United States Patent Application Publication US 2011/0183924 A1 - sequence listing, part 43

SEQ ID NO: 105820 - DNA, 507 bp, Homo sapiens
gtagacgacggggtttcgccattttgcccaggctggcctcgattctcccacctcagcctcccaaaatgctgggattataggggtgagccactgcacccgacctatatatacatttctaggtcctcattttctagaagtagttccaatctttttaccatcctagctctcaaatatttaaagattttatctactaagtaaacattcattttttcctgtatcctatttattagttatacaaatgcaaatagaggctcagaagcaccaggcaattaaagggttgcagcaaaacataaggaagaaatggggccaggcgcaatggctcatgcctgtaataccagcgctttgggaggccgaggcgggcagatcgcgaggtcaggagtttaagaccagcctggacaacatggtgaaaccccgtctctactaaaaacacaaaaagttagctggtcatggtggcacatgcctgtaattccagctactcgggaggctgaggcaggaaaatcgcttgaa

SEQ ID NO: 105821 - DNA, 256 bp, Homo sapiens
tgagatggagtttttaaatatattctggataataaccctttatcagatatatgagtttcaagtattttctcccatttcatggttgctgtttcactttattattagtgttctttgatgcacaaaagtttttattttgatgtcatgcaatttatctatttttaatgcaatacattttttaaaacaagaattaattcaaaaaccgtgatgaacaaaacatccaaattttaaatacagatagatcggtattactgatttt

SEQ ID NO: 105822 - DNA, 215 bp, Homo sapiens
tcatccctgcacatggctataactcccgaggaaggattgttcccagaggacgtcggtagcctgctgagaccctgcctagaggaggaaggggaggaaggcagtagattaatcaggttttacatattccgccttttatgatgctttgacaacttggggccttgctggtcctggaggggctgccccttcccaggccagctgattcctcgagacagcaa

SEQ ID NO: 105823 - DNA, 449 bp, Homo sapiens
cccatgtgttgtgggagggaatcagtgggagataattgaatcatgggggcggttacccccatacagttcttgtggtagtgaataagtctcatgagatctgttggttttataaggggtttctgctttcacttggctctcattctccctgcctgccgccatgtaagacctgccttccgccatgattgtgaggccttcccagccacctggaactgtgagtccattaaacctctttttctttataaattacccagtctcaggaatgtctttgttaccactgatttctattttttaaactggaaaatgcacatgacatcacttatttctccctatataaaaacccatgatgaggtacttagaggtaccagaaatcacagagacagaaagcagaatggtggttgtcagcagctggagggaggtggaaatggggagttctagtttaatgggtacat

SEQ ID NO: 105824 - DNA, 389 bp, Homo sapiens
gacctcccactgcaggaagctggttttggaggagggaaaccagcttttgctgggaaatcatcaagaggaagtaatacttagagaaaggaaagaagggtagcaggaaccagagctaagcctagcagaacgggggcaggatgaggctgcaggttgggggtgggggcagcccagagcctccacctccccacacagaaaagcttgatcagccctggcccagctccagacaccaagcctgggatcagcaatcctgggagagcccccaaacttgccaaaatttcccctgctcctggactctgctcttcctgtgataagacccattttccgggaagatgtgatcacaggacactctgcctgtgagtgtctgataggaggattccatctgagtcctc

SEQ ID NO: 105825 - DNA, 372 bp, Homo sapiens
aacagaccacccatagattacaccaaaaaatatacttgtatgatgtgacatatatattgagctttatatttatgtccatacaattggccctccgcatcctggggttccctactctcagtttcaaccaattgcagattgaaaataattgggggagaaaacaaaaaataataatgcagcaataaaaatgatacaaatttaaaaatatacaggataacaactatttacatagcatttacattgtattaggtattataagcaatctagagatgatttaaagtatacaggaggatttaaagtatacagtaggttatatgcaaatactatgccattttatattagggacatgagcatatttgaattttggtacccatg

SEQ ID NO: 105826 - DNA, 243 bp, Homo sapiens
aaaaagttcatcgtatggattgacactgggctgctccctggtggagtaccagctcaagatgttttgaggaaaaaatttgcatttaccaagtgggaggatttatagtggtgatttcacttgttcattgatttagacatatgaaatattatattttttgcacaactaagttggctttcagattatatgaccatatttttaactaaatgaagctttgctgaataaatacatgacttaatatattcc

SEQ ID NO: 105827 - DNA, 305 bp, Homo sapiens
aaaaaagactcaggaaaatggagagaccaggaaagtggcttaaaaatagaaatggagtcaaaatcagaagtagcacagtggagactagatactgatgagaatacagaaagaaacatagaagttagcaataagaaaagcaagcaaaattaacgaaagtaaatagaatttaaaacaattagagatagataaaatgtaaataagtagggaagacaggcaaaggaaatccaatatacagttattcaaaatctctatgtaatgaattagaaaaagtatttgaaatactgtggaagaaaatgttcattttg

SEQ ID NO: 105828 - DNA, 630 bp, Homo sapiens
tctggctgctgtccctgtcttcatagaatttaaaggaagtccttctgaaccacacaggcttccagattgggctggcttggcctcatcagctcattcagcttatgattctcttagaggagaaatgagttacctattttaggcattaggaacttcatgcttccacaaggagcagcagtgttgacagactaggctagaaagaggaaagggatagagccttagatacactcatgcattcctgccctggcttgctttcatggcaacacagaaagcaatattcaggttgcaaagcatgtacttgaatacagttagattagcagcattgaatggagaataagcttgccgctatctggctagggaactataggattaaactaatggtatgcaaactaatggttataaaactaatggtatgtaggggaattctccctctctcttcctctccaccacaaacacacacacacacacacacacacacccacccacacacacaccgaatcttaattatatgtttactgtgagggaaaaaaggctactcaatgaatgcttaattagcagtgatattcctcttctctgtgcggacaccaactgtgaaataagacccaagcatgtcctgtcaagccaagaagcttt

SEQ ID NO: 105829 - DNA, 338 bp, Homo sapiens
gcagtgcacaatcacgacccactgcagctttgaactcctgggctcaaaggatcaagggatcctccaagttcagcctcctaagtagatggaactacaggcatgcaccaccatgccctgctaatttttaaattttttatagagatagggtcttgctgtgttgcccaggatggtctcaaattcctggactcaaacagttctccagccttggcctcccaaagtgctaggattataggcatgataaatcattttttaaagcatctagatcaagcattgactagcaatatgaatgaaatataataatctcaagattaatcaataactttgcaaatttctatagt

SEQ ID NO: 105830 - DNA, 257 bp, Homo sapiens
ctagtaatttttatttctccttgaatattcaagagagaactaagcactacatgtaaatcgggaaacaaattggggtaaggaaagaaacacatgaaagaattagagggagcagtctaaattctcacagaacaggaaaaatagctgttcctcccagccacattagaaaaactgttagttcacagggtatagagtatctagaagagccttgttcggtaccaaggaatacttattcctatactatgcactgtttttggcta

SEQ ID NO: 105831 - DNA, 462 bp, Homo sapiens
aaaaacaaaaatgagtattttcaacttgtttctcttcctagcctccttttaaacaatgatttacttcatttgctcaatcattatgaataaaaatgatggcattttccgtgctgcaagaatttctttaaaattccgatttttggtgaaattgcattgtgtagaattttcttggtgtgcatgagggcagtttttgtatgcagaaaaggtttacgataatcttaaaaataaaattttatttcagaaacctggttcttgaggatttaagtccagtttttaaattttgtttacaggtctagctattttgagttataattgccagtaacttacgcattttccagcaatttaagctgtgtttaacacatgctttccttaatttgagtccaaagttctcttaggtgtttcagcatttagcaagatttcaactttttaaaagagcctaaattaattactgacatttacttt

SEQ ID NO: 105832 - DNA, 319 bp, Homo sapiens
tgcaacttctgcctccctggttcaagtgattctcatgcctcagcctcccaagtagctgggattataggcagccaccaccaggcccagctaatttttgtatttttggtagagacagggtttcaccatgttgaccaggctggtctcaaactcctgatctcagtgatccacctaccttggcctcccaaagtgctgggattacaggtgtgagccaccgtgcccagcctatttactcatatatttacaaaacaaaattaaacatctgaccctctcaagattgacaactactcagtacactgatttatggacttttaatcacaac

SEQ ID NO: 105833 - DNA, 451 bp, Homo sapiens
ccccaggtattacaagtggaggctggggactaccactgtcagttcattgtcaactatgtccgcctcatagacagggcacaagcctatccttagggacacacgtgaagaggggaggcaggaagattcaggcgcgctctccggcctagactggctgaaggagggagattttaatgcttggcataggtggtgaggggtccaccaaaggtaggaacacatccctggggctctgggaggaagaagcgtcaggactgcagctccagcctcttcaggcccagggtcctagggtggaacaaggctggaaaactggtgcatggaggaaagaaaaaaaatgggaagggagaatggacaggtaggaaggaaggaaaggaggaaagggaaatggaggaagaaagacatggaaagctgggaggacagagggcaaggcagaaggtaaaggaggcaaggccaaggc

SEQ ID NO: 105834 - DNA, 151 bp, Homo sapiens
catggtcatcgttttatacctgagtcgaaagtaccagatacggggacactggtacccacctgagctgcaagcccgcacctgcgtggatgagtacttggcgtggaagcatgtcaccatccagctgcctgccaccaatgtctacctgtgcaag

SEQ ID NO: 105835 - DNA, 305 bp, Homo sapiens
aggtgttcatcttccagttcgtcaacttctactcctcacccgtctacattgccttcttcaagggcaggtttgtgggatacccaggcaactaccacaccttgtttggagtccgcaatgaggaggtgagtgtgcctgaggcccgggactgggggatgagctgtgtgcttcctctcacttccattcttccattcgagctttgatttgcagcaattcctcccaccaccggctatttccatcgcccagccagggccagctgtgcagctgaccactcagggctcccagcctctcttcaccacttattctga

SEQ ID NO: 105836 - DNA, 396 bp, Homo sapiens
ttcttagttgcagaattgcacactgtggaaatgactttactggtaaaccctgggtagctgtacatctctctatgagaaagagttttataggaagagacatctatcgccaatgaattgccaaaagaatgatttttcctgaaaatagtagaatgtcttttctgtttgcctccacatttgtcatgtatctgtgaagtatgtatacagacacacatgcgcacacgcacatgctgcatgtatgttgaaaaacattaatttttaaaaatttaaaaaattttatagagatggggttttgctttgttgtgcaggctgttctgaaactcctggccttaagcagttctcctgagttggccttccaaagttctgggattacagatatgaactatcatgcccagccaa

SEQ ID NO: 105837 - DNA, 812 bp, Homo sapiens
atgattccatttatataagagttttgcaatggcaacattttaatgagggacaattttgtgtctgtaaagtgttaggcacaggcgtaggcagggagggaggctgctgtagttataaaagagcaacatgaggaatgcttgtggtgacgatactgttctatatcttgactgtggtgaggaatacatgaacctacagatgataaacttgtatagaattaaatacacacacatgcacacccacacacgcaagtcaaatgaaattcaaagatgttataaagttttaaatacagatgtgatgtgattggacttgtgttttttaaaaaaggatcactgagacttctgatctatacaagatggccagattagatattggacctgaacatttttctttgttcttcttccctaagtacaactatacatcccagacataatgtgagaggcaaccagcagaggactctgaaaggtgctaagaggaaggcagactggtttctggcatcaggaccagagaagcagcatggggcagggtatcttatgtttcccccagccagtaaaagaaggtgatcaggaccagcattttacaacctgtgacctagcaacagaaggtggttcaggaaagctccttcttttcatggagtccatccagtgtcaacagggaagcccagcaccattggcaaagggatcagtcgggaattcagttatggctagccatacatgggcagggtaaatgctcttcttcctgaccaggcctgggacttctccctctaccaagagatacaacacagggtcaccaggttgtaccagcaaaagggggccca

SEQ ID NO: 105838 - DNA, 1013 bp, Homo sapiens
ggagagagagagagggaaagactgccttctagaaatttggtgtgagccagacccccgctatcctagtgtcatttgcacaccagggctggaaggaggagcaggtgtgggtggggtggtcaagagctcgttccaggtggctctgagcatcccaggagaaagggggaggcagactcaggtactgggtcctggaactcggggaacggtctggacagacatgcgaggacttgtgtatcctgcagagggcttagcttttgcgctggaggctgtggagacagtgtcacaagtgggaatggcaggatctgatctgggatttaaaagcctccctctggcagccaaaagcctgttgtagacttgtctctgtaatctgggctatggggattgagggggaggtcggggaggtctaggagaaggcagaggtaggcttaagccatgggctgcagaggggcaccgctgtccgctgcctcgctggggagactgtgctactgtcggctgggatgagcctacaggagccctcagttcttgtgccaaggccaggaagtgctagactggacgagggttttggtttatacttgtcattcaggagccaatgccaaatcctacctaaaatccaaaccatcctacctaaaaaaccaaacaagaacaaatgatctagtgcttcctgacttttggtgacagagatccccacgtggcagctgcacagtcagtgtcaccagctgtgctcaagagctgggcaccttcagagttgtaaaaccagagccaacatgcccgggctccagcccaccaccttcttcccacagcgggtattgacacagtgagactgagcttggacacgggtgggatcgtgcagagttgccaggtagccagacccaccctgtgattcttcagctgcgccgcttgcccaaggcaccacgtgaggccaccagtttcactcagttcaggtctgcccagggtggtggccagactggagactcctcccacggcagaaaggcattcccacctggctggaaactgcc

SEQ ID NO: 105839 - DNA, 230 bp, Homo sapiens
tttgagtctcaaactggccttttcctttgcaaaacagaatgatccaaagtcacggtttctttaaagaactgtaagaatggagtctctagggaaaatgtggccggttagtggattacagccatagtggaggattcccttggtaatccaggttttcacttagaggaattagttaaaataagagatttgtgacatttggagctcactgttcagaataaatgtaaacagttatg

SEQ ID NO: 105840 - DNA, 91 bp, Homo sapiens
caagaacctagacaactgacggttgagaccttccacccagtaactctgtgcctcaaaggggcactgggaatgaagtccgaatatgctatgg

SEQ ID NO: 105841 - DNA, 485 bp, Homo sapiens
  misc_feature (394)..(394): n is a, c, g, or t
aaatcggaggtgctagggagacctcagctgatctgagaatcaacaaaaaatctactggcctgctaaattcaaaagatatgcattaaaatactgtcattaggcaaaataattcatggtttctatcatcaccctcacacacacagaacaatgaaaaccacaagctccactgatccatacatattacatgtcataaattgaaatagtgctgctgttcatgtgaattatgatgacgtctttgggccacatggtatccattcagcctccaacagtccatagactagaggtcagccatgtgggcagtcaaacatagagttccagtaaaatctctgggaaactaaagttctgaggagcctcctcggttgggcaatattctatggcatattgtcacacattngatgtcaggagggtaatgcatcctgaaaataatagaagcctcacatttgaaacacccacacccccacttcattgaactccaccctgtgcat

SEQ ID NO: 105842 - DNA, 364 bp, Homo sapiens
tgtgaggtaagcagtaagtggaattttgggaaccaagtcaagaggggaataatcaagcatcaaatgatgtcaacaggtctagataagaactgaaaacagacaatgcacctgatgacatggggttcactgagctttataagcagttccagtggagcggtaaagatgaaagtagattcaaaaataattcatgttatcttgcatggatggattcactcatctcccctctcttctccctcccaccaatgcctatccctgatcctatctcagcttagagtgaaactgtaaaatgacaatgtctcatgtaaagctctatgtagaacaagtcacttatgtctttcctgaacaagtatgaaatctttttaat

SEQ ID NO: 105843 - DNA, 665 bp, Homo sapiens
acactggtgaggctcttcctgtcacacgtgtcccagctatgtgcccatgtgctcctattacaaaaagataggaggccggacacggtggctcacgcctgtaatctcagcactttgggaggctgaggcgggaggatcacttgagcccaggagttcaagaccagcctgggaaacatagcaagaccccatctctacaaaaaaatacaaaaactagctgggtgtgacggcatgtgcctgtggtcccagctactcaggaggatgaggcagggtgattgcttgagcctggcagcttgaggctgtgcccttttgttgtagaactccagccagggtgggggacagagtgagaccctatcttgaaaagacaggaaacaatctaaatgccatcaatgggagatgacttagatgaatcaaaactcatcaattcaagagtgttctaggctgcccttccgcccccgcccccccacatgattctgcgtaggctcctttgcacgtttggccatttaaaattgctggcattctagtgtttttgacctttagagatggcagtttttataaggtccaagctcataatgaggaggtagatgtttgctttgtgctaatatgagaaaagacattaagcagaaaaaaagcaaaatgtgatacagtatgtactgattgagatctttttt

SEQ ID NO: 105844 - DNA, 316 bp, Homo sapiens
atagcacatacagttttctaggtattataacctaagactgttagatataaggtcatatactttaaaagtacaacgtaactctttttcccatccctgattcttttctgagtattctggagacagggaggggggggtcaaatgtgtacccagaaatacagtgacaggatggacctcatacctcatagccagtgctactcagccagccagtgagacatgcctcagtggctctcaaataccaatcttctcagctagcagatggaagagatcactctgcctgctcccttagtgataagggcaggaacccccccgcactgtt

SEQ ID NO: 105845 - DNA, 156 bp, Homo sapiens
ctcatgtttttaatttctcacctcaatctcatccaaagggcatgtataagttgaaatgtattgataaaagaacatcctgcataagtttctattactagtaactctagcaaatattatgaaaaaggacgttgaaaattattcagtaaagttacaaga

SEQ ID NO: 105846 - DNA, 702 bp, Homo sapiens
gattcacatttattatagttgtcatttattgagccctgcctaaataccagtccctgtcctagatgtcttatatatcttctctgtaactcctaccaccaccctgtaggaaggtattatccccattttaaaatgaaacagaggctgaggggaatcaaataacttgccagctgctacagaattagtcctgaagagcagagttctatacctaccttttcttagctctttacattgaccagaaagaaacaaaaatgaatggcctgatgctgaaaagagcaaatcagggttctatttctccagtgtaatggacagtagtttgttaattgaagtgagttcctatgccttaaataaaaatatgtaatataaaaataggtactgaattcccacaaaatgaatgggaataaaagtggagcttaaccaagagtatgttattgatagattccggtgacttttcaagagttttcaattcaggcataagtaattggctgggcatatggtggctcacacctgtaattccagaactttgggaggccgaggtgggaggattgcttgagcccgggagttcaagaccagctttgccaacatagtgagaccccgtctctacaataaaaatttttaaagagaaaacagataattttaattgccaatacagtgtaaactggaccctgattaataaatatgctaattggcctccctggatggagc

SEQ ID NO: 105847 - DNA, 481 bp, Homo sapiens
tcggcctcccaaagtgttgggattacaggtatgagccaccgtacctggccaatagggtttctttttgcacatacaaatacaaacgggttcttctgtcttgtatgcaattgtagtatctgacacatactgttcacttctttggaagtttggaataatggttcttgtttgaaattacatgtaccaggttgttacttgtagggtcaaataaagtagtcaataggaaaagactgaaaaaagatagaggaagccacacatattcagaaggaagaggaagacaatggcgttgccttttgtttgggaaccaaatgatcacttagccagtggcagagctgggactagaatcctgatgttttgactcccaacctagtgtattgttctttgtggtttacttcactaaacactgattgagtaaatgctacatgccaggtgctgtacctcagatttgaatatgacaccacaggccggatgtggtagttcaccc

SEQ ID NO: 105848 - DNA, 390 bp, Homo sapiens
tcagaatttgattggccaagactctggatttccagggaggttgtggagagataagatgaaatagtatgtgaaagaactttgaacaatgctttgcataaaggagatattcaatgaacattaaattgaaagaaaaagggaaggaacgaaagaaaaaaaagaaagggaagaaggagcttttcccttctctctacctctctgctgtgccccagtagggagagacattgagggttttaggagatctggtgggcatttttcctgggctgttcctaccaatagacttgctgctggtttcatgttagttaggtggcacaccaagaggggactcagaaagaacagaagatcagaacttgctggtgtcagacagaaaagacatgagcttgagccacattt

SEQ ID NO: 105849 - DNA, 262 bp, Homo sapiens
ctaaagtcttcctgcccattacaactttggtagggacatcagtatagcacacacagcaacatacactgtccacaaacaagacaagtgttttatcctacagaaacagacattacccaggataaggaaagtgtgacactctcatctgcctgttgataacacaatgccacaaccaggtttgccaaatatccaacaaatccattaaacaaagctagaaaaagaggaaacccacaaaagagcatccaagaactccagcacgccctaa

SEQ ID NO: 105850 - DNA, 773 bp, Homo sapiens
gaatgactgtaagcatgaatgagtaactttaagaactcagagtaatttgggatagacctctccctctgtggggtgatttcaacttctcgaaatatctggaagccttcttaggtaatttgtcatcctgcacccatctcctttccaatgtcccttatctcctggcattggactaatacactggagagttcattttcactttctccacaaacgggtggtattctttccctttgtccacaaacacaccaacacatagcatcaaactacctacttctaaacgttgagtgcaagttttatgattttacaatctttttaatactaacaaatattttttgaataccgatcatgtgtcagagactgtattaggtcttggaaatacagtgataaataagaaatgatttttgtctttaatggtttagaaagatgatttcaaatgtcttcactgcttatctaaggcagcaggttcaaccatgggtaggaggagccggaagcatagggaaacctcacaatattttcagtcatatttctttgttttggggaagcacaggactcttcattaccttccatctactttattatgtctttgttgttttttttttttttatcatcttgcttctgcatagaggccctttatatttccttttcatctctcaaattccagaccaaatattataccacttgactagttttccctgacatgttcagttttatagtggtctccttattatacacctgttatacctcttagcatattgccttatagttatactagcaat

SEQ ID NO: 105851 - DNA, 352 bp, Homo sapiens
  misc_feature (36)..(36): n is a, c, g, or t
gcggccctactactactactactactactaaattcncggccggtcgacaaaaaacaaatggaagttcacataaaaagcaaagcaaagggcccccaactcttcaactttatgcagaacagagaaattaaattaaagctacacagagatgccacttaacacttaacagattggtaaaaattctaagctttagcaatctggtctgcgaacaaagctgtgaagaaacagatattctcatatattgctcatgggagtctaaaatggcacagcccgtatggagaaaaatttagcaaaacctaacaaaaaaaatacatatttatcctttagtcgacgcaatctcacttctaggaataca

SEQ ID NO: 105852 - DNA, 475 bp, Homo sapiens
atgggcaccaggaactccaagagggattaactgtttataaactgtaactacaacttgcacactgaattttagccaactctcttacaagtagatgctgttggagcacccatttgtataagcggtagccctttctcactaactcatctccccatcttctctgcaagcatctgaagcatatttcactatatttcctgcgttttttcctctataacacctaggaggtcttaataaaaatatccaatccagtccagttatagaaaacaaagcaaaaacatcagataggttcttcatttactatataaagccacttttattctagatagttatagaatgtaaaggctaagagaaaacattagaagggtaagcttatgaaggttttcttcatgtaagaccaagattctatcattatgtccattttgttagaaaataagccttcaggccggacgccgtggctcacgcctgtaatcccagcact

SEQ ID NO: 105853 - DNA, 372 bp, Homo sapiens
ggatacaatatttgaccagctcaagaaccttcagtgcttgactgaaatttctaagactgatatttcttactgaaatgttcctttgggttttaaactgaggtttctattgtttgctttcaacagacatatgtttgacatacaaaatatggtaaagatccactacttctgcagtgttatatttccatattattcccttattggcctggatttcctcatcaatagcacaattcattcaaatgtggaaagaaaggcattgatacactgatcagagtaaggaaagtaatatcatatcatcaaaagtcacattaatctaaatgacaaatttattttctgttggtttccaaatctgggatgttttctagaagttgcaca

SEQ ID NO: 105854 - DNA, 414 bp, Homo sapiens
atccttccttttacagctgtctcatctccttgaaattatacatggccatggactgctttggccaatgaaatttaagtgaagtgatgtgaatcacttccaggcagaagcatttaagagctgatttatgattcaagctctgtttccttgccacagtggccgctggagacttgtgtttagatggcagtgtcataggatggtggatcttctgtcatcttgagtctttgaaggctacaatgcgtaggatcttttgtgacctgtgctggacaaataaagtagtataaataagaaacaaactttttttgatataccattgagatttgggggttctttgttgctacagcacaaactagactaacttgattgatactttataaaactctgcttttatgtaagccccttttatagctggatacc

SEQ ID NO: 105855 - DNA, 462 bp, Homo sapiens
ctcggctcactgcaacctctgcctcccaggttcaaatgattctcgtgtcttggcctcccaaatagctgggattacaggcgcccaccaccacgcccagctaatttttgtatttttagtagaaacagggtttcaccatattggccaggctggtctcgaactcctggcctcaagtgatctgcccacctcagcctccgaaagtgttgggattacaggcatgagccactgcaccaagccaagaattagaagatacttctaaaagatattttaaaagaaccaatggaaacttagagatgataaaacccaagcaggataaacaaagaaaaccacccaaggcacatcttaaattgcagaaaactagtgacaaatcttagaagcagtcagattaaacaaggcgtatgacatacaggcacaaagaagccaaggatttcttgtcccctcctccccctccacccaaaaaaaaaa

SEQ ID NO: 105856 - DNA, 328 bp, Homo sapiens
ttacacagcgaagttccattaatgccccccaaaggaattccaacttgatacaaatgtaatgaggaaagcccagctaacatgactatgtgctttggaaagttaaatctagagacaataggaagaagatatggagcaggtaaccaatcaggaggcctttcactgagggaacagtttctgctatgaaagcagtaggccggttttataatttgtgggtcattttgaatattgtcacggttatttattatgtaactttaatatgcattttaagagtttctgcaataattcacatgattttttatgttaaaataatgataaaagttttttcaaa

SEQ ID NO: 105857 - DNA, 478 bp, Homo sapiens
aacttaattagacatagggtatatataaactcaattttatctgcattttttaaaaaattgaaataatctgattgcatgtatgaaggactcctgcctcattacccaattacataaatacaattatctataggaaggtgaaattgttgatctattatttcaaagacttgtagactagcaaagattcattctgattagaaataaggtctatagctaaagatatttttattttaaaaaattacagcccttgtaacaaaaatcatttgtaacattggatatgaagacattattagtatttaaaattattgtagtcatttgatcataaatgaagtagcttgcaaaatagacttggtctttgaccctttaaggtgtaactgactgactgttgtgtttttcaagactgattttaggcagttttatgtatcgtgtaccaatgatatgtaaaataaagcaccttttctactataaaaaaaaaaaggtg

SEQ ID NO: 105858 - DNA, 325 bp, Homo sapiens
atggccactccatggactttgtgaaccacagtatcctatgtgacaattacatcccctttgtgaggaccagaaaaacaggctgaagaaatgcaatgctaggtggtgaggcagagaaaacagatgtggctcactgaggcaaccagctgagcctggttctatcacagctgctgcaacagcacagttgtggagtgatcctggttctcacatgcacgtctcagatttcctagattttctagttctctgtctgcaaaatgggaggggctgcccaagtgcttacccgatcgagaatacagggctttacaattcactctgcaagtcttcacca

SEQ ID NO: 105859 - DNA, 857 bp, Homo sapiens
acttgcacagctgttctgagatttcctgcagttgtccagaagaaaagaaaaatgttttatttaaagatatgtattatgtttagtacaacagagtggaaaacccatttttcataaaagacaagctattcattccaaacagataaaatgttaagcttcttgcactttacaaacaatggtccctctgctgccaatgatcttcctctgactcttcacctaaatcgtacacatccttcaggtcttacttgggacaatcctccatgcacaagccttccttgattctccccaaatatgggttaagggttaacatatttccattacaccctaaagacctctatcatcactcttaactctataattgagagttaacttgtttctcccatcaggacataaactctgggtatgaaggagaaaacactaaatatttacattttagctcctagcagagacagagaaatacataagtctgttttgaatgaccaattgctttgaataacagcaagaagggggagaagttgaaaataggatgtcctaccttgcaaacaagctacaaaaagaatcctccaaaaaagtggaaagtgataccagttaaaaaagaaaggctgggcacagtggctcacacctaaaatcctagcactttgggaggctgagccaggaggatcacttgaggccaggattttgagaccaccctgagcaacacagttaagactctgtctctattaaaaaaaaaaaaaaaaaaaaaaaggaaagaggtttaattgactcacagttcaacatggctggcaggcctcaggaaagttaaaataatgacagaaggggaagcacacgtcgtccttcacatagtggcagacaccgtcgaa

SEQ ID NO: 105860 - DNA, 228 bp, Homo sapiens
ctcaggagggctaccttttccttcctggagagaagatggaagagatcgcagtgtgtttgcatgtttcttcagtaaaacagacatcctggaggtgaacttttgagtctgagcaacataagcttgttctgacctgacagatgcttgcctttactctgtggaaagaagtgtgttagccagtgtcggattccagccggtaattccatacccctctcccacctcatgcaccag

SEQ ID NO: 105861 - DNA, 262 bp, Homo sapiens
taaaaacatcccctgtcttcagcaggggtccagggacctagacaggtgggggaccacccgttgttacggagtgactgggagggccacccgaggagagccaagcaggggaccacccctcccggcatgggcagacctagcagggcagccccgggacttggggcgtgagatccgacttcctgaggctccactcctggcggggggcaggccaggccaccgtggctctccaaggaaggcgcactgcctagctgcgtggagcgtggtt

SEQ ID NO: 105862 - DNA, 228 bp, Homo sapiens
taattgaaagcattttttaaaatgaagacggtcctattttggaaatgcagaaaggcgagatgaaagccaaactctggtgagtatagcagaactaattaaacttcagagatctaaaacaatcaggattaatgttaccaataaaacaaaacaaggtgacggggcaggaagaccgatgctgagtagaaaaagtattctgtacatacattctaaatgttaagcagtcggcct

SEQ ID NO: 105863 - DNA, 361 bp, Homo sapiens
cagtgctgatcttgctaattcaaacttaaatcttttccttgttataatattccagacttcctttaattccagcagtttattttgtttgaaagattatacctatgtcaaatttaggactgacacacgaggtagtcatgatgtatgtgtgtgtatatactttttttttaagagacatggtctcacgctgtcacccaggctggagtgcagtggtatgatcacagctcactgaagcctcaaactcctgggattaaatgatcctccccacccaggctcccaaatagctgagactacagacatgttccaccgtgcccagctaattttattttttagagagacagggtctcactatgttgcccaggct

SEQ ID NO: 105864 - DNA, 93 bp, Homo sapiens
gatgctgcgcagtgcacaggagggaagttaattcattatagacaatggatgcctcagggcctaagggctcagttcggtggagaaacccatttg

SEQ ID NO: 105865 - DNA, 131 bp, Homo sapiens
aaaaaaaaagaagcaattcctcatctgttcaggttttattatgagattgcaacaattctgtcacatcttcaaactccatttctaattgtagttcactttccaccacatctgtggtgactttattcaatgaa

SEQ ID NO: 105866 - DNA, 388 bp, Homo sapiens
tcttggttgagtagatttataccttggaagctctggttaagatagaataaattatgatataacattccttctccattcggtggtggtggtggtagaggtagctactccatgtacatacatttctacagtgggtttcaggctgagctctgggaaaggatgtcatattttaccaccttatatatttgatctgtgtatctcatacatagattttggctcttaaagagaatctgaattagaggcacttcaggaagcattcacatatctagaatagatgacttggctatcaaccccttgccggctgtagctccccatttgttgtagtctgtatgtgctatacccaacctagagcagggcgccatgcctggctaattttttttttttacttttt

SEQ ID NO: 105867 - DNA, 352 bp, Homo sapiens
tcttggttgagtagatttataccttggaagctctggttaagatagaataaattatgatataacattccttctccattcggtggtggtggtggtagaggtagctactccatgtacatacatttctacagtgggtttcaggctgagctctgggaaaggatgtcatattttaccaccttatatatttgatctgtgtatctcatacatagattttggctcttaaagagaatctgaattagaggcacttcaggaggcttaggcaggagaatcacttgaacccgggaggcagaggttccagtcacctgagacatccaactcactccagcttgggtccaaaattaagcttttcttaaaa

SEQ ID NO: 105868 - DNA, 211 bp, Homo sapiens
cccaacactttgggaggccgaggcaggaggatcaagtgagcccaggagttcaaggccagcctgggcaacatggtgagatcctgtctccatttaaaacaaacaaacaaacaaaaacttgaataaaagaaatcactcataactcccactgtcagagatactgctgtgtgtgtacatatgttcattcatgtgttttaaagcagtagtcacagga

SEQ ID NO: 105869 - DNA, 685 bp, Homo sapiens
tcctgaaccatccaggccaaataagcgccggctatgcccctgtattggattgccacacggctcacattgcatgcaagtttgctgagctgaaggaaaagattgatcgccgttctggtaaaaagctggaagatggccctaaattcttgaagtctggtgatgctgccattgttgatatggttcctggcaagcccatgtgtgttgagagcttctcagactatccacctttgggtcgctttgctgttcgtgatatgagacagacagttgcggtgggtgtcatcaaagcagtggacaagaaggctgctggagctggcaaggtcaccaagtctgcccagaaagctcagaaggctaaatgaatattatccctaatacctgccaccccactcttaatcagtggtggaagaacggtctcagaactgtttgtttcaattggccatttaagtttagtagtaaaagactggttaatgataacaatgcatcgtaaaactttcagaaggaaaggagaatgttttgtggaccactttggttttcttttttgcatgtggcagttttaagttattagtttttaggatcagtactttttaatggaaaaaacttgaccaaaaatttgtcacagaattttgagacccattaaaaaagtttaatgagaaaaaaagaaaaaagaatatcagcagacacagatctgtgg

SEQ ID NO: 105870 - DNA, 277 bp, Homo sapiens
gttggggatggcataagctatgattgcctcactgcactccagcctggacaacatagcaagcccccgtctcttaaaaaagaagaagaaaggaaaagtgaagcaaagtgagaatgacaggagtatgtggaccaacgtaaaaataaatgtaggagaaagactggccaggcgcggtcgctcacgcttgtaatcccagccctttgggaggccgaggcaggcagatcacaaggtcaagaaatagagaccctcctggctaacacggtgaaacccggtctctact

SEQ ID NO: 105871 - DNA, 476 bp, Homo sapiens
acaggcgagaagcagccgcgtccacatggcttcaggtgttcacatggcagtaaacgggcccctgctctcctgggcgccccagcgcggcgccctcccgcccacatcccggcccagccccgctggcctcgcctccagcccgtagccaagaggcgagcgcggccggtgcccccggggctgccaggggccccgaagcaggcggcgctgactcccggacgccgcccgctcacacccgccgcctttgcacccaaggcctcgcgcgaccagcagatggggccactgaggtgcaaagagtttaacttatcccaagtcacacagtttggaagaggctgagctggtatttgaacccaggttttcagaggctgcactcttaaccaccaagcttcccagcactcagcaaacactggaaagacagagatggacctagacagtcagtaggaccaaaagtctgcaggccgatagggaaagaatgtaagagg

SEQ ID NO: 105872 - DNA, 321 bp, Homo sapiens
ttgtccacctgttctacctcaagatgatgttgatatttcagactcaacattttgaaggctgaagtcatttactcttctccacaaggtatggcttccaatgtcttactttcttactactattctctaccctcctaggtctaaactttcagtcagtgttggattcattttgctcacttacctccccgtccagtcaggccccatttgcagcccttctgcgagccttctttcactgcttgccagtcctttcccatcaccactgcccccagtcactgccattttctttttaactttcttgccaggaatgttctaacagtacccaag

SEQ ID NO: 105873 - DNA, 375 bp, Homo sapiens
gttggacacaaaatatacacgaagaacatggaatatcttgttatatgagaggcaaggaaatatcaaatactattggggtcatctcaaaatgactcacaagggccagcttgaaaaccttcctacttaccacttcgcacctgttagagcagctattatcaacaagatgaaagataataatgttggtgaggatatagaagaaagggaacccttaaattgctggtgaaagtataaaatagcactgctgctatggaaaacactatgaagtttccccccaaaatttaaaatagaactatcatatgacccagtaatcccattaatgggtatatatccaaaggaattgaagtgagtgtgtcagagatatttgaaaagagaata

SEQ ID NO: 105874 - DNA, 235 bp, Homo sapiens
tatttacagtcaattgatttttgacaaagggtccaagaacacacaatggagagaggacagtctcttcaaatagtgttgggaaaactggatgtccacctgcagaagaaagaaactgtactcttatctcacactccatataaaaatcaactcaaaagagatataaaggcttaaacataagacctgaaactgtaaagctactagaagaaaatataagggaaaatctccacaacaatgg

SEQ ID NO: 105875 - DNA, 807 bp, Homo sapiens
ctgagatcccgccactgcactccagcctgggcgacagggcaagactctgtctcaaaaaaaaaaaaaaaaaaaagatcagaggctccactgatgttacttgggaagaacatattagatgtaggaactgatgtataatctacagtgccaacttaatgggcattggtaatgattttatgcttctgctggtcatgtattttaaaggtggaaacccctttttagtacgattaattacattttcagttaattattttgtttccagtgataagaatcctcttggtttcttagtattggccaaagtgcccggtttgtagtagttgcataatatgtttgtcaaactgaattgaagttaaaatctcaccagtgagctgtctcaaaagtcatattctcagattgattactgaagaattcttggataagtcccctctgctctgcagaatttgtttccttcatcagcgatgctagtgtgtacattcggactatatagaaacttcgtgggggtacttcttatttggacacctttgtcagcagttacaaaatgcaaatggactttgccttcctggattcagaaagctggtggagcggacagaactaatttcatggtttattcttcacacatttgacttttgacttcagatcgtaggttttcatttttcagcttcagctattttgttatggggaaataagatgtttaggccaggcacggtggctcactcctgtaatcccaacactttgggaggctgaggcagatggattgcctgagtttaggagttcaagaccagctggtcgacatggggaaaccctgtctct

SEQ ID NO: 105876 - DNA, 441 bp, Homo sapiens
ggcagaatgatgggcctgtagcgcaggccgggatggctccagcatcccacggtatcctggcacttccaactgaggggtagtcacagcaccctgcatcgtccaggaagtctttaaggcagagaatcttcctctgaagcactctgggctctctcctcaattcccgctcaggccatcagcaagtcctgccaaatctatatcctcacccctccagcctttgtttctccctctgtcttcatctttctgctgtagtccaggccactgctactcttgcttgagctgtggcagcacacttgccacagtctcctctgcccgctccagccgctttccagccacagaggcacctttccaaaacagatatgaatgtgcttctccctcacttaaaacccttcatgttccctccaggttgtgtgtcacttaaggtacactgagctccaggcctgt

SEQ ID NO: 105877 - DNA, 743 bp, Homo sapiens
gcctgcagtggcctaaagacactagcctggttagcgatgacctgcatttctctcatagagcacctcccttttcatcgtatccactagctctctaagtcctccttaatgaggacacttgatcctcattaagtctgccccttaagatggcttcacacctactgaaaaactccaggggtttgacatctcactttgattgaaatcttgtcttcctataacatttgattccctgggctcttcagccctatcacctctgcttgtctttatccactctcttcttcattcacttttggctacacaggccttccttccatctcttgactcttgaccacctcagagcctttgtatccgttccctttgcctggagagtttttcccttgcatcttttacttgtcactcagatctccactagttgtcgcctcctcctggagctcttcccagactatctaaagtagggcttttcttcccctcccctctatcttgcccccttactgaaatctgcttccctgtttcttcttcttttttttttttttttgagatggagtctcactctgtcgcccaggctggagtgcaatggcgctgtctcagctcattgcaacctccacctcccgggttcaagcgactttcccgcctcaccctcccaagtagctgggactacaggtgcacgccaccattcttggctaaattttgtatttttagtagagatggggtttcaccatgttgactaggctggtcttgaactcctg

SEQ ID NO: 105878 - DNA, 315 bp, Homo sapiens
taaacctttccattttatcttttaaaaccctccccagtaatatatgatctgtattagttacttattgctgcataagagaccacctcaaaacttagtggtttaacaaaagaaccattttgtttgctcagcctggcctgggctgagctgggtgatttttcttctaatctcacttaggactattcatgaggcttcagtcgtctagtggcttgattggaactggatggtctcaagtgacctcatggctagtattggtgccagctgttggctaggcctccttgtccgcaagatctttcattctcaagggagctaccccag

SEQ ID NO: 105879 - DNA, 435 bp, Homo sapiens
tgttttctaaaaaacattgacattcttattcagtaaagataaatgcaattattgctttttccaatagcaatacagttgtaataactggtagctgtttctgccttgcccccttacagtctattcttgatgcgtcaaccagagtgatccattcaaagtgcaagtcagaacatgtacactcctctgctcaagaccttccaagatttccccattcagagttaacgttgaagtccttacaatagcctgagtgttgggcatgttctccacctctgtgcttctttacatctgaccccagccattgctctcccctggctaattcttcctcagctgcaccagtccccttgctgtttctagaacaagctggacatgttcttgccttaacgcctttgtagtcgctcctccctcaatgtgggatgctattcctctagagcatctgtg

SEQ ID NO: 105880 - DNA, 627 bp, Homo sapiens
caccaagtaatcggtagagtgttttgaagattgttgatcaggcaacagtcttcaaaacacaggatgtgcggagggaacacatctcaggacatccatcgtagtcaagggaatatttcctaaggagaagggatatttaagtggagacccacagcatatggagagttagccagataaagagagagcagacaaaaatgtttcaaaccaaggaggcctccttggaggtagtgaagaatttccatgtgatcatatgactgtagactgggaagaaggagaaagatgagaactagaccagagataagtagcaagtagcttcctgtggtatgtcctaggggtgttttgttggggttgacagataaacactaccagacacaatgggaggaagtagatttttaaatgggaagctggtgaaaggatcattcagatggagtgataatattactggctcccagacacctatacagtctgctggtttcctggaagtaataccacccacagaatgaggatggaatctgttgtgcagagctctctttgccattcttatgggaccttctccacctgcctgccccttcaacaggtgtaagtaagagaggcaagaccgccctaatgtgccagctatttctcatgaga

SEQ ID NO: 105881 - DNA, 188 bp, Homo sapiens
tttaagtgaatgttagctttatgttcttataggttaggagatgttagtcaaagaggatgaataacatgagaattttttaagagaaaatgaaagtgatttctaaaattctcttttgcagcatctgtactcttgagctgtttttaaggcagtaaagcaatctagattaaatcagttgtcctttttttagg

SEQ ID NO: 105882 - DNA, 638 bp, Homo sapiens
gtttatgtcattaaatgcttatatttgaaaaaggaaaatcagtgacttaagtttccaccttcagaagctagcaaataatagcaaattaaatccaaagtaaatgaaaggaaggaaataataaggatcaggtgcaaatcaaggaaatttgaaaaggagaaacaatagtgaaaacatgaataaactcaaaagctgtttctttgaaaaacatcaataaaattgacaaaattttagccagactgatgaagaaaaaagaagatacaaattaccaatatcaagtacaaaagaggaaacatctctgcatatgtcacggatcttgaaaggataagggaatattgtgaacaactttatgccatcaagtttgataacattaaatggagaaattccttgtagagaaggagtggaacagactcaagaagaaatagaaaaattgtagcccactatgaggacaagaaattgaattagtgtttgaaattcttcctaccaagaagcgctcaggcccagatgatctcactgatgagttttatcaaacatgtagcgaagaaatactgcctgttctacacagtgttgttcagttagcaaagaagtaacacttgtcagctcattttatgaggctagtattgcccagataccaaagtcaa

SEQ ID NO: 105883 - DNA, 675 bp, Homo sapiens
gtggattcggatactttttggctttaggggattttgtaaaaacataattatttgttacatatacagaataccaccctggagccaaaaaagtatccgaatccacaacaaaaaacgatccagtgaaaaatattcacattgaaagctcacacaatatagacctaaacaaaattgcaatgaattctaatttacaagtggttgtgaagcgtttggaagatacaataagtatagccaaaaaatcctggaataatcagccattatcagaaggatataaagcatccaagaaattgatagaaattgatggtaaagaccaacatgctgacagaaatatgactcttactctaaatagaatgacatgcaaagaacagagcttatcaaaatctgtggtagcatccggcaatattatcaatagtcactgcatgcctacagtggatttgaataacaaaagacttgaaaatctgaaaaagtcatctattttagatatgggtcgcttgatttccagtgttgaaaatgtaccagcaaaatatgaaggtactgaaagttcatctgtttccaactattctagtcctatcaaactcatgtttttatctgaggttaaaagtagtgaaggggtcaaatatactttaacttcagttggcacttcccattcaaatgttgttctcccttctgaaaaaccta

SEQ ID NO: 105884 - DNA, 366 bp, Homo sapiens
gagaaccagcaatctaggagaggctgagttccagtgaggtggtggaggaccaaagcccaccaaaccagacgtggcttctgccccagagggtgtgcacacgagtagcagatccaaccagcacaggaagccgttctatctggctacccaggtggcaggacaagtccatccctggagaggcaagaaagcagacagctacggcttaggtctagagaaagatccccgcagtgggcctttctctctggcttccccaggaaggcagcagacaatgccagggttgacttctgagtcctctgtgctgatgggcctgatccccatggaccgtgaatccttcttctcctcttcctgctctgcttcttactaagtttg

SEQ ID NO: 105885 - DNA, 440 bp, Homo sapiens
agattgcgccactgctctccagcctgagcaacagagtgagactctgtctcaacaaaaaaaaattattacggatctcaagacagcagcagcagcaaagcgttaaaccaggtgtggggtccctcggagaacaggcccttgtgcttctctgggtcaaacgtccatgaagctggccctgagtggcctttcctgtttctcatgaccacagctttggatggcacccaaaacggctcccaaagggcgctcaagacgtgcctggaactgtcatgacaaccccaccaggctggaactggtatgatccccattttaccatgagaaagctgaggcttggggagataagtctcttgcccggggccacacatcaagaagtactgaactgggaaatgaaccccggctgcctggggcagagtttgtgctcctgggtcaggctcttaccataaacc

SEQ ID NO: 105886 - DNA, 668 bp, Homo sapiens
cattttggtcacaaccacttaactagtctctaagttccaaactttccctcatctttctgtcttctgagccctccagattcttccaacctctgcctgttacccagttccaaagctgtttctacattttccaatatgtatagcagtgccccactgtcagtactaatctgttttaatctgtttgcattactgtaaaggaatatctgagattgggtaattcttgcaaaagagagatttaattggcttacagtttctgcaggctgtacacaaagcatggcaccagcagctgcttctgatgagggcctcaggaagcttacaatcatggtagaaggcaaaatgggagcgagcatatcacatggtgagagagggagcaagagagaggaggaggtcccagactctaaacaaccaaatttcacatgaactaagatctcactcatcaccaaggtgatggtgccaagccattcatgaaggatttgccccatgattctatacctcccacgaggccctacctccagcattgggggttacatttcaacatgagatttggaagtgacagccatccaaaccatatcagcaacataacaagacccccaactcttaaaaaaaaaagttgaatatatatccaaaaatatcttgaattccatatggaaagcctcccccctcaaatttgt

SEQ ID NO: 105887 - DNA, 379 bp, Homo sapiens
cccttctctgtctgtatatatgaatgtgtatatacttaacatacatatgtgtacacacatgtgtcaagtggggtcattcttaccttgggggtggggcagaggtaccctcagatcttctgggagcatgtatgtttgaaagagtatatttaatatcattttatgtttgaaaaatgaaaactaaaaaccacttttataatacaaactacagaaaacaaaattcacatatcctgttgatggaataaatgattgaaaaccattattttattttaaaggatccaagtgtatcctgtaatatcagagtgggaagggtactttgagattagattattcagtgtggttcttcaagtttttatagttttttactatttatagtttttta

SEQ ID NO: 105888 - DNA, 317 bp, Homo sapiens
ctccatcctattcgaaaaaagaaaaggggtctctgtagagaaactattaaaaaagtttaaacagcctttacagaaacgtggtttggtggcaaagaaagggaaaccaccaccccttccaaagctcaccaggagaaaagtgagaaataaaatatcaaaatgaaattgactccacacaaagatatctgatcaccagacaaaacaagtaccaaagtgcagaaaaatattacaataaataacatcagattctttattcaagccaggcaaaacttatgtagtttttcctaaccaggttaattattttcctcatcttcttttcc

SEQ ID NO: 105889 - DNA, 139 bp, Homo sapiens
tttcacagttaagggctttttatcttctttaaggcaaatgatctacacaaaatttatttttttcatgagtgcaagaaaccagtcaaagaattctaagcagagtacgttctttttttttctcgagacggagtttcggtct

SEQ ID NO: 105890 - DNA, 407 bp, Homo sapiens
gggagaataagaactctttagcctgaagggaaaaaagagtcaagagacagtctctggtttccaaattcatgaagacctaggttcaactgggattagcgccttagagcagtagtaacatcaagttacactaaagtatgactcacatgtataatcaagaattttctaacaaaccaatccaactctgttccagaaaatattctatcctactgtttgagatttttaaaactgatttctatactagatgaacaattaaatggaatacatatatttctcagaaccaaagaagtttaagctataaaaactacttttttaactcccaatgtgatgttattggaaatggggcctttgggagataattaggtcatgaaggtggagccttcatgaatgggattagtggcctaataaaa

SEQ ID NO: 105891 - DNA, 659 bp, Homo sapiens
gtttacacatatacacacaatatataatagtgcctagcacagtgcaagttctgcataaatgtgtgctgtcatttttcttttttaattttatttttaatgttttgtagagacgtggtcttgctttgttgcctaggctggtcttgaatttctggcttcaaaggattctactgtcagggcctctcaaagtgctgggattataggtgtgagccactacacccggcctgtgctgtcatttttcttacctcacctccggcctggtctgagttctggcttcctgatgggcagtgttctcagtgattgataataaggggccagcagaatgacgttggggtgagaggtgtgtgcctgtgaagcgtgaaccatcatgggctagcttccctgttgatcagctctctggatccctgggtttcaggtacccctgggggattgtgggggcaagtcacattatgttctccctgccccagtgattggaggagcaagtcacatatgccgcttccaaaccagccctggtgcttgtgaggatgagaaaacagtggacgcacagatgcttctggcctgtgcctggcctgaagttgccccatcactgtccattttcttctctcctagtgacttctcattttctaggaatctggaacaggtgctttctccagccactttgg

SEQ ID NO: 105892 - DNA, 548 bp, Homo sapiens
ttcagtgtctactcgttcacttcatcttaaggccgtgtgtcccccggactctgtgtgttgccatccttttccacctgttccttctctaattcatatcacgactgtacaatttctggttttctttcaatgtgtgcacagaaggaagctcaacaactttgttgagccaggaagaaattattatcaacatttataatcaggccaaatttcagctgagtagtgactttaaaagaattagttttaatctcaaaataaaaaaaaaaaaagagggcaggcgaggtggctcacacctgtaatccagcactttgggaggctgaggcgggcggatcacgaagtttaggagatcgagaccatgctggctaacatggtgaaaccccgtctctactaaaaacacaaaaaattcgccgagtgtggtaataagcacctgtaatcccaggtactggggaggctgaggcaggatgattgcttgaacccaggaggcggagattgcagtgagccgagatcgcaccactgcactccagcctaggcgacagagcgagactccgtctcaa

SEQ ID NO: 105893 - DNA, 545 bp, Homo sapiens
ggacacacgtggcatatggctaccatattggacagtgtggctctgaagagtgattattttatgacccacctctgttctccctgggcctctcttggttctctcactgtccaagtgtgaatgcctccagagtttggtcctcggtcctccatcatctgcccccacattccattctcctctttgaagatctaattcacaaccacaacaggagctcaccgtggaaaggacattaccccagtgcctcatacccattttcacctggatgctcatggtatttcaaattcggcttatcccaaagcaaatccatctgtgtcaagctggcttctccactttcatccatgcatctttcattttcctgacttctaatgctcccgctaatgttataaagcagttaacaaggcaatcaggctacataagcagaaatctgtgaatactaagacccgcgagctgagggtattatggaaattgaatggcacttgtaagaaagccgaacatgtataatgacgtacataattcttataggcagcaaggtgactaggcatgtctag

SEQ ID NO: 105894 - DNA, 1517 bp, Homo sapiens
atttgatccaagttggagtcagacacagtatttgagctgcacggcttctgggttctcccaccttatttgatcatattcgaaagattatttcctgtgtttgctttgatttgttcctcagtacattaaaatgatccacaccttgaacactgccctctctagaaggttgattttgatcagccttttgaagatgggtgtcgtttccctaacttatctcacagaattttgagtgttgtatttggcaagttctgagatttgccttctgtcttatgccaaacacccctttctaagagctgtccccgcttagttttagaagtactaggggttttcatacttattttatagaacacccatttatatttatttctgtatatagaactaaaaaaaacagtagtgttaaaaatctttgttgtggtttgagcatctttgctgcttttggattgagatggcgaatcaaggcttcacttcctctctcttctgtctttagaaagctgtgatcgtgcgtgcaattatttgaaaggcaacatagtcaattaagaaacctgtagttgttaaggaagaaattgttggcaagatatccatactgcccatatctcgttggtgcaataattaaatagcaaaggaaatctgtattggcaactattataattcaataattcttttgtttactgcccttttctgttcaagaattttctggaaattactccctttcacatggttgaactcttaagttgaccagttctcatagctctatcactagaatggtttgcagataccccaaacatactatgataaaatcaaattgtgctacttttgacccatgtaatttacctaaaagttgtaattgctgacagagtactgccttgaattttggtttaaaacctctctagtttccaatgacaagtaacaactcaaataattccatattgtttgaggaagaggccataatccttctgaattgttggcactaagtaatgggatttggcccagtaagtatgacggtcgtgtcgcctaaccaacgcagagcagtgctttttgtgtggctgaagcgatgtgctgacgaaaaaaggaaaattctaggacaatcgttggctaaaaatcaccttaggatgaaaaatttgaggcaaatttttttaaatgacagaaaaagataatcatctcacttgcttgaaacaggagccagcatgatctctggaagcatcaactatccctcgtcgtgattgttgaaagctctttcactgttttgcattctagtttgaatagtttgtattgaaattggattcctatcttgtgtatgtttttggtgcgtaaaagggaaaaattggtgtcattacttttgaaatttgcaggacgaagggcatgcttttggtttgctgtaagattgtattctgtatatatgttttcatgtaaataaatgaaaatctatatcagagttatattttaatttttattctaaatgaaaaaaaccctttttacttcaaaaaaattgtaagccacattgttaataaagtaaaaataaa

SEQ ID NO: 105895 - DNA, 1463 bp, Homo sapiens
atttgatccaagttggagtcagacacagtatttgagctgcacggcttctgggttctcccaccttatttgatcatattcgaaagattatttcctgtgtttgctttgatttgttcctcagtacattaaaatgatccacaccttgaacactgccctctctagaaggttgattttgatcagccttttgaagatgggtgtcgtttccctaacttatctcacagaattttgagtgttgtatttggcaagttctgagatttgccttctgtcttatgccaaacacccctttctaagagctgtccccgcttagttttagaagtactaggggttttcatacttattttatagaacacccatttatatttatttctgtatatagaactaaaaaaaacagtagtggaatcaaggcttcacttcctctctcttctgtctttagaaagctgtgatcgtgcgtgcaattatttgaaaggcaacatagtcaattaagaaacctgtagttgttaaggaagaaattgttggcaagatatccatactgcccatatctcgttggtgcaataattaaatagcaaaggaaatctgtattggcaactattataattcaataattcttttgtttactgcccttttctgttcaagaattttctggaaattactccctttcacatggttgaactcttaagttgaccagttctcatagctctatcactagaatggtttgcagataccccaaacatactatgataaaatcaaattgtgctacttttgacccatgtaatttacctaaaagttgtaattgctgacagagtactgccttgaattttggtttaaaacctctctagtttccaatgacaagtaacaactcaaataattccatattgtttgaggaagaggccataatccttctgaattgttggcactaagtaatgggatttggcccagtaagtatgacggtcgtgtcgcctaaccaacgcagagcagtgctttttgtgtggctgaagcgatgtgctgacgaaaaaaggaaaattctaggacaatcgttggctaaaaatcaccttaggatgaaaaatttgaggcaaatttttttaaatgacagaaaaagataatcatctcacttgcttgaaacaggagccagcatgatctctggaagcatcaactatccctcgtcgtgattgttgaaagctctttcactgttttgcattctagtttgaatagtttgtattgaaattggattcctatcttgtgtatgtttttggtgcgtaaaagggaaaaattggtgtcattacttttgaaatttgcaggacgaagggcatgcttttggtttgctgtaagattgtattctgtatatatgttttcatgtaaataaatgaaaatctatatcagagttatattttaatttttattctaaatgaaaaaaaccctttttacttcaaaaaaattgtaagccacattgttaataaagtaaaaataaa

SEQ ID NO: 105896 - DNA, 570 bp, Homo sapiens
cggtgcgcgcgcctagctggcgggaccgttagctctaggcagacgccgacgggccccgcggggatggaacagccgccgcctctggcgcccgagccggcctcggcgcggagccgcaggcggcgggagccggagtctccgccggcgccgattcctctctttggtgctaggactgttgtccagagaagccctgacgagccagcactgagcaaagctgagtttgttgagaaagttcgtcagagtaaccaggcctgtcatgatggagacttccacacagctatcgtgctgtacaatgaagccctggcagttgaccctcagaactgcattttgtatagcaacagatctgcagcctacatgaaaacccagcagtaccacaaggcgctggacgatgccatcaaagcccggctcctcaaccccaagtggccaaaggcatacttccgacagggtgttgccctccagtaccttggacgtcatgccgatgccctggcagcctttgcatctggactggctcaagaccccaagagtctccagcttctggtggggatggtggaagccgccatgaaatctcccatg

SEQ ID NO: 105897 - DNA, 228 bp, Homo sapiens
ctcccaaagtgctgggattacaggcgtgagccaccacgcctagcctctttttgttttctatttttgcctcactgtgggctatgaatgggctatgtgtttatattctgttctcttgccacatgagatcttatatacctgacgccagcaaagaagcctggaaaattatggtcctgatttaactgtgcctcagttatccctggtgtgacttgggcattaatttgtctcacc

SEQ ID NO: 105898 - DNA, 734 bp, Homo sapiens
gattttaaatacctgcctccctgctaacttactgtgtaaccctgggcaagtcacttaacctctctgagctctggtttcctcattgagaaaatagttgtttaatgattaaaggtacctcatatgagctcaaataatattaatccccatccctagtcccttccctttaaggtagtatgtcagattagtagcataagaagatccaaacctgtgtgtcctcttagtccagcgttcttcctcccttatgcagtttccgtcatcaacattgcctttctgttgccctcataacttatcatacggagccaggctatataattagctacttctctatccgcctcttggtacttaccaggcaagcttacctgtcatttccagctatcagctatttgtcaagcatcagtcacccccaacagcccccctgccatgcatttctactgttaatatctgtatctgtctccagagctctctaatctgtcccaccccgtagctgttttacatctagccatatacttctgtctgctctcattaaactgcctccccaaaactggctaatttatatttccgattttctattagttatatgttcttcctaacaataagaactatttacccatttgttcattatctttgtcatctattttaccttctgtgtttccaccattcatctcaaacttcatctccatagagctatttcgcaactgacaaacagtatattcatatgtctggtaatggttatc

SEQ ID NO: 105899 - DNA, 253 bp, Homo sapiens
acctgccccccctccgaatgatgtgtccatttctcagaacctgtgaatttcatcctacttggaaaaggaatctttgcagatgcaatttaaaggacctcaagatgagattatcctggattatccaggtgggctctaaatcaaatgacaggtatctttatgaaggagacacagaagagacacacagagaagaggtgaaagcagtggataggcaaaataaaggcaaaggttgaagtgatgcagcctcaaaccatgg

SEQ ID NO: 105900 - DNA, 283 bp, Homo sapiens
ctgaagcccagagaggttaaataacttgcccaaagcctcacagcaaagttgaggaagtaaaactgggcctggaatccactcgtctgatcccctggcacatgacgcaaggcttgaccttagagggactcgtttccagacagagctctggcaaaggagtgtcttgggcagcttaggagtagaagaggaaaggtgaatggaaaccaggccttgggttatgagctgcgcaggattttccagcatctcagatgcaggcgtttagagaaagagatataatggagcaggc

SEQ ID NO: 105901 - DNA, 637 bp, Homo sapiens
tctaaggtgtgcttaaatgatccatttaaggaattttgccagctagtccgttttgttttgttccttctactgtggatggatgaaaaagcagttataaaaccatcgctaaagaaccaaaggcaaagacaggattcgtacatcctaaactccctgttctggattctcggtggatgtaagaatatcaaaagttacattgcattttccacagtggagaaatataatttaacaaaagcaccgtgagtggtacataaactctttagtagctggttaaaaggttaaaggaaaggagagtaaataactcatccttaagaagggagaagactccctgatcctggttttagaaattgatccctagttcaagcacaaagcaatgacggggaaaaaaactgaccacaaatattgttttctccccattatgtctcactccagcctgcataattagttggagaaagtttcacgtctgatagccccactctcagtccatgtctgcaaaattacgactgtgttgtggtttcttagctccgaagactccatgggcatttagcaggaaggccacatctctcattcagcaaggtggcaggttttgcgggggttctggggagtttgtgattgctgcttcgtgtgcacagagtgagaa

SEQ ID NO: 105902 - DNA, 416 bp, Homo sapiens
gattcatcatttcaaagaattcgttgctttgttgatttttcacttttacatgtttgttctcaagtttttaatgttgcaagttatgctccctgggaagcagactataggtaaaacatagcacagtaggttgattgggtagtgttcttggaattaacaccaggaaggaaaggaaaggaagcagaattgaaagacaaagaagtttgactttgatagagaccaccctggccaacatggcgaaaccctgtctctactaaaaatacaaaaattatctgggtgtggtggtgcacacctgtagtcccaactactcaggaggctcaggcacgagaatcacttgaaccccggaggcgaaggtcgcagtgagccgagatcatgccactgcactacagcctgggctacaagatgagactccgtctcaa

SEQ ID NO: 105903 - DNA, 883 bp, Homo sapiens
ttgaggagacctaaatgtctaacaaacactcatacacccaaacacccgctcttttcctccatactttcaatcatgcgtgccttcccgcagcagacgtttgggtccttcctctgagcctggcactatgaagaccccaagattttcaggttctgaacacaagcccagtttctgcttctgatgatcattttcaatagagcataaaaaacagagccatgttccacgtttttacggcctctgcacttggcaaaatattcttcccgaatggcctcacgtgtgctccctatcatcacgccttttcagctaggcaacgctcagagtcacacctgagtggaggccgacgcccctttggaggcgactccagccataaaaagtcctgcttggagctggttttagccacagagggccaataaatggccccttctgaatgaggtgcccctgcacctctgcagagcctgctgccagcctccaggatctaactgggctctgattcaccgctcccaaccccacatccagagattggccgggcatggtgactcacgcctgtaatcccagcactttgggaggccaaggcaggaggatcacctgaggtcaggagttcaagaccagcctgggcaacatagtgaaactccgtctctactacaaatacaaaaaaattagccgggcctggtggcacatgcctgtagtcccagctactcaggagctgggaggctcaggcagaagaactacttggaccagggagacggagattgcagtgagccaagaaaaggctgggcacggtggctcatgtctgtaatgccagtactttaggagtccgagtctggtggatcacctgaggtcaggagttcgagaccagcctaaccaacgtggtgaaaccccatctcta

SEQ ID NO: 105904 - DNA, 430 bp, Homo sapiens
gggagacgggaaggagaagaaaaacaaaagtgagaaaaagagctgaaaatgggacaacaagaaagattcctttttaaggaaaatgaataaactacctgtcaaaataagtataacatccttttcattctggaattttaggaatggttgccttcccttccaaaaattccccatccagttatcataaagcgaattatctgacacctatacacattacatactaaagtatttattgaatgagcaaggaccaccagtcaacaagctctacctatatacaacatttccaatcagtctatctattctctcacattaaaatacgtctagacaggccaggtgtggtggctcatgcctgtctgtaatcccagcactttgggaggccgaggccagtggatcacttgaggtaaggagttcgagaccagcctgaccaacatgg

SEQ ID NO: 105905 - DNA, 643 bp, Homo sapiens
gggcggttgctgcagctttggccgaggttcgggctcgaacttggaaaatgctcctggcgcctcagggaaggtccttctcaaagaaaaggatggggctgaatcgctggaaacggttcacaaggaagccgagtcccaagcctacttttggtcctgacagtgtggaacactggataaagagagtggagaaagcctcagagtttgcagtgtcaaatgcattttttactagaaattcagatttacctagaagtccctggggccaaatcacagatttgaaaacatctgagcaaatagaggatcatgatgaaatctatgcagaagctcaagagctggtcaatgactggttagacaccaaacttaagcaagaattagcaagtgaggaagaaggtgatgctaaaaacactgtgtcaagtgtcactattatgccgggagccaatggccatttgaaatatgacaagtttgatgatttatgtggctatttggaggaagaagaggaaagtaccaccgttcaaaaatttatagaccatctgctccataaaaatgtggtagattctgcaatgatggaagatcttggaaggaaggaaaaccaagacaagaagcagcagaaggatcctcgtcttaccatggagatgagacataagcaggt

SEQ ID NO: 105906 - DNA, 413 bp, Homo sapiens
actgaagctgtttgtcaatttaaacacttttattagctttcataaactgctgaaatagaatgattaaagaatggtttgttgctgtttttttgtttgtttgtttttgttgagatggagtttcactctgtcgcccgggctggagtgcagtggcgcaatctcggctcactgcaaactccacctcctgagttcaagtgattctcctgcctcagcctcccaagcagctgggattacaggtgcctgccactacgtccagctaattttttgttatttttagtagagacagggtttcatcatgttggccaggctggtctcgaactcctgacctcgtgattcgcccacttcggcctcccaaagtgctgggattacaggtgtgagctactgtgcccagcccaagaatggttttttatactcaa

SEQ ID NO: 105907 - DNA, 330 bp, Homo sapiens
caggggtgcatatgtgagctctttgtcaggcatcgcaaggagtgacagtcaccacttgctgctgttattattttgtttttcccaaactcaaaaatatcaatgagcactccttaccatgtgtgaggcactgggttaggtagtttcttacaaaatctaacattttgaagagacagaaggtagcacacaagaatcctcctagaggtaagacccacctgtgctgaaagatccccaaagccgcagcacaggcgggagcaggccaggatgagaacactcctgctcgcttcctctactgctctggatctgcgtgttggggaaggaatgagataccta

SEQ ID NO: 105908 - DNA, 398 bp, Homo sapiens
cctgagctttgtaaccatatctacaacataagtaaacacctgacagatcttccaccatctgactttgctgttgctccttatcgaagtacgggtaccattgagcatgagtttctgtgtcctatcatgttgggagccaccagtcccccgagggctgaggggcaaagaagataaaggtttcagggtggggttgaagactttatgactgagcagggccccacttcagaagccggagggccccatcccagatctgtttggtcttcatgccatagatgatggggttgagcatgggtggcacaaccaggtagaggtcagctagaaggatgtggatgtgccggggcacgtgctggccaaaccgctgtgtgtagaaggagaagagtcctggtgtgtagaagagaagt

SEQ ID NO: 105909 - DNA, 358 bp, Homo sapiens
ctcacggcaataatgatcaccacacttccctttattgtgtgttttgctactcaaaccacacacctccctctaggacaggaatgaaccgttactactcagagaggggaactcgcccaaggcccacagctggactcactatcctctctgcctgccccagctctcagtggatgtcaaattcttggctaaatccatcagcaatggaaagttggttggccctgggaagaggagaggccggcggatggctaggtccaggactggaccaggggggatggggtcccagatttccaccctgcattaggagctggcatagggactgtccccactgcacagataggtaagctgaggtttgggaaagggg

SEQ ID NO: 105910 - DNA, 727 bp, Homo sapiens
gctgatgtggcctgctcttatgaggggcagtcagtagggccaatggacagtggggacagggaggtcgctttggcagcatctgcctggcactgcccagggagggggtctccagcagccaacatgaccatcctgcctgctgggggggcatgtcctggggtggtgctggcagccatctgcccagcccaacatttattagtagtgatcgtgtgttccaccctggaagcgctcccagtgcactggggaagtcacgtgccctcgcactgggtgatatgaggtttgataggaggagctctaagtgggtggaggaactcctaatactgctttgaggctcaaggaagtcttctcagaaggtctttagactaggtcttgagggaggcctaggagttcactaggaaagactttccagagaaggtgaaattgggttgggtcttgagggatacaaaaagttcactcagaaaacaagagaggaaacaccttttctggacactgggttctctctaggggctcatgtaggccatcagaccagtaagaccacagtattccgggaccctgctcacccatgccagcctctcctgtacgccctgtgtgtgaccgtatgggtgagggcccctccactgccccatcctagagcggttgggattgtgccagtgtggagtgtgctcggcacacagcaagtgcttggtcggagtgggctctcagaatcgtgcagctggtccgaggtggggcc

SEQ ID NO: 105911 - DNA, 329 bp, Homo sapiens
attagaggatctacgggagccttacctcaggcccacatgaacagggtcacagccctgccgcccacaggcccggatgtgggcctcggcacatgtggccggctctagtttcaatctgctgctatggagggctagcaaatgcgtggggcaagacccgggccatccccaggctatgtcattcctgggcccacagggagactctgcatccagagctgcctctgtgggactctcaagcgggatgttttacactcaccatctgtggtcttcaacacaacccgtggtgggacagcagaatggtcccgtgaaggtaagagaagtcaggaaaggttaaa

SEQ ID NO: 105912 - DNA, 745 bp, Homo sapiens
ttattatcaaacatgaatttatttagaaatgaaataaaaacatgctatttgaacaaactttttttataaagaataagttgactgaaaagcagttttaaataacatgaactcacaaatgacttttagaagccaaataaacatttccattttagagaacagtatgtaatacataacttaaaagcatatagaacacatattcatacattcttaaaaataagagattgttattccacagagaatttttcaaaaatctaaagtatgtcctgtttaaccaacaatttgcttccaaataggagtctcttttgagaagctaaatattaattttcaaacaactatttctccatttggtaactggaatcagccatattaatatacattgacataaagacctttgttttaatatgaatgattccagttaccaaatggagaaatagttgtttgaaaacaaaggtctttatgtcaatgtatattaatatggctgaaggctccagccctgagttattttttttacttccttaaattcatatttacaacatatatcaatttgaggtatgatgacaaaaacagaaacaaaagacacaatggtagatgagaatctatctccttgtggaagaggcaaaattagtgtggacttcatttttctgacctataaaactaggaagtataatcacattatctgtgacaatttttccttctaaaatgccatgaatttgaagatagacttcatgcctttctccatcatatc

SEQ ID NO: 105913 - DNA, 2194 bp, Homo sapiens
tgaaggtcaggcaggtcaggtgatttgcccaaagtccgcactgtcactaaatgaacatagattggtatgactcccaagcctgtgagtttttgaccatcatattctgcctcactatgaaaagtttatttaaattaatttttttttaatcaaaagaagtagtatatggagagagaggtgaaaatccatgtttgctctctgcagtttccagaccattcatggcatgttatttttgtactggatatagtcattttttaaaatgctacaaactgttcaaaagagcatgaacaacatgataactccttataattttgttgtaagacaaatggctaaaagtatgtgggatgtttaatttggataagtggaaattctatcacttgataagctctcttgaagaataattatttgaaagattggacttaattctgtattgcctgaagtgtaaatcagaagtcaacaattagattgcaaattatgaaaagcataacttttctaattgtttagtctttttagagaaacaagcccaggaaaaaagtaagattctcattcattggagataagatttctatttatcaaagatacttcagaagagttagatagcaagtaggtaaaatgtcttttaaaggtatctgacatctttaaagctctgtgatttttaaattcttaattttgttacagctaatttttttaaaattaattgctgagtcatggtcaagtatttctgatgacttacatgctgtctttgatacattttaagtttctaaaccaaaactactatttaattctgttaccctgttttagaaaaacatttgagttatacaacttactaaaaggtattttagcgatgatgttttggagcactagtaatatagtgtttaacttattttctattttttatccctctatattagtgaaattacttctctttgaagttttcccccagtgataaaaaaaggctgagcagtatctgtaaaaatttttaaggtggtgtccactaggtggagatatgtgctacatttccaagtgttgtaattaaacttttattagtctgaattaaactcttttattttttataatcatttatatctatttatcataatgttattcaaatgtttcctgagttgtatgaagctaagatacaggtaaaaacaaaacaaaacaaaaacctcactttgtgttttgtaatcattagacaatttaacctaatatatcttcccatatgatatgatcttttcatatggcatacttcattcatatgacatagttagaatcttttcccacaaacaatgagtgatgatatctcatttgaaaactcgtgtaacattgtatcagccactgttataaagtgatttacccatgttagtctcataacaactctatgagatcagtaccgtacacatggggaaacttagtatagagaggtgaagtattttttccaagattacaaaatagctgtctgagctgggattcataaccaggcagcctgactccaaaatcaatattcttaactctattgatatgatggagaaaggcatgaagtctatcttcaaattcatggcattttagaaggaaaaattgtcacagataatgtgattatacttcctagttttataggtcagaaaaatgaagtccacactaattttgcctcttccacaaggagatagattctcatctaccattgtgtcttttgtttctgtttttgtcatcatacctcaaattgatatatgttgtaaatatgaatttaaggaagtaaaaaaaataactcagggctggagccttcagccatattaatatacattgacataaagacctttgttttaatatgaatgattccagttaccaaatggagaaatagttgtttgaaaattaatatttagcttctcaaaagagactcctatttggaagcaaattgttggttaaacaggacatactttagatttttgaaaaattctctgtggaataacaatctcttatttttaagaatgtatgaatatgtgttctatatgcttttaagttatgtattacatactgttctctaaaatggaaatgtttatttggcttctaaaagtcatttgtgagttcatgttatttaaaactgcttttcagtcaacttattctttataaaaaaagtttgttcaaatagcatgtttttatttcatttctaaataaattcatgtttgataataaaaaaaaaaaa

SEQ ID NO: 105914 - DNA, 446 bp, Homo sapiens
tgagacagagtctcgctctgttgccaggctgtagtgcagtggcatgatatcactcactgcaacctcggcctcccagtttcaagctattcccctgcctcagcctcccaagtagctgggactacaggtgtgcgccatcacacccagctaaattttttaatgtattttagtagagatggggtttcaccatgttggccaggatggtctcgattttatgacctcatgatctgcctgcctcagcctcccaaattgctgggattacaggtgtgagccactgtgcccggccctgactccagatttttaaacaaagcttcacttccttaaccaattacaaatcagaaaatctttgaatctacctatgacctataagtcaccctccaggcccccactccaagatattctacccttataaagctaaaaccttcttgtattgatgtataattttgcat

SEQ ID NO: 105915 - DNA, 616 bp, Homo sapiens
gagagatctgaaagtcatttttttctgttctgtattttaatgtttgtaaattctccaactccttacagttctttcaggattcttagggcaacagttctcaaggagtagtccaaggagttctagatattgagatttttttggggagtgatctgtgaggtgaaaattatttttgtaataatattaagatgttgtaggccaggcgtggtggctcacgcctgtaatcccagcactttgggaggccaaggcgggtggatcacttgagttcacgagtttgaaaccagcctgggcaacatggcgaaaccctgattctacaaaaaatacaaaaattagccgggtgttgtggtgcacacttgtagtcccagctacttgggaggctgaggtgggaggatggcttgagcccaggaggcaaaggtgcactgagccaagattgcaccacactgcactccagcctggatgacagagtgagaccccgtctcaaaaaaaaaaaggaaaaaatacattattgccttttggattgtcttgacatttgtactggtggcgcaaaagcaagaatgggtaaaactgttggtgccttagcagaaatcaaggtattggctccaacctctctctctctctc

SEQ ID NO: 105916 - DNA, 266 bp, Homo sapiens
cagccacccaaataagcaataaggattaagttatcaaaacagtggtatagtcatgcaccctttggatctaggctttgggtgaggagtataaggaagacatcaccagaaatcacgtcatccttaacatcagactgcatgggaaaggtagggcagggcatggctacttcctcatccagagctcagaccacagcacctgcagcatactcagtggacactctggagttgttcagatggtgcttggtgagcagctctactattcaggggcc

SEQ ID NO: 105917 - DNA, 392 bp, Homo sapiens
aggagacctaaaataaactgcctgccccataacccggtgctgctggtgtttgttgacctggggtatcccactgggaggatgtccaatgtggaaacacacctatgggcctagagggacccctggtggccctcctacctattcccaaggtgtgaaacccatgaacatccgggggaaatggtaaagatgccttagtctatgaaatattgcatcacagagggaaacctgactctccagtaagcctgatgagctcagatgaattgtacacaaccatagagacttgaggttgtagattatctcttaggtagcaaacagaagatgtggtctgctaagagaatactgtagtgctattttccaattgaattttatataaaattagaaattcattaatccgg

SEQ ID NO: 105918 - DNA, 770 bp, Homo sapiens
actgaacaaaatcatgtaactgaagttaatctttcataagctcttgaaattatgaatcttgtttagagaaaaactatagtttcatgagctttttaaagcaggatattgttattttagttatatagttatctttttttggtaacctaaagcaaacagtgaaaaattgatttttttatttttatttttagacagggcctggctctgttgcccaggctggagtgcagtggcacaacctcagctcactgcaacctccacctcctgggctcaagtgattctcctgcctcagcctcctgagtagctgggattacaggtgcctgccaccatgcccagctaatttttgtatttttagtagagatggggttttgccatgttgtccaggctggtctcaaactcctggcctcaagtgatctgcctgccttgacctcccaaagtgctgggattacaggagtgagccactgcgcccagccaaatggttttacatttctttatctataaagtgagggaattagacaagttgatttctaaacgatttttcaatattgaaattaaatgagtttaacatgataaattattgtgtcatgctgtgggttgatttagtgtttttaaaagttaaatgtttgaaactaatattttaatatataaatgtttttaaagatagctctatcatttaaaaattatgtttaatatcagtaggtttaatataacaaatttatgaaaacagaaaacatggccaattttaaatctttattaactgaaacataagagaatgt

SEQ ID NO: 105919 - DNA, 467 bp, Homo sapiens
gctgcaacctccgcctcacaggttcaagcaattctcctgcctcagcctccggagtagcagggattacagacatgcgccaccacgcccggcgaattttctgtatttttagtagagacagggtttcaccatgttggccaggctagtctggaactcctcacctcatgatccgcccaccttggcctcccaaagtgctgggattataggcatgagccaccatgcctggcccgtttatttcttatatgggatattcctcaggaagttctacctccctgggcctgatgcaataggaaaattaggaggacaaaggaagaggggaatgaaaaaagtaaggatacagaaaaaataaaggcatattgattctttgacttagtcctttgcaagacatgataatgttactagcatggaaagaaatcccatataggcatttgaaacagaagtagattgtgttttgtatggaaaattccctg

SEQ ID NO: 105920 - DNA, 378 bp, Homo sapiens
agtagctgaactagaggcgcgcaccatcacgcccagctaatttttgtatttttagtagagacaaggtttcgccatgttggccagtctggtctcgaactcctggactcatgcagtctgcctgcctcagcctcccaaagtgctgggattacaggtgtgagccagtgtgcccagcctagcttttctttctgctgtggatgtgcactgcagttgttttcagttttgggctattaggaattgcactgctatgaacatccttgtttatgttgtaggggagaaagatttctttttctttccaatggctaggtacatggctgacatcctatcacaaaagacagattaacaagagagaagcatacgaatttattaatataagtttta

SEQ ID NO: 105921 - DNA, 943 bp, Homo sapiens
ccttaatgactggcatcacgcacaaataggcctttcagcttctgaacgcagatattttcaaggaactctgaggcccaggagagcctaagtttttctccacggaagggcaaactactagcctcccccgcttcccctctgcgttcctgcctctttctagaaggaggctgagagggggaagcctgaacccccaaatcaagtccgccttctttctctgtgcctgacccagggcaaaataatctctctgatcctgttcttgaccattgaaaaagcactttctctggtcgggatactactggcactttacatggggggcagtttaaccgcaggagtccgctttctgaaaggtgcagagggaggggattccgccaccagccgactgagaggagccccggccccgcgtggtccctcccagccaccctccctctgggattagctgccctggctctgctctaggcgtccccagcccgtgcagtcccggctggcgcaccaccatcgcctctgcagagcgcggccgcagcccggagcccgcagcccggagcccgcagcctggggcccgcagcccgtagcccgcagcccgcagagccgcgctgtccggggcatcccagtgcacggcgtccgtggacctgggacctcgaacctgggacgggcggaaaatccactgggaacacttgcatttctgtaggtgcttatttcacattcttgtcttttcttgcttgctcgagctgttcgtgggttactttctgccttagttaaaccaaaagggaaaggcggaagaggggaagccctgaagaatgatttagtggttgcccagcctcctttccaaggagaggtgttcgctgagcggctctccccgtccccgacactggcccctttaagaagccaagtcagtcctgatgctgctgtttgtattgctaatccccaggagccccgtttaaaaaaaaaa

SEQ ID NO: 105922 - DNA, 151 bp, Homo sapiens
ctgccctagccttctgaagtgctgggctgtgcccaggcaagtggttcattttattcatctttgtaccccataaacatttactgaatgaatgaatatgaaggtgtcaagattactgattggagacatgaggaactaagcagtaaacaaacag

SEQ ID NO: 105923 - DNA, 308 bp, Homo sapiens
aaaatcataggaaaaattagccaggctgtgtggtgtgcatctatagctctagctactcaagaggctgagaggcaggaggaacacgagtccaggaatttgaggctgcagtgagctatgatcgtggcactgcactccagcctagatgacagagggtccaaacagagcaaccagacagaccctgcctctttatttttgagacagtttcactctattgcccaggctgtagtgcaatggcatgatctcggctcactgtaacctctgcctcccgagaccctgcctcttttaaaaaaaaagaagggaggaagaga

SEQ ID NO: 105924 - DNA, 431 bp, Homo sapiens
  misc_feature (299)..(299): n is a, c, g, or t
  misc_feature (331)..(331): n is a, c, g, or t
cactcaagcacctaccccatcccatctcaagctttaactcctgctgttcctgagatccgaaataccttcccatctgccttccacttagggatactgtttcttgttcttcaaggtccagctcaaatcctaccttctcctgatagcttccctgacttctaaattttttctccattcttgaccccctgacaaagaatcaaaatcatggctcaacaaactgctagcttctgtctcacaaatagtaactttgtcttctcaattagattaagttcttggtggcatttcatttataaccattattntgcctctagatcacgtgttccatatttttcanggttgacactggcctcagtcatgaaactgtccttgaaatgcccatacttctacatctcccagctgcttctcataaagtgacatacaaattctttctccaa

SEQ ID NO: 105925 - DNA, 151 bp, Homo sapiens
gaaactcaggcacagagatgctgattgacttccctaaggttgcacagcccatgggcagcagagctgggagaagcagaggtctgtctgacttcacagcaatgggactggaagtcactttctcttgtgagcctccttttctgcatctccaggt

SEQ ID NO: 105926 - DNA, 362 bp, Homo sapiens
ttggacagactcttgctctgtagctgaggctggagtgtaggacgtgatctcggctcactgcaacctccgcctcctgggttcaagtgattctcgtgcctcagcctccagagtagctgagattacaggcgtgcaacactacgtccgactgatttttgcatttttagttgaaacagggtttcatcatgttggccaggctggtctcaaactcctggcctcaagtgatccacccacctcggcctcccaaagtgttgggataatgggcgtgaaccacctcaccgggccaagacggcttttttgatacaggtaaggaaaattaaatctacagaagcacctaatatatcttaagaacaacctcatttcca

SEQ ID NO: 105927 - DNA, 147 bp, Homo sapiens
ctgaactggtgctttcttctctttggctatgcttgatcctcctaccttggcctcccaaagcattaggtttacaggtgtgagccactgctcctggcccgatgtgtttgtctaacaatttttttttatatttgagatgaagtctaactc

SEQ ID NO: 105928 - DNA, 419 bp, Homo sapiens
tactagtggacaataaatttcactcaggattctgatacctagagttaaaaatgtaaagtaatgcccttccaaaatgttgtttttgttattctttattattgtaatgcataattccttgtattttccatatattaatacactcttcccaatgacctaaagagggagaatttatcaatatttcttttatgtatgaggacattgagacttaggaaaatatgtaatttgaccaagattgcacagctactagacgccatttgactaacttattgactccatataatgttccaggcacattactgtaaaaattacaaacttacagcacatccgaaagtatcatataatctacactttttattaacgagtaggtcctcgaatgtccaactggcatagaaaagtgcttaataaccacatcattacct

SEQ ID NO: 105929 - DNA, 512 bp, Homo sapiens
tcgactggatggatgggtaagctgctcctgcctgaggtggggagccccgcactcaactcagatctaaagggacaatcgtggactccgcatgggatgtgctgagtttcagatgccctgaagtatacaggaggaggtggggcagtggccttggaaaacaggtctgtagtcaaaagaggcctggggtgagatgtatatatcagggagtcattgaggcacctgggcatgtgggcaggggtgaagtcacttagggagagagcttggcaggagaggaggggctgggtttcagccctgagaagctccaacctcaggtgacaaagtagaaggggatgagtcagcaaaggagactgaggaggggactgagcagcaagacgagcaccaggagagggtggggacgttcatcaacaaatacttattcagcagatgtcgagtgctattggggaactacaaaagacacaggcactgttctggaactttccatctttggtggagaggccaacatccacagtcaacag

SEQ ID NO: 105930 - DNA, 813 bp, Homo sapiens
ttcagacaaagccatatatgattgaaggttatcagtactgtgcttttggaggattcagaagaagttatatctgattgggagattgaaaaggattggcctgaaggagaggtggtttttgaactgcatcttaaaggatgaggaaactgaggctgagagggtagagaactttgcctgaggtcactcagcaggtaggtggtggagccaggggtgtaacccgggctgtgggcctccacatcagatacagacagaacaggaaggtgttgcagaggctggcgatgctgcgattctctgggtagcaaagggaggggacattcccagcagaaggaacggtttgtgtaaaggtgtggaggtgtgatacggtgtggcctgttcagggtggtgactaacagtggccagagtgaagggtgtgtagagaggagtgccagcagatgaggcaaggggctggggactggggccaaggtggaagaacttcaggttccaggccaaggaaatgaactttgtccttgggtagaggggtgccacaggaggcattgaacaagagtgcaaccttgggtttgtatggtgagcctccagcaataccttggcaggtgggatcctcatgtccaccccgggtgccagccacattttacaggctgggaaacagaatggttatgagaccggctcagaccacacagcaatagacaactggccccaagccagttctctcgttgtcacaggacgttgcttcgaaactcaggtcatagtgagaaaggcaggggcatccttccgttcctcacttctccagccctgtgcctgctcagctcactggagaac

SEQ ID NO: 105931 - DNA, 302 bp, Homo sapiens
agagaaatcctccatcctgttaatggcttagaagtgcattttactgagtctttcttcataaaaacgatattctgaatgttggtgacattccttggccaatccacataaagacagtcttataaaaatcttaatttatctttgtacattttcatattatagctactgtcttaggtttattgaaataggtacataagaatggtataaaatgtcataatctctaggttagtctcaaaaatctcattacttcgttttcgttctcaaccaaagcaagcatatttttctggacagtttatggtaatgag

SEQ ID NO: 105932 - DNA, 409 bp, Homo sapiens
actttgaagaagttattatgcataagttcaaagagttaaattgcatgcaaagaattgaaggacaatatggtacctttgacttaagagcaatctcaacagggagatggaaactataaaaaatggaaattctggctgggttcatggttcatgcatgtatgcccaatgctttgggaggctgaggcaggaggatcacttgaggccaggagttcaagaccagcctgggaaacatcacgagaccccaagtctacaaaaaaattaaaaaattagccaggcagggtggcatgtgcctgtagtctgagctactctggaggctgaggcagattgtttgaacccagaagttaagggtcacagtgagatgtgatcatgccattgcattctagcctgggcaacagggtgagaccctgtctct

SEQ ID NO: 105933 - DNA, 457 bp, Homo sapiens
gttccaagtagcagaatttcctgctttttaaaggctgaatattattccattgtgtgtgtgtatatatatatcacatttaaaaaattttattcatccattaatggaaaaccttcattcttgaaaaaatagcttataaagctatttatgtccctgatacctccaaagatcagaatgagtaataatctcacaaggatgggaaatacttcctctcttccaccttttgcatgtccatcctttgaacatgactcctggtgtgttagtctagtctgttctcatgctgctaataaagacatacctgagactggctaatttataaaggaaagaggtttaatggacttcacagctccacatgactgggggggcctcacaatcatggtggaagacagaagaagagcaaaggcacatcttacatggtggcaggcaagggagcatgttcaggggaactcccctttataaa

SEQ ID NO: 105934 - DNA, 396 bp, Homo sapiens
agagctttttgaaggaatttgattttgtgaataaaagttaggattatcactaaaatataggagtcattagaacaaaaataaaaacgttcactagagtcactaaccattcttaagctacattttagtaagatttaactataaaaattattgtatctttttagaaatgtaatttaggaattaggaaaaacaatttgcataaagacctaaaaacatattatacactatttaataactacattctttctcagtgtttgctgtcatcgtgtaaataatcacagctcttttgacaaactaacaagtatcatttattagagagagtgcaatggacatatagctctttaacttgtttgattgctattaggagcagtcataattcatttaagcttttagtttgac

SEQ ID NO: 105935 - DNA, 592 bp, Homo sapiens
cgacaacaaaaacaacaaacgaaaaggaaaaggaggaagtcaaattatctctctgagaaggatatgattctgtatctaaaaaaccctaaagattccactaaaagactcctagacctgataaatgacttcagcaaagtctcaggatttaaaatcaaggtacaaaaatcagcagtacttttttttttttttttgagatggagtttcgctcttgttgcccaggctggagtgcgatcttggctcaccacaacctctgcctccccggttcaagcaattctcctgcctcagccttcctaagtagctgggattacaggcatgcaccaccacgcccggctaattttgtatttttaatagagactgggtttctccatgttggtcaggctggtcttgaactcccgacctcaggtgatccgcctgccttggcctcccaaagtgctgggattacaggcgtgagccactgtgcccggcccagtcagcagtactcttaaacgccaataatgttcaagctgagaaacacatcatcaagaatgcaatcctattaaaaatagccacaccccccaaaaaatgactaggagtatgtctaaccaaggttgtg

SEQ ID NO: 105936 - DNA, 378 bp, Homo sapiens
tttgtggttacagtgagctatgatttggcccattgcactctagcctgggtgacagaattagactctttctcttcaaacaaacaaacaaacaaaaacccaatcattttctgggtttctttcaggatgtaaaacccttccagattattaccttttacctaactaaattctggcaattttttttcttttttcccggcggggatggagttttgctctgtcgcccaggctggagtatagtggtgcaatctcgactcacaacctctgcctcctgattcaagcaattctcctgccttagcctcctgagtcgctgggattacaggtgcttgccaccacgcccagctaatttttgtatttttagtagagatggggttttgccatgta

SEQ ID NO: 105937 - DNA, 661 bp, Homo sapiens
ctgacagtgcaggaagaggaaaacccagggacagaggggtgcaggactcgggctctggcacacaaggaggtagctggtggtccaggcaaagaccccaatcacagggaaaaaaggcttgttcctacacacagaaaattaaactggccaggcagtaagaagaaacacagggtcttcctcctgctcttggtgtgaggatggtctttcccaacacagagccctgaggggcagcctgggcgggcatctgggcccccagagtttgggtcctcaggggctgtccagaggccagggacaggccaacgttcctgggtgcactgagtgagcagcagtgatgactcttgaggcctggggtgtgggaactgccactgagtgaccttcccagcagcccatagaaggccctggaggaaaacaccccacttacaacgcaccaaggagaatgcccaaaagcccaggataaacccagtgagagagcagaacttgcacagtcagagctcaggcccggcattcaactatttctggttgctcaggtgttgaccaaggcctgcagcagctgggcctcctgggatcctcaccaaggaccggctctggtgctcagggcgtctcctccctcaggaagctgagctcatccggaacattcaggagctgctgaagagagccatcgtgc

SEQ ID NO: 105938 - DNA, 286 bp, Homo sapiens
taccctcagaaaaatatgttgccagattcgatctttatcatcagcttgcagagtcctcaagagtgtttggctagttttgtttataaaaatgtcccatgagacatttgcaggtctatttttcatttaaattgggtgggcaagcaggtaaaagaagttcctaaagacatgaacttctatagctcaatgaataataaccacaattaacatttattgagcatttactaagtgtcagagactgtgttaatgccttaaatggattgtctacttcaattaactctatgagtta

SEQ ID NO: 105939 - DNA, 118 bp, Homo sapiens
agtgggtgcactggtgatctcggggtgcactggtgatctgggctgaacctacaagcctcaggctgggcacgcaccctcaggaccgtcatctcctggaactatcaggcagcctggatca

SEQ ID NO: 105940 - DNA, 328 bp, Homo sapiens
tgaattttctaagaattgattttgcttcctttgggaagtttcagagtatatgaatgctcagtttctcttaagcccaaagataatttagaagtcatgtttctgtggaggtttctttccccattgtgagtttaaatttggggcggcttttaatgctcaattagaatacttcttatggttaagtactttctattccaaaaaacaaaaacacctctcaaatcctctgcacaagacctgcctttgaaaacatctggtaaaaataacaagtcacttggaaaactgtgattctcaaatggacccccgcctcttggttagtgggaagtcactgggg

SEQ ID NO: 105941 - DNA, 341 bp, Homo sapiens
tgagcccttcagaatcagattttgccccttagtaagcgatattgtcccactgagaatgcatgattcattgatacataaatgattttggacactaacaacagtagttgcagcagtgaagcaggggtcgaagccaatctgcattggactgaagagtgagtttgaagtaacgaaatggaaccagacatgtaggtcatttatagcagaatggttgcaagaactgcctcagcaatctggcctctgctctcaaacctgcccctgactaacaaggcaagctgctttatttgtgtctcagtttccttcttcatctgtaaaagtggaataatagtaactacctcataaag

SEQ ID NO: 105942 - DNA, 336 bp, Homo sapiens
cttccagtttcgccacagtccctggcgtccgtcggcctgtagatgtgtcaccctgacctcagcctctgtcttctcatcaccttctcccctcagtgctcctctcttctcttctcttccaagtacacttgtcccagaatgatctcatctcgagatcttcaccttaacaccatcggccaagaatctgtttgcaaatgaggccatgtgcacaggttccgggtggaggtatctacccagggaccactgttcaacccagcagagcagggacggggttaagtgggggcgccctgccctccgatcacagtgtctgccttgcggagactggattggggacttggg

SEQ ID NO: 105943 - DNA, 380 bp, Homo sapiens
atgctttaggaaatggaacttgcagggctggaggagaatgggtgtgagtctagggtcagctcaggcagcattaaacttcagcagcttattcctgcaaaacagtggccttgtggtgagctgttcattggctcttgattttctgctctgtgctctgctcatcctgtgctttcagctgatcccagcagatgcagtataaattgatttctctgtaattagatcagctgcagcagggaatacctatttccatatgtaagtgttaataaataaaggctggatgtgtatgtttgggtggtggtgccctcttagtgcctgtattccagtggtagctcatgctttctttgctgtcggtattttggtctttgcctctggcacatctgtag

SEQ ID NO: 105944 - DNA, 132 bp, Homo sapiens
cccacctcacactgggccctgagggtggtctggggggccatgggaaggcttcagctctatggttcccaacctgccacccagcgcaaacctgcccacttccccttctcgagccctgcagagatgctcacccct

SEQ ID NO: 105945 - DNA, 703 bp, Homo sapiens
gtgaattactcttgatggtactaccatagataaaaaagaataaagatgttttgattacaaaaaagcagtttaaaaaaatcactttaaattgtacacatttaaaaaatacttagtagtctagattttataattatttaaaaagttaattgtaggtaatttataatctcagtattgtttgaaaaaaattattatttaattatcgttcctagtattctagatgacctttttgtgtaaataagaaaacaaatttttaagttattatgttgtatttttttaatagtcacatgataatgaattagactttttatataattagaacttctatttaatttgtaaaataaattctttgcaattactaaatgaatcaataattacagttggcccttgaacaacatgggatttagtgctgccaatccccatgctgttgaaaatacatatttggtatgttatatatattatatattgtattctgagtacaagaaagtaagctagagaaaggaagattttgcagtagttaaagctgtagtttccttgtagttcgatgcttgaactactatcaatctagtgtaaggtgttcacccatccacggtaaaataaagtaaatttactccatttactcattttaaaatgttggtctttttcttgcctgtatgccttctttatttgttttacttaattttttatttataaaaaaacaataata

SEQ ID NO: 105946 - DNA, 396 bp, Homo sapiens
aattatacaaccctcccccaaaaaactgcaaggagcttctacagttgagtattgaatttaggatttctgatagcccaagccaaatggagtcaagggttccctttatctatttaaatgaagtataccagatagccaggtgcaaagagcagttcctgccatctaagaaattttcactccatttgaggagatagcacacaaaataaataatagagtaaactggcatgatattgttgactaaggacggtagacaatacatgattgaaaaacatactgagcattaaactagctagcttttaggtcttacactgaaacccctgcatcatgcagaccaagatggttctactgacaattgactactagaggaaaaaattaagcatttgttaagaaactagatta

SEQ ID NO: 105947 - DNA, 872 bp, Homo sapiens
ctcaaaccaagggtgtccaggcaagacagggaggtggcatgggaagggtggaatgggccagatcaggaagggatgacatgcttagccttatccctgtggtcacacctgtgatgcagggaggtggctgagtggtgcaggacagcaattggagaagacaagaccagcagcaggcttggggacacccagactatgctgaggcctagagaggctgggctcattgctgggaacccaaccaaaggggctggtcatgttcccctccaggcctaggatgggggcttggataggcggtgcctctacagcgtcccaagactgaatatccaggtagagcctcctactttctctcagatgctccagtctcactttcccttggccctggactcctctgggaagcctttcaggctgctctgagttctggcacaccttccacttagtgcccctggagttgttctgcctgcttttgtgtttcctggctgccagctccactgggagctcccaggccaggcctgggcgcctcccattcctgtccccagaaggagcactctggatgggaacttcccttctctcccaggggctggggcagcctgggtgatgagaggtgggatcaggaggggtggcaccacccccatctggcccagtaagttccaggtggggtggggctggaagagagggactcatctgagagggtgggggcagggtcctgctacagccctgagcagtggctgtcagctgaagccacccgcttcctctccccccagcctgctccagcagggctccctcctcctcctttgtcctccggggatccccagccccaagggctgatgggggtgcgggaggaggcggtgtgagccccggttggggggtgtcttcacccc

SEQ ID NO: 105948 - DNA, 428 bp, Homo sapiens
cagagatctatttacaagataggtttttcatggtgttaaggttttgtggtgttcaaagataggaaaaggaagttgaggcagtgcagtatatgctgtttgtctcattaggttattaactatttgaggttagggataatgcttttccttaattgacaatgtcatgctctatataatgtcattatttaatatgactgatggaaatataaaatataaaggtacactatgactcactgaatctaagtttcacagttttaatattttagcatttctaaaattggatagaggtcttacaatatatcgtctttggccaggcatggtgggtcatgcctgtaatctcagcactttgggaggctaagacaggaggatggcttgaggccaggagctcgagactagcctggtcaatacagtgagaccttgtctctacaaaa

SEQ ID NO: 105949 - DNA, 379 bp, Homo sapiens
ggacagttaataactatgtctgatgagtttagttgtgaaattaagccacactgacataaggagccaatcgaaaggacaccatctagtctatgtgcaattctgtagagaaatcctagtagttggaattcacagtttagcagagtatcattaaacacccatcttttgggctgggtgcaatggctcacacctgtaatcccagcactttgggaggcagaggcgggcggatcacttaaggtcaggagtttgacaccagcctggccaacatggtgaaacctcatttctactaaaaatgcaaaaactagccaggcatggtggtgtgtgcctgtaatcccagctacttgggaggctgagacaggagaactgcaagagcctgggaggt

SEQ ID NO: 105950 - DNA, 403 bp, Homo sapiens
aagttttctgaccttgtaagacgtagggtgtatgggcctagatgtttgtgatacctgtatctgatatcacaaatacaacattttaagaaatctaaaagtaaatatgcctttagataattttcagtatgtggcatttgggaatgttatatactttttttttttttttgagacagagttttgctcttgttgcccgggctggagtgtgatggcgcgatcttggctcgctgcatcctccacctcatgggttcaagcgattgtcttggctcagcctcctgagtagctgggattacaggtgcctgccaccacgcctggctgatttttttgtgcttttagtagagacagggtttcaccatgttggccaggctggtctcgaactcctgacctcaggtgatctgcccatctc

SEQ ID NO: 105951 - DNA, 279 bp, Homo sapiens
gactctcaacgtccggagcactagctggctgaggaccacacggtccgctgcagtagaaagctgtctctctgctctaaagatgagcgctgacatggcagggcggggccacacctacagattatcaagacctcaggagttcgggtttttaaaagtggaaattcccccaattaaaaaaaatggcatatatttcaattaaaatactgcatgggccaaagaaaacacaacggccagccagacctggttcctgtgccactgctttgctgtctgtgatggtgaata

SEQ ID NO: 105952 - DNA, 432 bp, Homo sapiens
agctgttcccagcaatggggatcagtcaccaactcctcccacctcctccttctcatgcttcactcttctgcaccaccccccgcccaattttatagtcttctcaagtttaaagacttcccttgacatgcataaaaccaaatttctcttctggggaccagtgaacacatattctgatttttttctagttcctcgccttaccccattctcaggaaagcccagttacttcgtgagttcagagcacttccttgctggggcgcctgctaagtggggtgagtttcactggagcacccctcccaacttttgggaaagagttcactctcaccaacccatactttctgcctttccttctctgggattgtcttacctctggaaatccttcagggacttctagggaatggctatgtcaatggggctggtaaaaagcagctgtgg

SEQ ID NO: 105953 - DNA, 720 bp, Homo sapiens
ccagctgttacttcctcctcttcaaataagccatacagaataaaggaaaaatctacagaatattggcaattgggatgaccgttggcctctaccttgcctagagaggaaagaaaggcccaaggaccttgagatttcatgtgcagcagcatctgatgggccggttaccttctttgccctgcacattttctctattcctctccccacagctctctgccctgagaggttgacctggatgagctgcacccacaagctcatttgtcctcaggtttccagttgagttccaccaatgggaggcaccatcaggagatgcagacttcaagaagagtgaagctgggatgtttacttccccaactcgctctaccgagctgcgtgtgagctggctgggtacttcggtgaagtttgcagctcccatcggcgcccttttctacatcagcctccgtagctgcccaactttcttttgccattgcagccagttgagtggcaaaactggccccctcaatattttactgttccttgttggcttcattttagcctgtccacacttttgtcaattaccttttctttaaactctcaatcacctatttgaacatgccaccggggatgctgctttgatcctgcctgacaaccttggtttctagtttaatattttctcctctcccctccgccccacactatgctgggttgaagcataaaggaaataaaagattgccttcatggaaa

SEQ ID NO: 105954 - DNA, 260 bp, Homo sapiens
aaaattagtcaccatttactcttcaagcctttcccggaaatttctaagccttcagtacactctagagttccaaaataattaagcagacagattctgccagtacaactgttatctggtaaagggacagatttctggtgcttccttctccatcatctttctagaatcctcccattcttctcttagctttactaaattcttgttcttgttgaattcttaattacatatttatagactccttccttacagctgatgtcttctgt

SEQ ID NO: 105955 - DNA, 287 bp, Homo sapiens
ggagagaggaggggcacaaaggctgaaaaattattgttgggtactatgctcacaacttgaatgacaggatcattgctacctcaaaccttggcatcacaccatatactaatgtaacaaacttgctcattgacccccgattctaaaatttaaaaagatgaaaaagaaagatagtggttgattgtagaattctgtttctgtgtaaatcctgctctgccactttgctagctgtgtgactttgggaaaataattaatctctctatcccttcatcatcaaataaaatgaagac

SEQ ID NO: 105956 - DNA, 415 bp, Homo sapiens
ttcatataagcaggatttttatttgttaagaactgtatgactttgaaactctgtagtctatcttttagagaacttgttatatatgtaaatgaatgccaactgttcaagatttttccgttactggggtggaatttttgtatacgttttggggcaggcaaagtttgagtattatcatctgatgtaatgtgttaggcatgagatttaacattcttggataaattgaaataataccaagaaaatctaaatcagtgataaaatccctacataggtgctgatatttatgttatgttactagaagtgcttattttacaatgctatgatatgtgtttgtgtgtttctcaaaatatataacacttggatatattaggttgctagcattatctgttaattgacatgcagaaacaaatcctaaatt

SEQ ID NO: 105957 - DNA, 415 bp, Homo sapiens
aaactgcctcattcatctttgtatcgttaaggcctagcacatacccacctagtaacaatagaatcaatatgaagcctccaaaataattgggttggaggacagtagtttttatattaaatgtactcatacccacacataaaatagaatactaaggctcattacttagtttcatatttaatttttttcttaattgtatagccatgcatatgttgctgcactataaactaatcataggagtatatagcattgtatctgaagccatcaggtgagactgaggaggaacactttaaggtcctttgccttttcactgtcctttccctccttcccttggtctccccttttctctcctttttccattccttccctcatttcacttgtctagttagtaattttcatacttaatgagcagcttctg

SEQ ID NO: 105958 - DNA, 138 bp, Homo sapiens
gagactgcgacactgcacttcagcctgggcaactaagcaagactctgtctcaaaaaaacaaaacaaaacaaaaaacaaatcaatggcaaagaagccactggggtttcctagttctgacttcggagggtctggcagccg

SEQ ID NO: 105959 - DNA, 379 bp, Homo sapiens
tgtgaaggaggagctaatttcagccctaaaccatagtttctctgactgcccaaggctgtaggcagataaatgtccctctttcaccaggaatctttcaagcaacttggagaaataaaaggtttggtgaggcagctgcttctaatacctataccccagctttgaaaacatatggaattagaacagcagttcttgactggcggtgactttgccccccgccccgcccaggagacatttggcaatgtcaggagacattttcagttgtcacactgggagagagtgtatgtgtgtgtgttactggcatctagtgggtaggggccagggatgctgtaaacatcctaccatgcacaggacagccccctccaccagcacagtggaaaat

SEQ ID NO: 105960 - DNA, 231 bp, Homo sapiens
cctcctttctccgctttgtcccatggaaccctctttcacccagggttcctcctcagcacctcatccacccgtgtgtcccacggagctctcttcctccacctggggttcatcctgagctcctcctcctcctatgtgtcatcctcagagctcctcctccctcgtgagtgtcccatggggctcctcctccccccatgtgtcatcctcagacactccttcacctgtgtgccccat

SEQ ID NO: 105961 - DNA, 391 bp, Homo sapiens
gttctgggggtcatggcccatctgcttggctgtgagccagactccaaggatactgttgctttcactttcctttttacctgtcctctctctttcagctcaggaaaattggattaaccgtgttctcatgtgttttgttggtcacatgccattgctattttctgccaagcaaaaaaataattacaaaaccttaagctgttactgcccccttttaatcacttttctcttgctttaatttctttcaccaccaaattgctttgaagagtccaagtcctaacccctttctccaaccctatcctaatttccctggccagagaaatatcatttttttctgaattgacatgagaatctgcatgtgctcctctgcctcatatgagtgttgcccatcttggtc

SEQ ID NO: 105962 - DNA, 170 bp, Homo sapiens
catgtaaattttatagtaatcttacctatatctgcaaaaacattttgctaggattttgatggaaattgattggtaaacctgttaatttggggagaattttgacatctttgctatgttgaattttttctattccatgaacactatgcctctccttttatttaaaattttta

SEQ ID NO: 105963 - DNA, 442 bp, Homo sapiens
aatggtagcgtaatacctaccatctatgtcttggaagatttcccatttggtaaataaaagaacttcgtctttttgatggacgttcgggctatttccagttctttcggcagtgtttctaggcggtcatttagcccaaggctccccaatctttttcacatcttgacattgactcaattcactcacgctgaggagcctgcctccaagggctgctgttaccccaatccctagctcctgtcccctccaccacccctacagccccataccactctaggcctggaaggattgttatctgggcacacatggaacttgttcatgttacacccgcacaccaaaatacaccagttatgaagctctgagttagccagtaagtacttgttaagggttcattaatgagcccagaactgccctctgaattggtagggaaattgcaaaagattgaaac

SEQ ID NO: 105964 - DNA, 277 bp, Homo sapiens
gtgcctcgctgtggagtttttatctattgtcctgggtcctagagggcccattcatcctcaacacacatgtccttcagtttaagaaaattatcttaaattatttctttccccactttttttttctgttcctatttttggaacttctattctttgaatattggacctgatcttctaattttcttctttttctattcattgtctactttctgggagaattcctccactttatcttctaaactttctactgagtttaccatatctgcttccatgcttggaa

SEQ ID NO: 105965 - DNA, 367 bp, Homo sapiens
aggacacaggaggcagagccgtgaggcctggtcagagcaggtggagtgctagtgtggagactgcagggagagaccacccgagccatcagctgaggactgtggcggcccagcaggagtaacactgttgaggagaacccagcccaagcctgaggaggctggaggtgccatacggctcctgcgtgcgcctggtgtcttgcccacgctcaccgctttcttggtcagggcagtcccggctgcagcctctcactcatcacattctcatctctcatctgtctgatgttcccacctccctgtccagccccagggttaggtgagagcagctactcagtcctggccactgtcccctcccctctgcaggatgacatgc

SEQ ID NO: 105966 - DNA, 424 bp, Homo sapiens
tataaactgggtttgggaaagaataatatggcagtcgggtcagattcactgtatctaaagatcttgctcctaattccgatggcatgtctgtaattgggcccccaatttcaaatttagtccactcttcttttctatacaaggagaggctttatgctccacctgctacatgacccaaatcaataatccaatgcagcagcttggggaaccctaggttttcactatgggaccaaataaactcagaatacttttgagaacttcaatcacatgaaataattatttcagagaaggatccttgtggaaagaccgtaacaggaagagcattctgaggtaacctttcccaactttctcctccacacattcttgcagaggaaattaagagagagaaaaaaattaagaaatcccaacttagtccggactctagtag

SEQ ID NO: 105967 - DNA, 706 bp, Homo sapiens
cacggtggctcatgcctgtaatcccagcactttgggaagccaaggcgggcagaccatgaggtcaggagattgagaccatcctggccaacatggtgaaaccctgtctctactaaaaatacaaaaatgagctgggtgtggtggcgcatgcctgtagtcccaggtacttgagaggctaaggcaggaaaatcgcttgaacccaggaggcagagattgcagtgagccaagatcgtgccagtgcattccagcctgggcgacagagcgagactccgtctcaaacaacaacaacaacaacaacaacaacaaaaaccaaaaacctgtattgccgcagtcatttagatggaaatggggaaagaataatattaataactgatttcaaaaaggacttgaagatatgaatcatctattttgctgaagaaatcgtaactctttgaaattactttctattgctgttgtcatactcttaggtgccaaactgcattaaattttttatcaatgaagtggaagcatgtgttttgtcgttttgggaatttttatcaagtatcttcagagaagattatttcctgctttatcttcaaaaactggaaaggaagggtcaaagaaaagacagtagctggccgggcatggtggttcatacctgtaatcccaacactttgggaggctgaggtgggcgggtcacctgaggttgggagtttaagaccagcctgac

SEQ ID NO: 105968 - DNA, 367 bp, Homo sapiens
agaataactatcacacaccacagaggaataagaggttgaatatgttcaatttctgtctgactattggaagcctcaggtcatcacttcttggaggcagtcctgagtagatgcaatagacactaaggcaaatattatgtgtaccatatgacagttaattcttggaatagctctggaaagtagacattatatgaccattattttactgaagacaatgctacagcaaggatgatttagtgacttatttagggcctcacagtaacagaacctggattgaaattaagtttggtctgagtcaaagtctgctttcttttcattccattacactggataggcttgagagtatattgcagagagaatatggcatttg

SEQ ID NO: 105969 - DNA, 441 bp, Homo sapiens
taatgtagacccagccaatagagtttaagtgatgtgaacaactttcaggaaatatcctctgaggaggtgtgtttgatttgctgccccttctcccttttttgctgcttggaatgcagacatgatggctgcaagtcatcttggaccacaagttagaagacgcaaattgaatatgcactggactacctactttacatgagaataagagacttctaactcattcaagctccttttattttgagtattgaatctaatcctaatttttttgtttctacccccatgtaacctttgcttctttgcataggaaactagataatggacttactaggagaagacaaaatttaatggcctttttttccctagtatataacaaactacttgacacataagagttgccacaaaaagtgtcttttttttttaacttggttaaatataaatatcacc

SEQ ID NO: 105970 - DNA, 339 bp, Homo sapiens
agaaggttaaggctgcggtgagccttgattatgccactgctctccagcctggcaacagaatgagactctatttttttttcttttaaaaagactttttacaaaaggcaaaatgataatggaactaaaaatgtacgttgactgacttaactccaactgcttcttccctcaattgaaaccacctttgcaaaaattataacagtgagaaaattatggcagtaggggtgatctgatcaagccaaaccccatcttgcctttagccttcaagctgcccataattattcctgggcttaggccaagctaactttgggagacacttggtctatagtttaaatgataata

SEQ ID NO: 105971 - DNA, 379 bp, Homo sapiens
ttttttttgagataggatcttgctctgttgcctaggctggtgtgcagtggcaggatcagggctcactgcagcctcaacttcctaggctcaagccatcctcccacctcagcctctggagtagctgggactacaggtgtgagccacctcacctggctaatttttcgtattttttgttgtaacagggttttgccatgttgcccaggttggtctaaaactcctgggctcaagggatccccccacctcggcctcccaaactgctgggattacaggcatgagccactgtgcctggtgcactttctaggttttaataaatagtagtgtaatagagggtgccgcttgaccatccacatggcttgaacttttcgctgtgcccagcaca

SEQ ID NO: 105972 - DNA, 384 bp, Homo sapiens
agcagggcagtaaaatcttaaagctccaaaatgatctcctttgactccatgtctcacatacaggtaatgcaagaggtaggtacttagcattgagcataagtacacttttgtggcacctggggttgtataatgtaagcatctaggtcatgttttaagctttaattataaatgctttcaatccacaagctattttctcttcatagcaaaatctcctttgactccatgtctcacatccaggtaacgatgatgcaagagcagctctgctcctgtggctttgcagggtacagcctccctcctggctgctttcaggggctggtgttaagtgtctgcagcttttccaggtgcacagtgaaagctgtcagtggatctgccattctcaggtct

SEQ ID NO: 105973 - DNA, 394 bp, Homo sapiens
acaatactgaatgtgtcccaccactacctctatcatcattcacctggtttgagcctctcgcacaaggatatccatacccccaggggacagatggaagccaggggtacaggaagccacctcaggataaacccagaacactctgaggatcaaatgtactcaggggcaagaaatgtaaatcattgtcttaaaacaaacaaggctacattatggagtcaaatgcaaaatgcaagtgaaatcgtaagataaaaagagaggcttcaaggcctgcatggtggcttatgcttgtaatcccagcactttgggaggccgagacagggagattgcttgaggccaggagttcgagacaagcctgtccaacaatgtgaagcttcgactctactaagaaaatacaaaa

SEQ ID NO: 105974 - DNA, 473 bp, Homo sapiens
ccgtgtagccaggatgtcttgatctcctgacctcgtgatccacccgcttcggctcccaaagtgctgggattacaggcgtgagcaccggccggcgagaactgttttagaccttataattttagtatgaaagtagtccattttgactggaaatcttattcccgtatgagctgatttttaaatagataccaagtttggcataaactcttacaagtacatcagtattggagctggattgctttttacttttttttttgagagagtctcgctctgtcacccaggctggggggcagtggcatgatctcaactaccacaacctctgtctccgggtctcaagccatcctcccacctcaccctcccaagtagctgatattacaggcgtgtaccaccatgcctggctaatattcgtatttgtatttttttatagatatgggggggggtcttcctatattgcccaggctggtcttgaactcctg

SEQ ID NO: 105975 - DNA, 228 bp, Homo sapiens
cagagtgagaccttgtctccaaaaaaaaaagtttgtttttttttatccactctcctcaccaaacaaactgagtaagttagagccctctcagctggcatgtgttggaaacagtgccctctcattaaagtgctgccctcactcccattgcctcttggccttggtcagtatgatgaaattagtgggaggcagggcaacagagggcagggaagagctagaaatccatggcct

SEQ ID NO: 105976 - DNA, 432 bp, Homo sapiens
cctctgacagactaaaagctgaatccgcttatttcgaactctgccttgaggcgggatgccccgtgcattatggttaactaggacctgctaaccatcggcttatcaaacaaatcaatttcactcttcagctaatttggaaatgaaaattatagaagttagaaaaaatgtgcagaaaaagtattattccaatgtattattccatttgtttcatagagatcctggcttcacaggaaagagccaagggcatgggttttgctgagggcgtaagagcttggggaaggtgagggctaggtgtgtacgggtgccctgatgtcctcttagcctgctggtgaggaaagtgcatgtttaataaatgggctccagccaactgtgtgcagttatttgtagcctgcataattttaaaaatgtggttgagcatttaggtctatcttc

SEQ ID NO: 105977 - DNA, 329 bp, Homo sapiens
tgtggatttttagaaaagactgtgtattggttaatttattttgaggacatcagcaaatttctatttagaacttagtgtctttattgcttttggaaagaataaattctgtgatgtgataatcattaactgagtaggggattttaaagacattttgggtttttaaaaatactctttaagacagaacctcctctgccctgaaacaaataagtgcttaggtgagtacttgctagtattggttatttttaataagatctcagtttgaggagttggagtaggaagaaatcccttccagtatgctttgcagtcttttgcttactaacttacttgcc

SEQ ID NO: 105978 - DNA, 310 bp, Homo sapiens
tggtggccagccaggcgtggtggttgtcgaatctgtggcacctgtgggaagtgggctcagcccagggactgcctttggatcccccagcattggcaccatacctaccctgggccctaaggtggccatgcttctctggatttgcttccctagcaggggctctagtgcttgcccactccctgcccacagcatggcctgggagcagctgagactgggggccagctcatcccgcgtcgattcctggaagtgttatcagtgcctgttatggaggctggacccatgagtggcagccttccctggcagctgggctgac

SEQ ID NO: 105979 - DNA, 284 bp, Homo sapiens
tgctgggattacaggtgtttttctttaagtaatacttggtataagagaactttatatctggaataatttaaatattatctgaccgaatctattattcacatatagaaactcaggttttagccatttaacatctaaagctgttctcatttagaggaaattaccaaaagagtgacttatttaactaacaataaaatctaaggatagatattttttcattctgttgcagagcaaaagcagccttctggatatgaaaagatattacttctttagtgtttattacttat

SEQ ID NO: 105980 - DNA, 839 bp, Homo sapiens
gaaagggtttttaacttggagagaaaactgaagggaatgtgcttgtgttagatgaccagttaaggtgtaccacttagattggaggagggatagcaggaattctaggacttctacccagtttctcatgaaactgacttggacatggtccttttttgcaaagggtttctgtttgcatttttctaggctttctgctggcttgattggtaagactatcactgttggaaatgggtggttcattggacattgtcagtaaaccaaaatgatttttttttctctttttgtagaaagaatctttaaaatgtataagtactacctacactactcctccaggaatattatctcattattgtgaaggaaataagtccttttctccagtaaggttggctaagtccatactagtttttctcacagatgtatgtcattggaccacatttacagtcagtatttgcctaaactgtatgatgactacaaggtctatagcatttagagtaataagatattctaataataccaaatttgaaaagagggttgctcttggaagaaaaagggtgtccaagagcaaagtttgcatactgttactttggataaagctttagcttaccaccagtgagagagacttgactgctgtccctcatttggtcttgaagtcctctcaggactccttttagattattctgaaggagttaaaacagatgtgtggttaccaggggctgggagggggtatggagagtgactgctaatggctacagggttcctttttggggtaatgaaaatgttctagaattagatagtagcgatggttgcacaactttgtgagtatacaagaaaccactgaattg

SEQ ID NO: 105981 - DNA, 341 bp, Homo sapiens
tgctcgctcgcacagtcctttatggaggttaactacaaaataagttccagtgagtgatcgggaacaggcatgtgtgtaatactgtaatgccaacgacggcataattcttgaaaagttcatttgcagaaaattctctgacttgatgaggcaaagtttggccccctgaatcattctgccacggtgtgcggcatctgcagagttgctctcaagtttacaatcctcgcacttttgaacttgcttcagctgcagtccattaaaaactgaaagcgccattccctggtacccaagctggggtttactgttcgggaagtcatgggaaagtggttttatggcgggactcg

SEQ ID NO: 105982 - DNA, 390 bp, Homo sapiens
caaattttcatggccttgcattaggaaatggattctttgatatggtaccaaaagaacaaaaaagaaatgaaaaattgatatattggacttaatcaaaattaaaaacttgtactatcaagaaagtgaaaagatgtccgggcatggtggctcacgcctgtaatcccaacactttgggaggccgaggcgggtgaactgcctgagctccagagttcaagaccagtctggccaacatggtgaaaccctgtctccactaaaaaaaaaaaatacaaaaaattacccaaacatggtggtacatgcctataatcctagctacttgggtggctaaggcaggagaatcgcttgaaccctggaggcggaagttgcagtgagcggaaatcgcaccactgcact

SEQ ID NO: 105983 - DNA, 382 bp, Homo sapiens
tcctcttcttctggcttaggtgtgtaaacttgagactagatatgaaacagtaatattacaatcatgaaacgacaagcacgataatgacattttaaaggtactgcattagaaatgaactgcatacttccaagacttattgttaagagaacaaaagacagcccacactagttaaggcactaaagttagactactgcaaccttgtagcagaacataattctaatatgatactgtcattacccatcactacacttcaaaaataaaaccttttgccattctaaggtggaatatcttcagttacacacacacaccccctttcaaatcaactttctttaaccataacacatttaatgttgacctcatttaaactatttttgcataaaat

SEQ ID NO: 105984 - DNA, 372 bp, Homo sapiens
gcattaaggggagacctgtcctaagtatttctgtgtgctttccagttaaaggtgttcctaaaccttaaatgcttcttgaaagagaaatagctgccttgagtttagcaccactgcttccatctgttttgagtactagctacctttctagtgtctacataattttgcaggtttcctgttctacagttgttgcccttttaggcactccggtgatgtggtttaaagtaggtgcttcacagtcagaaagatacagttttttccaccctgagcatctccacaatgtccgtgggcaaatagtttaaaccgtctgttccctaccttctacagctgtaaaattgcggtaataagagtatttttctcattgatttatcatgc

SEQ ID NO: 105985 - DNA, 362 bp, Homo sapiens
agattgggtctcatcatgtgtccagactggtctcaaactgctgggctcaagtgattctcccaccttagcctcccaaagtgctgggattacaggtgtgagtcaccatgcctcgccagtccccaggtttaaaaaaaattctccctttgaagttgtaggaaacttagaatgtgtatgaaacaggattttctatcacattaatttaaagtctctctttagagtatgttacccaacgtattttcctttcctgtatttgagtgttacagtataatcattagtgttttcagtatgttttgtctaattatcctatttgtagttttttttctcgtgaaaaacatcctgagtagtactttttgaacattctg

SEQ ID NO: 105986 - DNA, 363 bp, Homo sapiens
ctataccctataacctaggtgtgtacagcctaggatataccatcaaagtttgcgtaagtacgctctatgatattcctcaggaacaaaattacctaccaatgaatttctcagaagatgtctcagtcactaagtgatgtatgactatgtatgactacatagattagaaaactaaggtctcatgttaaaagatggtattcaatcccaacctgactgtgctcatccactactctagttctaacctgtgaagaacttgggacatttcaggaagagagatactttagatggatttaaaagacaagtaaacaaagaagagctagaatagtgaccaggtgagcaaaaaagagtttaaataatatgactcat

SEQ ID NO: 105987 - DNA, 322 bp, Homo sapiens
cccttactcctggagcggggggagactaacccctctcctgtgtccacaactgtagtaacacaatcctcggttctgctctccaaacttcaaataaggggtcagagccaagggtcaagactttaggaaaagccccggaaataccctgcactcaaaaagcagtttcagagtttcacattttcctgagaattaaacaaattatcctccaaattctgctgcttgttttgaattatggttatactggcaatgttatccaacccttgagttgtttttcttttctttttttttttttcctcgagagagtgtcttgctctgtcacccaggc

SEQ ID NO: 105988 - DNA, 420 bp, Homo sapiens
attcaatgctaaaggggccaatctgccaggaatttaactacctgcatgaacaaaactcaatgctctttaatccagactccctatagtatatcgatcataatgttcaacatagtaaaacaattactagatacacaaggaaacaataaaatgtgacctgtaatcaaaggagggaaatggcaacagaaatagaccctgaaatgatccagattttggaattagtaaacaacaactatgaagcacctattataatatgtcaaggagttaaagaaaaatatggttataacaagtagatgtgagtttaggagcgagataggtaatatcaaaaagaaccaaatagaacttctcaaactgaaaaggtaatacctgaaatgaaaaataaattagatatcattaatagcagatactttccattgatttatt

SEQ ID NO: 105989 - DNA, 671 bp, Homo sapiens
aatagcaataaaaaggttaagaacaataaaaaataaaaattttaatgaacatactaaatgtgtaggaaggatcagcattaagttcatatagcataacctattatatctttgattagacaatttacaaaaggaatccagtgaccaaaaatgagagggaaaaaatgcagtgtttcaaatggcttatctaagagtgtatttaggtacctgctttgtaaaggttttatgtggattgaaaagttaatgtgtttatatagtagttatgtatgtaattatgtatatagagcatttttcatatattattaatgggtattatatgatactatacagaaactaaagcgaaaaccagaaatttatataggacgtatagatggaataaagtctaacagttttcctaacctattgatactgcttatacatgtaagcaagtaaatattttagaatttatttccatgctatgaatagaatgctggttagtgcatttcaaagtggctcaagaaaattcctctgagcttatcaagaactgaaatgcaaatgtatgtaattcccagtacaaatggaggtgtacaccccaaactgccagtcagaactcatgcagctgagtcaaaaggccatgaggtagctgtgtagtctttgaattaagataaaacctgttacacctaactccataatct

SEQ ID NO: 105990 - DNA, 394 bp, Homo sapiens
gtttcaccctgttggccaggctggtctcaaactcctgacctcaggtgatctgcctgcctcggcctcccagagtgctgggattacggtcatgagccatggcgcatggcctatacagtattcttattggcttaggtcttttaactgggttattactgcttcataattggtctccctgcttccagtttcttccatccatatcttccaacctgaccccaaaagtaattctttcctctttaaaaaaaaaaaaattataaatacattattttagtccaggggcagtggtttacacctgtaatcccagcactttgggaggccaaggcggctggatcacttgaggtcaagagttcaagaccagcctggccaacatggtgaaaccccgtctctactaaaaata

SEQ ID NO: 105991 - DNA, 406 bp, Homo sapiens
tttccagctgagggcttggccccagagtttcctccactggggcagggtcttcttgtctcctgctgcgctttcccttccagttgtactcatgcccccctactcattcttatctccatctctagtcccctccccatcatccccctcacccgtacccccctccttctgtccttggattatcagtgaagtgaggggggttgggctccagagcttgctgctgtgacctagatttcaaggcagagacagttcctggtgctgacagtcagagagcattgttcctggcccggcctggcagggccactgctgggcccttctgtctggttgcacctgggtgtgcaactgagcatgcctatgactgcctgtttcttgcgggggtcatggtagccctcctgtctggctcattgtctgc

SEQ ID NO: 105992 - DNA, 615 bp, Homo sapiens
ttcatgccattctcctgcctcagcctcccgagtaggtgggactacaggtgcccgccaccgcgcctagctaactttttgtatttttagtagagatggggtttcaccatgttagccaggatggtctcgatctcctgacttcgtgatctgcctgccttggcctcccaaagtgctgggattacaggcatgagccactgcacccggcctagaacttcattcttaaagccttttacgtgaaccagaaatataatgaacttgagaaatagttaaactagcaggcagtgattaggttttatgatatcattttaattttactccttacagttagtaggaagactgaattgaggagaattttctccctcctttacatggtcctttgccctatagctaaatgagagtctgattagcaggctaactaaataatatattaacctttttggatcttcatccaagaagtttacaaagcatgactaaaatgaagtcttttgtgcaggtttgaagaaccctaatatttatgacttttagacaagaaaatcactaggatatcacactgtttcttcttttaagtacatgaacttaatagtctattctctgtatttaacatctagtcttaggaaa

SEQ ID NO: 105993 - DNA, 637 bp, Homo sapiens
ggaacatgaagtgggtgaggtatacagacttctgatggtccatcctgagccacaggaagaatggatacaatttaaaggagtggatatactgctcatccttcaaactattgtgactgggctttggtaaaagctcagcaagaaatgaagagtagacagagtctcacacctgtaatcccagcagtttgggaggccgaggcaggcagatcacctgaggtcaggagtttgagaccagcctggccaacatggtgaaaccccgtctctactaaaaatacataattaactgggcgtggtggctcatgcctgtaacctcagctacttgggaggctgaggcaggagaaccacttgaacccaggaggcggaggttatggtgagatgagatcgcgccattgcactccggcctgggcaacaagagtgaaactctgtctccaaaaaaaaaaaaaagagtagacagagtgaggtagaagtctctggagagaacccaaaggttatatactctgtactactggctgaggatggacctacaaaaattgaatatcatccaagcacagtattgctgaggtcctttcatgaaaatttgaggcctcgttaaaggctgtcccacatcagcatagatgagggccccattaataaaaggcca

SEQ ID NO: 105994 - DNA, 199 bp, Homo sapiens
atcggttgagtggggatgctgctagtgtgtctgcacaggtttcttgaggggacttgatgcttcccacaaatgacagtagggatgtggccaccgtaaagtggtgctgtgcttcgcagcactgcgtgatctgacccacgcttacgtttcaaagccattgaaacagattcaagatcatgtattgatttaaaaaatttactct

SEQ ID NO: 105995 - DNA, 367 bp, Homo sapiens
cagagcaagactccatctcgagggaaaaaaaaaaaaaggctcttcagcgcttctgttggcctgtgtgtagtttggccactgtctgggaataccttgtaccaattgctgtctgttaaaaggatgaaagatacaatgttcggagacagaccctgggtgacaatgctcttagtcttttccatatctaggaggctgccgtaagtttgataattgaaagattccaacctgaaacagctcagtgtttttccccaagcacaagaacattaagtcctgaccttgtgcctttctatgactcaacacagagagagccttgcgtcctttcttttggttgtcgtgctgagtctatgatcttttcgaggtcatagcagta

SEQ ID NO: 105996 - DNA, 362 bp, Homo sapiens
agaacatcctctcaagtttcctcaggttgtcagctgagttcagttccttgtgactgtaggactgagatctctgttttcttgctggctgtcagccaggggcctctcgctgctcctagaggcctcccatgttcccactgcatgcttcctccagccagcagaggaggatcgccctgcatggaaaccctcctgcacttcacatctctccaggaagtcctcagtccctccaaggaactcaccttcactaggtcaagctcatcagataatctgtctatcttaaatttgaccgatttgggatctcgattacatctgttaacttgtttttgccataaattgtaacacaatcgcaggagtgacatctcctc

SEQ ID NO: 105997 - DNA, 420 bp, Homo sapiens
tcaagttctgatggccagaagcatcatgtggccccacctcgaggagggggccaagaggaagaaggatgcagagtggggcagtacagtcacctctgtcacagtccctgattatgttgtttattgtccgagccccgactccggatggaaagtgagccccatgaaggcagggacatctgtctgttttgttcgctgagatatcccagcacctagacgtaggcccggctcatgggacgagcttcatcaatatttgctggatgactgagtgacaggtgggacacccctcgtccctgctgctctctcctctcctgtctcaaagacttcatttgcacatggcagtgttccacataaaatgccagcagacagtgtgcctgaggcctgaactcttccctgtaaggaattctgcctctatgctacagctca

SEQ ID NO: 105998 - DNA, 151 bp, Homo sapiens
attttatccaattctttagtctcttaagatgtttagaccgctcacatttaatgggatagttggatttaaatctaccattttgttctttctttgcattctctttgtcccacctcttttattcttctttccttatctttttggttacttattt

SEQ ID NO: 105999 - DNA, 104 bp, Homo sapiens
atgggagctggttaggggaggtgggatagaggaagagagcagttagtttggttttcctctttagccagcccattgtgggctcctcttagcaatttatgggcagt

SEQ ID NO: 106000 - DNA, 288 bp, Homo sapiens
tgtgcctggccccactgcagtaaatttgcacattcttcaccctctcagaggtggctgtgtgaatgtctgcagtcctgtctctagtagcctgtctttaaagccctgataagtgtgcacacacacatgcatgcacacagatactgtttttgctatttttcttgaattacagggatagtgtctctgcttgctttgagcactcacttctggaatctccctgggtctgggaggggcagtctgtaagtgtgatttaggaaaagacccatctcttccctccttttttttccttca

SEQ ID NO: 106001 - DNA, 704 bp, Homo sapiens
attggcttggtctgaattgggtgtgtatgtacccagtgaatttaactttgtatctctttatattgtccttctgagaatcatttaggatctttacgaggttaaacagcaaaaaagctgcctaaatttaatgtggtaagctgagccttctatatgctaccttcccttcaaacaattgtgaaagacttttcttcttaaaaatgaacttgttcctttgttaaaataaaatgagaccaggtgtggtggctcacacctgtaatcccagcactttgggaggctgagccagaaggatctctggaggccaggagtttgaggccagcccgggcaacatagtgagaccctgtttctacaaaagaaaataagaaaattcactaagatgatggcatgtgcctgtagttctagctacttgacaggctgaggtgggaggatcactggtgcccaggagttagaggctacattgagctgtgatccccccactgtactccagcctgggtgacagggcgagactgtctctaaaaaaataaaaataatgataataaaatgaaacatatgattgcatttaaaaatagcatgaagttcaaaaccatcaaaaaatagtgatagcaaggacatgaggaggcacctggggtgctcgctgttttctattattcatctgtggaatggtcacatgggtatatatatttagtgaaaattttatcttgctatat

SEQ ID NO: 106002 - DNA, 634 bp, Homo sapiens
taacaaaaatttgttgagcacattttatatttgtcaaatttcttaattgtaaactggaaaatctgctctagctattttaagaagcatggtttattaaacataaagaatctcaagaaaagtcagaaaactgggtttggctgctacacagagcaaccaggagacacacctaaccacaccactaaactgctctgcaaagtactactgtatagccacatggcactggattccagaaacttccctgcaactgcctcagaagaaccagatgcctctgccaccatgccccccgcagatctgatgttcctccttatggctaccacctctcactgctcacctccaaaccccacatagggctgtctgcttggtggagctacatcttaagcaaaacatgaccttcaagacaactaggaaaagtaatttcataggaagtcaaactagaatgagggctgccacgagaactgagggagacagctttgtttctgccatgttagcaagtgctgagcactgttctccgcagtgggggtcgagctatgaagaagagagacaacgtctctggccttgcagagcagaaagcctagaggggaagcagataacaaataagtacctaaatataattttaaatagtgataagtagtat

SEQ ID NO: 106003 - DNA, 176 bp, Homo sapiens
gtccattattgggcgaaggtcactgcagactcagggaggcccaggagctcaccccaaccagcttctttaccaggtgagtgacctcagccctgcagctggactcatggagacaatgacctcacccgaagatagatgacccctgtccaccgtccacacaacaactgaactggccccag

SEQ ID NO: 106004 - DNA, 420 bp, Homo sapiens
tttttttttttgaggagtctcactctgtccctcaggctggagtgcagtggcatgatctggactcactgcagcctccgcctcccaggttcaagtgactctcctgcctcaggttcctgagtagctggaattacaggcgtgcaccaccacacccagctaatttttgtatttttagtagaggcagtgtctcatcatgttggccaggctggtcatgacctcaaatgatccgcccacctcggcctcccaaagtgctgagattacaggcgtgagccactgcgcctggccatgttaagcatttcttaatgtgctgaaataatcactgcctgcttcaaaacgtagctcaaaaaaaatccacatttttcttcagatcctcaaaaaaaagctttaaccctttctatctacttttttaactgttcagattac

SEQ ID NO: 106005 - DNA, 345 bp, Homo sapiens
aagtgagtatgatgagtcttctaagccaggcagatagcaaaaaaattaggaaagtaaatggattgcacaggaagaattaactgggatttaaataatcaaagacagaaaggatatataaaagaagtgacgaaggagatttaccctattagactccagtgtattaatctaggacagtttggttgctatggggaagcagtgtgcaaaaacttaagaggcacacaaaagactgatgtttattttgtgggagtgaatctttttttaggaaggaaatagcactattgtggtaacagtgattcattttctcctcctatcttctctttacagagaagacccaaatagtgaact

SEQ ID NO: 106006 - DNA, 152 bp, Homo sapiens
ccgaaatgttatgcctcgaagagaacttccaagacaacactaaccaactaatgtaacggtgcagtaacggtgagctctacgtaatgtttatcaccctttcggtaaatagtggtcccacggctcggcctgcttttggaatgaagctacgcttg

SEQ ID NO: 106007 - DNA, 504 bp, Homo sapiens
ggagtagcctatttaaatatataactcatagattaaaaagtttgtgttatctaggaccatttacttcctttgtaccaaacactgtaataagcattatgtatgtacttccttatttactacttacaaacttaagaagtcgctacctaatactccattttacacatgaccaaactgagactcagaaagataacaagtccaaaatcacagagttcttaagtagccgtgctggattcaaatccaaaatagtctgactcaagaactgccagataagaagtgttaacaggtgctgggaatggagcccctggttgttactctgtattttccaatacgaggacatcatagatccagtaacacgccagcagcaaacaggtgaaataaacttctcccaggatatctggatcttttaaaaagcagacacttaaaaattttacttctattctattgcagaacctactcatctgtaatccactgacccaagttgcgacctgatagaacacaactatc

SEQ ID NO: 106008 - DNA, 96 bp, Homo sapiens
ttatctacactccaccatggccctcttttaatctagttaaagcaactgcttctcccacgttgattaaatccttgaatctagaaatgtggttaaggc

SEQ ID NO: 106009 - DNA, 230 bp, Homo sapiens
tgcaggcactagtgaccttgacaggccattggtgactttgttacatggtgggggtaaaagtctgattgaaatgggttgagaagagcccgaatgttcttctgattccaaagtcaatgcctaccttgttttgctaagctgcatagaaagttctcgtgtgcaggatgcagtcactgaaaatgttgtagaactgaagaatttgtacctcattcttggaaccactcaacctggaa

SEQ ID NO: 106010 - DNA, 351 bp, Homo sapiens
gcggccgcctactactactaaattcgcggccgcgtcgacttgcactccagcctgggtgacagagtgagactgtctcaagaaaacaaaacaaaaaaccccaaaactcttctcctccagcttcatcaccatccttggatatttcatttctctgcccactgcctgcctctgcatccctcaggctgttaagttacatgagctgatacagccgctttgtggcttaagtgacactgagctgtgtttctgtcacttataaccccaaaagtctacaggtggagttgctgatgcggacacccccacagctccatctcccatgcaagaatccttgctgtccccactgtaccctgatgctcc

SEQ ID NO: 106011 - DNA, 793 bp, Homo sapiens
aaggactgagcactgggagactccaatggggagaaggggaggaacaagcaaaaagatggagaaaaagctaccaccagtgacctaggagaaccaggggctggcatcctgcagccacatgcacatggaagatcactttgattgccatgtggagagtgaactgtgggaggaccccagtggaggcaggaagactaaaccagaagacagtcacagtagtccagataagagatgcatatgttatcaatcgccatgtgaagaagatgcttgcttcccctttgccttctgccatgattgtgagtttcgcgaggcctccacagccatgcttcctgtactgcagaactgtcttcgattagatattacttcttctgaacaatcttccttgatgacccagctactttacatctctggatggaatcctcctctttgctctaatgagtctgtggctgtgtgttgaaatagcagagccttgagatgagatccttggattactgtatggaagagagccacctagtaaagacactcaactcacattgaagttggtatgagtgagaaaatctctgttgtgagacttaaaataggagaaaaaaacctcacaaaacgacaaaaaagagagaaaagacaaagaagactgttgtaaaaataagaagctttgaagaatctgaagcagatgttatgctgggagctagtattctattactgaacctgtggagacagattgaattatctaatggataatttgaacttcctattcaaaaacaaattgcctgaaaaaggatacattcttcagagtatgcca

SEQ ID NO: 106012 - DNA, 1862 bp, Homo sapiens
tcccagagggtccccaagtcctctgttctcaaactctgagcccaagggaaccccggccacatctcctccaaacacacacaggacctcaggtcccttcctgggtaccccaaactcttagccctagtggggtgctcagatctctcaggaaaaccagtttcccttttgttaaccccccagcggggaccccaaagcagccccttggagctgcagggagcttcagcgggcaccagttctcattcctctggagctcttggggggactccctcctgggaagccgaattctatctctaaacctcagggtgggggccttgtttttcctctgggccccgtcttctttgccaagttcttgagggcaacctagaccctcctctgaaccccagaggcttccccagccctggggatcatttttctcttctgaaccccagaagcaatctcgactttcgcatttgagattccagacaggactcggctctccctctttcatacccaggggaaactgagtccctcacccccttcaagaccccaggccgctcctcgctcccgcccctcgaggcccttcgccggctctgcctcctcccccttcccgaccccaccggccataagatgatgtggtccaacttcttcctgcaagaggagaaccggcggcggggggccgcgggccggcggcgggcgcacgggcagggcaggtcggggctgacgcccgagcgcgaggggaaggtgaagctggcgctgctgctggccgccgtgggcgccacgctggcggtgctgtccgtgggcaccgagttctgggtggagctcaacacctacaaggccaacggcagcgccgtgtgcgaagcggcccacctggggctgtggaaggcgtgcaccaagcggctgtggcaggcggacgtgcccgtggacagggacacctgcggccccgcggagctgcccggagaagcaaactgcacctattttaaattcttcaccacgggggagaatgcacgcatctttcagagaaccacaaagaaagaggtgaatctggcagctgcggtgatagcagtgctgggcctggcagtcatggccttggggtgcctctgtatcatcatggtgctcagtaaaggtgcagagttcctgctccgagttggagccgtctgctttggcctctcaggcctgctgctcttggtgagcctggaggtgttccggcattccgtgagggccctgctgcagagagtcagcccggagcctcccccggccccacgcctcacctacgagtactcctggtccctgggctgcggcgtgggggccggcctgatcctgctgttgggggccggctgctttctgctgctcacactgccttcctggccctgggggtccctctgtcccaagcgggggcaccgggccacctagagccacgcgtgagacttctctaagcaaccaccgagccctttgaccttctccattgtacccccaagatctttttgccccatctcctagagaaactgtgttctccctgctcgggggcccatgtttttttacacgcctgcctcctgtccccttatcctttctccctctgtaaatacgtttttctctgtggctgtatgtgggttgcttgggggtgggatgggaagaggctctttgcaaacgagggtccccagagaagactggcggggacctgatggggtagctggggtgtggggttgggggatgaggtcagggggtcttgggtgggagttgggggccccttcatttcccaggtctggatcgattcacttgccgggagagactttttacaactcatctgcagctccgggtgcggttgggggagatagcgaagggtctggcctcgctgtgatctgatttgggattaaaggtttggaaattta

SEQ ID NO: 106013 - DNA, 838 bp, Homo sapiens
caggacctaggagaccaggttcctctcctctcagatccaagattctggaagcaaactgcacctattttaaattcttcaccacgggggagaatgcacgcatctttcagagaaccacaaagaaaggcctgctgctcttggtgagcctggaggtgttccggcattccgtgagggccctgctgcagagagtcagcccggagcctcccccggccccacgcctcacctacgagtactcctggtccctgggctgcggcgtgggggccggcctgatcctgctgttgggggccggctgctttctgctgctcacactgccttcctggccctgggggtccctctgtcccaagcgggggcaccgggccacctagagccacgcgtgagacttctctaagcaaccaccgagccctttgaccttctccattgtacccccaagatctttttgccccatctcctagagaaactgtgttctccctgctcgggggcccatgtttttttacacgcctgcctcctgtccccttatcctttctccctctgtaaatacgtttttctctgtggctgtatgtgggttgcttgggggtgggatgggaagaggctctttgcaaacgagggtccccagagaagactggcggggacctgatggggtagctggggtgtggggttgggggatgaggtcagggggtcttgggtgggagttgggggccccttcatttcccaggtctggatcgattcacttgccgggagagactttttacaactcatctgcagctccgggtgcggttgggggagatagcgaagggtctggcctcgctgtgatctgatttgggattaaaggtttggaaattta

SEQ ID NO: 106014 - DNA, 1527 bp, Homo sapiens
caggtattgtttttgagcattaagattctaatagtgtgaggagaataatgtttgtgtttgtgtgttctcccttgttaagtctcttgaaatggagaaatcaaccgttttcagcttctatttagctttgagcttcaacatcctcaccaaacatatttacatttagaagaatatccataatgctttaagcaattttgtcttaatattagacttagtatggaaataagcctttttgggagcaaataaaaagtttttcaaggacaatttgttgtaaaaagtaataaagattccatcactctagcaggtccaatgtaccccgtataagtggattacagcagcgtaggattttgtaattccattttaacttggtgcccagttcttctctaaggaattcgcttattccctacattaagcaataagtaaaatatcatgaagatatgaaacttaatttgacttctaccaactaagtgcagagggtgacggaaaaaaaaaaaaaagacagtcatagcatggtgtaaaggaggactagtctaagggtcatggatgaggatttttgtcatgaattcactactgtttgcctaggctgtccttgggccagccacctggtttctcagagcctcagtgtgatccactggaaaatgtgatcatgttcaatgtcctttcctaatctgtcattctgtgaagtggtgcttccaggtcaaggaaacaaataggtcagaatgttcctgtggtcattgttctctttaggctcattttccatgaaatagttgtattcctcttcctgtagcacactcaggttaagttggagctctttaacctgggcattcttcccaatacttcattagaaataccgcctgcttcaaaatcacctttgtttgcactatctactacagcgtaatagacttctggctcagagagtgaaagctgtggaagaaaactagaagaatatttatgttaactcccttattttacagctaatgaagttgaccctagggaggtttgatgactctccacccagtcccaaagctcctaaagcaaggaatcgagttcctaatgtaggatttttaattctcttattggtgtattttccacttgtctatctttaccaaaggagcatcagtgatttttagtggatttcacaaaggagtaataggacagcttccttgtcctgtttttttctttaaaaactacaacccaataatgatgagtgaggctgttgtaatttttggaaacatgataatgggttgttgcaaatatattgaaagttaggggctgtgtgcagtggctcacacctgtaattccagccttttgggagtccaggtcaggtggattgcttcagctcaggagttcaaggtcagcctgaccaatatggtgaaatcctgtttctactaaaactacaaaaactaggtgggcatggtggcacaggtgagaggatcacttgagcctgggaggtcaaggctgcaaggagccaagattgtaccactgtactccagcctgggtgacagagcaatatcttgtctcaaaaaaaaa

SEQ ID NO: 106015 - DNA, 1249 bp, Homo sapiens
  misc_feature (1249)..(1249): n is a, c, g, or t
caggtattgtttttgagcattaagattctaatagtgtgaggagaataatgtttgtgtttgtgtgttctcccttgttaagtctcttgaaatggagaaatcaaccgttttcagcttctatttagctttgagcttcaacatcctcaccaaacatatttacatttagaagaatatccataatgctttaagcaattttgtcttaatattagacttagtatggaaataagcctttttgggagcaaataaaaagtttttcaaggacaatttgttgtaaaaagtaataaagattccatcactctagcaggtccaatgtaccccgtataagtggattacagcagcgtaggattttgtaattccattttaacttggtgcccagttcttctctaaggaattcgcttattccctacattaagcaataagtaaaatatcatgaagatatgaaacttaatttgacttctaccaactaagtgcagagggtgacggaaaaaaaaaaaaaagacagtcatagcatggtgtaaaggaggactagtctaagggtcatggatgaggatttttgtcatgaattcactactgtttgcctaggctgtccttgggccagccacctggtttctcagagcctcagtgtgatccactggaaaatgtgatcatgttcaatgtcctttcctaatctgtcattctgtgaagtggtgcttccaggtcaaggaaacaaataggtcagaatgttcctgtggtcattgttctctttaggctcattttccatgaaatagttgtattcctcttcctgtagcacactcaggttaagttggagctctttaacctgggcattcttcccaatacttcattagaaataccgcctgcttcaaaatcacctttgtttgcactatctactacagcgtaatagacttctggctcagagagtgaaagctgtggaagaaaactagaagaatatttatgttaactcccttattttacagctaatgaagttgaccctagggaggtttgatgactctccacccagtcccaaagctcctaaagcaaggaatcgagttcctaatgtaggatttttaattctcttattggtgtattttccacttgtctatctttaccaaaggagcatcagtgatttttagtggatttcacaaaggagtaataggacagcttccttgtcctgttttttcttcctacacccaatatgttaagcagctgctgcttttggaccagccacgtgctggcccactatttcgggtcggcn

SEQ ID NO: 106016 - DNA, 503 bp, Homo sapiens
aaaggcccgcgtcgacccctagatgacaatcactacagccaggagcactctgtgggtccttgcatcctcagccagtgaagtgtgttcttggggtcctttttggaacttagaatacaatttcaccatataaaaatatgtagtagataaaaagcattaatcaatacggtatttcatgtattttaaggattaaattaggcatccttcaccaaactttgatgcactaatcactattatctattttgagatattgattcagagttacaaagatcaatgtacaaataaaattttgacagaaaaactgcttgtcaattgagctatatccgtagtttcctaaaatatattttttcacactttgcttatgacatcctacttaaacccaagcacactatttctgcttcaaagaagactaactctctcagtgatttggcaaggctttatagtgttctaagccagcttgcaaagcctcaaacaagtatacatatctatgcttaggcagctttaac

SEQ ID NO: 106017 - DNA, 546 bp, Homo sapiens
gcacgcgaacgtgttatccctaggacttgtttgaatacattgctgtatttatctaaaagggcaaagctttcattaaaaataatctagtggcaatgttgcacagccctaattctctactacatgaaaagttatattttcaggcccagagacacaggattacaggtcagtgataggcaatgcatatttgaagtataccaaaagcaccaaataatgtagctgagtatccagaaggaactgacataaaatgcaggggtctaattactagagtcattgccacagaaccagtcatcgatgactaaattatgcacctggtttcctgggaaaatctgcagtttggggaacatttcactacacttcagagcattttaagtctttaaatcatttagcttttaaaatcccacccatttctcctgttccggcatccattctaaatatgtctctagttcctgtcagttcatactcttcaatacttgatttcacttttgtgatccactcttctctgtggtttctgaagagtggatacactcgcgagccttgaccatgcca

SEQ ID NO: 106018 - DNA, 321 bp, Homo sapiens
ttagtctcgcccctaaccctgcttctagtggtcacagcagctacagggaccatccagctgaaggtcttggtatgtgatctcgaaagtcaaggtcagcgtggagaactggaaagaggcctgactagaagacagactgtcgctggtcagttgtgtcatcttctgcaagttgcttaaacctgttaagttttctcactctaaagtgaggtgttggggcagtgtctctgactttgaatgtgcatgaatgacctggggaccttgttcaaatgcagattctcatccagtggtctgggctggggcctgagattttgcattgctagcaag

SEQ ID NO: 106019 - DNA, 635 bp, Homo sapiens
ttcaagcaggtggccgagatgctgtcggcctccaggtaccccaccatcagcatggtgaagccgctgctgcacatgctcctgaacaccacgctcaacatcaaggagaccgactccaaggagctcagcatggccaaggaggtcatcgccaaggagctttccaagacctaccaggagacgcccgagatcgacatgtttctcaacgtggccaccttcctggacccccgctacaagaggctgcccttcctctccgccttcgagcggcagcaggtggagaatcgcgtggtggaagaggccaagggcctgctggacaaggtcaaagacggcggctaccggccggctgaggacaagatcttcccggtgcccgaggagcctcccgtcaagaagctcatgcggacatccacgccgccgcccgccagcgtcatcaacaacatgctggccgagatcttctgccagacaggcggcgtggaggaccaggaagagtggcatgcccaggtggtggaggagctgagcaacttcaagtcccagaaggtgcttggcctcaacgaagaccccctcaagtggtggtcagaccgcctggccctcttccccctgctgcccaaggtgctgcagaagtactggtgcgtgacggccacgcg

SEQ ID NO: 106020 - DNA, 362 bp, Homo sapiens
ttgtaatgcaaccaattagatataatgtgtttatacagaagtgatcttcaagggaagctgccttatttgtgcaagtcagacattgtagaggaggtatagttagataaataaaacatataggcctgtgaattttctttattcatttttaacttttttattatagaacatttaatcacatgcacaagtagaaagaacaggccgggcatggtggctcatgcctgtaattccagcactttgggaggctgaggtgggcagatcacaagatccggagtaagagaccagcctagccaatacggtgaaactccgtctctactaaaatacaaaaatttttcaggcatggtggcgggtgcctgtagtcccag

SEQ ID NO: 106021 - DNA, 431 bp, Homo sapiens
cggtggcggctcccggccgggcctcggcgcctccgccgcccccgcccgtgtactgtgtgtgccggcagccgtacgacgtgaaccgcttcatgatcgagtgcgatatctgcaaggactggttccacggcagctgtgttggagtagaagaacatcatgctgttgacattgacctgtatcactgtcccaactgtgcagttttacatggttcctccttgatgaaaaaaaggaggaactggcacagacatgactacacagaaattgatgatggttccaaaccagtgcaagctggaactagaactttcattaaggaattacgctctcgagtcttcccaagtgccgatgaaataattataaagatgcatggcagccagctgacacaaagatatctggagaaacatggatttgatgtccctattatggtcccaaaatta

SEQ ID NO: 106022 - DNA, 306 bp, Homo sapiens
cttgatgtattagggtttagagaatagctgcaaaaagttattttctgtatctgctggaaaacagcatatctttgtaagtacagattgtaaggcagacagattgtaattatgtggatagagtagcgagtggtaacagagcttgacagaccagtgttcacgtgacagagtgtgcagccctcaagcgcaggtgcaggtggctaacagtacagggttaaggggccaaagtgcacagacaaggtgttggccagggcctctccacattttgcaaacttctcttcccttaaaaaggaaggaaaaaaaaaaaga

SEQ ID NO: 106023 - DNA, 112 bp, Homo sapiens
aagcaatcttcccatctcagcctcccagagtaatgggattacacgcataagccaccacacctatccaataaaattatttttttaaaaactgttatggttggaaaatgcagct

SEQ ID NO: 106024 - DNA, 312 bp, Homo sapiens
tttttggagagagtctcactctgttgctcaggttggcgtgcagtggtttaatcaaggctcactgtgctctctaactcctgggctcaaacaatcctcccgcctccgcctcctaagtagctgggactacaggcttgtgctatcatgcctggctcatttttcaacctttttgtaagagatggagttttgctatgttgtctagggtggtcttgaactcctgggctcaaacaatcctcccgcctcagcctcccaagtagctgggactataggcttgtgccatcatgcctggctcatttttcaactttttttgtagag

SEQ ID NO: 106025 - DNA, 1009 bp, Homo sapiens
ctagaagagaccctagggttttgatcagatgccctcattttttaaaacagctttgttaagatgcaattcatatgccatacaatgtacctgtttaaagtgtgtaattcagtggcttttcatatattcacaaagttgtgtgatcatcaccacgaccagttttagaacattttcatgaccccaaaagaaacctggaccccttagccaataccctccattcacactccattccccacctcccattctgcagcaaccatgatctactttctgtctctatacattttgcctattatggacatttcacataaatggaatataatatgtggcctttctatctggcttcttttttggagcaaaatgttttcaagggtcatccatattgtagcatgtatcagtgctttgttcatttttatgactgaataagattccatcgtatggatatcccacattgtgtttatccattcatcagttgatggacatttgggtgtttccagttcttgactgttacaaataatgctgctgtggacattcatgtacaaatttttgatgaatgtatgttttcatttctgctttcattttaagaaaatgagctgaagctcagctacttcaaatactttagggaacatagtggagtataaagaaagagaggagggaattgagcctcccaaggtgttaaatgacttgccaaagtggaagatctttaacatcctctgtctgtgtatgtgtgtgtttcagtaggaagatgatttaaaagtatttaaaccccaatcttatttagaatatgaatgcaaaggattatcatttgtgagtttaatactaagtgttttcactaactctgccctgggttcctgggttttagttagaaatttctgaatgtataaattaatacttatctgtaaaaattcaggtgtcaattgaatcatacaatgaatgcaagatatttgttgaattaaatgattagcatttatattaaaggtaagctagactctaataaagtttttctattaatatt

SEQ ID NO: 106026 - DNA, 314 bp, Homo sapiens
aaaagaagtttctgtcagaatctgtttgagtgaacagtttaaatttttttaattaaaataagaaggctgaactcccaagtcctaatttctggagctgttacattttggtcagtgttttctagagtattctctgcattcaaaaattgccatgtaacttaacataaacagaacatgtgaatgtgtcttataacttgtttatttcagatagcagtaaattattgagcatttcatctcagagtgttgatacgttatccttttcagtggcttcatagtattcctttgttaggctataccatgatttatttaacccaatc

SEQ ID NO: 106027 - DNA, 397 bp, Homo sapiens
ttcctctagggtgattctccaaactcttctgctctcccctggagctgcagaaaatccttcagcctacttaagtgccctactgtatatgggttctgtggagcagtcataaagaacgggaaagaaagtcaaagaagggagttgcataagaaatggatgtaggacaaatacaaatcttttaggctgggtgtgtgtgtgtgtgtgtgtgtgtgtgtgtgtgcacgtgcacgtgcatgtttgtgtatgagattttttccccatagaaaatataagcaattcagtcataagaaattctatctccaaggctgcagtaaactatcacacctgtaggcttttatttttcacagaggaccctgtaaaatccaaggcagcaaatcagaattctgtgtggtttagaggg

SEQ ID NO: 106028 - DNA, 648 bp, Homo sapiens
caggacacactgccttatctttctgtcattccatgatgttagactttctgcccaacaagtttccaaaaccagagttccttagcttttggtacctcatgaggggggcttttaaagccttggataaatataggaaacagatttctgttcagagccagggataacctcttttcaactaataagtcctatgaaatgaaatccattcttctgatcctaaatcccatctaaagtaattttcataaaattgagggcatatttgagtacagtgcatcttacttgaatgagggaaaaaatatggtttctaagggaaaggggaaaaaatcttgtaatcaaatgtgaagaaaacactccttggcctcccaaaccaggtagggtctcgttctaaaaggccccaaagcaaacgaactgtgtgtcaacagaatgaccattgtgtggctcccttttgctgctctagtcactgatgcaactacaaaccagagagcatacagatgctcctccagcattgccacgagcaccagtggacatgtgagccttagagaaatcccaagaccctgagtgtcacagtgagctgagaggtgcactactagaaagccaatggggtgggagggataactgtagacacatcatggccacctcagggcttctggagaa

SEQ ID NO: 106029 - DNA, 1802 bp, Homo sapiens
  misc_feature (799)..(799): n is a, c, g, or t
gggtagggactgtcaggcagggctatgagatagaggccctgagagtatgggatttttttgtgctgatcgggagaaacgtggagaggtggtgtgataggaggagctgggtcaccccattttattatatgtcatgaaactggcttccttctgcatgacctctaaagtaactactcccagtgctgagtagaaggacactgtaaataggacaaagaaagtcttgatgtggtgtcggaggctaatgaggacagaagaaaaagaggaaacattcacaattagtaaaagacttctggcttatcattgcaagagaaatgtttgggggccaggcacagtggctcacacctgtaatcccagcactttgggggtccaggcaggcagatcacttgagcccaggagttcaagaccagcctggacaatatggggaaaccccatgtctataaaaaatacaaaaattctcctggcatgttagcacacatctgtagtcctagctactaaggaggcttaggtaggaggatcacttgagccccagaggtcgaggcagcagtgagccatgattgcaccactgcaccccagcctgggcgatagagcaagaccctgtctatttaaaaacaaaaaaagaaaaaaaaaagtttaggttctcagccatcccctgagctttaggctcaggaactctctgatttcaggtaccaagaaagagaaaatgggctgggcacagtggcccaagcctgtaatcccagtactttgggaggccaaggtgggtgaatcacctgaggtcaggagtttgtgaccagcctggccaacntggtgaaaccccatctctactaaaaatacaaaaattgctgggtgtggtggcaggcacctgtaatcccagctactcaggaggctgaggcaggagaattgcttgaacccaggaggcagaggttgcagtgatccgagatcatgccactggactccatctggcctggatgacagagtgagactctgtctcaattcaaaagaaagagagagaaaaaataacaacaatcttataattcctgtgactaaaattagggggtgttcctgcattacaccatgccacctctggagcaactttctctgtcactcacaaagctttttcatatgcctgccctttccccctacttaggctccccctttagaactaaacagctctggaaaggatccttcagagcagacctagggcaggagctaggcaagacccttgatggtgacaacttatttggctatttctcgtggctatttaatacatgaatgggagctgagttccctgcttaatagcatttgtgttcatttccagcgtggtgccggttgtctgacctctagcttctcccctcttattctgtacagctgaaattctccctcctgcctaccccccagctagtcagcctccagtcctgtttagtttatcttttttctctcctaatgcctgttaagctggaaacaggattcttgctcgtcgtcatattattttaaataagaatgaaactaaagaagaggtctttgggccaggcatggtagctcacacctgtaatcccagcactttgggaggccgaggctggcagatacctgaggtcgggagttcgagaccagcctgaccaacatggagaaaccctgtctctactaaaaatacaaaattagccaggcgtggcggcgcatgcctgtaatcccagctactcgggaagcctcaggcaggagaatcgcttgaacctaggagacggaggttgcagtgagccaggatctcaccatagcactccagcctgccaacaagagcgaaactccatctcaaa

SEQ ID NO: 106030 - DNA, 498 bp, Homo sapiens
agccaccatgccagccccagggaaggttttctaggtgggaagtgacatggtaaaattagtctgaaggtggtgtctaagatgatagaaagggacttgggaggaagctaagttgtacaggtgaaacaaaacacggatctaaaatataggggtgacataaatccaggaaactaaagtaaaaagtcaacattgtgattctcagaagagaaaaacaaattaaaactaaaacattcaaaattttacctataactttggcaaacagatatgagaaaacaagcactcttatatttcactggtaggaatggatttggtaatgagcaatgtgaaggactaattatcagtatttatagaaaattcaaatgtacaccctctttcacccatctgtaaagttattctacagatattttcacacatctgcatgaagctgcttagacagcgatattcattattaagctgtttataaaggtaaaagattgagaataacgtaatgcttgacaatag

SEQ ID NO: 106031 - DNA, 352 bp, Homo sapiens
gtcaatggaaagaagctctacaaaaagggacactggcaagttcctccaactactagatttagaagaatgttaaaaaatatatatttaaaaattatggatgcatttaccctttcacccaaaagtttcactcctaagaatttatcctaaataaatggttgcataaatacaaaatgatgtttgcacgtcatggcattatttgtaatagcaaaggactggaaacaacccaaatgccccgctttaggggtctggttgaataactagggtgcatccacacagtgaagttctatagagtccatagctttgtgagccttgcaccacattcccccaaactccagcgaatctgtcggggaca

SEQ ID NO: 106032 - DNA, 2184 bp, Homo sapiens
  misc_feature (786)..(786): n is a, c, g, or t
  misc_feature (1101)..(1101): n is a, c, g, or t
  misc_feature (1154)..(1154): n is a, c, g, or t
  misc_feature (1443)..(1443): n is a, c, g, or t
  misc_feature (1608)..(1608): n is a, c, g, or t
ctggaaggagtcctttgactctcctccctgccttttgccattattttgttaattaatgtttttattagtgtctgtaagacctaatgaagctgaggaaggaaacatgatatggcttcctgaattttgtggttttgcagcagtaaggttatgtgagggcttccaccctaaaggacacccttaagcacagcacttaccaatttcctaagaaaaacatcttaagcaattcttaaaagacctgggaagcaggcatatttgctgaacgagtgtcccagtcattttaaagccagtctcatatggcatgcacatcagttgctttgtctgggatgttccacttggcatttatagagggagttgggtagtcccccttctcaggggagccttttatctagtccaccagcctggctgtttgctcaggaataaccacctttgtctggatcatgtatagccatgtgattgttccattgtgagccatgcattctgcatccaccaaaactttttcttcattttgcagcattatacagaagcttatgcatgcagccgtcataggtttattgcctcatgtccacagcaagtcaatatgcacagacactgggttgcagtagagaaagaggtttatttgtagggccactagatgacgagacatgaggaaacctcaaatctgactccctaagggatttgtggggttagggcgtttaaaggttttgaagtgggccaaagtgtagatatcattcattggttagagtgcagggtgaagtcatgggacaggttgaagaagaagctgtattntcatgctgattctgttcctctctgggggtcttcaaactggttagcatcagctgttctgctggaatttgacatctgaaaaacatccgaagcaattcttaaaagccttatggttctaaggtcagaaattttatctacaggaaaatagggatgcaaattttcggtgtctactgctacatgactttcggttacaaggaagtaggtctaagttcagcttcattaatacttaattataactatctttctgcccagaattcttgttaaccctgtgaggacagcttcatataccctaaattcagaatctgtcttagtaatggnttttcaggaagttgataccaatgtaaccgcccaacgggttcaccttgtcctcngcctagacaaagctgatttatcaagatgggaattgcaatggagaaagagtaattcacacagagctggctgtgtgggagactggagttctattattactcaaatcaatttccccatattcggggatcagagttttaaagataatttggcaggtaggggcttgggaagtggggagtgctgattggtcaggttggagatggaaacactgggggttgaagtgagatgttcttgttgtcttctgttcctgggtgggatggcagaactggttgagtcagattatgggactgggtngtgtcagctgatccattgactgcagggtctgcaaaatatctcaactactgatcttagtactgttatccccaggagcaatttggggaggttcaaactcttggagccaaaagctgcatgacccctaagccatcatttctaatcttgtagctaatttgttagtcctgnaaaggcagactggtccccagacaagaagggagtcttttcaggaaagggctattatcagttttgtttcagagtcaaaccataaactgaattccttgccaaggttagttccagcctacttccaggactgagcaaggacagctgaaaggttagaagcaagatggagtcagtcaagtctgatctctttcactgtcataatttcctcagttacagtttttgcaaaggtggtttcagtccttccctttgggtttaacagcaccttattcttaaggtgtgggctatgaagttgggaaagggccgtcagtcactctggctgctttctcctaactgggcgtagtgggggaaggtgttgaccacaaagtgagaggagtggaactgctttgcagctgtctgagtgtactcacgcaagccaggctgaggttccaaggcttcatgacaaaggtgttagtattctcatctatggttttagtacagcatttaagtggacatttaaatactgagttctaggataaggagtgcaaattccagttaagcattaatttggggcattgtggctcaccaaaatctaaattgcagagg

SEQ ID NO: 106033 - DNA, 489 bp, Homo sapiens
ggactaaaaagaagagtgggtaggtgaatatcagaaaatgggctcagtaaggcagaggtaagaggaggggtcatcgtatggccttgtaagaaacaggaaagactttgccttgatttctgatgatgcgttaacactttatctcttctacttttctttcccatgagtatttggttactctctctgactcccacaagcccccaaaatggtactcaggaataaaataatttatcaaacacgggtaacgactactgctagctaccaggatacaaaatctattaaacatggccatcgagaggtgggacagtatcatgaaaaccttctagattatacttataataagccaacctatttctaactcagtaattttttaaattgatttttccctgaatcataagagtaatgatacaagagaaactctctcttctccaacccaatcaatcaggccagtggttggatcatccagggtgtgggcagactagagattagcca

SEQ ID NO: 106034 - DNA, 421 bp, Homo sapiens
cagtattccatgagcctcttagtttgaaattctgaggaaatgtgattgattacttgccatccagtagattgggttggctcccattgagataggtacttactcctatctcatttgtctttggccaaatagttgactgccaaatattgcaggagcattttctagagaagagggctatgacttaagcagtcatttcaaagcgtatctactacagctctccttttttatgtcattcattccacaaacatttatggaatacctgcttaggtgctggagcaatttaataagaccaggccaggcatggccaggtacaggctcatgcctgtaattccagtcctctgggaggctaaagcaggagtattgcttgaggctagcagtttgagaccagtccgggcaatagagcaagaccctgtctctacaaaaa

SEQ ID NO: 106035 - DNA, 1100 bp, Homo sapiens
  misc_feature (4)..(5): n is a, c, g, or t
  misc_feature (9)..(9): n is a, c, g, or t
  misc_feature (547)..(547): n is a, c, g, or t
  misc_feature (1077)..(1078): n is a, c, g, or t
  misc_feature (1081)..(1082): n is a, c, g, or t
  misc_feature (1084)..(1085): n is a, c, g, or t
  misc_feature (1094)..(1097): n is a, c, g, or t
  misc_feature (1100)..(1100): n is a, c, g, or t
caannattnggcacgacagataagttgtaggaggattacaacatttttcgtatgaagcaaggtgcatatgccacagcaattggtttgattgattatggatttctgcattccaagggaagttactttattactccatgaggatgggtagtgatcttaggggtcttatctctggcaccgtttggtctcaattatttacaggaaaaagaggcttttaaaaaaggcaaaagttgcagctgcctgccacctggctcaggctgcagagccacattcctctcaaggctcaggataacttaaagttccaaaaactgtaagtttaaactatttagtttcacagctactataatgttcagtttcctatctttgtatagttacctgggtaaccaagactctaaccctagtaatttctcttttctcttcttgttagaccatccgctgggctcattccaattcctacccgaccctgctgctttatgatgaattggcctttaccaatgaatcactttttaacattaccctgcagttgacaatttgcctctctgtaagccanattgcttcttaactagacattggccttgtcgctgaacctccttcatatatttgagtacaacttaattgtagcaaaatagtttcaactgtgttaaacccattgggttttctttaggggtctttctggagaccctaaataataacacatagtcagctgcaagattttttattgtaagactaactttgataccagcttgccatgtctaagaaagtgaaaaagctaatgcataaatagaaaatttctaaggctagctgtctcttgatcttggtatctttggagccaagacaagaaaggcaggataaaccttgctcaattaagctatctttgaggaaccagaaaacaaacaaaaatcccaatatagtgatttaaaaataaaccctaagcaggaaggatgaggatgtctattacttagtatgagaaagaaattgagcagattggaacgtgacaccaattcttggactcagcgagttgattctggagaggtaaagcaaagacagttctcttcaatgcagtgaacagagaacaggtannggnngnnttattaagnnnngcn

SEQ ID NO: 106036 - DNA, 472 bp, Homo sapiens
gtgtgactgtcgtggagccggaagccccacccagcccggacgtgctgcaggctgccacccacagagtcgtggagctcaggcccccttcccggtcccgctccacatccagctcccgcagcaggaagaaggccaagaggaagagggtgtccagggagcacggacggacgcgctctgggacgcgctctgaatccagggacaggagctcgaggtcagcgtcaccatcagtgggtgaggagcgccccaggaggcagcggtccaaggccaagagccggcggtcctccagtgaccgctccagcagccgagagcgagctaagaggaagaaagccaaggacaagagcagggagcacaggcggggcccctggggccacagccggaggacgtcccggtcgcggtcggggagccctggcagctcttcctatgagcactatgagagtaggaagaagaagaaaaggagatcagcgtccagacctcg

SEQ ID NO: 106037 - DNA, 179 bp, Homo sapiens
ccttagcccttataccattggacatatgacatgttttaatttttagaaaattatttttctctactgaataaaatataagctccatgaaggcaggagtttttgtctgctttgttcactttttattcttgtcttgtagaacagttcctgcacagagtgtgctgtcaataaatacttgttga

SEQ ID NO: 106038 - DNA, 1535 bp, Homo sapiens
ctgggcaacagagcaagactccgtctcgaaggaaaaaaaaaaaaaagaaaagaaaaaatgatgttgatgatgatagcaaatatgtagtgttttctgtgtcaagttttggtgtgtattaactcttaatcttcacaataatcttattagatactattattatccccttttacaaacgaggacactgatgcacaaagatttgaaaacttacccaaggttacttagccagtaagtgatggagtcaagatttaggattcaaatctagatgttttggtttcagagcacttgcccaatcctgcctttctaaagtaagacaaatggtgtcagacaagtgccacattctagatttaatcaaggcacagagaagacagatgttgatcctgcctgaaggttttagggaaggttcctggagcaccctgctcttcagggccacccatcacctggccctccatccctttctgggactctttggagccctttctcccacacagtggcaggccatctccctgacggtcatcgagaaggtccagattgctgccatagttctgggctcgctcttcctggttgccagcatctcctggctcatctggtcctcactcagcccttcagccaagtggcaacgacaggatctgctctttcagatctgctacggcatgtatggcttcatggatgtcgtctgcataggcctcatcatccatgaaggctcctctgtctaccgcatcttcaagcgctggcaggcagtgaaccagcagtggaaggtcctaaattatgacaagaccaaggacataggaggagatgcagggggagggacggcagggaagtcaggccccaggaactcacggacgggccccacctctggggccacgagccgccccccagctgcccagcgcatgcggacgctcttgcctcagcgctgcggttatacaatcttgcacctccttgggcagctgcggccaccagatgcccgttccagctcccattctggccgagaggttgtcatgagggtcactacagtctgaactggactccaggagcagggatcttgagtcaatgcatcagtcagagaagaactctcatggctgctggaggtaccagctggacaaggtgtttggggcatgctgcccccgtcaccgaggatctgtgtgggtagcctcaagctggagacattgtctggcctcactgcccactgggtagagacacctggatgacatttcagtacccgctggcagctcctcccactcatccagagacggccggtgggcaggcggggagagcagctttccttccctggagagaaccgtctttacctcagctcctagggcctccagccccccagctccaccacggtgacttggtgaagggggaccaatgccagaagaaaggggctgtagacccctattccccaccccatggccacagggcatctggcaataagactagtatacattgacctcccgttccctgcatgagggcggggagttccccctgctccatcccccattgcatgggggaagggcataaagaatcatttatatgca

SEQ ID NO: 106039 - DNA, 809 bp, Homo sapiens
atgatggggtgggggaaggaaagcatggctcagaagctctaacactcccctccctccagatcctaagaggaagcctttcttttgagaagtcttaaagactacccatcccaaattctaggaaaagagaagacccagcccttctcccctctaatccccccatccctttccatctttcatctctttggtatgggaagtttcccttgatctccaagggaagcttcttttctgttgcagccttacttagcctcttgccctgtcttgggtgaaaggcctgagttatttaaggtgggaaagtgacctgaagaggaggtttccctgtcggggagcgcggctgagtggggtcggggtggtgatggctgacagggcccctcctcactcttcctccagggggagctcttaagcccctgccgctgcgacggctcagtgcgctgcacgcatcagccctgcctcatccgctggatcagcgagaggggctcctggagctgtgagctctgctacttcaagtaccaggtcctggcgatcagcaccaagaacccactgcaggtgaggtgcaaggagaggactcggagattgggcgaggaccttttagctattggactcagggaccctccaggaagcctatttcatttactcttttcccaaagccacccttccccgccagttaccagtctcccgtgtgtctgtatatccttcctaagcccttaatttattcacagagatatttattgggtgccacttatattccaggcactgttctaggcactgggacaatcaccactccccacccgccacaaaaaaaaagaaaaaag

SEQ ID NO: 106040 - DNA, 2533 bp, Homo sapiens
ctgggcaacagagcaagactccgtctcgaaggaaaaaaaaaaaaaagaaaagaaaaaatgatgttgatgatgatagcaaatatgtagtgttttctgtgtcaagttttggtgtgtattaactcttaatcttcacaataatcttattagatactattattatccccttttacaaacgaggacactgatgcacaaagatttgaaaacttacccaaggttacttagccagtaagtgatggagtcaagatttaggattcaaatctagatgttttggtttcagagcacttgcccaatcctgcctttctaaagtaagacaaatggtgtcagacaagtgccacattctagatttaatcaaggcacagagaagacagatgttgatcctgcctgaaggttttagggaaggttcctggagcaccctgctcttcagggccacccatcacctggccctccatccctttctgggactctttggagccctttctcccacacagtggcaggccatctccctgacggtcatcgagaaggtccagattgctgccatagttctgggctcgctcttcctggttgccagcatctcctggctcatctggtcctcactcagcccttcagccaagtggcaacgacaggatctgctctttcagatctgctacggcatgtatggcttcatggatgtcgtctgcataggcctcatcatccatgaaggctcctctgtctaccgcatcttcaagcgctggcaggcagtgaaccagcagtggaaggtcctaaattatgacaagaccaaggacataggaggagatgcagggggagggacggcagggaagtcaggccccaggaactcacggacgggccccacctctggggccacgagccgccccccagctgcccagcgcatgcggacgctcttgcctcagcgctgcggttatacaatcttgcacctccttgggcagctgcggccaccagatgcccgttccagctcccattctggccgagaggttgtcatgagggtcactacagtctgaactggactccaggagcagggatcttgagtcaatgcatcagtcagagaagaactctcatggctgctggaggtaccagctggacaaggtgtttggggcatgctgcccccgtcaccgaggatctgtgtgggtagcctcaagctggagacattgtctggcctcactgcccactgggtagagacacctggatgacatttcagtacccgctggcagctcctcccactcatccagagacggccggtgggcaggcggggagagcagctttccttccctggagagaaccgtctttacctcagctcctagggcctccagccccccagctccaccacggtgacttggtgaagggggaccaatgccagaagaaaggggctgtagacccctattccccaccccatggccacagggcatctggcaataagactagtatacattgacctcccgttccctgcatgagggcggggagttccccctgctccatcccccattgcatgggggaagggcataaagaatcatttatatgcacgtggagactcctttctcatctggggcttttctggagggttgggagatgtggggaggtttctctgcacaggttgcaaatcccaaatgcagcagtgggttctgagttgtaggtgtgactcccacttgctggtgaataattcatgttggctgctaggtggcagcactccgaggtatctaaagggtagacctggacctgccacctatgagttgtgtgatatagaaaaaaatctcttagctctggttttcctgtctacttcatagggttggaataaggataaatgagggacaggttggatgccgttgcagagaaaatcagcaatgacataaagagatttctagaatagttgatggtccatttatttcaaatagtagctggtgtaacaaattctaaaatgtgtttttcatctggagttgcacagaatcatggaattttgtgttgagtgacataataggtatggaaatatgaggggaaatagacattgcaaatgtgaagcatggtggttatttgttaagaatgagaactcctctgactctaaatatttgggcctgtgggctggggaaggctggagccatctgccttgttctggagatcatctgggttctatcagtccttctcaagtactgtgctcacccagaaaagcagtgtgaagtgaatttggactcatttggagtgagatggagggaatccccccactcagtgttatgagtctccaaccccagtttaagctatttccatggcagtttagggtcacaggtttgatcccggtgtgcccagccagtggtattaatggatggcattatgtttggaggcagcagcatagaggactgttgtttatagagaaaagatttgggaaggactgtttacaatgtgggtcagcctgaagcctgggcactttcttctgtgaccttggggttgtgtattatatgaatgatgctgtttttaagtaaaccattcaacagcaattaaataattccttcattcacggctaaaaaaaaat

SEQ ID NO: 106041 - DNA, 2397 bp, Homo sapiens
cgaggaggagtactacgggtcggagccgcgggcccggggcctggccggcgacaaggagccgcgggccggacccctgccgccgcccgcgccgccgctgccgcccccgggcgcgctggacgccctgtcgctcagcagtagcctggacagcggactccgaacccctcagtgccggatctgcttccagggcccggagcagggggagctcttaagcccctgccgctgcgacggctcagtgcgctgcacgcatcagccctgcctcatccgctggatcagcgagaggggctcctggagctgtgagctctgctacttcaagtaccaggtcctggcgatcagcaccaagaacccactgcagtggcaggccatctccctgacggtcatcgagaaggtccagattgctgccatagttctgggctcgctcttcctggttgccagcatctcctggctcatctggtcctcactcagcccttcagccaagtggcaacgacaggatctgctctttcagatctgctacggcatgtatggcttcatggatgtcgtctgcataggcctcatcatccatgaaggctcctctgtctaccgcatcttcaagcgctggcaggcagtgaaccagcagtggaaggtcctaaattatgacaagaccaaggacataggaggagatgcagggggagggacggcagggaagtcaggccccaggaactcacggacgggccccacctctggggccacgagccgccccccagctgcccagcgcatgcggacgctcttgcctcagcgctgcggttatacaatcttgcacctccttgggcagctgcggccaccagatgcccgttccagctcccattctggccgagaggttgtcatgagggtcactacagtctgaactggactccaggagcagggatcttgagtcaatgcatcagtcagagaagaactctcatggctgctggaggtaccagctggacaaggtgtttggggcatgctgcccccgtcaccgaggatctgtgtgggtagcctcaagctggagacattgtctggcctcactgcccactgggtagagacacctggatgacatttcagtacccgctggcagctcctcccactcatccagagacggccggtgggcaggcggggagagcagctttccttccctggagagaaccgtctttacctcagctcctagggcctccagccccccagctccaccacggtgacttggtgaagggggaccaatgccagaagaaaggggctgtagacccctattccccaccccatggccacagggcatctggcaataagactagtatacattgacctcccgttccctgcatgagggcggggagttccccctgctccatcccccattgcatgggggaagggcataaagaatcatttatatgcacgtggagactcctttctcatctggggcttttctggagggttgggagatgtggggaggtttctctgcacaggttgcaaatcccaaatgcagcagtgggttctgagttgtaggtgtgactcccacttgctggtgaataattcatgttggctgctaggtggcagcactccgaggtatctaaagggtagacctggacctgccacctatgagttgtgtgatatagaaaaaaatctcttagctctggttttcctgtctacttcatagggttggaataaggataaatgagggacaggttggatgccgttgcagagaaaatcagcaatgacataaagagatttctagaatagttgatggtccatttatttcaaatagtagctggtgtaacaaattctaaaatgtgtttttcatctggagttgcacagaatcatggaattttgtgttgagtgacataataggtatggaaatatgaggggaaatagacattgcaaatgtgaagcatggtggttatttgttaagaatgagaactcctctgactctaaatatttgggcctgtgggctggggaaggctggagccatctgccttgttctggagatcatctgggttctatcagtccttctcaagtactgtgctcacccagaaaagcagtgtgaagtgaatttggactcatttggagtgagatggagggaatccccccactcagtgttatgagtctccaaccccagtttaagctatttccatggcagtttagggtcacaggtttgatcccggtgtgcccagccagtggtattaatggatggcattatgtttggaggcagcagcatagaggactgttgtttatagagaaaagatttgggaaggactgtttacaatgtgggtcagcctgaagcctgggcactttcttctgtgaccttggggttgtgtattatatgaatgatgctgtttttaagtaaaccattcaacagcaattaaataattccttcattcacggctaaaaaaaaat

SEQ ID NO: 106042 - DNA, 2588 bp, Homo sapiens
atgatggggtgggggaaggaaagcatggctcagaagctctaacactcccctccctccagatcctaagaggaagcctttcttttgagaagtcttaaagactacccatcccaaattctaggaaaagagaagacccagcccttctcccctctaatccccccatccctttccatctttcatctctttggtatgggaagtttcccttgatctccaagggaagcttcttttctgttgcagccttacttagcctcttgccctgtcttgggtgaaaggcctgagttatttaaggtgggaaagtgacctgaagaggaggtttccctgtcggggagcgcggctgagtggggtcggggtggtgatggctgacagggcccctcctcactcttcctccagggggagctcttaagcccctgccgctgcgacggctcagtgcgctgcacgcatcagccctgcctcatccgctggatcagcgagaggggctcctggagctgtgagctctgctacttcaagtaccaggtcctggcgatcagcaccaagaacccactgcagtggcaggccatctccctgacggtcatcgagaaggtccagattgctgccatagttctgggctcgctcttcctggttgccagcatctcctggctcatctggtcctcactcagcccttcagccaagtggcaacgacaggatctgctctttcagatctgctacggcatgtatggcttcatggatgtcgtctgcataggcctcatcatccatgaaggctcctctgtctaccgcatcttcaagcgctggcaggcagtgaaccagcagtggaaggtcctaaattatgacaagaccaaggacataggaggagatgcagggggagggacggcagggaagtcaggccccaggaactcacggacgggccccacctctggggccacgagccgccccccagctgcccagcgcatgcggacgctcttgcctcagcgctgcggttatacaatcttgcacctccttgggcagctgcggccaccagatgcccgttccagctcccattctggccgagaggttgtcatgagggtcactacagtctgaactggactccaggagcagggatcttgagtcaatgcatcagtcagagaagaactctcatggctgctggaggtaccagctggacaaggtgtttggggcatgctgcccccgtcaccgaggatctgtgtgggtagcctcaagctggagacattgtctggcctcactgcccactgggtagagacacctggatgacatttcagtacccgctggcagctcctcccactcatccagagacggccggtgggcaggcggggagagcagctttccttccctggagagaaccgtctttacctcagctcctagggcctccagccccccagctccaccacggtgacttggtgaagggggaccaatgccagaagaaaggggctgtagacccctattccccaccccatggccacagggcatctggcaataagactagtatacattgacctcccgttccctgcatgagggcggggagttccccctgctccatcccccattgcatgggggaagggcataaagaatcatttatatgcacgtggagactcctttctcatctggggcttttctggagggttgggagatgtggggaggtttctctgcacaggttgcaaatcccaaatgcagcagtgggttctgagttgtaggtgtgactcccacttgctggtgaataattcatgttggctgctaggtggcagcactccgaggtatctaaagggtagacctggacctgccacctatgagttgtgtgatatagaaaaaaatctcttagctctggttttcctgtctacttcatagggttggaataaggataaatgagggacaggttggatgccgttgcagagaaaatcagcaatgacataaagagatttctagaatagttgatggtccatttatttcaaatagtagctggtgtaacaaattctaaaatgtgtttttcatctggagttgcacagaatcatggaattttgtgttgagtgacataataggtatggaaatatgaggggaaatagacattgcaaatgtgaagcatggtggttatttgttaagaatgagaactcctctgactctaaatatttgggcctgtgggctggggaaggctggagccatctgccttgttctggagatcatctgggttctatcagtccttctcaagtactgtgctcacccagaaaagcagtgtgaagtgaatttggactcatttggagtgagatggagggaatccccccactcagtgttatgagtctccaaccccagtttaagctatttccatggcagtttagggtcacaggtttgatcccggtgtgcccagccagtggtattaatggatggcattatgtttggaggcagcagcatagaggactgttgtttatagagaaaagatttgggaaggactgtttacaatgtgggtcagcctgaagcctgggcactttcttctgtgaccttggggttgtgtattatatgaatgatgctgtttttaagtaaaccattcaacagcaattaaataattccttcattcacggctaaaaaaaaat

SEQ ID NO: 106043 - DNA, 1711 bp, Homo sapiens
ctgcccacgagtgcaagattgtattaccgcagcgctgaggcaagagcgtccgcatgcgctgggcagctggggggcggctcgtggccccagaggtggggcccgtccgtgagttcctggggcctgacttccctgccgtccctccccctgcatctcctcctatgtccttggttgtcatgagggtcactacagtctgaactggactccaggagcagggatcttgagtcaatgcatcagtcagagaagaactctcatggctgctggaggtaccagctggacaaggtgtttggggcatgctgcccccgtcaccgaggatctgtgtgggtagcctcaagctggagacattgtctggcctcactgcccactgggtagagacacctggatgacatttcagtacccgctggcagctcctcccactcatccagagacggccggtgggcaggcggggagagcagctttccttccctggagagaaccgtctttacctcagctcctagggcctccagccccccagctccaccacggtgacttggtgaagggggaccaatgccagaagaaaggggctgtagacccctattccccaccccatggccacagggcatctggcaataagactagtatacattgacctcccgttccctgcatgagggcggggagttccccctgctccatcccccattgcatgggggaagggcataaagaatcatttatatgcacgtggagactcctttctcatctggggcttttctggagggttgggagatgtggggaggtttctctgcacaggttgcaaatcccaaatgcagcagtgggttctgagttgtaggtgtgactcccacttgctggtgaataattcatgttggctgctaggtggcagcactccgaggtatctaaagggtagacctggacctgccacctatgagttgtgtgatatagaaaaaaatctcttagctctggttttcctgtctacttcatagggttggaataaggataaatgagggacaggttggatgccgttgcagagaaaatcagcaatgacataaagagatttctagaatagttgatggtccatttatttcaaatagtagctggtgtaacaaattctaaaatgtgtttttcatctggagttgcacagaatcatggaattttgtgttgagtgacataataggtatggaaatatgaggggaaatagacattgcaaatgtgaagcatggtggttatttgttaagaatgagaactcctctgactctaaatatttgggcctgtgggctggggaaggctggagccatctgccttgttctggagatcatctgggttctatcagtccttctcaagtactgtgctcacccagaaaagcagtgtgaagtgaatttggactcatttggagtgagatggagggaatccccccactcagtgttatgagtctccaaccccagtttaagctatttccatggcagtttagggtcacaggtttgatcccggtgtgcccagccagtggtattaatggatggcattatgtttggaggcagcagcatagaggactgttgtttatagagaaaagatttgggaaggactgtttacaatgtgggtcagcctgaagcctgggcactttcttctgtgaccttggggttgtgtattatatgaatgatgctgtttttaagtaaaccattcaacagcaattaaataattccttcattcacggctaaaaaaaaat

SEQ ID NO: 106044 - DNA, 1737 bp, Homo sapiens
  misc_feature (1613)..(1613): n is a, c, g, or t
  misc_feature (1620)..(1620): n is a, c, g, or t
ctgggcaacagagcaagactccgtctcgaaggaaaaaaaaaaaaaagaaaagaaaaaatgatgttgatgatgatagcaaatatgtagtgttttctgtgtcaagttttggtgtgtattaactcttaatcttcacaataatcttattagatactattattatccccttttacaaacgaggacactgatgcacaaagatttgaaaacttacccaaggttacttagccagtaagtgatggagtcaagatttaggattcaaatctagatgttttggtttcagagcacttgcccaatcctgcctttctaaagtaagacaaatggtgtcagacaagtgccacattctagatttaatcaaggcacagagaagacagatgttgatcctgcctgaaggttttagggaaggttcctggagcaccctgctcttcagggccacccatcacctggccctccatccctttctgggactctttggagccctttctcccacacagtggcaggccatctccctgacggtcatcgagaaggtccagattgctgccatagttctgggctcgctcttcctggttgccagcatctcctggctcatctggtcctcactcagcccttcagccaagtggcaacgacaggatctgctctttcagatctgctacggcatgtatggcttcatggatgtcgtctgcataggcctcatcatccatgaaggctcctctgtctaccgcatcttcaagcgctggcaggcagtgaaccagcagtggaaggtcctaaattatgacaagaccaaggacataggaggagatgcagggggagggacggcagggaagtcaggccccaggaactcacggacgggccccacctctggggccacgagccgccccccagctgcccagcgcatgcggacgctcttgcctcagcgctgcggttatacaatcttgcacctccttgggcagctgcggccaccagatgcccgttccagctcccattctggccgagaggttgtcatgagggtcactacagtctgaactggactccaggagcagggatcttgagtcaatgcatcagtcagagaagaactctcatggctgctggaggtaccagctggacaaggtgtttggggcatgctgcccccgtcaccgaggatctgtgtgggtagcctcaagctggagacattgtctggcctcactgcccactgggtagagacacctggatgacatttcagtacccgctggcagctcctcccactcatccagagacggccggtgggcaggcggggagagcagctttccttccctggagagaaccgtctttacctcagctcctagggcctccagccccccagctccaccacggtgacttggtgaagggggaccaatgccagaagaaaggggctgtagacccctattccccaccccatggccacagggcatctggcaataagactagtatacattgacctcccgttccctgcatgagggcggggagttccccctgctccatcccccattgcatgggggaagggcataaagaatcatttatatgcacgtggagactcctttctcatctggggcttttctggagggttgggagatgtggggaggttttttttttcttttttcttnctttctnttgcttctttgtgttctttgttcttctcgttttgtctcctttcttttctttcgtttgttttctgttgttattctctccctttttgtgccttttcttctttttactaatccttgtttt

SEQ ID NO: 106045 - DNA, 921 bp, Homo sapiens
gacaagtgccacattctagatttaatcaaggcacagagaagacagatgttgatcctgcctgaaggttttagggaaggttcctggagcaccctgctcttcagggccacccatcacctggccctccatccctttctgggactctttggagccctttctcccacacagtggcaggccatctccctgacggtcatcgagaaggtccagattgctgccatagttctgggctcgctcttcctggttgccagcatctcctggctcatctggtcctcactcagcccttcagccaagtggcaacgacaggatctgctctttcagatctgctacggcatgtatggcttcatggatgtcgtctgcataggtgagggcacctctctctcctttacctgctctgtatcttcctcttacacacctaactcccctgcccatcccctcagtttcctggctttattttctgccactgtagcctttagtgctatcctggtgccccctcaacccacttccctgcttctccagggccctttgcaactgtatcttctcactctgaagaaatgcttgcttaagtacctctggcctagatctaggccacagttaaccctggatttcttattcctattgctcaggcctcatcatccatgaaggctcctctgtctaccgcatcttcaagcgctggcaggcagtgaaccagcagtggaaggtcctaaattatgacaagaccaaggacataggaggagatgcagggggagggacggcagggaagtcaggccccaggaactcacggacgggccccacctctggggccacgagccgccccccagctgcccagcgcatgcggacgctcttgcctcagcgctgcggttatacaatcttgcacctccttgggcagctgcggccaccagatgcccgttccagctcccattctgg

SEQ ID NO: 106046 - DNA, 647 bp, Homo sapiens
cctataacagagcagagtatcttatgtgcagtaaacattcaatattggtaaactggcttgaccaacactagaaaagtgcatgaaagaagtcactgtttcctgaattagccttgtagtttcaaaaggtaaatcaagaataaaaatggtttcatggtcaaataaatttgggaagcagtgtatattttattcctatcttagaaaatcacagtgcaccctagaatatcaaaagcctgtgacatcttgaaggagagaatctagttatattttcttcaatccagtattttccaagttaatattatatacctttttcaaaaatttattttttgagggtacctttttaaaacattatttgtgaaactatgtttgaggactatgtttttcagaatgtttgggaagcattgccatatcttcctctaggaaaaaaaatcagtttttaatcggaaaatgggaggagtgctttccacaaatgtgtcaaaattcttcctcacttaagtttaagaaactgcaaaacagagattgtacataaattagttattgccttcatatagaataaacatagtattcttacttcagctcatgatctgacacttaatttagtaatacttccgcccaaaaggggtgtgacatttatgcctgctctttgtact

SEQ ID NO: 106047 - DNA, 390 bp, Homo sapiens
cagttcctagggaggcagttctccactcagtcccctcaggttccaggtgtggaggaggtgtggtgactgactgtggccccgtagagagtgtaggctgcaggaattcaggaattcatcccgttgcatttgccctcccagagagagctctaaccagttttctttctgggtcaccgaagcagtaaggcacaccttgccaaggtgagcattatttttttctcagacccagcgtcttctaatctactttgggggtcatgtatttccccttccaccatggctttggccttgatccttttggatctagcaaccctggcattgctgtgctaagaagcatgtggctcttgcccatccagcgtgagcccagtttgccctggtgattgccaccttccccta

SEQ ID NO: 106048 - DNA, 641 bp, Homo sapiens
caatcctcctgccccagcctcccaagtagctgcgaccacaggtgcacgccaccatacccagctaatttttaaattatttgtagagacaaggtctcactatgttgcccaggctggtctcaaactcttgagctcaaacaatcctcccacctcagccttttaaaatgttgggattacaggcatgagcaaccatgcccagccagaaagggattttaaaagacctgttacaaatatgctcagtgatttaaagaaaaagatgaacagaagaaaaatggaagatctatagatgaaccaaattccaggtctaaaaaatgaaaaatgcaatatctgaaataaaaaatccactggatgagcctaatagcagagtgaacatgacagaagaaaggataagtgaacttgaaaaactagtaaaagagattatctaaactgaagcacagagaaaaaaaatgcacagtgtctgtgacctgtggaacagcctaccatatatgtcactggagtctaagaataaaaggagagagaagcagagaggcactaaaagcgtttgaaaaaataatggctgaaattttttaaacttgatgcaaactatgcaaacaatgaacatccagcaggatgagcatgatataaactacatcagagcacattgt

SEQ ID NO: 106049 - DNA, 232 bp, Homo sapiens
gtttttttaaatgaaaagacaagagatgtcaaatttgctgacccttttttgtatgacaagtgactatgtaatctgcattgcagattaaacaccaagcaaccaaccaatcaatgcaacactgttacttcatttcttcaaggtaaaggtaatgttttaacaaggagtgaaaatgtaactgccttttctaaaggctgggataaaaacacagaatgtttttaaaatcactgtttgg

SEQ ID NO: 106050 - DNA, 332 bp, Homo sapiens
cgctatgttgctcaggctggacgggaacttccgggctccaagtgatcctcttgccttagcctcccaagtagctgggactacaggtgcatgcccagcaaaattagcgatttcagtcaatacaagaaatatgtccaggaagataaagaatataaaatttaaagatactgaataaatatccatttcgctaccccgcctacttgtcctaagataattatatataaaaatttaaataccaagttcctaaaggaatcccaaaaattcaaacaatgggcttttgatacaaatatagtctttgaacattctgttaattggtgtcctgtgccaggtataca

SEQ ID NO: 106051 - DNA, 420 bp, Homo sapiens
gaagaagactaaatatatatttcacaatatcacaggtatgataactgtactctagcaatgcttgacattttctccacaatggaatttaaaatactaaaaattaaaatatatgaaaataaaccaaaacatgagggccaatatatatacaaaataattattaacagtattattttatccaaaaaaagttttacaaatatggaaataaaaaggtcaatctctattacggtaaaagaaaatgaatattctggccgggcacagtggctcacacctgtaaccccagcactttgggaggccaaggcggatatatcacctgaggtcaggagttcaagaccagcctgggataaagactgatgaagagtctgtaacaaatcaaaggtagagaatgagacaagggttctgaatggaacttctgaaaacatt

SEQ ID NO: 106052 - DNA, 613 bp, Homo sapiens
atagctttgtatattagtcagctattttcaacattgcctatcatggtgctttgcaagtggttactcagtagttatttgctgcatgaacgaatgtctcttcattgagtcactgcatcagtcacttccctcctaacgtttcaggggatctttccttttcctcccatctctatccttttggttattttccttcttgtttgcatttcctctggagggtagaccaagaaggcaaaggagatgagtccaaaaccattctgttgtttattagtaaccctgataagaaaaaaagtattatatgagaaaggattgaaatatttggtgaaaatcagattttggagttaatgctggatttcattttttcattctgtatctcccactactagttatggattcggtttttgctgttttttcttttcttcaaagccctgaccatcttttttttctttaatttatagctagtgatgtcctcttacattttattttatttctcatttttataactttttccccctccatatggaagcctcttccatgtggagtcctaattcgggaaaaggagtcaggctggcgggaccaagggaatgcaaaaagagaaagcagataagctgtaactgcc

SEQ ID NO: 106053 - DNA, 411 bp, Homo sapiens
ggctgcagggattactgaggcattcatactgatgggaaagttgtcgtgaaacctaatatgagataatagaagcatctggcacatcatctcctgccgccctctactgcacaagaagaggtttgagatcacgattcagcctaattactgaacttgtcattatcatgccctatgctcagtgagaggctgctgtgtaccagcactgtgctaaagggcttcacagaaattatttcttgcaatcttcacagcaatgcttatgagataattattatccccattggattgatgagaaaactgtgatatggagagatgaaacagcttgtccaaagcatattcttacaaaaaggcagggctccactgcctccctattcatggagtcgcagagctgaaaggaactttaaaaattacctggac

SEQ ID NO: 106054 - DNA, 107 bp, Homo sapiens
agtataactcagaataaagaagaaaagccacagcgaccttcctcatcagcttctacaagcgttcatccagaaggctgccgtgttattgctggagctgctgtaaccag

SEQ ID NO: 106055 - DNA, 132 bp, Homo sapiens
acccggccgtcgccggcagtcgagagtggacgggagcggcgggggcggcgcgcgcgcgcgcgcgtgtggtgtgcgtcggagggcggcggcggcggcggcggcgggggtgtgtggggtcctcccccgcccccg

SEQ ID NO: 106056 - DNA, 425 bp, Homo sapiens
agtgctgggattacaagtgtgagccaccgcacccagcctccttctcttctaaatctacctcatacatttcctgtgttgttccatcatcttcaaaactgaagtcttccatgactgagaactgcccatcaagtgccccaatgatgtggagaggctttgtttcgtcccctaacggggtgggatcagaatgtgttctggaagcctctgggcctccatgtggcctgctggagatgcgggtttccctgccccaaggcactgatcccaggaacccacaggtgccccagagaaaggacctgaagttgctaagagggacacagatgctgccagatttgtgtctgggaggagcggctcctaataggtgacaattattcctagactttccaactgctcacattgggtaagactttcaaagccaattattttataag

SEQ ID NO: 106057 - DNA, 293 bp, Homo sapiens
gatctagaggatccggctgagcagctggcaggtggaaaaaaaaaagtgccactggcgacaggagggcccagctggcagaccccccaaccacatcagaggagttttcatttaactttactgttcggacaaactattctcatctgacctcataacggtctctttaatcataggaacagtttcaagaaggttgatttgctcaaggtgatacagctgttaaattacaggacaaagccttgagcccaagttcctaagactctctgacacctgcaactgtggcactgccagctcgctca

SEQ ID NO: 106058 - DNA, 95 bp, Homo sapiens
atgacttttccctgccaacccagcacagtgaacagataagtcagaagagtctgggagcaggaccctgaaagatggatgtgatgtcgactttcatg

SEQ ID NO: 106059 - DNA, 158 bp, Homo sapiens
ttgccttcactcgggatgcctctttgactcttttcatctgaaacagtttttgagtctttgtattctttgacattggcatttttgaaaagtacctgccagatattttttaagatgtctaaaaattcctttttaaataaatttaagttttaaataagtga

SEQ ID NO: 106060 - DNA, 323 bp, Homo sapiens
gtttacctatttgtaaaatgtgatactggagtagagtattcttgtcctttctcttacctaagacctagctaatcagaacaggtgatatcacatgtagatccaggttctggagctctaccagggcagttccattttctatttagaatcagcttgagtctttcctacctggatcaacatatggtcatcagtctatggtcactaggaatcctctcacaatcacccgggaatctttaagacatttcaggatgtcctgtacagacttaggtcagactggcaggagtgcctaattctgcttccatgttagaggaagggaaatgagtcat

SEQ ID NO: 106061 - DNA, 1018 bp, Homo sapiens
  misc_feature (848)..(848): n is a, c, g, or t
gctggtgtctttgcttacagaatacagtcaatccttgcccagatgatactttgatatctttcttgcctctcgcccatatgtttgagagagttgtagagtgtgtaatgctgtgtcatggagctaaaatcggatttttccaaggagatatcaggctgctcatggatgacctcaaggtgcttcaacccactgtcttccccgtggttccaagactgctgaaccggatgtttgaccgaattttcggacaagcaaacaccacgctgaagcgatggctcttggactttgcctccaagaggaaagaagcagagcttcgcagcggcatcatcagaaacaacagcctgtgggaccggctgatcttccacaaagtacagtcgagcctgggcggaagagtccggctgatggtgacaggagccgccccggtgtctgccactgtgctgacgttcctcagagcagccctgggctgtcagttttatgaaggatacggacagacagagtgcactgccgggtgctgcctaaccatgcctggagactggaccgcaggccatgttggggccccgatgccgtgcaatttgataaaacttgttgatgtggaagaaatgaattacatggctgccgagggcgagggcgaggtgtgtgtgaaagggccaaatgtatttcagggctacttgaaggacccagcgaaaacagcagaagctttggacaaagacggctggttacacacaggggacattggaaaatggttaccaatggcaccttgaaaattatcgaccggaaaaaaagcacatatttaagctggcccacaggagaatacatagccctgaaaaaggattgaacatttctacatgcgaatngagcgtgctcaggggaggccaagaaaaagcggagcattccatgccatggggaccgcagtgcacatcagtccggccccacagagagaaacgcgagaagggaacacgtcaaaaatcccaacggccagaagccgcgacacagagagacggcatactacacaggacaaagaacg

SEQ ID NO: 106062 - DNA, 361 bp, Homo sapiens
aatgtccccgtgcctgtcttctcatcttctcgcctggttggcctttactccctaagtcaggaaatcctccccagaagccatggccccagctggccaggacactctgaggttggggtggggatcgggggaattgccccaggactgtgttgtgatgctggtgtctaggaggtttgcaggtccagctgaacaccaagaacaaagctttgccaagctagacaagcctggagtccttggacctggccgggcaaggtggagggagggggcgtggagaatcacaggaggccagaaggcaggacacacacctctggaagaacggagcacaggtcagtgatgcagaggaggctggttaggcggccaaggg

SEQ ID NO: 106063 - DNA, 499 bp, Homo sapiens
tagcaattattcattcatttttattgctctatattagcatttaattatgtaaacacacctcaagtcttctatccactgtactcttggtttccactttcatttttccagtttttctcccttacatataatgctgtaatgaatattcttgtatttgtttttcagtgaatatacacatgcatatcttttgtggatagacctatttgttctgggccataggttttacatatgttcaactttagtagatactagaaaacagttttccaaagtggctataccaattttcatactcgctggcagagtatgagagttccagttgctccacatcttcatcaacatgtgttactgtcaatctttgtaatgttagtcatcttggtgataaccagtgaagttagatgccttatcttatgtttattggccatttggatatgcttcttttatgaaatgctctttcaagtcttttgttcattcttttaccttatagcaatgtcacgaagatact

SEQ ID NO: 106064 - DNA, 338 bp, Homo sapiens
tctacatgctcttcttgatttgtgcataatgaatatcaaccattgacttcagttaatggtctgaatggccttaatccctatcctcaaagcaatttacaagctacttagagatgcaggagttggatacaatgcacgtacttcaaggctgtgcattgttaggtgccaaggacaagaagaaaaacgccatttcttgagatgccttccccatctctaatacagtgagtacaatcaccaacattttattgcagggatacagagactcaatttaaggaatgtgtccaaagccatacttggtaaatgacagacataggaggtataactgacacaccaactcatgc

SEQ ID NO: 106065 - DNA, 316 bp, Homo sapiens
cctccccagaacccagagagccggggcagaaaaaacgaatcctcttagacatccctgtgggctgagcacgggttccctctgtccttaattgtctttcctccatgaggaggatttacttacagaggagttttcagtgccaagatgcttataagaaagctcttaagctttttgatgtgtttgttacctggtttcataccaggggtctcagaaggcccaaggatgaggagccagcgtgggagtgtgggaagtggaggaaacgtggtcatgaaaacagtgcattctccttgtttagccagaaggaaaatgaaatgttgca

SEQ ID NO: 106066 - DNA, 438 bp, Homo sapiens
gtagagacggggtttcactctgttagccaggaaggtctggatctcctgacctcgtgatccgccctcctcggcctcccaaagtgttgggattacaggcatgagccaccgcgcccggcctgattcttaaaatacccatttacacagcactaatttgagaatcataaaggggctgtccgaaataggattggggctgtctgaaataggattggggttcacgagatcaagccattgcattccagtctggacaacaagagcaaaaactctgtccaaacaaaaaaacaaaacacaactacaaatggggggaccaggtatggtgactcacacctgtaatcccagcactttgggaggccggggtggatgcatcacctgagttcagaagtttgagaccagcctgggcaacaaggtaagaccccatctctacaaaaaataacctgggtg

SEQ ID NO: 106067 - DNA, 459 bp, Homo sapiens
gcttagaggatccggctgagtgcatggtcatgctgtaatcccagcattttgggaggcaaggcgggcggatcacttgaggttagagttcaatgaccagcctggccaatatggtgaaaacccattcttttataaaaattacaaaaactagccagctgtggtggtgggtgcttataatcccagctactcaggaggcagaggcaagagaatcacttgaccctgagaggtggagattgcagtgatcccacaccaaccaagatccatactttggcagggtggggtgtcattcatattgggatgttgctgttcccaagcattctcagaggatggagctgggaaatagacatatacatatgaatagaaatagacacacacacacacagcctcaacatctctttctgtctgtccaccttaacagtcactggcccacactgacaccactaatcccaatccaccattgca

SEQ ID NO: 106068 - DNA, 269 bp, Homo sapiens
acatgaaaaggtattcactatacagtatgtgagaaaaaaaatcatacaaccctaaatttataatcagatattcagaaagacaggcctttggtatataccaaaagttcttatttttgtttggtggggttatacatgcattctttgccacttatccatatttactgaattatctacatcgagcataatgaatttataattaagagggaaaaattattaataataagaatacaatgaaatgttttatatgtgtgaggctagggagagcacag

SEQ ID NO: 106069 - DNA, 222 bp, Homo sapiens
tgcacacataaccacccactcagggaatgacaatgtaaaatgtagtaaaatattaccatttgaggaatttgagtaaagggtatacagggattctctgtactgaaattatgaaacaaatgtgtttttctaagtagtttatatgacagaaattttcaaagtaactttcatcatgtgaattttctcaacaggaaggttgataaccttgaaaattaatgggaaaca

SEQ ID NO: 106070 - DNA, 355 bp, Homo sapiens
tttcctcacacttttggagggcagaagtccaagatcaaggtgttggcagggttgatttcctctgaggcctctttcctggggttgcagatgaccatcttctcactgtgtcttcacatagtccttcccccgtgcaccttttaaggacaccagtcagactggattagacccaccctaacaatctcattttatcttaatcagctctttaaaggccccgatctccaaatactgttctattctaaggtactgtgggttaggacttcaacatatacattttggggaacacaattttgcccataacaaagtgctgggattacgggcatgagccactgcgcccgccaagcccctttgttttaat

SEQ ID NO: 106071 - DNA, 858 bp, Homo sapiens
ggctggcgggaccagctgcttccggctgggctgcgggcgtggactcctcattccggctgtggccgcgccgctgcggggcctgaggccctcttgggttttggttcagcgttagttaacggttaacccgccaaggcgggcttccgcccaggcacaggagactcaccgagcttgttcaccttgaaacttgggccacacctgagacctgccacctaaggggggtacgcgggtcgtttttaacaagctttcatggcatttgtgccatgaaagctctaaagtatagaagctgctccagggcttccgcagccccggccgtcctggagatactcgcctcctggagtctgtgtcgagaatttgcagcacctggacagccacgtgcagtctcagaactgcaggcggtctttaccgaaatgttaaacacaacttgaagttaggcaggataactgccagagctggatggaccttagaggtgccagctaacgcgctgtgagcgttttctgcggttaggcctgctctaaacatttgacatgtgttaaagcatttatgtgctttacccacacccctatgtggcgggcccttcttaaagtaaaagaaactgcagcacagcgaagttaagcaacttgccccaaatcacgcagaactgggatgcaaacccaggtctagctcactcgtgatcacaattcaacatcatacgatggtgctgatttccagagcagctctgtgactttatataaaattattgggcaagcgttcaattgtaaacattcgtgaacatagctgttgcacattagcgttcctttttttttttaattcaggaccatctttggtgacaaatataaatatcaatactatatatatcac

SEQ ID NO: 106072 - DNA, 255 bp, Homo sapiens
aaaaagcagccttcactcacagggctaataagaagccaaatcttcagaggagagccagctctcagccttggagcaagaagctgaagggtagagtcagagaagttgatcaaatagtgggttgtactaataaccatgagcttttgtactagtagccatgagctttgatgtaagctcatgggtattaatgcaaccctctatttgctcaactgaaagttgaaagtgaaagaacttcagcagttaggtcatagtggatag

SEQ ID NO: 106073 - DNA, 451 bp, Homo sapiens
agtcccagctacttggggggctgaggtgggaggattgcttgagccctaggagtttgagaccaggcctgggcaacatggtgagaccccatctttataaaacagttttgttcattcctggaggtccctctccctgtcaaatagcatccagtttttgtttcatagttatagtatattttcttaaatatctaaatatagtagtaacagttctgggggttttttggtttttgtttttgtgtagagatagagtctcaccctgtcaactaggctggagtgcagtggtgggatcagggctcactgcagcctccacttctggggttcaagcaatcctcctacctcagcctcctgagtagctgagatcataggtgtgcaccaccacacctggctaatttttaaaaatgggttttttttttttttgtaaagatgggtctcactatgttgcccagaaatcaaa

SEQ ID NO: 106074 - DNA, 1091 bp, Homo sapiens
tactctattaaaagctctagttgttctctgctctcctcacttatctgactctgaaatcttctaaatggtacccactttatttagaacgttttagggtcaaataagtacaggttggaatcctgagtgcaccacttaactattgaggctgacagccagtgtacacctgggtcttcacttcccctgccccatgactcttcattgtcttagtcccttctatggacctccctatgatacctcagctaaaagtttgaagcagaacccagctcctctagcaccagctagtgtctgttctgagtggccgatgctggtacaagtatgagttattaaatatttttaatttcaccctgtttattatatgtatgattttaattaagttacttgtcctttctgagccactcccagatctttaaaatggggataataatacctgttttgcaggatgactgttcattcatcaaatatttgttgaaggcctgccttgttctaggcaatgacttaagtacttgggatatattggtgaacaaaacagaaatgtctgtgccttcttggatcatgtgttttagaattatgagaattaaatgaaaataaatattcaatatggtgccagacacatagaggtgcccacagtgtcttatctcactttcttcctgcttgccatatcttttccatcagggccaaagagaatgggaagtgggaagaaataaacttcatatttcatttgtatagctgtggagagtagcaggccctgggtccctttggggaggtcatgcgaactgggcatggccttctgtcaagaattattagaccaggcatggtggctcatgcctgtaatcctagcactttgggaggctgaggcaggaggattgcttgaggccaggagtttgagaccagcatagccaacatggcgaaaccctgtctctaataaaaatataaaaattagccaggcatggtggcacatgcctgaaatctcaggtctccaggaggctgaggcatgagaattgcttgaacctgggaggtggaggttgcagtgagttgagattgtgccattgcactcccacctgggcaacagagtgagactcttgtctcaaaaa

SEQ ID NO: 106075 - DNA, 716 bp, Homo sapiens
gcacaatgtggttattttagtgagaaaataagtcttaccttggtctcagtcttgcaatgtaacctgaacttatttgcttaaccactctgagttccagtgtgcgcactggaacttacttagcattcttacttagaatgtgaaagtcaaaataagagtatgtaaaaagatatgctgagatgtttccactgttacacaaatgtaagggttggatgttatgtcctcatctcctgtctggctcttctctctctacctccagcctaatcttccccttctccacctcactgtcctcagcctcactggccttcattaagttctagaaagagttatcctctttcctgcctcagagccttaacacatgctgttccctgttcctgtaacactcttctctttttaaattattattatttaatttttgagatgagatccactctgtcacccaggctggagtgcaatggcacaatctcggctcactgcgtccaccacctcctgggctcaagcaattcttccacctcagcctcccaagtagctgggattacaggtgtgcaccaccacacctggctaatcttttttgtatttttggtagagatggggtttcctcatgttgtccaggctggtctccaactcctgagctcaagtaatccacctgcttcggcttcccaaagtgctgggattgcaggcgtaagccactgtgctcggcttccttctctttatgtctg

SEQ ID NO: 106076 - DNA, 363 bp, Homo sapiens
ttttgtagggacctggggtctcactatgttgcccaggctggtctcaaacttctgggctcaagcaatccaccctccttggccaggagtttttgccaagtccatgtcctccctccctctgtgtcgggagcaggcctgggcactcagcgtggggatccaggggttcacaggctgcctttgtgtgagagaagctgctatctctgctcatgggttgcccaggggtgcagagtctgcaggaaggttgcgatggagctgggcttttccctccgttcccagcctgcagcgtcatgagttgcctcctgtgctggggtgcagcctgcggttgctttagttctgtgtgggcgagagcttgtgggccccggcgta

SEQ ID NO: 106077 - DNA, 424 bp, Homo sapiens
cacatggggtataaacgtttaaattatgccaaaaactaattaaaacagatatgttgtagatgtaattgaatgcaaccatattacccatttgagaggactggttttaaggtcggtctcactctttaatgcttttctacagctctaagatgtaagtggatgtctcccctacccaattcagagaagccctgaaaccgaagccaaaagatgcactgagaagtcattgtattatatgacttatcttctttaaaagccctggctatttgacatttgatgaaatgccaaatcccaagtgcctgagtccactctgacacattctgtttattatgtagtagtttcaagttggggacccaatttgcaactaactccacaagttatatattacataatgggtatgttctgataaatcacaggaaaaacatgtcag

SEQ ID NO: 106078 - DNA, 218 bp, Homo sapiens
tttattaataagggatagggcaatagccctccttccctttcgagaataaaagagtacaaaaaaatgtacacattagtgaaaacttttttttttaaacagagtttcaatcttgttgcccaggctggagtgcaatggcgcaatctcagttcgctgcaacatccgcctcccgagttcaagtgattttcctgtctcagcctctcaagtagctaggattacag

SEQ ID NO: 106079 - DNA, 497 bp, Homo sapiens
tggatgggttctccctctccagttgttcccaggttgtctttaatgtctttccacaaagttttgtaattattcatgtttaggtcttatacatatttcgttaggtttattttgtatctttatacaggatgctttgtagtactcactggtatcataattggtgtctttaaaaaaatcttttaaatggattatttctgatgtttagatatatggtaaacttttgtatttggtcaccctgataaactcttatttcaaatattttgtagattcttgtatttggatgatggcaaacaatgatagctttatttcttcccttccagttttttttcctgccatcttgtgctggctagggcctttagtacaatgttatagagaagtgctcatagttgatatttttgtcttgttactgattttaaaaagaatgtttttgatatttccctatttaggatgatcttcactctggaatctcagatgcacttgatttggataccctttttaac

SEQ ID NO: 106080 - DNA, 500 bp, Homo sapiens
accatatacaaagcaaataaagtatctattcaaagctctacctcatctttgtcagcttgtgtccagcattggaaattcaagtattgtatttgaatgtaatgatttaagtgaattgtaccatgttggggtttggagtatctcttagtatgacattgaggtggaagtagctgaatctgaacttggtgtttttgagcctgctgtcctatatttgctctcagaattcatgttaaccaaacattactccttgttctttttaatcctctggttcgtaatcaaattgtttcttagcttctgaaagtcttgttaaatcatttaaggtctatgtgacgatagatggtcgttagagaaaagtcaaaaccagattcttggctgtgtccccactcgtgccataggttgtgttctagtgtgaaaacttactgtttcactttcttgggaaagatggggacagatttagtggcaacagaacaagactccgtctcaaaaactaaactaaaataaac

SEQ ID NO: 106081 - DNA, 606 bp, Homo sapiens
gtaaataacctatttctcatcaaacttgaacccctagttttagcattcatttatctatgaatcttgcctgagttgttactgtaatggctattttctagcctttttttgatggggaggatactgtactcaagagcttccccttttcctgttcatttgtcagtatgaactcctggattactttgttcagtgagttattattcattactgtcattattttgcttagatgtttccagatttagctggtttcttttatcaatggtttctttgtcctttgtgacgtttccatcaattcttgagtgctttgcattttccagcacagtaagatgttctggatgcactgtgtcatttccctgcctcagtctggggattgggcatttagtagagtggcttggagtactcactgctgtaggggtatcatgacttctgggccctttcagtgtacagaactaggaaatacacatacagtcacatgtcttataatggtgtttcagtgaacaatggacgacgtatatgatggtggtcctataaaataatggagctgaaaagtttctgtagcctagtgatcttgtaacgtaccgtaacacgttactcctgttgatggtggtg

SEQ ID NO: 106082 - DNA, 402 bp, Homo sapiens
  misc_feature (390)..(390): n is a, c, g, or t
ggtagcccctgagggaaggctgtcatattagccttagttgttctacattggtccagatactatttgattatgtaaagtcgtgaataccttctatccttaatattatgtgcatctgttcatgagcccattgaacaagtatcagctgactaacatctattatataacatgtcattgtatgcatacgattactcctcttcagtggattccctctaataagaatttacttgggctacaagtattttcatacttcgtgtctattttaagaagtcatcttcggctgggcttggtggctcacacctgtaatcccagcactttggaaggccaaggtgggcggatcaggaggtcaggagatcaagaacatcgtggctaatacagtgaaatccagtctcncctaaaaaaaaa

SEQ ID NO: 106083 - DNA, 199 bp, Homo sapiens
tccccgatggagtgggcagtgccccagtgctccgcagctggtgccgtctgtctccagacgctcttccagcctgcattcaacaagccagtcgtatcagaaaatattaaccacgggaattaatgaattttggcattgcagtggagttgactgggggagattttccaagtttattttccaagatgtatctggtgctctagag

SEQ ID NO: 106084 - DNA, 402 bp, Homo sapiens
cgtggctctcaatgggggcgattctgccccacggcagaaatgtggcaatatctagagacatttttgattgtcacgactagtagggtcctgctgggtagaggccaggatcagtgcccaccaccaataattatccagccccacgtctggagagctgagtgagaagccctactagggggccatctcggagctgccgattgcaccaggctccctccacatctctgggcctctgcatctgctatgctttccacctagaacttccttccctccctgattcctgagaccaagcctcacagatgttctctgctctacaacaccttctctgggctgcctcgaggcctgtgtctgcacatccgcctgcatttcctcttctcgcatcaccgccccaacactgtacctggatat

SEQ ID NO: 106085 - DNA, 348 bp, Homo sapiens
ttccaaacagagcccactgcctgttcccggcgccagacttcgaacaggtgaggcaactgtgacgccctgtggctcctttcacccggcagtggggagggtgctcaggccaaggggagagagagagacctctaaacacagcctggagaggaaggctgggcgtgctccgccagcttcacacgcacctctcttggccctgccagatgccatttgtgttttctctttcccgtgccctcgccccttgccaaaagctataggcagcatggccaagattcctctgtggggcaggaaaaagcaaagaaggaggcatgagcttctaattagcaaagatagacaaattgctggtggagg

SEQ ID NO: 106086 - DNA, 340 bp, Homo sapiens
cagaagccaagcactacagggttaaccaagatgatgtcagcaagcccgagcgttaaattgctgagtgaacgctgaaagatctttttagccagggaaacattttgctgtaatggtaccattacaaattttttacagtaataacacagcacattataagcttgctcaactgataagctctttgtaagggttagaagtctacagccctcacacacaaagacctttctgtctcagagttcttagaagtcaataagctaaaaatcacatcctgcacaatatccacttagagtcacagaggatctagtcttctattgctttgcctagtttccccttggcatggaga

SEQ ID NO: 106087 - DNA, 416 bp, Homo sapiens
actcatgttaaagtataattttccaaagaaagcatagctgtcatgcaagtataaaataaaataaacatatgtcaaagacacattaaagagggaaccagtaaggtgtatttataagcttgctaactaagaaataaatattagaaaaggattgctatgttagatgtaaaactggttagtatcccatagagcaataaagtataatttgggggttatctttttcactagacaatggttatttgaatatctattggacagacatctccaaattgtcctgtaattttactaaacctggtacctttaatccaaaattcttacactgagataacatttaaatgggcctttgttcccataagacattgaaaggatatgccatcctttcaataaggccatccacctcttgccttatttcctaagtt

SEQ ID NO: 106088 - DNA, 280 bp, Homo sapiens
tgaaactgtatatctggcagccatattttgatggcgggctgaggcctttaggattgatttactgaatgtcattgtgcatcgacttcctgatataaaccacccaaaaatgcatcatcaacaacttctagttcgtttctttttgtggaagggaaccttagacactcaacagcatccaagaacagcctcctccttgtcctctgcagctcttcccaatcattgtgcagtagtcccactcattcctaatttttcagaaattcttttagtgatttctcttttttaa

SEQ ID NO: 106089 - DNA, 864 bp, Homo sapiens
tctttcctgactatcacaatcctgactatcacaagcttgaaaccaagcttctcactcttctccagttgccaactctaatcctctcaatctcaacagctgttttttgttgttttttttttttgagacagttttcactcttgtcggccaggctggagtgcaatggcgcaatctcggctcactgcaacctccgcctcccaggttcaagtgattctcctgcctcagcctcccaagtagctgggattacaggcatgcgcctccacgcccgtctaattttgtatttttagtagagatggggtttctctatgttggtcaggctggtcttgagctcctgacctcaggtgatccacctgccttgggctccaaaagtgctaggattagaggcgtgagccaccgtgcccggcctcaacagctgtctttacctccaacttcactgggctcaaagcacctcagcatcttcctgtagaattactctccttttccttcattactgtttatgagtaataatcaactctttcttacatcctttttctatttccaatcccttctgcctcctcttggaccttctctttcttgcaaatggcttcccatctttgagggcttcttccttttctaacacaactcctatacacaagaacacctctgatttaatcctgccatatgacctggcataatatgatttatctccaacataggagagacaacggacccttgactgcgagggatcgactagttcaggtttaaattgaaaccgagggctgccattttatggatacaaatttttattaacctccaaaattctgaaatgggtcccgattaaaatatggcgacctcaccccttttatagaacacccgaaaaacttaaaa

SEQ ID NO: 106090 - DNA, 317 bp, Homo sapiens
aaagttttatcacattctgatagataatctagatatctacatacatacttgttgtcccaccaaattgtaaacttcttatggccagggccaccctttgttcaacttggatgccttgtagaacccagcagcattttctacatataattactaaaatatctatgacttaaaatctccttaaagagatttaaatgcatctgccctctcatgtggtaacaaatatgaggaaattattttggttcatcaatttcatatctacccaagatagacatttcaaaatggattaagtgccaaattttatcctgaaaagtttgtaggct

SEQ ID NO: 106091 - DNA, 583 bp, Homo sapiens
ggcagtagctcacacctgtaatcccagtactttgggaggccgaggtgggaggatagcttgagtccaggagttcgagaccagcccaagcaacataggggttacaattagttgtctacactggtgccctcatgttgtcccacatgtattcaagaggctgaagtaggaggatcacttgaacctggaaggttgagggtgcagtgagctatgatcatgccactgcactgcagcctgagtgacagagcaagaccctgtctcaaaataaagaaacaaagaaataaataaaactgctggagaatctttcatgcaacagttacttattgtaaatctactaagtagtagtcagtatccaggaagcagagatgaacggcatgatacttgccttcatggagcttacagtctagtggaaaaggtaccagtaaacaagcacctaccacatgccaggctgtgctacgtgcttatatccattatctattaataatgcatcatcacaactaggctgtatggcataaattattatgactatttcccaggtgagataactaaggctttaaaaggtaagtatattgaccaaaaaaatctgcta

SEQ ID NO: 106092 - DNA, 819 bp, Homo sapiens
tggacagtattgaaattcttattgtaaaacacaatttgaacttttatcttttcagctatagttaattagcataagttgcttaggggatattttgggagaggaaaagaaacaggaaaggccgcctgcagagcacaataatcagaagtactcacatggagatttttagcattaatatttttacaaaggaaagacacatactgtagtgattattgattggccctgggggcagggaagatgggggtgagaaagagaacgagggtcttgagagaattcaagtgtttgaacagctgattaaggagtaaaattaaataatcaagtaagagaaataaatttgtgcagatggctgtgaaagggaaactattgtctttgctgccatgggtcataaattcactctttttctcacaaaagggataattgatgcttcaaacattatggatcaaaagcacagtaatgaatccacagctagcattggaataatattgtcctttttaaaatgtcattgagatcattcctcatagaatggctttcaggacttgaagaaaatctatcccagtggtaaaaaaaaaaaaggatttttgccaaaggtcccagggcaatcacttcttccctgtggattgatttattctttccttttatataatttttattttccttgaaacttacagtttttcagaatatgaaagagttagaaagaaaagagtatactttatgcttttaatgagaaaaaggaaggcagcaccagaaacactgggacaggagccataagaggatgatgtggtttcagtttccagtccttcctaatgtttctcccaaagcatc

SEQ ID NO: 106093 - DNA, 823 bp, Homo sapiens
atagaaacctagattcaccatgagtcatcaagggacttaaagacagacgtatctggagaaaaagagaataaagctgaacatgcagcctccagccccagagaaagactgagagagaacaggagaatagaaccttattagacaccagatgtatttccagcaactgggttccttgaaatttctctggttcataagtgcttcacagacataatgggctagtaaattaggtccttattttggaacaaattgagagatatatttggaagtatgacagagatcaagctgtcagctttaattggagataaaagctaagttggagaagggcatactgctaataattcaccccagatttgtcagatttacctaccccatcacaagcccagtaaaaatcacagtataaaggcaaagataatgcatctctctgcagtcaggccaatttcaaagtctcctccaagatattcttatgtaactactctacttgtcacctggacatcaggactttggaaaacttcccaagtgtttccattgtgcaggctgtcatgagaatatcctctctcgggaagacttactagagaaagaagtagccatcaccaatctttcaagccttttgcactcttacctattggatttgaacaacttatgtaaggtcatcttgggttatgattgtccctctcagtgcttttggaggttatatttgtcacttcttaaactaaaggaaaagactcacttttcttataaagttggaagtagtaaatctgttcctttgaaactagagaaatatgtccctgcctatgaaaacgctgttctacttttgcagaggtagctg

SEQ ID NO: 106094 - DNA, 428 bp, Homo sapiens
agctctggtctctgtcagggatatctctcatcagaatccccatcccagccccagtatagttagtgctctgtgaagtctcaatatatattaaagtttcatgataatgggaatttcatctttgacctattcttagagatgggcagtgataaatacaccgggaatccaacatttccctcacttaaatggagaacgctccaagatttagtcattcctgatgatggcaggaagagacagtaaggttgactatcatttgatgaatctggaagggtagagagacaatcaaaataaccaagatcctaattcctttttacttctttcacacacaaatgtgattttagttaataaaggcaaacagttaattggggggattttccttctcaatttgggaggaaaccctttcccaagtgagacaaatgaccatccttttt

SEQ ID NO: 106095 - DNA, 214 bp, Homo sapiens
gtgattgttgtgaaatggggaggtgtgggttttactgttttgagggagaaggcgatgtgtttgtgttatggaagggaggcagggagagacatggccataatttgatggttttggggagggagtgaagattatttcgatttaaagggggcaggggcagccatgtttgctgccaaggcactgcagtgtaaataaattccttttcctctccgacatc

SEQ ID NO: 106096 - DNA, 315 bp, Homo sapiens
ctcatgagaaagaagtgtcagagacaggtttgcatgatagttgtaaaaacagctgtgcagagaactgtgaggagctggaaggacagtagggacagacaaacagtcagcatagacccaaaggcacagaataggacagggaacaatgtaggctggttttggggtctctttttgaggcagggtctcactgtgtgggcccagctggagtgtagtggcagaatcatggctcaatgcagccttgacctcctgggcttaggtgatcctcctacctcagactcccgagtaactgagaccacaggcatgtgccacgcccagcta

SEQ ID NO: 106097 - DNA, 294 bp, Homo sapiens
ctcatgagaaagaagtgtcagagacaggtttgcatgatagttgtaaaaacagctgtgcagagaactgtgaggagctggaaggacagtagggacagacaaacagtcagcatagacccaaaggcacagaataggacagggaacaatgtaggctggttttggggtctctttttgaggcagggtctcactgtgtgggcccagctggagtgtagtggcagaatcatggttgcagtgagctgagatcgtgccactgcactccagcctgggcaacagagtgagaatccatcttaaaaaaaa

SEQ ID NO: 106098 - DNA, 397 bp, Homo sapiens
ctcttctggtagacagctctggtgccctagtccggagcacatattcctgcatggcagtaattgccggagcttgttggctgctgtcccttccagaattgggggagagagagagagtatctcctctttgtacttgtaaaccttcaacttctctcaaggtctgtgtcaccctagccccagaggtatttaagtttacaaatcctgctctaaattgagtatttaaaccaaactgaggcccttcaccttgcctgaaactgccgtctgtgctttccataatgcaggtagtctgagtccatctcaactagggttcctggggtttgctagattttccaagtcccgggcttgcttcagacctcctagttcaacctctgggatggggcctgggagccggcattttaaa

SEQ ID NO: 106099 - DNA, 300 bp, Homo sapiens
tgaagatggagaaaagggaagaaaagggtgccactattaggaaacacaaaaagtgatggcagacaaccagatagacttcagaacttcactctcctgtccaggaccaggcttcattactattgccaatttgctaacactccagccttacagctcctgagtaactttcacgatctctctagggccccaagaaaattacaattgaagaatttaactaataatggtttctgacaagaagaaatcaaatatgctttcacctactccaaactcagcacatattcagaagcaagatgtatcttataa

SEQ ID NO: 106100 - DNA, 473 bp, Homo sapiens
tctatgcccttccttcctctctacgggactcccttatctaccctggcttccttccttagggtaacccatggcagaggtcactgctccccaagtgggaaaccccactgtgacgtgtgagccagcatttctgagaccagaggagccattctgggggaaggagaggtggctgcccctttagaaaccactctccttgctgcccaagagttttgcctgggggttctcaagcagaaagaggattacctgagagggaaagtgccccggaaaaggccaaggactcatgaatcacagcccacctaaagccccaacctaagctacacggagagacagagaggcagcagggctgcctggacaggtctctgaagattccaggcatgtgtctggtccttggctgcttttcccaacccccgtccccaggtgctgaccttggcagagtgacaaacacttcccatacctgtgctgggctcagacgtgcc

SEQ ID NO: 106101 - DNA, 401 bp, Homo sapiens
tgagacagcatttcactctatcacccagattggagtgcatgccacgatcatagctcactgtagcctcagcgtcccaggctcaagcaatcctcttccctcagccacctgagtagctggaactacaggcgtgcaccaccaagtccggctaattatttatttatcattattttttgtagagacaaggtctagctatgttgcccaggctggtctcaaactcctgggctcaagtgatcctgctgccttggcctcccaaattgttgagattacaggcttgagtcactgcacttggccggttttctcatctttagtaagaattgtgatccccaaagctgtttaggtatgttgttaaccagcattgtctagggatggtgaatgtgggctacctaggttaaaattccagc

SEQ ID NO: 106102 - DNA, 732 bp, Homo sapiens
tagagaagaataaattcagattctgagatttccagctactgcatccatggttgcttttttaaattttttttctggttagttttgatttttaaactctgtcttacagaacctgctagatgagatagcaagtagggagcaggaagtacagaagatctgtgccaattcccagcagtaccagcaagctgtaaaggtgagccgggaaacttccgcccaaagcacaaacagcaggggtcttattccaccgtgccctggtcagagaagcagcaagcaccggccctggcacatgggggtggagctggccatccgaggcactgccggctgctgtgcaaactggcacaggcttttgggaaaacagcatggtactagacatggaatgctgtaaaagggttttatactctgaagcagtaaactctttgggggaatttatccttaaggaaaaagtacaaaaaaaaaaaatgcaggataaacaacattgttgcaacagcactatttacaatagcaaaactagtacgctggaaaggactggtgtccagtggaaggggaaagctgcgtgaatcagcacacatccacctgatggattataaagtcagcaagctggtaaacatgagaagaggtggtggcaaggtgagacagggttatggtacgatgttaaaagcagcagcagaatgtgaaaatctctaggcatgtagaaaggctgggaggggaattcagggggcacttcttgtctcatat

SEQ ID NO: 106103 - DNA, 1045 bp, Homo sapiens
tcccttcctaagctgctgggagtcgtcacacccccacccgtgactgggtggagtcgtagtactcacctcccggggttgccgcaaagattaaacagaagcgtccgcgtgcagtgctgaggacagcacaggcccggcagctgcctgggtgcttctggtgtcactagtccattccacctcagcggttccctgggatgctcgtgaaaaatacagccctcaggctggggtccagatgccgggtcagagccccagaatgtgccaggcctctccagctgcttccactgtgcctgatgtgggaatctgtgctcaccctgggcacatcctcaggggaaggggctgcctggctgtgtccaaaactgaggggccctggttcccacagaacatcaccaacgagctactgcggattgaacctgagaagacgcggagcacggctgagggcgaagccttcatccaggccctcccaggcagtggcaccacacccctgctgaggacccaggtggaggacaccaaccggaaatacgagcacctcctgcagctgctggacttggcccaggagaaggttgatgtggccaaccgcctggagaagagcctgcagcagagctgggagttgctggccacacacgagaaccatctgaatcaggatgacacagtgcctgagagcagccgtgtcctggacagcaaggggcaggagctggcggtgagtctagggcccaagtcctgggagtccttctctgagcaggtgagagcatctggcacatccacccgcccgtctggatagatgaggacaccagcatccagtctccccaggtttggaatgcccaaattgggaactgcaaatggaggcccgcagcacaaatccaagctattcacgggatctgtgtgacttacgggatttcgggtgccagcattttaagatcaaatatctgcaatagccagtgtagtggcacatgcctgtaacaccagccattcaggaggctggggcaggattgcttgagccttggagtttaagtccagccgcctggacaacgttgcaagaccctatctctta

SEQ ID NO: 106104 - DNA, 6229 bp, Homo sapiens
cgcgccgccgctcgctcacctgcgctcccgcccgcccctcggtgcgcgcccggcccgccagccgccgccgcccgcaccccgagcgccaccatgaactcgctcttcaggaagagaaacaaaggcaaatacagccccactgtgcagacccggagcatctctaacaaggagctctcggagctgatcgagcagctgcagaagaatgccgaccaggtggagaagaacatcgtggacacagaggccaagatgcagagtgacctggctcggctgcaggagggtcggcagcctgagcaccgggacgtgaccctgcagaaggtgttggactctgagaagctgctctatgtgctagaggcggatgcggccattgccaagcacatgaagcacccacagggggacatgatcgccgaggatatccgccagctgaaggagcgtgtgaccaacctgcgcgggaaacacaagcagatctacaggctggcggtgaaggaagtggatccacaggtcaactgggcggcactggtggaggagaagctggacaagctgaacaaccagagctttgggactgacctgccgctggtggaccaccaagtggaggagcataacatcttccacaatgaggtcaaggccatcgggccccacctggccaaggacggggacaaggagcagaacagcgaactccgggccaagtaccagaaactgctggcagcatcacaggcccggcagcagcacctgagttcgctgcaggactacatgcagcgctgcaccaatgagctgtactggctggaccagcaggccaagggccgcatgcagtacgactggagtgaccgcaacctcgactaccccagccgccggcgccagtatgagaatttcatcaaccggaacctggaggccaaagaggagagaatcaacaaactgcacagcgagggcgaccagctgctggcggccgagcaccccgggaggaactccattgaggcgcacatggaggctgtgcacgcagactggaaggagtacctgaacctgctcatctgcgaggagagccacctcaagtacatggaggactaccaccagtttcacgaagacgtgaaggacgctcaggagctgctgcgcaaggtggactcggacctgaaccagaagtatggccctgacttcaaggaccggtaccagattgagctgctgctgcgggagctggatgaccaggagaaggtgctggacaagtatgaggacgtggtgcaggggctgcagaagcgaggccagcaggtggtgcccctcaagtaccgccgggagactccgctcaagcccatccccgtggaggcactctgtgactttgagggggagcagggcctgatctcgcggggctacagctacaccctgcagaagaacaacggggagagctgggagctcatggacagcgctgggaacaagctgattgctccggccgtctgttttgtgatcccccccacagaccctgaggccctggctctggctgacagcctgggcagccagtaccggagcgtgcggcagaaggcagctgggagcaaacgcacgctgcagcagcggtatgaggtgctgaagaccgagaatcccggagatgcctctgacctacaggggcggcagctgctggctggcttggacaaggtggccagcgacctggaccggcaggagaaggccatcacagggatcctgcggccaccactggagcaaggccgggctgtgcaggacagtgccgagcgggccaaggacctcaagaacatcaccaacgagctactgcggattgaacctgagaagacgcggagcacggctgagggcgaagccttcatccaggccctcccaggcagtggcaccacacccctgctgaggacccaggtggaggacaccaaccggaaatacgagcacctcctgcagctgctggacttggcccaggagaaggttgatgtggccaaccgcctggagaagagcctgcagcagagctgggagttgctggccacacacgagaaccatctgaatcaggatgacacagtgcctgagagcagccgtgtcctggacagcaaggggcaggagctggcggccatggcctgtgagttacaggcccagaagtccctcctgggtgaggtggagcagaacttgcaggcggccaagcagtgctcgagcacactggccagccgcttccaggagcactgcccggacctggagcgccaggaggccgaggtgcacaagctgggccagcgtttcaacaacctgcgccagcaggtggaacgcagggcgcagagcctacagagcgccaaggcagcctacgagcacttccaccgcggccatgaccacgtgctgcagttcctagtcagcatccccagttacgagccccaggagacagacagcctcagccagatggagaccaagctgaagaaccagaagaacctgctagatgagatagcaagtagggagcaggaagtacagaagatctgtgccaattcccagcagtaccagcaagctgtaaaggactatgagttagaagcagaaaaactaaggtctcttctcgacttggagaatggaaggagcagccacgtgagcaagagagccaggctccaatctcctgccaccaaagtgaaggaagaggaagcagcacttgccgccaagttcactgaagtttatgccatcaacagacagaggctgcagaatctggagtttgctctgaatctcctcagacagcagccggaagtagaagtgacccatgagaccctgcaaaggaataggccggactctggagtggaggaggcgtggaagatcaggaaggaactggatgaggagactgagcggaggcggcagctggagaacgaggtcaagagcacccaggaagaaatctggaccttgaggaatcaggggcctcaggaatcggtggtgaggaaggaggtgctcaagaaggtgccggatcccgtgctggaggagagcttccagcagctgcagcggacgctggcagaggagcagcacaagaaccagctgctgcaggaggagctggaggcactgcagctgcagctgcgtgccctggagcaggagaccagagacggggggcaggagtacgtggtcaaggaggtcctgcgcatcgagcctgacagggcccaggcggatgaggtcttgcagctgcgggaggagctggaggcactgaggcggcagaagggcgcccgggaggcagaggtgctcctcctgcagcagcgtgtggccgccctggctgaagagaagagccgggcgcaggagaaggtcacagagaaagaggtggtgaaactgcagaatgacccccagctggaggcagagtaccagcagctgcaggaggaccaccagcgccaggaccagctcagggagaagcaggaggaggagctgagcttcctccaggacaagctcaagaggctagagaaggagcgggccatggccgagggcaagatcaccgtcaaggaggtgctcaaggtggagaaggacgcggccaccgagagggaggtcagcgatctcacccgccaatatgaggacgaggctgccaaggctcgcgctagccagagggagaagacggagctgctccgaaagatatgggccttggaggaggagaacgccaaagtggtggtgcaggagaaggtgcgggagatcgtgcggccagaccccaaggcggaaagtgaagtggcgaacctccgcctggagcttgtggagcaggagcgaaagtaccggggtgccgaggagcagctccggagctaccagagtgagctggaggccctcaggaggcgaggcccccaggtggaagtcaaagaggtgactaaggaagtcattaagtacaagactgaccctgagatggagaaggagcttcagcggctcagggaggagatcgtggacaagaccagactgatcgaaaggtgtgatttagagatctaccagctgaaaaaggaaatccaggccctgaaagacaccaaaccccaggtccagaccaaagaggtggtccaggagatcctccaattccaagaagaccctcaaaccaaggaggaggtggcgtctctgagggcaaagctctcagaggagcagaagaaacaagtggatctggagagggaaagagcttcccaggaagagcagatcgcccggaaagaggaggagctctcgcgggtgaaggaaagggtggtgcagcaggaggtggtcaggtatgaggaggagccaggcctgcgggccgaggcgagcgcctttgccgagagcatcgatgtggagctgcggcagattgacaagctgcgggcagagctgcggcggctgcagcgccggcgcaccgagcttgagcggcagctggaggagctagagcgcgagcggcaggcccgcagggaggccgagcgcgaggtacagcggttgcagcagcggctggcagcgctggagcaggaagaagctgaggcccgtgagaaggtaacccatacgcagaaggtggtgctgcagcaggacccgcagcaggcgcgagagcatgccctgctccgactccagctggaagaagagcagcaccggcggcagctcctggagggggagctcgagaccctccggaggaaactggctgcactggagaaggcggaggtcaaggagaaggtggtgctctccgagagtgtccaggtggagaagggcgacaccgagcaagagatccagaggctcaagagcagcctggaggaggagagccgcagcaagcgcgagctggacgtcgaggtgagccggctggaagccaggctttcggagctggaattccataactccaagtcatccaaggaactagactttctgagggaagagaaccacaaattacagctggagagggaaaacctgcagctggagacccgaaggctccaatcggaaatcaacatggcagcgacggaaacacgagacctgcggaacatgaccgtggcggactctgggaccaaccatgactccagactgtggtccctggagagggaactggatgacctcaagaggctctccaaggacaaagacctcgagatcgacgagctgcagaagcgcctgggctccgtggccgtcaagcgggagcagcgggagaaccacctgcggcgctccatcgtagtcatccaccctgacacaggccgcgagctgtccccggaggaagcccaccgtgccgggctcattgactggaacatgttcgtgaaactcagaagccaggagtgcgactgggaggagatctcagtgaagggtcccaatggggagtcctcagtgatacacgacaggaagtctggcaagaagttctccatcgaagaggccctgcagagtggcaggctgacccctgctcagtatgaccgctatgtcaacaaggatatgtccatccaggagctggcggtcttggtatctgggcagaagtaggcacagctcttgcaactcttcgtaacggcagacgctggccctctcctacgacgcagtgacctccttggtgtcgtcctctccctagccctggtgcaggccaagcattttatacataccctcgctgccaggctgctcagagtcccgcccacatatgagacaggcactggctgaagacaggcaactctcgtcccaaccatcattcaccctgagtgacgtacttcatcctccaatgactggacaactgcgatgccttttcctcccttttcctgtacactcccagcaacaaactcctcatgataactgcacacaatctgaaaaccactgaaggacaagccaaccacagcagccaagcccactccttgcagcatgggtactggtggcacaccagacagtgacactgccccacaaaggcctgggcccgtgggggctgctgcctggcatgacatctctccagatttctggcttaaaaccaactttccatccgagaagcctcctcagtagttactctgctcatgagacagatctgggctccaagccaggaaaggtgaacagaaaccacaagtgtccagccctcggtgctggagtggacgttaattgtcagccaccagactgtcccggcacctacagagaatgtttcacagttctggcatttaaatcctttgatagtggattgtgctgctgttagccttagtttcagtgctttacaagtctcgcttattatctcattggtatttaggtatacaaaacagttgattattcaccacgccaatatctgggtctctgtatctcatgtagaacataagaaaatgggaactaatagggaactttatttatagcatgaaaataaacctggtggctggagtctgct

SEQ ID NO: 106105 - DNA, 4865 bp, Homo sapiens
tcccttcctaagctgctgggagtcgtcacacccccacccgtgactgggtggagtcgtagtactcacctcccggggttgccgcaaagattaaacagaagcgtccgcgtgcagtgctgaggacagcacaggcccggcagctgcctgggtgcttctggtgtcactagtccattccacctcagcggttccctgggatgctcgtgaaaaatacagccctcaggctggggtccagatgccgggtcagagccccagaatgtgccaggcctctccagctgcttccactgtgcctgatgtgggaatctgtgctcaccctgggcacatcctcaggggaaggggctgcctggctgtgtccaaaactgaggggccctggttcccacagaacatcaccaacgagctactgcggattgaacctgagaagacgcggagcacggctgagggcgaagccttcatccaggccctcccaggcagtggcaccacacccctgctgaggacccaggtggaggacaccaaccggaaatacgagcacctcctgcagctgctggacttggcccaggagaaggttgatgtggccaaccgcctggagaagagcctgcagcagagctgggagttgctggccacacacgagaaccatctgaatcaggatgacacagtgcctgagagcagccgtgtcctggacagcaaggggcaggagctggcggccatggcctgtgagttacaggcccagaagtccctcctgggtgaggtggagcagaacttgcaggcggccaagcagtgctcgagcacactggccagccgcttccaggagcactgcccggacctggagcgccaggaggccgaggtgcacaagctgggccagcgtttcaacaacctgcgccagcaggtggaacgcagggcgcagagcctacagagcgccaaggcagcctacgagcacttccaccgcggccatgaccacgtgctgcagttcctagtcagcatccccagttacgagccccaggagacagacagcctcagccagatggagaccaagctgaagaaccagaagaacctgctagatgagatagcaagtagggagcaggaagtacagaagatctgtgccaattcccagcagtaccagcaagctgtaaaggactatgagttagaagcagaaaaactaaggtctcttctcgacttggagaatggaaggagcagccacgtgagcaagagagccaggctccaatctcctgccaccaaagtgaaggaagaggaagcagcacttgccgccaagttcactgaagtttatgccatcaacagacagaggctgcagaatctggagtttgctctgaatctcctcagacagcagccggaagtagaagtgacccatgagaccctgcaaaggaataggccggactctggagtggaggaggcgtggaagatcaggaaggaactggatgaggagactgagcggaggcggcagctggagaacgaggtcaagagcacccaggaagaaatctggaccttgaggaatcaggggcctcaggaatcggtggtgaggaaggaggtgctcaagaaggtgccggatcccgtgctggaggagagcttccagcagctgcagcggacgctggcagaggagcagcacaagaaccagctgctgcaggaggagctggaggcactgcagctgcagctgcgtgccctggagcaggagaccagagacggggggcaggagtacgtggtcaaggaggtcctgcgcatcgagcctgacagggcccaggcggatgaggtcttgcagctgcgggaggagctggaggcactgaggcggcagaagggcgcccgggaggcagaggtgctcctcctgcagcagcgtgtggccgccctggctgaagagaagagccgggcgcaggagaaggtcacagagaaagaggtggtgaaactgcagaatgacccccagctggaggcagagtaccagcagctgcaggaggaccaccagcgccaggaccagctcagggagaagcaggaggaggagctgagcttcctccaggacaagctcaagaggctagagaaggagcgggccatggccgagggcaagatcaccgtcaaggaggtgctcaaggtggagaaggacgcggccaccgagagggaggtcagcgatctcacccgccaatatgaggacgaggctgccaaggctcgcgctagccagagggagaagacggagctgctccgaaagatatgggccttggaggaggagaacgccaaagtggtggtgcaggagaaggtgcgggagatcgtgcggccagaccccaaggcggaaagtgaagtggcgaacctccgcctggagcttgtggagcaggagcgaaagtaccggggtgccgaggagcagctccggagctaccagagtgagctggaggccctcaggaggcgaggcccccaggtggaagtcaaagaggtgactaaggaagtcattaagtacaagactgaccctgagatggagaaggagcttcagcggctcagggaggagatcgtggacaagaccagactgatcgaaaggtgtgatttagagatctaccagctgaaaaaggaaatccaggccctgaaagacaccaaaccccaggtccagaccaaagaggtggtccaggagatcctccaattccaagaagaccctcaaaccaaggaggaggtggcgtctctgagggcaaagctctcagaggagcagaagaaacaagtggatctggagagggaaagagcttcccaggaagagcagatcgcccggaaagaggaggagctctcgcgggtgaaggaaagggtggtgcagcaggaggtggtcaggtatgaggaggagccaggcctgcgggccgaggcgagcgcctttgccgagagcatcgatgtggagctgcggcagattgacaagctgcgggcagagctgcggcggctgcagcgccggcgcaccgagcttgagcggcagctggaggagctagagcgcgagcggcaggcccgcagggaggccgagcgcgaggtacagcggttgcagcagcggctggcagcgctggagcaggaagaagctgaggcccgtgagaaggtaacccatacgcagaaggtggtgctgcagcaggacccgcagcaggcgcgagagcatgccctgctccgactccagctggaagaagagcagcaccggcggcagctcctggagggggagctcgagaccctccggaggaaactggctgcactggagaaggcggaggtcaaggagaaggtggtgctctccgagagtgtccaggtggagaagggcgacaccgagcaagagatccagaggctcaagagcagcctggaggaggagagccgcagcaagcgcgagctggacgtcgaggtgagccggctggaagccaggctttcggagctggaattccataactccaagtcatccaaggaactagactttctgagggaagagaaccacaaattacagctggagagggaaaacctgcagctggagacccgaaggctccaatcggaaatcaacatggcagcgacggaaacacgagacctgcggaacatgaccgtggcggactctgggaccaaccatgactccagactgtggtccctggagagggaactggatgacctcaagaggctctccaaggacaaagacctcgagatcgacgagctgcagaagcgcctgggctccgtggccgtcaagcgggagcagcgggagaaccacctgcggcgctccatcgtagtcatccaccctgacacaggccgcgagctgtccccggaggaagcccaccgtgccgggctcattgactggaacatgttcgtgaaactcagaagccaggagtgcgactgggaggagatctcagtgaagggtcccaatggggagtcctcagtgatacacgacaggaagtctggcaagaagttctccatcgaagaggccctgcagagtggcaggctgacccctgctcagtatgaccgctatgtcaacaaggatatgtccatccaggagctggcggtcttggtatctgggcagaagtaggcacagctcttgcaactcttcgtaacggcagacgctggccctctcctacgacgcagtgacctccttggtgtcgtcctctccctagccctggtgcaggccaagcattttatacataccctcgctgccaggctgctcagagtcccgcccacatatgagacaggcactggctgaagacaggcaactctcgtcccaaccatcattcaccctgagtgacgtacttcatcctccaatgactggacaactgcgatgccttttcctcccttttcctgtacactcccagcaacaaactcctcatgataactgcacacaatctgaaaaccactgaaggacaagccaaccacagcagccaagcccactccttgcagcatgggtactggtggcacaccagacagtgacactgccccacaaaggcctgggcccgtgggggctgctgcctggcatgacatctctccagatttctggcttaaaaccaactttccatccgagaagcctcctcagtagttactctgctcatgagacagatctgggctccaagccaggaaaggtgaacagaaaccacaagtgtccagccctcggtgctggagtggacgttaattgtcagccaccagactgtcccggcacctacagagaatgtttcacagttctggcatttaaatcctttgatagtggattgtgctgctgttagccttagtttcagtgctttacaagtctcgcttattatctcattggtatttaggtatacaaaacagttgattattcaccacgccaatatctgggtctctgtatctcatgtagaacataagaaaatgggaactaatagggaactttatttatagcatgaaaataaacctggtggctggagtctgct

SEQ ID NO: 106106 - DNA, 5824 bp, Homo sapiens
cgcgccgccgctcgctcacctgcgctcccgcccgcccctcggtgcgcgcccggcccgccagccgccgccgcccgcaccccgagcgccaccatgaactcgctcttcaggaagagaaacaaaggcaaatacagccccactgtgcagacccggagcatctctaacaaggagctctcggagctgatcgagcagctgcagaagaatgccgaccaggtggagaagaacatcgtggacacagaggccaagatgcagagtgacctggctcggctgcaggagggtcggcagcctgagcaccgggacgtgaccctgcagaaggtgttggactctgagaagctgctctatgtgctagaggcggatgcggccattgccaagcacatgaagcacccacagggggacatgatcgccgaggatatccgccagctgaaggagcgtgtgaccaacctgcgcgggaaacacaagcagatctacaggctggcggtgaaggaagtggatccacaggtcaactgggcggcactggtggaggagaagctggacaagctgaacaaccagagctttgggactgacctgccgctggtggaccaccaagtggaggagcataacatcttccacaatgaggtcaaggccatcgggccccacctggccaaggacggggacaaggagcagaacagcgaactccgggccaagtaccagaaactgctggcagcatcacaggcccggcagcagcacctgagttcgctgcaggactacatgcagcgctgcaccaatgagctgtactggctggaccagcaggccaagggccgcatgcagtacgactggagtgaccgcaacctcgactaccccagccgccggcgccagtatgagaatttcatcaaccggaacctggaggccaaagaggagagaatcaacaaactgcacagcgagggcgaccagctgctggcggccgagcaccccgggaggaactccattgaggcgcacatggaggctgtgcacgcagactggaaggagtacctgaacctgctcatctgcgaggagagccacctcaagtacatggaggactaccaccagtttcacgaagacgtgaaggacgctcaggagctgctgcgcaaggtggactcggacctgaaccagaagtatggccctgacttcaaggaccggtaccagattgagctgctgctgcgggagctggatgaccaggagaaggtgctggacaagtatgaggacgtggtgcaggggctgcagaagcgaggccagcaggtggtgcccctcaagtaccgccgggagactccgctcaagcccatccccgtggaggcactctgtgactttgagggggagcagggcctgatctcgcggggctacagctacaccctgcagaagaacaacggggagagctgggagctcatggacagcgctgggaacaagctgattgctccggccgtctgttttgtgatcccccccacagaccctgaggccctggctctggctgacagcctgggcagccagtaccggagcgtgcggcagaaggcagctgggagcaaacgcacgctgcagcagcggtatgaggtgctgaagaccgagaatcccggagatgcctctgacctacaggggcggcagctgctggctggcttggacaaggtggccagcgacctggaccggcaggagaaggccatcacagggatcctgcggccaccactggagcaaggccgggctgtgcaggacagtgccgagcgggccaaggacctcaagaacatcaccaacgagctactgcggattgaacctgagaagacgcggagcacggctgagggcgaagccttcatccaggccctcccaggcagtggcaccacacccctgctgaggacccaggtggaggacaccaaccggaaatacgagcacctcctgcagctgctggacttggcccaggagaaggttgatgtggccaaccgcctggagaagagcctgcagcagagctgggagttgctggccacacacgagaaccatctgaatcaggatgacacagtgcctgagagcagccgtgtcctggacagcaaggggcaggagctggcggccatggcctgtgagttacaggcccagaagtccctcctgggtgaggtggagcagaacttgcaggcggccaagcagtgctcgagcacactggccagccgcttccaggagcactgcccggacctggagcgccaggaggccgaggtgcacaagctgggccagcgtttcaacaacctgcgccagcaggtggaacgcagggcgcagagcctacagagcgccaaggcagcctacgagcacttccaccgcggccatgaccacgtgctgcagttcctagtcagcatccccagttacgagccccaggagacagacagcctcagccagatggagaccaagctgaagaaccagaagaacctgctagatgagatagcaagtagggagcaggaagtacagaagatctgtgccaattcccagcagtaccagcaagctgtaaaggactatgagttagaagcagaaaaactaaggtctcttctcgacttggagaatggaaggagcagccacgtgagcaagagagccaggctccaatctcctgccaccaaagtgaaggaagaggaagcagcacttgccgccaagttcactgaagtttatgccatcaacagacagaggctgcagaatctggagtttgctctgaatctcctcagacagcagccggaagtagaagtgacccatgagaccctgcaaaggaataggccggactctggagtggaggaggcgtggaagatcaggaaggaactggatgaggagactgagcggaggcggcagctggagaacgaggtcaagagcacccaggaagaaatctggaccttgaggaatcaggggcctcaggaatcggtggtgaggaaggaggtgctcaagaaggtgccggatcccgtgctggaggagagcttccagcagctgcagcggacgctggcagaggagcagcacaagaaccagctgctgcaggaggagctggaggcactgcagctgcagctgcgtgccctggagcaggagaccagagacggggggcaggagtacgtggtcaaggaggtcctgcgcatcgagcctgacagggcccaggcggatgaggtcttgcagctgcgggaggagctggaggcactgaggcggcagaagggcgcccgggaggcagaggtgctcctcctgcagcagcgtgtggccgccctggctgaagagaagagccgggcgcaggagaaggtcacagagaaagaggtggtgaaactgcagaatgacccccagctggaggcagagtaccagcagctgcaggaggaccaccagcgccaggaccagctcagggagaagcaggaggaggagctgagcttcctccaggacaagctcaagaggctagagaaggagcgggccatggccgagggcaagatcaccgtcaaggaggtgctcaaggtggagaaggacgcggccaccgagagggaggtcagcgatctcacccgccaatatgaggacgaggctgccaaggctcgcgctagccagagggagaagacggagctgctccgaaagatatgggccttggaggaggagaacgccaaagtggtggtgcaggagaaggtgcgggagatcgtgcggccagaccccaaggcggaaagtgaagtggcgaacctccgcctggagcttgtggagcaggagcgaaagtaccggggtgccgaggagcagctccggagctaccagagtgagctggaggccctcaggaggcgaggcccccaggtggaagtcaaagaggtgactaaggaagtcattaagtacaagactgaccctgagatggagaaggagcttcagcggctcagggaggagatcgtggacaagaccagactgatcgaaaggtgtgatttagagatctaccagctgaaaaaggaaatccaggccctgaaagacaccaaaccccaggtccagaccaaagaggtggtccaggagatcctccaattccaagaagaccctcaaaccaaggaggaggtggcgtctctgagggcaaagctctcagaggagcagaagaaacaagtggatctggagagggaaagagcttcccaggaagagcagatcgcccggaaagaggaggagctctcgcgggtgaaggaaagggtggtgcagcaggaggtggtcaggtatgaggaggagccaggcctgcgggccgaggcgagcgcctttgccgagagcatcgatgtggagctgcggcagattgacaagctgcgggcagagctgcggcggctgcagcgccggcgcaccgagcttgagcggcagctggaggagctagagcgcgagcggcaggcccgcagggaggccgagcgcgaggtacagcggttgcagcagcggctggcagcgctggagcaggaagaagctgaggcccgtgagaaggtaacccatacgcagaaggtggtgctgcagcaggacccgcagcaggcgcgagagcatgccctgctccgactccagctggaagaagagcagcaccggcggcagctcctggagggggagctcgagaccctccggaggaaactggctgcactggagaaggcggaggtcaaggagaaggtggtgctctccgagagtgtccaggtggagaagggcgacaccgagcaagagatccagaggctcaagagcagcctggaggaggagagccgcagcaagcgcgagctggacgtcgaggtgagccggctggaagccaggctttcggagtggaacatgttcgtgaaactcagaagccaggagtgcgactgggaggagatctcagtgaagggtcccaatggggagtcctcagtgatacacgacaggaagtctggcaagaagttctccatcgaagaggccctgcagagtggcaggctgacccctgctcagtatgaccgctatgtcaacaaggatatgtccatccaggagctggcggtcttggtatctgggcagaagtaggcacagctcttgcaactcttcgtaacggcagacgctggccctctcctacgacgcagtgacctccttggtgtcgtcctctccctagccctggtgcaggccaagcattttatacataccctcgctgccaggctgctcagagtcccgcccacatatgagacaggcactggctgaagacaggcaactctcgtcccaaccatcattcaccctgagtgacgtacttcatcctccaatgactggacaactgcgatgccttttcctcccttttcctgtacactcccagcaacaaactcctcatgataactgcacacaatctgaaaaccactgaaggacaagccaaccacagcagccaagcccactccttgcagcatgggtactggtggcacaccagacagtgacactgccccacaaaggcctgggcccgtgggggctgctgcctggcatgacatctctccagatttctggcttaaaaccaactttccatccgagaagcctcctcagtagttactctgctcatgagacagatctgggctccaagccaggaaaggtgaacagaaaccacaagtgtccagccctcggtgctggagtggacgttaattgtcagccaccagactgtcccggcacctacagagaatgtttcacagttctggcatttaaatcctttgatagtggattgtgctgctgttagccttagtttcagtgctttacaagtctcgcttattatctcattggtatttaggtatacaaaacagttgattattcaccacgccaatatctgggtctctgtatctcatgtagaacataagaaaatgggaactaatagggaactttatttatagcatgaaaataaacctggtggctggagtctgct

SEQ ID NO: 106107 - DNA, 5591 bp, Homo sapiens
cgcgccgccgctcgctcacctgcgctcccgcccgcccctcggtgcgcgcccggcccgccagccgccgccgcccgcaccccgagcgccaccatgaactcgctcttcaggaagagaaacaaaggcaaatacagccccactgtgcagacccggagcatctctaacaaggagctctcggagctgatcgagcagctgcagaagaatgccgaccaggtggagaagaacatcgtggacacagaggccaagatgcagagtgacctggctcggctgcaggagggtcggcagcctgagcaccgggacgtgaccctgcagaaggtgttggactctgagaagctgctctatgtgctagaggcggatgcggccattgccaagcacatgaagcacccacagggggacatgatcgccgaggatatccgccagctgaaggagcgtgtgaccaacctgcgcgggaaacacaagcagatctacaggctggcggtgaaggaagtggatccacaggtcaactgggcggcactggtggaggagaagctggacaagctgaacaaccagagctttgggactgacctgccgctggtggaccaccaagtggaggagcataacatcttccacaatgaggtcaaggccatcgggccccacctggccaaggacggggacaaggagcagaacagcgaactccgggccaagtaccagaaactgctggcagcatcacaggcccggcagcagcacctgagttcgctgcaggactacatgcagcgctgcaccaatgagctgtactggctggaccagcaggccaagggccgcatgcagtacgactggagtgaccgcaacctcgactaccccagccgccggcgccagtatgagaatttcatcaaccggaacctggaggccaaagaggagagaatcaacaaactgcacagcgagggcgaccagctgctggcggccgagcaccccgggaggaactccattgaggcgcacatggaggctgtgcacgcagactggaaggagtacctgaacctgctcatctgcgaggagagccacctcaagtacatggaggactaccaccagtttcacgaagacgtgaaggacgctcaggagctgctgcgcaaggtggactcggacctgaaccagaagtatggccctgacttcaaggaccggtaccagattgagctgctgctgcgggagctggatgaccaggagaaggtgctggacaagtatgaggacgtggtgcaggggctgcagaagcgaggccagcaggtggtgcccctcaagtaccgccgggagactccgctcaagcccatccccgtggaggcactctgtgactttgagggggagcagggcctgatctcgcggggctacagctacaccctgcagaagaacaacggggagagctgggagctcatggacagcgctgggaacaagctgattgctccggccgtctgttttgtgatcccccccacagaccctgaggccctggctctggctgacagcctgggcagccagtaccggagcgtgcggcagaaggcagctgggagcaaacgcacgctgcagcagcggtatgaggtgctgaagaccgagaatcccggagatgcctctgacctacaggggcggcagctgctggctggcttggacaaggtggccagcgacctggaccggcaggagaaggccatcacagggatcctgcggccaccactggagcaaggccgggctgtgcaggacagtgccgagcgggccaaggacctcaagaacatcaccaacgagctactgcggattgaacctgagaagacgcggagcacggctgagggcgaagccttcatccaggccctcccaggcagtggcaccacacccctgctgaggacccaggtggaggacaccaaccggaaatacgagcacctcctgcagctgctggacttggcccaggagaaggttgatgtggccaaccgcctggagaagagcctgcagcagagctgggagttgctggccacacacgagaaccatctgaatcaggatgacacagtgcctgagagcagccgtgtcctggacagcaaggggcaggagctggcggccatggcctgtgagttacaggcccagaagtccctcctgggtgaggtggagcagaacttgcaggcggccaagcagtgctcgagcacactggccagccgcttccaggagcactgcccggacctggagcgccaggaggccgaggtgcacaagctgggccagcgtttcaacaacctgcgccagcaggtggaacgcagggcgcagagcctacagagcgccaaggcagcctacgagcacttccaccgcggccatgaccacgtgctgcagttcctagtcagcatccccagttacgagccccaggagacagacagcctcagccagatggagaccaagctgaagaaccagaagaacctgctagatgagatagcaagtagggagcaggaagtacagaagatctgtgccaattcccagcagtaccagcaagctgtaaaggactatgagttagaagcagaaaaactaaggtctcttctcgacttggagaatggaaggagcagccacgtgagcaagagagccaggctccaatctcctgccaccaaagtgaaggaagaggaagcagcacttgccgccaagttcactgaagtttatgccatcaacagacagaggctgcagaatctggagtttgctctgaatctcctcagacagcagccggaagtagaagtgacccatgagaccctgcaaaggaataggccggactctggagtggaggaggcgtggaagatcaggaaggaactggatgaggagactgagcggaggcggcagctggagaacgaggtcaagagcacccaggaagaaatctggaccttgaggaatcaggggcctcaggaatcggtggtgaggaaggaggtgctcaagaaggtgccggatcccgtgctggaggagagcttccagcagctgcagcggacgctggcagaggagcagcacaagaaccagctgctgcaggaggagctggaggcactgcagctgcagctgcgtgccctggagcaggagaccagagacggggggcaggagtacgtggtcaaggaggtcctgcgcatcgagcctgacagggcccaggcggatgaggtcttgcagctgcgggaggagctggaggcactgaggcggcagaagggcgcccgggaggcagaggtgctcctcctgcagcagcgtgtggccgccctggctgaagagaagagccgggcgcaggagaaggtcacagagaaagaggtggtgaaactgcagaatgacccccagctggaggcagagtaccagcagctgcaggaggaccaccagcgccaggaccagctcagggagaagcaggaggaggagctgagcttcctccaggacaagctcaagaggctagagaaggagcgggccatggccgagggcaagatcaccgtcaaggaggtgctcaaggtggagaaggacgcggccaccgagagggaggtcagcgatctcacccgccaatatgaggacgaggctgccaaggctcgcgctagccagagggagaagacggagctgctccgaaagatatgggccttggaggaggagaacgccaaagtggtggtgcaggagaaggtgcgggagatcgtgcggccagaccccaaggcggaaagtgaagtggcgaacctccgcctggagcttgtggagcaggagcgaaagtaccggggtgccgaggagcagctccggagctaccagagtgagctggaggccctcaggaggcgaggcccccaggtggaagtcaaagaggtgactaaggaagtcattaagtacaagactgaccctgagatggagaaggagcttcagcggctcagggaggagatcgtggacaagaccagactgatcgaaaggtgtgatttagagatctaccagctgaaaaaggaaatccaggccctgaaagacaccaaaccccaggtccagaccaaagaggtggtccaggagatcctccaattccaagaagaccctcaaaccaaggaggaggtggcgtctctgagggcaaagctctcagaggagcagaagaaacaagtggatctggagagggaaagagcttcccaggaagagcagatcgcccggaaagaggaggagctctcgcgggtgaaggaaagggtggtgcagcaggaggtggtcaggtatgaggaggagccaggcctgcgggccgaggcgagcgcctttgccgagagcatcgatgtggagctgcggcagattgacaagctgcgggcagagctgcggcggctgcagcgccggcgcaccgagcttgagcggcagctggaggagctagagcgcgagcggcaggcccgcagggaggccgagcgcgaggtacagcggttgcagcagcggctggcagcgctggagcaggaagaagctgaggcccgtgagaaggtaacccatacgcagaaggtggtgctgcagcaggacccgcagcaggcgcgagagcatgccctgctccgactccagctggaagaagagcagcaccggcggcagctcctggagggggagctcgagaccctccggaggaaactggctgcactggagaaggcggaggtcaaggagaaggtggtgctctccgagagtgtccaggtggagaagggcgacaccgagcaagagatccagaggctcaagagcagcctggaggaggagagccgcagcaagcgcgagctggacgtcgaggtgagccggctggaagccaggctttcggagctggaattccataactccaagtcatccaaggaactagactttctgagggaagagaaccacaaattacagctggagagggaaaacctgcagctggagacccgaaggctccaatcggaaatcaacatggcagcgacggaaacacgagacctgcggaacatgaccgtggcggactctgggaccaaccatgactccagactgtggtccctggagagggaactggatgacctcaagaggctctccaaggacaaagacctcgagatcgacgagctgcagaagcgcctgggctccgtggccgtcaagcgggagcagcgggagaaccacctgcggcgctccatcgtagtcatccaccctgacacaggccgcgagctgtccccggaggaagcccaccgtgccgggctcattgactggaacatgttcgtgaaactcagaagccaggagtgcgactgggaggagatctcagtgaagggtcccaatggggagtcctcagtgatacacgacaggaagtctggcaagaagttctccatcgaagaggccctgcagagtggcaggctgacccctgctcagtatgaccgctatgtcaacaaggatatgtccatccaggagctggcggtcttggtatctgggcagaagtaggcacagctcttgcaactcttcgtaacggcagacgctggccctctcctacgacgcagtgacctccttggtgtcgtcctctccctagccctggtgcaggccaagcattttatacataccctcgctgccaggctgctcagagtcccgcccacatatgagacaggcactggctgaagacagcagctcgcacccatgagttggggatcctgctagtagtcgaccggcaacctgcg

SEQ ID NO: 106108 - DNA, 2409 bp, Homo sapiens
cgcgccgccgctcgctcacctgcgctcccgcccgcccctcggtgcgcgcccggcccgccagccgccgccgcccgcaccccgagcgccaccatgaactcgctcttcaggaagagaaacaaaggcaaatacagccccactgtgcagacccggagcatctctaacaaggagctctcggagctgatcgagcagctgcagaagaatgccgaccaggtggagaagaacatcgtggacacagaggccaagatgcagagtgacctggctcggctgcaggagggtcggcagcctgagcaccgggacgtgaccctgcagaaggtgttggactctgagaagctgctctatgtgctagaggcggatgcggccattgccaagcacatgaagcacccacagggggacatgatcgccgaggatatccgccagctgaaggagcgtgtgaccaacctgcgcgggaaacacaagcagatctacaggctggcggtgaaggaagtggatccacaggtcaactgggcggcactggtggaggagaagctggacaagctgaacaaccagagctttgggactgacctgccgctggtggaccaccaagtggaggagcataacatcttccacaatgaggtcaaggccatcgggccccacctggccaaggacggggacaaggagcagaacagcgaactccgggccaagtaccagaaactgctggcagcatcacaggcccggcagcagcacctgagttcgctgcaggactacatgcagcgctgcaccaatgagctgtactggctggaccagcaggccaagggccgcatgcagtacgactggagtgaccgcaacctcgactaccccagccgccggcgccagtatgagaatttcatcaaccggaacctggaggccaaagaggagagaatcaacaaactgcacagcgagggcgaccagctgctggcggccgagcaccccgggaggaactccattgaggcgcacatggaggctgtgcacgcagactggaaggagtacctgaacctgctcatctgcgaggagagccacctcaagtacatggaggactaccaccagtttcacgaagacgtgaaggacgctcaggagctgctgcgcaaggtggactcggacctgaaccagaagtatggccctgacttcaaggaccggtaccagattgagctgctgctgcgggagctggatgaccaggagaaggtgctggacaagtatgaggacgtggtgcaggggctgcagaagcgaggccagcaggtggtgcccctcaagtaccgccgggagactccgctcaagcccatccccgtggaggcactctgtgactttgagggggagcagggcctgatctcgcggggctacagctacaccctgcagaagaacaacggggagagctgggagctcatggacagcgctgggaacaagctgattgctccggccgtctgttttgtgatcccccccacagaccctgaggccctggctctggctgacagcctgggcagccagtaccggagcgtgcggcagaaggcagctgggagcaaacgcacgctgcagcagcggtatgaggtgctgaagaccgagaatcccggagatgcctctgacctacaggggcggcagctgctggctggcttggacaaggtggccagcgacctggaccggcaggagaaggccatcacagggatcctgcggccaccactggagcaaggccgggctgtgcaggacagtgccgagcgggccaaggacctcaagaacatcaccaacgagctactgcggattgaacctgagaagacgcggagcacggctgagggcgaagccttcatccaggccctcccaggcagtggcaccacacccctgctgaggacccaggtggaggacaccaaccggaaatacgagcacctcctgcagctgctggacttggcccaggagaaggttgatgtggccaaccgcctggagaagagcctgcagcagagctgggagttgctggccacacacgagaaccatctgaatcaggatgacacagtgcctgagagcagccgtgtcctggacagcaaggggcaggagctggcggtgagtctagggcccaagtcctgggagtccttctctgagcaggtgagagcatctggcacatccacccgcccgtctggatagatgaggacaccagcatccagtctccccaggtttggaatgcccaaattgggaactgcaaatggaggcccgcagcacaaatccaagctattcacgggatctgtgtgacttacgggatttcgggtgccagcattttaagatcaaatatctgcaatagccagtgtagtggcacatgcctgtaacaccagccattcaggaggctggggcaggattgcttgagccttggagtttaagtccagccgcctggacaacgttgcaagaccctatctctta

SEQ ID NO: 106109 - DNA, 116 bp, Homo sapiens
cgccaagttcactgaagtttatgccatcaacagacagaggctgcagaatctggagtttgctctgaatctcctcagacaggtaactgatcttagtaagaaattctacttcaggctgt

SEQ ID NO: 106110 - DNA, 6337 bp, Homo sapiens
cgcgccgccgctcgctcacctgcgctcccgcccgcccctcggtgcgcgcccggcccgccagccgccgccgcccgcaccccgagcgccaccatgaactcgctcttcaggaagagaaacaaaggcaaatacagccccactgtgcagacccggagcatctctaacaaggagctctcggagctgatcgagcagctgcagaagaatgccgaccaggtggagaagaacatcgtggacacagaggccaagatgcagagtgacctggctcggctgcaggagggtcggcagcctgagcaccgggacgtgaccctgcagaaggtgttggactctgagaagctgctctatgtgctagaggcggatgcggccattgccaagcacatgaagcacccacagggggacatgatcgccgaggatatccgccagctgaaggagcgtgtgaccaacctgcgcgggaaacacaagcagatctacaggctggcggtgaaggaagtggatccacaggtcaactgggcggcactggtggaggagaagctggacaagctgaacaaccagagctttgggactgacctgccgctggtggaccaccaagtggaggagcataacatcttccacaatgaggtcaaggccatcgggccccacctggccaaggacggggacaaggagcagaacagcgaactccgggccaagtaccagaaactgctggcagcatcacaggcccggcagcagcacctgagttcgctgcaggactacatgcagcgctgcaccaatgagctgtactggctggaccagcaggccaagggccgcatgcagtacgactggagtgaccgcaacctcgactaccccagccgccggcgccagtatgagaatttcatcaaccggaacctggaggccaaagaggagagaatcaacaaactgcacagcgagggcgaccagctgctggcggccgagcaccccgggaggaactccattgaggcgcacatggaggctgtgcacgcagactggaaggagtacctgaacctgctcatctgcgaggagagccacctcaagtacatggaggactaccaccagtttcacgaagacgtgaaggacgctcaggagctgctgcgcaaggtggactcggacctgaaccagaagtatggccctgacttcaaggaccggtaccagattgagctgctgctgcgggagctggatgaccaggagaaggtgctggacaagtatgaggacgtggtgcaggggctgcagaagcgaggccagcaggtggtgcccctcaagtaccgccgggagactccgctcaagcccatccccgtggaggcactctgtgactttgagggggagcagggcctgatctcgcggggctacagctacaccctgcagaagaacaacggggagagctgggagctcatggacagcgctgggaacaagctgattgctccggccgtctgttttgtgatcccccccacagaccctgaggccctggctctggctgacagcctgggcagccagtaccggagcgtgcggcagaaggcagctgggagcaaacgcacgctgcagcagcggtatgaggtgctgaagaccgagaatcccggagatgcctctgacctacaggggcggcagctgctggctggcttggacaaggtggccagcgacctggaccggcaggagaaggccatcacagggatcctgcggccaccactggagcaaggccgggctgtgcaggacagtgccgagcgggccaaggacctcaagaacatcaccaacgagctactgcggattgaacctgagaagacgcggagcacggctgagggcgaagccttcatccaggccctcccaggcagtggcaccacacccctgctgaggacccaggtggaggacaccaaccggaaatacgagcacctcctgcagctgctggacttggcccaggagaaggttgatgtggccaaccgcctggagaagagcctgcagcagagctgggagttgctggccacacacgagaaccatctgaatcaggatgacacagtgcctgagagcagccgtgtcctggacagcaaggggcaggagctggcggccatggcctgtgagttacaggcccagaagtccctcctgggtgaggtggagcagaacttgcaggcggccaagcagtgctcgagcacactggccagccgcttccaggagcactgcccggacctggagcgccaggaggccgaggtgcacaagctgggccagcgtttcaacaacctgcgccagcaggtggaacgcagggcgcagagcctacagagcgccaaggcagcctacgagcacttccaccgcggccatgaccacgtgctgcagttcctagtcagcatccccagttacgagccccaggagacagacagcctcagccagatggagaccaagctgaagaaccagaagaacctgctagatgagatagcaagtagggagcaggaagtacagaagatctgtgccaattcccagcagtaccagcaagctgtaaaggactatgagttagaagcagaaaaactaaggtctcttctcgacttggagaatggaaggagcagccacgtgagcaagagagccaggctccaatctcctgccaccaaagtgaaggaagaggaagcagcacttgccgccaagttcactgaagtttatgccatcaacagacagaggctgcagaatctggagtttgctctgaatctcctcagacagcagccggaagtagaagtgacccatgagaccctgcaaaggaataggccggactctggagtggaggaggcgtggaagatcaggaaggaactggatgaggagactgagcggaggcggcagctggagaacgaggtcaagagcacccaggaagaaatctggaccttgaggaatcaggggcctcaggaatcggtggtgaggaaggaggtgctcaagaaggtgccggatcccgtgctggaggagagcttccagcagctgcagcggacgctggcagaggagcagcacaagaaccagctgctgcaggaggagctggaggcactgcagctgcagctgcgtgccctggagcaggagaccagagacggggggcaggagtacgtggtcaaggaggtcctgcgcatcgagcctgacagggcccaggcggatgaggtcttgcagctgcgggaggagctggaggcactgaggcggcagaagggcgcccgggaggcagaggtgctcctcctgcagcagcgtgtggccgccctggctgaagagaagagccgggcgcaggagaaggtcacagagaaagaggtggtgaaactgcagaatgacccccagctggaggcagagtaccagcagctgcaggaggaccaccagcgccaggaccagctcagggagaagcaggaggaggagctgagcttcctccaggacaagctcaagaggctagagaaggagcgggccatggccgagggcaagatcaccgtcaaggaggtgctcaaggtggagaaggacgcggccaccgagagggaggtcagcgatctcacccgccaatatgaggacgaggctgccaaggctcgcgctagccagagggagaagacggagctgctccgaaagatatgggccttggaggaggagaacgccaaagtggtggtgcaggagaaggtgcgggagatcgtgcggccagaccccaaggcggaaagtgaagtggcgaacctccgcctggagcttgtggagcaggagcgaaagtaccggggtgccgaggagcagctccggagctaccagagtgagctggaggccctcaggaggcgaggcccccaggtggaagtcaaagaggtgactaaggaagtcattaagtacaagactgaccctgagatggagaaggagcttcagcggctcagggaggagatcgtggacaagaccagactgatcgaaaggtgtgatttagagatctaccagctgaaaaaggaaatccaggccctgaaagacaccaaaccccaggtccagaccaaagaggtggtccaggagatcctccaattccaagaagaccctcaaaccaaggaggaggtggcgtctctgagggcaaagctctcagaggagcagaagaaacaagtggatctggagagggaaagagcttcccaggaagagcagatcgcccggaaagaggaggagctctcgcgggtgaaggaaagggtggtgcagcaggaggtggtcaggtatgaggaggagccaggcctgcgggccgaggcgagcgcctttgccgagagcatcgatgtggagctgcggcagattgacaagctgcgggcagagctgcggcggctgcagcgccggcgcaccgagcttgagcggcagctggaggagctagagcgcgagcggcaggcccgcagggaggccgagcgcgaggtacagcggttgcagcagcggctggcagcgctggagcaggaagaagctgaggcccgtgagaaggtaacccatacgcagaaggtggtgctgcagcaggacccgcagcaggcgcgagagcatgccctgctccgactccagctggaagaagagcagcaccggcggcagctcctggagggggagctcgagaccctccggaggaaactggctgcactggagaaggcggaggtcaaggagaaggtggtgctctccgagagtgtccaggtggagaagggcgacaccgagcaagagatccagaggctcaagagcagcctggaggaggagagccgcagcaagcgcgagctggacgtcgaggtgagccggctggaagccaggctttcggagctggaattccataactccaagtcatccaaggaactagactttctgagggaagagaaccacaaattacagctggagagggaaaacctgcagctggagacccgaaggctccaatcggaaatcaacatggcagcgacggaaacacgagacctgcggaacatgaccgtggcggactctgggaccaaccatgactccagactgtggtccctggagagggaactggatgacctcaagaggctctccaaggacaaagacctcgagatcgacgagctgcagaagcgcctgggctccgtggccgtcaagcgggagcagcgggagaaccacctgcggcgctccatcgtagtcatccaccctgacacaggccgcgagctgtccccggaggaagcccaccgtgccgggctcattgactggaacatgttcgtgaaactcagaagccaggagtgcgactgggaggagatctcagtgaagggtcccaatggggagtcctcagtgatacacgacaggaagtctggcaagaagttctccatcgaagaggccctgcagagtggcaggctgacccctgctcagtatgaccgctatgtcaacaaggatatgtccatccaggagctggcggtcttggtatctgggcagaagtaggcacagctcttgcaactcttcgtaacggcagacgctggccctctcctacgacgcagtgacctccttggtgtcgtcctctccctagccctggtgcaggccaagcattttatacataccctcgctgccaggctgctcagagtcccgcccacatatgagacaggcactggctgaagacaggcaactctcgtcccaaccatcattcaccctgagtgacgtacttcatcctccaatgactggacaactgcgatgccttttcctcccttttcctgtacactcccagcaacaaactcctcatgataactgcacacaatctgaaaaccactgaaggacaagccaaccacagcagccaagcccactccttgcagcatgggtactggtggcacaccagacagtgacactgccccacaaaggcctgggcccgtgggggctgctgcctggcatgacatctctccagatttctggcttaaaaccaactttccatccgagaagcctcctcagtagttactctgctcatgagacagatctgggctccaagccaggaaaggtgaacagaaaccacaagtgtccagccctcggtgctggagtggacgttaattgtcagccaccagactgtcccggcacctacagagaatgtttcacagttctggcatttaaatcctttgatagtggattgtgctgctgttagccttagtttcagtgctttacaagtctcgcttattatctcattggtatttaggtatacaaaacagttgattattcaccacgccaatatctgggtctctgtatctcatgtagaacataagaaaatgggaactaatagggaactttatttatagcatgaaaataaacctggtggctggagtctgcttgtacggtccacatgtttcttcttttgcatgcaaggcttactcccccgccccccccccttggctttcagccaaaatggatattccatctgtaacagctcctacaggaa

SEQ ID NO: 106111 - DNA, 5075 bp, Homo sapiens
  misc_feature (4989)..(4989): n is a, c, g, or t
  misc_feature (5024)..(5024): n is a, c, g, or t
  misc_feature (5036)..(5036): n is a, c, g, or t
  misc_feature (5051)..(5051): n is a, c, g, or t
  misc_feature (5061)..(5061): n is a, c, g, or t
cgcgccgccgctcgctcacctgcgctcccgcccgcccctcggtgcgcgcccggcccgccagccgccgccgcccgcaccccgagcgccaccatgaactcgctcttcaggaagagaaacaaaggcaaatacagccccactgtgcagacccggagcatctctaacaaggagctctcggagctgatcgagcagctgcagaagaatgccgaccaggtggagaagaacatcgtggacacagaggccaagatgcagagtgacctggctcggctgcaggagggtcggcagcctgagcaccgggacgtgaccctgcagaaggtgttggactctgagaagctgctctatgtgctagaggcggatgcggccattgccaagcacatgaagcacccacagggggacatgatcgccgaggatatccgccagctgaaggagcgtgtgaccaacctgcgcgggaaacacaagcagatctacaggctggcggtgaaggaagtggatccacaggtcaactgggcggcactggtggaggagaagctggacaagctgaacaaccagagctttgggactgacctgccgctggtggaccaccaagtggaggagcataacatcttccacaatgaggtcaaggccatcgggccccacctggccaaggacggggacaaggagcagaacagcgaactccgggccaagtaccagaaactgctggcagcatcacaggcccggcagcagcacctgagttcgctgcaggactacatgcagcgctgcaccaatgagctgtactggctggaccagcaggccaagggccgcatgcagtacgactggagtgaccgcaacctcgactaccccagccgccggcgccagtatgagaatttcatcaaccggaacctggaggccaaagaggagagaatcaacaaactgcacagcgagggcgaccagctgctggcggccgagcaccccgggaggaactccattgaggcgcacatggaggctgtgcacgcagactggaaggagtacctgaacctgctcatctgcgaggagagccacctcaagtacatggaggactaccaccagtttcacgaagacgtgaaggacgctcaggagctgctgcgcaaggtggactcggacctgaaccagaagtatggccctgacttcaaggaccggtaccagattgagctgctgctgcgggagctggatgaccaggagaaggtgctggacaagtatgaggacgtggtgcaggggctgcagaagcgaggccagcaggtggtgcccctcaagtaccgccgggagactccgctcaagcccatccccgtggaggcactctgtgactttgagggggagcagggcctgatctcgcggggctacagctacaccctgcagaagaacaacggggagagctgggagctcatggacagcgctgggaacaagctgattgctccggccgtctgttttgtgatcccccccacagaccctgaggccctggctctggctgacagcctgggcagccagtaccggagcgtgcggcagaaggcagctgggagcaaacgcacgctgcagcagcggtatgaggtgctgaagaccgagaatcccggagatgcctctgacctacaggggcggcagctgctggctggcttggacaaggtggccagcgacctggaccggcaggagaaggccatcacagggatcctgcggccaccactggagcaaggccgggctgtgcaggacagtgccgagcgggccaaggacctcaagaacatcaccaacgagctactgcggattgaacctgagaagacgcggagcacggctgagggcgaagccttcatccaggccctcccaggcagtggcaccacacccctgctgaggacccaggtggaggacaccaaccggaaatacgagcacctcctgcagctgctggacttggcccaggagaaggttgatgtggccaaccgcctggagaagagcctgcagcagagctgggagttgctggccacacacgagaaccatctgaatcaggatgacacagtgcctgagagcagccgtgtcctggacagcaaggggcaggagctggcggccatggcctgtgagttacaggcccagaagtccctcctgggtgaggtggagcagaacttgcaggcggccaagcagtgctcgagcacactggccagccgcttccaggagcactgcccggacctggagcgccaggaggccgaggtgcacaagctgggccagcgtttcaacaacctgcgccagcaggtggaacgcagggcgcagagcctacagagcgccaaggcagcctacgagcacttccaccgcggccatgaccacgtgctgcagttcctagtcagcatccccagttacgagccccaggagacagacagcctcagccagatggagaccaagctgaagaaccagaagaacctgctagatgagatagcaagtagggagcaggaagtacagaagatctgtgccaattcccagcagtaccagcaagctgtaaaggactatgagttagaagcagaaaaactaaggtctcttctcgacttggagaatggaaggagcagccacgtgagcaagagagccaggctccaatctcctgccaccaaagtgaaggaagaggaagcagcacttgccgccaagttcactgaagtttatgccatcaacagacagaggctgcagaatctggagtttgctctgaatctcctcagacagcagccggaagtagaagtgacccatgagaccctgcaaaggaataggccggactctggagtggaggaggcgtggaagatcaggaaggaactggatgaggagactgagcggaggcggcagctggagaacgaggtcaagagcacccaggaagaaatctggaccttgaggaatcaggggcctcaggaatcggtggtgaggaaggaggtgctcaagaaggtgccggatcccgtgctggaggagagcttccagcagctgcagcggacgctggcagaggagcagcacaagaaccagctgctgcaggaggagctggaggcactgcagctgcagctgcgtgccctggagcaggagaccagagacggggggcaggagtacgtggtcaaggaggtcctgcgcatcgagcctgacagggcccaggcggatgaggtcttgcagctgcgggaggagctggaggcactgaggcggcagaagggcgcccgggaggcagaggtgctcctcctgcagcagcgtgtggccgccctggctgaagagaagagccgggcgcaggagaaggtcacagagaaagaggtggtgaaactgcagaatgacccccagctggaggcagagtaccagcagctgcaggaggaccaccagcgccaggaccagctcagggagaagcaggaggaggagctgagcttcctccaggacaagctcaagaggctagagaaggagcgggccatggccgagggcaagatcaccgtcaaggaggtgctcaaggtggagaaggacgcggccaccgagagggaggtcagcgatctcacccgccaatatgaggacgaggctgccaaggctcgcgctagccagagggagaagacggagctgctccgaaagatatgggccttggaggaggagaacgccaaagtggtggtgcaggagaaggtgcgggagatcgtgcggccagaccccaaggcggaaagtgaagtggcgaacctccgcctggagcttgtggagcaggagcgaaagtaccggggtgccgaggagcagctccggagctaccagagtgagctggaggccctcaggaggcgaggcccccaggtggaagtcaaagaggtgactaaggaagtcattaagtacaagactgaccctgagatggagaaggagcttcagcggctcagggaggagatcgtggacaagaccagactgatcgaaaggtgtgatttagagatctaccagctgaaaaaggaaatccaggccctgaaagacaccaaaccccaggtccagaccaaagaggtggtccaggagatcctccaattccaagaagaccctcaaaccaaggaggaggtggcgtctctgagggcaaagctctcagaggagcagaagaaacaagtggatctggagagggaaagagcttcccaggaagagcagatcgcccggaaagaggaggagctctcgcgggtgaaggaaagggtggtgcagcaggaggtggtcaggtatgaggaggagccaggcctgcgggccgaggcgagcgcctttgccgagagcatcgatgtggagctgcggcagattgacaagctgcgggcagagctgcggcggctgcagcgccggcgcaccgagcttgagcggcagctggaggagctagagcgcgagcggcaggcccgcagggaggccgagcgcgaggtacagcggttgcagcagcggctggcagcgctggagcaggaagaagctgaggcccgtgagaaggtaacccatacgcagaaggtggtgctgcagcaggacccgcagcaggcgcgagagcatgccctgctccgactccagctggaagaagagcagcaccggcggcagctcctggagggggagctcgagaccctccggaggaaactggctgcactggagaaggcggaggtcaaggagaaggtggtgctctccgagagtgtccaggtggagaagggcgacaccgagcaagagatccagaggctcaagagcagcctggaggaggagagccgcagcaagcgcgagctggacgtcgaggtgagccggctggaagccaggctttcggagctggaattccataactccaagtcatccaaggaactagactttctgagggaagagaaccacaaattacagctggagagggaaaacctgcagctggagacccgaaggctccaatcggaaatcaacatggcagcgacggaaacacgagacctgcggaacatgaccgtggcggactctgggaccaaccatgactccagactgtggtccctggagagggaactggatgacctcaagaggctctccaaggacaaagacctcgagatnctgtttcatggatagtcgaacgttcgggtaatccntatgactagttnatcctcttaaattcnaccttgccangggggggggggggg

SEQ ID NO: 106112 - DNA, 448 bp, Homo sapiens
attctcatgtttataatggagactgaccagcaagattttgctgtgcgatgagttatctttgacgctttgacgtttattcaaatacagtcactctaataacaaaggatacggttggcagccataaaaaatgatgagttcatatcctttgtagggacatggatgaaattggaaaccatcattctcagtaaactatcgcaagaacaaaaaaccaaacaccacatattctcactcataggtgggaattgaacaatgagatcacatggacacaggaaggggaatatcacactctggggactgtggtggggtcgggggaggggggagggatagcattgggagatatacctaatgctagatgacacattagtgggtgcagcgcaccagcatggcacatgtatacatatgtaactaacctgcacaatgtgcacatgtaccctaaaacttagagtat

SEQ ID NO: 106113 - DNA, 205 bp, Homo sapiens
taagaagagttaatagattattgttttaatcagttgtaggtttacaggaacatgaatggcaagtacagagtttccacattactcccctacactcacattttcttttttattaacatcttttattagtgtacttttgttgcagttgatgagccaaatggatacattattattaactaaagttcatagtttacataagtattcactc

SEQ ID NO: 106114 - DNA, 184 bp, Homo sapiens
ttagtgtcattcttgactgaagagccctggacaaaggtatggcttttgataaagccaaaatattagcttgttttgttattcaaagggaatgtgctctgggagatttctggtctacacccagggacagtgcctggcatattgtaacagcttagcacatacccattgtattgaactgaattaatgg

SEQ ID NO: 106115 - DNA, 150 bp, Homo sapiens
gagatggcgccgactgcactccagcgtgggcaacagcgtgagactctgtctcaaaaaaaatagagaagaagaaatcaggaaattgtgaggcttcataggaaattctcaaaatcagtaatacccaaaagatataaaagtggttttggtgtt

SEQ ID NO: 106116 - DNA, 560 bp, Homo sapiens
actgccaccacaacctccccagactcaggtgatcctccctcctcagcctccttagtagctgggactacaggcatgtgccaccatgcctagctaatttttgtaaggactgggtctccttatgttgcctaggctaggaattctttatcttattccaggactttgaggagaggtctgtaaactgaaatttgacagtatttttttagaaagtattttttaaatgtattttcctattaatttgaaaattaaatatttaaaacttttttttttttttaaacaaagatgagatctcactatattgcctaggctggcctcaaactcctgagttccactgatcctcctgccttggcctcccaaagtgctaggattacaagcatgagccaccgtacccggccaaaacattttttttaagtcaaaattgcttaggaatttgtttcccatctcttactttaaataagtataggttgcttattttggcagcactaaaattggaatgatacagagattagcatggcccctgtgcaaagatgacatgcaaatttgtgaagagttccatatttaaa

SEQ ID NO: 106117 - DNA, 324 bp, Homo sapiens
ctgcagagggtcgtctaggctttgtttatctccagagattaggagtcttttatttcttatttttatttattgagacaatctcatgctgtcacccaggctgaagagcagtggtttgatcacagctcattacagcctcaaactcctgggctcaagccatcctcccacctcagcttcccaagtagctgggactacaggcgtgcgccaccgtgcctggctaattaaaaaaaaaaaaaatttttttttttttttttaagagatggtgtctcactttgttgcccaggctggtctcaaactcctcctgcctcagcttcccaaagtgttggg

SEQ ID NO: 106118 - DNA, 423 bp, Homo sapiens
tttacggatgagcaacctgatgtcacaccgctaatacgtagaaaaaggacttagtgccgcctaaccactacatttcctaatgcaaggctgccgggtttagttacagacgttatcgcaaaatgaggtgccaggactgagacccagttgctgtttttccagacaaatcaaatgagccctctttagattgccaggccccgctttgataagagagagccatcttcaagtattttagtttctctcatgcagttccctctactgattgcccctgatcagaaatacagagacagtcatagtcagcctacgcatattcacataacagtctcaccctgctttgtcttccgcctctcctccctcacatgaaaccccgtaggtttcattttgggttgcagtgacatagtaaacagctgtcaactggattttcgc

SEQ ID NO: 106119 - DNA, 207 bp, Homo sapiens
gagatcgcgccactgcactccagcctgggagacagcaagactccgtctcaaaaagaaaaaaagaaaatatatttacaaaactggtactattgtagagctcttgcatttaggggaaagatttaaacttggttatagaagaattggtttctcaaaagccatatttaatgcttttattttgtgtgactttttagggattctaatacttat

SEQ ID NO: 106120 - DNA, 549 bp, Homo sapiens
gttaaatgattttcaggggaggcatcaaagcaattcaatggggaattgcttttcaacaaatagtgctggatcagttggatatccaatacagaacaatgatgaacttcaaccccatctcacaccatgaataaaaaataatttgagattgatcatagatctgaacctaaagccaaaactataaaacttctagaaataaatacagcatatctttgcacagagtgtaggcaagatgcaagaaaagcatttgatgaaattcaacctaaggaagatgcaagaagtaccaccccctcatggtgttagaataacactggtagaatcaatatgaaatcatattgttaatagttgttaatatatgtgtgtatacatagatgttgctagggtatgaacgtgtccccaaaattctcatgttgaaacttaatcacgccctggtgtcctggctcaagcctgtaatcctagcactctgggaggccaaggcaggagaattgtttgagctcaggaatacaaaactagcctggacaacacagtgaggcttcatctctactacaaata

SEQ ID NO: 106121 - DNA, 424 bp, Homo sapiens
gggtcatgggagtggatttctcatgaataggctaatgtcctcccttaggggtgagtgagttctcactctcaagggaaaggatattccatgaagagtgggttgttaaaaatagtctgagtctgacttcgttgattttgctctcttgcgtcctctcttaccaagtgatctctttgcacatgccagctccccttccactttcaactcccccgccatgagttgaaccagtctgagtccctcaccagatgcatatgccaaatcttgaactttctagacaccagaattataagccaaattgcttctttataaactactcagtctcaggtgttctgttatagcaacacaaaatggataaagacagaaaactggtaccaagagtggggtgttgctataaagatacctgaaaatgtggaagtggcttttggaa

SEQ ID NO: 106122 - DNA, 635 bp, Homo sapiens
taaatgtcctatgctttttttcccccgtctacttaatatgttccacagtggactgtgttttcaggatggtcttgcgagcaaagcgaactacaaacgttgctattatttcgttttgaaaatgatatttttggtggcaaacgtgataggagaggtcatctcctaaaaagttctaactcaaaagtgtgcaaactggataaaattcaccaaccaatagaagagtggccttgcctttcctgaggagagtcatccagtctcacactcgggcagtgggggctactttaatctcaaatacaccacgatccagctgtgtgatgggggcgggttccccttcccagccttgttttcctccctacagcctgtcagtaactccactttccatcagaagcgttaccatcagctcaaacgtaaccattgtgtagtgtcccactgtacacagcagtgacacccccactaccccacctctcccagggacaaacatcacaaagaaaagttagaacatttttgccatcagacttcttgccccaccacagcaaaattaccaaagagtagaacaaagcttcagagacccaaaaacctttgcaacttcctactgctcactcacagtgacaggattagtttattgcttaccactttcc

SEQ ID NO: 106123 - DNA, 241 bp, Homo sapiens
ctcagcgtatttctgtcacgttctaatccccagaccaaaattagaagccatcaaagcatacgctaatacaggcaggaggacagaggctgatgctaacactgcatgaatgtatggataattttgtcatttttacatatgagtgattaggaatcccttttacttttcagtgtcttctgagaaaccaccaggcttgaaggctacaagtgatgagaaagattctgttttgaatatagccagagga

SEQ ID NO: 106124 - DNA, 311 bp, Homo sapiens
aaagggtaggactctagaacatttaggtcatggctttggaatcagagctctcagcagtttcatgctttgtggataattaaaatcaatacaaaataattacagaactagaaggatctccagatacctaatccagtcccttgtctccaggagaaactagatctagtttaaactaacttccacacagatacttgagttgtatgagagaaactgggactctagattcactttctgcacttaccaagaatattgcaaatgtggcttggtaaccagtgttcaaaaagagattatggtttttataagcatgacattgg

SEQ ID NO: 106125 - DNA, 340 bp, Homo sapiens
actacctgcctcacccattactttcatgttcctggaatttttgatatgaagaacaatgtatagcctatcagtagcttatgtgattttaatataaaatacttggtaagcaacttaggaactgcttcttctttttctttagaaacctacttgtaactgtagctaatcagagcatatattcagggcaacttaaatctatgttcacaagttgcagtcttcaaacttggtccaaataaaatctctacttacgttaagttggcctcaattttttcctttaggttgacattcctttgatcttttaatatgttgaatttttaaatttcttcattgaatccttgatcat

SEQ ID NO: 106126 - DNA, 319 bp, Homo sapiens
caaatgggccacctgcttccgttgatccaccatctacccaacaaaaaggtcaatcaaatcaggaaccacccagcttagccacccccaaagacttaaaaaagcacttaaggccctccatgaccaaacacctgttcatctggaccctggacgttcactcctttccagccacacgaatcttttgacactctgaacacaccaaaagttttgcagcctcagggccttcacacatgctattatctttacctaggatatcccttccctaaactgttttgaaagaaatttaaagaacaggctggacgccgtggctcacgcctgtaat

SEQ ID NO: 106127 - DNA, 173 bp, Homo sapiens
agcagtggaaggagagcgagaaggagaggccaggcatgcagcagggactgacgtaagcatgccagaccctggacagcccaggcaccacttgcggccagatgttaagagaaactcctgaacaaagtgtgactgccaccatccagcccataaactccctctctgtggccacaaag

SEQ ID NO: 106128 - DNA, 636 bp, Homo sapiens
tcatgcagattgttgaggcatatatagttttgcttgaatttcatagattgctttagttatacaatttgatcaggatttttctgttaaggataagtttttagtgggtacttgtcttcccagtgtggaaggggtaaagcaagacacataatatccattcatgtgcatcagagaagtcactcttacctagtagaggaagaattttttcagatgccttgcacattcaaagctatgtctaactcagccatggttcagcgttggttaaaatggtgtacataatatgatgatatacaggtagcttacccttcttctagagtgtacaggatatcagtaagatcttttgatttgaaaatagaaatgattcattttcatattggtatcaacattttaatttattttaattctaagctatggaaaagcacttcatctagtctgtttgaattaagttagctagggttcaatttttcttttctccctgcttttggttgtattcgcaaggaatgataggaagtggggatgagagattaatcatggttttgaggttgcttttggttattctgtatatcattcttacgtgcttctgagatgtcctcacgtttataaatatgtgtatcatataaatgtttgtttcatgtttta

SEQ ID NO: 106129 - DNA, 334 bp, Homo sapiens
tggatatataaccagcaatggaattgctgagctgaatggtagtcctattttaagttctttgagaaatcttcaaactactttccacaggggttcaattaatttacatttgcatcaacagtgtataagtgttcccttttctctgcagccttgccagcatctgttgttggttgactttttagtaatagccattctgacgggtgtgagatggtatctcattgtggttttcatttacatttctctggtgattagtgatgtggagcactgttcatgtttgttggctgcttttcatggtttgttggctctttgttgagaagtatctgttcatgtcttttgc

SEQ ID NO: 106130 - DNA, 381 bp, Homo sapiens
ctcagggtggggaagggtgagagaggggtgagaaattcttatttcgagtacatattgggtacagtgtacattgcttgggtgatgggtggaccaaaatcctagaaatcacctctaaagaacttattcatgtaaccagaagccatctgtaccccaaaaacttgaaataaaaacacaaacttagactgccaaaatataagtttgattctcactttgaatctcaaaaatctagttttacaaattaacaaggaacacattaatacttaaagaagaaaaaataacagttaagaaggatttcatacagtcattaattaaaattattaggccaggcatggtggctcacacctataatcgcagcactttgggaggccgaggcaggcagat

SEQ ID NO: 106131 - DNA, 649 bp, Homo sapiens
tacccaaggtctcatagcaaggcagaggtggaaaccgttttcaactccaggtctgtctggccccagtgtctcatgcagttttcattaccttgagctcacccttagtgacaatgtcattcatttttattctcaaccgcatcttccaggcattgcttgcctcgggattgttttaaaaaaattgctgaatacagtgaagaaacgtattggaagacatcttccaaggaaaaaccctaaatactgatgctttattggaaacaatgacttaagtgataggaccaggattagaatgcaggtgtgtcgtatctgactccgaagcctatgtcattttcactgcatgtgttagtacataatattaaatcctcttttgttttttcttctctgtagtgatgctgaaaattgactaggattgggcaagatttttttttttgaggcggagtctcactttgttgcccaggctggagtgcagtggcacgatcttggctcattgcaacctccaccttccggattcaagcaatcgatccttgtacctcagcctcccaacttgctgggattacaggaatccaccagcatgccgggctaatttttgtatttttagtagagacggggtttcgccatgttggccaggctggtctcaaactcctgacctcag

SEQ ID NO: 106132 - DNA, 241 bp, Homo sapiens
gagggctgaactgggacgaccagagagtggaagctcatacaattctctgggaagaagttctgctaacaacatgtctgatcatgacatgggccttctggacctattctgttggggacacagtggaagggatgaccttgacagaatcttccaaccctaagattctgggattctaggccaaaacctgggtcttgttttgaagtagaaatgatatccagaagtcgacaggctacagtggcaggta

SEQ ID NO: 106133 - DNA, 811 bp, Homo sapiens
attcacagttgtgagtgattctgggaccagtcagcatggatatctcaatgttgattattgtatttagcaaagaaaatggtactatattaaagtagcagttcccaacctctgtggcaccagggacccccagtttcatggaagacaatttttccatggcctgcgaggtggaggggatggtttcaagatgaaactctcccacctcagatcatcaggcattagttagattatcataaggaatactcaacctagagccctcacatgcacagttcacaataggtttcacgttcctatgagaatctaatgctgctgctgctctgacaggaggcagagctcaggtgctaatgctcgcggcatgctcacctcctgctgtgcggcccagttcctaatggtctgcagcctgggggttggggactcctgtattaaagaattttaaaaatgtaaatcactgtcatatagatttgtctgtattctttggattccattataggacaactcttgagataatacttgtttgaatttgtgaaaggtttcttatatagaagaaaattaccctaaattttatcctgtatcattttaggaaataattagaacccaattatttttatgtggcattagatcaaatgtttttcctaatttatctcactaataagattataatgtcagccagttatacatatgagaacacttagaataacataacttgatttttggacaattcgctattctgatgtttcaatgaacagtttaacatttgaagttaactgttgtaatagattaactaccaagcaaattagcactgcacttgcttgat

SEQ ID NO: 106134 - DNA, 358 bp, Homo sapiens
ttttcaagtataaagaagagtgtagtacattatacaggtgagatttttaatttggggaaaggatggattagttagtaagtgatattggagaaaagttacatttctgctccatactatacatcaaaataaattctagataatttaaaatttgctattaatattaaatgaaactataaagtactagaaggaaatgtgagtgaattattttatatttcaagaggacttcctaagtatgacataaaaagttagaaactatagttaccaatatgacaagaatgttcaagaaactggtaggacttaactacatctgcatgaacaccttttgaatgtgaacaatcattaaaaacaaaattgagag

SEQ ID NO: 106135 - DNA, 274 bp, Homo sapiens
gtgtgcctgcgcacagagaccccaagcgttctggagctcctggagagaaggccaaggaaggctgtgcttgtttccaccaagtccaggggtggcgttcacagcccgtaatacattaaggcaaagcagcgatgtctgagccttctgcggttctgaaactgctgctgtgatgagattttctacctgtcctctctcaaaacacagtgatcccatacactgtgtgtttagaacttcagaagaattagtcctccctctgtccaacaatctacaggcatca

SEQ ID NO: 106136 - DNA, 862 bp, Homo sapiens
cacaagattcacatatactcttcacccagattcaccgatggttaatattttgctacatttgttttatcatatttttctgagttatttgaaagtcagccacataatatataatatccctttataattatatacagtatataatataaacattttagtgtatatttccttaaaaaaacaaactaaactaataaaaaacaaagtatagatgtcacaatcaggatattaactttgatataaactgttatctaatctgtttattcagattttactaattgtcccagtcgtgcccgttgtagcaaaagaaaaacattttccttcggttcaggatttaatctgggatcaaacattgtgtttagttgtcatgtcttttaaatctcttttaatctggaacagctccttaatcttacattgtctttcatgaccttgacatttttagtttacaggccagttctactttataggatgttccttaatttgagtgattttgatgttccctgtgcttagatttaaggtatgtgtttttgactgggatactgcaatggtgtgtctttctaggtgcatcataacaagaggtcctgatgcctacttgtcccatcactgataaccaacctaaatcatctagttaactggtatctgccaggcttctccactgttaagttactatttttcactttgtaattagtaagtattttgtagggtgatactttgtatataaatcctcttccttatcaaactttcatttactaatgctagtgtccatccttctgaagcaacaaagtgagacatgcaaagtgaatagactctaccccttggagctaaaatgaagccaagagaaagtgaaccattcagtccgtttaggcag

SEQ ID NO: 106137 - DNA, 1075 bp, Homo sapiens
cttccctgtaaatgcttccaagatatgagcgaatgctatagaaattgcaggaaagtccaaagggctgcgcgtctcctgtggctcagtcttatttcatacctgcaacatcttttaagggaaatttgcaaaagggagaattatcaacttaaaaaaaaaatagccaaggaaacctcgactcttcaaggaagcaaggaaacgtgctctccttgggagtgacattagaggaggcccagtgtgagtcaggacttcatcaccacctggcggaaccagggagccccaccccatgtgtcagtggagatcatgtgctgtcttccctctccaagctagggtttgtcagcagaggcccaggagggagactgaatctcgcctgacagcaatgaactgataccttccttccctataagcaggtgacagacaatatttaataaaatcaaaaaaggctgggtgcaatggcttacacctgtaatcccaacactttgggaggccaaggtgggtggatcacttgaggccaggagtttgagaccagccccagcaacatggtgagaccctgtctttactaaaaatacaaaaaaataaattagccaggcgtggtggcacacgcctgtaatcacagctactctggtggctgaggcatgagaatcagttgaacctgggaggcagagattgcagtgcactgagatcacacaattgcactccagcctgggcaatagagacagactctgtctcaaaaataaaataggcttaaataagattcaggatcttaaagtacccagaatgcccagaatacaataaaaatcaatcactataccaagaaccacaaaactctcaacttgaatgagaaaagagagtcaacagacaccagcatcaggatgacacagatgttggaattaagatatagagaagaatgaaacagatgtcttagaaccgaaatatacaatagtcaaaataggaaactgaatggatgactccacagcaaaatggaggagacagaagagagaatccatgaacttgaagttagagcagtagaaatcacctaacctaaacaacagaaaatagactgaaaaccaaaacaaaa

SEQ ID NO: 106138 - DNA, 165 bp, Homo sapiens
tttagatttctgaagcagctaaatggaatgtctaaattccaaccttttccttctacaaattgttttgccacaaagttactgggagaaagtgctgtggttttatttatttgaagaagtatattaatccacagaagactctgcatgcctaactgggctttttgtata

SEQ ID NO: 106139 - DNA, 479 bp, Homo sapiens
gaacaatgaagaatctcaattatatcaggaatttgtacattagatgtgtcgttttaaaatcctatgcctgattatgcatacacaaataacaagtataaatcatcctcttcatacacattttttgtttaatctttaatacaaacccatgggaaagatttatcctactatcacaaatgatgaatctaatgttcagatattaggaagcataattttgctatttgtcttcctcattaaattgtgaattcctgggaggaagtgtgtaatagtagaaccaacttacttatgctgaattcactgtcccataaaaactgtgtgtcgcctgaacaagttattaaccctcctgaatctcagtttctttacctataaattgcaattacatgaagtacatataaagtcgttaagggcctgatatgtattagctaagtaatgagtgtttcttacaccatcatacatagcagagtccatgaatagactctctg

SEQ ID NO: 106140 - DNA, 151 bp, Homo sapiens
gtacatacaatttcatattcggttatttttcagttaatattgtgaggaagccagagatcacttccaaccccacttttagctcttagtgggctttttagctggatgtagaggccaaattgagagcaggcagattaacaagagaaaagcgtac

SEQ ID NO: 106141 - DNA, 1733 bp, Homo sapiens
ctggggcctgtggctccttctccatgttggccttcccttgtgtctcttgtccctgtaggagtgccttatagtactgtctcgtgcttctagtctagtctgaaccacttgaagcctgcaggacccttcaactaaatctggatccctttgcttcttccctgctggctactcttcatatagatgctcttggagcctgtgcattccatgatgcatgtcagaactctcaccttgttcagcctggtgtgccttaacctcaggagtaaagggaatcatgtcggaaacacgtcgttaaagtagaatggtacaaacattggcttcttagtgccattagcacttttaccaggaaatgcaaaagatgcaaccacataatgttttcactttgttttatgctgttcttcaatcgctctttttgtttatttgtttgtttgctttcattaaccaaactcaggggaatgtcatgatgtcaccaaggccaatgggtagagaaataaaaaccagccatccataattgaatctgtaaagtcagtgaacttagccttttcaggttcaaaattacacaaacacaaggattttcttatctttcacctttcaaaggttttctttttattttgccacctgttttccaaataagaagtgggaagcctcttagataaattgtgataaaaatgtctctttgtttggcgtgagctatcaaattagctttgtgtgtccactgagccatcaaattaggctttggctgctggaggcctaggttctagctttggtcacctatcagaatcttactgttacgctgggcatggtggcatgtgcctacagtcccagctatttgggaggctgaagtgggtagattgcttgagcccaggagcctgtgcaatatggtgagacccatctcaaaaaacaaacaaaaaaagaagtagaatcttactgtgaatagtactagctaccctagaagatatatattttaaatctgtttcttaggaatagtagctaaaagaaggaatggccaaaggagggaaagtggttggccgcagcggctcacacctgtaatcccagctctttgggaggctggggtgggaggatcactggagcccaggagttcaagacaagtctgggcaagatagcgagaccctcatctctttgaaaaatatatatatatacttttttttttaaaggagagaaaatgcttaggttgcaaatggagagtattgaacgtggtgatgtaaaaaacttctgcaaaacttgttctgtagctcctgggtcaggtctatgccattttttcttatatctgctcacacagtacagaaatgactaaaattttgggtctgggctgttatatcactttgtgttaagttatttgtagtagctaatgtgctaacttatatatgtgttctttctgttttttggattttaccttttgttttggcataacttatctatatttttgtttacattattttaaaaatatcagtaactgtaataatataaaattgaagttgtattgttgacaatacctctagtttttaaggtcatctgtcacataatttaagtgcaccagttcctaatgtataaagttctctctctctctctctcaataaacaatgcagaaaatactttcctttctcataacaacttgattaaaatactgctcttgagggggtggtgaaagcccaaggtgagccctatatattaattcaaagtcaagatttgagctttattgaaaatgagccacagccagg

SEQ ID NO: 106142 - DNA, 886 bp, Homo sapiens
gcggccgtctactactactaaattcgcggccgcgtccatctcaaaaaacaaacaaaaaaagaagtagaatcttactgtgaatagtactagctaccctagaagatatatattttaaatctgtttcttaggaatagtagctaaaagaaggaatggccaaaggagggaaagtggttggccgcagcggctcacacctgtaatcccagctctttgggaggctggggtgggaggatcactggagcccaggagttcaagacaagtctgggcaagatagcgagaccctcatctctttgaaaaatatatatatatacttttttttttaaaggagagaaaatgcttaggttgcaaatggagagtattgaacgtggtgatgtaaaaaacttctgcaaaacttgttctgtagctcctgggtcaggtctatgccattttttcttatatctgctcacacagtacagaaatgactaaaattttgggtctgggctgttatatcactttgtgttaagttatttgtagtagctaatgtgctaacttatatatgtgttctttctgttttttggattttaccttttgttttggcataacttatctatatttttgtttacattattttaaaaatatcagtaactgtaataatataaaattgaagttgtattgttgacaatacctctagtttttaaggtcatctgtcacataatttaagtgcaccagttcctaatgtataaagttctctctctctctctctcaataaacaatgcagaaaatactttcctttctcataacaacttgattaaaatactgctcttgagggggtggtgaaagcccaaggtgagccctatatattaattcaaagtcaagatttgagctttattgaaaatgagccacagccagg

SEQ ID NO: 106143 - DNA, 290 bp, Homo sapiens
caggggcccagctgggatgtggcagcagctgtctgtccttcggcactgccccaaccaccctgtgttcttggtgggatggagaggtgctctaaaggtggaaacagttgtgtacggtggataaagaggtcttggggaactagtaaaatgtccctattccctgggtcattgtagggggccccacccacctgaaccaccgtagactccaggatgcatccagaagtgttctgtccccagcatgcttctgggggacccacacaataatgatattcatggaggaacacgctgggaca

SEQ ID NO: 106144 - DNA, 4723 bp, Homo sapiens
cacaatgacatgcagacctgcatattggagctggacggagaaactgggctaatgtgacagacagcaacaagagtaaggcagttgcttcgctattgagagaaagaaccatatgaagaaatttcggcagaggcggaccgggaacctcagcagctgcagaactactggtcagaagtgcgctacacggtgcgctgcatctaccgccaggcaggaaccccgctggcagatgaccaggaccagtctctggtgcctgacaaggagggagtgaaggagctcgtggataggctctgcgagagggacccctaccagctgtaccagcgtctggaacagcaagctcgagagtatgtgctggagatgaaggtccgcctgctccggcagctgtcggctgcggccaaggtgaaggcaccatctggcctgcagggcccgccgcaagcgcaccagttcatctccctcctgcttgaggagtacggcgccctctgccaggccgcacgctccatcagcaccttccttggcactctggaaaatgaacacttgaaaaagttccaagtgacgtgggaactgcataataaacacctgtttgaaaatctggtcttttcggagccacttcttcagagcaacttgcccgcactggtgtcacagatcaggctaggaaccaccacacacgacacctgcagtgaggacacatacagtaccttgctgcagaggtaccagcgttccgaggaggagctgcgcagagtcgccgaggagtggctggagtgccagaagaggatcgacgcctatgtcgacgagcagatgacaatgaaaaccaagcagcgcatgttaacagaagactgggagctttttaaacaaagaagattcattgaagaacagttaaccaataagaaagcagttactggcgagaacaacttcacagacaccatgaggcacatgttatcgtcccggctgagcatgcccgactgccccaactgcaactacaggagaagatgtgcttgcgatgactgcagtctctcacacatcctcacgtgtggtatcatggacccccccgtcactgatgacatccacattcaccagctcccacttcaagtggatcctgctcctgactatcttgctgagaggagcccgcccagtgtgtcatctgcaagctcggggtccggctccagctctcccatcacaattcagcagcaccccaggctcatcctcacagacagtggctcggcaccaactttttgtagtgatgatgaagatgttgcaccattgtcagccaaatttgctgatatttatccattgagtaattatgatgataccgaggtggtggccaacatgaatggaatccacagcgaattgaatggtggcggggaaaacatggccctgaaggatgagtctcctcagataagcagtaccagcagtagttcctcagaagctgatgatgaagaagcggacggcgagagtagtggggagcccccaggggccccgaaggaagatggagtgctgggaagcaggagccccaggacagaggagagcaaagcagacagtccacccccatcctacccaacacagcaggctgaacaagctccaaacacttgtgaatgtcatgtttgtaagcaggaagcttctggactgacaccatctgcaatgacagccggagcccttcctcctggccatcagttcttgagcccagagaagcccacacaccctgcactgcacctttaccctcacatccatggacatgtgcctttgcacactgttccacacctgccacgccctctcatccaccccaccttgtatgcaacgccccccttcacacacagtaaggctttaccgccagcacctgttcagaatcacacaaataagcatcaggtattcaatgcatctcttcaagaccatatttatccgagctgttttgggaatactccagagtggaatagttctaaatttataagtctttggggatcagaagtgatgaatgataagaactggaatcctggcactttcttgccagatacaatttctgggagtgaaatattagggccaacactctcagaaacaagaccggaagcccttccacctccatctagcaatgaaacacctgcagtctcggatagtaaagagaaaaagaatgctgcaaaaaagaaatgtttatacaatttccaagatgctttcatggaagcaaataaagttgtcatggccacgtcatcagccacgtcctctgtgtcctgcacagctaccacagtgcagtccagcaacagccagttcagagtgtcatccaagagacctccttcagtaggtgacgtgtttcatggcatcagcaaggaggaccacagacactcggccccagccgccccgaggaatagccccacgggcttggcccccctcccagcgctctcgcctgctgcgctgtcacctgctgcgctctcacctgcctccacacctcaccttgcaaatcttgcagccccatcattccccaaaacagcaaccacaactcctgggtttgtggacacacgcaagagtttctgtcctgcacccctacccccggccacagatggctccattagcgcccctccaagtgtctgcagtgaccctgactgcgaagggcaccgctgcgagaatggtgtctacgacccacagcaggatgatggggacgagagtgcagatgaggacagctgctctgagcacagctccagcacctcgacctccaccaaccagaaggagggcaagtactgcgactgctgctactgcgaattctttgggcacggcgggcctccagctgcaccaacaagtagaaattatgcagaaatgagggaaaagcttcgcttacggctgaccaagaggaaagaggagcaacctaaaaaaatggaccagatctcagaaagggaaagcgtcgttgaccatcggagggtggaggatttgttgcagtttataaatagctccgaaaccaaaccagtgagcagcacgcgtgcagcgaagcgagcaaggcataagcaaaggaagctggaggagaaagctcgcctagaagcagaggccagggcccgggagcacctgcacctccaggaggagcagaggcggcgggaggaggaggaggatgaggaagaagaggaggatcgtttcaaggaggaatttcagcggcttcaggagcttcagaagctaagagctgtaaaaaagaagaagaaggagaggccaagtaaagactgccccaagttggacatgctcactagaaatttccaggcagcaacagagtctgttcctaactctggaaacatccacaatggctcactagagcaaactgaagaaccagaaacctcttctcactccccatccaggcatatgaaccactcagagcccaggccagggctaggggctgatggggatgctgcagaccccgtcgacaccagagactccaaatttctcctccccaaggaggtgaatgggaagcagcatgagccactctcttttttcttcgacatcatgcagcaccataaagaaggaaatggcaagcagaagctgaggcagaccagcaaggccagcagcgagccagcgaggaggcccacagagccccccaaggccacagaggggcagtccaagccccgggcccagactgagtcaaaggctaaggtggtcgacctcatgtccatcacagagcagaaaagagaggagagaaaagtcaacagtaataacaataacaaaaagcagctgaaccacatcaaggacgaaaagtcaaacccaacccctatggagcccacctctcccggtgagcatcagcagaacagcaagctggtgctggcagagtcccctcagccaaagggcaagaacaagaaaaataagaagaagaaaggagacagagtcaacaattcaattgatgatgtctttctacctaaagatattgacctagacagtgtggatatggatgagacagagagggaagtggaatatttcaaaaggttctgcttggattctgctagacagacccgacaaagactgtctatcaactggtccaattttagcttgaaaaaagccacctttgctgcccactgaatgaggactccctggagagggacacgcgagaggcaggccaggctgcaccaccccaagagccacgcccctcgctggcgccccagagccgtggtgcttgccaagggctgtgcggagctggtgctgcctgaaaccccagaccgagaagttgatgctcggcccacgccgttagctcgtgtgcgtgtagtctgtgcgtgagactccttcgattgtagctctgtgctgtcggattggaacagtagttcccgccaagtcctcccaccaccgcggcctcggaggcctgggccgtggccagataggagtttgcatcatccacgtggctccgttgcctctgcattgcgccctgtcctgtcatgtgtcctcaccggggtatcggccgtcactcagctctcctgtgcccctgcgtctcaccctaggcgggctgggcggggcaggcctcctttgttctccacaatctactgtctccgagtgtacacgttgcgctgtttgtgtttgatccccctgacttgtagccagcttgtgtaagatcccttgcagaacgagaaagttaaaaacaagcccacccagtactcacaccatcaagtctgttatagagtgtacgactgtattaacacggaggcctgcctggctacttttttaacatattgttaagtaatattaaaatcatgtctttctttttgaaagatggaatacattagta

SEQ ID NO: 106145 - DNA, 4676 bp, Homo sapiens
cacaatgacatgcagacctgcatattggagctggacggagaaactgggctaatgtgacagacagcaacaagagtaaggcagttgcttcgctattgagagaaagaaccatatgaagaaatttcggcagaggcggaccgggaacctcagcagctgcagaactactggtcagaagtgcgctacacggtgcgctgcatctaccgccaggcaggaaccccgctggcagatgaccaggaccagtctctggtgcctgacaaggagggagtgaaggagctcgtggataggctctgcgagagggacccctaccagctgtaccagcgtctggaacagcaagctcgagagtatgtgctggagatgaaggtccgcctgctccggcagctgtcggctgcggccaaggtgaaggcaccatctggcctgcagggcccgccgcaagcgcaccagttcatctccctcctgcttgaggagtacggcgccctctgccaggccgcacgctccatcagcaccttccttggcactctggaaaatgaacacttgaaaaagttccaagtgacgtgggaactgcataataaacacctgtttgaaaatctggtcttttcggagccacttcttcagagcaacttgcccgcactggtgtcacagatcaggctaggaaccaccacacacgacacctgcagtgaggacacatacagtaccttgctgcagaggtaccagcgttccgaggaggagctgcgcagagtcgccgaggagtggctggagtgccagaagaggatcgacgcctatgtcgacgagcagatgacaatgaaaaccaagcagcgcatgttaacagaagactgggagctttttaaacaaagaagattcattgaagaacagttaaccaataagaaagcagttactggcgagaacaacttcacagacaccatgaggcacatgttatcgtcccggctgagcatgcccgactgccccaactgcaactacaggagaagatgtgcttgcgatgactgcagtctctcacacatcctcacgtgtggtatcatggacccccccgtcactgatgacatccacattcaccagctcccacttcaagtggatcctgctcctgactatcttgctgagaggagcccgcccagtgtgtcatctgcaagctcggggtccggctccagctctcccatcacaattcagcagcaccccaggctcatcctcacagacagtggctcggcaccaactttttgtagtgatgatgaagatgttgcaccattgtcagccaaatttgctgatatttatccattgagtaattatgatgataccgaggtggtggccaacatgaatggaatccacagcgaattgaatggtggcggggaaaacatggccctgaaggatgagtctcctcagataagcagtaccagcagtagttcctcagaagctgatgatgaagaagcggacggcgagagtagtggggagcccccaggggccccgaaggaagatggagtgctgggaagcaggagccccaggacagaggagagcaaagcagacagtccacccccatcctacccaacacagcaggctgaacaagctccaaacacttgtgaatgtcatgtttgtaagcaggaagcttctggactgacaccatctgcaatgacagccggagcccttcctcctggccatcagttcttgagcccagagaagcccacacaccctgcactgcacctttaccctcacatccatggacatgtgcctttgcacactgttccacacctgccacgccctctcatccaccccaccttgtatgcaacgccccccttcacacacagtaaggctttaccgccagcacctgttcagaatcacacaaataagcatcaggtattcaatgcatctcttcaagaccatatttatccgagctgttttgggaatactccagagtggaatagttctaaatttataagtctttggggatcagaagtgatgaatgataagaactggaatcctggcactttcttgccagatacaatttctgggagtgaaatattagggccaacactctcagaaacaagaccggaagcccttccacctccatctagcaatgaaacacctgcagtctcggatagtaaagagaaaaagaatgctgcaaaaaagaaatgtttatacaatttccaagatgctttcatggaagcaaataaagttgtcatggccacgtcatcagccacgtcctctgtgtcctgcacagctaccacagtgcagtccagcaacagccagttcagagtgtcatccaagagacctccttcagtaggtgacgtgtttcatggcatcagcaaggaggaccacagacactcggccccagccgccccgaggaatagccccacgggcttggcccccctcccagcgctctcgcctgctgcgctgtcacctgctgcgctctcacctgcctccacacctcaccttgcaaatcttgcagccccatcattccccaaaacagcaaccacaactcctgggtttgtggacacacgcaagagtttctgtcctgcacccctacccccggccacagatggctccattagcgcccctccaagtgtctgcagtgaccctgactgcgaagggcaccgctgcgagaatggtgtctacgacccacagcaggatgatggggacgagagtgcagatgaggacagctgctctgagcacagctccagcacctcgacctccaccaaccagaaggaggcctccagctgcaccaacaagtagaaattatgcagaaatgagggaaaagcttcgcttacggctgaccaagaggaaagaggagcaacctaaaaaaatggaccagatctcagaaagggaaagcgtcgttgaccatcggagggtggaggatttgttgcagtttataaatagctccgaaaccaaaccagtgagcagcacgcgtgcagcgaagcgagcaaggcataagcaaaggaagctggaggagaaagctcgcctagaagcagaggccagggcccgggagcacctgcacctccaggaggagcagaggcggcgggaggaggaggaggatgaggaagaagaggaggatcgtttcaaggaggaatttcagcggcttcaggagcttcagaagctaagagctgtaaaaaagaagaagaaggagaggccaagtaaagactgccccaagttggacatgctcactagaaatttccaggcagcaacagagtctgttcctaactctggaaacatccacaatggctcactagagcaaactgaagaaccagaaacctcttctcactccccatccaggcatatgaaccactcagagcccaggccagggctaggggctgatggggatgctgcagaccccgtcgacaccagagactccaaatttctcctccccaaggaggtgaatgggaagcagcatgagccactctcttttttcttcgacatcatgcagcaccataaagaaggaaatggcaagcagaagctgaggcagaccagcaaggccagcagcgagccagcgaggaggcccacagagccccccaaggccacagaggggcagtccaagccccgggcccagactgagtcaaaggctaaggtggtcgacctcatgtccatcacagagcagaaaagagaggagagaaaagtcaacagtaataacaataacaaaaagcagctgaaccacatcaaggacgaaaagtcaaacccaacccctatggagcccacctctcccggtgagcatcagcagaacagcaagctggtgctggcagagtcccctcagccaaagggcaagaacaagaaaaataagaagaagaaaggagacagagtcaacaattcaattgatgatgtctttctacctaaagatattgacctagacagtgtggatatggatgagacagagagggaagtggaatatttcaaaaggttctgcttggattctgctagacagacccgacaaagactgtctatcaactggtccaattttagcttgaaaaaagccacctttgctgcccactgaatgaggactccctggagagggacacgcgagaggcaggccaggctgcaccaccccaagagccacgcccctcgctggcgccccagagccgtggtgcttgccaagggctgtgcggagctggtgctgcctgaaaccccagaccgagaagttgatgctcggcccacgccgttagctcgtgtgcgtgtagtctgtgcgtgagactccttcgattgtagctctgtgctgtcggattggaacagtagttcccgccaagtcctcccaccaccgcggcctcggaggcctgggccgtggccagataggagtttgcatcatccacgtggctccgttgcctctgcattgcgccctgtcctgtcatgtgtcctcaccggggtatcggccgtcactcagctctcctgtgcccctgcgtctcaccctaggcgggctgggcggggcaggcctcctttgttctccacaatctactgtctccgagtgtacacgttgcgctgtttgtgtttgatccccctgacttgtagccagcttgtgtaagatcccttgcagaacgagaaagttaaaaacaagcccacccagtactcacaccatcaagtctgttatagagtgtacgactgtattaacacggaggcctgcctggctacttttttaacatattgttaagtaatattaaaatcatgtctttctttttgaaagatggaatacattagta

SEQ ID NO: 106146 - DNA, 1021 bp, Homo sapiens
ccacagagcaggggtccctaacccttgggtcacagaccagtactagtccatggcctgttaggaaccaggctgcacagcaggaggtgagtggccggtgagccagtgaagcctgtcagtgtttatagccactccctattgcttgcattaccgcctgaacttctcatgtccgatcagcagagacattagatcctcacagaagcatgaaccctattgtgaactgcgtgtgcaagggatctagattgtacgctcctcatgagaatctaatgcctgatgatctgtcactgtctcccatcacccctagatgggaccatctagttgaaggaaaacaagctcagggctcccactaattgtgcattgtggtgagttgtataattatttcattctatatgacagtgtaataataatagaaacaaagtgcacaataaatgtgatgagcttgaatcatcccagaaccatccccttgcctcacctggtctgtggaaaagttgtcttccatgaaatcggtccctggtcctaaaaaggttggggaccactgctctagagcacatcccatggcacccacgcagggtggtttattgagagcacagaaggagggaggagcatgagatctcaggccatcagtagacactgtgaaggaaagaccttgagaaggaaaacagaaggcgaggggccggctttcctgcccggctcactctcgtcaccggggctcaagggaacgaagcgcacctgctctggcctcacgggtgcggtaggggaagccaagaccaccctggctgggggcagagatgggagctcagggctctgaagcccagggagaggctgctgtgcagggcggggtttcaagactcccagagaggctgcttgtgggaagcacgtgaaaggctccttaatccaagagtgtctctgttgacgacatagtgccacctgctaagtctctgtcttgccaacatgagctgcagtcaagttgtattgcattaggtcattgaaacctcccaagtgcataggaccccgcctaccttta

SEQ ID NO: 106147 - DNA, 5866 bp, Homo sapiens
ttttgtatttttggtagagacggggtttcaccgtgttgcccaggctggaagtttgaaatcaattatttttatgtttgctgtctgaaattcattctttctctgttgtttgacacatacataagcctgcaggtacccaaatttgttccaaaaaaaaaaaaatttccctgaggctgtgaggagagagtcaaggaagaggtttttattgatgttatttatcaaacaactcttacactgtacactaagattttataataactgcagacatatacaatgaaaagggagaattggcaccaatattgaatcttcccatccaagaatatggtatgtcactcttttttaaggtttttaaaaatatattgtattatggttttatagtttgtaaatcttgacccattttgtgcctccatagtctgtagtttgaggggctgctatgaccggcatcttgagtggggaatgtgtgtttaaagcattcatgctggaaactgggaaaatggagatgccctgtgaccagtcatctcgccagatgccggcattaactcttgtagtttttgagttgagtcttgaatctgggagtctaggaaatcacggtatcttctacaaataatgataggtttatctcatcttttccagcatttgtcccctttttttggcttccactaggaccttcagaccagtgtgaataagagcattgatactggcacccttgtccagtcctggcttcgaggggctgctatgacaatgaaaaccaagcagcgcatgttaacagaagactgggagctttttaaacaaagaagattcattgaagaacagttaaccaataagaaagcagttactggcgagaacaacttcacagacaccatgaggcacatgttatcgtcccggctgagcatgcccgactgccccaactgcaactacaggagaagatgtgcttgcgatgactgcagtctctcacacatcctcacgtgtggtatcatggacccccccgtcactgatgacatccacattcaccagctcccacttcaagtggatcctgctcctgactatcttgctgagaggagcccgcccagtgtgtcatctgcaagctcggggtccggctccagctctcccatcacaattcagcagcaccccaggctcatcctcacagacagtggctcggcaccaactttttgtagtgatgatgaagatgttgcaccattgtcagccaaatttgctgatatttatccattgagtaattatgatgataccgaggtggtggccaacatgaatggaatccacagcgaattgaatggtggcggggaaaacatggccctgaaggatgagtctcctcagataagcagtaccagcagtagttcctcagaagctgatgatgaagaagcggacggcgagagtagtggggagcccccaggggccccgaaggaagatggagtgctgggaagcaggagccccaggacagaggagagcaaagcagacagtccacccccatcctacccaacacagcaggctgaacaagctccaaacacttgtgaatgtcatgtttgtaagcaggaagcttctggactgacaccatctgcaatgacagccggagcccttcctcctggccatcagttcttgagcccagagaagcccacacaccctgcactgcacctttaccctcacatccatggacatgtgcctttgcacactgttccacacctgccacgccctctcatccaccccaccttgtatgcaacgccccccttcacacacagtaaggctttaccgccagcacctgttcagaatcacacaaataagcatcaggtattcaatgcatctcttcaagaccatatttatccgagctgttttgggaatactccagagtggaatagttctaaatttataagtctttggggatcagaagtgatgaatgataagaactggaatcctggcactttcttgccagatacaatttctgggagtgaaatattagggccaacactctcagaaacaagaccggaagcccttccacctccatctagcaatgaaacacctgcagtctcggatagtaaagagaaaaagaatgctgcaaaaaagaaatgtttatacaatttccaagatgctttcatggaagcaaataaagttgtcatggccacgtcatcagccacgtcctctgtgtcctgcacagctaccacagtgcagtccagcaacagccagttcagagtgtcatccaagagacctccttcagtaggtgacgtgtttcatggcatcagcaaggaggaccacagacactcggccccagccgccccgaggaatagccccacgggcttggcccccctcccagcgctctcgcctgctgcgctgtcacctgctgcgctctcacctgcctccacacctcaccttgcaaatcttgcagccccatcattccccaaaacagcaaccacaactcctgggtttgtggacacacgcaagagtttctgtcctgcacccctacccccggccacagatggctccattagcgcccctccaagtgtctgcagtgaccctgactgcgaagggcaccgctgcgagaatggtgtctacgacccacagcaggatgatggggacgagagtgcagatgaggacagctgctctgagcacagctccagcacctcgacctccaccaaccagaaggagggcaagtactgcgactgctgctactgcgaattctttgggcacggcgggcctccagctgcaccaacaagtagaaattatgcagaaatgagggaaaagcttcgcttacggctgaccaagaggaaagaggagcaacctaaaaaaatggaccagatctcagaaagggaaagcgtcgttgaccatcggagggtggaggatttgttgcagtttataaatagctccgaaaccaaaccagtgagcagcacgcgtgcagcgaagcgagcaaggcataagcaaaggaagctggaggagaaagctcgcctagaagcagaggccagggcccgggagcacctgcacctccaggaggagcagaggcggcgggaggaggaggaggatgaggaagaagaggaggatcgtttcaaggaggaatttcagcggcttcaggagcttcagaagctaagagctgtaaaaaagaagaagaaggagaggccaagtaaagactgccccaagttggacatgctcactagaaatttccaggcagcaacagagtctgttcctaactctggaaacatccacaatggctcactagagcaaactgaagaaccagaaacctcttctcactccccatccaggcatatgaaccactcagagcccaggccagggctaggggctgatggggatgctgcagaccccgtcgacaccagagactccaaatttctcctccccaaggaggtgaatgggaagcagcatgagccactctcttttttcttcgacatcatgcagcaccataaagaaggaaatggcaagcagaagctgaggcagaccagcaaggccagcagcgagccagcgaggaggcccacagagccccccaaggccacagaggggcagtccaagccccgggcccagactgagtcaaaggctaaggtggtcgacctcatgtccatcacagagcagaaaagagaggagagaaaagtcaacagtaataacaataacaaaaagcagctgaaccacatcaaggacgaaaagtcaaacccaacccctatggagcccacctctcccggtgagcatcagcagaacagcaagctggtgctggcagagtcccctcagccaaagggcaagaacaagaaaaataagaagaagaaaggagacagagtcaacaattcaattgatgatgtctttctacctaaagatattgacctagacagtgtggatatggatgagacagagagggaagtggaatatttcaaaaggttctgcttggattctgctagacagacccgacaaagactgtctatcaactggtccaattttagcttgaaaaaagccacctttgctgcccactgaatgaggactccctggagagggacacgcgagaggcaggccaggctgcaccaccccaagagccacgcccctcgctggcgccccagagccgtggtgcttgccaagggctgtgcggagctggtgctgcctgaaaccccagaccgagaagttgatgctcggcccacgccgttagctcgtgtgcgtgtagtctgtgcgtgagactccttcgattgtagctctgtgctgtcggattggaacagtagttcccgccaagtcctcccaccaccgcggcctcggaggcctgggccgtggccagataggagtttgcatcatccacgtggctccgttgcctctgcattgcgccctgtcctgtcatgtgtcctcaccggggtatcggccgtcactcagctctcctgtgcccctgcgtctcaccctaggcgggctgggcggggcaggcctcctttgttctccacaatctactgtctccgagtgtacacgttgcgctgtttgtgtttgatccccctgacttgtagccagcttgtgtaagatcccttgcagaacgagaaagttaaaaacaagcccacccagtactcacaccatcaagtctgttatagagtgtacgactgtattaacacggaggcctgcctggctacttttttaacatattgttaagtaatattaaaatcatgtctttctttttgaaagatggaatacattagtaaaaaaaaaaaaaaaaaaaaaaaaaaaaaaaaaaaaaaaaaaaaaaaaaaaaaagaggggggagcgcgcgccacaaaaaatcccccacgagggggcccacagacacccgcccaacccgctatttttgtcgcaacgggggcgcccaccacaaaagagaggagagccactctcatctcaacaccacgacagagcgcagcggcgcgcggcgaggttttcccaacgacccaccacacgcgggacaacaaaccgcgcctcccccgggcacccctcagggacgagacacgcccccccctcctcgccggagacggcaccacaccccgcagcggcccccaacccccgccccccagccgaacgactacacacaacccccccaaaggcgacaccacaacaccacacccacaccagagcagcaacaagacgccggcaaccaccaacgcccgccaaaacacgcgcccacacctacacaaacctcttgctcccacacaccagtcgcactgtactattcctcatacaaacccacatttcttacaccgcgagcacgcaacactcagtaaaaaaaaaagcaaaagccaataccgcagccacaacacacacacgacacctatcagaccaaacgtatacacaagcacacagcacaactatttacgacaaactatctcatcacaacgtccacatatcaatatacatctgaatctctcaaatcttcctcattacttgcacactcatcctcacaaacacaaccaccaaacaaacatacgacagcccatacacactcgacccatcctaccacacacaacgaactatacagtctctactggctacacatacatactcttaatcctacacaatctatacactccaccaccacgcacaccgaacacaccagaagactcgtaccccccaccgcccaaactactcaagcagaacacgagagacacagcgataaagacggagcgcaagcacagaacggagaggcgggagggacgagcagccgccaccgatcgctgcacacgcgcgagaccccacggcgtgccagtacgacacacctgcacagaaggtagacgaggacagcagggaacacgacacgggcgcggacgaagagcggcaacagcgcgcgccgccgcctaagcaaaagagacagacaagagaagagagagcggaccggagacgggacctaaaaaagagcctccactcgcccaat

SEQ ID NO: 106148 - DNA, 3935 bp, Homo sapiens
ttttgtatttttggtagagacggggtttcaccgtgttgcccaggctggaagtttgaaatcaattatttttatgtttgctgtctgaaattcattctttctctgttgtttgacacatacataagcctgcaggtacccaaatttgttccaaaaaaaaaaaaatttccctgaggctgtgaggagagagtcaaggaagaggtttttattgatgttatttatcaaacaactcttacactgtacactaagattttataataactgcagacatatacaatgaaaagggagaattggcaccaatattgaatcttcccatccaagaatatggtatgtcactcttttttaaggtttttaaaaatatattgtattatggttttatagtttgtaaatcttgacccattttgtgcctccatagtctgtagtttgaggggctgctatgaccggcatcttgagtggggaatgtgtgtttaaagcattcatgctggaaactgggaaaatggagatgccctgtgaccagtcatctcgccagatgccggcattaactcttgtagtttttgagttgagtcttgaatctgggagtctaggaaatcacggtatcttctacaaataatgataggtttatctcatcttttccagcatttgtcccctttttttggcttccactaggaccttcagaccagtgtgaataagagcattgatactggcacccttgtccagtcctggcttcgaggggctgctatgacaatgaaaaccaagcagcgcatgttaacagaagactgggagctttttaaacaaagaagattcattgaagaacagttaaccaataagaaagcagttactggcgagaacaacttcacagacaccatgaggcacatgttatcgtcccggctgagcatgcccgactgccccaactgcaactacaggagaagatgtgcttgcgatgactgcagtctctcacacatcctcacgtgtggtatcatggacccccccgtcactgatgacatccacattcaccagctcccacttcaagtggatcctgctcctgactatcttgctgagaggagcccgcccagtgtgtcatctgcaagctcggggtccggctccagctctcccatcacaattcagcagcaccccaggctcatcctcacagacagtggctcggcaccaactttttgtagtgatgatgaagatgttgcaccattgtcagccaaatttgctgatatttatccattgagtaattatgatgataccgaggtggtggccaacatgaatggaatccacagcgaattgaatggtggcggggaaaacatggccctgaaggatgagtctcctcagataagcagtaccagcagtagttcctcagaagctgatgatgaagaagcggacggcgagagtagtggggagcccccaggggccccgaaggaagatggagtgctgggaagcaggagccccaggacagaggagagcaaagcagacagtccacccccatcctacccaacacagcaggctgaacaagctccaaacacttgtgaatgtcatgtttgtaagcaggaagcttctggactgacaccatctgcaatgacagccggagcccttcctcctggccatcagttcttgagcccagagaagcccacacaccctgcactgcacctttaccctcacatccatggacatgtgcctttgcacactgttccacacctgccacgccctctcatccaccccaccttgtatgcaacgccccccttcacacacagtaaggctttaccgccagcacctgttcagaatcacacaaataagcatcaggtattcaatgcatctcttcaagaccatatttatccgagctgttttgggaatactccagagtggaatagttctaaatttataagtctttggggatcagaagtgatgaatgataagaactggaatcctggcactttcttgccagatacaatttctgggagtgaaatattagggccaacactctcagaaacaagaccggaagcccttccacctccatctagcaatgaaacacctgcagtctcggatagtaaagagaaaaagaatgctgcaaaaaagaaatgtttatacaatttccaagatgctttcatggaagcaaataaagttgtcatggccacgtcatcagccacgtcctctgtgtcctgcacagctaccacagtgcagtccagcaacagccagttcagagtgtcatccaagagacctccttcagtaggtgacgtgtttcatggcatcagcaaggaggaccacagacactcggccccagccgccccgaggaatagccccacgggcttggcccccctcccagcgctctcgcctgctgcgctgtcacctgctgcgctctcacctgcctccacacctcaccttgcaaatcttgcagccccatcattccccaaaacagcaaccacaactcctgggtttgtggacacacgcaagagtttctgtcctgcacccctacccccggccacagatggctccattagcgcccctccaagtgtctgcagtgaccctgactgcgaagggcaccgctgcgagaatggtgtctacgacccacagcaggatgatggggacgagagtgcagatgaggacagctgctctgagcacagctccagcacctcgacctccaccaaccagaaggagggcaagtactgcgactgctgctactgcgaattctttgggcacggcgggcctccagctgcaccaacaagtagaaattatgcagaaatgagggaaaagcttcgcttacggctgaccaagaggaaagaggagcaacctaaaaaaatggaccagatctcagaaagggaaagcgtcgttgaccatcggagggtggaggatttgttgcagtttataaatagctccgaaaccaaaccagtgagcagcacgcgtgcagcgaagcgagcaaggcataagcaaaggaagctggaggagaaagctcgcctagaagcagaggccagggcccgggagcacctgcacctccaggaggagcagaggcggcgggaggaggaggaggatgaggaagaagaggaggatcgtttcaaggaggaatttcagcggcttcaggagcttcagaagctaagagctgtaaaaaagaagaagaaggagaggccaagtaaagactgccccaagttggacatgctcactagaaatttccaggcagcaacagagtctgttcctaactctggaaacatccacaatggctcactagagcaaactgaagaaccagaaacctcttctcactccccatccaggcatatgaaccactcagagcccaggccagggctaggggctgatggggatgctgcagaccccgtcgacaccagagactccaaatttctcctccccaaggaggtgaatgggaagcagcatgagccactctcttttttcttcgacatcatgcagcaccataaagaaggaaatggcaagcagaagctgaggcagaccagcaaggccagcagcgagccagcgaggaggcccacagagccccccaaggccacagaggggcagtccaagccccgggcccagactgagtcaaaggctaaggtggtcgacctcatgtccatcacagagcagaaaagagaggagagaaaagtcaacagtaataacaataacaaaaagcagctgaaccacatcaaggacgaaaagtcaaacccaacccctatggagcccacctctcccggtgagcatcagcagaacagcaagctggtgctggcagagtcccctcagccaaagggcaagaacaagaaaaataagaagaagaaaggagacagagtcaacaattcaattgatgatgtctttctacctaaagatattgacctagacagtgtggatatggatgagacagagagggaagtggaatatttcaaaaggactccttccgcccacccattcctcctcccgagtcctttccccttctcaagtgcagcctg

SEQ ID NO: 106149 - DNA, 3840 bp, Homo sapiens
actgacttcccgacgtttatgttattgaggagatcatcgtcgtaaatgtatcgtccaggtgagcatgacgactgcccaactgcaactactggagaagatgtgcttgcgatgactgcagtctctcacacatcctcacgtgtggtatcatggacccccccgtcactgatgacatccacattcaccagctcccacttcaagtggatcctgctcctgactatcttgctgagaggagcccgcccagtgtgtcatctgcaagctcggggtccggctccagctctcccatcacaattcagcagcaccccaggctcatcctcacagacagtggctcggcaccaactttttgtagtgatgatgaagatgttgcaccattgtcagccaaatttgctgatatttatccattgagtaattatgatgataccgaggtggtggccaacatgaatggaatccacagcgaattgaatggtggcggggaaaacatggccctgaaggatgagtctcctcagataagcagtaccagcagtagttcctcagaagctgatgatgaagaagcggacggcgagagtagtggggagcccccaggggccccgaaggaagatggagtgctgggaagcaggagccccaggacagaggagagcaaagcagacagtccacccccatcctacccaacacagcaggctgaacaagctccaaacacttgtgaatgtcatgtttgtaagcaggaagcttctggactgacaccatctgcaatgacagccggagcccttcctcctggccatcagttcttgagcccagagaagcccacacaccctgcactgcacctttaccctcacatccatggacatgtgcctttgcacactgttccacacctgccacgccctctcatccaccccaccttgtatgcaacgccccccttcacacacagtaaggctttaccgccagcacctgttcagaatcacacaaataagcatcaggtattcaatgcatctcttcaagaccatatttatccgagctgttttgggaatactccagagtggaatagttctaaatttataagtctttggggatcagaagtgatgaatgataagaactggaatcctggcactttcttgccagatacaatttctgggagtgaaatattagggccaacactctcagaaacaagaccggaagcccttccacctccatctagcaatgaaacacctgcagtctcggatagtaaagagaaaaagaatgctgcaaaaaagaaatgtttatacaatttccaagatgctttcatggaagcaaataaagttgtcatggccacgtcatcagccacgtcctctgtgtcctgcacagctaccacagtgcagtccagcaacagccagttcagagtgtcatccaagagacctccttcagtaggtgacgtgtttcatggcatcagcaaggaggaccacagacactcggccccagccgccccgaggaatagccccacgggcttggcccccctcccagcgctctcgcctgctgcgctgtcacctgctgcgctctcacctgcctccacacctcaccttgcaaatcttgcagccccatcattccccaaaacagcaaccacaactcctgggtttgtggacacacgcaagagtttctgtcctgcacccctacccccggccacagatggctccattagcgcccctccaagtgtctgcagtgaccctgactgcgaagggcaccgctgcgagaatggtgtctacgacccacagcaggatgatggggacgagagtgcagatgaggacagctgctctgagcacagctccagcacctcgacctccaccaaccagaaggagggcaagtactgcgactgctgctactgcgaattctttgggcacggcgggcctccagctgcaccaacaagtagaaattatgcagaaatgagggaaaagcttcgcttacggctgaccaagaggaaagaggagcaacctaaaaaaatggaccagatctcagaaagggaaagcgtcgttgaccatcggagggtggaggatttgttgcagtttataaatagctccgaaaccaaaccagtgagcagcacgcgtgcagcgaagcgagcaaggcataagcaaaggaagctggaggagaaagctcgcctagaagcagaggccagggcccgggagcacctgcacctccaggaggagcagaggcggcgggaggaggaggaggatgaggaagaagaggaggatcgtttcaaggaggaatttcagcggcttcaggagcttcagaagctaagagctgtaaaaaagaagaagaaggagaggccaagtaaagactgccccaagttggacatgctcactagaaatttccaggcagcaacagagtctgttcctaactctggaaacatccacaatggctcactagagcaaactgaagaaccagaaacctcttctcactccccatccaggcatatgaaccactcagagcccaggccagggctaggggctgatggggatgctgcagaccccgtcgacaccagagactccaaatttctcctccccaaggaggtgaatgggaagcagcatgagccactctcttttttcttcgacatcatgcagcaccataaagaaggaaatggcaagcagaagctgaggcagaccagcaaggccagcagcgagccagcgaggaggcccacagagccccccaaggccacagaggggcagtccaagccccgggcccagactgagtcaaaggctaaggtggtcgacctcatgtccatcacagagcagaaaagagaggagagaaaagtcaacagtaataacaataacaaaaagcagctgaaccacatcaaggacgaaaagtcaaacccaacccctatggagcccacctctcccggtgagcatcagcagaacagcaagctggtgctggcagagtcccctcagccaaagggcaagaacaagaaaaataagaagaagaaaggagacagagtcaacaattcaattgatgatgtctttctacctaaagatattgacctagacagtgtggatatggatgagacagagagggaagtggaatatttcaaaaggttctgcttggattctgctagacagacccgacaaagactgtctatcaactggtccaattttagcttgaaaaaagccacctttgctgcccactgaatgaggactccctggagagggacacgcgagaggcaggccaggctgcaccaccccaagagccacgcccctcgctggcgccccagagccgtggtgcttgccaagggctgtgcggagctggtgctgcctgaaaccccagaccgagaagttgatgctcggcccacgccgttagctcgtgtgcgtgtagtctgtgcgtgagactccttcgattgtagctctgtgctgtcggattggaacagtagttcccgccaagtcctcccaccaccgcggcctcggaggcctgggccgtggccagataggagtttgcatcatccacgtggctccgttgcctctgcattgcgccctgtcctgtcatgtgtcctcaccggggtatcggccgtcactcagctctcctgtgcccctgcgtctcaccctaggcgggctgggcggggcaggcctcctttgttctccacaatctactgtctccgagtgtacacgttgcgctgtttgtgtttgatccccctgacttgtagccagcttgtgtaagatcccttgcagaacgagaaagttaaaaacaagcccacccagtactcacaccatcaagtctgttatagagtgtacgactgtattaacacggaggcctgcctggctacttttttaacatattgttaagtaatattaaaatcatgtctttctttttgaaagatggaatacattagta

SEQ ID NO: 106150 - DNA, 1425 bp, Homo sapiens
cacaatgacatgcagacctgcatattggagctggacggagaaactgggctaatgtgacagacagcaacaagagtaaggcagttgcttcgctattgagagaaagaaccatatgaagaaatttcggcagaggcggaccgggaacctcagcagctgcagaactactggtcagaagtgcgctacacggtgcgctgcatctaccgccaggcaggaaccccgctggcagatgaccaggaccagtctctggtgcctgacaaggagggagtgaaggagctcgtggataggctctgcgagagggacccctaccagctgtaccagcgtctggaacagcaagctcgagagtatgtgctggagatgaaggtccgcctgctccggcagctgtcggctgcggccaaggtgaaggcaccatctggcctgcagggcccgccgcaagcgcaccagttcatctccctcctgcttgaggagtacggcgccctctgccaggccgcacgctccatcagcaccttccttggcactctggaaaatgaacacttgaaaaagttccaagtgacgtgggaactgcataataaacacctgtttgaaaatctggtcttttcggagccacttcttcagagcaacttgcccgcactggtgtcacagatcaggctaggaaccaccacacacgacacctgcagtgaggacacatacagtaccttgctgcagaggtaccagcgttccgaggaggagctgcgcagagtcgccgaggagtggctggagtgccagaagaggatcgacgcctatgtcgacgagcagatgacaatgaaaaccaagcagcgcatgttaacagaagactgggagctttttaaacaaagaagattcattgaagaacagttaaccaataagaaagcagttactggcgagaacaacttcacagacaccatgaggcacatgttatcgtcccggctgagcatgcccgactgccccaactgcaactacaggagaagatgtgcttgcgatgactgcagtctctcacacatcctcacgtgtggtatcatggacccccccgtcactgatgacatccacattcaccagctcccacttcaagtggatcctgctcctgactatcttgctgagaggagcccgcccagtgtgtcatctgcaagctcggggtccggctccagctctcccatcacaattcagcagcaccccaggctcatcctcacagacagtggctcggcaccaactttgtaagttgtgactttgtaataaagtttccgaaatttaagtcgccccagtaatgagaaatacatacagtaatgtccacagaagtatgaacatcattattgtgcttttcatgacaagggaccctgaggtttttaatgcagcttttaaaacatgaaatcagtaaacccaaacttttaacactgtttatctgggaaaaaaaaacat

SEQ ID NO: 106151 - DNA, 576 bp, Homo sapiens
gtaaggctgggttgtggtgtcagcacgactggcccattggaccttcactgggctgagtggaggcctagaaccgacccttagagagcatggtctagtcttgtgcattggttggcttggtaactgtccttaattcctgatcagatgtgcttgcgatgactgcagtctctcacacatcctcacgtgtggtatcatggacccccccgtcactgatgacatccacattcaccagctcccacttcaagtggatcctgctcctgactatcttgctgagaggagcccgcccagtgtgtcatctgcaagctcggggtccggctccagctctcccatcacaattcagcagcaccccaggctcatcctcacagacagtggctcggcaccaactttgtaagttgtgactttgtaataaagtttccgaaatttaagtcgccccagtaatgagaaatacatacagtaatgtccacagaagtatgaacatcattattgtgcttttcatgacaagggaccctgaggtttttaatgcagcttttaaaacatgaaatcagtaaacccaaacttttaacactgtttatctgggaa

SEQ ID NO: 106152 - DNA, 374 bp, Homo sapiens
cagagagggaagtggaatatttcaaaaggtaaatgtggaggctgtgtctgaaaccgtggtgactgtgtgcttgccatacatgtttggttttctgtctttccatggcacttctagttgtcttggacgaagttacatcaagcaagccagacaacatggcttctgaagagccttgtagtaggacaggccagccacacacacccctcccatactcccaacactcacacaatcacttctgctccccctcacatgctagaaaaatagttgatggcagtggcttcccccccacccttccccgccaactggctgttgcgcttctgaggcggtggctctccaggtgtcctgggccagcagcgtctcctggggatacaggcccc

SEQ ID NO: 106153 - DNA, 269 bp, Homo sapiens
gccctctgccaggccgcacgctccatcagcaccttccttggcactctggtaagagagaaaacgtgtttttctttctgtttggatgagctgaagagaagcatgtggcaagaggaagcttctcacgcatgtgtgccgacctcgctgtcacacccccacacactgtgataggcccctcttctctacgggagaggacctgtttcctctcctctttgtctttcctctggactttgccactggataaaagcattgggtggattgatacgcaggtg

SEQ ID NO: 106154 - DNA, 409 bp, Homo sapiens
aaagagaaaaagaatgctgcaaaaaagaaatgtttatacaatttccaagatgctttcatggaagcaaataaagttgtcatggccacgtcatcagccacgtcctctgtgtcctgcacagctaccacagtgcagtccagcaacagccagttcagagtgtcatccaagagacctccttcagtaggtaaggcttgaaggctcactggccctcggggtctgcaggaaggctgggcttactgacttctcgtctttgtaactcatctttgtaactgccttttacttggcctagccagagggtaagtgtaattaactgcccaaaaatgctcacacacagagagctgatcccctaggactttgattagaattttagctgttgtgctagattcctctggggcttcgctgcactgtcttg

SEQ ID NO: 106155 - DNA, 457 bp, Homo sapiens
cgccagcacctgttcagaatcacacaaataagcatcaggtattcaatgcatctcttcaagaccatatttatccgagctgttttgggaatactccagagtggaatagttctaaatttataagtctttggggatcagaagtgatgaatgataagaactggaatcctggcactttcttgccagatacaatttctggtaaggaatttgttaaaactttcttgaagttttaaaataacctgagtagactgacatctttgccgtagtctcccgtggaagccctggcgcagctgtagccagctgctgctccaccacctctgtctccagtgggaggcccctcggggctgtcatcctactccatcctctcgcatctgccaccagtcggtcccactgtgtgacagagcggagcaagactctggctccatggctgcccgtcagcccggtgagccacatgggcgtggcc

SEQ ID NO: 106156 - DNA, 583 bp, Homo sapiens
aaacacctgtttgaaaatctggtcttttcggagccacttcttcagagcaacttgcccgcactggtgtcacagatcaggtattttgccttaacccgtatgtgtctttgtggtgtgacagcacagtcttttctcctgactggtgtgcgtgtacccgagtaccactgagtatgaaagttcttgcaggaaaaataacagggcttaaagaaaaagatagtttgggccaaaagctcaaaacctgagaagcaatacaattaaacttttaaatgataagtcaatataaatgctactaagatttaacaccacaaattcctcatacagaaaagctacagtaaatatagcacttttccttgacaagacctatccttggccgggcagctgtggtgtggttcatgctatggctcttggacatgtaggggaaatggaggagggaagaggcccaggtctgagggtgcccaaggcctccggatacagcttggtgtttcccacacattccgttgctacccgaggctctgttgctctgtctcctggtgtagcgcatccatgtggcttcttcacgcttgggaagctggctgggttctatgct

SEQ ID NO: 106157 - DNA, 4846 bp, Homo sapiens
cacaatgacatgcagacctgcatattggagctggacggagaaactgggctaatgtgacagacagcaacaagagtaaggcagttgcttcgctattgagagaaagaaccatatgaagaaatttcggcagaggcggaccgggaacctcagcagctgcagaactactggtcagaagtgcgctacacggtgcgctgcatctaccgccaggcaggaaccccgctggcagatgaccaggaccagtctctggtgcctgacaaggagggagtgaaggagctcgtggataggctctgcgagagggacccctaccagctgtaccagcgtctggaacagcaagctcgagagtatgtgctggagatgaaggtccgcctgctccggcagctgtcggctgcggccaaggtgaaggcaccatctggcctgcagggcccgccgcaagcgcaccagttcatctccctcctgcttgaggagtacggcgccctctgccaggccgcacgctccatcagcaccttccttggcactctggaaaatgaacacttgaaaaagttccaagtgacgtgggaactgcataataaacacctgtttgaaaatctggtcttttcggagccacttcttcagagcaacttgcccgcactggtgtcacagatcaggctaggaaccaccacacacgacacctgcagtgaggacacatacagtaccttgctgcagaggtaccagcgttccgaggaggagctgcgcagagtcgccgaggagtggctggagtgccagaagaggatcgacgcctatgtcgacgagcagatgacaatgaaaaccaagcagcgcatgttaacagaagactgggagctttttaaacaaagaagattcattgaagaacagttaaccaataagaaagcagttactggcgagaacaacttcacagacaccatgaggcacatgttatcgtcccggctgagcatgcccgactgccccaactgcaactacaggagaagatgtgcttgcgatgactgcagtctctcacacatcctcacgtgtggtatcatggacccccccgtcactgatgacatccacattcaccagctcccacttcaagtggatcctgctcctgactatcttgctgagaggagcccgcccagtgtgtcatctgcaagctcggggtccggctccagctctcccatcacaattcagcagcaccccaggctcatcctcacagacagtggctcggcaccaactttttgtagtgatgatgaagatgttgcaccattgtcagccaaatttgctgatatttatccattgagtaattatgatgataccgaggtggtggccaacatgaatggaatccacagcgaattgaatggtggcggggaaaacatggccctgaaggatgagtctcctcagataagcagtaccagcagtagttcctcagaagctgatgatgaagaagcggacggcgagagtagtggggagcccccaggggccccgaaggaagatggagtgctgggaagcaggagccccaggacagaggagagcaaagcagacagtccacccccatcctacccaacacagcaggctgaacaagctccaaacacttgtgaatgtcatgtttgtaagcaggaagcttctggactgacaccatctgcaatgacagccggagcccttcctcctggccatcagttcttgagcccagagaagcccacacaccctgcactgcacctttaccctcacatccatggacatgtgcctttgcacactgttccacacctgccacgccctctcatccaccccaccttgtatgcaacgccccccttcacacacagtaaggctttaccgccagcacctgttcagaatcacacaaataagcatcaggtattcaatgcatctcttcaagaccatatttatccgagctgttttgggaatactccagagtggaatagttctaaatttataagtctttggggatcagaagtgatgaatgataagaactggaatcctggcactttcttgccagatacaatttctgggagtgaaatattagggccaacactctcagaaacaagaccggaagcccttccacctccatctagcaatgaaacacctgcagtctcggatagtaaagagaaaaagaatgctgcaaaaaagaaatgtttatacaatttccaagatgctttcatggaagcaaataaagttgtcatggccacgtcatcagccacgtcctctgtgtcctgcacagctaccacagtgcagtccagcaacagccagttcagagtgtcatccaagagacctccttcagtaggtgacgtgtttcatggcatcagcaaggaggaccacagacactcggccccagccgccccgaggaatagccccacgggcttggcccccctcccagcgctctcgcctgctgcgctgtcacctgctgcgctctcacctgcctccacacctcaccttgcaaatcttgcagccccatcattccccaaaacagcaaccacaactcctgggtttgtggacacacgcaagagtttctgtcctgcacccctacccccggccacagatggctccattagcgcccctccaagtgtctgcagtgaccctgactgcgaagggcaccgctgcgagaatggtgtctacgacccacagcaggatgatggggacgagagtgcagatgaggacagctgctctgagcacagctccagcacctcgacctccaccaaccagaaggagggcaagtactgcgactgctgctactgcgaattctttgggcacggcgggcctccagctgcaccaacaagtagaaattatgcagaaatgagggaaaagcttcgcttacggctgaccaagaggaaagaggagcaacctaaaaaaatggaccagatctcagaaagggaaagcgtcgttgaccatcggagggtggaggatttgttgcagtttataaatagctccgaaaccaaaccagtgagcagcacgcgtgcagcgaagcgagcaaggcataagcaaaggaagctggaggagaaagctcgcctagaagcagaggccagggcccgggagcacctgcacctccaggaggagcagaggcggcgggaggaggaggaggatgaggaagaagaggaggatcgtttcaaggaggaatttcagcggcttcaggagcttcagaagctaagagctgtaaaaaagaagaagaaggagaggccaagtaaagactgccccaagttggacatgctcactagaaatttccaggcagcaacagagtctgttcctaactctggaaacatccacaatggctcactagagcaaactgaagaaccagaaacctcttctcactccccatccaggcatatgaaccactcagagcccaggccagggctaggggctgatggggatgctgcagaccccgtcgacaccagagactccaaatttctcctccccaaggaggtgaatgggaagcagcatgagccactctcttttttcttcgacatcatgcagcaccataaagaaggaaatggcaagcagaagctgaggcagaccagcaaggccagcagcgagccagcgaggaggcccacagagccccccaaggccacagaggggcagtccaagccccgggcccagactgagtcaaaggctaaggtggtcgacctcatgtccatcacagagcagaaaagagaggagagaaaagtcaacagtaataacaataacaaaaagcagctgaaccacatcaaggacgaaaagtcaaacccaacccctatggagcccacctctcccggtgagcatcagcagaacagcaagctggtgctggcagagtcccctcagccaaagggcaagaacaagaaaaataagaagaagaaaggagacagagtcaacaattcaattgatggagtttcgctcttgttgcccagtctggggtacaatggtgcaatcttggctcactgcaaccttcgcctcccaggttcaagcgattgtgctgcctcagcctcccaagtagttggaattacagatgatgtctttctacctaaagatattgacctagacagtgtggatatggatgagacagagagggaagtggaatatttcaaaaggttctgcttggattctgctagacagacccgacaaagactgtctatcaactggtccaattttagcttgaaaaaagccacctttgctgcccactgaatgaggactccctggagagggacacgcgagaggcaggccaggctgcaccaccccaagagccacgcccctcgctggcgccccagagccgtggtgcttgccaagggctgtgcggagctggtgctgcctgaaaccccagaccgagaagttgatgctcggcccacgccgttagctcgtgtgcgtgtagtctgtgcgtgagactccttcgattgtagctctgtgctgtcggattggaacagtagttcccgccaagtcctcccaccaccgcggcctcggaggcctgggccgtggccagataggagtttgcatcatccacgtggctccgttgcctctgcattgcgccctgtcctgtcatgtgtcctcaccggggtatcggccgtcactcagctctcctgtgcccctgcgtctcaccctaggcgggctgggcggggcaggcctcctttgttctccacaatctactgtctccgagtgtacacgttgcgctgtttgtgtttgatccccctgacttgtagccagcttgtgtaagatcccttgcagaacgagaaagttaaaaacaagcccacccagtactcacaccatcaagtctgttatagagtgtacgactgtattaacacggaggcctgcctggctacttttttaacatattgttaagtaatattaaaatcatgtctttctttttgaaagatggaatacattagta

SEQ ID NO: 106158 - DNA, 4666 bp, Homo sapiens
ttttgtatttttggtagagacggggtttcaccgtgttgcccaggctggaagtttgaaatcaattatttttatgtttgctgtctgaaattcattctttctctgttgtttgacacatacataagcctgcaggtacccaaatttgttccaaaaaaaaaaaaatttccctgaggctgtgaggagagagtcaaggaagaggtttttattgatgttatttatcaaacaactcttacactgtacactaagattttataataactgcagacatatacaatgaaaagggagaattggcaccaatattgaatcttcccatccaagaatatggtatgtcactcttttttaaggtttttaaaaatatattgtattatggttttatagtttgtaaatcttgacccattttgtgcctccatagtctgtagtttgaggggctgctatgaccggcatcttgagtggggaatgtgtgtttaaagcattcatgctggaaactgggaaaatggagatgccctgtgaccagtcatctcgccagatgccggcattaactcttgtagtttttgagttgagtcttgaatctgggagtctaggaaatcacggtatcttctacaaataatgataggtttatctcatcttttccagcatttgtcccctttttttggcttccactaggaccttcagaccagtgtgaataagagcattgatactggcacccttgtccagtcctggcttcgaggggctgctatgacaatgaaaaccaagcagcgcatgttaacagaagactgggagctttttaaacaaagaagattcattgaagaacagttaaccaataagaaagcagttactggcgagaacaacttcacagacaccatgaggcacatgttatcgtcccggctgagcatgcccgactgccccaactgcaactacaggagaagatgtgcttgcgatgactgcagtctctcacacatcctcacgtgtggtatcatggacccccccgtcactgatgacatccacattcaccagctcccacttcaagtggatcctgctcctgactatcttgctgagaggagcccgcccagtgtgtcatctgcaagctcggggtccggctccagctctcccatcacaattcagcagcaccccaggctcatcctcacagacagtggctcggcaccaactttttgtagtgatgatgaagatgttgcaccattgtcagccaaatttgctgatatttatccattgagtaattatgatgataccgaggtggtggccaacatgaatggaatccacagcgaattgaatggtggcggggaaaacatggccctgaaggatgagtctcctcagataagcagtaccagcagtagttcctcagaagctgatgatgaagaagcggacggcgagagtagtggggagcccccaggggccccgaaggaagatggagtgctgggaagcaggagccccaggacagaggagagcaaagcagacagtccacccccatcctacccaacacagcaggctgaacaagctccaaacacttgtgaatgtcatgtttgtaagcaggaagcttctggactgacaccatctgcaatgacagccggagcccttcctcctggccatcagttcttgagcccagagaagcccacacaccctgcactgcacctttaccctcacatccatggacatgtgcctttgcacactgttccacacctgccacgccctctcatccaccccaccttgtatgcaacgccccccttcacacacagtaaggctttaccgccagcacctgttcagaatcacacaaataagcatcaggtattcaatgcatctcttcaagaccatatttatccgagctgttttgggaatactccagagtggaatagttctaaatttataagtctttggggatcagaagtgatgaatgataagaactggaatcctggcactttcttgccagatacaatttctgggagtgaaatattagggccaacactctcagaaacaagaccggaagcccttccacctccatctagcaatgaaacacctgcagtctcggatagtaaagagaaaaagaatgctgcaaaaaagaaatgtttatacaatttccaagatgctttcatggaagcaaataaagttgtcatggccacgtcatcagccacgtcctctgtgtcctgcacagctaccacagtgcagtccagcaacagccagttcagagtgtcatccaagagacctccttcagtaggtgacgtgtttcatggcatcagcaaggaggaccacagacactcggccccagccgccccgaggaatagccccacgggcttggcccccctcccagcgctctcgcctgctgcgctgtcacctgctgcgctctcacctgcctccacacctcaccttgcaaatcttgcagccccatcattccccaaaacagcaaccacaactcctgggtttgtggacacacgcaagagtttctgtcctgcacccctacccccggccacagatggctccattagcgcccctccaagtgtctgcagtgaccctgactgcgaagggcaccgctgcgagaatggtgtctacgacccacagcaggatgatggggacgagagtgcagatgaggacagctgctctgagcacagctccagcacctcgacctccaccaaccagaaggagggcaagtactgcgactgctgctactgcgaattctttgggcacggcgggcctccagctgcaccaacaagtagaaattatgcagaaatgagggaaaagcttcgcttacggctgaccaagaggaaagaggagcaacctaaaaaaatggaccagatctcagaaagggaaagcgtcgttgaccatcggagggtggaggatttgttgcagtttataaatagctccgaaaccaaaccagtgagcagcacgcgtgcagcgaagcgagcaaggcataagcaaaggaagctggaggagaaagctcgcctagaagcagaggccagggcccgggagcacctgcacctccaggaggagcagaggcggcgggaggaggaggaggatgaggaagaagaggaggatcgtttcaaggaggaatttcagcggcttcaggagcttcagaagctaagagctgtaaaaaagaagaagaaggagaggccaagtaaagactgccccaagttggacatgctcactagaaatttccaggcagcaacagagtctgttcctaactctggaaacatccacaatggctcactagagcaaactgaagaaccagaaacctcttctcactccccatccaggcatatgaaccactcagagcccaggccagggctaggggctgatggggatgctgcagaccccgtcgacaccagagactccaaatttctcctccccaaggaggtgaatgggaagcagcatgagccactctcttttttcttcgacatcatgcagcaccataaagaaggaaatggcaagcagaagctgaggcagaccagcaaggccagcagcgagccagcgaggaggcccacagagccccccaaggccacagaggggcagtccaagccccgggcccagactgagtcaaaggctaaggtggtcgacctcatgtccatcacagagcagaaaagagaggagagaaaagtcaacagtaataacaataacaaaaagcagctgaaccacatcaaggacgaaaagtcaaacccaacccctatggagcccacctctcccggtgagcatcagcagaacagcaagctggtgctggcagagtcccctcagccaaagggcaagaacaagaaaaataagaagaagaaaggagacagagtcaacaattcaattgatgatgtctttctacctaaagatattgacctagacagtgtggatatggatgagacagagagggaagtggaatatttcaaaaggttctgcttggattctgctagacagacccgacaaagactgtctatcaactggtccaattttagcttgaaaaaagccacctttgctgcccactgaatgaggactccctggagagggacacgcgagaggcaggccaggctgcaccaccccaagagccacgcccctcgctggcgccccagagccgtggtgcttgccaagggctgtgcggagctggtgctgcctgaaaccccagaccgagaagttgatgctcggcccacgccgttagctcgtgtgcgtgtagtctgtgcgtgagactccttcgattgtagctctgtgctgtcggattggaacagtagttcccgccaagtcctcccaccaccgcggcctcggaggcctgggccgtggccagataggagtttgcatcatccacgtggctccgttgcctctgcattgcgccctgtcctgtcatgtgtcctcaccggggtatcggccgtcactcagctctcctgtgcccctgcgtctcaccctaggcgggctgggcggggcaggcctcctttgttctccacaatctactgtctccgagtgtacacgttgcgctgtttgtgtttgatccccctgacttgtagccagcttgtgtaagatcccttgcagaacgagaaagttaaaaacaagcccacccagtactcacaccatcaagtctgttatagagtgtacgactgtattaacacggaggcctgcctggctacttttttaacatattgttaagtaatattaaaatcatgtctttctttttgaaagatggaatacattagta

SEQ ID NO: 106159 - DNA, 4395 bp, Homo sapiens
ccacagagcaggggtccctaacccttgggtcacagaccagtactagtccatggcctgttaggaaccaggctgcacagcaggaggtgagtggccggtgagccagtgaagcctgtcagtgtttatagccactccctattgcttgcattaccgcctgaacttctcatgtccgatcagcagagacattagatcctcacagaagcatgaaccctattgtgaactgcgtgtgcaagggatctagattgtacgctcctcatgagaatctaatgcctgatgatctgtcactgtctcccatcacccctagatgggaccatctagttgaaggaaaacaagctcagggctcccactaattgtgcattgtgcatttgtcccctttttttggcttccactaggaccttcagaccagtgtgaataagagcattgatactggcacccttgtccagtcctggcttcgaggggctgctatgacaatgaaaaccaagcagcgcatgttaacagaagactgggagctttttaaacaaagaagattcattgaagaacagttaaccaataagaaagcagttactggcgagaacaacttcacagacaccatgaggcacatgttatcgtcccggctgagcatgcccgactgccccaactgcaactacaggagaagatgtgcttgcgatgactgcagtctctcacacatcctcacgtgtggtatcatggacccccccgtcactgatgacatccacattcaccagctcccacttcaagtggatcctgctcctgactatcttgctgagaggagcccgcccagtgtgtcatctgcaagctcggggtccggctccagctctcccatcacaattcagcagcaccccaggctcatcctcacagacagtggctcggcaccaactttttgtagtgatgatgaagatgttgcaccattgtcagccaaatttgctgatatttatccattgagtaattatgatgataccgaggtggtggccaacatgaatggaatccacagcgaattgaatggtggcggggaaaacatggccctgaaggatgagtctcctcagataagcagtaccagcagtagttcctcagaagctgatgatgaagaagcggacggcgagagtagtggggagcccccaggggccccgaaggaagatggagtgctgggaagcaggagccccaggacagaggagagcaaagcagacagtccacccccatcctacccaacacagcaggctgaacaagctccaaacacttgtgaatgtcatgtttgtaagcaggaagcttctggactgacaccatctgcaatgacagccggagcccttcctcctggccatcagttcttgagcccagagaagcccacacaccctgcactgcacctttaccctcacatccatggacatgtgcctttgcacactgttccacacctgccacgccctctcatccaccccaccttgtatgcaacgccccccttcacacacagtaaggctttaccgccagcacctgttcagaatcacacaaataagcatcaggtattcaatgcatctcttcaagaccatatttatccgagctgttttgggaatactccagagtggaatagttctaaatttataagtctttggggatcagaagtgatgaatgataagaactggaatcctggcactttcttgccagatacaatttctgggagtgaaatattagggccaacactctcagaaacaagaccggaagcccttccacctccatctagcaatgaaacacctgcagtctcggatagtaaagagaaaaagaatgctgcaaaaaagaaatgtttatacaatttccaagatgctttcatggaagcaaataaagttgtcatggccacgtcatcagccacgtcctctgtgtcctgcacagctaccacagtgcagtccagcaacagccagttcagagtgtcatccaagagacctccttcagtaggtgacgtgtttcatggcatcagcaaggaggaccacagacactcggccccagccgccccgaggaatagccccacgggcttggcccccctcccagcgctctcgcctgctgcgctgtcacctgctgcgctctcacctgcctccacacctcaccttgcaaatcttgcagccccatcattccccaaaacagcaaccacaactcctgggtttgtggacacacgcaagagtttctgtcctgcacccctacccccggccacagatggctccattagcgcccctccaagtgtctgcagtgaccctgactgcgaagggcaccgctgcgagaatggtgtctacgacccacagcaggatgatggggacgagagtgcagatgaggacagctgctctgagcacagctccagcacctcgacctccaccaaccagaaggagggcaagtactgcgactgctgctactgcgaattctttgggcacggcgggcctccagctgcaccaacaagtagaaattatgcagaaatgagggaaaagcttcgcttacggctgaccaagaggaaagaggagcaacctaaaaaaatggaccagatctcagaaagggaaagcgtcgttgaccatcggagggtggaggatttgttgcagtttataaatagctccgaaaccaaaccagtgagcagcacgcgtgcagcgaagcgagcaaggcataagcaaaggaagctggaggagaaagctcgcctagaagcagaggccagggcccgggagcacctgcacctccaggaggagcagaggcggcgggaggaggaggaggatgaggaagaagaggaggatcgtttcaaggaggaatttcagcggcttcaggagcttcagaagctaagagctgtaaaaaagaagaagaaggagaggccaagtaaagactgccccaagttggacatgctcactagaaatttccaggcagcaacagagtctgttcctaactctggaaacatccacaatggctcactagagcaaactgaagaaccagaaacctcttctcactccccatccaggcatatgaaccactcagagcccaggccagggctaggggctgatggggatgctgcagaccccgtcgacaccagagactccaaatttctcctccccaaggaggtgaatgggaagcagcatgagccactctcttttttcttcgacatcatgcagcaccataaagaaggaaatggcaagcagaagctgaggcagaccagcaaggccagcagcgagccagcgaggaggcccacagagccccccaaggccacagaggggcagtccaagccccgggcccagactgagtcaaaggctaaggtggtcgacctcatgtccatcacagagcagaaaagagaggagagaaaagtcaacagtaataacaataacaaaaagcagctgaaccacatcaaggacgaaaagtcaaacccaacccctatggagcccacctctcccggtgagcatcagcagaacagcaagctggtgctggcagagtcccctcagccaaagggcaagaacaagaaaaataagaagaagaaaggagacagagtcaacaattcaattgatgatgtctttctacctaaagatattgacctagacagtgtggatatggatgagacagagagggaagtggaatatttcaaaaggttctgcttggattctgctagacagacccgacaaagactgtctatcaactggtccaattttagcttgaaaaaagccacctttgctgcccactgaatgaggactccctggagagggacacgcgagaggcaggccaggctgcaccaccccaagagccacgcccctcgctggcgccccagagccgtggtgcttgccaagggctgtgcggagctggtgctgcctgaaaccccagaccgagaagttgatgctcggcccacgccgttagctcgtgtgcgtgtagtctgtgcgtgagactccttcgattgtagctctgtgctgtcggattggaacagtagttcccgccaagtcctcccaccaccgcggcctcggaggcctgggccgtggccagataggagtttgcatcatccacgtggctccgttgcctctgcattgcgccctgtcctgtcatgtgtcctcaccggggtatcggccgtcactcagctctcctgtgcccctgcgtctcaccctaggcgggctgggcggggcaggcctcctttgttctccacaatctactgtctccgagtgtacacgttgcgctgtttgtgtttgatccccctgacttgtagccagcttgtgtaagatcccttgcagaacgagaaagttaaaaacaagcccacccagtactcacaccatcaagtctgttatagagtgtacgactgtattaacacggaggcctgcctggctacttttttaacatattgttaagtaatattaaaatcatgtctttctttttgaaagatggaatacattagta

SEQ ID NO: 106160 - DNA, 4112 bp, Homo sapiens
ttttgtatttttggtagagacggggtttcaccgtgttgcccaggctggaagtttgaaatcaattatttttatgtttgctgtctgaaattcattctttctctgttgtttgacacatacataagcctgcaggtacccaaatttgttccaaaaaaaaaaaaatttccctgaggctgtgaggagagagtcaaggaagaggtttttattgatgttatttatcaaacaactcttacactgtacactaagattttataataactgcagacatatacaatgaaaagggagaattggcaccaatattgaatcttcccatccaagaatatggtatgtcactcttttttaaggtttttaaaaatatattgtattatggttttatagtttgtaaatcttgacccattttgtgcctccatagtctgtagtttgaggggctgctatgaccggcatcttgagtggggaatgtgtgtttaaagcattcatgctggaaactgggaaaatggagatgccctgtgaccagtcatctcgccagatgccggcattaactcttgtagtttttgagttgagtcttgaatctgggagtctaggaaatcacggtatcttctacaaataatgataggtttatctcatcttttccagcatttgtcccctttttttggcttccactaggaccttcagaccagtgtgaataagagcattgatactggcacccttgtccagtcctggcttcgaggggctgctatgacaatgaaaaccaagcagcgcatgttaacagaagactgggagctttttaaacaaagaagattcattgaagaacagttaaccaataagaaagcagttactggcgagaacaacttcacagacaccatgaggcacatgttatcgtcccggctgagcatgcccgactgccccaactgcaactacaggagaagatgtgcttgcgatgactgcagtctctcacacatcctcacgtgtggtatcatggacccccccgtcactgatgacatccacattcaccagctcccacttcaagtggatcctgctcctgactatcttgctgagaggagcccgcccagtgtgtcatctgcaagctcggggtccggctccagctctcccatcacaattcagcagcaccccaggctcatcctcacagacagtggctcggcaccaactttttgtagtgatgatgaagatgttgcaccattgtcagccaaatttgctgatatttatccattgagtaattatgatgataccgaggtggtggccaacatgaatggaatccacagcgaattgaatggtggcggggaaaacatggccctgaaggatgagtctcctcagataagcagtaccagcagtagttcctcagaagctgatgatgaagaagcggacggcgagagtagtggggagcccccaggggccccgaaggaagatggagtgctgggaagcaggagccccaggacagaggagagcaaagcagacagtccacccccatcctacccaacacagcaggctgaacaagctccaaacacttgtgaatgtcatgtttgtaagcaggaagcttctggactgacaccatctgcaatgacagccggagcccttcctcctggccatcagttcttgagcccagagaagcccacacaccctgcactgcacctttaccctcacatccatggacatgtgcctttgcacactgttccacacctgccacgccctctcatccaccccaccttgtatgcaacgccccccttcacacacagtaaggctttaccgccagcacctgttcagaatcacacaaataagcatcaggtattcaatgcatctcttcaagaccatatttatccgagctgttttgggaatactccagagtggaatagttctaaatttataagtctttggggatcagaagtgatgaatgataagaactggaatcctggcactttcttgccagatacaatttctgggagtgaaatattagggccaacactctcagaaacaagaccggaagcccttccacctccatctagcaatgaaacacctgcagtctcggatagtaaagagaaaaagaatgctgcaaaaaagaaatgtttatacaatttccaagatgctttcatggaagcaaataaagttgtcatggccacgtcatcagccacgtcctctgtgtcctgcacagctaccacagtgcagtccagcaacagccagttcagagtgtcatccaagagacctccttcagtaggtgacgtgtttcatggcatcagcaaggaggaccacagacactcggccccagccgccccgaggaatagccccacgggcttggcccccctcccagcgctctcgcctgctgcgctgtcacctgctgcgctctcacctgcctccacacctcaccttgcaaatcttgcagccccatcattccccaaaacagcaaccacaactcctgggtttgtggacacacgcaagagtttctgtcctgcacccctacccccggccacagatggctccattagcgcccctccaagtgtctgcagtgaccctgactgcgaagggcaccgctgcgagaatggtgtctacgacccacagcaggatgatggggacgagagtgcagatgaggacagctgctctgagcacagctccagcacctcgacctccaccaaccagaaggagggcaagtactgcgactgctgctactgcgaattctttgggcacggcgggcctccagctgcaccaacaagtagaaattatgcagaaatgagggaaaagcttcgcttacggctgaccaagaggaaagaggagcaacctaaaaaaatggaccagatctcagaaagggaaagcgtcgttgaccatcggagggtggaggatttgttgcagtttataaatagctccgaaaccaaaccagtgagcagcacgcgtgcagcgaagcgagcaaggcataagcaaaggaagctggaggagaaagctcgcctagaagcagaggccagggcccgggagcacctgcacctccaggaggagcagaggcggcgggaggaggaggaggatgaggaagaagaggaggatcgtttcaaggaggaatttcagcggcttcaggagcttcagaagctaagagctgtaaaaaagaagaagaaggagaggccaagtaaagactgccccaagttggacatgctcactagaaatttccaggcagcaacagagtctgttcctaactctggaaacatccacaatggctcactagagcaaactgaagaaccagaaacctcttctcactccccatccaggcatatgaaccactcagagcccaggccagggctaggggctgatggggatgctgcagaccccgtcgacaccagagactccaaatttctcctccccaaggaggtgaatgggaagcagcatgagccactctcttttttcttcgacatcatgcagcaccataaagaaggaaatggcaagcagaagctgaggcagaccagcaaggccagcagcgagccagcgaggaggcccacagagccccccaaggccacagaggggcagtccaagccccgggcccagactgagtcaaaggctaaggtggtcgacctcatgtccatcacagagcagaaaagagaggagagaaaagtcaacagtaataacaataacaaaaagcagctgaaccacatcaaggacgaaaagtcaaacccaacccctatggagcccacctctcccggtgagcatcagcagaacagcaagctggtgctggcagagtcccctcagccaaagggcaagaacaagaaaaataagaagaagaaaggagacagagtcaacaattcaattgatgatgtctttctacctaaagatattgacctagacagtgtggatatggatgagatctcgagaattctcgagatctacttcaggatgtttacaacatttgctgcccacttttcctaggtttctcgagacctctacaagagttggagttaagagttggagtgacactggggtactttcttggtgtaacgaactaatagcgcattctggaatttgtactctccaagctgctcaaaaagctcacaattttgtttgattaaattctgaggctcttccacaagaggtttaaattcatcgaacactttggcatagcattcatgagg

SEQ ID NO: 106161 - DNA, 151 bp, Homo sapiens
caacaatgtgagtcattgcctcccgggccggccacttgctgatgagcttgtatgcggttttgcagtgaccctgactgcgaagggcaccgctgcgagaatggtgtctacgacccacagcaggatgatggggacgagagtgcagatgaggaca

SEQ ID NO: 106162 - DNA, 582 bp, Homo sapiens
tcaactgaaagaatttttttaaatttttacaaataatatgacatggtttggctgtgtccccacccaaaactcatattgaattgtagttcctataatccccatgtgtcatgggaggaatgtagtgggaagtaattgaatcatgggggcagttaccccaatgctattctcgtgatagtgagtgagtttctcatgaggtctgttggttttatgaggggcttttccccctttactcaacacttctcctccctgccgccatgtgaagaaggtgcctttcttcccctttgccttctgcgatgattgtaagtttcctgaggccttaccagccatgtggaactgtgagtaaattaaacctcttttctttataaattacccagtcttgggtatttcttcatagcagcatgagaatgaactaatgcataataaatttagaaagttggctgagatatcaaactaacatgcagaaatcaatagtagatagatgatagatagatagatagatagatagatagatagacagatgatagatagatagatgatagatagatagatatagatagatagacagacagacagacagacaga

SEQ ID NO: 106163 - DNA, 249 bp, Homo sapiens
aaaacgtacttttttctaaatcatttaattgtagaagacataacatagctaacctatacatgaagctgtgatgatatttaatgaaataagagacctgcttatcctatgatgatatattaatgcaataagagatctgctacatatctgcttctcaggctgcttctcaggctgtattttattatttattttaaaacgccatattttcttcattatgaaagtgatgcatgttcataataaaatacttatgaa

SEQ ID NO: 106164 - DNA, 801 bp, Homo sapiens
ctctttgattatctcttttcatattttttctgtaaaactctctgcgtcatttggtattatttccctccagttcagcttcattatcagctgatttctctattgtattcagcaataccctgagtgaactattgctcagcaatttgatccagttaagttgggtcaggaatagtatttaaggccagtctttaaactttgtcatgactttagggtcgctattcttagctacattttttcatacattctggtaaagtatctggcctatgtttcagattgctgatcttgattgagaagagccattgctactgagagtgtccttaatttaaaactcctacatgttctataaagtcatattttgtaaggggagcttcatagctctctttccttatactcttcccttctctctggctaactatatgactaactactctgggcactaggcaggccactagactgtgttctcttatgcttgcctctcctaacatggaaactgcccaataaatgagctagggcaagagcatttgggggtcccagaattctcagcttaccacattggggttagagcttctatcctctatgtagagactgggtgtaggtaaaaggtcccacttcttggtcacactcactattaatttggcctctttaactaggagttggaggagataaaacatgttgatgacctacccctctaggtgagagatagagtaaaccttaatttggatttcagagtagagagtctatcttcttggctatatccacctgatataaaatttctgtcaagatgagcccaggataggtgaagga

SEQ ID NO: 106165 - DNA, 390 bp, Homo sapiens
tactctgagaagtgtcccatctattctctaattatataacattgtcactgacttgatagccatgatagatttgcatggttgtaccttcactatttaaaaactgatatgcctggtgcggtgactcacacctgtaataccagcactttgggaggccaaggctggtggaacacctgaggtcgggagtttgagaccagcctgaccaacatggagaaacctcgtctctactaaaaatacaaaattatccagacgtggtggcacacgcctgtagtcccagctactcgggatgctgaggcaggagaattgcttgaacctgggaagcagaggtttgcggtgagccaagatcgcagcagtgtactccagcctgggcaacaagagtgaaactccatctca

SEQ ID NO: 106166 - DNA, 453 bp, Homo sapiens
caataagtagaagcacacgaaggatattagtcttggatagaggccacagagcttgggtctaggtttttctttttcacatggggacagaaggtgaggcctccagtattaggcaggcagaaaactacaagtaatttaactgagagcttggaacattaactgtttttatgaagaagagactacaaaatctccaatcatgggcctggggaagtatcagaattgaattagctcatcagagtattagtaagctacaaaacaggtctgagaaaagttacctagaatgcctcaaaaatgataattatagaaatttaatatggaaaaaagaagttaacaaagacagaggatagattaacaaggtcaaacatagcttaataagggttctggaaagagaaaattgagaaggtgggaagatgaaatagacaaaaagatgatgaaaaaaatattccagaattgtaa

SEQ ID NO: 106167 - DNA, 457 bp, Homo sapiens
tggaaggctggtgatgcctctcccttagtgctcctgcagccccgaggtaccctattcccataccacagctgtcctgtacccacctactccctgcctgtctccctagaggaaagtgagtgcctggggagccagaggcagagggcactactatcacaaaggggactcaagataatgtgcagagcgagtgcttggcagttgggctttaggcattccaacaggtcagctaaaaaagcagattcagccgaatattcattcagccagcactctctgggctgtcacccccaattccaggagttgcatcccactcagcttcccacaccttgcaaaaccgcccctctttctcagcacctgtgactgccccacatggatctgccaacctttctaggcctctgcaggtggaacttatctggtatcctcatttctcagtttcccccatattcatttttggaaaataggc

SEQ ID NO: 106168 - DNA, 344 bp, Homo sapiens
tgaatgcataaatcaatatatcacagccttgtttctgtcccagctattgtgtactgggtccagtagtcttactccctggcccataccttttctttgactcccagtctacacatacagcagaaaaggtggtttccattaaatagttattttagtaatcttgattttttttctagaactcagcttcagaaatacatattgtatagaaataattaaatgtgaatttttaacttttttttctactagcttacctgaattatattttgctgggcctgagctcagcattacccaaagtaattctgtggaatggatatatgataagtgttacataaaagggggttctataa

SEQ ID NO: 106169 - DNA, 211 bp, Homo sapiens
ctctcatgaatcctgtgaggtaagtcttgttattctcatttaacacaagaggaaactgaatgttaaaaaagaaatgatggtggcacctatagtcccagctacttgggaggctgaggcaggagaattgtttgaaccggggaggtggagattgcagtgagctgagatcaagccactgccctccagtctgggcgtcagaacaagactctgtctc

SEQ ID NO: 106170 - DNA, 213 bp, Homo sapiens
tgacccctctgtcctggacagtgaagattctgagagcaggtccggtggaatggacgctggcacaggtccaatgatgaccatggtataggggagagagctgggaggtcgggagcctggttcaggctgtgacctaatttgctctgtgactgggcaagtctttgccttttactgaaccccagtttccccaaatgcccaaagagggtaggggagggg

SEQ ID NO: 106171 - DNA, 346 bp, Homo sapiens
tccttctctattggtctatggaagttatacttctttctcaataggttttatataggacttctctgccactcaggggagaatattctagcttcaaatcccaatgaattatctgcttgaacacttcactaatagagtttatcatatccttacccttttcatagttctgaatccattcagttccttttttcctctgaagacctgcctcctggaatgctatatccactgggtctagtctgccctggttactctctagggtcattccaaagctgtcattgtgagacttactttcactgttccatggacatcaccctgttacttggatcttatgttttctttatggcttaca

SEQ ID NO: 106172 - DNA, 356 bp, Homo sapiens
agacgaagtctcactgttgcccaggatggagaatagtggtgtgatctcagctcactgctacctccacctcctgggtttgagcgattctcctgcctcagcctccagagtagctggtattacagatgtgtaccaccatacccggctaattttggtatttttagtagagacagggtttcgccatgttggccaggctggtctcgaactcctgatctcaggtaatctgcccgcctcggcctcccaatgtgctgagattacaggcatgaaccaccatgcctggcccatcgtcattttaaaatttaattttaattggtagtgtggtaattattgtccagcaattaagtgtttattactgccag

SEQ ID NO: 106173 - DNA, 370 bp, Homo sapiens
taaaagggtatgtgcctgttaatggtggttacctttggagacaagcactggcatttgaatgcaagactgaaaatcttacttttcactttacttttgtatattgtttagagtatgcagccaatgcatgtatttcaaagaaatgacaccctgatataaacattactgggaattctgcacatgacattcccaactatatgtgtaagcactggtttttaagaagatgatgtatcaggctattggtttgttaacgccgttgttttgcttgcttatcactatccataaaccatgacaaaaagacaataactttctgcatcttccgctgttttctggtagcatgtttattgctcagtcctgatggtttcatatagag

SEQ ID NO: 106174 - DNA, 748 bp, Homo sapiens
agaagaggttttttacatgttgatttttctgttgctatggttactctccttgtcatcctgacagtgagttgaaagccattgacagtattaatctctgtggctgagcttaggctatttttagatatgccgtacttcacacataattgcacgtgggtgagcaacctacgctagtctgatctgtgagcagctgggctgagctgccagctgtttacagggaatacatgagctgctcatccttctgggctctaatgcccataccctcctgctcccaatggaagtgtttccattcatctgtttggtatttggacaccttggtttccagcagcttgccctttcattgatgagtcatacagataattagatggttaaatgcaattaatgaaggaaaatttgatttcccatgcttctgttgagagtactgtagctcataggatcgtagaatattaaagatgtaaaagccctagaagtcaacctagctgttctttatttgcagatgaggaagccaaggcccaggaagggtgagtgacgcttccagctagctggcaacgagagtccagacctgaatctagtccttggcttctctttcactgattagtctactgaggccacacttgaatcagcagtaggatttcaaatcttgttattttattgcacccatcgtaactgattttgtacttgtcataatatttatgcatgaattagctgaaaaaggaggccagttttgaacatcagtttatttgcctccata

SEQ ID NO: 106175 - DNA, 260 bp, Homo sapiens
gaaaggtttttgactagtagaatactcacagtgccccaaaatatcacctcacagattatttttaatttaaaaatcatgcagtcatgcttaaaatggtgaaatctggtacacactaccttaatcgagtcatcaaactcagcatcaccaagcatgggccaaactgacccttgagcttcctgatgggatgcagcagaagggatgtggcctcacgcatgtgatattcctgcctgacttatttaatctgaatccagtcatcaaga

SEQ ID NO: 106176 - DNA, 510 bp, Homo sapiens
cggcctcccaaagtgctggggttataggtgtgagccactgcagctggcccagatatagatttttgatcgatgggattttcaggattgctttgagaagaaacatcacaccaaagggatttaggcgtttgtcactttacttgtggtgtggagaagggaatggcgggtaactgtgtcacacacctgtatggctagctgggaagagaggaaagggatctttggaatctggaccagtacatacagcacagacaaaagtggggcctggtctgttgcaggagttgcatacattacaaataagtccctggccttcaagttctttaaattcttagttttatttctaggcctcaatgccttttaaatcctgacaggaagatgaaaaaaaaaaaatcaagtgcgggattttcattcttcttaactgatggaaacgattgccattttatgtttaatgttttcatgtgtcaccaaagagcattaaccttggagtcggccggccgcgaatttagtagtagtagg

SEQ ID NO: 106177 - DNA, 818 bp, Homo sapiens
tcagtgtgcccagctcctggaaaagtggactcaagagaggttctggtgacaaaaaacctccacaagaaactacagtttcaatccacagtgggttgcgcctgcaaagaaatttttacaacaccaaccattcctaaggaccatctattccttccttaattaaaagtatatagttaaaaatacttagagaaacagcttagaatagtctttagagtcagacagactgaaaatgtctgtattcatgtgaacctggaagtgtcattggccctctctgagccttggatgcatctgtaggatgaggaatgtagtacctacctcgctgggttattttgagaaagaaataaaaatatccttgcacacagtaagtactcaaatggaatgaaataaaagatagtaagggctcctgtttcaaatcctgtctgtaacatagcatttgatccttcctactgtaaaataattggcatttatcatcaacatcccacagtgatgtgtctcatgctgtctcactgttgtgaaaccacaaaaatcagctgaaaagtctaagaagagtaggtcctgatcattgtttcattaacgtatgagctttgggaagggcagacaacccacaaatttacaaatagtatatggattttcacaaaacaagcagatttgttcagatttagatttcaaccaatttcatgaaagcagacacaggagatgcaaactgcttttgtggattccgttctaggggcggaagcagctctcaaggtgtgtttaagtgtgcatgctttggcgtccctgttcttttgcagatattagggggagggagggtatggtctttg

SEQ ID NO: 106178 - DNA, 329 bp, Homo sapiens
gagaaggtacagaattatggtctccttcatcactgtaccttctctccttatgtatgtccaaactctactgaggagaaataataaagtttttcttatttctccttatgtatgtccaaactctactgaggagagaaggtacagtgatgaaggagaccataattctgtagtgttgatgatcctggattataatctttttctctttatctttcatagtttttttaaaaacatggactgtatcttatctaccactatatcccaaatacctaagatagtgcttacgttcagtgactattaaataaataaatggatgaattaaaaagtaaaaaaaa

SEQ ID NO: 106179 - DNA, 1863 bp, Homo sapiens
ctcactgatacatatcccttcacacttctataatttaactctctcaactgcatgtgaaagatcttagctgaagatgactgacagtgttatttattccatgttagagttgcctacggcaacccaagcccagaatgactatggaccacagcaaaaatcttcctcttccaggccttcttgttcttgccttgtggcaatagctttggggcttctgactgcagttcttctgagtgtgctgctataccagtggatcctgtgccagggctccaactactccacttgtgccagctgtcctagctgcccagaccgctggatgaaatatggtaaccattgttattatttctcagtggaggaaaaggactggaattctagtctggaattctgcctagccagagactcacacctccttgtgataacggacaatcaggaaatgagcctgctccaagttttcctcagtgaggccttttgctggattggtctgaggaacaattctggctggaggtgggaagatggatcacctctaaacttctcaaggatttcttctaatagctttgtgcagacatgcggtgccatcaacaaaaatggtcttcaagcctcaagctgtgaagttcctttacactgggtgtgtaagaaggtcagactttgatagatgaccactctgtcctgaccctcagatctgtcatgtatccctaaaaggagggagctggccactggctgttgggaaagccatgagtatatagttagcaaatactgaactttctcagatatggcattagatgcaagacaacctcctagggattgatgcctaactgatggattctctttgagactatttagatattatgtgagcaatttaaagaccagatctaagcaaattttgaaatagatgtttgttttttgtatttctcagtatggaaactaatgctgccactctcatccccgtcccaaccatctctgtcaaaaatatacctttttcatatgatattctgagctaatctgataaaatctatgccaatatatactattgcttgtgtactagagaagtacattattgctgtactcctctgtacattactgatccctgatggtatatttctatcctaacagtgtccctttgcagatcaagctttattctgaagaataaacctagctggcatgctggtgtgtacctgtagtcctagctatttgggaagctgaggtgggagggtcgcttgagcccaggagtttgaggctgcagtgagctatgattgtgccactgtactccagcctgggagatagagcaagactccatctctaaaaaaaaaaaaaaatgctaatgtgagaatataaattgtgggaaatgagtgagggcaaggtggtacttcctccttctgagctcttcacacgtaatgcaaaaacccggtcttaactgattttgttttttttctgagtatgcatatatgtggttgaatgaaccaatgtgtgattgtatcttttccattatgtgactgtttgacctgcatattaatttcaagatagcagtcaattcgataaggcattttcatagaggaaagtttacagaaacagtttatgtggttggatcaccaaattatcttaggtactaaggcctcaaaaataagaaaaactttattatttctcctcagtagagtttggacatacataaggagagaaggtacagtgatgaaggagaccataattctgtagtgttgatgatcctggattataatctttttctctttatctttcatagtttttttaaaaacatggactgtatcttatctaccactatatcccaaatacctaagatagtgcttacgttcagtgactattaaataaataaatggatgaattaaaaagtaaaaaaaa

SEQ ID NO: 106180 - DNA, 859 bp, Homo sapiens
gggctgcaggaattcggcacgatcttagctgaagatgactgacagtgttatttattccatgttagagttgcctacggcaacccaagcccagaatgactatggaccacagcaaaaatcttcctcttccaggccttcttgttcttgccttgtggcaatagctttggggcttctgactgcagttcttctgagtgtgctgctataccagtggatcctgtgccagggctccaactactccacttgtgccagctgtcctagctgcccagaccgctggatgaaatatggtaaccattgttattatttctcagtggaggaaaaggactggaattctagtctggaattctgcctagccagagactcacacctccttgtgataacggacaatcaggaaatgagcctgctccaagttttcctcagtgaggccttttgctggattggtctgaggaacaattctggctggaggtgggaagatggatcacctctaaacttctcaaggatttcttctaatagctttgtgcagacatgcggtgccatcaacaaaaatggtcttcaagcctcaagctgtgaagttcctttacactgggtgtgtgaaacaggcgtacatcaggggctgttcttttgctgcaaatgaagttgatggaattacactgtgatacgactgactggtagactcaaatattctatttctttccaactttatattcttgtcataacaacccagtattctctgaggcaaatggatgcttatgaccaactggcctgaaatgggggaatatagggttagtggtgagtcacatataagaaaatgcaagagaatagcagtgtatcatatttcaaaataaaatacaaactatacataaaa

SEQ ID NO: 106181 - DNA, 1824 bp, Homo sapiens
gggctgcaggaattcggcacgatcttagctgaagatgactgacagtgttatttattccatgttagagttgcctacggcaacccaagcccagaatgactatggaccacagcaaaaatcttcctcttccaggccttcttgttcttgccttgtggcaatagctttggggcttctgactgcagttcttctgagtgtgctgctataccagtggatcctgtgccagggctccaactactccacttgtgccagctgtcctagctgcccagaccgctggatgaaatatggtaaccattgttattatttctcagtggaggaaaaggactggaattctagtctggaattctgcctagccagagactcacacctccttgtgataacggacaatcaggaaatgagcctgctccaagttttcctcagtgaggccttttgctggattggtctgaggaacaattctggctggaggtgggaagatggatcacctctaaacttctcaaggatttcttctaatagctttgtgcagacatgcggtgccatcaacaaaaatggtcttcaagcctcaagctgtgaagttcctttacactgggtgtgtaagaaggtcagactttgatagatgaccactctgtcctgaccctcagatctgtcatgtatccctaaaaggagggagctggccactggctgttgggaaagccatgagtatatagttagcaaatactgaactttctcagatatggcattagatgcaagacaacctcctagggattgatgcctaactgatggattctctttgagactatttagatattatgtgagcaatttaaagaccagatctaagcaaattttgaaatagatgtttgttttttgtatttctcagtatggaaactaatgctgccactctcatccccgtcccaaccatctctgtcaaaaatatacctttttcatatgatattctgagctaatctgataaaatctatgccaatatatactattgcttgtgtactagagaagtacattattgctgtactcctctgtacattactgatccctgatggtatatttctatcctaacagtgtccctttgcagatcaagctttattctgaagaataaacctagctggcatgctggtgtgtacctgtagtcctagctatttgggaagctgaggtgggagggtcgcttgagcccaggagtttgaggctgcagtgagctatgattgtgccactgtactccagcctgggagatagagcaagactccatctctaaaaaaaaaaaaaaatgctaatgtgagaatataaattgtgggaaatgagtgagggcaaggtggtacttcctccttctgagctcttcacacgtaatgcaaaaacccggtcttaactgattttgttttttttctgagtatgcatatatgtggttgaatgaaccaatgtgtgattgtatcttttccattatgtgactgtttgacctgcatattaatttcaagatagcagtcaattcgataaggcattttcatagaggaaagtttacagaaacagtttatgtggttggatcaccaaattatcttaggtactaaggcctcaaaaataagaaaaactttattatttctcctcagtagagtttggacatacataaggagagaaggtacagtgatgaaggagaccataattctgtagtgttgatgatcctggattataatctttttctctttatctttcatagtttttttaaaaacatggactgtatcttatctaccactatatcccaaatacctaagatagtgcttacgttcagtgactattaaataaataaatggatgaattaaaaagtaaaaaaaa

SEQ ID NO: 106182 - DNA, 1345 bp, Homo sapiens
gggctgcaggaattcggcacgatcttagctgaagatgactgacagtgttatttattccatgttagagttgcctacggcaacccaagcccagaatgactatggaccacagcaaaaatcttcctcttccaggccttcttgttcttgccttgtggcaatagctttggggcttctgactgcagttcttctgagtgtgctgctataccagtggatcctgtgccagggctccaactactccacttgtgccagctgtcctagctgcccagaccgctggatgaaatatggtaaccattgttattatttctcagtggaggaaaaggactggaattctagtctggaattctgcctagccagagactcacacctccttgtgataacggacaatcaggaaatgagcctgctccaagttttcctcagtgaggccttttgctggattggtctgaggaacaattctggctggaggtgggaagatggatcacctctaaacttctcaaggatttcttctaatagctttgtgcagacatgcggtgccatcaacaaaaatggtcttcaagcctcaagctgtgaagttcctttacactgggtgtgttgtccctttgcagatcaagctttattctgaagaataaacctagctggcatgctggtgtgtacctgtagtcctagctatttgggaagctgaggtgggagggtcgcttgagcccaggagtttgaggctgcagtgagctatgattgtgccactgtactccagcctgggagatagagcaagactccatctctaaaaaaaaaaaaaaatgctaatgtgagaatataaattgtgggaaatgagtgagggcaaggtggtacttcctccttctgagctcttcacacgtaatgcaaaaacccggtcttaactgattttgttttttttctgagtatgcatatatgtggttgaatgaaccaatgtgtgattgtatcttttccattatgtgactgtttgacctgcatattaatttcaagatagcagtcaattcgataaggcattttcatagaggaaagtttacagaaacagtttatgtggttggatcaccaaattatcttaggtactaaggcctcaaaaataagaaaaactttattatttctcctcagtagagtttggacatacataaggagagaaggtacagtgatgaaggagaccataattctgtagtgttgatgatcctggattataatctttttctctttatctttcatagtttttttaaaaacatggactgtatcttatctaccactatatcccaaatacctaagatagtgcttacgttcagtgactattaaataaataaatggatgaattaaaaagtaaaaaaaa

SEQ ID NO: 106183 - DNA, 148 bp, Homo sapiens
tttaaatgctaccaattataaatgctaccatataaaaattatgaattataaataccgctccaatatcagatatgctaaaatgtgacctaatctttaaatcatcctgcaaaatagcaataattgtatcattttacttaattaaaatatt

SEQ ID NO: 106184 - DNA, 281 bp, Homo sapiens
aatgattccactggggctatggatttggggaaggaagaccacagagataagcttgacatgcactagctagacgaggcagaccatgttaaaattttccattgtgaagttaattcttctttcccctcttttcatattgaactgtggaaagaagtcactctatatacagcctacacataaagactggaggtgtagggagttatgttccacatctttgagtgggagtatatctgcattattagagatgttaaaattatttagaatttttctacagacaagatttg

SEQ ID NO: 106185 - DNA, 376 bp, Homo sapiens
  misc_feature (227)..(227): n is a, c, g, or t
cctcccttccatgtctctgttcttgcttccttccctcggtctgccgtcgccctttgtcagtgatcagacgtgaccatgggtaacaggcatgaattttagtctctgcatgctcaggtgtgtaagaaacatggcttcctttagttcctataactaaactttattttcagtttgcactgatcttcctccagctgccctcccagcccagcagggcttctgcctggcagggnatgggatcagaactcaaagcccctttcatgcaaccgtgtgtgcacagttacacacagatctgtcttaaaatctaactagtagggaagcagtgagaacttgggtgctttgtagagaggctttgtgattcagataacagggctagctccag

SEQ ID NO: 106186 - DNA, 411 bp, Homo sapiens
gaaaccttgagggacacgactgtctacacttctaattggaaagccgtatctgattcattcaaatgttcagatcttcaaaaagtaaagtggcctagagtggaatcttaaagttgagagtatggactcagggagatgctgttcattagccaggataagagatgtggtttgaaagagctggacttccttttctcactttgcaattgacctgctgactaaacttgggctactcacttcttaacctcagtctgtcttgaatttcccctgtgcaaaaaaacatgggaagacaatatctaaatgcctctcagggatgttgtgaagaggacctcatcgatgttttaaaccacatggtcctaggaaggtgctatatattaccatcattaaaatcacctgtggttggctgcagccctcccc

SEQ ID NO: 106187 - DNA, 814 bp, Homo sapiens
gagagcagggaggctgcggtggatcagctgcctgctgtctctgactggaagccactacctttagggcagggactccgactacttcactcgccaccggatcatctgggttttgaagaaaccaagatgcctttcattaattcttccaactaaattaatggagtcactgcatctcgaacaccattagcagagcagagacaagagttttggctggaaaagggttcctgcttttttatcttcttcattttctcttgccaccaccatgtaagaagtgcctttcacctcccacgatgatcctgaggtctccccagccatgtggaactatgtgcacaatcattatcactgatgtacctgtgtcttcagcctgtttgactacactggggtgaggacgttgtggaacagatggattattatctacctgggctcacacagctaggaggtgataaaggaaagaagcagcatgtagccattggacccaacccctcagccactgtagagcttgagagagctggatctctccaagttatatccagctttttaattatctgacaaaggagaacatgaaggatgaattccatcatcaccaaaaagtcatagtgatattaacacatgccctgataacctgagaaaactgctgtgaaaccagagaacagtttgataatgagcctgggacatatacaagaaaacctgagctatagagtgagtgtctgcaaaggccgagagggctcccactatgttcattctcctggaggttgcttttatccaactcacagttgcttcttttgctctttatggaggtgtttggaaatcttgaaat

SEQ ID NO: 106188 - DNA, 1881 bp, Homo sapiens
  misc_feature (181)..(181): n is a, c, g, or t
gaatactaggctttcctttttttgtgagatgggggtctcacactgtggctcaggctggagtgcagtggtgtgatcatggctcactgcagcctcgaagccccggggtcaagtgatcctctcacctcagcctcctgggtagctggaaccacaggcacgcaaccaccactcctggctagttttntttttttagtagaataaggtctcactgtgttgcacaggctggtctctaactccttacctcaagccatcctcccgccttggcctcccaaacatgttgggattacaggtgtgagccactggacctggccaaatactgggttttcagtgctcactgccactaataaaaatctgaaattctttcattatgcaatttctaagtgcctggtgagggccaagctcagttctaggctctgaagattaagagagaaacaaggctctgtctgctcctgttgtctctgtgagcatctttgacagagtgctcagattgttgggatatagtgcatcggactggcagcctgaatttgtggagaccgcagtcagtaactttgtgatatatggaatatttagaggacagtaacccatttccctacgccctacctgatcacatcgtgccctgctgggccataccccaaacagcccaccttcctctaggcctggccatggccctgtgcctgccacattgaggattaagtcaggatatcttgagccctctcaaatccctgtttattcaggcctctgccacatatagagccagccttctgtccccaccacttccactaccatggagcccacttagtaaaacgctctctgggcccagcttcgccagaaaagacaccaggggagcaaggctcaaaccaggggcagctaaatctgatcttgtggaccagtctctagtaagggctttcagcgtggctgtctgtccattgctttccaaataggatgcagcaatgattggtacatgggtattaagatcggtagtaggggctagtccaagtttagcaatagccaaactggagagcctctgaagtatgagagtcccagagggatttgtcagctcctggcagacatcctgattttcaccttcctgagtctaccctaccccagagggtgccagtctcactgtggtgatggttagcccagtgtgtgctgcactcacacaccagcacggggtccgtgcttgcaggctggtggatgctgtcctctgggttaagactgtctcccttctcgggagcactggagggttctccatctgcgtgtttcagtggaagttggcagatacgaaaacaggcccctatagggaagcagttccatgaaaatgattaattctttccaaaagacttaaaattttttcctatttcaattttcctttcaaaaaaggaaatacattcatgtagttcaaaacttaagaaaacaaaagtctgttcagcaaaagactcccactccggttccccaaacgctgagccccaccccccatccctggtagcaagaagtgtttccaattttaaggttaagaaacaaagtccctggatttgtgttagggatgtcttcctgagagtgggttgtgttccgtttgaccctggcggttgacctcggcccactaggatcatgccgccctctccagggaggagggcctccccatcaccctgtacagtggcaccccagccctggcactgcccgcccttgctcagcgtacctttcccatggcactctgacgtactggatgtttggtttctgaagttactggctgtttaccctgccgggatgtaagcccctccagggcaggggcttgtctcgtgttcagtgctgcatcccagctgctgggcacggtgcctggtccatggcgttcaataaataactgttggatgagtgaaaaaaaaaaaa

SEQ ID NO: 106189 - DNA, 1063 bp, Homo sapiens
ttggtcactctacaggatcttctggcaaggtggaaatcaggggcagctaaatctgatcttgtggaccagtctctagtaagggctttcagcgtggctgtctgtccattgctttccaaataggatgcagcaatgattggtacatgggtattaagatcggtagtaggggctagtccaagtttagcaatagccaaactggagagcctctgaagtatgagagtcccagagggatttgtcagctcctggcagacatcctgattttcaccttcctgagtctaccctaccccagagggtgccagtctcactgtggtgatggttagcccagtgtgtgctgcactcacacaccagcacggggtccgtgcttgcaggctggtggatgctgtcctctgggttaagactgtctcccttctcgggagcactggagggttctccatctgcgtgtttcagtggaagttggcagatacgaaaacaggcccctatagggaagcagttccatgaaaatgattaattctttccaaaagacttaaaattttttcctatttcaattttcctttcaaaaaaggaaatacattcatgtagttcaaaacttaagaaaacaaaagtctgttcagcaaaagactcccactccggttccccaaacgctgagccccaccccccatccctggtagcaagaagtgtttccaattttaaggttaagaaacaaagtccctggatttgtgttagggatgtcttcctgagagtgggttgtgttccgtttgaccctggcggttgacctcggcccactaggatcatgccgccctctccagggaggagggcctccccatcaccctgtacagtggcaccccagccctggcactgcccgcccttgctcagcgtacctttcccatggcactctgacgtactggatgtttggtttctgaagttactggctgtttaccctgccgggatgtaagcccctccagggcaggggcttgtctcgtgttcagtgctgcatcccagctgctgggcacggtgcctggtccatggcgttcaataaataactgttggatgagtgaaaaaaaaaaaa

SEQ ID NO: 106190 - DNA, 1827 bp, Homo sapiens
  misc_feature (181)..(181): n is a, c, g, or t
gaatactaggctttcctttttttgtgagatgggggtctcacactgtggctcaggctggagtgcagtggtgtgatcatggctcactgcagcctcgaagccccggggtcaagtgatcctctcacctcagcctcctgggtagctggaaccacaggcacgcaaccaccactcctggctagttttntttttttagtagaataaggtctcactgtgttgcacaggctggtctctaactccttacctcaagccatcctcccgccttggcctcccaaacatgttgggattacaggtgtgagccactggacctggccaaatactgggttttcagtgctcactgccactaataaaaatctgaaattctttcattatgcaatttctaagtgcctggtgagggccaagctcagttctaggctctgaagattaagagagaaacaaggctctgtctgctcctgttgtctctgtgagcatctttgacagagtgctcagattgttgggatatagtgcatcggactggcagcctgaatttgtggagaccgcagtcagtaactttgtgatatatggaatatttagaggacagtaacccatttccctacgccctacctgatcacatcgtgccctgctgggccataccccaaacagcccaccttcctctaggcctggccatggccctgtgcctgccacattgaggattaagtcaggatatcttgagccctctcaaatccctgtttattcaggcctctgccacatatagagccagccttctgtccccaccacttccactaccatggagcccacttagtaaaacgctctctgggcccagcttcgccagaaaagacaccaggggagcaaggctcaaaccaggggcagctaaatctgatcttgtggaccagtctctagtaagggctttcagcgtggctgtctgtccattgctttccaaataggatgcagcaatgattggtacatgggtattaagatcggtagtaggggctagtccaagtttagcaatagccaaactggagagcctctgaagtatgagagtcccagagggatttgtcagctcctggcagacatcctgattttcaccttcctgagtctaccctaccccagagggtgccagtctcactgtggtgatggttagcccagtgtgtgctgcactcacacaccagcacggggtccgtgcttgcaggctggtggatgctgtcctctgggttaagactgtctcccttctcgggagcactggagggttctccatctgcgtgtttcagtggaagttggcagatacgaaaacaggcccctatagggaagcagttccatgaaaatgattaattctttccaaaagacttaaaattttttcctatttcaattttcctttcaaaaaaggaaatacattcatgtagttcaaaacttaagaaaacaaaagtctgttcagcaacaagaagtgtttccaattttaaggttaagaaacaaagtccctggatttgtgttagggatgtcttcctgagagtgggttgtgttccgtttgaccctggcggttgacctcggcccactaggatcatgccgccctctccagggaggagggcctccccatcaccctgtacagtggcaccccagccctggcactgcccgcccttgctcagcgtacctttcccatggcactctgacgtactggatgtttggtttctgaagttactggctgtttaccctgccgggatgtaagcccctccagggcaggggcttgtctcgtgttcagtgctgcatcccagctgctgggcacggtgcctggtccatggcgttcaataaataactgttggatgagtgaaaaaaaaaaaa

SEQ ID NO: 106191 - DNA, 475 bp, Homo sapiens
taaatactcccccgcgtcgacaaaagactcccactccggttccccaaacgctgagccccaccccccatccctggtagcaagaagtgtttccaattttaaggttaagaaacaaagtccctggatttgtgttagggatgtcttcctgagagtgggttgtgttccgtttgaccctggcggttgacctcggcccactaggatcatgccgccctctccagggaggagggcctccccatcaccctgtacagtggcaccccagccctggcactgcccgcccttgctcagcgtacctttcccatggcactctgacgtactggatgtttggtttctgaagttactggctgtttaccctgccgggatgtaagcccctccagggcaggggcttgtctcgtgttcagtgctgcatcccagctgctgggcacggtgcctggtccatggcgttcaataaataactgttggatgagtgaaaaaaaaaaaa

SEQ ID NO: 106192 - DNA, 455 bp, Homo sapiens
caggtgtttatctctcggcagcagccaattaccaccttgcactcatgcagggcccagagtgcagatgggcttctccaggtaatcctgctccaccctcaacccttggcatgtcctgcatggctatgttaccatggggcctctctcaggccctgtcccactccacatcattctcatgagcatccagtggaggactgtaggaagaaactgagggtacaggttacccttgtgtctggggctcccagtaaactgccactctagataatgctcagccattaagatttcattaagatactagtcattttctccttatctacttttgcggcaactacctattcctctgtgctctgtcaaacatgaaacagatcatgtgtttcatccatcaaagataatgtgttctagttacctccagaaaccagtttgcttggtggcctgtgaccccagctctccagtaggct

SEQ ID NO: 106193 - DNA, 308 bp, Homo sapiens
tgggacggagtctcgctctgtcgcccaggctggagtgcagtggcgggatctcggctcactgcaagctccgcctcccgggttcacgccattctcctgcctcagcctcccaagtagctgggactacaggcgcccgccactacgcccggctaattttttgtattttgtatttagaaatctttttatacaagaaaatgggaacttgagacctataaagtaaaagatttcataacaataataaaactccttgcagacgtctaaaggctattctaagttaaacagattgactaatatcacattttttagtctat

SEQ ID NO: 106194 - DNA, 389 bp, Homo sapiens
aactgattgaataatgcagttgctgtaacaactgaataattcaatcaactgaactcattcttcagcgagtggagatgaatcctccactctctttggcctttgagatatttgagagccatatttgagaggtggaggtggaaggacgtcctcaatgtggaaaagcaaacaagggccattgaaagcagttgaggacaggactaaactcggatttttttttttttttatgctgcccaaattcttatctaaggggtctggggactcatgccctacaaactataaattcttatcaaatgggtttcatttaaccctgtatatcatgacttactttccaatctgactctggcataacattacctgacaaagaagaaagtggaaatattttaccccaa

SEQ ID NO: 106195 - DNA, 227 bp, Homo sapiens
tgaggatagtaacagtccctaccatcagaggtgattatagagaaataaatgagataatgcacataaagaattgataacagggcttggcatatgatagattctcaaaaattttagttattatttgacatgaattctgccctcacaaactgtaaaatatagatgaggatgccaaagtagtgtataaatgatgatggcataaggtagaaaagataactactattgaaata

SEQ ID NO: 106196 - DNA, 282 bp, Homo sapiens
tattaaaagaggctagccatgcggttccagaaaagatgaaatgaacacacttgtatttattcctactgagtggtataagcactgacaatacatgtaaaataagcacacagactgtgaaaggtggaaagaagagggtgatcgcagggaccttgcaactcaaaggaaaacagtgtcgggtgggtggtgtcccttgaggtttctttctgccttatttatcccagactagaaacaagagaaaccagcagccaaaaaatgccactcggatacagatcaactttttta

SEQ ID NO: 106197 - DNA, 548 bp, Homo sapiens
atttatatatttaaacattatttctaattatgtaattttcattgctgttaagtggaaatttatttgtgggaggggcatttgggggaaatataaatcgttttatattctttcctaagtcaattcacagggttatttttccccctgtacccacttagaacagtgtcttaaatcattctgtttttatgtgtatgcactttcagaaattttttaatttgaaaaatatcaaatatgttggaaatggaagagtaaaaatagactacgtgtttctactactgaatgatgtttttgagaaggttgagatgagtaaagagggaatactgtttctcgaactagtttaaaacaaccttgaatatgtgaggaactatttgggtttgttgaatatgtgatgttcttggtgtgttaaataccttcacttaaaaattaagtttttgaccatcaatcagtggaaacttgtttattttctttcttgttttctgtgattttttttttccttctcacgtaggaagatcggtatttatttacagttacttctattgcagcataaataa

SEQ ID NO: 106198 - DNA, 372 bp, Homo sapiens
ccagtccttgcctcttgaatccctctccccacctcaaaatttccctttctatttgaccttcaccactatgttttgtctcatctttcatgcctaagaccacatgtcgatcctttccaaagctccaacttcttaatttctccataacaggtctgtctgattccacggcgctggttctcttaacccctacattccttacgaccttgtgttttcactcctgcttgttttctttctcaaggtctaggtcagttatttcctacagaaacctgcccaaatttcattgacctatggttttcagttctatgagcaagccacaattgactactcacaaaggagatttattaatacggaaggagtgctcccatgataacttat

SEQ ID NO: 106199 - DNA, 285 bp, Homo sapiens
tatttttagtagagacgggggtttctccatgttggtcaggctggtctagaactcctgacctcaggtgatacccctgcctcagcctcccaattgctgggattacaagcgtgaagcattacatccaagtgaaacttcttgagatagttacataatgtttaaatctgctggtgtacaagttaataaagtgtagaactgaataaatattaaatattagatcaagtttctcatgtttaccttaacgtataaagatttatcttaaagcactgattttcacaaaataacatc

SEQ ID NO: 106200 - DNA, 304 bp, Homo sapiens
gtagagacgaggtgtcaccatgttggccaggctggtctcgagctcttgacctccggtaatccacccgcctcgccctcccaaagtgctgggattacaagcgtaaaccaccgcgcccgacctcctccccttatttcatccattttataattcacattattgatcgctgataattgcacctattgtaatgatactgataattgcacctgttgtaataatattgatattgataattgcacctattgtattacaatattattattgatatcgataatttcacctactgtaatgatcaataaaggcaggc

SEQ ID NO: 106201 - DNA, 315 bp, Homo sapiens
acagctaacatattaattctaagtagtgttggactgaaggtcaggaatctgattttgaccttagcactaatgggaatcctgtgggaatcctgagagtggctgaataagtgctgtaatatcactaataattaataatgatgataatgtcccaggtttcttattttagtgctttttagcccccgaaggcttcaaatcactttgcagaccaattgtttcacccactgttgacctgtaaccgactcagccatggaatattgccctgttgtcaagaacacagccacatttagcttgtttaagcatgaactgaagaaagat

SEQ ID NO: 106202 - DNA, 549 bp, Homo sapiens
taaaaaagaaagctgtgtaacaagagcatcagatgttactttgctcactgttgaaggcggtgaagaacagaagaaaactaggaagaaaaccaagctgggaagggcaatgaaggaacaggttagagttcaaaagtaaaagtacgttccacacaaaggaaagatttcagagagaaggctttgctctgttgcccaggctggaatgcagtggtgtgatcatggctcacgcagccttgaaattctgggctcaaatgatcttcttgcctcagcctcttgagtagctggaattacaggttgctggggcagctctgatccacatacgacttagggacccaggatgcagctgcttcaacatcttgtagccgtactatctggaatacatgggctgccagttgtcatgactactctcctatgttcagcccaaaagctaagcactttatttcttcatatagcccattggccagaattattcatatgtctcactacaggatgggccgggagtgtaccttcattatgtaggaaaaaataaaacataattcgtgagaattatcc

SEQ ID NO: 106203 - DNA, 238 bp, Homo sapiens
ctttttgttcttttcccattccatttctgtcggtcatattaggctaatgctaattagctactgctaatgctgcagtgaaaatttaattcccaaatgtcagcgacttaacacaacaaaagtttctcacttcacttccattgcaggttgctggggcagctctgatccacatacgacttagggacccaggatgcagctgcttcaacatcttgtagccgtactatctggaatacatgggctg

SEQ ID NO: 106204 - DNA, 751 bp, Homo sapiens
ggtgtgagccaccatgcccagcctacaattatgactatttccatttgaaaccatcttcctcagaaattgaaattttagagccgctcttgctagcatgtgaaaccttttccttgcttattgccttttggcgggggcagtgaaggaggagcctggcctttcaaaatgtgatcaaaaaaataaccaaactccagggctcattagtccttttataaacgccggtgtgaaatgatgggtatccgtgtgcctggtccaagtttcctggtggttgacttgggcgaataaaaataagacatgttctgcagagttctccttttaaattcttgtgtaatattccgtttgttttgctcctttgcaattaactacaaacttctaagtcctagaaaagatttcaagtatttatagagtgagcaacgatcattttcctagtcaaatagtatggcaaaaatcactgttttaaaaagttgtggcattaaactataaatcctccctcccctcgcttcccacccccaattatgaaagaaaagcatatgacaatgcctactgggctcagcttttgggctaattgagtctgactgagccttcttagcaggttcctgtcttttgaaacctcaaatcccaaaaagctgtctaataattttacttttttagggactaagaccaggtattttcagcagaggttcttacttttctgtaattgaggcgcaactataatgttccagaacacaatcttaaatctgaaagtgagaggaag

SEQ ID NO: 106205 - DNA, 390 bp, Homo sapiens
tctaggatcgcttccagtagaatgagtcactggcaaggctttgagtgcttcccctcttccccaatttcaaatggtgaattgcaaaatctcaagttatgtgttggcaactgatatctggaacaagaaagaacttgatatctttctgtcttgcaaattatgctcacccgcatctttatttaggcctaaaataaagtagcatgttggaattcatcagctgcacacatctctgaggtgacttttttttttttttttttgagatagggcctcgctctgtcaaccaggctgcagtgccgtggcatgatcatagctcactgtagccttgatctcttaggctcaaaccatcctcccgccttagcctcctgagtagctgggattacgggcctgtgccac

SEQ ID NO: 106206 - DNA, 532 bp, Homo sapiens
aggctaccgaggagggcgccaggcccccagggagcgtggaggatgcaggccagccgtggggcacattctggcccaggcctgtgtctacaggtgatcttgacagagccctgccggcggacacggggctccagaaagccagcgcggacgccgagctcctcgggctcctctgccagggggtggatatcccgctgcacgtgccggaccccaagtatcggcaggacctggtgtcccagggcggcagggaggtgtacccgtaccccagccccctgcacgccgtggctctacagagccccctgtttgtcctgactaaggaaaccccacagagaggtggcccctcgttccctagggagagccccaggggccccgcaggtctgaacaccatccagactgggccggtcctcgaggctggcccggccagggccagagcttatatcgacaggttgctgcatctgtggggccgggagaccccagcaaagggtagcgagggagaacagggacctctaaggcatgcagcgtccccatctccacagag

SEQ ID NO: 106207 - DNA, 286 bp, Homo sapiens
gccagctgagggaaggggtgggagcgaggggaggagtgtaccacaacacaacagctggcagctccagacccacacatactaacagctccgacaccagacagggaagaaaatgtgcttccctctaactccaatttaaagaatgtcagaaatagctctgattggcccaagttaaggtcatgtggctgctgcttggaccaatttctatagccaagaagatacactattatgattggcagctcctctagaatcccagtattggagtggaaatgaagtagtagccaaaaag

SEQ ID NO: 106208 - DNA, 210 bp, Homo sapiens
aatgccggcaaggatgcagagaaactggatcttctgtacactgctagcgggaatgtaaaatgaaacagccatgctggcaagtcacttggcagtttctaaaactaaatattgctgttactctatgacacagcaattgctctggggcatttaatccagagaaatgaaaactgttcgcacaaaaacctgtatgcataaacctccctcatagca

SEQ ID NO: 106209 - DNA, 297 bp, Homo sapiens
gagcagttggcatgttggctgttccgtaaacagggccgtgtgtctgctctaacagatggcctgggaaggtaaccccgaggctttgtgttccttcctgcagaccttcaggattccgcagagagagctggccctccctccagctgctggggctcttgtccttcccagctggggccagtccacctacagggggaatcctggagctgagggatcctaacttgggagatagtttctgtgctacccttcttgcctctcccctggacccctgaaggctctgtcctagggaggggatgggtcaca

SEQ ID NO: 106210 - DNA, 805 bp, Homo sapiens
gaatcaagccgagcgcgaacgccgtgtctggggctcccactcccgggacacacacgcgggctggcttacacatgctcttgctctctcgcgctctgggagagcgcttatatgggcttcatgaggctaagtaataaacactttgtcttcaccctgctatttatgggttgcttggggcatcctgtgctctccactgcccttacctgaacagacggctcatgcagacccggagtttaatagggacaacagtaaatctgagaggctgtgtgtgtcccacgcgctcctgttttcccagccacccatgctagttgcagagaaaagccaacctgtatcccttcggttatgctctgtgtgcccttcctggagagatcccttcattcttcagcaatggatcaaagaactctgaaaacaagaacaaccccgacagctgcaaaccacgagccctcacctccagcagaggttttcgggaaactctggacgaccacgcgcatgcagagggctctcagagcttccaggtcctgtaagaagagatggagtcatagctgcgccctgtccactctcgggctgtcacacaagcctggagcccagccatttctcggccttgtcttcatcttgggctaaccggtcgtctcctgcaaacagacagcacggagaaggatgagtgaactcggcctctccccacagaatacagttcgccattacagcgctgattaaatacaggacattatctcaccataatgccctcctggcggcgttcccaggaaaattctaactaatcataaaaatagaaagaaaaacgcaacctaaa

SEQ ID NO: 106211 - DNA, 339 bp, Homo sapiens
atcctaataaactccccttcatatatacatatagcctattagttctgtccctttaaagaaccctgactaatacagggagtgagttcattactgtgaaaatgggttcattataaaagaatgggttcagccccttcttgctctctcaccctctctttgcctttctgccattggataatgcagcaagaaagcttttgcaggaagccagcctctccatcttggacttcccaacctctagaactatgagccaatacatttctgtttattataaattagtctgtggtattgttatagcagctcaaaatgaactatgataataagaattcttaacatgtatgtgcc

SEQ ID NO: 106212 - DNA, 577 bp, Homo sapiens
gcagcaggtctcatcggggtcattgggaaatacaagaaaatgccaaaactctcaccacctactccaaattgagtaggtcagcaggtgggggctggacgtctatatttttacatgtaccctgggaaattctgacacaagaggcataagcaccactctttgggagactccatggagtagcaaacatgtgaactggcttcaggccccaaacatctgggtaccaggctggagaggagacatgctttcctgaagtctgtaggtggctttctgtttggatgtgatcctggcaatgactgccagatattcaccttgagttcctgctgcggagccacagcaggggtgtacctgtgtccaccccatggccaggggccaaggcagcgtgtgggtgctggtgtgagcatcttcacaccaactccatactccacagccctccgggaggtgaggcagtcaaacatttaggaccaggctacctgggttcaaatcccatttgtggaatttgcaaactgtttcaccctgggaaaattgctcctcctaggtttcctcccctgaaaaccgggaatgaaggctgatgaatattagc

SEQ ID NO: 106213 - DNA, 462 bp, Homo sapiens
ccaggagggctcaaaggagacagaaggagcagtcaaggaggagtcaaggaggagtcaagggccgaggaccaggagggctttgagtcctgaagcagaacagtgcatgtcagaaaggaggatggactgcagcagctttgtaggtcaagaagaacagggcatagtagacaaccgctgggtctgacagcgtggtggtccctggtagaatcatgtcgctaagagcctgactttggggtaaagaaaaaggaggaaaaggaatgggagacagagactacagacttactccttaatgaagctgtgctctacaaagaggagaaaaattgggacggtagctagcatgggaatatccaatgactgatccacgtggatgcaaacgcctgccccctggcctcaattcaggacaccttggcatggccaccccaagtccagggatctctgtgggctccgccaagattctggttgcag

SEQ ID NO: 106214 - DNA, 260 bp, Homo sapiens
taggtttttttttatttgttaaattttgagacaggatcccgctccatcacccaggctggagtgcagtggcacaatctcagctcactgtggcctctgactcctgagttcaggcgattctcattcgtcagcctcccaagagtacctgggactacagggtagattttattaataaggtcttattgataaaactatggtaatagtcccttcccctgaattttatttttaaaattcaacctacatccttgttgcaaacttagcaa

SEQ ID NO: 106215 - DNA, 532 bp, Homo sapiens
attgacatgacttgtctgctgtcattcattttcattctttgtggcttaaggtttatttgttttatccctttactgtcgctttattgagctttcaggaggaagtaaacaaacatttcactggaaatcaatattagaacttcaacttagctatcttgatagctttttaaagatttgttagaatatttccttttacattaaaaattgacttaatgataattaataatggataataatggaaaccatctgaattaccattagcattaatttaagatcagacaggatggtctagaaagattgatgaggcatcctctgatcgtcctcttcaaagttccaagattgtctccttcatgaggaattttagaggcaactcattaccaactttgtagttttgctttgtggcattattactccaactaacttaaaaaagtttcatttttgtaattaatattttgcctttttcatttatgttgaaatgcttatgtgctggtgtgccttagttattttcctttattgttttaagttcacatgtatg

SEQ ID NO: 106216 - DNA, 800 bp, Homo sapiens
attttcacttccacttttcataagaaatggtattctgaaagttgcgttttgtaggccacaatcattttttctctagcccttgtatagtatggagttacccctctggccactagatggagatcctgtttcattttaagaagtatttggtaatattcacatgttaatgttaacaggcagaatgttactttagagaccctcacctattttagaaaatagtatgttccttttttgagaagagagcatattaagtctcagcacacattaaattatttgccattaacttagtggggtatgctacaaattcttattgaaataaatctttacctttttaatagtggtcttattatatggggatgaatattctttcagattatcaagggaaattgctgttatctgggttaatctgacaattcacagattagaaaagaacaaatgaaatctagagaaatgtattcagttgctcaagtttaactggttagtaacgtggtgattattaaactcacttattttcaagttgaaaagcaagatataaatggattttgtcattatgaaaaataaaaatgagtaagtgatgtgttagagtaaggtagacatgagagagcaggcacaggacttcattgggaaaattataaagtatctactgaattggctggttatcttagttaaatgatgttatatactaggattaaaatttttaatttccctaatattggtttgacagttttataacaaactataatgtgtcaaaacccattactgcattttgatataccatctgatttttctcacagtgtattttg

SEQ ID NO: 106217 - DNA, 232 bp, Homo sapiens
taaatactcaagctggtcttgaactcttgggctcaagtgtccctcctgccttggcctcccaaagtgctgggattacagacatgagccaccactccctgcctatgttgttgttattgtttattcttttcattttattgaaaatttcaaacatcattcttgacccatgtttggaatgggaaattgcccagtgaaggagtgaggatgttaaatctatcttcctggttggaactat

SEQ ID NO: 106218 - DNA, 472 bp, Homo sapiens
caaaacaattctgtgctgagtttgagttggaaaagaaaagtcagaagttgaaatttagactacatacttaagaaaacacccttcaatggtagacttagaggcgattttgaaacctaatttcattcagctacaatctcttttgtagtactcttagcaaatcaacttctgtttgaatatttctagtgaaagccactttttataacaacagcaggaaatgaaatttggaaatacaatttgatgcttgcagctgccgaaaaagagattggctatagaaatcataagaaaattcagggtgttatttgtagatttttatctgattttgaaatgtctaaataagtgaatttttctgtgtctcccatataatgaaatgtcatgtgaataattgagaaataatgtctagcttggaaataaatgtaagaaccagaatgctcttcacaggtttttacagctcggaccaaatattcgttatcct

SEQ ID NO: 106219 - DNA, 284 bp, Homo sapiens
ctaatataaatcctaagaactcagacacagtcgattgagaacagagcaattcccttttccctcgttttaaagaatcatgtacataaaaggtttgaacactttgaactttgaataagtttgaacacttcatgccttttggccactagcatgctgttattttatgtcgcaagacgagcaacaatgaggcatccacagctcccaggcgtcaagactgaaggacactctgcctctcccttagggtttgagatctctgagtcagggaacactgagtgaaagcaaagctg

SEQ ID NO: 106220 - DNA, 541 bp, Homo sapiens
aggattgtcaaagccaatctgaattcaatgctttttatgtgctagatgctgtgcttggcactctgtgttgtatctcatttaatcttacatctggatgctacagtacaattgtttgtgaacggtagccagttaagttcattgactcctaggttagtcttgtacactgggatagaagaaaaaggagaatatatccttaaccttagggtcatatggtggaagaatctctgatggcttccagtaaccaagtttactttatggaaaagaggaataattgcttttttctaaaaggtggtactattcagtgacctggtgaaaattcctaggcttctgctattctatctcttttgggtataaatgactcaaatactcatgtgttcattaatgatgggtaagacctcagatattgggcttgcattgctggaatgtgttcaaaccgctatgtactgcccactcaactgttaattcactctcaacatctctgattctctggttccatatttgattatgtgtgttagatccagggcttatctatgacaactta

SEQ ID NO: 106221 - DNA, 392 bp, Homo sapiens
attccctctccaggcctacccatcccagccaggagcaggctctagatcctggtttgtttccccacccataataggaaggtgacataataggacctacgtgggcatcaagtaagttggggcctgaccaccacaagtgctcattaagtgccaccagctgttgtgggggtgatgacactgtgcctccagttccactcagtctgtgtactttattatcccacagacacatcctgtactttcctacctcccctttggctgtgatcccctctactcaaaacaaacactcttccctatcttcattgcattttgttgaaatcccatggctcttcatagctctcctcagatgcaggcccacccccacccgtgctgtttcctccttgtctcatcctgcctgt

SEQ ID NO: 106222 - DNA, 449 bp, Homo sapiens
aagaaagggagagctgacatttatgaagtgcctattatatgccagttagtgtatgaggtaccttctgtgcattttttcatctgattctcctacaacttcttgaggatgttatggttttgtgaggttaacttacccatgaccaaactccgactttctctggcacccaaacccttccatgccatcatcttgcatgcttgtttctcatggcattcggatttatgtatttttatttttatttatttattttgagatggagtttgccctccagcctgggtggcaaagctagactccatctcaaaatagataaataaataaaaatacatttatgtctggtattacaaattcatctcacgtaccactcctggctcatgtactgtttatactaatctttgacctatagcagtggttctccacagtagcattatattagactcatgtgggaagatata

SEQ ID NO: 106223 - DNA, 318 bp, Homo sapiens
gagaatagcttgaacccaggaggcaggggttgcagtgagccaagatcacgtcactgcactccagcctgggagacaaagcgagagtccgtctcaaaaaaataaaaaataagaaataaaaaatcctgttgctgccatgcaaactgccacaaactaggtggcttaacacaacagaaatgtattcctttacagttctgaagtccggaagtccaaaatcaaggcgtcggcaggaccgcactcaccaaaaactgtaggggagactccttccttgcctcttccagcttctggtagccccaagcattcctccgcttctggctgcat

SEQ ID NO: 106224 - DNA, 413 bp, Homo sapiens
gtatttttactggagatggggctttgccatgttggtcaggctgggcttgaactcctgacatcaggtgatccacccatctcggactcccaaactgctggtattacagataggagccactgtgcccggcctcctactatttgttataggagcttttgccaaacatacaacatttctgaagatattaatctttgtttgcttgatgtttttgtatcttactattatctgtgtttatattttctttgtgcacaatctgaatattctttttatgatatgtaagtatttgtcatgtaccctttaattttcaagcagtttaaacctatattttttttaatctagaaggcttctaatttgtttgaatagaatatgcataactacttaatagaatgcttgccctatcagtatagttaatagaa

SEQ ID NO: 106225 - DNA, 565 bp, Homo sapiens
caacaggctcttgggcagacgccaaaggttctttcttattattactgctactattgaaagtcttctgtttaaatgtagggatgctttttcctcgagttgtatgatagtgtggcttgggtttttttttccctcctttgtttgttttggactttttaaaaaacaaactttacatttgcattgataattatgttattattaatgacaaaatgattcagtatggggactacttatcaaaggtgccagttctttcacatttaagtgacattcaatttagatttacaaaacacccagaaacaattcctatttctccagagaagttgagagaaaaattcaaagggattgaatcctaaaacacctacacttaaccatttttatttacatgctattattacaaaacaaacaagcaacaatattagatcaaaaaactggatttactgacttattgcttgtgcagagagttctgccttccaagcaacataactgacaagcaactattttaaaaagtatgtataccaaatgaaaaattaaaatcatactaaatgtttacaaatgtttttataatttt

SEQ ID NO: 106226 - DNA, 301 bp, Homo sapiens
ggagcgtctcactgtgttgcccaggctgatcttaaactcctggcctcaagtcatcatcctgccttggcctcccagggtgctgggattataggtgtgagtgagctgctgtgcccagcctcttttcaattttttgaggacctgtcctacttttttccagagcagctgcatcagacagtgcatgagagttcccatagcttcatatcttggccagtacttgttatttcctgggttaaaaaacaatattagccatcctctgcagtgagccctgttctcatcactgcacttgcctgagcaacactgt

SEQ ID NO: 106227 - DNA, 306 bp, Homo sapiens
tctaagcgaaattatggagatatggcagtagatgaaatccttgctagaccttttctgcttttattgctaaatctctctcattcacataatcactatgatgccaataatttgttgttaacatttgcagaagcatttaaattgtaaaggagtatcctagctccaaattgacctagagattcaatgcaatcctgatgaaaatttccaaaaggctttttttgtcaaaactgacaagctgattctgaaagttatatggaaatgcaaataacctagagttgccaaagcaatttcttaaaaagaacaaagttg

SEQ ID NO: 106228 - DNA, 365 bp, Homo sapiens
ctctttcttgcaccctcaggactcaagagtgaccctttttcaagggcttttgggacctctgttcactgactgggagaagaaaacacaacaccaaggtgaaggcccaagggcaaatgtaaatttgacctgggttctgctccaacagacttcttgtcatttagcagcactataaattttaatatgattcttatttcaactcagtggcttacttttaatcttcaatcttcggaagatattgatcatattcatcaggtcatagatgtgtcctggctgccaccatcaaggcttttgtagagtagcatactcagttttggcttaaatccttagttattttattctttatgaaaatcatttctaattttcat

SEQ ID NO: 106229 - DNA, 354 bp, Homo sapiens
gtgctgactacatgccaggcactgttgcaagtactttgtttaagttaactcattgatcctgaccacagccctttgaggcatgtactacaaaaatccccattttgcagatgtggaaactgagacacagttaagacacttgcccaaagtcacccagccagtaaacgtgagatccagcgtttgcagtcaagcagattgcctggtcccttagctctgcggacccagagccagatcttccagtgctgatgctgcgcctcattagcaggataatgcgggaaatttacttaaaccatctccacttttgtttccttatctgtaaaaacaggcagagttgttatagtaattaaatggaatacc

SEQ ID NO: 106230 - DNA, 240 bp, Homo sapiens
attatttaataactgcctcctcctcagagcctctgagctgcacgacgtaggactctgcccatgtctgtcatagtcactgatgcatctcagtgtttagcaagtccctaatacacagtaagtgttcaaaaaataattgttggatacatgagtaataaatgctactaggatgtgccaggcattgggctacatataccatctctaatctcacaaaaacactacgagggatggaatacaagtctc

SEQ ID NO: 106231 - DNA, 105 bp, Homo sapiens
tgctggaattacaggcatgagccactgtgctcagccatgattccatttttatatgaaatgcctcagacttaagcagggagaacaaagggagagggtggtttgtac

SEQ ID NO: 106232 - DNA, 458 bp, Homo sapiens
atagctacttcagaatcaacctccatcccgtcgctatttagagacttcttttttgaaatagaaagtgacaaaaagtcccccactttaaatgaaacctaaacatgtttaactctgtctgtacaaagaacctgacaaaaataatgtactcatttgaccttatatgataaatatgtgcttccattccatgttggtttgatggtactgttcatctaataaatacttatggagtattggacaaatgtcaggaactagattgggtattaagaatataaggaaaaaacaggatattgtcactgccagtgaaagactggctttataattggaaaggcaaacaattataggactttgtactaagagctttaaccttactatgccctggaattcttctaagtgatttaagtatattaacccaataattctcccaacaacttttcacatggttgctattattatccccc

SEQ ID NO: 106233 - DNA, 414 bp, Homo sapiens
ccaggctggtcttgaactcctgaattcaaatgatctgcccacctcaacctcccaaaatgctgcgattacattttaaaactctaccttttaaaaattagaacctggacaaagaggtattaaagaatgtgtctcttattaatttattatggtaatgagaagagtttggatttggacctacctaggtttttctttcctccagctccgccaccccaactccttactcatgcttcctctgtaaaatgatcactccccagtttgacaggaattgcccctggaatcccatctggtgttctaattgttaccaaatccaggcaaatcttgcctgtgatacaggtggtgaagctactggatagaactggagcatctaactggtgtgagatggtatctcattgtggttttgatttgcatttctct

SEQ ID NO: 106234 - DNA, 363 bp, Homo sapiens
cttgaaatacagcaaatgcatcatcaatgtacacacacaggtatgtaaagctctttggctctagagtcaggagcctctctgcactcccagttcagaaacttatttggaccaagttacttaacctcttttctttcctcaaccttaaaatgtaaaggatatgaattagccctcaaaggcttattgaaaggattgtataggataatctataaaagtagtactttgtcacagtgatcttgatgaatgctgtcaagataccaatctcctccccacaaagaggacaacctctctgcacctactctccatgtggtttcacagccttcagcaggtatccatatatgaaggaataccaatactccacttaag

SEQ ID NO: 106235 - DNA, 357 bp, Homo sapiens
tccacttctcccaaggcagcctttcttcacttgcctcagccacctaatctctgtcccaccagttttggggttttccttactccatgcgtttacctttccacacttgcacatgcacacagcaccgcatgaaaactcctaggaatctctccttcaacatggcttaatagtccttcttacctaatttcccagtgacctctgactcacagttacacaaaggaaatggacgtacacctggagcccagctgacttgggctaaggttggtcatggctctaggtttggtttaccttattggctagaagacagtagaggcccaggcactgtgtgctttatggatcgtctttctaatttacttgaac

SEQ ID NO: 106236 - DNA, 175 bp, Homo sapiens
ggagccaaggggcaggtaaagaggctctgtagactcagtcagtgatgtctctaccgaggatgaaaaattcgatgtgacctttggggttgtggcaaagataatgacactatccacctcataggaaggaggcaatagctaaattagttcatttatgtgaacaccacttaggacagag

SEQ ID NO: 106237 - DNA, 456 bp, Homo sapiens
aggagagagtagggaaacggctggactttcttggagtcactgtgcttcccaccaactttgatgtggagacccccaagcctttccaaggtaatatatctctgggaaatagggctcccttttacaaatgctggctttatccctctactaaggagctgtgatgggctgctttgggggcctgaggagttaggggagagagggcaaagtgagcttccagtgagacgaaattcattgttgatgtggtgctgcttggaggatgtgaggttttcttaagcaactccttattttgtagcccacccaaaacttttgtaacagaagagagctaaagttaaactgcacccaaagagtccattgttggtgtgttgaaatacttaaaaaaaaaaattcaaaaacactaggtaatagtaacaacaaaccctttcaccggatcactcatctgcttctgaacatcaactcata

SEQ ID NO: 106238 - DNA, 269 bp, Homo sapiens
cagaagttcattattttctaacttaggagcacagaactgtatactgttcttcaccttccttaattttgaaattttttataaaggcgtggtcttcttatgttgtctaggctggtctggaattcctgggctcaagcagtcctccagcctctgcctcctaaattgcagggattacatgagtgagctaccttgcccatccctgcaccttcctttttctcttaagaagtctcagatcatcccaagtcagcatacagacctgcctcaatctttcc

SEQ ID NO: 106239 - DNA, 564 bp, Homo sapiens
agcctggacaacatggtgaaaccccgtctccacacacaccgtaatttttttaacttagccaggcatgatggcttgagcctatgaccactcaggatgctcaggtggcagtatccgcttgagcctgggaggtcaagtatgcagtgagccatgatggtaccactgcattccagcctgtgcgacagagcgagacctggcccctccccaaaaaagttttaatataaattacaggatatttttcattcgaaattgtgtacatatgaaatctatgagttataactgaacttccttaagaagtttgatagccttagggagtcttatgtttaggtcacatatggaattatcatctttactttgcagttatacagtgcatatacataagcactggttctttctgcagtaaccttttattcaagttatcaataaacttttgcttaatcatgctatctgttaaactgtaaaaataataacttagtaatagttcattatatctagaagtcacagttggctgtccagccctaaatgacctaggagacattttaccattgctgtgctaaggggtggggg

SEQ ID NO: 106240 - DNA, 501 bp, Homo sapiens
ctcctagcccttctgaagctgcagttcttctctcacaccgtgtattgccctatgcggatacctctcatacagaccctccactgggccgttcaagtccacgtacttatgggttcaccagctagttagtgcccccagcagggatacagagatggtttagtcacagtccctgcttgcaaggagctcacagtctagtgaggacatcacacaaagaaatggacagtgacgaccacacgagagactcctccagtgatgggtgcacgataatctggggcagatctggggtggggttaggtacaggctgctcagaggaagtgattctcaaactgagtcttaatgaggccaggaggctgagggctggaattttgggttggcatatttatagaccctgaggctgcaatggggcaagtttgggaaatcccaactctgtcatgatgactagaacaaagagtaagaggtgagaggggccagaagtaaggcttaaaacactaagagccacaaaaa

SEQ ID NO: 106241 - DNA, 499 bp, Homo sapiens
cgtggacttgaacggcccagtggagggtctgtatgagaggtatccgcatagggcaatacacggtgtgagagaagaactgcagcttcagaagggctaggaggccaggttctcaccagctagttagtgcccccagcagggatacagagatggtttagtcacagtccctgcttgcaaggagctcacagtctagtgaggacatcacacaaagaaatggacagtgacgaccacacgagagactcctccagtgatgggtgcacgataatctggggcagatctggggtggggttaggtacaggctgctcagaggaagtgattctcaaactgagtcttaatgaggccaggaggctgagggctggaattttgggttggcatatttatagaccctgaggctgcaatggggcaagtttgggaaatcccaactctgtcatgatgactagaacaaagagtaagaggtgagaggggccagaagtaaggcttaaaacactaagagccacaaaaa

SEQ ID NO: 106242 - DNA, 461 bp, Homo sapiens
ttgctgagatgtggattctaaccctgcacgtctgaagccggcccaagaatccgcatttctcacaggttcccggtggtgcccctgccactcatccccaggccacacttcagcccacgagggcctaggcttccgggggactgtctcccacccccacccttaacttaggtgaccattctctcagtgggactcacccgggtctggtgcacagctaggttccaccacatttgggttttttgagatggtgcaatgaaaatggtgactacggtagggtacgaggaagaagacagacctctgggttcacttttcaacttggcatttgtccttttcttccttatccacctcttggcaaaacatctaaaccaattcatctcaaaggagccaggctggggcagtacactctgaaagtgtccactatttagagtccttaacggggaggggctgccacgcttccttcccgtaag

SEQ ID NO: 106243 - DNA, 147 bp, Homo sapiens
acagtagctcttgatggaacattatttttaaaatctggagtgatctctggagggtcaagtgacttaaaatacaaggctagatgctgggatgagaaagagttaaagaatctaagagacagacgaagccagaaaatccaagagctaaag

SEQ ID NO: 106244 - DNA, 652 bp, Homo sapiens
tttacctacaactgtcttggtaaattctttttactgcctgcatgacactggccccagatagttgccactcaaaatactcctcttctttatccctttaaatattggtgtgtcttggccaggtgtggtggctcacgcctgtaatcccagcactttgggaggctgaggcgggcagatcacctgaggtcatgagttccaggtcagcctggccaacatggtgaaaccccatctctactaaaaatacaaaaattagccaggcatggtggcaggcgcctgtaatcccagctagttgggaggctgaggcaggagaatcgcttgaacctgggaggcggagtttgcagtgagctgatatcccgccattgcactcccacctgggggacaagagcaagactttgtctttttaaaaaaaaaaaaaaaatttttttgtctgtcttgaggcccctgcttctcttctagccttttctttggttactctgccactgttttcattgtgttttctccctctgtgaccctgtttaaaatccaaggtttcaactactctcagtttggtgttctagatttccagttccactggtgtaactatccattggacactttttgtccgcccatgggcataacatatttattatgtatgaaacagaactttttctttcca

SEQ ID NO: 106245 - DNA, 456 bp, Homo sapiens
gatcctaagaacagtgggcactgaagttgcctgtctctatgtcaggttacagctcaagctgtgtatatgctgcagacgcacaagctgaatttaagagaatccgttctaaaacattacttcctatttagacacatgcttaaagttatttccttttaaaccttaggcagatggtgaaatattcctgctgtattgtctcacaatgcataacaaaacttttcacgtattttcagatagttgagaatgtttccatatgtctggcatgcctgtaatccagcactttgagaggtggaaacaggagaatcacttaagcccaggagttcaaaatcagcctaggcaacaaaaggagacccccatctctacaaaaaaattaagaaattagctgggtatggtggtacaagactgtggtcccagctactcgggagttcgaggtgagaggattgcttgagcctacgaggt

SEQ ID NO: 106246 - DNA, 468 bp, Homo sapiens
ctcccacacccacctggagatgccgtgctctgagatccctcaaagccactgagggactcaggaagatcctgatcatggtactggctacacaggtgtgcttaatctgtgaaacttcatcaagctgaacctgggatgcacatgtttttttgtcttacggcttgccacaataaaaggtttctttaacatgcctccctttgagtggcagatgtcctatatggggtaggaaaaactattttaaagatcaaaaccttaacctaatcctaaccctaaataaagatcaaaactattataaagatcaaatccttgaaaggaaggccctgcctaggccaccaggctggtaatggctgagctggaattagggcccaaatcagacccccttcccatagtcctggagtcacactgtttccagggaacagccctcactgaaaagtatctcattacaggacgtcggataatcagagacagcgt

SEQ ID NO: 106247 - DNA, 712 bp, Homo sapiens
atattcctatggtgttgcactagcttgtagaaatcattaacagacccaacacaccaaagacattgttagagaatacagcaataacgattggtcgtcttggttacgtgtgtcttcaagaggtggcccccatgctacagcagtatgaagaccctggtgcacctttctgagaaacataagagacaatgaggaaaaggattcagcattccgtggaatttgtaccatgatcattgtgaatcccagtagtgtaatccaagattttatatttttttgtgatgctgttgcatcatggattaacccaaaagatgatctcagagacacattcggtgtaagatccttcatggatttaaaaatcaagtaggcgataaaaattggaggcatttctctgaccagtttcctcttcccttaaaaagagcgtcttgcagctgtttatggtgtttaatacacttaagctgcagtcccaaaattaggggtccttcagtcttggagactatgagggagcctctgcacccagggaaaatactaccctttacggggggaagggtaaaccggtagggaatacactacaatctcaaccctactggaaggggcaggagggaggtgttgctgtcactgtattaggttgatgttgggaaacgttttaacatgtggagcctttgtgggttgaaatatgtctccagctacaactctgcactggatctgaagaagcaaaaaa

SEQ ID NO: 106248 - DNA, 132 bp, Homo sapiens
cccgtctgctgtcctcagagcacatccagagcctgcccactctcctcaccatcatctcgtgatggggttactgaggagcctcccaaaaggtttcctgccttctttcctgcatcttactgtcagctttcaata

SEQ ID NO: 106249 - DNA, 389 bp, Homo sapiens
caggaatatatatgttgcacttcagaggataaaagtacttcattttcactctcttcttccccttcccctcattgattttatgttggaataagttcagtaccagcagaaaatactaatttgcaaagacagtgatttaagtgtctctccagacttcttgttggtttagtaaatccacataacactttagagtggaaataacttgaatgcttgcccagaatggcagacatgtgctgttgccagaaagagcagtcgactggggtagagggaaacggaggtttagccatgttttcgtgacaagtttgctgtatggcatcaagaaggtaattaaaacctctatgccttacacaaaaaacagaccccaggagtgtggtggggtacgttaggggatt

SEQ ID NO: 106250 - DNA, 277 bp, Homo sapiens
cgcagcctgattctgcctccctaaatgatacataggtatgatgttgctcactgtttttgaactttcaataattgattggaggctccatgttgacttctgcagcttttctgtcttcctgttgtttgagttgcagccacttggttttcattaccgtgtagtattccatcccatgatgtggctctcctgtggtttatccaggctcctatagatgggcatttaggctgtttctcattcacaaccacagcacatgctgtgtgggacttccatattcatgtct

SEQ ID NO: 106251 - DNA, 395 bp, Homo sapiens
tgcgtctcccaagtggcaccctcactctccttccatttagctgaagcaaggaggtgaaacctaaattttttaagcctggtgttcattgttctgatggaggaggagaactttaaaggaggctttccaggattcctttggccaaccttccccagatttccttcaccacgccatgcctttcctttgttccagtagagccctttttactgatggagttaactggccaacagtgaagcacagtcgtgtcctctcacttcctcccagccctgggaaccacagtgcactaaggaatcctgaccatctctccatgtctgagtcacagtggtggtgggaacagcacaactttccacagcttgttcccttggcagtctccttactccctccctccagattagaag

SEQ ID NO: 106252 - DNA, 523 bp, Homo sapiens
tgagcctcccgcctcagcctcccaaagtgctgggattacaggactgagccaccgcgcccggcccgtgttttgttttgttgttcaacagggtggaacataatgtctaaacctgggccctacctacctggtgctcaaaagtggaatgaccgtccctagccaacccttcagaaaggacagagagctactcaacggactgctgtactcttaaggactgggaaccggaaccgtgggtgagtgggactgaatcacagactaagcgttttccacgcttcgccgacgtgctgagtgccaagttataaagacaggaacatccaagctgctctcctgggctgacacggacgcgaggggacctacagtggccttgggcccagcaggcagcgactgcaacgtgactgcccagagtccagcccctggggcccagatctacagaaccgaccagacgtgatagccctttggctggggctgcagtcccacgatccacacaacgaccctggctccgcagacgcgccaaccacccacggag

SEQ ID NO: 106253 - DNA, 372 bp, Homo sapiens
gaattcagggcttttcgggagaacctctcttcttacacatcagtggagtactcactgataacactacgcttaatagtaatgttgccattattagtgttacgacccactgatatagagacctatttgacaactaacaggactttcttaaaagtccaaaaaaggatctgctttgataattctgctaggagatccaagtgggtgggtggatctgctagcaccactcctcaagtgtttcaatgttcagtctggggtagatccaattagcagagaagaatttttatgcaatggcttggactagagtttggaatttggcagtcatcactggaaaaatgaatttctgcctgttctgaatcaaaacaaaacaagccatgt

SEQ ID NO: 106254 - DNA, 169 bp, Homo sapiens
tatattagggagggggccttaggtgatgcagcggtcaagagttgaaactcatgattatggtatcttttccttctaatctacagggtgatgttgatccttttccatccggtgtccaggcactctgttgagagccaacgataagatctgcagcttgtggctctttcttttc

SEQ ID NO: 106255 - DNA, 196 bp, Homo sapiens
tcttccatgaacagtatagtttgaaatgtacagtgactagaaacaatttgcttgccataatcaatgtatgttagctcctaccctagtcacagcaccatattgggaagtttagcaaaatttacacaagatagttcttttatcagaaagcataaaataaaccatttgtatcaaaggaaggaatttagagacaatccag

SEQ ID NO: 106256 - DNA, 443 bp, Homo sapiens
gtgtccacagtgaggaggtagggggtcacaggtcaaggccgtggccgcagtgaggaggtaggggccacagcagcacccttttgtggagcagcaaagcccccctggagaccctggggtgccccaccctgtagtagggtgcttttggggagtgggtttgacgcagtagcacacagggcacccaggagccctgaatgggcatctcagtcatgcggtcactgttctgtccttgtatgacagagctggccagaggcctcattgctaaagatcggtctctcctaaaacttcctccgagaggaagatgcggagtgaagttgggtcaggttttggagaaggagcgtctgcaccacctggcccttgttaaatgcagtctcaggctggcctgggagccactcagaccgtccacaggcaagatccagaggctgctgtctgcacaagcttctctc

SEQ ID NO: 106257 - DNA, 652 bp, Homo sapiens
cggaattcttattatgttgaccacgcgtcgcagatttacaagatatggatttgtaaacctgtttaacatgaaccagtcctctaggactggttcatgttaaacagatttacaagatatggatttgtaaacctcaattccagtttaataatagtagaaaatattcccttcctagtgattgttgataatagttttttttattttaaaattctataatttcaaggattgaagagatttacactcatatatatctgatgtcactaagatttagttcaggttacttagaaagcattgggcaatgttttgtaacttttgggactttttccaaagggctggagaatataggaaaagccgtatacacgaagagtttcataaaagcattgttataagaacccatatttggaagtaacttaaatatccaacagtagggagatgtttaaataaattatggtataatcaatagttaaaatattgtacagttataatgacaatttagaaactactcacaactctgaagaatatttaaaaagtaggataaaaaatgtgtgtgaactattgattggaaccttacaaaaatgtatgtatatgaaaaagtctggaagagaatatacaaaagtgataatagttatgttacagtagtgagatatggagggct

SEQ ID NO: 106258 - DNA, 500 bp, Homo sapiens
ggtacactccctgttgttcaaaggtttatcattatgaaaagaccattctaaccagagcctactgagataaaagctgctgccccatcctgtgccggggcatgtgagtgctatttcagtggctgtgtccacagctctgaaaatctataccttggatgaaagcccaactagagaatggaacattctcttatatatattctctgaaaaactgtcacatatgctcagacatgaaagaacagaaaggctgaccctggcagctccccacgctgcagaatttcaaaaatgcctgaggcctcactaaaatgaactgtctgaacaaaaggaagtagaaagagtgaaaggagacagaatgttggccgatatggttgcctctcctccctctatccccagcctccatccctccagatgtttttgctgagcttctgtcagccttcttggcttaccctttagtccctgccccagggagctgaattcaagtaagtacagcaaatgtggcacaaatc

SEQ ID NO: 106259 - DNA, 1793 bp, Homo sapiens
  misc_feature (923)..(923): n is a, c, g, or t
  misc_feature (1034)..(1034): n is a, c, g, or t
aagtcccctatacccaaatatggtttaggcttgattgaaaacttagcttgggcatttttctttaaacataacgttttgtttagcaaaaggaaacttgttcttttttggttcatggttttcttactgaagattctactacttatttgaggctaaactgtagctagtatctttgagcttttcttgaaggagtttgaagttcactattagtgatttgggcttttggaccatgtctataagtgacatgggaccggctgtcactgacaggacccttccagggaggctgtgtaacacccacgggcccctgacagtaactctgtgcagtgagtgggtgggggcctctcacagtggctgggaaccagccagagcagggatgagggagcagactgtctgggccccagggcagactgaaaaggatggagagaaaccccaggatggggtcctcctccttatgtgtttttaagttgatgtttggcttggctgggtttccgtaataaaaatccttggagtgcagggctagtcctgctggccccagcagaaagtcgaggacttcctagatgtctgtggtgcaacagggcaggatggggccgtgttagcgctcccaggagacattaggaggcacaggcatgggtgggtgtcatccttttcctcaactgtatctgaagactccacccaacccttcaagaagatggaaatgcagttgcccagaaaccgtacttctcagtggtgttttttgatgtggcatctgatgtgcactgatctgtgtcttttgttctgttctgtttttctgtcctgcctcgctcgaaaggaccgcaagtctcagctgctacaaaatcaaagacagcaagttgcttaggagcagcacagccttttctgggattgagaccagagaatgcttccctcggggttcttaaggggcccccgtntctgtggtcagctcagtatgtggggctacaggaggcactcagtggagacaacagcctagggggagatgaaccccagagggagctggctgagccttgggctgagcagccacngggagagaatccagaggacgtagagagagaaacagcctcctgcagccagtgtgggaataacgtaggggatttcacttacttcccacccttggaattgtagcaagcccagcatcacctgagcctgagctctgccctttgtcactggggcaggagccagtagcgagcatgctgggtgctgtggctgtcagggcgctcccctcccctgggcctgctgtagcaggaatctggggcttctgacgcagtgcctgcaaggagcaaacccaggccttaggagtgatcaaactcactacagtcctgacagaaagtccccaacaagcaggaaccgggatgtcagtgacatcccccagccatgctccggggcctgcctctgagtagcacttaggctcagggctgcctgcctggcttggccccagccccttcaatggtgaccagatgtctacccaggtcctctgcaagactgactgctgtgagaaccctgcactctgtggggagggaccccccaagggcacctggaagcaggcatgggtgttgaggtacatctgggctcagaatgggagatggattttccccccattcccccagccactctctgtggcaggcttccaaagaaaccctctcagaaacacacaattatcaagctgtgacaactgcttgaggtgaggctcacctggaccagtgaggttgtttgtttgttttgagacgaagtctcgctctgtcgccactgcactccagcctgggcacagagcgagactccatctc

SEQ ID NO: 106260 - DNA, 499 bp, Homo sapiens
ggaggtgatatccatattctacaaacgaggaagctgaagcactacgtaagttgttcagggtcacgcagctagtacgagaaagtgctgggaggaaatctaagaagctgtggacctgtcatcatcctagttatgatttagtgtcaggtcaggcatcctcttgagtgctgaaaaaaatctttgcttctttgggattgacagtcttttttgctggcacctgagatgggccttgctaaaggacatctgtttgtcttcaatatcattgccacgttctgcagttccgttaagtgaccctgtgttgagcagtttctgtgggcaaggtactgttgctggagtggtcactaggagatacagaaatgaacaagaccatcctgccctcagcttacagtttaatcaggaagaaagattaaactgtaagctgaaaatgtacacaagaaatgtacacaagaaaatgcacaaaagaaaatgcagtacacaagaaaatgcagtacatactgagtgt

SEQ ID NO: 106261 - DNA, 741 bp, Homo sapiens
ttcacagccacattttatcacatatacaaagataacctggtattaattctactgagtgtattccaaaaatcaaggtggaagtccttcctaaattatttgaaaacattattatcttggtagtaaaacctagtgaacccacaacaaaaaaggaaaattaccggtcactattcttggtgaaaattgaaacaaaaattcatgaagtactagcaagttgagttcataagcaaagcaaaaagttactttgccacaatcatgtaaacttcattgtatgaatgcaaagatgtttcatcatatacaagtaaataaatgtgattcaccatgtaaagataatttttaaaaaacaattatcacatgcagaaaaggcattcaagaaaatctaatattcatttataaaaacattctcaacaaactaagcactggagaaatatgcctgaaaataataagagccatccatgacaaatcctcagccaacatcatactgagcgggcaaaacctggatgaggtctccatcagaataaaaataaggctgggtgcggttgctcacgcctgtaatcccggctctttgggaggctgaggtgggtggatcacctgaggtcaggagttcaagaccagcctggccaacagggtgaaactctgtctgtactaaaaatacaaaaaattagcctgtcgtgctggcaggcatgtgtaatcccagctactcaggaggctgaggcaggagaatcacttgaatgtgggaggcag

SEQ ID NO: 106262 - DNA, 446 bp, Homo sapiens
ctgatagtgggagccctaaatactatgtataaattctgcccacatctctggctaacccctgaagcttgcattcacaggggcagattcaaaagagcttgcaattaaggttgacagaactgagatttgaggagccataatgcctaggcagtacccactcatggcttgactccattttctccagtgagagtgcacgagaattggtaattagactggctgtgtggcattgttccttatgacaccaaactaaaacagagatgttcccaacattccctgataatgaaatactgaaggattgatcttttaaaggacacagtcagcagtcttgtcatttcagtggaattagacatgttaattccaaagaagtcttctatattgttggctaccttagcattttatttccttagaataaactacttaactaaatatttaaaaagccaagttgtggg

SEQ ID NO: 106263 - DNA, 397 bp, Homo sapiens
tacaaatcctataatgggttatcaaattgatgatttatatgaatttctaaacctgtacccacgtaatgatattttgtagttagattttggagaaatgagaaacattaaagtatccaaggaggaggtgttttgaaaaatgaaggcattatgttttattttacgcttttaagattagtagaactataaaaactgatgaaagatttaaataataatgagatacattataactggggttgaagactgacagtcaagattcctgaattacagctctcactgatggcagcttattgaatagctagctgtttctgtattcctgggtatttttcattgttaaaatgtggtcagatctccattatctctgctaattataggaatcatgccattattattattatta

SEQ ID NO: 106264 - DNA, 195 bp, Homo sapiens
cctctccaagcatttaccattcagacttactacagaagatatgtcttcagtccaggttctaattatattttctttgtaaagcataaagaatttcaaagaaaaaaaatgtgtgagaaaacattgatactggacatagtcataacacttggtacttcctcaataacacacttgatagtaatttcctgcgtaatcgtc

SEQ ID NO: 106265 - DNA, 421 bp, Homo sapiens
ttttaaattacttccaaataatttatacaaaaggaaatttaactttgaaagttcctttcctatctagattaaaaacctgtgccattgaaagaaaaaaaaagttgtaggttacaactatagaattgaatttagctatcaccagacaattattctttaaaacaatcaacttagagaaaacttagttaactctttgaaaaactgtcataagtgttatcttaagcttgtcctcaccaggattgaatcatctctatcaaaatgtagagattaggcttgagcctgggaggtcaagacttcaatgaaccatgatggtgcctttgcactccagcctgagtgacagagcgagtgagaccctgtctcaaaataaaatagaaaaatgtagagatcaggtggatgcaacctaggttatcccatcataagtctt

SEQ ID NO: 106266 - DNA, 441 bp, Homo sapiens
agagcctctcctctgtggcttgtggctctgcatacccactgacacaaagaggaagggattattaacagtcttattttgaaagggtcttctgattcaagtgattatttttctttcctccctgattcacttatatctattttacgagtattaaagaggagatctctctaagacttatctttgacaaatgcaataaaacctttcaaaagtattaattggtgtgaagccctttagaaagtcatgccatttgttgcatttcctgcctttattgctatttctactaatcacctgggaaaaattactggtttttaaattcttaagtccagttctttctaagctgataaactttctcccagtaaattaaaaagaaaaggaaggtaaccttccgaggtagctcatgggagtggttgctaactcttaataattgaaaatgaaagttggttt

SEQ ID NO: 106267 - DNA, 744 bp, Homo sapiens
ggtcttgccaccaacacgtattttgaagtattgtttcaaaagtagacgcctgatttagagtacttgatttagacattcacggattcaaatgttgaattttgaaatacttccaatatatttccgtattgtattacatacagtgtctaccagctgactgttgttcattcattttggattacattttggctaacatgctaccactgacctaagatacttaagcaaaactgctgaaaaatgtttttaatgctttgtgtagtagatgctgatgttaaatttttttctccgatttgggaattttccccgaattttgggaaaagcatattaataaatgcattattttttcgttttaaaagaaaaattaatttctacatatcaccacctacctcagcagcagaatatcagggcagtacattttaaaataacggttggttaaaagatgcaagaaaaagttcatgggccttttgtttttgttgttttaactaagcaagagaaatgaaatcttgaaactgtctttggatttcttttgttttatattatcctatcggataatctgaatttatattttttatgcaatgtgagttttttaaaaacagttcttagggtagctgcattttagctataatattttttggtgcttgcagatattttaacagtcattcagtttttcacattcagatagtgaactttttgcctgagagtttgagtacattttaagatttcactggggtaaaatttgaatgtttg

SEQ ID NO: 106268 - DNA, 811 bp, Homo sapiens
cagcacccgggggtcaaggtggcacggctcacccgggacgaccagctgggcccccgggagctgaagaaataccgcctaatcaccaagcagggcatccttttggtccgattcaacgcgtccgcgctgctggccgggctgggcgcgcggctggcggcgctgcggacctctggcaccttctcgccgctgcccaccgaggccgtgtccgaggcaggcggcgacgtggcacgcctcctgctgtcaccctccgtgcagcgcgacgtgcttccaggcgggaccatcatccaggactggcagccctaccggcctagcgaaagcaacctgcgcctgctggcggccaagggcctggagtggcgcgtggacagccgcgcgcgcccgcgcgtgctcacgctgtgcacgcgccccttccccatcccgcacggaggggacggcacttggcgctatctcaacatcgacgccttcggtagcgacggcgcgcaggtgcagagccagctgctgtggcacctgcagcgccaggccccgcgcctcgttggcctcaacgtcatgtgccagctcttcctggagccccagctgtggtcacagctggctgacttctgccaggtcgggctgggactggagctggtgaagggttatactgaacagtacctgctggaggccgacatctgaggcctctcctctggcggggagggggaaaaagacccgcccccttccgcagtttccccagccagcctctttcctgccatttccgacgctgcgtctcctgggaagtcccctctgactcctgccctcctgcccttaccggcgcaggtccccc

SEQ ID NO: 106269 - DNA, 426 bp, Homo sapiens
tcgctgtttttgctcgtctctagaggttcccgctgtctcgggtacgtcataggtcatgacaagatcggacagcgacaaaatcatggcttaggatcgacaagaagttcaaaaacagctgcgagtctgttacttaaagtttgtgcgacagtgccctgagacctctagataatagatgtttgtttacatgacagaaagaggccaggacattgtgtctcacacgtttattccccgctctttgggaggcaggggcgggtggcatcacctgaggtcaggagttcaagaccagcctggccaacatggtgaaaccctgtctctactaaaaatacaaaattagccaggcatggtggcaggcgcctataatcccagctactcaggaggctgaggcaggagaatcgcttgaacccgggaggtggaggttgcagtgag

SEQ ID NO: 106270 - DNA, 445 bp, Homo sapiens
agagagggcactcatcatgagactacatcaaattccatgctgccatcacagtagaaagcaaaaccaggcagctaacgcccgctcacaccagccctagccagagggcaattgttcattcagttccagcaaccctggccacctggactaaagtgctctagagcattaaataaacttgaaaagcagcctaggacacaactgcagttcctaggcaagttctagttgtcagctgggctcgaagccaggagacatggggggcatgtgacctactgagactccagccagagcaattaagggagtgcttgcaccacccttcccctaaccacaggcaacacagctcgtgacccctttctttcacttgaggaaaggagagaagagtaatgaggactttgtcttgcatcttggttataagctcagccacagtaggatagggaaacagacaaggtca

SEQ ID NO: 106271 - DNA, 236 bp, Homo sapiens
ctggttgtgtcaaaggctggagacttagtgatgagtcaagttatcatgttcaatcctgtaaagctccaagttcccgaggagattatgtccttaaaacaagaaggtaaggacttgtttaaagcttgtccaacacttctgcccactgctaaaagctgaaccctcaaggaaaggtttatgctcaaagtcagtgcccataaagacatgcaaagactttttcccaaaatactgatgcagca

SEQ ID NO: 106272 - DNA, 250 bp, Homo sapiens
ctgggctctgcggtgagtggctgtgtttggggctgtgctggacagcaaggtcacgtactccaccctaggtggcatctctgcatcaccagaagagcaggggtcagaggaggaggaagaggcttggcaggctgagtattcccagccttgcctttcacaccaccactgccatagggagtcaggcccttcaccatctgggcctcagcgtctttgactgtagaaacaaaaatggaggcatgaaaagcctcattca

SEQ ID NO: 106273 - DNA, 131 bp, Homo sapiens
tagagagtgggtcggggggaggtctcactatgttacgcaggctggtcttgaaattcctgctgcaatcaatcttcctgccttgggctcccaatccttgaggtcttaagcctttaagaagaaatctctttact

SEQ ID NO: 106274 - DNA, 363 bp, Homo sapiens
ttttttaattttcaattacttgcagatcaatgcaaggtcctattgcacgcctgagcagtttgcaacttgcatggcatgagactcaccttatgagttcagcagcactcaaactggtctaaacacttgaacaagacagactagtccactgatcagggcttggatgtcatagcagtgtcaaattgctacaagggcttccaactgcttactctttgtttctgtatttttgtcattatacactagtaaacaagcagttctgggacctgaagcaatgctctgttattggccatcacaaatgtaaggttgaatttgccacatgcactgtctagtcaaggttaattattcctagacaactatgacttgcca

SEQ ID NO: 106275 - DNA, 435 bp, Homo sapiens
tagcccggtgtggtggcacacgcctgtggtcccagctacttgggaggctgaggcaggagaattgcttgaacccaggaggtggaggttgcagtgagccgagatcatgccactgcactccagcctgggctgcagagctggaccctgtctcaactaagatgagaatcgtgtactaaagaaaatttaataaataagtctctgaaatgttacagtcgaacagttttcagttttgtatattttaatttttatacttttttttgtcacaatcataaaaggttttaaaagattgtggagatgatggcttctgaggaaagtttaaaagttcctttaaatttgtgatgaaaatgtatttattggcaatctttgtcgtgtttttaaaattctttttgtaaattaaaaaatgtcccaattgaaacaataaaaaaatacagaagagtt

SEQ ID NO: 106276 - DNA, 411 bp, Homo sapiens
tagcaagtgcctgccatagttgatgaataggaggtttctagataactggaattcagcattctagcatgggctgttggtttcccacattctcctgttacccttttccttttctaataatttctttctacttcctggttctttgctccaccttaatcagcatccataatcatctgccttacccagtctgacaattagaggtcttttaagcaactcttctctggacatttacccttggctatttgggtccagaatccagcattctagtgttgctgtcacctactgcctattataccatcttttattccctagagtggatcctctactcatgagtattatatagaatttgtatatttagtgattttaaaatatttttatattttctaattataaaggtaatttgggtttacatag

SEQ ID NO: 106277 - DNA, 434 bp, Homo sapiens
ggcaaaggcactagactctggtgccttcttttccttcgttgtcttaagcccttcttttcctctgccctcatgccctcaccacttcactcttttgaaggtcataatgaacacaaggtcagagatcccttttttggcgccaagcaccctgggcttttttgagatggagtctcactgtgtcacccaggcagtggcgcgaatctgcccactgcagcctccatctccctggttgaagcaattttcctgtctcagcctcctgagtagctgggactacaggtgcaagccacgacacctggctaatttttctgtttttagtagagacggggtttcaccatgctgatcaggctggtctcaaactcctgacctcaaataatccacccaccttggcctcccaaagtgctaggattacaggtgtgagcccctgcgcctggcctttc

SEQ ID NO: 106278 - DNA, 348 bp, Homo sapiens
tgtagggacaaggtctcattatgttgcccagtctggtctcaaactcctgggttcaaacaattctcccaccttggccttccaaagtgctaggattacaggtatgagccaccacacctggcacctgtagctcttgacatccccttctaaggaaccatataactgctttgttctattcattgtctgctgtctgtctctctgggccagaacgtcccctccgtgaggtcagggaccttggcgttgctccctgtcatatctcaagtgcctagaacaaggccccgctgagtatgtgttcaaacagtgtttgatgaatgaatgtaaattcagccacatcactgccctggctgttgt

SEQ ID NO: 106279 - DNA, 115 bp, Homo sapiens
caaggatgaatttttggcttttggtttgaacagctgggtgaatggtattgtttgctgagatagggaatgctggaaaggaactggttgatgggagtggtgggtaatgaagagttcc

SEQ ID NO: 106280 - DNA, 339 bp, Homo sapiens
acccacacctggtgaacaaaacagataaccttaaattgggccatacactgagttacaaaataaaagactaaaatctagtattttcatgtaacagacatgcattaagtgcctatctaatgcaaaggaaacaatccaaaatgacaaccaaaccatagaaggtatataggttcacagtgttgaaaagaacactattaatttgaaaatgtattatgtttcatcataccttaattaatgaaattagttcatttgattgcttttagtcattctaatataacacgaacaatgctaatactaaaattattaatccaatatattcatttctatggctattttcttgat

SEQ ID NO: 106281 - DNA, 396 bp, Homo sapiens
aggaaggatttttttaaaagatacaaaagcagttacagcgaaagactgataaactatactaacatttggaacttctattcaagagtgatcaagaaagtgagaggataagtcataaattggaagaaaacatagcaacccatgtaactctcaaaggactatttcaaaataagtactcctatgaatcaatgagagaaaaatggaaaaatagtcaaaatacatgaaaaggcacgtcacagaaaaggaaaacagaatggtaattaaatagatgaaaaaattgaccaatctcattagttatcagggagatgcaaataaagaccacagtgagaggacattttatgtccactaggtcagcaaaaagtaaaaagcctgatgacaccatgtatttgaaaagatgta

SEQ ID NO: 106282 - DNA, 493 bp, Homo sapiens
gtgatttttatctgcattggatctactttaataaaccccacagcctgaatagcagctactagggtagtgccagtggatgtatatggagactgggctggaatggctgagtgtgtgggtgcgcagctgggagcagccatggcagtaagtagacagccagtaacttctgataaaagggagtatctgaaaactgaaaggccccataggaatgccaacaacatttcagaagttttcaacccaaattaaagacgaaaaaagtgaagtagatgatgcaataaagagttggcaaattcccagctgggcgcggtggctcacacctgtaatcccagcactttggaaggccaaggcgggcggatcacgagcatggtctatagaagaagaaagaattcatcatcatttctaggaatatccccaatcataatcctaagactccagctcaaaacaataactggcaactcttcaataattaattaaaggaaggcacaccctcaattca

SEQ ID NO: 106283 - DNA, 696 bp, Homo sapiens
agagtggaaggagactctgtccatctcacctcatcagctcttccctggctggttggaaaagaccaacccaaaagaggggtgatccaaggagtgagagacacttaccacaaaatgggaccctccccacagaatatagggcttttacctccttctctttctccatagaaaactacatttcctatactagttagagcacaagtagtatagggaatgtagggggtgaggactacattatacaggagtgatagtgatagatccttgtttctcctgatgaaatgttttcatgtacttttggtcagcctatcatgcttctatcatttgttttcctttgtgaagttccagggatatggaagtgggtaggtaacctcttgccaccattctttgttctgtggcaccttgtcatcatatttcaccttgaagtccttgtctcacattatagatcttcactttggtatgcacacaccaaagttagtgtgaggaagtagtcattgaagttattataggacgacattgttcatctgtggtggaagacaggattggtatgggaatggtgatgaaagctaggtgtttgtgagggtttgtaaccctcatggggcactaccacttcccaaaaaattgtctccattattaagaacattttgtttttatgtgtgtgtgtgtatgtgtgtgtgtgtgtttgagacacagtctcactct

SEQ ID NO: 106284 - DNA, 133 bp, Homo sapiens
tgggtggcactgacctgtccccagccgttagggagggagctgcactccgggctcaggtggggtgtggggtctcctggttttatccacacccccatccccactccatctcactgagaagccgccttgccacttc

SEQ ID NO: 106285 - DNA, 262 bp, Homo sapiens
ttatgagcggagtcatgcggttcccaagcactcagcatcctgctagacgcgccgcgcaccgacggaggggacatgggcagagcaatggtggccaggctcgggctggggctgctgctgctggcactgctccttaccattcccctgtattgtttacaaaacaggaacttcttgaatccatctctgtaaataaactcagctggactttttatcaatctctttatctctttctagatgacagtctaaggacacttatctaacaggt

SEQ ID NO: 106286 - DNA, 425 bp, Homo sapiens
cagcatgctgttccctctgggctgtaaaaggcacaggggactctggcctgcggaggccagaaaatgtatcgggaatcccaggaggacggcccgactggggcaaaagctccagcgttctggacaagtgctgagcaatgtgtgacccagacgtacagagaggattagcaggaggtagggactgcaggtagggcctgttatgtccatcattgcatgcgtccataccagggctgcaggccaagccctggaatcccagccctgggtctggcttggggaggagaaccttaaagccctcactgctcttcccctccccccgcccccaagtgtgactccagatggccagggtgtacaccacctttcggccactattgagtgtgccaagggggccgtgagaggccctcacacccttttgttgcaggtaaaaaaaa

SEQ ID NO: 106287 - DNA, 1042 bp, Homo sapiens
  misc_feature (781)..(781): n is a, c, g, or t
  misc_feature (891)..(891): n is a, c, g, or t
  misc_feature (979)..(979): n is a, c, g, or t
  misc_feature (984)..(984): n is a, c, g, or t
  misc_feature (990)..(990): n is a, c, g, or t
ctacagcctgcccgagggccgccacggccgcctggacagccccaccttccacctcaccctgcactatcccacggagcacgtgcagttctgggtgggcagcccgtccaccccagcaggctgggtacgcgagggtgacactgtccagctgctctgccggggggacggcagccccagcccggagtatacgcttttccgccttcaggatgagcaggaggaagtgctgaatgtgaatctcgaggggaacttgaccctggagggagtgacccggggccagagcgggacctatggctgcagagtggaggattacgacgcggcagatgacgtgcagctctccaagacgctggagctgcgcgtggcctatctggaccccctggagctcagcgaggggaaggtgctttccttacctctaaacagcagtgcagtcgtgaactgctccgtgcacggcctgcccacccctgccctacgctggaccaaggactccactcccctgggcgatggccccatgctgtcgctcagttctatcaccttcgattccaatggcacctacgtatgtgaggcctccctgcccacagtcccggtcctcagccgcacccagaacttcacgctgctggtccaaggctcgccagagctaaagacagcggaaatagagcccaaggcagatggcagctggagggaaggagacgaagtcacactcatctgctctgcccgcggcatccagacccaaactcagctggagccaattggggggcagcccgcagagccaatccccggacggcagggnttgggtgagcagtctctgaccctgaaagtgaccagcgccctgagccgcgatggcatctcctgtgaagcctccaaccccacgggaacaagcgcatgtcttccacttcggcncgtgaggcccagactcccaggctggagtggccgtcatggccgggccgtcagcgtgggctcctgctcccgtcggtgctgcttctactgngtgancgcaanggggcccctgtgccgcggggggaaaggggcccgccgcggaccaggtggcatc

SEQ ID NO: 106288 - DNA, 251 bp, Homo sapiens
aagccctggatagaaaactagccagtatttacagtcaaagtgactataatctgaaccaaacatgtaagtcatgggaaaaaataattttaataaaaccccacagtgatgagaataacattgttttctccatttctgcacaagctcacttttttctgtatttttaaatgtacacatgttatatatacataatgtatacataacatatatgataacccggttactgcagtcagcatggagacagcagtacacta

SEQ ID NO: 106289 - DNA, 362 bp, Homo sapiens
atgagcccaatgtctccaaaaggtaaaatcaaagaacaaagccacccttggggctggtctgaatggggtaccacgtcggggtggggcagaaggctggaaaccacaactttgctctccttcttccccaattcccccacccaacccccaaattaagaggagtactgcagtgctcaggaattcccaagagggtggcccttctcccagttgctcggtctgctaccgtccgtccgggacccggcgcgctccgcctcattgttccagcgcgccgcccgccgcccgccgccgggagcccgcgccctgcagagccagcgagttggcggctcccggggaggggggttggggcttggcctgctctagatccc

SEQ ID NO: 106290 - DNA, 421 bp, Homo sapiens
gcaatactaacaggagcataagagaatggcctaagttccagatgtagtctttcttgcctacattttgtgcagtaacccatttttcctctgctaattggaatcagtcacgtgggccagtagactaacctcttttgctgcctgttggtttaatgactaggtagaagtctctagttcagtggaaccattgttgtgtttactggtagaagcaatactcttttgtacactaagcctccaaaccagcagagcttagagttgttgggaggggaagcaaaaatagtgtgaatgagtttatgagaggaaaataaatctcaggacccccaaatcactaagtcaaagagaaaagtcaagctgggaacagcatccagcaaaactgcctcccattttattcctaaataagatagctacaaaaatttaaaaaaaa

SEQ ID NO: 106291 - DNA, 354 bp, Homo sapiens
ccatgctcatcttcccagtattattccagttttagtatatgtgctgcctaagcgagcatggaaattcattttagctgtaagtttgtgctgggcagattatccaataaaagtgcccttgtaatctaatagttctgaaatagccttgtgaatggcagatcccctgactgccctgtctgttctgcacccagcctgccagctttgccttttccactgatgtttttgtgggatgcagtggaccccagaagaacagtacctcagatttcaagcttgtgacccactagctcagcctggccaggttaaattggtgtcttaggttccctgtagaaagggtctgtgattgtcaacctggctgcg

SEQ ID NO: 106292 - DNA, 357 bp, Homo sapiens
aaaaaaatacaaatacatgccaaataatattgtttaataaacaacaacaactttttctataaattttttcggagcatcagttaatctatgctgctgtgttacagtagggtttggcattcctcactgtgtcattgaacatggaaagtatgggccactgttaaagtttggctgcctttaagtggtagtcagctactactgctggagaaatttagcatcatatattgtttacttgttaatatgcattaaatataatgagctaagtacttttaaaccacttttattcaatattgtgggggaaaatttagccccttccagaagaaagagatggtcagaaacagctgctttgtaaagttggca

SEQ ID NO: 106293 - DNA, 887 bp, Homo sapiens
tcatgaagacctgcgaaggcctagtgatcttgagggtcagttgattttgaggttctcagtagcaggagttggtgtattcttagctgcccaagaaccctccccagcatattgctatggcattcttgtcatttgtcctgaagaagggaagagacaggaccatgctgggggaccttatctatctaactcctgttgttgtctagtgcttagaataatacctggatcataataggtatttgataaatagttgttaaatggataagtaattgctgaaggtctacttttgcttgactagctcatgccttcaaagtctataactggactggatgactgttctcttctaaaataggattttgtgaattatttgagtctatttctctgactcagaagtctaagccgggataaactcttcctctcatagcataaattctaccagttccttaaaaatctgtatctttgggtctataactcgcactggccaggaccatttgtattccacgcctcctctcatgcctacactatgagatgatggcttacaaaggcctattgcccacttatacttctcaaagcagccattcagagaggtcagaatttaaagcagagattattttagtggggaggtggtgaggagggttaacaaaattgctgttttattggatctaacttgcttttcagaagcacgtgactggcatatttgggtcattaaatataaagacattctgcttatgaattatgccagcaagatgttttcagatcatacaaaaacaatgtgtgtggtgactgccaagtagtgtttttatgtgtatgtctgtacacaccacccactgatctatgcaaggcagtggtgctttgcactaaatgccacatcgttccttctgggatctcagaac

SEQ ID NO: 106294 - DNA, 682 bp, Homo sapiens
gactaattttcaatgtgaaaataaaatataaaaactgttcttagagttatttctaaacagtactaacatcagaatcgtcccaatcatcagaatgtctgttttttaaaagtcagatttatcaaatcaatcttcggccaacaactttttgagaatgatgtaaacatcacacataggaattccgcattttctaggatttgacattttcagctattgaaaattactatattttgtaaatggacgtaccgctactaaaaacagaatgcttgaaatagaatgtcttttgtttccaaagtcagtacactagagctatgtgaaaataatcataaaagtgaagatattttatggcagagttatgttggggcaaatgctgcagctgcaagcggtgctggcaaatattgtcggagcaagtgggaaaaggattaaagatgtttatatgctgattataatgatctaataaaggggggaaatgatgcaagagagagggaaaattgcaagagcaaagttactgaggtgaaggagattgtgacttggtgtactagtccatatctgggagcactgacaatttctccagggtcacaggaagaaggtatggggctgcagagtctttcattgaacagatatttacggaatgcttaatatgtaccagtagcattctaggcaatatgttggtaaacagcaacaa

SEQ ID NO: 106295 - DNA, 709 bp, Homo sapiens
ctccttgcagccactgggctagactgcccaaaagaccacaactcccatactattagagagaaagacctctagttccttttctctttgttgtatctgttccctttcttatatatcgagaactattatgaacacagtaacaacaatttcttccaagaatcttcacttggatttatagaaggaaaaaccactgggacatggatcagcttccactggtcttttgtatcttatgaaagccctgggtggcctttcagagatcagatctggtcattaatatccctacacttcagactgcaacaatggagggccattttttttttctctttcattcaggtataagtattcaattataaactgcattagtattattagtttttaatctccatgtgaccactctgtgttttataacccagattacctggattaattaaaaatttccacctcacaaatacatgtacaactagacttcaaaccacagacataatggaaaattcctctctaattgctttgcagctgctcattcttgctttgccttgcctcttacctatggggttccagagttatgagatcactcagggtgtggctctcaggttccatcttgtacgcttcttggtatgagtaaataacgtgggtagagtggttctatttacttgtaatgcaacttaggtcacctgtactttgcatctccttccacaaatctgcattagcctaa

SEQ ID NO: 106296 - DNA, 372 bp, Homo sapiens
agtatgggaacatggaagagtatgatattatacaaagtaaaggaagcagtggcatgcatgctataataacaactatggaaaatatgagtgcatcaggccaaggaccaaagggtgttttgcaaaaaataaaaaatagttgtctagggtagcaagttttctcaaaatgattcccaaaattgttgcatagtctttctatgaatgataaactaagaaagaagggaatgactttcttttctttgagaaatcctattttttccaaaaatgtattacaggttgttaaacgctactcggctgagtttcttaaaagattagcctgccccataagggttgtgatggcaggaattctggcttctatttctagccctgttgaca

SEQ ID NO: 106297 - DNA, 318 bp, Homo sapiens
tactacagcgaaataaacactttactttcatggaaaagtttatttaaatgatccaagatacaatctgagagaggaagttcagcaacctgtgctggcttggccagttcccttgccttcctgtagtcccatggcaaggatacatcagagcactcaacaataccgttgaatatgtcagtggagctgccctggctggcagacctggaaagcagcaatttgcattaggtggaactcatcaattttgagtggtcacttagccaccatctacaccagtggtgctcaactttgctgcatgttaagagtcacccgaggggcttttaa

SEQ ID NO: 106298 - DNA, 264 bp, Homo sapiens
tggaaagttgctagattgtaatctgtattgtattttaattctcgtttactctttccactccccccacccctcaccccatccatctttccattgtctagtaaatggtttgcagcagcgacagcacagtttagattccttcttcccctttcaactgtgttgtctgggctctacttggaagtctttcactcagtgatttttcctctctcctctttctggtgatgaatctgctattcaagtgacagtgtctttattctttgtgtcatt

SEQ ID NO: 106299 - DNA, 573 bp, Homo sapiens
agggagtgttcttgggttttgggggttttttttctttttttgttcttgaagtcagtggtttttagtatattcatagacttgtaaaactatcaccacaaatcaattctagaacattattcatcccctccaaaagaaactatagctatcacctcccaattctcttcttcctccagcccttggcaactactgtgctactttctggcactataagattgggctattctagatatttcatataaatatgacttttgtcttttgggactgattctttcacatagtacaatgttttcaaggtctccagctattttttttagggagaaaggaaagcgtattactttgtatattatgcctctgcaacaattccaaggtccttgagaaaatacactaggattttgctttttacaagagagcttgaaatcaagggacatttgagagtagtaaactgggcctgggcatggtggctcctgcctggaatcccagcactttgggaggccaaggcaggtggatcacgtgagcccacaagttcaagaccaggctgggaaacatggcaaaaccctgtcctgtctctaccaa

SEQ ID NO: 106300 - DNA, 377 bp, Homo sapiens
ttaggcaagtaagagagtgacatgagcataagtccattttaggaagaataaactggaaggaatacaagaattggtttggcaaggaaagagtctgaaagaacagtccaaatgctaatataattctctaaacgagatgtattaaggacccaaattagggctgacagcattggaaacaaaaggtacccaatttcccacacatatcaagggtaaactttgtatctgtaaacttcatcagagaaagtactgtcatacctcctcctcatatattctttttgaataaaaaggttttgttttgttactaatactctctaaaatacatatattgtgcatgagtctcttagagaacacaatcaagatagtaaaataagcaattaagg

SEQ ID NO: 106301 - DNA, 514 bp, Homo sapiens
ctggtaatgcatctgaatatttctactgttgtaatgatagggtcttccaaagtatctatggctcctgtgcccaaacctgattccttgctggaagttatcaggggcaagaatgccatcctgtcctggctttggccaaatcacacttctttttcctcaccttctgcagttgacatgtacctcggtcagcaggccaaatggaaattaggtgttcccagctgctttggagctgcactgctttctgtatggcatgtatattcagttggttgcagtttacaatgcattctatgtgtattgtggaagagaaaacactcaggaaagaaggtggtcaagcttcatttacagcatgctttattttgattggtaccctagtgctctgagccttttcttgagcaaagaatagtaacttgggagtgttttactccagacatgacttaaacagaatctggatcttctctgcaatgtctggatttgtaataaaagttctgtctcagtcaagggagtaggaatgcttttc

SEQ ID NO: 106302 - DNA, 3852 bp, Homo sapiens
  misc_feature (579)..(579): n is a, c, g, or t
  misc_feature (1352)..(1352): n is a, c, g, or t
  misc_feature (1548)..(1548): n is a, c, g, or t
  misc_feature (1589)..(1589): n is a, c, g, or t
  misc_feature (2388)..(2388): n is a, c, g, or t
atcagaactcacacttcttcctggcaaagaagtgcccaggacgggagctggggagccagggctgatctaggaggctgggagccaggtgacaggatggccccaaagagagttgtgcagctgtccctgaagatgcctacccatgccgtgtgtgtggtgggagtcgaggcacatgtggacattcacagtgatgtgcccaagggtgccaacagcttcagggtctctggaagctccggggtggaggtcttcatggtctacaaccgcacacgtgtgaaagagcccataggcaaggcccgttggccgctagacactgatgcagacatggtcgtatctgtgggcacagccagtaaggaattaaaggacttcaaggtgagggtctcctactttggggagcaggaagaccaagctctgggccgcagcgtgctttacctcactggcgtcgatatttcccttgaggttgacacaggccgcacaggcaaggtgaagaggagccaaggggacaagaaaacctggcgctggggccctgagggctatggggctatcttgctggtgaactgtgaccgggacaatcacaggtccgcngagcctgacctcacccacagctggctgatgtcgctggctgacctgcaggacatgtccccaatgctgctgagctgcaatggccccgacaagctcttcgacagccacaagcttgtcttgaacgtgcccttttctgattccaaaagagtgagggtcttctgtgccaggggtgggaattctctctcggactacaaacaggtgctggggccccagtgtctgtcctatgaagttgagcgacagccaggggagcaggagatcaagttctatgtggaggggctgaccttccccgatgccgatttcctagggctggtttccctcagtgtcagcctggtggacccggggaccctgcccgaggtgaccctcttcacagacactgtgggcttccgcatggccccctggatcatgacgcccaacactcagcctcctgaggagctgtatgtgtgcagagtgatggacactcatggctccaatgagaaattcctggaggacatgtcttatctgacattgaaagccaactgcaagctgaccatctgccctcaagttgaaaatcgaaatgaccgctggatccaggacgagatggagtttggctacatcgaggcccctcacaaatccttccccgtggtctttgactcccccaggaacaggggcctgaaagatttcccctataagaggatcctgggtcctgactttggatatgttacccgggagatcccgctccctggtccctccagccttgactccttcggcaacctggacgtcagcccgcccgtcacggngggcggcacggaataccccctgggccggatcctcatcgggagcagcttccccaagtccggtgggcggcagatggccagggcagtgcggaacttcctgaaggcacagcaggtgcaggcacccgtggagctctactcggactggctctctgtgggccatgtggacgagtttctgacctttgtgcctacctctgaccanaagggcttccggctgctcctggctagccccagcgcttgccncaaactcttccaagagaagaaagaagagggttatggggaggcagcccagtttgatgggttaaaacaccaggcaaaaagaagcattaatgagatgctggcagacagacacctccagagagacaatcttcatgcacagaaatgcattgactggaaccgtaatgtgctgaagcgggagctgggcctggcagagagtgacatcgtggacattccccagctcttcttcctgaaaaacttctacgcggaagccttcttcccagacatggttaacatggtggtcttaggcaagtacctgggcatccccaagccctacgggcccatcatcaatggccgctgctgcctggaggagaaggtgcagtccctgctggagcctctgggcctgcactgcatcttcattgatgactacttgtcctaccacgagctgcagggggagatccactgtggcaccaacgtgcgcaggaagccctttcccttcaaatggtggaacatggtgccctgagcctgcccccacccgccatcctctctgccctcttgctagggaaccctgccagggtgaaggcaaggaacaaccacctggcctccattctcttgggggagtcttggcactttgcaaacatcctggccaccatgggcaccaggacacagggatggataccacctaccctcgcctctggaatggcctacccaacccgagaagaatgcacctcattcttccctggcctctttcccacccacagcccccagaggctctagatcaacaatgttagcatgttccagaatggctgtgggaggcctagggagntgggccccacttagaattgctcccccttcattctgatgcctccctggggaacaaggataatgactttgcatctgcacctggaacggggcctgggggacctggggtctggtgtgccaggcaccaggctgcctctgctcttggaaaactaggaaaggggatcagaaacatcctctccccgctctaggtttcttctcccaaaggggacccaaggctgtgacacttacctccacccccatccagcacccttcagctgtgtgtggacaaacaaggacagaaaaacccagtgtccaagggccaatttaaatagaaaaaaagacaacaaaattttaatagctgactccgacctcagaagagtgattgctacctttctggaaagactttaattaccagagctggcttctcccagctcagaaatgctgagaagccaacgtgaggcctgaggacacacaaaggatgacggggcaggaggggatgaggtcagggtagcagagtgtgtgacgacggatttgggggcctagaggtgtccgtggttcctgggctgggattttggactctggatttgaagggagctggagcttccagatgtagcaggggtagggggccagatgttagaagagggtgtgtgtgttgggaggaaattaggttatctctgaaggtggagtttaatttcctttaatagtctttaattattccccttcattctgcaggcagtgggaggggaaggcttgcccggtctctctcagcaacccagggaccctgcacatagcttaggtttcatccctgaataaaccgctgtgcaggcccatgtcccctcccacagtagggaagacagctgccacgggaggttaatagcccggagtgaggtcactgagacatgcacaggcaggctggttcagctgggctgcagggcacgggcaggaggaagccagcctaccctcttcccccactgccagtgaggccattgtagggcagttggccctagggcttcggtccatctaggttttcagtggcccctgctgagacctcacactgagccaactactgtcactgttttaaccaacaaaagctagcctggaactgctatggttaaagtgggtgagcgggaacctgaaaatccccttctggaaggttctacagaactctatttgcaagctcctgctttaacctgagcgtcctctgctcaggatcataccccagcctgcactgagtcaagaaggagaaggaggctctgaaggggccgggggtgtgagctggggttgggactcccctgagaaagagctgtgggtaggaagggagtgagcattgcagagatagggctgggggtcggggccacactgagtgtgggaagctctggagttgctgctgggccatcgaggggccctggtgttggctctgagaatgttctgggtgaccagtcacctactttctgatcaataaaaatgtcgacatgcatttcttacaaag

SEQ ID NO: 106303 - DNA, 492 bp, Homo sapiens
gctgctggggcctgcaggtgggatagagcctctgccttcaggaacccacagtctgatggaagagacagagccatgccctcagagagctcccagcctaatgagggagacccggccccacgctggggcaatgacctattttcacagaagcaaatctgagcctctcatctgagaagtctggtgaaatgcattgactggaaccgtaatgtgctgaagcgggagctgggcctggcagagagtgacatcgtggacattccccagctcttcttcctgaaaaacttctacgcggaagccttcttcccagacatggttaacatggtggtcttaggcaagtacctgggcatccccaagccctacgggccacactgagtgtgggaagctctggagttgctgctgggccatcgaggggccctggtgttggctctgagaatgttctgggtgaccagtcacctactttctgatcaataaaaatgtcgacatgcatttcttacaaag

SEQ ID NO: 106304 - DNA, 506 bp, Homo sapiens
atatcttctataacccttcccctatctccagttattttaaaatcttactctgagggttactgtagtgtataaggttgtttgtctctacagtaaatgattccagtccctttaaccatgtgaaaggagacaggaacactagcatctgatcctcgtcatgggaccccagcctgtcttactacaattgccagctggagacagaacagggcctaagggcaaaggcagaatggcatatgaggaagagaaccaaaggtcagtcacagaacagctgtgtcacaggtgagatctaaaggaaaactgcgggactaaaagcaggaagcaaacagaagttcaggagccagaggaatgcaagaacatatcaggaagggggatatgagacaggaatagaatcagggctttggccatgaatgaggccagggtacctcaagctcattcttgttgagagcttgccctgtggtgcttgggtaagcaggaaagagttaggcagtgcaggttgggacagtctttaa

SEQ ID NO: 106305 - DNA, 121 bp, Homo sapiens
tctgtaaagccatcattgcagtgctgtcaaccacaactcttcctgtcagtgtcctcctgggaattggcatgactctcacactctccacatgattctttttttctccacctgctcactcacc

SEQ ID NO: 106306 - DNA, 283 bp, Homo sapiens
aaaattttgggaaacaatcagctgctacaaatgtgctttgtatgaatacttttttaaaaaacaagttttgcttagaaaacacctaactccaaaattatccccaaagtctgcaactttcaagctaaaatgctaaataataaatatcagttatcgttataaaaaagaataaaattcagtaagaaatttaatgtctatcatttccccccaaggttcattaatacactttattaagcatattattatcattcatcttgattctctcacaatattgtttaggaatgat

SEQ ID NO: 106307 - DNA, 462 bp, Homo sapiens
attctcatctcctctatcagatccttctcctcttaactccaaattgggaactcttcatggcttcatgcaaggttcccctgtcctcctctataccaacactgtccaatagaactccctgtgacgatggacatgtcctctttctgcaccatccaatgaagtagccactagctatatatggcgactacgcacttgaaatgtagctcgtgtgactgagggatggaattttaaattttatttatttaatttttttattgagagttttgctctgccacgcaggctggagtgcagtgatgcaatcttggctcactgcaacctctgcctgctgggttcaagtgatcctcctgcctcggccttcggagtagctgggattataagaatgtgccatcatgcctggctaatttttgtattttttatagagactgggtcttgaactcctgacctcaagtggtctgcccaccttgg

SEQ ID NO: 106308 - DNA, 336 bp, Homo sapiens
cgcctgccaccacacctgggtaatttttgtatttttagtagagacagggtttcaccatgttggccgaactggtctcaaactcctgacctcaggtgatctgcctgcctcagcctgccaaagtgctgggatttacaggcatgagccactgtgcccagcctgcagaaacttttcttgttctctttcaagataaatcttacctagttctgtcaccttacatagaaaacccaagtgcacttacagaccaattactacaaataatagaatttaacagtctggctggataaaaggtaatataccgaaggcagttgcattttttatacttacacaaataactag

SEQ ID NO: 106309 - DNA, 142 bp, Homo sapiens
gagatcgcgccactgcactccagcctggacaacagcgtgagactccatctcaaaacaacaacaacaacaatttttagtctttggcgatgccctgaggctcatctcttccacagaggcttggaggatcggccacacgagtggg

SEQ ID NO: 106310 - DNA, 243 bp, Homo sapiens
tactgaatacctgaattttgacaaccaaaaacttggtgaaacaaaatgagataaaatagactttctttctcagggaatctcttctttccttgaggctatattaatctgctcttaatacacagaaaaattaagttcttaaaattatttagagtacctcaaaagtatagcataaaactttataaaagatggacaaatataaataatatagaatatatttcagtctctggtgttttatgttcatca

SEQ ID NO: 106311 - DNA, 1186 bp, Homo sapiens
gttgtctgcagagagtctctttgttttttgtttctttgttttctcctcagtaatttttcttttccttttaagtccgtcttaaccattcttcctccagtttaatctctgagattttatttcatccatcttcttcccctctcccctaaccaaagtgttgtatttcatgcaatgaatcaaatgaacatttttatactttttttctcgcaacagtgaaatgcagactgggcagctgtgttgattaattggcatttaatgttaatgctagaattttattctaggcaatttgttctcctaatggaatattgagtattacctttagtactcaataagaaaagcctgaattataattctatataaaattaatgcattaactaaatgattgtattacagtgatatgtgtgatagattattatttttgtcctctccctcctattttctattttatgaaagatcttgtaattattttatctttctttttttttttttttagacagagtctcactctgtcacccaggctggagtgcaatggcacaatctaggctcactgcaacctctgccacccaggttcaagcacttctctgccccagtctcccaagtagctcccaagtggcacctgccaccacgcctggctaattttttatttttagtagagatggggcttcaccatcttgcccaggctggtcttgaactcctgacctcgtgatccacctgccttggcctcccaaagtgctgtgatctttcttaatgacacagaaaatcccattcaaataaattgtcataaacctttatgaaacttcttttcttgaaacgttcgtttttataagttcaaattataaggtaagatggtattgtttacttgttaaatatattttttcttataataatacgttgatatggtttggctgtgtccccacccaaatctcatcttgaattcccacgtattgtgagagggacctggcgggaggtaatggaatcatggggacaggtctttcttgtacttgttctcatgatagttaataagtgtcatgagatctgatggttctataagggggagtttccctgcacaagctctcttcccttgtctgccgccatgtgagatgtgcctttcaccttccgccatgattgtgaggcctccccagccatatggaactgtaagtccattaaacctctgtcttttgtaaattcc

SEQ ID NO: 106312 - DNA, 185 bp, Homo sapiens
ctggtcctctcatcaatgttctgtcacatatagtgacatttccccccaaaattttactatgaaaattctcaagcaggcaaatggtgaaataattttacagcaaacacccatttacccgctgcttgaattctgagcttaacacttgactatatatatttgtttttttgtttgtttgtttgtttttg

SEQ ID NO: 106313 - DNA, 100 bp, Homo sapiens
ttcgagtcaccagaatggaagtcatcttggacttagtgctgagaactgcctgcagccggccagccagccggcaggagaagctgccgcctacagccaggcg

SEQ ID NO: 106314 - DNA, 416 bp, Homo sapiens
gctgggaacaaatcttccagtctgttgcagatgtcctcagaggaaatcatgtttgtatgaaaattgtgtaaggtaggcaactgatggagcgtcaaacgtgaaagacggttcaatgagtttgcattgcagttaaaaacagaatcgagccatgtgacacatttacagccttgttgtggcatttgcaacaaagatgtccaaaagacgattccagtgcagaacatttaagtttcttaaggcatcacaaaatgagtcacatacagaaataaatattttacacatccatctctgtgatatgaatacttaacactcatatagcacttctattctgcttattaaatacatcacctaatttaattcctacaacaaatgagggtattcgcattatcatcattattctcatttaacagatgagaaac

SEQ ID NO: 106315 - DNA, 385 bp, Homo sapiens
  misc_feature (14)..(14): n is a, c, g, or t
  misc_feature (17)..(17): n is a, c, g, or t
tgagacggagccgnctngtgtctcccaggttggagtgcggtggcgaatctcggctcactgcaagctccgcctcccgggttcacgccattctcctgcctcagcctcccaagtagtgccctctttatttcatactgagatggttctaagtgaaacctatttggacacaaattagtgactctaattagaatagtgtacatcccactcaactcaatttaatggaatatttattggcatgatgtgaagaaactgaaataaactgtatcagagttgtgcccatggggagtttatggtcttattgagaaagaaagacataaaacagcaaataggataacagacataatgagattcttatgttttacagagacttgcagaatgtacttctcta

SEQ ID NO: 106316 - DNA, 205 bp, Homo sapiens
tttccctttaacagggctattgtaggaatccagtgagatcatatcttggaagtgctcagctgagggcctgggcgggataagtactcaaatcatacccttaatatcattattcttttttgagatcaagtttcactcttgtcgcctaggctggagtgcatgttggccaggctggtctcacactcctgacctcaggtgattcacctgt

SEQ ID NO: 106317 - DNA, 697 bp, Homo sapiens
ccacctccaacactaccaccatttttcttaaagccaccatcatctcttccctggactattacaataccttcctaattatctccctgcctctgctattgattctttagggtccgttttccacacagtagccaaagcaatttttaaaaaaattattttaaaatgtgattctcttctttgtggctttccatcacagcctagaaaaaattgaaagatctgtaaggccctaatgacctgtccttcactacgtgtctgaccctatagcctactgttctccccttgtgcggtgtactgcagccacgttggccttcttggtattctttgaatacaagggagcttctacttcaaggcatttacattggctgttgccttagcttagaacgctctttctccagatagccgcagagcccgctctctcacctgactcatgtctctgctcaaatgttaatgatcaagaggcagtccccggcctccctcttaaaattacaacctgtcactctccaatcctttcctcacgattttctcaaaagcacttaccgctaaccaacattatatctaaatttttttttgtctctttttattggaatgtaagtttcatgtaagcaggaactgtatatcactgctataccctcagcatttaaaacaatggctgtacatcatacatactcaataaatatttgttggataaactaaaaaaatt

SEQ ID NO: 106318 - DNA, 137 bp, Homo sapiens
atcgcatttaatacttacctaatgatcttcctaaagttgtcattgtttctggaccataggcctgtagatttttcctctatttcctatagttcctgtgataaaaatagaatgccttattaaagtaaaaaatatcttct

SEQ ID NO: 106319 - DNA, 588 bp, Homo sapiens
gcctggcccagtgctgggtttgccttgttgacgatgcgcttggattgttaaggacaccgatgttcagaacccgggaagagtcatcttaacccacattctcagctgaatatgcagaccccaagcttgcatgtttatatacaccctaatcatgattccaaaacaaaactgttgttcagagttggaggtagctgagtgtggatggaggtattggtagactgccaggagggcagggggtgtggacaaaacagtgttttcatataaagctctgggacttttcttcatttgacttggtctgtcagataaaagttttgtgagactttagatgaagactggaagaagtgaacactttctccggcattctcaattagagcctgccactgtaactgtaatagagtaaaattggaggggcaagaggcatgagaagggattacgcagtcattgtcatttggaggacacacggctcttaggtccagtccagttttcttagtctgattagggaagtagctttgttgaatgcatgaactgagactctttgaggtgccggatttggcaagaaggggagtagctggagggagttggagaagtatg

SEQ ID NO: 106320 - DNA, 346 bp, Homo sapiens
cctccaaccactaaccccatggaccctgcactctggcctcagcaggctgctttttccccagtaagcatatacctggacgctgctgtgtctctgctccagctggtccctcatcctggaatttgacccacagcgccacctgccagccacccacacatcctttcaggccacttcaggtgactccttctgtaacatcacagacagagccaggcctccctatgactacactcccacagcactctctccacgctgtaacagaatctgtggccacgctgacctgactcccaccttcctccttaggaaaaaagactctatgacctctgtgcccaccacagtgcttggcacatgt

SEQ ID NO: 106321 - DNA, 405 bp, Homo sapiens
gtcctttaataaagatttgttaaaccgaactgaatgtgagggggtttaataacccatagccttccagtatacaagaatcagagagaaatttaaaaacagaagaagctgtcaacagagtaaagtaaaaatcaatatgttttctggttttagtgtcctctgctgtgtcaggcaaatagagaaagcatctgttttcacaaacaaaggaggtttgtcagcaaacatacctcatactttaacaaacacaaaggttaaaggttaaaaaaaaaagagtggggcagactcattgaattttacttttgcagtataaatctttgctcagttttgttttctaagttaccacttctctggcttcacttcttttgatgttttatttttgtcatctcctgcacttatgaaagccaaagg

SEQ ID NO: 106322 - DNA, 158 bp, Homo sapiens
gaagacgtgtgcccactcaccccaggtccaggcaaagccctgggacagcagcaccatggaagtctcctggccgcagcattcaaagaggccacaaacacctcccatcgctgcccacccaatttaaccctgctgtggctggcatgtgtgtgcactgcagt

SEQ ID NO: 106323 - DNA, 517 bp, Homo sapiens
gcaagaccataccacagtcccttctcaaaaacacataaactcctttattcataatgaaacagaaagctgggtttcaaaatacaatcccactccctctttatcttctccattatttttaaagattagaaataaggcctgtttttaagaaacagaaaatgtataccaacttctctcaaaccaaaagagaaaatccaaatttgatatatattttctatgttcataatattgagagtaagaacggactgttcatcaacagtatgttatgtgggacaaaaactaaaaaacgtatatcaaaaatacatactgtttgccgacattctttccttaatcataatcaaggagtatgtgcctaaattttactagatgtgagataagctttgtctgatatttcaagattcattcattcaacaaatactttactgagcacgtactataagccaggcccttcaacgaaacatttagattttgtaaactgcacatcaccccccaaaattcccctaaaaaagcttatcattta

SEQ ID NO: 106324 - DNA, 565 bp, Homo sapiens
ctctcttccactccctcctttgctgtgtgatggtcatctagccggtttcctgccttcccagctccaaggttcccttttctctttatttcacctccacactaccacaaaattatcctcctaaatggcaagtcccatgatttttcttccttgacccaaacccctgattattgaaattcaaacaaccttgcccaaattggacctaaactcccattccagttttgttttctatcgtgatgtcaacttcacccacccttcatcccaagcctctgttgcaagtacactgacttacttatctttcttacacctcccttcatgcttccaagcagtctcttccctcttattagaaggctctccccatcatgtctgctggctgaaagcctacctagcttaaaccttctagaggcatgatgttgtagaaaaatgcagcattagccctaaacagatctgatttcaaattccagatatgttactttataactctgtgcctcaagcaacaagaggtcacaccttctctgagcctcagtttgtagttttataaaatgggaatatatatattttgcagagt

SEQ ID NO: 106325 - DNA, 357 bp, Homo sapiens
aagatagcacttgcggaaaaaagtgaattaccattatgtcgaaagtgatacttttttacatttggccttttactgtaaatcgtggaagtgaattttccaagcctgtgacttggaattatatttttcatgctttgtttgcttttccagaggaaatagagtattatatatttgatattttaacataatacaggtatgtactttagttcaaataattaatggttttgttgaaatcaattatttttctttactacacatcagcaaacaatttttctaaacactataaaaattaactttcaggaaccatttggaatggtcagccgtaagccatgcagccatcgtgcttaaattggtttttgt

SEQ ID NO: 106326 - DNA, 377 bp, Homo sapiens
tgtaaagaactactgcatggttttccaaagtggttgccatttgacaatcctaccagcaacgtatgagaattccagttcctccctatcaccaacaatatttggtaatgtcagtctttttaattgtaggttttcaaatccatatgaagtgatatgatatataaccagtgggggaaattgggtgaagagtattctctctatactctctttgcaacttcctgtgaagctacaattattttcaaaataaaaaggttttaacacatattggtttttcaaactggtatgaggtggtatctcattgtaattttcttttgcatttatttgatttctaatgacattgagtactttgtcatgtggttattggccgcttatatatatct

SEQ ID NO: 106327 - DNA, 450 bp, Homo sapiens
ttaaagtataatagtaaaaaaaagaaaaagaaataataagccaaaaaaaagaaagtgttcaaagaattgtgggtacataagaaaaagccaaaaagccatgttaaagggcttcccattagtcaaatcttggaaatttgagtatcaaaataataatgacagtaactgattataactcattgaataaaataagaatccgtaagttcataatgagctacctacacacacatacatacatacatgcctataaaagaagagaaagctccttcttacagtacaaagcaaattaataaatatgaaaagaatgatgaacttgtaaagtcatcatttagcaacgatggttgtaataattgattcagacaagaatcattcatggatgctaaactagaatgtgtaaatttgatgagcaacaggatatctacatagtctcaaagtttctctctcaaatatgta

SEQ ID NO: 106328 - DNA, 727 bp, Homo sapiens
cttgggtggctagggtacaagcacctggaaccacaaggactaagaattggagaggatgattctccaagggaaatatggaatgagtaagtagggtgctgaaccaccccaaaaaagtcctgtctaactacctttgtacaaagtagtgctttctttctctttttttttattttttattttttaaaatttatttatttattatttttttgagacggagtctcgccctgtcgcccaggctggaatgcagtggtgcgacctcggctcactgcaacctccacctcccaggttcaagcgattctcctgccccagcctcccaagtagctgggattacaggtgcgcgccaccacgcccagcttaatttttgtatttttagtggagacagggtttcactatgttggtcaggctggtctcgaagtcttgacctcgtgatccgcccgcctcggcctcccaaagcgctgggattacaggcgtgagccaccacacctggccgattttgttgtctttttctagaagttttttctttgcagaccacctccaaaagtatcctttcgtgatggcccctccatctgagtgatggctttaggtggtgttggatggttagatttctttttttagatcttaggactcccagaactttactaactgttccatatagagaacaaccatggattctgtacaagaataagaggtttttttccctaaactttttattgaggcataaaatgcatac

SEQ ID NO: 106329 - DNA, 260 bp, Homo sapiens
tgaggttattttcttggtattgaatggagttccttatatattttggttattaaccccttatcagatatatagtttacgagtatagtgaaccattctgtatgttctctctctcttttttttttttttggtggagtttcgctcttgttgcccaggctggagtgcaatggcacgatctcagctcactgcaagctctgcctcctgggttcaagggattctcctgcttcagcctcctaagtagctgggattacaggcatgtgcca

SEQ ID NO: 106330 - DNA, 442 bp, Homo sapiens
accccttccttcccctggtacccccatcactgtcatttctgctgcatcacagacatagggttgcaaacaggtgtggttgtgactgagtctgtttctgacactccatcccttctcactctgcaggggaatcttgctggaaggtggctggaatcaggaatgaagccaaagggcagggctgacagggatcatttaaatgcttcaactccaagagattcacacagaatactggacacaattcagaagagtcacccagagggagacaacaatatcactgttacccatgagttgaaaaggcacagccttcaataatctcaggtcaccctaaaaaaggaaagagagattttatgagatgaaaatatgaacatttccattgtgaatgatttactgagaatggtaggggtgtggaagagagacactggggtaatggtatctgagatgcttg

SEQ ID NO: 106331 - DNA, 483 bp, Homo sapiens
gggggccaggccagggggtctccctggggggagcagaggagtgtcggacctcagaagaggctctgggggtctgagccgccaccgggcgctgccttccaggttcagcagggacagagctcagggggaaggcacctcccgtcctggttcaatacatggacccctgaccctgggaaagggactgagccaggggaggcctcaggtcactgcaccatgaagttgtggggagctgcgggggcctctgggctccgagctgggcaggcacagcgtggggaccacgtgctgaggggaagaagcgtgccagggtggacgtctcagtgcacacgcaggaacatgcaacggctgagccagcccagagaggcagcggagcgtgtgcggggcggccggcggagggagggagcatgtgccgtgtgttcgctggagggaggtagcatgtgccgtgtgttcactggaaggaggagagcatgcgctgtgtgttctctgacg

SEQ ID NO: 106332 - DNA, 2335 bp, Homo sapiens
  misc_feature (881)..(881): n is a, c, g, or t
gggggccaggccagggggtctccctggggggagcagaggagtgtcggacctcagaagaggctctgggggtctgagccgccaccgggcgctgccttccaggttcagcagggacagagctcagggggaaggcacctcccgtcctggttcaatacatggacccctgaccctgggaaagggactgagccaggggaggcctcaggtcactgcaccatgaagttgtggggagctgcgggggcctctgggctccgagctgggcaggcacagcgtggggaccacgtgctgaggggaagaagcgtgccagggtggacgtctcagtgcacacgcaggaacatgcaacggctgagccagcccagagaggcagcggagcgtgtgcggggcggccggcggaggagcagcaggatcccaggcgggagcgcacggccttttcggaggcaggttccaggacaatactaagcgtttacatcattgcactatttgatccaggaggtcccactgtggcgtttcatcgataaacgcacatgcgaggtggagggtggctggtgtggaatgtgcccggcagccttcatagcaaaggagaattctagaaccaaccgaagtgcccctctgaagggagctggtcccgtccgttccagccgccgtggagtaacacagccagcagtttccctcctgccacgaaagctcgagactgaaactcaggatgaactgttttcagcccgggtcaccccagccctggggtggaggcccattgaggatggccgagcaggggcgggcatccaggcaggtccagcagtcctggcgggctgaggagaaggaggtcagtgctcagggagacatccgcagagggacctggcaggcagagctccagaagggagggaactgcncagacagaaagctccagaaggctgcctgagggcctctgaggcctccggagtcaggcgccatgcatgtggaaggtggactcttcagcatgggtgggaccctagggggctgtggacccccggcccctgggacccacaggtgggagacaggagttccaaccgccagggggagagtcctggaggatcctgggctgttggcagccacccagcagggcccgtcctgggagtggggctggactcttcctgcaggaaaggctgggctggacctgctctgagaggcttcagaaccagccacacgaagaccaaagtgaagagcaaggagctgaactccacgcagaacacagcgcagcgtcctttaaaggaaggccaaaaacaacccaacaaaaatgccaggtgatcaaagcggtcacagcacaatgtccacatccaacgagaaattgctgctacgtccagacgcagggaaaggtggccgtgggaacgtgagtcagcagcaacaggcccagaagggcagccacggtggacttgtcagacgtggaccctgaaatgacaatcacagcatgatttcaggcaggagcctgaaatggtacagctttggacatcggtttggcaaattcttttagagagaaacacacaccttccctaggacccagcaactccactcctaataaccaagtgaaatggaaggagttgtcctcagcaaaacgtgtgtgcggaagttcacagtcactttctcggtgataaccaagagctggaaaccactgcaacacccaccagcaggtgaacggattaacacactgggctagggccacacaatgagatgctccgtggcaacacaaaatgaaccgtggacacacactgcacggcggatgaatatgcagacatcaggccacgtgaagggagccaggccccgaggcgccacgctttgtgattcagggtggtccctctgcgcccaagacccggctgcctcctcctcttcctggctgcagggagtgcttgtgtctgaagaacgccaggctggtgtccccagagggcggctggaggggctcagaaaccattttcaccttctgtctcctccatgtctgcactgtttgggaaagaaagcacgcagccaaagagcgcaaagaggctcagaggaggcccgggtgccctggagagacgctgcgtcctgacgacacagcatccctgtcccgcagcggagatttcccagatgaaggattccccggcgggagacagggccctgcacacaggtcctctgccacgctgctcaccatgcctgtgtgttatctccccatgaaaagtcacctaggccgagcatggtggctcacgcctgtaatcccagcactttgggaggtggaggcgtgcggatcatctgagatcaggagtttgagaccatcctgagtaacatggtgaaaccccgtctctaggaagaatacaaaaattaactgggaaaaaaatca

SEQ ID NO: 106333 - DNA, 2176 bp, Homo sapiens
  misc_feature (881)..(881): n is a, c, g, or t
gggggccaggccagggggtctccctggggggagcagaggagtgtcggacctcagaagaggctctgggggtctgagccgccaccgggcgctgccttccaggttcagcagggacagagctcagggggaaggcacctcccgtcctggttcaatacatggacccctgaccctgggaaagggactgagccaggggaggcctcaggtcactgcaccatgaagttgtggggagctgcgggggcctctgggctccgagctgggcaggcacagcgtggggaccacgtgctgaggggaagaagcgtgccagggtggacgtctcagtgcacacgcaggaacatgcaacggctgagccagcccagagaggcagcggagcgtgtgcggggcggccggcggaggagcagcaggatcccaggcgggagcgcacggccttttcggaggcaggttccaggacaatactaagcgtttacatcattgcactatttgatccaggaggtcccactgtggcgtttcatcgataaacgcacatgcgaggtggagggtggctggtgtggaatgtgcccggcagccttcatagcaaaggagaattctagaaccaaccgaagtgcccctctgaagggagctggtcccgtccgttccagccgccgtggagtaacacagccagcagtttccctcctgccacgaaagctcgagactgaaactcaggatgaactgttttcagcccgggtcaccccagccctggggtggaggcccattgaggatggccgagcaggggcgggcatccaggcaggtccagcagtcctggcgggctgaggagaaggaggtcagtgctcagggagacatccgcagagggacctggcaggcagagctccagaagggagggaactgcncagacagaaagctccagaaggctgcctgagggcctctgaggcctccggagtcaggcgccatgcatgtggaaggtggactcttcagcatgggtgggaccctagggggctgtggacccccggcccctgggacccacaggtgggagacaggagttccaaccgccagggggagagtcctggaggatcctgggctgttggcagccacccagcagggcccgtcctgggagtggggctggactcttcctgcaggaaaggctgggctggacctgctctgagaggcttcagaaccagccacacgaagaccaaagtgaagagcaaggagctgaactccacgcagaacacagcgcagcgtcctttaaaggaaggccaaaaacaacccaacaaaaatgccaggtgatcaaagcggtcacagcacaatgtccacatccaacgagaaattgctgctacgtccagacgcagggaaaggtggccgtgggaacgtgagtcagcagcaacaggcccagaagggcagccacggtggacttgtcagacgtggaccctgaaatgacaatcacagcatgatttcaggcaggagcctgaaatggtacagctttggacatcggtttggcaaattcttttagagagaaacacacaccttccctaggacccagcaactccactcctaataaccaagtgaaatggaaggagttgtcctcagcaaaacgtgtgtgcggaagttcacagtcactttctcggtgataaccaagagctggaaaccactgcaacacccaccagcaggtgaacggattaacacactgggctagggccacacaatgagatgctccgtggcaacacaaaatgaaccgtggacacacactgcacggcggatgaatatgcagacatcaggccacgtgaagggagccaggccccgaggcgccacgctttgtgattcaggaaagaaagcacgcagccaaagagcgcaaagaggctcagaggaggcccgggtgccctggagagacgctgcgtcctgacgacacagcatccctgtcccgcagcggagatttcccagatgaaggattccccggcgggagacagggccctgcacacaggtcctctgccacgctgctcaccatgcctgtgtgttatctccccatgaaaagtcacctaggccgagcatggtggctcacgcctgtaatcccagcactttgggaggtggaggcgtgcggatcatctgagatcaggagtttgagaccatcctgagtaacatggtgaaaccccgtctctaggaagaatacaaaaattaactgggaaaaaaatca

SEQ ID NO: 106334 - DNA, 2633 bp, Homo sapiens
  misc_feature (881)..(881): n is a, c, g, or t
gggggccaggccagggggtctccctggggggagcagaggagtgtcggacctcagaagaggctctgggggtctgagccgccaccgggcgctgccttccaggttcagcagggacagagctcagggggaaggcacctcccgtcctggttcaatacatggacccctgaccctgggaaagggactgagccaggggaggcctcaggtcactgcaccatgaagttgtggggagctgcgggggcctctgggctccgagctgggcaggcacagcgtggggaccacgtgctgaggggaagaagcgtgccagggtggacgtctcagtgcacacgcaggaacatgcaacggctgagccagcccagagaggcagcggagcgtgtgcggggcggccggcggaggagcagcaggatcccaggcgggagcgcacggccttttcggaggcaggttccaggacaatactaagcgtttacatcattgcactatttgatccaggaggtcccactgtggcgtttcatcgataaacgcacatgcgaggtggagggtggctggtgtggaatgtgcccggcagccttcatagcaaaggagaattctagaaccaaccgaagtgcccctctgaagggagctggtcccgtccgttccagccgccgtggagtaacacagccagcagtttccctcctgccacgaaagctcgagactgaaactcaggatgaactgttttcagcccgggtcaccccagccctggggtggaggcccattgaggatggccgagcaggggcgggcatccaggcaggtccagcagtcctggcgggctgaggagaaggaggtcagtgctcagggagacatccgcagagggacctggcaggcagagctccagaagggagggaactgcncagacagaaagctccagaaggctgcctgagggcctctgaggcctccggagtcaggcgccatgcatgtggaaggtggactcttcagcatgggtgggaccctagggggctgtggacccccggcccctgggacccacaggtgggagacaggagttccaaccgccagggggagagtcctggaggatcctgggctgttggcagccacccagcagggcccgtcctgggagtggggctggactcttcctgcaggaaaggctgggctggacctgctctgagaggcttcagaaccagccacacgaagaccaaagtgaagagcaaggagctgaactccacgcagaacacagcgcagcgtcctttaaaggaaggccaaaaacaacccaacaaaaatgccaggtgatcaaagcggtcacagcacaatgtccacatccaacgagaaattgctgctacgtccagacgcagggaaaggtggccgtgggaacgtgagtcagcagcaacaggcccagaagggcagccacggtggacttgtcagacgtggaccctgaaatgacaatcacagcatgatttcaggcaggagcctgaaatggtacagctttggacatcggtttggcaaattcttttagagagaaacacacaccttccctaggacccagcaactccactcctaataaccaagtgaaatggaaggagttgtcctcagcaaaacgtgtgtgcggaagttcacagtcactttctcggtgataaccaagagctggaaaccactgcaacacccaccagcaggtgaacggattaacacactgggctagggccacacaatgagatgctccgtggcaacacaaaatgaaccgtggacacacactgcacggcggatgaatatgcagacatcaggccacgtgaagggagccaggccccgaggcgccacgctttgtgattcagggtggtccctctgcgcccaagacccggctgcctcctcctcttcctggctgcagggagtgcttgtgtctgaagaacgccaggctggtgtccccagagggcggctggaggggctcagaaaccattttcaccttctgtctcctccatgtctgcactgtttgggtttgtacccgcctgtgtcgcttttgcacgggaagtgagatggagagacacgtgaaccaccattgctggggttccagcatggggccccaggggacccatggctttcccagaaggaagctctgccattggacagccggtctcaggctgctgcacaggcccctccccgccctcagccctggcctgcgggaatcaggaaagggtggggtccagctgcattgcgaatggactaaagccactgatttgcacacttgccaatggctgaaatggtcaataaaacgtcatgtaccttttgccacaggaaagaaagcacgcagccaaagagcgcaaagaggctcagaggaggcccgggtgccctggagagacgctgcgtcctgacgacacagcatccctgtcccgcagcggagatttcccagatgaaggattccccggcgggagacagggccctgcacacaggtcctctgccacgctgctcaccatgcctgtgtgttatctccccatgaaaagtcacctaggccgagcatggtggctcacgcctgtaatcccagcactttgggaggtggaggcgtgcggatcatctgagatcaggagtttgagaccatcctgagtaacatggtgaaaccccgtctctaggaagaatacaaaaattaactgggaaaaaaatca

SEQ ID NO: 106335 - DNA, 373 bp, Homo sapiens
gatactgatgctggaaaaaatggcctggggagtaatgggtagatacatggtaactgaaactatagggataactgtaacttagaacaatgtgaaggctgagaagagcaactggccaactcagaaacaccactgtttatgggacaggcagagaatacacaaaaggggatggcatagtggaagtaatgggacagagtttcttgagaaagtattattgtcactggttactttacaagagcaagtttagtgatatgaaaaagtagaaattaaactacagtgggataaagagtaaataagagaaaaaggattttagggccccacaagggcccttgtcattgatacagacaactctattttctcatctgcaaaactgaga

SEQ ID NO: 106336 - DNA, 623 bp, Homo sapiens
caatttggagaaggaagtactttaaaagaaaagttaaaaggcagacatagatagcatgaagcctaattgcaagatctttttcaaacatattagttttaggaaatagcacctgaatttaagtcccttaaaattgtctatgtcttcacgtccaagtctctatatttgcagggctgtgtacaatctagactgaacatgcttgacctaaaaacagaagtaatacctggggcaaagcacgatgtgcaccacagtcttctctctttagtgtgttaagataaagttgattcccagagtagcctgccatcactaactctgagggatggtgggctaattttgatagaaggagcagaggtggtagttaggaggaaggtgactcatcatcattgtatcagcaggcattgatgactggaaatatcagggggcacagcctgaaagagaatggcttaattggaattgatagtgggaacttggaaatcaatacatatgcactgaacagaaaatggtatgctataatctactatacactgtatgtgaaacccaagctccaaatttttcggcccatgcaatgtccagtaaaatttctcttagttacattataattgcaatgtacatgtatttgaggaaaa

SEQ ID NO: 106337 - DNA, 239 bp, Homo sapiens
  misc_feature (38)..(38): n is a, c, g, or t
tctagaggatcccagttctggtccccaactgtcatatntttgttataaattttattggaacacaaaaaaaaaaaaaagaaaacaaaaacaaaacaaaagaaagcaaaaggaggaagtttgattttgtcatcccatacttaacatgtaagtatatcctcaggctaacttatttttcaaaaatgtgatcatgctacacatattatgacttgatctttttatttatgtggtttttaaatatc

SEQ ID NO: 106338 - DNA, 651 bp, Homo sapiens
cagcaggtgactttaagaggaagctggttgggcatgggggcttacacctgtaatcccagcactttggggggctgaggcaggcagatcacttgaggtcaggagttcaagaccagcctggccaacatggtgaaacctcatctctactaaaaatacaaaaattagccagatgtggtggtgggtgcctataatccaagctacttgggaggctgaggcaggagaatcacttaaaactcaggaggcaggggtttcactgagccaagatggtgccactgcactccagcctgggtgatagagtgagactcttgtctcaaaaacaaaaacaaaaacaaacaaaaagccactgctcatttaccgtttctaaaatcctaggactcttaagaattatactaaatttaccatatctgtgttctgtaaataaaatagcaaagcctggatgctaacacccctgtttacagcatggtttactgattattttcagcttactgttgagacctactgctcagaaaccagattcctttcaaaatattactattcattgacaatgcactttgtcgtccagaagttctaatggagatatacattaggagagtaatgttgttttcatgtatggtaactgatatgttttggctctgtgtcccaaatctcatcttg

SEQ ID NO: 106339 - DNA, 341 bp, Homo sapiens
tgaaatggcaaatttttaattgaacctgctgccagcctcatacactgtcctgtttgtcatttatttcatgccaagcctgcccatttcctcccttagtactctctcctaacccctggaaatttgctctaccgacgatctctcaaaaggtcaccagtgcagcctgggcaacacggtaaaaccctgtctctacgaaaaatacaaaaaattagccaggcatggtggtgcacacctgtagtcccagctactcgggaggctgaggcaggaggattgcttgagcccaggaggtcaaggctgcagtgagccaagatcatgccactgcactccagcctggggggaaacag

SEQ ID NO: 106340 - DNA, 363 bp, Homo sapiens
accccccgccccaagcaatttgcatcccaaagcaagctagacttaatttagaaggacttttctataatgttttcatctttcagtagttgcatatatatatacgtttaacattttagaccatatcatagacgttcttctgtctttgcatctaccactacattttagaatgatgattcctttttctagcaattgatattttataggtacttaagagttaacgggtaagaattagcttcttttgaatctaagccttagaatcttaggatgttttaggtagatgtgtttagattagccagtattctaaaatagtaaagtcctaggagagaattgtcccttgttttgtttttcaaactcagttttccc

SEQ ID NO: 106341 - DNA, 583 bp, Homo sapiens
gaaagatttgcctaaagtgttgatattgaactacgcctgtttacctttaatcttcttttcttcccttgcagtatctcatcagggttgcccccagatgggaactaagaatgaattttggtaacttcctagggatggttgcatgaccttgtttttttctatgtgttctttaagcagtgagttctaggatgtatattcaggggtatcatagtatgtttccccttttgtggaaaaagtaaaccccttctaggcatagactcagacacaagaaaacagctagtacgactgtttacatgatgtctgccttctactgagcagttgtcacctttcccattgcagtgttgccttaacccatctggtgagtgccattggtgttaccaaattcttaaagaccttgtttggactttggcctttaaaagtggccagttctactcttcttagactgattatgcaatttttaaaattgcttttcactctgtactttttccctgtctctaacttgatgcttactcttggctttttaacaattaggggaactttcgctaaatgacaatgaagatacacacacccacacacaaaaaaaaaa

SEQ ID NO: 106342 - DNA, 371 bp, Homo sapiens
caggaatagagtgaatgaagtgcagtgaaaaggaagaatagcgagaaaggtgggcaggggccagagcacccaggccatggtaaacaatttggatttattcaaaacgcaatgtgaaacacaggtcattttggctttacctgtgttcacttggcaaatcaactctatttaattggcttcccaaaagccaaaacaaagttttctaaaatcagtaacctaaaggagatctttggctctgtggaaaaccacagggcgatgaacatttcagaagggaaccgtgatggttttggagtctgagctcctccctcccccagttccccagcacagctagcgctagctagctcccaagcaggccaattcagagacctgtaccc

SEQ ID NO: 106343 - DNA, 346 bp, Homo sapiens
tgagacagaatctcactctgttgcccagactggagtacagtggtgcaatcacagctcactgcagcctcacacttcccgggcccaggtgatcctcccatctatgcctcccacgtagctaggatgtagtcccaagctacaagtgcatgccaccatgctcggctaatctttgcaatttttttgtagagacagggtctccctgtgttgtccaggctggtcttgaactcctgggctcaagtgacctgcctgcctcagcctcccaaagtgctaggattacaggtgtgagccactgcgcccggccaataaagggttttttaacttcagcaattatattttcaatctctaggta

SEQ ID NO: 106344 - DNA, 355 bp, Homo sapiens
agaggatataggataaataccttttttcttgggagcaaagaatatgtagttgaaactcattaagggcaagcaaggtctgagtgtctttgaatttttgttcctggaatgatgccaggaatgtatagcagatctctgtacatgaataaatgaaaaaacctttctttgcatttgcatatactgttgctagcattatacttggttctgaaaagtaatagttaaatgagaaatggtctcagtggcacatgcctgtgatcctagcactttgggaggcggagagaggccaagacgggtggatctcttgagtccaggagtttgagaccagcctgggtaatatagtgagactcccctctctacc

SEQ ID NO: 106345 - DNA, 219 bp, Homo sapiens
gtttctaaagcatccagttggagaatggataaacaaagaatagatttgcctcctgtgcatggtgaaaatacagaggtccagtcttccagctggaagaaaaccttctgtttgtcctcttgcctgtccagtagctgctagtttcaggatcaaagaaggcaggttgtagtgctaaggagctgtgagcaggaaggtcatcattcactgaaaaaaaaaaaaaaa

SEQ ID NO: 106346 - DNA, 681 bp, Homo sapiens
aggcggggctaggcgtggccgacctcacactctccttgggcaggacctgctgcagctgctctcggggttggaggggaggttcctaggtcaatggagttgtgtacctaggaggattatggctgcctctgctgagtcatgcagattgtcaggaagtgtgagaaagccagcagtcaccggcctcacccagccaccctgccgccattaacagcactaggcaggcagtgcgcagagctgagaacttgccccaggttacccgcctcccagctgctaaacaaaagggaggcttttcagctggttcaaattgttacaaagttcagctagagatttgcttttacctgcggcgttttccccataccactggctgccctcccgaagaattcctgtgatgccaggcaggaatggcctggttggagaccagctagctcccagggcctttcccgctgcttcctctacccctgtatttcgctgggctctctaaatggattcagctccagaggaggaaaaccttgagaccctgagactttcagaaacttcttcacagttaccaaagctgaaaatgttcgtggcagggagtgggacatccggcttcagagcaggaactttcattgcaccagtgatgaaaaagagaatgaaatgtgggtgacgttgagaaaggcaagaagatttttgttcagaagtgtg

SEQ ID NO: 106347 - DNA, 1206 bp, Homo sapiens
aggcggggctaggcgtggccgacctcacactctccttgggcaggacctgctgcagctgctctcggggttggaggggaggttcctaggtcaatggagttgtgtacctaggaggattatggctgcctctgctgagtcatgcagattgtcaggaagtgtgagaaagccagcagtcaccggcctcacccagccaccctgccgccattaacagcactaggcaggcagtgcgcagagctgagaacttgccccaggttacccgcctcccagctgctaaacaaaagggaggcttttcagctggttcaaattgttacaaagttcagctagagatttgcttttacctgcggcgttttccccataccactggctgccctcccgaagaattcctgtgatgccaggcaggaatggcctggttggagaccagctagctcccagggcctttcccgctgcttcctctacccctgtatttcgctgggctctctaaatggattcagctccagaggaggaaaaccttgagaccctgagactttcagaaacttcttcacagttaccaaagctgagtcttgctctgttgccaagctggagtgtaatggcacgatctcggctcactgcaacttcctcctcctgagttcaagtgattcttctgcctcagcctcctgagtagctgggattacaagagtgtgccatcatgcccggctaattttttgtattttagtatagatggggtttcaccatgttggccaggatggtctcaatctcttgacctcgtgatctgcccgcctcggcctcccaaaatgccgggattacaggcgtgggacacagcgcccggctacatcttcttaattcttaatggtaccttttgatgaagtcacattcgtctttcatggatcgtgtttttgacctgccctgagaaatctcaaatatgtgatcacaatttttctcctgtgctttcttctagaaagtgtacaagcttcagcctttcatttctaggtttaatccagtgaggattacattattttccaatggcatatgggtccaggtccaaggtgtccttcatcattcatgattacttaatgttacatcaatgtatttggccgatccattcaatggtcctggactacttgccgacacagctatcagtttccacaacaattcttggctcttgggcaactccgttcccctattcggcccaccacattcatatagtgccct

SEQ ID NO: 106348 - DNA, 526 bp, Homo sapiens
gcgagcgttcgaaccgggaaaacatttgttcagctgtcaatcaaagtaacgtggggctgggagaatcggcggctgctgctgttgctgctgccctggctgcatcttcagaattaggtgttggtggtggtggtggtggtggcggcaaaataaagagggtggagggagcggtgagcctgggggctggtcaaaagatcttcttccgagtctcgtcctcccgcccacccgtctcccaacccagacaccttcggcccctcgctccgcagccgcgccaggaatgcggactaattagggtccaatgtctccttaaagagacaagctcggccttgtgtaacgcgccgaaacccctgttgagacaagagggggaggatcacgctgatcttacttcgttcggttcacatcaattttacgcgccgctggagccggcataattttccgtgtgaacgcgactcggtccccgttcttgtttagagccagaaatggagtcgcgagatgctggctggggccggggccgcggggtgggcgggga

SEQ ID NO: 106349 - DNA, 296 bp, Homo sapiens
atgaaagaaggaagagaataacatgttgaaagacaaagttgtcagaaatgggaagtcaagaacttttgagttctaagctctgagggaaaaatctacttcaagactgacatttctataataggttcccactcttaagattttacaataagaaaacatacacatgcaccaaaaacattttagggccgtagagatatcacaaataggatgaggattttccagcttgacagatcaggactcacactttcaatctgatttttactagccatgtgatcttgggctaccgacttaacctctct

SEQ ID NO: 106350 - DNA, 497 bp, Homo sapiens
ctgagcccctaacgctggggtccctgataaccgcggcagggtcagactgaactgaattacaggatgcctggctggtgtctgcagaggactggcgaattgttggtgtggaaaacccacacatttggtgcctgatgtgtagtgtgggtggaaatatccccggagcgacagggttggcacagctgcagactctaagtgccagctactgtcactctcaaagcctcatttaagctgtcactcattcaacaagccgctcatgacagccggctaccttgcaggtgccaagggcacagtgaggaagtcctgaccctgccctccaggagaggacagcccctctcccttcaccatgagcacaaatacctgcctgctcccagagctccccagtcttcagcaggtcgcacaggagggaccttacaaggtgctccccatcctgactacaaaagatgtgtacagaaggggccccagtggacggctgaaaactcaacacggggccagagcgg

SEQ ID NO: 106351 - DNA, 432 bp, Homo sapiens
aggtgcagcaaaccaccacggtacacatttacctatgtaacaaacctgcacgtcctgcacatgtatcccggaacttaaaattaaattaaattaaatttaaagaatagcttaaaaaaccaaaaacaaaccaaaaaatgccttttaaaaaatttaatttgtttgaaacaggatttaaaaagttctgtggacatggtggctcacacctgtaatcccagcactttgagaggccaaggcaggcggatcacgaggcgaggagttcgagaccagcctggccaacatggtgaaaccctgtctctactaaaaatacaaaaattagctgggcgtggtggcgggcacctgtaatcccagctgctcgggaagctgacgcaggagaatcatttgaatcctggaggtggaggaggttgcagtgagccgagatcgtgccattgcact

SEQ ID NO: 106352 - DNA, 390 bp, Homo sapiens
aaatcccacatatgatccaagagttttcaatagagtacacacattcacacaaaaatggcctttcaccctctgcagctttatctgtaattccttcatctgggtttaactctttcagaagctctgtggagcatctcatataggtagtggaaacatatgaagagcctagatggcttgtcactcctcagtgacacagacaggggagtaacacaaattggagcagggtaaacaatccatttggaaatttcatggccaatatgactttaaccataggtaagtccttcttaaataatcctcaaattacaaaatgaaatttataagaaactttaaaggtagaatttgaccagtaacagagagtgtagttttttcttttattctagcttttaatgaaag

SEQ ID NO: 106353 - DNA, 647 bp, Homo sapiens
aaacatttctgcagagacaaggatgaacttattttcctcttaagattggtctactagtctgatcatctgggattgaccatgcaagttttaatttgttttctattacttttatggatttaaaacatttttgtttgaaaatgttagtctttaaagataaagccaaaaatctgtttaaaaatacctgcttacagaatgaccaaaaagtagatgttttcatatttattaagttttcagacacgtcctcaacgaggtgctgctcacttcagggaaagatggccagttcaaactgctgatgaaaagtctgcaaccagcaagaccactgctgccagtgtgtcctgagggagcttgcatctgtttgactttacatatacatacttaggtttgtccatcagttgtatcctcttgaaggaggtatgtgagttcatggttttaagcatataaatttaaacgttaaaagaagaaatcagaagtagcccgtttgagtcttacatgagtgaaatgtgttgggtttcagcagcagaatatatagaaggaaatgaaacaatttttattaaagagcatagtttggaataaagaaagaatatgtgcacctagatgaacgaattagaactctgcctgccctttagggtttggtaatgttaccagat

SEQ ID NO: 106354 - DNA, 422 bp, Homo sapiens
gtgtttcatctggggtttttaaatattttaatgaatcaaatgtaggcacgtttagacgcttaatgggcagagccagtggagaggagaagctgatgttgcaagccaggaggtaatagaacaaggacctacaggagggaatccagagaccagctggccatatcttgtgtaacgcagcttgagcgctgtacaaccacaaggacactttccacattatagcttatgtgaacaaacagtgctaggcaggacaccttctgcatggtggagagagaaggtcataagcaatagaagaattagccttggccaatgaggaacagttggaaaagagtaaggggcacagatacaaaatactggtcctctttaaaatcagagtcaagtggctaggtgacaagagctagtgtcaatgttattttgccagattacct

SEQ ID NO: 106355 - DNA, 383 bp, Homo sapiens
cagttgcgtgctacttcaaaataaatgaatccagcataagggccattgtaaaaaaagaattcatgaagccattgctgaaggcacaccagcagatgcaaaaattgtgcacgttttgtgaaatagttttttatctcatgttgaaaatgtagcttttataggggtacaggattgctataaagaaaggcatccctataaactttaataagtttcaagaaaaagcaaagtcattatacaacttaaaacaaatggaaggcgaaggatctaaagctgaagaatataatgccagccacggatggcttgataattttagaaagagttttggctttaaaaacgtcacgataacaggagaagcagcttctgccaaccaagaggcagcagacgac

SEQ ID NO: 106356 - DNA, 220 bp, Homo sapiens
tgccttcccccaacagcccaaaagaagatatatctccgttgcacagataaggaaactacagctcaggcaaaatgccaaaagtcactgatagcaagtgatggagccaggatgaggttgcacatcctccttcacacgctctgctgccttccatcacgtggactttcttcagcaataatatcctctcacatcactaccaaagggatacagaatctggcctcag

SEQ ID NO: 106357 - DNA, 434 bp, Homo sapiens
gaaggaggaaggggagggaaaggtttactctctgtaataatattgttgacaactccaggcttttgtgactgggcagagagagcgaggctttaagagcagcagcgggggcttcctagttgcctcctgaccatgccgtcagaatgcttgtgacatggttctttttggttcccttaagtggttgtttcaagaagacgatgggcatgtgggataaaaggactcctacagagctggcaagggagccccgttagtgtcctgtgtcctggccgtgtcaggtggtgctggctgcagcagccactcccattctgtcacctgtttattcaacaatgtgcactgagggccttctaagtgctgggaacttagaagtgctcaaggtgcatcaatgagcaaaacaaagatccctgctagtggagaggaaactttaaggaggtgaaatg

SEQ ID NO: 106358 - DNA, 382 bp, Homo sapiens
tattcaactgcacacaaacgattctccagaatagatcatatattaaaccacaaaataagccctaacaaattgaagaagattgaaatcatatcaagtatctttcctgaccacaatggtctaaaattagaattcaataataggaaaaatatcagaaaaagtcacaaatatgtgaaaattgaacaatgtgttcctaaacaaccaattggtcaatgaataaatcaaaagagaattttttttaatcttgagcagaaaatggaaacacaacatttaaaacttatgggatgcataaaaataacagtcctaagagagaagattataataataaattcctacatcaaaaaagaagaaagatcccaaataagctaacattaaaccttagaga

SEQ ID NO: 106359 - DNA, 580 bp, Homo sapiens
tgatgatggtttggtccaggatgctagcaatatagatgttaagaaatcactggattctggatatattttaaagtcgtttgcaatagcatttcttgatagattctattgaaagccaaagagcaagaataatgctaaggtcgttggcttgagcaacttggagtttgaaattcccatcaactaacatagggagggctgtggatggagcaaattttgagagttaatcagaagttcagctttgaacatatttagtttggattgtctattaaactcccaagtgtagatgttgaatggaatttgtatatatgagtgtgtcgtttgtaagagaagactgaactaaaaatacaaatacgaaagttagtggtatacagatatttaaaaccaagagaatggaaatgagcatagacagaagtgggtcagtgttttctggattgccccaacaagaaaagttcatgccaaagagtaagaataagaaaaggaacctgagccatcactgcagtagtaggaaaaccaagattgcatgttaacttggaaaccaagttacgaaagtatttcaagaaggaggctatgattgacagtgaca

SEQ ID NO: 106360 - DNA, 252 bp, Homo sapiens
cctcccaaagtgctgggattacaggtgtgagccactgtacctggcctccaaaactttttttgacacaaggtcttgctctgtcacccagactggagtacagtgacatgatcatggctcactgcagcctcaacctccctggttcttgctcccacctcagcctcctgagcagctgggaccaaaggcacaggtcaccacactaggctaatgtttttattttttgtagactgggtctccctacattcccaatactgg

SEQ ID NO: 106361 - DNA, 157 bp, Homo sapiens
tgtaggttctgctgtgcatgtaggttcccctgtgtgtacgttcccctaagcatgtaggttcccccgtgtgtaggttctcccatgtgtgcgggttcccctgtgtgtgcagcttcccctgtgcttgcaggttcccctgtgtgtaggttcccctgggtgt

SEQ ID NO: 106362 - DNA, 624 bp, Homo sapiens
actctccatatttctacccacattctgatcatgaccacttagtaatcactataaagactgaagctgttgctacagtttttctcttattctgagccctccctagaattgcccttaatagtcaattctggatactgtagagtttctacagtattcacttcagaactgtttcagcctctacccattacccagtttgaaagctacttccacttttttaggtatttggcatagtaacaccccactcttggtaccaatttctgtcttggtctgtttgtgctgctgtaaaaaaatatctgagccttggtggtttagaaacactgaaattagttttgtcacagttctggaggctgtgaagtccaagaccaaggcattggcaggttcatttgtctggtgaggactgctctcttcatccaagatggcactttgatgctgcatcctccagaggggtggaatgctaggtcctcaaatagcagaaggcagaagttcaagctagctgaccactgtgtgaaacctcttttataagggccttaatcctatttgtgatggaggagacctggtggcctaatcatctcttaaaggctccacttaatactatcattaacaacacctgaattttttttttttttt

SEQ ID NO: 106363 - DNA, 334 bp, Homo sapiens
gtttaagctttgtgatgcaggctgccgtcgcttgaccttgagtagcatgggcacagcttatacttaagcaggcatcgctgtggcgagaattaggctataaaagaaaggacgctgtggtggttcctcaaaaaacttgaacagaattaccaattccatttctaggcatacactcaaaagtgacagcagggactcagatacttatacacccatcttcatggcaagactactcataaatgccacaaggtggataaacaaaacatgatatatatgtgcaacagaaaattattcagccttaaaaaggaataaaattctgatacatgctatataacatggg

SEQ ID NO: 106364 - DNA, 1586 bp, Homo sapiens
  misc_feature (723)..(723): n is a, c, g, or t
agcctaattcattcaacttttgaagcattggttgtgcgacatgcagttgggtgttgttgtggagaagaattgggccctttctgttgatgaatgtcagctgcaggccttgcagttttcagtgcatcacattgatttgctgggcatactactcagatgtaatggtttcacagggattcagaaagctgtagtggatcagaccgtcagcagactaccaaacagtgaccatgatcttcttttcgtgcaagtttggccttggggagtgctttgaagcttcttctcaatgcaaccactgagctggtagtcaccagttttcatataaaatccacttttcatcacatgtcacaatctgatagagaaatggtttgttgttgttgcatagaataagacaagatgccatttcaaaatgatattttttaaaatttttcactcagctcatgaggcacccacttatcaagctttttcacctttccaatttgcttcaaatgccaaaggaccatagagtggtcaacgttgagttccttggcaacttcttgtatagttgtaaggggacaacttagatgattgctctcatttagtcattgtcaacttctgatggccagccactatgttcatcaccttcaaggctcttgtctcctttgcaaagcttcttgaaccaccactgcactgtatgttcattagcagtttctcagccaaatgcattgttgatgatgcaagttgtctctnctgatttataacccattttgaacttgaataagaaaattgcttgaatttgctttttgtctaacataatttctgtagtctaaaataaacataaaataaacagaaagtaataagtcattagcaaaataacataaagtgagaaatgtccattaaaatgatgtataacaaaccacatttatttaagaatgtattccaatatcaaacagcaaattccaccaatacaaaaaaaatgcaatgagtttgcaccaactaataagactaacaactgacttcacgtcagaaaccaaggaagctggaaagcgtgagatgacatagttaaagttgtggcagaaaagggtgtcaactgagaactccatctacctcaactcatattcaacaacaaaaagaaaattaaacattccagaaaacaaaaactgagagactaatacaattaatattaaagtgaatctttcaaactgaaatgcaaggacagtatatggtttctcaaatacaaactaagaaataaagaacacccgggaaatgttacctacattgtcccttaggtcaatatctttctgtttgttactcatttcttgttctatctcttttaaatacaattgtataagcaataattataaaattatttgatagcttaacaaaaaatatagaaagagaaaaagggaattttaaaactatgttagaaaataatctatttaacaatcacaaaagacaggaatggatgaataaagaaatttttaaaaataaggcacatagaaaacaaatagcaaataacagatgcaaatcctacttcatctgtaaataaactaaattgaataattaaacatcccaaattgaaggtggatattgaaagaatggataaaaaaaaa

SEQ ID NO: 106365 - DNA, 604 bp, Homo sapiens
tgacaactgtcttatccggaagccttccaaactggtgtttgatactgaagagtggtccacagaaatgatttatataaaagaaacagatatgccaaaggaaacctctccttgagcaccccaaagaaggaccatctgcagaaacacaaccctgagggtaggtcagatgtgctggtcagtggagcaggtgtgttcctggggaggtacatgccccgtggtgggccatccactcccttcccctggatcagggctggtgacaatgccctcccttcaagctggcatgacatcaaggattcctccagatttaaaggaagtcaactccacaattcctgtgagaaataaacaggtctcaacctgggccaattccagggcccccaaggtctcctcttgacctcagaatcagcttttcttccctaaggtgtcattatatccaggacatcctttcagaataaactgcaggctaggggcaggcgtgcaggacacctgcactatctgtccagggcatgctggcattcccctgctgtgggctgggctcattcaagcccatcactgagtgtggcaaggacgaggcatccccctacagcagggtcagatgccgaaagagcct

SEQ ID NO: 106366 - DNA, 414 bp, Homo sapiens
attttactgagacacaccagaaacactctttgatcatcttgcttgatgagtgacttggcactttggatggctttttccattctcacttagctgtatcacattagtgtagttatcagcacagggtgtactttagaacactttggtgagctaatatcttctcctatgtgtttaggtagtaaccaatgaacctgtaatgtgaggattattaaggcacaggttggagatcaggatttcttactgtgtatgaggttttttttccctgtattcaaaaaatccaattaaaattaactttttattattgagggaacatatttaatttgctgtctttggcaaagtatttatactgttgtcataactaagtagatgactatataatttttcattcaaactggtacatttttgagaatgaaaggg

SEQ ID NO: 106367 - DNA, 1705 bp, Homo sapiens
tttgaagttacttatcttttaatacatgtatttaacaccatacttcatattattaaataggttttacttaaaaatataattattgtatttgtacctgtcagatataaatacttattcaggagttcacaggtacgaaaagatacacataaattttaggaacttttgagttatttctgtcatttttgcttttttctctttcttttcctaaattttatgtataagattacccctaaaaaaaaaaaaacagccagtattcagtgaattcaccagtaatttgaaatgcaccatattgtaaatgatccactgacagggaagccagcgtgttggagccatgccagccacctcagacaccgtggctctaagatgcggaagagtcactgcatcttcttgaatgttacagatttggtttgcctgaatgtgacttgacttctgttttgaaaaaacatacgaatagagttctattttccttatgtgatgctttcttctaacacactttaacacagaagcctaacctagctacaaagagcctatccacagacataggcaacagctccaaagggtatttcattgtgtcacctgcttctagatcatctgttagttaactgactttgtgcaaggtctcaccatgtatagcactgccttgcttgagcacggaagtttctgtcaacagcaagctttatgtgctctatcatttttattaaagtatttcagtcaatagtgacccattgtagaatggatgcaggattcacatgtgcaagtgctttgtgacctggcaccatttggttttggccaagcagcagagcagacctcaggacctaacgaggatggttgtgattaggtcaaatagaaaactagcaggccattgctgacaatttttactatataattagaggacttcctaaaatgctttaaaaaaaaatgtgtatggatggaaaatacaaaggaatttttcaaatactcaatttttattggtagtagttatcaagaacaaagtcctcggacttctgatgggaaatctgaactgctgtttctcttttagcgtacaagaagaaatagatccctctcattagcactttaatatcagtgtcacgtgtctggaaggaaattgtattcatttaggtaagcaacacactacataaatatcatagctgttagacccaggggactctcaggtgccagaattggggactcctttaattggaagggagctaaagggtctacctcctacctagaagtcctttctatgtggatatgaattaaattctcttgtctgttttgctctgatggggtctgtgtgggctagctggctctggtgtgtgcctgacgacagactgaactccttaaccatttcagacagcttgaagatgtatgatcattatttgaaaagggagagagggaggactctttgttttctccaccagtttggctcctgaggtttcttcagcgttaggtttctgtagggcccagctttctccagtgtttggctactgcaactctgtgttctgccagtctcttaactcagacagaaacaatgcaaaccagcagacagagcatcaccttgaaagtactaaaacagctgtcaatctagaaatctctgccccgcaaaaactgtcataaatactgcaagacccatgttcagatttcccatcagaagtccgaggactttgttcttgataactactaccaataaaaattgagtatttga

SEQ ID NO: 106368 - DNA, 4237 bp, Homo sapiens
tttgaagttacttatcttttaatacatgtatttaacaccatacttcatattattaaataggttttacttaaaaatataattattgtatttgtacctgtcagatataaatacttattcaggagttcacaggtacgaaaagatacacataaattttaggaacttttgagttatttctgtcatttttgcttttttctctttcttttcctaaattttatgtataagattacccctaaaaaaaaaaaaacagccagtattcagtgaattcaccagtaatttgaaatgcaccatattgtaaatgatccactgacagggaagccagcgtgttggagccatgccagccacctcagacaccgtggctctaagatgcggaagagtcactgcatcttcttgaatgttacagatttggtttgcctgaatgtgacttgacttctgttttgaaaaaacatacgaatagagttctattttccttatgtgatgctttcttctaacacactttaacacagaagcctaacctagctacaaagagcctatccacagacataggcaacagctccaaagggtatttcattgtgtcacctgcttctagatcatctgttagttaactgactttgtgcaaggtctcaccatgtatagcactgccttgcttgagcacggaagtttctgtcaacagcaagctttatgtgctctatcatttttattaaagtatttcagtcaatagtgacccattgtagaatggatgcaggattcacatgtgcaagtgctttgtgacctggcaccatttggttttggccaagcagcagagcagacctcaggacctaacgaggatggttgtgattaggtcaaatagaaaactagcaggccattgctgacaatttttactatataattagaggacttcctaaaatgctttaaaaaaaaatgtgtatggatggaaaatacaaaggaatttttcaaatactcaatttttattggtagtagttatcaagaacaaagtcctcggacttctgatgggaaatctgaactgctgtttctcttttagcgtacaagaagaaatagatccctctcattagcactttaatatcagtgtcacgtgtctggaaggaaattgtattcatttaggtaagcaacacactacataaatatcatagctgttagacccaggggactctcaggtgccagaattggggactcctttaattggaagggagctaaagggtctacctcctacctagaagtcctttctatgtggatatgaattaaattctcttgtctgttttgctctgatggggtctgtgtgggctagctggctctggtgtgtgcctgacgacagactgaactccttaaccatttcagacagcttgaagatgtatgatcattatttgaaaagggagagagggaggactctttgttttctccaccagtttggctcctgaggtttcttcagcgttaggtttctgtagggcccagctttctccagtgtttggctactgcaactctgtgttctgccagtctcttaactcagacagaaacaatgcaaaccagcagacagagcatcaccttgaaagtactaaaacagctgtcaatctagaaatctctgccccgcaaaaactgtcataaatactgcaagacccatgttcagatttccccccttttacaaataatgttttgttttatttcccagctactacaagtgatccaaatgttctttatagcagactttttcctgcagtctaggatccagtcagagatcttgcattaaattatatctctgtaatctttaatttcacgctatctgcaatgttttgtgtttttcatgacattgatgtttttgatgaggtcaggccatttattctgcagaatatctgtcaatttggattttttctaattgttctttcatgattagaatcaggcaaacattttttgacaagaatacatcagagacgactccgtggtgcatcagactgggggcatgtgatgtctgtgtgtcccattattggcgatgttcaattctgtcacttctgttgaggctgcatttgccagatttcagattaaggtacctttttccctttgtaaattaggatatcacctttgtggggtgccgttttgagactgcaaggatatcatcttcccgagtaggccttcatccatggcctcagcatccatgatggttcctgtccggatgctcacttttgaagaaacatttcaaataatagtgattcctttccaattcaaaagtaatcattgctttatagtcttcataaatattttctgtggttatttagttgatgaaagctgttgatgtccatttggatttttttccctccaacacaaacagctgcaggaattggtgccacatagaggctcagcttgcctgtctccatggaagctgtggccacagcagtggctttggaagcctagtaaggaatgacatcactgccaggtgcagtggctcacacctgtaatcccagcactttgggaggctgaggtgggtggatcacttgaggtcaggagttaaagaccagcctgatcaacatggtgaaaccccatctctactaaaaatacaaaaattagctgggtgtggtggtgcgtgcctgtagacccaactacttgggaggccgaggcaggagaatcactggaacccatgaggtagagcctacagtgagctgagatcatgccactgcactccagcctgggtgacagattctgtctcaaaaataaataaagaatgacatcactgaatacactgaatgtgctattgataaccagtgtgccagactccagacaacatgtgccaggcatcacccatgtctttgattttgtaataaataaaaaatggggccaggtgtggtggctcatgcctgtaatcccagtactttgggaggcccaggctgatggatcacctgaggtcaggagttcgagaccagcctggccaacatgatgaaaccccgtctctactaaaactacaaaaattagccgggcatggtggcgggtgcctgtattcccagctactggggaggctgaggcaggagaatcacatgaacccgggaggcggaggttgcagggagctgagatcgtgccactgcactccagcctgggcgacaagagcgagactccatctcaaaaacaaacaaaaaaggcaaaatccttggagaactcttactgtctctgtttccagaatcctagaattaaaactttcatttatcttcacaattttcccatagctttttcatgtctgtaaggatgataccctgaaatcttcttcttgagaagataaagaagggtcccctctgttacccctaccaaacggatgctcctcacgggcttgaggtggcagctcatctcagagcatgggatgatttttaaccaggtgagtggaaaggggcagtaataaacatttttaaaggttggggacacatgaagtcctcagggtgtaaagctggaaccagcctcctgtactgctcagctttcaggcctttggcccctagtcccttgggggtggcccctcccttctctgtgccataacagagtacccgtcaccccctgcctggaccactcctgcagcagaagaggagctcacgacctcctccggcagcacctctccttcctccctgcagagcccggctctcgtgctgagcaagcagcgttcccagctcccagacaggccccccagaagtcggcctttctgttcaaaagcttccagctgagcatctgcccattctcctgatccgtccaccaggatcacatttcaacagtgcacgtgggagcatttgtcttgatggcctctgagatcatcctggccccggagtccccaatgtggtttccctggagattgatatgctggagcctgtggtttccagacagtgctgtggcaatgcatatcgccccgtccatccccagagaattctcttgaagattgagtctccggagacttgagtttaccttcagagcatttgccagggctttggctccagccaccccaatggcatttcctcttaagtcgagaatctccaaggttctgttcacagccaaggcttcccctagcacctgggcgcctgaagcaccaattgaggccacctggagatagagagcagtgagggctgtgttgaccttcagtgcacgggccaccgcacacgctccgtcatccccgatggcgttctcctgtaaatctaagctggtgaggctcctgttgagctgtagtgcttgtcccagggcctgggcagcgccggcctggatgaag

SEQ ID NO: 106369 - DNA, 394 bp, Homo sapiens
gggcccagcagctggagatggggcagaagaggcgctagagagagctgatcataagccacagaactgactctggcaagcagaagggatcaaggaaagacccgaagaaccagaccctggaaaggccgggtcctgggggatctggggagcaggagctttgagtggatggaggtttcttcaggaagagatgagaaaacaccaatccactgtgcccaaggttcagaaatcctaggagaacacctcggattggccagaggagggtggagcatctgggttgacacatccaagcaaaatggcggtggggagtttccaaagcagagccaaagagctgccaccagaggaagaggagctcctgaggggccacgcggaggtgctcggacctgccctgtagacagtg

SEQ ID NO: 106370 - DNA, 255 bp, Homo sapiens
gaaccactgtgctccagcttgggcaatacagcgagacctcatctcttaaaaggattaaaaaaaaggataaagactgtagcattttctcatagagtattctaagctttataaagttatttccccaacgctttggacataatgattaggtcatttgaagttctgagaaacagaatgattatggaagttacttaaaactacttcttaaagtataagaatattgctaggcgtggtgtaatccccactatttgggaggct

SEQ ID NO: 106371 - DNA, 721 bp, Homo sapiens
gagggggcttttaaacctcctgagtcaactgtccatatttgagtgagattttctgcctgtcagttgtatcgcacctgacttagcaatggcatagaaagacctgctttagcagatgtgtttgatattaagacttttctgttctgtttgatccatgttctggtgaaaatattaatctctttgatgacctcatattccttaggatcagcttcattttgcttcctgaagtttggtggtttctttaacctttcatcgtttctttgaccttgcatcagcaataatgggaaataaactgggaccctgtttatttacaaatgattgctctcgcaaggcatacattttaagggttgcaacattttttttcagaggccttaagcaaatagtgacgcttagagccttctcagatgcagtagtttcttttgctgtggaagcctgcctgcatttcagtgcaggggagaaatcagtctcagtctctccacgccctgccctgtgcatgcggaaagcctgcctcgtaccccgaccgcggaggcaggttacttatgtttcctgtgtgtcactcttggggtggttgcaaaatctgtgctttgtagatctgaaactaaggtatgtaatacttttttaaaataataataaacacatacgttgaacacaaaagcttttttctctctccttcgcttcacctttcctctgtttttgctcatttcactcttactcagcttctgtt

SEQ ID NO: 106372 - DNA, 691 bp, Homo sapiens
tgccacgaaaacacagagctgggatttgaacccacttccctcctaaggcttttgcctttaacgtgtttgtgtagggagaagaaaagcttttccataaatgacaggttttgagcccatcagttcattgaagaggaagtgtgtagccatctcggcttaattggaagacatgtgaaggtgatgggtaaatacgtagctgacatgtgtcacatgagtaatataggtgttgccctgtagactcactgtgttgccaacagtgagcaagtttttcccccaaggctctttaccagctaaataggcagaaatctagggggacactcaccttcctggatggaaagagggaaagaggaagaccttgcaggtgagttgcctgggtctgaaaaagacagcaattgcagcctattcttttttatttatttattttttgagacggagttttgctcttgttgcccagcctggagtgcaatggcacgatcttggctcactgcaacctccacctcccaggttcaagcgattctcctgccccagcctcctgagtagctgggattagaggcatgtgccatgacgcccagctaattttgtatttttagtagaaatggggtttcaccatgttggccaggctggtttcgaactcctgacctcaggtgatccacctgccttggcctcccagacttctgggattgcaggcatgagc

SEQ ID NO: 106373 - DNA, 691 bp, Homo sapiens
atattccaggtaccatgactgtgatccttggacagccaagaaagtgtctgcaccagaccagctcatgccttatttggtactggacattctgcaagattatccaggacttcctggactttttgtggcctgtgcttacagtgggacattaagcacagtgtcctccagtattaatgccttagcagcagtaactgtggaagatctaatcaaaccttacttcagatcgctctcagaaaggtctctgtcttggatttcccaaggaatgagtgtggtgtatggagccctgtgtattggaatggctgcgctggcgtcacttatgggagctttgttgcaggcagcactcagcgtatttggtatggttggtggaccacttatgggcctgttcgctttgggcattttggttccctttgccaactcaattggagcacttgttggtctgatggctggatttgccatttctctatgggttggaattggagctcaaatatatcctccacttcctgagagaacattgccattgcaccttgatatccaaggctgtaacagcacctacaatgagacaaatttgattacaaccacagaaatgccatttactactagtgtttttcaaatatacaatgttcaaaggactccactgatggataactggtattctttatcatatctgtacttcagcactgttggaactttggta

SEQ ID NO: 106374 - DNA, 805 bp, Homo sapiens
atgtcaggaaaatattctcaatggggaggaaaaaatatataaattttcaagagatgtggaaaggtagaaaactccagaattttggtctttttagagatttaaaagagatttagtctttttagagacttaaaaaaaacttttcactttgaaataattccagatgcataaaagtttgcaaaacaatgtacaaaaagtttccaaaacatgtgagtcttttacaattgtaaaaaaaaacatataatgcaaataactcttttaaattatctcttggcacctcttgtaatccttaatccaaatgacttctgttgatgggagaaagcaccattgccagtttcttgataaaagggaccaaataactagaaccatgtcttcttaggaaaagcaagaagtcttggcagatgtgcatctggcatatggctcctgagacactgacaggtcctgagctactcaattctccccagccgggtttgtattgcacctgaggttaccagcatctgctcagccttggcacagaagtcttgcctgttcctccttgggctctgcctcctaaacacctaccttgttataatcactcatgagttcaaccaagttagtccagcgctgccttgctactcacagtgaagtcctctgacctgcggcatcagcaccacgtgggagcttgttagaaatgtggaatgtctggccagacctcagacctactgcagcagactgcattgtaacaggatccccgggtgattcatatgcacattacagtttgggaggcactgctctaaagaaaaagcaaaaacaaatgaaaaagcaaaaa

SEQ ID NO: 106375 - DNA, 331 bp, Homo sapiens
ggcagtgaaatatcattcttggcatagggtacggagggtgaattgacaatgaggaggtcgtgtgtacaccaagtgatcagcagctggccaatgaaggctgattctaaagtgtctgcctggtgccagcctcagacactagattgtgggcaccaggtcactgattacaaaacaaaacaattacatttttttttcagatcctatattctcattgtagaaaatatggaaaatacagaaaagcacaatatagaaaatttcctataatccttccacgtgatgataatcacctaaactgccagtgattgtggcaattagcaggtctttttatgttgcc

SEQ ID NO: 106376 - DNA, 407 bp, Homo sapiens
gaatcaaccaaccctgaagcccaccctacagttggacaggtgctatgtgaaccaattcttaagtttccagcttaagctaatttgtgcaggattttttgcttgctactcaaggcaacctacttaatttaatgctatggttcctttctgtggaatatggatatttagttggtaaattcaatttcttaatttctagcttatcctgaactcaacctattctcacttgctgtagttaaagccctagaatggagaatgagagagaaatattcttgagccagctatcatttaaaccataattttgacttactacacaaaatccatgaaagcagtgcctctaaacagtaagagtgctaccaatgaatattaatagcaataattataagaaggataacaaatatcatggaggagtc

SEQ ID NO: 106377 - DNA, 302 bp, Homo sapiens
gataacaggtcaaactgccagcacctaaggatggactgaatctgacgaggtgagaggaggaggtgtcaagggtgactcctgggttctggttctgccatttaatgagcagggaacatgttaggagaaggtttagggaagatctttaatttggttttagacatctgactgcgcagaagtcatgtagccaggtgtaggtctggactttaggagagatcatggttaggacaataaactctgcaatcatttgtaaatggtccataactgatctaagggcattaataagactggggtggggatcgaca

SEQ ID NO: 106378 - DNA, 425 bp, Homo sapiens
atataaaattaatttttaatagttattttacccaaagtacccaaaatattattcttctaacatataatcaatatgaaaacattaatttaattttaatttttaattttggtgggtacataataggtatatatagatatgagatacgtgagatgctttgatacaggcatgcaatgtttaataattgtgtcatgaaaaatgagagatgagccactgcgcccagccctggtctctttttttcttttctgttctgaacatggtactatcttctgcatttccactcaattctgtgtccatagtgtgccttcacttttaaatttaaaaatctttcaatacttactttttaaaactagaaacaaaatttaattataattaaaataatagtagggccaggggtggtggcttacacctgtaatcccagcactttg

SEQ ID NO: 106379 - DNA, 2770 bp, Homo sapiens
gcatctcaataagaaccagctaagaaacaacattagacaacaagtcctcaaatcaggaatgttggagtctggtattgaccgaattatttctcaggttgtggacccaaagatcaaccacacattcagacctcaggtagagaaagctgtgcatgagtttttggccacgctaaatcacaaagaggaaggaagtggcaacacagctcccgatgatgagaaaccagacacttcccttattacacaaggtgttcctactcctgggcccagtgctaatgtagccaatgatgccatgtcgatattggaaaccataacttctcttaaccaagaagccagtgctgctagggcttcaacagaaacatcaaatgccaagaccagtgagagagcgtcaaaaaaacttccatctcagccaaccactgatactagtactgacaaagaaagaacttcagaggacatggctgataaagaaaaatctacagctgactctggaggtgaaggactggaaacagccccaaagtctgaagagttcagcgacctcccctgtccagtcgaagaaattaaaaattacacaaaagagcataataatttaattctgctaaataaggatgttcaacaggaaagcagtgagcaaaaaaataaatcaacagacaaaggtgaaaagaagccagacagcaatgagaaaggagaaagaaagaaagaaaagaaggaaaagactgaaaagaaatttgatcactcaaaaaagagtgaagatacacagaaagttaaagatgaaaaacaagcaaaggaaaaagaagtagagagtttaaaacttccttcagaaaagaacagtaataaagctaaaactgttgaagggacaaaagaagatttctctttgatagattctgatgtggatggacttacagacatcacagttagctctgttcataccagtgacctttcatcttttgaagaagatactgaggaggaagttgtaacgtctgatagcatggaagaaggagagattacgtcagatgatgaagagaagaacaaacagaataaaacaaaaactcaaactagtgattctagtgaaggaaaaacaaaaagtgtacggcatgcgtatgtccacaaaccatatctttactcaaaatactatagtgattctgatgatgagcttactgtagaacaacgacgacagtccattgccaaagaaaaagaagagaggcttttaagaaggcaaatcaatagagaaaaacttgaagaaaaacgaaaacagaaagcagaaaagacaaagtcttcaaaaaccaagggtcaaggcaggagtagtgtggacttagaagaatcatcaacaaagagtttggaacctaaagccgccagaattaaagaagtccttaaagaacggaaagttttagaaaaaaaagtagccttaagcaaaaagagaaaaaaagattcaaggaatgttgaagagaactccaaaaagaaacagcaatatgaagaagattccaaagaaacccttaaaacaagtgagcattgtgaaaaggaaaaaatttcttcttcaaaggagctgaagcatgttcatgcaaaaagtgaaccaagtaaacctgcccggagactttcagagtctttgcatgtagttgacgaaaacaaaaatgaatccaaattagaaagagaacataaaagacggacatctacccctgttatcatggagggggtacaggaagagactgacacaagagatgtaaaaaggcaagtagaacgctcagaaatttgcaccgaagagccccagaaacagaaaagcacacttaaaaacgaaaagcatctaaagaaagatgattctgaaacaccacatttgaaaagcctacttaagaaagaggtgaaatcctccaaggagaagcctgaaagagagaaaactccatcggaagacaaattgtctgtgaaacataaatataaaggtgattgtatgcataaaacaggtgatgagactgagcttcactcttctgagaaaggtttaaaagtagaggaaaatattcaaaagcaaagtcaacaaacaaagctttcttcagatgataaaaccgaacgaaaaagtaaacataggaatgaaaggaaattatcagtattaggcaaagatggaaagccagtttctgaatatattataaaaacagatgagaatgttcgtaaagaaaacaacaaaaaagagagacgcttgtcagctgaaaaaactaaggcagagcacaaatcaagaaggtcaagtgattctaaaattcagaaagattctctgggttccaagcaacatggtatcacattacagagaagaagtgaaagttattcggaagataagtgtgatatggactccactaacatggatagtaatttgaaaccagaagaggttgttcacaaggagaaacgacgaacaaagagcttgttagaagagaaacttgtgttgaagtctaaatcaaaaactcaaggcaaacaggtaaaagttgtagaaacagaattacaagaaggtgccacaaaacaggcaaccactccaaaaccagacaaggagaagaacacagaagaaaatgactcagaaaaacagcgtaagtctaaagttgaagacaaaccttttgaagaaactggtgttgaacctgtattagagactgcttcttcttcagcacatagtacacagaaggattctagtcatagagccaagttaccattagcaaaggagaaatataagagtgataaagactccacttccaccaggcttgagagaaagttgtcagatggccacaaaagcagaagcttaaagcatagtagt

SEQ ID NO: 106380 - DNA, 2102 bp, Homo sapiens
gaagcagagctctcagaacctctcctggttccaacgcctgagtcatgaatcattctttgctccagaaaactctgttacatttaatttgtctgaaattttccttttaatagcataagtaactataatgtctaatttttctttgtcttatttatgtgtgagaagctgataagaaataaaaatatgaattatagcttttaaaagtcaatttctgaaatcttcacatcctgatatttccccttttggacctccaattcatcttgcctttactgcttgtacagcataatgttgattttatgctaattcacagacatactcctctttctattaactttcttacagatgaagagaagaacaaacagaataaaacaaaaactcaaactagtgattctagtgaaggaaaaacaaaaagtgtacggcatgcgtatgtccacaaaccatatctttactcaaaatactatagtgattctgatgatgagcttactgtagaacaacgacgacagtccattgccaaagaaaaagaagagaggcttttaagaaggcaaatcaatagagaaaaacttgaagaaaaacgaaaacagaaagcagaaaagacaaagtcttcaaaaaccaagggtcaaggcaggagtagtgtggacttagaagaatcatcaacaaagagtttggaacctaaagccgccagaattaaagaagtccttaaagaacggaaagttttagaaaaaaaagtagccttaagcaaaaagagaaaaaaagattcaaggaatgttgaagagaactccaaaaagaaacagcaatatgaagaagattccaaagaaacccttaaaacaagtgagcattgtgaaaaggaaaaaatttcttcttcaaaggagctgaagcatgttcatgcaaaaagtgaaccaagtaaacctgcccggagactttcagagtctttgcatgtagttgacgaaaacaaaaatgaatccaaattagaaagagaacataaaagacggacatctacccctgttatcatggagggggtacaggaagagactgacacaagagatgtaaaaaggcaagtagaacgctcagaaatttgcaccgaagagccccagaaacagaaaagcacacttaaaaacgaaaagcatctaaagaaagatgattctgaaacaccacatttgaaaagcctacttaagaaagaggtgaaatcctccaaggagaagcctgaaagagagaaaactccatcggaagacaaattgtctgtgaaacataaatataaaggtgattgtatgcataaaacaggtgatgagactgagcttcactcttctgagaaaggtttaaaagtagaggaaaatattcaaaagcaaagtcaacaaacaaagctttcttcagatgataaaaccgaacgaaaaagtaaacataggaatgaaaggaaattatcagtattaggcaaagatggaaagccagtttctgaatatattataaaaacagatgagaatgttcgtaaagaaaacaacaaaaaagagagacgcttgtcagctgaaaaaactaaggcagagcacaaatcaagaaggtcaagtgattctaaaattcagaaagattctctgggttccaagcaacatggtatcacattacagagaagaagtgaaagttattcggaagataagtgtgatatggactccactaacatggatagtaatttgaaaccagaagaggttgttcacaaggagaaacgacgaacaaagagcttgttagaagagaaacttgtgttgaagtctaaatcaaaaactcaaggcaaacaggtaaaagttgtagaaacagaattacaagaaggtgccacaaaacaggcaaccactccaaaaccagacaaggagaagaacacagaagaaaatgactcagaaaaacagcgtaagtctaaagttgaagacaaaccttttgaagaaactggtgttgaacctgtattagagactgcttcttcttcagcacatagtacacagaaggattctagtcatagagccaagttaccattagcaaaggagaaatataagagtgataaagactccacttccaccaggcttgagagaaagttgtcagatggccacaaaagcagaagcttaaagcatagtagt

SEQ ID NO: 106381 - DNA, 1716 bp, Homo sapiens
gcactaatcctatgtaatatatgaaatcacacatacacacacttatgtgatcatttgaaataagagagataagacttcttcatccaaaatattatatctattccagcacaacttaagaatattaaagccattttggctttaacaatgattagaaaaatcttaatgaaaaattaatattacattgtttgtaaaacttttctgaaatacgttttattgattgcttcttttctaggcaggagtagtgtggacttagaagaatcatcaacaaagagtttggaacctaaagccgccagaattaaagaagtccttaaagaacggaaagttttagaaaaaaaagtagccttaagcaaaaagagaaaaaaagattcaaggaatgttgaagagaactccaaaaagaaacagcaatatgaagaagattccaaagaaacccttaaaacaagtgagcattgtgaaaaggaaaaaatttcttcttcaaaggagctgaagcatgttcatgcaaaaagtgaaccaagtaaacctgcccggagactttcagagtctttgcatgtagttgacgaaaacaaaaatgaatccaaattagaaagagaacataaaagacggacatctacccctgttatcatggagggggtacaggaagagactgacacaagagatgtaaaaaggcaagtagaacgctcagaaatttgcaccgaagagccccagaaacagaaaagcacacttaaaaacgaaaagcatctaaagaaagatgattctgaaacaccacatttgaaaagcctacttaagaaagaggtgaaatcctccaaggagaagcctgaaagagagaaaactccatcggaagacaaattgtctgtgaaacataaatataaaggtgattgtatgcataaaacaggtgatgagactgagcttcactcttctgagaaaggtttaaaagtagaggaaaatattcaaaagcaaagtcaacaaacaaagctttcttcagatgataaaaccgaacgaaaaagtaaacataggaatgaaaggaaattatcagtattaggcaaagatggaaagccagtttctgaatatattataaaaacagatgagaatgttcgtaaagaaaacaacaaaaaagagagacgcttgtcagctgaaaaaactaaggcagagcacaaatcaagaaggtcaagtgattctaaaattcagaaagattctctgggttccaagcaacatggtatcacattacagagaagaagtgaaagttattcggaagataagtgtgatatggactccactaacatggatagtaatttgaaaccagaagaggttgttcacaaggagaaacgacgaacaaagagcttgttagaagagaaacttgtgttgaagtctaaatcaaaaactcaaggcaaacaggtaaaagttgtagaaacagaattacaagaaggtgccacaaaacaggcaaccactccaaaaccagacaaggagaagaacacagaagaaaatgactcagaaaaacagcgtaagtctaaagttgaagacaaaccttttgaagaaactggtgttgaacctgtattagagactgcttcttcttcagcacatagtacacagaaggattctagtcatagagccaagttaccattagcaaaggagaaatataagagtgataaagactccacttccaccaggcttgagagaaagttgtcagatggccacaaaagcagaagcttaaagcatagtagt

SEQ ID NO: 106382 - DNA, 594 bp, Homo sapiens
cagtgtactgtgtctagttctaagggtgttttgttttgtctgtttcagtatttccactagtgacacagtggtagaaaagtttacagacttgtatagtatggtatatctaaatgctactgtagcatgaaacttagtttccattgtctatatccaagtaaatggattgggacaatttaaggttggatggatggatagatagatgacagattgtagagtgttattttaaagtaattaatgcaaataatatattattttttcacctttccataaattatcttgtgtttcagatcaggaatgttggagtctggtattgaccgaattatttctcaggttgtggacccaaagatcaaccacacattcagacctcaggtagagaaagctgtgcatgagtttttggccacgctaaatcacaaagaggaaggaagtggcaacacagctcccgatgatgagaaaccagacacttcccttattacacaaggtgctttgcttttactcttggtcagttccattgtttttcttcttgaactgaatatcaagttagggatacttggctctttaacacattttttaatttggctattccaatgaaattgt

SEQ ID NO: 106383 - DNA, 1372 bp, Homo sapiens
aaggggtgtgggggaggtagcccgcagtgcaggggcagcgcggcgcggggccaccgacgggacgcggctccgggaacatggctcgcttcgctctgactgttgtccggcatggagaaacaagatttaacaaggagaaaataatccaaggacaaggagtagatgaacctctttcagaaactggatttaaacaagcagcagctgctggtatatttctgaataatgtgaagtttactcatgctttctccagtgatctcatgaggacaaagcagaccatgcatggaattttggagagaagcaaattttgcaaagatatgacggtaaagtatgactcaagacttcgggaaaggaaatacggggttgtagaaggcaaagcgctaagtgagctgagggccatggccaaagcagccagggaagagtgccctgtgtttacaccgcccggaggagagacgctggaccaggtgaaaatgcgtggaatagacttttttgaatttctttgtcaactaatcctgaaagaagcggatcaaaaagaacagttttcccaaggatctccaagcaactgtctggaaacttctttggcagagatatttcctttaggaaaaaatcacagctctaaagttaattcagacagcggtattccaggattagcagccagtgtcttagttgtgagtcacggtgcttacatgagaagtctgtttgattattttctgactgaccttaagtgttccttaccagccactctgagcagatctgaacttatgtcagtcactcccaatacagggatgagtctctttatcataaactttgaggaaggaagagaagttaaaccaacggttcagtgtatttgtatgaacctacaggatcatctaaatggactgactgaaactcgctaaggttaaatctgcatcaaaatctaaccattttgagcctctgaagggagtgccattggctttatttacttctctcctctgctagttctgatttggaaacagttaaaagccaatttttagctccagtggaaccatagccacataaaactttaatggacaaccatatagaattaacttattttgtccaagtacagttggcattttccagaataattttaccaccctgctagatgtcatctctggattgcacatggatgatgaaggaactcagcattgaaagttgggggattagtaaccttgttacaacggtttctttttcattttagcctattttaatggctattggtaagatactgtatgtttttagtatctcatccagtgcttagaagaaagaatggtttataattcccagtacatgtttatattgactgtgttatatttttaaatcctttaaataaaaaatccttataagtttatgtaaagca

SEQ ID NO: 106384 - DNA, 1600 bp, Homo sapiens
aaggggtgtgggggaggtagcccgcagtgcaggggcagcgcggcgcggggccaccgacgggacgcggctccgggaacatggctcgcttcgctctgactgttgtccggcatggagaaacaagatttaacaaggagaaaataatccaaggacaaggagtagatgaacctctttcagaaactggatttaaacaagcagcagctgctggtatatttctgaataatgtgaagtttactcatgctttctccagtgatctcatgaggacaaagcagaccatgcatggaattttggagagaagcaaattttgcaaagatatgacggtaaagtatgactcaagacttcgggaaaggaaatacggggttgtagaaggcaaagcgctaagtgagctgagggccatggccaaagcagccagggaagagtgccctgtgtttacaccgcccggaggagagacgctggaccaggtgaaaatgcgtggaatagacttttttgaatttctttgtcaactaatcctgaaagaagcggatcaaaaagaacagttttcccaaggatctccaagcaactgtctggaaacttctttggcagagatatttcctttaggaaaaaatcacagctctaaagttaattcagacagcggtattccaggattagcagccagtgtcttagttgtgagtcacggtgcttacatgagaagtctgtttgattattttctgactgaccttaagtgttccttaccagccactctgagcagatctgaacttatgtcagtcactcccaatacagggatgagtctctttatcataaactttgaggaaggaagagaagttaaaccaacggttcagtgtatttgtatgaacctacaggatcatctaaatggactgactgaaactcgctaaggttaaatctgcatcaaaatctaaccattttgagcctctgaagggagtgccattggctttatttacttctctcctctgctagttctgatttggaaacagttaaaagccaatttttagctccagtggaaccatagccacataaaactttaatggacaaccatatagaattaacttattttgtccaagtacagttggcattttccagaataattttaccaccctgctagatgtcatctctggattgcacatggatgatgaaggaactcagcattgaaagttgggggattagtaaccttgttacaacggtttctttttcattttagcctattttaatggctattggtaagatactgtatgtttttagtatctcatccagtgcttagaagaaagaatggtttataattcccagtacatgtttatattgactgtgttatatttttaaatcctttaaataaaaaatccttataagtttatgtaaagcaaaataacactaacatgttttacgtataaatcaactattggaattttttattctagagggcttgaaatgtggatgaatacagattatgattgcagaatggtctgggggaagaagttaaaacatttgatttaaatacagtaaagaaagaatcttggagcagaagatagaagaacagccttttctaaataatgccttgccaaagtcaagtcaatggaaaccaggaaagcca

SEQ ID NO: 106385 - DNA, 1387 bp, Homo sapiens
agcagcgagttctgtttccgccgcaggcccgggttcacttgcggccgctggcacgcactgtacagctgcgtcagctgctcgcaggacacgtcccgtcccgcagctggtccaagtctgtgccgcgtggagaaacaagatttaacaaggagaaaataatccaaggacaaggagtagatgaacctctttcagaaactggatttaaacaagcagcagctgctggtatatttctgaataatgtgaagtttactcatgctttctccagtgatctcatgaggacaaagcagaccatgcatggaattttggagagaagcaaattttgcaaagatatgacggtaaagtatgactcaagacttcgggaaaggaaatacggggttgtagaaggcaaagcgctaagtgagctgagggccatggccaaagcagccagggaagagtgccctgtgtttacaccgcccggaggagagacgctggaccaggtgaaaatgcgtggaatagacttttttgaatttctttgtcaactaatcctgaaagaagcggatcaaaaagaacagttttcccaaggatctccaagcaactgtctggaaacttctttggcagagatatttcctttaggaaaaaatcacagctctaaagttaattcagacagcggtattccaggattagcagccagtgtcttagttgtgagtcacggtgcttacatgagaagtctgtttgattattttctgactgaccttaagtgttccttaccagccactctgagcagatctgaacttatgtcagtcactcccaatacagggatgagtctctttatcataaactttgaggaaggaagagaagttaaaccaacggttcagtgtatttgtatgaacctacaggatcatctaaatggactgactgaaactcgctaaggttaaatctgcatcaaaatctaaccattttgagcctctgaagggagtgccattggctttatttacttctctcctctgctagttctgatttggaaacagttaaaagccaatttttagctccagtggaaccatagccacataaaactttaatggacaaccatatagaattaacttattttgtccaagtacagttggcattttccagaataattttaccaccctgctagatgtcatctctggattgcacatggatgatgaaggaactcagcattgaaagttgggggattagtaaccttgttacaacggtttctttttcattttagcctattttaatggctattggtaagatactgtatgtttttagtatctcatccagtgcttagaagaaagaatggtttataattcccagtacatgtttatattgactgtgttatatttttaaatcctttaaataaaaaatccttataagtttatgtaaagca

SEQ ID NO: 106386 - DNA, 223 bp, Homo sapiens
gcaattcttggggcctttgtaacaagtccacatgtcccctcccttgtgccaaccctttcttcctttgacagccttccccactactctgaggaattcaggggccatgtcttttgtgcttggtacatgctagtgtgcaatgagatagacacatatctctcacaccaaaagccagcattttgctgccatttccaaaagtttaggaaggccatctgcttcaatcact

SEQ ID NO: 106387 - DNA, 978 bp, Homo sapiens
  misc_feature (964)..(964): n is a, c, g, or t
cgttttttttcttattactaagatgtaaaacgtagtaataagctacattgtgtccccagactcggccagacacatagtatcacacatagtatccagcatcaggccttgggccttccttgggcttattacatccagctaataagcctggatagagtaacttgcgtgcagtcacatagagatacgatggaaagtccagagttagagcccgtatccctgctcagaactccattcgatgggttttccattcccagacctagagtggggctcagggttcttagaaagtgagagttcagcatcccttcccattctcagagtgcaggtttgacttggtcctggtggctgtaccccaggagcaagaatcgggatgtggcacagggaggggaggtttttaccttgtcagcaatcatttgacctgtccaacacagtaactggtatttatgatttcctgtcccagatttccaggcctaactgccactgcagtgtcttccttggggggttggggaagctctagctcagttaacaattcagtccactgctctagggggagtatccttctcatagcccaaagactgagtgctggtggcatgcagaatctaccatgttctactcttcctaccctgatcagagtcgcagtgagatccaggagcatagttctagagctagaaggagctggaatcacttgttccaggttacgcagccattaagtgaccagatttttacctagtttttttttgttttgttttgtttgagacagtctcactctcttgcccaggctggagtgcagtggcaccatctcagctcactgcaacctccatctcccgggttcaaacagttctcctgcctcagcctgtaatcccagctatttgggaggctaaggcaggagaatcacttgaacctgggaggcagaggttacagtgagctcagattgtgccactgtactccaggcagggctctagagcgagantctgtctcttaaaa

SEQ ID NO: 106388 - DNA, 804 bp, Homo sapiens
  misc_feature (790)..(790): n is a, c, g, or t
cgttttttttcttattactaagatgtaaaacgtagtaataagctacattgtgtccccagactcggccagacacatagtatcacacatagtatccagcatcaggccttgggccttccttgggcttattacatccagctaataagcctggatagagtaacttgcgtgcagtcacatagagatacgatggaaagtccagagttagagcccgtatccctgctcagaactccattcgatgggttttccattcccagacctagagtggggctcagggttcttagaaagtgagagttcagcatcccttcccattctcagagtgcaggtttgacttggtcctggtggctgtaccccaggagcaagaatcgggatgtggcacagggaggggaggtttttaccttgtcagcaatcatttgacctgtccaacacagtaactggtatttatgatttcctgtcccagatttccaggcctaactgccactgcagtgtcttccttggggggttggggaagctctagctcagttaacaattcagtccactgctctagggggagtatccttctcatagcccaaagactgagtgctggtggcatgcagaatctaccatgttctactcttcctaccctgatcagagtcgcagtgagatccaggagcatagttctagagctagaaggagctggaatcacttgttccaggttacgcagccattaagtgaccagatttttacctagtttttttttgttttgttttgtttgagacagtctcactgtactccaggcagggctctagagcgagantctgtctcttaaaa

SEQ ID NO: 106389 - DNA, 1862 bp, Homo sapiens
gactagttctagatcgcgagctagaactagtccccacgcgtccgctccggcgcgtcggtgcagggggatgagggccgcggtggctgccagcgtggggttgagcgaggggcctgctggctcccggagcggtcgcctcttccgcccgccgagtcccgctccggcggcccccggcgcccggctgttgcggctcccggggagcggggccgtgcaggccgcgagcccggagcgcgccggctggaccgaggcgctgcgggccgccgtggccgagctgcgcgccggcgccgtggtggccgtccccaccgatacgctgtacggcctggcctgcgcggcgagctgctcggcggctctgcgcgctgtgtaccgcctcaagggtcgcagcgaggccaagcctctggccgtatgcctcggccgcgtggccgacgtctacagatactgccgtgtgagagtacctgaggggctcctgaaagacctactgccaggaccagtgaccctggtgatggaacgctcggaggagctcaacaaggacctaaacccttttacgcctcttgtaggcattcggattcctgatcatgcttttatgcaagacttggctcagatgtttgagggtccgcttgctctcactagtgccaacctcagctcccaggccagttctctgaatgtcgaggagttccaggatctctggcctcagttgtccttggttattgatgggggacaaattggggatggccagagccccgagtgtcgccttggctcaactgtggttgatttgtctgtgcccggaaagtttggcatcattcgtccaggctgtgccctggaaagtactacagccatcctccaacagaagtacggactgctcccctcacatgcgtcctacctgtgaaactctgggaagcaggaaggcccaagacctggtgctggatactatgtgtctgtccactgacgactgtcaaggcctcatttgcagaggccaccggagctagggcactagcctgacttttaaggcagtgtgtctttctgagcactgtagaccaagcccttggagctgctggtttagccttgcacctggggaaaggatgtatttatttgtattttcatatatcagccaaaagctgaatggaaaagttaagaacattcctaggtggccttattctaataagtttcttctgtctgttttgtttttcaattgaaaagtaattaaataacagatttagaatctagtgagagcctcctctctggtgggtggtggcatttaaggttcaaaccagccagaagtgctggtgctgtttaaaaagtctcaggtggctgcgtgtggtggctcatgcctgtaatcccaacattctgggaggcccaggcgggagaactgcttgagcccaggagttcagaatcagcctgggcaacatagcaatactccgtctcataaaaattaataaataaaaagtctcaggtgaccaaaggctcctgaagctagaaccaggtttggataaagattgaagagccacaggccactcttccctctgagccattgggcctagtggtgtcatgtattgtaattgctcgcagggagagcagtctttttggtgtaatagtgggatgtctgcttagttggcaggggttcagtccaaatggaagaatattgggaaataaacctccactatcctttatagccagggacttttttcttatttattcataaaataaattatagttaattatacccataacacctttatttaaatccagtgttctccgcagccttttgtctatttatatgtgtaccaagtgttaaacataattattattgggcatttgaactttgtttttctttaaagaaatgctgctattaaacatatttgtaaatggtt

SEQ ID NO: 106390 - DNA, 2307 bp, Homo sapiens
agttgttcagagtccagccaccggccctggggagggagagaagtcagggtattctgctcggggatggtcagggctccgcagctccatcgccagcatcctttggaaagccgcctctggcggagacagccggctgggggggcgctccaggtttggctgagacgttcccgccacagccggctccggcgccgcgcccagctgccgtaacatctcctcgcagctgcgatggtgtccaggagctgccgctgccgctgctccaccgcgtccagcagctgtctggcgcgctcctcccggcggctgttgggggtggcctcccgccgagccccagccccgccttcccgcggtccacgccggcagcctcccggtctccttcaatcctcctgggggtcgtggtccctttaagctgcccggcgcagaggcggggccgagtctcctggaccggaagctggctgggagcgtcacttcctcccggaagcgggcctgggcggatgtctccggcgcgtcggtgcagggggatgagggccgcggtggctgccagcgtggggttgagcgaggggcctgctggctcccggagcggtcgcctcttccgcccgccgagtcccgctccggcggcccccggcgcccggctgttgcggctcccggggagcggggccgtgcaggccgcgagcccggagcgcgccggctggaccgaggcgctgcgggccgccgtggccgagctgcgcgccggcgccgtggtggccgtccccaccgatacgctgtacggcctggcctgcgcggcgagctgctcggcggctctgcgcgctgtgtaccgcctcaagggtcgcagcgaggccaagcctctggccgtatgcctcggccgcgtggccgacgtctacagatactgccgtgtgagagtacctgaggggctcctgaaagacctactgccaggaccagtgaccctggtgatggaacgctcggaggagctcaacaaggacctaaacccttttacgcctcttgtaggcattcggattcctgatcatgcttttatgcaagacttggctcagatgtttgagggtccgcttgctctcactagtgccaacctcagctcccaggccagttctctgaatgtcgaggagttccaggatctctggcctcagttgtccttggttattgatgggggacaaattggggatggccagagccccgagtgtcgccttggctcaactgtggttgatttgtctgtgcccggaaagtttggcatcattcgtccaggctgtgccctggaaagtactacagccatcctccaacagaagtacggactgctcccctcacatgcgtcctacctgtgaaactctgggaagcaggaaggcccaagacctggtgctggatactatgtgtctgtccactgacgactgtcaaggcctcatttgcagaggccaccggagctagggcactagcctgacttttaaggcagtgtgtctttctgagcactgtagaccaagcccttggagctgctggtttagccttgcacctggggaaaggatgtatttatttgtattttcatatatcagccaaaagctgaatggaaaagttaagaacattcctaggtggccttattctaataagtttcttctgtctgttttgtttttcaattgaaaagtaattaaataacagatttagaatctagtgagagcctcctctctggtgggtggtggcatttaaggttcaaaccagccagaagtgctggtgctgtttaaaaagtctcaggtggctgcgtgtggtggctcatgcctgtaatcccaacattctgggaggcccaggcgggagaactgcttgagcccaggagttcagaatcagcctgggcaacatagcaatactccgtctcataaaaattaataaataaaaagtctcaggtgaccaaaggctcctgaagctagaaccaggtttggataaagattgaagagccacaggccactcttccctctgagccattgggcctagtggtgtcatgtattgtaattgctcgcagggagagcagtctttttggtgtaatagtgggatgtctgcttagttggcaggggttcagtccaaatggaagaatattgggaaataaacctccactatcctttatagccagggacttttttcttatttattcataaaataaattatagttaattatacccataacacctttatttaaatccagtgttctccgcagccttttgtctatttatatgtgtaccaagtgttaaacataattattattgggcatttgaactttgtttttctttaaagaaatgctgctattaaacatatttgtaaatggtt

SEQ ID NO: 106391 - DNA, 2274 bp, Homo sapiens
gactagttctagatcgcgagctagaactagtccccacgcgtccgctccggcgcgtcggtgcagggggatgagggccgcggtggctgccagcgtggggttgagcgaggggcctgctggctcccggagcggtcgcctcttccgcccgccgagtcccgctccggcggcccccggcgcccggctgttgcggctcccggggagcggggccgtgcaggccgcgagcccggagcgcgccggctggaccgaggcgctgcgggccgccgtggccgagctgcgcgccggcgccgtggtggccgtccccaccgatacgctgtacggcctggcctgcgcggcgagctgctcggcggctctgcgcgctgtgtaccgcctcaagggtcgcagcgaggccaagcctctggccgtatgcctcggccgcgtggccgacgtctacagatactgccgtgtgagagtacctgaggggctcctgaaagacctactgccaggaccagtgaccctggtgatggaacgctcggaggagctcaacaaggacctaaacccttttacgcctcttgtaggcattcggattcctgatcatgcttttatgcaagacttggctcagatgtttgagggtccgcttgctctcactagtgccaacctcagctcccaggccagttctctgaatgtcgaggagttccaggatctctggcctcagttgtccttggttattgatgggggacaaattggggatggccagagccccgagtgtcgccttggctcaactgtggttgatttgtctgtgcccggaaagtttggcatcattcgtccaggctgtgccctggaaagtactacagccatcctccaacagaagtacggactgctcccctcacatgcgtcctacctgtgaaactctgggaagcaggaaggcccaagacctggtgctggatactatgtgtctgtccactgacgactgtcaaggcctcatttgcagaggccaccggagctagggcactagcctgacttttaaggcagtgtgtctttctgagcactgtagaccaagcccttggagctgctggtttagccttgcacctggggaaaggatgtatttatttgtattttcatatatcagccaaaagctgaatggaaaagttaagaacattcctaggtggccttattctaataagtttcttctgtctgttttgtttttcaattgaaaagtaattaaataacagatttagaatctagtgagagcctcctctctggtgggtggtggcatttaaggttcaaaccagccagaagtgctggtgctgtttaaaaagtctcaggtggctgcgtgtggtggctcatgcctgtaatcccaacattctgggaggcccaggcgggagaactgcttgagcccaggagttcagaatcagcctgggcaacatagcaatactccgtctcataaaaattaataaataaaaagtctcaggtgaccaaaggctcctgaagctagaaccaggtttggataaagattgaagagccacaggccactcttccctctgagccattgggcctagtggtgtcatgtattgtaattgctcgcagggagagcagtctttttggtgtaatagtgggatgtctgcttagttggcaggggttcagtccaaatggaagaatattgggaaataaacctccactatcctttatagccagggacttttttcttatttattcataaaataaattatagttaattatacccataacacctttatttaaatccagtgttctccgcagccttttgtctatttatatgtgtaccaagtgttaaacataattattattgggcatttgaactttgtttttctttaaagaaatgctgctattaaacatatttgtaaatggtttgtttttcttcttttgaattatttccttaggagagtaggtcaaagtgtaggaagtatttatggctctcagtatggattagccttcaaaagaactgagtcaagttacactgctgttagcagtgtgtgagaatggctgcctctgccccctggccttcccatgtttagtatttttcagattgtgtgtgtgttaaatgaagccagtgttgctaccttctgtgaattactacaggtcaacatccaaccctttcagctgtccctgcctgccttggtttccccagctaagccccaaagccaggtggccaggcctgctcatctctctggtggggcttaatatcagttacctaactggggctgggtgtccttgaggtgaccactggggtctatttcctccttcctccccttccctcttgta

SEQ ID NO: 106392 - DNA, 2088 bp, Homo sapiens
  misc_feature (1863)..(1863): n is a, c, g, or t
gactagttctagatcgcgagctagaactagtccccacgcgtccgctccggcgcgtcggtgcagggggatgagggccgcggtggctgccagcgtggggttgagcgaggggcctgctggctcccggagcggtcgcctcttccgcccgccgagtcccgctccggcggcccccggcgcccggctgttgcggctcccggggagcggggccgtgcaggccgcgagcccggagcgcgccggctggaccgaggcgctgcgggccgccgtggccgagctgcgcgccggcgccgtggtggccgtccccaccgatacgctgtacggcctggcctgcgcggcgagctgctcggcggctctgcgcgctgtgtaccgcctcaagggtcgcagcgaggccaagcctctggccgtatgcctcggccgcgtggccgacgtctacagatactgccgtgtgagagtacctgaggggctcctgaaagacctactgccaggaccagtgaccctggtgatggaacgctcggaggagctcaacaaggacctaaacccttttacgcctcttgtaggcattcggattcctgatcatgcttttatgcaagacttggctcagatgtttgagggtccgcttgctctcactagtgccaacctcagctcccaggccagttctctgaatgtcgaggagttccaggatctctggcctcagttgtccttggttattgatgggggacaaattggggatggccagagccccgagtgtcgccttggctcaactgtggttgatttgtctgtgcccggaaagtttggcatcattcgtccaggctgtgccctggaaagtactacagccatcctccaacagaagtacggactgctcccctcacatgcgtcctacctgtgaaactctgggaagcaggaaggcccaagacctggtgctggatactatgtgtctgtccactgacgactgtcaaggcctcatttgcagaggccaccggagctagggcactagcctgacttttaaggcagtgtgtctttctgagcactgtagaccaagcccttggagctgctggtttagccttgcacctggggaaaggatgtatttatttgtattttcatatatcagccaaaagctgaatggaaaagttaagaacattcctaggtggccttattctaataagtttcttctgtctgttttgtttttcaattgaaaagtaattaaataacagatttagaatctagtgagagcctcctctctggtgggtggtggcatttaaggttcaaaccagccagaagtgctggtgctgtttaaaaagtctcaggtggctgcgtgtggtggctcatgcctgtaatcccaacattctgggaggcccaggcgggagaactgcttgagcccaggagttcagaatcagcctgggcaacatagcaatactccgtctcataaaaattaataaataaaaagtctcaggtgaccaaaggctcctgaagctagaaccaggtttggataaagattgaagagccacaggccactcttccctctgagccattgggcctagtggtgtcatgtattgtaattgctcgcagggagagcagtctttttggtgtaatagtgggatgtctgcttagttggcaggggttcagtccaaatggaagaatattgggaaataaacctccactatcctttatagccagggacttttttcttatttattcataaaataaattatagttaattatacccataacacctttatttaaatccagtgttctccgcagccttttgtctatttatatgtgtaccaagtgttaaacataattattattgggcatttgaactttgtttttctttaaagaaatgctgctattaaacatatttgtaaatggttnaaaaaacaggccggacgcgggggcgagcggaacggcgggcgcggcggccgggggggccccggcagcacgccaggcagggcgggcgcgccgggccagagatagcagggacaccagcgcgggccccgacgcaagcgggaacagacgagacggtcctggacgggggcgggccaccccgcgcgggaggggagggagcgacgcggggcgcccgaccgcccaagacacgcg

SEQ ID NO: 106393 - DNA, 1220 bp, Homo sapiens
gactagttctagatcgcgagctagaactagtccccacgcgtccgctccggcgcgtcggtgcagggggatgagggccgcggtggctgccagcgtggggttgagcgaggggcctgctggctcccggagcggtcgcctcttccgcccgccgagtcccgctccggcggcccccggcgcccggctgttgcggctcccggggagcggggccgtgcaggccgcgagcccggagcgcgccggctggaccgaggcgctgcgggccgccgtggccgagctgcgcgccggcgccgtggtggccgtccccaccgatacgctgtacggcctggcctgcgcggcgagctgctcggcggctctgcgcgctgtgtaccgcctcaagggtcgcagcgaggccaagcctctggccgtatgcctcggccgcgtggccgacgtctacagatactgccgtgtgagagtacctgaggggctcctgaaagacctactgccaggaccagtgaccctggtgatggaacgctcggaggagctcaacaaggacctaaacccttttacgcctcttgtaggcattcggattcctgatcatgcttttatgcaagacttggctcagatgtttgagggtccgcttgctctcactagtgccaacctcagctcccaggccagttctctgaatgtcgaggagttccaggatctctggcctcagttgtccttggttattgatgggggacaaattggggatggccagagccccgagtgtcgccttggctcaactgtggttgatttgtctgtgcccggaaagtttggcatcattcgtccaggctgtgccctggaaagtactacagccatcctccaacagaagtacggactgctcccctcacatgcgtcctacctgtgaaactctgggaagcaggaaggcccaagacctggtgctggatactatgtgtctgtccactgacgactgtcaaggcctcatttgcagaggccaccggagctagggcactagcctgacttttaaggcagtgtgtctttctgagcactgtagaccaagcccttggagctgctggtttagccttgcacctggggaaaggatgtatttatttgtattttcatatatcagccaaaagctgaatggaaaagttaagaacattcctaggtggccttattctaataagtttcttctgtctgttttgtttttcaattgaaaagtaattaaataacagatttagaatctagtg

SEQ ID NO: 106394 - DNA, 1808 bp, Homo sapiens
gactagttctagatcgcgagctagaactagtccccacgcgtccgctccggcgcgtcggtgcagggggatgagggccgcggtggctgccagcgtggggttgagcgaggggcctgctggctcccggagcggtcgcctcttccgcccgccgagtcccgctccggcggcccccggcgcccggctgttgcggctcccggggagcggggccgtgcaggccgcgagcccggagcgcgccggctggaccgaggcgctgcgggccgccgtggccgagctgcgcgccggcgccgtggtggccgtccccaccgatacgctgtacggcctggcctgcgcggcgagctgctcggcggctctgcgcgctgtgtaccgcctcaagggtcgcagcgaggccaagcctctggccgtatgcctcggccgcgtggccgacgtctacagatactgccgtgtgagagtacctgaggggctcctgaaagacctactgccaggaccagtgaccctggtgatggaacgctcggaggagctcaacaaggacctaaacccttttacgcctcttgtaggcattcggattcctgatcatgcttttatgcaagacttggctcagatgtttgagggtccgcttgctctcactagtgccaacctcagctcccaggccagttctctgaatgtcgaggagttccaggatctctggcctcagttgtccttggttattgatgggggacaaattggggatggccagagccccgagtgtcgccttggctcaactgtggttgatttgtctgtgcccggaaagtttggcatcattcgtccaggctgtgccctggaaagtactacagccatcctccaacagaagtacggactgctcccctcacatgcgtcctacctgtgaaactctgggaagcaggaaggcccaagacctggtgctggatactatgtgtctgtccactgacgactgtcaaggcctcatttgcagaggccaccggagctagggcactagcctgacttttaaggcagtgtgtctttctgagcactgtagaccaagcccttggagctgctggtttagccttgcacctggggaaaggatgtatttatttgtattttcatatatcagccaaaagctgaatggaaaagttaagaacattcctaggtggccttattctaataagtttcttctgtctgttttgtttttcaattgaaaagtaattaaataacagatttagaatctagtgagagcctcctctctggtgggtggtggcatttaaggttcaaaccagccagaagtgctggtgctgtttaaaaagtctcaggtggctgcgtgtggtggctcatgcctgtaatcccaacattctgggaggcccaggcgggagaactgcttgagcccaggagttcagaatcagcctgggcaacatagcaatactccgtctcataaaaattaataaatattgaagagccacaggccactcttccctctgagccattgggcctagtggtgtcatgtattgtaattgctcgcagggagagcagtctttttggtgtaatagtgggatgtctgcttagttggcaggggttcagtccaaatggaagaatattgggaaataaacctccactatcctttatagccagggacttttttcttatttattcataaaataaattatagttaattatacccataacacctttatttaaatccagtgttctccgcagccttttgtctatttatatgtgtaccaagtgttaaacataattattattgggcatttgaactttgtttttctttaaagaaatgctgctattaaacatatttgtaaatggtt

SEQ ID NO: 106395 - DNA, 2277 bp, Homo sapiens
  misc_feature (1234)..(1234): n is a, c, g, or t
  misc_feature (1248)..(1248): n is a, c, g, or t
  misc_feature (1277)..(1277): n is a, c, g, or t
  misc_feature (1282)..(1282): n is a, c, g, or t
  misc_feature (1285)..(1286): n is a, c, g, or t
  misc_feature (1295)..(1295): n is a, c, g, or t
  misc_feature (1304)..(1304): n is a, c, g, or t
  misc_feature (1324)..(1324): n is a, c, g, or t
  misc_feature (1355)..(1355): n is a, c, g, or t
  misc_feature (1390)..(1390): n is a, c, g, or t
  misc_feature (1398)..(1398): n is a, c, g, or t
  misc_feature (1418)..(1418): n is a, c, g, or t
  misc_feature (1422)..(1423): n is a, c, g, or t
  misc_feature (1432)..(1432): n is a, c, g, or t
  misc_feature (1434)..(1434): n is a, c, g, or t
  misc_feature (1436)..(1436): n is a, c, g, or t
  misc_feature (1448)..(1448): n is a, c, g, or t
  misc_feature (1450)..(1451): n is a, c, g, or t
  misc_feature (1458)..(1458): n is a, c, g, or t
  misc_feature (1475)..(1475): n is a, c, g, or t
  misc_feature (1500)..(1500): n is a, c, g, or t
  misc_feature (1506)..(1506): n is a, c, g, or t
  misc_feature (1510)..(1510): n is a, c, g, or t
  misc_feature (1512)..(1512): n is a, c, g, or t
  misc_feature (1523)..(1524): n is a, c, g, or t
  misc_feature (1531)..(1532): n is a, c, g, or t
  misc_feature (1548)..(1548): n is a, c, g, or t
  misc_feature (1557)..(1558): n is a, c, g, or t
  misc_feature (1586)..(1586): n is a, c, g, or t
  misc_feature (1598)..(1598): n is a, c, g, or t
  misc_feature (1601)..(1603): n is a, c, g, or t
  misc_feature (1610)..(1610): n is a, c, g, or t
  misc_feature (1618)..(1618): n is a, c, g, or t
  misc_feature (1622)..(1623): n is a, c, g, or t
  misc_feature (1625)..(1625): n is a, c, g, or t
  misc_feature (1627)..(1627): n is a, c, g, or t
  misc_feature (1630)..(1631): n is a, c, g, or t
gactagttctagatcgcgagctagaactagtccccacgcgtccgctccggcgcgtcggtgcagggggatgagggccgcggtggctgccagcgtggggttgagcgaggggcctgctggctcccggagcggtcgcctcttccgcccgccgagtcccgctccggcggcccccggcgcccggctgttgcggctcccggggagcggggccgtgcaggccgcgagcccggagcgcgccggctggaccgaggcgctgcgggccgccgtggccgagctgcgcgccggcgccgtggtggccgtccccaccgatacgctgtacggcctggcctgcgcggcgagctgctcggcggctctgcgcgctgtgtaccgcctcaagggtcgcagcgaggccaagcctctggccgtatgcctcggccgcgtggccgacgtctacagatactgccgtgtgagagtacctgaggggctcctgaaagacctactgccaggaccagtgaccctggtgatggaacgctcggaggagctcaacaaggacctaaacccttttacgcctcttgtaggcattcggattcctgatcatgcttttatgcaagacttggctcagatgtttgagggtccgcttgctctcactagtgccaacctcagctcccaggccagttctctgaatgtcgaggagttccaggatctctggcctcagttgtccttggttattgatgggggacaaattggggatggccagagccccgagtgtcgccttggctcaactgtggttgatttgtctgtgcccggaaagtttggcatcattcgtccaggctgtgccctggaaagtactacagccatcctccaacagaagtacggactgctcccctcacatgcgtcctacctgtgaaactctgggaagcaggaaggcccaagacctggtgctggatactatgtgtctgtccactgacgactgtcaaggcctcatttgcagaggccaccggagctagggcactagcctgacttttaaggcagtgtgtctttctgagcactgtagaccaagcccttggagctgctggtttagccttgcacctggggaaaggatgtatttatttgtattttcatatatcagccaaaagctgaatggaaaagttaagaacattcctaggtggccttattctaataagtttcttctgtctgttttgtttttcaattgaaaagtaattaaataacagatttagaatctagtgggggccgcgcgggngggggggggggggngttgggggtgcgggccggccgggggggcnggggnggnnggaggaggntcggggggnggcgggggggggggcgggcnggggggccgcggcgggggggggggcccgggngggggggcggctggagcccgggagttcggtttctntttgggtntttttgcaggtcgccgtggntggnngaggagganangnaagggcgcgggngnncaggggngccgggggggggggccngggggggtggaaggaggggggggcngcgggncggncngccgggggggnngtggggnngggggggggcgggganggggagggnnggcggggggggggggggggggggggggngggggggggggnggnnnggggggngggggggngggnngnanggnngaatattgggaaataaacctccactatcctttatagccagggacttttttcttatttattcataaaataaattatagttaattatacccataacacctttatttaaatccagtgttctccgcagccttttgtctatttatatgtgtaccaagtgttaaacataattattattgggcatttgaactttgtttttctttaaagaaatgctgctattaaacatatttgtaaatggtttgtttttcttcttttgaattatttccttaggagagtaggtcaaagtgtaggaagtatttatggctctcagtatggattagccttcaaaagaactgagtcaagttacactgctgttagcagtgtgtgagaatggctgcctctgccccctggccttcccatgtttagtatttttcagattgtgtgtgtgttaaatgaagccagtgttgctaccttctgtgaattactacaggtcaacatccaaccctttcagctgtccctgcctgccttggtttccccagctaagccccaaagccaggtggccaggcctgctcatctctctggtggggcttaatatcagttacctaactggggctgggtgtccttgaggtgaccactggggtctatttcctccttcctccccttccctcttgta

SEQ ID NO: 106396 - DNA, 2758 bp, Homo sapiens
cgttttttttcttattactaagatgtaaaacgtagtaataagctacattgtgtccccagactcggccagacacatagtatcacacatagtatccagcatcaggccttgggccttccttgggcttattacatccagctaataagcctggatagagtaacttgcgtgcagtcacatagagatacgatggaaagtccagagttagagcccgtatccctgctcagaactccattcgatgggttttccattcccagacctagagtggggctcagggttcttagaaagtgagagttcagcatcccttcccattctcagagtgcaggtttgacttggtcctggtggctgtaccccaggagcaagaatcgggatgtggcacagggaggggaggtttttaccttgtcagcaatcatttgacctgtccaacacagtaactggtatttatgatttcctgtcccagatttccaggcctaactgccactgcagtgtcttccttggggggttggggaagctctagctcagttaacaattcagtccactgctctagggggagtatccttctcatagcccaaagactgagtgctggtggcatgcagaatctaccatgttctactcttcctaccctgatcagagtcgcagtgagatccaggagcatagttctagagctagaaggagctggaatcacttgttccaggttacgcagccattaagtgaccagatttttacctagtttttttttgttttgttttgtttgagacagtctcactctcttgcccaggctggagtgcagtggcaccatctcagctcactgcaacctccatctcccgggttcaaacagttctcctgcctcagcctcccgagtgagtagctgggattacaggcgtgtgccaccatgcccggctaatttttgtatttttagtagagatggggtttcactatgttgaccaggctagtctcaaactcctggcctcaagagatccagcctcccaaagtgctgagattacaggcgtgagccaccatgcctggtctttttacctagtttttgactcttgaccctgttctcttatctttgcggcaagccaggtcaaagaaaagatcatcctagtcctgtcttggctacatagattagaacaaatgaaatgaggacataggatcatctagtccagcccacttgtcttgtaggcctggatagagtaacttgcatgcagtcacacggagatacgatggaaagtctagagttatagcccgtatctctgcccagaactccattcattgtacttatatttccctaactgaagcaatgtgtgaaatttccttttgacatagcaagattttctttaaaccctagataggtgttacttggagtgctaacccaggaggcctccaaacctcatagaatacagtgtctttggcacagttgaccttaactaaatgaagctcctttctctgcttagaggaaagtgccttctgttttaagactatatggcctttgatgactgcgtgcagtttgacattattggatacaccagggatagtgtccatgctcttccttctccctcttctcaggagttccaggatctctggcctcagttgtccttggttattgatgggggacaaattggggatggccagagccccgagtgtcgccttggctcaactgtggttgatttgtctgtgcccggaaagtttggcatcattcgtccaggctgtgccctggaaagtactacagccatcctccaacagaagtacggactgctcccctcacatgcgtcctacctgtgaaactctgggaagcaggaaggcccaagacctggtgctggatactatgtgtctgtccactgacgactgtcaaggcctcatttgcagaggccaccggagctagggcactagcctgacttttaaggcagtgtgtctttctgagcactgtagaccaagcccttggagctgctggtttagccttgcacctggggaaaggatgtatttatttgtattttcatatatcagccaaaagctgaatggaaaagttaagaacattcctaggtggccttattctaataagtttcttctgtctgttttgtttttcaattgaaaagtaattaaataacagatttagaatctagtgagagcctcctctctggtgggtggtggcatttaaggttcaaaccagccagaagtgctggtgctgtttaaaaagtctcaggtggctgcgtgtggtggctcatgcctgtaatcccaacattctgggaggcccaggcgggagaactgcttgagcccaggagttcagaatcagcctgggcaacatagcaatactccgtctcataaaaattaataaataaaaagtctcaggtgaccaaaggctcctgaagctagaaccaggtttggataaagattgaagagccacaggccactcttccctctgagccattgggcctagtggtgtcatgtattgtaattgctcgcagggagagcagtctttttggtgtaatagtgggatgtctgcttagttggcaggggttcagtccaaatggaagaatattgggaaataaacctccactatcctttatagccagggacttttttcttatttattcataaaataaattatagttaattatacccataacacctttatttaaatccagtgttctccgcagccttttgtctatttatatgtgtaccaagtgttaaacataattattattgggcatttgaactttgtttttctttaaagaaatgctgctattaaacatatttgtaaatggtt

SEQ ID NO: 106397 - DNA, 629 bp, Homo sapiens
gcagcaacacacgagaaaggcagggaccctgttcccttggcgtatttgtgctaattggggaggcccccgggaaaaaagcaaacaaacacagtagcttaatttaatagcgaatgccttgaagaaaataaaacgtggagcttgatcccactatcatgatatcacagcggtgcagctgttgtagtccctgagaccagaggcacatgggcgtcaagccaggggtgcgcctctggagccctgctttctgctcaagctcttagggaggtgaagcagggagacaggcggctcccattgtaaactcgaaggattccttttctacgtctgcctagagtctaggaaaggaccaccagtggcccttcaattttgaatggatttattcttctgtgtttcccagatactgccgtgtgagagtacctgaggggctcctgaaagacctactgccaggaccagtgaccctggtgatggaacgctcggaggagctcaacaaggacctaaacccttttacgcctgtgagtcaagttttctcttgtgtccccagactccaggccacttggctttcactaggatccagataagacttaccctcttatcccttccaacctttctcatgatccctttccccttgccttaca

SEQ ID NO: 106398 - DNA, 274 bp, Homo sapiens
taactttttgtatgtcatttactatacacacatagctttttattagtgtatatacacaaagggattttatcttatctctaatttatatcaacagtagcatttaggttttcagtgttcatgtctattcaactatgaccattaagactttccagactacatttgttaaaaaaatctatctctctctctatatatctatctctatatatctgcatatctatgggtattacaaaaattcattttatttaacaagtttttagaataaagtgttaataat

SEQ ID NO: 106399 - DNA, 414 bp, Homo sapiens
gtggctgggagaacccccagcgctgggcaggggcaccccagagagaatgctcgtggcccctccttcgcagctctgaaggcaaggtgtgtgccccaggctccatgggcagagttggctaaaggctggaatccccttcacttcagccctagcttggtggttctcaaactttgctgcactttggaaccacctggggacctttaacaaatactggtgcgtggctcccacccccagacattctgactgaattggtagagggtgtgacctgggcataggagtgtgaacatttccccaggtgattctaatgtgcagaaaagcttgggaaccaatggacgctgtcttttgaggtctagttctgatgtttatggagcaacaccatcctagaggttgagggtggagtagggtccctggaacaag

SEQ ID NO: 106400 - DNA, 300 bp, Homo sapiens
tagccccaggccccagccacctagatgcaccttacatgctcacctgagcagccacctgcaaggctggctcccacttcacaacgggagtccaaggccaggcccaggactcaagaactcctactggcgagcccggggctgagattcaaactcagcttcctgacaaggtgtggtccggatgttaaagacaaggaagacagaagagtgccacctggggctctaggaacccttaacatgacccagctgcctcctgcagtggagatggtgagactcaggcagaataaagataccagctgtgtctat

SEQ ID NO: 106401 - DNA, 2713 bp, Homo sapiens
  misc_feature (1189)..(1189): n is a, c, g, or t
aaacatatgtgctgctaataacagagccctagaatgcataaagcaaacctgacagaattgaagggagagagagatagttctacaataatagttgaggactttaatacccaactttcagtcatagatagaataactggacacagaatcagcaaggaaatggaagacttgaacaacactgtaaactaaatctaacagacatctctagaatactctacttaatagcagcaccatacaggttgagtatcctatctgaaatgcttgggaccagagtgtttttatattttgaagtatttgcattatacttaccagttgagcatcccaaatccaaaaatcacagattcaaaatgctgcaaaacgtttctagcaaactccagtgggcattttctttgagtcatcatgctgcactcagaaagttttagattttggagcattttggattttcaggtttggggtgctcaccctgtattcttaagtgcacatgaaatattctctggggtagaccataggatagtctataaaacaagcctcagctggatgcggtgactcacacctgtaatcccagcactttgggaggctgaggcaagcagattgtgaggtcaggaggttgagaccaacctggctaacatggtgaaaccctgtctctactaaaaatacaaaaaattagctgggtgtggtggcacacgcctgtagtcccagctactcgggaggctgaggcaggagaatcgcttgaacccaggagctgagacggtgccattgcactccagcctgggcgacagggcgagactccatctcaaaaaaaaaaagcctcaatacatttaaaactgttgaaattagacaaagtaagttttctgactataatggggtgaaattagaaaccaggagtagagaaaatgttttaaattcgtaagtatgtggaaattaaataccacagttataaataagcaatggaacaaagaggaaatcacaaaagatgccacaaaacactttgagatgaacgaaatgaaaatacagtgtgtcaaaacttatgagatgcaagaagagcagcccttagggggtaatttatagctataaatgcctatatttaaaaagaagaaagatctcaaatcagtaacctaactttgcaccttaagaactagaaaaacaacccaaagcaaggagaaggaagaaaatagtaaatattagagtaganatgaacaaaacagagaataggaaaaaaatagagaaaatgaacaaaacccaagttggttctttgaaaagataaacaaaattgataaacccttggctagactgaccaagaaaatagaggactcaaatccctaaaatcaggaatgaaatagggaacattacttccgactttacagatattgaaaggattataagggaataccatgaacaattatataccaacagattatgtaacctagatgaaatggacaaattcctagaaagatataaatactaaaactgactcaagaagaaatagagaattgaaataaacctgtaagtacagagattggattaataataaagaaaaacattaaaaaaatactcatcaaagaaaaccctaggccagatggcttcactggtgaattataaagaaggttgaatgccagttcttcacaaacttttccaaaaaataggatcaatgggaacacttcctaacccattctacaaggccagtattacaaaaccaaagataacacaagaaaactacagaccaataccggttataaatatagacaaaaatctttgacaaaatattagcaaactgaatctagcagcatattaaaatgactatatacgatgacaaagtgtaatttatctcaggaatgaaagcttggttcagtatatggaaattaatgtaatataatctactaataaaggacaaaaaacacgcatggattatctcaacttatgaagaaaaaccatttgacaaaattcaacatttgtttgtgataaaaacactcagcaaactaggaatagaagggatattcctcaacttggtaaacaagcatttatgaaaaaccgacagctaacaatcatacttaatgctgaaagattgggtaccttcctcctcccatcagtaataagacaaatatgtctgttcttgccatttctatttaacattatactggtggttctatataggtcattaggcaataaaaagaaaaaaaatccaaattaggcaaaagtaaagctacctatgtttacagttgatatggtcacacacatttaaaaaacctaaagaatctaccagtaattatcagagctaataaacaagttcagcaatgtccaggatatgagatcagtaaacaaaaatcagttgtatttctgtacactaccagtgaacaatctgaaaaggaaattaataaaacaattcaatttataattagcattaaaaagaataaaatacttaggaatcaatttaccaaaagacttacaacgcttatagataacaaactataaaattattttaaggaattaaagacctaaattggacatcccatgtatatgtattggaagtcttaatattgttctgatagcagtactccccagtaatctaggaattcactgtaatccctctcaaaattgcagctgctttttttgttttgttttgaaacagggtctcctgtcacccaggctgtaataaagtggtgcgattggctcactgcagccttgaactttcaggctgaagcgatcctcccatctcaac

SEQ ID NO: 106402 - DNA, 803 bp, Homo sapiens
aaacatatgtgctgctaataacagagccctagaatgcataaagcaaacctgacagaattgaagggagagagagatagttctacaataatagttgaggactttaatacccaactttcagtcatagatagaataactggacacagaatcagcaaggaaatggaagacttgaacaacactgtaaactaaatctaacagacatctctagaatactctacttaatagcagcaccatacaggttgagtatcctatctgaaatgcttgggaccagagtgtttttatattttgaagtatttgcattatacttaccagttgagcatcccaaatccaaaaatcacagattcaaaatgctgcaaaacgtttctagcaaactccagtgggcattttctttgagtcatcatgctgcactcagaaagttttagattttggagcattttggattttcaggtttggggtgctcaccctgtattcttaagtgcacatgaaatattctctggggtagaccataggatagtctataaaacaagcctcagtgggattacaggcacgagccaccgcacccggcctctttttttaaatagacatttttttcgaccagttttaggttcacaacaaaattgagcagaatgtatagtgatttccctcataccccctgctgcatgcatgcgtagcctcccctattatcgatatcccccaccagaacggtacatttgttacaactaatgaacctacattgacacatcattatggcccagagtccatagtttgcattagagttcactctctttttttgagacagagtctcg

SEQ ID NO: 106403 - DNA, 617 bp, Homo sapiens
ctgttcactctttgggtccgcactgcctttatgagctgtaacactcaaactgcgaaggtctgtggcttcactcctgaagtcagtgagaccatgaacccaccagcaggaagaaattggacacatctgaagaaacaaactccagacacaccatctttaagagctgtaacactcactgcaaaagtccgcgacttcattcttgaagtcagcgagaccaagaacccacaggaaggaataaattccagacacactactactgtccctgttcattaatctatttattcggcaagaaaatattgataacacgcactgtcctgtgtactagagatggacagaatcatgacttttggcttcagggcctcacagttcagttggagagagcaacatggcaccagttgattccagggcaacacaattagtgacataacagagacagatgaaagggattgcagaagcagagagagcatcctgactaattgaatctgcaaatggtgaagaagcccttccaggggtgatgctgtgagctgaattgtgtattagtaggaatttctcggttcaacacacagagaaataacaagttttctgttgtaaactattccttactaattaaaaacaaagtg

SEQ ID NO: 106404 - DNA, 166 bp, Homo sapiens
catgtagtctcttggaaagctggttaatttcaagtcaatcacagcagttctggcagaggagcagccccatcatttctccatttggtagacaccagttaggaagagcccttgaaacttgtcctcttctgccttttactgattcccctcccagaggaaagctttgtgt

SEQ ID NO: 106405 - DNA, 478 bp, Homo sapiens
aagatctgtgagacggctcattccattgctaggtgagtgagtgttctctcggtcgtgagctctgcctcctgggttcaagcaatccccctgcctcagcctcctgagtaactgttactacaggtactcaccaccacacccagctaatttttgtatttttagtagagacagggtttcatcatgttggtcaggctggtctcaaactccttaagtgatccacttgcctcagccttccaaagtgctgggattacaggtgtgagccactgtgcctggccaacagttacattttctaaagtgagtaatgtaagtatgtatataggtacaggcttgtttctaatcagtagaattggtggctccaagtagctgcctgtaaagctatcatttacttactgaaggttttctatatgccagggacagggctaattgtgttacatgtattatctcatttagacctcataacaattctgtgacgttggaatta

SEQ ID NO: 106406 - DNA, 559 bp, Homo sapiens
cagggcgggctgccccttatccagagtccatcacttctccagtccagatcctggctccaggcccactttgagtgctgctggcttgtcccggaggactgtgtatgaaaacaggagctcctggaagcacagtctttgttcggagagcagttagttaatcaaaggatgagggaaggataattggagagacagcacgactactgcaaaggtttggtgccccacatggccagggactctccagcaggggtggccgcctttgagggctcttttgggaagggatgggtgtgtacctggaagacacatacagtggttggttattaaacgttaacgaatccgtgcacattttatcaaatgtcttcttttctggtgaaaataatatatggttctcctgaactctcaggggagtggaaggaaaagggccagttggcacacaatggagcatacatgtcttttattctaaaaactattaagagacctgaaaatatgagcaatatagatagtaaggaggcaagaaaaaaaaggatgtctattagaccaggagtccccaacccctgggtcatgg

SEQ ID NO: 106407 - DNA, 426 bp, Homo sapiens
ccataaccttgatatccaaactagacaagaacaatacaagaaaagtaaattaccggccagccttacttgtgaacataagatataaaaatctttacaaaatattagcaaagcaaatccagtaatgtattttaaaacaaacggggagccgggcgcagtggctcacccctgtaatcccagcactttgggaggctgaggcgggcggatcatgaggtcaggagttcgagaccagcctgaccaacgtggtgaaaccccgtctctaccaaaaatacaaaaattagccaggggtggtggtgtgtgcctggaatcccagctactcaggaggctgaggcaggagaatcacttgaacctaggaggcagaggttgcagtgagccgagatagcaccactgcactccagcctgggcgacagagagagactccgtctcaaa

SEQ ID NO: 106408 - DNA, 735 bp, Homo sapiens
caaaccaatttttcctttgctgtttgttattagtcattcaaatatttgccttctcattgagttagcgttttagtcaaaatagctttcaatatgctaaaataagtaaactattaagttctggtggagtttttaaattaaaaataatttattatgcagtgatgtatattaaatggatagtttaatatatgtatatgtaaataatgtttttaaatagcattatatttaatataatatttaaataaatgttgcccacatttaaaaatttcttatttgtttttagtttagtagctctaaaaattctttaaaatataatacaaaataaaacacagtagattctgtcaattactgaagagtgtatgcatatataacatacctatatgttacacatatataacatgcacatgtataacaacatataatgcttttctttgttgtttttccaagggccattattataaaatcagagatatgttcttccagaaaatgtttgacttgaaacataatggaaaattttaaattaaataacatttaattttaagtaaaaacatcttctgacatgatataaattctcaacctattattgtaatgaattttaccctaatatattaactggtaaaaaatatgaaaaaatacctaaggttgaaatttcttcttaaaatatacgtgctaactttatttatttatttatttatttattttcagacggagtcttgctctgtcgcccaggctggagtg

SEQ ID NO: 106409 - DNA, 457 bp, Homo sapiens
accagagcactagcctcatgcggaggtttacaccaagctgaaactaagtggtttttctggttttccaagaaatcgagaactgaaagaaagaagaagaaagaaagaaagagagagagagaaagaaagaaagaaacaaagaaacaaagaaagaaaggaaaagaaaaaaaaaactaaggccaggcaaggtggcttatgactgtaatttcagcactttggaagattgaggcaggaggatcacttgaggccagaagttcgagacaagactgagcaacagggagacccctgcctctacaaaaaaatttacaaattagccagatgtggtgacacatacctgtagtcccaactactcaggaggctgaggtgggaggatggcttgagcccaggagctggaggctgcagtgagctatgattgtaccactgcacttcagcctgggcaacaaagggaagccctgtctga

SEQ ID NO: 106410 - DNA, 456 bp, Homo sapiens
tgggattcaccaccttaaaaagcagataaaacaattaaaatgtgttaggttttataccgaagttttatattgaatttttaaaaatgtgaagtttaacctgctgccttcccttcttatgcatgtattcatttacaaatgctttcagtatgactttggacagtcattcagtcaaaacttctctgcaaaagttaatagtgactatcttttaaaaatgttttgtctgtaatattcttctcacctgtacatattgattacccttaactatggtcacgttcttgatatgatagagacctttaacatctaatgtcctaactaatgattgctttatagaaaaatgatgggttgttaaagaatattcaagtgacataactttaaaaattaaatacactaacatagcaaatcatccaatgtgtgaatatttaaaggatctattgacctcactattgctttataatg

SEQ ID NO: 106411 - DNA, 420 bp, Homo sapiens
gtcatgttcagctatggtcatcaacataggagtgattctcattccttctacaggaaatatatgttgggccacatactgggccaaccattgctagacaagaaagctatgccctatttgcatggcacatgtattttatcttgagagcacatctcaacagactgagattctaatttctgattctgcaacggtacaaccttgagtaaattattaaatatctattcttcccttctgaaaagtacagatgctgcccactcacaaattatccagaaggatactatgatgctgacagtttataaaacagatgaattttaagaagaaaagcagtcatgttgctacttagtaacaaaagatttgagatttaatttaaaaacttaatgaaatcttgtaacttcatgttaataggaaatttttttagagtac

SEQ ID NO: 106412 - DNA, 415 bp, Homo sapiens
gtgtggggattcatgggggtgggaattttctggagacccttttcaggagtccatgaggccaaaattattttcttaatactactatgaggttgcctttttcattcacattctctcaagatgtagtagttttttaagagctacctgagaagtgctaacgttagcaacagaagcagctagagaatccagttctcacatgaaatcagacattagagacttttcttactagatttaaaaaaaattacttgtcataaaaatgttgtttgttagctggtaacgcattagtaattttaaatcaatattttaaaactttaattctaatatagtaagtattgatataactgacagaaacaaaagctccctgggctctttaacaatctttaagaccgtaaagggatcttgaggtcaaatttgagaa

SEQ ID NO: 106413 - DNA, 265 bp, Homo sapiens
taaactcgggaggtggagatttcagtgagctgagatcgtgccactgcactccagtctgggtgacgaagcaagactctgtgtcaaaacaaaaccaaaaacaaaaaaaagatacctaaatgcttaaaagatgaaaaaattcaagtgatacaagaatgtattaaatagagcgaaagccacttacaatctcacctctcctcctctagatgcagctggtgttaaggctcactttcatgactgctgacaccagcatatgttcagtgtcctc

SEQ ID NO: 106414 - DNA, 341 bp, Homo sapiens
ggactcccacatggctttcctctttcctttgagctggattcattttcactgagtcccgagtcctgcacatctgacaattgcttcagaccttggacatgcttgaattattttatgcaaatcatttgaaaaggcaaagtaccactgttctttcttgagtttcttcgtaaactggtttctaatttatctgctgctttttctcgatccaatttgtgcctatgtcttactatagattctttggaaataaagaaataaagaatatatctgtagctattttgttaaactaagaatgttttaaaatattttattgtaaaataaaattcctttgttctctcagaacttag

SEQ ID NO: 106415 - DNA, 318 bp, Homo sapiens
ttaaataaatgtctagctcagcttgtgtttcttcttttctaatatgtattaaagctatacattttcccctaagtagaggggctgtatttaacacatgttaatattcagtaatgattagtttgattcgttttaaatattttttagtttccattatggtttctcttttgacccaatatttagaaagtatgttttaaaagctctgatcatattaggtttgctttagatgttgaaatcaattgcattgtaatcagacaatacagcttccatgatacaggaaattttctatctacttagagtaaccatttaaaaaaaatacag

SEQ ID NO: 106416 - DNA, 776 bp, Homo sapiens
ctaaatttgatgttaggtacctataattaccttcccttcttcttatttttacaagacagaatgccagcagaaaaaaacaaattcctgttcacttggtaattttaaacacaaccaggtcaaaagtttcaaatctagtgttaagtccgtaactgaaggcaccattccaaaactacttgagtataggtgagaacttgacagataattatggttgcttgacctgggtcttggggcatctaccaaatcttaatggtagtctcactgtctgtggccatgtgagctataatctactgccctggtcaaacttaaccaaaattctgttttctttcagaagattccctaacattggaataaatggtaagaatatagattgtttgtgccgggcttatacaatgggtctctaaactatattgagtggtcaaaatgccacattcagaatacttagagagggagaaagataaagtgccttggaagccgtgaaacattctagggagcaagagcacaccactgtacatgctcctggtttgtgtgctgcagactgtgttaaatgcagaggaggcaaggtggagagaaggaaagacaagagaagtggaagatagagtccactcccctatccccgtcaatgagaagaagctccttaccaggtctgtgtgggtcacggggcaagatcaaagaatccaagcaaggttcataaaatgccaccacccctgattcatgacctgacctactgaaaggtttaacttccagaggcaggttgtggtttctgatccaatcaagtg

SEQ ID NO: 106417 - DNA, 291 bp, Homo sapiens
aagaagtaaaactttcccaatttagacagcatgattttccatatagaaaatcctcaagattctgcaaaaaagctacatgaactaataagtacattcagcaaggttgaaagttagaagattaatatccaaaaagcagttgcacatacatttattaacaacaagcaattgggaattaatttattataacaaatacagcaccatttacaatagaagcaaaaacatgaaaaatttaggagtaaatttgacaaaatatgtgtaaacctgtttactgaaaactatacagcattgtag

SEQ ID NO: 106418 - DNA, 366 bp, Homo sapiens
ctgtggcgcgctgtgcatgttcactggggtggggggtcccaggcgctcagaggagactgcagaataggcccgagaggagaggggagttcgtttcgccgccgtcttcatgggcgagcttcctaaccgccacctcgccccggagcaattggcacattgtattgaacgctgctgttcttcttactcttcctccttgtgatctctaatagaactgttagaagcaggacagagccaaattggcttggaccaagtccgtcttgggcaccccaggctggcctgttctctccaccctcctcacactccggggtaccttgaaacccccgtctcttacgaaaaatacaaaaattagccgggcgtggtggctcatgc

SEQ ID NO: 106419 - DNA, 379 bp, Homo sapiens
agatgatcagtaaatatcatgaagccttggagacctgagggcagagaggttggcatagctctacccagtgcccttgaagaagcatctggcaggctattcagggaaactgttcaaggacaggtttctgacgctggggtgggacatgttcacaagggccaagaacagagccaggtaccaaagaggcgacttaacagagtaatctatctggcagggactgtgcgattgctttctgcacagttcaggccttgcctcagttttgcctattgtcactccatttattccttatcctctcccaagtaaagtaattcctggaaggacattctctagcatccctgagccactcatttgcattccgtggcccttaatgctagaggcttct

SEQ ID NO: 106420 - DNA, 601 bp, Homo sapiens
ctagaggatcccctcgcgaaggtgtatccacaaataagcaatccagataggacttatgatttagctgtctcaatcctgactatcacagccaatattccgtagtgcctatagctatatttggatagctaggaggcactggaaggttttaggaagagaagtggcattatctaattttcctcttaaaaggatcattctggctcagtgttgagaacataccatcaagaaacaaagatgaggagattaattaggaggcaatattaatccaggtgagaggatggcagtagaaacagtaaaaagtggtcagacttatcttctgaagtaagtcataaaaccttgggctgggcaggaatatgctggtgccaaccatttttggtcttctgtgctggtactaacaaggaattcccagggaaggagcatccagctggcatagcttgggccatacaaacacactgtgatagaggaaggatggacccgattgcagtctcaccgggccttgtctaagaaagatcattcttcaaaggaaaattcggatggatttattggaggaagttatttaagcagccaaaagaatcaagcagtcaccccaggatagtagaaagga

SEQ ID NO: 106421 - DNA, 350 bp, Homo sapiens
ggagccatggaaggtgattgaggaagggagggacaggtcagagataggttttagagatgactgtggagtgcacctagcagggagctgctaggcttgaaactgacaagtctgagagtttgctctatttacaaactaatgagttaattgtccacatttaactccatacatctacatctatatctatgtctggtctatgtttatgtttttgcctatgtctttctatatctttgtctctgtttgagtttgtgtctctatgactgtgactatgtgtatgtctttgtctttgtaattggccatatctgtatgtctttttatctatgtcttcatctttgtctatgtctacgcctttg

SEQ ID NO: 106422 - DNA, 149 bp, Homo sapiens
tcgagatcacgccactgcactccagcctgggtgacagagtcagactctgtctcaaaaaacattatagctagctagctagctagctagagatagcttatataaaagtcctaatataggcagggcgcggtggctcacacctgtaatcccag

SEQ ID NO: 106423 - DNA, 468 bp, Homo sapiens
ggcacgtcttacatgctgaagcaggaggaatagagagagggaggaggtcctatacactcttaaacaaccagatttcatgacagctcactgactcactattgatatgacaacacgaagggggatggtgttaaaccatgataaaccaccccagatccaatcacctcccaccaggccccacctccaataatggggattacaattcaacatgagatttaggtgagggcacagactcaaaccatgtcaccctacttgcaaaaaataggagttggattatgccatctcttaagaactactttggcgttgtggttttgatttcccaaagaatctttaaactcagaatttggaatgttctggagatcagggaatgatagaaaaatagttggggccttgatcacaaaatggcattttattttctattgaataaaatattttaatgtctttctaataaagtctgacttctgagtgatt

SEQ ID NO: 106424 - DNA, 395 bp, Homo sapiens
actgcagtcactaataacagcagagccgggaggccaccactctcgggccagagttcttttcaaccgctccaagcttctagggttttttccttgccaagggtgttgctaagggtgcactgtgcatgtccaggaaatactgcttctatcatggaataaataaaagcgtgtatagagatatatgtctcctgttttcaagaaactactagccttgctgtccaggtgcctgtgattcatggtgtttgggttgatctaagaaaatagcattaactctggttttatgaaatgaatattacatgcatgaattgtaaatatcagaaggtagatttgtgtgtctgtgtgtgtgtgtgtgtgtgtgtgtgtgtgtaatactaaaaagtataatttcttcctatacg

SEQ ID NO: 106425 - DNA, 661 bp, Homo sapiens
gaaagattagctgagtttttctgctgacttaactgttgaatagcatcatcctcaggcactaccaaaagtgtttagagcactctgttgaaaatggcagtatttgaagaaactggatgtcacttaaaatatgatccttggataaacatcacatgctgctggccttcttacaaaatgagtgtgagtgaagtgcttggctctgcgagatggtcctggaatatcttcaccactcttcacaattacgtcctcttgcattcccactgatccttcagaattgtgtggcctttcaactttctgaaaggccttcactgtctcttaattcaaattctccacatgtaaatacaagtcagatcaccttacaatttaatctttaagcaaaactgtaaatcatcatttcccgcgacattacaattgttgggggaaaggtgtttggtgtcacatctaatggcttgaaaactcggagcatctctggacacagtcaatatccaggtctcaaatatgcatttactgtgtttattataatgactgcctttgtattcactgcaatcattttctactgtttcttcctttgtgtaatcatttcttcccttcccctccattgtatttttttagagtaattctatattctgtttttgaatacacacttctctttcttttaaaataa

SEQ ID NO: 106426 - DNA, 372 bp, Homo sapiens
ctgatattgaaaatgtaataaatataaagtacaaatcccacttaaaaaatttataggacagaattattggtggaaggcaggcagttaagagataatctccctcatccaactgtgacaccatatataaatcttagctattgtgcagttcgtttgctaagcactattcccagataaatgacagtaagttcctaggtctatagcagaaacttttacacttaagtattgcacagggttgtcaaacagattgggcataacaggaagaagattaaaatacttgagacaatataatccatgtgttacagcaaatattctcaattcactaaaaaacagaatctgaatttcatgctcagagtttttcagtgaggaagtaga

SEQ ID NO: 106427 - DNA, 341 bp, Homo sapiens
tgtgaatgggcagtggctcacctcatggtggactgcccaccctaatattcttaaagaaaagaacttccagcacagaatttcatatccagccaaagtaagcttcttaagtgaaggagaagtaagatccttttcaggcaagcaaatgctgaggtaatttgtcaccactaggcctgccttgcaagagttcctgaaagaagcactaaacatggagaggaaaaaacactaccagccactacaaaaacacattgaagtacccagacctgtgacaatacaagcaatcgcataaacaagtctgcaaaataaccagctagcatcatgatgacaggatcaaattcacccat

SEQ ID NO: 106428 - DNA, 404 bp, Homo sapiens
gccaagagaaactgcatgcttgaatattctacagtcatccagataaagaccaaaagaggcatcaagtagcaataataaggatttatctaattttaaacaaaatatcttcttctttctcatcaggatcgagatgaccacagccacccctctgggggataccaccttcttctcactgaacatgaccaccaggggagaagacttcctgtataagagtaaggtcaaattcgcttagaggctgggggaaggatggcaggaccacgttcgcaacacggaagaatgtggactccattcgagcagtagagggacaaaacggacgactaacacacacatcatgtcgtgtccccttcaactatgcacgcaggccacagaagacagcgaagtgcactcacaaccaggccccagcc

SEQ ID NO: 106429 - DNA, 436 bp, Homo sapiens
ctacatactaaaatccccaaggggagaataccttgagtaacataacatttcactggaatcagcgaattaacaccatagtatttgctttattagtaaaactctaatgcattgaagtaagggataggagagaggaaaaacgacactgaatgtgtgaatgactttcctcctattaaaatactaaaagaaattgttgcatcactgtcaggattaatttgagattaaaaaaaatgcaaaaacctcccatctttaacagttctcctttccatcttttgaatcattcattttattttttaataaaaatatcacttaaaaaataatttgggattccccctttttttggtaactagaaagttgcttgtatatttttatgaacccactaaacttaaacagatctctttagaaaaataatgtggatatattttgctttctacagcct

SEQ ID NO: 106430 - DNA, 361 bp, Homo sapiens
gcctactactactaaatttgcaaccgctcgacatttgtttaactcaaacccctccttcacatacagaacctttctgtcactcccagagagttctctcatgctccttcccagttaattcttctccctagcaccaaggcaaccattgttatgattttgtcactggggattagttttctcttttctttctttctttttttttttttaagacatggttgggccaggtgtggtggctcatgcctgtaatcccagcactttgagaggccgaggtggggggatcacctaaggtcaggagttcaagaccagcctggctaacatggtgaaaccccatctctactaaaaatacaaaaaattagccgggcat

SEQ ID NO: 106431 - DNA, 757 bp, Homo sapiens
cgtggtggctcacgcctgtaatcccagcactttgggaggccgagatgggcagatcacgaggttaggagttcgagaccagcctggccaacatagcgaaaccccgtctctactaaaaatacaaaaaattagccaggtgtggtggcgcgcgcctgtaatcccagctattcaggagactgaggcaggagaatcacttgaacctgggaggcagacgttgtggtgagccgagatcgcgctattgcactccagcctgggtgacagagcgagactctgtctcaacaacaacaaaaaaaagtgtctttgtatatctgggagccttgggccacaccagatagtttatgttaataatgtggtttatggtgaatgcctgtttttgtttgcctggggccctgggccatgtttgatcaatttgataaagctaagtgcaggtattccatgcctacatgactaacccccagtaaaagaaaaactctgtactccaaggctcaggtgaggttctccagtcagcagtgcttcgcgtctgttgccacatattgttactgggagaactggggctctctgtgcgacttcactgggagaggacaactgcaagctttgcctgctttctgctagaccccacactccatcactttttcatttgctgattttaatctgtattctttcgccataatgtactgtaattgttgagcaaaatcgcttttctgtgttcttctagtgaattctcaagcctaagagtggccttggagatccccaacgcaga

SEQ ID NO: 106432 - DNA, 960 bp, Homo sapiens
tgaaggaggaagttcaagggcgagagtgagtaccagcagaaggctgggagtctgtagtttgttcctgctgccaggctccactgaggggaacggggacctgtctgaagagaagatgcccctgctgacactctacctgctcctcttctggctctcaggctactccattgccactcaaatcaccggtccaacaacagtgaatggcttggagcggggctccttgaccgtgcagtgtgtttacagatcaggctgggagacctacttgaagtggtggtgtcgaggagctatttggcgtgactgcaagatccttgttaaaaccagtgggtcagagcaggaggtgaagagggaccgggtgtccatcaaggacaatcagaaaaaccgcacgttcactgtgaccatggaggatctcatgaaaactgatgctgacacttactggtgtggaattgagaaaactggaaatgaccttggggtcacagttcaagtgaccattgacccagcaccagtcacccaagaagaaactagcagctccccaactctgaccggccaccacttggacaacaggcacaagctcctgaagctcagtgtcctcctgcccctcatcttcaccatattgctgctgcttttggtggccgcctcactcttggcttggaggatgatgaagtaccagcagaaagcagccgggatgtccccagagcaggtactgcagcccctggagggcgacctctgctatgcagacctgaccctgcagctggccggaacctccccgcaaaaggctaccacgaagctttcctctgcccaggttgaccaggtggaagtggaatatgtcaccatggcttccttgccgaaggaggacatttcctatgcatctctgaccttgggtgctgaggatcaggaaccgacctactgcaacatgggccacctcagtagccacctccccggcaggggccctgaggagcccacgga

SEQ ID NO: 106433 - DNA, 1021 bp, Homo sapiens
tgaaggaggaagttcaagggcgagagtgagtaccagcagaaggctgggagtctgtagtttgttcctgctgccaggctccactgaggggaacggggacctgtctgaagagaagatgcccctgctgacactctacctgctcctcttctggctctcagcacatggagaccagttgccgttgctgttttgatcaacttcaaaggcattcatccagggtggtttattccagaaccactagaaatcattaggaccaccaggacagcctctccacagccatctgatgtggctgcctcagctcgacctcatgagggtcatcagtgctaagagtcaaggctactccattgccactcaaatcaccggtccaacaacagtgaatggcttggagcggggctccttgaccgtgcagtgtgtttacagatcaggctgggagacctacttgaagtggtggtgtcgaggagctatttggcgtgactgcaagatccttgttaaaaccagtgggtcagagcaggaggtgaagagggaccgggtgtccatcaaggacaatcagaaaaaccgcacgttcactgtgaccatggaggatctcatgaaaactgatgctgacacttactggtgtggaattgagaaaactggaaatgaccttggggtcacagttcaagtgaccattgacccagcaccagtcacccaagaagaaactagcagctccccaactctgaccggccaccacttggacaacagcagccgggatgtccccagagcaggtactgcagcccctggagggcgacctctgctatgcagacctgaccctgcagctggccggaacctccccgcaaaaggctaccacgaagctttcctctgcccaggttgaccaggtggaagtggaatatgtcaccatggcttccttgccgaaggaggacatttcctatgcatctctgaccttgggtgctgaggatcaggaaccgacctactgcaacatgggccacctcagtagccacctccccggcaggggccctgaggagcccacgga

SEQ ID NO: 106434 - DNA, 246 bp, Homo sapiens
tgatgaagtaccagcagaaaggtgagaggacctgggtgaggctgggctgagactgggccgggtggctggggatgtggcatctgggagctatctggtccaagggattacccacacaatcaggaaatggcacagtcccaaaggccctcagcagctggcagtgccaggggaccggggggcgccctggagcttgcaggggagccccaggaggttttggcattcgccgcctgccctgcacctccgtccttc

SEQ ID NO: 106435 - DNA, 302 bp, Homo sapiens
aaaagtgcttggcacaaaggagtactcaataaatattgttaattgggccagtatcaaaatgacagtgaaaagacacgacttcaacaagctggtttgggtagtcatgtggtcattaaacaattacattctcatgcgaattcagaatttagctttatagcaaactcggaacataagacactaattccatcttgaaaacctgtaaaaagagcagtaggctctgtcaacgacaaacccaagcctatgcctaattccaggttgaatgagtctgctccttaaataaccctatcattctgtgcctcaag

SEQ ID NO: 106436 - DNA, 179 bp, Homo sapiens
tttagtagagatggggtttcaccatattggccaggctggtctcaacctcctaacctcaggtgatccacctgccttggcctcccaaaatgctgggattacaggcgtgagccaccgcacctggcctctggtctttaatactttctaaaagaaacatttagacagtaactgctctactctac

SEQ ID NO: 106437 - DNA, 287 bp, Homo sapiens
taaaaaacacatataaagcctgcagcagtttccaatatattgtaatttctcaataaatggtagctatcgtttttactatttccttcattcccctagtcctgttgattttacagatcttaccagtttttttctaatttatcccctcccaagttcaaacacctgacttccagcctagcccactgcagttgccccctcactgatatccctgccctccttcttagctgctcctgcccacccactactggcagagagttatttcagaaggccaaatcagtcatcaaacagtt

SEQ ID NO: 106438 - DNA, 1273 bp, Homo sapiens
ggaggattgatcaagaaagtatctatattgaagctaatggaagctggatttctctctgtgggaaaacaaatttacaaatatgaaaaggggaagcgaaaaaaataactcattgctattgttatggtaagaaggaagaaggaaggaaggaaagagcaaaaggaaggaaagaaggaaagagtgaaagggaagggaggaaagaaacaaaaaaaattatcaatgcaagtgaatatgtctgtgtacatatccatgaatacatacatatatttcaaaattctgaccatggagaggacctaggtgcaatgacaccccagtagcaattaataacaagtatgtaggttccaatttccataacaaacaacaaggactccttgtaaaagtggatgattcaaggatggaggtagagaaatttcaagataagcctggaacgttggataataatgaactgtggtttgaatgctggtatttatcgctgtccattttctgatttgaaaggcttggcaattactctgtaggagagtgtctttgggagaagtagtaataggaatatttacagatgataggacatacaggtttcaacttgcttaacttgctctcaaaatattcaaaaaaggtatcatatccttgaaaataccacatctatctatctatctatctatctatctatctatctatctatctatcatctttacaaaaagagatggagaaaatatgaaactattaactgaggaatctggatgaagagaatgtgggagttcattctactgttcttgcaacttttctgataaaaatatttcaaagtaaattatttcaaaattaaatttaaaaactcaatatatgagtttaacaataggttggacactattgaatacaagacttgtgaactggaaacatatcaatgaaaaatatacaaagtgaagcatggaagaaaaaaagaaagagaaaaaataagaaacaaatgtaagagacatacaggacaagtatgaaaggtctaccatgtaaaactgaagtttcagagggcaaggagaaagaaatagagcagaagcaatattcaaagggataatggttgggaattttctaaagcagataaaatacatttaacccactggttaagaagctcagcaaaccctcaagcaggataagtatagagaaaaccacaattatgcaactcacaataaaactgctgaaccaaagacagagaagatggaaaaaccagccagaagaaaaaagacacattatctacaaaagagcaacaatgagactggcagctgtctct

SEQ ID NO: 106439 - DNA, 649 bp, Homo sapiens
agaaatggggtttcgccatgttttctaggctggtcttgaactcctcagctcaagccatccacccaccttggcttcccaaagtgctaggattataggcatgagtcaccatgcccagcctacaacttcctttttaaaaattaaaaaaaaaattgcttggaataaatactgttccaagtcaattcagtacacatacttctttctgtataatttcatgtggatgttccgtaattttataattttcctattctgggcatttaagtgatactgatatatccatatttatatgttatgcttttttggttgagggggaggatattcttaaaagtgaggtttttgtgagtaaacaaaattgagtattttcaaggaaaatataaattaccaaagtgactcaagcagtagaaaatctaaagagcccagaaatcatagaagaacttgcaaaggttgtaaggtctaaaaatctgaagtgttactaggtccatatggtgttcttggtgcagtctgtataattttaaggaaagaacaaaaattaaactgttgtcagtagtttggttagtgaactatttcagagcagatgaaatagtggtaagtactccaatccattttacaaatcctctgtaataccactaccaaaactgttacagatagcaaa

SEQ ID NO: 106440 - DNA, 390 bp, Homo sapiens
gaggtcaacaatggcaaatgcatagaaagttcaataaaaggcattgataagtgtttacttcaggtgatgagcatgttcttgcgacatttagaaaaacagtatcagtaacaatcagttttcagtgtgtttagaaacaaaaaggagacaagaaatacaaaaatcttttttggccagattctgaaaggaaaaaaaaatagaagatagtagctcctggtggggaggcttagaactgatggagatatttcttggataattcatcaatctgagaaagtatcagtagggagaaatgagaaggatgaaacctgcaggaagagtcatagaaatcaataagaaataaggggagatttgccttggaaagaaacagaaaatttcctgtgagaaataaatcaa

SEQ ID NO: 106441 - DNA, 314 bp, Homo sapiens
attttcagcaagaacatcacatgtggtgacgctgtgtatatctctcacttgatgtcagatgatacaaatggtacatacataagagacctgctcctgaaaagataatagcatattagaaacttaggagactcttggtagagatgtatactgggtaccttaaagaggctgttcaaaaaaagctaataatatttttaaggcctaaccctgctcatacccttttacttttattcccataactaaatctgggttggttagttgggtttttgtagaccagtagttctgaagcacccaagctaactcgttagctgttactt

SEQ ID NO: 106442 - DNA, 456 bp, Homo sapiens
aaatgatttgaaaaaaatctctatgacaagaaactcctaattgggttttgaaaaagtctaaagaagtaagtaaactgaccactgtgattcttacttaaatggatacagttctttttgctttttaaaaaccaataattcttgtgaattagttatttttgagaaaaagtatcattttaagttggtataagtaacttggttaaatttgtcttatttaaatttataacttgcaggcacgtgcctgtaatcccagctacttgggaggctgaggcagaaggattgcatgagcccaggagtttgggaccaacctgggcaacatagtgagacccccgtctcaaaaaaaaataatttataacttaaacactattaattttaggaaagaaattttatagatattagcacttcaatttaattactattaaaataattcctttcttctgcaatatttctcacagggga

SEQ ID NO: 106443 - DNA, 408 bp, Homo sapiens
tattatgtgattcatcagttaactaaaacttgtaagtttaaaagtatgtatattcaattttcctagtgcacatgaagacattttacattatagagctgaatgaaaagtacttttagggcctagtgctttgcttaattttaatttaattagtggatgccttcttaaaagtagacttcctattctcttcttgtatttccacaatgctatttgttgaacactttctaccagttcagtacttaacactaagtactttctatagatcttgctttttgatccttattaaaatattttgatccttattgcaagattttataatgcatcattatcattttataaatagagaactctatccccagtatttagtacattgatgatatcagtaaatgtttgtggaatggaggggaggtt

SEQ ID NO: 106444 - DNA, 370 bp, Homo sapiens
ctgagcagctaggactatgggcatgtgccaccatgcctggctaatttttgtacttttttttgtagagaccgggtttcgctatgttgcccaggctggtcttgaactactggacccaagcagtccccctgcctcggcttcccaaagtgccaggattataggtgtgagccaacatacctggtactggcatactttttggacttaaggcattcattttctgtttgtggctctcaaatagcccacacgcctccacgcgttgtacatggactggcacttccaagtctgctttcacgtctggaatatgctctttccccctttcttgacttcttgttgccgcctgccagctacatctcacagcatttggggcaaagga

SEQ ID NO: 106445 - DNA, 720 bp, Homo sapiens
tgtctttcataataagccaggaagcataagtaaagttctcccctgcgttctgtgaaccattatagcaagttattaaacctgaggagggggttgtggccaagtctgaacaaagtgtaaataacctggggaccaactgcttgcaattggtgtctgaaatgaggggcagtcttgtgggactgagcctctaatctgtggggtctgcaataactctgggtagttactgtcagaattgaattcaattttagggcacccagttggtgtccatatagaactggaatattgcttggtgtggaaaacccatacatttggggtagagaaacagtttctcctagaacagaccaagagtgaaggcagaggtttcaatcctgatggctttttggtttctggttttcagtcccaacagccctttcttcccttgagttctgtggcatacagctaccatcttataatacatttttacatttttttaatgctagatggagtgggtttcattgacccaaaaggccttaactaacacactaacataactttttctgttagtgcagtaagtttttttttttagactctggagaatggacatgcaaatcaaattcccaagagaatgctgatttattaatttccatgcagaataactgccagtgggaccagaatactcctgctcacaggtcagcttgttccctgctggtaggaaaatctgcatgggaagccaagttattatga

SEQ ID NO: 106446 - DNA, 671 bp, Homo sapiens
cgtgctgtatgacaagaggaacctgctttctaagtctgctggacacgcgtgcttcttgaatccaaccagacaagcatgttttctcaaaaccacagtataagacaaggaaactgcacagattcgagtgatttttgaggtaagtatgttattggaaaggtgtgatctatatagaaccctgtacatgaaaaggaggagatgccgctatcttggcagggatgatcatgtatttgaaatagtaactcacagcatttggtctcatgataagagtactgaagattatcccagaaaacctaggatgattggtatttatagtaccattgtttcaggtttttatgacttgaggcatctaactatcttaatgctgtactttagtgtttaccaagcagctttctggtggaaacttgaactgcagacactgagtgttttggttttcctccaagttatagttctcattgtaacttaataagttggcattccagcttagtttgagtcagtttcccagggctgggtcctcagaggagagtggatagaattcagttcctctatgagctggggtgctgacattgtgttcctgctgttgactgtccctgcggtgcacgggacagactgtcagctaacctgtcttcatgacatttctataatactcctcagggggttaaccccatctctac

SEQ ID NO: 106447 - DNA, 427 bp, Homo sapiens
ccaggagtgtgccagagccagggaagccagattcctgtaagtgagttctctacctccctcagccataaccaggcatctttaaaccatctgcacttgtatagagcatgagttgaaaatatctcaaagcctgtgcaggggcatttggaaggtgtgatatggccgccaagtaaggaatgcttttctaccgctaagttacttgacaaatccagaaatacaggctttggggatcacccacatagcttcttgaaactaaattttaagtgaaagttacgaaggcagagactggctagaagttcatgagtctacttcctcttcctgggcaagctgactgcattccctggcccccttgcaggtgacggttgccatggatggaaagggagtggaggaaagtgagccccttctggccctgggcgtgaaggctgttctc

SEQ ID NO: 106448 - DNA, 355 bp, Homo sapiens
tagagaggaaatcttgctatgttgctcagagtggtctagaactcctggcctcaagtgatcctttcacctaggcctccaaaagtgctgggactacaagagtaagccactgagcctggccctgagatgatttttttttttttttcatgaaaatacagggcatggaggtgtggaaagacaccttgctttattattgttgttattattatttgtaaagtataattcataaatcacaaaattcaccatttttaagcataccattcagtgtcttttactatattccaaaggttttgcaaccatcaccaccatctaattttagaatattttcataatgccaaaaagcatgcctgtacttact

SEQ ID NO: 106449 - DNA, 403 bp, Homo sapiens
tatttattaggatcttatttttagcatttcattacaagtaataggtttgggtaccttatttttattgtttttactcatcagttatgaataaggcataccttagaaacttgggttaaattttttcaagttataccagtcaacttggtttaaatacaactgtactaacttgctttatcatgtttcctgtttaattggatgagaattacatgcacttattcagttgttctttgtgtttataggaaaaactctgttctcagctacctcattatgtagtattgtgcttgatcccctgccaattgagaagaattcaacacattctgttctttaacaaaagcttggaagcaggcagtcagaggccttgaggaatacaattctctaaggcctgttttccattttactactt

SEQ ID NO: 106450 - DNA, 664 bp, Homo sapiens
atatcgcagccgtgctcatctcttatccacgttgtggtgtggcagagttgaatcgttgtgacagactgcatgctctgcaaagttgagagtagttaccagctggacttttacagaaaattttgtgggccttgttctaaatgatctcagcgcattgcctagaaccatgccacttttctctgatgtgattctgagaaatgctctctcctcatctggcttctctaaatgctggtatgtgggacattgcacgtgatggtgtcctcgtggtctgaagcttgcccacagagccttgggtaagctccgttacattcttctgcgatgtctgtgtaggatgctgaccacctgtggggtgcacagatgccactctctctgggtgccctacagagaaggctgcttgggactccttcctgctgggggctgcagaagagggaggcattcaggcacagtctccagcagtgctggaagaacgaggctgggttgagtggcaggacagcaagtctggggcttccttcccagttagttacgcccagtgctgtttatgctggcactggaacttgtgtctggtgcagggggcattggataacacgttcgcgagctcgcgaaagtgttatcccattttctaatctatacaagcccttgggactcaaggggtgtatgtgagcccaga

SEQ ID NO: 106451 - DNA, 323 bp, Homo sapiens
tttgtaacatacaatgagtaattgatgttacatttttcaaagggcaaaagatttgttaaatcaaaagccgtatgtataaggtagagagtatttcagggagaccagtgtattatctctctggttctatgtagtattctatcttttttttttttttccgagacagagtttcactcttgttgcccaggctggagtgcaatagcatgatcttggctcactgcaacctccacctcccgagtttaagccattctcctgcctcagcctcccaagtagctgggattacatgcatgtgccaccatatctggctaatttttgtatttttagta

SEQ ID NO: 106452 - DNA, 713 bp, Homo sapiens
ggtcaaaaacctgtcatcctcaacccccctcacccactttaagggtatgaaaagagtcaggagttaagaggtaaaggaagaggatttgggatgagaattatttgaaaagggccattggtgtgtttggcatctccctagtgggagcagtgggtgccacctacactttatctcaagattaggggaaagggcctccatggagcttagtatgtgtccctgatctggtggattaaacagacccctgcctggaaaagtctgaaggatgagatgccagtgctggctaagtgtttgatgacgaagcaagggagaggctgggtgcagactccactcctagagtttgtcagggcagagcatgcatgtagaagaactggcctgcatcctggggtgatagagcctgggcaagaggcccggggtttcaaggaggcgaacttcagactcacagtgctgaggaaggagtagagcaaagagccagggagaaaccctcaccccaagagaccccaggtgatgggagatgaggatgggagactgggggaagggaggggaggaaccactccaaggagcatctgaggagcccatgggggaaggaagctgttaaactttgttaaacttttgcccagcagcgcccagtcaccaccaccagaccttaaggactgtctcttgctgctgcttcactcccactgctgtgtccctggaagggtcagaaacggtaaacaagg

SEQ ID NO: 106453 - DNA, 815 bp, Homo sapiens
tgcccaccaccacaaccagctaattttttttctgtattttcagtagagacggggtttcaccatgttggccaggctggtctcgaactcctgacctcaagtgatccgcccgcctcggccttccagagtgctgggattacaggcgtgagccactgtgcccggccatatctttttttattattatttgtaattttagaggctggtcatggaggatttcttgaggccaggagttcaagatcagcctgggcaacataacaagacctcatatctacaaaaaataaaagaataagccaggtgtggtagtgcatacctgtagtgtctgctactcctgaagctgaggcaggaggatctcttgagcccagaatgctccagccactgcactccagcctgagtgtcagagtgagaccctgtctctaaaaattaaaattaaattttaaaaaagaaagttcagtttagctgtcttgatagccgcagttgagtgctcctgagcccgtgtgacaagtggctcctgtattactggacagcgaaggtcagaaacacatttgaccaggtcacttctccggatgagagcattgtctttgaaactctatgctttgtctcctgttaaccacccagctccaacttcaaaccaggctaagtaaccctctttttgttaaaattctgacaagccactcccagtgcaaagcctctgcccagaacctcttctcctaggctcttggcatggctatgccttcttgtcattcaagtctctgttcaaatgtcctctccccagagaggcctttctaagggtgctctggacagtgttcaaactcacaggc

SEQ ID NO: 106454 - DNA, 480 bp, Homo sapiens
ggggtgtgaggaaagccgggaggcaaggactctttgaggctgggatgtgcagtcgagaagccattagacaaggaatgcacagagcatctgtggtgagggttaggaacaatggattcgattgtggttgctgaggaacgggtgacatctgcaggtggaggtgtccagcaggctgctgagaattatggactggggactgagagggaagtctgggtgtgagaagcagcatggacaaacatgcagggaagggcactgctggaagttggggagggtgtgggactgtttaggggagagactgtggtgagtgggggtgagacagaacccgggtcattgcacatttaaggagcctgaggatcattcagggaggagggaggagagactgaattagaagctgaaggagaatgaaaggcataagacaacagaaattaggttctcccttcatgtcacttccaaggaacaagaggatggattttggttgcagag

SEQ ID NO: 106455 - DNA, 194 bp, Homo sapiens
tctagaggatcctgtatagagcataccctatagcgcatacctcatatccgagatttaagagctactcctcctaccccaaccccaggcagtctctcctaaggataggaacatcatcattccaaggccacaccaggggggcactccgcaggccccatcctcaaaagcacccagttaggctccctgctatgtggaaa

SEQ ID NO: 106456 - DNA, 409 bp, Homo sapiens
tggggctacagacgtgtaccaccacacctggctactttttgtatttttagcagagaggggatttcgccatgttggtcaggctggttttgaactcctgacctcaggtgatctgcccaccttggcctctcaaagtgctgggattacaagcgtgagccactgtgcccggccagaaggagtgttttgagaatggctaagagaagataggttgaatagctatgcctacatgtcactaattaacatctcagagatctctgctacaggttgtcgtcctcattttgtctaatatttttccaatggcatgagtataggaagataaacggggaatgttttgaagtaataaaaaaattccatccataaagaagaacaacatgtattaagctttgtgcaccaaacaacacaacaggaagac

SEQ ID NO: 106457 - DNA, 316 bp, Homo sapiens
gctcgcctgcatctactaggcgctcattctgcacgacgatgaggtgaccgtcacggaggataagatcaatgctctcattaaagcagctggtgtaaatattgaacctttttgacctggcttgtttgcaaaggcctggtcaatgtcaacatcgggagcctcatctgcagtgtagaggctggtggagctgctccagctgaggagaagaaagtggaagcaaagaaagaagaatccgaggacggtgatgatgacatgcgctttggtctttttcactgaacctctttttataaagtgttcaataaaaagctgaacttcaatt

SEQ ID NO: 106458 - DNA, 460 bp, Homo sapiens
atgggccctcgggcttgcccacccccatccccagtcatcaatcaccatttgagaaatgcccactgccagggacatgggagggcagagggtagctcgcgggtgcgtggcccctatctcctcaagctggtttagacccttctggctcagcctcaccagattcctaggatgagcactggcttcaaatcccccaagtgctggtcccttcgtgtccccgaaagaggctgctcgcgtgggcaaaggccccgaggcgtcgagtgcgccttccagggcagtgcggaagctccctgccctcctccttcctccccacttctgcctcctcctcccccagtgttcacttgaagcaaattctagtgggctttttttttttcaatactgtttcaaaacagttgttacagcaaataactgcagacgggtctgctggacgcggtggagaggggctggcagctgcccagcacaggcg

SEQ ID NO: 106459 - DNA, 392 bp, Homo sapiens
gatacccaaaccagataaggatacaacaacaaaaaagaaaactacaggccaagatcactgatgaacatagatgcacaaatcctcaacaaaatactagccaactgaattcaacagcacatcaaaaagatcattcaccatgatcaagtgggtttcaccccagggtgcaaggttgattctacatatgcaaaccaataagtattgaaatgatcacatgatttttgttctcagttctattaatgttcttgattctgttaatgttctgttcacattgcagaaaaagcatttgacaaaataatttcagtagctgctgaaaaagcatttgataaaattcagcatacctttatgatacaaaaaaccttcaataaactgggtataaaagaaacataccttaa

SEQ ID NO: 106460 - DNA, 322 bp, Homo sapiens
aattcaagcttctaacgatgtacggggacatgcctgtagtcccagctacttgggaagctgaggcaggaggatcacttgagcttgggaggatgaggctgcagtgagctgtggttgcaccattgcactccagcccgggtgacagagccaaaccctgtcttgggaaggaaagaaggcaggaagttagggagggaaagagaaaaaggaaaggaaaggaaaaagagagaaagagaagaaaagaaaaagatttgatgggcaaaatcctgtctttggaaggaaagaggggaggaaggtagggagggaaagtggaaaagaaaaggaaaaa

SEQ ID NO: 106461 - DNA, 166 bp, Homo sapiens
ggtggcagggcagtcatccagctgaagagattgtgtggagatggttgatggaggacagcgtttctcggctttattgtgtagccggtggcttagaacccctgaagtaaagggcaagcttccagtcttttttctttttctttttttttttttttgagttggagtctcg

SEQ ID NO: 106462 - DNA, 656 bp, Homo sapiens
atagccaacctctgttagcttcaaacttttcttctgcagctttctcacctcccttggccttcatagaattaaagaaaattaaggcctgtctctagattaggctttggtttaagagaatgtagcttgtttgatcttctatccaaaccattaaaacttcctccatgttagcataaatctgttttactttcttatcattcatgtgtttgatggagtaggacttctaattttcttcaataacttttcattttcattcacaatttgatgaaatgtttggtgcaagaggcctagcttttagcttatttcagctttcaacacgccttcctcactaaacttaattatttctagctttgcattggaagtgaaagatatgtgactctttctttcacttgaacacttagaggccactgtagggctgttgattggcctaatttcaatttgttgtgccttagaaaaaggaaggcctgaggagagggcaagagaggaaaggccagtcagtggagcaataagtacagacaaaatatttatggattaagttcaccacactcagcctggcaattttcttaaaaataagacaacagtcaagttgggcacatcattttgactcttcttttcatgaatggtgcttgtaaccatgtgatgatgcttgatagcatttc

SEQ ID NO: 106463 - DNA, 720 bp, Homo sapiens
gcaggaggatcagttgaggctaggagtttgagaccatcctgggcaacagtagcaaaaccctgtctctaaaaacaagcaaacaaacaaaaaaacaatacaaaaactaccactgtgctcggcctctgtcgcttaagtaaatagatggattaaaaccaaaaaggaagtataccccaccatacctatgtaattttacccttctcttcctttgcatatactgtcttatttcctctgcctggaatcccattatttttttctctttgtaccaaatttctgctcatctttcaatgcctagctcaagtctcactttccttccgtaagttttgtttttgtttttgtattcccagtagaattattctctctccctcatctatgttgccatggcactttaaacatacttgttttagagcatatcacattatgttttagttattttattaaacatttgattttcctgctagtctttactgcttggtcaagttttctataactttcataggcttcagttttttcatttgtaagaaaggggatgatagaatttactttacaagatgttgtggggattaaatgagatagtgaatataacatctgatgcagactaggagcctgatagatgttagcgatactgtttctaaaggcgggaactgtgtctcatttatccttgagtctcctttacctagcatagtgcctggcacatagtaagcataaaaagagtatttgggg

SEQ ID NO: 106464 - DNA, 106 bp, Homo sapiens
ctagttgacgaggactctaataactccaggtggtgaatgggcggtggggaatacagttctgtagaaatacagctctaaagcaatacaaacacagagggaaaaaatg

SEQ ID NO: 106465 - DNA, 473 bp, Homo sapiens
atgcataaaataaaactcaccatcttaaccatgtggaagtgtacagtgagtggtattcagcacattcgtaatggtgcacagccatcaccaccgtccatctccaggactcttttcaacttataaaactggaactctgtacccattaaacaataactccctattttccccttcccagaccttgacaatgacccttctactttctgtctctatgaatttaactacagacctcatatcactggaatcatgcagtatttatttttgtgactggcttacttcactcagcatattgacctgaagattcacccattctgtaagcatgtgtcagaattgcctttctttttagggccaaataatattccgcagtatggatattgttttgttcactcttatctcaccagcatctggaatagtgcctgatacacttttttcttttgagacagagtcttgttctgtcacccaggctagagtgcagt

SEQ ID NO: 106466 - DNA, 184 bp, Homo sapiens
ctgaagtgtaagtactactttcccttatctatgtgatgtcataacacaagtatatttccacattactcattactttattcagcaaacatttattaagcatctactatttattaggccctctgctttgtactgaaatgataacaatgagtaagacccaatcccagctttcagggttaaagtttag

SEQ ID NO: 106467 - DNA, 802 bp, Homo sapiens
tagtatcataaacaatgagttttatcttaacagcagtagcttaataacagcaaattcaaagcaggccgaaaacaaaaaagagatagctttagaaaactctacattttaattgtatagttgcaggttgggcatttgagctctgaattttccttgctgtaatttgcccgttcagttttaaaatgtgcacaagaacaggccacaatatgcagctagctgaagtgctggaaaacctggcatgcctttgaacttctacaggagttcctgcccctagtgggtaagttacctattgcactgactttatgaagatatctcttccagtgcccttagtgtgagcatccccacaaaccttatgaaccagttgaatccaacctgaatgcctctccataagcccggagcccacaaatgcattttctccagggcccttggatggagggaatcaggaaggcctcctccaaacccaaggctaggagagatgttccctccggggtccagggaggagaacagaaaggactgagaagaactaggaatgccctcccaaacccaaggccagcaggagggtctcctccggagttccacagatggaggaggcctaaaagaagaaatcaagtctgcaacctaaaagtgggagatcttggattttgatagcacttacccagatcctttcccagcatagtcaggaacaactggactttttcaaagggaccttggctgtacctggtgtcctgggtgacacaggaaaaggaattcaggggctgcttcagaatcccatctttgccagatacgttaactttaaaaaaaaaat

SEQ ID NO: 106468 - DNA, 1076 bp, Homo sapiens
tttcttaatgtcattccacctgggtttgaaggagctgtgatggcgttctgtccacataatgacagaagatccgtggtgggatcacagacatgcaaagggccaagttggaagagaccttcagaatagtggagtccacttgcattgcatatggagagaaactgaggccctaggttcaggggggagggaacaagtacaaaaatcacagagcaacaatgcaggataagtaactacttgctgcccttcctccctctcctagcactcatcctgccactcatctggagtcaaggtaagaagaggaattcaggccgggtgcggtggctcacgcctgtaatcccagcactttgggaggccgaggcgggcggatcacgaggtcaggagatcgagaccatcctggctaacacagtgaaaccccatctccactaaaaaaaaatagcagagcgtggtagcgggtgcctgtagtcccagctactggggaggctgaggcaggaaaatggcatgaacccgggaggcggagcttgcagtgagccgagatctcgccactgcactccagcctgggcgacagagcgagactccgtctcaaaaaaaaaaaaaaaaaaaaaattcattgctaaccaaggcttacatttattgagaggacacatcagacagtcatttagtactcctgatatccccaagcagtggtgaatgttatttattcccatttaccaggttgacagactgagtatcagaaagattaaagtcacttgtacagaatcaccagggcataattgggtttccagctctagaatccctacatttatctttaaaagttttccctagggacacattccaggcatcttcatgagtgaaattagagctgtctgatagcgtatgagccttcgtaaatctcccagtcactgaatctcagaacttgctgcagctcaaggctctgatggtccagcgactgcacatggctctcagggtgcacctgctgccacccccaggcctccttgacccaaatgaggcacacgtcctctatttctttgagagacagcctcagcccatcaaaaagccattgccccttccgtggagacagg

SEQ ID NO: 106469 - DNA, 325 bp, Homo sapiens
tgttttagagccctaggaaaattgctcaagtttctttaattagtatcattttggttgtcaaattttcaagatgaagacattgtgtttcagcattatttaaagctagggcattaaaattagctggggatttttcaagaattactcattatgacccaattttaaaggtattttaaatgtaacatttaaaaagaattattaatgtctgtactctatctctttcggctacaatatctcaaagttatataaaaagttaattgctagccaaaggtttcacttttcactgtgtaaaatataatgtcaactcaattgtctgtattgggaaaag

SEQ ID NO: 106470 - DNA, 398 bp, Homo sapiens
ttgtgaacagagttctctccgaacctgactttctgcagttcctcagagtccccgtacatggtccaagtgccagttgtgttgtccctgcttaaattgttgaattctttgagggcagaactgcttatttcttttgttgtcatggggcccagcaaaataagtatttgttaagctgaacagtgctccagcatgaatgcttatacatatatttctgccttccaaaactttttttaatattactacttaataaatttttattaaatttttttttttttttgtagagatggggtcttgctgtgttgatcctgccagtcttgaactcctggcctcaagcaggcctcccaaagtgctaggattacaagcctaagctaccatgcccagctcgtatttttagatatagt

SEQ ID NO: 106471 - DNA, 654 bp, Homo sapiens
tgcggccgtggttggtgggggggcaggaagctgctggtggagctgcagcatccttcagtctcaggcccctgggagggggaggggaaagaaccagggctgagctgtggagtgaaggggagccatttctctccaccgactgcaacctccgtgctcacagctcacggttcaccagaatccaggggcttggtcggcctaggaatccacaatgctggatattttcatcctgatgttctttgccatcataggcctggtcattctgtcctacattatctatctgctctagtggcctggagctgcggccggagcctgctggagaacagctcagaaggaaggatggagctgaatggccgagtgccctgcttgctgacgcaccggtggatttttgcttctgctgttatctcggctcctggtctctccagtccaacaagaggcctctcatccacagaagcagtcctactgcccagcagacctctttcagagccttccagacatggctgacccctggcaagcaaggggctttttgagctgagaggcacttggctgggacttcaggaattcatggacagggctggcagatactgcatatgtttgagctgtagatgggattgagaacagaaagttgaaatggagacttattaaagttaccgtggagaa

SEQ ID NO: 106472 - DNA, 698 bp, Homo sapiens
tgctgctggagtgagtgcataaccctggattttcatcgctttcagcaatggaacccatcttccttacccctgactctgcttggatttctgtaacgtgcacatttttaaggttaaagtgaaatgtttttaaaaaagggaaaatctcaaaacccaatcagccttccctgtgttattgtcatcattattaatactgaggttgcagaggtatgtggcagagtccctgttgtgctgctgccctgggggaatttgtctgtcgaaaaggggcagggcagcagtggtattgtgaaacctatgttgtttgcccagtgagcgatagggaatataattgctgtaagagttcagaggaaggcagagatggcgagtgaaacgcttcctggaggaagcatcatgcttctgggggtcatgctgagtaagtcagtgtagttagctaggtcagagagcccccacattttttttttttgttttttttgagacggagtctcactctgtcgcccaggctggagtgcagtggcacaatcttggctcactgcgagctccgcctcctgggttcaccccattctcctgcctcagtctccctagtagctgggactacaggcgcccgccaccatgcccggctaattttttttttttttagtagggacgaggtttcgccgtgttagccaggatggtcttgatctcctgaccttgtgatccgcccg

SEQ ID NO: 106473 - DNA, 518 bp, Homo sapiens
agagaaaccctacaaatgtgaagaatgtggcaaagcctttagtattttctcaacccttactaaacataagataattcacactgaagagaaatcccacagatgtgaagaatgtggcaaagcttataaggagtcttcacacgttactacacataaaagaattcatactggagagaaaccctacaaatgtgaagaatgtggcaaaacctttagtgtattctcaattcttactaaacataaaataattcatacagaagagaaaccctacaaatgtgaagaatgtggcaaagcttttaaacgatcttcaacccttactaaacataggataattcatactgaagagaaaccctacaaatgtgaagaatgtggcaaagcttttaaccaatcttcaacccttagtatacataaaataattcatactggagaaaaaccctacaaatgtgaagaatgtggcaaagcttttaaacgatcttcaacccttactatacataaaatgattcacactggagaaaaaccctaca

SEQ ID NO: 106474 - DNA, 675 bp, Homo sapiens
tggtttctccaaggaaatacagaccaattctgtatatgtattaagcatgtcattttgaaagtttatgaatttagaaattaaaagtcaaatgtttgtttttcttttcttccttttttcaaatgaccttaggattttataacagtttagaagctccagatttgaaatctgcagtaagtgtattttggcaatacctaagatagtggaaagcagcacgatagctattcatctggaaagttatgcaggaatataaacgtgtaggggaggttagaccattcctggaaagaggagagtttagttgagtcagcctcaaagggcgggcaaatttgccattccataacaaagttgcagatcagaacaacctcgcagaggaaccctgaaaagctgatgtattagccatctggtggtcaggttgggcattgcagtcattcacttagctgatacccttattaggttttgtttaacttggaatttaaattagttctccatttttgtctaaaaaagcctattcctagttttaacatttttggcatttttgaggggtatggcaggtctggtcactgtaatttattgttgtattgctcatgatgatcctgaaaaaaacttacattagtgaacttggacaaagaagctaaaaagtacttggagagagaaatggagtttgcttttttgctttga

SEQ ID NO: 106475 - DNA, 128 bp, Homo sapiens
actctagacgatcccccttgcgttccttttggcccctccctgcctacctagaatctgcctgaaagggctggagcccttaggagaggggcagtattgggggactgtgctagctttacccccgcaagaca

SEQ ID NO: 106476 - DNA, 395 bp, Homo sapiens
ggttcaagtgattttcctgcctcagcctcctgagtagctgggactacaggcacctgctaccatgcccagctaacttttgtatttttagtagagacagggtttcaccatgttggccagggtggtcttgaactcctgacctcaggtgatccacccgccttggcctcccaaaatgctgggatatttccacattagttgaaatgtggaagcagcatgttttaaaaactctgctgtgatattatagccaaccaggcattctcctttgtttcttctcactcagcaatcatttactgaatttgcttactctttgtttactaggtggtgttaggttctgtgaacacagggaagaatatgacatggaccctgtcttcctggaaattttatgatcctttctaaca

SEQ ID NO: 106477 - DNA, 398 bp, Homo sapiens
ttagtagaaatgaggtcttgctgtgttggccaggcaactcctgagctcaagcagtcctcccacctcagcctcccaaagtgctaggattacagggtgagccactgcacctggcctgatgtgactcttgacctatccaaggctgcatggggtgggctgcttttccaggcctacagttgttgaaggaattgggctactgacttttttccacattatagccaggtttgcacagaaaagagttttgtttacatctggaatgccatttgcttcagctgtcaaccacgtggatcccaatctatttttgattatttctgtattgatgattggtgagacactcattactttgagttatcaaaattacaaatggagctagaaattactcctcttgaaatagcataggg

SEQ ID NO: 106478 - DNA, 470 bp, Homo sapiens
gaatcgcgagtaatagcgatgtccagtttgtagatgagccgcgggatgtcataacttgcaggcccagtcctgggtgacagagtgtgactccgtctcaaaaataaataaataaataaataagataacaaggcgtgctggagatggccacaggcctccagcagccgcaccatcagagaaatggagtcagagagagctgcagctgctctgatggggggtgggagtatgcaggatcctctgggggtggctcaggcctcccaggggagcacttaccttttcatttcatagtatgtcggagctgctgatgcaggaataaagcaaagtgcctggcactctgcgcgactgctattttttcattcattcatatatttgtccttcctctacacatgtatggcagattaacaaaagcacctccacggcctagctatgtggcccccacgggtttcttagcctctctgagcaagttggacagg

SEQ ID NO: 106479 - DNA, 495 bp, Homo sapiens
attaatatcttacaataatgtggcacattggccacgttagtgaagcaatatccatacattattggtaactgaagttcgtagttccttcaggccgttttcctccaaagtcctgtctctgttccaggatcccatccacgatcccatgtggtatgcgattgccatgcctccttacgccccctcggctgtgacagatcctcagaccttccttgtttttgatgacctggacatctctggggagtcctggtcgggaatattgtaggactttttgcacagattctggacgtaacatcagtcaagccaggagaggcagggcagccgagacagaagtggcttgggtttggagttggccagagctaccgtggagtcccatctgccccctagtagcactgtggccttggcaaactaacttcctctcagagcctccacttccccatctgttaaatggaggaagagtctcaaccacgtacttaatcctgtgcgtgaggattaagtgtg

SEQ ID NO: 106480 - DNA, 310 bp, Homo sapiens
tgcaccaaccctgactgatcctgcaagctgagaggtgggaaagtatggagagcctctaatgagttttcagttcagcaaatctagttaccagtccccagatttctgtttgatttttcaaaattatttcaatctctgttaaaattctctgataaatcaataaattgctttcctatgctatcttgcagatatctgatttccttaaaattgttattttgaattcttgatcagagagctaaccaactgtcatgtcattggggtcagtaactagtttggtacctttgtccttttgggaaggccatggctctttgct

SEQ ID NO: 106481 - DNA, 231 bp, Homo sapiens
taaatacttccaaactggtttggaaagcttctctgggctgaaagccagttgattcttatcagtctttttgcatgactgaagtcaattacttcagagcttgaacaactgcagccttggtaaatggtccagtactgtccagtagtacaatatgggaggcttttaaatgctactgtaattggtagtttaacagatgtgttttggttggacaagaatgtaaaagctattttggag

SEQ ID NO: 106482 - DNA, 726 bp, Homo sapiens
ctctcttccattgggctgttcctgagttatatcctttataataaactggttaagtgtaagaaaagtgttttcctgagtcccctgcgcagttctagtgaactctcaaacctgaggaggcggtcatgggaaaccccaaatttgcagtcaaggtggacaaaagtacaggtggtctggggacctgggacttacaacagagctcttaaatctgtggagtctgaggctaactctgagaagttagtgtcaaaattgaatggaattgttggacactcaactggtgttggagaaccagagaacacctctagtgaaggaaataaaagcatttcactccagaatatgcttctttgacatgttttgagatggctgttcagagggcttgcaaacagaagtacccctgcaaagctgtctttcatgggggagttttgcatcaatccagccaggtcttcccttgtcctgatctaggaaagatttaactgagagtcggacacctttaaagatctgaaagaagcatttaccacctatcctctctgatggctgccacctatcaggtttcatctgtataacaagactaccttcacaagccaggcctcctcctcttctttccttccccataatctatcttgccactgtaatcttgatttttggccatgccctgagccccattctttccgtgacctcaagatggtatagaagcttctgcaccccattgtaggcttgggtaaacacttc

SEQ ID NO: 106483 - DNA, 665 bp, Homo sapiens
cactcgactctgggactatgaggcagttcatccacacgctccaaactccagcttattgtaggagaccagtgcctcgatctcatgaggtcatctcgacgcctcagctgtaacccttggagaacctgtggtctctgctcctctgcctgctgacatgatcatcccaggtgcaaaacaggtatgagccactggcattcctgcgcgccagtcttccatcctcttttcctcgagggacccaccggccaaccagatgtgctgttgtcctgagaactggctccacattttgtgagatgtttaaagtccagggaggtcacttataaggaggcacctctgttctccaggtgcacacacaaagcctcccgttatccggtcttgcacgtgcgtccttaggggccagcaccctggctgccttccagagtctgcccggcttttccatcccatctctgctcccgaaggcatcccgctgcggtcctgggcatcttgcacagaagcccctgcaaatacctacttacataagccacgtacacgttctgtgctattccacggtggctcttggtgcaatttgtttttatttcctgcaagcagacttttcttattacttaacctttttggccccacatttctttaatctgcaaaatgtggcaatggaacccgatcagagatcttca

SEQ ID NO: 106484 - DNA, 891 bp, Homo sapiens
gtctctccttttcttcttccctccctccctccctccttccctcccatccttatatgcctgtgttactgcaaatctccaattcaaatggaggtgtatatgcctttacttagccaatttaaaaacaggactcaaaatgggagatgtgctgctgaatatgtgtttctttttcttcagtgccatactttgatagcttccaatttgttcactgatataaatgcaaattgggaaaataattaaacctgtatgctgttgatgctgtcagatgtttctgtagcttgctgcttagcataactgagggatgagtaatggaataaggatatgatgtgtaattccactgttgctgtagatggtgacaatctcagttctgatatgttgatgtttgaaagctatttaattgtaaagaaattagtcatgtagagacatgatgtggataaagcatttctggcatttctctagcaggttctagattgaccagtgtcttgcacatgagattatgcatattttttaaggggctgatacttttggttggcctcactgtgtttttcctgatcctgtgggaaagagaaaggcatcccagaagtttgacttgtttttcttttagaatctgtctctgcaggaaagaaaagtcattttaataaaaaccaaaataatttataataattgttgcctttccctccccatcctctccactaagccagcaactaaatgtattcagaaaacaagttaatcaaggagggcagaagaattttttttaaactgtaagaaaatgttcctaagtttagatttattacctgtcatttagggcaaaaatccagtgtccccagcacatgatgacccaactttgtctcacagttgcaagtgtgttgaaaataaagttgctttgtgaactta

SEQ ID NO: 106485 - DNA, 1597 bp, Homo sapiens
gtctctccttttcttcttccctccctccctccctccttccctcccatccttatatgcctgtgttactgcaaatctccaattcaaatggaggtgtatatgcctttacttagccaatttaaaaacaggactcaaaatgggagatgtgctgctgaatatgtgtttctttttcttcagtgccatactttgatagcttccaatttgttcactgatataaatgcaaattgggaaaataattaaacctgtatgctgttgatgctgtcagatgtttctgtagcttgctgcttagcataactgagggatgagtaatggaataaggatatgatgtgtaattccactgttgctgtagatggtgacaatctcagttctgatatgttgatgtttgaaagctatttaattgtaaagaaattagtcatgtagagacatgatgtggataaagcatttctggcatttctctagcaggttctagattgaccagtgtcttgcacatgagattatgcatattttttaaggggctgatacttttggttggcctcactgtgtttttcctgatcctgtgggaaagagaaaggcatcccagaagtttgacttgtttttcttttagaatctgtctctgcaggaaagaaaagtcattttaataaaaaccaaaataatttataataattgttgcctttccctccccatcctctccactaagccagcaactaaatgtattcagaaaacaagttaatcaaggagggcagaagaattttttttaaactgtaagaaaatgttcctaagtttagatttattacctgtcatttagggcaaaaatccagtgtccccagcacatgatgacccaactttgtctcacagttgcaagtgtgttgaaaataaagttgctttgtgaacttagaggaaatggctgtgttagattggactgatttagttgcaaaataataccttttagggtcacacttgtattattccctagggtttagccttctctatatacccttggccagactcagaaggggattaaaaagctctggtcttggcctctatcttccttgttgctcctcccagcctttccataacttacccatccacagcccatcagcaggaacacatgagaatgtgggactttgtttctttttttcttagttgtatgaattccagattaggccttatggatacttgtctactaatatatctgaagtttgaaaacaatccctgacaatattgtaggtgcaataaatattagtcaaataaacatttaagtgccaaggtggggtggtagtggttgggggagctttttttgattaaacagaaattccttcaagtagaacttgagaaaggacactaaatacagtcatcttaacccaggccagaacctaaatttattggtttgcctaacagtcttattgtcatggcaatatttgctaagatgagccttctttagataaaaatgaactctcatttagtggtggatgaaaaaagagaaattgctttatcatatagtttaatttggctcggtctactaagaccaccagggttgatgtattcctccatttttggtgtgatctttttcttcattcaataaagttattaaatatatggc

SEQ ID NO: 106486 - DNA, 2354 bp, Homo sapiens
gtctctccttttcttcttccctccctccctccctccttccctcccatccttatatgcctgtgttactgcaaatctccaattcaaatggaggtgtatatgcctttacttagccaatttaaaaacaggactcaaaatgggagatgtgctgctgaatatgtgtttctttttcttcagtgccatactttgatagcttccaatttgttcactgatataaatgcaaattgggaaaataattaaacctgtatgctgttgatgctgtcagatgtttctgtagcttgctgcttagcataactgagggatgagtaatggaataaggatatgatgtgtaattccactgttgctgtagatggtgacaatctcagttctgatatgttgatgtttgaaagctatttaattgtaaagaaattagtcatgtagagacatgatgtggataaagcatttctggcatttctctagcaggttctagattgaccagtgtcttgcacatgagattatgcatattttttaaggggctgatacttttggttggcctcactgtgtttttcctgatcctgtgggaaagagaaaggcatcccagaagtttgacttgtttttcttttagaatctgtctctgcaggaaagaaaagtcattttaataaaaaccaaaataatttataataattgttgcctttccctccccatcctctccactaagccagcaactaaatgtattcagaaaacaagttaatcaaggagggcagaagaattttttttaaactgtaagaaaatgttcctaagtttagatttattacctgtcatttagggcaaaaatccagtgtccccagcacatgatgacccaactttgtctcacagttgcaagtgtgttgaaaataaagttgctttgtgaacttagaggaaatggctgtgttagattggactgatttagttgcaaaataataccttttagggtcacacttgtattattccctagggtttagccttctctatatacccttggccagactcagaaggggattaaaaagctctggtcttggcctctatcttccttgttgctcctcccagcctttccataacttacccatccacagcccatcagcaggaacacatgagaatgtgggactttgtttctttttttcttagttgtatgaattccagattaggccttatggatacttgtctactaatatatctgaagtttgaaaacaatccctgacaatattgtaggtgcaataaatattagtcaaataaacatttaagtgccaaggtggggtggtagtggttgggggagctttttttgattaaacagaaattccttcaagtagaacttgagaaaggacactaaatacagtcatcttaacccaggccagaacctaaatttattggtttgcctaacagtcttattgtcatggcaatatttgctaagatgagccttctttagataaaaatgaactctcatttagtggtggatgaaaaaagagaaattgctttatcatatagtttaatttggctcggtctactaagaccaccagggttgatgtattcctccatttttggtgtgatctttttcttcattcaataaagttattaaatatatggcaaaacttttttcagtttccagtgaaaatgcatgatactcatgtcatggagtcaggcttgggaaaatctatgaaataatagtttgctgataatgatattttcttatggctttgtatagactacatcctcaaaggattttgtgcttctttgcccatagaaggctttttctccctttgtgtgcttttattaaatctgttgaattatattaatattttttgaatttacagggccaattatcttttttgatggattacttagattaggccatgggttcttcctggcctttctttttctcggtcttttaatcatttcacgtttttatctctccctgagtaaagtggcaagaaaactaaaaatgaaagttaaatgggttgatttgacaatgtgtcaagttctgatttagagtttataaggaaggtagaaacgattggccaaaataagatatttggatgaggattatttaagccgtttagatttggccagagacgccagatttagcaaaggactgggttcttatcttctttcattcatgaatatatgccttgggaggacactggtgattcccacagaattaggccaatgatttgccacattaccctttaagctagcccataattccaccagatcccacaccaagtttcagttcatgactcatactgaataaacgtcagttgtaaatgatgtttgaattggtcttcctactaaagtgaaacatcttcttttaagccaagccacatgaatgaaatagcacaatcaga

SEQ ID NO: 106487 - DNA, 2301 bp, Homo sapiens
gtctctccttttcttcttccctccctccctccctccttccctcccatccttatatgcctgtgttactgcaaatctccaattcaaatggaggtgtatatgcctttacttagccaatttaaaaacaggactcaaaatgggagatgtgctgctgaatatgtgtttctttttcttcagtgccatactttgatagcttccaatttgttcactgatataaatgcaaattgggaaaataattaaacctgtatgctgttgatgctgtcagatgtttctgtagcttgctgcttagcataactgagggatgagtaatggaataaggatatgatgtgtaattccactgttgctgtagatggtgacaatctcagttctgatatgttgatgtttgaaagctatttaattgtaaagaaattagtcatgtagagacatgatgtggataaagcatttctggcatttctctagcaggttctagattgaccagtgtcttgcacatgagattatgcatattttttaaggggctgatacttttggttggcctcactgtgtttttcctgatcctgtgggaaagagaaaggcatcccagaagtttgacttgtttttcttttagaatctgtctctgcaggaaagaaaagtcattttaataaaaaccaaaataatttataataattgttgcctttccctccccatcctctccactaagccagcaactaaatgtattcagaaaacaagttaatcaaggagggcagaagaattttttttaaactgtaagaaaatgttcctaagtttagatttattacctgtcatttagggcaaaaatccagtgtccccagcacatgatgacccaactttgtctcacagttgcaagtgtgttgaaaataaagttgctttgtgaacttagaggaaatggctgtgttagattggactgatttagttgcaaaataataccttttagggtcacacttgtattattccctagggtttagccttctctatatacccttggccagactcagaaggggattaaaaagctctggtcttggcctctatcttccttgttgctcctcccagcctttccataacttacccatccacagcccatcagcaggaacacatgagaatgtgggactttgtttctttttttcttagttgtatgaattccagattaggccttatggatacttgtctactaatatatctgaagtttgaaaacaatccctgacaatattgtaggtgcaataaatattagtcaaataaacatttaagtgccaaggtggggtggtagtggttgggggagctttttttgattaaacagaaattccttcaagtagaacttgagaaaggacactaaatacagtcatcttaacccaggccagaacctaaatttattggtttgcctaacagtcttattgtcatggcaatatttgctaagatgagccttctttagataaaaatgaactctcatttagtggtggatgaaaaaagagaaattgctttatcatatagtttaatttggctcggtctactaagaccaccagggttgatgtattcctccatttttggtgtgatctttttcttcattcaataaagttattaaatatatggcaaaacttttttcagtttccagtgaaaatgcatgatactcatgtcatggagtcaggcttgggaaaatctatgaaataatagtttgctgataatgatattttcttatggctttgtatagactacatcctcaaaggattttgtgcttctttgcccatagaaggctttttctccctttgtgtgcttttattaaatctgttgaattatattaatattttttgaatttacagggccaattatcttttttgatggattacttagattaggccatgggttcttcctggcctttctttttctcggtcttttaatcatttcacgtttttatctctccctgagtaaagtggcaagaaaactatttataaggaaggtagaaacgattggccaaaataagatatttggatgaggattatttaagccgtttagatttggccagagacgccagatttagcaaaggactgggttcttatcttctttcattcatgaatatatgccttgggaggacactggtgattcccacagaattaggccaatgatttgccacattaccctttaagctagcccataattccaccagatcccacaccaagtttcagttcatgactcatactgaataaacgtcagttgtaaatgatgtttgaattggtcttcctactaaagtgaaacatcttcttttaagccaagccacatgaatgaaatagcacaatcaga

SEQ ID NO: 106488 - DNA, 1468 bp, Homo sapiens
gtgaattgaaaaagcaaagctaatgaaaatgggttactacatcaaaaatatcttaaagagtttgctatttccatggaccagatatgatgaaattattccctgggtttaaaactgggcactcgaggaggaggtacctgaagtcatttgaaggcaagtttccaatgatgctacaatggcctgaaaaaatttctttaccctctgttatatttaacttgctggtaggaggaatagtggaatgcaggtgttaagccctttgtggtgaaaaagaggttctatagacagaaacaaaacccaccttacatcagctgattggttgattttactagtgtacctcttcatctacttgaattctatttggtaaatccatgtctttactggatatacagttaggtgggaagaggagataaaggatgacaaactctcaaacaatatttatacatttatttactccagggtcaaatccaatccttggaagtagcttctctagtttattttatttgtcccagagctctactcacacttaggacccacccaaaaattctcaaaaacgtaatatggattctgcctcatctgatgctatttctggcagtgggttgtcagccatactctgcttcattccactgggtgtccttgctagatggggagtgagatgtggagcagggaggagctttggattctgggagtggaggtggcaagggaaaagtctcctagtctcctgtgatgttcctgcctccagatagaatagcaaaaacaaacaatttttttttgtgtattatgcctccatgacattgttacattctatgaggagcatctgtctcctttctagacttgaactgtggtagaaaaagcccccttctctcttctatctacttagatttggtgatgctaggaatgtagtgttttagatattaattctatttttatttattcatttttacatcaccaataggatctgaggtggagatggcgggtattatcactggcattttacaggtgagaaagcccaaagccactgaggtaattaatggaataattgattttgaacttgggtctgtctgatttcatgtgcaagattatatacttagtgattttgattttaagtttattcttaacattttaaaccagactattaactcttacctttataaccacagatacaaagaactgtatcatttattttctgaatataaaatattaatggtcaatataaaaatacaaaaatagagaactatatacaacagaaaagcaaaattacccactaataacattttgatttatatccctttagacactgtttagagtttatacatatatgtaaatatgcttgtattttaacaaaattgagatattatataaactgtttgtagcagggtgtttaaaattttaacaatatgttatggatatctttctgtgtcaataaatgtgtatttacattagagttccaagcatttgaactgaatctagtcca

SEQ ID NO: 106489 - DNA, 171 bp, Homo sapiens
ggtcaatacaagttatctattttatatagatggaataaactgaggttcagaaaggttatataatgtgcccaaagtttcacaggtaataagcagagaatttggaactcagagcttctgctgccaaatactgttctaagatatgccagctaaagtcgattcgggtaccgagct

SEQ ID NO: 106490 - DNA, 491 bp, Homo sapiens
agccctttataaccaatcacaacagtactaatttttgcaagttaacagaggtcatagttttgcaccccaaaatacccctttcttcttctaccactgattctcctaccactgaaggatgtcttccagattgtctttttctgatcattcatcttattaactatcttcatatgatgcacattcactttcaatcttgtccaattgttttattattcctcttctctactgtagtcataggcaattctaaaaagcacaaagtcccctctttttgccctgaccttgagctacagccaggtgagctgtgattatccctacagaaggcagaaggtgttccagctttaatctcctggagtgaggccatgtcccctttcagtaacaaatgaagaacatcttacttcatctaagagaataccctaaaatacaaaatgatgatctcaaagcaggttaacatgcacatataaaataaaaccaaattgtcttctttagagtaattt

SEQ ID NO: 106491 - DNA, 925 bp, Homo sapiens
agattgaggcatgaagttcagaaaaaaaagtgttacaacacacagggaagttttttccactcttttctctgtgcattttgaaaattagtcaaaatggactcttttcagtctaccataagttaatataactgataccttgagagatggctggaccaattctctccatgacaaatgtttaatcattagttacaagaatgcagtatctggggcgtcaacatggggactcgagtaaacctgacccaccaataaggattcagctgtccacacgggctggcgacacacttaccgcatcaatctgtgttcaggtccagggttacataattgcagaagcacaagccatacatcgcaggtaggaaaccacagaaccgtctgcaaggagcaagcaacggtggccctgtccaccccagcaaataagaagcatatctgtagcttaaggccacgaatccgtaaaaaccccatgactttctcttcgtgcataaacagatgtatttttgatttcagggaattctttagtatcgtcaatggtgccacataaaacatgttcccaaaccaaatcccacccgtgctgggcagagtgcgtgcacgccattcctacagcattccaaagatggaaggttctttacttcatgttaatttttcctttgaaattatttatatgttctatatataaatacatatgtacatagatatatgggcctctgtgtggctgaacagtatattttgtaaatataagtactagtcctaattgcagaaagagcgtcagtttcacctccccacgagcacttcagatcagtattgtattcattttattcataaatggatatctttttcattgtcatataaagctgggttttatttttttttcctgaaaaataattgcctttattttctctcgttgcctccttggtttcagaagagagtagtt

SEQ ID NO: 106492 - DNA, 320 bp, Homo sapiens
ccctgcagaaggggcaggtttgaggatggtcaggagcttgattttggatacttcatcagacctgaagagcatgggtgcacgtataaaaaaaataaataaataagcatgggttcacgggcaagggcgggctgagagatgaacatggaggtattgacattgagtggctgctggatgccatgagcctggccaaggtccccaaggcagtggcgaggaggagatgaggaggtcaaggaggagacagaggatggacccgaaggccgaagaaaatgcctcaagggagtttcaacaccgggcgcggtggctcacgcctgtaatcccag

SEQ ID NO: 106493 - DNA, 1265 bp, Homo sapiens
cagcagtccctcaaagacagccctcaatccatgtagggacatctgagtatgcctctttctattgaaatgtcaattcaatcccagctttctcaccaccgttcccctttgattctttctcaattgtctttttgcctttagctcccacctatacatctcatgctcagagaaaaacaagttccttagaggttgtattctttattctccaagaatctgtctgaaacttgtacagctagttcctgtcccacaactattaagtggtttattaagtacattaggcagaatgtgcacttcatcaccaggttctagctctggcaaaggagtgctgtctacagcaagatttttgcttttagaattttattaactacatcttttgggttcatccatctacaaacactgattaagggcccctggggcaaccaattgatcagattactaaaaggacttgggaaaaagcaaaaaggtcccattgtactggactgaggattagaagcaattgaaatacaagcctgtaccaagcaagcagcctggccccacacaggtattagcaaatatgtggtaaccaaggttttaggccttggcctttaggtttcctgttttttttttgtttttgtttttgtttttgtttttctgcaacaggttattcttatctcactggctttcactgatcatgtttagaccttctggtagaagaaataatatccagacaggggatgatttggcttcagcaggctgcaggtgttcaaaggttgccatgtggctggcagtggttcaagcccacatttgacactgctgctctagaggaaagataatgatggtaacacagtaataataataataataacaaaaatatgataaagtgaaagagtaagacttcttcagtgtgcttgctcatggcatgaatgctatgtggacagcccaagccatacccagaatcaccttaattccaactttttgaggttcagcaattggaggtggcaattggctttgcattttaaagtatttcgggtaaaggtgaagtgaaggattttcgtctttataatttctgtttggccatggcaaataccatagttgagtatttgcttcaggagagttctttttacagttttacttttcaatgctgaggcatatttctttgagcactgtgcttttatgtgtctttctacaaaggggttattggtcagtggaagaacaaagtacacttgataaaaacattttcaacatacattgagcctaaacagcagttaagttgtctctaaatgaactag

SEQ ID NO: 106494 - DNA, 1211 bp, Homo sapiens
cagcagtccctcaaagacagccctcaatccatgtagggacatctgagtatgcctctttctattgaaatgtcaattcaatcccagctttctcaccaccgttcccctttgattctttctcaattgtctttttgcctttagctcccacctatacatctcatgctcagagattgtacagctagttcctgtcccacaactattaagtggtttattaagtacattaggcagaatgtgcacttcatcaccaggttctagctctggcaaaggagtgctgtctacagcaagatttttgcttttagaattttattaactacatcttttgggttcatccatctacaaacactgattaagggcccctggggcaaccaattgatcagattactaaaaggacttgggaaaaagcaaaaaggtcccattgtactggactgaggattagaagcaattgaaatacaagcctgtaccaagcaagcagcctggccccacacaggtattagcaaatatgtggtaaccaaggttttaggccttggcctttaggtttcctgttttttttttgtttttgtttttgtttttgtttttctgcaacaggttattcttatctcactggctttcactgatcatgtttagaccttctggtagaagaaataatatccagacaggggatgatttggcttcagcaggctgcaggtgttcaaaggttgccatgtggctggcagtggttcaagcccacatttgacactgctgctctagaggaaagataatgatggtaacacagtaataataataataataacaaaaatatgataaagtgaaagagtaagacttcttcagtgtgcttgctcatggcatgaatgctatgtggacagcccaagccatacccagaatcaccttaattccaactttttgaggttcagcaattggaggtggcaattggctttgcattttaaagtatttcgggtaaaggtgaagtgaaggattttcgtctttataatttctgtttggccatggcaaataccatagttgagtatttgcttcaggagagttctttttacagttttacttttcaatgctgaggcatatttctttgagcactgtgcttttatgtgtctttctacaaaggggttattggtcagtggaagaacaaagtacacttgataaaaacattttcaacatacattgagcctaaacagcagttaagttgtctctaaatgaactag

SEQ ID NO: 106495 - DNA, 971 bp, Homo sapiens
cgggcgtggtggttcacgcctataatcccagcactttgggaggctgaggcgggcggatcacttgaggtcaggagttcgaaaccaccctgaccaacatggtgaaacctcatctctaccaaaattatataaaattagctgggcgttgtggcgggtgcctgtaatcccagctactcaggaggctgaggcaggaaaatcgcttgaacccgggaggcagaggttgcagtgagccgagatcacaccacttcactccagcctgggcaacagagcaagactccatctcagataaataaataaatagtcataaaatttgagggcaggctagggaaatgctaacggaatttttgagaggccggcgccaccacggggttcagctgctgtcccagacggtggggggcaggcagcaggggatctacagatgatgaacaacaggagaggcagctgtcatgtggcatctgtccctggaagcttgaggcagcttgggttcaaatccttgctccatttcctctctctttttttttaaccaaagtccagttccaggcttaccacatatcctatttctctttatacctgtgacttcacctctctggatccttaattccctaagtgggatttttaagaggactgttgtgaaaattaaatatattaagtccaatttaaaaaaataaaacaaatatattaagtgctttgaggccaggcacagtggcttatgcctgtaatcccagcactttgagaggttgaggtaggcagatcacttgagcccagcaggttcaatagcagcctgggcaatgtggtgagatcccaactctacaaaaaaataaaaaactagctgggcatggtggcacacacctgtggttccagctactcaggaggctgaggcgagaggatcacttgagcccaggagttccaggctgcagtgagatgtgttcccaccactgcattccagcctgggcaacaaagcgaggagaccctgt

SEQ ID NO: 106496 - DNA, 314 bp, Homo sapiens
caaactggtttcggaagcagattcattcttttcctagccaaagcctggtgaaccgtagtgtgtacaacagttaaaagcagagacctgcaggtccacaggagcagacgctgagaccagcctgcctggggtcaatgccctctaacccctctgtgcctctgctgttcatctgctgaatgggtctcatagttgagcagtggtcgagagatttcctggcatcaaatacatggaagggacttagcgtaggtcctgcttagcacatagtaagtgctcagcgaacttacttaccacttattacttaccacccctgcctgaag

SEQ ID NO: 106497 - DNA, 379 bp, Homo sapiens
tttgaaagagagttttactctgttgcccaggttggagtgcagtggcacaatcacagtaactgtgaactcccgaactctagcgctcccactacatcggccttctgagtagctgcgactacaggcgcatgccaccacacacagctaagttttaaaatttttttagtagagacgagatctcactacgaagcccaggctggtctcgaactcctgagctaatgtgatcctcccgcctcagcctcccaaaatgttgggattacaggcatgagccactgcacctggcccaaatatttttcacagaactgattttctttttttttttttttttttgagacaaagtctcattcttgtcccccaggctggagtgcaatggcatgatctc

SEQ ID NO: 106498 - DNA, 703 bp, Homo sapiens
agccaaatcgagtccagaagtctaaaatccatgcttgtttgttttaaacaaagtagagtgagagatttcgagagaaaggaaaaactagagttgacgatagaacagacaatagaactgaagaataagatggctcatttcgatctccaggggagtgggattttcctcatattggtgaaatatttagttaaaaccacttcatttttaattccactgtcttcaaaacacttttatatctgatatcttgtttttgccttaatctatgagtaataatatgtacctaccttattaattaaaagacaaagagaatgatattgaaaggatactaaagggacctacctaaatgtctgtaatgtgaaataaataagctgtttaatttttgactcctaaactgactcttttctgccagttttacttaatatatgtgtatttcccacttgtgaggtgattgaaaggaaaccttgaactatgctacagccattcagtaagaaattctctataaagagtggcaaaataattcagattattagaatgttgctgtctttatcaaagtcaaagctaattttgttttatgaagccgccaaaagaaaatgcttggggaaactctccaggacatcggtctgggcaaagatttattgagtaataccccataagcacaggcagccacagcaaaaatggacaaatgggatcacatcaagttaaaaag

SEQ ID NO: 106499 - DNA, 770 bp, Homo sapiens
tatatttgaatatattaaggtagcaaactatgttatcttcacataattgtcaaaggatttagacttttcaaaaaaggtataacttcactaatttccatttgtcttttctttgtattgttaaataaagtgtaatcatgtcattgagaagaacttctattataatatcctgagtaagggatttaagttttgacttgtatcattattaaatttctatcccatacttgtaaatactaattgtatgcttttaaacctgtatgttttaaattcagaggtaattgcaataaaagaaagcacacataccaattttcttatagcaaacaactccaccagaatccttaaatctaagatgaagtctaaatatgtcacttagtgcatagaatcccacagtggtttcctgtcaaattaaatacacggtccttagcctgacattttaaatgtcttttaagacaacctcatatgataacaacctactttcctagtatctctcattactttcatttttctctcctgaaagcaagcaggctggactgctttccatcccttagcaggcacaaaaatttttaggcttttgctcagattgctcctcacctctcgcatgccttttcagtggtttttctctctttatgtacccgtcaaaatcctaccccttcttcaaagccatctgcagttaatgaacctcaatgaagtttgtcctcatctacacaaatgatactctttccccacaataccttttatttttctcataggtgttttacccagagacacactta

SEQ ID NO: 106500 - DNA, 912 bp, Homo sapiens
tctgatgaaagcattcttagtgaaaatcttagataattagagtctttctttattcagcatccagatcaatgctgtttcctatactctccaaacaagtggagtcttctagctaaataaagaaaaacctttttaatacttatgaattcacaaatttcaaatttaatttttcttttgttcataaatccctaacactttaatcacgataatccactaaccccatttcagcacttggcttaaccgtggcagtgcaccctaaaccctataagaggcagagcttgtctttttcatctttgcatttccaccatctaatatcatgtatttttaaaaaagaaaacataaactactacttctctaaaacaaaattacaaatgaaaattagagagtaaaattcctcgtcccatgtgcttgaagttgatgctgtacagcctgttcagcccacttgagggaaacagtgttttctccagagtgtgggtcacttgggtctacatggtgtctacatgggtcagcagttgcatggtgaatagagatacacagatgaaaaatggaatttctggctcagagactggacaatcttgagggagttctgagatctagatcaaataagacgatttatatgatacagtaaatgatattatggacatgttgtggaagcacagagggtaaacagcttggatcccctgaaattctgagatttccttgagaaaatggcatctgctgaaccaagaaggcccgtcactatccagtaaattcagtggcacctaagagcctagcaatgccacttcaacctggccagctctggtagagagacaccccaaatgaagtggaatttaatgcatcgtgttcctttggctgggcgtgtccggaggaaaaagaaataggcatttcccatccataagacaaatgctgttggca

SEQ ID NO: 106501 - DNA, 588 bp, Homo sapiens
tagtatcgggagagtccagctgagttcagcatttggacccgggaagcaggcgctggaggcctctccatcgctgttgagggccccagtaaggccgagattacattcgatgaccataaaaatgggtcgtgcggtgtatcttatattgcgccaggcagcctggcttttgttttcggggcttcacaagaggacattttccttgtttgaacatgattaggttgcaaggaacagaaatccatcaggtttgctgcaagtcaatgaggaatctatgtgtatgggcacatgggacagcctcctacaaatccagttgcaagatacatggccagacctcttaagggtgggaacgcttgttctggttgccttttgcctttctccattagcctctctgcttcttgctttcattcaattgctccattctttccaccaaccagcctctgtctgcccacccatggctaccctggctggctgccccagaagagtggccttggcatctgagctccctctagcaggagctcttaaccttttgtgtgccattgactcttgccatctggcgaagcctatggggactgttcttgggataatgttttaaag

SEQ ID NO: 106502 - DNA, 457 bp, Homo sapiens
aaacacttttttttatttacttatttatttagagacagggtctccgtctgttacccaagctggagtacagtggtagagtgctgtgatcatggctcattgcagcttcaaactcttgggctcaaatgattctctcacctcagcctcctgtgccaccatgccctgctagttgattttaattttttataaagaaggagactcattaggcagcccaggctggtctcaaactcctgggcccaagcaattctctcatctcagcctcccaaagcactgggattaaaaacatgagccactgtactgagctgtgcctacttcaaaagactgaaaataaaaaatcaataaatctttgccaaattaaaaaacaaaacaatagtttccaggtcttagacaaagacaattctgtgtcatgaaggtggcaaaaggcttatttagctgttaaaatgatttgcttatatttcaa

SEQ ID NO: 106503 - DNA, 364 bp, Homo sapiens
agccatgtttccaaacgtggctcaggcccattcagcttgtggttttcgctctctctgtccctccgcagggagtgcctgcctcccatgcatcaaggcctacttccaatgcagccctcgtgggcccctcctttagacagaggcagtcttcccccacttagaacaaccacagcactttgattttgtgctttggaattactcagactcaaacaatcattagggaattctatatcttgcctctccgtctagattgagggtacctgttaattcaacttttcattctcccctcctagaatactacaggtacagaaatcatttgctcaattaaatggtggcagcccagttcccatgaggaaggtctgggtga

SEQ ID NO: 106504 - DNA, 322 bp, Homo sapiens
cataaatctacacaaacttctacacaaatgctcatagcagctttattcataataaacagaagtggaaacagttcaaaagtccatcagctgatgactggataaatatcatatatgcatacaagggaatatttttcagtaaaaaactaagttctgggccaggtgaggcatctcatgcctgtaatgctgatgcttgcacccgtgcaagcataggtattgcacaggctgaagaaggaggatggtttcaccccaagagttcaagaccagcctggacaacatagcaagacccctttctctacatatatatagaaaatgttctcaaatt

SEQ ID NO: 106505 - DNA, 250 bp, Homo sapiens
ttaaagtggtttacagtggggtattttttcttactgtctgatatatttggattaaaactaccaccttactatgtgcataccttttgtccttcttgttttatgtttcctttaatctctttggttgttttcttttggattgaatatgttttattcttttaatattcttccttcattagtttggaagctacgttctcttttataattcttttggtggtcagtctagaaactacaatgtgattttaacttgtta

SEQ ID NO: 106506 - DNA, 452 bp, Homo sapiens
agttcctctaaaagcctacaagtccactcgttagattccaacatcaggagatcagcaagcctcaaactcatcattctgaaggctatccttgagcccttccacagacaccctcagaaaatcagcaacttcctaaaagaatctcgtatctaggtactggagtaaaatgcagaatgtacactctctagcttaacaacacaagttgttagcaacaaagctatttctccagacctttatgggaggaatttccccacagatggccagatgtgcaaacaagacctttgagtgcctttcagagcttggattatagaagccagcaaaagtgtatagcaatggagagggattcttccaaataagcctaaagtcccaagccctagatctgaatccaggggtggcattaagaattagagctctgtggcgcatgcctgtaatcccagctacttgggaggctgagg

SEQ ID NO: 106507 - DNA, 764 bp, Homo sapiens
cctaggtgtgcagtaagctatgccatctcggtttatgtaagtacattctatgatgtttgcacaaagaggaaattgcccagtgatacatttcccagagtgtttcctcattgttaagctacacatgactatatacttctttatatgtttaaagagtaacagttttacatctcacttcgttgacaattcttagttagccacagagtgtttcagtgaaagactatagtaaaatactcattcatttggtagaactttgcattttgagaatatctaatccctaatttgttgttaccgtaactgtggaattcctgttttggagagatagtttagtgaactaagagcatggacttcagaggcaggctggttggtttagattccaacttccacgtgcttgttgcaggatcctgggtgaatcacttaaactctccctgcatcaatttcttcatttataaaatgaggatattcaaagggctgttatgagatctatcaagctgatctaaatcatgcatgttcccttgaacagtgtgacacatgggaacactacacgagtgtccattatttcctaacattgtaagtcccttaaatgggtatagtagtgcactctgagcaggatggggaactgcaagaagaggagactgaggcagcctcctagttctcttgttaggactgtgtttgagagttgagtaccctccttttttaagcacattgtactaaatgctgtcctccaggtccaggacttatgagtgagacttccatgttacaagggc

SEQ ID NO: 106508 - DNA, 356 bp, Homo sapiens
ggaagattgaataaccagtgccagggtgggcttcatcctcttatcgtgggaccagctgtcccagtgactttcacttgtcggtactgcagtcctttctggaaaatgtcctgggacaaggatggtgcccagatgtggctgcattaattactgtaaaccccataatgaagaagatgtctccttacagccccctttcagtccttgaatggcctctaggagaaagtctgaatgtgacctccctttctaaaaagcaaggagtgggaccaggaggaaacaggccgcaggatcccggccttctgcaggcagtggggccccaaatatataataatgttgttttgtttcagttatgcttgttttta

SEQ ID NO: 106509 - DNA, 164 bp, Homo sapiens
gctttacaggtcatatagtcccttgcaactgctcacctttgctgcaactgctcacctttgctgccacagcatgacagtgccaataaacaatattgtaaatgaatgtggatagttgtgttctaataaaactttatttacaaaaataagcaacaggagaatttgac

SEQ ID NO: 106510 - DNA, 155 bp, Homo sapiens
acataagatattcagcgaaaaaggatactcataaaatctatctatcagtgtgtcatgcatttctaaaagcaaatataaaatcacgcacaatcaaaactgccctgaagtcacgtcattggccagcgtctggggtcttggaagttcaaaagccccta

SEQ ID NO: 106511 - DNA, 607 bp, Homo sapiens
gggggtcaggtcagcattggaggggatgccagccttgccctgaaggaactagtactcggggagatgcaatgtttattaatgaccgcattctacttagagttttaagaactgccacagaagagatcaagtgctgaggctggccaaagaaaggccagcttgcttctggctgggctgggctgggctgggtctggacctgaggaatctgggccacatcttagaagaagcattagcatttgaacaggaaaggggcggggtgaggggaaacttggcaaagggaaagaacaatccaggtttggggatagcagttcccatgggttactgggaatgcggatggatatgagggggttggagggaagccaggagttccctgtatgcggttttgtggtcttagaagtgtggttccttcaaaatccccactagtggcttgtggaggatggcaactcaggccaggtctttcttaagtgatgcacctgtgcacctgtgatcatttgcagactcaaattactgtagaatttagatgagagtgtgacgttgtgatatccagtgcagtagccacagccacacgcaaatgagcacttgaatcgggtcagtcctaaaatgaaatggg

SEQ ID NO: 106512 - DNA, 413 bp, Homo sapiens
aggagcatttgtgctgggattcaccggtatggattggagatgggggatgggaatggggagatgggtccaagagacagcaccgcaggggtgcggcatggaaggacagggtcccgaggcaaagcaaggcagtggtggggagggtcagggtgctaggctggatgaggcccagtctcagtccttggggcactcctggcatgatgggggagtggcacggaaacagagactggtaatcatgtgtttccaggcacagtggcaggctggccccagggaagggaaccaggcaggctgagagggcctggaaacagactaagcaggaggagatgggagccatggaaagtgctggagctggggtgtgacctgctttggtggctgggcccaagatggacagcctggagggaggaccacttgagggg

SEQ ID NO: 106513 - DNA, 384 bp, Homo sapiens
ccccatggcctttgggtgaatacttttattttagtagatgcacaaacgtattttaattgaattaaagaataaaggaagaaaacatagtgaaggaaaagagcagatatgaaaaagaacgctttagaaaaagtttatttttgctcataattacaaaaaatctactttttctaggcaactaaaataagaaataaaaatatctggactatagcatttgcttttcatcttatatcaggaatgtaatagctatttaaaattctgtgtattactaagggattagtaacgtttgcctcagcctaaggcatcagcatattctagcataatattatttcttaggtaatgtcttatgtcacaatcaccattgcctaattcaaatagaatggtagt

SEQ ID NO: 106514 - DNA, 554 bp, Homo sapiens
gaaaccttccaaaagtggtaaaataaatagctgggctagctaaggtagtttgttagaatataaaatatgaaactgagtatctgtttttgtcatcagaagtgggacatttaggaaagggcagttgttttcctgtaacagttttagtaaatatgaaaataacccacaatgtgggaagaaaactttgtagacaagcaattaagaaaatattcaataatacattttaatccgattttcaagtatgctaacattttagaaaataaacgacgaaaatgggattagggcaactgtattttatatctttgaagcctgaaatagatttgtaattacttcactaatcatcacatttttctaaagctgatggaacaacagcatgtaactcttttgctttactttgtactggaccaggctctcagtgttaaatttttggaaaaaaatcatgagtagtggaacatatataatgataatattatatgcattacatgaaaataatcataaagagactgttatgtggctttcaaggtcagaactttacaaataaatactaaatatatgta

SEQ ID NO: 106515 - DNA, 405 bp, Homo sapiens
ataacattatccctaatttttttttcctgaggaacaaagcaaataccactcaaaagaagcagccataatgcaagcaaaataatttttcccctaaatgctaattctaaatctctttgtaagtacagtcatgcatcggggggataccttctgagaaacaggtcattaggtgatttgatcgttgggtgaacatcatagtatgtacttacacaaacctaggtggtccagcctaccacacacctaagctacatggtatagctgattgctcctagactacaaacctgtatagcatgttactgtactgaatactgcaggcagttggaacacagtggaacacaatggtaagtatttgtattaacttaaacatatctaaacatggaaatggtatagtaaaaatatggtattata

SEQ ID NO: 106516 - DNA, 400 bp, Homo sapiens
ctttcccatctttgaaatatgacccctaaatgttcatccttactgtagaagacaacctatgagtgaagtcctctctctcttcttcactcattgggtatattactggtatatcatttagtgtgtcaggatgggcacagtggctcatgcttgtaatcccagcattttgggaggccaaggcaggcagatcacctgaggtcaggagttcgggaccagcctggccagcatgatgaaggcccatttctactaaaactacaaaacgtagcccggtgtggtggcacatgcttgtggtcccagctgcttgggaggctggggcaggagaatcgcttgaacccaggaggcggagattgcagtgagctgagattgcaccactgcactccagcctgggcaacaaactccctct

SEQ ID NO: 106517 - DNA, 274 bp, Homo sapiens
ctaaactccacagaggagaataaaacagaaacataacatgagtggaaacttgtagtgtccaaatgtcctagtctgacagcacagatatattaaattacttatgatcattgttttggtaaacatttccaagatcagaaatgacaaagttaagtgatacttcttatttctgcttttaaggtatgtctttaaaaaattacttacattgagaatatttaaaaaacataatatgctcatttgatttagagtatttccctttgttgaattgatcataaat

SEQ ID NO: 106518 - DNA, 469 bp, Homo sapiens
agcaaagcagcactgtataaactatacagcaatgcagacatgagaacatctgagggttatagccaagctctttgagaagtagtctctgctgtttaattatggttataaagggcttcagatcaattattctgaagccagaatgatcattagtgacacatctttctactttaattggttaacatttcacatagctttttagctgtagtaactctctgatttataccttttattttgttttttaaaaaatattgccagtcaccattcagtgtgtcaaattcataaccccattaaatgggtcttgactcatttaaacgactgtcaattcagatttccatgtccactaaaatccattttaaaagatgtctaaagcagaggaaatcttcaacataaaaaaccaacaagctaaaataattagcttgctaggaactaataaaatacttttcctagtgccaaagaactatgcttgaga

SEQ ID NO: 106519 - DNA, 308 bp, Homo sapiens
ctgagactcccaagtagctgggattacaggcacccacaaccacgcccggctaattttttgcatctttagtagagatggggttttgtcatgttggccaggctggtctggaactcctgacctcaagtgatccacccaccttgacctcccgaaatgctgggattacaggggtgagccaccatgtctggccgatatttttattttcatctcgaggaccgaaccgcccgtcctaaccaaatcactggtttggcacaagagttctgtgtgtctcatttgccctgtcccagtgcacgtgagggtcagttaatacc

SEQ ID NO: 106520 - DNA, 329 bp, Homo sapiens
ggtgtgtgtgcgtgcatgtgtgcatgtttatgggtgtgtgtgtgtgcatatgtgtatatttgtatgtatgtgtgtgtgcgttgcctgagctggggtgtgagggctcagtccctgtcacagattggtgaggcatagttggggagtcctttgccagaactcaaaggtcatgtgtacctcaaattctccttcctgcctccctgctcacccccatgaacagaaggctcctccccagccctgcggctgctctttgtatccaagactgtgaggcccaccagcgccgggcagcacattgtgttgccagcctgtggaacatctcgctttgcactggc

SEQ ID NO: 106521 - DNA, 1705 bp, Homo sapiens
acccgggctactgcggtgtggactcgagggctgggcgcggggccggcgcagaagccgccagctggagacgatggtggaccacttggccaacacggagatcaacagccagcgcatcgcggcagtggagagctgcttcggggcctcggggcagccgctggcgctgccaggccgagtgctgctgggcgagggcgtgctgaccaaagagtgccgcaagaaggccaagccgcgcatcttcttcctctttaacgacatcctggtgtatggcagcatcgtgctcaacaagcgcaagtaccgcagccagcacatcatccccctggaggaggtcacactggagctgttgccggagacgctgcaggccaagaaccgctggatgatcaagacggccaagaagtcctttgtggtgtcggccgcctccgctacggagcgccaggaatggattagccacatcgaggagtgcgtgcggcggcaactgagggccacgggccgcccgcccagcacggagcacgcggcaccctggatccccgacaaggccacggacatctgcatgcgctgcacgcagacgcgcttctctgccctcacgaggcgccaccactgccgcaagtgcggcttcgtggtctgcgctgagtgctcgcgccagcgcttcctgctcccgcgcctgtcccccaagcccgtgcgcgtctgcagcctctgctaccgcgaactggccgcccagcagcggcaggaggaggcggaggagcagggcgcggggtccccagggcagccagcccacctggcccggcccatctgcggagcgtccagtggagatgacgatgactccgacgaggacaaggagggcagcagggacggcgactggcccagcagcgtggagttctacgcctcgggggtggcctggtctgccttccacagctgacccccggcctgcagaacatctgtccccaagccagctccactgcccaggcccccaagagggcagctccagaagctgcccagggctccgggaccccatcccatggtggcaggtgcagcggtggggagtggctctttctggactcccagtgcctttttgctggacactgtgtccttatggcttcactgcaggtaatgcctttcccttcaggaagccccagaacacccacaggtcttggtaacaaacgccaccttacactctgcaggctgcagcggcagctccagatggcctcctgagctggacgaccccaggtctccagacatctagggaccagagcaggtttgggaacacagagggaagacaggatgggagtgtagccacagaacccacctgcaccctgacaggcacaccccactgaagagcctgagtcccaggaggcctcctggaagcccaggactgcccacccaccacgctggtgcccaccgcctggccagccaagccctgccgatcagacatgtgggctccccgaagcccagccagagactgccgtgctgtgggtgccaccaggcccagggactgcagcctgagctccccgaggcccagggcagccgggtgaggactctgtcctgtgtcacctctctccaggtgtccagctgtctcatgcctttttgtcctgtcctcagctctccgtgtggtcagcgaaaccattgttttctgttaggactcagttgcaagaacagaaaccctgcccccacttaataataaaaaagaaagtttattgatgggtggttgcaaaac

SEQ ID NO: 106522 - DNA, 1933 bp, Homo sapiens
ccccaccgtcccccggccgggctgcgggtcgcggggcaggcgcatgaggcgagtctcccatcaccacccccggacaagcgagctctctcccgccgcgcggtcttggcggctcctgggccggcggggcgcagtgccgctgactccagcccaagaagaggcctgggaagggcgctcctgggcggcttgcggggtgaacctgcagggagcctggggagagcggtcaggggtcagagcgtccgaggcggaatccccggggaaacgcgcagatgtaagctggtggagccgccagctggagacgatggtggaccacttggccaacacggagatcaacagccagcgcatcgcggcagtggagagctgcttcggggcctcggggcagccgctggcgctgccaggccgagtgctgctgggcgagggcgtgctgaccaaagagtgccgcaagaaggccaagccgcgcatcttcttcctctttaacgacatcctggtgtatggcagcatcgtgctcaacaagcgcaagtaccgcagccagcacatcatccccctggaggaggtcacactggagctgttgccggagacgctgcaggccaagaaccgctggatgatcaagacggccaagaagtcctttgtggtgtcggccgcctccgctacggagcgccaggaatggattagccacatcgaggagtgcgtgcggcggcaactgagggccacgggccgcccgcccagcacggagcacgcggcaccctggatccccgacaaggccacggacatctgcatgcgctgcacgcagacgcgcttctctgccctcacgaggcgccaccactgccgcaagtgcggcttcgtggtctgcgctgagtgctcgcgccagcgcttcctgctcccgcgcctgtcccccaagcccgtgcgcgtctgcagcctctgctaccgcgaactggccgcccagcagcggcaggaggaggcggaggagcagggcgcggggtccccagggcagccagcccacctggcccggcccatctgcggagcgtccagtggagatgacgatgactccgacgaggacaaggagggcagcagggacggcgactggcccagcagcgtggagttctacgcctcgggggtggcctggtctgccttccacagctgacccccggcctgcagaacatctgtccccaagccagctccactgcccaggcccccaagagggcagctccagaagctgcccagggctccgggaccccatcccatggtggcaggtgcagcggtggggagtggctctttctggactcccagtgcctttttgctggacactgtgtccttatggcttcactgcaggtaatgcctttcccttcaggaagccccagaacacccacaggtcttggtaacaaacgccaccttacactctgcaggctgcagcggcagctccagatggcctcctgagctggacgaccccaggtctccagacatctagggaccagagcaggtttgggaacacagagggaagacaggatgggagtgtagccacagaacccacctgcaccctgacaggcacaccccactgaagagcctgagtcccaggaggcctcctggaagcccaggactgcccacccaccacgctggtgcccaccgcctggccagccaagccctgccgatcagacatgtgggctccccgaagcccagccagagactgccgtgctgtgggtgccaccaggcccagggactgcagcctgagctccccgaggcccagggcagccgggtgaggactctgtcctgtgtcacctctctccaggtgtccagctgtctcatgcctttttgtcctgtcctcagctctccgtgtggtcagcgaaaccattgttttctgttaggactcagttgcaagaacagaaaccctgcccccacttaataataaaaaagaaagtttattgatgggtggttgcaaaac

SEQ ID NO: 106523 - DNA, 1959 bp, Homo sapiens
accggtctcttcccggaggagggccttccaggaatcacagggctggacagagcccaggggcggcccctctggagggagaggaggcttggcgcctgatgctgcagtctcaatgcacatggagaaaacctcacatcctcacgctggcctgggagcctgcaggatgtctcctgccggcactgcaacctcatctgtcctccttgccccatcgctccttcctccgcagcctgacttcacccattccaccttgagctgctccccaggaccggagctctgcccctagatctttgcacagctgacttcaggctggaccgccagctggagacgatggtggaccacttggccaacacggagatcaacagccagcgcatcgcggcagtggagagctgcttcggggcctcggggcagccgctggcgctgccaggccgagtgctgctgggcgagggcgtgctgaccaaagagtgccgcaagaaggccaagccgcgcatcttcttcctctttaacgacatcctggtgtatggcagcatcgtgctcaacaagcgcaagtaccgcagccagcacatcatccccctggaggaggtcacactggagctgttgccggagacgctgcaggccaagaaccgctggatgatcaagacggccaagaagtcctttgtggtgtcggccgcctccgctacggagcgccaggaatggattagccacatcgaggagtgcgtgcggcggcaactgagggccacgggccgcccgcccagcacggagcacgcggcaccctggatccccgacaaggccacggacatctgcatgcgctgcacgcagacgcgcttctctgccctcacgaggcgccaccactgccgcaagtgcggcttcgtggtctgcgctgagtgctcgcgccagcgcttcctgctcccgcgcctgtcccccaagcccgtgcgcgtctgcagcctctgctaccgcgaactggccgcccagcagcggcaggaggaggcggaggagcagggcgcggggtccccagggcagccagcccacctggcccggcccatctgcggagcgtccagtggagatgacgatgactccgacgaggacaaggagggcagcagggacggcgactggcccagcagcgtggagttctacgcctcgggggtggcctggtctgccttccacagctgacccccggcctgcagaacatctgtccccaagccagctccactgcccaggcccccaagagggcagctccagaagctgcccagggctccgggaccccatcccatggtggcaggtgcagcggtggggagtggctctttctggactcccagtgcctttttgctggacactgtgtccttatggcttcactgcaggtaatgcctttcccttcaggaagccccagaacacccacaggtcttggtaacaaacgccaccttacactctgcaggctgcagcggcagctccagatggcctcctgagctggacgaccccaggtctccagacatctagggaccagagcaggtttgggaacacagagggaagacaggatgggagtgtagccacagaacccacctgcaccctgacaggcacaccccactgaagagcctgagtcccaggaggcctcctggaagcccaggactgcccacccaccacgctggtgcccaccgcctggccagccaagccctgccgatcagacatgtgggctccccgaagcccagccagagactgccgtgctgtgggtgccaccaggcccagggactgcagcctgagctccccgaggcccagggcagccgggtgaggactctgtcctgtgtcacctctctccaggtgtccagctgtctcatgcctttttgtcctgtcctcagctctccgtgtggtcagcgaaaccattgttttctgttaggactcagttgcaagaacagaaaccctgcccccacttaataataaaaaagaaagtttattgatgggtggttgcaaaac

SEQ ID NO: 106524 - DNA, 186 bp, Homo sapiens
gtgtgtgggcgtgtgcatgcccgtgtgggggtgtgtgtgcaggcccgtgtgtgcggggcggtgtgtgcctgtgtgaaggggtatgtgtgtgggctgtgtgagcgggcccacgtgtgcgggggggtgtgtaagcccccatgtgtgcagaggggtgtgcatgcctatgtgtgatcgggtgtgtgtggg

SEQ ID NO: 106525 - DNA, 504 bp, Homo sapiens
cagcgtggatgaacttgttaaatgtaaatcagatggctacaccctgattaaaagcgtgcattggcttcctcatccctttaacagaaacccattcctccaggatcctgttgatcgggccttgtctgactcttctctctttccttgctctggcatgcagtcttttgtgttccttgatgccacattagtttttgtcttagggcatttgccatttcctagtctgagaagcactttttgctagtcttgtggctccaagtgatttagcgtcttcagagaggccttcctcaaacctgcttaaaagttacctttcccttctgaacaccagtcctcctgtagcaaagtggttctcaaactgtggttcctggacccctgggggttccctgagatgttttcaggcttctgtaaggtaaatatcatagactaagactgttaggctttttcactctgttaatttttgcactaattgtacaaaagcagttgttggcacaactgctgacatcttagcac

SEQ ID NO: 106526 - DNA, 245 bp, Homo sapiens
atacctaatgtaaacgacgagttaatgggtgcagcacaccaacatggtgcatgtatacatatgtaacaaacccgcacgttatgcacatgtaccctagaacttaaaatataatttaaaaaaaaaaagaaaaaaaataccacgaacaaaaaggacatggaattaacaggcaccgaattccttggtttctctctcaactatttaccacctggaatgatctccacgcagtcttctgtctacttctctct

SEQ ID NO: 106527 - DNA, 320 bp, Homo sapiens
ctgcagtgtcttcacagagagggtaatttaagactaactttgaaggatacgtagaattttgctgagcatggaaggaaaataattccaggtagagaaatggaatgaacaaagtacagagtcttgaaaatgcttggtatattaagagcccttctgtacggagctgatggagaataatgttggaaaggttgtttaaggcaagattgtgaaggcccatgaaatccatgccaagaaagttttaagttgtaccatagaagatagggagccatctgaggttgttttaatcatcacaatgaccaaatcttttctaagtttttgacggc

SEQ ID NO: 106528 - DNA, 471 bp, Homo sapiens
aagggtgctgttggcagaagctgggaaggctcacttgaaaggagagagaagccaagctgaattgcaggtatcaagctctggacttaacatactgcccaaaccccaagtcctcctagaagcccttgagacagatgaagatactgttacaggacagaaaggaaatccatgaaacgactcactgaaaaagaaaactgtgcaggaagggaggccctccaggtagactgtaaaggtacccatggtgggtatggcagtcctataagagggacagcatgcctggctccagacacacacttagagtgccagagaagaacaatgctgaggccaggcgcagtggctcacgcctgtaatcccagcactttgggaggcagaggcgggcggatcatgaggtcaggagatcgagatcatcctggctaacacagtgaaaccccgtctctactaaaaatacaaaaaaaaaaattagctgggcgtggt

SEQ ID NO: 106529 - DNA, 3439 bp, Homo sapiens
agcggggcttgggtttgaatattgtggttgagtctgaagcgctgggaggcggacattaaagtgaagtggttgcggtaacctggcctgggcctgaagtgagtgagaggcacatgaagagaagtattcaagtatttatacagataggaatcaagataatcaacaatgtctgtcactgaggaagacctgtgccaccatatgaaagtagtagttcgtgtacgtccggaaaacactaaagaaaaagcagctggatttcataaagtggttcatgttgtggataaacatatcctagtttttgatcccaaacaagaagaagtcagttttttccatggaaagaaaactacaaatcaaaatgttataaagaaacaaaataaggatcttaaatttgtatttgatgctgtttttgatgaaacgtcaactcagtcagaagtttttgaacacactactaagccaattcttcgtagttttttgaatggatataattgcacagtacttgcctatggtgccactggtgctgggaagacccacactatgctaggatcagctgatgaacctggagtgatgtatctaacaatgttacacctttacaaatgcatggatgagattaaagaagagaaaatatgtagtactgcagtttcatatctggaggtatataatgaacagattcgtgatctcttagtaaattcagggccacttgctgtccgggaagatacccaaaaaggggtggtcgttcatggacttactttacaccagcccaaatcctcagaagaaattttacatttattggataatggaaacaaaaacaggacacaacatcccactgatatgaatgccacatcttctcgttctcatgctgttttccaaatttacttgcgacaacaagacaaaacagcaagtatcaatcaaaatgtccgtattgccaagatgtcactcattgacctggcaggatctgagcgagcaagtacttccggtgctaaggggacccgatttgtagaaggcacaaatattaatagatcacttttagctcttgggaatgtcatcaatgccttagcagattcaaagagaaagaatcagcatatcccttacagaaatagtaagcttactcgcttgttaaaggattctcttggaggaaactgtcaaactataatgatagctgctgttagtccttcctctgtattctacgatgacacatataacactcttaagtatgctaaccgggcaaaggacattaaatcttctttgaagagcaatgttcttaatgtcaataatcatataactcaatatgtaaagatctgtaatgagcagaaggcagagattttattgttaaaagaaaaactaaaagcctatgaagaacagaaagccttcactaatgaaaatgaccaagcaaagttaatgatttcaaaccctcaggaaaaagaaatcgaaaggtttcaagaaatcctgaactgcttgttccagaatcgagaagaaattagacaagaatatctgaagttggaaatgttacttaaagaaaatgaacttaaatcattctaccaacaacagtgccataaacaaatagaaatgatgtgttctgaagacaaagtagaaaaggccactggaaaacgagatcatagacttgcaatgttgaaaactcgtcgctcctacctggagaaaaggagggaggaggaattgaagcaatttgatgagaatactaattggctccatcgtgtcgaaaaagaaatgggactcttaagtcaaaacggtcatattccaaaggaactcaagaaagatcttcattgtcaccatttgcacctccagaacaaagatttgaaagcacaaattagacatatgatggatctagcttgtcttcaggaacagcaacacaggcagactgaagcagtattgaatgctttacttccaaccctaagaaaacaatattgcacattaaaagaagccggcctgtcaaatgctgcttttgaatctgacttcaaagagatcgaacatttggtagagaggaaaaaagtggtagtttgggctgaccaaactgccgaacaaccaaagcaaaacgatctaccagggatttctgttcttatgacctttccacaacttggaccagttcagcctattccttgttgctcatcttcaggtggaactaatctggttaagattcctacagaaaaaagaactcggagaaaactaatgccatctcccttgaaaggacagcatactctaaagtctccaccatctcaaagtgtgcagctcaatgattctcttagcaaagaacttcagcctattgtatatacaccagaagactgtagaaaagcttttcaaaatccgtctacagtaaccttaatgaaaccatcatcatttactacaagttttcaggctatcagctcaaacataaacagtgataattgtctgaaaatgttgtgtgaagtagctatccctcataatagaagaaaagaatgtggacaggaggacttggactctacatttactatatgtgaagacatcaagagctcgaagtgtaaattacccgaacaagaatcactaccaaatgataacaaagacattttacaacggcttgatccttcttcattctcaactaagcattctatgcctgtaccaagcatggtgccatcctacatggcaatgactactgctgccaaaaggaaacggaaattaacaagttctacatcaaacagttcgttaactgcagacgtaaattctggatttgccaaacgtgttcgacaagataattcaagtgagaagcacttacaagaaaacaaaccaacaatggaacataaaagaaacatctgtaaaataaatccaagcatggttagaaaatttggaagaaatatttcaaaaggaaatctaagataaatcacttcaaaaccaagcaaaatgaagttgatcaaatctgcttttcaaagtttatcaataccctttcaaaaatatatttaaaatctttgaaagaagacccatcttaaagctaagtttacccaagtactttcagcaagcagaaaaatgaaactctttgttttcttcttttgtgttctaaaaaaataaaatttcaaaagaaaaggttgtcttttaagttttttaaatatttgttgccttttaaaatccctgagtgtaagttaccatggtggcagcttagttttactatgccacaacaagttgactaggacattttagtaaatggtagtgagttaaattatctttattattttttaaaaataagaatttagaagtggtaaaattatggcccaagatgtatttggttctctattatgttttgatacattattttaatcatatatatgactttccttttcaaaaatactttaatgtacaagtgtaaatatatgtgcccataaaatcattgtaaatattatttagtcatcacaaataaaatattgtcccttgctacttgatatattaaagatgtagattttaaagt

SEQ ID NO: 106530 - DNA, 3418 bp, Homo sapiens
agcggggcttgggtttgaatattgtggttgagtctgaagcgctgggaggcggacattaaagtgaagtggttgcggtaacctggcctgggcctgaaagaagtattcaagtatttatacagataggaatcaagataatcaacaatgtctgtcactgaggaagacctgtgccaccatatgaaagtagtagttcgtgtacgtccggaaaacactaaagaaaaagcagctggatttcataaagtggttcatgttgtggataaacatatcctagtttttgatcccaaacaagaagaagtcagttttttccatggaaagaaaactacaaatcaaaatgttataaagaaacaaaataaggatcttaaatttgtatttgatgctgtttttgatgaaacgtcaactcagtcagaagtttttgaacacactactaagccaattcttcgtagttttttgaatggatataattgcacagtacttgcctatggtgccactggtgctgggaagacccacactatgctaggatcagctgatgaacctggagtgatgtatctaacaatgttacacctttacaaatgcatggatgagattaaagaagagaaaatatgtagtactgcagtttcatatctggaggtatataatgaacagattcgtgatctcttagtaaattcagggccacttgctgtccgggaagatacccaaaaaggggtggtcgttcatggacttactttacaccagcccaaatcctcagaagaaattttacatttattggataatggaaacaaaaacaggacacaacatcccactgatatgaatgccacatcttctcgttctcatgctgttttccaaatttacttgcgacaacaagacaaaacagcaagtatcaatcaaaatgtccgtattgccaagatgtcactcattgacctggcaggatctgagcgagcaagtacttccggtgctaaggggacccgatttgtagaaggcacaaatattaatagatcacttttagctcttgggaatgtcatcaatgccttagcagattcaaagagaaagaatcagcatatcccttacagaaatagtaagcttactcgcttgttaaaggattctcttggaggaaactgtcaaactataatgatagctgctgttagtccttcctctgtattctacgatgacacatataacactcttaagtatgctaaccgggcaaaggacattaaatcttctttgaagagcaatgttcttaatgtcaataatcatataactcaatatgtaaagatctgtaatgagcagaaggcagagattttattgttaaaagaaaaactaaaagcctatgaagaacagaaagccttcactaatgaaaatgaccaagcaaagttaatgatttcaaaccctcaggaaaaagaaatcgaaaggtttcaagaaatcctgaactgcttgttccagaatcgagaagaaattagacaagaatatctgaagttggaaatgttacttaaagaaaatgaacttaaatcattctaccaacaacagtgccataaacaaatagaaatgatgtgttctgaagacaaagtagaaaaggccactggaaaacgagatcatagacttgcaatgttgaaaactcgtcgctcctacctggagaaaaggagggaggaggaattgaagcaatttgatgagaatactaattggctccatcgtgtcgaaaaagaaatgggactcttaagtcaaaacggtcatattccaaaggaactcaagaaagatcttcattgtcaccatttgcacctccagaacaaagatttgaaagcacaaattagacatatgatggatctagcttgtcttcaggaacagcaacacaggcagactgaagcagtattgaatgctttacttccaaccctaagaaaacaatattgcacattaaaagaagccggcctgtcaaatgctgcttttgaatctgacttcaaagagatcgaacatttggtagagaggaaaaaagtggtagtttgggctgaccaaactgccgaacaaccaaagcaaaacgatctaccagggatttctgttcttatgacctttccacaacttggaccagttcagcctattccttgttgctcatcttcaggtggaactaatctggttaagattcctacagaaaaaagaactcggagaaaactaatgccatctcccttgaaaggacagcatactctaaagtctccaccatctcaaagtgtgcagctcaatgattctcttagcaaagaacttcagcctattgtatatacaccagaagactgtagaaaagcttttcaaaatccgtctacagtaaccttaatgaaaccatcatcatttactacaagttttcaggctatcagctcaaacataaacagtgataattgtctgaaaatgttgtgtgaagtagctatccctcataatagaagaaaagaatgtggacaggaggacttggactctacatttactatatgtgaagacatcaagagctcgaagtgtaaattacccgaacaagaatcactaccaaatgataacaaagacattttacaacggcttgatccttcttcattctcaactaagcattctatgcctgtaccaagcatggtgccatcctacatggcaatgactactgctgccaaaaggaaacggaaattaacaagttctacatcaaacagttcgttaactgcagacgtaaattctggatttgccaaacgtgttcgacaagataattcaagtgagaagcacttacaagaaaacaaaccaacaatggaacataaaagaaacatctgtaaaataaatccaagcatggttagaaaatttggaagaaatatttcaaaaggaaatctaagataaatcacttcaaaaccaagcaaaatgaagttgatcaaatctgcttttcaaagtttatcaataccctttcaaaaatatatttaaaatctttgaaagaagacccatcttaaagctaagtttacccaagtactttcagcaagcagaaaaatgaaactctttgttttcttcttttgtgttctaaaaaaataaaatttcaaaagaaaaggttgtcttttaagttttttaaatatttgttgccttttaaaatccctgagtgtaagttaccatggtggcagcttagttttactatgccacaacaagttgactaggacattttagtaaatggtagtgagttaaattatctttattattttttaaaaataagaatttagaagtggtaaaattatggcccaagatgtatttggttctctattatgttttgatacattattttaatcatatatatgactttccttttcaaaaatactttaatgtacaagtgtaaatatatgtgcccataaaatcattgtaaatattatttagtcatcacaaataaaatattgtcccttgctacttgatatattaaagatgtagattttaaagt

SEQ ID NO: 106531 - DNA, 3281 bp, Homo sapiens
agcggggcttgggtttgaatattgtggttgagtctgaagcgctgggaggcggacattaaagtgaagtggttgcggtaacctggcctgggcctgaagtgagtgagaggcacatgaagagaagtattcaagtatttatacagataggaatcaagataatcaacaatgtctgtcactgaggaagacctgtgccaccatatgaaagtagtagttcgtgtacgtccggaaaacactaaagaaaaagcagctggatttcataaagtggttcatgttgtggataaacatatcctagtttttgatcccaaacaagaagaagtcagttttttccatggaaagaaaactacaaatcaaaatgttataaagaaacaaaataaggatcttaaatttgtatttgatgctgtttttgatgaaacgtcaactcagtcagaagtttttgaacacactactaagccaattcttcgtagttttttgaatggatataattgcacaggtatataatgaacagattcgtgatctcttagtaaattcagggccacttgctgtccgggaagatacccaaaaaggggtggtcgttcatggacttactttacaccagcccaaatcctcagaagaaattttacatttattggataatggaaacaaaaacaggacacaacatcccactgatatgaatgccacatcttctcgttctcatgctgttttccaaatttacttgcgacaacaagacaaaacagcaagtatcaatcaaaatgtccgtattgccaagatgtcactcattgacctggcaggatctgagcgagcaagtacttccggtgctaaggggacccgatttgtagaaggcacaaatattaatagatcacttttagctcttgggaatgtcatcaatgccttagcagattcaaagagaaagaatcagcatatcccttacagaaatagtaagcttactcgcttgttaaaggattctcttggaggaaactgtcaaactataatgatagctgctgttagtccttcctctgtattctacgatgacacatataacactcttaagtatgctaaccgggcaaaggacattaaatcttctttgaagagcaatgttcttaatgtcaataatcatataactcaatatgtaaagatctgtaatgagcagaaggcagagattttattgttaaaagaaaaactaaaagcctatgaagaacagaaagccttcactaatgaaaatgaccaagcaaagttaatgatttcaaaccctcaggaaaaagaaatcgaaaggtttcaagaaatcctgaactgcttgttccagaatcgagaagaaattagacaagaatatctgaagttggaaatgttacttaaagaaaatgaacttaaatcattctaccaacaacagtgccataaacaaatagaaatgatgtgttctgaagacaaagtagaaaaggccactggaaaacgagatcatagacttgcaatgttgaaaactcgtcgctcctacctggagaaaaggagggaggaggaattgaagcaatttgatgagaatactaattggctccatcgtgtcgaaaaagaaatgggactcttaagtcaaaacggtcatattccaaaggaactcaagaaagatcttcattgtcaccatttgcacctccagaacaaagatttgaaagcacaaattagacatatgatggatctagcttgtcttcaggaacagcaacacaggcagactgaagcagtattgaatgctttacttccaaccctaagaaaacaatattgcacattaaaagaagccggcctgtcaaatgctgcttttgaatctgacttcaaagagatcgaacatttggtagagaggaaaaaagtggtagtttgggctgaccaaactgccgaacaaccaaagcaaaacgatctaccagggatttctgttcttatgacctttccacaacttggaccagttcagcctattccttgttgctcatcttcaggtggaactaatctggttaagattcctacagaaaaaagaactcggagaaaactaatgccatctcccttgaaaggacagcatactctaaagtctccaccatctcaaagtgtgcagctcaatgattctcttagcaaagaacttcagcctattgtatatacaccagaagactgtagaaaagcttttcaaaatccgtctacagtaaccttaatgaaaccatcatcatttactacaagttttcaggctatcagctcaaacataaacagtgataattgtctgaaaatgttgtgtgaagtagctatccctcataatagaagaaaagaatgtggacaggaggacttggactctacatttactatatgtgaagacatcaagagctcgaagtgtaaattacccgaacaagaatcactaccaaatgataacaaagacattttacaacggcttgatccttcttcattctcaactaagcattctatgcctgtaccaagcatggtgccatcctacatggcaatgactactgctgccaaaaggaaacggaaattaacaagttctacatcaaacagttcgttaactgcagacgtaaattctggatttgccaaacgtgttcgacaagataattcaagtgagaagcacttacaagaaaacaaaccaacaatggaacataaaagaaacatctgtaaaataaatccaagcatggttagaaaatttggaagaaatatttcaaaaggaaatctaagataaatcacttcaaaaccaagcaaaatgaagttgatcaaatctgcttttcaaagtttatcaataccctttcaaaaatatatttaaaatctttgaaagaagacccatcttaaagctaagtttacccaagtactttcagcaagcagaaaaatgaaactctttgttttcttcttttgtgttctaaaaaaataaaatttcaaaagaaaaggttgtcttttaagttttttaaatatttgttgccttttaaaatccctgagtgtaagttaccatggtggcagcttagttttactatgccacaacaagttgactaggacattttagtaaatggtagtgagttaaattatctttattattttttaaaaataagaatttagaagtggtaaaattatggcccaagatgtatttggttctctattatgttttgatacattattttaatcatatatatgactttccttttcaaaaatactttaatgtacaagtgtaaatatatgtgcccataaaatcattgtaaatattatttagtcatcacaaataaaatattgtcccttgctacttgatatattaaagatgtagattttaaagt

SEQ ID NO: 106532 - DNA, 3188 bp, Homo sapiens
agcggggcttgggtttgaatattgtggttgagtctgaagcgctgggaggcggacattaaagtgaagtggttgcggtaacctggcctgggcctgaagtgagtgagaggcacatgaagagaagtattcaagtatttatacagataggaatcaagataatcaacaatgtctgtcactgaggaagacctgtgccaccatatgaaagtagtagttcgtgtacgtccggaaaacactaaagaaaaagcagctggatttcataaagtggttcatgttgtggataaacatatcctagtttttgatcccaaacaagaagaagtcagttttttccatggaaagaaaactacaaatcaaaatgttataaagaaacaaaataaggatcttaaatttgtatttgatgctgtttttgatgaaacgtcaactcagtcagaagtttttgaacacactactaagccaattcttcgtagttttttgaatggatataattgcacagtacttgcctatggtgccactggtgctgggaagacccacactatgctaggatcagctgatgaacctggagtgatgtatctaacaatgttacacctttacaaatgcatggatgagattaaagaagagaaaatatgtagtactgcagtttcatatctggaggtatataatgaacagattcgtgatctcttagtaaattcagggccacttgctgtccgggaagatacccaaaaaggggtggtcgttcatggacttactttacaccagcccaaatcctcagaagaaattttacatttattggataatggaaacaaaaacaggacacaacatcccactgatatgaatgccacatcttctcgttctcatgctgttttccaaatttacttgcgacaacaagacaaaacagcaagtatcaatcaaaatgtccgtattgccaagatgtcactcattgacctggcaggatctgagcgagcaagtacttccggtgctaaggggacccgatttgtagaaggcacaaatattaatagatcacttttagctcttgggaatgtcatcaatgccttagcagattcaaagagaaagaatcagcatatcccttacagaaatagtaagcttactcgcttgttaaaggattctcttggaggaaactgtcaaactataatgatagctgctgttagtccttcctctgtattctacgatgacacatataacactcttaagtatgctaaccgggcaaaggacattaaatcttctttgaagagcaatgttcttaatgtcaataatcatataactcaatatgtaaagatctgtaatgagcagaaggcagagattttattgttaaaagaaaaactaaaagcctatgaagaacagaaagccttcactaatgaaaatgaccaagcaaagttaatgatttcaaaccctcaggaaaaagaaatcgaaaggtttcaagaaatcctgaactgcttgttccagaatcgagaagaaattagacaagaatatctgaagttggaaatgttacttaaagaaaatgaacttaaatcattctaccaacaacagtgccataaacaaatagaaatgatgtgttctgaagacaaagtagaaaaggccactggaaaacgagatcatagacttgcaatgttgaaaactcgtcgctcctacctggagaaaaggagggaggaggaattgaagcaatttgatgagaatactaattggctccatcgtgtcgaaaaagaaatgggactcttaagtcaaaacggtcatattccaaaggaactcaagaaagatcttcattgtcaccatttgcacctccagaacaaagatttgaaagcacaaattagacatatgatggatctagcttgtcttcaggaacagcaacacaggcagactgaagcagtattgaatgctttacttccaaccctaagaaaacaatattgcacattaaaagaagccggcctgtcaaatgctgcttttgaatctgacttcaaagagatcgaacatttggtagagaggaaaaaagtggtagtttgggctgaccaaactgccgaacaaccaaagcaaaacgatctaccagggatttctgttcttatgacctttccacaacttggaccagttcagcctattccttgttgctcatcttcaggtggaactaatctggttaagattcctacagaaaaaagaactcggagaaaactaatgccatctcccttgaaaggacagcatactctaaagtctccaccatctcaaagtgtgcagctcaatgattctcttagcaaagaacttcagcctattgtatatacaccagaagactgtagaaaagcttttcaaaatccgtctacagtaaccttaatgaaaccatcatcatttactacaagttttcaggctatcagctcaaacataaacagtgataattgtctgaaaatgttgtgtgaagtagctatccctcataatagaagaaaagaatgtggacaggaggacttggactctacatttactatatgtgaagacatcaagagctcgaagtgtaaattacccgaacaagaatcactaccaaatgataacaaagacattttacaacggcttgatccttcttcattctcaactaagcattctatgcctgtaccaagcatggtgccatcctacatggcaatgactactgctgccaaaaggaaacggaaattaacaagttctacatcaaacagttcgttaactgcagacgtaaattctggatttgccaaacgtgttcgacaagataattcaagtgagaagcacttacaagaaaacaaaccaacaatggaacataaaagaaacatctgtaaaataaatccaagcatggttagaaaatttggaagaaatatttcaaaaggaaatctaagataaatcacttcaaaaccaagcaaaatgaagttgatcaaatctgcttttcaaagtttatcaataccctttcaaaaatatatttaaaatctttgaaagaagacccatcttaaagctaagtttacccaagtactttcagcaagcagaaaaatgaaactctttgttttcttcttttgtgttctaaaaataaatccaaaaaaagaaaaaaaaatttgggccgtcgcgcccgcaaaatttaacttcttgggccgccaagaaggacgggcggccggacagtgttaatgggtggtcacaaaaaccggccggtaaacaaggtggtgattaaggcgtaaccg

SEQ ID NO: 106533 - DNA, 823 bp, Homo sapiens
aatatcataaccccccgaccccacgtcactttgccggggaggaagggtcattctacatcaaacagttcgttaactgcagacgtaaattctggatttgccaaacgtgttcgacaagataattcaagtgagaagcacttacaagaaaacaaaccaacaatggaacataaaagaaacatctgtaaaataaatccaagcatggttagaaaatttggaagaaatatttcaaaaggaaatctaagataaatcacttcaaaaccaagcaaaatgaagttgatcaaatctgcttttcaaagtttatcaataccctttcaaaaatatatttaaaatctttgaaagaagacccatcttaaagctaagtttacccaagtactttcagcaagcagaaaaatgaaactctttgttttcttcttttgtgttctaaaaaaataaaatttcaaaagaaaaggttgtcttttaagttttttaaatatttgttgccttttaaaatccctgagtgtaagttaccatggtggcagcttagttttactatgccacaacaagttgactaggacattttagtaaatggtagtgagttaaattatctttattattttttaaaaataagaatttagaagtggtaaaattatggcccaagatgtatttggttctctattatgttttgatacattattttaatcatatatatgactttccttttcaaaaatactttaatgtacaagtgtaaatatatgtgcccataaaatcattgtaaatattatttagtcatcacaaataaaatattgtcccttgctacttgatatattaaagatgtagattttaaagt

SEQ ID NO: 106534 - DNA, 2040 bp, Homo sapiens
agcggggcttgggtttgaatattgtggttgagtctgaagcgctgggaggcggacattaaagtgaagtggttgcggtaacctggcctgggcctgaagtgagtgagaggcacatgaagagaagtattcaagtatttatacagataggaatcaagataatcaacaatgtctgtcactgaggaagacctgtgccaccatatgaaagtagtagttcgtgtacgtccggaaaacactaaagaaaaagcagctggatttcataaagtggttcatgttgtggataaacatatcctagtttttgatcccaaacaagaagaagtcagttttttccatggaaagaaaactacaaatcaaaatgttataaagaaacaaaataaggatcttaaatttgtatttgatgctgtttttgatgaaacgtcaactcagtcagaagtttttgaacacactactaagccaattcttcgtagttttttgaatggatataattgcacagtacttgcctatggtgccactggtgctgggaagacccacactatgctaggatcagctgatgaacctggagtgatgtatctaacaatgttacacctttacaaatgcatggatgagattaaagaagagaaaatatgtagtactgcagtttcatatctggaggtatataatgaacagattcgtgatctcttagtaaattcagggccacttgctgtccgggaagatacccaaaaaggggtggtcgttcatggacttactttacaccagcccaaatcctcagaagaaattttacatttattggataatggaaacaaaaacaggacacaacatcccactgatatgaatgccacatcttctcgttctcatgctgttttccaaatttacttgcgacaacaagacaaaacagcaagtatcaatcaaaatgtccgtattgccaagatgtcactcattgacctggcaggatctgagcgagcaagtacttccggtgctaaggggacccgatttgtagaaggcacaaatattaatagatcacttttagctcttgggaatgtcatcaatgccttagcagattcaaagagaaagaatcagcatatcccttacagaaatagtaagcttactcgcttgttaaaggattctcttggaggaaactgtcaaactataatgatagctgctgttagtccttcctctgtattctacgatgacacatataacactcttaagtatgctaaccgggcaaaggacattaaatcttctttgaagagcaatgttcttaatgtcaataatcatataactcaatatgtaaagatctgtaatgagcagaaggcagagattttattgttaaaagaaaaactaaaagcctatgaagaacagaaagccttcactaatgaaaatgaccaagcaaagttaatgatttcaaaccctcaggaaaaagaaatcgaaaggtttcaagaaatcctgaactgcttgttccagaatcgagaagaaattagacaagaatatctgaagttggaaatgttacttaaagaaaatgaacttaaatcattctaccaacaacagtgccataaacaaatagaaatgatgtgttctgaagacaaagtagaaaagaaggagtctcttcttctgttgcccaagctggagtgcagtggcacaacctcagctcactgcaacctctgccttccggattcaagcaattctcctgcctcagcctcccagctagctggtattacaagcgtgcaccactacgcccagctaatttttgtatttttagtagagatgatgtttcacaatgttggccatgctagtcttgaactcctgacttcaggtgatccatccgcctcagcctcccaaagtgctgggattacaggctgagccactgtgcccggcctggtggcggtggttctaactctggaaattttatagtcaaggctacttactcacccattctttacagacatctggaaatgttggagaaaatgtagcaaacattttttaaaatacatagttaagtgcacaagaaagaaattttaattcctggatgtcagtaacaaaaaggaaata

SEQ ID NO: 106535 - DNA, 677 bp, Homo sapiens
tacctaaatggctgtgatcctgtcttcagttagggctgcactttccaaacccacccagcatctaaacacctgaagggtatcacagtgcttatcactagaggcctttcccttccactcagcctcctccactatcactgtcaccactcctggcctcctttgggaattaacaggaaagaagcagaggatcacactattttctttctctgcgatcctgaacaagtcagctgtctctcagcctcatttatcattaattataaaatgagaatgatggggtaacagtacagccattaggtagaggatcctgctgagagttaaatgagataatatccagagtgcttagtaaactgtagagtcttatacagatgtttgctggtgaaattcatgttgttctggacacacattaactatcttggactgattctttaaggtcttctgaacaagattccagggtaacctcattttattctttcttggttattattaggggtgaacgggtgggtaggtggtgttttaggctttttttttttttttttaattcttacctatgaaaaaaatattttcttatattttagatttaaatgactaccaagaagtttgctgattgctttcattttggtagtagagtacaagatagttaattattatttctctctagtagagattttttaagaatctgt

SEQ ID NO: 106536 - DNA, 337 bp, Homo sapiens
gcaaggtctttatgacctgtatcttgtgccagcctcctatctcattcagtgacttaaaacgccttaaccgtctgggaatgcagcccagtaggtctcagcctcattttacccagcccctattcaagatggagttgctgtggttcaaatgtctctgacaataccataaagataaaaatcatcaaatttaattatataaaatttaaaatctctaagtaagacactataaacagagacagaaagtgaagtgggaaaaaatatttgctgcctatattagttttaaaagcccgatgacgagttagtgggtgcagtgcaccagcatgtcacatgtatacatatg

SEQ ID NO: 106537 - DNA, 252 bp, Homo sapiens
ttatgtgaagacttaccaagctgaaacatttggacttggaagatttaatacgcaatcactgttctcagagatctttcagtctagctagaaaggcaaacaacttcattgctactgtcatcactttgcaaacatttctataacgctataatttacaaagggtgctctcattcttttggtatttcaggaagtattgtagagctggacttaactgacagaaattgaagtacatgcacctggataatggagatactt

SEQ ID NO: 106538 - DNA, 460 bp, Homo sapiens
aatttatccaaggtcggtcagctgataactgatagagatgagcttcatactcaggcttagctgtgggggtgatagttaatattagaaaccaatccgtgttagtgcttcccttggctggttagaatcctggtgcctctggaatcactacaaccccaggcagctggtaggtctcatcctgatagctctcattctagagcagctgggctctctgacaaaggcctctggaaattcagccccagaagttaactgtgagtcccattttcctaaattcaaagaaaagctgacttgcctttccactatatatctaatagaaaaggcctcccagcagggactgtgggtaaatggaagtaaaaggatagcagaaaggaaaggtggagggggtggaataagatgtaacaaaggagtgagaaataaaactacggtagaggccaggcacggtggttcacacctgtaatctcag

SEQ ID NO: 106539 - DNA, 328 bp, Homo sapiens
ccattttctcccagcccctgaactccattcggagttgcctggaaagcatttggtgtgaaggagctggccacgtctacactaatcagctgttaaccctcagaactaccagccgagagaaatcctggtcggccagagcctcagtccctgaacagtccccctgacattgcatggaaattcctaaaaccaacgtcatcattcttgaaacctccctctacaacaccataaatgcccttttctcctgggctgaatgaatggagaccgtttctcccaatttatggggtgatgccagtttggctgggtagttctcataggccctgaccctggcaac

SEQ ID NO: 106540 - DNA, 215 bp, Homo sapiens
gaacctaaactcagatcccctgtcgccctctctcagagcacctgttcctttccttgctggctctccccacactgcttaacatctcttctagaccacaagctctgcagggaaaaacaatgtctgttttattccccgctgtatgtctaggacctacagagtaaaaggtgctcattaaatgttgtagattgagtgaatggtctccattctttaaagtt

SEQ ID NO: 106541 - DNA, 674 bp, Homo sapiens
ctcctccccctcccctccagcctctccaccagcccctccagtcaaccctcatcgccgtgcccccccagagctagagagatggggcccctgcgtggcccgaggggcagagctgggcgtcacttcgcaagcgtcctgccctgccggggcgcgggggtgggctctggggaagccggtgcgccccccacgcctccgctgccagtgccttacattctggagcgacccccctccctggtgcctcccagcgaagggggaccgccgtttgcactttcatcgcctaccccgacgcggggcccagctgcgggacgtgcatcacggctgggcccccagaggagagaggaggccgacgccagcggtccccgctcggaacggggagggttttcggggggttcggcgtcgcaccttggggccccccgcagccgtgtaccgggcctcccatctgctaagcgtttttccgttgagccgctccaaaaacactaagctggggacgccagggtgcccccccaccccggctccctggccctatccacacctccacccccaccccaggatcgccatctttaggggaggcctgggacgggggtgttaggtgttttagggccaccgagctcaaacacaaggacccctccccggcccacccagcccagccccaactgacctccatgcctagggaaaaa

SEQ ID NO: 106542 - DNA, 278 bp, Homo sapiens
ccagggagaggtgctggtgtccgtgtaccgggcctcccatctgctaagcgtttttccgttgagccgctccaaaaacactaagctggggacgccagggtgcccccccaccccggctccctggccctatccacacctccacccccaccccaggatcgccatctttaggggaggcctgggacgggggtgttaggtgttttagggccaccgagctcaaacacaaggacccctccccggcccacccagcccagccccaactgacctccatgcctagggaaaaa

SEQ ID NO: 106543 - DNA, 1764 bp, Homo sapiens
gtagaagtacagaagctaggtagtttggtgaggtaaaggccaagagcagcttgtggatctatccttgtacctccttgctgatggtctagcttgtggtttaataccatctacatttcactaaagccaggtcagcagcattgttcctttgtttcttattaggcaatcaccaatatatattggatgcctattttattcacgaagtgttttaccacactggttttgctggtgtttcctacctcctcacacattgtctatatgatttgctcagtaatgtagggataatgttttcagagtccatagtatatataactcctgatcaggtgactagatggtgtgacttaaggaaagaacacgttgccagtaattcagatgtgccattgacacaggaggacccatgcctgagaaagacttttatctgagttactgagattaagatgttttgaagctcccaagcagagggatgctggatctgctgtggaaatctggctgagcagctgcagggacagctgggggtaaagcatccaccctcccccagtttggcgaggatgcactcctcagctgttctggaaggccagacttcttatctgctgtcattgaagcaagaattgagatgtccaaagagaacagaaatgggacaatttaatactagaaaggaataaaagggttaaagtcttgaatgctaaaacttctgaaataattaatttatcctgaaagattagaaaatataagttgaaactttaaatgaaaaagagattcaatttaaaaaagaactttggcaagattgatatctaaaagggtaaaaataataatactgtatcttacaacatggttatcactgttctgagcatttaatgtgtattaactcgtaaaaccatcacaactacgtgaggtaggtgctactgcctttttacagatgatgaaacaggtatagggaggccaagcaaagtgtctgaggacactaggtggatgtgatggagccagaatttgaacccaggcagcctggatgtagagtctctactattaatcactatgggaaggtggtgatagaataaaagggaatgtgaaagtcgaaaaaattaaaaaataaatggtctaaatagtcaataaacgtttatgaggaaatgattatccttccaggacatgtagattaaaaactacgagtttctcatttatacccatcagatggacaaaagcttaaaaatctcataataccaagtgttttagaggatgtggaacaaaggagactctcatattcagctggagaaagtgtaaattggtacaatcactttggagagcaatttgacaaggtgaagatgtgcatactctgcaacccacttctaggctcatatcctctgaactctcaaatgtgtacccaagaagatatgtacatgccttcatgatagcattgtttgtaagagtaaagaaatgaaaacgacctaaatggccatcaataggggaatggataaatatggtatattcatacaatggaattctatatggcagttaaaatgaacgcaatgttgagtgaaaaagcaagtcacagaatgatttgtacactgtgatgccatttattaatgtttaaaaacatgcaaaacaatatgcatatatacagactgtgtattaacaatgtttaaaaatgcatgggcatgttaaacacccggggagtggctggggagagaaggagggaaaagggattggagttgggaggggtggtacacggtgggtgtcaactgtaacaaactactacaaaaagagctgaagtat

SEQ ID NO: 106544 - DNA, 406 bp, Homo sapiens
ggggagtttcaccattggctgtgtcagccaatggcaaggtgtgtgaacagggaactcctgtgttgagcagagagaggaagaagatgcgtccgagatggagttggggaaggcagcacttgcgtgtttgtgtgtccagagaccgggctggtgatgatgagcaggagggagcgtatgaagatatcagatgtgcaaaggacaaaacccccacccaattacaggaccactgagcctcgagctagggaagtcttaaaacagattgcctgggccgggtggattttccctgagcaggtgtacacctgaaaggaaagcaagtgtgagcatgccacagagtcaacatacatcttgtactggcattcttaagatcagcctctacggtgcagcattttcttgcatatgagtttccttt

SEQ ID NO: 106545 - DNA, 780 bp, Homo sapiens
tttggatatctttcatgaagtgtttgttcacatcttttgaactttttgtgatagtggcacaatcacgacccattgcaacctcaaactcatgggctcaagcgatcttcccaccttggcctcccaagtatctggcactacaggcatgtaccaccacgcttggctaattttttaaatctttcttttagacagggcctcgctatgttacccaggcccagtgtctgccacttgcttgttttcttgtctgaaactcttggcttcaagtgattgatcctcccacctcagcctcccaaaatgctggaattacagacgtgagccactgtgcccagccagctcatcttcgaataataacagttttacttcttccttcttaatttttatactttttcccccctttttcttgcttcattgtattgactaggatttctgatacattgttgattagaggtggtgatggaggacatccttgtctttttcccaaactcagggcaaaaaaggattcatagttgtgccattaagtaatttgctagggtttgttttggggtttttttggggggatgggggataccttttatcagactaaggatattcttttattctaatttgttgggaggtttctatttttgttttttgaattcatgaataggtgttgagtgttgtcaactgcttttcttgcagacttgttttctattttaagaatacaagaagcaaaccatgcagccagtgtctgccacttgcatgttttctgtaatgtggtaacttaatattaaagtaaaatagaga

SEQ ID NO: 106546 - DNA, 535 bp, Homo sapiens
tgagatggagtttcgctcttgtcgcccaggctacagtgcaatggcgtggtctcggctcaatgcaacctctgcctcccgggttcaagcgattctcctgcctcaacctcccgagtagctgggattacaggcatttgccaccatgcctggctaatttttgtatttttagtagagacggggtttcaccatgttggccaggctggtcttgaacttctgacctcaggtgatctgtccaactcagcctctcaaagtgcagggattacaggcatgagccaccgggccggtctcgtaaactaggtattatgagattcaattagccatagatttggacatgcccagcagaatcccattatcagctggaagtgatctctataaaatgcctaccacacaacccactgccgcaatagatacttctgacttcctattgacatcaacagttaactgaagaagaaaaagtccggcctggtatataaactgcttggtgaaacatgctggcccatgctgggctggaagtagactgctatggggtatactactt

SEQ ID NO: 106547 - DNA, 361 bp, Homo sapiens
attgtaaaatgacttgctttcagattcttttatgttttatttttaaaattattttcagccagctctcgtggaacagattcttttaaacagtagtttcctaagtgtattttaagtatttaattttgcagttagctttttctcagtggtatctacagaagattcatcataggatgagcttacatatttctgccattggtgtactttatgttcattggcctcatccattcagttcgttggaagagtgtttatctggcgccaacccacagctattcaaattcctttgcagtgctccatcgcttgattcagcagattcttacacagcgtctgctgtgagcatgatactgccctgggtactagagat

SEQ ID NO: 106548 - DNA, 272 bp, Homo sapiens
accagaggtaatgttcatccaaataatccaacacacatgacattaaaacatcaatatcaggtcggacgtggtggctcatgcctgtaatcccagcactttgggaggccaaggtgggcagatcacttgaggtcaggagttcgagaccagccaggccaacatgatgaaaccccatcttgactaaaaatacaaaaattagccgggaatggtggtgtgcacctgtagtcccagctacttgggaggctgagtcaagagaactgcttgaacccgagggg

SEQ ID NO: 106549 - DNA, 287 bp, Homo sapiens
tgcctttatatgctttattttggattttcatttgccttttttttaatattgtcacttagctatgtgtaatccattattaaatttatattggttttgtattgtcacttagctgtgtgtaatccattattaagcccatcgtagtgagttgaataatgtcaccccaaaattcatgtatactaagacctcagaatgtgacctcatttggaagcagcatctttgcagatgtaattaaagatcttaagatgaaagcatcctggttttaggatgggctctaaattcaatgattg

SEQ ID NO: 106550 - DNA, 237 bp, Homo sapiens
tgcactccagcctgggcgacaagagtgagactctgtctcaaaaaaaaaaaaaaaaagaaaaacgaaaaaaaagaagaagcattggtttctgcccattaatcgtcatttatctaagactaaagagtataattatgtctagatcaatctcttctttgagtttgccaacaaactgagagtcgtttgaagtagctataagggattttaaactgattattttaaatcaaaatttaacagggg

SEQ ID NO: 106551 - DNA, 346 bp, Homo sapiens
aacaaagaacagaaatagatccacaagaaatctaactattagaaatacaagaacagacttttaaaataattaagtatgttcaggaaaccaatgaccaataagtggaaataacaaaatcaaaaggaaatgcgaggactgaaaaataattgaaaggaagaactcaatagagagtttaacatcaacttaaacacagctaagagaggattcatgaactggaatgcaggtcaggagagactatctgagctgaagcaaaaaaataaaatgagaagaaaaatacagaaaaaggcatgagtctttagatgatgaaaaaattaatatacatgtaattcaagtcatagaaggagag

SEQ ID NO: 106552 - DNA, 345 bp, Homo sapiens
taatgttcctaaaaaatgaccattctgcattttccctccaatctccactgcctctatttttggaaaaaaatttcatctttgaaaaagcatttaagaccaactttttttcccactctggtgggaaaagaaatattgctgaatgcagaggacaactacatgaattcatactacttgctctggcaatattcccagatccttatcctggagcatttgtggtagttgggaggatggattttctagcagtatatagactgaatgtgtatgtcccccaaaaattcatatgttgaaacctagtcctcaactgtgtaggtatttggaagtggggctttgggaggtaataaggcc

SEQ ID NO: 106553 - DNA, 650 bp, Homo sapiens
gctgtcattctggaaaacattttgaaacaccccttcctttttaaattgctttcagagtctcacagtgtatccttttatccccagcggtggaaaatctttacccttcaaggtagattaggtttttggaaatagccagaagccattcaaagcaacatctgatgaaccacgcatgtcagatgaatcatatttacttttggagtataagagttctgtgactatgtggtattgacactcatttttatcctgtgtggcacctaaattaaatttaaagatagttctttcaggaagaaaggggagccctcatgtcatgttacacagtggtgtatcagtggaattaatttattgtagccttcagaggtgattgatttaaaagacaatattcatactagagtgtagatgtgactaaacagttttacaccaaaacttggaagaagagaagacactggggacaaataggctgaagagtggggttcagttggatgagtcttaaggcatagggaaatggtttgggaagttaaaacatgcaaagagctgatgattgaagcatttagatttagaaagtcatttgttttcctttccagtgtccctcattattaaatagctccttgatggctagaatcctatcctaacagtcatctgctaagcactta

SEQ ID NO: 106554 - DNA, 432 bp, Homo sapiens
tacgcagcctgctgagggctgtgtctggcatctgcttctaagatggtaccttgttgctatatcctctgtaagggagaaatgctgtgtcctcccatgttggaagagacagaagggcaaaaatggcctgggatggcccccttcagcttttttataagacaatattcatactagagtgtagatgtgactaaacagttttacaccaaaacttggaagaagagaagacactggggacaaataggctgaagagtggggttcagttggatgagtcttaaggcatagggaaatggtttgggaagttaaaacatgcaaagagctgatgattgaagcatttagatttagaaagtcatttgttttcctttccagtgtccctcattattaaatagctccttgatggctagaatcctatcctaacagtcatctgctaagcactta

SEQ ID NO: 106555 - DNA, 745 bp, Homo sapiens
gaaacatctaacttacagggctctgcctttttcaattgtcagcttgtttaaacatgagctgtagaaaagacaaaaaactgtcttttttttccccctcaacttttaagttcaggggtacatgtgcaggatgtggagttttgttacgtaagtaaacgtgtgctatagtggcaaaaaaaacttagtcttaaagatgttactgctaactttcatcagattctattcatgccaagaatgaaaatgaatcccacattatgagtctggatagaaaccaaaatgaccacttattataatcgctgtatactcagtgtcatcaattacaaacagatatagacagatgtttttatcaccgatatctcggcatatttcacacagctattgtgaaaataaatttgataatgtatatccttaggtccacttgagggggaatatgtttacgtgtgttttacctattattttatcttttaggtatctgctaatcactttttcttctatttaaaaaagttaatttggctttaactcccttctctaccacctctttatccattttaatctgcctgttcctgtgatgaaatttttaaaaatcagccttaatatgtttcagaggaatgatgcttttgctttcatctagagagtggcagtatgtaatgagtagcatgcttttagaggtataggaaaggcttttgactctatggaggcttccctagtcagggaaggagctgctattcctatgcctggctgaacttcc

SEQ ID NO: 106556 - DNA, 186 bp, Homo sapiens
atctacccagccatcccaccctcatttcagtgtcctcctagaagtctgtatttcagtcaaaaggaaacactggatttcgacgtgcctcatgttcctcagcttgtaaacacagctgagaaaccaaatggttttttggcagctacgtttctgcccctctcttagcacacaagaaaacgtgtctgtgaa

SEQ ID NO: 106557 - DNA, 450 bp, Homo sapiens
cagcaactttccacagcagttcagagcttgggtccttccattaattgcatgcatcagtagtagcatgtggcattttacttttagctgcatgtggctaagcatccgatcgcctctggctttttccacctcctccttcctgtacctagtgtggaggaggagaacttggcactgagctgagctggtgggcgcctggtattcttcctctccatttttggaacagaagggggatttgtccctcctgcttttccagctgtgaagttcatttggcttgcagccttggcagcattaagggaggaggaacgtgtggatttccacaggaaggtggagacaaagtgggagtggggatgagggcatgatatttgttttccaggatctaattctgccctgggtgggtttttgagtctggtattttgcacaatgggatgtagctcctaaagccagaatgtcatc

SEQ ID NO: 106558 - DNA, 335 bp, Homo sapiens
tgcaggtgttcttcagctttcgtaagcccatacagtgtttccaaacatttttgtgttatatataagttgatacatgacacgtgacacgttgaagcagagagaaatttattttgagcattaggaaggacaggaagaagccaaaacccagaatctaaactctgtgcttgcttgcttatttatttatttatttatttacttacttactgagatgaagtttcactctgtcggtcatgctagagtgcagtggcacgatctcaggtcactgcaacctccacctcccagattcaagcaattctcttgcctcacccttccaggtagctgagactataggtgcc

SEQ ID NO: 106559 - DNA, 242 bp, Homo sapiens
cttaaagcccctgtaaactctgaccacactgagcatgtgtctgctgctccctagtctgggccatgagtgagggtggaggccaagtctcatgcatttttgcagcccccacaagactgtgcaggtggccggccctcattgaatgcggggttaatttaactcagcctctgtgtgagtggatgattcaggttgccagagacagaaccctcagcttagcatgggaagtagcttccctgttgaccctg

SEQ ID NO: 106560 - DNA, 273 bp, Homo sapiens
gagagaggaatttagttccttggtgggttaggaagtggtcagtgctacagaaaaaagttgagttgggttagggacaggggtaccaatgggagggtcttgaggcaggctgcagtgctggtcagggcaggccacaggtcaaaggtgaaatttgagcaaagagttgaaacaggaaaaagaattagccaaggctggtaggagggagagagtgatctgggagggacagtgtctagactaaaagtcctgaggtgggaatacgtttgttgcattcaagat

SEQ ID NO: 106561 - DNA, 164 bp, Homo sapiens
gttagcatagggctacattattagctattatatcagttatatattatggttagttggcaggacctcttaataaattgagtagagggtttcagggaaagagaatcaaggatgacttataccttgaataactgggaaatgaatggttctattcactgaaatggaga

SEQ ID NO: 106562 - DNA, 235 bp, Homo sapiens
tagagacggggtttcaccatgttggccagggtggtctcgaactcctgacctcaagtgatccacccgccttggcctcccaaagtgctgggattacaggtgtgagccaccgcacccagccctgccaggtacccaaatcttaccagtgcaaactacaccattctgttgtgttcccactgctggtttaggatttgacttccctgggtctgcccaatcaatagtactccttcatctgctt

SEQ ID NO: 106563 - DNA, 488 bp, Homo sapiens
agttcgcgacgttatccaggaaggataagtggtcacttcataccaatatactttcagaaaatgcatttaagtttattctaaaacacagaaatactccaagataaaacttcatttgttgacatcgcgttgtttgtaatttgatcaatacaaaatggaatttaaatattctaattggcactttagtttattataatcatggcttaaaaatcaaattttatatacatacatagatatatgaaaacaatattattttaaatcaaaccatgaacattaaatataagaaagttactcctggaatgagatgtgaaaggttgagggacagaacactagaaggtcacaaattatgaagaatggtaacattcttggattaggtgtaagttttgggggtatttattacactattaggaaacagcattgttattttactcaaattttagtattccagatgaattgaagaaaactgccaccacacctcccacctcccaata

SEQ ID NO: 106564 - DNA, 341 bp, Homo sapiens
gaatcactggggatgctactaagggtgcctctgggaaagacaaaaacactcatttgaagacctccagggaccccataacggcagaactcggcactgcacggtatctgccaaggttggagaccgcggcaggcgctgggactggcccattgccaggctcgacaggagggcggcggcagcatcctccagccccttgaggacctttccccggccagacttggcgtcagctcaagggtggggtggcaccccggccatctgtcacttaggggctggactcgacgatacctccagtgcgaggagggtccttgctgcgagattccagtcctcgcggcgagacgaggcga

SEQ ID NO: 106565 - DNA, 279 bp, Homo sapiens
tttttccattatttttttctctttgttttcagttatagaaagttctattctgatctcctcaacctcaaagattcttccttcaggtatgtctagattactgatgagccacacaaagggattcttcaattctgttacagtagttttgatctccaacactttttattttctcttagaattttcatctgtctgtttgaattacccatctgtttttttatgttctctacttttttaattagtgcatttagcatattagtcatagttcttttaaattcacagttt

SEQ ID NO: 106566 - DNA, 147 bp, Homo sapiens
atccgctgggagaagaaagaccccctccccattttctaggtatccatatccaacttgcaaggaaagaacagcataaagttaaatggttacatgattagcaggatggaagcttcagcctgaagaaatgagtctacataggccttaaag

SEQ ID NO: 106567 - DNA, 163 bp, Homo sapiens
ctatgctgggttctctcaggtgtgctgggtcctcctgggtgtgctgggtcctcctgggtgtgctgggtccttcctgagtgtgctaggtccttcccgagtgtgctgggttctctcaggtgtgctgggtcctcctgggtgtgctgggtcctcctgggtgtgctgg

SEQ ID NO: 106568 - DNA, 178 bp, Homo sapiens
ctcagttatcctcctacttcataccctccctttggaaacaaacaagaccccagcaatggctgagctagagaaccccagggagccaggataagtgactcagggctgggtctgcccagcagctgtgggctcacctgggggcaggtgcctcgggtctcacttgggggcaggtgccttggtg

SEQ ID NO: 106569 - DNA, 240 bp, Homo sapiens
tgctggggttacaggcataagccatggcactcagctagtttctaacaattttcttaggaaatattgtattgtggtcagagaagttcatctggatgatattaattatttggtctattaaaactattcccttattactggattgggattctatatatgaccaagagatcaagtctgttaatcaggctattcaaagcttctgtatttcttctcatttttatcagctatatcaataatttttga

SEQ ID NO: 106570 - DNA, 546 bp, Homo sapiens
tcaggtggtgcaggaaggcgcggcccagtcaatcacgttcatgccagaataactgattaaggtagcagcccttgaaacagccttgcctgtaggacgtgacctcccagaccctgtctggtgcccgccatactgatgcggggattactccaaggaagcggctccctctggcttccttattcctccctcctccttattcagcctctcaggttttccgcagtcagaacaaaatgcacagaagggattgttcactcatagtgaaaatttattcaggataggtcatttgttttagtgaaaatagaatgttcttgaaaatgttgccattactggaaattatattcctgttctgcaagataagaaacaaagctggcctccagctttctcataaatgaaaagtaaaaatcaaaacaaaacgaaacaaaaggcacagagaacaaccacaacagcgaaatgcttccagccctgcggaaggaggaaatattctgcatacaccattctccatctattcaatgtttctggatttctgtttttgtttagtagagtcagtgg

SEQ ID NO: 106571 - DNA, 354 bp, Homo sapiens
agatcgtaacattgcacttaagccaagatggcaccattacactccagcccgggcaacaagagggaaactccacctccaaaaaaaaatttttttaaaaataaaagtagagatattaactcgattacagaactccagattttaaaaattgctccaaaaattatgatctaagattctataacagccaaagaattacctactaagtgagacaaataaaaatagcatggtgtgtagaaagcagagactcggacaggagtcacctccttggattctaacctgggttgtgccaggtacaagccatgtgacccaaagtactccctagacttctggccttggttctttcctagttgactttca

SEQ ID NO: 106572 - DNA, 269 bp, Homo sapiens
caatcctcccatctcagcctcccaagtagctgggactacagatgtgcaccaccatgcctggctaattttcgtatttttttgttgacactggtgtccttctacattccaggctggccttgaactcctgcgttcaagcaaccctccagccttggccttccaaagtggtaggattataggcgtgagccacggtgcccaacctatgctaaacttttcacatcagatttatatgtgtcctgtcccgttttacttcaccatgattggactcagtg

SEQ ID NO: 106573 - DNA, 386 bp, Homo sapiens
taccatctaggatccccaataccttctctctattttctctaaaccaactgcggtcaagatttcacctccattattccaccaaaactattctcattaaattcacctttcattactaaatctgttggttaattcttatcctaaacattcttgatctatgtgtgcacaacagttgacaccattaatcactttctcttccttgacataggcttcgctaggcttctagcatacatattatgtttgttttcttcttacctccctggttgttcattctcagtcatctttactgggccttcatcttcctcctgacctcttaattttggcatacatcagggttcagctctttgttctcttctctacctgcgctcattcttggtgatctcatctag

SEQ ID NO: 106574 - DNA, 402 bp, Homo sapiens
tgctaatactgtatttttttattgtggggttttatttttagtattttgaacctgcagttggttgaatcagaggatacagaacccacaaataaaaggagccaactatacttaaattttccacattagaagctgggttccaataagaggaattctaaaaatagcaaacgtactctaaagcagttagttgaaggggcaggttgtgggtaaaaacctttttcagctagcatggcttgccattcaaggctattctgctctaagagacagtggagaaaaaaacagatggacaaatgatctgatcaagctgagttcagtgccattgtttgaccaccacgcctccttatgatagtaggcctctgcaatcacacttgtttatgcatctcaataattaattagtctgtgatt

SEQ ID NO: 106575 - DNA, 343 bp, Homo sapiens
ttcttaattccttataatatgagaaggatgtgttccagccgcactggagcgggaactaaatgcctgtttttccaccagcacgaacgccttcccagtgcatcattactcccctccccattactctcccatagcgtgcaatggagaagcaccatacacaccgccgtgggaggcgagattgtgggctttggagtaaacactcctgcggtccaatcccagctctgtggccctggctgggaaagccagtttacctctctgagcctcagttgccccatctgtagaatggggcccactgcagggaccgggatgacactgtccagctgcctgctgtaccctaagtgcccag

SEQ ID NO: 106576 - DNA, 112 bp, Homo sapiens
ctaaaggactgccgaggaccttagcccaaagctctctgcccactctctgggtctgagtgattgacgatgtcgggagtgtcactgctggaaggaattcaggatcagaaccact

SEQ ID NO: 106577 - DNA, 495 bp, Homo sapiens
gaataacaagtctttatttttttcatcccaacttctttcttgcacatttttcttctagctatatttaatatctgttctccccacacacttgctaatctacatttcacaatcttcttccacttcactttgtctgcaaagaaatctacctggacagaatagcatctctttttttccccctgacccttggcatttcctctccctccaacttctgcctgatcctaggatggactctctcatccctcattctctatcattagctctcaggctgcccttcctgcactttaccttcccccacaccttcttacaggaaagcagaatagaaaggcatcagtgagggatgaacaggagagtgccttgagagaagattcccaggaagacagggagagccagacagtggactggttgcaacccatgtagccgaatcatagtgctcattgctgtggaggctctggtctgtctagccacacagaccagtgaagtgagggtacataggtt

SEQ ID NO: 106578 - DNA, 330 bp, Homo sapiens
gtttgaggtgctcgttgggataagtaggttgaagtattctgtaagcagttaggcataagggtctgagcttctgaaacaaatttggacgttagttgaaagcatataaatgggtaagactcttcgggataagtgaagaattggagacagggaaacagtccagctggactcgcagatttagagatgggcagtggcatgggggagcaggataagaaaagtcggcgaggtaagaagaaaaacagggcgacattttgaaagccaagggagcaagtttgaaggccgcctcctggaggtcaagaggaggatgacaaatctattctagcctcggtcaaa

SEQ ID NO: 106579 - DNA, 441 bp, Homo sapiens
ctaaatcccatcctctcctagctatttaaggaccccactcctgcaatggtcccattttctgcattgccaaatatgctgtgatattcccaccttaaaatgcaaaacaaaaaagttccaccatcttcaatcctacattgaagctatgtatctcactttccctttagctacacctccaagaaagaactgtcctataatgtctccatttctggttcttcccattctctcttcaacctactccaattacactgttgttactgccccttcattgaaagctactcttatcatagtctctaaattcaatagtaaatactgaattatcatcttatcctatttaggatatgactatattgtttctcttactttgaaatattttttctaactttcaagattcaattttcctcactggttgctacttcttaatcttctgtgctacattctcct

SEQ ID NO: 106580 - DNA, 700 bp, Homo sapiens
agtggcatttactgcattcacaatgctgcacaaccacaaccataatttctaaataattctaagttttcatcaccccaaagggaaactccatacccatcaagcagtcatttgtcattctcccctccagctagccccgttcatccattaatcagctttctgtgtccgtgggtttacctattctggaggtttcatatacatgaaatcatcactatatgtgaccttttctgtctggtcttttacttagaataatgtcgtggaggtgcatcccattttgttgcatatattagcacttcatttttttgattgaataatgttccattgtatagctataccacatttgttattcattcatcaattgatggacattcgagttgtttctgccttttgaatgcctgattttgattcatttttgtagagtccttaggttttcctaagtataagatcatttcgtctgggaacaaggctaatttaatttcctctttttcaatttggatgccctttatttctttgtcttacctaaatgctttggctgattcattttgggcaaatacctgggaagagtgtttaattgctgggtcatatggtaattctatatttaactttttaaggaaatgccaaactgtctactacaacatctacaataagataaattttcaccagcaacttatgagggttccagtttgtgtacatcctcactaac

SEQ ID NO: 106581 - DNA, 234 bp, Homo sapiens
ttactgtattttacagaagggctaggctcattgtgattctatgtgtgaactccaagacagtcactgcccaggttcatgagactgcttctagactaaccctacagccccgtccaagtgggagcatggcaattcagaattctaagcggtttcttctatcttttcttactgttataaagggaagatagaaattttctttccaaactcttaagaatgctatggaagaggctcatagcc

SEQ ID NO: 106582 - DNA, 316 bp, Homo sapiens
aggacagtgaaactcctctgtatgatgctgtaattgtggatacatgccattacacatttgtccaaacccaagaatgtatgaccttaggagtgaaccataatgtaaactatggactttcatgattatgatatgacaaagtaagttcataaatttttataaatatactcctctgatgggggatattgatagtaaaagaggctctacatctctgtactttatgctctgtaagaaatctctgtacttgatgctcaattttgctttgaatctaaaactcttcaaaaatatgtctattaaaaataatcttcctctgagtttt

SEQ ID NO: 106583 - DNA, 583 bp, Homo sapiens
ttctaccttataaataataagcctttgcggtggagggagaaagattttctgagactgtgctggtgaatattcttagcagaaagcagagttaacaagtcagctattccttctgtgaggcttttctcttgaattttagtggcagtgctttttgacttgtcaaagcctggggagtaaaagtggaaggtggtggctgtattgggaaggggacagtctgggtgatgagccacccaggttccagctgtgtctctgtcacctattactcatgtgactttagataaactgcatttcatctttctgagtctcaaagctgagtcaccaatcactcatgtgactttagataaactgcacttaatttttctgagtctcagatccaccatttacatggaggccattgaaaagagtttgaaatgtcataggattcttcagcaaataaaagggaagtaagatgctactcttggaggaaactgggtgaagggctcctgagattgactctatcaactatttttgcatcttcttgtaagcctacattatttcaaaataaaaagttgaaaaaaagaaaatgaaatataaactttttcagata

SEQ ID NO: 106584 - DNA, 459 bp, Homo sapiens
aagaagactgtaattatatttcctagtctgaaataaggtttaatttttcagtttcaatttaggatttactagagacagttatatgtatctattctctagttttgaatttgtaatattttcattgtcttctattatacaatagttcgtctttgtaaatgttttttctcctgaccacaaaatggagtatggctgagcattaattcctgtaggtttttggagtcattatagctctcaagaaaataagcagttccattactaggattaatcttcagtatctgagacaatgaagccagtatttatcattttaaaatttatgtctgggttttcttcactatttgtgcttacatcacaaagccagtaccatttattaagtgccaagtgtagatgaggcaatgtaatcttaggtgctctaaaactctttgagctaggtggttgtgtcccttatgatgcatgtatgtg

SEQ ID NO: 106585 - DNA, 662 bp, Homo sapiens
gatacgatatacataaattcttcaatgtactcttgaatagagaaatactgctatagaaattaatagtttaattccttcattatataaatttggcttctgctcagagagcataattaggttgccgaaggtcataaaatggcagagcctggacattataagaacctaagtcacttaattcaacccacagcttttctggtttgatataaacagacatatatatgtatattatacatgcacaaatacgtatttatagaagcatatacttagtatcagatgtaataatcttttaagcaaaaagcctgaaagacaagctacctttgagtaactgaccactgatttcccaacagattgtctctttgaggatttgttatattacggtaaattatggataacacctcttggtctgcctgccttggaaatagcataacaacatcacaatatgtgaaagttttaaaacctttatgctatttttatgttagatctctcaactggagagtgaataagtgtgtttcttttctcctttatatctcctcaaatttaaagttggctgtttcttttagttatgaactctgaatgaagtaaaagttaataattttaatgaaacaaatattttaatggggcttctacccacaatctggagcacctggataatgcatctacta

SEQ ID NO: 106586 - DNA, 354 bp, Homo sapiens
gctccgagtcctcgccctcatcctcggaggatgaggaggaggtagtggccagggaagaggaggaagaagaggaggaggaggagatggtggccgaggaaagcatggcttctgcaggccctgaggactttgagcaggacggggaggaagcggctctggccccgggggcacctgcagtggactcgttgggcatggaagaggaggtggacatcgagactgaggctgtggccctgaggagcggccctccatgctggacgagccccccttgcctgtgggtgttgaagagccagcggactccagggagccgcctgaggaaccaggcctgagccaggaaggggccatgttgctgtctccaga

SEQ ID NO: 106587 - DNA, 3147 bp, Homo sapiens
  misc_feature (447)..(447): n is a, c, g, or t
  misc_feature (816)..(817): n is a, c, g, or t
  misc_feature (821)..(821): n is a, c, g, or t
  misc_feature (890)..(890): n is a, c, g, or t
  misc_feature (953)..(953): n is a, c, g, or t
  misc_feature (957)..(957): n is a, c, g, or t
  misc_feature (965)..(965): n is a, c, g, or t
  misc_feature (974)..(974): n is a, c, g, or t
  misc_feature (980)..(980): n is a, c, g, or t
  misc_feature (1696)..(1696): n is a, c, g, or t
  misc_feature (2246)..(2246): n is a, c, g, or t
  misc_feature (2402)..(2402): n is a, c, g, or t
tgcttatgaaggcttggaaatctagtgtatattttacactaacagcatatctcaattgagatggccacatctcaagtgcccagtagccacgtgtggcctgaggccatgactctgggcaatacagctttaagtgagtctagggcagggcagagggcagcacctgggatcaggtgtggagcctggggccttgtttagcaccctctggtgagggcactttctttccataaaacccaggtcaagcatgcctcacaaaggggacagtggaagtgcctcagtttacttgggagcttggcctctccagcttgccttcctactgcctggaagaagattggtgtcctcttgccttctctagcccctttcacaagaaccctcccagaatttagtcctatgaagggccaggggtgcaaggagccacccacacaatgacaggacccaccagcaataccngaagttggccagccctactcatccaaattcccttctgccagctgaacatcacaaggatttcagactgccatgctgtggcaactccattttagggtctgggcatgtaaggattactgtattaatccattctcactctgctaataaagacatacctgaggctgggtaatttataaagaaaaagaggtttcatggactcacagatccatatgacaggggaggcctcatgattatggcagaaggtggagaagaagcaaaatcacatcttacatggcagcaggcaagagagttgtgcaggggagctcccctttataaaaccattagatcaggcagggcacagtgactcacatctctaatcacagcactttgganngccnaggtgggtggatcacctgagatcaggagtttgagaccagcctgaccaacatgttgaaaccacatccctnataaaaatacaaaaattagccaggcgtgatggctcatgcctgttgtcccagattcttgggagnctgnggcattanaattgcttnaatccnggaggcagagctttctgtgagctgagatcatgccactgcactccagcctgggcaacagagtgagactcggtctcaaaaaaggaaaaaaaaagaattagatcttgtgagacttattcaatgccatgggaacagctggggaaagacccagcccatgatttagttacctccaactagggccctcccacagcatgtggtgattatgggaactacaattagtgattttggtggggacacagccacaccatatcagttactgagctgggcatcttcttccttgaatgcatattggcctctgaggcacttcctggttaacctcattccacagctgagaaaacccaggcttggcacaggcaagggatctgacccaacgtctcccatcttattagtggaaggaccaagactggacccacaactgtgctcctgttttgagtcaccatgctgcccccaagatcagatctcaaaacaagcagacatgggggctcagaaagtccccagcctagaactttcctgtcaacccaatgacactaaaggctaagctggctgcttattcttctggattcacactagaatgaccttggggtgtgtttcacacatgccgatgtctggagattcacccccagctaactgactatgaatctctgggttggggcctgggcactgatattcatgcagagcttctgagatggtcctattgcattgccaaggtcgacacctgnagaaacattgcacactttttcattcatttagttattaaataggtaatatttattattatttttccagacacggaagcgttgcaagaatagtacaaagacatccgttatacccttcgctgagattccccagtgctaccattttaccccatttgctttattattttctaagtggcagatgagttatcctttacccctaaatattcctgtgtattccttaataacaaggactttctcttatctaaccaatgcaatgatcaaaatcaggaaactaaccctgctacaatacggttttctaatgtatggacctcattcagatttcgccagttaacccaatgatgtacattggagcaaacgatcatcccagatcatgcattattttcagttgttgtgtctctgtaggtccctttcaaccaggaacagctcctcagtttttctttatctttcatagtattggcattcttgaagaacgcaagacggttatttgatagaatgtcccttactttggacttggctgatgtttcttggcggtgatattcttatgcatttgggntgggactatcacagcaatggtgtcatgttgtctgtgcatcgcatcaggagggacatgctgatggtttaccccattacaccaaagtgaatgttgatcgttcagtgaaggtgggcgcaggatcattgcattatattgcagaagccatcatcagccatnctcgctctgattaaccgatcatcttacgtagccatttatctaacaaggctgtaagggtcttgaactcagggtaagcaagccttaaagcagaagagaagaaagaaaggaaggcactggaacctggagctttggcaaagggggcaggtgtggggaacgcaccaccaaagttgttcctggcattaggatgaagaggaaggagaacattctatctagaaggggtttgaggttagccaagctgttgtctcatctcctaaatgtctgccttccccagcatccctgcccgcagttcccgcctcggtagcccctcctgagcctcagtcaccacctgtgctgatgaattgctgttcgccctcctcccaggcaggatgccccatggtcactgcaggctcagcccatccacaacagattcacaaagccggtccctcaatgctggatttcctagatttcccagccaacagtaccaccagcttaaaaccctgcagccatgcctaaatcctctatcttcctgtaccccacttccccacgaccaacccttgctgattttatggctaaatccctctcttggcagtcaggaccagctgcagaatttgcaaggcccagtgcaagatgaaaatatggaccccctcattcaaaaatcagaggaaaagcactgctgaagtattaccatataaagcattttctttcttctgtggtctctgcgtctcaatttatcatgatgctttcatttgttatttaatgtccaagc

SEQ ID NO: 106588 - DNA, 303 bp, Homo sapiens
gagactactactactaaatttgcggcccatcgacctgaggccgagtgtggtggctcacgcctgtaattgtgccactgcacttcaacctgggtgacagagcgagactctgtctcaaaaaaaactcaactgaaaaaagtggaacaaaagaaaaagaaccatgataagtattttgcactttttttttttttgaggcacatttctactctgtcacccaggctgagtacagtggtgtaatcacagctcactgcagccttaactgcccaggctcacgcagtcctcctacctcagcctcccaagtagttg

SEQ ID NO: 106589 - DNA, 359 bp, Homo sapiens
tgagacagagtcttgctctgtcgcccaggctggagcgcagtggcgcgatctcggctcactgcaagcttcgcctcccaggttcacgccattctcctgcctcagcctcctgagtagctgggactacaggcacccgccaccatgcccagctaatttctttttgtatttttagtagagatggggtttcacggtgttagccaggaaggtcttgatctcctgacctcgtgatctgcccgcctcggcctcccaaagtgctgggattacaggcgtgagccaccacgcccggcctgcagtgattctcttaattcagttttgttaaaagcaaacatttggggtctttttttttaaattaattaatttat

SEQ ID NO: 106590 - DNA, 408 bp, Homo sapiens
tattaatgttaaaaattgttgacgttccatgcagtgtgtttttctaattagagccaagctgcagagtaccatttccataatcaacatgggaacggaaactcagcaaaatttcatgtatttgcaatgaaactgctccccggcaacataaaaatggcttttataacataaaggctgtaattagaataagtcaaatcagttggaaacgattaaggccggagtaggcaaagctgccttctaaatatttgtctggagattagcctactcctgcagctctgagaagcatctttgatttacttatactgctcgacgtggcaaagataatcttgtggaaggcaaacgaatacagatttagatgtgctggtcggccccttctgcaacttgacaggaggcagtccattggaagcaaag

SEQ ID NO: 106591 - DNA, 369 bp, Homo sapiens
aagaaaatagtaatgataaaagcagcaattaatgggatatagaacaatagagaatagaaaaaaacggaaagttctttgaaaagatcaataaaattgataaatcaggaaaaaagatactaattaacaatattaggaactaaggaatatcactattgatcctacagataataagggaatattttgaaaaacgatacgaatacattcaatgtcttagttgaagttagtaacttccttgaagacaaactaccaaaactcacttaaatacagaaccttgggtgggcatggaggcttacacatgtaatctcaacattttgggaggccaagagttcaagaccagcccaggaaacataatgagacctctctacaggc

SEQ ID NO: 106592 - DNA, 600 bp, Homo sapiens
gtagaccagattatcaaaaattctcatgattaaaaaggaacatatcaagaaattaagggaaatgaacacagaagcagaaaaattgtgacagaactcaaacgtggcatttactcaagttaaatggagagaaagaagcacttctctaaagaatttgaatgtactatttggggaaagttaaggtttttttctgcttttggtaagagtagactaggtaatttggattaaccttcctgctgtaaataactgtttcctctggaataaaatattaaaataacctgcttgaagaacactggagcattaacaaggcattaagaaggcctggcgcggtggctcgtgcctgtgatcccagcactttgggaggccaaggcgagtggatcacttgaggtcacgagttcgagacaagcctggccagcatggcaggaccctgtctctactgaaaataaaaaaaattagctgggtgtgataggtgtgcgcctgtggtcccagctgcttgggaggctgaggcaggagagtcgcttgaacccacgaagcagacattgcagtgggccaaggttgtgccactgtactctagcctgggcgacagagcgagactctgtctca

SEQ ID NO: 106593 - DNA, 711 bp, Homo sapiens
gatcctcttccttacattggatgagaaggtacgtatgtttgtagtgacaacctgaccgacgcgcctgcgtgcttgttttgcttttgcaacagtgttaactacctaaaggagatctaaatccggagcgttttgttgttttgtttatctttctctttcagttttagatcgctaaggcattttagataaggcaacagctgagtctggtgaagggaaaccgcccccccgcccccgctctgatagagctggctttctgagaaatcgagttcaggctgccaagtatcctctcttagtcgcttcatctcagaagttaatcataatggggtaggccctgggcatttccttttgtgaatcagtttttacatagttttatgcacactaggataactattcctggctaaaagtttcagcgttaatgttgccattcttagtgtacagaattccagtttcataggtgtaattcttttgcgggagaaaggagcaaaaataatcagttaaagctacaagattgttaaccctttcctttaggaggttgttttgaatattgtttccccagtaattatactgagcaaaattcagttcgattctcattcggtatttcctttcaagaccaataaaatagactcttttcggggagggtgtacattttgtatttttaacttttctttatgttccaaaatatttctcctctcacccgcccaatgaaatcaggaa

SEQ ID NO: 106594 - DNA, 335 bp, Homo sapiens
gctatttaaacttaatcaattaaaattcagttaaattaaaattttagctttggctgcactagccacatttcaagagctcaacagccacatgtagctactggctactatattagcgtggacacagaacacttcccccactgccgagagttttatgggatggcactgcctgttacttaaggatggagaaagtaaggtccagagaggtgagagaatgggagtgtgctgggaccctagtcccagagcctgctagcacacagcccggtggtccacccaacagcctccctcgtgatagcaagaagcgggacagagctaggcgtggtggctcatgcctgtaa

SEQ ID NO: 106595 - DNA, 760 bp, Homo sapiens
agccatagtttgcaaaattttgttctaaacagtaattccttcactggagattttaaaaacagaaagagaatacagacagctatacatgttctggtctattcctgttctctagtatagcagcaccttaaaattgtattactaacagagtacaggagattgtatggaaggcctatagtgatgactctttcatcagctttgttcgtaataaattaactgtatgtgtttcagagagtcatatgactccaaaatgatttaacacatgctgctacaagccagccttcttaagtttttattaaatcttgattgttttggtcacataatttttatattaaatcctgtgatagtcattgtttttctataaaaatcatcacatttcaagtgttaggtagtgtgtatagaactgacaggtaataattttgacaggtatgggattaaatagaatccatccaaaaccatttactttccttatacattatagcagaagtggctaaattagagggttgttcctgtctccatcatgcacttctgtcttctactccatcccttgtatatattggggatattttgagccaagtgctaacgttacttacacagctgatatttcagattaatatgaatgctgaccgtttgccctcacaacatgcccacaacacatggattatacaggggaattaatcgttagcaatgaattcaacatttagcttttaacatttttattctgccagtaaggccagagaataaatctattctttctagcagg

SEQ ID NO: 106596 - DNA, 705 bp, Homo sapiens
acaatcagtaattgaaaaataatgccatttacggcagcatcaaaaatatgaaataacttaagaatagacttaaaatacattcaagacctggtacactgaaaactataaaacattgctgaaagaaattaaggaagacctaagtaaacagggtgattttatcctcatggattagagacttagtattgttaagatcctgaaattgatctatacgttgaacacaatcctaatcaaaaccttaccaggtgatttggtagaaaatgacaagttgattcaatattatacaaaggacctagaatagccaaaagcaattttgacaaagcctaagttggaagactcacactacctgatttcaagatttactataaagctggtgtaatcaagacagtgggataatagtgtatgacagatttatggaccaatggaattgaatagaatcaagaaatagaccagtgcatatatgctcaatgaaatttcaacaagggtgccaaggtaatttaagggggaaaggataatcttttcaacaaatggtactggaacaattaaatagctatatgcacaaattaaaaaaaaaacacccaaaccaattaaataaattgtgactcttcatgccatatacacatattaatgcaaaatggatcatagacataaatataagaactaaaactataaaacttaaaacttaactgtaaaactatagaagaaatc

SEQ ID NO: 106597 - DNA, 423 bp, Homo sapiens
ccctctattctctgatgagctatacctgttgtatatctctctatatctgtctatcctctgataatctatatctattgtatctctctctatatctgtctatcctctgataacctgtatctgttgtatatctctctatatctgtctatcctctgataacttatatctgttatatctctctatatatctgtctatcctctgatattataaatctgttgtatatctattgtctgatggactattttgtatctatcttctgataacctgtatctgttgaatatctcggtatcctctgaggaagtatacctgttatatatttctctccctcagtagattagaaagctgatgcagagaaataaaaatagtagaaacaattatttagaattacatgaatgaagagcttctttttctccccctaatcaccat

SEQ ID NO: 106598 - DNA, 252 bp, Homo sapiens
ctggaggcagaggttgctgttagctgagatcgcgccattgcactccagctctgggcaacaagagtgaaactccatctcaaaaaaaaaaaagttcattcttaagttctattcactcatgctagtttaaaatacagatgaaagcttgaaggtttggtaagctctttcgttttttgtttttttaaaaaaccatggctatggtttgagtgtctcctccaaagctcatgggttggaaagttaatcctcagtgcaaca

SEQ ID NO: 106599 - DNA, 368 bp, Homo sapiens
gaattacaggcaagggccaccacacccggccagatcatcatactgattttttaaaaacaaccccatgaggtggatacaataattaaccccactttccagatgaaaaacaagtacagatagtttaagtaacttgttcgagaatatacagctaataaatgacaaggtcaggattttttttttttttcgcagtctcactctgttgcccaggctgaagtgcagtggcatgatttggctcactgcaacctccgcctcccggggtcaagctattcttgtgcctcagcctcccaagcagctgggattataggcgcctgccacaactcctgactaatttttgtatttttaataaagacagggtttcaccatgttgg

SEQ ID NO: 106600 - DNA, 450 bp, Homo sapiens
ttcacaccccagtgactaagctgaagagatttatcatgatgcctgctcttttctgttggccttggtcacttccatgtgcatgagcatctccatccaaaagtggccttcttctctagccccgatgggatgtcagtagcccatgtttctaatagaagacccatgccaaagccactttgacaactctccagctcgcaggaatgctgtcggcctctagctaaactgttatggtccactcaacgctgtacactgtgtggccactttcctccgcttcctgtacattgtcaggaggttgtaaggcagcaccaggggctgacctctcaggacttgcagcagcagagcccagctgggtacacctgtctaaaaaccacagcacagcagtagcagctcaatggagacattgttctctgcatcccaaagccaggaattcaaaataaagcttggcttccatgc

SEQ ID NO: 106601 - DNA, 541 bp, Homo sapiens
aactgctggatacgatgcatccgccttgcatccacctgtcctcgtttttatttctctctctttcttcttagcaggttggtaaatagatggcctgtgattaactagagccagtatgggttttgagaactagagctactaaaaattagaattagaagtgaatggtttctccatctgttctgtttgcattaaactgtaactatggttttgtgttacaaaagttttaacagaaatgagtggaaccatcctttaaactatgagttatgaaactgaatgattttactataaagatacgtttcaggtatcataaatcgtctgacttattgaatcactatttctggggggagaatgtcccttctcataaggcaaactccccgctgtggaaggcctgccctttcagtgaccctccatgctccctgtgctttcgctgcgggcgttggtgatgacttgttggcccttggtctcactaccctcttggcagttctttgttattttcttccatgattctaaccacaccagctgcttcaatgatcattgtttgtaa

SEQ ID NO: 106602 - DNA, 449 bp, Homo sapiens
agaaagccaatcactggaacttcacttgagcacttaagattattactagaggaagcacaattaaatcatcagtttatcagccatcattataaatcaccaggcaacatatcaagcttcattatttaagaatccttaaccagtgacttcctgcatcactgagagtcaaaagcaatctattcaccaaaaggtacctaaggagtatgttttttttgttgtgtttttattttttttttaccctgagaaatttatcatggaaacataatgaaacccactaaaattaattgtcatgtttttgcatgttttaggcattccgaagtcttcaaaaggaactcagtggtatttgggatatgagtgacgttcctcatcccgatgaggcacgtacatggggatgctgaggctagtccaggtgccaataaaatatggtcagaaccagaccatgtgaacggaag

SEQ ID NO: 106603 - DNA, 548 bp, Homo sapiens
cggccacccatgtattcttgattgaaaacatttgctcatgtcttagttctacagctgaccttctttcactgttttcaaggtcaataactgtgtgttcacacttctgcattttataaatgttactgtgattttcttgtaatgaagaattaaatgttgggagtcaatggcatcagaaccttgcaaaagaggtttttttagcccaggtatgtggaagacacttctttaattttcaataatgggtgtgataaagaccaacccttcccattagcccttccaggcccacatgtaagaattcagacacatcttttcactcatctcagaccttctcagggtaactcggtgaaaatgtcttcactctgagcctcagtgagcctccctgcaacttgcagatgaggggctacaccggaaaagctcaacctgagtgaccctggcccctgaaatgattggcaaaatagagtgggtgtctggatgtggctttttttctgtgagaggggactgtccagttgtaattagaattttaaatgggatgcagtaccctaaaaatgaaa

SEQ ID NO: 106604 - DNA, 610 bp, Homo sapiens
attttttttcttcccgtgtgccaatgcgattttctaaaagaaagaatacgtggattaagtaatgaaggtatcatttcttctgtgtgtaaaatgaacttatgtggctaaaatatttgaagttgaagtataataatagttttagttaaatctttccaataagtattttaaaacatatactaaaaagatacatattctactgaggatgactgcaaatatcagtatgtggatggttaaagggaaaggatctcatatagcgttcttgaatgctgtggccattgaatgtttcaggtcagatttttgtttgccaaaagcattcctattcaatttgtattttttgtaaatgcacttactttaaaaggtacccaattcctgtcttatttactgtttcagcatattaagctctgaaatatagcattttcccaaactttctcgtggttttctattttctcgaagtaaatgacatatttaaccttctttaatattacttgggaaaacttattagaaaacaaaaaatcattttctacttcaaaacgtatctccaaagtgtacactgttaactttgcacttaacaatgttaagttgaacttgtatggatacactttaacttccg

SEQ ID NO: 106605 - DNA, 808 bp, Homo sapiens
gagacagagtctcactctgtcactcaggctggagtgcagtggcatgatctcgctcactgcaacctccatctcctgggtttaagtgattctgctgccttagcctcccaagtagctgggactacaagtgtgtgccacaacacctggctaatttaatacagatgggggtttgccatgttggccaggctggtctcagactcctgacccgcgttggcctcccaaagtgctgggattacaggcatgagccaccgcacccagcctaaattccactttttagtatctttattgatgttccaacttgaattatgtcccttctattgctctgttagagtcactcttattcttttgttgcacttaactataaatttatttttttgtttttaaaagaaatgtttctaacataatagaagttttagagaatgatagaaccagcatctatgtgtccttcacctagctttgtcaaatgttaacatttgtcttatttgtaacagatcttttaatttttttttttttttttttgagatggagtctcactctgtctcccaggctggagtgcagtcacgcgatcttggctcactgcaacctctgtctcccaggttcaagcaattctcttgcctcagcctcccaagtagctgggaccacaggcatgtgccaccacgtccagctaatttttttgtatttttaatagagacagggtttcaccatgttggttaggctggtctcaaactcctgacctcaaatgatccgcccgcctcggcctcccaaagtgctgagattacaggcgtgagccaccctgcccagctagattttt

SEQ ID NO: 106606 - DNA, 413 bp, Homo sapiens
aacctggggcggattctcaggcctggaaagtgctgggagtggctggagttgcccttcctggaggtatctgggatgtgaggaaagaggacgttcttgaccagacaaaagcttcgtccagacagggaggcagggctgggagtgagagagccggtcaggcctggaggcatcctgagcactcacgccttcaggggctagtgctagcaccagggaaaggcatctttgtcctgtttgtgagtctcagcaccttggcagactggcatccatgcctccagcctgaggggccccacgtgggaagcatagagcctgtcctccctgccctaggggctgcaggcctcaacccccaaccaggcaccttctatgcctacagggtcccggggacccaggcccacacctcctgaatgggagagaagcct

SEQ ID NO: 106607 - DNA, 977 bp, Homo sapiens
ctacttctgaaagcagaggtggagacacacaaaagagaagccattgttgctactctcaccaccattgctgtaagccccttcctctgtcctccagatatagaagatctgtgctctgatgactgactgctacttctgaaagcagaggtggagacacacaaaagagaagccattgttgctactctcaccaccattgctgtaagccccttcccctgtggctgaagcagtttctagaagatttaaaaagccaacacatttcccctcttcggttttctctttttccccttttgggagccagatatttaaggactaggacattcaaaagcaactatatataaaagataatttagaaagtaattacacatatttagagaaaggtgccagctgagaaaaggcataagaaaccttaaatttactgatcccaggcacagagacagcctataccaatttaaaaaagaaagaaaagcaaactctgagaaagaaggagaatctgatttccagactttccacattataagattcaaatctccagttttcaacaacagcaacaaaaaaatcacgaggcataaaaagaaacaaaacagtatggcccattcaaagggaaaaactaaatcaacagaaaatgtccctaaggaagaccagatggtggacttatcaaagactttaaaacaacggtcttaaagatgctcaaaaaactaaacaaaaacatggagaaaaatgttttaaatgtatatgaacaaagtggaaatatcaataaagagatataaaacatttttttaaaacctcaaaagtgtttcaaggctaaaaagtgcagtatctgatgaattcgtaggttcagcgatggaagcgggaagatgaactggatgatgagttagtggaacaagaaaaagggggcaatccaggagacgtcttgaaggctgggtatagacgggaaggaagagtgagactggtaacaagaatttatctgtaaaaccacaaca

SEQ ID NO: 106608 - DNA, 322 bp, Homo sapiens
tattcggtgggagtgactttggtgaatagtaagctttgctaaagtgactgtccagtaatccccaggccatcccagatcctctgtttgggcattatttactagtgcctccttaaatggactctgccagtacattcatttgactccctgccttggtttcctaataaagtcagacgctagtcggaggccttggattgtctgcaacccaaagaaccatctccatgatcattagcaggacttacatccgtttccttagaacaccagattcagagcactgttactctgcttttctttttcatatttctttctggttcttgctggataa

SEQ ID NO: 106609 - DNA, 606 bp, Homo sapiens
ggaggcagaagaagagatcactggtctggaggaatcaaagattcaagaaaaagaatggaaggagcaaggaagtaaggatttgggagggttcatgatcaagagtaaaggtgaaggacatgaccttgccagaaggagagacattcatttcatcctggagccaaagattgaaaggcaaaatacaatatacagtctgaaggaattcagaggggaagagaaaggaagtacaaagaaaaacacttcaaatggctccagttttctcagaaaagtagctaactagaagtggagtcttgtgattggggattttaggaacctagaggaagagaaagttttgaaaggccactgaagagaatggaaaagggaattaataaggtaaatgagaggatttttgagtggtaatcaagagacaaatagggatgaaaagttgagagaagaatcaagaaaatgaaaatgatttcaaatgctagcagtactcatagaattttacagaattcctccctcccccacctacacgattttacaaatgaagaatttaattccagagtgggtaagcaacttactgtgagtttgttggagttctaacttctgccctccttctttctgaatgaa

SEQ ID NO: 106610 - DNA, 158 bp, Homo sapiens
cacatgtccttgtgacatgacagctgtcttctcccagagtgaatgattgaagagagggcaaggtgaacaccaaaatatcttttatgtaataaccttggaagtcacacagaatcctagaggttacacagatcagccctattcagcatgggaggggacta

SEQ ID NO: 106611 - DNA, 518 bp, Homo sapiens
ctgactcattccgaatacctgctacctgctccaccctaacttattcttcaccctgcataaccatttttcccaccaagacactcatcccatcactttctttaaattagccaatcagaattagtttagcctggtacagtctaacctagccaataggggaacgacacagcagcaccggcccacgtgcatcagggataagaacccattcccctcccttgtccaagtctgtgctcaccattgctccatctgtaagggcacacccttctatagaagtaacttcccttgctgagaattacaaagaaaattttgtatttgagtgttatttcttttgcagcaccaaagctttattgataacaatttgggggctctcccacgattacattcccctctgggggcgatctcttttcttgttctctcttgtgaggaggtgcaccccacccccttgcagcggcctcaggggtgagaaatcaagacccacccagtgcaaggaataacccaagctctcagcaatgcaaaaataa

SEQ ID NO: 106612 - DNA, 228 bp, Homo sapiens
ttaatactgtgggtttaatggtgtcctggatgtaccaggaagttgacaggatcagagcaagagtcagttggattttccccggttgttcctagtagaggaagaagacctttgcaaagagagaaagtgggtcctggatgggcgtggaggtcgcatattcctctctgggtgcagcttggacaggtcagtcttcttctttgagcaggtgtgtcatcatctatataatgaaca

SEQ ID NO: 106613 - DNA, 177 bp, Homo sapiens
atactgtccataggaaagggaaaagtaaaggatcttaggtcaaagtgagtttgagatatccaaggcaagacatttgcttctggtacttccagtgtggctccatctcagagccatgagagaatgcccctttttaatcctgccactataaggaagtttttccatggaggaacattcctg

SEQ ID NO: 106614 - DNA, 996 bp, Homo sapiens
ctgttatgggacgaatattaaatggcaattagacatagttgtccaatggtgttcagttttatagctggtaacttttttgtctaccagctcagtctattactgagagaggaatgttgaagtctctgatcctaatgttggatttgtcagtttctcctctcagtttcatcagtttttgctgcatgtatttttaaactctgtcgttaggtgcatacatattaagaattctcatgtcttcttaaagaatcaacttaaaaaaaatttttttttgagacagagtttcgctctttttgcccaggctggagtgcaatggcgcgatcttggctcactgcaacctccgcctcccaggtacaagtgattctcctgcctcagcctcccaaatagcttggattacaggcacgcaccatcacgcctggctagttttttttgtatttagtagagacaaggtttcaccatgtaagtcaggctggtcatgaactcctgacttcaggtgatccacccgcctcagcctccaaagtgctgggattataggcgtgagccaccgcagttggctgaatcaactgttttacattatgtaacatcactttttgttcctgtgattttctttgctcttaagtgtactttgtctgctattaacatagccattccagttttcttttgactagtatttgcatagtatgcattttcacatcctttaagtcctagcctcacctcattatatttgaaatggaaagcatttatactcagaagctggagttccttttccctagctcttccctttccagaattgttacctgttgtttcagtgttcctagttgccctgggcttcatcccttgtttctcagtccagaaagatggaaggagttgtattagaattttagcagccactttctgcactgtagctctgacctaccattggaataaagctatttattccttgttggtgcctttccccaaatattgactcccgttccagaatctattttcttttatcccatt

SEQ ID NO: 106615 - DNA, 757 bp, Homo sapiens
aaaaacattagtacaagattactaactggagcccttttcctagatactgttgcttataaattgtaggtatatggtacgttagaagaaggggtcctagtattcttgacctgattatttgagtgatgtgattaaaatttacaagtttttttagctaagggttctagtgatccttcctccttgggagttaagcacttaattgtcctactgttcttccaaagaaatacttaagtgagataccttgaggaggtggtaaggctaagaaagtggattcctgagtaaaatgtcctggattccaatcctcgtattatttgtgaaattttgggtgagtcacttaatctctccaagactaaattttcctatctatgaaatgaatttaattgctgtgcctactccataggattattataagaagtaaatgatgccaggtacagtggctcacacctgtaatcccagcactttgggaggctgaggcaagaggattgattgagcccaggagttcaagactagcctgggaaacatagcgagatccccctctctgcaaaaattaaaataaagtagtaaatgagcctggatgcagtggctcacgcctgtaatcccaacactttggaaggcgaagtgggcggatcacctgaggtcaggagttcgagaccagtttggctaacgtggcgaaaccccatctctactaaaaatacaaaaattaggtgtggtggcgtgcgcatgtagtcccagctactcaggaggctgaggcgggagaatc

SEQ ID NO: 106616 - DNA, 849 bp, Homo sapiens
agcccctctttttaaaaattaatttttctttttttagggttttaaaatttgtttttgttttttcgtttttctttctcttgcctgattgctctggctaggacttcccgcttctctctttaaggacttttgtgattctctggggcctacctaggtattccaggatactcttcccatctcagaaccttgatgtaaccatatctgcatggacccacctagatattccaggacgctctccccatctgagagccttgatgcagtcatgtctgcacggtccccttcgtcgtggcaggtcacagtttcccaggtgtcgcattggtcttccggtctccttaggcaccttttggctgtgacagtctctcatctctccttcattttgatgacagtgacacttttgagaagcactggtcaggtattttgtaggatgaccctctactgggattggtctggtgcttttctcatgattagactggggtgatgggttttgggaggaggaccgcagagagaaagttccagtttcagagcatcttgggtacattccgtcaacatactgtatcactgttgatgtcgaccttgatagcctggatgaggtcatgcctgtgacgtttctgcagtatcaagtttacttttattctccctttggattttattatctttttaacttgacgtgtaagttttaacttcacaggtaataagaacatatcttcctgaggggaagaatatggtttcctgtgactccccgccatccccagccgtacccaccatcatcaatttgctgtgcttccttccaggccttttcctacttatttacattcatatatatgtggccatagagaagatacatattgtcgt

SEQ ID NO: 106617 - DNA, 173 bp, Homo sapiens
catggttactgactacttgtgggagagaaaaaaaaagctaagggcaaagaatcaagtctggtatgttagtttttaccaactgagatgcatccaagatgggattagacatacaaggtaatttatcagggaagacacctgtgagggaatgtggagcaggcatgaaggtagtatgg

SEQ ID NO: 106618 - DNA, 387 bp, Homo sapiens
agggtacagctcctgcagctgctttcatgggctggcgttgagtgcctgctgcttttctaggcgtgtggtacaagccgtagatggatctaccattctggggtctggagggtagtggtcctcttctcacagctccactaggcagtgccccagtggagactctatgtggggctccagtcccacatttcccatccacactgccctagtagaggctctccgtgggggcttcgcccctgcaggaagcttctgtctggacatctggacatttccatatacttggcctccacatccagcatcctctgaattcaagcaattctcctgcctcagcttcctgagtagctgggattacaggcatgcgccaccacagatgtatggatgatatccatacat

SEQ ID NO: 106619 - DNA, 324 bp, Homo sapiens
ggtgaaaccctgtctctactaaaaatacaaaaaattagccaggcgttgtggcgggcatctgtagtccccgctactcgggaggctgaggcacaagagttgcttgaacttgagaggcggaggtttcagtgagccaagatcgtgccactgcactccagcctgggagacagagtgagaccctgtctctaataataataataaataaataaataaataaataaataaataaataaaaagaaagaagggggaaagtggtccccatgagtgattccagcaaggaggatgcagaccctgtgctccaggcatcatcagagttgggagcaggct

SEQ ID NO: 106620 - DNA, 292 bp, Homo sapiens
cagggtaagcagatcgtggggaagaaagagggtttctccaccatccattctgctgaggctgcttcaattttctctctacacagccctaatctcttagacccagaacttttaaattcctagaagaagaggggcctaaatatatcttacatacttttcctttcccctcttcatttaaattgactaaaattaaatgttcaacatcttcatcttatgtttcatgtagtgaactgcttaatgttatctgtcttgatttggcttttgtttttttccccttagaattgctacaaactag

SEQ ID NO: 106621 - DNA, 635 bp, Homo sapiens
tgacccaaacacaaccaactccttttatttccccacttttttgaatatactctttcctccgcctggaaatcctcagctcctcttctcttggctgggaaatgactaagctttgagacccaagtcaaataccaccaccttcgggaagtcttcccagactcccccaaggcagaactagctatcacctccccccaggcagaactagctatcaccgctttgcaagtacatgaacatccattatgaggctgtctccctccccagaccaacagtccctcaggttcagtgggtttatttatcttaatcacgccagtgcctcaggaagttttgtttttgttttgaaacaggttctcacactgccaaccaggctgggctacagtggctcaatcacagctcaccgcagccttgacctttgggtgacagagcaagactctatctcaaaacaaacaaacaaacaaaaaaaccaaagaggcaacacattctgcttctatggcaacggggagacaggcactcaacacgactgcaaaacgggatggccctgaagacaaacatttggcaaaatccagagcagttattcatgcatttactcttctgatctagcaagcccactcctaggaatctatcccaaaagacactttggc

SEQ ID NO: 106622 - DNA, 389 bp, Homo sapiens
tatatacattgtggatataactaaaattaacatatgcgttatctatcttatgtagtcattgtttttgtggtgaaaacattttacatctactttcttagcatttttcaagaatgtaatatattaagtatagtcacaatgttgtacaataatctctagcaattctaagttagtagttacccagttgaaagagcaataaatgtactttgagctcagaggtgcctactgtgaatcaaaaatagagaaagtagatggaaaaacaaattgtataagtattctttgtgctttcagacagagttaccaatttcccttttcttatccaaaaatgccatttatgaatttctataaatgatctgtgtgtagctgtttgactgtaagggataagtcagctg

SEQ ID NO: 106623 - DNA, 377 bp, Homo sapiens
tgagacagagtctcaatctgtcacccaggctggagtgcagtggctcaatctcagctcactggaacctccacctcccggatttaagggattctcctgcttcagcctcccaagtagctaagactataggcatgcaccaccacactcggctaatttctgtatttttagtagagatggggtttcaccatgctggccaggctggtcttgaactcctgacctcaagtgacccacctgcctccgcctcctaacgtgctggaattacaggtgtgagccaccgcatctggccttttcatttacttctacttacctatcctcttcggtaaattcttaaaatctattatgattataaatataccttacattaatgtttcatttagtat

SEQ ID NO: 106624 - DNA, 520 bp, Homo sapiens
tggctgcttaacaaagtttgagtcctcgaacttctcttgctattctccattcactccttaggttatcttattcagtactacagctttaaatatcatctataaatgaatgactcccaaacctagattcatatcgcagacctttctgctaaacgctagactcagataccaactgcctactcaacagccctgcttaggtgtctaacaggcctctcaaacataaatgtctaaaatggaatgccttatcttctccacaaatctacttcttttccagtcttctacaactcggtaagtggtgcctgtgcttttttagatacaggagccctaatacctgatcattatccatgactttctcacacccacattcaatccattagaaaatccttgtggctttctgacacgattttgctgtgtccccaaccaaatctcatcttgaattgtatctcctttaattcccatgtattgtgagagggacctggtgggagataactgagccatgggggcggttttccccatgctgctc

SEQ ID NO: 106625 - DNA, 375 bp, Homo sapiens
ttattatatacagtattctttcaataaagtaagctagagaaaaagttactaagaaaattataaggaagagaaaatatatttactattcattaagtggaggtggatcatcaaaaagattatcatcctcatcatcttcatattgagtaagctaaaaaggaagaggaagaggaggagttggtcttgctgtcttaggggtggcagaagcaggagaaaatttacatatatgtggaccctctcagttcaaacttgtgttattcaagggttaactgtatatcatggaagatgttaataataggggtagctgggtgtaaagtatgtagttattctgtattgttttcacaattttgctgtaaatctaaaaatgctctaaaactt

SEQ ID NO: 106626 - DNA, 325 bp, Homo sapiens
gttttgccatgttgcccaggctggtctggaactcctgagctcgagagatctgcctgccttggcctcccaaagtgctgagatttcaggtgtgagccaccgtacccggccaacacaagtgttttaagcacaccatcccggaggtccgaaatcccaagcctgaagtgccggcagggctggctccttctggagtcccagggaggggtccatttccttgcctcttccagcttccggtgaccaccaccctccccggctgggcccctcctcccatcgctccagtccttgcttcccctgctcatctccttctccagcgactctgaacctctgc

SEQ ID NO: 106627 - DNA, 899 bp, Homo sapiens
agccgccaacagacacttcctgtacaggggaggggggagggggccaggcagccgttagacagcacaaccgaacccaacaccggggcccaacggcaggggcttgggcaggagcaaggtccgagggctgccaggtccacgctgcttttatgagctgtaacactcaccgcgaagatctgcagcttcactcctgagcccagcgagaccacgagcccaccgggaggaacaaacaactccagacgcgctgccttaagagctgtaacacttgccgtgaaggtctgcagcttcactcctgagccagcgagaccacgaacccaccagaaggaagaaactccgaacacatctcaacatcagaacggacagactccagacgcaccaccttaagagctgtaacactcaccgcgaggttccgcggcttcattcttgaacaatgaatcctccaatgtacctgactctccctttgcgaagagcatctccgtggcagaaatctgaaaatgcccctggggagacacatgcacaagacagttcgtgagccacacatctccccacaccaagctcctccatacaagacctcggactgcatcacgtaaatgctttttcaggggcaaaatctagagaatctgaaacgagctatcagcttcccagtttgcacaattcatcaagaaattatgcggggtcactggcacaaatgatgaggcatctcctggaagcttaacttcttatccatcccatctcttggacagatgatgccagttaattaatttgaatgggtctgtcacacgcagcccaactcaactggagtcctgagaaggtgaacagaccaggatggatggccagggaactcaccagaagtccccaggcatcagaacaaggtcgaagcatcctggtgagcagataacacg

SEQ ID NO: 106628 - DNA, 973 bp, Homo sapiens
tccgaggctgggggagcagccgttggctctggtgcccctgggggtgggagcacgagtgggcaaggatgatggtgaggcagaggaggcggccccgagggagcgcccggctgagaggcggggggccgaggggcccggggagcgggcgtcaccgagggccctggaagcggcagggctgggggagaggagacgcgtgtctggagcatggggaccccagcccagctcccacttgcagacctgggccgcgggctgccggccgagtggccggggggcctggctgcccaggaggcgggccggggccggggccgcggccgggggcgcggagcggagttagggtcgccaggccgagccgaggtgggacggaccgacgcagagaggaagggaagccacctggcctgaagatcctgtctctaagatcccattctgaggtccacgctgcttttatgagctgtaacactcaccgcgaagatctgcagcttcactcctgagcccagcgagaccacgagcccaccgggaggaacaaacaactccagacgcgctgccttaagagctgtaacacttgccgtgaaggtctgcagcttcactcctgagccagcgagaccacgaacccaccagaaggaagaaactccgaacacatctcaacatcagaacggacagactccagacgcaccaccttaagagctgtaacactcaccgcgaggttccgcggcttcattcttgaagtcagtaagaccaagaacccaccaattccggacacagtagcatttgggaataataagaattgtagctgggcatggtggtacacgcctgtagacccctagcagctgccatcatcctcaccatccgcatattattgatatattaactctttgatggcaaccatggcttatcccccctatctccctatgccctacagcagggcagtggaatggttaagaggctttgaagtctaagagtgctggcttaaaaccctaat

SEQ ID NO: 106629 - DNA, 514 bp, Homo sapiens
caagtgcttaacaaagctttcttggtccttccatggtgttggtcagtcaaaatgaattggggtctcctgctgggtttgggaagattctgtctcattggtaggctctgaagttatggtaacctccacatctgcaggtttaactgtaatgttgggcaagtgataataagcttgatcctcacctggaggttgaactgacacctcatgattcggtagagttagactctccatagaggactctggaggcagagctggggcctcctgctgcattgaagaaggttcttcctcaaggagctgtggaagctgtgctggggcttcttgttggagtgaagaggactggatgtcttcaagggtctctggattttgagtttcgggctctagatggaattgagaaggtccaacttgctcagagggccctggaggctcatctgacttcacccggagttctggaggcaggctaccgggatacggtgtatctgtactggaatattcattctgcaaattctgtttctgacta

SEQ ID NO: 106630 - DNA, 840 bp, Homo sapiens
tccgaggctgggggagcagccgttggctctggtgcccctgggggtgggagcacgagtgggcaaggatgatggtgaggcagaggaggcggccccgagggagcgcccggctgagaggcggggggccgaggggcccggggagcgggcgtcaccgagggccctggaagcggcagggctgggggagaggagacgcgtgtctggagcatggggaccccagcccagctcccacttgcagacctgggccgcgggctgccggccgagtggccggggggcctggctgcccaggaggcgggccggggccggggccgcggccgggggcgcggagcggagttagggtcgccaggccgagccgaggtgggacggaccgacgcagagaggaagggaagccacctggcctgaagatcctgtctctaagatcccattctgaggcttcgagggtctggcttgagcagcacagacagggacgtgtctaaccgggatgaccatgaggtctcatcgcagtttgccactaaccagatggagtctcgctctgtcaaccagactgaagtgcaatggcatggtatcgcctcactgtaacctctgccttctgggttcaagcaattctcctgcctcagcctcctgagtagctgggactacaggcacacgccaccacgcttggctaacttttgtatttttagtagagatggggtttcaccatattggccaggatggtctcaatctcctgacatcgtgatccacccaccttggcctccgaaagtgctgggattgtaggcatgagccaccacacctggccttcaagtgctatttctttgcagtaccaggggacaagcattctctttctaa

SEQ ID NO: 106631 - DNA, 724 bp, Homo sapiens
tccgaggctgggggagcagccgttggctctggtgcccctgggggtgggagcacgagtgggcaaggatgatggtgaggcagaggaggcggccccgagggagcgcccggctgagaggcggggggccgaggggcccggggagcgggcgtcaccgagggccctggaagcggcagggctgggggagaggagacgcgtgtctggagcatggggaccccagcccagctcccacttgcagacctgggccgcgggctgccggccgagtggccggggggcctggctgcccaggaggcgggccggggccggggccgcggccgggggcgcggagcggagttagggtcgccaggccgagccgaggtgggacggaccgacgcagagaggaagggaagccacctggcctgaagatcctgtctctaagatcccattctgaggcttcgagggtctggcttgagcagcacagacagggacgtgtctaaccgggatgaccatgaggtctcatcgcagtttgccactaaccaggaccctaggagtgctgttttattgtctccacctgacagataaggaaatggcagctgacccaggtcaaggaagttcctgaggtcccagggctaataagtggcctgactccaccaccagcccccaggaggaagccaaccccagccctagaaaaacccaattcctgagtgagtgctgtaaaccaaaaataaaattctaagcttcccaactgcct

SEQ ID NO: 106632 - DNA, 686 bp, Homo sapiens
tccgaggctgggggagcagccgttggctctggtgcccctgggggtgggagcacgagtgggcaaggatgatggtgaggcagaggaggcggccccgagggagcgcccggctgagaggcggggggccgaggggcccggggagcgggcgtcaccgagggccctggaagcggcagggctgggggagaggagacgcgtgtctggagcatggggaccccagcccagctcccacttgcagacctgggccgcgggctgccggccgagtggccggggggcctggctgcccaggaggcgggccggggccggggccgcggccgggggcgcggagcggagttagggtcgccaggccgagccgaggtgggacggaccgacgcagagaggaagggaagccacctggcctgaagatcctgtctctaagatcccattctgaggcttcgagggtctggcttgagcagcacagacagggacgtgtctaaccgggatgaccatgaggtctcatcgcagtttgccactaaccagataaggaaatggcagctgacccaggtcaaggaagttcctgaggtcccagggctaataagtggcctgactccaccaccagcccccaggaggaagccaaccccagccctagaaaaacccaattcctgagtgagtgctgtaaaccaaaaataaaattctaagcttcccaactgcct

SEQ ID NO: 106633 - DNA, 1439 bp, Homo sapiens
agccgccaacagacacttcctgtacaggggaggggggagggggccaggcagccgttagacagcacaaccgaacccaacaccggggcccaacggcaggggcttgggcaggagcaaggtccgagggctgccaggtccacgctgcttttatgagctgtaacactcaccgcgaagatctgcagcttcactcctgagcccagcgagaccacgagcccaccgggaggaacaaacaactccagacgcgctgccttaagagctgtaacacttgccgtgaaggtctgcagcttcactcctgagccagcgagaccacgaacccaccagaaggaagaaactccgaacacatctcaacatcagaacggacagactccagacgcaccaccttaagagctgtaacactcaccgcgaggttccgcggcttcattcttgaacaatgaatcctccaatgtacctgactctccctttgcgaagagcatctccgtggcagaaatctgaaaatgcccctggggagacacatgcacaagacagttcgtgagccacacatctccccacaccaagctcctccatacaagacctcggactgcatcacgtaaatgctttttcaggggcaaaatctagagaatctgaaacgagctatcagcttcccagtttgcacaattcatcaagaaattatgcggggtcactggcacaaatgatgaggcatctcctggaagcttaacttcttatccatcccatctcttggacagatgatgccagttaattaatttgaatgtggcctagggatttctgggaggatccgaagaacaaggctgtctgcagtaggagcctcctgttcctcgccacctaagcttcagccctgcccaactaacagctctccatgttctaaagaaggtgggagtgctggaccaccccagccttctggaaccccagttctgtgacattatccatctcctggaaatatgctggttttaaccatgcaaactggccaagcatcaggcagaaatagcagctgtgcctggaaggacaggtgacatctgtgaagaaaatggccaagcaggacagggtggagagcacgggctgttcccttcctttctgggaacagcaccacctttgggggaactccttctctcatggggttttaggcaggggctgccagtcccagggccctgcctcctgtcaccccccatatgcataggaacacttgtgcaccagtcgctacatttgcaagtggaagctggtggagctgctcagctcccaacaggaagcccatgtgtgcggggccagaggacacagcccatctgaggcgctaagcttctgtgaagagggagtggagtctggatgggattccaatcccacggtccaccccttctgggacccagactcacccttccccttccttcaattctgagaaacaataaatgtccctacttgcgaacaaaaaaaag

SEQ ID NO: 106634 - DNA, 1517 bp, Homo sapiens
agccgccaacagacacttcctgtacaggggaggggggagggggccaggcagccgttagacagcacaaccgaacccaacaccggggcccaacggcaggggcttgggcaggagcaaggtccgagggctgccaggtccacgctgcttttatgagctgtaacactcaccgcgaagatctgcagcttcactcctgagcccagcgagaccacgagcccaccgggaggaacaaacaactccagacgcgctgccttaagagctgtaacacttgccgtgaaggtctgcagcttcactcctgagccagcgagaccacgaacccaccagaaggaagaaactccgaacacatctcaacatcagaacggacagactccagacgcaccaccttaagagctgtaacactcaccgcgaggttccgcggcttcattcttgaacaatgaatcctccaatgtacctgactctccctttgcgaagagcatctccgtggcagaaatctgaaaatgcccctggggagacacatgcacaagacagttcgtgagccacacatctccccacaccaagctcctccatacaagacctcggactgcatcacgtaaatgctttttcaggggcaaaatctagagaatctgaaacgagctatcagcttcccagtttgcacaattcatcaagaaattatgcggggtcactggcacaaatgatgaggcatctcctggaagcttaacttcttatccatcccatctcttggacagatgatgccagttaattaatttgaatgctctgctgctatggtgagctgcacgtctggaggcttcacagagacactgggtgaatctaaatgatgagtttgatggtgacctggaggtgaaactgtgacttcatgatgttctagaggctgacctggggtctcctgctgggtcagagaagatttgacctccccagaagactcagaaggctgaactggctgctgctgctcactgatggaaagttcatgctccataggaggaactggaggctcaattggggcctcctgttgggttgcagaaggttccacctcctctggaaactgaattggggtctcctgctgggtttgggaagattctgtctcattggtaggctctgaagttatggtaacctccacatctgcaggtttaactgtaatgttgggcaagtgataataagcttgatcctcacctggaggttgaactgacacctcatgattcggtagagttagactctccatagaggactctggaggcagagctggggcctcctgctgcattgaagaaggttcttcctcaaggagctgtggaagctgtgctggggcttcttgttggagtgaagaggactggatgtcttcaagggtctctggattttgagtttcgggctctagatggaattgagaaggtccaacttgctcagagggccctggaggctcatctgacttcacccggagttctggaggcaggctaccgggatacggtgtatctgtactggaatattcattctgcaaattctgtttctgacta

SEQ ID NO: 106635 - DNA, 1312 bp, Homo sapiens
taagaataacaatgccaaggttttcattcttgaaaggagcaattaagcgtctcaccccctcctcattttagatgggaactgtgagggtcccgtcatttacccagggtccctgttgaggatcttgtcctcattagatgacttcttgtgcagcttccatgcgtgattctttactcttgtggcactgagaggtttgtacatgtctttaagccagagcggctttctgaatgaaaaaagtccatcctagaagatagaaagggaaatattaattttgcatgtcctctgctttccctggtcacagcaatgaatcctccaatgtacctgactctccctttgcgaagagcatctccgtggcagaaatctgaaaatgcccctggggagacacatgcacaagacagttcgtgagccacacatctccccacaccaagctcctccatacaagacctcggactgcatcacgtaaatgctttttcaggggcaaaatctagagaatctgaaacgagctatcagcttcccagtttgcacaattcatcaagaaattatgcggggtcactggcacaaatgatgaggcatctcctggaagcttaacttcttatccatcccatctcttggacagatgatgccagttaattaatttgaatgtggcctagggatttctgggaggatccgaagaacaaggctgtctgcagtaggagcctcctgttcctcgccacctaagcttcagccctgcccaactaacagctctccatgttctaaagaaggtgggagtgctggaccaccccagccttctggaaccccagttctgtgacattatccatctcctggaaatatgctggttttaaccatgcaaactggccaagcatcaggcagaaatagcagctgtgcctggaaggacaggtgacatctgtgaagaaaatggccaagcaggacagggtggagagcacgggctgttcccttcctttctgggaacagcaccacctttgggggaactccttctctcatggggttttaggcaggggctgccagtcccagggccctgcctcctgtcaccccccatatgcataggaacacttgtgcaccagtcgctacatttgcaagtggaagctggtggagctgctcagctcccaacaggaagcccatgtgtgcggggccagaggacacagcccatctgaggcgctaagcttctgtgaagagggagtggagtctggatgggattccaatcccacggtccaccccttctgggacccagactcacccttccccttccttcaattctgagaaacaataaatgtccctacttgcgaacaaaaaaaag

SEQ ID NO: 106636 - DNA, 1421 bp, Homo sapiens
agccgccaacagacacttcctgtacaggggaggggggagggggccaggcagccgttagacagcacaaccgaacccaacaccggggcccaacggcaggggcttgggcaggagcaaggtccgagggctgccaggtccacgctgcttttatgagctgtaacactcaccgcgaagatctgcagcttcactcctgagcccagcgagaccacgagcccaccgggaggaacaaacaactccagacgcgctgccttaagagctgtaacacttgccgtgaaggtctgcagcttcactcctgagccagcgagaccacgaacccaccagaaggaagaaactccgaacacatctcaacatcagaacggacagactccagacgcaccaccttaagagctgtaacactcaccgcgaggttccgcggcttcattcttgaagttcgtgagccacacatctccccacaccaagctcctccatacaagacctcggactgcatcacgtaaatgctttttcaggggcaaaatctagagaatctgaaacgagctatcagcttcccagtttgcacaattcatcaagaaattatgcggggtcactggcacaaatgatgaggcatctcctggaagcttaacttcttatccatcccatctcttggacagatgatgccagttaattaatttgaatgctctgctgctatggtgagctgcacgtctggaggcttcacagagacactgggtgaatctaaatgatgagtttgatggtgacctggaggtgaaactgtgacttcatgatgttctagaggctgacctggggtctcctgctgggtcagagaagatttgacctccccagaagactcagaaggctgaactggctgctgctgctcactgatggaaagttcatgctccataggaggaactggaggctcaattggggcctcctgttgggttgcagaaggttccacctcctctggaaactgaattggggtctcctgctgggtttgggaagattctgtctcattggtaggctctgaagttatggtaacctccacatctgcaggtttaactgtaatgttgggcaagtgataataagcttgatcctcacctggaggttgaactgacacctcatgattcggtagagttagactctccatagaggactctggaggcagagctggggcctcctgctgcattgaagaaggttcttcctcaaggagctgtggaagctgtgctggggcttcttgttggagtgaagaggactggatgtcttcaagggtctctggattttgagtttcgggctctagatggaattgagaaggtccaacttgctcagagggccctggaggctcatctgacttcacccggagttctggaggcaggctaccgggatacggtgtatctgtactggaatattcattctgcaaattctgtttctgacta

SEQ ID NO: 106637 - DNA, 979 bp, Homo sapiens
agccgccaacagacacttcctgtacaggggaggggggagggggccaggcagccgttagacagcacaaccgaacccaacaccggggcccaacggcaggggcttgggcaggagcaaggtccgagggctgccaggtccacgctgcttttatgagctgtaacactcaccgcgaagatctgcagcttcactcctgagcccagcgagaccacgagcccaccgggaggaacaaacaactccagacgcgctgccttaagagctgtaacacttgccgtgaaggtctgcagcttcactcctgagccagcgagaccacgaacccaccagaaggaagaaactccgaacacatctcaacatcagaacggacagactccagacgcaccaccttaagagctgtaacactcaccgcgaggttccgcggcttcattcttgaacaatgaatcctccaatgtacctgactctccctttgcgaagagcatctccgtggcagaaatctgaaaatgcccctggggagacacatgcacaagacagttcgtgagccacacatctccccacaccaagctcctccatacaagacctcggactgcatcacgtaaatgctttttcaggggcaaaatctagagaatctgaaacgagctatcagcttcccagtttgcacaattcatcaagaaattatgcggggtcactggcacaaatgatgaggcatctcctggaagcttaacttcttatccatcccatctcttggacagatgatgccagttaattaatttgaatagaagactcactggtggcacctgcagctgcggcgttttccccaagctggtctgtggagaagcctgggacagaaagaagcagccagactccagaatcccccattttaatagctattctatgctatgtccccgtcttattcctggcaacttacctctcagctcgtgcactgtgacattacagcaagaagtactaatataaatgacacaaaagaaaa

SEQ ID NO: 106638 - DNA, 401 bp, Homo sapiens
ttttattttgatttttgaaaacttaattaaattttatgaaattaaaattcataattctagcattcaatgaccacctcattgccaatgcaaagaataagcatcactgtttgtctgagggctagacatagatacaaatttaagagtaatgtgtaatgtgatttatttaatccttttctcatttgcccagagaagactcactggtggcacctgcagctgcggcgttttccccaagctggtctgtggagaagcctgggacagaaagaagcagccagactccagaatcccccattttaatagctattctatgctatgtccccgtcttattcctggcaacttacctctcagctcgtgcactgtgacattacagcaagaagtactaatataaatgacacaaaagaaaa

SEQ ID NO: 106639 - DNA, 81 bp, Homo sapiens
gatcctgaggctttgatgctattttcttaatccagctggtctgtggagaagcctgggacagaaagaagcagccagactcca

SEQ ID NO: 106640 - DNA, 440 bp, Homo sapiens
ctccagcacagggttaataccaacgagtttccacctccagctgctcctagagtggccacagcatgagccatctggtgggggacctagccgccaacagacacttcctgtacaggggaggggggagggggccaggcagccgttagacagcacaaccgaacccaacaccggggcccaacggcaggggcttgggcaggagcaaggtccgagggctgccaggtaagtcacagggccactcatccctaaggccacaacgcaagggagcaataaaggccacagggaggccaagaccttaaggggagccaggccgccgcgtcccctaggcagcgctcagcggggaaggagttggaggtgtcactatggggcctcaagccccaagatgtacaaagttctaagaaaaaaccccaaagtttccttcaaaagcaacataagaaaaagttaaa

SEQ ID NO: 106641 - DNA, 252 bp, Homo sapiens
ctggtgaaggggtacagagtactacaggacaccagcgtgaagattaaagggaaagtgtttcagactagaatactccctgtctttttctgtataaaatagaaaacattttgctaacattagtaggattatagttacttttcgtatcgttctcttcgaacctgcctaacattgcagagcaagtagggtgagttggaaagatttttcaggttctcatattgactattttgcttttcatttttattcctttctcct

SEQ ID NO: 106642 - DNA, 715 bp, Homo sapiens
ctgtgccagcgtgccccctgctggtgactggggcaactgcagggttctcttgcttccattagtggccagcggcccctgctggcggcggggcaccgcagggtcctcttgcacacagtatagtggcggcatgccgcctgctggcagctggagacattgcagggctctcttgctcatagtatagtgacaggacgcccgcctgctggcagctggggacactgccggccactcttgctccaagtgtagtggctgttggctcccctgctggcagctggggacactgccgggccctcttgcttgcagtttactgggggcacgcccccttctggccgcttggggcactacaggatgctcttgctcacagtgtagtggcagctcgccgcctgctggcaaccagggtactgcagggttctcttgctcatggtgtggtgcccgtccaccacctgctggcagctaaggacactgcagggccctcttgctcagagtgtagtcgtcgtacaccccctgctggcagctggggacgctgccgggacttttcctggcactgtcgtggcagcacactacctgcaggcagatggggactatgcagggacctcttgttcagggtgtgagggctggcacgccctactggccgcctcctgcaccacttaaagtcggagcgccagttaagcaccatcagttctggaaattgaaactgaaatggagctattactgagga

SEQ ID NO: 106643 - DNA, 513 bp, Homo sapiens
acgtcactcacactaatgttatctgtgtggatgccaccaggaccacagatgagattgtagagtgtaagtcagcattgacactaataatgttcttatataaactatctggtctataaggcagttggtgtgacattttcagacattagagaatagataaatgtgtattacagctttcactggcatggtgggactttcccgcaatggatagaacacacattgtagtagtcagtggtccagaaagctacccctgttttgatatctttgtagtattgagggcagtgatgtcaaacagtgaataaagttatatatctatgtggtgatcttattttaacctcaatattattttagtgatttgtaagtcagaatatttgaaatcaaccttgctagaaaatccaggaagcatggtcctcaaaaatatatatatggcactgagtctcagttcaaagatttggcagtttgattggggaggggttgtatccttgaaatacagtgttgtttctagtgactagaaat

SEQ ID NO: 106644 - DNA, 378 bp, Homo sapiens
cttaaaagaaagagaaataataatccaatgacggaaataaaatggaattataaaaaatattcaattaactcaaagggaaaagagcaaaaacggagcaaagaatagatgggacaaatagaagctggtagtaagatggcaaatttaaactaaggaacgcagttcaaagccagaaattgtaagattggattaaaaaaagcaagtctcaactataagctatattcaagaaactatatatacacacatatatatatgaaaccatgtatatacatatatatgtatatatgatttattgagtgatactgataggttaaaagtggtggaaaaagaaataccacacaaacacttattaaaagaaagctagaatggctatattcatgt

SEQ ID NO: 106645 - DNA, 108 bp, Homo sapiens
tggggtctggcatacgtggagttctgtaattatgtccaagaagaggtgacatcagaatgttctttcttctgtaactacaaatacctcatgagagaagatgtttttaaa

SEQ ID NO: 106646 - DNA, 752 bp, Homo sapiens
gaagagtttaaagggaaagacacattagttgtgtagcagatgggtctgagattgattgaccgattgagatagggtcttgctctgtcacccaggctgcagtgcagtggtgccatccctttaaactcttcggtacttcctgatatagtccaaactctttgacataacgttttagtctcaatctggcttcagccttcctctctttacattccctgtctcctactttgctgttcagcaacatcaaaccctgtgtgcttttccatagactgtactatttctactatatctggaatttcacccccattcacctactcacccaaacaaaacaactggtcaatttttactcatccttcacctcagttgtcaccactctcagggagctcccttaaataagatatgcctccttggtgttatcataataccctctgcatatttttaccttgtggtattttaattatctgtttatatatctaattcttccaccatgctctgaattttttgagtatatggtatatacttagtacgatgcttgctatataacaggaacacagtgaatatttgaatgaatgaataatcttggctaccaatttgctgtgtttccttgtccctttctgcatatgtggctttgtcttttaagttctttataaaagatgaattgagataaattgctaaagctccttctaattctgaaataacttaattcttttttttttttcttcgagacggagtctcgctctgtcgcccagactggagtg

SEQ ID NO: 106647 - DNA, 877 bp, Homo sapiens
actcctgagctttggggagggagacagtggccaagtagcaggcagaataagatcatcactcatgtcctgaatcaatcacactttccttctcggattgtgtatatgctctgccacttcctacatattacatcctgagtttttaagtaaagtggatcttagccagatttgagtctaatggctgattcatcggcatagttcttggcgttaacatctcagtgtcctctttagttctctttgaggattcatgtcattgagggcctttgtgcctccacttgtctcagtatgaggaagaactttggtgtgagggcggagctatgtgaagggttgctgggttgggggattagttcatatggtccccatgccatctatttacttttggagagaggggactttgagtgggtgggtatggatagatgttcctcaaggaaaccctgctggctaatgggcactacatctgtgtattactgtgattctctctgtaagctccccatgtggccaaggacccccctcctaccagggcacttcctgccacctcattgcactggtctcaaccattcagcctgctgctgctgcaccatgttgggctgcggtaggatagggaaggggttctgttgattgctaaatgttgcctaactttatttccctctcccacatttcatgcaagggagtggacctaacacatgacttgcattctcttcctatgttcagaaactccagggcttgcccacgtgtatgtatgagtgaccaatggagcttggaattctttatctatatgatctgtccgaaaatgagatcttttgtactggaatttgtgatgtagttgatcattcagagccaaacgcatataccaataaagacaagactgtcataaaaaaaa

SEQ ID NO: 106648 - DNA, 531 bp, Homo sapiens
ttccccctgcacagatctccccggcccacaaaatacttaaaaagtaaccggactctttgttcagggctcaatctttttggatgttaatctgactgggccggtgcacctaaataataaataatatatatcctcctcgacctttggtctctctgattcctaaattatcctgctgcaccaggacttataggagcagaaatcagaagactttactccacacacttcaggtggacatgtggacaaagccatcggagaacatgacaaaaatacagcaagagcagagacaagatcagatcatcctgggggcagatgctgggctctgaccaatttgagagagaaaaggaaaaagaacccagctacaagatgcacaagtagcagccacagccaccaacatcagcagagcaattggaggccaggaagacaaggacacttctgaagagactgaaaaaagcagaagacagtccaagtcactgcaaggttccaagatggggtttctgagaaagaccaaattagttatagagcactagctcccaa

SEQ ID NO: 106649 - DNA, 407 bp, Homo sapiens
tacatcctgataaatgtgtcataagttgaaagtatcttataagtcgaaaatgcatttactacagcctaaccccactgaacattgtagcttaggctagcctaccttaaaacgtgatcaggacacttccctcagcctacatttgggcaaaatcacctaacacgaagcctattttataatagagcattgaatagctcaaataatttattgaatactgtacattacatagaatttgtgacagttttacaccatcattatgtcaaaaaatcattaagttgagccaccataactcagggactgtctgtatttatatttttacttcacactaagctttgaaactgaaatttttgctcctcagcagatggggtttctgagaaagaccaaattagttatagagcactagctcccaa

SEQ ID NO: 106650 - DNA, 324 bp, Homo sapiens
cagcagagggagacagattcgggcttgggactcctgtctctttgggagtgaactttcaacataaagcttgtctcaaaaacaaaaatccagtgacaactcaatgtattggctcttagcacattggatagtaagcactgttttctcaataacaagaagacctgaaaaaaacccagagttctgctttccaaataaggtttagtgaagctaagtggacatattttcattgcttaattcttccagcagtcaagaaaaacttgatcactttgccatttgaggcctttgacaaaaagagcctgcacctaaagatattctttggggtgtctg

SEQ ID NO: 106651 - DNA, 260 bp, Homo sapiens
gaacatgttaaatatacaatatatatttctttattttgcccttattccacagcttagttttttagtgactgggtatattcatgtgtgtgtatagtgtgagtgcatgtgtgtgcaattgagtgaagtgggaaagtagtgcttctatagtttgatcagggctttacacaaaaaagccacagagattttcccttaaatttgggaaaagacaaagatacccccatgattgccactgtttaatacagtactgaaggaccttttct

SEQ ID NO: 106652 - DNA, 816 bp, Homo sapiens
tcccgagtagctgggactacaggcgcctgccaccacgcccggctaatttttttgtatttttagtagagatggagtttcacagtgttagccaggatggcctcgatctcctgacctcgtgatccacccgcctcggcctcccaaagtgctgggattacaggcgtgagccaccgtgccccgcgtgtttttttctttagctgattgacaggtccccttcaaagttacaaaaaaaagtgctaatttttgctgttaaattctggttgttatttaattgacagaagtctcttgatgcacgaataaatatctctacatctagcctttgttaaaaataaaaattaatattctacaaacacctacatatactagagaggggtgaaacactgcagctaattcctttataatactttcagatgattgcattaagcctttcatgttatgtggcattgttaatttttcctagatacccatccacttaagggccagagaaatccttattcatttaactctggtgggcatttatgtaacatacccaaataaaaacgttattaaacagccacaatcgcattcagtcaacttggcactgaatgtagcttctaaaatcagttctctaccctacgaatggaatgttctaccaagaaagagaagcatcaccatgtcatcttgtgttctacaccactatagagagttacagttgcccccaaacacgaatgctattcccaaataaaatagaatcatgctttgggaggccaaggcgggccgatcacgaggtcaggagatcgagaccatcctggctaacacggtgaaaccccgtctctacta

SEQ ID NO: 106653 - DNA, 809 bp, Homo sapiens
  misc_feature (787)..(787): n is a, c, g, or t
  misc_feature (809)..(809): n is a, c, g, or t
tcccgagtagctgggactacaggcgcctgccaccacgcccggctaatttttttgtatttttagtagagatggagtttcacagtgttagccaggatggcctcgatctcctgacctcgtgatccacccgcctcggcctcccaaagtgctgggattacaggcgtgagccaccgtgccccgcgtgtttttttctttagctgattgacaggtccccttcaaagttacaaaaaaaagtgctaatttttgctgttaaattctggttgttatttaattgacagaagtctcttgatgcacgaataaatatctctacatctagcctttgttaaaaataaaaattaatattctacaaacacctacatatactagagaggggtgaaacactgcagctaattcctttataatactttcagatgattgcattaagcctttcatgttatgtggcattgttaatttttcctagatacccatccacttaagggccagagaaatccttattcatttaactctggtgggcatttatgtaacatacccaaataaaaacgttattaaacagccacaatcgcattcagtcaacttggcactgaatgtagcttctaaaatcagttctctaccctacgaatggaatgttctaccaagaaagagaagcatcaccatgtcatcttgtgttctacaccactatagagagttacagttgcccccaaacacgaatgctattcccaaagtgctgggattacaggcgtgagccaccgtgccccgcgtgtttttttctttagctgattgacagtccccntcaaagttacaaaaaaaagcgn

SEQ ID NO: 106654 - DNA, 622 bp, Homo sapiens
tgatggattgcttgtgacttttaagagaaaggcgtcaaggttgcttaaattgttaacagtttagtatgctaaaaatacttcttgctactttctttccctgaaaagagataacaacaaaaaacctgataatatgaagtgctgactagaatacagagcaattagaattctcatacattgctggtagaaatataaaatggtacagctgctttgaaaaatagtttgacaatttcttgcaacatgattcagcaatccccttcctagatatttacctaagagaaaggaaaacatatgtccacacaaaaactttaggcaactctttatagtggctttattcataatagctccaaactggaaacaacccaagtgtctttcagctggtaaatggaaaaacagactgtaatacatccacagagtggaatattactcagcaataaaacaagctactgttacatgtaacaacatgggtgaatatcagatacttcatgttaaatgaaggaggtgactcaaagggttaccagctgtgtgattccacttatatgacattctggaaaaggcagaatacatacatggaaaaagcaaaatacaattttccatcctatgggatggaacatcagcatcactg

SEQ ID NO: 106655 - DNA, 191 bp, Homo sapiens
tgtcttctagaatgttacaaattgaatgtgaaattttaaaaatggctctctctaatacaaatgaaaactttataaataattccattttattccttcaaaacagacacaataatacactgtcaagttaggtggtccaccctgccaaattttcaactgctattcaaagtttcttctgtaacaaaaagataaac

SEQ ID NO: 106656 - DNA, 405 bp, Homo sapiens
tgctgggataattggcaagccacatgtaaaagaataaaactgaatcctcatctctcaccttatacagaaatcaacataagatggatcaaagacttaaatctaaggtctgaaaccataaacattctagaagataacattggaaaacgcttctacacattggcttaggcaaacagttcatgaccaagaacccaaaagtaaatgcaacagaaacaaagataaatagatgggactcaattaaactaaaagcctcctgcacagcataggaaataatcagcagagtgaacagatcacccacagagtgggagaaaattttcgcaaactgcatctgacaaaggactaatgtccagaatctacagggaactctaatcagcaagaaaaaataatcccatcaaaaagtgtgccaag

SEQ ID NO: 106657 - DNA, 384 bp, Homo sapiens
ttggcctcccaaagtgctgggattataggcgtgggccaccgcacctggtctcactacgttacattcttaatatggttttgttagcactctctgtgccaaaatcctattttcccctcttttcccttaggcagggcatgcacagagcagatctatttcctaccaaccttttttcccatggcacacacagctgccccttggcaataagatgcagtccctgactaatgcagcattgctctctgaagattttaatccagctttcttagtctcacctagctttatgaaaaatgagaggctagatattttgctgtttcttactaagatttgcattgctcatactataggtgccctgtgtaattgctctaacattttctcttcacacaagat

SEQ ID NO: 106658 - DNA, 832 bp, Homo sapiens
gctgaagtcaaggtgttggctgacacacagtcctctcggtcctcagtccagtgtgggtttccctgggctgaagtcaaggtgttggctgacacacagtcctctcggtcctcagtccagtgtgggtttccctgggctgaagtcaaggtgttggctgacacgcagtcctctcggtcctcagtccagtgtgggtttccctgggctgaagtcaaggtgttggctgacacgcagtcctctcggtcctcagtccagtgtgggtttccctgagctgaagtcaaggtgttggctgacacacagtcctctcggtcctcagtccagtgtgggtttccctgggctgaagtcaaggtgttggccagggctttgctttttgcaggccctacaggaagatgttctcttgctcgttgggaggttggcagaattccgttcttgctggtggtaggactggcagtagcaccttgctgggtgcaagccgagcctttcccggcttctccaggccgcctgcgttgttcacggagggcccttgcccatctgcagagccagcactggcgggtgaagtccctctcatgctttgactctccttctgtctcatctgtagctcagccaggaaaggcggttaaggacttatgtagttaattggccccacccagataatcccggataatctcccacctcgagatccgtgcaccttaatcctgtctgcagagtcccatgctagcaactcagcagcaaacagcccctgcactgtgccctgcaggaacatggctgctggtggcaggccggcccagacagacagactaccacctgagccaaggaacctccactcaggtggccgagg

SEQ ID NO: 106659 - DNA, 386 bp, Homo sapiens
ggggctttcttttttaggaataaatagtttatttacaaatcattctgatttcttattgaagttagtggaaaattgaacacttattcatgctacaaaattaccagtgatagttactaccattatatgtcctagtctccaaatacctagtacttacctgtaatcaagaaatgatttgaagagctaagtatgttatagttcccaggatgctgcttatggttttctggctgctctttaactttaatgaatattcaatggcttattattattccaaatgagagagaacaacattgatttctttattgtaatgttctcaaggtcaatctacattataaatgagtaggcaggctggatacttgggaaaatttgaagatgccacatgtccccat

SEQ ID NO: 106660 - DNA, 236 bp, Homo sapiens
  misc_feature (35)..(36): n is a, c, g, or t
gattatagccttaccctcggagccttagtttcggnngccttaacctagagtcattggctcaactcagtcactatgagacacctggaaaactgccccaccttgtggctccactgcctgatgactgaactgacctccaggcctgactctggtctcccctgtgttatttctgctgaagtacccagttccaggccaggctttctaatacccaaagggcttaaggacaatgggaagttcca

SEQ ID NO: 106661 - DNA, 80 bp, Homo sapiens
ccttttaatccgttttgaggctggagaatggcgtgctcttcgtctgccctcattctgggaaactggaggacacttctaag

SEQ ID NO: 106662 - DNA, 384 bp, Homo sapiens
tggtgacagctgctcccccttcacctgagttggggttgggggaaagggagggcgagcccttgggataccgtttgatgccctgtccaatgtgaggactgcctgggcagggtctgcccctccaacccctctctgccctggaagccctacactccacttggagtctggatggacgcatgggcctgggaccctgaagcagcctcactctaacttcgtgttcacactccatgtgtgaatggagttcaggctgggagacaggcagaggcctaggagaactaaaacagtgtttgtggtggagcggcaggacccgccagagccacagatatatggtgatccaggaggctcaaagagaagccaagtcagctttgttgtgatttgatttttttt

SEQ ID NO: 106663 - DNA, 552 bp, Homo sapiens
ctgagttatccagaaaggctggaaatgaagtgttgtagataaccagcttactttttaaggataaggttttaatttattgaaaccatctgagaatgttattcttcttagttcataagggtagcatgctctatacatagcacaagaaagagcaccaaattggccattaagcccaaacaacaaattgggccaacatctaattataacttattggccaacaaacccaaactgggataactagcctgtaattacagaggataaaaatcaatctctaacctatagaggaatttggcaacacctagcaacacattctaaaatggtcatgaaattcaaagactagtacatattacatgagacaaaaaagacatgacaaccaaatcacttaatcctatatagaattattttcttataaaggacattaaagcaattggcaaaatctggataagtctgattaggtaacagtactgtatcaatatataatttcctaatttggataactataaactgtggttacataaaagaatgctctcattttcagaaaatacagactaagca

SEQ ID NO: 106664 - DNA, 1041 bp, Homo sapiens
aggtttttgagatttatttgcattgatatatatagctctcagtcatttacctaactgctaactaatatttcattatatgaataagctgtaatttatatatacattctccaactgatgcacattaaagttgtttctaacttttgactctcacacataattctgctaagaatatcattgtataatctctttgtttatatgtttgaaagctgctataaggggctgaattgcgtattctccaaaatcctgtcagcttcaaaattctatgcttccatatcgtatctattcctcggctcacatgaatccaaattagggtttcttaaaacagtagaagtgttcaatgataattctaataaaacatacacagaactatttttttggatacactgattgctattcagaattatagcggaaagatataaatataagacacagaatctgctctcagtgtttcttactttattggtatgccaacagagtatttcacagttcattgaaaatcgattaaaataattactaggtcattagtgtggactttgagtatgagtgtaaagacctcactcactaaataattcatggcagtcagcaagttaagtcctgttagcaagtattgattcagtaatgtaatactacctagtccaaactacgtaattttcctaatagaaataaactcctttaaatgtcaaagcaccatctagtcccagcctcctcccgaaaagcttaaatttgcatagccagtaggtaacaaaactggaactaaaacagaattcctgctaattgtttttccatgctgattttttcccttcccctcctccacctttgccttcttctttcctgccttcttgagatccaagagggctcaagatcctttggaattattggcttatttcccaaactggtttgaacatagcttttccaaaacctagaattaggaagtttagcaactagatgcaccacgaggagcaagaatatggtttctgttctccagctgaaaatctgtctgctgagaacttactactgtaccagccccagacttcaagagaa

SEQ ID NO: 106665 - DNA, 376 bp, Homo sapiens
tgtacacctgcttccaggtgttactgtaaagttcggccactaaatacgagaccagcattctacagttcctgaactgggtaacatgtaataggaattcagggttaccattttcttctcagatcataagaagttttagaaatcttattttagacactgtgatggcaattcacttttgaaaagaacaagaaacctagtcttttgcaggattaagaactctgtaaatggagtgtatgcacttgaagggagtagacttgggggttcttaatcttttttgtgccatggacccctttggcaatctagtgaaggctagggacccctttatagagtataacattttaaaatatatgaaataaaatatcagtttataaagaaagct

SEQ ID NO: 106666 - DNA, 744 bp, Homo sapiens
ccagttacatgatacttcttaagtgaaagtgtagttagtaatgtgtgtgtcctgttggccataacacaatagtattgtttaaagaatgttaattgagtcacagaagatgtactgatcattttatccatgctcaatatatgataggcagatacattattatagcccaacttttggagatcaaagtgaattattgatgggaagactgtctttcaaagtgatactttcccttaataaagtagacagcaaaggaacatgctttaaaataataaaagccacttatgacaaatccacacctaatatcatactgaatgggaaaaagctggaagcattccccttgagaactggaacaagacaaggatgcccactctctgcactcatattcaagatattactaattgtcctagtctgagaaatcaggcaagagaaagaaataaaaggcatccaagtagaaaaagaagtcaaactatttttcttcactgacaatatgattctattcctagaaaaccctaaagactctaccaaaaggttccagaactgataaatgacttcagtaaagtttcggggtacaaaatcaaggtacaaaaatcattagcatttctatacaccaatgtgttcaagctgagagccaaatcaagaacaaaatctcacctacaatagccacacatacagtatccctaggaatacatctaaccaaggaggtgaaagatctctacaaggagaactaaaaaatattgcagaaagaaa

SEQ ID NO: 106667 - DNA, 144 bp, Homo sapiens
gatccagtgacattgtgagtgaagacgcaaacaggttttgactcctgcatggccgatgacctttttctgtaggcttaccagaaaagtacattccaacagttctttgaggatttaaactagagcagcaaataaagacaaaagatt

SEQ ID NO: 106668 - DNA, 454 bp, Homo sapiens
ggcatttcagctcaactattatgtgctttgagtttgatgtatttttttttagtagtgttttattgttgtaaaccttgagacaggtctttatttttaagccatttttgaatggactacttggcagttttgtaagtaggtgaatcttcctgctttcaatgtggaatttttgaaattgcattagaaaaaacatgaaataagatacacttaatttgcctttgaagatagaatacaaattttgagaacatgtaattaacatctaattggtacacattaacatgagcattatagactttagttactgaagtttaatagcattatatgtattgcagatagaaatttcataagcattttcacagtgactaaacggacttatttttagaggttcttagcttctgcataattggaggctgtatgactaaggcaacattttgccaagtgcaggtaaagtcaagcc

SEQ ID NO: 106669 - DNA, 783 bp, Homo sapiens
cacaatgcctcacacctgtaatcccagcaatttgcaaggccaaggtgagtggatcacttgaggtcaggagttcaagaccagcctggccaacatggtgaaaccctatatctactaaaaatacaaaaattagctgggtgtggtggagggtgcctgtaatcccagctactcaggaggctaaggcgggagaatcgcttgaagctgggaggcaaaagttgtagtgagctgagatcaccccattgcattccagcctgggtaagagagagagactctgtctcaaaaataaataaataaatttcaaataaataaataaagtactaaatgaaaagtaatatacaaagaacatcgaaaatctagaattcttaacacacagagaaaatacccttcaaaactgaggagaaataaactctttcaagcccgtgtggtggcacatacctacagtcccagctacttgggaggccaagacagcctagaaaacatagcaacacccagtctcttaaaaaataaaaataaaaaagcttttcaaacaaaagctgggacatttcattgctatcatacccggtgacaagaaatattaaaggaagtttttcaagcaggcttatgataagcccacatggttagaaaatgaccctctttgtcaacagccatgtgagtaacccacttagaagtcgatcctccagtcccaaccaagcctctggaagattacagtgccaacttagatttttattataacctcatgagggatgctataccagaaccacccagctaagccactttcaaattcgt

SEQ ID NO: 106670 - DNA, 1478 bp, Homo sapiens
ctctcttctgcggtcctgttcaaagcttaagtcagacagtgtcacttcactcgtctgtttaaaacctttcaatggcccccatttcacgtagaccaaagtccaacgtatttacctggcctactgatcttgctcctagctacctctgacctcatctcctgtcaatttccctctcattctgttccaccatcctgactgccttgacttcctcaacagaacaagcctgctcctgcctcagggcctctgtccttattcttcctcttcccaggggtgtgctggtaaaatatttaacaaatagttctccgggacgggggagaaaaccctcatttgtagcatttgcaggtatctatgtgtaaatactctcatcaaggctatttttgagccactaatttgccttcactgaatacagagtttgggaagagatgcatgccatcaggaacaaatgcaagccagcaccagcacaccactgcctcttcctgcaactcttgtccatacacaacctcatggctggctggctcacttcctgcaggtctctcctcaaatatcatctgatgagagacacattccctgactatgctttctaaaataggccatatgcccccacattcataccccatctgctgtcattctttattctttttataagtgcattattttcatagcacttatcactacctgttgtatattaatcaatgatcttttcccattagaatgtaagtttcatgaacaggtacttgttttaatactgtatctccagtcctaatgtgtaacaggagcccaataaatgtttgctttcaaatggagaggttaagtaacctgctcaaatcacacagctattaagtggcagaacaggttttcaagcaatgcatctggtggttttaactaagtcgagatagtttttattcctaatgcctaaatcagggcctaggtagtgagctgtgggcacatattaagtattggttaaactaaaaataataagcaaaatggacattatctataaaagcttttgtggaaatggctagagctagggtaaggaaacaaatttggttccccatacctgccctccaagaaaataaagctgtcaaggaaaatctgggctaagagtaggatatgagggatgatggataaggcatgagacatgagaaataagggggattaaattattattactattatacaaatgatgcctgagtagatttttaaaatgattaaatacccaatgatgtaaaaaacatttataaaataggaaagtaagactgactcaaccataatttgttgagtcaacccaaaaatctatttggttattttcaaacagaaatagcctacagatgatatctgagattgttccaaactttttctatgaatatgtatactttttttacataattaacataatactgtatattaatttgttacctgctttttcaattaacaatatatcataagcatctatgccaataaacacaattctgcatatttca

SEQ ID NO: 106671 - DNA, 1025 bp, Homo sapiens
atgtcagggaactgaaacagcccagcctaaagaccagggcttgtaggcattgccttctgtaaaagggactataaaactccacccactggtccaggaacttgcgtgtgcaacttgtcctctctccaggatcttggacagagagatggggtatagggcatagtaaatgatgtgcaggataggaaaaccctagacctgcatcacacaaagggtgtatggtacaaacttttatactctatcttgtaccagaaacctcaaataaagagcataaatactggcctaggataatagaaatctttcaggctctagcaggaacaaacataaagtccttacctacacaaagccctaactcttccactaaccagccacaccagatgcctgggggccaaggaggaggactcttaagtacggttgcacttacactcaaatagaaaataaaatacagacaaaccacagagggaaacatgccgctgcgcaggaaagatagcactcacaaaactagaaataacaaaactgcaggagaaatgcatcagacagacccgaaccgagggacaaaatacctgaccagccctcctcaaaactgccaagatggtcccaaaacaagggaagtctaagaaacagtccagagaagacgaaggagactaaatgcgaggcgctgttctggatgggatctttgtacaggaaagagacgttagggaagaactagtgaaatctgaatacactgaatatagtgtagttactagtgaaatctgaatatagtgtagttaaaagtaatgcacatggccaggtgccgtggctcacgcctataatcccgtactttgagaggccgaggcgggcggatccctcgaggtcgggaattcaagaccagcttggcctacaaaaccctcccatccctactaaaaatacaaaaattagccgggtgtggtggtaggtgcctttgatcccagctacttgggaggctgaggttacagtgagttgagatctcaccactgccctccagcttgggcaacagagcgagactttgtctc

SEQ ID NO: 106672 - DNA, 706 bp, Homo sapiens
gtttaaatcactttattttattaagaattctgactaaatttttcatgaaggagaaggttgaggttttaattatttataagtttttggattatttgtgaatctgaaggccaagtttttcttataaatttaagatatttcagtttcaaaaactatcctgtatttgagatacgtaaactcatttaataaacctaagtacattgggaaagtgagacagtggggaaaaaaagaaaaaagaaaaaacaaaacctaagtacagcacagattggaaaccccaggagagcatagactgaattcacactcaagcttagctgctcaaatcctgaaactgtcattggtccactgaaggtacaggagtcagaggaccttaattcataaggcaaaggattgtatatatagatataaggagtttgacattttaagaagagtgaattgagcagaaattctccagaagaacttaaagagaacagagtggactcttccccattctaccggttctggccccaaagttataaagggcttggatacaaaggtcagacttgttatcttgttgatgctcagattttctaaataatgaaatgtgtttttgcctttatgacaacaggaaatgctcagaagccttcagacttggcataatttgtcataagaatgtagctattccattgattttgttgttgtcaaatttgtgcattctccattgtaccttttt

SEQ ID NO: 106673 - DNA, 142 bp, Homo sapiens
gagaaatgacattgagatcagttctttcccatgttcagattgccgctaggatgacaggaaatgaggcactcagtgactctcctttcttgtgggtaacaagggatcattacagtctaaatacactaaatggttcccaagtcat

SEQ ID NO: 106674 - DNA, 248 bp, Homo sapiens
ccggagtttgctgcaagattttcacttttaccttagattaaataagagactttttatactgtcgtgcttcaacttgtatttttggtggtgatgattttttctttgttgcttactaagctgatattactcacttgatattgggtgacagcttgagttacaagtttaatactagtaagtaagcattttcttttccttttttttttttttttttggggtttttttttttttttttaataattttttttttt

SEQ ID NO: 106675 - DNA, 511 bp, Homo sapiens
cccttgctacctttcctgaactattctgctagattcagacctcagaaacattgtatcaggaaatacagaaatgttctttcaaaatgagtgtatgggaatatgggaatgcctaataaaatctgtcttcattgattcgttagcaaaaaatcatataaatccatagcttgtgattgcaagcagatatatttcagatcctttctgtgtttgttttttgctttcttgatctatcacaattggagaaaacttaaaatttctcaatggtattgtatttttgccaatttcttattctgctttatgtttctcgttgctatattattgggctaaaatggtccataattacttaagaatcattgtgaaatatattgcttaatgacacaagtaaatctttttcactgtttgtaatgtctttgctcttaattctactttgcctaagattaatatggttattcctgtttggttttatatgtatttattgatttattttgaagatggagtctcgttctgtcgccca

SEQ ID NO: 106676 - DNA, 165 bp, Homo sapiens
gaggaaactgaggcacgggcagtggttcatcctggagtcttagtgccctcatctgtgaacaagggagactggaagccacaggaagccaggaaggatcgcctgtccagtccctgtgtgatggtccagtcacttgtgtgggcgcttggtggctttggaggagcaggt

SEQ ID NO: 106677 - DNA, 158 bp, Homo sapiens
tggggtcaggctcaggccacccacccagacctccggtccagtggcatccaccatgcagatccccagtgccagaacctgcctgcctgggcattgaaggggagctgggcctctaaaggcagaggaactaccagggtcgtgcctgcctccactcacagggg

SEQ ID NO: 106678 - DNA, 350 bp, Homo sapiens
gtgcttttcatattataaatatttgattaatactctttcccttttgaagaagatctacagtttatttcacttctttccgtaaatccatgtagagatccatgattatatgttgaatatatgcctgacagcatgattgctttttctaagaatatgttttccttttaagtactggtacattccaaactacaggttgattgtcactactcaactgaatgctttgggagaacagaatcattcatgccaagcactgatattttccaaattagtctgtggaataaccactaggtataagctttattttagttttttagaattgttttaatatactcacccataatattattagatga

SEQ ID NO: 106679 - DNA, 296 bp, Homo sapiens
tttaaaaaaaaagaaaaataaaataaataaaagagtgcctatctcggatggtgggattatgttatgaggaaattttatttttgctttaaaaacattaattcatttattttactctgagcattattatttttataaacagaagatgtagagttcaagataagaaccatactttcaggatttctagatttatgtgacacgcatgtgtgtgcacacacaacatatggtctctctataattagctattattattaagataatttttcctataatcctgcagctccttgcctagtgctttg

SEQ ID NO: 106680 - DNA, 378 bp, Homo sapiens
cccctgccctcataggttttagattggggcatgtcatagagcaagagtctttctcctccatctgttaaggtcggattatggtgaatacaccattaccaggagactaccattgccacgcagaggaataggttgatatatttttaattgtgtactagggtagatggcatcagaaactgtataacttcacatctgaagcaccccatattttatcctgtgtgtattaactttaagtcactggatattttcttgtattctcagtaaaatgatatttattggctagttatatgccagttttgtggtgttctccctaaagaacacctgttattcttttgaagaacacagggttccagtgatctggaacccagccttgagcactgg

SEQ ID NO: 106681 - DNA, 89 bp, Homo sapiens
gcctgcgatcaccactccgggatcctgccgcagtgcttggggctgtaaccttgaactttcccagcgcggtgacacattctccccgctct

SEQ ID NO: 106682 - DNA, 503 bp, Homo sapiens
actacagctccatgtccctcacctccccagtccccagcctcccaaaaaaacataaagctctgtggaaacacagacacagcaaacagagcacttccacccacatcttaaatctctttgtggctttctttggctttacattagaaatataaagtattagaaacactgacctaaacaagcaaacaaggcccatgtaagtgattcagacccgtgctgtgccttgcttgtttggttctcagacaaccacaaaaattctgaaaacgcactattttaaaatgctcccaaatccatttctgacgagtgaaaattccgccctgaataacgctgagcgcagcatgacgtcagcagcggaagtgggtgggtcaacgacccgggaccctgatggcgagcgccttctgcaacaaaacagctagatctttcctgcacagccagagctccccagcttccagaagcttctctggatgttacacaacaggaagtcctcccgtgggatctgtggggaggag

SEQ ID NO: 106683 - DNA, 250 bp, Homo sapiens
gaataaaacataggagaaaatattcatgaccttgggttaggcaaagattcttagatacaacaccaaaagcatgacccataatagaaaaaaatgaataaactgaacttcataaaaaatgaaaaaaatttgcatttcaaattattccattgaggaaatgagaagacaagccacagactgggagaaaatatttgcaaatcatatatctgataaaggacttgtatccagaatacattgagaactcttacaactc

SEQ ID NO: 106684 - DNA, 319 bp, Homo sapiens
aggagcccacctggagtgtggctgtgacctccagctgcttcctactgtagctaccagatcatgagcttgtgaaacacccctctgatcccatccttcccctgctcaaaagcctatcatggctcccatggtctacagaacaaaacaaacccctcagctggatagacaagccccttccccatcaggccgtcctttccttccaggctggtctccctgaattcactccccataccctaagtccggctcctcacgccatgtgcctgacacttttcccacctccatgcctttccctctgcctggaatatcctactttcgcctcact

SEQ ID NO: 106685 - DNA, 750 bp, Homo sapiens
cctttttgtttatgagtacaaacacaccattgatgtttataagaataattattttctcccctgaatgttaactagccacaaaagctggtgtacacatgtgatagtgtttttcacggagtttaaagaatgttggtctttgatgttctgcccttgaatggaaatgagtctgtattacaaaatcactagtgaggaaaatggggaacttctagacaagcacctgagaagcattattagaattcctgagcattaaaatccaacagatgcatttttcatgacgttaaaaaaaactccactttctggtagtagcccatgtcttatgctacgaaaatgaatgagattaagtagaatatgttaaaatcatattaagtagaaatgtcttagtcaaaacgtgactgaaaggaaaagacactaatacaaggtagcggtagcaaaaaaaaattaataaatagaaaaaattttaaataagctgtaaggaaaaaggggtgtctcatgggaaaagggactaggaacaagaatctaaaaggaggcccttttggtctttctcagaccataaaatctctcatctctacttctttgcatgacttgcattttttttttctttctctcagcctggcttgctcagtttgcctgaccacctggcagaaggtagctacctcatagcattctaggttatgtatcctctttcagttcaactaaagagcccagacagaattagaatctctcagttacaattccagtctcacagaaaag

SEQ ID NO: 106686 - DNA, 265 bp, Homo sapiens
gcacaatgcctggcatacagcaggcatttaataaagatgtgtgaataaacagatgagggaataaatccaacctgcagaaagaactactttacattgcaaagacagtactcatatgtttcagaagttttactgcatacacataaaatccttaccacatgtgacatattctgatttttttattttactgtattgtatgcttattctgtatttttttttttttttttttttttttttttttttttttttttttttttttttttttttt

SEQ ID NO: 106687 - DNA, 458 bp, Homo sapiens
cctgactattcacagagctgttgtgcagtgacagagatctaaatcctcttctctagaattgacccaggatctataaccctaaggaagtattcagtgacaaatctttttcacttgactcccttgattgactgtttcttctttcatctgtttaaaccaaatatactgtatgccaaccatgcacttggcactgtaatgcaaagaagaacatcatatagtgtttgctcacaagtctcattccaaaacattctagaaggcagtacaaaaggaagggttggaagcaaaataaaaaaactttactgtgaaggtggtatttaaaaatgcattttcctatgcaaactatagtcctgttacacaaaagttaaagggtattatgtgggtgtgtaaatacaatagtccccactgtccactgtttcagttacctatggtcaaaaagaaaaaggggaagtacagtataataa

SEQ ID NO: 106688 - DNA, 617 bp, Homo sapiens
gtctctgacagtcaatccaggttttatgttatttcaaaagggttatttttgtcctccttttttaatagcttcaggaaagttaaaggtatcatcttaggtctaacactctagtctttgagagttacggttctttcgtagaacaatttccatgttgttaactgttgtagacttaattgaatcacattttgggaccagatgtatttggggatagaattctttaaatgtatgggacttcatgcttcctgattatgtaatatttcctgtggttgggaatcctagaatgcctgatctattttatctgttcaggtagttttgttattgtaccctcttttgggtcatattctagtatttctcacagggggtatgagaaacagaaagctatatgtagcagctggtcttgagaagtagaagcatcttaactgtcataagagcatagattttttgtttttcacaacagctggaataagttcctgcattataagtataaagggaaccgagatttaatttggagatcatcactgttaaaacgataccagacatttgtcacagtgtcttatttggggaaagtttgctaatatacattttgtctgtgaaaatatagtaaattttaaaatact

SEQ ID NO: 106689 - DNA, 791 bp, Homo sapiens
gccttgttgccgtcccttcgcctccttcaccgccgcagaccccttcaagttctagtatgcgtgaatgcgtctccatccacgttggccaggctggtgtccagattggcaatgtctgctgggagctctactgcctggaacatggcatccagcccgatggccagatgccaagtgacaagaccattgggggaggagatgactccttcaacaccttcagtgagacgggtgctggcaagcatgtgccccgggctgtgtttgtagacttgggaaaccaacaggtccttggtgtaagcttcggcgatgtgcggcactatatgcgcaggcgtctcttcaccactcgtgccacactctctagtcacggcgcagacgcatgatggtcgacaaataaatatgcccgagggcactacaccattggcaaggagatcattgaccttgtgttggaccgaattcgcaagctggctaaccagtgcactggttttcagggcttcttggttttccacagctttggtgggggaactggttctgggttcacctccctgctcatagaacgtctcttagttgattatggcaagaagtccaagctggagttctccaattacccagcgccccaggtttccacagctgtagttgagccctacaactccatcctcaccacccacaccaccctggagcactctgattgtgccttcatggtagacaatgaggccatctgtgacatctgttgtagaaacctcaatatcgagcgcccaacctacactaaccttaaccaccttattagccagattgtgtcctct

SEQ ID NO: 106690 - DNA, 315 bp, Homo sapiens
ccaggatcccaccaggtgcctggttaacttgtctcaaataaatgtatggaatgaaggtgttaaacatagataatgcaaaatatacagttacgtgaagaggaaatctgatgaaggaaaagatgttcaatctcactagtaatcagaagagtgcaaatgtgagataatttttcaactaccaaatgaacaaaggtgaaaaagaatgaaaataccaaagtctgggagactttagggaaatgtaagatctcattggtggcagtgggcactgacataagctttctggaaaacagtttggtaatgcttgttataaatgtaaaa

SEQ ID NO: 106691 - DNA, 232 bp, Homo sapiens
cgtcagagcctcactttgtcatgccagccactgggtggcaggggccagtttcagtgaaggcactcacagccacccttcaaagtccagcctctccttttggcccaagctggccagaaaccgggacctggggtgggtgctggagacaccacagtgcctggctcctcactccacaggaactgctgggcccacctgggctgcactcctcgggaagcaggagcagcagaaactcaga

SEQ ID NO: 106692 - DNA, 487 bp, Homo sapiens
agacagcctttattcaagtaactgaataaacaaaagaattagagagtgtgatgagtttgaataaaaaatatagttcataaaaaccagaaatgtgatagagcatagtggctggaagaaagttacccaagtggcttgggtagtcaatgaagttgactccaacatgcagtagtacttggactgaggccagaaaaattagaaagaggccaggcatagcaactcatgcatataatcccaaccctttgggaggccaaagtggatcactggaggtaacgtcgacctcaagtgagatcgtgtctctaaaaaaaataaataatttatttttaaaattagctgcatgtgggtggcacgtgcctattaatcctagctacttggggaggctgaagtgttgagggccactttgaactcagggagttccagcctgcagtgagctataattacactactgcactccagtctaggcaacagaaggagaccctgtgtctttaaa

SEQ ID NO: 106693 - DNA, 373 bp, Homo sapiens
gtaagcaggtggttgactcccttaccttctgtacaggccagtcttagctggggtgggttgcatttccttgggtgctgcgtgtatgtgtttactggatagcaaactctcggtttgctgtgggttatctagatttcttctctctctcttttttgacacagagtctctctgtcacctagactggagtgcagtggcactatctcactgtaacctctgcctcctgggcccaagcaatcctcgtacctcagcctcccgagtagctaagattacaggtgtgtgctaccatgcccagccaatttttcttatttttagtggagacagcgtttcaccatgttggccaggctggtctcgaactcctgacctcaagtgatccacc

SEQ ID NO: 106694 - DNA, 389 bp, Homo sapiens
tttgagacagagtgttgctcttattgcccaggctggagtaatggcgccatctcggatcctgggaggcggaagcctcccaggttcaagcaattctcctgcctcagcctccagagtagctgggattgattacaggtgcccgccgccaacatgcctggctaattttttgtatttttagtagagatggggtttcatcatgttggccagactgatctcgaactcctggcctcagatgatctgcccacctcagcctcccaaagtgctgggattacaggtgtgatgacatcacttttaatggcaagaaccgcaattagttttgcactaacctaaatactgtgttcctttctccattcagtagctgcaacggccaccattttggaccactgtatagc

SEQ ID NO: 106695 - DNA, 320 bp, Homo sapiens
tttgctggggatgaaattactttgtcttatgacacatggagcagatgctactaattaacacacataaatgtctaaaacagagctttaaaaaaacatatgcatttggaaacagaagtagaaacagcttcaaagagtataagcagaatggcataatacaatgaatgaagagtatgtttttttaagaaagtcaatcagattcgcaagtgaattttataggcctctctctaaataaagtaaggatttgaaggaaaatgtcttgcttttaatttttttgttaacggaaagagggcagcccatatcatataccagcacaagaacca

SEQ ID NO: 106696 - DNA, 318 bp, Homo sapiens
atggttcttttagcccagaggacttccatgagcagaactgaggaaggagataggctgccctttggtcacagactctaacttggaggctcttccagggtcttgtctagggctctgctctggctgagggtggggtggggtgctcaggagccaggagagaaaggtggcgtggacaggcccacagtcagcttgcctgcacccagcattgtcggctgctgccctgaccacctcccccgccccctttggcagcccagagctggggtgcgttaagcactgtgcccccaccgccatggtccatcccccacacctgcctccctgact

SEQ ID NO: 106697 - DNA, 606 bp, Homo sapiens
ggtccctgtccagaaagagttgctgataaggaaaacagttaattcataggctaattcacactacagtgatagagattgatgtcatagtactctattcctcttaggtgtgtttgcatattttaaaagatgctggaagagctgctttatccatgagaaatagacttttaatgctaaaattttaatattgaaatctacgggtggggtatattttaggaaccccatatctgttctctgtgtctctgtgcgtgcattgctttttcattttggctcctagactggggctcagcttgagcttgcacgttgctgctgcctttaaaacaccgctcccttgtcacatgcagaggacgtgatggctgcctgtctgtgttaagtaagaaggaaatggagcccccccccgcatttgcctgccacagctgtggcagcaacctggacctggcactgagagcatgtccctagcttgacctcgctcctggaagccaccttagattatgtccagccataatatgacaggttggctggtgcaacatttggagctctagttcccatcttggatactgaaagccttcatggaaaagcagtgtaaggtcaggcctgcccagtgtgttt

SEQ ID NO: 106698 - DNA, 1339 bp, Homo sapiens
ggcgattggggcgcgcgcgcctccttcggtttggggctaattataaagtggctccagcagccgttaagccccgggacggcgaggcaggcgctcagagccccgcagcctggcccgtgaccccgcagagacgctgaggaccgcgacgagtcgtgtctgaacccggcttttccaattggcctgctccatccgaacagcgtcaactccatggcgcggttcctgacactttgcacttggctgctgttgctcggccccgggctcctggcgaccgtgcgggccgaatgcagccaggattgcgcgacgtgcagctaccgcctagtgcgcccggccgacatcaacttcctggcttgcgtaatggaatgtgaaggtaaactgccttctctgaaaatttgggaaacctgcaaggagctcctgcagctgtccaaaccagagcttcctcaagatggcaccagcaccctcagagaaaatagcaaaccggaagaaagccatttgctagccaaaaggtatgggggcttcatgaaaaggtatggaggcttcatgaagaaaatggatgagctttatcccatggagccagaagaagaggccaatggaagtgagatcctcgccaagcggtatgggggcttcatgaagaaggatgcagaggaggacgactcgctggccaattcctcagacctgctaaaagagcttctggaaacaggggacaaccgagagcgtagccaccaccaggatggcagtgataatgaggaagaagtgagcaagagatatgggggcttcatgagaggcttaaagagaagcccccaactggaagatgaagccaaagagctgcagaagcgatatgggggcttcatgagaagagtaggtcgcccagagtggtggatggactaccagaaacggtatggaggtttcctgaagcgctttgccgaggctctgccctccgacgaagaaggcgaaagttactccaaagaagttcctgaaatggaaaaaagatacggaggatttatgagattttaatatcttttcccactagtggccccaggccccagcaagcctccctccatcctccagtgggaaactgttgatggtgttttattgtcatgtgttgcttgccttgtatagttgacttcattgtctggataactatacaacctgaaaactgtcatttcaggttctgtgctctttttggagtctttaagctcagtattagtctattgcagctatctcgttttcatgctaaaatagtttttgttatcttgtctcttatttttgacaaacatcaataaatgcttacttgtatatagagataataaacctattaccccaagtgcataaaaaaaccttgtaa

SEQ ID NO: 106699 - DNA, 491 bp, Homo sapiens
gcgatgccaaccaaggctgtgcgcccgccccgggcattacaggacgcaggaccccctcctccagaggtcctcagcaaaatgtacagaagcacccccgcatagatcaattcattcattcaacaaatgaatatttgatggaagaggctccagatggagggaagagccagtgcaatgcctcaaaatggagacatggtgtattaatggagaagcagcaggacttgtgaaagcctgggacgagggcttggggttttattctcaatatgatagaaaatgattcaaggctgagagcaggagagtggcaggatatactgacttatttaaatctcactgtctcccacaaagaacaagttttatctctcctcatgctcctgagagaagaatgtactgcttatctaccatcatttctgcatccatcgaaacatctgggtttacctgaaaagaaattatataaaactttcagtgttttctaataaaaatgcaatgaatacaat

SEQ ID NO: 106700 - DNA, 844 bp, Homo sapiens
ggcgattggggcgcgcgcgcctccttcggtttggggctaattataaagtggctccagcagccgttaagccccgggacggcgaggcaggcgctcagagccccgcagcctggcccgtgaccccgcagagacgctgaggaccgcgacgagtcgtgtctgaacccggcttttccaattggcctgctccatccgaacagcgtcaactccatggcgcggttcctgacactttgcacttggctgctgttgctcggccccgggctcctggcgaccgtgcgggccgaatgcagccaggattgcgcgacgtgcagctaccgcctagtgcgcccggccgacatcaacttcctggattgtgggggaggagaagaggaaggctgctctttccagaattttccatactgctttttatgctcttgttgttatcacttattactattatcattactttaatccaggtgatggaatggcacgtgtagtgttagcaacttgaaaaaaatagataataagcaaccatcaataaaaatagtcttatagaaaggcattttgcataataactgatttgcattggaccctacatttagggttgttattgtctcaatgacaaaaggtttacttagtgactgtctcgctagaattacaacattctgggattttggctcggatgcaaaagacatgtgagaaacgaggttgcctagccaaaattatgtagtgaaatcaatgtaacaaatatttattgagcttctaccatgagaaagacacttatgattggtactgtggtggatgcagagatgagcaggcgtgctatggctgatgtccagatagaatttcccatctaatgtgatcttgacca

SEQ ID NO: 106701 - DNA, 1215 bp, Homo sapiens
gtcgcggcgagggtcctgccgagggacccgttctgcgcccaggcaggctcgaagcacgcgtccctctctcctcgcagtccatggcgcggttcctgacactttgcacttggctgctgttgctcggccccgggctcctggcgaccgtgcgggccgaatgcagccaggattgcgcgacgtgcagctaccgcctagtgcgcccggccgacatcaacttcctggcttgcgtaatggaatgtgaaggtaaactgccttctctgaaaatttgggaaacctgcaaggagctcctgcagctgtccaaaccagagcttcctcaagatggcaccagcaccctcagagaaaatagcaaaccggaagaaagccatttgctagccaaaaggtatgggggcttcatgaaaaggtatggaggcttcatgaagaaaatggatgagctttatcccatggagccagaagaagaggccaatggaagtgagatcctcgccaagcggtatgggggcttcatgaagaaggatgcagaggaggacgactcgctggccaattcctcagacctgctaaaagagcttctggaaacaggggacaaccgagagcgtagccaccaccaggatggcagtgataatgaggaagaagtgagcaagagatatgggggcttcatgagaggcttaaagagaagcccccaactggaagatgaagccaaagagctgcagaagcgatatgggggcttcatgagaagagtaggtcgcccagagtggtggatggactaccagaaacggtatggaggtttcctgaagcgctttgccgaggctctgccctccgacgaagaaggcgaaagttactccaaagaagttcctgaaatggaaaaaagatacggaggatttatgagattttaatatcttttcccactagtggccccaggccccagcaagcctccctccatcctccagtgggaaactgttgatggtgttttattgtcatgtgttgcttgccttgtatagttgacttcattgtctggataactatacaacctgaaaactgtcatttcaggttctgtgctctttttggagtctttaagctcagtattagtctattgcagctatctcgttttcatgctaaaatagtttttgttatcttgtctcttatttttgacaaacatcaataaatgcttacttgtatatagagataataaacctattaccccaagtgcataaaaaaaccttgtaa

SEQ ID NO: 106702 - DNA, 1057 bp, Homo sapiens
cactgactgaagtcctgccctggctcttagcttcggggatccgcgactatctggggaccggcttgcgtaatggaatgtgaaggtaaactgccttctctgaaaatttgggaaacctgcaaggagctcctgcagctgtccaaaccagagcttcctcaagatggcaccagcaccctcagagaaaatagcaaaccggaagaaagccatttgctagccaaaaggtatgggggcttcatgaaaaggtatggaggcttcatgaagaaaatggatgagctttatcccatggagccagaagaagaggccaatggaagtgagatcctcgccaagcggtatgggggcttcatgaagaaggatgcagaggaggacgactcgctggccaattcctcagacctgctaaaagagcttctggaaacaggggacaaccgagagcgtagccaccaccaggatggcagtgataatgaggaagaagtgagcaagagatatgggggcttcatgagaggcttaaagagaagcccccaactggaagatgaagccaaagagctgcagaagcgatatgggggcttcatgagaagagtaggtcgcccagagtggtggatggactaccagaaacggtatggaggtttcctgaagcgctttgccgaggctctgccctccgacgaagaaggcgaaagttactccaaagaagttcctgaaatggaaaaaagatacggaggatttatgagattttaatatcttttcccactagtggccccaggccccagcaagcctccctccatcctccagtgggaaactgttgatggtgttttattgtcatgtgttgcttgccttgtatagttgacttcattgtctggataactatacaacctgaaaactgtcatttcaggttctgtgctctttttggagtctttaagctcagtattagtctattgcagctatctcgttttcatgctaaaatagtttttgttatcttgtctcttatttttgacaaacatcaataaatgcttacttgtatatagagataataaacctattaccccaagtgcataaaaaaaccttgtaa

SEQ ID NO: 106703 - DNA, 523 bp, Homo sapiens
  misc_feature (495)..(495): n is a, c, g, or t
tactgtgccctctctcactagctcagtgcccaccatggcttcatgtgccttttgatgcttctaaatcctttcttgcatatctgctacttctgcactcttcccactctttcttctttcatctgtttttgtgatgacttctcagctttgatgatgaccaagcactatttctccttttttgagatgaagtcttgctctatcgcccaggctagagtgcagtggcacgatctcagctcactgcaaactccgcctcctaggttcaagcgattctcctgcctcagcctcccaagtagctgggattacaggctcccgccactgtgcctgactaatttttgtatttttagtagaaacggggtttcaccaccttggccaggctggtcttgaactcctgatctcgtgatccacccgcctaggcctgccaaagtgctgggattacaggcatgagccaccaagcccggccctaacagatctatttttgtaaacctcctcaaatgtttntcctaaaaatatttgaggaggtttacaa

SEQ ID NO: 106704 - DNA, 383 bp, Homo sapiens
aaaataataaaataaaatataaaataaataaaatgcaaggagaaaagctgttccagtgggaaaggcagggaggcaggaattacacgcagtgatcatgaactgcatgtatctaggccttatctctcaaattgtaaagtcacctaaaaggtagacattttctaggtacagctatgatatagaatttagactaacaaatgtctctctctccctcttccctgcctcccttttattccatgcttacagctaaggaaaggtgagtgagcctcttgaatgtggccctgatttgtcctatgctctgggaccttctcctccagcacaaaaccctctttgagtctttgcacatatcccaagctctcctgccggctcaggaggcacatccgcta

SEQ ID NO: 106705 - DNA, 820 bp, Homo sapiens
aaaatctggagggaacaagaggattgaatgtgacaaaacctgctgaagagaggcagggagggaactttcacctttatgtcgtaaacttctatgttgtttgaattttgtacaacaaactatgcattactttgtaattcttaagacaaagaatataagtaagaaaaacacataccaatagagttattctggcacacaacctggtttacattttttgaattattatttctaaactatacattggtgaaaggagatggaaacattatacaacacacaacacaaaattatgctctattccagctctgttgtcccctgtcctctgtaagaacgcaaggcctgcagatgttccccaaatggaggtccctaggacagcaaaggtgcccctcaccaccttctgtcaccttcaccccacccttttcctccctccttcagccccttgatgtttctaattccgtcctgtctcccattcaaagtttctatcttgcccttttccccaagttgctatcttctgccttagaagcaagtcccaaatttcctttcatgttttacgtattttcaccaattctggtgtccgttgtaaatcaaaattgctgtctttctcacccagttctgctgttttaagcccagtagttagggtcagaagaagaaaaatgttgcctgagtccccatctgggttatagtttgtttggggggattattatcctcacccatctaaaattaggcataccttgctctgcctgcttcagtttctctccagaaacattacatcttcctacaagatctgcttttccctactactgtgtttttgaacttatcctgaaag

SEQ ID NO: 106706 - DNA, 216 bp, Homo sapiens
tagctttctgagcctcagttttgtcatctggaaatggagataatataaccacctacactgcagtataattatgaagattaagagtataaaattctcagccaggcatgatggctcacgtctgtaatcccatcactgcgggaggccaaggtgggaggatcacttaagttcaggagtgtgagaccaacctgggcaatacagtgagacctcatctctatt

SEQ ID NO: 106707 - DNA, 556 bp, Homo sapiens
gggctcaagttccacattggtatcaaccggtacgagctgtactccagacacaacccggccatcgaggccctgctgcacgacctcagctcccagaggatcaccagcgtggcagattttactggcacctcctgcatgtcagaccccctttctgggtggtggggagttgaggatgagttcagcctcaacgagatctgctgcctctgtggacctgacagccccaggaagagacacacacgcacagtgcccaatcctgaggaggaacgagcacttcagagccgtgcacgccagccaggccgtgtggagaggagggggctccactgggaggggctgaggaccttccacagggtctgtcgggcagcttaccttccaggtgggtccgtcttggcagggagaggaatgagagagccgtgcacaccagccagggcgttcgggaggagcagcacgcaagttagaaagtccccagtgccgctgtccgtatgagcttctctccagctcattttccccatctgtccagcgggatctcgctgcgtgggaccaatgcaaggataggatgaga

SEQ ID NO: 106708 - DNA, 393 bp, Homo sapiens
aaaattgctagttaatcaaatccttggatgaaagttggctttagggatcaatgtgctcatctgttacttaatcctaaatatctcaagagttgtgctgtgtcttttacctcttttaggtaatctgcaattagaagcactagttttagggggtgtgtatatcatttctccttttttttcttttcttttttttttttttttttgagacagggtctcactctgtcacccaggatagagtgcagtggctcactgctacctctgcctcccgggttcaagtgatttactcgggaggctgaggcaggagaatcgcttgaacctgggaggcagaggtttcagtgagccgagattgcgccattacattccagcctgggcaacaagagcgaaactctgtctcaa

SEQ ID NO: 106709 - DNA, 377 bp, Homo sapiens
taaaaatcttgagatggtgacacaccatatccctttagtggaggaatgattcttggacagacttccaaggtctttagattattctatttaagtactaccttttggtaaaaaatacttcattttaaagatgaaatctaaaattccatattgtttatgttcatttcataataaaatagcaattgtaaataaatagcaaacttatttctttggcttatcttttaatttgttgcatgtgtgatgtttcgattagaagatgtacgtaggaaaaagcacttagtgatagtataaagggataaaactgagaaaaaatgttgctatgtgttattgtcgtaaacttttaaataatgtgtatctttctacttgtttgtaaactctga

SEQ ID NO: 106710 - DNA, 567 bp, Homo sapiens
tggcaagttcgcctacgagtctctaaacggggtctttctgactccgaaactaacagatcttgactccagaaaagcgtcctgcctgtcatttatgatatttgtgaaagacctaggaacaactgaagctaacacctgagatactgaaggcctggaagagttaggtacggctgatgacactgttgaaaagtcataaacgcacccaagttgagcaagaactgtgttggcccgtgtgtgagaaaaaatagccacgtccagactgggagaatttactacttccaaagacaagttaatagaagcggcacaggacatggaagtatggagtggacaggttaccatttgtacgcggtgattgtatttttaaatgtgctgtaactagcagccatttttattaatgggccaatctaaacagggttgaaaaagattaaccgtgacgccaccccaaattacaatagggtcttgtagatctctttttatagctgtaaaaacggaatcattcttggctctgtgtaatgtttataaggcgtgtctgatctcactgaataaaattttatagaaaagttaaaaatt

SEQ ID NO: 106711 - DNA, 405 bp, Homo sapiens
ataaatataaatctggaggaggaaaaaaaaaaaagaagtctagcttctcattagtaggacagcgttctcattttataagaccttaatacccaataggaaatggccgtcaattctgttcatttcatattctcacagcctgtctctcaggtgggagaacacagctaattcttagggtaagtgtcctcttttagaataaaaccttaccaaaggagagctgaaatgggttgtcccccaaggctgggagatgtgtttggttccctttgcctcacttcgacctttctgaaatcaagaaacaaacaaaatgaaatcgacttgtgaaaggatgtcaaaacgacatggcaaattcagttggtttgttcagaattttcttcctgtatttcctttttgaagttacaacagtcattc

SEQ ID NO: 106712 - DNA, 992 bp, Homo sapiens
cgcatgtggcgactgagcacttgaaatgtggccagtgcgactgaagaagtcaattttcaattttatttcactttaaccgattgacgtgtaagtgtatgtggccgcacgaggcgtggctaccctattggacagtagcatgggtctagatgtttgatccatggttcaacatccccaggtcctggagtctctgtggggctcctctggaagcattttgggagatagtttaaggagaccactagtgctcacgcctggcccttgggcatgtattgtgtcctgattctgggaagagcgtgggccttgatgtcagacctgaggtctcatcccagcctggctaagtcatagctaggaaatttcagattcttgtcctctccacattttggattccccttctgggaatacgtgggggacagggagtgcagtagctcatgttgactggcaagcccctggcgtagggaaggtgtctcctttctgctgggagcgctctccagccactcggtccccgggacagtccatctcagcctctatactcacacctcagcgtcgcgcccagctcagtgctgttctcagctcaaaacccagtcagaatggactccagctgaccttttgattttactctcagaaatctgagactgccctccaaggtcgaagtgtcaccactggaaagggtccctggctttggagcctcctcccgaagcctggcagcagtggcagcagtgtgtttgccttggattcgtttaaaaaaagaaaaaaaaaagttggctcttctactttttgtgtgtgtgtgtgtgagacagagttgttctgtcacccaagctggagtgcagtggcacgatctcggctaattgcaacctctgcctcccaggttcaaacaattctggcgcctcaacctactgagtagctggaattacaggcgcctgccaccacgcccggctaatttttgtattttcagtagagacggggtttcaccatgttggccaggctggtctcgaact

SEQ ID NO: 106713 - DNA, 396 bp, Homo sapiens
gagaaaggcctacaacagagacagggagagcagggagagcaaggaagaggaggtgaggtgtgtaacagagtgagggaatgaagtcatcgaggcagaactggttctagtcctaccaaatgactgaagaaggtgggggcaaagaccacagccctccttgaaggaagggacagtgtttaattcctctgtatccccactgcctagcatgcagccaggaagaggagggcctcatatacttatgattacatgtttattaaccaaagtcaggtcaccataacaacagtaggaccatcaaacagggggaaaattcaggaagtggagctggctggggacggggagcagggaaagacaatggcaccaccggggaccttcagatgaagaagggtgacacacagccac

SEQ ID NO: 106714 - DNA, 716 bp, Homo sapiens
gatggggactaggtgagtccttttattgaggggcagcagagttaataaagttactctggctttctccactagcgattatttttatatttcgagtgggttatttcctctagtaatggatataagttttggtttaattatttaaaagtgaattcagttaactctggctcatgaatgtgctttttctaatactgagtctgtgcttaaacacaaatcaaatttaatttaaataagatccagatattttaaagctttaattttagtatttatttcaataggtaatacacgtacatggctcacaattcaaatttataaaagggtatgcagtgaagagtatttgatatcttgatggtttctgaaggttcactgagaaagctgtgcagcattacattgttggtcccaagcttgggtaaagatgatcatcaatgtgcgtcattactaatgaaaacttagggcctaaagctaacattctgtgagttcttattaccgatcactatactattgccctgagaatgttccagtgacagaatccgtgatcatgttttctttatactactgtctagataggaataactggctgcttgtaagacttagaaaagaagagtaactttccaccccgtaaaggttgtttagtcatcatctagaaagttactaaagatgagaatggagcttatttttataccttatgatttactcaccttctatcaagaatctagtaa

SEQ ID NO: 106715 - DNA, 259 bp, Homo sapiens
tgggtgatctgaggattaccgctctcaccacccccgctctcacccaggaaacttttgaaggtttataagctggtgttcagagatgactggagttgtcagtagcagtcttgggtgaaagtgaggaaagactagaggccaagatgccatggaggaagccaccatagtgtcccggtaatgagcacatgggctcagaaggatggagacagagagggaggccatgagtgaatgtgcatggcactgcagaggagaaagggagggg

SEQ ID NO: 106716 - DNA, 296 bp, Homo sapiens
tgtactgtgcagttggagtagagagattcctgttttaaagttttctaagtttgttttttttggtccttttgctaaaaagaacagacatttgggggacattttggctgtgcctataggcatttccagtttgctgacttcttcagcccaagactgggatatatgagcaaagagaaaacccagggacctcacagctatgccattccagagatctcaaggtccctaaccagcctgctgcttctctccacctttcagattcattttatgtttgttttatatatgtgtccaaggttgttggc

SEQ ID NO: 106717 - DNA, 319 bp, Homo sapiens
gtggtgtgatcatagttcactgcaacctttaacccttgagctcaagtgatcctcccactttagccttctgactacaggtaggcaccaccatgcctggctacgtttttgttcttttagaggcagggactcgttatgttgtccaggctggtctcgaacttctgagctcaagtaatccttccacctcagcctcccaagtagctgggattacaggcacgcaccaccacgcccagctaaaagtatttttaatgcaaaatattcaatccttgcctcagagattctgattcagttgatctcaaggccaggaatcttttttcacaag

SEQ ID NO: 106718 - DNA, 203 bp, Homo sapiens
ggaggagggtcactgttacaaggccgagcagaaatgaagacgctgcccaggatgaactctctttaaagactcacaggctggagtctcaaagaacaagcattttcatggacactaactatctctgtgcctatggagtatctcagctttctgttcaaaacgtctatagaatccatgtctgacaatcaaacattatgctttggaga

SEQ ID NO: 106719 - DNA, 385 bp, Homo sapiens
gctgcgtgggccctggctcacacgatggcgagcgacagagcaacacactaaaggagaactcagggctttgatcatttgcctggctgagccatagggctggctctgagatgcctgtgttccaaacacttattcaaccacatataaaactcatagcatgttcaatgttactcttgggacacttggtcaatttcagaattccagagcaactgtgaaccttcttggaatgattttatctctaaggcaggcaggaggcagggcagtttgaaaatagagcatgagatttgaagtcagatagagctgggtttgaatctgcattctgcctcttacaaataagtgagcctttaaaaatgtaagtcatcctgggcatggtggctcacacctgtaa

SEQ ID NO: 106720 - DNA, 362 bp, Homo sapiens
tgcagttttgttctgatgttccagtgtccatactgaaaggcagtgtgtgaagacttgccatatccccaccctctttctcatcaacacacacccaagtgcacacacgtgcgtgtgatcacacggaaacagttgagaagatgcttgggtggaatccaggcttggattggaagccaagccccccacttgccagttgtgacctttaacaaggtagctgactactcaaagtcagtttcctcacctaggaaagattgggcaggtggctgaccagatgaacgtgattgtcatctgtaaaaccatgaagttccagggaagtgttggtggacatttgcatgtttgtgacgtgatggccaccatcctactgc

SEQ ID NO: 106721 - DNA, 200 bp, Homo sapiens
atcaaaagttaagcagcccagcaatgctctggaaaacagtcacgaacataagcacatgcccggagatcacaacaagtgcttaaagaaaaggaggctgaggcgtaatgacaaatgaacactgagccaaacaaaagacacgagcaaaatactttgctctatcgtcattatctgacttgattttccaagaatcgatttttttt

SEQ ID NO: 106722 - DNA, 561 bp, Homo sapiens
tgtaaatttgtttgagttcattgtagattctggatattagccctttgtcagatgagcaggttgcaaaaattttctcccattttataggttgcctgttcactttgatggtagtttcttttgctgtgcagaagctctttagtttaattagatcccatttgtcaattttggcttttgttgccatggcttttggtgttttagacatgaagtccttgcccatgcctatgtcctgaatggtattgcctaggttttcttctagggtttttatggttttaggtctaacatttaagtctttaatccatcttgaattaatttttgtataaggtgtaaggaagggatcaagtttcagctttgtacatacggctagccagttttcccagcaccatttgttaaatagggaatcctttccccatttcttgtttttgtcaggtttgtcaaagatcaaatagttgtagatatgtggtattatttctgagggctctgttctgttccattggtctatataagaaataattctctctttgacatgggctttctttttaagaacccaaggcattgttttgt

SEQ ID NO: 106723 - DNA, 783 bp, Homo sapiens
agcaatcgcttttttaaaaaatttgtgtaagcatactttctcagtttatttttttctcccctcccgtttatttttaatctgagttatttcttattaaaataacttttattaaaataaacttactagtctgtcatatcctcaaaacttgttttagaagcatttgctccaacaattacccttaagttatgtgatgaatttgtatgatagcgaataatttatgatcaagtggttctagagtattttaaatgtgtgtaaatagctatgagcctattattttaaaaaaagaaaaaaacttgggctctctatgcctaaggagttaaatatgtctaattttattatctgccagttgtatattcagttctttttataacactatgatttccttaggggctctggcatgtgaatttttaaaacctgtaagttataatgaaaggtatcaagatcccagatgttgggtgaagatctgccattccccttggtgtagtatctatggcattttcatcttcgttttcaataccaagtgttaattccatcccctttggattgtataccaccttgttatcttttatggacacatttaacacctacctaatcaccagggaaatcagctctatcagtgtcattacaattcatttcagtaaaagagaaaaggaaaggtcaccctctttgagagattctagggctttcaggaggaggagaagcaggagacagagctacagtctattcaaatcacaactatctccaaatcatttgtgttatcaggagcaggtgtttatatatttg

SEQ ID NO: 106724 - DNA, 693 bp, Homo sapiens
agcaatcgcttttttaaaaaatttgtgtaagcatactttctcagtttatttttttctcccctcccgtttatttttaatctgagttatttcttattaaaataacttttattaaaataaacttactagtctgtcatatcctcaaaacttgttttagaagcatttgctccaacaattacccttaagttatgtgatgaatttgtatgatagcgaataatttatgatcaagtggttctagagtattttaaatgtgtgtaaatagctatgagcctattattttaaaaaaagaaaaaaacttgggctctctatgcctaaggagttaaatatgtctaattttattatctgccagttgtatattcagttctttttataacactatgatttccccttggtgtagtatctatggcattttcatcttcgttttcaataccaagtgttaattccatcccctttggattgtataccaccttgttatcttttatggacacatttaacacctacctaatcaccagggaaatcagctctatcagtgtcattacaattcatttcagtaaaagagaaaaggaaaggtcaccctctttgagagattctagggctttcaggaggaggagaagcaggagacagagctacagtctattcaaatcacaactatctccaaatcatttgtgttatcaggagcaggtgtttatatatttg

SEQ ID NO: 106725 - DNA, 558 bp, Homo sapiens
ccctgtgtgaccgagccccggagcccctctgttggttcaagatcctgcattggggctgcagaagcggctggcccagtggcgtggctttcctaggacagaaggattgctccaccctacaggggaacaaatgtccaccttttaggagacagaaaactggctgttgtatccaaattaccgtttttctagcccgcggtttctgaacagtttcgtggatcttaagtctgagtttcagttaggctttcctccccactggcatatctgcaggaaggacagtcctagctctggatatttctctgcccccttttatttcttgctgtatgagtcactactctcccccggtgcattagtttcctggggctgctgtaacaaatgaccacaaacttgccagcttacaaccacagaaatttcttctctcacagttctggaggccaggtctggagtcaaggtgtgagcagctacgctccttcctaaggctctggagacaccccgttccgggcctctctcctggctcctggtggctgttgcgagccttggctcatagctgcatcactccaatct

SEQ ID NO: 106726 - DNA, 681 bp, Homo sapiens
aatatacaaaaagtaaaatgcaaacttatgaacatatttctgccaataaactaaaagtctttgaaaagatggaccagtcatgagatctatttttcattatatcaattcaataatttaaataattgatcaatactctttttttttagatggagtctctctctgtcgcccaggctggagtgcagtggcgtgatctcggctcactgcaagctccacctcccgggttcacgccattctcctgccgcagcctcccgagtagctggcactacaggtgcccgccaccatgcccagctaattttgttgtatttttagtaaagatggcatttcactgtgttcgccaggatggtctcgatctcctgtccttgtgatccgcccgcgttgtcctcccaaagttctgggattacaggcgtgagccactgcgtctggccaatcaatactcttaatacttgctaccaagagacttcagaaactgcagtgaaaatgaatgcaaaaattcttgtcaggtagtggagtagaaaatattttatccctgaaaactcataaccatgcagattttcagctagaattcccactatctgtggtgtttgaaaaattgtggttcttgaagtcaagagtttagtttagataaaaattttctctgaatgaagttacctgaacttcaaagtattcctcaaaataaattct

SEQ ID NO: 106727 - DNA, 432 bp, Homo sapiens
atccaggtgaggcaccagccagaacgcctgatcgcaggcacatacttctattctacaccctagtaggctcccttccctgacaccccctctacagaccctgggtcttttctttctgacctttccctgctctgttccttccagggctcttgtcaacacctgacctcacattctatatctctttgtgtgtgtgttttcctcttcatgacagcataagctctgtgatgactgagacttgtctgatgcttgttgtatgccattgactaaaattgattgcaaatgcttgtggatgagttaatgagtgtatctggtggttatttttcaacttctgattggtgagtaagggcagcatttagtttccttgttatatttttatttggagtgtcatcctaatgcagttctgatttctatcatttttcttttttttcaaatggt

SEQ ID NO: 106728 - DNA, 728 bp, Homo sapiens
tggtgaaagaagacagatgcagtgaggtatcgctgacctagtttttagataggctttcttgagtaaggtgctgttgcagaaacaagcctaacacttcttgtaaaagaaaatagcctgcattgtgtgcactgggtaacagaggtctaacatacctgcaatgacccgtggctacagtttttatgaaattataaaacagactgtaggacattttctgtgaccgcacaagctgtttagttaactactgatgccattgggttatacatctattcctttggctgtccttgcacagaattttgtcattgtcattaccagcatacatgtattaggatcatctgggtcctctcacctgaagcacacagtggaggacacaaggagggagagcatctgaccttggaacttccaatgtttatgatctggtgaaggagcaactatgaacctttaagtgaggaatgccaaatatccacatgatttcattacgcatgctctgcatctgggtagacagaaactagtgatactggtagattttgtgtcacccacggaaggtttctaggatgaggaaacttttatttacattcttccttatttcattatatcttggtccttgaagtgccatgtttgaatcaagaatgttcacaagcagtgtcataagaaaaattgttgagaaaactggaggcacttagattaaatactgtctttagagaccagaaagagggccacatagaagaaga

SEQ ID NO: 106729 - DNA, 476 bp, Homo sapiens
gtagagatgaggtgggaggattgcctgagctcaggagtttgagactagcttgggcaacatagcaagaccctatctctgttttttaaagaaattagccaggtgtggtggctcatggctgtgggcctagctacttgggaggctgaggcaggaggattgcttgagcccagtagtacaaggctgcagtgagctatgatcactgagctccagcctgggtgatagagtgagaacctggctctctaaaaatttaaaagcaaaaagaaaattacttcagttagttgcaaccagtccctttccccattctctatacagcagtgagaactttctgcatggggacaatccagatccctgccacacatctgacttctttgtaaacatgtgaccatcacctgtgatcatatctttaaccctcacactcccccatcctaaccttcatgaaatgctgctcatgctctgagctagtatctctcatctaaccc

SEQ ID NO: 106730 - DNA, 328 bp, Homo sapiens
ttgtagtggcggagtttcacaaacaacaaccacagaaaaaacaaaacaaaaacaaaaacttggtctccaactcctggccttaagtgatcctcctgcctcccgcgcccagccttctctttttttctgactctctgttgaatctagtccatgtggcctgttactgataatgaagcacagacgttaagtattgcccacaagcaaggcttacacagacttctgaacagtcagcattcaaagatatctaacagaatagctaggcaattggcttaagagcttaaatattgtgcatgagagtgacttttaacaacaggtccttgctaacaagtct

SEQ ID NO: 106731 - DNA, 594 bp, Homo sapiens
ctgaggatccgtagaagatggtggtcagtggggctgctggtactttgcaaatctaaccctaatgtctgttggagaaaggttctgattaaattatcctttacatcttatttttctggcctacaccttgaccttgactgtaaaagtactttctgaacagtttgattttccaagcagtttaaaatgatcatttatgctgggtgccgtggtaacaaaagtaggtcattattatttggttgtacgtcttctggagtccattagaactgtcggttaactacctaagctcaaattcctcagaaagtgcatgtttgttatcagccacacattgtgtggagggaaaggtagcagttctgatttcaaatgcttcttggatacttcaagaatttcttgcgctttttaaacaaattccttcctagctgcagtgaacaacctatagtatatcgaggtcacagcagtgaaaccccacagaaaattcattgtgcttcagccttaggcattgcccataggatgtaatgctacaactttttaaagaggcagtttttaaattgtactttatataggaatgggaatgagagatttctcccttctactatcgct

SEQ ID NO: 106732 - DNA, 179 bp, Homo sapiens
tgtattacaaacttttccaaagcagggactgggactatgcctgactcgactttgtattctcagtgcctggcatataatgggttctgagtagctgcttttaaatgagcaaataaacttaccagtatttttttaaatgacatgaaaataatacacattgtatattaatatgacaaaagaaa

SEQ ID NO: 106733 - DNA, 145 bp, Homo sapiens
aaaaattctgcaccttttaataggcagaaacacaaggaattcagcgacattaaattatcaggtaaaaatacccatgaagcagaggtgcttctaagcccaaaaaaagttatggcaagagaggaaatggagaaattaaattcaaagg

SEQ ID NO: 106734 - DNA, 157 bp, Homo sapiens
tctccacctcccaaggctccaccagttaccctcttttccacggtttctttttttcctattgactgtttccaatagcatttaaatatgcttgaaattttcccatcttaaaagaaaaatcccaggccgggcgcggtggctcacgcctgtaatcccagca

SEQ ID NO: 106735 - DNA, 384 bp, Homo sapiens
ccgaatttggtgctgttgataggaaaagaagttcaaaatcttaagccaaagaaagaagtaatggagttatttgggattgatgcattactatgttttgaatttacgaactgtttagattgtcagggagacgaggaagttaagattgtgtcatgtattaatttgagagtacagtgaatagaataatagtttgtatttacctacagggactcaaaacaggttataataatttttcattgccttgatatatcctggattggatttgagtggagagagacagaacccagcagaaatgaagaaaggagataatgggaaaagcagtagacggacctggttacaacgtgtaacatttttagatacttaaacaataatgagtacttgtacacc

SEQ ID NO: 106736 - DNA, 467 bp, Homo sapiens
agggctgctctcaggaccagtacatttactataaaaattatatatacacatgagtgataccttacagcaggcaccaatcatgagccaggctttacaaaacaaggtgctttgcttacatttaatgtaattcccatcattaccattacttaatagatagggaacctgaagcactgaggagttaagtgacttgaccaggccctatgatcagtaaatggtgacagtaggattccagttccttccacctagctctaaagctgtgctttttttctatcacacatgggtgcctccccctcaggtccctcagtgtgttcttaaagcaggacactatttgatactcctgccaggaatctgcagcctcaggatatggcatctcaagtgccctctttcttggccaccctcagctatttagcacaccaggaatcaaccaacaatgccttatcagctgccaagggaaaggaaggtgcttt

SEQ ID NO: 106737 - DNA, 412 bp, Homo sapiens
attttagaaaacgtatgtatataaaaacataaaacaaaatacggtgatcttcctacccagagacaactactgatatttttagtatatatccctcattcctggtctcgaactcctgagctcaagggatcccccctacctcagcctcccaaagtgctaggattagaggcatgagccactgcacctcttgctttttttatacttaatattagcatttacttcttttgtgaacctcttgccatgtttgctgtttttaatacatgtagttacatagtcataggttgcttaatgacagggacatgttctgagaaatgggttgttaggcaatttcatcattgtgaacattatagagtgtacttacagaaacctagatggtatagccaactatgcaccaagactgtatggtacagcctat

SEQ ID NO: 106738 - DNA, 408 bp, Homo sapiens
caacatacaactggacacaatataattgtttgactaacaactcgtcatttttgcagtacagctactcaattattgctatgactgagcactaaattcacattgtaaattaaaatataaaggttgtttaagggagcaaaatgttcatgaaatagaaatattgagaaaaccaggcctttaaagatgttcacagatggtaacagatactttgtgttgtaaaataaaatgtaacatttcttaagtgcaaatatttctcctacaacacattcacacattgtaatccaccaaggtttattttatggtatttttctgctgtgccagtatgtcagttcatagtaatttgtaatatgcttataaaaactgtggaaaagagttcttgactgctatttttggtaagcatgtaagaacact

SEQ ID NO: 106739 - DNA, 341 bp, Homo sapiens
tagatggagtctcactctgttgcccaggccggagtgtagtggcgcgatctcggctcactgcaacctccgcctcccgggttcaagcaattctcctacctcagcctcctgagtagctgggactacaggtgcgtgccaccacgcctggctaatttttgtatttttagtagaaacagggtttcaaaatatcagccaggctggtctcaaactcctgatcttgtgatccgcccaccttggcctcccaaagtgctgggattacaggcacgcgccactgctttcggccaagttacttaacattttaacacacaggtgacagtatctatttcataagactgctgggggaa

SEQ ID NO: 106740 - DNA, 940 bp, Homo sapiens
cttttgaaaaactttaaaacttacagaaaagttgtgacaatagtaatgtgaactcttgtctagctttcacctatattcatcagttataaacattttatcatgttgcttttttctttatctttgcctatataactggatgtatatctagagtttttatcttggtgaatcttttgagagacttacagatatcatgactctttaccttaaatacttcagcacatatcaccagagaaaaaggactttatcaatgtgatcattcatggaacgatgattaaattcaggaaatgtaacattcattgttaattgttgaagcaaatgccaaggcagaattacaattgcacaaaagtaaaaggaggaagcagggttggacagatgagactatcagattgtgattatactttgtctgccagctccaggggcagatccggagtcaagatggttcattagaggagcttctcattgggcagaaattggtctataccactacctttcttagttataagatagctggaggctgtccaaagaatgtgcaagtcttttgaaaactaatgccaacataaataaagctaacagctagagctctcagtttacccatccttctcacacctgccagtgagtcttttggatgtgagtggtgcacctccacatccactacgatataatactattgtccagtatatagtccatattcacattcactatttgcccaataaccttctttatggcaaatcccccacaccccgcatcagatctctcatcttatcattgaggaaagtctttcaagaagcttcccagatgactttcctgtatgtttcgttggtttaaaccaatcactggcaaaggagaatgggattttcaggattacttcagacctgtgggattcatcccatgggtctgggggaggggctcctaatcaggtgcttaggaaatcaggtgacca

SEQ ID NO: 106741 - DNA, 413 bp, Homo sapiens
aagctttaaaacaaaactcaaatgaacaatattaattgaatgtgatagatgaaactgaattatcatttgtaacatgagagtgaagtgggtagactcagattttttaaatttaatttttgaactaatagtacattcacatgattcaaaaataaaacgttattaaaaggtgtagagcctgggcgcggtggctcacacctgtaatcccagtactttgggaggctgaggcaggtggatcacctgaggtcaggagttcaagatgagcctggccaacatggagaaatccagtctctactaaaaatacaaaaaaatagttagccgggtgtggtggcgggcgcctgtaatctcagctactcaggaggctgaggcaggagaattgcttgaacctgggaggtggagattgcagtgagccaaaa

SEQ ID NO: 106742 - DNA, 493 bp, Homo sapiens
accccacttcaggtatgttctgaagacaagctagataatgtatgcaaagcactgtgaccttcttagagaaaggtgttcaatcaggactgtattaataatggctcattaccatgaacagttcatttgagctacagatttctgatcacatacaagatgtaaatgtcaaggaagacaaaaaaatgggtgggaggagtcattgtcataatactgtttcacttcctcaaaatcttccgactcccagaactttgggagatttcttgagaagttataataaaagagtagacattctagttcaaagttttaaagtataaggatggaaaaagaattctttccctgtaacagaaatggtttcaatgatttgacccagtatgactgctcgttattcacgtgtttctgtttttaccagacactatatgttagatgctgggaagaggaggatgagaaggggttctcaccatgattcgctcaggggtcctctagatcgaccacagct

SEQ ID NO: 106743 - DNA, 909 bp, Homo sapiens
cagctgaaagtaattacagatgtcaccacattcatttattcagtcacttatttatgcattcatataataaatacttattgagcatctattatgtgccaaacattgttctaggcacaggggatacagcagtgatcaaaacagacaaaaatccctactcgggaggctgaggcaggagaatcgctggaatctgggaggtggaggttgcagtgagcccagattgcaccactgcactccaacccaggcaactgtgcgagactctgtctcaaaaaaacaaaaacaaaaacaaaacaaaacaaaaaaaaaaaacaagacccagttaccaacctggccaaaattggagcttttaagtacactttagacctttgggaaaactgtgcttctggtcactgaaagcttaacagcttcccagttcttaaagactttttctgaagaagtcagaagtgatatcacaacattttcagtctttaatatggtgatacatatgtaccattcgactattttctaaatgactaatgcctgagttacaaaatcatgctggataaaagatcctttcaaaggagcaaaatagaccagtggactgggggttttcacctttccattctcaacatacctcttaattggtttcccaggagattgcggttagctaacacagttcctgtatacccaccccaggttttcccacacttaatatctctctttaccatggtcgttttcaaactaagactttctcggtccactattccataactcgctccaattccagtttcctaccgccctccggaaggtaaaattagagccaagcttggtctcatctccggcaggtcctgcattctggaaccagcgctggtgcaaaaaccggttcaagacgtgacgctgatcgaaaacacgatggccaaaaaagcgccagaa

SEQ ID NO: 106744 - DNA, 571 bp, Homo sapiens
gcaggccccaggtacattcccagcagctgcccatcctgtcaggggctgctggggcagaagtgacatggaatgcagaggtgcttccacggccagaggtgtgggtggttctgtccgtggttttggatgtgattattgtccagccaggtaatcgggagcttgtgaagcttcttgagcgaggcagtaatgtctgactatgaatacctgcagcttcagatttggaaaggacctttggaatagcagcagaagtcaagccctccaggaaataatgaagatgggaggccaggcgtggtggctcacacctgtaatcccagcacgttgggaggccgaggcgggcggatcacctgaggtcaggagttcgagaccagcctggccaacatgttgaaacccccatctctactaaaaatacaaaattagctgggcgtaatggcgcacacctgaaatcccagctactcgggaggctgaggcaggagaatcacttgaaccgggggggcagaggttgcagtgagctgagatcatgccattgcactccagcctgggcagcaggagtaaaactccatctcaaaaaaaaaaa

SEQ ID NO: 106745 - DNA, 356 bp, Homo sapiens
tactccctgatcttctttgcatatatgtaactataatgtcaaataaaaaataactgtgcaactgcctccttaagagtgcagggaagaactaggagggggtcagagtggggaagcatgatcattgcactctgtcttttcttctcagcagttgcagtgccattacaggagagctagggtcctgcacagaagacctacagaagtgaacaattcactgtagaatttgcaacccatctggcatatatcaaagattcagagacgataacataggtatatgataacataggtatggccattctaaatgcacttcgctctgaaatgcatagggggttgacaactgccactctctgcccatctac

SEQ ID NO: 106746 - DNA, 119 bp, Homo sapiens
aatcagtggccgtaaggggcgaggaatgggaacagggctgactgcaaccaggcagaaggaactttctagcagggatggaaatattatacaccagagtgtgatgatggctgcatgcctct

SEQ ID NO: 106747 - DNA, 655 bp, Homo sapiens
ctttgagaggtggaggcaggaggattgctttagcccaggagttcaagaccagcctgggcaacatagtgggaccctgtctccacaaaaaataaaaaactgctgactgtggtggtggtgcatgcctgtagtcccaactatttgggagactgaggttggggattacttgaacctgggaggttgaggctgcagtgagctgaggttgtgccagtgcacttcagcctgggtgactgagaccctgtctggaaaaaaacccgcaaaccaaatgagtaaaaattatactgaatttctgactattaccttacagtgtctagaatattataaaatatatgaaacatacaaagacctggaaaagggtgattgtataggcttatagatgacccaattattggaattaggagaaaagaacattaaggcaattggcaggataatatatgggggattgggtattttcaggtgagtaatggacatgccaaaaaaccaaatgcatattctggaactggaaaatagaatatcttaaattttaaaaattgatcaaatagccttaatagcagttctatgataagaaataaagacagaaggaaatggtaaatgtgtgaataaatatgaaagtttatcttctagtttttaaatttatatcgatgacagtggatagcac

SEQ ID NO: 106748 - DNA, 341 bp, Homo sapiens
gatcccctgcactctgcgatatctacattaccctgggcaaatcattttaatgctgatgagagttgaaagaaataatttgaaggctttgggaaaaggggaaataatttatacaagaggagactgagaagagctccagagcacaggtaaaaggaagccccttccatcaaggtggaggtccaggagagggtacaggcaggtgtgtgttgcagatatttttgtcagcgaggagaggggaagagggtagggatagttgaaagttctcttctgattgtctgctgagcataagggaggtggtgatcaagtagacttgaggaaggtgtagagaatagaatgaagcaatg

SEQ ID NO: 106749 - DNA, 368 bp, Homo sapiens
taaaaatatttgttgaaatatccccaaaaccagttatgtgatgacttaggttagggctggctggggaggggtcaggacaagacagaaaagacacagaggcaggacagggatttttgtgttgttatacaagtttttgcttttgaacatataaatgtgttatgcactcaaaaattatgtaaatacaaaaataatgcagtctattagtcttttctgttatggaagtttcctataataaaacgttttcctgcattttttcctaagcaacttctaagaacacgttatggagcttttaacacaaattccagcacttacatcaagctcacaggcaaggcctcactacgaatctaagcctggggatcagttagagc

SEQ ID NO: 106750 - DNA, 605 bp, Homo sapiens
gtagtaacatcaaagctattgccagcaattgccactgatgtgagtctctctcaagtgttaagaacaggacacccagagaaaggcaattttgaaagagtaggtgacgacgggcaatacaattaattgggccctttatgtatgagctgactgcacatgaagagaagacataaagaagaagacgggaatgagtacaaataatgagggataagtcaggagaaatgccatagacaacaattttctacttgttaatttttcccaggcttcattctgcaaagaaaacaagagaaaagttggctctaatatttcatctcattttagcagcagggaaatggctaacctttcgtatgtcctttgtcccagagccaaactccattttctccttcatgcttcctaatgtattttgttctattacggagccaaatacattcattgtaattaaacatggactttgagagctagaagtgttttaagagttcaaagataaaaccatcttttgatggtctgtgccaaataagcacaaaccctgatttctgaaaatccatgatttctcaaccttaacaatactgacatttggagctgggtttttgttgttgtggggggggctg

SEQ ID NO: 106751 - DNA, 269 bp, Homo sapiens
aagaaagagatgtgggggtttggtgaaactcaccagaggctggaccctctccagcataacacagggattgggaggagcggggcggcattaggccaggtgcatagcccagtgctgctatctctggactttctgctctctctggacttgtttactagctgagcttatccatttacataattttcagtgccatttctcagctgatgagtcctgaacttttgtcctgaggctagaattctccttgaaacagcagtcttaaacactcaacttct

SEQ ID NO: 106752 - DNA, 375 bp, Homo sapiens
tgtatcttcccttgttccagcccctttgaccctgcttatagcacatgggttttcctccttggaattcttcagaaactatgagggagtcaggtaagggaacaggattcacagcccaacctggtattcacccagctcatctaccaaatttggtttcaaatgatgtgtgactggctgttgtcagaaatcaaataaaaggatgaagatttgctgccaccaaggaaattccaggagagaaactcccccagtgttgcgaacatcattaataactgccagctagaccagcagccattcagaagagtggcttcagctagcatcccaattgccagggaagaaaacacaggacctctgtggtgccaaacagacctgggtccctgc

SEQ ID NO: 106753 - DNA, 688 bp, Homo sapiens
tggtagctagaatatcttatattataacactgaagtaatcagagttgctggagaggggatagattggagcaggggaggacaatgtatagaataatgtctgaagcgataatggccaaaaattcctaaatttagtgaaaacagtagatctgtgtgatctaatgatctcaacaaatccccaagtacaaggaacatgaagaaaactgcaccatgtcacattacaatcaagttgattaaattcagtgataaagagaaaatattagaagaagccagagggaagaacacactacaggggaacatacagaggagttactcatggagaataagaatgacagcagatttcttattgtaagcaatgcaaactggtacttaacggagtaacatctttaaataatgaaagaaatgcactgtcaacttagagttctctacccagcaaaaatatctttcatgaatgaaagtgaaataaatacttttctagatatacaaaatctgaaagacttcattgccatccaacttaacctatgagaaatgttaaaagaattcccttaagttgtggcaaataacagattaatgtagacgttaaatagattagaaccatgtttattgtggaacagaagttgtgagagcagacattcgtattttttccttatctttagggaaaaagcattcagtctttcatcactaagtgtgg

SEQ ID NO: 106754 - DNA, 259 bp, Homo sapiens
ggggagcatatataagctaggcttgaaggataacgataatagctaacacgtggtcatagcagttccagcctctgtactaagcatcatgcatacattatttatattaatcttcagaaatagatactatcccccagtttacacctgaggaacctgaagtttagtgagattaagtatttgcccaagttatatagatatgacatcaatttagtgttgtagtatgtcattattgtggctaggaaggaataaggccagtatttgg

SEQ ID NO: 106755 - DNA, 384 bp, Homo sapiens
tgttttgttttaaatagagatggggtttcacaatgttgcccaggctggtcttgaactcctgggctcaagtgattctcccacgtcagtctcccagagttttgggattacaggcatgagccactgcttccagctgagggctgcatttaagaatgtatcaaggggtcctgaaaccaaaatgagggacattgctctatcacttactgtgttaatcacatttctcgtaagtgaagtggttttattttctttgttgccctattatgaatttcattcctaagaaaactctgcaagggatgtagggatttttacagataggggaatgaagctcagagcggatacctgatttttttttctttttgagttggagtctctattgcccaggctgga

SEQ ID NO: 106756 - DNA, 703 bp, Homo sapiens
cgagatacttgtcttatttttcctactgggtgtacagtgtctgaagactgagtctgtcagttgttcttgtttgcgcagtgccctgtacatagcacctccacagaaagcatgtttgtttgcgagtcagctgaattgttgaatgggtttttctttgcctcctgggttatattgtaaaccccctgtggtcaggaattgtggcgtgtacactttcatgcagccgagatgaatggcgtagagtccaggctgatgcattttattgatcaaaagaccagtaaatgatcatatagttttttctcctttcagttacaaaataaatcagcagcagggcattttactgacagtcttccttaaactgtttctcccccatcaccaagtgtacagggcgacgggaggaggtgtgtggtgtgattgggcccccagtggctggactctgcaactgaccttgcagactatggcaggtgtggaggaaggagcagttcagatgcagcccctttgggtggagctcacctttgctggcactgtgagttttcaaccaaaacacattgacaacatctcttatgggcctgaccctgttccagtcccgggaatactgcagtgaagaaaacacacacgactcctgactcccagggaacttgtgttggtggagtattgtcctgggatcttcagtcctgggccacgaggaggcagtcagccagagctagcc

SEQ ID NO: 106757 - DNA, 668 bp, Homo sapiens
agtctatgcagattttaagggaaaaaaaaaattttttttcaccttcaaatatttgagtacctgtttaatgccaagcctggaacacaaattataagatgttggtttaaatttaagctattgtgacttcatttagaataattactatttgagattatggaatcatattccttagaaattttttaaaattaccacctgtacctaaatttctcccccaaaatactttttttttttccagattcaaatgtcataggcatttacctgcacctgttttggaatctatcttgatacatgaaattgaagtgcttcagctcgtctttaagtcagtagtggtttattaaacggttatatcacatctggaaaacattattcaaaacatttattcagcctacttcctgttcatattttagaagatgtaaagcaatgaaatttgctctaaataaatggcatttttttggccattatttggcatcttgccgggttactttttacatccaagttgaagtgatattttgttctcaaaataaaataattttcaaggtttggaaatataatgcaaaaattttaacagggattcttatcccaaaggatctgaggggcctgatttttttttttttaccttttatgtatgtttgtgtgcatgtgtgtgtgtcatttgtaccctttgtaag

SEQ ID NO: 106758 - DNA, 221 bp, Homo sapiens
tccatactctaatatggccactttgcaggtgaggaaactgaggatcagagtgaaagcaacctgcctcagcccccatagataataacgatcagagccaatataaactggtgtagtaagtaagaagacaaagtaggtagtattgctataggtaaagcaagagctaaggaaagccttagttgatatggcagaaataggaacagagagaaagggacagaaaagga

SEQ ID NO: 106759 - DNA, 797 bp, Homo sapiens
aatcataagtcttaaccccttacatttacagatgagaaaactgaggcctgaagagttacagtgactttcagagttatgtggttagtaaatgacctcatgtgaatgcaaaatgtaactcttctattctgcagttcttctctatattggttaaggatagttcaagacagaggaggtcagaagtaagtgacctttaaaaggtgtaataataactattgtcaggatgatcttatttcctatctttagaaccccatcatcagttttgtaaggccactgaataatagaaaatggttccgattctggtgctccctattctgtctcacagctgctcctgtgaaaacactcgttcatgggctctgtgtaattttgactcagtccataatctctctatcctgattttaaaagttatcatcagaatggatgtgctggtatactaagaaatgtctgtgaatattatttatttattttacttatctaatcattttcatagatttggttgtttaaaaataccccaggtctcaaatccctttggaaagttcagcaaatcattttaacaggtaattctggcaatatgtaattctttgtgtttacagagtgagagaaattctatttatcagtgttttttctttgttttgttttacttcagttctaagcaaagcagttattttgcttattgacatattgatatattcctttgggaatctcatttctttcttggccagctacaaacactcatactgtccaatttcaacaagagactatggttattctcttcttcaccaaacaaagaaatttgaacc

SEQ ID NO: 106760 - DNA, 533 bp, Homo sapiens
cttagtatatatcttaagtaatacagaaataaggacctggaagtaaaaatccaaaacaagtggcactggcttaacagactggcagtgagtaacaaggaaacagattctaacatatggagagccaataacctttgtgatagtatatcaaaatatttgataaaacttgcaggcaaaccatgtgtcacagtgcttgtagcacacaagaaagcaggtataaaaggggagagtagggctgggcgtggtggcttacatctgtaatcccaacattttgggaggctgctgtgggcagaccacctgaggttggaagttcgagaccagcctgactaacatggagaaacgccatccttactaaaaatacaaaattagctgggtgtggtggcgcatgcctgtaatctcaactactcgggaggctccctctgcccgtgtcctgtaattcaactgactaaaagttcagaaacgtggagctatgcaagatgggaaagacaatcttctttcccaaaccgcaggagggacaggcattgatagcccttctc

SEQ ID NO: 106761 - DNA, 161 bp, Homo sapiens
gagattaaagagatggtacacgagcagaaagctcctccccaatctctgtcattccctctccaaccaaatccacctgccgtcccagactcaaatgctcagccacctaactgcctgaggacccagcagttaatgagtttacatgctgggggcaggagtcaggg

SEQ ID NO: 106762 - DNA, 316 bp, Homo sapiens
ggtgaagatgaggacagtgtgatgcaagcagatgaagtcgcttttttctgaagtcgcttttttctgggctcctttcagtgctaggcaggcctgaggccctagctcaggccaggtgactcacaccaacacttcccaccccgtatactggtcggaggagccacttactagacataactcagttccagagatgccagtgttttatttcaataccagcagagagcaggggcctttctattcatccacaggcggattctcccagaagggacgctccaggtgccagggtcaggtcagtgcctggctcttggaagtttccata

SEQ ID NO: 106763 - DNA, 804 bp, Homo sapiens
agtaagtatccaagtgatcgatactggcatgatgggggtaggggagtgtcaggtaatgcaataacatacaaagcagggatcactccatttagaatgggttgtcactcccaggaatggcttccaagctattaggacccagagataaccctggacttggcaactaggtagagagaaggggtattcacctatgtaagtgaccttaggcaagtccttgctcgaaatctctcctcctttctgccaccaatccactcttaccccttagtttcttcttcctaagtgttgcactcccactcttcttttaaagtgcacatgccccgaggaattaaagctctgaacagtctttgagaacgctgagcacatcagttccttcctgagagaggagggttacaaggttccttggttacaaggctaatgctctgctgtgaccctggttttcctctaacccaggtcaggacagggatgtgatgtgactgacactttttaccccacacatggcctctggtgactgaaggttgacactttcaccagccctccccccagggtgccccgtcatctctcctccaaagctgacagcacattggcattgctgacaaatgactcatttccagccacataaaatggcttcaatcttcttttttgaagtctcacagattacctcctccgcctcctgcttttctgacaacttcgctccagcagtgcattatgttaaaaaccacacttattatgccagagtgggtctggcacgattagagttcagtttttataacagatgtggatatgcctgtaatgacctgcttggctcaa

SEQ ID NO: 106764 - DNA, 629 bp, Homo sapiens
ggtcagcagaggaggtactaagaaggaccagtcaggatttattggagtaaatcgcaggggtttaccgagggactggatgtgcgctgggagagaggaggcaaggacaccctcattgttttctcatccaaaccaagatttctaagcctgaacaatcggatcaaaaatggcattatttactgtgataggggaacccaaggtgagttaccaggcagagagtgaaggggagaaccaagagttctggttcaggtgcataatgtcctaaagaggggctggaaacatgcatttgagaaggaccagtgtttagctagctggcttagtgccacgggactaggctgcctgttcccaaatggcaattcaggagacagaagagcccaaaacagaaggctgagatgaaaccctttacagagcacgtacacttgatgctgtaaaattactcatgggagtactgcgtgacttcagatataatttaaattttagaggttgtggctttttgtgtgtgtgtgtgagacagggtctcaccatgttgcctaggctggacttgaactcctgggttcaagtgatcctcccacctcagccaccagagtagctggaactacaggcacatgccacggtgcttggcaaaattttag

SEQ ID NO: 106765 - DNA, 403 bp, Homo sapiens
agttctggtccccactgactatctctctatgttcatagatacttagtgataacccagtttctgaagtgggtaggggatatgtttatggaacgggtgagtacatttgtcttgttctctcctggcatctgttagaagatggagttggctatagaacagtgagaagccacggaagacagtagaggcttggactagaatgtgctagaggtagaggtagtgaaaggtaggtaaagatgacctgcctgctccattctctctgccattcctctgtgccaccagccccaacactaaggggactattccagttatttaaaaactgaggggtaaatatcgaaacactgaatcataatgctaggggtattgtgtacagccgtgccttgtacaagggtggctggccaagcaagta

SEQ ID NO: 106766 - DNA, 360 bp, Homo sapiens
cttaactggtgtgtttgattatgatagataaaaaagggaaaaaattatagaaatcatgtggatgttagcaagaatatgcatagtggttttagataatgaaattttattggaaaattgcataataagaaattaataccatataatgcaaactctagttttctgcgaatgagatagggtgatttaattgtaagtagagaaactatctaatataaaacaatacagtgtctctctggatggtaatagcaatgtgctaccagttcagagcaaaaataagaaaaatataatcaaaacttagttctggtaatttctcaagagtgagatctaatataatttcatctatttcccagtacttccagagtt

SEQ ID NO: 106767 - DNA, 436 bp, Homo sapiens
cccaggagctgaggggggccaaacaggtgggccaggtagtctctacccataaggccagggcaccaaggagacagagagaattcctgctggtgttttgacatcacggatgtccaacacccacaggctcactggcagagaccaccatcccttctccactctagggccacccctccaagtggggtactcctgcagcttgactccagctctgaggagcaaactcactctgtgacagctcagcaggggcaacagagagaaccaccaaaccagctgctgccaccagaccccagcacagccgggacccaggacgcactaaaccagccgccgctactagactccagcacagttgggacccaggacacactaaaccagctgtcgctaccagactccagcaaagttaggacccaggacacactaaaccagccgctgctaacagacc

SEQ ID NO: 106768 - DNA, 321 bp, Homo sapiens
ggtgtttgaggctgccatgagctatgactgtgccactgcgctccagcctgtgtgacagtcagactctgtctctgaaaaacaaaagaatgttcattgaatttgacttcgaaagaactgaacaattagaaacaatctaaatgaccaacaagaaggttgattatgatatctgaataacaggacttcaagaagggattaaaaatcacaccaatctgtatttactggcatagcaaggtacctatcaacagtatgttaagtgacagcaaaaaaggttatcagacagtacatacagcatgatcctctactgtaaaagagggctgtgtg

SEQ ID NO: 106769 - DNA, 563 bp, Homo sapiens
ctccttttttctgtatcccattcaccagttgtttgactctaaagattgcttaacttacctgcatctctatttccagttctgtatcatagaatggttgatatataattacatactttattttgactatccaataatagcaacagctaatattgagcatttgctatctacttatcactgttctaaacactttgcctatatcatcttttttcaatactcgcacaaatcacatagtataggcataccccatttttcagagaaggctattgagacacgaaacagctaagtagcttaccaaagtttaccagctaatcatgctaacctgagattcaagccaaagtagtttggctgcagagtcagcattctcaattcccagcactataatttatttcttcattcaacaaatatctattgagcaccaggtcatgctattgaccctagaagtatagcaataaatagacagacattcttgccttcatggaatttatattctaatgcgagagacaggcactatgtaaataaacatgggctttgttgtaggtaataagtgacatggagaaaaataa

SEQ ID NO: 106770 - DNA, 367 bp, Homo sapiens
attttctgaaaggaagagaagctctgaaattcagtgaaaatgacagggcggttgctattgtacacattattagaaagaaccatttcaaataacaattgtaaacatgtattttaatgctaatatactgtaatagcctagcattgagtagtgaaacaatttcagacaagtgtccaaattgttttatgactacatttatttcttagtatttatttagaaaattagtagtcaatgcttagttttatcccagtatggattataacttgtataatattctatagaaaaatgttacctaactggaataactcagagctgcctccctctgccccagcagttggtttgtgccctatgtttgctgattaccttaaat

SEQ ID NO: 106771 - DNA, 219 bp, Homo sapiens
attcaggtacacatatcctggtccacataagcacacatttctttgaagagactgtgtttgcccagtatcctcctttgtcataaatcaagcctctatgtatgtatggttatgtttctaggctctctgttatgttctactgtgctgttgtctgtcctagtgtcaatatcatacacttaattactgagctttgtaggacattccatacatagtacctgtgga

SEQ ID NO: 106772 - DNA, 434 bp, Homo sapiens
gcaggggcagagcctgtagcagcctcacaagagaagtaggtagagctgtcccagcgtgggcaggcgcctgtgctgcctgacacaggtaatgaaggcagctctgcatcctgacactggccctgccacctccgtgggtgaccagcacacatccacctagcagtcccagctccctctgtaccaggagcccctgaagtcagctgactttgcttgcaaaatgttctagagcctcctaccagtctgggtgcacccccctccactccaccacctcagcagcttggatgtctgcggggaagccctcctgctctctctctcccctgccactgctgattttgctcaagagctgtattattcagcacttaggagggagcagacactgatctaggcttcctcccaacggggctggcagctccagaatacttgagcacagctccccg

SEQ ID NO: 106773 - DNA, 1000 bp, Homo sapiens
atttttcagtatcctcacttgttcttaaggttgtttgacccagtttatatcctttttttcccccttaagtagacatgaattgttggtagaagatttctttatagatgactttattatttttatttttaaattttttacagagatggaaacttgctaggttgcccaggctggccttgaactcctggcttcaagccagtcttttgcctcagcctctcaaagtgttgggattacaggtgtaagtcaccacagccggtttccagctgactttaataacataaccagtctcctaacactcttaatatagttctgtctgacctttgatgtctaattgcttcatctggaattgtgagacagtggtactgaaggagagttatgctcttaaactagtagtacaccaactggaaatcatttaggacagggtatgtagagtcagcctagctacatcagtttcagagaggtctactttgggggtttttaatatttgcattttattataaaaggactacatagtcattgtaaatattaaaacaaggtagaagaaataataaagtgaaaagtaaaatttccttctttccaatgtctgtctactactctaattccaaagaaatagctactaatattgatacctttctggaagttttacatttataaagaaacatattgtgtgcatgcatttatgtctaatacattttggatatataatacatacatttggctgggtgcagtggctcacgcctgtaatcccagcactttgggaggccgaggcggacggatcacgaggtcaggagattgagaccatcctggctaacatggtgaaaccctgtctctactaaaaatacaaaaaaaaattagctgggcatggtggcacgcgcctgtagtcccagctacttgggaggctgaggcaggagaatggcatgaacctgggaggtggggcttgcagtgagctgagatcacgccactgcactccagcctgggcgacagagtgagactctgtctcaaa

SEQ ID NO: 106774 - DNA, 339 bp, Homo sapiens
caaatcttccacaccacccgctgcgctgctgtgtcccttctcctccttccctccatgcccctcagtttcttctgtcgactttcaaaagaagcctctaaaacggaagagccagctgagattttggaatacgcgtggtactgtctgcctgatgactaaaaagagccctacagtaagagggacggagcctaaactggctcacggaatcgcaagcccggctacctggttagaatagaggctagaattgtttccatttctgtgccctaaaactaaggaaacaagttgtactttggttttgtttatttgttgggattttaaaaagtatcttccttgtccctcaca

SEQ ID NO: 106775 - DNA, 361 bp, Homo sapiens
attgctgccaactgagttcaaatagagggaatggccccagccaagatgaagaaagacttcaaaaagccaatttatagaggcttaaatcctaagagatttgcctctgctttcttttgaaagtggtggtccccctcaaattctcctataatttatttgccttatagaaatttatttaaacactggttcagctggtgcaggctatggggcaggagtcacctttaaagataatctacaaaaaaaaggagggagatcatagttacaaggagcaggtataatgctaacttttattcagcattttctctgacttagatcacaagaaaacttggcagtgagtaacatgtcaaaacctaaaagaaagtca

SEQ ID NO: 106776 - DNA, 372 bp, Homo sapiens
tgggaaaattgagtaatcatgtattaaaaagcaaaataaaacaaaacttgaccactgcctcacaacatacacaaaaatacactcctggtagggccgggtgcggtggctcacgcctgtaatcccagcactttgggaggccgaggcgggcagatcacgaggtcaggagatcgagaccatcctggctaacatggtgaaaccccgtctctactaaaaatacaaaaaattagccaggcgcggtggcgggcgcctgtagtcccagctgctcaggaggctgaggcaggagaatggtgtgaaccccggaggcagagcttgcagtgagccgagattgtgccactgcactccagcctgggcaacagagcgagactccgtctc

SEQ ID NO: 106777 - DNA, 517 bp, Homo sapiens
cctccccatctcgtcgacttttttaacttaaagtcaactgattataggctttaaggttccccacttctatctaggacatggtcttcacaaggatcatctggctgagagttaagagaattaaactgggaatgcattgatggggcaaatttgcatgtgctttacatatcatttgctcacactgctgtaaacctgacagcatattctctgccacattttcatggttgccctgaaggatctgcttttccatttttctcttctctgacccattatgactgcgaaggtcaatgaccaacagcatcactgactgcagagagggccagagaagggaagcaccagcaggctgcgaggacctgctcccagccccctgcccactggggccactgcacgaggaagacagggcacccactcttctacctgctgacctgacttttatttagttccttgggacttcctactgctttgtcctggacacagtgacaggtgccaggatatggggactggttggcatcagtcctga

SEQ ID NO: 106778 - DNA, 330 bp, Homo sapiens
aatccttccgtcgacctttgagctaattttttttctgcagtcagaggagaatcatatcatcatatctcatattttattccagcattattgagaggataaagaaatgtctgtgaactgctttgaactttagaataagtatccaaataaaatgtacaaacaataaaaataagagaacatgtcattacagaaacagttcagtggcttccatcaaaacatctatcaacatttcaagtctccgatttcaagtctaattctctgttgataaaactggaaaatccacttctttcattctgttttgatgtcgacgcggccgcgaatttagtagtagta

SEQ ID NO: 106779 - DNA, 193 bp, Homo sapiens
gggattacaggtgtgagccaccacaccggcccattctttcttttatactgagtattcagaaatttttttaaatgtgttttccacttacagcatttctcaggttggactagccatctttcaagtgttcagcagccttgttggacagcacagctctggagggtgattttatgtacattcccactgctctctctgc

SEQ ID NO: 106780 - DNA, 422 bp, Homo sapiens
tttttttttttgagatggagtctcgctcttgtcgcccaggctggagtgcagtggcagaatttcggctcactgcaacctctgcctcctggattcaagtgattctcctgcctcagcctcctgagtagttgggactacaggcatgtgccaccacgcccagctaattattttgtatttttagtagagatggggtttcaccatgttagccaggatggtctcgatctcctgaccttgcgatctgcctgcctctgcctcccaaagtgctgggattacaggcatgggccactgtgcccggccctatgctaccttatttctaaccaaaattttcatgatataggatgccaaagaatacatttctagcttcctttgtcatgattctttcagtcataagctaaaaggagcttataagaaaaaataattccgtt

SEQ ID NO: 106781 - DNA, 455 bp, Homo sapiens
tttttaaggctagtcaagtgaagcaacaggaatgtagaagaacaaataaatctgtaagtagctgtgatcaattagttgtaaacagcaccgcacttggaccagcctgtggtcacccttaacatctatccaaaagctgatgaaagcagcagcctgaaggcatcacgtggtacaagaggagcaggtaggcctgaaagagcaccccaccccaacttcccctttctttcttattctctactatttctcacatttctttctactgcctcactggttcttacacaggattggttccctatctagagggtgatgttaagtttaatggcatctgaggaacttattgtttaagcatgaatgtaacactgtaccaggtggctgtacagccctcaagccctacctacccaactctagtggggaaacctaggaattctccactaaccaatgtgaacaaggatgtgggc

SEQ ID NO: 106782 - DNA, 610 bp, Homo sapiens
ttggagagagggtctttgcagatgtaattaattaaggccaacaagatggaacttaggatagcccttaagtccagtgactgacatccttataagaaggggagaggacacagccacagaggggcagccacgtgaagacagagccagagatgggggtgatgcagccaccaggaacaccagggttgccggcagcccctgaagctggaggaggcctggaatggattctccttcagtctccggaaggaaccaacccagccaacgcatcagttttggacctctggcctccagaactgcaggaagaaatttgctaatttgagccactcggctcatgggactttgttttggcagccgcaggacactcatgcactgtccttggagtgtaagtttttattttaaacatgtggctccatttgccagaatctccccaacagaccccaaacccaatccagggtctaggcagggtagcagctttgacaggagcctgtcggtgctggtggctcctccatgccccagacaccttgccttcccccgccccgtcctctccagttctgtgtataacacattcctgacaagccacacacaatggggcaaaacattttggagatctataaaa

SEQ ID NO: 106783 - DNA, 300 bp, Homo sapiens
agtagagatggggtttcaccatgttggccaggctggtcttgaactcctgacctcaggcgatctgcctacctctgcctctcaaagtgctgggattacaggtgtgagccatcgcgcccggccaacagtgatcactttcaaactaacagaggttcaaaaataaaatcagacttaaccaaaaaccaggtaacagagctggtaggatatacagaaagactgacctcacgtatatcaacgattacagttaatattaatgaaggaaatgctctagtttaaaaacgagggttgtcaaagaccccacat

SEQ ID NO: 106784 - DNA, 276 bp, Homo sapiens
gttatgggatggacgaatgtcagggtgcaggcaaaaaaagggattggattgaggctaaaggagacatagaataaaatattccatgaagaaaggcatagtgagaatccaaagcaagcaaactattccttataaaataattgaatgggttttcacttctagtagtaggactatcttatcccattcagtgtttctttcctgttttctttttgttaggtagttaaacctctgagatttgatctctgagaggtaataccgtagatctgtgttatgattggt

SEQ ID NO: 106785 - DNA, 353 bp, Homo sapiens
atctggtgagggccttcttgctggtggggactctgcagtcctgaggcagtgcggggcatcacatggccggggctgagtgtgctaacatgcttgctcaggacgctcttcctctacgtataaagccctacttccactcctgttacataacccatgaattccttaacccactaattcatgaacggattaatccattaatgagggcagagccttcatgatccaatcacctcttaaaggccctgccacattggggataaagtttccaacatatggaatttggggaacacacattgaaaccatagcacattccatctacaattttctctttgccatgtaacctaacatatttacaggtt

SEQ ID NO: 106786 - DNA, 497 bp, Homo sapiens
attctctccacacccccacaaatctagcaggtcccacactgacttagtccacctcctttacctagatatccaatccatcatccctgccactgccttcgacgagacccctgctctctctcagaaccccgtccatggccccttaaatgtttccatcacctccatcctgtgtgtgtgtgtgtgtgtgtttgtgtgtgtgtgtgtgtgtgtgtgtgtattctatactctgccatatggaagcatctgtcattctcaaatgtgataatatgatgtgctctttcaaagcctggtccatgaacaaacattggcccctcatttggagtatcttcacatttctattcctagcggcaacgactgtgcctggcacatggcaggggcactgtaaatgttgacgaatgctaactggtgctgcccggcaaaatagaacacatggtaccatttgacttattttctgaaatgtatggagatgaatggaaaaaataaagatctgtccaggaaaa

SEQ ID NO: 106787 - DNA, 175 bp, Homo sapiens
tcaggacggtaagtcttcttctaaagttacatgaaagttgttttttaatgtttcatttgtgcaatgtattactttcaccattacatgaaaaacagaattgaaaaagacactgattaccacacatagcctttaagctgaaggaagaattttcatgctatgtgtatcatacctgtgg

SEQ ID NO: 106788 - DNA, 410 bp, Homo sapiens
taggagattgtgacaaaagcgagaaagattgtacacaaggatatttatcctgaattcaaaaaggaaaaagtaaaatatttgagtaagtcttgatatatccttataatatacagccattaagatgatcagaggtctgtaatgactagagaagacattattcatgagaaaactaggttagacccttcctgggattatccaattaatagaagtatgtccacctaatgatgtgattatatgcatagaaataatagaaggatattaatatgctaacaattgtttactgtggcatggaaggttgggatgatattttaacttttcaaaaaattacagtgacatcaattttaccaaagtaaaagtgaaacaaagttatgcataaatgaaaatcccttatagctaaatcttgtttgttt

SEQ ID NO: 106789 - DNA, 423 bp, Homo sapiens
cacaccaacacggcacatgtatacatatgtaacaaacctgcacattgtgcacatgtaccctagaatttaaagtataatttaaaaaaaaaagaaaaagaaaaagacctttactcctaggagcagagtcaggaaacagtttatagtccaggctcctataccagtacactgaagatttgctaccactggggaaggagcagaaaatctctcctgcacaaaacctatcaaagaaatggggccgggtgcagggctcaggcttgtaatcccagcactttgggaggccaaggtgggaggatcacctgaggtcaggagttcgagaccagcctggccaacatggtgaaaccctgtctctactaaaaacacaaaattagccgggtttggtggcacatggctgtaatcccagctgcttgggaggctgaggcagaa

SEQ ID NO: 106790 - DNA, 430 bp, Homo sapiens
ccccagctcatgctcttctctgtgccccctcccataaatacctgcccctacatctataaataatgccacctgtttgctgtcaccagaaaatgtggggcttgttctagaacttcacataagtggggccagacagtaggaacccgtctgtgtctggggaacactgaggtagacccccgttgtccaccatggccctagtccctgccttggcgcagtgactgatcccctgttggtcccacccaccctcctccctgcaggaacgggttctgggtggtttcggcctgggcgtttttcacattttacagactggacgtcaccgccttgcacttttctcccaaggaggcctcgctgagatttctcggagcaggcacttgggcctccctcgccggcgtcttccgggaggccactccctgctggacccagggacgccccg

SEQ ID NO: 106791 - DNA, 432 bp, Homo sapiens
gagggtggggggatttatgctatctccctaacatgttaattctgcaagaagtgtatcccctcttatggatttctgccccatggcgttttgcatagtgctgggcatttagtaacactcgggctgagtagctttgaaaccatcaaatgtactttatagagaaggagcttggtgttgggggaggaagccagagataaagagtaccgtcctgcttacctgcttccagacttccacagaatgcccactctgctctgttccctagaatgtgttaattcatccactcattcaacacataggtctagagtgcttgctgtttgccagatatgatatttgctgctgggcatcagcagtgaacgacagatgctgtgtcctatgtgccgtgcttgatggatgacccatcacagtcacattactgatagcaggggcatggttaat

SEQ ID NO: 106792 - DNA, 590 bp, Homo sapiens
agccctgctctctgcaggcaagaggaagggactgagcctttcatgcccagttcttcctactaaactcaccaatcaaaggcacgagaacaagagggaggccctaggtttcccttcacatgaagaaaacaatggagagtgagtagtctgcagttatatctctaatgcctttgcatttggagtaaagcatgaactccttacttgaggtcactgggattgtctacttctccatcttcatcttttctaacttcctctcactccctaagcggcacacacactggccttctttctttgtttctcaagtatgccacattagtccctaaaggccttttaactttcttttccttctttaaggaccattctgccctcaggactaattatttttcattattcacatttgtgctcaaatgtcaccacagcgtaataacatgatcacccaatttcaaagaaatctttcagtcatttatcatcttattttattagattcactgaactaatcattatctgaaattgtattgtttatctgtttgtttgcatgtatattatttgcttccttccaactctcaaatatcgacttcatggaatcacgatta

SEQ ID NO: 106793 - DNA, 304 bp, Homo sapiens
ctgatcttgtccctgttgagaactgtggagactgtgccaagctgtggaccatgggattaggttaggtaactaaagaaaatatccaggctgtgagcacttttcaaacctaagaaaatctttagtttcttttgcacagttgtaaaccgtttgtgcttaaaaaattataaaagtgattgcagttgagatagagaaaagagcagtgctgatatgtgtttatatacttctaagggctgacttcatttttttcaacatcttaaacttctattgaacaaatattgtgtgtgtaggtgtgtgtttgtgtgtg

SEQ ID NO: 106794 - DNA, 906 bp, Homo sapiens
cattttgtatggaactgtctcacatattgtactcctggctcccactcacaaaatgccagtagtgctcccagatcattgtgacaatcagaaaagcccctaaacgttccaaaacatcctgaacaggcagtactgccgctattgagaaccactgatgtgtaggatttggagttggcacagactgctaatttgtggtttcaaggtcaagctcaaggctttgtgcctttgagcacagcaatgggcacacttgaaagtgagtcctttgagggttttttgttttgtgttacagttcagtgaggggtcaaaagatgaaaaatacaaagaaaacgggatttgtgtattttaaaagctaatttgcatacaaatatgtgtttgtatttatttctggtgaagtcttgaagtctgccaacatttttttcaaaagttagacgtcatgtcttagaaatggttttcactttgtaagcatttgtatgggaatacaaaatatcattttttggcaacacctatatttgtaggaccataacccttcataattaaatgtgagtaatctaccttttccttctacagagtcaggtctcaggttgactcctctgatcctcctctgcttagtcctttcggggcactgatttcaggatgacaccagggcgatggagtgtcccatcaatcccagtgtgttctctaatggaaaatgtgcttttctaattcaaaccagatttggctggtctcaaagagtaaaatctttaatataaagttgggttgtgtttttaagctaaaaaacaaaaacaggctgggcacagtggctcacgccttaatttcagcactttgggaggccaatgtgagaggatgactttgaggccaggagtttgagatcagcctgggcaacaaagtgagaccccatctctattttta

SEQ ID NO: 106795 - DNA, 320 bp, Homo sapiens
gctctcctgatggctagcagtgtcaaggatgcctgctttctacccaatgatgccggcagagagggagggaagagccctgggggcaacggctcctctcccctcgacagtggtgccatggatgggtggctaccccagtcaagggtccggccagagtggagacttctgcccacaaggtctctgctgctggtttgccaaagaagaaaacaagccaggtgactagacactgcccgtggccagacaggggagcccctctccccagctctccctgccgagcgctttcgcggactctggtggaggtatgtctactccctgacccctct

SEQ ID NO: 106796 - DNA, 371 bp, Homo sapiens
  misc_feature (311)..(311): n is a, c, g, or t
  misc_feature (319)..(319): n is a, c, g, or t
cagaagccaaaaaggtcttaaaattggaaatagatgtctttattgtacttcagccaacagcaagccaggggaaggaacatacataaatatgacaggtcatatatgaaatttggctctcctcctatcaaagtagcctaggagcttggaggaagcctaattaactaaaacaggaaaaaagcatactcatctgatgtaaaaactcatcagctgtaaattaccaacattaaaccagaagtcattaccagttaaaatgtgtggttttcatcttattcttaaataggagaggtggacagtagtgtaagtaacattgntttttaanggccattaaagcttttcccctggggtaaaacatggggtcttaaaattggggg

SEQ ID NO: 106797 - DNA, 760 bp, Homo sapiens
gaagaagccccagttgttggttcaaagttgatagagactttgctccctagatcacctattttagcgtcaggcaggacagcttagtagtcaagagctctggagtcagactgtctgggtttgaattttggccttgttcagtattaactgtgggatcttgagaaagttacttaaccttttgatgttcagtttcctcatctgtaaagtgtggataatatacttaccttatatagggttgtttcgataagtaaatgaaataatctttaaaaagcaattcgcatagttactaaaataatgtaagagttcaaaaaatgatgaagtgcttattttattattgaatatgtcatctatatgttgtcagcttggactaaagaggaaagaattgtgtgaggcatgggcattgaacaatggtaaagtagtatttcctgatgagtgtttactcaggaaaagggtggtactgacttaataggcttttagccctatatccacttctgctattcttatctcagatgtatttgtttatattgaatgtatatcaagaaatgtattacaggccaggtgcagtggctcaggcctgtaatcctagcacttagggagtccaaggcgggtggattacctgaggtcaggagttcgagaccaacctggccatcatggagaaaccctatctgtactaaaaatgtaaacattagcaggacatggtggcacatgcccgtaatcccagttactcaggagactgaggcaggagaatctcttgattctccac

SEQ ID NO: 106798 - DNA, 5466 bp, Homo sapiens
tgagggctttgctatgacctcagtcccctcacggagccacgactgccccttgctgccacagcctttccaagaccctgcccggccctgccccatcctcagccccgagtcaccatgggcagcgtcagtagcctcatctccggccacagcttccacagcaagcactgccgggcttcgcagtacaagctgcgcaagtcctcccacctcaagaagctcaaccggtattccgacgggctgctgaggtttggcttctcccaggactccggtcacggcaagtccagctccaaaatgggcaagagcgaagacttcttctacatcaaggtcagccagaaagcccggggctcccatcacccagattacacggcactgtccagcggggatttagggggccaggctggggtggactttgacccgtccacaccccccaagctcatgcccttctccaatcagctagaaatgggctccgagaagggtgcagtgaggcccacagccttcaagcctgtgctgccacggtcaggagccatcctgcactcctccccggagagtgccagccaccagctgcaccccgcccctccagacaagcccaaggagcaggagctgaagcctggcctgtgctctggggcgctgtcagactccggccggaactccatgtccagcctgcccacacacagcaccagcagcagctaccagctggacccgctggtcacacccgtgggacccacaagccgttttgggggctccgcccacaacatcacccagggcatcgtcctccaggacagcaacatgatgagcctgaaggctctgtccttctccgacggaggtagcaagctgggccactcgaacaaggcagacaagggcccctcgtgtgtccgctcccccatctccacggacgagtgcagcatccaggagctggagcagaagctgttggagagggagggcgccctccagaagctgcagcgcagctttgaggagaaggagcttgcctccagcctggcctacgaggagcggccgcggcgctgcagggacgagctggagggcccggagcccaaaggcggcaacaagctcaagcaggcctcgcagaagagccagcgcgcgcagcaggtcctgcacctgcaggtactgcagcttcagcaggagaagcggcagctccggcaggagctcgagagcctcatgaaggagcaggacctgctggagaccaagctcaggtcctacgagagggagaagaccagcttcggccccgcgctggaggagacccagtgggaggtgtgccagaagtcaggcgagatctccctcctgaagcagcagctgaaggagtcccagacggaggtgaacgccaaggctagcgagatcctgggtctcaaggcacagctgaaggacacgcggggcaagctggagggcctggagctgaggacccaggacctggagggcgccctgcgcaccaagggcctggagctggaggtctgtgagaatgagctgcagcgcaagaagaacgaggcggagctgctgcgggagaaggtgaacctgctggagcaggagctgcaggagctgcgggcccaggccgccctggcccgcgacatggggccgcccaccttccccgaggacgtccctgccctgcagcgggagctggagcggctgcgggccgagctgcgggaggagcggcaaggccatgaccagatgtcctcgggcttccagcatgagcggctcgtgtggaaggaggagaaggagaaggtgattcagtaccagaaacagctgcagcagagctacgtggccatgtaccagcggaaccagcgcctggagaaggccctgcagcagctggcacgtggggacagcgccggggagcccttggaggttgacctggaaggggctgacatcccctacgaggacatcatagccactgagatctgaggggctgcctgggaaggcgagtctggggacctggcactgggaggcagggctctcccgtgcatcccccctgctcagcaattcagacccctctgagagacgccactccctgggacacagacccaggacccccgaggggagggcaggatggcctttccttccctctctgatgtcccagtgctcaccagccctgcagcccaccagacgtcaggccctgactcctctggctttcccaggagatgggtccaggggtctgtctgctttggttaagggctccctaaactttggcctttgttcgaaatagatatcctctccccctcctccagggaaggtggccacagcaagaacagcggctcccctccgcttctcatcccaacctctttttcctcctggacacattggaatgccttggaaatagaaagaagccatatatgaccagaagccttggaaccagccccatcagaacctgagctattttcctctggccgcagaggtgtaggggtggaatgagccgcggggaagctggctttgaaacctcagggctgtcccagccccggcaagccacaggaaggaggggagagacaggcagcccagcagtgtggagaccctgccacagccagaggagggcagagggagaatccaagggttgagagccagtggcgggtgatggccagcccctggggcccagcccctgtttactggttcttgcaaatgggagctgagcagcctctggacagccagtgacctttgacctcggtgaccactcttctttaagccatagaccctgaggccctgggctgggtgctgggaagggagggttgaaaccaccgtgaaccagagggtgtggctttccagtcaccctcagggagcctccccatctgtccagctggggccagaggctgggagtccctacctgcttcacgttggccggcggctactctggaatgtttttccctccccagaatcaagcttttgcttgatccagaagagcccatatcactaagatggcatatatgtgatctgggcattttcctcctctgcctacagccaggtttagcggcaaacctttcccccttagcaccttcagggctgagttctgggtttctagaggtcaggacggctcctcagagcgccaggaagccagagccccaagcaggacgaaaaagaggcatacacacagcagtgtgaatagcctggccaccagccatcctccctccacctcaagacccccatttgtcccagactaaaggatccagagagcagctccctttctcaggagcttgggcagtgccccagggagtccagggtttctctgcagatgtgcggagcgggaggcggtggtagagagagataaaaggtggagtttctctgttgtttggttcagggattttatttttaattttatgagacagggtcttgctctgtcccccaggctggagtgcagtggcatgatcatagctcactgcagcctcatactcctgggctcaagcaatcctcctgcctcagccttccaactagctgggactacaggtgcgcgccaccgtgcctggctaacttttcattttttttgtagggacggggtctcgttttgttgccaaagctggtctcaaacttgtggcctcaagcaatccacctgccttggcctcccaaagtgctgagattgcagatgtgagccaccgtgcctggccagatttttcttttattcttctttctttttcttttttgctttcttgtcttttcagaagcaagccagacctagcaggctgttccatgttctatttttgactgtagccacagctgctgttctcaggacagcatcccttcccacatgcctgcgcctgctgcctgctgagatgaggaggggagcgtctgggaacttgcgagtccaaggccagtccccatttctgcctcgctcaccgctggcccttagagaccccgaggtaggggtggggagatgcttctctccttgccccccgccctcatgggtcctagcccttccctgagtgcgggctgaggccagagtcaccttttctgtggctggctctaccttcctgtccctgaggttaaacggtgcccatgctgccatcctcaaacgacagaggagcttttctggaatttcaaaccattgctcttagtcccaagctaggcttaaacctggaatctacaagccaaaagtccctccctgcctgagggcagtaccctccattgggcacagtccagacccaagtcaaagatgccccattccttgcgcctcagccctcagttccttcatttccaccaggccgtgccttgtttgagtttttcctcccagtgagactgccccacggagacagaggaaagggctggctccccctccccaggctggagacccccccccaactccaggaaagagcagtcagagtccagtgctctgcctcagacgttgcctgagaagaagtggctgccacacccaggggaaggccctgaggcggaggctgtgctccgccatggtgtcccggtaccttccatacacagaggagtgcagccttctccatatctccatggccctgtcccaggccggcccagatgtgtcccccccaggccttgtcctacgtccaaggtggcagatgtcttccctgggctgccaccagcccccgccccagagtggcccaccgtggcactagaatgcaagtatcctgcgaccttgcaacctcaccttcctgtgggtgttctttcctgccctgtccaaaagcgccctcactattcttggaccatgccagattctgcctctctggaaagaggctctggacagcagaagcctccaagcacagagcctggccccaggccccagacagggtgggcttcctgcccttccctctgggcacgcctgctggccgacccactgacccactcggatggaccaacctgctctgtccccaaaggacgcctgcaggagagagcagcactccgcatcacctcaccaaggatcggactctgcccctggacctgggaacgactggactgtcacggggttccctcctagctctcccagtgaactcctgccaggcacacacagcccctatagcactgagctcacatgggactgggatatgggggcatctcttccccagagaggcactcagtgagcctcctgtgcctggccccagcctgggccatctcttaggtgagacagttgcccgaaactaagccaggcctggctggaggagcagcagcttggggagagggatttccctgcagacctcaagccatcatgcggtgggtgctgccatgacagaggctgcacccctgggccagcggggctgctcacccacctcttgtgcaaggtggcctttgtgctgcgcctgcaggcagagctggagcccccagcagaggcaggctgggacggaccagcatctggaagatgtacatagttatttttctctttgtggtttcttgtttggtttggtttgcttttgacagcttcattttatttttgacgtcactttttggccatgtaaactatttgtggcaattttatgtttttatttatgaataaagaatgccatttctcacgccaaaaaaaaaaac

SEQ ID NO: 106799 - DNA, 5359 bp, Homo sapiens
tgagggctttgctatgacctcagtcccctcacggagccacgactgccccttgctgccacagcctttccaagaccctgcccggccctgccccatcctcagccccgagtcaccatgggcagcgtcagtagcctcatctccggccacagcttccacagcaagcactgccgggcttcgcagtacaagctgcgcaagtcctcccacctcaagaagctcaaccggtattccgacgggctgctgaggtttggcttctcccaggactccggtcacggcaagtccagctccaaaatgggcaagagcgaagacttcttctacatcaaggtcagccagaaagcccggggctcccatcacccagattacacggcactgtccagcggggatttagggggccaggctggggtggactttgacccgtccacaccccccaagctcatgcccttctccaatcagctagaaatgggctccgagaagggtgcagtgaggcccacagccttcaagcctgtgctgccacggtcaggagccatcctgcactcctccccggagagtgccagccaccagctgcaccccgcccctccagacaagcccaaggagcaggagctgaagcctggcctgtgctctggggcgctgtcagactccggccggaactccatgtccagcctgcccacacacagcaccagcagcagctaccagctggacccgctggtcacacccgtgggacccacaagccgttttgggggctccgcccacaacatcacccagggcatcgtcctccaggacagcaacatgatgagcctgaaggctctgtccttctccgacggaggtagcaagctgggccactcgaacaaggcagacaagggcccctcgtgtgtccgctcccccatctccacggacgagtgcagcatccaggagctggagcagaagctgttggagagggagggcgccctccagaagctgcagcgcagctttgaggagaaggagcttgcctccagcctggcctacgaggagcggccgcggcgctgcagggacgagctggagggcccggagcccaaaggcggcaacaagctcaagcaggcctcgcagaagagccagcgcgcgcagcaggtcctgcacctgcaggtactgcagcttcagcaggagaagcggcagctccggcaggagctcgagagcctcatgaaggagcaggacctgctggagaccaagctcaggtcctacgagagggagaagaccagcttcggccccgcgctggaggagacccagtgggaggtgtgccagaagtcaggcgagatctccctcctgaagcagcagctgaaggagtcccagacggaggtgaacgccaaggctagcgagatcctgggtctcaaggcacagctgaaggacacgcggggcaagctggagggcctggagctgaggacccaggacctggagggcgccctgcgcaccaagggcctggagctggaggtctgtgagaatgagctgcagcgcaagaagaacgaggcggagctgctgcgggagaaggtgagagcggctgcgggccgagctgcgggaggagcggcaaggccatgaccagatgtcctcgggcttccagcatgagcggctcgtgtggaaggaggagaaggagaaggtgattcagtaccagaaacagctgcagcagagctacgtggccatgtaccagcggaaccagcgcctggagaaggccctgcagcagctggcacgtggggacagcgccggggagcccttggaggttgacctggaaggggctgacatcccctacgaggacatcatagccactgagatctgaggggctgcctgggaaggcgagtctggggacctggcactgggaggcagggctctcccgtgcatcccccctgctcagcaattcagacccctctgagagacgccactccctgggacacagacccaggacccccgaggggagggcaggatggcctttccttccctctctgatgtcccagtgctcaccagccctgcagcccaccagacgtcaggccctgactcctctggctttcccaggagatgggtccaggggtctgtctgctttggttaagggctccctaaactttggcctttgttcgaaatagatatcctctccccctcctccagggaaggtggccacagcaagaacagcggctcccctccgcttctcatcccaacctctttttcctcctggacacattggaatgccttggaaatagaaagaagccatatatgaccagaagccttggaaccagccccatcagaacctgagctattttcctctggccgcagaggtgtaggggtggaatgagccgcggggaagctggctttgaaacctcagggctgtcccagccccggcaagccacaggaaggaggggagagacaggcagcccagcagtgtggagaccctgccacagccagaggagggcagagggagaatccaagggttgagagccagtggcgggtgatggccagcccctggggcccagcccctgtttactggttcttgcaaatgggagctgagcagcctctggacagccagtgacctttgacctcggtgaccactcttctttaagccatagaccctgaggccctgggctgggtgctgggaagggagggttgaaaccaccgtgaaccagagggtgtggctttccagtcaccctcagggagcctccccatctgtccagctggggccagaggctgggagtccctacctgcttcacgttggccggcggctactctggaatgtttttccctccccagaatcaagcttttgcttgatccagaagagcccatatcactaagatggcatatatgtgatctgggcattttcctcctctgcctacagccaggtttagcggcaaacctttcccccttagcaccttcagggctgagttctgggtttctagaggtcaggacggctcctcagagcgccaggaagccagagccccaagcaggacgaaaaagaggcatacacacagcagtgtgaatagcctggccaccagccatcctccctccacctcaagacccccatttgtcccagactaaaggatccagagagcagctccctttctcaggagcttgggcagtgccccagggagtccagggtttctctgcagatgtgcggagcgggaggcggtggtagagagagataaaaggtggagtttctctgttgtttggttcagggattttatttttaattttatgagacagggtcttgctctgtcccccaggctggagtgcagtggcatgatcatagctcactgcagcctcatactcctgggctcaagcaatcctcctgcctcagccttccaactagctgggactacaggtgcgcgccaccgtgcctggctaacttttcattttttttgtagggacggggtctcgttttgttgccaaagctggtctcaaacttgtggcctcaagcaatccacctgccttggcctcccaaagtgctgagattgcagatgtgagccaccgtgcctggccagatttttcttttattcttctttctttttcttttttgctttcttgtcttttcagaagcaagccagacctagcaggctgttccatgttctatttttgactgtagccacagctgctgttctcaggacagcatcccttcccacatgcctgcgcctgctgcctgctgagatgaggaggggagcgtctgggaacttgcgagtccaaggccagtccccatttctgcctcgctcaccgctggcccttagagaccccgaggtaggggtggggagatgcttctctccttgccccccgccctcatgggtcctagcccttccctgagtgcgggctgaggccagagtcaccttttctgtggctggctctaccttcctgtccctgaggttaaacggtgcccatgctgccatcctcaaacgacagaggagcttttctggaatttcaaaccattgctcttagtcccaagctaggcttaaacctggaatctacaagccaaaagtccctccctgcctgagggcagtaccctccattgggcacagtccagacccaagtcaaagatgccccattccttgcgcctcagccctcagttccttcatttccaccaggccgtgccttgtttgagtttttcctcccagtgagactgccccacggagacagaggaaagggctggctccccctccccaggctggagacccccccccaactccaggaaagagcagtcagagtccagtgctctgcctcagacgttgcctgagaagaagtggctgccacacccaggggaaggccctgaggcggaggctgtgctccgccatggtgtcccggtaccttccatacacagaggagtgcagccttctccatatctccatggccctgtcccaggccggcccagatgtgtcccccccaggccttgtcctacgtccaaggtggcagatgtcttccctgggctgccaccagcccccgccccagagtggcccaccgtggcactagaatgcaagtatcctgcgaccttgcaacctcaccttcctgtgggtgttctttcctgccctgtccaaaagcgccctcactattcttggaccatgccagattctgcctctctggaaagaggctctggacagcagaagcctccaagcacagagcctggccccaggccccagacagggtgggcttcctgcccttccctctgggcacgcctgctggccgacccactgacccactcggatggaccaacctgctctgtccccaaaggacgcctgcaggagagagcagcactccgcatcacctcaccaaggatcggactctgcccctggacctgggaacgactggactgtcacggggttccctcctagctctcccagtgaactcctgccaggcacacacagcccctatagcactgagctcacatgggactgggatatgggggcatctcttccccagagaggcactcagtgagcctcctgtgcctggccccagcctgggccatctcttaggtgagacagttgcccgaaactaagccaggcctggctggaggagcagcagcttggggagagggatttccctgcagacctcaagccatcatgcggtgggtgctgccatgacagaggctgcacccctgggccagcggggctgctcacccacctcttgtgcaaggtggcctttgtgctgcgcctgcaggcagagctggagcccccagcagaggcaggctgggacggaccagcatctggaagatgtacatagttatttttctctttgtggtttcttgtttggtttggtttgcttttgacagcttcattttatttttgacgtcactttttggccatgtaaactatttgtggcaattttatgtttttatttatgaataaagaatgccatttctcacgccaaaaaaaaaaac

SEQ ID NO: 106800 - DNA, 5191 bp, Homo sapiens
tgagggctttgctatgacctcagtcccctcacggagccacgactgccccttgctgccacagcctttccaagaccctgcccggccctgccccatcctcagccccgagtcaccatgggcagcgtcagtagcctcatctccggccacagcttccacagcaagcactgccgggcttcgcagtacaagctgcgcaagtcctcccacctcaagaagctcaaccggtattccgacgggctgctgaggtttggcttctcccaggactccggtcacggcaagtccagctccaaaatgggcaagagcgaagacttcttctacatcaaggtcagccagaaagcccggggctcccatcacccagattacacggcactgtccagcggggatttagggggccaggctggggtggactttgacccgtccacaccccccaagctcatgcccttctccaatcagctagaaatgggctccgagaagggtgcagtgaggcccacagccttcaagcctgtgctgccacggtcaggagccatcctgcactcctccccggagagtgccagccaccagctgcaccccgcccctccagacaagcccaaggagcaggagctgaagcctggcctgtgctctggggcgctgtcagactccggccggaactccatgtccagcctgcccacacacagcaccagcagcagctaccagctggacccgctggtcacacccgtgggacccacaagccgttttgggggctccgcccacaacatcacccagggcatcgtcctccaggacagcaacatgatgagcctgaaggctctgtccttctccgacggaggtagcaagctgggccactcgaacaaggcagacaagggcccctcgtgtgtccgctcccccatctccacggacgagtgcagcatccaggagctggagcagaagctgttggagagggagggcgccctccagaagctgcagcgcagctttgaggagaaggagcttgcctccagcctggcctacgaggagcggccgcggcgctgcagggacgagctggagggcccggagcccaaaggcggcaacaagctcaagcaggcctcgcagaagagccagcgcgcgcagcaggtcctgcacctgcaggtactgcagcttcagcaggagaagcggcagctccggcaggagctcgagagcctcatgaaggagcaggacctgctggagaccaagctcaggtcctacgagagggagaagaccagcttcggccccgcgctggaggagacccagtgggaggtgtgccagaagtcaggcgagatctccctcctgaagcagcagctgaaggagtcccagacggaggtgaacgccaaggctagcgagatcctgggtctcaaggcacagctgaaggacacgcggggcaagctggagggcctggagctgaggacccaggacctggagggcgccctgcgcaccaagggcctggagctggaggtctgtgagaatgagctgcagccagagctacgtggccatgtaccagcggaaccagcgcctggagaaggccctgcagcagctggcacgtggggacagcgccggggagcccttggaggttgacctggaaggggctgacatcccctacgaggacatcatagccactgagatctgaggggctgcctgggaaggcgagtctggggacctggcactgggaggcagggctctcccgtgcatcccccctgctcagcaattcagacccctctgagagacgccactccctgggacacagacccaggacccccgaggggagggcaggatggcctttccttccctctctgatgtcccagtgctcaccagccctgcagcccaccagacgtcaggccctgactcctctggctttcccaggagatgggtccaggggtctgtctgctttggttaagggctccctaaactttggcctttgttcgaaatagatatcctctccccctcctccagggaaggtggccacagcaagaacagcggctcccctccgcttctcatcccaacctctttttcctcctggacacattggaatgccttggaaatagaaagaagccatatatgaccagaagccttggaaccagccccatcagaacctgagctattttcctctggccgcagaggtgtaggggtggaatgagccgcggggaagctggctttgaaacctcagggctgtcccagccccggcaagccacaggaaggaggggagagacaggcagcccagcagtgtggagaccctgccacagccagaggagggcagagggagaatccaagggttgagagccagtggcgggtgatggccagcccctggggcccagcccctgtttactggttcttgcaaatgggagctgagcagcctctggacagccagtgacctttgacctcggtgaccactcttctttaagccatagaccctgaggccctgggctgggtgctgggaagggagggttgaaaccaccgtgaaccagagggtgtggctttccagtcaccctcagggagcctccccatctgtccagctggggccagaggctgggagtccctacctgcttcacgttggccggcggctactctggaatgtttttccctccccagaatcaagcttttgcttgatccagaagagcccatatcactaagatggcatatatgtgatctgggcattttcctcctctgcctacagccaggtttagcggcaaacctttcccccttagcaccttcagggctgagttctgggtttctagaggtcaggacggctcctcagagcgccaggaagccagagccccaagcaggacgaaaaagaggcatacacacagcagtgtgaatagcctggccaccagccatcctccctccacctcaagacccccatttgtcccagactaaaggatccagagagcagctccctttctcaggagcttgggcagtgccccagggagtccagggtttctctgcagatgtgcggagcgggaggcggtggtagagagagataaaaggtggagtttctctgttgtttggttcagggattttatttttaattttatgagacagggtcttgctctgtcccccaggctggagtgcagtggcatgatcatagctcactgcagcctcatactcctgggctcaagcaatcctcctgcctcagccttccaactagctgggactacaggtgcgcgccaccgtgcctggctaacttttcattttttttgtagggacggggtctcgttttgttgccaaagctggtctcaaacttgtggcctcaagcaatccacctgccttggcctcccaaagtgctgagattgcagatgtgagccaccgtgcctggccagatttttcttttattcttctttctttttcttttttgctttcttgtcttttcagaagcaagccagacctagcaggctgttccatgttctatttttgactgtagccacagctgctgttctcaggacagcatcccttcccacatgcctgcgcctgctgcctgctgagatgaggaggggagcgtctgggaacttgcgagtccaaggccagtccccatttctgcctcgctcaccgctggcccttagagaccccgaggtaggggtggggagatgcttctctccttgccccccgccctcatgggtcctagcccttccctgagtgcgggctgaggccagagtcaccttttctgtggctggctctaccttcctgtccctgaggttaaacggtgcccatgctgccatcctcaaacgacagaggagcttttctggaatttcaaaccattgctcttagtcccaagctaggcttaaacctggaatctacaagccaaaagtccctccctgcctgagggcagtaccctccattgggcacagtccagacccaagtcaaagatgccccattccttgcgcctcagccctcagttccttcatttccaccaggccgtgccttgtttgagtttttcctcccagtgagactgccccacggagacagaggaaagggctggctccccctccccaggctggagacccccccccaactccaggaaagagcagtcagagtccagtgctctgcctcagacgttgcctgagaagaagtggctgccacacccaggggaaggccctgaggcggaggctgtgctccgccatggtgtcccggtaccttccatacacagaggagtgcagccttctccatatctccatggccctgtcccaggccggcccagatgtgtcccccccaggccttgtcctacgtccaaggtggcagatgtcttccctgggctgccaccagcccccgccccagagtggcccaccgtggcactagaatgcaagtatcctgcgaccttgcaacctcaccttcctgtgggtgttctttcctgccctgtccaaaagcgccctcactattcttggaccatgccagattctgcctctctggaaagaggctctggacagcagaagcctccaagcacagagcctggccccaggccccagacagggtgggcttcctgcccttccctctgggcacgcctgctggccgacccactgacccactcggatggaccaacctgctctgtccccaaaggacgcctgcaggagagagcagcactccgcatcacctcaccaaggatcggactctgcccctggacctgggaacgactggactgtcacggggttccctcctagctctcccagtgaactcctgccaggcacacacagcccctatagcactgagctcacatgggactgggatatgggggcatctcttccccagagaggcactcagtgagcctcctgtgcctggccccagcctgggccatctcttaggtgagacagttgcccgaaactaagccaggcctggctggaggagcagcagcttggggagagggatttccctgcagacctcaagccatcatgcggtgggtgctgccatgacagaggctgcacccctgggccagcggggctgctcacccacctcttgtgcaaggtggcctttgtgctgcgcctgcaggcagagctggagcccccagcagaggcaggctgggacggaccagcatctggaagatgtacatagttatttttctctttgtggtttcttgtttggtttggtttgcttttgacagcttcattttatttttgacgtcactttttggccatgtaaactatttgtggcaattttatgtttttatttatgaataaagaatgccatttctcacgccaaaaaaaaaaac

SEQ ID NO: 106801 - DNA, 5122 bp, Homo sapiens
tgagggctttgctatgacctcagtcccctcacggagccacgactgccccttgctgccacagcctttccaagaccctgcccggccctgccccatcctcagccccgagtcaccatgggcagcgtcagtagcctcatctccggccacagcttccacagcaagcactgccgggcttcgcagtacaagctgcgcaagtcctcccacctcaagaagctcaaccggtattccgacgggctgctgaggtttggcttctcccaggactccggtcacggcaagtccagctccaaaatgggcaagagcgaagacttcttctacatcaaggtcagccagaaagcccggggctcccatcacccagattacacggcactgtccagcggggatttagggggccaggctggggtggactttgacccgtccacaccccccaagctcatgcccttctccaatcagctagaaatgggctccgagaagggtgcagtgaggcccacagccttcaagcctgtgctgccacggtcaggagccatcctgcactcctccccggagagtgccagccaccagctgcaccccgcccctccagacaagcccaaggagcaggagctgaagcctggcctgtgctctggggcgctgtcagactccggccggaactccatgtccagcctgcccacacacagcaccagcagcagctaccagctggacccgctggtcacacccgtgggacccacaagccgttttgggggctccgcccacaacatcacccagggcatcgtcctccaggacagcaacatgatgagcctgaaggctctgtccttctccgacggaggtagcaagctgggccactcgaacaaggcagacaagggcccctcgtgtgtccgctcccccatctccacggacgagtgcagcatccaggagctggagcagaagctgttggagagggagggcgccctccagaagctgcagcgcagctttgaggagaaggagcttgcctccagcctggcctacgaggagcggccgcggcgctgcagggacgagctggagggcccggagcccaaaggcggcaacaagctcaagcaggcctcgcagaagagccagcgcgcgcagcaggtcctgcacctgcaggtactgcagcttcagcaggagaagcggcagctccggcaggagctcgagagcctcatgaaggagcaggacctgctggagaccaagctcaggtcctacgagagggagaagaccagcttcggccccgcgctggaggagacccagtgggaggtgtgccagaagtcaggcgagatctccctcctgaagcagcagctgaaggagtcccagacggaggtgaacgccaaggctagcgagatcctgggtctcaaggcacagctgaaggacacgcggggcaagctggagggcctggagctgaggacccaggacctggagggcgccctgcgcaccaagggcctggagctggaggtctgtgagaatgagctgcagcgcaagaagaacgaggcggagctgctgcgggagaaggtgaacctgctggagcaggagctgcaggagctgcgggcccaggccgccctggcccgcgacatggggccgcccaccttccccgaggacgtccctgccctgcagcgggagctggagcggctcgtgtggaaggaggagaaggagaaggtgattcagtaccagaaacagctgcagcagagctacgtggccatgtaccagcggaaccagcgcctggagaaggccctgcagcagctggcacgtggggacagcgccggggagcccttggaggttgacctggaaggggctgacatcccctacgaggacatcatagccactgagatctgaggggctgcctgggaaggcgagtctggggacctggcactgggaggcagggctctcccgtgcatcccccctgctcagcaattcagacccctctgagagacgccactccctgggacacagacccaggacccccgaggggagggcaggatggcctttccttccctctctgatgtcccagtgctcaccagccctgcagcccaccagacgtcaggccctgactcctctggctttcccaggagatgggtccaggggtctgtctgctttggttaagggctccctaaactttggcctttgttcgaaatagagacaggcagcccagcagtgtggagaccctgccacagccagaggagggcagagggagaatccaagggttgagagccagtggcgggtgatggccagcccctggggcccagcccctgtttactggttcttgcaaatgggagctgagcagcctctggacagccagtgacctttgacctcggtgaccactcttctttaagccatagaccctgaggccctgggctgggtgctgggaagggagggttgaaaccaccgtgaaccagagggtgtggctttccagtcaccctcagggagcctccccatctgtccagctggggccagaggctgggagtccctacctgcttcacgttggccggcggctactctggaatgtttttccctccccagaatcaagcttttgcttgatccagaagagcccatatcactaagatggcatatatgtgatctgggcattttcctcctctgcctacagccaggtttagcggcaaacctttcccccttagcaccttcagggctgagttctgggtttctagaggtcaggacggctcctcagagcgccaggaagccagagccccaagcaggacgaaaaagaggcatacacacagcagtgtgaatagcctggccaccagccatcctccctccacctcaagacccccatttgtcccagactaaaggatccagagagcagctccctttctcaggagcttgggcagtgccccagggagtccagggtttctctgcagatgtgcggagcgggaggcggtggtagagagagataaaaggtggagtttctctgttgtttggttcagggattttatttttaattttatgagacagggtcttgctctgtcccccaggctggagtgcagtggcatgatcatagctcactgcagcctcatactcctgggctcaagcaatcctcctgcctcagccttccaactagctgggactacaggtgcgcgccaccgtgcctggctaacttttcattttttttgtagggacggggtctcgttttgttgccaaagctggtctcaaacttgtggcctcaagcaatccacctgccttggcctcccaaagtgctgagattgcagatgtgagccaccgtgcctggccagatttttcttttattcttctttctttttcttttttgctttcttgtcttttcagaagcaagccagacctagcaggctgttccatgttctatttttgactgtagccacagctgctgttctcaggacagcatcccttcccacatgcctgcgcctgctgcctgctgagatgaggaggggagcgtctgggaacttgcgagtccaaggccagtccccatttctgcctcgctcaccgctggcccttagagaccccgaggtaggggtggggagatgcttctctccttgccccccgccctcatgggtcctagcccttccctgagtgcgggctgaggccagagtcaccttttctgtggctggctctaccttcctgtccctgaggttaaacggtgcccatgctgccatcctcaaacgacagaggagcttttctggaatttcaaaccattgctcttagtcccaagctaggcttaaacctggaatctacaagccaaaagtccctccctgcctgagggcagtaccctccattgggcacagtccagacccaagtcaaagatgccccattccttgcgcctcagccctcagttccttcatttccaccaggccgtgccttgtttgagtttttcctcccagtgagactgccccacggagacagaggaaagggctggctccccctccccaggctggagacccccccccaactccaggaaagagcagtcagagtccagtgctctgcctcagacgttgcctgagaagaagtggctgccacacccaggggaaggccctgaggcggaggctgtgctccgccatggtgtcccggtaccttccatacacagaggagtgcagccttctccatatctccatggccctgtcccaggccggcccagatgtgtcccccccaggccttgtcctacgtccaaggtggcagatgtcttccctgggctgccaccagcccccgccccagagtggcccaccgtggcactagaatgcaagtatcctgcgaccttgcaacctcaccttcctgtgggtgttctttcctgccctgtccaaaagcgccctcactattcttggaccatgccagattctgcctctctggaaagaggctctggacagcagaagcctccaagcacagagcctggccccaggccccagacagggtgggcttcctgcccttccctctgggcacgcctgctggccgacccactgacccactcggatggaccaacctgctctgtccccaaaggacgcctgcaggagagagcagcactccgcatcacctcaccaaggatcggactctgcccctggacctgggaacgactggactgtcacggggttccctcctagctctcccagtgaactcctgccaggcacacacagcccctatagcactgagctcacatgggactgggatatgggggcatctcttccccagagaggcactcagtgagcctcctgtgcctggccccagcctgggccatctcttaggtgagacagttgcccgaaactaagccaggcctggctggaggagcagcagcttggggagagggatttccctgcagacctcaagccatcatgcggtgggtgctgccatgacagaggctgcacccctgggccagcggggctgctcacccacctcttgtgcaaggtggcctttgtgctgcgcctgcaggcagagctggagcccccagcagaggcaggctgggacggaccagcatctggaagatgtacatagttatttttctctttgtggtttcttgtttggtttggtttgcttttgacagcttcattttatttttgacgtcactttttggccatgtaaactatttgtggcaattttatgtttttatttatgaataaagaatgccatttctcacgccaaaaaaaaaaac

SEQ ID NO: 106802 - DNA, 5362 bp, Homo sapiens
tgagggctttgctatgacctcagtcccctcacggagccacgactgccccttgctgccacagcctttccaagaccctgcccggccctgccccatcctcagccccgagtcaccatgggcagcgtcagtagcctcatctccggccacagcttccacagcaagcactgccgggcttcgcagtacaagctgcgcaagtcctcccacctcaagaagctcaaccggtattccgacgggctgctgaggtttggcttctcccaggactccggtcacggcaagtccagctccaaaatgggcaagagcgaagacttcttctacatcaaggtcagccagaaagcccggggctcccatcacccagattacacggcactgtccagcggggatttagggggccaggctggggtggactttgacccgtccacaccccccaagctcatgcccttctccaatcagctagaaatgggctccgagaagggtgcagtgaggcccacagccttcaagcctgtgctgccacggtcaggagccatcctgcactcctccccggagagtgccagccaccagctgcaccccgcccctccagacaagcccaaggagcaggagctgaagcctggcctgtgctctggggcgctgtcagactccggccggaactccatgtccagcctgcccacacacagcaccagcagcagctaccagctggacccgctggtcacacccgtgggacccacaagccgttttgggggctccgcccacaacatcacccagggcatcgtcctccaggacagcaacatgatgagcctgaaggctctgtccttctccgacggaggtagcaagctgggccactcgaacaaggcagacaagggcccctcgtgtgtccgctcccccatctccacggacgagtgcagcatccaggagctggagcagaagctgttggagagggagggcgccctccagaagctgcagcgcagctttgaggagaaggagcttgcctccagcctggcctacgaggagcggccgcggcgctgcagggacgagctggagggcccggagcccaaaggcggcaacaagctcaagcaggcctcgcagaagagccagcgcgcgcagcaggtcctgcacctgcaggtactgcagcttcagcaggagaagcggcagctccggcaggagctcgagagcctcatgaaggagcaggacctgctggagaccaagctcaggtcctacgagagggagaagaccagcttcggccccgcgctggaggagacccagtgggaggtgtgccagaagtcaggcgagatctccctcctgaagcagcagctgaaggagtcccagacggaggtgaacgccaaggctagcgagatcctgggtctcaaggcacagctgaaggacacgcggggcaagctggagggcctggagctgaggacccaggacctggagggcgccctgcgcaccaagggcctggagctggaggtctgtgagaatgagctgcagcgcaagaagaacgaggcggagctgctgcgggagaaggtgaacctgctggagcaggagctgcaggagctgcgggcccaggccgccctggcccgcgacatggggccgcccaccttccccgaggacgtccctgccctgcagcgggagctggagcggctcgtgtggaaggaggagaaggagaaggtgattcagtaccagaaacagctgcagcagagctacgtggccatgtaccagcggaaccagcgcctggagaaggccctgcagcagctggcacgtggggacagcgccggggagcccttggaggttgacctggaaggggctgacatcccctacgaggacatcatagccactgagatctgaggggctgcctgggaaggcgagtctggggacctggcactgggaggcagggctctcccgtgcatcccccctgctcagcaattcagacccctctgagagacgccactccctgggacacagacccaggacccccgaggggagggcaggatggcctttccttccctctctgatgtcccagtgctcaccagccctgcagcccaccagacgtcaggccctgactcctctggctttcccaggagatgggtccaggggtctgtctgctttggttaagggctccctaaactttggcctttgttcgaaatagatatcctctccccctcctccagggaaggtggccacagcaagaacagcggctcccctccgcttctcatcccaacctctttttcctcctggacacattggaatgccttggaaatagaaagaagccatatatgaccagaagccttggaaccagccccatcagaacctgagctattttcctctggccgcagaggtgtaggggtggaatgagccgcggggaagctggctttgaaacctcagggctgtcccagccccggcaagccacaggaaggaggggagagacaggcagcccagcagtgtggagaccctgccacagccagaggagggcagagggagaatccaagggttgagagccagtggcgggtgatggccagcccctggggcccagcccctgtttactggttcttgcaaatgggagctgagcagcctctggacagccagtgacctttgacctcggtgaccactcttctttaagccatagaccctgaggccctgggctgggtgctgggaagggagggttgaaaccaccgtgaaccagagggtgtggctttccagtcaccctcagggagcctccccatctgtccagctggggccagaggctgggagtccctacctgcttcacgttggccggcggctactctggaatgtttttccctccccagaatcaagcttttgcttgatccagaagagcccatatcactaagatggcatatatgtgatctgggcattttcctcctctgcctacagccaggtttagcggcaaacctttcccccttagcaccttcagggctgagttctgggtttctagaggtcaggacggctcctcagagcgccaggaagccagagccccaagcaggacgaaaaagaggcatacacacagcagtgtgaatagcctggccaccagccatcctccctccacctcaagacccccatttgtcccagactaaaggatccagagagcagctccctttctcaggagcttgggcagtgccccagggagtccagggtttctctgcagatgtgcggagcgggaggcggtggtagagagagataaaaggtggagtttctctgttgtttggttcagggattttatttttaattttatgagacagggtcttgctctgtcccccaggctggagtgcagtggcatgatcatagctcactgcagcctcatactcctgggctcaagcaatcctcctgcctcagccttccaactagctgggactacaggtgcgcgccaccgtgcctggctaacttttcattttttttgtagggacggggtctcgttttgttgccaaagctggtctcaaacttgtggcctcaagcaatccacctgccttggcctcccaaagtgctgagattgcagatgtgagccaccgtgcctggccagatttttcttttattcttctttctttttcttttttgctttcttgtcttttcagaagcaagccagacctagcaggctgttccatgttctatttttgactgtagccacagctgctgttctcaggacagcatcccttcccacatgcctgcgcctgctgcctgctgagatgaggaggggagcgtctgggaacttgcgagtccaaggccagtccccatttctgcctcgctcaccgctggcccttagagaccccgaggtaggggtggggagatgcttctctccttgccccccgccctcatgggtcctagcccttccctgagtgcgggctgaggccagagtcaccttttctgtggctggctctaccttcctgtccctgaggttaaacggtgcccatgctgccatcctcaaacgacagaggagcttttctggaatttcaaaccattgctcttagtcccaagctaggcttaaacctggaatctacaagccaaaagtccctccctgcctgagggcagtaccctccattgggcacagtccagacccaagtcaaagatgccccattccttgcgcctcagccctcagttccttcatttccaccaggccgtgccttgtttgagtttttcctcccagtgagactgccccacggagacagaggaaagggctggctccccctccccaggctggagacccccccccaactccaggaaagagcagtcagagtccagtgctctgcctcagacgttgcctgagaagaagtggctgccacacccaggggaaggccctgaggcggaggctgtgctccgccatggtgtcccggtaccttccatacacagaggagtgcagccttctccatatctccatggccctgtcccaggccggcccagatgtgtcccccccaggccttgtcctacgtccaaggtggcagatgtcttccctgggctgccaccagcccccgccccagagtggcccaccgtggcactagaatgcaagtatcctgcgaccttgcaacctcaccttcctgtgggtgttctttcctgccctgtccaaaagcgccctcactattcttggaccatgccagattctgcctctctggaaagaggctctggacagcagaagcctccaagcacagagcctggccccaggccccagacagggtgggcttcctgcccttccctctgggcacgcctgctggccgacccactgacccactcggatggaccaacctgctctgtccccaaaggacgcctgcaggagagagcagcactccgcatcacctcaccaaggatcggactctgcccctggacctgggaacgactggactgtcacggggttccctcctagctctcccagtgaactcctgccaggcacacacagcccctatagcactgagctcacatgggactgggatatgggggcatctcttccccagagaggcactcagtgagcctcctgtgcctggccccagcctgggccatctcttaggtgagacagttgcccgaaactaagccaggcctggctggaggagcagcagcttggggagagggatttccctgcagacctcaagccatcatgcggtgggtgctgccatgacagaggctgcacccctgggccagcggggctgctcacccacctcttgtgcaaggtggcctttgtgctgcgcctgcaggcagagctggagcccccagcagaggcaggctgggacggaccagcatctggaagatgtacatagttatttttctctttgtggtttcttgtttggtttggtttgcttttgacagcttcattttatttttgacgtcacttttttttttttttcttcttatgaataaagaatgccatttcaaaaacaaa

SEQ ID NO: 106803 - DNA, 3176 bp, Homo sapiens
tgagggctttgctatgacctcagtcccctcacggagccacgactgccccttgctgccacagcctttccaagaccctgcccggccctgccccatcctcagccccgagtcaccatgggcagcgtcagtagcctcatctccggccacagcttccacagcaagcactgccgggcttcgcagtacaagctgcgcaagtcctcccacctcaagaagctcaaccggtattccgacgggctgctgaggtttggcttctcccaggactccggtcacggcaagtccagctccaaaatgggcaagagcgaagacttcttctacatcaaggtcagccagaaagcccggggctcccatcacccagattacacggcactgtccagcggggatttagggggccaggctggggtggactttgacccgtccacaccccccaagctcatgcccttctccaatcagctagaaatgggctccgagaagggtgcagtgaggcccacagccttcaagcctgtgctgccacggtcaggagccatcctgcactcctccccggagagtgccagccaccagctgcaccccgcccctccagacaagcccaaggagcaggagctgaagcctggcctgtgctctggggcgctgtcagactccggccggaactccatgtccagcctgcccacacacagcaccagcagcagctaccagctggacccgctggtcacacccgtgggacccacaagccgttttgggggctccgcccacaacatcacccagggcatcgtcctccaggacagcaacatgatgagcctgaaggctctgtccttctccgacggaggtagcaagctgggccactcgaacaaggcagacaagggcccctcgtgtgtccgctcccccatctccacggacgagtgcagcatccaggagctggagcagaagctgttggagagggagggcgccctccagaagctgcagcgcagctttgaggagaaggagcttgcctccagcctggcctacgaggagcggccgcggcgctgcagggacgagctggagggcccggagcccaaaggcggcaacaagctcaagcaggcctcgcagaagagccagcgcgcgcagcaggtcctgcacctgcaggtactgcagcttcagcaggagaagcggcagctccggcaggagctcgagagcctcatgaaggagcaggacctgctggagaccaagctcaggtcctacgagagggagaagaccagcttcggccccgcgctggaggagacccagtgggaggtgtgccagaagtcaggcgagatctccctcctgaagcagcagctgaaggagtcccagacggaggtgaacgccaaggctagcgagatcctgggtctcaaggcacagctgaaggacacgcggggcaagctggagggcctggagctgaggacccaggacctggagggcgccctgcgcaccaagggcctggagctggaggtctgtgagaatgagctgcagcgcaagaagaacgaggcggagctgctgcgggagaaggtgaacctgctggagcaggagctgcaggagctgcgggcccaggccgccctggcccgcgacatggggccgcccaccttccccgaggacgtccctgccctgcagcgggagctggagcggctcgtgtggaaggaggagaaggagaaggtgattcagtaccagaaacagctgcagcagagctacgtggccatgtaccagcggaaccagcgcctggagaaggccctgcagcagctggcacgtggggacagcgccggggagcccttggaggttgacctggaaggggctgacatcccctacgaggacatcatagccactgagatctgaggggctgcctgggaaggcgagtctggggacctggcactgggaggcagggctctcccgtgcatcccccctgctcagcaattcagacccctctgagagacgccactccctgggacacagacccaggacccccgaggggagggcaggatggcctttccttccctctctgatgtcccagtgctcaccagccctgcagcccaccagacgtcaggccctgactcctctggctttcccaggagatgggtccaggggtctgtctgctttggttaagggctccctaaactttggcctttgttcgaaatagatatcctctccccctcctccagggaaggtggccacagcaagaacagcggctcccctccgcttctcatcccaacctctttttcctcctggacacattggaatgccttggaaatagaaagaagccatatatgaccagaagccttggaaccagccccatcagaacctgagctattttcctctggccgcagaggtgtaggggtggaatgagccgcggggaagctggctttgaaacctcagggctgtcccagccccggcaagccacaggaaggaggggagagacaggcagcccagcagtgtggagaccctgccacagccagaggagggcagagggagaatccaagggttgagagccagtggcgggtgatggccagcccctggggcccagcccctgtttactggttcttgcaaatgggagctgagcagcctctggacagccagtgacctttgacctcggtgaccactcttctttaagccatagaccctgaggccctgggctgggtgctgggaagggagggttgaaaccaccgtgaaccagagggtgtggctttccagtcaccctcagggagcctccccatctgtccagctggggccagaggctgggagtccctacctgcttcacgttggccggcggctactctggaatgtttttccctccccagaatcaagcttttgcttgatccagaagagcccatatcactaagatggcatatatgtgatctgggcattttcctcctctgcctacagccaggtttagcggcaaacctttcccccttagcaccttcagggctgagttctgggtttctagaggtcaggacggctcctcagagcgccaggaagccagagccccaagcaggacgaaaaagaggcatacacacagcagtgtgaatagcctggccaccagccatcctccctccacctcaagacccccatttgtcccagactaaaggatccagagagcagctccctttctcaggagcttgggcagtgccccatgcgcactaccatgatatctctgccattatcagagcttccactccgttata

SEQ ID NO: 106804 - DNA, 704 bp, Homo sapiens
tactctagaggatctttgtcagctctctcggatggaccaacctgctctgtccccaaaggacgcctgcaggagagagcagcactccgcatcacctcaccaaggatcggactctgcccctggacctgggaacgactggactgtcacggggttccctcctagctctcccagtgaactcctgccaggcacacacagcccctatagcactgagctcacatgggactgggatatgggggcatctcttccccagagaggcactcagtgagcctcctgtgcctggccccagcctgggccatctcttaggtgagacagttgcccgaaactaagccaggcctggctggaggagcagcagcttggggagagggatttccctgcagacctcaagccatcatgcggtgggtgctgccatgacagaggctgcacccctgggccagcggggctgctcacccacctcttgtgcaaggtggcctttgtgctgcgcctgcaggcagagctggagcccccagcagaggcaggctgggacggaccagcatctggaagatgtacatagttatttttctctttgtggtttcttgtttggtttggtttgcttttgacagcttcattttatttttgacgtcactttttggccatgtaaactatttgtggcaattttatgtttttatttatgaataaagaatgccatttctcacgccaaaaaaaaaaac

SEQ ID NO: 106805 - DNA, 1438 bp, Homo sapiens
tgagggctttgctatgacctcagtcccctcacggagccacgactgccccttgctgccacagcctttccaagaccctgcccggccctgccccatcctcagccccgagtcaccatgggcagcgtcagtagcctcatctccggccacagcttccacagcaagcactgccgggcttcgcagtacaagctgcgcaagtcctcccacctcaagaagctcaaccggtattccgacgggctgctgaggtttggcttctcccaggactccggtcacggcaagtccagctccaaaatgggcaagagcgaagacttcttctacatcaaggtcagccagaaagcccggggctcccatcacccagattacacggcactgtccagcggggatttagggggccaggctggggtggactttgacccgtccacaccccccaagctcatgcccttctccaatcagctagaaatgggctccgagaagggtgcagtgaggcccacagccttcaagcctgtgctgccacggtcaggagccatcctgcactcctccccggagagtgccagccaccagctgcaccccgcccctccagacaagcccaaggagcaggagctgaagcctggcctgtgctctggggcgctgtcagactccggccggaactccatgtccagcctgcccacacacagcaccagcagcagctaccagctggacccgctggtcacacccgtgggacccacaagccgttttgggggctccgcccacaacatcacccagggcatcgtcctccaggacagcaacatgatgagcctgaaggctctgtccttctccgacggaggtagcaagctgggccactcgaacaaggcagacaagggcccctcgtgtgtccgctcccccatctccacggacgagtgcagcatccaggagctggagcagaagctgttggagagggagggcgccctccagaagctgcagcgcagctttgaggagaaggagcttgcctccagcctggcctacgaggagcggccgcggcgctgcagggacgagctggagggcccggagcccaaaggcggcaacaagctcaagtcctacgagagggagaagaccagcttcggccccgcgctggaggagacccagtgggaggtgaggccacacagggctcatgggtttgggtggtcagcggtttggcgccagtacccccctctccttctggtgccggccaatagcgtgcaaacacagaccgcgcaggcaagcggggctaatgtgctggctttatcacccaaagaaggggctccctgcaaaccatgttgggggatcgacttacatctgagcttcctcctgtccccaccatcaccctcatggctcctagatttcagtttcccaagtgagccattaaatcatgaagccggaagccagatgaccaaggcccagccaggctgtgggctgacctcccttccat

SEQ ID NO: 106806 - DNA, 5397 bp, Homo sapiens
tgagggctttgctatgacctcagtcccctcacggagccacgactgccccttgctgccacagcctttccaagaccctgcccggccctgccccatcctcagccccgagtcaccatgggcagcgtcagtagcctcatctccggccacagcttccacagcaagcactgccgggcttcgcagtacaagctgcgcaagtcctcccacctcaagaagctcaaccggtattccgacgggctgctgaggtttggcttctcccaggactccggtcacggcaagtccagctccaaaatgggcaagagcgaagacttcttctacatcaaggtcagccagaaagcccggggctcccatcacccagattacacggcactgtccagcggggatttagggggccaggctggggtggactttgacccgtccacaccccccaagctcatgcccttctccaatcagctagaaatgggctccgagaagggtgcagtgaggcccacagccttcaagcctgtgctgccacggtcaggagccatcctgcactcctccccggagagtgccagccaccagctgcaccccgcccctccagacaagcccaaggagcaggagctgaagcctggcctgtgctctggggcgctgtcagactccggccggaactccatgtccagcctgcccacacacagcaccagcagcagctaccagctggacccgctggtcacacccgtgggacccacaagccgttttgggggctccgcccacaacatcacccagggcatcgtcctccaggacagcaacatgatgagcctgaaggctctgtccttctccgacggaggtagcaagctgggccactcgaacaaggcagacaagggcccctcgtgtgtccgctcccccatctccacggacgagtgcagcatccaggagctggagcagaagctgttggagagggagggcgccctccagaagctgcagcgcagctttgaggagaaggagcttgcctccagcctggcctacgaggagcggccgcggcgctgcagggacgagctggagggcccggagcccaaaggcggcaacaagctcaagcaggcctcgcagaagagccagcgcgcgcagcaggtcctgcacctgcaggtactgcagcttcagcaggagaagcggcagctccggcaggagctcgagagcctcatgaaggagcaggacctgctggagaccaagctcaggtcctacgagagggagaagaccagcttcggccccgcgctggaggagacccagtgggaggtgtgccagaagtcaggcgagatctccctcctgaagcagcagctgaaggagtcccagacggaggtgaacgccaaggctagcgagatcctgggtctcaaggcacagctgaaggacacgcggggcaagctggagggcctggagctgaggacccaggacctggagggcgccctgcgcaccaagggcctggagctggaggtctgtgagaatgagctgcagcgcaagaagaacgaggcggagctgctgcgggagaaggtgaacctgctggagcaggagctgcaggagctgcgggcccaggccgccctggcccgcgacatggggccgcccaccttccccgaggacgtccctgccctgcagcgggagctggagcggctcgtgtggaaggaggagaaggagaaggtgattcagtaccagaaacagctgcagcagagctacgtggccatgtaccagcggaaccagcgcctggagaaggccctgcagcagctggcacgtggggacagcgccggggagcccttggaggttgacctggaaggggctgacatcccctacgaggacatcatagccactgagatctgaggggctgcctgggaaggcgagtctggggacctggcactgggaggcagggctctcccgtgcatcccccctgctcagcaattcagacccctctgagagacgccactccctgggacacagacccaggacccccgaggggagggcaggatggcctttccttccctctctgatgtcccagtgctcaccagccctgcagcccaccagacgtcaggccctgactcctctggctttcccaggagatgggtccaggggtctgtctgctttggttaagggctccctaaactttggcctttgttcgaaatagatatcctctccccctcctccagggaaggtggccacagcaagaacagcggctcccctccgcttctcatcccaacctctttttcctcctggacacattggaatgccttggaaatagaaagaagccatatatgaccagaagccttggaaccagccccatcagaacctgagctattttcctctggccgcagaggtgtaggggtggaatgagccgcggggaagctggctttgaaacctcagggctgtcccagccccggcaagccacaggaaggaggggagagacaggcagcccagcagtgtggagaccctgccacagccagaggagggcagagggagaatccaagggttgagagccagtggcgggtgatggccagcccctggggcccagcccctgtttactggttcttgcaaatgggagctgagcagcctctggacagccagtgacctttgacctcggtgaccactcttctttaagccatagaccctgaggccctgggctgggtgctgggaagggagggttgaaaccaccgtgaaccagagggtgtggctttccagtcaccctcagggagcctccccatctgtccagctggggccagaggctgggagtccctacctgcttcacgttggccggcggctactctggaatgtttttccctccccagaatcaagcttttgcttgatccagaagagcccatatcactaagatggcatatatgtgatctgggcattttcctcctctgcctacagccaggtttagcggcaaacctttcccccttagcaccttcagggctgagttctgggtttctagaggtcaggacggctcctcagagcgccaggaagccagagccccaagcaggacgaaaaagaggcatacacacagcagtgtgaatagcctggccaccagccatcctccctccacctcaagacccccatttgtcccagactaaaggatccagagagcagctccctttctcaggagcttgggcagtgccccagggagtccagggtttctctgcagatgtgcggagcgggaggcggtggtagagagagataaaaggtggagtttctctgttgtttggttcagggattttatttttaattttatgagacagggtcttgctctgtcccccaggctggagtgcagtggcatgatcatagctcactgcagcctcatactcctgggctcaagcaatcctcctgcctcagccttccaactagctgggactacaggtgcgcgccaccgtgcctggctaacttttcattttttttgtagggacggggtctcgttttgttgccaaagctggtctcaaacttgtggcctcaagcaatccacctgccttggcctcccaaagtgctgagattgcagatgtgagccaccgtgcctggccagatttttcttttattcttctttctttttcttttttgctttcttgtcttttcagaagcaagccagacctagcaggctgttccatgttctatttttgactgtagccacagctgctgttctcaggacagcatcccttcccacatgcctgcgcctgctgcctgctgagatgaggaggggagcgtctgggaacttgcgagtccaaggccagtccccatttctgcctcgctcaccgctggcccttagagaccccgaggtaggggtggggagatgcttctctccttgccccccgccctcatgggtcctagcccttccctgagtgcgggctgaggccagagtcaccttttctgtggctggctctaccttcctgtccctgaggttaaacggtgcccatgctgccatcctcaaacgacagaggagcttttctggaatttcaaaccattgctcttagtcccaagctaggcttaaacctggaatctacaagccaaaagtccctccctgcctgagggcagtaccctccattgggcacagtccagacccaagtcaaagatgccccattccttgcgcctcagccctcagttccttcatttccaccaggccgtgccttgtttgagtttttcctcccagtgagactgccccacggagacagaggaaagggctggctccccctccccaggctggagacccccccccaactccaggaaagagcagtcagagtccagtgctctgcctcagacgttgcctgagaagaagtggctgccacacccaggggaaggccctgaggcggaggctgtgctccgccatggtgtcccggtaccttccatacacagaggagtgcagccttctccatatctccatggccctgtcccaggccggcccagatgtgtcccccccaggccttgtcctacgtccaaggtggcagatgtcttccctgggctgccaccagcccccgccccagagtggcccaccgtggcactagaatgcaagtatcctgcgaccttgcaacctcaccttcctgtgggtgttctttcctgccctgtccaaaagcgccctcactattcttggaccatgccagattctgcctctctggaaagaggctctggacagcagaagcctccaagcacagagcctggccccaggccccagacagggtgggcttcctgcccttccctctgggcacgcctgctggccgacccactgacccactcggatggaccaacctgctctgtccccaaaggacgcctgcaggagagagcagcactccgcatcacctcaccaaggatcggactctgcccctggacctgggaacgactggactgtcacggggttccctcctagctctcccagtgaactcctgccaggcacacacagcccctatagcactgagctcacatgggactgggatatgggggcatctcttccccagagaggcactcagtgagcctcctgtgcctggccccagcctgggccatctcttaggtgagacagttgcccgaaactaagccaggcctggctggaggagcagcagcttggggagagggatttccctgcagacctcaagccatcatgcggtgggtgctgccatgacagaggctgcacccctgggccagcggggctgctcacccacctcttgtgcaaggtggcctttgtgctgcgcctgcaggcagagctggagcccccagcagaggcaggctgggacggaccagcatctggaagatgtacatagttatttttctctttgtggtttcttgtttggtttggtttgcttttgacagcttcattttatttttgacgtcactttttggccatgtaaactatttgtggcaattttatgtttttatttatgaataaagaatgccatttctcacgccaaaaaaaaaaac

SEQ ID NO: 106807 - DNA, 5290 bp, Homo sapiens
tgagggctttgctatgacctcagtcccctcacggagccacgactgccccttgctgccacagcctttccaagaccctgcccggccctgccccatcctcagccccgagtcaccatgggcagcgtcagtagcctcatctccggccacagcttccacagcaagcactgccgggcttcgcagtacaagctgcgcaagtcctcccacctcaagaagctcaaccggtattccgacgggctgctgaggtttggcttctcccaggactccggtcacggcaagtccagctccaaaatgggcaagagcgaagacttcttctacatcaaggtcagccagaaagcccggggctcccatcacccagattacacggcactgtccagcggggatttagggggccaggctggggtggactttgacccgtccacaccccccaagctcatgcccttctccaatcagctagaaatgggctccgagaagggtgcagtgaggcccacagccttcaagcctgtgctgccacggtcaggagccatcctgcactcctccccggagagtgccagccaccagctgcaccccgcccctccagacaagcccaaggagcaggagctgaagcctggcctgtgctctggggcgctgtcagactccggccggaactccatgtccagcctgcccacacacagcaccagcagcagctaccagctggacccgctggtcacacccgtgggacccacaagccgttttgggggctccgcccacaacatcacccagggcatcgtcctccaggacagcaacatgatgagcctgaaggctctgtccttctccgacggaggtagcaagctgggccactcgaacaaggcagacaagggcccctcgtgtgtccgctcccccatctccacggacgagtgcagcatccaggagctggagcagaagctgttggagagggagggcgccctccagaagctgcagcgcagctttgaggagaaggagcttgcctccagcctggcctacgaggagcggccgcggcgctgcagggacgagctggagggcccggagcccaaaggcggcaacaagctcaagcaggcctcgcagaagagccagcgcgcgcagcaggtcctgcacctgcaggtactgcagcttcagcaggagaagcggcagctccggcaggagctcgagagcctcatgaaggagcaggacctgctggagaccaagctcaggtcctacgagagggagaagaccagcttcggccccgcgctggaggagacccagtgggaggtgtgccagaagtcaggcgagatctccctcctgaagcagcagctgaaggagtcccagacggaggtgaacgccaaggctagcgagatcctgggtctcaaggcacagctgaaggacacgcggggcaagctggagggcctggagctgaggacccaggacctggagggcgccctgcgcaccaagggcctggagctggaggtctgtgagaatgagctgcagcgcaagaagaacgaggcggagctgctgcgggagaaggtgagagcggctcgtgtggaaggaggagaaggagaaggtgattcagtaccagaaacagctgcagcagagctacgtggccatgtaccagcggaaccagcgcctggagaaggccctgcagcagctggcacgtggggacagcgccggggagcccttggaggttgacctggaaggggctgacatcccctacgaggacatcatagccactgagatctgaggggctgcctgggaaggcgagtctggggacctggcactgggaggcagggctctcccgtgcatcccccctgctcagcaattcagacccctctgagagacgccactccctgggacacagacccaggacccccgaggggagggcaggatggcctttccttccctctctgatgtcccagtgctcaccagccctgcagcccaccagacgtcaggccctgactcctctggctttcccaggagatgggtccaggggtctgtctgctttggttaagggctccctaaactttggcctttgttcgaaatagatatcctctccccctcctccagggaaggtggccacagcaagaacagcggctcccctccgcttctcatcccaacctctttttcctcctggacacattggaatgccttggaaatagaaagaagccatatatgaccagaagccttggaaccagccccatcagaacctgagctattttcctctggccgcagaggtgtaggggtggaatgagccgcggggaagctggctttgaaacctcagggctgtcccagccccggcaagccacaggaaggaggggagagacaggcagcccagcagtgtggagaccctgccacagccagaggagggcagagggagaatccaagggttgagagccagtggcgggtgatggccagcccctggggcccagcccctgtttactggttcttgcaaatgggagctgagcagcctctggacagccagtgacctttgacctcggtgaccactcttctttaagccatagaccctgaggccctgggctgggtgctgggaagggagggttgaaaccaccgtgaaccagagggtgtggctttccagtcaccctcagggagcctccccatctgtccagctggggccagaggctgggagtccctacctgcttcacgttggccggcggctactctggaatgtttttccctccccagaatcaagcttttgcttgatccagaagagcccatatcactaagatggcatatatgtgatctgggcattttcctcctctgcctacagccaggtttagcggcaaacctttcccccttagcaccttcagggctgagttctgggtttctagaggtcaggacggctcctcagagcgccaggaagccagagccccaagcaggacgaaaaagaggcatacacacagcagtgtgaatagcctggccaccagccatcctccctccacctcaagacccccatttgtcccagactaaaggatccagagagcagctccctttctcaggagcttgggcagtgccccagggagtccagggtttctctgcagatgtgcggagcgggaggcggtggtagagagagataaaaggtggagtttctctgttgtttggttcagggattttatttttaattttatgagacagggtcttgctctgtcccccaggctggagtgcagtggcatgatcatagctcactgcagcctcatactcctgggctcaagcaatcctcctgcctcagccttccaactagctgggactacaggtgcgcgccaccgtgcctggctaacttttcattttttttgtagggacggggtctcgttttgttgccaaagctggtctcaaacttgtggcctcaagcaatccacctgccttggcctcccaaagtgctgagattgcagatgtgagccaccgtgcctggccagatttttcttttattcttctttctttttcttttttgctttcttgtcttttcagaagcaagccagacctagcaggctgttccatgttctatttttgactgtagccacagctgctgttctcaggacagcatcccttcccacatgcctgcgcctgctgcctgctgagatgaggaggggagcgtctgggaacttgcgagtccaaggccagtccccatttctgcctcgctcaccgctggcccttagagaccccgaggtaggggtggggagatgcttctctccttgccccccgccctcatgggtcctagcccttccctgagtgcgggctgaggccagagtcaccttttctgtggctggctctaccttcctgtccctgaggttaaacggtgcccatgctgccatcctcaaacgacagaggagcttttctggaatttcaaaccattgctcttagtcccaagctaggcttaaacctggaatctacaagccaaaagtccctccctgcctgagggcagtaccctccattgggcacagtccagacccaagtcaaagatgccccattccttgcgcctcagccctcagttccttcatttccaccaggccgtgccttgtttgagtttttcctcccagtgagactgccccacggagacagaggaaagggctggctccccctccccaggctggagacccccccccaactccaggaaagagcagtcagagtccagtgctctgcctcagacgttgcctgagaagaagtggctgccacacccaggggaaggccctgaggcggaggctgtgctccgccatggtgtcccggtaccttccatacacagaggagtgcagccttctccatatctccatggccctgtcccaggccggcccagatgtgtcccccccaggccttgtcctacgtccaaggtggcagatgtcttccctgggctgccaccagcccccgccccagagtggcccaccgtggcactagaatgcaagtatcctgcgaccttgcaacctcaccttcctgtgggtgttctttcctgccctgtccaaaagcgccctcactattcttggaccatgccagattctgcctctctggaaagaggctctggacagcagaagcctccaagcacagagcctggccccaggccccagacagggtgggcttcctgcccttccctctgggcacgcctgctggccgacccactgacccactcggatggaccaacctgctctgtccccaaaggacgcctgcaggagagagcagcactccgcatcacctcaccaaggatcggactctgcccctggacctgggaacgactggactgtcacggggttccctcctagctctcccagtgaactcctgccaggcacacacagcccctatagcactgagctcacatgggactgggatatgggggcatctcttccccagagaggcactcagtgagcctcctgtgcctggccccagcctgggccatctcttaggtgagacagttgcccgaaactaagccaggcctggctggaggagcagcagcttggggagagggatttccctgcagacctcaagccatcatgcggtgggtgctgccatgacagaggctgcacccctgggccagcggggctgctcacccacctcttgtgcaaggtggcctttgtgctgcgcctgcaggcagagctggagcccccagcagaggcaggctgggacggaccagcatctggaagatgtacatagttatttttctctttgtggtttcttgtttggtttggtttgcttttgacagcttcattttatttttgacgtcactttttggccatgtaaactatttgtggcaattttatgtttttatttatgaataaagaatgccatttctcacgccaaaaaaaaaaac

SEQ ID NO: 106808 - DNA, 4307 bp, Homo sapiens
tgagggctttgctatgacctcagtcccctcacggagccacgactgccccttgctgccacagcctttccaagaccctgcccggccctgccccatcctcagccccgagtcaccatgggcagcgtcagtagcctcatctccggccacagcttccacagcaagcactgccgggcttcgcagtacaagctgcgcaagtcctcccacctcaagaagctcaaccggtattccgacgggctgctgaggtttggcttctcccaggactccggtcacggcaagtccagctccaaaatgggcaagagcgaagacttcttctacatcaaggtcagccagaaagcccggggctcccatcacccagattacacggcactgtccagcggggatttagggggccaggctggggtggactttgacccgtccacaccccccaagctcatgcccttctccaatcagctagaaatgggctccgagaagggtgcagtgaggcccacagccttcaagcctgtgctgccacggtcaggagccatcctgcactcctccccggagagtgccagccaccagctgcaccccgcccctccagacaagcccaaggagcaggagctgaagcctggcctgtgctctggggcgctgtcagactccggccggaactccatgtccagcctgcccacacacacgccggggagcccttggaggttgacctggaaggggctgacatcccctacgaggacatcatagccactgagatctgaggggctgcctgggaaggcgagtctggggacctggcactgggaggcagggctctcccgtgcatcccccctgctcagcaattcagacccctctgagagacgccactccctgggacacagacccaggacccccgaggggagggcaggatggcctttccttccctctctgatgtcccagtgctcaccagccctgcagcccaccagacgtcaggccctgactcctctggctttcccaggagatgggtccaggggtctgtctgctttggttaagggctccctaaactttggcctttgttcgaaatagatatcctctccccctcctccagggaaggtggccacagcaagaacagcggctcccctccgcttctcatcccaacctctttttcctcctggacacattggaatgccttggaaatagaaagaagccatatatgaccagaagccttggaaccagccccatcagaacctgagctattttcctctggccgcagaggtgtaggggtggaatgagccgcggggaagctggctttgaaacctcagggctgtcccagccccggcaagccacaggaaggaggggagagacaggcagcccagcagtgtggagaccctgccacagccagaggagggcagagggagaatccaagggttgagagccagtggcgggtgatggccagcccctggggcccagcccctgtttactggttcttgcaaatgggagctgagcagcctctggacagccagtgacctttgacctcggtgaccactcttctttaagccatagaccctgaggccctgggctgggtgctgggaagggagggttgaaaccaccgtgaaccagagggtgtggctttccagtcaccctcagggagcctccccatctgtccagctggggccagaggctgggagtccctacctgcttcacgttggccggcggctactctggaatgtttttccctccccagaatcaagcttttgcttgatccagaagagcccatatcactaagatggcatatatgtgatctgggcattttcctcctctgcctacagccaggtttagcggcaaacctttcccccttagcaccttcagggctgagttctgggtttctagaggtcaggacggctcctcagagcgccaggaagccagagccccaagcaggacgaaaaagaggcatacacacagcagtgtgaatagcctggccaccagccatcctccctccacctcaagacccccatttgtcccagactaaaggatccagagagcagctccctttctcaggagcttgggcagtgccccagggagtccagggtttctctgcagatgtgcggagcgggaggcggtggtagagagagataaaaggtggagtttctctgttgtttggttcagggattttatttttaattttatgagacagggtcttgctctgtcccccaggctggagtgcagtggcatgatcatagctcactgcagcctcatactcctgggctcaagcaatcctcctgcctcagccttccaactagctgggactacaggtgcgcgccaccgtgcctggctaacttttcattttttttgtagggacggggtctcgttttgttgccaaagctggtctcaaacttgtggcctcaagcaatccacctgccttggcctcccaaagtgctgagattgcagatgtgagccaccgtgcctggccagatttttcttttattcttctttctttttcttttttgctttcttgtcttttcagaagcaagccagacctagcaggctgttccatgttctatttttgactgtagccacagctgctgttctcaggacagcatcccttcccacatgcctgcgcctgctgcctgctgagatgaggaggggagcgtctgggaacttgcgagtccaaggccagtccccatttctgcctcgctcaccgctggcccttagagaccccgaggtaggggtggggagatgcttctctccttgccccccgccctcatgggtcctagcccttccctgagtgcgggctgaggccagagtcaccttttctgtggctggctctaccttcctgtccctgaggttaaacggtgcccatgctgccatcctcaaacgacagaggagcttttctggaatttcaaaccattgctcttagtcccaagctaggcttaaacctggaatctacaagccaaaagtccctccctgcctgagggcagtaccctccattgggcacagtccagacccaagtcaaagatgccccattccttgcgcctcagccctcagttccttcatttccaccaggccgtgccttgtttgagtttttcctcccagtgagactgccccacggagacagaggaaagggctggctccccctccccaggctggagacccccccccaactccaggaaagagcagtcagagtccagtgctctgcctcagacgttgcctgagaagaagtggctgccacacccaggggaaggccctgaggcggaggctgtgctccgccatggtgtcccggtaccttccatacacagaggagtgcagccttctccatatctccatggccctgtcccaggccggcccagatgtgtcccccccaggccttgtcctacgtccaaggtggcagatgtcttccctgggctgccaccagcccccgccccagagtggcccaccgtggcactagaatgcaagtatcctgcgaccttgcaacctcaccttcctgtgggtgttctttcctgccctgtccaaaagcgccctcactattcttggaccatgccagattctgcctctctggaaagaggctctggacagcagaagcctccaagcacagagcctggccccaggccccagacagggtgggcttcctgcccttccctctgggcacgcctgctggccgacccactgacccactcggatggaccaacctgctctgtccccaaaggacgcctgcaggagagagcagcactccgcatcacctcaccaaggatcggactctgcccctggacctgggaacgactggactgtcacggggttccctcctagctctcccagtgaactcctgccaggcacacacagcccctatagcactgagctcacatgggactgggatatgggggcatctcttccccagagaggcactcagtgagcctcctgtgcctggccccagcctgggccatctcttaggtgagacagttgcccgaaactaagccaggcctggctggaggagcagcagcttggggagagggatttccctgcagacctcaagccatcatgcggtgggtgctgccatgacagaggctgcacccctgggccagcggggctgctcacccacctcttgtgcaaggtggcctttgtgctgcgcctgcaggcagagctggagcccccagcagaggcaggctgggacggaccagcatctggaagatgtacatagttatttttctctttgtggtttcttgtttggtttggtttgcttttgacagcttcattttatttttgacgtcactttttggccatgtaaactatttgtggcaattttatgtttttatttatgaataaagaatgccatttctcacgccaaaaaaaaaaac

SEQ ID NO: 106809 - DNA, 4078 bp, Homo sapiens
tgagggctttgctatgacctcagtcccctcacggagccacgactgccccttgctgccacagcctttccaagaccctgcccggccctgccccatcctcagccccgagtcaccatgggcagcgtcagtagcctcatctccggccacagcttccacagcaagcactgccgggcttcgcagtacaagctgcgcaagtcctcccacctcaagaagctcaaccggtattccgacgggctgctgaggtttggcttctcccaggactccggtcacggcaagccatgaccagatgtcctcgggcttccagcatgagcggctcgtgtggaaggaggagaaggagaaggtgattcagtaccagaaacagctgcagcagagctacgtggccatgtaccagcggaaccagcgcctggagaaggccctgcagcagctggcacgtggggacagcgccggggagcccttggaggttgacctggaaggggctgacatcccctacgaggacatcatagccactgagatctgaggggctgcctgggaaggcgagtctggggacctggcactgggaggcagggctctcccgtgcatcccccctgctcagcaattcagacccctctgagagacgccactccctgggacacagacccaggacccccgaggggagggcaggatggcctttccttccctctctgatgtcccagtgctcaccagccctgcagcccaccagacgtcaggccctgactcctctggctttcccaggagatgggtccaggggtctgtctgctttggttaagggctccctaaactttggcctttgttcgaaatagatatcctctccccctcctccagggaaggtggccacagcaagaacagcggctcccctccgcttctcatcccaacctctttttcctcctggacacattggaatgccttggaaatagaaagaagccatatatgaccagaagccttggaaccagccccatcagaacctgagctattttcctctggccgcagaggtgtaggggtggaatgagccgcggggaagctggctttgaaacctcagggctgtcccagccccggcaagccacaggaaggaggggagagacaggcagcccagcagtgtggagaccctgccacagccagaggagggcagagggagaatccaagggttgagagccagtggcgggtgatggccagcccctggggcccagcccctgtttactggttcttgcaaatgggagctgagcagcctctggacagccagtgacctttgacctcggtgaccactcttctttaagccatagaccctgaggccctgggctgggtgctgggaagggagggttgaaaccaccgtgaaccagagggtgtggctttccagtcaccctcagggagcctccccatctgtccagctggggccagaggctgggagtccctacctgcttcacgttggccggcggctactctggaatgtttttccctccccagaatcaagcttttgcttgatccagaagagcccatatcactaagatggcatatatgtgatctgggcattttcctcctctgcctacagccaggtttagcggcaaacctttcccccttagcaccttcagggctgagttctgggtttctagaggtcaggacggctcctcagagcgccaggaagccagagccccaagcaggacgaaaaagaggcatacacacagcagtgtgaatagcctggccaccagccatcctccctccacctcaagacccccatttgtcccagactaaaggatccagagagcagctccctttctcaggagcttgggcagtgccccagggagtccagggtttctctgcagatgtgcggagcgggaggcggtggtagagagagataaaaggtggagtttctctgttgtttggttcagggattttatttttaattttatgagacagggtcttgctctgtcccccaggctggagtgcagtggcatgatcatagctcactgcagcctcatactcctgggctcaagcaatcctcctgcctcagccttccaactagctgggactacaggtgcgcgccaccgtgcctggctaacttttcattttttttgtagggacggggtctcgttttgttgccaaagctggtctcaaacttgtggcctcaagcaatccacctgccttggcctcccaaagtgctgagattgcagatgtgagccaccgtgcctggccagatttttcttttattcttctttctttttcttttttgctttcttgtcttttcagaagcaagccagacctagcaggctgttccatgttctatttttgactgtagccacagctgctgttctcaggacagcatcccttcccacatgcctgcgcctgctgcctgctgagatgaggaggggagcgtctgggaacttgcgagtccaaggccagtccccatttctgcctcgctcaccgctggcccttagagaccccgaggtaggggtggggagatgcttctctccttgccccccgccctcatgggtcctagcccttccctgagtgcgggctgaggccagagtcaccttttctgtggctggctctaccttcctgtccctgaggttaaacggtgcccatgctgccatcctcaaacgacagaggagcttttctggaatttcaaaccattgctcttagtcccaagctaggcttaaacctggaatctacaagccaaaagtccctccctgcctgagggcagtaccctccattgggcacagtccagacccaagtcaaagatgccccattccttgcgcctcagccctcagttccttcatttccaccaggccgtgccttgtttgagtttttcctcccagtgagactgccccacggagacagaggaaagggctggctccccctccccaggctggagacccccccccaactccaggaaagagcagtcagagtccagtgctctgcctcagacgttgcctgagaagaagtggctgccacacccaggggaaggccctgaggcggaggctgtgctccgccatggtgtcccggtaccttccatacacagaggagtgcagccttctccatatctccatggccctgtcccaggccggcccagatgtgtcccccccaggccttgtcctacgtccaaggtggcagatgtcttccctgggctgccaccagcccccgccccagagtggcccaccgtggcactagaatgcaagtatcctgcgaccttgcaacctcaccttcctgtgggtgttctttcctgccctgtccaaaagcgccctcactattcttggaccatgccagattctgcctctctggaaagaggctctggacagcagaagcctccaagcacagagcctggccccaggccccagacagggtgggcttcctgcccttccctctgggcacgcctgctggccgacccactgacccactcggatggaccaacctgctctgtccccaaaggacgcctgcaggagagagcagcactccgcatcacctcaccaaggatcggactctgcccctggacctgggaacgactggactgtcacggggttccctcctagctctcccagtgaactcctgccaggcacacacagcccctatagcactgagctcacatgggactgggatatgggggcatctcttccccagagaggcactcagtgagcctcctgtgcctggccccagcctgggccatctcttaggtgagacagttgcccgaaactaagccaggcctggctggaggagcagcagcttggggagagggatttccctgcagacctcaagccatcatgcggtgggtgctgccatgacagaggctgcacccctgggccagcggggctgctcacccacctcttgtgcaaggtggcctttgtgctgcgcctgcaggcagagctggagcccccagcagaggcaggctgggacggaccagcatctggaagatgtacatagttatttttctctttgtggtttcttgtttggtttggtttgcttttgacagcttcattttatttttgacgtcactttttggccatgtaaactatttgtggcaattttatgtttttatttatgaataaagaatgccatttctcacgccaaaaaaaaaaac

SEQ ID NO: 106810 - DNA, 4835 bp, Homo sapiens
tgagggctttgctatgacctcagtcccctcacggagccacgactgccccttgctgccacagcctttccaagaccctgcccggccctgccccatcctcagccccgagtcaccatgggcagcgtcagtagcctcatctccggccacagcttccacagcaagcactgccgggcttcgcagtacaagctgcgcaagtcctcccacctcaagaagctcaaccggtattccgacgggctgctgaggtttggcttctcccaggactccggtcacggcaagtccagctccaaaatgggcaagagcgaagacttcttctacatcaaggtcagccagaaagcccggggctcccatcacccagattacacggcactgtccagcggggatttagggggccaggctggggtggactttgacccgtccacaccccccaagctcatgcccttctccaatcagctagaaatgggctccgagaagggtgcagtgaggcccacagccttcaagcctgtgctgccacggtcaggagccatcctgcactcctccccggagagtgccagccaccagctgcaccccgcccctccagacaagcccaaggagcaggagctgaagcctggcctgtgctctggggcgctgtcagactccggccggaactccatgtccagcctgcccacacacagcaccagcagcagctaccagctggacccgctggtcacacccgtgggacccacaagccgttttgggggctccgcccacaacatcacccagggcatcgtcctccaggacagcaacatgatgagcctgaaggctctgtccttctccgacggaggtagcaagctgggccactcgaacaaggcagacaagggcccctcgtgtgtccgctcccccatctccacggacgagtgcagcatccaggagctggagcagaagctgttggagagggagggcgccctccagaagctgcagcgcagctttgaggagaaggagcttgcctccagcctggcctacgaggagcggccgcggcgctgcagggacgagctggagggcccggagcccaaaggcggcaacaagctcaagcaggcctcgcagaagagccagcgcgcgcagcaggtcctgcacctgcaggtactgcagcttcagcaggagaagcggcagctccggcaggagctcgagagcctcatgaaggagcaggacctgctggagaccaagctcaggtcctacgagagggagaagaccagcttcggccccgcgctggaggagacccagtgggaggtgtgccagaagtcaggcgagatctccctcctgaagcagcagctgaaggagtcccagacggaggtgaacgccaaggctagcgagatcctgggtctcaaggcacagctgaaggacacgcggggcaagctggagggcctggagctgaggacccaggacctggagggcgccctgcgcaccaagggcctggagctggaggtctgtgagaatgagctgcagcgcaagaagaacgaggcggagctgctgcgggagaaggtgaacctgctggagcaggagctgcaggagctgcgggcccaggccgccctggcccgcgacatggggccgcccaccttccccgaggacgtccctgccctgcagcgggagctggagcggctcgtgtggaaggaggagaaggagaaggtgattcagtaccagaaacagctgcagcagagctacgtggccatgtaccagcggaaccagcgcctggagaaggccctgcagcagctggcacgtggggacagcgccggggagcccttggaggttgacctggaaggggctgacatcccctacgaggacatcatagccactgagatctgaggggctgcctgggaaggcgagtctggggacctggcactgggaggcagggctctcccgtgcatcccccctgctcagcaattcagacccctctgagagacgccactccctgggacacagacccaggacccccgaggggagggcaggatggcctttccttccctctctgatgtcccagtgctcaccagccctgcagcccaccagacgtcaggccctgactcctctggctttcccaggagatgggtccaggggtctgtctgctttggttaagggctccctaaactttggcctttgttcgaaatagatatcctctccccctcctccagggaaggtggccacagcaagaacagcggctcccctccgcttctcatcccaacctctttttcctcctggacacattggaatgccttggaaatagaaagaagccatatatgaccagaagccttggaaccagccccatcagaacctgagctattttcctctggccgcagaggtgtaggggtggaatgagccgcggggaagctggctttgaaacctcagggctgtcccagccccggcaagccacaggaaggaggggagagacaggcagcccagcagtgtggagaccctgccacagccagaggagggcagagggagaatccaagggttgagagccagtggcgggtgatggccagcccctggggcccagcccctgtttactggttcttgcaaatgggagctgagcagcctctggacagccagtgacctttgacctcggtgaccactcttctttaagccatagaccctgaggccctgggctgggtgctgggaagggagggttgaaaccaccgtgaaccagagggtgtggctttccagtcaccctcagggagcctccccatctgtccagctggggccagaggctgggagtccctacctgcttcacgttggccggcggctactctggaatgtttttccctccccagaatcaagcttttgcttgatccagaagagcccatatcactaagatggcatatatgtgatctgggcattttcctcctctgcctacagccaggtttagcggcaaacctttcccccttagcaccttcagggctgagttctgggtttctagaggtcaggacggctcctcagagcgccaggaagccagagccccaagcaggacgaaaaagaggcatacacacagcagtgtgaatagcctggccaccagccatcctccctccacctcaagacccccatttgtcccagactaaaggatccagagagcagctccctttctcaggagcttgggcagtgccccagggagtccagggtttctctgcagatgtgcggagcgggaggcggtggtagagagagataaaaggtggagtttctctgttgtttggttcagggattttatttttaattttatgagacagggtcttgctctgtcccccaggctggagtgcagtggcatgatcatagctcactgcagcctcatactcctgggctcaagcaatcctcctgcctcagccttccaactagctgggactacaggtgcgcgccaccgtgcctggctaacttttcattttttttgtagggacggggtctcgttttgttgccaaagctggtctcaaacttgtggcctcaagcaatccacctgccttggcctcccaaagtgctgagattgcagatgtgagccaccgtgcctggccagatttttcttttattcttctttctttttcttttttgctttcttgtcttttcagaagcaagccagacctagcaggctgttccatgttctatttttgactgtagccacagctgctgttctcaggacagcatcccttcccacatgcctgcgcctgctgcctgctgagatgaggaggggagcgtctgggaacttgcgagtccaaggccagtccccatttctgcctcgctcaccgctggcccttagagaccccgaggtaggggtggggagatgcttctctccttgccccccgccctcatgggtcctagcccttccctgagtgcgggctgaggccagagtcaccttttctgtggctggctctaccttcctgtccctgaggttaaacggtgcccatgctgccatcctcaaacgacagaggagcttttctggaatttcaaaccattgctcttagtcccaagctaggcttaaacctggaatctacaagccaaaagtccctccctgcctgagggcagtaccctccattgggcacagtccagacccaagtcaaagatgccccattccttgcgcctcagccctcagttccttcatttccaccaggccgtgccttgtttgagtttttcctcccagtgagactgccccacggagacagaggaaagggctggctccccctccccaggctggagacccccccccaactccaggaaagagcagtcagagtccagtgctctgcctcagacgttgcctgagaagaagtggctgccacacccaggggaaggccctgaggcggaggctgtgctccgccatggtgtcccggtaccttccatacacagaggagtgcagccttctccatatctccatggccctgtcccaggccggcccagatgtgtcccccccaggccttgtcctacgtccaaggtggcagatgtcttccctgggctgccaccagcccccgccccagagtggcccaccgtggcactagaatgcaagtatcctgcgaccttgcaacctcaccttcctgtgggtgttctttcctgccctgtccaaaagcgccctcactattcttggaccatgccagattctgcctctctggaaagaggctctggacagcagaagcctccaagcacagagcctggccccaggccccagacagggtgggcttcctgcccttccctctgggcacgcctgctggccgacccactgacccactcggatggaccaacctgctctgtccccaaaggacgcctgcaggaacccacccatccgcaataacttaacaaggatctgaatcatgccctctggccgactgactgtcacagggttc

SEQ ID NO: 106811 - DNA, 404 bp, Homo sapiens
tggtggtttgctgcacctattgacctgtcttctaagttccctcagccaattgatttcaatgagtctatcaatgccaaaatttgacaaagatatggaccaataggttctcacacctactgctgagattatagtttggtacaattatgttggaaaactgtttacattatctaataaagttgaagatgacacattctacaacccagtgattctcctcttaagtatatttcaaaaaaatgtctagcaagagattgtttttgcaaatagagacctgaaaaaatgctcaggagagcacagtccacagtttaaagagaaacactggaagcacttcaaatgtcgattagcagtggaatgaataaataagtgatttattcatgcaatgtattcatgtgtgcaatgtaaaacta

SEQ ID NO: 106812 - DNA, 319 bp, Homo sapiens
gtgcccaccaacggccagaagaaccttccggctgctgcaaagcccagcaggctgggccagtttctcgctcatctgattgttgtgagcagaggagaacgagttactcagtccccagccggccgagggcggggccgccttcatctctgctccatgggctgctgggtgctcacactctaaagtgatgtgggtggcaggaagtggccttgtggcgcccacctgctgagcacagggctggcctgtggagccaccccagtcaagctggctggggctctcctgcccctctctgtcttggcacaggcccttcccaggcctgcaaagc

SEQ ID NO: 106813 - DNA, 733 bp, Homo sapiens
tgcttgagaccaggagtttgagactagcctgagcaacgtaataagaccctgtctccccaagaaacaaaaaattagctgggcatagtggcatgcacctgtagtctcagctacttggagggctgaggcaacatcgcttgaacccaggtgttcaaggctgcagtgagccatgagcatgtcacttcaattcagcaagggcaacagagcaaaactctacttaaaggcaggggaaaagagattcttgtttttaatcaatagaagaattacatttatctttcaaatgttttatcagtatattttaacatctatccatcatcaaatatttactgttttatgcagaggtaacaagagagtgtatttgctgttactgaattttggtaattgaatatggtaatttgggtttattattgtctttgctctcaaagagactaatattaacaaatttctgggagagaatgtgcttgtatgtgtgtttacacaacatagctcattgtgtttgtgttgccttagaataaataattcaggaataaaatttgtgttggttctaaattaattattcttcatcaactttttgaccttagaaccaacacaagttttattcttgaatcattcaggattttatctgagtatccctagttaactcaacctgtgcatacccagcctagaatatggacccatcccaaacaactgacaaaacacaaataagttaactacatcacatctattattatctttg

SEQ ID NO: 106814 - DNA, 376 bp, Homo sapiens
aagggatcaaggatggggcatgatatagcactacctatgacaggttttgtaatcaggcagagctgggttcaaattgtgactacattatttctgggctgcttaaacttaagcaagttatttcatcacagaaccttggtttcttcatgtgtacaacaaacaagacacctactggagagagaaactgtctcaaattatcttttttctctactctcacaccataatcatcaacacaagagacttctgtgaccaaatgtgagggggtttcttccccacacaccaaccagcggacagcagctgggtatcctctcattcagttcccatgctgtctacctggagagagtgtcagatcccacaggttgagggctcagtccccagg

SEQ ID NO: 106815 - DNA, 250 bp, Homo sapiens
ccccaaggcccaccacacgtccctacccaggaaggaggcgctgcacagtgaggccagctgcaccgccatccatctttacttacaaaaacaggcagtggccgggagcggtggctcacgcctataatcccaacactttgggaggccaaggcaggtcacaaagtcaggagtttgagaccagcctggccaacatggtgaaaccccatctctactaaaaacacaaaaaattagcaggtgtggtggcacatgcctg

SEQ ID NO: 106816 - DNA, 291 bp, Homo sapiens
atatagctgattgaaacttgaaaattcaatatggctgagggacacataattatctaacaaactattcagatatttttcaaacacaaatgtgatacttattcaggataaatgtgataccaaatatataataaagtcactataatttccaaatcagatttcactgaaagcgtataaccaaatcggaacttaaaagttcactcatagttatgaagagatttggcaatgcactgtcaggtactgtcacacattatcttctctaatcttcataatagatattaactccttgtttca

SEQ ID NO: 106817 - DNA, 485 bp, Homo sapiens
acagggcctcacctcactctatcatccaggctggagtgcagcagcatgatcacgggctcaagccatcctgccacctcagcctcccaagtagctggaactacaggcatatgccaccatgactcattaattttttattttttgtagacatggggtctcactatgttgcccaaggtggtctcgaactcttggacacacatgatcctcccaacttggcttcccaaaatgctgggattataggtatgagccaccacacaaggcaaaaagatgctttagcgtaattttttttttttttaagctcttgaaaactgaagcctatgctatattaaaaaggctctcatcacccagctttccctcttatcatgcagaatcaaattctttataaagaaatggatagcattttaacatatcactggctatacatactaccccatcataacaaaataaaaaatgtttggctttttggacaacacctagttgaaaaaatt

SEQ ID NO: 106818 - DNA, 540 bp, Homo sapiens
tggagacagaatctcactctgtcacccaggctggaatgcagtggtgctatcttggctcactgcaacctccaccttccaggctcaagcgattctcgttcctcagcctcctgaatagctggaactacaggtgcccgacaccacgcccagctaatttttgtatttttagtggagatggggttttaccatgttggccagtctggtctcaaacttctggcctcaagcgagccctccaccttggcctcccaaagtgctgggattacagatgtgagccaccgtgcccagctgccattttggttttcagatgtgttaaactgcatgtgtaggggtgggagagcagaggcctttaaaatgcaccccttgccagtagtgggtttgtgtgtgtggcgttctccacaggacttcttgaaagcaatgccagcttagagtaggagctgctttgaacagcagacttctaccaaatcgtaattacttaaggagtatcattatagtaatttagtttttataattatcattttcttaccttgggaagaacatcctaag

SEQ ID NO: 106819 - DNA, 404 bp, Homo sapiens
gcttatacacccctgcagtaaggacactgatattctgagcatgggaaccagaggtagagggcacaggaaatgaagggcacaaaccttataggggcacaagccatgtagagaatagtgagaaatcacatgtggacagagcataaagaggcaggagtagagactggaagtgtagcataaggtcaaattgcgtgcattctatggagaaaggggagtaaatttttttagtaagtaaggaacaggcatggcaggtgtattagtccattctcacactgctaataaagacatactcgagactgggtaatttataaaggaaagaggtttaattgactcacagttcagcatggctggcgaggtctcaggaaacttacaatcatggaggaaggggaagcgaacacgtccttctt

SEQ ID NO: 106820 - DNA, 521 bp, Homo sapiens
gaaagggctcttcgctcccggaagagagagaggtttggttttggtttgatatgcgagacgaaaatattagaaaaattaagggatggcggttgtatggatgtgtatggttgtaaaaaactacctagctctacgcagaagagggcatttaattgtacgttttttattttccggtttttaaatagtgatcagtagcgactgtaagcttttctttttctatcagttgaataaatcaactgaaatgccggttttcacctgggtggtataatttatatgcaagtatgtaaaaatgattcctaattagaacttgtagtattaagggtgaaatttgaaaccttcccagtctttgatgtgatacatttatcctggcgaccttcgaaggtctctcagcctttgatatgatacatttaaggtgtgaaggataagcttaattattttacataatgggatgtagaaagcataaacgcaatttcaggtcacttgtcttattcatcggtggattgtaaaagtggaatattgccagg

SEQ ID NO: 106821 - DNA, 365 bp, Homo sapiens
ccaatattctgcctttaccccggaggatgcagatgtaccttctctcaggccgatgacctcaggcctccacggtccctggagctctaggaaaggtgagcgcgatctcgtgcccacacccagtgctctgggtcataagcctggatctggaaaaacaaacgccctttgagaagacggggactcgccaggatacccctctctcccctcatccagcctccagcccacccgattcctccccacctcctccacctccccaggccccactcacctcctccaactcctccggggaaacccaagccctgccgctcatggaacagaagaactggaaccgaagtttctggaacaggactatctgagagcggttcttc

SEQ ID NO: 106822 - DNA, 307 bp, Homo sapiens
actcttttactctttccgatgacagcttcccttgtggcttaatagaggttattaaccactttgttatatagaaggatgaattattaatttttttgtcttaaattttttgtctcactgcaattgtgaggataaatatattcattgcatatgtacttggagctccttagaggaaataatcttttttacattttctgcatttccaaatacaacttgcataatatttatgctattaatgttttttcctttgattttccaagtaatttgacttttctcataaagaatatgagagtcatgaattttttatggt

SEQ ID NO: 106823 - DNA, 536 bp, Homo sapiens
atttctaatggaggtgtcacatacggtcaaagcaaggcagaacacagacttttctttgcgtggtttctaggcacatttacaaagctgcattcagattgatgaggagcttcatcattcagtttaatgtggccaactcctccctctttttggaaaaagagcaggtgcactaaaccagcaaacacagccagcactgggctgtgctgagagcagccacataggggtctctacagacagaaacccgagaagaccgggaaagaaccaggacccagactcaaatatgaaaaatctctgggctttgtcctacggccttcccatgagtaactcatagccttgttccagtggaatctggccttcactagtctcagtggcaagttggttatgtggaaagtctctcttcacacacttgtgcgaataacgataaagaattttgtattgttttcactctacattagaccatgagtatttatgcctgtggctgcagtttgtattagtttccggccccaggtatctcctgcagcatgcagcttcagtcctat

SEQ ID NO: 106824 - DNA, 419 bp, Homo sapiens
ccagtgttgcactagcctcttcccacacccctttgacctgggtatgttatattcaccaagtctcttctatgactttattcaacagctaacacagacgtaaagcttgtcaacaccccaatcaagattagaaaaaaaatctaagggatatttcatgaatgtttactttggaacatttgtgtttctcacaccagggaaaaataacatgttttggaagaataaaattaaatagtgacatttgcttagacactcatggatgcaaaacccaatccgcactggttatttgataatggtgttattgagagtgatcaactccaggccgagttgctgggaaacaaaggtcactgtcaagatgactcactgattttctctaaggatctattgataagctccttgtcaacggaggtactgtcagaagtata

SEQ ID NO: 106825 - DNA, 405 bp, Homo sapiens
tcaaacagactgtcaatgccgcctcccccgagccccaaagtggggggctccctccaaggagacactgtttgtagagatttggggtttcgcacaagactggaagatgaggctctgcagattcttgatcgtccgttggatgatccgttagcaaccaccccaccccgacgaggaggcgcatcccagggcgccttaccagaaagcccttggtcccctgtccagcgtggctcctctccttcaggaacacacgcacctacaacaagcccgcttcctttccttctccttcctgtgacaatccaggtcctcggcagtatggctcatcctcactgctgcccctgctcctcatcctctcagccctttgcacctcctgtctcgacgcagcccgtttcattcttctaactctgcttc

SEQ ID NO: 106826 - DNA, 939 bp, Homo sapiens
  misc_feature (871)..(871): n is a, c, g, or t
  misc_feature (876)..(876): n is a, c, g, or t
  misc_feature (879)..(879): n is a, c, g, or t
  misc_feature (886)..(886): n is a, c, g, or t
  misc_feature (890)..(890): n is a, c, g, or t
  misc_feature (892)..(892): n is a, c, g, or t
  misc_feature (900)..(900): n is a, c, g, or t
  misc_feature (905)..(905): n is a, c, g, or t
tggaccgggttgaaaagagatttcattgattctttttaatgatattggaaaatatttatgcaattttattttttaaccttttctccatttcattagttatactattaactttgataatcacaaaactatgtggaagaaatcattctgattatattttatgaaagagaggggtagagtaaattttttaattagacaatgttgatatgcagaaatctctcaaaagaaattgcaaaggaaaaattacgttgagatgaaatgttgagaaataaggagtatcttaaaaacctaatttcttacactttttagagcaatcaacttatttccaaattattatttcatgctgttgtttccatgaattgtgtttttagcatagtatatacttttctaccacgttagcatttacactctaattactgaaaataaaggaagaagttggtgaataaaagccagggaaactgggtttattctcattttccaatagcactaatgtataatccctttaaccttccatatggtgctttgtgtgatgagtatataacattcatatacgttattagtgccttatttttttcacttgactttatttcttatctaaagagccatatattttttgtgagtgttctttggtccctctatttaaagtgctaaggagaaagcatatctttagggatgtatataggctgcgtttgctaccttaatctactgtattatctctaaaacaggttagccaatgtatttttcttaaattcattgttcatttttaagctaacctatacaaatggatattaaacaccagaaattaaagccattaaaattgaattgtactttaaaaccataaaatgctataggttgacaccgggtgaatgactcnggttntanggccatngggnantctttcanaggtnaaaaagaaggtgggctcgatggcggttaaaattg

SEQ ID NO: 106827 - DNA, 1987 bp, Homo sapiens
tggaccgggttgaaaagagatttcattgattctttttaatgatattggaaaatatttatgcaattttattttttaaccttttctccatttcattagttatactattaactttgataatcacaaaactatgtggaagaaatcattctgattatattttatgaaagagaggggtagagtaaattttttaattagacaatgttgatatgcagaaatctctcaaaagaaattgcaaaggaaaaattacgttgagatgaaatgttgagaaataaggagtatcttaaaaacctaatttcttacactttttagagcaatcaacttatttccaaattattatttcatgctgttgtttccatgaattgtgtttttagcatagtatatacttttctaccacgttagcatttacactctaattactgaaaataaaggaagaagttggtgaataaaagccagggaaactgggtttattctcattttccaatagcactaatgtataatccctttaaccttccatatggtgctttgtgtgatgagtatataacattcatatacgttattagtgccttatttttttcacttgactttatttcttatctaaagagccatatattttttgtgagtgttctttggtccctctatttaaagtgctaaggagaaagcatatctttagggatgtatataggctgcgtttgctaccttaatctactgtattatctctaaaacaggttagccaatgtatttttcttaaattcattgttcatttttaagctaacctatacaaatggatattaaacaccagaaattaaagccattaaaattgaattgtactttaaaaccataaaaaatgctaattaagtttagaacaggagttgaaatgactctcagttttatctatagctccaattaggacaaaattactttacaaaaagcattaaaaataaaagtaactgtatggtacttcaggaatttgaccagttccttacaacttattcttggcaatattttgtcagtaatatactttcatacagatgctagagaaccatggtgtctgctatttacatgttatttgttcccagtgagctttatcaacatcaaccctgtttatataatatgttattttgctcttcttgatctgtgccttttgttttagctttatacaaaatgctaggtttgttatattctttatgtatcataatatataattcaacttttcctgatgaatgtatgctgaataattaaactaaaccatgtgcttagaaaagacaaagacaggttgtatatgcagttatgtgtaaatatttgacaaagaaaaaaaaaggaaaagaatcttcctgccaacaggtaggtcctgctggacaggacctgaaaattaagagatttttttttttaagcagtgaaatttaaaaatctattacctcaagaattttcagtcgatatgtcaatgtactgttccttctcagtaagtacagtgtcacatgctgctggcggtaaaagcaacccaagtgtcagatcacacaaattttagggacaagtctttcaaaagacggacaccttgtgatattttggagtctaatttccgacttttcgtaatgtcccaatgaccttttgttgtggttgggcttttataaaaaattattttcggttggttgttgtagaatggaagagtaatcttaattatgaaatcagattgcatggaagaatataaagacactcactcggatgaaaactataacggttttcaaactattttgatggtcattgtacgagctattgtatggattactgtggagtgctgtttaccacatgatgtgtgcaatacatcatgcaatgttatttagcaatgcgtaataaaagtttttaaaagagaaaaatataataaaaaaactgagggggggcccggtcccaatttgccttatagggaggttattacaattacttggcggagtttataacgtattaatgggaaaacctgggttatccaattatacgc

SEQ ID NO: 106828 - DNA, 1923 bp, Homo sapiens
ccgcccccccatgcattaggcgacacatcatgaaacaagctcggggttaataatgcaggcggtacggcggactctgggatctgattatattttatgaaagagaggggtagagtaaattttttaattagacaatgttgatatgcagaaatctctcaaaagaaattgcaaaggaaaaattacgttgagatgaaatgttgagaaataaggagtatcttaaaaacctaatttcttacactttttagagcaatcaacttatttccaaattattatttcatgctgttgtttccatgaattgtgtttttagcatagtatatacttttctaccacgttagcatttacactctaattactgaaaataaaggaagaagttggtgaataaaagccagggaaactgggtttattctcattttccaatagcactaatgtataatccctttaaccttccatatggtgctttgtgtgatgagtatataacattcatatacgttattagtgccttatttttttcacttgactttatttcttatctaaagagccatatattttttgtgagtgttctttggtccctctatttaaagtgctaaggagaaagcatatctttagggatgtatataggctgcgtttgctaccttaatctactgtattatctctaaaacaggttagccaatgtatttttcttaaattcattgttcatttttaagctaacctatacaaatggatattaaacaccagaaattaaagccattaaaattgaattgtactttaaaaccataaaaaatgctaattaagtttagaacaggagttgaaatgactctcagttttatctatagctccaattaggacaaaattactttacaaaaagcattaaaaataaaagtaactgtatggtacttcaggaatttgaccagttccttacaacttattcttggcaatattttgtcagtaatatactttcatacagatgctagagaaccatggtgtctgctatttacatgttatttgttcccagtgagctttatcaacatcaaccctgtttatataatatgttattttgctcttcttgatctgtgccttttgttttagctttatacaaaatgctaggtttgttatattctttatgtatcataatatataattcaacttttcctgatgaatgtatgctgaataattaaactaaaccatgtgcttagaaaagacaaagacaggttgtatatgcagttatgtgtaaatatttgacaaagaaaaaaaaaggaaaagaatcttcctgccaacaggtaggtcctgctggacaggacctgaaaattaagagatttttttttttaagcagtgaaatttaaaaatctattacctcaagaattttcagtcgatatgtcaatgtactgttccttctcagtaagtacagtgtcacatgctgctggcggtaaaagcaacccaagtgtcagatcacacaaattttagggacaagtctttcaaaagacggacaccttgtgatattttggagtctaatttccgacttttcgtaatgtcccaatgaccttttgttgtggttgggcttttataaaaaattattttcggttggttgttgtagaatggaagagtaatcttaattatgaaatcagattgcatggaagaatataaagacactcactcggatgaaaactataacggttttcaaactattttgatggtcattgtacgagctattgtatggattactgtggagtgctgtttaccacatgatgtgtgcaatacatcatgcaatgttatttagcaatgcgtaataaaagtttttaaaagagaaaaatataataaaaaaactgagggggggcccggtcccaatttgccttatagggaggttattacaattacttggcggagtttataacgtattaatgggaaaacctgggttatccaattatacgc

SEQ ID NO: 106829 - DNA, 178 bp, Homo sapiens
gacctttcccaagaaacggcttctatagagggggccctgcttctctctgtcggtggcctctcaggacagcgtcagtgtgttttgaactcagtgttaagagacaagattgtcaaaaaggcatgtgtcaattattctgtggtttttgactacacacacatacacacacacactccaaaaa

SEQ ID NO: 106830 - DNA, 462 bp, Homo sapiens
ggtaactgtattaaaaattcccatttaggaaagagggaaggggaagcctgctgcctgggtctctgcccagaatgtctgtctcctgtgagacaggaatagtcggtaagtgatagggcctgggaacctagtgggcaccggcttgttgacacgtttctatggtgggggaatcggttcttggtcagcaatctggctgctccagattctgcctgctgatataacttttctggggagttagccaaacctctaaaccccagaccttattcagagcttgaccttcttttactctaatcccaaagtactttgctctcctgtaattcccagaaaactgtatttgatttttaactgagggttgtagcaggacagtatgtagatatgtgtgtgtagatatgtgtggatgtagatgtgtttgtatgtgtgtgtgtatgtgtgtgtgtagatgtatgtgtgtatgagtgtgtgtgt

SEQ ID NO: 106831 - DNA, 334 bp, Homo sapiens
gggccacactttgagatctgctggtccagcccacggtgaggctgaacttgaattctagttgtagctgctatgcaagtttccaggattctggtattagagtaaaccttgctattttgtgctcctaaatatcagtattcttattaatgtaatcctttatttcatatgtttttgagattaaaatctgagtcatttacatcttgagatatactcatcctatgatattccatattacaatttcaacttgaacagcagaacccttttcccatagctcttggatcttccacttgtaatccccttctaaggtattccaagtccttggttactagtaagaatg

SEQ ID NO: 106832 - DNA, 398 bp, Homo sapiens
tagggaagcatttaccccagctaggcatgacccaagtctcatttccttgctcccacttcacaatctaagcgccacactcctgccaaaatgatctttcaaaatgcatagccaatatcctactgaatgggcaaaagctggaagcattccctttgagaaccagcacaagacaaggttgccctctttctccactcctatttaacatatcattgaaagttctgaccagggctatcaggcaagagaaagaaataaaaggtattcaaataggaagagaggaaatcaaattgtctctgtttgcagatgacatgattgtgtatttagaaaactccatcgtctcagcccaaaaactccttaagctgatatgcaattttggcaaagtctcaggataacacgttcgcgag

SEQ ID NO: 106833 - DNA, 329 bp, Homo sapiens
aatcctatctgcccttttatgcacaaattgacaagcagatgaattctgaaattcccatggaaatgtaaaggatccagaatagccaaaagaatcttgaaaaagaagaacagagttagagaactcacactttccaatttcaaaacttactatacaaagctacagtttttaatacatgtgacacaggtatattgatagctatatagatcagtggaatagaactgcaagtccaaaaataaattcaaacatttatggtcagttgattttcaacaagggtgccaagacaattcagtgggaaaagaatagtcttttcaatcagtggtgctgggaca

SEQ ID NO: 106834 - DNA, 481 bp, Homo sapiens
ggcctgaggggcaagtcccaacgtggaagatggttggagcgtcatgaaattcacactgaggtaaaacccctgaaccacataggaggccgcccctgacctgggccagatgataggaaagcagtagcctccacctgtggggtgcttctaggaggaagccagcctcagtgggagtgggcagatctgccagagtcggagctgtgccccctgttggccaggcgtgccacagtcctgcaagacagacatgttggggacatgaagcttggcaagacaggaagtcactggccgggtggcaagagccctgaatcagaccaggtctgtctgacctgagagttcggctttcaaccactcttcaggaagaagagggaagaagatagacttcttgtcctagagttttgagtagagacagaagacaggaatcacccctcccaccccttcatctcactgatgttagaagtggagagcagagaggacagtgtggcat

SEQ ID NO: 106835 - DNA, 361 bp, Homo sapiens
ccacctgtcactgtctttaaaatttaattcagataatatttattttaatatgtttgtcatttactcttttgtctttttcgtgataaatttgctggagcgtctttgaaaaggagaaaactgaaattcaaatacagccatctaattacttaatttatgagagtaagactcacagcagagtctgagttctatcccagactgtggtatcataaggtcacccatgtaggttattagattgtacccccaataatttttttttaactttcttttagagacagggtctctctcactctattgcccatgctgaaatgcagtgatatgattatagctcactgcaccctcaaaggctcaagcgattctccca

SEQ ID NO: 106836 - DNA, 381 bp, Homo sapiens
cacacacacacactcatacagacacacacaagtgtgagcaaaggactcaatccatcggaatgcagatcacaccatggaagctattgttctgtcaaaaaaacaaaacaaaacaaaatgagagagatacattcattaatgctgcagcagatggctgctctgcagaaggacacagcatgaggcaggctgccggctggcagccacaactcaggcagcattcactccagctgtaagttcaggttcctttcagaagctctgcattccactggcactttgcaggaaatcccttgggcttaatggatagctttaggcgcagtccattggcaatcaggactgaatcccttgtcatttccctaggtcttctctcccacccactctacttgc

SEQ ID NO: 106837 - DNA, 643 bp, Homo sapiens
gatccacctgcctcggcctcccaaagtgctagaattataggcgtgagccaccatgcccagccttatgtcatcatttcttgagcactcctttctgctttctagcacaacacatgtatctgtatttctatgtctctgtctataaatatatgtaaaccttgagtttacactgatacatccagttttaaaatttcatggttcattttagttttacttatactggctttttggatgatgagaaacctggtggctcccatgatccttaatatagtgacttgatcaaagccctatgtgtgactaattcccattactgttgctgcctcctcttctggagggagccctttttcttgggctctctcaccctcctatggatgcttgcttgctccataggactggattgttcagaaagggaaagaagggtaaaaaaaaaagaaaaacccaaacctatccatttttaaatactttcttatgttctgttgtttttttctttgagacagtcttgctctgtcacctaggctggagtgcagtggtgcaatcatggctcactgcaggctcaaactcctcggcttaagcaatcctcccacttcagcctcccaagtagctgggactacaggctcatgtcaccgtggctagctaattaaaaaaa

SEQ ID NO: 106838 - DNA, 267 bp, Homo sapiens
gggtggatgggatggagaggatggatgggatggataggatggatggataggatgggatggatggctaggatggatagattggatggatggatgggatgatgggatgaatggattggacggatggatgggatggatacatgaattgatgggatgataagatagatggatgcaatggatgggcatggataggcatggcatggatgggcatggcatggcatgggcatggatgggatgcagtggatggatggatggcatggcatcaggatg

SEQ ID NO: 106839 - DNA, 425 bp, Homo sapiens
tgagatggtgtgcgtcacatagagcgtgttggaggaatgatcgtttggttgtataagggatgttggctggccttacagatgagatgtttgaactgggtcttgagtgagtgggaatttgttagggaggtgttagtgcagtaggagcagagattgtgaaggcttttgtgggccttttgtgtgggagaaaggttatagttctgtggagtgtggggcagtgtgggccagatttcttgacacttggaagccatgagagagttttaagcatgcgacatatatgacttcattggcttggtgtcagaagagagtttggagaggagagactgagacagcaagtccagttaggaagctgttgcagaggcccaggggtagatgaatctggagacccagaggcccaggggtagatgaatctggagacccagaggccc

SEQ ID NO: 106840 - DNA, 667 bp, Homo sapiens
gttcatagtagaaccatactgtgtaaattgcaatctaagagaattatcaaggaccaaagtaaagtcaaggggatcaatgactaatatgcagtaatatttaccttagccctcaggcagatatgtgaaaagatgtgtaaagttaagaaatacctgtaaactccagatacaaaggctttctgcaaacaaagacctttgcttctttctaggaatttttgctggttttactgtggaatgagaacccaaactgttttgtgattaagttaaacaggtacatgattcaagcagtaggttttgtaggttatattcttgaaagaaggcctgggaatttttgaagccttggaaagccttgggtttttttgttggtttgtttttcacttgagagtgtttttaaactagaaaacaatttaaatatatgcgtgatgaggattctggggaggtgaggaaggcatctttgttgcatgtcagagacagataaaactttcacattgtaggctgggcaccatggcttacacctgtaatcccagcactttgcggggccgaggcaggcagatcacctgaggtcaggagttcaagaccagcctggccaacatggtgaaacctcgtctctactaaaaatgcaaaaattagccagatgtgctggcgggcacctgtaatcccagctactcag

SEQ ID NO: 106841 - DNA, 430 bp, Homo sapiens
tcaagtttatccaggtgatcctgatgcactagactactcaaggaaaacatactgctccctctggcttatctcttcctcatttataaatggtaaatatgagcaaagtgtggcataaagtaaataagtatgagacagaaaataacaagatcagaatctctaattcatattgtggataaagtatgatctagctttgttgaacccaagctatactctgtttaagagagtgtgtatgtgtgtgtgtgtgtttgtgtgtgtgtgtgtgaataatcagaaggaaaaggagcctggcccctgaaacattaaacagtactgtgtagaagtctctggaataaactgctaataggatagttcaaagtcttcaaggatttgtagagaaatctactgtatgtatcagaaatattaggtctcccggaagatgagggaccagaag

SEQ ID NO: 106842 - DNA, 287 bp, Homo sapiens
tggtgtttttcaatttttcaatgaattttttaatttttacttaaaaaaagacatttttttcatgttataaaattaatgtccactgtagacaagtttgagaaatcagaaaaatatacatttagataaacaaaaaatacataatccataattcctagagaaccagttaacttttggtagagaatcttccagtattctttatatgattatcttgtatttctctctataaatgtacatataaatacaggttcatatatagaaacagatcttttaaaaatggaaaggagggc

SEQ ID NO: 106843 - DNA, 1223 bp, Homo sapiens
ggaatgtatgatggagtttctgccatccacggtgggaagaactcatgcacacctcattagcacccaggtatccaactgagacactagaatggatgtgctttaggaataagtgtcacacttttcaataaggcctattgttcaccaacctggtaaagcctaaagccaaaccctgacaaaatccacaaaggggtggattggtgattgagtcctgccaaattagagggtcttgggaaattctgtgggctttccatgaatccgttgtaataaaacataaaccagtccacataagtccaaagtgatcgatcagacagtaattttacgcccactagagcaaaattaattcacacaatcaatgacacaagttagccaagtcgacatttaagcaaaatacatctaagaacagctaacaaataactctcctcaaactcacatagagcattcaccaagatagaccacatatgctgagccatccttagtattttctgtcctttctctttgactcgtgtatactgtgctcaaactcttaaaattatacactttaattatatactttaatgattatacactttcatgcatctcaattgcatgtaagttatatttcaatatatttgttaaaagtttataattaaaaaaactgtcctagcttgattccagaaatcttttttatattttagaaaatgtaatgttatatattatcagggcaaaagagaaaaaccgtatgattaccttgtcatacacagtaaaagcatttggcaaaattgaaaaatttttcatgatttataaaaacaaaccccagaaaactcagcatgataagaagagaaggcaacacttccaaccctattaagggtagatttgaaaaaaactcacaggtaacattatattaaatggcatgggattgaatgcttttctattaaatcagataaaaaagtagaatatctgttgttattctttcaattcagcattatactagagatctaaatcagtgcaataaagtaagaaaaataaaagtattgaaaagattgaaaagaaagaattgaggctgtctttattcacagataatgactgtgtatgttaataatcctagaaatctgcaaaaatctgccaaagctaattagtgagtttggtaatgttgcagagtataagctcaatagaagtagtcttttgtatttctgtgtattagcaatgagcatttggaaaatgaaataaaaatacaatttcatttc

SEQ ID NO: 106844 - DNA, 2077 bp, Homo sapiens
aattaaccattttatatttgccacctacaaaaaaacacccaatatcttctcttgtagactatatgaatcaattattacatctgttttactatgaaaaaaaaattaatactactagcttccagacaatcatgtcaaaatttagttgaactggtttttcagtttttaaaaggcctacagatgagtaatgaagttatcttttttgtttaaaaaaaaaaaaaaacactgcattaaaaaagtatctgttgcattaaggcacatagtgggattacatcataaacctcccataatttttgtcattctgtgttaaatcatttcagggtttaattttgaaataaaagattaatataaaatgcaacaactttttatattacctattagttttggagttctttatgtttaaaaattcaggtgtaaattttattgccttggataaataaattattgatcttttttaaggcagcagttattaaattggtaatagaagatgctgcttgcttagaattgggaaattcggctgggtgcagtgactcaatgcctgtgatcccagtactttgggaggttgaggcgggcagatcacttgaggtcaggagtttgagattggcctggtcaacatggtgaaatcctgtctctactaaaaatacaaaaattagctgggcatggtggcacatacctgtaatcccagctactcgggaggctgaaacaggagaatcgcttgaacccaggagatggagttggcagtgagccaagattagcctgggcaacagtgagtgagactcggtctcaaacaaaaaccaaattgggaaattcttcttgagttaaaaaagacactttttattatgaatcagattccaaatcattaactatttttgcaaaactggcacaagtggtttttctttttaagtatattaacagggtagctcctgagcctttccctttattggaaactttaactgcagtgttaatatatacactgcaaaagaccaaggatgcagttgaatggaaaattactcagtgtatagaaaggaaaaaaaccagaaatttaaaatagatacagaaaagtacactggtaatatttttatttcctattggagagtgaatccccacagttgctttttgtgacttgattcaaatgaggcactcattattgttaccaaacttgtaaaagcattccatgtattcagtggaggcagaatgtataatattttttccttataatttagcatacaggaaaagtatttattttttaagtagggtatcttaattatgctcatttcttcccctaaaccacattatctatatgattggaccctttagtgaaatcagaaaaataaagtaggcatgaataaatgttcaggacacacacatacactcacacacatcacagtatcagctctttcagtgagtttttattaactagataacacatgtaatacatagtagaatacatttcagaggcagagttcctcggattattttttatggatattagtgttcagcagcttattatttaaaggggtgccaaatatagcatccttctgttgtttattttaaatatatttttaatgaaaagggacttaaaaagtaaacatgattatctaaattacttaaaattttttaatcttagtaaaaattttaggaaagttatctagtttaaatttcaaatgttttaaaatttgtaggcatttaataaattatctttttttggaggggtggatgctgcatttcattggaaatgtcatttttccaaagtttctagctatatactctctttccttcaaataacataagtctgaaagcaatgaaaacgtcaaaggaaaatgtttatatacatccacatgtttatttaatatgtttctcttaacacctgaaacttgttttaaaacaaaaagcagtattcacttcaaatcataaacttagaattctgtatctcatgtcagaaatatgtttatggccttgcttttaagtggtgctgtttcccatagggcattagttctcagattttggaatgtgaaataatcacctaggaagttggtttaaaatgcacactagtgagcccaccttagacttcttttggggc

SEQ ID NO: 106845 - DNA, 1691 bp, Homo sapiens
cggcactaggtgatatctcattatggttttggctcacatttctctagcgatgttgggcatcttttcatgtactcactgcaacctctgactccctggttcaagggattctcccacctcagcctcccgagtggctgggattgcaggcacacgccaccacgcccggctggttttttgtattttgggcagatcacttgaggtcaggagtttgagattggcctggtcaacatggtgaaatcctgtctctactaaaaatacaaaaattagctgggcatggtggcacatacctgtaatcccagctactcgggaggctgaaacaggagaatcgcttgaacccaggagatggagttggcagtgagccaagattagcctgggcaacagtgagtgagactcggtctcaaacaaaaaccaaattgggaaattcttcttgagttaaaaaagacactttttattatgaatcagattccaaatcattaactatttttgcaaaactggcacaagtggtttttctttttaagtatattaacagggtagctcctgagcctttccctttattggaaactttaactgcagtgttaatatatacactgcaaaagaccaaggatgcagttgaatggaaaattactcagtgtatagaaaggaaaaaaaccagaaatttaaaatagatacagaaaagtacactggtaatatttttatttcctattggagagtgaatccccacagttgctttttgtgacttgattcaaatgaggcactcattattgttaccaaacttgtaaaagcattccatgtattcagtggaggcagaatgtataatattttttccttataatttagcatacaggaaaagtatttattttttaagtagggtatcttaattatgctcatttcttcccctaaaccacattatctatatgattggaccctttagtgaaatcagaaaaataaagtaggcatgaataaatgttcaggacacacacatacactcacacacatcacagtatcagctctttcagtgagtttttattaactagataacacatgtaatacatagtagaatacatttcagaggcagagttcctcggattattttttatggatattagtgttcagcagcttattatttaaaggggtgccaaatatagcatccttctgttgtttattttaaatatatttttaatgaaaagggacttaaaaagtaaacatgattatctaaattacttaaaattttttaatcttagtaaaaattttaggaaagttatctagtttaaatttcaaatgttttaaaatttgtaggcatttaataaattatctttttttggaggggtggatgctgcatttcattggaaatgtcatttttccaaagtttctagctatatactctctttccttcaaataacataagtctgaaagcaatgaaaacgtcaaaggaaaatgtttatatacatccacatgtttatttaatatgtttctcttaacacctgaaacttgttttaaaacaaaaagcagtattcacttcaaatcataaacttagaattctgtatctcatgtcagaaatatgtttatggccttgcttttaagtggtgctgtttcccatagggcattagttctcagattttggaatgtgaaataatcacctaggaagttggtttaaaatgcacactagtgagcccaccttagacttcttttggggc

SEQ ID NO: 106846 - DNA, 947 bp, Homo sapiens
cacctgatgctggggtggaggtggagggtcgtctggtttattgttaccactactcttttctaccaccgtagtccttacaaggcttacagcagacagataaccaggcaaggcccagcgtgaccaggcccagactccttccagaaaagacatggcacaggtacccagcagtgtggatacagtgtcttgagcctcacggggcacctgtggctggtctgctgtggaaccatgagccagtgttggggaggagcaaggtggggcgaggcaggccttgcccaggttggcaaaggtgacctgagtcagcccaaggctgctccaggctagtgagtcacccagctccccacgtgaatggacatcacagccgcccagccctgtgctgctcggacctcagcaaggaaccacctcaggggcgccatggagaagttcttgtcatggtaggccccagcctcccaggggtcctgcagaggtaggggctcatggtgggaatctggggcagctaggagctatgaagggcatctgggcctcggggtcagaggactgggtccaatctggggctcccaactcctggctgcatgacctcaagcatgtcacttctctgtaaaactggaaccacaagcgctgacttgcaggatctgtgcaaacaacaagctcagtgcctggcatatgagtggagatccatggggctgggtggctgccacccactcctgggatctcagagaccaccactggaagacagtccctaaaattcaaaggagaagctccaatcagacttgggcacgtgcccctcaacaccttcccacttgactcccccagcctgtgctcccctccgtgggctgtggctccacctggctatgccctgccattggaccctaccccattttgcatcctctgctctcagcctcttcctctccctggctgggggatgtgagcaggaatggctcaatcaggat

SEQ ID NO: 106847 - DNA, 418 bp, Homo sapiens
accacatattctattgagtctatttatataaactgtatacagaataggcaaaatctgtagaaaagtggagaccacttgttgcatagggctggggaagtagtgggcatagaggaattaagaagtgatgattggccaggagcagtggctcacgcctgtaattccagcagattcagaggctgaggcgcgtggatcacttgaggtcaggagttcaaggccagcctggccaacatggcgaaatgccacctcaactaaaaatacgaaaattaggcaggtggcatgcgcctgtagtcctagctacttaggtggctgaggcagggggatagcttgaacctgggaggcggaggttgcagtgagccgagatcatgctactgcactccagcctgggcaacagagtgagactgtctcaaaaaaaaaaaaa

SEQ ID NO: 106848 - DNA, 762 bp, Homo sapiens
gcttgtccattttgtcggatgatctccagtggtggaggatgagtgtgctgattggattaattccgagttggaatataatgaatggttagtgtccttttactccgttgtgttttgaggtgtttgtccctgacagccatttggcaaataatctggttatccaaaaagatttttggttttttgatttaatgctttaaacttttcttattttttttttacttataatattaaacatgtaaaagcgattttaatgacttttcattgaagatatacccttctgcctccatctccccaaatgggcatgcgagaaacatcactactgaatagtctgggaagtaagtttgcaccaccaaaggtcagtgtgggttgtataaaaaccaggactggaagcagccctcccaccccagataataacggcaattccagagaacattgagaacacaaaccctcgaagaaagagcaaaatttctctgtcatgtaatgatgtttgatttgggctaaaaggaatgtccattttaccaaggtcttaagttctctttttgattccacttttatgcattttaaaaagttttcttagctgccttccttgttttccaaaaatatacaagtgctgatcctcttttgtccttcttggggtccccaggaatcagagaatacaatgtataaaactatagcaccagctgggggggtgcgaggccgaggcaggcagatcatctgaggtcagcctggccaatatggtgaaaccctgtctctactaaaaatacc

SEQ ID NO: 106849 - DNA, 347 bp, Homo sapiens
tacttggacaccagaggccaaggaaacaacagccaaggacaacagaatccctgcctaccccacacgacatgttgctcattaaggccccagaatacagaatctgaattgagagattataagccagaatatgactgaatgaattacaggcctgaactgacagaaacggcactgaacttgctgagcaaaacctggcccagggctgatgagatggtttgctttcacagccagaaattcaactgaactttgggagtcaagaacatttcatttttttttttttttttttttttttttttttttttttttttttttttttttttttttttttttttggggggcccccccaaaag

SEQ ID NO: 106850 - DNA, 368 bp, Homo sapiens
tctttgtcaggtatgaaaaagaaatatactcaaaatgaagagtaaatataattaaaacagttccttgccttaacatataaccttcttatgggcaaaaatctttgtaaggttaatactgtaaaactttgatttaaaagaaggaataagaaagagtaggcagagagaggaaggggagaggaagaagtttgatttttgtaagagtaaacagaaaatgatagtaaatgaaatgatattaaatcattagctgcttttaatgatacagttttagacccacaatgtatatatatatatttttcaaatttccagtatttggcatgtacctgacatacagtcatctcttttcaatagttaacagaatgagtgatatt

SEQ ID NO: 106851 - DNA, 291 bp, Homo sapiens
cccgctctttgccttcagttgtattctatatgtttaatacacagcacagcagaagcaatcagctctccccaatgttacttatcccataaatcatctttccttacacctacgtattttcttctgtattcaattttattaatggatcatctgatctccagctttgctggtttagaacctctgtgctcatcttaagctcctcaaggagaaaaggactattgtaatcatctttcaacgagtttgtaaaaacaattcccccatcacagcactgtgcctcatagggtttaaaatttg

SEQ ID NO: 106852 - DNA, 314 bp, Homo sapiens
tgcttatgtcacagagctccaaaatgtgggctgcgtgtgcccaggaaaaattataaaggccagtttaaatacagcctatatttctctctaccacttagattttttctttattttcaaaaacaataattttctgaagttaagtaaaactggaacatggaaaacaactacttgcgaaacagtccacaggactccatgacagcctccattctcctccttaagacggatttgcatcaaacttctccatcacactggaccaaacacactctattttgtcttaggaaaccctgaggaacatgaatttttaaatgctatac

SEQ ID NO: 106853 - DNA, 234 bp, Homo sapiens
ttttttcctataatcttatgactttaaagcagaaaacactgtaaacacctgtcttagttggctaaggctgctataacaatattaaatatcacagattgggtggcttcaacaacggacatgtatttctcacagttctggaggctgggaagtccaagatcaaggtgcctgcagattcactgtctggtgcggatcctcttcctgtctagtagacagctgccttcttaactgagtgct

SEQ ID NO: 106854 - DNA, 468 bp, Homo sapiens
accttagggggatgctaggaactcaacttgttcttctgcaaaaaggcaaataaagtcaaaggatcaaggcggtattctgcctttcctatgcaaaaaggactgcccagtaacccatagctcgagaaggctctctttagataggtggactccagctaatacacgaggaaggaatgctagacctgaaagtcaccattttgccgtccctaatctcagccctgatgtagtggctgctaacatcacaaaagacagcctctgtcccttctaatccaagaccacacacagcagcacttaggagagttcttgccaaaacaatcttgaatctgatcaaacctctagatctaaatgacaacttaaagcaaatacaaggacagaggctcacgttcaacagcaccatggggacacggtacgacccagactgggaaatcgtagatggcaaaggacaggctcatcaatagatttcaaaatgaa

SEQ ID NO: 106855 - DNA, 364 bp, Homo sapiens
tgagacagagtctgctgccttccagtctaggctggaatgcagtgatgcaatcttggctctcagctcactgaaacctccactagctgggttcaagtgatccttccacctcagcctcccaagtagctgggattacaagtgtgcaccaccatacctggctaatttttgtgtttttagtagagacagggtttcaccatgttggccaggctcgactcaaacacctgacttcaagtgatccgcctgcctccgcctcccaaagtgctgggattacaggcataagcctctgtgcctggctgtaactcaggtaaattttcattggctcattcatatttcccagttcccaatctttctattgctcctatttaac

SEQ ID NO: 106856 - DNA, 507 bp, Homo sapiens
tcagtgtggtcatctctgggcagagatactatagatttactgctaacattgggaattggaaactagaatctcttctgagattctaaaagcagggtgtttctgctgccatccttgctgccctttgccacatgcttcttcactttatgtgttttcaaatcacagttgcccatgggtgtgtctgatgagggaaaggtcacatacctgtaccctagctgcaaaagagctggagatttcaggctcgttgttaagggtctgcggattcataaggtcagaaattccatgaacacagaaaaagtattcaaaaggtactcagcagctagtgaattcaactggggacagttggaacttcaggatgtttgatgactggggagagggtctttgttaagaaaaagcaataatatgaaatattaatgctttccaattttatcaagatgatagcatttttgtgtactgaattacatgcatattacatacataataaaattgtaaaactctgtaactaggaag

SEQ ID NO: 106857 - DNA, 308 bp, Homo sapiens
aaagaaggcatcacaattaattctacctccttacgttcttaatgattccactttatctgtggtttaggaattgggtggtggggcttaggtgcaaagaggaaagaaaaaggaaaaggtaattgatacttaggaaaggagcctaaagcccaaattcctcacaatgattctactccttttttcccccgtcatttcaaagtcccaatgcttaaaatatatgtcaagttcaaagacttacaaatgtaaaacaaagatttgcccatggattgaatggtcataccacattttctcagatactgcagaaaggcttg

SEQ ID NO: 106858 - DNA, 308 bp, Homo sapiens
tgggggttggggggacgacgggacattacacgactttagtgccaagaaggattctgctagctggtttaggagcttagattttgctttgctagctaggttttgtttgttcatagcaggacagtgaggtaatcagatatatggtctggaaagatgctccagctgtgggttcatggtggagtacaatggccagagatctggggtgggcagacctgggctctttttttcctggtattttcttctctgtagcctctttttcattcacctttgtcaatctcccctccttctcccggatacccatttctccctcc

SEQ ID NO: 106859 - DNA, 272 bp, Homo sapiens
gtgtataaaaagagttcttctgtctctcattatttgtggaatctatagacaaattattagaattaatgagagtttagcaaggttgctggatataatttatgccagcagtaaacagccatttaaaggaaataatgcaatagcatcaaaaaatatatataaaggtacctaagaataaatccttttttttttttttttgtcgcctgggcagaggttgcagtgagctgagatcacaccactgtactccagcctaggtgatggagtgagactgtctc

SEQ ID NO: 106860 - DNA, 257 bp, Homo sapiens
aatgctctaggaaggatgtcagaacccataaaaaatgatgagtatttgaaatatatgtaaaaacttaagtaacaaatcagaaaatatattctgagatagaagtgaccattctaaaactgtgctgtacaatacagtagtcactagctacatgtagtttttaagcaatcgaaacgtggctagtctgattgagattgctgtgaaaaatacacactggattttgaagattagaaatgtaccctaaaacttaaagtataata

SEQ ID NO: 106861 - DNA, 458 bp, Homo sapiens
ggtgaggatggagctttcataagacggagtgggagtctctaaaaaacattttttaaagtttttttttaagtactagaacctgtggttgatcctagaaatccagcattcaaaatcaccttatgttagtaatttggatgtgacaggtgtctggctgtgaaagtatcactccattaatgaccaggtgtttcacgaaaaggtcatataggcaaagcaacccccaaacacagaaggagtcaaaaaaccaaagaaggaggcagacaagtccctcttgtcattacagggtgattttattggggaacttacggacaggggcatggtcttgggtagccacatgacaagcagatctcctcgtcattagacccccagacccaaggattatatacccagggaaggggtacacatgctccagaggaaatgaggaggaatttgatctaagggcaggatttatagtaagtacc

SEQ ID NO: 106862 - DNA, 391 bp, Homo sapiens
tgcccgcctcagccccccaaagtgctgggattacaggtgtgagccactgcacccggcctatttttcttttattaacattagctttagtaatttttcttcacagaactatgtatttgtgtatttgttgtcaggtttggaatttgtgttggctatcaatttaatataaagtcttagactttatagagtataaaccctcatttatttttgttcatcgtattcttgcaaaatactgttttgacttggtgacctagagtggatcaaggcactatcttcaagtggtttctgtagtagcctaacctagaaacactgcctgacatagctgagtggcaatgaaaaacagccataggtactaacttaaaaattagctatagaattgcaactggcagctaag

SEQ ID NO: 106863 - DNA, 581 bp, Homo sapiens
tattcttgtgcatcggtatctttttctttttttattgtagtaagaacatctaacatgagatctaccctcttaacaattttttaagtgtacaatacagtattgctaactataggcatgagaatgtgcagcagatctctggaacgtttcactctttaaaactgaagctttataccccttgaatagcagcttcccatttccctgtcttcatagcccctggcatccaccattctacactctttctgtggggttgactattttaattacctgacacaagtggaatcatgcattatttgtctttctgtgactggttgatttcatgtagcataaagtcatcaaggttcatccatgtttttgcatatggcaaggtttcctttttaagtctgaataatattccattttctacatataccacatttactttatccctttttctgttagtggacatttaacttgttctcacagcttggctattgcaaataatgctgcaatgaatatctcataagtctcatatatgtccatacaagatcatgaaaatggacatgtctctgggtattttgaattggtgggacaattttgcttaa

SEQ ID NO: 106864 - DNA, 570 bp, Homo sapiens
gctccgggtctggtgcgcggtctggccgcgctcgggccctcgccaaatgagagcgcagcgcctctccgccttcggatccagagaaagagcttgttgctgcctctaaaaggttggagccttagtaagcggttcctgcctttcctgcacagaccagaccgccgggtgctggtctgcgctctgccgcgcgccgactgggacagcccacccacgagatccttgttcctgaaatccctttccttccctcatctgccaagaaaactttcaacttttgggctctccgcgcctcccaagcttcctcgaatccctgggcccttgactgttctgccctgatggcacttggtgagagatccattgagagccctttccgtgccttcctgaatattgatatgttttccagcctctcctcctgcgctggcccaaggactcattttccgtccctgcttcctcactaaaaagagggtgcccaataattgcttgttccatacagaaggcagggaggccgtctctaggttttctcccactcagatctgctgtcctcacagccacctccccaagaggaatgaaggtatt

SEQ ID NO: 106865 - DNA, 650 bp, Homo sapiens
gagccagtagtagaagagatctaagctaggcaagggcacctcaacctagtcctagaaacaatgcaatattatctattgaagactccacctcagtgttatcactgacaagcagagagtgctgtgttaaaacaacgcagtgaagacaagaggttaagaagctaatggtaaagaagaaaaactaaaggcattgaaatagcaaccgttgtgatgcaaatttattcttatgtaaatgtagaaacttgctagttctttagagctctctgacaaatgtgcatttaagcaacaacagtcaattttccaggaaacatctttatagcatattttgagtggaccttttgaataaagcaatcagaaatgtttgttatgacaatggataataaaactgccacttgaaagaaactagcaattgagagggagcagcttgaccaaatatgaagaaggtaaaaaaattccaatggcttgctttcactgccagagtatctgaaacacactaagagcactgtcaagggagctattcttgaattttaattcaggtccccaacatgtgtctgtctcttggtttacttgggagaaaccctgaaggctcagatagtctttggaataaggtcactgtagaagactgacaaggggtccctggatgatagagaggg

SEQ ID NO: 106866 - DNA, 401 bp, Homo sapiens
ggaaaaggggcccaggcaaggcagggcccatgagagttcctagtgtgacgcttcaagtgtcctctcatggaggtgtgaacagtgccaacttctcccagcatgtgacagcacccagagaccattgccccccagggaagcccacctgagactcactgtctggagttttgttgggtctcagttgtgtggattggctggccttagtctccagccctccagaggctgagctggcgctgtgtgcccgaggcctccaccacagggttagcacagactgtggaagtggcccagggcacccagttagacagacattcttaccaggcaggactttccaagggtctagagatctcccaggagctgggggcagaggcgaggcctctctggcagggttaaccctttgccttgca

SEQ ID NO: 106867 - DNA, 494 bp, Homo sapiens
cggaagtcttgaactgggttcgagttcccgttatagagaaaggtaatttctaggactttccctaaagcatcaacctgcttaagggttagacacagcaccagatctacaataaattaaataatacatttgacatgtttgcctccctgtaggtactgcagtgatgatttacaaatactttctcttcatatttcactggcaaggggtcaaatatttctggtcctctattaacatgtatcaataatcagaaatattattatcgatatgaaataagcaaactgaataattatcaaccaaccaccatagaaaaagcaaggcaggctaaacgtggtagctcacgcctgtaatcataacacttgggaggccaaggtgggtggatcacttgtggccaggagtcaagaccagcctggccaacatggcgaaaccccatctctattaaaaatacaaaaattagctgggcgtggtggcgcacgcctatagtcccagctacttgggag

SEQ ID NO: 106868 - DNA, 387 bp, Homo sapiens
gtttggaatgttcttccctacactacaaaggagtaagatgcaaatgacccagggggtatatttcatcagtcatctcctagagagacagaatcttatgcaatcttctttgaaaaaaaaaaaaacaaaaaagaaaaaaattacagagacagaaagaaagggactctacccttccttaagagactgagtattggtactgctcatattccaatttttctcttttcagttactccaataagtcccgcctctccttcctccagtttggctggacaagctaagttttcacatcatgcactcaaaatggggaaggagaaacttgtccattttctctatgtctggaggagcaggaagagccacagtatccagaatcatagcttcagggagaggaag

SEQ ID NO: 106869 - DNA, 862 bp, Homo sapiens
cacgccaccacctccatgtctgttgacattttatttgtccttcaagatttaactttggtatcgttaaatctcttgaagcctttctagatcttaccaagagaaaataatttccttatctgttgtatcatgggactttattaaaactactgatattatggttatctatacacacatttctttcctctattatggattgtcttttattttgcaatatacaacagttatttgagtacttactgtataccaggcactgttactaagaggtgggggtataatagtgaataacataaacttggtctctgtcatcatggacctaacagtaaagtacattaattgtgtatgttcagcatttgctacagtgtttgacatgtattctgatctttacatatgtattcatattagttattaaggactgttaggagcaatgatacttaaatgccttttaaagataaaatttagatggcctgaaagtggttagtcacactaacttatgaaaatatatgagaagatagagataagtattttggtgtcatgtgtttagaccatagacaacaacgtaaaggaatgaaaagaccgcttggaatagttgaaaggtagctgagctgagtcagagctagataatagtcttggctttgccttgaattaggtgtaatcttgacttactaacttcatctgtaaattgggaggttttggggagagagaatacttttttttccctgagctttaaaatttaaatcataaaattttaaatttgatgatctgatgagagtatagtaaagatgatcctagcagtattattagggaaagcaaatagtttatcttaactgcctttatttgtttacatttattgtatgtctatttt

SEQ ID NO: 106870 - DNA, 399 bp, Homo sapiens
ctgggcatccacccctgcgtttcccttctgttccccattttcctctagcttctcagtgataaatgatcacaaatcctgttcttccttcctaccacttgattcacagctcctacctgatttcagaatgtttttgtctaagaaacaactttcttctggcaggaagcagagatgaggtcaggctgctcatgctgttcacactcccctgacctctgtcccctggcatgtggggtgctgttcaccctcccctgcatgcctgctgtgttctagggtggcccttgggtatgaattaaacataaattatcccagagggctgacttcctccatcaccttacattcatcttctggttttaaaataattctcatccatttcatttatgaaattaaaaccaaatgcatact

SEQ ID NO: 106871 - DNA, 250 bp, Homo sapiens
gggagagtaagtagaaaccaccggatatacaattgcattagtcaggattactgttactagttgctgcaactaaatagccttaaatcaccactggtttacacaacacaggcttattccttgctcatgctgcatctccagtgagagccaacaggagtgtctctctgctccatatagtcactcagggccccaggctagaggagacattacagaagacatgttgtctttgagatctctatggaaggaagagagg

SEQ ID NO: 106872 - DNA, 352 bp, Homo sapiens
cccccggcctgctggctgaccccagacacagcagccttgtgtttcctccctcctggtcagctggtgcctggtagctgcagcggtggtagctgcagtggtgtctctccagaaggttctgggggagagactgaaattcccatgcttagccttacaatgccccggccccgtgcaaacctccagatgaaaacacagccccggccagtgcggtggctcacgtctgtcatcccagcactttgggaggccgagacacgtggatcacaaggtcaggagttcaagaccagcctggccaagatagtgaaaccccgtctctactaaaaatacaaaaattagccgggtgcggtggcgggcgcct

SEQ ID NO: 106873 - DNA, 664 bp, Homo sapiens
tcacattgatgagatttccaaccttttagctcaccaaccttgcttctgcctcagggcctttgccctttctgtgcatctgcctgaagctctccccagttctgcagacagctaccatttccatattcaggtcttcagtcaaattgtccctggttgctaatgagttcttatttgatgaccatatttaaaattgcaggtatacacatgcacatgtatgtacacacacacacacacacacacacacacacacacacacaatctcccttctctgctttatttttttcactgactgttctccatcttacatactaaatattttcctattttcgtttgtctcctgctactagtatgtgagtccatgaattcaggaatccctctgctctgtattctctgaattcatttctgtgttcccagtctccagaacaatgtctggcacttaggatatccataactatctattgaataagtgaatgaatggtggccagcctgcccacactgtctacagcatcaccacaattcattttccacctaggcacttacctgcagtctaaagttatcttgtttattaatgtgtttccttaattatcacctgtgtctcctttcctgaagtgaaaggaagctccaagtgaggacaggcctggcttaccttgcttaactgacattccag

SEQ ID NO: 106874 - DNA, 868 bp, Homo sapiens
  misc_feature (187)..(187): n is a, c, g, or t
acaggatattcaacagcacctgatagaatctgttggaccctcaaaatctaaattctagaacctgaataaaaacttctctttgcgatagtctatgattttcagaaattacaactaaaacctttaacattttttttttgaaatctacatcacattaagctctgattattattatttttttttttagtcnattgctcttcatagaccaaccatgttactgaatcagatcaaaagctgtggagagggtaaagcacaaaacaaaaaccctcacaggggaatcttaacattttgagggggagcagtgctccgcagtcagtacacacaggaggtgacaagcagactatttggaaaccaaaaaatatcaaagatgctgtaggagaatgtacaggaaaactttcaagtgtataagttgaaaatgatgcagaaatgtagaggctatatgacatgtctttgcatatttagtaccattaattgaaaatttagcacattccaagagaacgtgttcttaatcaaacttcaaaactgacccatcaaagtcaatagggcaaagcaccaaatacctgtggatgtactcctgggaactaaaaccaaaatacttttggaggttgcaaagctgctgtactgtgccaatgtcctttcttatacatgtacatatgtgatgacggcttgagtcagctgcagggcagggggctcaatgagagctttgtaaagacagctcttcacttcagctcattagctttggtaataggcaagtttgtttcccattataatttgatcattcttgtgattaattcaatgccagttcttaaagaactcttttatttctgtatatgaagctgatgtttaccttggaaatgttgcaaaatacata

SEQ ID NO: 106875 - DNA, 1155 bp, Homo sapiens
cgtttttggtagttcatgttccagtcagaagaaaagaccagtgagaactgggatttataataattacaatcatcaaaattaactgagtacagtgctcagcaatttatatcaatttcatgtaatcctgagaacccttttataaggtaggcattgcactgattcacattttaccagtgaggaaatagaagtttaggaaggttgccaaaaacttagaatgacctttctaaaatatgtctggttctattagtctttggtttaaaatcttaccatggatttatcttcaggataaaataaaattctttaacacagaaaaaaagacccttccatgctgtgagccttcaggattcagtggttaaccagtatcatctttctaacttcctgacctgcaagtctccctctgaccacactgagctttcacccttccctagctgactgaggtgttcttgcacctccaagaatctgcacacaatcttttcttcttccttcatatccttctggatctggctaactctgactatccttcaagacatggttgggtatcgctttgtctgggagaataacctgtatgcccccaaagatgggggataaacaccctttctagatgatctggtagtttctgagtctgcttctaacaaggttaactccaaattcctcagcccaagactgaagggaactccttttcactccttttacccggggactctcacccgtgcagctctctggcagccggaagtccaagatgcccaggactccttagcaagcccattccacagtcctccatttagggaattttagtagagtctgctgaatttgtccttaaataggctgacctacaatgattttttaaaatgtatacaatccatgcactgcataacaacttttcagtcaacaacagatcaaatatatgatggtgatccccaggacctgaaaatatcctattgccctggtgacattatagccatcagcatgtggtagagcaacacattactcacttgtttgccagttgtaaaaaagaatagcacatacaattacatacagtacgtaatacttgataataataaatgacgatgttagtggtttgtatatttactgtactatatttttcacagttattttagggtgtactcctatttattaaaaaaaatgttaactata

SEQ ID NO: 106876 - DNA, 381 bp, Homo sapiens
catctcagaaaggcaagtttcatctgcaaattcttggtctcacaatgaaccataacatctctgccatggcccagttagcatgccgggagctatttgtcaaaggacaaataattctatgctgcagaagaaatgaccttgctccagagaccaaaagctctctgttataattctgtcactgacatttgctgcaaactataaatggtatatgtttttccattagtgatatctctaacaacatagagtcttttgcttatgccttctgcatggctttctgtctctgggttctacttaaagatggcaggtttcggttcatctagtagctaaaatagtagccctagtaaaatgatgacatcaaaactcaaaaaccactgaatgttttcc

SEQ ID NO: 106877 - DNA, 370 bp, Homo sapiens
accttctggagattaagatttccaaatatgaattttagagggaacacaattcagccataacaaaggctaagtaagaacctgtttaaaatcctggatgtcttttcttgctaaaggagctgactcttagttctctccttcagctcctggagattgtgtaattaactggaggaggctcagaggtagaaggagcctaagatactatctattctagcctctcattttgcagttgaggctgaagttcacagaggttaaatgacctggttctgagtaactggttggacagctgtacccaagaggttctgataatggatagttgtcagcttcctatcaacttccttcctttaaagttaacacatattcattgtttttt

SEQ ID NO: 106878 - DNA, 438 bp, Homo sapiens
ggtcaggaacctagcattgtttagactaaaaaatatccaattttagagatggggttaactttttcccctaatatatttattattgttaatactgctgtttaacactcattccaaaacttagtggcatgaaacactttttattatgcacatcgattctgcaagttgtgccctctgaaagggcacagtggggatagatttttctcagccatgtggtgactgggatctcagttgggaagactggaaagttgagattgacacacttgactcctgggggccaaaatagtttgatggctttttcaccaacatgtctggtacctaggctagcattgttgaccagactgccttcatgtggccttgcttgtgtataacctggcggcctcgaatgttaaagtgaacaaggacaaatctgcgtttttttttttgttttttgtttttttt

SEQ ID NO: 106879 - DNA, 225 bp, Homo sapiens
tgctaggttggatgaattagatagtcatggagaaatagaattcaacaaagagggtatgatctaatcgtgaggcagcttagcaaggccgatttgttcagattcttcttggcatctttgtgtctctggctcctttcctccaggaatagggagggcacctcttgaatgaaggtcttatgatctgcttcaggggaaggtcagaaaatccttacctggttttatgaccta

SEQ ID NO: 106880 - DNA, 383 bp, Homo sapiens
tagcatctcctggtgcatgcaaccacctaccacaagagcttgactggcctctccacttcccactgctccccgtctgcaccacccccagatgcccacacaccacagccagccttctgctgaacgcggccttcatgttgtcatcttcccatttaagagccctccacgcttcttgccccttccactgatccaaatcctaactagctttcaaggcacagctaagatcctgcctgcttctggttctgttgaaggagcattagcttggatttgggaggcctctgcctctagccatttcttttctttgtgaccttttgcttcctgaggcaggtccttatcccatcaagcttaccgtctttgggtgtggttcaccgataataagagaatca

SEQ ID NO: 106881 - DNA, 268 bp, Homo sapiens
ttgaaaatctgaagcaaatgacaaaaacttttgacacagtatcaatataaaaaacttagaaagtacctgtattaattttgaaatgttatacctataatactttcttatctattaaataactacagctccactcctagaatctatgattaaaagtcgtaacacttagaaaagactttttttcagatgaaatatgagaattacttagcctagatttatcagccagtttattaaatctgacattcaccaaatatatttaaacatctactat

SEQ ID NO: 106882 - DNA, 784 bp, Homo sapiens
aaccaaacaccgcatattctcactcataggtgggaattgaacaatgagaacacttggacacaggaaggggaacatcacacaccagggcctgttgtggggtggggggagtggggagggatagcattaggggatatacttaatgtaaatgacgagttaatgggtgcagcacaccaacatggcacatgtatacatatgtaacaaagctgcatgttgtgcacatgtaccctagaacttaaagtataataaaatttaaaaaaagatttcttgccactgaaaacacccagaaccaaagccaaaaggactacaaaacattatatattatagacacctcctcaaagggagaaaaatcccatccaaattatggcaaaattgaaaaagtaaggaaagataatatatccagataaaagaacccgataaacaactcccaaagtattaaaaaccggagtattacaacaccacccaaggggaacactaactctacagcaacagatcctagccaaaatgaaatcattgaaataccagataaataattcaaaatattgattttaaagaagctcaatgagatccaagaaaaaacaataccaatagaaagaaatcataaaaacaattcaggacatgaaagaagaaatagacacaatttaaacaaaaaacttctgaaaatgaaaaatttattgaagttacaaaatacagttgaaagctttaacaacaggctagaccaagtggaagaaataattttagaactcgaatataggtcttttaaattaacccagtcagacaaaagtaa

SEQ ID NO: 106883 - DNA, 445 bp, Homo sapiens
tggagatggagtctcactctgttgcgcaggctggagtgcagtggcacaatcttggttcactgcaacctccacctcccgggttcaagcgattctcctgcctcagcctcccaagtagctgggactacaggcacgtgccaccatgcctggctatttttttgtatttttagtagagatggggcttcaccatgttagccaggatggcctcgatctcctgaccttgtgatctgcctgcctcagccttccaaagtgctaggattacaggtgtgagccaccgcacctggcccatgttggaatattttctaagaaaaaatatggaagccaagaagaaatcattccattaaagtcacaagctcttaatgtgtccagtttaaggtttcacttgagaagcaagaactggaaaagatttagggaatagaaattgcaagaatgactagggattgaaaag

SEQ ID NO: 106884 - DNA, 429 bp, Homo sapiens
ttaaggacttggctagaacctgagttttccatttctcctggtgagaatgtgtcttcaggagcttattgataattctgtctttcagcacaactttgtaaagttgaagtccctgccaattgatagtcaccttgtggcgtgatcttgtcagtccaaaagaataaagatctacctttacattcatttagagtgagggatgatgtacagccaggatgcctaagtgtcacctcctgcagttcactgacacatggagtccctttgacaggtgcccgagtttctttttcctatgtattacaacatctacttttaggattttttttttaacctctttccccctttccttcctgttctttcttccctcttttttcttctttttccatctccttggctttttaactctctcctcttttctctctttccctttccactttt

SEQ ID NO: 106885 - DNA, 264 bp, Homo sapiens
ctgtcttaggctaccgctttacgtgtgctcaggttagcacagcctctttgtccaagctgattgagactttctctactacttgcctttactgtttccctcctcctttttagcaccttgacttgctgggctcctatgtagtctgaggccaatgttttgaaatccaatgcctcttcctgaggccttctgtcatcagtatgccactgcctcctccactgaacactcacagtactttgctgttccccttcctgccctttccacggcctg

SEQ ID NO: 106886 - DNA, 539 bp, Homo sapiens
agcagagaggtaaagtcactaccctcaaggacacaccgttacccatggtgggaccaggattcaaactcagactctctacttcatgctgcagcactcctctagtggtctccatgctggagactccttgaggacaacaccagggcctgatacccagagtctggacacagagcagaggggcgtgagcagctggcagtgagcaatgccctggggcctcgggaactttgaggaaagcatgttctcaggagcatttcccctgtagccgccttgtagatgccgtcagccccttgagtctgcccccatggctgggagactcacgcactctgcccagcgtggggtctgtttgagagatgggcgttccagccatcgttgctgcatccggctaaaaccaccctgagaagcacctgagcacatgttccctgctgggtgcccccctgcattagaaatgatagaaacttaagctggctgaagcaagaaagggaactagcaggctcttgaaatcaaaaagtccaagggtgcatctacctcaggcatggctggat

SEQ ID NO: 106887 - DNA, 402 bp, Homo sapiens
catggctcactgtaacctagaactcttgggcccaagtgatcctcccacttcagtctcctgaagggctgggactctaggctcatgccactaccaccagctaatttttaaatttttttttgtagagacagggtctcatctctcgatgttgcccaagatggtcttgaactcctggcctcaagcagtccctcccacctaggcctcccaaagtgatgggattacaggagtaagccaccacacctggcctaaaggtatcctttttaaaatgaagtattttgaataataaacgaaaaagggattcatttcaaacgtacaaaataggccatctatatttttctgaaattaatacactttttggtgtagaatatctggaataccaaaaatacattttgtagcttttcccca

SEQ ID NO: 106888 - DNA, 850 bp, Homo sapiens
tgcttcgggctgtaggggacgccccaaggcagggagtcggacctgcgagcggagggatggggcgggagggcgagctgagggcagtcgcggaatccgggaaatgggagggagcccggcggggcgggggcccagggccagcccaggcgggacccgcaggcacccacctgccccggacgcctcccgagacccagccttgccgtgggggaaagtgcgcagcgggctggtcccggcgccttggactgggctccgtctctgcttcagttgcctgtctcttctcctctctctcctgcttctctctctctatgcctctctctcaagttctgggtctttcattctctcccttttcttcctttctcccttcctctccttattgctatcctttgcctctccccccggtctctctttccttccgtgcgtctgtctccctctccccaccgcctgctctggctctcccagtgtgtccctcctctgtcccttcatcctcttccctctgtcactttcgcacaatcttttggtctctctctctctctcaagaggctttcgctcccggtcttcctggctcccctgtctcttgctctctgcgcccatctctctgctcgtccctctttctgtccaggctccgtgtttccgcctgtgtttggcggtgttggagaagagcctctggaagttgtccgctgtggtgcgggtcttacttctttagagctgcacccctccagctgggtcctgctgtttgttctgaatggaaacgctgcagttcccttgagttattagaaactgctcttttcttagccacctttccagcaaggtgaggtcagtgactacgagcggccacaaaggtgccagtgaaaga

SEQ ID NO: 106889 - DNA, 466 bp, Homo sapiens
tgttacccaaagtactctctgccacacatgcaagctcattctggcaggctgagataggggaattggaagacaggggttcaagccctgccctgcacccagcagcagcaaggcagccgttcctccttctgggcccctgtaggcgatgggtagatggtttctgtgttttcatagactgccttgcgaggccttgtgggtgaagggcccaatcccagaccttggcagaggagtgacgttgaaggctggcttggcattgtttttccagagttgacgtcagggcagctggtttagggtttcatctgtgagacaaaggctgctttgtagcttctgcccggtttaagtccaagcacatcaccccccaaggtgggaaacgaggtggaagggattgcagggcccaaacagagaagccttgggaggcttggcttgcgctcagcccctccaagaagggagccaagatctcataattcta

SEQ ID NO: 106890 - DNA, 279 bp, Homo sapiens
gcagtgtagggctgagttaaggaatcctggatggatctgcaaaggagtcagagagagaaagctaggagaatgggatgtcctgagagctgagtgaagatgtattgggaagagaggattgattagtaacatcaaatgttgctgagagattaggtaaagtgagaacgcaaaagtgtctacactgttttcactgaggaggtggacttttctccagttcttgttctgtgaagggaaatcaacagaaggaaagacaagactgcttggaactagaagacagggctc

SEQ ID NO: 106891 - DNA, 1821 bp, Homo sapiens
  misc_feature (276)..(276): n is a, c, g, or t
atctggaaggcatgtttgcaatataatgtggcttgtaggatctctcctacttttttacgctctgttttgccagttctcaaaagtaaatacctgaagtcctagaggtactataaacattttggtaaacattctttgagactttttctcatgtacatgtaaatatacatcatcccaagttaaatttgataggccttcctgacagtagccatatagataaatagaagttttcgttggtttagtggcaaaactgaattcttaatgtaggtatacaagttnaatatgatggttagaaatgaagttttctgaaagtagttcgttgtatgctccctaaaagaattagctttatatttatcttaagaatatctctaaacctatgcaaaaatatggcaaatagtcttctttccattagtctagttcaacaaaatctgactcagagacagtaaagaaagggcaagtagaagatctaatgccaactaagaagataattatttctgaaatatttagttgaagataactttctttcttaagacattactgttgttatgatgcacaagtcaaagaacatgtggcatttccaaagagtattaaatgcatgttacttttttataaaaataagataaatgagattaatggggcttggaactgcaatcttggtaaataaagttactgtatgtctttcacgagtgtgtgacatgaggattgaatagacagaattgcttgttagaaagaggaactaatttttgtatctattacaaattatatttgtaattcttccctaattataaattatcatgattatttttatttgggaaataccaaaaaatcataaataactaatctaaacttacagaatcctatcatccaaaaatggccattaatgacagtttgatagatttattgcagtttttttgtatccatttatctttcttgttcattttttcttctttcctaacaaattgaagtaatgccataaattctgtttcatactttgctttatgtacccttacagcatgaacatttttcatatctttattgcccaaacataattttaatgtatattaaatagttcatcatttgaatgatctatactttatatactttatatttctcaaaataattaaattgtccaaattttggcacatttagattattcaaatttttgaacgtagggaactcactgataaatataattatacataaaccctagaccacatctctcgtgatattattagtatagattcctagaagtagagttgctatgtcaaaagtatgaagatttattttctattttcatctttaatcggattttcattataaaaaaacaaggccaggtgtggtggcttatgcctgtaatcccaacactttgggaggctgaggcaggaggatcacctgaacccaggagtttgagaacagcccacgcgacatggcaaagccttatttctataaaaaaatacaaaaattatccaggcttggtggtgcatgcctatagtctcagctactcaggaggctgaggtgggaggatcacctgagcccaggaggttgaggctgcgagtcattctatcatcccactgcacttcagcctaggtgacagaatgagaccttttctcatacatatatatatagctgcccattaaaacaaagttgcaccattttgccatctcacttcctggaagtacctacctaatactgcagacatttggtgggtgcagtagctcatgtctgtaatcctagcactttgggaggctgaggtgggcagattgctggagcccgggagattgagaccaccatggtcaacatagtgagtcctgtctctacaaaaaa

SEQ ID NO: 106892 - DNA, 1380 bp, Homo sapiens
  misc_feature (276)..(276): n is a, c, g, or t
atctggaaggcatgtttgcaatataatgtggcttgtaggatctctcctacttttttacgctctgttttgccagttctcaaaagtaaatacctgaagtcctagaggtactataaacattttggtaaacattctttgagactttttctcatgtacatgtaaatatacatcatcccaagttaaatttgataggccttcctgacagtagccatatagataaatagaagttttcgttggtttagtggcaaaactgaattcttaatgtaggtatacaagttnaatatgatggttagaaatgaagttttctgaaagtagttcgttgtatgctccctaaaagaattagctttatatttatcttaagaatatctctaaacctatgcaaaaatatggcaaatagtcttctttccattagtctagttcaacaaaatctgactcagagacagtaaagaaagggcaagtagaagatctaatgccaactaagaagataattatttctgaaatatttagttgaagataactttctttcttaagacattactgttgttatgatgcacaagtcaaagaacatgtggcatttccaaagagtattaaatgcatgttacttttttataaaaataagataaatgagattaatggggcttggaactgcaatcttggtaaataaagttactgtatgtctttcacgagtgtgtgacatgaggattgaatagacagaattgcttgttagaaagaggaactaatttttgtatctattacaaattatatttgtaattcttccctaattataaattatcatgattatttttatttgggaaataccaaaaaatcataaataactaatctaaacttacagaatcctatcatccaaaaatggccattaatgacagtttgatagatttattgcagtttttttgtatccatttatctttcttgttcattttttcttctttcctaacaaattgaagtaatgccataaattctgtttcatactttgctttatgtacccttacagcatgaacatttttcatatctttattgcccaaacataattttaatgtatattaaatagttcatcatttgaatgatctatacttttgacacagcaactctacttctaggaatctatactaataatatcacgagagatgtggtctagggtttatgtataattatatttatcagtgaagttcctacgttccaaaatttgaataatccaaatggtgccaaatttgggacatttaattaattttgagaaatataaagtatgtaaagtatagatcattcaaatgaggggcggtttattttctttaggtcgacgcggcgtcttgggaggagtagtagtcgcccgggaatccggacggtaccgggggtgttttagaatac

SEQ ID NO: 106893 - DNA, 148 bp, Homo sapiens
ccacctctgcctcccaaagtgctgggattacaggtgtgcgtcactgcacccagcctgactgtcccctttctgtttgaaacagtgttgagaaccacccttgctttaggtgcccgactcttttcagccccatggcgtggttggaggcctg

SEQ ID NO: 106894 - DNA, 406 bp, Homo sapiens
tagtagagacaggggtttcccatgttggccaggctggtctcgaactcctgtgctcaagcgatctgcacgcctcagccttccaaactgctgggattacaggcttcagtcactatacccagctgacttgtacactttaaatgaggagactgtatggtatgagaattctatctaataagcagtcactttcaaaatgttgcttatactgcaagtttaccttttaatacagtcatgcacagtataatgacatttcagtcaatatatatgaactgcacatatatgacagtgttcccatgagattacagtagaactaaaaaatgcttatctcttagtgacactgttgccatcaggacatcatagcacaacacattactctcgtttgtggcaatgcttgtgtaaatctaactgt

SEQ ID NO: 106895 - DNA, 398 bp, Homo sapiens
ggaccagggagatttgattgagtctggtttccaggtgaattaaaaggaagggtgtcatccagggtttgttactacagtcaaaagaataaataaatcaatgaagaaataccttcattgtctgtggttttcatgcagatatactcatggaggttgtatctctccaaaaacagacaaatccaaggctgtgaacaagcatccgcatttgaattccattaaaccaaaatctatgttgaacgaagtgaagtctgtacacagcattgcaaatgtgaacacattcctgtgtgaggcacatcaccatttgtcagttattgtgaatatgtgtatttttaagcaataagatgcagctggtcagttttctgggcaatcttggtgaggcatttcctgtgctgtggttgttc

SEQ ID NO: 106896 - DNA, 326 bp, Homo sapiens
aaattaatgagaaaaacaggctattgtttgtcttttcatttaataactcagttggctcagtgccctggctcacacctgcaatcccagaactttggtaggctgaggctggtggatcactggagccaagtagttcaagaccagcctgggcaacatagcatgactctttctaccaaaaaacaaaaaaaattaactgggtttggtgacatgtgcttgtagtcctagcaactcaggaggactgatgggacgaatccttgagcccagaaatttgaggttacagtgagctatgatcacaccactcaagcctgggtgactgagaccatgtcact

SEQ ID NO: 106897 - DNA, 5905 bp, Homo sapiens
gggaagagatttaggctaggtacgaaggcggggaggcggcggtggcggcggtggcggctgggtcgggccccgacgggcggcggcggctgaggtggaggcggagggaggcggcggcggcggcggcgggaagatggcggctcccgtcctgctaagagtgtcggtgccgcggtgggagcgggtggcccggtatgcagtgtgcgctgccggaatcctgctctccatctacgcctaccacgtggagcgggagaaggagcgggaccccgagcaccgggccctctgcgacctggggccctgggtgaagtgctccgccgcccttgcctccagatggggtcgaggatttggtcttttgggttccatttttggaaaggatggtgtattaaaccagccaaacagtgtctttggacttatattttatatactacagttattacttggcatgacagcaagcgctgtggcggctttgatcctcatgacgtcctccatcatgtcggtcgtggggtccctgtacctggcctacattctgtactttgtgctgaaggagttctgcatcatctgcatcgtcacgtacgtgctgaacttccttcttctcattatcaactacaaacgactagtttacttgaacgaggcctggaagcggcagctgcaacccaagcaggactgacgcccgacagactccaccctaacagtctcaagcccctttccattcagtttattttgcagcaggtttttattattattattattattattattcacaacagacactttccctaagaatctcaaactgatttttaaaaatccggtaaattagaaggggccctcgctattttctgtgtcagtcttcattttaaatatggatacaaaaaggatacgccgagccaatcaaagacaagctttaactttactttgaagtgtttctgaaatgataaaatgtagccctagccccctgccctcaattgtaaagtgagcaaccattgctagtaattctttaatgtgtataaattcaatttcaggtataacaaatgtgatcatgacatgaaaatattctagaatagatactgtattaaatattgccatgtttacaatatgtaatatgtttttagccgatggatttaaacatgtagattcaactagaatccatttgtgatatttgtaaataaaggtagaaatattagatccatttctgcagaacttactgtacagtttagttggagtgtagcactgaagaactgtcagctcagcgttgactgaggagatagtgaaaatagcctatacacagcatcttgtgaaaagtactggcagccgtggttgcagcaaataatagggcaaaaaaaataataatagggtggtcggttccctttcatctccctcttctgaaaggaaaaaattgaattggaacgttcaagtccagtttgtgttcagtcataaaactgggccagttgttaaccttacagaatgagtcatgtggccagaccttcaagtccaaggccttcagacactaaggatgggaaaatgggtatttttctttggagaaaagctggaaatataaacatggcatttttaggtaaagtttcttccactagttgaattttcatgcagatatttttccttaacgttggtgccagtcaagcaaagagtattatgatggaaaagaccagtccaagccccatcgctccggagtgggagccagtgttcttgctaattgtttctttctgcactaaccactcagatgtctaatttaattgttttgcagtcaaatactggatttgtaaccttcagggctgacatgctgcccagtttgcttcatcgggagaatagcaacaggtagacacatctcaaggctaaatctgctcatgtcgccactgctctcataatgacacacatgcagtaagaagacttttgtaaggggatttgagtacacccaaatgaaattgtgacaggatgtttgtatggttaacatctgatatcagaatgttaaaagtgccttctgtcttaaatctcaaaccaaatattttgtgtgttgaccttgggcagaagaagtgtccttccctcctttcttcaccgtcaggtagaaaacctgcactctgcagaagggtcctgtgtgatcacttaatcctctggttgagaagcagcagtaatgtttttgcttccaacctgattaatcattttatgttgaaaatagtcaatgagaccagtatctcttgagtgctttatttgccttctctttgaagggaggggacgggctctgctctgtaaactcaaatgtgtagagtcagcaacaattccgtagcttccaactgactcagaattgatgcaacgtaggtcttctggcccgaggcaggtatcaagtccaaatcataatgaacttttcaccagtttcaaccagtttcttaaaagagagcttaagtcaagatttcatcaagacttgtgttttcccatgaatgtgaatctttcaatggctgttggagtatgtatgtactgttcttgcattctgaagtagttaaagaactctagaaagtactgattggccatctggtgtctatggagaaagaagtcctcacgtttgagggctgtacagtgaggccatcttgtagcagcgcatccagctctaccaaggcagtcctctggttcttttttctaagctacagtggaaatggcctaatggttaaaactgtggtatacatgacatcggttgtgctaaacaagttcctcgtgtcccaatatccaatggtttttcatcctattttgtatcaatcaacagagtatagttaaagcttgtcttgatgttgcattcttgcaaatgtcttcaactcttacctgagaaaacatggcaaaatggtcagccagacccttccagtttttcctttgcttttctaagcctcggggaaaccactgtttcagttgtataaaaacttttgccacattcctatggcccagtcgaattaataccctttttctcactgagagaggaacacgtactgcctgtcataacagcattgtaatgccagtgtctcagtaacagaatcctggtgggtgttaattgggtgttttttgccctggagaattcagattcctttctatacctccgattctgcccagaagagggggggaatcaccagtgttacaaaattagaagattgttttgcctgttttagactgaatatttgaacactgcagcattactagccaccagtgttaaaggacagatgaggggaaacatttgtttttagcagtaattccatgcctcatcttttttaagtgatttgttccaaatgaagccatttattgacttgatgttcacaaatatcatttgaagaaataacaggaattggggttagatgataaattctagggaatctaggtgatttggaggatttcatttgttttgcattacagctagttgctctcactaaaggtaaatttccggtgaaataactcaggtttaactagctgtgtgcccagaatcactgttccttcatacatgtgtcctctccttaaattcattactttcaaatgatgttcaaagcattgactattttcattcaaagaaactacattcggccgggcacggtggctcacgcctataatcccagcactttgggaggccgaggcgggtggattacctaaggtcaggagttcaagaccagcctggccagcatagtgaaaccccatctctactaaaaatacaaaaattagccaggcgcagtggcacacccctgtaatcccagctactcgggaggctgagggaggagaattgcttgagcccgggagacagaggttgcagtgagtcaagatcgtgccactgcactccagcctggccaacagagcgagactgtcccccccccaaaaaaaaaagagagagactgcattcaaagaggaccaagactacagtgaaattaaaactgtttgctggctgggcatggtggctcacacctgtaatcccagcactttgggaggccgaggcggttggatcacctgaggtcagaagttcgagatcagcctgaccgacatagtggaaccctgtctttactaaaaatacaaaaattagctgggcatggtggcggcacctgtaatgccagctcctccagaggctgaggcaggagaattgcttgaacccagtaggtggaggttgcagtgagccacagttgcgccattgcactccagcctgggcaatgagtgaaactctgtctcaaataaaaaaataaaaataaaaactatttgttgacttttgtttttcatttagttttggaaaagactatttgcaaaagtacagagttatcttcagcaattacttcacaacttagattggtaccaagagtgacaggagatcttgtcttggaagatcattattagatgccaacaaggagacccactgtgatttctggtaacctatttggggaaaaagacctaatgacctaatatgcaatttctgtcctcgtgtctttttctctaacacacagtcatgggtgaaacatttcagacacctcaggcagcacttatggtttctaattgtgagaactacccttccatcaaacaaaaagggcaagggtgggagccccggctacttggttaaacattttttactacaaattcgcccagaaaaggtgaaatattttgttataaaactgtattaagcatggcctaagtatttattaggtatatgatctgtgtagtatgttccatcagaaatatttcttactagtgctttaagctccagagtaaacagtcatttaaaatggagttcactgggcaggtttcccctttaatctagatagaaatactctttatcagagatttaaggcactgttttgctaactggtaaataaaaccaaatgtaaatatgtaagaatgtttatttgttgcacataacttttttggtataaaataaatgtagaagttacctgtggaagttgtgctcccattattcttaaactgcagggttgcattccaaaagaactgaaacgaagtctttttagactcagtaggagccttatattcttgaagtcaatactgtaacctcatttctaaggtatacagggttgattctttttctcttaaatcatatgtaacttgcagaagattcagagtcctcagacctctagttcttggaattcctgtaggtttacggtgtatgtgattgtcaagaattaatgacaaaaatgtgtcactgcctacagttctgtgaacactcagaatgtattaatgagctgtttttccatagttttactttagcttaccttgaatactccctgtataatcctctaaaaaggtagcatcggcaagaaagatgaatccgttggaaatacagctgagccatacttcacggaatagaacaagtgtgttctgtgctggagctcaagacctgtggaaagggactgcccccactgggtgcaatggctcatgcctgtaatcccagcactttgggaggtagaggcgggtggatcacttgagggtcaggagttcaagaccagcctggccaacatggtgaaacctgcctctactgaaaaatacagaaaaattagccaggattgtggtgtgcgcctgtaatcccagctattcaggaagctgaggcaggagaattgcttgaaccagggaggcggaggttgcagtgagacgagatcacgccactgcactgcagcctaggcgacagaggaagactccagctcaagaaaaaaaacaatggactgcccctaatttgtaaaccatttaaatgtgtctattacatttaacttttcttaatgtttgtcaactaaaagttttattcattatactttgacatactggaacacaaaacttgattcctttgaaaaactaaagagaagttgataaaaaaaatacagaagctctagattcctaattggaactgactacactcatttttaaaaaatggacgatgcctaataaa

SEQ ID NO: 106898 - DNA, 5655 bp, Homo sapiens
gggaagagatttaggctaggtacgaaggcggggaggcggcggtggcggcggtggcggctgggtcgggccccgacgggcggcggcggctgaggtggaggcggagggaggcggcggcggcggcggcgggaagatggcggctcccgtcctgctaagagtgtcggtgccgcggtgggagcgggtggcccggtatgcagtgtgcgctgccggaatcctgctctccatctacgcctaccacgtggagcgggagaaggagcgggaccccgagcaccgggccctctgcgacctggggccctgggtgaagtgctccgccgcccttgcctccagatggggtcgaggatttggtcttttgggttccatttttggaaaggatggtgtattaaaccagccaaacagtgtctttggacttatattttatatactacagttattacttggcatgacagcaagcgctgtggcggctttgatcctcatgacgtcctccatcatgtcggtcgtggggtccctgtacctggcctacattctgtactttgtgctgaaggagttctgcatcatctgcatcgtcacgtacgtgctgaacttccttcttctcattatcaactacaaacgactagtttacttgaacgaggcctggaagcggcagctgcaacccaagcaggactgacgcccgacagactccaccctaacagtctcaagcccctttccattcagtttattttgcagcaggtttttattattattattattattattattcacaacagacactttccctaagaatctcaaactgatttttaaaaatccggtaaattagaaggggccctcgctattttctgtgtcagtcttcattttaaatatggatacaaaaaggatacgccgagccaatcaaagacaagctttaactttactttgaagtgtttctgaaatgataaaatgtagccctagccccctgccctcaattgtaaagtgagcaaccattgctagtaattctttaatgtgtataaattcaatttcaggtataacaaatgtgatcatgacatgaaaatattctagaatagatactgtattaaatattgccatgtttacaatatgtaatatgtttttagccgatggatttaaacatgtagattcaactagaatccatttgtgatatttgtaaataaaggtagaaatattagatccatttctgcagaacttactgtacagtttagttggagtgtagcactgaagaactgtcagctcagcgttgactgaggagatagtgaaaatagcctatacacagcatcttgtgaaaagtactggcagccgtggttgcagcaaataatagggcaaaaaaaataataatagggtggtcggttccctttcatctccctcttctgaaaggaaaaaattgaattggaacgttcaagtccagtttgtgttcagtcataaaactgggccagttgttaaccttacagaatgagtcatgtggccagaccttcaagtccaaggccttcagacactaaggatgggaaaatgggtatttttctttggagaaaagctggaaatataaacatggcatttttaggtaaagtttcttccactagttgaattttcatgcagatatttttccttaacgttggtgccagtcaagcaaagagtattatgatggaaaagaccagtccaagccccatcgctccggagtgggagccagtgttcttgctaattgtttctttctgcactaaccactcagatgtctaatttaattgttttgcagtcaaatactggatttgtaaccttcagggctgacatgctgcccagtttgcttcatcgggagaatagcaacaggtagacacatctcaaggctaaatctgctcatgtcgccactgctctcataatgacacacatgcagtaagaagacttttgtaaggggatttgagtacacccaaatgaaattgtgacaggatgtttgtatggttaacatctgatatcagaatgttaaaagtgccttctgtcttaaatctcaaaccaaatattttgtgtgttgaccttgggcagaagaagtgtccttccctcctttcttcaccgtcaggtagaaaacctgcactctgcagaagggtcctgtgtgatcacttaatcctctggttgagaagcagcagtaatgtttttgcttccaacctgattaatcattttatgttgaaaatagtcaatgagaccagtatctcttgagtgctttatttgccttctctttgaagggaggggacgggctctgctctgtaaactcaaatgtgtagagtcagcaacaattccgtagcttccaactgactcagaattgatgcaacgtaggtcttctggcccgaggcaggtatcaagtccaaatcataatgaacttttcaccagtttcaaccagtttcttaaaagagagcttaagtcaagatttcatcaagacttgtgttttcccatgaatgtgaatctttcaatggctgttggagtatgtatgtactgttcttgcattctgaagtagttaaagaactctagaaagtactgattggccatctggtgtctatggagaaagaagtcctcacgtttgagggctgtacagtgaggccatcttgtagcagcgcatccagctctaccaaggcagtcctctggttcttttttctaagctacagtggaaatggcctaatggttaaaactgtggtatacatgacatcggttgtgctaaacaagttcctcgtgtcccaatatccaatggtttttcatcctattttgtatcaatcaacagagtatagttaaagcttgtcttgatgttgcattcttgcaaatgtcttcaactcttacctgagaaaacatggcaaaatggtcagccagacccttccagtttttcctttgcttttctaagcctcggggaaaccactgtttcagttgtataaaaacttttgccacattcctatggcccagtcgaattaataccctttttctcactgagagaggaacacgtactgcctgtcataacagcattgtaatgccagtgtctcagtaacagaatcctggtgggtgttaattgggtgttttttgccctggagaattcagattcctttctatacctccgattctgcccagaagagggggggaatcaccagtgttacaaaattagaagattgttttgcctgttttagactgaatatttgaacactgcagcattactagccaccagtgttaaaggacagatgaggggaaacatttgtttttagcagtaattccatgcctcatcttttttaagtgatttgttccaaatgaagccatttattgacttgatgttcacaaatatcatttgaagaaataacaggaattggggttagatgataaattctagggaatctaggtgatttggaggatttcatttgttttgcattacagctagttgctctcactaaaggtaaatttccggtgaaataactcaggtttaactagctgtgtgcccagaatcactgttccttcatacatgtgtcctctccttaaattcattactttcaaatgatgttcaaagcattgactattttcattcaaagaaactacattcggccgggcacggtggctcacgcctataatcccagcactttgggaggccgaggcgggtggattacctaaggtcaggagttcaagaccagcctggccagcatagtgaaaccccatctctactaaaaatacaaaaattagccaggcgcagtggcacacccctgtaatcccagctactcgggaggctgagggaggagaattgcttgagcccgggagacagaggttgcagtgagtcaagatcgtgccactgcactccagcctggccaacagagcgagactgtcccccccccaaaaaaaaaagagagagactgcattcaaagaggaccaagactacagtgaaattaaaactgtttgctggctgggcatggtggctcacacctgtaatcccagcactttgggaggccgaggcggttggatcacctgaggtcagaagttcgagatcagcctgaccgacatagtggaaccctgtctttactaaaaatacaaaaattagctgggcatggtggcggcacctgtaatgccagctcctccagaggctgaggcaggagaattgcttgaacccagtaggtggaggttgcagtgagccacagttgcgccattgcactccagcctgggcaatgagtgaaactctgtctcaaataaaaaaataaaaataaaaactatttgttgacttttgtttttcatttagttttggaaaagactatttgcaaaagtacagagttatcttcagcaattacttcacaacttagattggtaccaagagtgacaggagatcttgtcttggaagatcattattagatgccaacaaggagacccactgtgatttctggtaacctatttggggaaaaagacctaatgacctaatatgcaatttctgtcctcgtgtctttttctctaacacacagtcatgggtgaaacatttcagacacctcaggcagcacttatggtttctaattgtgagaactacccttccatcaaacaaaaagggcaagggtgggagccccggctacttggttaaacattttttactacaaattcgcccagaaaaggtgaaatattttgttataaaactgtattaagcatggcctaagtatttattaggtatatgatctgtgtagtatgttccatcagaaatatttcttactagtgctttaagctccagagtaaacagtcatttaaaatggagttcactgggcaggtttcccctttaatctagatagaaatactctttatcagagatttaaggcactgttttgctaactggtaaataaaaccaaatgtaaatatgtaagaatgtttatttgttgcacataacttttttggtataaaataaatgtagaagttacctgtggaagttgtgctcccattattcttaaactgcagggttgcattccaaaagaactgaaacgaagtctttttagactcagtaggagccttatattcttgaagtcaatactgtaacctcatttctaaggtatacagggttgattctttttctcttaaatcatatgtaacttgcagaagattcagagtcctcagacctctagttcttggaattcctgtaggtttacggtgtatgtgattgtcaagaattaatgacaaaaatgtgtcactgcctacagttctgtgaacactcagaatgtattaatgagctgtttttccatagttttactttagcttaccttgaatactccctgtataatcctctaaaaaggtagcatcggcaagaaagatgaatccgttggaaatacagctgagccatacttcacggaatagaacaagtgtgttctgtgctggagctcaagacctgtggaaagggactgcccccactgggtgcaatggctcatgcctgtaatcccagcactttgggaggtagaggcgggtggatcaagaactgtaggcagtgacacatttttgtcattaattcttgacaatcacatacaccgtaaacctacaggaattccaagaactagaggtctgaggactctgaatcttctgcaagttacatatgatttaagagaaaaagaatcaaccctgtataccttagaaatgaggttacagtattgacttcaagaatataaggctcctactgagtctaaa

SEQ ID NO: 106899 - DNA, 5420 bp, Homo sapiens
gagcctgcgtctcttctcttacaggcatgacagcaagcgctgtggcggctttgatcctcatgacgtcctccatcatgtcggtcgtggggtccctgtacctggcctacattctcatcatctgcatcgtcacgtacgtgctgaacttccttcttctcattatcaactacaaacgactagtttacttgaacgagctgcaacccaagcaggactgacgcccgacagactccaccctaacagtctcaagcccctttccattcagtttattttgcagcagattattattattcacaacagacactttccctaagaatctcaaactgatttttaaaaatccggtaaattagaaggggccctcgctattttctaatatggatacaaaaaggatacgccgagccaatcaaagacaagctttaactttactttgaagtgtttctgaaatgataaaatgtagccctagccccctgccctcaattgtaaagtgagcaaccattgctagtaattctttaatgtgtataaattcaatttcaggtataacaaatgtgatcatgacatgaaaatattctagaatagatactgtattaaatattgccatgtttacaatatgtaatatgtttttagccgatggatttaaacatgtagattcaactagaatccatttgtgatatttgtaaataaaggtagaaatattagatccatttctgcagaacttactgtacagtttagttggagtgtagcactgaagaactgtcagctcagcgttgactgaggagatagtgaaaatagcctatacacagcatcttgtgaaaagtactggcagccgtggttgcagcaaataatagggcaaaaaaaataataatagggtggtcggttccctttcatctccctcttctgaaaggaaaaaattgaattggaacgttcaagtccagtttgtgttcagtcataaaactgggccagttgttaaccttacagaatgagtcatgtggccagaccttcaagtccaaggccttcagacactaaggatgggaaaatgggtatttttctttggagaaaagctggaaatataaacatggcatttttaggtaaagtttcttccactagttgaattttcatgcagatatttttccttaacgttggtgccagtcaagcaaagagtattatgatggaaaagaccagtccaagccccatcgctccggagtgggagccagtgttcttgctaattgtttctttctgcactaaccactcagatgtctaatttaattgttttgcagtcaaatactggatttgtaaccttcagggctgacatgctgcccagtttgcttcatcgggagaatagcaacaggtagacacatctcaaggctaaatctgctcatgtcgccactgctctcataatgacacacatgcagtaagaagacttttgtaaggggatttgagtacacccaaatgaaattgtgacaggatgtttgtatggttaacatctgatatcagaatgttaaaagtgccttctgtcttaaatctcaaaccaaatattttgtgtgttgaccttgggcagaagaagtgtccttccctcctttcttcaccgtcaggtagaaaacctgcactctgcagaagggtcctgtgtgatcacttaatcctctggttgagaagcagcagtaatgtttttgcttccaacctgattaatcattttatgttgaaaatagtcaatgagaccagtatctcttgagtgctttatttgccttctctttgaagggaggggacgggctctgctctgtaaactcaaatgtgtagagtcagcaacaattccgtagcttccaactgactcagaattgatgcaacgtaggtcttctggcccgaggcaggtatcaagtccaaatcataatgaacttttcaccagtttcaaccagtttcttaaaagagagcttaagtcaagatttcatcaagacttgtgttttcccatgaatgtgaatctttcaatggctgttggagtatgtatgtactgttcttgcattctgaagtagttaaagaactctagaaagtactgattggccatctggtgtctatggagaaagaagtcctcacgtttgagggctgtacagtgaggccatcttgtagcagcgcatccagctctaccaaggcagtcctctggttcttttttctaagctacagtggaaatggcctaatggttaaaactgtggtatacatgacatcggttgtgctaaacaagttcctcgtgtcccaatatccaatggtttttcatcctattttgtatcaatcaacagagtatagttaaagcttgtcttgatgttgcattcttgcaaatgtcttcaactcttacctgagaaaacatggcaaaatggtcagccagacccttccagtttttcctttgcttttctaagcctcggggaaaccactgtttcagttgtataaaaacttttgccacattcctatggcccagtcgaattaataccctttttctcactgagagaggaacacgtactgcctgtcataacagcattgtaatgccagtgtctcagtaacagaatcctggtgggtgttaattgggtgttttttgccctggagaattcagattcctttctatacctccgattctgcccagaagagggggggaatcaccagtgttacaaaattagaagattgttttgcctgttttagactgaatatttgaacactgcagcattactagccaccagtgttaaaggacagatgaggggaaacatttgtttttagcagtaattccatgcctcatcttttttaagtgatttgttccaaatgaagccatttattgacttgatgttcacaaatatcatttgaagaaataacaggaattggggttagatgataaattctagggaatctaggtgatttggaggatttcatttgttttgcattacagctagttgctctcactaaaggtaaatttccggtgaaataactcaggtttaactagctgtgtgcccagaatcactgttccttcatacatgtgtcctctccttaaattcattactttcaaatgatgttcaaagcattgactattttcattcaaagaaactacattcggccgggcacggtggctcacgcctataatcccagcactttgggaggccgaggcgggtggattacctaaggtcaggagttcaagaccagcctggccagcatagtgaaaccccatctctactaaaaatacaaaaattagccaggcgcagtggcacacccctgtaatcccagctactcgggaggctgagggaggagaattgcttgagcccgggagacagaggttgcagtgagtcaagatcgtgccactgcactccagcctggccaacagagcgagactgtcccccccccaaaaaaaaaagagagagactgcattcaaagaggaccaagactacagtgaaattaaaactgtttgctggctgggcatggtggctcacacctgtaatcccagcactttgggaggccgaggcggttggatcacctgaggtcagaagttcgagatcagcctgaccgacatagtggaaccctgtctttactaaaaatacaaaaattagctgggcatggtggcggcacctgtaatgccagctcctccagaggctgaggcaggagaattgcttgaacccagtaggtggaggttgcagtgagccacagttgcgccattgcactccagcctgggcaatgagtgaaactctgtctcaaataaaaaaataaaaataaaaactatttgttgacttttgtttttcatttagttttggaaaagactatttgcaaaagtacagagttatcttcagcaattacttcacaacttagattggtaccaagagtgacaggagatcttgtcttggaagatcattattagatgccaacaaggagacccactgtgatttctggtaacctatttggggaaaaagacctaatgacctaatatgcaatttctgtcctcgtgtctttttctctaacacacagtcatgggtgaaacatttcagacacctcaggcagcacttatggtttctaattgtgagaactacccttccatcaaacaaaaagggcaagggtgggagccccggctacttggttaaacattttttactacaaattcgcccagaaaaggtgaaatattttgttataaaactgtattaagcatggcctaagtatttattaggtatatgatctgtgtagtatgttccatcagaaatatttcttactagtgctttaagctccagagtaaacagtcatttaaaatggagttcactgggcaggtttcccctttaatctagatagaaatactctttatcagagatttaaggcactgttttgctaactggtaaataaaaccaaatgtaaatatgtaagaatgtttatttgttgcacataacttttttggtataaaataaatgtagaagttacctgtggaagttgtgctcccattattcttaaactgcagggttgcattccaaaagaactgaaacgaagtctttttagactcagtaggagccttatattcttgaagtcaatactgtaacctcatttctaaggtatacagggttgattctttttctcttaaatcatatgtaacttgcagaagattcagagtcctcagacctctagttcttggaattcctgtaggtttacggtgtatgtgattgtcaagaattaatgacaaaaatgtgtcactgcctacagttctgtgaacactcagaatgtattaatgagctgtttttccatagttttactttagcttaccttgaatactccctgtataatcctctaaaaaggtagcatcggcaagaaagatgaatccgttggaaatacagctgagccatacttcacggaatagaacaagtgtgttctgtgctggagctcaagacctgtggaaagggactgcccccactgggtgcaatggctcatgcctgtaatcccagcactttgggaggtagaggcgggtggatcacttgagggtcaggagttcaagaccagcctggccaacatggtgaaacctgcctctactgaaaaatacagaaaaattagccaggattgtggtgtgcgcctgtaatcccagctattcaggaagctgaggcaggagaattgcttgaaccagggaggcggaggttgcagtgagacgagatcacgccactgcactgcagcctaggcgacagaggaagactccagctcaagaaaaaaaacaatggactgcccctaatttgtaaaccatttaaatgtgtctattacatttaacttttcttaatgtttgtcaactaaaagttttattcattatactttgacatactggaacacaaaacttgattcctttgaaaaactaaagagaagttgataaaaaaaatacagaagctctagattcctaattggaactgactacactcatttttaaaaaatggacgatgcctaataaa

SEQ ID NO: 106900 - DNA, 5100 bp, Homo sapiens
gggaagagatttaggctaggtacgaaggcggggaggcggcggtggcggcggtggcggctgggtcgggccccgacgggcggcggcggctgaggtggaggcggagggaggcggcggcggcggcggcgggaagatggcggctcccgtcctgctaagagtgtcggtgccgcggtgggagcgggtggcccggtatgcagtgtgcgctgccggaatcctgctctccatctacgcctaccacgtggagcgggagaaggagcgggaccccgagcaccgggccctctgcgacctggggccctgggtgaagtgctccgccgcccttgcctccagatggggtcgaggatttggtcttttgggttccatttttggaaaggatggtgtattaaaccagccaaacagtgtctttggacttatattttatatactacagttattacttggcatgacagcaagcgctgtggcggctttgatcctcatgacgtcctccatcatgtcggtcgtggggtccctgtacctggcctacattctgtactttgtgctgaaggagttctgcatcatctgcatcgtcacgtacgtgctgaacttccttcttctcattatcaactacaaacgactagtttacttgaacgaggcctggaagcggcagctgcaacccaagcaggactgacgcccgacagactccaccctaacagtctcaagcccctttccattcagtttattttgcagcaggtttttattattattattattattattattcacaacagacactttccctaagaatctcaaactgatttttaaaaatccggtaaattagaaggggccctcgctattttctgtgtcagtcttcattttaaatatggatacaaaaaggatacgccgagccaatcaaagacaagctttaactttactttgaagtgtttctgaaatgataaaatgtagccctagccccctgccctcaattgtaaagtgagcaaccattgctagtaattctttaatgtgtataaattcaatttcaggtataacaaatgtgatcatgacatgaaaatattctagaatagatactgtattaaatattgccatgtttacaatatgtaatatgtttttagccgatggatttaaacatgtagattcaactagaatccatttgtgatatttgtaaataaaggtagaaatattagatccatttctgcagaacttactgtacagtttagttggagtgtagcactgaagaactgtcagctcagcgttgactgaggagatagtgaaaatagcctatacacagcatcttgtgaaaagtactggcagccgtggttgcagcaaataatagggcaaaaaaaataataatagggtggtcggttccctttcatctccctcttctgaaaggaaaaaattgaattggaacgttcaagtccagtttgtgttcagtcataaaactgggccagttgttaaccttacagaatgagtcatgtggccagaccttcaagtccaaggccttcagacactaaggatgggaaaatgggtatttttctttggagaaaagctggaaatataaacatggcatttttaggtaaagtttcttccactagttgaattttcatgcagatatttttccttaacgttggtgccagtcaagcaaagagtattatgatggaaaagaccagtccaagccccatcgctccggagtgggagccagtgttcttgctaattgtttctttctgcactaaccactcagatgtctaatttaattgttttgcagtcaaatactggatttgtaaccttcagggctgacatgctgcccagtttgcttcatcgggagaatagcaacaggtagacacatctcaaggctaaatctgctcatgtcgccactgctctcataatgacacacatgcagtaagaagacttttgtaaggggatttgagtacacccaaatgaaattgtgacaggatgtttgtatggttaacatctgatatcagaatgttaaaagtgccttctgtcttaaatctcaaaccaaatattttgtgtgttgaccttgggcagaagaagtgtccttccctcctttcttcaccgtcaggtagaaaacctgcactctgcagaagggtcctgtgtgatcacttaatcctctggttgagaagcagcagtaatgtttttgcttccaacctgattaatcattttatgttgaaaatagtcaatgagaccagtatctcttgagtgctttatttgccttctctttgaagggaggggacgggctctgctctgtaaactcaaatgtgtagagtcagcaacaattccgtagcttccaactgactcagaattgatgcaacgtaggtcttctggcccgaggcaggtatcaagtccaaatcataatgaacttttcaccagtttcaaccagtttcttaaaagagagcttaagtcaagatttcatcaagacttgtgttttcccatgaatgtgaatctttcaatggctgttggagtatgtatgtactgttcttgcattctgaagtagttaaagaactctagaaagtactgattggccatctggtgtctatggagaaagaagtcctcacgtttgagggctgtacagtgaggccatcttgtagcagcgcatccagctctaccaaggcagtcctctggttcttttttctaagctacagtggaaatggcctaatggttaaaactgtggtatacatgacatcggttgtgctaaacaagttcctcgtgtcccaatatccaatggtttttcatcctattttgtatcaatcaacagagtatagttaaagcttgtcttgatgttgcattcttgcaaatgtcttcaactcttacctgagaaaacatggcaaaatggtcagccagacccttccagtttttcctttgcttttctaagcctcggggaaaccactgtttcagttgtataaaaacttttgccacattcctatggcccagtcgaattaataccctttttctcactgagagaggaacacgtactgcctgtcataacagcattgtaatgccagtgtctcagtaacagaatcctggtgggtgttaattgggtgttttttgccctggagaattcagattcctttctatacctccgattctgcccagaagagggggggaatcaccagtgttacaaaattagaagattgttttgcctgttttagactgaatatttgaacactgcagcattactagccaccagtgttaaaggacagatgaggggaaacatttgtttttagcagtaattccatgcctcatcttttttaagtgatttgttccaaatgaagccatttattgacttgatgttcacaaatatcatttgaagaaataacaggaattggggttagatgataaattctagggaatctaggtgatttggaggatttcatttgttttgcattacagctagttgctctcactaaaggtaaatttccggtgaaataactcaggtttaactagctgtgtgcccagaatcactgttccttcatacatgtgtcctctccttaaattcattactttcaaatgatgttcaaagcattgactattttcattcaaagaaactacattcggccgggcacggtggctcacgcctataatcccagcactttgggaggccgaggcgggtggattacctaaggtcaggagttcaagaccagcctggccagcatagtgaaaccccatctctactaaaaatacaaaaattagccaggcgcagtggcacacccctgtaatcccagctactcgggaggctgagggaggagaattgcttgagcccgggagacagaggttgcagtgagtcaagatcgtgccactgcactccagcctggccaacagagcgagactgtcccccccccaaaaaaaaaagagagagactgcattcaaagaggaccaagactacagtgaaattaaaactgtttgctggctgggcatggtggctcacacctgtaatcccagcactttgggaggccgaggcggttggatcacctgaggtcagaagttcgagatcagcctgaccgacatagtggaaccctgtctttactaaaaatacaaaaattagctgggcatggtggcggcacctgtaatgccagctcctccagaggctgaggcaggagaattgcttgaacccagtaggtggaggttgcagtgagccacagttgcgccattgcactccagcctgggcaatgagtgaaactctgtctcaaataaaaaaataaaaataaaaactatttgttgacttttgtttttcatttagttttggaaaagactatttgcaaaagtacagagttatcttcagcaattacttcacaacttagattggtaccaagagtgacaggagatcttgtcttggaagatcattattagatgccaacaaggagacccactgtgatttctggtaacctatttggggaaaaagacctaatgacctaatatgcaatttctgtcctcgtgtctttttctctaacacacagtcatgggtgaaacatttcagacacctcaggcagcacttatggtttctaattgtgagaactacccttccatcaaacaaaaagggcaagggtgggagccccggctacttggttaaacattttttactacaaattcgcccagaaaaggtgaaatattttgttataaaactgtattaagcatggcctaagtatttattaggtatatgatctgtgtagtatgttccatcagaaatatttcttactagtgctttaagctccagagtaaacagtcatttaaaatggagttcactgggcaggtttcccctttaatctagatagaaatactctttatcagagatttaaggcactgttttgctaactggtaaataaaaccaaatgtaaatatgtaagaatgtttatttgttgcacataacttttttggtataaaataaatgtagaagttaccctcgtgccgaattcggcacgagaagaatatgagttttgaaaccagacactctatatttggattccagctcaatcactttgtaaagaccttcagcaagtcctttaattctctgagccttagtggcttcatgtataatctgggaataataacacttgccttacaggtttggctcaagatactgcaggcacttgttcgggg

SEQ ID NO: 106901 - DNA, 4826 bp, Homo sapiens
gggaagagatttaggctaggtacgaaggcggggaggcggcggtggcggcggtggcggctgggtcgggccccgacgggcggcggcggctgaggtggaggcggagggaggcggcggcggcggcggcgggaagatggcggctcccgtcctgctaagagtgtcggtgccgcggtgggagcgggtggcccggtatgcagtgtgcgctgccggaatcctgctctccatctacgcctaccacgtggagcgggagaaggagcgggaccccgagcaccgggccctctgcgacctggggccctgggtgaagtgctccgccgcccttgcctccagatggggtcgaggatttggtcttttgggttccatttttggaaaggatggtgtattaaaccagccaaacagtgtctttggacttatattttatatactacagttattacttggcatgacagcaagcgctgtggcggctttgatcctcatgacgtcctccatcatgtcggtcgtggggtccctgtacctggcctacattctgtactttgtgctgaaggagttctgtcaagcaaagagtattatgatggaaaagaccagtccaagccccatcgctccggagtgggagccagtgttcttgctaattgtttctttctgcactaaccactcagatgtctaatttaattgttttgcagtcaaatactggatttgtaaccttcagggctgacatgctgcccagtttgcttcatcgggagaatagcaacaggtagacacatctcaaggctaaatctgctcatgtcgccactgctctcataatgacacacatgcagtaagaagacttttgtaaggggatttgagtacacccaaatgaaattgtgacaggatgtttgtatggttaacatctgatatcagaatgttaaaagtgccttctgtcttaaatctcaaaccaaatattttgtgtgttgaccttgggcagaagaagtgtccttccctcctttcttcaccgtcaggtagaaaacctgcactctgcagaagggtcctgtgtgatcacttaatcctctggttgagaagcagcagtaatgtttttgcttccaacctgattaatcattttatgttgaaaatagtcaatgagaccagtatctcttgagtgctttatttgccttctctttgaagggaggggacgggctctgctctgtaaactcaaatgtgtagagtcagcaacaattccgtagcttccaactgactcagaattgatgcaacgtaggtcttctggcccgaggcaggtatcaagtccaaatcataatgaacttttcaccagtttcaaccagtttcttaaaagagagcttaagtcaagatttcatcaagacttgtgttttcccatgaatgtgaatctttcaatggctgttggagtatgtatgtactgttcttgcattctgaagtagttaaagaactctagaaagtactgattggccatctggtgtctatggagaaagaagtcctcacgtttgagggctgtacagtgaggccatcttgtagcagcgcatccagctctaccaaggcagtcctctggttcttttttctaagctacagtggaaatggcctaatggttaaaactgtggtatacatgacatcggttgtgctaaacaagttcctcgtgtcccaatatccaatggtttttcatcctattttgtatcaatcaacagagtatagttaaagcttgtcttgatgttgcattcttgcaaatgtcttcaactcttacctgagaaaacatggcaaaatggtcagccagacccttccagtttttcctttgcttttctaagcctcggggaaaccactgtttcagttgtataaaaacttttgccacattcctatggcccagtcgaattaataccctttttctcactgagagaggaacacgtactgcctgtcataacagcattgtaatgccagtgtctcagtaacagaatcctggtgggtgttaattgggtgttttttgccctggagaattcagattcctttctatacctccgattctgcccagaagagggggggaatcaccagtgttacaaaattagaagattgttttgcctgttttagactgaatatttgaacactgcagcattactagccaccagtgttaaaggacagatgaggggaaacatttgtttttagcagtaattccatgcctcatcttttttaagtgatttgttccaaatgaagccatttattgacttgatgttcacaaatatcatttgaagaaataacaggaattggggttagatgataaattctagggaatctaggtgatttggaggatttcatttgttttgcattacagctagttgctctcactaaaggtaaatttccggtgaaataactcaggtttaactagctgtgtgcccagaatcactgttccttcatacatgtgtcctctccttaaattcattactttcaaatgatgttcaaagcattgactattttcattcaaagaaactacattcggccgggcacggtggctcacgcctataatcccagcactttgggaggccgaggcgggtggattacctaaggtcaggagttcaagaccagcctggccagcatagtgaaaccccatctctactaaaaatacaaaaattagccaggcgcagtggcacacccctgtaatcccagctactcgggaggctgagggaggagaattgcttgagcccgggagacagaggttgcagtgagtcaagatcgtgccactgcactccagcctggccaacagagcgagactgtcccccccccaaaaaaaaaagagagagactgcattcaaagaggaccaagactacagtgaaattaaaactgtttgctggctgggcatggtggctcacacctgtaatcccagcactttgggaggccgaggcggttggatcacctgaggtcagaagttcgagatcagcctgaccgacatagtggaaccctgtctttactaaaaatacaaaaattagctgggcatggtggcggcacctgtaatgccagctcctccagaggctgaggcaggagaattgcttgaacccagtaggtggaggttgcagtgagccacagttgcgccattgcactccagcctgggcaatgagtgaaactctgtctcaaataaaaaaataaaaataaaaactatttgttgacttttgtttttcatttagttttggaaaagactatttgcaaaagtacagagttatcttcagcaattacttcacaacttagattggtaccaagagtgacaggagatcttgtcttggaagatcattattagatgccaacaaggagacccactgtgatttctggtaacctatttggggaaaaagacctaatgacctaatatgcaatttctgtcctcgtgtctttttctctaacacacagtcatgggtgaaacatttcagacacctcaggcagcacttatggtttctaattgtgagaactacccttccatcaaacaaaaagggcaagggtgggagccccggctacttggttaaacattttttactacaaattcgcccagaaaaggtgaaatattttgttataaaactgtattaagcatggcctaagtatttattaggtatatgatctgtgtagtatgttccatcagaaatatttcttactagtgctttaagctccagagtaaacagtcatttaaaatggagttcactgggcaggtttcccctttaatctagatagaaatactctttatcagagatttaaggcactgttttgctaactggtaaataaaaccaaatgtaaatatgtaagaatgtttatttgttgcacataacttttttggtataaaataaatgtagaagttacctgtggaagttgtgctcccattattcttaaactgcagggttgcattccaaaagaactgaaacgaagtctttttagactcagtaggagccttatattcttgaagtcaatactgtaacctcatttctaaggtatacagggttgattctttttctcttaaatcatatgtaacttgcagaagattcagagtcctcagacctctagttcttggaattcctgtaggtttacggtgtatgtgattgtcaagaattaatgacaaaaatgtgtcactgcctacagttctgtgaacactcagaatgtattaatgagctgtttttccatagttttactttagcttaccttgaatactccctgtataatcctctaaaaaggtagcatcggcaagaaagatgaatccgttggaaatacagctgagccatacttcacggaatagaacaagtgtgttctgtgctggagctcaagacctgtggaaagggactgcccccactgggtgcaatggctcatgcctgtaatcccagcactttgggaggtagaggcgggtggatcacttgagggtcaggagttcaagaccagcctggccaacatggtgaaacctgcctctactgaaaaatacagaaaaattagccaggattgtggtgtgcgcctgtaatcccagctattcaggaagctgaggcaggagaattgcttgaaccagggaggcggaggttgcagtgagacgagatcacgccactgcactgcagcctaggcgacagaggaagactccagctcaagaaaaaaaacaatggactgcccctaatttgtaaaccatttaaatgtgtctattacatttaacttttcttaatgtttgtcaactaaaagttttattcattatactttgacatactggaacacaaaacttgattcctttgaaaaactaaagagaagttgataaaaaaaatacagaagctctagattcctaattggaactgactacactcatttttaaaaaatggacgatgcctaataaa

SEQ ID NO: 106902 - DNA, 3871 bp, Homo sapiens
atatcataagtagggccgggtgttaatcggccgagtagaaaacctgcactctgcagaagggtcctgtgtgatcacttaatcctctggttgagaagcagcagtaatgtttttgcttccaacctgattaatcattttatgttgaaaatagtcaatgagaccagtatctcttgagtgctttatttgccttctctttgaagggaggggacgggctctgctctgtaaactcaaatgtgtagagtcagcaacaattccgtagcttccaactgactcagaattgatgcaacgtaggtcttctggcccgaggcaggtatcaagtccaaatcataatgaacttttcaccagtttcaaccagtttcttaaaagagagcttaagtcaagatttcatcaagacttgtgttttcccatgaatgtgaatctttcaatggctgttggagtatgtatgtactgttcttgcattctgaagtagttaaagaactctagaaagtactgattggccatctggtgtctatggagaaagaagtcctcacgtttgagggctgtacagtgaggccatcttgtagcagcgcatccagctctaccaaggcagtcctctggttcttttttctaagctacagtggaaatggcctaatggttaaaactgtggtatacatgacatcggttgtgctaaacaagttcctcgtgtcccaatatccaatggtttttcatcctattttgtatcaatcaacagagtatagttaaagcttgtcttgatgttgcattcttgcaaatgtcttcaactcttacctgagaaaacatggcaaaatggtcagccagacccttccagtttttcctttgcttttctaagcctcggggaaaccactgtttcagttgtataaaaacttttgccacattcctatggcccagtcgaattaataccctttttctcactgagagaggaacacgtactgcctgtcataacagcattgtaatgccagtgtctcagtaacagaatcctggtgggtgttaattgggtgttttttgccctggagaattcagattcctttctatacctccgattctgcccagaagagggggggaatcaccagtgttacaaaattagaagattgttttgcctgttttagactgaatatttgaacactgcagcattactagccaccagtgttaaaggacagatgaggggaaacatttgtttttagcagtaattccatgcctcatcttttttaagtgatttgttccaaatgaagccatttattgacttgatgttcacaaatatcatttgaagaaataacaggaattggggttagatgataaattctagggaatctaggtgatttggaggatttcatttgttttgcattacagctagttgctctcactaaaggtaaatttccggtgaaataactcaggtttaactagctgtgtgcccagaatcactgttccttcatacatgtgtcctctccttaaattcattactttcaaatgatgttcaaagcattgactattttcattcaaagaaactacattcggccgggcacggtggctcacgcctataatcccagcactttgggaggccgaggcgggtggattacctaaggtcaggagttcaagaccagcctggccagcatagtgaaaccccatctctactaaaaatacaaaaattagccaggcgcagtggcacacccctgtaatcccagctactcgggaggctgagggaggagaattgcttgagcccgggagacagaggttgcagtgagtcaagatcgtgccactgcactccagcctggccaacagagcgagactgtcccccccccaaaaaaaaaagagagagactgcattcaaagaggaccaagactacagtgaaattaaaactgtttgctggctgggcatggtggctcacacctgtaatcccagcactttgggaggccgaggcggttggatcacctgaggtcagaagttcgagatcagcctgaccgacatagtggaaccctgtctttactaaaaatacaaaaattagctgggcatggtggcggcacctgtaatgccagctcctccagaggctgaggcaggagaattgcttgaacccagtaggtggaggttgcagtgagccacagttgcgccattgcactccagcctgggcaatgagtgaaactctgtctcaaataaaaaaataaaaataaaaactatttgttgacttttgtttttcatttagttttggaaaagactatttgcaaaagtacagagttatcttcagcaattacttcacaacttagattggtaccaagagtgacaggagatcttgtcttggaagatcattattagatgccaacaaggagacccactgtgatttctggtaacctatttggggaaaaagacctaatgacctaatatgcaatttctgtcctcgtgtctttttctctaacacacagtcatgggtgaaacatttcagacacctcaggcagcacttatggtttctaattgtgagaactacccttccatcaaacaaaaagggcaagggtgggagccccggctacttggttaaacattttttactacaaattcgcccagaaaaggtgaaatattttgttataaaactgtattaagcatggcctaagtatttattaggtatatgatctgtgtagtatgttccatcagaaatatttcttactagtgctttaagctccagagtaaacagtcatttaaaatggagttcactgggcaggtttcccctttaatctagatagaaatactctttatcagagatttaaggcactgttttgctaactggtaaataaaaccaaatgtaaatatgtaagaatgtttatttgttgcacataacttttttggtataaaataaatgtagaagttacctgtggaagttgtgctcccattattcttaaactgcagggttgcattccaaaagaactgaaacgaagtctttttagactcagtaggagccttatattcttgaagtcaatactgtaacctcatttctaaggtatacagggttgattctttttctcttaaatcatatgtaacttgcagaagattcagagtcctcagacctctagttcttggaattcctgtaggtttacggtgtatgtgattgtcaagaattaatgacaaaaatgtgtcactgcctacagttctgtgaacactcagaatgtattaatgagctgtttttccatagttttactttagcttaccttgaatactccctgtataatcctctaaaaaggtagcatcggcaagaaagatgaatccgttggaaatacagctgagccatacttcacggaatagaacaagtgtgttctgtgctggagctcaagacctgtggaaagggactgcccccactgggtgcaatggctcatgcctgtaatcccagcactttgggaggtagaggcgggtggatcacttgagggtcaggagttcaagaccagcctggccaacatggtgaaacctgcctctactgaaaaatacagaaaaattagccaggattgtggtgtgcgcctgtaatcccagctattcaggaagctgaggcaggagaattgcttgaaccagggaggcggaggttgcagtgagacgagatcacgccactgcactgcagcctaggcgacagaggaagactccagctcaagaaaaaaaacaatggactgcccctaatttgtaaaccatttaaatgtgtctattacatttaacttttcttaatgtttgtcaactaaaagttttattcattatactttgacatactggaacacaaaacttgattcctttgaaaaactaaagagaagttgataaaaaaaatacagaagctctagattcctaattggaactgactacactcatttttaaaaaatggacgatgcctaataaa

SEQ ID NO: 106903 - DNA, 2401 bp, Homo sapiens
  misc_feature (35)..(36): n is a, c, g, or t
gcgaaattccggcacggaaggaactatttttcatnntccaaaagaaactacattcggccgggcacggtggctcacgcctataatcccagcactttgggaggccgaggcgggtggattacctaaggtcaggagttcaagaccagcctggccagcatagtgaaaccccatctctactaaaaatacaaaaattagccaggcgcagtggcacacccctgtaatcccagctactcgggaggctgagggaggagaattgcttgagcccgggagacagaggttgcagtgagtcaagatcgtgccactgcactccagcctggccaacagagcgagactgtcccccccccaaaaaaaaaagagagagactgcattcaaagaggaccaagactacagtgaaattaaaactgtttgctggctgggcatggtggctcacacctgtaatcccagcactttgggaggccgaggcggttggatcacctgaggtcagaagttcgagatcagcctgaccgacatagtggaaccctgtctttactaaaaatacaaaaattagctgggcatggtggcggcacctgtaatgccagctcctccagaggctgaggcaggagaattgcttgaacccagtaggtggaggttgcagtgagccacagttgcgccattgcactccagcctgggcaatgagtgaaactctgtctcaaataaaaaaataaaaataaaaactatttgttgacttttgtttttcatttagttttggaaaagactatttgcaaaagtacagagttatcttcagcaattacttcacaacttagattggtaccaagagtgacaggagatcttgtcttggaagatcattattagatgccaacaaggagacccactgtgatttctggtaacctatttggggaaaaagacctaatgacctaatatgcaatttctgtcctcgtgtctttttctctaacacacagtcatgggtgaaacatttcagacacctcaggcagcacttatggtttctaattgtgagaactacccttccatcaaacaaaaagggcaagggtgggagccccggctacttggttaaacattttttactacaaattcgcccagaaaaggtgaaatattttgttataaaactgtattaagcatggcctaagtatttattaggtatatgatctgtgtagtatgttccatcagaaatatttcttactagtgctttaagctccagagtaaacagtcatttaaaatggagttcactgggcaggtttcccctttaatctagatagaaatactctttatcagagatttaaggcactgttttgctaactggtaaataaaaccaaatgtaaatatgtaagaatgtttatttgttgcacataacttttttggtataaaataaatgtagaagttacctgtggaagttgtgctcccattattcttaaactgcagggttgcattccaaaagaactgaaacgaagtctttttagactcagtaggagccttatattcttgaagtcaatactgtaacctcatttctaaggtatacagggttgattctttttctcttaaatcatatgtaacttgcagaagattcagagtcctcagacctctagttcttggaattcctgtaggtttacggtgtatgtgattgtcaagaattaatgacaaaaatgtgtcactgcctacagttctgtgaacactcagaatgtattaatgagctgtttttccatagttttactttagcttaccttgaatactccctgtataatcctctaaaaaggtagcatcggcaagaaagatgaatccgttggaaatacagctgagccatacttcacggaatagaacaagtgtgttctgtgctggagctcaagacctgtggaaagggactgcccccactgggtgcaatggctcatgcctgtaatcccagcactttgggaggtagaggcgggtggatcacttgagggtcaggagttcaagaccagcctggccaacatggtgaaacctgcctctactgaaaaatacagaaaaattagccaggattgtggtgtgcgcctgtaatcccagctattcaggaagctgaggcaggagaattgcttgaaccagggaggcggaggttgcagtgagacgagatcacgccactgcactgcagcctaggcgacagaggaagactccagctcaagaaaaaaaacaatggactgcccctaatttgtaaaccatttaaatgtgtctattacatttaacttttcttaatgtttgtcaactaaaagttttattcattatactttgacatactggaacacaaaacttgattcctttgaaaaactaaagagaagttgataaaaaaaatacagaagctctagattcctaattggaactgactacactcatttttaaaaaatggacgatgcctaataaa

SEQ ID NO: 106904 - DNA, 2462 bp, Homo sapiens
  misc_feature (2462)..(2462): n is a, c, g, or t
gggaagagatttaggctaggtacgaaggcggggaggcggcggtggcggcggtggcggctgggtcgggccccgacgggcggcggcggctgaggtggaggcggagggaggcggcggcggcggcggcgggaagatggcggctcccgtcctgctaagagtgtcggtgccgcggtgggagcgggtggcccggtatgcagtgtgcgctgccggaatcctgctctccatctacgcctaccacgtggagcgggagaaggagcgggaccccgagcaccgggccctctgcgacctggggccctgggtgaagtgctccgccgcccttgcctccagatggggtcgaggatttggtcttttgggttccatttttggaaaggatggtgtattaaaccagccaaacagtgtctttggacttatattttatatactacagttattacttggcatgacagcaagcgctgtggcggctttgatcctcatgacgtcctccatcatgtcggtcgtggggtccctgtacctggcctacattctgtactttgtgctgaaggagttctgcatcatctgcatcgtcacgtacgtgctgaacttccttcttctcattatcaactacaaacgactagtttacttgaacgaggcctggaagcggcagctgcaacccaagcaggactgacgcccgacagactccaccctaacagtctcaagcccctttccattcagtttattttgcagcaggtttttattattattattattattattattcacaacagacactttccctaagaatctcaaactgatttttaaaaatccggtaaattagaaggggccctcgctattttctgtgtcagtcttcattttaaatatggatacaaaaaggatacgccgagccaatcaaagacaagctttaactttactttgaagtgtttctgaaatgataaaatgtagccctagccccctgccctcaattgtaaagtgagcaaccattgctagtaattctttaatgtgtataaattcaatttcaggtataacaaatgtgatcatgacatgaaaatattctagaatagatactgtattaaatattgccatgtttacaatatgtaatatgtttttagccgatggatttaaacatgtagattcaactagaatccatttgtgatatttgtaaataaaggtagaaatattagatccatttctgcagaacttactgtacagtttagttggagtgtagcactgaagaactgtcagctcagcgttgactgaggagatagtgaaaatagcctatacacagcatcttgtgaaaagtactggcagccgtggttgcagcaaataatagggcaaaaaaaataataatagggtggtcggttccctttcatctccctcttctgaaaggaaaaaattgaattggaacgttcaagtccagtttgtgttcagtcataaaactgggccagttgttaaccttacagaatgagtcatgtggccagaccttcaagtccaaggccttcagacactaaggatgggaaaatgggtatttttctttggagaaaagctggaaatataaacatggcatttttaggtaaagtttcttccactagttgaattttcatgcagatatttttccttaacgttggtgccagtcaagcaaagagtattatgatggaaaagaccagtccaagccccatcgctccggagtgggagccagtgttcttgctaattgtttctttctgcactaaccactcagatgtctaatttaattgttttgcagtcaaatactggatttgtaaccttcagggctgacatgctgcccagtttgcttcatcgggagaatagcaacaggtagacacatctcaaggctaaatctgctcatgtcgccactgctctcataatgacacacatgcagtaagaagacttttgtaaggggatttgagtacacccaaatgaaattgtgacaggatgtttgtatggttaacatctgatatcagaatgttaaaagtgccttctgtcttaaatctcaaaccaaatattttgtgtgttgaccttgggcagaagaagtgtccttccctcctttcttcaccgtcaggtagaaaacctgcactctgcagaagggtcctgtgtgatcacttaatcctctggttgagaagcagcagtaatgtttttgcttccaacctgattaatcattttatgttgaaaatagtcaatgagaccagtatctcttgagtgctttatttgccttctctttgaagggaggggacgggctctgctctgtaaactcaaatgtgtagagtcagcaacaattccgtagcttccaactgactcagaattgatgcaacgtaggtcttctggcccgaggcaggtatcaagtccaaatcataatgaacttttcaccagtttcaaccagtttcttaaaagagagcttaagtcagaaaaaaaaaaaatggcctcgttggcaacagcggtggagctttgcgccaaan

SEQ ID NO: 106905 - DNA, 2354 bp, Homo sapiens
gggaagagatttaggctaggtacgaaggcggggaggcggcggtggcggcggtggcggctgggtcgggccccgacgggcggcggcggctgaggtggaggcggagggaggcggcggcggcggcggcgggaagatggcggctcccgtcctgctaagagtgtcggtgccgcggtgggagcgggtggcccggtatgcagtgtgcgctgccggaatcctgctctccatctacgcctaccacgtggagcgggagaaggagcgggaccccgagcaccgggccctctgcgacctggggccctgggtgaagtgctccgccgcccttgcctccagcaaattcaacacccaacagcttccttaatagcaaaggtagcaacagcccaggatgatataactggtgatggtacgacttccaacgtcctaatcattggagagctgctgaaacaggcggatctctacatttctgaaggccttcatcccagaataatcactgaaggatttgaagctgtgaaggaaaaggcccttcattttttggaagaagtcaaagtaagcagagagatggacaaggaaacacttaaagatgtggccagggcatctctttgtactaaagttcatgctgaacttgcagatgtcttaacagaggctgtagtgggctccattttggccattaaaagaaaagatgaacctattgatctcttcatgattttgtgatcattgacaagaaacataaatctgaaactgatacgagagaagtgaattctggctttttttacaagagtgcagaaagagaaaaactcataaaagctgaaagaaaattcattgaagatagagttaaaacaaataatagaactgaaaaggaaagtctgtggtgattcagataaaggatttgttattaatcaaaagggaattgaccccttttccttagatgctctttcaaagaaggcatagtcgctcttcacagagctaaaaggaggaatatggagaggctgactcttgcttgtggtggggtggccctgaattcttttgaggacctaagtcctgactgcttgggacatgcaggacttgtatatgagtatacattgggagaagttcacctttattgagaagtgtaacaaccctcgttctatcacattattgatcaaaggaccaaataagcccacacttagatcaaagatgcagtaagggatggcttgagggctgtcaaaaatgctgttgatgatggctgtgtggttccgggtgctggtgctgtggaagtggcaatggcagaagccctgaataaatataagctcagtgtaaagggcaaggcacagcttggagtccaagcatttgctgatgcgttgctcgttattcccaaggtgagcccgtggtagcagcagaagcaggcattatgggataacgattgtgtaaagaaacagcttcttcattcctgcactgattgccaccaacattctcttggttgatgagatcatgcgagctggaatcttctctgaaaggttgaattgaagcttcctctgtatctgagtcttgaagactctgcaaagtgatcctgaagaatacagctgtggaatttttgtccaagcttcaaatgagtttcaagggaattttcccatgtgaaaaaaggagagaacactggcatctgtggaagttctgaaattataattacagtattttttaaaaattgcactgaagtgtacacagataaagcaggtctttcacccagtgaacaggatgttttgctttagcagcagtgacataaaattccatgttaaataagcatatattacctaccttattaaatattccttgaaaaagcagattttaatggtttaattttatgtggacatatgttaaattattcagcagtaccctattgttaagcatctggttttaaaatttttatgctaatataaataacgcttagtaatttaaaattttggaagcatcccgttagtgtaaatttctgagtaaatttattgatcagttggacttttcacgcttttgaaatagctttgctaaaatgctccccctacaaagttgtaggaaatgggaagaggagtaaactagaggcaagggagttgagagagctggaaggcatggtggctaagggctacggttatcaggtgaaatttgagatttgtaggctgactatattttcaagcttctgaacttttgcttatgcaaaatattcatcccaaagcctctagcgtcatagtttcctcacccaaattactatgtttccacaagatttatatagttggtctatctctgcggtccttgaaagtgaagttggtgttactaggctgtgggttttgggggctcagcagtgacctggagtgtgcaaataaatgttaagttgaaacctc

SEQ ID NO: 106906 - DNA, 1340 bp, Homo sapiens
gccagtgaagccattctggttggaccattctcctatttgatatgttagtcgcttgtattgtggctttcacatgcagtacttaaattgatgtggtcatagtgaatttgtaagaaattaatggctttcatatgtatattttgttattcataattagttctacagttttcttagcatttttctttttcccccatccaacaggctgtgtggttccgggtgctggtgctgtggaagtggcaatggcagaagccctgaataaatataagctcagtgtaaagggcaaggcacagcttggagtccaagcatttgctgatgcgttgctcgttattcccaaggtgagcccgtggtagcagcagaagcaggcattatgggataacgattgtgtaaagaaacagcttcttcattcctgcactgattgccaccaacattctcttggttgatgagatcatgcgagctggaatcttctctgaaaggttgaattgaagcttcctctgtatctgagtcttgaagactctgcaaagtgatcctgaagaatacagctgtggaatttttgtccaagcttcaaatgagtttcaagggaattttcccatgtgaaaaaaggagagaacactggcatctgtggaagttctgaaattataattacagtattttttaaaaattgcactgaagtgtacacagataaagcaggtctttcacccagtgaacaggatgttttgctttagcagcagtgacataaaattccatgttaaataagcatatattacctaccttattaaatattccttgaaaaagcagattttaatggtttaattttatgtggacatatgttaaattattcagcagtaccctattgttaagcatctggttttaaaatttttatgctaatataaataacgcttagtaatttaaaattttggaagcatcccgttagtgtaaatttctgagtaaatttattgatcagttggacttttcacgcttttgaaatagctttgctaaaatgctccccctacaaagttgtaggaaatgggaagaggagtaaactagaggcaagggagttgagagagctggaaggcatggtggctaagggctacggttatcaggtgaaatttgagatttgtaggctgactatattttcaagcttctgaacttttgcttatgcaaaatattcatcccaaagcctctagcgtcatagtttcctcacccaaattactatgtttccacaagatttatatagttggtctatctctgcggtccttgaaagtgaagttggtgttactaggctgtgggttttgggggctcagcagtgacctggagtgtgcaaataaatgttaagttgaaacctc

SEQ ID NO: 106907 - DNA, 1758 bp, Homo sapiens
gcctcagcctcccgagtagctgggactacaggcacctgccaccacgcctggctaattttttgtatttttagttgagatggggtttcaccgtgttagccaggatggtctcgatctcctgacctcgtgatctgcccgcctcagcctcccaaaatgctgggattacaggcgtgaagcaccgcacccggccaccttactcagtttttaatcaagtactatgataagaaaatagattgggtgattatattcatgggtgaaaaacagctaaagatagcaaataatgccagaagaggggatctagaaatctaatgaaatggtgacagccctgatcttaggcccctgtaacaaaacaacacaaattaagtacaaagtaggagacagataacaggtacatccatgcagtatgtgcaagacctattgctgtcaacattattatttaataaaaaagatttctggaatgagggaaatgatcagtccattttagccagattagagttgcagtgctgtactttagtatgggtaaacagaaatgtatccagaaggagagaggggtgttcaggtcttctaagtagaagtcagacactcctcaaatattgtggacaggggtcatggtttagagtagaaaattgggctaacagagaagctttgaattcccatagttaatactggaggaaatgagtcatcggtgataagcaaagccacacacagtattgttggttcttattgactgaacttactttggttgccttttaggtgagcccgtggtagcagcagaagcaggcattatgggataacgattgtgtaaagaaacagcttcttcattcctgcactgattgccaccaacattctcttggttgatgagatcatgcgagctggaatcttctctgaaaggttgaattgaagcttcctctgtatctgagtcttgaagactctgcaaagtgatcctgaagaatacagctgtggaatttttgtccaagcttcaaatgagtttcaagggaattttcccatgtgaaaaaaggagagaacactggcatctgtggaagttctgaaattataattacagtattttttaaaaattgcactgaagtgtacacagataaagcaggtctttcacccagtgaacaggatgttttgctttagcagcagtgacataaaattccatgttaaataagcatatattacctaccttattaaatattccttgaaaaagcagattttaatggtttaattttatgtggacatatgttaaattattcagcagtaccctattgttaagcatctggttttaaaatttttatgctaatataaataacgcttagtaatttaaaattttggaagcatcccgttagtgtaaatttctgagtaaatttattgatcagttggacttttcacgcttttgaaatagctttgctaaaatgctccccctacaaagttgtaggaaatgggaagaggagtaaactagaggcaagggagttgagagagctggaaggcatggtggctaagggctacggttatcaggtgaaatttgagatttgtaggctgactatattttcaagcttctgaacttttgcttatgcaaaatattcatcccaaagcctctagcgtcatagtttcctcacccaaattactatgtttccacaagatttatatagttggtctatctctgcggtccttgaaagtgaagttggtgttactaggctgtgggttttgggggctcagcagtgacctggagtgtgcaaataaatgttaagttgaaacctc

SEQ ID NO: 106908 - DNA, 2482 bp, Homo sapiens
gggaagagatttaggctaggtacgaaggcggggaggcggcggtggcggcggtggcggctgggtcgggccccgacgggcggcggcggctgaggtggaggcggagggaggcggcggcggcggcggcgggaagatggcggctcccgtcctgctaagagtgtcggtgccgcggtgggagcgggtggcccggtatgcagtgtgcgctgccggaatcctgctctccatctacgcctaccacgtggagcgggagaaggagcgggaccccgagcaccgggccctctgcgacctggggccctgggtgaagtgctccgccgcccttgcctccagcaaattcaacacccaacagcttccttaatagcaaaggtagcaacagcccaggatgatataactggtgatggtacgacttccaacgtcctaatcattggagagctgctgaaacaggcggatctctacatttctgaaggccttcatcccagaataatcactgaaggatttgaagctgtgaaggaaaaggcccttcattttttggaagaagtcaaagtaagcagagagatggacaaggaaacacttaaagatgtggccagggcatctctttgtactaaagttcatgctgaacttgcagatgtcttaacagaggctgtagtgggctccattttggccattaaaagaaaagatgaacctattgatctcttcatgattttgtgatcattgacaagaaacataaatctgaaactgatacgagagaagtgaattctggctttttttacaagagtgcagaaagagaaaaactcataaaagctgaaagaaaattcattgaagatagagttaaaacaaataatagaactgaaaaggaaagtctgtggtgattcagataaaggatttgttattaatcaaaagggaattgaccccttttccttagatgctctttcaaagaaggcatagtcgctcttcacagagctaaaaggaggaatatggagaggctgactcttgcttgtggtggggtggccctgaattcttttgaggacctaagtcctgactgcttgggacatgcaggacttgtatatgagtatacattgggagaagttcacctttattgagaagtgtaacaaccctcgttctatcacattattgatcaaaggaccaaataagcccacacttagatcaaagatgcagtaagggatggcttgagggctgtcaaaaatgctgttgatgatggctgtgtggttccgggtgctggtgctgtggaagtggcaatggcagaagccctgaataaatataagctcagtgtaaagggcaaggcacagcttggagtccaagcatttgctgatgcgttgctcgttattcccaaggtgagcccgtggtagcagcagaagcaggcattatgggataacgattgtgtaaagaaacagcttcttcattcctgcactgattgccaccaacattctcttggttgatgagatcatgcgagctggaatcttctctgaaaggttgaattgaagcttcctctgtatctgagtcttgaagactctgcaaagtgatcctgaagaatacagctgtggaatttttgtccaagcttcaaatgagtttcaagggaattttcccatgtgaaaaaaggagagaacactggcatctgtggaagttctgaaattataattacagtattttttaaaaattgcactgaagtgtacacagataaagcaggtctttcacccagtgaacaggatgttttgctttagcagcagtgacataaaattccatgttaaataagcatatattacctaccttattaaatattccttgaaaaagcagattttaatggtttaattttatgtggacatatgttaaattattcagcagtaccctattgttaagcatctggttttaaaatttttatgctaatataaataacgcttagtaatttaaaattttggaagcatcccgttagtgtaaatttctgagtaaatttattgatcagttggacttttcacgcttttgaaatagctttgctaaaatgctccccctacaaagttgtaggaaatgggaagaggagtaaactagaggcaagggagttgagagagctggaaggcatggtggctaagggctacggttatcaggtgaaatttgagatttgtaggctgactatattttcaagcttctgaacttttgcttatgcaaaatattcatcccaaagcctctagcgtcatagtttcctcacccaaattactatgtttccacaagatttatatagttggtctatctctgcggtccttgaaagtgaagttggtgttactaggctgtgggttttgggggctcagcagtgacctggagtgtgcaaataaatgttaagttgaaacctcctttgtggtcttgcaatggtttgacacacagaagcaatcttaaagggaatgaaagctgtccaaaggttcaaaaagtagtgaaggggcctctagggaccctcaacctgcttttccttacttccctgggc

SEQ ID NO: 106909 - DNA, 421 bp, Homo sapiens
tttgaaagatgactggagataaaacaacctgctttataatgtaatgatcttgtttctagaaatgatcacttagaattcataagaaaataattcaaaattctaatgtgtgttatagtttatcactgctaagtatccttctacttctgagactatacagttgcataaacttccatgttagatgtgatctttgagataatgtattttacacccgcaacattatgtttgaaaaatataaaggcctagagactgttttgtgcaagtatcattgtctgtgataaaattatttcatgaattctcagcttggatctgagtattcattctacagcacaagaagtcagctttattcttagggaaaacaacatattcacacaattttatttttagctttgataaataaaatttttgttttccttttattcag

SEQ ID NO: 106910 - DNA, 489 bp, Homo sapiens
aactgcactctgcgatatctacattaaaatacatcaagcacttccgaatatctaaagactagatatttcatagcttgtccaccgtgtacacggcactgttaaataaaactgcacacacataacaatggttatcatctaaggtatcttctaaatgtgaccattttggccttgaatcattccctcttctcttccttctctgccttcaattcagtggacaagtacacgcatgtgtaatgcttagagatggctgaacaaattcctatgcaaaagtcaattacagaagacaagttttcctatgaatttcaacacaaagcatacaaaatatgctaattttactactttgtcatacactggcaacctctagatgttaaaaaattaagactatttgtccattaatacacaataacaagaaatcaaaatatatgggcaaaaatgcaggtaggatgtaggatgtggttttgggagcttgtgaaattctcttctaattgc

SEQ ID NO: 106911 - DNA, 871 bp, Homo sapiens
cctcagactcctgactagctgggactacaggtgcctgtcaccacagccggctaatttttgtacttttagtagagatggagttgcaccatgttggccaggctggtcttgaactcctgtcctcaggtgatccacccgtctcagcctcccaaagtgctgggattacaggcgtgagccaccgcatccggcctcagccaccatcttaattacatgtctgaaggaatgacattttatatttggccatgagtgaggtggatttccctgaactttagccttgacaatttgatgacagttagggatatccttacagccctaagagggccattgaccctgaacagtacaactgggagctggccaacctcagcgtttgtcacccgtgatcaagtctttctgcttagcacacactgtggttttcagtagcatcttttgttgaatgctattcagatcctgaattattcataaaggattcccacgttcagaaggagtgtggaccagatgaccttgttggggctcggaaaacgatgacccaaagtgtagcactttggcatgctgagtactttgaactgaaggactttggaagggcctcaaaggctgtctctttctgaccctctcctgctcttctttttcttccttcccttttccccaagacaggccacagaaagtagaatccctcttcaaggcaggccatagaaactagaacccaacttctccaataccagccacaaaaacctaggtatataactctaacctatcaccacctttctgtgtaagagctggttataaataaattctctggaggtggaggatcagttgaggccaagagttcaagaccagcctgggcaacatagtgagatctagctctgaaagaaagaaa

SEQ ID NO: 106912 - DNA, 447 bp, Homo sapiens
gcttgcagacagccttttgtggcacttcaccttgtgactgtgtgagtcaattctaataaaatcctcttcatatattcatctatcctgttagttgtgtccctttagagaacactgactaatacagtgaagatgaaggaaaaactctgggtaatgcttcttcttcatggcaaggaatgtcaaaaatggtcaataaaccaccagatactagggaagaggcatgggtaagatcactctcaccgcattcagagcgaatcaaccctgctgatgccttgatctcagattttgagcctccaaacctgtgagacaatatattcctattgtttaagccacccactcaattagcaatactttgttcaggctgctctaacaaactaagacaagctttaatggagtctacaagtttgttgagacatgtttaagtcccatgcactaggacactgatattct

SEQ ID NO: 106913 - DNA, 383 bp, Homo sapiens
agactctaagtagctggaaggcaggggagtgtctgtttttaaagccccctgctgaatcctgggcagttagggtgggacctggctcatgctggaagttcaataatgagttcttagatgagggtgtccagtatagggaaccacctgtgtacctgttcttcccttcctctcccatctcccttgcaactccgtcaatcgcaaggctgccatcacacatcacagactggagggctcaaacagggatacatttcctaccagttctctaggctgcaagtccaagatcaaggcgtcagcagggttggtttcctctaagcctctctctttggcttgtagatggtcatcttctccctacatcttcatgttgacttctctctgtgcatatgtct

SEQ ID NO: 106914 - DNA, 218 bp, Homo sapiens
cagcatctgctcagtttctgttgaggcttcaggaagtttttcctcatggcagaggtgaagaaggagcagatgtgtcacacagagagggagcaagagagaggggaggaggtaccaggctcttttaaagaaccagctctcgcatgaactcatagagcaaggactcactcgttaccatggggagggcaccaagccattcattaaggatccacctccatgac

SEQ ID NO: 106915 - DNA, 342 bp, Homo sapiens
tcaaagtttcataggccctgggcactgtgtctagtgggtaagttgtccttgcctgtcagttttaaagttacttgaacctcacattgttttttcagtactaggagtgagaggatttttgcttatttctggttcttggctgtgctctggatagttgaaattgtttagcagattggcctccagataagtaaggcattattattggatatagtaaattcatgttctggaagtttggggcctaaaggagcaatgtgggctctgtagggttaaatgagggcagggtatggtgagaaggcaaattttgaaacattgtgaacataagagacaattgcaaattggcagaaa

SEQ ID NO: 106916 - DNA, 203 bp, Homo sapiens
ttcccttggcctaccccatgtgctaagcccatcccgcaaccaagccctccctgctctccctacagcctgcgtagacaccgctcctcagatgccctcagcatccctcaccttccctgaaaccttgtctgagagactggggcaaaatctttccttggagttctgctgcccccagatccacccgccaacactggaggcaggcaggg

SEQ ID NO: 106917 - DNA, 341 bp, Homo sapiens
ggctggagtgcagtggcgctatcttggctcactgcaacctctgtctcccgggttcaagtgattctccagcctcagcctcccaagtagctgggattacaggtgcataccaccatgcccgactaatttttgtatttttagtagagacaggctttcaccatgatggccaggctagtcttgaactcctgacctcaagcccgcgtcagcagattactggcgtgagccaccgcccagcctcttttcagttgtttttctgaaacattgtgtgtgtttgtgtgtgagtatgtgcacttctgtatctgtctgtgagttttcttttgttcctcttggtaggtgagacattc

SEQ ID NO: 106918 - DNA, 249 bp, Homo sapiens
cttgtgatccacaccaatagcttctgagacgattttcagcggactccctcaccgagtttccttctctttcattttattttttcctcctcggtttctgtttccatctcctctgtgaccattgtgtgctccagccccaagattcttcttcagaggatccagggcgtgaggagcaggatccgtcagtgaaaaacacgaaacaaaacagaaagctcttccagggtgtgttgaggatcagcaagacccagaaat

SEQ ID NO: 106919 - DNA, 611 bp, Homo sapiens
gagccagggatggggcagggggcccagactcccagtcacacccaagcaagtgggacaagtaccagaggtgactcatatgtagaggtaaaaagcacaacaccgctgctgtctgtcctttggggtcctgtagccgtcggccatgagagggggctgcagtgccaccaacccctgggtctgtatgccttggtctcccacttacagacccagatgggtcgaattcctccgtctccataatcacactaaggaatgcggtacataccgagcatgcactgcaggtgctttgtccttaactcactgaatcctccagcaaccctacgaagtcaggactaatgtccccactttccagatggggtggcagaggctcagggaggggatgtgacttccccaaggtcacacagcgggatccatagccagcagctcttggttaatatgacttacggtgtccaaagccccctccccatgtgcctcccccgaccctcagctggtgggactgagaagccagggccgcactgctctctgcggaccctgcaggactctccttctcccctggcttcctttgcgccacaccgaggggactggatggtgtgatgcttttcccacgctggatttgg

SEQ ID NO: 106920 - DNA, 434 bp, Homo sapiens
tctaattattctgtaatgaatatatattactctggtactaagaagaaaatatttaaaatgaaaaacagaaaggaaaagtctaaaccaaagggcccggagtggtggctcacacctgtaatcccagtattctgggaggctgaggcgggcagatcacttgaggccaggggttcgagaccagcctggccaacatggcgaaaccccatctctatttataaataatttttttttaaaaaagagtctaagccaaaggttgacaaactatagctcatagaccaaatgtagttcatcatgttttcctatgaccatgagctaagattggttttacatattaaatggttaaaaaaattcacaagaagaataatgttatgtgacacatagaaactacataaaattcaaattttactgtgcataaataaaattttatgggaacacag

SEQ ID NO: 106921 - DNA, 419 bp, Homo sapiens
ggacagatgagatggacagcagtgttttagtcacgtagactcacagtcccagggagaagggcacagcatgtcatgcagggttacatgggggtgtccttgaaacagagtggataagcagcagctgtggaaagcaggctttgtagtttcaagagggtgcttgtcctttttcattccctgggaaaaatgtgattgcctcatttgatctatggtctgacagaaaactgaaatcttctgtgctcagggataagcaggaacttcacctggtcctgttgataaggagagttgtttggttaggagactttacccacatgagcggaggagaggaagttgtggctacgccatttgagacccttctgatttcaacagatgttaaagcatcacttagtattggacttagatgttaaactttacttcacaac

SEQ ID NO: 106922 - DNA, 347 bp, Homo sapiens
atgtaaacaattttaggctacaatgaagtgattttgcctgagtaacctagaaaatcatttgtgtttcctcttgaaccatgatactagaaaacactattgagaaatattactttgtgtgtagtatgaatggctttacatgtagcaaatataagcaaataaaggaatacagatttttatgctagcaaagttcctgtctaggctgttgaagtttctgtttataataaccctgccttttaaattaatcattctcaaagttattcatataaaatgttcaaaacacactttttaactttacactaaatcttatgtctatgtcctttacaattgattcctttttttgataaatt

SEQ ID NO: 106923 - DNA, 345 bp, Homo sapiens
tggttcctaaatcagctgcagagcaacaagagccaagaccagctctctgcaaacccagagtgaagtgacttggtctggggagctcaaacacttttagcacaaaagttccacaagacaacgaaggtaagtacactactggggaaagaaagagaagcaccgtaattagcttgacaacagaagatctcaaatcttcatcagtgtaagggttcactgaggcataaataaacattagcacaattgatatgtgtcttttatttttccatataaaccaatggttctcaggcttttgggataacagactcacaccctccttctttgagaacctgatgtaagtttccttctaga

SEQ ID NO: 106924 - DNA, 478 bp, Homo sapiens
tggaagaaaagggtcttactctgccacccaggctggagtgcagtggggcgatcatagttgattacagcctcgacctcctggggtcaagcaattttcctgcctcagcctcctgagtagctgggactacaggcccacacaccactcctaatatttatatttgctttttgtagaggtggggtttcaccatgttgcccaggctagtcatgaactcctgggctctagcaatcctcctatctaggcctccaaatgtgctgtgactgcaattgtgatttactgctcccgctttatgtgaatttcagacatccttaccagtactaacaattttctctactttaccatgcttcaaaccaatattagctgtgattgaatgggtaaaccaaacttaattcaaaggtttagtattgtagggcttactttcaagtaataaagatttggggctcccattgttaactttgtttcatttctgaaattgttgaaa

SEQ ID NO: 106925 - DNA, 1903 bp, Homo sapiens
gaccagaaaaagcatagaaaaattagatccacacacagcacccaaaaaaggccatagtcttttgtttacctagatgtattttaacctctttaccactaagcattttactataatagaactggggacatacattgtccttttgagtccgttgaatctgcaccatctaccttttggctgattcaccatacaggtggcaaaggcctttaaaaatggggagctaatacgtagggcacattctggtagggccaaaatattcagtgtctggggggtgctatgcaaatatcaatgactttttactaaaaacagtggatttcctcatttctttaagatccaagtagaaaatgtaaataacttacattctgtatgcaggactcaatacagacttagtcaatctgattttttttggtgcttttcagtatagcgcaactctaaaaggaaacccattcaccctccttagtcctttgaagtatacttttgaaattataccttattgttaatggcaacctaatcaagctaggatttgtcggttaaaattttgattcttgtaatctgtactgtcaatttttggccactctggctgttacagcaaacttttctcccactgtcataattggtctaaagtagtatttgtttcaggactatccaaaaagcaaggccagcacattgagaagatgcagaatcctactctattacaaacctcactcatgtttcttttattgaaacctttttctactttatatttcctcttttgtaaatttttccatgtcatttaaaaaattttttactttagaattacagattagttctttttttaaagcattatggcattttcaaaaaaaaaattattttggttacccaaaaagctatacaagaaatataacttcaattttttaggttgatatgggtatatttttaaagtttttattactttatacaaatacaaattaatttatattatagtttaacacctgctatgatgatagatatcacactgctatgatagaaaatccctgtctgtcattgaactattcatttagtgttactctgatatgttaataatgtattccttctaatgaagtccttgtaacaagaaaccctgtgagattggtataatgagatatcaaataatcagaagtataattaaaatagaacatgttggaaaatcccaacatttcctgttatgccgtcatacctccggtgttcagtttgttactcaaaagttcccagttcttaggctgaaaaacattcaagtaaaaatgtagcatagattacactgaaatattttcagtatcaatgatttaatatccacacaaactattaggaatggtatctggaacttgttacaaggtcagataaactgttacagaattttagaaataattatctctgtatgtgactgtgtattacatataaaaatgaatttttcaggaaaagtgcactttaaaaatactttctcttgctagttttttaaattgatgaaatagcctgtgctgctttggaatgcttattctttctttgatgaaaatacggtcattgattatgataattttaaaaatatctatttctgcatcgctgcaggatttcctacacttttctgttcctcatccctcttttatgtgtgcttggctcagttgcctgttacacagcctctgccttggttttgtgtattctaagataatttataaacacagatatttacagtgaagttcttccttttgaaactaatcttattcttttattcctctctctaaaaattggttggccatgctcactaatgattttttttcttaacaataagcatttcttggtattggtagatttggattgcatggtaagatgactgcccattttcaccatgtatacctttgtcaaataaagatttctgatctttggtctgcttctg

SEQ ID NO: 106926 - DNA, 410 bp, Homo sapiens
tgtagagatggagtctcactatgttgtccaggctggtcttgaactcctggcttcaagtaatcctcctgcctcagcctccctaaatgctgggattacaggcatgagcacttgcactcgacctacttataatgtttttaatccttgcaatggctctacatgggttatcatgcatgttttatagatacagaaacaaatgcagaggtggtgatatgatcaaggttcacacagttaacaaactgtagtgaggattcaactcatcaccaaagccctcattttttcttctccatcaagttaagagctgaatagtcctatattgtacaggaagggagaggagatcttagagaagttgcgagggaatttgcttttgattgagatcattgctatccctgggatcagaatgcagagcactc

SEQ ID NO: 106927 - DNA, 396 bp, Homo sapiens
aacccggcggtgctcccgagcgctgtctccggcttgaggcccggttctgatgcagcctcttgactctgggcatttcctatgtgtctgtttcctcatcgctgaaatgggcatagtaaaagcacccatcccacaggggcatgagggcatctgaaggttgcaggtagaggaagcggtgccccaagtgccgacgggcccaccccggggctcggtgtgtgctcaggatgggggtcaggacaggtgcagcctggcacacaggaggcgctccccaggagcccaggggcgtccttgttccacagcccctgcttctgctgtgatgatggttcttccacagccggaaagtctaagggtactgacgctgaggtggaagggattgtgaactcagatgctggtagtcga

SEQ ID NO: 106928 - DNA, 444 bp, Homo sapiens
aaggtgaggactcagggaagctccaaggttaagtgctaggtcctctgggggctccatgccacagtttgctgtcactggagcctgccgagggatccaatggggacagagcaggcagtgagcctcttagtgtttctaatgcagcccgtggccatctcagacacctgtcactagagtctatggtcttcagactcacactggtcacacgctctcagatgtttgacccccacacatgagtgccctttggcttgtctatgtgtcctgtgggtgctcgtgtgctctgtgtgtcctcgtgcatgcacaaacatgcacatccttttctattcttgtgcacgcacaagcccatgtactcagctgtgatcatatccacacgagcaagtgtacccatgcccttgcacatgtgtataccaggtatgtgcacccagaggtgtgcatccactcctgtgc

SEQ ID NO: 106929 - DNA, 867 bp, Homo sapiens
ctcaaattttgctgccttttctaaccttttcccagaaatttatttaaatccctggagattccttgtccattactgaatagcctttgggagaagctctctgaatggaagaggtatgttgatcagtgatgccattgggacctgaaaacagtgaaggctctaaaatagccaccacggccaggcacggtggctcacgcctgtaatcccagcactttgggaggacgagacaggcggatcacgaggccaggagatcaagaacatcctggctaacatggtgaaaccccgtctctactaaaaatacaaaaaaattagccaggcgtggtggcgggtgcctgtagtcccagcaacttgggaggctgaggcaggagaatggtgtgaacccggaaggcggatctctcattgagccgaggtcgcaccacttgcactccagcctgggcaacagagcaagactccatctcaaaaaaaaaaaaaaaaaaaaaaaaaaaaaaaaaaaaaaaaaaaaaaaaaaaaaaaaaaaaaaaaaaaaaaaaaaaaaaaaaaaaaaaaaaaaaaaaaaaaagggggggggggggaaaaaaaaataccggggggggaaaaatgatagaaccacccactgtgttataaataaaggagggacgcgcctatgatgacggaaacattataataaagacgagagggaggatgtataaaaaaagtagtgggggaaagaaactggtgtggaggtatatgtgaaaaagacaaccacatgtggggggagaataagtggggaacaacatcagtaataatagtaagggcagagagaaaaaaatgtgggttgagtgagaaaccagagatatgttggggaaaaatgccaagattattggaaattag

SEQ ID NO: 106930 - DNA, 596 bp, Homo sapiens
caaacatggatcctttacatcatcaaaagaatatacaactcaaacatactgctacattactagaatcccattcagtcattagtaattagtccagttcattatcatgttgtatgaatatgtctcccagggagagaccactcaagtttgcaggcttcctttcagtcttgtcagattccagaagcaggagcagtctccgcaaacatacaacttttaccttttgagcatctcttataactgagttaaagacagtgtcatctcttgctctgagcttctttaaatgtgttaatgtaatgttggatttccctcaatgaataacccatttattcctgtctttaccctcagctgctattcctcctctccagtagttcccaaacttttcctcctttggaaggcacattaagaattgccactgtgctggtttagattgcagacaacaactctagtctagcaagtacctcctcctcagtccactcccctttagatagggtaaattacatgggtgcagaactagtgagctgtttttatggccaggaaaagtagtagttgcattcactcttagccccaattttgctagatagagtgaaggtacaacccac

SEQ ID NO: 106931 - DNA, 364 bp, Homo sapiens
cctatactccaaagatgggttgtataagtctgattaatatctaccgtgttaataaagtcttaaagcagatagtgacttcttaaatttaagatttaggatatcaaacctagcatcatggatacccttatccatttaaaataaaaagataacccaaggaaacatttttgattcacaatggttttaatgaaagatgtaaaggaaagagtgtagcaattaaagcagaatggcttttgctcttcaagttccatagtcaatttgtaattgtttttcaacccaaacttccttctacatcatcatgttttccatatggcataatgttgcctattgttggaatctcatctaaattgaaaaacctagacttttg

SEQ ID NO: 106932 - DNA, 242 bp, Homo sapiens
ttgttagaggcggaaggggaggatgttgggttgtaactgccctaacccctgtgcttctctcaggcctgggatcctgcccaagcaaaagtggtccttaggagagcggctcctgggttacagagtaggcgcaatctctgactggtggtggagtggaggggagggttaaatagtacaacagggcagtgggtaggacagcccggagtctcctagaccctccctccaaatccagggggattttgctg

SEQ ID NO: 106933 - DNA, 489 bp, Homo sapiens
tagagacagggtcttgctctgttgcccaggctggagtgcagtggcgcaatcatggctcactgcagcctcaaactcctgggctcaagcaatcctactgcctcggactcccgagtagctgggactacaggcatgcgccaccacacctggctagttttttattattttgtagagatggggtcttgttttcttgcccaggccactttcaaatgcctgggctcaagtgatccttcttcctcgacctcccaaagtgctgggaatacaggcatgagccaccactccaggtctctcttttatatagtgtggtggatgttgactttatacttaaaatttttttaaaacatatggcaaatattataaggtgtttgtgccccacacccctgccaccaaattcctgtgttgaaatccaatccccaatgtgatggtatttggaggtggggcctttgggtggtaattaggtcatgagggtggagccctgatgaatgggattag

SEQ ID NO: 106934 - DNA, 620 bp, Homo sapiens
acaagctatgcgaccttgagcaaatcatttaatctctttgtacttcagtttcttcatctgtaaaatctggatacttagctcataaagtagtgatgattaaataagttagtatatgtaaagtgtagcgttggtaaagtgcttagaatgctgcctggcctacagtaagcagcatgtgtgtgtgtgagtaatgtcactactaggagtagtcatgtggactctaatactgctccggctactacttcaaagatgtaaatgttctggggtcagtctccccaggtaccccctcattgcctcctctgtcacatttcttagtcttggccacttccttaagagtgcccatgacacttcctttcagtccctcagttcctgatcattttctccgttctccatttgttttggaatgctcagctagctgatgcccgagaaggcagctgggttggtaattacacttctctgcttgctctcaccactatttcttctcaagaaagctcttgtggctgagggaaatcgctcttaaaggttggggagaccttgaaaagaattctgaagtggttgggagaggagtgtgagctaagtttgcagagctgagctagccagcaaagtcgggttctcagtgggga

SEQ ID NO: 106935 - DNA, 436 bp, Homo sapiens
cggttaatttgtggcagaggactagatgtgagtctagtgcttaccagttctattataaattatttcaagtactatttaaattgaataattaaatctttatacaactttagtattctgttttatattgtctttgaaaataaatgtcctttgctcagtgctgagataagaactaatattaacctattgtttcacagtttgaataactttttacatgtaatatgatcctcacaaccctaggagtaggaaaaacagaattttatcactattcctattttagatataaaatcttacagtaatatcacacagccaacaagttgcagagccagaattcaaaagtagattttctcacataagatttgaaattggactcacttaagtgagctagttcagccagtctggatcagagaagccagcttcttggttgtagtgatggtga

SEQ ID NO: 106936 - DNA, 357 bp, Homo sapiens
ttggccaatacaagttgcttgctccttatgttttggactcagccacctcaggaagcctcaagtctggccatgatagtaattttccctagattatctcccacaaaattctattctcaagcagatgtaagatctataataaatacctatgaaattgctgtgaaagaaactagagtaatcaaccattgcattttttatgtgaagttttgtaatggagaaaaagttaatcaagaataaagattcaggcccaggtagtgtgcatctatagttgcagctactcaggaggctgaggcaagagaatctcttgagcccaggagttcagggccagcctgggcaacataatgagacccctacctctta

SEQ ID NO: 106937 - DNA, 359 bp, Homo sapiens
gacctgactctgaatttaattttttaagaatgtaatcataagtgaagcaactttaaatatagcattatagggcacagtattgataaatgagaggaaaactttttcttaaagagtgtaccactcacttaccatgccctgaaattaactgagaactcatttgtcaagagagcacctaccctatagagaattcttccaattaacatcaaaagcgatcattcttaacctctcatgcattaagaaaatcttgtctgcacccaatgttctgttcataatcaatgaagccccttatgtatgttattgcaaatttatcaccttgtatattactaaaatggatgaattaataaatgaatctgctgtag

SEQ ID NO: 106938 - DNA, 366 bp, Homo sapiens
tgaagagtgaggtgcataactgggactagaaacacaatggaaaaattctatttcctggtttgtcctggaatctattctgataacagtctatggcctctgcacagatgttttcatatggattagccaccaagcagtttaatgcattaagcctactataacagcaacaaattataatttgtttgtattgatgcacatgttagatagatagatgatagatatgtgagtatagatagatagagcgatagatgatagataggtagataggtagatcgatagagagacagatgtttccacttaaatgccctcatttacataagtttaaatagacatatgaattacagctcaggctgatttgacttcatttat

SEQ ID NO: 106939 - DNA, 322 bp, Homo sapiens
gatttgtaaaaacacaggctaagatccaagatggaaataaccagagctatgccttagggcctcctctgtgccaaggcttagagccttgtaaagctgctttatctgcattagttcccatccttataacatctctgtaatgtaagtttataatccccatattactgatgagaaagagaccacaagattaagaaacctgccaaaagttacacagccaagggattgagtggagcctaatattaaagactgtctgactcttcagcccacattattggtgtactagagagacaagaatggatgtcagaaaacaggttcggggggcagt

SEQ ID NO: 106940 - DNA, 675 bp, Homo sapiens
cagaccccactcatggactggaggcttccttaggcatgacatgctaagataatggggccttggtcctggcttgcgaggtggtggttccatggcaagagaggcaagccgagaggaccccagctgctctgcactgacagaggctctctccttacccaaactttagtcaggcttagaaactttttttttttttttttttgagacagagtctcactctgtcgcccaggctggagtacagtggcgtgatctcggctcaccgccacctccatctcccaggttcaccccattctcctgcctcagctacttgggaaagtagctgggactacaggcgcctgccaccacacctggctaatttttgtatttttagtagagacagggtttcaccgtgttagccaggatggtctcgatttcctgaccttgtgatccacccgcctcggcctcccgaagtgctgggattacaggtgtgagccactgcacctggccaggcttagaaacttttttagactaggcctcattcttggaccttgtcctcaagagcccagttttagcaagaatcctggcagtttaaaaagaatccccttgaccctttatatctgatcaacctgacctgacttaagcaagaatcctgtttggtaaatgtagcaagaatttcccttacccttcatttctgtctcctct

SEQ ID NO: 106941 - DNA, 592 bp, Homo sapiens
tggatttggaagaagttaagatagtatctgttcagcctcttgaatatcccttttggccctcctccttgcttaccagcatatgtaactccgaaaggataggagcagtgaaaacaaagcattattaaaagggaagatttttaattaggtggaagttgtttaagccctcccttcaacttacgtgttttagggaatgtggaacctgggaaattcgttactgaaattccttttgtttactttccttgtcttggggaggtagcaggtgacactgaaagaggcaacctgtaggcaataatatttgctcattctgtaaccctttgaaacctttgaaatgaagacttgccctcccctttgtttttgccatagttgccaagtatcttggttaacatggctgcaagtattaagtgtatttcttttaccatttttttttatgtcctgtaataacatagcctttggatgtggagcacccatttttcactctagttcagatcaacagagcgtaatttggttaaaataataaataaccttccttgaaatcttcgcatgagggaaggggggcaaaaaaaaaaaaaaagccctagaaagtagataataa

SEQ ID NO: 106942 - DNA, 350 bp, Homo sapiens
tagaattacacagcagcctgaaaagtcttacaaatagtgttgatgaaagaacacataaagtataattcaaaaagaggcaaaccaaaatatattattcaaggatgtacctgggtggtaaaactgtaaggaacgtatacaattactgttaagtcgagatagtggttactcctaagggattagggtgtgatcaagaagggtcacatgagaaaaagtcttcccgggtgcaagcagtgttttatttcttgatttgggtggtggttctacagatgtacactttataatcatttcttgttcgctacatttatgtttcatgtactttactatgtactatttcatttttttaaagttta

SEQ ID NO: 106943 - DNA, 3867 bp, Homo sapiens
cgcaggctccctgcgggtgcaggctgggctcagctccgctggacccgcgctggggaactctggcctcgctgcactcatggcttctcctagcaaggcagtgattgttcccgggaacggaggcggggatgtgaccacccacggctggtatggctgggtgaaaaaggagctggagaagatacctggtttccagtgtttggctaaaaacatgcccgacccaattacagcacgagagagcatctggctgcccttcatggagacagagctgcactgtgatgagaagactatcatcattggccacagttctggggccatcgcggccatgaggtatgcagaaacacatcgagtatatgctattgtattagtgtctgcgtacacatcagacttgggggatgaaaatgagcgtgcaagtggatacttcacccgcccctggcagtgggagaagatcaaggccaactgcccttacattgtgcagtttggctctactgacgacccgttccttccctggaaggaacaacaagaagtggccgataggttggaaaccaaattgcacaaattcactgactgtggccactttcagaacacagagtttcatgaactgattactgttgtaaagtctttgctgaaagtaccagcatagactgtatgatttctgctattttgcatcccaatataggagtagaataatatctactatcagctgattactagacacatagaacatccagttaagttccgtaagtgcctgaaaaacaaacacaagtttcaacattcaatctaagttacaaatagcacttccattttccatagactctaaaactccccaaattgctatgaactaccacagtattttcctcatttgataagaaacataaggacagcttaactacccttctctatccgaagtgagtcagaaacagaacccaggtttcttgattcccactcctgagtaaaattaaataggttttatgtatgttgcaggtattgcacacttttcctctttgaaatcaaacttttctatttcactggggaaagaaaacatgactgaaagtccagagtgttagcttagagctcaaaatactagctgctgtttcaagctggccccagacattaaactcagactagggccttcacctctgacacttgcccctaagtccttcagacatgttgagagagactgagacaggagtcttccggagtcaggcaggaaggagaagcacagcaatatacattcataatatacgtacaactgactagatttgtttgagacaagagtggtgggatcagagccatgtggagagctcatggcctgtctaaattgttgccatgtggaaatggggcagagtgttgccaattttctgattttttgtgtggaaaaaaatctccaaattgtagtttttaaatttggggaatgcaaatatatatatatataacacacacacacacacacacatacacatacaatccatatacatatggagtatgtaagttggcaataacagtatacatcaaaaaatttacaaacactgcaagacaaataaaatccaagccatccatttgtgaccacagtcataagcattcacttagccaggggcttttagataattgtctgtgaagtctgagaaaagactaagataaccaagatgaacataatgtcaaaggacgaaatcatggggacaatttggattttgttccaaaagacaagtgtttttaaaaagaacctttccatacttcgtgttctgttctatagagttaaaccttttaacttccatggccctttagatctctttcaagcacattccattttcttctgatcatacttcctcagaaaacctttttttggctgggtgtggtggctcatgcctgtaatcccagcactgtgggaggctgaggtggttgtattgcttgaggccaggtgtttgaggccagccagggcaacacagcaagaccccatctctacaaaatattaaaacattagctaggcatggtggtgcacacctgtggtcctagcttcttgggaggctgaggtaggattgcttgagcccaggagtttgagccttcagtgagctatgatcgcgccactgtactccatcctgggtgatggagcgaagaacctgtctcttaaaaaaaaaaatttttttttaattaaaaaaacccaccctttttcatttcccaacattttttggctattatgatcgctatgtgttacttcaaataatttccagtgaatccacacttgatgttgcaaagcctaagtttgctgcagaaatacaatttcctacacttcatacctaaaggagattcagagctatcgctcaaaaccaaaagtcttggtttttaaatgtgcttagacaaaaaaaatcaggaaaggtaccctaatcgttcaacagcaatcatctttggggaatgggcattttggtaggtaaagtgtggtggacgtccttattattatttttgagacagtgtcttgctctgtctcccaggctggaggtcagtggcacaaatctcagctcactctaacctgcacctcccgggttcaagtgattctcatctcagcctcccaagtagtgtgaactaaaggcatgtgccaccacgcctggctaatttttgtatttttagtagagacagggtttcaccatgttggccaggctggtctcgaactcctggcctcaagtgatccacccacctcagccgcccaaagtgttgggattgcaggcatgagccaccatgcccggccccttattttactttatcctcctgattatttgaatttgttacactaagcatgtattttataatcaaaaataattaagatttaaaacaatgtatttgactactaaaaagcaaattatataaatcagttgaataataatgttgttaaagaggctgtttagcactaatttgaccaaatctatagtcaaagtttgattctacttgaattttttggaaatttgctgttgtattacttattctttgccttgttctctgtgaagtcctttcctaaaaaagaaacttatacaatttagttcacaaaactttgttgacctctttctctgtagaaatgaaaactaaatatatataattgagaaataattctgatactcttcattcctataaaagtaattaagatagacctataggattgttgaactttgctgccaaatatagtaaccagtaaccacagctagctgtaaaattgaaaattcagttcagtcaaactagccatatttcaagtgctcaacagccactggtggctattggttaccttactgaccagccaatataggctatttccgtcattatagaaagctctattggacaacattggtctaggacatatattttgtattttcccctcacccaccatccaataatgagtaatagcacaaagtaaaagtgacttaatttgaaattacttctgtttggctagtttgcttagctgatcaccaccaacatcataggtctataaatcacccaactaagatcaggggtgtttcatgggaaaatctacacaaactattcattaaaaaccatagagccatggactgtcatttctgatttctgtttgattctttgtggtcatcattgaatatacaggggcctctatacactctggggagtatctattctcaggtgagcaaaataccgaatactgaatggaaatcaactgtaagtattaggacttcatatgcaacttgaatttttggtgctgtccggagtctagagccccacaatctgttttggttacagtttatccctgtaggataaatgatccatttaactattcatcagaggtgctgtaattttaaattgtctcttgtctccttcagttaattttcagaattaaaaacataccatgggaaaaaaaat

SEQ ID NO: 106944 - DNA, 3824 bp, Homo sapiens
cgcaggctccctgcgggtgcaggctgggctcagctccgctggacccgcgctggggaactctggcctcgctgcactcatggcttctcctagcaaggcagtgattgttcccgggaacggaggcggggatgtgaccacccacggctggtatggctgggtgaaaaaggagctggagaagttacagcacgagagagcatctggctgcccttcatggagacagagctgcactgtgatgagaagactatcatcattggccacagttctggggccatcgcggccatgaggtatgcagaaacacatcgagtatatgctattgtattagtgtctgcgtacacatcagacttgggggatgaaaatgagcgtgcaagtggatacttcacccgcccctggcagtgggagaagatcaaggccaactgcccttacattgtgcagtttggctctactgacgacccgttccttccctggaaggaacaacaagaagtggccgataggttggaaaccaaattgcacaaattcactgactgtggccactttcagaacacagagtttcatgaactgattactgttgtaaagtctttgctgaaagtaccagcatagactgtatgatttctgctattttgcatcccaatataggagtagaataatatctactatcagctgattactagacacatagaacatccagttaagttccgtaagtgcctgaaaaacaaacacaagtttcaacattcaatctaagttacaaatagcacttccattttccatagactctaaaactccccaaattgctatgaactaccacagtattttcctcatttgataagaaacataaggacagcttaactacccttctctatccgaagtgagtcagaaacagaacccaggtttcttgattcccactcctgagtaaaattaaataggttttatgtatgttgcaggtattgcacacttttcctctttgaaatcaaacttttctatttcactggggaaagaaaacatgactgaaagtccagagtgttagcttagagctcaaaatactagctgctgtttcaagctggccccagacattaaactcagactagggccttcacctctgacacttgcccctaagtccttcagacatgttgagagagactgagacaggagtcttccggagtcaggcaggaaggagaagcacagcaatatacattcataatatacgtacaactgactagatttgtttgagacaagagtggtgggatcagagccatgtggagagctcatggcctgtctaaattgttgccatgtggaaatggggcagagtgttgccaattttctgattttttgtgtggaaaaaaatctccaaattgtagtttttaaatttggggaatgcaaatatatatatatataacacacacacacacacacacatacacatacaatccatatacatatggagtatgtaagttggcaataacagtatacatcaaaaaatttacaaacactgcaagacaaataaaatccaagccatccatttgtgaccacagtcataagcattcacttagccaggggcttttagataattgtctgtgaagtctgagaaaagactaagataaccaagatgaacataatgtcaaaggacgaaatcatggggacaatttggattttgttccaaaagacaagtgtttttaaaaagaacctttccatacttcgtgttctgttctatagagttaaaccttttaacttccatggccctttagatctctttcaagcacattccattttcttctgatcatacttcctcagaaaacctttttttggctgggtgtggtggctcatgcctgtaatcccagcactgtgggaggctgaggtggttgtattgcttgaggccaggtgtttgaggccagccagggcaacacagcaagaccccatctctacaaaatattaaaacattagctaggcatggtggtgcacacctgtggtcctagcttcttgggaggctgaggtaggattgcttgagcccaggagtttgagccttcagtgagctatgatcgcgccactgtactccatcctgggtgatggagcgaagaacctgtctcttaaaaaaaaaaatttttttttaattaaaaaaacccaccctttttcatttcccaacattttttggctattatgatcgctatgtgttacttcaaataatttccagtgaatccacacttgatgttgcaaagcctaagtttgctgcagaaatacaatttcctacacttcatacctaaaggagattcagagctatcgctcaaaaccaaaagtcttggtttttaaatgtgcttagacaaaaaaaatcaggaaaggtaccctaatcgttcaacagcaatcatctttggggaatgggcattttggtaggtaaagtgtggtggacgtccttattattatttttgagacagtgtcttgctctgtctcccaggctggaggtcagtggcacaaatctcagctcactctaacctgcacctcccgggttcaagtgattctcatctcagcctcccaagtagtgtgaactaaaggcatgtgccaccacgcctggctaatttttgtatttttagtagagacagggtttcaccatgttggccaggctggtctcgaactcctggcctcaagtgatccacccacctcagccgcccaaagtgttgggattgcaggcatgagccaccatgcccggccccttattttactttatcctcctgattatttgaatttgttacactaagcatgtattttataatcaaaaataattaagatttaaaacaatgtatttgactactaaaaagcaaattatataaatcagttgaataataatgttgttaaagaggctgtttagcactaatttgaccaaatctatagtcaaagtttgattctacttgaattttttggaaatttgctgttgtattacttattctttgccttgttctctgtgaagtcctttcctaaaaaagaaacttatacaatttagttcacaaaactttgttgacctctttctctgtagaaatgaaaactaaatatatataattgagaaataattctgatactcttcattcctataaaagtaattaagatagacctataggattgttgaactttgctgccaaatatagtaaccagtaaccacagctagctgtaaaattgaaaattcagttcagtcaaactagccatatttcaagtgctcaacagccactggtggctattggttaccttactgaccagccaatataggctatttccgtcattatagaaagctctattggacaacattggtctaggacatatattttgtattttcccctcacccaccatccaataatgagtaatagcacaaagtaaaagtgacttaatttgaaattacttctgtttggctagtttgcttagctgatcaccaccaacatcataggtctataaatcacccaactaagatcaggggtgtttcatgggaaaatctacacaaactattcattaaaaaccatagagccatggactgtcatttctgatttctgtttgattctttgtggtcatcattgaatatacaggggcctctatacactctggggagtatctattctcaggtgagcaaaataccgaatactgaatggaaatcaactgtaagtattaggacttcatatgcaacttgaatttttggtgctgtccggagtctagagccccacaatctgttttggttacagtttatccctgtaggataaatgatccatttaactattcatcagaggtgctgtaattttaaattgtctcttgtctccttcagttaattttcagaattaaaaacataccatgggaaaaaaaat

SEQ ID NO: 106945 - DNA, 2919 bp, Homo sapiens
cgcaggctccctgcgggtgcaggctgggctcagctccgctggacccgcgctggggaactctggcctcgctgcactcatggcttctcctagcaaggcagtgattgttcccgggaacggaggcggggatgtgaccacccacggctggtatggctgggtgaaaaaggagctggagaagatacctggtttccagtgtttggctaaaaacatgcccgacccaattacagcacgagagagcatctggctgcccttcatggagacagagctgcactgtgatgagaagactatcatcattggccacagttctggggccatcgcggccatgaggtatgcagaaacacatcgagtatatgctattgtattagtgtctgcgtacacatcagacttgggggatgaaaatgagcgtgcaagtggatacttcacccgcccctggcagtgggagaagatcaaggccaactgcccttacattgtgcagtttggctctactgacgacccgttccttccctggaaggaacaacaagaagtggccgataggttggaaaccaaattgcacaaattcactgactgtggccactttcagaacacagagtttcatgaactgattactgttgtaaagtctttgctgaaagtaccagcatagactgtatgatttctgctattttgcatcccaatataggagtagaataatatctactatcagctgattactagacacatagaacatccagttaagttccgtaagtgcctgaaaaacaaacacaagtttcaacattcaatctaagttacaaatagcacttccattttccatagactctaaaactccccaaattgctatgaactaccacagtattttcctcatttgataagaaacataaggacagcttaactacccttctctatccgaagtgagtcagaaacagaacccaggtttcttgattcccactcctgagtaaaattaaataggttttatgtatgttgcaggtattgcacacttttcctctttgaaatcaaacttttctatttcactggggaaagaaaacatgactgaaagtccagagtgttagcttagagctcaaaatactagctgctgtttcaagctggccccagacattaaactcagactagggccttcacctctgacacttgcccctaagtccttcagacatgttgagagagactgagacaggagtcttccggagtcaggcaggaaggagaagcacagcaatatacattcataatatacgtacaactgactagatttgtttgagacaagagtggtgggatcagagccatgtggagagctcatggcctgtctaaattgttgccatgtggaaatggggcagagtgttgccaattttctgattttttgtgtggaaaaaaatctccaaattgtagtttttaaatttggggaatgcaaatatatatatatataacacacacacacacacacacatacacatacaatccatatacatatggagtatgtaagttggcaataacagtatacatcaaaaaatttacaaacactgcaagacaaataaaatccaagccatccatttgtgaccacagtcataagcattcacttagccaggggcttttagataattgtctgtgaagtctgagaaaagactaagataaccaagatgaacataatgtcaaaggacgaaatcatggggacaatttggattttgttccaaaagacaagtgtttttaaaaagaacctttccatacttcgtgttctgttctatagagttaaaccttttaacttcctgagccaccatgcccggccccttattttactttatcctcctgattatttgaatttgttacactaagcatgtattttataatcaaaaataattaagatttaaaacaatgtatttgactactaaaaagcaaattatataaatcagttgaataataatgttgttaaagaggctgtttagcactaatttgaccaaatctatagtcaaagtttgattctacttgaattttttggaaatttgctgttgtattacttattctttgccttgttctctgtgaagtcctttcctaaaaaagaaacttatacaatttagttcacaaaactttgttgacctctttctctgtagaaatgaaaactaaatatatataattgagaaataattctgatactcttcattcctataaaagtaattaagatagacctataggattgttgaactttgctgccaaatatagtaaccagtaaccacagctagctgtaaaattgaaaattcagttcagtcaaactagccatatttcaagtgctcaacagccactggtggctattggttaccttactgaccagccaatataggctatttccgtcattatagaaagctctattggacaacattggtctaggacatatattttgtattttcccctcacccaccatccaataatgagtaatagcacaaagtaaaagtgacttaatttgaaattacttctgtttggctagtttgcttagctgatcaccaccaacatcataggtctataaatcacccaactaagatcaggggtgtttcatgggaaaatctacacaaactattcattaaaaaccatagagccatggactgtcatttctgatttctgtttgattctttgtggtcatcattgaatatacaggggcctctatacactctggggagtatctattctcaggtgagcaaaataccgaatactgaatggaaatcaactgtaagtattaggacttcatatgcaacttgaatttttggtgctgtccggagtctagagccccacaatctgttttggttacagtttatccctgtaggataaatgatccatttaactattcatcagaggtgctgtaattttaaattgtctcttgtctccttcagttaattttcagaattaaaaacataccatgggaaaaaaaat

SEQ ID NO: 106946 - DNA, 3129 bp, Homo sapiens
cgcaggctccctgcgggtgcaggctgggctcagctccgctggacccgcgctggggaactctggcctcgctgcactcatggcttctcctagcaaggcagtgattgttcccgggaacggaggcggggatgtgaccacccacggctggtatggctgggtgaaaaaggagctggagaagatacctggtttccagtgtttggctaaaaacatgcccgacccaattacagcacgagagagcatctggctgcccttcatggagacagagctgcactgtgatgagaagactatcatcattggccacagttctggggccatcgcggccatgaggtatgcagaaacacatcgagtatatgctattgtattagtgtctgcgtacacatcagacttgggggatgaaaatgagcgtgcaagtggatacttcacccgcccctggcagtgggagaagatcaaggccaactgcccttacattgtgcagtttggctctactgacgacccgttccttccctggaaggaacaacaagaagtggccgataggttggaaaccaaattgcacaaattcactgactgtggccactttcagaacacagagtttcatgaactgattactgttgtaaagtctttgctgaaagtaccagcatagactgtatgatttctgctattttgcatcccaatataggagtagaataatatctactatcagctgattactagacacatagaacatccagttaagttccgtaagtgcctgaaaaacaaacacaagtttcaacattcaatctaagttacaaatagcacttccattttccatagactctaaaactccccaaattgctatgaactaccacagtattttcctcatttgataagaaacataaggacagcttaactacccttctctatccgaagtgagtcagaaacagaacccaggtttcttgattcccactcctgagtaaaattaaataggttttatgtatgttgcaggtattgcacacttttcctctttgaaatcaaacttttctatttcactggggaaagaaaacatgactgaaagtccagagtgttagcttagagctcaaaatactagctgctgtttcaagctggccccagacattaaactcagactagggccttcacctctgacacttgcccctaagtccttcagacatgttgagagagactgagacaggagtcttccggagtcaggcaggaaggagaagcacagcaatatacattcataatatacgtacaactgactagatttgtttgagacaagagtggtgggatcagagccatgtggagagctcatggcctgtctaaattgttgccatgtggaaatggggcagagtgttgccaattttctgattttttgtgtggaaaaaaatctccaaattgtagtttttaaatttggggaatgcaaatatatatatatataacacacacacacacacacacatacacatacaatccatatacatatggagtatgtaagttggcaataacagtatacatcaaaaaatttacaaacactgcaagacaaataaaatccaagccatccatttgtgaccacagtcataagcattcacttagccaggggcttttagataattgtctgtgaagtctgagaaaagactaagataaccaagatgaacataatgtcaaaggacgaaatcatggggacaatttggattttgttccaaaagacaagtgtttttaaaaagaacctttccatacttcgtgttctgttctatagagttaaaccttttaacttccatggccctttagatctctttcaagcacattccattttcttctgatcatacttcctcagaaaacctttttttggctgggtgtggtggctcatgcctgtaatcccagcactgtgggaggctgaggtggttgtattgcttgaggctggtctcgaactcctggcctcaagtgatccacccacctcagccgcccaaagtgttgggattgcaggcatgagccaccatgcccggccccttattttactttatcctcctgattatttgaatttgttacactaagcatgtattttataatcaaaaataattaagatttaaaacaatgtatttgactactaaaaagcaaattatataaatcagttgaataataatgttgttaaagaggctgtttagcactaatttgaccaaatctatagtcaaagtttgattctacttgaattttttggaaatttgctgttgtattacttattctttgccttgttctctgtgaagtcctttcctaaaaaagaaacttatacaatttagttcacaaaactttgttgacctctttctctgtagaaatgaaaactaaatatatataattgagaaataattctgatactcttcattcctataaaagtaattaagatagacctataggattgttgaactttgctgccaaatatagtaaccagtaaccacagctagctgtaaaattgaaaattcagttcagtcaaactagccatatttcaagtgctcaacagccactggtggctattggttaccttactgaccagccaatataggctatttccgtcattatagaaagctctattggacaacattggtctaggacatatattttgtattttcccctcacccaccatccaataatgagtaatagcacaaagtaaaagtgacttaatttgaaattacttctgtttggctagtttgcttagctgatcaccaccaacatcataggtctataaatcacccaactaagatcaggggtgtttcatgggaaaatctacacaaactattcattaaaaaccatagagccatggactgtcatttctgatttctgtttgattctttgtggtcatcattgaatatacaggggcctctatacactctggggagtatctattctcaggtgagcaaaataccgaatactgaatggaaatcaactgtaagtattaggacttcatatgcaacttgaatttttggtgctgtccggagtctagagccccacaatctgttttggttacagtttatccctgtaggataaatgatccatttaactattcatcagaggtgctgtaattttaaattgtctcttgtctccttcagttaattttcagaattaaaaacataccatgggaaaaaaaat

SEQ ID NO: 106947 - DNA, 1382 bp, Homo sapiens
cgcaggctccctgcgggtgcaggctgggctcagctccgctggacccgcgctggggaactctggcctcgctgcactcatggcttctcctagcaaggcagtgattgttcccgggaacggaggcggggatgtgaccacccacggctggtggttgtattgcttgaggccaggtgtttgaggccagccagggcaacacagcaagaccccatctctacaaaatattaaaacattagtgagccaccatgcccggccccttattttactttatcctcctgattatttgaatttgttacactaagcatgtattttataatcaaaaataattaagatttaaaacaatgtatttgactactaaaaagcaaattatataaatcagttgaataataatgttgttaaagaggctgtttagcactaatttgaccaaatctatagtcaaagtttgattctacttgaattttttggaaatttgctgttgtattacttattctttgccttgttctctgtgaagtcctttcctaaaaaagaaacttatacaatttagttcacaaaactttgttgacctctttctctgtagaaatgaaaactaaatatatataattgagaaataattctgatactcttcattcctataaaagtaattaagatagacctataggattgttgaactttgctgccaaatatagtaaccagtaaccacagctagctgtaaaattgaaaattcagttcagtcaaactagccatatttcaagtgctcaacagccactggtggctattggttaccttactgaccagccaatataggctatttccgtcattatagaaagctctattggacaacattggtctaggacatatattttgtattttcccctcacccaccatccaataatgagtaatagcacaaagtaaaagtgacttaatttgaaattacttctgtttggctagtttgcttagctgatcaccaccaacatcataggtctataaatcacccaactaagatcaggggtgtttcatgggaaaatctacacaaactattcattaaaaaccatagagccatggactgtcatttctgatttctgtttgattctttgtggtcatcattgaatatacaggggcctctatacactctggggagtatctattctcaggtgagcaaaataccgaatactgaatggaaatcaactgtaagtattaggacttcatatgcaacttgaatttttggtgctgtccggagtctagagccccacaatctgttttggttacagtttatccctgtaggataaatgatccatttaactattcatcagaggtgctgtaattttaaattgtctcttgtctccttcagttaattttcagaattaaaaacataccatgggaaaaaaaat

SEQ ID NO: 106948 - DNA, 1370 bp, Homo sapiens
cgcaggctccctgcgggtgcaggctgggctcagctccgctggacccgcgctggggaactctggcctcgctgcactcatggcttctcctagcaaggcagtgattgttcccgggaacggaggcggggatgtgaccacccacggctggtatggctgggtgaaaaaggagctggagaagatacctggtttccagtgtttggctaaaaacatgcccgacccaatgagccaccatgcccggccccttattttactttatcctcctgattatttgaatttgttacactaagcatgtattttataatcaaaaataattaagatttaaaacaatgtatttgactactaaaaagcaaattatataaatcagttgaataataatgttgttaaagaggctgtttagcactaatttgaccaaatctatagtcaaagtttgattctacttgaattttttggaaatttgctgttgtattacttattctttgccttgttctctgtgaagtcctttcctaaaaaagaaacttatacaatttagttcacaaaactttgttgacctctttctctgtagaaatgaaaactaaatatatataattgagaaataattctgatactcttcattcctataaaagtaattaagatagacctataggattgttgaactttgctgccaaatatagtaaccagtaaccacagctagctgtaaaattgaaaattcagttcagtcaaactagccatatttcaagtgctcaacagccactggtggctattggttaccttactgaccagccaatataggctatttccgtcattatagaaagctctattggacaacattggtctaggacatatattttgtattttcccctcacccaccatccaataatgagtaatagcacaaagtaaaagtgacttaatttgaaattacttctgtttggctagtttgcttagctgatcaccaccaacatcataggtctataaatcacccaactaagatcaggggtgtttcatgggaaaatctacacaaactattcattaaaaaccatagagccatggactgtcatttctgatttctgtttgattctttgtggtcatcattgaatatacaggggcctctatacactctggggagtatctattctcaggtgagcaaaataccgaatactgaatggaaatcaactgtaagtattaggacttcatatgcaacttgaatttttggtgctgtccggagtctagagccccacaatctgttttggttacagtttatccctgtaggataaatgatccatttaactattcatcagaggtgctgtaattttaaattgtctcttgtctccttcagttaattttcagaattaaaaacataccatgggaaaaaaaat

SEQ ID NO: 106949 - DNA, 909 bp, Homo sapiens
ctgcgggtgcaggctgggctcagctccgctggacccgcgctggggaactctggcctcgctgcactcatggcttctcctagcaaggcagtgattgttcccgggaacggaggcggggatgtgaccacccacggctggtatggctgggtgaaaaaggagctggagaaggtaagcgcccaacgccgctgctccgtgaagtcagcctggagggagggacggcgggagaggactgagggctgaagtttgaataggcgtctaatcccctctagcaaagccctgtgtgttttcctgcctctcccccgctgccttctcttaaagtctgagctagtggtcgaattttgactggtaaaactgcctggaagacttctctgagggctcagcctttagagttaaaggaacccctttgaactaccgaggctgagcccctgagccccgccccccgtatctgctgctggttcagatttgggacttcccagataattttacatgttcactgcttcccgcttcagcttttaaaaaattaaatatgctatacttaatatatacaaaggatatacgtaacatgcgtctacattatgaggcataatgtaatgaattaccaaactaaaacctgggacattgcctatacatcatcttccaaacgacccttatgtctacccatctcagtcccgtgccatcctgaattttttcatctgcttctctttttaaaattgaagtacttttcaacctatgaatataccttttaaacaacagactgttctatttggcttcttggtgagctttataaaagtggcatcttactgtaggctgacctgtgccgtttgatttttattttttaaccctcttctgtaaccaggcggtaagtcggctccctgggttgctgtcctctagagcgggtctccagaatagatt

SEQ ID NO: 106950 - DNA, 290 bp, Homo sapiens
tgactctgctagtaatttaaacttggcatttcatggaggatggttgtgctcatgatgttctttctggaggttcaacactacgtaccgcactttataatttaactggaattgagatgaaggccagtgacatgacaactgtgacctaagaaatgggaagattatctttcaagatagctgcctagaattgttcgacagtgagtaacttccagaagccaaaagagtttggcttcatgaggcaaggtgattgactcaatggcttgttgaatctcagcagttccgccatcttgaag

SEQ ID NO: 106951 - DNA, 1008 bp, Homo sapiens
cctggacaacagagtgagactctgtctccaaaaataaataaataagaaaaaaaaaaaaaagtgcagatggggcggggccagagctgggatggagctgactgttagcatccgttcagggcgtcggcaccatgggggcactatccagcgcagatctgcaagcccagcattcagcactccctcccccagccccagctgttgccagctgcatggggccagctgtgttgggtggggactgtgtagggtccagctatgagttggtggagtctgcgtggggactgtgtagggtccagctatgagttggtgaggcttaacaagcagtgcaggtgattccaatgcacactcatctgtggttttggaccacagatgtagatgttccagggaccacatggacaggggccattgcagacaggcctgaggacctcctgggcctgattgacttgaaggctagtttggggtctgggagctacagagatttggtggcagctctttcccatagggctaagacagatggggccaggaatacacctttcctccagcataggagccggaacaggtacctcaggaccctcttcaccccacagctggtgtctctcacccacatgggagcaagacccagcgccaggcagagaattcaggtttcaagactccaaatcagggctggttgcagtggctcatgcctttaatcccagtgctctgggagactgacatgggagaactgcttgaggccgagggttcgagagcagccctggcaacgtagtgagaccccccccccgccccggccaccatctctacaaaaaaaaaaaaaagactccaaatcagaccggccagactagatgcctagagagatgtgtgggcacacccagagccatgtcctccgccagggaagccagcaactgtgatgctgggggtatggtagtgacaggcggtcgactcggggtaatattcttggaggagccgggcatggtggctcacacctataatcccggcactttgggaagccgaggcggg

SEQ ID NO: 106952 - DNA, 384 bp, Homo sapiens
ttgaggccgagggttcgagagcagccctggcaacgtagtgagacccctcatgcctttaatcccagtgctctgggagactgacatgggagaactgcttgaggccgagggttcgagagcagccctggcaacgtagtgagaccccccccccgccccggccaccatctctacaaaaaaaaaaaaaagactccaaatcagaccggccagactagatgcctagagagatgtgtgggcacacccagagccatgtcctccgccagggaagccagcaactgtgatgctgggggtatggtagtgacaggcggtcgactcggggtaatattcttggaggagccgggcatggtggctcacacctataatcccggcactttgggaagccgaggcggg

SEQ ID NO: 106953 - DNA, 254 bp, Homo sapiens
aggcagatctgaagaaaatgtctaaccacacatttgtgcctgtaactttgcaggcaccatttggcagctgcagtgcgctaaggtcatctgtggcttggtctctgacatcctaggctcgaattttagcatggccatttactatctttggctctggcaaaatcatttaacttttccaagctcccatttccccttttataacatgggaccaaaaagctgggttggggtgacaaataaatggcaaaacacactgagta

SEQ ID NO: 106954 - DNA, 455 bp, Homo sapiens
tttttgagatggagtctcgctctgtcgcccaggctggagtacagtggcgcgatctcggctcactgcaagctccgcttcccaggttcacgccattcccctgcctcagcttcctgagtagctgggactacaggcgccagccaccacgcctgtctaattttttgtatttttagtagaaacggggtttcaccgtgttagccaggatggtctcaatctcctgacctcgtgatccgcccgtctcggcctcccaaagtgctgggattacaggcgtgagccaccgcgcctggcctccaactgagatcttaaccctactaggatgttaaaacatttacttttgtgcttttttccttaaagaaattaagagttcctaaaaggaagtgtcttagtcagtttgggctgctataacaaattaccacagactgggtgttttatgaacaacagaaatgtatttctcacac

SEQ ID NO: 106955 - DNA, 341 bp, Homo sapiens
aggcaggagtcagtttgggttgcaggccagagacagcagggcggggcggtgcagggactaaggccgggcaggtaagcagccaggtagcagcgggcatgtgcccatggtcccacggcagagctggctgctgaagggctacaggcagaagcatgaagggatcaagcgcacattctagaaagctctctctggctgcattctggaaggtggatcggaaggaagcaggagtaggggcaggcagagccagctcctgtgacagtcccagaagaacggggtggcacggggccagaagagggctcaggaacatggggtgcaaccgccaggcctgacgaccaagactcggg

SEQ ID NO: 106956 - DNA, 444 bp, Homo sapiens
actgattgaataaagaagatacaagttacagaaaagggtttttccctccctatgcgtgtgccctttattcttaaactctttgctttattattttgactgagactttctcagataaattctaattcagtttactccatgattttactgagattttctcttataaatcctgttgtatttatggtatgagcgcttaacactgtattgggtactataccagactttgggtagagcagtgcctaaaaagacaggctccttgtccaaaagttgtgaggaagagagaggctaaacaaaattgtaatgtcacttactgtttcaatctctaagtcaagtcttctttagtcacattttgtatgtttatttggtcccttctttacattctacctttggattaaaataagcacgttttcctctttgcattgtttttactaaagcactaatctgtgt

SEQ ID NO: 106957 - DNA, 319 bp, Homo sapiens
tctggtacccatttgtataagtctgagtaatgtcaagtctctttattgattatcaactacctgttgtgggaagtcagggatcctgaatggaaggaccagctgaagccatggcagaggaacataaattgtgaagatttcattttaatatggacatttatcaattcccaaataacacttttacaatttcttatgcctttcttactttaatctcttaatcctgttatcttagtaagctgaggatgtacatcacctcaggaccactgtgataattgtgttaactgtacaaattgattgtaaaacgtgtttgaacagtatgaaa

SEQ ID NO: 106958 - DNA, 658 bp, Homo sapiens
catgattagttggcttgcgcactgctcaccaatcaaaagagtcgcccggcggcgttagcgtccttttctgaagaaatccaagtactgggaatgcatgaggtcaattattgtcactcgtgaatcaaccaggtagctcctatgcgcaagcgttcgatatctatattctacgtctccctgccctgcaaataaaatgaaaactttgtaatttaatgtgtttcctttttgtcttcattgccagaaaactcagagctgaatatcttatccaggtgttataatcttttttttcctctttcacttttgatacctcagaataactttatctgtttccttcaggtgggttgtaatctatcttactctaaaatgtcttcacttgtactcggattaagacctcttaggtgtaaataaaatataaacctaaataattagatattgaaaagaggtaaaaggaaaagataaactgataggaactcacttttagataacagtagcaggacttcaaataaaacattcattttgaaaagatttgagtataagaaatgtgatttcaggcccgatgcagtggttcacacttgtaatcccagcactcaaaaaggccaaggtgggaggaacgcttgaggctaggtgttcagcaccagcctggacaacctaggaagacctc

SEQ ID NO: 106959 - DNA, 170 bp, Homo sapiens
ctgtagcccctggatgagctcatctactccatggcttacactctagtctctggatgagctcatctactccacagcttccactgtagtccctggatgagctcatctaccccatgacttcctctgtagcccctgggtgagcttgtctactccatggcttgcgttacctttac

SEQ ID NO: 106960 - DNA, 515 bp, Homo sapiens
  misc_feature (511)..(511): n is a, c, g, or t
gtgcagaattctgctttctctcttgagggcttctcccaagaacactaagaggttacagagtccagccaggccagtcctgcttccaaatatcttgccaagggagcctgggaaagctgactagttcactggtagatttcgcattttctgaggctgtggcttttgtgcatgggcccaggtttccactctgtttggccacagttcccaaaagcacatcttccttgtcagagtaagccatgcactctgctggaaccagctctcaataatctagaccttgatattgagcttaggagtctaggccagttcacccttttcttcttggccagattctccttgcagaccatctcagtcccatatacagaatctgaaccccaaaagggtaggaattataaatctctacgttttccccaaagcttctagttccccatgcaaatttggccacattctccccaaaacataccactcctgcataccatggagtattgatggagcatactttgataggccaaaaaanaaaa

SEQ ID NO: 106961 - DNA, 485 bp, Homo sapiens
cgaggtactctagaggatgttccgggagccttaaccctaggcgctgctatcatgcctggctgattttgtatttttagtagagacagggtttctccatgttggtcaggctgatcttgaactcccgacctcaggtgatccacccacctcggcctccccaagtgctgggattacaggcgtgcaccaccgcgcccggccagaaattataatcttatgggaccactgtcatgtgtatggtcctttgttcattgaaaatccttatgtgctgcatgactatatctgatatttacatgtgtgagcttcgtgctcagtgaggactccctgtatattaggaataatatcacaggaccagcaaggaagactagcctggaaccagaggtgagagttgtacaagatggcttagagatgacattgagagctagattatttagggccttgtgggctattcagaagcctttggattttattctaagacggagagccattgg

SEQ ID NO: 106962 - DNA, 117 bp, Homo sapiens
acgatcatatcccagcctgctctcgggtcaaaattcacaagcgtgactgccttttagtggaggcccagagaggttaagaaacttgcccaaggtcacacagcttgtcatgggcagata

SEQ ID NO: 106963 - DNA, 264 bp, Homo sapiens
attaatacctgaggatgaaattctaaaagtagaattttaacatcaaagggtttgcactttaaggcattttcagcctccatttctggctgttgctgttgtggacagtcttgggcagattttgaactctttgccttactgtggggtggtggaaaggaggctttaggagcagccagagcagggttcaaactccagccctgccagggacaactggccaaaaggtcgtgaactaatgactcagtgagttttctcatttataaaatagga

SEQ ID NO: 106964 - DNA, 350 bp, Homo sapiens
gttaatacttggaagatttttaaaatctttttgttttggtctgtttttgtttataacagctgtaatgagatataattcacataccataaaatttatccttaaaagtatacaactcagtggtttttagtatagtcagagttttgcaactattactagtatctatttttatattgattgattgattgattgattttttgagacagagtctcactcttgtttcccaggctggagtgcatggtgcaatctcggctcaccgcaacctccgcctcccaggttcaagtgattctcctgcctcaccctcccgagtagctgggattacaggcatgtgccaccatgcctggctaattttg

SEQ ID NO: 106965 - DNA, 455 bp, Homo sapiens
tctagagtaatgactcgtggttaacgaataccaacccccttttaaaacatgggcaaaagatttgaatcaacatttcagcgtacagacaataaacaaatggacttaagcacaagagatgctcaacatcagtcattattagggaaatgccaatcaaaactacaacgagataccctatatccactagtatggctatcataacaaagagtaacaaacgttgaggaggatatggagaaactcgagccctggtcaggtgtggtggatcacacctgtaattccaacaccctgggaagctgaggcaggcagaccacttcactgaacccaggagtttgagagccacctgggcaacaagccaaaaccccatttttacagaaaatacaaaaattagccaatcatggtggcatccacctgtagtcccagctactggggagtttgaggtgggaggattacttgagcct

SEQ ID NO: 106966 - DNA, 443 bp, Homo sapiens
acatagaagatgcacattaaatgcttagtaaatgtatggaaacatttcacatatgagtagaaagaaataatgcagaggaaattagatgtaagtacatatgtataattgtaattttacttatgattttgaacaatctatcttcttatagcagcttcctgctagttttacctaactcagagctaactttgtcttaccttctccaggaggtaagatttagaaacctactaaagtgctctcagacatcagttattttgtaagtcagagttgttatctatgatacattaacatgtttgatgatgtgaatgctcaaattttacaagatcttttgttcctcttctgcataattcagttcttttaagaacaacttatgtgttgtagttccatgtgtgtatttcagactagtcaacacaactaaaatctgatcatgattactagcttttcaa

SEQ ID NO: 106967 - DNA, 439 bp, Homo sapiens
acaacgtctgcctccacgtgaaccacaattacagaccccaaacaaaacgtgtgtgtgtgtgtactgggtgtgccagcctccttatacagagattgtttagtagcccatcatcaagttactaaggttatttgctcagtagttctactggatatggattgagacatcacacctagacttgcctagctcctcttgtaaccagagtatcttttatgcttcttggaaagtaagagtgtagtcttgcccctgaagtagagttaaaaggtttgcacgataatctaacccttaaccttatcctaatctggactgtggtctcacagactgaactaattggcgcagtattcaagtattctaatacttggtgattagcaaaaacactacaacccagtgaaataggttgggcatgtattcacatgcctatttaacatatgagaaaacagat

SEQ ID NO: 106968 - DNA, 269 bp, Homo sapiens
gacttgtgtttaaagataaaaacaagactattttatatttcccaaagattgtttttgaccctttaagtaggaaatgattttctaagcctaagtaaaataaatcaaagaagtactctgttatgcaagttttttaacttcagagttatgacttctaaactgccatgcccaccaagggcagcttccagggaattaaaataaggataggcttgtggcatggcaaatatttgacaaggatgtcttcccatgcctagtcaactctatgaaatact

SEQ ID NO: 106969 - DNA, 422 bp, Homo sapiens
ttcttgaagtgggtagctgccattctgggagctggggctgaaacgggtattcattgccattcagaaccaggcctttgacagctctgctgtctcacatctgctgagggcatcaagcaccggttcagtagggaaagaaggatggggaaaggctgtggggagagaggttgggtaacattagggagatgccaagaatctggctattcaagacagtgttcacagcaccaacaattgcagaaaacattcattgagtggttgtaaattagcacttgaatcccactatcctctttttcaactgccaaatttgtttgtttttcaccagaagagacttagtgattggaattttgtaattgtgatattagctattggtcctgcattcatcacagaactaattaatgcacccatagaagagaaaataaattccc

SEQ ID NO: 106970 - DNA, 420 bp, Homo sapiens
ggcggagacagcaggaagcccaaaacccgagctgggtttcctgcttggagtcgcagggtgtggcaatgttgaagttcgccgtgcccctgctccctatgggaattagaatccggtccaggacaagcatcgggaaagggggacagtttgtgaccgaggaaactaggactgatccagaacagcgcaggcagagacgcgctgggctcatgaagcgcgacaaaggccccgacccctcttccgcttggctcgttggtctaggggtgtggttctcgcttagggaccacagggacaagcccgggagacccaagaggtcccgggttcaaatcccggacgagcccacactttaagaacccagcaggggctgggcgcggtcgctcacgcctgtaatcccagcactttgggaggccgaagcagtggatcact

SEQ ID NO: 106971 - DNA, 409 bp, Homo sapiens
agacggcatggggtctgtaagtagaatctgagcctggaacgaaggataatcatgcatccctctgcatagatgaggatcgcactctccttgctgcccagcagtgagtgacttcagctgctctcctcaaggctatttttggaatcccttttcaaatttcttccagagttattggtctgttcaggtattgaactttatgtgtcaactttgcaaatttaggttttctgacaatatcattcactttaatcaagattttaaagttaattagcaagaatcagaaattcctatataatttttacaattacttctgtaattttagcccttcttttaacgtaacttgttttcttttaaaatacaggtccatatgtatattaagtatttttttttcttttttctttttcttttttttttt

SEQ ID NO: 106972 - DNA, 382 bp, Homo sapiens
tgcccttataaaaatctttaatccttccactcttttgggtattgactgggcgccaagtggatttgcatattattacaaagcgaaatgtgtgaatacagccagccagccatcctgttaaaaatctgggttgaaaaccacatggatttgctgaacaacaaattcacattggagaggtatcaccaactgctgcctaaaaacatccccaggatgccggggcgtggaaatgtagccgagcccagcttctgaaacacaatgattccactgaaatctgcatctctttcagtgggacttggttaaatttagaagagtccctcagtgaaggggtcaccgggcaaatgaccagagctcacagaccagcagacagcccaggtcccgcactgtc

SEQ ID NO: 106973 - DNA, 598 bp, Homo sapiens
cggacggtatatggcatagctgttccttgtgtaaactctgcgatgcagaatcctcgatacagtgtactataggtgtcatgcctttaacccttgtatagcgtcttgcttttatactcatgtcatatttgacctcaccaagacacgactgtgtggactgctctaggctggcacaggcccctctggagagctgttgcatgaggtgagtgggctgatgaacagatgtttttagcattagggcgctcttaaactgtctcacctagtataaaagttcaaggttctcattcactgcaaaaagacctgcaactacaagaaagagaatcccaaggtgggctttgcatggatatagaagtcttggtattaaacctaacttttctaaggaataagacattttggggtaggattatctattggtgtataatattttggaatgttccttattactgccttacctttctccttgactgaaacatttggtctctttctaacaatagtgaggtggaatagaaatacactccatacaaaagcaggttccaggggaattgaaagtaagccacagatgagctagagaaggctgctgataagaatatgttgcacaaat

SEQ ID NO: 106974 - DNA, 380 bp, Homo sapiens
gtagtaaaacacacgaaaccagtataaaattttcacctatctcttttattaacagatttacattcccatcacaaaactacttagtttactgggtaatcaaatcctattgtttttcccttacacattttgtaaaaagaaaaaaaccttttaccttctaaaacacgtaataagaaaattacatagataaaagacattactgggccaggcatggtggttcatacctgtaatcccagggctttgagaagccaatgcaggaggattgcttgagcctgggattttgagaccagcctgggcaacacagtgagatcgtgtctctacaaaaaataaaaatattggcccagggagtggtggctcatgcctgtaatcccagcactttggga

SEQ ID NO: 106975 - DNA, 353 bp, Homo sapiens
ctgagcatggcaaaagtagcctcaaagtccagttttacaatctatgctatctcagcacacgctgagcactcaccatgtgataggtgtgttcaaaacatcacctgtgtatggttttatttaatcctccaagcacatctgtgtgctattattcccatttcagaggctgagatgaaactgaggcccagagacgtgcattctcgccccaggtcacacagcaagggctttgcatggctggaatcccctccagagctgcctctcctcgccccctgtcaccacctgcaggctttcctgggtgaagtgattcttgcggagggattctagtcctctgtgcagacaggaattgtggtggaggc

SEQ ID NO: 106976 - DNA, 699 bp, Homo sapiens
gcttggtacctgggtagaattcacttctccaaagatgtcattttatttattttttattgttttttgagacgtggtctcactctgtcacccaggctagagtgctgcagcacaatcgtggctcaatgcagcctcgacctcctgggctcaagcaatccttccacctcagctcccaagcagctgggaccacaggggtacaccataacacctaggttttgttttgttttttaattttttggcagagagagggtttccctatgttgcccaggttggtctccaattcctgggctcaagcaatcctccagcctcagcctccagaagtgctgggattaccaccacacctggccaaaagatgccattttaaagaaagccttaaaagtcaggcacagtggttcatgcctgcagtcccagcactctggtagcccaaggcaggtagatcgcttgaggccaagagtttgaaaccccatctctactaaaaatacaaaaattagccaggcgtggtggtgcacgcctgtaatcccagctacttgggtggctgaggcccaagaatcacttgaacccacaaggcagacgttgcaacaagtcaagatcacaccactgcactccagcctgggagacacagagcaagattctgtctcaaaaaacaataataaaattaaattaaattttaaaataaagtctttcagctgaaatgagtactgt

SEQ ID NO: 106977 - DNA, 176 bp, Homo sapiens
atgggatgtctgaggtgaataagggtgcttaccttcatggcccctagtgaaggggccaggtgggccaggggtcttctctgaaaggtatctgagtcccctcatttctttttttttttttttttttttttttttttttttttgggcccccccccaaaaattccccggcgggtgcccgg

SEQ ID NO: 106978 - DNA, 669 bp, Homo sapiens
gatgttgatttttgccatagaaactgtaaattagatcatccctagatacagaaaattgccaacaaaaggggagaataaaatgtaggtatgttacacaaccaaatgtttcctgtttgttgcgtgaaaataagtataattaccaaataaaacgttttatatctggttttatggaaggacaaaagacagtaaccacaatgaacacccactgtgtgcattgataatgtatgaacttttaaatgcttcaattttttgccatggtcacacttcggattctgttctagtctctctggtaatagtatgctgtaatcccagaagtttctatattttgaaatattacagagggactatactttagcctagatctataatttgacttcaggatatgctttaaatgccctttaagtgtatttttgttgtttacttttctgtttatagttgtttagaattgttctcattgaggcattgtgacattgcatactttagagcacttaatactactttttttttttttctttaaatgataggagacttgaatcttgcccacattccttcaggtatgctactgaaggttttgtggcaaagtgctattagcagaacaaaaaggttttaacaccgtcttgaaatttttatttattatctggtcccaggtgtgtaggctgtgagtatttc

SEQ ID NO: 106979 - DNA, 599 bp, Homo sapiens
ttcctcgcttctcctgaccgctggaggtctgtgctcttagaagctcctgctctggcctctggcaggatgagagcagagcagttgggagcttccgtggagggcagcctgacctggcagatcactgaaggtgataattagaggctcaggctcacagctgcattagaaaagctaggaagcacaaagggcctcggcagggaaggccattagtcaccggcctaactgccctggccgggtctggttgacctgggcgaggacctggctatgcccatgtggctccaacttgtggatgctgcctctgtgggtgggcggcgggacaggctcaccccactggtgctggggcagtggggccagccaggcctcaccagcacatggacacctccctcctccctactgaagagctcgtggggtggagggcggcatcccgctctcccccttccttgtggagggacgtgaagggaggctgtgttggccacaggtcctccctgtggcccactcctggcccctccactggccaggctcctcttgttcccaggctggaactcctggcccgtgtggtcttgctgttccaggatggaatcgtcccatttctaaggggtacc

SEQ ID NO: 106980 - DNA, 267 bp, Homo sapiens
tgtaaaagttatcagtaatcctaattcttttcctgggttttccttttgtcacttattaatcagtttttgaaaggacgaatgaatttagagatgtactctggagcagtatcatgttaaaccaggggtatattagaaaaatcatcctcataatcattctgggaagtttttcctccccaaaaaaagccatcctgatgggttttcaaaaccagaaaaaagctcttaatgaggaacagaccactggagtacccatgagcatctcaggaaaac

SEQ ID NO: 106981 - DNA, 500 bp, Homo sapiens
tgcaagaaaactaagaaactcaagtaggcagggcttcaagggttcccaggggtttggctggcagcatctgaatcacctaggtcaccaggttcaaaaagcaacttcctggtttggtcctactcccagagactctgcttcctgaggtctggggctcacacctgcattttagcaaatgctccaggagatgctattatagtgatgatgacaccacagctgctatgtaataactacttgttgcagcctgtattaaggtgacctagctggtcactggctcccccaggattcacacccaagcaatttggcatgtctgtgctgagactcctggtaaagctgggtttggagaaaaggacggttatactaagaccctgttcatgaacatctactgtgcaggcactgagcttagccttcccaggaagtcagcccactgccacatcccatgatggttatccttttgcagaggaggaagaccaatgcttcacaaggagagggaaaatagccca

SEQ ID NO: 106982 - DNA, 499 bp, Homo sapiens
ggcaccaaacccagacaggaaatatttattttgggtctcaggaaaaggttccattttcctcccttgagttttcttccattcctggacttgctagggtgttcttggattattggaatgaatcgtctatttgaaaagagaaaaccttgcttttattctaaactccgtggtgatgggtgtgtgtgttttcaaaattggttttttcgttgctatttagtgcaaggcccaaggacaggtctggcttaagccaggtgtctgccaaacatatacccaaggtgggagttggggtgagaattgtctttaagaccctgggagagaaggattctaaagtgactgagagtggtgtcctggcttgggtcccacagatgtgttgggttttgattggtgatgacctgtgggtcccctgaatgtgtgtgtggattgacatgtgggtgttagccttcgagaaggtggagcagtggcttatagaaggcttttgtggttttatgttgttggtattgct

SEQ ID NO: 106983 - DNA, 384 bp, Homo sapiens
ccctcgcgaacgtgtatcccatttgggcatcaagaactactcctgtagactcttcctttgtaagttatcttacagctggccattgttttttattttcactgctagcacctcagtccaactctttaggcagtaaataacagaacatctgggttaggacaccaatggatctctcttccatgaatctcttttccctctgaagtttacaggactgctatatcagcagcaccattttcttgtaactagcctatccaaaatcctttactgtttcccagaccttttagcttcacattcaagggcaattggctatcggaaaacaaacacaagatggatgagtcaccttaaatcccttttttagcaagctggtggataactaaacaaagagag

SEQ ID NO: 106984 - DNA, 612 bp, Homo sapiens
tctttcttgtgctgatcatttttattgtcgcacatttcaggcaaataagaaacagcagagaaccacctgtgttacacaccacccagtatgagaaacaaagttacaaatgctatgggaaatattttttgaaaactagcatggacctcaagaggggcttgcactggagggtgcacctgctttgccagaggtggaagccttttgcagcattgggcctccctcctaacactacacatcctgctggctggcctggcctcacctggtccccgagctccacactggaactggacaatgagactggccccaccgttaggtctaaatgaagaggcacctgctgtatagttgactgaatttgtcacctcctgctcggtgccatttctgcttgtctccgtgagcctggggcaaggctgtattccttagctctgagaaatctgtgcagtgccttcagagagacaattccagtgtcagatttctgaatctgtcacctaagccatgacaattcgttgtcttttttgtaagcctacttctgcagttactatatgaaaaatctcttgtaaagctcttagacaaatgggcatacttcacaacacattatgatgtgcatgtgtgtgttct

SEQ ID NO: 106985 - DNA, 270 bp, Homo sapiens
tggtggggggtgtttgtttttgttttgctttttagtttgcttagttgtctctgtaactaatctcaccagactcttaaccaggagtgtaaatcttcttctgaaatactcaagcatgaatttcagtctatcggtcctccttttaattggtgacatccctcctgaagatctctcgatttattttcacagcctgagttctttgctctctaagccgtcacacattctgggagttctcttctccctctttctggggatttcctttacctgtgctga

SEQ ID NO: 106986 - DNA, 452 bp, Homo sapiens
gagcaacattagaccagatactttttttcaccaagaaaaaaaaaatcagaatcttggctttcaacattagaaatttctcatcccagatacttaataagtgagaataatttgccttccaattttttgacacccaatagtttttccaagttaaattttaaaaaagcataagaaagtaagcagctctggcggagcgcggtggctcaggcctataatcccagcactttgggaggctgaggcgggcggatcacgaggtcaggagtttgagaccagtctgaccaacatggtgaaaccgtctctactaaaaatacaaaaattagccgggggtggtggtgtggaatgcctgtaatcccagctactcaggaggctgaggcaggagaatcacttgaaccctggaggtggaggttgtggtgagccgaaatcatgtcactgcactgcagcctggtgactgtctc

SEQ ID NO: 106987 - DNA, 810 bp, Homo sapiens
gatctacatattatgaagatgtaatgagataatgaatgtaattggacttaaaacagtacctggcacatagtgtattattactattgtatttgtcaccaggtgcttttacacatatatgcatataattagctatgcgatgctcagttattatgtccaactacttcagggatgatttcaaggggaactcaaaatgacaagcaagtggtatacatgtccacaccctagattaggaaaagatagccttagtcttttggtgtgggtacttagacctcttttgtccaggctctgttgtaggtgcttaagtgttaggacctttaggaatgattcttgcaaaagtgaatgttaaaggcttagagattactatggcacgcccacatggaagcatctgtttattctggtagtgcttgtgacaacacatagacttctcagaaccaagatgagaaaagacatcctcacaagatatcaaggtttttctgtgtgtctgaaacctcaagagataaaggagtaatctttgggcatgagaacccatgagagatatgaagggatttaattgaatgaaagaatgaataaaaagctacatacatttattaagtattttgtgtatgttaggccctatactggtgatagacagacatgtagtgaggctgaggtgggaggatgggttaaagcatcttcacagctcagtactgggaaggtgagtggacgatggttaagctgcgaagcggaggtggagtgagccaagatcatgccatgaactccagctgggtaacaggagtggagaaccacatcttaaaagaaatacaaaacgaa

SEQ ID NO: 106988 - DNA, 367 bp, Homo sapiens
ggtagtattacagctagaactaagacctaaagtcaagttttgtggtttatctttctctatacagcatggccacttttgtaaaaattagatgattagccaaaaatgaaataaagcaaaaacaaacccccaaacccacccatctgcaggaaggaaggcagaaactgctcaagggcagagaaaagcgcagcttggccttttcaaataaatcacaaaacacgtttgagtttaaaaatagtgttgataacataacctcacttaggctgggcgtggtggctcacacctgtaatctcagcactttgggaggccatggagggtggatggcttccactcataaattggagaccagcctcggcaacatggcaatacc

SEQ ID NO: 106989 - DNA, 487 bp, Homo sapiens
ttcacaaggacgtgaggcattcacaccctcctgtttcctactagggaaggcactgacgtcagttttcacacattggaagcctggggccaggcgtgcatttttattttggtgaagaattctttatgctccttgatgttcctataaaacacaagcagaacgctagaatttgctcgtggtgcgtccgaggtctgttgctctctgtgcggtatctgcaggagattcagagtaggatccttttgtgacattggcaaaaacaagcgcaactgtcggtgattgttagagtgtgtgtttagccccttagatttgagggaatttgtgtgtgtcttctctgtctgccctctcttaaattataaaatccccaaggggcaaggtgcagtggctcatacctataatcctagcacttttggaggccaaggcaggtggatcgcttgagtccaggaattcaagaccagactggtcaatgcagcaaaaccctgtctctactgaa

SEQ ID NO: 106990 - DNA, 323 bp, Homo sapiens
acagccatccgcagaggcagctttttgctagagcctcattttgcccctgaaatcttgggctgtgtgagttaaacaagccctctccactcagaccagctgggcaggagtgtttgaccctagagagatttatgaggtcggtggagcagtcctgcctctggccccagggaattcatgctcagcccgattttgatggtgaccagacgtgcctcctaaaacacaaggtggccctggaggcctggggaggagagtgcagtctacccacttggccccttcttcccggccctgagtcagtgaccttcacctaaatcctaaaaggactctgt

SEQ ID NO: 106991 - DNA, 232 bp, Homo sapiens
atccaagatatcagcatatttttaaagtcccaggtgatgtgatgtaatgtaatatgctaccaggttcaggatatagtggaccaagcccagggtgggctcagactccacagagccccttttctgtggtctgagtagatattcatggggtgaggagtaaagctctgtgttcatgaagaacggagtgggctagaagccaggacccctgggccggcctcgtgctgcagacacttct

SEQ ID NO: 106992 - DNA, 406 bp, Homo sapiens
ctcctgggttgtgtgtgtggcaggctgatctctagttctccaggtgacgtgtgcaggttctggtggtgggtaggcaggtgtttcctcaggcctctcagtagtaagtgtgagcgccagctctggaggcagtgtgagtcagtctccaggcccccagatggtacattcaggcaccagcatattcctatgcatttctagataatagtatttttcagaaaacctgagcatatgtcctattaatacaactttccctcatcagctctgcatgagaagaagggggatttccctcagtagaacagtcacaatggaatcatagacttgttttgagccactcactggtatgtgggggtaggctaaaatgataagctcagaatctaaaccttagactagggaatggctaactttttcc

SEQ ID NO: 106993 - DNA, 306 bp, Homo sapiens
ctcaactgtaaatcaaattatattcttcaggaccaaagcaggctgccttaacagttgtatgcatgtccctgcatacatctgtgagttgtgtgtgtatttaaaatgtgtctttaattaaccatcccattgtgttcaacgagttggtcttagccactgattgaaaggcactgagttgcttatcaaaaacaaattgttgccatctgtataataaatgacgaatggtattaacaccataatgaaattcagaaatcaagattgataaggagagggatatttttgatacccaaagtttgcttttttcccccc

SEQ ID NO: 106994 - DNA, 311 bp, Homo sapiens
tcttttgccttgacctcccaaagagctgggattacaggtctaagcctgaataggatttctgtaacatttaatagaaagagtcctggctaatagttccttggtaaagggcaaggtatacagatagcaacaatcaaaactaaagaacataaagcagggagaatttagagatttggttcctttcttgagcctgcacttgtgggtaagcttctcttccaaagatatctgcatttctaaaaaccttcctttggccactataacacttggtgtcttaaagcaacagaaatgtattctctcacagttctggatgccaa

SEQ ID NO: 106995 - DNA, 401 bp, Homo sapiens
tatcactgttttttagttttccttgtagaagtctttcgcatccttggttaagcgtattctgagggtttcttctgtgtgtgtgagtgtgtgtgtgtgtgtgtgtgtgtgtgtgtgtgtgtatgtggctaacataaatgggattactttcttgattgcttttttcagctagttcatatatacagtttttaatcttaaaaaagcatgatatttttccattttacaaaaggatagtaggcaaacattaaacgttaaggacttcctcatggatacaaatcccagtatatgtctaaataaattaggactcaaatttatatacatatagctactttccaagtccaatctttctcccctgtataagtcctccttcccctgaaaaataaatggtttggggctttattctg

SEQ ID NO: 106996 - DNA, 570 bp, Homo sapiens
ctagatattcgtatattgcaatattcgtttttttctcttctgcagcttttttttgtcttctgaggctagttcattcttttatccctttgaaaatattgatctgaaaaaggtctatatttatgtttataaatatatgtatatatacacacacacagccatcccttatcccaagaactctgaataaccattcctctaagccgtgagtcataagctttgcatgttgaaggtatagactcaaacctttgaaacccagatcaacagatttactttctagaagcatctgtaaattttccagatgaatcaatattgggtctagtaaccattcatctttgcataatttggtctgtatttcattctagatcttattgaatttcagtaaaggtcaaagatagtactagctttgatgcccagtactgttctgtggaagaatcagaactaagtcatttcttattctgaaagccagtagctgctgggagaaaagcagacagataatcctaaagcagaaaatttcaaaatatgtgtatatgtcataatatatgcattatctatgattggaataacagaagaatc

SEQ ID NO: 106997 - DNA, 429 bp, Homo sapiens
ttggcaagaaactgactacttaaggctttcagttaggtgtagctatgcttcccttgggcttctcagtgtgttcattgatggcttgtgattccagttgaaattcctggtctatacctcagcttcctccaacatgggggtagtggtggggcctatttttggggttttgtatgattcttatgtttctataagtctgtgttttgtttccttgaaggggtaattgctagttgtcttccatcatattttatctacaatatacctaaattttttttttcgggtttacatcctttcctaatttctagtgttagtgaagatttctctttttctcttatgtttgtcatgatctttagtcacttcagtacttgctggtagtgaggggagaatgctcaagttaagtctttctggtatcttcccttccctttttctcctctc

SEQ ID NO: 106998 - DNA, 667 bp, Homo sapiens
tgcctctgaatgcaaggcattgtgctgggtggtacccacagctagttaaatagagccttctgggtcaggagcttacactctaaaatggatagtttcaacagagcaggagaggagaagggcagagaacgtggagctaaaaccataatacagagtttgtggttaagagtttgtggcttctgagccagagtatgaatgagtaagtcactggataagggaggaagattgtgtccttcctctggcagaagagctatcagtggagaaggggcaagatcatgttcagagcagaataaacgaacttcatttatgtgacagaagtagggatctgtgggaagttggcaggggtagggtgaggtgagtttgtgtgtcaaggcttggtgctagatgtggcaaatagagtaaaaatatgacacagagtgggcaagagaccagagctgtatataccacagggcctgcagcggcctttgtatgactagcactggaaatgtagggcctacttagcagctaggtttattttcagaaatgtgcatggggaaatagttggattgaatatagaagtttgagtgttgactcttgtatttaaatatctgcttggctttgaataaatcatctaatccttgctgaactgtggtttcctcacctggaagatgggaagaataatcattcttcc

SEQ ID NO: 106999 - DNA, 272 bp, Homo sapiens
gttgtctgtaggctcctactgatagggcttcaaatgaggaatgaagccctatctgggcagctctggggaagggagtaaggaggaagggaatacagatgctttcattgtagtctcagttccggaacttgtgctcagcttttcacataaaatgtctcatcaggatgccttgaagctttttaaccccaagaggattcctggttctcacccctattcagtaagccatggacagctgcacaggaagtgtggttctgaagggacccagccccactgtg

SEQ ID NO: 107000 - DNA, 256 bp, Homo sapiens
cccccgcgcgcaggtatatagcaagcactatctaaggtagtctatgtgatacatgcatcacagagtacagatgactgtagctctgctgtcatttgagctgccaggcactgtgctgggtagtggggatatggagatgaattagacaccatccccgtcctcaaggagttctcagtctagtgagagagatcaacatctatgtacacatataattacaacaatatggtatgctctacaatggaggtatgtataagatact

SEQ ID NO: 107001 - DNA, 182 bp, Homo sapiens
cgagccgagctgggcggaagaaggcgaggcgggagccaggcccgtccctgaccgccgcggcgccgaccgtgacaaacactcatcgttgggtggggctctagtgcagtccgttggtgccaatattttataagcgacgttttcaaactatgtgaagatcctttcttttcttttctttctttctt

SEQ ID NO: 107002 - DNA, 353 bp, Homo sapiens
cggtctgttgaatgtctcctctgtaccaggcaggaaggggccgtgggagaagagtccactgataacacagtgttgtcggtgccctgatggggcatcagctactctgggagtcccgggagggacagaggggccagcccaaagctagagatggctgcgcagaggcagcaaagaccagagagtttgggctttatcagcaccaagactggggtgagaagtgcctcaagcagagacggctttctaggtgtgagccgcatgcaaagtggagctttagtcaacgaagcggaaacaaggactgcaagacttgagggtttccaaggctcctgtgagaggagctccctctcctgttgatttct

SEQ ID NO: 107003 - DNA, 415 bp, Homo sapiens
taccccagtggggactctgtgtgggggctccaaccccacattttcccaccacactgccctagtagaggttactgtgagggctctgcccctgaagcaggcttctgcctgggcacccaggttttctcatacatcctctgaaatctaggcaggggctgtcaagccttcactcttgcactctgtgtgcccacaggcttaacaccacgtgaaagccaccaaagcttacagcttgcgctctcccgagtagcagcccaagctgtatctggggccctttgaatcatgactgatgccatgactggagccacagcagctggaatgcagggagcactgtcctgaggctgtgcagggtagcgggggcactggctggcctgtgaaatcattcttttttcttaggcctctgggcctctcgtggcggggg

SEQ ID NO: 107004 - DNA, 649 bp, Homo sapiens
gccccagaaagcagatgaaatctttctgtgaagtgctgacttcacctccctgagagccataaaagaatgccccttaacacagtaagccaaagctctgcaggatgatgacttctggatggaaaatgcccctcaatacagtaagccaaagctctgcagggtgatgacttctggatggaaaatgcccctcaatacagtaagccaaagctctgcagggcgatgacttctggatggttgctccagttaacatggtgcaagaagctgtaactgtcagcccaaagaaaaaggcaatggccgagaataatcagagcccataatgaacacagttaatggcacccgcaacacgctttctaagtgatgttaacatcaaaatatggaaagcaacacctccagctatcctgctgccttcctcgaagtattctttctcaatccttatatatatgctccctccacttgctgcttttctttttttagagacagagtctcactttgtgcagtggtgcaatcacggctcattgcagcctctaattcctgggctcaactgatcccctcacctcagcctcctgagtagctaggactacaggcatgcaccaccaccatgcctggctaatttttaaattttttatacaaacagggtctcactatgttgccc

SEQ ID NO: 107005 - DNA, 199 bp, Homo sapiens
cacagagagcttcccttgtcctctccttgtagagtcatcaatgctttactctcctggcattcgtgtatgataatatacttgtaatatttttaatcagagaagctcacctgagtttttgatgtccagagtttttttttttttttttggtttggtttttttttttgttttgttttgttttttttgcagttcattatatttt

SEQ ID NO: 107006 - DNA, 220 bp, Homo sapiens
tttcagtctgtgttcacactgctttatgagtccagtttgcttagattttttgtgggggtacttagatgtagctgctttgggaagagggacacgtggaaaatatagagggagatggggaatatttagttcagcattttatatgctataaataattatagctgtatagccaaatgagcttttagagctctggattccattggaatttaaggatttttctctt

SEQ ID NO: 107007 - DNA, 262 bp, Homo sapiens
tagggttttgcaaaaagctgccttggccctgcccttcccagaagggccccatccagggactgactgtggaggaggtaaaaaggtcactggggcccaactccggacagccatgaagagcctttaaccccagagctgctgcgggtgcctgcctggcctcactgtgggatgatctctgtcttctcaatcccactgccttcccctcccttccaaaggcattggtcccaagggccctccttgatgaaacccatctgggaggaaccca

SEQ ID NO: 107008 - DNA, 461 bp, Homo sapiens
cttgctctgccccttgcaaagtccagtgagccgttcaaagataacccagatgtcccaagcctcccagccagagtgcctgtgctgcgcagctggcgtggttgccccagtctccttcgccccaaggccatgcttggccgaccccctgacccgctgaggttgcgcagagctttttgggccctgtagcagcactgcttgggcaccaagccttgcatggtctcatgggactcactgcctgcagccgctagtcccagctcccctccttaccagaacccacaccatgttgtccagctgatgggggatcacatatcatgctattccctccaggatcctgtcccctgtttttctccccctgccatgaggagtagcatcctcatttagcctttccctcagaaagtccccacgcttatcactacacatgaatagatcccaggaaggtcactttctcatggttctgcaaaaag

SEQ ID NO: 107009 - DNA, 420 bp, Homo sapiens
caataaaacaacccagggaaaatcattctaattttaggagaaaaattaacacctacctaccctacaacctcacaattaaaatctggtggaattctataaccttccacatggtttgcctcttgtgtggtgggaaagtgagagggagcttttattgacttctttgagagaatgaagaggaaagaagacaacactgttgaagaatcttctataatctagatgtcagaagaagccacccactctttgattctaagattgccttgctccatcccccattctatgttctgttctgttgttttttttttttccctgaacatttctacaaatactttcttctagtatttgtggaatacttcattctataactaatggctatttgtttatctccaatccagcattgacctaaagttcagacatgactct

SEQ ID NO: 107010 - DNA, 3329 bp, Homo sapiens
gggggagctctcgcgagaggagcaagaggaagatggccgtgccctgtttttcggtgtaaggcagcgacggcggctgcgacggcgagactgagatcctggtgtcgtgggcacctgagttctagcttcccccagcgagcgcgcgtcccttcgtgcctaggcgagagccggctcttccccgggagatgcgtttgtcccaggctcgggggctcagtgggagttcatgctgcgctggaggctcttggccaccgctctaatcgccttgtgccgccgcagcgccagctccgtcgccagcggtgagcctcccgattcccccccttgcccctggcggcggcgatgaccggggagaagatccgctcactgcggagggaccacaagcccagcaaagaagaaggggacctgctggagcccggggatgaggaagcggcggctgccctcggcggtacctttaccagaagcaggattggcaagggcggcaaagcttgtcataagatcttcagtaaccatcaccaccggctacagctgaaggcagctccggcctcctccaatccccccggcgccccggctctgccgctgcacaattcctccgtgactgccaactcccagtccccggcccttctggccggcaccaaccccgttgctgtcgtcgcggatggaggcagttgccccgcacactacccggtgcacgagtgcgtcttcaagggggatgtgaggagactctcctctctcatccgcacgcacaatatcgggcagaaagataatcacggaaatactcctttacaccttgctgtgatgttaggaaataaagttacagctcttttgaggaagcttaagcagcaatccagggaaagtgttgaagaaaaacgacctcgattattaaaagccctgaaagagctaggtgacttttatctagaacttcactgggattttcaaagctgggtgcctttactttcccgaattctgccttccgatgcatgtaaaatatacaaacaaggtatcaatatcaggcttgacacaactctcatagactttactgacatgaagtgccaacgaggggatctaagcttcattttcaatggggatgcggcgccctctgaatcttttgtagtattagacaatgaacaaaaagtttatcagcgaatacatcatgaggaatcagagatggaaacagaagaagaggtggatattttaatgagcagtgatatttactctgcaactttatcaacaaaatcaatttctttcacgcgtgcccagacaggatggctttttcgggaagataaaacagaaagagtaggaaactttttggcagacttttacctggtgaatggacttgttttagaatcaaggaaaagaagagaacatctcagtgaagaggatattcttcgaaataaggccatcatggagagtttgagtaaaggtggaaacataatggaacagaattttgagccgattcgaagacagtctcttacacctcctcctcagaacactattacatgggaagaatatatatctgctgaaaatggaaaagctcctcatctgggtagagaattggtgtgcaaagagagtaagaaaacgtttaaagctacgatagccatgagccaggaatttcccttagggatagagttattattgaatgttttagaagtagtagctcccttcaagcactttaacaagcttagagaatttgttcagatgaagcttcctccaggctttcctgtaaaattagatatacctgtgtttcccacaatcacagccactgtgacttttcaggagtttcgatacgatgaatttgatggctccatctttactatacctgatgactacaaggaagacccaagccgttttcctgatctttaactgacgtggaaaaggatgccgtctaaccaaggaaagaaaatacagagaccctagaagtggatccaaatagaagggacaaatgctttcagtgaagaaaagggaattacacattgaatcgacacatcagtaatacgatacagtgaaatgggcctctaataagaatttcagcgagttttctgatgtgccattttttgtctttttaaaaatatacatattataaatgtaatagtttgacacattaatgaccctaagacctgcgtatgtgaagcagctatgagtgctgtgatttgtttttaaaaatttttacacttcttgttgaaatatatatgcatataaatatatctatatctatatctatatctaaaacactcctggaccattaacgtaaattaaatgtcttaagagatatggagcccttttaaacttgtcatctttatgcaaggtgacatttataaatattccttcgagctttgttttcataaaatgtaaactatgtaacattatgtatagttcagtaatttgaatgtttgttcaatataatgaactagaaggaatgcaattttctgtagatgaatgaaccaaatggtaaccattaaacaattgcatttatatgttgcaatacatttcagaaggagcgttcactctgcagggaataaggtacctcctttagcaccttagtgcaattcattgtggtgctatttgtttttacctgaatgtttgttactaatcttcctttcatagaacctctattttttttttttctaaacttgagtttgagtccttgttatggtcatcataaggtaatggttagcatgtttaaagatattcctcttccaaatctcagcactttaaaaaaaaatccaaatttttaaacttgcttcctaataagtacacatcggtctgattattttgtttgtttttagtagaatatggatgcattggtgtcagttttaaaaaacaatacacatattttggacaaccctacatatttaatcctttcaaaataagataaaaacattttatatgctaacagaatatatttgttacaagttaaagtccagaagtatacacaagattgattactcctattattttttttaaatcacaggaaaatattgatttcattgtctccaaagtgataaaatcatgtattactcatttttgcacttaaaatttttcttatttattccaaggtggtttgaaggtccaagtatgaaaataaattagggggattaatgtataacagttataaagtatcatgttgtattaaagagcttacttagattgatgtttttaaaatgtatcctgatgaatgtctcaagaatgcatctgtcaagttttttagactgaccagtagcttaaacttttttcaggattttaggtaatttgaaaggagtttagagacccttattgaaaatatgatttaaaaatccaaagcataaaccgtaagaaaaattttaaataaacatctttaa

SEQ ID NO: 107011 - DNA, 1219 bp, Homo sapiens
gggggagctctcgcgagaggagcaagaggaagatggccgtgccctgtttttcggtgtaaggcagcgacggcggctgcgacggcgagactgagatcctggtgtcgtgggcacctgagttctagcttcccccagcgagcgcgcgtcccttcgtgcctaggcgagagccggctcttccccgggagatgcgtttgtcccaggctcgggggctcagtgggagttcatgctgcgctggaggctcttggccaccgctctaatcgccttgtgccgccgcagcgccagctccgtcgccagcggtgagcctcccgattcccccccttgcccctggcggcggcgatgaccggggagaagatccgctcactgcggagggaccacaagcccagcaaagaagaaggggacctgctggagcccggggatgaggaagcggcggctgccctcggcggtacctttaccagaagcaggattggcaagggcggcaaagcttgtcataagatcttcagtaaccatcaccaccggctacagctgaaggcagctccggcctcctccaatccccccggcgccccggctctgccgctgcacaattcctccgtgactgccaactcccagtccccggcccttctggccggcaccaaccccgttgctgtcgtcgcggatggaggcagttgccccgcacactacccggtgcacgagtgcgtcttcaagggggatgtgaggagactctcctctctcatccgcacgcacaatatcgggcagaaagataatcacggaaatactcctttacaccttgctgtgatgttaggaaataaagaatgtgcccatttacttttggctcacaatgctccagtcaaggtgaaaaatgctcagggatggagccctctggcggaagccatcagctatggagataggcagatgattacagctcttttgaggaagcttaagcagcaatccagggaaagtgttgaagaaaaacgacctcgattattaaaagccctgaaagagctaggtgacttttatctagaacttcactgggattttcaaagctgggtgcctttactttcccgaattctgccttccgatgcatgtaaaatatacaaacaaggtatcaatatcaggcttgacacaactctcatagactttactgacatgaagtgccaacgaggggatctaagcttcattttcaatggggcggtacatcgtgcgcttcgggagtcctctagagtca

SEQ ID NO: 107012 - DNA, 688 bp, Homo sapiens
tgcgtaaacaatgtttcaaaactgcaaaatggattctacgctaccactcctttcttctgctcaatccacgaggggatctaagcttcattttcaatggggatgcggcgccctctgaatcttttgtagtattagacaatgaacaaaaagtttatcagcgaatacatcatgaggaatcagagatggaaacagaagaagaggtggatattttaatgagcagtgatatttactctgcaactttatcaacaaaatcaatttctttcacgcgtgcccagacaggatggctttttcgggaagataaaacagaaagagtaggaaactttttggcagacttttacctggtgaatggacttgttttagaatcaaggaaaagaagagaacatctcagtgaagaggatattcttcgaaataaggccatcatggagagtttgagtaaaggtggaaacataatggaacagaattttgaggtataatttttaattcttctaatttgtagttttctaagaagagaggggatagatttcattcttggtggcattcagtaagtatataaatgtactcacagcttttatttactgtgtgttacctttttctgtgaatcttcatttcgttgatgtcattattatgaagacaaaaaaatgtcttttgggatttttttgggaatctgtactttatctttgagtcttcatta

SEQ ID NO: 107013 - DNA, 819 bp, Homo sapiens
agctgctggacatggaactacagagaagtgtaaaaactaactctgggcccggcgtggtggcttatgcatgtaatcccagcactttgggaggccgaggccggcggatcacgaggtcaggagttcgagaccagcctggccaacacggtgaaaacctgtctctactaaaaatacaaaaattacccgggcgtggtggtgatgcctgtaatcccagctactcggaaggctgaggcaggagaatcgcttgagactgggaggtggaggttgtggagctgagattgcgccattgtgctacatcctgggcaacaagagcgaaactccgtctcaaaaaaaaaaaaatttcccagatgttaatgttttactgccatttgtatagcactgtttttcaaactgcaatatagggatcctttagtagattataagaaattaatttagtgggccatgactacttgtttttccttttctcccctcagttgttggcaatacttaaaaaaatttgtatctaaataaaaatggtaggccaggcacagtggctcgcacctggaatcccagcactttgggaggccaaggtgggaggattgcttgagtccaggaggtggaaaccagcctgggcaacagagcaagaccctgcctctactaaaaaaataaaaaattaaaaaattaaaaatcagctgtgcgcagtggcatgagcctatagttccaactacttgggaggctgaggcaggatgatcacttgagcccgggagactgaggctacaatgagctataatcatgccactgccactgcattccagcctgggtgacacagtgagatcctgtcac

SEQ ID NO: 107014 - DNA, 4084 bp, Homo sapiens
gggggagctctcgcgagaggagcaagaggaagatggccgtgccctgtttttcggtgtaaggcagcgacggcggctgcgacggcgagactgagatcctggtgtcgtgggcacctgagttctagcttcccccagcgagcgcgcgtcccttcgtgcctaggcgagagccggctcttccccgggagatgcgtttgtcccaggctcgggggctcagtgggagttcatgctgcgctggaggctcttggccaccgctctaatcgccttgtgccgccgcagcgccagctccgtcgccagcggtgagcctcccgattcccccccttgcccctggcggcggcgatgaccggggagaagatccgctcactgcggagggaccacaagcccagcaaagaagaaggggacctgctggagcccggggatgaggaagcggcggctgccctcggcggtacctttaccagaagcaggattggcaagggcggcaaagcttgtcataagatcttcagtaaccatcaccaccggctacagctgaaggcagctccggcctcctccaatccccccggcgccccggctctgccgctgcacaattcctccgtgactgccaactcccagtccccggcccttctggccggcaccaaccccgttgctgtcgtcgcggatggaggcagttgccccgcacactacccggtgcacgagtgcgtcttcaagggggatgtgaggagactctcctctctcatccgcacgcacaatatcgggcagaaagataatcacggaaatactcctttacaccttgctgtgatgttaggaaataaagaatgtgcccatttacttttggctcacaatgctccagtcaaggtgaaaaatgctcagggatggagccctctggcggaagccatcagctatggagataggcagatgattacagctcttttgaggaagcttaagcagcaatccagggaaagtgttgaagaaaaacgacctcgattattaaaagccctgaaagagctaggtgacttttatctagaacttcactgggattttcaaagctgggtgcctttactttcccgaattctgccttccgatgcatgtaaaatatacaaacaaggtatcaatatcaggcttgacacaactctcatagactttactgacatgaagtgccaacgaggggatctaagcttcattttcaatggggatgcggcgccctctgaatcttttgtagtattagacaatgaacaaaaagtttatcagcgaatacatcatgaggaatcagagatggaaacagaagaagaggtggatattttaatgagcagtgatatttactctgcaactttatcaacaaaatcaatttctttcacgcgtgcccagacaggatggctttttcgggaagataaaacagaaagagtaggaaactttttggcagacttttacctggtgaatggacttgttttagaatcaaggaaaagaagagaacatctcagtgaagaggatattcttcgaaataaggccatcatggagagtttgagtaaaggtggaaacataatggaacagaattttgagccgattcgaagacagtctcttacacctcctcctcagaacactattacatgggaagaatatatatctgctgaaaatggaaaagctcctcatctgggtagagaattggtgtgcaaagagagtaagaaaacgtttaaagctacgatagccatgagccaggaatttcccttagggatagagttattattgaatgttttagaagtagtagctcccttcaagcactttaacaagcttagagaatttgttcagatgaagcttcctccaggctttcctgtaaaattagatatacctgtgtttcccacaatcacagccactgtgacttttcaggagtttcgatacgatgaatttgatggctccatctttactatacctgatgactacaaggaagacccaagccgttttcctgatctttaactgacgtggaaaaggatgccgtctaaccaaggaaagaaaatacagagaccctagaagtggatccaaatagaagggacaaatgctttcagtgaagaaaagggaattacacattgaatcgacacatcagtaatacgatacagtgaaatgggcctctaataagaatttcagcgagttttctgatgtgccattttttgtctttttaaaaatatacatattataaatgtaatagtttgacacattaatgaccctaagacctgcgtatgtgaagcagctatgagtgctgtgatttgtttttaaaaatttttacacttcttgttgaaatatatatgcatataaatatatctatatctatatctatatctaaaacactcctggaccattaacgtaaattaaatgtcttaagagatatggagcccttttaaacttgtcatctttatgcaaggtgacatttataaatattccttcgagctttgttttcataaaatgtaaactatgtaacattatgtatagttcagtaatttgaatgtttgttcaatataatgaactagaaggaatgcaattttctgtagatgaatgaaccaaatggtaaccattaaacaattgcatttatatgttgcaatacatttcagaaggagcgttcactctgcagggaataaggtacctcctttagcaccttagtgcaattcattgtggtgctatttgtttttacctgaatgtttgttactaatcttcctttcatagaacctctattttttttttttctaaacttgagtttgagtccttgttatggtcatcataaggtaatggttagcatgtttaaagatattcctcttccaaatctcagcactttaaaaaaaaatccaaatttttaaacttgcttcctaataagtacacatcggtctgattattttgtttgtttttagtagaatatggatgcattggtgtcagttttaaaaaacaatacacatattttggacaaccctacatatttaatcctttcaaaataagataaaaacattttatatgctaacagaatatatttgttacaagttaaagtccagaagtatacacaagattgattactcctattattttttttaaatcacaggaaaatattgatttcattgtctccaaagtgataaaatcatgtattactcatttttgcacttaaaatttttcttatttattccaaggtggtttgaaggtccaagtatgaaaataaattagggggattaatgtataacagttataaagtatcatgttgtattaaagagcttacttagattgatgtttttaaaatgtatcctgatgaatgtctcaagaatgcatctgtcaagttttttagactgaccagtagcttaaacttttttcaggattttaggtaatttgaaaggagtttagagacccttattgaaaatatgatttaaaaatccaaagcataaaccgtaagaaaaattttaaataaacatctttaaagctgcatcttccatactgatacatgcattgcgtatgttgacattaaatacattttataatgaagaaaaataatcatagtaaaaaattgaaagacctaattactacgttacatggacctattgaattttgggggaacgtgttagtaaacccagactagctttgttgaatagaagttgatcgctgttatttaggaaatgggtagatcaaatgacttagagactgaattatcctatcagtggttacatggggttggagacactgaaaggcagtgatcactgttgcttctaggctcccttactttgtaggaatatggtatactttcaggaatatgctatatatgttttcataagtacagacaccttagggaagaaaaaaagtgggtaattgaagcttatggttgattaatttcctaacagcacagctatgaatattttgctggggtacactggaggtaggaagactactggaaatttttgcacttgaattttgtttttaaagcttttttctttaaagaatggtagaaacagattatccattccaaaatgtcttttctctgatcacaaagagcaaacaaatgtcaatatctcttatgatggtgaaaaaaaggaattaatcgatgcaaataaacttttcacagtattacttttaa

SEQ ID NO: 107015 - DNA, 5957 bp, Homo sapiens
gggggagctctcgcgagaggagcaagaggaagatggccgtgccctgtttttcggtgtaaggcagcgacggcggctgcgacggcgagactgagatcctggtgtcgtgggcacctgagttctagcttcccccagcgagcgcgcgtcccttcgtgcctaggcgagagccggctcttccccgggagatgcgtttgtcccaggctcgggggctcagtgggagttcatgctgcgctggaggctcttggccaccgctctaatcgccttgtgccgccgcagcgccagctccgtcgccagcggtgagcctcccgattcccccccttgcccctggcggcggcgatgaccggggagaagatccgctcactgcggagggaccacaagcccagcaaagaagaaggggacctgctggagcccggggatgaggaagcggcggctgccctcggcggtacctttaccagaagcaggattggcaagggcggcaaagcttgtcataagatcttcagtaaccatcaccaccggctacagctgaaggcagctccggcctcctccaatccccccggcgccccggctctgccgctgcacaattcctccgtgactgccaactcccagtccccggcccttctggccggcaccaaccccgttgctgtcgtcgcggatggaggcagttgccccgcacactacccggtgcacgagtgcgtcttcaagggggatgtgaggagactctcctctctcatccgcacgcacaatatcgggcagaaagataatcacggaaatactcctttacaccttgctgtgatgttaggaaataaagaatgtgcccatttacttttggctcacaatgctccagtcaaggtgaaaaatgctcagggatggagccctctggcggaagccatcagctatggagataggcagatgattacagctcttttgaggaagcttaagcagcaatccagggaaagtgttgaagaaaaacgacctcgattattaaaagccctgaaagagctaggtgacttttatctagaacttcactgggattttcaaagctgggtgcctttactttcccgaattctgccttccgatgcatgtaaaatatacaaacaaggtatcaatatcaggcttgacacaactctcatagactttactgacatgaagtgccaacgaggggatctaagcttcattttcaatggggatgcggcgccctctgaatcttttgtagtattagacaatgaacaaaaagtttatcagcgaatacatcatgaggaatcagagatggaaacagaagaagaggtggatattttaatgagcagtgatatttactctgcaactttatcaacaaaatcaatttctttcacgcgtgcccagacaggatggctttttcgggaagataaaacagaaagagtaggaaactttttggcagacttttacctggtgaatggacttgttttagaatcaaggaaaagaagagaacatctcagtgaagaggatattcttcgaaataaggccatcatggagagtttgagtaaaggtggaaacataatggaacagaattttgagccgattcgaagacagtctcttacacctcctcctcagaacactattacatgggaagaatatatatctgctgaaaatggaaaagctcctcatctgggtagagaattggtgtgcaaagagagtaagaaaacgtttaaagctacgatagccatgagccaggaatttcccttagggatagagttattattgaatgttttagaagtagtagctcccttcaagcactttaacaagcttagagaatttgttcagatgaagcttcctccaggctttcctgtaaaattagatatacctgtgtttcccacaatcacagccactgtgacttttcaggagtttcgatacgatgaatttgatggctccatctttactatacctgatgactacaaggaagacccaagccgttttcctgatctttaactgacgtggaaaaggatgccgtctaaccaaggaaagaaaatacagagaccctagaagtggatccaaatagaagggacaaatgctttcagtgaagaaaagggaattacacattgaatcgacacatcagtaatacgatacagtgaaatgggcctctaataagaatttcagcgagttttctgatgtgccattttttgtctttttaaaaatatacatattataaatgtaatagtttgacacattaatgaccctaagacctgcgtatgtgaagcagctatgagtgctgtgatttgtttttaaaaatttttacacttcttgttgaaatatatatgcatataaatatatctatatctatatctatatctaaaacactcctggaccattaacgtaaattaaatgtcttaagagatatggagcccttttaaacttgtcatctttatgcaaggtgacatttataaatattccttcgagctttgttttcataaaatgtaaactatgtaacattatgtatagttcagtaatttgaatgtttgttcaatataatgaactagaaggaatgcaattttctgtagatgaatgaaccaaatggtaaccattaaacaattgcatttatatgttgcaatacatttcagaaggagcgttcactctgcagggaataaggtacctcctttagcaccttagtgcaattcattgtggtgctatttgtttttacctgaatgtttgttactaatcttcctttcatagaacctctattttttttttttctaaacttgagtttgagtccttgttatggtcatcataaggtaatggttagcatgtttaaagatattcctcttccaaatctcagcactttaaaaaaaaatccaaatttttaaacttgcttcctaataagtacacatcggtctgattattttgtttgtttttagtagaatatggatgcattggtgtcagttttaaaaaacaatacacatattttggacaaccctacatatttaatcctttcaaaataagataaaaacattttatatgctaacagaatatatttgttacaagttaaagtccagaagtatacacaagattgattactcctattattttttttaaatcacaggaaaatattgatttcattgtctccaaagtgataaaatcatgtattactcatttttgcacttaaaatttttcttatttattccaaggtggtttgaaggtccaagtatgaaaataaattagggggattaatgtataacagttataaagtatcatgttgtattaaagagcttacttagattgatgtttttaaaatgtatcctgatgaatgtctcaagaatgcatctgtcaagttttttagactgaccagtagcttaaacttttttcaggattttaggtaatttgaaaggagtttagagacccttattgaaaatatgatttaaaaatccaaagcataaaccgtaagaaaaattttaaataaacatctttaaagctgcatcttccatactgatacatgcattgcgtatgttgacattaaatacattttataatgaagaaaaataatcatagtaaaaaattgaaagacctaattactacgttacatggacctattgaattttgggggaacgtgttagtaaacccagactagctttgttgaatagaagttgatcgctgttatttaggaaatgggtagatcaaatgacttagagactgaattatcctatcagtggttacatggggttggagacactgaaaggcagtgatcactgttgcttctaggctcccttactttgtaggaatatggtatactttcaggaatatgctatatatgttttcataagtacagacaccttagggaagaaaaaaagtgggtaattgaagcttatggttgattaatttcctaacagcacagctatgaatattttgctggggtacactggaggtaggaagactactggaaatttttgcacttgaattttgtttttaaagcttttttctttaaagaatggtagaaacagattatccattccaaaatgtcttttctctgatcacaaagagcaaacaaatgtcaatatctcttatgatggtgaaaaaaaggaattaatcgatgcaaataaacttttcacagtattacttttaatgaagatttttcgaaatgtgccttttaatccagttaatgaatgaagctatatgcagtgtttcaaatgaataagtcaaaacaccatatgttttcataataccacatgaaaaatcaagattttgcaatgtaggtacacaaaattctatatgttcttctccatttgtgattttgaaactgtttaaattggtagggggacaatcgtatagtcatcttcaatagccatttagaaatggttaatattcttgcccactggtatggtatccagagaagatatggtttccatctttgagaaaataattctctgatgagacaatttgccctctgtagatattcacatacagagaattgccaaacttcataaaagggtagtatgaagtagatgccctgatttttgtgagtataagaagtacagatgatggtttggaaactgtcacatctgtctgctgatacatgttagtagatgaaaaactgtttccttctgctcagaactggaattaagccccactcatgctaataaaaatgggtttttatagtagtattcacatacagtttattattcacacactgggggagggtgatgaataatgattatttaatgagccctcttcctagttttccctaagtctgcagaagacaaagatcctgtttccaggccatgaaaggactgaagtaaatattgtaaataagtacagctgacccttgaacaacatggaggttaggggttcagttgaaaatctgcatgtaagtggacctgtgcagtccaaacctgtgtttaactgctgaattaaaggtgcttccttctgctcattgatattacccatatttacaaacatgctagagaaaagcaactggtgtaaaacttgcccccactagagaaatggacaggaggtattaagtcacttgtaaagatagatagcagaactaagcttggtaaaagcccatgattgtttgtatactataaattagccaaaactactcttgcaaagcattttatgtcagaaatctggggcaatagtaactaactctggttgccacctaaaaatttcataacatgttaagaatcacattttttacatcatgcaaaccatccttacagagtgagcttaccttgtgatgagctttttaattgttacagttcattttagaagagtaatactttcagtcataatggtacctatggtacatagaattacaattttgctttttccacacactgaaaaatattgaagcaaaatcttaagaacttctaagaaaggtgcttgttaatcattcttggttttcatcatgttttgcggtgaaaatgactttaattagagtagaaatattgtctaacataaaaccaaaaagataaaacccaccacttatttacctgtacctcccatacatagagttcttgatgactaaagaaggatgacagtaattgggatgttctaaatacagttgtgtgtcacttaatgatgggtacatgttctgtggaatgcatcaggtgattttgtcattgtgagaaccatattgggtgtacttacacaaacctaggtggtatagcataccactcacctagactatacaataaagcctattgctccgagacaaaaaaagaaaaaaaaacggacgcagagtgatcatgaggacgcgtacacgaccacgaagacaagccagaaccagccagcagtcaccgacccactcacgaccagcagcacggcgggcgctaaactaccggggcccacacgctagcacagccattggtaagcgcgcccagtacggaactataaacaggcgccccgctcaacacggacggcaaactcgttcttccgaaaccttggggagcacacccccgagccggaaaaagtagtgacccgcgggggttaaacgc

SEQ ID NO: 107016 - DNA, 3983 bp, Homo sapiens
gggggagctctcgcgagaggagcaagaggaagatggccgtgccctgtttttcggtgtaaggcagcgacggcggctgcgacggcgagactgagatcctggtgtcgtgggcacctgagttctagcttcccccagcgagcgcgcgtcccttcgtgcctaggcgagagccggctcttccccgggagatgcgtttgtcccaggctcgggggctcagtgggagttcatgctgcgctggaggctcttggccaccgctctaatcgccttgtgccgccgcagcgccagctccgtcgccagcggtgagcctcccgattcccccccttgcccctggcggcggcgatgaccggggagaagatccgctcactgcggagggaccacaagcccagcaaagaagaaggggacctgctggagcccggggatgaggaagcggcggctgccctcggcggtacctttaccagaagcaggattggcaagggcggcaaagcttgtcataagatcttcagtaaccatcaccaccggctacagctgaaggcagctccggcctcctccaatccccccggcgccccggctctgccgctgcacaattcctccgtgactgccaactcccagtccccggcccttctggccggcaccaaccccgttgctgtcgtcgcggatggaggcagttgccccgcacactacccggtgcacgagtgcgtcttcaagggggatgtgaggagactctcctctctcatccgcacgcacaatatcgggcagaaagataatcacggaaatactcctttacaccttgctgtgatgttaggaaataaagaatgtgcccatttacttttggctcacaatgctccagtcaaggtgaaaaatgctcagggatggagccctctggcggaagccatcagctatggagataggcagatgattacagctcttttgaggaagcttaagcagcaatccagggaaagtgttgaagaaaaacgacctcgattattaaaagccctgaaagagctaggtgacttttatctagaacttcactgggattttcaaagctgggtgcctttactttcccgaattctgccttccgatgcatgtaaaatatacaaacaaggtatcaatatcaggcttgacacaactctcatagactttactgacatgaagtgccaacgaggggatctaagcttcattttcaatggggatgcggcgccctctgaatcttttgtagtattagacaatgaacaaaaagtttatcagcgaatacatcatgaggaatcagagatggaaacagaagaagaggtggatattttaatgagcagtgatatttactctgcaactttatcaacaaaatcaatttctttcacgcgtgcccagacaggatggctttttcgggaagataaaacagaaagagtaggaaactttttggcagacttttacctggtgaatggacttgttttagaatcaaggaaaagaagagaacatctcagtgaagaggatattcttcgaaataaggccatcatggagagtttgagtaaaggtggaaacataatggaacagaattttgagccgattcgaagacagtctcttacacctcctcctcagaacactattacatgggaagaatatatatctgctgaaaatggaaaagctcctcatctgggtagagaattggtgtgcaaagagagtaagaaaacgtttaaagctacgatagccatgagccaggaatttcccttagggatagagttatatacctgtgtttcccacaatcacagccactgtgacttttcaggagtttcgatacgatgaatttgatggctccatctttactatacctgatgactacaaggaagacccaagccgttttcctgatctttaactgacgtggaaaaggatgccgtctaaccaaggaaagaaaatacagagaccctagaagtggatccaaatagaagggacaaatgctttcagtgaagaaaagggaattacacattgaatcgacacatcagtaatacgatacagtgaaatgggcctctaataagaatttcagcgagttttctgatgtgccattttttgtctttttaaaaatatacatattataaatgtaatagtttgacacattaatgaccctaagacctgcgtatgtgaagcagctatgagtgctgtgatttgtttttaaaaatttttacacttcttgttgaaatatatatgcatataaatatatctatatctatatctatatctaaaacactcctggaccattaacgtaaattaaatgtcttaagagatatggagcccttttaaacttgtcatctttatgcaaggtgacatttataaatattccttcgagctttgttttcataaaatgtaaactatgtaacattatgtatagttcagtaatttgaatgtttgttcaatataatgaactagaaggaatgcaattttctgtagatgaatgaaccaaatggtaaccattaaacaattgcatttatatgttgcaatacatttcagaaggagcgttcactctgcagggaataaggtacctcctttagcaccttagtgcaattcattgtggtgctatttgtttttacctgaatgtttgttactaatcttcctttcatagaacctctattttttttttttctaaacttgagtttgagtccttgttatggtcatcataaggtaatggttagcatgtttaaagatattcctcttccaaatctcagcactttaaaaaaaaatccaaatttttaaacttgcttcctaataagtacacatcggtctgattattttgtttgtttttagtagaatatggatgcattggtgtcagttttaaaaaacaatacacatattttggacaaccctacatatttaatcctttcaaaataagataaaaacattttatatgctaacagaatatatttgttacaagttaaagtccagaagtatacacaagattgattactcctattattttttttaaatcacaggaaaatattgatttcattgtctccaaagtgataaaatcatgtattactcatttttgcacttaaaatttttcttatttattccaaggtggtttgaaggtccaagtatgaaaataaattagggggattaatgtataacagttataaagtatcatgttgtattaaagagcttacttagattgatgtttttaaaatgtatcctgatgaatgtctcaagaatgcatctgtcaagttttttagactgaccagtagcttaaacttttttcaggattttaggtaatttgaaaggagtttagagacccttattgaaaatatgatttaaaaatccaaagcataaaccgtaagaaaaattttaaataaacatctttaaagctgcatcttccatactgatacatgcattgcgtatgttgacattaaatacattttataatgaagaaaaataatcatagtaaaaaattgaaagacctaattactacgttacatggacctattgaattttgggggaacgtgttagtaaacccagactagctttgttgaatagaagttgatcgctgttatttaggaaatgggtagatcaaatgacttagagactgaattatcctatcagtggttacatggggttggagacactgaaaggcagtgatcactgttgcttctaggctcccttactttgtaggaatatggtatactttcaggaatatgctatatatgttttcataagtacagacaccttagggaagaaaaaaagtgggtaattgaagcttatggttgattaatttcctaacagcacagctatgaatattttgctggggtacactggaggtaggaagactactggaaatttttgcacttgaattttgtttttaaagcttttttctttaaagaatggtagaaacagattatccattccaaaatgtcttttctctgatcacaaagagcaaacaaatgtcaatatctcttatgatggtgaaaaaaaggaattaatcgatgcaaataaacttttcacagtattacttttaa

SEQ ID NO: 107017 - DNA, 4040 bp, Homo sapiens
gggggagctctcgcgagaggagcaagaggaagatggccgtgccctgtttttcggtgtaaggcagcgacggcggctgcgacggcgagactgagatcctggtgtcgtgggcacctgagttctagcttcccccagcgagcgcgcgtcccttcgtgcctaggcgagagccggctcttccccgggagatgcgtttgtcccaggctcgggggctcagtgggagttcatgctgcgctggaggctcttggccaccgctctaatcgccttgtgccgccgcagcgccagctccgtcgccagcggtgagcctcccgattcccccccttgcccctggcggcggcgatgaccggggagaagatccgctcactgcggagggaccacaagcccagcaaagaagaaggggacctgctggagcccggggatgaggaagcggcggctgccctcggcggtacctttaccagaagcaggattggcaagggcggcaaagcttgtcataagatcttcagtaaccatcaccaccggctacagctgaaggcagctccggcctcctccaatccccccggcgccccggctctgccgctgcacaattcctccgtgactgccaactcccagtccccggcccttctggccggcaccaaccccgttgctgtcgtcgcggatggaggcagttgccccgcacactacccggtgcacgagtgcgtcttcaagggggatgtgaggagactctcctctctcatccgcacgcacaatatcgggcagaaagataatcacggaaatactcctttacaccttgctgtgatgttaggaaataaagaatgtgcccatttacttttggctcacaatgctccagtcaaggtgaaaaatgctcagggatggagccctctggcggaagccatcagctatggagataggcagatgattacagctcttttgaggaagcttaagcagcaatccagggaaagtgttgaagaaaaacgacctcgattattaaaagccctgaaagagctaggtgacttttatctagaacttcactgggattttcaaagctgggtgcctttactttcccgaattctgccttccgatgcatgtaaaatatacaaacaaggtatcaatatcaggcttgacacaactctcatagactttactgacatgaagtgccaacgaggggatctaagcttcattttcaatggggatgcggcgccctctgaatcttttgtagtattagacaatgaacaaaaagtttatcagcgaatacatcatgaggaatcagagatggaaacagaagaagaggtggatattttaatgagcagtgatatttactctgcaactttatcaacaaaatcaatttctttcacgcgtgcccagacaggatggctttttcgggaagataaaacagaaagagtaggaaactttttggcagacttttacctggtgaatggacttgttttagaatcaaggaaaagaagagaacatctcagtgaagaggatattcttcgaaataaggccatcatggagagtttgagtaaaggtggaaacataatggaacagaattttgagccgattcgaagacagtctcttacacctcctcctcagaacactattacatgggaagaatatatatctgctgaaaatggaaaagctcctcatctgggtagagaattggtgtgcaaagagagtaagaaaacgtttaaagctacgatagccatgagccaggaatttcccttagggatagagttattattgaatgttttagaagtagtagctcccttcaagcactttaacaagcttagagaatttgttcagatgaagcttcctccaggctttcctgtaaaattaggagtttcgatacgatgaatttgatggctccatctttactatacctgatgactacaaggaagacccaagccgttttcctgatctttaactgacgtggaaaaggatgccgtctaaccaaggaaagaaaatacagagaccctagaagtggatccaaatagaagggacaaatgctttcagtgaagaaaagggaattacacattgaatcgacacatcagtaatacgatacagtgaaatgggcctctaataagaatttcagcgagttttctgatgtgccattttttgtctttttaaaaatatacatattataaatgtaatagtttgacacattaatgaccctaagacctgcgtatgtgaagcagctatgagtgctgtgatttgtttttaaaaatttttacacttcttgttgaaatatatatgcatataaatatatctatatctatatctatatctaaaacactcctggaccattaacgtaaattaaatgtcttaagagatatggagcccttttaaacttgtcatctttatgcaaggtgacatttataaatattccttcgagctttgttttcataaaatgtaaactatgtaacattatgtatagttcagtaatttgaatgtttgttcaatataatgaactagaaggaatgcaattttctgtagatgaatgaaccaaatggtaaccattaaacaattgcatttatatgttgcaatacatttcagaaggagcgttcactctgcagggaataaggtacctcctttagcaccttagtgcaattcattgtggtgctatttgtttttacctgaatgtttgttactaatcttcctttcatagaacctctattttttttttttctaaacttgagtttgagtccttgttatggtcatcataaggtaatggttagcatgtttaaagatattcctcttccaaatctcagcactttaaaaaaaaatccaaatttttaaacttgcttcctaataagtacacatcggtctgattattttgtttgtttttagtagaatatggatgcattggtgtcagttttaaaaaacaatacacatattttggacaaccctacatatttaatcctttcaaaataagataaaaacattttatatgctaacagaatatatttgttacaagttaaagtccagaagtatacacaagattgattactcctattattttttttaaatcacaggaaaatattgatttcattgtctccaaagtgataaaatcatgtattactcatttttgcacttaaaatttttcttatttattccaaggtggtttgaaggtccaagtatgaaaataaattagggggattaatgtataacagttataaagtatcatgttgtattaaagagcttacttagattgatgtttttaaaatgtatcctgatgaatgtctcaagaatgcatctgtcaagttttttagactgaccagtagcttaaacttttttcaggattttaggtaatttgaaaggagtttagagacccttattgaaaatatgatttaaaaatccaaagcataaaccgtaagaaaaattttaaataaacatctttaaagctgcatcttccatactgatacatgcattgcgtatgttgacattaaatacattttataatgaagaaaaataatcatagtaaaaaattgaaagacctaattactacgttacatggacctattgaattttgggggaacgtgttagtaaacccagactagctttgttgaatagaagttgatcgctgttatttaggaaatgggtagatcaaatgacttagagactgaattatcctatcagtggttacatggggttggagacactgaaaggcagtgatcactgttgcttctaggctcccttactttgtaggaatatggtatactttcaggaatatgctatatatgttttcataagtacagacaccttagggaagaaaaaaagtgggtaattgaagcttatggttgattaatttcctaacagcacagctatgaatattttgctggggtacactggaggtaggaagactactggaaatttttgcacttgaattttgtttttaaagcttttttctttaaagaatggtagaaacagattatccattccaaaatgtcttttctctgatcacaaagagcaaacaaatgtcaatatctcttatgatggtgaaaaaaaggaattaatcgatgcaaataaacttttcacagtattacttttaa

SEQ ID NO: 107018 - DNA, 2218 bp, Homo sapiens
gggggagctctcgcgagaggagcaagaggaagatggccgtgccctgtttttcggtgtaaggcagcgacggcggctgcgacggcgagactgagatcctggtgtcgtgggcacctgagttctagcttcccccagcgagcgcgcgtcccttcgtgcctaggcgagagccggctcttccccgggagatgcgtttgtcccaggctcgggggctcagtgggagttcatgctgcgctggaggctcttggccaccgctctaatcgccttgtgccgccgcagcgccagctccgtcgccagcggtgagcctcccgattcccccccttgcccctggcggcggcgatgaccggggagaagatccgctcactgcggagggaccacaagcccagcaaagaagaaggggacctgctggagcccggggatgaggaagcggcggctgccctcggcggtacctttaccagaagcaggattggcaagggcggcaaagcttgtcataagatcttcagtaaccatcaccaccggctacagctgaaggcagctccggcctcctccaatccccccggcgccccggctctgccgctgcacaattcctccgtgactgccaactcccagtccccggcccttctggccggcaccaaccccgttgctgtcgtcgcggatggaggcagttgccccgcacactacccggtgcacgagtgcgtcttcaagggggatgtgaggagactctcctctctcatccgcacgcacaatatcgggcagaaagataatcacggaaatactcctttacaccttgctgtgatgttaggaaataaagaatgtgcccatttacttttggctcacaatgctccagtcaaggtgaaaaatgctcagggatggagccctctggcggaagccatcagctatggagataggcagatgattacagctcttttgaggaagcttaagcagcaatccagggaaagtgttgaagaaaaacgacctcgattattaaaagccctgaaagagctaggtgacttttatctagaacttcactgggattttcaaagctgggtgcctttactttcccgaattctgccttccgatgcatgtaaaatatacaaacaaggtatcaatatcaggcttgacacaactctcatagactttactgacatgaagtgccaacgaggggatctaagcttcattttcaatggggatgcggcgccctctgaatcttttgtagtattagacaatgaacaaaaagtttatcagcgaatacatcatgaggaatcagagatggaaacagaagaagaggtggatattttaatgagcagtgatatttactctgcaactttatcaacaaaatcaatttctttcacgcgtgcccagacaggatggctttttcgggaagataaaacagaaagagtaggaaactttttggcagacttttacctggtgaatggacttgttttagaatcaaggaaaagaagagaacatctcagtgaagaggatattcttcgaaataaggccatcatggagagtttgagtaaaggtggaaacataatggaacagaattttgagccgattcgaagacagtctcttacacctcctcctcagaacactattacatgggaagaatatatatctgctgaaaatggaaaagctcctcatctgggtagagaattggtgtgcaaagagagtaagaaaacgtttaaagctacgatagccatgagccaggaatttcccttagggatagagttattattgaatgttttagaagtagtagctcccttcaagcactttaacaagcttagagaatttgttcagatgaagcttcctccaggctttcctgtaaaattaggagtttcgatacgatgaatttgatggctccatctttactatacctgatgactacaaggaagacccaagccgttttcctgatctttaactgacgtggaaaaggatgccgtctaaccaaggaaagaaaatacagagaccctagaagtggatccaaatagaagggacaaatgctttcagtgaagaaaagggaattacacattgaatcgacacatcagtaatacgatacagtgaaatgggcctctaataagaatttcagcgagttttctgatgtgccatttggcttttaaattctttctaatgtatagttgccattatgacctaagactggttggaagatataggcgggttgtttaaatttcacttgtgaattttggtaattttttgtttttta

SEQ ID NO: 107019 - DNA, 1838 bp, Homo sapiens
gggggagctctcgcgagaggagcaagaggaagatggccgtgccctgtttttcggtgtaaggcagcgacggcggctgcgacggcgagactgagatcctggtgtcgtgggcacctgagttctagcttcccccagcgagcgcgcgtcccttcgtgcctaggcgagagccggctcttccccgggagatgcgtttgtcccaggctcgggggctcagtgggagttcatgctgcgctggaggctcttggccaccgctctaatcgccttgtgccgccgcagcgccagctccgtcgccagcggtgagcctcccgattcccccccttgcccctggcggcggcgatgaccggggagaagatccgctcactgcggagggaccacaagcccagcaaagaagaaggggacctgctggagcccggggatgaggaagcggcggctgccctcggcggtacctttaccagaagcaggattggcaagggcggcaaagcttgtcataagatcttcagtaaccatcaccaccggctacagctgaaggcagctccggcctcctccaatccccccggcgccccggctctgccgctgcacaattcctccgtgactgccaactcccagtccccggcccttctggccggcaccaaccccgttgctgtcgtcgcggatggaggcagttgccccgcacactacccggtgcacgagtgcgtcttcaagggggatgtgaggagactctcctctctcatccgcacgcacaatatcgggcagaaagataatcacggaaatactcctttacaccttgctgtgatgttaggaaataaagaatgtgcccatttacttttggctcacaatgctccagtcaaggtgaaaaatgctcagggatggagccctctggcggaagccatcagctatggagataggcagatgattacagctcttttgaggaagcttaagcagcaatccagggaaagtgttgaagaaaaacgacctcgattattaaaagccctgaaagagctaggtgacttttatctagaacttcactgggattttcaaagctgggtgcctttactttcccgaattctgccttccgatgcatgtaaaatatacaaacaaggtatcaatatcaggcttgacacaactctcatagactttactgacatgaagtgccaacgaggggatctaagcttcattttcaatggggatgcggcgccctctgaatcttttgtagtattagacaatgaacaaaaagtttatcagcgaatacatcatgaggaatcagagatggaaacagaagaagaggtggatattttaatgagcagtgatatttactctgcaactttatcaacaaaatcaatttctttcacgcgtgcccagacaggatggctttttcgggaagataaaacagaaagagtaggaaactttttggcagacttttacctggtgaatggacttgttttagaatcaaggaaaagaagagaacatctcagtgaagaggatattcttcgaaataaggccatcatggagagtttgagtaaaggtggaaacataatggaacagaattttgagccgattcgaagacagtctcttacacctcctcctcagaacactattacatgggaagaatatatatctgctgaaaatggaaaagctcctcatctgggtagagaattggtgtgcaaagagagtaagaaaacgtttaaagctacgatagccatgagccaggaatttcccttagggatagagttattatggactgtttggaagtagtagcttcctcaggcacttaaacagcttagacgaattggcagaataaggttccaccagggttctgttaaattgattttaccggggttccc

SEQ ID NO: 107020 - DNA, 1772 bp, Homo sapiens
gggggagctctcgcgagaggagcaagaggaagatggccgtgccctgtttttcggtgtaaggcagcgacggcggctgcgacggcgagactgagatcctggtgtcgtgggcacctgagttctagcttcccccagcgagcgcgcgtcccttcgtgcctaggcgagagccggctcttccccgggagatgcgtttgtcccaggctcgggggctcagtgggagttcatgctgcgctggaggctcttggccaccgctctaatcgccttgtgccgccgcagcgccagctccgtcgccagcggtgagcctcccgattcccccccttgcccctggcggcggcgatgaccggggagaagatccgctcactgcggagggaccacaagcccagcaaagaagaaggggacctgctggagcccggggatgaggaagcggcggctgccctcggcggtacctttaccagaagcaggattggcaagggcggcaaagcttgtcataagatcttcagtaaccatcaccaccggctacagctgaaggcagctccggcctcctccaatccccccggcgccccggctctgccgctgcacaattcctccgtgactgccaactcccagtccccggcccttctggccggcaccaaccccgttgctgtcgtcgcggatggaggcagttgccccgcacactacccggtgcacgagtgcgtcttcaagggggatgtgaggagactctcctctctcatccgcacgcacaatatcgggcagaaagataatcacggaaatactcctttacaccttgctgtgatgttaggaaataaagaatgtgcccatttacttttggctcacaatgctccagtcaaggtgaaaaatgctcagggatggagccctctggcggaagccatcagctatggagataggcagatgattacagctcttttgaggaagcttaagcagcaatccagggaaagtgttgaagaaaaacgacctcgattattaaaagccctgaaagagctaggtgacttttatctagaacttcactgggattttcaaagctgggtgcctttactttcccgaattctgccttccgatgcatgtaaaatatacaaacaaggtatcaatatcaggcttgacacaactctcatagactttactgacatgaagtgccaacgaggggatctaagcttcattttcaatggggatgcggcgccctctgaatcttttgtagtattagacaatgaacaaaaagtttatcagcgaatacatcatgaggaatcagagatggaaacagaagaagaggtggatattttaatgagcagtgatatttactctgcaactttatcaacaaaatcaatttctttcacgcgtgcccagacaggatggctttttcgggaagataaaacagaaagagtaggaaactttttggcagacttttacctggtgaatggacttgttttagaatcaaggaaaagaagagaacatctcagtgaagaggatattcttcgaaataaggccatcatggagagtttgagtaaaggtggaaacataatggaacagaattttgaggtataatttttaattcttctaatttgtagttttctaagaagagaggggatagatttcattcttggtggcattcagtaagtatataaatgtactcacagcttttatttactgtgtgttacctttttctgtgaatcttcatttcgttgatgtcattattatgaagacaaaaaaatgtcttttgggatttttttgggaatctgtactttatctttgagtcttcatta

SEQ ID NO: 107021 - DNA, 1718 bp, Homo sapiens
gggggagctctcgcgagaggagcaagaggaagatggccgtgccctgtttttcggtgtaaggcagcgacggcggctgcgacggcgagactgagatcctggtgtcgtgggcacctgagttctagcttcccccagcgagcgcgcgtcccttcgtgcctaggcgagagccggctcttccccgggagatgcgtttgtcccaggctcgggggctcagtgggagttcatgctgcgctggaggctcttggccaccgctctaatcgccttgtgccgccgcagcgccagctccgtcgccagcggtgagcctcccgattcccccccttgcccctggcggcggcgatgaccggggagaagatccgctcactgcggagggaccacaagcccagcaaagaagaaggggacctgctggagcccggggatgaggaagcggcggctgccctcggcggtacctttaccagaagcaggattggcaagggcggcaaagcttgtcataagatcttcagtaaccatcaccaccggctacagctgaaggcagctccggcctcctccaatccccccggcgccccggctctgccgctgcacaattcctccgtgactgccaactcccagtccccggcccttctggccggcaccaaccccgttgctgtcgtcgcggatggaggcagttgccccgcacactacccggtgcacgagtgcgtcttcaagggggatgtgaggagactctcctctctcatccgcacgcacaatatcgggcagaaagataatcacggaaatactcctttacaccttgctgtgatgttaggaaataaagaatgtgcccatttacttttggctcacaatgctccagtcaaggtgaaaaatgctcagggatggagccctctggcggaagccatcagctatggagataggcagatgattacagctcttttgaggaagcttaagcagcaatccagggaaagtgttgaagaaaaacgacctcgattattaaaagccctgaaagagctaggtgacttttatctagaacttcactgggattttcaaagctgggtgcctttactttcccgaattctgccttccgatgcatgtaaaatatacaaacaaggtatcaatatcaggcttgacacaactctcatagactttactgacatgaagtgccaacgaggggatctaagcttcattttcaatggggatgcggcgccctctgaatcttttgtagtattagacaatgaacaaaaagtttatcagcgaatacatcatgaggaatcagagatggaaacagaagaagaggtggatattttaatgagcagtgatatttactctgcaactttatcaacaaaatcaatttctttcacgcgtgcccagacaggatggctttttcgggaagataaaacagaaagagtaggaaactttttggcagacttttacctggtgaatggacttgttttagaatcaagggagagtttgagtaaaggtggaaacataatggaacagaattttgaggtataatttttaattcttctaatttgtagttttctaagaagagaggggatagatttcattcttggtggcattcagtaagtatataaatgtactcacagcttttatttactgtgtgttacctttttctgtgaatcttcatttcgttgatgtcattattatgaagacaaaaaaatgtcttttgggatttttttgggaatctgtactttatctttgagtcttcatta

SEQ ID NO: 107022 - DNA, 797 bp, Homo sapiens
aaaagggataaaatcagcctggccttccattttttcatatgtctttacttatctgaagtaacaaaagtgtgatctgtcagtatttctaactttaatttatgtatggaggcaactgaagatattctcaagcacaaaagaattcaagaaacgtagcagtcgtaggacttttttcaaagaaaaatgctactacttaaaaaagaaatccatccaaccaaaagatgaaagaaattatagcataatgactaatatgatatagaatgctaagagatattatgaaattgtagttcagaaggaaagacagtataacctgaaattttatgtgagtcaagtttccctttaaagataagaagcaatcatttatcaaatatgcaggaaatcaaggaatattaagcacataagagccttttacacacacaataaattgacagtggaaatcagccacccaaacagtgaatctagttactagctttgagtccatctaaatatggacctaaaatcaaacaattgtgaaaattatggctgcacaatcaaaagttgtaaaccattatagagtaaaaagttaggaggaataaagtctgtaatttactcatccttagtatctggaagtcaatactactgtccaggtttgaagcatgtagttgaaaagcataaggacacaaggcaatttgaacaatgaaaacatttttttcttcttccatttttcagattattgaatgttttagaagtagtagctcccttcaagcactttaacaagcttagagaatttgttcagatgaagcttcctccaggctttcctg

SEQ ID NO: 107023 - DNA, 355 bp, Homo sapiens
tcgcccacagccactttagcagtatgtgtctgtgtgtgcatgttggagggggcattgttggatgtgtgggaagagcaagaaaatcacattctttttgcatcgctctgtaaactcatgaatcattggtacagctgtcccctggctactgggagcatggccgtgctttatgtttctttattgtgttaaggtgaaagatgcaataattttggtggtagaattttaacactttgaggactggagccagtaaataccttctaagtgcctgggattgtgcaaggtgctttacaaatataaactcagctctgaaagcaacccatctactacctactgttgcccattgcatagacaaagaaac

SEQ ID NO: 107024 - DNA, 251 bp, Homo sapiens
gattgcaagatccatgcccggccttgcctctgaacttttaaagaccattgtgagtattgattatctgtagaagcttacaagatttccttatctttggtattcaaaagatccatcaggttgaatgtctcagcatctgatgcgcccatccaatctaaagacatgccttagcacattaaaagtttgtatcggttgtctactgtattgtctcttgttctcatgttcttgaactcctgttagattgttggccatat

SEQ ID NO: 107025 - DNA, 410 bp, Homo sapiens
aaatgactctccccatttcaacaaaaatattagcactgttctacattttgatttttctcttaatatatcatggatgttatttgttgttatagagctgtctcattttaaaaaatggttgaattgtattacctttcatggctatatcataatttatttatctagctgtccactgagagacgcttagcttgctaccaatattttactgttaccgcagtgaatatctttacatgtgtcatatggcctatctgtaaaatatagttgtagaatacattttaaaaagtgaaattgcgaagttagaaggtatgtatgttttaaattttgatagctctcgctaaactgccttctgtagatattgtaccaatttacactcctaccaacaatgcatgagagtgactatttccccataactg

SEQ ID NO: 107026 - DNA, 874 bp, Homo sapiens
cccgtccccaccacaggaatcttgttttctaaccggccgtgctggtggacactgcgcaattttgcacttggagcgcttaagaagttcgggttgggtacgcggaccgtcgaggcgcgcgtcctggaggaggcggcttgtctgctagacgaatttcaagccaccattgcttcggcctggccgggagagcggaagggcctggtgtgggagagtcccttgcactgccaagacggggccactggaaggtatttgggtggaagaaagccagtaagcccatggggctggctgggggcaggaccacgcgttatgaccaccgtcctgttcctacccccaggagccccgtttgaccccgtgcggctactggataatgctgtatccaatgttatctgttcttgtcttcgggaaccgctatcgctatggggacccggagttcctgaggctcctgaacctcttcagtgacaacttctgcatcattagttccagatggggcgaggtgagagggccggccacaatctttccttggtgcgtccagccttatgccaaatcccgagtacacagacctacctacaatggatcattagaatgggacagattcctggaagagttctagaacatccagtatcaaagtcctagtccaatctccctgtagggaaactaaggcctagtggccttgtgcagggcccatgttgagacagaccctgtctctccagatgtacatttgcctgtccctcatggactggctcccgggcccgcaccaccgaatcttccgaaacttttcggagctgcgggtcatctctgagcaaattcaacgacactggcagatgcggcagccagcggagccccgcgatttcattgattgcttgaccagatgggtaag

SEQ ID NO: 107027 - DNA, 294 bp, Homo sapiens
tagtgattagccgatgcttatagaggcacaagggagggagtgaccacttaggagagtggcagaacactctctcggtgtttttgaaaatggttttgaaaactttcagcctgagggcagactgaaattgtgcttgaagagccacaggatagagtccaaggtgaccaaagctgccgggaagtgaggggggatattccaaagaggggagagccagagcgaggagtcccgaattctgtgtatcaactctgccctaatctcttgctgggagatgtatgtttttgttgttgtttttgtttt

SEQ ID NO: 107028 - DNA, 325 bp, Homo sapiens
attaagcacctaatgtgtgtactgtgctgggcactagcgatacatgaatgaacaagacattgtctgtgcctccaaggagcttacagttcagtacctcagttttcccaagtgaatgattataaacaagccatttttgtcatttgtaccctctgtgtctatcataattacaaatgaagttgtagttagctatttctacccttgctagtaggtccttattaagttactaataaatgtatattttttaaaaaagaatcagccatgcaatatttatatggcatagtgccttgcatacatataatacttttttttttttttttttgagatg

SEQ ID NO: 107029 - DNA, 319 bp, Homo sapiens
tcaaatctctgaatcaataattgaattaaacctggtgaacaaagaagagaataactgattgtatttaattcttttttaaaatttattattattatttttttgagacagggtctcattttgtcatccaggctggagtgcagtggcatgatctcagttcactgcagcttcgacttcctaggctcaagtgatcctcccaccttagcctcccaagtagctgggacgaccatgcctgtctaatttatgtattttttgtagagatgagggttgccatgttgcccaagctggtcttgaactcctgggcttaagtgatcacctgcct

SEQ ID NO: 107030 - DNA, 830 bp, Homo sapiens
gagcaggtgggccccggggccgggccgcgtggggttctccgtcctccgggtgcagccagacctggcggtgcagcggcagcaccagtgagaggcgaagggggcctgtgaggcaagggggacttccaggccctgagcatctcaagaaaacagccatgaagccccacacccaggtgccaggtgcagaggccaaggggtcctggggacaggagcggctgatctccctcagggtagagcagcagcgcgcccaggacagaaccgcctgccctgccgcgggagggggacagggacccaccctggctggggcccacagagtccagaggaccaggagctcgcccctgctccagcaggaggaagggagcggaggaacacccctcctgggacttgaagctggaattgactgagtacttactggatagagaccggtttaaactgagagagactgttcaaactggagcaaagtgaaaagctgttacccagataatcaggtcttacaattggccacgaaggtgtcttttcttttctttgccacaggatcatggtttttcccatttgttaattagaggattcagttgctcacctgagccacaatagatgcgggtagaaacgggacacctacagagatctgatttttgtcacgcttctggaaattcataggtaaatctcattcatggcactccactctctaccccaaatccctgtcaagtcccaatcccttggtgtgccctgctcctttcatccgtttaaccattccggagatacaatggtgagaactgcctgagaggggctggattccagagggagagctacccatttcgccaaggcgaacgccg

SEQ ID NO: 107031 - DNA, 1063 bp, Homo sapiens
taaagagatagagtctcactatgttgcccagacaggatttgaattcctgggctcaaggtatgcttctgtcttagctcctcagtagctgagaccatgggcacccaccactgtgcccagattcgggctttcttgtaaaaagcggatggatgcttgaaactattttctgaatccctttggctcccaaatgtgaatattctgggaaatatttttatccaaattagctgagtaatcgagtagttaggcacattttgaagactgaggcttgtcctttaaaagaagggcagcccacaaactgacttccttgagccaaaaattgttttaaaaggggaagtacagcccaaaacagtgattttaaaatatcaacaaaaagagtcaaattctgtgaaaatatttaaagagatttattctgagccaaatatgagtgaccatgtcctgtgacacagccctcgggaaatcctgagaacatgtgcccaaggtggtcagggtacagcttggttttctacattttagggagacatgaggcttcaatcaaatacatttaagaaatacattggttcagtccagaaaggcaggacaacccgacgcgaggcagggagcttccaggttataggtacgttttaaatttttctggttgacaattggttgagtttatctaaagacctgggatcaatagaaaggaaatgtctgggttgcaataagagttgtggagactgaagttttattatgcagatgaagcctccaagtagcaggcttcagagagaatagattgtaaatgtacttaaggtctgcgttgatgtgaatgccggcttgaggtataatgaggcatatctgacccccacttcccctcatggcctgaaacaatctctcaagttaaattttaaaagcgccctggccaaggagaaagtccattcagatggttagaggccttagaacattatttttggtttacaaaaacgttgagttgtgaacactgagagcctctgcccagaatgtaaaagagagaattcttgctgactgtggccgggcatgcatgtcctttcacttcctttttttttttttaaaa

SEQ ID NO: 107032 - DNA, 3564 bp, Homo sapiens
  misc_feature (1729)..(1729): n is a, c, g, or t
  misc_feature (1733)..(1733): n is a, c, g, or t
  misc_feature (1978)..(1978): n is a, c, g, or t
cagaagaaggattaagtatgacagcttgtctcaataatggaagtaaaaagcagagatcctggaaagaatctgccatccatcagaggaatttgtctgactttgtggtattgctagggggtgtatggttggagtattattttgatggtgctggatcaccctcatcacagtaaactcaagaacataggacagcttgtgaaataggttcttacttgtaaggtttgtatttatttttcttgcttttgaaatcttggatttaaatataataaaagtagatagcactgtcaatatttagactgtactgataactgtttaggtaaaggtctgttgacacttgtatcctagtaagactttgaaagtaaactttgtaaaataatgatttagtttgtcccttccctcttataaaattgaaagtgtaactcagaaagtaggctgtaagatcttcaggctgatgtaggatggtatactgcctaaccagtgaggatgacttttgggaaaataatgtggaagaaactaactgtggagcagcatcttacttatatttaattatagtatagtgaatatctggatcagcagatgatacttattttatagtagggcatttgcttttctctaattatctacttagaaaaagctgcttgcttttaaatgagagatttctggtcataaataagggggaggaattatagtttaaaagcaacacctcatgggagcaataaatgaactcacatagcagtagcttctttttcgcgagctttatctgtaggtctgtacttttaacatacattattttggataataaggaggaacatatgcagcagaaaaaagaggaggaagaagttcttaaagaagtaactgcacatttccaaattactttaactgaaactcaagcccagctggaacagcatgaaatacacaatgccaaactgcagcaggagaacatggaaatgggagaaaagctaaagaagctcactgaccagtatgcactgagggaagaggtaaacggcgtttggtttgtttatagacagctgctcaccagtagcaaaagctacaccctaccgtaaagtaaaaactctttcacaggacagtattttagaacttttgtgtatgcacagtggaaattacatgtttattaggaaaagagtagaaacctgtaaacagaatgactaaattggagcatcacttggcccaagtgtcagtggagtaggataagtaaagggatttctaggagatgtgtaccacttgtctcccatatgatgctacaagattgtcaatatagcatacagatatttttctcttatgcagtctaataatacagatttgttccctaaatactctgtatctcagatttctgtgacaatctgaacaatataaataggagaattgtgctatttgtgagaataaggaacctactaattacccatcaccaagtcacattgtttgtgtaatcaatgaagtaaaaagtttgtggaggactcaatagttgtcgaacctagtcattggagttattttataaattgatgtggaagttgtatgatggctaaataaaaaacaaataggtgataacctgcttatttgtttttattttttctttacttttagaggtctatacatagggtaagatttcaattttcaaaggatgcatccccttcctttattatgctttaagctagtaaaatatatatttaaatccttacttagtagattaaaattggaaatagaaagtgacaanttanaaattaataaaacagtaaatattactttatgcatatcaaaatgttattttgagttacaccttttcatgctacttttgaaaacatttttctttaagattttgagtatcttttaaaccattttcctctatgtttcaagaacatttcaaacttattatggaagctgcaaacttatagtagaatatatcacttggctttagcaattatttacttttgtttctagcaactcttgtttccatctatttttnagcaaatccaagatattatatcattttatttattactattcaaatatgcatcatgaaataagattctttttaagccataatcactgtactatttttactccaaaaggttaaacaattgctatgtaatcacataccttctcactgtactatttaaatatctgttacttcccttttccttcaggttgtttacatcaacatcaaaataaggtttatacattttattgttttaatatgtctcaagtctttttagtatataagcttcccccccctcttttttttccttggaatgtatttattaaagaaattttttaggcctatatagtgaacttttaaaattaaatttgttttatattataaagcatattatgaatatcatcagtttttttaaaagaatcctttaaattccattgttttaaataatggtattaaaaatgattaattttattttattttttattattttactctttaggatttatattattttaactgtattaaactctccaaatttgctatagaagtagcagattgggagaggacatgtgttcaagttgtactacttgtatgtcttgtttagatattacagtctttttcttttatcagaaaataattgaataatgataaaatcagttgcagattaagacagattatctgttgcagtcttctcaaaacttaatttaagtacattattttcagctagcatttcttccttcacatagaacctccatgtgtggagggatttcctaatgagtctattgtatgtacaatagcacttaatgacatagcttttaaataataacaggattttaccaaatgtttaatatgtgccaggcatcaagcaccttacacagtttaattattgcatagatttggacagcaactctgcaagttaggtatggtcatgaacctttgcagataaggaaactgtgtttcacaaggagaagaaattgtcctggatcatacaataagctaggatttgctccagaccatttttttcattttatcaggctacctacaattaaggaatttcagaagattttgtgaacaaaaaatgtccaggaattatgtgtgtaataaatgaatttgatattttgatctccttatccatctttttcttgataaaatatcagcttttttttttccaatgtagggcagaagcaagaagtacagatattttgatggggacagcccacgtctgatagggtgggacatggggcagcagttagagggttgtgctctttctagtgtgggatagtttgcaagatgatatgttgtagccacttctgcagtgacggggacagaaggagtcagtgttcttaactacagtggtagcagcagaaaagaagggtaagcagggttctagaaatttgtgttatgttttctccccactgtatttatttctttggttagtggtgcaagaaattctgttttcctgtagcaaattaataaagcgttcaaacataaggaattacgacaacagcttgtagatgccagacttcaacaaacagcacagctgataaaagaagctgatgaaagacatcagagagagagagagtttgtaagttctacttcttggaaaaaaaaaa

SEQ ID NO: 107033 - DNA, 412 bp, Homo sapiens
gcggccgcctactactactacgactactactactaaattcgcggccggtcgacgggttgtgctctttctagtgtgggatagtttgcaagatgatatgttgtagccacttctgcagtgacggggacagaaggagtcagtgttcttaactacagtggtagcagcagaaaagaagggtaagcagggttctagaaatttgtgttatgttttctccccactgtatttatttctttggttagtggtgcaagaaattctgttttcctgtagcaaattaataaagcgttcaaacataaggaattacgacaacagcttgtagatgccagacttcaacaaacagcacagctgataaaagaagctgatgaaagacatcagagagagagagagtttgtaagttctacttcttggaaaaaaaaaa

SEQ ID NO: 107034 - DNA, 2750 bp, Homo sapiens
  misc_feature (915)..(915): n is a, c, g, or t
  misc_feature (919)..(919): n is a, c, g, or t
  misc_feature (1164)..(1164): n is a, c, g, or t
tgctgttccagctgggcttgagtttcagttaaagtaatttggaaatgtgcagttacttctttaagaacttcaagcccagctggaacagcatgaaatacacaatgccaaactgcagcaggagaacatggaaatgggagaaaagctaaagaagctcactgaccagtatgcactgagggaagaggtaaacggcgtttggtttgtttatagacagctgctcaccagtagcaaaagctacaccctaccgtaaagtaaaaactctttcacaggacagtattttagaacttttgtgtatgcacagtggaaattacatgtttattaggaaaagagtagaaacctgtaaacagaatgactaaattggagcatcacttggcccaagtgtcagtggagtaggataagtaaagggatttctaggagatgtgtaccacttgtctcccatatgatgctacaagattgtcaatatagcatacagatatttttctcttatgcagtctaataatacagatttgttccctaaatactctgtatctcagatttctgtgacaatctgaacaatataaataggagaattgtgctatttgtgagaataaggaacctactaattacccatcaccaagtcacattgtttgtgtaatcaatgaagtaaaaagtttgtggaggactcaatagttgtcgaacctagtcattggagttattttataaattgatgtggaagttgtatgatggctaaataaaaaacaaataggtgataacctgcttatttgtttttattttttctttacttttagaggtctatacatagggtaagatttcaattttcaaaggatgcatccccttcctttattatgctttaagctagtaaaatatatatttaaatccttacttagtagattaaaattggaaatagaaagtgacaanttanaaattaataaaacagtaaatattactttatgcatatcaaaatgttattttgagttacaccttttcatgctacttttgaaaacatttttctttaagattttgagtatcttttaaaccattttcctctatgtttcaagaacatttcaaacttattatggaagctgcaaacttatagtagaatatatcacttggctttagcaattatttacttttgtttctagcaactcttgtttccatctatttttnagcaaatccaagatattatatcattttatttattactattcaaatatgcatcatgaaataagattctttttaagccataatcactgtactatttttactccaaaaggttaaacaattgctatgtaatcacataccttctcactgtactatttaaatatctgttacttcccttttccttcaggttgtttacatcaacatcaaaataaggtttatacattttattgttttaatatgtctcaagtctttttagtatataagcttcccccccctcttttttttccttggaatgtatttattaaagaaattttttaggcctatatagtgaacttttaaaattaaatttgttttatattataaagcatattatgaatatcatcagtttttttaaaagaatcctttaaattccattgttttaaataatggtattaaaaatgattaattttattttattttttattattttactctttaggatttatattattttaactgtattaaactctccaaatttgctatagaagtagcagattgggagaggacatgtgttcaagttgtactacttgtatgtcttgtttagatattacagtctttttcttttatcagaaaataattgaataatgataaaatcagttgcagattaagacagattatctgttgcagtcttctcaaaacttaatttaagtacattattttcagctagcatttcttccttcacatagaacctccatgtgtggagggatttcctaatgagtctattgtatgtacaatagcacttaatgacatagcttttaaataataacaggattttaccaaatgtttaatatgtgccaggcatcaagcaccttacacagtttaattattgcatagatttggacagcaactctgcaagttaggtatggtcatgaacctttgcagataaggaaactgtgtttcacaaggagaagaaattgtcctggatcatacaataagctaggatttgctccagaccatttttttcattttatcaggctacctacaattaaggaatttcagaagattttgtgaacaaaaaatgtccaggaattatgtgtgtaataaatgaatttgatattttgatctccttatccatctttttcttgataaaatatcagcttttttttttccaatgtagggcagaagcaagaagtacagatattttgatggggacagcccacgtctgatagggtgggacatggggcagcagttagagggttgtgctctttctagtgtgggatagtttgcaagatgatatgttgtagccacttctgcagtgacggggacagaaggagtcagtgttcttaactacagtggtagcagcagaaaagaagggtaagcagggttctagaaatttgtgttatgttttctccccactgtatttatttctttggttagtggtgcaagaaattctgttttcctgtagcaaattaataaagcgttcaaacataaggaattacgacaacagcttgtagatgccagacttcaacaaacagcacagctgataaaagaagctgatgaaagacatcagagagagagagagtttgtaagttctacttcttggaaaaaaaaaa

SEQ ID NO: 107035 - DNA, 411 bp, Homo sapiens
tgccccatggacttacacgtcaaatcaatgctaattgtttaaggcacctgttaggggttgaattttgtcccctcaaaatttgtatgttgaagtcttaacccttaaccttatttggaaatagggttgttgcagttgtgattagctgagatgaagtcacactggagtggggtgggcccctaatccagtctgactggcgttcttacaaaaagaggaaattgggacacagacatgcacacaggaagcacaccatgtgaagatcagagttctgtggccacaagccaaggagctaccagaagctcggaaggaacagaaccttccctggtgtctttagagggagcacagccatgcccacaccttcatcttgaaccttccagcctccaaaactgtgagacaatatgtttctgctggcta

SEQ ID NO: 107036 - DNA, 223 bp, Homo sapiens
caactgtacccatcataatgaaacagcaaaacactccagttaaaaagatctgaaaaataacagagggggaaaaaaaaaaaaccaagttacctgcaaagaactaaagattagactaatagatttcttaggagccacaatagtagtcagaagatagtagaatatcttcaatagtggagagaaaaataacatcaatttagaattgtgacattgtttcacccagtga

SEQ ID NO: 107037 - DNA, 1005 bp, Homo sapiens
gggcggtacggtccggaatgttgggatcatggccatcactgcctgcagccatggagagccatcaggacttccggagcatcaaagcaaagttccaggcctctcagccggagcccagcgacctgcccaaaaaacctccgaagcctgagtttggtaaactgaagaagttctcccagcctgagctaagcgagcaccccaagaaggccccgctgcctgagtttggtgcagtgtccttgaagcccccgccgcctgaggtcactgacctccccaagaagcccccgccgcctgaggtcactgacctccccaagaagcccccgccgcctgaggtcactgacctccccaagaagcccccgccgcctgaggtcactgacctccccaagaagccgtccaaactggagttgagtgacctctccaagaagttcccacagctgggggccactccgtttccaaggaagcccctgcagcctgaggtcggtgaggcccctttgaaggcctcgctgccggagcctggtgcgccggcccggaaacccctgcagcccgacgaactcagtcaccccgccagacccccctccgaacccaaatccggcgcattccccaggaagctctggcaacccgaggccggtgaggctaccccgaggtccccgcagcctgagttgagtacctttcccaagaagcctgcgcagcctgagttcaacgtgtaccccaaaaagcctccgcagcctcaggtcggtggcctccctaagaagtccgtgccgcagcctgagttcagcgaggccgctcagactcccctctggaagcctcagtccagcgagccgaagcgcgactccagcgcctttcccaaaaaggcctcccagcctccgctgagtgactttcccaagaagcctccgcagcctgagcttggggacctcaccaggacctcctcagagcccgaagtcagcgtgcttcccaagaggccgcggccggccgaattcaaagcgctctccaagaagcccccgcagcccgagctgg

SEQ ID NO: 107038 - DNA, 591 bp, Homo sapiens
ctgacattatggctgcaaagtgtccaggacagggcctggtacacattagatgctcaacaactgaggcttttctcttttccctctgttgtgcctgccagacgaagcccaggcttgacaggagaaagttcctggcttcctagaaaacctgcccagaacaataactgggaacataaactgctggagaacactagaccttggaagaagatcacgttactgaagtgtcagtcaggggataagaagtggagcaagatcctagcgcagagatggtgtggaggaatctgcctccccaggcctctcacttggggccggtgcagtgttcagggaaggcatctctgcttccgcaccagacctgcactggagaagtcaaggtggggaacgtgacagcgccagggtcccaagtgccagagccctcccttgcccctccccctcagggctgctccaccctgaccctgtgtcctacagcctcacacttctgccatcatcattattattatggcccctccctgaagctcagtcccctcaacctcacctgcccaccctgatttacctgggttgcctgggaggaggatgtgagaagggagtcagatgtgt

SEQ ID NO: 107039 - DNA, 752 bp, Homo sapiens
ctcccaaaatgctgggattacaggtgtgagccattgtgccaggctgggatttgagatttttgatttgactaggaataaccctgtctgaacaaacatctcctacctgattgcaataccatatgtcacccttataaacagaagcctctgtggaaaccaaaacgttcagtataaaagggaaaaacacagttatatactttttataatattgagcaataacgaccattttctccataaaattcgtgtttagctcccacacacatgaacataaggcaaatggcatcaggcttctggaatacaggaagggctgatggtgcggtagaagaggggaagagaggcagggccagatgttacggtggagactgtgtttgtatatgtttccttcagctcatctcagaattttttcatccatgtagggaaaagccgaggacagagtagtatgatagtcgttcttgctgtcactgaattaagaattttaaaattcaaagagtgtcaaacttgtgtttctttctttttactacttctgtctctctcagaatggaacctcacacccttcggtaaacttagaaaatatacgcctggcctcactccttattcacctacacttttagcagaatgaatgtcttatctctcaaatcaattttcagatttcaatgtggtatttctgcactagtcacagtctgatgtataacactgtggtaaaattgactatggcttgaacaacacagtggaacctaattgataactgcaggaca

SEQ ID NO: 107040 - DNA, 82 bp, Homo sapiens
gggtatctgtctcagacagtgctgttcctgatgacctttgtgaggaacattgggactaagatttgtagcactgtgtgaagtc

SEQ ID NO: 107041 - DNA, 671 bp, Homo sapiens
gcggctgtggggaggggaaaggggcccacgcagtgcctggagagtcccgctgcgggtcccacgcgggctggacctccccacagcgatgctgggatcctgggacgctctcaaggcttgagagcagtcgattgaagggtgagaatgggggaagtctccaaaaaaaccaaaaaacaaaaaatgtatgttggaggaagacaaggagcgcagtagggatcctgtaccatcaggctcgtgatgggatcggattgtgtgcatcggagtgtgtgcatatctgccagttctgacctcactttcctcttctgtaaaatgggcagagtggggttaactagattttactgaaggctccttccacggaaatatttcctaattttatttcctaattttatcaagtacctactaaaccaccactggctcctcgtcgtccaccctcctccctcactccacctgcagggccctcattgctgcattaacgaaaggcagagacgttgggggaagggggagaatatctcacactcctttaaagttagtaactggggcgcaccagggcgcacctgggtggaggggctaaggctttgggccaggttgcccaagcagagtggctggccctctttcctgcctcagatcaggaactgccagaggctttgggagctggtgttgcgcttctgtccacc

SEQ ID NO: 107042 - DNA, 795 bp, Homo sapiens
cgcggtggctcacgcctgtaatcccagcactttgggaggctgacacaggcagacaatgaggtcaggagatcaagactatctggctaacacagtgaaaccccgtctctactaaaaatacaaaaaactagcagggcatggtggcgggaggtacttggcagtctgaaacaggagaatggtgtgaacgtgggaggcggagcttgcagtgagccactgcactccagcctgggcgccacagcgagactctgtctctaaatacataaatacataaataaacaaataaaaataaaaagacccaaggaagcagcatttaaaaatattgttcctcctccaaatacatttcagtcttgagaaagaacataagacagtttttcttcatgtatttgcacatttcccatgaaatctcagacactgttatccttaaagaggaaggtaaaatcaagttcaacatcccatagggctcattctgagatatttgtgcttgtggcaagttatatgtagcagtgcgtatgattcttaaagatagttttttactcctggtctctggcaacagtttggggagcagctctttaaatagcaaagaataaaaacataaaggacagtttttttaaaatgccattaccaaatatgctgtagaaggagtcaaaactcttgagtagcaaatacagcaggatcctttatttattgagcttagataccagtgcatagcacagaaaaagttacatttgtactcacacatattcctccatcagtctagttcaactctgaagtaaaccaaagtaatatttataaaagaat

SEQ ID NO: 107043 - DNA, 457 bp, Homo sapiens
ggtggccctggcagtttctccccttcctcggggcttttctgttctgggcccctcctttccggaagcgagccccggagcacgtggagggagtggccgcggagcctgaggctgggaccttgagtggttctggctttttcccagggcctctccctgcagtgagagtgctgtgtcctctgcatcctgagtgtgtcctaaatcctgaaggtggggtgagggcacaccccgcacttctgtgtgtgtgtgtgtgtgtgtgtgtgtgtgtgtgtgtgtgtgtgtttttgagacagggtctcgctctcttgcccaggctggagtgcattggcactatctcagctcgctgcagcctctgcctcccgggctccagcaattctcctgcctcagcctcccaagtagctgggactacagatgggtgcccccacaccccactaatttttatatttttagtagagacagggtt

SEQ ID NO: 107044 - DNA, 241 bp, Homo sapiens
gtaaatcccaactaatattgtcaatagtaataatttatattgttacctgtactatatcctacattccagtctaaaattatgtgaatgtcataatcaatacatagtcttcctgtgagtaatgtcttccagctagagtattttgtttattacaattctgttgtccctccaaatagatgagcaaatatgtaatttcaaaatatttccataatttatgtattttttacgagtcactttctgatta

SEQ ID NO: 107045 - DNA, 284 bp, Homo sapiens
agtacttagaacaatgcctggcatatataagcactaaaaaaatccgtttaaaaaatccacttttaaaaaaagtgaatcttacatgttaaggctactgtaaagaaaacagtgtgatattgatggagagatagacacatagatcagtgaaatataatagagaaatatatcacacaagtatagccaaccgattttcaacaatgttgcaaaaaaaaattcaatggagaaaagatagtcttccaataaatagtgctagagcaactggatgtcaataggcaaaataatga

SEQ ID NO: 107046 - DNA, 394 bp, Homo sapiens
cagatggctatgtaccaaaaatgtgaattcttccattcaatgaaatgtaatgcagccttacttaccgtatgccaggcacctcgctgggcctgtggggtcccgggatgggtagaagtgacaaggcccctgtatatattccagtaggggtcaggggatttcaaagccacaccagtaggtaatgtagcggcagacagcattaagggctgggggaaagcatgaagccaagtgggggacagagagtgacagggtctacctggacatatggtggtcagggaaggttgtcctgagtccatctttgccaggagcaccagcagagccagggggacctcggggaccagcaggaccagaggctcccagagggaccttgttcaccaggagagccagggaaaggggg

SEQ ID NO: 107047 - DNA, 318 bp, Homo sapiens
gacctatacttcagaaatttggaaagaggagaagtgggacatgcccaaattaatgggacttggccactaacggggtttgaaggacaaaggagagggaagagtcagataggattagcatagcacatgactgcctaagagatgctcacaaaaataaatggctgaatgagtgaatgaacccagcggttttaaatctggaggcttaagacagtttttggtagctgagggagaacagaaatagctatgtttactgttaatatagaatatgtgttattctttgcactcacctttcccacctatattgcagacgccactgatagc

SEQ ID NO: 107048 - DNA, 327 bp, Homo sapiens
gggtggtggtgggtgcctgtggtaccggctactcgggaggctgaggcagaagaatggcgtgaacccgggaggcagagcttgcagtgagcggagattgggccactgcacaccagctaattttttgtgtttttagtagagatgaggtttcaccgtgttagccaggatggtctccatctcctgaccttgtgatccgcctgccctggcctcccaaagtgctgggattacaggcgtgagccaccacgcctggcctggttggagtttcttaagaggaggcagaaggccctttctggtctcattctacaggtaacatacccagtctaatttatc

SEQ ID NO: 107049 - DNA, 350 bp, Homo sapiens
cccagccaagagttcttaattttaacgaagtccaactttttgattatttctttcattgattgtacctttaaaaagccatctccaaacccagggtcatctagattgtcttctgtgttattgtcttaagagttttatagttttaccttttacatttgggtctttaatgttattttttgtgaagagtttaaggtctgtgtctagactgatgttttttgcttgtggatgtcaaattgttctagcactttttttttttttttttttttggagacagggtctcactctgttgcccagtctggagtacagtgtcgtgatcttggctcactgcaacctccaccttccgggttcaagcg

SEQ ID NO: 107050 - DNA, 445 bp, Homo sapiens
tggactggattgagggatgcctagctggttagtgaagcactgtttctgggtgtgtctgtgagggtgtttccagaggagattgacatgtggagtcagtggactgggagaggaagagccacccttgatgtgagtgggcaccatctaatcagtaatgggtgtgattagaacaaagcaggtggaacaagggggatactcagattgcttaccttcctccctctctcccttttgcagtgaggcaccttttctcctcctgcccttagacatcagactccaggttcatcttcctttggactctaggtcttgcactagcagcctgcctggggctctcaggccttcaccctcagacttattcaggactgcattgtcggcttccctggtttcaaggcttttggacttgaactgagccacactactggcattccctagcttacggatgacctattgt

SEQ ID NO: 107051 - DNA, 381 bp, Homo sapiens
cagagtgccacctaaaaataaaaaagaggtgcagaggggacacgtggcctcactgtgatccctatagattggtgggaccactgtaatctggtttatcctctgcccagttcaaatcatccccaaaattcatatggttattgtgtattattatacatccttttttggcaggtgctcaggttttttgactactctcctaggaatttaaaataacaggttatccaccttacaatcaggatccaggcccatgccaagggccaggcccctttgagacttaggctgggctgcaagagaagcacctatcacctattcactctgtgcagtccttggacacagtttgcttcctctaggagaaatctcagctgttgtagcctgggttgcctc

SEQ ID NO: 107052 - DNA, 691 bp, Homo sapiens
tccatggtgtgagcacctcctgcctcctgcctttcacctccactgcttggcctcttcaaaaccctctccatccaacctgctcctgtcaaatatgtctcttgtcagactgagcaatgtcagactgagagcatttatttcatgggcaggaagccagagtggctgctgtgatgtctgactgcacgtgtggtgcaagcacacaggggaagggggccttagattttctcaggtcaaggaggaccatgcggcctggccttctccacttagcgctgcatgagctcactgggctggcatcagaaagcccttccaaaacaggaagatacaagataaaacctccaagagagcaagggaggagagtgatgctccctctgggaagaatgcaccaagccagaaataaacaccttcatgaaaaatattttaaaagttaagctcaaaattgttttttaaatgcagctttactgaaaaaactataagctcagagtctctgctggggcaaggataaacaaagcacggttctttccaacaggaagccctcagtctagcaggacaggtaaatcaggcgagtgatttattttaaaagagaaagacaagggaaatgaacatttactgagtgtctacttcatggcaaagcttggagcagactatattacacacacatacacacacacacacaaattcacacacatctcatttt

SEQ ID NO: 107053 - DNA, 1643 bp, Homo sapiens
gccgggccaatgtcctatctcagggtttcccacgtcgctcgctccttgacggctgaccgacactgggtctgaggtgtaagcgctttccaggcccttccctggggcttggaggggaatggcgcaaaggacttttcttacaagcagagaggttggactcctgaaagcctggacagtgtcatcatcttcacctgaagagtggaaaaattcaagcaaagagtttctcaggaaatgaccaaataaaacatctggagtaagtcagcaggattcacagtgactccccccaaccagctggtggtgtttctctctgaaagcagcgcttggtaccagtgtgaactctcttccttcagaagtctcatcaggtgtttcagatgagttctccggaatttggacctcctactcttgggttgaaggtggacgtaatacgagggtctggtcccccataccttgaggactccgctgccatctgacaattacagacaatccaattgtcctcatccttgaggactctgctgccatctgacaattagagacagtccaaaacatgccacactttgatcctaaacacattcctggctttggtcacttttgaaaagtccctgagttatgagaaatcaataataagagtgttcaaaacctgaacactctttttagaaatacctgctggaactacatatatgatttatggggtactgtcttgtagtgtctgggaaagtagacccatctaacctggaatgatcataggcaacaatgaccaaaaatggggatcttttgatatacctaaagtaatttatttgtgcacaccattggaaagagctggttttagaaccagacatgtaaataagagactgacttccactggcacctaaaaacttctaaaagaaatcctgaaagaaaaagtcaccttcattcaagaggtaaacaaagggatatttgaaactatgttaaaagacttcagaggctttctccctttcacctccagaccctccttttccttccagccctgtgatctgaactcatccctttctgccgcttctcttggcttccatacatctcttaggcagagatgttttaaaatttcacaatgtacacatttccttctctcaggggaaatgaatttaaatttagagcagaaggaacaagcagaacaacaacagaatgggaataagactgctgagactataaaaatgcagatccaacaaaattttttctcaccaggtctagtgaatgacactgtgatatggtctggctctgtgttcccaacaaaatgtcatctcgaattgtaatccccacgtgtcgggggagaagcctggtgggagatgattggatcatggaggcagtttcccccatgctgttttcatgatagggagggagttcttacgagatgtgatggtttaaaagtgtttggcagtggccgggcgcggtggctcacgcctgtaatcccagcactttgggaggccgaggcgggtggatcatgaggtcaggagatcgagaccatcctggctaacaaggtgaaaccccgtctctactaaaaatacaaaaaattagccgggcgcggtggcgggcgcctgtagtcccagctactcgggaggctgaggcaggagaatggcgtgaacccgggaagcggagcttgcagtgagccgaga

SEQ ID NO: 107054 - DNA, 1632 bp, Homo sapiens
gccgggccaatgtcctatctcagggtttcccacgtcgctcgctccttgacggctgaccgacactgggtctgaggtgtaagcgctttccaggcccttccctggggcttggaggggaatggcgcaaaggacttttcttacaagcagagccactgcagttaccaaagagtatgtcgcttattgtctaagaggttggactcctgaaagcctggacagtgtcatcatcttcacctgaagagtggaaaaattcaagcaaagagtttctcaggaaatgaccaaataaaacatctggagtaagtcagcaggattcacagtgactccccccaaccagctggtggtgtttctctctgaaagcagcgcttggtaccagtgtgaactctcttccttcagaagtctcatcaggtggacgtaatacgagggtctggtcccccataccttgaggactccgctgccatctgacaattacagacaatccaattgtcctcatccttgaggactctgctgccatctgacaattagagacagtccaaaacatgccacactttgatcctaaacacattcctggctttggtcacttttgaaaagtccctgagttatgagaaatcaataataagagtgttcaaaacctgaacactctttttagaaatacctgctggaactacatatatgatttatggggtactgtcttgtagtgtctgggaaagtagacccatctaacctggaatgatcataggcaacaatgaccaaaaatggggatcttttgatatacctaaagtaatttatttgtgcacaccattggaaagagctggttttagaaccagacatgtaaataagagactgacttccactggcacctaaaaacttctaaaagaaatcctgaaagaaaaagtcaccttcattcaagaggtaaacaaagggatatttgaaactatgttaaaagacttcagaggctttctccctttcacctccagaccctccttttccttccagccctgtgatctgaactcatccctttctgccgcttctcttggcttccatacatctcttaggcagagatgttttaaaatttcacaatgtacacatttccttctctcaggggaaatgaatttaaatttagagcagaaggaacaagcagaacaacaacagaatgggaataagactgctgagactataaaaatgcagatccaacaaaattttttctcaccaggtctagtgaatgacactgtgatatggtctggctctgtgttcccaacaaaatgtcatctcgaattgtaatccccacgtgtcgggggagaagcctggtgggagatgattggatcatggaggcagtttcccccatgctgttttcatgatagggagggagttcttacgagatgtgatggtttaaaagtgtttggcagtggccgggcgcggtggctcacgcctgtaatcccagcactttgggaggccgaggcgggtggatcatgaggtcaggagatcgagaccatcctggctaacaaggtgaaaccccgtctctactaaaaatacaaaaaattagccgggcgcggtggcgggcgcctgtagtcccagctactcgggaggctgaggcaggagaatggcgtgaacccgggaagcggagcttgcagtgagccgaga

SEQ ID NO: 107055 - DNA, 1871 bp, Homo sapiens
gtctgtgatgcccttcattgtaaacatttcttgtgagccgcatcctactaatcttgtggcattggtttgctcgggaatgacgttcacccacagacctgaaaagtccttacagagttgggaagctgcgtgtcatcattttttcagttggcaaatctgcccactttgaactgacataattgtagcctaaaagttcagagagagagtagttcaggaaaaagactattccttcttcttagagggaacagcagccctgaaaactatgtggacatcataccagcttcttacaacaaaaggtgcacttggtctaaattatctggcagctctagataacgttctcatcaagtacctgtttgttgtagttatgcatatttattccttggcttagccactgcagttaccaaagagtatgtcgcttattgtctaagaggttggactcctgaaagcctggacagtgtcatcatcttcacctgaagagtggaaaaattcaagcaaagagtttctcaggaaatgaccaaataaaacatctggagtaagtcagcaggattcacagtgactccccccaaccagctggtggtgtttctctctgaaagcagcgcttggtaccagtgtgaactctcttccttcagaagtctcatcaggtggacgtaatacgagggtctggtcccccataccttgaggactccgctgccatctgacaattacagacaatccaattgtcctcatccttgaggactctgctgccatctgacaattagagacagtccaaaacatgccacactttgatcctaaacacattcctggctttggtcacttttgaaaagtccctgagttatgagaaatcaataataagagtgttcaaaacctgaacactctttttagaaatacctgctggaactacatatatgatttatggggtactgtcttgtagtgtctgggaaagtagacccatctaacctggaatgatcataggcaacaatgaccaaaaatggggatcttttgatatacctaaagtaatttatttgtgcacaccattggaaagagctggttttagaaccagacatgtaaataagagactgacttccactggcacctaaaaacttctaaaagaaatcctgaaagaaaaagtcaccttcattcaagaggtaaacaaagggatatttgaaactatgttaaaagacttcagaggctttctccctttcacctccagaccctccttttccttccagccctgtgatctgaactcatccctttctgccgcttctcttggcttccatacatctcttaggcagagatgttttaaaatttcacaatgtacacatttccttctctcaggggaaatgaatttaaatttagagcagaaggaacaagcagaacaacaacagaatgggaataagactgctgagactataaaaatgcagatccaacaaaattttttctcaccaggtctagtgaatgacactgtgatatggtctggctctgtgttcccaacaaaatgtcatctcgaattgtaatccccacgtgtcgggggagaagcctggtgggagatgattggatcatggaggcagtttcccccatgctgttttcatgatagggagggagttcttacgagatgtgatggtttaaaagtgtttggcagtggccgggcgcggtggctcacgcctgtaatcccagcactttgggaggccgaggcgggtggatcatgaggtcaggagatcgagaccatcctggctaacaaggtgaaaccccgtctctactaaaaatacaaaaaattagccgggcgcggtggcgggcgcctgtagtcccagctactcgggaggctgaggcaggagaatggcgtgaacccgggaagcggagcttgcagtgagccgaga

SEQ ID NO: 107056 - DNA, 1592 bp, Homo sapiens
gccgggccaatgtcctatctcagggtttcccacgtcgctcgctccttgacggctgaccgacactgggtctgaggtgtaagcgctttccaggcccttccctggggcttggaggggaatggcgcaaaggacttttcttacaagcagagaggttggactcctgaaagcctggacagtgtcatcatcttcacctgaagagtggaaaaattcaagcaaagagtttctcaggaaatgaccaaataaaacatctggagtaagtcagcaggattcacagtgactccccccaaccagctggtggtgtttctctctgaaagcagcgcttggtaccagtgtgaactctcttccttcagaagtctcatcaggtggacgtaatacgagggtctggtcccccataccttgaggactccgctgccatctgacaattacagacaatccaattgtcctcatccttgaggactctgctgccatctgacaattagagacagtccaaaacatgccacactttgatcctaaacacattcctggctttggtcacttttgaaaagtccctgagttatgagaaatcaataataagagtgttcaaaacctgaacactctttttagaaatacctgctggaactacatatatgatttatggggtactgtcttgtagtgtctgggaaagtagacccatctaacctggaatgatcataggcaacaatgaccaaaaatggggatcttttgatatacctaaagtaatttatttgtgcacaccattggaaagagctggttttagaaccagacatgtaaataagagactgacttccactggcacctaaaaacttctaaaagaaatcctgaaagaaaaagtcaccttcattcaagaggtaaacaaagggatatttgaaactatgttaaaagacttcagaggctttctccctttcacctccagaccctccttttccttccagccctgtgatctgaactcatccctttctgccgcttctcttggcttccatacatctcttaggcagagatgttttaaaatttcacaatgtacacatttccttctctcaggggaaatgaatttaaatttagagcagaaggaacaagcagaacaacaacagaatgggaataagactgctgagactataaaaatgcagatccaacaaaattttttctcaccaggtctagtgaatgacactgtgatatggtctggctctgtgttcccaacaaaatgtcatctcgaattgtaatccccacgtgtcgggggagaagcctggtgggagatgattggatcatggaggcagtttcccccatgctgttttcatgatagggagggagttcttacgagatgtgatggtttaaaagtgtttggcagtggccgggcgcggtggctcacgcctgtaatcccagcactttgggaggccgaggcgggtggatcatgaggtcaggagatcgagaccatcctggctaacaaggtgaaaccccgtctctactaaaaatacaaaaaattagccgggcgcggtggcgggcgcctgtagtcccagctactcgggaggctgaggcaggagaatggcgtgaacccgggaagcggagcttgcagtgagccgaga

SEQ ID NO: 107057 - DNA, 1538 bp, Homo sapiens
gccgggccaatgtcctatctcagggtttcccacgtcgctcgctccttgacggctgaccgacactgggtctgaggtgtaagcgctttccaggcccttccctggggcttggaggggaatggcgcaaaggacttttcttacaagcagagaggttggactcctgaaagcctggacagtgtcatcatcttcacctgaagagtggaaaaattcaagcaaagagtttctcaggaaatgaccaaataaaacatctggagtaagtcagcaggattcacagtgactccccccaaccagctggtggtgtttctctctgaaagcagcgcttggtaccagtgtgaactctcttccttcagaagtctcatcaggtggacgtaatacgagggtctggtcccccataccttgaggatctgctgccatctgacaattagagacagtccaaaacatgccacactttgatcctaaacacattcctggctttggtcacttttgaaaagtccctgagttatgagaaatcaataataagagtgttcaaaacctgaacactctttttagaaatacctgctggaactacatatatgatttatggggtactgtcttgtagtgtctgggaaagtagacccatctaacctggaatgatcataggcaacaatgaccaaaaatggggatcttttgatatacctaaagtaatttatttgtgcacaccattggaaagagctggttttagaaccagacatgtaaataagagactgacttccactggcacctaaaaacttctaaaagaaatcctgaaagaaaaagtcaccttcattcaagaggtaaacaaagggatatttgaaactatgttaaaagacttcagaggctttctccctttcacctccagaccctccttttccttccagccctgtgatctgaactcatccctttctgccgcttctcttggcttccatacatctcttaggcagagatgttttaaaatttcacaatgtacacatttccttctctcaggggaaatgaatttaaatttagagcagaaggaacaagcagaacaacaacagaatgggaataagactgctgagactataaaaatgcagatccaacaaaattttttctcaccaggtctagtgaatgacactgtgatatggtctggctctgtgttcccaacaaaatgtcatctcgaattgtaatccccacgtgtcgggggagaagcctggtgggagatgattggatcatggaggcagtttcccccatgctgttttcatgatagggagggagttcttacgagatgtgatggtttaaaagtgtttggcagtggccgggcgcggtggctcacgcctgtaatcccagcactttgggaggccgaggcgggtggatcatgaggtcaggagatcgagaccatcctggctaacaaggtgaaaccccgtctctactaaaaatacaaaaaattagccgggcgcggtggcgggcgcctgtagtcccagctactcgggaggctgaggcaggagaatggcgtgaacccgggaagcggagcttgcagtgagccgaga

SEQ ID NO: 107058 - DNA, 349 bp, Homo sapiens
gcttctccttcaccttccaccctgattttaagtttcctgaggcctccccagccatgtagaactgtgagtcaattaaaccaattttatttataaattatccggtctcaggtagttctttatagcagtgtgagaatgaactaatacacactgatttattgacccactgtgagacagtaccctttaaatcttatcatgtctttaaaatgctaacattcagggaattagctaagcagcattccagatgagatcagatctaagacaagataaaatccttaaatgcttaaactgcctgctttggattccctgcaaaatttaccaaaaaacaaacacacaaacaaaaaaatgaaaa

SEQ ID NO: 107059 - DNA, 400 bp, Homo sapiens
tctctcttgccagttgtttgccttcagagttacagtttagaaacaacacttaaactgatatcctctgaagaaaaaaacagatacaaattcatgaagtcgtagttatacttaaatttcctccgtcacagagaaacatgttatttttagaaagtggatcccaaacctaactgatcagaatcccttgggggaaatgtttttaaaaaataccattacctgtgcactggcccagaaaatccagggccattagagactgcaaatgtctgagaatctgtgtttcctaaaaggcacaatggtgattctgatgggcagccatgtttgagaacctctgattgaattgtgcacaattttgatggtgctgctgttgcattataggtaattcaaagaagagcttctttttttt

SEQ ID NO: 107060 - DNA, 157 bp, Homo sapiens
attagacacaaaacacatgggatttaaatttattaacactagaatcctgttagaaccattaactgacaccagtgtatttaactctctgaccttgggacattagttaagggatgacaaccatcactatttattgttaatctgtaatgtgattttatgc

SEQ ID NO: 107061 - DNA, 226 bp, Homo sapiens
gctcgcgaacgtgttatccatagtcatatgtcaaaagagtgagcgatatttaatccttatacacacccatcttaccaaccacaaacaatctttcattctctcgtcctgaccctcattctgatgttatcctctatgctcactttgtatatgcaaactactctgaggtctgccgtatgtgagcatagaggataacacgttcgcgaggggatcctctaggtcagccccg

SEQ ID NO: 107062 - DNA, 399 bp, Homo sapiens
gtacattctcatggtgaagaacagcttcatcaaagctcagagcagcagagagtgcgcaccaggtctcaggaggcaggcccaccccacgggcgctctgccgggtcattcacatattctctgtgcagatggcagatggcacggtgccaggcttacagtttcatgctcactgtgctatgggtgtgaggctgcctcagctcctcccgaaggaatgaaaaccccctgcccagagtagaggggtaggggtttctagttttgggggcttcctgtaactggtgagatattcctgacacacattggtcagtttcactgttcgttggtcgttagtgtatagttccgggcatccagtgcgttcacagtgccgtgaacccgtgtccagtcccacacccctaacacaagctc

SEQ ID NO: 107063 - DNA, 269 bp, Homo sapiens
gaagtgctacacctacttttaaacaagtagatctcacaagaacttacgatcgtgagaacagtagcaaggagatggtgctaactattcatgagaaaccgcccccatgatccaaccacctcccaccaggccccacttccaacattcaggtctacgattcgacatgagatttggtggggaaacacatccaaatcatatgaccatgtcttatgagtcccaaggcagcagttcccaatcagtgcctaagagctgggtaggaacctcctgagtcc

SEQ ID NO: 107064 - DNA, 843 bp, Homo sapiens
cagaaacaaaagtttcttccctggaagggatgggagcagcaggggctggtggaggagctgccactgttttggtcacagaaccacgcgttctccaggtgaaaggtaaagcttcaactctgcacagtaatccagggaagcatcttcttcaacgggacgcgagccgctttctcctgtcgctgtgggtttcatttgtggcgacgtctctgcaacatccatttttccctgagtttctttctggccgtagcatgcaccttcgggggctacgaagttctgatgctcaggtactacaggagatccattgaactgaatctctggaagtggggcccaggcctctccttttcagaagctcagtgtgtgcttctgatgtacagccagagtttagagccatcaggctcacccagtcacggtgataccaactctccaaccagtgactgttcttggaacatgcagatcactctattctagacgtgaggcatgaggagaagcctgcaggaagcttctggaaaggagttcatcactcctaaggggaaagtgcctcgcaacagaccaacctggtgagggaggcggggggagcacatggcgcaacccaccctcctaccatccacattgcaaagccccagcgattcctgggcgtcacttttccacccccacccaccctgtgtctctgtggcttcgggcgcgagcttgtgggcagagccaacagacagagctggggacacctggggcccttcacagcgagatgccagactcaggcctttaccaactgcgcgtcactggtagaaaaggacattaggaacactaggtaaaaagcaaaacaaaaataaatctcacttggcatctttc

SEQ ID NO: 107065 - DNA, 1131 bp, Homo sapiens
cgcctcggctttctcatgatcagaaagttgaactactgaaaaatgcactgctcatccataaacctattagctttcaatgcttctatttttatataccagcattgagtttgttcattcctagaaacaaaggacataactttggactggacacattttaacttttcattctttttttttttttgagttatttcatttttatcacttttaaacaagagttgctgattttaacgacctttctttccccttggttgtatcctgaaagctatttcttatagagcaaggaatgttaaatttgatgctgtcaaatcatgacagtttagtgaaaaccttttttgcaacataagttgtaaaagcttttctgttcagaaggaatgtgaaatttgtttttaaaactactccaacaatttttgttttatcaccacttttgcagaagtctaggagttctggatattcacgttaaaagctgacaaatgtaggacttttttgtttcttttgcttgcttggtaaaaaaaaaaaattattattattattattattactatttgagacaaagtctcactctgttgcccaggctggagtgcagtggtgcaatcttggctcactgcaaccttggcctcctgggctcaagcaattctgcctcagcctcccaagtagctgggattacaggcacccaccacccaggcctggctaatttttgtatttttagtggagacggggtttcaccatgttgaccaggctggtctcgaactcttgatctcagacagtccacctgcctcagcctcccaaagtgttgggattacaggcgtcggtcactgcgcccaggtggcattgtattttaactaacaacagaatgttaccttgtgtacattgaataattaaaagttttttttttttttcttaaagtctacaacttaagacaaggtattttctaaacactgaacatattaaaagcagaccatttcaacagagaacatgtccattctgaaatagcctaacaacattatatactatgctggtgttgttttgttcctgctcagcaggtatttctgtaaatgaagtaatcagggaaggatcaaaggagaggtgaagtatgaaatcttattttattcaaaggtcaccgtctgaatcttc

SEQ ID NO: 107066 - DNA, 709 bp, Homo sapiens
tacagttgtatgaatctatacttttctttaaccaaaacagaacagtatcctttaaaacttaactgagatgttgaaggttaacaggtatctctgagaagaaagttgtctttgtgttttaaaacatggttggtagtcattcaattaccttcttctcatccttattctgcaatccatactgggttggtaactctgtaggtactggttttataattaatattatgtatttagtaggcaataaatttttattgtattttaataaattaaccttgctaactaatgtggaaaactataataccataagtgtagggaataatagagtcgataccttaaagattattaaaggcaaaatgtttttatctcaaaaaagtaaataagtaaaattcaaaaatgcctagagatcaaccctaggtggccgcttagggatggaatttctggggttctgctaatgaaattaattcatgatgttttctcagtttgcatacttataaatctatatggtgtcacagatgtgtctttgaaagtgcaatcccttttgagacctgtaatgaccgagcaggtatgagtttcggctgctcttctgtggcttcctttttttagtcttctcacggctgtcttaacacatttgctgttctgtcttctggggctataaacacccagagagtagaatctatatattatcgtttctccagctgtttcctaatcggcttaa

SEQ ID NO: 107067 - DNA, 806 bp, Homo sapiens
ttcaagcaactctcttgtctcagtctcctgagtagctgggattataggtgtccgccaccacacctggctaatttttgtgtttttagtagagacagggtttcaccatgttggccaggctggtctcgaactcctgacctcaggtgatccgcccgcctgggcctcccaaagtgctgggattacaggcgtgagccactgctcccggtccccctccctttcttccctttctcagaagctttgcagaaccatgcttcagtctatccgtctttaatactaacctgcaaccttagaacttactcatttctttggaaatgagttttgttgagaatgctaattgttatttaagacctcaaggactaggagggcctatgaggaggaaggtctttcaggtggtgcccagggcagggcatgttccagtgaggtagggaggtgtgccaggtgtgcatttatgtgatggtgtcagggctggatttgttggtgacccaggcactgtgatcactgtgagtaaacagctgggtgtatctagtgggtgtcctgggacttgtctgttggcagggaccttaaattgggacacctgtttccttttgggtgtgtctttgtagatgtatcttttcccaaaagaggttgaggattctggggaagactgaggacagggagggggttatcacctttatattggaattatcatagggagagatttattcaggatggtttactggaaccagtttattcctttggttgcttctgggttcaagtttaggacctgtctggtttccaaaggaatcagtgtgtttctggagagagagagc

SEQ ID NO: 107068 - DNA, 390 bp, Homo sapiens
gattcacttaattgtatccagaaataataggcttcaggcaagagttgatatccagctgcctactaatatcaccacagattgtttctttctcactctctgtcttttacagtagtagttttgtcctaagactgggtctgcttataaaatcacacaatgaaatgattgccagcaacaatcaggactacatgcttcttcattcacatcaagcagaaagaaaaggatcttttcctctctccaccatggaaataagtcctgggcttcattttggttgacccaaactgagtcacatgaaccaaccccaatggccaagagaatatcatgtgactttaggacaatcagcacctaccccaaaagttagaagtcaaagggtcagtgcccctcagacatcac

SEQ ID NO: 107069 - DNA, 4263 bp, Homo sapiens
gggaaagcgaggagccgcggcggcgtggagccggcgggcccgggcgggggctccccggagccctaccaccccaccctgggcatctacgcccgctgcatccggaacccaggggtgcagcacttccagcgggacacgctgtgcgggccctacgccgagagcttcggcgagatcgccagcggcttctggcaggccacagctattttcctggctgtgggaatctttattctctgcatggtggccttggtgtccgtcttcaccatgtgtgtacagagcatcatgaagaaaagcatcttcaatgtctgtgggctgttgcaaggaattgcaggtctattccttatcctcggtttgatactctaccctgctggctggggttgccagaaggccatagactactgtggacattatgcatctgcctacaaacctggagactgctccttgggctgggccttttataccgccattgggggcacagtcctcactttcatctgtgctgtcttctctgcacaagcagaaattgcaacctctagtgacaaagtacaggaagaaattgaagaggggaaaaatctgatctgcctcctttagtttggaagagacaatgccattttctcccttgagtaatcttgtgaaacagtccacagtttcatcatttgagtcaagtggagaactaacctttacctaccaaagccacgttccacggcccgaggcttaaacaggaccaatgagaggccacatccagctacgcaaagttactggacatgcggtctgcagtgcacattataaggaatggaacatgaaaatagtatataatcctagacctggagttgccaagttctgtcagactccatctcccccaggttcaatgatggatgataatctaaatcattagggcagcagtttctctggtaacggaagagaccgtccgccagatctgcaggctgtttctgctccaacactgcttgcttgtgagcatctctgcctcagaatggggttttgggttggagttcttgttttcctctgttctttcaagttgtctccaacgaacagaaaactataaacttactggggacaggatgtgtgctaaagggcacagcaagacactgtcttttgcttagctgaccaaaggggtcagcagggatggcgtggagtcatgctgtggaacttattctaggctgaatcctagggtaaggtggatcaactgaactgtcactccagagattttagaaatttgagtaaagaaacaataaggacctatacaatcatatgagaacaaaaatatgaaatcttgctagtgaagacgtattttttcttcttcccagcagccaggctagcaccagttctggcccagtctcctcttcttctggagatcacatgtttttcttctaaggttaggattgtgctttgactgcgaaaggaaacctcactgtttcctccttccagggactgaggtctccaagctagctgtggcttatgcagatgttcactgggaggacctgccagaatctcggcacttggggggagacctttactcccagtttggtgaccatgctgtagtcagctctatttccaatcccgacagtagcagaatggcattctacaacaaaaagaagctagttatgggagttaagtttttgtagttactggtgttgatcctgaaagcagactgagataacattaaattgctgcaactgaagaactgcagccaagaccttaattccaggaaagcacagaggacaaagttaattcaaaaagaggcgctagatcaaggtcacagcactgcctacacctgtttacaaaaagaatcaaataccactatgaataaggattcaggggtttttaatctactttccataaattaccaatatcactgattcaggaagatagtatctcagaatgaccagagcagcacagaaacaagctactctgacattatgggagcttcaaaattgtatcatgatacagaaacactccttagcactttaagaaagtgagatggaactgccagatttctggaaggagaaaaagtgtaggtatttgggttcattaatctgctcacttgaggactttgttttgaaaaagtaccttctgtggacaaggtattgtgctaccagctatacaaccctgacttcagagtttgcaaccttgccctgagtgaatcatgttaaagctgtctgagtctaaagcaccgtatcttggtgcagaacagataattatacagagatggaatgggacaaccgcagttttactacattctggtgtttggcctatatgagaaaccatcttctcacagattaagggctaagggcaaaaggggtgggaggtgtggaactagccttaatgagtttcccattcctgaaccaaaattcaaagtgagtgagatgtaaatcctgtgattttggtgaagaaaaaaacgggtatcttcatagcagcctaggaaaccttaaccatatctctaacaccacacagaaagaggctggaggagccactggacaaagcttctgtctctgtgtgtacatttataatgttctaaccaagtctcaaaccttgatgaaaaacacaaaatttttccataaacttatcagaagactcacttttctttctttcttggatagagaaaccattttctgacactaggtttacaatctcagtgtccttacaagttaagtcctaagctcacaggatcctccgagcatgtccatcacctgctctttggctaaggtggcagtgtacctctagatcaacctgggaacagtcacaagggagtgtgacttcttggccataataaactcactcgatagtgtttatgttattaatctgaatgcaacagaagacaaaagcacaggcatgcacacacacagaaccccaaaccactaaaaactacctaaacactgacttagtaaatagtaaaaaggtaatgttgggacttttaaaccttgaatccattagccaggcttgggatgaaaggaccatctaaaatcatgctagtctaaaccatgctcttccacacagctgtttaaaaaccactgggtatgaggaatatgctagaaagaaatgttaaaaatagattgttggctcacacttatttttctaataaataggaccattattactaccaggaaagtcttatttattttgcctgaaattggcttaaagaaagtctcatgacgggatgggatgggctgcgcttctcaatgaactctgaggcagaaatatttgccttggattctgtggattctttaaacctgtgtgctaataattcaaacaatgttgcattaattgtataagggtttttgtatagttttcaaacatctgtggtgtaatgatctttgttaaacatatattctgtaaagtgccatagtctttttttatgtgtagcatatttaaaaatatatatgtatattatacatacacaagtttgtgtgaaagatgtgcaataacaaaggtgtatgtatgttttgttgttttgttttggaaactggacaggagtcaaaacagggatgtttgtttctgttttggcaaaggagagttccacatttttgccttcatggcttattcagtaacccataattttaatgctacacaaatcttatgtgaagaaaagactggtatgaaatcattttttcctgggtctaaaataatcgctagtgttatgtcaaagttaagcccgcacgccaggcccagttaatgctagtctttcatgtgaaatgtgaagctgccatgttgccttttctcttagtaggataactagtagctggtacataatcactgaggagctatttcttaacatgcttttatagaccatgctaatgctagaccagtatttaagggctaatctcacacctccttagctgtaagagtctggcttagaacagacctctctgtgcaataacttgtggccactggaaatccctgggccggcatttgtattggggttgcaatgactcccaagggccaaaagagttaaaggcacgactgggatttcttctgagactgtggtgaaactccttccaaggctgagggggtcagtaggtgctctggagggactcggcaccacttgatattcaacagccacttgagccaaatataaaattgtatttacagctgatggactcaatttgagccttcaaacttgtagttatcctattatattgtaaactaatacattgtctagcattgatttggttcctgtgcatatgtattttcactatgtgctcccctccccagatcttaattaaaccagattttgcaattcattcttattctttc

SEQ ID NO: 107070 - DNA, 263 bp, Homo sapiens
cggacgcgtgggtcgacccacgcgtcgtgctctggagggactcggcaccacttgatattcaacagccacttgagccaaatataaaattgtatttacagctgatggactcaatttgagccttcaaacttgtagttatcctattatattgtaaactaatacattgtctagcattgatttggttcctgtgcatatgtattttcactatgtgctcccctccccagatcttaattaaaccagattttgcaattcattcttattctttc

SEQ ID NO: 107071 - DNA, 2091 bp, Homo sapiens
cggacgcgtgggtcgacccacgcgtcaacagataattatacagagatggaatgggacaaccgcagttttactacattctggtgtttggcctatatgagaaaccatcttctcacagattaagggctaagggcaaaaggggtgggaggtgtggaactagccttaatgagtttcccattcctgaaccaaaattcaaagtgagtgagatgtaaatcctgtgattttggtgaagaaaaaaacgggtatcttcatagcagcctaggaaaccttaaccatatctctaacaccacacagaaagaggctggaggagccactggacaaagcttctgtctctgtgtgtacatttataatgttctaaccaagtctcaaaccttgatgaaaaacacaaaatttttccataaacttatcagaagactcacttttctttctttcttggatagagaaaccattttctgacactaggtttacaatctcagtgtccttacaagttaagtcctaagctcacaggatcctccgagcatgtccatcacctgctctttggctaaggtggcagtgtacctctagatcaacctgggaacagtcacaagggagtgtgacttcttggccataataaactcactcgatagtgtttatgttattaatctgaatgcaacagaagacaaaagcacaggcatgcacacacacagaaccccaaaccactaaaaactacctaaacactgacttagtaaatagtaaaaaggtaatgttgggacttttaaaccttgaatccattagccaggcttgggatgaaaggaccatctaaaatcatgctagtctaaaccatgctcttccacacagctgtttaaaaaccactgggtatgaggaatatgctagaaagaaatgttaaaaatagattgttggctcacacttatttttctaataaataggaccattattactaccaggaaagtcttatttattttgcctgaaattggcttaaagaaagtctcatgacgggatgggatgggctgcgcttctcaatgaactctgaggcagaaatatttgccttggattctgtggattctttaaacctgtgtgctaataattcaaacaatgttgcattaattgtataagggtttttgtatagttttcaaacatctgtggtgtaatgatctttgttaaacatatattctgtaaagtgccatagtctttttttatgtgtagcatatttaaaaatatatatgtatattatacatacacaagtttgtgtgaaagatgtgcaataacaaaggtgtatgtatgttttgttgttttgttttggaaactggacaggagtcaaaacagggatgtttgtttctgttttggcaaaggagagttccacatttttgccttcatggcttattcagtaacccataattttaatgctacacaaatcttatgtgaagaaaagactggtatgaaatcattttttcctgggtctaaaataatcgctagtgttatgtcaaagttaagcccgcacgccaggcccagttaatgctagtctttcatgtgaaatgtgaagctgccatgttgccttttctcttagtaggataactagtagctggtacataatcactgaggagctatttcttaacatgcttttatagaccatgctaatgctagaccagtatttaagggctaatctcacacctccttagctgtaagagtctggcttagaacagacctctctgtgcaataacttgtggccactggaaatccctgggccggcatttgtattggggttgcaatgactcccaagggccaaaagagttaaaggcacgactgggatttcttctgagactgtggtgaaactccttccaaggctgagggggtcagtaggtgctctggagggactcggcaccacttgatattcaacagccacttgagccaaatataaaattgtatttacagctgatggactcaatttgagccttcaaacttgtagttatcctattatattgtaaactaatacattgtctagcattgatttggttcctgtgcatatgtattttcactatgtgctcccctccccagatcttaattaaaccagattttgcaattcattcttattctttc

SEQ ID NO: 107072 - DNA, 465 bp, Homo sapiens
gatttcagcactaatgaaggaagagggccagagctctatttccctcctttccatcatcccattagggaaacctaatgactcctgggaaggaacatagcctattgtgttgactacgagggtaatagggacaggaactgtttcatagcaaaacaatcatgatacacgcatcactttctggaactggaatgaaaagtctgaccccctattttaaggcaagcaatgctgtcaacagggaaaatcctttgagtgaaacatttcagcagaattccacttaatgcctgatgttacaatgctactagaagggaacagtagaagggacagtggtgtagataggcctaaacaatggaaaattccttctctgagttcccacgacccaggtgtcaactcctggttcatttctttgtttctcccaatagagcttcttgagggatgaaatctgtcttattttacccaccatggcatccc

SEQ ID NO: 107073 - DNA, 379 bp, Homo sapiens
ggggatgctgccgttctgacagccacctgaactcagtatcccaaattgttcatcgatgtatcccagagcactgtagctaacttgcaagggtgccatggaatatttttaaatttcaagggaaatacactggcgtcattagattgctgtattagatcactgcattcctttcagtgatgtcatacctttgggaagctggattttcagtgcttgctctgataaaaagcaagtactgcctgaaaatcagtgtggaacaggaaatgaggctgtcagtgttcaatctgagtccagagtttgaaaagtatgcagtgcccaacaggcatccagtttttagaacttaaaatacttactaagtggtttggctcttactgcttaacggagg

SEQ ID NO: 107074 - DNA, 446 bp, Homo sapiens
tccaactatccctctgagagtaatgcttcaccttagttatgtctttgctattttcaaaacatttttattctcatggtcccccctacaaggcaaaaatcatgacgcccgttttacaggagaggacagagaggtgaaatggcatgcccaaggtcccccagctgtcaacaaagacacctcaacaggaggccagggctctgagagcctggtgcccgtctgctcatacctgccttccctctgccagtgagccccagtccattatcttgctccagcgtcatccccaaggtcaactccttactcccagctgggttcctcaagggcacctcaaactcaacatgttgaaactgagcttctctcctcctcccctcctggtggctctaatatacaaagtcgctacgtcttggaactctcagagatgcctttgacaaatttttgccatcccttctcta

SEQ ID NO: 107075 - DNA, 167 bp, Homo sapiens
aggatagcagaaaaggcctatatgtgtgatcagctggcctttccaggtggaatgtatatagaagttgtcctgtggtttgaggaagcagctactatttgcagagcctccctcatgtggttctgccacaagccttggctaaaggtagcctcacccgtgattgccagcct

SEQ ID NO: 107076 - DNA, 535 bp, Homo sapiens
cggcttatttacccctgcaacagggactttgcggtttgggtgttgtagctagaattgcgtgaaagccgtgagtgagctgtgcctggcacgctgtggattctagcgctggtagtttttggcttccacataaacttcagcctagagattgggaaggaaatatgtatgtaagggagttagggggtttggggtccttggcttgatagctttttggctggcttctcatcgatcttcaagtcaaacgtttagcgatttcttgaaagaattctctgactcggccccacccactcagccaccgaggtgattaaattatcacctcccaggggataggtatcatcttttgggaagagaagtttagcagattccacgaaatccttggccaacagaataggtgagctagtttcagcttctgtttacttgtagccttccagatttcagtctttgtttaaaatctaggtcccatttggtcagtagatgtttgtcagttcgcttacagtcgcaagagcggtgtaagacttaaatggtaaagtggtggaga

SEQ ID NO: 107077 - DNA, 414 bp, Homo sapiens
tctccagcacacatggggagcttgaaaatgaaagaaaggttgctctgacctctcagaactgcggacttcttaaaaaagaaagagtgaggtgggcggcctcccttgctgccggtgctagattccatgatatgaaacagcaagggtgcagctgggtgcggtggctcatgcctgtaatcccagcacttcggaggcgggggtgggcagatcacctgaggtcaggagttcgagaccagcctggccaacatggtgaaaccccgtctctactaaataatacaaaaattagccaggcatggtggtgagtgcctgtagccccagctactcaggaggctgaagcaggagaatcacttgaacccagaggtggaggttgcagtgagctgagatcacgccactgtactccagcctgggcaacagaac

SEQ ID NO: 107078 - DNA, 935 bp, Homo sapiens
aagaagaggttgttctcacagtggggaggtttcagcacagccacctgctgaggccacagagaacctagatatgtgtcctgtaccctggccagctgccctgagctgtggggtgctgtgcatggccaagcaccgctagaaaagacacttattctgaatttcactcctcccatgccatcgttcagctttcaagtcttgggttagctttttgagataagtctccatggcaagggacaggaaagcatggccatgtccagttctgaaggccatctcaactctccctgtggtcgtgtatctgacttcttgcaaccaggaggaggcatcagaaatttccccagtacccagacgtcccaaggcagttgggcacacttgaactctgccccaagtacagtgcatttgggcacgtggcttaacaattttggacctcagcttcctcattttagaaaatgcaggggccaaagaggcttcctgggacttcatgactcaccctcagaacctaagatctcatgaaccaaagggctgcagctgtggagaggggagaatggggcagtgtgtgtgactacgaagctaaactgggggattcgcacccatttcgtgccttttcagcctccactgggacctcgaactccccaagtcccacaggtcttccaggggatctctcacctccccatgagtcataagccttacgtggcatgcactgcagtgggggtgttgttccctgcctggcatcagactcctgtgtttctgttcaccaggacccagggcagggggttgttctgagggtcacccacactccaagctaggtggtagagctgtccatcttggatctaacccaaatgcaggccctggtgaagaaaggtgagtccacagtgctccacagataatcagggcccgtggtgcccctgtgctcatcaccctgagaagcgtcactgctactg

SEQ ID NO: 107079 - DNA, 255 bp, Homo sapiens
cggcccgctcccctctctccacactggactgtccaggttggaggcatctctgacaccaatcagatcttcggcctgagcgagacggaacctggctccttcctgtattatgctcccttcgatggcatcctggggctggcctaccccagcatttcctcctccggggccacacccgtctttgacaacatctggaaccagggcctggtttctcaggacctcttctctgtctacctcagcgcgtaagttgagtggagaggg

SEQ ID NO: 107080 - DNA, 1376 bp, Homo sapiens
ccttctccctcgagttgggacccgggaagaaccatgaagtggctgctgctgctgggtctggtggcgctctctgagtgcatcatgtacaaggtccccctcatcagaaagaagtccttgaggcgcaccctgtccgagcgtggcctgctgaaggacttcctgaagaagcacaacctcaacccagccagaaagtacttcccccagtgggaggctcccaccctggtagatgaacagcccctggagaactacctggatatggagtacttcggcactatcggcatcggaactcctgcccaggatttcaccgtcgtctttgacaccggctcctccaacctgtgggtgccctcagtctactgctccagtcttgcctgcaccaaccacaaccgcttcaaccctgaggattcttccacctaccagtccaccagcgagacagtctccatcacctacggcaccggcagcatgacaggcatcctcggatacgacactgtccaggttggaggcatctctgacaccaatcagatcttcggcctgagcgagacggaacctggctccttcctgtattatgctcccttcgatggcatcctggggctggcctaccccagcatttcctcctccggggccacacccgtctttgacaacatctggaaccagggcctggtttctcaggacctcttctctgtctacctcagcgccgatgaccagagtggcagcgtggtgatctttggtggcattgactcttcttactacactggaagtctgaactgggtgcctgttaccgtcgagggttactggcagatcaccgtggacagcatcaccatgaacggagaggccatcgcctgcgctgagggctgccaggccattgttgacaccggcacctctctgctgaccggcccaaccagccccattgccaacatccagagcgacatcggagccagcgagaactcagatggcgacatggtggtcagctgctcagccatcagcagcctgcccgacatcgtcttcaccatcaatggagtccagtaccccgtgccacccagtgcctacatcctgcagagcgaggggagctgcatcagtggcttccagggcatgaacctccccaccgaatctggagagctttggatcctgggtgatgtcttcatccgccagtactttaccgtcttcgacagggcaaacaaccaggtcggcctggcccccgtggcttaagcctaagtctcttcagccacctcccaggaagatctggcctctgtcctgtgcccactttagatgtatctaattctcctgactgttcttcccaggggagtgtggaggtcttggccctgttccctgtcctaccaataacgtagaataaaaacataacccactgaaacaggttttgtgga

SEQ ID NO: 107081 - DNA, 1169 bp, Homo sapiens
ccgacctctccacacggtgtaagaacagccccggagaactcctggatggagtacttcggcactatcggcatcggaactcctgcccaggatttcaccgtcgtctttgacaccggctcctccaacctgtgggtgccctcagtctactgctccagtcttgcctgcaccaaccacaaccgcttcaaccctgaggattcttccacctaccagtccaccagcgagacagtctccatcacctacggcaccggcagcatgacaggcatcctcggatacgacactgtccaggttggaggcatctctgacaccaatcagatcttcggcctgagcgagacggaacctggctccttcctgtattatgctcccttcgatggcatcctggggctggcctaccccagcatttcctcctccggggccacacccgtctttgacaacatctggaaccagggcctggtttctcaggacctcttctctgtctacctcagcgccgatgaccagagtggcagcgtggtgatctttggtggcattgactcttcttactacactggaagtctgaactgggtgcctgttaccgtcgagggttactggcagatcaccgtggacagcatcaccatgaacggagaggccatcgcctgcgctgagggctgccaggccattgttgacaccggcacctctctgctgaccggcccaaccagccccattgccaacatccagagcgacatcggagccagcgagaactcagatggcgacatggtggtcagctgctcagccatcagcagcctgcccgacatcgtcttcaccatcaatggagtccagtaccccgtgccacccagtgcctacatcctgcagagcgaggggagctgcatcagtggcttccagggcatgaacctccccaccgaatctggagagctttggatcctgggtgatgtcttcatccgccagtactttaccgtcttcgacagggcaaacaaccaggtcggcctggcccccgtggcttaagcctaagtctcttcagccacctcccaggaagatctggcctctgtcctgtgcccactttagatgtatctaattctcctgactgttcttcccaggggagtgtggaggtcttggccctgttccctgtcctaccaataacgtagaataaaaacataacccactgaaacaggttttgtgga

SEQ ID NO: 107082 - DNA, 1066 bp, Homo sapiens
  misc_feature (108)..(108): n is a, c, g, or t
  misc_feature (111)..(111): n is a, c, g, or t
  misc_feature (119)..(119): n is a, c, g, or t
  misc_feature (130)..(130): n is a, c, g, or t
ctgtgtcgtggttgtctcgtggtcactgtgtcgtgtccgaggatgcctgtcatgctgccggtaccgtaggtgatggagactgtctcgctggtggactggtaggtggangantcctcagngttgaagcggntgtggttggtgcaagcaagactggagcagtagactgagggcacccacaggttggaggcatctctgacaccaatcagatcttcggcctgagcgagacggaacctggctccttcctgtattatgctcccttcgatggcatcctggggctggcctaccccagcatttcctcctccggggccacacccgtctttgacaacatctggaaccagggcctggtttctcaggacctcttctctgtctacctcagcgccgatgaccagagtggcagcgtggtgatctttggtggcattgactcttcttactacactggaagtctgaactgggtgcctgttaccgtcgagggttactggcagatcaccgtggacagcatcaccatgaacggagaggccatcgcctgcgctgagggctgccaggccattgttgacaccggcacctctctgctgaccggcccaaccagccccattgccaacatccagagcgacatcggagccagcgagaactcagatggcgacatggtggtcagctgctcagccatcagcagcctgcccgacatcgtcttcaccatcaatggagtccagtaccccgtgccacccagtgcctacatcctgcagagcgaggggagctgcatcagtggcttccagggcatgaacctccccaccgaatctggagagctttggatcctgggtgatgtcttcatccgccagtactttaccgtcttcgacagggcaaacaaccaggtcggcctggcccccgtggcttaagcctaagtctcttcagccacctcccaggaagatctggcctctgtcctgtgcccactttagatgtatctaattctcctgactgttcttcccaggggagtgtggaggtcttggccctgttccctgtcctaccaataacgtagaataaaaacataacccactgaaacaggttttgtgga

SEQ ID NO: 107083 - DNA, 1025 bp, Homo sapiens
ctgccctcctcccgggctgataccctggaagccaagtcctgcatgagatgaaccagggtggctctgggcctgaggctggcatccagagctcagtgaacatgacccgatggtgaacatcatctcggtttccccacccaggttggaggcatctctgacaccaatcagatcttcggcctgagcgagacggaacctggctccttcctgtattatgctcccttcgatggcatcctggggctggcctaccccagcatttcctcctccggggccacacccgtctttgacaacatctggaaccagggcctggtttctcaggacctcttctctgtctacctcagcgccgatgaccagagtggcagcgtggtgatctttggtggcattgactcttcttactacactggaagtctgaactgggtgcctgttaccgtcgagggttactggcagatcaccgtggacagcatcaccatgaacggagaggccatcgcctgcgctgagggctgccaggccattgttgacaccggcacctctctgctgaccggcccaaccagccccattgccaacatccagagcgacatcggagccagcgagaactcagatggcgacatggtggtcagctgctcagccatcagcagcctgcccgacatcgtcttcaccatcaatggagtccagtaccccgtgccacccagtgcctacatcctgcagagcgaggggagctgcatcagtggcttccagggcatgaacctccccaccgaatctggagagctttggatcctgggtgatgtcttcatccgccagtactttaccgtcttcgacagggcaaacaaccaggtcggcctggcccccgtggcttaagcctaagtctcttcagccacctcccaggaagatctggcctctgtcctgtgcccactttagatgtatctaattctcctgactgttcttcccaggggagtgtggaggtcttggccctgttccctgtcctaccaataacgtagaataaaaacataacccactgaaacaggttttgtgga

SEQ ID NO: 107084 - DNA, 116 bp, Homo sapiens
agcacaacctcaacccagccagaaagtacttcccccagtgggaggctcccaccctggtagatgaacagcccctggagaactacctggatgtgagtgtgcgggcaagtggtggggcc

SEQ ID NO: 107085 - DNA, 206 bp, Homo sapiens
cagtcgctgtagtgtaccacattccaaggaaggcagcaggcgctaaaataaccctcccttcgatggcatcctggggctggcctaccccagcatttcctcctccggggccacacccgtctttgacaacatctggaaccagggcctggtttctcaggacctcttctctgtctacctcagcgcacgcgactggggtcccgcgcacgcca

SEQ ID NO: 107086 - DNA, 1080 bp, Homo sapiens
ccttctccctcgagttgggacccgggaagaaccatgaagtggctgctgctgctgggtctggtggcgctctctgagtgcatcatgtacaaggtccccctcatcagaaagaagtccttgaggcgcaccctgtccgagcgtggcctgctgaaggacttcctgaagaagcacaacctcaacccagccagaaagtacttcccccagtgggaggctcccaccctggtagatgaacagcccctggagaactacctggatatggagtacttcggcactatcggcatcggaactcctgcccaggatttcaccgtcgtctttgacaccggctcctccaacctgtgggtgccctcagtctactgctccagtcttgcctgcaccaaccacaaccgcttcaaccctgaggattcttccacctaccagtccaccagcgagacagtctccatcacctacggcaccggcagcatgacaggcatcctcggatacgacactgtccaggttggaggcatctctgacaccaatcagatcttcggcctgagcgagacggaacctggctccttcctgtattatgctcccttcgatggcatcctggggctggcctaccccagcatttcctcctccggggccacacccgtctttgacaacatctggaaccagggcctggtttctcaggacctcttctctgtctacctcagcgccgatgaccagagtggcagcgtggtgatctttggtggcattgactcttcttactacactggaagtctgaactgggtgcctgttaccgtcgagggttactggcagatcaccgtggacagcatcaccatgaacggagaggccatcgcctgcgctgagggctgccaggccattgttgacaccggcacctctctgctgaccggcccaaccagccccattgccaacatccagagcgacatcggagccagcgagaactcagatggcgacatggtggtcagctgctcagccatcagcagcctgcccgacatcgtcttcaccatcaatggagtccagtaccccgtgccacccagtgcctacatcctgcagagagggtaccaactcgagtcgtatatgtat

SEQ ID NO: 107087 - DNA, 1026 bp, Homo sapiens
tacatatacgaactcgagttccaaccacaaccgcttcaaccctgaggattcttccacctaccagtccaccagcgagacagtctccatcacctacggcaccggcagcatgacaggcatcctcggatacgacactgtccaggttggaggcatctctgacaccaatcagatcttcggcctgagcgagacggaacctggctccttcctgtattatgctcccttcgatggcatcctggggctggcctaccccagcatttcctcctccggggccacacccgtctttgacaacatctggaaccagggcctggtttctcaggacctcttctctgtctacctcagcgccgatgaccagagtggcagcgtggtgatctttggtggcattgactcttcttactacactggaagtctgaactgggtgcctgttaccgtcgagggttactggcagatcaccgtggacagcatcaccatgaacggagaggccatcgcctgcgctgagggctgccaggccattgttgacaccggcacctctctgctgaccggcccaaccagccccattgccaacatccagagcgacatcggagccagcgagaactcagatggcgacatggtggtcagctgctcagccatcagcagcctgcccgacatcgtcttcaccatcaatggagtccagtaccccgtgccacccagtgcctacatcctgcagagcgaggggagctgcatcagtggcttccagggcatgaacctccccaccgaatctggagagctttggatcctgggtgatgtcttcatccgccagtactttaccgtcttcgacagggcaaacaaccaggtcggcctggcccccgtggcttaagcctaagtctcttcagccacctcccaggaagatctggcctctgtcctgtgcccactttagatgtatctaattctcctgactgttcttcccaggggagtgtggaggtcttggccctgttccctgtcctaccaataacgtagaataaaaacataacccactgaaacaggttttgtgga

SEQ ID NO: 107088 - DNA, 1026 bp, Homo sapiens
caggctgctgatggctgagcagctgaccaccatgtcgccatctgagttctcgctggctccgatgacgctctggatgttggcaatgggtctggttgggccgggcagcatgacaggcatcctcggatacgacactgtccaggttggaggcatctctgacaccaatcagatcttcggcctgagcgagacggaacctggctccttcctgtattatgctcccttcgatggcatcctggggctggcctaccccagcatttcctcctccggggccacacccgtctttgacaacatctggaaccagggcctggtttctcaggacctcttctctgtctacctcagcgccgatgaccagagtggcagcgtggtgatctttggtggcattgactcttcttactacactggaagtctgaactgggtgcctgttaccgtcgagggttactggcagatcaccgtggacagcatcaccatgaacggagaggccatcgcctgcgctgagggctgccaggccattgttgacaccggcacctctctgctgaccggcccaaccagccccattgccaacatccagagcgacatcggagccagcgagaactcagatggcgacatggtggtcagctgctcagccatcagcagcctgcccgacatcgtcttcaccatcaatggagtccagtaccccgtgccacccagtgcctacatcctgcagagcgaggggagctgcatcagtggcttccagggcatgaacctccccaccgaatctggagagctttggatcctgggtgatgtcttcatccgccagtactttaccgtcttcgacagggcaaacaaccaggtcggcctggcccccgtggcttaagcctaagtctcttcagccacctcccaggaagatctggcctctgtcctgtgcccactttagatgtatctaattctcctgactgttcttcccaggggagtgtggaggtcttggccctgttccctgtcctaccaataacgtagaataaaaacataacccactgaaacaggttttgtgga

SEQ ID NO: 107089 - DNA, 451 bp, Homo sapiens
catttagtgggaaatgaggtcctcttcatctgaatgattcaagtaaggtttccccaaggaagtaccatgaagaaggcagccaggagtgagagtgcacaaaatgctcagggtgtggtggacagcccagaacctctgcaggaggagatgtgtgtgtgagtgaggtggacagggtgtcataagcaagaaaggcagctggagaaggtcacttagagccttgagtgtcatgctcaggaaccaggctggccccacctgcatggacctgtgcagtcacacagggccccaggcttggcttaatgctctgctgtcaccgtcctgaaattcctaacatttttacctttgaactggtgtggggatgttttgtttgttttgtttcgagacggagtttctctcttgttgcactccagcctgggtgacagagcgagactccatctctaaaaaaattaaaaaagaa

SEQ ID NO: 107090 - DNA, 697 bp, Homo sapiens
gtagtattgtgactggaacttaaccttggtatttaaataaaatttatttttaagtagctgttgtataaaaagaaaacattttaccatgtagaggaaacagtatgacaaaaagcgtattagaatgggagtctctgtgacacctgggttttgggctcacttctagcaataactagcagcaagatccttgtttatagcatactctagtttggtgaaatagtggagtgatttttttgacagaaatagttctcaaataaagattgcaaaaggaatggcttcagattatccggaagaaaagtagattgtttccccttctatatttcatcattcactccaaaaactggagataaaataattagtacagacttttgatttgaaaagaaaatctcagggttagacgtagtacttaatttatttaacaaactcttataaaacactgcatacttcatatagtcttaagcactttagaaatattaaccttaaaaaaattttaggtgtggatgtgatattgaatattctgcatagttttctaataaatttacttacacagatgttcatacatatgtgaatttaatatattatgcattatatattacacccaccacttaacatgtttacagtttcaaaacaactaaaattttagaattccccctagaatatttccattagaatccagtttaactcctgtagagaacagatg

SEQ ID NO: 107091 - DNA, 694 bp, Homo sapiens
gagccctcaggggaagacaaaatgacacagagtgctaagacaaggcagggcaaagttccacgctccagtggcctgtcttgtcctctcaggaaagtgcccaatggccaaacaccctgctccatcactttggggtgcctggactcctccctcctctagtttctgttttcctccctacaccctccccaaaggtagacagcatggctggcctgggctgataaggtttcttcttcctaaaacatcgatcacgtggcctcagaaattcagagcccgagggagtgataggtgactctggccctctgttcacgaacaaactttctttgcaggattgggtcaaccatggggtctgatttggagatgcttcccttctctgtcagctgctcatgtctcaaatgaagagccttttgtgatgaccatgtatggaatagtgtctgaagtaccactgcactgtacctgtctttgcgtctaaacatcactaccatcatcacgggacaaaccgcccatctcagtggtgtctggcagtgagctgtgcgtatgtggatagtgctggtgtttttagggttgaaatttttagtttgttctttatttgagctaatgtttctctcctctgagggtcagggtaatttccctgccttcctctttctctcaaatccccacctcccagtggctgtcctgataccttgaggcacctgcattc

SEQ ID NO: 107092 - DNA, 700 bp, Homo sapiens
cagaatctgggtaaattccttaagaactctatgcctcacttttctcatctgaaaattaggttgttgtgaggattaaatgcactaatttaagtaaagtgctcagcccaggacttggagtaaaacaaacacttaataaatattattattattttcttcggattcagggcaatcaatacgacatcagtaaacttgctgttctttaatacaatggcttttaacctttgttacatattaaaatcaccagggaagcattttaaaactcatgatgtccagaccataccccatactaattaaattagaacagtcatttttagaaattcctaactgatttcaatctataataatttggggaataagtgttacgagtaacttagacaataggtgttatacccagattttcttctgagggaaactattgaagcagggtctatagcttcctcctttctattctgagccaaatgactctgggaaatgatgaaggtcctgatgctattttatcaaatgttgttgcatttcctgcttacatagcttgcactttctttctcattttaagtttctttggcagttatctgaatcttctccaggtaggcagtgccaaacagagagcacaagtgaagacaatataagaaatctggattctctgtgttatttgccagtgctgtagtttgggttcaggggcagaagaaaatacaatctatca

SEQ ID NO: 107093 - DNA, 447 bp, Homo sapiens
gggtgcagcctggacctccagggttcaagcagtcctccctgctcagcctcttgagtagcttggacaacaggtgtgtgccaccacaccaagttaattttttaagtttttcatagagatgggagtttctccattgttgcccaggctggtctcaagctcctgggctcaactgatagaactgtcttgtcctcccaaagtgctggaattacaggtatgagccactgtacctagcctgatctttttaaataaatgattttagacatgaatgttggagcttgagatcagataattggttagcagaattacttaagtcatagccagcctgtgacttgatctattttgggagtatcctttgaaccagtagaggaatccactaaaagggctatatggctgtcattagtagaaaaacaaaaggcaaaatgtgttggcaattttagtttcatgctttaa

SEQ ID NO: 107094 - DNA, 412 bp, Homo sapiens
gcagataaggaaactgaagcttagagaaatttaagtaacttagcagagcttgctggtctgttggaaaagtagacattccacttaagtctggctgctcttagagcctctctcccacacatagagcctctctcccacacactgtgctacctcccactcctcctgtgtgccctcttccactttcaccactgccagtaatgacggtgctcccactctctgcatctttaagccaccttcagtacaaacatcctgcctggcaagcaggagagggattactgccccattcaacagacacgacgctgagggccagggcaggaaagtgacctttgtggggtcgcatggctagtcctcatcctaactgctcagagcattctcaggacactctccccactgatcatggccagggcttcccaaa

SEQ ID NO: 107095 - DNA, 1005 bp, Homo sapiens
aaaacttgcaacaccacttaagcttagatgtattatttgtacctcaacattttttattttgttgagaaagtttaaggttaattggcagcatatttctaatagtagatagaataatgtctgttttataaacattgacatcctacattacatgtgtcaaccctgaaaatctgagacggctctcagattttttagaaagtttattttgccaagcttgaggatgtgcgcccatgatgcatccttaggaggtcctgacaacatgggcccaaggtggtcggggcacagcttggtcttacacactttagggagacatgagacatcaatcagtatgtgtaagatgtacattggttcagtccagaaaggtgagaaggccagacagggggcttccaggtcataggtaggtaagagacaaacgatttcattcttttgcattgctgattaccctctccacgtgaggcaatcaggtatgcatttatctcggtgagcaggtgggtgtctttggatagaatgggaggcagatttgccctaagcagttcccagattgacttttccctttagcttagtgattttgggtccccaagatttattttcccttcataaggttttcctatgagtattaattattcattgtgtattttattacacaaataaggcacagatttttaaaaaatcatcaacttcgtggctacctatatagacataattgcatagaagttcaactaaatttgcaaacatcccagaatttgggtttccaataattcttagtgattctttaaaaggtaaagtatttttttcccataaaacatagcaacatgtaaaatcacccgtagaatgtcccgccatttttgtttttctagtttcctcattttctgcaaagcctcactgaggagattgactttgaatatccttttacactcttctgttttagatagcattgtggtaaaacattgaatcatcatggtcataagttctgtccacattctttctttctttgaatattttttccca

SEQ ID NO: 107096 - DNA, 676 bp, Homo sapiens
cactctcttatttgtgctctcacttccttaaattttaaccttcttctcgtgctgcactttctccaggtatatgagaaacctctccatttttcactttcatctgtattgctctttgcctgttggcctcaatttctcccaccacaagatgagcccctaaacgtatctaagaatgtggcctcaagaaccccagtgtggcaatcccagtgaaaagccttttcccagtactcatctttccatcctggggaaggcatgggattgcttttggttggttgtgtacctaccctggcacacagcactattatcagagtgatgggccaatacaatatatggtgagggaaatgaggttccatgattggccccatcagtcacaaggatggaaaggcagtttcctaagacagatgtatcaggcaggagagaggagctatacaatgtcaacagggaaagtgtaatataaataatcatgaactaataatagagggttagccactaagggataaaaagaagtctaaaggttacagaaacaggtgaatggataaacaaaatgaaatgttattctgccataaaatggaatgaaattctgatacatgctaccccatggataaaccttgaagacattatgcaaaatgaaataagccagactcaaaagggcaaatattatatggtgccacttatacaa

SEQ ID NO: 107097 - DNA, 591 bp, Homo sapiens
attaacagcaatcctatttaaagaattaacagcaacccttctcagattccttaaaaaaatagaataggatggaatactacttaactcattttatgaagtcaacatgatacaacacacaaaaactacataccagtagttcttaggaatatagatgcaaaaatcctcagtaaaatactggaaaacagaattcatcagcatagtagaaggattgtacacaatggccaagtggaattaatcccaagaatgcaagggtagttcaatataatcaaagtcaatcaatgtaagacatcttactaaggcagtgaaagaaaaaatgatcaactcaactggtgctgaaaaagcatttgatgagattcagtacccttttatgataaaacagtcaaacttggaatagaaaggaacataactaataaagggcatctgtgaaacaccaacagctaacatcatacttaaagattccatgctttcttcataaggtcaggaacaagacaagggtgttcactcttaccacttccttttagcattgttgagaaagttatggccaggataattagtcaaggttttttttttttttaaaaaaaaaaaaaaaaa

SEQ ID NO: 107098 - DNA, 3174 bp, Homo sapiens
agcagtagttctcccgggcgcctagcgggatcgccagcgcggcagtgggggcttccgcggctgcaagccagcgggtcctgtgagggcgagcggaggcggagaaagggcgcgggagtgagagagggtgagtcagccactgtctatgcaataaagggaggcctcaccgcgggatagggctgaattcagaagtgcggcccgtgccgcagtctgttccaggacgcggcttgtcttagcgtcagcgagggaaggttgaggaggagccagagcctggtcctgcagcctttctcgccgtcagcgcccgtcgccatctccaccatgcagtcccgggaagacgtcccgcgctctcgccgcctcgccagtccccgtggtgggaggcggcccaagaggatttccaagccctcggtttcggcctttttcacgggtccagaggagttaaaggacacggcccattctgcagccctgctggcacagctcaagtccttctacgacgcgcggctgctgtgtgatgtgaccatcgaggtggtgacgcctggcagcgggcctggcacgggtcgcctcttttcctgcaatcgcaacgtgctagcagctgcgtgtccctacttcaagagcatgttcacaggtggcatgtacgagagccagcaggccagcgtgaccatgcacgatgtggacgccgagtccttcgaggtgttggtcgactactgctacacgggtcgtgtgtctctcagtgaggccaatgtgcagcgcctgtacgcggcctccgacatgctacagctggaatatgtgcgggaagcctgtgcctccttcttagcccgacgtcttgacctgaccaactgcaccgccatcctcaagtttgcagacgccttcgaccatcacaagcttcgatctcaggcccagtcctacatagctcacaacttcaagcagctcagccgaatgggttcaattcgggaggagactctagcagatctaaccctggcccagctgctggctgtcctacgcctggatagtctggacatagagagtgagcggactgtatgccatgtagctgtgcagtggctggaggctgctgccaaagagcggggtcccagtgctgcagaagtcttcaagtgcgtgcgctggatgcacttcactgaagaagatcaggactacttagaagggctgctgaccaagcccatcgtgaagaagtactgcctggacgttattgaaggggccctgcagatgcgctatggtgacctgttgtacaagtctctggtgccagtgccaaacagcagcagcagcagtagcagcagcaactctcttgtatctgcagcagaaaatccaccccagagactgggtatgtgtgccaaggagatggtgatcttctttggacaccccagagatccctttctctgctatgacccttactcgggggacatttacacaatgccatcccctttgaccagctttgctcacactaagactgtcacctcctcagctgtctgtgtgtccccagaccatgacatctatctagctgctcagcccaggaaagacctctgggtgtataaaccagctcagaatagttggcagcaacttgcagatcgcttgctgtgtcgtgagggcatggatgtggcatatctcaatggctacatctacattttggggggacgagaccctattactggagttaagttgaaggaagtggaatgctacagtgttcagagaaaccagtgggcattggtggctcctgtccctcattccttctattcctttgaactcatagtggttcagaactatctttatgctgtcaacagtaagcgcatgctttgctatgatcctagccacaatatgtggctgaactgtgcttctcttaaacgtagtgactttcaggaagcatgtgtcttcaatgatgaaatctattgtatctgtgacatcccagtcatgaaggtctacaacccagctaggggagaatggaggcggattagtaatattcctttggattcagagacccacaactaccagattgtcaatcatgaccaaaagttgcttctcatcacttctacaaccccacaatggaaaaagaaccgagtgacagtgtatgagtatgatactagggaagatcagtggattaatataggtaccatgttaggccttttgcagtttgactctggctttatttgcctttgtgctcgtgtttatccttcctgccttgaacctggtcagagttttattactgaggaagatgatgcacggagtgagtctagtactgaatgggacttagatggattcagtgagctggactctgagtcaggaagttcaagttctttttcagatgatgaagtctgggtgcaagtagcacctcagcgaaatgcacaggatcagcagggttctttgtaaatagtattttgagacactaagatgtttctactgctacggaatgtattttaaacacatatcgtttctttttcttggaaaaaaagttgattaggaccacagatttggtttagaaagggtaatattttgaaatactacaaggtttagacagtccatgaaatcgacctgtttaataatttaccatcctgaaagtccagaattaaaatatggaagcaagaactatataattgattaggatgcttggtaggtttttttcattgttcaaatattcattgcacagtggattgttttgattagttagtatgctttttttttaattaattcagtcttctgttaatttttaagttttggttagtgccacaaggaatttaactttttgatttgtataatagaaaactgaactaggaattgttagcggggttttgaaggatgtgtactttccttcaaaataaagtggtagattttcaaaattttacactagtcagttctttatattctaagttaaatgtagtttgtaaaattattttggttttcttctacaaaggaaaaaattggatttatatatataaggttactgcataatgatttcattttgataatgtgcagaatggcctcataagctcacagaaagtaaaaaaaaaaaaaaaaaaaagaaaaaatcaggattccactgttttaaaagaaatctcagtttttattttggaatataaaatgtgtatttggtatatgtgaccaattttctatcccaaaaaacacccattcttagtaatgtcatgaattaaacacccttctaaaccaaaaaaaaaa

SEQ ID NO: 107099 - DNA, 2994 bp, Homo sapiens
agcagtagttctcccgggcgcctagcgggatcgccagcgcggcagtgggggcttccgcggctgcaagccagcgggtcctgtgagggcgagcggaggcggagaaagggcgcgggagtgagagagggtgagtcagccactgtctatgcaataaagggaggcctcaccgcgggatagggctgaattcagaagtgcggcccgtgccgcagtctgttccaggacgcggcttgtcttagcgtcagcgagggaaggttgaggaggagccagagcctggtcctgcagcctttctcgccgtcagcgcccgtcgccatctccaccatgcagtcccgggaagacgtcccgcgctctcgccgcctcgccagtccccgtggtgggaggcggcccaagaggatttccaagccctcggtttcggcctttttcacgggtccagaggagttaaaggacacggcccattctgcagccctgctggcacagctcaagtccttctacgacgcgcggctgctgtgtgatgtgaccatcgaggtggtgacgcctggcagcgggcctggcacgggtcgcctcttttcctgcaatcgcaacgtgctagcagctgcgtgtccctacttcaagagcatgttcacaggtggcatgtacgagagccagcaggccagcgtgaccatgcacgatgtggacgccgagtccttcgaggtgttggtcgactactgctacacgggtcgtgtgtctctcagtgaggccaatgtgcagcgcctgtacgcggcctccgacatgctacagctggaatatgtgcgggaagcctgtgcctccttcttagcccgacgtcttgacctgaccaactgcaccgccatcctcaagtttgcagacgccttcgaccatcacaagcttcgatctcaggcccagtcctacatagctcacaacttcaagcagctcagccgaatgggttcaattcgggaggagactctagcagatctaaccctggcccagctgctggctgtcctacgcctggatagtctggacatagagagtgagcggactgtatgccatgtagctgtgcagtggctggaggctgctgccaaagagcggggtcccagtgctgcagaagtcttcaagtgcgtgcgctggatgcacttcactgaagaagatcaggactacttagaagggctgctgaccaagcccatcgtgaagaagtactgcctggacgttattgaaggggccctgcagatgcgctatggtgacctgttgtacaagtctctggtgccagtgccaaacagcagcagcagcagtagcagcagcaactctcttgtatctgcagcagaaaatccaccccagagactgggtatgtgtgccaaggagatggtgatcttctttggacaccccagagatccctttctctgctatgacccttactcgggggacatttacacaatgccatcccctttgaccagctttgctcacactaagactgtcacctcctcagctgtctgtgtgtccccagaccatgacatctatctagctgctcagcccaggaaagacctctgggtgtataaaccagctcagaatagttggcagcaacttgcagatcgcttgctgtgtcgtgagggcatggatgtggcatatctcaatggctacatctacattttggggggacgagaccctattactggagttaagttgaaggaagtggaatgctacagtgttcagagaaaccagtgggcattggtggctcctgtccctcattccttctattcctttgaactcatagtggttcagaactatctttatgctgtcaacagtaagcgcatgctttgctatgatcctagccacaatatgtggctgaactgtgcttctcttaaacgtagtgactttcaggaagcatgtgtcttcaatgatgaaatctattgtatctgtgacatcccagtcatgaaggtctacaacccagctaggggagaatggaggcggattagtaatattcctttggattcagagacccacaactaccagattgtcaatcatgaccaaaagttgcttctcatcacttctacaaccccacaatggaaaaagaaccgagtgacagtgtatgagtatgatactagggaagatcagtggattaatataggtaccatgttaggccttttgcagtttgactctggctttatttgcctttgtgctcgtgtttatccttcctgccttgaacctggtcagagttttattactgaggaagatgatgcacggagtgagtctagtactgaatgggacttagatggattcagtgagctggactctgagtcaggaagttcaagttctttttcagatgatgaagtctgggtgcaagtagcacctcagcgaaatgcacaggatcagcagggttctttgtaaatagtattttgagacactaagatgtttctactgctacggaatgtattttaaacacatatcgtttctttttcttggaaaaaaagttgattaggaccacagatttggtttagaaagggtaatattttgaaatactacaaggtttagacagtccatgaaatcgacctgtttaataatttaccatcctgaaagtccagaattaaaatatggaagcaagaactatataattgattaggatgcttggtaggtttttttcattgttcaaatattcattgcacagtggattgttttgattagttagtatgctttttttttaattaattcagtcttctgttaatttttaagttttggttagtgccacaaggaatttaactttttgatttgtataatagaaaactgaactaggaattgttagcggggttttgaaggatgtgtactttccttcaaaataaagtggtagattttcaaaattttacactagtcagttctttatattctaagttaaatgtagtatataagaaatctcagtggttatcttggaatatggaatgtgtatggtaggtatatatgaccaggtttctatcccgaatacacttactcctagtcgtcgcatacttctattccccc

SEQ ID NO: 107100 - DNA, 762 bp, Homo sapiens
ctccactctgttccacccaggaatgggggatgaaatgttggggtgaaaagggcagggaatttgtgatcgtggtagcaccatggctggattcaggcaacagtgttttttcattcattcattctgaaaaattttattgagtctctttaagtcaggtcttgtgctgaggaatcaatgatgaaccaacactgagacattccctgtgctggagaagcctgaatgtgtagaaggctctaccatctagatttgtggtttccagtggaaaagacatcttgtttcctaaacaacaattggccacacactggagacacataacctgcctatgaactggagaatcctattgaaatcttagaggaagtttgagattttcctcagataggtgtttactattcaagttggcacgaataggttttgttaaaacccattttctttctattctgcctctatctggtacaagatagaactaaagaggatataaagcagcaaggtacaatttgaaatcaaatggcaacaatggaagataatggtcttggttcaacccaatgcccacctgaaatcacttttattaaggacgaccaactggaacaaaattgtatattagtcttctcatgataatttcaagtgtgttttgatttgagaatttctttatgaaagtcttcaaaaatcccacctcttaatccatggaattttccctggagtctgaaaattccccaaatctttggagacttgatggttattcactggtcaagggctctataaaagtgt

SEQ ID NO: 107101 - DNA, 502 bp, Homo sapiens
aaagacttgtgaattagaggattgatcagtaagaaatatccacagtgaagcaccgagaaatgaaaggatgaaaaaaacatagtgtaatggagacaagggacataatagaagggttaagacacatacaattgggttataccaaaagagagggctaggagtgtcataagtgctaaaagtcaaggacagtgaaaaaaatatttaattgctagagaaaaaagatactaggttaagaagaataatgggatcaacagccgatttctcaataggtaacagaaagaggatttgtcaccagcaggcccattctgaaagaaaaaggaagttcttgtagcagaaagaaaataatcccatagggaaacaaaatttcaggaaggaataaagaacagtggaagagtaaatgtgaaagtaaatatatatgaatattgactgcagtgtaataaaaatatcttgtttaaagatatatgtagcttgaaaatttaagataaaatggtttaaaagttaggag

SEQ ID NO: 107102 - DNA, 376 bp, Homo sapiens
  misc_feature (2)..(2): n is a, c, g, or t
gnggaaccaaagtccttggctcctggtccaccccaggtttaggagtgcaagtgggtgtgatcttggctcactgcaacctccgcctcccgactactcgggagcctgaggtaccagaatcacttgaacctgggaggcggaggttgcagtgagccgaggtcatgccagcccaggagacaagagtgactccgtctcaaaaacaaaaaacaaaaaacattgaattttactaaggaaaattaatcacaggaattctgttcatatgagatagatcttttgttatgcttgaggtagtgggacataaggagtatttgtttagaaaaaaattttaaattaagtggtattttggataagagagatatcagtattttttaaatgtgac

SEQ ID NO: 107103 - DNA, 282 bp, Homo sapiens
tccacccaccaagaccacaaagcccgattccaccacctctctgccacccctccccctgctacatccttgctttcttctctacccgactcagagccacagccttgtagtcatattggctccctggtgctctcacgtgccaccacgttcctctgccctccaaagcgctttctggcaaatcccagagctgattaaatctaactccccatctcctctgccccaagcagctgtacacagctggaggagatgcagaatcctgctgactggtcccaccgtaaactcttg

SEQ ID NO: 107104 - DNA, 241 bp, Homo sapiens
tccacatcatatcccctctcgccaaggtaataactctccaacaattctctactctccattctgcatcaataattttcccttctatactggatcgttactggtgcaacaaacaaatatgttattgtttccatcaattaaaaacaaaaaaacttgctagggtcccactttcctctccagctaccctcaaatttcctgctctctgggttatccagcctccatgaaggcccctaatggcccccac

SEQ ID NO: 107105 - DNA, 408 bp, Homo sapiens
aatgctacataataaatcctttttctttaacattaattttgtgatattccttatttcatttctactaataaaaatagacatgttttgtttgcattttcccttgttttaatttgtatgtttgtactactttttagatgcttaaactatacataagctattatctattgttcctagtaatcttaggggagtggtctgaaaaaacatcaagcatagtaattgtctgggtagacagatttcagaatttttaaaatgctttaatttatttattagcatttttctttgtatgggctgtgtacttttgcttcaaaaaccattgttaaaaagtatttcttttgtaatcaatctaaataatagactttttttacaggcaaaatgaaagaggaggaagtctgggttttatgaatagca

SEQ ID NO: 107106 - DNA, 408 bp, Homo sapiens
atagtatagtggtgactcagtattttttaaattaatccaccaattatgcttttttgtaatatggtaataatttccctgtttaaactatgattctatccagggcctattgttcctttactaaatggacctaggtggtcgaacttgagttcttgtttctacatgtgatcatttttctttctctttccctgtttaccatttgttttgcttctttaaatgtacctacctttagcaccctccctccaacacttttcttttttttgagacgggagttttgctcttgttgcccagactggagtgcaatggcgcgatcttggctcactgaaatttctgcctcccgggttctagcgattctcctgcctcagcctcccaagtagctgggattgcaggtgcctgccaccactcttggct

SEQ ID NO: 107107 - DNA, 429 bp, Homo sapiens
  misc_feature (159)..(159): n is a, c, g, or t
  misc_feature (186)..(186): n is a, c, g, or t
taagaatattataacagaatcaaggtctgaaggcatcagagggtatttttagactcttctatggggtcatggtctgctctttttaggtgtggatttcacatattaaaattcagtaactagttttagctccaagacgaagccatcgcgttgttgttgtgngcctagtggtggacctaggaaggaggnggagttgacttgtggggggcgggttcggggggtgtgtggggtgggggtggtggtgggggtgggtggtgtggggttgtgggggtgggtgtgggtggtggtggtgtagagcataatgaaaaaatgctatgggtcccaaattataacaaaggataccttttaattttaattccaatattgttttcaataatatttcaacatgtttcctgttgtgccctggtattcttaggcagccagttgtaaaag

SEQ ID NO: 107108 - DNA, 338 bp, Homo sapiens
aaataactcaatgtccatccttatacataaatggataagtaaattgtggtacatccatacaatggaatactactcaacaatgaaaagaaatgaagtactgatacatatagcaacatggatgaatctcaaaataattttgctgagtgaatgaagctaaattttaaaaatcaccatatttttaaaaaaggaagaaaaaaatcaccatataattccattatacaaaattctagaaaatgaaaactaagttatagtgacagagagatgatcagtgcttacctgggcagtgggtagagagggacatgagggagggatttcttttggaggtgatggatatgttt

SEQ ID NO: 107109 - DNA, 741 bp, Homo sapiens
ggtaaaggaagtttccctaccttggcaaacttcccatttgcttgcttaggtgctgaggcttgttcattctttccttgccatagctttttccttcccttccttccttctgcctgccaggctcatctcctaattctacttctacccataaggacaaataatgatcacaccacttacctaattgcctggccctagttctggtcccaactataatcagaaatgtggattctggaatggcagtgaggagcgacgtggactgtatctccagtaaaacaccataactggtaatttagaaaaccaaaaacaaccatttaaactacacggaatttgtcttaagaccactcaggaatttagagaaacatttattcagaaaaatcaactgagcctttctgagaacagtgagagtctgtaacatttgacacacaaactgctaccctccccacccccattttggtccactctgagagaaactccactgtgggctgtgaaaatcacaagatggaaccctgtccctctccagttctcagtctatggtgacagcttttccctgagagaggcacgatgccactattcttaacttctctccccctgccagtcctgtgttcctgaagctggtttcatgtaagtatagttgagaagtgtgtttgggtgtggacctccttgaatttattcttggagtttgttgagtgtgctggccttgtagattcatgtctgtcttcaaattttgaagttttggccattatt

SEQ ID NO: 107110 - DNA, 362 bp, Homo sapiens
aactacatcagcctagatgagggtctctagtggcatgtcaagggactctgtctttggccatatcttattcagcccttttatcaatgactggaatgaaataggtgagggaagggtgaacatttattgagaaactcctgtgtcagcaactattgccaatattttacaaagcttatttatcttatccctcacagcctgactgtaagagaggttgtattaccctttcacagaccaggaaataaatatgtaaccaagggcaagcaacttgcccaaggtctcacagcaattaatgcaataagatttggcatccagactgggatctgaaggctggggctctgtgtcacatgtggcactaaactgtctta

SEQ ID NO: 107111 - DNA, 113 bp, Homo sapiens
tgtctggaggcgcctctcaagtcagccagcgtggcaggtcaggaggagacagggcaggggacgtgagggcaggggatgcagggtggagggcgcacagcgggctgggtgagtac

SEQ ID NO: 107112 - DNA, 1159 bp, Homo sapiens
  misc_feature (692)..(692): n is a, c, g, or t
  misc_feature (797)..(797): n is a, c, g, or t
  misc_feature (940)..(940): n is a, c, g, or t
  misc_feature (1152)..(1152): n is a, c, g, or t
  misc_feature (1154)..(1154): n is a, c, g, or t
  misc_feature (1157)..(1157): n is a, c, g, or t
  misc_feature (1159)..(1159): n is a, c, g, or t
gatgtatttaaattatttctgaatattttactaaaaagggaatgtgggaggtcagtgcatttaaaacataaagaaatgaagagctagttcaaaccctgggaaaatacactatatcttaaactccatgaaagaaggtgaggctgcaaacagctaatgcacattggcaacagccctgatgcctatgccttattcatccctcagaaaaggattcaagtagaggcttgatttggaggttaaagttttgctatgctgtattttacattacttattgttttagctgtcctcatgaatgtcttttcactacccatttgcttatcctgcatctctcagccttgactccactcagttctcttgcttagagataccacctttcccctgaagtgttccttccatgttttacggcgagatggtttctcctcgcctggccactcagccttagttgtctctgttgtcttatagaggtctacttgaagaaggaaaaacagggggcatggtttgactgtcctgtgagcccttcttccctgcctcccccactcacagtgacccggaatctgcagtgctagtctcccggaactatcactctttcacagtctgctttggaaggactgggcttagtatgaaaagttaggactgagaagaatttgaaagggggctttttgtagcttgatattcactactgtcttattaccctntcataggcccaccccaaatggaagtcccattcttcctcaggatgtttaagattagcattcaggaagagatcagaggtctgctggctcccttatcatgtcccttanggtgcttctggctctgcagttattagcatagtgttaccatcaaccaccttaacttcatttttcttattcaatacctaggtaggtagatgctagattctggaaataaaatatgagtctcaagtggtccttgtcctctctcccantcaaattctgaatctagttggcaagattctgaaatcaaggcatataatcagtaataagtgatgatagaagggtatatagaagaattttattatatgagagggtgaaacctaaaatgaaatgaaatcagacccttgtcttacaccataaacaaaaataaatttgaatgggttaaagaattaaactaagacctaaaaccataaaaatttttaangnaancn

SEQ ID NO: 107113 - DNA, 122 bp, Homo sapiens
tgtcatggtctaattaaacaagctaatttatctggaggagttatagatattttgtctcatggtcagtgaatgctataactttaaggtttgtgtctatctcctataccattccctcattgtat

SEQ ID NO: 107114 - DNA, 354 bp, Homo sapiens
aattcatgaactacagaaaaagagctgcaaagggaatgagccgctgaagggtgatctccgaaatttaaactatactgagcagttgctgttgggcatctaggataggattcaactttttaaccgctccttgtaaatcaaacccatagctttcaattcttttaaagacagtctgtggtcctcagaagtatggtgcagttcagcgtggctgatgtgagccattcttgattgaaaggatttcttacagaaaagctaatggaaacaggttaataggaaacaggctaatggaaggtgtttttagctaggacaaatgcagggactcatattaaaaagatactctgggacagtattggggag

SEQ ID NO: 107115 - DNA, 527 bp, Homo sapiens
cgggaggcagaggttccagtgagcccagatcgtgccattgaactccagcctgggtgacagagggagactctgtctcaaaaaaaagaaaaaagaaataggtcgacctgggccccagccgcgctgtgctttcatgagtttccgtcagccctgttccatatcctggatctgtgcatgccaagggctatgtgggaagatttcatttcaggtctcttgagaacagggtcagatggaggaggcaggctttatttcagatttggacaataggcctgagggcttgatttatagagaaagtctcagaggaaaataaaggaaaagaaaatacttcccattctcctaaagtgttcacatgtctcctgtgcagtgagtggggctgagattgcaggcttttttttttttttttttttttgaagtggagcctcactctgttgcccaggctggagtgcagtggcatgatttcagctcacgacaacctctgcctcccgggttcaagcaattctcctgtctcagcctcccaagtagctgggatt

SEQ ID NO: 107116 - DNA, 428 bp, Homo sapiens
aggcagatgtttgaggcccccaccagctctctcctcagtgactagttcacatcatccctccagcctcaaaccccaaactgagacatattccccagtcctctctctcatcttccacacacagtctgcctgccagtcctgaccgttccccgctgtcagccacttcgcatctcccacttctcctcctctccatcattaccactttgttcaagccactgtccctgctcctgaacagctgccatggtcttttcattgtccttcctgctttcgtcatcctttccagccttctctccacacagcagacagaatgacctcacgagcatatcttgttcagtcctcacaacgaccctgtgaggtaggtactgttgtcatgcctgttctgcaaaataggaaagtgaagcacaaaaacatcaggcgccgtgtatccgagg

SEQ ID NO: 107117 - DNA, 640 bp, Homo sapiens
taattttttgtatttttaatagagccaaggggcttcaccatgttagccatggtggtctcgatctcctgacctcatgatctgcctgcctcggcctcgtaaagtggtgggattacgggcatgagccacgtgcccagccttcatgtgtattttagacaatgaaaatgatgttagacaaaaaagcaaattcgagcagttttcgtttttgagttaaaaatgggttgtaaaacaacagagacaccatatcagcaatgcatatggttcaggaactgttaacttacagtgcagtggtgattcaagaagtttttttgttgttgttgtttgagatggaatcttgctctttcaggctagagtgcagtggcatgatcttggctcactgcaacctctgcctcctgggttcaagccattctgcctcagcctccccagtagctgggattacaggcacgcaccaccatgctcagctaatttttgtatttttagtagagatggagtttcaccatcttggcccaggctggtctcgaactcctgacctcgtgatccgcccgccttggcctcccaaagtgctgggattacaggcttgagccgctgtgcctggcagtttcaagaaattttgcaaagggaaggaaagtcttgaaaatcagga

SEQ ID NO: 107118 - DNA, 283 bp, Homo sapiens
aactcctaacctcaggtaatccgcctgcctgggcctcccaaagtactgggattacaggcgtgagccactttgcctggcctaattctttaaacagaataaacggcgtatgcattgctttccatcttgttaggttcactgcatacagaatacttttctgtaagaaaataggagctgtttttccaagggtgcaatgtcacatgtgattctgacttgagtttccgtgtattttaccctccccttctgccctcctaacgagaactgtgagttggatgcagaagtttct

SEQ ID NO: 107119 - DNA, 233 bp, Homo sapiens
caggtactgggtgactgcctggctgaggaaaagttaactagacacttggggaaaggagatccaagggagtaagaggcaaaatgcctttgcatgcttttcttccgatctctttttctttctctccttctcactctctcccttccttcctttcttcctttctctttcttttttttttctcttttcccccacctctctgtctgcctccttccttccctcccctcccctcccttccc

SEQ ID NO: 107120 - DNA, 915 bp, Homo sapiens
tcgtgccactgcactccagcctggtgacagagcaagactctgtcataaataaataggaggcaaatgtagaatgggtcggtcagttaggaggcattattcatttttaggttcatccttgtcccttgcaatcttgcacatggtaggtatttaacaaaggcttgctgagtgaaggaatgtgtcttctgtaatttgtattcatggtaaaagcaaggctcctattctccaacttttagaatttttaagtaaaggatattgtgtttaaagatggagctctcttctatttagcgtttttataagttgtggcaatatctttaatagtctctgaaattcttgtaggaagtggaaactgagcatactatttcagctgctaaggagaccattcatggcagctgcaagaacatgcagatgaaaaactttcctttttatttgcaaaattgatacttttcctactgtcagtatccatccctcagtaagattggatgaacaaatcccaggacctcttctccagggcatgtggacagcaggcctgcatgtgtccaggcctgctgctgcctgcatctccaaggactagtagcttctttgggaagtgttacctcaggagtgcagcttgtgcgttcattcaacaaattttgatagtgtcttgccaatgatttatcccagttcttcccaaatttctatcgttcttttacctaatctcattattttagctgcattatagtattatctgtgctatcagttaatatttttctccaaggtgacttttaaaattaaatttattttataattatattattgctatgagtggaaaacttgtatcacttgctgtaggaaaataaaactgtaaaagtaaagtacaatgaaaactaaacaatgttattaaccagattctgatacttgtgaaacttcaggacctat

SEQ ID NO: 107121 - DNA, 523 bp, Homo sapiens
  misc_feature (21)..(21): n is a, c, g, or t
ctttttttttatttgagacanagtctcactctatcacccaggctgaaatgcagtggcgtgatcaggctgaaatgcagtggcgtgatctcggctgactgcaacctccacctcccaggttcaagcaattctcgtgcctcagcctcccaagtagctgggattacaggcgccagccagcatgcccagctaattttagtacttttggtagagatcgggtttcgccatgttggctaggctggtctccaactcctggcgtcaagtgatccacctgcctctacctcccaaattgctgggattatagatgggagccccaagcctggtcttatgtaccttttgacaagaaagtaatttaaaagcagtcggacacagtggtaaatatttctttcttttttaaaattatctcatgcaacagatgaaagaagtatatatttctttatctgcactttgtagttgaaagaaaccaagctcagagaggttaaatatcatttccaatgtcacagagctagtattgcacaactaatcagaa

SEQ ID NO: 107122 - DNA, 379 bp, Homo sapiens
gtcccctggtggtggttgggaagggaggttgggtggcaaagtcagccttagttgtaaaccactgcttagatgaaggagccaaaaatagccagctggcacatatcagctgccaaggctttaaatcagttttaactaaaatgagtctttgcagaattccttcagggtattgactgtgatcctaatgcatgcaaacatggaaggatcatagcagagagccaggaaagtaaagatgtccacagactttgaggccagaggtgttcgtgacttggcatatgcgtatttatgattgcttttacagaacatacaaggtaaatttacccttcgctagaccctaatgcactgattttttttcacatttctttagagccaaatggctaag

SEQ ID NO: 107123 - DNA, 349 bp, Homo sapiens
ataatagttaatagcagggagcctttgttatcacaagatctggttttgaaaaccagtttcttaatgtgtattcttaggcaagttactaaacttctctaaacctcattttctttatcctcaaaatgagattacgtgtgtaaagtacttagtatactgtctgacacatagtaagtgttctataagtggtggctaaaaagatgtgttaaactttttgtctgtgttagataatatctgtgatatttaaagtagacatgtatagtgacataaaatattagtatgtatgagagcagatgattgacactttccacagttacataccaagtcaaaaagtgaaaaatctataactact

SEQ ID NO: 107124 - DNA, 313 bp, Homo sapiens
gtacaagcaattcttatgcctcagcccccaggtagagtagttggaactacaggcacgtgccaccatgcccagctaatttttttgtatttttagtggagatcgccatgttgtccaggctggtctcaaactcctggcctcaagtgatctgcccacttcagcctcccaaagtgctgggattataggcctgagccacctcgcctgccctccaaatgtgattttgaatttgtcaatttcttcttttatttgttgtgctttactttaaataacatatgtccatcttcttacaaaatatctatttctagcaatgctgttg

SEQ ID NO: 107125 - DNA, 582 bp, Homo sapiens
aactcccccactttattttgtgctatgtagatctggccatacttgcattagtgactgtcttgccttaaccacacttaagcaacccacaaatttcttctcagattggtttcctagattacttatgatactcatcccatgtctcaataagagtgtcttttctttctggatgtgttctcttactccctcttaccaccatactttttgctctcttctcctgcaagcgtagtcttcacagggagtggcttcctgacatttttttcagttatgtgaatgaatggaaaccaacagctgctgcaaacactgtttttccaagaaggctacactcagaacctaaccattgccaaccatttcagtattgataaaaagctgaatttactttagcattacttatttttttttccatttgatggttcttactttgtaaaaatttaaataaatgaatgtctatactttttataaagaaaagtgaaaataccatgacactgaaaagatgatgctatcagatgctgtttagaaagcatttatcttgcatttctttattctttctaattatctaaaattcaataaaattttattcatata

SEQ ID NO: 107126 - DNA, 658 bp, Homo sapiens
aactcccccactttattttgtgctatgtagatctggccatacttgcattagtgactgtcttgccttaaccacacttaagcaacccacaaatttcttctcagattggtttcctagattacttatgatactcatcccatgtctcaataagagtgtcttttctttctggatgtgttctcttactccctcttaccaccatactttttgctctcttctcctgcaagcgtagtcttcacagggagtggcttcctgacatttttttcagttatgtgaatgaatggaaaccaacagctgctgcaaacactgtttttccaagaaggctacactcagaacctaaccattgccaaccatttcagtattgataaaaagctgaatttactttagcattacttatttttttttccatttgatggttcttactttgtaaaaatttaaataaatgaatgtctatactttttataaagaaaagtgaaaataccatgacactgaaaagatgatgctatcagatgctgtttagaaagcatttatcttgcatttctttattctttctaattatctaaaattcaataaaattttattcatataaaataagttgtcattaattatcaatactaacgagtatgtcattttaaaacttagtattctctttaatgttacaaga

SEQ ID NO: 107127 - DNA, 410 bp, Homo sapiens
ttcttccatagaaaaggatgaagtactgatacatgctacaacatggatgaactctgaaaacattatgctacataagtcataccagacacagaagtccacatattgtataactctataggaaatgtccagaatagacaaattcacagagacagaaagtacattagtggttttcaggaggtggaagaggaaggaaaggagagtaactgctaatgggtagagggtttcttttttcagtgatgcaattgttatagaattagagtggtgatggttgcacaattttgtaaatatactaaaaccactaaaggtgcacttaaaaataatttttaaaatctgtttaaaaatacaatgaatagcattttttaaaatgcaatgaatagcattttacatatgtcatttcacacaataaatta

SEQ ID NO: 107128 - DNA, 249 bp, Homo sapiens
caaagtgctgggattacaggcgtgagccaccacgcccagcccatacaccccctcattcttgactgtgctgctctagtggacgaaacagccccaaagcattgctcagttgggagggggtggagggagtccagcctgggtgtgtgcaaaggagtcacccaggaaattcgccgcgggatctgcccttacagatgcactcgcctggggccaagccctcggtggctggggcaggttacccagaggcccaggggc

SEQ ID NO: 107129 - DNA, 322 bp, Homo sapiens
tggcttttttccttctctgctggtgacttgcagcctgccagcgctgtaggctttggcgggggtcggggggacaggataaagtgccccatcttgtgctttgcaagcacttttcaaagggtcttctgctttttttccatgtcttgggcggcgagtgggtagttactgttagggttccagaaaaatccatgtggagtctccaccaggtagtgaggtcctctcctgggcagaggtgccttagagctgccctggttccacctgcctctccttccttcagggcggctgagggacagtaggctcccccagcatctggctgctggggcca

SEQ ID NO: 107130 - DNA, 981 bp, Homo sapiens
tttctagttgcttctaaatgttatggttggctcaagccagctggagttcagaataacccgagagcttgggataacatgtctgtgcgtgtgtgtgtgtgtgtgtgtgtgtgtgtgtgtgtgttttgtgtgtgttgtgtgtggagtgggggcggctgttacgtctgcgcccagctgtctgttgtactcattgtgctcatgaagtaggctactccctttcgctttatcctatcagtggtggctggtggtggggataacacatagagaagggctgaacagtgttgtatgggtgggtgtaatgtgtttctactatggtggctcttgctagagaaccaagaatttcaagagaacacaccaaagcatatctcgagcgctgcgggccctgtgtgcatctacaggggggatattcttcccagatgacccaggagcctgtatcgtgagtcatgtgtatatctgttacccttaagaagtgtcggggattatataattactctcagtgatttatgagaagcgagactgtcgtcttctcctagttcatataagttgatgattatagtgtgtcccacaagtatggctatggtattcaacactcagaatgaatggaagggtttcagggcgcagtgggttagagaaagaatttgcgacgatagtggaggggaggaatcatgtcgccatgttttgggtaataagatatcagcagggggatattacacaacgaggttgttttcatcgtgtgtctattacaccaagggggcagatgtttatcttcactgacacgtgtagtggtgtacgaaggacgaattgctcggcatacgagaacccaacttacaatcggttaaccgaaatggggcaacggtcaggcctgagctttagacagaataatgagcgaaacagcgggctgttcctctaaaaccaatggtttgaaaaaaaaagtgcgccaatcatggcagagatctatcgtttacacgccatctgcctccacgc

SEQ ID NO: 107131 - DNA, 448 bp, Homo sapiens
ccttcccaccctcctgtgccttcctttattggtccatactcagggaccttgacagagggacagggagacatagtctttggattcagctctgttagctctagttgttcagagaagaactcatttgacagttttgtcttttttttcttcctgtagtcattcagtcttggcctagtgatagactcagcctcagaatatcttgacatggaatctcctttctcactgggaagaacactttctttttaaagaaacattttaaataaatgcttttctaagaggtgacagttaagtcttatctgtttggctgaccttatgttctcatgagtgatgacttctgaaaataccaatcactgctaattgattacatccatcaagggagtaattgtgttcttctcatctaaagctgttgttgagatgaagaaactcacttggagtaagacagaatgatggc

SEQ ID NO: 107132 - DNA, 712 bp, Homo sapiens
cgcggtggctcacacctgtaatcccagcactttggaaggccgaggcggtggatcacctgaggtcaggagttcgagaccagcctggccaacatggtaaaaccccgtctctactaaaaatacaaaaaagttagccgggcgtggtagcgggtacctgtaatcccagctactcagaaggctgaggcaggagaatcgcttgaacctgggaggcggaggttgcagtaagccgagattgtgccattggactccagcctgagccaaaagagcaaaactctgtcttagaaaaaaagaacttctaagacaatcagatgacacatgatgggcccaactaagatctcagtttgctttgtgccaggtggaggcaatagtaagagtgcttagtgctaactgaggtcctggcttagtactacaaggtactgtgtcgcatcactcttgacacatcgggtactgtcgtcatccacatttcacaaatgagtagaccaggactcagagaaaacttgcctaagtgcccccatttatgcaccggtagccagccttgctcaacagacttcactgccttcctggggactgttaacacgctatgaccatttgatttttttcccttttgtgctttcctaaagatgataatttggttttggccccattttgtgaaacactccagctttaacacttttagaaatgtgccacggcttcagggagaaccctttgactagaa

SEQ ID NO: 107133 - DNA, 294 bp, Homo sapiens
cttgaactctctccctgtgggattttttttcacagtgacctttcagagagtatgagctgtgaaagaagaaatccacagggatagtatggcagtgtgccaactgtaaatgtagataaaaaatctggctactatatcatcatcctcaattttaatactttgtatttacttagtagctttcagctataggactcaaaagtctacaaatagcctcaaaacaccccattgaggcaagcatagagtaatcattattttttgttaaaagaggaagtgaatggtgttatttaattgtcagtt

SEQ ID NO: 107134 - DNA, 271 bp, Homo sapiens
tttttcttttattccatcagtgaaatgtttttatagtcaaataattttgcaaaacatttttttcataattcacaaaacaaatgcgtattttaagtgttcctatagtaaaggagaatcctttaatctgatatgacaccaattttgattgactatagtataccctaaactcatttttattccaaaaaatttattgatatcattagaatagtacacatttgtgggacacttaagtttgtaattataatagctgggagaaagggttacagccaat

SEQ ID NO: 107135 - DNA, 515 bp, Homo sapiens
ccgccgccacccccgcccccacccgcaccgcggcccagggcctggcgtggatcccggcgcagatcccggcctgggtccaggcctcagacacggagaagctgctctggtgacctagacgggtcgggggatcctggcggcttaggggactggttgctggaagtcgagtttggtcagggtcccacaggctgctctcatgtggagagctttaaagtaggtaagaactggcagaagaacctgaggttgatctaccagcgtttcgtttggagtgggaccccagagactaggaaacgtaaagcaaagtcatgcatctgtcacgtatgtagtacccatatgaacagactccactcttgtctctcctgtgtcttttttggctgcttcactgagaaacatattcacaaacatgcagaaacaaagcagcaccatttagctgtagacctttatcatggggtcatatattgcttcatgtgtaaggattatgtatatgacaaagacatagaacagattgccaaagaaac

SEQ ID NO: 107136 - DNA, 516 bp, Homo sapiens
tgagacagagtctcgctctgtcggccaggctggagtgcagtggtgcgatctcggctcactgcaacctctgcctccgggctcaagcaattctcctgcctcagcctcccgagtagctgggattacacaggtgtgccaccatgcccaactaatttttgtatttttagtagagacagagtttcaccatgttggccaggctggtcttgaactcctgacctcaggtaatccaccatgcctggcctgctctgatcatctgtttcttaattctctatttcacctctaaggactgagtttgttgttgtgaaataaataaaatattgtattctaataattttttatttatcttcctcttccaataaaaatgtgattatttttaaaatgggaaatatatctctttttctattttcaatttactttccccaatagttaacagagtatttagcagatagtaggcctacaaaaatatttgacgaatgaatgaataaaagaaacatgcttgcttaaaagtaggcgtatagc

SEQ ID NO: 107137 - DNA, 338 bp, Homo sapiens
tcatagaaagccgcagatgtggtattcattccaggcttagaataccatggatttaagtgtcatttataaagtgggtacagaatatgcagtcccttctgatccccccaaaaatttactccaagaaataggctgagatagcaagactcttgttgccacagatgggtaaggatggtatttgcaggtacagtgcctccagtatcccacaagtttgtgagggaccaccagtcagccctgttaatctgtgacaccaggtagtccctcctggaattaaactttcccagaactaaccaggcaacaaggattgagacaagcaaagccccttttgcatgggagttatt

SEQ ID NO: 107138 - DNA, 443 bp, Homo sapiens
ttctgcacctgaacactttgtaatttcttatttacggttctgctcagcaaaagaccattgctaccttgaccagaacataagaaatcctgcacagaagtcagaatcaaatttcatcattaacatagaaatttaaaaaggggaaaggccagactaacattaatggagcaccctgaatgtggcagttattaagccaattatctgtatacattatcatcataaaaactttacattagccatcataaaaactcaataatgaatgtattatcaggtggggcgcggtggctcatgcctgtaatcccagccctttgggaggccgaggcgggtggatcacctgaggtcaggagagagaccagcctggccaacctggtgaaaccccgtctctactaaaaatacaaaaattagctgggcatggtggcgggcgcctgtaatcccagcttctcggg

SEQ ID NO: 107139 - DNA, 359 bp, Homo sapiens
tcttgatctccagcactcgatcccccgggttctgattggtggattgtttctgatgtgccgtcatattacccctaatatcacagggaggcttcctgcccgttttcagttaacatttcaaacaatcgaaggtaaaataacatttggtagtgggccattttgtactgaatgctgaatcgttttttctcccaagttgaaaatggttttaaggcaaagtgccttttttgagcaggtggagtcgcgcgtcctgcaggcggggcaagctcccctcaggctgggacaggttggggtacaggggcaggtacctcggtaaaggggtggagtggggcgctgcttacaacggggactgataatttgaatgg

SEQ ID NO: 107140 - DNA, 249 bp, Homo sapiens
gataaagaaaattgaagcaggcatttgtttttcttctgaagacagaagtgaagccactgtttattgaatatttttttcttttttgctatgaaaagtggagatttctctagattttcagtctcagcctttttcctccccactatgcagtacatgtacctcattcttcctaatcaaagaagcaggtcatacttaacctgaaatttcgacttaccctttgaccgctacttataaagtaggtgattattattt

SEQ ID NO: 107141 - DNA, 293 bp, Homo sapiens
gagatctcaccactgcactccagcctgggcgaacctgggcaacagagctaggctccgtctcaaaaaaaaaacgaaacaaaacaaataaaacagaattagttacagtgtctgttctgtagccttcagttgctgcctttcccaaatggggaaggaagccccttctaatgagccagcacttcttaaagacaagatccccattttcagcctttgccctgggcagacattcccaagatacaaccagctccgaagttattttttctcccctaatgatttgggaaaattcacccatgctt

SEQ ID NO: 107142 - DNA, 196 bp, Homo sapiens
tttttattttttctagacatggttcttactttgttgcccaggctggtgtccaacttctgccctcaagcaatcctcctgcctcaacctcccaaagggatgggattaaaggcacccagccttgggtttctattctaagtgagatgggaagggcacaaatgtgataagatccaaatgcacttttttttttttttttttt

SEQ ID NO: 107143 - DNA, 548 bp, Homo sapiens
aggtcagaggaagtgcagaggggaaggaggggaagcactattaactccatccttccttagcagctgactaagtcaggttggctgctgagctctgatttgggatctaagagtcaagagggcggggccaccataatgtgacagcacaggctgatttgattgccagagccaatctgtcattcatttgcttgttcacttatccatttatttatccaacaaacatgaagcgagcacagaccatatgccaagcactatgttaagggtttgggaagaagtggtatccgggaggcaaaggaagggctcagcatcactgatgttaagctcagggatgattgtcccaagcctggggactcacagcaagccccgcttgttggtagtgctctagggagtttgcatctgtttccctggagagcacatttaacccttgacttcagggaggtaagatctagacccgacgcacaactgagctggtaggggccttagatatcattgcagggcagcccctggtgttagcagtgagaccatggcctgaatggtaaagggcttgcgct

SEQ ID NO: 107144 - DNA, 138 bp, Homo sapiens
ccgcctcctagcccagcccacttggtgcaggaagggtggagggatctggggaaggccagagtgtaagaggacttaggggaggatcagcagagggtttcgggagtgatgcctgcagagaaggatctggagggcaggaag

SEQ ID NO: 107145 - DNA, 331 bp, Homo sapiens
tgattttagctactcttagtaccttatataagtggaatcatccactatttttttttctttgtgactggtttaattcacttaggagattgttgtcaaggttcatttatgttgtagtatcgcatatgtcagaaattccttcctttttaaggctgcatagtattccaccatagacatactgccaatgtggtatgtctgtaccacattttacttaactgttaattatgttttatttattgtgaataatgctgctgtgaacatgggtgtataaatatctctttggagactctgcttctgattctttttggtgtatacccagaggtggaatttgtgg

SEQ ID NO: 107146 - DNA, 237 bp, Homo sapiens
ttaatgagattgccatctaaagttcccaccatactttggaagctataatgatcatgcagatatacactttgggctgggcaatatttaagaaatgataggaaaatagaaaaatcatgattattaattgtggaattcagcttgatttgtcctaaatgttggtgtctgttgctagagtattttaaatctgtacataaataagcatgataaaataatcaaggattttttcccaggatatgg

SEQ ID NO: 107147 - DNA, 570 bp, Homo sapiens
gacatgttcatttgacttatcagttcaaagcattgtgcagccaagtaaagcacttaatcatatgttacccatcagcttatacagaaacttgagtttcaaatctttaatttaaaaataaaaatatagatttataattttatacttttcttctttagctaaagcaactattagcttgaaccgcatgaaaataccatttttattagttaaaaaaggtagaatagtggcatttaaaatggctcaatctaataataaattcttatcaaagtgttaaggtatcttaatgaatccttgctgtagtgtcaaaatcatttctgaaaaacaataattccagaatgataaaatccaaataagagagtagtatagttccacgggatatccttgctttgatcaattgcttctgtatgattacaagatattttgaatattgtcactcattcatactaaacttttttgtctgtactaaattgacatataatgtttccactccacaaaaataaactgttttggtaaataaatggctaatgaaatacatctcaaaagaaatgtgctcgttacggcacataactgtgg

SEQ ID NO: 107148 - DNA, 319 bp, Homo sapiens
gatgcaagatactatagttaacctgccatttcagaagacatgcgaaagaagaccacaaattttaaaaagtataccatcgctagtacaatatgcattgcttaatgacagggctatgttctgagacatgcgtccttaggcaattttgtcattctgcaaacatcctagagtggacttacacaaacctagatggcagagcctactagatgcgcaggccttatggtatggcctgttgctcccgggctacaaatttgtatggtgtgttactaaactgaatattgtaggcaattttaacacagtggtaagtgtttgtgtgtctgaa

SEQ ID NO: 107149 - DNA, 365 bp, Homo sapiens
tttacagcaatgaaaacgtaaatgaatctgctcacttaagggagaccaagctgtgcagaagtggtgaatgttaagccaacttgccagaaactgatttataaaccagaatgctgattcattaaatgaaatgggagatgaatctggtaagataaccggcatcaatcatttgaacagggtactccctcttaatgaataagctcattgaagaaactaaattgcagatcagaaggatttttggtacagggaattagaagagaaaaaaaaagtgttaaggggcattcccttaaactcagtttactcaatttgttcctccccattttggaagtctttcagtctacgaatctggcagcagacactggaatgat

SEQ ID NO: 107150 - DNA, 982 bp, Homo sapiens
ctgggcaacctaggaagatcctgtctgcacacacacacagccacgcacacatgcacacaagtcctgggcaaacctagcaagatcctgtctagacacacacacacacacacacacacaccacacacaccacacacacacaaccacacacacacgacgtccccactctccccaatcccgcgggccacacaacaattatactgtgtgtctctgaagagtgagacacagagaagcaacgctgatggtgctgccaccgcatatatgcgatgtcattactcatcactcaagtggcactctcatacaatatcatcttcactcctttgttgctgcaccgtggctatcacttccacgctgtcagcctaaagtgcccaaccagaggggtgacctactgtagtgggtatgtacacctcgtgctcacgatattccactcatctccttcttacgaacggcgcatagatgaattagtcgatgatatatactactttccaatatactagtggttgtactcttaactactcactcacgcggcattactccccatactcatccaagggggggcatcatttggtggtggtgcagtctcataaacacaacttgttgcggcgtgttgggagggaacaataattaactatcattatagttggagcctgttgaaaatcacttgattcattagtcggccaatcattactccttcgtcgcaggaaggcgcacccccctaaaaaacagctctgcaattaatcgctgaggcacacacacccccgaagaaatagttcgggaaaacacacgagaggaacaccaaccaccgcgacacaactcactacgtggcagggacaagaagacactggaggcggaacaccagtgacaacgaggagtgcctccccacaacaccgcaaggcaatggaacacaatgaaccaacgtatccaccacccaaccaacggcggcggggcgactccaacgtacagtgtagcgcggcatcgatgtgga

SEQ ID NO: 107151 - DNA, 190 bp, Homo sapiens
aatgagcgagcccaactgtccagactcccagcagagccttggggtttgggtagcagaggttgttggtgcctgccaactttgttacacactagcaaggtctgtgaagtaggagtggctgccagccccacaacacaccatgagaaaggagcatgagatggaaatctgtctagccaatagcaggaggctctag

SEQ ID NO: 107152 - DNA, 230 bp, Homo sapiens
agaaaataaagaaatgaagaaagatatcaggtaaatgctacatcaatgaaagctgatactcacagaattagcataaataattgcatttttacatcagtttaactcaagggacttaaactaaaggcatttcttatttatacatcccaagtagcatgacggtctcactacagccaacagactcctcttgcccaggcacctccacgtggttcaccatccctcctggctcatca

SEQ ID NO: 107153 - DNA, 356 bp, Homo sapiens
ggaggcaggggcatgcaagtgcaggggcagtccttgaattatttacagttttgatatgtaattcgtgatggactttaccacactaatttttatttttaaaagtactgtagtcgggagcagtggctcatgactgtaatctcaatacattgggaggccaaggcaggcagattgcttgagcccaagagtttgagactagcctgggcaatgtggggaaaccccatccctacaaaaaatgcaaaattagctgggcatggtggtactcacctgtagtcccgaattgcttgggcccaggaggcagaggttgcagtgtgtggggatcatgccattgcactccagcctgggtgacagagtaagac

SEQ ID NO: 107154 - DNA, 544 bp, Homo sapiens
tcttttttttaaggaaataacttttgatattatgatagaaagataaaattgaaaggaacaatcattactacacaaattacccaacattttaaatgcatttcttggaagattcggtttctgtttatttctgtaagaaaaggagaacagattttgcagatcccattagatcaaacacaagggtaacaggttagcataggaccttgtaccttataaattgttttccttcaatctcatttaaccatcatggcctctgaggagattatcatcaggtttttgaagcctaagtaaactcacactaagcctttgatggactccaaccaagttcagtaaggaaaaaaatgttcttgaaaacttgagcctttttacaagactatgtcactgcttctagaaaaatggaactgttttaagttttgaaagggaaagaatccatagccattgactaaaatatctaatattgcatcctaaatttgtccttcattttaaataatgtactgattagatgccatgtggttggttttctaaaaaattatattaaaatgtcatt

SEQ ID NO: 107155 - DNA, 383 bp, Homo sapiens
gtatccaggtctggtcagtagtttgcatgcacacgtgtgtgtgtgtgtgtatccaactctggtcagaagtcattgatcgtacccttgctgtgggccaggccttgtacaagctactgaggccacagatgtgatgaaagcagggcccctccttttacttatgatcagaaccactggttccaaacccaggggtcctaagtccaggttaggctcatatgtgggttttgtcagcctgcacgggattgttttaaaattttttgtttaggctgggtacagtggctcaggcctgtaatcccagcactttgggaggctgaggtgggtggatcacctgaggtcgggagttcgtgaccagcctggcaaacatagtgaaaccccatgtttaataa

SEQ ID NO: 107156 - DNA, 228 bp, Homo sapiens
actctccttccccctcatttcagccaaacctgccacaatgtttgctttccaacatttagagcaagaggactgccctgttttgcctggtgacataaaggactaattcagataacaaggccctggctctcggccttgccaccttctgccatcacagacccattcatctggcaatcactcctttgtcacccccgcctaccccccacggcccgtccttgcgagccatccctg

SEQ ID NO: 107157 - DNA, 338 bp, Homo sapiens
agaacagtgcctggcacagaaaaggcactgtttaagtgtggctgatatttgagagcattgacctgtgatcttctcaaagcttggggcaaacgtcggttagtgacctggcattaagaatgaggtcccactaggggagtgggagggaagaataggctttcccttgctcttgcaaggttatttctattctgtctttcttggctgctagctccccacttgccaatgcataagatctaagaaaagagatgccaagaatgaggtaagaatactaaatggaaaacaaatgaaagtgatgaaaggtggggtgtggtggcttacgtctgtaatcccagcactttggg

SEQ ID NO: 107158 - DNA, 273 bp, Homo sapiens
tcgacatcaagttcagcccgtttttattgagcatctactatgtgctggcattgaagagctcttggattcacaaaaagaaggctgccttttccagcaagtccccactgtggcctcacctgtctctgaatgacagtggaccaagcatttccacctcaccaggcaacagaacaggggacaatgactcaaaaccacaaataaaaccacatgtttaaaatactggcaaggatgtagagaaaagggaactcttacacacagttggtgggaacgtaaact

SEQ ID NO: 107159 - DNA, 533 bp, Homo sapiens
gaaaaagaaatgtagacgagagtaaacaacacagagacaagagtacagcaatgtaagctgatggtcttgctaaaggatagcgtgaaaagtgagaggagaaaaataaagaattcttcagaacattgctttccaatagaaataaaatgtgagccacatctgtcattttaaattttctagacaccacagtaaaaggggtagaaacagaaactaaagaaattattataatacagtctgtttaacacaagtctccaaaattttatcactttgacatttgatcaatataacacttattaaagggacattttctattcttatatttgtactacatctttgaaatcccatgtgtattttacacttacagcacatcttaattcgactagtcatgtctcaggtggttaacagccacatgtaactggggcctacatattagaaagcacggatctggagatagaagaaaaagatcagcctaggaactgaaaagatgtcagagaaggagaaggagaagcaggagaaaaaagcattacaacacctag

SEQ ID NO: 107160 - DNA, 397 bp, Homo sapiens
tgttatccctttttagtgatgttagtaatgtaatctcaatctctgtgtcagagttgaaacttattctctatacactacacaaagttcagctttctttataactagaccagactgtagttttatttctttgcttgttcctaccttttagaatcagattttatgaggaaacttctgaatggatgctctctctgtaatgaaccctaaattttgccagttgttgcaagggtagcagtgggcactgccttcttttaataagctggtctcccttagtccttatctgtttgggttctctgctactaatttgcttcttccattttagaaaaacactctggtggtagaaccagaatacctaattgtacttagtgatctttgaaggagtttgagtattaactgtttg

SEQ ID NO: 107161 - DNA, 276 bp, Homo sapiens
tgacaaaggtactctgcatgtcacaaaggaaatccatttaaaaattggttcattattttgactttaaattcccatcaataaagaatgatttattccacacttttattgacatgctgaatttaaaagaaaattaattgtgcatattacagtgcctgtacattgtgataactgatacagttttatcagttttagcagtgaaactttggaaattcacaagtatgaagatacaatatagagaagaaaaaatacttggaaaaccatgtgaagaaattataa

SEQ ID NO: 107162 - DNA, 372 bp, Homo sapiens
ggggtcctaattcaggtcataggatcatggcatggcccggtagcataattatccaagcaactggattctgtggcactaggatggcctctgtgcctcaaagcactagctgccacagccctattagcacaggaagctgaccaactgactctagggcagcaactgaccatccaggtactgcactcggttataactttaatggatcagagatggcatccttgattatcaaacctaagaatgactcaataccaagggctcctatgcaaaaatcctcacataaataccctaaacctggctaccttgctcccaactgatttggaaccaggaggcccccttcattgccgtgtagatggagtaggcgaggtatcctcaagc

SEQ ID NO: 107163 - DNA, 233 bp, Homo sapiens
ccctcctaccaaaaaaatagacataataaaagctaacataatatttatataaatagagggcatttggtaattatgatttatcacaatctactgagttgaaatcatttgttttggtttaactgagtaccaattcattctaacctcttttgggcttactcataggctaggcctaggattaaaataataattagtatgagagctgtgctaattattaattttaggttgcttgtctg

SEQ ID NO: 107164 - DNA, 145 bp, Homo sapiens
ggcctggcctcagagccttgggtggctgctaacagcctccacgcctgcctccctttcctcctgtttccttttcatacatacttctcatgacagccacactgaagccccacgaggcctaccagaataacctccaagaatagtgtcc

SEQ ID NO: 107165 - DNA, 372 bp, Homo sapiens
gcaagataattaagaaacttgctcaaagtcatatagcttataagtggtagatctgggatttacgccctggcaatctggctctagagctgtgccattcagtatggtagccactagccacatgttgctattgagcacttgaaatatggctagtccagattgagatgcactgtaagtgtacagtgcataccagatttttgaagacatacaggttgagcatcacaaatctgaaaattcggagtccggaatatttcagtaagcatttcctttgagttgcatgttgctgctaaaaatgttttggatttcagagtatttcgggttttagatttttggggtttgagatgctcagctggtaagtacaatgcaaatatttca

SEQ ID NO: 107166 - DNA, 524 bp, Homo sapiens
gccacaagtcttaccgtcccttaacagtattgacatttcgcttaaattatttgttaagtgaactaaaaccaatgtcatatcatctcctgaatatgatttttcatgctgtggttagtgtgatatttctcaaagtatgcaaactttttctggacaacaagagtagtgtgattgcttctttactttttgcagtgcacccaatacacacagaagcagtaacaggagttgttggaagagcagaacttttgtcatctatcttttttctagcagcttttttgtcatataccagatcaaaaggaccagacaattccataatatggactccaattgccttgacagtgtttttagtggctgttgcaacattatgtaaagaacaaggaataacagttgtaggaatttgctgtgtgtatgaagtgtttattgcccaggggtatactttgccattactatgtactactgctggacagtttctccgtggaaagggtagcattccattttctatgctgcagacactagtaaaactcatt

SEQ ID NO: 107167 - DNA, 330 bp, Homo sapiens
tggtcaggggagtggaggaggaaaggcgccgtggggatgaggaggtacagtggctggaagatgagcaagccccttaggcactattgatcgaatctatgcgtgcagggcactgtgcagtccaaccattcgtttcccagaggattggcaaaaaggatccagaagggctacctgacttatcaactgctgcaaaactcagtagcttaaaacaataaatgtttattacctcacacagtgtctgagggtcaggaatctgaatggttctggcccacgatttctaatggggctgcaaagatttcggccagggctgctgttctctgaaggtttgcctag

SEQ ID NO: 107168 - DNA, 582 bp, Homo sapiens
gagctgaaggaagcacattggtattttgtcctttcccttcttagaagatagattgtcaggcacagtggttcttgaatttgacgtatattggcatcacctggagggttagttaaagtacagatcgctggccccaccctggtctttcagattccatggggccaaggatggggctggagaatttgcatttttaacaagatctcatatgatgtgatgctgttggtttagggccacactttgggaactactggtgtgtaggaagaaagaaagaatggtgggtggagcttgtgagacggaaagataagaaatgagattataccatgctcagagtcaacattctaaaactcaaacttggagacatgactcacgtgctcaaatatctccctggcttcccactgccttaccagttgggctctgctttcgtccccagcctcatggtttacattcccctcttggactccttatctcgtgccacaagcttctcatccttcccctaatgcagtggtcctttcttcttttcctacctttgcacgtgctgctacttctaccttggcaaccccagtcctcttttctaaacctggaaaa

SEQ ID NO: 107169 - DNA, 348 bp, Homo sapiens
tcatgtcctcattgttaaaggcccatgttaaaggtcatggcctctgatcttgagcagagcaagctgctgcccctttgtggtcaggtgcgggctctgcagtgccctgaccttagaacccagcattttggtcaggatcgtgtgcttctgcttctcccacagacagtgagaaagtaggaatcatagagcacgacgtgtaggtttgaatgaatgcatgggtgtttggtgagtatcttgtttttagccagggccccagtttctgttttacagaagaagacagaggactttgtgactgctctttccattttttagatgattcactttacttccagcttcatagctgaattagtc

SEQ ID NO: 107170 - DNA, 320 bp, Homo sapiens
tttgcaacagatatgattttattattagaaaaaccagatttaaaaaaagccattatatgagttttcctagttggcaaaaattcattatatgagttatcctagttggcaaaaaaggcacttaagtgaggaaaggagatgcaaaatcatccttgactgtaaaggggtgcaggtgggatatgagcttgtctgggtatgagaatatcatgttctatgcattttttatttcctaaactgcttaaattataaatcattaatggtaattattaaaagactttgttttccctacaattagaaaaacttatttgaagacctcaaatccc

SEQ ID NO: 107171 - DNA, 707 bp, Homo sapiens
gtagaactagttacaggtcagtggaggtttaaggtatctggaataggcttgtcaaagccagacaagaaggaactttgaaaatatgaattgaaaggaagctttgaaattgttgctataaaaatacacttgattgttacatatttatatatattatatgtaattacttaattagtaatcatttttgttagcctttaaaacctgccaaggatcattttaagcacttcacataaattatccaaagtttagtgaagtaacttgcccaagatcgtaccgttaacaaagggcagagccaagatttgaggtcagggctaatacccttaagcactatgctatatactgctgatttatttatgtttatttttgttggtgactgcacagaagagttgaaccaagattagaatgatatttctgccttggctggaaaatactgatgctggggttcttggtttctgttgttgtttttaaggaagtggtaacatgggtaaatacgattgagaattcactagaatcaggacgtatacatgagatgaacttccaaatgttttctatttgattttgtctatgttaacttttgttccttctgctatatttaaaaccacaagaaaagtttactgaaacatgaagtgaattgtttcaccctggggcgtgtgcttaaaatatacccttcatgggaagagttactgaagaggttttggctgggtttattt

SEQ ID NO: 107172 - DNA, 562 bp, Homo sapiens
tagctctgtactggatactggatactggagtatcttacttttctttttttaaatgactgtttatccacatgaggtaaaagtcactattttataaacagttgataaagaaaatctaacttgaactggtttaagcagaagagggaatcttctgaaaagtcaacaaacaaataaatttgacttctgacttgacagggttcagggactcaaaagacgtctccggctccctgtgtctgatatgtcaactctgttggcttcttagctgctacacggtgagcaagatgtctgccgacagtgcacttcttacattttcctctacacaatgaaagttctggacctgactctcactggcctatattgggccacaggccagaggaatgccatttctgattggccagtctgaatcacatgttcatccctggattcagggatagagtcaactctagttaggctgagagtagcagaaagggtggttctcccagaagttcagataagcattaattaaagaaaggaaaatacatactaggtagcaaaaaagagcacatgttcactacagatgacaagc

SEQ ID NO: 107173 - DNA, 331 bp, Homo sapiens
ttccactactggtagacattgaggttgtttctgaaatatttccttttagatataacaacaccgcagtgaacatcttagtaaataaagctcaacgtgcatcccagattatttccttaaggaccaggtttcattagcagaatgacagagggggagagcccatacctgtttaaagggtttggctatctctgtgaagttgccttccacgtgggttaggctaacgtaggactccgtataccatatgtaggctgcctggttcaccgtccttgcccatggagccagcagcgagctggctgcttactgtggaagggactaaaacagcaaggaagaaggg

SEQ ID NO: 107174 - DNA, 590 bp, Homo sapiens
taaggtgagggaagacattttcaacatttctaatttttcaccattgtaaacagtctaaatatccagccctaggggaatggcaaagtcaactgttgatatcttgagtaaactaaggaatacaattgaatctatgctatgattctaatataaatctatgggcatgtaaattaggactggaaagaaacagaaaaattaaaatagtatgttaattaggtgaaattacaggtaattttatttttatattaaaatgtgtgattaaaaagaaacttaaaatttaggcttttcaaacattgactgtcacatgatattcttcagaaggctaatgttttcctttgtactcctgtattaaacttattttcagaataattggaacagctaaaaaaagcagagttactggtgtgttgtaaaggctatgttcatgatgagaaataactagccgactgaattaattctttgtctcagcctttatagaataagatgcttgggaaatttccatttccagtttttccattcaaactgacatggtttgagaacaaatacttgtaaatacattggatattttaatttcttaaatcttgtatcttagaatg

SEQ ID NO: 107175 - DNA, 410 bp, Homo sapiens
cataacccacctttcccctcctcagacccttattaggaatccagtgcctggccacctccctgaaaccctcaaccagtcatgccctggatttacactcttgcctctgcctagaacacaaatcttgtcaaagtaaacataaccactccccaaattccaactcaattcttcctctttaaagctccaagccaggaagaactttcttgagcacctgttatatcatgtatcttcctgttctccattaaatgtcaacatttgatttcaaccaagtaaagcccttgagatgaagaatctgcctgaaatttgtatactctacaaaaccataaatgatataatctcataatatacttccttgtcagaaaatatttgtaatcattccttgtaacaaaaatacacatataaccatatacatt

SEQ ID NO: 107176 - DNA, 578 bp, Homo sapiens
accctgcttccatttatgcagtatgccaggcatcggcacgattttcagtggcacacaggcggttgccaccaccagggccctaggcaaaattgcaaagaaggcagagtttgtctttggccctcccacctcccttatgcatttctctcccacctcctggcagtccccctgcccagcctcccggcaccatcatgctgccctcagattgtctaaagcccccaactttccaccactcacccaggaatgtcctttcttgaagtgcccagtgatccaaaattacctctccatttccctgctaacaaaattcctactcctaaggattccagtgaagtttaggtaatctaaatgattaactactttatgtaattcaagttaaggtatatttaactaacagacttaaatctccaatgaattttaaaaggaactaattaaaaactgtcaggaaggggagggggaagaaaccttgagggggtgaggaggtaatgttttcccaaagccccaggactctgtgccacttcagattccttcacagacaggacactaagagtggagggggtcactgccaccttgaaccccacttc

SEQ ID NO: 107177 - DNA, 636 bp, Homo sapiens
taacacatcataaaaattgtacacttccaagtaattaactttgcatatattttgtactcctgtaactgttgctcaaaatttaggaggacatttttttttaatgggtttagaatctatacagctgtcttctttctctcacacagtcactcagtaaataaatattgactgaatctcttcatcttggatatgttctcctgaatattctgggtatgggcatttttgctattaagagtgaattaaatttttgaaatgatccctagttatttggagaaaagtctaaaagaattagatgtttaactaaggtcgataatactttgttgggtaaaaactatgttaaagcactaaatctggttttcagatatagcttagaattgaatctaaaagcaattcccaaaaaggaatttcatatattttcttttggaatcattagaacaagaatatggtatcaaaaattttctgctttgcaaatgataatacccactagatacagataagttttgttctgtgtggtttttcagatcagcttcataagaacctaatttggtggtgtgatttaaatttcccaattcataacttgggatgtttatacaggtactgattaaacttggctctaatgtaattatttactttattttt

SEQ ID NO: 107178 - DNA, 677 bp, Homo sapiens
aaaatatgtaaaaatatgtgaattatcatgtaattgataccatagtgaattaatatcattttgattaaagtcaaatttgtttaaaagttttactgaattcataacagctcaaccaataatattagaaacaccactgctgtcatgtggcaatgcaagtgtttcgacattaaaaaggagtgcagggtggggcacggtggctcacacctgtaattccagcattttgggaggcccatgcaggaggatcacttggggccaggagttcaagaccagcctggacaacatagggagaccctgtctatacaaaaaataaaaacttagctgggcatactggcacatacctatagttccagctacctgggaggctgaggtgggaggatcactttagcccagaagtttgaggcaacattgagctatgatcgcaccactgaattccagcctgggcaacagagcaagaccttgtctcttaaagaaaaaaaaaaaagaaggagtgctgatgtcccaagagtctagacacctgctggactctagttgcctaactttaaagatgagaaaccccggcccaaaggagtgaaatgacccacctcacatcacccagaaagtgtttaacatagaactagatctggttcctatggccctgtaatcatattacttctctatacggctgtggacataacaaa

SEQ ID NO: 107179 - DNA, 847 bp, Homo sapiens
tacatgaagagtgacagtctcaattgtttgaaggaaagtaaaatgaacaacaaactagaatcatagcaaagaggaccctgacaatatcagaaatgatctgctccttgagatcatagcactgttcctgatttgactccctccaccattatttattctccccacacttttagtttggtagggaaaaaaccccacagtttctgtattttggaacagtgactgtgcagccaaactccctatcgctgaaaggtttctggtggaaaataactcatagatcagaatccagcctccttgaaaaagtaaaggcctaggtagtaacttgctcaacattacactgccagtttttgatagaattaactaccttaatttgttagaattgagactaacacccgaatctcttcattctaacaatgctttgtagcttctaaatgatcccacacggggtttttcaaggtcttcctcctccccaatcccttaattactcagaaacatcttttctgaactcacagcatttgataattatgtaccatgttaggaattatttttcattattgtcacacgttttaagtttagagtcatacttctggaatgaaaactatgactcatttcataagttgaaccaatcatctcatttctttatagttgcctccccaactatattaagctccttgaagataggacacatgccttacatttcttaactcttagctagtattcaacataattaatatgacgtttgatacatattagtttaattaacttcataataaaattgataagattaagtattgaatgtgctgaagaagagctctatatgaggccattgtcagtgctgacccaaaaaaaaaaa

SEQ ID NO: 107180 - DNA, 742 bp, Homo sapiens
aatctctgtcatcttgatctaataatcgttaaaaggtaaagcagtaatacagcattttttggtgctaaaatactgtgataactactatacaagtctgtgctttatcttagaatagattatccaaatttgtttggtggcaagattccagacatcaagagtcatctgaaattgtatctcaatgtatttgttactgagttcaaacagtgaaagattttaaagttaaattgcagacaagacattcccccaagtatttgagtctacatctctaaaaaaagtctgtctacataaccactctattttctcttctaacaaaattaacagtaatttcataatttcatgtcactcagatctattcagatccactcaaatcactcaaatttctctcaaatatcttttatactgatttgttaaaaccgggatctaatcaaggaccatgttatacagacattttgtcattttaattaaaaataagggccttacatttatcagtgataaattttattttgttggtagtgcctctttgggcttgtccagtaatcagcaaactttttcttaaagggccagagagtaaatattttaggcttgtggttcatttggttcttgtcacaactactcagttgtgctgcgtagtcattatggaaacacacgggcatggctgtgttccaataaaacttttgcaaaacaggcactggcccattggctgtagtgtgctgacccttgcctaacctattatgatcttggt

SEQ ID NO: 107181 - DNA, 423 bp, Homo sapiens
cccatctacttcttgtctcatgtattcatttactcaacacatatttattgaacacttgctatgtgctgggaactagtctagataccaggcctagaacaggaaacaaaataaagttcctgctctcatggagctcacattcttgatgcttgaaattagttcacagaggagtaaaatgttgcagttgaacaataagaaataagacttaaaaaggtatccatgctaaaaagaaaaaagtaaaactaaatctacttgcagatgacatgatctagtatacagataatcataaggtatctacccaaaccattaaaactcataattgagttcagcaaggttgccagatgcaagatcaaaatataaaaatccattatatttttatacactagcaatgaatgatccaaaatgaaattaagaaaacgattacat

SEQ ID NO: 107182 - DNA, 492 bp, Homo sapiens
ttttcttgcatttgagactaattcactaaattactttatattatatatttttctgtaagattatgttttctctataattttcttaagtataaaaatacaagttgtttggtaacagcctcttcttagttatctaccctttaagtatgacacatggatgtggatagttgagtcactgatgcattttattaaagtctgttttaaaagagcagataaagactgaggatgaggcatttttatgttattataagtcttaacagttctagagtataataatctagggaactaagctaaacactgtttagtttctaaaatttcaaagaacacgtcaattaccacatgccaaaatatataatctgagtatatataatgacattttagaagatttattaatgatgaataggaagaatggctctatatcttcagatgtttgcttaaaaattatagaagtccaaaaaaaaaaaacttcctaagtaaattgaggataagaccatt

SEQ ID NO: 107183 - DNA, 457 bp, Homo sapiens
aacgtatccataactcctagaagtttcccatgtccctttgtgatctcccccaactccctatcccaagtaactaccgatttgttttctgtcactatcaattggattacactgatatacctatgtacatatatcaatctggagatttacataaatacaagtacatattatgtactcttttatatctagttctttgactctatacatgttgtgagattcattcatgttgttgcatatattgagttcaatccttcttattgctgagtagtattctgttatttaaatataccaatttgtttacccattcatttattgatggacatttgggttgttttcatttttgactattctaaacaaagaagctatgagcatttaggtataaatttttctatggatataggctttattttcctttgggtaaataattaggactggaattgataatttatatggtatatat

SEQ ID NO: 107184 - DNA, 899 bp, Homo sapiens
tgccatttccaagtagttaataaattacagtttgggtttgactctgacacactatgcagccattaaaaagaagtcagtaggctgagcgtggtaggtcatgactgtagtcccagctgctcaggaggctgaggtagaaggatcgcttgggcccggaaagtcgaggctgcagtgagccattactatgccactgcattccagcctgggcagcagagtgagaccctgtctcaaaaaaagtttaatgtgctgcttcccttttctcattttacttcttttcctaagtcgtaggaaaatacctgctttggccaagacatctgaaaagaggtttatttaaggactaggagtagtagaacatgaggtttttgccgtttgtttttgttttcccttctaataaccatataattgaagttaagcaaaatttgatccatggagaaacatacaacaaagtgcaaagtgccactccctaaaaacaaggttgaacgttccttctttgctttttttgtatacatgtagtggtacattcctgtgtcttgttacacaaacaggattttaatttataaaccgcactccagcatgaccttttcatattatatctgtgatgcatttcatatcagtttctataaatatgcctcagtcttaatagctacattacaatttattgcatggatgtatttgatcatttcccttttttggacatttacataatttctggtttggaggtgcttgggggagtgccttatagtatagatccctgaagggagaggttctctaaggtgtgaatgtaacaacattttcatagatcctgtccctttgcctctggaaaagtgcagcttaccttcacccaaacagcctgaaagtgcccatgttcctgatagaaaccaccaggctcaggcagaagtggg

SEQ ID NO: 107185 - DNA, 1061 bp, Homo sapiens
gttatcctcactccaccatggactcactgttgttgtagcacttttgttttcccagtagttaaatgctacctgtgcagctgacatcactggactagatctgggaatagatgaaataatgttgaaaacaaaactttagaggtgccttctggtatcagatgctgcaaggccttgagcatcagagtgtgttaagtcccatctactgtatcaaggccagagtgtggctccatgctcttaggaagggtttcccaaccacggggccagagcccaaaaggtttccccttccctaatatgctaatgaacgaaacatgtaaatctgttttcccctgttaggctagtcttactgtgatgagaagtgtacctggctttccttttcctgggtggagacagctggggcatattcgggtggcactccctctcagtaccagaggccccactgcctgcagctggaggcatgtgaccataagctcctgcttttgctttttgggcttgcatccctcttttctgtgaactctggagaatgctggaattaaaacatttaagcattttgattaaatgagcttgagctcctctgttcttttctaggtgctcttgttctccaactctcctgcctctttctacctctgccctatacattccagctctggagacagagtctgaaactggagtctctggagggatgagaaaaccatctttaattgtaacaaatggggtgggtagacgagcttcagagtgggagcagattgcattgaggttcaactctcccacccatgcctgggagtcaagtcttggagaggagtaacactcttggtggtcagcacagctcagagtcagagacaatagccagcaggccagcaaggctggctgtgtgaggcacaggaagcagggcataggtagggagcagagctgggggttctctctctgctggaagatagcagctgccccttggcatatgggggttgcacactgcaccttgtagccagggctgctatttgctgttctgtgaaggagttggccactcattgtgacatgcaggacagtggccttctgagaacctgctgctt

SEQ ID NO: 107186 - DNA, 616 bp, Homo sapiens
atgaaacgcccatcgcctggccttcccctttcccctttcccctctcctctccattcttggagcacttcctggaaaaacaccagttggggcgccgccttcccctccaaacgttggggcctgcactctcaacctgctataaggaagttaaaccgcagctcaccgaggagtagggtgtctacggggcgggcccgtgtagaccagctgtgctcctcgggcacaaacccgccgtacatgccaggcctagaagcttttggctttgtggacgcaaaatctggttggagccgccttctccaccctgactctcccgcctctcctttttagaaggaaccgcactgagaaagggtatttctgaaggctcaatgcgtaggagaaggggtgggaagatgggtttgtggaatgggctgagggtggggagtggtcaggtgactgatttcatgtttattgtacagattcctaaaacatagttttactaagtgactccttaaattctgattaatgtgatttttttttttttttgagtgtttgggttttttagttgcaaacaggagtggaattgaaatgtgaaagtatggcaaaactgtgaaagcatttaaattaaaatgtcccttcctctgca

SEQ ID NO: 107187 - DNA, 1140 bp, Homo sapiens
atgaaacgcccatcgcctggccttcccctttcccctttcccctctcctctccattcttggagcacttcctggaaaaacaccagttggggcgccgccttcccctccaaacgttggggcctgcactctcaacctgctataaggaagttaaaccgcagctcaccgaggagtagggtgtctacggggcgggcccgtgtagaccagctgtgctcctcgggcacaaacccgccgtacatgccaggcctagaagcttttggctttgtggacgcaaaatctggttggagccgccttctccaccctgactctcccgcctctcctttttagaaggaaccgcactgagaaagggtatttctgaaggctcaatgcgtaggagaaggggtgggaagatgggtttgtggaatgggctgagggtggggagtggtcaggtgactgatttcatgtttattgtacagattcctaaaacatagttttactaagtgactccttaaattctgattaatgtgatttttttttttttttgagtgtttgggttttttagttgcaaacaggagtggaattgaaatgtgaaagtatggcaaaactgtgaaagcatttaaattaaaatgtcccttcctctgcattgaaatgtcatcaaaacgtcaaatataaatgatttgttcagttttctttttttatttgtttgtttttggttttctgtaatgacaagtccatctgtaataaaagtgagttatttttagttttctaattaagcacagaaatttcaagaaactagacaggatatccttggaatgccttaccaaaagaaacacttcatttttcacgtgttctagaagcacaacttcttttaccattaggcaaataatggtactgtaccaaacatctagaactgcgggaccatgtgtcttgattagtaattttatattgggggggcatattaggcatggctgagactaaaatgtctaaagatagatgaattgtaattttgtcaaacttatctgtacttttcaataattctctaaagagaagggacaagttctcttttctgaatgtcttcaatttgtaattccagatttgaaatatgagagcagtcatctgataggtactgattaaatatcagtagcattaaaagcatttttaagtcag

SEQ ID NO: 107188 - DNA, 542 bp, Homo sapiens
atgaaacgcccatcgcctggccttcccctttcccctttcccctctcctctccattcttggagcacttcctggaaaaacaccagttggggcgccgccttcccctccaaacgttggggcctgcactctcaacctgctataaggaagttaaaccgcagctcaccgaggagtagggtgtctacggggcgggcccgtgtagaccagctgtgctcctcgggcacaaacccgccgtacatgccaggcctagaagcttttggctttgtggacgcaaaatctggttggagccgccttctccaccctgactctcccgcctctcctttttagaaggaaccgcactgagaaagggtatttctgaaggctcaatgcgtaggagaaggggtgggaagatgggtttgtggaatgggctgagggtgggaactgatattcttcatgtgtgaaagttattcgtaccgggtctaaaactcttggctgcgaatttcttttttttcacactttaagggtgccattcccttctctggagggcagaaaagttttccgtttacaag

SEQ ID NO: 107189 - DNA, 368 bp, Homo sapiens
gtaccatgtggcccatattcagatttgtcggtggtttgaagtactagagctgagaaccactgccctcccttggttggggctgcaatctccatttattgcagtcctcattgagtccttcctttgttttatgtgagtccgtctcccaaagtgctgggattacaggcataagccactgtgcctggcctgtagattgtacgtttttataaggaggtaatagtaatagttaaattcattattgtcccaagtgaaggtaattaaaaaataaaaacttagggacggtgatgaagacagtatgctttttaatttggaaattttgtcagaatagtggcccttccagaggggtagatgaatgtatgaccatttagtcc

SEQ ID NO: 107190 - DNA, 314 bp, Homo sapiens
cagacccaaagaagcttagctaaagacgaaagatagaaattgagaggagagctgctgccccagaaacagaatttgcaattcaatacaagcaagaaaacagtgtacaaattaacattccagatgcagggcaaagttacctgctatctgtagaaccaggaacatagtgtgagagagaaaaataggttttcctcttacccctcggagtttttagctgggacagacccctgtaacaaaagacaaattaacaagagaaaaacaaataagtgttttaatgtgtgtatttcatatatacatgggacgtacccagggaatga

SEQ ID NO: 107191 - DNA, 862 bp, Homo sapiens
gaaaagagcaatcttttaaacaaatggtgcttgggcaactagatattcatatgtaaaagaataaagtaggaaccttacctaacactatatacaaaaataaattcaaaatacctgaaagatctaaaagtgcgatataaaactataaacctttttgaagaaaaagagggcaaaaacctcacagcattgtatctggcagtgattccttggatatgacaccaaaagtacagtcaacaaaagaaaaacagacaaattagacttcatgacaattaaaaacaacgtgtatcaaaggacatttgtcaacagagagaaaaagcagcctatgaaatgggagaaaatattttcaaatcatgtatctgataagatattaaaatccaaaatatatatagactcttaaaactctacatcaagaaaacctaaaaaactccttttgacttgaataaacatttctgcaaagaatatgtatgaatgatcaataagcacatgaaaagatgtttaacgtcactaattattaggggaatgcaaaccaaaatgacagtgagatactgccttacagccattagggtggctgttatcaaaacaaccagaaaaaacctgtcagtgaggatgtggagtaattagaactctttgcactgttcataggaatataaaatggtatagccactgctgaaaagaatatgacagttgcacaaaagatttaaaattgaattacaatatgatccaacagttctgcttttgaatatatatcccaaagattggaaaggaagtcttgaggaggtatttgttcacctgtgtttttagcagcagcattcgtaatagctaaagcatgaaagcagcccaggtatccattgacagaagaatggat

SEQ ID NO: 107192 - DNA, 692 bp, Homo sapiens
gaaagaaagaggtaaatccaaagttgaatctaattcacacatttagaaccatctccataaaaagtaactccacacttttggccatatttctttgaaataactgtggtttattttgttcctgttcctctcctagatactgacatctagtaatgagcagaatctaagcatttagctgtaccaattttggttcattatcatcttctttgcaggctaagtatttccattgaagtttgattagggtgtgagggtgattttgggctttgcatcataggaccagctgaatgataactgtggaggcctgcacttacctaaggaaagaaggatgaggtagacaaggcagcgtggtagccaaattagacaaagggctatcattataaaacttactgccccatcccattgttatgacaatttcagccatatccaaagcataggtttcaaacaacaggtcatgcttctttacaatgtcaggaaatcagttggttcttgtcagcattaaaaacaaaaatacaattagtgcatgacaagtaaaatagagggtaaaaaacccacagagaaaataaatttaatgaaatgtttcttcaaaaagtttttaaaaattgaaaaatcattatctggattgtctaagaaaaaatggaaaactaaaaagaaagcaggacattactaccaattttacagaaagcaaagattataaa

SEQ ID NO: 107193 - DNA, 665 bp, Homo sapiens
agggtgtggcaagagatgaacctgaaaggcagtcttggaccagatcagagaggaccttataagctacatcatgaagcttaaaatgaatccttaggtcattggacagctgtggagaaagagtttgtaagggagggaagttatatgaatacacaggaattttttaaggtggctatggtagtagtgtgaaaagagaaatgattaacagtaggcaagctcagagaaagaagccgccaaggaggctgtcaccataatccagcagaaagaagatggtggcctggactggggaagtgactgtagggatggagagaaatggatgggcttgggaaatgagaagggataggatccacagggcttaggatttgagtgaatagaaaagagagagaaaagtaaaacaagaccaacccaggtaactgggtgaggctattcccacccactaggatgaagggagaagaaccagtttgggagggaagatgacttcaagcttattcatgttgagtttgatatgtcagtggacagccaagagatgtccacttgggcagctttgaatgagaatccaggagaccagaggggaagagtgagatgaagatacggatttgagttgtatcaacatatagatggtaattagctagagaaaaggtacaaagtaagaagaaaagagcatagac

SEQ ID NO: 107194 - DNA, 320 bp, Homo sapiens
aagagagctgaggactgcatgggaactgttcatgggctgagcctagaagtaatgtacatcacttccacttccaattctattcatattctactggctgaaactctgaaggagaggctgggaaatgtagtccagctacacgttgagggagagagtgaacaggctttggtgaccacacagccatctctgctcagatacccaaggaggcaaatagaagagccagtccatgccttcaacatgcttgctccacgacctccctgagcacctgtggcctctgagtttatggtcagggtcaacagtgggggaatctcatgccaccaaat

SEQ ID NO: 107195 - DNA, 300 bp, Homo sapiens
aaccaacaaccaactatgtgactgagatcatccagccaacattctccttcaccagcaagcctatcagctgattgtatacacacgagtaagtgcaactgtgatcagccaatcctggcccttatgagcagaaccacccatctgatccacaagcttgtagacaataatatatacttacagttttaggccaccctgtttagaaataatttgttatgcagtggtagctaactaacacaatctctcttctgttctcaggatattgccccaattttaaaaaattgctcaatgaatgtggatgtaaat

SEQ ID NO: 107196 - DNA, 609 bp, Homo sapiens
accattcctgccaatccatcccagggtgactgcaccctgacagtcaggtctggccatgacctgcacacggtggctctccatcgtacttgggtcagtgactcaagtccccagcatggcagtcatgggcttgcacgactgggctgcctctctgtttctcccagcatctaaatatccccttccccatatacacacatgctgagctacaagtcatctgtggccacccactgatggtttgctaattgtgataacaaaactaagtttataatcagtttgtttttaaagactctctccactgggactggttcagggttctcctgtgcagtaatggcagggctaccccactacagctttgcatggaactgagcatgggcccagctctctgtcatgggaggagaagagactaactgcagaaaatggtgcgtatgtgtgttttaatatggactgtctccctgcaaatgccatttgaactgatggattgtcaagagcagtgctgaccccttgaaatacaatgtgaaccacaaatgcaagccccagatgtaatcataatgttctggtagccacattaaaaatgtaaaaccaaacaagtattattaattttcatcctatatt

SEQ ID NO: 107197 - DNA, 347 bp, Homo sapiens
atttgattcattcaattttttaaatttaagaataattgattagttcctgttagtcaatgttcttgcaaaaatactcaacttcttcaaaggaggagaaataatgaaaataaaaggatatggaaggtgcatcactctggagctaatgccatttgggagccttttccacacctcagcctgaatatatggatggaaggagcagttgcccaaacctacagagagccagagagagaggacggcctgagaggagttatgcagtgcctctcctgcctctgctcttcccagcctctgctcttcccagcctctgatctcccaccaggacctcatggtggtggaaaccatgcagaaag

SEQ ID NO: 107198 - DNA, 521 bp, Homo sapiens
gccggcgtggagggtgtaggtgtgtgggacattgagtcacaccagagtctaagctgtcactcttggaaagtctggggcggctcctccaccccctgcgccaggggcccccaaggccctggatgcggcaacagctctgtcttccgtcgcccagggctgatgggcacggtgaaggtcaggttggtctggaaggtgggtaggattccagaggagtggcgctctcggggggcaggtggcggtgggtgggggcccaggtctggtggcgtcagcacgcctgccttaggggtgctggcgctcaggtggcgactgcggactgcagtgcgctggatgactggtgaggcattgatggggctaaagttggcagggcggaagccgaagagtggtgagggtgagggtgatggggctggcgagaagggcgattgagtggagacgggtgagaaggagggcgtgcctgagcgcgagctgcccagcgacaccagcatcacggccgcctcacactcgtcgaactcaaagcgtgacaagtc

SEQ ID NO: 107199 - DNA, 1787 bp, Homo sapiens
  misc_feature (1510)..(1510): n is a, c, g, or t
  misc_feature (1674)..(1674): n is a, c, g, or t
  misc_feature (1677)..(1677): n is a, c, g, or t
  misc_feature (1686)..(1686): n is a, c, g, or t
  misc_feature (1699)..(1699): n is a, c, g, or t
  misc_feature (1702)..(1702): n is a, c, g, or t
  misc_feature (1710)..(1710): n is a, c, g, or t
agcctcggcctccacacactcattcctacaccatcagccacgcaacactggaacgaattggtgcagtacctgtcatggtaccagcccagagtcgggccgggtccttggtataggacatgaggaaatgttgtgttcagaaatgaataaatggaatgccctcatacaagggggagggtggggtggggagtgctgggaaagaaacacttccttataattatattagtaaaatgcacaaagaagaaggcagtgctgttacttggccactaagatgtgtaaaatggactgaaatgctccatcatgaagacttgcttccccaccaaagatgtcctgggattctgctggatctcaaagatgtgccaagccaaggaaaaagatacaagagcagaatagtacttaaaatccaaactgccgcccagatgggcttgttcttcatgcctaacttaataatttttaagagattaaagtgccagatggagtttaaatattgaaattattttaaaaggtaggtgtctttaagaaaataacaagcaaccctgtgatatgttccgtctctcccaattccctcgttatatagagggcttaatggtataaatggttaatattggtcccaacagggctgactcttctatcatataatcaaaactttttacatgagcaaaattcagtaagaaatgggggaagacaaaggaaacgtctttgagaagccccttcatatttatttatttatctcttcctgaaccatgaatttcatatgtggaatattgctatattgacagattcttgcctgtctgtgttattctaggatctgttacaggtccatggcaattactgtttattttttcctggaaaaatatttttttataaaaggctttttttttttttaaatacatgagaggcattgggctaagaaagaaaagactgttgtataataccttgttcaatggttgtatttagtgagctcatagaggtccatcatatcatgaccgagctaggttgtgtgggcaggaaggtagggctaaggggttgtagccttgctgggcagcctctcagagcaaggttgttcagatctcccttgctattacagtaggttactattaatgagggcagcacctgatgccttttgtactgaggtatgtaactttctccttatttgacaagtagaagttaacttacttgtcagggagggcagacgtttttttgttctgtttcgtttttcaaaataatgctttttgcaaaagaggtaagactgagactaaaggtgttatcttctggtgtgctcctggaagtgtctaccctacatttgtgtcagctcagggttgcagtgttgcccagatgcattttacatcactgtaaagagattacttttgtggttactacctggcttggctggccttgcggttcaccagattaatttacaaactcccccactttattttgtgctatgtagatctggccatacttgcattagtgactgtcttgccttaaccacacttaagcaacccacaaattncttctcagatttgtttcctagattacttatgatactcatcccatgtctcaataagagtgtcttttctttctggatgtgttctcttactccctcttaccaccatactttttgctctcttctcctgcaagcgtagtcttcacagcggagtggcgttcctgacattnttntcagttaangtgaatgaatggnaanccaacagntgctgcaaacactgtataaacaacgaaggctaccatcaggaacctaaagcattgtcagccatatcaagatagataac

SEQ ID NO: 107200 - DNA, 1222 bp, Homo sapiens
tgtcacaggctttctttacagatgcggtgtaaatgaaattgttaacggggttcaaaatcagatggctaaatgtgttaatattctcatttaaacccaactacctttcttcgtctccaagcccctataatttaactctgaactataatcttttccattctatctagctcccatcctaagtcctctcctcctaacgtggaactctcctaaaatcttctccttatactagggttcgagacatgaggctgtctttttgggccttttgcgttgtcacagtcccagaccacggaacattctctcttccccaggacaggacattctctcttccccagcctccttcctgtcctggcgttgagtcttccaaatggaaaattccagccatatcaattggtgatgcacccatttcttcctgtggaacgacagtctgatggaattgcttctggagtaaatgcccagcttcttaccacttcagtgtcagcctgaatgtttggaaagttctagcacctcaaaccatttgcatctatgaaagcagaactctattttttccctttggtttagcttgtgagttctctgtgggaggaagatctgatatggccggctctctttcaaccctagttccagcagagagagagagagaatgttctgggtgacggaccctcccagcaaaggggcttgctttatttgcttctctccccaaccctccactcttagcctttgtcttttgaataatccttcctcattccacttttgtggtgggggataattagtcacaactcagtagtaagccgtgcctgctgtagagaggaagcattcagggggttggaagtgtggagaccccagtctgattgctggaatcagtgctcctcggttcagtgttttgagaccaggtctttagcttctagctgggcatatttttctgctttgtaatttaacctgtatcttttttttcccatgttcctgcctcatcagggaattgtaagatttagggggaggtgtgggaaatcttactctttgccctaaagtattcagcgatcagaattctggataccctgcaaaacacctccaacctccctgcctttgaaccctgtgttaacaatgagaagcttgtttatttgaaggctgggttctcattggcccacaggggtaggttgtaattgtgtgtctaaaaaattgccttttgcattccccaatagcatgacaactggaatagtaatttgacttaaaa

SEQ ID NO: 107201 - DNA, 244 bp, Homo sapiens
cctaatagcaattagctatacctcttcagaggggggaaatgatatgagaggggggtagggaagtgctgggtagagaagagccggtccctggctaaagctccacccctgcgcctgtgcctatggacctaggtgaggacagtcatttctgttttcgtgcccaaatgttgcatttcccaagaccaccctgacccaccacacccccatcctgtgactataaaaaccctgacacattagtgggcatgcc

SEQ ID NO: 107202 - DNA, 145 bp, Homo sapiens
tgcctctttggtcctctcttggacttcttattcttaagtctttcatgtgttcttaattcaaggaaatttatatccattatttcttcaactacttcttcctggagggaatgtaagatgggagacatccatctgttttttgaaccat

SEQ ID NO: 107203 - DNA, 291 bp, Homo sapiens
gttcctagttatctttcggtaacttttttcctaaactactctgaaaggcatagactgtctcttgaaagctcatctgttcttaacccctttccctcattccactgactgcagcatcttccacataccattccctcttagcatttatgtccatgtcatgcttttgttggtttatttgtgtattttctgcttcccaccattagatcatttgtagaattaatgaatgcctatgggttaatagatttttcgctgtatcctcttttctctgtatctctctgcccagttgcttagaaa

SEQ ID NO: 107204 - DNA, 564 bp, Homo sapiens
  misc_feature (113)..(113): n is a, c, g, or t
  misc_feature (123)..(123): n is a, c, g, or t
  misc_feature (165)..(165): n is a, c, g, or t
  misc_feature (190)..(190): n is a, c, g, or t
tgagacggagtctcgctctgtcgcccaggctggagtgcagtggcgcgatctcggcttactgcaagccccgcctcccgtgttcacgccattctcctgcctcagcctcccaaatngctgggactncaggcgcccgccaccgcgcccagctaattttttatatttttngtagagacggggtttcaccatgttngccaggatggtctcgatctcctgacctcgtgatctgcccgcctcagcctcccaaagtgctgggattacagatgtgagccactgcgcccggcctcctgaggtttttaatacaaagttctcgctgggacatttagtctgtgttagctgtagagtttttattttatttatttttatttttatattctggattcccatgaaaactgtggagtttttagaatgtaacattcaatctgcaaacacatgaatgttgtattcattaaatgtgacacaggtttgttggatgttcactgaagatgtgaatgaactcttactgtctcatactaataagacccatcattatataaattgaattggctctagttattaaaaaaaaaa

SEQ ID NO: 107205 - DNA, 321 bp, Homo sapiens
ctgcaaacactgaattagggaataccagagcattgctcctaggagaaatacagggctaggttcctatgagcctctgatgacatttttgtcaaccaatcaatacataaccttgttttgtgcatgtatgttaagatgctgtatctaatatttactgttgattcattaagactgaattcacagccaatggcactataattcatgtctgaacaaagcttatctaacacacatatttcctccctaaggaacatcacagccttcttgtgcttagaacactagacagcactagtatggggccattttaaaaagtgacctcaccaacaa

SEQ ID NO: 107206 - DNA, 436 bp, Homo sapiens
ctgcagtccctgagggacacagtccccaggcgccatctctttgaggctttgttctgtgctctgtggccttaccttgccctccctgagccaatttccctttctcaaggtggtcactgcctggtaagtttggagtaagggacggtcagaagcatttcccccacagtcaggttgtttgatgggggatgaaaagagacagcagaagttttgtgtttctgcaaaaacagaggcagtgcaggggacagtgagaggctggggtgtccaggagacctgagtctggcggtaggggcgctggtttctcatccttgaacctaattgcactgtcagtcggcccctcatgcctgagcagatgggaaggttcgtcccctgccctgcagcaagagggccctgtccaggaggcacccacagcaggggcagtgcaggtctgtggtcactcctg

SEQ ID NO: 107207 - DNA, 215 bp, Homo sapiens
attacaggtgtgagccaccaggcccagctaatttttatatttttagtagagacagcgtttcaccgtgttgcccgggctggtctctaactcctggcctcaagtgatccgcccaccttggcctcccaaagtgccgtgattacaggcatgagtcactgtgcccggccctcaagtgatctgtcttaaatatgttttattttcttcccgattttctatcc

SEQ ID NO: 107208 - DNA, 158 bp, Homo sapiens
ttttgtgtaggttgtgatggcctttgtgtatgttgtgagttgtgtttttgaggtagggtcttgctctatcacctgggctggagtgcagttgcactgtcaaggctcactgtagcctcagcctcctggactgaagcaatcctcttacctcaatcctctca

SEQ ID NO: 107209 - DNA, 584 bp, Homo sapiens
ggaggagtggcctggtgggaggtgattggaccatggaggtgaatttcccccttgctgttctcgtgatagtgagtgagttctcacgagatctcatggtttaaaagtccggcgcttcccagttctgtctctcgctcctgccgccttgtagacgtgttcgctttgcgtttgccttctgcgtgattgtaagtttcccgaggcttccccagccatgcggaactgtgagtcaattaaacctcttttctgtataaactacccagtctcaggtacttcttgataacagtgtgaaaatggactgatacagtaatgatataagctagcatgactgctgactgtgaactggaaaatggtgctaagtacgtgacatcacttgatcttttcaatactgtgagattggtactatcattaatccattttacagatgagataaccaaggccgagtaacttgctcaaagtctcacagctgttaagaagtgaaaccaatatttgaatgcaggtttctgaccatgatcgtgcgttcttagctgatatattatgatgcctgtcactctgggtgctttaacaatgaccaccaatgagagattgac

SEQ ID NO: 107210 - DNA, 681 bp, Homo sapiens
tcaaatcagctttattgagatatgatttatatagaataaaattcattaattgtatctgtttaattattttggacaaacacgtgagtcttgtaatcatcaccacttcagtcaagatgtagaacatgtctatcatgtcaaaactttccattatgtttctttacagtcagtacccttcccccactttcagctcagcccgtgacaggcaactaagttgccttctttccctaattttgtcttttctacaatttcatatcaaataaatcagaatatgcagtattctgtgtcatactacttctacttctgatatttatgcgattcatccaagtagttagaagtctcagtagttaattcctttttcttgctgaatagtatttcatatctgcttattagttaacagtttatgaacatctaagttgtttctagtctttcgcaggcatgaataaagctattatgagtgcttgtttacaagtctttgttttaatgtatgctttgttacctcgggttaaacacctgagggtgggattcatggattatataagtatatataagaaactgggctgggcgcagtagttcatgcctgtaatcccggcactttgggaggctaaggcaggcggatcgcttgagcccaggggttcaagaccaacctgggcaacatggcaaaccctgtctctactaaaaata

SEQ ID NO: 107211 - DNA, 111 bp, Homo sapiens
ccagcaagactggctcgcatgtgtaacaagggaatccagttggccaaaggtagagaaaaatcaccaaatgtggggctatgagcctaaagcagccaatgggatcacgaacaa

SEQ ID NO: 107212 - DNA, 368 bp, Homo sapiens
ggccaattgttcttaattaagcaccaatctggttgattccatgggaatttgagatgtcatcaaggtatattgctattgtcatcttccacagactgagcaccagtcaggccactgggtctgagtccctggggctggagcgggtccagtgggcaatttattaaaagttgccaggagaagaagggtgaatgcaggccacatcctgggaaacacacactgaacgtcaatgctggagaattctgagttgtacctctaagttcatggatgagcatgatataaggaagggaaggcaaaaataaaagtagaaagacaggtactgaagtattgtaaatgaacgggtccagtatttgtgaatggaacccacaacttgt

SEQ ID NO: 107213 - DNA, 503 bp, Homo sapiens
caaacttaaactaatagtacttttttaaaaaagattttgtatatggcacacaccccttactaactttctgacttctccaaagtccaggaagctgcttcctaaaataccttgttacatagttgtgccctccttaattaagcttcctagacctgggagtgtccaggaagtctgtataagtacatgtttccagtaaatacaatgattggttaagatgtttaagttttttgaaataccagggggaaaaaaagccctttgaaaacaggtgtcatgtgcacaaaaatgcacatgaagaagtaattcactttcatatttaacagtttattataatatcctttgtttctggtactattcatttaattcttcatggtagtttttggaagtttcatatttttatggtttattaatgattgtttttttaacctcagttcttgtattcactttacagtggtttattttcatttgaataaaatactgggcagctgttaatagttttacttcatagg

SEQ ID NO: 107214 - DNA, 264 bp, Homo sapiens
tatctgcacacagagactctgcatcttcacccagagtctccaaaacatgtcccttcgatgccagagaccatcagcatcccccatccccctttcccacattcctcagagagccagccactctacatcttggccgccctatgagaaagctgggactgggcctatttcccagataggcgaaggcaggcttggagcccaggtccagtgcagagcagggctgagatgacctcagcacagtgcccatgtgacaagccagccagggcccag

SEQ ID NO: 107215 - DNA, 269 bp, Homo sapiens
gttgcccaggctggagtatagtggctattcacaggcactacgagttcaagtgtactataggctgggtgtcctggcttatgcctgtaatcccagcacttgggaggccaaggcaggtggattacctgaggtcaggagttctagaccagtctggccaatatgatgaaaccccgtttctactaaaaattccaaaattagccgggcatattggtgggtgcctgtagtccgagctactggggaggctgaggcaggagaattgcttgaaactggga

SEQ ID NO: 107216 - DNA, 570 bp, Homo sapiens
  misc_feature (311)..(311): n is a, c, g, or t
gggagggtacctgtgtttgggtgaggtgcccttcaagaagggcagttcctggagagtccccagatagaggttgtcaatagttgacactttctgcagctggcgggacagcgcttggttgagggggactctgggtggcccactacagtgtctaccacaaatgcctacctgctctccaggatacattcaaatctcgccacccccaggaggccttcttagattcccatggatcagaatgggcctgggatgctctcttcccatgtccctcaggcttgcttgagctgtctcaggcatgacagctgttgtgggtttgnaaaggctctgccactagactgtgattccctggggaagcaataatcccctttggggacatcactgacttcaaaacggttaagggtaaaaggcaaaagacctgcccgtttggggacatcactgacttcaaaacagttaagggtaggccaggcgcggtggctcaagcctgtaatcccagcactttgggaagccgaggcgggcggatcacgaggtcaggagatcgagactatcctggctaacatggtgaaaccccgtctctac

SEQ ID NO: 107217 - DNA, 324 bp, Homo sapiens
aacaggtgaaattactatgggaaatttccttatggctgttacataaccagggtcctactgtcaaaaggctgcatggatggcctctgagtagcagagctgaaataaaacattttataattagtgcatgattctaacaaaggtagacgttaagaatatgcttgcgtgttaaggggaaaatgatttttttttctagtttattttgtaattcctaggttcactctaagctttaggtctaagcgaatgaaggacaaattcttaaaacataacatttgcctgtattattgctgattttatcaccagactataagcttttcttctgagaga

SEQ ID NO: 107218 - DNA, 616 bp, Homo sapiens
tcagcttcctcctgcctcaaagggttgttgctccattgaatgagatgatgcaggtaagcaggtgaagccctggaaggcggcagggggcttggaggaggcagaagaggatgagtgcccagcggcagggagcagggagggaggggactgtggccaggcctccctcacctaccttctcatctgagcttcacagggaccccccagcggtcagtttcttcaccgcccattcacagataacaaactgaggctcagagacagaatcctcttgcccaaggtcatgtggctagtggctggtgctgctgggattctaacggaagtctgtgtgactctggagttggcctggtcccaggacatcagctgaaggacacagctgcagccccaggtgccggatgcaggttcagagcattctccttgcgcagctagagggaactcctcccctgcatgggacagagtggggcagcttccagcccctctgccaggccgtggctcacccaggccctcctgggcccacttcagcagtctctggaccataaatgcttagagggcaagcagatatctgcctccaggcactccaagaagaccttgttcctccacctcctccatgggtctaggagaagaa

SEQ ID NO: 107219 - DNA, 344 bp, Homo sapiens
ccccctacacacaaggaggaagttctctttggactgggttgaggcaggcggccggacaggtggctaatgaattcagggccagcagaaaagccctggggatgagagtggaggcctgcacagggcttatgcatggaggcgggtgctggaggccgagcctgggagagagatgggcaggcgtatccaggccaggtagggcagtgggcgactcagctctttcatggccaagtgtgggtagggatggtctggggtgagtgtcaggggacctttggggtcagtagtgatggaggggtcttctcatcccactgcctggctgcccagtgggctcttttctctgctcctttctg

SEQ ID NO: 107220 - DNA, 594 bp, Homo sapiens
ccctcgcgaggtagtatcaagatgccattaatttccatagcatcttggataacaaataagaaaaatgtcaagagaggaaagcaaagcttttgacagtggcctcattaagtggaaaacatatttcctgtattaggatggggattctccaagggaggcttaagtgaggagacctcttcttcaaattataccaatgtggaaaggagttctgtttatttgaggctatagatttgtattgctctttggtttcctgtgttttggtacatttctgaggtggaagaattctgatgtctgagccctacccccagactaattaaatcagaatatctgagagtggggcttgggcattccagtttttaaaatgcttagttgtgtggaattttcgagctctaaaaacatactttgttgacatatcataaactagtaattttgcaaaaacttttttcataagttctcagatgtacatgaccctaattaataaacctcaggactcagatttcattttagtgtcataagctttcaatttgttatatttgagtttgggattcatgagtgattattgaagccaacagagagctaggataacacgttcgcgag

SEQ ID NO: 107221 - DNA, 1013 bp, Homo sapiens
cctgccatcacgcctagctaatttttgtatttttaatagagttagggtttcaccatgttggccaggctggtctcgaactcctgacctcaggtgatccgcctgcctcagtctcccaacgtgctgggattacaggcatgagccactgcacctggccagaagatcacattataacatggaaagatttcttaaaataattttttaaaattgtggtaaaatagtcataacataaagtttaccatctttaccattattaagtgtacagtgtagtggcgttaagcctattcacattgtgcggccatctccgccatctatctccagaactctcttgtcttgtaaaactgaaactctgcacccatcaaaccgtaattctccatttcttctcctccaacccttggtaactttattctgctttccctatgaatttgactactctaggtacctcatgtaagtggaatcatagaatatttgtccttttgtgactggcttatttcacttagcgtaatgtcctcaaggttcatccatgttgttgcatgtgtcagaatttccttcctttttaaggctgaataatattccattgtgtggatataacacatgatttatccatttatctatcgacggacacgtgggctgttttcatcccttgactgttgtgaataatgctgctgtgaacttgggtgcacacatatctctttgagccctttttaataatttttgtaacacagcaataacaatagctatagatacacttgtatagacatacctaccgcagctgccaactctgggggataagatgagtggagagttttactaattccgtggtttctaaatttttttattttaattttttttaccctttattatggaaaattaaaaacacaggaatagggaggccgaggcgggtggatcacttgaggccaggagttgaagaccagcctggccaacatggtgaaaccccgtctctactaaaaatacaaaagttagccaggtgtggtggtgtgcacctgtagtcccag

SEQ ID NO: 107222 - DNA, 453 bp, Homo sapiens
gaaaaccatattcattctaaaacctttcatgaagacatgtgcattgctgctaagagtattgtttcgtttttaagttgcctgttacttggacctctgcttcctatgtacttgtttcactgttggtcatttttatggtgcagttcttttagtaggtaagaaaagcaaaggaggattgcttatgcgatgactgtttacagtggtgtcagactatgccgtgttcacgaacactttaatatgttgttgtaatctgattttatcctcgtcttacaaatgaggaagttgaagccaagaaaggctgaatcacttgcctaacgtcacataactaattatattagtcaaaccagaattcagattctaaatttatctaatgggtacgagagtaaaagacttgtcatgaaaagagcttgaacttgattgcctttggaggtatttagttgtcagtaaattgcactt

SEQ ID NO: 107223 - DNA, 269 bp, Homo sapiens
actgttgtcctttccatgtgtagtgcttccttcaggagctcttgtaaggcaggcgggtggtgacaaaatctctcagcatttgcttgtctgtaaaggattttatttctccttcagttatgaagctgagatttggcttgctgagagataatggagggggcagagtggtagcctcaatgataggtgtggaagatactatagtatagcctgcctttgctggtgagtggagattaggcctggtggaactgccatcaataaaccaagtgtgatca

SEQ ID NO: 107224 - DNA, 241 bp, Homo sapiens
cagcatggtggtgcaggatatggaaggcatatttagagtcagtataaatattgatgtgtggtacttttgcaagagtgagggcccgagttaaggcaatgagtttggcttgctgagagataatggagggggcagagtggtagcctcaatgataggtgtggaagatactatagtatagcctgcctttgctggtgagtggagattaggcctggtggaactgccatcaataaaccaagtgtgatca

SEQ ID NO: 107225 - DNA, 809 bp, Homo sapiens
tgggtctgcagtaacctcaattcttgcctcctcagaagaaagaattcaactgaggagcataaagaaaaaaagagaccaaggcaagtttcagagcaggagtggaagtttattaaaaaggctttagaacagggaagaaacacttgaaagagatccaggtgggcaacttggaaaacaagtgcagtgtttaactctgaccctaggacttcataggcttgcccctttcccatgattcttcccttagggtgtgctgcccctatgtgtggtgccctccttacccttggtaggtgaacacgtgcagtgtgtttaggaattcgtacacacgtccatctgaggcttccctctgttttccagtgggagtgccccccgaaggtcatactccaccattttgttacttactgcccatgcctgggaagttgcgtctccctggcgcttgcattcagttaacactttagtgcagcaggtgtggaccatcaggaaatgggttctccctggcgccggctgccaatatcacttttagtgaggcagtgtgataattgtcaaaccatcatctgacatttctagagccctctcctgccccactcatgcctacctacctatgatattcactgtatcatcttggaagttgatctttttggtagtttccctagccattcatagacatttagtctactgggtgaactttaagatcgctttgtccaaattcaagaaaagctgttgagattctaattacattacatttataaattaattttggaagaaccgatattttaggatttcatattttcttaaattgcaacatattaaggctg

SEQ ID NO: 107226 - DNA, 750 bp, Homo sapiens
agaagtagttgtctacttagatgataaccaaaaaccacctgtgggtgaagggctaaattaggaaggctgaagttacattggatggagtttggccaacagataaaacatctcgtcgtttaataaagagcccagatcgccttgctgatatcaactatgaaggaagattggaagcagtttcaaggaaacagggagctcaattcaaagaataccggcctgaaactggttcttgggtgtttaaggtctcccatttttctaagtatggccttcaggattctgatgaagaggaggaggagcatccgtctaaaactagtacaaagaagttgaagactgctcctttgcctcctgcaagccagactacgcccttgccagatggctctttaatggcaaagctgcacctccacctcagagccagagcccagaggtggagcagttagggagggttgtggaactggacagtgacatggtagatatcacccaggagccagttttggataccatgttagaagagagcatgcctgaggatcaggaacctgtgtctgcctcaacacatattgcatcttcactgggaattaatccacatgtcttacagatcatgaaagcatcattgcttactgatgaagaagatgtagatatggcactggatcaacgcttcagtcgcctgccttccaaagcagatacttctcaagaaatctgttctcccagactccccatttcagcatcccactcgtcgaaaactcgttcactaggtac

SEQ ID NO: 107227 - DNA, 398 bp, Homo sapiens
tgagcaagccagggtcctcctacacaccagactcctcagaaaccagagtcgcatggggtgaggagcccagggaccgtggctggactgcagggtggacccagcttcccctctacctgctattcctctgtttactgcacataaaaatagatgcgacagaatcttactatgttgcccaggctggagtgcagtagatttttacaggtgtggggaaactgtcaacaccctcgcctctgcaggaggtatggccatgtaacgcattgggccaaatgactgggacaggcagcaaaaccagtgtgcacttttccgtgttctcttcatttgggtaaccagttcctgcctgtggaaatttaccttccaatactcaaaataaatgaatatcattttctgaaagttaaaac

SEQ ID NO: 107228 - DNA, 716 bp, Homo sapiens
gagagggagactccatctctgttccccaggctggagtgcagtggtaagatcttcgctcactgcaacctctgcctcccaggttaaagtgattctcctgcctcagcctcctgagtagccaagatcataggcaggcaccaccacgcccagctaatttttgtatttttttgtagagacggggtttcaccatgttggccagtctggtcttgaactttgacctcaaatgatccgcccacctcagcctcccaaagtgcaactgcaatagctttctaactggctcccctacagctaccctgaccaccatttcactcccttccaccctccttgaggagttatctttttaaaaaacacaaatatgggatattttactgccatatttaaaaacacgatgatctcccagattccccaacctactacatttctgacctttcatctccacatgctcctggctatcctacgcccagttcacaccctagttaattatggtgaagtccttccccttcccttcttacataaaccatcacatgcggacccattgtgctcaaatccctgctcaaccagttcccagcccacaagacaggttgcttttttctcctttactcgttcactcagtcggtcaacaaaatgtgcaacttaaaatttcctgggggcaacagaacaaaaagtaaagcaataaattaaaactttatttaagaatgtgataaatactatgaactaag

SEQ ID NO: 107229 - DNA, 180 bp, Homo sapiens
taatgacataataagtatgtctagtattatttaagtgcctattcatattttctcatcaaagctttttatgaatgattataatgcattttctataaaatgttattgctttcactgtataccagtgattcaaactttattgtcttcaacagcaatgacatgaaatcactctagttgcccatc

SEQ ID NO: 107230 - DNA, 5764 bp, Homo sapiens
  misc_feature (5595)..(5595): n is a, c, g, or t
cccggaagttgaccggggtgcggagctcctgggctgcagctcctggagtttccgaggttcgtgcgcgtctggtggcggcggcgtgatgttctcggcaggagcggagagtttgctccaccaggccagggagatccaggacgaggagctgaagaagttctgttcccggatctgtaaactgctgcaggcggaggacttggggccggacaccctcgactccctgcagaggctcttcctcatcatctcagccacgaagtacagccggaggctggagaagacatgcgtagacctgctgcaggccaccctcggcctgcctgcatgccccgagcagctccaggtgctttgcgccgccatcctgcgagagatgtccccctctgacagcctcagcctggcctgggaccacacgcagaacagccggcagctgagcctggtggcctccgttctcttggcccagggtgacagaaacgaggaggtcagagccgtgggccagggcgtgctacgagcgctggagagccggcagcctgagggacccagcctcagacacctcctccccgtcatggccaaggtcgtggtcctcagcccgggcaccctccaggaggaccaggccaccctgctcagcaagcggctggtcgactggctgcgctacgccagcctccagcaagggctcccacactccggcggcttcttctccacgcccagggcccggcagccgggccccgtcaccgaggtggacggggcggtagccacagacttcttcacggtgctctccagcggccaccgcttcacagacgaccagtggctgaacgtgcaggccttctctatgctgcgggcgtggctgctgcacagcggccccgagggcccgggcaccctggacacagatgacaggtcagagcaggagggctccactctgtcggtgatctccgccacctcctctgccggccgcctgctgccgccccgggagcggcttcgggaggtggccttcgagtactgccagcgcctcattgagcaaagtaaccgacgagccctgaggaagggggactccgacctgcagaaagcttgcctggtggaggccgtgctggtgctggacgtgctgtgccggcaggacccgtccttcctgtaccgaagtctctcctgcctgaaggccctgcacgggcgggtgcgcggggacccggcctctgtgcgggtgctgctgcccctcgcccacttcttcctgagccacggggaagcggctgcagtggactcggaagccgtctaccagcacctgttcaccaggatcccggtggagcagttccacagccccatgctggcctttgaattcatccagttctgcagggacaacctccacctgttcagcgggcacctcagcaccctcagattgagcttccccaacctctttaagttcctggcctggaacagcccacccctcacctccgagtttgtggcgctcctcccggccctggtggacgctggcacagccctggagatgctgcacgcgctgctggacctgccctgcttgacggcggtgctggacctgcagctcaggtcagcaccggctgcatccgagaggccactctgggacacctctctcagggcccccagctgcctggaggccttccgggacccgcagttccagggtcttttccaatacctgctgcgccccaaggccagtggcgccactgagaggttggcgccactccaccagctgctgcagcccatggccggctgtgcccgcgtggcccagtgtgcccaggccgtgcccacgctgctgcaggcattcttctcagcagtgacccaggtggctgacgggtccctgatcaaccagctggcgctgctgctcctgggcaggagcgactcgctctacccggccccagggtacgctgccggtgtgcacaggcctgatgcatgcaggcccatcctggttccactctgagcctgggcctgaggccagcgctggtgccagccttctccccagtgagaacagtttctctgaggctggcagtcttctgtgttcctctatcggagggtgcagcatacacctaccactcagacgcttcccgggtttctccaggcccttggcctggatggggatggggtcataggtctgcacagagcaggcgtagacccggctttctgggcagtgtgctgagttctcagttcctggccctgtgtacgctgaaaccctccctggtggtggagctggcaagagacctgctggagttcctgggcagcgtgaatggtctctgcagcagggcgagcctcgtcaccagcgtggtgtgggccatcggcgagtacctgtcggtgacctacgatcggaggtgcaccgtggagcagatcaacaagttcttcgaagccctggaggctctgctattcgaggtcacccagtgccgcccctctgctgccctgcccaggtgtcccccccaggtggtcaccgtgctgatgaccacgctgacgaagctggcctcccggagccaagatctgatccccagggcctctttattgctgtcaaagatgaggaccctggctcacagtccagccaccagctccacgcacagcgaggagggcgcggaagccatccgtacccgggccacagagctgctgaccctgctgaagatgcctagcgtggcccagtttgtgctcacacccagcacggaggtgtgcagcccccgctatcaccgcgatgccaacacggccctgcccctggccctgcgcacggtcagccggctggtggagagggaggccggcctcatgccagggtgaagggacagtggccagggacttcggtgcagattaagagcctgggcagccagcttgctactgaggccaggctgataggagctcaggagggcgcgggagtcctgggagaggaggcaaggcccacggtgggcttggcaccctcacagacacgcggggctggcccccctgctcaccctctgggctttgtctccgagccttttgctcccaggcaacactgagctgagctgaggggtgccatggagcggctctgattggaggcttgaggccctgtggctgggtcgggtggaggctgctgggtctgtttcctagtcttttgtttttggacagttgatgggcaagaagagctgcagtaaaagtaaatctcctttaataagcgtctgtatgaagagtgcgcgatcagttccgttacctgccctgcaccctggggagaggaccagggatgggaacccctggcagctgctgccagtcctggaggctcagcccggcgtgccactgctgctacagaaaccaggtcatttgtgcacagcccggaaggcagcggcgcgagttcccgggtgtggtcaccgctctgggtggtgcgcttgtcaatgccccttttgatgcccttgaatagcctgaagatgaaggggaccgggggagggttgcaagcgccatggcctatgcaggctgcggcctctggccattcggagggaaggccccagggagccacctgagtggagctcagaacactggattcgcgcgaaggggaggtgtctgggcgtgcggccccagccccgccaccttcctgggccctgtggtcccaccctccggactaccaaggcacagctgtgtcgcacgttccgcccggtgcctgggacgggctcagccgccagggggcgccgccgccccgagagcctcacgccccgcccccaggctcaaactcttccccctccccactctggctccgcccccggtctcctcttttgctctggccccgcccacctcccctccggcctcggccccgcccccaatcccccatagctctgcgactaagaaaccacaggctgaaggcgactgcagggtcctgccccttgcccagcctcaggactatggagggggcgagtgacgcgcaaggaacggagcaggggacaccgtgcgggctcaggagctccccagatgcccgagccgaaccgcggggtcctcaccgccaggttccagcccaggaagcgctcgcctgccccacagcctgggccttgggtcgcgttccgagctccaggacggctggtgtcccccgcggcctgcgatgacagcccagggccgctgagccggggccgcaggaaaggctggcgctggcaggcgcttccgtcggcagcactgtgtttgtgtttccacgtggaaacagcagcgcacgtgtacaactgtgcataccaaggcgtgcgtgccagtgcgcgggtctcgggatcacttcccagtgcggtgcacgaccccgcctgcagcagtgggtgtgggggcgctgctgggctcatcccgaagctcagagagcgtggggctgcccctaggctcggaatgagtctcccactgagtccgcagctcccctcctgccctggggcggggcttccctgacctgaaggcgtcgggggtgtcctggctcccagctcccaggcactcgtggggccaccgcccaggccagctggtgctaagtccgcagcctgtgcagcagcgcccggcttaggactgggagtgtgacttgaagggccgtcccgctcatccaagggacaaggaggagctcatggccacagggcctcggagggcatgaccccagcccagggaggagcaaccttcaggtggcctccaggaggcagctgggaaaagggcaaagctcaccagctctcaactttttttttaaataaactgaaattttagaatagtttttcagatttacagaaaagatgataaaccttagaaacattatatgctaagtgaaagtgagaagtgacagcctgctggcagtcctcacagccctcgctcgctcttggcgcctcctctgcctgggctcccactttggcagcacttgaggagcccttcagcccgccactgcactgtgggagcccctttcagggctggccaaggccggagccggctccctcagcttgcggggaggtgtggagggagaggcgcggtgggaaccagggctgcacgcggtgcttgcgggccagcgcgagttccgggtgggcgtgggctctgtgggccccgcactcggagccgccggctagccccgccagcctgggcagtgaggggcttagcacctggaccagcagctgctgtgctcgatttctcactgggccttagctgccttcctgcggggcagggctggggacctgcagcccgccatgcctgagcctcccccctcccctccgtgggttcctgcgcagtccgagcctccccaacgagtgttgccacctgctcagggcacccagtcccatcgaccacccaagggctgaggagtgcctttggagcagggcacgggactggcaggcagctctacctgcagcccctgtgcaggatccactgggtgaaagccagctgggctcctgagtctggtggggacttggagaacctttatgtctagctaagggattgtaaataaaccaattggcactctgtatctagctcaaggtttgtaaacacaccaatcagcaccttgtgtctagctcagggtttgtgaatgcaccaatagacactctgtatctagctactctggtggggacttggaaaacctttttgtcaacactctgtatctagttaatctggtggggacatggagaacctttgtgtctagctcagggattgtaaacgcaccaatcngcaccctgtcaaaacagaccactcggctctaccagtcagcaggatgtgggtggggccagatgagaataaaagcaggctgcccgagccagcagtgacaacccactcgggtccccttccacaccgggatgctttgtttgttcgctctttgcaataaatcttgctgctgctc

SEQ ID NO: 107231 - DNA, 1707 bp, Homo sapiens
gcagcctcagaccctgccacccccacccacagccccacacccagccccaggcacttctctctgcttctcaagaacattcccgtccttctttctgccgagcctgtcctcttcagggttagctcaggtccctcttccccgtcttgtcccctggggtccttctctccaaaggcctgatgcatgcaggcccatcctggttccactctgagcctgggcctgaggccagcgctggtgccagccttctccccagtgagaacagtttctctgaggctggcagtcttctgtgttcctctatcggagggtgcagcatacacctaccactcagacgcttcccgggtttctccaggcccttggcctggatggggatggggtcataggtctgcacagagcaggcgtagacccggctttctgggcagtgtgctgagttctcagttcctggccctgtgtacgctgaaaccctccctggtggtggagctggcaagagacctgctggagttcctgggcagcgtgaatggtctctgcagcagggcgagcctcgtcaccagcgtggtaaggcgggcgctggcctcccacagccgctcctgacccaggaggcctgggtgggggctgaatctctgtccccgggcctaggtgtgggccatcggcgagtacctgtcggtgacctacgatcggaggtgcaccgtggagcagatcaacaagttcttcgaagccctggaggctctgctattcgaggtcacccagtgccgcccctctgctgccctgcccaggtgtcccccccaggtggtcaccgtgctgatgaccacgctgacgaagctggcctcccggagccaagatctgatccccaggtgcctggtcagggagggagcgaagccttctggctcctggggaagagaggtggcttctgaggtcttcccatccaggtgttgtgaaatggtcgcagcagcgcaggtcctgggtgggccctgctgagctaaagccactctgctgggcgcttcaggcctggcccctccacacagacccctgtcctgggaggggagcatctgcagctgacggagggaccttctttccccagggcctctttattgctgtcaaagatgaggaccctggctcacagtccagccaccagctccacgcacagcgaggagggcgcggaagccatccgtacccgggccacagagctgctgaccctgctgaagatgcctagcgtggcccagtttgtgctcacacccagcacggaggtgtgcagcccccgctatcaccgcgatgccaacacggccctgcccctggccctgcgcacggtcagccggctggtggagagggaggccggcctcatgccagggtgaagggacagtggccagggacttcggtgcagattaagagcctgggcagccagcttgctactgaggccaggctgataggagctcaggagggcgcgggagtcctgggagaggaggcaaggcccacggtgggcttggcaccctcacagacacgcggggctggcccccctgctcaccctctgggctttgtctccgagccttttgctcccaggcaacactgagctgagctgaggggtgccatggagcggctctgattggaggcttgaggccctgtggctgggtcgggtggaggctgctgggtctgtttcctagtcttttgtttttggacagttgatgggcaagaagagctgcagtaaaagtaaatctcctttaa

SEQ ID NO: 107232 - DNA, 812 bp, Homo sapiens
cccggaagttgaccggggtgcggagctcctgggctgcagctcctggagtttccgaggttcgtgcgcgtctggtggcggcggcgtgatgttctcggcaggagcggagagtttgctccaccaggccagggagatccaggacgaggagctgaagaagttctgttcccggatctgtaaactgctgcaggcggaggacttggggccggacaccctcgactccctgcagaggctcttcctcatcatctcagccacgaagtacagccggagggtgacagaaacgaggaggtcagagccgtgggccagggcgtgctacgagcgctggagagccggcagcctgagggacccagcctcagacacctcctccccgtcatggccaagaccaggccaccctgctcagcaagcggctggtcgactggctgcgctacgccagcctccagcaagggctcccacactccggcggcttcttctccacgcccagggcccggcagccgggccccgtcaccgaggtggacggggcggtagccacagacttcttcacggtgctctccagcggccaccgcttcacagacgaccagtggctgaacgtgcaggccttctctatgctgcgggcgtggctgctgcacagcggccccgagggcccgggcaccctggacacagatgaacaaggtcaagagcagagaggggataccaatactgtacggtgaatctcccgacaaacttcatctgacaggcacgctagatagacgcaccgagaagcaggatacggaaaggttggccttcagagtaactgcaaagctcaatagagcaaagtaacc

SEQ ID NO: 107233 - DNA, 2876 bp, Homo sapiens
cccggaagttgaccggggtgcggagctcctgggctgcagctcctggagtttccgaggttcgtgcgcgtctggtggcggcggcgtgatgttctcggcaggagcggagagtttgctccaccaggccagggagatccaggacgaggagctgaagaagttctgttcccggatctgtaaactgctgcaggcggaggacttggggccggacaccctcgactccctgcagaggctcttcctcatcatctcagccacgaagtacagccggaggctggagaagacatgcgtagacctgctgcaggccaccctcggcctgcctgcatgccccgagcagctccaggtgctttgcgccgccatcctgcgagagatgtccccctctgacagcctcagcctggcctgggaccacacgcagaacagccggcagctgagcctggtggcctccgttctcttggcccagggtgacagaaacgaggaggtcagagccgtgggccagggcgtgctacgagcgctggagagccggcagcctgagggacccagcctcagacacctcctccccgtcatggccaaggtcgtggtcctcagcccgggcaccctccaggaggaccaggccaccctgctcagcaagcggctggtcgactggctgcgctacgccagcctccagcaagggctcccacactccggcggcttcttctccacgcccagggcccggcagccgggccccgtcaccgaggtggacggggcggtagccacagacttcttcacggtgctctccagcggccaccgcttcacagacgaccagtggctgaacgtgcaggccttctctatgctgcgggcgtggctgctgcacagcggccccgagggcccgggcaccctggacacagatgacaggtcagagcaggagggctccactctgtcggtgatctccgccacctcctctgccggccgcctgctgccgccccgggagcggcttcgggaggtggccttcgagtactgccagcgcctcattgagcaaagtaaccgacgagccctgaggaagggggactccgacctgcagaaagcttgcctggtggaggccgtgctggtgctggacgtgctgtgccggcaggacccgtccttcctgtaccgaagtctctcctgcctgaaggccctgcacgggcgggtgcgcggggacccggcctctgtgcgggtgctgctgcccctcgcccacttcttcctgagccacggggaagcggctgcagtggactcggaagccgtctaccagcacctgttcaccaggatcccggtggagcagttccacagccccatgctggcctttgaattcatccagttctgcagggacaacctccacctgttcagcgggcacctcagcaccctcagattgagcttccccaacctctttaagttcctggcctggaacagcccacccctcacctccgagtttgtggcgctcctcccggccctggtggacgctggcacagccctggagatgctgcacgcgctgctggacctgccctgcttgacggcggtgctggacctgcagctcaggtcagcaccggctgcatccgagaggccactctgggacacctctctcagggcccccagctgcctggaggccttccgggacccgcagttccagggtcttttccaatacctgctgcgccccaaggccagtggcgccactgagaggttggcgccactccaccagctgctgcagcccatggccggctgtgcccgcgtggcccagtgtgcccaggccgtgcccacgctgctgcaggcattcttctcagcagtgacccaggtggctgacgggtccctgatcaaccagctggcgctgctgctcctgggcaggagcgactcgctctacccggccccagggtacgctgccggtgtgcacagtgtgctgagttctcagttcctggccctgtgtacgctgaaaccctccctggtggtggagctggcaagagacctgctggagttcctgggcagcgtgaatggtctctgcagcagggcgagcctcgtcaccagcgtggtgtgggccatcggcgagtacctgtcggtgacctacgatcggaggtgcaccgtggagcagatcaacaagttcttcgaagccctggaggctctgctattcgaggtcacccagtgccgcccctctgctgccctgcccaggtgtcccccccaggtggtcaccgtgctgatgaccacgctgacgaagctggcctcccggagccaagatctgatccccagggcctctttattgctgtcaaagatgaggaccctggctcacagtccagccaccagctccacgcacagcgaggagggcgcggaagccatccgtacccgggccacagagctgctgaccctgctgaagatgcctagcgtggcccagtttgtgctcacacccagcacggaggtgtgcagcccccgctatcaccgcgatgccaacacggccctgcccctggccctgcgcacggtcagccggctggtggagagggaggccggcctcatgccagggtgaagggacagtggccagggacttcggtgcagattaagagcctgggcagccagcttgctactgaggccaggctgataggagctcaggagggcgcgggagtcctgggagaggaggcaaggcccacggtgggcttggcaccctcacagacacgcggggctggcccccctgctcaccctctgggctttgtctccgagccttttgctcccaggcaacactgagctgagctgaggggtgccatggagcggctctgattggaggcttgaggccctgtggctgggtcgggtggaggctgctgggtctgtttcctagtcttttgtttttggacagttgatgggcaagaagagctgcagtaaaagtaaatctcctttaa

SEQ ID NO: 107234 - DNA, 2551 bp, Homo sapiens
cccggaagttgaccggggtgcggagctcctgggctgcagctcctggagtttccgaggttcgtgcgcgtctggtggcggcggcgtgatgttctcggcaggagcggagagtttgctccaccaggccagggtgacagaaacgaggaggtcagagccgtgggccagggcgtgctacgagcgctggagagccggcagcctgagggacccagcctcagacacctcctccccgtcatggccaaggtcgtggtcctcagcccgggcaccctccaggaggaccaggccaccctgctcagcaagcggctggtcgactggctgcgctacgccagcctccagcaagggctcccacactccggcggcttcttctccacgcccagggcccggcagccgggccccgtcaccgaggtggacggggcggtagccacagacttcttcacggtgctctccagcggccaccgcttcacagacgaccagtggctgaacgtgcaggccttctctatgctgcgggcgtggctgctgcacagcggccccgagggcccgggcaccctggacacagatgacaggtcagagcaggagggctccactctgtcggtgatctccgccacctcctctgccggccgcctgctgccgccccgggagcggcttcgggaggtggccttcgagtactgccagcgcctcattgagcaaagtaaccgacgagccctgaggaagggggactccgacctgcagaaagcttgcctggtggaggccgtgctggtgctggacgtgctgtgccggcaggacccgtccttcctgtaccgaagtctctcctgcctgaaggccctgcacgggcgggtgcgcggggacccggcctctgtgcgggtgctgctgcccctcgcccacttcttcctgagccacggggaagcggctgcagtggactcggaagccgtctaccagcacctgttcaccaggatcccggtggagcagttccacagccccatgctggcctttgaattcatccagttctgcagggacaacctccacctgttcagcgggcacctcagcaccctcagattgagcttccccaacctctttaagttcctggcctggaacagcccacccctcacctccgagtttgtggcgctcctcccggccctggtggacgctggcacagccctggagatgctgcacgcgctgctggacctgccctgcttgacggcggtgctggacctgcagctcaggtcagcaccggctgcatccgagaggccactctgggacacctctctcagggcccccagctgcctggaggccttccgggacccgcagttccagggtcttttccaatacctgctgcgccccaaggccagtggcgccactgagaggttggcgccactccaccagctgctgcagcccatggccggctgtgcccgcgtggcccagtgtgcccaggccgtgcccacgctgctgcaggcattcttctcagcagtgacccaggtggctgacgggtccctgatcaaccagctggcgctgctgctcctgggcaggagcgactcgctctacccggccccagggtacgctgccggtgtgcacagtgtgctgagttctcagttcctggccctgtgtacgctgaaaccctccctggtggtggagctggcaagagacctgctggagttcctgggcagcgtgaatggtctctgcagcagggcgagcctcgtcaccagcgtggtgtgggccatcggcgagtacctgtcggtgacctacgatcggaggtgcaccgtggagcagatcaacaagttcttcgaagccctggaggctctgctattcgaggtcacccagtgccgcccctctgctgccctgcccaggtgtcccccccaggtggtcaccgtgctgatgaccacgctgacgaagctggcctcccggagccaagatctgatccccagggcctctttattgctgtcaaagatgaggaccctggctcacagtccagccaccagctccacgcacagcgaggagggcgcggaagccatccgtacccgggccacagagctgctgaccctgctgaagatgcctagcgtggcccagtttgtgctcacacccagcacggaggtgtgcagcccccgctatcaccgcgatgccaacacggccctgcccctggccctgcgcacggtcagccggctggtggagagggaggccggcctcatgccagggtgaagggacagtggccagggacttcggtgcagattaagagcctgggcagccagcttgctactgaggccaggctgataggagctcaggagggcgcgggagtcctgggagaggaggcaaggcccacggtgggcttggcaccctcacagacacgcggggctggcccccctgctcaccctctgggctttgtctccgagccttttgctcccaggcaacactgagctgagctgaggggtgccatggagcggctctgattggaggcttgaggccctgtggctgggtcgggtggaggctgctgggtctgtttcctagtcttttgtttttggacagttgatgggcaagaagagctgcagtaaaagtaaatctcctttaa

SEQ ID NO: 107235 - DNA, 3104 bp, Homo sapiens
cccggaagttgaccggggtgcggagctcctgggctgcagctcctggagtttccgaggttcgtgcgcgtctggtggcggcggcgtgatgttctcggcaggagcggagagtttgctccaccaggccagggagatccaggacgaggagctgaagaagttctgttcccggatctgtaaactgctgcaggcggaggacttggggccggacaccctcgactccctgcagaggctcttcctcatcatctcagccacgaagtacagccggaggctggagaagacatgcgtagacctgctgcaggccaccctcggcctgcctgcatgccccgagcagctccaggtgctttgcgccgccatcctgcgagagatgtccccctctgacagcctcagcctggcctgggaccacacgcagaacagccggcagctgagcctggtggcctccgttctcttggcccagggtgacagaaacgaggaggtcagagccgtgggccagggcgtgctacgagcgctggagagccggcagcctgagggacccagcctcagacacctcctccccgtcatggccaaggtcgtggtcctcagcccgggcaccctccaggagggtacgcggggcccctcccaagaggctgttgggggtctgccttcccaggtccttccctgagggcccatggtgggttgggagtgtggggggcaggtgggggacacggggaggcccgagggtttgggacgctgcaggattctgttttctgagaaaagtcggccagcatcccaacaacccaggcatctgtaggattcaacctcacctccccatgccaccccacccactgcagaccaggccaccctgctcagcaagcggctggtcgactggctgcgctacgccagcctccagcaagggctcccacactccggcggcttcttctccacgcccagggcccggcagccgggccccgtcaccgaggtggacggggcggtagccacagacttcttcacggtgctctccagcggccaccgcttcacagacgaccagtggctgaacgtgcaggccttctctatgctgcgggcgtggctgctgcacagcggccccgagggcccgggcaccctggacacagatgacaggtcagagcaggagggctccactctgtcggtgatctccgccacctcctctgccggccgcctgctgccgccccgggagcggcttcgggaggtggccttcgagtactgccagcgcctcattgagcaaagtaaccgacgagccctgaggaagggggactccgacctgcagaaagcttgcctggtggaggccgtgctggtgctggacgtgctgtgccggcaggacccgtccttcctgtaccgaagtctctcctgcctgaaggccctgcacgggcgggtgcgcggggacccggcctctgtgcgggtgctgctgcccctcgcccacttcttcctgagccacggggaagcggctgcagtggactcggaagccgtctaccagcacctgttcaccaggatcccggtggagcagttccacagccccatgctggcctttgaattcatccagttctgcagggacaacctccacctgttcagcgggcacctcagcaccctcagattgagcttccccaacctctttaagttcctggcctggaacagcccacccctcacctccgagtttgtggcgctcctcccggccctggtggacgctggcacagccctggagatgctgcacgcgctgctggacctgccctgcttgacggcggtgctggacctgcagctcaggtcagcaccggctgcatccgagaggccactctgggacacctctctcagggcccccagctgcctggaggccttccgggacccgcagttccagggtcttttccaatacctgctgcgccccaaggccagtggcgccactgagaggttggcgccactccaccagctgctgcagcccatggccggctgtgcccgcgtggcccagtgtgcccaggccgtgcccacgctgctgcaggcattcttctcagcagtgacccaggtggctgacgggtccctgatcaaccagctggcgctgctgctcctgggcaggagcgactcgctctacccggccccagggtacgctgccggtgtgcacagtgtgctgagttctcagttcctggccctgtgtacgctgaaaccctccctggtggtggagctggcaagagacctgctggagttcctgggcagcgtgaatggtctctgcagcagggcgagcctcgtcaccagcgtggtgtgggccatcggcgagtacctgtcggtgacctacgatcggaggtgcaccgtggagcagatcaacaagttcttcgaagccctggaggctctgctattcgaggtcacccagtgccgcccctctgctgccctgcccaggtgtcccccccaggtggtcaccgtgctgatgaccacgctgacgaagctggcctcccggagccaagatctgatccccagggcctctttattgctgtcaaagatgaggaccctggctcacagtccagccaccagctccacgcacagcgaggagggcgcggaagccatccgtacccgggccacagagctgctgaccctgctgaagatgcctagcgtggcccagtttgtgctcacacccagcacggaggtgtgcagcccccgctatcaccgcgatgccaacacggccctgcccctggccctgcgcacggtcagccggctggtggagagggaggccggcctcatgccagggtgaagggacagtggccagggacttcggtgcagattaagagcctgggcagccagcttgctactgaggccaggctgataggagctcaggagggcgcgggagtcctgggagaggaggcaaggcccacggtgggcttggcaccctcacagacacgcggggctggcccccctgctcaccctctgggctttgtctccgagccttttgctcccaggcaacactgagctgagctgaggggtgccatggagcggctctgattggaggcttgaggccctgtggctgggtcgggtggaggctgctgggtctgtttcctagtcttttgtttttggacagttgatgggcaagaagagctgcagtaaaagtaaatctcctttaa

SEQ ID NO: 107236 - DNA, 2842 bp, Homo sapiens
cccggaagttgaccggggtgcggagctcctgggctgcagctcctggagtttccgaggttcgtgcgcgtctggtggcggcggcgtgatgttctcggcaggagcggagagtttgctccaccaggccagggagatccaggacgaggagctgaagaagttctgttcccggatctgtaaactgctgcaggcggaggacttggggccggacaccctcgactccctgcagaggctcttcctcatcatctcagccacgaagtacagccggaggctggagaagacatgcgtagacctgctgcaggccaccctcggcctgcctgcatgccccgagcagctccaggtgctttgcgccgccatcctgcgagagatgtccccctctgacagcctcagcctggcctgggaccacacgcagaacagccggcagctgagcctggtggcctccgttctcttggcccagggtgacagaaacgaggaggtcagagccgtgggccagggcgtgctacgagcgctggagagccggcagcctgagggacccagcctcagacacctcctccccgtcatggccaagaccaggccaccctgctcagcaagcggctggtcgactggctgcgctacgccagcctccagcaagggctcccacactccggcggcttcttctccacgcccagggcccggcagccgggccccgtcaccgaggtggacggggcggtagccacagacttcttcacggtgctctccagcggccaccgcttcacagacgaccagtggctgaacgtgcaggccttctctatgctgcgggcgtggctgctgcacagcggccccgagggcccgggcaccctggacacagatgacaggtcagagcaggagggctccactctgtcggtgatctccgccacctcctctgccggccgcctgctgccgccccgggagcggcttcgggaggtggccttcgagtactgccagcgcctcattgagcaaagtaaccgacgagccctgaggaagggggactccgacctgcagaaagcttgcctggtggaggccgtgctggtgctggacgtgctgtgccggcaggacccgtccttcctgtaccgaagtctctcctgcctgaaggccctgcacgggcgggtgcgcggggacccggcctctgtgcgggtgctgctgcccctcgcccacttcttcctgagccacggggaagcggctgcagtggactcggaagccgtctaccagcacctgttcaccaggatcccggtggagcagttccacagccccatgctggcctttgaattcatccagttctgcagggacaacctccacctgttcagcgggcacctcagcaccctcagattgagcttccccaacctctttaagttcctggcctggaacagcccacccctcacctccgagtttgtggcgctcctcccggccctggtggacgctggcacagccctggagatgctgcacgcgctgctggacctgccctgcttgacggcggtgctggacctgcagctcaggtcagcaccggctgcatccgagaggccactctgggacacctctctcagggcccccagctgcctggaggccttccgggacccgcagttccagggtcttttccaatacctgctgcgccccaaggccagtggcgccactgagaggttggcgccactccaccagctgctgcagcccatggccggctgtgcccgcgtggcccagtgtgcccaggccgtgcccacgctgctgcaggcattcttctcagcagtgacccaggtggctgacgggtccctgatcaaccagctggcgctgctgctcctgggcaggagcgactcgctctacccggccccagggtacgctgccggtgtgcacagtgtgctgagttctcagttcctggccctgtgtacgctgaaaccctccctggtggtggagctggcaagagacctgctggagttcctgggcagcgtgaatggtctctgcagcagggcgagcctcgtcaccagcgtggtgtgggccatcggcgagtacctgtcggtgacctacgatcggaggtgcaccgtggagcagatcaacaagttcttcgaagccctggaggctctgctattcgaggtcacccagtgccgcccctctgctgccctgcccaggtgtcccccccaggtggtcaccgtgctgatgaccacgctgacgaagctggcctcccggagccaagatctgatccccagggcctctttattgctgtcaaagatgaggaccctggctcacagtccagccaccagctccacgcacagcgaggagggcgcggaagccatccgtacccgggccacagagctgctgaccctgctgaagatgcctagcgtggcccagtttgtgctcacacccagcacggaggtgtgcagcccccgctatcaccgcgatgccaacacggccctgcccctggccctgcgcacggtcagccggctggtggagagggaggccggcctcatgccagggtgaagggacagtggccagggacttcggtgcagattaagagcctgggcagccagcttgctactgaggccaggctgataggagctcaggagggcgcgggagtcctgggagaggaggcaaggcccacggtgggcttggcaccctcacagacacgcggggctggcccccctgctcaccctctgggctttgtctccgagccttttgctcccaggcaacactgagctgagctgaggggtgccatggagcggctctgattggaggcttgaggccctgtggctgggtcgggtggaggctgctgggtctgtttcctagtcttttgtttttggacagttgatgggcaagaagagctgcagtaaaagtaaatctcctttaa

SEQ ID NO: 107237 - DNA, 2053 bp, Homo sapiens
agtactatgcgggcttattggttagcgaggcctgggtggcgcctggacacagatgacaggtcagagcaggagggctccactctgtcggtgatctccgccacctcctctgccggccgcctgctgccgccccgggagcggcttcgggaggtggccttcgagtactgccagcgcctcattgagcaaagtaaccgacgagccctgaggaagggggactccgacctgcagaaagcttgcctggtggaggccgtgctggtgctggacgtgctgtgccggcaggacccgtccttcctgtaccgaagtctctcctgcctgaaggccctgcacgggcgggtgcgcggggacccggcctctgtgcgggtgctgctgcccctcgcccacttcttcctgagccacggggaagcggctgcagtggactcggaagccgtctaccagcacctgttcaccaggatcccggtggagcagttccacagccccatgctggcctttgaattcatccagttctgcagggacaacctccacctgttcagcgggcacctcagcaccctcagattgagcttccccaacctctttaagttcctggcctggaacagcccacccctcacctccgagtttgtggcgctcctcccggccctggtggacgctggcacagccctggagatgctgcacgcgctgctggacctgccctgcttgacggcggtgctggacctgcagctcaggtcagcaccggctgcatccgagaggccactctgggacacctctctcagggcccccagctgcctggaggccttccgggacccgcagttccagggtcttttccaatacctgctgcgccccaaggccagtggcgccactgagaggttggcgccactccaccagctgctgcagcccatggccggctgtgcccgcgtggcccagtgtgcccaggccgtgcccacgctgctgcaggcattcttctcagcagtgacccaggtggctgacgggtccctgatcaaccagctggcgctgctgctcctgggcaggagcgactcgctctacccggccccagggtacgctgccggtgtgcacagtgtgctgagttctcagttcctggccctgtgtacgctgaaaccctccctggtggtggagctggcaagagacctgctggagttcctgggcagcgtgaatggtctctgcagcagggcgagcctcgtcaccagcgtggtgtgggccatcggcgagtacctgtcggtgacctacgatcggaggtgcaccgtggagcagatcaacaagttcttcgaagccctggaggctctgctattcgaggtcacccagtgccgcccctctgctgccctgcccaggtgtcccccccaggtggtcaccgtgctgatgaccacgctgacgaagctggcctcccggagccaagatctgatccccagggcctctttattgctgtcaaagatgaggaccctggctcacagtccagccaccagctccacgcacagcgaggagggcgcggaagccatccgtacccgggccacagagctgctgaccctgctgaagatgcctagcgtggcccagtttgtgctcacacccagcacggaggtgtgcagcccccgctatcaccgcgatgccaacacggccctgcccctggccctgcgcacggtcagccggctggtggagagggaggccggcctcatgccagggtgaagggacagtggccagggacttcggtgcagattaagagcctgggcagccagcttgctactgaggccaggctgataggagctcaggagggcgcgggagtcctgggagaggaggcaaggcccacggtgggcttggcaccctcacagacacgcggggctggcccccctgctcaccctctgggctttgtctccgagccttttgctcccaggcaacactgagctgagctgaggggtgccatggagcggctctgattggaggcttgaggccctgtggctgggtcgggtggaggctgctgggtctgtttcctagtcttttgtttttggacagttgatgggcaagaagagctgcagtaaaagtaaatctcctttaa

SEQ ID NO: 107238 - DNA, 3405 bp, Homo sapiens
  misc_feature (2883)..(2883): n is a, c, g, or t
cccggaagttgaccggggtgcggagctcctgggctgcagctcctggagtttccgaggttcgtgcgcgtctggtggcggcggcgtgatgttctcggcaggagcggagagtttgctccaccaggccagggagatccaggacgaggagctgaagaagttctgttcccggatctgtaaactgctgcaggcggaggacttggggccggacaccctcgactccctgcagaggctcttcctcatcatctcagccacgaagtacagccggaggctggagaagacatgcgtagacctgctgcaggccaccctcggcctgcctgcatgccccgagcagctccaggtgctttgcgccgccatcctgcgagagatgtccccctctgacagcctcagcctggcctgggaccacacgcagaacagccggcagctgagcctggtggcctccgttctcttggcccagggtgacagaaacgaggaggtcagagccgtgggccagggcgtgctacgagcgctggagagccggcagcctgagggacccagcctcagacacctcctccccgtcatggccaaggtcgtggtcctcagcccgggcaccctccaggaggaccaggccaccctgctcagcaagcggctggtcgactggctgcgctacgccagcctccagcaagggctcccacactccggcggcttcttctccacgcccagggcccggcagccgggccccgtcaccgaggtggacggggcggtagccacagacttcttcacggtgctctccagcggccaccgcttcacagacgaccagtggctgaacgtgcaggccttctctatgctgcgggcgtggctgctgcacagcggccccgagggcccgggcaccctggacacagatgacaggtcagagcaggagggctccactctgtcggtgatctccgccacctcctctgccggccgcctgctgccgccccgggagcggcttcgggaggtggccttcgagtactgccagcgcctcattgagcaaagtaaccgacgagccctgaggaagggggactccgacctgcagaaagcttgcctggtggaggccgtgctggtgctggacgtgctgtgccggcaggacccgtccttcctgtaccgaagtctctcctgcctgaaggccctgcacgggcgggtgcgcggggacccggcctctgtgcgggtgctgctgcccctcgcccacttcttcctgagccacggggaagcggctgcagtggactcggaagccgtctaccagcacctgttcaccaggatcccggtggagcagttccacagccccatgctggcctttgaattcatccagttctgcagggacaacctccacctgttcagcgggcacctcagcaccctcagattgagcttccccaacctctttaagttcctggcctggaacagcccacccctcacctccgagtttgtggcgctcctcccggccctggtggacgctggcacagccctggagatgctgcacgcgctgctggacctgccctgcttgacggcggtgctggacctgcagctcaggtcagcaccggctgcatccgagaggccactctgggacacctctctcagggcccccagctgcctggaggccttccgggacccgcagttccagggtcttttccaatacctgctgcgccccaaggccagtggcgccactgagaggttggcgccactccaccagctgctgcagcccatggccggctgtgcccgcgtggcccagtgtgcccaggccgtgcccacgctgctgcaggcattcttctcagcagtgacccaggtggctgacgggtccctgatcaaccagctggcgctgctgctcctgggcaggagcgactcgctctacccggccccagggtacgctgccggtgtgcacagtgtgctgagttctcagttcctggccctgtgtacgctgaaaccctccctggtggtggagctggcaagagacctgctggagttcctgggcagcgtgaatggtctctgcagcagggcgagcctcgtcaccagcgtggtgtgggccatcggcgagtacctgtcggtgacctacgatcggaggtgcaccgtggagcagatcaacaagttcttcgaagccctggaggctctgctattcgaggtcacccagtgccgcccctctgctgccctgcccaggtgtcccccccaggtggtcaccgtgctgatgaccacgctgacgaagctggcctcccggagccaagatctgatccccagggcctctttattgctgtcaaagatgaggaccctggctcacagtccagccaccagctccacgcacagcgaggagggcgcggaagccatccgtacccgggccacagagctgctgaccctgctgaagatgcctagcgtggcccagtttgtgctcacacccagcacggaggtgtgcagcccccgctatcaccgcgatgccaacacggccctgcccctggccctgcgcacggtcagccggctggtggagagggaggccggcctcatgccagggtgaagggacagtggccagggacttcggtgcagattaagagcctgggcagccagcttgctactgaggccaggctgataggagctcaggagggcgcgggagtcctgggagaggaggcaaggcccacggtgggcttggcaccctcacagacacgcggggctggcccccctgctcaccctctgggctttgtctccgagccttttgctcccaggcaacactgagctgagctgaggggtgccatggagcggctctgattggaggcttgaggccctgtggctgggtcgggtggaggctgctgggtctgtttcctagtcttttgtttttggacagttgatgggcaagaagagctgcagtaaaagtaaatctcctttaaaaaaaanaaaataaaaaaaaaaaaaaaaacaaacaacaaacataaaccaccaaaaaccacccatcaacaccaccatcacataaacaggggcaccaccttataatataccgccacgggacccatatttctacgacagccaatactcttcacaaatgtttccccacctaataaactctcttttcatgaagccgaacagacaggcaccggccgttcaacacaagagctgttgatgcgctgccacacagcataccacgggaaggccaattcgcgaaggccacgcacaccacacacaggcggtgggcacaccacacttctgtgtgcgagaaccacatccccctccgccccgaccaattataaacgtcgcgcctcctgtcaatccatatacgtcaatgactcacgcagagagcgcacatacagtggcgtgcaaacaaacacagctgcactaactatgttgatgaccagacaacaaagcctgctgcccgctcccggaacgccgcgatagttatactacactcgcctcttttctacc

SEQ ID NO: 107239 - DNA, 2273 bp, Homo sapiens
cccggaagttgaccggggtgcggagctcctgggctgcagctcctggagtttccgaggttcgtgcgcgtctggtggcggcggcgtgatgttctcggcaggagcggagagtttgctccaccaggccagggagatccaggacgaggagctgaagaagttctgttcccggatctgtaaactgctgcaggcggaggacttggggccggacaccctcgactccctgcagaggctcttcctcatcatctcagccacgaagtacagccggaggctggagaagacatgcgtagacctgctgcaggccaccctcggcctgcctgcatgccccgagcagctccaggtgctttgcgccgccatcctgcgagagatgtccccctctgacagcctcagcctggcctgggaccacacgcagaacagccggcagctgagcctggtggcctccgttctcttggcccagggtgacagaaacgaggaggtcagagccgtgggccagggcgtgctacgagcgctggagagccggcagcctgagggacccagcctcagacacctcctccccgtcatggccaaggtcgtggtcctcagcccgggcaccctccaggaggaccaggccaccctgctcagcaagcggctggtcgactggctgcgctacgccagcctccagcaagggctcccacactccggcggcttcttctccacgcccagggcccggcagccgggccccgtcaccgaggtggacggggcggtagccacagacttcttcacggtgctctccagcggccaccgcttcacagacgaccagtggctgaacgtgcaggccttctctatgctgcgggcgtggctgctgcacagcggccccgagggcccgggcaccctggacacagatgacaggtcagagcaggagggctccactctgtcggtgatctccgccacctcctctgccggccgcctgctgccgccccgggagcggcttcgggaggtggccttcgagtactgccagcgcctcattgagcaaagtaaccgacgagccctgaggaagggggactccgacctgcagaaagcttgcctggtggaggccgtgctggtgctggacgtgctgtgccggcaggacccgtccttcctgtaccgaagtctctcctgcctgaaggccctgcacgggcgggtgcgcggggacccggcctctgtgcgggtgctgctgcccctcgcccacttcttcctgagccacggggaagcggctgcagtggactcggaagccgtctaccagcacctgttcaccaggatcccggtggagcagttccacagccccatgctggcctttgaattcatccagttctgcagggacaacctccacctgttcagcgggcacctcagcaccctcagattgagcttccccaacctctttaagttcctggcctggaacagcccacccctcacctccgagtttgtggcgctcctcccggccctggtggacgctggcacagccctggagatgctgcacgcgctgctggacctgccctgcttgacggcggtgctggacctgcagctcaggtcagcaccggctgcatccgagaggccactctgggacacctctctcagggcccccagctgcctggaggccttccgggacccgcagttccagggtcttttccaatacctgctgcgccccaaggccagtggcgccactgagaggttggcgccactccaccagctgctgcagcccatggccggctgtgcccgcgtggcccagtgtgcccaggccgtgcccacgctgctgcaggcattcttctcagcagtgacccaggtggctgacgggtccctgatcaaccagctggcgctgctgctcctgggcaggagcgactcgctctacccggccccagggtacgctgccggtgtgcacagtgtgctgagttctcagttcctggccctgtgtacgctgaaaccctccctggtggtggagctggcaagagacctgctggagttcctgggcagcgtgaatggtctctgcagcagggcgagcctcgtcaccagcgtggtaaggcgggcgctggcctcccacagccgctcctgacccaggaggcctgggtgggggctgaatctctgtccccgggcctaggtgtgggccatcggcgagtacctgtcggtgacctacgatcggaggtgcaccgtggagcagatcaacaagttcttcgaagccctggaggctgctgggtctgtttcctagtcttttgtttttggacagttgatgggcaagaagagctgcagtaaaagtaaatctcctttaa

SEQ ID NO: 107240 - DNA, 1157 bp, Homo sapiens
cccggaagttgaccggggtgcggagctcctgggctgcagctcctggagtttccgaggttcgtgcgcgtctggtggcggcggcgtgatgttctcggcaggagcggagagtttgctccaccaggccagggagatccaggacgaggagctgaagaagttctgttcccggatctgtaaactgctgcaggcggaggacttggggccggacaccctcgactccctgcagaggctcttcctcatcatctcagccacgaagtacagccggaggctggagaagacatgcgtagacctgctgcaggccaccctcggcctgcctgcatgccccgagcagctccaggtgctttgcgccgccatcctgcgagagatgtccccctctgacagcctcagcctggcctgggaccacacgcagaacagccggcagctgagcctggtggcctccgttctcttggcccagggtgacagaaacgaggaggtcagagccgtgggccagggcgtgctacgagcgctggagagccggcagcctgagggacccagcctcagacacctcctccccgtcatggccaaggtcgtggtcctcagcccgggcaccctccaggaggaccaggccaccctgctcagcaagcggctggtcgactggctgcgctacgccagcctccagcaagggctcccacactccggcggcttcttctccacgcccagggcccggcagccgggccccgtcaccgaggtggacggggcggtagccacagacttcttcacggtggagagggaggccggcctcatgccagggtgaagggacagtggccagggacttcggtgcagattaagagcctgggcagccagcttgctactgaggccaggctgataggagctcaggagggcgcgggagtcctgggagaggaggcaaggcccacggtgggcttggcaccctcacagacacgcggggctggcccccctgctcaccctctgggctttgtctccgagccttttgctcccaggcaacactgagctgagctgaggggtgccatggagcggctctgattggaggcttgaggccctgtggctgggtcgggtggaggctgctgggtctgtttcctagtcttttgtttttggacagttgatgggcaagaagagctgcagtaaaagtaaatctcctttaa

SEQ ID NO: 107241 - DNA, 390 bp, Homo sapiens
ccgacccggacccccggccgcggcacctacgccccgccccagtcgctccacgccaaagcccattggtcggcaacctgtccctcctgctcatgtgatgcggcacgtgacgcagccacgtaaggccgctgcgctcacgtgacgcggtcccggaagttgaccggggtgcggagctcctgggctgcagctcctggagtttccgaggttcgtgcgcgtctggtggcggcggcgtgatgttctcggcaggagcggagagtttgctccaccaggccaggtacgggggagctgcggccccggccctccttcctgcatctctccctaggggcacacgggggtgggtctcacagggcaggggcttgggcgccagccttgcaggaacccgactggactcgc

SEQ ID NO: 107242 - DNA, 506 bp, Homo sapiens
ggattgctgtgccagatgttggtaatttttaaacttttaaatagagaaataaacagactctttttgctgtgtccctagcccaggaaacctgaaagtctaggaaccagcaccttccaaagaatgtgccatagtgtgtgtgactcacgagctgtccgtgtccctgggcgagggagaccaagtgccgcttccccagcgtcccagcgtaggacgcctcggagcccttggtgtcctggagagcaggcctgagactcagggcccctaaccagtcacagaagcacggccagggcgaggtcaagacgtgtgccctggcgggccctggtcttgcaggggaagcggctgcagtggactcggaagccgtctaccagcacctgttcaccaggatcccggtggagcagttccacagccccatgctggcctttgaattcatccagttctgcagggacaacctccacctgttcagcgggcacctcagcaccctcagattgagcttccccaacctctttaag

SEQ ID NO: 107243 - DNA, 469 bp, Homo sapiens
accctgtctctaataaaaatacaaaaagtagtcggtcgtggtggtgcgtgcctgtaatcccagctactcaggaggctgaggcaggagaattgcttgaaccgaggaggcagaggttgcagtgagcagagatcgtgccactgcactccagcctgggcaacagagcaagactctgtctcaataaacaaataaataaataaaataaacacagctaacagcactgagtatttgctatgtgccagacacagttctaggcactttttctatagtaactcatttaattcctttgacaacctgagttaccctcacagcaggagaatgaggcacatgttgataggtaaattgtccatggtcattgtggtacagtgatgggatctgaatgcaaagattcaaaaccaaagattcaagtagggtgacgagtagggcagtttaagcaggactttcctaattttagcattgagagtcttgcatc

SEQ ID NO: 107244 - DNA, 552 bp, Homo sapiens
tttcctattcactttaatattttaatttttggttgtatggaaattattcaatgaaatatctgtctttttaaaagtgtatgcttccaatcaatgttttcctagtaggacctcttggtgattcttgtatataatcacttataaagtactaatataaccttttataaaaccaagatttttaccaatccaaacatcaaaaaaaaagccttaaaataacatttttaaaaacttaagaaacccaaaccaagacttaaaaaaaaaaacacctgtcttatttttaataattctatctaacattcctatctaaattaaaaatttttaaataattattttcaacaagggaaatataactcttcaatgatcatatatcatttcaggacaaaaacatgacaattcatttatttatttatttatttttccagcagggtttctctgtgtagccctggctgtcctggaactcactttgtagaccaggctggcctcgaactcagaaatctgcctgcctctgcctcccaagtgctgggattaaaggtgtgtgccacctctgccaggccc

SEQ ID NO: 107245 - DNA, 382 bp, Homo sapiens
catatgtttcctactgagatttgaagtgagatggggaatcgatgaggcggagagaagcaggatggcaggagctgccgagaagtcggcttgtacttcgaagggaaaaagaggaaggaaaaggactgttaataaaataacaaaggcagcaatcagaatgaaccagagccaggacagcgtaaaggctaggttcacagtgagatgaaagaacctgaaaacaagtttaaaactcaaaagaggattattctcaagttatactacagtgaaaaaacatggaaaaacacaaaaaggacaggcaataaggcacaggcatacatacaaggcaaattgtaacacaatatttacttgcaaaagagcccacagagacatgtcaatgaagtcatag

SEQ ID NO: 107246 - DNA, 404 bp, Homo sapiens
tagagacagggtttcaccatgttggccaggatggtctcgatctcttgacctcatgatcttcccgcctcggcctcccagagtgctaggattacaggtgtgatccaccatgcccagccgaatattattttttgttatacattttggttaagtgattgacctggtgagttataattattataaatttaaaaatgtcatccagtagtatttgcctatttggaattaatagccttactttctcagtgagttttgccttttataatgttaagtgctctttatatgctttgaaatgctttgtactttgaaatattatagaggtcctattagtatattttgggcatttaattggatgaagaaatgatttcattttcatggccataactcaattatgttacagaatttgtttc

SEQ ID NO: 107247 - DNA, 1722 bp, Homo sapiens
  misc_feature (2)..(3): n is a, c, g, or t
  misc_feature (558)..(558): n is a, c, g, or t
  misc_feature (609)..(609): n is a, c, g, or t
tnnttttttccctgagttctgtattatcccaactaatgatctaattttaatgataatacaatgataaattatccaagtaaatgaaggcagagaggtgacttaataattaattaattgtgtaatacataaaaatggactattcttcctcattgtgattcactttatcactccctgaagcaatacaatctttccgaagatgtaaaccatggtgccaaaccatgtcattgcccagtctagttattatctcactctcattcttcttacagctttgttggaagaaagtgtccatgttgaccagagccttcattatggccttctctcctctcctggtttctatgatactgcactttcttggatttctttctaaatctctgtatgaggccttgcccggcaataccttctcacatccaactctggaaaatactgaggctctgcgctcatgatgtggttggatctctcgctctacttctttgcccagttagctcagcaccatctatatgtctcttttgtgagggcaggtaagtggtccttaaagccactcttgccactagattgcangtttgaaattggaaattgatcatggggctttccttctgagcttacctgtgnactaaaaatatttttcaatctgagtctcaaggtagacacaactagttaattggggttgagaaagaagaaaaaactgagctcccattctagattatttttgcacagaaaattctcaaattattatctccagtcacttattcacaactcttctctccttggatgtaactctgtcttttcaaatttaaaatgaaaacatttaaacaattattttccttattaaacatgtttccctttacaaataccccacttgtgtctaaattaacatgttttttcctctcagttcccaggccaaaatccttggtattatttgttcatgtttcatccaagttatatactccaactctattctttttactcactttaatatgccttaagggttcttgatttacactacctctttcatagtcctacttctttatttggattataataagggtctctacccacagtatttctagatttctccaccccacaaattcagctaagagtgtgaaaccataagccctttgatacatctactttataaagttaaaaagattctcattttacaaagtcctccctgctttctttccctccatagaatgctgggaggcaaagcctctgccttcaccacatccagagtgacttctggtatttatttccaatttccagtcatggattaaaccagagagaacatggggacatgcaatggtgtgatttgttacctaacacagctactgatcaaagtcagtaggagaatttatgaggtactgctacccacgagccccttttcagtgcacaaactcaaactagtcttttatacacaggtgagattcttcctcttcatgaaactgttccttactgacagcccaatttcttccctaacatggctgagaactatccctcaagataaggctaaccccaggatgtactgttccacctcaactttctgttgacttcatttacatatttttattataattatgttctcaaaatataaagaattgccacagcaaatgagagtgatgtactatcaagttttgaacaagattgttaactcaccttgtcagtttcccactatcttcttggattccctgaatctcagaataaataataaaaactatttcatagttc

SEQ ID NO: 107248 - DNA, 1817 bp, Homo sapiens
aatagaccaaattaaaggatgttcaataaaatctactgcctacatgaagttaacacaaccacggatgaaaacaggaaaatcagaaattctacgataagaaaacataataaggatataagggatagaaaagcaaagtattctgttgtttctttacaaacaaaagacagagcctatcaatgaatgctcatcatatatcatttgtactattactgcaattttactgttaagttattctaaagtccactcaaaatgcttgaagcagcaagtactttaatcaataaaatctaccataagcctccattttccatgcagttgacaagcacactgatgtagaaatactacataatggaaatctgtggaacaaagttatatctgtttatatggcttatagcaggaataactgagaatgggttttccttgtgctgaagttctaaaatgttatagtcttgcatcatactgagccagaaggccagaatgcagctaaagtatacagatgacatgggagcacatttaaaagactatgcccatttgaccctattagcacaagctgaaatgatgtggggtccaatactaaataggttaatttatttatactcagcctttttgaaaatgcatctctctgaggaattacacaaggcaagataaaaagatagatctcttttgctacaggaaagatgtgtatcttaccagcctggggtcaaaaatgttacctttaggggcttgatggaaccagaaaatagcagttatattcacttatttctcatcttgttatatttggaaagatctgaaaacaatcttttctgaattacaaaggctgagaaaatgttctattgagggtaatataacccataatataacatttactcagcctttgtaattactccatcaagaacagttaatcactagagataatttataagcagagggggttgccagtggacccttttactgacagatattgtttatgggagatgcaaggagtactactagattcttactaagaagcaagcaagagaatatacttactctctttgggcttacaagaaaaacaacaacagaagactgccttttactgcccaagaggccattactggcttgcagcatgttaaaaagaaatgtctcatactaagaaaaagatttataaataagtgacatggcagaaaaatggatggttcagttcatactagctagataatttgtatagttgtcaatagctggacacttaattctatattattataacttttccatcaatgtagttcaaggttaaaaataagggagatatagggaattgtgtaaatatggtattatcttaatataaaatctaagagtcagaaacttttacaaaagaattgataaaacaaaaatcattaatcttaaaatataattataatcgaaaaaggattataagaatagagctaaaatagcaaagtaaagaataataatttaaccattattttatatggctaacatactataaaaattttctatgtagatttgaatgttttttcctttcaaaaaatgtcttgcaattgctgatgtcctcatgtcaaaacaatgccactccaaccagaagcccaccaaacacttgaagtttgctgcaagccttgctcatatctaacctcaaacagaaagcagcctacaaagaataaagaacagtcaactcaacaatggtcaccttttcattgtcatttctttgtcctgctttgctctttatcttgctaagtttcatttctacttttaacataatgtcatatctcatttggagattttttttttcactcaaactaaatcaacacagattatacttgctgcca

SEQ ID NO: 107249 - DNA, 699 bp, Homo sapiens
gtccacccctaggcacaattgatcctcccatcttagcttcctgagtagttgagaccacaagcatgtaccaccatgcctggctattttttctgtatttttagtagagatggggtctcactgtattgcttaggctggtcttgaactcctgagcttaagtgatccacccaccttggcctcccaaagggctgagattacaggtgtgagccaccgtgcccagcccctccaatgtcactttcatcagagaattccttggagctcttctgtggaaaagtcatttggatcttgctctgtcacccaggctggagtgcagtggcgcaatttcggctcactacagcctcgacctcccatgtttcaagtggattatccggcttctgcctcctgagtagctgggattacaggtgcacaccaccatgcccaggtaaagaggcacctgtcttgtaaggcaggtatttttacattgtcttcaagcaaggaggaatgctaagctttaacaaagaggaatgggcaatgtgttgggtccttcttgcgctgctctaaagaaatacctggcagggaggagggagagcatcacgaagaatagctaatggatgctgggcttaatacctaggtgataggatgatctgtgcagcaaaccaccacagcacacgtttatctatgtaacaaacctgcatatccagcgcatgtacccctgaacttaaa

SEQ ID NO: 107250 - DNA, 825 bp, Homo sapiens
tgctggtctttcaactgcttttctcagatgccttttcttcttgttccatgaacttctaaagatccccctttccgaaaataccaggctgcttcatctgtctgattctctaccacctttaaatttccatatggttgtaccttcaagtagatacatttaaaaacaagtaaacaccagaaataaaccctcatctatacggtcactttgaggcaggaaaatagggtctggaggcagggaacataaggccgattcacacctcagctatgacaggaaatatcctcaccatagggtgtatgctgagtaaatgactttgtaactttacttcatcctcttcatttacatagggcatacaccaagtaaccaatggaaactcccacaaattctgtaacagggactttgagcccctgtgctcgggccactcccacactgtggagtgtactttcattttcaataaatctcttcattccttccttgctttgttagtgcgttttgtccaattatttgttcaagatgccaaaaacctagacaccctccactggtataacaaagtgatttttgacaaagttgccaagaccattcaatagcaaaaaggcagtcttttcaagaaatgtggctggaaaacaatacccacatgcacgagagtgaagttggaccgttaccttataccatattcaaaaatggtaaatcggtcaaggcgtcaatttagaggtgaaattaatcttgggggaacaacggggaggtcctcgatatgtgtggggggattttgttttaacacaggtgccaagatattatgtcctcaattaaattgtgtcggtgttatgggagacc

SEQ ID NO: 107251 - DNA, 600 bp, Homo sapiens
cgtgaactggtgccccggcagcagctggactctcttgctggtgacctggcatcctcaattgtttcctcctgaagtggaagctggggccttagactctgccctggtgacaccagcaattatgactttgtctacccttcctccccagttattgttgcagattctggttaagcagaggcttcagaaccactgaacttgaaacttaccctctagggatgcaggtgggatgtccagggactataggtttgggaaaaccataccttaaggttggtcagcagtcagacaactctaatgtgtgtagtgataagagattcaagtaacatcagttctcctccttttcatgcttttccttcccaggtgcagcctgtgattctgatggggactggtaaatctgtgcctctgcctcctaggacttattttcccaggaggccatttacaaggggatctggatgacctgctgatggagatccagcttgccagggacttaggtttatcctgttttgtttgctactggttacaaattctattttctgtacaattagtcagactaaagttttcactgtgtttgtttggcaaaacaaattaaacaaaaagtaaggtttt

SEQ ID NO: 107252 - DNA, 1886 bp, Homo sapiens
cgcggcgtccccggggcccactcccgagcgcaggcgggcagccaggcgggcggcgcggcgcgggccggcaggaagcgtattctgggcacggggcgccgggcgggccggctgcgccgagcggcagtggtgggataccacccaaggcctcgcgcggcgccgcccgtcgaggggcgggcggcggcgtagccactgggccgtcgaagagcgcaggaggccggtgggccgggccgggccgcgcggcgcagccatgcctggctttacgtgctgcgtgccaggctgctacaacaactcgcaccgggacaaggcgctgcacttctacacgtttccaaaggacgctgagttgcggcgcctctggctcaagaacgtgtcgcgtgccggcgtcagtgggtgcttctccaccttccagcccaccacaggccaccgtctctgcagcgttcacttccagggcggccgcaagacctacacggtacgcgtccccaccatcttcccgctgcgcggcgtcaatgagcgcaaagtagcgcgcagacccgctggggccgcggccgcccgccgcaggcagcagcagcaacagcagcagcagcagcaacagcagcaacagcagcagcagcagcaacagcagcagcagcagcagcagcagcagcagtcctcaccctctgcctccactgcccagactgcccagctgcagccgaacctggtatctgcttccgcggccgtgcttctcacccttcaggccactgtagacagcagtcaggctccgggatccgtacagccggcgcccatcactcccactggagaagacgtgaagcccatcgatctcacagtgcaagtggagtttgcagccgcagagggcgcagccgctgcggccgccgcgtcggagttacaggctgctaccgcagggctggaggctgccgagtgccctatgggcccccagttggtggtggtaggggaagagggcttccctgatactggctccgaccattcgtactccttgtcgtcaggcaccacggaggaggagctcctgcgcaagctgaatgagcagcgggacatcctggctctgatggaagtgaagatgaaagagatgaaaggcagcattcgccacctgcgtctcactgaggccaagctgcgcgaagaactgcgtgagaaggatcggctgcttgccatggctgtcatccgcaagaagcacggaatgtgaactggtgccccggcagcctgctggactcccagaccccatccagccaggggaccgcaggccattgttgaactcctctatactcctgggcactggttgacagtactgaggcttaaggcagctggactctcttgctggtgacctggcatcctcaattgtttcctcctgaagtggaagctggggccttagactctgccctggtgacaccagcaattatgactttgtctacccttcctccccagttattgttgcagattctggttaagcagaggcttcagaaccactgaacttgaaacttaccctctagggatgcaggtgggatgtccagggactataggtttgggaaaaccataccttaaggttggtcagcagtcagacaactctaatgtgtgtagtgataagagattcaagtaacatcagttctcctccttttcatgcttttccttcccaggtgcagcctgtgattctgatggggactggtaaatctgtgcctctgcctcctaggacttattttcccaggaggccatttacaaggggatctggatgacctgctgatggagatccagcttgccagggacttaggtttatcctgttttgtttgctactggttacaaattctattttctgtacaattagtcagactaaagttttcactgtgtttgtttggcaaaacaaattaaacaaaaagtaaggtttt

SEQ ID NO: 107253 - DNA, 991 bp, Homo sapiens
ctagctagtacgaggctgggttcgaatcggccgagggtagagcaggtggcgaatgctgctttcacctgcgtctcactgaggccaagctgcgcgaagaactgcgtgagaaggatcggctgcttgccatggctgtcatccgcaagaagcacggaatgtgaactggtgccccggcagcctgctggactcccagaccccatccagccaggggaccgcaggccattgttgaactcctctatactcctgggcactggttgacagtactgaggcttaaggcagctggactctcttgctggtgacctggcatcctcaattgtttcctcctgaagtggaagctggggccttagactctgccctggtgacaccagcaattatgactttgtctacccttcctccccagttattgttgcagattctggttaagcagaggcttcagaaccactgaacttgaaacttaccctctagggatgcaggtgggatgtccagggactataggtttgggaaaaccataccttaaggttggtcagcagtcagacaactctaatgtgtgtagtgataagagattcaagtaacatcagttctcctccttttcatgcttttccttcccaggtgcagcctgtgattctgatggggactggtaaatctgtgcctctgcctcctaggacttattttcccaggaggccatttacaaggggatctggatgacctgctgatggagatccagcttgccagggacttaggtttatcctgttttgtttgctactggttacaaattctattttctgtacaattagtcagactaaagttttcactgtgtttgtttggcaaaacaaattaaacaaaaagtaaggttttaaaaaaaaaaaagtcgagattattggtgggaaaggagtattgaagggcagggctaggttctgccagttttttaaggggaatggggccaaggggtataaagcgtattatatgaacacggggggtgaaaaataaggatgat

SEQ ID NO: 107254 - DNA, 1757 bp, Homo sapiens
cgcggcgtccccggggcccactcccgagcgcaggcgggcagccaggcgggcggcgcggcgcgggccggcaggaagcgtattctgggcacggggcgccgggcgggccggctgcgccgagcggcagtggtgggataccacccaaggcctcgcgcggcgccgcccgtcgaggggcgggcggcggcgtagccactgggccgtcgaagagcgcaggaggccggtgggccgggccgggccgcgcggcgcagccatgcctggctttacgtgctgcgtgccaggctgctacaacaactcgcaccgggacaaggcgctgcacttctacacgtttccaaaggacgctgagttgcggcgcctctggctcaagaacgtgtcgcgtgccggcgtcagtgggtgcttctccaccttccagcccaccacaggccaccgtctctgcagccagcaacagcagcagcagcagcaacagcagcaacagcagcagcagcagcaacagcagcagcagcagcagcagcagcagcagtcctcaccctctgcctccactgcccagactgcccagctgcagccgaacctggtatctgcttccgcggccgtgcttctcacccttcaggccactgtagacagcagtcaggctccgggatccgtacagccggcgcccatcactcccactggagaagacgtgaagcccatcgatctcacagtgcaagtggagtttgcagccgcagagggcgcagccgctgcggccgccgcgtcggagttacaggctgctaccgcagggctggaggctgccgagtgccctatgggcccccagttggtggtggtaggggaagagggcttccctgatactggctccgaccattcgtactccttgtcgtcaggcaccacggaggaggagctcctgcgcaagctgaatgagcagcgggacatcctggctctgatggaagtgaagatgaaagagatgaaaggcagcattcgccacctgcgtctcactgaggccaagctgcgcgaagaactgcgtgagaaggatcggctgcttgccatggctgtcatccgcaagaagcacggaatgtgaactggtgccccggcagcctgctggactcccagaccccatccagccaggggaccgcaggccattgttgaactcctctatactcctgggcactggttgacagtactgaggcttaaggcagctggactctcttgctggtgacctggcatcctcaattgtttcctcctgaagtggaagctggggccttagactctgccctggtgacaccagcaattatgactttgtctacccttcctccccagttattgttgcagattctggttaagcagaggcttcagaaccactgaacttgaaacttaccctctagggatgcaggtgggatgtccagggactataggtttgggaaaaccataccttaaggttggtcagcagtcagacaactctaatgtgtgtagtgataagagattcaagtaacatcagttctcctccttttcatgcttttccttcccaggtgcagcctgtgattctgatggggactggtaaatctgtgcctctgcctcctaggacttattttcccaggaggccatttacaaggggatctggatgacctgctgatggagatccagcttgccagggacttaggtttatcctgttttgtttgctactggttacaaattctattttctgtacaattagtcagactaaagttttcactgtgtttgtttggcaaaacaaattaaacaaaaagtaaggtttt

SEQ ID NO: 107255 - DNA, 2025 bp, Homo sapiens
cgcggcgtccccggggcccactcccgagcgcaggcgggcagccaggcgggcggcgcggcgcgggccggcaggaagcgtattctgggcacggggcgccgggcgggccggctgcgccgagcggcagtggtgggataccacccaaggcctcgcgcggcgccgcccgtcgaggggcgggcggcggcgtagccactgggccgtcgaagagcgcaggaggccggtgggccgggccgggccgcgcggcgcagccatgcctggctttacgtgctgcgtgccaggctgctacaacaactcgcaccgggacaaggcgctgcacttctacacgtttccaaaggacgctgagttgcggcgcctctggctcaagaacgtgtcgcgtgccggcgtcagtgggtgcttctccaccttccagcccaccacaggccaccgtctctgcagcgttcacttccagggcggccgcaagacctacacggtacgcgtccccaccatcttcccgctgcgcggcgtcaatgagcgcaaagtagcgcgcagacccgctggggccgcggccgcccgccgcaggcagcagcagcaacagcagcagcagcagcaacagcagcaacagcagcagcagcagcaacagcagcagcagcagcagcagcagcagcagtcctcaccctctgcctccactgcccagactgcccagctgcagccgaacctggtatctgcttccgcggccgtgcttctcacccttcaggccactgtagacagcagtcaggctccgggatccgtacagccggcgcccatcactcccactggagaagacgtgaagcccatcgatctcacagtgcaagtggagtttgcagccgcagagggcgcagccgctgcggccgccgcgtcggagttacaggctgctaccgcagggctggaggctgccgagtgccctatgggcccccagttggtggtggtaggggaagagggcttccctgatactggctccgaccattcgtactccttgtcgtcaggcaccacggaggaggagctcctgcgcaagctgaatgagcagcgggacatcctggctctgatggaagtgaagatgaaagagatgaaaggcagcattcgccacctgcgtctcactgaggccaagctgcgcgaagaactgcgtgagaaggatcggctgcttgccatggctgtcatccgcaagaagcacggaatgtgaactggtgccccggcagcctgctggactcccagaccccatccagccaggggaccgcaggccattgttgaactcctctatactcctgggcactggttgacagtactgaggcttaaggcagctggactctcttgctggtgacctggcatcctcaattgtttcctcctgaagtggaagctggggccttagactctgccctggtgacaccagcaattatgactttgtctacccttcctccccagttattgttgcagattctggttaagcagaggcttcagaaccactgaacttgaaacttaccctctagggatgcaggtgggatgtccagggactataggtttgggaaaaccataccttaaggttggtcagcagtcagacaactctaatgtgtgtagtgataagagattcaagtaacatcagttctcctccttttcatgcttttccttcccaggtgcagcctgtgattctgatggggactggtaaatctgtgcctctgcctcctaggacttattttcccaggaggccatttacaaggggatctggatgacctgctgatggagatccagcttgccagggacttaggtttatcctgttttgtttgctactggttacaaattctattttctgtacaattagtcagactaaagttttcactgtgtttgtttggcaaaacaaattaaacaaaaagtaaggttttaaaaaaaaaaaagtcgagattattggtgggaaaggagtattgaagggcagggctaggttctgccagttttttaaggggaatggggccaaggggtataaagcgtattatatgaacacggggggtgaaaaataaggatgat

SEQ ID NO: 107256 - DNA, 1627 bp, Homo sapiens
  misc_feature (1488)..(1488): n is a, c, g, or t
  misc_feature (1539)..(1539): n is a, c, g, or t
  misc_feature (1590)..(1590): n is a, c, g, or t
  misc_feature (1595)..(1595): n is a, c, g, or t
  misc_feature (1607)..(1608): n is a, c, g, or t
cgcggcgtccccggggcccactcccgagcgcaggcgggcagccaggcgggcggcgcggcgcgggccggcaggaagcgtattctgggcacggggcgccgggcgggccggctgcgccgagcggcagtggtgggataccacccaaggcctcgcgcggcgccgcccgtcgaggggcgggcggcggcgtagccactgggccgtcgaagagcgcaggaggccggtgggccgggccgggccgcgcggcgcagccatgcctggctttacgtgctgcgtgccaggctgctacaacaactcgcaccgggacaaggcgctgcacttctacacgtttccaaaggacgctgagttgcggcgcctctggctcaagaacgtgtcgcgtgccggcgtcagtgggtgcttctccaccttccagcccaccacaggccaccgtctctgcagcgttcacttccagggcggccgcaagacctacacggtacgcgtccccaccatcttcccgctgcgcggcgtcaatgagcgcaaagtagcgcgcagacccgctggggccgcggccgcccgccgcaggcagcagcagcaacagcagcagcagcagcaacagcagcaacagcagcagcagcagcaacagcagcagcagcagcagcagcagcagcagtcctcaccctctgcctccactgcccagactgcccagctgcagccgaacctggtatctgcttccgcggccgtgcttctcacccttcaggccactgtagacagcagtcaggctccgggatccgtacagccggcgcccatcactcccactggagaagacgtgaagcccatcgatctcacagtgcaagtggagtttgcagccgcagagggcgcagccgctgcggccgccgcgtcggagttacaggctgctaccgcagggctggaggctgccgagtgccctatgggcccccagttggtggtggtaggggaagagggcttccctgatactggctccgaccattcgtactccttgtcgtcaggcaccacggaggaggagctcctgcgcaagctgaatgagcagcgggacatcctggctctgatggaagtgaagatgaaagagatgaaaggcagcattcgccacctgcgtctcactgaggccaagctgcgcgaagaactgcgtgagaaggatcggctgcttgccatggctgtcatccgcaagaagcacggaatgtgaactggtgccccggcagcctgctggactcccagaccccatccagccaggggaccgcaggccattgttgaactcctctatactcctgggcactggttgacagtactgaggcttaaggcagctggactctcttgctggtgacctggcatcctcaattgtttcctcctgaagtggaagctggggccttagactctgccctggtgacaccagcaattatgactttgtctacccttcctccccagactgtgctatttcagtgtagtgcttctcattataaatgaatctaatatggggcttcnaaagatcatcatgtatgtgcttgtggcttaatgtaggagggtattttatantttgtagttattttaatcttatctgcccatagttggtggatgactgttggnctgcntgttcctggttnnggatctgtcggtccgagct

SEQ ID NO: 107257 - DNA, 1574 bp, Homo sapiens
cgcggcgtccccggggcccactcccgagcgcaggcgggcagccaggcgggcggcgcggcgcgggccggcaggaagcgtattctgggcacggggcgccgggcgggccggctgcgccgagcggcagtggtgggataccacccaaggcctcgcgcggcgccgcccgtcgaggggcgggcggcggcgtagccactgggccgtcgaagagcgcaggaggccggtgggccgggccgggccgcgcggcgcagccatgcctggctttacgtgctgcgtgccaggctgctacaacaactcgcaccgggacaaggcgctgcacttctacacgtttccaaaggacgctgagttgcggcgcctctggctcaagaacgtgtcgcgtgccggcgtcagtgggtgcttctccaccttccagcccaccacaggccaccgtctctgcagcgttcacttccagggcggccgcaagacctacacggtacgcgtccccaccatcttcccgctgcgcggcgtcaatgagcgcaaagtagcgcgcagacccgctggggccgcggccgcccgccgcaggcagcagcagcaacagcagcagcagcagcaacagcagcaacagcagcagcagcagcaacagcagcagcagcagcagcagcagcagcagtcctcaccctctgcctccactgcccagactgcccagctgcagccgaacctggtatctgcttccgcggccgtgcttctcacccttcaggccatcctggctctgatggaagtgaagatgaaagagatgaaaggcagcattcgccacctgcgtctcactgaggccaagctgcgcgaagaactgcgtgagaaggatcggctgcttgccatggctgtcatccgcaagaagcacggaatgtgaactggtgccccggcagcctgctggactcccagaccccatccagccaggggaccgcaggccattgttgaactcctctatactcctgggcactggttgacagtactgaggcttaaggcagctggactctcttgctggtgacctggcatcctcaattgtttcctcctgaagtggaagctggggccttagactctgccctggtgacaccagcaattatgactttgtctacccttcctccccagttattgttgcagattctggttaagcagaggcttcagaaccactgaacttgaaacttaccctctagggatgcaggtgggatgtccagggactataggtttgggaaaaccataccttaaggttggtcagcagtcagacaactctaatgtgtgtagtgataagagattcaagtaacatcagttctcctccttttcatgcttttccttcccaggtgcagcctgtgattctgatggggactggtaaatctgtgcctctgcctcctaggacttattttcccaggaggccatttacaaggggatctggatgacctgctgatggagatccagcttgccagggacttaggtttatcctgttttgtttgctactggttacaaattctattttctgtacaattagtcagactaaagttttcactgtgtttgtttggcaaaacaaattaaacaaaaagtaaggtttt

SEQ ID NO: 107258 - DNA, 1479 bp, Homo sapiens
cgcggcgtccccggggcccactcccgagcgcaggcgggcagccaggcgggcggcgcggcgcgggccggcaggaagcgtattctgggcacggggcgccgggcgggccggctgcgccgagcggcagtggtgggataccacccaaggcctcgcgcggcgccgcccgtcgaggggcgggcggcggcgtagccactgggccgtcgaagagcgcaggaggccggtgggccgggccgggccgcgcggcgcagccatgcctggctttacgtgctgcgtgccaggctgctacaacaactcgcaccgggacaaggcgctgcacttctacacgtttccaaaggacgctgagttgcggcgcctctggctcaagaacgtgtcgcgtgccggcgtcagtgggtgcttctccaccttccagcccaccacaggccaccgtctctgcagcgttcacttccagggcggccgcaagacctacacggtacgcgtccccaccatcttcccgctgcgcggcgtcaatgagcgcaaagtagcgcgcagacccgctggggccgcggccgcccgccgcaggcagcagcagcaacagcagcagcagcagcaacagcagcaacagcagcagcagcagcaacagcagcagcagcagcagcagcagcagcagtcctcaccctctgcctccactgcccagactgcccagctgcagccgaacctggtatctgcttccgcggccgtgcttctcacccttcaggccactgtagacagcagtcaggctccgggatccgtacagccggcgcccatcactcccactggagaagacgtgaagcccatcgatctcacagtgcaagtggagtttgcagccgcagagggcgcagccgctgcggccgccgcgtcggagttacaggctgctaccgcagggctggaggctgccgagtgccctatgggcccccagttggtggtggtaggggaagagggcttccctgatactggctccgaccattcgtactccttgtcgtcaggcaccacggaggaggagctcctgcgcaagctgaatgagcagcgggacatcctggctctgatggaagtgaagatgaaagagatgaaaggcagcattcgccgtgggatgtccagggactataggtttgggaaaaccataccttaaggttggtcagcagtcagacaactctaatgtgtgtagtgataagagattcaagtaacatcagttctcctccttttcatgcttttccttcccaggtgcagcctgtgattctgatggggactggtaaatctgtgcctctgcctcctaggacttattttcccaggaggccatttacaaggggatctggatgacctgctgatggagatccagcttgccagggacttaggtttatcctgttttgtttgctactggttacaaattctattttctgtacaattagtcagactaaagttttcactgtgtttgtttggcaaaacaaattaaacaaaaagtaaggtttt

SEQ ID NO: 107259 - DNA, 597 bp, Homo sapiens
tgtgggatctctagagtctggctgctggtgttgaatgcttgtgacgtggtcgatgttttccatactgtcgtgtgtggctggggccttagactctgccctggtgacaccagcaattatgactttgtctacccttcctccccagttattgttgcagattctggttaagcagaggcttcagaaccactgaacttgaaacttaccctctagggatgcaggtgggatgtccagggactataggtttgggaaaaccataccttaaggttggtcagcagtcagacaactctaatgtgtgtagtgataagagattcaagtaacatcagttctcctccttttcatgcttttccttcccaggtgcagcctgtgattctgatggggactggtaaatctgtgcctctgcctcctaggacttattttcccaggaggccatttacaaggggatctggatgacctgctgatggagatccagcttgccagggacttaggtttatcctgttttgtttgctactggttacaaattctattttctgtacaattagtcagactaaagttttcactgtgtttgtttggcaaaacaaattaaacaaaaagtaaggtttt

SEQ ID NO: 107260 - DNA, 1248 bp, Homo sapiens
cgcggcgtccccggggcccactcccgagcgcaggcgggcagccaggcgggcggcgcggcgcgggccggcaggaagcgtattctgggcacggggcgccgggcgggccggctgcgccgagcggcagtggtgggataccacccaaggcctcgcgcggcgccgcccgtcgaggggcgggcggcggcgtagccactgggccgtcgaagagcgcaggaggccggtgggccgggccgggccgcgcggcgcagccatgcctggctttacgtgctgcgtgccaggctgctacaacaactcgcaccgggacaaggcgctgcacttctacacgtttccaaaggacgctgagttgcggcgcctctggctcaagaacgtgtcgcgtgccggcgtcagtgggtgcttctccaccttccagcccaccacaggccaccgtctctgcagcgttcacttccagggcggccgcaagacctacacggtacgcgtccccaccatcttcccgctgcgcggcgtcaatgagcgcaaagtagcgcgcagacccgctggggccgcggccgcccgccgcaggcagcagcagcaacagcagcagcagcagcaacagcagcaacagcagcagcagcagcaacagcagcagcagcagcagcagcagcagcagtcctcaccctctgcctccactgcccagactgcccagctgcagccgaacctggtatctgcttccgcggccgtgcttctcacccttcaggccactgtagacagcagtcaggctccgggatccgtacagccggcgcccatcactcccactggagaagacgtgaagcccatcgatctcacagtgcaagtggagtttgcagccgcagagggcgcagccgctgcggccgccgcgtcggagttacaggctgctaccgcagggctggaggctgccgagtgccctatgggcccccagttggtggtggtaggggaagagggcttccctgatactggctccgaccattcgtactccttgtcgtcaggcaccacggaggaggagctcctgcgcaagctgaatgagcagcgggacatcctggctctgatggaagtgaagatgaaagagatgaaaggcagcattcgccacctgcgtctcactgaggccaagctgcgcgaagaactgcgtgagagccaagaccgcgtgggccgcggggtgctggtaggaagtggttgggagagactttgcgaaggcggctgggggtgtttcggatttccaaataaagaaaccggagtgat

SEQ ID NO: 107261 - DNA, 1152 bp, Homo sapiens
cgcggcgtccccggggcccactcccgagcgcaggcgggcagccaggcgggcggcgcggcgcgggccggcaggaagcgtattctgggcacggggcgccgggcgggccggctgcgccgagcggcagtggtgggataccacccaaggcctcgcgcggcgccgcccgtcgaggggcgggcggcggcgtagccactgggccgtcgaagagcgcaggaggccggtgggccgggccgggccgcgcggcgcagccatgcctggctttacgtgctgcgtgccaggctgctacaacaactcgcaccgggacaaggcgctgcacttctacacgtttccaaaggacgctgagttgcggcgcctctggctcaagaacgtgtcgcgtgccggcgtcagtgggtgcttctccaccttccagcccaccacaggccaccgtctctgcagcgttcacttccagggcggccgcaagacctacacggtacgcgtccccaccatcttcccgctgcgcggcgtcaatgagcgcaaagtagcgcgcagacccgctggggccgcggccgcccgccgcaggcagcagcagcaacagcagcagcagcagcaacagcagcaacagcagcagcagcagcaacagcagcagcagcagcagcagcagcagcagtcctcaccctctgcctccactgcccagactgcccagctgcagccgaacctggtatctgcttccgcggccgtgcttctcacccttcaggccaaccactgaacttgaaacttaccctctagggatgcaggtgggatgtccagggactataggtttgggaaaaccataccttaaggttggtcagcagtcagacaactctaatgtgtgtagtgataagagattcaagtaacatcagttctcctccttttcatgcttttccttcccaggtgcagcctgtgattctgatggggactggtaaatctgtgcctctgcctcctaggacttattttcccaggaggccatttacaaggggatctggatgacctgctgatggagatccagcttgccagggacttaggtttatcctgttttgtttgctactggttacaaattctattttctgtacaattagtcagactaaagttttcactgtgtttgtttggcaaaacaaattaaacaaaaagtaaggtttt

SEQ ID NO: 107262 - DNA, 1849 bp, Homo sapiens
cgcggcgtccccggggcccactcccgagcgcaggcgggcagccaggcgggcggcgcggcgcgggccggcaggaagcgtattctgggcacggggcgccgggcgggccggctgcgccgagcggcagtggtgggataccacccaaggcctcgcgcggcgccgcccgtcgaggggcgggcggcggcgtagccactgggccgtcgcggcgcagccatgcctggctttacgtgctgcgtgccaggctgctacaacaactcgcaccgggacaaggcgctgcacttctacacgtttccaaaggacgctgagttgcggcgcctctggctcaagaacgtgtcgcgtgccggcgtcagtgggtgcttctccaccttccagcccaccacaggccaccgtctctgcagcgttcacttccagggcggccgcaagacctacacggtacgcgtccccaccatcttcccgctgcgcggcgtcaatgagcgcaaagtagcgcgcagacccgctggggccgcggccgcccgccgcaggcagcagcagcaacagcagcagcagcagcaacagcagcaacagcagcagcagcagcaacagcagcagcagcagcagcagcagcagcagtcctcaccctctgcctccactgcccagactgcccagctgcagccgaacctggtatctgcttccgcggccgtgcttctcacccttcaggccactgtagacagcagtcaggctccgggatccgtacagccggcgcccatcactcccactggagaagacgtgaagcccatcgatctcacagtgcaagtggagtttgcagccgcagagggcgcagccgctgcggccgccgcgtcggagttacaggctgctaccgcagggctggaggctgccgagtgccctatgggcccccagttggtggtggtaggggaagagggcttccctgatactggctccgaccattcgtactccttgtcgtcaggcaccacggaggaggagctcctgcgcaagctgaatgagcagcgggacatcctggctctgatggaagtgaagatgaaagagatgaaaggcagcattcgccacctgcgtctcactgaggccaagctgcgcgaagaactgcgtgagaaggatcggctgcttgccatggctgtcatccgcaagaagcacggaatgtgaactggtgccccggcagcctgctggactcccagaccccatccagccaggggaccgcaggccattgttgaactcctctatactcctgggcactggttgacagtactgaggcttaaggcagctggactctcttgctggtgacctggcatcctcaattgtttcctcctgaagtggaagctggggccttagactctgccctggtgacaccagcaattatgactttgtctacccttcctccccagttattgttgcagattctggttaagcagaggcttcagaaccactgaacttgaaacttaccctctagggatgcaggtgggatgtccagggactataggtttgggaaaaccataccttaaggttggtcagcagtcagacaactctaatgtgtgtagtgataagagattcaagtaacatcagttctcctccttttcatgcttttccttcccaggtgcagcctgtgattctgatggggactggtaaatctgtgcctctgcctcctaggacttattttcccaggaggccatttacaaggggatctggatgacctgctgatggagatccagcttgccagggacttaggtttatcctgttttgtttgctactggttacaaattctattttctgtacaattagtcagactaaagttttcactgtgtttgtttggcaaaacaaattaaacaaaaagtaaggtttt

SEQ ID NO: 107263 - DNA, 1908 bp, Homo sapiens
  misc_feature (1845)..(1845): n is a, c, g, or t
cgcggcgtccccggggcccactcccgagcgcaggcgggcagccaggcgggcggcgcggcgcgggccggcaggaagcgtattctgggcacggggcgccgggcgggccggctgcgccgagcggcagtggtgggataccacccaaggcctcgcgcggcgccgcccgtcgaggggcgggcggcggcgtagccactgggccgtcgaagagcgcaggaggccggtgggccgggccgggccgcgcggcgcagccatgcctggctttacgtgctgcgtgccaggctgctacaacaactcgcaccgggacaaggcgctgcacttctacacgtttccaaaggacgctgagttgcggcgcctctggctcaagaacgtgtcgcgtgccggcgtcagtgggtgcttctccaccttccagcccaccacaggccaccgtctctgcagcgttcacttccagggcggccgcaagacctacacggtacgcgtccccaccatcttcccgctgcgcggcgtcaatgagcgcaaagtagcgcgcagacccgctggggccgcggccgcccgccgcaggcagcagcagcaacagcagcagcagcagcaacagcagcaacagcagcagcagcagcaacagcagcagcagcagcagcagcagcagcagtcctcaccctctgcctccactgcccagactgcccagctgcagccgaacctggtatctgcttccgcggccgtgcttctcacccttcaggccactgtagacagcagtcaggctccgggatccgtacagccggcgcccatcactcccactggagaagacgtgaagcccatcgatctcacagtgcaagtggagtttgcagccgcagagggcgcagccgctgcggccgccgcgtcggagttacaggctgctaccgcagggctggaggctgccgagtgccctatgggcccccagttggtggtggtaggggaagagggcttccctgatactggctccgaccattcgtactccttgtcgtcaggcaccacggaggaggagctcctgcgcaagctgaatgagcagcgggacatcctggctctgatggaagtgaagatgaaagagatgaaaggcagcattcgccacctgcgtctcactgaggccaagctgcgcgaagaactgcgtgagaaggatcggctgcttgccatggctgtcatccgcaagaagcacggaatgtgaactggtgccccggcagcctgctggactcccagaccccatccagccaggggaccgcaggccattgttgaactcctctatactcctgggcactggttgacagtactgaggcttaaggcagctggactctcttgctggtgacctggcatcctcaattgtttcctcctgaagtggaagctggggccttagactctgccctggtgacaccagcaattatgactttgtctacccttcctccccagttattgttgcagattctggttaagcagaggcttcagaaccactgaacttgaaacttaccctctagggatgcaggtgggatgtccagggactataggtttgggaaaaccataccttaaggttggtcagcagtcagacaactctaatgtgtgtagtgataagagattcaagtaacatcagttctcctccttttcatgcttttccttcccaggtgcagcctgtgattctgatggggactggtaaatctgtgcctctgcctcctaggacttattttcccaggaggccatttacaaggggatctggatgacctgctgatggagatccagcttgccagggacttaggtttatcctgttttgtttgctactggttacaaattctattttctgtacaattagtcagactaaagtttttgcangccattagatttaaaacaacgggctcgtttggggcgaataattcaaatactatttattccaca

SEQ ID NO: 107264 - DNA, 1869 bp, Homo sapiens
cgcggcgtccccggggcccactcccgagcgcaggcgggcagccaggcgggcggcgcggcgcgggccggcaggaagcgtattctgggcacggggcgccgggcgggccggctgcgccgagcggcagtggtgggataccacccaaggcctcgcgcggcgccgcccgtcgaggggcgggcggcggcgtagccactgggccgtcgaagagcgcaggaggccggtgggccgggccgggccgcgcggcgcagccatgcctggctttacgtgctgcgtgccaggctgctacaacaactcgcaccgggacaaggcgctgcacttctacacgtttccaaaggacgctgagttgcggcgcctctggctcaagaacgtgtcgcgtgccggcgtcagtgggtgcttctccaccttccagcccaccacaggccaccgtctctgcagcgttcacttccagggcggccgcaagacctacacggtacgcgtccccaccatcttcccgctgcgcggcgtcaatgagcgcaaagtagcgcgcagacccgctggggccgcggccgcccgccgcaggcagcagcagcaacagcagcagcagcagcaacagcagcaacagcagcagcagcagcaacagcagcagcagcagcagcagcagcagcagtcctcaccctctgcctccactgcccagactgcccagctgcagccgaacctggtatctgcttccgcggccgtgcttctcacccttcaggccactgtagacagcagtcaggctccgggatccgtacagccggcgcccatcactcccactggagaagacgtgaagcccatcgatctcacagtgcaagtggagtttgcagccgcagagggcgcagccgctgcggccgccgcgtcggagttacaggctgctaccgcagggctggaggctgccgagtgccctatgggcccccagttggtggtggtaggggaagagggcttccctgatactggctccgaccattcgtactccttgtcgtcaggcaccacggaggaggagctcctgcgcaagctgaatgagcagcgggacatcctggctctgatggaagtgaagatgaaagagatgaaaggcagcattcgccgccaagctgcgcgaagaactgcgtgagaaggatcggctgcttgccatggctgtcatccgcaagaagcacggaatgtgaactggtgccccggcagcctgctggactcccagaccccatccagccaggggaccgcaggccattgttgaactcctctatactcctgggcactggttgacagtactgaggcttaaggcagctggactctcttgctggtgacctggcatcctcaattgtttcctcctgaagtggaagctggggccttagactctgccctggtgacaccagcaattatgactttgtctacccttcctccccagttattgttgcagattctggttaagcagaggcttcagaaccactgaacttgaaacttaccctctagggatgcaggtgggatgtccagggactataggtttgggaaaaccataccttaaggttggtcagcagtcagacaactctaatgtgtgtagtgataagagattcaagtaacatcagttctcctccttttcatgcttttccttcccaggtgcagcctgtgattctgatggggactggtaaatctgtgcctctgcctcctaggacttattttcccaggaggccatttacaaggggatctggatgacctgctgatggagatccagcttgccagggacttaggtttatcctgttttgtttgctactggttacaaattctattttctgtacaattagtcagactaaagttttcactgtgtttgtttggcaaaacaaattaaacaaaaagtaaggtttt

SEQ ID NO: 107265 - DNA, 1471 bp, Homo sapiens
cgcggcgtccccggggcccactcccgagcgcaggcgggcagccaggcgggcggcgcggcgcgggccggcaggaagcgtattctgggcacggggcgccgggcgggccggctgcgccgagcggcagtggtgggataccacccaaggcctcgcgcggcgccgcccgtcgaggggcgggcggcggcgtagccactgggccgtcgaagagcgcaggaggccggtgggccgggccgggccgcgcggcgcagccatgcctggctttacgtgctgcgtgccaggctgctacaacaactcgcaccgggacaaggcgctgcacttctacacgtttccaaaggacgctgagttgcggcgcctctggctcaagaacgtgtcgcgtgccggcgtcagtgggtgcttctccaccttccagcccaccacaggccaccgtctctgcagcgttcacttccagggcggccgcaagacctacacggtacgcgtccccaccatcttcccgctgcgcggcgtcaatgagcgcaaagtagcgcgcagacccgctggggccgcggccgcccgccgcaggcagcagcagcaacagcagcagcagcagcaacagcagcaacagcagcagcagcagcaacagcagcagcagcagcagcagcagcagcagtcctcaccctctgcctccactgcccagactgcccagctgcagccgaacctggtatctgcttccgcggccgtgcttctcacccttcaggccactgtagacagcagtcaggctccgggatccgtacagccggcgcccatcactcccactggagaagacgtgaagcccatcgatctcacagtgcaagtggagtttgcagccgcagagggcgcagccgctgcggccgccgcgtcggagttacaggctgctaccgcagggctggaggctgccgagtgccctatgggcccccagttggtggtggtaggggaagagggcttccctgatactggctccgaccattcgtactccttgtcgtcaggcaccacggaggaggagctcctgcgcaagctgaatgagcagcgggacatcctggctctgatggaagtgaagatgaaagagatgaaaggcagcattcgccacctgcgtctcactgaggccaagctgcgcgaagaactgcgtgagaaggatcggctgcttgccatggctgtcatccgcaagaagcacggaatgtgaactggtgccccggcagcctgctggactcccagaccccatccagccaggggaccgcaggccattgttgaactccctctgcctcctaggacttattttcccaggaggccatttacaaggggatctggatgacctgctgatggagatccagcttgccagggacttaggtttatcctgttttgtttgctactggttacaaattctattttctgtacaattagtcagactaaagttttcactgtgtttgtttggcaaaacaaattaaacaaaaagtaaggtttt

SEQ ID NO: 107266 - DNA, 1304 bp, Homo sapiens
cgcggcgtccccggggcccactcccgagcgcaggcgggcagccaggcgggcggcgcggcgcgggccggcaggaagcgtattctgggcacggggcgccgggcgggccggctgcgccgagcggcagtggtgggataccacccaaggcctcgcgcggcgccgcccgtcgaggggcgggcggcggcgtagccactgggccgtcgaagagcgcaggaggccggtgggccgggccgggccgcgcggcgcagccatgcctggctttacgtgctgcgtgccaggctgctacaacaactcgcaccgggacaaggcgctgcacttctacacgtttccaaaggacgctgagttgcggcgcctctggctcaagaacgtgtcgcgtgccggcgtcagtgggtgcttctccaccttccagcccaccacaggccaccgtctctgcagcgttcacttccagggcggccgcaagacctacacggtacgcgtccccaccatcttcccgctgcgcggcgtcaatgagcgcaaagtagcgcgcagacccgctggggccgcggccgcccgccgcaggcagcagcagcaacagcagcagcagcagcaacagcagcaacagcagcagcagcagcaacagcagcagcagcagcagcagcagcagcagtcctcaccctctgcctccactgcccagactgcccagctgcagccgaacctggtatctgcttccgcggccgtgcttctcacccttcaggccactgtagacagcagtcaggctccgggatccgtacagccggcgcccatcactcccactggagaagacgtgaagcccatcgatctcacagtgcaagtggagtttgcagccgcagagggcgcagccgctgcggccgccgcgtcggagttacaggctgctaccgcagggctggaggctgccgagtgccctatgggcccccagttggtggtggtaggggaagagggcttccctgatactggctccgaccattcgtactccttgtcgtcaggcaccacggaggaggagctcctgcgcaagctgaatgagcagcgggacatcctggctctgatggaagtgaagatgaaagagatgaaaggcagcattcgcccctctgcctcctaggacttattttcccaggaggccatttacaaggggatctggatgacctgctgatggagatccagcttgccagggacttaggtttatcctgttttgtttgctactggttacaaattctattttctgtacaattagtcagactaaagttttcactgtgtttgtttggcaaaacaaattaaacaaaaagtaaggtttt

SEQ ID NO: 107267 - DNA, 2069 bp, Homo sapiens
tcggggcgcctgtttctccctctctgggcttgttttcctcccccgtcacctacacttcacccaatcttggaacggagccccggcagacccggaggtggtggtgggaggccggacctatcagtgacagagctgccaagcaagccccaggatgctgactccacccgcctcccactcctcttctccgcgcgggtgctgtccgtcgtccggtgctgaaaatgtcctcccgcctcagccgccatcctgtagactcccgggggcctgcgtatgggaagatttggggtctcgaaccacacgctcctagcgagcgcgtggccgcacgcacacatacacgcatactgcaaaactggggcccagaggatccgaagtctgagagattgggtggtataggtggggcaggatcctgccccgggcctgtcccatagactctcccgtagtccagcagatttgggggcagaggtgtgctgatttgcgtcctgaagctgcagcctaaactcctgagtcatcgccgggcctgtggtcttcttgaagtgaggcccctaagcctcacttgtagtcccgggggttcctttctctccacccaggttctgatcactcccaaccccgcggagacagtcttcaggggcctccctctcacagaccttcagccaccgctttctagagagcatgagcaggttctctgcgacctctctaattagctaccaggtatccagttacaccagatgaccttcctgctccccaaactcagcccacgtggtctgattgcagtgccattgcccagaggtcccctccacctgggatgcccttccccctcatatccacttgtccataagcctagttatctttaagagttagttcatctcgtgcctctcagagggacaaaggggacagagacctgacccggtcaggggtggaggtcataggttgggttctaaggccccctctgggtgcacccaatttgccctgcatgtaagttccatgaggacaggccctgttgtcattctccacttccacccttgtcttcccaggccaagcacaatacttgcatatggaagacacccaataaacatctgtgtccaagaaattcataataaatagataaaaccctgaaaaaaaaaaaaaaaaaaagaaaaaaaaaacaaaacaaaaaaacaaaaaaaaaaaaaaagaacaagaaaaaaacaagaggggagggccccgacataaaagtactcccctacggggcacccacagagcctgcaccccccccgctactattagcatagcacgtggcgaccacctatggcgagcgcagcgcatgatcaatcggcagagcctcgcacggccagcgcagcatgaaaccaaccaccataccagaaggagtagcgaccacagcataggcgcccaccccagagcaaaatgaatctcgggggaaagagaaccccaaccatcacccctgggtgcgtcgggtccactcacacaactgtgggggtacaacaacagtcaccaccacaccaagacaacagaacacaccccgacccccgccagcgagaaaaaaaaaaagaaacaaggaccaaaacagcgcgacgtcaaaagcgggcggcaacaccccaccaaggaagggttacaaaacacggccaccgggcgccctggggaacgacgctagccgtcaccaccagcgccggccctgctatgactcgcgcacaacacaacctactctaccccccccgaggggcacccagccagcaaaacaacaccatacgatgaagacagagccactcatgcgacctcaggcgaagggcccaagcggagacgcgcgcgtagagaccaacgcacggggaatgaacacgccaacgaacagtgtacccaggcgaggcggcgtgcctcgtaggactccgacgcggcggggagcgcaccgacataagaactcgatcgaacgcgggaggggaagcatggcgatggagaggatgaatgactgatcgatgacagacaagccgcccagagcagcgccacgaggtacaaccgccgccgacagtcacggacagcaccaccaggcgcagctgacgccgcgccgaccacacgaccacagcaca

SEQ ID NO: 107268 - DNA, 272 bp, Homo sapiens
ctcacagggttcaaggtctaaatggaataatagatatgaaataactcaacaagtaaatagctcagctgttggaaatcaaacaaggagaagaaaagaaaaaggacatagtgctataaaagaaaatctttataaaattcaaaaccatttaaaatatgtcgccattgatttccttattaataggttttaatacctccatctttctctaatagttttcagtttattagaaatagtatgtgaactttttagattaaaaatttccagcacagatttat

SEQ ID NO: 107269 - DNA, 338 bp, Homo sapiens
agccttgagttcagtgacttcaccttggtagcttgaaattggccatggcaggagaatttacaccacaagaaatggcaaatgccacagatcatggcgcctccctgcttccccatccccacgcccagctggtcattaaacatttaccagcacactactgactctttccttaaaagttaaccattgtgggccaggcacagtggctcatacccataatcccagcactttaggaggctgaggctggaggatggcttgatccaacagttcaagaccagcctgggcaacataacgagaccccatctttactaaagatacaaaaaattagtcaggcatggtggcat

SEQ ID NO: 107270 - DNA, 370 bp, Homo sapiens
ttttaggtatgagcatggggtagggggagatcactgctgattaggaaaaggagcggggagggagaccccaggcttcgctcttccagagggccccaaatgcaggaagaagtgcttcaaagcaaggaacgttttcttgtgctggcaacaaacgttcactgggagaaaggccgctgtaacatcaacatcaacttaaacataggggtgcacgataaaacctgaaataacacaaagaggaacaaaacgaagcaactgaaaattactggatcacatcctcacatcaaagaaaaaaatctaaaccatcactacaagttagctacaaataatactggaaacactgcaacaccaaaagctatacaatccagccaaagat

SEQ ID NO: 107271 - DNA, 568 bp, Homo sapiens
tgcccacagtcatcatcttacaatttttacctctcctcatttccataaagctgcatatgaacgttttacctccttttttcagagattttccttctctccacctatggtctaattgtgtttaagggacacaatcctttcatttccagtggggccttggttcgggatagtctgcattgcctgtatagagattgcctgcgataacagataaaggcagggccctgcagctgagatttgatgcccacgggaagagctggaaaagagaaacttctctagttctggaagctgggatgtggatctatgtgtttgaattcaacaaggccttccctgtcctcattttatgccgtctcataatttcactgaagaaggatggcaataaattcgagcaccaagaaagtgattcagagatacccccaaaggtgttgggaggggttatacaagaggcctggcagaaaagagtagggggtgagacaaaagggaagtaaaccatgaattaagaggtggtagcactagtggtcatggtgatgatagagagatagtggaccaaagtggggaaaaggatgaaagatag

SEQ ID NO: 107272 - DNA, 367 bp, Homo sapiens
tgtgcattccttaggcctctctagatctcacaccccctatttcctttctccctcaagcccttggctcaggcacctgcactccttgctctcccttgaccatgccaggcaagctcctgcctcagggccttagcatctgctactaccaaccaaatcactctcccccctcacccagaaatatacatctctctctcccactcccgctttctcagtgtgtgtgtgcatgcatgtttatccacctatcatatatacacacacatatgcatgtatatatacacacacatatattcatattacactcctaaagaagcattttagattttgttcatccagataaatattctggacaaaggaactacatatctaaata

SEQ ID NO: 107273 - DNA, 137 bp, Homo sapiens
gtgtgacagggatacagcaactattttatcaattgtttgtatttccctttaaggtaacattttaaatgaaatgtattatattttaatctatccttttcctttgtttttgttcttattatctcttctgatatataacc

SEQ ID NO: 107274 - DNA, 404 bp, Homo sapiens
aattgaatattagagaaggaacctattagagatggattgtgtctaattcacttatttggataactattctattggcgtttgttagcaaaaaaaagccacaggctggcctaactagctataattttataacccttgttttaaaagattaagtggttgttttgggcttagtataggcaggctgctctaataacataaaacgaattttgtttatcatctgaatccttggttattgattggagaatatttattctcttagatttgttattcacagaattttgccaaatattaccaaggaggtgacattcaggaatataatttcctaatatgtagcatcaccatgcttcatcttaatttcatattttataaaagaataaaacaagtgatccagtacattttggaaaatt

SEQ ID NO: 107275 - DNA, 925 bp, Homo sapiens
acaagttccacgagaatgacaacggggctgcggctggtgacttgtggcagtgataccccggggcctcccccgtgacagtgacggctgcgcctccaccccgactgctcagtgcatctaatcacttagactcccctgaagaatcccccatggaaactgcccttatccgctgtccagcagctgccagaggccccaggtcacctcgggtccccttgaaagaatgtctcggtcacatcaggcccgctaggtccagagagcgagcccccaatgcccggccaggctaagccgcagagaccctctcagcccccacctcaggttaggctctgcccgcagcctgacctctagccctggtggcagaggtccctcagctgcgaggctaattgggtgaccaccgattccagctgcggttaatccagcttgggcctgtctgcactgcgatcctcttgggctctcctaggatccccccatgccccgtaagaggtggaagacgcttccttccaggacagcaggctttgagtccagcacccccagcctgcctttgccaccagccccaccctgcagagtatatgaggcttgacagagtctgccccctcccccactgcaccccaagagagagagccccagccagcggaacagtttctattaccccctccctgcccccagacccatgtgatttctgctttcttctttagcaagatattctggtttctagataaggaagagtctctaatgagcccccgagccccagtctcttcagactcatggattggtatgaggggtctgaacgtctcctagccaatcagaactggctgtggaccaccctagcacggccacctctcagggccactggcaggccttcctgagttagatttgtagttgcatatttagctttgcacatttgaaataaaccacggttgcagccaccctg

SEQ ID NO: 107276 - DNA, 264 bp, Homo sapiens
ctcaggtcctctgcagaagagcccctttcagaggctcccttccctcccccatcctccggtgatttagaggacgggacaggcctgggcgggaaagaaggcggccttgcagagagcttcgtgatcacatcgttccagagtggcctcagccagggtgggagcaccccctgccacctgccgtccgtccatccacctgtccatctctctgtgggaagggactgactggtcagaggttctgtgtgtacaagcaagggattttaggggctg

SEQ ID NO: 107277 - DNA, 576 bp, Homo sapiens
cttagaatagcttgtagtttcccttatagcacttgtcaaagcttcttatacatggatctgagtgattacttgactaatgtcagtttctaataggacagttaagatccaagaggactggaaccatctggttttgcccaccattttaacctctcatccccagcaccaggcctggcacacaacaggggttcaagatattttggttaaaattgctgaatacatgatgtgtttgtgagagtaagctgcttaaatgtgttttgagtggtgcaggagcaggatgtgcaccatcggcatatccagaagtaaaccgcctgaaggtttagatcatctcataatagggaagtccctcttcttgaggtttaaattaaatatggaagtaggaaagaatgtttgtatatgtgaatgcaaagtgaatcactatcacacagttttccactgtgggttaattcatgcagttgttaggctggtagtttattgaaaataggaggctcaatttaagagctgcaatgaatcaaagtggtccaacaatgaatgtacacttgggtcttggaaattaaatgcaagcatctggcaacaaaa

SEQ ID NO: 107278 - DNA, 236 bp, Homo sapiens
agtcagtgccctttggtgccggtatctgtcttcccggccaccgctagatcaggcttctgagcctgttggctgtcagggtcggactgtgccccataggcgccatggcagtccccatgcaatccaccaggtgtcaccaggcagcatacaagtaacaggcctggaaggtccccaacagcccagctggacatgctcactctggggctcttcattcagtggcacaaactccaggacccagt

SEQ ID NO: 107279 - DNA, 429 bp, Homo sapiens
atttttaaaaattgagaaggtgtgagggacatgatggacaactacaaagatgaggagcggttggtgtgatctgatgttacgagtttcaaagctgtgggtggattacagaggtaggaggcagaataatctgaaaaataaagaagcagcctgaagaaaatctatgctgcctacaagtgcaaggagaatagggggatcggagagaaaacagctgccatttgagagaatcgtgggagaagctgtgacttcaagcaggagccagatttcagctagagctcatggagaagaacatttacaaaggagaagttgagatattgcagataactgatctgaaatttcagaggagagaatgaaatggttttagaaattcagcaggaaattggggattcttagataatgaattctttcataactcttgaatttgacgagatt

SEQ ID NO: 107280 - DNA, 774 bp, Homo sapiens
atttttttcttcagaaaacagttatttttcatcaaattatgctattttaacatttaatgggtttattattaaatgaattaatatttaaatttcacaccttgaaatttctactatggtaaataccagtaaaacaaggaaacaaaagctcttcagggtgcttaatattttaaagatatgtagagggatcttagaattgagaactgttcctctaggcatattgttctttcagttccttaaatgtgccatgtttctttgctatggggatttcactcatgttctttctgcatggcttttctgccacttcaagggagcaaatgtatgaaactctcttattcttcctatgaatcccctcattttgttagagaagcattttattatcccataacttaggactgattgccccttgacttactagtcctttaaatttctcttaagtaaaaccttgcagcttaaaaaaaagttgcgttaattcctaataaccactaacatagaatatagtcttcgtgaggactgggacttaccttttattcttctgtctcccaattcttgtattgagtaagtgtgcaataagcattttttggagcatgtgtcaggccctatgctgacccccaataagacattggaaaacaaggttatgacagtttattcttgtgtttgatagtccttcagctgttaatgacagtttttatacctccccattcttttcatctgtgaattctgttttgctttgtgatttaaataattctgtttaaatgagtgctaattccaaaaaaa

SEQ ID NO: 107281 - DNA, 122 bp, Homo sapiens
gagatcatgccagtgcactccagcctgggtaacagagtgagactctgcctcaattaaaaaaaaaatgtagataatagtttagtaagaaaagtagtgaactgaaaaccaagaaatctgactct

SEQ ID NO: 107282 - DNA, 277 bp, Homo sapiens
cagtaatgtaagatattaaaaatagaaactgaatgctggctctagggaaaccccatgtgtttgcaagttttgtgtaataaactaggaactatcatctttctaaactgtaaaatagaatgttaattacacagaaaaagaaataaaattaagagaccaaaatatcagattcatgtagttgacttagtttttatattgaagactattttctggaagcagtcaaagctagaaaaaactctgaagaatataaagtacatgtttgcttgtttttccacagaaa

SEQ ID NO: 107283 - DNA, 618 bp, Homo sapiens
gaacaggaaatagggtgagtgaaacaaacgattactatgggtcaggcagaggtccaaatctttttttttttagtttccagttaaagactgaggctaatgcatgcattcagccttcagtctttaactggaaactaaaaaggaagtactggatttgcatctaaaagtttttattctgcctttcattcttaggatttatatggttttttggatatgatgtaacattttggtatgccagttgaatgatccattaagttctaactgttattgccacatatattatacagataactttctttctccaaatagaatgaaaggctaaagaacaaactgtagatggttatctctggttgatgggattagttatttttcagtttctttgtgcttttactttatttttgctttttttgggacagggtcttgatcctcacccaggcttgagcgcagcggcgcgatcatggctcactgcaacctcaacctcccagactcagttgatacccccgcgtcagcctcctgagtagctgggactataggcgcatgccaccacacctggctactttgtgtattttttgttgcccaggctggtcttgaactcctgggcttaagtgatctgcccgcctc

SEQ ID NO: 107284 - DNA, 264 bp, Homo sapiens
tcacaggttgctattttcaaatgcatgcttagatttctcttttctcttgtcgcatttcagaagttactgtactcaccgatatgtgtatatgaatagttacttcccatacagctccccatgtttacgggaaaaaaaattcttaaaacatggtagagtacttgctctgtttggccttcaataatgttgtggatccccactgctggaatataggccaccagagatgggtttggatttcagcaataaatgacccagcttcatagaagg

SEQ ID NO: 107285 - DNA, 174 bp, Homo sapiens
gtggtgatttaagaacctaggcttcttttgttttgcggtgctgccatccccaaggaccgtgaatttctctgcctccagttggcgaataggagaagaaagagtggagaaggtatacccgcttctcacccaccttggctcagaggagaccttcaccacttccactccattcctttg

SEQ ID NO: 107286 - DNA, 274 bp, Homo sapiens
atcataaggtttgtctcaagtaatttccagttaatgaaaacaagtgtcaaaaatttctgaatgattccttttcaaaccactcatatctatgtgtgtgtgggcgcacattcatgattttgcctcaagtagcatcattcacactcacttgcattgccattgctttctttgagagtgagaagttggtacttcagctggtgtattagtctgttttgcattgccaaaaagaagaacctgagtaatttataaagaaaagaggtttatttggctcctgatt

SEQ ID NO: 107287 - DNA, 5607 bp, Homo sapiens
agcagttatcactcctccacctgcttttccatcttccagtgtggagcagtgtgtgcccagccctgcccaccagggacatttggccagaactgcagccaggattgtccttgccaccatggagggcagtgtgaccacgtgactggacagtgccactgtacagctggatacatgggggacaggtgccaagaggagtgccccttcgggtccttcggcttccagtgctcacagcgctgtgactgccacaatggggggcagtgttcacccaccacgggtgcctgcgagtgtgagcctggctacaagggcccacgctgccaggagcgactgtgcccggagggcctgcatggcccaggctgcaccctgccctgcccctgtgacgctgacaacaccatcagctgccacccagtaactggagcttgtacctgccagccaggctggtctggtcaccactgcaatgaatcctgccctgttggctactatggcgatggctgccagctgccttgcacctgtcagaatggcgccgactgccacagcatcactgggggctgcacttgtgctccgggcttcatgggagaggtctgtgccgtttcctgtgcagcagggacctatggccccaactgctcgtccatctgtagctgtaacaatggtggcacctgctccccagtagatggctcctgtacctgcaaggaagggtggcagggcctggactgcaccctgccatgtcccagtgggacgtggggcctgaactgcaacgagagctgcacctgtgccaatggggcagcctgcagccccatagacggctcctgctcctgcactcctggctggctgggagacacctgtgagctgccttgcccggatggcacatttgggctgaactgcagtgaacactgtgactgcagccatgctgatggatgtgaccccgtcacaggccactgctgctgcctggccggatggacaggcatccgctgtgacagcacgtgtccacctggccgctggggccccaactgctctgtctcctgcagctgtgagaatggaggctcctgctccccagaggatgggagctgcgagtgtgcccctggcttccgaggacccttatgccagagaatctgcccccctgggttctatggccacggctgcgcccagccatgccccctctgcgtgcacagcagcaggccctgccaccacatcagcggcatctgtgagtgcctcccaggattctctggagctctctgcaaccaagtgtgtgctggaggatactttgggcaggactgtgcccagctctgctcctgtgccaacaacgggacctgcagccctatcgatggctcctgccagtgctttcctggatggattggcaaggactgctcacaggcttgcccacccgggttctggggccccgcctgcttccacgcatgcagctgccacaacggggcgagctgcagcgccgaggacggggcctgccactgcacccctggctggactggactcttctgcacacagcgctgcccagcagcattttttgggaaggactgtgggcgcgtatgccagtgtcagaatggcgccagctgtgaccacatcagtggcaagtgcacctgccgcacaggcttcaccgggcaacactgtgagcagagatgtgccccaggaacctttggctatgggtgtcagcagctatgtgagtgcatgaacaactccacctgtgaccatgtcaccggcacctgttactgcagccctggcttcaaaggaatcaggtgtgaccaagctgccctcatgatggaggagctgaatccctacaccaagatcagcccagcactgggtgcagagcggcactcggtgggtgctgtcacaggcatcatgctcctgttattcttcattgtggtgctgctgggcctatttgcctggcatcggcggcggcagaaagagaagggccgagacctggctccccgtgtctcctacacacctgccatgaggatgaccagcaccgactactccctctcagcatcaaccacaccatggtggcctgtcatggaacacctagctcgccctttctctcaacggcctaggacccagctcagtaacaagtcccttgacagagacacagcaggctggaccccctacagctatgtgaacgtgttgttagatcagtgccctggaggccaggtacccgcccgaggacttctacattgaacttagacacctcagccgccccgctgagccacactcaccaggtgcttgtggaatggatagacgtcagaacacatacattatggacaaaggcttcaaagatgccaactaaatgtcttcggaaatgtaaagcgtcattatccaaccaattagtacgagttaaattgattataaaatctgaaataaagttgatctacctgccccagaggcctcctgtcgttgcactagcaaggaatgccaccctgcacctgctggctttctgggggcacaaggaatgaaaatgatacgcagtgttaatattgtatggcactccaacctcaagagatctctgcctccaagagcagagaagccaagacaaatccctaacacatgggaactgcaagttggatcatccctctaggaagtctacaggtgaagccaaagatgaaagattacatgaaagaatccgtgtgcagttctagtacttgttccttgaatagcagtgaaaacccttacgccacaattaaggacccacccatcctcacctgcaagcttccagaaagcagctatgtagaaatgaagtcgcctgtgcacatggggtctccgtacacagatgtgccatccttgtcgacatctaataaaaatatatatgaagttgagcccacagtcagtgtggtccaagaaggttgcggtcataactccagctatatccagaatgcatacgacctacctaggaacagccatattcctggtcattatgacctcctcccagtaagacagagccctgccaatgggccgtcccaggacaagcaatcttaagagggataagcttctctcttgcagtgtgctctactgaatattctgactctgaaagaagacagtcccttgacttgaagtaatggtacagactggctccagctgcatgttagttattacgttcacctggaactaaagaagagcgtccaggtgggactgggataattgttcaaggaattgtgttctcaaaggcaaatcctatcacccactcagccccaaatgccctggattatatgatttttaaaacattttaagatacagctactcatcaacatcagctaaatatagctgatatatatatatatatttatctgaaacgtgatattttaaaaacatgtaggtttaacaaaccttcctaggacaaaaaggagactggggagggaagaggattactttaaagcacctgaaacgtatatgtacttttggttgctgttaccatcaacatctgttttattaccgaagacaattagtacacagacatgaactgttcttaaacagaacagtcttaaaatgtctgtacatatctgtctggtccatcaaattacaacagccaagattacagaatctatatagtctaatgctgacaacttctattttaaaaaacaagactttactttcttctgccccctaagtgataggtttaaacacacagagacacacacacacgtttccaaagtgcagcagtgtctctttcagtctacaataagattcctagggcagctttatcaaattttgccaattcaaagttcaaggacattacaagttagtcctggctttgtcatatctacttagtccatccgacacctgaatcattccatgtaaaacagagctctaagatgatcctttaagcaagcagtcatagactggtcgggattaagtaaaagacggctagttggcctcctcattttatttggtcagcatcccttgactcaagagtacttgctttcaagttcttcataaatcttgagattgacgtagtatgaaacctaaaagtatacaggaaattggacaaatgtggatacagcaagtttacactgcttaaagtacattatgctttttaatggaactaaatgatcaaaaaaagaatggactgtaaccagttgctgtaacatgatgtaaaaacgttactgtaaacagcatgaggatatgaagtccttccaccttctatcttaaaactactacttactgagctagcccaatatgcattacaatgagctaatgctccagatcccagtattcagatgtgtctataccttccactatgaacacagataaactgaggctcagataagtccaaatgaaatgaaatcaactcccaagccctaaagagaaccttctcacaagaattaaaaacaaaaagggcaaacctaggaagctaacggctactcctgtaccactctattcactggtacagtccagccagtaaaaaacacttccaaaaagatacacagaagaggaactaaatgactgcgaagctggaatactgctacaggaagtatgagagttctgaaacccttgatagaaactggaagcctgccatggaacacaatactttgggcaataatcagaaaaagcaaaaaaataaataaatgagtacatctccccttcccacatcactcaaggcataagcagattttactgttagaggaaaatatgtaatacttacatgaatgttgcatgtgtgcatgggagcaactgagtagcaatagtaaatttactttccaaaaaagccttattaaaatataaatattagaaaattactttggagacccaagtaaatatttctcatacatatgtagaaagaaatataggtaagcagcttacctcagtatttcagggcagcaagtgtttgtgaagcaaggatgagcagcatgaagatgtcagatcagcaaggagaaacttcaactcaatcccaggttttctcttcttcccttatcctgcatgtacaataactgctgcctggcaaactgcaaacaagcagcatcactcaagtttgaagtttcgccgcttttgtcaactatcctctgggcaaaggtattcagcaagaggtggaatggctagacactgaatcaagagatttcagtgttactctggtcaagttagtcgccctctctgggctccctttttttctatgcataaaaaggggagaagcagagagtgggaagacagctctactaacccttcagctctagcagtccatgactttttaaggaaatgtaatacaagtcaaaccaggcaatacagaggagaagggaaaggcagagggtgtgattatggtgacaatagctgccttcccctatcgaacagttatcagtaaaagacatttcaatcttacaaagcaactgttagaaacttctgtctaacaccatcacaaataggttcatggtcagcctaaacatgtatactgtgcattttatgggtgactttgaaagatctgttcaattatttttcagaaactaaattttcaaaaaattaatatgtgtacaattaaaatgaatgaaagaaaaaccattattgtacagaggtattaatgagactatgaaacggcaatacttttttaaatcacagatttgtaatatatgttcactgtgcagagggattgtaccttgtacaaaataaaacaaatttctcaaacta

SEQ ID NO: 107288 - DNA, 5278 bp, Homo sapiens
agcagttatcactcctccacctgcttttccatcttccagtgtggagcagtgtgtgcccagccctgcccaccagggacatttggccagaactgcagccaggattgtccttgccaccatggagggcagtgtgaccacgtgactggacagtgccactgtacagctggatacatgggggacaggtgccaagaggagtgccccttcgggtccttcggcttccagtgctcacagcgctgtgactgccacaatggggggcagtgttcacccaccacgggtgcctgcgagtgtgagcctggctacaagggcccacgctgccaggagcgactgtgcccggagggcctgcatggcccaggctgcaccctgccctgcccctgtgacgctgacaacaccatcagctgccacccagtaactggagcttgtacctgccagccaggctggtctggtcaccactgcaatgaatcctgccctgttggctactatggcgatggctgccagctgccttgcacctgtcagaatggcgccgactgccacagcatcactgggggctgcacttgtgctccgggcttcatgggagaggtctgtgccgtttcctgtgcagcagggacctatggccccaactgctcgtccatctgtagctgtaacaatggtggcacctgctccccagtagatggctcctgtacctgcaaggaagggtggcagggcctggactgcaccctgccatgtcccagtgggacgtggggcctgaactgcaacgagagctgcacctgtgccaatggggcagcctgcagccccatagacggctcctgctcctgcactcctggctggctgggagacacctgtgagctgccttgcccggatggcacatttgggctgaactgcagtgaacactgtgactgcagccatgctgatggatgtgaccccgtcacaggccactgctgctgcctggccggatggacaggcatccgctgtgacagcacgtgtccacctggccgctggggccccaactgctctgtctcctgcagctgtgagaatggaggctcctgctccccagaggatgggagctgcgagtgtgcccctggcttccgaggacccttatgccagagaatctgcccccctgggttctatggccacggctgcgcccagccatgccccctctgcgtgcacagcagcaggccctgccaccacatcagcggcatctgtgagtgcctcccaggattctctggagctctctgcaaccaagtgtgtgctggaggatactttgggcaggactgtgcccagctctgctcctgtgccaacaacgggacctgcagccctatcgatggctcctgccagtgctttcctggatggattggcaaggactgctcacaggcttgcccacccgggttctggggccccgcctgcttccacgcatgcagctgccacaacggggcgagctgcagcgccgaggacggggcctgccactgcacccctggctggactggactcttctgcacacagcgctgcccagcagcattttttgggaaggactgtgggcgcgtatgccagtgtcagaatggcgccagctgtgaccacatcagtggcaagtgcacctgccgcacaggcttcaccgggcaacactgtgagcagagatgtgccccaggaacctttggctatgggtgtcagcagctatgtgagtgcatgaacaactccacctgtgaccatgtcaccggcacctgttactgcagccctggcttcaaaggaatcaggtgtgaccaagctgccctcatgatggaggagctgaatccctacaccaagatcagcccagcactgggtgcagagcggcactcggtgggtgctgtcacaggcatcatgctcctgttattcttcattgtggtgctgctgggcctatttgcctggcatcggcggcggcagaaagagaagggccgagacctggctccccgtgtctcctacacacctgccatgaggatgaccagcaccgactactccctctcagcatcaaccacaccatggtggcctgtcatggaacacctagctcgccctttctctcaacggcctaggacccagctcagtaacaagtcccttgacagagacacagcaggctggaccccctacagctatgtgaacgtgttgttagatcagtgccctggaggccaggtacccgcccgaggacttctacattgaacttagacacctcagccgccccgctgagccacactcaccaggtgcttgtggaatggatagacgtcagaacacatacattatggacaaaggcttcaaagattacatgaaagaatccgtgtgcagttctagtacttgttccttgaatagcagtgaaaacccttacgccacaattaaggacccacccatcctcacctgcaagcttccagaaagcagctatgtagaaatgaagtcgcctgtgcacatggggtctccgtacacagatgtgccatccttgtcgacatctaataaaaatatatatgaagttgagcccacagtcagtgtggtccaagaaggttgcggtcataactccagctatatccagaatgcatacgacctacctaggaacagccatattcctggtcattatgacctcctcccagtaagacagagccctgccaatgggccgtcccaggacaagcaatcttaagagggataagcttctctcttgcagtgtgctctactgaatattctgactctgaaagaagacagtcccttgacttgaagtaatggtacagactggctccagctgcatgttagttattacgttcacctggaactaaagaagagcgtccaggtgggactgggataattgttcaaggaattgtgttctcaaaggcaaatcctatcacccactcagccccaaatgccctggattatatgatttttaaaacattttaagatacagctactcatcaacatcagctaaatatagctgatatatatatatatatttatctgaaacgtgatattttaaaaacatgtaggtttaacaaaccttcctaggacaaaaaggagactggggagggaagaggattactttaaagcacctgaaacgtatatgtacttttggttgctgttaccatcaacatctgttttattaccgaagacaattagtacacagacatgaactgttcttaaacagaacagtcttaaaatgtctgtacatatctgtctggtccatcaaattacaacagccaagattacagaatctatatagtctaatgctgacaacttctattttaaaaaacaagactttactttcttctgccccctaagtgataggtttaaacacacagagacacacacacacgtttccaaagtgcagcagtgtctctttcagtctacaataagattcctagggcagctttatcaaattttgccaattcaaagttcaaggacattacaagttagtcctggctttgtcatatctacttagtccatccgacacctgaatcattccatgtaaaacagagctctaagatgatcctttaagcaagcagtcatagactggtcgggattaagtaaaagacggctagttggcctcctcattttatttggtcagcatcccttgactcaagagtacttgctttcaagttcttcataaatcttgagattgacgtagtatgaaacctaaaagtatacaggaaattggacaaatgtggatacagcaagtttacactgcttaaagtacattatgctttttaatggaactaaatgatcaaaaaaagaatggactgtaaccagttgctgtaacatgatgtaaaaacgttactgtaaacagcatgaggatatgaagtccttccaccttctatcttaaaactactacttactgagctagcccaatatgcattacaatgagctaatgctccagatcccagtattcagatgtgtctataccttccactatgaacacagataaactgaggctcagataagtccaaatgaaatgaaatcaactcccaagccctaaagagaaccttctcacaagaattaaaaacaaaaagggcaaacctaggaagctaacggctactcctgtaccactctattcactggtacagtccagccagtaaaaaacacttccaaaaagatacacagaagaggaactaaatgactgcgaagctggaatactgctacaggaagtatgagagttctgaaacccttgatagaaactggaagcctgccatggaacacaatactttgggcaataatcagaaaaagcaaaaaaataaataaatgagtacatctccccttcccacatcactcaaggcataagcagattttactgttagaggaaaatatgtaatacttacatgaatgttgcatgtgtgcatgggagcaactgagtagcaatagtaaatttactttccaaaaaagccttattaaaatataaatattagaaaattactttggagacccaagtaaatatttctcatacatatgtagaaagaaatataggtaagcagcttacctcagtatttcagggcagcaagtgtttgtgaagcaaggatgagcagcatgaagatgtcagatcagcaaggagaaacttcaactcaatcccaggttttctcttcttcccttatcctgcatgtacaataactgctgcctggcaaactgcaaacaagcagcatcactcaagtttgaagtttcgccgcttttgtcaactatcctctgggcaaaggtattcagcaagaggtggaatggctagacactgaatcaagagatttcagtgttactctggtcaagttagtcgccctctctgggctccctttttttctatgcataaaaaggggagaagcagagagtgggaagacagctctactaacccttcagctctagcagtccatgactttttaaggaaatgtaatacaagtcaaaccaggcaatacagaggagaagggaaaggcagagggtgtgattatggtgacaatagctgccttcccctatcgaacagttatcagtaaaagacatttcaatcttacaaagcaactgttagaaacttctgtctaacaccatcacaaataggttcatggtcagcctaaacatgtatactgtgcattttatgggtgactttgaaagatctgttcaattatttttcagaaactaaattttcaaaaaattaatatgtgtacaattaaaatgaatgaaagaaaaaccattattgtacagaggtattaatgagactatgaaacggcaatacttttttaaatcacagatttgtaatatatgttcactgtgcagagggattgtaccttgtacaaaataaaacaaatttctcaaacta

SEQ ID NO: 107289 - DNA, 3628 bp, Homo sapiens
cacgcgtcgggcatcatgctcctgttattcctcattgtggtgctgctgggcctatttgcctgtgacagcacccaccgagtgccgctctgcacccagtgctgggctgatcttggtgtagggattcagctcctccatcatgagggcagcttggtcacacctgattcctttgaagccagggctgcagtaacaggcatcatgctcctgttattcttcattgtggtgctgctgggcctatttgcctggcatcggcggcggcagaaagagaagggccgagacctggctccccgtgtctcctacacacctgccatgaggatgaccagcaccgactactccctctcagcatcaaccacaccatggtggcctgtcatggaacacctagctcgccctttctctcaacggcctaggacccagctcagtaacaagtcccttgacagagacacagcaggctggaccccctacagctatgtgaacgtgttgttagatcagtgccctggaggccaggtacccgcccgaggacttctacattgaacttagacacctcagccgccccgctgagccacactcaccaggtgcttgtggaatggatagacgtcagaacacatacattatggacaaaggcttcaaagattacatgaaagaatccgtgtgcagttctagtacttgttccttgaatagcagtgaaaacccttacgccacaattaaggacccacccatcctcacctgcaagcttccagaaagcagctatgtagaaatgaagtcgcctgtgcacatggggtctccgtacacagatgtgccatccttgtcgacatctaataaaaatatatatgaagttgagcccacagtcagtgtggtccaagaaggttgcggtcataactccagctatatccagaatgcatacgacctacctaggaacagccatattcctggtcattatgacctcctcccagtaagacagagccctgccaatgggccgtcccaggacaagcaatcttaagagggataagcttctctcttgcagtgtgctctactgaatattctgactctgaaagaagacagtcccttgacttgaagtaatggtacagactggctccagctgcatgttagttattacgttcacctggaactaaagaagagcgtccaggtgggactgggataattgttcaaggaattgtgttctcaaaggcaaatcctatcacccactcagccccaaatgccctggattatatgatttttaaaacattttaagatacagctactcatcaacatcagctaaatatagctgatatatatatatatatttatctgaaacgtgatattttaaaaacatgtaggtttaacaaaccttcctaggacaaaaaggagactggggagggaagaggattactttaaagcacctgaaacgtatatgtacttttggttgctgttaccatcaacatctgttttattaccgaagacaattagtacacagacatgaactgttcttaaacagaacagtcttaaaatgtctgtacatatctgtctggtccatcaaattacaacagccaagattacagaatctatatagtctaatgctgacaacttctattttaaaaaacaagactttactttcttctgccccctaagtgataggtttaaacacacagagacacacacacacgtttccaaagtgcagcagtgtctctttcagtctacaataagattcctagggcagctttatcaaattttgccaattcaaagttcaaggacattacaagttagtcctggctttgtcatatctacttagtccatccgacacctgaatcattccatgtaaaacagagctctaagatgatcctttaagcaagcagtcatagactggtcgggattaagtaaaagacggctagttggcctcctcattttatttggtcagcatcccttgactcaagagtacttgctttcaagttcttcataaatcttgagattgacgtagtatgaaacctaaaagtatacaggaaattggacaaatgtggatacagcaagtttacactgcttaaagtacattatgctttttaatggaactaaatgatcaaaaaaagaatggactgtaaccagttgctgtaacatgatgtaaaaacgttactgtaaacagcatgaggatatgaagtccttccaccttctatcttaaaactactacttactgagctagcccaatatgcattacaatgagctaatgctccagatcccagtattcagatgtgtctataccttccactatgaacacagataaactgaggctcagataagtccaaatgaaatgaaatcaactcccaagccctaaagagaaccttctcacaagaattaaaaacaaaaagggcaaacctaggaagctaacggctactcctgtaccactctattcactggtacagtccagccagtaaaaaacacttccaaaaagatacacagaagaggaactaaatgactgcgaagctggaatactgctacaggaagtatgagagttctgaaacccttgatagaaactggaagcctgccatggaacacaatactttgggcaataatcagaaaaagcaaaaaaataaataaatgagtacatctccccttcccacatcactcaaggcataagcagattttactgttagaggaaaatatgtaatacttacatgaatgttgcatgtgtgcatgggagcaactgagtagcaatagtaaatttactttccaaaaaagccttattaaaatataaatattagaaaattactttggagacccaagtaaatatttctcatacatatgtagaaagaaatataggtaagcagcttacctcagtatttcagggcagcaagtgtttgtgaagcaaggatgagcagcatgaagatgtcagatcagcaaggagaaacttcaactcaatcccaggttttctcttcttcccttatcctgcatgtacaataactgctgcctggcaaactgcaaacaagcagcatcactcaagtttgaagtttcgccgcttttgtcaactatcctctgggcaaaggtattcagcaagaggtggaatggctagacactgaatcaagagatttcagtgttactctggtcaagttagtcgccctctctgggctccctttttttctatgcataaaaaggggagaagcagagagtgggaagacagctctactaacccttcagctctagcagtccatgactttttaaggaaatgtaatacaagtcaaaccaggcaatacagaggagaagggaaaggcagagggtgtgattatggtgacaatagctgccttcccctatcgaacagttatcagtaaaagacatttcaatcttacaaagcaactgttagaaacttctgtctaacaccatcacaaataggttcatggtcagcctaaacatgtatactgtgcattttatgggtgactttgaaagatctgttcaattatttttcagaaactaaattttcaaaaaattaatatgtgtacaattaaaatgaatgaaagaaaaaccattattgtacagaggtattaatgagactatgaaacggcaatacttttttaaatcacagatttgtaatatatgttcactgtgcagagggattgtaccttgtacaaaataaaacaaatttctcaaacta

SEQ ID NO: 107290 - DNA, 3095 bp, Homo sapiens
gatccaggagaggacagacaggaccagagctgagaggtgcttgtggaatggatagacgtcagaacacatacattatggacaaaggcttcaaagattacatgaaagaatccgtgtgcagttctagtacttgttccttgaatagcagtgaaaacccttacgccacaattaaggacccacccatcctcacctgcaagcttccagaaagcagctatgtagaaatgaagtcgcctgtgcacatggggtctccgtacacagatgtgccatccttgtcgacatctaataaaaatatatatgaagttgagcccacagtcagtgtggtccaagaaggttgcggtcataactccagctatatccagaatgcatacgacctacctaggaacagccatattcctggtcattatgacctcctcccagtaagacagagccctgccaatgggccgtcccaggacaagcaatcttaagagggataagcttctctcttgcagtgtgctctactgaatattctgactctgaaagaagacagtcccttgacttgaagtaatggtacagactggctccagctgcatgttagttattacgttcacctggaactaaagaagagcgtccaggtgggactgggataattgttcaaggaattgtgttctcaaaggcaaatcctatcacccactcagccccaaatgccctggattatatgatttttaaaacattttaagatacagctactcatcaacatcagctaaatatagctgatatatatatatatatttatctgaaacgtgatattttaaaaacatgtaggtttaacaaaccttcctaggacaaaaaggagactggggagggaagaggattactttaaagcacctgaaacgtatatgtacttttggttgctgttaccatcaacatctgttttattaccgaagacaattagtacacagacatgaactgttcttaaacagaacagtcttaaaatgtctgtacatatctgtctggtccatcaaattacaacagccaagattacagaatctatatagtctaatgctgacaacttctattttaaaaaacaagactttactttcttctgccccctaagtgataggtttaaacacacagagacacacacacacgtttccaaagtgcagcagtgtctctttcagtctacaataagattcctagggcagctttatcaaattttgccaattcaaagttcaaggacattacaagttagtcctggctttgtcatatctacttagtccatccgacacctgaatcattccatgtaaaacagagctctaagatgatcctttaagcaagcagtcatagactggtcgggattaagtaaaagacggctagttggcctcctcattttatttggtcagcatcccttgactcaagagtacttgctttcaagttcttcataaatcttgagattgacgtagtatgaaacctaaaagtatacaggaaattggacaaatgtggatacagcaagtttacactgcttaaagtacattatgctttttaatggaactaaatgatcaaaaaaagaatggactgtaaccagttgctgtaacatgatgtaaaaacgttactgtaaacagcatgaggatatgaagtccttccaccttctatcttaaaactactacttactgagctagcccaatatgcattacaatgagctaatgctccagatcccagtattcagatgtgtctataccttccactatgaacacagataaactgaggctcagataagtccaaatgaaatgaaatcaactcccaagccctaaagagaaccttctcacaagaattaaaaacaaaaagggcaaacctaggaagctaacggctactcctgtaccactctattcactggtacagtccagccagtaaaaaacacttccaaaaagatacacagaagaggaactaaatgactgcgaagctggaatactgctacaggaagtatgagagttctgaaacccttgatagaaactggaagcctgccatggaacacaatactttgggcaataatcagaaaaagcaaaaaaataaataaatgagtacatctccccttcccacatcactcaaggcataagcagattttactgttagaggaaaatatgtaatacttacatgaatgttgcatgtgtgcatgggagcaactgagtagcaatagtaaatttactttccaaaaaagccttattaaaatataaatattagaaaattactttggagacccaagtaaatatttctcatacatatgtagaaagaaatataggtaagcagcttacctcagtatttcagggcagcaagtgtttgtgaagcaaggatgagcagcatgaagatgtcagatcagcaaggagaaacttcaactcaatcccaggttttctcttcttcccttatcctgcatgtacaataactgctgcctggcaaactgcaaacaagcagcatcactcaagtttgaagtttcgccgcttttgtcaactatcctctgggcaaaggtattcagcaagaggtggaatggctagacactgaatcaagagatttcagtgttactctggtcaagttagtcgccctctctgggctccctttttttctatgcataaaaaggggagaagcagagagtgggaagacagctctactaacccttcagctctagcagtccatgactttttaaggaaatgtaatacaagtcaaaccaggcaatacagaggagaagggaaaggcagagggtgtgattatggtgacaatagctgccttcccctatcgaacagttatcagtaaaagacatttcaatcttacaaagcaactgttagaaacttctgtctaacaccatcacaaataggttcatggtcagcctaaacatgtatactgtgcattttatgggtgactttgaaagatctgttcaattatttttcagaaactaaattttcaaaaaattaatatgtgtacaattaaaatgaatgaaagaaaaaccattattgtacagaggtattaatgagactatgaaacggcaatacttttttaaatcacagatttgtaatatatgttcactgtgcagagggattgtaccttgtacaaaataaaacaaatttctcaaacta

SEQ ID NO: 107291 - DNA, 5703 bp, Homo sapiens
gcccgctgcccgccgcccggctcccggctgctcgcggccccctgctcctgcctggcgctctggccaggctcgggctccggaggacaggaccgcgcgactggccggccgatccctgggccggccgcgggagcagctatgctgtgactgtccaggaatcgtatgcacaccccttcgatcagatctattacacacgatgcacagacatcctcaactggttcaagtgcaccaggcaccgccctgtgtacggaggagtgtgtgcacggccgctgcgtttccccggacacctgccactgcgagcctggctggggagggcccgactgctccagcggctgcgacagcgaccactgggggccccactgcagcaaccggtgccagtgccagaacggcgccctgtgtaaccccatcacaggcgcctgcgtgtgcgccgccggcttccgtggatggcgctgcgaggagctctgcgcgcctggcacccacggcaagggatgccagctgccgtgccagtgccgacacggtgccagctgcgacccccgcgccggcgagtgcctctgcgcacctggctacaccggcgtctactgcgaggagctgtgccctcctgggagccatggagctcactgtgagctgcgctgcccctgtcagaatgggggcacctgccaccacatcactggcgagtgtgcctgccccccaggctggacgggagcagtgtgtgcccagccctgcccaccagggacatttggccagaactgcagccaggattgtccttgccaccatggagggcagtgtgaccacgtgactggacagtgccactgtacagctggatacatgggggacaggtgccaagaggagtgccccttcgggtccttcggcttccagtgctcacagcgctgtgactgccacaatggggggcagtgttcacccaccacgggtgcctgcgagtgtgagcctggctacaagggcccacgctgccaggagcgactgtgcccggagggcctgcatggcccaggctgcaccctgccctgcccctgtgacgctgacaacaccatcagctgccacccagtaactggagcttgtacctgccagccaggctggtctggtcaccactgcaatgaatcctgccctgttggctactatggcgatggctgccagctgccttgcacctgtcagaatggcgccgactgccacagcatcactgggggctgcacttgtgctccgggcttcatgggagaggtctgtgccgtttcctgtgcagcagggacctatggccccaactgctcgtccatctgtagctgtaacaatggtggcacctgctccccagtagatggctcctgtacctgcaaggaagggtggcagggcctggactgcaccctgccatgtcccagtgggacgtggggcctgaactgcaacgagagctgcacctgtgccaatggggcagcctgcagccccatagacggctcctgctcctgcactcctggctggctgggagacacctgtgagctgccttgcccggatggcacatttgggctgaactgcagtgaacactgtgactgcagccatgctgatggatgtgaccccgtcacaggccactgctgctgcctggccggatggacaggcatccgctgtgacagcacgtgtccacctggccgctggggccccaactgctctgtctcctgcagctgtgagaatggaggctcctgctccccagaggatgggagctgcgagtgtgcccctggcttccgaggacccttatgccagagaatctgcccccctgggttctatggccacggctgcgcccagccatgccccctctgcgtgcacagcagcaggccctgccaccacatcagcggcatctgtgagtgcctcccaggattctctggagctctctgcaaccaagtgtgtgctggaggatactttgggcaggactgtgcccagctctgctcctgtgccaacaacgggacctgcagccctatcgatggctcctgccagtgctttcctggatggattggcaaggactgctcacaggcttgcccacccgggttctggggccccgcctgcttccacgcatgcagctgccacaacggggcgagctgcagcgccgaggacggggcctgccactgcacccctggctggactggactcttctgcacacagcgctgcccagcagcattttttgggaaggactgtgggcgcgtatgccagtgtcagaatggcgccagctgtgaccacatcagtggcaagtgcacctgccgcacaggcttcaccgggcaacactgtgagcagagatgtgccccaggaacctttggctatgggtgtcagcagctatgtgagtgcatgaacaactccacctgtgaccatgtcaccggcacctgttactgcagccctggcttcaaaggaatcaggtgtgaccaagctgccctcatgatggaggagctgaatccctacaccaagatcagcccagcactgggtgcagagcggcactcggtgggtgctgtcacaggcatcatgctcctgttattcttcattgtggtgctgctgggcctatttgcctggcatcggcggcggcagaaagagaagggccgagacctggctccccgtgtctcctacacacctgccatgaggatgaccagcaccgactactccctctcaggtgcttgtggaatggatagacgtcagaacacatacattatggacaaaggcttcaaagattacatgaaagaatccgtgtgcagttctagtacttgttccttgaatagcagtgaaaacccttacgccacaattaaggacccacccatcctcacctgcaagcttccagaaagcagctatgtagaaatgaagtcgcctgtgcacatggggtctccgtacacagatgtgccatccttgtcgacatctaataaaaatatatatgaagttgagcccacagtcagtgtggtccaagaaggttgcggtcataactccagctatatccagaatgcatacgacctacctaggaacagccatattcctggtcattatgacctcctcccagtaagacagagccctgccaatgggccgtcccaggacaagcaatcttaagagggataagcttctctcttgcagtgtgctctactgaatattctgactctgaaagaagacagtcccttgacttgaagtaatggtacagactggctccagctgcatgttagttattacgttcacctggaactaaagaagagcgtccaggtgggactgggataattgttcaaggaattgtgttctcaaaggcaaatcctatcacccactcagccccaaatgccctggattatatgatttttaaaacattttaagatacagctactcatcaacatcagctaaatatagctgatatatatatatatatttatctgaaacgtgatattttaaaaacatgtaggtttaacaaaccttcctaggacaaaaaggagactggggagggaagaggattactttaaagcacctgaaacgtatatgtacttttggttgctgttaccatcaacatctgttttattaccgaagacaattagtacacagacatgaactgttcttaaacagaacagtcttaaaatgtctgtacatatctgtctggtccatcaaattacaacagccaagattacagaatctatatagtctaatgctgacaacttctattttaaaaaacaagactttactttcttctgccccctaagtgataggtttaaacacacagagacacacacacacgtttccaaagtgcagcagtgtctctttcagtctacaataagattcctagggcagctttatcaaattttgccaattcaaagttcaaggacattacaagttagtcctggctttgtcatatctacttagtccatccgacacctgaatcattccatgtaaaacagagctctaagatgatcctttaagcaagcagtcatagactggtcgggattaagtaaaagacggctagttggcctcctcattttatttggtcagcatcccttgactcaagagtacttgctttcaagttcttcataaatcttgagattgacgtagtatgaaacctaaaagtatacaggaaattggacaaatgtggatacagcaagtttacactgcttaaagtacattatgctttttaatggaactaaatgatcaaaaaaagaatggactgtaaccagttgctgtaacatgatgtaaaaacgttactgtaaacagcatgaggatatgaagtccttccaccttctatcttaaaactactacttactgagctagcccaatatgcattacaatgagctaatgctccagatcccagtattcagatgtgtctataccttccactatgaacacagataaactgaggctcagataagtccaaatgaaatgaaatcaactcccaagccctaaagagaaccttctcacaagaattaaaaacaaaaagggcaaacctaggaagctaacggctactcctgtaccactctattcactggtacagtccagccagtaaaaaacacttccaaaaagatacacagaagaggaactaaatgactgcgaagctggaatactgctacaggaagtatgagagttctgaaacccttgatagaaactggaagcctgccatggaacacaatactttgggcaataatcagaaaaagcaaaaaaataaataaatgagtacatctccccttcccacatcactcaaggcataagcagattttactgttagaggaaaatatgtaatacttacatgaatgttgcatgtgtgcatgggagcaactgagtagcaatagtaaatttactttccaaaaaagccttattaaaatataaatattagaaaattactttggagacccaagtaaatatttctcatacatatgtagaaagaaatataggtaagcagcttacctcagtatttcagggcagcaagtgtttgtgaagcaaggatgagcagcatgaagatgtcagatcagcaaggagaaacttcaactcaatcccaggttttctcttcttcccttatcctgcatgtacaataactgctgcctggcaaactgcaaacaagcagcatcactcaagtttgaagtttcgccgcttttgtcaactatcctctgggcaaaggtattcagcaagaggtggaatggctagacactgaatcaagagatttcagtgttactctggtcaagttagtcgccctctctgggctccctttttttctatgcataaaaaggggagaagcagagagtgggaagacagctctactaacccttcagctctagcagtccatgactttttaaggaaatgtaatacaagtcaaaccaggcaatacagaggagaagggaaaggcagagggtgtgattatggtgacaatagctgccttcccctatcgaacagttatcagtaaaagacatttcaatcttacaaagcaactgttagaaacttctgtctaacaccatcacaaataggttcatggtcagcctaaacatgtatactgtgcattttatgggtgactttgaaagatctgttcaattatttttcagaaactaaattttcaaaaaattaatatgtgtacaattaaaatgaatgaaagaaaaaccattattgtacagaggtattaatgagactatgaaacggcaatacttttttaaatcacagatttgtaatatatgttcactgtgcagagggattgtaccttgtacaaaataaaacaaatttctcaaacta

SEQ ID NO: 107292 - DNA, 6117 bp, Homo sapiens
agcagttatcactcctccacctgcttttccatcttccagtgtgtgacatcctttgtctcctattcctcttttctttgtgggtttatacctgtacccctttgactctcatgtcagctgggtttgagaaagaagctgagcaaagtgcacgtctccataccagcatgtttactcagcctccttccttatgtcttctcagcactttactatgtacccatgtgagagtacttactgccttgtacttagcggtttttttggctctttctgtggtagactaggaggacaggaatcaaatcgaatcacccctagtgtctcacacagcacctcgtatacaataggcagttcctaaattgtgctgaataactggatgagcaagttggcctcagtctcccatctcccatctctaagaggagggctttggagccctggtgtccagctgtctgaacttcttctgggaagttgggtggtccctggagccacagcaggtgtgccattcccaggaaagtttggcatttctggagcaccgccatgcatgtcttcccacctttcttttagggagcagtgtgtgcccagccctgcccaccagggacatttggccagaactgcagccaggattgtccttgccaccatggagggcagtgtgaccacgtgactggacagtgccactgtacagctggatacatgggggacaggtgccaagaggagtgccccttcgggtccttcggcttccagtgctcacagcgctgtgactgccacaatggggggcagtgttcacccaccacgggtgcctgcgagtgtgagcctggctacaagggcccacgctgccaggagcgactgtgcccggagggcctgcatggcccaggctgcaccctgccctgcccctgtgacgctgacaacaccatcagctgccacccagtaactggagcttgtacctgccagccaggctggtctggtcaccactgcaatgaatcctgccctgttggctactatggcgatggctgccagctgccttgcacctgtcagaatggcgccgactgccacagcatcactgggggctgcacttgtgctccgggcttcatgggagaggtctgtgccgtttcctgtgcagcagggacctatggccccaactgctcgtccatctgtagctgtaacaatggtggcacctgctccccagtagatggctcctgtacctgcaaggaagggtggcagggcctggactgcaccctgccatgtcccagtgggacgtggggcctgaactgcaacgagagctgcacctgtgccaatggggcagcctgcagccccatagacggctcctgctcctgcactcctggctggctgggagacacctgtgagctgccttgcccggatggcacatttgggctgaactgcagtgaacactgtgactgcagccatgctgatggatgtgaccccgtcacaggccactgctgctgcctggccggatggacaggcatccgctgtgacagcacgtgtccacctggccgctggggccccaactgctctgtctcctgcagctgtgagaatggaggctcctgctccccagaggatgggagctgcgagtgtgcccctggcttccgaggacccttatgccagagaatctgcccccctgggttctatggccacggctgcgcccagccatgccccctctgcgtgcacagcagcaggccctgccaccacatcagcggcatctgtgagtgcctcccaggattctctggagctctctgcaaccaagtgtgtgctggaggatactttgggcaggactgtgcccagctctgctcctgtgccaacaacgggacctgcagccctatcgatggctcctgccagtgctttcctggatggattggcaaggactgctcacaggcttgcccacccgggttctggggccccgcctgcttccacgcatgcagctgccacaacggggcgagctgcagcgccgaggacggggcctgccactgcacccctggctggactggactcttctgcacacagcgctgcccagcagcattttttgggaaggactgtgggcgcgtatgccagtgtcagaatggcgccagctgtgaccacatcagtggcaagtgcacctgccgcacaggcttcaccgggcaacactgtgagcagagatgtgccccaggaacctttggctatgggtgtcagcagctatgtgagtgcatgaacaactccacctgtgaccatgtcaccggcacctgttactgcagccctggcttcaaaggaatcaggtgtgaccaagctgccctcatgatggaggagctgaatccctacaccaagatcagcccagcactgggtgcagagcggcactcggtgggtgctgtcacaggcatcatgctcctgttattcttcattgtggtgctgctgggcctatttgcctggcatcggcggcggcagaaagagaagggccgagacctggctccccgtgtctcctacacacctgccatgaggatgaccagcaccgactactccctctcagcatcaaccacaccatggtggcctgtcatggaacacctagctcgccctttctctcaacggcctaggacccagctcagtaacaagtcccttgacagagacacagcaggctggaccccctacagctatgtgaacgtgttgttagatcagtgccctggaggccaggtacccgcccgaggacttctacattgaacttagacacctcagccgccccgctgagccacactcaccaggtgcttgtggaatggatagacgtcagaacacatacattatggacaaaggcttcaaagatgccaactaaatgtcttcggaaatgtaaagcgtcattatccaaccaattagtacgagttaaattgattataaaatctgaaataaagttgatctacctgccccagaggcctcctgtcgttgcactagcaaggaatgccaccctgcacctgctggctttctgggggcacaaggaatgaaaatgatacgcagtgttaatattgtatggcactccaacctcaagagatctctgcctccaagagcagagaagccaagacaaatccctaacacatgggaactgcaagttggatcatccctctaggaagtctacaggtgaagccaaagatgaaagattacatgaaagaatccgtgtgcagttctagtacttgttccttgaatagcagtgaaaacccttacgccacaattaaggacccacccatcctcacctgcaagcttccagaaagcagctatgtagaaatgaagtcgcctgtgcacatggggtctccgtacacagatgtgccatccttgtcgacatctaataaaaatatatatgaagttgagcccacagtcagtgtggtccaagaaggttgcggtcataactccagctatatccagaatgcatacgacctacctaggaacagccatattcctggtcattatgacctcctcccagtaagacagagccctgccaatgggccgtcccaggacaagcaatcttaagagggataagcttctctcttgcagtgtgctctactgaatattctgactctgaaagaagacagtcccttgacttgaagtaatggtacagactggctccagctgcatgttagttattacgttcacctggaactaaagaagagcgtccaggtgggactgggataattgttcaaggaattgtgttctcaaaggcaaatcctatcacccactcagccccaaatgccctggattatatgatttttaaaacattttaagatacagctactcatcaacatcagctaaatatagctgatatatatatatatatttatctgaaacgtgatattttaaaaacatgtaggtttaacaaaccttcctaggacaaaaaggagactggggagggaagaggattactttaaagcacctgaaacgtatatgtacttttggttgctgttaccatcaacatctgttttattaccgaagacaattagtacacagacatgaactgttcttaaacagaacagtcttaaaatgtctgtacatatctgtctggtccatcaaattacaacagccaagattacagaatctatatagtctaatgctgacaacttctattttaaaaaacaagactttactttcttctgccccctaagtgataggtttaaacacacagagacacacacacacgtttccaaagtgcagcagtgtctctttcagtctacaataagattcctagggcagctttatcaaattttgccaattcaaagttcaaggacattacaagttagtcctggctttgtcatatctacttagtccatccgacacctgaatcattccatgtaaaacagagctctaagatgatcctttaagcaagcagtcatagactggtcgggattaagtaaaagacggctagttggcctcctcattttatttggtcagcatcccttgactcaagagtacttgctttcaagttcttcataaatcttgagattgacgtagtatgaaacctaaaagtatacaggaaattggacaaatgtggatacagcaagtttacactgcttaaagtacattatgctttttaatggaactaaatgatcaaaaaaagaatggactgtaaccagttgctgtaacatgatgtaaaaacgttactgtaaacagcatgaggatatgaagtccttccaccttctatcttaaaactactacttactgagctagcccaatatgcattacaatgagctaatgctccagatcccagtattcagatgtgtctataccttccactatgaacacagataaactgaggctcagataagtccaaatgaaatgaaatcaactcccaagccctaaagagaaccttctcacaagaattaaaaacaaaaagggcaaacctaggaagctaacggctactcctgtaccactctattcactggtacagtccagccagtaaaaaacacttccaaaaagatacacagaagaggaactaaatgactgcgaagctggaatactgctacaggaagtatgagagttctgaaacccttgatagaaactggaagcctgccatggaacacaatactttgggcaataatcagaaaaagcaaaaaaataaataaatgagtacatctccccttcccacatcactcaaggcataagcagattttactgttagaggaaaatatgtaatacttacatgaatgttgcatgtgtgcatgggagcaactgagtagcaatagtaaatttactttccaaaaaagccttattaaaatataaatattagaaaattactttggagacccaagtaaatatttctcatacatatgtagaaagaaatataggtaagcagcttacctcagtatttcagggcagcaagtgtttgtgaagcaaggatgagcagcatgaagatgtcagatcagcaaggagaaacttcaactcaatcccaggttttctcttcttcccttatcctgcatgtacaataactgctgcctggcaaactgcaaacaagcagcatcactcaagtttgaagtttcgccgcttttgtcaactatcctctgggcaaaggtattcagcaagaggtggaatggctagacactgaatcaagagatttcagtgttactctggtcaagttagtcgccctctctgggctccctttttttctatgcataaaaaggggagaagcagagagtgggaagacagctctactaacccttcagctctagcagtccatgactttttaaggaaatgtaatacaagtcaaaccaggcaatacagaggagaagggaaaggcagagggtgtgattatggtgacaatagctgccttcccctatcgaacagttatcagtaaaagacatttcaatcttacaaagcaactgttagaaacttctgtctaacaccatcacaaataggttcatggtcagcctaaacatgtatactgtgcattttatgggtgactttgaaagatctgttcaattatttttcagaaactaaattttcaaaaaattaatatgtgtacaattaaaatgaatgaaagaaaaaccattattgtacagaggtattaatgagactatgaaacggcaatacttttttaaatcacagatttgtaatatatgttcactgtgcagagggattgtaccttgtacaaaataaaacaaatttctcaaacta

SEQ ID NO: 107293 - DNA, 5320 bp, Homo sapiens
agcagttatcactcctccacctgcttttccatcttccagtgtggagcagtgtgtgcccagccctgcccaccagggacatttggccagaactgcagccaggattgtccttgccaccatggagggcagtgtgaccacgtgactggacagtgccactgtacagctggatacatgggggacaggtgccaagaggagtgccccttcgggtccttcggcttccagtgctcacagcgctgtgactgccacaatggggggcagtgttcacccaccacgggtgcctgcgagtgtgagcctggctacaagggcccacgctgccaggagcgactgtgcccggagggcctgcatggcccaggctgcaccctgccctgcccctgtgacgctgacaacaccatcagctgccacccagtaactggagcttgtacctgccagccaggctggtctggtcaccactgcaatgaatcctgccctgttggctactatggcgatggctgccagctgccttgcacctgtcagaatggcgccgactgccacagcatcactgggggctgcacttgtgctccgggcttcatgggagaggtctgtgccgtttcctgtgcagcagggacctatggccccaactgctcgtccatctgtagctgtaacaatggtggcacctgctccccagtagatggctcctgtacctgcaaggaagggtggcagggcctggactgcaccctgccatgtcccagtgggacgtggggcctgaactgcaacgagagctgcacctgtgccaatggggcagcctgcagccccatagacggctcctgctcctgcactcctggctggctgggagacacctgtgagctgccttgcccggatggcacatttgggctgaactgcagtgaacactgtgactgcagccatgctgatggatgtgaccccgtcacaggccactgctgctgcctggccggatggacaggcatccgctgtgacagcacgtgtccacctggccgctggggccccaactgctctgtctcctgcagctgtgagaatggaggctcctgctccccagaggatgggagctgcgagtgtgcccctggcttccgaggacccttatgccagagaatctgcccccctgggttctatggccacggctgcgcccagccatgccccctctgcgtgcacagcagcaggccctgccaccacatcagcggcatctgtgagtgcctcccaggattctctggagctctctgcaaccaagtgtgtgctggaggatactttgggcaggactgtgcccagctctgctcctgtgccaacaacgggacctgcagccctatcgatggctcctgccagtgctttcctggatggattggcaaggactgctcacaggcttgcccacccgggttctggggccccgcctgcttccacgcatgcagctgccacaacggggcgagctgcagcgccgaggacggggcctgccactgcacccctggctggactggactcttctgcacacagcgctgcccagcagcattttttgggaaggactgtgggcgcgtatgccagtgtcagaatggcgccagctgtgaccacatcagtggcaagtgcacctgccgcacaggcttcaccgggcaacactgtgagcagagatgtgccccaggaacctttggctatgggtgtcagcagctatgtgagtgcatgaacaactccacctgtgaccatgtcaccggcacctgttactgcagccctggcttcaaaggaatcaggtgtgaccaagctgccctcatgatggaggagctgaatccctacaccaagatcagcccagcactgggtgcagagcggcactcggtgggtgctgtcacaggcatcatgctcctgttattcttcattgtggtgctgctgggcctatttgcctggcatcggcggcggcagaaagagaagggccgagacctggctccccgtgtctcctacacacctgccatgaggatgaccagcaccgactactccctctcagcatcaaccacaccatggtggcctgtcatggaacacctagctcgccctttctctcaacggcctaggacccagctcagtaacaagtcccttgacagagacacagcaggctggaccccctacagctatgtgaacgtgttgttagatcagtgccctggaggccaggtacccgcccgaggacttctacattgaacttagacacctcagccgccccgctgagccacactcaccaggtgcttgtggaatggatagacgtcagaacacatacattatggacaaaggcttcaaaggcaggtggatgactcagctggagaacaaagtggcttcctgagattacatgaaagaatccgtgtgcagttctagtacttgttccttgaatagcagtgaaaacccttacgccacaattaaggacccacccatcctcacctgcaagcttccagaaagcagctatgtagaaatgaagtcgcctgtgcacatggggtctccgtacacagatgtgccatccttgtcgacatctaataaaaatatatatgaagttgagcccacagtcagtgtggtccaagaaggttgcggtcataactccagctatatccagaatgcatacgacctacctaggaacagccatattcctggtcattatgacctcctcccagtaagacagagccctgccaatgggccgtcccaggacaagcaatcttaagagggataagcttctctcttgcagtgtgctctactgaatattctgactctgaaagaagacagtcccttgacttgaagtaatggtacagactggctccagctgcatgttagttattacgttcacctggaactaaagaagagcgtccaggtgggactgggataattgttcaaggaattgtgttctcaaaggcaaatcctatcacccactcagccccaaatgccctggattatatgatttttaaaacattttaagatacagctactcatcaacatcagctaaatatagctgatatatatatatatatttatctgaaacgtgatattttaaaaacatgtaggtttaacaaaccttcctaggacaaaaaggagactggggagggaagaggattactttaaagcacctgaaacgtatatgtacttttggttgctgttaccatcaacatctgttttattaccgaagacaattagtacacagacatgaactgttcttaaacagaacagtcttaaaatgtctgtacatatctgtctggtccatcaaattacaacagccaagattacagaatctatatagtctaatgctgacaacttctattttaaaaaacaagactttactttcttctgccccctaagtgataggtttaaacacacagagacacacacacacgtttccaaagtgcagcagtgtctctttcagtctacaataagattcctagggcagctttatcaaattttgccaattcaaagttcaaggacattacaagttagtcctggctttgtcatatctacttagtccatccgacacctgaatcattccatgtaaaacagagctctaagatgatcctttaagcaagcagtcatagactggtcgggattaagtaaaagacggctagttggcctcctcattttatttggtcagcatcccttgactcaagagtacttgctttcaagttcttcataaatcttgagattgacgtagtatgaaacctaaaagtatacaggaaattggacaaatgtggatacagcaagtttacactgcttaaagtacattatgctttttaatggaactaaatgatcaaaaaaagaatggactgtaaccagttgctgtaacatgatgtaaaaacgttactgtaaacagcatgaggatatgaagtccttccaccttctatcttaaaactactacttactgagctagcccaatatgcattacaatgagctaatgctccagatcccagtattcagatgtgtctataccttccactatgaacacagataaactgaggctcagataagtccaaatgaaatgaaatcaactcccaagccctaaagagaaccttctcacaagaattaaaaacaaaaagggcaaacctaggaagctaacggctactcctgtaccactctattcactggtacagtccagccagtaaaaaacacttccaaaaagatacacagaagaggaactaaatgactgcgaagctggaatactgctacaggaagtatgagagttctgaaacccttgatagaaactggaagcctgccatggaacacaatactttgggcaataatcagaaaaagcaaaaaaataaataaatgagtacatctccccttcccacatcactcaaggcataagcagattttactgttagaggaaaatatgtaatacttacatgaatgttgcatgtgtgcatgggagcaactgagtagcaatagtaaatttactttccaaaaaagccttattaaaatataaatattagaaaattactttggagacccaagtaaatatttctcatacatatgtagaaagaaatataggtaagcagcttacctcagtatttcagggcagcaagtgtttgtgaagcaaggatgagcagcatgaagatgtcagatcagcaaggagaaacttcaactcaatcccaggttttctcttcttcccttatcctgcatgtacaataactgctgcctggcaaactgcaaacaagcagcatcactcaagtttgaagtttcgccgcttttgtcaactatcctctgggcaaaggtattcagcaagaggtggaatggctagacactgaatcaagagatttcagtgttactctggtcaagttagtcgccctctctgggctccctttttttctatgcataaaaaggggagaagcagagagtgggaagacagctctactaacccttcagctctagcagtccatgactttttaaggaaatgtaatacaagtcaaaccaggcaatacagaggagaagggaaaggcagagggtgtgattatggtgacaatagctgccttcccctatcgaacagttatcagtaaaagacatttcaatcttacaaagcaactgttagaaacttctgtctaacaccatcacaaataggttcatggtcagcctaaacatgtatactgtgcattttatgggtgactttgaaagatctgttcaattatttttcagaaactaaattttcaaaaaattaatatgtgtacaattaaaatgaatgaaagaaaaaccattattgtacagaggtattaatgagactatgaaacggcaatacttttttaaatcacagatttgtaatatatgttcactgtgcagagggattgtaccttgtacaaaataaaacaaatttctcaaacta

SEQ ID NO: 107294 - DNA, 2858 bp, Homo sapiens
agcagttatcactcctccacctgcttttccatcttccagtgtggagcagtgtgtgcccagccctgcccaccagggacatttggccagaactgcagccaggattgtccttgccaccatggagggcagtgtgaccacgtgactggacagtgccactgtacagctggatacatgggggacaggtgccaagaggagtgccccttcgggtccttcggcttccagtgctcacagcgctgtgactgccacaatggggggcagtgttcacccaccacgggtgcctgcgagtgtgagcctggctacaagggcccacgctgccaggagcgactgtgcccggagggcctgcatggcccaggctgcaccctgccctgcccctgtgacgctgacaacaccatcagctgccacccagtaactggagcttgtacctgccagccaggctggtctggtcaccactgcaatgaatcctgccctgttggctactatggcgatggctgccagctgccttgcacctgtcagaatggcgccgactgccacagcatcactgggggctgcacttgtgctccgggcttcatgggagaggtctgtgccgtttcctgtgcagcagggacctatggccccaactgctcgtccatctgtagctgtaacaatggtggcacctgctccccagtagatggctcctgtacctgcaaggaagggtggcagggcctggactgcaccctgccatgtcccagtgggacgtggggcctgaactgcaacgagagctgcacctgtgccaatggggcagcctgcagccccatagacggctcctgctcctgcactcctggctggctgggagacacctgtgagctgccttgcccggatggcacatttgggctgaactgcagtgaacactgtgactgcagccatgctgatggatgtgaccccgtcacaggccactgctgctgcctggccggatggacaggcatccgctgtgacagcacgtgtccacctggccgctggggccccaactgctctgtctcctgcagctgtgagaatggaggctcctgctccccagaggatgggagctgcgagtgtgcccctggcttccgaggacccttatgccagagaatctgcccccctgggttctatggccacggctgcgcccagccatgccccctctgcgtgcacagcagcaggccctgccaccacatcagcggcatctgtgagtgcctcccaggattctctggagctctctgcaaccaagtgtgtgctggaggatactttgggcaggactgtgcccagctctgctcctgtgccaacaacgggacctgcagccctatcgatggctcctgccagtgctttcctggatggattggcaaggactgctcacaggcttgcccacccgggttctggggccccgcctgcttccacgcatgcagctgccacaacggggcgagctgcagcgccgaggacggggcctgccactgcacccctggctggactggactcttctgcacacagcgctgcccagcagcattttttgggaaggactgtgggcgcgtatgccagtgtcagaatggcgccagctgtgaccacatcagtggcaagtgcacctgccgcacaggcttcaccgggcaacactgtgagcagagatgtgccccaggaacctttggctatgggtgtcagcagctatgtgagtgcatgaacaactccacctgtgaccatgtcaccggcacctgttactgcagccctggcttcaaaggaatcaggtgtgaccaagctgccctcatgatggaggagctgaatccctacaccaagatcagcccagcactgggtgcagagcggcactcggtgggtgctgtcacaggcatcatgctcctgttattcttcattgtggtgctgctgggcctatttgcctggcatcggcggcggcagaaagagaagggccgagacctggctccccgtgtctcctacacacctgccatgaggatgaccagcaccgactactccctctcagcatcaaccacaccatggtggcctgtcatggaacacctagctcgccctttctctcaacggcctaggacccagctcagtaacaagtcccttgacagagacacagcaggctggaccccctacagctatgtgaacgtgttgttagatcagtgccctggaggccaggtacccgcccgaggacttctacattgaacttagacacctcagccgccccgctgagccacactcaccaggtgcttgtggaatggatagacgtcagaacacatacattatggacaaaggcttcaaagatgccaactaaatgtcttcggaaatgtaaagcgtcattatccaaccaattagtacgagttaaattgattataaaatctgaaataaagttgatctacctgccccagaggcctcctgtcgttgcactagcaaggaatgccaccctgcacctgctggctttctgggggcacaaggaatgaaaatgatacgcagtgttaatattgtatggcactccaacctcaagagatctctgcctccaagagcagagaagccaagacaaatccctaacacatgggaactgcaagttggatcatccctctaggaagtctacaggtgaagccaaagatgaaaggtcaggtcctgccctaggtttaaatgccggaatgtgtgaaatagggggctttggaactctgtcacttgccactctgttgctcattaactgtgaccttagactggactgtgagctttccaaggctcagtttcctcatctgcaaggttgggataattttgcctgtcctattgtctaatgcctgtcctactgtctaacaaggttatcatgagtaaccaataaaatcaccaatgggaagtgttttttgcatactgta

SEQ ID NO: 107295 - DNA, 279 bp, Homo sapiens
ctcttcatttggcttggctgacaaagcattgcacccctgtcccgcctctggccacagtgatggattcaggggtggcacacaactcaatcccggaaactggaactgatgagactcagttcttggactttggtggggagaggaccattgagaaaagggcctggccaggtgcagtggctcacgcctgtaatcccagctctcagggaggcagaggcgggaggatagcttgagcccaggagttctagacctgcctgggcaatatagagagaccccgttctccac

SEQ ID NO: 107296 - DNA, 199 bp, Homo sapiens
tggtaactgttatcctcaaataatgggtgggctcaggtacactggttactaaccacttaagtttaagaaagtgcttcttgagtttgaaataaacatatgagaagaaagtaactcttgaaagattattttatagtaatttatgaaattctcaaaaagaggtaatcactaggccatgttcctaaaggctgatacgtgctaa

SEQ ID NO: 107297 - DNA, 239 bp, Homo sapiens
taaggtttcagagggggtaaagagaaaatgtacaattaacaacatttactcatgctgaccatgctttaacccaagattttcgccacacaagtggcaatgaccaaaactaactccccaaatgcaataatctctatgaagtttctccagacactcagagatgcctccaccaagccagctgactcactacatcaaggtgacaatccagtttaccaaagagatcaaaggcatccaaaatatac

SEQ ID NO: 107298 - DNA, 204 bp, Homo sapiens
ggagtttgcaggtgaggatgagacttgaataattctcccgtacctggttctcattggctgagggactgggcatggtgctttacctataatcctcacaaaccatactcaataagtattattatctttattttgaaaataaggaaactacaaatctgcgtgttctgcacatgtatctcagaacttaaagtataatttaaaaaattt

SEQ ID NO: 107299 - DNA, 503 bp, Homo sapiens
cagcccccttgtctgttcttaactgaatggtaacttcctgttgcatggactccctgtgaagtcacacagactggtgacttaaaaggagcaggaacctctaatgaacttttaaaaggactcaacttgaaaggatttaaaattatacccaatttttgaaaaccattaactgtttaaaccattatactttgtttgctctgaacaatactataatgtggttacaatactaaccactacttttactttttttttaccaaacaacatttacctaagtgggatgaatacaaaagaataccacaaaacagcataacgaagaaaactggaaacaatttacatgctcatggaggttacttcacatcttcactgctttggaaataaccatgagaatagctttgtatctgtgttgaggtaggtgctttcgatctctggcattattaacaatttcagattaagtccactgccaatcattattcttctaacacaacaaaacttctgttactctaata

SEQ ID NO: 107300 - DNA, 855 bp, Homo sapiens
cagtagaatatgagaaaaagatttaagcactttacagaaaaggaaacacaaatgtaaacatatggaaatgaggtttaatctcattcatcattagtgatatgtgaattaaaatcataggtatatttcatacctaaccagattggtaaaaattaaaaattttgcaaataagagttggttggaaagtttatcaccgactcttaagcactcctagggtaatgtaaatgagtataatcactttggaaaacagtttggcattatctagtaaatttgataggatgacttaacttttgacccagcaattccatttctaatgatatacttgatagaaatgtgtgcccaggtacacccagaaatatatgcaagaatgttcatagcagtgttattcgagatattcaaacatcagagacaaccctaataaattgtggtatattcatacaatggaatactacaaaacaataaaaataaaggaatcacaaacatgtagtagtctagatggatctccaagaagaaaaatctgtcttatggtaggaagttattgttgaacctgaatctcctgtgatgcagtataaatgtatttcctctggttctctcctcagtggcagttaagtattaggaaagattatgtgaggattggtgtcaaccattctcagtcttttgtactaaagaaattttctggccggcgtgggtctcacgcctgtagtctcagcaaactgggaggccgaggtgggtggatcacgaggacgggctgagacagaagaatggcgtgaaccccagaggtggagcttgcagtgagccaagatcgcgccaaccgcactccggcctgggtgacagatgagactccgtctcaaaaaaaaa

SEQ ID NO: 107301 - DNA, 593 bp, Homo sapiens
agcgttatcggaagaacaagaggacagcaagatggtggatctgtttgtgggccagatgaaaagttatctcaagtgccaggcctgtgggtaccactctatgaccttcaaggttttttttttgtgacctctccctgaccatccccaagaaaggatttgctgggggcaaggtgtctctgcgggattgtttaagccttttcaccaaggaagaagagctagagttagagaatgcctcagtgtgtgacccacatgggcagaaaacacatggtgccaaaagttgacagtacaaagattcccttgaatcttcatgctccatctgaatcaattttctgcctcctgaggctccatcaagaaaagttctgtaggtgtagacttcccactgcagtgactgagcctaggggacttggccagtgacaaagtcggaagtcctgtctaccagctgtgtgccctttggaaccactcaggcagcatccactgtggccactacacaaccctgtgccagtgccagactggttggcacgtttacaatgactcttgtgtctcccctgtaagtgaaaaccaggtggcatccagtgaagcctactgttctaccaact

SEQ ID NO: 107302 - DNA, 432 bp, Homo sapiens
tggcaacaaattctctcagttttctttcatctgaaaatgtcttgattttcccttgatatctgaagaatatttacattagacatagacttgtaggtttatagttcttttctttcagcacttgaaaattgttctgccacttccagccaagaggggtggctcacgcctgtaagcccagcactttgggaagccaaggcgggcagatcacttgaggtcaggagtttgagaccagcctggctaacatggcgaaaccccgcctctactaaaaatacaaaaattagccggcatggtggtgcacatctgtaatcccagccatttgggaagctgaggcaggagaatcacttgaacccgtaggcggagattacagtgagctgagatcgcaccactgtactccagtctgagcaacagaacgagactccttgtcaaaaaaaaaaa

SEQ ID NO: 107303 - DNA, 487 bp, Homo sapiens
tcctacaccacctgcctgcggggcgggagcgtggggaggagggtgagcacgcctatgatacgctgagtctggagagctctgacagcatggagaccagcatctccaccgggggcaactcggccagcctactttggtcttttcttggactgaccccaaatttaggacatctcccttctttaactcttcctttcccatgatttgttcctaaagatggtggtttaaggccgccttcttcaggaagccctcctgggattaacccagcccatttttcccatctctcatccttcccccttacttactatcttttcatttccttttagcacatgattgttgagccagatatattcacaaataacaataataaaggcagatggtgatacagaagaatgtgagcacagaggaaggagcaaagaaatcggcaatcaaggaaggctttggagaggagatagcatttggtctagtcttagatgataagtaagctcttgat

SEQ ID NO: 107304 - DNA, 373 bp, Homo sapiens
atcatactggtagcactattacttctaaattagaatatcgtagcagtctcctgagtttcctgtgcctctttcagtccagtagttctcaaccatgggtgattctgctttgtgggcaatctttggaggcatttttggttgtcacaactgggcaaagggtatgtatgctactggcatctggtggtagagcccaggcctgctgaaaacatcctacagtgtactaaacaggcctgcactaagaaccgtctagcccaaaaagtcaacagcccagaggttgagaaatccttcttaagtctattctcaacacaggagtcctgagtgattctatgatttattttatttaaaaaactttttgtagagacagggtcttactatg

SEQ ID NO: 107305 - DNA, 575 bp, Homo sapiens
tccaagtctttgctattgtgaataatgccgcaataaacatacttgtgcatgtgtctttatagcagcatgatttataatcctttgggtatatacccagtaatgggatggctgggtcaaatggtatttctaattctagatccctgaggaatcgccacactgacttccacaaaggttgaactagtttacagtcccaccaacagtgtaaaagtgttcctatttctccacatcctctctagcacctgttgtttcctgactttttaatgattgccattctaactggtgtgagatggtatctcattgtggttttgatttgcatttctctgatggccagtgatggtgagcattttttcatgtgttttttggctgcataaatgtcttcttttgagaagtgtctgttcatgtccttcgcccactttttgatggggttgtttctttttttcttgtaaatttgtttgctcactcctttcttaaagcaacagccgatcattcgtggaatatttggaatctcattattcttttaatggatagttctttctctgtcagtctcttaaaaagacagtgtcttaaaaaaaaaa

SEQ ID NO: 107306 - DNA, 673 bp, Homo sapiens
caattcccaattttaaaagcaaagatttgaaagtattagtttggggacttctaacccacaagaatttagattttgtttaactgcagaaaaaaaccctcaagaacagctacaatattgtactatagtttttcttttgaagcataattttctctctccaatccccatttttattaaaaacaaatcatgataggactgatttgtttacaaaataaactttagccttactgtgcttggcctgattatttgcataaagtgcagcaagaataattatttttcacttaggctttttaagttggttttgatagaactctgttccatgaagaatctcagataagactttttaaaagctgagcccagctgtggatttgtactctcaaatacctatgagttgggcaaatttctctcctcttgaggtcccaagataacttggggttcctgggcctgttagcaagtgacattctttacttaccacgggttgtcaggaagcttgtacagagactctgtgtggacaaggtatgaggccagattccccaacaggctttaattggctctataagtcaactttgattctttaaaggaagcatgatttctccagctgtgtcctgttacaaaagaaaacagattcttattgcactaaagcaatgaactatactgccataaattgagaatattc

SEQ ID NO: 107307 - DNA, 1179 bp, Homo sapiens
agggctggtcccacagtgagctacagccctgcccgctggccgtgggagaggcttaaaacaaacgccggaagcaactcccagccccataaagatctgtgaccggcagccccagacctgcctgccttcctgacttctgttccagagcaaaggtcattcagccgcttgaatcagccttttccccccacccggtccccaactttgtttacccgataaggaaggtcagcattcaaagtcaagaagcgccatttatcttcccgtgcgctctacaaatagttccgtgagaaagatggccgggaactcgatcctgctggctgctgtctctattctctcggcctgtcagcaaagttattttgctttgcaagttggaaaggcaagattaaaatacaaagttacgcccccagcagtcactgggtcaccagagtttgagagagtatttcgggcacaacaaaactgtgtggagttttatcctatattcataattacattgtggatggctgggtggtatttcaaccaagtttttgctacttgtctgggtctggtgtacatatatggccgtcacctatacttctggggatattcagaagctgctaaaaaacggatcaccggtttccgactgagtctggggattttggccttgttgaccctcctaggtgccctgggaattgcaaacagctttctggatgaatatctggacctcaatattgccaagaaactgaggcggcaattctaactttttctcttccctttaatgcttgcagaagctgttcccaccatgaaggtaatatggtatcatttgttaaataaaaataaagtctttattctgtttttcttgaaaaaaaaaaaaaaaaaaaaaaaaaaaaaaaaaaaaaaaaaaaaaaaaaaggggggggggggtttaaaaaatattccttcggaggggggaccaaattttacgtgtacaaccgttttttttgaacaagggggcctaaaaaggagaggcgtaattaaaagcaaggaagcggggcgggtgttaaacagttgctgcctggggaaaatttgttctcgggttttggggagaggaacctttcttctcgggtgtggactaatttggcacaatacccagaatatataggttcggggatttaacattcggtgttaggggaacccggtctatgtgggggaaatcggtcgttgttagtc

SEQ ID NO: 107308 - DNA, 693 bp, Homo sapiens
gaacttcggctaggtacgaggctgggtgtcggcagccccagacctgcctgccttcctgacttctgttccagagcaaaggtcattcagccgcttgaatcagccttttccccccacccggtccccaactttgtttacccgataaggaaggtcagcattcaaagtcaagaagcgccatttatcttcccgtgcgctctacaaatagttccgtgagaaagatggccgggaactcgatcctgctggctgctgtctctattctctcggcctgtcagcaaagttattttgctttgcaagttggaaaggcaagattaaaatacaaagttacgcccccagcagtcactgggtcaccagagtttgagagagtatttcgggcacatttttgctacttgtctgggtctggtgtacatatatggccgtcacctatacttctggggatattcagaagctgctaaaaaacggatcaccggtttccgactgagtctggggattttggccttgttgaccctcctaggtgccctgggaattgcaaacagctttctggatgaatatctggacctcaatattgccaagaaactgaggcggcaattctaactttttctcttccctttaatgcttgcagaagctgttcccaccatgaaggtaatatggtatcatttgttaaataaaaataaagtctttattctgtttttcttgaaa

SEQ ID NO: 107309 - DNA, 445 bp, Homo sapiens
cacatccagcacgccccctcgcgcaagtaatcccaaaaccccacacccgttatcacaaaactgtgtggagttttatcctatattcataattacattgtggatggctgggtggtatttcaaccaagtttttgctacttgtctgggtctggtgtacatatatggccgtcacctatacttctggggatattcagaagctgctaaaaaacggatcaccggtttccgactgagtctggggattttggccttgttgaccctcctaggtgccctgggaattgcaaacagctttctggatgaatatctggacctcaatattgccaagaaactgaggcggcaattctaactttttctcttccctttaatgcttgcagaagctgttcccaccatgaaggtaatatggtatcatttgttaaataaaaataaagtctttattctgtttttcttgaaa

SEQ ID NO: 107310 - DNA, 374 bp, Homo sapiens
  misc_feature (44)..(44): n is a, c, g, or t
  misc_feature (48)..(48): n is a, c, g, or t
tctttttatatttaagataatcattattgcttaatcttactcantacnttttcttggtaactccacgaacacgtcctgcgtacatatatggccgtcacctatacttctggggatattcagaagctgctaaaaaacggatcaccggtttccgactgagtctggggattttggccttgttgaccctcctaggtgccctgggaattgcaaacagctttctggatgaatatctggacctcaatattgccaagaaactgaggcggcaattctaactttttctcttccctttaatgcttgcagaagctgttcccaccatgaaggtaatatggtatcatttgttaaataaaaataaagtctttattctgtttttcttgaaa

SEQ ID NO: 107311 - DNA, 837 bp, Homo sapiens
tcgcccaacaattcccacacaggtcactaacacagaatgcaaatacttataacaaaactgtgtggagttttatcctatattcataattacattgtggatggctgggtggtatttcaaccaagtttttgctacttgtctgggtctggtgtacatatatggccgtcacctatacttctggggatattcagaagctgctaaaaaacggaccaccggattccgcctgagcctggggatcttggccttcgccaccctcctaagagacctgggaacatgaaaccacctccctggctgagtacccttcatctactcttcgcctacctcacgagatgcaattctcaccttacctctcccctatttacgcatgacataccgatcccagcttgagtgccccacgaaccgcgacgggttagtactcatcggcgtcacagtccagaatataaaaaacgagatgggcccgccgcgatccccccataaatccacggtaaggcttctcgataacagcagacccaatgttactccaatcttccctatcactccactatattaagaatgtcagtacagtcgtcatcccatcactccccatactcaactttctgtctctcaaacctgcacccatgtacccacctttcacagcatagccatgcctcactcaccgcccccccaagtctaacaatccccgcctcgaacacgaaatctacgctgagaggagggcgtcaccgtatataatatcaacaattgttattcattatccatacgtcccaccgccactcactaaaccaccgctccacctctcaaactttaacaccgattctacctcccaatacggagaatcgaccg

SEQ ID NO: 107312 - DNA, 1143 bp, Homo sapiens
agggctggtcccacagtgagctacagccctgcccgctggccgtgggagaggcttaaaacaaacgccggaagcaactcccagccccataaagatctgtgaccggcagccccagacctgcctgccttcctgacttctgttccagagcaaaggtcattcagccgcttgaatcagccttttccccccacccggtccccaactttgtttacccgataaggaaggtcagcattcaaagtcaagaagcgccatttatcttcccgtgcgctctacaaatagttccgtgagaaagatggccgggaactcgatcctgctggctgctgtctctattctctcggcctgtcagcaaagttattttgctttgcaagttggaaaggcaagattaaaatacaaagttacgcccccagcagtcactgggtcaccagagtttgagagagtatttcgggcacaacaaaactgtgtggagttttatcctatattcataattacattgtggatggctgggtggtatttcaaccaagtttttgctacttgtctgggtctggtgtacatatatggccgtcacctatacttctggggatattcagaagctgctaaaaaacggatcaccggtttccgactgagtctggggattttggccttgttgaccctcctaggtgccctgggaattgcaaacagctttctggatgaatatctggacctcaatattgccaagaaactgaggcggcaattctaactttttctcttccctttaatgcttgcagaagctgttcccaccatgaaggtaatatggtatcatttgttaaataaaaataaagtctttattctgtttttcttgaaaaaaaaaaaaacaaaggacaagaagaacaaaaaagagcgggaaaaaacaagaggacaacaacaagaacatgtcgcggggcgcatgaggcccgcggaaacgacttcacaaaaactcagagataggcagcagcaccacaacaaaagagagaacaaaacagggaaagaagtactcccaagaaaactggggcaacaaatagggaggagcacaaccagcaagagaacaccgcgcgggaacccgggtgatagaaaaccacaggggggacagggcaaacgggcctcaacaaggagccacggagacataaaaagccg

SEQ ID NO: 107313 - DNA, 735 bp, Homo sapiens
agggctggtcccacagtgagctacagccctgcccgctggccgtgggagaggcttaaaacaaacgccggaagcaactcccagccccataaagatctgtgaccggcagccccagacctgcctgccttcctgacttctgttccagagcaaaggtcattcagccgcttgaatcagccttttccccccacccggtccccaactttgtttacccgataaggaaggtcagcattcaaagtcaagaagcgccatttatcttcccgtgcgctctacaaatagttccgtgagaaagatggccgggaactcgatcctgctggctgctgtctctattctctcggcctgtcagcaaaacaaaactgtgtggagttttatcctatattcataattacattgtggatggctgggtggtatttcaaccaagtttttgctacttgtctgggtctggtgtacatatatggccgtcacctatacttctggggatattcagaagctgctaaaaaacggatcaccggtttccgactgagtctggggattttggccttgttgaccctcctaggtgccctgggaattgcaaacagctttctggatgaatatctggacctcaatattgccaagaaactgaggcggcaattctaactttttctcttccctttaatgcttgcagaagctgttcccaccatgaaggtaatatggtatcatttgttaaataaaaataaagtctttattctgtttttcttgaaa

SEQ ID NO: 107314 - DNA, 916 bp, Homo sapiens
agggctggtcccacagtgagctacagccctgcccgctggccgtgggagaggcttaaaacaaacgccggaagcaactcccagccccataaagatctgtgaccggcagccccagacctgcctgccttcctgacttctgttccagagcaaaggtcattcagccgcttgaatcagccttttccccccacccggtccccaactttgtttacccgataaggaaggtcagcattcaaagtcaagaagcgccatttatcttcccgtgcgctctacaaatagttccgtgagaaagatggccgggaactcgatcctgctggctgctgtctctattctctcggcctgtcagcaaagttattttgctttgcaagttggaaaggcaagattaaaatacaaagttacgcccccagcagtcactgggtcaccagagtttgagagagtatttcgggcacagtggacctggacatctcatcagcgtcacttcaaggttcactgatcctaaaggactgtttcttgttggaaggtcatctcaggacaaaactgtgtggagttttatcctatattcataattacattgtggatggctgggtggtatttcaaccaagtttttgctacttgtctgggtctggtgtacatatatggccgtcacctatacttctggggatattcagaagctgctaaaaaacggatcaccggtttccgactgagtctggggattttggccttgttgaccctcctaggtgccctgggaattgcaaacagctttctggatgaatatctggacctcaatattgccaagaaactgaggcggcaattctaactttttctcttccctttaatgcttgcagaagctgttcccaccatgaaggtaatatggtatcatttgttaaataaaaataaagtctttattctgtttttcttgaaa

SEQ ID NO: 107315 - DNA, 835 bp, Homo sapiens
agggctggtcccacagtgagctacagccctgcccgctggccgtgggagaggcttaaaacaaacgccggaagcaactcccagccccataaagatctgtgaccggcagccccagacctgcctgccttcctgacttctgttccagagcaaaggtcattcagccgcttgaatcagccttttccccccacccggtccccaactttgtttacccgataaggaaggtcagcattcaaagtcaagaagcgccatttatcttcccgtgcgctctacaaatagttccgtgagaaagatggccgggaactcgatcctgctggctgctgtctctattctctcggcctgtcagcaaagttattttgctttgcaagttggaaaggcaagattaaaatacaaagttacgcccccagcagtcactgggtcaccagagtttgagagagtatttcgggcacaacaaaactgtgtggagttttatcctatattcataattacattgtggatggctgggtggtatttcaaccaagtttttgctacttgtctgggtctggtgtacatatatggccgtcacctatacttctggggatattcagaagctgctaaaaaacggatcaccggtttccgactgagtctggggattttggccttgttgaccctcctaggtgccctgggaattgcaaacagctttctggatgaatatctggacctcaatattgccaagaaactgaggcggcaattctaactttttctcttccctttaatgcttgcagaagctgttcccaccatgaaggtaatatggtatcatttgttaaataaaaataaagtctttattctgtttttcttgaaa

SEQ ID NO: 107316 - DNA, 446 bp, Homo sapiens
  misc_feature (53)..(53): n is a, c, g, or t
gcccgactatttttttcttccccacaccatatataccgaacacgcccccctantcacaaaactgtgtggagttttatcctatattcataattacattgtggatggctgggtggtatttcaaccaagtttttgctacttgtctgggtctggtgtacatatatggccgtcacctatacttctggggatattcagaagctgctaaaaaacggatcaccggtttccgactgagtctggggattttggccttgttgaccctcctaggtgccctgggaattgcaaacagctttctggatgaatatctggacctcaatattgccaagaaactgaggcggcaattctaactttttctcttccctttaatgcttgcagaagctgttcccaccatgaaggtaatatggtatcatttgttaaataaaaataaagtctttattctgtttttcttgaaa

SEQ ID NO: 107317 - DNA, 188 bp, Homo sapiens
atgtaatttccttgccacatgctgaaatccatcagttgccccagaagtgtcatactttttattagaaaatggcatttgaggccgggcacggtggctcatgcctgtaatcccagcactttgggaggccgaggcaggtggatcacttgaggtcaagagttcgagaccagcctgaccaacatagtggaacc

SEQ ID NO: 107318 - DNA, 2467 bp, Homo sapiens
gcaatgcaccgcacaccctttactggccggccccgcgctgctctcctaagaccccgcgggccagcgccgcgaccccttcccagcgctcctcgcgctgtgtgcggcgcgtcctctcgccggtgacccggtgtgcgtggggtcgaggcgccgggcggagtggctccgggccgaaacgccatgcggaggggcgagcgcagggacgccggaggtccgcggcccgagtccccggtgcccgcgggcagggcctcgctggaggagccgcctgacgggccgtctgccggccaagccaccgggccgggcgagggccgccgcagcaccgagtccgaggtctacgacgacggcaccaacaccttcttctggcgagcccacaccttaaccgtgctcttcatcctcacctgtacgcttggctatgtgacgctgctggaggaaacacctcaggacacggcctacaacaccaagagaggtattgtggccagtattttggttttcttatgttttggagtcacacaagctaaagacgggccattttccagacctcatccagcttactggaggttttggctctgcgtgagtgtggtctacgagctgtttctcatctttatactcttccagactgtccaggacggccggcagtttctaaagtatgttgaccccaagctgggagtcccactgccagagagagactacgggggaaactgcctcatctacgacccagacaatgagactgacccctttcacaacatctgggacaagttggatggctttgttcccgcgcactttcttggctggtacctgaagaccctgatgatccgagactggtggatgtgcatgatcatcagcgtgatgttcgagttcctggagtacagcctggagcaccagctgcccaacttcagcgagtgctggtgggatcactggatcatggacgtgctcgtctgcaacgggctgggcatctactgcggcatgaagacccttgagtggctgtccctgaagacgtacaagtggcagggcctctggaacattccgacctacaagggcaagatgaagaggatcgccttccagttcacgccgtacagctgggttcgcttcgagtggaagccggcctccagcctgcgtcgctggctggccgtgtgcggcatcatcctggtgttcctgttggcagaactgaacacgttctacctgaagtttgtgctgtggatgcccccggagcactacctggtcctcctgcggctcgtcttcttcgtgaacgtgggtggcgtggccatgcgtgagatctacgacttcatggatgacccgaagccccacaagaagctgggcccgcaggcctggctggtggcggccatcacggccacggagctgctcatcgtggtgaagtacgacccccacacgctcaccctgtccctgcccttctacatctcccagtgctggaccctcggctccgtcctggcgctcacctggaccgtctggcgcttcttcctgcgggacatcacattgaggtacaaggagacccggtggcagaagtggcagaacaaggatgaccagggcagcaccgtcggcaacggggaccagcacccactggggctggacgaagacctgctggggcctggggtggccgagggcgagggagcaccaactccaaactgacctgggccgtggctgcctcgtgagcctcccagagcccaggcctccgtggcctcctcctgtgtgagtcccaccaggagccacgtgcccggccttgccctcaaggttttttgcttttctcctgtgcacctggcgaggctgaaggcgaggggtggaggaggccccagcacagcctcatctccatgtgtacacgtgtgtacgtgtgtatgcgtgtgtgtacgcgtgtgtacgcgcgtgtgtacacatgcgtggccgcctgtggtgtgcacgtgtgctctgggctccgaggcttctccagagctgggagctggctggcgtggcaagggcatgctctggggcagtgtgtccctcaggaaccagggtcctccctcccctttctgcctggtcagccccgtggcctctggcccaccaagctccctgtcacccagccatggtgtggtccaggcagggacatctcggtaccctttctgcactccgtgggccctgggtgcgctgaggcctggaggcgtctacactggctccacatccacttcccccgcagctcgtgtgggcgctcgtccacaaacactccgtggctgagaggcagcggatccaggcagcgatgctgagccacctcctccgagccttcctttcacacagaccaccccggaggacacgtggatgatggggtcagagatcactgagctgcccctcaagggggcctggaacccgggtgctggggtcatgctgcctccgtggctccaaggtgagggtcatcttcacgagcaaagagaaccaataaagtgacaacgaacgtctgaggcttccagccctccccccaaaaaaaagt

SEQ ID NO: 107319 - DNA, 579 bp, Homo sapiens
gcaatgcaccgcacaccctttactggccggccccgcgctgctctcctaagaccccgcgggccagcgccgcgaccccttcccagcgctcctcgcgctgtgtgcggcgcgtcctctcgccggtgacccggtgtgcgtggggtcgaggcgccgggcggagtggctccgggccgaaacgccatgcggaggggcgagcgcagggacgccggaggtccgcggcccgagtccccggtgcccgcgggcagggcctcgctggaggagccgcctgacgggccgtctgccggccaagccaccgggccgggcgagggccgccgcagcaccgagtccgaggtctacgacgacggcaccaacaccttcttctggcgagcccacaccttaaccgtgctcttcatcctcacctgtacgcttggctatgtgacgctgctggaggaaacacctcaggacacggcctacaacaccaagaggtttgtctccacaggcaggcaggctagaccttgggtgtgtcctctgcctgaattccatggattctgacgccagtctcagaagtgcgtgtggaagagaagctggttttagagcctgtga

SEQ ID NO: 107320 - DNA, 2692 bp, Homo sapiens
agatgatcctactgcctcggctcccaaagctctggaattacaggcacaaatagtttacatttcatggaggcaagtcctgggcaacatgctttaagtgcatgttcacttaattttcatgatgtccttggaagtcagaagcttccccatttagatatgaggaaactgaggcacggaggggtgcatcatctctccaaggacacactccagtggatgtaggacctgggttagacgtgaggacacactccggtgaatgtaggacctgggttagacgtgaggggacactccggtggatgtcggacctgggttagacgtgaggacacactccggtggatgtcggacctgggttagacgtgaggacacactccggtggatgtcggacctgggttagacgtgaggacacactccggtggatgtcggacctgggttagacgtgaggacacactccggtggatgtcggacctgggttagacgtgaggacacactccggtggatgtcggacctgggttagacgtgaggacacactccggtggatgtcggacctgggttagaacgtgaggacacactccggtggatgtcggacctgggcgagcccacaccttaaccgtgctcttcatcctcacctgtacgcttggctatgtgacgctgctggaggaaacacctcaggacacggcctacaacaccaagagaggtattgtggccagtattttggttttcttatgttttggagtcacacaagctaaagacgggccattttccagacctcatccagcttactggaggttttggctctgcgtgagtgtggtctacgagctgtttctcatctttatactcttccagactgtccaggacggccggcagtttctaaagtatgttgaccccaagctgggagtcccactgccagagagagactacgggggaaactgcctcatctacgacccagacaatgagactgacccctttcacaacatctgggacaagttggatggctttgttcccgcgcactttcttggctggtacctgaagaccctgatgatccgagactggtggatgtgcatgatcatcagcgtgatgttcgagttcctggagtacagcctggagcaccagctgcccaacttcagcgagtgctggtgggatcactggatcatggacgtgctcgtctgcaacgggctgggcatctactgcggcatgaagacccttgagtggctgtccctgaagacgtacaagtggcagggcctctggaacattccgacctacaagggcaagatgaagaggatcgccttccagttcacgccgtacagctgggttcgcttcgagtggaagccggcctccagcctgcgtcgctggctggccgtgtgcggcatcatcctggtgttcctgttggcagaactgaacacgttctacctgaagtttgtgctgtggatgcccccggagcactacctggtcctcctgcggctcgtcttcttcgtgaacgtgggtggcgtggccatgcgtgagatctacgacttcatggatgacccgaagccccacaagaagctgggcccgcaggcctggctggtggcggccatcacggccacggagctgctcatcgtggtgaagtacgacccccacacgctcaccctgtccctgcccttctacatctcccagtgctggaccctcggctccgtcctggcgctcacctggaccgtctggcgcttcttcctgcgggacatcacattgaggtacaaggagacccggtggcagaagtggcagaacaaggatgaccagggcagcaccgtcggcaacggggaccagcacccactggggctggacgaagacctgctggggcctggggtggccgagggcgagggagcaccaactccaaactgacctgggccgtggctgcctcgtgagcctcccagagcccaggcctccgtggcctcctcctgtgtgagtcccaccaggagccacgtgcccggccttgccctcaaggttttttgcttttctcctgtgcacctggcgaggctgaaggcgaggggtggaggaggccccagcacagcctcatctccatgtgtacacgtgtgtacgtgtgtatgcgtgtgtgtacgcgtgtgtacgcgcgtgtgtacacatgcgtggccgcctgtggtgtgcacgtgtgctctgggctccgaggcttctccagagctgggagctggctggcgtggcaagggcatgctctggggcagtgtgtccctcaggaaccagggtcctccctcccctttctgcctggtcagccccgtggcctctggcccaccaagctccctgtcacccagccatggtgtggtccaggcagggacatctcggtaccctttctgcactccgtgggccctgggtgcgctgaggcctggaggcgtctacactggctccacatccacttcccccgcagctcgtgtgggcgctcgtccacaaacactccgtggctgagaggcagcggatccaggcagcgatgctgagccacctcctccgagccttcctttcacacagaccaccccggaggacacgtggatgatggggtcagagatcactgagctgcccctcaagggggcctggaacccgggtgctggggtcatgctgcctccgtggctccaaggtgagggtcatcttcacgagcaaagagaaccaataaagtgacaacgaacgtctgaggcttccagccctccccccaaaaaaaagt

SEQ ID NO: 107321 - DNA, 1486 bp, Homo sapiens
cagggttcggtgggctgccttcctcaggctgccggctctgtggttcccaggggcaagatgaagaggatcgccttccagttcacgccgtacagctgggttcgcttcgagtggaagccggcctccagcctgcgtcgctggctggccgtgtgcggcatcatcctggtgttcctgttggcagaactgaacacgttctacctgaagtttgtgctgtggatgcccccggagcactacctggtcctcctgcggctcgtcttcttcgtgaacgtgggtggcgtggccatgcgtgagatctacgacttcatggatgacccgaagccccacaagaagctgggcccgcaggcctggctggtggcggccatcacggccacggagctgctcatcgtggtgaagtacgacccccacacgctcaccctgtccctgcccttctacatctcccagtgctggaccctcggctccgtcctggcgctcacctggaccgtctggcgcttcttcctgcgggacatcacattgaggtacaaggagacccggtggcagaagtggcagaacaaggatgaccagggcagcaccgtcggcaacggggaccagcacccactggggctggacgaagacctgctggggcctggggtggccgagggcgagggagcaccaactccaaactgacctgggccgtggctgcctcgtgagcctcccagagcccaggcctccgtggcctcctcctgtgtgagtcccaccaggagccacgtgcccggccttgccctcaaggttttttgcttttctcctgtgcacctggcgaggctgaaggcgaggggtggaggaggccccagcacagcctcatctccatgtgtacacgtgtgtacgtgtgtatgcgtgtgtgtacgcgtgtgtacgcgcgtgtgtacacatgcgtggccgcctgtggtgtgcacgtgtgctctgggctccgaggcttctccagagctgggagctggctggcgtggcaagggcatgctctggggcagtgtgtccctcaggaaccagggtcctccctcccctttctgcctggtcagccccgtggcctctggcccaccaagctccctgtcacccagccatggtgtggtccaggcagggacatctcggtaccctttctgcactccgtgggccctgggtgcgctgaggcctggaggcgtctacactggctccacatccacttcccccgcagctcgtgtgggcgctcgtccacaaacactccgtggctgagaggcagcggatccaggcagcgatgctgagccacctcctccgagccttcctttcacacagaccaccccggaggacacgtggatgatggggtcagagatcactgagctgcccctcaagggggcctggaacccgggtgctggggtcatgctgcctccgtggctccaaggtgagggtcatcttcacgagcaaagagaaccaataaagtgacaacgaacgtctgaggcttccagccctccccccaaaaaaaagt

SEQ ID NO: 107322 - DNA, 729 bp, Homo sapiens
actgtgttacccagtctggtcctgaacgcctgggctcaagcaatcctcttgtctcagcctcccaaagcgttgggactacagacgcgtgcagcctacaaagttttatcagatatatgtattgtgaatattttctcccagtttgtgacttgccttttcatttctttagggcacaaatagtttacatttcatggaggcaagtcctgggcaacatgctttaagtgcatgttcacttaattttcatgatgtccttggaagtcagaagcttccccatttagatatgaggaaactgaggcacggaggggtgcatcatctctccaaggacacactccagtggatgtaggacctgggttagacgtgaggacacactccggtgaatgtaggacctgggttagacgtgaggggacactccggtggatgtcggacctgggttagacgtgaggacacactccggtggatgtcggacctgggttagacgtgaggacacactccggtggatgtcggacctgggttagacgtgaggacacactccggtggatgtcggacctgggttagacgtgaggacacactccggtggatgtcggacctgggttagacgtgaggacacactccggtggatgtcggacctgggttagacgtgaggacacactccggtggatgtcggacctgggttagaacgtgaggacacactccggtggatgtcggacctgggttagacgtgaggacacactc

SEQ ID NO: 107323 - DNA, 1989 bp, Homo sapiens
gcaatgcaccgcacaccctttactggccggccccgcgctgctctcctaagaccccgcgggccagcgccgcgaccccttcccagcgctcctcgcgctgtgtgcggcgcgtcctctcgccggtgacccggtgtgcgtggggtcgaggcgccgggcggagtggctccgggccgaaacgccatgcggaggggcgagcgcagggacgccggaggtccgcggcccgagtccccggtgcccgcgggcagggcctcgctggaggagccgcctgacgggccgtctgccggccaagccaccgggccgggcgagggccgccgcagcaccgagtccgaggtctacgacgacggcaccaacaccttcttctggcgagcccacaccttaaccgtgctcttcatcctcacctgtacgcttggctatgtgacgctgctggaggaaacacctcaggacacggcctacaacaccaagagaggtattgtggccagtattttggttttcttatgttttggagtcacacaagctaaagacgggccattttccagacctcatccagcttactggaggttttggctctgcgtgagtgtggtctacgagctgtttctcatctttatactcttccagactgtccaggacggccggcagtttctaaagtatgttgaccccaagctgggagtcccactgccagagagagactacgggggaaactgcctcatctacgacccagacaatgagactgacccctttcacaacatctgggacaagttggatggctttgttcccgcgcactttcttggctggtacctgaagaccctgatgatccgagactggtggatgtgcatgatcatcagcgtgatgttcgagttcctggagtacagcctggagcaccagctgcccaacttcagcgagtgctggtgggatcactggatcatggacgtgctcgtctgcaacgggctgggcatctactgcggcatgaagacccttgagtggctgtccctgaagacgtacaagtggcagggcctctggaacattccgacctacaagggcaagatgaagaggatcgccttccagttcacgccgtacagctgggttcgcttcgagtggaagccggcctccagcctgcgtcgctggctggccgtgtgcggcatcatcctggtgttcctgttggcagaactgaacacgttctacctgaagtttgtgctgtggatgcccccggagcactacctggtcctcctgcggctcgtcttcttcgtgaacgtgggtggcgtggccatgcgtgagatctacgacttcatggatgacccgaagccccacaagaagctgggcccgcaggcctggctggtggcggccatcacggccacggagctgctcatcgtggtgaagtacgacccccacacgctcaccctgtccctgcccttctacatctcccagtgctggaccctcggctccgtcctggcgctcacctggaccgtctggcgcttcttcctgcgggacatcacattgaggtacaaggagacccggtggcagaagtggcagaacaaggatgaccagggcagcaccgtcggcaacggggaccagcacccactggggctggacgaagacctgctggggcctggggtggccgagggcgagggagcaccaactccaaactgacctgggccgtggctgcctcgtgagcctcccagagcccaggcctccgtggcctcctcctgtctcgtgtgggcgctcgtccacaaacactccgtggctgagaggcagcggatccaggcagcgatgctgagccacctcctccgagccttcctttcacacagaccaccccggaggacacgtggatgatggggtcagagatcactgagctgcccctcaagggggcctggaacccgggtgctggggtcatgctgcctccgtggctccaaggtgagggtcatcttcacgagcaaagagaaccaataaagtgacaacgaacgtctgaggcttccagccctccccccaaaaaaaagt

SEQ ID NO: 107324 - DNA, 2576 bp, Homo sapiens
gcaatgcaccgcacaccctttactggccggccccgcgctgctctcctaagaccccgcgggccagcgccgcgaccccttcccagcgctcctcgcgctgtgtgcggcgcgtcctctcgccggtgacccggtgtgcgtggggtcgaggcgccgggcggagtggctccgggccgaaacgccatgcggaggggcgagcgcagggacgccggaggtccgcggcccgagtccccggtgcccgcgggcagggcctcgctggaggagccgcctgacgggccgtctgccggccaagccaccgggccgggcgagggccgccgcagcaccgagtccgaggtctacgacgacggcaccaacaccttcttctgctgcgaccctgggctggccctttgccgatgctcctctgtgagaaggatcaagccgtcgacctgaaagcaggcttcgtgagaggagggtttggctcttcttgactgcaaggcgagcccacaccttaaccgtgctcttcatcctcacctgtacgcttggctatgtgacgctgctggaggaaacacctcaggacacggcctacaacaccaagagaggtattgtggccagtattttggttttcttatgttttggagtcacacaagctaaagacgggccattttccagacctcatccagcttactggaggttttggctctgcgtgagtgtggtctacgagctgtttctcatctttatactcttccagactgtccaggacggccggcagtttctaaagtatgttgaccccaagctgggagtcccactgccagagagagactacgggggaaactgcctcatctacgacccagacaatgagactgacccctttcacaacatctgggacaagttggatggctttgttcccgcgcactttcttggctggtacctgaagaccctgatgatccgagactggtggatgtgcatgatcatcagcgtgatgttcgagttcctggagtacagcctggagcaccagctgcccaacttcagcgagtgctggtgggatcactggatcatggacgtgctcgtctgcaacgggctgggcatctactgcggcatgaagacccttgagtggctgtccctgaagacgtacaagtggcagggcctctggaacattccgacctacaagggcaagatgaagaggatcgccttccagttcacgccgtacagctgggttcgcttcgagtggaagccggcctccagcctgcgtcgctggctggccgtgtgcggcatcatcctggtgttcctgttggcagaactgaacacgttctacctgaagtttgtgctgtggatgcccccggagcactacctggtcctcctgcggctcgtcttcttcgtgaacgtgggtggcgtggccatgcgtgagatctacgacttcatggatgacccgaagccccacaagaagctgggcccgcaggcctggctggtggcggccatcacggccacggagctgctcatcgtggtgaagtacgacccccacacgctcaccctgtccctgcccttctacatctcccagtgctggaccctcggctccgtcctggcgctcacctggaccgtctggcgcttcttcctgcgggacatcacattgaggtacaaggagacccggtggcagaagtggcagaacaaggatgaccagggcagcaccgtcggcaacggggaccagcacccactggggctggacgaagacctgctggggcctggggtggccgagggcgagggagcaccaactccaaactgacctgggccgtggctgcctcgtgagcctcccagagcccaggcctccgtggcctcctcctgtgtgagtcccaccaggagccacgtgcccggccttgccctcaaggttttttgcttttctcctgtgcacctggcgaggctgaaggcgaggggtggaggaggccccagcacagcctcatctccatgtgtacacgtgtgtacgtgtgtatgcgtgtgtgtacgcgtgtgtacgcgcgtgtgtacacatgcgtggccgcctgtggtgtgcacgtgtgctctgggctccgaggcttctccagagctgggagctggctggcgtggcaagggcatgctctggggcagtgtgtccctcaggaaccagggtcctccctcccctttctgcctggtcagccccgtggcctctggcccaccaagctccctgtcacccagccatggtgtggtccaggcagggacatctcggtaccctttctgcactccgtgggccctgggtgcgctgaggcctggaggcgtctacactggctccacatccacttcccccgcagctcgtgtgggcgctcgtccacaaacactccgtggctgagaggcagcggatccaggcagcgatgctgagccacctcctccgagccttcctttcacacagaccaccccggaggacacgtggatgatggggtcagagatcactgagctgcccctcaagggggcctggaacccgggtgctggggtcatgctgcctccgtggctccaaggtgagggtcatcttcacgagcaaagagaaccaataaagtgacaacgaacgtctgaggcttccagccctccccccaaaaaaaagt

SEQ ID NO: 107325 - DNA, 2031 bp, Homo sapiens
gcaatgcaccgcacaccctttactggccggccccgcgctgctctcctaagaccccgcgggccagcgccgcgaccccttcccagcgctcctcgcgctgtgtgcggcgcgtcctctcgccggtgacccggtgtgcgtggggtcgaggcgccgggcggagtggctccgggccgaaacgccatgcggaggggcgagcgcagggacgccggaggtccgcggcccgagtccccggtgcccgcgggcagggcctcgctggaggagccgcctgacgggccgtctgccggccaagccaccgggccgggcgagggccgccgcagcaccgagtccgaggtctacgacgacggcaccaacaccttcttctggcgagcccacaccttaaccgtgctcttcatcctcacctgtacgcttggctatgtgacgctgctggaggaaacacctcaggacacggcctacaacaccaagagaggtattgtggccagtattttggttttcttatgttttggagtcacacaagctaaagacgggccattttccagacctcatccagcttactggaggttttggctctgcgtgagtgtggtctacgagctgtttctcatctttatactcttccagactgtccaggacggccggcagtttctaaagtatgttgaccccaagctgggagtcccactgccagagagagactacgggggaaactgcctcatctacgacccagacaatgagactgacccctttcacaacatctgggacaagttggatggctttgttcccgcgcactttcttggctggtacctgaagaccctgatgatccgagactggtggatgtgcatgatcatcagcgtgatgttcgagttcctggagtacagcctggagcaccagctgcccaacttcagcgagtgctggtgggatcactggatcatggacgtgctcgtctgcaacgggctgggcatctactgcggcatgaagacccttgagtggctgtccctgaagacgtacaagtggcagggcctctggaacattccgacctacaagggcaagatgaagaggatcgccttccagttcacgccgtacagctgggttcgcttcgagtggaagccggcctccagcctgcgtcgctggctggccgtgtgcggcatcatcctggtgttcctgttggcagaactgaacacgttctacctgaagtttgtgctgtggatgcccccggagcactacctggtcctcctgcggctcgtcttcttcgtgaacgtgggtggcgtggccatgcgtgagatctacgacttcatggatgacccgaagccccacaagaagctgggcccgcaggcctggctggtggcggccatcacggccacggagctgctcatcgtggtgaagtacgacccccacacgctcaccctgtccctgcccttctacatctcccagtgctggaccctcggctccgtcctggcgctcacctggaccgtctggcgcttcttcctgcgggacatcacattgaggtacaaggagacccggtggcagaagtggcagaacaaggatgaccagggcagcaccgtcggcaacggggaccagcacccactggggctggacgaagacctgctggggcctggggtggccgagggcgagggagcaccaactccaaactgacctgggccgtggctgcctcgtgagcctcccagagcccaggcctccgtggcctcctcctgtgtgagtcccaccaggagccacgtgcccggccttgccctcaagctcgtgtgggcgctcgtccacaaacactccgtggctgagaggcagcggatccaggcagcgatgctgagccacctcctccgagccttcctttcacacagaccaccccggaggacacgtggatgatggggtcagagatcactgagctgcccctcaagggggcctggaacccgggtgctggggtcatgctgcctccgtggctccaaggtgagggtcatcttcacgagcaaagagaaccaataaagtgacaacgaacgtctgaggcttccagccctccccccaaaaaaaagt

SEQ ID NO: 107326 - DNA, 253 bp, Homo sapiens
ggttcgcttcgagtggaagccggcctccagcctgcgtcgctggctggccgtgtgcggcatcatcctggtggtaaggccgggctgcctcgcgacggcgcggcgggcggggggccagagctggtgctcaccctctcctcccctagttcctgttggcagaactgaacacgttctacctgaagtttgtgctgtggatgcccccggagcactacctggtcctcctgcggctcgtcttcttcgtgaacgtgggtggcgt

SEQ ID NO: 107327 - DNA, 374 bp, Homo sapiens
ttgaaaggagtggtagaaacagagggggcagcagcctggaggcttgatccacggctacagggaagaagggtcagaggaaaggtttctggtgcccttgaagtctcccaggctcctcaaaacccagggagtaaaaaagcagaggagaggtcatgcacacagggcagagggcactcgggcctcgcggcactcctggggcacaggcttcagaagcttccgcttaggaatctgagaatggttttccactgagacagatgtgagaggaaaaagaattcctaggtctctccactcagaagtcggaggaaactttcagaaatgtaaagtgggtcatctcatgtgctgctttaaactcttcctagcttcttgctgctctcaga

SEQ ID NO: 107328 - DNA, 258 bp, Homo sapiens
tccttttcactgctgtgtgatatcccattgtaggcaaatagtacacaatatttatttattttccagatgggatctcattctgtcacccaggcttgtagtgcagtgaccccatcacgattcactgcagccttgaactcctgggctcaagcaatcctcctgcctcagcctcctgagttgctaaggccacaaatatttatccattttactgctaatgcaatttgagctgttttcaactttttcctattaaaacattattgc

SEQ ID NO: 107329 - DNA, 449 bp, Homo sapiens
taatctcctcgattcaggctagcaacaaaaagacacaaatagtagtgctccccaaacttcagtgtgctctgaatcccctaaagatcttattaaaatgcagattccgattcagtagatctctggtacggcctgagatgctgctgttctgtgaaccttgcttgactagcaagggatcatctaaagattctaaccacgtgcctggctgcccacctgggactaatgaccactaacaaccttaaaatcaaggtacattttctacagccagtttctcagatgttccaaccccataactgacctaccggaaatgtacgcctgcaataccattaacagtgggggagaaaattatggaactggaaactgtatttaaaaaaaatgttgaaaatgaagcacagagagctaagtagatgaaaatagggaagtttaaaaaactcaaagagatttaaaaaaac

SEQ ID NO: 107330 - DNA, 921 bp, Homo sapiens
ggactattttagaagaaatggagctgtcacccacatcaagattcagaacactggtgattactatgacctgtatggaggggagaaatttgccactttggctgagttggtccagtattacatggaacatcacgggcaattaaaagagaagaatggagatgtcattgagcttaaatatcctctgaactgtgcagatcctacctctgaaaggtggtttcatggacatctctctgggaaagaagcagagaaattattaactgaaaaaggaaaacatggtagttttcttgtacgagagagccagagccaccctggagattttgttctttctgtgcgcactggtgatgacaaaggggagagcaatgacggcaagtctaaagtgacccatgttatgattcgctgtcaggaactgaaatacgacgttggtggaggagaacggtttgattctttgacagatcttgtggaacattataagaagaatcctatggtggaaacattgggtacagtactacaactcaagcagccccttaacacgactcgtataaatgctgctgaaatagaaagcagagttcgagaactaagcaaattagctgagaccacagataaagtcaaacaaggcttttgggaagaatttgagacactacaacaacggagtgcaaacttctctacagcgaaagaggtcaaggcacgaaaacacaagagaaaaaaaaccgggatcaatgccgggggccgaaacagaggtaatgaaggccatggctagggtcctggccagtttctgtcacagggtcgattgcgccctaaggagaggctaatccgaaccggtacggtgaagccgcacgaacaacggaagacaccaacagtacatatacaaaagaggacaacccactcaacaccaaaaacacgagagaaccacatctacatgcacaa

SEQ ID NO: 107331 - DNA, 265 bp, Homo sapiens
gttgagtgtctgcccagtgagaggatgaatggatgaacgtgaattcattctttaaaaataaaactagaacttcattagaataatgagatgcctggaggggtggaccaagggatggagacagatgtgagaaagcaggcacagcgaaatgcgaagggtggaatcaagctggtgcgtgtccaggcataaaattctttcaactctgctgcacgttcaaaagaaaaatgctggcggaagaccttgagcatcctccatgctgacatgtaac

SEQ ID NO: 107332 - DNA, 428 bp, Homo sapiens
ctagagatgtgaatgaggaggtcattagcatatttatggtatctaaagccatgaggtccctaaggcagtcagtatagataggcaagaaaaatattttagaccagagttttggtgctccagtaaaatattttccattattttatctcaatgatttttatgtttcattatgaacttttattcaatatttggcttaacttaaaatgtttttctattcccttctagaacttcagctcacttaaaaaatttttctgttttgtttggtatactgtattatgtatttaatggagaagaaaaatcttagacaaattaaatttaacgtaggttacttgagaaacgaattattcttaaattgggaagcccctgaaccagcacaggttcagaactccagtgctgcacatggtggaagatttatggacagaaaaaagaaa

SEQ ID NO: 107333 - DNA, 441 bp, Homo sapiens
gttagtggctggcaactaattaggtgactggcaactaaaatttcttatctgttgcaagagtatctcctatttataatggttatccagttgtttatgtacaaataaacgtttttataagatactttaagaaaagaagttatttttctttaaaaaggagttctgttctttttaaaatggaatctgacaggatcttttgtttttaagaagtttcattctttttttaagcaaaaactacagcttggagttttttaaatacatagtgaatgttttgaccaaatacatgtaattttacttaaactattttaacaatgacttttctaagtggaagaccctaatagaaattgacatgtcctagtcagtgatatggactgagaacttgataacaaatcccactgctggctactaagaagctttatcgggtttaatagggaaaagccttgt

SEQ ID NO: 107334 - DNA, 599 bp, Homo sapiens
atttttggatgcacttttgatgggacccaacaagagatgatttgtttatttgggaagaatcctggcatgcagtgaggagcacctttgtagctagaacatgcttagattttggtattcttgaaaatgtggcctcctccccaatgccagtgtaaaggattaaaaaaaaaacaaaaaaacacatctcaaaccttggcatttattgaatattaacaggccaggcaccaaagcattattcagcattgacacttaaacttttctgtattgattattattattattattattttttgagacaggatctcactctcttgcccaggctggagtacagtgacataatcttggctcactacaacttgtgcctcccaggctcaagtgattctcttgcctcagtcttttgagtagctgggactacaagctcgcaccaccacacccgtctctactaaaagtacaaaaaaaattagctgggcatggtggcgggcgcctgtagtcccagctactcggcaggctgaggcaggagaatagcgtgaacctgggaggcagagcttgcagtgagccaagatcgcaccactgcactccagcctgggcgacagagcgagact

SEQ ID NO: 107335 - DNA, 315 bp, Homo sapiens
agccctctctcccacccagagctgcttcttgtgccctctgccagaggatggcaatgtcacaggagcaagggagctgcacaatgcccagaggtttatgaaaatacgtatctgaaaaagggaatgctgtgcagagagtggtcgtgtgggcaggcctggtgcatgggagcaattagagctctgggtgggagagagggctccgccaattttccctgtgtgaatgagcaacacagaccccatgtccaagggggtagcaggatgcaggctcagcagggccttgaaaccaaataaaacatttgtggggtgggtggagagcgg

SEQ ID NO: 107336 - DNA, 362 bp, Homo sapiens
atttattttttgagatggagtcattctgtcacccagcctggagtgcaatggcacagtctcagctcactgcaacctccacctgccaggctcaagcgattgtcctgcctcagcctcctgagtagctgggactacaggcatgcaccaacacacctggctaatttttgtatttttagtagagacagggtttcaccacattggctgggctgatcttgaactcctgacctcgtgatccacccacatctgcctcccaaagtgctaaggggtgaaccaccgcacctggcccatttcccctttctttaccatatattctttacattaaatataagggtaataagtggcgggaaatggtatggtagaaaaaa

SEQ ID NO: 107337 - DNA, 180 bp, Homo sapiens
acaaagactctaattcaaaaggtctgggtagatcaaggaatcttcatttttacaagtaaccaaggttcagatttaaaaatcactgctgttaactatgaacttccaaaagtctaaatccagagaatttatcttcaaccacaccctgtgcaaaaagcatgcctgtccaaaagctggtgctca

SEQ ID NO: 107338 - DNA, 685 bp, Homo sapiens
cttgttatagaagcaggatcttttgttctgtaggaagtcacacattctggtttcatatgctcttctttaatgtgttccttcaccactcttattttttcttaagggatgctgtctctaaatttgatttaacgtaaatgtttttggcaagaatgctttgcagagggtgtctttactacgtttattaggaagcatccactattcagaacctgttttattgaagctgagattcatcattggttttggcaggtaacagactgactattccattttaaagttccatattaatttttcatgtgattgtttcttcaattgatgattgttacttaaatcaattatgtcattaagtaattgcaaaaatcatgatttctaattctgttaattattttccatttgtcaactagactttttctgtaaagaactttccctgactgactaggactgtttggagcgcacttcttttccttgacttagatttgtcctacgcaataattttagtgtggtgttttagtcccttttgtgctgctataatagaatatgtgagactgggtaacttataatgaatagaaatgtatttgtctcatggtcctagaggctgggacatctaagatcaagggtctgcatttggcaaaggcctacttgatgagtcatccaatggcagaaggataaaagacatgcacacatgagt

SEQ ID NO: 107339 - DNA, 1039 bp, Homo sapiens
catgcatatactgctatcttctactttaccagttttgcgcattagtcttacaaccatggtagatgagaacgtttctgtgtagaaccaaaccactcattcagtctcatcaccatcacccaaacatagcctatctctgttaataaaactaatagcatttacagtcatgtgactatgcaatagctgtcatgactcagtcgagtggtaccctatgagctgcctcctttcttctgcagcccttcatttttcctggacttaataattgtcttgcattttatttgatttttcatattcttactactaaatatctttctgtatcttccagtaaccactgtagagtttttcacatgatgaaaacatatggtcacacatacggtctgatagttcaggttttttctatctttatgctccagtctagactagttcctctgtaaacgtgctgtatagctctcagctgggacttcccttttgccattattctatttcctttggctgtctactatgtcacatgtttcctagatgccacattttcttctttctcaattaatcttcctagagcacatcctccagtaaattcctgcgaaaaggtgtgtgggaggcaccctttgaggcttagcatgtctgaaatgactttgttttgccttctccccagtagagaatttggaatgtgggggagggaatgataccctgttttattttgcaggagctccctcatcttccatttcttttgtggacatgatctggtgtgtctctgagattttcttctgcttttttgtattctttgctttctctgtattccttttttctagctatcctattttcttggaggttttttctttagtgttttatataaggcattctttaaatatccagtgttcctttcattgttttccactcttaggaatagagaaatgaagataatggatttaactagaagacagtggggtaaagggggggataaattggctcttaaattttctctcctgtcccacgtcattctgttcttttctataattaaatatccttagagaagaatccctgt

SEQ ID NO: 107340 - DNA, 1514 bp, Homo sapiens
taaccctggcgtttttatccagtgttaaaataaattatttcaagtttcaatgtaaacacttaacagatgacttctttgcagaagaaatgttcgttacctactatcaaactactttttaacagattttgtatatacacacacaagttgacagaggtttacctccctactttcttagattttatgtaactcttttcattggtgcttattcagaacctgaaagccttgggcatccaagctttcacctactcaatggaggagaggtgataatgaatgaaaagattgacaccaggtttcttggacaaatttaagttcaaatttatctctttcaagtagaccatggtctccctagagagtgtgttggcttgtgtctgccagtacgacaaaggacgctcccagcttgatcgtggtaccttatggaagccactcacgcattctctgatttacccccaaaacactaccatgccccagccccactcatttaaataatacaatcatatcactttcaaagggctcagcacgaatgttcccctcactccactttttaactcgtttgctgaactcgacaaggcttccccttacgagcagtgagacctaggctactttcgaacgcttccttccgaacggtaagccacttcgctctcgggcaggacaggtcctccctgcagagagagacaactcatcccccgaccttccatactacagaccaaaatacccaggtgtggcctaaggactatattaaatgcctcctatagaaattcaaggaatgttagaaccaggaaactagctgtttaaagttttaaagaagtatataaatatatatataaatataaatatgaaatcatatcgagtgtgaggatgagcagagtgccaaatattcagcatctgtacaaagtcattcactggaattcaactattttatgtcattctctttctcacgcttttatggttcttttgataaattctatttagtagcatgcaggatacctaatctgaatgtgcaatatgctattcatcaccacgacaatttcttacttcctcttaataacttaccagaatgttggtcattcctttaaggcagttaaggattgctttatttgtgttcttttttcccatgactttttttcactctcagctgactgtaagaaactgtgcaccgtttccgccataaccgtcctgtgacgatgcctccatttgacttctgtatcgctgatgttcacctcctgtaaatagtttggcaattaaattttttgagaaaagtaatgtttacttttttattggagtgaattctcgtgttattttaatctcagaaaaattatatagaccaaagagttttatccgaaaaaaaattacactcttcctccattatatatttcattgttgaaatatcctcaatttctctatattttaagaagtaatggacatttattaaggttacagatttaatatgtatgcaaaatggtatagattaaatgagtttttaattaataaatcctacagtatttagttaaaagttg

SEQ ID NO: 107341 - DNA, 1239 bp, Homo sapiens
agtgacgcgcgacggttcgtgcgtgcgtgcgggcggctgcgtcgggctgcaggagaagatggcggtctccacaggagttaaagttcctcgtaattttcgcttgttggaagaacttgaagaaggacaaaaaggagtaggcgacggtacagttagctggggccttgaagatgatgaagatatgacacttacaaggtggacaggcatgattattgggccaccaaggacaaattatgaaaacagaatatatagcctgaaagtagaatgtggacctaaatacccagaagctcctccgtcagttagatttgtaacaaaaattaatatgaacggaataaataattccagtgggatggtggatgcccggagcataccagtgttagcaaaatggcaaaattcatatagcattaaagttgtacttcaagagctaagacgtctaatgatgtccaaagaaaatatgaagcttccacagccaccagaaggacaaacatacaacaattaattttagtggatctcaaacttgtcttaaatcaacaaccttctactcatgttaatgtcttgattaaatatcacaatgcaaaatacacattaagtaaaagaattccagctggtaaacatgacctggacatttgtaagaatatatttaatatatgtacacccattatgttttcaggtaacaggaggaaaaatgcagcacaattttttttctcttgaaaggcactgtcatttaaacataaacctggagtactcgaaatagaattcaggtttacaagatgaaagcgtgtggagaagtgtcagatggcagtggaagcatgtgtgtttctaaaaagtaaaaatctcaagaaaacagaaatggcatgctttacccatcttacttagtgaaagagagctgcagttgaaattgtttaaaaagtagcaggtacaatgaatattgtcacagatgtgttaatttttgaagcaatgtgggtgctgactactagtagtatcaaaaatatgttcaggattgttttgatacctgtatttataataaaaaatgttggggggagttgatgaattcctgttaaaagctgttcttgtgtgttacatgtaacagacatggtaaatatttgtttacagtctttgtttaacaaaccatgcatttaagtttaagtgaagtcaacaaaaaggaaataggtgtatggatatgtgattttgagattaaagttagtcttaaaatgtaaataaaatgtgaaacgtgtcctcaga

SEQ ID NO: 107342 - DNA, 1227 bp, Homo sapiens
ctagaattcagcggccgctgaattctagaacgggctgcaggagaagatggcggtctccacaggagttaaagttcctcgtaattttcgcttgttggaagaacttgaagaaggacaaaaaggagtaggcgacggtacagttagctggggccttgaagatgatgaagatatgacacttacaaggtggacaggcatgattattgggccaccaaggacaaattatgaaaacagaatatatagcctgaaagtagaatgtggacctaaatacccagaagctcctccgtcagttagatttgtaacaaaaattaatatgaacggaataaataattccagtgggatggtggatgcccggagcataccagtgttagcaaaatggcaaaattcatatagcattaaagttgtacttcaagagctaagacgtctaatgatgtccaaagaaaatatgaagcttccacagccaccagaaggacaaacatacaacaattaattttagtggatctcaaacttgtcttaaatcaacaaccttctactcatgttaatgtcttgattaaatatcacaatgcaaaatacacattaagtaaaagaattccagctggtaaacatgacctggacatttgtaagaatatatttaatatatgtacacccattatgttttcaggtaacaggaggaaaaatgcagcacaattttttttctcttgaaaggcactgtcatttaaacataaacctggagtactcgaaatagaattcaggtttacaagatgaaagcgtgtggagaagtgtcagatggcagtggaagcatgtgtgtttctaaaaagtaaaaatctcaagaaaacagaaatggcatgctttacccatcttacttagtgaaagagagctgcagttgaaattgtttaaaaagtagcaggtacaatgaatattgtcacagatgtgttaatttttgaagcaatgtgggtgctgactactagtagtatcaaaaatatgttcaggattgttttgatacctgtatttataataaaaaatgttggggggagttgatgaattcctgttaaaagctgttcttgtgtgttacatgtaacagacatggtaaatatttgtttacagtctttgtttaacaaaccatgcatttaagtttaagtgaagtcaacaaaaaggaaataggtgtatggatatgtgattttgagattaaagttagtcttaaaatgtaaataaaatgtgaaacgtgtcctcaga

SEQ ID NO: 107343 - DNA, 911 bp, Homo sapiens
  misc_feature (764)..(764): n is a, c, g, or t
  misc_feature (766)..(766): n is a, c, g, or t
  misc_feature (771)..(772): n is a, c, g, or t
  misc_feature (783)..(783): n is a, c, g, or t
  misc_feature (788)..(788): n is a, c, g, or t
agtgacgcgcgacggttcgtgcgtgcgtgcgggcggctgcgtcgggctgcaggagaagatggcggtctccacaggagttaaagttcctcgtaattttcgcttgttggaagaacttgaagaaggacaaaaaggagtaggcgacggtacagttagctggggccttgaagatgatgaagatatgacacttacaaggtggacaggcatgattattgggccaccaaggctggaataattgaggaaggctgaacagtggaggaagttgcctttggaatgatccctaaaggactgactggtaggatttcagaaggtggtgatggggatggagaacattccagatagagaggagaaaagacaaattatgaaaacagaatatatagcctgaaagtagaatgtggacctaaatacccagaagctcctccgtcagttagatttgtaacaaaaattaatatgaacggaataaataattccagtgggatggtggatgcccggagcataccagtgttagcaaaatggcaaaattcatatagcattaaagttgtacttcaagagctaagacgtctaatgatgtccaaagaaaatatgaagcttccacagccaccagaaggacaaacatacaacaattaattttagtggatctcaaacttgtcttaaatcaacaaccttctactcatgttaatgtcttgattaaatatcacaatgcaaaatacacattaagtaaaagaattccagctggtaaacatgacctggacatttgtatccttttntnccccnntgtttcggtcnggganaagggccattttcttcgagggcggttaactaacgggccgaaaatcgtcaaataacgtggagtgagcggggcgcgtaacaaaccaagagggccctgagaggggagaacagacctaagggcaaag

SEQ ID NO: 107344 - DNA, 702 bp, Homo sapiens
ggatgtgaaaaatcttttttttttttttttttcagttttatgtagagactaggtatcactatgttgtccaagctggtctcaaagtcttgggttcaagccatcctcctgcctcagcctcccaaagtgttaggattacagaagtgagcttcggcgcccagcctgtattactttccttgtttctttctgttcttgttgttttttgaaatggagtctccctctgttgcccaggctggagtgcagcgatttctgctcactgcagcctcacctcttgggctcacgtgaccctcccacctcagcatccctagctgttcaaatttattgtccaactcttttgaatcgtttatcaacgcaaatctgtcaatgcccacttatttttatttatttttttgaggcggagtctcgctctgttgtccaggctggagtgcagtggcgcaatcgcggctcattgcccctccgcctccccggttcaaacgattctcgtgcctcagcctcccaaatagctgggattacaggcgcgcgccaccacgtccggctaatttttgtatttttagtagagacggggtttcgccatgttggccaggctggtttcgaactcctgacctcgggtgatccgatcgcctcggcctcccaaagtgctgggattacagacgtgagccaccgcgcccggccctcatgaacttattctttagcgtttcattttga

SEQ ID NO: 107345 - DNA, 1605 bp, Homo sapiens
  misc_feature (1249)..(1249): n is a, c, g, or t
  misc_feature (1418)..(1418): n is a, c, g, or t
agtgacgcgcgacggttcgtgcgtgcgtgcgggcggctgcgtcgggctgcaggagaagatggcggtctccacaggagttaaagttcctcgtaattttcgcttgttggaagaacttgaagaaggacaaaaaggagtaggcgacggtacagttagctggggccttgaagatgatgaagatatgacacttacaaggtggacaggcatgattattgggccaccaaggacaaattatgaaaacagaatatatagcctgaaagtagaatgtggacctaaatacccagaagctcctccgtcagttagatttgtaacaaaaattaatatgaacggaataaataattccagtgggatggtggatgcccggagcataccagtgttagcaaaatggcaaaattcatatagcattaaagttgtacttcaagagctaagacgtctaatgatgtccaaagaaaatatgaagcttccacagccaccagaaggacaaacatacaacaattaattttagtggatctcaaacttgtcttaaatcaacaaccttctactcatgttaatgtcttgattaaatatcacaatgcaaaatacacattaagtaaaagaattccagctggtaaacatgacctggacatttgtaagaatatatttaatatatgtacacccattatgttttcaggtaacaggaggaaaaatgcagcacaattttttttctcttgaaaggcactgtcatttaaacataaacctggagtactcgaaatagaattcaggtttacaagatgaaagcgtgtggagaagtgtcagatggcagtggaagcatgtgtgtttctaaaaagtaaaaatctcaagaaaacagaaatggcatgctttacccatcttacttagtgaaagagagctgcagttgaaattgtttaaaaagtagcaggtacaatgaatattgtcacagatgtgttaatttttgaagcaatgtgggtgctgactactagtagtatcaaaaatatgttcaggattgttttgatacctgtatttataataaaaaatgttggggggagttgatgaattcctgttaaaagctgttcttgtgtgttacatgtaacagacatggtaaatatttgtttacagtctttgtttaacaaaccatgcatttaagtttaagtgaagtcaacaaaaaggaaataggtgtatggatatgtgattttgagattaaagttagtcttaaaatgtaaataaaatgtgaaacgtgtcctcagaaaaaaaaaanaaaaaaaaaaaaaaaaaaaatttgggcggcgcgggcacgggcgccccgggagaagaagtctttctaaagaaaccattttgggttgggggggcgcgagcggggccccggtggaggtaacgggagaaaagggtggtccaagacggggtcccccgagggaacactcgcgggngcggcaacgacgcggcgtgggatttcccgcacaaatataaaaaagcgccgggggggggacaacacgggagcggtcctggaaaaaaaatccccagagagggggctcgcgagggcccaataacggggatcgataacaggagaggatcccaggggaagcccggaattaaaataagccccggagagggggg

SEQ ID NO: 107346 - DNA, 1090 bp, Homo sapiens
agtgacgcgcgacggttcgtgcgtgcgtgcgggcggctgcgtcgggctgcaggagaagatggcggtctccacagacaaattatgaaaacagaatatatagcctgaaagtagaatgtggacctaaatacccagaagctcctccgtcagttagatttgtaacaaaaattaatatgaacggaataaataattccagtgggatggtggatgcccggagcataccagtgttagcaaaatggcaaaattcatatagcattaaagttgtacttcaagagctaagacgtctaatgatgtccaaagaaaatatgaagcttccacagccaccagaaggacaaacatacaacaattaattttagtggatctcaaacttgtcttaaatcaacaaccttctactcatgttaatgtcttgattaaatatcacaatgcaaaatacacattaagtaaaagaattccagctggtaaacatgacctggacatttgtaagaatatatttaatatatgtacacccattatgttttcaggtaacaggaggaaaaatgcagcacaattttttttctcttgaaaggcactgtcatttaaacataaacctggagtactcgaaatagaattcaggtttacaagatgaaagcgtgtggagaagtgtcagatggcagtggaagcatgtgtgtttctaaaaagtaaaaatctcaagaaaacagaaatggcatgctttacccatcttacttagtgaaagagagctgcagttgaaattgtttaaaaagtagcaggtacaatgaatattgtcacagatgtgttaatttttgaagcaatgtgggtgctgactactagtagtatcaaaaatatgttcaggattgttttgatacctgtatttataataaaaaatgttggggggagttgatgaattcctgttaaaagctgttcttgtgtgttacatgtaacagacatggtaaatatttgtttacagtctttgtttaacaaaccatgcatttaagtttaagtgaagtcaacaaaaaggaaataggtgtatggatatgtgattttgagattaaagttagtcttaaaatgtaaataaaatgtgaaacgtgtcctcaga

SEQ ID NO: 107347 - DNA, 1435 bp, Homo sapiens
gcagtggtatcaacgcagagtggccattacggccgggggcgtcgggctgcaggagaagatggcggtctccacagagtcactcatgtggttgcatcagctggtgaagggataggcttgttgcccgggacgccttgctccccctccctgcagcctctccaggtggccagttaggacttcctcacatcccggtggtgtcagggtgttcagaattcttacatgatggttggcttccaaaagaacgaaagcagaagttagcattcctcttacaaggagttaaagttcctcgtaattttcgcttgttggaagaacttgaagaaggacaaaaaggagtaggcgacggtacagttagctggggccttgaagatgatgaagatatgacacttacaaggtggacaggcatgattattgggccaccaaggacaaattatgaaaacagaatatatagcctgaaagtagaatgtggacctaaatacccagaagctcctccgtcagttagatttgtaacaaaaattaatatgaacggaataaataattccagtgggatggtggatgcccggagcataccagtgttagcaaaatggcaaaattcatatagcattaaagttgtacttcaagagctaagacgtctaatgatgtccaaagaaaatatgaagcttccacagccaccagaaggacaaacatacaacaattaattttagtggatctcaaacttgtcttaaatcaacaaccttctactcatgttaatgtcttgattaaatatcacaatgcaaaatacacattaagtaaaagaattccagctggtaaacatgacctggacatttgtaagaatatatttaatatatgtacacccattatgttttcaggtaacaggaggaaaaatgcagcacaattttttttctcttgaaaggcactgtcatttaaacataaacctggagtactcgaaatagaattcaggtttacaagatgaaagcgtgtggagaagtgtcagatggcagtggaagcatgtgtgtttctaaaaagtaaaaatctcaagaaaacagaaatggcatgctttacccatcttacttagtgaaagagagctgcagttgaaattgtttaaaaagtagcaggtacaatgaatattgtcacagatgtgttaatttttgaagcaatgtgggtgctgactactagtagtatcaaaaatatgttcaggattgttttgatacctgtatttataataaaaaatgttggggggagttgatgaattcctgttaaaagctgttcttgtgtgttacatgtaacagacatggtaaatatttgtttacagtctttgtttaacaaaccatgcatttaagtttaagtgaagtcaacaaaaaggaaataggtgtatggatatgtgattttgagattaaagttagtcttaaaatgtaaataaaatgtgaaacgtgtcctcaga

SEQ ID NO: 107348 - DNA, 1203 bp, Homo sapiens
agctggataaaatgtccgtctccaccacgcggtcacaggagttaaagttcctcgtaattttcgcttgttggaagaacttgaagaaggacaaaaaggagtaggcgacggtacagttagctggggccttgaagatgatgaagatatgacacttacaaggtggacaggcatgattattgggccaccaaggacaaattatgaaaacagaatatatagcctgaaagtagaatgtggacctaaatacccagaagctcctccgtcagttagatttgtaacaaaaattaatatgaacggaataaataattccagtgggatggtggatgcccggagcataccagtgttagcaaaatggcaaaattcatatagcattaaagttgtacttcaagagctaagacgtctaatgatgtccaaagaaaatatgaagcttccacagccaccagaaggacaaacatacaacaattaattttagtggatctcaaacttgtcttaaatcaacaaccttctactcatgttaatgtcttgattaaatatcacaatgcaaaatacacattaagtaaaagaattccagctggtaaacatgacctggacatttgtaagaatatatttaatatatgtacacccattatgttttcaggtaacaggaggaaaaatgcagcacaattttttttctcttgaaaggcactgtcatttaaacataaacctggagtactcgaaatagaattcaggtttacaagatgaaagcgtgtggagaagtgtcagatggcagtggaagcatgtgtgtttctaaaaagtaaaaatctcaagaaaacagaaatggcatgctttacccatcttacttagtgaaagagagctgcagttgaaattgtttaaaaagtagcaggtacaatgaatattgtcacagatgtgttaatttttgaagcaatgtgggtgctgactactagtagtatcaaaaatatgttcaggattgttttgatacctgtatttataataaaaaatgttggggggagttgatgaattcctgttaaaagctgttcttgtgtgttacatgtaacagacatggtaaatatttgtttacagtctttgtttaacaaaccatgcatttaagtttaagtgaagtcaacaaaaaggaaataggtgtatggatatgtgattttgagattaaagttagtcttaaaatgtaaataaaatgtgaaacgtgtcctcaga

SEQ ID NO: 107349 - DNA, 1337 bp, Homo sapiens
agtgacgcgcgacggttcgtgcgtgcgtgcgggcggctgcgtcgggctgcaggagaagatggcggtctccacaggctggtgtgcaatggtgtgatcttggctcaccgcaacctccacctcccgggttcaagcgattctcctgcctcagcctcccgagtagctgggattccaggagttaaagttcctcgtaattttcgcttgttggaagaacttgaagaaggacaaaaaggagtaggcgacggtacagttagctggggccttgaagatgatgaagatatgacacttacaaggtggacaggcatgattattgggccaccaaggacaaattatgaaaacagaatatatagcctgaaagtagaatgtggacctaaatacccagaagctcctccgtcagttagatttgtaacaaaaattaatatgaacggaataaataattccagtgggatggtggatgcccggagcataccagtgttagcaaaatggcaaaattcatatagcattaaagttgtacttcaagagctaagacgtctaatgatgtccaaagaaaatatgaagcttccacagccaccagaaggacaaacatacaacaattaattttagtggatctcaaacttgtcttaaatcaacaaccttctactcatgttaatgtcttgattaaatatcacaatgcaaaatacacattaagtaaaagaattccagctggtaaacatgacctggacatttgtaagaatatatttaatatatgtacacccattatgttttcaggtaacaggaggaaaaatgcagcacaattttttttctcttgaaaggcactgtcatttaaacataaacctggagtactcgaaatagaattcaggtttacaagatgaaagcgtgtggagaagtgtcagatggcagtggaagcatgtgtgtttctaaaaagtaaaaatctcaagaaaacagaaatggcatgctttacccatcttacttagtgaaagagagctgcagttgaaattgtttaaaaagtagcaggtacaatgaatattgtcacagatgtgttaatttttgaagcaatgtgggtgctgactactagtagtatcaaaaatatgttcaggattgttttgatacctgtatttataataaaaaatgttggggggagttgatgaattcctgttaaaagctgttcttgtgtgttacatgtaacagacatggtaaatatttgtttacagtctttgtttaacaaaccatgcatttaagtttaagtgaagtcaacaaaaaggaaataggtgtatggatatgtgattttgagattaaagttagtcttaaaatgtaaataaaatgtgaaacgtgtcctcaga

SEQ ID NO: 107350 - DNA, 1222 bp, Homo sapiens
atcatacagtgagtcctagagcgagatcgaatgatcaaattacagccccagtcctgagagttaaagttcctcgtaattttcgcttgttggaagaacttgaagaaggacaaaaaggagtaggcgacggtacagttagctggggccttgaagatgatgaagatatgacacttacaaggtggacaggcatgattattgggccaccaaggacaaattatgaaaacagaatatatagcctgaaagtagaatgtggacctaaatacccagaagctcctccgtcagttagatttgtaacaaaaattaatatgaacggaataaataattccagtgggatggtggatgcccggagcataccagtgttagcaaaatggcaaaattcatatagcattaaagttgtacttcaagagctaagacgtctaatgatgtccaaagaaaatatgaagcttccacagccaccagaaggacaaacatacaacaattaattttagtggatctcaaacttgtcttaaatcaacaaccttctactcatgttaatgtcttgattaaatatcacaatgcaaaatacacattaagtaaaagaattccagctggtaaacatgacctggacatttgtaagaatatatttaatatatgtacacccattatgttttcaggtaacaggaggaaaaatgcagcacaattttttttctcttgaaaggcactgtcatttaaacataaacctggagtactcgaaatagaattcaggtttacaagatgaaagcgtgtggagaagtgtcagatggcagtggaagcatgtgtgtttctaaaaagtaaaaatctcaagaaaacagaaatggcatgctttacccatcttacttagtgaaagagagctgcagttgaaattgtttaaaaagtagcaggtacaatgaatattgtcacagatgtgttaatttttgaagcaatgtgggtgctgactactagtagtatcaaaaatatgttcaggattgttttgatacctgtatttataataaaaaatgttggggggagttgatgaattcctgttaaaagctgttcttgtgtgttacatgtaacagacatggtaaatatttgtttacagtctttgtttaacaaaccatgcatttaagtttaagtgaagtcaacaaaaaggaaataggtgtatggatatgtgattttgagattaaagttagtcttaaaatgtaaataaaatgtgaaacgtgtcctcaga

SEQ ID NO: 107351 - DNA, 1367 bp, Homo sapiens
agtgacgcgcgacggttcgtgcgtgcgtgcgggcggctgcgtcgggctgcaggagaagatggcggtctccacaggagttaaagttcctcgtaattttcgcttgttggaagaacttgaagaaggacaaaaaggagtaggcgacggtacagttagctggggccttgaagatgatgaagatatgacacttacaaggtggacaggcatgattattgggccaccaaggctggaataattgaggaaggctgaacagtggaggaagttgcctttggaatgatccctaaaggactgactggtaggatttcagaaggtggtgatggggatggagaacattccagatagagaggagaaaagacaaattatgaaaacagaatatatagcctgaaagtagaatgtggacctaaatacccagaagctcctccgtcagttagatttgtaacaaaaattaatatgaacggaataaataattccagtgggatggtggatgcccggagcataccagtgttagcaaaatggcaaaattcatatagcattaaagttgtacttcaagagctaagacgtctaatgatgtccaaagaaaatatgaagcttccacagccaccagaaggacaaacatacaacaattaattttagtggatctcaaacttgtcttaaatcaacaaccttctactcatgttaatgtcttgattaaatatcacaatgcaaaatacacattaagtaaaagaattccagctggtaaacatgacctggacatttgtaagaatatatttaatatatgtacacccattatgttttcaggtaacaggaggaaaaatgcagcacaattttttttctcttgaaaggcactgtcatttaaacataaacctggagtactcgaaatagaattcaggtttacaagatgaaagcgtgtggagaagtgtcagatggcagtggaagcatgtgtgtttctaaaaagtaaaaatctcaagaaaacagaaatggcatgctttacccatcttacttagtgaaagagagctgcagttgaaattgtttaaaaagtagcaggtacaatgaatattgtcacagatgtgttaatttttgaagcaatgtgggtgctgactactagtagtatcaaaaatatgttcaggattgttttgatacctgtatttataataaaaaatgttggggggagttgatgaattcctgttaaaagctgttcttgtgtgttacatgtaacagacatggtaaatatttgtttacagtctttgtttaacaaaccatgcatttaagtttaagtgaagtcaacaaaaaggaaataggtgtatggatatgtgattttgagattaaagttagtcttaaaatgtaaataaaatgtgaaacgtgtcctcaga

SEQ ID NO: 107352 - DNA, 1291 bp, Homo sapiens
cgttgctataccatgcgttgggggcgcaaggatcgcgaggactctccacgtgaaacttggtcttacgtctgtaatctacgggcaatagtccgggatcatgttgtaggtagcgtggcgaatctcgacctagtcaaagagtgcccgtggagctggcgggcgtcgtacgtgtagaactagaatcactagtggtggcttactgggggcatcgcgtggtgacttatcagaggaggagatccggagcgagcttctgatatcagattatagtccgcgtgaggacaaattatgaaaacagaatatatagcctgaaagtagaatgtggacctaaatacccagaagctcctccgtcagttagatttgtaacaaaaattaatatgaacggaataaataattccagtgggatggtggatgcccggagcataccagtgttagcaaaatggcaaaattcatatagcattaaagttgtacttcaagagctaagacgtctaatgatgtccaaagaaaatatgaagcttccacagccaccagaaggacaaacatacaacaattaattttagtggatctcaaacttgtcttaaatcaacaaccttctactcatgttaatgtcttgattaaatatcacaatgcaaaatacacattaagtaaaagaattccagctggtaaacatgacctggacatttgtaagaatatatttaatatatgtacacccattatgttttcaggtaacaggaggaaaaatgcagcacaattttttttctcttgaaaggcactgtcatttaaacataaacctggagtactcgaaatagaattcaggtttacaagatgaaagcgtgtggagaagtgtcagatggcagtggaagcatgtgtgtttctaaaaagtaaaaatctcaagaaaacagaaatggcatgctttacccatcttacttagtgaaagagagctgcagttgaaattgtttaaaaagtagcaggtacaatgaatattgtcacagatgtgttaatttttgaagcaatgtgggtgctgactactagtagtatcaaaaatatgttcaggattgttttgatacctgtatttataataaaaaatgttggggggagttgatgaattcctgttaaaagctgttcttgtgtgttacatgtaacagacatggtaaatatttgtttacagtctttgtttaacaaaccatgcatttaagtttaagtgaagtcaacaaaaaggaaataggtgtatggatatgtgattttgagattaaagttagtcttaaaatgtaaataaaatgtgaaacgtgtcctcaga

SEQ ID NO: 107353 - DNA, 1223 bp, Homo sapiens
tgctgaggatacagatggcggccccggaacccagagaaataattccaatcgatggtcatcgcttggttgctagaactaagcctgaaagcgatcgataggtggctaggctactggatccagtaagctgggcgccgtgtggaaatccaggacgttctgaacaaatttccaagaggtggactgcgtcgtgagtcattagctgcatctatgacaaattatgaaaacagaatatatagcctgaaagtagaatgtggacctaaatacccagaagctcctccgtcagttagatttgtaacaaaaattaatatgaacggaataaataattccagtgggatggtggatgcccggagcataccagtgttagcaaaatggcaaaattcatatagcattaaagttgtacttcaagagctaagacgtctaatgatgtccaaagaaaatatgaagcttccacagccaccagaaggacaaacatacaacaattaattttagtggatctcaaacttgtcttaaatcaacaaccttctactcatgttaatgtcttgattaaatatcacaatgcaaaatacacattaagtaaaagaattccagctggtaaacatgacctggacatttgtaagaatatatttaatatatgtacacccattatgttttcaggtaacaggaggaaaaatgcagcacaattttttttctcttgaaaggcactgtcatttaaacataaacctggagtactcgaaatagaattcaggtttacaagatgaaagcgtgtggagaagtgtcagatggcagtggaagcatgtgtgtttctaaaaagtaaaaatctcaagaaaacagaaatggcatgctttacccatcttacttagtgaaagagagctgcagttgaaattgtttaaaaagtagcaggtacaatgaatattgtcacagatgtgttaatttttgaagcaatgtgggtgctgactactagtagtatcaaaaatatgttcaggattgttttgatacctgtatttataataaaaaatgttggggggagttgatgaattcctgttaaaagctgttcttgtgtgttacatgtaacagacatggtaaatatttgtttacagtctttgtttaacaaaccatgcatttaagtttaagtgaagtcaacaaaaaggaaataggtgtatggatatgtgattttgagattaaagttagtcttaaaatgtaaataaaatgtgaaacgtgtcctcaga

SEQ ID NO: 107354 - DNA, 1273 bp, Homo sapiens
  misc_feature (45)..(45): n is a, c, g, or t
ggagagcaggcgcgtgcgtccctgcggcgcggatgtaatgtgacntagtgggagtaagcatggtggcttatcgagagtgatgttatacatgacctacgtgacattgtactgcttatcggatagaacttgacaccaaggacaacacgggacgtacgtgaagagatatccgattatggtggtgtcgtggtcgattgactgaatatatgaacacatgtgcgtcgtggcagcaggccgtgattctgtggacgccacagggcacaaattatgaaaacagaatatatagcctgaaagtagaatgtggacctaaatacccagaagctcctccgtcagttagatttgtaacaaaaattaatatgaacggaataaataattccagtgggatggtggatgcccggagcataccagtgttagcaaaatggcaaaattcatatagcattaaagttgtacttcaagagctaagacgtctaatgatgtccaaagaaaatatgaagcttccacagccaccagaaggacaaacatacaacaattaattttagtggatctcaaacttgtcttaaatcaacaaccttctactcatgttaatgtcttgattaaatatcacaatgcaaaatacacattaagtaaaagaattccagctggtaaacatgacctggacatttgtaagaatatatttaatatatgtacacccattatgttttcaggtaacaggaggaaaaatgcagcacaattttttttctcttgaaaggcactgtcatttaaacataaacctggagtactcgaaatagaattcaggtttacaagatgaaagcgtgtggagaagtgtcagatggcagtggaagcatgtgtgtttctaaaaagtaaaaatctcaagaaaacagaaatggcatgctttacccatcttacttagtgaaagagagctgcagttgaaattgtttaaaaagtagcaggtacaatgaatattgtcacagatgtgttaatttttgaagcaatgtgggtgctgactactagtagtatcaaaaatatgttcaggattgttttgatacctgtatttataataaaaaatgttggggggagttgatgaattcctgttaaaagctgttcttgtgtgttacatgtaacagacatggtaaatatttgtttacagtctttgtttaacaaaccatgcatttaagtttaagtgaagtcaacaaaaaggaaataggtgtatggatatgtgattttgagattaaagttagtcttaaaatgtaaataaaatgtgaaacgtgtcctcaga

SEQ ID NO: 107355 - DNA, 1283 bp, Homo sapiens
  misc_feature (77)..(77): n is a, c, g, or t
taggatcgattcgtggcggcgcgcagaacactggtgggtacggtgaggatggtcatttcctgctgttcctatgcagnatcgctgggtcatagacctagatagcataggacttacatacagcgcagttaaagcaggaacggccacggtgtgagcatcgcggagccgttgctagaatcgatagtccgagtatggaacgattctagacaggtcgtaaccattgcatctaatctagaggcacgtccaaggcagcaactcgctgatcaacatacaaattatgaaaacagaatatatagcctgaaagtagaatgtggacctaaatacccagaagctcctccgtcagttagatttgtaacaaaaattaatatgaacggaataaataattccagtgggatggtggatgcccggagcataccagtgttagcaaaatggcaaaattcatatagcattaaagttgtacttcaagagctaagacgtctaatgatgtccaaagaaaatatgaagcttccacagccaccagaaggacaaacatacaacaattaattttagtggatctcaaacttgtcttaaatcaacaaccttctactcatgttaatgtcttgattaaatatcacaatgcaaaatacacattaagtaaaagaattccagctggtaaacatgacctggacatttgtaagaatatatttaatatatgtacacccattatgttttcaggtaacaggaggaaaaatgcagcacaattttttttctcttgaaaggcactgtcatttaaacataaacctggagtactcgaaatagaattcaggtttacaagatgaaagcgtgtggagaagtgtcagatggcagtggaagcatgtgtgtttctaaaaagtaaaaatctcaagaaaacagaaatggcatgctttacccatcttacttagtgaaagagagctgcagttgaaattgtttaaaaagtagcaggtacaatgaatattgtcacagatgtgttaatttttgaagcaatgtgggtgctgactactagtagtatcaaaaatatgttcaggattgttttgatacctgtatttataataaaaaatgttggggggagttgatgaattcctgttaaaagctgttcttgtgtgttacatgtaacagacatggtaaatatttgtttacagtctttgtttaacaaaccatgcatttaagtttaagtgaagtcaacaaaaaggaaataggtgtatggatatgtgattttgagattaaagttagtcttaaaatgtaaataaaatgtgaaacgtgtcctcaga

SEQ ID NO: 107356 - DNA, 1563 bp, Homo sapiens
gcagtggtatcaacgcagagtggccattacggccgggggcgtcgggctgcaggagaagatggcggtctccacagagtcactcatgtggttgcatcagctggtgaagggataggcttgttgcccgggacgccttgctccccctccctgcagcctctccaggtggccagttaggacttcctcacatcccggtggtgtcagggtgttcagaattcttacatgatggttggcttccaaaagaacgaaagcagaagttagcattcctcttacaaggagttaaagttcctcgtaattttcgcttgttggaagaacttgaagaaggacaaaaaggagtaggcgacggtacagttagctggggccttgaagatgatgaagatatgacacttacaaggtggacaggcatgattattgggccaccaaggctggaataattgaggaaggctgaacagtggaggaagttgcctttggaatgatccctaaaggactgactggtaggatttcagaaggtggtgatggggatggagaacattccagatagagaggagaaaagacaaattatgaaaacagaatatatagcctgaaagtagaatgtggacctaaatacccagaagctcctccgtcagttagatttgtaacaaaaattaatatgaacggaataaataattccagtgggatggtggatgcccggagcataccagtgttagcaaaatggcaaaattcatatagcattaaagttgtacttcaagagctaagacgtctaatgatgtccaaagaaaatatgaagcttccacagccaccagaaggacaaacatacaacaattaattttagtggatctcaaacttgtcttaaatcaacaaccttctactcatgttaatgtcttgattaaatatcacaatgcaaaatacacattaagtaaaagaattccagctggtaaacatgacctggacatttgtaagaatatatttaatatatgtacacccattatgttttcaggtaacaggaggaaaaatgcagcacaattttttttctcttgaaaggcactgtcatttaaacataaacctggagtactcgaaatagaattcaggtttacaagatgaaagcgtgtggagaagtgtcagatggcagtggaagcatgtgtgtttctaaaaagtaaaaatctcaagaaaacagaaatggcatgctttacccatcttacttagtgaaagagagctgcagttgaaattgtttaaaaagtagcaggtacaatgaatattgtcacagatgtgttaatttttgaagcaatgtgggtgctgactactagtagtatcaaaaatatgttcaggattgttttgatacctgtatttataataaaaaatgttggggggagttgatgaattcctgttaaaagctgttcttgtgtgttacatgtaacagacatggtaaatatttgtttacagtctttgtttaacaaaccatgcatttaagtttaagtgaagtcaacaaaaaggaaataggtgtatggatatgtgattttgagattaaagttagtcttaaaatgtaaataaaatgtgaaacgtgtcctcaga

SEQ ID NO: 107357 - DNA, 1148 bp, Homo sapiens
tgggggcacatcgagcagttactgaagcataattcccagcatggcagttgctgagcgtcgacttagctggattcgtatcaccaggagtccaatgcgtagctcgcatatctatattacgctgcacagagtctgacaaattatgaaaacagaatatatagcctgaaagtagaatgtggacctaaatacccagaagctcctccgtcagttagatttgtaacaaaaattaatatgaacggaataaataattccagtgggatggtggatgcccggagcataccagtgttagcaaaatggcaaaattcatatagcattaaagttgtacttcaagagctaagacgtctaatgatgtccaaagaaaatatgaagcttccacagccaccagaaggacaaacatacaacaattaattttagtggatctcaaacttgtcttaaatcaacaaccttctactcatgttaatgtcttgattaaatatcacaatgcaaaatacacattaagtaaaagaattccagctggtaaacatgacctggacatttgtaagaatatatttaatatatgtacacccattatgttttcaggtaacaggaggaaaaatgcagcacaattttttttctcttgaaaggcactgtcatttaaacataaacctggagtactcgaaatagaattcaggtttacaagatgaaagcgtgtggagaagtgtcagatggcagtggaagcatgtgtgtttctaaaaagtaaaaatctcaagaaaacagaaatggcatgctttacccatcttacttagtgaaagagagctgcagttgaaattgtttaaaaagtagcaggtacaatgaatattgtcacagatgtgttaatttttgaagcaatgtgggtgctgactactagtagtatcaaaaatatgttcaggattgttttgatacctgtatttataataaaaaatgttggggggagttgatgaattcctgttaaaagctgttcttgtgtgttacatgtaacagacatggtaaatatttgtttacagtctttgtttaacaaaccatgcatttaagtttaagtgaagtcaacaaaaaggaaataggtgtatggatatgtgattttgagattaaagttagtcttaaaatgtaaataaaatgtgaaacgtgtcctcaga

SEQ ID NO: 107358 - DNA, 1292 bp, Homo sapiens
gcaacttgggatcatattgataatactttgtagaattaattttgtaaaatctcatggaattaattttgtaaaatctcaatttttaagtatgcttattgcattttttctcaccatataggtgaaataaatttgaatgtagaaaaataaattcttaatcataaacactgtcttacgtacattcatattgtactttcccttttttttttttagcacttagacattaatattttaggtattgttattttgattatctttttgttttttgccttccagacaacaaattatgaaaacagaatatatagcctgaaagtagaatgtggacctaaatacccagaagctcctccgtcagttagatttgtaacaaaaattaatatgaacggaataaataattccagtgggatggtggatgcccggagcataccagtgttagcaaaatggcaaaattcatatagcattaaagttgtacttcaagagctaagacgtctaatgatgtccaaagaaaatatgaagcttccacagccaccagaaggacaaacatacaacaattaattttagtggatctcaaacttgtcttaaatcaacaaccttctactcatgttaatgtcttgattaaatatcacaatgcaaaatacacattaagtaaaagaattccagctggtaaacatgacctggacatttgtaagaatatatttaatatatgtacacccattatgttttcaggtaacaggaggaaaaatgcagcacaattttttttctcttgaaaggcactgtcatttaaacataaacctggagtactcgaaatagaattcaggtttacaagatgaaagcgtgtggagaagtgtcagatggcagtggaagcatgtgtgtttctaaaaagtaaaaatctcaagaaaacagaaatggcatgctttacccatcttacttagtgaaagagagctgcagttgaaattgtttaaaaagtagcaggtacaatgaatattgtcacagatgtgttaatttttgaagcaatgtgggtgctgactactagtagtatcaaaaatatgttcaggattgttttgatacctgtatttataataaaaaatgttggggggagttgatgaattcctgttaaaagctgttcttgtgtgttacatgtaacagacatggtaaatatttgtttacagtctttgtttaacaaaccatgcatttaagtttaagtgaagtcaacaaaaaggaaataggtgtatggatatgtgattttgagattaaagttagtcttaaaatgtaaataaaatgtgaaacgtgtcctcaga

SEQ ID NO: 107359 - DNA, 1235 bp, Homo sapiens
agctagcatagaagcatgcgtccggagcgctgaccctgccatgcgtaagtgaacgtgtgtcatagctgttcgctagaagatcctggtgcaatgtactgacgtgcttgcattctacactgaagtcctaaacgcaccggtggaagatatgagcgttctcgaggtgagtccaaggatggaagtactgggagggtcaataacggggcatctattctagaccagcgagacactatggtagagcgctggatagtcgaatgaggccctaacttggaatacccagaagctcctccgtcagttagatttgtaacaaaaattaatatgaacggaataaataattccagtgggatggtggatgcccggagcataccagtgttagcaaaatggcaaaattcatatagcattaaagttgtacttcaagagctaagacgtctaatgatgtccaaagaaaatatgaagcttccacagccaccagaaggacaaacatacaacaattaattttagtggatctcaaacttgtcttaaatcaacaaccttctactcatgttaatgtcttgattaaatatcacaatgcaaaatacacattaagtaaaagaattccagctggtaaacatgacctggacatttgtaagaatatatttaatatatgtacacccattatgttttcaggtaacaggaggaaaaatgcagcacaattttttttctcttgaaaggcactgtcatttaaacataaacctggagtactcgaaatagaattcaggtttacaagatgaaagcgtgtggagaagtgtcagatggcagtggaagcatgtgtgtttctaaaaagtaaaaatctcaagaaaacagaaatggcatgctttacccatcttacttagtgaaagagagctgcagttgaaattgtttaaaaagtagcaggtacaatgaatattgtcacagatgtgttaatttttgaagcaatgtgggtgctgactactagtagtatcaaaaatatgttcaggattgttttgatacctgtatttataataaaaaatgttggggggagttgatgaattcctgttaaaagctgttcttgtgtgttacatgtaacagacatggtaaatatttgtttacagtctttgtttaacaaaccatgcatttaagtttaagtgaagtcaacaaaaaggaaataggtgtatggatatgtgattttgagattaaagttagtcttaaaatgtaaataaaatgtgaaacgtgtcctcaga

SEQ ID NO: 107360 - DNA, 1496 bp, Homo sapiens
agtgacgcgcgacggttcgtgcgtgcgtgcgggcggctgcgtcgggctgcaggagaagatggcggtctccacaggagttaaagttcctcgtaattttcgcttgttggaagaacttgaagaaggacaaaaaggagtaggcgacggtacagttagctggggccttgaagatgatgaagatatgacacttacaaggtggacaggcatgattattgggccaccaaggacaaattatgaaaacagaatatatagcctgaaagtagaatgtggacctaaatacccagaagctcctccgtcagttagatttgtaacaaaaattaatatgaacggaataaataattccagtgggatgccagtgggatgagtctcactctgtcacccaggctggagtacaattgtgcgatcttggctcactgcaacctctgcctcccggcttcaagtgattctcctgcctcaacctcccgagtagctgggattacaggcacctgccatcatgcccagttaattttgtattttgtagagacggggtttcacaatggccaggctggtctcgaactcctgaccttagttgatccgcccggctcggctcccaaagtgctgggattacaggtggatgcccggagcataccagtgttagcaaaatggcaaaattcatatagcattaaagttgtacttcaagagctaagacgtctaatgatgtccaaagaaaatatgaagcttccacagccaccagaaggacaaacatacaacaattaattttagtggatctcaaacttgtcttaaatcaacaaccttctactcatgttaatgtcttgattaaatatcacaatgcaaaatacacattaagtaaaagaattccagctggtaaacatgacctggacatttgtaagaatatatttaatatatgtacacccattatgttttcaggtaacaggaggaaaaatgcagcacaattttttttctcttgaaaggcactgtcatttaaacataaacctggagtactcgaaatagaattcaggtttacaagatgaaagcgtgtggagaagtgtcagatggcagtggaagcatgtgtgtttctaaaaagtaaaaatctcaagaaaacagaaatggcatgctttacccatcttacttagtgaaagagagctgcagttgaaattgtttaaaaagtagcaggtacaatgaatattgtcacagatgtgttaatttttgaagcaatgtgggtgctgactactagtagtatcaaaaatatgttcaggattgttttgatacctgtatttataataaaaaatgttggggggagttgatgaattcctgttaaaagctgttcttgtgtgttacatgtaacagacatggtaaatatttgtttacagtctttgtttaacaaaccatgcatttaagtttaagtgaagtcaacaaaaaggaaataggtgtatggatatgtgattttgagattaaagttagtcttaaaatgtaaataaaatgtgaaacgtgtcctcaga

SEQ ID NO: 107361 - DNA, 1113 bp, Homo sapiens
agtgacgcgcgacggttcgtgcgtgcgtgcgggcggctgcgtcgggctgcaggagaagatggcggtctccacaggagttaaagttcctcgtaattttcgcttgttggaagaacttgaagaaggacaaaaaggagtaggcgacggtacagttagctggggccttgaagatgatgaagatatgacacttacaaggtggacaggcatgattattgggccaccaagggtggatgcccggagcataccagtgttagcaaaatggcaaaattcatatagcattaaagttgtacttcaagagctaagacgtctaatgatgtccaaagaaaatatgaagcttccacagccaccagaaggacaaacatacaacaattaattttagtggatctcaaacttgtcttaaatcaacaaccttctactcatgttaatgtcttgattaaatatcacaatgcaaaatacacattaagtaaaagaattccagctggtaaacatgacctggacatttgtaagaatatatttaatatatgtacacccattatgttttcaggtaacaggaggaaaaatgcagcacaattttttttctcttgaaaggcactgtcatttaaacataaacctggagtactcgaaatagaattcaggtttacaagatgaaagcgtgtggagaagtgtcagatggcagtggaagcatgtgtgtttctaaaaagtaaaaatctcaagaaaacagaaatggcatgctttacccatcttacttagtgaaagagagctgcagttgaaattgtttaaaaagtagcaggtacaatgaatattgtcacagatgtgttaatttttgaagcaatgtgggtgctgactactagtagtatcaaaaatatgttcaggattgttttgatacctgtatttataataaaaaatgttggggggagttgatgaattcctgttaaaagctgttcttgtgtgttacatgtaacagacatggtaaatatttgtttacagtctttgtttaacaaaccatgcatttaagtttaagtgaagtcaacaaaaaggaaataggtgtatggatatgtgattttgagattaaagttagtcttaaaatgtaaataaaatgtgaaacgtgtcctcaga

SEQ ID NO: 107362 - DNA, 1271 bp, Homo sapiens
  misc_feature (476)..(476): n is a, c, g, or t
agtgacgcgcgacggttcgtgcgtgcgtgcgggcggctgcgtcgggctgcaggagaagatggcggtctccacaggagttaaagttcctcgtaattttcgcttgttggaagaacttgaagaaggacaaaaaggagtaggcgacggtacagttagctggggccttgaagatgatgaagatatgacacttacaaggtggacaggcatgattattgggccaccaaggacaaattatgaaaacagaatatatagcctgaaagtagaatgtggacctaaatacccagaagctcctccgtcagttagatttgtaacaaaaattaatatgaacggaataaataattccagtgggatggtggatgcccggagcataccagtgttagcaaaatggcaaaattcatatagcattaaagttgtacttcaagagctaagacgtctaatgatgtccaaagaaaatatgcacaaggcctttttcccccaancaagggccccaagcttccacagccaccagaaggacaaacatacaacaattaattttagtggatctcaaacttgtcttaaatcaacaaccttctactcatgttaatgtcttgattaaatatcacaatgcaaaatacacattaagtaaaagaattccagctggtaaacatgacctggacatttgtaagaatatatttaatatatgtacacccattatgttttcaggtaacaggaggaaaaatgcagcacaattttttttctcttgaaaggcactgtcatttaaacataaacctggagtactcgaaatagaattcaggtttacaagatgaaagcgtgtggagaagtgtcagatggcagtggaagcatgtgtgtttctaaaaagtaaaaatctcaagaaaacagaaatggcatgctttacccatcttacttagtgaaagagagctgcagttgaaattgtttaaaaagtagcaggtacaatgaatattgtcacagatgtgttaatttttgaagcaatgtgggtgctgactactagtagtatcaaaaatatgttcaggattgttttgatacctgtatttataataaaaaatgttggggggagttgatgaattcctgttaaaagctgttcttgtgtgttacatgtaacagacatggtaaatatttgtttacagtctttgtttaacaaaccatgcatttaagtttaagtgaagtcaacaaaaaggaaataggtgtatggatatgtgattttgagattaaagttagtcttaaaatgtaaataaaatgtgaaacgtgtcctcaga

SEQ ID NO: 107363 - DNA, 951 bp, Homo sapiens
tgagcggtccgattgcttagacacaaaataatatgaacggaataaatattccagtgggatggtggatgcccggagcataccagtgttagcaaaatggcaaaattcatatagcattaaagttgtacttcaagagctaagacgtctaatgatgtccaaagaaaatatgaagcttccacagccaccagaaggacaaacatacaacaattaattttagtggatctcaaacttgtcttaaatcaacaaccttctactcatgttaatgtcttgattaaatatcacaatgcaaaatacacattaagtaaaagaattccagctggtaaacatgacctggacatttgtaagaatatatttaatatatgtacacccattatgttttcaggtaacaggaggaaaaatgcagcacaattttttttctcttgaaaggcactgtcatttaaacataaacctggagtactcgaaatagaattcaggtttacaagatgaaagcgtgtggagaagtgtcagatggcagtggaagcatgtgtgtttctaaaaagtaaaaatctcaagaaaacagaaatggcatgctttacccatcttacttagtgaaagagagctgcagttgaaattgtttaaaaagtagcaggtacaatgaatattgtcacagatgtgttaatttttgaagcaatgtgggtgctgactactagtagtatcaaaaatatgttcaggattgttttgatacctgtatttataataaaaaatgttggggggagttgatgaattcctgttaaaagctgttcttgtgtgttacatgtaacagacatggtaaatatttgtttacagtctttgtttaacaaaccatgcatttaagtttaagtgaagtcaacaaaaaggaaataggtgtatggatatgtgattttgagattaaagttagtcttaaaatgtaaataaaatgtgaaacgtgtcctcaga

SEQ ID NO: 107364 - DNA, 1116 bp, Homo sapiens
agaccatcccctgctggcacgcgatcccagatatgtcaggtgcccatgtggtcatagcctgtatcctaggagaatcctggtcatgactagttgcttgcaataactactatcaacagaaaatgcccgtgtggacctcgacagtcatgaactactccgagatggagtactggtcgttcataactggatctatcaagcagtgagttccatgccgagtcgtcgatatcgaatagcccggccccgatcccgagtgttagcaaaatggcaaaattcatatagcattaaagttgtacttcaagagctaagacgtctaatgatgtccaaagaaaatatgaagcttccacagccaccagaaggacaaacatacaacaattaattttagtggatctcaaacttgtcttaaatcaacaaccttctactcatgttaatgtcttgattaaatatcacaatgcaaaatacacattaagtaaaagaattccagctggtaaacatgacctggacatttgtaagaatatatttaatatatgtacacccattatgttttcaggtaacaggaggaaaaatgcagcacaattttttttctcttgaaaggcactgtcatttaaacataaacctggagtactcgaaatagaattcaggtttacaagatgaaagcgtgtggagaagtgtcagatggcagtggaagcatgtgtgtttctaaaaagtaaaaatctcaagaaaacagaaatggcatgctttacccatcttacttagtgaaagagagctgcagttgaaattgtttaaaaagtagcaggtacaatgaatattgtcacagatgtgttaatttttgaagcaatgtgggtgctgactactagtagtatcaaaaatatgttcaggattgttttgatacctgtatttataataaaaaatgttggggggagttgatgaattcctgttaaaagctgttcttgtgtgttacatgtaacagacatggtaaatatttgtttacagtctttgtttaacaaaccatgcatttaagtttaagtgaagtcaacaaaaaggaaataggtgtatggatatgtgattttgagattaaagttagtcttaaaatgtaaataaaatgtgaaacgtgtcctcaga

SEQ ID NO: 107365 - DNA, 1178 bp, Homo sapiens
gcagtggtatcaacgcagagtggccattacggccgggggcgtcgggctgcaggagaagatggcggtctccacaggagttaaagttcctcgtaattttcgcttgttggaagaacttgaagaaggacaaaaaggagtaggcgacggtacagttagctggggccttgaagatgatgaagatatgacacttacaaggtggacaggcatgattattgggccaccaaggacaaattatgaaaacagaatatatagcctgaaagtagaatgtggacctaaatacccagaagctcctccgtcagttagatttgtaacaaaaattaatatgaacggaataaataattccagtgggatggtggatgcccggagcataccagtgttagcaaaatggcaaaattcatatagcattaaagttgtacttcaagagctaagacgtctaatgatgtccaaagaaaatatgaagcttccacagccaccagaaggacaaacatacaacaattaattttagtggatctcaaacttgtcttaaatcaacaaccttctactcatgttaatgtcttgattaaatatcacaatgcaaaatacacattaagtaaaagaattccagctggtaaacatgacctggacatttgtaagaatatatttaatatatgtacacccattatgttttcaggtaacaggaggaaatcgaaatagaattcaggtttacaagatgaaagcgtgtggagaagtgtcagatggcagtggaagcatgtgtgtttctaaaaagtaaaaatctcaagaaaacagaaatggcatgctttacccatcttacttagtgaaagagagctgcagttgaaattgtttaaaaagtagcaggtacaatgaatattgtcacagatgtgttaatttttgaagcaatgtgggtgctgactactagtagtatcaaaaatatgttcaggattgttttgatacctgtatttataataaaaaatgttggggggagttgatgaattcctgttaaaagctgttcttgtgtgttacatgtaacagacatggtaaatatttgtttacagtctttgtttaacaaaccatgcatttaagtttaagtgaagtcaacaaaaaggaaataggtgtatggatatgtgattttgagattaaagttagtcttaaaatgtaaataaaatgtgaaacgtgtcctcaga

SEQ ID NO: 107366 - DNA, 583 bp, Homo sapiens
agtgacgcgcgacggttcgtgcgtgcgtgcgggcggctgcgtcgggctgcaggagaagatggcggtctccacaggagttaaagttcctcgtaattttcgcttgttggaagaacttgaagaaggacaaaaaggagtaggcgacggtacagttagctggggccttgaagatgatgaagatatgacacttacaaggtggacaggcatgattattgggccaccaaggacaaattatgaaaacagaatatatagcctgaaagtagaatgtggacctaaatacccagaagctcctccgtcagttagatttgtaacaaaaattaatatgaacggaataaataattccagtgggatggtggatgcccggagcataccagtgttagcaaaatggcaaaattcatatagcattaaagttgtacttcaagagctaagacgtctaatgatgtccaaagaaaatatgaagcttccacagccaccagaaggacaaacatacaacaattaattttagtggatctcaaacttgtcttaaatcaacaaccttctactcatgttaatgtcttgagacactcggggtcctctagatcgactc

SEQ ID NO: 107367 - DNA, 1261 bp, Homo sapiens
tagaggacccccttatttccttctatatagggggggagttgatgaattcctgttaaaagctgttcttgtgtgttacatgtaacagacatggtaaatatttgtttacagtctttgtttaacaaaccatgcatttaagtttaagtgaagtcaacaaaaaggaaataggtgtatggatatgtgattttgagattaaagttagtcttaaaatgtaaataaaatgtgaaacgtgtcctcagagactgtgccatttctattatgttgatgtatatgtacagtaccttgccagggaagcaaaaattggaattattgtagcttttcatgtatacacacttttatttaccctattttgtgtacttcttgtgaattataatttgcagactatttcagaaaagaaattatctagtttaatttcttctttggacaaggagtcctaggtattatattttgagtttgatttcaccagaaataataatattaaaaagatctttgcattctggcagttcttttaggattataggttgcaaattatccaaatatatatcccattttttaaagcataatatcttttttagttgtttttctgtgaagcttttggttaataaatagggtcaactaattggagacttttctcttccaattagggcttttaatactaacaaggataactttattcattcctcgtattctctactctaacaaatatgaactctgaagttgaaaagtcatttatgttccgctttcaccaaagtgacgtgaggctttaggtcactgtttcacttcaaagtactggatccaaagctttgttgaaaatgctgtttgatgaattcactgaagaatatagaaaggtggtcaggtaaagtctacttttattttgtcaagcttaataatttgtgtcatactttaccccagtatatataggcaaaccaaaaccttatcaaatattaaattagttgtttaaactttgcttataaagtattggccatgtggtggctcatgccgctaatcccagcactttgggaggctgagacgggcagatcacttgaggtcaggagcttgagaccagcctggccaacatgatgaaaccctgtctctactaaaaatacaaaaaattagccaggtgtggtggtgggtacttgtagtcccagctactcgggaggctgggcaggagaactacttgaaactggcagacagaggttgcagtgccgagagcgcaccactgctccagcctgggcaacagagcaagactccatctcaaaaaaaa

SEQ ID NO: 107368 - DNA, 666 bp, Homo sapiens
  misc_feature (310)..(310): n is a, c, g, or t
  misc_feature (479)..(479): n is a, c, g, or t
agtgacgcgcgacggttcgtgcgtgcgtgcgggcggctgcgtcgggctgcaggagaagatggcggtctccacaggagttaaagttcctcgtaattttcgcttgttggaagaacttgaagaaggacaaaaaggagtaggcgacggtacagttagctggggccttgaagatgatgaagatatgacacttacaaggtggacaggcatgattattgggccaccaaggacaaattatgaaaacagaatatatagcctgaaagtagaatgtggacctacattaaaatctacgtttctgacgatggcaaaaaaaaanaaaaaaaaaaaaaaaaaaaatttgggcggcgcgggcacgggcgccccgggagaagaagtctttctaaagaaaccattttgggttgggggggcgcgagcggggccccggtggaggtaacgggagaaaagggtggtccaagacggggtcccccgagggaacactcgcgggngcggcaacgacgcggcgtgggatttcccgcacaaatataaaaaagcgccgggggggggacaacacgggagcggtcctggaaaaaaaatccccagagagggggctcgcgagggcccaataacggggatcgataacaggagaggatcccaggggaagcccggaattaaaataagccccggagagggggg

SEQ ID NO: 107369 - DNA, 395 bp, Homo sapiens
tgaactttggcttctatgaactttctgggcatgcctgtttgattggtgcagagtccttggctgtaacagaaacatcaaatagggaaaacgatttccttatggttgattgacttacatcagtataaaattgatgaggaatttatatacacgttgtatactgctgttaatgtttggtacagtgctttctttagtgttttcattttgaggggttattagattcagcattttctggagcagaatgctttttaaaggggatttggtctttttgggaaataatttataaaggttaatttggaaaaagctgaatttaaatacgtgtagctcttataattatgagctttttacatttacactgacgttcttttgtatagggagttaaagttcctcgtaatttt

SEQ ID NO: 107370 - DNA, 768 bp, Homo sapiens
ttatttttttgaggcggagtctcgctctgttgtccaggctggagtgcagtggcgcaatcgcggctcattgcccctccgcctccccggttcaaacgattctcgtgcctcagcctcccaaatagctgggattacaggcgcgcgccaccacgtccggctaatttttgtatttttagtagagacggggtttcgccatgttggccaggctggtttcgaactcctgacctcgggtgatccgatcgcctcggcctcccaaagtgctgggattacagacgtgagccaccgcgcccggccctcatgaacttattctttagcgtttcattttgagagcgggattcacaagggaattgcggaaacagcagcgaggccccgcgacccctcggcccacgtgcgcgctgtccctcgggtcgccccgcgcccgccgggggcggagtccgctgtgacgcgtgcagggcggcgcgctcccggaagtgacgcgcgacggttcgtgcgtgcgtgcgggcggctgcgtcgggctgcaggagaagatggcggtctccacaggtcggttcccgggccgggctgcgtgattttccgctccgacccggctctgcccctccgtctgctgctggcgcccgagcgctgaccgtgcgggagaagcccgagtgcgctgtctcgaatgccgcgctctccgcagagcgtagcctgggaccgggtgggaccggcgccgaggccccggcggccgtcgggttggcgggtcgtgctcgcgcgtcggccgcgcgccggcgggct

SEQ ID NO: 107371 - DNA, 2263 bp, Homo sapiens
agtgacgcgcgacggttcgtgcgtgcgtgcgggcggctgcgtcgggctgcaggagaagatggcggtctccacaggagttaaagttcctcgtaattttcgcttgttggaagaacttgaagaaggacaaaaaggagtaggcgacggtacagttagctggggccttgaagatgatgaagatatgacacttacaaggtggacaggcatgattattgggccaccaaggacaaattatgaaaacagaatatatagcctgaaagtagaatgtggacctaaatacccagaagctcctccgtcagttagatttgtaacaaaaattaatatgaacggaataaataattccagtgggatggtggatgcccggagcataccagtgttagcaaaatggcaaaattcatatagcattaaagttgtacttcaagagctaagacgtctaatgatgtccaaagaaaatatgaagcttccacagccaccagaaggacaaacatacaacaattaattttagtggatctcaaacttgtcttaaatcaacaaccttctactcatgttaatgtcttgattaaatatcacaatgcaaaatacacattaagtaaaagaattccagctggtaaacatgacctggacatttgtaagaatatatttaatatatgtacacccattatgttttcaggtaacaggaggaaaaatgcagcacaattttttttctcttgaaaggcactgtcatttaaacataaacctggagtactcgaaatagaattcaggtttacaagatgaaagcgtgtggagaagtgtcagatggcagtggaagcatgtgtgtttctaaaaagtaaaaatctcaagaaaacagaaatggcatgctttacccatcttacttagtgaaagagagctgcagttgaaattgtttaaaaagtagcaggtacaatgaatattgtcacagatgtgttaatttttgaagcaatgtgggtgctgactactagtagtatcaaaaatatgttcaggattgttttgatacctgtatttataataaaaaatgttggggggagttgatgaattcctgttaaaagctgttcttgtgtgttacatgtaacagacatggtaaatatttgtttacagtctttgtttaacaaaccatgcatttaagtttaagtgaagtcaacaaaaaggaaataggtgtatggatatgtgattttgagattaaagttagtcttaaaatgtaaataaaatgtgaaacgtgtcctcagagactgtgccatttctattatgttgatgtatatgtacagtaccttgccagggaagcaaaaattggaattattgtagcttttcatgtatacacacttttatttaccctattttgtgtacttcttgtgaattataatttgcagactatttcagaaaagaaattatctagtttaatttcttctttggacaaggagtcctaggtattatattttgagtttgatttcaccagaaataataatattaaaaagatctttgcattctggcagttcttttaggattataggttgcaaattatccaaatatatatcccattttttaaagcataatatcttttttagttgtttttctgtgaagcttttggttaataaatagggtcaactaattggagacttttctcttccaattagggcttttaatactaacaaggataactttattcattcctcgtattctctactctaacaaatatgaactctgaagttgaaaagtcatttatgttccgctttcaccaaagtgacgtgaggctttaggtcactgtttcacttcaaagtactggatccaaagctttgttgaaaatgctgtttgatgaattcactgaagaatatagaaaggtggtcaggtaaagtctacttttattttgtcaagcttaataatttgtgtcatactttaccccagtatatataggcaaaccaaaaccttatcaaatattaaattagttgtttaaactttgcttataaagtattggccatgtggtggctcatgccgctaatcccagcactttgggaggctgagacgggcagatcacttgaggtcaggagcttgagaccagcctggccaacatgatgaaaccctgtctctactaaaaatacaaaaaattagccaggtgtggtggtgggtacttgtagtcccagctactcgggaggctgggcaggagaactacttgaaactggcagacagaggttgcagtgccgagagcgcaccactgctccagcctgggcaacagagcaagactccatctcaaaaaaaa

SEQ ID NO: 107372 - DNA, 953 bp, Homo sapiens
  misc_feature (855)..(855): n is a, c, g, or t
  misc_feature (859)..(859): n is a, c, g, or t
  misc_feature (867)..(867): n is a, c, g, or t
  misc_feature (890)..(890): n is a, c, g, or t
  misc_feature (892)..(892): n is a, c, g, or t
  misc_feature (912)..(912): n is a, c, g, or t
gcagtggtatcaacgcagagtggccattacggccgggggcgtcgggctgcaggagaagatggcggtctccacaggagttaaagttcctcgtaattttcgcttgttggaagaacttgaagaaggacaaaaaggagtaggcgacggtacagttagctggggccttgaagatgatgaagatatgacacttacaaggtggacaggcatgattattgggccaccaaggacaaattatgaaaacagaatatatagcctgaaagtagaatgtggacctaaatacccagaagctcctccgtcagttagatttgtaacaaaaattaatatgaacggaataaataattccagtgggatggtggatgcccggagcataccagtgttagcaaaatggcaaaattcatatagcattaaagttgtacttcaagagctaagacgtctaatgatgtccaaagaaaatatgaagcttccacagccaccagaaggacaaacatacaacaattaattttagtggatctcaaacttgtcttaaatcaacaaccttctactcatgttaatgtcttgattaaatatcacaatgcaaaatacacattaagtaaaagaattccagctggtaaacatgacctggacatttgtaagaatatatttaatatatgtacacccattatgttttcaggtaacaggaggaaaaatgcagcacaattttttttctcttgaaaggcactgtcatttaaacataaacctggagtactcgaaatagaattcaggtttacaagatgaaagcgtgtggagaagtgtcagatggcagtggaagcatgtgtgtttctagtaaattctgaaaaagaaggggtggtccctctttgnaaanaggcgggnaggtaaagaaggacaatagcaangnttgaagggggcgaaacaaanggggggtataaaaagggggggggttttaggaattaacaaag

SEQ ID NO: 107373 - DNA, 1239 bp, Homo sapiens
gcagtggtatcaacgcagagtggccattacggccgggggcgtcgggctgcaggagaagatggcggtctccacaggagttaaagttcctcgtaattttcgcttgttggaagaacttgaagaaggacaaaaaggagtaggcgacggtacagttagctggggccttgaagatgatgaagatatgacacttacaaggtggacaggcatgattattgggccaccaaggacaaattatgaaaacagaatatatagcctgaaagtagaatgtggacctaaatacccagaagctcctccgtcagttagatttgtaacaaaaattaatatgaacggaataaataattccagtgggatggtggatgcccggagcataccagtgttagcaaaatggcaaaattcatatagcattaaagttgtacttcaagagctaagacgtctaatgatgtccaaagaaaatatgaagcttccacagccaccagaaggacaaacatacaacaattaattttagtggatctcaaacttgtcttaaatcaacaaccttctactcatgttaatgtcttgattaaatatcacaatgcaaaatacacattaagtaaaagaattccagctggtaaacatgacctggacatttgtaagaatatatttaatatatgtacacccattatgttttcaggtaacaggaggaaaaatgcagcacaattttttttctcttgaaaggcactgtcatttaaacataaacctggagtactcgaaatagaattcaggtttacaagatgaaagcgtgtggagaagtgtcagatggcagtggaagcatgtgtgtttctaaaaagtaaaaatctcaagaaaacagaaatggcatgctttacccatcttacttagtgaaagagagctgcagttgaaattgtttaaaaagtagcaggtacaatgaatattgtcacagatgtgttaatttttgaagcaatgtgggtgctgactactagtagtatcaaaaatatgttcaggattgttttgatacctgtatttataataaaaaatgttggggggagttgatgaattcctgttaaaagctgttcttgtgtgttacatgtaacagacatggtaaatatttgtttacagtctttgtttaacaaaccatgcatttaagtttaagtgaagtcaacaaaaaggaaataggtgtatggatatgtgattttgagattaaagttagtcttaaaatgtaaataaaatgtgaaacgtgtcctcaga

SEQ ID NO: 107374 - DNA, 981 bp, Homo sapiens
  misc_feature (847)..(847): n is a, c, g, or t
  misc_feature (981)..(981): n is a, c, g, or t
gcagtggtatcaacgcagagtggccattacggccgggggcgtcgggctgcaggagaagatggcggtctccacaggagttaaagttcctcgtaattttcgcttgttggaagaacttgaagaaggacaaaaaggagtaggcgacggtacagttagctggggccttgaagatgatgaagatatgacacttacaaggtggacaggcatgattattgggccaccaaggacaaattatgaaaacagaatatatagcctgaaagtagaatgtggacctaaatacccagaagctcctccgtcagttagatttgtaacaaaaattaatatgaacggaataaataattccagtgggatggtggatgcccggagcataccagtgttagcaaaatggcaaaattcatatagcattaaagttgtacttcaagagctaagacgtctaatgatgtccaaagaaaatatgaagcttccacagccaccagaaggacaaacatacaacaattaattttagtggatctcaaacttgtcttaaatcaacaaccttctactcatgttaatgtcttgattaaatatcacaatgcaaaatacacattaagtaaaagaattccagctggtaaacatgacctggacatttgtaagaatatatttaatatatgtacacccattatgttttcaggtaacaggaggaaaaatgcagcacaattttttttctcttgaaaggcactgtcatttaaacataaacctggagtactcgaaatagaattcaggtttacaagatgaaagcgtgtggagaagtgtcagatggcagtggaagcatgtgtgtttctaaaaaggaaatttcgaaagaatggtgttncactttataggaaaaggggggaatgttaaaggcggagatggtggtgttcttgaaggggccaaagtacatgtgtgacgctacaagggggacagggcggagattagacgtgagcgtgtagacatggtagtaaatan

SEQ ID NO: 107375 - DNA, 718 bp, Homo sapiens
attgtaaggacaaaagggcaaatgatataaaacaggtattactattctaagtataatggaatggttgttacatctttagcgatttacccatatctgtatggaaatttattgtatgattctgaagcaatacaaccaatgactaaaacttggtcattaaatgttgtttggggataattcaatttccaattagtttgcaaactgattttagatctctctctcacagcatgggcttcctcacgacatgtggacaggttcctgagagaacaggttagaattatatggcatttttaggatctagactcaaaagttactaagcatcacttcttacatactctattggtcaaagcagttacaatggtccactgaggttcaagtgggaggaatccgatgtcaccagttgcagggaagatatcaaggtcccattgtcatcagaaagcatgaggtgagagatgatcttttggacgtttttggaaggtatgatctgccacacattgcaaattccaagatgttaaaaatgtaaacacgtgcatctaaaaatcaacaactgtggtaagaaatgtatggtagaatttcttatcaatgtcattaagcagaagagaagaccctgttctgagagaaaatctatgtgttcacttaaaagaaaagtaagtctgtcattaatcacttgaaaataatccctcttttaaagatatctgtataatgttataacaatatgagg

SEQ ID NO: 107376 - DNA, 360 bp, Homo sapiens
tgaggatcccccctggtatcccaccccaagctctcctcctgcacactcacctgaccagccactaacctgaccagccaacagggactgtaaactgtgaatgagctccaagccctctcacctagcatatcaccagctatttgaacttttcccagcaggcttgtcttataattgactttcggggaaaggtgaagtccagaagcatctactggacccagagggtatgggtaaggcctaattagggaggaaaagggctcccagagtgtgtatgctcagaaaagcagcactccccctcctctcccactcagcaagggttggcaggtaagtttcatatggggtggggatttcaaggctgcaagggtt

SEQ ID NO: 107377 - DNA, 341 bp, Homo sapiens
gataagggatatagggttacttttttggggtaattgtgggattatactacaaaattgactgtggtgatggttgcataactctgtgcatacaccaaaaaccattgaattgtacactttaaaatagtgaattgcgagatgggtggatcacttgaggccaggagtttgagaccagcctggccaacatggtaaaaccccacctctcctaaaaataccaaaattagccaggcgtggtggcacatgcctgtaatcccagctactcgggaggctgaggcaggagaatcgcttgaacctgggaggcagaggctgcagtgagctgagatggtgccattgcgctccagcct

SEQ ID NO: 107378 - DNA, 124 bp, Homo sapiens
tttttaaattaagagtcccaaagtcattcttctcagactgccttctaaaagcccaaacagcgaaatcaagagtaaaagcgccaagacggtgacccgggtctaggggattcccccctggaggcca

SEQ ID NO: 107379 - DNA, 296 bp, Homo sapiens
ggctgatgtcttgaatggtggcagtctgcatggaagtccaaggaagtattgtgaaaagccatcccatagagctgttttatcgagatatatccagatgtgaataaactggaaaagcagaaagcatggaaagttaccagagggagtttacctgaggcagccggtatgtgcaaaggagtaggatgacttggcctgattgggtgggaaggtttcttggctatgtatattgggacttttctttcttaagtagactttatattttagagcagtttcagggtcatagcaaaactgaacagatg

SEQ ID NO: 107380 - DNA, 135 bp, Homo sapiens
atgtccgtcttctgcaaatatgtgagtttgtttctcattggccaaagctgattcaaacagggctgctgtatttatcagctaggttgtgttaactagactttccagggacttcagaactgggacacaatcatttta

SEQ ID NO: 107381 - DNA, 431 bp, Homo sapiens
gttctactttcttctccattcccacacacataaacttcatgaaaataaactcagttatgtagcatttaaggcctattcagaaaggattcagttgtagtcagtcaatggaagaaccaagatagttaaccaagtcttaagcatttctctattcattcagcagcatttatcgaactgggtataagaaatagataaagccagcctctgccatcaggagcttgtgattggggagtaatgtgtgatgtgatctgtattatcacagaggggagcacagcatgtgatgggaatggaagatgggctcctagcgtggccttcttgggtcaaggatggcacgctggattggataactcaggggaagaactgattttatggaaattatccaaaggagttattcattaatttagcatctctcttccccagtctctgatgtgtgt

SEQ ID NO: 107382 - DNA, 567 bp, Homo sapiens
gtctgaggatcgcgaccggagcataccctttaataagccctttaaatgattctgatgcttgctaaagtttgagaaccactgggttaaaagatctgctcttaataaaaaccagcaccctgccagctcctgctgtcccgtttttcttccgtagcacttaactgcgtgacatcccatcccatcccatcccatccctctcttgccaatagaatgaaagcttcctgagactgggaagttttgtcagtttggtcattgctttaatcctagtgcctagaatagtgactgcatatagcaggcactcaagtatttgttgaatgaataatgtaagatgatttaattctatgtattgccagctgcgacattggggttttactcaagaaccgttctcagaatgaataggaatcatggtccaatgtgcaaatccaaggggatcctaacatttttgggggattcattttaggttgagcttttccctttatgtgtctccaaccaaagcctgcaagaatttttagcctagtcttttgttcgtttgtttgttttaaccaccacctgaaaactgctgttgcaata

SEQ ID NO: 107383 - DNA, 375 bp, Homo sapiens
ggcgtagtaagtggggtaaaggcgctgaacataaactgcaaagggtcctgtcctcgtgaaacttaaagtctagtgggaaagacaggaaatacataaataactacatactttattgtcaggtagtcaaggaaaaaaatcaggttacttctttagatagcagtggctagttagggcaggtgtctctcttagaagctgatatttgaacaagagaagtgaaagaagggcaggggcaagccatgtgagcatctgggaaaggagatccaggcagagaacggagcaaactcaaaggccctgagttagtattgtgcttagtgtgttgggcggcgaacaccaggaaatcagtgtagccacagcatagtggtcacgggcaatgga

SEQ ID NO: 107384 - DNA, 406 bp, Homo sapiens
tcaggctttcccagaaggtgagcaagccctgattctttgccttgcccagctggagagaacatataaggggcaatgcagagcaatggtgctgtcttttgatgtgctgttgaactgccttttgcagggaggattctgccccttgcattgtggatgtgaaactgtgattaaaccttcaatgagtgctgctttactaggcaacgcggggacagtgcctggaatctagtcagttcattgataaaactcgaggttgaaagcatgactgttcctttgtgtaagtgcatccaggccttattaacgggccactgcccaactctgccatctgattcagccactgactaataggagacattgcagaggccattttaaagtgcctacaagggaagcttttaatctcttattggaaaat

SEQ ID NO: 107385 - DNA, 761 bp, Homo sapiens
tcgtattcccactattcctttctttcatgattcatgtcattgtcccatcaacatttctaagatttccattccgttaagagcaaaagagaatgttggaaggtgggggaaaacatttctttgttttctacagggccagcttcttggatgtgtgtgatctgttcagttgcaaagggtcacatgctcagaaggaccgcatgctaaatttaatgctttgcagttaccctcttgaaatcctttattttttaagaaggaattcgacatttccatttttcaatgagccccacaaattacgcagctagtcctgggcttctctactctgaaattgggcaggatctctcttgatctagaatttactaaggcataataggggcaagaaaatcttatgaaataatggggggtagggaagagatgggaatggagcatgagatccagcttcgttattctctacttgagaaaaataaggccccaaagattaaacaacttgcccaaggatattgcttgttagtgtcagaactgaaaccagaaaccaaatgatcatatccctagacttttagtctgctttctcttccataaaatgaaacttataatgtttctaatccattgctcagacaggtagacatgaatattaattgataatgactattaattgatctggaaaatacttgtttggggatcaataatatgtttgggctattatctaatgctgtgtagaaatattaaaacccctcttattttgaaataaaaaagatacccacttttta

SEQ ID NO: 107386 - DNA, 740 bp, Homo sapiens
tatttttactgtactttttctatgtgtagatatgtttagatacacaaatacttaccattatgttacagttgcctacaatattcagtacagtaacatgttgtacaggtttatagcctaggagcattaggctatatcatgtagtctaggtgtagtaggctttacaatctaggtttgggtaagtacactctgatgtttgcacaatgatgaaatcacctaatgatgcatttctcagaatgtatccttgttggtaattgatgcatgactatatttagttttcatgtctcttttgttttccttaatctgaaaaggtcactcaacctttctttgtctttcattaccttgacatttttgaagagtgtagggcatttattttgtaaaatgtcttgcaatctggttttatctgatattttcagtttagattcagccaatgcattttgacaagaatataacagaattttgtgtccctcataatgtataacatcatgaggcacagatgacgtttgacttgttcatgatgttgcgtttgatacttggcttaggtggtgtctgccaggttttgattatagagttatttgatccccaaaattaaaaatagaattgccatatgatccaacagttcacttacgggatatacctctgtaagggctgccataacaaaatgccacaggctggatggcttaaacaacagaaattgctcacgtttctgaagtctagaatctaagattaaggtgctggcaaat

SEQ ID NO: 107387 - DNA, 452 bp, Homo sapiens
attcaggtgagtattgatttttatcatcactttgtaggtgatagttataaaagttaatcctcaagaacagtgtttttcagttaatgcctgggtctcatctcagacattctaattgttttgtgttttaagattttctaaattccgtggacgatttttattttgcagcctaatttgggaactttgtgctctaggctgtttattgcagtagagattctttacctgcaattagcaagtgctgccaccaggggcgtgggggtgtgcatgcctttattacttgcggcttcttgatctgaataacttgactggtgtctttaaaacttaagacctgtgtggaaattatcacatgtacaatgagaataaacactctcagaatacaaagagctcttactaaatcaaagagaaaaagatgaaccaatagaaaatgggcaaaaaataggaatagacatttcaca

SEQ ID NO: 107388 - DNA, 314 bp, Homo sapiens
ctcgcgaggtgtatcctctacgttatcctctcttccaccctcaccccagaagacgggacatatctggaccctagctcaggggcatgctgatcaatttatcaccaagctcctgccagctgattctttctattaaaggagagtttgagtcaaggaaggagctcctggtctctcctgacctctttggttgccagttggctggccaggtttatcaaggtgaatatgtggaaaagagccagagagctggggatgggggatgtgagtaacagtgcatctactcatgcatgcacctaagcaaacaggatagacagcgcaat

SEQ ID NO: 107389 - DNA, 172 bp, Homo sapiens
acacaaggaaacatgtcttaaaatgttcactaaagaactatttcttatagtatacaaagaaactgtgactcaggaggggaataaactagtttagtcaaagaaatactatacaacagtctaaatgaatagatttatatatcacaaaaagatacatgcaggacaagaaggaaaa

SEQ ID NO: 107390 - DNA, 663 bp, Homo sapiens
aagaaatcagtagtttcacatgagtctggcctggctgcagagcagcaagcaccctaaagtggtggagaattagtggccaggcttcccttcactcttccacttctctatcctggcagccccccacaaaggatacctttagggtcataatcatccatattacatgaaaagaatcttagtcattgtgaggaaaagatcagctagaaggggatgaaggtgaagagaaggttctttggagaggttcttagagacatcagatttcctgagaatctgatgaaatcagatctctattatacagaagccatggatgttacttttttttgagtagagagccatgatgtagaaagccatgttttcttttcattcttggcccctagtattcgagggtatcatctttctcagtcacagcctttcctaacctctgccctcttccaggaagaaagggatttggttacacacagatgatttcccagtcaccttgtttccatgagtgatcttgtcatttttaagctcaattgatgtattaggtttgaatttgtttgccagatacttgaaattcacttttctttggtatactggttttttagcattaacatggattccaaacaaacttggttctgccaaagaaaaccagagctggacagttgttaaaacagtaaaaaaaaa

SEQ ID NO: 107391 - DNA, 366 bp, Homo sapiens
tgttggctctagaggctgagtgactagcatcatgtcaattagtactgagtctagcacatatggagtctcctcaagcatttgttgaaatagttcattaatgtggtcagtttcagagccagggcctggcagcattgtgcagtgggaaaacccagatgaagagacaggagactcagcttctggtcaaagttctccctctaactagccgtggggccttgagtaagacacctcacctctctgggcctcagttttctcatccgtagaacaagagtatagaaccagatattctaagtctctccagttcactagggttgccccatccccctccagaatccctgtgggcatgctgtcatgggccaagccaggtgc

SEQ ID NO: 107392 - DNA, 679 bp, Homo sapiens
gaatgattatagatacgagatttctcctgagtctttccccactctggtcacaggcaatgagagctcaccagactctccttctcacggcagcaactgctcccactaccttttttggcaagcaatgagcagttcagccttttctccacccccaccccaccccccacttcatccccagtcaaccatgaggccctagttaaaagaggggctcctggaggcaaagatgctgagtcgactcctgagtccactgcagactggctgtgtgacctgggaccagttactctgcctctctgttcttcaatttactcattcgttaaaggggattaatctctacttcatggggcttttgtaaggattgaggactcattgaagataagttcccaatattacctattaaccagtgtctctgatgttgttttgcttctgagtttgacattgactatttcatccctaaatgaaatagtcccccctctactcctccttcccaaactccacttcaaaagtgcccaaacctttccaatttcaagaaacctcacgaggttcttgtcactctggcacaccctcacatcccacaaggtgcttggcaattgcctccgctaactgatcatccttttcccacgcactagcattttacttgatgggtgtgatggttgaactagccttaccaggagcggcaagaaga

SEQ ID NO: 107393 - DNA, 689 bp, Homo sapiens
gggggaagcagttgaaatgaagtgttggaatttcagagcttgcattactggattatgtgtggattgttgtttgtactgcctctttcttcctcctgctacctcatataggtgcttgatatctgattattacagtctttttaggggttcttgaacatactcacttgtagaaaagtgctggttaaaatcataacaggcagacatttgggttcttatagccttgcaataaatggaaggaagtaacttttgggcttatgaaaatgtatactgcaaggtttttctttctttctttctttctttctttctttctttctttctttctttctttctttctttttcttccttccttccttcttccttccttcctttcttcctttcttccttccttccttcctttcttcctttcttcccttctttctttctttcttgagacagggtctcgctccatcacccaggctggagtgctcactgcaaggatcctcctgcctcagcctcccaagtagctaggactacaggcatagccaccatgcctggctaacttttcttattttttgttttatgtagagacagtatcttgctgtgttgcctaggctggtctcaaactcctggcttcaagggatgcccccaccttggtcttccaaaattctgagattataggcacgacccaccatgcccagtggttttcttaaagt

SEQ ID NO: 107394 - DNA, 305 bp, Homo sapiens
ccagtttgcatctgtggtccgtctttagcaaaagtttgttcttagttgtcgtaattctgctttgatgtattctgtgatctcagtgatgtcctgagggctgtcatgtccacggtcataatctataactctttttctagttattataggtcttgccacatgcgcccgcctcccagggtcatcataatctcccgggtcctctggatggggggtttggtcccagacattccttttcaaaagttacatctgaaaaggatttacttttgcttaaaattctatgaacgacctctttgcctttctggtgatcc

SEQ ID NO: 107395 - DNA, 321 bp, Homo sapiens
agtgatagtaacaatagcctcatctcaggcaaacagagactgagtcacctgctcaaggtcaccctaactagcagagtgggaagttaaacccaagccttggtgcctaaccactgtgatccactgttatcttggcccctgggcacttctgattattgctgagctgattttgatccacccctcctttcttggcctcagccctgccatattactaagtctgctcccacccccacatttatttatttatttattttgagacagagtttcactctttttgcccaggctggagtgcagtggcatgatctcggctcactgcaacctctg

SEQ ID NO: 107396 - DNA, 151 bp, Homo sapiens
tcttattgtgggtgggttaaggtcaaaaaattctgaaagcccctgcattaagagcaagaggactatttacttccaaggctacttaagaggccttgaaatgtgagatttatactaaatcatctttgcataaagttatttgtctttttttttt

SEQ ID NO: 107397 - DNA, 438 bp, Homo sapiens
aatatttataattcttgaactaaacttttacatgccaaatgaatattttaatcttccacttggagaatacgtttacaggtaggaagttatttcagtacttagttttccaaaaactttagcttatttaatgcagtcaccattctcctgataggctggtcttacctataaaataataaagattagctcatgccttctggagaataaaggtctcaatccttaagtgggctatcaaccagtaaatgtgtaaggaataatgtagttagaaaatcattcatggatgctaaacctagtgaatgaaagtttgaggaaaaacatgatatttacacatctcaaaatacacctccccaaataacttaatttcatgggaaaaataggcagactccaccttaaccaagtaagtcttctttaatctccctgattggtctaactgcttaattg

SEQ ID NO: 107398 - DNA, 229 bp, Homo sapiens
aagcgtaataatttttaaattatattttcaactcagaatagaggtttggtggctgaaaagagcaagtccgaaatgcaaacctgaaagcaatgaaagcaggtaagaggctgagtgggctcgcctcgagtctggagttgcggtgtgtgtgttaaccctaaaacatcccttcgcacccgtcaggagagaagagacagcccaagtccagcaccagtccccaaagccaaggatg

SEQ ID NO: 107399 - DNA, 300 bp, Homo sapiens
ccaccttggcctcctaagtagctggggtgataggcatgagcccaccactcccaggtaatttttaaatattattatttgtagagacagagtctttctatgttgcccaggctggtctcaaactcttagcctcaagtgatcctcccacctcggcctcccaaaatgctgggattacaggtgtgagctactgtgcccagccaagagtcaagttctaaccctggccttggatggcacatagggccttctgggtgggtaaaatgtgcccactaggccctgccagagtgttggctctcaggccatctc

SEQ ID NO: 107400 - DNA, 493 bp, Homo sapiens
taggccagggtcaaatttattttaacctagcctttccacttttgtttcttcaactacaattttacttgaaaggttcacctcacattcttgactaggtttctcggctacagaaaaacatgaaagagaattctatgcccattaaaaaggcaaaatgaaaatctgtgaactaaatgggataaaactggttcctgtaagaattatgaccacctttaccgaaatttttaaaactcattgttttactaacaggatgctcctggaattttaaaggtaaagtctgaacaacagtagagtaacctcaaattccaagcacaagtgaagacaaactttgagtaacagctacaaaaaggtagtactttaatccaaagttcagttcaaaataaacacagaggatagtagagggtctagaaagagaaccggaataaggaggtaccagtaggaagaggctataaagggagtgacgctgtggtggggcggtatggaggacaggtgagaa

SEQ ID NO: 107401 - DNA, 452 bp, Homo sapiens
ggtgcatactttacagttgagtttgatagcatagcaaggcttgacagataatgataactagctatctatgtgcctagggtttctcatacatcgcatcatgaatttttttacaaccttgtgtccagtgtattgatcagaaaggtcacagagacaagaagtgccccagcaggaattcagacccatctctgtttggcttcataatttatgcaaatcgatcccagacagaattctacttagaaatgcctcaagataccagttggaaattatctttcatttctgaaactggaaattaaaaaattatttaaacaatgcataatcattgtaaaaatatgtaggcattgggatatacagtataaataaaagaaaaatatcctttgtagagatcctttgtagacatagccaccattcatatttcgatgtgtgtcctttttgacctttttcattgtgtggct

SEQ ID NO: 107402 - DNA, 445 bp, Homo sapiens
ggccaccagagggttctcggggctccttggtcctggactgtggaactgggggcagctggttcctgggggctctgaagtcagtgtctccctcactgctcactgccatggtgtctctgcctctctctgcttctctgtgtccctcatcttcctcccacttcattctgactggcaagccctgtcctgcacagcttcttcccccacccctaggccttccccagacactccctctaactaggctggctgttctattcccttcccgctaacactgtggcctggcccacctcccaggaaataggaaaggtgcagaaatcacctggagttgccactcctgccaggcttcatctcgagccaatgtccccaggtcactaagagaatgagcttccactgtattcccatcaagggctcttcccctttgtgaggctgacctgtggacaagaccatggga

SEQ ID NO: 107403 - DNA, 1175 bp, Homo sapiens
tttttttttcatgtcacatgggtaatgtaccaacgacatgacaagatttaagggaggcacatctcacagacaagcatgaaaacccaatcatcatgcttatgaactaaaaaggaaactggattcttacaatcagaaacaggaatatcaaccaaattgtggtaccctatgagccaggagccacagaccatgcccaccttccactccgcctcttttaactttattatacaaaaatagctgtatccctccccaggatacaggcaagtcactacagccttgagaagccagcaggaagaagaattaaaccagatctccctaagggtgaagtagagctgccttcaaagataggaagttcctgcctctggagttgtttgtttattatggtacaagaaatcgagcacaattgggtcagaagaacagaagacccttccagcgccaattttctgggaggtggtccaaaggaagtcagtggggccagctctctccctcagacagctaacaggagcaaggcttggtcagccttcctgaagctctgcaagtccaaggcttctgagctatttattctatacttactttgaaaacacaaaattgctccaacaggatggatatgttacggaacaattaggcataataggatgtgcatttctgtctactgagaaacaccaggtagaaaactgcaccaagctgaattgagcttcgtggtaatacacaaaaaatgcacacagctcagctcaacaagtgcactgagtcacaccaaacacatttgatgttacaactttccatccaattccagataaccttcctcccactgcttctcaactgctcaaaagcctaactctccaaacccatttccacaaggtaatttgaagactttttcaaataaaatgccaaatttaccatagtagttatgtatttcttaaccatttaacatttataaaactatatcatttttattcagttccttttttcagatgtgtcactgacaaagttttagaatattgtgcccttaaccaaattttccccgtgagacctgtggtttcattgtgcagttctgcttaatgtggtaatttttagaatgcgtatgtcatgttgtattgtagcagaactatttccagggctctagtgtagagtatttacattcattcttaaaaattacactaaatgtccaaaaggaaaat

SEQ ID NO: 107404 - DNA, 279 bp, Homo sapiens
gggatcggtgtcttcactccatttcagagcagtttaccagaaagcctcttgctacccatcttggcagggttttttagaccattcaaactcaaggttcaaaataggcatttgccaggcccattcacagatctgagatggccaagtcactgaatgtcaaggttggatagactcaggtcaccttctcctgccacctctgcagtgccctgcactccccgcctctccactgtttcatcgggtggctgtgctttcctctgcagtgctgagtctacacggagccat

SEQ ID NO: 107405 - DNA, 464 bp, Homo sapiens
gtggtaagaggctgggaacaagatgaagcagacaaggtgaaaggggatgaaacaggaggaaaagagagagaaggagagggcagtctgctgcagtcccagtgccctggggatcagtaactttgcatcctggccctagccccacttattactgcctgtgtgacgttgggccagtcatctgtgctctgggccagctcccttagctatagaatgaggtgcggagagaagctgtgatctctacagccccctcttcctcaagtggcatgaacactctctttttctggaaggtcccttaccaactgctggcaaccactgcgaagagcagtgggcaggtgggtgcagatggcagtggtgctgatgaggggttgggggtgctggcacctcaggataactcaaaagcggtgcaggctgaagcccttcctccctccttccttctacctcctgcctgctgagccccccaggaccca

SEQ ID NO: 107406 - DNA, 355 bp, Homo sapiens
gtcccatgctccttatgagaatctaatgcctgagaatctgaggcggaacagtttcatcccaaaaccatctcccccactccagtccatggaaaaattgtcttccatgaaaccggtcctggtgccaacaaggttagggaccgctggtctaaaggacactgggcgatatacaaattgctgtacaaatgacggatggacttcagctttctcatctctaaaacaaggttgttacgaggattccctgaggcagtgcatgcaaaatgcttagaactgtgcctggcacatagtagaagcctggtaagtgtcagctagtctgattagatgaagtgcagcagggatacagaagagagagggcttg

SEQ ID NO: 107407 - DNA, 523 bp, Homo sapiens
tagatgcaaaatctcacataaaaaccatttaagaaaatctggggacatggaaattgtttttttccctttaacaagatggtaccactaatgtattcttatttttttgcccagagagtagcaatttctaaattgttagacatggttcttctttggtttcacataacccattccttcatggtacttaaagttagtaaatggttgaaatacttccttgagaagtagaaatgaggaagcatgaagagattaaatgagtcacttaaagccactgtaaggaagttttccttcctttttattggtttctgcctttggtgttctgctgcttaccctccctccttcctacctgccttgtgctggaaagggccgggatttgggtatgcccttctcagctgtgtgacttcgaacaagctatttgacgtctcaaggtcttacatttctcatctgtaaaatctaagatccttctcttcaaatggctcccaggtcacccctgctgcagaccaggaatatggctaacattttgggattt

SEQ ID NO: 107408 - DNA, 484 bp, Homo sapiens
tagctgggagtcactggagcttttagagcagggttgtggcataagcagaactgtaataagcctaatttggcaggagcaagtcccatgcgtgacaagagtggagatgaaaggcaaggtgattagacagagggtcattttaatcatctaagcatgaggtgtgagggttttcaccacacagtacagtaggttggcctgaagagacacacgagcgagtaattacagaggaaaatctaacaggacctcaaaaccggtaggacatgggagcaggagagaaggaggggtcaaaggtgatggtgcggtttcaagcctggctgaccacaggaaaggtgatatacttagccaaaataaagaacacagtggtaaccagagttcaggacatgtgagtttggagctcaagagagtcggggctcttattagaatcagaatatttgtcatcagttagttggtttagaaacataaaaactctctataaaaaataaaatct

SEQ ID NO: 107409 - DNA, 1480 bp, Homo sapiens
gccagacagctaggtgtcattcagggctggtgtcctctgtccaggccatcatggcctccactgccggctacatcgtctccacctcctgcaagcacatcattgatgaccaacactggctgtcctctgcctacacgcaatttgctgtgccctacttcatctacgacatctacgccatgttcctctgtcactggcacaagcaccaggtcaaagggcatggaggggacgacggagcggccagagccccgggcagcacgtgggccatagcgcgtggctacctgcacaaggagttcctcatggtgctccaccatgccgccatggtgctggtgtgcttcccactctcagtggtgtggcgacagggtaagggagacttctttctgggttgcatgttgatggcagaggtcagcacgcccttcgtctgccttggcaagatcctcatccagtacaagcagcagcacacactgctgcacaaggtgaacggggccctgatgctgctcagcttcctctgctgccgggtgctgctctttccctacctgtactgggcctacgggcgccatgccggcctgcccctgctggccgtgcccctggccatccctgcccacgtcaacctgggcgctgcgctgctcctggcccctcagctctactggttcttcctcatctgccgtggggcctgccgcctcttctggccccgctcccggccgcccccggcctgccaggcccaggactgaggccgggggccgggaccctccccctccccacccccacccccgtggagacagggctctggggctgatggctggggttgggagccagggtcctcttgcccggacaaccccaggactgacgatgaccccgaaagggaagaggccccatctctcggggactgagggggtggagagaggggacctcttccccctactctgcccccttcctgcacacccttgcgctggaggaggggagggggcaccgcctcccacccactgagggcaggagggcttgtggggagggacaccaacagggtttcaaggggaccaggagtcagaatgtggggagacgcctctgccaaggccatcccagcccctatgctgccatcccccagggctccccatcacccgagaggagaggacgccccaactaacccccgctggccctcgggcctcccgagtggccggctgcaaccacggctcctctccagggtaggccagcttgaggaatcttatttattttatttatttacccaaatttgaactagtctgttgggttgggggaaggaggtggctgctacccccaagccttcccagtgctgacaaccccgggggcaggcgagggcgcccagtccctcaccatcggctgcacatcgcgccctcgggccctgccatgtccctggtgctactgacctctcaaggcttcctccaatctggggtcgggggaccctgggaggtgctttacagaccgctaataaaagacgatctgcgtgaacgcc

SEQ ID NO: 107410 - DNA, 566 bp, Homo sapiens
cccccatccgcatcctcctcctcctgtcccctcttcctctctgtccctcaccaagccatcccctctttgcctctccccatccctcgctggcctgctcctgctccccttctcccatcctcccctcccccgtctctgcccagccagccccctcccgactccccagtttcatcggactccctggccccatcccgtccccgccctggcccctttgtgccccttctcatcgttttctccctccttcccgggcttggcgtcccttctccacccctaactccttccactcggcctccctgccccttcacggcccgcctgcctccctgcccaagtcctgagccaccatgctgaccccgatggtggccgggggggtggtgttccccggactcttcctcctctccaagaacacgctccagcggctgccccagctacgctgggaggaggccgacgcagtcattgtctcagccaggctggtgtcctctgtccaggccatcatggcctccactgccggctacatcgctgccgcccggcacgctgctcaccaacaacaaacacagccctgcagcacgaac

SEQ ID NO: 107411 - DNA, 2089 bp, Homo sapiens
cggggctttctcgcggggagcgaaggggaagagcgaatcccgccgccgcccgcctgggtcggatcctcatcagatgccggacgttggaggaggcaccgggttctggggcgccacaggaggattgaacccccaggctacacccaccacttggatgtatctccggccaagccactgagcatctgcaaaagggagaaacgcctgccgctcagggatattggcacccggtggagaggatgagtgaaacagcctgtgggcggcagaacctggaagaacagagaacgacaagcctgtgcagccttggactgttttgctctcaacaagaagaaatcgacaaggaaaggaagaaatgtaggagagagtccagattccagtgagactcgggcctgactctaaccagctcatggcctgtaaactttcctcccttccacattttcttgtctaggttctgggtgctgaggagaaacatcaacctccctttctgtcttccaacctgtccctctgaggcaggcatgaccctgctgttcgcagtgggttgcgtcttcttcccgttgtgcttcactgccctgcgctggggcttgcagaaccacaccaacctgcagatggagagacaagaggctgtcctggtagcatccaagctggtgtcctctgtccaggccatcatggcctccactgccggctacatcgtctccacctcctgcaagcacatcattgatgaccaacactggctgtcctctgcctacacgcaatttgctgtgccctacttcatctacgacatctacgccatgttcctctgtcactggcacaagcaccaggtcaaagggcatggaggggacgacggagcggccagagccccgggcagcacgtgggccatagcgcgtggctacctgcacaaggagttcctcatggtgctccaccatgccgccatggtgctggtgtgcttcccactctcagtggtgtggcgacagggtaagggagacttctttctgggttgcatgttgatggcagaggtcagcacgcccttcgtctgccttggcaagatcctcatccagtacaagcagcagcacacactgctgcacaaggtgaacggggccctgatgctgctcagcttcctctgctgccgggtgctgctctttccctacctgtactgggcctacgggcgccatgccggcctgcccctgctggccgtgcccctggccatccctgcccacgtcaacctgggcgctgcgctgctcctggcccctcagctctactggttcttcctcatctgccgtggggcctgccgcctcttctggccccgctcccggccgcccccggcctgccaggcccaggactgaggccgggggccgggaccctccccctccccacccccacccccgtggagacagggctctggggctgatggctggggttgggagccagggtcctcttgcccggacaaccccaggactgacgatgaccccgaaagggaagaggccccatctctcggggactgagggggtggagagaggggacctcttccccctactctgcccccttcctgcacacccttgcgctggaggaggggagggggcaccgcctcccacccactgagggcaggagggcttgtggggagggacaccaacagggtttcaaggggaccaggagtcagaatgtggggagacgcctctgccaaggccatcccagcccctatgctgccatcccccagggctccccatcacccgagaggagaggacgccccaactaacccccgctggccctcgggcctcccgagtggccggctgcaaccacggctcctctccagggtaggccagcttgaggaatcttatttattttatttatttacccaaatttgaactagtctgttgggttgggggaaggaggtggctgctacccccaagccttcccagtgctgacaaccccgggggcaggcgagggcgcccagtccctcaccatcggctgcacatcgcgccctcgggccctgccatgtccctggtgctactgacctctcaaggcttcctccaatctggggtcgggggaccctgggaggtgctttacagaccgctaataaaagacgatctgcgtgaacgcc

SEQ ID NO: 107412 - DNA, 2040 bp, Homo sapiens
cccccatccgcatcctcctcctcctgtcccctcttcctctctgtccctcaccaagccatcccctctttgcctctccccatccctcgctggcctgctcctgctccccttctcccatcctcccctcccccgtctctgcccagccagccccctcccgactccccagtttcatcggactccctggccccatcccgtccccgccctggcccctttgtgccccttctcatcgttttctccctccttcccgggcttggcgtcccttctccacccctaactccttccactcggcctccctgccccttcacggcccgcctgcctccctgcccaagtcctgagccaccatgctgaccccgatggtggccgggggggtggtgttccccggactcttcctcctctccaagaacacgctccagcggctgccccagctacgctgggaggaggccgacgcagtcattgtctcagccaggctggtgtcctctgtccaggccatcatggcctccactgccggctacatcgtctccacctcctgcaagcacatcattgatgaccaacactggctgtcctctgcctacacgcaatttgctgtgccctacttcatctacgacatctacgccatgttcctctgtcactggcacaagcaccaggtcaaagggcatggaggggacgacggagcggccagagccccgggcagcacgtgggccatagcgcgtggctacctgcacaaggagttcctcatggtgctccaccatgccgccatggtgctggtgtgcttcccactctcagtggtgtggcgacagggtaagggagacttctttctgggttgcatgttgatggcagaggtcagcacgcccttcgtctgccttggcaagatcctcatccagtacaagcagcagcacacactgctgcacaaggtgaacggggccctgatgctgctcagcttcctctgctgccgggtgctgctctttccctacctgtactgggcctacgggcgccatgccggcctgcccctgctggccgtgcccctggccatccctgcccacgtcaacctgggcgctgcgctgctcctggcccctcagctctactggttcttcctcatctgccgtggggcctgccgcctcttctggccccgctcccggccgcccccggcctgccaggcccaggactgaggccgggggccgggaccctccccctccccacccccacccccgtggagacagggctctggggctgatggctggggttgggagccagggtcctcttgcccggacaaccccaggactgacgatgaccccgaaagggaagaggccccatctctcggggactgagggggtggagagaggggacctcttccccctactctgcccccttcctgcacacccttgcgctggaggaggggagggggcaccgcctcccacccactgagggcaggagggcttgtggggagggacaccaacagggtttcaaggggaccaggagtcagaatgtggggagacgcctctgccaaggccatcccagcccctatgctgccatcccccagggctccccatcacccgagaggagaggacgccccaactaacccccgctggccctcgggcctcccgagtggccggctgcaaccacggctcctctccagggtaggccagcttgaggaatcttatttattttatttatttacccaaatttgaactagtctgttgggttgggggaaggaggtggctgctacccccaagccttcccagtgctgacaaccccgggggcaggcgagggcgcccagtccctcaccatcggctgcacatcgcgccctcgggccctgccatgtccctggtgctactgacctctcaaggcttcctccaatctggggtcgggggaccctgggaggtgctttacagaccgctaataaaagacgatctgcgtgaacgccaccaaggcccttgccaccaagttctttggggctgggaagggaggaggtggggggcttgggccatgggaaacagaggggacaggatccccagctgctcgctgggcagtcagggaggaggaaag

SEQ ID NO: 107413 - DNA, 1918 bp, Homo sapiens
cccccatccgcatcctcctcctcctgtcccctcttcctctctgtccctcaccaagccatcccctctttgcctctccccatccctcgctggcctgctcctgctccccttctcccatcctcccctcccccgtctctgcccagccagccccctcccgactccccagtttcatcggactccctggccccatcccgtccccgccctggcccctttgtgccccttctcatcgttttctccctccttcccgggcttggcgtcccttctccacccctaactccttccactcggcctccctgccccttcacggcccgcctgcctccctgcccaagtcctgagccaccatgctgaccccgatggtggccgggggggtggtgttccccggactcttcctcctctccaagaacacgctccagcggctgccccagctacgctgggaggaggccgacgcagtcattgtctcagccaggctggtgtcctctgtccaggccatcatggcctccactgccggctacatcgtctccacctcctgcaagcacatcattgatgaccaacactggctgtcctctgcctacacgcaatttgctgtgccctacttcatctacgacatctacgccatgttcctctgtcactggcacaagcaccaggtcaaagggcatggaggggacgacggagcggccagagccccgggcagcacgtgggccatagcgcgtggctacctgcacaaggagttcctcatggtgctccaccatgccgccatggtgctggtgtgcttcccactctcagtggtgtggcgacagggtaagggagacttctttctgggttgcatgttgatggcagaggtcagcacgcccttcgtctgccttggcaagatcctcatccagtacaagcagcagcacacactgctgcacaaggtgaacggggccctgatgctgctcagcttcctctgctgccgggtgctgctctttccctacctgtactgggcctacgggcgccatgccggcctgcccctgctggccgtgcccctggccatccctgcccacgtcaacctgggcgctgcgctgctcctggcccctcagctctactggttcttcctcatctgccgtggggcctgccgcctcttctggccccgctcccggccgcccccggcctgccaggcccaggactgaggccgggggccgggaccctccccctccccacccccacccccgtggagacagggctctggggctgatggctggggttgggagccagggtcctcttgcccggacaaccccaggactgacgatgaccccgaaagggaagaggccccatctctcggggactgagggggtggagagaggggacctcttccccctactctgcccccttcctgcacacccttgcgctggaggaggggagggggcaccgcctcccacccactgagggcaggagggcttgtggggagggacaccaacagggtttcaaggggaccaggagtcagaatgtggggagacgcctctgccaaggccatcccagcccctatgctgccatcccccagggctccccatcacccgagaggagaggacgccccaactaacccccgctggccctcgggcctcccgagtggccggctgcaaccacggctcctctccagggtaggccagcttgaggaatcttatttattttatttatttacccaaatttgaactagtctgttgggttgggggaaggaggtggctgctacccccaagccttcccagtgctgacaaccccgggggcaggcgagggcgcccagtccctcaccatcggctgcacatcgcgccctcgggccctgccatgtccctggtgctactgacctctcaaggcttcctccaatctggggtcgggggaccctgggaggtgctttacagaccgctaataaaagacgatctgcgtgaacgcc

SEQ ID NO: 107414 - DNA, 2347 bp, Homo sapiens
cggggctttctcgcggggagcgaaggggaagagcgaatcccgccgccgcccgcctgggtcggatcctcatcagatgccggacgttggaggaggcaccgggttctggggcgccacaggaggattgaacccccaggctacacccaccacttggatgtatctccggccaagccactgagcatctgcaaaagggagaaacgcctgccgctcagggatattggcacccggtggagaggatgagtgaaacagcctgtgggcggcagaacctggaagaacagagaacgacaagcctgtgcagccttggactgttttgctctcaacaagaagaaatcgacaaggaaaggaagaaatgtaggagagagtccagattccagtgagactcgggcctgactctaaccagctcatggcctgtaaactttcctcccttccacattttcttgtctaggttctgggtgctgaggagaaacatcaacctccctttctgtcttccaacctgtccctctgaggcaggcatgaccctgctgttcgcagtgggttgcgtcttcttcccgttgtgcttcactgccctgcgctggggcttgcagaaccacaccaacctgcagatggagagacaagaggctgtcctggtagcatccaagctggtgtcctctgtccaggccatcatggcctccactgccggctacatcgtctccacctcctgcaagcacatcattgatgaccaacactggctgtcctctgcctacacgcaatttgctgtgccctacttcatctacgacatctacgccatgttcctctgtcactggcacaagcaccaggtcaaagggcatggaggggacgacggagcggccagagccccgggcagcacgtgggccatagcgcgtggctacctgcacaaggagttcctcatggtgctccaccatgccgccatggtgctggtgtgcttcccactctcagtggtgtggcgacagggtaagggagacttctttctgggttgcatgttgatggcagaggtcagcacgcccttcgtctgccttggcaagatcctcatccaggtgagtgagcatgggagggtgcaggagcccaatggggaggtcacaggaaggggagggaccttcaaggttgctgccaagggctctagccccttcgtcatccccccctcaccccgtgcattttgagcacctggtgcttgtgtcctggcaaagtgtctggtttgggaggagctgcctgctagggtcgcagggaggcagggagagggccaaggggggccgagcccttctgctgccgtggccactgtgtctgtgtctcctcagtacaagcagcagcacacactgctgcacaaggtgaacggggccctgatgctgctcagcttcctctgctgccgggtgctgctctttccctacctgtactgggcctacgggcgccatgccggcctgcccctgctggccgtgcccctggccatccctgcccacgtcaacctgggcgctgcgctgctcctggcccctcagctctactggttcttcctcatctgccgtggggcctgccgcctcttctggccccgctcccggccgcccccggcctgccaggcccaggactgaggccgggggccgggaccctccccctccccacccccacccccgtggagacagggctctggggctgatggctggggttgggagccagggtcctcttgcccggacaaccccaggactgacgatgaccccgaaagggaagaggccccatctctcggggactgagggggtggagagaggggacctcttccccctactctgcccccttcctgcacacccttgcgctggaggaggggagggggcaccgcctcccacccactgagggcaggagggcttgtggggagggacaccaacagggtttcaaggggaccaggagtcagaatgtggggagacgcctctgccaaggccatcccagcccctatgctgccatcccccagggctccccatcacccgagaggagaggacgccccaactaacccccgctggccctcgggcctcccgagtggccggctgcaaccacggctcctctccagggtaggccagcttgaggaatcttatttattttatttatttacccaaatttgaactagtctgttgggttgggggaaggaggtggctgctacccccaagccttcccagtgctgacaaccccgggggcaggcgagggcgcccagtccctcaccatcggctgcacatcgcgccctcgggccctgccatgtccctggtgctactgacctctcaaggcttcctccaatctggggtcgggggaccctgggaggtgctttacagaccgctaataaaagacgatctgcgtgaacgcc

SEQ ID NO: 107415 - DNA, 812 bp, Homo sapiens
tctgaccccaatcactggtgtcccctttcctccttgctcccccaccccgtctctctgcccaacagacactggctgtcctctgcctacacgcaatttgctgtgccctacttcatctacgacatctacgccatgttcctctgtcactggcacaagcaccaggtcaaagggcatggaggggacgacggagcggccagagccccgggcagcacgtgggccatagcgcgtggctacctgcacaaggagttcctcatggtgctccaccatgccgccatggtgctggtgtgcttcccactctcagtggtgagtcccggggagctgggcgggcggggtgcgggtggcctgctccttggtcctgctggtgctggcaggagcctgggaagccccgggtctgcgtactgacaaccaagcagacccagcgtattcccagggaaagctgtggacaggcagggttcactgagcaccagcccagggcaccagggtgtgggggcagcctggccctgggctggacgatgcccggctgtggctctttggatttgtggttgcacgtctctgagcctcagtttcctcacctgttacataagggacacagtctttctgcaggaccgtgagagggatgcagccaagtcatgcacctgctcctgcacccaggtgttctttctcttttttttctttccaagacggagtctctctctgtcactcaggctggagtgcagtggtgtgatctcggctcactgaaacctccgcctcctgagttcaagtgattctcccatctcagcctccccagtagctgggattacaggtgcccaccaaca

SEQ ID NO: 107416 - DNA, 566 bp, Homo sapiens
taatgtcttcgaaagtattgactttaacaagtactttgtgatgcatttattatttcatttgttattatttatgtatttgatttatttctttgtgaggtaggatagaatctcagtcagatttttgctgttaggataccacagactggataactacaaagaagggaagtctgtttaactcgcaattctagaggctggcgcatctaagagcatgacactggcaactggcgaggatcatctcatggtggaaggtggaagggagtacatgagatagagagaagcaccaggggctggactcgctttgtaacaaccaacccttgagataactaacccgctcctgcaataatgacaattaatccactcatgagggttccaccctcatgactgagtcacatataattaggccccacctcctaatattattcactggagtttaagcttctaacacgtgaacttttgggggatacattcaaaccatagcagatgatgagcaaaagtacatacgatcccttatctattgagcttacagcttagaggagaacatacatttcttaaaatgtttcttaaat

SEQ ID NO: 107417 - DNA, 744 bp, Homo sapiens
gtaaagaagaataatgaatgcaaaaaaggaacctactgagctatcaaaggacaaacttgtaagattctgaaacttgtaagattctgctttttccagaaactactctaagaggaattgaaaatggtaagagaggcttccgaaaaaaggatattagctcaactatacaagtgagtgaaaaaaaaacaaattatatatacagttgacagtaatgcaaaagaaatgaacagacccaagaaatagtagcaggaagctgaatctgtgataaaggtgtagcatctttgacacttctgtggatttagattctaccattcatgctatgtgtttagaattacagcctgtgatatcctgtgagaggtacaatgtccttccgtgggttttagtggctctttagaatgggtaggagtaagacacgtgagcatcccagagaggcaaatgctgtattttcattccattgtcatttatcaaaatgctttggccaaggctgctgaaaggaacaactccatgtagacacatgggaaaataattaggaagtaaatgtaggaataggtgctaattggaacagtcttccctatttccaatcagtaaaagaccttgggaagattttggaaaggtctttgaagctatcaactagatactctagtattagtaaaggagtcagttctaagttaaggaatgactatggttggttgagcactcattatatccttctgaaatattccctatagttctgatctgtagcctaca

SEQ ID NO: 107418 - DNA, 345 bp, Homo sapiens
ggacaagcattctggaggggagcctgacactccttagttcaattagatgtaaataaaactctgaacagaactgctggtttctggcttctcagcacttctgttcctgagtttttatccaaaagaaattcttatataggtccaaaagggaatatatacaacaatgttcattgcagcatttctggtggtgatggagaattggcacaagcctagttgtccattgctgggaaagtggggagataaaatgcggtgttggagcaacatgaagtttaacgcagattgacctcatctctacaaaaaaataaaatattagccaggcacagtggcatgcgcctgtggtcccaattg

SEQ ID NO: 107419 - DNA, 618 bp, Homo sapiens
  misc_feature (612)..(613): n is a, c, g, or t
  misc_feature (617)..(617): n is a, c, g, or t
gtttcctaagacataagtagatggattttgttcaaaagccttatcccaagggttgacatcagttctaatgtgtctcactatggtttctcccaggagtcttctcaaaacctcttggccccacaatctcagctgttagccccaaatgccagtatctggagattctttgccaggttaacccctactttcccctttcaactcacaggggccctagggacacatgtatttgcctgaaatctctctcttttcttgtgtttgctaattttctggcatatcttttgcctatcttgattttttgtatttccaaaatgtgtacatagttttaaaattttaggatacaaatgccattcctgggtaactaaaatggtctttgctacaattattattccatgtgtgagtaccttgtgcatgcttggacattatcagcaaagccatgggatttgattctaatgtttattttaattcagctggttcacattatataataaaatctgactaattctgaataatggaagttaagactactgtgatttcctgaaaaatgagaatcattgactaattttcaacataattaaattgttttcctttcaaattccatgtgtatcataaacaaannaaana

SEQ ID NO: 107420 - DNA, 414 bp, Homo sapiens
  misc_feature (10)..(10): n is a, c, g, or t
agaggatccncgcacacacagacacaaacacataccacacagactcacacttgtgcacacaactacacattctcacacatattgtgtgcacaagtgtgtgggtgtcagagagtgtgtgtgagtctggtgtgtgcatgcatgtgactccatgtggtgtgtgcatgcatgcgtgggtgtgccatgggtggagtgtgtatgcaggtgtatgaatatgtccatgtgtgtgagggtgagtctgtggtgcatttgtgcatgaatgtgcacgtgtgtgttcatctgtgttcgagtgcgtatatgcatgtgcatgtgtgttcatgtgcgtccatgtgttggtgtgtgcccatgtgtctgcgtgcatgtgtgttcatgtatgtcagggtttctctctcccctcccttggtcttaattcttaca

SEQ ID NO: 107421 - DNA, 550 bp, Homo sapiens
gaaggtatgatccatggatcaggaaaccagccttccctagacatggaatctgctggcaccttgattttgaacttcccagactccagaactactcctgcccctgccacgagaacacaccctttccagtttgctggagaaatataagagaagtccagtgaaagagagctgagtttccccaatgatgccatcaagatgaactaactacagttaaccagccagctgatagcagatgcatgagtgagcccagctgagagcaggttgtgcaagcatggcacgtgcatctgtttggcttgtggtgaggcctcaggaagcttacagtcatggtggaaggcaaagagggagccagtacatcacgtgaactcgtagagtgagaactcattcactaccatgaagacaacaccaagccattcctgagtgcctacaatagttcctggtatgtagaaggtatacaataaatattggcggagtgaaggaacaaatgggatttgcttgattctgctgcagaagactaagaaaaagacataaatgaataaataactagtagaatgtt

SEQ ID NO: 107422 - DNA, 337 bp, Homo sapiens
tgacctgaacatctcccactaggcccacctccaacactgggggtcaaacttcaacatgaaatttggaggggacaaacatccacgtcatatcagatatcattatttaacctaccatatccttggaattaggggttgatgtgttactgcagcatagtttaatgtatgctgaggaatatggaagccatagtaagttaatactaaaatctcactggacattaactatagaagtatgcccaaggtaactatttagtagacataatcagcctcaactttttgttgtcttcatgaggttgcaaattatagaacttgcttatgaaagttaatacaaaatgcacaa

SEQ ID NO: 107423 - DNA, 398 bp, Homo sapiens
ctgctttcttttgtagactcctgcccctgccacgagaacacaccctttccagtttgctggagaaatataagagaagtccagtgaaagagagctgagtttccccaatgatgccatcaagatgaactaactacagttaaccagccagctgatagcagatgcatgagtgagcccagctgagagcaggtgagcatggcccagagcagcagagctgctgagccagtccctgagttgaaacaaaataataagtggttatcttcatccattaagcttaatttgttgtacagcaatagtgtatcgatacaggatcatttgttccagaattcccatattagagatgagaatactgaggctggggatctacattttccccaacttaacagagctaccaaactccccag

SEQ ID NO: 107424 - DNA, 180 bp, Homo sapiens
aaggaaggcagtcaggcaggcagggaagggagggagggagggagagaaggaaaggaaggatcaattaccttatcttccacttcaggaaacatggaaaaatagagcaaacaaaagcagagggaataaaatactgaaaactagagtacaaataaatgaaatagatactagaaagcaatagag

SEQ ID NO: 107425 - DNA, 636 bp, Homo sapiens
  misc_feature (516)..(516): n is a, c, g, or t
gaattgtctgtttgcttttagtacctacattttcgttatgaatctaggtgtgtaaagagtgagccaccacgccctgccaaaaatgtgcatttctagcaggttcccaggtgacgctgctggccacaggggctgacgctgcgggaagccctgacctagtgcacaacccattgggctcttcactgtcagtgtagaggcataggtccaaaatatgtttccccagtcaaaaacatgtaaggtttgcaccaggagtggaaggaaacaaacaaacataaaccaaagcaaagacacttaagggctgggtactcatgcctgtaaacccaacactttgggagtttgaggcaggaggctcatttgaggccaggagtttgagaccagcctggggaacatagtgagaccctgttgcaacaaaaaccagaaaaacaacaaaaagaagacattggaaaatggctggagctgattctaggtgaataaacaaccctcgacttaaaaaaaacaaccaccgacgcacctccccgngcttacgttccatggatggcggactttgcttaatagcgccttagagttatttcctctgggggggggcccgggacccctattccccctttagggggggtggtataacaattaattggcccg

SEQ ID NO: 107426 - DNA, 502 bp, Homo sapiens
gaagataattttctcctttgttttggagacacttaacaagtggattaaggatttaaaagtaggttatttgatttgttggcctaggttatattgctgatgctgcaagaataattttaataaagtggaaaggacaaagttcatattgtaaggggttaagtagttcctaggtgataattaaatgtagtcaaatttgtatagattgcagtcttttcaaaagtttaacattgcttatttttgtcttcataatattaaaccaggtctatctaaaattttaatatcacatgcaagaagcattatcattttgtagcagatttttaaagctgttatttcagattttgaactgatcagcatgagacagattttctttagaaccatttttgttctggacaaaattcaagctggatattactgattactctgaaatgcaaatagtgctattttgttttacagctatcatttaaaaagccatgtactcattaagataaatatgtgcagcatgaac

SEQ ID NO: 107427 - DNA, 323 bp, Homo sapiens
aaattgcaacgtcatgacttgtggcgttattaaaacttcctgtattcctggttggctggatataatcttgaacaaaaggcatgcacttaaacaggaaaggtgaaaggcggaatgcaggttttcagctaaggagcttcccttttaaagaattgatgaagtgtcattattgggggtgggtgtgaaaggtgttagctaggaaaattaactttgcacttgcattgatattaagaaattattttcggacgggcgcggtggctcacgcctgtaatcccagcactttgggaggccgaggcgggcggatcacctgaggtcaggagttcgag

SEQ ID NO: 107428 - DNA, 784 bp, Homo sapiens
agtgatgtgctgcagatgtataggtcagtttgtcaggaaaagatacccaaggtcaggaattgaatttctcaggagtttctaacaaaatgcctgcctgcctgtgaatacaaaaggagactgggaattgcccccaactggatacagtcaattcctactactttgaaataacatgtagtatagctatatataagaatacataagctcacacagagaaaaagcatggaaagagtgtcatctagaaatgataggtatgtaagaatattataagctttaaggcactacacagaggttttagtaatggaacagttaactaccatctatggtgcttcaattcatacctatgttacaacctcatccagcagggctcattctagtacaattaaataacggttgtgcaaacactggggtctgtctggggatagggtgcggggagggagagtattagaaaggatggctaatgcatgctgggcttaatacctaggtgatgggttgacaggtgcagtaaaccactatggcacacatttacctatgcaacaaacctgcacatcctgcacatgtaccccatacctaaaaagaataattttaaaaaagatttgagagaaaaaataataataatggttgtgaaaacactttgaaagtataatcataccaaacaaatgtgagattgcaccattttactattattttcttaaacgactttcctttaactgcatactttcctattttctcttcctgtatgtgttatttaactagtcaatagtatcttgagttaattttgaagtta

SEQ ID NO: 107429 - DNA, 456 bp, Homo sapiens
atgtgatggtcatggcctggcatttgtactcagctatggtagcagaatatgcttaaattgataagattagataaatagcattcttcagatgttctggatgacagcatatttaatgtaattgcatttgtctgccagtttctatgtgttagagcacaaaagattttgaaccatgcataattttgatagagaaattcaatccactttcttctataatataccacaaattataaattttcattgcaactattcaatcgcttgagaaaagaatgcatttcaaatcaggttccatgccaaatacctcatttatggagctatgctgcttaaaattggacaaattgattaccttactgaatattgaaaatattagttggaagcattaaaaccatctttattagctctagactctagtaatacatatacttgtgtaataaatattaagagctactaatataccag

SEQ ID NO: 107430 - DNA, 378 bp, Homo sapiens
tcctctagttccttctagaatcatccttgaaaaacattcatgaaggaggaagaaatgatgggtatgtttcccaatacttttttgtctgatctgttctgtttcgttctttttttgtgtttcagcatctaacacagaatctgcttgataaaagacacccagtaaatatggatagaaaaaatgtgtttgaggccgggcatggtgactcacgcctataatcccagcactttgggaggccaaggcgggcagattgcttgaggtcaggagttcgagaccagcctgcccaacatagtgaaaccccatctctactaaaaatacaaaaattagtcaggtatagtggctcacgcctgtagtcctagctactcaggaggttgaggcagg

SEQ ID NO: 107431 - DNA, 428 bp, Homo sapiens
ctggaaagagaatagaattaaagagaagaatcatctatgtatgaagcctggtctaactgataacgcagtcagattgccatttttaagatggaaaaaggggaacatgcttgccttgagcagaaaagtttttggtggggctggagctcctaaatattattttggtcatttgcccaaaaactgaagtacaccaccaatgtcccaattatgaagttgaatacagaattataaaaaaaaattgttgaaagtcaataagaataaatcttagaatttggactcctgccacatggcagaaaaaaagcatgatgttttaagacaacctggcctttgtccaacatgatgtttaccagattgctgacattttctagcataacaatactattcatcattgggataaccaaaagaagggaaataaaaaaaaaaagaagtct

SEQ ID NO: 107432 - DNA, 698 bp, Homo sapiens
tctgacacattccacccatacctgaaactacaatgaccatcagcccctgggccagaggatgggcttctccctgggcattctgggagtcatagggtcctttaatccaaggattagctctggcctttgaggacatgaacatccaagggcccaggctctactctcgatgccaacttcatttactctagtcttccaagcatagggattcttggaatcagcctcaaagtgaggctggcgggcttgcccgaggaattctaggagttgtagttctctagtgtgatattgctggactcagctctcagatgctgccctggatgctcatgaatccccagcctgacctggttttgacccccttctaggttttaagaggctcaagaagcttagtttccaggctgggcacggtggctcatgcctgtaatcccagcactttgggaggccgatgggggaagatcacgtgaggccaggagttcaagatggccaaacctcgtctttactaaacatacaaaaaaattagctgggtgtggtggtgggcacctgtaatcccaaatcccagctacttgggaggctgagacaggagaattgcttgaacctgggaggcgggaattgcagtgagctgagattgcatcacggcactccagcctgggccacagagtgagacactgtctcaaaaaaaaaaagaaaaagaaaaaaaaaaaaagaag

SEQ ID NO: 107433 - DNA, 190 bp, Homo sapiens
acaaagggatttttgctaggatgaggggaagatgaacacgtctgcagacttaaggtcaagagaaggagaaaattttggatattcaattactgaacaccggtaacatgaaaacaattatctaacaagtttggttgaatacaggaaatttcctccaataaagaaagattgtatcagttaagtctaatatata

SEQ ID NO: 107434 - DNA, 342 bp, Homo sapiens
tcagtccagctgtttcttaactccagcctcacactatacagatgcattctctccagagccctttgcccccaagtctagactttagttctgacttaattcttcaacacttagtaagaacaggcagaactaaatgtttagcagaatcttggtgaggaattgagaataatcagaaaacaaaacatggataaaggaaaaagaaagaaacttcaactgaatactaggtattatggctcctaataagcccccatgaggaaaccctctggtccctctttccttagactcccgtatccttgcctgttgccatattacagggggccccctaccatgaagggcctctggcca

SEQ ID NO: 107435 - DNA, 551 bp, Homo sapiens
caatactgactcttgagtcatttgctcattctctcaataaacttactgaatttagtcatgccattttggaagacaccaaagaaatatagtaatgatctataagactggtgggaacgggtgcttggattttactcaggaagacctgggaacaagattgtattcccttttaattggaatcattaaaatatatccaggcttatgcaactgcagctcattatagggagatgttaagtaattctctaattatatgtattacactgtaggcagaagatcctcagacaagtgacttatctcacatgtcaaggggcagagctaaaagcaggacttgacttcctgacttgaataactgttctgaaccagctgcctagcaaccatggcctccgttcaggagcagctaccatgtgaggagcgtcggtgcccggctgctccactaaactgtgaatttctcaagggcagaaacagggtcctgttcctctgcatttcccccagggccttgtctggcatcagacacacagaagagagatcttcagtaaggagtcagctttacagtt

SEQ ID NO: 107436 - DNA, 629 bp, Homo sapiens
ttaaaatcagcttttcaagttccgtaagaacacttgacaggatattaaggttctagttaggtatcccttatctgaaatgcttaggaccagaagtatttttggatttgggatatttttttcagaatttggaacatttgcattatatcagttaagtatcccaaaatctgaaatctgaaatgcttcaatgaatatatattttttagcatattgttaatgcttaacaagtttcagattttggagcatttttggattttggcttttcagatttgggatgctcaacttataatcacattggttttatagatttatagattaattttggagaagaactgatatcctgaaggtaatttattatctatgagcatgacatttttctgtatttgcttagatcttctttaatctttttttcttctttaatcttttaatgacattttcttttcttcataaaggtcttgcatacctttgttgagagaattataattctttataatttaattgaatttcttatttttggttattataaattgtattttgaaatgatctttctaacattattgctggtatgtgcatgtgcatttggcttgtgcatagtaatttgataacagaaaaaaactttctaaactcttatt

SEQ ID NO: 107437 - DNA, 1214 bp, Homo sapiens
gggaacctgggaactgaagatctttctgcccaaaacaagctggtgtgagaaagggcacggttcctagacatgtgaacaaaaacaagccactgaggggaactctggacagctttctttgagaggaaactttgccaaattcctagattcaggaaaagccaatgaataaaagtttgactctcaacaagcttatatcatagggacatgtttttgaaaagttgtattgggaccagaggaaatgttttactacctcactgattctcagaatagaagaggtttgttttaaagtatttatttgactagaaaggcatttttacatgcttgaatacactatacatttgcaaagaaagttccagtactgcaaagtgattctagatacagtgtcttatttaatagcacatatttaatgttcttttgttgctcatcattatacatcctgtgtttgggttgtgccagcccttattgcagagtaaaattagtcaactcttagtcaccagctgggtcacactggtggctgggaaagaccaagaagaggcagaggaagaggtggcaccgatgataaaaatccattcaagaatttagctgtgacacatctacagcaggttcaaatctctcagctgtaagacaaactggatactttataaggactgtggcctattatgcaccaaaatgccttactgaaattgtctggatgagctgcctgctgggtccagtgatacattagtaaacgaagaagttgaaatagaaggctaacatatgctttggatcgcttggcagtgtgacaccaatatggcatcaagccttactatgagtccaaggacttaatgactaaataaaagtaaaaatgaacaaaaaaaaaaagtgaatgcttctagatttccttcaaacagcctcttttatgacttctcttctttttgttccttctactttatgccttacttctcttctcacaccagggcaggcagtatatagtctagtaattatgagcacatgcccagattgggctcaaatccctggctagcactaccctgtgaccctaggcaagttccttaacctctgtgcctcaatttcctcatctgtaaaatggaagttaatatgtatctcatagagtagatgtaggattaaacaaactagtacaaagtacatgtgaaacatctagagccccatctgttatgtaataagtgctcaataaataataaatgccattatactgatta

SEQ ID NO: 107438 - DNA, 393 bp, Homo sapiens
actccctcacaagattcaggtttctattcaaaaggctctcatggagaaataaacttgcttgaccattgtcttggtttggtttcttccaaaaccaactctaaaaccagaattgggtagaaagagtctatttggaaggcaatccctgaaagcagagtaaggaaataagaagatgaggcaaggaagagaagaaagccaattaagagtgtgctgataggtgggtcactactgtgggcacctgagacttcacaccactggagacacttaagaactatcaccagctccatctctcactagttgaagagattgcttctggggacattagttcccagtctgcccatgtgttgtcagagctggtacttgaggcagagaacataataggctcccaatgaacat

SEQ ID NO: 107439 - DNA, 437 bp, Homo sapiens
ggaacctggacaatatctattcactctttaagattcaccatttgttgcctccagtttcaaagtttttcccatttctccaagtagagttagtcattctcccttctgcccatgtgtatctctgttacgtgccatatattatatgccacatgatattaaatatgtacctattttattgcctttaagatgtgaactactctaaaagagtaactactggttccttatctctgcatgccagcacccatcacagcatctggcacttagtaatttatcaataaaagaagagagtaatttatcaataaaagtaatttatcaataaaagaacaaaggaaggagggaggtagaagagagagaaaaagaaacttgagtgcatcttccactgggagagacttctgtttcctcaactccagattacatgagaagaggaggtgtataaattt

SEQ ID NO: 107440 - DNA, 420 bp, Homo sapiens
tgagatggagtcttgttctatcacccaggctggagtgcagtggtgcaatcttggtacactgtagcttctgcctcccaggttccagtgattctcctgcctcagcctcctgagtagctgggattatagttgtgcaccaccaagcccggctaatttttgtatttttagtaaagacggggtttcactgtgttggtcagactggtctcgaactcctgacctcaggtgatccacctgcctcagcctcccaaaatgctgggattacagacctgagccatcgtgccctgccaataacaaagttttgatgagcgtttttctctctctccttctagtgaatccagttctggaggttcagggtcataatgttgggatcctgcccagctctctccataatcctctgtgtgtattatttggaaatgcctcttt

SEQ ID NO: 107441 - DNA, 398 bp, Homo sapiens
aaaaaatgctatgggtcccaaattataacaaaggataccttttaattttaattccaatattgttttcaataatatttcaacatgtttcctgttgtgccctggtattcttaggcagccagttgtaaaaggcttctttgatttggcagtaaagagctcataaaggaatgagcactaagttattcattgcccattagcacaaattgcaggttaggtatcagtcaagtgaggcaatggataacatttcttgtatatgtctaagaaacttgtgaaacagaatttcctggcagattaaatttaatttaaccatactgaataaagaaaaatttcagggactttgtaaatggatttcttagaaggatttaaaagtggcttaagttttgcagttgagtctttttaaa

SEQ ID NO: 107442 - DNA, 537 bp, Homo sapiens
acccttaattttgaagctcttcacaaattgtgagatccaaataatgactcaggaatgacatatgttaatgaagaagcaggaaagacccaggcagaaaggtaaggtgcatgtatgtatatatggaaatcttgtcagtcacagatccaggctaatatgtgtggggaaagaataaaacatatctgtacaatatgactgactgaccactcttagaagttttcaagaaaaaaatccttcatgaagtcacaatttaatttctcattaaaaaaacagaataaatataacagtttattaatgtaatcagactttaaactttctaaagaaaaaaatagtcaccttacaacaaaagaaaccttcatgacagatttaatcatgttgtgactaaatgctgcattttattattgattaagaggttttgaccatgaccattcattagattgcacttctctttacatggaaacaatgaacgtctcaagtacatgtgtgacttcttacatttgtgttttctttgaaatctcatttcgcctttaactttacatt

SEQ ID NO: 107443 - DNA, 762 bp, Homo sapiens
gaggactcctctcctgggctctgcaggtggcagctttggtcacactgacagtcctaagaatgggtgagacttaacagtcggtgtccctcctcaagtggggttcacgactgatcaggcaagtttgcagcagctgatgggtgagatgtcatcgaggggcattcctctttgggtctggagttttggctgtcaagctcctgttcttccagccatccatctccatgttacgattgtcctgggaccagagagacttgagaaggtggcatgaggctgtagaaaatgtgtcttcctatacacagagatatgatgtctgctttgagtctatacctgtcgagttgtgtcttggacttacggtctgccaaggtggtaaatgttagctgttgatgggatcatcactgaagtggaaggctccacaaggtttacaaaatgtgttaagaagaatgttgatggtggtgtgtggtgcctaacatcttaatctcagcatttggtgaggcagaagtgggaggatcacatgaggccagttcaagaccagtctgggcaacatagcaagacccccatctctacaaaaaaattagaatgttatgaagatactgaaaagaagaacaggagaatgtagtgggtaaaggtctgggccctggaacagactgggtgcagatcttgggctgcccatcacactggtggagagcaagttatctattactatcttaggctctaatcccaccatacggtgggcaaaagttgtgcccatctcttagcatatgttaa

SEQ ID NO: 107444 - DNA, 737 bp, Homo sapiens
tagtttattataaaggaaagaaaatacctacatagcaacttcaaaatgataataatgtcataagagctaccagttattgtgaactaaggcatactaagacatttaaaggtattatctcactattttccctcacaataacctgtctgcccattgaagaaacatctgctttctctgatgacctattccaatatcttaaaaccattataaccagaaactctcactgtgatacggtgttttgaattttactcaaccctcttcccccattatcttctgtgacaaaaaggagacaaattctctaaaaagagatggactgcataaagtagaaaatgtctgagcatcacctgtcctgtgttcctggctaacacctcatgagtgggttccccgtgacccccaatctaggtacagctaccttaaaatgccacactgggctctaaatgtgcttcccacttttttgacaagtaatggactgaaatcagaatcttattaaaagattgtctcctgccattcttttaaataagtttcaatatcacagaatataataaaatttgatgagatttcttcttgataaaagttggaaaagtacttaatgaaaagctaattcaaagagacaggtaatataaaatgtttaattcaggaagatgcttaatgcaagaagacaaaccattcttccttgactcagttgccttcctacttgtctttttttaatctttcttttcttatgaaaagtttaagtgagg

SEQ ID NO: 107445 - DNA, 272 bp, Homo sapiens
gttctttggttgtaagcaagggaaaccaatttcagctaatgtaagcaaaggggaatttgtcagaactatatcagaggattttcagctggctggagaatcatgcttagaaactggcaaacaccaacaatgctcccaaaagcagctatctcaggcatagtttatagaagaagagagctgggtgtggtggttcacaactacaactcagtgctttgggaggctggaggtgggaggattgcttgaggccaagggttcaacatcatcctgggcaacat

SEQ ID NO: 107446 - DNA, 544 bp, Homo sapiens
gacaagtgaggatctcacactgggtcgagtctaattcctctaccaatggaaatgcttataggaggagacagcctatgcctccattcccattttatagatgtgaaaatcactacctatcgacaggaccaatttaagagtttcatgtataagtgtgatggtgctttgtaaatgacatacagcacagtacaaaaattttaagcctaactactgctaatagtcatttgtgattttcatgtgatgtttatataaggaatcttattacttcaaaaatatttcatagatttagaaaaacaaataggatattcaggatacagtatggctcattaatacattaaacttttcaactttaatttcttgttaaaagctccctgaaaatatattagtacattttatgtctgagtatacagggcaaaatggtgctagatatgtttcacggtgactgtcactcgtaactcctcctaaggaaagtacccagccttctggaccaggggaagttttttgttaacagtgagatctcttccatatccctctgggtaaatggacc

SEQ ID NO: 107447 - DNA, 340 bp, Homo sapiens
aaagtatttaagaattcctaaaggatcagaaattcttttttgagataattttccttaacataacaatgcatgtttatttgctgtctgatggccatggagtagtggtatgttatgaaaaaatgtcttaaatttgctgtgacagcctcttttcccagaagattagcatatcaaggtttgtcttctatatatatttgtaagctagataaaagtgttaattctaattgaaatggttcctttagtagatttaatgaaccctccaccaacaagtaaattaaactgaaaattattgacacaagttttatcattggagaagaaaataattaccaaaatcattgtctcc

SEQ ID NO: 107448 - DNA, 459 bp, Homo sapiens
atgccaccacacctggttaaatttttaaattttttgtagagacagtctcactatgttgcccaggttggtttcaaattcctgagctcaagcaatcctcctgccttggcctcctaaagtgctaggagtacagcatgagccactgcatccagcgtagactgctttgtatatttaaattatgtgtcgtacttagaagatgaggtgattaaatccttgataaaaatcatgattaaggtttttggtgtgattatatcttgagttgcctttgaataatagaagcttagtaggagaaagaagtttgtttactatatttgagttaatctctttagctcaagctaaaatagtatatcaaatattcctctgagtaatttaagtgtagatgacctcagtccacattcttacccttgctttttaggcaataatgtaccagaccctgttttaaagttacctaggaaatatctt

SEQ ID NO: 107449 - DNA, 964 bp, Homo sapiens
acctggaggagctgcacgtgctgccccccgggcgccgcgagcccctgcgcagcctgcgcatcctgcacagcgcccgcgcgctcttcgtggggctgagagacggcgtcctgcgggtcccactggagaggtgcgccgcctaccgcagccagggggcatgcctgggggcccgggacccgtactgtggctgggacgggaagcagcaacgttgcagcacactcgaggacagctccaacatgagcctctggacccagaacatcaccgcctgtcctgtgcggaatgtgacacgggatgggggcttcggcccatggtcaccatggcaaccatgtgagcacttggatggggacaactcaggctcttgcctgtgtcgagctcgatcctgtgattcccctcgaccccgctgtgggggccttgactgcctggggccagccatccacatcgccaactgctccaggaatggggcgtggaccccgtggtcatcgtgggcgctgtgcagcacgtcctgtggcatcggcttccaggtccgccagcgaagttgcagcaaccctgctccccgccacgggggccgcatctgcgtgggcaagagccgggaggaacggttctgtaatgagaacacgccttgcccggtgcccatcttctgggcttcctggggctcctggagcaagtgcagcagcaactgtggagggggcatgcagtcgcggcgtcgggcctgcgagaacggcaactcctgcctgggctgcggcgtggagttcaagacgtgcaaccccgagggctgccccgaagtgcggcgcaacaccccctggacgccgtggctgcccgtgaacgtgacgcagggcggggcacggcaggagcagcggttccgcttcacctgccgcgcgccccttgcagacccgcacggcctgcagttcggcaggagaaggaccgagacgaggacctgtcccgcggacggctccggctcctgcgacac

SEQ ID NO: 107450 - DNA, 745 bp, Homo sapiens
agtgcagtggcacgatctcggctcactgcaagttctgcctcctgggttcacgccattctcctgcctcagcttcccgagtagctgggactacaggcacccaccaccatgcccggctaattttttgtatttttagtagagacggggtttcaccgtgttagccaggatggtctcaatctcctgacctcgtgatccgcccgcctcggcctcccaaagtgctgggattacaggcgtgagccactgcacccggcccggagaactttgaagtattgttctatcgtgttcttttaatcaactgtgtgttcttccatagaatgtctttttggctggttttctgttattgaacatttaggttacttctgattttttttgttatcattgttattagaagtgatgttccaattatttgtctctccgcaaatctgcatgaggttttcaaaagtatataccaagaagtggatactgggccaggtgtggtggctcacgcctgtaatcccagcacttagggaggctgaggtgggcagatcaattgaggccaggagttcaagaccagcctggccaacatggcagaaccctatctctactaaaaatacaaaaaattagccgagcgtggtggcaggcacttgtaatctcagctagttgggaggctgaggcacaagaatcgcttgaactcaggaggcggatgttgcagtgagatgagatcgtgccactgcactccagcctgggtgacagagtgagactctgcctc

SEQ ID NO: 107451 - DNA, 228 bp, Homo sapiens
ttctcaagagggaagccaatatcctggacttcaaggtacttattaagaaccttctggcaaacagtgctctgtggacactgtaggccaggagctactagaacgtacagacacatccaagttcagaaatgcgaaggccagaatggacaaacagcaaacaagcaaaaatcatcaccttcaagctaatgaattttgtcagacaaggaaagaacacacctttgcgggaactgc

SEQ ID NO: 107452 - DNA, 274 bp, Homo sapiens
ccagaataagaaaataatgagattatactttcatggatagtacagctgagtgacagaaggaaaaattcatcggttgaattaagagcagagaagaaattagaactcagcactcccaatacctgatcttttgctgtaattactatggtgtcctgttataaggagagcccctggctccttggcctagtgacttccctttcccagtcttgccttccccatctgaaaatacaagaatgtagttccattgaagagaatcatgatgatcatgataggcact

SEQ ID NO: 107453 - DNA, 227 bp, Homo sapiens
cactccgccagctggccactctagccctcgccgcgcttccgcaacaagccccaccactctgaacttggaggtccgggtcaggggaccggcagaaagcaggacaggaagcatgcagcggtgcggagcaggtgagggcccaggaaaagccctgagctgggcaaggagggggccgaagggaaggaacagaaagggaaggagcaggtgagggagcagagaccaggtggggg

SEQ ID NO: 107454 - DNA, 851 bp, Homo sapiens
ctttatggtctaaataacatatctaaaatgaagtaaaataaaaagttttcagctgcaggaaatgcaaagagaatttaacaaaatatggtggtggtaagagatgttaattcatcatgtcagccattaaaagattacgtagaaaaaaaattagttgcaatttaaagggtctgaataaaatcgataaaaagttaaagcaaatgtagatgtagaaatagataacttgatagccagttggttggatggattgatgaaagaatgaattatggctatttctagagaatcactttattgcaataccttaggccatacacggaaatgaaacatatattagacctcaaagaaaacttttatatagcccaaaaaggtaaaataatatgaactacctcactggccaatatataataaaactagagcttaatagaaggacaacaaaatccaatcacttaaaaaaaactttcaaataattcttgagttacagaagaaatcaaaagaaaaattataaaagatgaagaaaacaacaaatatttgacaaaatgcaagaccattttgctattacaattgacctagaaaataatattcacggcaattttgaaaaagaaaagtaatgagggatgaactaactttatcagattttaaaatacatcaggaagttgcaataattaaaataaattggtactggagaagagcaaaataaaggggccacccatagatttgcatatttgtaacattaatttgtgataatagtattattttttaaataactgagaaaagagaaccttcagtaaataatgtggaatagctggctaattgttgcagaaaaggataaacctgtatccctatcttaatttcta

SEQ ID NO: 107455 - DNA, 329 bp, Homo sapiens
ccattatcaccactgcccacatggagcccaaaggggtagagagtaaggaggccctgtgacaagtaccctgggaggggcctagagttactatgggaacctggagtagaacataactctggcagattagggggttcaggaacactttctaaatgaagtaaagtattagacctgaggatgagtgggaattagccggttgcaggcaagatgaagagggccgcaggataggaatggaatgtatgaaggtccccagggcagccagaggactgagccagagtagtagtgctgagaagaggaagtgggccacagaaatgaagcagagaaggcgtctg

SEQ ID NO: 107456 - DNA, 446 bp, Homo sapiens
aaacatagaaatgtaaagactcttaggaaaggctgaataggctcagttgtctaggtttctggggaaacatgtcccccaaagagtttgtatttttttaactgaaaataattgtaaactaaacatttctatgatgttagctagtctttcttaacacattatttagtatttgtactcccacgaactctctaatagttattttaatgtttaatagcctgtaactgcttgctactttaattgaatttttttaactgcctgtttttaactgtgatttgtttaggacattgagtaaaaggtcacttgtactgttttaggaatgttgtgtttttgtctcattttattcaccgcctctacatgcgccttttactgttctgtttttctctttagctatcctcataccacccaaggcagtcttccacctggacagtttctgggctggccaccaggag

SEQ ID NO: 107457 - DNA, 408 bp, Homo sapiens
tcttatattggggcatttaggtagttttcagtttttcacaatgacagtccatctgcatctttgttgattgctaccggttcttttgtcaatttagtaactgagggctgaaaaaacctgggtttaggaccctttggtccttattagcccaaagaaattattagcactagaatcctggaaaccggctgttggagctggaagacactgagacatcatctcatccaatcatctcgcttttcaggaaggggaaattgaggcaccgagctgttcagtcacttggcctggggatcccaagtgggtctgcggttgagatggaaccgaaacccaggttttctgactcctattccgtgatagtctgcttttgtccaacagctaagactccttggaggacagagagggaggtttaagttg

SEQ ID NO: 107458 - DNA, 560 bp, Homo sapiens
aatgttttcccccttaaaaaaagaaaacctacaactctctgtatactaagagggtcaaagatgatagccatagtgtcaatgctgcttgaaagaggcctctaagaaagacatatgtggagagcacacattctagctgcaatccagtcttttcccatggctttgagctttgattagcaatttcaggaaaccaggaaaggtctacattgacaactacaaaccatccgattacaggaatctcccctaaaaattagtccaaggatttcttaatgttattttcattttcggtctacttcaaaatagtcctttatttttaactgtgaataactcaaagcagaaagtccgttcaaccttactgagcataaactacataaccagttcaaatggagcctgttaccaactccatccataatctttcagatgtttagcttaaatgttcctctgtggtaagtagataccattagcaaaaaaattcttcatgcctttttttttttaagagacaaggtattgctctgtcattcaggctagagtgcagtgatctaatcatggctcactcgaattcc

SEQ ID NO: 107459 - DNA, 743 bp, Homo sapiens
cgaaactatgagtctattaaacctcttttgtttatagattacccagtctcaggcagttctttttattttttttttgagacagaatcttgctctgttgcctaggctggagtgcaatggcgcgatctcagcttaccgcaacctctgcctcccaggatcaaatgattctcccgcctcagcctcccaagtagctgggactacaggtgtagtttttaatgttcatgacaagtctttattttgttctctataatttttctttattaaaatgttccataattcacttgtgtttctttcataaccagattgtgaaccaaaaagtgttattgtttttgtttggttttgagacagggtcttgctctgtcttaatacatatttattgatttattgatttatttttgagatggagtctcactctgttgctcaggctggtgtgcggtggcgccatctcggctcactgcaacctccgcctcccaggctcaggcaattctcctgcctcggcctctctagtagctgggattacaggtgcccaccaccacgcctggctaatttttatatttttagtagagatggggttttaccatgttggccaggctggtcttgaactcctgacctcaggtgatccacccacctcagcctcccaaagtgctggggttacaggcgtgagccactgtgcccagccaatacatttatttttagatgaacattgatgcgaaaatccttcataaaatactggcgaactgaatcca

SEQ ID NO: 107460 - DNA, 523 bp, Homo sapiens
gtcacatacttgtaatcccaactacttgggaggctgaggcagaattgcttgaacccaggaggcagaggttgcattgagccacgattgtgccattgcactcaagccagggcgacagagtgagactatgtctcaaataaattaattaaataaaatggatttttaaaagattttggaatgaataacacatttaataaattagttttaaccctcagaggacctataagaatataaacaaaattgaaaattgaagcatttgttcttaatcttgattgaaagactaatcagcatatctgaaaccctggcctcagaaaaatataatatttgatgaaatcacagataacaagacctatgtaagggtgctaatactgcgaaaataaaacccaaattttatataaaaaggactgtgactggtcaaggtggtgtgcacctgtagtcccaggtactcaggaggctgagacaggaggatcactagagcccaggagtttgaggccagcctgggcacatagcaagaccccatctctta

SEQ ID NO: 107461 - DNA, 513 bp, Homo sapiens
tttttttttttaattccacgggatactgtcaagaccaggtgatgagaggctgtcagcctgcaaggccgactttgatctttatacaaagtaaaactagtggaaaaagaaaggcccggttcttgtcaaaggcaggacattcaccattgggcgggtagccaagtggttgcttttgctatcttattcttccctactgtggtgtctcttaaaacactggacaggactcttctctctcatttgaggtaatagatttggcttcaaaatcacctcttgcctcctgaggtggcagattattctgaattgctgcagacttaaaccttggcctgcaaaggccatggtggtaataattatttcactttaaccaaacagaagagcacataagaggatatcagttatcctgacagcatagctatgatgtggaagccgtcctgttagggaactgctgagtggctaaaaagtcacaaatcatttttctctgttctttcctctttcttttgctcaataacaccccccacc

SEQ ID NO: 107462 - DNA, 258 bp, Homo sapiens
cttgggcaggtcagcctcagggctcctgtttgttcatgagcacacaccacctgtcttacagttgttcaccacctgctggtgatactctacttgctttacttatattaacactgcgactcctcaaaagatccccattgtccaccctactgagatcagaaagcggaagcagaacgatgttgagaaacttggggctggcaagtggtagtttcaggattaagacccaggctgtttgggtctaattccttctggctacactgg

SEQ ID NO: 107463 - DNA, 202 bp, Homo sapiens
aaaaaatctaaagactcttccaaaaaaaaaactactagaactgataaattcagtgaggttgcaggtacaaagtcaacacacaaatatcagtattgtttcaaagtcaacacacaaatatcagtattgtttctatatgccaacagtgagcaatctgaaaaagaaatttaaaaaagtaatctcatttgcaatagctacaaataaa

SEQ ID NO: 107464 - DNA, 586 bp, Homo sapiens
cattacaaaaagaaaataatatttcctattagagcctgaagcttttttcctccctagctcttatttagggagaatatataatttaagtgtttgaataggaatagaggaagtagccaaacacttttcaatagtccagctaaaatacacaatagcacatgtttaaagtacatctttggaagaaagatttgaagatccttgataagataatatatcatgtaccacaaaggcatgccctgctaagtaaaagtgggaagaagcagtacatattctattagggggtcagaaatctttaaatagaagtttctctggcaatctggttcccagatagatagttgaaggctcaaagaaatttccaagcttgctagaaatttccatctgctggcttttgtgttgagttaaatgccatcatattttattgcctcatacatttgcattaacactttccctttaaatttacttaaagtattttttgttttgtttcatttttgtttttttttgagactggtctcactttgtcgctcaggttggagtgtagtggagctcacagtttacttcagccttctgagtacctgggactacaggtgca

SEQ ID NO: 107465 - DNA, 339 bp, Homo sapiens
agtgtttatatatgattataagcaagcggctagcagggaaaccatgggtaaagggttaaaaaactctcatttgatcttcgtttccctcctaccaccacttccactgagataatttcaagattatctccatctcgaaattgaaaaacttaggcatagaggttaagaagatgacccaggttcatgttgtgacagttgggattagaacctaggcagcctggtccagagtatgtgctcttaacaactacagtttgatatcatcctttagtttttttttgtcattcagaacggtttacttttgcatatagtattatctattacagtagttaagacaatgcagtc

SEQ ID NO: 107466 - DNA, 167 bp, Homo sapiens
gctcaaaccaaacacttcggagccatccttgattattctctttctaccacccccacattcaatccatcaaattatatcaatttctatgtcaaattgttcctaaattcccccgttctttctagttccaccactaccacctcggtccaagctgcatcatctcttgccta

SEQ ID NO: 107467 - DNA, 377 bp, Homo sapiens
agagaattcaaagcctaacaaaaacaattatcccctagaactggtcctgacggctgcatttgacacagaaaaacatgaaattagaattgtgaggtgggggtagggaaagtttccagtattccaggcaactcaccacagtaaaaggatttttaacagttattttactaaggaaggatattttcattttcattttcgttggtttagagtgatttaatttgcccatgaaaaaaaattgtgctactgttaaagtaaattataattcaatttatttctttattttgttttattttatttttttgagacagagttttgctcttgtcacccaggctggagtgcagtgccatgatctcagctcactgcaacccctgcctcccagg

SEQ ID NO: 107468 - DNA, 162 bp, Homo sapiens
tggaaaggaaggactctacatttttcatactctgccactgtggtgccaactctacacaaaaacactcccagtcatcatttttaggagcagctagaccttgatacagagcaagaaacactgggatatggtcgccttcatagtaatggtgaacgggcatcccca

SEQ ID NO: 107469 - DNA, 353 bp, Homo sapiens
ggaaaaaaaatcagccacactcacagcatttagaacattaataagatgctttataaatatggttggttgaatgggtgtactgcctactcctacacctttacttatgtcattccatcctctttgtatacgctggtgagcatcttcagtgcacgtcacctgggaagctcattaaaaattcaatccttaggccctactccataaattttgattgactaatctgagagagagcccaggaggaatatacattttaactagcagcccaagtattctactttgagaaacaaagctgtatactcaacaccacctgtatgtgcctgtgcaacaggcatttgccttcagcatgatgccattac

SEQ ID NO: 107470 - DNA, 347 bp, Homo sapiens
tgcccctctccagactcactctcctcatctataaaatgggaacagttcctaccggctgggcaagctggtcgatccactgaaaaccctaaaaacagagcctggcacttgtgaaaacaacgttctaaggcgtattttctgacaatttgggcggaattcaagaaccaaatggtgctagcattcctgcgctgtgcccagattatgggattcgtgtcacctagggttgggcgaaaggcacaggcaagtaaccagagtcactgactcactaattttaccatttttaactatttcagattagggaggagcctttcgccaagtactgagctactcagcagctttggtggctccga

SEQ ID NO: 107471 - DNA, 423 bp, Homo sapiens
ctcaaactgactttacatctgggaaaggagaaattgtaggtctctcttactctgggatatttttgatagagcaaaggtatccatgatgtaaatttctgagatattatagataagccctttataaagtcacaaataatattcccataatgaggggggaaaagattccaaagaaggctgagcacttactgagggcagggaccatcattgtctcctgctttacagtatctgcaactcctagcatatctggtttacgtcttgccaactaaaggtaatgaggcttccctggaagggcactgaatccatggccagaaagtttcacaaggaggcagctgaaataaccagccacatagctcatgggggaacatcagtgcacctcagggggttggcattctgggagaggtcctctcagctcagatttctttt

SEQ ID NO: 107472 - DNA, 322 bp, Homo sapiens
catcacagcccaaatgagcagcagtaaccacttcacaacttcttgagcttccccttccccgcttttcattctatttgtttcttcatattcagaccattttttccattgctgccagtggcagttccatcctcttccatcccaacttaacaaaccacaccatcaaaatgaagggcagttccaaaacgcctgttagctatgccagataaaagctgacatttctggctcttaatgtgaaagtcaggtgacctgctaaagacaactatctgttttgaaaatatgttctttttaacttctatgcagctcctgggaagatagcccagcc

SEQ ID NO: 107473 - DNA, 433 bp, Homo sapiens
ggaacattaataacagagggaagttccatacatgtggtataggggccacatgggaactctactttctgcccagttttgttatgagcataaaatgatctaaaaaataaagtctattaaaaaacccatcaatctatttgcagaaatagattgatcctaaaattcatggccagacctggtggctcatgcctataatcccaacaatttgggaggctgacttgggagaatcgcttgagccaagaccagcttgggcaacatggcgaaatcctgtctctacaaaacactacaaaaattagccaggcatggtggtgcacacctatagtcccagctacttggaaggctaagatgggaggatcgcttgagcctgggaggttgaggctgcagtgagctctgatcaagccactgtactccgccctaggcggcagagcaacaccct

SEQ ID NO: 107474 - DNA, 437 bp, Homo sapiens
ctttctaggcccaaccccatgttcctgagagccagggggaaacccacaaagtgtgatctcctgggcctcaggaagcagctttatttacttaggcaaattagggctgcagtatatttgatcctggcccttaaaatcaaaggttctgtcttgggaaagcatagattggtgaaagatgatctatatagaattttaaaaatcataaacagtctgggcgcagtggctcatgcctgtaatcccagcactttgggaggccgaagcagacgaatcacttgaggctaggagttcaagaccagcctggcaaacagggcgaaaccccgtctttactaaaaatacaaaaattagccaggcatggtggcgcatgcctgtaatcgcagctacttgggaggctgaggcacgagaattgcttgagcctgggaggcgaaggttgcagtgagctg

SEQ ID NO: 107475 - DNA, 692 bp, Homo sapiens
aggcttctcagatgattcacatgtttagccagggttgacaagtactgtcctaaaacatatttctgagatttttcacactccattttccaatgtgctccaaagatagcttaggcaggaaccctgctacatggccacttcaaaaagatgcacccctgcatgggcctttgagtgcatccacctagcgtggcctccatgccacttccctgtctggttactccactataaaaaattcatccgcggactctccaagtcctcaagctgtacattgtcctgcctttgtcccaacaagaattgttggtgataagtccgacagtggagaggctgtggctgcagagtggcaggaaagagagtaagtaaaggagaagacaggacaaaggaagagtaaaagggtacttgaaaaggactggaaaggagggccctgcaaggtgctgcttctcacgtgctccccaccagccttctgcattcaaagcagggagggaagagtgtgggctcagagccatacatgcttaagtgcaagccttggggccccataatttactagctgcttgatcttggaaaaattacttaatcttgtacagctaaaaagtggtggagctctgggattcagaactggtctgtctgggttaaaagagcccaaacgtttttcccagcgtatactacatctcccaatccatacacacacaatagacttt

SEQ ID NO: 107476 - DNA, 332 bp, Homo sapiens
ggaggaaaggattggcagtatttttttaaagggagggagatgataaaggagagtaccccagagagttgcaacaataccacttggaagaaaaacttcagtcctgctgttgcaagagtggtcatgtgctgttcatgataggagggtattggggaagaaagattaagactttcacagctgtcagcattcactgaaaaatacctctgttgtcacttaacgtaatttcttgtcccttgaaataagattttgattaaaaatggaagagtacttgtaaaagtaataggcatattacagacagaggtcagtgaattgaaagtcagaagaccagtatttgc

SEQ ID NO: 107477 - DNA, 202 bp, Homo sapiens
agtgtatttcccttccggatccagttgtaggagaaggagaggagcagtctgggagaggcttaaccagggagggaggcggagggggcgggagccggtcccaccctccggatgcctgggatcgagggggtatcagatggtgatacaggccagtgcctggtgatggatgactttctacagggagaggcacagcggggagcccgag

SEQ ID NO: 107478 - DNA, 290 bp, Homo sapiens
ggtcgacccacacaaagtttcactagtcatgctggaagctcagtgcggacaagtgtgagagattaaaactccagagaaatccaatcattgggctctcaagtttttgttaagttttacttccaggagttctactaggttctcactataaatactggagaaaaatcccctcatatttccaccagcagggagaagagaaaagaaaccattttgaagtacgtcagagcattccattcttaacaaaacctgacctcaggagaaattcttttttctacagcctcatctgtcgacgc

SEQ ID NO: 107479 - DNA, 759 bp, Homo sapiens
tttagtgtctaccttcaatatttcttgtatgaagtttcagctaaaaatgtactttgtgtatctgtagagtggcttcatattcagagtttatggacatttatgattttatgtcccctccttggttcttatctcctggagttcagccttatgtgcttctcaaagtgtataacaaaatcaaagacaatgtcatgtcccttgaatttaattctaacaccaaaccttggtgttagagtcacaaaaagtccttttttaaaaaaacttggtgagaacagacaataacttgtctttctgggcattcgcgtcatggtccttttagccagaagagaggttttcttttgcatagtttggtgagcatcaagaatcctttaaggagggtggcggtgctgacttctccccattgagagtcagcctcatcccctcctcagccttgtggatggagaagaacaggcagtgatatacattttctgctgttgaaagatgtccgcttatccttctctttcagtgaaaagttgcttttttattcaatatgtactgaacaggttctagagtttcagaaacaaaagaaacagaaccaacatttatagatctcactatagaggcatcactaattggggaaagacagactaggtaatagtcagatgtgatatagtatgtttaagctataggatggcaggtgcatgagtgttggttgtattattctttatttttttgtatgacttatgatattcatgataattaaaacgttttggaacaattcat

SEQ ID NO: 107480 - DNA, 113 bp, Homo sapiens
ctatggaagaacaaatgtggaacttcttggtctcagattaagggctttgtgcatcatttgccagatggtgtttcaaatgttcacaattctttctttcaacttcaggggtatat

SEQ ID NO: 107481 - DNA, 393 bp, Homo sapiens
atccatggtcaaaggcctaatgctacagattgtgggggtggggcgggagtatcatctccctgatgatgtcatactctcaataaaacccagcaccacagtgatcgttctaggtcctctcatatatatacagtgccacccagcacatcagctgtactctatatttttaatgaaatgtgacattcaaaatccgaacttactaaaatgtaaataagggggtaattaccaagacattactttaagaaagaaatcaccgatcagttcctctaatgccttgttctctgtttaaataccactggctacttaacagagacattaacaggtatgtcaggtttgatcagaaataaattcattgcacagagctggttgtatcccgatacgacagctaaaagtaga

SEQ ID NO: 107482 - DNA, 1062 bp, Homo sapiens
ataaaaaccttaaaaaagcagctgagggtggtgtgtgcctatagtcccagctacgcctgtagtctcagctactcctgtagtctcagctactcctgaggctgaggtgggccaatcacttgagtccaggaggtgcaggaggttgcagtgagctgagatgatgccactgccctccagcctaggtaacagagggagaccttgtctcaataaaaaaaaaaaaaaaaaaaaaacgcgtgggtttttatataatctcgcaaagatggattgccgtggttttggaaaaaccaaattcgccctgtgccgccttggtgtcggagcccctttattgagggcttatactacagagccgaaaaaattagcgttagagatttcacctttttataaactcctgtggttaacccaactccttgctcggggtacgccccccattttgggacgggaaagatggggggtggggatggccaactggcttttggtcccccaagaaatttttcaactcccttattgcacagtaactttttttggaagtgggccatgtggggtgctcaactggggaggtccattaaacttactaggcaggtttaataccttcctaatgcgggggtgtaccatttagccggcatttcccaggtacgcccatttttctttaaattcccaaccttttagatttttccctttctcaatctcgaaatactctgtgggagaccttctcttcttttaaaaacccttaaaaaacgcccgctgggggggcggtggccctattatgtcccacagtaagcgcgtaagtctacagcaaccccgtgaggtctagcaaaccctggaggcgggggggggccacactgggtccggaggtggcagaggttgcggagcctgaaatatgcccgccctcagcgcctggtaagagggacctgctctaaaaaaaaaaaactcggtttttcgtgcgaaaggtgaaaggcaggcatggtccgaccctgtaaggaatgggcctagagtatagtgagctggaaaaataataaatcgtcgcacacgcacgaccggccatactctgcttatgagccgaaaaag

SEQ ID NO: 107483 - DNA, 406 bp, Homo sapiens
ccaccagattacaggagaatggaatcccagcctggtggcacctaccagctccagtgctttatcagatacacccatagtggtttcaaaaacctacaggaatattcctttgggaaaggaacccgtgaggttgctccctgggccggctctgtgttctcactgccccagcttgcacctgagccccgctgcccctggggccgttggcctgctaagatgctttgggtttctctgcatcctcctttgtatagtggagtgcatcgtgctgctcaggctttgtaacagagcaccgcaggcgggtggcgtgcactgcagacgttacctcctcagggtcctggaggctgaaaattcaagatccagatgtgggaaaggctgattcctccagaggcctctctcctcagctggtggacgg

SEQ ID NO: 107484 - DNA, 358 bp, Homo sapiens
ttatattttatacatttcaattgattgtactatattgcaggatatggagatttcatcacgtactacaatacagtgtattttgttatatttgacgtatattctacttgtattttgtactgagatcatacactatttcattatctaagtgtattaattgtttggttgctttataattttcattttatgtaatgaaataaacaatgttgtttggaattttaaatttctttcatatggaatttgtatttaataaaaatgtgaaaaagagaatgtcttatcgtcacttccgtgtcatcctatccctgacctccccacagcccacagctcttgtcatagtgcgggaatagtgttctatcactac

SEQ ID NO: 107485 - DNA, 196 bp, Homo sapiens
agaagcagttagaaaacaataaccctggccaaagtgaatcaaactggacacagccccagcaaggcaagggaaagcccctgttgagagacaggactagctggatttcctaggcagactaagaatccctaagcctagctgggaaggtgaccacgtccacctttaaagatggggcttgcaacttagctcacacccgagc

SEQ ID NO: 107486 - DNA, 512 bp, Homo sapiens
agtgaggagactctgtctcaaaaaatatatatattaaaaaaaagaaaaaaaaaagtaaactaggaaaacacatcagcagcctgccaacagactcccctagcctcggtgagggccagtgttctgggaggcagatctgaattctagtcctagttcacccactggcaggctggtgcccttggcaggtcgcttctctggggctcagtttcttcctctataaaatgagatcaaatcccatgttctaagagtttgtgctctggagtcagacagatctgggttctaccactgccagctctgtgatcttgtagcttcagtctcgtcatctgacatggagataacagtaactgtctcactgtgttgttagggtttaaaggagataatgtatgtgaaatgttagcaaacaagtgttagctaccctgatttccggtttcagagttctgtggtcccagtttatgccacatgcagtgacgttgtatggtaggctgtggtgtggcaccacttcagaactcagcgca

SEQ ID NO: 107487 - DNA, 444 bp, Homo sapiens
gattgtccttgcagatacttagaagttgtacaagtctgccctggctatcccttcacctgagctactatttcgagacagctgtctactctgaaggttacctcttgctgtaactgtatttccaggatgctactgcagaaattataaagaaaatgactcagatttgtttgtgttaaaaaaaatcaactagaagtaatatgcagcatatatgacaattcaaagatcttaatgtgtaaagtgttctaaatgcaataatgaaaatgaattttaatttataaaattaaatttaaaataaaattatttagaggtaaataaatatagaaaaataaagtagggcatggtggctcatgcctgtaatcccagcatttgggaggctgaggcgggaggattgcttgagttcaggagttcaaaaccagcctgggtaacctggtaaaaccccatctctac

SEQ ID NO: 107488 - DNA, 487 bp, Homo sapiens
ggctaatttttgtatttttagtagagacagggtttcaccatgttggccaggctggtttcaaactcctgacctcaagtgatccgcctgccttggcctcccaaagtgctgggattacaggcatgagccactgcacccggccatcagtatcttatttaacttctcgaatatatcaatcctccagccagatctcaccccaaaacatgattaacctctcaaggctgggctgagtatctggcagatggacaagggtggcacatctgcctaccttgtcccagggccccactggggaggagggtgacagcaggttctctgggctgggcccgggtggtctctgggctgggcctgggtggtcactgcagttggcatgtggacagtgcctgacagaggactgaggcccccacaggggacaggagtgttcaggagagctgggcctgttgggggtgggagtccttagcctggctgcccccaaccctggcctccctacctc

SEQ ID NO: 107489 - DNA, 824 bp, Homo sapiens
ctgcctgcctcggcctcccaaattgctgggattacaggcacgagccaccacgcccggcctaatttcatactatatagttatctattgttgtcccatactttatctttctaagtccacactatctatggacatagaataccacctgtactctattttgttcattttcttgccgagagaaaagtgtttcttctagtcagattctttgttttctcctgaactacccaccatggtcagtgactgtagtcttaagactcagacaaatctagcagaatgccatattggatttttttcccccacattcctctgaaagtagtccaacatggattttactgttgttttaaaccaaaataatggtagtataacactctttcatttatttttatcaaagcatctgtggaaatatattccatttttcaaatatatcagtgctcaagtgtcatcatgaaagaacaactaaccaaactgtattgaagatggggttgtaaagagttttacatgttgatcacaataatacatatttttggttcattttgttttcttttataaataaatgtttcctttctttagtaggaacaactacaagagctttccctgttttttttggtatactttcttgtgactgacaggtatctgaggccataagagtattttattttaaagatgagggcaattgagttcagaggttggataacttgcccaagaccctataacaggcaagcagcagatcccagaatcaaacccaggccgtttgaattcaaattcacttcctttttcactatggtacaagaattggaaaataagagcattcttttgcatattagaga

SEQ ID NO: 107490 - DNA, 564 bp, Homo sapiens
tgatagcctttagttcaaaagtatgtgcctcatggttaacctttctgatgacttgtaattattaacatcagttatgagcagtcactatccaatacctacctttctagccatactattttccagccaaatcgaatacattgctttacccacctcaaccccttctccacctttacctctgtctaggggtttgtccaaatccaaccaagacctagctctgttgtcaacgctaccatgaagctagaaataacctttgccttctccaaaccattgagaggttctttcacctcttatgtggcacttagtgccttccactttgtaatatcgttattcatgtatatcttatttccactaaatacctgtgacagttagtactgtcccatacaaatctatgctccacagcgcttaaccttgaacaagtaagcactttaaaacattagatgatgctggcatggtggctcacacttgtaatctcagcactttgggaggccaaggtaggaggaatacctgagcccaggagttcgagaccagccagagcaacatagtgagacccgtctctacaaagaa

SEQ ID NO: 107491 - DNA, 390 bp, Homo sapiens
aataatatatttggtttttattctggttcctgtcacagagctcctaaaacccttggaatttcctgagtgatagggggtaagaagagcatcttttgttatccgtaataagccccttccagctggacctgagtttatgctaatgaggtgactcttggatgatggaggctgattgccagagaaaccaaccacataattagtgggttgggattttcagtcccatccctcaacctccaagtaggggagagggggctggagtttaagtgcaatcaccaatggccaatggtttaatcaatcacacctacctaatgaagctccataaaaacccctaacaatggaatttggagagcttccaggttagcaaacacaaggaggtactaggagggtggtgca

SEQ ID NO: 107492 - DNA, 312 bp, Homo sapiens
ccaagatcgcggcactgcactccagcctgggcgacagagactccgcctcaaaaataaataaataaaaataaaaaataaaaatctatgaatattctacaactaaaaaatattaatataattgaaattaaaagctcaacagatgggtttaacagtagacatagtagaaatgggtgaactggaagacagtaacaaagatccaaactaaaagcacagaggttaaaaatggtaagaatgaaaaagaatgtaatggacaagtgagacacattgaaaaggccaatggtccaacatatgtataactggaggcccagaaag

SEQ ID NO: 107493 - DNA, 545 bp, Homo sapiens
taaaagccggactcttccggtgaagcggaggtgtggtggggcttgctgggatcatggcggggaatcactgcgagctcctgccgctggcccgtggcaggctcggggcggggttggggtggcttcttgtgcctcccttaaagcgcggggctcagcgtcctggcccagcgccccagcagcaggtccaagtgggtccggctctacagcggcggcacctacttcctcaccactgggcagacgccgctgtgtcaggacccgaaatccttcctgtacctcttgagccaggccgaccccgacccggactcggacaagacggagttttgttcttgttgcccaagctggagtacaatggcacaatcttggctcaccacaacctctgccacctgggttcaagcgagtctcctccttcagtctcctgtaatgccagctacttgggaggctgaggcaggagaatcgcttcaacctgcaaggcagaggttgcagtgagctgatagcatgccattgcactccagcctaggcaacaagagtgaaatttcgtctcaaaaaaa

SEQ ID NO: 107494 - DNA, 807 bp, Homo sapiens
taaaagccggactcttccggtgaagcggaggtgtggtggggcttgctgggatcatggcggggaatcactgcgagctcctgccgctggcccgtggcaggctcggggcggggttggggtggcttcttgtgcctcccttaaagcgcggggctcagcgtcctggcccagcgccccagcagcaggtccaagtgggtccggctctacagcggcggcacctacttcctcaccactgggcagacgccgctgtgtcaggacccgaaatccttcctgtacctcttgagccaggccgaccccgacccggactcggacaagacggagttttgttcttgttgcccaagctggagtacaatggcacaatcttggctcaccacaacctctgccacctgggttcaagcgagtctcctccttcagtctcctgagtagctgggattacaggcatgcaccaccacacacagctaagttttatatttttagtagagatggtttcaccatgttggccaggccagtctcaaactcctgacctcgtgatccgcccaccttggcctcccaaagtgctgggattacaggtgtgagccaccacacccagccaattagggctgtcttacaaaaaaaaaaaccaccacgaacctttgcgagaatcgagcgcagcctgtgctggttgtgtaagccgtgggacacacgggaaagccaggaagaagaggaagagcacccccacaccccacccgcgtgaagaagagcaaccccactccccgcccgtgggaagaagagcaccctcacgccgggcccgcaggaagaagagcacccccacgc

SEQ ID NO: 107495 - DNA, 599 bp, Homo sapiens
ccaaatggtagcacaaagagattgaggtctaattaggagctctaccaggaaggaatagggagcaggccattttcgaagaactgtgtggccaaggattttccagaattgaagaataacataactcctcacactcagcacagtgagtctgaataagttaaatatacacttacaaacattttgctgaatccttagaaccccagaaatggatcttaaaagtaatgagagattaaaaagatattataaaggaataacaaatagactgacagtgtgtttctaaacatctcatcaagaaaatgccggaagacaagtgaaataacatcttcaacatggtgagagaaaactgtcagcatggaattctgtcctcagttaatccatgaaggtgaagtaaattttctcagggctttaaggactgagaaagtttatgaagaagagatccttgctgaaagaactactcaaggatgtactttggcaagaccctaaaaaaaggaatgagatgcaagtagcagtgatgagcagatggccagcatttgggtaaacaagcaagtgtcagctatccggaaccaaacaacactgactagtccagatgtgtgtgtgatggg

SEQ ID NO: 107496 - DNA, 370 bp, Homo sapiens
ttgtgacagagtctcactctgtcgcccagggtggagtgcagtggcgcgatctgggctcactgcaacctctgcctcccgggttcaacccattctcctgcctcagcctcctgagtagctgggactacagatgcgtgccaccatacccagctgatttttgtattcttagtagaaacagagtttcaccatgttggccaggatgatctcgatctcctgacctcgatccacctgccttggcctcccacagtgctggcattacaggcctgagccaccatgcctggctgttggtatactttaaatggatgtaattcattgcagattatacctcagtaaatttttatttagtttttgagactgagttgctctgttgccc

SEQ ID NO: 107497 - DNA, 878 bp, Homo sapiens
tgaggaacctacagcagagccgttagatcattggcaagtcctccaggcgacctcgcccaagttgggcaagagcggctccccggctggccaccaaaaatcgggcctgatctgatttggtttttttttttttttgagttttgctattgttgcccaggctggagtgcaattgcgcgatctcggatctcggttcaccgcaacctcggcctcctgggttcaagcgattctcctacctcagcctcccgagtagctgggattacaggcatgcgccaccacgcccggctaattttgttttttttttgttgttgttgttgttttagtagaggcggtgtttcaccatgttggccaggctggtcttgagctcccgacctcaggtgatccgcccgcctcggcctcccaaagtgctgggattacaggcgtgagccaccgcgctaggccaagaaggatgtattttaagaaagcttcctgttcaatgttcccctgctctgtgcgcttctctgggcggtggtgtaaaaggaagccccttcccttgaagtatcctggtcgtcaaagaatcttcctctatttacaattataaaaccccgtggggcagaaataactagatgtcatatatggcgtggacatggtggtaaccgcatagtaatgagtcttaaaggctttggggaggccacgcaggggacggactggcttggagccccgggagtttgagagcttccgtggcagcatagtgaaccgcatcttttgacaaaggtcccaggttttcccagaccagcacgggacatttgactccgggaaccagttgggagaccttagccagggtctagaggcggtcacgggctaggtcttagcaagcgaaaatacgcttgtagtgtcacgttgcc

SEQ ID NO: 107498 - DNA, 548 bp, Homo sapiens
tgtagagacagggtttcaccacatggcctaggctggtctcaaactcctgaactcaagtgatctgtcagccttggccacctaaagtgctgggattacaggcataagcaaacatgcctggaaaatatcaaaatttcttaaccccctgtgtatttggcacctgtctaaagttttgcatttacttatatttttaatctttatagttgcttggcatagtatcttctggaagtttattgcctattaggaagcagtattctgtaagtcaattagtcatgaatgtatacctctcttaggcttttcaggaagaaccttttcttcatgtattctaggatgtagtgacaaagtctattattacttcattgtataccactttatctgtattgattcccagatggaagaatccaatcctttttagtttatcattataaatgattctcccattcctaatattaactgcccttttgagatgttttattacactgtatctttgttttcacaccagtgaattttaaaatttgttagtttcttgttattacagtcatgttctgaca

SEQ ID NO: 107499 - DNA, 287 bp, Homo sapiens
aagtcctgtgagtttgtgaccgcggagtcatgggcagctgtcttgggatggggctgagctgtctgcatgaatagaaaggtatggaagagtctcactatagtatagtgcagcatggagactagcctctcggttttcagaatcttcttggaaagaaaacaacttgtaactgagattctaagaaatttgggaaacaaaatttatggctaatggctgaggcaaacaagaaaggtggctcaaatattggaatggaaagcaggaaaccctaggttttagttctggcatcgaca

SEQ ID NO: 107500 - DNA, 398 bp, Homo sapiens
aagaaagatgtgaggatcaagcagacaatacctataaaatttatgctctttatttttcaagggccacataagtgtagtcacatagttactttatcttcttcctgtaactgtcctccctctaggcagagggatggcagtcattgacgatttatgactctgaagagctgatggggggtgtggcaaaacatctcatcttcctccattcacaccctccaagcaccttgaataattgctgggagataacttggcaattgtttggctaactgtggccttaatttcctgccagggcttcactcacgcctacctgtcctttccgttcctgattagtaagacaacattcagcgttccttttctgctaaaaaaaaatggagtgacttttgtgactgttgatacagatc

SEQ ID NO: 107501 - DNA, 729 bp, Homo sapiens
gggaggaaatatctgcaaagtattcatcttacaagggactaatatacagaatatacaagaagtcaaaaaacaacaacaaaaaatccaactaaaaagtgggaaaaggatctgaatagacatttctcaaaataagacatacaaatgggcaacaggtatacgaaaaaatgctcatcatcaccaatcatcagggaaatgcaaatcacactgagagatcctcttaccacaattaggatggctattatcaaaaagagaaaaaataacaaataatggcaaagatgcagaaaaaaggcaataattatacactcttggtgtataattagtacagccattatggaaaatggtatggaggttccttaaaaaactacaaatagaactacgatacaatccagcaatcccactacttcatatttatccaaagaaaaggaaatcagtatggcaaaaggatacctgtacccccatgttaacattattcacaatagtctagatatggaattaacctaaatgtccatcaatggttgaatggataaagaaaatgtagtacatatatataatggaatgttagtcaaccataaagaagaataagaatactgctgtcatttacagcagtatcattagaatcattatcattaactaatgatataatcagtatcattagttcattatgttaggtgaaataagccaggcacagaaagccaaatattgcatattgtcactcatatgtgggagcag

SEQ ID NO: 107502 - DNA, 605 bp, Homo sapiens
gggtgtaccccacaaatgatacagtaatgaggatacacaattaaatcccatagcatgactgaaagctttcactgtgtttgacatcatcacaatggaattgcctaggtttcttagctaaaagtaagtttgtatcttttattatttgatagtggggggttagcgtcctagaagtcccagacttaggttctcaattgtcttaagaaaccatccatctgtattgacaatatgggtgctctaggggcagtcttaagcccaataagaggtcttttagcgcactgagcttttgctctctagggtcagtgtttggatttgaatatccagcactgccactcaccttgggcaagtcatttaaactgcatgtctcagtttcctcatctgcaaagggactaataaacacacctacctcctgggatggttttgaggaatacattggctaatatatgtaaagcatttactatgtgccagaccctgcaataaatgtgaaagtagtctctgttactacataaagggcttctcatttagccaaaattttattacattctagtacacttacgttgagtaatatgcagctttttcagtggatacttcatttcaaccttacagag

SEQ ID NO: 107503 - DNA, 498 bp, Homo sapiens
cgtgtatatgacagtcttggctttttggttagaagtagcatcttgttactgggaagaagggcacacagctcttctctgtaattaatgaatctactcactaaatatttatcttaggaacacacttacttctgttatccattgtagccccaaagatagagatggttacaagtacgtgatgagcatctagaaaattaaggatgggctgggtgcagtggctcatacctataatctcagcactttgggaggccaaggcagaaggatcacttgaggcctggagtttgagactagcctgggcaatatagcaagaccccccatctctatacaaaaaaaaattaaaaattatctgggcatggtggcccatgctgtatgtagtcctagcttacttgaaagactgaggcaggaagatcacttgagcccaggagttcaaggctgcagtaagccatgatcatgccactgcattccagtctgggcagaagagtaggaccctgtctcagaaga

SEQ ID NO: 107504 - DNA, 630 bp, Homo sapiens
tttagtagtatttctggtctggggcaaattacactaataactacaatcccccaccctccccaacaaatgagtatgataatataatcatgcgccttggaggatttcttggataagtaattttaaacagtccaaatataaaaaatgaatactaaatcaatagcatgcttaatccccactaggtccaactcagattacttcttttggatggaagcttcaggcctttgtggtgtcccatatcttagcttttcagagaattctgtcctcacagtgttgtttatagacagtgatggaagagaagaatcatcacagtaaacatggagagtatgatgttccgaattttcatttgtccctgtcgctgagccactctacagcttctgaataagtaaactgaataacccgcaataaactgttttctcccataaaaaatcagttgcataaaagggcaggttaatgatgggaaggcagcaggatgttgtttagtctaagggtggacaattttgggaggctgatggctctggccaccctacagcctttcgtgtttccgatgtcactggggatgcctggtggccctttggatcccccgtgggtatcccaggcactttggcctgtccaggattcctggcctcgttt

SEQ ID NO: 107505 - DNA, 442 bp, Homo sapiens
ttatgtctttgcctgtaacttctgcctgtaacttggataacaatcaagctgtacccaatcaccttgggcacatgttctcaggacctcccaggactatgtcacaggtcatggccctcacatttggctcagaataaacctcttcgaatatttaacagagtttggctttttcatcaacagtgccatcacctcagagctaggattccaggggtggtctgggaagatcctttcgctgggggccgggaacagggggtgcaggggaacattaaggccagtgtggcaggaaaggtttcctggacagccctggagcagcatgaggtttggaaagcagacaggcaggctggccctaaatggtggaaggtgctctgattggatctctggcttctggggatagcagagggcaaacaggacacagggagtcaggacccagagccaacctccctaa

SEQ ID NO: 107506 - DNA, 421 bp, Homo sapiens
tgcatcctctccctgtgctctgtgcatcccccaatccatgctctgtgcatccccgccccatgctctctgcatcctccccgcctctgctctctgcatccccaccccaggctctgtgcatccctgccccatgctctgtgcatcctctctccatgctctgtgcatcctccccgtgctctgtgcatcctctctccgtgctctgtgcatcctctccccatgctctgtgcattctctccccgtgctcttgcatcctccccgtgctccgtgcatcctctctccgtgctctgtgcatcctctccccatgctctgtgcatcttcccatgctctgtgcatccctcatgctctgtgcatcctcccctccatgctctgtgcctctccctgtgctctgtgcatcctccctgtgctctgtgcatcctctccccgt

SEQ ID NO: 107507 - DNA, 655 bp, Homo sapiens
ttcggcactagcagatctggagagcatccgtcagtgtggagtggccctctgcatcgtgctgggattctccatcctgtctgcatccatcggcagctctgtggtgagggacagggtgattggagccaaaaggttgcagcacataagtggccttggctacaggatgtactggttcacaaacttcctatatgacatgctcttttacttggtttccgtctgcctgtgtgttgccgttattgtcgccttccagttaacagcttttactttccgcaagaacttggcagccacggccctcctgctgtcacttttcggatatgcaactcttccatggatgtacctgatgtccagaatcttttccagttcggacgtggctttcatttcctatgtctcactaaacttcatctttggcctttgtaccatgctcataaccattatgccccggttgctagccatcatctccaaagctaagaatttacagaatatctatgatgtcctcaagtgggtctttactatttttcctcaattctgtcttggtcaaggactggtagaactctgctataatcagatcaaatatgacctgacccacaacttcggcattgattcctatgtgagtccctttgagatgactttctgggctggatcttgcctcgtgccggcc

SEQ ID NO: 107508 - DNA, 562 bp, Homo sapiens
ttcggcactagcagatctggagagcatccgtcagtgtggagtggccctctgcatcgtgctgggattctccatcctgtctgcatccatcggcagctctgtgctcttttacttggtttccgtctgcctgtgtgttgccgttattgtcgccttccagttaacagcttttactttccgcaagaacttggcagccacggccctcctgctgtcacttttcggatatgcaactcttccatggatgtacctgatgtccagaatcttttccagttcggacgtggctttcatttcctatgtctcactaaacttcatctttggcctttgtaccatgctcataaccattatgccccggttgctagccatcatctccaaagctaagaatttacagaatatctatgatgtcctcaagtgggtctttactatttttcctcaattctgtcttggtcaaggactggtagaactctgctataatcagatcaaatatgacctgacccacaacttcggcattgattcctatgtgagtccctttgagatgactttctgggctggatcttgcctcgtgccggcc

SEQ ID NO: 107509 - DNA, 421 bp, Homo sapiens
atgatttgggggtgaagataggccttgacctgagctgggtttggagggagaattattagtggcctgatggggtcttagactgagggtcgagtgtgttccttccttcctggctgggtgagcatctaagtcactgcctctcggaggctcacgtccataacagtaaagcagggatggtcttggccctcctggagggcttcctgcaagggtgttggtgaaatgtgtttctatttgtgaagctgtgctagtgctgttgccattttcatgagcagttaccaatcaacaaacacttgtagccagccctgcaccgggcccacgatcacccagggatgaagtggtgaccgaaagcaggaacaggccggagccttcaccagctaagaggtgagaccctcagctggggctgagacccagcctggctgtatct

SEQ ID NO: 107510 - DNA, 1116 bp, Homo sapiens
tacatcatcaattttcctttcttctgaattattcctattttccttttatctgaattatttctattaacataaaaaaattatttcttacatcttaaaatttttttttctccttattccacttcccccttctactacctcatttctctccttctcttagtagcaaaaccttaaaagagttgtttatacttgttccttctaagttccttcctcctgttctgagttaaaactattccactgaaatagttttagtcagggtcaccactgcctctaaatcctgtggtcagttcgtagtccacatcttatttaccatagcagcagcatttgacacaccatgacacattcttcagttgtctagggcacatagtcccctgattttcacacagactgctgcttctcaggctcctttgctgggttcctcatcatcatcctgaccttttaacattggagccactttggcattcttgacacttaaggggttggtggaggaagagcccaagattgaagtgagaagacaaagtaagagtcaggaggtcaacactgagataattatcctgtggaacaaaggggagagagttctaaggagataatcattagtgaattcacagcagcgaggttaagtaaagtgatgactaaaaagcgtccttgaatttgaccattaaaaggtcagtggcatccaccctgcattctattaagtcacaaaaaagtttcatgtgtattgtcatagccaaagaaacttaggattcaggtctggatgagatctctctctgtctgtctctgacgcgcatgtactctctctctctctttctctctctcctcttcttattttatggataaaggcgccaaggcccagagaagttatatgtcttctggtaatcacacagctagatataggcagagcaggaactagaactggtatctcaaaatcttcatccagtgttcagcccaccacttattgtaaatgcaatttcggaagtcttgattatctgatttttcagctgacagcagattagcagcatcaaattgggggtgtgataaaggcagtctcactgacagcagtaaaaagtgacagctgactgacagcttgacaacaggggaggagagagataaaccattttg

SEQ ID NO: 107511 - DNA, 787 bp, Homo sapiens
cacatggtgagggaggaaagcaaggagaggtcaggggaggtgccaggctgtttgtaatgaccagctgtcctgggaactagtagagtaagaactcattactataaggacagcaccatgccattcgtgcaggatcatccctatgacccaaacacctcctactagtcccgagctccaacactgggggtcgaatttcaacataaggtttggagagttaaatatccaaactatagcactacccttaatggcaactcaggctgatataaagtagcattccctgttttcttgaaaaattgacttcagagttggggattgcccatgctccctaattcccttcttttgagtgctcacatagcctgcttccgaattcttggtattttgctctctgtaaggtcatcattcaggtccaaagaagtctagaacaggatgaggtctcagtgggacctagaccaaggttcttgctcttcagaatcatcacagtagccatggactggactcttccatctcaggcactggctttgccatcatttttcagatgtagccttatcctgcccagaaagactcaacacctcaccaggggaagggatttcctacaaccaaaaccctactgcagttttcacttcttttttttttctttttgtttatatggtggatatttttactttatatagttttattcttatttttactgtttttcattgtttgtttttaaaagcttatcttattatagcttctttgtcccaggtttgcattactttcaattacaaaaataaagcatgattatttgaaa

SEQ ID NO: 107512 - DNA, 262 bp, Homo sapiens
tctacctggtccctgtaggatcagtttaagagtttacatttatttttccttacttggaactctcttgatgctgagtcagctaccaaggagtgtttggaagaagcatttataggtaaacatatattcattgttgccggggtcaatggataacagttgaagcaaacatagattaaccaaaagcttaggagaaagactggtaaatgggatgctttggggaataaggattttgaaaagatctaagacatttctgggaattgagaag

SEQ ID NO: 107513 - DNA, 2957 bp, Homo sapiens
ggcagggggagggcgagaagccgccgttgacaattacgtctgggtccaagcaaacatgaggcagctgccagccggcctgggcagtcttgtctgcctcggctgtgaagtggggaggctggcaacagttttcttcagcgcccaggatgcagccggctaaggaagtgacaaaggcgtcggacggcagcctcctgggggacctcgggcacacaccacttagcaagaaggagggtatcaagtggcagaggccgaggctcagccgccaggctttgatgagatgctgcctggtcaagtggatcctgtccagcacagccccacagggctcagatagcagcgacagtgagctggagctgtccacggtgcgccaccagccagaggggctggaccagctgcaggcccagaccaagttcaccaagaaggagctgcagtctctctacaggggctttaagaatgagtgtcccacgggcctggtggacgaagacaccttcaaactcatttacgcgcagttcttccctcagggagatgccaccacctatgcacacttcctcttcaacgcctttgatgcggacgggaacggggccatccactttgaggactttgtggttggcctctccatcctgctgcggggcacagtccacgagaagctcaagtgggcctttaatctctacgacattaacaaggatggctacatcaccaaagaggagatgctggccatcatgaagtccatctatgacatgatgggccgccacacctaccccatcctgcgggaggacgcgccggcggagcacgtggagaggttcttcgagaaaatggaccggaaccaggatggggtagtgaccattgaagagttcctggaggcctgtcagaaggatgagaacatcatgagctccatgcagctgtttgagaatgtcatctaggacacgtccaaaggagtgcatggccacagccacctccacccccaagaaacctccatcctgccaggagcagcctccaagaaacttttaaaaaatagatttgcaaaaagtgaacagattgctacacacacacacacacacacacacacacacacacacacacagccattcatctgggctggcagaggggacagagttcagggaggggctgagtctggctaggggccgagtccaggagccccagccagcccttcccaggccagcgaggcgaggctgcctctgggtgagtggctgacagagcaggtctgcaggccaccagctgctggatgtcaccaagaaggggctcgagtgcccctgcaggggagggtccaatctccggtgtgagcccacctcgtcccgttctccattctgctttcttgccacacagtgggccggccccaggctcccctggtctcctccccgtagccactctctgcccactacctatgcttctagaaagcccctcacctcaggaccccagagggaccagctggggggcaggggggagagggggtaatggaggccaagcctgcagctttctggaaattcttccctgggggtcccaggatcccctgctactccactgacctggaagagctgggtaccaggccacccactgtggggcaagcctgagtggtgaggggccactgggccccattctccctccatggcaggaaggcgggggatttcaagtttagggattgggtcgtggtggagaatctgagggcactctctgccagctccacagggtgggatgagcctctccttgccccagtcctggttcagtgggaatgcagtgggtggggctgtacacaccctccagcacagactgttccctccaaggtcctcttaggtcccgggaggaacgtggttcagagactggcagccagggagcccggggcagagctcagaggagtctgggaaggggcgtgtccctcctcttcctgtagtgcccctcccatggcccagcagcttggctgagccccctctcctgaagcagtgtcgccgtccctctgccttgcacaaaaagcacaagcattccttagcagctcaggcgcagccctagtgggagcccagcacactgcttctcggaggccaggccctcctgctggctgaggcttgggcccagtagccccaatatggtggccctggggaagaggccttgggggtctgctctgtgcctgggatcagtggggccccaaagcccagcccggctgaccaacattcaaaagcacaaaccctggggactctgcttggctgtcccctccatctggggatggagaatgccagcccaaagctggagccaatggtgagggctgagagggctgtggctgggtggtcagcagaaacccccaggaggagagagatgctgctcccgcctgattggggcctcacccagaaggaacccggtcccaggccgcatggcccctccaggaacattcccacataatacattccatcacagccagcccagctccactcagggctggcccggggagtccccgtgtgccccaagaggctagccccagggtgagcagggccctcagaggaaaggcagtatggcggaggccatgggggcccctcggcattcacacacagcctggcctcccctgcggagctgcatggacgcctggctccaggctccaggctgactgggggcctctgcctccaggagggcatcagctttccctggctcagggatcttctccctcccctcacccgctgcccagccctcccagctggtgtcactctgcctctaaggccaaggcctcaggagagcatcaccaccacacccctgccggccttggccttggggccagactggctgcacagcccaaccaggaggggtctgcctcccacgctgggacacagaccggccgcatgtctgcatggcagaagcgtctcccttggccacggcctgggagggtggttcctgttctcagcatccactaatattcagtcctgtatattttaataaaataaacttgacaaaggaaaaaaaaaccg

SEQ ID NO: 107514 - DNA, 2779 bp, Homo sapiens
ggcagggggagggcgagaagccgccgttgacaattacgtctgggtccaagcaaacatgaggcagctgccagccggcctgggcagtcttgtctgcctcggctgtgaagtggggaggctggcaacagttttcttcagcgcccaggatgcagccggctaaggaagtgacaaaggcgtcggacggcagcctcctgggggacctcgggcacacaccacttagcaagaaggagggtatcaagtggcagaggccgaggctcagccgccaggctttgatgagatgctgcctggtcaagtggatcctgtccagcacagccccacagggctcagatagcagcgacagtgagctggagctgtccacggtgcgccaccagccagaggggctggaccagctgcaggcccagaccaagttcaccaagaaggagctgcagtctctctacaggggctttaagaatgagtgtcccacgggcctggtggacgaagacaccttcaaactcatttacgcgcagttcttccctcagggagatgccaccacctatgcacacttcctcttcaacgcctttgatgcggacgggaacggggccatccactttgaggactttgtggttggcctctccatcctgctgcggggcacagtccacgagaagctcaagtgggcctttaatctctacgacattaacaaggatggctacatcaccaaagaggagatgctggccatcatgaagtccatctatgacatgatgggccgccacacctaccccatcctgcgggaggacgcgccggcggagcacgtggagaggttcttcgagaaaatggaccggaaccaggatggggtagtgaccattgaagagttcctggaggcctgtcagaaggatgagaacatcatgagctccatgcagctgtttgagaatgtcatctaggacacgtccaaaggagtgcatggccacagccacctccacccccaagaaacctccatcctgccaggagcagcctccaagaaacttttaaaaaatagatttgcaaaaagtgaacagattgctacacacacacacacacacacacacacacacacacacacacagccattcatctgggctggcagaggggacagagttcagggaggggctgagtctggctaggggccgagtccaggagccccagccagcccttcccaggccagcgaggcgaggctgcctctgggtgagtggctgacagagcaggtctgcaggccaccagctgctggatgtcaccaagaaggggctcgagtgcccctgcaggggagggtccaatctccggtgtgagcccacctcgtcccgttctccattctgctttcttgccacacagtgggccggccccaggctcccctggtctcctccccgtagccactctctgcccactacctatgcttctagaaagcccctcacctcaggaccccagagggaccagctggggggcaggggggagagggggtaatggaggccaagcctgcagctttctggaaattcttccctgggggtcccaggatcccctgctactccactgacctggaagagctgggtaccaggccacccactgtggggcaagcctgagtggtgaggggccactgggccccattctccctccatggcaggaaggcgggggatttcaagtttagggattgggtcgtggtggagaatctgagggcactctctgccagctccacagggtgggatgagcctctccttgccccagtcctggttcagtgggaatgcagtgggtggggctgtacacaccctccagcacagactgttccctccaaggtcctcttaggtcccgggaggaacgtggttcagagactggcagccagggagcccggggcagagctcagaggagtctgggaaggggcgtgtccctcctcttcctgtagtgcccctcccatggcccagcagcttggctgagccccctctcctgaagcagtgtcgccgtccctctgccttgcacaaaaagcacaagcattccttagcagctcaggcgcagccctagtgggagcccagcacactgcttctcggaggccaggccctcctgctggctgaggcttgggcccagtagccccaatatggtggccctggggaagaggccttgggggtctgctctgtgcctgggatcagtggggccccaaagcccagcccggctgaccaacattcaaaagcacaaaccctggggactctgcttggctgtcccctccatctggggatggagaatgccagcccaaagctggagccaatggtgagggctgagagggctgtggctgggtggtcagcagaaacccccaggaggagagagatgctgctcccgcctgattggggcctcacccagaaggaacccggtcccaggccgcatggcccctccaggaacattcccacataatacattccccaggctccaggctgactgggggcctctgcctccaggagggcatcagctttccctggctcagggatcttctccctcccctcacccgctgcccagccctcccagctggtgtcactctgcctctaaggccaaggcctcaggagagcatcaccaccacacccctgccggccttggccttggggccagactggctgcacagcccaaccaggaggggtctgcctcccacgctgggacacagaccggccgcatgtctgcatggcagaagcgtctcccttggccacggcctgggagggtggttcctgttctcagcatccactaatattcagtcctgtatattttaataaaataaacttgacaaaggaaaaaaaaaccg

SEQ ID NO: 107515 - DNA, 2902 bp, Homo sapiens
ggcagggggagggcgagaagccgccgttgacaattacgtctgggtccaagcaaacatgaggcagctgccagccggcctgggcagtcttgtctgcctcggctgtgaagtggggaggctggcaacagttttcttcagcgcccaggatgcagccggctaaggaagtgacaaaggcgtcggacggcagcctcctgggggacctcgggcacacaccacttagcaagaaggagggtatcaagtggcagaggccgaggctcagccgccaggctttgatgagatgctgcctggtcaagtggatcctgtccagcacagccccacagggctcagatagcagcgacagtgagctggagctgtccacggtgcgccaccagccagaggggctggaccagctgcaggcccagaccaagttcaccaagaaggagctgcagtctctctacaggggctttaagaatgagtgtcccacgggcctggtggacgaagacaccttcaaactcatttacgcgcagttcttccctcagggagatgccaccacctatgcacacttcctcttcaacgcctttgatgcggacgggaacggggccatccactttgaggactttgtggttggcctctccatcctgctgcggggcacagtccacgagaagctcaagtgggcctttaatctctacgacattaacaaggatggctacatcaccaaagaggagatgctggccatcatgaagtccatctatgacatgatgggccgccacacctaccccatcctgcgggaggacgcgccggcggagcacgtggagaggttcttcgagaaaatggaccggaaccaggatggggtagtgaccattgaagagttcctggaggcctgtcagaaggatgagaacatcatgagctccatgcagctgtttgagaatgtcatctaggacacgtccaaaggagtgcatggccacagccacctccacccccaagaaacctccatcctgccaggagcagcctccaagaaacttttaaaaaatagatttgcaaaaagtgaacagattgctacacacacacacacacacacacacacacacacacacacacagccattcatctgggctggcagaggggacagagttcagggaggggctgagtctggctaggggccgagtccaggagccccagccagcccttcccaggccagcgaggcgaggctgcctctgggtgagtggctgacagagcaggtctgcaggccaccagctgctggatgtcaccaagaaggggctcgagtgcccctgcaggggagggtccaatctccggtgtgagcccacctcgtcccgttctccattctgctttcttgccacacagtgggccggccccaggctcccctggtctcctccccgtagccactctctgcccactacctatgcttctagaaagcccctcacctcaggaccccagagggaccagctggggggcaggggggagagggggtaatggaggccaagcctgcagctttctggaaattcttccctgggggtcccaggatcccctgctactccactgacctggaagagctgggtaccaggccacccactgtggggcaagcctgagtggtgaggggccactgggccccattctccctccatggcaggaaggcgggggatttcaagtttagggattgggtcgtggtggagaatctgagggcactctctgccagctccacagggtgggatgagcctctccttgccccagtcctggttcagtgggaatgcagtgggtggggctgtacacaccctccagcacagactgttccctccaaggtcctcttaggtcccgggaggaacgtggttcagagactggcagccagggagcccggggcagagctcagaggagtctgggaaggggcgtgtccctcctcttcctgtagtgcccctcccatggcccagcagcttggctgagccccctctcctgaagcagtgtcgccgtccctctgccttgcacaaaaagcacaagcattccttagcagctcaggcgcagccctagtgggagcccagcacactgcttctcggaggccaggccctcctgctggctgaggcttgggcccagtagccccaatatggtggccctggggaagaggccttgggggtctgctctgtgcctgggatcagtggggccccaaagcccagcccggctgaccaacattcaaaagcacaaaccctggggactctgcttggctgtcccctccatctggggatggagaatgccagcccaaagctggagccaatggtgagggctgagagggctgtggctgggtggtcagcagaaacccccaggaggagagagatgctgctcccgcctgattggggcctcacccagaaggaacccggtcccaggccgcatggcccctccaggaacattcccacataatacattccatcacagccagcccagctccactcagggctggcccggggagtccccgtgtgccccaagaggctagccccagggtgagcagggccctcagaggaaaggcagtatggcggaggccatgggggcccctcggcattcacacacagcctggcctcccctgcggagctgcatggacgcctggctccaggctccaggctgactgggggcctctgcctccaggagggcatcagctttccctggctcagggatcttctccctcccctcacccgctgcccagccctcccagctggtgtcacttggccttggggccagactggctgcacagcccaaccaggaggggtctgcctcccacgctgggacacagaccggccgcatgtctgcatggcagaagcgtctcccttggccacggcctgggagggtggttcctgttctcagcatccactaatattcagtcctgtatattttaataaaataaacttgacaaaggaaaaaaaaaccg

SEQ ID NO: 107516 - DNA, 2887 bp, Homo sapiens
ggcagggggagggcgagaagccgccgttgacaattacgtctgggtccaagcaaacatgaggcagctgccagccggcctgggcagtcttgtctgcctcggctgtgaagtggggaggctggcaacagttttcttcagcgcccaggatgcagccggctaaggaagtgacaaaggcgtcggacggcagcctcctgggggacctcgggcacacaccacttagcaagaaggagggtatcaagtggcagaggccgaggctcagccgccaggctttgatgagatgctgcctggtcaagtggatcctgtccagcacagccccacagggctcagatagcagcgacagtgagctggagctgtccacggtgcgccaccagccagaggggctggaccagctgcaggcccagaccaagttcaccaagaaggagctgcagtctctctacaggggctttaagaatatgccaccacctatgcacacttcctcttcaacgcctttgatgcggacgggaacggggccatccactttgaggactttgtggttggcctctccatcctgctgcggggcacagtccacgagaagctcaagtgggcctttaatctctacgacattaacaaggatggctacatcaccaaagaggagatgctggccatcatgaagtccatctatgacatgatgggccgccacacctaccccatcctgcgggaggacgcgccggcggagcacgtggagaggttcttcgagaaaatggaccggaaccaggatggggtagtgaccattgaagagttcctggaggcctgtcagaaggatgagaacatcatgagctccatgcagctgtttgagaatgtcatctaggacacgtccaaaggagtgcatggccacagccacctccacccccaagaaacctccatcctgccaggagcagcctccaagaaacttttaaaaaatagatttgcaaaaagtgaacagattgctacacacacacacacacacacacacacacacacacacacacagccattcatctgggctggcagaggggacagagttcagggaggggctgagtctggctaggggccgagtccaggagccccagccagcccttcccaggccagcgaggcgaggctgcctctgggtgagtggctgacagagcaggtctgcaggccaccagctgctggatgtcaccaagaaggggctcgagtgcccctgcaggggagggtccaatctccggtgtgagcccacctcgtcccgttctccattctgctttcttgccacacagtgggccggccccaggctcccctggtctcctccccgtagccactctctgcccactacctatgcttctagaaagcccctcacctcaggaccccagagggaccagctggggggcaggggggagagggggtaatggaggccaagcctgcagctttctggaaattcttccctgggggtcccaggatcccctgctactccactgacctggaagagctgggtaccaggccacccactgtggggcaagcctgagtggtgaggggccactgggccccattctccctccatggcaggaaggcgggggatttcaagtttagggattgggtcgtggtggagaatctgagggcactctctgccagctccacagggtgggatgagcctctccttgccccagtcctggttcagtgggaatgcagtgggtggggctgtacacaccctccagcacagactgttccctccaaggtcctcttaggtcccgggaggaacgtggttcagagactggcagccagggagcccggggcagagctcagaggagtctgggaaggggcgtgtccctcctcttcctgtagtgcccctcccatggcccagcagcttggctgagccccctctcctgaagcagtgtcgccgtccctctgccttgcacaaaaagcacaagcattccttagcagctcaggcgcagccctagtgggagcccagcacactgcttctcggaggccaggccctcctgctggctgaggcttgggcccagtagccccaatatggtggccctggggaagaggccttgggggtctgctctgtgcctgggatcagtggggccccaaagcccagcccggctgaccaacattcaaaagcacaaaccctggggactctgcttggctgtcccctccatctggggatggagaatgccagcccaaagctggagccaatggtgagggctgagagggctgtggctgggtggtcagcagaaacccccaggaggagagagatgctgctcccgcctgattggggcctcacccagaaggaacccggtcccaggccgcatggcccctccaggaacattcccacataatacattccatcacagccagcccagctccactcagggctggcccggggagtccccgtgtgccccaagaggctagccccagggtgagcagggccctcagaggaaaggcagtatggcggaggccatgggggcccctcggcattcacacacagcctggcctcccctgcggagctgcatggacgcctggctccaggctccaggctgactgggggcctctgcctccaggagggcatcagctttccctggctcagggatcttctccctcccctcacccgctgcccagccctcccagctggtgtcactctgcctctaaggccaaggcctcaggagagcatcaccaccacacccctgccggccttggccttggggccagactggctgcacagcccaaccaggaggggtctgcctcccacgctgggacacagaccggccgcatgtctgcatggcagaagcgtctcccttggccacggcctgggagggtggttcctgttctcagcatccactaatattcagtcctgtatattttaataaaataaacttgacaaaggaaaaaaaaaccg

SEQ ID NO: 107517 - DNA, 3020 bp, Homo sapiens
cgccgccgcgcctcgaagtttgccggctgactcggaaagttgcgctcgggctcggccgccgcgtccggtccccgcgtccagcctccggcctgacccgctcgccgccgccgccgccctccacggggccccggcccagccaacccagcagccccgcctgccgggggcatgtgagccgtcgccgcccccgagaggccgtgcgggctgcaggggccccggtgcctccgaggcagcgcgtgggcgaggggtgcgcccgggccccagggccccaggcagcccggcttgccatgggcatccagggcatggagctgtgcgccatggccgtggtggtgctgctgttcatcgccgtcctcaagcagttcggcatcctggagcccatatccatggaagatagcagcgacagtgagctggagctgtccacggtgcgccaccagccagaggggctggaccagctgcaggcccagaccaagttcaccaagaaggagctgcagtctctctacaggggctttaagaatgagtgtcccacgggcctggtggacgaagacaccttcaaactcatttacgcgcagttcttccctcagggagatgccaccacctatgcacacttcctcttcaacgcctttgatgcggacgggaacggggccatccactttgaggactttgtggttggcctctccatcctgctgcggggcacagtccacgagaagctcaagtgggcctttaatctctacgacattaacaaggatggctacatcaccaaagaggagatgctggccatcatgaagtccatctatgacatgatgggccgccacacctaccccatcctgcgggaggacgcgccggcggagcacgtggagaggttcttcgagaaaatggaccggaaccaggatggggtagtgaccattgaagagttcctggaggcctgtcagaaggatgagaacatcatgagctccatgcagctgtttgagaatgtcatctaggacacgtccaaaggagtgcatggccacagccacctccacccccaagaaacctccatcctgccaggagcagcctccaagaaacttttaaaaaatagatttgcaaaaagtgaacagattgctacacacacacacacacacacacacacacacacacacacacagccattcatctgggctggcagaggggacagagttcagggaggggctgagtctggctaggggccgagtccaggagccccagccagcccttcccaggccagcgaggcgaggctgcctctgggtgagtggctgacagagcaggtctgcaggccaccagctgctggatgtcaccaagaaggggctcgagtgcccctgcaggggagggtccaatctccggtgtgagcccacctcgtcccgttctccattctgctttcttgccacacagtgggccggccccaggctcccctggtctcctccccgtagccactctctgcccactacctatgcttctagaaagcccctcacctcaggaccccagagggaccagctggggggcaggggggagagggggtaatggaggccaagcctgcagctttctggaaattcttccctgggggtcccaggatcccctgctactccactgacctggaagagctgggtaccaggccacccactgtggggcaagcctgagtggtgaggggccactgggccccattctccctccatggcaggaaggcgggggatttcaagtttagggattgggtcgtggtggagaatctgagggcactctctgccagctccacagggtgggatgagcctctccttgccccagtcctggttcagtgggaatgcagtgggtggggctgtacacaccctccagcacagactgttccctccaaggtcctcttaggtcccgggaggaacgtggttcagagactggcagccagggagcccggggcagagctcagaggagtctgggaaggggcgtgtccctcctcttcctgtagtgcccctcccatggcccagcagcttggctgagccccctctcctgaagcagtgtcgccgtccctctgccttgcacaaaaagcacaagcattccttagcagctcaggcgcagccctagtgggagcccagcacactgcttctcggaggccaggccctcctgctggctgaggcttgggcccagtagccccaatatggtggccctggggaagaggccttgggggtctgctctgtgcctgggatcagtggggccccaaagcccagcccggctgaccaacattcaaaagcacaaaccctggggactctgcttggctgtcccctccatctggggatggagaatgccagcccaaagctggagccaatggtgagggctgagagggctgtggctgggtggtcagcagaaacccccaggaggagagagatgctgctcccgcctgattggggcctcacccagaaggaacccggtcccaggccgcatggcccctccaggaacattcccacataatacattccatcacagccagcccagctccactcagggctggcccggggagtccccgtgtgccccaagaggctagccccagggtgagcagggccctcagaggaaaggcagtatggcggaggccatgggggcccctcggcattcacacacagcctggcctcccctgcggagctgcatggacgcctggctccaggctccaggctgactgggggcctctgcctccaggagggcatcagctttccctggctcagggatcttctccctcccctcacccgctgcccagccctcccagctggtgtcactctgcctctaaggccaaggcctcaggagagcatcaccaccacacccctgccggccttggccttggggccagactggctgcacagcccaaccaggaggggtctgcctcccacgctgggacacagaccggccgcatgtctgcatggcagaagcgtctcccttggccacggcctgggagggtggttcctgttctcagcatccactaatattcagtcctgtatattttaataaaataaacttgacaaaggaaaaaaaaaccg

SEQ ID NO: 107518 - DNA, 2559 bp, Homo sapiens
cagtgagctgaagcaagttttctgaggaagctatgtcatcaaaatttacaacatctgtttctttggaggtccttactgtaagtgaatcaaagtctactgattttggtctaaggggcagctgttcagaatctagctttagttttgatactggactgtgccccgcagcaggatggagaggccatccactttgaggactttgtggttggcctctccatcctgctgcggggcacagtccacgagaagctcaagtgggcctttaatctctacgacattaacaaggatggctacatcaccaaagaggagatgctggccatcatgaagtccatctatgacatgatgggccgccacacctaccccatcctgcgggaggacgcgccggcggagcacgtggagaggttcttcgagaaaatggaccggaaccaggatggggtagtgaccattgaagagttcctggaggcctgtcagaaggatgagaacatcatgagctccatgcagctgtttgagaatgtcatctaggacacgtccaaaggagtgcatggccacagccacctccacccccaagaaacctccatcctgccaggagcagcctccaagaaacttttaaaaaatagatttgcaaaaagtgaacagattgctacacacacacacacacacacacacacacacacacacacacagccattcatctgggctggcagaggggacagagttcagggaggggctgagtctggctaggggccgagtccaggagccccagccagcccttcccaggccagcgaggcgaggctgcctctgggtgagtggctgacagagcaggtctgcaggccaccagctgctggatgtcaccaagaaggggctcgagtgcccctgcaggggagggtccaatctccggtgtgagcccacctcgtcccgttctccattctgctttcttgccacacagtgggccggccccaggctcccctggtctcctccccgtagccactctctgcccactacctatgcttctagaaagcccctcacctcaggaccccagagggaccagctggggggcaggggggagagggggtaatggaggccaagcctgcagctttctggaaattcttccctgggggtcccaggatcccctgctactccactgacctggaagagctgggtaccaggccacccactgtggggcaagcctgagtggtgaggggccactgggccccattctccctccatggcaggaaggcgggggatttcaagtttagggattgggtcgtggtggagaatctgagggcactctctgccagctccacagggtgggatgagcctctccttgccccagtcctggttcagtgggaatgcagtgggtggggctgtacacaccctccagcacagactgttccctccaaggtcctcttaggtcccgggaggaacgtggttcagagactggcagccagggagcccggggcagagctcagaggagtctgggaaggggcgtgtccctcctcttcctgtagtgcccctcccatggcccagcagcttggctgagccccctctcctgaagcagtgtcgccgtccctctgccttgcacaaaaagcacaagcattccttagcagctcaggcgcagccctagtgggagcccagcacactgcttctcggaggccaggccctcctgctggctgaggcttgggcccagtagccccaatatggtggccctggggaagaggccttgggggtctgctctgtgcctgggatcagtggggccccaaagcccagcccggctgaccaacattcaaaagcacaaaccctggggactctgcttggctgtcccctccatctggggatggagaatgccagcccaaagctggagccaatggtgagggctgagagggctgtggctgggtggtcagcagaaacccccaggaggagagagatgctgctcccgcctgattggggcctcacccagaaggaacccggtcccaggccgcatggcccctccaggaacattcccacataatacattccatcacagccagcccagctccactcagggctggcccggggagtccccgtgtgccccaagaggctagccccagggtgagcagggccctcagaggaaaggcagtatggcggaggccatgggggcccctcggcattcacacacagcctggcctcccctgcggagctgcatggacgcctggctccaggctccaggctgactgggggcctctgcctccaggagggcatcagctttccctggctcagggatcttctccctcccctcacccgctgcccagccctcccagctggtgtcactctgcctctaaggccaaggcctcaggagagcatcaccaccacacccctgccggccttggccttggggccagactggctgcacagcccaaccaggaggggtctgcctcccacgctgggacacagaccggccgcatgtctgcatggcagaagcgtctcccttggccacggcctgggagggtggttcctgttctcagcatccactaatattcagtcctgtatattttaataaaataaacttgacaaaggaaaaaaaaaccg

SEQ ID NO: 107519 - DNA, 983 bp, Homo sapiens
ggcagggggagggcgagaagccgccgttgacaattacgtctgggtccaagcaaacatgaggcagctgccagccggcctgggcagtcttgtctgcctcggctgtgaagtggggaggctggcaacagttttcttcagcgcccaggatgcagccggctaaggaagtgacaaaggcgtcggacggcagcctcctgggggacctcgggcacacaccacttagcaagaaggagggtatcaagtggcagaggccgaggctcagccgccaggctttgatgagatgctgcctggtcaagtggatcctgtccagcacagccccacagggctcagatagcagcgacagtgagctggagctgtccacggtgcgccaccagccagaggggctggaccagctgcaggcccagaccaagttcaccaagaaggagctgcagtctctctacaggggctttaagaatgagtgtcccacgggcctggtggacgaagacaccttcaaactcatttacgcgcagttcttccctcagggagatgccaccacctatgcacacttcctcttcaacgcctttgatgcggacgggaacggggccatccactttgagacaggctggagtgcagtggcaccaccatagctcattgcagcctcgacctcctggcctcaagtgatcctcctaccccagcctcccgagtacctgggactgcgggtgcatgccaccatgcccagctaatttttttattttaattgttgtagatgcaaggtctcactatgttgtccaggctagtcttgaaatcctggcctcaagcaattctcctgtctcagcctcccaaagtgctggaattgcaggtgtgagccaccacacctgggtgttgcttctttaaaatattttcattggccgggctcggtggctcacgcctgcaatcccagcactttgagaggccaaggcggtcagatcacctgaggtcaggagtttgagacaagcctggccaacatagcg

SEQ ID NO: 107520 - DNA, 554 bp, Homo sapiens
aatttttagtctctgttgtctgagagtatgtggtacatgtgagattaactgccccagaaaggatgcattgactaaagggatagtctggatgtgtcagggaaaatgtatattttctggtttgggcatttgactggatttcttgtctagttgtttttttgtttcatctaaatatgaaaatgcagcaaaagaatttaagagtcaaaaatcagtaaactctggatttttaacaggctagtgattgtagaggttcacgtgggtatctattgattgagggctacataccaattcacttgaaaatcccatattcttactgaccacccaggaaagactttggactttcaaagttaagagccattggtagaaagtcctttggctcaaatacaaacgagcatcttatatatgaactggataggaaacaattgctgttggatactgcaaacctgtaatatcaatagatacactgcatctctaaaatactatcgtttcagtcatttcctgttgtctttcatccagttcactttattcctttatgttacctatctggccactatagt

SEQ ID NO: 107521 - DNA, 509 bp, Homo sapiens
tggcaatatgcatttcaggttccttctgatcatttcatggcttgctagatcatttcttacaattgctgaatggtattgcattgtatgaatgtgccacaatttgtttaggcactcgcccattgaaggacatcttagttgcttccaaattttggtaatgatagataaagctgctaaacatttgcatacaagtttttgtgtggacataagttttcatttgggtaattaccagggagtgtaatttctacatcgtatggcatgtctatgtttagttttgttaagactacgcttagttttgcaacatttggcaaccctattttcattgagttgtacccctttttaagaggcaaagaacaagcatatacttcaatgagaaaaggctgtaaaggacatctgaaactcatgtgttcagtcattcatgcattcatttgatatttattgagcacagttatgtgcgagatcctggaagtacaaacatatgtaatggaaaagattcacgcacaaaccaaagc

SEQ ID NO: 107522 - DNA, 588 bp, Homo sapiens
cttataaatctgttgtgtttgactctggcacgacccctacaggttgtgtgactttgagtaagtttatataacctcttttagtcattcttttcccatccgtatgataagaacactaatgtctcttttgcaagtttgttataatgatcaaatgacattatatacacacacatataaaatatgtgtatatataaaatatatacatatatttttcaagtcattcaaacaatattgaaaactatgtgctaagcactattttaggtattagtgatatatcagttaataaaacagatttaaaagaaaatcttgccttcatgtaaattaccttttaggtaaatatatgaaagtacctgaaacagagtagccatttggtaactgctcttttctttttcctaagtaaaaggaaggcagtacttatccttcagtactgattttagcaggcagtacaatactggttaaaacttcatccggccaggcgcggggactcacgcctgtaatcccagcactttgggaggccgaggcgggcggatcacgagatcaggagatcgcgaccatcctggctaacacggtgaaaccccatctctactaaaa

SEQ ID NO: 107523 - DNA, 620 bp, Homo sapiens
ttagatttagctttaacgggtacttttgctggaagtgtaaaatattgacatttattgacataagaaaacctaaaatggaatcttgtagctactgtaaacctattttccaggtcagagaatatttttaagatactttatatgttaaagaggcctcattccttaacaagtactttaaaaattatatttggtagatacattttctttggtaaattttgtaatcaatgaagatgtaaagaacttcctttgatataattaacactgagctgtttatactcaaatacagcaaaccatattgatatcaattctgtaattggggatgagttgtccaattaagttcatttctttgaaaataaaaggatttctttattagccctacttccagatacacatttttaaaaagactcatttatactctaagctacacctaattccatttttttatcaaatcaatattaaacataatagcagacatctgaatatgccttaatttgtaaacatgattagcacaatttctaaaaatccagaagcaaaacatataccttacatttctgtactatgctgccagttatttcacatcattcccagctttctgctaatttctatcctgaattgtttgctct

SEQ ID NO: 107524 - DNA, 94 bp, Homo sapiens
ctgtgggattgtttctaagcacaaagcacagcttctcttctttgtataactgggtttttttaggtaagcccactccgccctatgcaagttccca

SEQ ID NO: 107525 - DNA, 338 bp, Homo sapiens
tgaatggtattgcctaggttttcttctagggtttttacggttaaggtctaacatttaatgtctgtaatccatcttgaattaatttattgtacaaggtgtaaggaagggttccagtttcagctttctacacacgcctagccagttttcccagcaccggctaactccctttatccaccattgaggcaatcactgttatctgtacaactgttcagacctctttttatgtatttatccatctacatgcagaaaagtaaaatgttttgagatttaaaacaatacacaggatactacacatattattctacaacttgctgtttttacccaacaagacatcctgg

SEQ ID NO: 107526 - DNA, 465 bp, Homo sapiens
ttcctatccccgacttttgcaaaaaaaaaaaagtactatttactgagtgcctgtaaatgttttatacactaaagatacatattactcatccttttaccctacaaatatgaatgaatattagagatgtttggcaacttgtccaagtcatacaataaatgactgaagtaggagcttaagtccacacagaacttcatacatgtaaactgagcagcaacttcacgcctagctccatgccactttcctagttttatttgtgtcttttttcttacatggttccaacttactttctgatattttactgtatgcaccttgtaaatgaattaaaatcttagttggaacaaagccaaatataaatgaaaaaataaaatttaaaatgttctggaagttgatgatggtctagctctattaggtttcataaaactaaaacaaaaaaaaagaagatcattatttcaggctggcacagtg

SEQ ID NO: 107527 - DNA, 411 bp, Homo sapiens
gtatttatttaatcttgtatctgtgatagggctctgagacacttctgtgaagcagatgtttgaagatctgacaattatggaagaaaatttctcatagaaaaagatatgttctccagccttgggcgggggcctgacattactcttccacatttcactcattcatttattgaaaaatgaaaaattatatatatttataatataccaggtgatattttgatatgtgaatacattgttgaattattatgttaagctaattaacatatctctcaccttacatacttattttttgttgatgagatggacatttcttttttaagtatgcttaaatgtgttcacggattgtgtgaaatttttggcatcccgtttcttgatataccaccttttgccacatttcttgtttatatagtatgt

SEQ ID NO: 107528 - DNA, 464 bp, Homo sapiens
gattatgcaacctcagtgttgcctttccttgtaaattatactgttgaagttcttttgtgtaaatagattgtattgatttttatctgagtgtatccgttattttcacagtacacacatctttaactatgccttgtcccttgagagtttacttgtgcattaagaaattaaggagggctggtcgcagtagcttatgcctatatgtaattccagcactttgggaggatggggcagaaggattgcttgagcccatgggttcgagaccagcctgggcaatatgatgaatccctgtctctacaaaaaatacaaaaattagccgggcatggtggtgcgtccctgtggtcccaactattaatattcgggaggctgaggtgggaggatcccttgagcccaggaagtagaggctgcagtaagccaagatcaagccactatacttcggcctgggggacagagcaagactctgtcaa

SEQ ID NO: 107529 - DNA, 399 bp, Homo sapiens
attattaatatgctcgaatttgggttcaccaatgaattgttttctgtttgttccctctatgttttgtttctgtttgccctttcttatcctctcttagataatttgaatactattttattttattttattttattttattttgagatggagtcttgttctgtcacccaggctggagtgcagtggcacagtctcagctcactgcaacctctgcctcttgggttcaagtgattctcctgccccagccgtccaggtagctgggactacaggcatgtaccaccatgcccagctaatatttgtatttttagtagtgacagggtttcaccatgttggccaggctggtctcaaaatcctgacctcaggtgatccgcccacctcatcttcccaaagtgctgggattac

SEQ ID NO: 107530 - DNA, 131 bp, Homo sapiens
gatacactagtaaagttatgcatcttttctcttttttgaagcagggtatcactctgtcacccaggctagcaggcagtgacatgatctcagctcactacactcaccaccctccaggatcaggtgatcctccc

SEQ ID NO: 107531 - DNA, 319 bp, Homo sapiens
  misc_feature (8)..(8): n is a, c, g, or t
tcgcgaangtgttatcctcgggtcccataccaagggatcccaggttgcttgctttcttctttaattcctccccaaccattcctatggattataaagagatatttcatgtataattgtttgcgtgggagcccgaggatgacttcagcttctcttttgaggtagagtacttttttgtagaggaggaatctgaggctctggtttaactggttggagagaatgccaggattcagcctgggtgtgaatccttctacccatcaaagagcgtcattctgctctctctggctgctccccacagcagaatggataacacgttcgcgag

SEQ ID NO: 107532 - DNA, 187 bp, Homo sapiens
cttgctttagtatatgttgagatgtttttgggttgcatgggtgactgtgtccagtaggcagatgaatctgtatatccagagatccgattggaaaaacagagccaacagtatggatgcaggggtcaccggccctaacagtggaagctgaattctttgagtgggtcaggaattagtgcagcactgtaag

SEQ ID NO: 107533 - DNA, 333 bp, Homo sapiens
aacacgctaaatgaaagaagcaagtcacaaaacctatatactgtgtgatcccatttattttaaatgtccagaataagtaaatctagagaggcagaagttagattagtggtttcctagagctgagtgtgggctggggtgggaagtgactactaagggtattttgggtgataaaaatattctaaatttagattatggtggtggttgcacaattattttaatatgctaaaaaccattgactagtacactaagtgagtgagctttatagagtatgtaaaatttatatctcagtaagttattaagaatcagcttattattctccaagttttgaaaaca

SEQ ID NO: 107534 - DNA, 384 bp, Homo sapiens
caggtgagactctgtctcaaaacaaaacaaaacgaaaaacttgttttaaattatgttctattttaatttcaaattagaaaaagtaaagaaaattacagcataatacatcctcatataatctttgcctggattcaccatttgttagcattctacaaatttgcattttttttctctctctttctgaaccatttgaaagtaagttgcaggcatcatgacatttcaccactaaatagttcagcgtgtttgtcctaagaacaagaacattctcctggccatgcatggtagctcacatctgtaatcccagcactttgggagctaaggcgggtggattgtttgagcccaggagtttgagactagcctgggaaacatagcaacaccctgtct

SEQ ID NO: 107535 - DNA, 1007 bp, Homo sapiens
tttttttaaaggcaaagattgacattattgaaggaaaggggatgaggacaactgtgaactcacagtgagccctgtggaaagaagagacagacagagtgtgggtttgttcggaggcctctgctgtcaatggattccaggagcaaggccatttgtcgcgctttccaaatttcttaggcatttattttgataagtttatagccatcatgtttctaagagacttggagacaccagcaaactgctagaactcaaactcttcaattactcaaagaaggagccatttcagttaactcaagtgaatgaaagagttttggaatctgctgtgggtccttccctgttgaccatttggtaacttataatctgacaaaaactcttgagctgcaacaggccttgccagagggctcaggatgggaaaggaagaaggggataggaaaagaagaggtaattttacatttcccctttaaagtaaattttagccaactcatcattctgaaatgtccctataaagaatgagtcgaactagaccagaagccagcctactccttcttacatagcttctccaacaggggtagcaatgacctgtccacttcaaacacagataaggcctgccatcctcattggttaaaggcacacgtgagactttcagtgggctctgctgagaaggaaggcagcccaggagtcaggtatgcaggcattgcattgtcagtgtctgctctcagagtttacacattcaattgcttccaagggtgaatctcctgctctgtgaatgctatcagaccccaaaggccaaccttgggctgggtctatgtacgttcttccgaagcactgatgatcaaaattgaagacacattcagaggtttgattggttgagattaactggtgtggtggttggtgtatgtatgttttatttttatgtctttgtatgtagttctacataatgcaaattgtgctttctgatggacaagacctcataactgtgattaatatcaataaaaaggggatgttgtgga

SEQ ID NO: 107536 - DNA, 1029 bp, Homo sapiens
tttttttaaaggcaaagattgacattattgaaggaaaggggatgaggacaactgtgaactcacagtgagccctgtggaaagaagagacagacagagtgtgggtttgttcggaggcctctgctgtcaatggattccaggagcaaggccatttgtcgcgctttccaaatttcttaggcatttattttgataagtttatagccatcatgtttctaagagacttggagacaccagcaaactgctagaactcaaactcttcaattactcaaagaaggagccatttcagttaactcaagtgaatgaaagagttttggaatctgctgtgggtccttccctgttgaccatttggtaacttataatctgacaaaaactcttgagctgcaacaggccttgccagagggctcaggatgggaaaggaagaaggggataggaaaagaagaggtaattttacatttcccctttaaagtaaattttagccaactcatcattctgaaatgtccctataaagaatgagtcgaactagaccagaagccagcctactccttcttacatagcttctccaacaggggtagcaatgacctgtccacttcaaacacagataaggcctgccatcctcattggttaaaggcacacgtgagactttcagtgggctctgctgagaaggaaggcagcccaggagtcaggtatgcaggcattgcattgtcagtgtctgctctcagagtttacacattcaattgcttccaagggtgaatctcctgctctgtgaatgctatcagaccccaaaggccaaccttgggctgggtctatgtacgttcttccgaagcactgatgatcaaaattgaagacacattcagaggtttgattggttgagattaactggtgtggtggttggtgtatgtatgttttatttttatgtctttgtatgtagttctacataatgcaaattgtgctttctgatggacaagacctcataactgtgattaatatcaataaaaaggggatgttgtggaaaaaacacacaaacaacaaaac

SEQ ID NO: 107537 - DNA, 874 bp, Homo sapiens
cagcttgtcaatttggtcttaaagtgtacagtggagtgacatgagtttcttctgcattggtgtggagatgggtactctccatcacatgaatatttcaaacaagggagagctcaaagtcttaagttgttgctcatggctaaggtaatgttgttctggaagtctttcaaagcaggatttattcacttcacagtcaagtcattaactcatggaaatgaggagcccaggaaaagaatatcattctgggctagtttctgttcctgtgcattacatgattttttaaattaatcatttgccagtggataaccattgatggtaaatttggcaagtatctttaaagttcttttttaagaaatgactttattaagttgtaatttcacataccatatagtttgcccatttaaagttcagtagtcttcagtatattcacagagctgcacaaccattatggttatcactgcactgctcctctagtccctcttcccctaccagtgcaaagcaaccattaatctactttatatctgtacatttccctattttggattttcatatacatgagtagaaacaggtactatgtagtcttttgttagtagcttctttgacttagcatattttcagtgttcatctatattgtagcatatgtcagtactttattcttttttgtggctgaatactatttcattgtatggatatgccatattttgttcatttattttctgatggacatttgggttgtttctaccttctgactattatgaataatgctgctataaacattcatatgcaagtttctgtgtggacttgtgttttcacttgtgtttggtatgtactaagtggagccaggcatgagctactgcacctggcagaggcaacatta

SEQ ID NO: 107538 - DNA, 891 bp, Homo sapiens
caagttttaagattctcaagccagtttatttaaatatagccaaaatatatacctaatttgtgttatataaccatcagcatttagcacaaagaattcattgaaatatatatccagagttctaggttgggaagatcttgggagaaataattcccaccaaaattccaggaactagaaaactgggacttactttcaccagccatgactctaatcttctcacccaccaggatgtgagactaaacactgcccgctctcctgtacccctcccatcccaaaccccagactacaaactccaaaagcatgttcatacaatcccttaggacaaggatggaaatagaggtgacaggggagaggaaggcaagaaacttagaagtgtctgaagggtgattttttaaaagtcgaggcactggggtgtgtccatggaattaagaggggtttcctgtcttagttctctcttgtatatgctgaaaaaccaaagcagagtgaggaacaaggactaggtggagaaagcaaggctgaacatggaagcttttctacagttacttctgtgaaagtaactataatttgaaactggattaaattttcccttccccttctccttctcattgctgtactagtattacaaaaagaagctgtgagaaacatctaaaagagttctttgcattgaggcagggtgataatggaccactggaaatgaggtgggaagtaacatcccaaaggggatggtaataactgagaaaataagaaagtatatttaatccttctactctactctgagttctttaacgacaggtttcacctcctgcccaactttgcacctttggtgcctggaaatctggcacacagtaggtggtcaataaatatgtcaaatgaatgaataaatataactgtagt

SEQ ID NO: 107539 - DNA, 400 bp, Homo sapiens
tgaagttcctcttttttgctcttaaatgggttgagagattgtgataggtagtggggggaaaaagcatttagggccctgaattttgtattatggtgtttttgctactagaaaacacatgtctcaatggtgaatatttttaaaaagttactatttcaatttaactagacccttaaaaataatagaggttcatcaacaagtggcataaagagaggaacaacaaacattggggcctacttgagaatgagggatgggagagggagaggatcagaaagaataactattgggcaccaggcttagtacctgggtgaaaaaataatctgtataacaagcccccacgacacaagtttacccatataacaaacctgcacatttacccttgaacctaaaataaaagttaaaa

SEQ ID NO: 107540 - DNA, 901 bp, Homo sapiens
ggcctcatcagccccacctgggacctggcaggggatgggtctgagcagccctagaggagggtccccagggcccacagcaagggtgacatgacccacaccatccccactgatgggacccacacagtgaacctcctcccacaccccctccccagccagccacttggaccagagagacgttatcaaagtgccctctcggaaacgtcgccttcatccaccatcctcttttaacccactgggcttggtcaggaagccgttggtcagcagggggcaggtggggttgggtggcacccttatgtcctgtgagaccctagcaggcactccagcttgggatttccagaggctctgaggtggctaagaacaggatgacaaatcgactccaaggttcaactcttcccctcatggacactcctccctatgctgttctcatctcaaattttacctgtttttctcaaagtagctcaccagaggttggaaatgagatcaaaggtcagcgtggatctcaacattattattcatcagggaaatgcaaatcacaccagagatgagacgccatgacactcacactagcagggctaaaatttaaaagtctagctggggctgggcatggtggctcatgcctgtgatcccagcactttaggaggccaaggcaggaggattgcttgaagcccaggagctcaagaccagcccggcacaaagcaaactgtacctctacaagaattttttttttaattggctagatgtggtacacatgcctgtggtcacagctacttgggaggctgaggagggaggatcacttgagtccacgagttcgaggcttggtgaactgtgatcatgccactgcactccagtctgggcaacagagtgggacctcatctcttaaaaataaagaaaaggaaaggag

SEQ ID NO: 107541 - DNA, 1020 bp, Homo sapiens
aaaagaggagcaaggacacgtcttacatgggtgcaggcaagagggtatgagcagaggaattcccttttataaaaccatcggatctcatgagacattcattatcaagagaacagcatggaaaaaaaacagcacccatgattcaattacatcccaccagatacctcccataacacatgaggattattacaattcaaggtgagatttgagtagggaaacagagacagaccatatcaccagccttcatgtttgtctttccctcttgaatgtgagaccaaaggggaaaggaccatgatatgttttgactgaacctctggcacctagagcaatgtcgtccgtatatgtttgctaaatgaatgactagatgcactgcttgaggattctaacaaaagataaacttagctaaataatctgcaaataatcatccttgattattttttctaaccttaaacatttgtattaattataataatatcacctcattatttgcttaccatttgccaggctatgttccatgcattttccacattttctctcacttaatgctcaaaactgtgtaggtacatactattaataaaattatttcacatacagaggaaccaatgcatagggaagttcattatcttgccaaggaagggaagtttaaaatgctaagttcgacattctcattccagagcctatgctctgggcctctacaatgcaatttccctcaaaaataaaccctccaggatgggtgggtggctcatgcctgtaatcctagcaatttgggagaccaaggtgggcacattgcttgagcctgggagctgaagacaagcctaggaaacacaaggagaccctgtctttacaagagatacaaatattagctggccatggtggcatgtgccagtaattgcagctactcgggaggctgagttggaagaatcatctgagcctgggaagtggaggctgcagtgagccaaggtcaaataactgcattccggcctgcacgacagaatgataccctgtatcagaaaaaaaaaaaaa

SEQ ID NO: 107542 - DNA, 285 bp, Homo sapiens
gaccccgctatgcccacagtttcattccatctgagttcctcgcagcattgggaatgttttggcccttgcagagatgcattgtaagggcagaactaaaaatagatgaatttttaattgcagaatttagcctatgcatactgtgccaggaacacagcagaagaaaacgattaaattcagagactataaaatcccagcctagatatgaagatcctgtttccaaagaggctcaaggtagtgattatcactgttaatgttggaatgatggtcgaggacccccagaaagag

SEQ ID NO: 107543 - DNA, 195 bp, Homo sapiens
tctgcttaatgttttatttttccagagacccgagccttaagccaaaggagtcatgccttaaaggaatttcagagatcagttaggggatgaagaaagtatttcctgaaatccttttcagtaccctggatatcaccccacccagataattgcttactcacccttttacaatgtcagccttgatgataactcagacga

SEQ ID NO: 107544 - DNA, 487 bp, Homo sapiens
tgtaaatttgtttaagttccttgtagatgctaaatattagacctttgtcagatggatagattgcaaaaattttcccccattccataggttgtctgttcactctgtggatagtttcttttgctgtcaaattattttcattcatattcttccattaaaaaaaggttcaaagttatgtcataaggcaatctatattacctttatatggttttagaatggaaggtaaataccacaatgagagttcttgttttaaataagtatgtgctgtaatattttagtataatatccgaaaataagatttaccaagcacaacatttttcaaatgactaggcttgatatatttgataaactgcaatttgtaattgattaaataaaccctgttggcctaagagttgctcaattctctcttttcttcatcagggttattaaggtattataagattgatgttatgaaaaaagatcctactcctaaaagaatttcaaacattta

SEQ ID NO: 107545 - DNA, 185 bp, Homo sapiens
aggtagggagagagtctgtatgacaaatattttccactgaagacttaacaaatattgcagaattccaagggatcttcctgagaagataagtgagcataactgttttgaatttcttcggttcaatcatggggaaagtgcttagtaactcctgatgcttacacttttttgagagagagagagtgtgt

SEQ ID NO: 107546 - DNA, 482 bp, Homo sapiens
ttctatgtgtacacccaaagaactgcaaatgtatgatcaaccaaaaatatgaacatgaacgctcatcgcggcacagttccgtaatagcccaaaaagtggaaacaaacccaaacgcccatcaagggttgaatggataaacaaaacgtggcccatccttacaacagcgtaaccttgggccgtacagaggagtgaagtatgatatgcaccacgatgcggaggaaacttgagaacatagtaagtgaaagaaaccagacacaaaggacccacacacggtgtgattccattcacaccagatgtccagagcaggagatctgtagaggcagaaaggagattgctggttgtctagggctgggtttcgggaggataagggagtgatagccaaaggctgcgagtttctttataaaggatgaaaatgtcctaaaattggggtgatggttgcatgtctgtgaacctactaaaaaccactgaatcacacacttact

SEQ ID NO: 107547 - DNA, 494 bp, Homo sapiens
gaatgaaacaagctattatcaaaatatttcagtctaaagcgttgggtggtttctggacttctacctgttttatattctcattttttcttcctattttttttatgattctgtgcatacaaagtattgccctggaggtgagacttaaaacattcaaaagaggttgaaaatattttattctgaaagtatatcccaactattctctcaggaaagcaggaatacgtggagcagaaaaacggacagctcaatcaaaaacagaacaacaaacaaagctcactttctttccatgattattccatctgggagagatgcctaggggttactaggatttagggaaaagagggaaagtaggacattttgttttcaaatatgtaaatgtctggcagttgccccaatgtttgaaggccaaaattgttatatttgtattattatattttgaagcagttgtattacaatttatttcacttcaggaggctcttaggaaatttgtatatttt

SEQ ID NO: 107548 - DNA, 407 bp, Homo sapiens
aagggtgggtatcagtaattacctatttttgcaactgtatctacaaagataataattaaaatgatgagattaaaagagatcactagggcagagagtataagaaaggaagaaagataaggaaagaactttggtgaatacctcatttaaatatagaaataagagttatcagagaagctgggtggggtatttatgccgaagcagtgtttagaaaacttatggaagagaaaatttcaggaaagaaagggttaatcagcaatctaagtttttaaaaacttttgcgaatttgtttttattggggtataagacatgggttggaaaatgtcagtttggggtatgcacttgtctccaggaaatatctatcctcatcttcccgggatgatttttggaactttttctctttaatggag

SEQ ID NO: 107549 - DNA, 779 bp, Homo sapiens
ggctttttcttaccaagccatcaaatgtggaatatagctttattctcgactctctgctgctcataagattctctccctgggtgaccttatacatgcccaaggctttatataccatctattagctgttaactccatttatatgagctcaaactttagctgaatttcacacttatgcatctaaacacctatctgacgttcgttcacagatacttcagagacatctcaaacggtagagagcgatagtaccaggcactgagctgtaatggatccgtcgttccagcccaatggtacgacctgtaatccgcatttgtacctttctctcgatagtcatcttatactgatttctaagccatagtatctcactaagtcagttgggggatgattctggggttcttaacctcacattaagttctattagttacaggattgaccaccgcttaatatctgtcttttccatgctccttccccctttctacttctgttcatgagacaactcagttttgagttcaaaaagagtacatgtgttgatgattcccacatccagacatgaggtgcttttcctaatacaaccatcagccatttcaattttggtttatctaaaacaaattcaccagcatctgttaaaccagctacttctcttagcttattgcttgtgtcagggtactacttttcttctagataccgggtgtaaacctttagcatgtaagttgacccctctctccattttgacagtcatttgtcaagctctggcctttatcccttgtagatggatgttgctt

SEQ ID NO: 107550 - DNA, 171 bp, Homo sapiens
ggggaaggtaaaaggggaattcggatttttataattcgaatttacaattttacaattgggtacagcttgttcactgtttggattatgggtacattagaagcccaaacctcactattatgtaatatatctatgtgataaacctgcacatgtgccccccaaatctaaaatctt

SEQ ID NO: 107551 - DNA, 289 bp, Homo sapiens
cctgtcccggtgccctgcggttgccatgccgacccccaggctgtgtttgcggatgttgtatttgatttcacacgtttggaactccgattacgtcatttcgcaacacagggttgccatgacagccggccccatgttccctgggtagctcacaccttgggggaaagggaggggcccgggcctctcccccaaccaaacctcaaccctgagccccctcggggagagaggccaggaatgtggggttgggaagcaccttgggatcaatcaacgtctacatttggggaaaccaagg

SEQ ID NO: 107552 - DNA, 404 bp, Homo sapiens
agagacaggggtctcagtatgttgcccaagctagcctcaaactcctgggctcaagcaatcctcccaactcagcctccccagtacccagaactacgacatgcaccaccatacccagcttgtatttgcttactatttattgatatccaccactcaatgtaagctccataaaggtaggcactttggttcactactgaatgaattcctgatacctagcacaatattaggtcataacagattcataacaaatacctgtgactgactaaattaatctttggccaaataaactgaatttttagaatttcaactatttgattatataaaatagggagatgacaataatctcttgctatacctgtgctcactctctctcacatacactccttattcattcatatcactctatc

SEQ ID NO: 107553 - DNA, 255 bp, Homo sapiens
tgggaaaatagctgtgggatgattttagaaaatcaaagctcaataacattatttattttcatcataaaaaatttgaaaatttgtaaaagaagaaaactttagaaaaattaaatttaacagtttaaatgagcaaatcatgatttgcaaatcgggtaacctatggatccagagtaggctcagagagactccaacacagccacatgttggtaaaatttttatgaaccagaaaagcaaaatgacatacagaaaatggaa

SEQ ID NO: 107554 - DNA, 766 bp, Homo sapiens
ggagtaaaagtctcattatgatatgaagttcttattccaacctcttggagaaagctgtttacagtgtgaaaatagcaactttttcttctggtttgtagtttgaatatctttggtcatgacattgggcagttgggtgaaccttttttgtggttcataaatcagacatgaggcttgtttcttaaaatttatccagtttcagccgggcaccagttgttcacacctgaaatcccagcactttcagaggccaaggctggcagatcacttgaggtcaggagttcaagactagcctggccaacaatgtgaaaccccgtctctactaaaaatacaaaagttagatgggtgtggtggtgtgtgcctgtagtctcagctactcgggaggctgaggcacgaaaatcatttgaacccgggaggtggaggttgcagtgaatcatgattgcaccactgcactccagcctggtcgagagagtgagactccatctcaaaaagaaaaattatctagtttcagctaataaagctttttaagccagctggagaattgtgaccaagtattggaggaaattagaagaattcagaatctagtccagtctacacgtagataacaagaactttaaaacaatgcacggggctacaaactgtaataagaataggtatattacagtttttctatagagacataactttttcttcccacattgatcacacaggaatctcagatttaaaaacctcctgagctaggaagccaaaccagggcagattttagatctta

SEQ ID NO: 107555 - DNA, 147 bp, Homo sapiens
aacaagtcatatttattctttttagtaaataaatttgttgaactgtggaaagagaaggtttgcttgttttaggtacctgggtaataatattacttcttagattattttttgatgagggaaaaatgaatggaataaacattccaagaa

SEQ ID NO: 107556 - DNA, 185 bp, Homo sapiens
ggacagatacattggcgatgaggtcgcagtctgtgcgacgtgacggaaacaaatccttacatcccaaagtgagtccccagcaggctttcctctctttggtggactgggtttttgtttctcaggtttcagatataaggcgtccaaataccactcgcggaattcttagcgtataccaaggtcagatg

SEQ ID NO: 107557 - DNA, 377 bp, Homo sapiens
catctcttgcccttccacaggataagctagtcgttcttcaaaatgtttcccattgtcaccttcattctagtattatttttgtactatatgtacatacactgttagtagcacattgtatatacctgtctttcctaccagatgtaaacacctttgcattccagatgcataacacatagatactcaaatatttattgaaatataattgatttatgctttaggcaactctattatgttcataagaactttagaaaaatttagattgacagaattttttaaatctccattaggttagttttttaatagagaatttggacttttaacttaattttttataggttattctaactaaaacctttttggttgtttacattcaagta

SEQ ID NO: 107558 - DNA, 310 bp, Homo sapiens
ctactccataggcagagcagctctgcaagattatatccaacaggaaaacaacacggcctcactgtgggtgccaaagcgagggcttgccaggcagaagacaacagcatgagcagaggcatggggcctgaagcagaactgtgtgttaggcgaacctgacacagggtggggagtgggtaccaggagagagttctggacaggttgtcacacagtgaaccgtggaaggtcacaacgagtacaggttttatcctgagggattttaagtggggaactgacatgatctggatttgtattcgaaaaatccccagcagct

SEQ ID NO: 107559 - DNA, 146 bp, Homo sapiens
aaatgggcttttaaggagtgatttgaacaagttggcaaacaaggaaaaaaggaatttcaccaaagaaatgtctgaaagaaggccatggaatgagactcaacagggaacagaaagaaagttaacccaaatggaaaggaagcccaacc

SEQ ID NO: 107560 - DNA, 214 bp, Homo sapiens
agccagagtatactgaattttgctagagggaaaggagtgggcttttagaaaatgtgcatttttcctaatgttaaattgatgtaaactataccatactgtagctggataggctactagggaagaaacagtgtaaagaaatgacccagcttcctcttctggaggtgacagaaagggctctggtccttgtatctatcaacaagttaggaagtggtct

SEQ ID NO: 107561 - DNA, 375 bp, Homo sapiens
gattagtttgcattgtctagaattttatataaatgaaataatatatacttcttttggtctggcttctttcactcagaatagttattctgagatttaacaatcttattgttgcatgtatcaataggccattcctttttattggtgggtagcgttccattgtgtgcacatagcagcttctttacccattcacccttttaatttagccattttagtaggtgagtaatggtatcccactgtagttttaatttgtgtttccctaataaccaatgatagtaagcatcttttcatgcggctatttgccatcagcttatcttctttggtgaaatgtctgttgaaattttatgagtttttttcatcgagatattttatttttga

SEQ ID NO: 107562 - DNA, 513 bp, Homo sapiens
ggcaacagaaagagaaagtagatctcaagtgacaggtatgctgaacattgtccaaatatttattttgaatttctcatttaggttcaaaagaagacccaaaatatccagctcataaaacgagtcacctttgacttcttgattctctcatccattaccactaattcctggctcttctgtaatttcctttgaacttatcaacactgcttttctttcaaggatttatccagcctacctaccgtttccagtcgagcctctgcttcatccttcacgatgtagccagagtcatcagacacgagtctgactatatcacctgtactaatggttctcctctatctgtaacagagacttgagagttttctccactcagaatcagaagtctgtgtatgttcaggcccacatatgttttattgataattatggtgaatcaagaaagaggtatagtatagtggttaaaagcataggctcttagtttccagaaatggaaatgcaaatgtctttaagtgtatgaaaaga

SEQ ID NO: 107563 - DNA, 537 bp, Homo sapiens
cacacataatagaaatttattttgaaaaataaatgttgaaacatttagtctcgcctttgttcacatatgaaattagcacgtcttcatttggcttcaccttaatattgcctctcctgtgtactttcctcactgcagaagaaccaacagcaaccatttctggggctgtaatttctggccttctgtaagcttttatgtcaagagagcttttagaaatcttttctttgtgagggcagtattaaaatttaaaaaatgtttttaagtttcttttaaacatattctcttgaagtcctttgcttttcatattgcccttgttcaagttcatacactgttaaatattctcttccctttgcttttcttcattttgtcaataaaagattttattttattttattttttatttttggcacagtctcgctctgtcacctaggctggagtgcagtggcacaatctcggctcactgcaacctctgccttcccaattcaagtgattctcgtgtcctccgcctaggcaacagactgagactcagtctaaaaaaaa

SEQ ID NO: 107564 - DNA, 102 bp, Homo sapiens
aaaccaagaaaagtttctaaggatcccatcatccttctaagaaggactagtaggtgacaaaatcatttatttttttttttgagacggagtcttgctctgttg

SEQ ID NO: 107565 - DNA, 1018 bp, Homo sapiens
aaaaaagagaaagaatataaagtgaatctgaatctccactcaaggggatggccccaaggatattgtagctggtaatttcttcatgccactaggtgtccccagtgttcaacctccatgactgagattggaagaagtagagttaaaagtttttactacctttgagaagcctgcgggcatgttcacagtcgtcccatgccagccaggttctgaggctaactgcttgtgcccctgctgcttcacatggcattgtgggagttgctgatactggggaaatgatggcagatctgaccaagtggtgctgagaaaaccaccctcggccttgcagactccatagtttatctcaaggcagtgccagtcggatttggtgctaaaggcataaggccaagtcagcctctgatattggcacaaaagaatggtctcatgccagtagcattgaactgctgagcttgggaaggcttaaggctcccacacacagactgagaatgatgggggtccctctgcgtctgctaattagacaaacattctatatctagtgccaaaagtggtcctaaatcctttggcaagggtcctttctgctctcatgctgatttgggggaggactgggcatcctgcctcaggagaacttgagtcctgaggaaagggccctagtaacacttaagggctacccctggctaacagatactcggctgtgggtgagagcagaaggtcttggacccctcgatgtgcaggtacttaattgtgtttccagtgcattttcatatacattatcccatttaacctttataacaggttcacagagtggatattcccattctgttgatgagaaaaagagtggagagactgtgtccagtgtcagcaggaagaaaaaagatctgttggaggccagtacatgttgacagaaactctagaccatattttgtctcctgtctttggccaaagagaactagcttcagtctgaaaagggcagggctaagtggttacaaggaactaaaaagttcaaggtaagacaaatgaggta

SEQ ID NO: 107566 - DNA, 340 bp, Homo sapiens
tccacttaagatatcatcgtgtatatgacaactgaattgtagatcagcagaaacaatttttcctgtatgttcaaagttttacaaagacttcaggctaacatcgccaatgcagccttgcacagcttcttcctaaaacaccaatgaagtcacatagaaagatgaaaacacaaagcagcagtgaaaattaagaaagacaacccactgacagtttgggggaagaattcctactaattgagtcctgaacaaaatgatcagtaccacatcaatgttccacctcctgcaacagaaagatgagaagggccgggcgcggtggctgacgcctgtaatcccagcactttgg

SEQ ID NO: 107567 - DNA, 713 bp, Homo sapiens
cacaggggttcatgcctgtatccccagcactttgggaggccgaggcaagtggatcacctgaggtcaggagttcaagaccagcctgaccaacatggagaaaccccatctctactaaaactaaatacaaaattagccaggcatggtggagcatgtctgtaatcccagctactcaggaggctgaggtaggagaatcacttgaacccgggaggcagatcgggccattgcactccagcctcggcaactaagagcgaaactccatctcaaaaacaattatttcaataatgcaatgcatcctaacacttcttattctttttcatttttctaaaaatgcttgtcataatccactaatgtgtttcacaatctactaaggggtcatgatctgcagattgaaaaatacttctttgggagatataaaaaatcatttaacctggtgttatgagtcaccattatgagcacattaactaactacactgtgctataaaacagtaatgcccttagggcctaagatatacagctataaacttacagtcaaaactcccaggccgggagtggtggctcacgcctgtaatcccggcactttgggaggcctaggcaggtggatcatctgaggtcaggagttcaagaccggcctggccaatatggcaaaaccccatctctactaaaaatacaaaaattatccgggtgtggtggcgggcacccgtaatcccagctac

SEQ ID NO: 107568 - DNA, 288 bp, Homo sapiens
acagcagggcactactggaacacagagaagggacatctacccacttttatgtcaatatcatgggctttctggtggaggagataacataggttgatacctgaaggacaaggaaaagcttcccagatagaggaaagaggcaaaggcaaagagcctgaggtgaggaagagccctgcagagttccactccatccagtttggtgctacgttattctagtttcatgaacctttactcttagaacttggtttattctctaatatctttgggattcagtgttgcagtgtgcttccg

SEQ ID NO: 107569 - DNA, 679 bp, Homo sapiens
acagcagggcactactggaacacagagaagggacatctacccacttttatgtcaatatcatgggctttctggtggaggagataacataggttgatacctgaaggacaaggaaaagcttcccagatagaggaaagaggcaaaggcaaagagcctgaggtgaggaagagccctgcagagttccactccatccagtttggtgctagagcaaagggcagagtgcagtaagtggtgagaaacaaggctgagtaacttggcaagaattacattgacatgggtgtttttatttcatggtgaaaaatttggaacttttcctgagaacaagtgtaagccaatgacacagtaaattagaggagatttaaaatgtcacctgtcaagtgactgcttatgaagggttattgctcagctaagtatttctgaatgagtcttagtctgttggccttcaatctctaccgaaaccctgagaacttgatgatgcttttgttttctgagaatcgtttcagtgtgctggctgacagttccatgaggatggcaaaacttaagaaactgtagagccagtgaaaaagagatgcacagacttcttgggaactgtttaagcttaggaacatgatgaatttatggtgcataagtacagtcttctctgtgaaagtttttgttttcacatctttcattagatgtgtgt

SEQ ID NO: 107570 - DNA, 438 bp, Homo sapiens
atgattgctcttgggggccagagggtgtatcctctgtgttacttaaattttaaacaactgagtaatttaggaccatcaggaagaaaaattaagagaggttaagagaagacatttgaatattccagtggaaatatatgctaatcggggattaattatcttccaagatcctcttactgctttctctcttttatctgttctctgccttttaactggtgaaagtaagggggcagaggagataggcatttcctgtttctctctctctctctctttctctgtctctctctgagatagtatcttactttctcaggctggagtgcagtgacgccatcatggctcactgagacctcaaactcctgggctcagataatcctcctgcttcagcttcctgagtagaagctacaggatcatgttaccgtttctggataatttttttttttt

SEQ ID NO: 107571 - DNA, 199 bp, Homo sapiens
tacaataattgttaatctgcctgtgctgctgaaaagagttgacctgggactgttacaaaataataacacataaaattaatcccacaaatatttgcagggcatataatacatatggaatactgtgttagtgtggccaagcatagtacagataacacaagtgcaacagctgccttaatgtttttgtagataaagatgaggg

SEQ ID NO: 107572 - DNA, 499 bp, Homo sapiens
catgcctcaccatcttttaattttttctacatttgaaaattttcttaataaaaaattgggaagaaaggggctttttaaaaagtcattacatgactcgtattgccagcaacatagtgaacttgatattctggagctattagatattcttgctagcatttcgtcgtaccactggtttgcaaatagagaaacctctaagactcttcttactcatttccttgaccaaaataaaactatgagtggaaaatggagtgatgagcagtaagcacactggaaaagtgggatgatcttgaagcaaattgctgataatcacttctgggattcagactgagacttgagcaagcttcaaggttggatgactgaattgaagacttccatgttaaattggttatcttgagaaggatacaagttaatttcaggtcagtaatgcttcctgacagttgtacaagcaaacacaaattacctctggagtaattcactctcagttaggcctccagaaatt

SEQ ID NO: 107573 - DNA, 636 bp, Homo sapiens
accatgacccctgctgactctgcttctgtggaaaccaataacttctctttcttcataaccccagtggtcactatttgaatgaagtgggattccaaacattttggcattcagtcttctgttttcagcccaggttggttttcattttttaaccacaggagatataaaagaatgatttagtaaatcataatagcagttaagtctgaagctgttcatcagcttctccttcacaagtttgggtatcagctcctcagtctcttttgctttcaccatttacaggcttcacttatttcttgagtctctgttaatttaagcttttaatgaaactgtgcatcttcctgaattacgtgtttgcactttcaaagttaaagtgtttctcaaatttcattggtctgtctcacagaatactgaattccctgacactttgatgatcctctcactttaaagcataaggaacatttggaactacttatctcatgcagtcatttctcggtttaatttctggctttagaagtttgtgtgcttcagcttgagataagtgtatttttaagagattgtgtattctgtgtaaaggtagcgccaactgcactgctttggaataggtatcattgctagactttttcattccatagaaagtta

SEQ ID NO: 107574 - DNA, 322 bp, Homo sapiens
atatctctgagagttgatgtttaagccaagattccaaggctgtacgggagttagccagacataggaaactgagcatccaggcagaagaacacccatcatatttgatgatctggtattcagaaagaatatagcatgtccaaggaactaagagatattcaaaatagctacagcatggaatgcaaatagaaaggtggtgagaaatttggctagagagataggaagagccagaatatgggaaatttttctagggtatgtcagggagtttatacttcatcaataggctctaagtaacgttaaagtatgtagcacaatgaatctaacc

SEQ ID NO: 107575 - DNA, 205 bp, Homo sapiens
gggatatatgagtcaaagataaaccctgtggctcacacttgtaatcccagtgctttggcaggccaacatgggagaatcgcttgaggccaagagtttgagaccagcctgagcaacatagtgagtgcccatctttacaaaaaagaattttttttaaattagctaggcattgcggtgtgtacctgtcctccaagctacttgggaagct

SEQ ID NO: 107576 - DNA, 408 bp, Homo sapiens
agacagagtctcactctgtcacccaggctggagtgtagtggcacaatctcggctcactgcaaccttgtctccctgattcaggcaattctccttcctcagccccctgagtagctgggtgcccaccatcacacccggctaatttttgtatttttagtagagacagggtttcaccatgttggccggggtggtcttgaactcctgacctcaagtaatccacctgccttggcctcccaaagtgctaggattacaggcgtgagccaccgtgcccagccccctcctgctattaatacaatgggagatggggctcagctctagtcagaggccatttcgtttcattggtctctggatttcacctctcttctgcttccctgaatcacgagttgctccttggctatagacacgttctag

SEQ ID NO: 107577 - DNA, 312 bp, Homo sapiens
ttttgcaaataaattgttgtgagttcactgacatcccagacatacgaatgtcactaaatctattgactacttaataagtaaggtataagtattaataatgtatatgtaccatcttttaaggtggaaggatgcagattatattttgagaattttttgtaattgtttccattaactatactttacacttctacaggctagcaagtctttgtctttttaagattattttgaacctctatttttgatagtaattcacttgatagtcacatgagacctgccggtaaaggccacagtgagccgtgattgcaccactgc

SEQ ID NO: 107578 - DNA, 799 bp, Homo sapiens
cctctctggaactcagcgggctgtgaggaagtcatgtatctaagaagcccaaacacatactccatggcccttgactgtctgaaaaactcagtttcggagtttaatacattcccccagggtaccaaataactagatttgtaaatgtaaattttttcagtcagttcttaaggtttgatgaggaacaggatatttacatagtcgcaaagtatctcaccacaaatcactttgcatttgtaataggaaaaattacgcagtggggaagttggaaaatacttaaccaaatgatgaaagtgaatatcacctacaaatatcatgtacctctggacatcatgccctcagaaggacacaaaattatttgcctagaattctagtcaaaaatgtgaaagatgaatctaagtatgacaaatatcaggcaaactcaaatggagggaaattctataaaataacttgcctgaactgtttaaaatgtcaccatcataaaagacaaaggaaaactcatgcctgtaatcccagcactttcaaagcccacggtgggaggatcactcgagcttaggagttcaagaccaacccgggcaacatagtgagacctcatctgtactaaaattcaaaaaaattagccaagcatggtagtgcacacctgtagtcccagctactccagggctgaggtgggaggatcacttgagcccaggaggtcgaggtggcagtgagccctcatcgcaccactgtactccagcccaggccacaagagcacgaccctgtctcaaaaaattataaaaattttaaaagccagacatggtgg

SEQ ID NO: 107579 - DNA, 677 bp, Homo sapiens
caacaaagtcaaaagtttaaaagagtaataaaatcgagaaacccatagcaatactgatcaagaaaagagagagattagtagggacattactccaggttctgtaggcttaaaagggtgatgaaggcctattatgaataactttatgccaatttgacaaacagacaaattccttgaaaaaaaaaaatactataacacaagaagaaaatgcattcatgtttagccttatgatccatttcaaattaagctttatgaatggtgtgaggtaggaatcaatgaaattgaattcatatttaaaaactcttcccatatataaggctccaactgacacattttcattagtgaattctaatcatatatttaaggaaaaaataatgcccaatgtaaacagactgtttcagaaaatagaagatgaaactcctcccaactcattttaggaggtgaacataaccctgatacaaaaagaaacaaaattgataggaatcctatcagagaagaaattacagaccaatgtccctcatgagtatagatgcaagtctctaacaaaatacttgcaaattaaatttagcaatataccaaaagtctaatacattataaccaagtgggattatcctaagaatacaaggctgattcaactttcaaacatcaaatgatgtaatttactatagtgacaaaatgac

SEQ ID NO: 107580 - DNA, 153 bp, Homo sapiens
cacaggcccactgtactttttcgttaacacttactgcacagaatgtagaaagactgtttacaaaatgactggtttaatgacagtctcctccaacacactgtaagtgcttaaaacgtaggtactatgtctacttaattgtttacctagcaccat

SEQ ID NO: 107581 - DNA, 236 bp, Homo sapiens
cctttcattccctcttcctttcccccgacctcccattcccgctccctcccccactcctcaggctgaggctgccacacttacctgggttcgactacagtctggtcataggcgtagccaggctctgccccttacaggataaaggccacagacccccatggggcccatcacaggtgtaagttacagaggggaagggtcctgaaagatgagactgggccaagaggagatgcagcggagca

SEQ ID NO: 107582 - DNA, 721 bp, Homo sapiens
gtgctgattaagtttccacattacctgcaggattataatgctttggcctactcctgagaactggtaacaggctacagtgagtgtagaaccaggaaatacaggacagcccactcctgctatacctcctatgcctgacccacaggcagatgtgctgagctagagacctagcgggtcacacaaacagttcggaaagttaagactagcatttaagcgcacacacacaaagaagtacacgcatgaacaggaagtatctaaaggacacttggaattgtttcaggtgcatacttgtaaatataccttatctgtgtactgggttgccgcataaaataagctgggtgcaaaaaggtttgaaagtcattgtactatcaataatgttcacagcaacactataaaatagcaattacttggcagcaacctaaatgttcctaaatagcagtctaagttgtggtaaagacaacaatggaatattaacaagaccacgaaaaggagtaaggtatagctacatgcaacaatatgttaattttaagaacataattacaagttttatgaagtatatttaaagcttgaaactatacaaaactacagctggggcaggagaatcacttgaacccaggagctggagggtaaggcaggagaatcacttgaacccaggttgcagtgagccgagacagtgccactgcactccagcctgggtgacaaagactctgtctcaaaaaaataa

SEQ ID NO: 107583 - DNA, 299 bp, Homo sapiens
aggaaatccacagcagcacattggcttgacttgctgggtcacctctagcacttcccttcagtcttcccttccctggtgttcttatcagtggatttaatcccatccagagaatgagctaggcattgactctctggaaaagacctctttaatagctcttttttttttttttttttttttttgggctatgttctcctcttccaattttaagtagatctgctttattctgatggtgccttctgttcagaggctccagcagacttacctgagtcctaacactatcactgtgatgggggtggtag

SEQ ID NO: 107584 - DNA, 248 bp, Homo sapiens
atgagagctgttttggtgtttcctccccaagtggggagatcaattagtgcaacaactctggcctgtctccatctcattacttggggcttccccagggaagggagtgactgaacttgcttgctgaatctgggcagaacaaatctggtttgcttagctgctttctacctgtctccttgggagtgagtttccccctaacccctacaggccatgcgactcccctctttctcttcattcctaagtcttaccta

SEQ ID NO: 107585 - DNA, 609 bp, Homo sapiens
ccttgggcagcctcgggggtggctgtggtgaaggttggtgggtgccctctgctcctgccctgacactgatggtgtggggtaatggctgcagcttgtgtttccgaggaagcctcttccagggatatttaggaggtagtgtttcttggggtgggtttctgttcctctcaaagggagagcagtgtcagaggttggtgtcaggtccaaagcagcagataatgtggtgatggttgtggtctttctgcagcctagtggcttttttttttggagatggagtctcgctctgtcgcccaggctggagtgcagtgacacgatctcagttcgctgcaacctccgcctcctgggttcaggcgattctcctgcctcagcctcccgagtagctgggattacaggcacgcaccaccacgcccggctaattttggtatttttactagaggtggggtgttcatcatgttggccaggatggtctcgatctcttgacctcgtgatctgcccacctcggcctcccaaagtgctgggattacgggtgtgagccactgcgcctggccagcctagtggcttttaactgctctgccgagacgcctggggacagtatggggacctggagaggcc

SEQ ID NO: 107586 - DNA, 238 bp, Homo sapiens
cacaaaccgggccgagggaccacttgacaccaaggccagtgggcggagctgcccgccagggggcctgacacttaggagggctcagtccccagagccgacagctcccatcctgcatgctctgggccacaggcacctagtgttggccaacttggccccatagctttctccagggctgctgcaatgcctcacccatgcagccaacagccctgccctccgctgtcggggagcctgccttgca

SEQ ID NO: 107587 - DNA, 464 bp, Homo sapiens
tcactgtgatgaccatgaggaaaacagactagaagagggagagtggagcatttggaagactatgacagcaatccagacatgaaattatcagaggcttggattagagcaagtctcaaaggagctcaagaataagtaaatagatttgagaggtaattaggcaggtcttaaagctacaatatgctgcatattagggtaagggagaagaaggtaacatgatttccaggtctctggcttctgtacttggaaagataatggggcaagcattgagatgagaaatcccagaagaggagcagtttaggacgcattaagtgtgatgctttgagatacccaagaagaaaagatgagaaggaagacatagcagcctagtgctcagagaaggctccagcctggagctattatttgtgcatagaggtggtcattaaagccatggatgcagggaagactacctgcaggggaaacaaagg

SEQ ID NO: 107588 - DNA, 456 bp, Homo sapiens
gtagaatgggcttcgtttggtaataaaggaaccagaaatagtttgaagtaaaattgggagatgattcatgtagatttactatattgttgtatcactttctagtgtgtagtactatgttatttaaaagagtaagtaggtaaaggagtggtatgattactttggatatttctgcttcagccacagttaccatgaataaatgatctgtctttataaaggagatggaagtgaattcaagatattgagatgttagatttgactgggttgtcctttggctagaagatcaccagataaaatgtaaacctcctaaactagatgagatgataccattaaacattttttttggcccagcactttgggaggctgaaatgggaagatcgcttgaacccaggagtgaggctgcagtaagctataatctgccatgcactccagcctgagcaacagagtgagaccctgact

SEQ ID NO: 107589 - DNA, 436 bp, Homo sapiens
attttgcgtgcacatctagattcatatatctgtattttaaaacttaaagctgatgttgagacagttttaatacaatggaggctgcacaaatgtccgcatttccctgggaagtgttcctgtttgcgggcaaaggagtggcaggacaagctctctagttaagaaacgaaaagcgctgtcattcaggggatctatcctgtgagccatctctcttcctctgcagggttgctagcaaactccactcataaacacagttaccagagaacaaatcccaatacaagttgcttactatgggtggacggccttattatgggatatttcctgtgaatgcaggaagaggaaggcattcttgtgacttcaagcaatatatatatacacacagttttctaaattctatgcacagtctctgccggagagcaatcttcctaatcagtccatg

SEQ ID NO: 107590 - DNA, 680 bp, Homo sapiens
gcccaggctggtctcgaactcccgagctcaagcagtctgtcagccttggcctcccaaagcgctgggattacaggtgtgagccaccatacccagcctccttttcattctttcaaacctggctgtgtcctcaaaacttccgcaggctcgtggctgaggtggggccgttcatgtgagcttagctcaccctcgcgcccaagtcgccagtgagcattcttcctcacttcttcatgtgggatttgctttcttccttattcttaagaatgggaagtgatggtttccaaaactgatacaaagtatcaactttaactgcctgtgatgtttcaatacaacacaaagtgcatatactgtttaccttttggaaaatagtcctgtttgttttgtgttttaaaaaatcctttagcttagaaaaccaactagggggtgaaattacatacaaaagttcctttatacagcaaagccaccgaacactgtgtaaactagctaatatgtttaaatattctggcaatattaagttatgttaaagaattatttaggatatatctattttgttctcattactaagctgggagttagaaattaaaactttatgaaacatttatagaataactatacaccctattcatggattactaattttcaaacaatttaatacaataaagtatactgaaaatttaaacttt

SEQ ID NO: 107591 - DNA, 629 bp, Homo sapiens
gaggacatagaaggtgccatctacaaagaggcagccctcaccagacacctgccagcaccttgatcttggacttaaccaagatccagaaatgggagaagtaactatttattgtttataagccactcagtttatggtatttgatgtttgttgtagcagcccaaacagacgaagacatggatggacccaatggctaggcttcctcaggtataggacagagaggagaaataacaaattataagaagatagtgctttatctaaatgtgtatgacattgctttcacaatctgatatcatgttatgaaagccagatgtgtgatttggagcaaagtttaaagaaataggaataatcaaaataatttttctttcaaaaatctaaatttcaacggctttcaaatatttcttaatctactcatgatttttgttgctctgcttcagtctcagcctttttctttttgatattttggctgccaaaaagcctgagtccttattctcaggagcctgattattatctccgataatggttctaaacttagtcatttttgtccatcattattattattagttttgaagtttaaagaatagcaaaatttggctctaaaaatgaaacagactttcatcaagtaatacttt

SEQ ID NO: 107592 - DNA, 446 bp, Homo sapiens
ccttccaccatgggatgagacagcatgaaggccctcatgtgccagatcctgtgccatgcttttggacttcacagccttcagaactataagcctaaaaaacttctagtgtttatacattagtcaatctgtggtattgttatagcatcagaaaacaaactaagacaactagtattgagaatatagaaagatttcctacaaataaataagaaaaagagcactctataatacagtgaataaaaaacttgagcaaacatttcacagatgagatatgaacaaccaataaacatttgaaaaggtgctcaaatttcttagaaattaggaaatacaaaataagtccacaacacttttatactcacttgtgttgtggaagtcaggaaccccaaactgagggactggctgaagccatggcagaagaacataaattgtgaagatttcatggacattta

SEQ ID NO: 107593 - DNA, 389 bp, Homo sapiens
atgaggtctcaccatgttggccgagctgctctcaaacgcctgacctcaaatgatccactcacttcggcctcccaaagttctgggattacagacgtgagccaccgtgcacggccgcgtttgcccctttccaagcaggttgggttggtatccagctgtgacccctgcccttgtagttctgagtcttgtctttgtcctccacgacaaactttttccatagccccaagcaacgtgcttcctagtgtgcatcacatgctcatgatgttgggaacctagtggctgaacatggtggtacttaatttcttaataaggactttctacattgggtagttggtttgttcatttttacatcatgctggttccagacaactaataatgcctgatattcaggg

SEQ ID NO: 107594 - DNA, 311 bp, Homo sapiens
cttatggtccagaaaacagacactagtgcagtgaataagacatgggtttggggttgctaatggttttgaatcactgcgcttcacttgttttcagggaggttatggtcggagttaagttcacaattcacatggccaagacaattcataatggaaagctgctagttgtccggagatcaattttcttttgggattgctctggaaagctctaaactcgcagtgaaatctgctgatgtgcatagctacaggcctaatttcaaggaagaagagtcacccatgaggggtttctcaccccgttctctggaaggactgag

SEQ ID NO: 107595 - DNA, 919 bp, Homo sapiens
ctcttatctcattgaatttcttccgtctgcctcatctgatcataacagaaagtgataagtttgataaaatgtatattgtacttactaaaaacaattttaattatttatcaatttaaaaatcagttgtttaaccttctctctgtctttccgttttctcatctaattcccaataatgttgccttttaatttctgctgccttgcggatcagcaccctgggattttttttttgtatttgtaaattaaatattgcgatgacaagatataataattttatgtcacttattagatttttaaccataaatgccgtaggcatgctataatatgtattccttacttttctttctagaactaaatctccatacccacttcatccgtgtttttggcttatgtatgggatgctagaatggcctatctccatgtattttgttgcatttctccattgcttcttgtgttctggcgggaatcttggtgattcttttcaagcactacctgagctctgtgccaattgttcctcttctcccagggtgttgtgctgcgtggtcatgtctccacttccttagccctgtccattgacagaaccttgggttctgtgatggctgcctctaaacccttgtgaaagcggggaatattcctccccctgctgctacagttgagcaccgtgctgggtaccatgttgccctctacacttgctttcagttgttaaggcttcccaagctttggctgtggctcagtgatcctgctgtcaaaaccctgaaactttcctagcctggacactcagtggtagcagcaggtgttgggatttctccaagcccctaagactctgggaggaagagaatggctgtttgacatagacctcaggagttttcaaagcaccaagaaacctctccagaagatatgtaaaggtaagattctgatttct

SEQ ID NO: 107596 - DNA, 568 bp, Homo sapiens
gcatgatacaatcgagctcggtcccagcagcatagatattaccggttgccccctaaaaacttgtagcaatttactcttaaatactcatggtgtgtaatacttattgttttagtacatcattgccaaaacttggttttatcaatctgttaactatgtgaaaaaggcatattaagattgttttaattttatatttcatgacaatttaacacttcatatttagctattataaaccgcctatattttcgttaggatacgttctttaacaatcttgcatgacttttggactttctgcttttatgtcttgcttaagtcttcctcactcaaagatcgaatgtattagaataatacatgtcagtatttttctggtagttttagtaagtcctgtcttccacacatactttttttgtcttaaattctgtattaagatttattttgacttaaaaactgggatacagattctgctttatctttttccaaatggctagccagttgttctaactggttttatgtacaggcaacaatggttttacttacaatttttcagttttacaatgaagcagaaatgatg

SEQ ID NO: 107597 - DNA, 6159 bp, Homo sapiens
  misc_feature (160)..(160): n is a, c, g, or t
  misc_feature (230)..(230): n is a, c, g, or t
  misc_feature (246)..(246): n is a, c, g, or t
  misc_feature (263)..(263): n is a, c, g, or t
  misc_feature (2373)..(2373): n is a, c, g, or t
  misc_feature (2384)..(2384): n is a, c, g, or t
cgacctctgtcaagggcctgtgggtccctgacccctgggtgagcgagggcactgctcccatgggcctgggcactgtgccatcctccagtgggaaacaggaggtccccagggtctgagagaaccatgcagtccaggtgtgaaaggggtcctacaaggtcanctgaccatagagaccttgggaccaccaggaaatcgtgggggccctcagccaggggatggggtcagggctncttgagcctgttccgnccatctagctccccttnaaccccagggaagaagtagctcaggtggagaccctgggtctgcatgggggtcacgtgagctgcctgtagccagcaggggggagggctgggtgctgtcctgaggatgcaggtgcaaatggccatttctgggccacctgtgtgtatcagcatctgcagaggggcctggggtctggctcctggggttggcagccccaggggctctgccatggctgcccaaggtggtgatatttcctgtctgcctgttgggtgtggggcagtgccaccctgtcccatcccacctcatcagcacagaatgaagctggtcctatactcatcacctgtgcacatgaggaaactgaggccccaagaggggagcccaaggtcatattactggggatctgtgggctggcgtctgagcccagcactgtggcttcaagcccacatctgccctaggagggcccaggaggccctgtgatgtcattcccccgtgatgtcattcccccatgacatcattcccctgtgatgtcatacatgtgacgtcattcccgtgctgtcaccacatgatgtcatcccctgtggtatcacctctgtgatgtcaatacctcttttaatgtcatccccatggtgtcattccccccatgatgccatccccccatgatgtcagtcccccatgatgtcaatttcccacaatgtcttcccctgtaatgtcaatactccctttgatgtcatccccgtaatgtcatcccctgtgatgtcattccctcatgatgccagtgtgatgtcatctctgtgatgtcattccgtgatgtcaccccccatgatgcaattcccctgcaatgtcatgcccctgtgatgtcatcccccggtgatgtcatccccccatgtgatgccagtctcccatgatgtcccccctgtgatgtcattcatgtgacatcatcccgtgatatcattcccgtgatgtctcccccatgatgtcattccccatgtgatgtcaatttcccacgatgtcacccctctgacatcatcctctgtgatgtctcgcccatgatgtcatcccccatggcgtcattcttggtcgtggggggttgtggatcccctcctctcccctcccttggggtcttcctggctggtggggagaggtggcctggcctgggtgccacagcagctgctctggaaggtgcccgggctcttgggggccttggcccacgccatcccctggactgtgcggcgccctccagggcccagcttctgttgggtgttgggcacaagtcagaatcaagtgcatctggccagatgctgccagggccaaggatgcagctgcctgtggcctggccttggtgtagagccagagtcttgagcaggggctgaggggacccagatggtggggaggctccggagcatgtgaccagggaccgtcctgctgtggacagacctcctgggctgagtgttggtcgggaccgggccatgcacctagagatgtcctttgaccagtggggagggtctgggggtgagtgtggctgtgtcccttggctactgggccagtgtagtccagggcactctagggactccctgtgttctgacttgaatggagctattggggctgaaggggcaatggccctgtgtctcctcggagcttgcaggtcctcttggaggcccagagagagccagaggagggcagggtcactgctgcctcctcatggtatggaattgactgagcccatgctgggatctggaggccccaaaggaatgaggcctgtggccaggggccggcccaggagctggggtggctttcgggggagaggcccgcagtgctgggaggtaagtggtgatgtgcttggcagcctcagtgctcccttaggagggtctaggaccccacctcgaatcttcctgggctatgcagagccaggaagagaggccaggtggccttggtgggtggcattagatgctccagccctgcctggaactcccttgggggtcgggccacagccaagaagagtgctgttttgcctgtgctaaggccactgtacgtgcagagctggacccagaacctcgtccaaggcccccggcagtctcaccaggaggtgtttagagctggccacgtggagtggcatacctccggggggcggggggnctgtgagaggncagtggtgtgggcccttggtctgtgcctcccacaggacagctgcttcaatagcatctgtgccccctcctgcctgtagtccacccaccactgacccctggacttggctggcggattttcacaccttctcctgggggcaggtctcagcttgtccccaacccagtcagagccagtctcactccctgcctcaggcaactgtgtatgttttaatttttatttatttatgtattcatgagatagagtctcactctgtctcccaggctggagtgtagtggcaccatttcggctcactgcaacctccgcctcccgggttcgagccattctcctgcctcagcctcctgagaagctgagattacaggcgctcgccaccatgcatggctaatttttgtatttttagtagagatggggtttcaccatgttggccaggctggtcatgaactcctaacctcaggtgacctgcctgcctcggccttccaaagtgctgggattacaggcatgagccaccgcctgtaattttaatttttaaccaaactgagaacttgaggattgaatgcaggtaacgggtggtgttcatgtggatgtggattccatgaaagagggctttgtcctcactgtcggttctccacatgtaggtcctttgactcagcaggccttaggcctagtccacaggtgctgagtgaacagccccagcgtctgacagctccttagcttggggtgcacaggcagctgaagcagtaggatggcagctcagacttcccagggccccacgtgtgcagggctggcctcccagcaccaccaggcagggccggcctcccagcgccaccaggcagggccctgtgagtgtcccctccctgacacacaccttgtagagaggctgggcctgggcaggctgctctgctgcaccacatcccattctcaagagggtcccaggtcccaaaggaagcctgtagcccagtggctttctggaggtttgcatggctggcaagcctgggccggctgctggagaggcatcaggacaggagcaactctgctgactgctcccctcagcgagctctaagagtctttgggtgggaggcacatcacatccctgtcactcctggctggccctggaatgcctcagcccacacaccccactccagccagggctgtgggaactgtgtctgctcaggtacaaaaggctttgtttgttcttggacctcttggttctggtctgggcttcccacctcccatgctgtgagcccccacgggctgggaccgcagcttgccatgtgtctctcagtggcaccaagtggacgctcgaggcttatgttgagggagtgagagccaggataggccactgggcgtgctgggagcccacacaggcagggagcccagcgggaggtgccctgctcctgccagccccggttaccccagcaggctcggcacccactcagagcccccatttctgctccccaggcactccctgtgtgcctacctgcccttgtccttgtcctgggccagcttggctcctgcctcccagctctgaggaggcctctgcaggtagccgacctccctggacgagggggcagctgcctcctctcacctgggctcaccctgagccaagtcctctcaacccaggataaatggcctttctgaaggcccagagagcatgcctgccccagtgtgggagctgcatccgctccccacctgacagtgatggccaagagcccagtgttcctggagggctcccaaactctggacctgtaggggggtcagggcagtcgctggtccctaagggaaaagcgtgaccctcggccccaggtggctgaacccgtcactgccagggcgagctgtcacctctgtgagctgataaggccttgcttttaggacctctaatctctgcaagaacccaagctggctctgcctgtttctcctgagcagctcgcagtgttcaccacactccagcacgactcgggacaggcacgtgcgcccctctgcaccagctggagtccctcaggacacctggctggagctgatgggcatgggcgggtgtgtgcgagcatgagcccgcaggtctgtgagcttcgtctccctttccttcttcgcagtgtactaatggtcacttgatgtgcgctggctgttttatccacctactagcagatgcccggctgaaggaggagcaggccacgtgccccaattgtcgttgtgagatcagtaagagcctctgctgccggaacctggccgtggagaaagccgtgagcgagctgccttcagagtgtggcttctgcctgcgccagtttccccgctccctcctggagaggcaccagaaagaggaatgccaggacagggtaacccagtgcaagtacaaacgcatcggctgcccatggcacggccccttccatgagctgacggtgcacgaggctgcgtgcgcccacccgaccaagacaggcagtgagctgatggagatcctggatgggatggaccagagccaccgcaaggagatgcagctgtacaacagcatcttcagcctgctcagcttcgagaagattggctacacaggtgaggcgccccgccgcctgctgcatgccacacaggtgtgggttggggggctggcagccaggagtctgggggcagcaggctctgggcactgggcactgacagcgccggacagccgggctctggacaagctcccggtggacaggtggacacctcggtcgagaagacaggccggagactgagtggaaggaggggccgaggcagaccccaggtgcacacctgtgtggctctcacagcagccccgcccacctgtcctcgccaccctggcttcaccacccctgcaaggtggcatctcactgtggggctccagagcctcaagacagtcacggtctaaccagaaagtgggcaggtctcagggggcctgggagctaggggcctgcccctcggaccctggggcaagaagagcaccctgccgagtgaggtcctacctgcaggcagtcactgccccggccatgggcctctcaaggctggcacgaagccattcagggagagggctccacaacaagctgagggtgcccgactcaaactgtagaaccgggagtggacacccacagacgcccaggctggatgcgtgcgcaggcacactggatctcgtggctctctgggccgctgccaccgcctttgaacgtgtcggggagcaggagccaggccagagtctggcccagaggacagcgagaagcacctgttgatgctggggccactggaggaagctccatccctctactctcagcccgcaccaggcggccagctcagagcaccaggcgtggcgcaagcagggtggtcgtgggcagccagtcccgccctgctgcctggactgtgcccagcgggatgtgggcccgagcaggccagagaggccgagggcctggggtctctgcggcagccacagcccgtggtgagtagcagccttagctgtcctggagataccggggcctcgtggagtctaggcaggctggggcactgtggctgtggccgtggccaggtgagaagccccattcgcgcaggaaagactggccacctgggaacccacgcctccacggagggacttgccggccacaggctgtgggctgcccaagaggactgtgcaggcagggctgcctgctgattggcagctccggatcaggcccggtgcctgcagacctggtgctcccctcgggcagggctgggtgccgcagccgcctgctggcttttctggcagctcctctgtatcagaaccaataaagtgcacttgttctcggaaccgca

SEQ ID NO: 107598 - DNA, 1920 bp, Homo sapiens
gcggccgccgggcaggcggcggcggcggctctgggcgaggcggcggggcctgggctcccggacgaggcgggcttggcgggcgcccggcagctacagctgcaggaggcggccggcgaccccgacgcgccgcccaagaagcggctgcgggcagccgaggcggccgaggcggcggcggcggcggcggcggccggcagcgggaaactggaggagcggctctactcggtgctgtgctgcaccgtgtgcctggacctgcccaaggcctccgtgtaccagtgtactaatggtcacttgatgtgcgctggctgttttatccacctactagcagatgcccggctgaaggaggagcaggccacgtgccccaattgtcgttgtgagatcagtaagagcctctgctgccggaacctggccgtggagaaagccgtgagcgagctgccttcagagtgtggcttctgcctgcgccagtttccccgctccctcctggagaggcaccagaaagaggaatgccaggacagggtaacccagtgcaagtacaaacgcatcggctgcccatggcacggccccttccatgagctgacggtgcacgaggctgcgtgcgcccacccgaccaagacaggcagtgagctgatggagatcctggatgggatggaccagagccaccgcaaggagatgcagctgtacaacagcatcttcagcctgctcagcttcgagaagattggctacacagaggtccagttccggccgtaccgcacagacgacttcatcacgcgcctgtactatgagacgcccaggttcacagtgctgaaccagacgtgggtcctgaaggctcgagtcaacgactcggagcgtaaccccaacctgtcctgcaagcgtacgctctccttccagctcctcctcaagagcaaggtcacggcaccgctggagtgctccttcctgctgctcaagggcccctacgacgacgtgaggatcagccccgtcatctaccactttgtcttcaccaacgagagcaacgagacggactacgtgccactgcccatcattgactccgtggagtgcaacaagctgctggctgccaagaacatcaacctgcggctcttcctgttccagatacagaagtagggcggggcctcaggatgtccgaggagcccacgggcggcatcccagcaccgctgccctgtccacctggctggcagctgcttcacaggactatctgatcactttagcaaaggaggagaacaaacgaagccaacacagggcaagtctgcatgcgtgcgcgacggggcccccgcctccggctcacccccccgacccctgcctcccctccttccgagggccgccagaggctgggctgacccgaagaggagacggtgcaccaggcgccccgaggctaagagacggtggcagcaaggaggccgagaggcacagcgaccctgccccagcccttctgtgcagtcaggcggcggtgctgctccatccctgcgggttccggcggggcgcgggggccttgctgacatcagacgggatatccgaatatctgatagcaattaaaaggcagccttgtttcgtactttctgttttgttcgaggggaaggcatggctgtgaatggacagcgtgggggctttggtttggcctgggggtcagagcctgccccgcccccatctgtgtgcccgcacacgtcccccgaggaaagactcagagacactgcctccccctacgctctgtcatggggtcttgagactgaggcttgggcaggaagatccaggtagggtcggggctgccctggccaaccggccgctcccagggagacaggactcagccaccagggctcagcaggcattttcggaaagcagggtgaaattgtctcttcccaggaaaaagattaaactccttgcaggctcttggataagttacacaaaaatagt

SEQ ID NO: 107599 - DNA, 1564 bp, Homo sapiens
gcggccgccgggcaggcggcggcggcggctctgggcgaggcggcggggcctgggctcccggacgaggcgggcttggcgggcgcccggcagctacagctgcaggaggcggccggcgaccccgacgcgccgcccaagaagcggctgcgggcagccgaggcggccgaggcggcggcggcggcggcggcggccggcagcgggaaactggaggagcggctctactcggtgctgtgctgcaccgtgtgcctggacctgcccaaggcctccgtgtaccagtgtactaatggtcacttgatgtgcgctggctgttttatccacctactagcagatgcccggctgaaggaggagcaggccacgtgccccaattgtcgttgtgagatcagtaagagcctctgctgccggaacctggccgtggagaaagccgtgagcgagctgccttcagagtgtggcttctgcctgcgccagtttccccgctccctcctggagaggcaccagaaagaggaatgccaggacagggtaacccagtgcaagtacaaacgcatcggctgcccatggcacggccccttccatgagctgacggtgcacgaggctgcgtgcgcccacccgaccaagacaggcagtgagctgatggagatcctggatgggatggaccagagccaccgcaaggagatgcagctgtacaacagcatcttcagcctgctcagcttcgagaagattggctacacagaggtccagttccggccgtaccgcacagacgacttcatcacgcgcctgtactatgagacgcccaggttcacagtgctgaaccagacgtgggtcctgaaggctcgagtcaacgactcggagcgtaaccccaacctgtcctgcaagcgtacgctctccttccagctcctcctcaagagcaaggtcacggcaccgctggagtgctccttcctgctgctcaagggcccctacgacgacgtgaggatcagccccgtcatctaccactttgtcttcaccaacgagagcaacgagacggactacgtgccactgcccatcattgactccgtggagtgcaacaagctgctggctgccaagaacatcaacctgcggctcttcctgttccagatacagaagtagggcggggcctcaggatgtccgaggagcccacgggcggcatcccagcaccgctgccctgtccacctggctggcagctgcttcacaggactatctgatcactttagcaaaggaggagaacaaacgaagccaacacagggcaagtctgcatgcgtgcgcgacggggcccccgcctccggctcacccccccgacccctgcctcccctccttccgagggccgccagaggctgggctgacccgaagaggagacggtgcaccaggcgccccgaggctaagagacggtggcagcaaggaggccgagaggcacagcgaccctgccccagcccttctgtgcagtcaggcggcggtgctgctccatccctgcgggttccggcggggcgcgggggccttgctgacatcagacgggatatccgaatatctgatagcaattaaaaggcagccttgtttcgta

SEQ ID NO: 107600 - DNA, 3058 bp, Homo sapiens
aagtggaaatggaccaagagaaaggattcttccacccaggagggtagaaaaggaggcgtccataggatgttcaggagtggagggacaaactcgggggtgtggctggcctcccagcaccaccaggcagggccggcctcccagcgccaccaggcagggccctgtgagtgtcccctccctgacacacaccttgtagagaggctgggcctgggcaggctgctctgctgcaccacatcccattctcaagagggtcccaggtcccaaaggaagcctgtagcccagtggctttctggaggtttgcatggctggcaagcctgggccggctgctggagaggcatcaggacaggagcaactctgctgactgctcccctcagcgagctctaagagtctttgggtgggaggcacatcacatccctgtcactcctggctggccctggaatgcctcagcccacacaccccactccagccagggctgtgggaactgtgtctgctcaggtacaaaaggctttgtttgttcttggacctcttggttctggtctgggcttcccacctcccatgctgtgagcccccacgggctgggaccgcagcttgccatgtgtctctcagtggcaccaagtggacgctcgaggcttatgttgagggagtgagagccaggataggccactgggcgtgctgggagcccacacaggcagggagcccagcgggaggtgccctgctcctgccagccccggttaccccagcaggctcggcacccactcagagcccccatttctgctccccaggcactccctgtgtgcctacctgcccttgtccttgtcctgggccagcttggctcctgcctcccagctctgaggaggcctctgcaggtagccgacctccctggacgagggggcagctgcctcctctcacctgggctcaccctgagccaagtcctctcaacccaggataaatggcctttctgaaggcccagagagcatgcctgccccagtgtgggagctgcatccgctccccacctgacagtgatggccaagagcccagtgttcctggagggctcccaaactctggacctgtaggggggtcagggcagtcgctggtccctaagggaaaagcgtgaccctcggccccaggtggctgaacccgtcactgccagggcgagctgtcacctctgtgagctgataaggccttgcttttaggacctctaatctctgcaagaacccaagctggctctgcctgtttctcctgagcagctcgcagtgttcaccacactccagcacgactcgggacaggcacgtgcgcccctctgcaccagctggagtccctcaggacacctggctggagctgatgggcatgggcgggtgtgtgcgagcatgagcccgcaggtctgtgagcttcgtctccctttccttcttcgcagtgtactaatggtcacttgatgtgcgctggctgttttatccacctactagcagatgcccggctgaaggaggagcaggccacgtgccccaattgtcgttgtgagatcagtaagagcctctgctgccggaacctggccgtggagaaagccgtgagcgagctgccttcagagtgtggcttctgcctgcgccagtttccccgctccctcctggagaggcaccagaaagaggaatgccaggacagggtaacccagtgcaagtacaaacgcatcggctgcccatggcacggccccttccatgagctgacggtgcacgaggctgcgtgcgcccacccgaccaagacaggcagtgagctgatggagatcctggatgggatggaccagagccaccgcaaggagatgcagctgtacaacagcatcttcagcctgctcagcttcgagaagattggctacacagaggtccagttccggccgtaccgcacagacgacttcatcacgcgcctgtactatgagacgcccaggttcacagtgctgaaccagacgtgggtcctgaaggctcgagtcaacgactcggagcgtaaccccaacctgtcctgcaagcgtacgctctccttccagctcctcctcaagagcaaggtcacggcaccgctggagtgctccttcctgctgctcaagggcccctacgacgacgtgaggatcagccccgtcatctaccactttgtcttcaccaacgagagcaacgagacggactacgtgccactgcccatcattgactccgtggagtgcaacaagctgctggctgccaagaacatcaacctgcggctcttcctgttccagatacagaagtagggcggggcctcaggatgtccgaggagcccacgggcggcatcccagcaccgctgccctgtccacctggctggcagctgcttcacaggactatctgatcactttagcaaaggaggagaacaaacgaagccaacacagggcaagtctgcatgcgtgcgcgacggggcccccgcctccggctcacccccccgacccctgcctcccctccttccgagggccgccagaggctgggctgacccgaagaggagacggtgcaccaggcgccccgaggctaagagacggtggcagcaaggaggccgagaggcacagcgaccctgccccagcccttctgtgcagtcaggcggcggtgctgctccatccctgcgggttccggcggggcgcgggggccttgctgacatcagacgggatatccgaatatctgatagcaattaaaaggcagccttgtttcgtactttctgttttgttcgaggggaaggcatggctgtgaatggacagcgtgggggctttggtttggcctgggggtcagagcctgccccgcccccatctgtgtgcccgcacacgtcccccgaggaaagactcagagacactgcctccccctacgctctgtcatggggtcttgagactgaggcttgggcaggaagatccaggtagggtcggggctgccctggccaaccggccgctcccagggagacaggactcagccaccagggctcagcaggcattttcggaaagcagggtgaaattgtctcttcccaggaaaaagattaaactccttgcaggctcttggataagttacacaaaaatagt

SEQ ID NO: 107601 - DNA, 1669 bp, Homo sapiens
ccctgggtgtgaaattcggacgtgtactaatggtcacttgatgtgcgctggctgttttatccacctactagcagatgcccggctgaaggaggagcaggccacgtgccccaattgtcgttgtgagatcagtaagagcctctgctgccggaacctggccgtggagaaagccgtgagcgagctgccttcagagtgtggcttctgcctgcgccagtttccccgctccctcctggagaggcaccagaaagaggaatgccaggacagggtaacccagtgcaagtacaaacgcatcggctgcccatggcacggccccttccatgagctgacggtgcacgaggctgcgtgcgcccacccgaccaagacaggcagtgagctgatggagatcctggatgggatggaccagagccaccgcaaggagatgcagctgtacaacagcatcttcagcctgctcagcttcgagaagattggctacacagaggtccagttccggccgtaccgcacagacgacttcatcacgcgcctgtactatgagacgcccaggttcacagtgctgaaccagacgtgggtcctgaaggctcgagtcaacgactcggagcgtaaccccaacctgtcctgcaagcgtacgctctccttccagctcctcctcaagagcaaggtcacggcaccgctggagtgctccttcctgctgctcaagggcccctacgacgacgtgaggatcagccccgtcatctaccactttgtcttcaccaacgagagcaacgagacggactacgtgccactgcccatcattgactccgtggagtgcaacaagctgctggctgccaagaacatcaacctgcggctcttcctgttccagatacagaagtagggcggggcctcaggatgtccgaggagcccacgggcggcatcccagcaccgctgccctgtccacctggctggcagctgcttcacaggactatctgatcactttagcaaaggaggagaacaaacgaagccaacacagggcaagtctgcatgcgtgcgcgacggggcccccgcctccggctcacccccccgacccctgcctcccctccttccgagggccgccagaggctgggctgacccgaagaggagacggtgcaccaggcgccccgaggctaagagacggtggcagcaaggaggccgagaggcacagcgaccctgccccagcccttctgtgcagtcaggcggcggtgctgctccatccctgcgggttccggcggggcgcgggggccttgctgacatcagacgggatatccgaatatctgatagcaattaaaaggcagccttgtttcgtactttctgttttgttcgaggggaaggcatggctgtgaatggacagcgtgggggctttggtttggcctgggggtcagagcctgccccgcccccatctgtgtgcccgcacacgtcccccgaggaaagactcagagacactgcctccccctacgctctgtcatggggtcttgagactgaggcttgggcaggaagatccaggtagggtcggggctgccctggccaaccggccgctcccagggagacaggactcagccaccagggctcagcaggcattttcggaaagcagggtgaaattgtctcttcccaggaaaaagattaaactccttgcaggctcttggataagttacacaaaaatagt

SEQ ID NO: 107602 - DNA, 1588 bp, Homo sapiens
  misc_feature (1582)..(1582): n is a, c, g, or t
gcggccgccgggcaggcggcggcggcggctctgggcgaggcggcggggcctgggctcccggacgaggcgggcttggcgggcgcccggcagctacagctgcaggaggcggccggcgaccccgacgcgccgcccaagaagcggctgcgggcagccgaggcggccgaggcggcggcggcggcggcggcggccggcagcgggaaactggaggagcggctctactcggtgctgtgctgcaccgtgtgcctggacctgcccaaggcctccgtgtaccagtgtactaatggtcacttgatgtgcgctggctgttttatccacctactagcagatgcccggctgaaggaggagcaggccacgtgccccaattgtcgttgtgagatcagtaagagcctctgctgccggaacctggccgtggagaaagccgtgagcgagctgccttcagagtgtggcttctgcctgcgccagtttccccgctccctcctggagaggcaccagaaagaggaatgccaggacagggtaacccagtgcaagtacaaacgcatcggctgcccatggcacggccccttccatgagctgacggtgcacgaggctgcgtgcgcccacccgaccaagacaggcagtgagctgatggagatcctggatgggatggaccagagccaccgcaaggagatgcagctgtacaacagcatcttcagcctgctcagcttcgagaagattggctacacagaggtccagttccggccgtaccgcacagacgacttcatcacgcgcctgtactatgagacgcccaggttcacagtgctgaaccagacgtgggtcctgaaggctcgagtcaacgactcggagcgtaaccccaacctgtcctgcaagcgtacgctctccttccagctcctcctcaagagcaaggtcacggcaccgctggagtgctccttcctgctgctcaagggcccctacgacgacgtgaggatcagccccgtcatctaccactttgtcttcaccaacgagagcaacgagacggactacgtgccactgcccatcattgactccgtggagtgcaacaagctgctggctgccaagaacatcaacctgcggctcttcctgttccagatacagaagtagggcggggcctcaggatgtccgaggagcccacgggcggcatcccagcaccgctgccctgtccacctggctggcagctgcttcacaggactatctgatcactttagcaaaggaggagaacaaacgaagccaacacagggcaagtctgcatgcgtgcgcgacggggcccccgcctccggctcacccccccgacccctgcctcccctccttccgagggccgccagaggctgggctgacccgaagaggagacggtgcaccaggcgccccgaggctaagagacggtggcagcaaggaggccgagaggcacagcgaccctgccccagcccttctgtgcagtcaggcggcggtgctgctccatccctgcgggttccggcggggcgcgggggccttgctgacatcagacgggatatccgaatatctgatagcaattaaaaggcagccttgtttcgtaaaaaaaaggatgacaatngaaata

SEQ ID NO: 107603 - DNA, 1963 bp, Homo sapiens
gcggccgccgggcaggcggcggcggcggctctgggcgaggcggcggggcctgggctcccggacgaggcgggcttggcgggcgcccggcagctacagctgcaggaggcggccggcgaccccgacgcgccgcccaagaagcggctgcgggcagccgaggcggccgaggcggcggcggcggcggcggcggccggcagcgggaaactggaggagcggctctactcggtgctgtgctgcaccgtgtgcctggacctgcccaaggcctccgtgtaccagtgtactaatggtcacttgatgtgcgctggctgttttatccacctactagcagatgcccggctgaaggaggagcaggccacgtgccccaattgtcgttgtgagatcagtaagagcctctgctgccggaacctggccgtggagaaagccgtgagcgagctgccttcagagtgtggcttctgcctgcgccagtttccccgctccctcctggagaggcaccagaaagaggaatgccaggacagggtaacccagtgcaagtacaaacgcatcggctgcccatggcacggccccttccatgagctgacggtgcacgaggctgcgtgcgcccacccgaccaagacaggcagtgagctgatggagatcctggatgggatggaccagagccaccgcaaggagatgcagctgtacaacagcatcttcagcctgctcagcttcgagaagattggctacacaggtgaggcgccccgccgcctgctgcatgccacacaggtgtgggttggggggctggcagccaggagtctgggggcagcaggctctgggcactgggcactgacagcgccggacagccgggctctggacaagctcccggtggacaggtggacacctcggtcgagaagacaggccggagactgagtggaaggaggggccgaggcagaccccaggtgcacacctgtgtggctctcacagcagccccgcccacctgtcctcgccaccctggcttcaccacccctgcaaggtggcatctcactgtggggctccagagcctcaagacagtcacggtctaaccagaaagtgggcaggtctcagggggcctgggagctaggggcctgcccctcggaccctggggcaagaagagcaccctgccgagtgaggtcctacctgcaggcagtcactgccccggccatgggcctctcaaggctggcacgaagccattcagggagagggctccacaacaagctgagggtgcccgactcaaactgtagaaccgggagtggacacccacagacgcccaggctggatgcgtgcgcaggcacactggatctcgtggctctctgggccgctgccaccgcctttgaacgtgtcggggagcaggagccaggccagagtctggcccagaggacagcgagaagcacctgttgatgctggggccactggaggaagctccatccctctactctcagcccgcaccaggcggccagctcagagcaccaggcgtggcgcaagcagggtggtcgtgggcagccagtcccgccctgctgcctggactgtgcccagcgggatgtgggcccgagcaggccagagaggccgagggcctggggtctctgcggcagccacagcccgtggtgagtagcagccttagctgtcctggagataccggggcctcgtggagtctaggcaggctggggcactgtggctgtggccgtggccaggtgagaagccccattcgcgcaggaaagactggccacctgggaacccacgcctccacggagggacttgccggccacaggctgtgggctgcccaagaggactgtgcaggcagggctgcctgctgattggcagctccggatcaggcccggtgcctgcagacctggtgctcccctcgggcagggctgggtgccgcagccgcctgctggcttttctggcagctcctctgtatcagaaccaataaagtgcacttgttctcggaaccgca

SEQ ID NO: 107604 - DNA, 1352 bp, Homo sapiens
gcggccgccgggcaggcggcggcggcggctctgggcgaggcggcggggcctgggctcccggacgaggcgggcttggcgggcgcccggcagctacagctgcaggaggcggccggcgaccccgacgcgccgcccaagaagcggctgcgggcagccgaggcggccgaggcggcggcggcggcggcggcggccggcagcgggaaactggaggagcggctctactcggtgctgtgctgcaccgtgtgcctggacctgcccaaggcctccgtgtaccagtgtactaatggtcacttgatgtgcgctggctgttttatccacctactagcagatgcccggctgaaggaggagcaggccacgtgccccaattgtcgttgtgagatcagtaagagcctctgctgccggaacctggccgtggagaaagccgtgagcgagctgccttcagagtgtggcttctgcctgcgccagtttccccgctccctcctggagaggcaccagaaagaggaatgccaggacagggtaacccagtgcaagtacaaacgcatcggctgcccatggcacggccccttccatgagctgacggtgcacgaggctgcgtgcgcccacccgaccaagacaggcagtgagctgatggagatcctggatgggatggaccagagccaccgcaaggagatgcagctgtacaacagcatcttcagcctgctcagcttcgagaagattggctacacagaggtccagttccggccgtaccgcacagacgacttcatcacgcgcctgtactatgagacgcccaggttcacagtgctgaaccagacgtgggtcctgaaggctcgagtcaacgactcggagcgtaaccccaacctgtcctgcaagcgtacgctctccttccagctcctcctcaagagcaaggtcacggcaccgctggagtgctccttcctgctgctcaagggcccctacgacgacgtgaggatcagccccgtcatctaccactttgtcttcaccaacgagagcaacgagacggactacgtgccactgcccatcattgactccgtggagtgcaacaagctgctggctgccaagaacatcaacctgcggctcttcctgttccagatacagaagtagggcggggcctcaggatgtccgaggagcccacgggcggcatcccagcaccgctgccctgtccacctggctggcagctgcttcacaggactatctgatcactttagcaaaggaggagaacaaacgaagccaacacagggcaagtctgcatgcgtgcgcgacggggcgcgggggccttgctgacatcagacgggatatccgaatatctgatagcaattaaaaggcagccttgtttcgta

SEQ ID NO: 107605 - DNA, 1674 bp, Homo sapiens
gcgaaaacaagattgcggcgtgccgggtgtactaatggtcacttgatgtgcgctggctgttttatccacctactagcagatgcccggctgaaggaggagcaggccacgtgccccaattgtcgttgtgagatcagtaagagcctctgctgccggaacctggccgtggagaaagccgtgagcgagctgccttcagagtgtggcttctgcctgcgccagtttccccgctccctcctggagaggcaccagaaagaggaatgccaggacagggtaacccagtgcaagtacaaacgcatcggctgcccatggcacggccccttccatgagctgacggtgcacgaggctgcgtgcgcccacccgaccaagacaggcagtgagctgatggagatcctggatgggatggaccagagccaccgcaaggagatgcagctgtacaacagcatcttcagcctgctcagcttcgagaagattggctacacagaggtccagttccggccgtaccgcacagacgacttcatcacgcgcctgtactatgagacgcccaggttcacagtgctgaaccagacgtgggtcctgaaggctcgagtcaacgactcggagcgtaaccccaacctgtcctgcaagcgtacgctctccttccagctcctcctcaagagcaaggtcacggcaccgctggagtgctccttcctgctgctcaagggcccctacgacgacgtgaggatcagccccgtcatctaccactttgtcttcaccaacgagagcaacgagacggactacgtgccactgcccatcattgactccgtggagtgcaacaagctgctggctgccaagaacatcaacctgcggctcttcctgttccagatacagaagtagggcggggcctcaggatgtccgaggagcccacgggcggcatcccagcaccgctgccctgtccacctggctggcagctgcttcacaggactatctgatcactttagcaaaggaggagaacaaacgaagccaacacagggcaagtctgcatgcgtgcgcgacggggcccccgcctccggctcacccccccgacccctgcctcccctccttccgagggccgccagaggctgggctgacccgaagaggagacggtgcaccaggcgccccgaggctaagagacggtggcagcaaggaggccgagaggcacagcgaccctgccccagcccttctgtgcagtcaggcggcggtgctgctccatccctgcgggttccggcggggcgcgggggccttgctgacatcagacgggatatccgaatatctgatagcaattaaaaggcagccttgtttcgtactttctgttttgttcgaggggaaggcatggctgtgaatggacagcgtgggggctttggtttggcctgggggtcagagcctgccccgcccccatctgtgtgcccgcacacgtcccccgaggaaagactcagagacactgcctccccctacgctctgtcatggggtcttgagactgaggcttgggcaggaagatccaggtagggtcggggctgccctggccaaccggccgctcccagggagacaggactcagccaccagggctcagcaggcattttcggaaagcagggtgaaattgtctcttcccaggaaaaagattaaactccttgcaggctcttggataagttacacaaaaatagt

SEQ ID NO: 107606 - DNA, 1538 bp, Homo sapiens
gcggccgccgggcaggcggcggcggcggctctgggcgaggcggcggggcctgggctcccggacgaggcgggcttggcgggcgcccggcagctacagctgcaggaggcggccggcgaccccgacgcgccgcccaagaagcggctgcgggcagccgaggcggccgaggcggcggcggcggcggcggcggccggcagcgggaaactggaggagcggctctactcggtgctgtgctgcaccgtgtgcctggacctgcccaaggcctccgtgtaccagtgtactaatggtcacttgatgtgcgctggctgttttatccacctactagcagatgcccggctgaaggaggagcaggccacgtgccccaattgtcgttgtgagatcagtaagagcctctgctgccggaacctggccgtggagaaagccgtgagcgagctgccttcagagtgtggcttctgcctgcgccagtttccccgctccctcctggagaggcaccagaaagaggaatgccaggacagggtaacccagtgcaagtacaaacgcatcggctgcccatggcacggccccttccatgagctgacggtgcacgaggctgcgtgcgcccacccgaccaagacaggcagtgagctgatggagatcctggatgggatggaccagagccaccgcaaggagatgcagctgtacaacagcatcttcagcctgctcagcttcgagaagattggctacacagaggtccagttccggccgtaccgcacagacgacttcatcacgcgcctgtactatgagacgcccaggttcacagtgctgaaccagacgtgggtcctgaaggctcgagtcaacgactcggagcgtaaccccaacctgtcctgcaagcgtacgctctccttccagctcctcctcaagagcaaggtcacggcaccgctggagtgctccttcctgctgctcaagggcccctacgacgacgtgaggatcagccccgtcatctaccactttgtcttcaccaacgagagcaacgagacggactacgtgccactgcccatcattgactccgtggagtgcaacaagctgctggctgccaagaacatcaacctgcggctcttcctgttccagatacagaagtagggcggggcctcaggatgtccgaggagcccacgggcggcatcccagcaccgctgccctgtccacctggctggcagctgcttcacaggactatctgatcactttagcaaaggaggagaacaaacgaagccaacacagggcaagtctgcatgcgtgcgcgacggggcccccgcctccggctcacccccccgacccctgcctcccctccttccgagggccgccagaggctgggctgacccgaagaggagacggtgcaccaggcgccccgaggctaagagacggtggcagcaaggaggcctgtagatccaaagaccttgctcccactcatacctgcagttcacgctaatgaaatgaatggctagcagtgagccctttgttcccaggactttaaggcagactattaaaaattattgccaaaattaaga

SEQ ID NO: 107607 - DNA, 772 bp, Homo sapiens
gagatcacttacaactcgctgcagatcaagctgcggctcagcaaccggcctgtcttcatgctctctgagggcaggatggtctcggacatcaacaatgcctggggctgcctggagcagcaggaggaggactgctccttcctgctgctcaagggcccctacgacgacgtgaggatcagccccgtcatctaccactttgtcttcaccaacgagagcaacgagacggactacgtgccactgcccatcattgactccgtggagtgcaacaagctgctggctgccaagaacatcaacctgcggctcttcctgttccagatacagaagtagggcggggcctcaggatgtccgaggagcccacgggcggcatcccagcaccgctgccctgtccacctggctggcagctgcttcacaggactatctgatcactttagcaaaggaggagaacaaacgaagccaacacagggcaagtctgcatgcgtgcgcgacggggcccccgcctccggctcacccccccgacccctgcctcccctccttccgagggccgccagaggctgggctgacccgaagaggagacggtgcaccaggcgccccgaggctaagagacggtggcagcaaggaggccgagaggcacagcgaccctgccccagcccttctgtgcagtcaggcggcggtgctgctccatccctgcgggttccggcggggcgcgggggccttgctgacatcagacgggatatccgaatatctgatagcaattaaaaggcagccttgtttcgta

SEQ ID NO: 107608 - DNA, 330 bp, Homo sapiens
gtaccagggtgccctttcaaagtcctgggctgcactaccaggctgatgctttacctctagttggaaaatgtgaaaagtgattctcagccatggaaactgggtaacttccataacatctgctttgcttactggcctttaaaatgggagtagttttaggctgggcatggtggctcacgcctgtaatcccagctctctgggaggccgaggcaggcggatcacgaggtcaggagttcaagaccagcctggccaacatggtgaaaccccgtctctatcataaacgcaaaaattagctgggcgtggtagcgggcgcctgtaatcatagctactcag

SEQ ID NO: 107609 - DNA, 694 bp, Homo sapiens
ggagcagcaaggcgaacaattcaacgagagtggagtatgtgagggagagggcagtagcaggtaagagcagagaggtgacagggataaagatgttggctgattttccagggcctcgtaagccattgtaaggattcaggcatgttctaaacaggtctcaaaagtttattccaggaatgatattttctgtaaattgctcaattttctggtagaaaccagctcatgacagttattctaaagcctacatgatcacaagtatcatggtagaaaccaagatccagcagatctggtctcagatggtggagcaggacagcagcctgaaaccttccaagcaggtctgacaattgaccttctcatgatccaaacagattattgatttcttaaggcactaattatcatggaggttgggataaaaatctaatttccatttgcaacttcttatgggatgtatcaggataggctaggttattataacaacaataattcatggctcgaaaaatattgaagtgtttctctttctcatgtaacagttccaaggtgagtagcattttaggccaatgggtggttctgcttcacagagtcattcagggacccagactgacagcaactctccagagttgttctagttgtcaccattcccaccaacaggaggggaagaaagcatgcaagtccagactagggaatccctcttaagcaa

SEQ ID NO: 107610 - DNA, 223 bp, Homo sapiens
ttgatgggcttgccatctgagtttaagtggaaatgcagaatgttcccataccagcctgggttacattgtcctcttacaggggcctcaagcccagcagcgaactttggctcccgaattaggtagactgtctcggctggtatgtgacacagggcaaggcacttcattgcttcagagctccttccatgccgtaaaaggtcctacaagacctggtcctaatccctct

SEQ ID NO: 107611 - DNA, 733 bp, Homo sapiens
tgctgccttgttgaggtaggaggcctgtaggatttgttttcaggtcatggtcccactaatagaagcaggatttagtcaatcccgttttcagatgcagtgaagaagccagccaaaactaccaggtggggaggaaagcaacctctagttgccttcattgctcattagcataaagacactcccattggcgccaggacagtttacaagtgccatggcaacagcctagaagttatctcatatcgttctgaaaaccctctgcccctttttcagaaagttctgcataacctgcctcttacttagcatataattaaaagtccccaccagggattttgtgatcccatttatctaggctgttgcatatttcggatttgtttttcagagcatcatgcataaggtgattgctatgatgtatcacaggtagagatatatataggagggtgtacctccatttcttttggagtcagacatgtaacaacttaataaatgctaaaatatgaaggatataactgtcagaatgagataatgtgacaatatcttgaaggctataaagagctatggaaatgaaaattaaagtcaataaatgcaaaagaaatgcattgagcttttcactttgtgagaccagatcacaaatctgtatgaagattttcaattttaattattaccaagaggctttgtgcttattaaacatgtctttactaacaacctaaactctactctggtcttctgttgatgccag

SEQ ID NO: 107612 - DNA, 398 bp, Homo sapiens
tggaatatttgcatatacataatgggatatcttgggcatgggacccaagtctcaacataaaattcatttatgttccatacaccttacacacatagcctgaaggtaattttatataatatttttaataattttgtgcatgaaacaaagttttgactgtgactcatcacatgaggtcaggtgtgggattttccacttctgttatcatgtcagtgctaaaaaatttttagattttggggcattttggatttcagattttttgattagggatgctcaacttctacaatagacagaatagtttaagtttcctactgtggttttaattgagattttaaaattgagaatttatagtttaattggaaagaattaatgagattacctaagaatatagtatatatctc

SEQ ID NO: 107613 - DNA, 683 bp, Homo sapiens
ccagtagaattcgtcatcttccttacttgcttctccttccttgtcttccttttcttgatgcatatccttgccattcatctcactgggcgtcctgctgggctttgctttcccttatccctctgtcccttttccatattcaggtggtgattcagctttccgttttatgatacagtttatattgaaatacatgttcagatatggaggaactcttttgtaatgatgacattggaagaaaggcaagaatttatattgtataaaaattaagcatttattattagttttatgtggtttatatttcaggtaacataaattaagcttgaacagcacacaccgtctcgaaagacagttatttatttattttaactttatttttagttatttcattagctatttcattgagggtattctttcttctgattgctcgcttcgagaccataatgaacattcaagattgtgagatgtattcttattgtcccagattacattctatctgttgacagaatatatccctggatatcatgcttaaatgctgattagattctaaggcatcgtgacaaaaatttaattacagatttcggataaagaacttataagagtgagttgtgttcagaagtttatgaactagacagtgtgcatatatgaatttgtctattgtacttggaatttactatataaaacttaaa

SEQ ID NO: 107614 - DNA, 710 bp, Homo sapiens
gatgcagagtgtgggagtattttctgtaattctgtaggttgtctttttattcctatgatagttttctcttgctgtgcagaagctctttagtttaattaggtctcatttatcgtttttttttcttttgagacaaagtctcattttgtgaccccggctggggtgcagtggcacgatctcggctcactgcaacctctgcctcctgggttcaagcgattctcatgaatcagcctcccaagtagctgggataggtgtgcaccaccacacctggctaatttttgtatttttagtagagatggggtttcgccatgttggcaaggctcatctcaaactcctggcctcaagtgatctgcctgtctgggcctcccaaagtgctgggactacaggcgtgagctaccgcctcaatttttgttttggttgcagttgcttttgagagtatctctctttgcctatgaaatgattctatactaagaaaactctaaataatccgtaaggctcctagaactaataaacaacttcagtaaaatttcaggatacaaaatcagtgtacaaaaattagtaacatttctatacactaataacattgaacctgagggccaaatcaagagtgcaatcccagttacaatagccacaaaagagtaaaatacacctgaatacagctaaccaaggaggggaaagatctctattacagatactatgaaacactgctgaaa

SEQ ID NO: 107615 - DNA, 553 bp, Homo sapiens
atgagatgtagaaggtgtaggttgactttcgcttcccttctgctgcctctgttgagagcacacaatgctggaggtgtttggttcttctgcagcagggttcgtgaaagttgcagggtttagtcagtaaccacaagtcaagaaggaggccgtaaggcatgcatgttgctggtgcacgtggttctgtatgtggcatgattctggagctggcagtagtagtaatggcgtcctgattgtagcaacgataatggggtctggagccagaaatgtccaattcccaatgtttgtgatgtgtttcactacttatgaagcatattgatgtatcttgtaaattttagttttaaagcatcaccctgattctcagaggttagtggggcagatactaccttcattttatagatgtatggcagagatgagtggcaggcttggccacacagtagaatgtattaggaatgatgcataaagttctcctgactccatagttagggctctttcctcctcaagtactgcttttcggggttttgttttttttttttttttgagacagtctcgctct

SEQ ID NO: 107616 - DNA, 348 bp, Homo sapiens
aaatttaatgaatatacgttaaattaaaaactgctttcattaaactgagataatcttccctcaatgcatgaataccttcagaattcacatagaccaaagaattgtataaaatataatagccttaaaaatcttatttgtagctagcacagtggctcccacctgtaatcccagcacattggcaagccgaggtgggcagatcacctgaggtcaggagttcaagagcagcctggccaaactggtgaaaccccatctctactaaaaatagaaaaattagcagggtatggtagcacgtgcatgtagtatcagctactcgaggggctgaggcaggagaattgcttgaacccgaga

SEQ ID NO: 107617 - DNA, 160 bp, Homo sapiens
catgtcccagggagtaagtgggggcttccatgttgcatctgagaaggctccttttccagcagtcatacagctggtgtgggtgcaccacagtgctcaaatgctggacttctgaccccaaaccattgctaccacacttggggttaaagatgacccccaacct

SEQ ID NO: 107618 - DNA, 407 bp, Homo sapiens
cggggtctggggcctgggtgggagaagttggagctttcagttgtcaggggtttctttgggtccgagggacttgatccctttcccagtctaccttcttcttggtctactttttacgggattcgggattctgagatttagagcaaataagactttattttggaaggccgggcgcggtggctcttgtaatctcagtactttgggagagaccaaggagggcggatcacttgaggtcaggagttcgagaccagcctggccaacatggtgaaacctcgtctctactcaaaatacaaaaaaaaatcagccgagcgtggtggcgagcgcctgtggtcccagctactcgggaggctgaggcacgagaatcgcttgaacccgggaggtggaggttacagtgagccgagatcgcgaca

SEQ ID NO: 107619 - DNA, 353 bp, Homo sapiens
atataaaaaatgccacgaaattttccttttgagattcagccagggagacctcctggagtttagaggtacccagactggtgagtaaaaggagtgtgaccttgtgggggcagtcagaggacctagatgtctgacaccaacatccccaggttccagtctctgctcagttactactgggcctgagaagctgggtgcagagatagtgacccacccacctctgaaagtcactactttttgaagtcagaataccgcccatacattgtgggcctaagcaggttacgagggtctcggcagagacccagaggcatgctctagaaattgctgtgaccctggagcagaaacatgtggcagtcccc

SEQ ID NO: 107620 - DNA, 711 bp, Homo sapiens
ggattttggaactgcagttgaaggatcatgaaccatatcttggcttttaatctgttctttacttttgtcagaattgtcttcctcatactcacatggcatggcaccttcgttgtataaaaaccttcatggctttccactacttccctcttgaagcttcttttaagacctcccacatctgtgccctatcaatttttccaggcatttctctaaaatgtgtgtgcttcaccacagccaaactcaccttaccagaatttcctgagtgttccttctcctttgttcactgtgctacagactggaataccttctttcagaaacctccagtccacacttcactgcaatgccagggtcctaatcatcttcacgtgtctcaatttctacctttatgggagtcttactccagtcctcagacagaataagcttaagtactgcctgctcctctaaccagagcactaatttaacacattttccatgtggattgacattcatatgacaattccctgtcacccattagatttgaaaccctgcagcttctttcgctgtacttggcgtatagcatgtattccagagacatttgtcacacgaaggaatgcatgttttagttcatctctcttgttctcatcactctgacctcccacaggaatccttataaccctttgccattgcccttatcctgaccttgcccaagttgaagaacagagtctacgtctcaag

SEQ ID NO: 107621 - DNA, 365 bp, Homo sapiens
tgagatagaatctcactctgtcacccaggctggagtgcagtggcacaatctcggctcactgcaagctccgcctcctgggttcacgccattctcccgcctcagcctcccgagtagctgggaccacaggcgcctgccaccatgcccggctaattttttgtatttttttttttagtagagacgggtttcaccgtgttagccaggatggtctcaatctcctgacctcgtgatctgcccaccttggcctcccaaagtgctgggattacaggcgtgagccaccatgcccggccctttaagcatgtttctaaatggtcctgttcagttgtgttccatgtgcaacaacagagtaagtgggtgcaagtcctctg

SEQ ID NO: 107622 - DNA, 377 bp, Homo sapiens
ccgggcctcacagccctgctgctcccactgacctctccggcccaactcacggctgcaaagagacttgactaagcttgacaatcccaaaggccgggtcccacacctggccctgcctgccgggtcctgcccccaccctcacccccatccccctccctcttgatctgtctctgtttccctcttttcctctgtgtttctgtctctctatgggttgtgtttccttgttttccactctgacaaatgcaacatgaacgggaaagaggcgcccagctgcctaggagggcaagctgggcaagccgggcaaggagaccccgcacccacacctacctcatttaagtgttggattttttgctgttttgaaatgtgagaccctctccaag

SEQ ID NO: 107623 - DNA, 696 bp, Homo sapiens
gggcacatgaaaatgaaaaagttacagatcgtaggggccaatgtctaatagagggaaaatagaataatttattacctacaatgtggttatatgttatcagatatcaaatgattatcacatatgttaaaatgggataaatgcctcagagatataacaaagtacaatgtggattcaaagaagggtagtgattaataattaagtgaataatcacttctttcaatttgcagactgaccagacatcagtgttacacagacaaaaacatttcaattaatgttttaccttcatcctcctcttttgtttttggacctgatttgataacagaaaaaatgtgattatgattaagaggtagtataaaagcatgacctctggaaataagattcgaagctgagtttcaccatttactagctatgcaatcttgacaagttaactttgcttgcctgtacctaattttcttcatctgtaaaacaggattcataataatagtatctacttcctagtgttgtgctgtggtttgaaagaataaatcccacttaattttccatttcttacaggatttaattttttccccttggatcattttgaaatgcttagtacaaacattgacttcctgaaatgtaccacgtcttgtgtgtctgggccccaaatggatgtgggcttagtaattcctgggattctggaagacttcccttcctgaa

SEQ ID NO: 107624 - DNA, 438 bp, Homo sapiens
gctcttttgggctctcccagcactttaaaccagatagaatatacttactgattacagccggcgctcattctgagcacctgttagacactagcatatataacatcatcatgctgactctccacaagaatcctgggaaacaggaactatgattatatcctcttcacagatgaggaaactgaggctcagagggaaattgtcacttggccagtgagtagtggaactaggacttaatcctggggtcaactaatccagaacttcaggaaaaccggtgcagcccgtgccactagaccagggaaactgaccctaattaggggtgaataggaagttggcaagtcagtaggttcaggctggaagctgttgcttccttggcacccttagaactcccagccagactgcctatcccagctgctggaagtcagcaggggagggagaaagtgg

SEQ ID NO: 107625 - DNA, 461 bp, Homo sapiens
acaggatcttcggagccttaccctgagacagctgtgcctagcactgcaggcttcatcagaccacagagcacagcccctccatggaactgctgcagaatgttctgtctgaaaggtgaggggacttcgtgtccatttgggtggcaaaattctacttggggaagattgtcatttagcatcagagtctaaatcacagagctgattccagtaaaaatcaaagtttgagggagttttgtaagtatgaaagtgaaaaagtcattgttcttttttgttgcaaacaggaagaaagacctcctgctggggagatggaattctcttctagacagaaaggatatttctgtgtttgaatgtgttttgtgtgtgttttgttatagacaaaagtagctaaaagtttaaaagaaggtttttaaaatcaactcaataaatataggaatagtttacagcagtagtagagaaattttcat

SEQ ID NO: 107626 - DNA, 729 bp, Homo sapiens
ctagctcccaggtttgcttcctcacctctctccgtcttggtagaattgaagagagtttgtgccttgttctggattcggctttgacttaagggagtatggtggctggtgtgatctttcagaccacccagactttctccatatcaacaataagcctgtttcactttcttatcattcatgtgtttgctggagtagcacttgtaatttccttcaagatttttttaaattttttatttatttattttttttgcattcacagcttggcttcttggctcaaaagcactagttttcagcctatcttggctttcgacatgacttcttcactaagcttaatcatttctcacttttgatataaagtaagagatgggcagttcttccttttcacttgaacatttaatggccattgtagggttattaattggcctaactttaatattgtttctagcaactaggcttgaggagaataagagagatggggaggagccagtcctggagcagtcagaacacatacaatagtgatcaattggttcagtctgctgttttatatgggtgtggtttgtggtgcccctgaacaatataatagtaacatcaaagatcactgatcacagatccaccataacagatattataataatgaaaatgtttgaaatattgcaagaattaccaaaatgtgacacagacacaagaattgagcacatgctttttgaaaaatggcgctgataggcttgctcg

SEQ ID NO: 107627 - DNA, 332 bp, Homo sapiens
ttatacagcttcatatacactaaccttttctaacttaatgtttacgtgccatttattaaggtaaattaagaagttatttaattaagcatataacattttgaagagagggttaacattttctttcaagagcttacctctacctacacttgctcaagaggtagcattacagccaaaactctgaagacattggaatggcctgagatactccacttagctcaaacacaaaaactatctatttcccttatttattggctcaaaagacaaatatcatcttaaatatttcatcgtgttccacaagaaaatgaaagaggaagtaaccaatagtagaacag

SEQ ID NO: 107628 - DNA, 379 bp, Homo sapiens
gttttcagcctccactgtctgcagccaaccccaggggaggaatagtatggaagagaactcaaagaaatgaaagcacaacatacccctttactttgaaacaagaggcctgtaagtattcatgtaaaaagtcatggtaaaattctgtgttcttacagaatgatgatcctcttattttcaaagttgtggggaggcactcttatgggaataaaaagactccaaaaacaaaacaagaagaaaaagtatttttctacacagaaaaacttcaagaaaacatcccatcgccttttatgtcctaggcttttatccttattcttttaaaacacccattaaaaagaaagaggctggcgggtttcatgctaaaagctatttgctacagggg

SEQ ID NO: 107629 - DNA, 198 bp, Homo sapiens
gtacccagggctggcaggccccaggcgcagagcgtgcagacctccatttgcaggaaatacaaggaagatgctcatgtcaccaggaaaatcacagcaaatgcaccacgcttgctctgtgcccactctgtgcccagtaccttccttgattaactcatcggcctcccagcgccactgaggaaggacctgtgggtctccctt

SEQ ID NO: 107630 - DNA, 456 bp, Homo sapiens
aattgcttgagtccaggagttcaagccatcctccccatcttggtcttcgaaagcattgagattacccattcctctctcccattctgtgttttttgtttttgtttttgacaagaggtcacccaggctggagtgcagtggtgcgatctcagctcactgcaacctccacctcccaggtttaagcgattctcctgcctcagtctccggagtagcttattaaccaatacacttctgaataatacataggccaaagaaaaacactcaaaaccagcgctgggtgacagagtgagaccccacctcaaaaaagaaaaaaagactcgagaaattttgaaaatattttaaactaaatgaaaacgaaaaatacaacttatcaaaatttgtgggatgtagtaaaagcaatgctgcaagagaaacctgtagcattgaatgtatatattccaaagggagaaagatataaaa

SEQ ID NO: 107631 - DNA, 345 bp, Homo sapiens
tacaaattagtcaccctagcctacatagcaagaccccgtctctacaaaggataaaagaaacttacccaggtgtggtggtacatgcttgtgagtcctagcttctcagtctccggagtagcttattaaccaatacacttctgaataatacataggccaaagaaaaacactcaaaaccagcctaggaaacatagtgataccccatttctaaaaaaaataaaataaacaataataataaattagctgggcgtggcacacacttgtggtcccagctactcgggaggctgaggtgggaggatcacttgagtcccaggcagtcaaggctgcagtgagctattgtgatggtta

SEQ ID NO: 107632 - DNA, 200 bp, Homo sapiens
gttagatccccggcagaatccgcgcagtacagcctaggaaacatagtgataccccatttctaaaaaaaataaaataaacaataataataaattagctgggcgtggcacacacttgtggtcccagctactcgggaggctgaggtgggaggatcacttgagtcccaggcagtcaaggctgcagtgagctattgtgatggtta

SEQ ID NO: 107633 - DNA, 257 bp, Homo sapiens
ttttttttttctgagacagggtcttgttctgtcactgaggctggaatgcagtggtgtgatcacggctcactgcagcatcgacatcctgagttcaagcaatcctcccatgtagctggggccacaagtgtgcaccaccatgcccagctaattttttgaattgtttgtagagttgggggtctcgctatgtttcccagggtggtcttgaactcccgagctcaggctatcctgtagcctcagcctccctaaagtgctgggat

SEQ ID NO: 107634 - DNA, 283 bp, Homo sapiens
acagatttgttctaaaatcttctacttgacactcaagattctatgagatctaattgttcaacccacttttctgccactgtccctcagcctcagtagtaaccatttgatcacaacttaaggcgtttgatcaaacctaagcattctgggtttctgctttcctctgagccttgcttctgttccctctgcctgcaatgcccttcctcttatcactgccctactcttccaggcccaaatcaaataacaactcctccaagatttgtctccgtgagaatatctctgtcat

SEQ ID NO: 107635 - DNA, 372 bp, Homo sapiens
tagccacatgatttgggggtttgatttcttcccagtccgctgagtattatgatttatccattaaagcaggaaattcaagaataattgaataactaaaaaatggaggaaaaattatgttatatttttacatggagctttttattacaggtaaatagtaatcactaaaccatgtatactggcagctgggcatggtggctcactcctgtaatcccagcactttgggaggccaaggtgggcgattcatgaggtcaggagtttgagaccagctggccaatatagtgaaacaccgtctctactttaaaaattcaaaaattagcctggtgtggtggcatgcgtctgtaatccccgctactcaggaggctgaggcaggaa

SEQ ID NO: 107636 - DNA, 411 bp, Homo sapiens
acctggtacaaaatatgtgttcaataaatattcattgaattcagattaaataagactcattctgaaacatttggcagtatgacagtattaaaatataatttccaagttatcattgtgaattattttggtaatagcaatatttcagcttaatctgtatataggatatttataaagcaacttatattagtttttcaatagagatgtgtgaacttcattgagagcatctctggattattccaaacatttaaagaacatgcatatagctagatctttatgaaccagtggggaggcaaattactactactactattcctataacaacaacaaaaaaaatagtaatgttttataccagatatataattctgcagcactttggactcatccattgtgttctaatgtgaaaagtgactg

SEQ ID NO: 107637 - DNA, 287 bp, Homo sapiens
attcccaaggcacagctgcttgaggtgccaccaaggcccagctgggggatggggtgctgggagtgtgtcctggagcatgacccggcctggggtggtcagagaggcttctctcagggagatgctctggtgccgagaaggaagcggtgagtggagtcaggcaggtggggaggagggggaagggcagaccatgtggaagacatccatatggacgccctgagccaggaggggccttcacctccagaaacctcagtttctccattggcaaagtgggcgggattggcctcacc

SEQ ID NO: 107638 - DNA, 827 bp, Homo sapiens
gtggttcagggtgagtagcaagatgtgaagggagagtgctgagaaggaggagggtggaggaagttgagaaagacagcagctttcgatgagtgcacaggccactcttcaagtcaccaaatttaaatgttgcttgtgctgctcattaacatgttgggaaatccttgactctttcaggattccagctccctcatctgttaataaaatgagaaattgccacaaagacctccctgccttggaaattcaaagactatataggctctataattcaatggtagaacttttttatggggggtgttagttactaaaactgtagactgtttattttgacctttgagtataggaaaacttgttgaggtaaaaatattctcttctatgattattcaggtagaactttaccattcaacttagggattctgaaagatgattacagaaaagcactatgatgcagagctccatgtggtgatgtcaaatccaataattcagttaaactcctgtactgtttcattcttttgttggagttaaatactattgcaaacaaggctggatgtttttatttctttttgaaatccagaatgctctttgtcatttgacaatgcagcatactaaactacttaaaatactttgtgagtgaaatcacatgcatgaaatgtggtataagttactagagcccttgaagggcagcacttgggtttagttggcctcttctgttttacctaatttctcaatcccacctattcttttttctcactttcttaaatcccagtaattatcttaggcataaagcagttttctatgcatagacagttcatttagattggtaacatggg

SEQ ID NO: 107639 - DNA, 881 bp, Homo sapiens
gtggttcagggtgagtagcaagatgtgaagggagagtgctgagaaggaggagggtggaggaagttgagaaagacagcagctttcgatgagtgcacaggccactcttcaagtcaccaaatttaaatgttgcttgtgctgctcattaacatgttgggaaatccttgactctttcaggattccagctccctcatctgttaataaaatgagaaattgccacaaagacctccctgccttggaaattcaaagactatataggctctataattcaatggtagaacttttttatggggggtgttagttactaaaactgtagactgtttattttgacctttgagtataggaaaacttgttgaggtaaaaatattctcttctatgattattcaggtagaactttaccattcaacttagggattctgaaagatgattacagaaaagcactatgatgcagagctccatgtggtgatgtcaaatccaataattcagttaaactcctgtaaaaatttcccatctcctactggcagggtccaagtcaggatatactgcatttcttctgtttcattcttttgttggagttaaatactattgcaaacaaggctggatgtttttatttctttttgaaatccagaatgctctttgtcatttgacaatgcagcatactaaactacttaaaatactttgtgagtgaaatcacatgcatgaaatgtggtataagttactagagcccttgaagggcagcacttgggtttagttggcctcttctgttttacctaatttctcaatcccacctattcttttttctcactttcttaaatcccagtaattatcttaggcataaagcagttttctatgcatagacagttcatttagattggtaacatggg

SEQ ID NO: 107640 - DNA, 460 bp, Homo sapiens
gggcacttgcccgagccccttacccacgggctgcagggcagagtggatacagcactgggctgacacccctaccccgtctccagacaaccccagggcacagctttctatatccccagggcttacacagtgcccaccacctagcaggggatcagttaagtaactggaaacagaaaggaaggaaggaaaggaagaagagaggaaggtaatgatgggtgcaaagcagctttaggtgagtaagaaaaagtatttgattgatagaagcttaaattccttttattggatataattagagtcggtatcttggggtcttgatgggtccggatagcttgcacttgtctacaggtctggcaggagaggaaacagggagggaggctgagggggaaagagtacacactcccctgacccctgcctcgatctggatatttgagcacaagagagcagactgtgcccagagctccgg

SEQ ID NO: 107641 - DNA, 419 bp, Homo sapiens
ggtggaggttgcagtgagccgagattgcgccactgcactccagcctaggcaacagcgaggtcctctcaaaaaaaaaagaatagcttgtaagtttttttttgatgtttttgcccgattatatttgggattactagatctacagataaacatatatgtaaattttgctattatagggctaattcccctataagaattatgccattttatactaccagcctcacacacaaatatttagattttcttattctgataaatatgaaaggagatatggatattttaatttgcatttcttttatttatgtggttttttaatacatcataagcattttttcaggttgccacttgtcttaatatttaatagttgcttattcagtagatttaccataattagacaattatgcttattgagaattttagtt

SEQ ID NO: 107642 - DNA, 376 bp, Homo sapiens
tgccaagatccctttaagatgctgctcctcgtgttcgaggatgacactttaaacatccaggctttcaggtgatggtgtcatgtgatgtacgtgtctcaggctttcactcccacaggggaattcccatgcagcttttggagatgtgctgaccagtcacgattttttatcatagtagtttttccttgagggcttcacatagtcttctgaggtagcaggaagggagggagactttcttgccaacaccatttctaaatataaacttctaattaagcaggctgtttgaacctcctttggaaaggtcatttgtgaaagtggagcttttgctcattctgtaagcgattccccttcacttgcatcatatggacgatgccacgtg

SEQ ID NO: 107643 - DNA, 534 bp, Homo sapiens
gggattacagtcaaagggcttggaatagcatcccagttctacactctattttctatgtgatccttaacaaggcactatttcctaatctgtaaaatggaagatgatacttgctctgcatagctcaagggcttgttatgaaaatgaaatgtgataatacaaatactttacaaagtgttattcaaaatttttgttatgtgctaaatattggggatgccaaatatttagttatgacttcagaatgaccaaagttaatgggtttgaatggaagagactagaaaggctttgttgatgaggtgagtcttacatggagtttgaggtagacaaagatgtgatcagtggaaaaaaacaggaaacggaatcccaagtgcattgtttcagaactgggccagggtaaaatctacagattcactgggctatagtaaagctcatgagtgcctgtgtgctagccaggcagttattgaaggggcagttggtggtggacattaaactccatgattaggagctttaattgatctcagaggtaattaagcctca

SEQ ID NO: 107644 - DNA, 433 bp, Homo sapiens
tgaggcagcagaatcgcttgaacccaggaggcggaggttgtggtgagtggagattgcgccagtgcactctagcctgggccacagagcaagattccattaaaaaacaaaccaaccaccattaccacctttaggatctagcagctcttgctgttttactccagtgattgggaattaagcactgagaattgtctgttcaagtaacacatttctaactgtaaactaggcatggatcattggttgtaatatcatttacctttaagttaaaataacattttaccttaagcatcaggacttgtgatgcagctctagtggcagtcataatctacagctgtaggttttaaatcagtgattcttacagtatttcagaagcattgttacctataatatcctttgtgttttagggcagggtaaattgtcagctactgctaaaatg

SEQ ID NO: 107645 - DNA, 294 bp, Homo sapiens
gagagccaggaggctttgggggcagggatggcaaggctctgggagtctggtctgccggagagtgatacccagctggtccccaggggacaggccacccttggggaaaacaggtagagagggtttagaatgaatacccatttggcaagtatttctggagcacctgatggatgcgtgccaggcactgttccaggggatgcagcagaaacttgaccctcacaagtcgtgtgaggcaggcagtgcttattgtcctcgttttctagatgacacagccaaggcacagacatcttgggaaaa

SEQ ID NO: 107646 - DNA, 821 bp, Homo sapiens
gtctttgtaaactcttcctagaaattctgttcttttggctcctgtactggctctcattattttcttttcttcctagatgcttagctcacttgaattcaacgattctctctgttaggtgatcccatatctgtatttccagcctaggcctgtctcttgagcaccatgcatcccattcatgagggtgcccatgtatctgtatctgaatctgtctaccaaggtactctattcttgcattctctattttaagtaacagtaacactctgtaccttgcatcttctaatcaaaattaatttattgattgaaggtcattaccaatggacttatctcacagtctttttttttccccttaatttgagtacttatcagacaatgtgctaaatgctaatgcacaaaacatagaaaacgaagtcctaatcttcattaagcttccagcccatgattgcatgcatattgtgtgtctgtatgtgtgtgtatttggaaggtgcagaacagtaaagacaatgctctaatgcagtgtgattggtgctataataaaggtaaaattagactacacaaaagagttgctgaactctgaactcagataggaggaggggtagttagtggtgctggagaagcttcctaggggagacaaatggatcatttgtcctttctcccacaaaattttacctctttgaaccctttcttttgctaggagagctcttcccatctttctccctctacttcaatactccttatctctcagttccacaagtcttaactccaatatttcttccttgaaggtcttcccaatgtctacaggtagcaccagtcagatttctctc

SEQ ID NO: 107647 - DNA, 280 bp, Homo sapiens
ccataacatttctatacaactacaagtctatataacattcaagctgaaagccaaattaagaacacagtcctattcacaataacacacacacacacacacacacacacacacacacacacacacacagagacagagagagagagagagggagagagggagagagagcctatgaatacagctaactggggaggagaaagatctctataatgagaattacaaaacactgttgaaagaaatcagagatgacacaaacaagtagaaaaacattatatgctcatgg

SEQ ID NO: 107648 - DNA, 2538 bp, Homo sapiens
  misc_feature (1133)..(1133): n is a, c, g, or t
gttgccatgtttgctctgcccctggggtggaggccagaggagatgcttaccaggcctgagaccttgagagttcacccagggtttgtacgctgccacccagggttcccaaggtttctcccatctggtcagatgtcgaacacaaaatgtgggcattctgcacggaaggaaagatcaggcttctcttgctgagtgtgtgaagacagggagagccaggccccagcagatgcggcctagcacactctgatttggttttgtggggagggcccaggaacttgggggtggtcttggcattcagagctggtgctaaaaacccagagcagaagcagggagaagggagtgaggatgggacagagaagagcgaccactggggatcagaacagcttttcaggggccaccttgcagcctaaaataatgccgtttcagggcctgggcctgctgtgagagccagaatgaagcatgtgcaagattggaatgtgagaagaactgtggggggaaaccagttttaattaagtggaagtgctttgtgcttgtgctgaagttgcctgggcctcctgcagctctggacctcactggagcggccccgccctgcccttgcctgcctttcttttatgctgatgctggtgggctttttcctgcttcaggatccatgtaagggactgaccaggttcatccagccttaactggttcctgcaacccacttttaggtctcccaccaggggcctattgtgctgtcttcctgtgaccagcagatcctgtaagggggtgatcctaattctggggctctttgcagcaagaggagaacgttctttttcttgaacaaggtggccggttccctgggagaaggctgggaatggcacgtccggccagggcaggcggtgcggcatcctcctcctgggattcctgtggcctcccctgttctattcattgtttggcttcccacccataagctctgggatacccagggcttgcttcccagctcttctcatctccaagcctctgctccccttcccaccaccactgccatataaaatggccatgctaactcctacacaactaggagcctcagcaggattgctaggatgtgggttccttcctgcatgcttgcttctgcagctgtgtggccttgccatggncctcccaccactttcccttctaccttgccttccattgtcttccttctcccagaaagccaggtttcaccacgtgctcaccacaaactgtctcccctccctcgtaggagtcactgcagtagggcacctgcaggccctggtagagtgagcagggcttacgtgtacattctttctcactctaaggatgtgatatctgaccctgatgtcagagaggaggtctcaggactagcattcggggtcctttgagtgttcccagaatggtttggggtatcacacaaaacaccagagctgagggtagggatagagtccccaaacacacatcctgggagcaagccacttcatctgagcttcccataccaggagcatggtttgtgctttgatgggaaacctagcaagcccctgcactctggggcttctcctctcctggagcccagggcggctctggcccgatgatatggcagccataggtacaggtattgcaggtgcagcctttcttaagtaccctgcctccactctatagcccagctgctgctggagtccaggaccttagacccaggatgagcaaaaggatcccaccaggttgtccaggaccattgccagggtgaccccagagttcttcagacctgtgtctgatactgaatacagtgccatgggaccctgctccaatctaactgcctacaacctgcccgtccccctgctgcagggatgttgctgctacctcgggaggctctctgagactggtgtctggtcttagatgctgcacatagtacctggtgctagggtctaggggctgcccaaagcccagcaggaacagctactactcatcctgcagaggccttggcccagaccagctttccatccaaagcctcacctggtttccatgtccatctcaacagtctggccttcctgtgactgtagcctggcagccacaccctcagtaatcccgcacagtgagtccagcttctctgggagcttggccttcagttagcccagtccatgagagggcagggtaatgaggaggagtaaaggacctatcttctctgtccacataaggaagttgggaccacaaggtcttttatctccttgttactccccaaccccaccataacctcctactcagcacacagctttatcctggtagattataaggtgagcttccagaacctggcaggaggctggtgtatccccctgcacagagggaagtgtatctgaatgttgtgtatgtggctgatatggaagacatacatgtatgcaatccatcagcgtttaaagaagaagattggctccagttcggaggaggaggaggaagattacagatctattctgagtattttttagagagttaatatttatatttttagtaattttctggtagaaggaaattgcacaataaaatgatttggtttgg

SEQ ID NO: 107649 - DNA, 662 bp, Homo sapiens
gtgtctagaggatccgtactctgcaggatgagtagtagctgtcctgctgggcttgggcagccctagaccctagcaccaggtactatgtgcagcatctaagaccagctttccatccaaagcctcacctggtttccatgtccatctcaacagtctggccttcctgtgactgtagcctggcagccacaccctcagtaatcccgcacagtgagtccagcttctctgggagcttggccttcagttagcccagtccatgagagggcagggtaatgaggaggagtaaaggacctatcttctctgtccacataaggaagttgggaccacaaggtcttttatctccttgttactccccaaccccaccataacctcctactcagcacacagctttatcctggtagattataaggtgagcttccagaacctggcaggaggctggtgtatccccctgcacagagggaagtgtatctgaatgttgtgtatgtggctgatatggaagacatacatgtatgcaatccatcagcgtttaaagaagaagattggctccagttcggaggaggaggaggaagattacagatctattctgagtattttttagagagttaatatttatatttttagtaattttctggtagaaggaaattgcacaataaaatgatttggtttgg

SEQ ID NO: 107650 - DNA, 2593 bp, Homo sapiens
  misc_feature (1133)..(1133): n is a, c, g, or t
gttgccatgtttgctctgcccctggggtggaggccagaggagatgcttaccaggcctgagaccttgagagttcacccagggtttgtacgctgccacccagggttcccaaggtttctcccatctggtcagatgtcgaacacaaaatgtgggcattctgcacggaaggaaagatcaggcttctcttgctgagtgtgtgaagacagggagagccaggccccagcagatgcggcctagcacactctgatttggttttgtggggagggcccaggaacttgggggtggtcttggcattcagagctggtgctaaaaacccagagcagaagcagggagaagggagtgaggatgggacagagaagagcgaccactggggatcagaacagcttttcaggggccaccttgcagcctaaaataatgccgtttcagggcctgggcctgctgtgagagccagaatgaagcatgtgcaagattggaatgtgagaagaactgtggggggaaaccagttttaattaagtggaagtgctttgtgcttgtgctgaagttgcctgggcctcctgcagctctggacctcactggagcggccccgccctgcccttgcctgcctttcttttatgctgatgctggtgggctttttcctgcttcaggatccatgtaagggactgaccaggttcatccagccttaactggttcctgcaacccacttttaggtctcccaccaggggcctattgtgctgtcttcctgtgaccagcagatcctgtaagggggtgatcctaattctggggctctttgcagcaagaggagaacgttctttttcttgaacaaggtggccggttccctgggagaaggctgggaatggcacgtccggccagggcaggcggtgcggcatcctcctcctgggattcctgtggcctcccctgttctattcattgtttggcttcccacccataagctctgggatacccagggcttgcttcccagctcttctcatctccaagcctctgctccccttcccaccaccactgccatataaaatggccatgctaactcctacacaactaggagcctcagcaggattgctaggatgtgggttccttcctgcatgcttgcttctgcagctgtgtggccttgccatggncctcccaccactttcccttctaccttgccttccattgtcttccttctcccagaaagccaggtttcaccacgtgctcaccacaaactgtctcccctccctcgtaggagtcactgcagtagggcacctgcaggccctggtagagtgagcagggcttacgtgtacattctttctcactctaaggatgtgatatctgaccctgatgtcagagaggaggtctcaggactagcattcggggtcctttgagtgttcccagaatggtttggggtatcacacaaaacaccagagctgagggtagggatagagtccccaaacacacatcctgggagcaagccacttcatctgagcttcccataccaggagcatggtttgtgctttgatgggaaacctagcaagcccctgcactctggggcttctcctctcctggagcccagggcggctctggcccgatgatatggcagccataggtacaggtattgcaggtgcagcctttcttaagtaccctgcctccactctatagcccagctgctgctggagtccaggaccttagacccaggatgagcaaaaggatcccaccaggttgtccaggaccattgccagggtgaccccagagttcttcagacctgtgtctgatactgaatacagtgccatgggaccctgctccaatctaactgcctacaacctgcccgtccccctgctgcagggatgttgctgctacctcgggaggctctctgagactggtgtctggtcttagatgctgcacatagtacctggtgctagggtctaggggctgcccaaagcccagcaggaacagctactactcatcctgcagaggccttggcccagaccagctttccatccaaagcctcacctggtttccatgtccatctcaacagtctggccttcctgtgactgtagcctggcagccacaccctcagtaatcccgcacagtgagtccagcttctctgggagcttggccttcagttagcccagtccatgagagggcagggtaatgaggaggagtaaaggacctatcttctctgtccacataaggaagttgggaccacaaggtcttttatctccttgttactccccaaccccaccataacctcctactcagcacacagctttatcctggtagattataaggtgagcttccagaacctggcaggaggctggtgtatccccctgcacagagggaagtgtatctgaatgttgtgtatgtggctgatatggaagacatacatgtatgcaatccatcagcgtttaaagaagaagattggctccagttcggaggaggaggaggaagattacagatctattctgagtattttttagagagttaatatttatatttttagtaattttctggtagaaggaaattgcacaataaaatgatttggtttggaaaaaaaaaataataaagtcgtacggccgtgaatttagtagtagtaggcggccgc

SEQ ID NO: 107651 - DNA, 2620 bp, Homo sapiens
  misc_feature (1133)..(1133): n is a, c, g, or t
gttgccatgtttgctctgcccctggggtggaggccagaggagatgcttaccaggcctgagaccttgagagttcacccagggtttgtacgctgccacccagggttcccaaggtttctcccatctggtcagatgtcgaacacaaaatgtgggcattctgcacggaaggaaagatcaggcttctcttgctgagtgtgtgaagacagggagagccaggccccagcagatgcggcctagcacactctgatttggttttgtggggagggcccaggaacttgggggtggtcttggcattcagagctggtgctaaaaacccagagcagaagcagggagaagggagtgaggatgggacagagaagagcgaccactggggatcagaacagcttttcaggggccaccttgcagcctaaaataatgccgtttcagggcctgggcctgctgtgagagccagaatgaagcatgtgcaagattggaatgtgagaagaactgtggggggaaaccagttttaattaagtggaagtgctttgtgcttgtgctgaagttgcctgggcctcctgcagctctggacctcactggagcggccccgccctgcccttgcctgcctttcttttatgctgatgctggtgggctttttcctgcttcaggatccatgtaagggactgaccaggttcatccagccttaactggttcctgcaacccacttttaggtctcccaccaggggcctattgtgctgtcttcctgtgaccagcagatcctgtaagggggtgatcctaattctggggctctttgcagcaagaggagaacgttctttttcttgaacaaggtggccggttccctgggagaaggctgggaatggcacgtccggccagggcaggcggtgcggcatcctcctcctgggattcctgtggcctcccctgttctattcattgtttggcttcccacccataagctctgggatacccagggcttgcttcccagctcttctcatctccaagcctctgctccccttcccaccaccactgccatataaaatggccatgctaactcctacacaactaggagcctcagcaggattgctaggatgtgggttccttcctgcatgcttgcttctgcagctgtgtggccttgccatggncctcccaccactttcccttctaccttgccttccattgtcttccttctcccagaaagccaggtttcaccacgtgctcaccacaaactgtctcccctccctcgtaggagtcactgcagtagggcacctgcaggccctggtagagtgagcagggcttacgtgtacattctttctcactctaaggatgtgatatctgaccctgatgtcagagaggaggtctcaggactagcattcggggtcctttgagtgttcccagaatggtttggggtatcacacaaaacaccagagctgagggtagggatagagtccccaaacacacatcctgggagcaagccacttcatctgagcttcccataccaggagcatggtttgtgctttgatgggaaacctagcaagcccctgcactctggggcttctcctctcctggagcccagggcggctctggcccgatgatatggcagccataggtacaggtattgcaggtgcagcctttcttaagtaccctgcctccactctatagcccagctgctgctggagtccaggaccttagacccaggatgagcaaaaggatcccaccaggttgtccaggaccattgccagggtgaccccagagttcttcagacctgtgtctgatactgaatacagtgccatgggaccctgctccaatctaactgcctacaacctgcccgtccccctgctgcagggatgttgctgctacctcgggaggctctctgagactggtgtctggtcttagatgctgcacatagtacctggtgctagggtctaggggctgcccaaagcccagcaggaacagctactactcatcctgcagaggccttggcccagaccagctttccatccaaagcctcacctggtttccatgtccatctcaacagtctggccttcctgtgactgtagcctggcagccacaccctcagtaatcccgcacagtgagtccagcttctctgggagcttggccttcagttagcccagtccatgagagggcagggtaatgaggaggagtaaaggacctatcttctctgtccacataaggaagttgggaccacaaggtcttttatctccttgttactccccaaccccaccataacctcctactcagcacacagctttatcctggtagattataaggtgagcttccagaacctggcaggaggctggtgtatccccctgcacagagggaagtgtatctgaatgttgtgtatgtggctgatatggaagacatacatgtatgcaatccatcagcgtttaaagaagaagattggctctggagaaactggctctgagcgggagaaactggctctgagcgggagaaactggctctgagcgggagaaactggctctgagcgggagaaactggctctgagcgggagaaactgggctccgagcgggagaaactggctctgagcgggagaaactggctctgagcgggagaaactggctctgagcgggagaaactggctctgagcggg

SEQ ID NO: 107652 - DNA, 816 bp, Homo sapiens
ggcgtacggccggagtgtgggatcgctggctcttcgcacgcggcatggccgactccgagctgcagctggttgagcagcggatccgcagcttccccgacttccccaccccaggcgtggtattcagggacatctcgcccgtcctgaaggaccccgcctccttccgcgccgccatcggcctcctggcgcgacacctgaaggcgacccacgggggccgcatcgactacatcgcaggcctagactcccgaggcttcctctttggcccctccctggcccaggagcttggactgggctgcgtgctcatccgaaagcgggggaagctgccaggccccactctgtgggcctcctattccctggagtacgggaaggctgagctggagattcagaaagacgccctggagccaggacagagggtggtcgtcgtggatgatctgctggccactggtggaaccatgaacgctgcctgtgagctgctgggccgcctgcaggctgaggtcctggagtgcgtgagcctggtggagctgacctcgcttaagggcagggagaagctggcacctgtacccttcttctctctcctgcagtatgagtgaccacagggcctcccagcccaacatctccagctggatcccagggaaatatcagccttgggcaactgcagtgaccaggggcaccggctgcccacagggaacacattcctttgctggggttcagcgcctctcctggggctggaagtgccaaagcctggggcaaagctgtgtttcagccacactgaacccaattacacacagcgggagaacgcagtaaacagctttcccacaa

SEQ ID NO: 107653 - DNA, 582 bp, Homo sapiens
caccaggcctgtccttgggtccagggacatctcgcccgtcctgaaggaccccgcctccttccgcgccgccatcggcctcctggcgcgacacctgaaggcgacccacgggggccgcatcgactacatcgcaggcctagactcccgaggcttcctctttggcccctccctggcccaggagcttggactgggctgcgtgctcatccgaaagcgggggaagctgccaggccccactctgtgggcctcctattccctggagtacgggaaggctgagctggagattcagaaagacgccctggagccaggacagagggtggtcgtcgtggatgatctgctggccactggtgtatgagtgaccacagggcctcccagcccaacatctccagctggatcccagggaaatatcagccttgggcaactgcagtgaccaggggcaccggctgcccacagggaacacattcctttgctggggttcagcgcctctcctggggctggaagtgccaaagcctggggcaaagctgtgtttcagccacactgaacccaattacacacagcgggagaacgcagtaaacagctttcccacaa

SEQ ID NO: 107654 - DNA, 975 bp, Homo sapiens
ggcgtacggccggagtgtgggatcgctggctcttcgcacgcggcatggccgactccgagctgcagctggttgagcagcggatccgcagcttccccgacttccccaccccaggcgtggtattcagggacatctcgcccgtcctgaaggaccccgcctccttccgcgccgccatcggcctcctggcgcgacacctgaaggcgacccacgggggccgcatcgactacatcgcaggcctagactcccgaggcttcctctttggcccctccctggcccaggagcttggactgggctgcgtgctcatccgaaagcgggggaagctgccaggccccactctgtgggcctcctattccctggagtacgggaaggctgagctggagattcagaaagacgccctggagccaggacagagggtggtcgtcgtggatgatctgctggccactggtggaaccatgaacgctgcctgtgagctgctgggccgcctgcaggctgaggtcctggagtgcgtgagcctggtggagctgacctcgcttaagggcagggagaagctggcacctgtacccttcttctctctcctgcagtatgagtgaccacagggcctcccagcccaacatctccagctggatcccagggaaatatcagccttgggcaactgcagtgaccaggggcaccggctgcccacagggaacacattcctttgctggggttcagcgcctctcctggggctggaagtgccaaagcctggggcaaagctgtgtttcagccacactgaacccaattacacacagcgggagaacgcagtaaacagctttcccacaaaaaaaaaaacaaaaaacaactacaaacaaacaacaacaacaaaaaaagacagaaacaacaaaaaaaggcgccgataacttaggaggcaagtcacattaagaggcctgataaaaacaaggtacggagaaactttcccttgtggaaaccccaaaggaaatt

SEQ ID NO: 107655 - DNA, 465 bp, Homo sapiens
ccatgccttcccctccccaacccaggggctggcctggagcacctgctctctgcagcccaggccaactggggacctcacccctcccatccccaggaaccatgaacgctgcctgtgagctgctgggccgcctgcaggctgaggtcctggagtgcgtgagcctggtggagctgacctcgcttaagggcagggagaagctggcacctgtacccttcttctctctcctgcagtatgagtgaccacagggcctcccagcccaacatctccagctggatcccagggaaatatcagccttgggcaactgcagtgaccaggggcaccggctgcccacagggaacacattcctttgctggggttcagcgcctctcctggggctggaagtgccaaagcctggggcaaagctgtgtttcagccacactgaacccaattacacacagcgggagaacgcagtaaacagctttcccacaa

SEQ ID NO: 107656 - DNA, 392 bp, Homo sapiens
  misc_feature (9)..(9): n is a, c, g, or t
cgcatcgantacatcgcaggcctagactcccgaggcttcctctttggcccctcctattccctggagtacgggaaggctgagctggagattcagaaagacgccctggagccaggacagagggtggtcgtcgtggatgatctgctggccactggtgtatgagtgaccacagggcctcccagcccaacatctccagctggatcccagggaaatatcagccttgggcaactgcagtgaccaggggcaccggctgcccacagggaacacattcctttgctggggttcagcgcctctcctggggctggaagtgccaaagcctggggcaaagctgtgtttcagccacactgaacccaattacacacagcgggagaacgcagtaaacagctttcccacaa

SEQ ID NO: 107657 - DNA, 782 bp, Homo sapiens
cctggcccctggggattcccatgctgccgagtcactcctgtcacttaccctgacaggcctagactcccgaggcttcctctttggcccctccctggcccaggagcttggactgggctgcgtgctcatccgaaagcgggggaagctgccaggccccactctgtgggcctcctattccctggagtacgggaagaaggtaagagggctggggtggccagaggaagggcagggccaggccaccgtggccactctcccccagttctaaaaggccttcccaggcgtgtcaagtggagctgctgtggttacagtggccttgggagctcagagaggttgagacataggctgggctcacagccaggtaacagcaaggtggggttggagtcagggtctagggtggcagctgccaagctgtgcaacaaagctgttttctgcgggaggctgaggaccacacaccacttcccactccaggctgagctggagattcagaaagacgccctggagccaggacagagggtggtcgtcgtggatgatctgctggccactggtgtatgagtgaccacagggcctcccagcccaacatctccagctggatcccagggaaatatcagccttgggcaactgcagtgaccaggggcaccggctgcccacagggaacacattcctttgctggggttcagcgcctctcctggggctggaagtgccaaagcctggggcaaagctgtgtttcagccacactgaacccaattacacacagcgggagaacgcagtaaacagctttcccacaa

SEQ ID NO: 107658 - DNA, 663 bp, Homo sapiens
ggcgtacggccggagtgtgggatcgctggctcttcgcacgcggcatggccgactccgagctgcagctggttgagcagcggatccgcagcttccccgacttccccaccccaggcgtggtattcagggacatctcgcccgtcctgaaggaccccgcctccttccgcgccgccatcggcctcctggcgcgacacctgaaggcgacccacgggggccgcatcgactacatcgcaggcctagactcccgaggcttcctctttggcccctccctggcccaggagcttggactgggctgcgtgctcatccgaaagcgggggaagctgccaggccccactctgtgggcctcctattccctggagtacgggaagctgacctcgcttaagggcagggagaagctggcacctgtacccttcttctctctcctgcagtatgagtgaccacagggcctcccagcccaacatctccagctggatcccagggaaatatcagccttgggcaactgcagtgaccaggggcaccggctgcccacagggaacacattcctttgctggggttcagcgcctctcctggggctggaagtgccaaagcctggggcaaagctgtgtttcagccacactgaacccaattacacacagcgggagaacgcagtaaacagctttcccacaa

SEQ ID NO: 107659 - DNA, 507 bp, Homo sapiens
ggcgtacggccggagtgtgggatcgctggctcttcgcacgcggcatggccgactccgagctgcagctggttgagcagcggatccgcagcttccccgacttccccaccccaggcgtggtattcagggacatctcgcccgtcctgaaggaccccgcctccttccgcgccgccatcggcctcctggcgcgacacctgaaggcgacccacgggggccgcatcgactacatcgcaggcctagactcccgaggcttcctctttggcccctccctggcccaggagcttggactgggctgcgtgctcatccgaaagcgggggaagctgccaggccccactctgtgggcctcctattccctggagtacgggaaggctgagctggagattcagaaagacgccctggagccaggacagagggtggtcgtcgtggatgatctgctggccactggtgtatgagtgaccacagggcctcccagcaccagcatctccgctttggaaaggtaccggctatctt

SEQ ID NO: 107660 - DNA, 154 bp, Homo sapiens
attgagtactcactggattctagagctgttttcagcattgtaactgggcagcgaggttggacctcgtgctggctggctgcagggcttggagaggaggaccccctcccctgccgcggttttgccccgcttcctccttcacaaatgcagtcctcaa

SEQ ID NO: 107661 - DNA, 172 bp, Homo sapiens
ataccacaagacagtcattaatttccaaatgaacaaccagagagtgagttctacagacattcagagcatcctataagccaggaagactcactagaagaaaaaaagatgtgaactggtcttcaagaatgggtaggaactgaatagagagagaggaaaggagaaggattcacca

SEQ ID NO: 107662 - DNA, 328 bp, Homo sapiens
aggaaaaaggagtcggggacgtcagtcacctctatcacccaggcaggagatgctgggcctggaaccagaggcaccccaaagaagccaggcataatatggcctcacctgagcccggtgacctcatctgcaaaactgggactcaagaatcagaaaacggtgaccttctacctctctacacgtacatatatgttttctaaagaagttaatcacaagaatccacaaacccattggttctgacctccaagagcctatatgataccctcctccacaggtagcccttttcctggcttctgttcttaccaaggccaccccacaactagtcatcccg

SEQ ID NO: 107663 - DNA, 410 bp, Homo sapiens
ccctctaaatgactgcagtagcctcctaactgatccccaaactctggtcttttccttctccttttgtcctatagattttcccccagagtatcatatttgggcacatctctgatcatgtcatttctctactcagtaacctaaaataacttaataagtctaactgcttattagagcatctaagactttcagttatctgatcccatcctacaaatctagccttaattccctcttcttccctttgtattgacgcatcctataatattgtcaaactggacacttaattcttccccaatctcttacttccatgaacggctcatcctgtctcacctccctctccctgcacatattcctttcctacccatctttcattgccaaggacaaatgccatccctgatccctcctgacctttc

SEQ ID NO: 107664 - DNA, 209 bp, Homo sapiens
accggcgcaaggggcggatcggctaaggggagagagcccgggagccctgcacaaatgcggaactgcgacggatggcagcaaacccgcagggaagggatggttatttaataaatgctgccagaaattccagcccaggtgggaaaagaaagaaataagttccctgtttcacacctaacacaaaagtacataccgactggaggcgggcttaa

SEQ ID NO: 107665 - DNA, 344 bp, Homo sapiens
gcaggtgaggaaattcaggcccgtgctgttaaattacttgcccaaggtcacaggtctttgctagtggcaaagccaaaaccgaaacgggagactcttgaattcttagaagcctcattcaccaagagaaggttaactgtgtctcatgaaccctatatgggaaaattggggtgtgtaggacacattttagatttccttcaggagtggttaccttttttaaaaatgcacacataaagaagtgtcctttaaacagttggctgtgggggtaatgacttattcccaaagatacaaaataagcaaggctactttggatgttaaatgaacagggaattatttaaaaaaggaaa

SEQ ID NO: 107666 - DNA, 500 bp, Homo sapiens
cagagattctatgctcttaaccattatgtggtgctgtgtgatttagtgacaggtctagggtactttaaggtggctatgtagcatagctgggatttgaacctacgtcttctgactgtggtctaagattaaagttgtccaagtcattgcctttgtgatctagaccacctgttgcacaggtgcatgaatagtttgcatttgatataggctaaggttcagttccaaaaaactcccttttttcttaattttttcattgtttagagtggtgctgtccaatgatgtaggtactgtgtgtggttatgagcacttgagatgtggctagtgtaaatgaagaactaaattttaattaaatagatctgtgtagccgatggccaccatattggatgggcacacgtttggagaatttgaatagcctctgcttcttatatcagtttgtataaatttgggtggcatttctaatgtacttgagcttttatcagttaggatgacccattcttgctctc

SEQ ID NO: 107667 - DNA, 413 bp, Homo sapiens
ccacgcctttatctcccctcccagatggggtccccaaagcagagctggggctttgcttcctccctggccctccacggcctccagaaaacagcccacacctgtcagcactcaaggcccctggagacctgtgcctggctcttctttgccccatgatccctcctccctggaatagccttcctgaccctaggctgttcaattcccacttgtcctccagggacccattagaacatcacctccaccaggaagccctccctggtcctgtgtctgggctcacggcctccctgggctctatcagaattctcatccccttgcattatacattataatgggctattgattcatcatttcttgaggtcagggatggtgggtcctcagggagagatttttaagtgagggaaggaaacaagtaaagg

SEQ ID NO: 107668 - DNA, 691 bp, Homo sapiens
tgtatatatatgtatataaatttcccagaaaaatactgaaccttcctacatgtgatatatttggatatttcctattctaatttatgtatttaaaaagctgctgtgactcactgatggctaacagccagtagtgagaaaaaacactgaactaaaacgcgtgagcacctagaacagtgactgatcacttagcaaacgcagagttaagagtagtgattgtttttaaaccaagagagaaagttgactaaatacacaatttcagtaaggacagcattatctttattgttattgctctagatgtatccagtaagtgagaggtaaaaagtattcatctgcaatctgatggtcagtggtaagctgctagagaaatttctgtaggtgggttggggtagtggattaagaaataaatgtgaaataaggaagtaagagtgagtttagtaaactcaagaagcttgagagaaaaagatagggccatttgctagaggattaagggtttttcttttctttcttgtccccttcctaccctccttctctctctttcttagactggagagactagactctgggaaagtttaagtgaataagagaagattgaagaagcagacgagattgataaattggggaatgggaaagagaatagagtctaaactctggtccataatgtcaacatttaggggtagattattaaaattgt

SEQ ID NO: 107669 - DNA, 759 bp, Homo sapiens
cagtgagccgagatcatgccactgcactccagcctgggcgacagagagagactccgtctcaaaacaaacaaacaagcaaacaaaaacacacatactctttgaccagcatctccagttcccagaatgtttcctgcagatatacgtgtgtgtggagaaccgctgtgcagcactgtctggaagggcgagagccgtttaggtgggttaccatgcagaacaaaacaagcacagcagctaagaagatgaagttttcatttgctgaggtacaccaatctccaagatatgttaagtaaagcaaagcagaatgaagaatgttcgtcgtaatggatccatctctactcaaagaaaagacacacaaatctaggcttgtctatgattattgaaaagggatgcatacaaattgggactcgtgtgtagtttctgtagagtggacggctgggtgcacaggctgcaggtctctcctgaatcttttgaaaggggttgaatgcgttgttgttcagcaggtgggtctttggaaggtggacagttgtgtgtgcacaacacagagcagggacagggacgtggggctggcggctctgggagctgagaacctttccagcaagcaagcagctggcctttggctgaaatgacttagtcaattaaaacaacttgtggtcttaaaaaataaaaaggccaggcatggtggttcacgcctctaatcccagcactttgggaggccaaggcaggtggatcacctgaggtcaggagttcaagaccagcctg

SEQ ID NO: 107670 - DNA, 556 bp, Homo sapiens
agtgaatctttggtaggaagacagttcctagctacctttttaacattttgtttgatatattcacacctttatttgactctccaaggtgttgagaacagacaagccatatattagcaattgaggaaagaggaacacctaagtgaaccctggctgtccagggctgctgaagcattagagtggttttcaaactttaacaggcgtaagaattatctggagggcttgttaaacagcttcctgggttccacccacccctagaatttctgattcagcaggtctgtgttggggcctgacagtttgcatttgcaacaagtttccaggtgatgctgctgctgctgctctggatctcacacttttgaggcactgatagaaagtaatgatcagtctctgcagtagaccaagtatgaattcataatgcttactataattcctgaatttattcttcccttataaacaaaaaaacccttaaaaggattatatagtagggctaacctggtttgctttagcctatgtgaaatcaaatgtaatttaagctttaattgcaaaacagctaataagt

SEQ ID NO: 107671 - DNA, 221 bp, Homo sapiens
caaaaaaaaacttccattctttatcttggactggtagactaattttaggtgtgaacatttaaaaatggtaatctgacataaaaaattctaagtatcattgacctacatgagggctctaaaatgtgatctaaaataatcacactcaagttaaaagcaacaattcctttagaattaaaatgctttattgttgaacattagcaatgaatggaaggaagaatgca

SEQ ID NO: 107672 - DNA, 751 bp, Homo sapiens
cagttgataaagcagtggtagagtttgagaggattgactacaattttgagagacactgtgctgtgggtaaaatgttacgaaacagcatctcatgctacagagaaacattttgtgaaaggaagagttaactgatacagcaaacttcactgcggtattatttaagaaacactacagccaccccaaactggacttctaagcagcacaggtgcctctgcactctctcgttattctccagggttctcccactgacactccagtcaaatcttagctatttatctgttgcctcggtctttttttgttgagagtggactagcaccaggcctctcttgtcagccatctttctgatgtcactcctaaacataacttttagaaaaccaaataccgcatgttctcacttacaagtggaagctaaatgatgagaatacatggccacatctggggaacaacacacactgggacttttcagagagtggaggctgggaggagggagaggatcagaaaaaacaaatgggtactaggcttaatacgtgggtgatgaaataatctgtaaaacaaacccccatgacacaagtttacctatgtaacaaatctgcacatgtacccctgaccttaaaagttaaaaagaaatttttaagaaaattgacgttgtgaaggcaaacaaacaaacataacttttatgtgcactgggaaaccaaaaaatttatgtgacttacattattgcgatattctcattattgcagtggtctggaac

SEQ ID NO: 107673 - DNA, 380 bp, Homo sapiens
gctaatattataaaactctcagacataaacataggtgagcccagtgccatgacacatgcctgtaatcccagctcctcagggggctgagggggaagctcccttgagtccaggaatttgagaccagcctgggcaacatagcaagactctgtctctaaaaaacaaaaaggagaaataaacatagatgtataaatcttcatagctgtggattgggtaatggattcttagatatgacatctaaagcacaagcaagctaagaaaaaatagttaaacttcatcaggccagccatggaggctcactcctgtaatcccaacacgttgggaggccaagacgagaagattgcttgagctcaggagtttgagaccagcctgggcaacatagc

SEQ ID NO: 107674 - DNA, 416 bp, Homo sapiens
ctaatgttacaacaaagaaaaattcaaggatagtaatcgagtctaattccattcacagaaaaacggaattcttgctttggctattcacatgaagttggttgcagtcccgggaacagcacagccacaatgaacttgtacatgctctgtaaaaatgctcagcctggtacccttgttgtggcacttctcacactctgaattgaattagtgttctccagtttccctaactttgctgttacaactcagagaatggacaccgtctaagtgctcacaggataggcatagtgtctggttcataatgggcattcgggaaatgtttattccttatttaaattaatgccttgataatcaaatccaagaatgaagaagtgaatgaggaaatgaattcctaagtatgtaaaatctgcattcctctggag

SEQ ID NO: 107675 - DNA, 484 bp, Homo sapiens
gcctcggcctccccaagtgttgcaattacaggtgtgagccaccgtgcccagcctaccacaggttattcctataaccaatatcctcacatcctcagagtgacacagcagaatgaattctgggaacacacgcttcttctttttttttttttttgtagctatcccagaaggggaaggaaaaagaaaaaactgcagtggacttggaaaacacactcttggctctgagtcctgatatcactgcttaatatcaatatgattcttgaaaaaagtcactgtgtttctaagcctcagatccttatttgtaatatagtgacaatcccacattaactccaaggtgattgtgaggaacaaaaaagaaaatgggggccaggtgcggtggctcacgcctgtgatcccagcactttgagaggcagaggagggtggatcacctgaggtcaggagttcgagaccagcctggtcaatacggcaaaaccctgtctctactaaa

SEQ ID NO: 107676 - DNA, 238 bp, Homo sapiens
cacacattgctgcaggttgttgatagtattaaaacatggtttgacctgggaaaaggccattagggaaaaaatgtgaaggatggaggtttgacacccacttctgtgcacacacacacatatacacacatacacacatacatagccacatgcatacacacacacacacacacacacacacacacaagatgtgcttgggctgtatgccttccttgagaacagcttggtttcattcgctaca

SEQ ID NO: 107677 - DNA, 801 bp, Homo sapiens
cctaaacaaactgaagcatgaacagaaaatcaaatactgcacgttctcacaggtgagagctaaatattgaggacatatggacacaaagaagggaataagacattggggcctaactgagagtggagaatgagacgagagtgaggattgaaaaactacatatcaggtattacgatgattatctaggtgtcagttttatctgtataccaaagccacatgatatgcaatttacccatgtaacaaacctacacatgtatcccttgagtaaaaaataaaagttggaaaaaaagaagaaaaatttaaaaatacaaaaataaagctgctattatgaaaatgatctaacaagcaattacaaatgctttgtaaacaaattaagaaatgaaaaatcttaacagtgaattggaagtttaaaaaaattcacctgaaaattacagagctgaaatatatgataataataacaaaactcacttgataaactcagtagtggagtgagaatgatagaagataaattaagtgaactcaagtcctgaacaaaaaaacttacctattctgaacagcaaggaggaaataaaaaataaacaaaggcccttgaaccaatgggacagtaacaaatgaattaacattaatatcattggaatcccaatgaacagtgaagcaagatcaaaatagtccttaaagaaataatagatgaaaacatgtcaaatttgtcaaatgagaatagccttcagaatcaagaagcagaacacacctaatatataacaaacaggacacatcataattaaaactctgaaaaataagccccta

SEQ ID NO: 107678 - DNA, 409 bp, Homo sapiens
ctcatgtaaccgtaaaatcagctatgctttttattaagtaacagcaactaggtagcaatcaacagcaatcttcttagaaaataattttatgctaccaactaaagttccaatttcacagcaatagagctaaagctaaagggaaaacctcaggaataagtggcctgaacatgaggaaaatgtaatagaagaaagcaaagaataagaggaaactggatctgagttatttatcgaagcacattaaagaacaagcgtgagccaccacacccggccgaattttggagcactttggatttcagatgttcagatttggggtgctcaacatgtactgtagaacttttttcagtttctctttctgtatctcatataaacattttactgatcttttactcagtgtaattttacacttttt

SEQ ID NO: 107679 - DNA, 268 bp, Homo sapiens
tgttaacgttcttactgttactatttagctttagaaatatacctggttctctgtcctgattctgccacttgctggcactgttaccttcaaagaatggggaaaagtgactttttccccattctgtgaagttaattgttgattagccagtagtataggaacatactccctgagctgaaaaatatttccggggaatccagatccagtactcttccgtggccatcacctgcaccccatccctctcttcaaaggtgacaaaggcacaaatgag

SEQ ID NO: 107680 - DNA, 147 bp, Homo sapiens
gtttatattgcctggatgcctgacttggaagttcatggtacagttcagggccttgaaacagggcagggcttgagccccaactgtgcacaaagcactgggctggatcttctgagacagaggagccttctctccccttcctgcctccag

SEQ ID NO: 107681 - DNA, 206 bp, Homo sapiens
aaggaattgtgcagagctgggtgctgtggctgagctaaggggtgaggtgggatgtgatatagaaccacggctgccaggagaaaaacagattgggggagctaggggtggaattcacatgtaatttgagccttcttgtgtttttccagaaaagattttttcccccataaactctcttagttggggcctaagtatttattcctaggtat

SEQ ID NO: 107682 - DNA, 263 bp, Homo sapiens
atctcctgacctcgtgatgatctgcctgcctcggcctcccaaagtgcgtgagccaccgcgcccagccataaattttaatgttctatttcatcacctagggatatattgctttacagaggaaaacaatatattgagcaatatgttatgaaaatgatttgacttaataatccagagctatttagtctcctacagtcatacagcattatagaggaaacacttccaattagccattttttcaaatgacatttactgaaggccattct

SEQ ID NO: 107683 - DNA, 325 bp, Homo sapiens
ggtttctgtggaactgcacttggtctaacacaggggcatattaatgaggactccatgttcaacaaaacataacctcccaataacaacacagctgaggcaagagaaatttcagtatttacatacacatgttcaggaggtcaccacttcctgttcctcaaaactccctcaaagtctgtctctccccaaagaaacaagcatatacgccactctctacaaatttatcggagtaattaaaataaatataaaatacttttaaaagcttttatgtgtccctgaaaaaccacttaattcttaacatagtctcctgccctagagaaacaaatca

SEQ ID NO: 107684 - DNA, 759 bp, Homo sapiens
ccaagggggagcgaggctgggggaccgggtcgcggagacccggcttcgcacaccttttggaagactcagggagaagcgggggccgccttcggggggaaaggcgggactggggagcccacaggccatggctcctcccacaggatccccaggccggaggcgggatccccccatgatcctcccgtggcccccgcacaatctggggagatgcggagctgcccagagagggctctggggcgacagtcactgcgcagggacaggacaggactcccggagtcccagctgccggcccagccccaccctgcggccgagaggaccgagggccgagctgctccaggggaactcgggtcccagaccccggagtcgcagcggacaggcccgggtcccgccacagccagatccggctggttccaccagctcctcctccggtctcgggacgtccggccccgcacactcagcatttccggcttccgggtgtcccggcgtcctcccctgggcctgctcacgtcgcagaggggcggcgacggggattagaggggaggagggcctgcgcgagcagcaaagaccccaaaccccaaaaaacaaagaaaccgccagaaactgaagcttccacagcccgccacgtcccccggctacggctacgctcctgattggatagttagtacggcccctagtgcccctgattggataccgcttcaggtcccgccccctggggttagaaagacaggagacccgagaagacacttggctgcgtggagccca

SEQ ID NO: 107685 - DNA, 1421 bp, Homo sapiens
agtgtcccgaaagacttacaaattcagatctgacttgttcatttgtgtaggggagagttggtggcacacatcctctctgtcactgtaagtatgttccaaatgtcacattaggtccactggcacgtgtaagccctgtctggcatttgcctggtccctgcaggcatttgggttggcagtaaactttcttttctaacagatttctggaaatgtttacatgtagcatataatagaataatagaaccacagaacttccacagtaaagccttccttcttttatgttccaaaagctaaaatgtactaacaacctccaaaaggcactatgacattggagtttaaactttgtggagcaggactcaaagctggacttagctgcttgctaactttgaccttgagtgaagagttagcagatgatttaaagtgtaaagtagaaagaattcatgctggttagcccattaaatacccgttaattaagctctccaaaaacgccattcaaaaatgtatatgataatcaaatatttattgcaatgtttcttaaaatagtgaaaaattagaaaacattatagggggctagtgttaaatcatggtgtaaccagaaatgaaacattatgcaaccataaaaaggagttctgaagagtagttcccggcatgatataatgtgaaaaaaagcaaaatacgaaattgtgcaattctaattttgcaaaaactttcagcgtacacgactatcactgtataaagtcacaaagtaggaatggtgattgtatcttggagtgatgagattataagtgatttttaattttcttcactatgctttactgcaattaaacatttacaattcaattttatttaacaaaaatatataaaacttctcaaatggagtaacttcagtaccagacatcctcaacctgactgctctggaggttattgtgcagagcaatctttgaccatatggtcacagatccagaagccagacgtctgtggggctttgctcctgagactgtgacctttgattcctgcactcctcctcttgccatctgacgccggtctgcgcctgtgactgagtgaaaatcgtcataactgtactcggaggttaactctggcatgactgggatggaatcccaggcaacatgctggaggcaggaaagaaggccagccggcaagtcagaaccaaacaccctggacggcacctttccttacaaatgcggttcacaggacccttggggatcctctgcgcacactgaggcaagcagcaatggaagaaattatcttccactcccttcttgttgaaaatgtctgttttccagaaatgaattacagtaatagattatgaaaattgtttccattgcctacataacacagcagggaattctaaaatttcaaaacatgtaatatactcaacctgtgcttgagactgtagggtatta

SEQ ID NO: 107686 - DNA, 168 bp, Homo sapiens
aatgaaaatggcatttgttccagaggcaagagtagcctccaaattagtagaatgccagatggagatgtggggtggggtgggatggggagaaaggtgttgaagcaactcaatcatgctactactaatagttcctcttgggttgagacttaggatggtattaaattcaat

SEQ ID NO: 107687 - DNA, 314 bp, Homo sapiens
gggtggagtttatggcaaatcccaagaggaaagtcacaacatagatacgagagttctggggtcaggcggggccatctgcagcagataattgtactctgtttgaaaaagcagctcctgggacgctatggggtcccggcagagacagagcttctgacgagggacgcgaggtgatggtgctgcccagaagtgaccatcatgaggcctgagacccagtaggtcctgagatggggtcagagggtgcatgttggccacatgcaggtggctcggactcctgtcccctctacccctgtcgcaccgtgtctgtgtctgctcac

SEQ ID NO: 107688 - DNA, 534 bp, Homo sapiens
ggaagggcaggaggcacacctgccaggaggcacacgacctgccgcccaaggcaccaggaagggggcggggcaggcacaggcgctggagacacacaggccctgccacccggtggctgccgccgtgagtgggagtctggatgggcaccgggcaggcggggggcacgttcccggcctagggtgggaccagtgctaaggagactggagaaaagcacagacagggtttgtgagtgagccctaaggcagggacgggagtagcaggggacagatttttcgttcattcaaaaaggtttctggagggctacctgtgccaggcactgtccgaggcactggggatactgcaacacccagacgcctccccttaaggatctgtcaggtcagggaaaagcagggcggggagacaggaaactaactgcttgcacaggggcgtcagggaaggcctcctgccaaggcaactctgcggcagaggaggtgcagtgctgtgtcaacctcctggggacttgctgaatggcaggatgtggggtgagggcaagggcc

SEQ ID NO: 107689 - DNA, 265 bp, Homo sapiens
aatagaaactgggtttggccaggctggtctcgaactcctgacctcaggtgatccacctgcctcggcctcccaaagtgctgggattacaggtgtgaaccaccatgcccggcccgggaagatgctttttatatcaaaaccacagcattttaatcctattttacagcagaatgtttccaagcttaatttactttgtagtattttgctaatcttctcttgtaaatttccttaactgtctccttatcagactgacttacttttcactgta

SEQ ID NO: 107690 - DNA, 523 bp, Homo sapiens
taactatccaaagaaaggctataaccagaggtgaagaacctggaaagccatgctagagtttggaattgattctgtggcaaaaaggagtgattactcctgagaagtagaaggaacagtgaaatatgacacatctgtagctgctgaatctggtagtaataaggctatgctgcccattttttctagtattttacagcaatctcattttcccaattatttaaatgggttcttatctcttggtatagtatatagatttattaagtaaaagaatataactagatttttaagtcatccaatgtgacacttcctgctaatagcctattttaatcaagttacattttttatatttacagatacatctaattttattcctatcactttacttcacactttccactttttgaggtttttccttttattctcctcttccttcttgtcctcttttgctttgtgttttctgtttctctttcccccatctctgatggaaagttacacatcatctccctccattcatccctccctccct

SEQ ID NO: 107691 - DNA, 712 bp, Homo sapiens
tgttttttagagacagggtcttgctctgtcacccaggctgaagtgaatagtatgatcgaactctggggctcaagcaattatcatgcctcagctctgggattacaggtgtgcaccactgtgcccggcccttatttagcattcatatcgcctgctatgtaccaggcactgtacttaacacttgacagatattttaactcacataattctcatggaaaccctgagagatagcgtattagtcagttttctttttgctgtgatgttgctatgtaacaacccctgtcccccgcccccaaactcagtggcttacaacagcgagcactgattcctcactcacgggtctgtgggttggccgtggccttgccgattggctgcaaggagctgggctttatcagctgcagttgaactccgatttctttcaagtgtcctctcttttaggaaccaaccagagtatgttcactcactcagtgggtggcagaggcacagagcacaggcagagccaatgcatttgcagcttctgcttgtgacacatgcccacattccctcagccaagcaagtcacatggctaagcccgacactgtgagccgggaagttgcatgccacaaggagggggcagacaattcttctaaagagagggaaaggtgagtcagaaacaataacctaatctcccgcaggtcggtgctcttattacccacattttacagatgggggactg

SEQ ID NO: 107692 - DNA, 435 bp, Homo sapiens
gataagaaacagctggaacagttttctatgaattataaatatgtttatgtcccattggtcttcgagcattattgttaggatatggaatggcaagtaagaaaacactgagggaaagagggtcatggtaccgggagtgtggaaaacagtggccacatcccactcacccagttcttatgatattttcagtgattttatgaccaactcctaattggcttagactgatttttggagaaccagataaataagctccaagttatctctacaaacactcttttccaaatagattagaaaacctgttcttcaaaacaagccatggacaaagtgccttagttgaattagataaattgtactagtcaatgaatccatgcactaaaagaacacagcatgtttttaaaggaattaaatcttgcttttcctgatgtcatctgaggacat

SEQ ID NO: 107693 - DNA, 320 bp, Homo sapiens
agtccccacagtaggtcacctgtaagctgggaaagagagaagctggtagtggctcagtctgagtccaaaagcctcaaaaccaaggaagctgacagtgcagcctttagtctgtggctgaaggctgagagcccctggcaaaccactggtgcaagtcccagagtccagaggccaaagaacttggagtctgatgtctaagaacaagaggagaagaaagaaatatccagcacaggaaaaagaaaggagccagaagacccagtaaacaaggttatcttaccttctgcctactttgttctagccacgctgacagctgattggatggt

SEQ ID NO: 107694 - DNA, 361 bp, Homo sapiens
acatataccatatattaactaacctgccgtgcgatctggggcagcacctcataatcaaatccattaggatttcttcagcaaatctgggaatattacattaatgtgggattaatgtttacactaatgtgggataaagactattcataggttcacatcagctcatatcaggctttgcctaaaaattaccaaaaaaaccttgagttttgagagctttttagcattgtggattgtgaaccatgggtgttagttttgtccctcatcaagtaacggcttcttgagaacaggtgttgtgtatgcttcttcctatgatacctagtacagtgttggacacaagagtgctcagtgattaactgcctgataa

SEQ ID NO: 107695 - DNA, 917 bp, Homo sapiens
gagtcggtaaatatttgagtgaccaccgagtatcaatcagccaccttattaagctttgtagggggagactgaggcttgattttgcccttaaggatttaaaaatctgctggtgttacacaatgctttgagacaggttaatgctgcccccggggggtctggggagatggttctggccgtcacagatgtggtaggaatgggtagagatggtggaaaggagtggagagaagtatggatggtagaagcttactttccacacatcctatcttcatttcttgattcaagtgattctcttctgtaccttggacagctcagagcatgggcctcagtttccccatctgccaagaagatttatattggagtgcctctcaaattttttacccctaaccctctctgatgaatttgttattcttctcactatcatttggatgtttgaagccccacagacacttattttctccatttggattttgccacgtgcaaagaccagccagagagatgaaaatgggtaggataaagtcttatgctaggtaatagacttagaataaaaggactagaaattgtggaaagagaaggtggaatcattttgtagcagagtgtgacatgaaggacgctcagaatcaggtttctcatagataacgttttgtctgtgcatagcatttgttaaaaaaaaaaaaaaagtcggccgggcgcggtggctcaggcctgtaatcccagcactttgggaggctgagacgggcggatcacgaggtcaggagatgagaccatcgtggctaacacggtgaaaccccatctctactaaaaatacaaaaaagtatccgggcgtggtgttggccgcctatagtcccaggtactcgggaggctgaggcagaagaattgcttaaacccgggagacggaggttgcagtgagccgagatcgt

SEQ ID NO: 107696 - DNA, 265 bp, Homo sapiens
gccaactccagaggcctgtccaactccagaggcctgcccaactccagaggcctgtatgactccaaagtcagtctttctattaaacccaggctgcctctcactagacctaaataaactcttcttgctttttaaccaatttatggataaggtaaaaattacatacctaattctgaattctgggcttggttccaaagtggaaattcttcagctgggcgcggtggatgctgcctgtaatcccagcactttggggggctgaggcgggagg

SEQ ID NO: 107697 - DNA, 175 bp, Homo sapiens
aggttccagaagggagaattcacctctttattcctggaaggaataagcggtctagtattcttattagactctatttctcttgttctaacatctgacattatcagcctagtttagtcgctctcaatgtttgttgcatatatattgcatggaaagtttatgaaaaagaatctctttg

SEQ ID NO: 107698 - DNA, 382 bp, Homo sapiens
aagtcagtactccatactggaaaaagccccctgcctgcaattcagacaacctgggttcttgcctcagttcttctacctcctggcttggggatcttgggcaaatttctcaacttccacttcctgatctgtaaatggaatgactcaatgatttttttttttttttttttgagatggagtttcgctctttttgcccaggctgcttccgaaaaatcacctgaggctcaggattttgatctccagcctggccacctgtgtgaatctcccgtctctactataattacaaaaaattagctgggcgtggtgacacttgcctgtcacccctgctacgggggaggctgaggcagggaattcgcctgaccctggaaggcggaggctggattga

SEQ ID NO: 107699 - DNA, 368 bp, Homo sapiens
ttaggcagggtcttgctctgtagctcaggctggagtgcactggtgcaatcttggctcactgcagcctctgcctcccgggtcccggttcaagcaattctcttgcctcagcctcttgagtagctgggattacaggaacgcaccactatgcccagctaacttttgtatttttagtagagacagggtttcaccacgttggccagactggtcttgaattatttaccttttacaatagttcaggactgtgacaggagatatgggggaaaatataccttcatcttcctattttgttccagactgattgtctgcctgttctccataaacttcttccctctccccactcccagtcacccagattggggaactgacct

SEQ ID NO: 107700 - DNA, 6628 bp, Homo sapiens
  misc_feature (4233)..(4233): n is a, c, g, or t
ggaagtgggcctggcaccttcccggcctgccgcaggatggggcagctgtgctggctgccgctgctggcaccgctcctgttgctgcgaccgccaggggtccagtccgccggccccatccgggccttcgtggtgccccacagccacatggacgtgggctgggtctacactgtgcaggaaagcatgcgggcgtacgccgccaatgtctacacctcagtggtggaagagctggcccgcggccagcagcgccggttcatcgctgtggagcaggagtttttccggctgtggtgggatggcgtcgcctcggaccagcagaaataccaggtccgccagctcctggaggaaggacgcctggaatttgtcatcggaggccaggtcatgcatgacgaggctgtgacgcaccttgatgaccagatcctgcagctcacagaaggacacgggtttctctatgaaacatttgggatccggccacagttctcctggcacgttgacccgtttggcgcctctgccacgacgcccaccctatttgcgctggcgggcttcaatgcccacctcggctcccggatcgactacgacctgaaggcagccatgcaggaggcccgggggctgcagttcgtgtggcgagggtccccatccctctcagagcggcaggaaatcttcacgcacatcatggaccagtacagctactgcaccccgtcccacatccctttctccaacaggtcaggattttactggaatggcgtggctgtcttccccaagcctcccccagatggggtgtaccccaacatgagtgagcctgtcaccccagccaacatcaacctctatgccgaggccctggtggccaacgtgaagcagagggccgcctggttccggacaccgcacgtcctctggccctggggatgtgacaagcagttcttcaatgcctcggtgcagtttgccaacatggacccgctgctggaccacatcaacagccatgctgccgagctcggtgtctcggtgcagtatgccacgctgggcgactacttccgtgccctgcacgctctcaatgtcacctggcgtgtccgcgaccaccacgacttcctgccctattccacagaaccattccaggcctggacgggcttctacacgtcccgcagctcactgaaggggctggcccggcgagccagcgccttgttgtatgccggggagtccatgttcacacgctacctgtggccggccccccgtgggcatctggaccccacctgggccctgcagcagctccagcagcttcgctgggccgtctccgaggtccagcaccatgatgccatcactgggactgagtcccccaaggtgagagacatgtacgcaacgcacctggcctcggggatgctgggcatgcgcaagctgatggcctccatcgtcctagatgagctccagccccaggcacccatggcggccagctccgatgcaggacctgcaggacattttgcctcggtctacaacccgctggcctggacggtcaccaccatcgtcaccctgactgttggtttccctggagtccgcgtcacagatgaggcgggccacccagtgccctcgcagatccagaactcaacagagaccccatctgcgtatgacctgcttattctgaccacaatcccaggcctcagttaccggcactacaacatcagacccactgcaggggcccaagagggcacccaggagccggctgccactgtggcgagcacccttcaatttggccgcaggctgaggagacgcaccagccatgcgggcaggtacttggtgcctgtggcaaacgactgctacattgtgctgctcgaccaggataccaacctgatgcacagcatctgggagagacagagtaaccgaacggtgcgcgtgacccaggaattcctggagtaccacgtcaacggggatgtgaaacagggccccatttccgataactacctgttcacaccgggcaaggccgcggtgcctgcgtgggaagctgtggaaatggagattgtggcgggacagcttgtgactgagatccggcagtacttctacaggaacatgacagcacagaattacacgtatgcaatccgctcccggctcacccatgtgccgcagggccatgacggggagctgctctgccaccggatagagcaggagtaccaagccggccccctggagctgaaccgtgaggctgtcctgaggaccagcaccaacctaaacagccagcaggtcatctactcagacaacaacggctaccagatgcagcggaggccctacgtttcctatgtgaacaacagcatcgcccggaattactaccccatggttcagtcggccttcatggaggatggcaaaagcaggcttgtgttgctgtcggagcgggcacatggcatctccagccaagggaatgggcaggtggaggtcatgctccaccggcggctgtggaacaacttcgactgggacctgggctacaacctcacgctgaacgacacctcagtcgtccacccagtgctctggcttctgctgggatcctggtccctcaccactgccctgcgccagaggagcgcactggcgctgcagcacaggcccgtggtgctgttcggagacctcgctgggactgcgccgaagctcccaggaccccagcagcaagaggccgtgacgctgcccccgaatcttcacctgcagatcctgagcatccctggctggcgctacagctccaaccacacggagcactctcagaatctccggaaaggccatcgaggggaagcccaggctgacctccgccgtgtcctgctgcggctctaccacctgtatgaagtgggcgaggacccagtcctgtctcagccagtaacagtgaatctggaggtgaacttccccacccccatccagaccataagccagggaagcaaaccctagatgaagccccaagaaactgccttggcaaagagatccacgagggcttcctcccaaatggacgctggtatgggccccaccccgcccttcttcatggtcttctgggtttgtcaggtattacaactggcctggttttttagggttttttgtgtatatgtgagacaggatctcactctgttgcccagtctggggtgcagtggcacaatctcagctcactgcaacctctgcctccctggctcaagtgatcctcccacctcaacctcccaagtaactgggatcacaggggcgcgccaccacgatggctaagtttttttttttttttttgagaccgagtttcgctctcgtcccccaggctggagtgcaatggtgcgctctcagctggctgcaacctccatctcccaggttcaagtgattctcctgcctcagcctcccgagtagctgggattacaggcatgtgccaccacgcccggctaatttttttgtacttttagtagagacagggtttctccatgttggtcaggctggtcacgaacccctgacttcaggtgatccacctgcctcggcctcgcaaagtgctgggattacaggcgtgagccaccaagcctggcctagtttttttatttttagtagagacacggtcttgctgtgttgctcaggctggtctcgaacgtctggcctcaagcaatctgcctgtcttagcctcctgaagtgctgggattacaggcgtgagtggcctgtattttctttcttatttattctgtggtaaaacttttaaaacacagacaacatctgtgtaatccaaaaacaaaacagattccccatagagttgctttgaaaggtgacttagagtcagacaatccagggtccacacccaggcccctctacgggggcatctccggcaccccatgcctctgggcctcagtttccccccatgtaaaatggggagaggtgagagttctttgcccagaaggttgctgagaggccctggcactaaggggcctcgtgcagtgtcagggcccccaggcctcgtccccttccaggttcccctcttggctgatgttgccctctcagctctactatcaggcgaggcttccgccacctggcctgcccacgctccctccccagaaggcatgacctgagccgcctcatttctttcccagtttgcattctttctatttcatttcctgctcatggagaatttctgtgaatctctgtgtttctgccttgggcctccttcgacatctgagtcttcaggggaatccagagaagccccagtaccttttcgccatgatgtcttactgggccacccacctcctctttcatgatcctcgccanggaggatcctttcctcacggtccctggcctgcctgagagcaggtctaggccatggcgggtaccagtgcccagcacagggccagcctgccctgggaagcaaggaggccggcgtgggacctggaagttggtcatctgatgctcccccgtttcacagatggaagcaccaaggccctgagacaaggagacggttgggatggacaccatgactccctgcccaacgtggacggtggtggggtggaaagaccattgagttaggaacgcagtgagtttggctgcaagtcacaaaacacctaacagatgtgcttagaacagaggacagagtgttttctcaccgaacaggcatgtccgatggaccccaagcgctgtcaccgtgggcccgatcactgtcgtcttcccgccatcgccggcagactggcttttgtcttttgccgtctgcttgtttgcggtcacaagatggcacaggcctccctcatgagcaaatttcaaggcagggtggggctcggcagtagtggccagaaaggccttgccctagcgtggctctctccctccgtcagcacacagaagcttctccaagagccacccccacccctcctgctccacagacttttccagacccctaagggcctcctgcctcccctaggtgtaagggaggctgggacaaggcctattgggaaagggggatggggtaactgtggctggcttcctccctggactgggcacggggccacctgagcaatgtggggagaggagaactccgcggtggggtgggcagctcaaaatgccacacctcccgggctgctcctccagctcggccacctggtaaagcatgcacctcccgcttcagtgtcctcatctgtaaagtacacggccagtcctgtcctcgcagatgtgctgtgagaagcagatgagggagctgtgtcaggcaccaggggaggacctgggctcctgaggacaccgagttcgtggtgtgtctgccctgctgctgtcttggttctctgctcagctctggaacttggtgcagctcactctccctctgctcctctccctgcaggctgtgctgcaggcgctggggtccgtggtggcagtggaggagcgctcgctcacagggacctgggatttgagcatgctgcaccgctggagctggaggacggggcctggccgccacagaggtgacaccacctctccctcgaggccaccaggaggccccatcatcaccgtccacccaaaggaaatccggacgttctttattcactttcaacagcagtgagccctgggcagatgccccgtccccagggcttcccccaggaactccatgtaacagaacagacccaggacagggaaaagcagtgcggagggatgggactggggagtcagctgctcatctgcaggctaatggcaggaaatggtcatatttggggtttttccctaatttttttaaacaaaaattacattacaagatccaggttcttcccccccacactcaatcaagccagccctctcctcttctgtcacgtaaaggatatttggcacactcatgcgtcattcattcacaaaacacaaacccaggactttctgcctaaggcagaacacaagactcacagcagcaccgaagcgcatctgccgtccgggccctgccaggcttgccaggctgccagtggtaactgtggacctactgcgtgccacgtgttttcatagactcatcccatgctggcaacagccctgcaaggggcttggctctgccacagggcaggagaggaagttgtagcgcctagcgagagttccagccccagacgcccacctgtgcctcagggcaccgcctgccgagcagagaaggcacagcagccgtcagagtccatgagaggtgaaaccacacagcagggatgtccaatatcagaactattaatatcaataaaagtataaccttcccaggtctatgcccaagagaattgaaaacatccatccacacaatacctgtgctcccgcgttcatagcagcattactcaaaagtcaaacggtagcaacaacccaaatgtccatccacagatgaattaagacatgaagtgtgttctgtccatacaatggaatattatttggccataaaaaggaaggaaattctgacgcatgccacagcctgagtgaatcctacaaatattacgctaagtgaaagaagccaatcacgagtttatgtgaaatgtccagaataggcaaatctgtgtatcagagacaaagcacattggtggttgccaggtactggaggaagagagaagaggcatgacagctaacagggacgggctttctttggaagatgatgaaattgtggaatgatggttgcacaactttgtgaatatactagaaaccaatgaattaaaaactttggaagatgaaaaaaaaaaaa

SEQ ID NO: 107701 - DNA, 4194 bp, Homo sapiens
ggaagtgggcctggcaccttcccggcctgccgcaggatggggcagctgtgctggctgccgctgctggcaccgctcctgttgctgcgaccgccaggggtccagtccgccggccccatccgggccttcgtggtgccccacagccacatggacgtgggctgggtctacactgtgcaggaaagcatgcgggcgtacgccgccaatgtctacacctcagtggtggaagagctggcccgcggccagcagcgccggttcatcgctgtggagcaggagtttttccggctgtggtgggatggcgtcgcctcggaccagcagaaataccaggtccgccagctcctggaggaaggacgcctggaatttgtcatcggaggccaggtcatgcatgacgaggctgtgacgcaccttgatgaccagatcctgcagctcacagaaggacacgggtttctctatgaaacatttgggatccggccacagttctcctggcacgttgacccgtttggcgcctctgccacgacgcccaccctatttgcgctggcgggcttcaatgcccacctcggctcccggatcgactacgacctgaaggcagccatgcaggaggcccgggggctgcagttcgtgtggcgagggtccccatccctctcagagcggcaggaaatcttcacgcacatcatggaccagtacagctactgcaccccgtcccacatccctttctccaacaggtcaggattttactggaatggcgtggctgtcttccccaagcctcccccagatggggtgtaccccaacatgagtgagcctgtcaccccagccaacatcaacctctatgccgaggccctggtggccaacgtgaagcagagggccgcctggttccggacaccgcacgtcctctggccctggggatgtgacaagcagttcttcaatgcctcggtgcagtttgccaacatggacccgctgctggaccacatcaacagccatgctgccgagctcggtgtctcggtgcagtatgccacgctgggcgactacttccgtgccctgcacgctctcaatgtcacctggcgtgtccgcgaccaccacgacttcctgccctattccacagaaccattccaggcctggacgggcttctacacgtcccgcagctcactgaaggggctggcccggcgagccagcgccttgttgtatgccggggagtccatgttcacacgctacctgtggccggccccccgtgggcatctggaccccacctgggccctgcagcagctccagcagcttcgctgggccgtctccgaggtccagcaccatgatgccatcactgggactgagtcccccaaggtgagagacatgtacgcaacgcacctggcctcggggatgctgggcatgcgcaagctgatggcctccatcgtcctagatgagctccagccccaggcacccatggcggccagctccgatgcaggacctgcaggacattttgcctcggtctacaacccgctggcctggacggtcaccaccatcgtcaccctgactgttggtttccctggagtccgcgtcacagatgaggcgggccacccagtgccctcgcagatccagaactcaacagagaccccatctgcgtatgacctgcttattctgaccacaatcccaggcctcagttaccggcactacaacatcagacccactgcaggggcccaagagggcacccaggagccggctgccactgtggcgagcacccttcaatttggccgcaggctgaggagacgcaccagccatgcgggcaggtacttggtgcctgtggcaaacgactgctacattgtgctgctcgaccaggataccaacctgatgcacagcatctgggagagacagagtaaccgaacggtgcgcgtgacccaggaattcctggagtaccacgtcaacggggatgtgaaacagggccccatttccgataactacctgttcacaccgggcaaggccgcggtgcctgcgtgggaagctgtggaaatggagattgtggcgggacagcttgtgactgagatccggcagtacttctacaggaacatgacagcacagaattacacgtatgcaatccgctcccggctcacccatgtgccgcagggccatgacggggagctgctctgccaccggatagagcaggagtaccaagccggccccctggagctgaaccgtgaggctgtcctgaggaccagcaccaacctaaacagccagcaggtcatctactcagacaacaacggctaccagatgcagcggaggccctacgtttcctatgtgaacaacagcatcgcccggaattactaccccatggttcagtcggccttcatggaggatggcaaaagcaggcttgtgttgctgtcggagcgggcacatggcatctccagccaagggaatgggcaggtggaggtcatgctccaccggcggctgtggaacaacttcgactgggacctgggctacaacctcacgctgaacgacacctcagtcgtccacccagtgctctggcttctgctgggatcctggtccctcaccactgccctgcgccagaggagcgcactggcgctgcagcacaggcccgtggtgctgttcggagacctcgctgggactgcgccgaagctcccaggaccccagcagcaagaggccgtgacgctgcccccgaatcttcacctgcagatcctgagcatccctggctggcgctacagctccaaccacacggagcactctcagaatctccggaaaggccatcgaggggaagcccaggctgacctccgccgtgtcctgctgcggctctaccacctgtatgaagtgggcgaggacccagtcctgtctcagccagtaacagtgaatctggaggctgtgctgcaggcgctggggtccgtggtggcagtggaggagcgctcgctcacagggacctgggatttgagcatgctgcaccgctggagctggaggacggggcctggccgccacagaggtgacaccacctctccctcgaggccaccaggaggccccatcatcaccgtccacccaaaggaaatccggacgttctttattcactttcaacagcagtgagccctgggcagatgccccgtccccagggcttcccccaggaactccatgtaacagaacagacccaggacagggaaaagcagtgcggagggatgggactggggagtcagctgctcatctgcaggctaatggcaggaaatggtcatatttggggtttttccctaatttttttaaacaaaaattacattacaagatccaggttcttcccccccacactcaatcaagccagccctctcctcttctgtcacgtaaaggatatttggcacactcatgcgtcattcattcacaaaacacaaacccaggactttctgcctaaggcagaacacaagactcacagcagcaccgaagcgcatctgccgtccgggccctgccaggcttgccaggctgccagtggtaactgtggacctactgcgtgccacgtgttttcatagactcatcccatgctggcaacagccctgcaaggggcttggctctgccacagggcaggagaggaagttgtagcgcctagcgagagttccagccccagacgcccacctgtgcctcagggcaccgcctgccgagcagagaaggcacagcagccgtcagagtccatgagaggtgaaaccacacagcagggatgtccaatatcagaactattaatatcaataaaagtataaccttcccaggtctatgcccaagagaattgaaaacatccatccacacaatacctgtgctcccgcgttcatagcagcattactcaaaagtcaaacggtagcaacaacccaaatgtccatccacagatgaattaagacatgaagtgtgttctgtccatacaatggaatattatttggccataaaaaggaaggaaattctgacgcatgccacagcctgagtgaatcctacaaatattacgctaagtgaaagaagccaatcacgagtttatgtgaaatgtccagaataggcaaatctgtgtatcagagacaaagcacattggtggttgccaggtactggaggaagagagaagaggcatgacagctaacagggacgggctttctttggaagatgatgaaattgtggaatgatggttgcacaactttgtgaatatactagaaaccaatgaattaaaaactttggaagatgaaaaaaaaaaaa

SEQ ID NO: 107702 - DNA, 4831 bp, Homo sapiens
  misc_feature (2436)..(2436): n is a, c, g, or t
ggtgtcccatctcatgctggcttggctggctgggccacagattggcccagataactgcagggcctggagaactggggccaggaccctgggtctctgccaatgcctcaaaggcctggcaccagaggccccatttccgataactacctgttcacaccgggcaaggccgcggtgcctgcgtgggaagctgtggaaatggagattgtggcgggacagcttgtgactgagatccggcagtacttctacaggaacatgacagcacagaattacacgtatgcaatccgctcccggctcacccatgtgccgcagggccatgacggggagctgctctgccaccggatagagcaggagtaccaagccggccccctggagctgaaccgtgaggctgtcctgaggaccagcaccaacctaaacagccagcaggtcatctactcagacaacaacggctaccagatgcagcggaggccctacgtttcctatgtgaacaacagcatcgcccggaattactaccccatggttcagtcggccttcatggaggatggcaaaagcaggcttgtgttgctgtcggagcgggcacatggcatctccagccaagggaatgggcaggtggaggtcatgctccaccggcggctgtggaacaacttcgactgggacctgggctacaacctcacgctgaacgacacctcagtcgtccacccagtgctctggcttctgctgggatcctggtccctcaccactgccctgcgccagaggagcgcactggcgctgcagcacaggcccgtggtgctgttcggagacctcgctgggactgcgccgaagctcccaggaccccagcagcaagaggccgtgacgctgcccccgaatcttcacctgcagatcctgagcatccctggctggcgctacagctccaaccacacggagcactctcagaatctccggaaaggccatcgaggggaagcccaggctgacctccgccgtgtcctgctgcggctctaccacctgtatgaagtgggcgaggacccagtcctgtctcagccagtaacagtgaatctggaggtgaacttccccacccccatccagaccataagccagggaagcaaaccctagatgaagccccaagaaactgccttggcaaagagatccacgagggcttcctcccaaatggacgctggtatgggccccaccccgcccttcttcatggtcttctgggtttgtcaggtattacaactggcctggttttttagggttttttgtgtatatgtgagacaggatctcactctgttgcccagtctggggtgcagtggcacaatctcagctcactgcaacctctgcctccctggctcaagtgatcctcccacctcaacctcccaagtaactgggatcacaggggcgcgccaccacgatggctaagtttttttttttttttttgagaccgagtttcgctctcgtcccccaggctggagtgcaatggtgcgctctcagctggctgcaacctccatctcccaggttcaagtgattctcctgcctcagcctcccgagtagctgggattacaggcatgtgccaccacgcccggctaatttttttgtacttttagtagagacagggtttctccatgttggtcaggctggtcacgaacccctgacttcaggtgatccacctgcctcggcctcgcaaagtgctgggattacaggcgtgagccaccaagcctggcctagtttttttatttttagtagagacacggtcttgctgtgttgctcaggctggtctcgaacgtctggcctcaagcaatctgcctgtcttagcctcctgaagtgctgggattacaggcgtgagtggcctgtattttctttcttatttattctgtggtaaaacttttaaaacacagacaacatctgtgtaatccaaaaacaaaacagattccccatagagttgctttgaaaggtgacttagagtcagacaatccagggtccacacccaggcccctctacgggggcatctccggcaccccatgcctctgggcctcagtttccccccatgtaaaatggggagaggtgagagttctttgcccagaaggttgctgagaggccctggcactaaggggcctcgtgcagtgtcagggcccccaggcctcgtccccttccaggttcccctcttggctgatgttgccctctcagctctactatcaggcgaggcttccgccacctggcctgcccacgctccctccccagaaggcatgacctgagccgcctcatttctttcccagtttgcattctttctatttcatttcctgctcatggagaatttctgtgaatctctgtgtttctgccttgggcctccttcgacatctgagtcttcaggggaatccagagaagccccagtaccttttcgccatgatgtcttactgggccacccacctcctctttcatgatcctcgccanggaggatcctttcctcacggtccctggcctgcctgagagcaggtctaggccatggcgggtaccagtgcccagcacagggccagcctgccctgggaagcaaggaggccggcgtgggacctggaagttggtcatctgatgctcccccgtttcacagatggaagcaccaaggccctgagacaaggagacggttgggatggacaccatgactccctgcccaacgtggacggtggtggggtggaaagaccattgagttaggaacgcagtgagtttggctgcaagtcacaaaacacctaacagatgtgcttagaacagaggacagagtgttttctcaccgaacaggcatgtccgatggaccccaagcgctgtcaccgtgggcccgatcactgtcgtcttcccgccatcgccggcagactggcttttgtcttttgccgtctgcttgtttgcggtcacaagatggcacaggcctccctcatgagcaaatttcaaggcagggtggggctcggcagtagtggccagaaaggccttgccctagcgtggctctctccctccgtcagcacacagaagcttctccaagagccacccccacccctcctgctccacagacttttccagacccctaagggcctcctgcctcccctaggtgtaagggaggctgggacaaggcctattgggaaagggggatggggtaactgtggctggcttcctccctggactgggcacggggccacctgagcaatgtggggagaggagaactccgcggtggggtgggcagctcaaaatgccacacctcccgggctgctcctccagctcggccacctggtaaagcatgcacctcccgcttcagtgtcctcatctgtaaagtacacggccagtcctgtcctcgcagatgtgctgtgagaagcagatgagggagctgtgtcaggcaccaggggaggacctgggctcctgaggacaccgagttcgtggtgtgtctgccctgctgctgtcttggttctctgctcagctctggaacttggtgcagctcactctccctctgctcctctccctgcaggctgtgctgcaggcgctggggtccgtggtggcagtggaggagcgctcgctcacagggacctgggatttgagcatgctgcaccgctggagctggaggacggggcctggccgccacagaggtgacaccacctctccctcgaggccaccaggaggccccatcatcaccgtccacccaaaggaaatccggacgttctttattcactttcaacagcagtgagccctgggcagatgccccgtccccagggcttcccccaggaactccatgtaacagaacagacccaggacagggaaaagcagtgcggagggatgggactggggagtcagctgctcatctgcaggctaatggcaggaaatggtcatatttggggtttttccctaatttttttaaacaaaaattacattacaagatccaggttcttcccccccacactcaatcaagccagccctctcctcttctgtcacgtaaaggatatttggcacactcatgcgtcattcattcacaaaacacaaacccaggactttctgcctaaggcagaacacaagactcacagcagcaccgaagcgcatctgccgtccgggccctgccaggcttgccaggctgccagtggtaactgtggacctactgcgtgccacgtgttttcatagactcatcccatgctggcaacagccctgcaaggggcttggctctgccacagggcaggagaggaagttgtagcgcctagcgagagttccagccccagacgcccacctgtgcctcagggcaccgcctgccgagcagagaaggcacagcagccgtcagagtccatgagaggtgaaaccacacagcagggatgtccaatatcagaactattaatatcaataaaagtataaccttcccaggtctatgcccaagagaattgaaaacatccatccacacaatacctgtgctcccgcgttcatagcagcattactcaaaagtcaaacggtagcaacaacccaaatgtccatccacagatgaattaagacatgaagtgtgttctgtccatacaatggaatattatttggccataaaaaggaaggaaattctgacgcatgccacagcctgagtgaatcctacaaatattacgctaagtgaaagaagccaatcacgagtttatgtgaaatgtccagaataggcaaatctgtgtatcagagacaaagcacattggtggttgccaggtactggaggaagagagaagaggcatgacagctaacagggacgggctttctttggaagatgatgaaattgtggaatgatggttgcacaactttgtgaatatactagaaaccaatgaattaaaaactttggaagatgaaaaaaaaaaaa

SEQ ID NO: 107703 - DNA, 1385 bp, Homo sapiens
gctcgcgatctagaactaggccagtaacagtgaatctggaggctgtgctgcaggcgctggggtccgtggtggcagtggaggagcgctcgctcacagggacctgggatttgagcatgctgcaccgctggagctggaggacggggcctggccgccacagaggtgacaccacctctccctcgaggccaccaggaggccccatcatcaccgtccacccaaaggaaatccggacgttctttattcactttcaacagcagtgagccctgggcagatgccccgtccccagggcttcccccaggaactccatgtaacagaacagacccaggacagggaaaagcagtgcggagggatgggactggggagtcagctgctcatctgcaggctaatggcaggaaatggtcatatttggggtttttccctaatttttttaaacaaaaattacattacaagatccaggttcttcccccccacactcaatcaagccagccctctcctcttctgtcacgtaaaggatatttggcacactcatgcgtcattcattcacaaaacacaaacccaggactttctgcctaaggcagaacacaagactcacagcagcaccgaagcgcatctgccgtccgggccctgccaggcttgccaggctgccagtggtaactgtggacctactgcgtgccacgtgttttcatagactcatcccatgctggcaacagccctgcaaggggcttggctctgccacagggcaggagaggaagttgtagcgcctagcgagagttccagccccagacgcccacctgtgcctcagggcaccgcctgccgagcagagaaggcacagcagccgtcagagtccatgagaggtgaaaccacacagcagggatgtccaatatcagaactattaatatcaataaaagtataaccttcccaggtctatgcccaagagaattgaaaacatccatccacacaatacctgtgctcccgcgttcatagcagcattactcaaaagtcaaacggtagcaacaacccaaatgtccatccacagatgaattaagacatgaagtgtgttctgtccatacaatggaatattatttggccataaaaaggaaggaaattctgacgcatgccacagcctgagtgaatcctacaaatattacgctaagtgaaagaagccaatcacgagtttatgtgaaatgtccagaataggcaaatctgtgtatcagagacaaagcacattggtggttgccaggtactggaggaagagagaagaggcatgacagctaacagggacgggctttctttggaagatgatgaaattgtggaatgatggttgcacaactttgtgaatatactagaaaccaatgaattaaaaactttggaagatgaaaaaaaaaaaa

SEQ ID NO: 107704 - DNA, 6625 bp, Homo sapiens
  misc_feature (4233)..(4233): n is a, c, g, or t
  misc_feature (6069)..(6069): n is a, c, g, or t
  misc_feature (6071)..(6072): n is a, c, g, or t
  misc_feature (6075)..(6075): n is a, c, g, or t
  misc_feature (6077)..(6077): n is a, c, g, or t
  misc_feature (6079)..(6079): n is a, c, g, or t
  misc_feature (6094)..(6094): n is a, c, g, or t
ggaagtgggcctggcaccttcccggcctgccgcaggatggggcagctgtgctggctgccgctgctggcaccgctcctgttgctgcgaccgccaggggtccagtccgccggccccatccgggccttcgtggtgccccacagccacatggacgtgggctgggtctacactgtgcaggaaagcatgcgggcgtacgccgccaatgtctacacctcagtggtggaagagctggcccgcggccagcagcgccggttcatcgctgtggagcaggagtttttccggctgtggtgggatggcgtcgcctcggaccagcagaaataccaggtccgccagctcctggaggaaggacgcctggaatttgtcatcggaggccaggtcatgcatgacgaggctgtgacgcaccttgatgaccagatcctgcagctcacagaaggacacgggtttctctatgaaacatttgggatccggccacagttctcctggcacgttgacccgtttggcgcctctgccacgacgcccaccctatttgcgctggcgggcttcaatgcccacctcggctcccggatcgactacgacctgaaggcagccatgcaggaggcccgggggctgcagttcgtgtggcgagggtccccatccctctcagagcggcaggaaatcttcacgcacatcatggaccagtacagctactgcaccccgtcccacatccctttctccaacaggtcaggattttactggaatggcgtggctgtcttccccaagcctcccccagatggggtgtaccccaacatgagtgagcctgtcaccccagccaacatcaacctctatgccgaggccctggtggccaacgtgaagcagagggccgcctggttccggacaccgcacgtcctctggccctggggatgtgacaagcagttcttcaatgcctcggtgcagtttgccaacatggacccgctgctggaccacatcaacagccatgctgccgagctcggtgtctcggtgcagtatgccacgctgggcgactacttccgtgccctgcacgctctcaatgtcacctggcgtgtccgcgaccaccacgacttcctgccctattccacagaaccattccaggcctggacgggcttctacacgtcccgcagctcactgaaggggctggcccggcgagccagcgccttgttgtatgccggggagtccatgttcacacgctacctgtggccggccccccgtgggcatctggaccccacctgggccctgcagcagctccagcagcttcgctgggccgtctccgaggtccagcaccatgatgccatcactgggactgagtcccccaaggtgagagacatgtacgcaacgcacctggcctcggggatgctgggcatgcgcaagctgatggcctccatcgtcctagatgagctccagccccaggcacccatggcggccagctccgatgcaggacctgcaggacattttgcctcggtctacaacccgctggcctggacggtcaccaccatcgtcaccctgactgttggtttccctggagtccgcgtcacagatgaggcgggccacccagtgccctcgcagatccagaactcaacagagaccccatctgcgtatgacctgcttattctgaccacaatcccaggcctcagttaccggcactacaacatcagacccactgcaggggcccaagagggcacccaggagccggctgccactgtggcgagcacccttcaatttggccgcaggctgaggagacgcaccagccatgcgggcaggtacttggtgcctgtggcaaacgactgctacattgtgctgctcgaccaggataccaacctgatgcacagcatctgggagagacagagtaaccgaacggtgcgcgtgacccaggaattcctggagtaccacgtcaacggggatgtgaaacagggccccatttccgataactacctgttcacaccgggcaaggccgcggtgcctgcgtgggaagctgtggaaatggagattgtggcgggacagcttgtgactgagatccggcagtacttctacaggaacatgacagcacagaattacacgtatgcaatccgctcccggctcacccatgtgccgcagggccatgacggggagctgctctgccaccggatagagcaggagtaccaagccggccccctggagctgaaccgtgaggctgtcctgaggaccagcaccaacctaaacagccagcaggtcatctactcagacaacaacggctaccagatgcagcggaggccctacgtttcctatgtgaacaacagcatcgcccggaattactaccccatggttcagtcggccttcatggaggatggcaaaagcaggcttgtgttgctgtcggagcgggcacatggcatctccagccaagggaatgggcaggtggaggtcatgctccaccggcggctgtggaacaacttcgactgggacctgggctacaacctcacgctgaacgacacctcagtcgtccacccagtgctctggcttctgctgggatcctggtccctcaccactgccctgcgccagaggagcgcactggcgctgcagcacaggcccgtggtgctgttcggagacctcgctgggactgcgccgaagctcccaggaccccagcagcaagaggccgtgacgctgcccccgaatcttcacctgcagatcctgagcatccctggctggcgctacagctccaaccacacggagcactctcagaatctccggaaaggccatcgaggggaagcccaggctgacctccgccgtgtcctgctgcggctctaccacctgtatgaagtgggcgaggacccagtcctgtctcagccagtaacagtgaatctggaggtgaacttccccacccccatccagaccataagccagggaagcaaaccctagatgaagccccaagaaactgccttggcaaagagatccacgagggcttcctcccaaatggacgctggtatgggccccaccccgcccttcttcatggtcttctgggtttgtcaggtattacaactggcctggttttttagggttttttgtgtatatgtgagacaggatctcactctgttgcccagtctggggtgcagtggcacaatctcagctcactgcaacctctgcctccctggctcaagtgatcctcccacctcaacctcccaagtaactgggatcacaggggcgcgccaccacgatggctaagtttttttttttttttttgagaccgagtttcgctctcgtcccccaggctggagtgcaatggtgcgctctcagctggctgcaacctccatctcccaggttcaagtgattctcctgcctcagcctcccgagtagctgggattacaggcatgtgccaccacgcccggctaatttttttgtacttttagtagagacagggtttctccatgttggtcaggctggtcacgaacccctgacttcaggtgatccacctgcctcggcctcgcaaagtgctgggattacaggcgtgagccaccaagcctggcctagtttttttatttttagtagagacacggtcttgctgtgttgctcaggctggtctcgaacgtctggcctcaagcaatctgcctgtcttagcctcctgaagtgctgggattacaggcgtgagtggcctgtattttctttcttatttattctgtggtaaaacttttaaaacacagacaacatctgtgtaatccaaaaacaaaacagattccccatagagttgctttgaaaggtgacttagagtcagacaatccagggtccacacccaggcccctctacgggggcatctccggcaccccatgcctctgggcctcagtttccccccatgtaaaatggggagaggtgagagttctttgcccagaaggttgctgagaggccctggcactaaggggcctcgtgcagtgtcagggcccccaggcctcgtccccttccaggttcccctcttggctgatgttgccctctcagctctactatcaggcgaggcttccgccacctggcctgcccacgctccctccccagaaggcatgacctgagccgcctcatttctttcccagtttgcattctttctatttcatttcctgctcatggagaatttctgtgaatctctgtgtttctgccttgggcctccttcgacatctgagtcttcaggggaatccagagaagccccagtaccttttcgccatgatgtcttactgggccacccacctcctctttcatgatcctcgccanggaggatcctttcctcacggtccctggcctgcctgagagcaggtctaggccatggcgggtaccagtgcccagcacagggccagcctgccctgggaagcaaggaggccggcgtgggacctggaagttggtcatctgatgctcccccgtttcacagatggaagcaccaaggccctgagacaaggagacggttgggatggacaccatgactccctgcccaacgtggacggtggtggggtggaaagaccattgagttaggaacgcagtgagtttggctgcaagtcacaaaacacctaacagatgtgcttagaacagaggacagagtgttttctcaccgaacaggcatgtccgatggaccccaagcgctgtcaccgtgggcccgatcactgtcgtcttcccgccatcgccggcagactggcttttgtcttttgccgtctgcttgtttgcggtcacaagatggcacaggcctccctcatgagcaaatttcaaggcagggtggggctcggcagtagtggccagaaaggccttgccctagcgtggctctctccctccgtcagcacacagaagcttctccaagagccacccccacccctcctgctccacagacttttccagacccctaagggcctcctgcctcccctaggtgtaagggaggctgggacaaggcctattgggaaagggggatggggtaactgtggctggcttcctccctggactgggcacggggccacctgagcaatgtggggagaggagaactccgcggtggggtgggcagctcaaaatgccacacctcccgggctgctcctccagctcggccacctggtaaagcatgcacctcccgcttcagtgtcctcatctgtaaagtacacggccagtcctgtcctcgcagatgtgctgtgagaagcagatgagggagctgtgtcaggcaccaggggaggacctgggctcctgaggacaccgagttcgtggtgtgtctgccctgctgctgtcttggttctctgctcagctctggaacttggtgcagctcactctccctctgctcctctccctgcaggctgtgctgcaggcgctggggtccgtggtggcagtggaggagcgctcgctcacagggacctgggatttgagcatgctgcaccgctggagctggaggacggggcctggccgccacagaggtgacaccacctctccctcgaggccaccaggaggccccatcatcaccgtccacccaaaggaaatccggacgttctttattcactttcaacagcagtgagccctgggcagatgccccgtccccagggcttcccccaggaactccatgtaacagaacagacccaggacagggaaaagcagtgcggagggatgggactggggagtcagctgctcatctgcaggctaatggcaggaaatggtcatatttggggtttttccctaatttttttaaacaaaaattacattacaagatccaggttcttcccccccacactcaatcaagccagccctctcctcttctgtcacgtaaaggatatttggcacactcatgcgtcattcattcacaaaacacaaacccaggactttctgcctaaggcagaacacaagactcacagcagcaccgaagcgcatctgccgtccgggccctgccaggcttgccaggctgccagtggtaactgtggacctactgcgtgccacgtgttttcatagactcatcccatgctggcaacagccctgcaaggggcttggctctgccacagggcaggagaggccgctctcgccccccgccccccccccccccccccccccccccccccccccccccccccccccccccccccccacgcccancnnccnananagaccaaaagagaanaaaccacacaacaggaaaaaaaaaaaaaaaaactattaatatcaataaaagtataaccttcccaggtctatgcccaagagaattgaaaacatccatccacacaatacctgtgctcccgcgttcatagcagcattactcaaaagtcaaacggtagcaacaacccaaatgtccatccacagatgaattaagacatgaagtgtgttctgtccatacaatggaatattatttggccataaaaaggaaggaaattctgacgcatgccacagcctgagtgaatcctacaaatattacgctaagtgaaagaagccaatcacgagtttatgtgaaatgtccagaataggcaaatctgtgtatcagagacaaagcacattggtggttgccaggtactggaggaagagagaagaggcatgacagctaacagggacgggctttctttggaagatgatgaaattgtggaatgatggttgcacaactttgtgaatatactagaaaccaatgaattaaaaactttggaagatgaaaaaaaaaaaa

SEQ ID NO: 107705 - DNA, 871 bp, Homo sapiens
ggaagtgggcctggcaccttcccggcctgccgcaggatggggcagctgtgctggctgccgctgctggcaccgctcctgttgctgcgaccgccaggggtccagtccgccggccccatccgggccttcgtggtgccccacagccacatggacgtgggctgggtctacactgtgcaggaaagcatgcgggcgtacgccgccaatgtctacacctcagtggtggaagagctggcccgcggccagcagcgccggttcatcgctgtggagcaggagtttttccggctgtggtgggatggcgtcgcctcggaccagcagaaataccaggtccgccagctcctggaggaaggacgcctggaatttgtcatcggaggccaggtcatgcatgacgaggctgtgacgcaccttgatgaccagatcctgcagctcacaggtttggccaccctaccctgcacccagggtccctcaggacctccagtggggctgggacatggtatcagaacccccaggttctgagctctgtctgcccctcttagtggggtcggggaccttaaccagtgaaagcagtgatttgctagtgccatattcatgcctcaccaaggaagttgaatgtaggggttaagagcatggatgctagagtcagatggtctcaatatatcctggctctgccaattccctcctctgtgaccctggaaaggaatgtaacttcagtttcctcatagataaaatgagtttgatggtaatacctacctcaaagggttgttgtgagtattaaatgggataattcaaataaagcactttagtaggatgtgggttccctagtaaatgctcagtaagtgtttgctgccttccatcacaattaccaccttcagcacca

SEQ ID NO: 107706 - DNA, 177 bp, Homo sapiens
gagcaccccattccagaaagtgtgagagctgacagttaacaagtctcatcctgctggccttgcagatccagaactcaacagagaccccatctgcgtatgacctgcttattctgaccacaatcccaggcctcagttaccggcactacaacatcagacccactgcaggggcccaagagg

SEQ ID NO: 107707 - DNA, 6806 bp, Homo sapiens
  misc_feature (4411)..(4411): n is a, c, g, or t
ggaagtgggcctggcaccttcccggcctgccgcaggatggggcagctgtgctggctgccgctgctggcaccgctcctgttgctgcgaccgccaggggtccagtccgccggccccatccgggccttcgtggtgccccacagccacatggacgtgggctgggtctacactgtgcaggaaagcatgcgggcgtacgccgccaatgtctacacctcagtggtggaagagctggcccgcggccagcagcgccggttcatcgctgtggagcaggagtttttccggctgtggtgggatggcgtcgcctcggaccagcagaaataccaggtccgccagctcctggaggaaggacgcctggaatttgtcatcggaggccaggtcatgcatgacgaggctgtgacgcaccttgatgaccagatcctgcagctcacagaaggacacgggtttctctatgaaacatttgggatccggccacagttctcctggcacgttgacccgtttggcgcctctgccacgacgcccaccctatttgcgctggcgggcttcaatgcccacctcggctcccggatcgactacgacctgaaggcagccatgcaggaggcccgggggctgcagttcgtgtggcgagggtccccatccctctcagagcggcaggaaatcttcacgcacatcatggaccagtacagctactgcaccccgtcccacatccctttctccaacaggtcaggattttactggaatggcgtggctgtcttccccaagcctcccccagatggggtgtaccccaacatgagtgagcctgtcaccccagccaacatcaacctctatgccgaggccctggtggccaacgtgaagcagagggccgcctggttccggacaccgcacgtcctctggccctggggatgtgacaagcagttcttcaatgcctcggtgcagtttgccaacatggacccgctgctggaccacatcaacagccatgctgccgagctcggtgtctcggtgcagtatgccacgctgggcgactacttccgtgccctgcacgctctcaatgtcacctggcgtgtccgcgaccaccacgacttcctgccctattccacagaaccattccaggcctggacgggcttctacacgtcccgcagctcactgaaggggctggcccggcgagccagcgccttgttgtatgccggggagtccatgttcacacgctacctgtggccggccccccgtgggcatctggaccccacctgggccctgcagcagctccagcagcttcgctgggccgtctccgaggtccagcaccatgatgccatcactgggactgagtcccccaaggtgagagacatgtacgcaacgcacctggcctcggggatgctgggcatgcgcaagctgatggcctccatcgtcctagatgagctccagccccaggcacccatggcggccagctccgatgcaggacctgcaggacattttgcctcggtctacaacccgctggcctggacggtcaccaccatcgtcaccctgactgttggtttccctggagtccgcgtcacagatgaggcgggccacccagtgccctcgcagatccagaactcaacagagaccccatctgcgtatgacctgcttattctgaccacaatcccaggcctcagttaccggcactacaacatcagacccactgcaggggcccaagagggcacccaggagccggctgccactgtggcgagcacccttcaatttggccgcaggctgaggagacgcaccagccatgcgggcaggtacttggtgcctgtggcaaacgactgctacattgtgctgctcgaccaggataccaacctgatgcacagcatctgggagagacagagtaaccgaacggtgcgcgtgacccaggaattcctggagtaccacgtcaacggggatgtgaaacagggccccatttccgataactacctgttcacaccgggcaaggccgcggtgcctgcgtgggaagctgtggaaatggagattgtggcgggacagcttgtgactgagatccggcagtacttctacagcttccgggccgtggttgacacgtggtctgatgaagaaatgaattgctctggtgtctgcatgctggctgcgtttgcgtgtgctgtgtcacgttggttgggagctaagttcagagctgggagagagacccacagaccctggggcccacagagcacctgttcttccatgatcagagcagacgaacatgacagcacagaattacacgtatgcaatccgctcccggctcacccatgtgccgcagggccatgacggggagctgctctgccaccggatagagcaggagtaccaagccggccccctggagctgaaccgtgaggctgtcctgaggaccagcaccaacctaaacagccagcaggtcatctactcagacaacaacggctaccagatgcagcggaggccctacgtttcctatgtgaacaacagcatcgcccggaattactaccccatggttcagtcggccttcatggaggatggcaaaagcaggcttgtgttgctgtcggagcgggcacatggcatctccagccaagggaatgggcaggtggaggtcatgctccaccggcggctgtggaacaacttcgactgggacctgggctacaacctcacgctgaacgacacctcagtcgtccacccagtgctctggcttctgctgggatcctggtccctcaccactgccctgcgccagaggagcgcactggcgctgcagcacaggcccgtggtgctgttcggagacctcgctgggactgcgccgaagctcccaggaccccagcagcaagaggccgtgacgctgcccccgaatcttcacctgcagatcctgagcatccctggctggcgctacagctccaaccacacggagcactctcagaatctccggaaaggccatcgaggggaagcccaggctgacctccgccgtgtcctgctgcggctctaccacctgtatgaagtgggcgaggacccagtcctgtctcagccagtaacagtgaatctggaggtgaacttccccacccccatccagaccataagccagggaagcaaaccctagatgaagccccaagaaactgccttggcaaagagatccacgagggcttcctcccaaatggacgctggtatgggccccaccccgcccttcttcatggtcttctgggtttgtcaggtattacaactggcctggttttttagggttttttgtgtatatgtgagacaggatctcactctgttgcccagtctggggtgcagtggcacaatctcagctcactgcaacctctgcctccctggctcaagtgatcctcccacctcaacctcccaagtaactgggatcacaggggcgcgccaccacgatggctaagtttttttttttttttttgagaccgagtttcgctctcgtcccccaggctggagtgcaatggtgcgctctcagctggctgcaacctccatctcccaggttcaagtgattctcctgcctcagcctcccgagtagctgggattacaggcatgtgccaccacgcccggctaatttttttgtacttttagtagagacagggtttctccatgttggtcaggctggtcacgaacccctgacttcaggtgatccacctgcctcggcctcgcaaagtgctgggattacaggcgtgagccaccaagcctggcctagtttttttatttttagtagagacacggtcttgctgtgttgctcaggctggtctcgaacgtctggcctcaagcaatctgcctgtcttagcctcctgaagtgctgggattacaggcgtgagtggcctgtattttctttcttatttattctgtggtaaaacttttaaaacacagacaacatctgtgtaatccaaaaacaaaacagattccccatagagttgctttgaaaggtgacttagagtcagacaatccagggtccacacccaggcccctctacgggggcatctccggcaccccatgcctctgggcctcagtttccccccatgtaaaatggggagaggtgagagttctttgcccagaaggttgctgagaggccctggcactaaggggcctcgtgcagtgtcagggcccccaggcctcgtccccttccaggttcccctcttggctgatgttgccctctcagctctactatcaggcgaggcttccgccacctggcctgcccacgctccctccccagaaggcatgacctgagccgcctcatttctttcccagtttgcattctttctatttcatttcctgctcatggagaatttctgtgaatctctgtgtttctgccttgggcctccttcgacatctgagtcttcaggggaatccagagaagccccagtaccttttcgccatgatgtcttactgggccacccacctcctctttcatgatcctcgccanggaggatcctttcctcacggtccctggcctgcctgagagcaggtctaggccatggcgggtaccagtgcccagcacagggccagcctgccctgggaagcaaggaggccggcgtgggacctggaagttggtcatctgatgctcccccgtttcacagatggaagcaccaaggccctgagacaaggagacggttgggatggacaccatgactccctgcccaacgtggacggtggtggggtggaaagaccattgagttaggaacgcagtgagtttggctgcaagtcacaaaacacctaacagatgtgcttagaacagaggacagagtgttttctcaccgaacaggcatgtccgatggaccccaagcgctgtcaccgtgggcccgatcactgtcgtcttcccgccatcgccggcagactggcttttgtcttttgccgtctgcttgtttgcggtcacaagatggcacaggcctccctcatgagcaaatttcaaggcagggtggggctcggcagtagtggccagaaaggccttgccctagcgtggctctctccctccgtcagcacacagaagcttctccaagagccacccccacccctcctgctccacagacttttccagacccctaagggcctcctgcctcccctaggtgtaagggaggctgggacaaggcctattgggaaagggggatggggtaactgtggctggcttcctccctggactgggcacggggccacctgagcaatgtggggagaggagaactccgcggtggggtgggcagctcaaaatgccacacctcccgggctgctcctccagctcggccacctggtaaagcatgcacctcccgcttcagtgtcctcatctgtaaagtacacggccagtcctgtcctcgcagatgtgctgtgagaagcagatgagggagctgtgtcaggcaccaggggaggacctgggctcctgaggacaccgagttcgtggtgtgtctgccctgctgctgtcttggttctctgctcagctctggaacttggtgcagctcactctccctctgctcctctccctgcaggctgtgctgcaggcgctggggtccgtggtggcagtggaggagcgctcgctcacagggacctgggatttgagcatgctgcaccgctggagctggaggacggggcctggccgccacagaggtgacaccacctctccctcgaggccaccaggaggccccatcatcaccgtccacccaaaggaaatccggacgttctttattcactttcaacagcagtgagccctgggcagatgccccgtccccagggcttcccccaggaactccatgtaacagaacagacccaggacagggaaaagcagtgcggagggatgggactggggagtcagctgctcatctgcaggctaatggcaggaaatggtcatatttggggtttttccctaatttttttaaacaaaaattacattacaagatccaggttcttcccccccacactcaatcaagccagccctctcctcttctgtcacgtaaaggatatttggcacactcatgcgtcattcattcacaaaacacaaacccaggactttctgcctaaggcagaacacaagactcacagcagcaccgaagcgcatctgccgtccgggccctgccaggcttgccaggctgccagtggtaactgtggacctactgcgtgccacgtgttttcatagactcatcccatgctggcaacagccctgcaaggggcttggctctgccacagggcaggagaggaagttgtagcgcctagcgagagttccagccccagacgcccacctgtgcctcagggcaccgcctgccgagcagagaaggcacagcagccgtcagagtccatgagaggtgaaaccacacagcagggatgtccaatatcagaactattaatatcaataaaagtataaccttcccaggtctatgcccaagagaattgaaaacatccatccacacaatacctgtgctcccgcgttcatagcagcattactcaaaagtcaaacggtagcaacaacccaaatgtccatccacagatgaattaagacatgaagtgtgttctgtccatacaatggaatattatttggccataaaaaggaaggaaattctgacgcatgccacagcctgagtgaatcctacaaatattacgctaagtgaaagaagccaatcacgagtttatgtgaaatgtccagaataggcaaatctgtgtatcagagacaaagcacattggtggttgccaggtactggaggaagagagaagaggcatgacagctaacagggacgggctttctttggaagatgatgaaattgtggaatgatggttgcacaactttgtgaatatactagaaaccaatgaattaaaaactttggaagatgaaaaaaaaaaaa

SEQ ID NO: 107708 - DNA, 1617 bp, Homo sapiens
aggggagcctggtgaggcaagggcagactcaccagatggtctcagaaagctcttgggctttgagggcaacacccatgaggaattgaggccactagggccaggaccaacctatgaattgccctcagggtgggcagaaacgccaagaggcccacaggagtcctggcagaaggggatgccataggccgttgccacggtgggagccacagcagactgtagccaggtgcagtgtggtgagaaggaggctgggagccacagcagattgtagacaggtgcaggagggtgagagggaggctgggagccacagcagactgtagacaggtgcagggggtgagagggaggctgggaggaggcatcccaggccacactggacagatcacctctgttcccctaggtgacaccacctctccctcgaggccaccaggaggccccatcatcaccgtccacccaaaggaaatccggacgttctttattcactttcaacagcagtgagccctgggcagatgccccgtccccagggcttcccccaggaactccatgtaacagaacagacccaggacagggaaaagcagtgcggagggatgggactggggagtcagctgctcatctgcaggctaatggcaggaaatggtcatatttggggtttttccctaatttttttaaacaaaaattacattacaagatccaggttcttcccccccacactcaatcaagccagccctctcctcttctgtcacgtaaaggatatttggcacactcatgcgtcattcattcacaaaacacaaacccaggactttctgcctaaggcagaacacaagactcacagcagcaccgaagcgcatctgccgtccgggccctgccaggcttgccaggctgccagtggtaactgtggacctactgcgtgccacgtgttttcatagactcatcccatgctggcaacagccctgcaaggggcttggctctgccacagggcaggagaggaagttgtagcgcctagcgagagttccagccccagacgcccacctgtgcctcagggcaccgcctgccgagcagagaaggcacagcagccgtcagagtccatgagaggtgaaaccacacagcagggatgtccaatatcagaactattaatatcaataaaagtataaccttcccaggtctatgcccaagagaattgaaaacatccatccacacaatacctgtgctcccgcgttcatagcagcattactcaaaagtcaaacggtagcaacaacccaaatgtccatccacagatgaattaagacatgaagtgtgttctgtccatacaatggaatattatttggccataaaaaggaaggaaattctgacgcatgccacagcctgagtgaatcctacaaatattacgctaagtgaaagaagccaatcacgagtttatgtgaaatgtccagaataggcaaatctgtgtatcagagacaaagcacattggtggttgccaggtactggaggaagagagaagaggcatgacagctaacagggacgggctttctttggaagatgatgaaattgtggaatgatggttgcacaactttgtgaatatactagaaaccaatgaattaaaaactttggaagatgaaaaaaaaaaaa

SEQ ID NO: 107709 - DNA, 6015 bp, Homo sapiens
  misc_feature (4233)..(4233): n is a, c, g, or t
ggaagtgggcctggcaccttcccggcctgccgcaggatggggcagctgtgctggctgccgctgctggcaccgctcctgttgctgcgaccgccaggggtccagtccgccggccccatccgggccttcgtggtgccccacagccacatggacgtgggctgggtctacactgtgcaggaaagcatgcgggcgtacgccgccaatgtctacacctcagtggtggaagagctggcccgcggccagcagcgccggttcatcgctgtggagcaggagtttttccggctgtggtgggatggcgtcgcctcggaccagcagaaataccaggtccgccagctcctggaggaaggacgcctggaatttgtcatcggaggccaggtcatgcatgacgaggctgtgacgcaccttgatgaccagatcctgcagctcacagaaggacacgggtttctctatgaaacatttgggatccggccacagttctcctggcacgttgacccgtttggcgcctctgccacgacgcccaccctatttgcgctggcgggcttcaatgcccacctcggctcccggatcgactacgacctgaaggcagccatgcaggaggcccgggggctgcagttcgtgtggcgagggtccccatccctctcagagcggcaggaaatcttcacgcacatcatggaccagtacagctactgcaccccgtcccacatccctttctccaacaggtcaggattttactggaatggcgtggctgtcttccccaagcctcccccagatggggtgtaccccaacatgagtgagcctgtcaccccagccaacatcaacctctatgccgaggccctggtggccaacgtgaagcagagggccgcctggttccggacaccgcacgtcctctggccctggggatgtgacaagcagttcttcaatgcctcggtgcagtttgccaacatggacccgctgctggaccacatcaacagccatgctgccgagctcggtgtctcggtgcagtatgccacgctgggcgactacttccgtgccctgcacgctctcaatgtcacctggcgtgtccgcgaccaccacgacttcctgccctattccacagaaccattccaggcctggacgggcttctacacgtcccgcagctcactgaaggggctggcccggcgagccagcgccttgttgtatgccggggagtccatgttcacacgctacctgtggccggccccccgtgggcatctggaccccacctgggccctgcagcagctccagcagcttcgctgggccgtctccgaggtccagcaccatgatgccatcactgggactgagtcccccaaggtgagagacatgtacgcaacgcacctggcctcggggatgctgggcatgcgcaagctgatggcctccatcgtcctagatgagctccagccccaggcacccatggcggccagctccgatgcaggacctgcaggacattttgcctcggtctacaacccgctggcctggacggtcaccaccatcgtcaccctgactgttggtttccctggagtccgcgtcacagatgaggcgggccacccagtgccctcgcagatccagaactcaacagagaccccatctgcgtatgacctgcttattctgaccacaatcccaggcctcagttaccggcactacaacatcagacccactgcaggggcccaagagggcacccaggagccggctgccactgtggcgagcacccttcaatttggccgcaggctgaggagacgcaccagccatgcgggcaggtacttggtgcctgtggcaaacgactgctacattgtgctgctcgaccaggataccaacctgatgcacagcatctgggagagacagagtaaccgaacggtgcgcgtgacccaggaattcctggagtaccacgtcaacggggatgtgaaacagggccccatttccgataactacctgttcacaccgggcaaggccgcggtgcctgcgtgggaagctgtggaaatggagattgtggcgggacagcttgtgactgagatccggcagtacttctacaggaacatgacagcacagaattacacgtatgcaatccgctcccggctcacccatgtgccgcagggccatgacggggagctgctctgccaccggatagagcaggagtaccaagccggccccctggagctgaaccgtgaggctgtcctgaggaccagcaccaacctaaacagccagcaggtcatctactcagacaacaacggctaccagatgcagcggaggccctacgtttcctatgtgaacaacagcatcgcccggaattactaccccatggttcagtcggccttcatggaggatggcaaaagcaggcttgtgttgctgtcggagcgggcacatggcatctccagccaagggaatgggcaggtggaggtcatgctccaccggcggctgtggaacaacttcgactgggacctgggctacaacctcacgctgaacgacacctcagtcgtccacccagtgctctggcttctgctgggatcctggtccctcaccactgccctgcgccagaggagcgcactggcgctgcagcacaggcccgtggtgctgttcggagacctcgctgggactgcgccgaagctcccaggaccccagcagcaagaggccgtgacgctgcccccgaatcttcacctgcagatcctgagcatccctggctggcgctacagctccaaccacacggagcactctcagaatctccggaaaggccatcgaggggaagcccaggctgacctccgccgtgtcctgctgcggctctaccacctgtatgaagtgggcgaggacccagtcctgtctcagccagtaacagtgaatctggaggtgaacttccccacccccatccagaccataagccagggaagcaaaccctagatgaagccccaagaaactgccttggcaaagagatccacgagggcttcctcccaaatggacgctggtatgggccccaccccgcccttcttcatggtcttctgggtttgtcaggtattacaactggcctggttttttagggttttttgtgtatatgtgagacaggatctcactctgttgcccagtctggggtgcagtggcacaatctcagctcactgcaacctctgcctccctggctcaagtgatcctcccacctcaacctcccaagtaactgggatcacaggggcgcgccaccacgatggctaagtttttttttttttttttgagaccgagtttcgctctcgtcccccaggctggagtgcaatggtgcgctctcagctggctgcaacctccatctcccaggttcaagtgattctcctgcctcagcctcccgagtagctgggattacaggcatgtgccaccacgcccggctaatttttttgtacttttagtagagacagggtttctccatgttggtcaggctggtcacgaacccctgacttcaggtgatccacctgcctcggcctcgcaaagtgctgggattacaggcgtgagccaccaagcctggcctagtttttttatttttagtagagacacggtcttgctgtgttgctcaggctggtctcgaacgtctggcctcaagcaatctgcctgtcttagcctcctgaagtgctgggattacaggcgtgagtggcctgtattttctttcttatttattctgtggtaaaacttttaaaacacagacaacatctgtgtaatccaaaaacaaaacagattccccatagagttgctttgaaaggtgacttagagtcagacaatccagggtccacacccaggcccctctacgggggcatctccggcaccccatgcctctgggcctcagtttccccccatgtaaaatggggagaggtgagagttctttgcccagaaggttgctgagaggccctggcactaaggggcctcgtgcagtgtcagggcccccaggcctcgtccccttccaggttcccctcttggctgatgttgccctctcagctctactatcaggcgaggcttccgccacctggcctgcccacgctccctccccagaaggcatgacctgagccgcctcatttctttcccagtttgcattctttctatttcatttcctgctcatggagaatttctgtgaatctctgtgtttctgccttgggcctccttcgacatctgagtcttcaggggaatccagagaagccccagtaccttttcgccatgatgtcttactgggccacccacctcctctttcatgatcctcgccanggaggatcctttcctcacggtccctggcctgcctgagagcaggtctaggccatggcgggtaccagtgcccagcacagggccagcctgccctgggaagcaaggaggccggcgtgggacctggaagttggtcatctgatgctcccccgtttcacagatggaagcaccaaggccctgagacaaggagacggttgggatggacaccatgactccctgcccaacgtggacggtggtggggtggaaagaccattgagttaggaacgcagtgagtttggctgcaagtcacaaaacacctaacagatgtgcttagaacagaggacagagtgttttctcaccgaacaggcatgtccgatggaccccaagcgctgtcaccgtgggcccgatcactgtcgtcttcccgccatcgccggcagactggcttttgtcttttgccgtctgcttgtttgcggtcacaagatggcacaggcctccctcatgagcaaatttcaaggcagggtggggctcggcagtagtggccagaaaggccttgccctagcgtggctctctccctccgtcagcacacagaagcttctccaagagccacccccacccctcctgctccacagacttttccagacccctaagggcctcctgcctcccctaggtgtaagggaggctgggacaaggcctattgggaaagggggatggggtaactgtggctggcttcctccctggactgggcacggggccacctgagcaatgtggggagaggagaactccgcggtggggtgggcagctcaaaatgccacacctcccgggctgctcctccagctcggccacctggtaaagcatgcacctcccgcttcagtgtcctcatctgtaaagtacacggccagtcctgtcctcgcagatgtgctgtgagaagcagatgagggagctgtgtcaggcaccaggggaggacctgggctcctgaggacaccgagttcgtggtgtgtctgccctgctgctgtcttggttctctgctcagctctggaacttggtgcagctcactctccctctgctcctctccctgcaggctgtgctgcaggcgctggggtccgtggtggcagtggaggagcgctcgctcacagggacctgggatttgagcatgctgcaccgctggagctggaggacggggcctggccgccacagaggtttggggacccccgcttcagctccctacccaggactcccagccaggctcagcagctggtcagacccggtgcacatccaaccatctgcctgtcccggcctgtgcgaccttgcgaggctgctttcctactctgaacccgcagccctcccaaatctactacagtcggttaagaaaggctttgggttagtctctgcctgccagggctccacacaggcgtgtgtgtgcacttgtacgtgtgcacacgcagaccacacgccctgcctgtgccctgggtgacagctaggggcccaggggcttctgcccaccttggccctgctgacctcagcccatcagccggtccctgcctcatacgacatgtgccaccgtgagctcctgcactacaggcagcttccaggctccagtccctgtccgcaccatgccctctgcctgggacgcacaggtcccattcactctggccagcacctgctcaagctccccaggatgcctccccagagtcaccaaccaggccaagtgcctcctccactctcctggccccagcggtttcttctgtcctgtgcagctcgttgtccactacacacagcatggtggcgggtgcatggtgacaccacctctcc

SEQ ID NO: 107710 - DNA, 395 bp, Homo sapiens
cacatgggtgtcctgctggacagctcagagtcagcatgacaaaagcccgttcctgcactggtttcgcttgcagaccacagcctgggtgagccagttccatctcttgggggtgccctctgctgacggctcacggttcctgtctgcaggctctgtccgtctcctcgtttgtgacccattctgggacagcatggagtctaaggccacactggctgtgggtggggtctcagggcttctagatgagctgagtcacatggcctcgtgagtgctacgcaggccactcagatggcatctggagagagaggcttgccagccggtgtctgtaagaccttgtgcaggatgagaatgacatcttctctctcctgcctctgcagacagagtaaccgaacggtgcgcgt

SEQ ID NO: 107711 - DNA, 128 bp, Homo sapiens
catcaggcccagagatttaaaacttcttctcattccccctctccctatgatactaggtgagaaaagataagataagaacttttatctgaggactatgagtccttttaaacaatcaggcccagagagac

SEQ ID NO: 107712 - DNA, 512 bp, Homo sapiens
tcctgacctcaagtgatccacccacctcagcctcccaaagtgctgggatttcaggcatgagccaccacacccagcctctctttattttaaaacgaaggttattgcttcctgatcagtatatattttatggtcacattatataataaggtcactcagtttgtgacccactgactggattttgtttccataattacttttatgcttacatttctttccttctttctttttttttggagacagagttttgctcttgttgcccaggctagagtgcaatggtgtgatctcagctcactgcaacctccgccacccaggttcaagcaattatcctgcctcagcctcctgagtaactgggattacaggcgcccaacaccacgcccagctaatttttgtatttttagtggagacagggtttcaccatgttggccaggctggtcttaaattcctgatctcaggaggtccacctgcctcagcctcccaaagtgctgagattacaagcatgagccaccacgcct

SEQ ID NO: 107713 - DNA, 258 bp, Homo sapiens
aactactcagaggctgagggagaggaattgcttgagcctaggaatttgaggctgcattgagctgtgatcatgtccctgcactccagccagggtaacagagtgagaccctgtctcatagaaaacaaaatacatgggttcttcggaggtcacagacctactgtgtgtaaccgcactagtctctgattcctgcctaacaaacttgcgattccttgacatataatccaagtaattaaggtatcttagaagccatccatctgg

SEQ ID NO: 107714 - DNA, 852 bp, Homo sapiens
ggctgggctttgccgcgctcgctgcacttgggcgagagctggaacgtggaccagagctcggatcccatcgcagctaccgcgatgagaggcgctcgcggcgcctgggattttctctgcgttctgctcctactgcttcgcgtccagacaggctcttctcaaccatctgtgagtccaggggaaccgtctccaccatccatccatccaggaaaatcagacttaatagtccgcgtgggcgacgagattaggctgttatgcactgatccgggctttgtcaaatggacttttgagatcctggatgaaacgaatgagaataagcagaatgaatggatcacggaaaaggcagaagccaccaacaccggcaaatacacgtgcaccaacaaacacggcttaagcaattccatttatgtgtttgttagagatcctgccaagcttttccttgttgaccgctccttgtatgggaaagaagacaacgacacgctggtccgctgtcctctcacagacccagaagtgaccaattattccctcaaggggtgccaggggaagcctcttcccaaggacttgaggtttattcctgaccccaaggcgggcatcatgatcaaaagtgtgaaacgcgcctaccatcggctctgtctgcattgttctgtggaccaggagggcaagtcagtgctgtcggaaaaattcatcctgaaagtgaggccagccttcaaagctgtgcctgttgtgtctgtgtccaaagcaagctatcttcttagggaaggggaagaattcacagtgacgtgcacaataaaagatgtgtctagttctgtgtactcaacgtggaaaagagaaaacagtcagactaaactacagaat

SEQ ID NO: 107715 - DNA, 543 bp, Homo sapiens
ggctgggctttgccgcgctcgctgcacttgggcgagagctggaacgtggaccagagctcggatcccatcgcagctaccgcgatgagaggcgctcgcggcgcctgggattttctctgcgttctgctcctactgcttcgcgtccagacaggctcttctcaaccatctgtgagtccaggggaaccgtctccaccatccatccatccaggaaaatcagacttaatagtccgcgtgggcgacgagattaggctgttatgcactgatccgggctttgtcaaatggacttttgagatcctggatgaaacgaatgagaataagcagaatgaatggatcacggaaaaggcagaagccaccaacaccggcaaatacacgtgcaccaacaaacacggcttaagcaattccatttatgtgtttgttagaggtaaatgcttggctttctgcagtgctgtgctttcaagaatttaatatcctgctcttaattttggatgacatatggatgactgagccatagataaaatatttctggctgggtctagaaggcctaaa

SEQ ID NO: 107716 - DNA, 142 bp, Homo sapiens
gtatgttagtagctcgatttaatcattccacattgtataaatatatcataaatctttgtacttcataaatacatacaattataatttgtaaatttacagtgaaaaatatattaactatgagtttttgtgtatgccctttgta

SEQ ID NO: 107717 - DNA, 361 bp, Homo sapiens
agccaccgtgctgggcctgtagtgttttctaaaaatagaattatattataaattgggtttatcaacttgctgaaaatggcagaggccagtgcgatgagagtagggtgattaagggagtaggaagtaatgcaggaaagggagtttgtaggatttagatttcactgaaagtgtactggacaggttgggcatagtggctcaggcctgtaattgtgtcactttgggaggctgaagtggaaagatcccttaagcccaggagttcgagccagcctgggcaacatagggaaaccctatctctataaaataaaaataaaaataattattttgaaaaaaaagtttactggacagagtaagttcagggttg

SEQ ID NO: 107718 - DNA, 719 bp, Homo sapiens
aatctctcattactgctgccagttctcttgtgtgcaaataccctccttaccatagtaagctctaacaccctgtgccaggatgtcaccctaggtgaactcctccttatcttgtcatacattgattctccattcttggccacccacatccccacctgggtgggcttgtcattttttttagggtctgacactccacaccaggccacccctgtgtgaatgttctatcttgctctgcctaatggtttcaggaagggaacaggaagcttaattactttttaaagatgaattttattaccctttccgttcttcatgagttttacttatgagagtttgcaaagatatgttagacctaaatcagtatctctggcttcaagaatggaaggaaggtacacaaaactggtaaacaaattgatttttgttttaggcacctgtaaagaaaaactgattattttcaagaaggaagtgaatctaagaatccataagaattttagcaatgagtaagaccctatccaggcagctccatattcattcctgacgataaatcaaatgggttatttgaaagaaagacatagtaattttccttgacatcagccagtcattactgccatttagtcagcacatccctgtgtgctaggcattgtgtttaatccttaagtttgtatggtggtttctatttttacctgtgtgttaccgatgaagatacctgctttactttaccaaaa

SEQ ID NO: 107719 - DNA, 358 bp, Homo sapiens
gaggcagagtctcgctctgtcatgcaggctggagtgcagtgttgcaatctcggctcactgcaacctccgcctcctggaatggatataaatttctatccagggtgggtaagacataaaacctagaatttgatatgtgcaaaacaatactgcacaaacaacacttgtgccttaaatgtctctttgaacaaccactagttagggaaaagatggatccgatttttactgttatatttttaatttttatgggtacatagtaggtgtatatatttattgagtatatgaaatattttgatacaggcatatgatgtgtaataatcacatcagggtaaatggagtatccttcacctcaagcatttac

SEQ ID NO: 107720 - DNA, 269 bp, Homo sapiens
agtacttaccactgtgttccagttttctaaagtactcagtacagtcacatgctgtaccagtttgtagcctaggaacaacaggctgtaccatacagcagaggtggagtaggctatgtactctaggtttgtatgagcaccttctatcatgttcacacaatgataaaattgcctaaaaattcatttcctagaacatatccccattgttaagcaaggcatgactgtatttggtgactgggaaaataaattcctatttggaatttatttatgcc

SEQ ID NO: 107721 - DNA, 627 bp, Homo sapiens
atcattatctgcagagaatttcagtatatcttcgagttccttgttagtatttatgctctcttatttgtgttgggatagaaagattaaggaaaggagagatgagaaggtggctcaacagttgagacagttttattgggagtaaacctgagaagggcttccagcggcagggtcaggtgcaaacttctcttacagcctgaggcttttttaaagggcccagtggagaagtgtgctttgaaacaaaattctgttagggaggggttggggaagtcctggctgttctgttacagttagggccgttattctctgttgaagttatgggcggggctgacattttcagttttggccaggtggccaaatagaaacttaaagcttaggatggtggagtgttataaagatggcggtgctcttgtcctgtcaatgtgttcctcaataaagtcttcaagcatgtcatagattgttttccccaccaacctcccttgcagcatttgagatattcctgatacttcatcaatagtggagaagctcctgaaatcattgacttcctcactccataatggtttccaacacccaatgaagtagtaggaggaaaacatgggtttcttctcctggaagcctccagaagaaggt

SEQ ID NO: 107722 - DNA, 315 bp, Homo sapiens
ctcctttgtaaagtggagataacaacagtgcccagcccatagggtggattttgtgaggctgaaattagttaattatatgtaaagcacttggaacggtgcctcttggcatgtaatactcactggacaagggttagtttgtatttgtattgttgtttcccaccaagccctgcgcaaagttagttgcacgcaggtttagttacattctcatcaggtgctcttaaccagcttattttacaaaagaggacactgagttcagagaggcttatagcagtagaaccaggactcaaaccacaggctgcctacctccaaagctca

SEQ ID NO: 107723 - DNA, 383 bp, Homo sapiens
agggtgtggacatttaacagtttcatcttcaaaataccccgatgagctatgatactcttaggtgttctcattttacaatttggggaaactgaggcccagagaaggcatgggatatgtgtagccagcagctgtgcaggaatttgactcctgcttatacctaccttgctgcattttggggttttggacatgggtgaagttggacggaacccaggctctgtcattggtcattgggtgggatggtgaagctccctgagcctcagtggcaccatctgcagaatgggacagtagtagtagttacatcatggggttgtgaaaaataatgccactacccagctcagtgtggcctggctcagcatatccacttctctggggaggagggatta

SEQ ID NO: 107724 - DNA, 669 bp, Homo sapiens
tgcagtggctcacgcttgtaactccagcactttgggacaccaaggtgggagggctgcttgggctcaggacttcaagaccaccctaggcaacatagtaaggcctcgtctctatgaaaatttaaaaaaaaaaattagccaggtatggtggcacacacctgtagtcccagcctcctggggagctgaggaggaaggatcacttgagcccaggaggttgaggctgcagtgagctatgactgcaccactgcactccagcctgggtgacagagtgagaccttgtctcaaaaaaataagacagaaaacaaaaaactgcccaacttcttcaatagggagttaaatccagaacttgtctgtatccgaagcttttccgtaataacacaatgacttcctgagcatcaatgggcacgaagatttgtattgcagtgtcctagtgtaggggtcagtcaactatagcccccgagccaaatccagctgctgactttttctaaataaagttttattggaacacagccacgtcctttcacttacccatggtctgtggctgccttcaaactacgacagcagaaatgaatacttgaggctgagaccagatggcccacaaagtagaaaatatttactatctggcccttcacaggaaacgcctaccaatcctatcctagaacaccataaatg

SEQ ID NO: 107725 - DNA, 262 bp, Homo sapiens
actcacaacacctgtataatgtgatgcaagtcatcctctctatcataacccctccccccaacacacagtaggtcactccccaacccctgaagaaagtggcttatttgaggttgttggtgctgttggtattattgccatagttgttatttaattgcttgattaaactcagtcaaatatccttcctaaaaacatgtcattccacttgtgaaagaaaacacaatgtgcatgtttcaatgatactgtgcggaaacacacctcatga

SEQ ID NO: 107726 - DNA, 322 bp, Homo sapiens
aggcatttctcaaggcaaactcctactcacacatcaacacctagctcagaagtctgggaagccaaagaaagacagccccaagtcactcagctcttctcttcctctcagcacttcacaaactcctgggtaacactggtatcttctctgtattattccccaattccatcccattatttggatgaagagttcaataaacattttctgagtaaataactctacatgaaaggttttaaaggctaaaaagtgatacaagcaaaagcagacaacagatatttcttgttactgaaataatctattttctcaactctgatctttggtggag

SEQ ID NO: 107727 - DNA, 1256 bp, Homo sapiens
acagccatggcaagcactttaaccaacttctatggtgatttacgaaaagctttatgagaggcaaaatacattcaaacttgtagtactacagatcaactctctcagctacatggcctgtaaaaatcattgattccacttttctgcatagccggtagaaaaatttgaaatgtttttggttcactagtacaatgtttggttttattcctaaagtaaatagctatctaagagagggcattttcacttttttttttttaaattttgagacaggctctcactctgttgcccatgctggagggcagtggtatgatcacagctcactgcagctttgatctgaccgctcaaggggttattctacctcagcctcctgaatagctgggaatacaggtgcacgccactatgcatggctaatttttgtttaattttttgtagagatgtggtcacactgtgttgcccaggctggtcttgaactcctggcctcaagtcattccccaccttagcctcccaaagtgttgggattataagcgtgagccaccatgcctggccccaatttaaaatgtggaattcagttggtgtccaagacttatcttgagactcttaaaagcatcagtctgtaactagaacaaatacagtcttagatttacccaagtgcctagatatcattttataatgattagaattgagtattgtgggtcccctaattctgtgggtgccttaagtgagaatttctaaatgattttcacattctaaatgactttgggttttgaactctccatctagtttacttctaaaatgggaacttgaggcaattcaggtatccaggcaaatctttgtatatatttttttgtgtacatgcacacatctcgaaatccatttccgtgtttaatgttagttgtttatgtgttagtattcctgtgtctactgttttgttgttgttaatatgggtaaagtgagccctgaaatacatgctaaacaagacatgaaatgcagaaaggtacatagtgtttcaagtgcatggtagtttgatctgtgttttactttattgtgttttcttgagtgtaaagaaagaataaatcaaagttcttcatacctaaaaaaaaaaaaaaaaaaaatttggcggctcgcggagacttttaacccttttggggcgccggaaggaatgtcaggtcaggaacggggaatggggttaccaaaagcgggggcggttgaacagtttggttgttagcgtgcctcccgcgccgagagaaaggacaataggg

SEQ ID NO: 107728 - DNA, 1008 bp, Homo sapiens
acagccatggcaagcactttaaccaacttctatggtgatttacgaaaagctttatgagaggcaaaatacattcaaacttgtagtactacagatcaactctctcagctacatggcctgtaaaaatcattgattccacttttctgcatagccggtagaaaaatttgaaatgtttttggttcactagtacaatgtttggttttattcctaaagtaaatagctatctaagagagggcattttcacttttttttttttaaattttgagacaggctctcactctgttgcccatgctggagggcagtggtatgatcacagctcactgcagctttgatctgaccgctcaaggggttattctacctcagcctcctgaatagctgggaatacaggtgcacgccactatgcatggctaatttttgtttaattttttgtagagatgtggtcacactgtgttgcccaggctggtcttgaactcctggcctcaagtcattccccaccttagcctcccaaagtgttgggattataagcgtgagccaccatgcctggccattgtgtctgtttttatatagcataacagtggaattcagtaacttaaaagttgttggaaagtaggcaaagcaggaaggaactcttggtttttaatgaggtgatagaaaaataaaaagccagaggctattctgactgatggagggaggaggatatcttcagtgtgtcaagcactggatagattacttaacggtgtgtgttcttcacaggtgctttctaaggtaaagagatacttattttaccttgagcaaatagtttcctgtcccaggttaagaagtcaggcagtagttataccttttaaaactactaaatgtttcttaaattgtggcctgttgatggaaatttcttgacagatgacactgttttctctggacttgatttcgaagacaaattgcttcttagaattgtctttgcgtgggatggccggtccggggttttggccgttaacttgttattactccggcaaa

SEQ ID NO: 107729 - DNA, 227 bp, Homo sapiens
tgagatcatgcaactgcactccagcctgggcgacagaatgaggctccatctcaaaaaaaaaaaaatcatctaagtaaaggaaagtaatcaaaggataggaaacaaggaatcactcttcattatatgctgcttacgttaaattactttataacattgtgcatgcagtagttgtctatgtggaagttcacaaaaccatcactgggcctatctactagcaccctcctcct

SEQ ID NO: 107730 - DNA, 141 bp, Homo sapiens
cctgcttagagatactctgattcctctcactgctatggaacagacacacacacccacacaccaccccagctgatgttgtcacactcacacacacacacaccaccccagctgatcttgtcacacacacaccaccccagctga

SEQ ID NO: 107731 - DNA, 235 bp, Homo sapiens
ttttattttttgctattgagtttgagttctttatatatttgggtattaatcacttatctgatttgcgcatttaatcattttccccaattctgtaggttgtctctttactctgttgtttctttttcttccaaaagctttttagtttcatttaattccatttgtgtatttctgcttttgttgtctgtgcttttggggtcatatccaaaaaatcattgccaagaatattgtcttgaag

SEQ ID NO: 107732 - DNA, 104 bp, Homo sapiens
ggtccaaaactttagaattaatatttgtaaaagagaatcattattattttccacaatattagaaaaccttgtatgacattaatcatttattttctgattcattt

SEQ ID NO: 107733 - DNA, 181 bp, Homo sapiens
catttttggttgctgtgcctggaggaagggtgccgccgtcatgtagtgggtagaggccagggacgctgctcaacatcctttagtgcccgggacagctcctcaacaaaggattctctagctcaaatgtcaatagtgccaaggtggagaagccacctgggtataaacccagcccagaaatgta

SEQ ID NO: 107734 - DNA, 575 bp, Homo sapiens
ccgtctagaggatccggtcgacggggatttagacacaagtactctctacaaatggcagacaaccaagttgatgattcactgttagggcaatggcttccatgaaacactgaatcacaaaagcggaaatactctgaactcccaaccaagggagagaacacaggcatttggagaccaccacattctttatatactttttgaaatctaaagcatacacctattacttatacttctgaaggtatgtccagacacccagttaagcaactctaagtagaaaaatgaaatttaaaggtttttaaaatttaaatattcttaatttaaacagccccaattcataccgaatggtcataaacataaaacatcaagtcttactattaagatttttacttcaagaactaattctacaagtatgactaccctacaaataatgtaaaaaccgacttcattttggcagcactggtaaatcacgcatactaaaatcattctaccagatgacaattcaaatattgaaacacagaagaaaaataaaatatttgacaaggctttcatttagaaacatctcaggacacagttcagtc

SEQ ID NO: 107735 - DNA, 369 bp, Homo sapiens
aaaagtcagagtaatgccatcataattttttgttgttgttgaggtgtacagtacttccaccaggctggacaagtaaagtatgcaacactaacataattcacctggaggtggaaaatatttcagaaagcttagttataaaatacggatgttagtggtgtctgcacattggaagttaacaatgggatcactgtggtaaaaaatgatttacagtatattattccttaatttcatatgtgctttgagttccaaatataaaagctgtttgttttatttctctgcagacccagtttaagatgccagcaaacctagaaattacttttgtttttcatcccaagctgtataactttagaagaatcatagcctgtgcag

SEQ ID NO: 107736 - DNA, 378 bp, Homo sapiens
tctaagaccttgcaatacacgaactgttcagctgagcagctcatctcccccttccacatattgctgctctcaagggagataaattaaatatggaacagtagacaaataaaaactactggggcttgtagggccccaaaagcataaaaggacatggtaagtaatgcttagtggtaacaacaggaatccctctacccttattttcaaccctttctctgccattttttcaaaggagcatgccactttctcattaattagtctctgtgcatgtagttcaatcaaaaattcacaagaaaggggcagatgatggccagacccttggttttagtttctgatatccccttcactgtttctgagattggatggagaacatcaacttgt

SEQ ID NO: 107737 - DNA, 399 bp, Homo sapiens
agcctaccgcacgcctttgttcttgtgccaacagtgcccactgcccggtagtgcctgtgtgtgcggtggccatgatggcaccacaatgtctgaagccacacagtgcatgggtgacatctgtggaaaggacctggcaccggccagcacacagaggcactcacctgtctcacacaatgcactgtggtcccaattctagttttgtaaaactaccttgagatgactccttttaaaattatccttaagatgtctttctttttctaaagcttattaaaggtcattttcaaaacgttttcagcaggaacttggtgtatatttgcagttctgcatggaaaactaatggagtcatgatggctgctgatgctgatgaagtagtaccagccagcctgatttcataacttc

SEQ ID NO: 107738 - DNA, 302 bp, Homo sapiens
aaaaggggagaaaaatctccacaactcagaactaagccaacagttcctagacttgacaccaaaagctctaatccacaaaaggaaacactgataaatggaagctcatcaaaagtacagagtaagaccctgtaaacaggatgaggaaacaaattactgactggaagaaaatattttcaagtcacacatctaccaaagaacttgagattagactatctaaagaattccaattagaaaactggcaaaaaatatgaatagacattttactaaagaggatgtaggccaggggcggtggctctccagca

SEQ ID NO: 107739 - DNA, 532 bp, Homo sapiens
gtcagactcccagccttgtgcaatataaacactccatgaatgtttactgagtgaaagaataagtgagcatcactctatgacaagacatatggcaaatcaagaaaatctgtgtcaggattttttcctcttctacataatggctaatgacactgttttcattcccaactaagaatagtattgttgaccaggcgcagtggctcacacctgtaatcccagcactttgggaggccaaggcgggcggatcacgatgtcaggagatggagaccagcctggctaacatgctgaaaccccgtttctaccaaaaatacaaaaattagctgagtgtggtggctcttgcctgtagtcccagctactcaggagcctgaggcaggagaatggcttgaatccgggaggtggaggttgcagtgagccaagatcgtgccattgcactccagcctgggtgacagagtgagactccatctcaaaaaaaaaaagaatagtattgttgcaagaactttactaaaagaaagtaggaccaacatatgctggaatt

SEQ ID NO: 107740 - DNA, 647 bp, Homo sapiens
gacacactggaaaaaaactggtgatataggagagagagagtgaagagttctggagttatgtccttcaaagattggatctgctgcacaagaggagacatcttttaaataggagcatgggtagttcacctacagtagaaagtgggaacacagagcatcctctacagatgttggtaattggagaggtctggtggtggaaatctggtggtagatgggaagaagataatgtgctgaagttctcttatcactgcttcagttttcccagtgaaataaaaaaaatcatcagttgagagtgaggatatgggtggatgtgctgaaatatttgaaaggaatgtgatagttctatgttctgtaggagaacaaatggcctagggaactatagtatatttgctgggcaccattaaagacccatttaagtttaaagtgagatcgttcagccatattaaatcgcccaggtttaggtttggagtaggcagaaaaattggatttttctaggcttgtgatttggtcaaacacccaaaacaaagtgacagtgaggcaggggaattgaaggcatgtgcaagagagtgaatataatgattaaccataaaatttaagataatctaggagggagataagctgtctgaggagtgagggaaacagaaaagatg

SEQ ID NO: 107741 - DNA, 355 bp, Homo sapiens
gctctagaggatccgttacctgttatccccacccaaagacaagtgtatttgtatgttcatcatagctctattcatcacagcaaagattcatcaatgcccatcattgcccatcaacggtggactcaataaagatgtgatacagagacaccgtggaatactgtacagccataaaaagaacaaatcatgtcctttgcagcaacatggatggagctggaagccatcatcctaagtgaattaatgaagtaagagaaaaccaaataccacatgttctcacttataagtgggagttaaacactgggtactcataaagatggttacaacagacacagggaactactggggtgggggaaggaag

SEQ ID NO: 107742 - DNA, 347 bp, Homo sapiens
aggacatcattcaaacaaaccagaatatattcagatgctaatgcctccactgacccagaaatggaacatgttaaatggtgaagataaggatctcttccctttacctgagtgcctatcttcagttgccacagcactgcagtctggctttcttccatactgtgaacctgtgtaagagacaatgaggaaaacttgcccaagccatgctaaacaatgctcaaccagatcaatatgaagctccagataaagattttatgttagtgtctcttgatttactgagtggcctggctgaaggacttggaggcaacattgaacagctggtagcccaaagtaacatcctaacactaatg

SEQ ID NO: 107743 - DNA, 783 bp, Homo sapiens
gcacttgaagccccgttaataggcaaagctctccctaagtaatatcaactagctaatgtaatcagtctcggtgcttgctttactactgatatatctgagctggtatgctatagagatcaataactcttttgatatgcttgtcaatttgtagtgttgatgagcaatttctcttaaggagtctgccttccaatgttagtgtgccttcataggaaataaaagtgccataatttcatgtgaaacatccatctgttgttaatatttaattattatttccattattagctgagatgtctcaatccctgaaaactttaatcaactgctcctaaatttactgtgtaaaataaattttctttaaaatttctttgaggtgtttatataagttaatagctaattgcattttaaatcttgaatggaaaactagaatatttatgatgtttaagtcattagaattgggcagagcatctttttaaatggaaaagaatattggaaagaaataaatatcttttgctgaaatttatggaagtacacactaatcagctgtgatatttaaatttttttctccctaagtttgttaccttttaccttccatattttttatgtctctcaattcttctaaccaatattttctttagccctcttctttatctcctctttctttcttttttctcttttgtttctttttaaaatttctccttcctttgttcttcatcctttctttctgttataaacattcacatatttacaaagctcatcaataagtgcaagcagtaatgggattgggca

SEQ ID NO: 107744 - DNA, 436 bp, Homo sapiens
tacaaagttgcagtgtgtgtgaatgtctgtgtcattgtttgccaattcccctgcctctgctactaaactgagcacctctatttccctcatgtctttctcagtggttacaaatggcaggtctaaggacaggtatctaattaaagctaggccaattacagtatctctggccttggcatgttgaattgatacaaaggtaggttcccaacgccaatcacgttccttctctgggattgtatatactggaataagatgagattgagatctaatggatagacataaaactcagaaactatttgggagctgtgtattaggcagcatctatagtggaaagagcaatgatattgatgctatgatgaaaaataggttgcttgtggaatttttaatgcgcacgaagctaggaccctaaggaggaaggccaaagtatgacagctccaat

SEQ ID NO: 107745 - DNA, 392 bp, Homo sapiens
atgcatttgccaaatattcagatttctaggagagttattttttgaattatgagagtatatcctttaaatcaaaacatcagtctcctcattgactcttgggtattgggaaaatgataacctgcttaaaaagctacctacatttaggttgaaattatttatctagccgtaatctagttttctgctatattaaagaaaaccctaatattaacattttagctgtatatattttaaaatcgagaatagcaaatgaaaaaatttaacaaaagagaaacatttgagtttcttaatattttggggagaaaattcagaaacaaaactaatgcaatatttgcctctggcagtcattttattatgtttaaaaaaccaagtttttccagcagtgaaggtgtaaa

SEQ ID NO: 107746 - DNA, 485 bp, Homo sapiens
cctgctcctgtaagccccgatgatgatggaaacgacaatggctgtcatgtccctacagcgtgtctgcatccagcactgtgctcaggactttgctcgcattactattaccccttacataagcccgagagagttatttctccttctagagttatttttctattcggaaaatcattatcttctctcttagaaattacaaaactgaaggtcagggagattcagtgatttgctcagtaatgcacagctgatgggaggcaaagctaggatttgaacaaaggccaaacctgactccaaagccaaagttctttctactccatcatgtggacttgagatccggcatcagtaagctacggcccatggccaaacccagccactgtctgttctcgcaagccccatgagaatgaagactggattttacatttgccctccaattcagtgaaatgttttctcccaagaaagaaccccttctgcttttctcattagtagac

SEQ ID NO: 107747 - DNA, 416 bp, Homo sapiens
gtggccggaagactgaagcatcagcacagtaaggaagccattaaattggccaaagaacaatccttagaaacattgtggaaaactttaggggtcaagtgcaagccagacaaagtcaaaaagagagacactggggtcatgagatctatgatgtgcccagtggttgtgatgtgtaaaaaatagagatggtacatggccaggcacggtagttcacgcctgtaatcccagcactttgggaggctgaggcgggtggatcacctgaggccaggagttcaagaccagcctgaccaacatggtaaaaccttgtctctactaaaagtacaaaaaattagccaggtgtgctggcgggcgcctgtaattccagctactcgggaggctgaggcaggagaatcgcttgaacccaggagatggaggttgca

SEQ ID NO: 107748 - DNA, 255 bp, Homo sapiens
gtggattttccaggtgttttggctggttcttgtctgatttaaatagggcaggatacctttttttacgcagaggagcaatcaccatataaaaataattgggcctctgaataggagtcctggactgctctctactttgccccgatttgtacgatgaccttatcacattgggaccaaagcttatactggaaagggtactttggtcccactatttaaggatttcactcatttaataaatattcactaagcctttgctct

SEQ ID NO: 107749 - DNA, 410 bp, Homo sapiens
ccgggttcacgccattctcctgcctcaacctcccaagtagctgggactacaggcgcccgccaccgcgcccggctaattttttgtattttttagtagagacggggtttcactgtgttagccaggatggtctcgatctcctgacctcgtgatcttcccacctcggcctcccaaagtgctgggattacaggcgtgagccactgcgtccggcctccactgcactgtcttgtcttttacctttttttgttttctttagacgggtttccctgtgttacccaggttgaccttgaactcctgatctcctcaaacaatcttcccgtctcagcttctaagtagttgggactacaaggagcccaccaccatgctgggctacctccactgtctcactggatcgtctcactccttgtcgtatt

SEQ ID NO: 107750 - DNA, 394 bp, Homo sapiens
gagtgcagtggctattcacaggagcaatcccactgctgaccagcacgggagttttgacctgctgcttctgacccgggccagttcacccctctttaggcagcctggtgatcccccctaaccccacctcccctcttgggaagtcaccgtattgatgctgagctcagtgtgggcacccgatgggcacagaccccagaaagcccagaactcttgggctcaggagatcctcctaagtggctggaactccaggcatgtatcaccacgctcagtccctttcatctttatagtctccagactctgttagggggagactctggttccactggcagttggaaagattctaaaccagccccaccaccctcttgggagagacttggccccatctgtaacttgagac

SEQ ID NO: 107751 - DNA, 243 bp, Homo sapiens
cttgtttctttcctgttactaacatccccaagggctgccactgtcctgacttttaaaatcatgagtcagtttagcctattttggcaccttacataaatggaatcatacagtatgtgctcttctgtatctagcttctttcgttcagtgttatttttgtgatcatctagttgtagttccagattgttcattcttattgctgtatggtattcaattgcataaatataccaaaagtagtcactttta

SEQ ID NO: 107752 - DNA, 144 bp, Homo sapiens
cgggtctttctggatgctgcggtgggagggggctggacctgctctggggccacttgtgccattccgcccagtcacctcctgcccctttcaggcaatgactgttctacggaggcctagttctctgggtaattctgttttggctac

SEQ ID NO: 107753 - DNA, 645 bp, Homo sapiens
gttccacaacgtgagtgccaagaaggtattttctctcttgctgagagctttctgggaaaagggtgcagatcaggtgaagatgacttgagcaaggtgccttatcgtggagtgctggacagacgagcctcacatggtgtcagccagaacagactgttctctgcagtgaatctgagccttcaagattcatgtaggacatgatttggctaagaagggagtatcacagtgaaattttgttcagactttacactccatttaaaccaagaaaccatagtcttctcaagatagaaccagtttttgcaagctcctcctgcaaacctcccaaaccgaagaaaaaaaaaaaaagcatggttctatcagtaaacctcacaaaccacaggctattcaaagtacagagagctgagaaagaaaggatgttgcaaattctaaagacatttctgtctcgcccttttagtcctgaatctattggcttcagtctctcaaaagtgtgagatggaaataattagatcattttcaggagttctttgggtttttcaataagattttgaagctaagaatcttccttggtgactggtaacttttaaaaacataaggtggttttaccgtgtctctcaaatcaaaaaagttcaggttcaggtcaagaaaaga

SEQ ID NO: 107754 - DNA, 330 bp, Homo sapiens
aattcatgtggggaaacatgggaagagttcagctgtgtgttccttgcagcacaatctttcattgcagaagaatgggaagaatggaaatgcccagtactagaagaacggataaggctgtggtggcctacgcacttactggccttcaccggaatattctgcagcagtgcagaaaaatgagtgattgaatttgaagtgcaagcagcagaatactgtgatttcagttctgccagtctcaaaattaaatctcatttgtaaggcaggcagtattgtgggagaattcctctaatgtatttcattcccagagtgtttatgcagtggcaggaagagtac

SEQ ID NO: 107755 - DNA, 1431 bp, Homo sapiens
tactcaccaacctttattaagtacattttagatactgggattagaagatgatgtcattagacatttctttggttttagcttctgtgggtttgatcaaggagtttattcagtattttaaatcttcccccaaatctggctttaactctttgccttaagagtgctttgtgtttgtttcttttacttagccctttgaggtggacctttctcacgtgtatcttgcctatactgaggagagtctgcgtcagtctttgatgaaactagaaagaccacgaacttcaaaggggaaagcaaggccaaagacagggagaagaaagcgttctgcaaagcctgaaactgtaattgactctttactgcagtaaatgttacagacttaaagtcacaataaaaattagtgatattctcatgcctggacaaaatctttaattaaaacagtgaagacttctctataatttcaattaatggaagttgtagatcaatgaataagactggaaataataatttgcttaagaacttttagtctacatatattaatataacattaaaattgtacaactggtgattgttcaaattgttgtactactactcttcaattgtactgtgcagggaagttgggggaacagttcatactatagagagttacagtttagatgtatgtgtaaatcgattagctatttatccaactactgtatatttaggtaactagaatttcaaaatagaaaaaaaaaaaactgtgtcctgttttgcacatagaaagaagcagatcagattgtcctatgttgcgctgttatatatgaatgtttggactgtacatctaaagaatgattccgtcctaacacccacccagcctgtttgaacacattctaattgtctaacatttgttgcattttaagtatgagatgactgatcttatgaatgttttgtagaaaatgttataatttaacagtctttgcgagtatacatgttttttaacaagttgaaaatgtttcatctgaacctttcctaacttttttttgccagtttgagttcaaatcaaatacaccttaagttctggtttcatgttctcttgaaacattgaattgtacgtaaatataaaggatctactgttgcggaaaattaagaagctaaatactgctcagttatctttgcctgcgtgtatatttttaaaaattcactctgaagtgttatggatgcttttctttgagttctaaattttggtgggaattactttatgtctcccagttaagaagagtctccattttccagaaaatacagctaagcaagaaaaatatcttttaaatactttgcctttaaaacactttttattttgtttttctattttaaaaataaaatattattttctgaatttcttctattgggtaatccagttagaccatattcctctacaaataaaaactatgttgatttcatagt

SEQ ID NO: 107756 - DNA, 3703 bp, Homo sapiens
agcgggcggctgcgcactgggcgctctcgcccgagaagccgcagtctcgagagcgtcaacgaggtgtttcggtagtctctggccatcctttctgcgcacccggtgtcgctgggctgcaccccgggcggggacgtccgccgggcacgggagggggccaagatgccgatcaataaatcagagaagccagaaagctgcgataatgtgaaggttgttgttaggtgccggcccctcaatgagagagagaaatcaatgtgctacaaacaggctgtcagtgtggatgagatgaggggaactatcactgtacataagactgattcttccaatgaacctccaaagacatttacttttgatactgtttttggaccagagagtaaacaacttgatgtttataacttaactgcaagacctattattgattctgtacttgaaggctacaatgggactatttttgcatatggacaaaccggaacaggcaaaacttttaccatggaaggtgttcgagctattcctgaacttagaggaataattcccaattcatttgctcacatatttggtcatattgcaaaagcggagggtgatacaagatttttggttcgagtgtcttatttggaaatatataatgaagaagttcgtgaccttttgggcaaggatcagacacaaaggttagaggttaaagaaagacctgatgtgggagtttatatcaaagatttatcagcttatgtggtaaataatgctgatgatatggatagaattatgacgctaggccacaaaaatcgttctgttggtgcaactaatatgaacgaacatagttcccgttcccatgccatctttacaattactatagaatgcagtgaaaaaggcattgatggtaacatgcatgtcaggatggggaagctccatcttgtagatcttgctggttcagaaagacaggcaaaaactggagctactggacagcgcctaaaggaagctacaaaaatcaatctttcactttccacccttggtaatgtaatttctgccttggttgatggaaaaagcactcatgtgccttatcgtaactctaaactgactcgtcttcttcaggattccttaggaggaaattcaaaaaccatgatgtgtgcaaatattgggccagcagattacaattatgatgaaactatcagtacattacggtatgccaatcgtgctaagaatattaaaaataaagctagaattaatgaagatccaaaggatgctttgctgcgtcagttccagaaagaaatagaagaactgaaaaagaagcttgaagaaggtgaagaaatatcaggctctgatatcagtgggtcagaggaagatgatgatgaagagggtgaggttggagaagatggagagaaaaggaaaaaaagaagggattcaaataggaaaaaagaaagtctccccagacaagatgattgaaatgcaagcaaaaattgatgaggagagaaaagcacttgaaacaaagctcgacatggaagaagaagaaagaaacaaggctagagctgaattagagaaacgggaaaaagatcttcttaaagcccaacaagagcatcagtctttgctggaaaaattatctgccctggaaaagaaggtaattgttggtggggttgacttgttggccaaagctgaggaacaagagaaacttcttgaagaatctaacatggaactggaagaaaggaggaaaagagcagagcaacttcgcagagaacttgaggaaaaagagcaagaacgcttggatattgaagaaaaatataccagtttgcaagaggaagcacagggaaagaccaagaagttaaagaaagtttggactatgctgatggctgcaaagtcagagatggctgatctccaacaagaacatcagagggaaattgaaggcctactggagaacattcggcaacttagccgggagcttcgacttcagatgcttattattgataactttatacctcgggattatcaggaaatgattgaaaactatgtccattggaatgaagacataggagaatggcagctagtgagtattaccttcattctttcacgtaataattaaagagtacttcctatggtctagaaattgtgctggctacagtggggaggaacatggtccagtagatgaatcagatgagaatccagtagggcagataaaatatttttctaattccatgtaattaattgtaacatacagatcatggtctgggtggaaatggtcagagttaggggctatgtgggactaagtgacctctggggccctttctgctctagcattcaaatcatgttttactagtgtaatgttaggatttctcagttatttgcctaactcacagtattgattactaattaagacatttctctgtctctcccttttctttttttgagaaatgtgttgcttatacaggaaataacatgaggaagcaaaccccagtacctgataaaaaggagaaagatccctttgaggtggacctttctcacgtgtatcttgcctatactgaggagagtctgcgtcagtctttgatgaaactagaaagaccacgaacttcaaaggggaaagcaaggccaaagacagggagaagaaagcgttctgcaaagcctgaaactgtaattgactctttactgcagtaaatgttacagacttaaagtcacaataaaaattagtgatattctcatgcctggacaaaatctttaattaaaacagtgaagacttctctataatttcaattaatggaagttgtagatcaatgaataagactggaaataataatttgcttaagaacttttagtctacatatattaatataacattaaaattgtacaactggtgattgttcaaattgttgtactactactcttcaattgtactgtgcagggaagttgggggaacagttcatactatagagagttacagtttagatgtatgtgtaaatcgattagctatttatccaactactgtatatttaggtaactagaatttcaaaatagaaaaaaaaaaaactgtgtcctgttttgcacatagaaagaagcagatcagattgtcctatgttgcgctgttatatatgaatgtttggactgtacatctaaagaatgattccgtcctaacacccacccagcctgtttgaacacattctaattgtctaacatttgttgcattttaagtatgagatgactgatcttatgaatgttttgtagaaaatgttataatttaacagtctttgcgagtatacatgttttttaacaagttgaaaatgtttcatctgaacctttcctaacttttttttgccagtttgagttcaaatcaaatacaccttaagttctggtttcatgttctcttgaaacattgaattgtacgtaaatataaaggatctactgttgcggaaaattaagaagctaaatactgctcagttatctttgcctgcgtgtatatttttaaaaattcactctgaagtgttatggatgcttttctttgagttctaaattttggtgggaattactttatgtctcccagttaagaagagtctccattttccagaaaatacagctaagcaagaaaaatatcttttaaatactttgcctttaaaacactttttattttgtttttctattttaaaaataaaatattattttctgaatttcttctattgggtaatccagttagaccatattcctctacaaataaaaactatgttgatttcatagt

SEQ ID NO: 107757 - DNA, 2659 bp, Homo sapiens
cgagcggccgcccgggcaggtacgcgggatcagcttatgtggtaaataatgctgatgatatggatagaattatgacgctaggccacaaaaatcgttctgttggtgcaactaatatgaacgaacatagttcccgttcccatgccatctttacaattactatagaatgcagtgaaaaaggcattgatggtaacatgcatgtcaggatggggaagctccatcttgtagatcttgctggttcagaaagacaggcaaaaactggagctactggacagcgcctaaaggaagctacaaaaatcaatctttcactttccacccttggtaatgtaatttctgccttggttgatggaaaaagcactcatgtgccttatcgtaactctaaactgactcgtcttcttcaggattccttaggaggaaattcaaaaaccatgatgtgtgcaaatattgggccagcagattacaattatgatgaaactatcagtacattacggtatgccaatcgtgctaagaatattaaaaataaagctagaattaatgaagatccaaaggatgctttgctgcgtcagttccagaaagaaatagaagaactgaaaaagaagcttgaagaaggtgaagaaatatcaggctctgatatcagtgggtcagaggaagatgatgatgaagagggtgaggttggagaagatggagagaaaaggaaaaaaagaagggattcaaataggaaaaaagaaagtctccccagacaagatgattgaaatgcaagcaaaaattgatgaggagagaaaagcacttgaaacaaagctcgacatggaagaagaagaaagaaacaaggctagagctgaattagagaaacgggaaaaagatcttcttaaagcccaacaagagcatcagtctttgctggaaaaattatctgccctggaaaagaaggtaattgttggtggggttgacttgttggccaaagctgaggaacaagagaaacttcttgaagaatctaacatggaactggaagaaaggaggaaaagagcagagcaacttcgcagagaacttgaggaaaaagagcaagaacgcttggatattgaagaaaaatataccagtttgcaagaggaagcacagggaaagaccaagaagttaaagaaagtttggactatgctgatggctgcaaagtcagagatggctgatctccaacaagaacatcagagggaaattgaaggcctactggagaacattcggcaacttagccgggagcttcgacttcagatgcttattattgataactttatacctcgggattatcaggaaatgattgaaaactatgtccattggaatgaagacataggagaatggcagctaaaatgtgttgcttatacaggaaataacatgaggaagcaaaccccagtacctgataaaaaggagaaagatccctttgaggtggacctttctcacgtgtatcttgcctatactgaggagagtctgcgtcagtctttgatgaaactagaaagaccacgaacttcaaaggggaaagcaaggccaaagacagggagaagaaagcgttctgcaaagcctgaaactgtaattgactctttactgcagtaaatgttacagacttaaagtcacaataaaaattagtgatattctcatgcctggacaaaatctttaattaaaacagtgaagacttctctataatttcaattaatggaagttgtagatcaatgaataagactggaaataataatttgcttaagaacttttagtctacatatattaatataacattaaaattgtacaactggtgattgttcaaattgttgtactactactcttcaattgtactgtgcagggaagttgggggaacagttcatactatagagagttacagtttagatgtatgtgtaaatcgattagctatttatccaactactgtatatttaggtaactagaatttcaaaatagaaaaaaaaaaaactgtgtcctgttttgcacatagaaagaagcagatcagattgtcctatgttgcgctgttatatatgaatgtttggactgtacatctaaagaatgattccgtcctaacacccacccagcctgtttgaacacattctaattgtctaacatttgttgcattttaagtatgagatgactgatcttatgaatgttttgtagaaaatgttataatttaacagtctttgcgagtatacatgttttttaacaagttgaaaatgtttcatctgaacctttcctaacttttttttgccagtttgagttcaaatcaaatacaccttaagttctggtttcatgttctcttgaaacattgaattgtacgtaaatataaaggatctactgttgcggaaaattaagaagctaaatactgctcagttatctttgcctgcgtgtatatttttaaaaattcactctgaagtgttatggatgcttttctttgagttctaaattttggtgggaattactttatgtctcccagttaagaagagtctccattttccagaaaatacagctaagcaagaaaaatatcttttaaatactttgcctttaaaacactttttattttgtttttctattttaaaaataaaatattattttctgaatttcttctattgggtaatccagttagaccatattcctctacaaataaaaactatgttgatttcatagt

SEQ ID NO: 107758 - DNA, 1965 bp, Homo sapiens
cagcatcacctctatttctctgttaggacatttgctccatctgtatctagtcacagcaaatccaatctcctggaatcagtttaatgagcagaggagattatactggagtcagctgaaggacatactgatggagcaaatgtcctaacagagaaatagaggtgatgctactgcgcatcttacaagagcatcagtctttgctggaaaaattatctgccctggaaaagaaggtaattgttggtggggttgacttgttggccaaagctgaggaacaagagaaacttcttgaagaatctaacatggaactggaagaaaggaggaaaagagcagagcaacttcgcagagaacttgaggaaaaagagcaagaacgcttggatattgaagaaaaatataccagtttgcaagaggaagcacagggaaagaccaagaagttaaagaaagtttggactatgctgatggctgcaaagtcagagatggctgatctccaacaagaacatcagagggaaattgaaggcctactggagaacattcggcaacttagccgggagcttcgacttcagatgcttattattgataactttatacctcgggattatcaggaaatgattgaaaactatgtccattggaatgaagacataggagaatggcagctaaaatgtgttgcttatacaggaaataacatgaggaagcaaaccccagtacctgataaaaaggagaaagatccctttgaggtggacctttctcacgtgtatcttgcctatactgaggagagtctgcgtcagtctttgatgaaactagaaagaccacgaacttcaaaggggaaagcaaggccaaagacagggagaagaaagcgttctgcaaagcctgaaactgtaattgactctttactgcagtaaatgttacagacttaaagtcacaataaaaattagtgatattctcatgcctggacaaaatctttaattaaaacagtgaagacttctctataatttcaattaatggaagttgtagatcaatgaataagactggaaataataatttgcttaagaacttttagtctacatatattaatataacattaaaattgtacaactggtgattgttcaaattgttgtactactactcttcaattgtactgtgcagggaagttgggggaacagttcatactatagagagttacagtttagatgtatgtgtaaatcgattagctatttatccaactactgtatatttaggtaactagaatttcaaaatagaaaaaaaaaaaactgtgtcctgttttgcacatagaaagaagcagatcagattgtcctatgttgcgctgttatatatgaatgtttggactgtacatctaaagaatgattccgtcctaacacccacccagcctgtttgaacacattctaattgtctaacatttgttgcattttaagtatgagatgactgatcttatgaatgttttgtagaaaatgttataatttaacagtctttgcgagtatacatgttttttaacaagttgaaaatgtttcatctgaacctttcctaacttttttttgccagtttgagttcaaatcaaatacaccttaagttctggtttcatgttctcttgaaacattgaattgtacgtaaatataaaggatctactgttgcggaaaattaagaagctaaatactgctcagttatctttgcctgcgtgtatatttttaaaaattcactctgaagtgttatggatgcttttctttgagttctaaattttggtgggaattactttatgtctcccagttaagaagagtctccattttccagaaaatacagctaagcaagaaaaatatcttttaaatactttgcctttaaaacactttttattttgtttttctattttaaaaataaaatattattttctgaatttcttctattgggtaatccagttagaccatattcctctacaaataaaaactatgttgatttcatagt

SEQ ID NO: 107759 - DNA, 3341 bp, Homo sapiens
agcgggcggctgcgcactgggcgctctcgcccgagaagccgcagtctcgagagcgtcaacgaggtgtttcggtagtctctggccatcctttctgcgcacccggtgtcgctgggctgcaccccgggcggggacgtccgccgggcacgggagggggccaagatgccgatcaataaatcagagaagccagaaagctgcgataatgtgaaggttgttgttaggtgccggcccctcaatgagagagagaaatcaatgtgctacaaacaggctgtcagtgtggatgagatgaggggaactatcactgtacataagactgattcttccaatgaacctccaaagacatttacttttgatactgtttttggaccagagagtaaacaacttgatgtttataacttaactgcaagacctattattgattctgtacttgaaggctacaatgggactatttttgcatatggacaaaccggaacaggcaaaacttttaccatggaaggtgttcgagctattcctgaacttagaggaataattcccaattcatttgctcacatatttggtcatattgcaaaagcggagggtgatacaagatttttggttcgagtgtcttatttggaaatatataatgaagaagttcgtgaccttttgggcaaggatcagacacaaaggttagaggttaaagaaagacctgatgtgggagtttatatcaaagatttatcagcttatgtggtaaataatgctgatgatatggatagaattatgacgctaggccacaaaaatcgttctgttggtgcaactaatatgaacgaacatagttcccgttcccatgccatctttacaattactatagaatgcagtgaaaaaggcattgatggtaacatgcatgtcaggatggggaagctccatcttgtagatcttgctggttcagaaagacaggcaaaaactggagctactggacagcgcctaaaggaagctacaaaaatcaatctttcactttccacccttggtaatgtaatttctgccttggttgatggaaaaagcactcatgtgccttatcgtaactctaaactgactcgtcttcttcaggattccttaggaggaaattcaaaaaccatgatgtgtgcaaatattgggccagcagattacaattatgatgaaactatcagtacattacggtatgccaatcgtgctaagaatattaaaaataaagctagaattaatgaagatccaaaggatgctttgctgcgtcagttccagaaagaaatagaagaactgaaaaagaagcttgaagaaggtgaagaaatatcaggctctgatatcagtgggtcagaggaagatgatgatgaagagggtgaggttggagaagatggagagaaaaggaaaaaaagaagggattcaaataggaaaaaagaaagtctccccagacaagatgattgaaatgcaagcaaaaattgatgaggagagaaaagcacttgaaacaaagctcgacatggaagaagaagaaagaaacaaggctagagctgaattagagaaacgggaaaaagatcttcttaaagcccaacaagagcatcagtctttgctggaaaaattatctgccctggaaaagaaggtaattgttggtggggttgacttgttggccaaagctgaggaacaagagaaacttcttgaagaatctaacatggaactggaagaaaggaggaaaagagcagagcaacttcgcagagaacttgaggaaaaagagcaagaacgcttggatattgaagaaaaatataccagtttgcaagaggaagcacagggaaagaccaagaagttaaagaaagtttggactatgctgatggctgcaaagtcagagatggctgatctccaacaagaacatcagagggaaattgaaggcctactggagaacattcggcaacttagccgggagcttcgacttcagatgcttattattgataactttatacctcgggattatcaggaaatgattgaaaactatgtccattggaatgaagacataggagaatggcagctaaaatgtgttgcttatacaggaaataacatgaggaagcaaaccccagtacctgataaaaaggagaaagatccctttgaggtggacctttctcacgtgtatcttgcctatactgaggagagtctgcgtcagtctttgatgaaactagaaagaccacgaacttcaaaggggaaagcaaggccaaagacagggagaagaaagcgttctgcaaagcctgaaactgtaattgactctttactgcagtaaatgttacagacttaaagtcacaataaaaattagtgatattctcatgcctggacaaaatctttaattaaaacagtgaagacttctctataatttcaattaatggaagttgtagatcaatgaataagactggaaataataatttgcttaagaacttttagtctacatatattaatataacattaaaattgtacaactggtgattgttcaaattgttgtactactactcttcaattgtactgtgcagggaagttgggggaacagttcatactatagagagttacagtttagatgtatgtgtaaatcgattagctatttatccaactactgtatatttaggtaactagaatttcaaaatagaaaaaaaaaaaactgtgtcctgttttgcacatagaaagaagcagatcagattgtcctatgttgcgctgttatatatgaatgtttggactgtacatctaaagaatgattccgtcctaacacccacccagcctgtttgaacacattctaattgtctaacatttgttgcattttaagtatgagatgactgatcttatgaatgttttgtagaaaatgttataatttaacagtctttgcgagtatacatgttttttaacaagttgaaaatgtttcatctgaacctttcctaacttttttttgccagtttgagttcaaatcaaatacaccttaagttctggtttcatgttctcttgaaacattgaattgtacgtaaatataaaggatctactgttgcggaaaattaagaagctaaatactgctcagttatctttgcctgcgtgtatatttttaaaaattcactctgaagtgttatggatgcttttctttgagttctaaattttggtgggaattactttatgtctcccagttaagaagagtctccattttccagaaaatacagctaagcaagaaaaatatcttttaaatactttgcctttaaaacactttttattttgtttttctattttaaaaataaaatattattttctgaatttcttctattgggtaatccagttagaccatattcctctacaaataaaaactatgttgatttcatagt

SEQ ID NO: 107760 - DNA, 749 bp, Homo sapiens
agatgaatggatgaatgtttgtctattttcagtttcattatttttatattttcatgtgtatgcatatatgcacattttaatggaagggaatacttgagcagtccctccaataaataaaatgcttgtgccttgccaatagataccaaaccagctcataaataagtactaagcaaattctcatctcaatattatgggtctgaaaaattcgcttgtctggtttacagttttttctttatgtatttacattttcatgagatgtaaaaagtaatcttagtttctgacaattggaagcattcattaaaaatattctagaaataaatatgttgatggaataaacttctaaaagtcggaaatagattcagatgcatttgacaatttagtttataacaaaaatagcattttaaattatgggaaaatagaaatcattcaaatagcaacgttgagccatttgactcatcatgtagggagaaaaaacaattcagaaatttttatctttttctttacaaaaataaattttaaatggattaaagatggaaaaccccatggaattactagaaaatattgatgacgttatttagagttacagggatacttctttgcatgaatcaaaatctagaaaatacgtgggtagatttaaaaatttgaatataaaagaattaaaacttcttaaagaatattaaaagcaaaactaaaaaactagaaataaatttgcaactcatctagcaaagggctaatttcatcaatgtaaa

SEQ ID NO: 107761 - DNA, 309 bp, Homo sapiens
ttcatattaactggtttccttcaaactccaggaacagaaactaaccctttttgtgatacaaatcagtgtaacattcccagagtttgtacttgaggggccagaattcttagcagaggctgctggcatagttaacgcttgggcagggctaagtcactgggaaactgcctgacatgatcagaggttcaggtgtgctcatggaccacacagaacagcctgagagtttgtagcacatcacaaagcttggtggacttccctgtgtaagagccaaaactttgtttaagaggcgggaaagatggaagacaaggactg

SEQ ID NO: 107762 - DNA, 154 bp, Homo sapiens
cctggagggcaaagtctccgcgtccccagctgagatcccaagggcttcaagaagtgttttctacatggaaagtgactttgtcaagtgaaataatcaatgaggtccttattgtgtgagggaacacagaataatttttaaggtaaaactatcaccg

SEQ ID NO: 107763 - DNA, 388 bp, Homo sapiens
acaaggaagaaaatattttgcagaagcacttgtcaactttagggtgcttgaaagcatacccgcattgctccatagaattaaatgtaaatgatcctgaaaacaagtagagtctctatgagaaaggtcttggttggcatagactcagtataatttgctgattctgctctttctaagtttcatttgtgatttctaatattgaaatcctggttatttgcaggtttcagttagtttgttataccttaaccacaagtttctacctctgccagtttctgtctcttatggcttaatttggtgagtcatattaggaaaagtcaatcagaaattaattaccaggattcagcttgtcattttgaacacttaaagtagtgaaataaaagttacatttgaa

SEQ ID NO: 107764 - DNA, 299 bp, Homo sapiens
tggagtctgtgtgggaatgtaattgtgtatgtgtgcatgtgactgtgcgtaggtgtgcaggtgagtgtgcatgtgtgttgtatgaatagacgtgtgtgcatgtgtgagcagtgtgcatgtgtaagtgtaatgagtgcatatgtggagtgtgtgtgcacgtgtgtatgtgattgtaagagtgtgtgggcgtgcatgtgtgtatgtatatgcaagtgtgtgctatgtgcctgtgcataagtgtgcatgggtgagtgtgtgcatgtgattgtaagtgtgggtgtgcatgtgtgcatgcctgt

SEQ ID NO: 107765 - DNA, 888 bp, Homo sapiens
catattggccaggctgttctcgaactcctgagcttaagtgatccgcctgcctcagcctcccaaagtgctggggttacatgtgcgagccactgagactgggcatgtttatccttttgggatttatttatttcactgacgataatgtcttcaaggttcatccatgttgcggcctgcgtcagaagtgcctgtttgtttttgttgttttttttttcatttggttttattttgttttgctttgcgttttcatggagtctcactctgtcgcacaggctggagtgcagtggcacaatcggggctcactccaacctccgcctcctgggttccagcgattcttgtgcctcagcctcttgagtagttgggactataggcacacgccaccacgctcgtttcattttttgcattttcagtagagacagggtttcaccaagatggccaggctggtcttgaattcctgacctcaggtgatccgcccacctcggtcttccaagacgctgcgattacaggcgtgagccaccgcaccggccagaagtgcctgccttttgaaggctgaatggtcttccattgtatgaaagaactgcagtgtgctttttcattcatctgtccacgaacccttgggttgcttccacattttggctgttgtgaataatgctgctatgaatatgggtgtacacaaatctgtcttccactcctggcttctaattctttttggtaggtacccacaaatgcaactgcgggaacatctgatcattctgtttctaatttttccagtacacgccatactattttcccccactccttcacggttttacattccctccgatcagaatcgagcattcctacttctctctagtctcaccaatgcctgtttgtttatcacatccatcctaa

SEQ ID NO: 107766 - DNA, 915 bp, Homo sapiens
gacagtgagcggagatcgtgacattgcactccagcctgggtgacagactgagaccctgcctctaaaaaagaaatttttaaaataaatacatttcagttaattacaaataaattagtgaaatgctgagaaaaatatatgaaagtaaatttaaaaaacagttcttcatttttactaagcctacttgtggctagtggctaccatattggccaaggaaggctatggaacatttttatcatctcaggaagtactattggacagcacaaatccatagttctcacttgatcctcacgataatcctataaaatgacaagttgtacagtattgtatccatagaggccaggagactaaggttccaagaggttaaataatgtatcttttcatagaacttgagctagagaacttcctctagaagcaaataaatacaggcagatgtaaatacaaataaataaagggttttatctacaatttttaaatcttacaatgtaagtatcttgaaggcagagatgttgtctacctcttcaatattatatgcctaatatctattgcagagtctgacacaagccgaacacttagttactactaattagagggataaatacgtgtagtttttggcccaaacagaaattacagtttaatataattgtaaaaatttggatgtctttaccaaaggaactgctgggtttaaagggttataattaaagttctggttagtaaaagaaggaagtttgaaagctctgctctctattctgcttgcactctctttttagtatagtcacagctaagaagcagtaaattttcctactccgtgatggattcagccatttgaaaagtttgcaatattctatgaacgtgtaggcactgtttccagacaataagtttcaataaaccattgctgaaaacacttattttgcataa

SEQ ID NO: 107767 - DNA, 469 bp, Homo sapiens
tgaatagctaaatcttttctttttaaaacaaataaaaaagattagggaagtgagatcaagaagagcaaatagttgaaaccacatcaaacttgaaaaggaaaaaaatccctatgctcataattgcaaagtgccttccagattaaaggcctttgcccgctgcctgcatgtaatttcaagactaattctgattttatccattggataaaaatgaattagctaaaatctgggctgtagagtgcttttaattcttaaggtagatctctgggtccattttcaaggaattaaatgtaaattacgttaaaaagtctttaaggaatttggatttaggggactcgaagttgtcaagtacagtaacattaaaaaaaagggtagacaaatataggtcatggtttgtctttgttcaatccctgagattcctttttaagattttaaatggaattaaagatccaatatttgaagttgctaaaaa

SEQ ID NO: 107768 - DNA, 306 bp, Homo sapiens
attcttagagtatcctgaacttatagaaatcttgttttataatagtatcttatgacatttgaacagcatgattttatttatttatttatatttatatatttatttatttttgagacagagttttgctcttgttgcccaggctggagtgcaatggcatgatcttggctcactgtaagctctgcctcccaggtccaagcgattctcctgcctcagcctcccgagtagctgggactacaggcgcgcacccctaatttttgcgccctgctaatttttgtgtttttaatagagacagggtttcaccgtgtt

SEQ ID NO: 107769 - DNA, 302 bp, Homo sapiens
gtatcagcgcaacagagctagacccttagtggtgggcactccctagaggccccgttgattgagatacaattcacacccaaatcatccggcgggttaccagaatgtggctgtctcagagcccacatttggccccagaagggcaaccctgaagggcaagctcatttgtttattgatgaagtttgtagacaacccatgactgaagactgtataaatgaaattactacacaagttgcacagatttttctttttcattttcttttgagacagagtctaactctgtcgcccaggctggagtgcagtgg

SEQ ID NO: 107770 - DNA, 379 bp, Homo sapiens
gatgaatgtaaaaacttgaaggtacaagagagtctgacatataaaaatttgaaggaagacttaagtatctggctgcaatgcaacaacaaagaagctagttaagagagaagctagtaagaaagaaatagtaagagagaagctagtaagagagaaatagagttttaccaaataaatagtacagagtctatggcactcctctgccacctccaacagggctggtgcttgcacccaccattggaggactgagggtgggtcagtgtggaacagctctacccagctttaccctatctcaggctgagaatggagcccaggccgctgtgaaattcattggcctgaggagcctagcccatggcctgaggagtcagaaagcttctccaag

SEQ ID NO: 107771 - DNA, 274 bp, Homo sapiens
gtgagcccagctgtgagaatccatcctcacatttaaaactgcttttataaatggccttcatttccttttttcctctctgcctgtggagctatcctgaatcctgttctttgatgctgtgctgtctgtgaggtgctttgtgatgctaccattttcttgttggactagttcacattaattttactatatcatttttatgcaaaataattcaacatcttgagttttatgcagtaagagaaggggtgactttcctaccacagtgagctctggttagtct

SEQ ID NO: 107772 - DNA, 258 bp, Homo sapiens
acttcattaaaataaattaaataatctctgataacattttagtagatagtattctcgtctttcttaaggcatgaaactacacttttcaaattaaaaaatggtattataggccaggtaggtgtggtggctcacacttgtaatcccagtactttcagaggctaaggcaggtcagtcgcttgagcccaggagtttgaggctgcagtgagttattactgcaccactgcacaccagcctgggtgacacaagaccttgtctcaa

SEQ ID NO: 107773 - DNA, 368 bp, Homo sapiens
tcatttgaggccaggaactctagaccggcctgggcaacatggcaaaaccttgtctctactaaaagtacaaaaattagccaggcgtggtggcataggcctgtgctcccatctcagcaggctgaagtgggaggattgctcgagcccgggaggcagaggttgcattcagccaagatcatgccactgcattccagcctgggtgacaaagtgagaccctatctcaagaaaataaaaaataaaaaaaagaagggcttcacatggtggctaatcccaaagtgctgggattatatatgtgagccaccgtgcctggctgaaatttttattaagtaaaacgtaagttcacttgctcattgccacagtcaaagaactac

SEQ ID NO: 107774 - DNA, 228 bp, Homo sapiens
atttttacattcatttcatgagtgagactggcctgtaattttccatttctattccttgtcagttttggtgtaaaggttatgctggcttcatataacaagttggaaagaattcatttttttgccattctccagacaagtttgtataagaaaggggcttttttttttttttttttttccaagtgtcaaaggctgtttctttgatcatccactttattccaataacagaag

SEQ ID NO: 107775 - DNA, 343 bp, Homo sapiens
atcatagcttgctacagcctcaacctcccaggctcaagccatcctcccacctcaacctcccaagtagctgggactacaggcatttaccattacagccagctaatttttaaatgtttttttgtagagatgaggtcccactatgatgcccaggctggtctcaaattcttggactgatgcgatcctctcatctcagcctcccgaagtgctggaattacaggcatgagccacctcaccaggcctagacttggattgtgaaaggcatctcaaccatgacacattccaaaggcaaacttcttgattgaacccgcaactttgcttagccagccccatttctccaccatgc

SEQ ID NO: 107776 - DNA, 476 bp, Homo sapiens
gaactgcaaaaatggaggaggtggaaggaagctctcagccggggcagccggcccctcgtttcaggacaccatggctgggaagggagaaggaggagagaagatccaagctgagcggtgggggaggccttcccggagctaaacggaaccaaggagtccctggtgggtttggctcacccccacgggggagaggtaccgccagggcctgtccctgctgttgttggcccgtggcggtgggcctgtggccaacagccatctttcccctgaactccttgcaagggttgggacgtgcctgccacacatcggctctgcacatgagcttccgagggggtctgtgggcgcccccagcagctgccggctcagcccccagctcaggagagaagtgtcctctggctggccggcggggaggcttcccaccacgcgtaggcatgtcccagctcccacaccactcaccccgggtccccctgcatgcggttggc

SEQ ID NO: 107777 - DNA, 587 bp, Homo sapiens
tgaggccagcgacagcacgaacccaccaggaggaatgaacaactccggacccgctgccttaagagctgtaacactcaccacgaaggtctccagcttcactcctgaagccagcaagaccacgaacccaacagaaggaagacactctgaacacgtctgaacatcagaaggaataaactccgaacacaccatctttaagaactgtaacactcaccgcgagggtccatggcttcattcttgaagtcagtgagaacaagaacccaccaatttcagacacaccaccatataacagttgctcaataaatgcttcctcttttcaatttcctttgctctagattttacatttggaagactcagctccagacttctttaactaaccaaattctaatttttcttcaaggttcaatgcaggaccccagttccatgaagcatctgacttcatctcccctggtctctcccttcctctctctgaatctctgaacacttaagagtgtgactcataaagcctagcctgtgattctactgatgcattccgccttgcattttttctctaagattttccatttgtgatgatctttgaggctcttaga

SEQ ID NO: 107778 - DNA, 700 bp, Homo sapiens
tgattctattctattatctattctacattttcagggaagccctgtaccagttcagctctttgaataggaattttctccctctctcctttctccagagaggacctctaggcctctctaccctctcccctgaaatcccagccttcaccatccaaggagtgcccagctagttccagccattgtcctgatcacaaacatttcggtaagaatgccatgcttgtcccttgagtcagactttcatcctcttcaatccaacccgttcattcacttgtgagttcagcagtcactgaacatctactctgtgctaggcaatatgctagatgccagtgacacaaagccaataggacaatattctgactacgacaaagtcagacttgagtagatagcatgtgctgtaaccaagcttaacgggcacacaggggagagcattcaaaagcagacccaggaaggcagggaaagcaaggaagaatgctcagaggctgtgatactcgccctaaaacaatgggagcaatttagatcataaactcatggaaagatactctaggcagaagaaaggccagtgcaatgcacataggtgaggaaaagcatcatatattctggcagcctcaaggatctccacttgactggagtacagtgtgcaagggtgagtgtcaggagataatattgcaagagtatgtcccaaattatgttacatggactacca

SEQ ID NO: 107779 - DNA, 238 bp, Homo sapiens
tgtattgtttttggggaatggaggaagctcagtgtggtgcaagtgtagcccaaggtggggtggaaatggtcgtggtgtgtgtctggggaggagggtctggcagaatttggattttgtccaaagagcagtggagaaacggtgatgggaagtgacgtggtcagatctgcattttacgaagatctctcctctgagggaagaatgaacggggtaggccctggctgttggtaggcagggtcct

SEQ ID NO: 107780 - DNA, 133 bp, Homo sapiens
cctcccaaagtgctgagattacaggtgtgagccaccgcgtccagcctaattggctaagagtttaataatgagtggctgttgacttttctcaaatgcttttcctgtataaattgatatcatgtggttttgcttc

SEQ ID NO: 107781 - DNA, 335 bp, Homo sapiens
gcagggagctattagggaggaggggattgagggatttttactaaggcagaggcaggtgatagatttgagatttgcaaagtcagaacttggagcccagttgaggaatagcattacaatgttagcagcgttgttaggcgagcacaagacttcacaggtgatgctagttcaccaaaatgtgaacccacattaactggttttccttttgaatgtgatggttccaagaggtttgcagtcagtggagatgtgtgaaagggcttggaggtggaaatctgggtaagaatgccaagggcattcctggtagattaaaatggtaaagcaagcaacagatctggaaa

SEQ ID NO: 107782 - DNA, 662 bp, Homo sapiens
gggatgcccagtgaggtgagaccctcatcagattggagtggcgcagccatttcccagtttggccccaccattgtattgctattttagggccctagctcctactttcccttttattggacccttttctgggcacctttcgagtagatggggtcaacttaccttgcacaatcactgtacttctttttagaccttgaagaaatcttagtaatcaccctatctaatctctaccttttcttcatgaagaaagaggcccaggggttttgggaataaaccgaaagagtcagaaccagcctccaggtctccaggttccctgtctagggtatatttcagtctttgtggtggttttcagagaggctctcaggattgctgaacagagaacaagaaggcagggatctttctgcacatttgggctggcttgggattagcagttacactgagggtggggaagctctctccctctgctgggtaagccagacacacagagggcatttggggtagatcgctcttcagaagaggcatggagatgtatatttgtttttgtattctctcctgttttctgcctaatatgttgcagttttcttagcagcccttcccaccatttacctaactcctcagcctaagtggctgggcaaagattaatgtcataacttcctagatagtga

SEQ ID NO: 107783 - DNA, 96 bp, Homo sapiens
acatacgaatctgtccacaagtgacagggactgaattgcttaaactgcaagctccaggttactgtaatcagaggccacatttggtattgcactcca

SEQ ID NO: 107784 - DNA, 192 bp, Homo sapiens
agtaatcttaagtgtctttatttgtaaagcagaattaatagtacttaataagatgattgtgaagattcagtgagttggtgctggagatgaggttagcacagtgttttggtacagcatacgtgcttgataatcaccaggtattctatttcttttggaagagggcaataatgagatgggctaaagccatcaggg

SEQ ID NO: 107785 - DNA, 329 bp, Homo sapiens
tgggtcatgtgtaatctgacagtttaaaattatacaaaaatgtgctgaagtccttgcgttcattgcttagggagtatctgtgtgcaagaggaacattatatgaatgaatagaaatataattcaggtctcagctatttagaaaaaaaaatgcttcttaattctcttaatctaaagatttcttctttatctccttttgctttttctccttgcactttgttaaagaaactattgttctgtaggttttcctgtagagtctgagttttgctgattgcatccccatattgtcatttaacatgaactgctaccttctgtatttcctatacattgat

SEQ ID NO: 107786 - DNA, 298 bp, Homo sapiens
agggtgagaatacttggccctgatcaccgatgtcctagctcactgccccagtccagtcagtagcagaagccagccaagaaaaccaaggcttggctgggcgcagtggctcatgcctgtaatctcagcactttgggaggccaaggtaggcagatcaccagctcaagagttcaagactagcctggccaacatggtgaaaccctatctctagtaaaaatacaaaaattagccaggtgtggtggtgcatgcctgtagttccagctacttagtaggctgaggctggagaattgcttgaacccaa

SEQ ID NO: 107787 - DNA, 552 bp, Homo sapiens
caaaaattaaaagcaagaatataaacccaaagcataatgactaaaatggaaagaagtaaagcagaattacattttataaaacatttgcaacacaaaacaaagccacaaaaatgcttctcctaaataagaaataccagacgctaaaaaaaaaaaggaaaaaaattaattttaggaagaatgcactacaattttagtaccatagactagttaaatatattagtggaaacagaaaaacaatggatgcttcagtaagtaaggtgtgaaatccaataatggaaaacacatttctctatactcctaacacttctgacaccaaatatgtgggttttccacactaagcaattttccagttctctatggacagcaacagggtgtcctacaatttaattttgatactactgtcccaaacttagcacagccctcacaggttaagggctcagtgccacaagagtgtccccacttcagttggcattcgccaagttcagacctctggtacttctgaccgactagctataatagatcaggggtttccaaaaccctttcctcagatat

SEQ ID NO: 107788 - DNA, 342 bp, Homo sapiens
tgtgcgggtgtggtctgtgcggctgtgctctgtgcggctgtggtctgtgctgcaatttatgttactaaccagtcgtgagtttaccttattagcttagcaaatccagtaactgcaaaggtaaaaaactgtaaaccaacacacaaccaaactattgtgaaatttcataaaattcaaataactgaatttttactatatagtacaactgtatttttatttcaatttttcaacatttttactggttttctaaataagagcttacatgtatgtttctgctaactcaggcagttcaaacgtatggtaagttctatccgttcattccatttcccagaggtaaccactctt

SEQ ID NO: 107789 - DNA, 458 bp, Homo sapiens
atagaatccttcattttttttacataaatattacatcttaaccttttcatagaagagcctcggttttctttccaaaggtataaaggcgaggtctgtgtttccataagcagagaacatttatcctctgtcctgcctccctctagaacaaaatccattgctgtcttaatttccagttttgattgtagctctcagtgtgagacctcccagtgctgtagagtgtgtttcctctatgaggctcactcaccacaggcataaagatcggggtgaatttcccagccgcctacatccgggaatctctcattcggactcagcaagatcatttttatttttgaccagaaccttataaataaatcacaaatatataaatgtgatagggaaggcgcccatcacaactatttgttcaaacaaatcctgggcccaaagaaggagtgaaaaattaacttcctatcactttattt

SEQ ID NO: 107790 - DNA, 829 bp, Homo sapiens
ctaattaaagctcttgatacaataagtgcccagtaaatgcaccctgccttctcccctctctgtaaatctcttggcctgtgtgggagggtctcccgcctctttagtgtcacagtctgctcccagcccaggttgtacctcttcatttcctagtgaccacctgacataagcttgccgcttctctaggcccaacccctgcccacccatgtcagttgaggtggtgccattcttttgccatgcatcacctatgcatacctaaggctgaggagaccagaacacctctaacctgctttgccaccaaacacattggttaaagggagctttgtttgctgaaggtttgttattggtgtgttgttgatggctaacatttattaaaagcttacttactatgggccagatgctatgccaagcaccttatataggaaagtatttgcatttcatgaattttgagatgcagtttttgaaactggagtgtatcttaaagttggtgtcttctcagtgtcagcaaggcagcagttgcaacattgctgttctcgtcgcctgtggatgtgcaaactgggtgtgctcttcccattgtcatcatttttgttgagtaatgtgcattgttgataaccacatgtgttcagtgtaagcgctttttaagatgccttcaaaaacattatactgtgatttggtattataataaaaggtggttttatactcagaaaggcagagcagtggggttaatttgatattagtaaagcacagatttgccattggaggaatgaacatgattttttacaaagcaggaggtgtttttttggaactaagaaagaaagatacccactagtaa

SEQ ID NO: 107791 - DNA, 775 bp, Homo sapiens
cttccatccatatgagggaacaagtctttcttgccaacctttgcaagtttccctgtagcctttaattttttccgcatattctgatccctgaagatgtcccttactttcttgttcactaagctaagcatgtaaaattgaggaccaatgtactgagcccccttttatgaagtctggcaattctgtgagcatccagtctgcatcagtgcagcaccctgagttagagctctttgttaggcatcatagaacaggaaggacacaaatagtgtccctggcaacaaagacttcagctcctcccagctcaggaggctttcccaggacatgtcatatagattcggctctgcacagctgttctgagaaatctgaaaaccctaagttgcactgttaacccatcatcttgttagccctgcccaggatgtcaaagggggaaaggaaatcaacatttttctgcattaaatggtgacttaaagaaagctacctccatatttgaccctgtaaatcccattaaaaacctgggggcctgccagaaagtgcctttatgcttggctctgtattagctttcgtgactttcctataatgaattgtagcttgcttgagtcattaagaagattctgacagggaatcagctggaatctgctgttctttgaaggactcaatttatctatgattcagtgcttaagcagtcaaaaggcttgaaggggtcagtcagggaacatagctcataactcttataggtgcattgacttttagtatatgcattagataaacttaagacaag

SEQ ID NO: 107792 - DNA, 411 bp, Homo sapiens
attcagtgcctaaaaatttgttaaaattactggcagtgcaggccctaggctgggcctctaggaataattaacataacacattcaactggcttgctaaggttaaatgctatctgtgcctccttcaggaagtctggaaatcaggaagccattatctcaagtgcatgctagaggaacacatcacttgagccaaatctgatgatcaagaatcatagccacaactgttggctccagggctacctgctgctgcagcacctgctagaatggtaccagtaaagtggatgccttgctctggccaccaccactctcccattggtggaatctaaattatatctagaaacctagctgcaagggagtgtgggaaatgtagttttcaactttctgtcctttatagaactggactgaaaagaggtg

SEQ ID NO: 107793 - DNA, 484 bp, Homo sapiens
tccccagagctgaatgtcaaggccagccaagaggtggtgatttcggtttattttacatgcagaagtaggggcccgggttacctccttctcttagaattttggggaaattgatagtccagtgactcctacccacttttgggtgaaggacgatttggaatttgaagtgtggggagacaggcctgtgaagtccgaaggactcactgggtctccagatcccccaactctggaatgcagtgaatacccacccccatgtttcagagcatctctcccatgtgttagacgtcgtgcagtcctgcattttggctgagacacctaaccccggtgcactcaggtcagagcgccagggcttcaggcagacagcaatgggtcacacgggtccttatagttccttcctcttcccaggagtgtcattttagattttacaacacgagcgaataaatcatctccaaaccaacaagatgtcaccttcaggctccccactgca

SEQ ID NO: 107794 - DNA, 939 bp, Homo sapiens
gttcctggcacatagtgagtgctcaaaatatgttgccaattattggtcagtagtgctttgaaagtgaagatcccatggtagggacagagatcagatgacaattgcttgtttgctgagaacttcctttgaagttttgtcagtggaggctgctctagaatgctctaagagaaaaggaagctctctgtattattgaaccagccctcaaacaaatcacctcttttatatcactgtcatcaagaaaaaaagactgctaatgattactggtcagggtagaagatttgggcccaggcttgaggtctttggattctactccagaaatttccaagacaggaagaatcagaagagcctctaaaccaatacttctcagtcaggctgggagtgctatagtgggccagggatctggggccaatctgtctactttctgaaaccagtccaagatcaggtcagcatagacattgagagtcagcttttggaaacctttataataatttgcagcgtaattttatgtctgttggatccaaatgataattttaaaaatggggcttgtatttgtattacctttacattatttcacttttctagtaatttatttttcttgtattttacaaaagcatcagttcaggtcagattgaaaaacaaaataaaacttgtcctttatttcagagagtttgagaattgatctagaaaaacgattctcaaaactatgtcctgggccggcagtatcggcatcacctgggaactggttagaaatgcagttctcatccctaccaagatcttttgcattagaaattctgagctaggtcccagcaatctgtattttaacacttttcaggtgattcttatgcatactgaagttttagttgtactgggaccatctccaggataagtgtaccttcttctaaatttattagaacaagaacaggtattatatcccaagct

SEQ ID NO: 107795 - DNA, 275 bp, Homo sapiens
ggagtctcgctctgtcgcccaggctggagcgcagtggttgcaatcatggctcactgcaatctccgcctcccatttgatttttcacaaggatgccaagtctattcagtggaggaaagaacagtcttttcaacaaatgatgctgggaaactggatttccacatgcaaaggaaaggttgaacccctaccccacaccatattacaaaaattaactcaacaacctaatataaaatatcaacaacctaaatataaaagctaaaatcataaaactcttagag

SEQ ID NO: 107796 - DNA, 371 bp, Homo sapiens
tgccataatagtgaaggaacaaaaggtgatttaattatttctgactgttctccttggtctcttttactggtgttttttttgaagtttgtgaccacaactcataagatcaaaaatcccaagttcaccatcacagcctatgattatttctataataatatttaaatatgcattataatcactcccttgtctctctttccaagagtctataagctctttttttttctaagttttgagaataaattatttcctatgcctatatttttgagatcgagcactttgcaggtaattaacacattttagtggaaagaatttaaaaaaatcaattagtggaatttccaaagattttcaaaattaacaaggtcaaaacaaag

SEQ ID NO: 107797 - DNA, 427 bp, Homo sapiens
ctttatgttttggacataaactggaaacatttgaagtccaacgcataggaaatgcagaataacatcttaaaaataaagagcctttttatttacccgctttcccattcttttacattgcttttactcatccttacctgtatgtcttagagatttttgctttttattttttttttttagagatttttatttttatttttttagacggagtctttctctgtcaccaggctgcagtgcagtggcatgatcttggctcactgcagcctccgcctcctgggttcgagcgattctcctgcctcagcctcccaagtagctgggattacaggtgtgtgccaccacacccagctaatttttgtatttttagtagagatggggtttcaccatgttggccaggatggtttcaatctcttgacctcgtgatctgtccacc

SEQ ID NO: 107798 - DNA, 270 bp, Homo sapiens
cggcctcaaatgatcctcccacctcagcctcccaaagtgctggtattacaggcatgagctgtcccacctggccagaagtttgttattaataataattatcagaggttgtatagggtcctatttgccccagttcagatgattgaggagggaatgctgcattttatgttttacttagaatctgcaggtatttagtaagtttgcttttaatgattaatagagggtgacagccctataaatagagtagagagaagatgccagtagcgatcatgg

SEQ ID NO: 107799 - DNA, 398 bp, Homo sapiens
atttgtgaggggtcctggaagcaatcccctgtggtttccaaggaatttactttaaatctaaataatggccttccaacatgtatatcaagcatgcttgtcacatactctccttctataataactgattataacatttattccaatctatatttcagcatactcttaaagagctgccaaattcaggggaagtttttagtccttttatcacaattttatcactgtgacattgctttaatgatttgtatgcctattaactccccacctgttagtcagaagagtagataactaaaaaaaatgtaagcagccgaacttaagatttcagaaaatgtttcatagctttctctattaaactgagctttaaaatctaacatttgagcaaataaaaacaatagaagctg

SEQ ID NO: 107800 - DNA, 433 bp, Homo sapiens
catatgatgaaatacagtttggccattaaaaatgacattaagtaaaaatgacattattagagatttactgacacgagaaaatgttcatgatatagtgttaatgaaaaagcagattacaaaacagtgtatagtatatgatttaatttttgtgcttatatacgtgtatgtaaaaacatatctatgttatgtgcacacgaagcaagtaaggaagatttagaaaactgtatactaaggggttaacagtatttgtcactcaagggtagaattatgcgtgatttttattttcttctattgtgttacctgcattaaacattttgtacaataaacatgtgtcattcttggggcctaatctaccagaaattccttgcatttttaaggagaagaaaagaaaggagctgcccaaatttatggagggggtaaccatctgattttt

SEQ ID NO: 107801 - DNA, 439 bp, Homo sapiens
ttcgagttccatgatgagataggtactattatgatttccattatgcagaaggagaaacaggattagagagtttaatagcttccccaaagtcacaaagatagcccatgatgactctgtgatttaaacccaggcagctggactccagatttattttttctttaccatggtcttctactgccctggtgaataggatggacatcacaagtcatatgtcatatatcccaatacacattcattcacatacatacacacacacacaaatacacacacacatgtacataaactaagctatggaagctgtttagaacatataacttaaaattttccccttataaaatattttattcatcacatttagactctgcagtaaaacttgtgaacagtttgccaactggcagccccggggtcatattatctgcacatcgttttatttggcctt

SEQ ID NO: 107802 - DNA, 600 bp, Homo sapiens
ttgagacggagtctcactctgttgcccaggctggagtgcagtggtgtgatcataactcactgcagcctcaaactcttgggcactagcaatcctcctgccttggcctatcaaaggctggtattacaggtgtgagccagcacacctggcattgactatggccttaagtgggccgattagactatgaaataaaattcctagcactgaatattagccctcatttcagacctaaatatcagttgttgtttttcctgaaccatcttccaaggatcattttgtaactgaggtcccagagttcccctttgatgtagaggctgttgatttcttttctggggcaggttctgatagcaacaagattgccagcctgctgaactgtggctaaggtattagatgtcaagatgaaactgtccagtgagattcctggagcccctgggaggtctagggttgggggtactggtgactagccctttcacctgagggtaggtggcagagctggtaccttcctgcagcctccaacagccatctcagccctgaggctgaagaccttgtctcttctctccttttcatcacttcctaccagagccctgtgggtgtagggacatc

SEQ ID NO: 107803 - DNA, 423 bp, Homo sapiens
cggtcagccactgactacgagaaatgtggaatagaggtgggtggggtggaaactctcccatgtcatcacagctgcccagtagaccccagagcatcctcctcatgccagaggcagaactggagagagaccaagattcagagacaggtaaagtccaagacagggaaagaaggaaatcagagccagttgcccacagagatgctgccagtgatgcccacacatgctcagcactttgactcctccacaagcctgttttacagacagaacactgaggccaagagaggtgaaaagaaatgtcccacatttgatggcccaggccaaggggattagtagaggggatgctgagccccatgatttccaaattcaacccagcaccactcaggctgagaaggagggattcaggggtcattgagaaagacagggatg

SEQ ID NO: 107804 - DNA, 181 bp, Homo sapiens
gagactctgtctcaaaaaaaataaaaataaaaatagagttgtaaattgtgtgaggattaaatgaaataatgtgtaaaaccatctagcagacaatttgggaagatgaaaaagtgctggagatgcatggtggcgatagttgcacaacagtgtaaatatacttcatgctactgaactatatacc

SEQ ID NO: 107805 - DNA, 635 bp, Homo sapiens
ttgaggacattgctcaaagggaagctgagataatggaccaatgggaggtcttggttggatgatgagccactgaggatggataccatggagtgggtgggagcgtagaaatcacagtgaaattaaagagctggcgtgagtgggctaaagtgtgaatgtgctggagagaaagaaaactgtggtccatatcagcaagtgcagcttaggaaaactacaatttaaatggtgatggagttcaatgccttggcagggtttggggtgtgatcatggaggcagttggctggaatggagtggaaatgaaggtctctgggattgaagcagacaagaaactgagaccagagtttcaaatgggcttctactctccctaagatgatgaaaccactcacgttgttgcactgctaccccctgaacctgtctcatccttccccagcctcctgtgtcccagaaaccagggttcttaccatgactgtaatgtcccctccttcactcatgggctgcagtcctggttcttggaggcccaaccctctgacaatgaaatcttctagtccttctcatcatccttaactgagaatgcctattctattctcactattcctcatagcccattgccactcctaatcctgctcatcttgaggtac

SEQ ID NO: 107806 - DNA, 485 bp, Homo sapiens
ttgaggacattgctcaaagggaagctgagataatggaccaatgggaggtcttggttggatgatgagccactgaggatggataccatggagtgggtgggagcgtagaaatcacagtgaaattaaagagctggcgtgagtgggctaaagtgtgaatgtgctggagagaaagaaaactgtggtccatatcagcaagtgcagcttaggaaaactacaatttaaatggtgatggagttcaatgccttggcagggtttggggtgtgatcatggaggcagttggctggaatggagtggaaatgaaggtctctgggattgaagcagacaagaaactgagaccagagtttcaaatgggcttctactctccctaagatgatgaaaccactcaagattttagcaggatttggagtggcaatgggcttgaggaatatgggagaatgactaggcattctcagttaaggatgatgagaaggactagaagatttcattgt

SEQ ID NO: 107807 - DNA, 403 bp, Homo sapiens
taaagtggaagtggggttggtgagtggagcaatccactgtccttgcctccaaggccacactgaccagggaaaagatagagtcagggctgcctgcgcagaggacttgcaggctatgcagacctctccgtctctttgctactccatctacccttgaagtctcgaggaaatcagcactagagagtattggacccaggtgaactctccaaggtctaagctgagacttggggcctagaaggtgatccaggtatgaagagggaagcagcagccaagcagagtgtttgctctgagtgctgagggtctaaaactgggaatggagtccatgctgattagaccccctaagctgtggatcattatgcaccatgcacatcctgatcctgggtagcagcaccctctctcaagcccc

SEQ ID NO: 107808 - DNA, 202 bp, Homo sapiens
aagcccttacctacctgcgtcctcgtgtgactttgccgggtctggcacctgctttcctgccaatcgatgggaagtggctactaactgatgctagctttcactggtaacgggaaagtcaacagcctctggccctttctgtgaaggagaaaagcagaaaagtgctcagaatcctaaaagggaaacagatcaaaagaagggtggg

SEQ ID NO: 107809 - DNA, 359 bp, Homo sapiens
tactagctgggaaagtcgtttatgttaaatgttcagaagaaacattagaagaaagttctaaacttctctacactttgtggaaaagtgggagttttctcttgagtcgacttttcctttccccaaaaccaaaggtataaacatattgcatcagaaatacttatactgcagaaaaacagatcaatacttctatcaaaaaatatttctctatgagttcaatttcataaagtttagtcattagcttaatggcagaatacagccttaacagccactgaattacactcttttaacacataaataaaaccattataaattatgatgcaaacaactgagacttccatctgtctcctcctgtttgccat

SEQ ID NO: 107810 - DNA, 299 bp, Homo sapiens
actacaggcgcccgccaccatgcccggctagttttttctattttagtagtgacggggtttcaccgtgttgcccaggttggttttgaactcctgagctcaggctcaggcaatctgcctgcctcagcctcccaatgttctagggttacaggcatgagctactgtgcctggcccagttagtgatttttaaattgtagttccttaaatgagtattttggatttcactccacaatgttcttcaactgtaagatctacttgaggttatttgatttgctggtttgcaagaactcgtctacacgttg

SEQ ID NO: 107811 - DNA, 343 bp, Homo sapiens
ttggatggacactgttcaatttccctgcttttataagaaaagaatctaatccttatctacataattggggtcacagcctcaggagctgaaatccaaaactacagtagtaggaaaaagaaaaggcaatagaacctttcttctcttgacacagttaagtgtcctctgggtaaaaggtcactatttccagataaaaagcaaatacacatttaatgtgatctcctccccattcagagatctttcagataagcgtagccaacgcctccttactgatgggtctatatacacattatctgggactctacagtgcctcagcctccgtagtagctgggattacaggcatgcg

SEQ ID NO: 107812 - DNA, 331 bp, Homo sapiens
tgagatcgtggccttgaactccatcctgggccacagagactgtcttaaaaaaaaaatttagaaatagaattacccataagatccagcaattctacttcaaagatctatatacccttggctacatatccaacagcagcaaaatgagtgatttgaacatatatttgtagccccctgttcatagcagcattaatcacaacagccaaaagcttgaaacaacccgtgtccatcaacagaagaatggagaatcaaaatgtgacataaggaagggaattctacgtggtagaaaacagatgagcattaaaggaagtgaacaatgtgcctctagcatgta

SEQ ID NO: 107813 - DNA, 716 bp, Homo sapiens
ctacataaaagatttagagaaaaaatttagaaatgtggattacattaaaatgatctattagacaatcacaaatttttaacttatattgtgaattatactaatagattagccaatagagaaatatgattactttgaggaggattacatatgctgatatttcactaagaatttttacatcaataatcataagaatggcttgtcactttctttaaacctatttgctttgccaccaattagccaccactattttgttgatttaaaagtggtatggtattccattcagaacttgctctcaatggcaaaccaactggccagtgccaaaggaagctaggctagactggaccacttgttcctataaagggactactatttccagagatctggcttactggtattctgaaacttgtctctgaatacttactaataaactccagggtacaatttattctagtataaagtacaaagaaaagaggatgaactacagggtgattttataatttatggatataagaaccaatccataccatgccttctccctgaaactaaccaagcaacctgcacaagttacttaacctctctgtgtctcattttcctcaaatataaaatggagatgataataccactaacagcatagggttgttatgaagattaaatgagttaatatacataataacttataacagtgattgtcacatagtaaatggtgaggtgtgtct

SEQ ID NO: 107814 - DNA, 463 bp, Homo sapiens
tattcctttctatagcaatcctgtgcccacataaaagctgcattttcactacaagataaaaaggtgttttgcaagaagtgcaaggtttttatgcctgctgacgcagctacagctcaacagctcacaaatttccttttcttttttcacaatggtccttaaactggattcatttatcttaaaatggcaggcaactgcagctgcagaacacagtctacaaaacatatcaagtaattcaactatttcttgtaatgtcatgacttctctctgtttcctaggagcgcttccaggatctttgtaagggctgacactttgtaagggtccaatggtgttattcaatgtctatggtattacactgaacatcatatacaagaaggcaagagatcactttttaccgcaataagcaatttactagagagaaaagaaaaacagctcggagcagtctgagctatgtgaactatgcagg

SEQ ID NO: 107815 - DNA, 317 bp, Homo sapiens
tacaaattaagatgtgcccatggcttagcctgcgctccatcctgggccctgcagcccactcccagggtaaccctctgcagacccaagactaatgggacaagggatctgctggggcagtgtaggccaaagctgcggctgggtccaccagaggccaagatggagactgacctggacatgcttcctgggcagctttggtggcagtctcccttctctatgcctcacttttctggcagaattttcaggcatttccaagcggaagggagggagagaactcaggcatcactttgaatgttctgccagtgaccagctttaaacaa

SEQ ID NO: 107816 - DNA, 264 bp, Homo sapiens
agtgccccatttttttttttcttccaagtaactaagttctgtgacttggatgctgtgacttggactttagaggtgaagtcagatgacaaaagatttccatgcaaatcatgtttccagaatcatccctcatgtgcatgtatgtctagtggaatgcaaggcttactagagggaggttgaaatttggtgtgcgttaaaggaaatataaaaatcctgcttaatgatcctgttaggtttgtatacagattaactgttattacacaagaa

SEQ ID NO: 107817 - DNA, 187 bp, Homo sapiens
  misc_feature (113)..(113): n is a, c, g, or t
ggtgggagaccagagttttaatcattactcaaatcagtctctatgaacattcggggagcagagttttaaaggataacttggtgggtcacctgtaactacctttacctcctgtngttctcaggagcggaggctggaggtgaaggtagttactggtgacgggcccagggcctgctggcaaatagcaagc

SEQ ID NO: 107818 - DNA, 601 bp, Homo sapiens
tgcatattatgtgtcattatgtatgctcattgtcattccagccactttttttcctcacttaagaacgcttattggaatgcaagtgaatgagagtgtcattgttagaaagaaaatcttgaatttttcaaaagtaaactatttgtaaatgtcacaacttgaattgtgggatgtcttgcttgtagacatccaaggcctctgttggatggcattcacgctggagtcttagcgctgagttggaataaataaaacatcctggtgggatgtatgaatgtgatgaggcttctcttagaaaccgcagcaccagagctagttgcgtgccctgctccaaaaccatggagaacagcctgccatggctttttctgcagaggatgttgaattttaatgattttaaataaactcctcataaccatcttcctcattttagttcagtccagcaggcacagactcctctcaatgcaagaaggataaacgcagcccgcagtgtcctcagtgggcctctgtgggaaattctgcactcaggagaatccccagaagagagctcttagggcctcctgagaaattaactccttgaccgcttacaagtgactctcaggtttccaaa

SEQ ID NO: 107819 - DNA, 363 bp, Homo sapiens
atggcacactgagaccagaaagccaaaaagatggtgagagttagtgctaatgccctaaattttggtcatgctctcatctaagtaagaaagcacgcggtggctcaagcctgtaatcccagcactttgggagactgaggcgggcagatcatgaggtcaggagattgagaccatcctggctaacacggtgaaaacccgtctctacaaaaaatacaaaaaattagccgggcatggtggtgggcacctgtagtcccagctactcgggaggctgaggaggagaatggcatgaacccgggaggcggagcttgcagtgagccgagattgcaccactgcactccagcctgggcgacagagcgagactgtctc

SEQ ID NO: 107820 - DNA, 732 bp, Homo sapiens
gggggcttcgggaatctgctaagctggtgcccaagttgcaagacaaagtcctctgtgctcttcccactccatcctccacatagaagatgtctccccaagagctgcactgcctggaactggggaggggtgatacaggcactcccttagctgccacagttggttttgccctgggttgcattccaagtccactgcctctgagactagtgcagcaccagcgtttgcctgaggactgcagtccttgtggcctgactgccactcaaatttattctgtgatccaggccactttagtcagctggtggggaagccccactggcctgaaactgggttcttctcgctggagttggggattcccctgtggcccactggtagtctgaatgctccctccataggcattgacggaattcctacctgtgttgtgttctgctatgacagagcagcactgagctccattgtaaagtcccccactaacttcactctctcctccatgcacatagactctgtctcctcaatgcactgcctggcattgctgtagtcaatgcaagactgtctctcctacattcttgaatgcctctttccttgataaaaagtacctggtttgaacataggtacttttatcactcacctgatctttttgttcttatgaagatgctttcttgcatggatggttgttcaatttagtgttcctgatgggggattattgctcagggttctatctggccatcttgctctgtc

SEQ ID NO: 107821 - DNA, 699 bp, Homo sapiens
gtgggcggatcatttgaggtttgaggtcaggatttttcaaaattaatgacagacaccaaatcacatatgcaggaagcttacagaacatcaagcaagataaaaaccaaaaaatctgcacctagaaatatcatattcaaactgcagaaaaccaaagacaaagagaaaaatctagaaagaaaccagttttaaaaccactttttttagagaaacagggataagaattatactgtacttcttgtcaaactacataaacaagaagaaagtacagtgaaatatttaaactgttgaaagaaagaaccactaacctagaattctgtttccagtatccagtaaaattattctataaaaatgaaggagagacagttgcacattgttaatgtgctaaatgccactgaattgtacactttaaaacggttagttttatgttatgtgaatttcaccctaataaaataagtgaaggagaaattcagacaaacaaaaactatcaccaagtagacctattttcctagaaaagttaaagaagttcttcagaaagaatgaaaattgtgtatgtcagtaaattcggatctacataaagaaaaaaaatcagagaaggaataaataaagctcaaataaaatatttcatttttcttagctgacataatagtaataatagaaaaaatgtattgagtgattatatcataagggtaagtaaaataa

SEQ ID NO: 107822 - DNA, 931 bp, Homo sapiens
ggcgatgtcaatgatttggtattttttttatcatattacatttatttttattaagacttttattgtttttattggtataatttacatacagtgaaattgacccttacagttctgagttttgacaagcatatacagtcatgtaaccaccacaattaaaatacaagacaacttcaatacaaaaactttctcttaacacctatttttaatcatcccggtcccctcacgtccacttaaccaatgatatggtttctttttgtacattcttgccttttctagaatgtcatgtaaatggactcatacaacatgtagccttttgaggctgacttcttacacttagcctaatgcatttgggatttctccatgatgttactctatcagtagtttctcttattgcatagtagcatttcattgtatgaatgtataattgtgtgttcgttctccagttgtggtatatttgtgttttgcagtttccattgattatgaacaaacctctagtgtacaggtttttgtatgaacataactttttatttcttttgggtaaatacttaggaaaagacttgctgtgggtcccatggtaattatttaagttttaaagaaatggtcaaattctctgtaccatctaacaccaccactggcagtgtataagagctcccgttgttgcgtatcctcatcagcacttgatatgggttgagcatcccagatctgaaatctaaaatgcaaaattcaaaacttttcgagtgatgacgtcatgtttaaaggaaatgctcattggaacattctgaattttggattttcagattatgggtgccgaactggtaagtataacgcaaatattcccaaatccaaaacatttgaaatctgaaacatttctggtcccaagcatttcaggtaaaggatactcaatccgtattgtcagatttagaaagaaaag

SEQ ID NO: 107823 - DNA, 141 bp, Homo sapiens
tgctgctctgtcctctgtaattcttataaattactatatagctctagaagccagatctgtttgtataggaaagggatggtatatggttaatgtagtgttagcaagtggtatccaatagcttttttaaaaaatatcatcatg

SEQ ID NO: 107824 - DNA, 129 bp, Homo sapiens
acagggtctcactctgttgcctaggctggagtacagtggtgtgatcactgctcactgtagcatcaacatccgggggtaagcgttcctcacactttagtcccccaaatagctaaggactacaggtgtgtg

SEQ ID NO: 107825 - DNA, 207 bp, Homo sapiens
taatagtaagaagatttctccatcaaagaggagaaatgtcatgacttctagaaaaaactttatggaaaaggggaggtggccagagcctactgggtcaaaacctcattcgtaggggctcttttaaacaatgagaacccttgagaactagtagagtgagcactcactcattacccggaggacaacatcaagccgttcatgagagatttg

SEQ ID NO: 107826 - DNA, 155 bp, Homo sapiens
cgcgcgcgctgtctctctcctccctggacctgaacctggttctctctctccctccccgcctaacccctctccgcagctcctctccctccaggtctcctccctggaccggaacctggttctctctctccctccccgcctaacccctctccgcagct

SEQ ID NO: 107827 - DNA, 573 bp, Homo sapiens
gagggcagtgcaccttaactccgtagggacagaacctctgcactcaggacccttccagacctctctgtatgtacctcttcatctggctgttcatttgtatcctttgtaagaaaccgctagtggccagtgttctgagtgctgtgagtcattctagcaaataatcaaacccaaggaggggatttgttggaaccccagacttggtagcaaagtcagagagaaatgtgggtaacctggggacctgacatttgtgagtggcaagtgaagcaaggcagtattgtgggactgagtctttacacctgtggagtctgatgctaaatttaggtattgtcaaaattgaactgcattataggacactcaataggtgtcagaattggtttgcgtcaagaagaaaaacccttgcgcaatctcataagccaaaaaaagatgttgaattgttttatttttgcatttccttattaatgtggacaaataacttttttcatgtatatattggacactgaagtgacttcttctgtaaactgtctgttcttgtcctttgctggttttcctactgaattgtttgtctttttctca

SEQ ID NO: 107828 - DNA, 194 bp, Homo sapiens
gactagtagcatctgactggaattagagggctgcaagagggaagcatgcagataaaacggcacagagacaggttcagataagaaggatcccataaaaattactcaattaccaaaatgaaatgatggcttcaaggcttcagtggggaaaaactcatttcagttgattcagttaagacatttaaaagaagacattt

SEQ ID NO: 107829 - DNA, 966 bp, Homo sapiens
ggagaaggaagaaacagccaggcctggtggctctcacacctgtaaaggaagaggaagaggaggaggagcaggaggaaacagccaggcgtggtggctcacgcctgtaaaggagaaagaggaggaagaaacagccaggcacagtggctcaagcctgcaaaggaggaggaggaaacagccagttgcagtggctcacgcctgtagaggaggaggaggagacagccaggcacagtggctcatgcctgtaaaggaggaggaggaggagcaggaggaagaagaaacagccaggaagggtggctcatgccggtaaaggaggagaaggaagaggaggaggaggaggaaacagcaggaaggatgccaattctgcgcttctcagtaactacgaggtatttcagttactaactgatctgaaagagcagcgtaaagaaagtggaaagaataaacacagctctgggcaacagaacttgaacactatcacctatgaaacgttaaaatacatatcaaaaacaccatgcaggcaccagagtcctgaaattgtcagagaatttctcacagcattgaaaagccacaagttgaccaaagctgagaagctccagctggtgaaccaacggctgtgactgctgtggagatccagctgatggtggaagagagtgaagagcggtcaaggaggaaccagattgaagctcttctcacaaccgtcacaggcattctgctgagagcagaggctgagcagaagacgataccacccgcatgtggcaatgacgagaggaccagtaaaaagcacagtgggccgggttaataagtcagaggctgcaccctttctggagtgagagtggattgatttatccctccaaggcggttgggtgtggctcacaaaaaaaccggtttttcgggaaagataagaggctcttttcacttgaaggacggcctaggttagggcaacaaaccaccatcccgttatgagttccc

SEQ ID NO: 107830 - DNA, 116 bp, Homo sapiens
cccagtaatccctttccaggggcctgtctcttccaggccctgcagtggcctgaggtctgggtggggcctcagtgggggctggggcccctgaggctctcgaagccacttcccctgct

SEQ ID NO: 107831 - DNA, 231 bp, Homo sapiens
cgagagccattagtgccacattgtgtggggtctctgcatgcattgcgtagggggtagcaggcagagaccttcagagctggttggctggcctgctccgtgggcagccgggcccactcacgcactgtgggccacaaagattcatgtttgtgccttggcaaaattatgaatggccacgtatcaggaactttagaggtgcttaggaattgtcagagcttatttcactcaagactg

SEQ ID NO: 107832 - DNA, 413 bp, Homo sapiens
ctgggggtgggagagagacagcacaaggggcgtgagccaggggcacgcatcatgcagggaggaggaggaggaggcagaaccgatgggctcctgggatgaggcagggtgtgctgtcagcgtcccatttacagagaaaacgtgaggctcagcagataaggggggctgaggggagtcaaaaagcttggacgcccaaccaggtgcgtgctcctcgaccttcagctgttgccagggtgtgagaagctgaagaacctgagctgaggatgaaacttgcttgtccctgttcctctcaggcacagctccactgtctcacccacccatccacttgcatggtaaaagccagtacatgtgcaggggatgttggcgtggctggaggtagcagcaccaaagccagctccacacacttggagtaataa

SEQ ID NO: 107833 - DNA, 362 bp, Homo sapiens
ttggtccccttatccccgagaaaccactaagagaaccttcaggtctccccagaagccgaagctgaggaactgggcttgccccagggcatcctcctgtgaagctccttggtctccgccacgggctccaatcctgttgctggagcttatctcctcagtgatttacctgccccctgcttctggtggaacagtgagtaactgcccaaccagaaacctacacacacatattcaacacagcgcctgcaagcttccagctcacctggacctggagtgatccccaagcatcctggggtcaggcacagaaacaggaacagcgagctcctggctccagtgctgaatggggcacagatgcattaactctccca

SEQ ID NO: 107834 - DNA, 733 bp, Homo sapiens
aaaacatttatttctattttagggaaatcagtattgtggtgtatattttctgttactattttcactggaggaaaagccctcaagtaggccacggaattgtggaaagaaagtgtaagaagatttttcccctcatgacaaaggacaatcctcccctacaccttggtgtatggagcacgaaggctgctgagaaagagggtaggcagtttttattaagagccaagaaacttcttgggaagaaagaaatcaagaccctgacacactttgggatggggttggggacaccgagtgtatgttatgaacagttagcccttgtagatcaatagacaggaaaggacaccaagcaaactcaccaaaacccaaagagaaactaaccatgagaaggaagagagtcaagttctatgtaaacaaaggcttcactagtgcaaaggaggagctagtcttgagctgacagagaaacaccctctgcccactcaacgctggaacctgggtattctctaggaagatagccacctattttggtgtaacctagggattctgtgtcattttaacactacaggaatctttctttctctgatcttgaagaatgactgtatcttggatctgtactgatggttccagaagcaatgggtaaagggagtacaatttctagcctttcctgttggcaaccaaggtttcaggggtccgtgacagtgtgttttagcacatcaactggacattctaggatgccttattg

SEQ ID NO: 107835 - DNA, 438 bp, Homo sapiens
tcccccttccagcagccatcagacgcactcacttctcatgaaggagacagaggttcattttcttgagacactgaatgatctcagaggaataaaccctaaacagattggatgcttcaggttttcctcaagaaaaaggctggctagctgtcctgtcactctccatggagctgcatcagtcagcaagcctcagttacacaaccaggcctttcattgaggtttagtatttctattattaagtactagagcagtattagatttacagagaaattaaacagaaaatacagagaattcccttttaccccttctccctcccacactcagttttgcctacggttaacatttttgtattagtgtggtatatttgttacatttggtgaattaatattgatatattataattattaactaaagtccatagtttacattagcaatcaccct

SEQ ID NO: 107836 - DNA, 152 bp, Homo sapiens
gaatgaacctcaacaacatttataccaaatttttaaaagccagacaaaaaatgatcacgtatcatatgactccacttatataaaatgtccataaaagtttataaaataaaaccattattcaatggtggcctggggctggaggtgggactagg

SEQ ID NO: 107837 - DNA, 338 bp, Homo sapiens
tattttatacatgtatatgtggccaatctgaatggaatacttctgaacaacagcaaatattgatggtgcctaaatttttagaatcccagaaatatcctcttttgcaaatacctgaattcattcctgccggcaaatatttgttaagaggctactgtgggtcaggcactgcagtaaaccctgaggactaatggagaagaaaagagttgaactctgcttttgtggcgcttatattctagagggaaatatggtcaataggaaggaaatagaaagttacatatagtggtaagttctatgaagaaagtcaacatggtgagttaataaagaacaggtcgggggcg

SEQ ID NO: 107838 - DNA, 376 bp, Homo sapiens
tatcatttttatacccctgttttattgattccctatccaccagaatgaactccaccctcccattagaaggcagagaagatggctccagccccatcagatctcaacagagtgcacacacacagatgttgacttggcaactgaactaagctcatatttaactagctagagcccaaacaatttctgctagttccctctgggtgatcagggagagtcaccacctcccaacctccattttctcttctgtaaaactgggcaagtcatacctgcagtaaaccatggcaagcaatgcacaaaagtgccaagcctggagctggtatgtagtaggaacacgtattagctcccctttccaggcaccacccatatattccattcctct

SEQ ID NO: 107839 - DNA, 126 bp, Homo sapiens
cctcccaaagtactgggattaccggcataagccactgtgcccagccctgtagcattatttctaacaacaaacaattagaaaaattaaacactgcctattctttttttttttttttttttttttttt

SEQ ID NO: 107840 - DNA, 177 bp, Homo sapiens
ctgtaatctagaggatccagacaatgctggtttacattactctgacaggatgttttacacggccagagtggatgtggatgcttctgagaaatgaagtttgggcttacccacccatcttgagagttcttaactgtgtgtgccaatatgcataggaatccccggtcgacagaaaaatcc

SEQ ID NO: 107841 - DNA, 833 bp, Homo sapiens
ggttaaaactttttcaaattcttacctgtattaaacacttaacctacattctcctcttgtaatcagaatctcgtgtgcatgtatgtaatgatgggttctctaatattcagttttctggcagattaaaacatctgacaaaactaaagaattattttaaaaatatttagagtgtcaacatattcaattcttagatggaataatgatctttaaagagatgagactagtatgtaaaaagttcatttttaaaagtaagaatcttcatcctaattatctgctagctaagacaaaataatagaatcaacattcttacagattttcgtttacactgcctcctttaaaagatgcccaatactgtggatattaaagagtgattactagtatattatgtatattatatattcagctttccttttgtaaattgattttaaacatttccaagaaatagtttcaaactaggtacttcttaacatctcttatacttttgccttaaataaaaacacattgataatgctaattatatggtaaaactgttaggtctgcagaagtcatattttatttctgaaataataaaaatacattttaaaacagatgcagaaaatgtgaaaggtagattgctgctggaaattcacatagtctttaaggaataaactatgtacgtgttgactatgaacagactagtctatatttactatattaaattttcaccaagttataaagattcagtatgttatccttttggaaatttaaaaaatagtaaaacacattctttttaagagcaggaacaatgtacttgaagcaacaaatttatgactgaagattatatatcagtataa

SEQ ID NO: 107842 - DNA, 301 bp, Homo sapiens
cagtttcattgcagcggagtgaaatgctgccacctgcatgctgcagcccagcctcccctcacaccagactcttggggaaagaataccttagccccttgcagtatcgctatggacagacggtcctttgattgagctgactttacaagtggctcctttcatccatcatgtgttaaatctgactagtgtctgtttgagtgtaccctttccttgtcccagcataatcatgatgccacaaaaccaaatcttcccactaatgggtcagacagaagaacgtagcctgtccctgacaccagaactgcca

SEQ ID NO: 107843 - DNA, 297 bp, Homo sapiens
ggccacgttcctcttagcgtgaagagactcaagtttaattagaaacacaaaaatgggcatggttggtggtgtggacaccaagccaatgatggaatcactttgattggtggtatggacaccaagccacagatgaaatcaaacttagcttggcaattcaaggctctatctaacttgatcacaatctacatgattattgttactattttgtatttcctaaggtaccatctattcactaaggaaaaagtacagaaaattcttcatccagagaaagacactctttaacattccctcaaatta

SEQ ID NO: 107844 - DNA, 371 bp, Homo sapiens
cgtccttcctgtaggaaccctctcatcccagctgtacatggtcagcattcaaagccttcttcaaatccttcctatgcctcaaagtcaagttttcccacagtcttccctggcactctcctccacaccccagagccccacagtgtccaggcttcctcagtctactctcagaggctgactgcctgttctgcaaggctagaccagcagcccttgaggagacatttcaaaatctgtgtgcctgggtcctgcctcccctcccaacccagggagtctgatacctgagatctaggaagaggcatctctggatacgttttgctggaggttttttttgtgtgtaaaagttatatttttactgaaaaagcaatacatgtatg

SEQ ID NO: 107845 - DNA, 341 bp, Homo sapiens
caatttttaacttattaaaacagaatcacaggttaaccttacatcatctataatacacacatacagttccaaaagatatacaatatttgaaaatttaaaacatatgtttaaaaaatatcagaaaatatttcaatcaaattatatataggatagacattttatttcacataaagggaaattcaaggcaacaggaagacctaaagcacaaagatgtttcttatacactggtaaaagaaacaatatgtccacaggataaaagccaaagttctaaaagtaaaaacagcccacatgatctgcaacttcctccctttcatcactgacctcctttcctactactcttc

SEQ ID NO: 107846 - DNA, 390 bp, Homo sapiens
ggcttctaacattgtatgcccacctatatttcatcaggctaacaataattttgatggctgatctgctgagagaagattttttttaagagacaggtcttactctgttgcccaagctggagtgcagtggtggtcatagctcaccataacctcaaactcctgggcttaagtgatcctcccacctcagcttcctgagtagctaggactacaggcatgtaccactgcacccagcacaagatggtcttgattacaggcatttatttagggatacaatttaaaatgactgacttttataaccctatcactatatatcaccatattctaaatgtctagggaaaagtagggggaaagactggattaggccaggcatgattaccagtaatcttagcactt

SEQ ID NO: 107847 - DNA, 341 bp, Homo sapiens
acctaatgaactaagagtaaaatggtcttgtgaattttctttcatttacattttcagttattttgtatagaaatttaataggaacaagaagtcagaagcagattagagacatgcaaaacttaaactcctaaccagagcatttggctgtgtagactactatgcactgcactagtgttttgaatctaaacctgtttagtccaggcgccgtggctcatgtctgtaatcctagcactttgggaggccactgtgggcggatcacttgaggtcagaggttcaagacctgcttggccaacgtgatgaaaccccatctctactaaaaataagctggatgtagtggcacc

SEQ ID NO: 107848 - DNA, 378 bp, Homo sapiens
aaaaattaagacaaagggtattactgagaataggatggtgctctggtttgaatgtgtttccaaagtttatgtgttagaaacataatccccagaacaacagtattgacagatgggaacttgaagaggtgattaggttatgagggccctgctgtcatgaatgaattgatgttgttatcatgggagtaggtttcttgtaaacactagctcagcccttctcaccctctcttctggctatgtgatgcctttcaccatgttatgacatagcaagaaggccctcactggatgcagcttgccccttgatctgggacttcccagcctccagaaccatgagccaaataaatttctgtttattataaatcttccagtctcaggtattct

SEQ ID NO: 107849 - DNA, 356 bp, Homo sapiens
tgttttagtgatttgggggataaagcacacttgtgctgattgctggaacttcccatcaatcagccaagaatgctctgccagtgggtgagagtctgtgaggcaggagagattggggaattcccctgtatggtaataggtgtatgaggaagaaatggtgggggcatccaggccatctggagcaaagagaataaagtcacaggtgacattattctctttgctccagatggtctgtctttccccatcccttgtcctcttgcacctattctcaacagagcagccagaatgattctgctgaaacataaatgagtcatatgtgtcagtcctctctcaaattcttcagtggcttcctttcttgc

SEQ ID NO: 107850 - DNA, 365 bp, Homo sapiens
acctgaatgaatgtaggcaagatcacaagaaaatttgaacagtgtttgaaattaaaagaacagccacaacaacaaaacaaaaaacaaacaaaaaaacatagacttatgcttccagaaaggtacttctggaaatagatgtccttttaaatgtccttctccacaatcctcttgctaagcccaactaaaatccctgggcataacatataaaacaaatatatgagcccctgaaaggtgaagagaaggcagacaagcaagaaactctggagacacagtagtgcttttactgggttttcatttagcttcatatatcctagagttggaaccaaagaaggtcggaatccagaaacaaaacagcagacaaaata

SEQ ID NO: 107851 - DNA, 726 bp, Homo sapiens
gcacttatagtggataattcatttgaatttgaaaaacatagaaatgaacctatcaaatacagagagagctatggaataaaagtattgatgcaatgaagagagttgaagagatcaagcagaaatgccaagcgaaatttataatgaacagattgaagaaaaagagcgacagaaagttcaggatatcaaagaagtcaagcaaaacatccatcttatccgagcctcttttgcaggcaaagggaagcagttggaagagaaaatggtatagcagttaccagaggatgtggatatggaagatgcttcttaaaaatctctgtaaccatttcttttatgtatatttgaagatgccctttggagacttggaactgctaaattattagtttattttttacataggtcacttaaatgaaaagtgattaatatatctttcctacatttccatctacaaaacatcagatattacggatattagattgcatctcagtgctaaattttcactgatagatatacttaatgtaaatcatgaaaattctacttataactatagaagtgaattgtggatgtaaaatggttatgccatttggataatggcactaggcagcatttgtataataactagtgacaaaaattcatggctagtgataaaatattatttacagtaaaatattccctttattaatattatagaaggggggatacaacaagaaactaacaatttgtatgacagtg

SEQ ID NO: 107852 - DNA, 401 bp, Homo sapiens
ttggggtgcgcggccgccgctgtttttggtcaagatcagaactggggagcctgggtgtaaatcgctgctgggccacttaccagccacgtgaattggggaagtcacttcacctttcgtgcctcagtttcctttctgtcaaatgggggaaaacaacattctctccttacagttgttgggcaaagtaaattgtaatctacctaaactaagccctcagagtagtccctggcacataatcctctaataattcattaatcactcagaattattaattaggccgggcgaggtgcctcacgtttataatcccagcactttgggaggccgaggcgggcggatcacttgaggtcaggagtttgagacgagcctgggcaacatggggaaaccccatctctactaaaaataca

SEQ ID NO: 107853 - DNA, 463 bp, Homo sapiens
acctgtttataatgacctgagcttggaacccaactctgttttataaataaactcctttttgtgtgatcttaacatatgttcagttatccaggaatgcaaatcaagggaagactaaaatttactttgttcaaaactttaacaagactcgatcaccattttggaggtaacatcggagatggcaacgtgacttgtgattgagaaagaagaaattaacccagatgcctgtggcaactaagaattttgcttgatgtggcctggtgcagcagctcatgcctgtaatcccaacactttaggaggctgaggcgggaggattgcttgagcccaggagttccagactagcctgagcaacatagcaagaccctatctctacaaaaaattaaaaagttagctgggagtggtggctcatgactgcattcccagctacttgggaggctgaagtaggaggattgcttgaccctgtctc

SEQ ID NO: 107854 - DNA, 458 bp, Homo sapiens
tggggggagttagattgaattaggctttcctctcaagcactggagcttttaattaacgtcagtggcagcaaaattcatggtggaagaattctttcaacttagcagcaaataagtctgtattaatctacctgttaacctgtgttctcactatatgcatgagacagcacttattcacgagtatgacagggtatagaatgaaagaacttaatttcataaattttttaaacttgcaaatacatgctaaagcctgtttaattcctggtgagctaataaagtaaagatgctagaagggctttaacttggtgtaatatcaaacaaatggtctgcttacaagcatgaagctgttggtaaatctctaatctcaggaaaataatgcagtataccattttttaaagagatgagatgaggctgattatggatatttacacttttacaaggccctttagtttcgtattttc

SEQ ID NO: 107855 - DNA, 408 bp, Homo sapiens
aacacaaaggtgcaagccattctcctctttgtggattcttattaagagagatgccggtggagaggggtgatcacggtcgcaaaatatatacgccaactgtattactctaggtccctgctatccatttcctgtaacttaagttttcaaattcctacaaacaagaagaaaatcctttgttcttcattagtaccaaggctgaattgatactgctgatttatgctcatctgaaagcgcagactttttttttttttagctctagaaaaacaaaatcaactccttgggaaggcagccagtctcctcaggcacctttcttggcagactttaccaatttcagaagaacccaccagttgggaagaactggttgaatggtctgtcctctgtgaaactgtcattagaaatgggctttgg

SEQ ID NO: 107856 - DNA, 238 bp, Homo sapiens
ataccttagcaatggataccatttacccttgctatgctactgtccaaagaagatatctggcatataatcagcataaaatatggatgaaagaatgactgaatgaatgaagcaagtgtcagagctggtgtgtccactcacaaacagcttttctagtttgatgctattcagcaaccccctcctcctgtagtattataaccaacatggtggaattagaaaagtgacatccaagacattaggg

SEQ ID NO: 107857 - DNA, 373 bp, Homo sapiens
ggcagagatgaccacagaggaggatcactcagaaagcattttctcaaaaactataatttctttagtctcctgttcaggtggataattaaataaatggtgattttcccaaaatgcctttagaaatggtggtcctggctggatgtggtggctcacacctgtaattctagaactttgagaggccaaggtgggaggattgctgaaggccaagagttcaagagcagcctgggcaggacagcaagaccccatctctaaaaaacaaacaaacaaaaattttaattagctaggtgtggtggcatgcacctgtagtaccagctactaagaagactgaggtgggaggatcacttgagcccaagagttcaaggctgtagtaagc

SEQ ID NO: 107858 - DNA, 295 bp, Homo sapiens
agaaaatgtcactgaactctgcctgtcaattcaagaacagaaattcaatgtaaacttctgccccaaattgtgtatttcccaaatgtggatcaactccctggtcacaaacacactgtaactgctcttgcaatgacagccacctcagcgcagcactcgcctggttgagtgactcggccacaggagctcccctgcgttctctaacacggcacttggtgtttactcctgccctttgctgctgtcaactccatttcactttaagcttggtgtggcagagagagtatgagctctgaagtca

SEQ ID NO: 107859 - DNA, 450 bp, Homo sapiens
ctgtcctccagcaccatgattcggttgggaacagaggaaggcgaggagagccatccgcttcctgcttctgcagcattcggccatttgcccaatgctccctgatgccacggttctcaaagtgtggtccctgtccctggcctgggagcatcagcttcctgtggggactctagaaatgcaagttctccggccccacactagactgactgaatcagaaactcggggcggtggggtctagcgatctgtgcgttaacacatactctagggggttccgatgcccctcgagtttgagaccctctggtctaatgatttatgggtgagacactctgcgcctgcttccctgaggaccccgagctgcagccccagggcttccccctcccactttgggtgagtatgagcagggcccaggtggctggggtgcagtgggcagcccggtggtcctgcctggggtct

SEQ ID NO: 107860 - DNA, 402 bp, Homo sapiens
ggttccctttctccatacccttgccaatggtggttatcttttatttttttttcatagtaaccatcctaacaggtgtaaggtgatatctaattgtgatattgatttgcttttctcagatgattaatggtgttgatcacctttcatatacatcttagccatttgtatgttttctttggataaatgtctattcaggttgtttgttcatatttttattaagttatttgtttctttgctattgaaacgtaggagattttgacaaaagtcaacaccctttcatgaaaaaagggctcaacaaatgaaggtaaagaagaaatgcatctcaacacaatgaaggccatatatatcacgctcacagctaacatcatactcagtggtgaaggacaaagtttattctctaatatt

SEQ ID NO: 107861 - DNA, 360 bp, Homo sapiens
tccaagacaggatctctgtcccccagactggcatgcagtgggggcagtcttggctcactacagcctcgacccccgaggttcaagcaatcctcccacctcagtctcccaagcagccgggactacaagcatgtggcaccacacctggctaatttttgtagagacggggctttgtcgcagcctaggctggtcttgaactcgtgagctcaagcagtttgcctgcctcggtctctcaaagtgctgggattacaggcatgagctaccatgcctggccgggcagtgagagaccctgagagtttgacacaggtgagtcgccatctgactttttttttttgagacagagtcttgctccttcactcatgc

SEQ ID NO: 107862 - DNA, 589 bp, Homo sapiens
cttccgtccccagtgcctcctgatgcttgcaatctcattcccaattcaccagcgtgcgtgaatgcagactccagatccagcgcagacgccaagaattcgctcaggggcaccagctaaatagcaaacagatgccatgtcaaacatgtgaaagcctcagcgactagggtaccgccgggaaaaccagttccagcccaggaatttctgggtggaaacactggccgccgaattgttttattctctttgcttgattcgagtcggttctgaaagcaggtgtcccctctcccccggcttcaggaagggaaaccccggccccaggcagttgcagagctaagaaaaaccatcccgccaggccccttcttgtggtaacgcggtcctaaccctgctctgccccacaaccccatttcacccgggagacgcagacgccaggctccctagcactttgtcgcctcttcctccagcctggcttcctgagctctggaaaagttccgggcctccggacgttgtttccatcttcgccttcgctgcctgggccgcatgcctcctgggcttatttaggaagcgaagttagcgccacacatttggctccaga

SEQ ID NO: 107863 - DNA, 685 bp, Homo sapiens
gccaggcatactggtgcgcgcctgtagtccaagcttcttgggaggctgaggtgggaagattgcttgagcccgggaagttgaggctgcagtgagtgatgattgcaccactgtgctcaaatctgggcaacaaagcaagaccctgtgtctaaacaaacaaaggaaatgtaaggatgcttccgacagcagctgcagtggtgttggtggagccagtgctgtccagggaagccaggcttgctgcaatgtagtgtaactgtttcttatcactgctgtaacaaattgccacacatataggggctcaaagccacagacattagccaggcacagtggctcatgcctataatcccagcaccttgggaggccgaggtgggtggatcacctgaggtcaggagtgtgagaccagcctgaccaacaaggtgaaactccgtctctactaaaaatacaaaagttggctgggcatagtggcgggcgcctgtaatccctgctactcgggaagctgagacaggagaactgcttgaatccgggaggttgcagtaagccgagatcgcaccactatactccagcctgggtgatggagcaagactccatctcaaaaaaaaaaaaaagaaaaagccacagacattgattctcttacagttctggagaagtccaaagttagtctcactgggttaaagtcaaggtctcagca

SEQ ID NO: 107864 - DNA, 346 bp, Homo sapiens
tcagccctgtcccccttcttctcacagtagctggagtgatctttccagaacataaggtaggaggctctccatgttctgatcctgccttcctgacctccccagcctcatctctccctcctctgccctcgccctctgtgctccagccaacgtggcctgtcactcgtccacctgccatactgtcctgactccaggcctttgcctgtgctatggcctctgttgggaccactcttgtctctcccctgctgtgtctgctaattcccactcgtgtcagtgatccatggctgcagaacacaccactccatccatggaaaacaatcacaatcattgattactatctctccctggg

SEQ ID NO: 107865 - DNA, 843 bp, Homo sapiens
tggtagataactcttgctatattgcctaggctagtctcaagctcctgggctcaagtaatcctcctgccttggcctcccaatgtgcggggattacaggcgtgacacgcatgttcagcccccctcaaccattttttttttaaacttctgcacaaacatctttactaccctcttcatttcattctgttcgtcatattcttctaagtttcattcactttatcttcatgtgtctggtttacaactggactactctgagaaacttctgctgtatttaccatgtaacaaaaagatgttttccatagataagtatatattctatacattcattctttggtatacagtcattctttggtatctgtggggggattggttccagtacctcccattgatatgaaaatcgttaagttctgccttggcctcccaaagtgctgggattacaggcatgagccaccgtgcccagccatggattcttaagagtttccattttaaaggaacaaaataaatattgcgtattcaagatttatgaataaaatatgatttaaattttccttacactgtaatttagggtatcaacatatattacaaatatttgcatattgttaaacatataataatttttatttatttattaatgtattaggcattttgtaaaattcctttgaacaagaagctccttgaaggcagaaactatgttctgtttcattttgactatctcatacctaccacagtgcctggtatataacaggtatgcattacatttttattcaacgaataaataaaaatttcctcactataagaccaagttcgaagtgttgagaaggccttaaaagacatgaggtatatact

SEQ ID NO: 107866 - DNA, 2109 bp, Homo sapiens
gtttgagcagcattgttagagcctgtggaaaacactttacaactgtgtaactgtcttcatctttacagaggaatagtctacaaaggaagacttgtaacctggagaagagacctgtcatttactccatcctttatagtgatgctacaggacgaagaggaatggataaaaacattggcgagcaactcaataaagcgtatgaagccttccggcaggcatgcatggatagagattctgcagtaaaagaattacagcaaaagactgagaactatgagcagagaatacgtgaacaacaggaacagctgtcacttcaacagactattattgacaagctaaaatctcagttacttcttgtgaattccactcaagataacaattatggctgtgttcctctgcttgaagacagtgaaacaagaaagaataatttgactcttgatcagccacaagataaagtgatttcaggaatagcaagagaaaaactaccaaaggtaagaagacaagaggtttcttctcctagaaaagaaacttcagcaaggagtcttggcagtcctttgctccatgaaaggggtaatatagagaagactttctgggatctgaaagaagaatttcataaaatatgcatgctagcaaaagcacagaaagaccacttaagcaaacttaatataccagacactgcaactgaaacacagtgctctgtgcctatacagtgtacggataaaacagataaacaagaagcgctgtttaagcctcaggctaaagatgatataaatagaggtgcaccatccatcacatctgtcacaccaagaggactgtgcagagatgaggaagacacctcttttgaatcactttctaaattcaatgtcaagtttccacctatggacaatgactcaactttcttacatagcactccagagagacccggcatccttagtcctgccacgtctgaggcagtgtgccaagagaaatttaatatggagttcagagacaacccagggaactttgttaaaacagaagaaactttatttgaaattcagggaattgaccccatagcttcagctatacaaaaccttaaaacaactgacaaaacaaagccctcaaatctcgtaaacacttgtatcaggacaactctggatagagctgcgtgtttgccacctggagaccataatgcattatatgtaaatagcttcccacttctggacccatctgatgcaccttttccctcactcgattccccgggaaaagcaatccgaggaccacagcagcccatttggaagccctttcctaatcaagacagtgactcggtggtactaagtggcacagactcagaactgcatatacctcgagtatgtgaattctgtcaagcagttttcccaccatccattacatccaggggggatttccttcggcatcttaattcacacttcaatggagagacttaagacacatttgaaaacagacatatcaagttctatgtgatgattttgggtttttaatactataaatacttgattgtaaactaaattcaagatcatttataggaaaatctagtttcacagctatttgaatttttttctggatttactatataactcttattttttaaaagatcattctgttctttcaaggagaaataagcctaaaagaagaaaaacaaaaaaaattctgtataaaactgtaatcctttgtattcatgtttacagtgctattactataattcaaaattatgtatgtgacttagagttatataatcataatttatgtttatttcaaatatctaagtttattgcttggatttctagtgagagctgttgaatttggtgatgtcaaatgtttctagggtttttttagtttgtttttattgaaaaatttaattatttatgctataggtgatattctctttgaataaacctataatagaaaatagcagacaacataaacatctttgtaaatatcaaacctaatacatttcttgtccagtgataaaacaactggtagaattatttaaacactttagatttttaaataatatacatggctttaatttttactgtgtgtatagctacatgatgaaattaattaaatattaagaggtacttatgttgtgatcatttg

SEQ ID NO: 107867 - DNA, 811 bp, Homo sapiens
gccctggccttgttgggtggaggtgaagagttaatggctccgcgcgcaggcactgccctctgaactggaacaaaatgcaacttccggttggagtcactcggccaggcgccggcgacctgaggggagagggaacgcagctgaaagcgtgaactgtgtggttgcacaattcccctctgccttcctgtggggtgtcatcatagcctggtcaatgagaagttgggtaacttcccagagggtcacggagggagtgggtggccaaggcaggaagaacagaagccaaccccgcccacagtgggaacccaggcgttaggagatgcttttgacaagttataataagggagagatggtagtaaaggaagtgaagaagcgacgtgaaattgaaggaaaagaaaatgacctgccttcttaccgcggttggaatacacacccaaacgagaggtagcagagaagcaagcagtgcattctgttaaaaattattgtgtcctcatttgagagaggagggatcctcaaataatacaactatgtgcaaagcaggaagtgaaatccttctcagtcctctccccagttgtaatccaagccttccacatctttcctgtatgtgcataaccatgttattttgctttcttatgaaaatgagattatgcatactgttcgataatctgtttcagattaaatatatatatatggtggaaacaaataatctctccctctcttttccttttcccttctctctccctcccctctctcctcttcttctctccctcctactctacacctatatccgggtatccctcccttctaccacaaaaat

SEQ ID NO: 107868 - DNA, 2154 bp, Homo sapiens
gccctggccttgttgggtggaggtgaagagttaatggctccgcgcgcaggcactgccctctgaactggaacaaaatgcaacttccggttggagtcactcggccaggcgccggcgacctgaggggagagggaacgcagctgaaagcgtgaactgtacctgtcatttactccatcctttatagtgatgctacaggacgaagaggaatggataaaaacattggcgagcaactcaataaagcgtatgaagccttccggcaggcatgcatggatagagattctgcagtaaaagaattacagcaaaagactgagaactatgagcagagaatacgtgaacaacaggaacagctgtcacttcaacagactattattgacaagctaaaatctcagttacttcttgtgaattccactcaagataacaattatggctgtgttcctctgcttgaagacagtgaaacaagaaagaataatttgactcttgatcagccacaagataaagtgatttcaggaatagcaagagaaaaactaccaaaggtaagaagacaagaggtttcttctcctagaaaagaaacttcagcaaggagtcttggcagtcctttgctccatgaaaggggtaatatagagaagactttctgggatctgaaagaagaatttcataaaatatgcatgctagcaaaagcacagaaagaccacttaagcaaacttaatataccagacactgcaactgaaacacagtgctctgtgcctatacagtgtacggataaaacagataaacaagaagcgctgtttaagcctcaggctaaagatgatataaatagaggtgcaccatccatcacatctgtcacaccaagaggactgtgcagagatgaggaagacacctcttttgaatcactttctaaattcaatgtcaagtttccacctatggacaatgactcaactttcttacatagcactccagagagacccggcatccttagtcctgccacgtctgaggcagtgtgccaagagaaatttaatatggagttcagagacaacccagggaactttgttaaaacagaagaaactttatttgaaattcagggaattgaccccatagcttcagctatacaaaaccttaaaacaactgacaaaacaaagccctcaaatctcgtaaacacttgtatcaggacaactctggatagagctgcgtgtttgccacctggagaccataatgcattatatgtaaatagcttcccacttctggacccatctgatgcaccttttccctcactcgattccccgggaaaagcaatccgaggaccacagcagcccatttggaagccctttcctaatcaagacagtgactcggtggtactaagtggcacagactcagaactgcatatacctcgagtatgtgaattctgtcaagcagttttcccaccatccattacatccaggggggatttccttcggcatcttaattcacacttcaatggagagacttaagacacatttgaaaacagacatatcaagttctatgtgatgattttgggtttttaatactataaatacttgattgtaaactaaattcaagatcatttataggaaaatctagtttcacagctatttgaatttttttctggatttactatataactcttattttttaaaagatcattctgttctttcaaggagaaataagcctaaaagaagaaaaacaaaaaaaattctgtataaaactgtaatcctttgtattcatgtttacagtgctattactataattcaaaattatgtatgtgacttagagttatataatcataatttatgtttatttcaaatatctaagtttattgcttggatttctagtgagagctgttgaatttggtgatgtcaaatgtttctagggtttttttagtttgtttttattgaaaaatttaattatttatgctataggtgatattctctttgaataaacctataatagaaaatagcagacaacataaacatctttgtaaatatcaaacctaatacatttcttgtccagtgataaaacaactggtagaattatttaaacactttagatttttaaataatatacatggctttaatttttactgtgtgtatagctacatgatgaaattaattaaatattaagaggtacttatgttgtgatcatttg

SEQ ID NO: 107869 - DNA, 2127 bp, Homo sapiens
gccctggccttgttgggtggaggtgaagagttaatggctccgcgcgcaggcactgccctctgaactggaacaaaatgcaacttccggttggagtcactcggccaggcgccggcgacctgaggggagagggaacgcagctgaaagcgtgaactgttgatgctacaggacgaagaggaatggataaaaacattggcgagcaactcaataaagcgtatgaagccttccggcaggcatgcatggatagagattctgcagtaaaagaattacagcaaaagactgagaactatgagcagagaatacgtgaacaacaggaacagctgtcacttcaacagactattattgacaagctaaaatctcagttacttcttgtgaattccactcaagataacaattatggctgtgttcctctgcttgaagacagtgaaacaagaaagaataatttgactcttgatcagccacaagataaagtgatttcaggaatagcaagagaaaaactaccaaaggtaagaagacaagaggtttcttctcctagaaaagaaacttcagcaaggagtcttggcagtcctttgctccatgaaaggggtaatatagagaagactttctgggatctgaaagaagaatttcataaaatatgcatgctagcaaaagcacagaaagaccacttaagcaaacttaatataccagacactgcaactgaaacacagtgctctgtgcctatacagtgtacggataaaacagataaacaagaagcgctgtttaagcctcaggctaaagatgatataaatagaggtgcaccatccatcacatctgtcacaccaagaggactgtgcagagatgaggaagacacctcttttgaatcactttctaaattcaatgtcaagtttccacctatggacaatgactcaactttcttacatagcactccagagagacccggcatccttagtcctgccacgtctgaggcagtgtgccaagagaaatttaatatggagttcagagacaacccagggaactttgttaaaacagaagaaactttatttgaaattcagggaattgaccccatagcttcagctatacaaaaccttaaaacaactgacaaaacaaagccctcaaatctcgtaaacacttgtatcaggacaactctggatagagctgcgtgtttgccacctggagaccataatgcattatatgtaaatagcttcccacttctggacccatctgatgcaccttttccctcactcgattccccgggaaaagcaatccgaggaccacagcagcccatttggaagccctttcctaatcaagacagtgactcggtggtactaagtggcacagactcagaactgcatatacctcgagtatgtgaattctgtcaagcagttttcccaccatccattacatccaggggggatttccttcggcatcttaattcacacttcaatggagagacttaagacacatttgaaaacagacatatcaagttctatgtgatgattttgggtttttaatactataaatacttgattgtaaactaaattcaagatcatttataggaaaatctagtttcacagctatttgaatttttttctggatttactatataactcttattttttaaaagatcattctgttctttcaaggagaaataagcctaaaagaagaaaaacaaaaaaaattctgtataaaactgtaatcctttgtattcatgtttacagtgctattactataattcaaaattatgtatgtgacttagagttatataatcataatttatgtttatttcaaatatctaagtttattgcttggatttctagtgagagctgttgaatttggtgatgtcaaatgtttctagggtttttttagtttgtttttattgaaaaatttaattatttatgctataggtgatattctctttgaataaacctataatagaaaatagcagacaacataaacatctttgtaaatatcaaacctaatacatttcttgtccagtgataaaacaactggtagaattatttaaacactttagatttttaaataatatacatggctttaatttttactgtgtgtatagctacatgatgaaattaattaaatattaagaggtacttatgttgtgatcatttg

SEQ ID NO: 107870 - DNA, 2208 bp, Homo sapiens
gccctggccttgttgggtggaggtgaagagttaatggctccgcgcgcaggcactgccctctgaactggaacaaaatgcaacttccggttggagtcactcggccaggcgccggcgacctgaggggagagggaacgcagctgaaagcgtgaactgtacctgtcatttactccatcctttatagtgatgctacaggacgaagaggaatggataaaaacattggcgagcaactcaataaagcgtatgaagccttccggcaggcatgcatggatagagattctgcagtaaaagaattacagcaaaagactgagaactatgagcagagaatacgtgaacaacaggaacagctgtcacttcaacagactattattgacaagctaaaatctcagttacttcttgtgaattccactcaagataacaattatggctgtgttcctctgcttgaagacagtgaaacaagaaagaataatttgactcttgatcagccacaagataaagtgatttcaggaatagcaagagaaaaactaccaaaggtaagaagacaagaggtttcttctcctagaaaagaaacttcagcaaggagtcttggcagtcctttgctccatgaaaggggtaatatagagaagactttctgggatctgaaagaagaatttcataaaatatgcatgctagcaaaagcacagaaagaccacttaagcaaacttaatataccagacactgcaactgaaacacagtgctctgtgcctatacagtgtacggataaaacagataaacaagaagcgctgtttaagcctcaggctaaagatgatataaatagaggtgcaccatccatcacatctgtcacaccaagaggactgtgcagagatgaggaagacacctcttttgaatcactttctaaattcaatgtcaagtttccacctatggacaatgactcaactttcttacatagcactccagagagacccggcatccttagtcctgccacgtctgaggcagtgtgccaagagaaatttaatatggagttcagagacaacccagggaactttgttaaaacagaagaaactttatttgaaattcagggaattgaccccatagcttcagctatacaaaaccttaaaacaactgacaaaacaaagccctcaaatctcgtaaacacttgtatcaggacaactctggatagagctgcgtgtttgccacctggagaccataatgcattatatgtaaatagcttcccacttctggacccatctgatgcaccttttccctcactcgattccccgggaaaagcaatccgaggaccacagcagatggcaccctgcattgtacatttgctttctatactacagcaagggaaacagctgcccatttggaagccctttcctaatcaagacagtgactcggtggtactaagtggcacagactcagaactgcatatacctcgagtatgtgaattctgtcaagcagttttcccaccatccattacatccaggggggatttccttcggcatcttaattcacacttcaatggagagacttaagacacatttgaaaacagacatatcaagttctatgtgatgattttgggtttttaatactataaatacttgattgtaaactaaattcaagatcatttataggaaaatctagtttcacagctatttgaatttttttctggatttactatataactcttattttttaaaagatcattctgttctttcaaggagaaataagcctaaaagaagaaaaacaaaaaaaattctgtataaaactgtaatcctttgtattcatgtttacagtgctattactataattcaaaattatgtatgtgacttagagttatataatcataatttatgtttatttcaaatatctaagtttattgcttggatttctagtgagagctgttgaatttggtgatgtcaaatgtttctagggtttttttagtttgtttttattgaaaaatttaattatttatgctataggtgatattctctttgaataaacctataatagaaaatagcagacaacataaacatctttgtaaatatcaaacctaatacatttcttgtccagtgataaaacaactggtagaattatttaaacactttagatttttaaataatatacatggctttaatttttactgtgtgtatagctacatgatgaaattaattaaatattaagaggtacttatgttgtgatcatttg

SEQ ID NO: 107871 - DNA, 2059 bp, Homo sapiens
agaggtcttttttaaaaaaagatataagatgataaaataatctattcatccacagttttcttaacatgcatcacaatatttcatccttcctttgccttcactgtcttctttttcccaactcctgcaaccaccagtccctcacatggattattgagagcagacagtggctaaactgattagtgatatacttagttagacagtgacattaataataaatgacctaattttagatatacctagtaagattttcccttttaacaacttatttgtctaagcaaactcacagttatagcttccgttactgacaaaatgtttaaatgtatacactacaagcaaatgtttttcaagtgtggagcagtgtaactgtgaacaagatgcaaagcttacggcagaagacttaggaaaagacaaagtagttaaattgcgactaataagctatgtttcagttcacccgctggagactgctaatattctgtgtaagatggtagcaaattttaaaatcccagttgtcttcatttgctataaaaaccaatagaaaaaataataataatctctccaaagctgattgaacagatttttttaatgatttgaatgcggctgtttctcttttgtgttcttctccctccagaaacacagtgctctgtgcctatacagtgtacggataaaacagataaacaagaagcgctgtttaagcctcaggctaaagatgatataaatagaggtgcaccatccatcacatctgtcacaccaagaggactgtgcagagatgaggaagacacctcttttgaatcactttctaaattcaatgtcaagtttccacctatggacaatgactcaactttcttacatagcactccagagagacccggcatccttagtcctgccacgtctgaggcagtgtgccaagagaaatttaatatggagttcagagacaacccagggaactttgttaaaacagaagaaactttatttgaaattcagggaattgaccccatagcttcagctatacaaaaccttaaaacaactgacaaaacaaagccctcaaatctcgtaaacacttgtatcaggacaactctggatagagctgcgtgtttgccacctggagaccataatgcattatatgtaaatagcttcccacttctggacccatctgatgcaccttttccctcactcgattccccgggaaaagcaatccgaggaccacagcagcccatttggaagccctttcctaatcaagacagtgactcggtggtactaagtggcacagactcagaactgcatatacctcgagtatgtgaattctgtcaagcagttttcccaccatccattacatccaggggggatttccttcggcatcttaattcacacttcaatggagagacttaagacacatttgaaaacagacatatcaagttctatgtgatgattttgggtttttaatactataaatacttgattgtaaactaaattcaagatcatttataggaaaatctagtttcacagctatttgaatttttttctggatttactatataactcttattttttaaaagatcattctgttctttcaaggagaaataagcctaaaagaagaaaaacaaaaaaaattctgtataaaactgtaatcctttgtattcatgtttacagtgctattactataattcaaaattatgtatgtgacttagagttatataatcataatttatgtttatttcaaatatctaagtttattgcttggatttctagtgagagctgttgaatttggtgatgtcaaatgtttctagggtttttttagtttgtttttattgaaaaatttaattatttatgctataggtgatattctctttgaataaacctataatagaaaatagcagacaacataaacatctttgtaaatatcaaacctaatacatttcttgtccagtgataaaacaactggtagaattatttaaacactttagatttttaaataatatacatggctttaatttttactgtgtgtatagctacatgatgaaattaattaaatattaagaggtacttatgttgtgatcatttg

SEQ ID NO: 107872 - DNA, 2069 bp, Homo sapiens
gtttgagcagcattgttagagcctgtggaaaacactttacaactgtgtaactgtcttcatctttacagaggaatagtctacaaaggaagacttgtaacctggagaagagacctgtcatttactccatcctttatagtgatgctacaggacgaagaggaatggataaaaacattggcgagcaactcaataaagcgtatgaagccttccggcaggcatgcatggatagagattctgcagtaaaagaattacagcaaaagactgagaactatgagcagagaatacgtgaacaacaggaacagctgtcacttcaacagactattattgacaagctaaaatctcagttacttcttgtgaattccactcaagataacaattatggctgtgttcctctgcttgaagacagtgaaacaagaaagaataatttgactcttgatcagccacaagataaagtgatttcaggaatagcaagagaaaaactaccaaaggtaagaagacaagaggtttcttctcctagaaaagaaacttcagcaaggagtcttggcagtcctttgctccatgaaaggggtaatatagagaagactttctgggatctgaaagaagaatttcataaaatatgcatgctagcaaaagcacagaaagaccacttaagcaaacttaatataccagacactgcaactgaaacacagtgctctgtgcctatacagtgtacggataaaacagataaacaagaagcgctgtttaagcctcaggctaaagatgatataaatagaggtgcaccatccatcacatctgtcacaccaagaggactgtgcagagatgaggaagacacctcttttgaatcactttctaaattcaatgtcaagtttccacctatggacaatgactcaactttcttacatagcactccagagagacccggcatccttagtcctgccacgtctgaggcagtgtgccaagagaaatttaatatggagttcagagacaacccagggaactttgttaaaacagaagaaactttatttgaaattcagggaattgaccccatagcttcagctatacaaaaccttaaaacaactgacaaaacaaagccctcaaatctcgtaaacacttgtatcaggacaactctggatagagctgcgtgtttgccacctggagaccataatgcattatatgtaaatagcttcccacttctggacccatctgatgcaccttttccctcactcgattccccgggaaaagcaatccgaggaccacagcagcccatttggaagccctttcctaatcaagacagtgactcggtggtactaagtggcacagactcagaactgcatatacctcgagtatgtgaattctgtcaagcagttttcccaccatccattacatccaggggggatttccttcggcatcttaattcacacttcaatggagagacttaagacacatttgaaaacagacatatcaagttctatgtgatgattttgggtttttaatactataaatacttgattgtaaactaaattcaagatcatttataggaaaatctagtttcacagctatttgaatttttttctggatttactatataactcttattttttaaaagatcattctgttctttcaaggagaaataagcctaaaagaagaaaaacaaaaaaaattctgtataaaactgtaatcctttgtattcatgtttacagtgctattactataattcaaaattatgtatgtgacttagagttatataatcataatttatgtttatttcaaatatctaagtttattgcttggatttctagtgagagctgttgaatttggtgatgtcaaatgtttctagggttttcagtgtttatgaaaattatattatgtatagggaatctctttgataactatatagaaatggacactaacttttgtatttaactataattctgccggtgaacacaggattttaactgatttaaataaggtatcagttggccgggaatttaggaaaaaaaaaaaggggggaataaagggggggagagtggaggcaggcgagagtacgtacaacgaaaggagaaagaaaaaag

SEQ ID NO: 107873 - DNA, 1443 bp, Homo sapiens
  misc_feature (1408)..(1408): n is a, c, g, or t
gccctggccttgttgggtggaggtgaagagttaatggctccgcgcgcaggcactgccctctgaactggaacaaaatgcaacttccggttggagtcactcggccaggcgccggcgacctgaggggagagggaacgcagctgaaagcgtgaactgtacctgtcatttactccatcctttatagtgatgctacaggacgaagaggaatggataaaaacattggcgagcaactcaataaagcgtatgaagccttccggcaggcatgcatggatagagattctgcagtaaaagaattacagcaaaagactgagaactatgagcagagaatacgtgaacaacaggaacagctgtcacttcaacagactattattgacaagctaaaatctcagttacttcttgtgaattccactcaagataacaattatggctgtgttcctctgcttgaagacagtgaaacaagaaagaataatttgactcttgatcagccacaagataaagtgatttcaggaatagcaagagaaaaactaccaaaggtaagaagacaagaggtttcttctcctagaaaagaaacttcagcaaggagtcttggcagtcctttgctccatgaaaggggtaatatagagaagactttctgggatctgaaagaagaatttcataaaatatgcatgctagcaaaagcacagaaagaccacttaagcaaacttaatataccagacactgcaactgaaacacagtgctctgtgcctatacagtgtacggataaaacagataaacaagaagcgctgtttaagcctcaggctaaagatgatataaatagaggtgcaccatccatcacatctgtcacaccaagaggactgtgcagagatgaggaagacacctcttttgaatcactttctaaattcaatgtcaagtttccacctatggacaatgactcaactttcttacatagcactccagagagacccggcatccttagtcctgccacgtctgaggcagtgtgccaagagaaatttaatatggagttcagagacaacccagggaactttgttaaaacagaagaaactttatttgaaattcagggaattgaccccatagcttcagctatacaaaaccttaaaacaactgacaaaacaaagccctcaaatctcgtaaacacttgtatcaggacaactctggatagagctgcgtgtttgccacctggagaccataatgcattatatgtaaatagcttcccacttctggacccatctgatgcaccttttccctcactcgattccccgggaaaagcaatccgaggaccacagcagcccatttggaagccctttcctaatcaagacagtgactcggtggtactaagtggcacagactcaggtggtgtgactcaggtggtgtgactcaggtggtgtgactnaggtggtgtgactcaggtggggtgccgagctcgaa

SEQ ID NO: 107874 - DNA, 716 bp, Homo sapiens
gccctggccttgttgggtggaggtgaagagttaatggctccgcgcgcaggcactgccctctgaactggaacaaaatgcaacttccggttggagtcactcggccaggcgccggcgacctgaggggagagggaacgcagctgaaagcgtgaactgtacctgtcatttactccatcctttatagtgatgctacaggacgaagaggaatggataaaaacattggcgagcaactcaataaagcgtatgaagccttccggcaggcatgcatggatagagattctgcagtaaaagaattacagcaaaagactgagaactatgagcagagaatacgtgaacaacaggaacagctgtcacttcaacagactattattgacaagctaaaatctcagttacttcttgtgaattccactcaagataacaattatggctgtgttcctctgcttgaagacagtgaaacaagaaagaataatttgactcttgatcagccacaagataaagtgatttcaggaatagcaagagaaaaactaccaaaggtagacattgcttctgcagaaagcagcatttaaatgctgatgcgtgacatagcttcctcattttatttttctgaagtgatctgctggaattccaaacagaagttccatatatacaaatatgtggcttaaatatttctaaatagaagaactattttcaagtaaaataaaggctgaggttttgtattt

SEQ ID NO: 107875 - DNA, 655 bp, Homo sapiens
gccctggccttgttgggtggaggtgaagagttaatggctccgcgcgcaggcactgccctctgaactggaacaaaatgcaacttccggttggagtcactcggccaggcgccggcgacctgaggggagagggaacgcagctgaaagcgtgaactgtgagatgcttttgacaagttataataagggagagatggtagtaaaggaagtgaagaagcgacgtgaaattgaaggaaaagaaaatgacctgccttcttaccgcggttggaatacacacccaaacgagaggtagcagagaagcaagcagtgcattctgttaaaaattattgtgtcctcatttgagagaggagggatcctcaaataatacaactatgtgcaaagcaggaagtgaaatccttctcagtcctctccccagttgtaatccaagccttccacatctttcctgtatgtgcataaccatgttattttgctttcttatgaaaatgagattatgcatactgttcgataatctgtttcagattaaatatatatatatggtggaaacaaataatctctccctctcttttccttttcccttctctctccctcccctctctcctcttcttctctccctcctactctacacctatatccgggtatccctcccttctaccacaaaaat

SEQ ID NO: 107876 - DNA, 1043 bp, Homo sapiens
gagggacgcgctgacagtaggggcgccgcagggagagaagccgaggagcagcggagacaaccaatttgcagtttggggagggattttgtgcgggagaaaccacgcgagtccttcccccggagcggactccttgtgggttggtttccgggcccgcgatgtcagcatagcatcgtcggcctctgccccaacggcttcaagggagggactcgtcccggctgctttgcccgggaaatgggggtggaagggcctgcggtgtcgaggtgagcagtggaccctccaggaacattcccgacttcccttcgggagagagactgcctcctagaatcaagtagtatcgtggttactctttcgaaaacttaattggttctttctgttgttttcccaaggtggttgcacaattcccctctgccttcctgtggggtgtcatcatagcctggtcaatgagaagttgggtaacttcccagagggtcacggagggagtgggtggccaaggcaggaagaacagaagccaaccccgcccacagtgggaacccaggcgttaggagatgcttttgacaagttataataagggagagatggtagtaaaggaagtgaagaagcgacgtgaaattgaaggaaaagaaaatgacctgccttcttaccgcggttggaatacacacccaaacgagaggtagcagagaagcaagcagtgcattctgttaaaaattattgtgtcctcatttgagagaggagggatcctcaaataatacaactatgtgcaaagcaggaagtgaaatccttctcagtcctctccccagttgtaatccaagccttccacatctttcctgtatgtgcataaccatgttattttgctttcttatgaaaatgagattatgcatactgttcgataatctgtttcagattaaatatatatatatggtggaaacaaataatctctccctctcttttccttttcccttctctctccctcccctctctcctcttcttctctccctcctactctacacctatatccgggtatccctcccttctaccacaaaaat

SEQ ID NO: 107877 - DNA, 487 bp, Homo sapiens
gtttgagcagcattgttagagcctgtggaaaacactttacaactgtgtaactgtcttcatctttacagaggaatagtctacaaaggaagacttgtaacctggagaagagacctgtcatttactccatcctttatagtgatgctacaggacgaagaggaatggataaaaacattggcgagcaactcaataaagcgtatgaagccttccggcaggcatgcatggatagagattctgcagtaaaagaattacagcaaaagaatgtttttgattcaatggagataccatactgatttctcgtgaagaaacacctgaatcctaggttacaacgaactagaaaaatgactgagagatctggcttcggtgataaccagagcttttgttcataaacatgtgctacatgctctgtgtcttagtccatttgcactctataacaaaataccttatacaaggtaatttgtaaataatagaaatttatttctcacagttt

SEQ ID NO: 107878 - DNA, 153 bp, Homo sapiens
tgtcaaagtaactattacctaaagaattttctaaaactcctaccttaaaatgtattctctttatggttttgagtttgtattattttttgctttttcaggtggtaccaaaaataagggttttctgctaatgtccaagaggtttttgtcttgcag

SEQ ID NO: 107879 - DNA, 407 bp, Homo sapiens
gtaaagtggtgtttatctcacctcacaggagatgcttttgacaagttataataagggagagatggtagtaaaggaagtgaagaagcgacgtgaaattgaaggaaaagaaaatgacctgccttcttaccgcggttggaatacacacccaaacgagaggtagcagagaagcaagcagtgcattctgttaaaaattattgtgtcctcatttgagagaggagggatcctcaaataatacaactatgtgcaaagcaggaagtgaaatccttctcagtcctctccccagttgtaatccaagccttccacatctttcctgtatgtgcataaccatgttattttgctttcttatgaaaatgagattatgcatactgttcgataatctgtttcagattaaatatatatatatggtg

SEQ ID NO: 107880 - DNA, 445 bp, Homo sapiens
tgtgagtaagaaactttgtgaattggtgtgtccgaatccgtcaagcacgacgtcggagaatttgtatgcgtgagcgagagggacgcgctgacagtaggggcgccgcagggagagaagccgaggagcagcggagacaaccaatttgcagtttggggagggattttgtgcgggagaaaccacgcgagtccttcccccggagcggactccttgtgggttggtttccgggcccgcgatgtcagcatagcatcgtcggcctctgccccaacggcttcaagggagggactcgtcccggctgctttgcccgggaaatgggggtggaagggcctgcggtgtcgaggtgagcagtggaccctccaggaacattcccgacttcccttcgggagagagactgcctcctagaatcaagtagtatcgtggttactctttcgaaaacttaattggttct

SEQ ID NO: 107881 - DNA, 420 bp, Homo sapiens
atggataaaaacattggcgagcaactcaataaagcgtatgaagccttccggcaggcatgcatggatagagattctgcagtaaaagaattacagcaaaaggtgtgtggttctggttttgaaagttattctttatcttggtacatggaattttagagccttttgcatctgaaaaatgttatattgttagaaattgccctgaagaactataattacagaaatgcaggtatatattaatggattaaatttgaagtttttgtttgttgttttttttaaaaatattgcaacccataggaagagttgatttgatgggctccttttcaggtgattgtgaaagattgtgaatgttgtcttccataaataattttaaaatatcagtatttataaataaggaggaaataactataaaaacagttttatgac

SEQ ID NO: 107882 - DNA, 316 bp, Homo sapiens
ctctattatatgtcttgcttgttcttttactagtctgtgcattcatgtttcagtagatggcaccctgcattgtacatttgctttctatactacagcaagggaaacagctggtatgtgattacaacttgatggaaaagtattcagcttaaaaaattcaggagaattagtgttgagttgtcacaagacatggggcataaggttagataattgatattttggcagaaaaagcaaagaaattagtttgttttgaagaccatgttacagtttaggatggaaagaatatttcttaaaatgagttttttaaaaaaaacctttt

SEQ ID NO: 107883 - DNA, 1559 bp, Homo sapiens
gccctggccttgttgggtggaggtgaagagttaatggctccgcgcgcaggcactgccctctgaactggaacaaaatgcaacttccggttggagtcactcggccaggcgccggcgacctgaggggagagggaacgcagctgaaagcgtgaactgtacctgtcatttactccatcctttatagtgatgctacaggacgaagaggaatggataaaaacattggcgagcaactcaataaagcgtatgaagccttccggcaggcatgcatggatagagattctgcagtaaaagaattacagcaaaagactgagaactatgagcagagaatacgtgaacaacaggaacagctgtcacttcaacagactattattgacaagctaaaatctcagttacttcttgtgaattccactcaagataacaattatggctgtgttcctctgcttgaagacagtgaaacaagaaagaataatttgactcttgatcagccacaagataaagtgatttcaggaatagcaagagaaaaactaccaaaggtaagaagacaagaggtttcttctcctagaaaagaaacttcagcaaggagtcttggcagtcctttgctccatgaaaggggtaatatagagaagactttctgggatctgaaagaagaatttcataaaatatgcatgctagcaaaagcacagaaagaccacttaagcaaacttaatataccagacactgcaactgaaacacagtgctctgtgcctatacagtgtacggataaaacagataaacaagaagcgctgtttaagcctcaggctaaagatgatataaatagaggtgcaccatccatcacatctgtcacaccaagaggactgtgcagagatgaggaagacacctcttttgaatcactttctaaattcaatgtcaagtttccacctatggacaatgactcaactttcttacatagcactccagagagacccggcatccttagtcctgccacgtctgaggcagtgtgccaagagaaatttaatatggagttcagagacaacccagggaactttgttaaaacagaagaaactttatttgaaattcagggaattgaccccatagcttcagctatacaaaaccttaaaacaactgacaaaacaaagccctcaaatctcgtaaacacttgtatcaggacaactctggatagagctgcgtgtttgccacctggagaccataatgcattatatgtaaatagcttcccacttctggacccatctgatgcaccttttccctcactcgattccccgggaaaagcaatccgaggaccacagcaggtaactgttttgcattaacaaatatattattatgtgtgaacacacattttgccatacatgcacagatatgcatctcttttacgttatcaaacatcctttttaaactactgacagccaaagttaaggctttcaaaaaaacaagtcccataataaatgacatgaaattagaaaagctgaatatggtaaaactttattggaaagtaccttagaatttatgtcagatttaaaaatacatgttaagccttatccatatct

SEQ ID NO: 107884 - DNA, 971 bp, Homo sapiens
gccctggccttgttgggtggaggtgaagagttaatggctccgcgcgcaggcactgccctctgaactggaacaaaatgcaacttccggttggagtcactcggccaggcgccggcgacctgaggggagagggaacgcagctgaaagcgtgaactgtacctgtcatttactccatcctttatagtgatgctacaggacgaagaggaatggataaaaacattggcgagcaactcaataaagcgtatgaagccttccggcaggcatgcatggatagagattctgcagtaaaagaattacagcaaaagactgagaactatgagcagagaatacgtgaacaacaggaacagctgtcacttcaacagactattattgacaagctaaaatctcagttacttcttgtgaattccactcaagataacaattatggctgtgttcctctgcttgaagacagtgaaacaagaaagaataatttgactcttgatcagccacaagataaagtgatttcaggaatagcaagagaaaaactaccaaaggtagacattgcttctgcagaaagcagcatttaaatgctgatgcgtgacatagcttcctcattttatttttctgaagtgatctgctggaattccaaacagaagttccatatatacaaatatgtggcttaaatatttctaaatagaagaactattttcaagtaaaataaaggctgaggttttgtatttcctactgaccgtttttctacatcacaagcatttcaacaaagaaaacatttaacaaagaaatagggctggacacagtgactcactcctgtaattcaaacactttgggaggccaaggagggaggatcacttgagctcagcagtttgagaccagcctgggcaacatagggggatccctatctctataaaaaatgaaaaaattagccacgcagaatggcacacgcctgcagtcccagttactcagtaggaggattgttt

SEQ ID NO: 107885 - DNA, 624 bp, Homo sapiens
gtgagttctgtcctccagactccatgcccatccttcccactgaaataaacatcccaaactaccccttctcttggtatttcatgaaccactgccactgacccaaaaaggtatctttgctgtcctttgtacagaaactatttgggatctgcattaatggtgcagttgtcaaatcccagtccaggatctgccctttaccatttttgcaagcctgaaagtcgctttaaaggcatatgtttttcccctacttgcttcactggagaatcattcacagaggatctgtcattgcagctcagcatagcatatacctgaaggaggcaaatgtgatttcttaaaatcacgatttcggatttcatgtcctccacgtcccattgttctctaatgaagtcgtgccaataccaaaatttcttcttactgtgttgcagctcacccacacatcatcacacgggcaagccactacaaaactttcaccttcagtgcttgaatcgtttcataactcgccttgttatctggtgaagggcgaagccaaactcacagaacttaaagtcgatgctatttctaaagtgtgtggcattgttcctcagcagccctggcttctagctttccattcctaaacttgctgctcag

SEQ ID NO: 107886 - DNA, 210 bp, Homo sapiens
agtaagcatctctatcaaaatcaaggatttgcgaataaaatttcccactcaaattatgtaagttccaagtactgctattatattttaaaagatttaagccacaccaacttatacattagcattgcaagggccatggttcttgtttaaaacaagacacttaactgaaagaagccaaaagacagtaggtcactagagccatggcctttctgt

SEQ ID NO: 107887 - DNA, 232 bp, Homo sapiens
ctcccgcctcagcctcccaaagtgcgggaattacaggtgtgagccactgtacctggctgttaatctcatttttaaaacagaaaacctcaggctcagaggctttgattgggcaatagtgtctggccagatttaatacatttttactttcgttatttttcttttctttcttttttttttgggaaggggggccgggcagggggggcacccccgagaggcgcaccgggcgggatcc

SEQ ID NO: 107888 - DNA, 477 bp, Homo sapiens
tcactggcaatttagacttgtaagaaaactcttttatttgtttaaaagcattagtttccttttcccagcagttttgtgctgtactgaaacaacgtgttcctggtgtgcagtgctcttagatagtagtgtgtctgtgttgcctttcaacaaagaaaaaactaccaagcactgtctgctttaaacatcatccagagtgatggtttgcagcaaagatgtccactagccacagtgaattttttttctggataatagattcatacaattccatgtcaaagcaaagaaaaaaaagtgccacattttagactgtgaagtcttattataagtaagctcagtatttccattagttactcattaggctatttaataaggattcttaacctggagtaagggtctgtggttaggattcaaggagttgtcagtgaacttggaagggaaaaaactgcatctttattttctctaacctctaactgaaatagc

SEQ ID NO: 107889 - DNA, 356 bp, Homo sapiens
  misc_feature (350)..(350): n is a, c, g, or t
tatctattataagtctactcaaactttttgtggaatgaaatggagcattaaaaaactaagttatgtctcaattttaaaagccaaatccacccttccacaaatacacaatattaacgtcaattgcttcagactttttacaccctttccatcagacaacccacaatctaggaggggctcggttgtgcacatagtacaaccgtccttaaccgcttagttgactaaaaactgtaataaaagtaaagagctgttttgggcatcaaaggacattaccaaaaaagtgaaaaggcaaccaaaaagaaaggaagtcgaagtatctctgtttgcagacgatatgattctatatctagaanacccca

SEQ ID NO: 107890 - DNA, 788 bp, Homo sapiens
aaaggatgaatagaaatagtaacttcatgtagagattctttgcagactcactaattccatttcttctgttattttctcatgtaggaaatatattcagattgttaaatggaaaggtcctgatttttttaaccttaatatggaaatgaatttctgacttggggaaatgctgttaactttttaatttatttggccttttccatataaattcccatgaatccttcatatttctgtttagtctcttgtggaaatatattatttatattgaacaatgagttgacactctactgcaactcttcctccaaatcacttaattttaaaaaataaggtagaaggaaaagacgtatttacttgaaatatcagctttttaagctaagcgttttcttttctcctgcatttttttttctttgctacatttcttaaagcaaaatgagaaaaaataaaataaaacaccacagggaaggtttattacattatctggcatacaatttgctttttgaaccagtcatgaaaacttaaatcaaaattataaaaatcaaaatgtctaatcctgtctctgaagagaccccaggaaccatttagagtaacagacctgaagaaaagaaagaattgctgaatactccattatgaattagagcattccattgtcctatagagcaaatgaatccacagagtaaaatgttctcttagtattcatatcaacatttcactagggaaaagttggactggaaaattctaatcaactataaattaaaggtggatgcatgatgaggtgaataatttaaggttat

SEQ ID NO: 107891 - DNA, 731 bp, Homo sapiens
aatgcaattacaaagtgttatataaacaaatttagaacaatataaaccttgtgttggtgttttggatttttcagaaaggatatatgtggataaagcctgttgtccaaaatttgagatgacccatgctctttatgcctgaaccatcctttttttcctttctcattgctgctgactcactcctttaggtatattgtctactctcctcagcaaacctatttccaatcatgtacctcttctagtgaattaaaatcatattgtgattgagaatgaaagacttttttccttatactgactgtctgttggaataattgtactgctcgctctctgtaatgttctttatggtttgtattatgctaatacatttataaaagactatctaaacataaggctgccattatcgtgaaattaatccaccttgggtgagattgtgaagaaatacatatatgtgtgtgtgtgtgtgtgtgtgtgtgtgtgtgtgtatatgtatatatatatacatatatatatgttctcttgtttttttcttgcgactgggtctcgctctgctgcccaggctggagtgcaatggcaggatcacagctttctgcagcctcgaacttctgagctcaagggatcctcctgcctcacccttccaaagtgttgggattactggcatgagccaccacacccagctttcctttataatctgttgtatactttctagttaaaaggttaaagtgggttttagaaat

SEQ ID NO: 107892 - DNA, 567 bp, Homo sapiens
ctggagtggaagaataaaaagtggtataaaaacaggaatgaaaatgaagaagaaaaatgcaagggtctggtgaaagcagccaaatctatgaacaaatggagaactcagagaaagggtcttgccaccagggtgggaaagagtttgggaagattagcacatgagaacctctcggtaatcaaagtctctaaatatgacaaattgaattgagactcctttcatattctttgagaagctaaataaatattgaagtatattttaaattagcatttggaaactaaactgggtttcccacaaagagactaagccatgtgggtcctaggttttatttaggttacatgtatctgttgcctccctttctactccacacatatttcttcagtacctaacacagtgcctgaatgattcaataagtgaatgtatgagtggcacatatgtataaataagttgtatctggttccttctgagaaaattcccaggtttcaaaatcagtattaaccaacatttccaggtgatgtcactttgctgaatatttaagcactaatggtccttgaagccaggccagcagat

SEQ ID NO: 107893 - DNA, 670 bp, Homo sapiens
gacagaaaaagctaaagggatggggtaatagaaaagcgtttatagttgatattatacttccgagttggttctaattcaagttaacattcctcatagtcattatgtagctcataaattcaataaagtgttttactgttactataaaaatgacaggaggggggttttatgttgtaagtttcgttagttgctcttcctgttttatattgaagttctcaggccattatgtcattaaactccttggagtctgaagggctcaagccttccatttcttctcttttgcagacttggccaaggcaaatgttagcccaggccaggtcaggtcactagacacttggagccaactggctatgatgccaggggacagggctgtttaaatctattatttcatgagaagtgccttcaacccatgcagatgtaatcgtgaggagtggaaaggtctggggtgggagggaagctttaggcagactaagagttctaacaattcaccctagaaagaaacagtccgtttggtcaggaggcagaggagggcttgctggatggggtcaggaggcagaggagggcttgctggatggggtcaggaggcagaggagggcttgctggatggggtcaggaggcagaggagggcttgctggatggggtcaggaggcagaggagggcttgctggatgggg

SEQ ID NO: 107894 - DNA, 550 bp, Homo sapiens
tctaacgtcagaacggctgacgagcagttgattgtccttgcttgtgttgttgacaggggtgggtggggtgggagcaggggtatggatattgcataagttattgaaatgctgacccccgttcaggaaaccatgcagccccttcccttcccttcccttcccttcctttcccttccctagccagggctcaggtacctcactctcctgccttgtgcgtagctcctggggccccggtcagtccccagcagccttggcacacagtgtctggagcctctgctcctgctgcaaaagcagaaaccatgtgaaccttctggccagtactggaaaggggaatgctatttatttttatattgtgtatattttgtcgtggtctgctgattccctgtttcactgagagcgacacttacctcaatagttagttcaatattgtgtgttggataattttttaaaagaactttttaaaaagctttttgatccttggaggtctgtagatttatttccatatgaactggttattttgtataaagtacatgcttaaaatagcaaggctcct

SEQ ID NO: 107895 - DNA, 600 bp, Homo sapiens
gtctggcctccacacgtttctcttgtggaggccagggccctgagtgtcctggcctccacacgtttctcttgtggtcccattcaggctttaactgcctgctttgtgcagagatgctgggacggaaagaggacctcctccaccactggaagcaccagcataactgtgaggacccttccaaactgtgggctattttaaatacggtctccaaccagggagtgatcgaactttccagtgaagctgagaaatgagaccccaaggcagcctggggttaaggagagagctctgccgccaccttccttcagagcttcgtgctttatggtggtgcttagtcacaaagatcaaacaacaggattggtgtgagtgaacagaaatgatttttgtacatggttttattttcttaacgaaataaaatataagctctcgaagcataaaaaaaaaaaaaaaaaaaaaaaaaaaacaaaaaagaacaagaaaaaaacaaaaaaaaacacaaaacgaaagaaaaaacaacaacaaagaggggggcgggcctccctaaaaacaccccaggggggggcacaaaaatgcgcgaccacgaattttgtaagagagggggctcca

SEQ ID NO: 107896 - DNA, 1609 bp, Homo sapiens
gaaatatatcattaataagtgtagagatggtaaagaaagagtaaaaaatgatccccaagaattcagagaccaaaagctggggaccctgaaaaaataccgtagcattatgcccaaacctatcatggtcatacccactttggcctccctggcttctccaactacactacagtcccagatgcttgggggcctaggacaggatgttttgttaaataattcactcactcctaaatatcttggctgtaagcaagacaacagctcttcccctaagcccagctccgtgttcagaaatggattctctggcattaagaagccttggcacagatgtcacgtctgcaaccaccacttccagttcaaacagcaccttcgagaccacatgaatacacacaccaacagacgcccttacagttgtcggatttgtcgcaagtcctatgtacgtcctggcagcctgagcacacacatgaaacttcatcatggtgagaaccgtctgaagaaactcatgtgttgtgagttttgtgcaaaagtgtttggccacatccgagtctattttggccatctgaaagaagtgcatagggttgtgatcagcactgagcctgcgcccagtgaactgcagccaggagacataccaaagaacagagacatgagtgtgcgaggcatggagggatcattggagagggaaaacaagtccaacctggaagaagacttccttctaaaccaggcagacgaagtcaaattacaaatcaaatgtggtcgttgtcagattactgctcagtcttttgcggaaataaaatttcatttacttgatgttcatggagaggaaattgagggcaggctacaagaagggaccttcccaggaagcaaggggactcaggaagagttggtgcagcacgctagccccgactggaaaaggcatcctgagagagggaagccggagaaggttcattcctcctccgaggaatcacatgcatgtccaagactgaaaaggcagctccaccttcatcagaatggcgtggaaatgctcatggaaaatgaaggaccccagtcaggaaccaacaagccaagggaaacctgccagggccctgagtgtcctggcctccacacgtttctcttgtggtcccattcaggctttaactgcctgctttgtgcagagatgctgggacggaaagaggacctcctccaccactggaagcaccagcataactgtgaggacccttccaaactgtgggctattttaaatacggtctccaaccagggagtgatcgaactttccagtgaagctgagaaatgagaccccaaggcagcctggggttaaggagagagctctgccgccaccttccttcagagcttcgtgctttatggtggtgcttagtcacaaagatcaaacaacaggattggtgtgagtgaacagaaatgatttttgtacatggttttattttcttaacgaaataaaatataagctctcgaagcatatttttctaactatatgcagtcttattttaaaatacgtactgattcttaatatcttagactttcagaataaataaaaagatcaaaatttgaagattgaaatttagcagaatataggctgttcttcaaatacagctctcagtga

SEQ ID NO: 107897 - DNA, 541 bp, Homo sapiens
ggtggggtatctaaggatcccggaatctgaccgatgcctctctgagttcctccgtctccaactgcctgcctgacccaccttgtggtcctcacttggagcatgcagtgctggaatcttcttagtttcagtcttactttgccccccgaggtatgttttctctgcagcttccctttccaaggacatcctagagatggatgatggaacttcccattgtccttaaaccctttgggtactggaaagcctgacctgggactgggtacttcagcataaataacacaggggagaccagatggatggaggaactgcctatccctgtcccattgtcttgtccacaggtcagcctcacaaagggaaagagcccttgaagggaatacagtagaagctcattctcttagtgacctggggacattggctcgagatgaagcctggcaggagtggcaactccaggtgatttctgcacctttcctatttcctgggaggtgggccaggccacagtgttagcgggaaaggaactgaacagccagactagtcagagggagtg

SEQ ID NO: 107898 - DNA, 924 bp, Homo sapiens
acatttttaaagtttcctccttggcctttgcacctctcatctttgttatttgttcattattgcctattggggtgatgcctattattttctctctttttacattccaaagatatttcctttactgtagaacaggggcatccaagggagaatctcaccacgaccccaggtctagagcgcccggagtccgccatccctgggaatggaggcggcttcggcctggggtcgtggtgagattcgttggtggctgcgcgattgtggcggagttgcaagcaaacgggtttcatcaccttaaatggttttgaaccaaagaagctgtattcccttaaaaagacggacaacccatcgtgtgaactatagagtttgtgaacaaatttatattgggttcatagtggcgtcatgcacgcagactcctgcgagttcccctaagttcttagaggactgctttgccttttgatctgagagttgcaaagttccctaaagaatggcccttgtggataagcgctaagtcaagagacagcgattggacagaatttgtgaggaattcgtccccagatcatgaaagtcaccctgaaccccgcctcgtggtggctctgctggatggacgggactgcactgtggacatgcccatcctgaaggacctggccacctggccttctgtgaggctcagtccatgcaggagatccacgagaaagttctaaacgaagtcgtgggcgccatgatgtaccacaccttctccctcaccagggaggacctggaaaatttcaaggccctgagagtgatcgtgcaggtgggcagtggctacgacaacgtggccatcaaggctgctggcgagctcgaaattgctgtgtgcagcatcccgtccgcagccgtggaagagacagccgactccaccaccggccacatcctcaatctgtactgggggaa

SEQ ID NO: 107899 - DNA, 283 bp, Homo sapiens
agagagaaaatgagtcatccgtgggtactaaggggctcaaaagtggacccaaattaggcctgatctgccttcctgaatgaagcccattgtacattctgggtcccctcctccctttaaaatttctcaggtctttaccagaaagatagctgcatcctttgtaataaaactgaaataacatgaaacaaagttatcaatccttagcctctctcagccaagactgaggtataataaaaacagatgtccaaagcctaatgctgtacaggatgctttgcacatccactct

SEQ ID NO: 107900 - DNA, 186 bp, Homo sapiens
gtcgcaaattcctgacctcaagcaatccacctgcctcggccctacaaagtgctgggattacaagcatgagccactgtgcctggcccatatttattttttattctttattttgtatacaagttcttggtcagatacaataatacctggtcagatgagataatgagttggaaaatgctttgcaaatgg

SEQ ID NO: 107901 - DNA, 544 bp, Homo sapiens
ctggagcaatggccttaagagttgggtggctctggcctaatctttggtctgggaggtgaccagctacctccctgctgctcctgggatccacatcactatctggggcatctgggaagtctaactgtagagcttgggatattcacaagatggcaggcctcctttctaggtccttgcctctcttgaaggaagtgggcagtattcctggtgggtgtacctagagcacctctcatagtttttttgattctgattaccctaagatgtgatgtaagtaaaatctggtaaatacagtttaaatccatttcttgtgtacaatgctgtatgctaggtgcaaggctctggagttaaaaagatgacataatctactgtaagggcagcctgaagggtttctctgggtttctgtatgatgcacgttagtggaaggagagggcaatggagagagagggcattcatgggctaattaatcatatgcatgttagctgccaatcattttaccactatgttcttggagtccctccttttcttcagatataagtcttccaacaca

SEQ ID NO: 107902 - DNA, 811 bp, Homo sapiens
ttattcttttttatttttattttttttttgaggcagagtcttgctctgtcacccaggctgcagtgcagtgctgccgtcttagcttactgcaacctctgcctctccggttccagcgattttcctgcctcagcctcctgagtagctgggattacaggcaccagccaccacacccagggagtttcaccaggttagccgggctggtctcgaactcctgacctcaggtgatccgccagcctctgcctaccaaagtgctgggattacaggcgtgagccaccgcgcccggccggtttctgctttgatcggaattaagtgggcagaaaagtctaggcgggctaagtcttgcctatgcatctgcgcccagctgctcagactggccaaacagacccagtcgtttagtctaacgcttctggaactccactgaagcgttttgcattgtttcgtttggagccttcaaatccgagtgtgtggcaggagataataatcctagcagaagctgtttactgctgacgcgcctcccacttcccagatactgacaccggctcggggcggatccagccttttccgctcttccctccctccaccccctcctttccctacaactactctcaaaggaaaagggttggatgtcccatttgggtgaaaacaaagtggcataaaagcaaatgatcacctttgatagccacatattagaattttccgagggtatttttaaattacaacgattctaatgggcagctgggctgagaatcatcagatttgaaggtctggtttcacatggctcttgagctgagaagaccggattttccccccc

SEQ ID NO: 107903 - DNA, 718 bp, Homo sapiens
cacataaatggacctagaaaaaccatttaacttattcaacatcaagaaaatatatgaatcaaatgagtttttaaaatagcaacagtaatcataccaagtaaaattacagtaatctacaatttctgctattatttaacatttttttctgacagcttaagcaaatgccaaaatataagaaacagaaaaaaaagatggaaggaaagaaaagcattacctttattcaaatagagtaatagtggacactctgcatataaaatattaatagatcagaaaacctaataaaacaaaaaataatgttcagcatggtcgttggctaaaaacaaaacttaagtgcttatataaaaaaacaccaattagaatgtacaatggaattaaaattccattcataagtcattaaaaagaaaataaataggaatagatttcataagaaatatgcaagagccatatgaaaccatattctaaaaattactaaaagacacaaaaatgccttaatttaacaaaatgatatagtcccagagagcaagcacactattttaaaggtttccatactcacaactctatatatttaataacaatccatttcaaaatctccttagtgggtttccaggaaccaatgagttgattataaaattcttcttgaaaaacaaatatgtgaattgagctaagatagcagaatgatggctggagccttccttcttccttctcagatgtcaaacat

SEQ ID NO: 107904 - DNA, 380 bp, Homo sapiens
gatgtagggaaattggaaccctcacacattgccagtgggaatgtaaaatggtttagctactgtggaaagcagtttggcaggtcctcaaaaagctaaacaaaattaccataagacccagcattccattcttggtatatacccgaaaaagtgaaaacaggttctcaaataaatccttggacacaaatattcacagcaacatattcataataactaaaaggtggaaacaacccaaatatccatcgatggataaatggataaacaaactgatatatagacatggaaaggaatattcttctgacatggaaaggaatattcttctgctatgaaaaggaaagaagtactgatatatgctacatgtgggtaaaccttgaaaacatttt

SEQ ID NO: 107905 - DNA, 298 bp, Homo sapiens
acacagagggtgtgcacagctggcactcccccatgggcccacgctccccttccatgccacaggtctatgggatgaggagtcaagctagacacagagcagggagggggcatttaggggacttactcggaaacatcagatactttcacgtgctgagaaagctggtatttcgggaactgcattggttgctaaatcactgccatggtcaggtgtttctccaacatctatgtcaacaacccacaatatggatttcacattttatatcatgacgcaggccatgtacacatcttccctgaaacag

SEQ ID NO: 107906 - DNA, 408 bp, Homo sapiens
ccaccatcccccctacggacactcatagccacccaccaggtacaaagtgcttcacagccctcaggtcatggatgagaaaacggaggggtggcagggggaagcctcctggccatgatcacacagctggaaactggtggcatctgagttcacacccaagatcctggctgagtttgcacccttcctccctgcccctcaggaaccaaggctggccatctcgtctctctgggcccctggacttcccgtctgtgggcctgcttgtgtgcgtgcatccctggggggtggggagctccagctgactcagcaccctgcttcctctgtccatgtgggcagaaagggccaaggcaggcccagagcctgtcctccctctgtctgcctcttcaggccagcctccttggtgggctcccccat

SEQ ID NO: 107907 - DNA, 229 bp, Homo sapiens
gggcagaagccattgctggtcacggtcactgctccatgcccagtgcctagcaccgagaagtcctttgatatccatttgtgggcatgacgctcaccctgtccctgagagctggacccaaggaaggagcaggaccccctctactttacagcccatgccacagttaagctgcggctactttgcatctgccctgtgtgatcttgagtgagtcatcgaccctctgagcatctgg

SEQ ID NO: 107908 - DNA, 480 bp, Homo sapiens
cagatgggagataagtcaggtcaatttgatttgatcaacacccctgattgcatttatttccttatttctaggctggctccagagatgctatccccaaatgggcctctggaggacaaatcttttggtgaacattcattaagcaaaataatgcacttatgagtaaagcacatggtgacttggatggtgtgccattacctccccaggacagagtccaaactgcttgccatgataggtgcatgtggtctggatcctgcctttccccacttcttcccacctggccctttgttcctggtatcctttctgcctggcactccttttccttcccttctttctgtttggaaaattggcctcccttaagtcttgtctgcttgtaacaatctctgctttaacccccatgacactctcatctcccctagttcttgaggtaccccaggcttagaggacccacagaccctggaatccatattacagcatttgttt

SEQ ID NO: 107909 - DNA, 341 bp, Homo sapiens
gaggtatatctgagctgggccatgcaggggaggcaggatttctccaggtggagctcggaagggtttgaacaagaatgaaagttagagacgttgagagcctgatgatgggatggtgggtgggggagtagaaaaggctatggaaggctcttgcccgccaggccaagggcatgtatcctgtgggcagtgaggagccactgaaaatacaaagtgcatgctggcagggtgtgggggtcatactagaggtgtgctgtaggaagggagccatggagaaagtggggatgtggtagagtaggagcatccttaggggaaccaagtccaggaaaaatccctctccacttcct

SEQ ID NO: 107910 - DNA, 253 bp, Homo sapiens
acccaagaccctcacagttttacagatggggaaattgaggctcagaaaagttaactaccttagcgagaaactcctggcagggatgggacttgcacctgattttcctgactgcccatccaccataccatgcctggccctggggagcaggtcacagagtccagaaacaagtccattcttcttttcttggcccagtggcccttgttttgtattcagctttctcctccatcctcccatcctggtttgatttatcctg

SEQ ID NO: 107911 - DNA, 212 bp, Homo sapiens
aatgatggcttggctgagaacttaatgcaggagatggtaagtattactgacctggtcttgaaaacaataaattctaaacaaagggcaaatagagataataagtgaactcaaaatgagtccgaatatccttaacaaagaccgaaagaatacaaaattcaaaatgagtagtttgcagaatacctgcatgccatttctcccctgaaagactgatt

SEQ ID NO: 107912 - DNA, 401 bp, Homo sapiens
tgggccccagaagtgaattattacaaggaccattttttgcctgctccatttgagatgctgccatcataagattcaagtcttaactcttagcattaggatcccaagtgaactttctctgaatttcacaatgaatctctcttatttttaattgtaaatgactactataggtagagctcgagatcctctctaattcaggagatttgccctgcacgtgggattttgctcacaagaagggcaatttctgtttgagaatcacactgtgaggctgccattttccctgcacacattcttcctatgttctgttgatctacactggatgttagtcggctccaaagagagagaacagttgagttcctcacacgttctctcctgctaccttatgcagcactggaatcaaagga

SEQ ID NO: 107913 - DNA, 586 bp, Homo sapiens
atttgttgaatgaatgaaatgttgttcatgatttcttgcccatactcagcattcataaggaatattttgtacttaacgtattttttcttccctatagtcagattgatattctatttgttgctttcgtggctgtctcctgcagttctgcttctcttcctaatttgactctggactagaaaatcagataaccaatgtgatagatgacatagatgtctctgtaataagagatatttaaaaaaatctgtaagagagaaggcctctcttaaaagcaacaagaggatggccaggcatgatggctcatgcctgttaattccaataatttgagaggctgatgcaggaggatcaccagcagttcaaatccagcttgggcaacataggaagactccatgtctacaaaaattaaaaaagtgagccagatgtgttgatgcatgtggtctcagctgcttgggacgctgaggtgggaggattgcttggtcccaggaggtcagggctgcagtgagccgtgaccatgccactgcactccagcctaggtgacagagcaagatcctgtctcaaaaaaaaaaaaataaaataaaaaataaaaaaa

SEQ ID NO: 107914 - DNA, 354 bp, Homo sapiens
ctgatatattctggagtttcctccccacccccgcctttttcttttctctctttctccccttgttgaaagatactaacttctacagtgttggtgtgagtagagtatcaggatattgatcttaggggaggtgaactaattatagatttgttttttcattttatgagaggctattcttcataataggaatatagaatatatgccatatacttgaggttacttttgttaatccctttaagaatggagcactttaccttgcttaacaagaaggaaataattgattcagatgctgcatgctgtgcaaggtgagttttgaatgcagtgaggcgtatatgcagtggtctgacttccgtaagc

SEQ ID NO: 107915 - DNA, 463 bp, Homo sapiens
cgcgcccctgcactccagcctgggtaacagagccagaccctatctcaaaaaaaacttccaaaaacaatacagcaacacatacagatgtaccacggttcgcgtatggagcctcctgttggtggagactgacgtcgttttcaaatgcttttgctatgacagaatcatgtgaatgtttttcatgtttggtttttttctttgagaaaatgataaaattatctcaaaaatatcattaaaaaatttaaaaaagtagagacgggggtttcaccttgttggccagtttggtctcgaactcctggcctcaagtgatccacccaccttggcctcgcaacgtgctgggaatacaggcgtgagccaccgcacccggcccctgccgggaattaaacgcaaaccacttacagactacagttaatgtcgctgacacttctgctcccaggggtccccatgaggctccagtccccagggc

SEQ ID NO: 107916 - DNA, 431 bp, Homo sapiens
catggccctatagcccttgctatctacttgtgataacaagataaatacacgaaaagttaaatagtacaaggtagtatgtgatcaagggacatgggcaaaagtgttacacaattttagaaattagagagctgactacctggataatactggaaacaaacgagaagggcaccaaaaccctaaaggtcatacacaaactaaagctaaaatatgccaatgattatgtcagttgcctgctcaaaaaccttcaaagacccatcactaataatcaaagaaagtccaaactccttagcttggcatgcaagaccctacaggccctgaccccttcctacctgaccaggctttactccagccacactgctccattaatgtcccttgaacacactgacaccagctgctgtccgccctgctttgctcctgatgccctatctcag

SEQ ID NO: 107917 - DNA, 288 bp, Homo sapiens
aatgcattgaacaaaatatatcaagtactatttgtgtacattgaagttatggttctttcctgcttcataaacattcatgggggttggtcatgaaacactggatgaaattgggtcacaaattgccatcaggaagagttggctgctgcataaccccctctgtccacttgtggagaaactgaccctgttaaccgtcgggcttgctgaaggtgccttgcaggtggctgtgctcagttttcatgctttgtgttttgcttaggacacgctgcatacttaaatcttcttcatcct

SEQ ID NO: 107918 - DNA, 197 bp, Homo sapiens
cttcccttccctactcttaatcatatagcattttcatagagctgtgtaagttggcccttgtattggtttttcagtgatgaggattttttttcatttctttaaattttttgagagggaaactggttagattaagcagcattttaaattatatgtattatattttgtgtatttttacatattatgttttctaaagttat

SEQ ID NO: 107919 - DNA, 674 bp, Homo sapiens
ggttcagctttgaggttgattttctttatttcatccttgagttgggagtttcagtgatgtgaaagaaaaagatggggacaaatctaacacaatgaaaataatgtttccttttcaaagctttatttacaacaaagtgaaaagaagataaatgttgtaaaatatagatactttacaattgtaatttctattaatttctcacctcagtgaagcttgggtgcccagaatgtgacaatcatgttgtcatatgtgaccttgccattgggaaaatgtttgtgggtcctcaaatttcttaaagggggatgcccttaaatcaggaaactttaacattaagaaatgactcactcatgtgaacttcttcagagggatgttgattttctttgaaagttgaaaccctggttgttgcagcatgtgaaacatttaatttatccaatgcctctgtgaatgcgtggatgaaatttcccggagggctccccgtacttatcatttttccctctcaagcacacacagccaaggaagtgggccagcagacaccctgaacttccgccaaaccgagctgctctgagcctccctctcctggcctgagaacaaaaaacaagccctcctccttgcctttcctttagaagtggaggtggggtgtaggggtgagaggtgctgcacgagtgtttaaaaggtgg

SEQ ID NO: 107920 - DNA, 674 bp, Homo sapiens
atatccacaaatcccctttacagtttattctagaacaatgcaagttaataatttagtactgaaatgaacacatgtgtctgtgtgcatgtacactgaattccacggtgtggtgcattcattacttctgcttctgtattcatttctgttctcaaagttaattcacttataaatatttgacaatcatttttcaatctgaattacagcaggcatatgaaaactcaaatacattaaaggtgttcacacttttcacatgtaagtacctacttgtcatcaaaactaaacttcttatttagtactggctctctaactgtaaacgaaaaatgtaagtcataaacttgctaattgtttttcctattacttgtcacagataaagacttgaatgccagttgattcccacattcttagtgttcaaactaattgcccacatctaactggaaaactagtaaagaacaatgagccaattataggaactttcctataggtcttagtaggaggaagaaaaggaaaggatgatcagctcttaaattttttttaaaggtttattccatttcagcatgaataatgggcagactcagtgtccatggggtatgggctctgtctgagttgtttttcctgtagctatgatgaatttttaaagtaataaattacctctgagtctattcagataaactgaa

SEQ ID NO: 107921 - DNA, 334 bp, Homo sapiens
ggagccaagcttcagctgctgcctttagagggagtgtgggatcgcagtttgccaatctctacctctccttgctgcttaccactggctagcctcagtcttctgtggaccctcctgactgtgtgtactggtggaagttttagttgtgtaagccctgaggtcatgcagctctgagttcaaatccattctccccactttactggctatgtaactttgagtgcatgactttctctatgtctcagtttctcttcctaaaagtagagtcacacacttccctttttgtgtgattgtgccagggtagcatttggcacctacctttagcgtacatcatcattat

SEQ ID NO: 107922 - DNA, 347 bp, Homo sapiens
ctgcctcatcttcccaaagtgctgggattactggcctaaattattgcttttattgtatgcattatatactattttatcataacaaaagttaatggttcaactatggcatttagagctgcccacgtagcctgattgtctatttagttcacttttgactgagtaaaatggagctgatctatctgctattaaagagagttatattctgaaattttacatgatgttcataatgcctggaactaaccagcctgaaatggaatcaccgttgtactgttttcaattggctaggtgacttattctccctatacttcagttttctcatttgaaaaatgtagataaaaataaataaa

SEQ ID NO: 107923 - DNA, 409 bp, Homo sapiens
tagaaaagttgttttacacagtaaatgaagtgccaatgcagacaaatgtaaccaacatgaagctggccaatagaattcaacaaactgctaaggtcattaatataatttgttttggcactgctacgtttcctagtgctactctgagtagtttgctgggcgcatcaatttgttttcagctattgtgaaatcggatatcttggctttcatccaaaacaccctctccatttgcatatctttgttatcatttcaggttctcagaacatactgtggactatcacaccatctgcaccaagatcctcacatccaaacacaaattaaaaatgaaactgtaaaatttgcaaggaaacaatacagaccttttatctcattctccctctgttcattttcaaaagagaaacttgcttgtagc

SEQ ID NO: 107924 - DNA, 327 bp, Homo sapiens
tgagcatctcctagtatgtgtgcttttgagcttgtccagagcaggggttcttgcttggttttgagccacagtcccctttggcagtctcatgaagcccgtggagccctcctcagattcaggctttcgcttccctagatcatgccaatctgtttgagaggtttcctaggtcccatcccagccagcactgggtaagggtcccacgtttgacttggcttgtcaggctggcactaaggttttaagtaactccagtgcccgagtgagatgggaggagcccaggaagcactttggggctccaagcaagtgtctccccatgagtcactgctgtgt

SEQ ID NO: 107925 - DNA, 370 bp, Homo sapiens
ctccaggacctcttttagaattatcttattcctaatttgccaggaggctgggtgtagggctagttactaacaatcttcctttcattcttatctggatttcaccactggcctttctgatttgtgtcacctgttagccaccgtctcaaccagccagatgctccccctgagcctcctctcctgccatgatctgtttctgacaacatcctactgaggcattcactaagacaacttaagagattgatttaggggaaattattatcaagttgtatgcagaggcattgtacctaattttctcttttaaaattagattcatcatgaatcatttgtatttatttatcttagagaaaaccttactaattcatatatagta

SEQ ID NO: 107926 - DNA, 374 bp, Homo sapiens
atgtggcttcctcaagaggggaagggagaagggcacaaacgggtgggtctggcacctttatagccactctctctgctagatggggaaactgaggctcagagaggtaagggccagctgggaactgggccactgggattcgattctaagatgagtgtgcttcctctggctgtgttccagatgttctcagctcctaaacaaggaactttcataaacatctgggggttcacaccaggtgtgtgcatgccctcaagcgtgtgacccacatgtgttatcataagaccatccagagctgaatcttcttgtaacttccaacaccctccatacagccagcactgggagcttgagccccagacagtgacatcattcctccaact

SEQ ID NO: 107927 - DNA, 493 bp, Homo sapiens
tctccaaaggttattggttgactgctatggaagattcaatgttaacagaaatgcaacattggtaagaaagtagcaaaagagtattgtaaataataagaaaataatgcagtaaaatggtttttgtaattatacacagatgagtttacattagtgattttgtttattaaaaacaaattaagcctaattttctttcctgagtgggcaaaaaaaaatttaaggcagtcatgctagctctggaagtgttagaattttttcttctgaccaggtcttgctctgtagcccagactggagagcaatgatgagtgaggtcgtagctcactacaacctttactcctgaactcaagtgatcctcccacctcagccacctgaagagctgagactacatgtggaccaccacacctgggtaatttaatatgatttttttttgaaagacagggtctcccaggttggccagtctagtttcaactaatggcctcaattggtcctcccacct

SEQ ID NO: 107928 - DNA, 223 bp, Homo sapiens
aaaaaatgagagcaagggcattctgtggtttggactggggtctcaaaatgcctctttctccttagctcaagtggcatcctttaccttcagctatctttagggaaaaaaaaacaaattttgacctaaaggggatgtttggttgaaaaagagacctcagtgctggtatagttgctaatttaatagtcctttttatttggctgctccttgttcttatattgtacat

SEQ ID NO: 107929 - DNA, 851 bp, Homo sapiens
ctctctttctttcttttcctctcctttcccctcttcccctctcctctcctctcctcttcttttctttttctttctttctctctctctctctctcttttttgttttcaagacggggtttctcactgtctcccaggctggagtacagtggctcgatcccagttcactgcagcctcattcactcaggctccagtgatcctcccacctcggcttctaagagatgggaagcaggaactgccaggtcagttaagggatatacctactacttgcccagtgtcactactgctatattcctgatctaagcagtcaagggcctatgtagatgaaatggggtacaaagataaaaatacaaagacagacataccactgtttgacgtgggagtgacaaggtcacactgcaaataaatgtaggctgaggggtatttttgtggccatttttggaaagtacaatctgccatagcagtaaacacaggggcaatgaacaaggggcttcactttgcagctcctctgctctgtttttattaccaaaaaaaaaaatccttttaaagtaagatgcctagacaacatagtgagatgcccacttcttttcttttctttctttctttctttttgagacggagtctctctgttgcccagggtagagtgcagtggcgcaatctcggctcactgccgcttccacctctcgagatcccatttctaatttaaataaaaagaaagaaagtttctttgtggatgaagagatagacgtgtacataactggttagactgtggggcatcatctaagaattataagccaagtgataagtgagtgcagtggagaaagatatttattttgtctttggggttgggtgaaa

SEQ ID NO: 107930 - DNA, 167 bp, Homo sapiens
ctccttaaaatctttcaacatgaatcacatggcttagcaggggtaaaatattttaggagcctcctcctagaggatctcactcaatcttactcccttgtagaacaggcgatatcttcaccatgcgcacaatgaaatcaatactcagagaaggcagataattctccacg

SEQ ID NO: 107931 - DNA, 648 bp, Homo sapiens
tgcctggagcactttccaggtagagagaaactggtgaatgaagaaaatgcatcatgatgattgcaggggaaacacttaatctgtggaagataataccttgttttgaggcatttgcaaatactttctgagacaccctgttccatgccaataatggatggactaacctcaaattgttcttatttgttcattaatgcaagtcccccaagggcttgctatgcaacactttattagcctggaccgagtaatatattttaaagcaataaaactacattattttaaaattattttttaatgtggactttccagccattgactgccctctctgataggtctgaattagtgagttttaattgcgtgtaaaagagcaatgaaatcatcattatgaaaatgatggggtgcctccttcatggcaggcactgtgctgggccttatcccactcagcctcactacacccaccatgtgggcaccccatgccttcactgcacagacagaactcacgttctgaggggttcaactccttgctaatgaatgggggagctgggacttaggcccaggtgtgtcaacctctgttggggctcagaaaatgatactccccaatatggtgctttgacgtgctggactaaagaagaagcctcaaggtctcttgac

SEQ ID NO: 107932 - DNA, 383 bp, Homo sapiens
ttttgaatatgaaaacttggactcatattttgggtggtctaattacgagtgtgtccgattgttttaaaatactggcagtttaccagttcggttttggccgtgaactccagcctgactttttaaaaatgtaattattccaaatatggaggtgcatttgttcttcctgaattgatgaaaggggctctcagtgtccccaaggccttcgggctgcacagagctgcttcaattgtttgcccgcgtccggctcacctcccaaagccagctctgcagtgcagccccagcccacagcccagccagtgagactcagaactgaatgtcaaaggagagagagagagagaagcaggctttgtttgcagccatggcccagggaggtgacccacagg

SEQ ID NO: 107933 - DNA, 396 bp, Homo sapiens
gctggacaggactgctcagtcattcccagaaacacacaaactgcctgcctcctcctgccagaggggctagcttcaaggaccatcaggagcagaagctgtcttagcctgctggcagaattcccattagattaaaacttgcacatttttccagaaaaactgcagcccaaataatcagcttcctgactttacatggcagaggctgccaaaagtcagtctccattccttcagtacctcagctgaccaagcagcaaacgaccccagctgccctgcagtcagcagtccaacaggcacaagtgcaacagtcagggctttccctgatttagacaacagccactcaccatgccctgttcagaggggcctggggctatgcccaacaccacatgtcatcccatcccc

SEQ ID NO: 107934 - DNA, 369 bp, Homo sapiens
tcgcgacgttatccaaagatgccattaatttccatagcatcttggatacaaataagaaaaatgtcaagagaggaaagcaaagcttttgacagtggcctcattaagtggaaaacatatttcctgtattaggatggggattctccaagggaggcttaagtgaggagacctcttcttcaaattataccaatgtggaaaggagttctgtttatttgaggctatagatttgtattgctctttggtttcctgtgttttggtacatttctgaggtggaagaattctgatgtctgagccctacccccagactaattaaatcagcacataatctgaaagtggggcttgggggattcccagttttaaaaatgcgttagt

SEQ ID NO: 107935 - DNA, 527 bp, Homo sapiens
ttgtatccagaatatataaagaactgttaatcaccttaacgcacgtaaaaatgggtaaaaaaaatctgaacgtttacaaaaaaaaaatatatttgaatggccaataagttccatgtaaacatggtcaatttcatgaaatatcagggaaatgtgaactaaaaccacaatgagataccaatatccaaccattataatggttgagttgaagaagactgaatataccaagtgtaaattataaatcaccaccaccaccgacatataatgtataccttggtgaggatagaaacaatagaacacatatatatttctggcgggaaagtaaaatggtagactttgggagacaatttggcaatttcttagaaagctaaacacttgaaacaggaattccattcctgggtatattcccaaatgaaataaaaatatatttctacacagtgacttacacagagttaattataacagctttactcttaatagctcaaaacttgaatcaacccaaatatccatcaacaggggaatgtatgagc

SEQ ID NO: 107936 - DNA, 417 bp, Homo sapiens
gagagcaggtgttcaggagtgaaaaaaacccagccaggctggcgtcgtggtcaagaatccatatcacaggaatccctgaccccagaggctgtcccctctggtcctgcccttgccatcccgagtccctcccgtggtgtccagtgagtgggtattcgcttgtacgtgtgctgagtgtgtcacaaagggggtgcagggacacctgccagtttcacactgccatctggagcacttgcagaggccctggcagtcctgacctggctgcactgctccgttgcttgttctccaagctgcgatcccaattcgctccacacgggcctggtcctacggtcttggtgctctgggttctcactttgtccagggccccagagctgagtctcttagccctgaggagttttattagaaatacgagtctagagg

SEQ ID NO: 107937 - DNA, 288 bp, Homo sapiens
acagaggcaagaaggtgattttcctgaagcaggtgggcattggcttgttacctgtaactggatctctggtcctcagtcgagttcctctacgaggaacacaccagaaatctgccatcgccacctccacaaaaattgctctcagcaatatgaaatcctcaaacatcatactgatgcttactttaagaagcagcagctgtggaagcccagccatcaggaaggtggggttttcaacaccaaaaaagagacatatgaaattacagagtagtgtaaggttgatcaggaagctgt

SEQ ID NO: 107938 - DNA, 889 bp, Homo sapiens
cctctcaaagtgctggcatgagccaccactgcacttagcttgttattattttcctttgccaaagattgcaaaattttgtatgttttaaataccaaacatttccacagaaaatgacttgctgccaatatctggtgtgtccgggaatgcaaactgatcttgtacctaatgcacatcatcacatatcagattctttgaatattggtaataaacataatttaaccaaatgtctaaatgttttagaaaggcaaaccacctgtgatttaactaagttatagtgtggtaatggagtgattctttttctttacatgggctaagagcaagagagcaatctttggacagaatgatctttctccacatgtgaagctagttgcaagcatgcccgcccttcagaacagtccagtgacaccagttctgtgttggcagttgagtaattcaaggtagaatgctgaattagaattcaatcctaatcctgctgcaagtgctggttttactgggtcatatcttggtagtcagaaaatgaccccacagccccacagttttacagatccaatatccgcccatcaagtcacacacatgaaaggcatcatgtcactagtgatatgcaaacatcaaatgtgatgagtacaaacaaaaaggacccacagtatacagtgaaattcttcattattgttcttttatcagtccttaatctctccaccctcatacatgaaatatcttacaataattttacatactgacacgggtgggtggagtcataagttgtgccaaactaaattgatttagacatgatgataaggaggatcatagaagagtgatgtattatcagaactgtaccacctcaattgtcgttggccattcagtgtattaatccaaaaaaagttggcggccg

SEQ ID NO: 107939 - DNA, 636 bp, Homo sapiens
ggagaatttgcattctatttagactaccctttggagcacttccaaccaaaagccctgctatgcagaggttcctgaatacatgttcattgcctggcaccagcttggctctcctggttggagagacacgggctcgttcctgtgtgtgccagctctctattcattccaggccacatactgggcttccctcccagagagccatcacctactctcacccttccagagtggtacatggaagaacagacaaatgctttaataagaagtgtgcagtttgggggccctacttaaagtattgggatcaacctcttcacggacagtgtgctgcgctcattactgatgacccatgctataggatgtagatggggtgaaatcacttcctgcttcaacacacgttcctcactggtgggtgttcacatcccaccactcttgctttagtctttttcaacccatgggggatatccaaccaaagtttctggtagagaaatcttcattttgcagaacttgttgcaatggtgtggttagtgttttcattttagtaaaatgatgtttatttctgacttgatgtcagtcttgggaaatccctctgttttcaaggcttgtttcaagaaaaacaaaatttgtccaaatccaaacatgtta

SEQ ID NO: 107940 - DNA, 169 bp, Homo sapiens
accacaggcaaagatctccatacatgcaaataggaattaacatatgatcctccagaacatgacagtaatttaaaacaatttccaattcatctttgaacttctttttttttttctttttgagatgaagtcttatgctgtcgcccaggctggagtgcagtggtgcaatctt

SEQ ID NO: 107941 - DNA, 776 bp, Homo sapiens
ctacatgaattacaaaacagaagaacccaacaggttgattatcaagatctaaacaactggcattaaaaaggaatctattaattgctatcatgaaccttaaagatattcattcagaacccaacctgatactttaaattgctgtgcagtttaattattttctattagcatagagaaatgaattggaaggtaagaagggagctatatctcctattgttaattgcaaataataatctacagtctgcttctgctacctgttgtcattcttccctaccagctaaatataaaagcacccatgcattgctcatctgcataaagagaagaaggaaagtctgatttgttattacaaaggggatttatttcaaaaaggaaagtgaagggatgacagataagtgcacttaaaccttttgagcattacagaaagcttgtagaattcgggtaactgaatgtaatctctgtattctccgttaacgatagagcctcttggacagactgaagttgtgcctggaaccataatactctctttatgccactgtcttccttcttagcaggccgaaaggcacacactcatggctgattcttctgctctccacctgctggcccccttgtgagccagagcttttggatctgatgtagccttttgggtgtttgcacaaagggctggcacatttgcaagtggtatgtctgcttgcaaagcagtgggacaccaaaaacattaaacacagattgtttggggtttaagcaaatctaagacaaacaagttgaatatctgagactat

SEQ ID NO: 107942 - DNA, 141 bp, Homo sapiens
tctaggcgggtaaggggcaagaagagacacaaagacttctttctagtggagagcgaaagagaaaggcgccaagctcagtggatgctgcatgaccacgagacctagagctggggctgtctgagcctcggagaacaatgagaa

SEQ ID NO: 107943 - DNA, 280 bp, Homo sapiens
aggctggtctcgaactcctggccttaagtgatctgcctgccttggcctctcaaagtgctgggattataggcgtgagccaccgcgcccagccacagttgctccatttttaattgaacttctgttgcacttgtattgacagtgtttatgggaactctcaaatgtgtcaccaaaaatctatatttgaaagatttccagactattgttctagagctaagttttaattatacacatctatctgtattgttaaaataaaaactttaaacaaattaaatttaacaga

SEQ ID NO: 107944 - DNA, 1075 bp, Homo sapiens
gcttcaatatacattcatgagagctaagtgccacctttgcactaaagggtggtctcagggcccgttctgtttgggtttggtagggacaggggagtgtggctcatatttccattactgtagcagaaattgctggtgtctgtggcagaggagggcacctaaggacaggaaaagagaaacatacttttatattcatagagcagctcgttgttcctgaatcctttctgttataaaggacagagaaatgggtggactttttctgcaggaccttccttctgtttgtgtgcgtgatggtagcagacaaaaaggtggtgctgacatttttaaaggaacgttctcaaaatgcaggtataacttgtccagagaatgttatctaaaaaggattttcagagaaagaaagagaaaaaatggctttttttcagctaaacgtgtctcagacgaagagctgtgtgcactctgcttcatggaatgccatgtgtttagtacttgcaaatctttacttctcgatttgtgtttttccttcttaaggagtttgttttaactacattaaaaaattcttataatattcaaggctgtctgcaaaacatttctttactatataccagagctttctctacattctctacatcatggcttcttatatgccacgcagaattcctaccataaatttataatcggcactactaaaaatgttccctttgtggctgttaaacatggggagatgtagatactcaagattcctattgggggaaagctggggtccctagtaaagatggagaatatgtaatgttgaggtttcatctgttttctctattaactctatgcagaacaggattaagaaaatgcttatttaaacagaataccatttattacccagaaagttctgaaaaaaattattaggagatacctgctctctagggtgctaaagaaagactacttaaaatcactgttaaaaataacagaacatgggagatatctgtattttgaactttgtataaaactgatgtatctttatggttgcattcagattataatttactgtttgaggggcaatatcttagcagtgatgccgtgttct

SEQ ID NO: 107945 - DNA, 900 bp, Homo sapiens
ctgcccgctcctggacatttccggaaggccccaggaaatggtggctgatagtggttcctgaggccacaccacgggctgcctggtgccctttccctccccagtgcccggctggagcaagaagccgagctcctgatgggagctggccctttctttagactttgcttcaccttcaggacagggggttctgaatttctgcgctagggccccgccggcttgggtgggcttccagcgtgaatcctcggcctgtcgtccccgtcatcaggaagcccaacagggcgcccgcctgccctctgtgtcctccccgggctcgcggccgtgcaccttctggtgctggatgagggtggacagccggctgcaggccctcccgcaggcgcggcaccggtatggcctctcgccgctgtggagccggtagtgctcgttcagcgtgtagctcctgcggaacgccttgccgcactcggtgcacgcgaagggcttctccttggtgtggatcttctggtgcagagtgaggttggacttgcgaccgaaggccttgccgcactccgcgcactcgaacggcttctcgcccgtgtgtaggcgcaggtgcagcagcagcagggagttgtgtcggaacggcctcccgcacaccgggcactcgtggggcgggtcccccgcctggggcctctgcgcagctccgagcagggcgccctgccccgcgccgccgtcctgggcaccctcctgcgcgtgcagccggtggtgcttcaggagcgaggaccctcggatgaagcgctgcccacaccgcaggcaccggtagggccgctccccgctgtggatgcggccgtgctcgttgagggtgaacctgcggcagaacgccttgccgactctgtgcacgcgaagggcttctccccggtgtggaacttctgg

SEQ ID NO: 107946 - DNA, 476 bp, Homo sapiens
gattggcagctccagcgtgatcccagttgttagagaaagggatgctggtgaatgaagaagcgcagatgtgcattgcagtgggggagctggaatactggcctgaactacaggtgcaggctcatattttgaccattatcatttgcattttccacctctccacttacgaatgttaattatctgaagctgctacaagaccttacatttatactgcagttgcaaatatagccatttaggtgacaaagggtccattctgctggtataatgctgtctttccacggccgctaaaaccatgcagagactggcatgcctatcaacttcccctctgcttcacggggattcagagcggatgttctctaagggaccttccagatgggcccattccgggtgccatgtcttggggaccaggtcacttccccagctgcactttttgccatcatttccatatgaagaagaagtagattggcttttagtttaag

SEQ ID NO: 107947 - DNA, 437 bp, Homo sapiens
atgcttcaaccatctatttttatggaaaatctaagggtcttaaccacatttcaggaatttaattaatatcatgttgtgtttaggaatgctggtttattcactagggtataaatgcaatttattttacagagcctgaagtctttatatgtttctatacccctggataaatctcaactattttagttgttgattttttttgatgttgcctttaaaaaatcaaaactatatttattactttatcaaaccaataggccatcaagctgtcacatgaaagactaaaagactgacttaatcacagcatcttcagatcaacaacaaatgctttccctgctacagaggctactgatttcaggacatgggaatcagaatagaggtcttgcataggactctacctgcctgagggaattaatacatgtaaaacatgttcagtgtgttct

SEQ ID NO: 107948 - DNA, 585 bp, Homo sapiens
aagaattgagtggagacctgctatgatacgcagtagaaaaatgagaaaactttagcaggaggagatagagagatagacgcacaatagaggtagaaggctacatagaaggtaaagtgaagattgttttggctttggaagacagaaaagttggactataacatgaataaagagaatttggaaactgacccataacattatttgggaaaactaacctggagtttaatattaatgtaacattaattgttgttaaatatcttagttgctgcctttcttaaaataaatttgatttttcagtataccagcacccttctatacaaatacataagaaaatcagatttttaataattatacattccttagataagcttaattagagctcagcttctcatcttggagaaacaagttctctgaagattgaagaactgaatgaagatactgagagaaaaaaaaaaaaaaaggaaattttttgggggttttatatcatgtaaatggtcaagtggaaaagcattgatacaaaatctggttgggagacctggatgtttattttggaagatattatcccttttttgaagaggttaatattta

SEQ ID NO: 107949 - DNA, 347 bp, Homo sapiens
ctttcacttttgagctatgatgagcaatgctgctataaaatttcttgtatgtttttgtgtagacatatattttcatttctgtatacctggggactaccaaacctatttctaaaacagctgcaccattttacattaccaccaacagcgtttaagagttcagtttctccacatcctcagtaatacttgtcattgtctgtctttttgatgatggccatcctggtggtatcttgtcgtcgttttgatttgcatttccttaataatgatttgagcatatttccatgtgcttattggtgcctcgtctgtctgcttttgagaaatctctgttcaggttctttgcccccttttta

SEQ ID NO: 107950 - DNA, 596 bp, Homo sapiens
cagaatctggagaaacgtatttgaatagtttggtcgggggatccttggggccaaggactttgcttgccactgtgcctgaactttctggcacacagagcacaatacatattgatcaaatgagtaaataaatgaattccagcagttttcaatattaagcatttagttccatgtttccatatgtctatctttgactactgatttcaacttgggacactgcagtctcttcaagaagcaagaatctttcactttttttttttctcctgatttattcttcctgttgtgtgtgtgtgtgtgtgtgtgtgtgtgtgtgccatttttagaccattttgaagtgtttttttaataacaggtgtattgagatataacttacatattacaaaggaaacccattcaaagtgtataatgcgatggtttctagtatattcacccagctgtgcagcaatcttcacagtgtcattggtgcaggaaacatgcaacaccacatggagcttgttgccacaaagatccaggctccaatccttgtgttcaccacttacaagcttatgatctttggcaagtttcttaaattcttgaggccttcgtttttcccagccgta

SEQ ID NO: 107951 - DNA, 461 bp, Homo sapiens
ttctcacttgtttctaaatagcattctagcgactcattagctgaatctaaagtacaagggattttgagaattaacattcctggcttctctcctgtgataccaagaagaacccagaaagaggtgatggtggggcttcactgagcacaatctggcacacttgcattctttacagcttttccaatttcttacaagataattttgcttattaatgaggggaaaacaatagtaataatgcactctgtatttagtgcacactatgtttaaacaatgcaaacatgaaatggaaattctgtcctactggaagaatatcttcaatacatcatgtgttctacctcctctcttccaaagccatgagctacttaaacattttcactggggtctcatgcagatctttaacacggatagtgactttgaaaatcatattagaatatatttggaaacatagttcataaaatgatgga

SEQ ID NO: 107952 - DNA, 438 bp, Homo sapiens
gctgtggtccccacatctacatggccttcgcatatcccccagtgaaaccagcgagggccaggctgccgccccagcaagagcttctctccacacctgccaggccctactcccctgcacctgctccaggctgctcctggctcagcacctcctcagagaagccctccttgataccccatactgggccaggcctccctgggaccccctgactcaacctgtgttatcctgttaacgtaacccatggcaggatcccacgtggacagcctgccttccctagagagaccgtcctgggaggcagagcctgtgctggcctcgttcttggctctgggcccactcaggcttcagggcactcacagggaaggcctctccacgcagctggcctcccggcatccttgtggcccatgtatggcctgtgcgtggacgggagacttgcaagagagg

SEQ ID NO: 107953 - DNA, 412 bp, Homo sapiens
gggtggtgaccagggagagtctgtgccatgtttcctcagaaatgtcagttttgattctttgagtgcccctgtcacaagggccagaggaggcagggttgtcttttaccctggctttgctggtggagacactgaggtctagttagctgatgcacattggtcagctggcagtaggcaacctgagaaggaaagatgtggactcctggtcaggtgacagccaagagcaatggagatttaaaaggattttcttactagctttccagttaaataatcttaaagcatcttgggcgatgcacatcacacaaaaaaatattcagataatgctttttctcttcctttatacaggctgcctaataccccaaaaagtaactataggcagcctgattttactataactcctggccctcttttttta

SEQ ID NO: 107954 - DNA, 208 bp, Homo sapiens
atattaaagattcattagtctctttgctctatactttgttcctcgtgtttcatacctcctctgcagcctctcattcgtgcactccagataccctggcctcctggtgctgttctaactcatggtgcatgctccttgcacaagctcctgccattagcacttgctcttctctctacatgggatgctcttcctccagcagaagcagaattac

SEQ ID NO: 107955 - DNA, 423 bp, Homo sapiens
cactatcttggctcactgccatttccgcttctggggtttaagtgatcctcctgcctcggcctcccagctactggggaggctgaggcaggagaattgcttgaacccgggaggcagaggttgcagtgagccaagattgcgccattgcactacagcctggggaacgagagcgaaatgccgtctcaaaaaaaaaaaaagaaaaaagaaaaaaagagcagcacatggaaaaatgcctttgagccaaatgccagggccacgtgagggccccagcagagaagcagtctgagctgcattccttgaattcccaggtcaaaggaggtgacagggccactgcctgtggagttggtcagagcatggccaaactgttgttttcccatgggacagcaggtttaagagtggtatcaaaaataaaggtacgtgtgttga

SEQ ID NO: 107956 - DNA, 589 bp, Homo sapiens
attctgctgtgagtcgacgtggtatgtgtctgttatgacgccacatttagcagtcgcataaggcctgaaagagttaagatacctccatatgtatgaattcaacagatagtctccagccaggccagagctcagtatacctttccttgtcttactgaatgttttggcagtcaacattgaatcagtgttttgaataagcaagacagtttattgctactgtcatttatcacatgttttgtagataaattctaatgctgcaagtgacaaaactccacctcagactggcttacataaaaaagggaacttggccgtgtgttggctcacacctgtaatcccagcatgttgggaggtcgaggcaggaggatctcttgaagccaggagtctgagactagcctgggcaacatagcaagacctcatctttaaaaaaaatttaaaacaaatagctggacacagtggcacacacctatagtcccagctactcaggaggctgaagcaggaggattgcttgagcccaggagtttgaggctgcgggtgagccacgattacaccactgcactccagcctgggtgacagaacgagaccctgtctcaaa

SEQ ID NO: 107957 - DNA, 412 bp, Homo sapiens
ttgcggggatttctaaggtaggaagaagaggtgtgtgtgtgtgtgtgtgtgtgtgtgtgttactgtgctacactcaggcatgtgtaatattttcctttagtttaggtcaaattctactattctaattattcctatagagagcttacattttctttgttcctctttataaagtgcctcaggtctctatctcaggtttttctaggtctttctgaaaattcttattacttaactttatccttggacattgcttatacataaacgtctgctaattctaaatgtcattacttaactccagaaattttccttagcttctcttctgaaataaatttcccattaaattaaactattttgttcagctaattctctcctttgtgattttatagaattcccatgatctgaagcaaagttaaaa

SEQ ID NO: 107958 - DNA, 349 bp, Homo sapiens
cttaaacctaatgaagatctaaagcttttacttagtatgtgaaacctaagtaatattttttattcttaataacaattaatatggatttttaaattaataaattataagtgctatgagtattcctcaccacccagctaaatagaatcctgtttttgttctagaaaattgactgtctgcatttgtaaagctatggttttgatgtactttgtatctagttcaggtcgtcactcatctgtattgaacagattgagtcctaaagagggaattgattgtttaggatcctgtaaataattatcggctgacactgaacccaagtcttttccattcagtttataatctttctgtaatt

SEQ ID NO: 107959 - DNA, 456 bp, Homo sapiens
gatctgaggatccttttgcggtgccttccacagatgggtactcagccaataaacccccttattttgtttggctaattcaagatgggcctctgtcacttgccaccagagggtcttgactaatgtactgtacctaaagtataatcccgcctttgttacaatacagagaaacagacgtagatgcagatgtaagtatattacgtgaaagggtgtgcttttgcatagaaaaaaaagaccacaaaaaaaatattaaacgttaatatctctacagtctcccttgtgggactgaaggtgatttttattttaatccttgtgcttttctgtgttttccaaattttctgcaaggaacaaggatttttaaaatataataaacatttctttcaaaaaccagattgtcaggcagggcacggtggctcatgcctgtaatcccagcactttgggaggacgaggcaggcagat

SEQ ID NO: 107960 - DNA, 593 bp, Homo sapiens
tccaaggaatcatctgaaatgattttgtagatagtttattgcaggttggagaagggagaaaatgaaggaaggggtagagggggcaattatcacgcatcgttttgctatcgtatttgcaaggggaagaaaatctcaatgcatacatggttcgaaagtgattatttagacagtaagcagtttccccaggaaagctcctcagagggtctcctcgcaggctgcagattctagaaagtctgcggaagagtagttcgcaggtgcatgtgtctgggcgaagcgctgcgtgtggctcagttggtggcagtctctgcctctgtccgcaggtcctggggaatgctctttgcctggtccagccccgacaaacgtggtctgagaacagcggagcgcggaaaccgcggagcatgactcctccgaagctgcgagcgtcgctgtcgccgtcgctgctgctgctgctgagtggttgcctcctcgcggtgcgctgagaagtggcactccctctgcaacttctttgtcaatttctggaacggctgagactgcctgccggcttagggagggttgatgggggaggcgtggggaagggaaagctaagggcgtct

SEQ ID NO: 107961 - DNA, 592 bp, Homo sapiens
tgttaataaactaggatattatatttttattagtagtaacaattattaagattgagagtcttaagaaaggctattggaaataataggtaaaaatgtagaactcagaatatgagaaatagaatgtaaatgatataattgtgtaaaaaatgcctagtttagaatactgaagtttgttttgtttcattttatttaacttttaaaacttagatcttttgtttaatttttattttttggatggttaagtacatgaaagaagaaaaacttggttaattttgcctgattattttaaacattggaagcaaaatacaagatttgtatttcatactacaggaccgcttccatcatccatctggagagacagagagagagagggagagagagagagaagcgcggcggtgataagtctcccagtgtgagagaaatcggggaggggcgaagaagggtaggcctcttctgttccattgataccacgttcattcacagggagccggctaaaacagactactcccccgtgcagtcgttccctctaccctaataaggctttggcgcctctcccagaactcggtaagttcaaagtgtagtaaagtgcatg

SEQ ID NO: 107962 - DNA, 1240 bp, Homo sapiens
tccaaggaatcatctgaaatgattttgtagatagtttattgcaggttggagaagggagaaaatgaaggaaggggtagagggggcaattatcacgcatcgttttgctatcgtatttgcaaggggaagaaaatctcaatgcatacatggttcgaaagtgattatttagacagtaagcagtttccccaggaaagctcctcagagggtctcctcgcaggctgcagattctagaaagtctgcggaagagtagttcgcaggtgcatgtgtctgggcgaagcgctgcgtgtggctcagttggtggcagtctctgcctctgtccgcaggtcctggggaatgctctttgcctggtccagccccgacaaacgtggtctgagaacagcggagcgcggaaaccgcggagcatgactcctccgaagctgcgagcgtcgctgtcgccgtcgctgctgctgctgctgagtggttgcctcctcgcggctgctcggagggagaaaggggcggctagcaacgtggcggagccggtccccgggcccactggcggctcctcgggtcgcttcctcagccccgagcagcacgcgtgcagctggcagctcctgctgcccgccccggaggccgcagcgggcagcgagctggcgctgcgctgccagagcccggacggggcgcgccaccagtgcgcctaccgcgggcatccggagcgctgcgcagcctacgccgctcgccgcgcgcacttctggaagcaggtgctgggagggctgcgcaagaagcggaggccctgtcacgaccccgcgccgctccaggcccgcttgtgcgcgggcaagaagggccacggcgccgagctgcggctagtgccccgcgcgtccccgcccgcacgccccaccgtcgcgggattcgcgggggagtccaagccccgggcccggaaccgggggcggacccgggagcgtgcgtccggcccagccgctgggaccccgcctccccaaagcgcaccgcccaaagaaaacccctcagagaggaagaccaacgagggcaagaggaaggcggccttggtccccaacgaggagcgacccatggggaccgggcccgaccccgacgggctggacgggaacgcggagctcacggagacctactgcgctgagaagtggcactccctctgcaacttctttgtcaatttctggaacggctgagactgcctgccggcttagggagggttgatgggggaggcgtggggaagggaaagctaagggcgtct

SEQ ID NO: 107963 - DNA, 1484 bp, Homo sapiens
tgttaataaactaggatattatatttttattagtagtaacaattattaagattgagagtcttaagaaaggctattggaaataataggtaaaaatgtagaactcagaatatgagaaatagaatgtaaatgatataattgtgtaaaaaatgcctagtttagaatactgaagtttgttttgtttcattttatttaacttttaaaacttagatcttttgtttaatttttattttttggatggttaagtacatgaaagaagaaaaacttggttaattttgcctgattattttaaacattggaagcaaaatacaagatttgtatttcatactacaggaccgcttccatcatccatctggagagacagagagagagagggagagagagagagaagcgcggcggtgataagtctcccagtgtgagagaaatcggggaggggcgaagaagggtaggcctcttctgttccattgataccacgttcattcacagggagccggctaaaacagactactcccccgtgcagtcgttccctctaccctaataaggctttggcgcctctcccagaactcggtcctggggaatgctctttgcctggtccagccccgacaaacgtggtctgagaacagcggagcgcggaaaccgcggagcatgactcctccgaagctgcgagcgtcgctgtcgccgtcgctgctgctgctgctgagtggttgcctcctcgcggctgctcggagggagaaaggggcggctagcaacgtggcggagccggtccccgggcccactggcggctcctcgggtcgcttcctcagccccgagcagcacgcgtgcagctggcagctcctgctgcccgccccggaggccgcagcgggcagcgagctggcgctgcgctgccagagcccggacggggcgcgccaccagtgcgcctaccgcgggcatccggagcgctgcgcagcctacgccgctcgccgcgcgcacttctggaagcaggtgctgggagggctgcgcaagaagcggaggccctgtcacgaccccgcgccgctccaggcccgcttgtgcgcgggcaagaagggccacggcgccgagctgcggctagtgccccgcgcgtccccgcccgcacgccccaccgtcgcgggattcgcgggggagtccaagccccgggcccggaaccgggggcggacccgggagcgtgcgtccggcccagccgctgggaccccgcctccccaaagcgcaccgcccaaagaaaacccctcagagaggaagaccaacgagggcaagaggaaggcggccttggtccccaacgaggagcgacccatggggaccgggcccgaccccgacgggctggacgggaacgcggagctcacggagacctactgcgctgagaagtggcactccctctgcaacttctttgtcaatttctggaacggctgagactgcctgccggcttagggagggttgatgggggaggcgtggggaagggaaagctaagggcgtct

SEQ ID NO: 107964 - DNA, 518 bp, Homo sapiens
aatactggagaaggaatttggagattgcattaggccgttcttgccttgctatgaagaaatatctgagactaggtaatttattaaagaaaagaggtttaattggctcacagttctgcagggtatagaggaagcacagtggcgtctgcttctggggaggcctcaggaaacttccaatcatgacaagaaggcaaaaggggaacaggcacatcacattactagaactggagcaagagtgagagagctggcgaggaggtaccacacacttttaaatgaccagatctcatgagatcactcactgtcttgaggaaagcaccaagccatgaggaatccgcccccaagatataaacacctcccaccaggcctcacctctagcactggggattacaattcaacatgagatttgggcagggacaaatatccagactcttatcagaaatgatccaggatagagcagcagcggggaaattaagagacatatagcaaatgccaccgtgcttaagcgttgttggcaaccacaa

SEQ ID NO: 107965 - DNA, 328 bp, Homo sapiens
tttcataagatcagtggcagggtcggagccaggactcaggataaacacaatgggcgaatgtggagtgctctgctcaaaaatagcttcaaagctgatcattgggggctgcacatacctggtgaaagaaacacagtcagaaaactctcccgcgaggacagctccagaccaggggctggtctgtctgatcagcgctgcctcctccggtgtccagaaccttctgaccactcctctgggatagctcgttgcagtcttccctgttttagattctagtttctatgcacgtctcccaccctgatggggaactcctgagtggcagggacttctctgt

SEQ ID NO: 107966 - DNA, 111 bp, Homo sapiens
ggtctctgacacccactcatgatcctgtcacagtgacacaccagcccaccgcagttcccactactgttccttcgtgggctccaactctcaaagcagcagacatcttttctg

SEQ ID NO: 107967 - DNA, 251 bp, Homo sapiens
ctctttttacccctaattgagaggcgtgactagaaggcagaaagctggctgttgaggtgggagtctctctcttcaggcagaggtagggccgcttcctggggcagaggcgtggatggtgtgtctggctctgcagttcctgatgaagacatactggggtgcccaggctaacctttggcaaaactaggagctgaactcaggagtccctgatgccagcctttctgatgcggtcccccctcccctcccccatgtgt

SEQ ID NO: 107968 - DNA, 313 bp, Homo sapiens
ctcagacacaagggaagagactctgctgcttcctgggagaagctgcaagaccacattgcgaaggaacatgttgttgctgctcccatgttaccttcgtcagtgacctgagatgcagactggatctagggaatggtgtttcctgtgtgatgccttccaggagtatctgcaccacgggcagtgccaggccgaggacagagggcctaatggaggacactctacaactccatcctgctgctgggggggcttgggggcgcctccacgagggtcttcagaggaaaggcatgtgtgtggtctgtggcctgccagcaggaga

SEQ ID NO: 107969 - DNA, 461 bp, Homo sapiens
ggaacagttggaaatgcgtttcccaaccttgcctaaccagctgccctggaatgttttccacttcctgggtcattgcctccagagatcaaagcccccatccacacagtgggctgaatatggatccatgcagcgatctggtcctggtgctgtggaatcagctttgcacaaggccccagaaggtctgcgttccagagccttcctgttggggcctcagtcttctcatctgaaaaatgggagcaaactcagttctgccatgcccagtgtgggtgtgatgtcacatcagatggagtctcgctctgtcacccaggctgaagtgcaatggcaagatctcagctcactgcaacctccacctcccagtttcaagcgattcttgtgcctcagcctctggagtagctgggattacaggtgcccaccaccacacctggctgatttttgtatttttagtagagacggggtttcac

SEQ ID NO: 107970 - DNA, 346 bp, Homo sapiens
gccgaactactactactaaatttgcggccggtcgacaatcagaggtgtaataagttatcaatttttaacttcttttggaagccataggagctctattatcagtttttgaaatcagtgtggtactcatatcctttcattacttttcctcattattgaggtctaccctgagctctctaaataaacctgaaatatcttccacctgctacattctctgcgccctccatttcagctctacattattccagtggcactctcatcattgtataatatgctaaataacttgtttatttttacttttataactttttcctagaatacaagtaatacaatggcttggacatttgtt

SEQ ID NO: 107971 - DNA, 1687 bp, Homo sapiens
cctgtaaggcggggagacaatgagtaaactctccttccgagcgcgggcgctggacgccgccaagccgctgcctatctaccgcggcaaggacatgcctgatctcaacgactgcgtctccatcaaccgggccgtgccccagatgcccaccgggatggagaaggaggaggaatcggaacatcatttacagcgagcaatttcagcacagcaagtgtttagagaaaaaaaagagagtatggtcattcctgttcctgaggcagagagcaacgtcaactattacaatcgcttgtacaaaggagagtttaaacagccaaaacagttcattcatattcagctgaaattgcatcttaaattgctgttgttcaggattgaagtcttgttcttctaaagagaattttcatttgtttctgccaggcatttggggacactaccaaccggagaccacgttaaagtttttgcttgtttgttttgttcatttgtttttggaccacagtattagctttaatttaggctgcagatctgctcaaggttcagttctcaggaagattttttgcttctcctttctacctaagggcaagttgagaaatacaaaattctttgctttccctttctgcatggctaatttatttctttaatcttacactgagggcatagccctttggtaatgtatctttattcagtagcattctatactaatattaacacacaagcataaagcttttttctttcttatggtatatatagtaatgttgtgtcttttaattgatggcagtttagatttgatagaattcaataatagtcatattctctagtatgaatattaggttctttgtaatttgttcccgctttctcctttaacgtcatttatttttgctcttcccttcactctgtgtaccatagggactacgaaaattaccctcattcaccttctttcatatttaacatttccttggatgtgctattgaagtcttctttcccttcctatagctcattaaagacttaactcccttatgaaagccaccttgacttttctcactctacctgtcttctttgcttatcgtagtatcttttacatacttctgttagagggactcaccatactttattgcaattatttgtaaccattctttctctccttttagactgtgagctccttgagggcaggaactatatattttattttcttttgtgttttcagagtaaagtgcttggtttatagatgctcaataaatgatgtgtttgtcgactgaattgttttaaaatggctttaaaaagtcttttggtggtacagccattttccacagatttcttttctctgaaatagtctagagaaacacacatgcgaaaattatttatgtatatttttttctcctgtgttctttgactttgagtcctattagctttttgaatttgcctttaccttctatcagtcaggaaggagataactattcataatagaaattttaaggatctctcttaagccaaagtatcaattattttgtattttgataatattgcagttaggcaggaagaccatttgtaaaaaccattctaggaaaccaagaactaaaaatcgggtgtaactcatgtgggtcaggcccatcgaatacaataaacattattcttgtgttggtttttttcatttcattttattctattattgtaaaaaacaataaaaataatagaaatt

SEQ ID NO: 107972 - DNA, 4556 bp, Homo sapiens
cctgtaaggcggggagacaatgagtaaactctccttccgagcgcgggcgctggacgccgccaagccgctgcctatctaccgcggcaaggacatgcctgatctcaacgactgcgtctccatcaaccgggccgtgccccagatgcccaccgggatggagaaggaggaggaatcggaacatcatttacagcgagcaatttcagcacagcaagtgtttagagaaaaaaaagagagtatggtcattcctgttcctgaggcagagagcaacgtcaactattacaatcgcttgtacaaaggagagtttaaacagccaaaacagttcattcatattcagccttttaatctagacaacgagcaaccagattatgatatggattcagaagatgagactttattaaatagacttaacagaaagatggaaattaagcctttgcaatttgaaattatgattgacagacttgaaaaagccagttctaatcagcttgtaacacttcaagaagcaaaactgctgctaaacgaagatgattaccttattaaagctgtatatgactactgggtgagaaaacgtaaaaactgcagggggccatccctcattcctcagataaaacaagagaaaagagatggctctaccaacaatgacccttatgttgcctttcggagaagaacagagaaaatgcaaactcgaaagaatcgtaagaatgatgaagcctcttatgaaaagatgttgaaactgagacgagaatttagtagagccataacaattttggaaatgattaagagaagagagaaaacaaaacgagaattattgcacttaaccttagaagttgtggagaaaagataccatttgggagactatggtggtgaaatccttaatgaagtaaaaatcagtagatcagaaaaagagttatatgccactccagcaactcttcataatggaaatcatcacaaagttcaagaatgtaaaactaagcaccctcatcatttgtctttgaaagaagaggcttctgatgtggttcgtcaaaagaagaagtacccaaagaagcctaaagcagaggctttgataacatctcagcaacccactcctgagacattgcctgtgatcaataagagtgacattaagcaatatgattttcacagctcagatgaagatgaatttccacaggtattgtccccagtatcagaaccggaagaagaaaatgatcctgatggtccctgtgctttcagaaggcgggcaggatgccagtattatgctcctcgtttggaccaagctaaccattcatgtgaaaattcagaattggcagatttggataagttgaggtataggcattgccttacaacacttacagtcccaagaagatgtataggatttgcaaggaggcgaattggcagaggtggaagggtcataatggaccgaatatccacagaacatgacccagtcctgaaacagatagaccctgaaatgctgaatagtttttcaagctcttcccaaactatagacttttcttctaatttctctcggaccaatgcttccagtaaacattgtgaaaatagactgtctctttctgaaatattaagcaatatcagatcatgtcgactacagtgtttccagccaaggctactaaatttacaggacagtgatagtgaagaatgtacctcaagaaaaccagggcagactgtgaacaataaaagagtttctgcagcatctgtagctttattgaacaccagcaagaatggcatatcagtaacagggggtatcacagaagagcagtttcagacacatcagcagcagttagttcagatgcaaaggcagcaacttgcccagcttcagcagaaacagcaatctcagcattcctcgcaacagacacatccaaaagcacagggctcaagcacctctgactgtatgtctaaaacacttgactcagccagcgcccactttgctgcatctgcagtggtcagtgcacctgttccaagtcgcagtgaggtagccaaggaacagaacactggccacaacaacataaacggtgttgtccagccttcaggaacctctaaaacattatactccaccaatatggctttatcatccagcccagggatttcagctgtacagcttgtaaggacagttggccacaccactacaaaccacttaatcccagcattgtgcacaagcagtcctcagacacttcccatgaacaattcctgcctgacaaatgcagtgcacctcaataatgtcagtgttgtttctccagtcaatgtgcatatcaatacacggacttcagcaccatcgccaacagccttaaaacttgccacagttgctgccagtatggacagagtgccaaaggttactcccagcagtgccatcagcagcatagcaagagagaaccacgaaccagaaagattgggcttaaatggaatagcagagacaacagtagctatggaagtgacataacctaaaacacgtggctctgacctgtgctgatggtgtgcagtcattcatattccagctgaatgcaaaaggcaacactctgtggatcacagagtgtaacaatggacctaaatggactatagtatattggatgttaaatccatatatgatgtatattttgtaaaattgggaaaatcactaccttgtaaaatagtttatttgtatcatcaatattatttctgttacttgaatagtagatattcatcatcatgcttttgcacttgaatttgcaactgaatggattttaaaaaataattctttaatgggatcatgagcatgaaatgggatcctgcatcacttgttttaactatttattttgccatgtttacattttgtatcttgtaaaaataaatccaactttgtgtctaaaaagttaaagattcatagctaggaaatgaaattcttgtaatttttttctaaaggaactgtaaagttttcacttggttcattttgtttcacaatttgactagatggactttttggtaaatactttagtggcatttcactgtcaaatatgaagttcaaggcaaaatagtattttctattactgtgcaggggaaagggatggatcgatacatgcaaatttaatgtagtaactcacttttccatatattttgaatgtatatttctatttatgataccaatttataaaaaataattacacagaaaaaatggaataggaaaaattatgcatctagcacatttaaactgtgcaaatatgaaaatttttcgaggattacattttatctgaaggctgcatattttaactggctttaaaactgtaacacatcacataaaagatactttaccaggtatgtattgcattatatcattgcaataattattggaagtctagatatcgagccatcccaggtgttgggcggggggagggttgtggcaagattgtcttttcaattttggagagttttcctgtggctacaaggcaagtaacgggttggaaaaagtctgactgtaagcgttggacaccttcatagtgtagtgttttagtgactttttttatacggttcttgtaaattagatacgtgtagtggtgtttcagaatgtttgtttatgcactagttcagacaactttccctgttacttgttcttgataagtgaaaactgcagggaaataaaaaatacatatcaaaacatggacatgctgcatatgtgtttatttcacaatgtgcacacagtataagtgaaaatttaagggagatgatagcacttaacagcacttttcatgttcacatgctttccaagcattaatgaaaagaactataggaagctcatctgtgggctctattgggtttcagataatccaatataaactacctttgatatgaaagttcgtaagatattttacagaatgtaagtaatttgcagtatcgcagtcattgaaatgtcataagtgagcctcattttataaataaaagtttagagtagaattatattgcaagggggttttgtcaagtaagtactgggaaatgtaaatatttttaatgaatacaattaaaaccatttcaaacttacataattttatactttacattttttatatctgcagtcctgaaagttgtaaattgaaatgtcagttgaattaatgggccaagatttctggtgaaagtggtttttattcaggtcctaaatgtgtaaagcaatttatggtcaaaaccatagaaaaaatactaattttgtcttggttgtgacctgataggatccatgctcgtttctgccatactacctctggagttactcattgctgattatataaaggaaataattttgatttgatatgtattatgactgtgttcattctgcttatagttggatgtatctccttgctattaagaacttaaaacaactttagtgccaattgcagagaaagcttttttccccattttactgaagtaaagcatgaagtgaatttgccttatgtgatatatatgttataaataagtaaaacaaaagaattatccatttgtacggtttctggaggtggtggcaaatccagaacttataagactgatgaccaattgatttgttccttttgaagtaaaatagaaacgtaagcctt

SEQ ID NO: 107973 - DNA, 4498 bp, Homo sapiens
cctgtaaggcggggagacaatgagtaaactctccttccgagcgcgggcgctggacgccgccaagccgctgcctatctaccgcggcaaggacatgcctgatctcaacgactgcgtctccatcaaccgggccgtgccccagatgcccaccgggatggagaaggaggaggaatcggaacatcatttacagcgagcaatttcagcacagcaagtgtttagagaaaaaaaagagagtatggtcattcctgttcctgaggcagagagcaacgtcaactattacaatcgcttgtacaaaggagagtttaaacagccaaaacagttcattcatattcagccttttaatctagacaacgagcaaccagattatgatatggattcagaagatgagactttattaaatagacttaacagaaagatggaaattaagcctttgcaatttgaaattatgattgacagacttgaaaaagccagttctaatcagcttgtaacacttcaagaagcaaaactgctgctaaacgaagatgattaccttattaaagctgtatatgactactgggtgagaaaacgtaaaaactgcagggggccatccctcattcctcagataaaacaagagaaaagagatggctctaccaacaatgacccttatgttgcctttcggagaagaacagagaaaatgcaaactcgaaagaatcgtaagaatgatgaagcctcttatgaaaagatgttgaaactgagacgagaatttagtagagccataacaattttggaaatgattaagagaagagagaaaacaaaacgagaattattgcacttaaccttagaagttgtggagaaaagataccatttgggagactatggtggtgaaatccttaatgaagtaaaaatcagtagatcagaaaaagagttatatgccactccagcaactcttcataatggaaatcatcacaaagttcaagaatgtaaaactaagcaccctcatcatttgtctttgaaagaagaggcttctgatgtggttcgtcaaaagaagaagtacccaaagaagcctaaagcagaggctttgataacatctcagcaacccactcctgagacattgcctgtgatcaataagagtgacattaagcaatatgattttcacagctcagatgaagatgaatttccacaggtattgtccccagtatcagaaccggaagaagaaaatgatcctgatggtccctgtgctttcagaaggcgggcaggatgccagtattatgctcctcgtttggaccaagctaaccattcatgtgaaaattcagaattggcagatttggataagttgaggtataggcattgccttacaacacttacagtcccaagaagatgtataggatttgcaaggaggcgaattggcagaggtggaagggtcataatggaccgaatatccacagaacatgacccagtcctgaaacagatagaccctgaaatgctgaatagtttttcaagctcttcccaaactatagacttttcttctaatttctctcggaccaatgcttccagtaaacattgtgaaaatagactgtctctttctgaaatattaagcaatatcagatcatgtcgactacagtgtttccagccaaggctactaaatttacaggacagtgatagtgaagaatgtacctcaagaaaaccagggcagactgtgaacaataaaagagtttctgcagcatctgtagctttattgaacaccagcaagaatggcatatcagtaacagggggtatcacagaagagcagtttcagacacatcagcagcagttagttcagatgcaaaggcagcaacttgcccagcttcagcagaaacagcaatctcagcattcctcgcaacagacacatccaaaagcacagggctcaagcacctctgactgtatgtctaaaacacttgactcagccagcgcccactttgctgcatctgcagtggtcagtgcacctgttccaagtcgcagtgaggtagccaaggaacagaacactggccacaacaacataaacggtgttgtccagccttcaggaacctctaaaacattatactccaccaatatggctttatcatccagcccagggatttcagctgtacagcttgtaaggacagttggccacaccactacaaaccacttaatcccagcattgtgcacaagcagtcctcagacacttcccatgaacaattcctgcctgacaaatgcagtgcacctcaataatgtcagtgttgtttctccagtcaatgtgcatatcaatacacggacttcagcaccatcgccaacagccttaaaacttgccacagttgctgccagtatggacagagtgccaaaggttactcccagcagtgccatcagcagcatagcaagagagaaccacgaaccagaaagattgggcttaaatggaatagcagagacaacagtagctatggaagtgacataacctaaaacacgtggctctgacctgtgctgatggtgtgcagtcattcatattccagctgaatgcaaaaggcaacactctgtggatcacagagtgtaacaatggacctaaatggactatagtatattggatgttaaatccatatatgatgtatattttgtaaaattgggaaaatcactaccttgtaaaatagtttatttgtatcatcaatattatttctgttacttgaatagtagatattcatcatcatgcttttgcacttgaatttgcaactgaatggattttaaaaaataattctttaatgggatcatgagcatgaaatgggatcctgcatcacttgttttaactatttattttgccatgtttacattttgtatcttgtaaaaataaatccaactttgtgtctatgtaaagttttcacttggttcattttgtttcacaatttgactagatggactttttggtaaatactttagtggcatttcactgtcaaatatgaagttcaaggcaaaatagtattttctattactgtgcaggggaaagggatggatcgatacatgcaaatttaatgtagtaactcacttttccatatattttgaatgtatatttctatttatgataccaatttataaaaaataattacacagaaaaaatggaataggaaaaattatgcatctagcacatttaaactgtgcaaatatgaaaatttttcgaggattacattttatctgaaggctgcatattttaactggctttaaaactgtaacacatcacataaaagatactttaccaggtatgtattgcattatatcattgcaataattattggaagtctagatatcgagccatcccaggtgttgggcggggggagggttgtggcaagattgtcttttcaattttggagagttttcctgtggctacaaggcaagtaacgggttggaaaaagtctgactgtaagcgttggacaccttcatagtgtagtgttttagtgactttttttatacggttcttgtaaattagatacgtgtagtggtgtttcagaatgtttgtttatgcactagttcagacaactttccctgttacttgttcttgataagtgaaaactgcagggaaataaaaaatacatatcaaaacatggacatgctgcatatgtgtttatttcacaatgtgcacacagtataagtgaaaatttaagggagatgatagcacttaacagcacttttcatgttcacatgctttccaagcattaatgaaaagaactataggaagctcatctgtgggctctattgggtttcagataatccaatataaactacctttgatatgaaagttcgtaagatattttacagaatgtaagtaatttgcagtatcgcagtcattgaaatgtcataagtgagcctcattttataaataaaagtttagagtagaattatattgcaagggggttttgtcaagtaagtactgggaaatgtaaatatttttaatgaatacaattaaaaccatttcaaacttacataattttatactttacattttttatatctgcagtcctgaaagttgtaaattgaaatgtcagttgaattaatgggccaagatttctggtgaaagtggtttttattcaggtcctaaatgtgtaaagcaatttatggtcaaaaccatagaaaaaatactaattttgtcttggttgtgacctgataggatccatgctcgtttctgccatactacctctggagttactcattgctgattatataaaggaaataattttgatttgatatgtattatgactgtgttcattctgcttatagttggatgtatctccttgctattaagaacttaaaacaactttagtgccaattgcagagaaagcttttttccccattttactgaagtaaagcatgaagtgaatttgccttatgtgatatatatgttataaataagtaaaacaaaagaattatccatttgtacggtttctggaggtggtggcaaatccagaacttataagactgatgaccaattgatttgttccttttgaagtaaaatagaaacgtaagcctt

SEQ ID NO: 107974 - DNA, 3478 bp, Homo sapiens
  misc_feature (3312)..(3312): n is a, c, g, or t
  misc_feature (3317)..(3317): n is a, c, g, or t
cctgtaaggcggggagacaatgagtaaactctccttccgagcgcgggcgctggacgccgccaagccgctgcctatctaccgcggcaaggacatgcctgatctcaacgactgcgtctccatcaaccgggccgtgccccagatgcccaccgggatggagaaggaggaggaatcggaacatcatttacagcgagcaatttcagcacagcaagtgtttagagaaaaaaaagagagtatggtcattcctgttcctgaggcagagagcaacgtcaactattacaatcgcttgtacaaaggagagtttaaacagccaaaacagttcattcatattcagccttttaatctagacaacgagcaaccagattatgatatggattcagaagatgagactttattaaatagacttaacagaaagatggaaattaagcctttgcaatttgaaattatgattgacagacttgaaaaagccagttctaatcagcttgtaacacttcaagaagcaaaactgctgctaaacgaagatgattaccttattaaagctgtatatgactactgggtgagaaaacgtaaaaactgcagggggccatccctcattcctcagataaaacaagagaaaagagatggctctaccaacaatgacccttatgttgcctttcggagaagaacagagaaaatgcaaactcgaaagaatcgtaagaatgatgaagcctcttatgaaaagatgttgaaactgagacgagaatttagtagagccataacaattttggaaatgattaagagaagagagaaaacaaaacgagaattattgcacttaaccttagaagttgtggagaaaagataccatttgggagactatggtggtgaaatccttaatgaagtaaaaatcagtagatcagaaaaagagttatatgccactccagcaactcttcataatggaaatcatcacaaagttcaagaatgtaaaactaagcaccctcatcatttgtctttgaaagaagaggcttctgatgtggttcgtcaaaagaagaagtacccaaagaagcctaaagcagaggctttgataacatctcagcaacccactcctgagacattgcctgtgatcaataagagtgacattaagcaatatgattttcacagctcagatgaagatgaatttccacaggtattgtccccagtatcagaaccggaagaagaaaatgatcctgatggtccctgtgctttcagaaggcgggcaggatgccagtattatgctcctcgtttggaccaagctaaccattcatgtgaaaattcagaattggcagatttggataagttgaggtataggcattgccttacaacacttacagtcccaagaagatgtataggatttgcaaggaggcgaattggcagaggtggaagggtcataatggaccgaatatccacagaacatgacccagtcctgaaacagatagaccctgaaatgctgaatagtttttcaagctcttcccaaactatagacttttcttctaatttctctcggaccaatgcttccagtaaacattgtgaaaatagactgtctctttctgaaatattaagcaatatcagatcatgtcgactacagtgtttccagccaaggctactaaatttacaggacagtgatagtgaagaatgtacctcaagaaaaccagggcagactgtgaacaataaaagagtttctgcagcatctgtagctttattgaacaccagcaagaatggcatatcagtaacagggggtatcacagaagagcagtttcagacacatcagcagcagttagttcagatgcaaaggcagcaacttgcccagcttcagcagaaacagcaatctcagcattcctcgcaacagacacatccaaaagcacagggctcaagcacctctgactgtatgtctaaaacacttgactcagccagcgcccactttgctgcatctgcagtggtcagtgcacctgttccaagtcgcagtgaggtagccaaggaacagaacactggccacaacaacataaacggtgttgtccagccttcaggaacctctaaaacattatactccaccaatatggctttatcatccagcccagggatttcagctgtacagcttgtaaggacagttggccacaccactacaaaccacttaatcccagcattgtgcacaagcagtcctcagacacttcccatgaacaattcctgcctgacaaatgcagtgcacctcaataatgtcagtgttgtttctccagtcaatgtgcatatcaatacacggacttcagcaccatcgccaacagccttaaaacttgccacagttgctgccagtatggacagagtgccaaaggttactcccagcagtgccatcagcagcatagcaagagagaaccacgaaccagaaagattgggcttaaatggaatagcagagacaacagtagctatggaagtgacataacctaaaacacgtggctctgacctgtgctgatggtgtgcagtcattcatattccagctgaatgcaaaaggcaacactctgtggatcacagagtgtaacaatggacctaaatggactatagtatattggatgttaaatccatatatgatgtatattttgtaaaattgggaaaatcactaccttgtaaaatagtttatttgtatcatcaatattatttctgttacttgaatagtagatattcatcatcatgcttttgcacttgaatttgcaactgaatggattttaaaaaataattctttaatgggatcatgagcatgaaatgggatcctgcatcacttgttttaactatttattttgccatgtttacattttgtatcttgtaaaaataaatccaactttgtgtctaaaaagttaaagattcatagctaggaaatgaaattcttgtaatttttttctaaaggaactgtaaagttttcacttggttcattttgtttcacaatttgactagatggactttttggtaaatactttagtggcatttcactgtcaaatatgaagttcaaggcaaaatagtattttctattactgtgcaggggaaagggatggatcgatacatgcaaatttaatgtagtaactcacttttccatatattttgaatgtatatttctatttatgataccaatttataaaaaataattacacagaaaaaatggaataggaaaaattatgcatctagcacatttaaactgtgcaaatatgaaaatttttcgaggattacattttatctgaaggctgcatattttaactggctttaaaactgtaacacatcacatagtctagatatcgagccatcccaggtgttgggcgtggngaggnctactgctccttcctcttttcaactcttctcacatttcctcccgctgcctgtttttcccgcccctttccttccttttcttcattcctccgccctccctgctctctttctttttcgtttcttctcctcaatctctctttcttttcaattataaataaataat

SEQ ID NO: 107975 - DNA, 1315 bp, Homo sapiens
cctgtaaggcggggagacaatgagtaaactctccttccgagcgcgggcgctggacgccgccaagccgctgcctatctaccgcggcaaggacatgcctgatctcaacgactgcgtctccatcaaccgggccgtgccccagatgcccaccgggatggagaaggaggaggaatcggaacatcatttacagcgagcaatttcagcacagcaagtgtttagagaaaaaaaagagagtatggtcattcctgttcctgaggcagagagcaacgtcaactattacaatcgcttgtacaaaggagagtttaaacagccaaaacagttcattcatattcagccttttaatctagacaacgagcaaccagattatgatatggattcagaagatgagactttattaaatagacttaacagaaagatggaaattaagcctttgcaatttgaaattatgattgacagacttgaaaaagccagttctaatcagcttgtaacacttcaagaagcaaaactgctgctaaacgaagatgattaccttattaaagctgtatatgactactgggtgagaaaacgtaaaaactgcagggggccatccctcattcctcagataaaacaagagaaaagagatggctctaccaacaatgacccttatgttgcctttcggagaagaacagagaaaatgcaaactcgaaagaatcgtaagaatgatgaagcctcttatgaaaagatgttgaaactgagacgagaatttagtagagccataacaattttggaaatgattaagagaagagagaaaacaaaacgagaattattgcacttaaccttagaagttgtggagaaaagataccatttgggagactatggtggtgaaatccttaatgaagtaaaaatcagtagatcagaaaaagagttatatgccactccagcaactcttcataatggaaatcatcacaaagttcaagaatgtaaaactaagcaccctcatcatttgtctttgaaagaagaggcttctgatgtggttcgtcaaaagaagaagtacccaaagaagcctaaagcagaggctttgataacatctcagcaacccactcctgagacattgcctgtgatcaataagagtgacattaagcaatatgattttcacagctcagatgaagatgaatttccacaggtattgtccccaagatccactaccggaagaagaaacagctcatgaggctacggaaacaggccgagaagaacgtggagaagaaaattgacaaatacacagaggtcctcaagacccacggactcctggtctgagcccaataaagactgttaattcctc

SEQ ID NO: 107976 - DNA, 618 bp, Homo sapiens
agtctgttatgccaacactctttttttttcattagatacctgttttatcctcagtaatttgaaacatcatttccattatactctgttcttgagcttgtttctcaattcttaattttggcaaagtttctcattatgccaccaaactaccatgtcaacatgtatatgtcatcttttttatagctgctattttatattctgttatacattttcaaaataagatatttcttaacgtttttactgtttaaatcatatataaagcaaaattttattttttcttccactgtgcagtaagtctctgaaattaattgtggataccttctcctgagctcccctttagtcagtgcactgtaatttagaggtagtctgcagtcaaatatgatgaacaatgtataatttcataatttctcctgagtttgaagaatttttctttcttttctagcttttaatctagacaacgagcaaccagattatgatatggattcagaagatgagactttattaaatagacttaacagaaagatggaaattaagcctttgcaatttgaaattatgattgacagacttgaaaaagccagttctaatcaggtactgtaccatgtaaagatgtctcttatcttc

SEQ ID NO: 107977 - DNA, 3627 bp, Homo sapiens
cctgtaaggcggggagacaatgagtaaactctccttccgagcgcgggcgctggacgccgccaagccgctgcctatctaccgcggcaaggacatgcctgatctcaacgactgcgtctccatcaaccgggccgtgccccagatgcccaccgggatggagaaggaggaggaatcggaacatcatttacagcgagcaatttcagcacagcaagtgtttagagaaaaaaaagagagtatggtcattcctgttcctgaggcagagagcaacgtcaactattacaatcgcttgtacaaaggagagtttaaacagccaaaacagttcattcatattcagccttttaatctagacaacgagcaaccagattatgatatggattcagaagatgagactttattaaatagacttaacagaaagatggaaattaagcctttgcaatttgaaattatgattgacagacttgaaaaagccagttctaatcagcttgtaacacttcaagaagcaaaactgctgctaaacgaagatgattaccttattaaagctgtatatgactactgggtgagaaaacgtaaaaactgcagggggccatccctcattcctcagataaaacaagagaaaagagatggctctaccaacaatgacccttatgttgcctttcggagaagaacagagaaaatgcaaactcgaaagaatcgtaagaatgatgaagcctcttatgaaaagatgttgaaactgagacgagaatttagtagagccataacaattttggaaatgattaagagaagagagaaaacaaaacgagaattattgcacttaaccttagaagttgtggagaaaagataccatttgggagactatggtggtgaaatccttaatgaagtaaaaatcagtagatcagaaaaagagttatatgccactccagcaactcttcataatggaaatcatcacaaagttcaagaatgtaaaactaagcaccctcatcatttgtctttgaaagaagaggcttctgatgtggttcgtcaaaagaagaagtacccaaagaagcctaaagcagaggctttgataacatctcagcaacccactcctgagacattgcctgtgatcaataagagtgacattaagcaatatgattttcacagctcagatgaagatgaatttccacaggtattgtccccagtatcagaaccggaagaagaaaatgatcctgatggtccctgtgctttcagaaggcgggcaggatgccagtattatgctcctcgtttggaccaagctaaccattcatgtgaaaattcagaattggcagatttggataagttgaggtataggcattgccttacaacacttacagtcccaagaagatgtataggatttgcaaggaggcgaattggcagaggtggaagggtcataatggaccgaatatccacagaacatgacccagtcctgaaacagatagaccctgaaatgctgaatagtttttcaagctcttcccaaactatagacttttcttctaatttctctcggaccaatgcttccagtaaacattgtgaaaatagactgtctctttctgaaatattaagcaatatcagatcatgtcgactacagtgtttccagccaaggctactaaatttacaggacagtgatagtgaagaatgtacctcaagaaaaccagggcagactgtgaacaataaaagagtttctgcagcatctgtagctttattgaacaccagcaagaatggcatatcagtaacagggggtatcacagaagagcagtttcagacacatcagcagcagttagttcagatgcaaaggcagcaacttgcccagcttcagcagaaacagcaatctcagcattcctcgcaacagacacatccaaaagcacagggctcaagcacctctgactgtatgtctaaaacacttgactcagccagcgcccactttgctgcatctgcagtggtcagtgcacctgttccaagtcgcagtgaggtagccaaggaacagaacactggccacaacaacataaacggtgttgtccagccttcaggaacctctaaaacattatactccaccaatatggctttatcatccagcccagggatttcagctgtacagcttgtaaggacagttggccacaccactacaaaccacttaatcccagcattgtgcacaagcagtcctcagacacttcccatgaacaattcctgcctgacaaatgcagtgcacctcaataatgtcagtgttgtttctccagtcaatgtgcatatcaatacacggacttcagcaccatcgccaacagccttaaaacttgccacagttgctgccagtatggacagagtgccaaaggttactcccagcagtgccatcagcagcatagcaagagagaaccacgaaccagaaagattgggcttaaatggaatagcagagacaacagtagctatggaagtgacataacctaaaacacgtggctctgacctgtgctgatggtgtgcagtcattcatattccagctgaatgcaaaaggcaacactctgtggatcacagagtgtaacaatggacctaaatggactatagtatattggatgttaaatccatatatgatgtatattttgtaaaattgggaaaatcactaccttgtaaaatagtttatttgtatcatcaatattatttctgttacttgaatagtagatattcatcatcatgcttttgcacttgaatttgcaactgaatggattttaaaaaataattctttaatgggatcatgagcatgaaatgggatcctgcatcacttgttttaactatttattttgccatgtttacattttgtatcttgtaaaaataaatccaactttgtgtctaaaaagttaaagattcatagctaggaaatgaaattcttgtaatttttttctaaaggaactgtaaagttttcacttggttcattttgtttcacaatttgactagatggactttttggtaaatactttagtggcatttcactgtcaaatatgaagttcaaggcaaaatagtattttctattactgtgcaggggaaagggatggatcgatacatgcaaatttaatgtagtaactcacttttccatatattttgaatgtatatttctatttatgataccaatttataaaaaataattacacagaaaaaatggaataggaaaaattatgcatctagcacatttaaactgtgcaaatatgaaaatttttcgaggattacattttatctgaaggctgcatattttaactggctttaaaactgtaacacatcacataaaagatactttaccaggtatgtattgcattatatcattgcaataattattggaagtctagatatcgagccatcccaggtgttgggcggggggagggttgtggcaagattgtcttttcaattttggagagttttcctgtggctacaaggcaagtaacgggttggaaaaagtctgactgtaagcgttggacaccttcatagtgtagtgttttagtgactttttttatacggttcttgtaaattagatacgtgtagtggtgtttcagaatgtttgtttatgcactagttcagacaactttccctgttacttgttcttgataagtgaaaactgcagggaaataaaaaatacatatc

SEQ ID NO: 107978 - DNA, 4734 bp, Homo sapiens
cctgtaaggcggggagacaatgagtaaactctccttccgagcgcgggcgctggacgccgccaagccgctgcctatctaccgcggcaaggacatgcctgatctcaacgactgcgtctccatcaaccgggccgtgccccagatgcccaccgggatggagaaggaggaggaatcggaacatcatttacagcgagcaatttcagcacagcaagtgtttagagaaaaaaaagagagtatggtcattcctgttcctgaggcagagagcaacgtcaactattacaatcgcttgtacaaaggagagtttaaacagccaaaacagttcattcatattcagccttttaatctagacaacgagcaaccagattatgatatggattcagaagatgagactttattaaatagacttaacagaaagatggaaattaagcctttgcaatttgaaattatgattgacagacttgaaaaagccagttctaatcagcttgtaacacttcaagaagcaaaactgctgctaaacgaagatgattaccttattaaagctgtatatgactactgggtgagaaaacgtaaaaactgcagggggccatccctcattcctcagataaaacaagagaaaagagatggctctaccaacaatgacccttatgttgcctttcggagaagaacagagaaaatgcaaactcgaaagaatcgtaagaatgatgaagcctcttatgaaaagatgttgaaactgagacgagaatttagtagagccataacaattttggaaatgattaagagaagagagaaaacaaaacgagaattattgcacttaaccttagaagttgtggagaaaagataccatttgggagactatggtggtgaaatccttaatgaagtaaaaatcagtagatcagaaaaagagttatatgccactccagcaactcttcataatggaaatcatcacaaagttcaagaatgtaaaactaagcaccctcatcatttgtctttgaaagaagaggcttctgatgtggttcgtcaaaagaagaagtacccaaagaagcctaaagcagaggctttgataacatctcagcaacccactcctgagacattgcctgtgatcaataagagtgacattaagcaatatgattttcacagctcagatgaagatgaatttccacaggtattgtccccagtatcagaaccggaagaagaaaatgatcctgatggtccctgtgctttcagaaggcgggcaggatgccagtattatgctcctcgtttggaccaagctaaccattcatgtgaaaattcagaattggcagatttggataagttgaggtataggcattgccttacaacacttacagtcccaagaagatgtataggatttgcaaggaggcgaattggcagaggtggaagggtcataatggaccgaatatccacagaacatgacccagtcctgaaacagatagaccctgaaatgctgaatagtttttcaagctcttcccaaactatagacttttcttctaatttctctcggaccaatgcttccagtaaacattgtgaaaatagactgtctctttctgaaatattaagcaatatcagatcatgtcgactacagtgtttccagccaaggctactaaatttacaggacagtgatagtgaagaatgtacctcaagaaaaccagggcagactgtgaacaataaaagagtttctgcagcatctgtagctttattgaacaccagcaagaatggcatatcagtaacagggggtatcacagaagagcagtttcagacacatcagcagcagttagttcagatgcaaaggcagcaacttgcccagcttcagcagaaacagcaatctcagcattcctcgcaacagacacatccaaaagcacagggctcaagcacctctgactgtatgtctaaaacacttgactcagccagcgcccactttgctgcatctgcagtggtcagtgcacctgttccaagtcgcagtgaggtagccaaggaacagaacactggccacaacaacataaacggtgttgtccagccttcaggaacctctaaaacattatactccaccaatatggctttatcatccagcccagggatttcagctgtacagcttgtaaggacagttggccacaccactacaaaccacttaatcccagcattgtgcacaagcagtcctcagacacttcccatgaacaattcctgcctgacaaatgcagtgcacctcaataatgtcagtgttgtttctccagtcaatgtgcatatcaatacacggacttcagcaccatcgccaacagccttaaaacttgccacagttgctgccagtatggacagagtgccaaaggttactcccagcagtgccatcagcagcatagcaagagagaaccacgaaccagaaagattgggcttaaatggaatagcagagacaacagtagctatggaagtgacataacctaaaacacgtggctctgacctgtgctgatggtgtgcagtcattcatattccagctgaatgcaaaaggcaacactctgtggatcacagagtgtaacaatggacctaaatggactatagtatattggatgttaaatccatatatgatgtatattttgtaaaattgggaaaatcactaccttgtaaaatagtttatttgtatcatcaatattatttctgttacttgaatagtagatattcatcatcatgcttttgcacttgaatttgcaactgaatggattttaaaaaataattctttaatgggatcatgagcatgaaatgggatcctgcatcacttgttttaactatttattttgccatgtttacattttgtatcttgtaaaaataaatccaactttgtgtctaaaaagttaaagattcatagctaggaaatgaaattcttgtaatttttttctaaaggaactgtaaagttttcacttggttcattttgtttcacaatttgactagatggactttttggtaaatactttagtggcatttcactgtcaaatatgaagttcaaggcaaaatagtattttctattactgtgcaggggaaagggatggatcgatacatgcaaatttaatgtagtaactcacttttccatatattttgaatgtatatttctatttatgataccaatttataaaaaataattacacagaaaaaatggaataggaaaaattatgcatctagcacatttaaactgtgcaaatatgaaaatttttcgaggattacattttatctgaaggctgcatattttaactggctttaaaactgtaacacatcacataaaagatactttaccaggtatgtattgcattatatcattgcaataattattggaagtctagatatcgagccatcccaggtgttgggcggggggagggttgtggcaagattgtcttttcaattttggagagttttcctgtggctacaaggcaagtaacgggttggaaaaagtctgactgtaagcgttggacaccttcatagtgtagtgttttagtgactttttttatacggttcttgtaaattagatacgtgtagtggtgtttcagaatgtttgtttatgcactagttcagacaactttccctgttacttgttcttgataagtgaaaactgcagggaaataaaaaatacatatcaaaacatggacatgctgcatatgtgtttatttcacaatgtgcacacagtataagtgaaaatttaagggagatgatagcacttaacagcacttttcatgttcacatgctttccaagcattaatgaaaagaactataggaagctcatctgtgggctctattgggtttcagataatccaatataaactacctttgatatgaaagttcgtaagatattttacagaatgtaagtaatttgcagtatcgcagtcattgaaatgtcataagtgagcctcattttataaataaaagtttagagtagaattatattgcaagggggttttgtcaagtaagtactgggaaatgtaaatatttttaatgaatacaattaaaaccatttcaaacttacataattttatactttacattttttatatctgcagtcctgaaagttgtaaattgaaatgtcagttgaattaatgggccaagatttctggtgaaagtggtttttattcaggtcctaaatgtgtaaagcaatttatggtcaaaaccatagaaaaaatactaattttgtcttggttgtgacctgataggatccatgctcgtttctgccatactacctctggagttactcattgctgattatataaaggaaataattttgatttgatatgtattatgactgtgttcattctgcttatagttggatgtatctccttgctattaagaacttaaaacaactttagtgccaattgcagagaaagcttttttccccattttactgaagtaaagcatgaagtgaatttgccttatgtgatatatatgttataaataagtaaaacaaaagaattatccatttgtacggtttctggaggtggtggcaaatccagaacttataagactgatgaccaattgatttgttccttttgaagtaaaatagaaacgtaagccttccttattttgttggttgtaactgtttcatggatggcatttcagttatgtacatacacattttccactgcttctctaaaacttaagtgacaaatatttgttttcactttattaaattgaagaatagtctatttctgcactggacagcactgctctcttagttttctcaggaaattagtg

SEQ ID NO: 107979 - DNA, 3865 bp, Homo sapiens
  misc_feature (3762)..(3762): n is a, c, g, or t
  misc_feature (3828)..(3828): n is a, c, g, or t
cctgtaaggcggggagacaatgagtaaactctccttccgagcgcgggcgctggacgccgccaagccgctgcctatctaccgcggcaaggacatgcctgatctcaacgactgcgtctccatcaaccgggccgtgccccagatgcccaccgggatggagaaggaggaggaatcggaacatcatttacagcgagcaatttcagcacagcaagtgtttagagaaaaaaaagagagtatggtcattcctgttcctgaggcagagagcaacgtcaactattacaatcgcttgtacaaaggagagtttaaacagccaaaacagttcattcatattcagccttttaatctagacaacgagcaaccagattatgatatggattcagaagatgagactttattaaatagacttaacagaaagatggaaattaagcctttgcaatttgaaattatgattgacagacttgaaaaagccagttctaatcagcttgtaacacttcaagaagcaaaactgctgctaaacgaagatgattaccttattaaagctgtatatgactactgggtgagaaaacgtaaaaactgcagggggccatccctcattcctcagataaaacaagagaaaagagatggctctaccaacaatgacccttatgttgcctttcggagaagaacagagaaaatgcaaactcgaaagaatcgtaagaatgatgaagcctcttatgaaaagatgttgaaactgagacgagaatttagtagagccataacaattttggaaatgattaagagaagagagaaaacaaaacgagaattattgcacttaaccttagaagttgtggagaaaagataccatttgggagactatggtggtgaaatccttaatgaagtaaaaatcagtagatcagaaaaagagttatatgccactccagcaactcttcataatggaaatcatcacaaagttcaagaatgtaaaactaagcaccctcatcatttgtctttgaaagaagaggcttctgatgtggttcgtcaaaagaagaagtacccaaagaagcctaaagcagaggctttgataacatctcagcaacccactcctgagacattgcctgtgatcaataagagtgacattaagcaatatgattttcacagctcagatgaagatgaatttccacaggtattgtccccagtatcagaaccggaagaagaaaatgatcctgatggtccctgtgctttcagaaggcgggcaggatgccagtattatgctcctcgtttggaccaagctaaccattcatgtgaaaattcagaattggcagatttggataagttgaggtataggcattgccttacaacacttacagtcccaagaagatgtataggatttgcaaggaggcgaattggcagaggtggaagggtcataatggaccgaatatccacagaacatgacccagtcctgaaacagatagaccctgaaatgctgaatagtttttcaagctcttcccaaactatagacttttcttctaatttctctcggaccaatgcttccagtaaacattgtgaaaatagactgtctctttctgaaatattaagcaatatcagatcatgtcgactacagtgtttccagccaaggctactaaatttacaggacagtgatagtgaagaatgtacctcaagaaaaccagggcagactgtgaacaataaaagagtttctgcagcatctgtagctttattgaacaccagcaagaatggcatatcagtaacagggggtatcacagaagagcagtttcagacacatcagcagcagttagttcagatgcaaaggcagcaacttgcccagcttcagcagaaacagcaatctcagcattcctcgcaacagacacatccaaaagcacagggctcaagcacctctgactgtatgtctaaaacacttgactcagccagcgcccactttgctgcatctgcagtggtcagtgcacctgttccaagtcgcagtgaggtagccaaggaacagaacactggccacaacaacataaacggtgttgtccagccttcaggaacctctaaaacattatactccaccaatatggctttatcatccagcccagggatttcagctgtacagcttgtaaggacagttggccacaccactacaaaccacttaatcccagcattgtgcacaagcagtcctcagacacttcccatgaacaattcctgcctgacaaatgcagtgcacctcaataatgtcagtgttgtttctccagtcaatgtgcatatcaatacacggacttcagcaccatcgccaacagccttaaaacttgccacagttgctgccagtatggacagagtgccaaaggttactcccagcagtgccatcagcagcatagcaagagagaaccacgaaccagaaagattgggcttaaatggaatagcagagacaacagtagctatggaagtgacataacctaaaacacgtggctctgacctgtgctgatggtgtgcagtcattcatattccagctgaatgcaaaaggcaacactctgtggatcacagagtgtaacaatggacctaaatggactatagtatattggatgttaaatccatatatgatgtatattttgtaaaattgggaaaatcactaccttgtaaaatagtttatttgtatcatcaatattatttctgttacttgaatagtagatattcatcatcatgcttttgcacttgaatttgcaactgaatggattttaaaaaataattctttaatgggatcatgagcatgaaatgggatcctgcatcacttgttttaactatttattttgccatgtttacattttgtatcttgtaaaaataaatccaactttgtgtctaaaaagttaaagattcatagctaggaaatgaaattcttgtaatttttttctaaaggaactgtaaagttttcacttggttcattttgtttcacaatttgactagatggactttttggtaaatactttagtggcatttcactgtcaaatatgaagttcaaggcaaaatagtattttctattactgtgcaggggaaagggatggatcgatacatgcaaatttaatgtagtaactcacttttccatatattttgaatgtatatttctatttatgataccaatttataaaaaataattacacagaaaaaatggaataggaaaaattatgcatctagcacatttaaactgtgcaaatatgaaaatttttcgaggattacattttatctgaaggctgcatattttaactggctttaaaactgtaacacatcacataaaagatactttaccaggtatgtattgcattatatcattgcaataattattggaagtctagatatcgagccatcccaggtgttgggcggggggagggttgtggcaagattgtcttttcaattttggagagttttcctgtggctacaaggcaagtaacgggttggaaaaagtctgactgtaagcgttggacaccttcatagtgtagtgttttagtgactttttttatacggttcttgtcaacgctccctcgtacttgctcttgcttaccggaagctctcttgcccgttacttctacctgctctaattcggccctgcacgcatatgagtccatttcacagagtaaccccacgcacccctcaattcttcatgtcgacgctcgctcttataagctccttctcaagcttcatttgctgtagtaagctatgaacgctgttgcagctgttcgcacgcccatcttctgtcgttaattttcatatcacggccgcacnctcttaacgtcccttccacttgtctgctagctttatacgtactaaacaccccaaagttcctctccnccctcccttgttatcccgtatctttcccaccttatag

SEQ ID NO: 107980 - DNA, 1608 bp, Homo sapiens
cctgtaaggcggggagacaatgagtaaactctccttccgagcgcgggcgctggacgccgccaagccgctgcctatctaccgcggcaaggacatgcctgatctcaacgactgcgtctccatcaaccgggccgtgccccagatgcccaccgggatggagaaggaggaggaatcggaacatcatttacagcgagcaatttcagcacagcaagtgtttagagaaaaaaaagagagtatggtcattcctgttcctgaggcagagagcaacgtcaactattacaatcgcttgtacaaaggagagtttaaacagccaaaacagttcattcatattcagcgcatttggggacactaccaaccggagaccacgttaaagtttttgcttgtttgttttgttcatttgtttttggaccacagtattagctttaatttaggctgcagatctgctcaaggttcagttctcaggaagattttttgcttctcctttctacctaagggcaagttgagaaatacaaaattctttgctttccctttctgcatggctaatttatttctttaatcttacactgagggcatagccctttggtaatgtatctttattcagtagcattctatactaatattaacacacaagcataaagcttttttctttcttatggtatatatagtaatgttgtgtcttttaattgatggcagtttagatttgatagaattcaataatagtcatattctctagtatgaatattaggttctttgtaatttgttcccgctttctcctttaacgtcatttatttttgctcttcccttcactctgtgtaccatagggactacgaaaattaccctcattcaccttctttcatatttaacatttccttggatgtgctattgaagtcttctttcccttcctatagctcattaaagacttaactcccttatgaaagccaccttgacttttctcactctacctgtcttctttgcttatcgtagtatcttttacatacttctgttagagggactcaccatactttattgcaattatttgtaaccattctttctctccttttagactgtgagctccttgagggcaggaactatatattttattttcttttgtgttttcagagtaaagtgcttggtttatagatgctcaataaatgatgtgtttgtcgactgaattgttttaaaatggctttaaaaagtcttttggtggtacagccattttccacagatttcttttctctgaaatagtctagagaaacacacatgcgaaaattatttatgtatatttttttctcctgtgttctttgactttgagtcctattagctttttgaatttgcctttaccttctatcagtcaggaaggagataactattcataatagaaattttaaggatctctcttaagccaaagtatcaattattttgtattttgataatattgcagttaggcaggaagaccatttgtaaaaaccattctaggaaaccaagaactaaaaatcgggtgtaactcatgtgggtcaggcccatcgaatacaataaacattattcttgtgttggtttttttcatttcattttattctattattgtaaaaaacaataaaaataatagaaatt

SEQ ID NO: 107981 - DNA, 344 bp, Homo sapiens
tgcagtgcctcaaaaacagtagttgctcagtaaatatttagtgattcgagatctattcaattctggtgggttaagagaggaaagaaaagaatcagctatgccacagaagagttgaggagagctcaagacagagtttaaaagccattgagttaagattcctattttaacaatcttttatatcctgaggaaacacccacagagtaatagaattaaagaaatgcatttctctcccacttccaaagccttcagaaatataggcacttagacttagaaaaaagtactttgtattaatacatctgttatctatgcatacatatgcaaatgtgtgttaatatgtgagtgtg

SEQ ID NO: 107982 - DNA, 348 bp, Homo sapiens
ctccagcccaatgttttctacggcatatttcaaggagagctgcaaagtgtcaggttaatgccagcagcaattcttgtgaaccagcaaatgtctgtccagtctaagccccagatatgacaggaaactgagtttgttttattgtcaagactgcaccaaaagtcacttaatgtttgtatactatttccgctctccaaatctaatcaaataaatactacccaataaatttagaccccactaaatctttatatctgaatatcatatttattcattcaataaacacttattccacacctcctacatgccagacactgccagctctcagtcacaactgaaaagattgataataaa

SEQ ID NO: 107983 - DNA, 330 bp, Homo sapiens
aaactatataaaatgatttttaataaagtataacacaaacatgagttacagagaatagaatttttcacgaatcctgaaaggatgtcttcttttctaaagaaaaaaaattatctagcaaaaataatccttatgtaatcttaggataactttaagtttgctctaacatatcattaccaaagaatgttagttttttactctttcatccttttatgtgcccaaaacttactattttaaacagtctggatggcaaacatcttagtaaatccatggccacacttcactagacgatttattaaatatagcttcacctaatcttgatgacccgcaatc

SEQ ID NO: 107984 - DNA, 660 bp, Homo sapiens
ctagacacaaaatggagccagcacagggcgcgtctcggcgcatcctcctcagcccaggccccgtgcgtaaggagcgctccgtgtcagcgcgcttgctagaccccattgctgttgactttaatgtgaataggaaataagttttgatgtttgtttgttttttaagtggggctcctgttttttaaaaatggatcaatttacctggagtgcaggctgctcctgagcttgaaggtggaagtcagttcatgcgtgaaagaagtcttgcctaattgaaacatggcatcacggttaataattaaaatgttatctgatttgagatcagctgtttttgtgagaatgctaatgtggcattcctgattagtctgtatgtttgtttgtttgatttttaattctgggtgcagaggaacacagattatcaaatccagttggtatttcttatgccactatagtacaacttgaaatcccttttaagtagaggaaacagtgttgtattcatttcctattgctgttataacaaattactacatatttgagtagcttaaagcaacacagatatattatcttagagttctggaggtcagaagtctagaacaagtgggccttccttctggaggctctagggcagagcccctttccctgccctttccagctgctaggggctgc

SEQ ID NO: 107985 - DNA, 407 bp, Homo sapiens
tgtatcttttaatccatgaatcacccctctgttgcttttttcctaatttatttgtggaagaaagtaggccatttgtcccacagttttcccatattctgcattttgctcattgtgtccacgcggtggtattgctttgtggggagattttactctttgctaattagttacatttctagtcatactttctatttattcttgagtcagctgccatgttacacttttccacaaaactattttatccaatttttcaaattcatgggcagaaagttttccatattctatatttataggtttttttaaatcttcattatatctatagttgtattttttcattcctaatatttatgccttttctttgatcaatcttgccagaggttagggttatagatcttaatcttttcaatgaa

SEQ ID NO: 107986 - DNA, 1643 bp, Homo sapiens
cacgaaggcaccctgcccataaaaccaggatgtgcatacgtacacacaatcggtgtctggttatggttttctaaacactacataaggatctgaattttttagtgtgccaaaagcaaacgataggtttaaatgaaattgctcactaccaaatcaagactcttcatatatatacgtgtgtgtatatatatatgtcataacactttcacgtgtgacagcctaaggtttctttagttttaggatggggtggggtgggagtggttttgcatgtttgaccaggatgtgatgcctgtctttattccttgataagaagtagctgttacagcatttcaagcaaattattttaggtagaatagaacttactgccaaatgattatttatttagcaaaaattattctccaacttttcgaattcacaatttttctaagtgcatagagtagttttttacattgtcacgaattccttaatacctttatttaaaatggaaaaaatatggacaatattttagaaatatgttctacacatctaattttatctgtagtttaagtgatctaaattgagatgcctttgatatgaagagatttaccaacattatatgcactcgtgccttcaatgtggaatcaaactggttaacctcagcacagtcctctcgtttctgtgtttctgctgcactaattgccagggggtgggggagaaggcgaatgaattaattcatagtaggaggcggcgataggtgcagcaaagggcagccacagtgttgattccacattataatgttgttgcctcttcttggcaaaagacaccacatggtgggaagatctcagcttccagggtaaaagttaatttataacttaaaagtgctattaagtttttattaccaaatatatcttttatggtttatattgtagtggtatgtatgaaacatttaaaattttactgtggaaattgtgtatatatatatatatagtcgaaataggtgttcacaggtcacatgtgaacggagaactgcatgactgtacatgaaatgcaataaaccaactggaaaaagtgcatgtgcttcatcctctcaagccaactgcagctggaaagtgctgcttatcctccacccccagaaaatgcatgtatcaatatgagaataaagaacgcacactttcaattttattgaggccttcaacactatttaaaagaaaatgtaagaatttgacattctggagttattataacattagaaaatgagcataacattcactctgattttagccattaagggagattagtaaacagactgctacagtgttccatagttggactgtgcatccaaaacatttttttatctttaataaatggtacagtttttatgtagttttcgaatgtaagaagaaaggaatgctgaccaaaacttgatttcatcagcttcatgaaaaggactagtgtcattaacctgttgaacagaattggtttattaaaaaaatcatttccagtagtgtgaaacctttacgagtctttaacatctaaatgttatgactccttgtaccttaagttttccagtctttcttatttatatcatctccaagtacctctggctcctttcctcttgctcaccggaaccttagttttcctcaacagaatgctttgttaaagtagcc

SEQ ID NO: 107987 - DNA, 412 bp, Homo sapiens
tgggactcctgcctgtgggactgctgggctgtttgtcctggcaaatactcaggaaggctttgcagccattagactggttccctggattctttatctgaaaatcagatattattggctgttaccaatgaatgtccaaagtgatggtcgagaaaaaagagcgatttaaaagacataagcaaaactaaactatctttttaaaaaaggaaatctcaaaaaacacttgtatacttcaaatactaactcaaggaggttatacatttattccaatgatgcgactactacagacatcattttcagaactatttttctggaaggttttccagataccatttgggatcaccagcaaaaaatgtcttagtatgatatagtcacatttcactgacccaaaatggcaaaaaattcaactttcaca

SEQ ID NO: 107988 - DNA, 455 bp, Homo sapiens
aaagtcttcccatagatttttacatagctgctgcatttgtcatccctttcctgaagagctttgttgctgtggtcttgctctagggctgctttcagcaacatttctgacgcaggtttaatgctgattagccctaaaacaattctagggcagggctccctgccaggataaagaatgaacaaaattggtttgcatataggccagctgcagttgctgcagctagagtctgtcaaactaggaccattttcttgtttaccaagatgaggttaaattagcacagcatgaggcaaaaaaaaaagatttaaaaaacccagaaaattagctatgcttttgagtatgatgcagtgagtgtggaattaaggtgattttaagttagtttgagaagggaaggtaatatacagtactaaaagcttgattaaaagctgcttgaagatatttgcttgctaactatcttagta

SEQ ID NO: 107989 - DNA, 341 bp, Homo sapiens
ggccgagagtagatcttaaaagcatttaccacaagaaaaaggtaactatgtgagataatgggtatgttaattagcttgattgtggtaatcatttcacaaggtatacatatattaaaacatcatgttgtacaccttaaatatatacaatttttatttgtgaatgatacctcaataaagttgaagaataataaaaaagaatagacatcacatgaattaaaaaactaaaaaataaaaaaatgcatcttgatgattagaattgcattcttgatttttcagatacaaatatccatttgactgtttactcttttccaaaacaatacaataaattttagcactttatc

SEQ ID NO: 107990 - DNA, 279 bp, Homo sapiens
caatgcgcccagccagactcatttctaacagtcttctaaagacactgtctctgggaagaccaatgaaatcgagaaaaagtatcttgaagctgctagcccacctccaacaggacaaagcatgcttccagagggagctttcccatagctccttctaggagctgctatttactgggcattcactgcagaccagaccctggctgggcacttcttacgcctgttctcacctcatctgcctaagagcgctgaagtcaggaactatttgcttcaattttttttttt

SEQ ID NO: 107991 - DNA, 511 bp, Homo sapiens
cgagacatgatacgaatcgagccggtaccggaagcatccctaacagaagtctctgaaacatcagcttttcgtggagtgcgcggcatgtgtccaccgtcaagatgtggtagattgcatgtaacttgacccgctggagatccgggtcctttgcagtttttcatcacggtgcatagtctgggtaatttcttctttaggttcacttccaagaagtggaattttgttcaggacagtgcttgttttcacacagctttggagagtttgtcctccgttgttactttcctcaaaggttagaatgctcagactctcactttcatttgagttaacttggggggaaaaaaaggttcaacaccactgcattccagcctgggcgacagagcgagacttggtctcaaaaaaaaagaaaaaagaaagttaaagtggctgtctgatatcatggtttttctggagtgcagatggtgatgataataagttaaacttattcatgaacatttcctcgatgctttaggacccc

SEQ ID NO: 107992 - DNA, 150 bp, Homo sapiens
cagacaaaaatatagagacttctaggcaagatggagtaacaggaatttcattttctgctggaaacaacacatgtgagttagtaatcatcagaacttcttaatgagagaaagtctggggaccatggctaatagaggtaaaatcaaggccaa

SEQ ID NO: 107993 - DNA, 368 bp, Homo sapiens
aactcctgacctcgtgatccacccgcctcggcctcccaaagtgctgggattgcaggtgtgagccactgcacccagccgcaggtttggactttttaaaagcgtgtgtttgcctcctgtctcctccatcatgatttagagttgctttttctactgtattttgtttctgggtatcttctttaccaacagcatgtgctctttaccagtcaaatcattgctttatccagttgccattattcatccctatcattctctgttttcccctctctcttctattttcagttatttaattactgtcaaggcatcaacagccaagcacagaactcctttcatttttcccagtcaacttagtagtcagaatgtcaggtgta

SEQ ID NO: 107994 - DNA, 360 bp, Homo sapiens
gaagctaataatgctggttgcctgtaaggaaatggaatagccaggctccaatggtaacagagaaacttctttagattagattctttacattttgacccatatgatagctaatttaaacaataattaacacagtttaaaagtataggatcattaatagatagttggagaaaagaataaatggagaccaagttactggccaggctttatgtataaattttctaatagaaagaaggagctatttgggggtgctaaggcaaggggattcctctagcccaggagttttagaggctgcaatgaattttgatggtgccactgcactacagcctgggtgatagtgtaagacccagtctcaacaacacc

SEQ ID NO: 107995 - DNA, 537 bp, Homo sapiens
tggtgcccttgtaagaagagacaacagagatctctctctctctgtgagcacaaagagaagaggccatgtggagacacagggagaaagcaacagtctacaagccaggaagagagttctcaccagaaaccaacttgatggcaccttgctcttagacttctagcctccagaatgggcctgatgcagaagtgcttctccttccccttgcccctggacctgagccggagctgtctatctacatgaggacaccatctggcaacactgaaatgttgccctcactgtatgccatcaccaggaagacaagcaatagatgatgagtgaaaataaaatgtttagttggaaactatttgggaatggctttatgtccacatatggacacagcctggctggaactggggagatcttccctttctggtgtcttttcaaggtcttgagatgagctctaacaaatatctcaggccatctggcctagtttttcataattgtgactcctaaatgtaaacacggtccgagagaatatcgggaacaaaaaaaaggcta

SEQ ID NO: 107996 - DNA, 429 bp, Homo sapiens
gaggtaaaaactcaagcagctctctgctgctaccctgctcccagccaagaagataagggatttcaataggagtaaatgagacaacatgttatagctgaggattttctttcaaaaaggtaccataccttttaaaccagtaaggttctttgctgtacacagttaatatatgcctagaaggttataagttgagcagcctttgcatgcctggaacctgacagatctcaacagacacctgggaagcccactgtggcttttaaagaatgcatatttctggctgggtgcggtggctcacacctataatcctagcactttgggaggccaaggtgggcagatcacttgaggtcaggagtttgagaccagcctggccaacatggcgaaactttgtctctattaaaaatataaaaattagctgggtgtggtggtgcatgc

SEQ ID NO: 107997 - DNA, 222 bp, Homo sapiens
aaaagtaatatgaatggtgcctatcctttcaaacccgttttttactttattatgacagtaaagtctattataataatttatcttaattattaattatatggtttttggaactaagattatgtatgcatatgggaagtacatgtgtgtatttaaatttctgcttgaaaaagtataggttttttgctttcttgttttttcttcaaagtttcttggacacatttt

SEQ ID NO: 107998 - DNA, 266 bp, Homo sapiens
ttgttttttagtatgaactccacctggtatgttaaaatcatgacactcctaaattattttcatttgcatttgtatcttataccttttctctatcttttaaaataccagtctttcacaatcactgccttaggtgtgtaccttgtataaaccagagagtgggttttgccttgaatctaagctaaaaatattttccttctaaaggtgagttaagcatattaatatcttttttaagaaaggcatgtttgggccgggcatggtgactcaca

SEQ ID NO: 107999 - DNA, 773 bp, Homo sapiens
acctggccaatgtggcaaaaccccatctctgttaaaaatatcgcaccactgaactccagcctgggggatagagcaagattctgtctccaaaaaaaaaaataaaataaaagcctaggacctgatggctttagtgctgaattctaccaaacattaaaaaagctctactctaatacaaatttttcctaactatatataaaaaaattgaagagagaattctactaaacttattctatgaagccagcattattttaataataaaaccagaaggaaaaaaaagaaaactacaagtcaacatccctgatgaacatagatgcagaaattctcaaccaaataccagcaacctgagttcaaattcaacagcacactgaaaagattagtcaccatgatcaagtaggatttatcccaaggatgcaaggatggtgcaatgtatacaaatcaaaagcatgatacatctctgatatggtttggctctgtgtccccacgcaaatctcatcttgaattgtagctcccacaattaccacatgtcctgtgagaaaccctgtgggaggtgattgaattatgggggtgggtctttcctgcactgttctcctgatagtgaatgagtctcacaagatcagatggtttttaaaaaacgcgagtttgcctgcacaagctgtctctttgtctgctgccatccacataagatgtgacttgctcctccttaccttcctccataattgtgaggtttccccagccatgtggaactatgagttctccattaaaactctttcctt

SEQ ID NO: 108000 - DNA, 480 bp, Homo sapiens
tgcatagtgaccagttatccagtactaagaaagtactaaagaaggcactaaaaattatttttccttcatagtaataatagttctatttgctcagaagagcccatcccttattacatacccccttcgaatccactggtcaggatgcctaggctgcaccttctcttcccatggctgatccctacctccaggaatgaaaaaggagctctccaagggtcaccagttgggtagctgaggccaccagggaagtggctggcatggccaaacctaacatgatcatcagtgtgactggcgatgtgatcaccattaaatctgaaagtacctttaaacatactgagatttccttcatactgggaccggaatttgacgaagtcacttgcagatgacaggaacagtcaagaggcgcataaccttagaatgggggtgtccctggtccacatgtgcaggaaatgggatggaaaatcaatcaccaatatggagaaa

SEQ ID NO: 108001 - DNA, 141 bp, Homo sapiens
gcttgtaaacattgaccactctcagaaggggatgagggtgggagaggggtccccctatacttcctcacagggttaaggcctctccaggtccctgggccccctaattccaaagcttcttagctggaggtaaagagcagaaag

SEQ ID NO: 108002 - DNA, 878 bp, Homo sapiens
gaaatgttaccactacagaaagccaccaaacaacaatgctaaacattaacagagaaaaaaaaagatatagaaaacaagcagaaatcaattaataaagtgacagcaataagccttcacatatcaatgataaccttgaatgtaaactgattaaacttttcacttaaaagttatagactgactgaatggataaaatacataacccaactgtatgttgcctacaagaaactaatctcacctgtaaagacacatatagactgccagtaagtgatggaaaaaaatattccatgcaaatggaaaccaaaaacgggcagaagtagctatacttatatcagataaaataagctttaaataaaaaacagcaaaaaatgaaggttattatataataataaagggatcaattcaacaagaggggtaacaattttaaacatatgtgcacccaccaacagaacactcagatatgtaaagcaagtattagttttaaagggagagttagagtccagtacaataatagttgagggtttcaacaccccagtctcagcattagacaaattgtatagacagaaaatcaacagagaaacattgaatttaaactgcagtttagaccaaaaggacctttggtatttatagaatatttgaactgacagctgcagaatacacattcttctcatcagcacatggaacattctccaggatagttcatatgttaaacctcaaaacaagtctcaacaaattttttaaaaattgaaatcatgtcaagtattttcttagaccacaatgaaatcaaactagaaatcagtaatgatgaactagaaatcaataacaatggaaactcttcaaacacatggaaattaaacaacatgttcctgaatgaccactgg

SEQ ID NO: 108003 - DNA, 498 bp, Homo sapiens
tgtgcctttcccttcatgagatttaaaaattcctaacaatagcattatatctatagtttccctctatgtttttaacacttaacaaaacactagtcatatacatttaataccaacttgttgaatgactgaagatcatctctaaaaaactgaagctatctgaaagataggtttaatttataattgccacttcattttcttaagtcattgtgtcatttgtctcttaagtcaaaaccaataattaaagagctctaatttacaaactccatccctctgggttatagagttatcattctcaacaactcagctgtggtagcaatctatgaatatacatttgtcatacatcaaatatagctttattgttattgttaaattaaaaaagagaaacaggggtaaagtaagtattatatccattctaaggtctgagtaacactgggaaacacagagagagtgggtagcattatcccagaactgatatttaagaaacagtcaagaaaactg

SEQ ID NO: 108004 - DNA, 431 bp, Homo sapiens
  misc_feature (23)..(24): n is a, c, g, or t
  misc_feature (36)..(37): n is a, c, g, or t
cactggtcggtcccgtgctcagnntctgagagcggnntacagacgtgcacacatgctgactaattttgtattttagtagagacaagttttcgctatgctggcaggctgacctcgaactcctagcctcctcatatgatccatccacctcagtctcccaagtgctgggattacaggcatgagccactgcacctggcctttacatgtctttcgtgtgagtttaattcacttaaccttttagaaattctccctttctctaaaatgggtaggttagactcagtagataatttccaaagtctttgctagctcttaatgatttatatgcctacctgttattgagataaagcctttgattattttttaaaacttctggttatgttgagagaaaatatcatttgagaacttgaagaacgacaaagcattattgctcctta

SEQ ID NO: 108005 - DNA, 345 bp, Homo sapiens
cctgcccacaccagggagaggaggctcctaagctgcatttgggtcgttttgtttccaatgttggcattcaggtagcagaaaattccaccgcctgactgcggtcacctgttgtcatttgtgatgctgggtttttcctagaaatcacctcatcaaaccttttccatcttaatgtcagcccactctttcatttgagttgccatataaataaggactgtagtaagggcagatcaatgctgcgtgtcgctgctggggccagtgaattgacctcagagggtctgccattggcaccatcattcgtttggcaccataacgtacaaggagcaaaggacacgttttaaaaaaaat

SEQ ID NO: 108006 - DNA, 258 bp, Homo sapiens
caaaaatcttagaaatgtgcataccttttggcccagtaattccagttcaaggaatatgtcctaaggaaataatccaaaaagtagtaaagatgtaagtacaaagctgtttgactgcaatattgcatataataaaaaattagaatttaaatgttcatcaatatgggattggtcaaattaccttatagcatttagtgaagtgttatatagccttaagaaagatgatattgatttggatttgttgatgtggaaatagaaatt

SEQ ID NO: 108007 - DNA, 673 bp, Homo sapiens
atatctttttctttattatcaaattaatgccaggcattgaacatttcctgctttgtgtacacatagaacctgatatgctgacctttagcatttagaagaagactaatgtgaaagttaacagccaccttgtgcagtaggtgattagtgcgcatgctcagcctgatgctgaacgaatgttggatggcaatgctgttttcttgcatggctttagttgcacagctgtgcaatttttccagattattttcaatattaagagatctctaagcactccatttccttgtattaaacttctaacttttaatactgcattacttagaaagatgtcttagtgacacaaagttattctagtgactatccatgtggtaattaatttttacaccatcttttcatagctggatctcactgtggtatttattgctttacatttatttatgaaaatgttttgctggatattaaattcaagattggcagttattttgccattttaaagatggttttctgccttccaacattttcgttgtcattcaaattgtttctgttttagaggtaatgtatctttgtcttttctcttagaggtaatgtatctcacacaactttctctggatgctttgagatttttccttatatttttagtgggaaaactaaaatgtaccaactataaattaaaaaaaaa

SEQ ID NO: 108008 - DNA, 208 bp, Homo sapiens
tttatcatggcctcagggctatacacctggtctggccgtgcttatctttctgaccccacctacttcctcctccctccatttctgtccagctccaccttaccccaaactctttaccagctcgggcctctgctcttgccgttccctccgcctgaaaatgcttttccctctgacctttgaatacctactcttgtgctcaccattcatatct

SEQ ID NO: 108009 - DNA, 266 bp, Homo sapiens
tagagaaactgaagcataaatgtgggtgtatgtatttgtgttgcagagtgaatctatggggcatcatctctatactagacactatgtaagtgaggacaaatctatgtttccttggtagcatttatcaggccagtctgatttgaacgcacagacatttatgttttgggatgagcaggtagacaacaaggagatgggaagaaatatttcaggaagagttctccactggcttttactctgattattcctgccctgctcaagactgtgtg

SEQ ID NO: 108010 - DNA, 287 bp, Homo sapiens
tgacgagacgactccctccagtcttatctctcccactctaggtcccacccacccctaatcccgcaaacgtttcttttctctctcctcctccgttcttctcgcttctcttctcgaattctctgcttttctaattttctatttttaatatattccaaaataggtgtagttcttctagcaatgagctctcttgtcttcgcctccatctcccccagcagtctcagggttggcactggtcttctcttcctccacacagtaggtttctaaaaagtttttatattctggatctc

SEQ ID NO: 108011 - DNA, 315 bp, Homo sapiens
ttcctttcttcttcattggaagaggccacaagtgtctgccttttcagtttgaaccaaacctttgcttttgtattctaatagcaactctaaatgcgctcggtgtggttcagtggctcgcaggattttataccgtgagaattacacaggggctcacaaatcatcatttctgatcgcattgctttagagacaaagaaggcagggccccgagaatcatcatggatcttttataattccatcagtttcctggcagttaaaacaaattttatagccaaatggcaaggctaggcagggtgaagtgctgagggtcaccgtgct

SEQ ID NO: 108012 - DNA, 395 bp, Homo sapiens
tttgagaatgataaaccaaggggaaaagtcaggttttaagaagaatgtcatggccacgaagataacactgccgttgggcgttgccgtggttctgactgggtgaaggtttcccagtgaccatctttgtgtggaaagagcactctgctcctgatgttggggatgtcatgccacccacgtacatcactgtcctcagcattccagcactcttgcctattctctgtgcatctcttccaccctgcaagccattgcttatgtcaccctgattgatcatggtgtaacacccagctgtcctctgcacacaggatcccaagccagaagtctcaggattttcttggttgtctccatcttttttttgtttcacgcacctaataggtttccaagtgctacgagttctg

SEQ ID NO: 108013 - DNA, 1321 bp, Homo sapiens
cgagctgcagtgccgcctacaagtggtgcgctggctgcagctgtggcaaccccggatcccgtcctcccgcctcgcacccatcagcgcggaccccgggggcgacgcagtggcgaagtggggctgtgggcccagcggtggcaccaggcggagaagcaccactcaaccccatccctgggctgcagagggcccagcgcgggggactccgagcgtcgggagcctgtggaagagaagagcgcgcgggcgacagttaaacaggccctggggcagggcgcgcctcgcgctccagggagccccgccctcccgcggcacctccgcagcaaccgccgcctgcactgggcgcgcgagagctgctagggcggtttctctgcctcgggcctgttgggcagggccggctaaggtgcgcgtgctcgctggttctaacccttctgttgggcgtttctgctgagaggcgggaggcgctgagagtctgtgcggaggtccgtggacagactgctttgctcgttgttgctcttcggaggcggcgatccccgaaggcgagctgaaatacggctgcaggctacaatttgcagccgacgattatggaagacggcaagcgggagaggtggcccaccctcatggagcgcttgtgctcggatggcttcgcatttccccaataccccattaaaccgtatcatctgaagaggatccacagagctgtcttacatggtaatctagagaaactgaagtaccttctgctcacgtattatgacgccaataagagagacaggaaggaaaggaccgccctacatttggcctgtgccactggccaaccggaaatggtacatctcctggtgtccagaagatgtgagcttaacctctgcgaccgtgaagacaggacacctctgatcaaggtatatagtagctgactctttgagcatgagatggatttggttgaagtacataggataaaatgaatttatctcattggaataccaccatataactagtaggaaatcctacggagtgtttattttgatttttcagtatttgcatgtttctcggtctaatactgacaggctgtacaactgaggcaggaggcttgtgcaactcttctggtgaaatggggcatcaatattaggattctggaggatggttgactaggtgtttatgagattatctgttgaaaatttttcctggcaatttggatgggcggtttggtgccctgttttaattggaggtttttatggccggagggatatgggaacacctggaataggggggggaaatagggaaagagtttggaaaaaaaataggggaggattggtggaaaaggtaggcgtgg

SEQ ID NO: 108014 - DNA, 1169 bp, Homo sapiens
cgagctgcagtgccgcctacaagtggtgcgctggctgcagctgtggcaaccccggatcccgtcctcccgcctcgcacccatcagcgcggaccccgggggcgacgcagtggcgaagtggggctgtgggcccagcggtggcaccaggcggagaagcaccactcaaccccatccctgggctgcagagggcccagcgcgggggactccgagcgtcgggagcctgtggaagagaagagcgcgcgggcgacagttaaacaggccctggggcagggcgcgcctcgcgctccagggagccccgccctcccgcggcacctccgcagcaaccgccgcctgcactgggcgcgcgagagctgctagggcggtttctctgcctcgggcctgttgggcagggccggctaaggtgcgcgtgctcgctggttctaacccttctgttgggcgtttctgctgagaggcgggaggcgctgagagtctgtgcggaggtccgtggacagactgctttgctcgttgttgctcttcggaggcggcgatccccgaaggcgagctgaaatacggctgcaggctacaatttgcagccgacgattatggaagacggcaagcgggagaggtggcccaccctcatggagcgcttgtgctcggatggcttcgcatttccccaataccccattaaaccgtatcatctgaagaggatccacagagctgtcttacatggtaatctagagaaactgaagtaccttctgctcacgtattatgacgccaataagagagacaggaaggaaaggaccgccctacatttggcctgtgccactggccaaccggaaatggtacatctcctggtgtccagaagatgtgagcttaacctctgcgaccgtgaagacaggacacctctgatcaaggctgtacaactgaggcaggaggcttgtgcaactcttctgctgcaaaatggcgccaatccaaatattacggatttctttggaaggactgctctgcactacgctgtgtataatgaagatacatccatgatagaaaaacttctttcacatggtacaaatattgaagaatgcagcaagtgtcttctcagaaacaaccagccttgaaggctacaagtggcaaggaagattctatttcaaatatagccacagaaataaaggatggacaaaaatctgggacaggta

SEQ ID NO: 108015 - DNA, 1263 bp, Homo sapiens
cgagctgcagtgccgcctacaagtggtgcgctggctgcagctgtggcaaccccggatcccgtcctcccgcctcgcacccatcagcgcggaccccgggggcgacgcagtggcgaagtggggctgtgggcccagcggtggcaccaggcggagaagcaccactcaaccccatccctgggctgcagagggcccagcgcgggggactccgagcgtcgggagcctgtggaagagaagagcgcgcgggcgacagttaaacaggccctggggcagggcgcgcctcgcgctccagggagccccgccctcccgcggcacctccgcagcaaccgccgcctgcactgggcgcgcgagagctgctagggcggtttctctgcctcgggcctgttgggcagggccggctaaggtgcgcgtgctcgctggttctaacccttctgttgggcgtttctgctgagaggcgggaggcgctgagagtctgtgcggaggtccgtggacagactgctttgctcgttgttgctcttcggaggcggcgatccccgaaggcgagctgaaatacggctgcaggctacaatttgcagccgacgattatggaagacggcaagcgggagaggtggcccaccctcatggagcgcttgtgctcggatggcttcgcatttccccaataccccattaaaccgtatcatctgaagaggatccacagagctgtcttacatggtaatctagagaaactgaagtaccttctgctcacgtattatgacgccaataagagagacaggaaggaaaggaccgccctacatttggcctgtgccactggccaaccggaaatggtacatctcctggtgtccagaagatgtgagcttaacctctgcgaccgtgaagacaggacacctctgatcaaggctgtacaactgaggcaggaggcttgtgcaactcttctgctgcaaaatggcgccaatccaaatattacggatttctttggaaggactgctctgcactacgctgtgtataatgaagatacatccatgatagaaaaacttctttcacatggtacaaatattgaagaatgcagcaagatcagccctcatacatgctgttactcttggagaaaaagatatagtcattcttcttctgcagcacaatattgatgtgctttctcgagatgcgtttcgaaagattgcaggagattatgccattgaggctaagaatagagtcatttttgatctaatttatgaatacgaaagaaagagatatgaagatcttcctataaatagc

SEQ ID NO: 108016 - DNA, 775 bp, Homo sapiens
tatttgcttttcttcatgaagtgaaatgactagtgatttgggcccaaaccagaatctttttagctcttgctctttctctgccattttgtgtgtgcagttgtgtaactctgctgcaagccatagccaggtgtctgtgatcactgcctcatccccctaccccactgaaaggaacagcagctgatgagaaggcggcaagcctgtggggctcaggaacagcgcaccagcagaaacggaaactgtagcaagctgctccttgaactgcgtcataaagagatttgtctttatcagtcattcgtggctattcatatattcagatactgaattatccatgccgttgagggggtcaggaatggaaaagatattcaaaatccacaggcaatccaaagctttatttgcaccaacagctttagcttctaacttgttctcttccagtttcccggaacttctattaagaatagaagtgaatggatgggtttgatcagggtaaagagtcaaatgtccaaatgatgggaaggaacaaaggaaggacagtaaatgattggtaacaccaacaggctgattcattcctgaaagatccagaggtaaccatgtcattattttttaaaggcaaagagaaatattgttatacactgggacttgaaactagtatttttggccagacatggtaattcatgcctgtatttccagtactttggaaggccaaggtgggagaatcacttgaggccaggagtttgagaccagcctggacaacatagcaaagcctgtctctgttaaa

SEQ ID NO: 108017 - DNA, 177 bp, Homo sapiens
aaagggacataatggattaggctgaattaccaagtatttaatacaaaaggattaattgggtaggctaaatgtagacacatttctgtcatttcaaacaggtgtagtgaccttcactcacatccttagtgaatatattatacatatttgtatggcttcagattcaagtctcttcttcca

SEQ ID NO: 108018 - DNA, 636 bp, Homo sapiens
tgagacagtcttgctctgttgcccaggctggagtacagtgcagtgatcttggctcaccgcagcctctgcctcctgggttcaagtgattctcgtgcctcagcctcctgagtagccgggattacaggtgcatgcccctacacctggcaaatttttgcatttttagtaaagataggggtttcgccatgttggccaggctggtcttgaactcctggccttaagtgatccacctgccttggtctcccaaagtgctgggattacaggcatgagccaccatgtccggctatgcaaagaatttaatttaaacaaagctccctgagtaagtagtagtagcttggtctgagacagggagtctggtaaggagcctgggaactcgggaactcaagttctcttttccctcttttcttttagaaggcaaaagttcagaggcttaagatgaattttcagccactcactaataaaacaaatactactggaccctattattcaccactggtgaacaacacagatgtcagggatcctgtggtgtttacattttagtgcaagcagacagacacttttatatagaaaaatatcagatagtgggaagcactagaaaaaaattaaaataaagtaacttgacaggagtgactgggtagc

SEQ ID NO: 108019 - DNA, 322 bp, Homo sapiens
agttaaggacccagaataggtttgaaaatggaggtagatgaagatgttaagcatggtccccttgcgagggctctgcttccaaaaatggagggcttattcttgaaagtggagaatgaagaaccaggcaaagggtccggccctggctttcccacacccatcccctcacaatggggagccatgggcttgtgagagacctgcttgcctgaaggaaggggcaaaagagaactgttgattacatcgttactgatgtactgggttcatctgtgctcagcgctgggccgattgagatgaacacacagtgcctggcctccagcagctttca

SEQ ID NO: 108020 - DNA, 571 bp, Homo sapiens
gttgtttagttgatttttatcaactaaaactgggagttttagctgacccaggagagtgaaagggctctctttgagactgataatcattttctgacatgaggctatttaaggactcaagaacttctaatgtcaattaaccatgaaatattttaatagtgcttagtctttgctcaataggttggtctgtgctatgtttgtaatagatgtaagtcaaatcgacattttggtttatgagattccatgtttcagaagaggctattggattcttaaagtgtttattcagtcatcaaatatttattaagtattgaactcatgttaggcattgtgacagacatggggtatttagtggtgaacaaaatatatattttcctgctgtcatattctttgaaatctagtgaggttggcagactttaaaaagacagtaacacaaatgaatatactgtcatacattttgataatatttgtcattgcacatattgatttcattgaacactagagatgtacttttttagacatatcttgaaaagctgtgtgtgtgtgtgtgtgcatgtgtgtatgtataaaaattcac

SEQ ID NO: 108021 - DNA, 348 bp, Homo sapiens
ggtgggaacattttaagactaagaaattgagtggaagaaaaattaatagacgtgtctttgaaggtaggaattccgtccttaaacttacatccctgatgcctgtgcggaataagtgatattgaaagaatgcatggagttctttttttttttttttgagacagcgtctcgctctgtcacccaggttggagtgcagtgacgcaatctcagctcactgcaacctccacatcctgggttcaagtgattctactgcctcggcctcctgagttgctgggattataggcatgtgccaccatgcccagctaatttttgtattttagtagagatggggtttcgccatcctgacctcag

SEQ ID NO: 108022 - DNA, 335 bp, Homo sapiens
atatacctgatcatacttcacttaggaatataggaagtgaaaactcacaaaacacacattcagaagctgtcctttaccctcaaaattactaggaagtcaggtttaaatttaaaacatgtatgctttttgacttgagcattccacttccagaagtccatcctacagaaatccgacaaatgggcagaaaacccctataaacacatgtactgctatattatttaaagagaagaaaatgttggatatatctgagtgtctataaataggggaagagttaaataaagagaaaaaagaaaataacaacaatacctatggtataatcataattatactgaaca

SEQ ID NO: 108023 - DNA, 741 bp, Homo sapiens
actaccttttattttattttatttttttgtttttctgcttataaaatactatgtactaattgagaaaaacttggaaagtagaaaaaaaatatatatatatatataaattaattcccttgtcattcctgtgtctagaatagttaataacatcattctgatggatttaccttttatttatgttttcctgtatgtatgtgagaactcaggcacttaattgggcttaagctgtatatgttccataccctgctattgttgcttgacattttattatggatattttcctccatgtcattaaatattcttcaaaaagataaacttaatggtcatagtaacccaacatttttggatacaccatcccacttgccaccccccagctctttacactaatattgctttagtcttttttttttccatcctagttaaaagctgagatgaaaatttgtaagtagagatggctgagcacttctccattttccttcaatggctcttaaaagtaaaataattggctccaggtatagacaatattaaggattgaaattgtctgtattgacttctttatcaagaatcaggtagttttggccgggcccagtagctcctgcctgtaattccagcactttgggaggtctaggcaggctgaatcacctgaggtcaggcattccagactaccctggccaacatggcaaaaccccatctctagtaaaaatacaaaaaaaattagtcaggcttgatgacaggtgtctg

SEQ ID NO: 108024 - DNA, 424 bp, Homo sapiens
tggatggctgctcgggagcagccactagggaagccccacacagtagccagattgtgcacattttcaagagaagctggaaattgttgatggtttctaaatgtcagccccgaagtcaatattggaaaataaaaccccggtagacagctggttagctttctctagggtaaatcacagtgagagaaacagctgagcagggaaggatcaagctccagagaacagagtcagggggctctgccattcattgactgcgtaccttcaagcaagtagatcaaacactctgtgtctccgtaaaacagggaggataatggcacctcattggggtggcatgatgattaaacgcaataatgcatggagaatgctctaggaagcaccctgcatgtgggaagcaatgaataaatgcccctctcagtacaggttgactggg

SEQ ID NO: 108025 - DNA, 430 bp, Homo sapiens
tgagacagtctctctgttggctaggctggagcgcagtggtgcgagatcggcccaccataacctccacctcctgggagtttcgccatgttggccaggctggtctcgaactcctgacctcaggtcagatctgcctgccttggcctctgaaagtggtgggattacaggagtgagccaccatgcctggactcatttcattttttagacatccctgagaggggtgttgcagagtgctgttcctgtatggggccaggcagttgcagggttggattctgactctgctgtttattagccttgggtatgaacacttctctgctcctcagttttctctaatgttaattaactagtcaatcaatctaccctacagatctgtaaagaggttgacagcaaatacatactaggtacctggtacacagcaagtaccccataggca

SEQ ID NO: 108026 - DNA, 341 bp, Homo sapiens
tgatgcccaggctggagtgctgtggcatcatcatagcttaccccaaactcttgtgctcaagagatcctcccacctcagccttccaaagagtccagtttattgagaaaaatattcgagttaaaagtatccctaaagataataaagctcagaatgttctttctacagacaaatagactcaggaccatacagtgtaagtaacttggttaagatgatacagctgttacatggtagagttagcaaacaaaaacaaaaataaaaacctctccggccagcagcgctcaacatgactagcacccacctccagccagggacctcacggtttctcatgcccatctggcaca

SEQ ID NO: 108027 - DNA, 544 bp, Homo sapiens
gctggagaatacttttaattttaaaactcaaatggagtggtgttttgatggaaactaatccatgatttagggtaaatggagttattgtgcatgaccatgtggaatatgttatcaatatgagtcaatcagaatcactaaggtggtattaaactgcttatatgtcttgtttataattagttgtgttattgtctttgttacttgacttccatattacttaactgttgatgtggttaatcagaacatgagctttttgagggtgaattctatgcccatatctctcaaaggcctaaataggaatgtttgcacacaatacttaaaatagtttttccactaataaagatttctgatacagattcaacatactgtaaaactgatttcaaccgggtgcagtggctcatgcctgtaattctagcactttgggaggccagggcgggcagagtgctttgagctcaggagttcaaggccagcccggacaacatggagaaaccccatctgtacaaaaagtacaaaaaaatgagtcaggtatggtggcttgtgcctgtgt

SEQ ID NO: 108028 - DNA, 159 bp, Homo sapiens
ctggtttttatcaggattaatcacttttgtgcttccaaaaacaccagcaagaaagtgaaacacagctgggtgcagtcgcccacgcctgtaatcccaacactttgggaagccaaggtagaattgcttaagcccaggaattcaaagccagcctgggaaaaa

SEQ ID NO: 108029 - DNA, 646 bp, Homo sapiens
ttagttttgactccttgatacttccatttgccagaatgtggcatattgcaaagttgtagtcagtaattatttgtaccaccatatttttctgcgtacaacaaaaaaaatctcatattacttatcacagtctgcagttactacttaatcgaaatagcaagggaatctaagactcaaaaataagttcttaatcaaaagtgttaagtaggaagtttgggagaaaagtaatttgtacctattaatatttgcattgaaaatttaagagttgataaggcacctgcaacgtcacaaatgtgcacaaattattatggcaaaatctctcttaagatacaagttgagtaacatgtaaaggccatttattatccgaaaattccctattggtaataaataagattttaatataaaattttctttgtatagacttatcccaatgaatggagcagctttatacatttgtcaccatttctaccttagtaggaagctattgaaaagtgatcactactgcctttcattagcccctagtattccataacattctcccagtggctctcggtgtgggcaagaggatggcaaggagggagtgatgttctaacaggcaagcaggaaatatttctcttctagccttacctcaaccaaggaagctcctttg

SEQ ID NO: 108030 - DNA, 518 bp, Homo sapiens
taaccaggtttacgcgattctcctgtctcgttctcccaagtacctgggactacaggcatgagtcaccacacctggccaatttttgtatttttagtacgcgatggggtttcgcctatactggccaggctggtctcaaactcctgacctcaagtaatccatccaccttggcctcccaaagtgctgggattacaggcatgagccactggtatcccgccttatcaccattttttcatttcccttctttccctaccatcatccaaatgtcagctccagaacagggaccatgtttgttctgttcactgctttatctctagagccttagaattctgcctgccagagtaggagctcaaaactttgtttttgtgactgacaacctctgatccctggtccctctccaatttgtccctctccatcaggcaggcccctcccgtcttcgaagctcccatcatcgccccacccctcctcttgccaatatcctgagttcctttgcctttaatcaaacctgttggaagacgctc

SEQ ID NO: 108031 - DNA, 259 bp, Homo sapiens
tcctccctcccaccctcactctcttctccccattccccttcccttggggctttcgctccctcccaccacgatcctggctcccaccctgcctcttggaagtgccctcctcacaccacacaccaactcatcttcctgaagtcactcagttcaaacaacccaattagaacccgggcaaaggatccgagaaagcattcctccaaagaaagacaaatatctgataggcacatgcaaggatgtcctcatgagccgtctgggagag

SEQ ID NO: 108032 - DNA, 561 bp, Homo sapiens
tgtttatgcctccagaactttttacgacgtatccttgaataaagattagttaaaaaccttttgtacctcctccaaagagtggctataagacaagggcaggccttggagctcagattattaagtattaaactctcttggatgattaaggtttatatctcagtatgacagggacaaagctgataaaaggaccaaatttctctgggtaagctctgtgaatgtagttttagagtatacaagaattatcaatgattatgctttcaggtgacaaaactaaatccaagtctcattcttaaaagcctattgggctgatgaaaactacaacatttgtcattattggatgtattgtgttccagagttccttcctaatttaggacagttacagagaaagggcttcatactgtaatctggtgtgactaccattgacatactcattatacaagccaatcatggaacagctatttgcttttatgctatgaagcctaaagactgagcctgaaagcttttaaaagtctacctacaaggctgggcacagtggctcatgcctgtaatcccagcacttca

SEQ ID NO: 108033 - DNA, 419 bp, Homo sapiens
tttacgaggcctaagaactgccagcttgtgggaggaaggaggaagggggaagctaaaacagaaagaaatttggagaaagttggttgacttatagttggatgctaagattctcttccccactctatcatgctattggttactgttgtttccccactacagaagtctagaggcttactctctacagtgggtaaaacgaatctttgttttaggggagaccaggcacaggggagagagtaggcactatgccaaaaccaagaggattaaacgaccatatacatgagacacaaaccctcacctcatatcccctttttttctgcttctaagttggctcctaggcgacagcaatgctccttaaactatggtctgctgatggcccataagccatctatcaccagtccatgacaaggtaagtaccaaaa

SEQ ID NO: 108034 - DNA, 310 bp, Homo sapiens
tgcttttctgttcagtctgttacaatatgctgtttgggttgaagtatatgaagaaaatctggcctcatgcagatatgtagttgcaaaaggaaatactttatagaccacaagaaaggatattgaggaccctgaagggtctttataccacacctttgagaaccacagttttagcaaaccaaccatgcaaagtgcagtcctcagaccaacagaatcagcatctcagggtgcttgtatttagtgtaaaattttggccccattccaggcctgttaaaatctgcattttacatagtccaagggtgattcatatgta

SEQ ID NO: 108035 - DNA, 1700 bp, Homo sapiens
catgcgtaacggagttccctttgcggggcgccgggagtcgtagttcttatctttcgggcccgccgccctcgcgcgccgtgcgacgtagccaatcccaggacgcgtagggggcgtctccctggccgccaccttccatcgcttagacctcgctaaagaaacgcgagcggccattggtgaaaaatcacacgactcgctgaggaaggacggccaatcgcagagaagatggggcgggttctggaccgtaccattctgtttcaggaatacgagaagattcgatggcctatgagagtcctcacagaatatttttatgaaaaggtgcgttataaaggctattatcgtattttgttctcagcggaggggttccgaaggttatgaacctttattaactaacgcaagaatggtttattcctaaaaagtagtccctaaaatgtaaaagaattaaatcctataaagagagacgtcggcccacggctgctaactcgcgagtcttaagattatagaaatggcttcaaggcgggtggtgagtgcctgagactgacacttgcggaaggatatcgcgagcacattttgtaaagaccgaagagcgcatgaagaagtaaacaaatgaagaataaaaagtgccgccttaaagggacagtgtgactgcgtttagcgccgcaggtcgcactaggcctcggaagacgaagaggcgggttcgagtcccggtgacgcgactcccggactgacctcggtacccttagctgaaggtggcggagtcccagccccagcctggtctcagaaagccgcccccgccccaggggcaaatgcaaactggtgattcgcgaccaaggctcttccctgggccgagatcggaaagccggggccgggggcgggcgggggagtggagggggaagcgggggaaggccacgcccccacgcctcagcttctgtcgaagaaaatggcctcctggggccgatttggtcttttcacttccgaccgagatcatttcctgagccgggacagaggaggtccgggacagccatgaggctgtttgttgggaagagttcggaatgattaatgagttgaaatcatcagccctggctatccgagagggaagcaggtctcacccgcagaggcccttcctcatcagtgggcgctgggcaagactgggagggaagcatggaggaggccttgctccgaaacttgctgcaggggattctggcgcagggctgggggggccgattcccccgggggcgtagtttctcagagagaaattctctagacccaagcccccagccctccataaacagggactgagaggacccagagaaccctccataccagtcactgaggcctaaaatcttggcgccctttccacttctccttcgccacacacccagtgaccctttcttcttattgcttccttaatagcatccctgacattccagcacgtttgcactgtgtaccttttacgcacagagccatgtgacctcaccacagcctggcaagttagacacgataggaatgagtgtctccattttacagataaggcatctctaagacactggaaaataagtgacttgtccaaggtcacatgacaaccatggggcagttctggctagagcgctggtctttgtgaccccccccgtgccatttttctttctgtcacaaacacaaaacccattttttcttaaaatcggggaatactctgaaaaaaaaaa

SEQ ID NO: 108036 - DNA, 331 bp, Homo sapiens
gcgctccagcctgggtgacagagcgagactccgtctcaaaaaaaaataaataaaaataaaaaaataaaaaataaaaaaaaaaagaaatgatggtattagtaatgtaaagaaaaaataacaggccttctacaaatttgaagtagaggtactgaatttgatacatttctgtaagcatttttctttttttaaaaaaataatgacagagtctcactatgttggccaggttggtcttgaactcttggccctgaagcagtcctcctgcctcagcctctcaaagtgttgggattataggcatgagctgccgcactggtcctctgtaagcattttttaa

SEQ ID NO: 108037 - DNA, 1064 bp, Homo sapiens
ggctcagatttacctgaaatttaccgcagattctaagtttccgctatgaatttacattttgtgagatactagttgaactcagttaaagagagatttaagtaagagttgaagatgtcctgctctctgttctttcttggtatctaatttcttttaggtgtagcagtacaaagtcaacaatgttgaggtgtctgccttttctgcttttaaaagcttgattgattctcctataagaggtccccacccccttccctccaaggacaagctaatgcacagaataatttgtgaaaaatctacctggatttcagtctaagaaattattgctcttcacagtctctccctctgatttttagaaaactgatggataatcatttgcttgagcgtgacactcagctatttgagaataacattgagatggttaaatttaaattaaacatgatatgagacgccctctagtcctccttccccagttcttctgcttcacccatgaaggcttctttgtgaagctctggaaacttctggtaagcaggttttatccccgcagatctttgagctccagtaattagtcttagattccctaggtaacttgcatggtaattactgcattagctttcttgaatagttttctaacttaaagaactgtattcatttctgtagccaattacagaaaactaataggtacacagtaacagtccttaatttctattttactttcttcccgcccccaaccccgaaatacacacactattattttgtttcttagtttcttttggagccactaataccatttgatttttatagacatcgtcaggtttcaaagagatgagctggaatccaagatgactgaatattatcaatcacatatttactgaaaacttagtggcaggaaacagtgctattatgtcaacccacacatttatgactcatgcaaatgagatacctttcaaatgacttgtaaaacaggtatttcgtgcctgattactttgttacagataactattacactgtggcaattttattaaatcttgtattatcccctcaggtttgattaaaatttcttggaagtt

SEQ ID NO: 108038 - DNA, 351 bp, Homo sapiens
gcgcggtctgggacgcactaaacctcttttattttataggggatagtgatggtattccactattaaaggccaccatccccaaaaatcagtatcgttcttttatgtctcaaggcagccctgagttactgataacaataagcatgaattatgttgtttaataagttaacacgaagattctgcctggcagatgataattaatagcctgacaatgtaaatacagacagaatcttcgtgttaacttattaaacagcatttttccgtgcttttgacatcagtgacagctcatggttaggtttttgtttagttttgttttgagacggagtcttgctctgtcacccaagctggagtaca

SEQ ID NO: 108039 - DNA, 149 bp, Homo sapiens
ctgaactcctgacctcaagtgatccccccgcctcggcctcccacagtgctgggatgacaggcgtgagccaccgcgcctggctcctttcccattttctaagggacagtcagtctcctccataccatttgtcacacagcctttcccccatg

SEQ ID NO: 108040 - DNA, 545 bp, Homo sapiens
cgccactgcactccagcctctgggtgacagagggagactccgtctcaaaaaaaacaaaaaaaaacaaaaaaaaaacttgaagttattttatgtttaattaagaaatccttgttttttcatgggaaataaaagttactaagagctactaataattactatatgtaattaaagctaccaaatataagaaactgttctacatacacagtgtctaaagaaagtaagatgtgtttttggtgaaatttaattttaaaaaaacatgaggatgtggtttttgctgaaggaaaagtaattttgtctagttgagaagctatttaaaggttgcctcaaaataaaggggaaaataatataaataaaactaaatggctagaaagagaaaagataaaagtgtggggaattaggaacctttgattcctgggtggccaggtggtcacccatggtatggagctgcagctgggctgcattcagttacgaaagataaagggcaccagaaaaatttagagatgggtccaactcctggggagttggttcactggatgcataaggaa

SEQ ID NO: 108041 - DNA, 412 bp, Homo sapiens
gaaggtgggagatggcacatgggaaagagcagagaccaatttacctgcttccaactccggctaaaccctgtccttacagagtgccttttgcccagaatattcttcagacaccatttagaaaccaagatggagggtgggggaactggtttacagtgccaagcacattcactgcctgccagatcatctcaggtaggcatggatttgggttctgtctagggccttatagatccaggacccgaacgattcttgcaggtctccagttgccccaggcagaaacaatgaaggcatctagatcacgactcctccatcaccaagacctgccggataccatgtcctatgtccccccccacaattccttcccctcacctcttacccagatctcaacggtggcctccttgcatgccatcctgtc

SEQ ID NO: 108042 - DNA, 643 bp, Homo sapiens
agtgacaaacctcttttggtttacaggcggtcagacactcagcatgactggcaaaacagattatctgtgtgtcagtgtacattttattcatccgtcgtttgggtcagggtctgcgggcagacacaggtagctactgccctgttgtgagaagcaatacctcaattggtgccccatgtgaggagagctgtgtgaggacagtcaggggtctgcagaaacagaccttccgcagttggagccccttgtaaggcaagctatgaaggaagtgtaaggaccgctttcatgaggaaagctgcaaaggaagcctgaggaatgcgacgggcccccaggaaacaaaggtgaagaaaaaccgcgtggtcaagtcagtgagtaactacaatcaaagacagccttgcagagccccaggggagtcaaggggaggagcaggctggcaaggagagagatgccccaggtctgaaggagtgatgtagaagacaggatctgttggctgggaacctaaggatgattcacactcacttcctagaactgaatcaaaaggaaaatcccacctctccacaatcaagtaacaaaaggatcagaggctactccttttgcaaatcatgccaccaattcccactttccactgcattgcagatgaaaaacggaa

SEQ ID NO: 108043 - DNA, 473 bp, Homo sapiens
acaagctgtgtatcctgtgagtatgaaatttacttgagatcagtctagacccaccagaggaactgaggcatcttttggggaactggaagtactgtacacttcttagctatttttgtgtgtgagagagttctgggtatatgtgcacacatttgtgaggattaaaagtagaaagaaacagctataacacccccgaaaacgatgacagcactgaattgagaagaattgccactttgcgtgatagaggcaggctgaccacacttaagctctactctgtcacctttgataaggcattaaagccaccccaaatataaagtgaacatgtacatttcagatgcagcagacaagttgcaagtggaaatgctcagatttctaactatataaacagagaagctccgaggagaagcgatcagtaccctccacattcaaattctgacatattttataatttcccagcagctcagggaccctctgtg

SEQ ID NO: 108044 - DNA, 464 bp, Homo sapiens
ctgccctctcccatcaccccggaccctgtgatctccatgccaccctcacctgccctcccctctgctctccctcctgccaccccgcatcgcggagaagctctcctgaaattaattagtgtggcgtgtttacggtctctctcgcctccatcccgtcagaccccactcttggaacagagggcatggaagacagctttgccacttgttagctgtatcatcttgagaaaggacttctcttctctgagcctcagtttccccttattgaaaacaccgataatagttgcacttatttcctagcatactttgtgaggcttcagtgagacaatttatatcaatcatttcacacaggaatgaatcataaatcataggatcatagatggtgtcattatttgtattctgtcatgtctgaagacagctcattttaaagaagatttgctggtgatggctgttaggggaacatctcgtta

SEQ ID NO: 108045 - DNA, 451 bp, Homo sapiens
acagccacacaactaggatgaagcagagctaaaactcagctctcattcactgccaagcctgtggtcttagagacataagccagcaggacttggtgtcattaagggactggggagagtggttccattcccccaaatcctcccccagagaacttcctcgtattttataatggtcataccttcaacccttttacctcctacctgggctgattgcaataatctgaaagggccctgtttgaggggcaatggtagttactgtggagaagggcttcaaagaatatggatggtggtgccaatttacctcccggactgtggctgctgctgtgtgatgttggggtaatggttaatctgctcttgtgtgagtcagctaatgcccctcccaaatcacataatgcgttaactcagttaaaagacacctgcccaactcatctgaatgtcagacctgagtgtcagc

SEQ ID NO: 108046 - DNA, 440 bp, Homo sapiens
gagaatgagattatggttacatgtaactacatgggcatttcatttttaaagcctctttgaactttttgaaatactaagaatataaaatttttattttttaagtttagatgtcctgaacgagtatgtttaggcaaaattgagttatttaagaatttataggctgggcgcagtggctcacgcctgtaatcccagcactttgggaggccaaggctggcggatcatgaggtcaggagatcgagaccagcctggccaacatggtgaaaccccatctctactaaaaatccaaaaaattggccgggtgtggtggcatgtgcctgtagtcccggctacttcggaggctgaggcaacagaattgcttgaacccgggaggcagaggttgcagtgagccgagatcgcgccactacactctagcctgagcgacagagtgagactccatctcc

SEQ ID NO: 108047 - DNA, 674 bp, Homo sapiens
gagaatgtcaaagaacttctcagaatcacattaagcatgctaattaccaaatattaaatgctaattgttccacacgcagttcgaatgccaaggaaggaagatgaaactagtataagctactcttgacattatgtcagggatggttttgacacgttttgcagcctccacctggaggtggggaacgtttcctgtgtcgtccccagagcagagtaacagcgttgtttatgggtgagagcaagcctcaagcctaggcaacaatgtgccttgcttgcttttaagctccttctaaaggggaggtaaaccaagaccgctaaagaattgctaggtgcctgggcgtgatggttcaccccggtaatcccagcactgtgggaggcggaggcggaggcgggcggatcacgaggtcaagagatcaagacgatcctggccaacatggtgaaaccccgtctgtactaaaaatacaaaaattagctgggcatggtagtgcgcgcctgcagtcccagctactcgggaggctgaggcaggagaatcgcttgaacccgggagttggaggttgcagtgagctgagattgcgccactgcactctagcctgggcaacgatagtgaaactccgtctcaaaaaaaaaaaaaaaaaattgctaggcagctgggcacaggggctcaggctgataatacta

SEQ ID NO: 108048 - DNA, 271 bp, Homo sapiens
cccaaagtacacatttaggtaaacattcctctgtatgaggataaggggaacccagataagatattaagagagataaaatgaagtctgaaattcagtgcaaaacaaagatgtacagatctagcatttaactttttaaatactgctaaaaattatatgataaagctgttctataaataatctaatatttatgctattaatgattatactttttctagccgggcatgggggcatacgtccatagtcccagctactagggaggctgagccaggag

SEQ ID NO: 108049 - DNA, 356 bp, Homo sapiens
tgtttctataagcctttgcactagcccatggatgcatggtatgacacaacacccaacaagaatgagtacaccaattactgctgtaagagaagtaagaattgaggctacaatttctttccatttactgaaccacctttctagccatcttgagaaagggttattgactccagaatttttagctaattcattggataaagtggtaaatccttgtagggcccttgttatgctcccattgggggcagtgttgtttgcccccaatggataaaggtacaacactgagttttaatcataacacaaacaccaccattttcagctaatatcataactagggccattctgttttcccaggccatctg

SEQ ID NO: 108050 - DNA, 281 bp, Homo sapiens
aggaataacaagggcaattccacgagtcttatacaaataaacctaattagctaatagtcatacctagcactgcctatgttatttactaattattccgtgtatattagtcgtggttctccaagaagactctttaagagcaaaaaccatgtttttttttactctatttgtatttgatagcatcttgtatagtagtctgtttttgataggcaccagtattatttcccaaagtaggaatcatttatctatttcactaatattttctgaactcttactatgtgccg

SEQ ID NO: 108051 - DNA, 319 bp, Homo sapiens
ccattttttctttttcttttgagtttaacttgcccttctttttcttgtttcttaagttacatatgaagtcatttacttgaaaaattttatttggtttcagtattggagtattttccagatattttttctgtattgatttctaatttaattgcattacggtcagggagtattcatgtatgacttgaatacaagtaagtttattaagagtcgttttatggcacagattatggtccctcttagtaaatgttttgtgtacacttgaaaataatgtgcattttgctattgttggatgaaatgttctataaatgtcaattgtgtt

SEQ ID NO: 108052 - DNA, 450 bp, Homo sapiens
gaaagccattaatggctctttgatttctaaattgcagccttgaggctggactgctcccatcacaggccttggaggcagaagactgggaggtttggcttgatttaacaattctttcagtggatgttgaaaggataacatctacctgggcagtcaatttatgaccaagcttggcgaggtggctcatgcctgtaatcccagcactttagaacgctgaggtgggaggattgcctgaggccaggtggtcaagaccaacctgggcaacatagtgacaccccatctctacaaaaaattagaaattagccgggcatggtggcaggcacctgtagtccgagctactcagggtggagtgctgggctcaagtaggaggattgattgagcccagaagattgcagtgagctgtgattgtgccactgtactgcagcctgggtgacagagtggagaccctgtttc

SEQ ID NO: 108053 - DNA, 451 bp, Homo sapiens
cgggaggtggaggttgcagtgagccaagatcacggcactgcactccagcctgggtgacagaacgagactccatctaaaaaaaaaagaaaaaagaaaggagtacttgtgcccttctggcttcagctttgggccgtatctggacagcaggaagggccacataaccttctgtgactgtagtcgtctgtccagtactttctctgtgccacacacctgcactacagtaaccccgaggtagagtgccagtatcttcccttttcagataaggaagctgaccttgagagaggtttagtaactcacccaaggccatagttctaagcagcccaaaaagtatgcaaactcggtatcaccttaaagcagggaaagttgcagggataagagtgtagggcagagaaactatagccaaatgataactcggataataaaagtctacttggtttgtacgttctccgca

SEQ ID NO: 108054 - DNA, 423 bp, Homo sapiens
aggccaggagttcgagttcaagactagcctggtcaacacagtgagaacccgtctctgcaaaagcttcaaataaaaaaaaattagccaggctcagcagtatacctatagtcctagctacttggaaggctaaggcaagaagctcacttgagcttagggcttcaaggttgcagtgagctatgaccatgccattgcactccaacctgggtgacagagcaagacctcatctccaaataaataaagtattaaaattaaaattaaacctaccccaaattttgaggggtgaggaatatgtttatggccttgatggtagttatggtttcagtgatctatagttatctccaaagtaatcaagttgtatatattaaatatatacagctttttgttcaattatactctgataaagtgattttttaaataaaatta

SEQ ID NO: 108055 - DNA, 313 bp, Homo sapiens
aacagacaaaaccatagtttccatcagaattaggcagcttggagctttgccgattaggactagggcagccctaagcaccaggagaacccgggctagagtgtctctagcctatcaccaagttctcccagctacactcacaacggtcccagggaagcaggcggggatctcttggggaagaaggtgcttcctaaagggaggggctcactgacggagggatttaggacatgggagagaccaggtccacctctgagtaactcttcactctgctggattccaagagaaatgtctggccatgcacaaatgaagtcctgtg

SEQ ID NO: 108056 - DNA, 354 bp, Homo sapiens
atagagaacccagaattaaagccacatatttacagccaagtgatctttgacaaagttaacgagagcatacaatggggaaaagacatccttttcaataaatggtactgggaaaattggattgccctgtgtagaagaatgaaactggactgctatctctcaccatacacaaaatcaactcaagctggattaaagacttaaacctgaaactataaaaatactagaagaaaacctagggaaactcttttggatgttggtctaggcaaataatttattgttgaattctcagaagtacagacaacaaaaacaaaattggacaagtgggacttaaagaacttctgcacagcaaaagaaata

SEQ ID NO: 108057 - DNA, 291 bp, Homo sapiens
ggcagcagcctcagaaaagagatgggagggtccctagagttccctgggaacagcctccctgtttgccttcctttttcctgataatctgagtcagtttgggccttttatgttcaaggctgtccactgggcaccactccccagtcccgtgatcccacccaagagcaggaatcagttcttcctctccaagcgatttctgtgtgagtcaggacagtagtatgtcatcagggctggccaacaaagcaggggtaaggtctccctggaactagaggcatgtgcaggggctgcaaaact

SEQ ID NO: 108058 - DNA, 363 bp, Homo sapiens
tccttataattatctagttaatccagatctcaccattttataaacgaagaaactgagatagtttgtgagaaatttgcccatgttcctatatagttaatggcagaaccagaaacttgagttcctgatgcctacagtactgcagtcttctagtgtaatagacagttacagtgcataagcagcattttttcatattttgtgggctattcagttttgtcttctttgattgcctctttaaaagttggtttagccgagtgctgtggctcacacctgtaatcccagctactcaggaggctgaggtgaggggattgcttgaggccaggagtttgagattagcctgggcaatataatgagaccttgcctctt

SEQ ID NO: 108059 - DNA, 513 bp, Homo sapiens
tgctttccaaaagtcattttgaaccaaggctgatgatcattggtttgttttgcacaagagcgcgtactttgctagcagagtgagagtgagagtttgggcaggaggcagccaggcatgaagatgtaggaggcgtcctgccctcggccacgtgcggggatcagagttgggtgaaccctgcttaggagtcgttagaacacaatcctgagacagtttctcctccgaggtggttctgctgggtttctccatctcaactgctgttgtcctgggttacagttacaggcgcttgtgtgaattgcggtgttttaaagccttcagagcagaaggatgtgaacttgtccttctccttgtgcccctctctctgtcatcccacttgtaaattgtttctgggctggaggataagtgaggaggccacaggaacttttgcatgttgtctcttagcattttgagttaggaagagcaactgaaagaccgagctgaaagctacactgaacctcatcaacaattcacacactg

SEQ ID NO: 108060 - DNA, 307 bp, Homo sapiens
catgtacccagccagctgtattttgaagtaatgctaatgcaatctgaattgtaagaatatgtttcagcagatttgttaggtaagatatttgtgaaccgccaaaagtaatctctcaaatatttccaaaataataagcataatgggatattttgtccttttattgattccacattgagacagacatttttaaagttataaagagggtgggacaaaggaaacagtagtgctttttgggaaatctgattgatacaaatgtattcatatcatttatctgtatggttttgtattaactataactcattctggg

SEQ ID NO: 108061 - DNA, 236 bp, Homo sapiens
aatttccgattttttgctattaccagtgacacatatcttgatgtcttagattgttcctggagctgatggaggtgagtgaatggttcactttgagggccttcagatctgatcagccaccctctaaccaggaggtcagagatgcagattggagctccccttgtgttgttcacacagtggacatcaggacgtggtgaccacgtgttgcagctttgtatgtatgagctgccgcgtgctgc

SEQ ID NO: 108062 - DNA, 122 bp, Homo sapiens
gagtttccagctcctttggggcaggattaaaatattaattttagactttgttaggttaaaaaatgtgcatgctgtaatttctagtgcgaccacacaaaaaattaagaaacaaatatctcaag

SEQ ID NO: 108063 - DNA, 404 bp, Homo sapiens
ccaaagatggcatgataagatcattagtatttatgccaaagatagatgcagaacttctaaaggattttatgtgaagtagtgatctgataggattttcattaaaacactggttgcaggagagcaggtttgagtataaggaggctagttaggaagctattacacaaatttcaacattttctatgtttttgttcttaaaaaactctaatgtaggatgagaattcatgtttatgatagaaactaagtagctgtgtacggtgagaaggaagggaggaactgaactgagaaaggatgggataggaacactgcctgacagtttgaaaaactaataaagggtaataatgacttagaatgtataagattttccatcataaaaataatctactataccatgttacaaaactcac

SEQ ID NO: 108064 - DNA, 536 bp, Homo sapiens
gggatgaccctagggggtaggtggctgccattggctggggtctgcccctctgcagagtgcatgataatccccactttgccattaatgggaggattaaatagaaggtatagaagggtatgtggcacagacaaggcacacagtaggagcaccatagatattggctgcgtgatgatcataatggtatcaattgtctttaaaccccagtggctagactttcataaattgaagtttacttcccagtcaaccaggaccaagtttcaaaatggcttcttttcccccagggcaaggcaccctcagaaactaacgaaatcaggttacggcaaaacagtgcaaatttattttcagaaaacccaccccaagctcagagtctacacttaaagggtgtagaggtgtgagctgcagctagacgttacctgctggattctactctggtcatttctctccagagactccactgtcatcaagtgtgggatggctctgtttatgcttttgcagcctcagcctagcttgctggtttttcatgtctccctctgcct

SEQ ID NO: 108065 - DNA, 778 bp, Homo sapiens
ggatttttatatattcaatatattttaataatttacagttattattctttttattgctcaaattatttcattttacacacataagagttccttcaaacttattcctttgttatttcttcactgtaggaatcagtctcttctatttttatagaattgcacaaaatgtactcaaaggccctttctccccaacatttctaaacttagaaatatgtgttctatcttttacaaaaatgcagctagatgttatttaattttgctaagtaattttgcaaacccacatattttgtatttttaaattgttctacggtcattgacttctgatttttttctttaagttattactttttagattttggattgaacatttaactcacatgtttcagttttagtttttattaatacaggcaatgaatgcaatgtattttcctctgaatactgctgtgtctgtgtcatgtacgttatgatttgccttgttgataatatgcttattttctagcaatgctgcagtttcattctattcattgtatttcctctttaacccaagagtttttaaataaaaagttcttattgtccaagtaaagggacctttgtgcttcagccagtgtatgcttgtgtgtatatacatatatgtatgttattgatttctagttgtcttagtttgtgttccctctaaagcagaccctgagcaaagggatttgggtgcaatgcatatatttggaagacgatcccaaggagatacagtgagagactgtggatgtggtgcagggataatgagtgt

SEQ ID NO: 108066 - DNA, 415 bp, Homo sapiens
taagccagatgattaatgtcctcagagggcaaatgcatactttttgtttaggatgctctattctgactcctgcgattttggcaaggggtgctttctctgagagtatgccatgaatggcgtggccttcccttcactgtcctcatcgagcctatcccctgctgcagctgagcgcacctggtactcaggtcagagtcacagtgaagcacaaggcatggtctctgccctcacattatttacagtctagtggtgggtccaggtgctttaaatcgtggcagctacagtttatattattataactacatagtaactagtagctttatacttattgctgttttttttttaatttacattaatgtagggccttcctttgtaagatccttttatggtagcaaaatgcacaaatcttccatgtata

SEQ ID NO: 108067 - DNA, 484 bp, Homo sapiens
gctgaattgagtatgaatcctgaatttgttgaaggagctcacttccctagcaagggcctaattgcatgcctgttgcacctttgggttcagctctcacaaaccattagatcccgcttgctttctggtacctaaacttcctttcctgccctcaaactctattgtgcattaaaaaataacttatcgccagggtggtggctctcgcctgtaatcccagctactcaggaggccaaggtacaagaatcgcttgagcccaggaggcagaggttgcagtgagccaagatggcaccactgcactccagcctgggcaacagtgtaagactgtctcaaaacaagcaaataaaacccttatgctttacccatcatttccacatgtttgtagtgggacattcatattaaccataagtacctatttatcttttctatttgctgcaactatatgaaaatatatatggatataatcagactggaaaggactttgaaaatg

SEQ ID NO: 108068 - DNA, 272 bp, Homo sapiens
tgagatcgtgccactgcactccagctcaggcaacagagtgagacttggtctcaaaaacaaacaaacaaaagactttctgtcctggctgtgggttggcacccgttaaaactcagttccttgatttttcacaggcacttggcctcttttctgccttttgtggagggccctctgtttctggctgtgcattagcaaccattcttttaaacttctgattatattgaatcagcaactttaagcttgcacctgctgcttgtcatacatcctgtggcagt

SEQ ID NO: 108069 - DNA, 384 bp, Homo sapiens
ttccttgaaagaaatgtgtacttacctatgtttgtatgcatttaaatgcctaaatacagacccatgcacagatataaattttctgtctttgatatcctaaaatgactgatggtcatgtgcataaaagctagtctgagaaccctggagcctgccagacaggttgagcttctgagtaagcactgtagctattgcagtgctcagcccacacgatatgttttgcttaaagggaactatccaatccttggccggatggatgatggtggacactttggtttaatactgcttattactgtgtcactttaatttgcctaaaattgttcacagaacgttgtccttatatgtttctgggagttacttttccttgggctactgtgttggttttgc

SEQ ID NO: 108070 - DNA, 324 bp, Homo sapiens
caagtgactcatctgcctcagcctcccgaggagctgggattacaagcacccaccaccacacccagctaatttttggatttttagtagagatggggtttcaccatgttggccaggctggtctcgaactcctgacctcaagtgatccacctgccttggcctcccaaagtgctgggattaccagggtaagccaccacacctggcctagatacactttttatgctgtttgttctcgtgtagaatcagcctgccctgggatcctttgttagaaattgaccagccttatgttaagggtagtccgagcctgctgtgcagatgaggtggtgg

SEQ ID NO: 108071 - DNA, 462 bp, Homo sapiens
gcaccatcccaattcaggtatctatatcattcctactctcagaaaactgccagccaaatggtcttcttgcttctggctttctttctcttctgttctaaatactgcctcacagcagctcacctttgatgtaaagtctatcatgctatttgctaaattatgaaatccaaacccttggcctgaattccatgacaattcataatctggccactcttgtctctctaatgaaatctgcatccatttccacatgtgttctctttacccagaccagcttcctactacctcctgaggccctcagctacatttccaactccaaatatctgctcattctggaatgctgctccttccccgacctctgctgaccttaacttccctgtctcaaaagtccagcccagacccctcccaggagccttccctgacaatccagacaacactctggccccttctttgacctttcctagccct

SEQ ID NO: 108072 - DNA, 538 bp, Homo sapiens
acatcacttctgagatactttcctctcctatcaaaaagacctgtgaaaaacagtgacattttttcagcctccctccatcttttaaaattgaggccagatagacaggattttaatagatacagctacagataggctattgtgtatattagtcagagtagtgatgtcatcgccagtaggggagggagatgaaaaagctgagctgcctttcagcctctccccagtcatgccttcacactgtaaagtcctgctttggtctgaaagttaggcacatccatcaagttcggcatgcattccagagccaaattcaaagtgttttgggcattctcctctcctgtattttacataaacccttagtcagatgattgattccctctggccgccacttgggattgaatgggaggggtacgtactccaaaacaaatcataatcatattgtctttcccgcacatcctgagccattgggaactttctttttcttccaggtgaaatcaggtaaaaatgaactcagcgagggctgctttgaagggaaaaggaattc

SEQ ID NO: 108073 - DNA, 238 bp, Homo sapiens
ctaatggagctccatttaaccaacatcggccaggccttgataggagccaaggtctcagagaggcgatagagaccagcgacaagcagattccagaccctgtatggtccccttagaaccacatggccggggaggagatgcacaggtagacggtcagacctgtgtgtccaggcactgcttgctgagaagtctcagtggtcagcacacactgggaacacaacagcaaataaacagagaaaat

SEQ ID NO: 108074 - DNA, 481 bp, Homo sapiens
gccacactaaaccctgccaattttcacatgagtcagcttaaaggctcatgctttcccagtccagcttcagttaagaccacagtcccaatgtcataaaagacctaaaggcagaggtacccaactgaactgtgtccagattctggtccacataaattatgagatattatatgttgttgaaaagtgctgacttttagggcaatgttgtcagaaaggagcagatatctaacttcatctcccaggccctaggattctccatccctctacttatatcttcctcaggctgtttgcagccaaactttctaacctctgccgaactcacacctatgagtctcttcactaagggtggcttctccctgacacatacttgtgcagagatgtctccctgttgtcatccttatcatggattaaacatcaccacaatgaggccttagttcctcccatgcaataattttccagcttttcttctcaacattccacttta

SEQ ID NO: 108075 - DNA, 317 bp, Homo sapiens
tccctccactctctagatctattttgagccattaaaatgtgggtagtctgaattgagatctgtaataaatgctaagttacatcacgggtatgataagaacaaaagagtgttactatctcattagtttttatattatttacatattgaagataatattttggctatattggattacataagtattaaaataaacaacatgtgatttttcctttctaaaatacagtttactagcaaatttaaaattatgtatgtagatttaattatatttttattggagaatgctgctctagagtcttttattgatttttttctactaa

SEQ ID NO: 108076 - DNA, 342 bp, Homo sapiens
ctcaccagcaggtgccctttatggctctgtggacagactctgagcctgatggggaggcccctctgtgcagaagtcagctggactccttcgctgagctctcctgcagcactggggccttccaggatgcgtggaagagggcaatgggggcgggggcgcttccctagctgagtgctccatacgcctgctgcagaccctcactattttgccgtcaggagatggagcacagccttcgggttgcagcctggagggggcagatattcaagagcagaatttcttttctctcagttcttgttggatttatcaatgaagattcctggtgtaagttgaagacaccgtctctat

SEQ ID NO: 108077 - DNA, 332 bp, Homo sapiens
tcctgacctcaggtgatccacctgcctcagcctcccagagtgctgggattacaggcatgagccactgggcccagcggatcctatcatttttagctctctcctccctacagagctggtgtctagggcatcagggtctgggcagagtcatgatgcccctgccccatggggtgggatggggctggaggcttacaggggtgcctctccaggaggggtcccctccccatgatggacagggcagaaggagaggagggatctaggccgggcgcagtgattcacacctataatcccagctactcggaaggctgaggcgggagaattgcttgagcccagga

SEQ ID NO: 108078 - DNA, 444 bp, Homo sapiens
aaaacgagggtggggtctgtgggttgaaaaaatatattttccctcctgacaaagtaaaaaaatatgcaatgaaaaatagaagagagaaaagggggaaagagaataagatcttctatacaggcaattagtgggagtcaaaaatataatttaaaactgacaaataataaagaatactatttaagtaagaagaggtatgcatcatcatgcccagctaatttttccaactttttgtagatgtggggtctcaccatgttgcccaggctggtgtccaactccttgcctcaagtgatccacctcagcctcaatgtgctgggataacaggcatgagccactatgtccagccatccttgtacttatttctttttgagacagggtcttgctctgtcactcaggctggagtgcagtggtaggatgatagctcactgcagcctcaaactcctgggc

SEQ ID NO: 108079 - DNA, 177 bp, Homo sapiens
gaactgatcagcgagaaagccaggcctagaactcaaggtctgtttatatactgatactgtaagactggcaaaaacagtgccacttcattagccaaggcatactctgcaggacctacaaaaagtggttttttttttcttaagagtacttttaaaaatatttaaccaatactcgtctca

SEQ ID NO: 108080 - DNA, 278 bp, Homo sapiens
cagagctaaaaatagacccacacaaaggcacaccattataaaacttcatatcacagggaacaaggaaaatataatccaggcttccaggatcagggattaaacaggtcatctgtcaaagatcaggagtcagaatagctttccacttctctaaagcagtcctgaaagctaatagatgtggggaatgccttcacattttggaagggaaattatatccaagtcagaataatattttcaaccaaattattagccaagcgtgaaaatagaataaagttgttttc

SEQ ID NO: 108081 - DNA, 397 bp, Homo sapiens
ggtcgacccaaaacgactgtagaagatgctgtggtgtatagcacaaatccccaggcacaccatcgtcttactaacagctacaggagcaccccattattcctgtaggatgggatccaaaacccccagtgaaggcctaaaaccgcaaatagtaccaaaccctaatatactgttttttcctttgcatgtatatctgtgataaagtttaatttgaaaattaggcccagtaagagatgaacaacaataataataaaatagaacaattctcacagtatgccagcatcactactcttgcagctactaagtgactcataaggaggggaccttctgcagtgtggatccgctggacaaaggtagaattcaggtcctttgcaggacgaagctggatggtgcaagattt

SEQ ID NO: 108082 - DNA, 131 bp, Homo sapiens
catagacttttaaactggtacggttcttagagatggtccttggccttctgttgttgttttttttttttttttctttttcttcttctccttctccttcttcttctcttctccttctttcttctttttttttt

SEQ ID NO: 108083 - DNA, 212 bp, Homo sapiens
gataatgagcaaattgttcttttcttaactttgttcttacttttagggaagtccttgctctaattttgagaggaaagtagaattctaactgtaaaataaaggttcttggctactctgatacatatatcatctaaaagtgtaactgaccctgacagtggccctgtctcctaggaccccctcctttctcatagaatccagtacactggagagat

SEQ ID NO: 108084 - DNA, 285 bp, Homo sapiens
aggaaatgagaaccggtgcctttacatccaggccctgaggtgggcggtacaaggtaaagaccagagctggaagtgggtcaccggagacgtgaccacagcggacctgactccgcctaggttctgagccatcccttcctgccaggactgagatccgggtcccaccttctgccaaatgagcgacaaggtcctcaacttctccaaagttaaaaggcccagaagcctctgcagttttcgtcgggctggctgagggattcccgccccacctcgcccctcacagaggaaagg

SEQ ID NO: 108085 - DNA, 2774 bp, Homo sapiens
agcggaagcgcagcgggggcgggaaggttgtagtgccgcgagttgagctcctcttgcctaagtggtcgcgccccctttaagagcagcgattgtaaggagaggcggtcccggtgtcctcgggtcccaggtgattgtgaagtgctgaccaattgccactggacatacttgaaacaaaataggaaaatggcagcaaactcttcaggacaaggttttcaaaacaaaaatagagttgcaatcttggcagaactggacaaagagaaaagaaaactacttatgcagaaccagtcttcaacaaatcatcctggagctagcattgcactctcgagaccctctcttaataaggacttccgggatcacgctgagcagcagcatattgcagcccaacagaaggcagctttgcagcatgctcatgcacattcatctggatacttcatcactcaagactctgcatttgggaaccttattcttcctgttttacctcgccttgacccagaatgaagaaaacatttgcgatggaaaagtgactttgtaatatcaaatgccaaagctactatcattcagtgctacatgaactgtgactttaagaattttggtgaactttgatattttttgtttgtctgaaagaaaggaatgtgtaagtgaaagctgaaagaagaataaccaggatgatgagagctgtggaagctgtatcgtccaaggaattgattatgtaccgtgactgtaacttttttgtaatgctgtttaactctcaatcagactgtgaactggatggtcacgaagtcattccccaactcctagcaagtttgactgaatatatcatgtccacagtagattttcaagaatcatttatagtacttaactttaaagaaacaaggctgcttttaaaaaatgaactaataggcttaaatcaattgcatccatatttgctgtttataggattgctatcagtataccttttgcgtttatagtcaacatgtatcatcctgaaatattctttctggacttataactacttccccctttttcactttaaaacaaacctcaagaataaattactaaccagtcttaaccatcttttataaacatatgctcttataaatgttgtgactagatgcaattaaaaataatagggaatgtggtaggtttttaatttgtacatcctcttatttagtgttaccacataaatgatgagtttgtgtggttctgttttccatttttgttctaactgaaaactttttggctgggcacggtgcctcatgcctgtaatcccagcactttgggaggccaaggcgggcagatcacttgagatcaggagtttgagaccagcctggccaacatggtgaaaccctgtctctactaaaagtataaaaaattagccatgtgtggtggcacacgcctgtaatcccagctactcaggaggctgaggcaggagaatcgcttgaacctgggaggcaggggttgcagtgagctgagacggtgtcactgcactccagcctgggtgacagtgagtctttgtctcaaagaaaaaaagaaaaagaaaacttatgcaagtcgagctcctttttaattaagtaggaagggattaggttaagaaagtctctcaacatgacccatctttagcagtatctggggtgcttatttaagtatgcagtcccactaccctaccctagtcctacagaattagaatctgattcaaaataaagtctgaaaaccatgagatagagaattctatgaaatatcttgtacagattttcgtgatatatttatacacgcatgggtttgtagatccctgaaacttagaggtcatttagctaaaatctacattttttttaacttttaataggattgaaatgatattttacactgtatcacagatacagtattttatataactttttgtaactgaccttatcttggccttgagtcccatcctctctggtggtagcgtaaaactgaaaattccagttgggtcaatatttagtgaaagttctactttcttttcagagagtttgttcccccctttcttccttagatgttttcaaacacacagccccatcctactcaaaccaagtgaagcaagagtggacaattctagaattggctgtgccatgtaggttttttttagaatttgaactgatttccttcattttgatgaggtggcaactgtccccattgtaatggtcaccattgcagcgaggatagccttacttctgcggcgcagagctcctcagggggcctctggctcctgtccttcctcaggtccatccaactactccttgggcctccttatggtagccctcattgtcttgagttgatttcactaggtttctgttctctgtcatctgcaacataactgacatggttctaaatctgtctctaaggagataacacattagtatattttctacactattgaagcctctacctaatgtatgacttttgtagctcaggtaaagagatctttttaccagtgttatcgtttctagtctgtttgttagtcttcttttaaatagatatggcctaaatcctgtattcctggctaggaagcacttctctccacccctctgctttgagttacaaattcaattcaatttcctatgtatttattaatacctacagataaagtactgtgctttgggggacacaaaggtgactggtacctgctcttttaggaggtcaccgtgcagaggatcctattctggtacaccaatagttataaagcaagccacagcctgggcaacatagtgagacccctgtctctactaaaaaattaa

SEQ ID NO: 108086 - DNA, 1571 bp, Homo sapiens
gctgagacggtgtcactgcactccagcctgggtgacggtgagtcttgtgcctcatgcctgtaatcccagcactttgggaggccaaggcgggcagatcacttgagatcaggagtttgagaccagcctggccaacatggtgaaaccctgtctctactaaaagtataaaaaattagccatgtgtggtggcacacgcctgtaatcccagctactcaggaggctgaggcaggagaatcgcttgaacctgggaggcaggggttgcagtgagctgagacggtgtcactgcactccagcctgggtgacagtgagtctttgtctcaaagaaaaaaagaaaaagaaaacttatgcaagtcgagctcctttttaattaagtaggaagggattaggttaagaaagtctctcaacatgacccatctttagcagtatctggggtgcttatttaagtatgcagtcccactaccctaccctagtcctacagaattagaatctgattcaaaataaagtctgaaaaccatgagatagagaattctatgaaatatcttgtacagattttcgtgatatatttatacacgcatgggtttgtagatccctgaaacttagaggtcatttagctaaaatctacattttttttaacttttaataggattgaaatgatattttacactgtatcacagatacagtattttatataactttttgtaactgaccttatcttggccttgagtcccatcctctctggtggtagcgtaaaactgaaaattccagttgggtcaatatttagtgaaagttctactttcttttcagagagtttgttcccccctttcttccttagatgttttcaaacacacagccccatcctactcaaaccaagtgaagcaagagtggacaattctagaattggctgtgccatgtaggttttttttagaatttgaactgatttccttcattttgatgaggtggcaactgtccccattgtaatggtcaccattgcagcgaggatagccttacttctgcggcgcagagctcctcagggggcctctggctcctgtccttcctcaggtccatccaactactccttgggcctccttatggtagccctcattgtcttgagttgatttcactaggtttctgttctctgtcatctgcaacataactgacatggttctaaatctgtctctaaggagataacacattagtatattttctacactattgaagcctctacctaatgtatgacttttgtagctcaggtaaagagatctttttaccagtgttatcgtttctagtctgtttgttagtcttcttttaaatagatatggcctaaatcctgtattcctggctaggaagcacttctctccacccctctgctttgagttacaaattcaattcaatttcctatgtatttattaatacctacagataaagtactgtgctttgggggacacaaaggtgactggtacctgctcttttaggaggtcaccgtgcagaggatcctattctggtacaccaatagttataaagcaagccacagcctgggcaacatagtgagacccctgtctctactaaaaaattaa

SEQ ID NO: 108087 - DNA, 1636 bp, Homo sapiens
agcggaagcgcagcgggggcgggaaggttgtagtgccgcgagttgagctcctcttgcctaagtggtcgcgccccctttaagagcagcgattgtaaggagaggcggtcccggtgtcctcgggtcccaggtgattgtgaagtgctgaccaattgccactggacatattgagatcaggagtttgagaccagcctggccaacatggtgaaaccctgtctctactaaaagtataaaaaattagccatgtgtggtggcacacgcctgtaatcccagctactcaggaggctgaggcaggagaatcgcttgaacctgggaggcaggggttgcagtgagctgagacggtgtcactgcactccagcctgggtgacagtgagtctttgtctcaaagaaaaaaagaaaaagaaaacttatgcaagtcgagctcctttttaattaagtaggaagggattaggttaagaaagtctctcaacatgacccatctttagcagtatctggggtgcttatttaagtatgcagtcccactaccctaccctagtcctacagaattagaatctgattcaaaataaagtctgaaaaccatgagatagagaattctatgaaatatcttgtacagattttcgtgatatatttatacacgcatgggtttgtagatccctgaaacttagaggtcatttagctaaaatctacattttttttaacttttaataggattgaaatgatattttacactgtatcacagatacagtattttatataactttttgtaactgaccttatcttggccttgagtcccatcctctctggtggtagcgtaaaactgaaaattccagttgggtcaatatttagtgaaagttctactttcttttcagagagtttgttcccccctttcttccttagatgttttcaaacacacagccccatcctactcaaaccaagtgaagcaagagtggacaattctagaattggctgtgccatgtaggttttttttagaatttgaactgatttccttcattttgatgaggtggcaactgtccccattgtaatggtcaccattgcagcgaggatagccttacttctgcggcgcagagctcctcagggggcctctggctcctgtccttcctcaggtccatccaactactccttgggcctccttatggtagccctcattgtcttgagttgatttcactaggtttctgttctctgtcatctgcaacataactgacatggttctaaatctgtctctaaggagataacacattagtatattttctacactattgaagcctctacctaatgtatgacttttgtagctcaggtaaagagatctttttaccagtgttatcgtttctagtctgtttgttagtcttcttttaaatagatatggcctaaatcctgtattcctggctaggaagcacttctctccacccctctgctttgagttacaaattcaattcaatttcctatgtatttattaatacctacagataaagtactgtgctttgggggacacaaaggtgactggtacctgctcttttaggaggtcaccgtgcagaggatcctattctggtacaccaatagttataaagcaagccacagcctgggcaacatagtgagacccctgtctctactaaaaaattaa

SEQ ID NO: 108088 - DNA, 575 bp, Homo sapiens
atagctcactgcaagactccttgaatccctgggctcaagcaatcctcaacccttagcctcccaagtagctgagactacaggcacatgccaccatgcccagctaatttttttttttttttaatttttgtagagacagcatcttgctatgttgcccaggctggtcttgaactcttggcctcaagcagtcctctcgatcctcccaccttggcctcctaaagtgctgagattacaggtgtgagccactgcatctggcttacttattttgtctattgtctgttccactagtatgtaaagtcttagagagcaagaatttttgtttatttctttctcttcctcctttcctttcttcctcttttacttcgttcactactgtattccacataaaatatatttggcatatagtaggtgttcaatatgttgaaggaatgaaagaatttatagacttgagttgcaatataaaatgtatttttttttactgtgagttatggcaaaaaaagttttgaaagccgcttctaaataatgcagatgtcagtgctttgaccctggaataaaaactgaaatgacttagtgatttc

SEQ ID NO: 108089 - DNA, 965 bp, Homo sapiens
  misc_feature (965)..(965): n is a, c, g, or t
agcggaagcgcagcgggggcgggaaggttgtagtgccgcgagttgagctcctcttgcctaagtggtcgcgccccctttaagagcagcgattgtaaggagaggcggtcccggtgtcctcgggtcccaggtgattgtgaagtgctgaccaattgccactggacatacttgaaacaaaataggaaaatggcagcaaactcttcaggacaaggttttcaaaacaaaaatagagttgcaatcttggcagaactggacaaagagaaaagaaaactacttatgcagaaccagtcttcaacaaatcatcctggagctagcatgctcatgcacattcatctggatacttcatcactcaagactctgcatttgggaaccttattcttcctgttttacctcgccttgacccagaatgaagaaaacatttgcgatggaaaagtgactttgtaatatcaaatgccaaagctactatcattcagtgctacatgaactgtgactttaagaattttggtgaactttgatattttttgtttgtctgaaagaaaggaatgtgtaagtgaaagctgaaagaagaataaccaggatgatgagagctgtggaagctgtatcgtccaaggaattgattatgtaccgtgactgtaacttttttgtaatgctgtttaactctcaatcagactgtgaactggatggtcacgaagtcattccccaactcctagcaagtttgactgaatatatcatgtccacagtagattttcaagaatcatttatagtacttaactttaaagaacagcgctttaaaatgactataggtaatcatggtctatgcgaaaggatgctcagaaacttggtttagcacgttcccgaaattttgggctgatccctgctaaaccagaaatacgttattaaatgctaggggggtcaggaaaagggcatggccatagaaaagtggtgtcttatatgtaattactgcgcgn

SEQ ID NO: 108090 - DNA, 834 bp, Homo sapiens
atagctcactgcaagactccttgaatccctgggctcaagcaatcctcaacccttagcctcccaagtagctgagactacaggcacatgccaccatgcccagctaatttttttttttttttaatttttgtagagacagcatcttgctatgttgcccaggctggtcttgaactcttggcctcaagcagtcctctcgatcctcccaccttggcctcctaaagtgctgagattacaggtgtgagccactgcatctggcttacttattttgtctattgtctgttccactagtatgtaaagtcttagagagcaagaatttttgtttatttctttctcttcctcctttcctttcttcctcttttacttcgttcactactgtattccacataaaatatatttggcatatagtaggtgttcaatatgttgaaggaatgaaagaatttatagacttgagttgcaatataaaatgtatttttttttactgtgagttatggcaaaaaaagttttgaaagccgcttctaaataatgcagatgtcagtgctttgaccctggaataaaaactgaaatgacttagtgatttcaaaggcatatttgttttcctgaacaatctataaactgtctcattaagttgtctcagttatttgcttcacttcggcaacagaacctcagcctttacatgtgtttaaagcctcttgaggcaaaggatttggaaaatatggttacatggagaatagaagataatgagagagagtatcaattcattagtgcagttgaacccctctattggaatcccatcagcgagcacaagtcccatttcaacagcaataaatgcaacaagta

SEQ ID NO: 108091 - DNA, 366 bp, Homo sapiens
ctggagtgttaaaggcacgatcatggctcacggcagcctctacttcatgggctcaagcgatcctcctgcctcagcctcccaagtagctagcctacaggcacatgccaccaagcctgggtaatttcaattttttgtagacataaggtcttgaataaccattctgtttagtacatagtcaggtccaaacaacctagtaagtatttatgtcctaacatcttgtagttgttttaagttgcccaggctagtcttgaactcctggcctcaagtggtcctcccactttggctcctagcactttgtgagactaaggtgggaggatcgcttgagcccaggagttcaagaccagcctgggcaacatggtgaaatcc

SEQ ID NO: 108092 - DNA, 2631 bp, Homo sapiens
agcggaagcgcagcgggggcgggaaggttgtagtgccgcgagttgagctcctcttgcctaagtggtcgcgccccctttaagagcagcgattgtaaggagaggcggtcccggtgtcctcgggtcccaggtgattgtgaagtgctgaccaattgccactggacatacttgaaacaaaataggaaaatggcagcaaactcttcaggacaaggttttcaaaacaaaaatagagttgcaatcttggcagaactggacaaagagaaaagaaaactacttatgcagaaccagtcttcaacaaatcatcctggagctagcattgcactctcgagaccctctcttaataaggacttccgggatcacgctgagcagcagcatattgcagcccaacagaaggcagctttgcagcatgctcatgcacattcatctggatacttcatcactcaagactctgcatttgggaaccttattcttcctgttttacctcgccttgacccagaatgaagaaaacatttgcgatggaaaagtgactttgtaatatcaaatgccaaagctactatcattcagtgctacatgaactgtgactttaagaattttggtgaactttgatattttttgtttgtctgaaagaaaggaatgtgtaagtgaaagctgaaagaagaataaccaggatgatgagagctgtggaagctgtatcgtccaaggaattgattatgtaccgtgactgtaacttttttgtaatgctgtttaactctcaatcagactgtgaactggatggtcacgaagtcattccccaactcctagcaagtttgactgaatatatcatgtccacagtagattttcaagaatcatttatagtacttaactttaaagaaacaaggctgcttttaaaaaatgaactaataggcttaaatcaattgcatccatatttgctgtttataggattgctatcagtataccttttgcgtttatagtcaacatgtatcatcctgaaatattctttctggacttataactacttccccctttttcactttaaaacaaacctcaagaataaattactaaccagtcttaaccatcttttataaacatatgctcttataaatgttgtgactagatgcaattaaaaataatagggaatgtggtaggtttttaatttgtacatcctcttatttagtgttaccacataaatgatgagtttgtgtggttctgttttccatttttgttctaactgaaaactttttggctgggcacggtgcctgtaatcccagctactcaggaggctgaggcaggagaatcgcttgaacctgggaggcaggggttgcagtgagctgagacggtgtcactgcactccagcctgggtgacagtgagtctttgtctcaaagaaaaaaagaaaaagaaaacttatgcaagtcgagctcctttttaattaagtaggaagggattaggttaagaaagtctctcaacatgacccatctttagcagtatctggggtgcttatttaagtatgcagtcccactaccctaccctagtcctacagaattagaatctgattcaaaataaagtctgaaaaccatgagatagagaattctatgaaatatcttgtacagattttcgtgatatatttatacacgcatgggtttgtagatccctgaaacttagaggtcatttagctaaaatctacattttttttaacttttaataggattgaaatgatattttacactgtatcacagatacagtattttatataactttttgtaactgaccttatcttggccttgagtcccatcctctctggtggtagcgtaaaactgaaaattccagttgggtcaatatttagtgaaagttctactttcttttcagagagtttgttcccccctttcttccttagatgttttcaaacacacagccccatcctactcaaaccaagtgaagcaagagtggacaattctagaattggctgtgccatgtaggttttttttagaatttgaactgatttccttcattttgatgaggtggcaactgtccccattgtaatggtcaccattgcagcgaggatagccttacttctgcggcgcagagctcctcagggggcctctggctcctgtccttcctcaggtccatccaactactccttgggcctccttatggtagccctcattgtcttgagttgatttcactaggtttctgttctctgtcatctgcaacataactgacatggttctaaatctgtctctaaggagataacacattagtatattttctacactattgaagcctctacctaatgtatgacttttgtagctcaggtaaagagatctttttaccagtgttatcgtttctagtctgtttgttagtcttcttttaaatagatatggcctaaatcctgtattcctggctaggaagcacttctctccacccctctgctttgagttacaaattcaattcaatttcctatgtatttattaatacctacagataaagtactgtgctttgggggacacaaaggtgactggtacctgctcttttaggaggtcaccgtgcagaggatcctattctggtacaccaatagttataaagcaagccacagcctgggcaacatagtgagacccctgtctctactaaaaaattaa

SEQ ID NO: 108093 - DNA, 1587 bp, Homo sapiens
agcggaagcgcagcgggggcgggaaggttgtagtgccgcgagttgagctcctcttgcctaagtggtcgcgccccctttaagagcagcgattgtaaggagaggcggtcccggtgtcctcgggtcccaggtgattgtgaagtgctgaccaattgccactggacatacttgaaacaaaataggaaaatggcagcaaactcttcaggacaaggttttcaaaacaaaaatagagttgcaatcttggcagaactggacaaagagaaaagaaaactacttatgcagaaccagtcttcaacaaatcatcctggagctagcattgcactctcgagaccctctcttaataaggacttccgggatcacgctgagcagcagcatattgcagcccaacagaaggcagctttgcagcatgctcatgcacattcatctggatacttcatcactcaagactctgcatttgggaaccttattcttcctgttttacctcgccttgacccagaatgaagaaaacatttgcgatggaaaagtgactttgtaatatcaaatgccaaagctactatcattcagtgctacatgaactgtgactttaagaattttggtgaactttgatattttttgtttgtctgaaagaaaggaatgtgtaagtgaaagctgaaagaagaataaccaggatgatgagagctgtggaagctgtatcgtccaaggaattgattatgtaccgtgactgtaacttttttgtaatgctgtttaactctcaatcagactgtgaactggatggtcacgaagtcattccccaactcctagcaagtttgactgaatatatcatgtccacagtagattttcaagaatcatttatagtacttaactttaaagaaacaaggctgcttttaaaaaatgaactaataggcttaaatcaattgcatccatatttgctgtttataggattgctatcagtataccttttgcgtttatagtcaacatgtatcatcctgaaatattctttctggacttataactacttccccctttttcactttaaaacaaacctcaagaataaattactaaccagtcttaaccatcttttataaacatatgctcttataaatgttgtgactagatgcaattaaaaataatagggaatgtggtaggtttttaatttgtacatcctcttatttagtgttaccacataaatgatgagtttgtgtggttctgttttccatttttgttctaactgaaaactttttggctgggcacggtccactgcatctggcttacttattttgtctattgtctgttccactagtatgtaaagtcttagagagcaagaatttttgtttatttctttctcttcctcctttcctttcttcctcttttacttcgttcactactgtattccacataaaatatatttggcatatagtaggtgttcaatatgttgaaggaatgaaagaatttatagacttgagttgcaatataaaatgtatttttttttactgtgagttatggcaaaaaaagttttgaaagccgcttctaaataatgcagatgtcagtgctttgaccctggaataaaaactgaaatgacttagtgatttc

SEQ ID NO: 108094 - DNA, 1846 bp, Homo sapiens
agcggaagcgcagcgggggcgggaaggttgtagtgccgcgagttgagctcctcttgcctaagtggtcgcgccccctttaagagcagcgattgtaaggagaggcggtcccggtgtcctcgggtcccaggtgattgtgaagtgctgaccaattgccactggacatacttgaaacaaaataggaaaatggcagcaaactcttcaggacaaggttttcaaaacaaaaatagagttgcaatcttggcagaactggacaaagagaaaagaaaactacttatgcagaaccagtcttcaacaaatcatcctggagctagcattgcactctcgagaccctctcttaataaggacttccgggatcacgctgagcagcagcatattgcagcccaacagaaggcagctttgcagcatgctcatgcacattcatctggatacttcatcactcaagactctgcatttgggaaccttattcttcctgttttacctcgccttgacccagaatgaagaaaacatttgcgatggaaaagtgactttgtaatatcaaatgccaaagctactatcattcagtgctacatgaactgtgactttaagaattttggtgaactttgatattttttgtttgtctgaaagaaaggaatgtgtaagtgaaagctgaaagaagaataaccaggatgatgagagctgtggaagctgtatcgtccaaggaattgattatgtaccgtgactgtaacttttttgtaatgctgtttaactctcaatcagactgtgaactggatggtcacgaagtcattccccaactcctagcaagtttgactgaatatatcatgtccacagtagattttcaagaatcatttatagtacttaactttaaagaaacaaggctgcttttaaaaaatgaactaataggcttaaatcaattgcatccatatttgctgtttataggattgctatcagtataccttttgcgtttatagtcaacatgtatcatcctgaaatattctttctggacttataactacttccccctttttcactttaaaacaaacctcaagaataaattactaaccagtcttaaccatcttttataaacatatgctcttataaatgttgtgactagatgcaattaaaaataatagggaatgtggtaggtttttaatttgtacatcctcttatttagtgttaccacataaatgatgagtttgtgtggttctgttttccatttttgttctaactgaaaactttttggctgggcacggtccactgcatctggcttacttattttgtctattgtctgttccactagtatgtaaagtcttagagagcaagaatttttgtttatttctttctcttcctcctttcctttcttcctcttttacttcgttcactactgtattccacataaaatatatttggcatatagtaggtgttcaatatgttgaaggaatgaaagaatttatagacttgagttgcaatataaaatgtatttttttttactgtgagttatggcaaaaaaagttttgaaagccgcttctaaataatgcagatgtcagtgctttgaccctggaataaaaactgaaatgacttagtgatttcaaaggcatatttgttttcctgaacaatctataaactgtctcattaagttgtctcagttatttgcttcacttcggcaacagaacctcagcctttacatgtgtttaaagcctcttgaggcaaaggatttggaaaatatggttacatggagaatagaagataatgagagagagtatcaattcattagtgcagttgaacccctctattggaatcccatcagcgagcacaagtcccatttcaacagcaataaatgcaacaagta

SEQ ID NO: 108095 - DNA, 2693 bp, Homo sapiens
agcggaagcgcagcgggggcgggaaggttgtagtgccgcgagttgagctcctcttgcctaagtggtcgcgccccctttaagagcagcgattgtaaggagaggcggtcccggtgtcctcgggtcccaggttttcaaaacaaaaatagagttgcaatcttggcagaactggacaaagagaaaagaaaactacttatgcagaaccagtcttcaacaaatcatcctggagctagcattgcactctcgagaccctctcttaataaggacttccgggatcacgctgagcagcagcatattgcagcccaacagaaggcagctttgcagcatgctcatgcacattcatctggatacttcatcactcaagactctgcatttgggaaccttattcttcctgttttacctcgccttgacccagaatgaagaaaacatttgcgatggaaaagtgactttgtaatatcaaatgccaaagctactatcattcagtgctacatgaactgtgactttaagaattttggtgaactttgatattttttgtttgtctgaaagaaaggaatgtgtaagtgaaagctgaaagaagaataaccaggatgatgagagctgtggaagctgtatcgtccaaggaattgattatgtaccgtgactgtaacttttttgtaatgctgtttaactctcaatcagactgtgaactggatggtcacgaagtcattccccaactcctagcaagtttgactgaatatatcatgtccacagtagattttcaagaatcatttatagtacttaactttaaagaaacaaggctgcttttaaaaaatgaactaataggcttaaatcaattgcatccatatttgctgtttataggattgctatcagtataccttttgcgtttatagtcaacatgtatcatcctgaaatattctttctggacttataactacttccccctttttcactttaaaacaaacctcaagaataaattactaaccagtcttaaccatcttttataaacatatgctcttataaatgttgtgactagatgcaattaaaaataatagggaatgtggtaggtttttaatttgtacatcctcttatttagtgttaccacataaatgatgagtttgtgtggttctgttttccatttttgttctaactgaaaactttttggctgggcacggtgcctcatgcctgtaatcccagcactttgggaggccaaggcgggcagatcacttgagatcaggagtttgagaccagcctggccaacatggtgaaaccctgtctctactaaaagtataaaaaattagccatgtgtggtggcacacgcctgtaatcccagctactcaggaggctgaggcaggagaatcgcttgaacctgggaggcaggggttgcagtgagctgagacggtgtcactgcactccagcctgggtgacagtgagtctttgtctcaaagaaaaaaagaaaaagaaaacttatgcaagtcgagctcctttttaattaagtaggaagggattaggttaagaaagtctctcaacatgacccatctttagcagtatctggggtgcttatttaagtatgcagtcccactaccctaccctagtcctacagaattagaatctgattcaaaataaagtctgaaaaccatgagatagagaattctatgaaatatcttgtacagattttcgtgatatatttatacacgcatgggtttgtagatccctgaaacttagaggtcatttagctaaaatctacattttttttaacttttaataggattgaaatgatattttacactgtatcacagatacagtattttatataactttttgtaactgaccttatcttggccttgagtcccatcctctctggtggtagcgtaaaactgaaaattccagttgggtcaatatttagtgaaagttctactttcttttcagagagtttgttcccccctttcttccttagatgttttcaaacacacagccccatcctactcaaaccaagtgaagcaagagtggacaattctagaattggctgtgccatgtaggttttttttagaatttgaactgatttccttcattttgatgaggtggcaactgtccccattgtaatggtcaccattgcagcgaggatagccttacttctgcggcgcagagctcctcagggggcctctggctcctgtccttcctcaggtccatccaactactccttgggcctccttatggtagccctcattgtcttgagttgatttcactaggtttctgttctctgtcatctgcaacataactgacatggttctaaatctgtctctaaggagataacacattagtatattttctacactattgaagcctctacctaatgtatgacttttgtagctcaggtaaagagatctttttaccagtgttatcgtttctagtctgtttgttagtcttcttttaaatagatatggcctaaatcctgtattcctggctaggaagcacttctctccacccctctgctttgagttacaaattcaattcaatttcctatgtatttattaatacctacagataaagtactgtgctttgggggacacaaaggtgactggtacctgctcttttaggaggtcaccgtgcagaggatcctattctggtacaccaatagttataaagcaagccacagcctgggcaacatagtgagacccctgtctctactaaaaaattaa

SEQ ID NO: 108096 - DNA, 2823 bp, Homo sapiens
agcggaagcgcagcgggggcgggaaggttgtagtgccgcgagttgagctcctcttgcctaagtggtcgcgccccctttaagagcagcgattgtaaggagaggcggtcccggtgtcctcgggtcccaggtgattgtgaagtgctgaccaattgccactggacatacttgaaacaaaataggaaaatggcagcaaactcttcaggacaagacaaggtctcgctgtgttgcccaggctgatcttgaactcctggcctcaggttttcaaaacaaaaatagagttgcaatcttggcagaactggacaaagagaaaagaaaactacttatgcagaaccagtcttcaacaaatcatcctggagctagcattgcactctcgagaccctctcttaataaggacttccgggatcacgctgagcagcagcatattgcagcccaacagaaggcagctttgcagcatgctcatgcacattcatctggatacttcatcactcaagactctgcatttgggaaccttattcttcctgttttacctcgccttgacccagaatgaagaaaacatttgcgatggaaaagtgactttgtaatatcaaatgccaaagctactatcattcagtgctacatgaactgtgactttaagaattttggtgaactttgatattttttgtttgtctgaaagaaaggaatgtgtaagtgaaagctgaaagaagaataaccaggatgatgagagctgtggaagctgtatcgtccaaggaattgattatgtaccgtgactgtaacttttttgtaatgctgtttaactctcaatcagactgtgaactggatggtcacgaagtcattccccaactcctagcaagtttgactgaatatatcatgtccacagtagattttcaagaatcatttatagtacttaactttaaagaaacaaggctgcttttaaaaaatgaactaataggcttaaatcaattgcatccatatttgctgtttataggattgctatcagtataccttttgcgtttatagtcaacatgtatcatcctgaaatattctttctggacttataactacttccccctttttcactttaaaacaaacctcaagaataaattactaaccagtcttaaccatcttttataaacatatgctcttataaatgttgtgactagatgcaattaaaaataatagggaatgtggtaggtttttaatttgtacatcctcttatttagtgttaccacataaatgatgagtttgtgtggttctgttttccatttttgttctaactgaaaactttttggctgggcacggtgcctcatgcctgtaatcccagcactttgggaggccaaggcgggcagatcacttgagatcaggagtttgagaccagcctggccaacatggtgaaaccctgtctctactaaaagtataaaaaattagccatgtgtggtggcacacgcctgtaatcccagctactcaggaggctgaggcaggagaatcgcttgaacctgggaggcaggggttgcagtgagctgagacggtgtcactgcactccagcctgggtgacagtgagtctttgtctcaaagaaaaaaagaaaaagaaaacttatgcaagtcgagctcctttttaattaagtaggaagggattaggttaagaaagtctctcaacatgacccatctttagcagtatctggggtgcttatttaagtatgcagtcccactaccctaccctagtcctacagaattagaatctgattcaaaataaagtctgaaaaccatgagatagagaattctatgaaatatcttgtacagattttcgtgatatatttatacacgcatgggtttgtagatccctgaaacttagaggtcatttagctaaaatctacattttttttaacttttaataggattgaaatgatattttacactgtatcacagatacagtattttatataactttttgtaactgaccttatcttggccttgagtcccatcctctctggtggtagcgtaaaactgaaaattccagttgggtcaatatttagtgaaagttctactttcttttcagagagtttgttcccccctttcttccttagatgttttcaaacacacagccccatcctactcaaaccaagtgaagcaagagtggacaattctagaattggctgtgccatgtaggttttttttagaatttgaactgatttccttcattttgatgaggtggcaactgtccccattgtaatggtcaccattgcagcgaggatagccttacttctgcggcgcagagctcctcagggggcctctggctcctgtccttcctcaggtccatccaactactccttgggcctccttatggtagccctcattgtcttgagttgatttcactaggtttctgttctctgtcatctgcaacataactgacatggttctaaatctgtctctaaggagataacacattagtatattttctacactattgaagcctctacctaatgtatgacttttgtagctcaggtaaagagatctttttaccagtgttatcgtttctagtctgtttgttagtcttcttttaaatagatatggcctaaatcctgtattcctggctaggaagcacttctctccacccctctgctttgagttacaaattcaattcaatttcctatgtatttattaatacctacagataaagtactgtgctttgggggacacaaaggtgactggtacctgctcttttaggaggtcaccgtgcagaggatcctattctggtacaccaatagttataaagcaagccacagcctgggcaacatagtgagacccctgtctctactaaaaaattaa

SEQ ID NO: 108097 - DNA, 2623 bp, Homo sapiens
cggtcaagaagcgtcatcaaccccacgtgctccccagcaaaagccccacgaaccctggttttcaaaacaaaaatagagttgcaatcttggcagaactggacaaagagaaaagaaaactacttatgcagaaccagtcttcaacaaatcatcctggagctagcattgcactctcgagaccctctcttaataaggacttccgggatcacgctgagcagcagcatattgcagcccaacagaaggcagctttgcagcatgctcatgcacattcatctggatacttcatcactcaagactctgcatttgggaaccttattcttcctgttttacctcgccttgacccagaatgaagaaaacatttgcgatggaaaagtgactttgtaatatcaaatgccaaagctactatcattcagtgctacatgaactgtgactttaagaattttggtgaactttgatattttttgtttgtctgaaagaaaggaatgtgtaagtgaaagctgaaagaagaataaccaggatgatgagagctgtggaagctgtatcgtccaaggaattgattatgtaccgtgactgtaacttttttgtaatgctgtttaactctcaatcagactgtgaactggatggtcacgaagtcattccccaactcctagcaagtttgactgaatatatcatgtccacagtagattttcaagaatcatttatagtacttaactttaaagaaacaaggctgcttttaaaaaatgaactaataggcttaaatcaattgcatccatatttgctgtttataggattgctatcagtataccttttgcgtttatagtcaacatgtatcatcctgaaatattctttctggacttataactacttccccctttttcactttaaaacaaacctcaagaataaattactaaccagtcttaaccatcttttataaacatatgctcttataaatgttgtgactagatgcaattaaaaataatagggaatgtggtaggtttttaatttgtacatcctcttatttagtgttaccacataaatgatgagtttgtgtggttctgttttccatttttgttctaactgaaaactttttggctgggcacggtgcctcatgcctgtaatcccagcactttgggaggccaaggcgggcagatcacttgagatcaggagtttgagaccagcctggccaacatggtgaaaccctgtctctactaaaagtataaaaaattagccatgtgtggtggcacacgcctgtaatcccagctactcaggaggctgaggcaggagaatcgcttgaacctgggaggcaggggttgcagtgagctgagacggtgtcactgcactccagcctgggtgacagtgagtctttgtctcaaagaaaaaaagaaaaagaaaacttatgcaagtcgagctcctttttaattaagtaggaagggattaggttaagaaagtctctcaacatgacccatctttagcagtatctggggtgcttatttaagtatgcagtcccactaccctaccctagtcctacagaattagaatctgattcaaaataaagtctgaaaaccatgagatagagaattctatgaaatatcttgtacagattttcgtgatatatttatacacgcatgggtttgtagatccctgaaacttagaggtcatttagctaaaatctacattttttttaacttttaataggattgaaatgatattttacactgtatcacagatacagtattttatataactttttgtaactgaccttatcttggccttgagtcccatcctctctggtggtagcgtaaaactgaaaattccagttgggtcaatatttagtgaaagttctactttcttttcagagagtttgttcccccctttcttccttagatgttttcaaacacacagccccatcctactcaaaccaagtgaagcaagagtggacaattctagaattggctgtgccatgtaggttttttttagaatttgaactgatttccttcattttgatgaggtggcaactgtccccattgtaatggtcaccattgcagcgaggatagccttacttctgcggcgcagagctcctcagggggcctctggctcctgtccttcctcaggtccatccaactactccttgggcctccttatggtagccctcattgtcttgagttgatttcactaggtttctgttctctgtcatctgcaacataactgacatggttctaaatctgtctctaaggagataacacattagtatattttctacactattgaagcctctacctaatgtatgacttttgtagctcaggtaaagagatctttttaccagtgttatcgtttctagtctgtttgttagtcttcttttaaatagatatggcctaaatcctgtattcctggctaggaagcacttctctccacccctctgctttgagttacaaattcaattcaatttcctatgtatttattaatacctacagataaagtactgtgctttgggggacacaaaggtgactggtacctgctcttttaggaggtcaccgtgcagaggatcctattctggtacaccaatagttataaagcaagccacagcctgggcaacatagtgagacccctgtctctactaaaaaattaa

SEQ ID NO: 108098 - DNA, 2671 bp, Homo sapiens
agcggaagcgcagcgggggcgggaaggttgtagtgccgcgagttgagctcctcttgcctaagtggtcgcgccccctttaagagcagcgattgtaaggagaggcggtcccggtgtcctcgggtcccaggtgattgtgaagtgctgaccaattgccactggacatacttgaaacaaaataggaaaatggcagcaaactcttcaggacaagcattgcactctcgagaccctctcttaataaggacttccgggatcacgctgagcagcagcatattgcagcccaacagaaggcagctttgcagcatgctcatgcacattcatctggatacttcatcactcaagactctgcatttgggaaccttattcttcctgttttacctcgccttgacccagaatgaagaaaacatttgcgatggaaaagtgactttgtaatatcaaatgccaaagctactatcattcagtgctacatgaactgtgactttaagaattttggtgaactttgatattttttgtttgtctgaaagaaaggaatgtgtaagtgaaagctgaaagaagaataaccaggatgatgagagctgtggaagctgtatcgtccaaggaattgattatgtaccgtgactgtaacttttttgtaatgctgtttaactctcaatcagactgtgaactggatggtcacgaagtcattccccaactcctagcaagtttgactgaatatatcatgtccacagtagattttcaagaatcatttatagtacttaactttaaagaaacaaggctgcttttaaaaaatgaactaataggcttaaatcaattgcatccatatttgctgtttataggattgctatcagtataccttttgcgtttatagtcaacatgtatcatcctgaaatattctttctggacttataactacttccccctttttcactttaaaacaaacctcaagaataaattactaaccagtcttaaccatcttttataaacatatgctcttataaatgttgtgactagatgcaattaaaaataatagggaatgtggtaggtttttaatttgtacatcctcttatttagtgttaccacataaatgatgagtttgtgtggttctgttttccatttttgttctaactgaaaactttttggctgggcacggtgcctcatgcctgtaatcccagcactttgggaggccaaggcgggcagatcacttgagatcaggagtttgagaccagcctggccaacatggtgaaaccctgtctctactaaaagtataaaaaattagccatgtgtggtggcacacgcctgtaatcccagctactcaggaggctgaggcaggagaatcgcttgaacctgggaggcaggggttgcagtgagctgagacggtgtcactgcactccagcctgggtgacagtgagtctttgtctcaaagaaaaaaagaaaaagaaaacttatgcaagtcgagctcctttttaattaagtaggaagggattaggttaagaaagtctctcaacatgacccatctttagcagtatctggggtgcttatttaagtatgcagtcccactaccctaccctagtcctacagaattagaatctgattcaaaataaagtctgaaaaccatgagatagagaattctatgaaatatcttgtacagattttcgtgatatatttatacacgcatgggtttgtagatccctgaaacttagaggtcatttagctaaaatctacattttttttaacttttaataggattgaaatgatattttacactgtatcacagatacagtattttatataactttttgtaactgaccttatcttggccttgagtcccatcctctctggtggtagcgtaaaactgaaaattccagttgggtcaatatttagtgaaagttctactttcttttcagagagtttgttcccccctttcttccttagatgttttcaaacacacagccccatcctactcaaaccaagtgaagcaagagtggacaattctagaattggctgtgccatgtaggttttttttagaatttgaactgatttccttcattttgatgaggtggcaactgtccccattgtaatggtcaccattgcagcgaggatagccttacttctgcggcgcagagctcctcagggggcctctggctcctgtccttcctcaggtccatccaactactccttgggcctccttatggtagccctcattgtcttgagttgatttcactaggtttctgttctctgtcatctgcaacataactgacatggttctaaatctgtctctaaggagataacacattagtatattttctacactattgaagcctctacctaatgtatgacttttgtagctcaggtaaagagatctttttaccagtgttatcgtttctagtctgtttgttagtcttcttttaaatagatatggcctaaatcctgtattcctggctaggaagcacttctctccacccctctgctttgagttacaaattcaattcaatttcctatgtatttattaatacctacagataaagtactgtgctttgggggacacaaaggtgactggtacctgctcttttaggaggtcaccgtgcagaggatcctattctggtacaccaatagttataaagcaagccacagcctgggcaacatagtgagacccctgtctctactaaaaaattaa

SEQ ID NO: 108099 - DNA, 2592 bp, Homo sapiens
ctggagtgttaaaggcacgatcatggctcacggcagcctctacttcatgggctcaagcgatcctcctgcctcagcctcccaagtagctagcctacaggcacatgccaccaagcctgggttttcaaaacaaaaatagagttgcaatcttggcagaactggacaaagagaaaagaaaactacttatgcagaaccagtcttcaacaaatcatcctggagctagcatgctcatgcacattcatctggatacttcatcactcaagactctgcatttgggaaccttattcttcctgttttacctcgccttgacccagaatgaagaaaacatttgcgatggaaaagtgactttgtaatatcaaatgccaaagctactatcattcagtgctacatgaactgtgactttaagaattttggtgaactttgatattttttgtttgtctgaaagaaaggaatgtgtaagtgaaagctgaaagaagaataaccaggatgatgagagctgtggaagctgtatcgtccaaggaattgattatgtaccgtgactgtaacttttttgtaatgctgtttaactctcaatcagactgtgaactggatggtcacgaagtcattccccaactcctagcaagtttgactgaatatatcatgtccacagtagattttcaagaatcatttatagtacttaactttaaagaaacaaggctgcttttaaaaaatgaactaataggcttaaatcaattgcatccatatttgctgtttataggattgctatcagtataccttttgcgtttatagtcaacatgtatcatcctgaaatattctttctggacttataactacttccccctttttcactttaaaacaaacctcaagaataaattactaaccagtcttaaccatcttttataaacatatgctcttataaatgttgtgactagatgcaattaaaaataatagggaatgtggtaggtttttaatttgtacatcctcttatttagtgttaccacataaatgatgagtttgtgtggttctgttttccatttttgttctaactgaaaactttttggctgggcacggtgcctcatgcctgtaatcccagcactttgggaggccaaggcgggcagatcacttgagatcaggagtttgagaccagcctggccaacatggtgaaaccctgtctctactaaaagtataaaaaattagccatgtgtggtggcacacgcctgtaatcccagctactcaggaggctgaggcaggagaatcgcttgaacctgggaggcaggggttgcagtgagctgagacggtgtcactgcactccagcctgggtgacagtgagtctttgtctcaaagaaaaaaagaaaaagaaaacttatgcaagtcgagctcctttttaattaagtaggaagggattaggttaagaaagtctctcaacatgacccatctttagcagtatctggggtgcttatttaagtatgcagtcccactaccctaccctagtcctacagaattagaatctgattcaaaataaagtctgaaaaccatgagatagagaattctatgaaatatcttgtacagattttcgtgatatatttatacacgcatgggtttgtagatccctgaaacttagaggtcatttagctaaaatctacattttttttaacttttaataggattgaaatgatattttacactgtatcacagatacagtattttatataactttttgtaactgaccttatcttggccttgagtcccatcctctctggtggtagcgtaaaactgaaaattccagttgggtcaatatttagtgaaagttctactttcttttcagagagtttgttcccccctttcttccttagatgttttcaaacacacagccccatcctactcaaaccaagtgaagcaagagtggacaattctagaattggctgtgccatgtaggttttttttagaatttgaactgatttccttcattttgatgaggtggcaactgtccccattgtaatggtcaccattgcagcgaggatagccttacttctgcggcgcagagctcctcagggggcctctggctcctgtccttcctcaggtccatccaactactccttgggcctccttatggtagccctcattgtcttgagttgatttcactaggtttctgttctctgtcatctgcaacataactgacatggttctaaatctgtctctaaggagataacacattagtatattttctacactattgaagcctctacctaatgtatgacttttgtagctcaggtaaagagatctttttaccagtgttatcgtttctagtctgtttgttagtcttcttttaaatagatatggcctaaatcctgtattcctggctaggaagcacttctctccacccctctgctttgagttacaaattcaattcaatttcctatgtatttattaatacctacagataaagtactgtgctttgggggacacaaaggtgactggtacctgctcttttaggaggtcaccgtgcagaggatcctattctggtacaccaatagttataaagcaagccacagcctgggcaacatagtgagacccctgtctctactaaaaaattaa

SEQ ID NO: 108100 - DNA, 2602 bp, Homo sapiens
agcggaagcgcagcgggggcgggaaggttgtagtgccgcgagttgagctcctcttgcctaagtggtcgcgccccctttaagagcagcgattgtaaggagaggcggtcccggtgtcctcgggtcccaggttttcaaaacaaaaatagagttgcaatcttggcagaactggacaaagagaaaagaaaactacttatgcagaaccagtcttcaacaaatcatcctggagctagcatgctcatgcacattcatctggatacttcatcactcaagactctgcatttgggaaccttattcttcctgttttacctcgccttgacccagaatgaagaaaacatttgcgatggaaaagtgactttgtaatatcaaatgccaaagctactatcattcagtgctacatgaactgtgactttaagaattttggtgaactttgatattttttgtttgtctgaaagaaaggaatgtgtaagtgaaagctgaaagaagaataaccaggatgatgagagctgtggaagctgtatcgtccaaggaattgattatgtaccgtgactgtaacttttttgtaatgctgtttaactctcaatcagactgtgaactggatggtcacgaagtcattccccaactcctagcaagtttgactgaatatatcatgtccacagtagattttcaagaatcatttatagtacttaactttaaagaaacaaggctgcttttaaaaaatgaactaataggcttaaatcaattgcatccatatttgctgtttataggattgctatcagtataccttttgcgtttatagtcaacatgtatcatcctgaaatattctttctggacttataactacttccccctttttcactttaaaacaaacctcaagaataaattactaaccagtcttaaccatcttttataaacatatgctcttataaatgttgtgactagatgcaattaaaaataatagggaatgtggtaggtttttaatttgtacatcctcttatttagtgttaccacataaatgatgagtttgtgtggttctgttttccatttttgttctaactgaaaactttttggctgggcacggtgcctcatgcctgtaatcccagcactttgggaggccaaggcgggcagatcacttgagatcaggagtttgagaccagcctggccaacatggtgaaaccctgtctctactaaaagtataaaaaattagccatgtgtggtggcacacgcctgtaatcccagctactcaggaggctgaggcaggagaatcgcttgaacctgggaggcaggggttgcagtgagctgagacggtgtcactgcactccagcctgggtgacagtgagtctttgtctcaaagaaaaaaagaaaaagaaaacttatgcaagtcgagctcctttttaattaagtaggaagggattaggttaagaaagtctctcaacatgacccatctttagcagtatctggggtgcttatttaagtatgcagtcccactaccctaccctagtcctacagaattagaatctgattcaaaataaagtctgaaaaccatgagatagagaattctatgaaatatcttgtacagattttcgtgatatatttatacacgcatgggtttgtagatccctgaaacttagaggtcatttagctaaaatctacattttttttaacttttaataggattgaaatgatattttacactgtatcacagatacagtattttatataactttttgtaactgaccttatcttggccttgagtcccatcctctctggtggtagcgtaaaactgaaaattccagttgggtcaatatttagtgaaagttctactttcttttcagagagtttgttcccccctttcttccttagatgttttcaaacacacagccccatcctactcaaaccaagtgaagcaagagtggacaattctagaattggctgtgccatgtaggttttttttagaatttgaactgatttccttcattttgatgaggtggcaactgtccccattgtaatggtcaccattgcagcgaggatagccttacttctgcggcgcagagctcctcagggggcctctggctcctgtccttcctcaggtccatccaactactccttgggcctccttatggtagccctcattgtcttgagttgatttcactaggtttctgttctctgtcatctgcaacataactgacatggttctaaatctgtctctaaggagataacacattagtatattttctacactattgaagcctctacctaatgtatgacttttgtagctcaggtaaagagatctttttaccagtgttatcgtttctagtctgtttgttagtcttcttttaaatagatatggcctaaatcctgtattcctggctaggaagcacttctctccacccctctgctttgagttacaaattcaattcaatttcctatgtatttattaatacctacagataaagtactgtgctttgggggacacaaaggtgactggtacctgctcttttaggaggtcaccgtgcagaggatcctattctggtacaccaatagttataaagcaagccacagcctgggcaacatagtgagacccctgtctctactaaaaaattaa

SEQ ID NO: 108101 - DNA, 2249 bp, Homo sapiens
  misc_feature (17)..(17): n is a, c, g, or t
  misc_feature (51)..(51): n is a, c, g, or t
  misc_feature (59)..(59): n is a, c, g, or t
  misc_feature (100)..(100): n is a, c, g, or t
cccgctggcccgatgangaaccgcgtggaaatgctgtattcaatccaagcncttctccntgctctgacgtgcttaagagtgacttgaatggttgtcgaangaagaatgtgtaagtgaaagctgaaagaagaataaccaggatgatgagagctgtggaagctgtatcgtccaaggaattgattatgtaccgtgactgtaacttttttgtaatgctgtttaactctcaatcagactgtgaactggatggtcacgaagtcattccccaactcctagcaagtttgactgaatatatcatgtccacagtagattttcaagaatcatttatagtacttaactttaaagaaacaaggctgcttttaaaaaatgaactaataggcttaaatcaattgcatccatatttgctgtttataggattgctatcagtataccttttgcgtttatagtcaacatgtatcatcctgaaatattctttctggacttataactacttccccctttttcactttaaaacaaacctcaagaataaattactaaccagtcttaaccatcttttataaacatatgctcttataaatgttgtgactagatgcaattaaaaataatagggaatgtggtaggtttttaatttgtacatcctcttatttagtgttaccacataaatgatgagtttgtgtggttctgttttccatttttgttctaactgaaaactttttggctgggcacggtgcctcatgcctgtaatcccagcactttgggaggccaaggcgggcagatcacttgagatcaggagtttgagaccagcctggccaacatggtgaaaccctgtctctactaaaagtataaaaaattagccatgtgtggtggcacacgcctgtaatcccagctactcaggaggctgaggcaggagaatcgcttgaacctgggaggcaggggttgcagtgagctgagacggtgtcactgcactccagcctgggtgacagtgagtctttgtctcaaagaaaaaaagaaaaagaaaacttatgcaagtcgagctcctttttaattaagtaggaagggattaggttaagaaagtctctcaacatgacccatctttagcagtatctggggtgcttatttaagtatgcagtcccactaccctaccctagtcctacagaattagaatctgattcaaaataaagtctgaaaaccatgagatagagaattctatgaaatatcttgtacagattttcgtgatatatttatacacgcatgggtttgtagatccctgaaacttagaggtcatttagctaaaatctacattttttttaacttttaataggattgaaatgatattttacactgtatcacagatacagtattttatataactttttgtaactgaccttatcttggccttgagtcccatcctctctggtggtagcgtaaaactgaaaattccagttgggtcaatatttagtgaaagttctactttcttttcagagagtttgttcccccctttcttccttagatgttttcaaacacacagccccatcctactcaaaccaagtgaagcaagagtggacaattctagaattggctgtgccatgtaggttttttttagaatttgaactgatttccttcattttgatgaggtggcaactgtccccattgtaatggtcaccattgcagcgaggatagccttacttctgcggcgcagagctcctcagggggcctctggctcctgtccttcctcaggtccatccaactactccttgggcctccttatggtagccctcattgtcttgagttgatttcactaggtttctgttctctgtcatctgcaacataactgacatggttctaaatctgtctctaaggagataacacattagtatattttctacactattgaagcctctacctaatgtatgacttttgtagctcaggtaaagagatctttttaccagtgttatcgtttctagtctgtttgttagtcttcttttaaatagatatggcctaaatcctgtattcctggctaggaagcacttctctccacccctctgctttgagttacaaattcaattcaatttcctatgtatttattaatacctacagataaagtactgtgctttgggggacacaaaggtgactggtacctgctcttttaggaggtcaccgtgcagaggatcctattctggtacaccaatagttataaagcaagccacagcctgggcaacatagtgagacccctgtctctactaaaaaattaa

SEQ ID NO: 108102 - DNA, 1089 bp, Homo sapiens
agcggaagcgcagcgggggcgggaaggttgtagtgccgcgagttgagctcctcttgcctaagtggtcgcgccccctttaagagcagcgattgtaaggagaggcggtcccggtgtcctcgggtcccaggtgattgtgaagtgctgaccaattgccactggacatacttgaaacaaaataggaaaatggcagcaaactcttcaggacaaggttttcaaaacaaaaatagagttgcaatcttggcagaactggacaaagagaaaagaaaactacttatgcagaaccagtcttcaacaaatcatcctggagctaggtattgacactataatgtgggttttttgtttgttttgttttgttttgttttgagacggagtctcgccctgtcccccaggctggagtgcaatggtgcaatctcggctcactgcagcctccgcctcccgggttctagcgattctcctgcctcagcctcccgagtagctgggattacaggcacctgccacgacacccagcaaatttttgtatttttagtagagatggggtttcaccatgttggttaggctggtcttgaactcctgacctcaggtgatccacccgccttggtctcccaaaatgctgggattacaggcgtgagccaccatgcccggcaataatggatctgagggaagatactaaatatggcagagactgaatacctataataaagatcatcaagctacctaaatttggcctactttgcagaatgattaaaaagtggggcactagcagcaattgcagtaataaaaaaccatacaaaactcaaaaaaaaaaaaaggctataagggctaggtgcagtggctaacgcttgtaatcccagcactttgggaggctgaggcaggaggatcacttgaggccaggagtttgagaccagcctgggcaacacaagacctcacttgtttctactaaaaaacaaaaaaattagccaggtgtggtagggtgcacctgtagtgtgagatactcaggggcgatcacctgagcccaggagactcaggatgtagtgagttatgattgtgccactccactccactctaggtgacagagttagaccctgtctc

SEQ ID NO: 108103 - DNA, 688 bp, Homo sapiens
agcggaagcgcagcgggggcgggaaggttgtagtgccgcgagttgagctcctcttgcctaagtggtcgcgccccctttaagagcagcgattgtaaggagaggcggtcccggtgtcctcgggtcccaggtgattgtgaagtgctgaccaattgccactggacatacttgaaacaaaataggaaaatggcagcaaactcttcaggacaagagacagggtcttgctctgccgcacaggccagagtgcagtggcccatcatagctcattccactgagcccaagtgatcctcctgcctcagcctcctgagtcactgggactacaggcatgtagcaccacacctaactggaaaaaaaaaattttttttttaagagatagggtcttgctatgttgcccaggctgatctcaaactcctgtcctcaagtgatcctcctgcctcgacctcccaaagtgctgagattacaggtgtgaaccactgaacctggcccgtttttaaataaaaataataatgcaaataagaaataatttcctaaaagatgtctcaggtattaagacacctagaaattcagaaaatcaatgaaaataattctgtagcctggaattcaaacattattgaagtctgaagaacaattcccttctctacgtctgtatctggagggaaagaaggctattatatgagagtcactgtggtgt

SEQ ID NO: 108104 - DNA, 1220 bp, Homo sapiens
aagtgccagaaagatgattagagattagctgctgaaggagggccagggctgggaagaatgttccaagatcagggaacagctgtgcaaaggcttggaagaggaagagacattgggagcacagagacttgattatatcagtgtttgggtctcattgaggcaggtggcctgggtcttgtgggctgtagggagccatagaagggttttgaacagaggagtggcatgaacgttttatagactggtttggtagacaactttggaaaagcaagagatggtccacgtacacacatgagcctggaaggtgaggagaactctaatgtgatctgaattcccaaaagcagtccgtttggaggtgatcccatacagactcctgggcctggtccaagacttagtgaatagactctgccctcgaataaggttttaacaagtgcttcacaagattctgagcagccagctttgggaagacttaaattggatgactgtccaaaggtctccagtagaagggctgggtcagtttacctctctgaggttgttttatcatctctaaaattgggggcatgggtgaggtttgaactcagagcaatgctgtaaaacagatattgttttcacccccatttacagatgaggaaatgggcttggagaggtttaaacagcttacctcaaaccatgaagccaggaagtggctgagtctgagtttaacctttacatttatacagcattttatgggtctatgactttattcatagagttttccatgtctggtgtggatgagtctcctttggttcttgtggcctaggtagttatgctgagccccatagatagtgaaagattaggtccagtccttttgcttgagttgcttacagtctggccatggccagcatataaacagaaagttatggtgcaaagggaaacctgttctcccagaggggccaagggattgagaggagagagcctctagcaaccagggtgttttagtccattttgtgctgctataacaataccacagactggataacttataatgaacaggtatttattggctcacagttctgggtgctggggaattcagtgtcaaggggctggcaacttgtgagggccttcttgctgtgtcatcccatggcaggtgagagggcaagagagggcaagagggagttgaacttgcccttttataagggtgtcaatccacccatgagagtgcagccctcatggcctaataacctctt

SEQ ID NO: 108105 - DNA, 769 bp, Homo sapiens
tgtggcaaatcttttaaccggtcttcaacttttactaaacataaggtaattcatactggagtaaaaccctacaaatgtgaagaatgtggcaaagcatttttctggtcctcaaccctaactaaacataagagaattcatactggagagcaaccctacaaatgggaaaaatttggcaaagcctttaatcggtcctcgcacctcaccacagataagataactcattggagagaaatcttacaagtatgaataatgtgccaaagcctaagaaaaccctcaattcttaatagatataagattattcctactggagagaaactacaaacctgagagaggcgctaatgcttttgacagtacctaaaactttaaagaaaatcattctgctgaaaaatcctagaaatgtgaagaatgtgaaaaagcctttaaatgattgtcacacttgattgtaggtaagataattcatactggagaaaactaccagtgtgaacaacgtggccaagcttcgacaatgctcacaccctattgcacaggaaagcatttatacttgagaagaaatgtacaaatattggcaaagtaaaaaatccattaacacctgctcacatcttactcaaaattgtagagttcatagtaaataaaagcattaaaattctaattactctcagaagatctgtcagaaagtatgtctttaaagtatagaagagcatttattttgaaaaaaacattacacatatgaagaggattgtaatatctttacttgtaccacagatcttat

SEQ ID NO: 108106 - DNA, 398 bp, Homo sapiens
aaacaaacaaaactgggctagaaaacagtaagacaagagagtaatattgtcaatattgaagcaaaatgattttgaactctgaacttcgtacctgggtaaattattaactgacagtatatacatttccacacatatatgggctaaaatttatatttcatacacatcttctttggaagttactgaaggatacccttcaggaaataagaaaagcaacataaacacataggatctgagaaaccatagatataacctagaagagcagaaggttccaaagcaagacttatgtgatataggctgacagacccatacaggtgggagtgagagaccagggactcaagaaaggctgtttccaagaaactgactccacacaacagaagtgtaagaaggtaaatgacccc

SEQ ID NO: 108107 - DNA, 917 bp, Homo sapiens
aattttttgtatttttagtagagacggggtttcaccatgttggccaggctggtctcgaactcctgacctcatgatccacccgcctctgcctcccaaagcactgagactacaggagtgagccactgtgcccagcctactctggttttagtgcattcaagaggaacaaaaaaggaagaaaatcactagtaaatatacctctttctggttagagtggatgtttggaaattatatatatattatataatatatattatatatatacacaaacacgtacatacatgcacacacatatatgcctttttgattataggatagtataccaaaactcagaaatattatggaattaacagaatttagtaaggcagataagtagtaggtagaaaaatattaattttatcttccagcagaagcactgtgaaaaattagacaacaagaaaacattccattcaaaataatgacaataaggccgggcatggtggctcacacctgtagtcccagcactttgggaggctgaggcaggaggatcatctgaggtcaagtttgagatcagcctggccaacatggtgacaccctgtctctactgaaaatacaaaaatcagccagctatggtagtgtaagcctgtaattccagctactcgggaggtcgaagcagaagaatcacttgaacccaggaggcagagattgcagtgagccaagatcctgccagtgctttccagcctgggcaacagtgtgaggctccatctcaaaaaaaaaaaaaaaaaaaagacaatagcaataaacattaagaaatgtgtaataggaatggcacacacaaagaaggaatggcacagagcctgtatgcagaagaccacaaacccttatttaacgacgtaagccaagatccaaagaaaatgatagattctcagatgggaaaacta

SEQ ID NO: 108108 - DNA, 327 bp, Homo sapiens
gaggggccagtactgagtggagagacaaggggtgcaaaggtcacacacttgtaacaaatcataatctgagccctgtatttcaaaaggagctatatctgtgggatctgacactcaaatatttcattctagcacggtaggcacatttgcattcgataaagcacgcagctgcattgcttttgaagaaagccacatttaataagcgttcaaaccagtatcgaccagccaacaccccttgtataggattctgaggctatcagggattgtagatttcatatagttaatcctccatcccataatatgattccagtaacgatccttctctttgat

SEQ ID NO: 108109 - DNA, 257 bp, Homo sapiens
gaagaggaccaagttggagtcaaggagatatattagaaagatactatggtcatccaaggagaaagtgatgaggtcaggagaagtggcatttgagaagaaggatagatttgagaggattataatcaggagggcttgattggtgactaactgcttttggttaaatagtgaaaaagaagagtctgggcttttagtttgagcaactgagtgagatctggcattcactgggaagggaaatagaagaaaaggaaggatttggg

SEQ ID NO: 108110 - DNA, 217 bp, Homo sapiens
ctggacaaatatactgcccttattctctggtatttttttgttttaaatttgaacagttttgaaggagtaagactgatatgtaaatatatatcaggatatcattttctgaacttagattgaaaaatatgtttcttgacaagtgctcttgacaagcgcatgttctgtagtaattgaagaacatagctgggagaggtggctcacgcctataatccctgaa

SEQ ID NO: 108111 - DNA, 700 bp, Homo sapiens
gtgactacaggtcctccccaccacgcctggctaattttcttgcatttttgatagagatggagtttcgccaggttgcccaagctggtctcaaactcctgagctcaagcaatccgcccaccttggcctcccaaagtactgggcttacaggcgtgagccaccggacccagcaaaaaaattaaaactgataataataagtaatgtaaacatatgaggcgatggaaggtcactgttgtttgaagtataaactggtatagcctttttggaaaataatcacaatatctcaaaaaattaaaaatgaagattgaaaatacctccaacattttcacttctatgcatataaactagaggaatttctcaaggagattgggtaagaatgtttgttgtgttatttgtaacagtggaaaaagtatactgtaaatctgttcaagactaggtaaatgtaatatccataaaatggataacagtgaaactatatgtattgttttctttttcaagccattaacatggattattttggttgtaggttaaatatgttctgtattataaccctctccaactgtgtaggaacagatttgctaatttacgtttgtagagttttcccttaagtgatcattattactgatatttccctaaattcaagatttttttccttaaacattgacttctcttaatctattcaaggaaaatagtagtattcaaa

SEQ ID NO: 108112 - DNA, 440 bp, Homo sapiens
gcagaggcaattaacaggctcgcagttcccccactgcccacatcctgaaaaacatgtgggcattaaggaggttgttctgataaaggaagcagcccctctccttgggtcgtgaagctttttagttgcatgactgaggcactagcccctctcctggcatgctcatggtctagtgtccaagcctactgctccagctttgtgatggggtggcacttggcttcggccctactctccttttttggctttcacgtctgggagtgccccgagtcctccctgcataatcaaaggctagcattcaagacttaaaattgcaggggcaggatgtggtcagccacccaatggcctgcaacctggatccactgaagcaggttttcatggagcaatttagttcccaaatagtttgcaagtggcaacttgagctctgagtggccggcctgcacagg

SEQ ID NO: 108113 - DNA, 593 bp, Homo sapiens
gtttaaagaaaacttttgagtttttagaagttggcacatcatatactgtctatggcttaaaaaacctctagctttgtcagttgtgttagctctgataaactttgcaggtcttcctggaatcagagacaaagcaataaacaataaattgttccgtctttagatgtcagcattgcttatgttacatcattcctcagatgtaaagtatatttgaagggtttttttagtttttttaaaatattttgctcttctgcagactaagagcccatgtttatcccattaaatatattttttgaatatagatacggtttttcattaatcttcacagaaggatcactatagatatctcatggttatatgactttatttctaagtctgggttttaatgacacttttgcatgtaggagtccatctctaataagcaatagcttgtgaaacagcttttaataaggtcatgaaattctgatccagccccttggcagatgtctctgactcttattcagagctctttttaagcaacgtgtctctataggctaaaagctataaccctaaaaatattttgagaatttacatacatacatagatacatcatatat

SEQ ID NO: 108114 - DNA, 276 bp, Homo sapiens
gtttttatgcacagatgtagatgtagagggaacttagaaggaataagtcaaccaatggaaatgtcatcagtgtaaattttttcttttctaggagtctgcccatgatgaaatgccttaggtcttccttacctttttattggcagtcacattataaagtgtcttatgacatgtctcttaatgtatatttaaacctttgaattactcttttactttttatatcaagccatatgtacccaaaatgggtcataagtttgagaatttaatactttcgttact

SEQ ID NO: 108115 - DNA, 244 bp, Homo sapiens
gttttggtatcaggatgctgctggcctcatagaatgagtcagggaggagtccctgcttttcaattgtttggaatagtttcaaaaaaaagggtatcaactcctctttgtacttctggtagaattcagctgtaaatccatctggtcctgggatttttttcattggtaggctattattgccttaatttcagaacttgttactgatctattcagggattcacctttttcctggttaatcttgggaggg

SEQ ID NO: 108116 - DNA, 744 bp, Homo sapiens
gtgatttgtgtgctgggtgcagtctttagtttcttagattataaatttctaattgtgctaaacccattccgcaacttaagtaaaagtagggttaatggagagagaagtgtaaaatcttccaaaaatcaaaacctgaatgaagctccccaattagagattgtagtgttgtttccgtatggctactctgtggtaggaagcagagagaaacagtatattgggatatttaagtgctcttttgtcttgtaaatgaggaatttctgtgttgaattgtgtgctgagatgaggagattccataaattgttatggtgttagttaattattcagatagcattagataagaatacatttatcaatgtttcatttctttcttaagttttaaaaatgcttagcatagtcagattctatctggtaggagtaagagaaattattaaaccttaaccattgtagctggtttttaaattttttcttcataatttgtattatactgtttccacaagttcaatactcatggaaaattctgtattttaaaaaagacttttgttagaaaagggaacaggtacttttttcttctggggatacatgctattgagtacagggactggcctgggttagtagactgtgtactttgctgttttgtacatctttcatctgtttctcagaccccacatctgtatcctcgtggcacctttgtgcaggcagtctggtccctggaataagacctgctgttttgatttggtgattccc

SEQ ID NO: 108117 - DNA, 325 bp, Homo sapiens
aggcagtggtggggctcagccttgtccaagctcacacaacactaagcatgatgtgagggcagagaagggcagggccctggcccaaatcatgcagcctctctgcttcccacataacctcactgtcacctgcttgcaagtgaacaaggggcaggggaaggaagttttgggagatgaaggcagccaatagaagaggaagaggaggttcaggcccgtgtccacacactaagactcactctgcatggactaagctccatgcagaccaaggccccaggtcgatctcaaacaattgtcaattagagctgagcccaagaagtccaatcctggg

SEQ ID NO: 108118 - DNA, 305 bp, Homo sapiens
taccagcctgaaacatcaggctggctccaccctgctgcagttggaggttaagcattgccctcgatttgctttgcccagtgaaaggtgcaacacttctagagagaagttctcagagctggttaattatttggcgtgtgctcttctctgtaacagtaaagcctctgccagccagaatcactgagtaccaataaagaatgaaagctccctttctgcctagccaaggtggacataaaacttgagcaacaggtaaaccttgattggcccaagcactgagagctttttagtattgcaataaaagccagact

SEQ ID NO: 108119 - DNA, 565 bp, Homo sapiens
gccagggatcataatgacaacaatcagttgaagaaaaaccaggaccaagcaaaccaaagacgcaccagtaaactgcacaggggacagcatgtggtaagttgaataaaataaacatggcaattcctattcccttgctggctattgcccaagtttaatttggcatatgaggacataggccatgtcacagttatcctagcaaaacaaatctgagaacaccttacttggggccattttaattctgcctctgatagtctacctctcctatagaatatcacctgaccttgaattacattacagatctcttagtcactatattactctttaggaaagatataaattttactatctaagtcaaagcccctgcgtcatgattattccaaagtttcattgtcactggcctatgactaggaaactaattttataatcagcataaaactatttatctcacctttggccaagtagccagtgacatcattctcctatatcaagaaatcagtctgtgaacagatgaaccacgatataggcctagtaataatcttatgcacgttaaaactgttgtcgacgc

SEQ ID NO: 108120 - DNA, 1533 bp, Homo sapiens
atgtttgagaagacttgtttatttaaatatttatttatttttaaaagactagtcaagtggaagtggggaaagagtggtacaacgggcaaccaactgtgaataaccaattgagacaattcactaccttgggaccagccaaagcttgctttttaaagtaaccttgaaatacataccatattccatattatacaaagctttacatattgctcttagttttgaaatagaaaaagaacttttgaagagaataagaatcataaaactaggtctaaaaattgtaacacctgttcttcataaaacatatataactttatttacattaatacattatttaggaggttcaagcctttaacataacccttcccattaatctataactgtaaagagttcatgtatatttctcattttctgcacatatgtattaatgtaaaaaatttgtcctgccgtattttttttagtcaacaattatctggagcattttatcagttcgtgattcaacttctaatacatatgtcgcttaagagtaaaaagcccctccataacttgaaaacatcttttttttcttaacctgaaataggcttaaattctcacattgtcagatgagtcttaacactttagtatttgctaaatttagcatattaaaattttttaaaaggagtataagggccctaaattggaaaaaaaaactctactacgatcataactgtgggatttcatttccagttcattctgtcagaatcaatctaaagtccatgtaatgtaaacagttcgaaaaaagtcttaaaaatgaattgttgactttaaacacacaatcttcggagccgctcacaacgtccgtagaagcagactcctccccgctcctggggaaaaccctgcctaatatttataacgttatgacatactgtaatactcacaaggtggttgtagaagtataaacacgactggagttatctgattggctgctggtgatgtaacacccatgtcaatacttcccagtgaacgcacgtgttcgaccttttatttaaatttccatttcatcacagcaataagacactcggggcggtgcattttctgtgaaatgactactgtccggggcccgaggtgctgcctcgcacaatgcatcaaaggaggttgtgtccgtggtcgtaacctcttcgcgtgaaaggcaccgcctggtccagtctttgtgaaggaacaaaataagttcacttccttgggcaccgccacccaccctcagcaaatgacaaggctggagcgcagctcccaccgcacagttatttgcaaagtcccaggtgaactcgtggcgagagaaggaaaatgcgcgtcccgggcgcgggtaggtgcgtgtgggcagcggggaggcggccagaccctgacactcgccagctgtttgtcctccgcgtagcccggccccggccgcacacgcccgccccctccctgagacccccagcccgccgcccggccttttgtccccaacccctcggccgacttccttccccgcggccgcacccccgcccccaggccggaggcgcagcc

SEQ ID NO: 108121 - DNA, 1479 bp, Homo sapiens
atgtttgagaagacttgtttatttaaatatttatttatttttaaaagactagtcaagtggaagtggggaaagagtggtacaacgggcaaccaactgtgaataaccaattgagacaattcactaccttgggaccagccaaagcttgctttttaaagtaaccttgaaatacataccatattccatattatacaaagctttacatattgctcttagttttgaaatagaaaaagaacttttgaagagaataagaatcataaaactaggtctaaaaattgtaacacctgttcttcataaaacatatataactttatttacattaatacattatttaggaggttcaagcctttaacataacccttcccattaatctataactgtaaagagttcatgtatatttctcattttctgcacatatgtattaatgtaaaaaatttgtcctgccgtattttttttagtcaacaattatctggagcattttatcagttcgtgattcaacttctaatacatatgtcgcttaagagtaaaaagcccctccataacttgaaaacatcttttttttcttaacctgaaataggcttaaattctcacattgtcagatgagtcttaacactttagtatttgctaaatttagcatattaaaattttttaaaaggagtataagggccctaaattggaaaaaaaaactctactacgatcataactgtgggatttcatttccagttcattctgtcagaatcaatctaaagtccatgtaatgtaaacagttcgaaaaaagtcttaaaaatgaattgttgactttaaacacacaatcttcggagccgctcacaacgtccgtagaagcagactcctccccgctcctggggaaaaccctgcctaatatttataacgttatgacatactgtaatactcacaaggtggttgtagaagtataaacacgactggagttatctgattggctgctgatttaaatttccatttcatcacagcaataagacactcggggcggtgcattttctgtgaaatgactactgtccggggcccgaggtgctgcctcgcacaatgcatcaaaggaggttgtgtccgtggtcgtaacctcttcgcgtgaaaggcaccgcctggtccagtctttgtgaaggaacaaaataagttcacttccttgggcaccgccacccaccctcagcaaatgacaaggctggagcgcagctcccaccgcacagttatttgcaaagtcccaggtgaactcgtggcgagagaaggaaaatgcgcgtcccgggcgcgggtaggtgcgtgtgggcagcggggaggcggccagaccctgacactcgccagctgtttgtcctccgcgtagcccggccccggccgcacacgcccgccccctccctgagacccccagcccgccgcccggccttttgtccccaacccctcggccgacttccttccccgcggccgcacccccgcccccaggccggaggcgcagcc

SEQ ID NO: 108122 - DNA, 434 bp, Homo sapiens
gctaacaaataccgacatagacatgaagtgagaacatgctgttggaaaaatggtgccaacagacttgctggatacagggtttgcccacaaaccttcaatttgtaaaaagcaaaaaaaaagtcaactgcaaaaaatgaagcgtgcctatatcctccgtgagcttgtatactatccccacttaccctcccagaattttaccctgaatgcatttcctatgctttcaagtcttttatcaccctagcatataaaaatatgtacataaacttaacttttatttaacttctaggcattaacatttttggtttgaactgttacaactgcaattattagtaatgcaaaacaaatcaaaacaaaatatatcagaaactttgatagataattatgatattaaaagcaaaattatattaaaaatgcttttcaagaggaaaaaaaaa

SEQ ID NO: 108123 - DNA, 796 bp, Homo sapiens
tgtgtaaaggatatggagcctgtaaaagcctttttttttgggaaattctttttttaaaaaaagggttttttggaatagaccattgttgtggaaaaagatttatattcgacaaaaagtggagtccaaatttttttaaaaaaggattttggtcaaatctgggacatgggttaagcttatgactggtttagaaaaatattttagaggggtttttacgattttaacccattgggttaaagtggggtttatttgacggctttttttggggagtttccacgggtttttccccactaagatttcgaataaccggccaatatgggtttatgttccggacgttttcgtgagtgggccaagtgggttaaaaggtgacgggcgaaataaagattgggctgcgaaaatgattaagttggggaaagtcgggggttttttctgtattttttcttgtttatgtattggtcatttttttttttttttttttttattttttgtttttttttttttttttaatttttttttttttttttttttttttttttttttttttttttttttttttttttttttttttttttttttttttttttttttttttttttttttttttttttcttttttttttttacataaacttaacttttatttaacttctaggcattaacatttttggtttgaactgttacaactgcaattattagtaatgcaaaacaaatcaaaacaaaatatatcagaaactttgatagataattatgatattaaaagcaaaattatattaaaaatgcttttcaagaggaaaaaaaaa

SEQ ID NO: 108124 - DNA, 113 bp, Homo sapiens
cgctgaaatgaggcttgccatggcctggcagatcagactgttcgagaaagaggggatgtggcaggcacaagaggaaagccatccaaaaggaatagaaaagggatcaggggtca

SEQ ID NO: 108125 - DNA, 380 bp, Homo sapiens
cttgccctctgctactcttcacacagctccttctcttcgcatctgttgggtctcagcttgaacggtatctccccagagaagccctccctggccacgcttcgtggcgcctgtttgcttccccatcacacttctctgaagctctgatttagctgatgatgagctgatttcctagctctgtctcccacaagactgtaagctcctggagggcaggggctatgttggtctcatccctgactgtattgacgccaatgtgtatagcacctgacacccagggagtgctcagtaagtaaacatctgctatattaagccggctgtggtgacacaagccagtagttctagctactccggaggctgagacagaaagatctcttcagcccagg

SEQ ID NO: 108126 - DNA, 118 bp, Homo sapiens
atttttctttctaaaatctgtaagatgattttacagaaataaaaacattagaagctatgatcacaccactgcactccagcctgggcaacagagcaagaccctgtctcaaaaaaaacca

SEQ ID NO: 108127 - DNA, 1080 bp, Homo sapiens
ctgtgtgtggaaagatcacatattgtgtagaatcgtggcgagagctcacaacgggcctgtgtttgccatgtacaccaccctgcgagatggacttatcgtgactgggggaaaggaaaggccgtcaaaagaaggaggagcggttaaactgtgggatcaggaactgaggcggtgccgtgccttcaggcttgagacaggacaagccacagattgtgttcgttctgtgtgcagaggcaaaggcaagatccttgttgggacaaggaatgctgaaataatcgaagttggagagaaaaatgcagcttgtaatattttagttaacggtcatgtggatgggccaatctggggactagcaacacatccttccagggattttttcctttctgctgcagaagatgggacagtgagactttgggatattgctgataaagtaagtacagataatttttttaaaagaggttacaacttctaaaaagaaaagttggaagttctaaattgctagtacttaaagaactgccagaattctgttgagcattttgaggggaaactggtataatttagaagtacttcacttaatgtttcctatgactcttttttttttttttttttaaatgcagaagatgttaaacaaagtgaatttgggacatgctgctcgtactgtgtgttacagccctgaaggggacatggtggctattggaatgaaaaatggagaatttatcattttactagtgagttctctaaaaatatggggaaagaagagagacaggagatgtgcaatccatgatatcaggttagtgaacaaatggaatagagtttctagtatatacttgatttaacttccatttgtaaaattttccatagccttgccttcaaaaagaggtccccagggcctgtagcatttcccgtattataaattgtatgctaaaatatggctgtttgtatactacttaattcttcttgctaaattataaacccactgggcaccaactataatagcaagtactagtaggtaatgttttgattgaattcatgttaacacttagccatgtccattaagttcatcccaccaagaggtatctcccactg

SEQ ID NO: 108128 - DNA, 1320 bp, Homo sapiens
ctgtgtgtggaaagatcacatattgtgtagaatcgtggcgagagctcacaacgggcctgtgtttgccatgtacaccaccctgcgagatggacttatcgtgactgggggaaaggaaaggccgtcaaaagaaggaggagcggttaaactgtgggatcaggaactgaggcggtgccgtgccttcaggcttgagacaggacaagccacagattgtgttcgttctgtgtgcagaggcaaaggcaagatccttgttgggacaaggaatgctgaaataatcgaagttggagagaaaaatgcagcttgtaatattttagttaacggtcatgtggatgggccaatctggggactagcaacacatccttccagggattttttcctttctgctgcagaagatgggacagtgagactttgggatattgctgataaagtaagtacagataatttttttaaaagaggttacaacttctaaaaagaaaagttggaagttctaaattgctagtacttaaagaactgccagaattctgttgagcattttgaggggaaactggtataatttagaagtacttcacttaatgtttcctatgactcttttttttttttttttttaaatgcagaagatgttaaacaaagtgaatttgggacatgctgctcgtactgtgtgttacagccctgaaggggacatggtggctattggaatgaaaaatggagaatttatcattttactagtgagttctctaaaaatatggggaaagaagagagacaggagatgtgcaatccatgatatcagatttagtccggattcccggtatctggcagtaggttctagtgagaactcagtggatttttatgacctaacgctgggccccactcttaacagaatcagctactgcaaagacattccaagctttgtcattcaaatggacttctctgcagatagcagttatctccaggtctctagtggctgctataaacggcatgtctatgaagtgccttcaggaaaacatcttatggatcatgccgctattgacagaattacttgggctacatggactaggtaaatacttatatattcacaaggcaagaactgactttgaaggccagttagaaaatcctatttctgaactgttagagccattccaataaggaatagtaattgagtttcaagtttttgttaccatattttgaaatggtatgttcatgttgggacccctttttattgaatatatttccatgttttatcagtttccatgatttatcaagtttttttttttaaggaaatcaaagttttaactttaaagataccctgatatttttcttaatgct

SEQ ID NO: 108129 - DNA, 1170 bp, Homo sapiens
taaaattcactgaaactggatgtttattttgaccgagatatagtatatcctcaaattgccatagaaagtttacaagaatattagaggtaaattataaatatcagggcctttttaaaaaaaaaagattctgcttataacttggtatttgtttataataaaaattatagtagccaataatgaacacttactctggcttggttatttacttaggtcaaaagaaggaggagcggttaaactgtgggatcaggaactgaggcggtgccgtgccttcaggcttgagacaggacaagccacagattgtgttcgttctgtgtgcagaggcaaaggcaagatccttgttgggacaaggaatgctgaaataatcgaagttggagagaaaaatgcagcttgtaatattttagttaacggtcatgtggatgggccaatctggggactagcaacacatccttccagggattttttcctttctgctgcagaagatgggacagtgagactttgggatattgctgataaagtaagtacagataatttttttaaaagaggttacaacttctaaaaagaaaagttggaagttctaaattgctagtacttaaagaactgccagaattctgttgagcattttgaggggaaactggtataatttagaagtacttcacttaatgtttcctatgactcttttttttttttttttttaaatgcagaagatgttaaacaaagtgaatttgggacatgctgctcgtactgtgtgttacagccctgaaggggacatggtggctattggaatgaaaaatggagaatttatcattttactagtgagttctctaaaaatatggggaaagaagagagacaggagatgtgcaatccatgatatcaggttagtgaacaaatggaatagagtttctagtatatacttgatttaacttccatttgtaaaattttccatagccttgccttcaaaaagaggtccccagggcctgtagcatttcccgtattataaattgtatgctaaaatatggctgtttgtatactacttaattcttcttgctaaattataaacccactgggcaccaactataatagcaagtactagtaggtaatgttttgattgaattcatgttaacacttagccatgtccattaagttcatcccaccaagaggtatctcccactg

SEQ ID NO: 108130 - DNA, 506 bp, Homo sapiens
ttcactgaaactggatgtttattttgaccgagatatagtatatcctcaaattgccatagaaagtttacaagaatattagaggtaaattataaatatcagggcctttttaaaaaaaaaagattctgcttataacttggtatttgtttataataaaaattatagtagccaataatgaacacttactctggcttggttatttacttaggtcaaaagaaggaggagcggttaaactgtgggatcaggaactgaggcggtgccgtgccttcaggcttgagacaggacaagccacagattgtgttcgttctgtgtgcagaggcaaagtaagatgttccatgagctgatacagtgcagcagaaaacagaaagtggttattactgtgattccctcaccctttgcagcctaatgaacaatacttaataatgcataacgatggatttgcttgccaacattactctgtctttgctgctttctttgccaaagttagcaccagtgtggtgcataagcta

SEQ ID NO: 108131 - DNA, 380 bp, Homo sapiens
ctcccaggttcacgccattctcccgcctcagcctcccaaatagctgggactacaggcacccgccaccacacccggctaatttttttttttagtatatttagtagagatgggtgtttcaccgtgttagccaggatggtctcgatctcctgacctcatgatctgcccgcctcggcctgccaaagtgctgggattacaggtgtgagccaccgcacccggcctgaactctgtttcttacgcagtcttagacttccaggacaggattcctaggtaagaggtactatccccatatattcactgacacaggtaagctccatttctatcccaaaattagagtagctgggtgggttacacccaaagaagtgtcagcaaagataggcccc

SEQ ID NO: 108132 - DNA, 426 bp, Homo sapiens
cacagtatgacagtaataagacactttatgaagaacatattttcagtagctaagtgtcatagaaaaggaagcttgttagccatttcctcaagttgacaacagagagtccttaggaaaataattttttaaagccaatattgagccttccaagactgcacatggtgatatgttaaatttggaatttatgcaacttaaaaaactgagagtcgggggttggcatttttgtgcatcctaactgacgagtgctgccccagggctctctaacactgcacacagtctactaaagaagcaggctgcccatcatgacccccacccatcagctacacagcacacatctgcttctagatgaaccttcttgcaagtggcctgtcttatggcaaaatcaaggggcaggcctgtaaagcggaccaggaaatgagcagcaac

SEQ ID NO: 108133 - DNA, 124 bp, Homo sapiens
tcctgcccacccgtgaacttttatccagtcctttctcttgtctttgtttcctgagggtgggcacaggcagtcagtggcagagaaggtggtctgctcctagcgtggctgggggaggctctgaggg

SEQ ID NO: 108134 - DNA, 465 bp, Homo sapiens
agtcatggagctcttctgccttccacaatacctctaaaacagtgagggccattctgaatatttgttattcatagaccccttggggactccagtgaatgttgtgaaacctgtctctaaaaaaatgcacatgtacccgaaatgttgtgttgaattccaggggctccggtgaaatcgccagtaggtagaggatacctctgctttctgtgtcgtgtgcaaaagattatttctaccgctgacctgttcaactctgaataggtgttaacagacatcaggttagaggtacagggctcatacacagtcactgaacttcatcttgcaagggcaatctccaacacactttctacatgcctacttcctgaaattaaagttcaggtagcagtgccttctactttgggccaaactttaaccttagaaggtttgaaaatttggggattatgtatcctaacattaactagaagatttcaa

SEQ ID NO: 108135 - DNA, 695 bp, Homo sapiens
ggttataacatcctactgtgctcaaaaagctggggtctctgtagtgtataaaacaaggttcctacccaagaggatgtacaccctcgctaataatatagcaaacaggcagtaaaccataaccatttattgaagtacttaaaaagtggcagaaaacattatgggctaaagcagtcttcacaagggaaaatttcataaaggatacatttttatatatggaccctgaaggagaaaaaagtcctatataattttttgaaaggtgataaaggtattccaagcagccaaactggtatatacagtagctcagagatagaaatgtgcttagtctttctgacaccctataagttaaccagtttagaccatgtggagtattaatggaaaggaaatctgagaggactcatttgatagggagtcagtgaatttccgagcccaggcttaagagtttggaaccaggggaatcccttaaagcatcttttcccgaagcatattctgaggttaaataagtgttccattaaaaagggggatgggggagtctgtaatccggtaagcctggacaagattaggcttccagcaccttaatatcctgtgtacacttgcgagttgaaaatagaatatatagttttcagtgtttcctaaacttacttgactgaggaactttttttgagatgcatcttgaagttccagtatgaaacacactt

SEQ ID NO: 108136 - DNA, 279 bp, Homo sapiens
ctgaggagtggtgatattaatatgacatttttagtattttattaaaaactacatcagcacttagaagcgctgaaaatctcagtgaaaccatttcccaaacgaccaatacatgatgttataaaatcaacaatgaacaaaagatccattcaaagtacaagatagcccaatggatttcaatgtaactgagtaccaacaaatccactagatttcacactgcaactaacctttaagaaatctctacttggccaggcgcggtggctcacacctgtaattacagaa

SEQ ID NO: 108137 - DNA, 278 bp, Homo sapiens
tgctctgggatatgggggtggctcataatctgtgactctacatacctagtggggttctcccttggtaacccgtagaaatgccacattgtgtgctgaacttcctctgagtagagtagactcatgaagatttttaagaatgcttttataatcttaggaactgcatgggcatatatataatcttagaaaaagttattactatcacacacttactttctaaaagcagctcctcatttcttactgcctcccacccttgaaacagtcttgcatcttgcctcttt

SEQ ID NO: 108138 - DNA, 492 bp, Homo sapiens
atggatttgcctcttgtggacattttgtagcccaacaatattccactgtatcaatataccacacttcgtttcttcactcatcaggtgatggacattttgttgtttccaccttttggctcttatgaatagtgttgctttgaacgttcatatacaagtgtttggacatatatttccattttttcgtgtatatacccaagattggatgctgggtcacatgcttatttagttgtgaaacgttactgtcaagttgatctaacagaaaaccacagctgacctgatgttaccactcagggtgagcaacgccctctagcaggcaggctcttatggggaagagaagtatggatacaattaggcggactggctgttagttaaagccacctggaaagggtgctgactctcagattcgctggtgacacaaagttggggcagaatctaggcccaaaagatctcagcaagctggtgtgatgtccacagataaaatatagcaaagaa

SEQ ID NO: 108139 - DNA, 646 bp, Homo sapiens
gtatacagacatatctttgtacatttgtgtgcagttttatgagccccgatcatacttgcacatacttttgcacgtgtccatgtgtatcttgttctcagacatgtgcattcatacatttgcacatgtgtatcatgcacatgtatctacaaaggcatgctagataaataatgaaataggttcataattctattttgtaatgttcttcacacaatgttattaatgtcttctatataaaatatttttaatgtctgcatggcatgtaattgtatggctgaatcataatttaactaattgcttatctttggtcactaagaatgtttacagtttttttcattgaaatttatttcacatacgtcttcaaccgtttccttagcataaattactagccatggaaatgcctggtcagcgaatatgcatttttaaaaggcttttgaattatagaatgatggtgaattgtccaggcaacttgataggagcatgatactctttggttgtcacacagggctgttctgacttctatttgatctggttaatcaaattgagctagttttctcaccaagtaaatgtaatggaaaactgtatgattcattcataaatgcaaacacagttttgtctttatggtctttttattggtagtgtaatatgt

SEQ ID NO: 108140 - DNA, 214 bp, Homo sapiens
  misc_feature (12)..(12): n is a, c, g, or t
  misc_feature (18)..(18): n is a, c, g, or t
  misc_feature (20)..(20): n is a, c, g, or t
  misc_feature (37)..(37): n is a, c, g, or t
accgcactagcntatgcngngcactagcttatgcagngcatagcctcatcgctaaggagtagggtgagaaacgcccacccagaggcacccagggctgcgcatttgacggggccttgctctttccaagaagagacagacttggcatgttacctatctgaagggggcgcagagtggagtccctgaggagaggatgggatccaggcggtgatgggat

SEQ ID NO: 108141 - DNA, 2059 bp, Homo sapiens
gtgaactggagtaggtgaggattctgcagttgacgccccaggatggctttgctcagccctcccccgtagactggaggaaagcctaccgccaagggaggagaggatgcatctgtcctaggtgcagccggcctccctcttccaggttcagcaagggtccctggctgggcattttcctcgtaacctttggcagcattggctcaaatgccattgtttagattcccagatatttccccactgctttttgtgttaaggtagtttggtaaaatgccttattccaatggcctaagataatatcaagcaactcactggtttacttttctaaccagctgtggttaagacacacacggcaatgtgctatctttcacatgttggacgttaaacccagaccaactccccaaatctaatttgtttcagtaatttctgaatgcattgaccaagatattcctttcatctctggttgagtttcttccattagaaggaaggattaaaccttggataaaagatttgcagatgccccagtggttagtagaggtgaaaatggaggtttcagggaaactgctggggccttttgcctttgtcctcatccaaagcattttgtgcctctctttcttctcctctggctgaatatccactggagattgaattctccgaaactccctgtgtgggtgaagtgggaagctgtgcccaggaaggggagtaactgtgcaaagttttatgcagtcagtgccagaattggattacatcacctgggggaggcgccttcaggaccaggaaatggtacatggagctttgaggtgaaaactcatcttagaaacccacaaaaagtcattcccccagcctgacatcagggacagaccacacccatggggcagaaaccgggcttggttgttgcagtgggaagagaaggcacgactctggtgcaccgagcacctttcctcgtggctgtttccaggcactgggctggatgtcctcagaaccccctgtcccctgcccactcctcaaacccttactgacccacccctctcgcctggtgctgtcccaggccctgggggtgagggggaggggactccagcgtgggcttgccctccagtgtggtgggagggaaccacgtggccacttggcttagccgtgctcatggtgcagacgtggaacgcggaggcagggagaggctccgtgacgtccccagggccccagaacgaggaaggagcggagttgggattccagcccagttggacgctgaagtccctgttttgtttactgcctcctgttcatggcgtatgaatgtatctgagatgctttgtaaggcataaagtgcaatactagcttagtggctgttcgttcagtgattccttctgttaccaaacaggtggctgagatgagagggcaacccaagcctaacgcccttcagtggccttgcatcagagtactcgtgacaggtacctctccgtggagaggggctgtcctctgcccttgcctgctcctcctattgcaacagtcctgtggactagctcaggctctacaggggctggtgtgtgtgtgtgcgtgtatggtgtatatgtgtctacctacacacaagcacatgtgcacacatgcacacacatgcatgcaagcacacgcacacacacacatgcacacacactcacatggacacacacacacacacatgcacacacatacatgcacacacatgcacatggacacacatacatgcacacacatacatgcaggtgtgcagacttggctccaggcgtgtgtttgatagtattattctatgatatttccctcatctccatagaataccagcttctgaatcctcaatcagcctttactgcaagaagaaaagaaaaacctctctcattccaggtctgtggtgcagatgggaagagtatagtcaaaacccattaaggccttagtcaaatgccagccgaattagaacgcaatgaacgttagacaaaacaacccaactggccaggcgggggaggcgcagagcgtataaatataaagttagatacttataaagaataaagactctaataaaatattttatataaaacttttt

SEQ ID NO: 108142 - DNA, 468 bp, Homo sapiens
atccttgtatggtcgacgggcctgataatgatagagtagaatcataaagtgggggaacttaagataatttttagttcaactcttacgttgtagctgaggcaaagcaaactattccttatacagagctatataactaatgaaaatcagaaatgctttttttttaaacgaaatttgagcgaggtagaaataattatgcaaattgaataccactaaaagaagaatctggctggatgccgtggcccacgcctctaatcccagcgctttaggaggccgaggcgggtggatcacctgaggtcaggagttcaagaccagcctggctaacatggtaaagccctgtttctactaaaaatacaaaaaattacccgggcatggtggtgcgtgcctgtaatctcagctactcgggaggctgaggcaggagaatcgcttgaacccgggaggcggaggttgcagtgagatcgcgccattgca

SEQ ID NO: 108143 - DNA, 301 bp, Homo sapiens
tcaagatgagcatgactagctgggagacacacatggcaaagcatggtcatattagcttccaccatgggtcatgggaggaggacaaaggcaatagttaatgccttcagtggcacctggagaaagagctggctttaagaggctatgacatcttatctgaggctgaaagaatagaatagaaatattcccacagaaagtaatggagaatttccagccaaaaaccacccctgcgaaggcccaggggtaatgctccagggcaaggcgagtgtatgtctgagtttggtaaagggtgaagtctagaggt

SEQ ID NO: 108144 - DNA, 115 bp, Homo sapiens
tatcggcatactcagccctcacgacagcactagtaggtgggtgctgcaagaaccctcactttttaggtgtggaaactgaggcacagtggggttaagcagcttgccgaggctcaca

SEQ ID NO: 108145 - DNA, 344 bp, Homo sapiens
gtgtagaggaatgacataagaattaccattttaggggcttactgtgtgctagtataattttatataataatcacaacttaacaacaaaatagatcatttttattcctattgtacttaggaaaaaactaaggcttatggagctcagagagcttgaccaagatcacagagcaagtagctgacctggattcacaatcaggacaactgaacttaaatactcacggtattaactgctaaaagtgtgatatggttttgttctgtgtccccaccaaatctcgtattgaattgtaatccccagtgtagaaggtggggtcttggaggaggtgattggatcatgggggtggggt

SEQ ID NO: 108146 - DNA, 491 bp, Homo sapiens
tgatggcaccactacattccagcctgggcagcagagcaagaccctgtctcaaaaaaaacccaacaaaacaaaaacaaaaaaacagttcaaagaatactgtttacctaggtttacctattgttaacattttactctatttgctttattatttgctctttctctcataagttgcatacattgtggcattttatccccaaatacttcagtgtggattccctaagagtagggatatatcttgtgtatgtaatgttgttacgttacagttataatttcaataaattaatctctctccccacctgccttttccagaaaactaagacccagagaggttaagtgacttgccctgtggttagataggttccaaatggaaaatccagcctactctgctagtcaggtattagccctggtccctaacatcacaacagaatcttttttttttcccctgacacgccaaattatttagtagtataatacagtaataaaaatttgtg

SEQ ID NO: 108147 - DNA, 215 bp, Homo sapiens
gtctttctcatatacaacatgatgtgatcacatagttgtagcctagctaattttgtagttggttgcacattaagaattcaaaagattctgcctgcacatcactttatctgtgaaaacgaaggacttgggtcacatgatttaaagagctctctctcccttgatattcttgatattcaagtctccatgacaggggctccaatttccacaggaatttt

SEQ ID NO: 108148 - DNA, 183 bp, Homo sapiens
taaatccaatttatacacttgaaaagaatgacatttatgcagtgctttttaatgtaatggatatgtcatttaggtcaaattttttgattaggttgttcaaatcttcatacttaatgattttttgtgtaatttttctaccattactgcaaaaaaatgtattaaatcccatactataattgtgga

SEQ ID NO: 108149 - DNA, 331 bp, Homo sapiens
cataataaatgagaactcatttttgagtagaggtcacaacttataatattaacttgaccagaattatgatggcagtgaatttctgtgaatcactgagtataaggatttccatacactgggtatgggaaaatgcattgttttgatgaatgaagacgccggatgtcacagcagcaatcgtcctctgtaataatcaggccaagccactacctgcaacatactgagcaagtaggtaatcagaaacagtgcgatgcattgaaatgacaagaaggatctgctaaaaatcaggcccaacaacatcacagtcaccgtcttagtctgagataaaatgaaa

SEQ ID NO: 108150 - DNA, 367 bp, Homo sapiens
agccaggctggagtgcagtggtgtaatcctggctcactgcagcctcgaacttccaggctgaagcaatcctcctacctcagcctcctgagtagctgggaccacaggcatgtgccaccatgtattttttgtagagacagggtctcactatgttgccgaggctggtctcgaactcctagacttcagcgacctgcccacctcagcctcccaaaatgctgtgatgataggcatgagccactgggcccagccaaaaaaaccttttattgtaatagggaaaactatgcttctacatagcaatgcccattatgttggaatttcactcacagaataatgtctcaaattacaggaaatctccaggtgaatagcactc

SEQ ID NO: 108151 - DNA, 456 bp, Homo sapiens
ccataacaagctgtcctgaccttctcagtgtgtgacccaggacaccgtggaatctgggaaagccatgatttccacagtatactcctagaaattttaatctcagagaatgatgatagatgtttctggaaaatgagttgtgtttgagaactggattaaacaaaattacagaggcttctttgtggcacttaataatttcccaaaccactaaagagggaagccccagcgctatgagcatacctggcaacagaccacttcctagagaaatgcctccagtgagccagggctacattttgggaagtgactgtatcctacagagtagaaaaatagtcccagcacagggtctcatgcctgtaatcccagcactttgggaggccaaggtgggcagattgcttgagcctaggagttcaagaccagccagggcaacatggcaaaaccctgtcactacagaaaataccc

SEQ ID NO: 108152 - DNA, 1121 bp, Homo sapiens
cgcccctgcgtctgttctctcccaaagaagctggtccttagcctgtgttaaggagcaatctttcggtggccagatggagccggggcatccttcttcaaataatggcttttaattcgcagactagaatgtttcggattacaaaagaaaccggttctcttcacatccttatccttgtgatgcagcattccgcttgcatttggaagccgtttaatatcagagagaagccatatttatgaaagtaaagaggctgctcagatgactgcaaaccagccttccttactggttttatcactggtaatgttataaagacagttgtccagtttcatgaatcttgtaggtttttttttttgatgttgtttttttttcaaaaatccgtattgtagaaaaatatgctgtcccagaagagatgattggacactctcaagcgtggtgctggactttgtcatctcttgcacagccatctccacaccttagtgcttacctcatgttagttttttatattctgcaaagacgaaaccaaaataatccaaatttgacacaaatacctgggctacatcttatttgagatgtttaacaaatgtctggatcatcttttcttatatattacgcaggaaacactgtgaagtaagcaaagttggaatgcccaagtgaaagaccatttgaatatttacaagtagatttcagacaggaatactacagggtggtcacaggataacaaattctaggcagcagatttacatgacttgaggctgtgggctgttaagacgctgaaaaaccagggtgtggaccaagctggctaaggctgagtggacccaacgtggtgctggattggatggaggttttacctaggccctcattatatgctcattaacatactaaatcacacacccgccagtgccatgacagttctgagaccagtgtttgatgtaaaaatggcaccacagttccaagaaatctccacctttacccaggaattttcgtgaacattccactccttggttaaagaaacccatcaagatgaaaccccagaacccattattctctcttgggtatgcccaagctcccctttcttgagagtgtactttttgctttgcaataaatctcttctttcactatctgct

SEQ ID NO: 108153 - DNA, 396 bp, Homo sapiens
tcttctgaatgttcttactgcagcctcacatccatccacggtccgtaggagccatagattgttgctggataacttttcctgcaattttattctatggatttcctatggaaaacagtcttgtgtatctataggtatgaatctaatttttcaaggattaaataaatagtggatggtgtgctggcaagcttttgtttttgacctcatggaaaagttttttggtttttttttttgtttgttttgttttgtttttttaaacttttggctgctttctactttggggttcttaggacaccataaaaataacttcttctccttcccttcatctactgtcaacacagacacagtctttcactttgctctgttctttgcacatcactttattgtgctcatggtctc

SEQ ID NO: 108154 - DNA, 445 bp, Homo sapiens
ttatccaaaagagaaggtaatataagcaaggaaattcaaatatagatgtgaataacatctttccagagagaaaaacaagtaagcaaataattaggatgtgttgtaactaagcaaagaatgtcatcccctttagctacatcgggaacaaaaacatatattctctttaacaaagagatcagaaatagacattttacaaagccttgaacatatcacataagcatcccaaacaatgtggaagatttttaaaatgctattatgtacactataattgaaaaagactttattacatacaaaagataatctccacttgtttttaagtttaggaattataaaaattcataaagacaaaaaagatggattgcagatcatgaaagatacatttctaagaatacatttagaaggacacatttctaagttatgtagcaaatatagctattcaaaagaa

SEQ ID NO: 108155 - DNA, 345 bp, Homo sapiens
caaactagagagcagttccaagtcaacttactggtaacctgttgtataaaaagttactacaaggccaggcatgttggctggtgcctgtaatactagcactttgagaggccgaggagggaggattgcttgagcgtaggggcttgcagtcagcctggtcaacatattgaaaccccatctgtacaaaacaataaaaaaaatttgccaggtatgatggtgtgtgtgtgtggtcccacttagtttgggaggctgaggtgagatgatctcttgagcttgggaggttgaggctgcattgagccgattgcacaactgcattccagcctgggtgacagagtgagaccctgtctc

SEQ ID NO: 108156 - DNA, 467 bp, Homo sapiens
aataaggccggaggaagtgagcatgctgatactaaagaacaggggagagaatactgggtttggttgtgcctggtcactaaaagcaaacttcacccactgagaacctgctagtcaacctcctatgatgttcagaagcctcttgaatgttgataattaatggacagggtgagcttggccaggcaggctggctcatgcctgcagtcccagcactttgggaggtcaaggtgggcagatcgcttgagctcaggagttcaagaccaggctgggccacatggcaaaatgctgtctctggaaaaaatacaaaaaaaattagccagatatggtggcatgcacctgtagtcccagctccttgggagggtgaggcagcaggattgcttaggcccaggaggtcaaggctgcagtgagacaagattgcactgctgcaccccagcatgagtgacagagcgaggtcctgtctcaaaaaaaaa

SEQ ID NO: 108157 - DNA, 204 bp, Homo sapiens
ttccacactgctggctcctcaccaccaaaactcgagggttatctctcagacacccgtcctatcaatgctacgggaagtatccctcaagttactgcctataccacctattgatatatttcatagtatttatcacaatataaaattacttcatcttccccttttaatttaaaatctttttttttctccagactagaatgtaaacct

SEQ ID NO: 108158 - DNA, 3409 bp, Homo sapiens
acaaagtggaggaagaagctatggctcctgggctgccaaccgcctgttcacaggaaccagtcacctttgcagatgtggctgtggtgttcaccccagaagaatgggtgtttctggactctactcagaggagcctgtatagagatgtgatgctggagaactacaggaacctggcctctgtggctgatcaactgtgcaaacccaatgcgttgtcttatttggaagaaagaggagagcagtggaccactgacaggggcgtcctctcagacacctgtgcagaacctcagtgtcaaccccaagaggcaattcctagccaagatacttttacagagatcctgtccattgatgtgaaaggggagcaacctcagcctggagaaaaactctataaatataatgaacttgagaaaccttttaacagcattgaaccacttttccagtaccagagaattcatgctggagaggcatcctgtgaatgtcaagagattagaaattccttcttccagagtgcccacctaattgtgcccgagaaaatccgtagtggggataaatcctatgcatgtaacaaatgtgaaaaatccttcagatacagctctgaccttatcaggcatgagaagactcatactgcagagaagtgctttgactgtcaagaatgtgggcaagccttcaaatattcctcgaatctccggcgacacatgagaacccataccggagagaagccatttgaatgtagtcagtgtgggaaaaccttcacgaggaactttaacctgattttgcaccagagaaaccacacaggagagaagccctacgagtgtaaagattgtgggaaagccttcaatcagccatcatccctcaggagccacgtgagaactcacactggagagaagccctttgaatgcagccagtgtgggaaagccttcagggaacactcttcactgaagacacatctgcgaacccataccagagagaaaccatatgaatgcaaccagtgtggcaagcccttccggacgagcactcatctgaacgtgcacaagaggatacacacaggggagaaactgtatgagtgcgcgacttgcggtcaggtcttgagtcgtctttcaaccctgaagagtcacatgcgaactcacactggagagaagccctatgtgtgccaggaatgtgggcgagccttcagtgagccctcatccctcaggaaacatgcaaggactcacagtggcaagaagccctatgcatgccaggaatgcgggcgagcctttggtcagtcttcacatcttattgtacatgtgagaacacacagtgccgggagaccctatcaatgtaatcagtgtgagaaagccttcaggcacagctcctcactcactgtacacaaaagaacccatgtgggaagagagaccattaggaatggcagcctgcctttatccatgtctcatccatactgtgggccccttgctaattaacttccattttgtaaaaatataaacacatggggctatgactttccctcgtaatactcctttagctgcatcctgtgtttcaatgtataatattttcattttggtttaattgtaagtattgtcttaacctccattatcgtttattctttgacccatctattatttggaattagatttttcaaaactaatatgtggatatattttcatagaggtataatgacttatagtgaaatgcatacatctgaagtgtacagttggatgagtttgacagatgcatacatgcatgtaaccaccaccccattccagatatagaatgtttctatctctctggaaggttcctgcatgttatatggctatttcttagttgcctttttgttgttggtttctaatttaattacatggtgagaagagtatgtggcctctttgttactgattcataggtatttgctgagatttgctattaggtctggtgtggcttattcttctagctgccaacccaaattaccccttcctccttagaaaagaacctgggttttctgttcagattggcagtgtgcactattaaaaagcttccatctcccggctgggcacggtggctcatgcctctaatcccagcactttgggaggctgaggctgggggatcacctgaggtcaggagttcgagatcagcctggccaacatggtgaaatcccctctctactaaaaatataaaaattagccaagtttggtggcatgcacctgtaatcccagctacttgggaggctgaggcaggagaattctttgaacccaggaggcagaggttgcagtgagccgagattgcgccactgcactccagcctgggcaacagagtgaaactctgtctcaaaaataataataataaaaaaaagcttccatctcccagcccttcttgcaagcaagggcaggccatttcctccggtcctggctagtatgaatatgagaagtcactggatgtgactctggggaagatattgtgttcagggatggtttcatgtagccacatctctccacttcttgccttttggacaagtagacatgatttctagacctagaggagccctcctgtgaccataagggtaaaagccgcaagctaagaagagggtggccggaagtcataaccatcttgcttctgtaatctaaaaaatatttaggatagatttaatagaattggcatatttatgtgattgcagcagccctggactatttatttctggatgtcccatacatgaaaaatatgcacttcttactggtacagttttcttttgtttgtttttgtttttggtgggaggtttatttcacctgaatataattcctaactgatgcacttagtatatgtcagtttttataaatgcttcatggatggttgaaatcaatgtattgtattctacaaatgtctgctagatcaagcaaatgtgtttaaaaaccatctacacatttataaatgttgatctgtgatctagcatttattgagagaggtatgttaaactctcccaccatgattatgtattgctgaaaaatctttgtcattctgtcagtttttaaatttatgtatatacatacatatatatgttttgaagcaatgaaattaaatatagatactgacattttttacatttccaacaaattgttacttttattcttataaagtgatcatccttttccctattactgaacattcaaccattcattgtaatgatagtaaatacttatttagagtttactattaatagatagtagccactgcctgaagctttgcatcttttaatttagtcctcacactgacactttgaggtatgtactgttatccccaattcccagatgaggaagctgaggcccagcaagttaaggtgggctatcaaagtcatctgggtggcatgtgacaggcctgactctctctacagtggcagacccaggggactagtctccatttttacttgttcttt

SEQ ID NO: 108159 - DNA, 1258 bp, Homo sapiens
ggttacttcttctttttttattttattttaattgagacagcatctcgctctgtcacctgggctggagtgcagtggcacgatctcggctcactgcaacctccgcctcccgggttcaagcgattttcctgcctcagcctcccgagtagctgggattacaggggtgcgctaccatgcccggctaatttttgtatttttagtaaagacggggtttcaccatgttggccaagctggtctcgaactcttgacttcaggtgatccgcccacctcggcctcccaaagtgctgggaccacaggtgtgagccaccgtgcctgacctattttgttacttcttgaagcgggtaacaccactactgtcatccgatggtgagatggggaccaggaaacagtcacaaagaaaacaccgacccctcctccgtggagctcacggtcagctgggtggtcagagttcgaaatgaataacagagtccagtggaagtgtgttatacaaggacttcatctcaggggacaggggagagttctgggaaaggatggatatttaagcttaggccagggtttctcaactgcagcactgctgataatgggctactgcagcactgctgataatgggcctgttcactctcagctgtgggccgtcctgtgcattataggatgctgagcagcatccctggcctcaactcactagatgctacgagcacttttcctctatgagtttgctagggctgccatatcaaagttccaccagctgggtggattaaacagcaaaaatatattgtctcaccgttctggaggccagaagctcgagagcaaggtgttggcagtgttggttccttttgaagcctctccttggtgtgtagatggccatcttctctctatatcttcacatcatcttccctctgtccatgtctgtgtccaaatgtcgtcttcttgtgatagggtttggatttgtgtccccacctaaatctcatgtcaaattgtaatctccagtgttggaggaagggcttggtgggaggtgactggatcatgggggtggacttcccccttgctgttctcttgatagtgagtgagttctcacgagatctggttgtttaaaagtgtgtagcacctcccccttcactctcttcctcctgctccagccatgtagcacgtgcctgcttcccctttgccttccgccatgattgtaagtttctcgagtcctccccagccatgcgtcctgtacaacctgtggaaccaggagccaattaaacctcttttctttata

SEQ ID NO: 108160 - DNA, 1726 bp, Homo sapiens
gcggccgctcccacttcagatgtatgcatttgacagatgcatacatgcatgtaaccaccaccccattccagatatagaatgtttctatctctctggaaggttcctgcatgttatatggctatttcttagttgcctttttgttgttggtttctaatttaattacatggtgagaagagtatgtggcctctttgttactgattcataggtatttgctgagatttgctattaggtctggtgtggcttattcttctagctgccaacccaaattaccccttcctccttagaaaagaacctgggttttctgttcagattggcagtgtgcactattaaaaagcttccatctcccggctgggcacggtggctcatgcctctaatcccagcactttgggaggctgaggctgggggatcacctgaggtcaggagttcgagatcagcctggccaacatggtgaaatcccctctctactaaaaatataaaaattagccaagtttggtggcatgcacctgtaatcccagctacttgggaggctgaggcaggagaattctttgaacccaggaggcagaggttgcagtgagccgagattgcgccactgcactccagcctgggcaacagagtgaaactctgtctcaaaaataataataataaaaaaaagcttccatctcccagcccttcttgcaagcaagggcaggccatttcctccggtcctggctagtatgaatatgagaagtcactggatgtgactctggggaagatattgtgttcagggatggtttcatgtagccacatctctccacttcttgccttttggacaagtagacatgatttctagacctagaggagccctcctgtgaccataagggtaaaagccgcaagctaagaagagggtggccggaagtcataaccatcttgcttctgtaatctaaaaaatatttaggatagatttaatagaattggcatatttatgtgattgcagcagccctggactatttatttctggatgtcccatacatgaaaaatatgcacttcttactggtacagttttcttttgtttgtttttgtttttggtgggaggtttatttcacctgaatataattcctaactgatgcacttagtatatgtcagtttttataaatgcttcatggatggttgaaatcaatgtattgtattctacaaatgtctgctagatcaagcaaatgtgtttaaaaaccatctacacatttataaatgttgatctgtgatctagcatttattgagagaggtatgttaaactctcccaccatgattatgtattgctgaaaaatctttgtcattctgtcagtttttaaatttatgtatatacatacatatatatgttttgaagcaatgaaattaaatatagatactgacattttttacatttccaacaaattgttacttttattcttataaagtgatcatccttttccctattactgaacattcaaccattcattgtaatgatagtaaatacttatttagagtttactattaatagatagtagccactgcctgaagctttgcatcttttaatttagtcctcacactgacactttgaggtatgtactgttatccccaattcccagatgaggaagctgaggcccagcaagttaaggtgggctatcaaagtcatctgggtggcatgtgacaggcctgactctctctacagtggcagacccaggggactagtctccatttttacttgttcttt

SEQ ID NO: 108161 - DNA, 383 bp, Homo sapiens
acaaagtggaggaagaagctatggctcctgggctgccaaccgcctgttcacaggaaccagtcacctttgcagatgtggctgtggtgttcaccccagaagaatgggtgtttctggactctactcagaggagcctgtatagagatgtgatgctggagaactacaggaacctggcctctgtggctgatcaactgtgcaaacccaatgcgttgtcttatttggaagaaagaggagagcagtggaccactgacaggggcgtcctctcagacacctgtgcaggtgagcccaggcagatcaggtgagcatcagctctggtcagtaaggggagtgtccagtttggaaactgtcttatcagggcaacctattcatacctttgactgagaagc

SEQ ID NO: 108162 - DNA, 2657 bp, Homo sapiens
ctctctccacactggcctctcccctctctccacacaggagagaagccctacgagtgtaaagattgtgggaaagccttcaatcagccatcatccctcaggagccacgtgagaactcacactggagagaagccctttgaatgcagccagtgtgggaaagccttcagggaacactcttcactgaagacacatctgcgaacccataccagagagaaaccatatgaatgcaaccagtgtggcaagcccttccggacgagcactcatctgaacgtgcacaagaggatacacacaggggagaaactgtatgagtgcgcgacttgcggtcaggtcttgagtcgtctttcaaccctgaagagtcacatgcgaactcacactggagagaagccctatgtgtgccaggaatgtgggcgagccttcagtgagccctcatccctcaggaaacatgcaaggactcacagtggcaagaagccctatgcatgccaggaatgcgggcgagcctttggtcagtcttcacatcttattgtacatgtgagaacacacagtgccgggagaccctatcaatgtaatcagtgtgagaaagccttcaggcacagctcctcactcactgtacacaaaagaacccatgtgggaagagagaccattaggaatggcagcctgcctttatccatgtctcatccatactgtgggccccttgctaattaacttccattttgtaaaaatataaacacatggggctatgactttccctcgtaatactcctttagctgcatcctgtgtttcaatgtataatattttcattttggtttaattgtaagtattgtcttaacctccattatcgtttattctttgacccatctattatttggaattagatttttcaaaactaatatgtggatatattttcatagaggtataatgacttatagtgaaatgcatacatctgaagtgtacagttggatgagtttgacagatgcatacatgcatgtaaccaccaccccattccagatatagaatgtttctatctctctggaaggttcctgcatgttatatggctatttcttagttgcctttttgttgttggtttctaatttaattacatggtgagaagagtatgtggcctctttgttactgattcataggtatttgctgagatttgctattaggtctggtgtggcttattcttctagctgccaacccaaattaccccttcctccttagaaaagaacctgggttttctgttcagattggcagtgtgcactattaaaaagcttccatctcccggctgggcacggtggctcatgcctctaatcccagcactttgggaggctgaggctgggggatcacctgaggtcaggagttcgagatcagcctggccaacatggtgaaatcccctctctactaaaaatataaaaattagccaagtttggtggcatgcacctgtaatcccagctacttgggaggctgaggcaggagaattctttgaacccaggaggcagaggttgcagtgagccgagattgcgccactgcactccagcctgggcaacagagtgaaactctgtctcaaaaataataataataaaaaaaagcttccatctcccagcccttcttgcaagcaagggcaggccatttcctccggtcctggctagtatgaatatgagaagtcactggatgtgactctggggaagatattgtgttcagggatggtttcatgtagccacatctctccacttcttgccttttggacaagtagacatgatttctagacctagaggagccctcctgtgaccataagggtaaaagccgcaagctaagaagagggtggccggaagtcataaccatcttgcttctgtaatctaaaaaatatttaggatagatttaatagaattggcatatttatgtgattgcagcagccctggactatttatttctggatgtcccatacatgaaaaatatgcacttcttactggtacagttttcttttgtttgtttttgtttttggtgggaggtttatttcacctgaatataattcctaactgatgcacttagtatatgtcagtttttataaatgcttcatggatggttgaaatcaatgtattgtattctacaaatgtctgctagatcaagcaaatgtgtttaaaaaccatctacacatttataaatgttgatctgtgatctagcatttattgagagaggtatgttaaactctcccaccatgattatgtattgctgaaaaatctttgtcattctgtcagtttttaaatttatgtatatacatacatatatatgttttgaagcaatgaaattaaatatagatactgacattttttacatttccaacaaattgttacttttattcttataaagtgatcatccttttccctattactgaacattcaaccattcattgtaatgatagtaaatacttatttagagtttactattaatagatagtagccactgcctgaagctttgcatcttttaatttagtcctcacactgacactttgaggtatgtactgttatccccaattcccagatgaggaagctgaggcccagcaagttaaggtgggctatcaaagtcatctgggtggcatgtgacaggcctgactctctctacagtggcagacccaggggactagtctccatttttacttgttcttt

SEQ ID NO: 108163 - DNA, 1636 bp, Homo sapiens
agcgggtgggtcgacgagatgagctgtgctgcgcgggtgggcattgtggcttggcacgttggtactgtctcggctggttatgcagggaaaacaccgattgacatcttctataacctggtctccagttgtcctggtaactcagtgcgagctttgcaggatagtggcgtcgtgtcagtcccagcgatgtggcctatttgcatgagatgagcgcatcggaggatcccatgtgggaaactaccgtgatgcttgacccagtggcagtgaccctggcctccatggggaactccaccatgcaaacccagttgtgtctcccagctggggcaaagagcagagccaaaggcaacagaacgagggattctccgtgccacaggtgttgcctgggaatctcaacttaaacccgaagagttgccttctatgcaggatcttttggaagaagcatcctccagggacatgcaaatggggccggggctgttcctgaggatgcagctggtgccctccatagaagagagggagacaccattgactcgagaggaccggccagctctccaggagccgccttggtctctgggatgcacgggactgaaggccgctatgcagattcagagggtggtgataccagtgcctactctgggccaccgcaacccatgggtggccagggattctgggaacaattcttagatctaagtcttgtgttgctcttcagtatatttttgcgggtaacaccactactgtcatccgatggtgagatggggaccaggaaacagtcacaaagaaaacaccgacccctcctccgtggagctcacggtcagctgggtggtcagagttcgaaatgaataacagagtccagtggaagtgtgttatacaaggacttcatctcaggggacaggggagagttctgggaaaggatggatatttaagcttaggccagggtttctcaactgcagcactgctgataatgggctactgcagcactgctgataatgggcctgttcactctcagctgtgggccgtcctgtgcattataggatgctgagcagcatccctggcctcaactcactagatgctacgagcacttttcctctatgagtttgctagggctgccatatcaaagttccaccagctgggtggattaaacagcaaaaatatattgtctcaccgttctggaggccagaagctcgagagcaaggtgttggcagtgttggttccttttgaagcctctccttggtgtgtagatggccatcttctctctatatcttcacatcatcttccctctgtccatgtctgtgtccaaatgtcgtcttcttgtgatagggtttggatttgtgtccccacctaaatctcatgtcaaattgtaatctccagtgttggaggaagggcttggtgggaggtgactggatcatgggggtggacttcccccttgctgttctcttgatagtgagtgagttctcacgagatctggttgtttaaaagtgtgtagcacctcccccttcactctcttcctcctgctccagccatgtagcacgtgcctgcttcccctttgccttccgccatgattgtaagtttctcgagtcctccccagccatgcgtcctgtacaacctgtggaaccaggagccaattaaacctcttttctttata

SEQ ID NO: 108164 - DNA, 2306 bp, Homo sapiens
acaaagtggaggaagaagctatggctcctgggctgccaaccgcctgttcacaggaaccagtcacctttgcagatgtggctgtggtgttcaccccagaagaatgggtgtttctggactctactcagaggagcctgtatagagatgtgatgctggagaactacaggaacctggcctctgtggctgatcaactgtgcaaacccaatgcgttgtcttatttggaagaaagaggagagcagtggaccactgacaggggcgtcctctcagacacctgtgcagaacctcagtgtcaaccccaagaggcaattcctagccaagatacttttacagagatcctgtccattgatgtgaaaggggagcaacctcagcctggagaaaaactctataaatataatgaacttgagaaaccttttaacagcattgaaccacttttccagtaccagagaattcatgctggagaggcatcctgtgaatgtcaagagattagaaattccttcttccagagtgcccacctaattgtgcccgagaaaatccgtagtggggataaatcctatgcatgtaacaaatgtgaaaaatccttcagatacagctctgaccttatcaggcatgagaagactcatactgcagagaagtgctttgactgtcaagaatgtgggcaagccttcaaatattcctcgaatctccggcgacacatgagaacccataccggagagaagccatttgaatgtagtcagtgtgggaaaaccttcacgaggaactttaacctgattttgcaccagagaaaccacacaggagagaagccctacgagtgtaaagattgtgggaaagccttcaatcagccatcatccctcaggagccacgtgagaactcacactggagagaagccctttgaatgcagccagtgtgggaaagccttcagggaacactcttcactgaagacacatctgcgaacccataccagagagaaaccatatgaatgcaaccagtgtggcaagcccttccggacgagcactcatctgaacgtgcacaagaggatacacacaggggagaaactgtatgagtgcgcgacttgcggtcaggtcttgagtcgtctttcaaccctgaagagtcacatgcgaactcacactggagagaagccctatgtgtgccaggaatgtgggcgagccttcagtgagccctcatccctcaggaaacatgcaaggactcacagtggcaagaagccctatgcatgccaggaatgcgggcgagcctttggtcagtcttcacatcttattgtacatgtgagaacacacagtgccgggagaccctatcaatgtaatcagtgtgagaaagccttcaggcacagctcctcactcactgtacacaaaagaacccatgtgggaagagagaccattaggaatggcagcctgcctttatccatgtctcatccatactgtgggccccttgctaattaacttccattttgtaaaaatataaacacatggggctatgactttccctcgtaatactcctttagctgcatcctgtgtttcaatgtataatattttcattttggtttaattgtaagtattgtcttaacctccattatcgtttattctttgacccatctattatttggaattagatttttcaaaactaatatgtggatatattttcatagaggtataatgacttatagtgaaatgcatacatctgaagtgtacagttggatgagtttgacagatgcatacatgcatgtaaccaccaccccattccagatatagaatgtttctatctctctggaaggttcctgcatgttatatggctatttcttagttgcctttttgttgttggtttctaatttaattacatggtgagaagagtatgtggcctctttgttactgattcataggtatttgctgagatttgctattaggtctggtgtggcttattcttctagctgccaacccaaattaccccttcctccttagaaaagaacctgggttttctgttcagattggcagtgtgcactattaaaaagcttccatcatgcccagccaagttaatttttatatatggagtaagaaaagagtccaacttcattcttttgcatgtgcatatccagttttcccagcaccatttgttgaagactgtcctttccccattgaatggtcttggcacccttgtcaaaattcatttgactataaatgtgaggttttatttctgggctccctcctcgattccattggtctatatgtcttatctttatgccattaccgtattgtgttgattactgtagttttacaataaattttgaaataagaaatgtg

SEQ ID NO: 108165 - DNA, 1560 bp, Homo sapiens
cacggcacggtgggagtgtctccggctggcttgcagggagaacaccgactgagacctcaaaccctggctccagtgtcatggaatccgtcacctttgaggatgtggccgtggagttcatccaggagtgggcattgctggacagcgcacggaggagcctgtgcaaatacaggatgcttgaccagtgcaggaccctggcctccaggggaactccaccatgcaaacccagttgtgtctcccagctggggcaaagagcagagccaaaggcaacagaacgagggattctccgtgccacaggtgttgcctgggaatctcaacttaaacccgaagagttgccttctatgcaggatcttttggaagaagcatcctccagggacatgcaaatggggccggggctgttcctgaggatgcagctggtgccctccatagaagagagggagacaccattgactcgagaggaccggccagctctccaggagccgccttggtctctgggatgcacgggactgaaggccgctatgcagattcagagggtggtgataccagtgcctactctgggccaccgcaacccatgggtggccagggattctgggaacaattcttagatctaagtcttgtgttgctcttcagtatatttttgcgggtaacaccactactgtcatccgatggtgagatggggaccaggaaacagtcacaaagaaaacaccgacccctcctccgtggagctcacggtcagctgggtggtcagagttcgaaatgaataacagagtccagtggaagtgtgttatacaaggacttcatctcaggggacaggggagagttctgggaaaggatggatatttaagcttaggccagggtttctcaactgcagcactgctgataatgggctactgcagcactgctgataatgggcctgttcactctcagctgtgggccgtcctgtgcattataggatgctgagcagcatccctggcctcaactcactagatgctacgagcacttttcctctatgagtttgctagggctgccatatcaaagttccaccagctgggtggattaaacagcaaaaatatattgtctcaccgttctggaggccagaagctcgagagcaaggtgttggcagtgttggttccttttgaagcctctccttggtgtgtagatggccatcttctctctatatcttcacatcatcttccctctgtccatgtctgtgtccaaatgtcgtcttcttgtgatagggtttggatttgtgtccccacctaaatctcatgtcaaattgtaatctccagtgttggaggaagggcttggtgggaggtgactggatcatgggggtggacttcccccttgctgttctcttgatagtgagtgagttctcacgagatctggttgtttaaaagtgtgtagcacctcccccttcactctcttcctcctgctccagccatgtagcacgtgcctgcttcccctttgccttccgccatgattgtaagtttctcgagtcctccccagccatgcgtcctgtacaacctgtggaaccaggagccaattaaacctcttttctttata

SEQ ID NO: 108166 - DNA, 521 bp, Homo sapiens
cacggcacggtgggagtgtctccggctggcttgcagggagaacaccgactgagacctcaaaccctggctccagtgtcatggaatccgtcacctttgaggatgtggccgtggagttcatccaggagtgggcattgctggacagcgcacggaggagcctgtgcaaatacaggatgcttgaccagtgcaggaccctggcctccaggggaactccaccatgcaaacccagttgtgtctcccagctggggcaaagagcagagccaaaggcaacagaacgagggattctccgtgccacaggtgttgcctgggaatctcaacttaaacccgaagagttgccttctatgcaggatcttttggaagaagcatcctccagggacatgcaaatggggccggggctgttcctgaggatgcagctggtgccctccatagaagagagggagacaccattgactcgagaggaccggccagctctccaggagccgccttggtctctgggatgcacgctgcctctcctgtccctgctg

SEQ ID NO: 108167 - DNA, 285 bp, Homo sapiens
cctctgccatctgtttcctcccaggaccctggctgatgcaccaggagcttgaggagatggagtggtgttcagagcctcttccctttagagttcagagcaaccaaatgggcatcatgctgaacgtgggagaaacaaaagaatctcttgcacttggactcttttctgaaaatttgccccctgcaaagcaaaatggtggtggtgatgatgacggtgatgatggtagtggccatttctttgcctacccactgtggccttgttgtgaagaactttgatgccctgttgtat

SEQ ID NO: 108168 - DNA, 569 bp, Homo sapiens
agctgggattacaggcacccgccaccacacccggttaattttttttgtattttttagtagagacggggtttcaccatgttggccaggctagtctcaaactcctgacctcaggtgatccacccaccttggcctcccaaagtgctgggattacaggcatgagccactgcgcccagctgagaatttttaaaaacagactacaaagtgcagcaaatacaataaacacagtaaaaatctaatatgatggagttgagaccaaacataccagtcataccagtaggcaactcttctatcaaaagaaaatgatgttcaaattggctaacaaagcaacactagttttgcactaggtacaaagaaatacaaagtgatttaatgtgaaaaccaagagacaggcaaaggaaccccagagaggtggtatggtgcatgtgtactgcacatgtgcatgtatagctatctttatcagggttatacttatttataagaagtacttttatgtttttaactgcttatttcttcatctgttatattcaggttcttcagtgtgtccagcagtttctgtggggtgaggatgt

SEQ ID NO: 108169 - DNA, 432 bp, Homo sapiens
  misc_feature (8)..(8): n is a, c, g, or t
  misc_feature (33)..(33): n is a, c, g, or t
gcggccgnctactactactaaattcgcggccgntcgaccgcccgcgccatggcctctgtctccgagctcgcctgcatctactcggccctcattctgcacgacgatgaggtgacagtcacggaggataagatcaatgccctcattaaagcagccggtgtaaatgttgagcctttttggcctggcttgtttgcaaaggccctggccaacgtcaacattgggagcctcatctgcaatgtaggggccggtggacctgctccagcagctggtgctgcaccagcaggaggtcctgccccctccactgctgctgctccagctgaggagaagaaagtggaagcaaagaaagaagaatccgaggagtctgatgatgacatgggctttggtctttttgactaaacctcttttataacatgttcaataaaaagctgaacttta

SEQ ID NO: 108170 - DNA, 547 bp, Homo sapiens
aaaaattaggctagagggccgcggtaaatcggagagggtcctcagctgccgccaaggtgctcggtccttccgaggaagctaaggctgcgttggggtgaggccctcacttcatccggcgactagcaccgcgtccggcagcgccagccctacactcgcccgcgccatggcctctgtctccgagctcgcctgcatctactcggccctcattctgcacgacgatgaggtgacagtcacggaggataagatcaatgccctcattaaagcagccggtgtaaatgttgagcctttttggcctggcttgtttgcaaaggccctggccaacgtcaacattgggagcctcatctgcaatgtaggggccggtggacctgctccagcagctggtgctgcaccagcaggaggtcctgccccctccactgctgctgctccagctgaggagaagaaagtggaagcaaagaaagaagaatccgaggagtctgatgatgacatgggctttggtctttttgactaaacctcttttataacatgttcaataaaaagctgaacttta

SEQ ID NO: 108171 - DNA, 549 bp, Homo sapiens
  misc_feature (36)..(36): n is a, c, g, or t
caatagctaggtcgaggccgggtgttaattcggccnaggctcctcagctgccgccaaggtgctcggtccttccgaggaagctaaggctgcgttggggtgaggccctcacttcatccggcgactagcaccgcgtccggcagcgccagccctacactcgcccgcgccatggcctctgtctccgagctcgcctgcatctactcggccctcattctgcacgacgatgaggtgacagtcacggaggataagatcaatgccctcattaaagcagccggtgtaaatgttgagcctttttggcctggcttgtttgcaaaggccctggccaacgtcaacattgggagcctcatctgcaatgtaggggccggtggacctgctccagcagctggtgctgcaccagcaggaggtcctgccccctccactgctgctgctccagctgaggagaagaaagtggaagcaaagaaagaagaatccgaggagtctgatgatgacatgggctttggtctttttgactaaacctcttttataacatgttcaataaaaagctgaacttta

SEQ ID NO: 108172 - DNA, 589 bp, Homo sapiens
caacgaatggtcctcagctactcgggaggctgaggcaacgatggtcctcagctgccgccaaggtgctcggtccttccgaggaagctaaggctgcgttggggtgaggccctcacttcatccggcgactagcaccgcgtccggcagcgccagccctacactcgcccgcgccatggcctctgtctccgagctcgcctgcatctactcggccctcattctgcacgacgatgaggtgacagtcacggaggataagatcaatgccctcattaaagcagccggtgtaaatgttgagcctttttggcctggcttgtttgcaaaggccctggccaacgtcaacattgggagcctcatctgcaatgtaggggccggtggacctgctccagcagctggtgctgcaccagcaggaggtcctgccccctccactgctgctgctccagctgaggagaagaaagtggaagcaaagaaagaagaatccgaggagtctgatgatgacatgggctttggtctttttgactaaacctcttttataacatgttcaataaaaagctgaactttaggaccatcgttgcaacgatggtcctcagcttctcga

SEQ ID NO: 108173 - DNA, 505 bp, Homo sapiens
cttccaaccggttgcggccggcttctaaaaattaatggaaccccggggctgcaggaaatcggcaacgaacctcctcagctgccgccaaggtgctcggtccttccgaggaagctaaggctgcgttggggtgaggccctcacttcatccggcgactagcaccgcgtccggcagcgccagccctacactcgcccgcgccatggcctctgtctccgagctcgcctgcatctactcggccctcattctgcacgacgatgaggtgacagtcacggccctggccaacgtcaacattgggagcctcatctgcaatgtaggggccggtggacctgctccagcagctggtgctgcaccagcaggaggtcctgccccctccactgctgctgctccagctgaggagaagaaagtggaagcaaagaaagaagaatccgaggagtctgatgatgacatgggctttggtctttttgactaaacctcttttataacatgttcaataaaaagctgaacttta

SEQ ID NO: 108174 - DNA, 258 bp, Homo sapiens
  misc_feature (8)..(8): n is a, c, g, or t
  misc_feature (33)..(33): n is a, c, g, or t
gcggccgnctactactactaaattcgcggccgntcgaccattgggagcctcatctgcaatgtaggggccggtggacctgctccagcagctggtgctgcaccagcaggaggtcctgccccctccactgctgctgctccagctgaggagaagaaagtggaagcaaagaaagaagaatccgaggagtctgatgatgacatgggctttggtctttttgactaaacctcttttataacatgttcaataaaaagctgaacttta

SEQ ID NO: 108175 - DNA, 221 bp, Homo sapiens
  misc_feature (45)..(45): n is a, c, g, or t
aattcgcggccgcgtcgacacggtgcgagaagacgacagaagggnaggcagctggtgctgcaccagcaggaggtcctgccccctccactgctgctgctccagctgaggagaagaaagtggaagcaaagaaagaagaatccgaggagtctgatgatgacatgggctttggtctttttgactaaacctcttttataacatgttcaataaaaagctgaacttta

SEQ ID NO: 108176 - DNA, 233 bp, Homo sapiens
cgagctcggtaccccaacgatggtcctgcagctggtgctgcaccagcaggaggtcctgccccctccactgctgctgctccagctgaggagaagaaagtggaagcaaagaaagaagaatccgaggagtctgatgatgacatgggctttggtctttttgactaaacctcttttataacatgttcaataaaaagctgaactttaggaccatcgttgggatcctctagatcaactcg

SEQ ID NO: 108177 - DNA, 690 bp, Homo sapiens
  misc_feature (573)..(573): n is a, c, g, or t
aagaggctacgtagaggcgactaggcccctttcctcagcttcctcagctgccgccaaggtgctcggtccttccgaggaagctaaggctgcgttggggtgaggccctcacttcatccggcgactagcaccgcgtccggcagcgccagccctacactcgcccgcgccatggcctctgtctccgagctcgcctgcatctactcggccctcattctgcacgacgatgaggtgacagtcacggaggataagatcaatgccctcattaaagcagccggtgtaaatgttgagcctttttggcctggcttgtttgcaaaggccctggccaacgtcaacattgggagcctcatctgcaatgtaggggccggtggacctgctccagcagctggtgctgcaccagcaggaggtcctgccccctccactgctgctgctccagctgaggagaagaaagtggaagcaaagaaagaagaatccgaggagtctgatgatgacatgggctttggtctttttgactaaacctcttttataacatgttcaataaaaagctgaactttaaaaaaaaaaaaaaaaaaaaaatanatataatataattaaataaaaattttttaattaatacaaaaataggaggggaacaaagaattaaaaattaaaaagagaaggggcccatattcggggccaactgggccaatatccccc

SEQ ID NO: 108178 - DNA, 409 bp, Homo sapiens
gtgcatatgctaggactaagctttggccagtatgactcacatggtaacagacagggctgctggggccctgtctgtcaccagaaaggtgacagtcacggaggataagatcaatgccctcattaaagcagccggtgtaaatgttgagcctttttggcctggcttgtttgcaaaggccctggccaacgtcaacattgggagcctcatctgcaatgtaggggccggtggacctgctccagcagctggtgctgcaccagcaggaggtcctgccccctccactgctgctgctccagctgaggagaagaaagtggaagcaaagaaagaagaatccgaggagtctgatgatgacatgggctttggtctttttgactaaacctcttttataacatgttcaataaaaagctgaacttta

SEQ ID NO: 108179 - DNA, 577 bp, Homo sapiens
ctatgcacatcctcctgtatactttagaagtctacatgtttggtacacatgcttatttttccactgttgaatccatggatgtggaactcactgtatatagtgttaggggttgatcactgtaacctggaatgggggatacttttcgtttttggctgcgtgagtgcttaacaaggacagaactgggcgtttacctatgcatgcacatgtattgcaggccctggccaacgtcaacattgggagcctcatctgcaatgtaggggccggtggacctgctccagcagctggtgctgcaccagcaggaggtcctgccccctccactgctgctgctccagctgaggagaagaaagtggaagcaaagaaagaagaatccgaggagtctgatgatgacatgggctttggtctttttgactaaacctcttttataacatgttcaataaaaagctgaactttaaaaaaaaaaaaaaaaaaaaaaaaaaaaaaaaaaaaaaaaaaaaaaaaaaaaaaaaaaaacaaaaacaaaaaaaaaaaaaaaaagaaacaaaaaaaaaaaaaaaaaaaaaaagagaggggggggggg

SEQ ID NO: 108180 - DNA, 848 bp, Homo sapiens
aagaggctacgtagaggcgactaggcccctttcctcagcttcctcagctgccgccaaggtgctcggtccttccgaggaagctaaggctgcgttggggtgaggccctcacttcatccggcgactagcaccgcgtccggcagcgccagccctacactcgcccgcgccatggcctctgtctccgagctcgcctgcatctactcggccctcattctgcacgacgatgaggtgacagtcacggaggataagatcaatgccctcattaaagcagccggtgtaaatgttgagcctttttggcctggcttgtttgcaaaggccctggccaacgtcaacattgggagcctcatctgcaatgtaggggccggtggacctgctccagcagctggtgctgcaccagcaggaggtcctgccccctccactgctgctgctccagctgaggagaagaaagtggaagcaaagaaagaagaatccgaggagtctgatgatgacatgggctttggtctttttgactaaacctcttttataacatgttcaataaaaagctgaactttaaacaaaaaaaaaaaggggggccgcccttttttttttttttaaggatgaaaacgcgcaactctacctcttgcgggtccacaaacacccgctcgccggaacgaggccgcgggggcgcgtgtcattattgggttcccccccaaccccgaggaagggagcttaggttcccaaataaagggcctgagggggggggtacccggccttgggcgtggagctccggtgggagggagaccccgtattcctccaggagtgggagcgccgtcccacgagggtcttgccccagagcccctccggtcccccta

SEQ ID NO: 108181 - DNA, 451 bp, Homo sapiens
ctatgcacatcctcctgtatactttagaagtctacatgtttggtacacatgcttatttttccactgttgaatccatggatgtggaactcactgtatatagtgttaggggttgatcactgtaacctggaatgggggatacttttcgtttttggctgcgtgagtgcttaacaaggacagaactgggcgtttacctatgcatgcacatgtattgcaggccctggccaacgtcaacattgggagcctcatctgcaatgtaggggccggtggacctgctccagcagctggtgctgcaccagcaggaggtcctgccccctccactgctgctgctccagctgaggagaagaaagtggaagcaaagaaagaagaatccgaggagtctgatgatgacatgggctttggtctttttgactaaacctcttttataacatgttcaataaaaagctgaacttta

SEQ ID NO: 108182 - DNA, 549 bp, Homo sapiens
aagaggctacgtagaggcgactaggcccctttcctcagcttcctcagctgccgccaaggtgctcggtccttccgaggaagctaaggctgcgttggggtgaggccctcacttcatccggcgactagcaccgcgtccggcagcgccagccctacactcgcccgcgccatggcctctgtctccgagctcgcctgcatctactcggccctcattctgcacgacgatgaggtgacagtcacggaggataagatcaatgccctcattaaagcagccggtgtaaatgttgagcctttttggcctggcttgtttgcaaaggccctggccaacgtcaacattgggagcctcatctgcaatgtaggggccggtggacctgctccagcagctggtgctgcaccagcaggaggtcctgccccctccactgctgctgctccagctgaggagaagaaagtggaagcaaagaaagaagaatccgaggagtctgatgatgacatgggctttggtctttttgactaaacctcttttataacatgttcaataaaaagctgaacttta

SEQ ID NO: 108183 - DNA, 299 bp, Homo sapiens
  misc_feature (23)..(23): n is a, c, g, or t
  misc_feature (243)..(243): n is a, c, g, or t
accggcgctgactaccggcgtantgcacgacgatgaggtgacagtcacggaggataagatcaatgccctcattaaagcagccggtgtaaatgttgagcctttttggcctggcttgtttgcaaaggccctggccaacgtcaacattgggagcctcatctgcaatgtaggggccggtggacctgctccagcagctggtgctgcaccagcaggaggtcctgccccctccactgctgctgctccagntgaggagaagaaagtggaagcaataagaagagccgagtgggtcctctagatcaccg

SEQ ID NO: 108184 - DNA, 207 bp, Homo sapiens
tcgtgccgaattcggcacgagcggcacgagcacgcagctggtgctgcaccagcaggaggtcctgccccctccactgctgctgctccagctgaggagaagaaagtggaagcaaagaaagaagaatccgaggagtctgatgatgacatgggctttggtctttttgactaaacctcttttataacatgttcaataaaaagctgaacttta

SEQ ID NO: 108185 - DNA, 463 bp, Homo sapiens
agactagttctctctctctttccttcatccggcgactagcaccgcgtccggcagcgccagccctacactcgcccgcgccatggcctctgtctccgagctcgcctgcatctactcggccctcattctgcacgacgatgaggtgacagtcacggaggataagatcaatgccctcattaaagcagccggtgtaaatgttgagcctttttggcctggcttgtttgcaaaggccctggccaacgtcaacattgggagcctcatctgcaatgtaggggccggtggacctgctccagcagctggtgctgcaccagcaggaggtcctgccccctccactgctgctgctccagctgaggagaagaaagtggaagcaaagaaagaagaatccgaggagtctgatgatgacatgggctttggtctttttgactaaacctcttttataacatgttcaataaaaagctgaacttta

SEQ ID NO: 108186 - DNA, 148 bp, Homo sapiens
tctagaggatcccgtaagagaccaggtagctgaggagaagaaagtggaagcaaagaaagaagaatccgaggagtctgatgatgacatgggctttggtctttttgactaaacctcttttataacatgttcaataaaaagctgaacttta

SEQ ID NO: 108187 - DNA, 177 bp, Homo sapiens
cgagtgatcccttatttccttctttattgcttcctgccctccactgctgctgctccagctgaggagaagaaagtggaagcaaagaaagaagaatccgaggagtctgatgatgacatgggctttggtctttttgactaaacctcttttataacatgttcaataaaaagctgaacttta

SEQ ID NO: 108188 - DNA, 682 bp, Homo sapiens
atattacatacgctacgttttgatggattgacgtttttatttgttgtaggaggataagatcaatgccctcattaaagcagccggtgtaaatgttgagcctttttggcctggcttgtttgcaaagggtaaggtgatggtggcaaagtgattgtggtaaggcctgctgatttacgagggcagttgtacatgctaaagtacccccagcggtgccataacgccccacatgccgctggatctcctaggtgtttttcgttgcatgtatatctctaggagctaataagatttcagcttgtcaagtcttacgtttccttatcagactctggtttcccttttgctctgaaaccatggttaaaaaaaatgtgaatcaggtcatttattcccaaaaagggtcactcgggagataggtactacgcatgttaagttgcaagcaaattctttttctttttcttttttttttcttgagacggagtcacccaggctggagtgcagtggtgcgatctcagctcactgcaagctccgcctcccgggttcacgccattatcctgcctcagcctcccgagcagctgggactacaggcgtgcgccaccatgcctggctaatttttgtgtgtgtgtttagtagtgacggggtttcaccatgttagccaggatggtctcgatctcctgacctcgtgatccccccg

SEQ ID NO: 108189 - DNA, 582 bp, Homo sapiens
tccctggtggtctagtggttaggatttggcgttctcaccgccgcggcccgggttcgattcccggtcagggaactcctcagctgccgccaaggtgctcggtccttccgaggaagctaaggctgcgttggggtgaggccctcacttcatccggcgactagcaccgcgtccggcagcgccagccctacactcgcccgcgccatggcctctgtctccgagctcgcctgcatctactcggccctcattctgcacgacgatgaggtgacagtcacggaggataagatcaatgccctcattaaagcagccggtgtaaatgttgagcctttttggcctggcttgtttgcaaaggccctggccaacgtcaacattgggagcctcatctgcaatgtaggggccggtggacctgctccagcagctggtgctgcaccagcaggaggtcctgccccctccactgctgctgctccagctgaggagaagaaagtggaagcaaagaaagaagaatccgaggagtctgatgatgacatgggctttggtctttttgactaaacctcttttataacatgttcaataaaaagctgaacttta

SEQ ID NO: 108190 - DNA, 982 bp, Homo sapiens
atgggaaatgctttcgccacagcctgttcagagaaacatgatccctgacccggaaatggaggaggagacagagttccttgagctcggaaccaggatatcaagaccaaatggactactgtcagaggatgtaggaatggacatcccctttgaagagggcgtgctgagtccccgtgctgcagacatgaggcctgaacctcctaattctctggatcttaatgacactcatcctcggagaccacgatggtcctcagctgccgccaaggtgctcggtccttccgaggaagctaaggctgcgttggggtgaggccctcacttcatccggcgactagcaccgcgtccggcagcgccagccctacactcgcccgcgccatggcctctgtctccgagctcgcctgcatctactcggccctcattctgcacgacgatgaggtgacagtcacggaggataagatcaatgccctcattaaagcagccggtgtaaatgttgagcctttttggcctggcttgtttgcaaaggccctggccaacgtcaacattgggagcctcatctgcaatgtaggggccggtggacctgctccagcagctggtgctgcaccagcaggaggtcctgccccctccactgctgctgctccagctgaggagaagaaagtggaagcaaagaaagaagaatccgaggagtctgatgatgacatgggctttggtctttttgactaaacctcttttataacatgttcaataaaaagctgaactttaaaaaaaaaaaaaaacaaaaacaaaaacaactctatcaccttacctacccactactaccaatcttacaaaaaaaaaaaactcggggggggccccggcccccatttggccttatgggggcggattacaaataacgggccggggtttaaaaccggcgggcatgggaaaaccgtggggttcccaccttaatccgcttgggaaaaatcccctttttgccggtgtgggaatacca

SEQ ID NO: 108191 - DNA, 727 bp, Homo sapiens
  misc_feature (651)..(651): n is a, c, g, or t
  misc_feature (679)..(679): n is a, c, g, or t
aaaaattaggctagagggccgcggtaaatcggagagggtcctcagctgccgccaaggtgctcggtccttccgaggaagctaaggctgcgttggggtgaggccctcacttcatccggcgactagcaccgcgtccggcagcgccagccctacactcgcccgcgccatggcctctgtctccgagctcgcctgcatctactcggccctcattctgcacgacgatgaggtgacagtcacggaggataagatcaatgccctcattaaagcagccggtgtaaatgttgagcctttttggcctggcttgtttgcaaaggccctggccaacgtcaacattgggagcctcatctgcaatgtaggggccggtggacctgctccagcagctggtgctgcaccagcaggaggtcctgccccctccactgctgctgctccagctgaggagaagaaagtggaagcaaagaaagaagaatccgaggagtctgatgatgacatgggctttggtctttttgactaaacctcttttataacatgttcaataaaaagctgaactttaaaaaaaaaaaaaaaaaaaaaaaaaaaaaaaaaaaaaaaaaaaaaaaaaaaaaaaaaaataatatataaataatttattatttatataaaataatattttttatntgggtgtataaaaatatttattttaatnaagggcccaaattgagcgctatttgcaaatatcccctttttggggggg

SEQ ID NO: 108192 - DNA, 851 bp, Homo sapiens
atgggaaatgctttcgccacagcctgttcagagaaacatgatccctgacccggaaatggaggaggagacagagttccttgagctcggaaccaggatatcaagaccaaatggactactgtcagaggatgtaggaatggacatcccctttgaagagggcgtgctgagtccccgtgctgcagacatgaggcctgaacctcctaattctctggatcttaatgacactcatcctcggagaccacgatggtcctcagctgccgccaaggtgctcggtccttccgaggaagctaaggctgcgttggggtgaggccctcacttcatccggcgactagcaccgcgtccggcagcgccagccctacactcgcccgcgccatggcctctgtctccgagctcgcctgcatctactcggccctcattctgcacgacgatgaggtgacagtcacggaggataagatcaatgccctcattaaagcagccggtgtaaatgttgagcctttttggcctggcttgtttgcaaaggccctggccaacgtcaacattgggagcctcatctgcaatgtaggggccggtggacctgctccagcagctggtgctgcaccagcaggaggtcctgccccctccactgctgctgctccagctgaggagaagaaagtggaagcaaagaaagaagaatccgaggagtctgatgatgacatgggctttggtctttttgactaaacctcttttataacatgttcaataaaaagctgaactttaaaaaaaaaaaaaaaaaaaaaaaaaaaaaaaaaaaaaaaaaaaaaaaaaaaaaaaaaaaaaaaaaaaaaaaaaaaaaaaaaaaagagaggggggggggg

SEQ ID NO: 108193 - DNA, 1174 bp, Homo sapiens
  misc_feature (977)..(977): n is a, c, g, or t
atgggaaatgctttcgccacagcctgttcagagaaacatgatccctgacccggaaatggaggaggagacagagttccttgagctcggaaccaggatatcaagaccaaatggactactgtcagaggatgtaggaatggacatcccctttgaagagggcgtgctgagtccccgtgctgcagacatgaggcctgaacctcctaattctctggatcttaatgacactcatcctcggagaccacgatggtcctcagctgccgccaaggtgctcggtccttccgaggaagctaaggctgcgttggggtgaggccctcacttcatccggcgactagcaccgcgtccggcagcgccagccctacactcgcccgcgccatggcctctgtctccgagctcgcctgcatctactcggccctcattctgcacgacgatgaggtgacagtcacggaggataagatcaatgccctcattaaagcagccggtgtaaatgttgagcctttttggcctggcttgtttgcaaaggccctggccaacgtcaacattgggagcctcatctgcaatgtaggggccggtggacctgctccagcagctggtgctgcaccagcaggaggtcctgccccctccactgctgctgctccagctgaggagaagaaagtggaagcaaagaaagaagaatccgaggagtctgatgatgacatgggctttggtctttttgactaaacctcttttataacatgttcaataaaaagctgaactttaaaaaaaaaaaaaaaaaaaaaaaaaaaagggggggtttttggggggggggaaaaaggggttgaatggcgcactgggccatacgcggtttcccggaccccacgtttcttgtgtgtcaccagcgggggcaaaactggcggggcgcccccccatatgggggaggcgcgaattaaaatttcccgaaaaagcccggggttacccgggttaggtgtctgcggccagacacngggacaaccgacacacgacacaacaccaacacagcacgcgacgggaaccacacagagtgagccgagcaaaaacgacgccaccaacgacacgagcaacagcacaaacgaaacacacacaacacactagacaacgtcacagaccacacacatacgaacacgacagccagagccggacgcacatatcagtcagacggcgt

SEQ ID NO: 108194 - DNA, 1265 bp, Homo sapiens
  misc_feature (929)..(929): n is a, c, g, or t
atgggaaatgctttcgccacagcctgttcagagaaacatgatccctgacccggaaatggaggaggagacagagttccttgagctcggaaccaggatatcaagaccaaatggactactgtcagaggatgtaggaatggacatcccctttgaagagggcgtgctgagtccccgtgctgcagacatgaggcctgaacctcctaattctctggatcttaatgacactcatcctcggagaccacgatggtcctcagctgccgccaaggtgctcggtccttccgaggaagctaaggctgcgttggggtgaggccctcacttcatccggcgactagcaccgcgtccggcagcgccagccctacactcgcccgcgccatggcctctgtctccgagctcgcctgcatctactcggccctcattctgcacgacgatgaggtgacagtcacggaggataagatcaatgccctcattaaagcagccggtgtaaatgttgagcctttttggcctggcttgtttgcaaaggccctggccaacgtcaacattgggagcctcatctgcaatgtaggggccggtggacctgctccagcagctggtgctgcaccagcaggaggtcctgccccctccactgctgctgctccagctgaggagaagaaagtggaagcaaagaaagaagaatccgaggagtctgatgatgacatgggctttggtctttttgactaaacctcttttataacatgttcaataaaaagctgaactttaaaaaaaaaaaaaaaaaaaaaaaaaaaaacaaacaaaaaaaacacaaaaaaacaaaaaaaaaaaaaaaaaaaggggggggggggggggggggccaaaaaaattcccccgggggggccaccacaaaggttatacagcagacaccccgtattttagtaaaaaaaggcgggcgccccaanaagaggggcggcgcctcataaaaagaacaaggacgcgggcgcgcggcagtaaaaccacacgcgcggggagaggacacaacagcgtagagagggacatcgaaggagggggcgcaccccccaaccgcggcgggggcggcgggcacgatatgtcggaccccaacaccaccacgaaggagtataaagccccccgagaggaaagaaatacacacagagaagaggggggacagggggggacaacccacacaggacaatatcacgcgcgcgaagaaaaattgcacccacacaccgactattatcagaagacaagaccgcgcggggggcgaaaaaacatctaag

SEQ ID NO: 108195 - DNA, 1028 bp, Homo sapiens
  misc_feature (895)..(895): n is a, c, g, or t
atgggaaatgctttcgccacagcctgttcagagaaacatgatccctgacccggaaatggaggaggagacagagttccttgagctcggaaccaggatatcaagaccaaatggactactgtcagaggatgtaggaatggacatcccctttgaagagggcgtgctgagtccccgtgctgcagacatgaggcctgaacctcctaattctctggatcttaatgacactcatcctcggagaccacgatggtcctcagctgccgccaaggtgctcggtccttccgaggaagctaaggctgcgttggggtgaggccctcacttcatccggcgactagcaccgcgtccggcagcgccagccctacactcgcccgcgccatggcctctgtctccgagctcgcctgcatctactcggccctcattctgcacgacgatgaggtgacagtcacggaggataagatcaatgccctcattaaagcagccggtgtaaatgttgagcctttttggcctggcttgtttgcaaaggccctggccaacgtcaacattgggagcctcatctgcaatgtaggggccggtggacctgctccagcagctggtgctgcaccagcaggaggtcctgccccctccactgctgctgctccagctgaggagaagaaagtggaagcaaagaaagaagaatccgaggagtctgatgatgacatgggctttggtctttttgactaaacctcttttataacatgttcaataaaaagctgaactttaaaaaaaaaaaaaaaaaaaaaaaaaaaaggggcccgccccagggggttgccagggcctcaggacttgcttgggccccaaggaattgcagaggcatcctgggacctcatgggcccttggggacctcaaggggccacctggaccncaagggtagttctggtcctcaaggtcatatgggtcctcagggtccacctggcccagaggtcacttaggccccaaggccgctgggcctcaggtacttggcccagggccccggaccaggttgcggccctgcccag

SEQ ID NO: 108196 - DNA, 894 bp, Homo sapiens
  misc_feature (777)..(777): n is a, c, g, or t
atgggaaatgctttcgccacagcctgttcagagaaacatgatccctgacccggaaatggaggaggagacagagttccttgagctcggaaccaggatatcaagaccaaatggactactgtcagaggatgtaggaatggacatcccctttgaagagggcgtgctgagtccccgtgctgcagacatgaggcctgaacctcctaattctctggatcttaatgacactcatcctcggagaccacgatggtcctcagctgccgccaaggtgctcggtccttccgaggaagctaaggctgcgttggggtgaggccctcacttcatccggcgactagcaccgcgtccggcagcgccagccctacactcgcccgcgccatggcctctgtctccgagctcgcctgcatctactcggccctcattctgcacgacgatgaggtgacagtcacggaggataagatcaatgccctcattaaagcagccggtgtaaatgttgagcctttttggcctggcttgtttgcaaaggccctggccaacgtcaacattgggagcctcatctgcaatgtaggggccggtggacctgctccagcagctggtgctgcaccagcaggaggtcctgccccctccactgctgctgctccagctgaggagaagaaagtggaagcaaagaaagaagaatccgaggagtctgatgatgacatgggctttggtctttttgactaaacctcttttataacatgttcaataaaaagctgaactttaaaaaaaaaaaaaaaaaaaaaatanatataatataattaaataaaaattttttaattaatacaaaaataggaggggaacaaagaattaaaaattaaaaagagaaggggcccatattcggggccaactgggccaatatccccc

SEQ ID NO: 108197 - DNA, 1405 bp, Homo sapiens
atgggaaatgctttcgccacagcctgttcagagaaacatgatccctgacccggaaatggaggaggagacagagttccttgagctcggaaccaggatatcaagaccaaatggactactgtcagaggatgtaggaatggacatcccctttgaagagggcgtgctgagtccccgtgctgcagacatgaggcctgaacctcctaattctctggatcttaatgacactcatcctcggagaccacgatggtcctcagctgccgccaaggtgctcggtccttccgaggaagctaaggctgcgttggggtgaggccctcacttcatccggcgactagcaccgcgtccggcagcgccagccctacactcgcccgcgccatggcctctgtctccgagctcgcctgcatctactcggccctcattctgcacgacgatgaggtgacagtcacggaggataagatcaatgccctcattaaagcagccggtgtaaatgttgagcctttttggcctggcttgtttgcaaaggccctggccaacgtcaacattgggagcctcatctgcaatgtaggggccggtggacctgctccagcagctggtgctgcaccagcaggaggtcctgccccctccactgctgctgctccagctgaggagaagaaagtggaagcaaagaaagaagaatccgaggagtctgatgatgacatgggctttggtctttttgactaaacctcttttataacatgttcaataaaaagctgaactttaactgctgttggtcttgtccatagttttggaatgtgctctgcaaaaatggtctgttttgtaatgttggctttcagcctattctgccatgacacaggctggattttccctgccaccattgccggatgtgagatttagacaatcctgatgctaacaagaaggcacctcatggtacagtgttgaaaactgcactggggtggcaggaggaaggatcagagcagatgctttgtccaggttacctgtgtaaacttgatgattataaggtgtgtcccctacactgggggtggagggtaatacagaccagctttagaaagcctcctgggtatttaccctatacaaccctgcctaagaacgaactttgacgtatgctgaatgttgactgctacatcccaaggttgtaaaaaaacaagacttagctatgtaatgtctcaccaaatgtttgggagttttatgataacactgaaggagtgcagaaagtttacttaatagtttattaaggtctccagttacacaaagtggaaaaaaaaaagattcaaacctgtgttccaaaaactaagagctttttttgtttgccaattaataataccatgaatggaattttcaacttttcaggcttggatttatataataaaccgtgggtattgtgtgttcagag

SEQ ID NO: 108198 - DNA, 1052 bp, Homo sapiens
atgggaaatgctttcgccacagcctgttcagagaaacatgatccctgacccggaaatggaggaggagacagagttccttgagctcggaaccaggatatcaagaccaaatggactactgtcagaggatgtaggaatggacatcccctttgaagagggcgtgctgagtccccgtgctgcagacatgaggcctgaacctcctaattctctggatcttaatgacactcatcctcggagaccacgatggtcctcagctgccgccaaggtgctcggtccttccgaggaagctaaggctgcgttggggtgaggccctcacttcatccggcgactagcaccgcgtccggcagcgccagccctacactcgcccgcgccatggcctctgtctccgagctcgcctgcatctactcggccctcattctgcacgacgatgaggtgacagtcacggaggataagatcaatgccctcattaaagcagccggtgtaaatgttgagcctttttggcctggcttgtttgcaaaggccctggccaacgtcaacattgggagcctcatctgcaatgtaggggccggtggacctgctccagcagctggtgctgcaccagcaggaggtcctgccccctccactgctgctgctccagctgaggagaagaaagtggaagcaaagaaagaagaatccgaggagtctgatgatgacatgggctttggtctttttgactaaacctcttttataacatgttcaataaaaagctgaactttaaacaaaaaaaaaaaggggggccgcccttttttttttttttaaggatgaaaacgcgcaactctacctcttgcgggtccacaaacacccgctcgccggaacgaggccgcgggggcgcgtgtcattattgggttcccccccaaccccgaggaagggagcttaggttcccaaataaagggcctgagggggggggtacccggccttgggcgtggagctccggtgggagggagaccccgtattcctccaggagtgggagcgccgtcccacgagggtcttgccccagagcccctccggtcccccta

SEQ ID NO: 108199 - DNA, 1218 bp, Homo sapiens
  misc_feature (882)..(882): n is a, c, g, or t
atgggaaatgctttcgccacagcctgttcagagaaacatgatccctgacccggaaatggaggaggagacagagttccttgagctcggaaccaggatatcaagaccaaatggactactgtcagaggatgtaggaatggacatcccctttgaagagggcgtgctgagtccccgtgctgcagacatgaggcctgaacctcctaattctctggatcttaatgacactcatcctcggagaccacgatggtcctcagctgccgccaaggtgctcggtccttccgaggaagctaaggctgcgttggggtgaggccctcacttcatccggcgactagcaccgcgtccggcagcgccagccctacactcgcccgcgccatggcctctgtctccgagctcgcctgcatctactcggccctcattctgcacgacgatgaggtgacagtcacggaggataagatcaatgccctcattaaagcagccggtgtaaatgttgagcctttttggcctggcttgtttgcaaaggccctggccaacgtcaacattgggagcctcatctgcaatgtaggggccggtggacctgctccagcagctggtgctgcaccagcaggaggtcctgccccctccactgctgctgctccagctgaggagaagaaagtggaagcaaagaaagaagaatccgaggagtctgatgatgacatgggctttggtctttttgactaaacctcttttataacatgttcaataaaaagctgaactttaacaaacaaaaaaaacacaaaaaaacaaaaaaaaaagggggggggccaaaaaaattcccccgggggggccaccacaaaggttatacagcagacaccccgtattttagtaaaaaaaggcgggcgccccaanaagaggggcggcgcctcataaaaagaacaaggacgcgggcgcgcggcagtaaaaccacacgcgcggggagaggacacaacagcgtagagagggacatcgaaggagggggcgcaccccccaaccgcggcgggggcggcgggcacgatatgtcggaccccaacaccaccacgaaggagtataaagccccccgagaggaaagaaatacacacagagaagaggggggacagggggggacaacccacacaggacaatatcacgcgcgcgaagaaaaattgcacccacacaccgactattatcagaagacaagaccgcgcggggggcgaaaaaacatctaag

SEQ ID NO: 108200 - DNA, 856 bp, Homo sapiens
atgggaaatgctttcgccacagcctgttcagagaaacatgatccctgacccggaaatggaggaggagacagagttccttgagctcggaaccaggatatcaagaccaaatggactactgtcagaggatgtaggaatggacatcccctttgaagagggcgtgctgagtccccgtgctgcagacatgaggcctgaacctcctaattctctggatcttaatgacactcatcctcggagaccacgatggtcctcagctgccgccaaggtgctcggtccttccgaggaagctaaggctgcgttggggtgaggccctcacttcatccggcgactagcaccgcgtccggcagcgccagccctacactcgcccgcgccatggcctctgtctccgagctcgcctgcatctactcggccctcattctgcacgacgatgaggtgacagtcacggaggataagatcaatgccctcattaaagcagccggtgtaaatgttgagcctttttggcctggcttgtttgcaaaggccctggccaacgtcaacattgggagcctcatctgcaatgtaggggccggtggacctgctccagcagctggtgctgcaccagcaggaggtcctgccccctccactgctgctgctccagctgaggagaagaaagtggaagcaaagaaagaagaatccgaggagtctgatgatgacatgggctttggtctttttgactaaacctcttttataacatgttcaataaaaagctgaactttaacaaacaaaaaaaacacaaaaaaacaaaaaaaaaaaaaaaaaaaaaaaaaaaaaaaaaaaaaaaaaaaaaaaaaaaaaaaaaaaaaaagagaggggggggggg

SEQ ID NO: 108201 - DNA, 906 bp, Homo sapiens
atgggaaatgctttcgccacagcctgttcagagaaacatgatccctgacccggaaatggaggaggagacagagttccttgagctcggaaccaggatatcaagaccaaatggactactgtcagaggatgtaggaatggacatcccctttgaagagggcgtgctgagtccccgtgctgcagacatgaggcctgaacctcctaattctctggatcttaatgacactcatcctcggagaccacgatggtcctcagctgccgccaaggtgctcggtccttccgaggaagctaaggctgcgttggggtgaggccctcacttcatccggcgactagcaccgcgtccggcagcgccagccctacactcgcccgcgccatggcctctgtctccgagctcgcctgcatctactcggccctcattctgcacgacgatgaggtgacagtcacggaggataagatcaatgccctcattaaagcagccggtgtaaatgttgagcctttttggcctggcttgtttgcaaaggccctggccaacgtcaacattgggagcctcatctgcaatgtaggggccggtggacctgctccagcagctggtgctgcaccagcaggaggtcctgccccctccactgctgctgctccagctgaggagaagaaagtggaagcaaagaaagaagaatccgaggagtctgatgatgacatgggctttggtctttttgactaaacctcttttataacatgttcaataaaaagctgaactttataccgccgccccccgcccacaagcgcccgctcacggaggggccggacccacttcggcgtaaattgagtcgtatacaagtcaggggcgacggtttacaacgtcgtagcgtgtaaccctcgggttccctaatcgcctttgaccaatccctttgct

SEQ ID NO: 108202 - DNA, 1277 bp, Homo sapiens
  misc_feature (941)..(941): n is a, c, g, or t
atgggaaatgctttcgccacagcctgttcagagaaacatgatccctgacccggaaatggaggaggagacagagttccttgagctcggaaccaggatatcaagaccaaatggactactgtcagaggatgtaggaatggacatcccctttgaagagggcgtgctgagtccccgtgctgcagacatgaggcctgaacctcctaattctctggatcttaatgacactcatcctcggagaccacgatggtcctcagctgccgccaaggtgctcggtccttccgaggaagctaaggctgcgttggggtgaggccctcacttcatccggcgactagcaccgcgtccggcagcgccagccctacactcgcccgcgccatggcctctgtctccgagctcgcctgcatctactcggccctcattctgcacgacgatgaggtgacagtcacggaggataagatcaatgccctcattaaagcagccggtgtaaatgttgagcctttttggcctggcttgtttgcaaaggccctggccaacgtcaacattgggagcctcatctgcaatgtaggggccggtggacctgctccagcagctggtgctgcaccagcaggaggtcctgccccctccactgctgctgctccagctgaggagaagaaagtggaagcaaagaaagaagaatccgaggagtctgatgatgacatgggctttggtctttttgactaaacctcttttataacatgttcaataaaaagctgaactttaaaaaaaaaaaaaaaaaaaaaaaaaaaaaaaaaaaaaaaaaaaaaaaaaaaaaaaaaaaaaaaaaaaaaacaaaaaaaaaaaaaggggggggggggggggggggccaaaaaaattcccccgggggggccaccacaaaggttatacagcagacaccccgtattttagtaaaaaaaggcgggcgccccaanaagaggggcggcgcctcataaaaagaacaaggacgcgggcgcgcggcagtaaaaccacacgcgcggggagaggacacaacagcgtagagagggacatcgaaggagggggcgcaccccccaaccgcggcgggggcggcgggcacgatatgtcggaccccaacaccaccacgaaggagtataaagccccccgagaggaaagaaatacacacagagaagaggggggacagggggggacaacccacacaggacaatatcacgcgcgcgaagaaaaattgcacccacacaccgactattatcagaagacaagaccgcgcggggggcgaaaaaacatctaag

SEQ ID NO: 108203 - DNA, 934 bp, Homo sapiens
atgggaaatgctttcgccacagcctgttcagagaaacatgatccctgacccggaaatggaggaggagacagagttccttgagctcggaaccaggatatcaagaccaaatggactactgtcagaggatgtaggaatggacatcccctttgaagagggcgtgctgagtccccgtgctgcagacatgaggcctgaacctcctaattctctggatcttaatgacactcatcctcggagaccacgatggtcctcagctgccgccaaggtgctcggtccttccgaggaagctaaggctgcgttggggtgaggccctcacttcatccggcgactagcaccgcgtccggcagcgccagccctacactcgcccgcgccatggcctctgtctccgagctcgcctgcatctactcggccctcattctgcacgacgatgaggtgacagtcacggaggataagatcaatgccctcattaaagcagccggtgtaaatgttgagcctttttggcctggcttgtttgcaaaggccctggccaacgtcaacattgggagcctcatctgcaatgtaggggccggtggacctgctccagcagctggtgctgcaccagcaggaggtcctgccccctccactgctgctgctccagctgaggagaagaaagtggaagcaaagaaagaagaatccgaggagtctgatgatgacatgggctttggtctttttgactaaacctcttttataacatgttcaataaaaagctgaactttaaaaaaaaaaaaaaaaaaacaaaaaaaaaaaaaaaaaaaaaaaaaccgggggggatataaatgggggggggggaaaaaggggtttaaaaggggcggggcaaaggggttttcggcacccgtttttttacaggggggaaaagggggccccaatgggggggaataatggaagcggggtaccggaa

SEQ ID NO: 108204 - DNA, 1210 bp, Homo sapiens
  misc_feature (874)..(874): n is a, c, g, or t
atgggaaatgctttcgccacagcctgttcagagaaacatgatccctgacccggaaatggaggaggagacagagttccttgagctcggaaccaggatatcaagaccaaatggactactgtcagaggatgtaggaatggacatcccctttgaagagggcgtgctgagtccccgtgctgcagacatgaggcctgaacctcctaattctctggatcttaatgacactcatcctcggagaccacgatggtcctcagctgccgccaaggtgctcggtccttccgaggaagctaaggctgcgttggggtgaggccctcacttcatccggcgactagcaccgcgtccggcagcgccagccctacactcgcccgcgccatggcctctgtctccgagctcgcctgcatctactcggccctcattctgcacgacgatgaggtgacagtcacggaggataagatcaatgccctcattaaagcagccggtgtaaatgttgagcctttttggcctggcttgtttgcaaaggccctggccaacgtcaacattgggagcctcatctgcaatgtaggggccggtggacctgctccagcagctggtgctgcaccagcaggaggtcctgccccctccactgctgctgctccagctgaggagaagaaagtggaagcaaagaaagaagaatccgaggagtctgatgatgacatgggctttggtctttttgactaaacctcttttataacatgttcaataaaaagctgaactttaaaaaaaaaaaaaaaaaaaaaaaaaaaagggggggggccaaaaaaattcccccgggggggccaccacaaaggttatacagcagacaccccgtattttagtaaaaaaaggcgggcgccccaanaagaggggcggcgcctcataaaaagaacaaggacgcgggcgcgcggcagtaaaaccacacgcgcggggagaggacacaacagcgtagagagggacatcgaaggagggggcgcaccccccaaccgcggcgggggcggcgggcacgatatgtcggaccccaacaccaccacgaaggagtataaagccccccgagaggaaagaaatacacacagagaagaggggggacagggggggacaacccacacaggacaatatcacgcgcgcgaagaaaaattgcacccacacaccgactattatcagaagacaagaccgcgcggggggcgaaaaaacatctaag

SEQ ID NO: 108205 - DNA, 1149 bp, Homo sapiens
  misc_feature (761)..(761): n is a, c, g, or t
  misc_feature (764)..(764): n is a, c, g, or t
  misc_feature (768)..(768): n is a, c, g, or t
atgggaaatgctttcgccacagcctgttcagagaaacatgatccctgacccggaaatggaggaggagacagagttccttgagctcggaaccaggatatcaagaccaaatggactactgtcagaggatgtaggaatggacatcccctttgaagagggcgtgctgagtccccgtgctgcagacatgaggcctgaacctcctaattctctggatcttaatgacactcatcctcggagaccacgatggtcctcagctgccgccaaggtgctcggtccttccgaggaagctaaggctgcgttggggtgaggccctcacttcatccggcgactagcaccgcgtccggcagcgccagccctacactcgcccgcgccatggcctctgtctccgagctcgcctgcatctactcggccctcattctgcacgacgatgaggtgacagtcacggaggataagatcaatgccctcattaaagcagccggtgtaaatgttgagcctttttggcctggcttgtttgcaaaggccctggccaacgtcaacattgggagcctcatctgcaatgtaggggccggtggacctgctccagcagctggtgctgcaccagcaggaggtcctgccccctccactgctgctgctccagctgaggagaagaaagtggaagcaaagaaagaagaatccgaggagtctgatgatgacatgggctttggtctttttgactaaacctcttttataacatgttcaataaaaagctgaactttataaacaancanaccnaaaaacccaacccacacccaaccccaccccctccccacccaccacacacacactaccccaaccaacaccaccaaccccccccacccacaccaccccctccccacaccacacacacccccacacccccccccccaccccatctccctcaccccctccaccgcagtgacagcggtacagcagtcgtagagacctgccgcgggagcccggcgccacacaagccatcaggatagcgcgaccgacccgcagtacagagtgcgacgggcctcgtaaacgcgaaggaaggcactcgccatccagggagccacattgacgcgcagtgcaggcccccatgttacgaccggcacacacgggggggacagaggagacagccctcaaaccgct

SEQ ID NO: 108206 - DNA, 879 bp, Homo sapiens
  misc_feature (879)..(879): n is a, c, g, or t
atgggaaatgctttcgccacagcctgttcagagaaacatgatccctgacccggaaatggaggaggagacagagttccttgagctcggaaccaggatatcaagaccaaatggactactgtcagaggatgtaggaatggacatcccctttgaagagggcgtgctgagtccccgtgctgcagacatgaggcctgaacctcctaattctctggatcttaatgacactcatcctcggagaccacgatggtcctcagctgccgccaaggtgctcggtccttccgaggaagctaaggctgcgttggggtgaggccctcacttcatccggcgactagcaccgcgtccggcagcgccagccctacactcgcccgcgccatggcctctgtctccgagctcgcctgcatctactcggccctcattctgcacgacgatgaggtgacagtcacggaggataagatcaatgccctcattaaagcagccggtgtaaatgttgagcctttttggcctggcttgtttgcaaaggccctggccaacgtcaacattgggagcctcatctgcaatgtaggggccggtggacctgctccagcagctggtgctgcaccagcaggaggtcctgccccctccactgctgctgctccagctgaggagaagaaagtggaagcaaagaaagaagaatccgaggagtctgatgatgacatgggctttggtctttttgactaaacctcttttataacatgttcaataaaaagctgaactttaaaaaaagcgagactgggaaaccctgcgtacccacctaatcgcttggggacatcccctttgccgttgcgtaaacaacagcccgaacgacgcctttcaacattgccacccgatggcaatgcattttan

SEQ ID NO: 108207 - DNA, 789 bp, Homo sapiens
atgggaaatgctttcgccacagcctgttcagagaaacatgatccctgacccggaaatggaggaggagacagagttccttgagctcggaaccaggatatcaagaccaaatggactactgtcagaggatgtaggaatggacatcccctttgaagagggcgtgctgagtccccgtgctgcagacatgaggcctgaacctcctaattctctggatcttaatgacactcatcctcggagaccacgatggtcctcagctgccgccaaggtgctcggtccttccgaggaagctaaggctgcgttggggtgaggccctcacttcatccggcgactagcaccgcgtccggcagcgccagccctacactcgcccgcgccatggcctctgtctccgagctcgcctgcatctactcggccctcattctgcacgacgatgaggtgacagtcacggaggataagatcaatgccctcattaaagcagccggtgtaaatgttgagcctttttggcctggcttgtttgcaaaggccctggccaacgtcaacattgggagcctcatctgcaatgtaggggccggtggacctgctccagcagctggtgctgcaccagcaggaggtcctgccccctccactgctgctgctccagctgaggagaagaaagtggaagcaaagaaagaagaatccgaggagtctgatgatgacatgggctttggtctttttgactaaacctcttttataacatgttcaataaaaagctgaactttaggaccatcgttgcaacgatggtcctcagcttctcga

SEQ ID NO: 108208 - DNA, 1031 bp, Homo sapiens
  misc_feature (774)..(774): n is a, c, g, or t
  misc_feature (827)..(828): n is a, c, g, or t
  misc_feature (844)..(844): n is a, c, g, or t
  misc_feature (846)..(846): n is a, c, g, or t
  misc_feature (852)..(852): n is a, c, g, or t
  misc_feature (855)..(855): n is a, c, g, or t
  misc_feature (864)..(865): n is a, c, g, or t
  misc_feature (873)..(875): n is a, c, g, or t
  misc_feature (889)..(889): n is a, c, g, or t
atgggaaatgctttcgccacagcctgttcagagaaacatgatccctgacccggaaatggaggaggagacagagttccttgagctcggaaccaggatatcaagaccaaatggactactgtcagaggatgtaggaatggacatcccctttgaagagggcgtgctgagtccccgtgctgcagacatgaggcctgaacctcctaattctctggatcttaatgacactcatcctcggagaccacgatggtcctcagctgccgccaaggtgctcggtccttccgaggaagctaaggctgcgttggggtgaggccctcacttcatccggcgactagcaccgcgtccggcagcgccagccctacactcgcccgcgccatggcctctgtctccgagctcgcctgcatctactcggccctcattctgcacgacgatgaggtgacagtcacggaggataagatcaatgccctcattaaagcagccggtgtaaatgttgagcctttttggcctggcttgtttgcaaaggccctggccaacgtcaacattgggagcctcatctgcaatgtaggggccggtggacctgctccagcagctggtgctgcaccagcaggaggtcctgccccctccactgctgctgctccagctgaggagaagaaagtggaagcaaagaaagaagaatccgaggagtctgatgatgacatgggctttggtctttttgactaaacctcttttataacatgttcaataaaaagctgaactttacctataaaaaaaaaaaaaaanaaaaaaaaaaaaaaaaaaaaaaaaacctcgggggggggcccgggccccaattnnccctataggggggcgntnacaatncanggggcgggnnttacaaannnggggactgggaaanccctggggttccacaattattggccttgaaaaaatccccctttgcaagctggggtaaagcaaaaaggcccgaccgtcgccctccaaacatttgcgaccctgaaggcaatgcaaattgtagcggtatattttgggggttttgg

SEQ ID NO: 108209 - DNA, 804 bp, Homo sapiens
atgggaaatgctttcgccacagcctgttcagagaaacatgatccctgacccggaaatggaggaggagacagagttccttgagctcggaaccaggatatcaagaccaaatggactactgtcagaggatgtaggaatggacatcccctttgaagagggcgtgctgagtccccgtgctgcagacatgaggcctgaacctcctaattctctggatcttaatgacactcatcctcggagaccacgatggtcctcagctgccgccaaggtgctcggtccttccgaggaagctaaggctgcgttggggtgaggccctcacttcatccggcgactagcaccgcgtccggcagcgccagccctacactcgcccgcgccatggcctctgtctccgagctcgcctgcatctactcggccctcattctgcacgacgatgaggtgacagtcacggaggataagatcaatgccctcattaaagcagccggtgtaaatgttgagcctttttggcctggcttgtttgcaaaggccctggccaacgtcaacattgggagcctcatctgcaatgtaggggccggtggacctgctccagcagctggtgctgcaccagcaggaggtcctgccccctccactgctgctgctccagctgaggagaagaaagtggaagcaaagaaagaagaatccgaggagtctgatgatgacatgggctttggtctttttgactaaacctcttttataacatgttcaataaaaagctgaactttattttaaaagaaacgcgtatactatatatagatatttcttttaaacggggcc

SEQ ID NO: 108210 - DNA, 785 bp, Homo sapiens
atgggaaatgctttcgccacagcctgttcagagaaacatgatccctgacccggaaatggaggaggagacagagttccttgagctcggaaccaggatatcaagaccaaatggactactgtcagaggatgtaggaatggacatcccctttgaagagggcgtgctgagtccccgtgctgcagacatgaggcctgaacctcctaattctctggatcttaatgacactcatcctcggagaccacgatggtcctcagctgccgccaaggtgctcggtccttccgaggaagctaaggctgcgttggggtgaggccctcacttcatccggcgactagcaccgcgtccggcagcgccagccctacactcgcccgcgccatggcctctgtctccgagctcgcctgcatctactcggccctcattctgcacgacgatgaggtgacagtcacggaggataagatcaatgccctcattaaagcagccggtgtaaatgttgagcctttttggcctggcttgtttgcaaaggccctggccaacgtcaacattgggagcctcatctgcaatgtaggggccggtggacctgctccagcagctggtgctgcaccagcaggaggtcctgccccctccactgctgctgctccagctgaggagaagaaagtggaagcaaagaaagaagaatccgaggagtctgatgatgacatgggctttggtctttttgactaaacctcttttataacatgttcaataaaaagctgaactttacgtgccgctcgtgccgaattcctgcagcccgg

SEQ ID NO: 108211 - DNA, 480 bp, Homo sapiens
  misc_feature (8)..(8): n is a, c, g, or t
  misc_feature (33)..(33): n is a, c, g, or t
gcggccgnctactactactaaattcgcggccgntcgacccttcatccggcgactagcaccgcgtccggcagcgccagccctacactcgcccgcgccatggcctctgtctccgagctcgcctgcatctactcggccctcattctgcacgacgatgaggtgacagtcacggaggataagatcaatgccctcattaaagcagccggtgtaaatgttgagcctttttggcctggcttgtttgcaaaggccctggccaacgtcaacattgggagcctcatctgcaatgtaggggccggtggacctgctccagcagctggtgctgcaccagcaggaggtcctgccccctccactgctgctgctccagctgaggagaagaaagtggaagcaaagaaagaagaatccgaggagtctgatgatgacatgggctttggtctttttgactaaacctcttttataacatgttcaataaaaagctgaacttta

SEQ ID NO: 108212 - DNA, 748 bp, Homo sapiens
  misc_feature (740)..(740): n is a, c, g, or t
atgggaaatgctttcgccacagcctgttcagagaaacatgatccctgacccggaaatggaggaggagacagagttccttgagctcggaaccaggatatcaagaccaaatggactactgtcagaggatgtaggaatggacatcccctttgaagagggcgtgctgagtccccgtgctgcagacatgaggcctgaacctcctaattctctggatcttaatgacactcatcctcggagaccacgatggtcctcagctgccgccaaggtgctcggtccttccgaggaagctaaggctgcgttggggtgaggccctcacttcatccggcgactagcaccgcgtccggcagcgccagccctacactcgcccgcgccatggcctctgtctccgagctcgcctgcatctactcggccctcattctgcacgacgatgaggtgacagtcacggaggataagatcaatgccctcattaaagcagccggtgtaaatgttgagcctttttggcctggcttgtttgcaaaggccctggccaacgtcaacattgggagcctcatctgcaatgtaggggccggtggacctgctccagcagctggtgctgcaccagcaggaggtcctgccccctccactgctgctgctccagctgaggagaagaaagtggaagcaaagaaagaagaatccgaggagtctgatgatgacatgggctttggtctttttgacaaaaagaccaaagcccatggtcgacccgnccgcgaat

SEQ ID NO: 108213 - DNA, 722 bp, Homo sapiens
tccctggtggtctagtggttaggatttggcgttctcaccgccgcggcccgggttcgattcccggtcagggaactcctcagctgccgccaaggtgctcggtccttccgaggaagctaaggctgcgttggggtgaggccctcacttcatccggcgactagcaccgcgtccggcagcgccagccctacactcgcccgcgccatggcctctgtctccgagctcgcctgcatctactcggccctcattctgcacgacgatgaggtgacagtcacggaggataagatcaatgccctcattaaagcagccggtgtaaatgttgagcctttttggcctggcttgtttgcaaaggccctggccaacgtcaacattgggagcctcatctgcaatgtaggggccggtggacctgctccagcagctggtgctgcaccagcaggaggtcctgccccctccactgctgctgctccaggtaggaaacatggagtttttagtattgggaggagtgtagagatttttttaaaaatagtattatagacaaaattgccattaatttttcacaagtatatgaagtatggaaatcctaacacctgattgactttttttttctagctgaggagaagaaagtggaagcaaagaaagaagaatccgaggagtctgatgatgacatgggctttggtctttttgactaaacctcttttataacatgttcaataaaaagctgaacttta

SEQ ID NO: 108214 - DNA, 823 bp, Homo sapiens
  misc_feature (781)..(781): n is a, c, g, or t
tccctggtggtctagtggttaggatttggcgttctcaccgccgcggcccgggttcgattcccggtcagggaactcctcagctgccgccaaggtgctcggtccttccgaggaagctaaggctgcgttggggtgaggccctcacttcatccggcgactagcaccgcgtccggcagcgccagccctacactcgcccgcgccatggcctctgtctccgagctcgcctgcatctactcggccctcattctgcacgacgatgaggtgacagtcacggaggataagatcaatgccctcattaaagcagccggtgtaaatgttgagcctttttggcctggcttgtttgcaaaggccctggccaacgtcaacattgggagcctcatctgcaatgtaggggccggtggacctgctccagcagctggtgctgcaccagcaggaggtcctgccccctccactgctgctgctccaggtaggaaacatggagtttttagtattgggaggagtgtagagatttttttaaaaatagtattatagacaaaattgccattaatttttcacaagtatatgaagtatggaaatcctaacacctgattgactttttttttctagctgaggagaagaaagtggaagcaaagaaagaagaatccgaggagtctgatgatgacatgggctttggtctttttgactaaacctcttttataacatgttcaataaaaagctgaactttaaaaaaatgcacccgcttacagtgattaaaaacacacacacacacacaccacctacattntgtggggtctaatggaatagtggggaccagaactggatcttg

SEQ ID NO: 108215 - DNA, 483 bp, Homo sapiens
gcctactactactaaatttccccccggtgtcctcagctgccgccaaggtgctcggtccttccgaggaagctaaggctgcgttggggtgaggccctcacttcatccggcgactagcaccgcgtccggcagcgccagccctacactcgcccgcgccatggcctctgtctccgagctcgcctgcatctactcggccctcattctgcacgacgatgaggtgacagtcacggaggataagatcaatgccctcattaaagcagccggtgtaaatgttgagcctttttggcctggcttgtttgcaaaggccctggccaacgtcaacattgggagcctcatctgcaatgtaggggccggtggacctgctccactgaggagaagaaagtggaagcaaagaaagaagaatccgaggagtctgatgatgacatgggctttggtctttttgactaaacctcttttataacatgttcaataaaaagctgaacttta

SEQ ID NO: 108216 - DNA, 676 bp, Homo sapiens
  misc_feature (545)..(546): n is a, c, g, or t
  misc_feature (562)..(562): n is a, c, g, or t
  misc_feature (564)..(564): n is a, c, g, or t
  misc_feature (570)..(570): n is a, c, g, or t
  misc_feature (573)..(573): n is a, c, g, or t
  misc_feature (582)..(583): n is a, c, g, or t
  misc_feature (591)..(593): n is a, c, g, or t
  misc_feature (607)..(607): n is a, c, g, or t
gcctactactactaaatttccccccggtgtcctcagctgccgccaaggtgctcggtccttccgaggaagctaaggctgcgttggggtgaggccctcacttcatccggcgactagcaccgcgtccggcagcgccagccctacactcgcccgcgccatggcctctgtctccgagctcgcctgcatctactcggccctcattctgcacgacgatgaggtgacagtcacggaggataagatcaatgccctcattaaagcagccggtgtaaatgttgagcctttttggcctggcttgtttgcaaaggccctggccaacgtcaacattgggagcctcatctgcaatgtaggggccggtggacctgctccactgaggagaagaaagtggaagcaaagaaagaagaatccgaggagtctgatgatgacatgggctttggtctttttgactaaacctcttttataacatgttcaataaaaagctgaactttaaaaaaaaaaaaaaaaaaaaaaaaaaaacatgcgggccgcaatttgagcctacttggcaattnnccctataggggggcgntnacaatncanggggcgggnnttacaaannnggggactgggaaanccctgcgttacccacataaattgcttggggaaaacccccttttccgtggcggcggcccccccccccccc

SEQ ID NO: 108217 - DNA, 950 bp, Homo sapiens
  misc_feature (614)..(614): n is a, c, g, or t
tggctagtaagctgggtgtgaatcggcgaaggcgcccgcgccatggcctctgtctccgagctcgcctgcatctactcggccctcattctgcacgacgatgaggtgacagtcacggaggataagatcaatgccctcattaaagcagccggtgtaaatgttgagcctttttggcctggcttgtttgcaaaggccctggccaacgtcaacattgggagcctcatctgcaatgtaggggccggtggacctgctccagcagctggtgctgcaccagcaggaggtcctgccccctccactgctgctgctccagctgaggagaagaaagtggaagcaaagaaagaagaatccgaggagtctgatgatgacatgggctttggtctttttgactaaacctcttttataacatgttcaataaaaagctgaactttaaaaaaaaaaaaaaaaaaaaaaaaaaaaaaaaaaaaaaaaaaaaaaaaaaaaaaaaaaaaaaaaaaaaaacaaaaaaaaaaaaaggggggggggggggggggggccaaaaaaattcccccgggggggccaccacaaaggttatacagcagacaccccgtattttagtaaaaaaaggcgggcgccccaanaagaggggcggcgcctcataaaaagaacaaggacgcgggcgcgcggcagtaaaaccacacgcgcggggagaggacacaacagcgtagagagggacatcgaaggagggggcgcaccccccaaccgcggcgggggcggcgggcacgatatgtcggaccccaacaccaccacgaaggagtataaagccccccgagaggaaagaaatacacacagagaagaggggggacagggggggacaacccacacaggacaatatcacgcgcgcgaagaaaaattgcacccacacaccgactattatcagaagacaagaccgcgcggggggcgaaaaaacatctaag

SEQ ID NO: 108218 - DNA, 549 bp, Homo sapiens
  misc_feature (544)..(545): n is a, c, g, or t
tccctggtggtctagtggttaggatttggcgttctcaccgccgcggcccgggttcgattcccggtcagggaactcctcagctgccgccaaggtgctcggtccttccgaggaagctaaggctgcgttggggtgaggccctcacttcatccggcgactagcaccgcgtccggcagcgccagccctacactcgcccgcgccatggcctctgtctccgagctcgcctgcatctactcggccctcattctgcacgacgatgaggtgacagtcacggaggataagatcaatgccctcattaaagcagccggtgtaaatgttgagcctttttggcctggcttgtttgcaaagggttgtgcaaggcctgcctagtcttctttttttttctttattttttatgttctgaaggattaacccggtaaggagtcggatgatgcatggagaatcatttcgagcctgctgtccctatgcgatgccacgcgccgcgctcggaacgcgcaacagcaatcgagccgactgacttaaacacgggaaactcgtttctcttttnntccc

SEQ ID NO: 108219 - DNA, 603 bp, Homo sapiens
cttccaaccggttgcggccggcttctaaaaattaatggaaccccggggctgcaggaaatcggcaacgaacctcctcagctgccgccaaggtgctcggtccttccgaggaagctaaggctgcgttggggtgaggccctcacttcatccggcgactagcaccgcgtccggcagcgccagccctacactcgcccgcgccatggcctctgtctccgagctcgcctgcatctactcggccctcattctgcacgacgatgaggtgacagtcacggccctggccaacgtcaacattgggagcctcatctgcaatgtaggggccggtggacctgctccagcagctggtgctgcaccagcaggaggtcctgccccctccactgctgctgctccagctgaggagaagaaagtggaagcaaagaaagaagaatccgaggagtctgatgatgacatgggctttggtctttttgactaaacctcttttataacatgttcaataaaaagctgaactttaaaaaaaaaaaaaaaaaaaaaaaaaaaaaaaaaaaaaaaaaaaaaaaaaaaaaaaaaaaaaaaaaaaaaaaaaaaaaaaaaaaagagaggggggggggg

SEQ ID NO: 108220 - DNA, 388 bp, Homo sapiens
ggaggcgttaattggcccggaggcgttgcatggcctcctcagctgccgccaaggtgctcggtccttccgaggaagctaaggctgcgttggggtgaggccctcacttcatccggcgactagcaccgcgtccggcagcgccagccctacactcgcccgcgccatggcctctgtctccgagctcgcctgcatctactcggccctcattctgcacgacgatgaggtgacagtcacgaggataagatcaatgccctccactgctgctgctccagctgaggagaagaaagtggaagcaaagaaagaagaatccgaggagtctgatgatgacatgggctttggtctttttgactaaacctcttttataacatgttcaataaaaagctgaacttta

SEQ ID NO: 108221 - DNA, 773 bp, Homo sapiens
ggaggcgttaattggcccggaggcgttgcatggcctcctcagctgccgccaaggtgctcggtccttccgaggaagctaaggctgcgttggggtgaggccctcacttcatccggcgactagcaccgcgtccggcagcgccagccctacactcgcccgcgccatggcctctgtctccgagctcgcctgcatctactcggccctcattctgcacgacgatgaggtgacagtcacgggtgagtgcgggcgcgggccggcggccgggctgcctgtgggcggtgactttcggctctccatgcggttcccggctccaggccgttcgactgagcacttccggccggggccaggccgcgaacacaggccgcatagggcgggcgctcctcggggctggggcctctctccgggcaggtcctgggcccccgggaccacgtgcgggcccagcgggcatggagtgcgcttgaggctgggcgctccggctccaagagccttcgtgtagaaaagctcttccgcagtgcttgggcaccctgacccgtgcctcgtctctctcagggacacttactcggacctctttcggtgtaattgccttgaattcccccggtcgtggaggaaggcgcccgagctcggctccacctcccaggtcttgtaacttaaaaatagccgcgtgactcaggcaagtcccagcccgtgaaacagcagtgatgggctcgcctcattgcagggcgcctggcacacatctcttttgcttgtgatagaatacctcgagctggttaaacatg

SEQ ID NO: 108222 - DNA, 320 bp, Homo sapiens
  misc_feature (233)..(233): n is a, c, g, or t
  misc_feature (241)..(241): n is a, c, g, or t
  misc_feature (283)..(283): n is a, c, g, or t
ggaggcgttaattggcccggaggcgttgcatggcctcctcagctgccgccaaggtgctcggtccttccgaggaagctaaggctgcgttggggtgaggccctcacttcatccggcgactagcaccgcgtccggcagcgccagccctacactcgcccgcgccatggcctctgtctccgagctcgcctgcatctactcggccctcattctgcacgacgatgaggtgacagtcacgntttccaancccggcaagggactacagatcaatgccctcattaaagcagcncggtggtttaaaacaaacttgggcttttgcgacgccc

SEQ ID NO: 108223 - DNA, 631 bp, Homo sapiens
atgggaaatgctttcgccacagcctgttcagagaaacatgatccctgacccggaaatggaggaggagacagagttccttgagctcggaaccaggatatcaagaccaaatggactactgtcagaggatgtaggaatggacatcccctttgaagagggcgtgctgagtccccgtgctgcagacatgaggcctgaacctcctaattctctggatcttaatgacactcatcctcggagaccacgatggtcctcagctgccgccaaggtgctcggtccttccgaggaagctaaggctgcgttggggtgaggccctcacttcatccggcgactagcaccgcgtccggcagcgccagccctacactcatggtgcacaagccgccaagccgcgccctcggagccggggcgggcggagatgggcggactgaggagccccatgggggaccccctggtgcataccgaaggtacagcgccggggaactaacgtggggacacccaattcgtgggcagagagcaagcagggtggacaggtcacaacgggagggactaaagaccaatgcccctcagtaaacgagcgggcgtaacacgtagcaggccctctggggccgggcacgggagccaagggccggcaaggtca

SEQ ID NO: 108224 - DNA, 753 bp, Homo sapiens
atgggaaatgctttcgccacagcctgttcagagaaacatgatccctgacccggaaatggaggaggagacagagttccttgagctcggaaccaggatatcaagaccaaatggactactgtcagaggatgtaggaatggacatcccctttgaagagggcgtgctgagtccccgtgctgcagacatgaggcctgaacctcctaattctctggatcttaatgacactcatcctcggagaccacgatggtcctcagctgccgccaaggtgctcggtccttccgaggaagctaaggctgcgttggggtgaggccctcacttcatccggcgactagcaccgcgtccggcagcgccagccctacactcgcccgcgccatggcctctgtctccgagctcgcctgcatctactcggccctcattctgcacgacgatgaggtgacagtcacggaggataagatcaatgccctcattaaagcagccggtgtaaatgttgagcctttttggcctggcttgtttgcaaaggccctggccaacgtcaacattgggagcctcatctgcaatgtaggggccggtggacctgctccagcagctggtgctgcaccagcaggaggtcctgccccctccactgctgctgctccagctgaggagaagaaagtggaagcaaagaaagaagaatccgaggagtctgatgatgacatgggctttggtctttttgactaaacctcttttataacatgttcaataaaaagctgaacttta

SEQ ID NO: 108225 - DNA, 359 bp, Homo sapiens
  misc_feature (45)..(45): n is a, c, g, or t
aattcgcggccgcgtcgacacggtgcgagaagacgacagaagggnaggaggataagatcaatgccctcattaaagcagccggtgtaaatgttgagcctttttggcctggcttgtttgcaaaggccctggccaacgtcaacattgggagcctcatctgcaatgtaggggccggtggacctgctccagcagctggtgctgcaccagcaggaggtcctgccccctccactgctgctgctccagctgaggagaagaaagtggaagcaaagaaagaagaatccgaggagtctgatgatgacatgggctttggtctttttgactaaacctcttttataacatgttcaataaaaagctgaacttta

SEQ ID NO: 108226 - DNA, 380 bp, Homo sapiens
cactaggtaatattactagtgaattcactagtaattcattctgcacgacgatggaggtgacagtcacggaggataagatcaatgccctcattaaagcagccggtgtaaatgttgagcctttttggcctggcttgtttgcaaaggccctggccaacgtcaacattgggagcctcatctgcaatgtaggggccggtggacctgctccagcagctggtgctgcaccagcaggaggtcctgccccctccactgctgctgctccagctgaggagaagaaagtggaagcaaagaaagaagaatccgaggagtctgatgatgacatgggctttggtctttttgactaaacctcttttataacatgttcaataaaaagctgaacttta

SEQ ID NO: 108227 - DNA, 933 bp, Homo sapiens
  misc_feature (857)..(857): n is a, c, g, or t
  misc_feature (885)..(885): n is a, c, g, or t
atgggaaatgctttcgccacagcctgttcagagaaacatgatccctgacccggaaatggaggaggagacagagttccttgagctcggaaccaggatatcaagaccaaatggactactgtcagaggatgtaggaatggacatcccctttgaagagggcgtgctgagtccccgtgctgcagacatgaggcctgaacctcctaattctctggatcttaatgacactcatcctcggagaccacgatggtcctcagctgccgccaaggtgctcggtccttccgaggaagctaaggctgcgttggggtgaggccctcacttcatccggcgactagcaccgcgtccggcagcgccagccctacactcgcccgcgccatggcctctgtctccgagctcgcctgcatctactcggccctcattctgcacgacgatgaggtgacagtcacggaggataagatcaatgccctcattaaagcagccggtgtaaatgttgagcctttttggcctggcttgtttgcaaaggccctggccaacgtcaacattgggagcctcatctgcaatgtaggggccggtggacctgctccagcagctggtgctgcaccagcaggaggtcctgccccctccactgctgctgctccagctgaggagaagaaagtggaagcaaagaaagaagaatccgaggagtctgatgatgacatgggctttggtctttttgactaaacctcttttataacatgttcaataaaaagctgaactttaaaaaaaaaaaaaaaaaaaaaaaaaaaaaaaaaaaaaaaaaaaaaaaaaaaaaaaaaaataatatataaataatttattatttatataaaataatattttttatntgggtgtataaaaatatttattttaatnaagggcccaaattgagcgctatttgcaaatatcccctttttggggggg

SEQ ID NO: 108228 - DNA, 1238 bp, Homo sapiens
  misc_feature (770)..(770): n is a, c, g, or t
  misc_feature (772)..(772): n is a, c, g, or t
  misc_feature (774)..(775): n is a, c, g, or t
  misc_feature (777)..(777): n is a, c, g, or t
  misc_feature (782)..(782): n is a, c, g, or t
  misc_feature (785)..(785): n is a, c, g, or t
  misc_feature (902)..(902): n is a, c, g, or t
atgggaaatgctttcgccacagcctgttcagagaaacatgatccctgacccggaaatggaggaggagacagagttccttgagctcggaaccaggatatcaagaccaaatggactactgtcagaggatgtaggaatggacatcccctttgaagagggcgtgctgagtccccgtgctgcagacatgaggcctgaacctcctaattctctggatcttaatgacactcatcctcggagaccacgatggtcctcagctgccgccaaggtgctcggtccttccgaggaagctaaggctgcgttggggtgaggccctcacttcatccggcgactagcaccgcgtccggcagcgccagccctacactcgcccgcgccatggcctctgtctccgagctcgcctgcatctactcggccctcattctgcacgacgatgaggtgacagtcacggaggataagatcaatgccctcattaaagcagccggtgtaaatgttgagcctttttggcctggcttgtttgcaaaggccctggccaacgtcaacattgggagcctcatctgcaatgtaggggccggtggacctgctccagcagctggtgctgcaccagcaggaggtcctgccccctccactgctgctgctccagctgaggagaagaaagtggaagcaaagaaagaagaatccgaggagtctgatgatgacatgggctttggtctttttgactaaacctcttttataacatgttcaataaaaagctgaactttaaaaaaaaaaaaaaaaananannanaaaanaanaaaaaaaaaaaaaaaaaacaaaagggggggggccaaaaaaattcccccgggggggccaccacaaaggttatacagcagacaccccgtattttagtaaaaaaaggcgggcgccccaanaagaggggcggcgcctcataaaaagaacaaggacgcgggcgcgcggcagtaaaaccacacgcgcggggagaggacacaacagcgtagagagggacatcgaaggagggggcgcaccccccaaccgcggcgggggcggcgggcacgatatgtcggaccccaacaccaccacgaaggagtataaagccccccgagaggaaagaaatacacacagagaagaggggggacagggggggacaacccacacaggacaatatcacgcgcgcgaagaaaaattgcacccacacaccgactattatcagaagacaagaccgcgcggggggcgaaaaaacatctaag

SEQ ID NO: 108229 - DNA, 1148 bp, Homo sapiens
atgggaaatgctttcgccacagcctgttcagagaaacatgatccctgacccggaaatggaggaggagacagagttccttgagctcggaaccaggatatcaagaccaaatggactactgtcagaggatgtaggaatggacatcccctttgaagagggcgtgctgagtccccgtgctgcagacatgaggcctgaacctcctaattctctggatcttaatgacactcatcctcggagaccacgatggtcctcagctgccgccaaggtgctcggtccttccgaggaagctaaggctgcgttggggtgaggccctcacttcatccggcgactagcaccgcgtccggcagcgccagccctacactcgcccgcgccatggcctctgtctccgagctcgcctgcatctactcggccctcattctgcacgacgatgaggtgacagtcacggaggataagatcaatgccctcattaaagcagccggtgtaaatgttgagcctttttggcctggcttgtttgcaaaggccctggccaacgtcaacattgggagcctcatctgcaatgtaggggccggtggacctgctccagcagctggtgctgcaccagcaggaggtcctgccccctccactgctgctgctccagctgaggagaagaaagtggaagcaaagaaagaagaatccgaggagtctgatgatgacatgggctttggtctttttgactaaacctcttttataacatgttcaataaaaagctgaactttagaccatcaacgatggtcctcagcttctacctagaagctgatggacaacagatttaaatccatattctttttttaagcagggctcagaagacctactcttgtctaaggaaactatgggttccacatctattttgcacattccccaacacacacacacacacacacacacacacacacacacaaatagagagcatcaagagtgctaattgtatctaagcgcgagtgctaagggtgggatcccagagccactcagaattatactaaacttagagcagggatcgagtggagggtatactaaataaatatatagtgaacaaaaatatatattcctaaagtcataccctatgctcagttggtgggaatttttttctctctctctttaaaaaacaagtctca

SEQ ID NO: 108230 - DNA, 519 bp, Homo sapiens
  misc_feature (15)..(15): n is a, c, g, or t
  misc_feature (20)..(20): n is a, c, g, or t
  misc_feature (22)..(22): n is a, c, g, or t
  misc_feature (51)..(51): n is a, c, g, or t
  misc_feature (58)..(58): n is a, c, g, or t
acaaaagatggagcncaccngnggtgcggccgcccttagaacgtagtggtnccccggnctgcaggaattcggcacgatcttcatccggcgactagcaccgcgtccggcagcgccagccctacactcgcccgcgccatggcctctgtctccgagctcgcctgcatctactcggccctcattctgcacgacgatgaggtgacagtcacggaggataagatcaatgccctcattaaagcagccggtgtaaatgttgagcctttttggcctggcttgtttgcaaaggccctggccaacgtcaacattgggagcctcatctgcaatgtaggggccggtggacctgctccagcagctggtgctgcaccagcaggaggtcctgccccctccactgctgctgctccagctgaggagaagaaagtggaagcaaagaaagaagaatccgaggagtctgatgatgacatgggctttggtctttttgactaaacctcttttataacatgttcaataaaaagctgaacttta

SEQ ID NO: 108231 - DNA, 741 bp, Homo sapiens
atgggaaatgctttcgccacagcctgttcagagaaacatgatccctgacccggaaatggaggaggagacagagttccttgagctcggaaccaggatatcaagaccaaatggactactgtcagaggatgtaggaatggacatcccctttgaagagggcgtgctgagtccccgtgctgcagacatgaggcctgaacctcctaattctctggatcttaatgacactcatcctcggagaccacgatggtcctcagctgccgccaaggtgctcggtccttccgaggaagctaaggctgcgttggggtgaggccctcacttcatccggcgactagcaccgcgtccggcagcgccagccctacactcgcccgcgccatggcctctgtctccgagctcgcctgcatctactcggccctcattctgcacgacgatgaggtgacagtcacggaggataagatcaatgccctcattaaagcagccggtgtaaatgttgagcctttttggcctggcttgtttgcaaaggccctggccaacgtcaacattgggagcctcatctgcaatgtaggggccggtggacctgctccagcagctggtgctgcaccagcaggaggtcctgccccctccactgctgctgctccagctgaggagaagaaagtggaagcaaagaaagaagaatccgaggagtctgatgatgacatgggctttggtctttttgacggataatgtcaaacgctgcgtctttgtttt

SEQ ID NO: 108232 - DNA, 3050 bp, Homo sapiens
atgggaaatgctttcgccacagcctgttcagagaaacatgatccctgacccggaaatggaggaggagacagagttccttgagctcggaaccaggatatcaagaccaaatggactactgtcagaggatgtaggaatggacatcccctttgaagagggcgtgctgagtccccgtgctgcagacatgaggcctgaacctcctaattctctggatcttaatgacactcatcctcggagaccacgatggtcctcagctgccgccaaggtgctcggtccttccgaggaagctaaggctgcgttggggtgaggccctcacttcatccggcgactagcaccgcgtccggcagcgccagccctacactctcttcatctctcgacctcgtgatgggccgccgcggcgggcgcgggcccggagatggtccgcgggcaggtgttcgacgtggggccgcgctacaccaacctctcgtacatcggcgagggcgcctacggcatggtgtgctctgcttatgataatgtcaacaaagttcgagtagctatcaagaaaatcagcccctttgagcaccagacctactgccagagaaccctgagggagataaaaatcttactgcgcttcagacatgagaacatcattggaatcaatgacattattcgagcaccaaccatcgagcaaatgaaagatgtatatatagtacaggacctcatggaaacagatctttacaagctcttgaagacacaacacctcagcaatgaccatatctgctattttctctaccagatcctcagagggttaaaatatatccattcagctaacgttctgcaccgtgacctcaagccttccaacctgctgctcaacaccacctgtgatctcaagatctgtgactttggcctggcccgtgttgcagatccagaccatgatcacacagggttcctgacagaatatgtggccacacgttggtacagggctccagaaattatgttgaattccaagggctacaccaagtccattgatatttggtctgtaggctgcattctggcagaaatgctttctaacaggcccatctttccagggaagcattatcttgaccagctgaaccacattttgggtattcttggatccccatcacaagaagacctgaattgtataataaatttaaaagctaggaactatttgctttctcttccacacaaaaataaggtgccatggaacaggctgttcccaaatgctgactccaaagctctggacttattggacaaaatgttgacattcaacccacacaagaggattgaagtagaacaggctctggcccacccatatctggagcagtattacgacccgagtgacgagcccatcgccgaagcaccattcaagttcgacatggaattggatgacttgcctaaggaaaagctcaaagaactaatttttgaagagactgctagattccagccaggatacagatcttaaatttgtcaggacaagggctcagaggactggacgtgctcagacatcggtgttcttcttcccagttcttgacccctggtcctgtctccagcccgtcttggcttatccgctttgactcctttgagccgtttggaggggcggtttctggtagttgtggcttttatgctttcaaagaatttcttcagtccagagaattcctcctggcagccctgtgtgtgtcacccattggtgacctgcggcagtatgtacttcagtgcaccttactgcttactgttgctttagtcactaattgctttctggtttgaaagatgcagtggttcctccctctcctgaatccttttctacatgatgccctgctgaccatgcagccgcaccagagagagattcttccccaattggctctagtcactggcatctcactttatgatagggaaggctactacctagggcactttaagtcagtgacagccccttatttgcacttcaccttttgaccataactgtttccccagagcaggagcttgtggaaataccttggctgatgttgcagcctgcagcaagtgcttccgtctccggaatccttggggagcacttgtccacgtcttttctcatatcatggtagtcactaacatatataaggtatgtgctattggcccagcttttagaaaatgcagtcatttttctaaataaaaaaggaagtactgcacccagcagtgtcactctgtagttactgtggtcacttgtaccatatagaggtgtaacacttgtcaagaagcgttatgtgcagtacttaatgtttgtaagacttacaaaaaaagatttaaagtggcagcttcactcgacatttggtgagagaagtacaaaggttgcagtgctgagctgtgggcggtttctggggatgtcccagggtggaactccacatgctggtgcatatacgcccttgagctacttcaaatgtggtttatacctcgcagatacaagaatctttatgaatatacaattctttttccttctacagcttagctccgtcttttcaaccacgaacatttaaaacccgacctactagcactgttctgtcctcaagtactcaaatatttctgatactgctgagtcagactgtcagaaaaagctagcactaactcgtgtttggagctctatccatattttactgatctctttaagtatttgttcctgccactgtgtactgtggagttgactcggtgttctgtcccagtgcggtgcctcctcttgacttccccactgctctctgtggtgagaaatttgccttgttcaataattactgtacccctcgcatgactgttacagctttctgtgcagagatgactgtccaagtgccacatgcctacgattgaaatgaaaactctattgttacctctgagttgtgttccacggaaaatgctatccagcagatcatttaggaaaaataattctatttttagcttttcatttctcagctgtccttttttcttgtttgatttttgacacgaatggagaatgggttatataaagactgcctgctattgacagaaatgcatttgtaattcatgaaaataaatgtacatcttctatcttc

SEQ ID NO: 108233 - DNA, 840 bp, Homo sapiens
  misc_feature (707)..(707): n is a, c, g, or t
tacacgccccagcgcagaccgcaaccaagtaggcctaggtacgaggcccgtttatttcctcagctgccgccaaggtgctcggtccttccgaggaagctaaggctgcgttggggtgaggccctcacttcatccggcgactagcaccgcgtccggcagcgccagccctacactcgcccgcgccatggcctctgtctccgagctcgcctgcatctactcggccctcattctgcacgacgatgaggtgacagtcacggaggataagatcaatgccctcattaaagcagccggtgtaaatgttgagcctttttggcctggcttgtttgcaaaggccctggccaacgtcaacattgggagcctcatctgcaatgtaggggccggtggacctgctccagcagctggtgctgcaccagcaggaggtcctgccccctccactgctgctgctccagctgaggagaagaaagtggaagcaaagaaagaagaatccgaggagtctgatgatgacatgggctttggtctttttgactaaacctcttttataacatgttcaataaaaagctgaactttaaaaaaaaaaaaaaaaaaaaaaaaaaaaggggcccgccccagggggttgccagggcctcaggacttgcttgggccccaaggaattgcagaggcatcctgggacctcatgggcccttggggacctcaaggggccacctggaccncaagggtagttctggtcctcaaggtcatatgggtcctcagggtccacctggcccagaggtcacttaggccccaaggccgctgggcctcaggtacttggcccagggccccggaccaggttgcggccctgcccag

SEQ ID NO: 108234 - DNA, 544 bp, Homo sapiens
ggaggcgttaattggcccggaggcgttgcatggcctcctcagctgccgccaaggtgctcggtccttccgaggaagctaaggctgcgttggggtgaggccctcacttcatccggcgactagcaccgcgtccggcagcgccagccctacactcgcccgcgccatggcctctgtctccgagctcgcctgcatctactcggccctcattctgcacgacgatgaggtgacagtcacggaggataagatcaatgccctcattaaagcagccggtgtaaatgttgagcctttttggcctggcttgtttgcaaaggccctggccaacgtcaacattgggagcctcatctgcaatgtaggggccggtggacctgctccagcagctggtgctgcaccagcaggaggtcctgccccctccactgctgctgctccagctgaggagaagaaagtggaagcaaagaaagaagaatccgaggagtctgatgatgacatgggctttggtctttttgactaaacctcttttataacatgttcaataaaaagctgaacttta

SEQ ID NO: 108235 - DNA, 531 bp, Homo sapiens
tatcagtcgtcctatagcgctatcctcagctgccgccaaggtgctcggtccttccgaggaagctaaggctgcgttggggtgaggccctcacttcatccggcgactagcaccgcgtccggcagcgccagccctacactcgcccgcgccatggcctctgtctccgagctcgcctgcatctactcggccctcattctgcacgacgatgaggtgacagtcacggaggataagatcaatgccctcattaaagcagccggtgtaaatgttgagcctttttggcctggcttgtttgcaaaggccctggccaacgtcaacattgggagcctcatctgcaatgtaggggccggtggacctgctccagcagctggtgctgcaccagcaggaggtcctgccccctccactgctgctgctccagctgaggagaagaaagtggaagcaaagaaagaagaatccgaggagtctgatgatgacatgggctttggtctttttgactaaacctcttttataacatgttcaataaaaagctgaacttta

SEQ ID NO: 108236 - DNA, 769 bp, Homo sapiens
  misc_feature (638)..(639): n is a, c, g, or t
  misc_feature (655)..(655): n is a, c, g, or t
  misc_feature (657)..(657): n is a, c, g, or t
  misc_feature (663)..(663): n is a, c, g, or t
  misc_feature (666)..(666): n is a, c, g, or t
  misc_feature (675)..(676): n is a, c, g, or t
  misc_feature (684)..(686): n is a, c, g, or t
  misc_feature (700)..(700): n is a, c, g, or t
aagaggctacgtagaggcgactaggcccctttcctcagcttcctcagctgccgccaaggtgctcggtccttccgaggaagctaaggctgcgttggggtgaggccctcacttcatccggcgactagcaccgcgtccggcagcgccagccctacactcgcccgcgccatggcctctgtctccgagctcgcctgcatctactcggccctcattctgcacgacgatgaggtgacagtcacggaggataagatcaatgccctcattaaagcagccggtgtaaatgttgagcctttttggcctggcttgtttgcaaaggccctggccaacgtcaacattgggagcctcatctgcaatgtaggggccggtggacctgctccagcagctggtgctgcaccagcaggaggtcctgccccctccactgctgctgctccagctgaggagaagaaagtggaagcaaagaaagaagaatccgaggagtctgatgatgacatgggctttggtctttttgactaaacctcttttataacatgttcaataaaaagctgaactttaaaaaaaaaaaaaaaaaaaaaaaaaaaaaaaaaaaaaaaaaaaaaaaaaaaaaaacatgcgggccgcaatttgagcctacttggcaattnnccctataggggggcgntnacaatncanggggcgggnnttacaaannnggggactgggaaanccctgcgttacccacataaattgcttggggaaaacccccttttccgtggcggcggcccccccccccccc

SEQ ID NO: 108237 - DNA, 657 bp, Homo sapiens
  misc_feature (657)..(657): n is a, c, g, or t
aattacgggctaggtagcgaggtcctcagctgccgccaaggtgctcggtccttccgaggaagctaaggctgcgttggggtgaggccctcacttcatccggcgactagcaccgcgtccggcagcgccagccctacactcgcccgcgccatggcctctgtctccgagctcgcctgcatctactcggccctcattctgcacgacgatgaggtgacagtcacggaggataagatcaatgccctcattaaagcagccggtgtaaatgttgagcctttttggcctggcttgtttgcaaaggccctggccaacgtcaacattgggagcctcatctgcaatgtaggggccggtggacctgctccagcagctggtgctgcaccagcaggaggtcctgccccctccactgctgctgctccagctgaggagaagaaagtggaagcaaagaaagaagaatccgaggagtctgatgatgacatgggctttggtctttttgactaaacctcttttataacatgttcaataaaaagctgaactttaaaaaaagcgagactgggaaaccctgcgtacccacctaatcgcttggggacatcccctttgccgttgcgtaaacaacagcccgaacgacgcctttcaacattgccacccgatggcaatgcattttan

SEQ ID NO: 108238 - DNA, 763 bp, Homo sapiens
  misc_feature (36)..(36): n is a, c, g, or t
caatagctaggtcgaggccgggtgttaattcggccnaggctcctcagctgccgccaaggtgctcggtccttccgaggaagctaaggctgcgttggggtgaggccctcacttcatccggcgactagcaccgcgtccggcagcgccagccctacactcgcccgcgccatggcctctgtctccgagctcgcctgcatctactcggccctcattctgcacgacgatgaggtgacagtcacggaggataagatcaatgccctcattaaagcagccggtgtaaatgttgagcctttttggcctggcttgtttgcaaaggccctggccaacgtcaacattgggagcctcatctgcaatgtaggggccggtggacctgctccagcagctggtgctgcaccagcaggaggtcctgccccctccactgctgctgctccagctgaggagaagaaagtggaagcaaagaaagaagaatccgaggagtctgatgatgacatgggctttggtctttttgactaaacctcttttataacatgttcaataaaaagctgaactttaacaaacaaaaaaaacacaaaaaaacaaaaaaaaaacaaacacacctccgaggacaatgacttcctcgctcttccttccccccgagagtatttactactcgcacgatactgacctcagggaagagcgaccatcctccaccttgggctaacacaggcaggagaaacatcctggggcccacactatcgccccccgcgagaccactgtgttcccccgg

SEQ ID NO: 108239 - DNA, 588 bp, Homo sapiens
  misc_feature (2)..(2): n is a, c, g, or t
  misc_feature (8)..(8): n is a, c, g, or t
  misc_feature (26)..(26): n is a, c, g, or t
  misc_feature (33)..(34): n is a, c, g, or t
  misc_feature (44)..(44): n is a, c, g, or t
  misc_feature (49)..(49): n is a, c, g, or t
  misc_feature (66)..(66): n is a, c, g, or t
  misc_feature (70)..(70): n is a, c, g, or t
tntttacngcattagggacaagtggngtccacnnggtgagaccntctanaatatggttccccgggntgcngattcggcatcctcagctgccgccaaggtgctcggtccttccgaggaagctaaggctgcgttggggtgaggccctcacttcatccggcgactagcaccgcgtccggcagcgccagccctacactcgcccgcgccatggcctctgtctccgagctcgcctgcatctactcggccctcattctgcacgacgatgaggtgacagtcacggaggataagatcaatgccctcattaaagcagccggtgtaaatgttgagcctttttggcctggcttgtttgcaaaggccctggccaacgtcaacattgggagcctcatctgcaatgtaggggccggtggacctgctccagcagctggtgctgcaccagcaggaggtcctgccccctccactgctgctgctccagctgaggagaagaaagtggaagcaaagaaagaagaatccgaggagtctgatgatgacatgggctttggtctttttgactaaacctcttttataacatgttcaataaaaagctgaacttta

SEQ ID NO: 108240 - DNA, 325 bp, Homo sapiens
gagttaggattaagtaaaactacagtctttcttctcaaggaacttacatcaagcagaggaaatgagacttaaatataataatcaggactgggcatggtggctcatgcctataatcctagcactttgggaggctaaggtgggtgaattgcttgagctcaggagtttgagactagcctgggcaacatggtgaaactccatctctacaaaaaatacaaaaaattagccaggcgtggtggtgcaggcctgtagtcccagctacttggggagctgaggtgggaggatcatttgtgcccagaggtcaaggctacagtgagccgagatcgcg

SEQ ID NO: 108241 - DNA, 381 bp, Homo sapiens
tgggtggggcagagtgagcgaggggcaaggcggaggagatgagacagagaggaaggcaagtttcaccaggccttccaagccacagcaaggaatcagggcttcatgccaactcaactgggagcccctgacctggcttaaagcagggaagcaacacaatctggcccgagtttgttctagtagtgctatggctgcagtgtagaaagtggagcaccatgcaggtcccattcggagcactaggagcgtgtctggaaacagctgggtggcatccatccaggcgtctcctcctgagctcccctagggacctagggacccatggtagaatgtctgtctgctcatttctctggccagcctccacctccctgcctccacccacaccagaca

SEQ ID NO: 108242 - DNA, 713 bp, Homo sapiens
caactaaaactgaaaaaaaaattaataaatgatttgggatgttactttacatctttaaaatatctttacttttgccatattctgttagcaagaagcaagttataggtctcgcccacacttgggggaaagtattagacagggcttgagtaccaaggggattggggaccatgggggcaccttagagtctgtctgccacatttcctaaaactcagaagcaaaataaaacaagtgaaattcacagcataccaaattggtgtcaaaacaatatacagagatcttaaactatagtaatttgtctgtatatccctaatatatacacaaagacagaaaaaactgttttcagtaatcatgttgttaataaaaatattgactttaacctaaaactagtatatggatataataggataaagcaaataagtaattatgttagaaagcaagatgttcagcataagattagaaagatacaaatatatggccaggcgttgtggctcacatttgtagtgccagctgtttgagaggctaagacgagaggattgcttgagcccaggaatttgagcctgcagtgagctgtaattgtgccactacactctagcctgagtgacacagtgagaccttgtctctaaaacagtaataaaataaataaaagatacaaatataaaatcaaataagtaaaaatgttatattcttaaatttggattctaattagcaagatg

SEQ ID NO: 108243 - DNA, 223 bp, Homo sapiens
tccagtgaaaccacagctttcctatgctaaaaatatgtacctcaaaaaattagaatctcattcatcaggtcccagtgctcacactgaggcatgccttagcaactataagcaatgaaagggataaaaaacagattcttctccaggtgcacatcattcttggccatttgccaaggtataggtatacaagtagtttagacctttttctcttaagtttccaataaca

SEQ ID NO: 108244 - DNA, 435 bp, Homo sapiens
agatgtagtacttataaaatgaatgttacctctcttgggaaacagactttttttcttcgcaactctttggagagcatgtcccttgaggtgtgacattattttagctgtgtaacaattaactggatctgagttgttttacatcagctaaatatcagtctccttgagatttgggaaatatttaagtctcatcagcagtattttggggaagggggtgctcctgcagacagcagctgctgttttctgtttgtttgttcattgattgattgattgagacacagtctcgctcttgtgctccaacattggcagtagagtgagactttgtctctaaaaaaccacaacattttaaaatttatttaatgtccctggattcctacaggtattgaattcctatgggtatgggattttgactgtggtcttttcctagtttctataact

SEQ ID NO: 108245 - DNA, 264 bp, Homo sapiens
cttattagctatattaatataaaaactcaaggagatattccttaaatgatatcatggagattatcagtacattaatcaaagccaaacaatgctaatatgaaaggaaaggaaagccaaattattatcttacgagaagttttaatggttaaaagctggaggccgggtgtggtggctcatgcctgtaatcctagcacttcgggaggctaaggcgggcagatcactttgagctcaggagtttgagaccagcctggacaacatggtgaa

SEQ ID NO: 108246 - DNA, 178 bp, Homo sapiens
cccgacacattcctggctttcacgttccatgttaaatcaatcatgaggatttatctaacctgtatacaccctttaagtgtccactgttctccaaccccatcgtctcctctctgctccaaaacgccatcatcttttgctcaaacagctgctagctgatcttcctgcatcccactccact

SEQ ID NO: 108247 - DNA, 310 bp, Homo sapiens
  misc_feature (29)..(29): n is a, c, g, or t
  misc_feature (41)..(41): n is a, c, g, or t
  misc_feature (47)..(47): n is a, c, g, or t
  misc_feature (57)..(57): n is a, c, g, or t
  misc_feature (158)..(158): n is a, c, g, or t
  misc_feature (177)..(177): n is a, c, g, or t
tcctagaacttgatatgtactcaattttnctaaaagcaganaagcanagtaccaaanacatacacaaggaatttaatttcttgttatcaacatgcccttatcatttagtctctgggaggagcagcctgtgggtgtagaatacatgggcaggtgagganaatgcagtctttttaaagnactgtgtgaagaaaagatggggtctggagacctggttttggctgttcctgccaatccaggaaaacaggggtatggcaaggagctgcacctccccctcagtgtagaggatcaaacactgtgacagcacaaagtg

SEQ ID NO: 108248 - DNA, 514 bp, Homo sapiens
ctgttacagttttttgcagtcagaacttgaagaaagtgctatcccctgcctgtctaacctgaaaagtagccaggggcccaagggtcacaagaggctccagggacaggtgagggcctcttctctgcatcaccactcaagcagcatcaccatagcaaccccaggagtaaacaatggtgccagaaagggcttccccacaaagccgcccctcctggctctgaggcccagaagaatggccagtaaccggcaaagatcactcagagggcccagtcacccatctcatatggaagaacctttcctgcaggtagggggtggcccatctctgccgcctacctttttgtaccccactgggctacaggctgtcccttatagtgggccaggctttcttctgggcagcagactgcctggcccatacattttctgctgtcttccccttttcatcctatgacactaggaacccagagctcagaacagagaggagatgcctggctagtgccacatctcccagccccaccca

SEQ ID NO: 108249 - DNA, 559 bp, Homo sapiens
gaggggggagggatggcatcgggagatatacctaatgctagatgacgagttagtgggtgcagcgcaccagcatggcacatgtatacatatgtaacctgcacaatgtgcacatgtaccctaaaacttaaagtataattaaaaaaataaaataaaaattaaaaaaaatgacatgaaagcttaaacctgggaaagcaagtaagacaaaagccatcttttaccttgaagatcagggtaagccctgattaccctgagcctctgttgtgctgactgagatggatgcaggaggtaaagcagggcctgctcaaggcaggaagtttaatctgagatctcccacaaagtggggaccctccaagtgctacccttactgtgtaaaggtaaacactaaataagccaccaagcagaaataacagcaaggaaaattgcctttcttgaccttggccctgggtggaggaaaagctgttcctgtctcaccaacctaaaaatgtttaacaagttgtcccttacatagagagttgggcctcaaatttatgctacttgtatgttgcaaaatactgcatga

SEQ ID NO: 108250 - DNA, 591 bp, Homo sapiens
gttctccagctatcatatcagaaaacattactatttccccatttttcaccttcttgggtgtctctcagttgggtcctgaatgtcaccccctgtccagccttggtcatcccagcccaagcacaggcacaaacctctttcttgcttccccttgaaaaatgaaggtcacctatatcaacctcccgaaacaacacattcgactgtctctgcctgttgaaatcctggttaaggtccatctcagaaactgcctcttccccgattatctccactggctatgagctctctaatccctgcaccagagagtatttgatctgtttctctctctcttttttttttttttgagatggcgtttcgctctgtcacccaggctggagtgcagcggcgcgatcttggctcactgcaagctctgcctcccgggttcatgccattctcctgcctcagcgtcccaagtagctgggactacaggcgcctgccactatgcctggctaattttttgtatttttagtagagatggggtttcaccgtgttagccaggatggtctcaatctcctgaccttgtgatctgcctgcctcggcctcccaaagtgctgggat

SEQ ID NO: 108251 - DNA, 342 bp, Homo sapiens
acatgatcattatctatctccttcccctggcatataaacaccatgaacactaagaatataaccaccttgtttaccactaaatccccaaagcctggaaaaatgcttgcctcaaattagttacacactgtatgtttaatgaataaacataaagtctacctaagtccttaagtagactttcttaataatcctacaaaataaagacaaattagtgaaattataacttataattgcattgcaagattacaatcctctggttgaattttatggcttttcaaattgaggtcaggaatgttcagcatgtaatcctaaccatgcaggtaaatttgtaaagtaggctgttga

SEQ ID NO: 108252 - DNA, 483 bp, Homo sapiens
caagatcctcaaactcacccatgagtttgagtttgacagggatggcagtgggaaccttagggctgcgtgctagaagctgatgggttccagagaccgagtcacccagaaatcccatctaattctaagatttgatgagccctatatcaggaggagacaagacccgagaaactatcactgtggtcacctccagggtggctggggacggtcagagagaagggggactggttttacttttgtcttttcacccatgtgctacccatacaaaaaataatacacgtgtatatttgaactgaatatttctaagagtctagccttctaagcctccaagattattacaatcattctgagatccagactgattctcagagactgctggcaaagattcgggggttgggcatccgtgggtttggaccccggctccgtgcatttctgtgcctcagtttcctggtgtgtaacccaggacgaggatacccacttccgctg

SEQ ID NO: 108253 - DNA, 176 bp, Homo sapiens
ttttggtgtcttaacaaaaatatatgtttcttggatttctgctaaataataattttaataaaatagtataataatccctctccaaccctgaattcccctttaacagaattttcctcaatgtggatttgcttctgtatacctttttcaaatcatgaggatttcattttgagtatcct

SEQ ID NO: 108254 - DNA, 337 bp, Homo sapiens
ctgtgccatctgaatacaggaaccattaacaggaagtacctacatgtctgaaattatatcttctgaaaacaaaaacaaaaaacaaaaaccaaagcaatgttgggcaaagagctccagatggtccagacggtgaccagagcagtagggagccagtatgagttgttgacaagaagagtgctctggtcagagctaggctttaggaccatcagtcaagcagccatggaggatgcttgggaggcagagcctcccatcaggaaaccccaggagtcttgtgtagagatccaggagaggtgaccacctggcgtgaggccgtggggctgaggtggagggaggtggg

SEQ ID NO: 108255 - DNA, 141 bp, Homo sapiens
tcagccttatatctcttgacccctgagcaccatgctttgtgaacaatagatgctcaacaaatatttgctgaactgaactcactgaaatgcagcttaaatcatattccagaaagaacatgaagttctttggaagagactttc

SEQ ID NO: 108256 - DNA, 651 bp, Homo sapiens
ggagggagatctaaagaggatggggagattggccctggctatgttgtgataccattgttaaccatttttttggtttgtttttggttttttgtttgtttgttttgcttttccttttttaataggacattatgggtttaaatattctaagtaatttgatgtcttttgtaatctctttgcactgattttcagcttgtctctttgagtgatcatttaaggctctctctccctcattatttttatgatggtatacccctgccacacacacacaaaaagcaaaaaacaacaaaaaatctcctcttaagcatgctgaaaataggtaccagttggtttcctagaagggaacagcattcagagagaatttcaaaatcctgatttggtggtcttctttgcccttgtcttagagataaataaagtggactcctttttttattgatctttgcatgatcctgctcttggaatataacactatgtgccaaagtgtttgaaagaaatctaggtgcttagtgagagtgagaaataattttatttgaaggtggggtaaggagaaaagcaaatgcttaaattcacattggagatgtgtgttaccattttcttccagtaagtggcagcagggatctacacattttatcctaattgttacaatctagaaaa

SEQ ID NO: 108257 - DNA, 3113 bp, Homo sapiens
cgtttctgcttggaggtccttattgttaacaatagcttctggggcagtagactgagcagcaacaccagccacaagtcctaccggcctctcaccgtcctgactttcaggattaactactacctctcgggaggcttccaccccgtgggctttcacgtggtcaacatcctcctgcacagtggcatctctgtcctcatggtggacgtcttctcggttctgtttggcggcctgcagtacaccagtaaaggccggaggctgcacctcgcccccagggcgtccctgctggccgcgctgctgtttgctgtccatcctgtgcacaccgagtgtgttgctggtgttgtcggccgtgcagacctcctgtgtgccctgttcttcttgttatctttccttggctactgtaaagcatttagagaaagtaacaaggagggagcgcattcttccaccttctgggtgctgctgagtatctttctgggagcagtggccatgctgtgcaaagagcaagggatcactgtgctgggtttaaatgcggtatttgacatcttggtgataggcaaattcaatgttctggaaattgtccagaaggtactacataaggacaagtcattagagaatctcggcatgctcaggaacgggggcctcctcttcagaatgaccctgctcacctctggaggggctgggatgctctacgtgcgctggaggatcatgggcacgggcccgccggccttcaccgaggtggacaacccggcctcctttgctgacagcatgctggtgagggccgtaaactacaattactactattcattgaatgcctggctgctgctgtgtccctggtggctgtgttttgattggtcaatgggctgcatccccctcattaagtccatcagcgactggagggtaattgcacttgcagcactctggttctgcctaattggcctgatatgccaagccctgtgctctgaagacggccacaagagaaggatccttactctgggcctgggatttctcgttatcccatttctccccgcgagtaacctgttcttccgagtgggcttcgtggtcgcggagcgtgtcctctacctccccagcgttgggtactgtgtgctgctgacttttggattcggagccctgagcaaacataccaagaaaaagaaactcattgccgctgtcgtgctgggaatcttattcatcaacacgctgagatgtgtgctgcgcagcggcgagtggcggagtgaggaacagcttttcagaagtgctctgtctgtgtgtcccctcaatgctaaggttcactacaacattggcaaaaacctggctgataaaggcaaccagacagctgccatcagatactaccgggaagctgtaagattaaatcccaagtatgttcatgccatgaataatcttggaaatatcttaaaagaaaggaatgagctacaggaagctgaggagctgctgtctttggctgttcaaatacagccagactttgccgctgcgtggatgaatctaggcatagtgcagaatagcctgaaacggtttgaagcagcagagcaaagttaccggacagcaattaaacacagaaggaaatacccagactgttactacaacctcgggcgtctgtatgcagatctcaatcgccacgtggatgccttgaatgcgtggagaaatgccaccgtgctgaaaccagagcacagcctggcctggaacaacatgattatactcctcgacaatacaggtaatttagcccaagctgaagcagttggaagagaggcactggaattaatacctaatgatcactctctcatgttctcgttggcaaacgtgctggggaaatcccagaaatacaaggaatctgaagctttattcctcaaggcaattaaagcaaatccaaatgctgcaagttaccatggtaatttggctgtgctttatcatcgttggggacatctagacttggccaagaaacactatgaaatctccttgcagcttgaccccacggcatcaggaactaaggagaattacggtctgctgagaagaaagctagaactaatgcaaaagaaagctgtctgatcctgtttccttcatgttttgagtttgagtgtgtgtgtgcatgaggcatatcattaatagtatgtggttacatttaaccatttaaaagtcttagacatgttattttactgatttttttctatgaaaacaaagacatgcaaaaagattatagcaccagcaatatactcttgaatgcgtgatatgatttttcattgaaattgtattttttcagacaactcaaatgtaattctaaaattccaaaaatgtcttttttaattaaacagaaaaagagaaaaaattatcttgagcaacttttagtagaattgagcttacatttgggatctgagccttgtcgtgtatggactagcactattaaacttcaattatgaccaagaaaggatacactggcccctacaatttgtataaatattgaacatgtctatatattagcatttttatttaatgacaaagcaaattaagtttttttatctcttttttttaaaacaacatactgtgaactttgtaaggaaatatttatttgtatttttatgttttgaatagggcaaataatcgaatgaggaatggaagttttaacatagtatatctatatgcttttccccataggaagaaattgactcttgcagtttttggatgctctgacttgtgcaatttcaatacacaggagattatgtaatgtaatatttttcataagcggttactatcaattgaaagttcaagccatgctttaggcaagagcaggcagcctcacatctttatttttgttacatccaaggtgaagagggcaacacatctgtgtaagctgctttttagtgtgtttatctgaaggccgttttccattttgcttaatgtaactacagacattatccagaaaatgcaaaattttctatcaaatggagccacattcggggaattcgtggtatttttaagaattgagttgttcctgctgttttttatttgatccaaacaatgttttgttttgttcttctctgtatgctgttgacctaatgatttatgcaatctctgtaatttcttatgcagtaaaattactacacaaacta

SEQ ID NO: 108258 - DNA, 3727 bp, Homo sapiens
ggccgagactggtgctggggggcgcccgcgcgcgtggggagctgcgggaggcgcggcgcggggggggtcgggtgcgcggcgggccgcccctccccctgccaggtccgggcgggtgcctggagccgccagagtttccgcacccgggagggagatgcggccggggctcaggctccttgcagttgtaatttagattcgagaagtggtttatcctttgactggaaaagaaaagtagctgcagtattcccccagcacttgctgagagcatgccgtatgccaggctgtgaggctcgagagacaagcagtggaagagttgcggcctgtttcatctctggattgtaaatctgagcctccttctggcccctggaaggggacagcatcaccatggaatgattcctaaccagcataatgctggagccgggagccaccaacctgcagttttcagaatggccgtgttggacactgatttggatcacattcttccatcttctgttcttcctccattctgggctaagttagtagtgggatcggttgccattgtgtgttttgcacgcagctatgatggagactttgtctttgatgactcagaagctattgttaacaataaggacctccaagcagaaacgcccctgggggacctgtggcatcatgacttctggggcagtagactgagcagcaacaccagccacaagtcctaccggcctctcaccgtcctgactttcaggattaactactacctctcgggaggcttccaccccgtgggctttcacgtggtcaacatcctcctgcacagtggcatctctgtcctcatggtggacgtcttctcggttctgtttggcggcctgcagtacaccagtaaaggccggaggctgcacctcgcccccagggcgtccctgctggccgcgctgctgtttgctgtccatcctgtgcacaccgagtgtgttgctggtgttgtcggccgtgcagacctcctgtgtgccctgttcttcttgttatctttccttggctactgtaaagcatttagagaaagtaacaaggagggagcgcattcttccaccttctgggtgctgctgagtatctttctgggagcagtggccatgctgtgcaaagagcaagggatcactgtgctgggtttaaatgcggtatttgacatcttggtgataggcaaattcaatgttctggaaattgtccagaaggtactacataaggacaagtcattagagaatctcggcatgctcaggaacgggggcctcctcttcagaatgaccctgctcacctctggaggggctgggatgctctacgtgcgctggaggatcatgggcacgggcccgccggccttcaccgaggtggacaacccggcctcctttgctgacagcatgctggtgagggccgtaaactacaattactactattcattgaatgcctggctgctgctgtgtccctggtggctgtgttttgattggtcaatgggctgcatccccctcattaagtccatcagcgactggagggtaattgcacttgcagcactctggttctgcctaattggcctgatatgccaagccctgtgctctgaagacggccacaagagaaggatccttactctgggcctgggatttctcgttatcccatttctccccgcgagtaacctgttcttccgagtgggcttcgtggtcgcggagcgtgtcctctacctccccagcgttgggtactgtgtgctgctgacttttggattcggagccctgagcaaacataccaagaaaaagaaactcattgccgctgtcgtgctgggaatcttattcatcaacacgctgagatgtgtgctgcgcagcggcgagtggcggagtgaggaacagcttttcagaagtgctctgtctgtgtgtcccctcaatgctaaggttcactacaacattggcaaaaacctggctgataaaggcaaccagacagctgccatcagatactaccgggaagctgtaagattaaatcccaagtatgttcatgccatgaataatcttggaaatatcttaaaagaaaggaatgagctacaggaagctgaggagctgctgtctttggctgttcaaatacagccagactttgccgctgcgtggatgaatctaggcatagtgcagaatagcctgaaacggtttgaagcagcagagcaaagttaccggacagcaattaaacacagaaggaaatacccagactgttactacaacctcgggcgtctgtatgcagatctcaatcgccacgtggatgccttgaatgcgtggagaaatgccaccgtgctgaaaccagagcacagcctggcctggaacaacatgattatactcctcgacaatacaggtaatttagcccaagctgaagcagttggaagagaggcactggaattaatacctaatgatcactctctcatgttctcgttggcaaacgtgctggggaaatcccagaaatacaaggaatctgaagctttattcctcaaggcaattaaagcaaatccaaatgctgcaagttaccatggtaatttggctgtgctttatcatcgttggggacatctagacttggccaagaaacactatgaaatctccttgcagcttgaccccacggcatcaggaactaaggagaattacggtctgctgagaagaaagctagaactaatgcaaaagaaagctgtctgatcctgtttccttcatgttttgagtttgagtgtgtgtgtgcatgaggcatatcattaatagtatgtggttacatttaaccatttaaaagtcttagacatgttattttactgatttttttctatgaaaacaaagacatgcaaaaagattatagcaccagcaatatactcttgaatgcgtgatatgatttttcattgaaattgtattttttcagacaactcaaatgtaattctaaaattccaaaaatgtcttttttaattaaacagaaaaagagaaaaaattatcttgagcaacttttagtagaattgagcttacatttgggatctgagccttgtcgtgtatggactagcactattaaacttcaattatgaccaagaaaggatacactggcccctacaatttgtataaatattgaacatgtctatatattagcatttttatttaatgacaaagcaaattaagtttttttatctcttttttttaaaacaacatactgtgaactttgtaaggaaatatttatttgtatttttatgttttgaatagggcaaataatcgaatgaggaatggaagttttaacatagtatatctatatgcttttccccataggaagaaattgactcttgcagtttttggatgctctgacttgtgcaatttcaatacacaggagattatgtaatgtaatatttttcataagcggttactatcaattgaaagttcaagccatgctttaggcaagagcaggcagcctcacatctttatttttgttacatccaaggtgaagagggcaacacatctgtgtaagctgctttttagtgtgtttatctgaaggccgttttccattttgcttaatgtaactacagacattatccagaaaatgcaaaattttctatcaaatggagccacattcggggaattcgtggtatttttaagaattgagttgttcctgctgttttttatttgatccaaacaatgttttgttttgttcttctctgtatgctgttgacctaatgatttatgcaatctctgtaatttcttatgcagtaaaattactacacaaacta

SEQ ID NO: 108259 - DNA, 3517 bp, Homo sapiens
ggccgagactggtgctggggggcgcccgcgcgcgtggggagctgcgggaggcgcggcgcggggggggtcgggtgcgcggcgggccgcccctccccctgccaggtccgggcgggtgcctggagccgccagagtttccgcacccgggagggagatgcggccggggctcaggctccttgcagattcctaaccagcataatgctggagccgggagccaccaacctgcagttttcagaatggccgtgttggacactgatttggatcacattcttccatcttctgttcttcctccattctgggctaagttagtagtgggatcggttgccattgtgtgttttgcacgcagctatgatggagactttgtctttgatgactcagaagctattgttaacaataaggacctccaagcagaaacgcccctgggggacctgtggcatcatgacttctggggcagtagactgagcagcaacaccagccacaagtcctaccggcctctcaccgtcctgactttcaggattaactactacctctcgggaggcttccaccccgtgggctttcacgtggtcaacatcctcctgcacagtggcatctctgtcctcatggtggacgtcttctcggttctgtttggcggcctgcagtacaccagtaaaggccggaggctgcacctcgcccccagggcgtccctgctggccgcgctgctgtttgctgtccatcctgtgcacaccgagtgtgttgctggtgttgtcggccgtgcagacctcctgtgtgccctgttcttcttgttatctttccttggctactgtaaagcatttagagaaagtaacaaggagggagcgcattcttccaccttctgggtgctgctgagtatctttctgggagcagtggccatgctgtgcaaagagcaagggatcactgtgctgggtttaaatgcggtatttgacatcttggtgataggcaaattcaatgttctggaaattgtccagaaggtactacataaggacaagtcattagagaatctcggcatgctcaggaacgggggcctcctcttcagaatgaccctgctcacctctggaggggctgggatgctctacgtgcgctggaggatcatgggcacgggcccgccggccttcaccgaggtggacaacccggcctcctttgctgacagcatgctggtgagggccgtaaactacaattactactattcattgaatgcctggctgctgctgtgtccctggtggctgtgttttgattggtcaatgggctgcatccccctcattaagtccatcagcgactggagggtaattgcacttgcagcactctggttctgcctaattggcctgatatgccaagccctgtgctctgaagacggccacaagagaaggatccttactctgggcctgggatttctcgttatcccatttctccccgcgagtaacctgttcttccgagtgggcttcgtggtcgcggagcgtgtcctctacctccccagcgttgggtactgtgtgctgctgacttttggattcggagccctgagcaaacataccaagaaaaagaaactcattgccgctgtcgtgctgggaatcttattcatcaacacgctgagatgtgtgctgcgcagcggcgagtggcggagtgaggaacagcttttcagaagtgctctgtctgtgtgtcccctcaatgctaaggttcactacaacattggcaaaaacctggctgataaaggcaaccagacagctgccatcagatactaccgggaagctgtaagattaaatcccaagtatgttcatgccatgaataatcttggaaatatcttaaaagaaaggaatgagctacaggaagctgaggagctgctgtctttggctgttcaaatacagccagactttgccgctgcgtggatgaatctaggcatagtgcagaatagcctgaaacggtttgaagcagcagagcaaagttaccggacagcaattaaacacagaaggaaatacccagactgttactacaacctcgggcgtctgtatgcagatctcaatcgccacgtggatgccttgaatgcgtggagaaatgccaccgtgctgaaaccagagcacagcctggcctggaacaacatgattatactcctcgacaatacaggtaatttagcccaagctgaagcagttggaagagaggcactggaattaatacctaatgatcactctctcatgttctcgttggcaaacgtgctggggaaatcccagaaatacaaggaatctgaagctttattcctcaaggcaattaaagcaaatccaaatgctgcaagttaccatggtaatttggctgtgctttatcatcgttggggacatctagacttggccaagaaacactatgaaatctccttgcagcttgaccccacggcatcaggaactaaggagaattacggtctgctgagaagaaagctagaactaatgcaaaagaaagctgtctgatcctgtttccttcatgttttgagtttgagtgtgtgtgtgcatgaggcatatcattaatagtatgtggttacatttaaccatttaaaagtcttagacatgttattttactgatttttttctatgaaaacaaagacatgcaaaaagattatagcaccagcaatatactcttgaatgcgtgatatgatttttcattgaaattgtattttttcagacaactcaaatgtaattctaaaattccaaaaatgtcttttttaattaaacagaaaaagagaaaaaattatcttgagcaacttttagtagaattgagcttacatttgggatctgagccttgtcgtgtatggactagcactattaaacttcaattatgaccaagaaaggatacactggcccctacaatttgtataaatattgaacatgtctatatattagcatttttatttaatgacaaagcaaattaagtttttttatctcttttttttaaaacaacatactgtgaactttgtaaggaaatatttatttgtatttttatgttttgaatagggcaaataatcgaatgaggaatggaagttttaacatagtatatctatatgcttttccccataggaagaaattgactcttgcagtttttggatgctctgacttgtgcaatttcaatacacaggagattatgtaatgtaatatttttcataagcggttactatcaattgaaagttcaagccatgctttaggcaagagcaggcagcctcacatctttatttttgttacatccaaggtgaagagggcaacacatctgtgtaagctgctttttagtgtgtttatctgaaggccgttttccattttgcttaatgtaactacagacattatccagaaaatgcaaaattttctatcaaatggagccacattcggggaattcgtggtatttttaagaattgagttgttcctgctgttttttatttgatccaaacaatgttttgttttgttcttctctgtatgctgttgacctaatgatttatgcaatctctgtaatttcttatgcagtaaaattactacacaaacta

SEQ ID NO: 108260 - DNA, 3804 bp, Homo sapiens
ggccgagactggtgctggggggcgcccgcgcgcgtggggagctgcgggaggcgcggcgcggggggggtcgggtgcgcggcgggccgcccctccccctgccaggtccgggcgggtgcctggagccgccagagtttccgcacccgggagggagatgcggccggggctcaggctccttgcagttgtaatttagattcgagaagtggtttatcctttgactggaaaagaaaagtagctgcagtattcccccagcacttgctgagagcatgccgtatgccaggctgtgaggctcgagagacaagcagtggaagagttgcggcctgtttcatctctggattgtaaatctgagcctccttctggcccctggaaggggacagcatcaccatggaatggtgtgtcccgttgcctgttggatctgtctccatcttcactcagacagaaggctatagaaagatgcctgtgacttcagattcctaaccagcataatgctggagccgggagccaccaacctgcagttttcagaatggccgtgttggacactgatttggatcacattcttccatcttctgttcttcctccattctgggctaagttagtagtgggatcggttgccattgtgtgttttgcacgcagctatgatggagactttgtctttgatgactcagaagctattgttaacaataaggacctccaagcagaaacgcccctgggggacctgtggcatcatgacttctggggcagtagactgagcagcaacaccagccacaagtcctaccggcctctcaccgtcctgactttcaggattaactactacctctcgggaggcttccaccccgtgggctttcacgtggtcaacatcctcctgcacagtggcatctctgtcctcatggtggacgtcttctcggttctgtttggcggcctgcagtacaccagtaaaggccggaggctgcacctcgcccccagggcgtccctgctggccgcgctgctgtttgctgtccatcctgtgcacaccgagtgtgttgctggtgttgtcggccgtgcagacctcctgtgtgccctgttcttcttgttatctttccttggctactgtaaagcatttagagaaagtaacaaggagggagcgcattcttccaccttctgggtgctgctgagtatctttctgggagcagtggccatgctgtgcaaagagcaagggatcactgtgctgggtttaaatgcggtatttgacatcttggtgataggcaaattcaatgttctggaaattgtccagaaggtactacataaggacaagtcattagagaatctcggcatgctcaggaacgggggcctcctcttcagaatgaccctgctcacctctggaggggctgggatgctctacgtgcgctggaggatcatgggcacgggcccgccggccttcaccgaggtggacaacccggcctcctttgctgacagcatgctggtgagggccgtaaactacaattactactattcattgaatgcctggctgctgctgtgtccctggtggctgtgttttgattggtcaatgggctgcatccccctcattaagtccatcagcgactggagggtaattgcacttgcagcactctggttctgcctaattggcctgatatgccaagccctgtgctctgaagacggccacaagagaaggatccttactctgggcctgggatttctcgttatcccatttctccccgcgagtaacctgttcttccgagtgggcttcgtggtcgcggagcgtgtcctctacctccccagcgttgggtactgtgtgctgctgacttttggattcggagccctgagcaaacataccaagaaaaagaaactcattgccgctgtcgtgctgggaatcttattcatcaacacgctgagatgtgtgctgcgcagcggcgagtggcggagtgaggaacagcttttcagaagtgctctgtctgtgtgtcccctcaatgctaaggttcactacaacattggcaaaaacctggctgataaaggcaaccagacagctgccatcagatactaccgggaagctgtaagattaaatcccaagtatgttcatgccatgaataatcttggaaatatcttaaaagaaaggaatgagctacaggaagctgaggagctgctgtctttggctgttcaaatacagccagactttgccgctgcgtggatgaatctaggcatagtgcagaatagcctgaaacggtttgaagcagcagagcaaagttaccggacagcaattaaacacagaaggaaatacccagactgttactacaacctcgggcgtctgtatgcagatctcaatcgccacgtggatgccttgaatgcgtggagaaatgccaccgtgctgaaaccagagcacagcctggcctggaacaacatgattatactcctcgacaatacaggtaatttagcccaagctgaagcagttggaagagaggcactggaattaatacctaatgatcactctctcatgttctcgttggcaaacgtgctggggaaatcccagaaatacaaggaatctgaagctttattcctcaaggcaattaaagcaaatccaaatgctgcaagttaccatggtaatttggctgtgctttatcatcgttggggacatctagacttggccaagaaacactatgaaatctccttgcagcttgaccccacggcatcaggaactaaggagaattacggtctgctgagaagaaagctagaactaatgcaaaagaaagctgtctgatcctgtttccttcatgttttgagtttgagtgtgtgtgtgcatgaggcatatcattaatagtatgtggttacatttaaccatttaaaagtcttagacatgttattttactgatttttttctatgaaaacaaagacatgcaaaaagattatagcaccagcaatatactcttgaatgcgtgatatgatttttcattgaaattgtattttttcagacaactcaaatgtaattctaaaattccaaaaatgtcttttttaattaaacagaaaaagagaaaaaattatcttgagcaacttttagtagaattgagcttacatttgggatctgagccttgtcgtgtatggactagcactattaaacttcaattatgaccaagaaaggatacactggcccctacaatttgtataaatattgaacatgtctatatattagcatttttatttaatgacaaagcaaattaagtttttttatctcttttttttaaaacaacatactgtgaactttgtaaggaaatatttatttgtatttttatgttttgaatagggcaaataatcgaatgaggaatggaagttttaacatagtatatctatatgcttttccccataggaagaaattgactcttgcagtttttggatgctctgacttgtgcaatttcaatacacaggagattatgtaatgtaatatttttcataagcggttactatcaattgaaagttcaagccatgctttaggcaagagcaggcagcctcacatctttatttttgttacatccaaggtgaagagggcaacacatctgtgtaagctgctttttagtgtgtttatctgaaggccgttttccattttgcttaatgtaactacagacattatccagaaaatgcaaaattttctatcaaatggagccacattcggggaattcgtggtatttttaagaattgagttgttcctgctgttttttatttgatccaaacaatgttttgttttgttcttctctgtatgctgttgacctaatgatttatgcaatctctgtaatttcttatgcagtaaaattactacacaaacta

SEQ ID NO: 108261 - DNA, 3814 bp, Homo sapiens
ggccgagactggtgctggggggcgcccgcgcgcgtggggagctgcgggaggcgcggcgcggggggggtcgggtgcgcggcgggccgcccctccccctgccaggtccgggcgggtgcctggagccgccagagtttccgcacccgggagggagatgcggccggggctcaggctccttgcagttgtaatttagattcgagaagtggtttatcctttgactggaaaagaaaagtagctgcagtattcccccagcacttgctgagagcatgccgtatgccaggctgtgaggctcgagagacaagcagtggaagagttgcggcctgtttcatctctggattgtaaatctgagcctccttctggcccctggaaggggacagcatcaccatggaatgattcctaaccagcataatgctggagccgggagccaccaacctgcagttttcagaatggccgtgttggacactgatttggatcacattcttccatcttctgttcttcctccattctgggctaagttagtagtgggatcggttgccattgtgtgttttgcacgcagctatgatggagactttgtctttgatgactcagaagctattgttaacaataaggacctccaagcagaaacgcccctgggggacctgtggcatcatgacttctggggcagtagactgagcagcaacaccagccacaagtcctaccggcctctcaccgtcctgactttcaggattaactactacctctcgggaggcttccaccccgtgggctttcacgtggtcaacatcctcctgcacagtggcatctctgtcctcatggtggacgtcttctcggttctgtttggcggcctgcagtacaccagtaaaggccggaggctgcacctcgcccccagggcgtccctgctggccgcgctgctgtttgctgtccatcctgtgcacaccgagtgtgttgctggtgttgtcggccgtgcagacctcctgtgtgccctgttcttcttgttatctttccttggctactgtaaagcatttagagaaagtaacaaggagggagcgcattcttccaccttctgggtgctgctgagtatctttctgggagcagtggccatgctgtgcaaagagcaagggatcactgtgctgggtttaaatgcggtatttgacatcttggtgataggcaaattcaatgttctggaaattgtccagaaggtactacataaggacaagtcattagagaatctcggcatgctcaggaacgggggcctcctcttcagaatgaccctgctcacctctggaggggctgggatgctctacgtgcgctggaggatcatgggcacgggcccgccggccttcaccgaggtggacaacccggcctcctttgctgacagcatgctggtgagggccgtaaactacaattactactattcattgaatgcctggctgctgctgtgtccctggtggctgtgttttgattggtcaatgggctgcatccccctcattaagtccatcagcgactggagggtaattgcacttgcagcactctggttctgcctaattggcctgatatgccaagccctgtgctctgaagacggccacaagagaaggatccttactctgggcctgggatttctcgttatcccatttctccccgcgagtaacctgttcttccgagtgggcttcgtggtcgcggagcgtgtcctctacctccccagcgttgggtactgtgtgctgctgacttttggattcggagccctgagcaaacataccaagaaaaaggtatcaactgagagtggtgccagctgatgaacagaatgaccggatgcatctcactggtgacaattaccatgtctttctgttcttaagaaactcattgccgctgtcgtgctgggaatcttattcatcaacacgctgagatgtgtgctgcgcagcggcgagtggcggagtgaggaacagcttttcagaagtgctctgtctgtgtgtcccctcaatgctaaggttcactacaacattggcaaaaacctggctgataaaggcaaccagacagctgccatcagatactaccgggaagctgtaagattaaatcccaagtatgttcatgccatgaataatcttggaaatatcttaaaagaaaggaatgagctacaggaagctgaggagctgctgtctttggctgttcaaatacagccagactttgccgctgcgtggatgaatctaggcatagtgcagaatagcctgaaacggtttgaagcagcagagcaaagttaccggacagcaattaaacacagaaggaaatacccagactgttactacaacctcgggcgtctgtatgcagatctcaatcgccacgtggatgccttgaatgcgtggagaaatgccaccgtgctgaaaccagagcacagcctggcctggaacaacatgattatactcctcgacaatacaggtaatttagcccaagctgaagcagttggaagagaggcactggaattaatacctaatgatcactctctcatgttctcgttggcaaacgtgctggggaaatcccagaaatacaaggaatctgaagctttattcctcaaggcaattaaagcaaatccaaatgctgcaagttaccatggtaatttggctgtgctttatcatcgttggggacatctagacttggccaagaaacactatgaaatctccttgcagcttgaccccacggcatcaggaactaaggagaattacggtctgctgagaagaaagctagaactaatgcaaaagaaagctgtctgatcctgtttccttcatgttttgagtttgagtgtgtgtgtgcatgaggcatatcattaatagtatgtggttacatttaaccatttaaaagtcttagacatgttattttactgatttttttctatgaaaacaaagacatgcaaaaagattatagcaccagcaatatactcttgaatgcgtgatatgatttttcattgaaattgtattttttcagacaactcaaatgtaattctaaaattccaaaaatgtcttttttaattaaacagaaaaagagaaaaaattatcttgagcaacttttagtagaattgagcttacatttgggatctgagccttgtcgtgtatggactagcactattaaacttcaattatgaccaagaaaggatacactggcccctacaatttgtataaatattgaacatgtctatatattagcatttttatttaatgacaaagcaaattaagtttttttatctcttttttttaaaacaacatactgtgaactttgtaaggaaatatttatttgtatttttatgttttgaatagggcaaataatcgaatgaggaatggaagttttaacatagtatatctatatgcttttccccataggaagaaattgactcttgcagtttttggatgctctgacttgtgcaatttcaatacacaggagattatgtaatgtaatatttttcataagcggttactatcaattgaaagttcaagccatgctttaggcaagagcaggcagcctcacatctttatttttgttacatccaaggtgaagagggcaacacatctgtgtaagctgctttttagtgtgtttatctgaaggccgttttccattttgcttaatgtaactacagacattatccagaaaatgcaaaattttctatcaaatggagccacattcggggaattcgtggtatttttaagaattgagttgttcctgctgttttttatttgatccaaacaatgttttgttttgttcttctctgtatgctgttgacctaatgatttatgcaatctctgtaatttcttatgcagtaaaattactacacaaacta

SEQ ID NO: 108262 - DNA, 4124 bp, Homo sapiens
ggccgagactggtgctggggggcgcccgcgcgcgtggggagctgcgggaggcgcggcgcggggggggtcgggtgcgcggcgggccgcccctccccctgccaggtccgggcgggtgcctggagccgccagagtttccgcacccgggagggagatgcggccggggctcaggctccttgcagttgtaatttagattcgagaagtggtttatcctttgactggaaaagaaaagtagctgcagtattcccccagcacttgctgagagcatgccgtatgccaggctgtgaggctcgagagacaagcagtggaagagttgcggcctgtttcatctctggattgtaaatctgagcctccttctggcccctggaaggggacagcatcaccatggaatgattcctaaccagcataatgctggagccgggagccaccaacctgcagttttcagaatggccgtgttggacactgatttggatcacattcttccatcttctgttcttcctccattctgggctaagttagtagtgggatcggttgccattgtgtgttttgcacgcagctatgatggagactttgtctttgatgactcagaagctattgttaacaataaggacctccaagcagaaacgcccctgggggacctgtggcatcatgacttctggggcagtagactgagcagcaacaccagccacaagtcctaccggcctctcaccgtcctgactttcaggattaactactacctctcgggaggcttccaccccgtgggctttcacgtggtcaacatcctcctgcacagtggcatctctgtcctcatggtggacgtcttctcggttctgtttggcggcctgcagtacaccagtaaaggccggaggctgcacctcgcccccagggcgtccctgctggccgcgctgctgtttgctgtccatcctgtgcacaccgagtgtgttgctggtgttgtcggccgtgcagacctcctgtgtgccctgttcttcttgttatctttccttggctactgtaaagcatttagagaaagtaacaaggagggagcgcattcttccaccttctgggtgctgctgagtatctttctgggagcagtggccatgctgtgcaaagagcaagggatcactgtgctgggtttaaatgcggtatttgacatcttggtgataggcaaattcaatgttctggaaattgtccagaaggtactacataaggacaagtcattagagaatctcggcatgctcaggaacgggggcctcctcttcagaatgaccctgctcacctctggaggggctgggatgctctacgtgcgctggaggatcatgggcacgggcccgccggccttcaccgaggtggacaacccggcctcctttgctgacagcatgctggtgagggccgtaaactacaattactactattcattgaatgcctggctgctgctgtgtccctggtggctgtgttttgattggtcaatgggctgcatccccctcattaagtccatcagcgactggagggtaattgcacttgcagcactctggttctgcctaattggcctgatatgccaagccctgtgctctgaagacggccacaagagaaggatccttactctgggcctgggatttctcgttatcccatttctccccgcgagtaacctgttcttccgagtgggcttcgtggtcgcggagcgtgtcctctacctccccagcgttgggtactgtgtgctgctgacttttggattcggagccctgagcaaacataccaagaaaaaggtatcaactgagagtggtgccagctgatgaacagaatgaccggatgcatctcactggtgacaattaccatgtctttctgttcttaagaaactcattgccgctgtcgtgctgggaatcttattcatcaacacgctgagatgtgtgctgcgcagcggcgagtggcggagtgaggaacagcttttcagaagtgctctgtctgtgtgtcccctcaatgctaaggttcactacaacattggcaaaaacctggctgataaaggcaaccagacagctgccatcagatactaccgggaagctgtaagattaaatcccaagtatgttcatgccatgaataatcttggaaatatcttaaaagaaaggaatgagctacaggaagctgaggagctgctgtctttggctgttcaaatacagccagactttgccgctgcgtggatgaatctaggcatagtgcagaatagcctgaaacggtttgaagcagcagagcaaagttaccggacagcaattaaacacagaaggaaatacccagactgttactacaacctcgggcgtctgtatgcagatctcaatcgccacgtggatgccttgaatgcgtggagaaatgccaccgtgctgaaaccagagcacagcctggcctggaacaacatgattatactcctcgacaatacaggtaatttagcccaagctgaagcagttggaagagaggcactggaattaatacctaatgatcactctctcatgttctcgttggcaaacgtgctggggaaatcccagaaatacaaggaatctgaagctttattcctcaaggcaattaaagcaaatccaaatgctgcaagttaccatggtaatttggctgtgctttatcatcgttggggacatctagacttggccaagaaacactatgaaatctccttgcagcttgaccccacggcatcaggaactaaggagaattacggtctgctgagaagaaagctagaactaatgcaaaagaaagctgtctgatcctgtttccttcatgttttgagtttgagtgtgtgtgtgcatgaggcatatcattaatagtatgtggttacatttaaccatttaaaagtcttagacatgttattttactgatttttttctatgaaaacaaagacatgcaaaaagattatagcaccagcaatatactcttgaatgcgtgatatgatttttcattgaaattgtattttttcagacaactcaaatgtaattctaaaattccaaaaatgtcttttttaattaaacagaaaaagagaaaaaattatcttgagcaacttttagtagaattgagcttacatttgggatctgagccttgtcgtgtatggactagcactattaaacttcaattatgaccaagaaaggatacactggcccctacaatttgtataaatattgaacatgtctatatattagcatttttatttaatgacaaagcaaattaagtttttttatctcttttttttaaaacaacatactgtgaactttgtaaggaaatatttatttgtatttttatgttttgaatagggcaaataatcgaatgaggaatggaagttttaacatagtatatctatatgcttttccccataggaagaaattgactcttgcagtttttggatgctctgacttgtgcaatttcaatacacaggagattatgtaatgtaatatttttcataagcggttactatcaattgaaagttcaagccatgctttaggcaagagcaggcagcctcacatctttatttttgttacatccaaggtgaagagggcaacacatctgtgtaagctgctttttagtgtgtttatctgaaggccgttttccattttgcttaatgtaactacagacattatccagaaaatgcaaaattttctatcaaatggagccacattcggggaattcgtggtatttttaagaattgagttgttcctgctgttttttatttgatccaaacaatgttttgttttgttcttctctgtatgctgttgacctaatgatttatgcaatctctgtaatttcttatgcagtaaaattactacacaaactagcatgaaaatgtcatattgccttcttaatcaattattttcaagtagtgaactttgtatcctcctttaccttaaaatgaaatcaaactgaccaaatcatcatttatgtggcttctgtgtgacttggggaccatttcatagaatggcactacagtgttttccaagttcagagaacagagcgagtagatccacactgagaggaatgtgattctctggactcacgtgttgggggcaggtctgtgtagtgtttcagtcagtgattgtaacttctggtgtttgaaatgtatcaagaaataaagtgctgtgtttaaa

SEQ ID NO: 108263 - DNA, 3625 bp, Homo sapiens
ggccgagactggtgctggggggcgcccgcgcgcgtggggagctgcgggaggcgcggcgcggggggggtcgggtgcgcggcgggccgcccctccccctgccaggtccgggcgggtgcctggagccgccagagtttccgcacccgggagggagatgcggccggggctcaggctccttgcagttgtaatttagattcgagaagtggtttatcctttgactggaaaagaaaagtagctgcagtattcccccagcacttgctgagagcatgccgtatgccaggctgtgaggctcgagagacaagcagtggaagagttgcggcctgtttcatctctggattgtaaatctgagcctccttctggcccctggaaggggacagcatcaccatggaatgattcctaaccagcataatgctggagccgggagccaccaacctgcagttttcagaatggccgtgttggacactgatttggatcacattcttccatcttctgttcttcctccattctgggctaagttagtagtgggatcggttgccattgtgtgttttgcacgcagctatgatggagactttgtctttgatgactcagaagctattgttaacaataaggacctccaagcagaaacgcccctgggggacctgtggcatcatgacttctggggcagtagactgagcagcaacaccagccacaagtcctaccggcctctcaccgtcctgactttcaggattaactactacctctcgggaggcttccaccccgtgggctttcacgtggtcaacatcctcctgcacagtggcatctctgtcctcatggtggacgtcttctcggttctgtttggcggcctgcagtacaccagtaaaggccggaggctgcacctcgcccccagggcgtccctgctggccgcgctgctgtttgctgtccatcctgtgcacaccgagtgtggtttaaatgcggtatttgacatcttggtgataggcaaattcaatgttctggaaattgtccagaaggtactacataaggacaagtcattagagaatctcggcatgctcaggaacgggggcctcctcttcagaatgaccctgctcacctctggaggggctgggatgctctacgtgcgctggaggatcatgggcacgggcccgccggccttcaccgaggtggacaacccggcctcctttgctgacagcatgctggtgagggccgtaaactacaattactactattcattgaatgcctggctgctgctgtgtccctggtggctgtgttttgattggtcaatgggctgcatccccctcattaagtccatcagcgactggagggtaattgcacttgcagcactctggttctgcctaattggcctgatatgccaagccctgtgctctgaagacggccacaagagaaggatccttactctgggcctgggatttctcgttatcccatttctccccgcgagtaacctgttcttccgagtgggcttcgtggtcgcggagcgtgtcctctacctccccagcgttgggtactgtgtgctgctgacttttggattcggagccctgagcaaacataccaagaaaaaggtatcaactgagagtggtgccagctgatgaacagaatgaccggatgcatctcactggtgacaattaccatgtctttctgttcttaagaaactcattgccgctgtcgtgctgggaatcttattcatcaacacgctgagatgtgtgctgcgcagcggcgagtggcggagtgaggaacagcttttcagaagtgctctgtctgtgtgtcccctcaatgctaaggttcactacaacattggcaaaaacctggctgataaaggcaaccagacagctgccatcagatactaccgggaagctgtaagattaaatcccaagtatgttcatgccatgaataatcttggaaatatcttaaaagaaaggaatgagctacaggaagctgaggagctgctgtctttggctgttcaaatacagccagactttgccgctgcgtggatgaatctaggcatagtgcagaatagcctgaaacggtttgaagcagcagagcaaagttaccggacagcaattaaacacagaaggaaatacccagactgttactacaacctcgggcgtctgtatgcagatctcaatcgccacgtggatgccttgaatgcgtggagaaatgccaccgtgctgaaaccagagcacagcctggcctggaacaacatgattatactcctcgacaatacaggtaatttagcccaagctgaagcagttggaagagaggcactggaattaatacctaatgatcactctctcatgttctcgttggcaaacgtgctggggaaatcccagaaatacaaggaatctgaagctttattcctcaaggcaattaaagcaaatccaaatgctgcaagttaccatggtaatttggctgtgctttatcatcgttggggacatctagacttggccaagaaacactatgaaatctccttgcagcttgaccccacggcatcaggaactaaggagaattacggtctgctgagaagaaagctagaactaatgcaaaagaaagctgtctgatcctgtttccttcatgttttgagtttgagtgtgtgtgtgcatgaggcatatcattaatagtatgtggttacatttaaccatttaaaagtcttagacatgttattttactgatttttttctatgaaaacaaagacatgcaaaaagattatagcaccagcaatatactcttgaatgcgtgatatgatttttcattgaaattgtattttttcagacaactcaaatgtaattctaaaattccaaaaatgtcttttttaattaaacagaaaaagagaaaaaattatcttgagcaacttttagtagaattgagcttacatttgggatctgagccttgtcgtgtatggactagcactattaaacttcaattatgaccaagaaaggatacactggcccctacaatttgtataaatattgaacatgtctatatattagcatttttatttaatgacaaagcaaattaagtttttttatctcttttttttaaaacaacatactgtgaactttgtaaggaaatatttatttgtatttttatgttttgaatagggcaaataatcgaatgaggaatggaagttttaacatagtatatctatatgcttttccccataggaagaaattgactcttgcagtttttggatgctctgacttgtgcaatttcaatacacaggagattatgtaatgtaatatttttcataagcggttactatcaattgaaagttcaagccatgctttaggcaagagcaggcagcctcacatctttatttttgttacatccaaggtgaagagggcaacacatctgtgtaagctgctttttagtgtgtttatctgaaggccgttttccattttgcttaatgtaactacagacattatccagaaaatgcaaaattttctatcaaatggagccacattcggggaattcgtggtatttttaagaattgagttgttcctgctgttttttatttgatccaaacaatgttttgttttgttcttctctgtatgctgttgacctaatgatttatgcaatctctgtaatttcttatgcagtaaaattactacacaaacta

SEQ ID NO: 108264 - DNA, 2198 bp, Homo sapiens
cagtcgagctggtacctcgattagcaagccctggtctgtgatggtgtgccccaaagaaggatccttactctgggcctgggatttctcgttatcccatttctccccgcgagtaacctgttcttccgagtgggcttcgtggtcgcggagcgtgtcctctacctccccagcgttgggtactgtgtgctgctgacttttggattcggagccctgagcaaacataccaagaaaaagaaactcattgccgctgtcgtgctgggaatcttattcatcaacacgctgagatgtgtgctgcgcagcggcgagtggcggagtgaggaacagcttttcagaagtgctctgtctgtgtgtcccctcaatgctaaggttcactacaacattggcaaaaacctggctgataaaggcaaccagacagctgccatcagatactaccgggaagctgtaagattaaatcccaagtatgttcatgccatgaataatcttggaaatatcttaaaagaaaggaatgagctacaggaagctgaggagctgctgtctttggctgttcaaatacagccagactttgccgctgcgtggatgaatctaggcatagtgcagaatagcctgaaacggtttgaagcagcagagcaaagttaccggacagcaattaaacacagaaggaaatacccagactgttactacaacctcgggcgtctgtatgcagatctcaatcgccacgtggatgccttgaatgcgtggagaaatgccaccgtgctgaaaccagagcacagcctggcctggaacaacatgattatactcctcgacaatacaggtaatttagcccaagctgaagcagttggaagagaggcactggaattaatacctaatgatcactctctcatgttctcgttggcaaacgtgctggggaaatcccagaaatacaaggaatctgaagctttattcctcaaggcaattaaagcaaatccaaatgctgcaagttaccatggtaatttggctgtgctttatcatcgttggggacatctagacttggccaagaaacactatgaaatctccttgcagcttgaccccacggcatcaggaactaaggagaattacggtctgctgagaagaaagctagaactaatgcaaaagaaagctgtctgatcctgtttccttcatgttttgagtttgagtgtgtgtgtgcatgaggcatatcattaatagtatgtggttacatttaaccatttaaaagtcttagacatgttattttactgatttttttctatgaaaacaaagacatgcaaaaagattatagcaccagcaatatactcttgaatgcgtgatatgatttttcattgaaattgtattttttcagacaactcaaatgtaattctaaaattccaaaaatgtcttttttaattaaacagaaaaagagaaaaaattatcttgagcaacttttagtagaattgagcttacatttgggatctgagccttgtcgtgtatggactagcactattaaacttcaattatgaccaagaaaggatacactggcccctacaatttgtataaatattgaacatgtctatatattagcatttttatttaatgacaaagcaaattaagtttttttatctcttttttttaaaacaacatactgtgaactttgtaaggaaatatttatttgtatttttatgttttgaatagggcaaataatcgaatgaggaatggaagttttaacatagtatatctatatgcttttccccataggaagaaattgactcttgcagtttttggatgctctgacttgtgcaatttcaatacacaggagattatgtaatgtaatatttttcataagcggttactatcaattgaaagttcaagccatgctttaggcaagagcaggcagcctcacatctttatttttgttacatccaaggtgaagagggcaacacatctgtgtaagctgctttttagtgtgtttatctgaaggccgttttccattttgcttaatgtaactacagacattatccagaaaatgcaaaattttctatcaaatggagccacattcggggaattcgtggtatttttaagaattgagttgttcctgctgttttttatttgatccaaacaatgttttgttttgttcttctctgtatgctgttgacctaatgatttatgcaatctctgtaatttcttatgcagtaaaattactacacaaacta

SEQ ID NO: 108265 - DNA, 1273 bp, Homo sapiens
tcccccgggctgcaggattcggcacgagagcaaatccaaatgctgcaagttaccatggtaatttggctgtgctttatcatcgttggggacatctagacttggccaagaaacactatgaaatctccttgcagcttgaccccacggcatcaggaactaaggagaattacggtctgctgagaagaaagctagaactaatgcaaaagaaagctgtctgatcctgtttccttcatgttttgagtttgagtgtgtgtgtgcatgaggcatatcattaatagtatgtggttacatttaaccatttaaaagtcttagacatgttattttactgatttttttctatgaaaacaaagacatgcaaaaagattatagcaccagcaatatactcttgaatgcgtgatatgatttttcattgaaattgtattttttcagacaactcaaatgtaattctaaaattccaaaaatgtcttttttaattaaacagaaaaagagaaaaaattatcttgagcaacttttagtagaattgagcttacatttgggatctgagccttgtcgtgtatggactagcactattaaacttcaattatgaccaagaaaggatacactggcccctacaatttgtataaatattgaacatgtctatatattagcatttttatttaatgacaaagcaaattaagtttttttatctcttttttttaaaacaacatactgtgaactttgtaaggaaatatttatttgtatttttatgttttgaatagggcaaataatcgaatgaggaatggaagttttaacatagtatatctatatgcttttccccataggaagaaattgactcttgcagtttttggatgctctgacttgtgcaatttcaatacacaggagattatgtaatgtaatatttttcataagcggttactatcaattgaaagttcaagccatgctttaggcaagagcaggcagcctcacatctttatttttgttacatccaaggtgaagagggcaacacatctgtgtaagctgctttttagtgtgtttatctgaaggccgttttccattttgcttaatgtaactacagacattatccagaaaatgcaaaattttctatcaaatggagccacattcggggaattcgtggtatttttaagaattgagttgttcctgctgttttttatttgatccaaacaatgttttgttttgttcttctctgtatgctgttgacctaatgatttatgcaatctctgtaatttcttatgcagtaaaattactacacaaacta

SEQ ID NO: 108266 - DNA, 2315 bp, Homo sapiens
  misc_feature (2286)..(2286): n is a, c, g, or t
ggccgagactggtgctggggggcgcccgcgcgcgtggggagctgcgggaggcgcggcgcggggggggtcgggtgcgcggcgggccgcccctccccctgccaggtccgggcgggtgcctggagccgccagagtttccgcacccgggagggagatgcggccggggctcaggctccttgcagttgtaatttagattcgagaagtggtttatcctttgactggaaaagaaaagtagctgcagtattcccccagcacttgctgagagcatgccgtatgccaggctgtgaggctcgagagacaagcagtggaagagttgcggcctgtttcatctctggattgtaaatctgagcctccttctggcccctggaaggggacagcatcaccatggaatgattcctaaccagcataatgctggagccgggagccaccaacctgcagttttcagaatggccgtgttggacactgatttggatcacattcttccatcttctgttcttcctccattctgggctaagttagtagtgggatcggttgccattgtgtgttttgcacgcagctatgatggagactttgtctttgatgactcagaagctattgttaacaataaggacctccaagcagaaacgcccctgggggacctgtggcatcatgacttctggggcagtagactgagcagcaacaccagccacaagtcctaccggcctctcaccgtcctgactttcaggattaactactacctctcgggaggcttccaccccgtgggctttcacgtggtcaacatcctcctgcacagtggcatctctgtcctcatggtggacgtcttctcggttctgtttggcggcctgcagtacaccagtaaaggccggaggctgcacctcgcccccagggcgtccctgctggccgcgctgctgtttgctgtccatcctgtgcacaccgagtgtgttgctggtgttgtcggccgtgcagacctcctgtgtgccctgttcttcttgttatctttccttggctactgtaaagcatttagagaaagtaacaaggagggagcgcattcttccaccttctgggtgctgctgagtatctttctgggagcagtggccatgctgtgcaaagagcaagggatcactgtgctgggtttaaatgcggtatttgacatcttggtgataggcaaattcaatgttctggaaattgtccagaaggtactacataaggacaagtcattagagaatctcggcatgctcaggaacgggggcctcctcttcagaatgaccctgctcacctctggaggggctgggatgctctacgtgcgctggaggatcatgggcacgggcccgccggccttcaccgaggtggacaacccggcctcctttgctgacagcatgctggtgagggccgtaaactacaattactactattcattgaatgcctggctgctgctgtgtccctggtggctgtgttttgattggtcaatgggctgcatccccctcattaagtccatcagcgactggagggtaattgcacttgcagcactctggttctgcctaattggcctgatatgccaagccctgtgctctgaagacggccacaagagaaggatccttactctgggcctgggatttctcgttatcccatttctccccgcgagtaacctgttcttccgagtgggcttcgtggtcgcggagcgtgtcctctacctccccagcgttgggtactgtgtgctgctgacttttggattcggagccctgagcaaacataccaagaaaaaggtatcaactgagagtggtgccagctgatgaacagaatgaccggatgcatctcactggtgacaattaccatgtctttctgttcttaagaaactcattgccgctgtcgtgctgggaatcttattcatcaacacgctgagatgtgtgctgcgcagcggcgagtggcggagtgaggaacagcttttcagaagtgctctgtctgtgtgtcccctcaatgctaaggttcactacaacattggcaaaaacctggctgataaaggcaaccagacagctgccatcagatactaccgggaagctgtaagattaaatcccaagtatgttcatgccatgaataatcttggaaatatcttaaaagaaaggaatgagctacaggaagctgaggagctgctgtctttggctgttcaaatacagccagactttgccgctgcgtggatgaatctaggcatagtgcagaatagcctgaaacggtttgaagcagcagagcaaagttaccggacagcaattaaacacagaaggaaatacccagganccggggataatcactagtgaattcgcgcc

SEQ ID NO: 108267 - DNA, 698 bp, Homo sapiens
gaaatatttaaaataaacagctgaacttctgcatagtcagggctctgggcagtgcctagcatccatcacccccacctcccatacccagccttgcttcctggaaatttcatggcagcactaagacattgcatgtactcttctttttgcttctttatgtaataatgttactataggcagatgtatcttatctagtgctatgaagagccctaggagtaactggcagtaaatggataatcatcagggagtgtgattacaataaatagagttttcagtacaaacaatattgtttcatacaattgacttttgaaaactgtttgcataggatctgtaatatttctttgtccaagagggtaggaatacggcacgttactcagaagcattcccagtgaaatttatctcctgctatttcagctgtgctttatcatcgttggggacatctagacttggccaagaaacactatgaaatctccttgcagcttgaccccacggcatcaggaactaaggagaattacggtctgctgagaagaaagctagaactaatgcaaaagaaagctgtctgatcctgtttccttcatgttttgagtttgagtgtgtgtgtgcatgaggcatatcattaatagtatgtggttacatttaaccatttaaaagtcttagacatgttattttactgatttttttctatgaaaacaaagacatgc

SEQ ID NO: 108268 - DNA, 3915 bp, Homo sapiens
ggccgagactggtgctggggggcgcccgcgcgcgtggggagctgcgggaggcgcggcgcggggggggtcgggtgcgcggcgggccgcccctccccctgccaggtccgggcgggtgcctggagccgccagagtttccgcacccgggagggagatgcggccggggctcaggctccttgcagttgtaatttagattcgagaagtggtttatcctttgactggaaaagaaaagtagctgcagtattcccccagcacttgctgagagcatgccgtatgccaggctgtgaggctcgagagacaagcagtggaagagttgcggcctgtttcatctctggattgtaaatctgagcctccttctggcccctggaaggggacagcatcaccatggaatgattcctaaccagcataatgctggagccgggagccaccaacctgcagttttcagaatggccgtgttggacactgatttggatcacattcttccatcttctgttcttcctccattctgggctaagttagtagtgggatcggttgccattgtgtgttttgcacgcagctatgatggagactttgtctttgatgactcagaagctattgttaacaataaggacctccaagcagaaacgcccctgggggacctgtggcatcatgacttctggggcagtagactgagcagcaacaccagccacaagtcctaccggcctctcaccgtcctgactttcaggattaactactacctctcgggaggcttccaccccgtgggctttcacgtggtcaacatcctcctgcacagtggcatctctgtcctcatggtggacgtcttctcggttctgtttggcggcctgcagtacaccagtaaaggccggaggctgcacctcgcccccagggcgtccctgctggccgcgctgctgtttgctgtccatcctgtgcacaccgagtgtgttgctggtgttgtcggccgtgcagacctcctgtgtgccctgttcttcttgttatctttccttggctactgtaaagcatttagagaaagtaacaaggagggagcgcattcttccaccttctgggtgctgctgagtatctttctgggagcagtggccatgctgtgcaaagagcaagggatcactgtgctgggtttaaatgcggtatttgacatcttggtgataggcaaattcaatgttctggaaattgtccagaaggtactacataaggacaagtcattagagaatctcggcatgctcaggaacgggggcctcctcttcagaatgaccctgctcacctctggaggggctgggatgctctacgtgcgctggaggatcatgggcacgggcccgccggccttcaccgaggtggacaacccggcctcctttgctgacagcatgctggtgagggccgtaaactacaattactactattcattgaatgcctggctgctgctgtgtccctggtggctgtgttttgattggtcaatgggctgcatccccctcattaagtccatcagcgactggagggtaattgcacttgcagcactctggttctgcctaattggcctgatatgccaagccctgtgctctgaagacggccacaagagaaggggacattgggaatgatcaggtggttccagaagtgtttcaatgctcagcttcgtatctccctgactgaaatttatggtggtgatgtagcaaccaaaaaatggatccttactctgggcctgggatttctcgttatcccatttctccccgcgagtaacctgttcttccgagtgggcttcgtggtcgcggagcgtgtcctctacctccccagcgttgggtactgtgtgctgctgacttttggattcggagccctgagcaaacataccaagaaaaaggtatcaactgagagtggtgccagctgatgaacagaatgaccggatgcatctcactggtgacaattaccatgtctttctgttcttaagaaactcattgccgctgtcgtgctgggaatcttattcatcaacacgctgagatgtgtgctgcgcagcggcgagtggcggagtgaggaacagcttttcagaagtgctctgtctgtgtgtcccctcaatgctaaggttcactacaacattggcaaaaacctggctgataaaggcaaccagacagctgccatcagatactaccgggaagctgtaagattaaatcccaagtatgttcatgccatgaataatcttggaaatatcttaaaagaaaggaatgagctacaggaagctgaggagctgctgtctttggctgttcaaatacagccagactttgccgctgcgtggatgaatctaggcatagtgcagaatagcctgaaacggtttgaagcagcagagcaaagttaccggacagcaattaaacacagaaggaaatacccagactgttactacaacctcgggcgtctgtatgcagatctcaatcgccacgtggatgccttgaatgcgtggagaaatgccaccgtgctgaaaccagagcacagcctggcctggaacaacatgattatactcctcgacaatacaggtaatttagcccaagctgaagcagttggaagagaggcactggaattaatacctaatgatcactctctcatgttctcgttggcaaacgtgctggggaaatcccagaaatacaaggaatctgaagctttattcctcaaggcaattaaagcaaatccaaatgctgcaagttaccatggtaatttggctgtgctttatcatcgttggggacatctagacttggccaagaaacactatgaaatctccttgcagcttgaccccacggcatcaggaactaaggagaattacggtctgctgagaagaaagctagaactaatgcaaaagaaagctgtctgatcctgtttccttcatgttttgagtttgagtgtgtgtgtgcatgaggcatatcattaatagtatgtggttacatttaaccatttaaaagtcttagacatgttattttactgatttttttctatgaaaacaaagacatgcaaaaagattatagcaccagcaatatactcttgaatgcgtgatatgatttttcattgaaattgtattttttcagacaactcaaatgtaattctaaaattccaaaaatgtcttttttaattaaacagaaaaagagaaaaaattatcttgagcaacttttagtagaattgagcttacatttgggatctgagccttgtcgtgtatggactagcactattaaacttcaattatgaccaagaaaggatacactggcccctacaatttgtataaatattgaacatgtctatatattagcatttttatttaatgacaaagcaaattaagtttttttatctcttttttttaaaacaacatactgtgaactttgtaaggaaatatttatttgtatttttatgttttgaatagggcaaataatcgaatgaggaatggaagttttaacatagtatatctatatgcttttccccataggaagaaattgactcttgcagtttttggatgctctgacttgtgcaatttcaatacacaggagattatgtaatgtaatatttttcataagcggttactatcaattgaaagttcaagccatgctttaggcaagagcaggcagcctcacatctttatttttgttacatccaaggtgaagagggcaacacatctgtgtaagctgctttttagtgtgtttatctgaaggccgttttccattttgcttaatgtaactacagacattatccagaaaatgcaaaattttctatcaaatggagccacattcggggaattcgtggtatttttaagaattgagttgttcctgctgttttttatttgatccaaacaatgttttgttttgttcttctctgtatgctgttgacctaatgatttatgcaatctctgtaatttcttatgcagtaaaattactacacaaacta

SEQ ID NO: 108269 - DNA, 2351 bp, Homo sapiens
ggccgagactggtgctggggggcgcccgcgcgcgtggggagctgcgggaggcgcggcgcggggggggtcgggtgcgcggcgggccgcccctccccctgccaggtccgggcgggtgcctggagccgccagagtttccgcacccgggagggagatgcggccggggctcaggctccttgcagttgtaatttagattcgagaagtggtttatcctttgactggaaaagaaaagtagctgcagtattcccccagcacttgctgagagcatgccgtatgccaggctgtgaggctcgagagacaagcagtggaagagttgcggcctgtttcatctctggattgtaaatctgagcctccttctggcccctggaaggggacagcatcaccatggaatgattcctaaccagcataatgctggagccgggagccaccaacctgcagttttcagaatggccgtgttggacactgatttggatcacattcttccatcttctgttcttcctccattctgggctaagttagtagtgggatcggttgccattgtgtgttttgcacgcagctatgatggagactttgtctttgatgactcagaagctattgttaacaataaggacctccaagcagaaacgcccctgggggacctgtggcatcatgacttctggggcagtagactgagcagcaacaccagccacaagtcctaccggcctctcaccgtcctgactttcaggattaactactacctctcgggaggcttccaccccgtgggctttcacgtggtcaacatcctcctgcacagtggcatctctgtcctcatggtggacgtcttctcggttctgtttggcggcctgcagtacaccagtaaaggccggaggctgcacctcgcccccagggcgtccctgctggccgcgctgctgtttgctgtccatcctgtgcacaccgagtgtgttgctggtgttgtcggccgtgcagacctcctgtgtgccctgttcttcttgttatctttccttggctactgtaaagcatttagagaaagtaacaaggagggagcgcattcttccaccttctgggtgctgctgagtatctttctgggagcagtggccatgctgtgcaaagagcaagggatcactgtgctgggtttaaatgcggtatttgacatcttggtgataggcaaattcaatgttctggaaattgtccagaaggtactacataaggacaagtcattagagaatctcggcatgctcaggaacgggggcctcctcttcagaatgaccctgctcacctctggaggggctgggatgctctacgtgcgctggaggatcatgggcacgggcccgccggccttcaccgaggtggacaacccggcctcctttgctgacagcatgctggtgagggccgtaaactacaattactactattcattgaatgcctggctgctgctgtgtccctggtggctgtgttttgattggtcaatgggctgcatccccctcattaagtccatcagcgactggagggtaattgcacttgcagcactctggttctgcctaattggcctgatatgccaagccctgtgctctgaagacggccacaagagaaggatccttactctgggcctgggatttctcgttatcccatttctccccgcgagtaacctgttcttccgagtgggcttcgtggtcgcggagcgtgtcctctacctccccagcgttgggtactgtgtgctgctgacttttggattcggagccctgagcaaacataccaagaaaaagaaactcattgccgctgtcgtgctgggaatcttattcatcaacacgctgagatgtgtgctgcgcagcggcgagtggcggagtgaggaacagcttttcagaagtgctctgtctgtgtgtcccctcaatgctaaggttcactacaacattggcaaaaacctggctgataaaggcaaccagacagctgccatcagatactaccgggaagctgtaagattaaatcccaagtatgttcatgccatgaataatcttggaaatatcttaaaagaaaggaatgagctacaggaagctgaggagctgctgtctttggctgttcaaatacagccagactttgccgctgcgtggatgaatctaggcatagtgcagaatagcctgaaacggtttgaagcagcagagcaaagttaccggacagcaattaaacacagaaggaaatacccagactgttactacaacctcgggcgtctggtaagcgcggggtgccctgtgcctgtggaaggaaagatgggttatttttcttatttataataaaatgacatagtgacacccaactagcccatacattttataaagttctttcacatgtttctatctcat

SEQ ID NO: 108270 - DNA, 2297 bp, Homo sapiens
ggccgagactggtgctggggggcgcccgcgcgcgtggggagctgcgggaggcgcggcgcggggggggtcgggtgcgcggcgggccgcccctccccctgccaggtccgggcgggtgcctggagccgccagagtttccgcacccgggagggagatgcggccggggctcaggctccttgcagttgtaatttagattcgagaagtggtttatcctttgactggaaaagaaaagtagctgcagtattcccccagcacttgctgagagcatgccgtatgccaggctgtgaggctcgagagacaagcagtggaagagttgcggcctgtttcatctctggattgtaaatctgagcctccttctggcccctggaaggggacagcatcaccatggaatgattcctaaccagcataatgctggagccgggagccaccaacctgcagttttcagaatggccgtgttggacactgatttggatcacattcttccatcttctgttcttcctccattctgggctaagttagtagtgggatcggttgccattgtgtgttttgcacgcagctatgatggagactttgtctttgatgactcagaagctattgttaacaataaggacctccaagcagaaacgcccctgggggacctgtggcatcatgacttctggggcagtagactgagcagcaacaccagccacaagtcctaccggcctctcaccgtcctgactttcaggattaactactacctctcgggaggcttccaccccgtgggctttcacgtggtcaacatcctcctgcacagtggcatctctgtcctcatggtggacgtcttctcggttctgtttggcggcctgcagtacaccagtaaaggccggaggctgcacctcgcccccagggcgtccctgctggccgcgctgctgtttgctgtccatcctgtgcacaccgagtgtgttgctggtgttgtcggccgtgcagacctcctgtgtgccctgttcttcttgttatctttccttggctactgtaaagcatttagagaaagtaacaaggagggagcgcattcttccaccttctgggtgctgctgagtatctttctgggagcagtggccatgctgtgcaaagagcaagggatcactgtgctgggtttaaatgcggtatttgacatcttggtgataggcaaattcaatgttctggaaattgtccagaaggtactacataaggacaagtcattagagaatctcggcatgctcaggaacgggggcctcctcttcagaatgaccctgctcacctctggaggggctgggatgctctacgtgcgctggaggatcatgggcacgggcccgccggccttcaccgaggtggacaacccggcctcctttgctgacagcatgctggtgagggccgtaaactacaattactactattcattgaatgcctggctgctgctgtgtccctggtggctgtgttttgattggtcaatgggctgcatccccctcattaagtccatcagcgactggagggtaattgcacttgcagcactctggttctgcctaattggcctgatatgccaagccctgtgctctgaagacggccacaagagaaggatccttactctgggcctgggatttctcgttatcccatttctccccgcgagtaacctgttcttccgagtgggcttcgtggtcgcggagcgtgtcctctacctccccagcgttgggtactgtgtgctgctgacttttggattcggagccctgagcaaacataccaagaaaaagaaactcattgccgctgtcgtgctgggaatcttattcatcaacacgctgagatgtgtgctgcgcagcggcgagtggcggagtgaggaacagcttttcagaagtgctctgtctgtgtgtcccctcaatgctaaggttcactacaacattggcaaaaacctggctgataaaggcaaccagacagctgccatcagatactaccgggaagctgtaagattaaatcccaagtatgttcatgccatgaataatcttggaaatatcttaaaagaaaggaatgagctacaggaagctgaggagctgctgtctttggctgttcaaatacagccagactttgccgctgcgtggatgaatctaggcatagtgcagaatagcctgaaacggtttgaagcagcagagcaaagttaccggacagcaattaaacacagaaggaaatacccagactgttactacaacctcgggcgtctggtaagcgcggggtgccctgtgcctgtggaaggaaagatgggttatttttcttatttataataaaatgacatagtg

SEQ ID NO: 108271 - DNA, 424 bp, Homo sapiens
attttttccaaaaacctaagaaaacccttttcctatagaaacacaggttcccatatgattataaaacattcaaatactagctcaaatattgaatgggatacaggttgaatatccttagtccaaaaatctgaaatcatttcaaaatccaaaactacttgagcactggcatgatgttcagaggaaatgctttgagaagtgctcatttcagacttcaaatgttaaggatgctaagtttaatgcaaatatccccaaatcagaaacattgctgttccaagaagtataagctgaattataaataggatgatcatataatttatcattgaaaacaggatacttttgagaatgaaagcaggcactggatgtctccattaaaaatgcactaatttataatgtaaaacattttataaatggttgtaataaaagt

SEQ ID NO: 108272 - DNA, 485 bp, Homo sapiens
gctgggatttggaagaaggaattaagaacaatggtggcagaaaacactggaatgccacgcccttcaagtaacgagggctccacacatatataccaatgtactggctaatgaagccagacaacttcattgcagtgggcagaaggaatcttccttttctctttaagatatagcttgttctaaacatctttccctgactcgaaagagcagtcaacaagacactaactttcttttattattattattatttttgagacagagttttgctcttgttgcccaggctggaagtatctgggtgcagaagagtacccatcccgatgtggcaggacacgggaaaggaaaagagcccaacaaggacattttggaaataaagagctagcatttaggctggaaatctgccttaaagccccagaagaagagaacttggaacccatcctgtaaattaccacggccttctttaacatccacccacggcaaaatatttaagt

SEQ ID NO: 108273 - DNA, 402 bp, Homo sapiens
gagattaaaattcttgggatggaggaacctagcaatgttacggtgaaacacaatggtgtcccaagtcagacttctcctacagtcacttatgattctaacctgaaggtcgccattatcacagacatcaatcttttcctgggagaagcatacacagtggagtggagcataaagataagggatgaagaaaaaatagactgttaccctgatgagaatggtgattctgcagaaaactgcactgcccgtggctgtatctgggaggcatccaattcttctggagtccctttttgctattttgtcaacgacctatactctgtcagtgatgttcagtataactcccatggggccacagctgacatctccttaaagtcttctgttcatgccaatgccttcccttccacaccc

SEQ ID NO: 108274 - DNA, 154 bp, Homo sapiens
  misc_feature (133)..(133): n is a, c, g, or t
  misc_feature (153)..(153): n is a, c, g, or t
ctaaattgcagttaatatgacttattcaagacttatcaacttctttttgtcatgtaacttccatatgaaaaaagtacacaaatcctgagtgatttaattctcaacagatcacaccactgcactccagcctggntgacagagcgaggctccgtnt

SEQ ID NO: 108275 - DNA, 794 bp, Homo sapiens
ctgtctcaaaaaaaaacaaaaaacaaaaaacaaacaaacaaacaaaaaacaaaaaaaaaaccacacatacacacagaaaacaaaaagcgaaaaaaaccacaccaccccaaaacaaacaaaaaagatgtaaaagtgaccttgcacataacaagcttccagccaagaagattgaaaagcagttaaatagaggaataggtagactatcatttgcttagtattttataattttgagtctttgttctgaagaaaatgtgacctttgttaaattttagataaatatgagaatgaccttgattctttggttttatcttcagtaatgttaaaaatgcaagtatgttgaagtcatttgttgtttttctcagataagcctcgtgtatttgaaaataattggaatgatttctgctcggtagtagtatgattttcctagccttatatcttttatgcagtgctctcaaggaatatgggtggtacaaggttataatatactggcaaccgtgtttcttaaggatttgacgtgaaagaaggtataactttctataggcgattacagataagaacatggtactgtgagagtacataggaaaggtgcttacctgcagccctgaggatcaggaaggtgctttatgagaagtgacaactaaaccaggacctgagatatgggtggcagttaaccaaataagttagtgagagaagggatgtgaaagtaaaggaataattactgcagaagcttggagtcagggctgcagagagtttagagatcagaaagatgttcttcgtggcaagaatatataccg

SEQ ID NO: 108276 - DNA, 246 bp, Homo sapiens
gagaatgtgtgcaccccacactcttccttgctcttcccacatctggccagactcgggccattaactgtctttattggctcagctctgctgtggttctctccaccactgtccatctgttcagtggtaacattcacatttcagccatgatttcaggaaccacaggactcattggaggttcttaggggccggtgttgggggaataggaatgcccagtgtggaacggcgcacccactccagctatacttg

SEQ ID NO: 108277 - DNA, 429 bp, Homo sapiens
cctggagcactctgcattccagttcactctcaacttcattgctcactctgattctttgtgtagttttggaggttttctcccttcacttttttcttctttactctttttacttttcattcacttttgtttggggaggtcaggatcagcctggaagtcagggtcaactgggctagggaacacccttagggaaaacaaacttatttttcctaaggaaattagaaggaccccagctgatccctgcaaggagtgattggcatttccctttcctttctgccctctctccatattgccatttgtggctgattatctcttttccctgatatatatttcctccccgtttttcatcttcctctctttttgggggtccttccctgccttggccttgtaggcttggggctcagtggttccttgcagtctgctgatgacatc

SEQ ID NO: 108278 - DNA, 194 bp, Homo sapiens
cacacccaccccccgctagcctggtcagtggtcagcaaattggaagaggatccgatgggagtgtaaatgtgagacacaatgtcttgattatacctgtttgtggtttagctttgtatttaaataaggaaataaacttgaaaattatttgtcatcataaaaatgaaacaaattaaaatatttattgccaggcaaaa

SEQ ID NO: 108279 - DNA, 568 bp, Homo sapiens
tgttattgtatactgatacttcatttcttataatatagtttgccttgaaagataccttcttggaaatacacatacccatgatatttttcatgtgctattttattactatttgttttccatatgtcctttctgcctttttccccactgctatgtttgagtgtttgtgtcccaccaaacataaatgttgagaacttactcaccagtgtgataggattatgacatggggcctttgggggtgattggatcatgagggcagagtcctcatgaatgggattagcaccctcataaaagagggtccagagagctgccttgtccctccaccatctcagaacacagatagaaggcaacatatatgaatcagaaataagtgggccctcaccagaaatggagtcggccagcaccctgatcatggaagtcccggcttccagaactgtgaaaaataaatttcagttgtttataatccattcagtttacagtattttgttacagcagccaaaatagaccaagacaacctcttttatcccttttctgctttgtgttagtcaagcaatttttagtattctatttc

SEQ ID NO: 108280 - DNA, 682 bp, Homo sapiens
ttgaattcttggtgttaattatttaacttgatgttaagtattaattcaagaaaaagtaccacagttcatttgttttatggataacaatgacagcttttttttttgttttggaaatggatccattctatctaaatatataatagttaaaattttgctgtaacttcagctttctggttagatagggtctcactagaatgctctctttgggaatcaagcaatgggaccagcttataaaagtcttttgatccttaaatgaaatagatctccttgaatgaaatcccaagatgaatttatgtatgtggaatccctggaaaacagtaaatgtgtcagaagaagttcatgatcttactgtgatagattttgtgatttctttaagggaagagcatgcacatataactactttgatgtggttcaattcagagcaaattcaggcactgactgtcctttgggtatctcagtgtttggaaggggcttggataattctgcagcctttccaggcttaaggacccagggcagaaacaggggcttataccaaaaccgtgccattttggttgtaacatattgaacctcaaagaagacttcaaatggttcttaacttgaggctttgaggatcaacttggaacccaattttcgtgggagtttgaggtagtttttccttgggagggctttataggacccctat

SEQ ID NO: 108281 - DNA, 741 bp, Homo sapiens
  misc_feature (34)..(34): n is a, c, g, or t
  misc_feature (92)..(92): n is a, c, g, or t
  misc_feature (102)..(102): n is a, c, g, or t
  misc_feature (131)..(131): n is a, c, g, or t
  misc_feature (291)..(291): n is a, c, g, or t
gggctgtttcatgtcaagagcgaaaaaggctatntcagactacacttgaatggggaaaatctgaaattttcatgtggttattaggaaaagtngtatttgatnatataaaacatgtatcttctctaaaatcnttgtttggagacagggtctcactctgggtacccagacagagtgcagtggttcaatcatggctcattgcagcctcgacctcccaggctcaggtgatcttctgacctcagcctcccgagtagctgggattacaggcatgcaccacatccaactaattttttntgtatttttagtagagacagggtttcaccatgttggccaggctgttctcgaactcctgacctcaggcaatccacccgtcttggcctcccatagtgctgggattacagacatgagccattgcgcctggccgatgacattttattaattgaaattctgttctacatttaaactaatttttctctttccttgattactgaagaaaagagatggggaatgattttgacatttttggcctgcttagttccaagagaaatttgatttatggctggcttttggaaggcaggagccagtaattctaatcttacctgatttgatcgaatgaccttgagcaagtgacttgatttcaatgatctgatactttcaaaaaatcccaaagccctttgaaaaactagaactgcatcttagtcaatcttttagagaatttttaagaaatcatacctcaataaagct

SEQ ID NO: 108282 - DNA, 434 bp, Homo sapiens
tggcctcagagagtgaaaggacggcagctagtctctgaaggtcagggcagtgcagatattggcccaaggtcacacagcaagaaactggagaagccaagatctgaacccagatccagctgaccccaaagcacctgccccatacaagccaggtgtacccagagaaggctcaggctgagccgggcattcacactcaacccaggcagcaggccccgccccactccacccacttcttcagccaggccagcctagaggctgcaaaggaggttccaagagctcagaggccagggaagaggaaggcccagtccttttcttgtcgcagcctcaatctctcgtgcagtgacggggaaaaggaagacctcagactcctcccagccccactcaggaatgtgcaaaaactgcccaacaaaaagtgccacttttcaaatagaaggata

SEQ ID NO: 108283 - DNA, 620 bp, Homo sapiens
tagtctagccacgaggaattgcttcctatgggagatgttgttttagctgagacctgagcaatgtgtgagagttagctacaggaaaagtgaagagtgttccagacagggggaacagcttgtacagaggccaggaggttgatgagagcctgtgtataactgcaggactggataaagcccaggccagttggaatgtggggaggggacagcatgcatgtatatttcaaagttcttgggtattgattacaaatgatcggcctcatgactctagatgaagactcatgtgttatgagctggttatactctccctgatggcagagttctccccaggggtcatctgctaacccacctgtcctggaagagaagtgagaacagaggttgctccatgcgaagtcaatggttcttcattttggaagaggtcatggaaatttctgagaagctctggacccttttcccaagaaaaagcatgtggcacatttgaaacgttgcatatcatttcaagaggttcacaggcacctcttgaagcttgtccatgaattggaggtataaggaccactggttggaaaccttggcttctttccctttcaccagaggagcaccatttccacctggaaatagtgctg

SEQ ID NO: 108284 - DNA, 434 bp, Homo sapiens
tgtctttattctggagagttggggagcaaagttaagaatacatagggcaatgtttttaactaagggtatatattacaaccctctttggaacttgttaaaaatgcagatgcttggaacaaacttatgaaaatagggattcagtgagtgaatctgaaaattcatattttataattctggaggtgatcctgatgacctgctgattgaagattaatatagggatggctggagacagtgctgcgtgcttatagttccagctacttgggaggctgaggcaggaggatcgcttgaactcaggaactgaagaccagcctgggtgatacaatgagaccccctctcacacacaacacacacaaaaaaatactaaatagaaaatgaaaatttttctacttgaattatttaattcaacacttcatgtcctcattttgcttttaact

SEQ ID NO: 108285 - DNA, 639 bp, Homo sapiens
ttcttggtcagttctgatgccagcgggatagtcctcaggagtcactgaagacattcagattttccatcttcattccgtctgctcagccttgccctctcttctcgctcagatattcccgcacactctgacccagaccagcgactgaaggtggaaatgatgctggctaatcatttggatcctttgggagaatcgatgatattctttcagctaatagcttttacttataaatggaaactttaagaaatacaaggtcaataatgataacacatgcattctagcctcaaaaattagataattagccatcttagccatgtctgatttccttctccctccttttaaggtttcataaaattgcccaggtctaggcttaagcagatcctaattgcaggactatagatttgcccttgcggtttgctgcctggcacccttgtctgagtgtgccatagctgctctggtgggtgacatgcagttgcttagagcaagcccactaatgatgtgattatagaaacttcttggcttccttttgtccctcaagtttccatggccctgacatgttgagcacagggctagatggtgttagcatttttgtctgatgggctcttgcttcattacccagcatctgggcccagtgttggtgcc

SEQ ID NO: 108286 - DNA, 138 bp, Homo sapiens
gagcaagactgcatatcacaaaaagaaaaaaaaaggcatatgacaacaaatgcacaaaaaactgaggacacataaaaggaattaaaatactattaagggttgcgtacagtggcttacgcctgtaatcacagtactttg

SEQ ID NO: 108287 - DNA, 341 bp, Homo sapiens
catcttcttctgaacgcgctgccgggtaccacggctttctttgtctttatcgtgagatgaaggtgatgcttctgtttcttctaccataactgaagaaatttcgctgcaagtctcttgactggctgtttctccgacttcgcctttttgtcaaacgtgagtctttttacctcatgcccctcagcttccacagcatcttcatctggatgtttatttctcaaagggctcactgaggaaacttctgattcagatgtcgaagagtcactgtgagttttctcttcattttgctgcaaatttgcctctttgctgtctgtgctctcaggccacccatttgttgtcatggg

SEQ ID NO: 108288 - DNA, 2330 bp, Homo sapiens
  misc_feature (1782)..(1782): n is a, c, g, or t
tgcggagggttttgcccttcgtaaagatggccgcggaggcttttggagccaactgggagcgcagtacgcgttttctggagcatgggcagaggagacaggaacaagcgtagcatccgtgagcaccgattggctgaagcgagcaccccgggagctgactggctccgccattcgcgggaaggcgtttgtggtgccagagaaaagtagccagagcggcgcagtggcggccgcgttctgtggttttccgctattcccccagacccgcaccttctcggcctctttgcggagaatcgtgaccaagatgtggaacagtggattcgaaagctatggcagctcctcatacgggggagccggcggctacacgcagtccccggggggctttggatcgcccgcaccttctcaagccgaaaagaaatcaagagcccgagcccagcacattgtgccctgtactatatctcagctgctttctgccactttggttgatgaagtgttcagaattgggaatgttgagatttcacaggtcactattgtggggatcatcagacatgcagagaaggctccaaccaacattgtttacaaaatagatgacatgacagctgcacccatggacgttcgccagtgggttgacacagatgacaccagcagtgaaaacactgtggttcctccagaaacatatgtgaaagtggcaggccacctgagatcttttcagaacaaaaagagcctggtagcctttaagatcatgcccctggaggatatgaatgagttcaccacacatattctggaagtgatcaatgcacacatggtactaagcaaagccaacagccagccctcagcagggagagcacctatcagcaatccaggaatgagtgaagcagggaactttggtgggaatagcttcatgccagcaaatggcctcactgtggcccaaaaccaggtgttgaatttgattaaggcttgtccaagacctgaagggttgaactttcaggatctcaagaaccagctgaaacacatgtctgtatcctcaatcaagcaagctgtggattttctgagcaatgaggggcacatctattctactgtggatgatgaccattttaaatccacagatgcagaataactggatctaactgggtacctgagatattttacagctggacctagtttcacaatctgttgtctccagctctgcatatgtctggccagggggcttctaggaagtaggtttcatctatcaaatgtctcctctgacttccttttgaaacttactgctcttctgttttattttgttttgtttgaagctcagagggagatgggcaattgacagggatgcaatccagggtgggatttcttgaggaagttacaaataagcttgttacaacatcaagatagatggaattggaaggatgctaccaggagagtacttacatagtgctcaggagtttctcttcttaaaatgtttactgctgaaagatgagcaggaccagggcgttataggcagagccctagccgagaaacctgctggcctctgcctgttttcatttcccactttggttgtgtggcattactttcagaattgcactttcctgcttgtcatgactttttgacacacttgccatgacgtgtgtttctgtgaacatgaagttctgcggtagtgcctccaggggcagaggaaaagaagaagtgttactgcattttgtacaaaataaatacagtcatatgtttaataaaacagttctattgtagtaacttgtaaaaaaaaaaaaaaaaaaaaaaaaaaaaaaaaagaanaaaaaaaaaacaaaagaaagaggggggcggcgcgcctaaaaagtatcttccccgagggggcgccagcaagttgcacgcggttaccccaggtatttatgggaaccaaggggggccccataatagaggacggcgggtattaagtagccgcagagggaagcgggggccgcgcggttaataacacagagctggcgagagacagcgggggaacaaccgcgcggcaacacggggggaccccttgtgggggagagaggcaacccctctacatctcgcgggggggcggcggacaccacatcgtggggggccacaagactacctctctcgcgagaggaatatttcttaagacgcgcttctaggaggggggggacaatatttatataacattttgacgggggggtgttgatacaagggggggtggtatacacaccagagcggcgcggaaaatatatgtgagtggaggcgagtggattgaaaaaaggtttgcgggccaacacgggggatagttagtgatattgtggaggcgaaacaatttttttataccagggggggct

SEQ ID NO: 108289 - DNA, 2303 bp, Homo sapiens
  misc_feature (1755)..(1755): n is a, c, g, or t
tgcggagggttttgcccttcgtaaagatggccgcggaggcttttggagccaactgggagcgcagtacgcgttttctggagcatgggcagaggagacaggaacaagcgtagcatccgtgagcaccgattggctgaagcgagcaccccgggagctgactggctccgccattcgcgggaaggcgtttgtggtgccagagaaaagtagccagagcggcgcagtggcggccgcgttctgtggttttccgctattcccccagacccgcaccttctcggcctctttgcggagaatcgtgaccaagatgtggaacagtggattcgaaagctatggcagctcctcatacgggggagccggcggctacacgcagtccccggggggctttggatcgcccgcaccttctcaagccgaaaagaaatcaagagcccgagcccagcacattgtgccctgtactatatctcagctgctttctgccactttggttgatgaagtgttcagaattgggaatgttgagatttcacaggtcactattgtggggatcatcagacatgcagagaaggctccaaccaacattgtttacaaaatagatgacatgacagctgcacccatggacgttcgccagtgggttgacacagatgacaccagcagtgaaaacactgtggttcctccagaaacatatgtgaaagtggcaggccacctgagatcttttcagaacaaaaagagcctggtagcctttaagatcatgcccctggaggatatgaatgagttcaccacacatattctggaagtgatcaatgcacacatggtactaagcaaagccaacagccagccctcagcagggagagcacctatcagcaatccaggaatgagtgaagcagggaactttggtgggaatagcttcatgccagcaaatggcctcactgtggcccaaaaccaggtgttgaatttgattaaggcttgtccaagacctgaagggttgaactttcaggatctcaagaaccagctgaaacacatgtctgtatcctcaatcaagcaagctgtggattttctgagcaatgaggggcacatctattctactgtggatgatgaccattttaaatccacagatgcagaataactggatctaactgggtacctgagatattttacagctggacctagtttcacaatctgttgtctccagctctgcatatgtctggccagggggcttctaggaagtaggtttcatctatcaaatgtctcctctgacttccttttgaaacttactgctcttctgttttattttgttttgtttgaagctcagagggagatgggcaattgacagggatgcaatccagggtgggatttcttgaggaagttacaaataagcttgttacaacatcaagatagatggaattggaaggatgctaccaggagagtacttacatagtgctcaggagtttctcttcttaaaatgtttactgctgaaagatgagcaggaccagggcgttataggcagagccctagccgagaaacctgctggcctctgcctgttttcatttcccactttggttgtgtggcattactttcagaattgcactttcctgcttgtcatgactttttgacacacttgccatgacgtgtgtttctgtgaacatgaagttctgcggtagtgcctccaggggcagaggaaaagaagaagtgttactgcattttgtacaaaataaatacagtcatatgtttaataaaaaaaaaaaaaaaaaaaaaaaaaaaaaaaagaanaaaaaaaaaacaaaagaaagaggggggcggcgcgcctaaaaagtatcttccccgagggggcgccagcaagttgcacgcggttaccccaggtatttatgggaaccaaggggggccccataatagaggacggcgggtattaagtagccgcagagggaagcgggggccgcgcggttaataacacagagctggcgagagacagcgggggaacaaccgcgcggcaacacggggggaccccttgtgggggagagaggcaacccctctacatctcgcgggggggcggcggacaccacatcgtggggggccacaagactacctctctcgcgagaggaatatttcttaagacgcgcttctaggaggggggggacaatatttatataacattttgacgggggggtgttgatacaagggggggtggtatacacaccagagcggcgcggaaaatatatgtgagtggaggcgagtggattgaaaaaaggtttgcgggccaacacgggggatagttagtgatattgtggaggcgaaacaatttttttataccagggggggct

SEQ ID NO: 108290 - DNA, 2594 bp, Homo sapiens
  misc_feature (2046)..(2046): n is a, c, g, or t
tgcggagggttttgcccttcgtaaagatggccgcggaggcttttggagccaactgggagcgcagtacgcgttttctggagcatgggcagaggagacaggaacaagcgtagcatccgtgagcaccgattggctgaagcgagcaccccgggagctgactggctccgccattcgcgggaaggcgtttgtggtgccagagaaaagtagccagagcggcgcagtggcggccgcgttctgtggttttccgctattcccccagacccgcaccttctcggcctctttgcggagaatcgtgaccaagatgtggaacagtaatgatgggggtgcggggtggaggaggaagagaatcgcaggaggttttagcaagagggcgagcctagggtccgagaggcgtgtggtagcgggagaggaagggcgggagcggagctggggcgtttgggggtcacccgcaggaaggcggcgaggaaggttagggagactcgggcagtgtttgaaggggcgaagcctccgggagcctgcgggtttctcggaggcgtgggacgtggcacaggcactaatcctgttgttcaaaacaggtggattcgaaagctatggcagctcctcatacgggggagccggcggctacacgcagtccccggggggctttggatcgcccgcaccttctcaagccgaaaagaaatcaagagcccgagcccagcacattgtgccctgtactatatctcagctgctttctgccactttggttgatgaagtgttcagaattgggaatgttgagatttcacaggtcactattgtggggatcatcagacatgcagagaaggctccaaccaacattgtttacaaaatagatgacatgacagctgcacccatggacgttcgccagtgggttgacacagatgacaccagcagtgaaaacactgtggttcctccagaaacatatgtgaaagtggcaggccacctgagatcttttcagaacaaaaagagcctggtagcctttaagatcatgcccctggaggatatgaatgagttcaccacacatattctggaagtgatcaatgcacacatggtactaagcaaagccaacagccagccctcagcagggagagcacctatcagcaatccaggaatgagtgaagcagggaactttggtgggaatagcttcatgccagcaaatggcctcactgtggcccaaaaccaggtgttgaatttgattaaggcttgtccaagacctgaagggttgaactttcaggatctcaagaaccagctgaaacacatgtctgtatcctcaatcaagcaagctgtggattttctgagcaatgaggggcacatctattctactgtggatgatgaccattttaaatccacagatgcagaataactggatctaactgggtacctgagatattttacagctggacctagtttcacaatctgttgtctccagctctgcatatgtctggccagggggcttctaggaagtaggtttcatctatcaaatgtctcctctgacttccttttgaaacttactgctcttctgttttattttgttttgtttgaagctcagagggagatgggcaattgacagggatgcaatccagggtgggatttcttgaggaagttacaaataagcttgttacaacatcaagatagatggaattggaaggatgctaccaggagagtacttacatagtgctcaggagtttctcttcttaaaatgtttactgctgaaagatgagcaggaccagggcgttataggcagagccctagccgagaaacctgctggcctctgcctgttttcatttcccactttggttgtgtggcattactttcagaattgcactttcctgcttgtcatgactttttgacacacttgccatgacgtgtgtttctgtgaacatgaagttctgcggtagtgcctccaggggcagaggaaaagaagaagtgttactgcattttgtacaaaataaatacagtcatatgtttaataaaacagttctattgtagtaacttgtaaaaaaaaaaaaaaaaaaaaaaaaaaaaaaaaagaanaaaaaaaaaacaaaagaaagaggggggcggcgcgcctaaaaagtatcttccccgagggggcgccagcaagttgcacgcggttaccccaggtatttatgggaaccaaggggggccccataatagaggacggcgggtattaagtagccgcagagggaagcgggggccgcgcggttaataacacagagctggcgagagacagcgggggaacaaccgcgcggcaacacggggggaccccttgtgggggagagaggcaacccctctacatctcgcgggggggcggcggacaccacatcgtggggggccacaagactacctctctcgcgagaggaatatttcttaagacgcgcttctaggaggggggggacaatatttatataacattttgacgggggggtgttgatacaagggggggtggtatacacaccagagcggcgcggaaaatatatgtgagtggaggcgagtggattgaaaaaaggtttgcgggccaacacgggggatagttagtgatattgtggaggcgaaacaatttttttataccagggggggct

SEQ ID NO: 108291 - DNA, 2137 bp, Homo sapiens
  misc_feature (1589)..(1589): n is a, c, g, or t
tgcggagggttttgcccttcgtaaagatggccgcggaggcttttggagccaactgggagcgcagtacgcgttttctggagcatgggcagaggagacaggaacaagcgtagcatccgtggattcgaaagctatggcagctcctcatacgggggagccggcggctacacgcagtccccggggggctttggatcgcccgcaccttctcaagccgaaaagaaatcaagagcccgagcccagcacattgtgccctgtactatatctcagctgctttctgccactttggttgatgaagtgttcagaattgggaatgttgagatttcacaggtcactattgtggggatcatcagacatgcagagaaggctccaaccaacattgtttacaaaatagatgacatgacagctgcacccatggacgttcgccagtgggttgacacagatgacaccagcagtgaaaacactgtggttcctccagaaacatatgtgaaagtggcaggccacctgagatcttttcagaacaaaaagagcctggtagcctttaagatcatgcccctggaggatatgaatgagttcaccacacatattctggaagtgatcaatgcacacatggtactaagcaaagccaacagccagccctcagcagggagagcacctatcagcaatccaggaatgagtgaagcagggaactttggtgggaatagcttcatgccagcaaatggcctcactgtggcccaaaaccaggtgttgaatttgattaaggcttgtccaagacctgaagggttgaactttcaggatctcaagaaccagctgaaacacatgtctgtatcctcaatcaagcaagctgtggattttctgagcaatgaggggcacatctattctactgtggatgatgaccattttaaatccacagatgcagaataactggatctaactgggtacctgagatattttacagctggacctagtttcacaatctgttgtctccagctctgcatatgtctggccagggggcttctaggaagtaggtttcatctatcaaatgtctcctctgacttccttttgaaacttactgctcttctgttttattttgttttgtttgaagctcagagggagatgggcaattgacagggatgcaatccagggtgggatttcttgaggaagttacaaataagcttgttacaacatcaagatagatggaattggaaggatgctaccaggagagtacttacatagtgctcaggagtttctcttcttaaaatgtttactgctgaaagatgagcaggaccagggcgttataggcagagccctagccgagaaacctgctggcctctgcctgttttcatttcccactttggttgtgtggcattactttcagaattgcactttcctgcttgtcatgactttttgacacacttgccatgacgtgtgtttctgtgaacatgaagttctgcggtagtgcctccaggggcagaggaaaagaagaagtgttactgcattttgtacaaaataaatacagtcatatgtttaataaaacagttctattgtagtaacttgtaaaaaaaaaaaaaaaaaaaaaaaaaaaaaaaaagaanaaaaaaaaaacaaaagaaagaggggggcggcgcgcctaaaaagtatcttccccgagggggcgccagcaagttgcacgcggttaccccaggtatttatgggaaccaaggggggccccataatagaggacggcgggtattaagtagccgcagagggaagcgggggccgcgcggttaataacacagagctggcgagagacagcgggggaacaaccgcgcggcaacacggggggaccccttgtgggggagagaggcaacccctctacatctcgcgggggggcggcggacaccacatcgtggggggccacaagactacctctctcgcgagaggaatatttcttaagacgcgcttctaggaggggggggacaatatttatataacattttgacgggggggtgttgatacaagggggggtggtatacacaccagagcggcgcggaaaatatatgtgagtggaggcgagtggattgaaaaaaggtttgcgggccaacacgggggatagttagtgatattgtggaggcgaaacaatttttttataccagggggggct

SEQ ID NO: 108292 - DNA, 973 bp, Homo sapiens
tgcggagggttttgcccttcgtaaagatggccgcggaggcttttggagccaactgggagcgcagtacgcgttttctggagcatgggcagaggagacaggaacaagcgtagcatccgtgagcaccgattggctgaagcgagcaccccgggagctgactggctccgccattcgcgggaaggcgtttgtggtgccagagaaaagtagccagagcggcgcagtggcggccgcgttctgtggttttccgctattcccccagacccgcaccttctcggcctctttgcggagaatcgtgaccaagatgtggaacagtggattcgaaagctatggcagctcctcatacgggggagccggcggctacacgcagtccccggggggctttggatcgcccgcaccttctcaagccgaaaagaaatcaagagcccgagcccagcacattgtgccctgtactatatctcagctgctttctgccactttggttgatgaagtgttcagaattgggaatgttgagatttcacaggtcactattgtggggatcatcagacatgcagagaaggctccaaccaacattgtttacaaaatagatgacatgacagctgcacccatggacgttcgccagtgggttgacacagatgacaccagcagtgaaaacactgtggttcctccagaaacatatgtgaaagtggcaggccacctgagatcttttcagaacaaaaagagcctggtagcctttaagatcatgcccctggaggatatgaatgagttcaccacacatattctggaagtgatcaatgcacacatggtactaagcaaagccaacagccagccctcagcagggagagcacctatcagcaatccaggaatgagtgaagcagggaactttggtgggaatagcttcatgccagcaaatggcctcactgtggcccaaaaccaggggaatagcttcatgccagcaaatggcctcactgtggccatt

SEQ ID NO: 108293 - DNA, 1364 bp, Homo sapiens
  misc_feature (816)..(816): n is a, c, g, or t
cggacgcgtgggtccggacgcgtgggtcgacccacgcgtccggtctgtatcctcaatcaagcaagctgtggattttctgagcaatgaggggcacatctattctactgtggatgatgaccattttaaatccacagatgcagaataactggatctaactgggtacctgagatattttacagctggacctagtttcacaatctgttgtctccagctctgcatatgtctggccagggggcttctaggaagtaggtttcatctatcaaatgtctcctctgacttccttttgaaacttactgctcttctgttttattttgttttgtttgaagctcagagggagatgggcaattgacagggatgcaatccagggtgggatttcttgaggaagttacaaataagcttgttacaacatcaagatagatggaattggaaggatgctaccaggagagtacttacatagtgctcaggagtttctcttcttaaaatgtttactgctgaaagatgagcaggaccagggcgttataggcagagccctagccgagaaacctgctggcctctgcctgttttcatttcccactttggttgtgtggcattactttcagaattgcactttcctgcttgtcatgactttttgacacacttgccatgacgtgtgtttctgtgaacatgaagttctgcggtagtgcctccaggggcagaggaaaagaagaagtgttactgcattttgtacaaaataaatacagtcatatgtttaataaaacagttctattgtagtaacttgtaaaaaaaaaaaaaaaaaaaaaaaaaaaaaaaaagaanaaaaaaaaaacaaaagaaagaggggggcggcgcgcctaaaaagtatcttccccgagggggcgccagcaagttgcacgcggttaccccaggtatttatgggaaccaaggggggccccataatagaggacggcgggtattaagtagccgcagagggaagcgggggccgcgcggttaataacacagagctggcgagagacagcgggggaacaaccgcgcggcaacacggggggaccccttgtgggggagagaggcaacccctctacatctcgcgggggggcggcggacaccacatcgtggggggccacaagactacctctctcgcgagaggaatatttcttaagacgcgcttctaggaggggggggacaatatttatataacattttgacgggggggtgttgatacaagggggggtggtatacacaccagagcggcgcggaaaatatatgtgagtggaggcgagtggattgaaaaaaggtttgcgggccaacacgggggatagttagtgatattgtggaggcgaaacaatttttttataccagggggggct

SEQ ID NO: 108294 - DNA, 2190 bp, Homo sapiens
  misc_feature (1642)..(1642): n is a, c, g, or t
atccttaattaaattaatccctcccccccggcgggaaggcgtttgtggtgccagagaaaagtagccagagcggcgcagtggcggccgcgttctgtggttttccgctattcccccagacccgcaccttctcggcctctttgcggagaatcgtgaccaagatgtggaacagtggattcgaaagctatggcagctcctcatacgggggagccggcggctacacgcagtccccggggggctttggatcgcccgcaccttctcaagccgaaaagaaatcaagagcccgagcccagcacattgtgccctgtactatatctcagctgctttctgccactttggttgatgaagtgttcagaattgggaatgttgagatttcacaggtcactattgtggggatcatcagacatgcagagaaggctccaaccaacattgtttacaaaatagatgacatgacagctgcacccatggacgttcgccagtgggttgacacagatgacaccagcagtgaaaacactgtggttcctccagaaacatatgtgaaagtggcaggccacctgagatcttttcagaacaaaaagagcctggtagcctttaagatcatgcccctggaggatatgaatgagttcaccacacatattctggaagtgatcaatgcacacatggtactaagcaaagccaacagccagccctcagcagggagagcacctatcagcaatccaggaatgagtgaagcagggaactttggtgggaatagcttcatgccagcaaatggcctcactgtggcccaaaaccaggtgttgaatttgattaaggcttgtccaagacctgaagggttgaactttcaggatctcaagaaccagctgaaacacatgtctgtatcctcaatcaagcaagctgtggattttctgagcaatgaggggcacatctattctactgtggatgatgaccattttaaatccacagatgcagaataactggatctaactgggtacctgagatattttacagctggacctagtttcacaatctgttgtctccagctctgcatatgtctggccagggggcttctaggaagtaggtttcatctatcaaatgtctcctctgacttccttttgaaacttactgctcttctgttttattttgttttgtttgaagctcagagggagatgggcaattgacagggatgcaatccagggtgggatttcttgaggaagttacaaataagcttgttacaacatcaagatagatggaattggaaggatgctaccaggagagtacttacatagtgctcaggagtttctcttcttaaaatgtttactgctgaaagatgagcaggaccagggcgttataggcagagccctagccgagaaacctgctggcctctgcctgttttcatttcccactttggttgtgtggcattactttcagaattgcactttcctgcttgtcatgactttttgacacacttgccatgacgtgtgtttctgtgaacatgaagttctgcggtagtgcctccaggggcagaggaaaagaagaagtgttactgcattttgtacaaaataaatacagtcatatgtttaataaaacagttctattgtagtaacttgtaaaaaaaaaaaaaaaaaaaaaaaaaaaaaaaaagaanaaaaaaaaaacaaaagaaagaggggggcggcgcgcctaaaaagtatcttccccgagggggcgccagcaagttgcacgcggttaccccaggtatttatgggaaccaaggggggccccataatagaggacggcgggtattaagtagccgcagagggaagcgggggccgcgcggttaataacacagagctggcgagagacagcgggggaacaaccgcgcggcaacacggggggaccccttgtgggggagagaggcaacccctctacatctcgcgggggggcggcggacaccacatcgtggggggccacaagactacctctctcgcgagaggaatatttcttaagacgcgcttctaggaggggggggacaatatttatataacattttgacgggggggtgttgatacaagggggggtggtatacacaccagagcggcgcggaaaatatatgtgagtggaggcgagtggattgaaaaaaggtttgcgggccaacacgggggatagttagtgatattgtggaggcgaaacaatttttttataccagggggggct

SEQ ID NO: 108295 - DNA, 2285 bp, Homo sapiens
  misc_feature (1737)..(1737): n is a, c, g, or t
tgcggagggttttgcccttcgtaaagatggccgcggaggcttttggagccaactgggagcgcagtacgcgttttctggagcatgggcagaggagacaggaacaagcgtagcatccgtgagcaccgattggctgaagcgagcaccccgggagctgactggctccgccattcgcgggaaggcgtttgtggtgccagagaaaagtagccagagcggcgcagtggcggccgcgttctgtggttttccgctattcccccagacccgcaccttctcggcctctttgcggagaatcgtgaccaagatgtggaacagtggattcgaaagctatggcagctcctcatacgggggagccggcggctacacgcagtccccggggggctttggatcgcccgcaccttctcaagccgaaaagaaatcaagagcccgagcccagcacattgtgccctgtactatatctcagctgctttctgccactttggttgatgaagtgttcagaattgggaatgttgagatttcacaggtcactattgtggggatcatcagacatgcagagaaggctccaaccaacattgtttacaaaatagatgacatgacagctgcacccatggacgttcgccagtgggttgacacagatgacaccagcagtgaaaacactgtggttcctccagaaacatatgtgaaagtggcaggccacctgagatcttttcagaacaaaaagagcctggtagcctttaagatcatgcccctggaggatatgaatgagttcaccacacatattctggaagtgatcaatgcacacatggtactaagcaaagccaacagccagccctcagcagggagagcacctatcagcaatccaggaatgagtgaagcagggaactttggtgggaatagcttcatgccagcaaatggcctcactgtggcccaaaaccagtttcaggatctcaagaaccagctgaaacacatgtctgtatcctcaatcaagcaagctgtggattttctgagcaatgaggggcacatctattctactgtggatgatgaccattttaaatccacagatgcagaataactggatctaactgggtacctgagatattttacagctggacctagtttcacaatctgttgtctccagctctgcatatgtctggccagggggcttctaggaagtaggtttcatctatcaaatgtctcctctgacttccttttgaaacttactgctcttctgttttattttgttttgtttgaagctcagagggagatgggcaattgacagggatgcaatccagggtgggatttcttgaggaagttacaaataagcttgttacaacatcaagatagatggaattggaaggatgctaccaggagagtacttacatagtgctcaggagtttctcttcttaaaatgtttactgctgaaagatgagcaggaccagggcgttataggcagagccctagccgagaaacctgctggcctctgcctgttttcatttcccactttggttgtgtggcattactttcagaattgcactttcctgcttgtcatgactttttgacacacttgccatgacgtgtgtttctgtgaacatgaagttctgcggtagtgcctccaggggcagaggaaaagaagaagtgttactgcattttgtacaaaataaatacagtcatatgtttaataaaacagttctattgtagtaacttgtaaaaaaaaaaaaaaaaaaaaaaaaaaaaaaaaagaanaaaaaaaaaacaaaagaaagaggggggcggcgcgcctaaaaagtatcttccccgagggggcgccagcaagttgcacgcggttaccccaggtatttatgggaaccaaggggggccccataatagaggacggcgggtattaagtagccgcagagggaagcgggggccgcgcggttaataacacagagctggcgagagacagcgggggaacaaccgcgcggcaacacggggggaccccttgtgggggagagaggcaacccctctacatctcgcgggggggcggcggacaccacatcgtggggggccacaagactacctctctcgcgagaggaatatttcttaagacgcgcttctaggaggggggggacaatatttatataacattttgacgggggggtgttgatacaagggggggtggtatacacaccagagcggcgcggaaaatatatgtgagtggaggcgagtggattgaaaaaaggtttgcgggccaacacgggggatagttagtgatattgtggaggcgaaacaatttttttataccagggggggct

SEQ ID NO: 108296 - DNA, 1651 bp, Homo sapiens
  misc_feature (1103)..(1103): n is a, c, g, or t
taaggatacgaaggctcctggttaacgaacaaaaagagcctggtagcctttaagatcatgcccctggaggatatgaatgagttcaccacacatattctggaagtgatcaatgcacacatggtactaagcaaagccaacagccagccctcagcagggagagcacctatcagcaatccaggaatgagtgaagcagggaactttggtgggaatagcttcatgccagcaaatggcctcactgtggcccaaaaccaggtgttgaatttgattaaggcttgtccaagacctgaagggttgaactttcaggatctcaagaaccagctgaaacacatgtctgtatcctcaatcaagcaagctgtggattttctgagcaatgaggggcacatctattctactgtggatgatgaccattttaaatccacagatgcagaataactggatctaactgggtacctgagatattttacagctggacctagtttcacaatctgttgtctccagctctgcatatgtctggccagggggcttctaggaagtaggtttcatctatcaaatgtctcctctgacttccttttgaaacttactgctcttctgttttattttgttttgtttgaagctcagagggagatgggcaattgacagggatgcaatccagggtgggatttcttgaggaagttacaaataagcttgttacaacatcaagatagatggaattggaaggatgctaccaggagagtacttacatagtgctcaggagtttctcttcttaaaatgtttactgctgaaagatgagcaggaccagggcgttataggcagagccctagccgagaaacctgctggcctctgcctgttttcatttcccactttggttgtgtggcattactttcagaattgcactttcctgcttgtcatgactttttgacacacttgccatgacgtgtgtttctgtgaacatgaagttctgcggtagtgcctccaggggcagaggaaaagaagaagtgttactgcattttgtacaaaataaatacagtcatatgtttaataaaacagttctattgtagtaacttgtaaaaaaaaaaaaaaaaaaaaaaaaaaaaaaaaagaanaaaaaaaaaacaaaagaaagaggggggcggcgcgcctaaaaagtatcttccccgagggggcgccagcaagttgcacgcggttaccccaggtatttatgggaaccaaggggggccccataatagaggacggcgggtattaagtagccgcagagggaagcgggggccgcgcggttaataacacagagctggcgagagacagcgggggaacaaccgcgcggcaacacggggggaccccttgtgggggagagaggcaacccctctacatctcgcgggggggcggcggacaccacatcgtggggggccacaagactacctctctcgcgagaggaatatttcttaagacgcgcttctaggaggggggggacaatatttatataacattttgacgggggggtgttgatacaagggggggtggtatacacaccagagcggcgcggaaaatatatgtgagtggaggcgagtggattgaaaaaaggtttgcgggccaacacgggggatagttagtgatattgtggaggcgaaacaatttttttataccagggggggct

SEQ ID NO: 108297 - DNA, 395 bp, Homo sapiens
cctctattgttcaataggttttagtgaataaattgtcaattattttttagtgacagtcaaaataaatgaagcaaggtgactggcaccaataacccaaactgtgagaaatttacctagaaaaaaagccaactaccaatgagtcaaataataatatgaccaggaacaataaaatgtggtaggaagaaatgccagaaatggtagcaaaaatgtaacagttcaatttatcatataatttgtcaaaaatatcctcccaagtaaaaccccaggagctctcaaggatttgcaagaagttttgaaaccacaaactttatcacctggcataatagctttataagtcataattagatatgagaggcatgggctggatgtggcggctcacgcctgtaatcctagca

SEQ ID NO: 108298 - DNA, 316 bp, Homo sapiens
actcgccgtcctaggcaagatcttactttgatggttgagaagattttacaatctattgtctgaatagcctctgaatattaagttggactccacaagttctgtagttactcagagccttgactgtttttcataaactctatatccagtctgtggacaaatcccacgtcaaagtgtatcttgaaactgaccccttcttatcttccctactgctgttaccctggtctaagctaccattatatctacttgtctccttgcttccacccttaccatttttgtaatgtttccacatagcagatagagtgatcctttgtaaaac

SEQ ID NO: 108299 - DNA, 445 bp, Homo sapiens
gtaaggaaatgcaacatgctttcgctatgctttcacagtaggatgaggctgtccttgaggtttgaggtttatttgcctaacacctggcatgcaggaacttcagtaaatatttgttggagaaatgaatgatccattcacagactcattaggccctgattgtgtctgtgggttacaatagaacactcttcttatcagtccttatctgacttgatttgctctgtgacacttaacttcctctcttttctctacccctgacccatgacactccttaattttcttctttcctcttgaatgtgtcttcttaatcttctttgcttctcttccaccttctctgtaagtgatgatgctccccgcccttcccattaggttctgtattgaccttcgatattccccttggatgatctcattcgtgtccatgacttcaaccaccaccacccagacatgg

SEQ ID NO: 108300 - DNA, 277 bp, Homo sapiens
acttacagccaactgatctttgataaagcaaacaaaaacgcagagtggggaaaggacaccctattcgacaaatgatgggataattggcaagccacatgtagagaatgatactggattttcatctctcagcttatacaaaaattgactcaagatggatcagacttaaatctaaggcatgaaatcataaaaattctggaagataacgtcagaaaaacccttctagatactggcttaggcaaagacttaatgacccaagaacccaaaagcaaatgcaaca

SEQ ID NO: 108301 - DNA, 269 bp, Homo sapiens
aggctaaaatgttccctcatttggtgacaagttcctatgcaagttttgaattatttggaataattggatttctttggcttgtgagccaaggggaatcactatcactttcttctatggtatcagaaaactccctctttcttctaagttcccctgctgcagtcttctcccccaccttcatgtgagagctacacaaggggaatttgttcacttaagtttgcagccattttgcacaccccaaagagttgaccttgatgtgaactaattgggat

SEQ ID NO: 108302 - DNA, 198 bp, Homo sapiens
ccaacaagtatttagtaagtgctgccttggtgccaggaaaggtactagatgctgaagaggaataagccctcatgccagcccttgaggagtgtgcagtccagtgggggaaagctggtatattaatgtctgataatcatgtatttatcatgatacatgataaatggctgggcgcggtggctcacgcctgtaatcccaaca

SEQ ID NO: 108303 - DNA, 653 bp, Homo sapiens
tcgactccacagcaccggcttccaggtgtgctcagaaccatagggaattttctcttctaacaagcaccagacctgcttgctgccaagcgtttgaacgtgctgttcctttgcccagagtagccgctgcttcctgcagccttctcctcccctagctaatgcccacccacctattgttgtcacttgggaagaaaacagacaccttcaaggagagggctcccctggtagcccccaccccaagacagagctggatgcccctcgcttccgtagggaaagcacttctcctgcaggatggcattgctctctccccttccatggcacgtagtatgtgctcagtaaatatgtgttggatgagaaactgaaggtgtccccaggcctacaccactgccatgcccgaacactatccatgctatggtgggcaccatctctctgatgacagttctgtgtccacaacccagacccctccacacaaacccagatggggctgtgccgctgttttccagatgtattcattcaacaaatatttgtagggtacctactgtgtgtcagaagatgttcaagatcagcatcatccgatggaaatagcatatgagccatgtatgtagtttcaagtttttcattagccacattaaaaaagtaaaaggaaacaaatgaaa

SEQ ID NO: 108304 - DNA, 327 bp, Homo sapiens
cctttttatctcctttggttctggatgctccttattgactcttctatctcttcctgaaatttgctgagttccctagggctctggcccaggctcattttcactctacatactttctgccaacttcatcccattcttcaattaccacatctatgtgccaactggacctttctctcaagttctagtgtgtattaagattctccggataaacagaactaaaggaatataatagatatgtaagaggatatttattatgggaattggctcacacaattaagttggttctctgggtttttggtttgtttagtcttttgttcttttaaactaaaa

SEQ ID NO: 108305 - DNA, 545 bp, Homo sapiens
  misc_feature (432)..(432): n is a, c, g, or t
ctctggaagcgctttcatgagataggcactgagatgatcatcaccaaggccggcaggcgcatgtttccagcaatgagagtgaagatctctggattagatcctcaccagcaatattacattgccatggatattgtaccagtggacaacaaaagatacaggtatgtttaccacagttcgaaatggatggtggcaggtaatgctgactcgcctgtgccaccccgtgtgtacattcatccagactcgcctgcctcgggggagacttggatgagacaagttatcagcttcgacaagctgaagctcaccaacaatgaactggatgaccaaggccatattattcttcattctatgcacaaataccaaccgcgagtgcacgtcatccgtaaagactgtggagacgatctttctcccatcaagcctgttccatccgggganggagtaaaggcattctcctttccagaaactgtcttcacaaccgtcactgcctatcagaatcagcagattactcgcctgaagatagataggaatccatttgctaaaggcttccg

SEQ ID NO: 108306 - DNA, 484 bp, Homo sapiens
tatatccaactgacaggaaaggagttttgtttgttattttctatgtagttatataaatggccattaattaatgataaataataatcacacatcatgatgaaatgttcagttaggctgacactacagttttttggcctaggattcttctttagaccccaaagaggaatatcattgtttattgctgaaaccagaagaaataaaatcattctgcagtatatctgtcaggattttttatgctgccagaaagttatataaccgtaagtaaagtaatttcagcagcctttcataaatgcagctggaagagtgataactttaattctgctagtcaattcttgagttggtccagccagttccataatctcttgataaaatgataacaacctaacatttactagatgtcttctgtgtgccagacgtctcctcctaaactcttttcacaaataggctaatttaaacttcacaataaccttatgaaataggaact

SEQ ID NO: 108307 - DNA, 427 bp, Homo sapiens
atgtgccctcccgcccctctcaggccggacagccttgcttctggaacacacgagcacagcttcaccaggcactttctgagcaccctgcaggcgcctcccaggagtggtcagtggtcaatcagctaatgaagctgcataggacatgacccttgtttaccgcagaatgcccagagctggcaggatgttttatatgcaggaagtacccaaaatgtatttattgaggaagtgatgatggataagaggaagacggagagcgagggagagaggggctaggggcccctgcggtgtaaagggggtgtggctgggagtgtgcaggggaacagggatcatttcaaggttcctatctgggagaaaataaaaaggtttacagttagttgagataagcgtgggaatatgcgaacatttttaaagaataaaaagtttagct

SEQ ID NO: 108308 - DNA, 495 bp, Homo sapiens
tggaagaagatactggccatatacagatgacctacaaaggaacagtaaccagaatatgcacagaactcctataattaatacgaaataatttaaagaaaacggggcaaaaagacacagacatttcacagaaggttacccacaaacaataaacatagaaaattaatttcctctatattaaaggaaaagaagttaaatgaaattaattttcattaaggaattaaaggaaataaatcaaatttctttttttttttaaaaaaaaaagagttttgctcttgttgccctgcctcgagtgcagtggcgcaatctcagctcactgcaacctcccgctcacgggttcaagcgattctcctgcctcagcctcctgagtagctgggattacaggtacccgccatcacaaccggctaattttttgtatttttagtagagatggagtttcaccatgttggccaggctggtctcgaactcctgacctcaggtgatccacccgcctcggcc

SEQ ID NO: 108309 - DNA, 811 bp, Homo sapiens
tgtctctaactccacaaatttcaacatgcatacaaatcaagaaggggtgggggtgttacatgcaaattctgcttcagtgggtgttggagcctgagattctggctttctaacaagctcccaggtaagtgctgatgctgctgctttgagggccacacaccttgaggagtaggaagagtactcatactggaagagtattcagcacggactggaatcctgcatacatatctgagctctgtgttctggtatgtatatagactttttaaaaaaattagtagagatggggtctcaccattttggccaggctggtctcaaactccagggctcaagagatcctcctgccttggcctcccaaagtgctgagattacaggcatgagccactatacctggcttatatagactgcttctaaggtccattctaactgtacaattccatgattcagtcactgtttggctattaactaatttttttaggcttctgattctcattgtttataagctgctatattagagaatgttctgtactggaaggccagataaaaagtcttacttatggccagtaagttttatttttcaatcttctacaagtctgcctcaacccatgggaaatcttggctaatagtaacatgatactgggcttggaccataaactaaacttgagtcagcaatgtagggctttggttagataagcaagaatgaacttgggaatataaccaaaagaaagggacagctaatcctaccagaacaggcagtatttatatgaatacttttttcaaatatccacaactgggaaaagctgctgaacacataaag

SEQ ID NO: 108310 - DNA, 739 bp, Homo sapiens
acagtagcagtactttggttatgtttatctgaagatcttttatgatttacttgcactgaccataacctgctgtgtgacagatggggggacatcacctaacagtgaagaagtatgaactgggtagtcagtcataaatacctccttccagttctaggaagcccagttatttgcatataatttgctgtctctgctgtgtgacatactgcagaattattctctttttgatgaaaaatatgtatttggaaatatgagagccatttagccagtgatgcatatttttcttattctctataaggatcggattggtaaatatggcctcattaacagtttgttttattaactgttcaaacctgcccagacttaactacatgtaactggagcagaggaaaggacagagaaggtccaaatcaaagtgcctgattgtccttctgtccttgaaaattcagctatgggcctggcacagtggttcacgcctgtaatctcagcactctggggggctgagttgggtggaccacttgaactcaggagttcaagatcagcctgggcaacatggcaaaactttttctctacaaaaaaaatacaaaaattggctggacacggtggctcacacctgtaatcccagctactcgagaggctgaggcaggagaattgcttgaacccgggaggcagaggtgagccgagatcgcgttattgcattccagcctgggcaacaagagggaaattccgtctcaaaaaaaaa

SEQ ID NO: 108311 - DNA, 429 bp, Homo sapiens
ccaggctccagctatcctcccacctcaacctccagagtagttgagaccacaggcgtgcactaccacgcccggctacctttttgtattttcagtagagacgaggtttcgccgtgttgcccaggctggttcaagcggagctcaagcaatcagcctgcctcggcctcccaaagtgttgggattacaggcatgagccgctgcgcccaaccttcttctgctgtcgagatactgctcatcacctgcctgctccagaattcatgtggcttctcattgctcaatggattaagttcatgtttatcctggctttcaagtctttccgaagtgctgaatgaaagaacttgtaaggcatttcgggaatgccaaggagggaatggacgagtgtttcctgggctggaaaacctttacagagaaatggatcttggcaaagaattc

SEQ ID NO: 108312 - DNA, 131 bp, Homo sapiens
gtgtctgcctggaatgctcagggaatctgcctgaggaacacctttttgtctttaaagattatttttgtgtcatctcaaggacgacacattccctacaccagggtttctcagcctgggcattgttgacctct

SEQ ID NO: 108313 - DNA, 422 bp, Homo sapiens
ataaactgctctccaatccagtactgataaacgacgtggggaaagactatggaggttactttcaaaacaaacatttaccatgttccaggaaatacatgtgtttgtataaaaagcaggtagcaattacataaacttttttcttctttatctatttgccaagcaattggctgttaaggtctttttggttgcctttgggcactttgtgtgcactcttttctgcttttaaaaacataatgcatggtaacccatttgccactgactggcattgtgaagagttggaatggggcagtgtaataacatgaaaggctgatgacaaatttagtatttgtaatttggaatctcttctcagtacattagaagtcttccctatttaaaggaaccctgaaaccatcattttatcaagtgaagagtttgtaacacat

SEQ ID NO: 108314 - DNA, 586 bp, Homo sapiens
gcttttcttcctcccctgttttggaaaagcaaacccagggggcttgggcttaacaaggagaggcttcctggaagccagtgtccttccagttctctggccttgcaattaggtcagagcctcgtcccccaccagccactgtgcagaggggagactgagtccccagatggaaataacttgcctggggaaggacaagagggactggagatagatggagttggagactcatcccagctctgctgctcactagccatgcagccttggacaagacacttcactcccaagtcttttctgtagggggtggaggggctgtgctctgtacctgcagagtgctctgcagaggggcactgttgccctagtcagggctgctgggctgaagctgagtctctgactcccattccagtactcctgcctgcagccaggcctctgagtacagacagggcactttcacaggtgtgttcctcccggttagattccccatcaggaatggaacaggttggctatgtgctccccaaatgtagttcctggtcttgaggcctcagcctgcagctttgctggatgccctccttccctgctccacagcccaccc

SEQ ID NO: 108315 - DNA, 504 bp, Homo sapiens
aaattctgttctccttaagtggcatagcccatggtaagtcctccctgcctgcgaacctattcataggttcgcaggtgggaatggaggtccaatcacactaaccctcggactaataaaacatatgttgagggagacatgttcttacacagcaggttcataggagccagtcttgatgtcaagtgtctggcctttgttccaagcctgatagcctttgtgtggtttggattctttatttggttctttggacgatttttgaaaaatgagccacgcatggagaatcaagacaaaacttacactcgcatgaaaagaaaatctccatcagaacatagcaaagacatgggaatcactcgagaaaacacccaggcttcagtagaagaccccttgaatgacccttctttggtttgcatcaggtctgacttcaatgagatcgtctacaagtcttcccacctaacccgccggacccgagctcaccctgaacccattactccgcaccgttacaccggc

SEQ ID NO: 108316 - DNA, 2470 bp, Homo sapiens
acgtggcaagtttcagatcagtcgaagctggagactggaggtcgttggagtgctgttggaggaagtactgttggaggttggagcaaggagagtagttgttggaaggaacttcttagaagagccagtctcgaagatatggtgtagacaaagcctgaagctgcactcttactacatttgcaagttgatgtccagtgttcggtattctatttgtggctacacaaattgagaaatgtgaaaaatagcatatatcattacagactatatgggcatccgaaatgaaagtttcatgaaattagctgcagtagggacctggatgggggactttgtcacagcttggatggtcactgatatgatgcttcaggacaaaccctatcctgactggggaaaatcagcaagagctttctggaagaaaggaaatgttaggatcactttattctggacagttctttttactctgacgtctgtggttgtacttgtgattacaacggactggatcagctgggacaagctgaatcggggatttttgcccagtgatgaagtttccagagcattccttgcttcttttatcttggtctttgaccttcttattgtgatgcaggactgggaattcccacatttcatgggagatgttgatgtaaatctccctggtttgcacacccctcacatgcagttcaagattcctttcttccagaaaatcttcaaggaggaatatcgtattcacataacaggcaaatggtttaactatggaattatcttcctcgtcttgattttggatcttaatatgtggaagaaccaaatattttataaacctcatgaatatgggcaatatatcggcccggggcagaagatatatacagtgaaagactcagaaagtttaaaagatttgaacagaaccaagctatcctgggaatggaggtccaatcacactaaccctcggactaataaaacatatgttgagggagacatgttcttacacagcaggttcataggagccagtcttgatgtcaagtgtctggcctttgttccaagcctgatagcctttgtgtggtttggattctttatttggttctttggacgatttttgaaaaatgagccacgcatggagaatcaagacaaaacttacactcgcatgaaaagaaaatctccatcagaacatagcaaagacatgggaatcactcgagaaaacacccaggcttcagtagaagaccccttgaatgacccttctttggtttgcatcaggtctgacttcaatgagatcgtctacaagtcttcccacctaacctcggaaaacttgagctcacagttgaacgaatctactagtgcaacagaagctgatcaagacccaacgacttctaaaagtacacctacgaactagactcggagatagacttggagataacacaaaaagcaaccttgagtgtaactttaaaaatttagtctttccttttgtatatgtaaggtttacgtagtgttaggtaaaaatatgaacaatgccacaacggtgctcaacatgctttttctaggattcattgttttctatttgtattataatacacgtgcctactgtatactcaacagtcctctagagattgcttttcacaattgcacaagctattactgactttacagcatagtggaagattagctgatgacccatgtatctgatgttcaaccatagtggtgccttgagacattaaactgtttttaactgtaccagaaatgaagtgtggaacagttacctaacctatttcacatgggcgttttgtatacaactattttgatctacacttgatgtctgagcagaaaacagaaatagctaaatgtgactcaggaagtatctcttggtttcttattcagcagcagagttggtgactttgacaactggactgcagagaaacatggtgatcaccttttaatttttattggctgtctgccaaatataaatacagatgcaaaattcagtaataggagatccataacccaacatgggtcactactcgtgaaatgtgactttctcccaccagtaattgaaatgaggtgatgatacctaattatgttttcctaattaaagataaattgctacttgattaaaaatcctgcccttcacctttgggaacaaaggttaagagacacagttgggcgaactctcaaatttattggcatttacacaaagtcccagacaaccaaggaactgaagttttcatcatatgagagcagcacatcccaccatttacaatattcgtatatctttctgcaaatatggctctggatagtgaaaattgaaaaacatatgccaaccctgagcaagggaactcctcaaaaaatcatgcagcggaaccttgtcaggtagagaagccgtgcatgaaagaatttgtttaatgtcttgttttgcgtatgtgttttttgtttttgttttttaagaactaaatattgcacattaataaataagaattatacagcaaaaaaaaaa

SEQ ID NO: 108317 - DNA, 2911 bp, Homo sapiens
gcccgcggccgcggactttgcggcgggagcgcggcgcggtgaagcaccggcgcggagggcgcccggcgtaggcggcggcgggtgtgggccgagccggtatttatagctccgtgacagcagcagcggcagcgacgccgccggcccgtctcgccgcgcttcccagcgaggccgccggcgcgccgagggctgtgctcgaccgcgaatcccgtgtgcagtcgccccgcgccccgcgcgacccttcgggtaaactacgaactgggagttctgaagaatgggtaaagactttcgttactatttccagcatccctggtctcgcatgattgtggcttacttggtgatcttctttaacttcttaatatttgcggaggacccagtttctcatagccaaacagaagccaatgttattgttgttggaaactgtttttcatttgttacaaataaataccctagaggagttggctggaggattttgaaggtgcttctatggctacttgccattctcacaggactaatagctggcaaatttctgttccatcagcgtttgtttggtcagttgctccgattaaaaatgtttcgagaagatcatgggtcgtggatgacaatgttcttcagcacaattctctttctcttcatattttctcacatatacaacacgattcttctaatggatgggaacatgggagcatatatcattacagactatatgggcatccgaaatgaaagtttcatgaaattagctgcagtagggacctggatgggggactttgtcacagcttggatggtcactgatatgatgcttcaggacaaaccctatcctgactggggaaaatcagcaagagctttctggaagaaaggaaatgttaggatcactttattctggacagttctttttactctgacgtctgtggttgtacttgtgattacaacggactggatcagctgggacaagctgaatcggggatttttgcccagtgatgaagtttccagagcattccttgcttcttttatcttggtctttgaccttcttattgtgatgcaggactgggaattcccacatttcatgggagatgttgatgtaaatctccctggtttgcacacccctcacatgcagttcaagattcctttcttccagaaaatcttcaaggaggaatatcgtattcacataacaggcaaatggtttaactatggaattatcttcctcgtcttgattttggatcttaatatgtggaagaaccaaatattttataaacctcatgaatatgggcaatatatcggcccggggcagaagatatatacagtgaaagactcagaaagtttaaaagatttgaacagaaccaagctatcctgggaatggaggtccaatcacactaaccctcggactaataaaacatatgttgagggagacatgttcttacacagcaggttcataggagccagtcttgatgtcaagtgtctggcctttgttccaagcctgatagcctttgtgtggtttggattctttatttggttctttggacgatttttgaaaaatgagccacgcatggagaatcaagacaaaacttacactcgcatgaaaagaaaatctccatcagaacatagcaaagacatgggaatcactcgagaaaacacccaggcttcagtagaagaccccttgaatgacccttctttggtttgcatcaggtctgacttcaatgagatcgtctacaagtcttcccacctaacctcggaaaacttgagctcacagttgaacgaatctactagtgcaacagaagctgatcaagacccaacgacttctaaaagtacacctacgaactagactcggagatagacttggagataacacaaaaagcaaccttgagtgtaactttaaaaatttagtctttccttttgtatatgtaaggtttacgtagtgttaggtaaaaatatgaacaatgccacaacggtgctcaacatgctttttctaggattcattgttttctatttgtattataatacacgtgcctactgtatactcaacagtcctctagagattgcttttcacaattgcacaagctattactgactttacagcatagtggaagattagctgatgacccatgtatctgatgttcaaccatagtggtgccttgagacattaaactgtttttaactgtaccagaaatgaagtgtggaacagttacctaacctatttcacatgggcgttttgtatacaactattttgatctacacttgatgtctgagcagaaaacagaaatagctaaatgtgactcaggaagtatctcttggtttcttattcagcagcagagttggtgactttgacaactggactgcagagaaacatggtgatcaccttttaatttttattggctgtctgccaaatataaatacagatgcaaaattcagtaataggagatccataacccaacatgggtcactactcgtgaaatgtgactttctcccaccagtaattgaaatgaggtgatgatacctaattatgttttcctaattaaagataaattgctacttgattaaaaatcctgcccttcacctttgggaacaaaggttaagagacacagttgggcgaactctcaaatttattggcatttacacaaagtcccagacaaccaaggaactgaagttttcatcatatgagagcagcacatcccaccatttacaatattcgtatatctttctgcaaatatggctctggatagtgaaaattgaaaaacatatgccaaccctgagcaagggaactcctcaaaaaatcatgcagcggaaccttgtcaggtagagaagccgtgcatgaaagaatttgtttaatgtcttgttttgcgtatgtgttttttgtttttgttttttaagaactaaatattgcacattaataaataagaattatacagcaaaaaaaaaa

SEQ ID NO: 108318 - DNA, 2811 bp, Homo sapiens
gcccgcggccgcggactttgcggcgggagcgcggcgcggtgaagcaccggcgcggagggcgcccggcgtaggcggcggcgggtgtgggccgagccggtatttatagctccgtgacagcagcagcggcagcgacgccgccggcccgtctcgccgcgcttcccagcgaggccgccggcgcgccgagggctgtgctcgaccgcgaatcccgtgtgcagtcgccccgcgccccgcgcgacccttcgggtaaactacgaactgggagttctgaagaatgggtaaagactttcgttactatttccagcatccctggtctcgcatgattgtggcttacttggtgatcttctttaacttcttaatatttgcggaggacccagtttctcatagccaaacagaagccaatgttattgttgttggaaactgtttttcatttgttacaaataaataccctagaggagttggctggaggattttgaaggtgcttctatggctacttgccattctcacaggactaatagctggcaaatttctgttccatcagcgtttgtttggtcagttgctccgattaaaaatgtttcgagaagatcatgggtcgtggatgacaatgttcttcagcacaattctctttctcttcatattttctcacatatacaacacgattcttctaatggatgggaacatggggtcactgatatgatgcttcaggacaaaccctatcctgactggggaaaatcagcaagagctttctggaagaaaggaaatgttaggatcactttattctggacagttctttttactctgacgtctgtggttgtacttgtgattacaacggactggatcagctgggacaagctgaatcggggatttttgcccagtgatgaagtttccagagcattccttgcttcttttatcttggtctttgaccttcttattgtgatgcaggactgggaattcccacatttcatgggagatgttgatgtaaatctccctggtttgcacacccctcacatgcagttcaagattcctttcttccagaaaatcttcaaggaggaatatcgtattcacataacaggcaaatggtttaactatggaattatcttcctcgtcttgattttggatcttaatatgtggaagaaccaaatattttataaacctcatgaatatgggcaatatatcggcccggggcagaagatatatacagtgaaagactcagaaagtttaaaagatttgaacagaaccaagctatcctgggaatggaggtccaatcacactaaccctcggactaataaaacatatgttgagggagacatgttcttacacagcaggttcataggagccagtcttgatgtcaagtgtctggcctttgttccaagcctgatagcctttgtgtggtttggattctttatttggttctttggacgatttttgaaaaatgagccacgcatggagaatcaagacaaaacttacactcgcatgaaaagaaaatctccatcagaacatagcaaagacatgggaatcactcgagaaaacacccaggcttcagtagaagaccccttgaatgacccttctttggtttgcatcaggtctgacttcaatgagatcgtctacaagtcttcccacctaacctcggaaaacttgagctcacagttgaacgaatctactagtgcaacagaagctgatcaagacccaacgacttctaaaagtacacctacgaactagactcggagatagacttggagataacacaaaaagcaaccttgagtgtaactttaaaaatttagtctttccttttgtatatgtaaggtttacgtagtgttaggtaaaaatatgaacaatgccacaacggtgctcaacatgctttttctaggattcattgttttctatttgtattataatacacgtgcctactgtatactcaacagtcctctagagattgcttttcacaattgcacaagctattactgactttacagcatagtggaagattagctgatgacccatgtatctgatgttcaaccatagtggtgccttgagacattaaactgtttttaactgtaccagaaatgaagtgtggaacagttacctaacctatttcacatgggcgttttgtatacaactattttgatctacacttgatgtctgagcagaaaacagaaatagctaaatgtgactcaggaagtatctcttggtttcttattcagcagcagagttggtgactttgacaactggactgcagagaaacatggtgatcaccttttaatttttattggctgtctgccaaatataaatacagatgcaaaattcagtaataggagatccataacccaacatgggtcactactcgtgaaatgtgactttctcccaccagtaattgaaatgaggtgatgatacctaattatgttttcctaattaaagataaattgctacttgattaaaaatcctgcccttcacctttgggaacaaaggttaagagacacagttgggcgaactctcaaatttattggcatttacacaaagtcccagacaaccaaggaactgaagttttcatcatatgagagcagcacatcccaccatttacaatattcgtatatctttctgcaaatatggctctggatagtgaaaattgaaaaacatatgccaaccctgagcaagggaactcctcaaaaaatcatgcagcggaaccttgtcaggtagagaagccgtgcatgaaagaatttgtttaatgtcttgttttgcgtatgtgttttttgtttttgttttttaagaactaaatattgcacattaataaataagaattatacagcaaaaaaaaaa

SEQ ID NO: 108319 - DNA, 2563 bp, Homo sapiens
acgtggcaagtttcagatcagtcgaagctggagactggaggtcgttggagtgctgttggaggaagtactgttggaggttggagcaaggagagtagttgttggaaggaacttcttagaagagccagtctcgaagatatggtgtagacaaagcctgaagctgcactcttactacatttgcaagttgatgtccagtgttcggtattctatttgtggctacacaaattgagaaatgtgaaaaatatacgagttttcgccatgttactcaggttgctcttgaactcctgggctcaagcgattcacctgccttgtcctcctaaagccctgggattacagagcatatatcattacagactatatgggcatccgaaatgaaagtttcatgaaattagctgcagtagggacctggatgggggactttgtcacagcttggatggtcactgatatgatgcttcaggacaaaccctatcctgactggggaaaatcagcaagagctttctggaagaaaggaaatgttaggatcactttattctggacagttctttttactctgacgtctgtggttgtacttgtgattacaacggactggatcagctgggacaagctgaatcggggatttttgcccagtgatgaagtttccagagcattccttgcttcttttatcttggtctttgaccttcttattgtgatgcaggactgggaattcccacatttcatgggagatgttgatgtaaatctccctggtttgcacacccctcacatgcagttcaagattcctttcttccagaaaatcttcaaggaggaatatcgtattcacataacaggcaaatggtttaactatggaattatcttcctcgtcttgattttggatcttaatatgtggaagaaccaaatattttataaacctcatgaatatgggcaatatatcggcccggggcagaagatatatacagtgaaagactcagaaagtttaaaagatttgaacagaaccaagctatcctgggaatggaggtccaatcacactaaccctcggactaataaaacatatgttgagggagacatgttcttacacagcaggttcataggagccagtcttgatgtcaagtgtctggcctttgttccaagcctgatagcctttgtgtggtttggattctttatttggttctttggacgatttttgaaaaatgagccacgcatggagaatcaagacaaaacttacactcgcatgaaaagaaaatctccatcagaacatagcaaagacatgggaatcactcgagaaaacacccaggcttcagtagaagaccccttgaatgacccttctttggtttgcatcaggtctgacttcaatgagatcgtctacaagtcttcccacctaacctcggaaaacttgagctcacagttgaacgaatctactagtgcaacagaagctgatcaagacccaacgacttctaaaagtacacctacgaactagactcggagatagacttggagataacacaaaaagcaaccttgagtgtaactttaaaaatttagtctttccttttgtatatgtaaggtttacgtagtgttaggtaaaaatatgaacaatgccacaacggtgctcaacatgctttttctaggattcattgttttctatttgtattataatacacgtgcctactgtatactcaacagtcctctagagattgcttttcacaattgcacaagctattactgactttacagcatagtggaagattagctgatgacccatgtatctgatgttcaaccatagtggtgccttgagacattaaactgtttttaactgtaccagaaatgaagtgtggaacagttacctaacctatttcacatgggcgttttgtatacaactattttgatctacacttgatgtctgagcagaaaacagaaatagctaaatgtgactcaggaagtatctcttggtttcttattcagcagcagagttggtgactttgacaactggactgcagagaaacatggtgatcaccttttaatttttattggctgtctgccaaatataaatacagatgcaaaattcagtaataggagatccataacccaacatgggtcactactcgtgaaatgtgactttctcccaccagtaattgaaatgaggtgatgatacctaattatgttttcctaattaaagataaattgctacttgattaaaaatcctgcccttcacctttgggaacaaaggttaagagacacagttgggcgaactctcaaatttattggcatttacacaaagtcccagacaaccaaggaactgaagttttcatcatatgagagcagcacatcccaccatttacaatattcgtatatctttctgcaaatatggctctggatagtgaaaattgaaaaacatatgccaaccctgagcaagggaactcctcaaaaaatcatgcagcggaaccttgtcaggtagagaagccgtgcatgaaagaatttgtttaatgtcttgttttgcgtatgtgttttttgtttttgttttttaagaactaaatattgcacattaataaataagaattatacagcaaaaaaaaaa

SEQ ID NO: 108320 - DNA, 295 bp, Homo sapiens
aagaatttttttaaaaaattagtagactgtgtgtgtgtgtgtgtgtgtgtgtgtgtgtgtgtgtgtagttttaggtttagagaaaaattgaatggaaaatatggagtattcccatatacccttcaccctgccatcatcaccccctgacccctgcactccccagttttcccttttatttacatcttgcattattagtggtacttttgttacagttgatgagccaatattaaaacactattgttggctaaagtgcatagtttacattaaggttcactcttagtgttgtatattctat

SEQ ID NO: 108321 - DNA, 437 bp, Homo sapiens
ttttttttgatggaggagtctcgctctgtcacccaggttggagtgcagtggcacaatctcggctcactgcaacctcgcctccctggttcaagagattttcctgcctcagccttctgagtagctgggactacaggcgcccaccaccatgcctggctaattttttttattttttgtagagatggggttttgccacattggccaggttggtcttaaactcctgacgtcaagtgatcgcctgcttcggcctcccaaactgctggggttacaggcgtcggccatccaccatgcccttccagagtatgtttttccttagttacatggacaatggaaaagggcaccaggctgaggtctatcttaaagttagtatgttcaagttagtatgtaaaagtggtacagccctggagaacttcagccgtaggagcctgggtctgtaaccc

SEQ ID NO: 108322 - DNA, 174 bp, Homo sapiens
tgctgggattacaggtatgagccactgtgcccggccttaaggcacataatttatttttaagggtttctttaaagagttcacatgttgtcactactgtgaataaaatagtttgtctattatttgtctattatgttttcttccttccttcctttcttttttttttttttttttttt

SEQ ID NO: 108323 - DNA, 344 bp, Homo sapiens
tgcacaaaaacaagaagaagtgagtggaaaggcacgctgggcagagggaacagcgagaacagatgctcagaggcaggaggtggggtgaggttttcagtggagggagcacagagcccagtgaggtttgtgagcccaggttggaaaggtcgtttgggcacagatctctaggaggtctttccggcctgcctgagaggaagggccagcttccgggaaatgcaactcgcacagtcacacaaggggagaacttaacagggcttcgtggttagtttcatgctctgcagtcactggcttgaaattcctttcttgttttttaaaatttttttcaattttatgtatttatttat

SEQ ID NO: 108324 - DNA, 710 bp, Homo sapiens
gccagcgacccagtgaccccattccccggggtgatcagccggtgaccccaatccctggggtgatcagccagtgaccccattctctggggtgatcagccagcgacctggtgaccccattccctggggtgatcagttggtgaccccattccctggggtgatcagccagcgacccggtgaccccattccctggggtgatcagccggtgaccccaatccctggggtgatcagccagtgaccccattctctggggtgatcagccagcgacccggtgaccccattccctggggtgatcagccagtgacccggtgacaggttggtgacactggatcacttccatcacggaaggggcagcattttgtcctcactggaatagacactctagatcgggatttgccttccctgtacgtcacgctcctgccaaaactagcgtccgtggactcacagaatgccgtacctactgtcacggtatgccacaccgcactgcttctgtctgaggaactcccttcacagcaaagaaagtatggtaacgagcccatgctcatggaattccccggtacgaccatgttgcccaccatcttgaagcagctggtttgataagatggtggaatggccttttgaagactccactacagcaccagctgggtggcgatgccttgcagggctgggccagagttctgcaggaggcagtatatgctctgaatcagaactga

SEQ ID NO: 108325 - DNA, 817 bp, Homo sapiens
ctgcaggaggcacgaggggatttttctccattattcactgtgagaactcggggaagctccagaaggtgagggagaggggacaacgacatggttcccgtggatctttaacttccagacttgcccgctctgcgcctccggcactctggtgatgacagctcaggtttccctgcctgtcactgctcgggcagaggctgctgcccagggcttctgctccggtaccttgtgaagctgcattctcctgccggtttctccagttctggggacagtggtttgctctgagacctcgcttcctttatggatccaaggagacttgctttttcagtctgttcagctttttacttgctaggatggaattgcaatttgcaagcttcttcgacaggaaactacaagttccacactttaattttatacatataaatatatacatgtgtacatatatctatgtaaaggggtattatatatatacatataagatgatgatatatataatgatgatatgtattactgagaacgtaaaatatcattacatagtgatagctggacacacaaggaattcacaactccccaaagaaaatacatctggatgacctgcctagcagtttccccatgagatagaggaatgtctacgtatttcattccctgttcctgccctgaaacaatttcaatcactgacaaatcattatcattcattaataatgtttactgagtgcccatatgtgaaagaaatccactctacattccacagatgcatttcctctccccacggggtttccattttaatgggaacaatgtagaatatatctgtcttccctttata

SEQ ID NO: 108326 - DNA, 265 bp, Homo sapiens
gaaaacagaggcacagacatttttaagtttgccatagtcacacagctattaagtagcagaattgaaacgaggctctaagtacgttaaatccagatcccacatccacaaccattattcactgatttctggatgagattacctggagggtctgtgaggataaggaaaagagcaaacataaccctggaaaacagcaacattcagagttcggaagaagtgaaggagcaaaccatggaggctaaaaagaagtatctggtgagtaggagga

SEQ ID NO: 108327 - DNA, 807 bp, Homo sapiens
ctctcattgactgaaatgtccttatgcagcacatgactgtatatggtagaatctccatggttatgtaaagctcctttgtaaatgcaaccttgataatatcttgataattattcagtaaaagtgtgccaaaaagtgcttttttgtttcataccttttggagaatggaggaaaaattttaagagtgacactttgtagcttaaatatattatgtgggcaaagttttttaaaggcattatcacttctgaatctgacctttcagatggatcattaaaagtgcggccgggcgccatggctcatgcctgtaatcccagcacttttggaggccaaggtgggcagatcacctgatgttgggagttcgagaccagcctgaccaacatggagaaaccgcgtctctactaaaaatacaaaattagccaggtgtggtagcacatacctgtaatcccagctactcgggaggctgaggcaggacaatcgcttgaacccggaaggcggaggttgcagtgagccgagatcgtgccattgcactccagcctgggcaagagcgaaactccgtctcaaaaaaaaaaaaaagtgcagaagactcatagagattgatatttttctttgatttgcagatagctttgcaattccaaagtcaatgatatgttagtgatgcctttgtaatatttgtcaatccccaggattttcctgttatcagatatctttaatgttacattttaagttcatttgaaactggccacaagataaaaggagctcataaataagtcatgaagctttgatttttctccatggaaacttttcctcaat

SEQ ID NO: 108328 - DNA, 511 bp, Homo sapiens
tgagatagagtctcgctctgttgcccaggctggagtgcagtggtgtgatctcggctcactacaatctctgcctcccggattcaagtgattctcgtgcctcagcctcccaggtaactgggatcacagacatgtgccaccacacccagctaatttttgtacttttagtagtgatgtggtttcaccatgttggccaggctggtcttgaactcctgacctcaggtgatccgcccactttggcctctcaaagtgctgggattacaggtgtgaggcaccacgctggacctctgtttgcaactttaaatgtggtatcatttaaatttccagtgttataataggtgatgacagctactatttactgagcatctaccatgtgccaggtgctttacatattcatcccatgaaattctcataacaacctataaagtattaacatcccagtttttcagatgagaaaactgaggtttagcacactaaaatgacatgcccaacatcatacaattaactggcagaa

SEQ ID NO: 108329 - DNA, 111 bp, Homo sapiens
tggtggcaaggggaaatgccccttgtcttgtccaccctcattcgtccccttccctccccagtaatggccactggttgccctaggaaccacccaggctcttcccagaggacc

SEQ ID NO: 108330 - DNA, 726 bp, Homo sapiens
aagggacacagagcaaagaaattgtttcattggttaaagtttgagtgtttgccttatttggactatccaagtgagaaatttatgacaatataaccaatgtcccagttagccaactgtgattggctaaactaagtttcattttcctcatgagggtgttacagctacatcagtctaatggcctaccaattattttaacacttgagaagcacaatttatcaaaactgattaaagattaaaagtcagaatagctttatatctaattgagaaattgaattcattataaagaatcttcaaacaaggaaaatgtcaagcccaaatggttttattagtgaattctgttaaacatttaaggggaaaatgataccaatctgaaacaaactcttgctttatgagactagcataactctgatatcaaaacctgataaacacattacaagaaaataaaattattgactaatattcctcatgaacacagacacaaaagtatttatgaaaatactcatttggtcatgatatagcatcctttgtatctaaaaccaaatgagatttatcccaggaatggtaggttgggtgaacgttcaaaaattgatcagtgaaatttggtatgttaacagaatatatgatcacctcaataaatgcaggaaaaaacatttgaaaaattcaacacccatgcattataaaaactcagcaaactaggaataaaagagaacttcatcaatctgataa

SEQ ID NO: 108331 - DNA, 704 bp, Homo sapiens
tcttagtgttttatttgcatattatatgttgtcactcattgtatttgaaaatagcattaataatggcaattttttaatgttccagtacctgaaaagttcagtggatggcccattgctcttttctcactgcatgttgttaaacatttttcttttgttagtgatttatagccattatttgcagagcctgtcaatttttgacaatttttgagccttgtagcttgctcatacctctacttcaaagagcaattggttttcccacttcagggtattgaagatatatcaagcaggcttagtttttaacccccttaagtttctgtttgaaattatttccagaaaagaatgtgcatgttggtttcttcttcatctactgcgttacaacttttcaagagtcttgagaataatcgtatggcctttgaaacaattgaattttgaaatgctttagcagaagttattttagaaaataacaatacatttttaatatttttctcattaccccaacctaatcaagttccaatttgtcttatggctttacctcttttgaagatataatctttggtatctaaatgtaaaatgaacatcttgggtgttacctagtaacaaacaggttaactaagaaccaagaaaatttttttctggaaatctagaaatggttaacttcagtttccttcatcttattcttgcttacctctgttaatttcgggccc

SEQ ID NO: 108332 - DNA, 584 bp, Homo sapiens
atacctgatggagaatgactgaatgtttgaattaaaagactcagggagaaggcaaagttgtgtttaagttgcaagttgaaaaaaacaatccattggctctgttagcagctattagagaggttggggcgggagcagagtctgtagcttaactttgcttttgttatgtcgatgctatgagcgtgggaatcatggaaactgtgaataaatggaagagagtctgtcagtgacctactgctgcatcttgggccagcccaggcatccgtgagtgttcagggagacctcgggagagttctcaggcagaaactagccactcacatgcttgtcatctgcggggttgacatggtgggctatttttatgctcagacacttgggagaaagggcaggctgtacccaaaggcagataagtgctggccagatgggcttgctgggcaccgtcgaactcatggtcaccgtcctgcccaggagctagaaatagaactagccccgggacaatccgtgaggtatcaggtgagtatggcccgatacatgtgactcagagacacaaggagtgagggtgtgtgctctgtctcaatgagagaagagag

SEQ ID NO: 108333 - DNA, 308 bp, Homo sapiens
tagtagagacaaggtttcaccatgttggccaggatggtcttgatctcctgacctcatgatctgcccccctcggcctcccaaagtgctgggattacaggcatgagctactgtgcctggcccatttggattttttttaaacaactaccaaagggactagtgtgaatattttctgtaagaaggtttcacaattgtatatgaatggatcaaacttctttttccccagagacataggttctgtcccttaaattctgacttaggaaactttaatatgttattattagggtgaaagttgtgaaagtcagatatta

SEQ ID NO: 108334 - DNA, 532 bp, Homo sapiens
ggctgcagtgtatcctcaggacagataggacagatagtgtatctttgggacagacggcaagatggggattccacccaggtctgtctgcagcgagttgatatgagagtttaaggaatttggaccagggctgctttgtttcagggttttgggcaatgacctaaacacctttatcagtgcctgggaatgctcaaggcccagcttgagttcaggcctgcagggaaaacctgcaactggccgggctgcagagtggtcagggcacggaaagccagaagctggggacacacctgctgtatgatccagccgttcgtctttacctgggagaaatggcaccacctggctgaacataacttcttacactcccatgagtcctcctggacaggtgctgtgacctcgtgcagccttggggaccctgacactcccacggacaggccaaggggtttgcctgggccctgtgggcacagagccccttgagatgggtttccctatgcagccccccaccccccaccggggacccatggcactgcagccctca

SEQ ID NO: 108335 - DNA, 486 bp, Homo sapiens
attttcttggtgtgttgccacgagataatcagtttggtacaaacctttttaattttctgccggcaaaggataagaatttagaaggcagatgaacaaattaataagtagatcttgatatgatggtggatagtctatttcttgggtttctgcatcggatgtgatgtgtgggtgaatgaatttaggacttttttgcctttttaaaaattcatgataggccaggtgcagtggctcatgcctgtaaatcacagtactttgggaggctgaggtgggtggattactagagctcaggagttgagaccatcatgggcaacaaggaaaaccccatctgtacaaaaatttagctggatatggtggtgcatacctgtactctcagctactcgggaggctgaggtaggagaatcacctgagtctggggtgtcaaggctgcagtgagccgtgatcatgtcactgtgctctagcctgggtgatggagtgagaccctgtctc

SEQ ID NO: 108336 - DNA, 287 bp, Homo sapiens
taataaaacgttgggaaggggatgaaattattttggaagttccagctatgtgcctgcccctgtgctgggcatttctcagttatatcctcatttaatcctcaacataaatttggagagtgagaaaattgaggtttgttgaattaacaactggatttcaaaaccagttttctctaactcaagcctttactatttggtactgctatattaaatcctgtggaatttaaggaaagtataaaccaggttttatagtagagtacttgaacattaattgaaaatggtctcctatc

SEQ ID NO: 108337 - DNA, 199 bp, Homo sapiens
cccttttctccctttggttagaaagtgtgtgtaggggttgcagcctggcactcagtgtcctccaaccctgggtctaaaggcactgggatggagttggaagagaataatacggcaggccgcccttgatgcaggttctgggaagcaaagaagctccactctacactgaccagcccaacgtgaagctctacactgaccttgc

SEQ ID NO: 108338 - DNA, 127 bp, Homo sapiens
gtgctgcagcagttcaccagagcacggaagtggcacatccgggactgagaactggcaaggccagagggcagaagcaagtcacacaagccagtggcccaaaatcacgtcatctacctccgttgcactg

SEQ ID NO: 108339 - DNA, 275 bp, Homo sapiens
gaagctccccctccagcaattttccctcagaacagtgaggacagtggctcatccctgcgacatttagatctctcatgttacagggcattctttcaaaaaaaaaaacaaaaacaaaaaaaacagaaatagtatacagtaggccaggcactgtggctcaggactgtaatctcagcactttgggaagtcaaggcaggaggatcacttgagaccaggagttcaaagctgcagtgaactgagtgcgccactgaactccacctgggcaacaaagcaagact

SEQ ID NO: 108340 - DNA, 656 bp, Homo sapiens
ctaaagtctgtgtcttctaactccaatatatggagcccttgtgggtctgtttctctcctatcatttctggtcatttttagtcgctttttttgcctcttcatgtgtcattatgtactggacacctaacaaataaagagaaacactatgttcatgggttagaagactgaatactgtgaatccatccttgcacattgacttacagaattaatgcaatccacatcaaaatcccaagcaagcggttttataaaaactgacaagctcattttaagtcatatggaaatgtaaagggcctgcaacagccaaaatatatttgaaaaagaacaaagctaaaaaactgttgcaacctgagttcaggccttttataaagctgtagtaatcaagacaatgtggcattgccaccaaaatacacaaataaatcaatgaaacagtactgggagtccagaaatagatccatacatccatagacaactgatttctgacaaaggcaaaaggcaattcagtaggaaaagcgtagtttttcaacaaatacaactgaaacaactggacaatcatgcccaaaaaagcctttcaatctgaacctcccactatatataaaatttaatcaactggtcatagatatacctgtctaaaactataaaacttctataacagaacat

SEQ ID NO: 108341 - DNA, 288 bp, Homo sapiens
cacaggcgtgcaccaccacacctggctaattttagtattttttgtagagatgggttttcaccacattgcccaggctggtcccaaactcctgggcccaagtaatgctcccatctctgcctcccaaagtgttgggattatagatgtgagccaccgtgccctgctcaccacccattctttgagtgaaaaacgcagcagtctgtcctgtcagctccctggtttggagtttacccacagcacctgccctgacctgacctccaggtatacaggtctcctgctacaaccgtccct

SEQ ID NO: 108342 - DNA, 444 bp, Homo sapiens
attacacattgggtgcagtctacactgcttgggtgatgggtgcaccaaaatctcagaaatcaccactaaagaacttatccatataaccgaacaccacctgttccccaaaaacctcttaaaataaagcaaaaaactgtcaacaatttctaagaggtcaaataggtttcaaccatattgtctttatgtgaggcttcagtctatagaacatatgcattaatcatagaaatatggaggtggcataaaaattaaacaatatagaatgtttaagtaaatgaacaaaaaatgaaatatataggctctgtatttacagtgctggggttcaaatctctgctatctgtatgaccttaagcaggctagttaaccttactttccttatccataaaatggggataaaagtggctcctaccctcacagagttgctgtgaggattaagctaatacatgt

SEQ ID NO: 108343 - DNA, 395 bp, Homo sapiens
ataaatgccaaaatattaatgcctttcacatccttttcattttgaatacattccgtattcaaagaattctttacatttcctttttaaaaatcaactgtctatgttcttgttaggaatggaggaagtatcccagtgtccccttaatttatttccatttatttatttattttttatatttatttatttattttttgaggcagagtctcgctgtgtctcccaggctggaatgcagtggcctgaatgaatggagaaagtatcccagtgtccccttaatttatttccattttatttatttatttatttatttatttatttatttattttttgagacacagtctcgctgtgtcgcccaggctggagcacagtggcctgatcttggctcactgctagctcca

SEQ ID NO: 108344 - DNA, 487 bp, Homo sapiens
actgcccacagccctgctgataaaagcaaagctcatctctgccgtgctgcagggaaccctatttccttcccctgcagctcagccacctcctcctctcaggtctgccagccatgaaacttctttacctgtttcttgccatccttctggccatagaagaaccagtgatatcagctctggtgaggacagtgggatgctgcctggatactgccaggcaaacgccacatccttcgatgcatgggtaacagtggaatttgtagggcctcttgcaaaaagaacgaacagccctacctctattgcagaaattgtcagtcctgctgcctccagtcctacatgaggataagcatttctggcaaagaggaaaataccgactggtcttatgagaagcagtggccaagactaccttgagtgctggtgattaccattctcaagctctctgggcgcagagacctgctgtcaacccccctcattaaaattcatgtgcctgcta

SEQ ID NO: 108345 - DNA, 802 bp, Homo sapiens
tctaattaaggcaggcctgaatgagtttgagtttgaattgggttaatatagggtcaaggaagattgcagattgggatgcggctggagctgaggcttgttgggcttatgtgaaatagggtcaggttattgataagaaacagggtctgtgtaatgtgagtgaatcctcttcgttccctaatattacaggtgatcatgtccttttcccttcatccctagctctgctaggtgggacattaattagcttcagttgattccaaagtaaggagtaggaagttgggggctaggaagacagaagggtgagaagtccaaaaaaggctctcccaaaaacttcggagctctcagttggaaccattgtctcagttctcttccctctcaaggtctcttctctcttttcctgggactgggtctggcattactcactcagctggctttcttctcttcttccctgtcctcctgttcctcctctgccttgtcttttctctccgcttgagggatactaacatctgcttaattgttgttcatatgccccaaagtagagtgttggatggatggacactgccggttgttgtgcaaagatggtgaagacagcatcatacgctgccgaaatcgtaaacggtgctgtgttcctagtcgttatttaacaatccaaccagtaacaattcatggaatccttggctggaccactcctcagatgtccacaacagctccaaaaatgaagacaaatataactaatagatagaaatgactttgtttcaggttgcttagggtccacatttcattaaaactcacaaatttgaaactg

SEQ ID NO: 108346 - DNA, 447 bp, Homo sapiens
actgcccacagccctgctgataaaagcaaagctcatctctgccgtgctgcagggaaccctatttccttcccctgcagctcagccacctcctcctctcaggtctgccagccatgaaacttctttacctgtttcttgccatccttctggccatagaagaaccagtgatatcaggcaaacgccacatccttcgatgcatgggtaacagtggaatttgtagggcctcttgcaaaaagaacgaacagccctacctctattgcagaaattgtcagtcctgctgcctccagtcctacatgaggataagcatttctggcaaagaggaaaataccgactggtcttatgagaagcagtggccaagactaccttgagtgctggtgattaccattctcaagctctctgggcgcagagacctgctgtcaacccccctcattaaaattcatgtgcctgcta

SEQ ID NO: 108347 - DNA, 524 bp, Homo sapiens
actgcccacagccctgctgataaaagcaaagctcatctctgccgtgctgcagggaaccctatttccttcccctgcagctcagccacctcctcctctcaggtctgccagccatgaaacttctttacctgtttcttgccatccttctggccatagaagaaccagtgatatcaggattgcagtaaggatgaaatgacataataatgcaaagctctggtgaggacagtgggatgctgcctggatactgccaggcaaacgccacatccttcgatgcatgggtaacagtggaatttgtagggcctcttgcaaaaagaacgaacagccctacctctattgcagaaattgtcagtcctgctgcctccagtcctacatgaggataagcatttctggcaaagaggaaaataccgactggtcttatgagaagcagtggccaagactaccttgagtgctggtgattaccattctcaagctctctgggcgcagagacctgctgtcaacccccctcattaaaattcatgtgcctgcta

SEQ ID NO: 108348 - DNA, 594 bp, Homo sapiens
actgcccacagccctgctgataaaagcaaagctcatctctgccgtgctgcagggaaccctatttccttcccctgcagctcagccacctcctcctctcaggtctgccagccatgaaacttctttacctgtttcttgccatccttctggccatagaagaaccagtgatatcaggtaacgtgaacctctctcgggggtctgggttcctggtcatgggcttcccgtctttcccttccctctcactgtgggcatcatctgaagcctttccttctctcctgcagcttcgggaggtttgcccaggatcatctcaagttaatatctctctctgattcttttttgccagagtggtgggatgatagatgtttggagcatctggtgcttgagggccagggtggtatcctggtgggagcttgggagaggtttgaggggcaaagcgtgggtgcaggttggggacttgttgaggacttcgggagactagagtggaagctggggtgagttgtgatgtggaggaaaaaccttgggattggagtgatagaaggaatattaggatgagctggaggtgaggagctgggcttccctgatggtttagggcagagt

SEQ ID NO: 108349 - DNA, 359 bp, Homo sapiens
actgcccacagccctgctgataaaagcaaagctcatctctgccgtgctgcagggaaccctatttccttcccctgcagctcagccacctcctcctctcaggtctgccagccatgaaacttctttacctgtttcttgccatccttctggccatagaagaaccagtgatatcagaaattgtcagtcctgctgcctccagtcctacatgaggataagcatttctggcaaagaggaaaataccgactggtcttatgagaagcagtggccaagactaccttgagtgctggtgattaccattctcaagctctctgggcgcagagacctgctgtcaacccccctcattaaaattcatgtgcctgcta

SEQ ID NO: 108350 - DNA, 329 bp, Homo sapiens
caatttgtctatgttagagatttttcctaaagaatttacaagtaaaaggatattttatccttgattgctttaaaatactctagtaaatgaacaaaaagtggtggggaggatagagtataactaagagcaacagaatgttgctcactgttgaaatggagtgataggtgcatggacacttcttataccattctctctgctttgtgtgtgtttgacattttccataataaaaaggtattaattccctcattcctgtctccccaagtgaagctttgagctaaaaaggtcaagtgttatatcaaataaaaattttaatataaattaaaaaaaaa

SEQ ID NO: 108351 - DNA, 415 bp, Homo sapiens
ctggagctcatagcccgttcctcagaatgttctctatcctttgagaattgagctctatgtcctttgaaaagacataatgagatgtctcatgttttgaaatatatgaaagccactcttagaaagcatgtctggttgataagatttttgattaggcttgagaagtagcatttgtttccaaagctgtgaagccattaagtcataagactaccttgtacactgaccttcagaagacaattctataagaagagaccccaaagtaccttgaacaacggcaacctcacaggaatcagtaaactccaggaacatcccaagttagccactttaatgtgatattactcatcagtgtggatggatcctatgtgtttgttaaaaatctggggccaggcatggtggctcatgcctgtaatcccaggac

SEQ ID NO: 108352 - DNA, 215 bp, Homo sapiens
tgagcaggtgtgagcaggtgtgtgcatgtgagccttcatgagcgtgtgtgtgagcgtgtatgcatatgcatttgagtgggcgagtgtgtgagctgtgtgagcgtgtgtgtgagcagacatgcatatgagtgggagtgtgcgtgagagcaggtgtgagcgagtgtgtgtgagcaggcatatgcatatgagtgggtgtgtgcatgagagcaggtgtg

SEQ ID NO: 108353 - DNA, 547 bp, Homo sapiens
gaacatcttaaatactacggacaaatctaacaatgttaatcactcaccagctcatgcccagtggtcatcaccagacccttaaaatcagttgctttctaggagtcctaggtcacttcctgctggaaatggcaacaattttcaccagcattagatgcttgtttataagaaaactgtggattttctgaaataaatgtgaggtcgatcaatgctataacaaagtgcttttcccgtggttaagctgaggttatgagtgctttagtgtggctccattgaccagcactaacttcatgaaaatatttagaaaaagtttttgaaaacatatttttttaaggagaagaaaacagatttggcataagttatatgacagccacagtgaggctttcttatatatgaaagacattgacaatcagtcccatggggtttatgtaatttgagaatatagctttaaaaatcatattacaggcagcagtacttaagattaatacagaggccatttacctttttattacgtgttttattagcacttagcagcttgacttatgaaaga

SEQ ID NO: 108354 - DNA, 479 bp, Homo sapiens
tgagaccagcctgttccaaactgcgaaaccctgtttccactaaaaatacaaaaattagccaggtatggtggcacatgcctgtaatcccagctacaagagaggctgaggcaggagaatcgtttgaacccgggaggcggaggttacagtgagcggagatcgtgccattgcactcagcctgggcaacaagagagaaactctgcctcactttaaaaaaaaaaaaaaaaaaaaataagagggagatactaaaaatgcagaagagaaaggagataagcaactagcatgtgggctctgagaaagcgggggccattggggtctagagcaaaagacaaatgattagctttagagaggaagaagaacatctctttaattgaaaaaaaccaagaaaggatggaatgggttggaggctgcttagcagatgtggtggtaggaaaccaaaggtgttcctaagtgttgtgaagtaggaaggactgtacattaaa

SEQ ID NO: 108355 - DNA, 282 bp, Homo sapiens
aattcatggggtagtgtagaggcctttctatagggatgcaccttttggatcacctggaggggagattcatttctcttgtttgaagttttctgtttgaaaatttaaaacagaccaggcgcaatggctcatgcttgtaatcccagcaatttgggaggccgaggcgggcggatcacttgaggtcaggaattcgagaccagcctggccaacatggcaaaaccctgtctctactaaaaatacaataaatagccgggcatggtggtgcatgcctgtagtcccagctac

SEQ ID NO: 108356 - DNA, 337 bp, Homo sapiens
ctgtgtgtgtgtctgaaattgtccatttaaaaaatgaatcagtgttttacagaaatcagaagtacttgttttcacaaatcagtaccctttcttgaaatctcatctcaaaatatcaacttaaattcgaatttaaacttgttttattactaaccaaccacttcagctgagccctgcggtgtatttctgaaactttaatttgtgataagatttgataaagggtgaaaaaatacaaaggtcctttaaggtcttgctctcttacaagtcctttggggaagatctaactggtaaggctgtgcttcctttgtgttaatgacaagtgtgtcttcgtttcgtagct

SEQ ID NO: 108357 - DNA, 566 bp, Homo sapiens
aagaagggaacgtggcaaataaagagacaaggaatcaggaggctattgtaatcactcaggtgaaaaggtggtataaactaaggtaacagccatggaaacagaatgatcacatcagttaattgttcaacttacatacaaaccacaaatccaatcaactaatatttcaaacgtgcaaaatatgtttggcaggggtttattacgaatgtttctataaattatgtctctatacacatatctatacatatatatacatacacacctatatgcctatatatatattccatagttttgtgaaagtgatggtataacaacaaaaaatatattctgtcatatccactgatcacaatagactttgtgcctctggttattttgcaaatcatttaacaattagttttcatttaaaggaagtttataagttaaagtaaacataagacaaatttattcttgaatgttaagccctcagcatcgaggaccatgaaaatactgattaattagtgtgacgaaggaaaacattgaattaagtcaactagttattcagttaaatttattttgaagaaaccgcagaa

SEQ ID NO: 108358 - DNA, 416 bp, Homo sapiens
gtttgttctctcctcgccctgcaaaagattcccctttacccatgagtgctcattgcttattagctgtggtatttcactgggcaatctctgggtatagtgaacttacgggaataataataaatatcacagtgctaaaatggttaatattctataagcaacaagggaaattaaccctgaagtgcacagtaccttaagaaatgataatggcaaattctaaaatgaacaatatcatgggattaaaaatcaacatggagacgccacagtaagatgcaacttaacgttagatccatgcaacttgcaggtaaaaacaaaaccgtttattaattcattcaaattgtatttaccaagtgagaaagatagagatgttaactatttaaggtctagttaacataaactaaaaagctactggacttcta

SEQ ID NO: 108359 - DNA, 628 bp, Homo sapiens
tgaaaatggagctcagaacattttccatgttagaagccgtgtagggcagaggggatagtaacactcttttctgtgtggttgaactaattctactcaatcaattgctttattcaaatagtcagtatgaataaacaaatatttatttagcagctatttagttggccctcagcaaatatttattgagggccgactctatgccaacattattagatctaataattagatctaataacaacattattagaaaaccctacctagtcttccactggcacacacagaagagaataattaggaagtgaaagagaagtcgtaaactgaagaatgaagccatctgatgatgacatcatgctatttgcacagtgccatgttttcccaggctcattgccttgagaaaatgcttcagctaccctttccttatggagatttaagtcctaattcaagacattaaggaattaggaattcaaatcccatatttctccatccttgttcatgttatcgttagcttttgaaaaggaagaatgattggccattttagtcattgtgtcagtgaaaactctatggaattggtgtttttttaaaaaatatatgacaccctcatttttaagatatacagcttttatgcattaaa

SEQ ID NO: 108360 - DNA, 560 bp, Homo sapiens
gaaacatggaggcttagtttcccaccccctccaaaagaagcactttacttatgtactcacatattttcggtttctgtggctgtgttactgggtagctgtccagttgagacgagatgtttacttaagccacacccagcagagtcagcttttaatgtgttgggggcactattttaatcctgtgctgatttgtaaccatcatctatgggatgcctttgagttgtaaaaagagggaaaatactagattcacaggttgcagcttactatgtttttgaatatttgagttgctgtattaatagcacagaagagcagtatttaagttatgcagcatttatctatggcagagagagatagagaatatgtgtatggttccattacaagtgtaatgcaagtattctgatcatatagctaaaaatgctgctggtatattattttagttagtgttgtgggtagtaaattggagtatgacattcagagttcagattttcttatttgagaaaatatttgtccaaacattttaaatacttaatttttctgtgcttttaaaagatttgcaaaggatt

SEQ ID NO: 108361 - DNA, 517 bp, Homo sapiens
gctgtgcaggatttagggcaaataaaaggctagaaaaggagatgttaggtaaattctcactggtctaacagaggcagactgactacagtgagtccaggagaactttctgtaatgatatgaaatgccccaaatgctctacctttgtgtggtgcaatacacgtggctacagagcacttgaaatgaatgtataacagctagtgccactggagaaactgaagttttcattttacttaattttcttttttaagagatgggttctcactctgtcacccagtctggagtgtggtggcacagtccatagctgactagagcctcaaactcctgggctcaagcaatcctcccacctcagcctcccaagcaggtagaactacaggcatgccatcctatgcccaactattttaattcttttgtgaagacagggtttttacaaaaccctgttgctcaggctggtctttaactgatgcctcaagtgatttcccacctcagcctcccaaagtattgagactacaggtgtgag

SEQ ID NO: 108362 - DNA, 93 bp, Homo sapiens
ttggctggaaatacatatctttttaagacaactgtttgtttatttcccctgtgggaccccatgccactctcacccctcaccaggtagacttct

SEQ ID NO: 108363 - DNA, 378 bp, Homo sapiens
tgacctcaggcaggccctacacctctctggaccttggtttccttgtctgtaaaatggaggaaggctagaatggctggtaaatgctcagctctgtgagccatctgaacctgctttgtttcaccagtgaggaatcacccataatggggggagactagagccactctaaacctaaagcagggttagatggtacatggagctgagcatttgctattttaactttgtttactttcatggatatatttcatgtgtatattttcacatatatgtgtatatgtatgtgtctgagcgtgtatgtgcatggtatttgactagtacatcagaccctgatttcacaaatatggctaaagacgaggctaaaacacacacttaaattttaaa

SEQ ID NO: 108364 - DNA, 303 bp, Homo sapiens
ccaagtctgctccagggccagctgagcacacagtcaggtggcctgctcttctcttggccacctgctgaacctttatctactacctaaacctttcatagacccgcacaaaaggcagactgcagtgtggttaagagcgaaggtttttcaagatctttatctgtgttcctgttcaaactccagctctgccagtgcctctctgtgcctctgttccccatcagtgagaggcagtggcgccttccctgcagggttactaaaggtttagaggtcacatggggagagcaggatagtgtggagcgtgaaggt

SEQ ID NO: 108365 - DNA, 386 bp, Homo sapiens
atgaaaattaaatatatagtaatttttttattctacaaaaacattcattataagatttctgtaaatgataaatttctcccttgcacataagatttttgattaaatatagaaatactctattcttctccttttataacttttggttatatatcataaggctaaatatcttccctgctgaattcacttccccaaataaaatttattgtggattaaaggaaataccagacaagagtagaagattctgtgcaaaaatgaaaatgtaattttttttttaattcttaaggaacggcagtggagtgtccttggcttgagcatttttttttagaaggactgcaaatctgattttagagagctgatagtatcagaaagtagaactgtgaataaga

SEQ ID NO: 108366 - DNA, 803 bp, Homo sapiens
ggtctcagttttacaggaggaatagaaaatctaccacttgccatctggaagatcaaagtatttccaaatagaatttaagtcaataccacacaaattctaattccctagaagcagcagttttaattttgatagtctctaaaagcaataacatttggtagtttctgagtaaattttagactctcaagggtttagttttagcagtttaataaaatgtgaattttgtctgctgagaagtgaactttgtggtaagacttggcgagtctgaggtctgtggtactccccctttggccttcagtgggccatgctcattcccttctttcttctttctgggcatatttgctgcccagattctgcagtaaggagagagtggctgccttggggtgattattaggtgaatactcaggtctggggttgggagggacctcgtaggaaccaccaaaatcgagcctttaaggaactgccgccttgtagttgcttaactgtacaggatttcccccgcaacggtccccttcctaacaggctgctctacaaagccaggcttggactcataagaactcagaggtggaccgttggaggccctgcatgccttcctctgtcacgtgctgcccctggcagctcggtgcttcttgccatgggcctacctggatccgccactcagcagtgaacagccgaggaaggtagtggacgtcgaacctggcccgtgggctctaccatggcatggtgatgaaggcatgaactttggcccacttggcctgtcctggcaccagccaccccctactcacaagttatttcctctgagaagc

SEQ ID NO: 108367 - DNA, 439 bp, Homo sapiens
catttctatctaagcaagaaccattttgccttttaaaaactaaactagtagtctattaacgatcaagtccagaagggcgtgcccaatctttctaaagacatacagagaagatgatgcaaatgtaacagaactgtgttaatgtgctctgctcagatttgtggggcccagtagataacacacaagcactggagcctttacccactacccttgagcccaagctctgtccctaaagactgtatgcttgtgggtaggcatttaacatctctgaatttttttcttatctgtacaatttaagacagcagtatttcttcatatacgtgtatctggggataagaaaaaaatgtgtattgaaccctatgatagacacttggtaaacgatggaaatgtaccaggtatatatccagcatgtatatgcatacactccagtgagtggtctttc

SEQ ID NO: 108368 - DNA, 467 bp, Homo sapiens
ttgaaatcttccagcaacatcaaaagtcagaatgtctctagaaaccaaggattaaatgaaaaggaaaagatgacttgtcctcaaatccaaacactatttatgcctgcatgtggactcttttgtacattttagctcatatctaatgcaattttaacaggcctgtttatctcattttctagctcagtgaagattagaagggaggaatagactacacagaccaaatgacagcagtgaaaagtgatagcagtaggaaataataaccaatatcatggtggtgggcagaaatcccaaaattacctcctcctctccacacacacatgcacagccaatccaaccagtataatactatagaggccctaaacaataacttcaatatagaaatcaaagtgcacagtaatttgggaatacttaatacaaagcagctccaaatgtgtctcacatccttgagaatatcaccatagtataga

SEQ ID NO: 108369 - DNA, 511 bp, Homo sapiens
attaatgtatcaaacctgtgtactgatgaagatattttaaatagtcttttttttgtggagggcagagaattgtgtaacttttatgtatcccactgccttttttattgtgtattgtgaacacaccacagcagaatttaaatagttaaatatttgttgcctcattaaattgtggcttcctaacttaacttcagattgcagaggactagaaaagtaggcatttaatatattattttattttacgagttttcttgatacataattggttttggatatatttcctcctaagtacagagctagcaccataaattacaagcagtaaccagatctttttatatgcctcactttatattgcttaggcaaccttctgtatgctgttttctctagtcctctccatagcagttaaacctgaactctcatcagagaagtaaaaatttcctgtaaaatgagttgttaaaagctatatgtttgaagtgtaagagcaggcccttctaatgtttaggagttagcttgt

SEQ ID NO: 108370 - DNA, 309 bp, Homo sapiens
ggtcaatatagcaagaccccatctctacaaaaaatttaaaaacttagtcaggcatggtggcacacacctgtactcccagttgctctggaggctgagacaggaggattgtttgagtccaggagttcgaggctgcagtgagctgtgatcataccactacactccagcctggaagaaatagtgagaccacatttgaaaaaaagaaaaagttatgacccaccacattgcagcattggctcctgcagaaagagactggaaactgcctaaatgttcatcgatagttaagtaatggtacagccatatcatggaatg

SEQ ID NO: 108371 - DNA, 204 bp, Homo sapiens
gtagtttgcctaagatccacagtagagtctgactccagctcacctgtgctgtgctgcctccatttatcaccaaattcctttctcttctgttcccaagtcatttccacattcatgctttatttccctctgccttagttcaggacaccattctctcttcagtgcaatactcttctaactggttttcctgacatgcattgcctcttg

SEQ ID NO: 108372 - DNA, 540 bp, Homo sapiens
acctgatgttatacaaaccttagacactgaaatgcttaaggattaaagaaaacactaatgtctaaaatgccactcaaagcagaataaatctgcagctggaaaatctgacctttagccctgaatctgcctctaataagctgtgtgatctggggctagttagtaagtcactctgaatcccaatttctttatcagcatttggacttcctacttggggtgcctatctctcaataggcagaaagtgaggtagaatgagattaaggatgctgggcacagtggctcacgtctgtaatcccagcacttttggaggcaagggtgggtagattgtttgagaccagcctgggtgacatggcaaaaccctgtctctacaaaaaatacaaaaattagccaggcatggtggtgcaggcctgtagtgccagctacttgggaggctgaggagggaggatcacttgagcccaggagataaaggttgcagtgagctgagattgcactgctgaattccagtctgggcagcagagggaaaccctgtctcaaaaaaaaaaa

SEQ ID NO: 108373 - DNA, 452 bp, Homo sapiens
ggatagagggcactccatctagaaggagtcttagagttcatctgggccaaatcccaggccacgaggttaagtgagcagtccaaagcacacagacgtctagtgacagggcataccttggaccctggactcctgagtcctaagccctctctttacttgctcttccttgtattttttgacctgctccgtttctgtcctgggccggttcacccctccttaggcaacctggtggttccctgctcccaggaagtcaccatattgatgccaaacttagtgcggacacctgatgggcatagcacactacaacccagaactcctgggcttgaacgatcctcctgcctcagcttcccgagtagccggaactacaggcacgcaccaccactccctgcatacttgtagttttttctattacctttaaaaaaagtttagatatctgataatcataacttaagcat

SEQ ID NO: 108374 - DNA, 403 bp, Homo sapiens
tggacatgtgactttaactctctgtgcctccatttcctcatttgtaccatatgactaaagatataccaatatatggctaactaaatgagataaaatataagtaagctgcccagtccataataggtaatatgtaagtgctgttgctgtgttgtagctgttgttgttgacagaaaaaaaaattatttcggcagagacatttttatctaagagatggcgtatttgagctagtcactgatagatgaaaaccatttcaaaagatggaagttgggaggttgaagaagtgcaggatggcattccaagtgatgggggcaatggcatggaggtaggaaagcataaggtatattcaggctataaataatagttagatttggctggatcctggatttgagaagccaggaaatga

SEQ ID NO: 108375 - DNA, 193 bp, Homo sapiens
agccccttttctctcttctacagatcaaaataagcaaactttaatggtagggaattattgtttattttgttgaaatctagttctgagttttcctacttgaaacgtgttttccccaggacactgacctatcctttaattgtttggtgcgaggcatgttagggggaggggcgttacttgtttattggaacagcgc

SEQ ID NO: 108376 - DNA, 596 bp, Homo sapiens
gatcccacagctctgtaacttaataaaatagagcctggatatgggagtcgtcgcttctacttgttgagaagggaactccctttggcaagttacggtagcttaaggtttaacaagagaaaagaactgttaaataatctttaactatgtaaagttgtgtcctggagcctgaggtagaaattcctgtgggctgatagccagaacaattcatttacttcatacaaccccttgtagcttaaactcacaaccctctctgggccccatcgattggcgtctatttctgatcatccagaaaatgagaacattgtattttaggagaggcaccagggtggtggtgaagtatctgggcacaagaccagtggaagatatggttggaaaggcaggtaaaagatttgattaaggttttaggtatattttatcgaatggctgtaccattgtttagcttacaatcatttgtctctttacctttgattgagtctgtcctatttagaataaatgtacctacagttggagaaaaccagaaatagaaagattctttgtgtacacatttcatatttttgtttgtcctttcaacacacacacacacacacacacacaca

SEQ ID NO: 108377 - DNA, 862 bp, Homo sapiens
aatctcttcgttctgtgcacacgaattcttccttatttcacagacctagcttcagtgctggctctgccataagccttctctgatatgctcaggtggaaataataccacttatttcctataacatctaaaatgttgtatctgtatataaaggtgtaattctatcacccagctcacaatggctctgctctactacatttctaattaatttttaaagtttccagatagggcatcataataaaaagtgaactggtaggtttatatatttttacttgatgcatctcagaatacaccagtatactgagaagatgaccagataggactcatagacctaaattctagttccacatctctgttaaagcttagataactcaagatctcttagccttgtttcctctataaaagaaaaaagttcagccagatgtgatggctcatgccttttagcccagcactttgggaggccaagatgggaggactactttaggccaggaattcaataccagcctcgatgacataaggagaccccatctctacaaaaaataattttaaaaaattagctggctgtgttagcacacatctttggttccagctactcaggaggttgaggctggacaatcacttgagcctgggaggtcaaggctgcagtgagccatgattgtgccactgcactccagcctggttgaccgagtgagaccatacctcaaaaaaaagaaaaaagacattgtatgagatagtttcaaatgtaactttgaaattacaaacaaagcctacctatataaatgctttagaatgggaggcagcaagattcaaaggaccacgttattgttggctttgctgaccacacggtgtttgttgcaactaccta

SEQ ID NO: 108378 - DNA, 137 bp, Homo sapiens
gtctccatctcctgacctcgtgatctccccacctcggcctcccaaagtgctgggattacaggtgtgagccaccgtgcccggccaagaaggacatatcttatttaatgatctccagcagtgaactccttattctaaac

SEQ ID NO: 108379 - DNA, 637 bp, Homo sapiens
ttgcaaagggttgtaaaactttattgtgattattcttgctttaagctgaaacatccctaatctttctttagagattgtggcatagcatgttagtttcttttccatatccaattgttttctgtaatgaatacagaaatacgggcactattttgtaactttaaatagacatcatctcaagtctacaagaattatccaaaatggtatttaatgacatttctaggtcttcagacactattaatgcagattgtagcctctaggtcctgaagattttactagatactggttactgaaactgagctttcttgaattctttttccttccactgtggtttcccgcatttcaacatatcacctatttttgtcctcaaaggttacttaaatgttttccacagaattaaattaaatatgaatcatccctcctctgatttttgaaatgaccctttgcttcctatgataatgattcttctggtccgttttgtagttatatgttagagtttgtaaatagtcacacattttgcaactgcatgtaattttcttattattttttcctcttcctctaaaactgctgttatttcttttaactttttgtgggaaaaattaaacccatctttcactttgttgatatgcttatttataat

SEQ ID NO: 108380 - DNA, 383 bp, Homo sapiens
agtttcccaaaatgtttataactacgattcaatagtcaggtgaagccttttagttcttcttttgagaggtgcttaagatcatcttttcatagcaatgagaatcaaagaagtctgggagagaaaaaattgccattttacacagtgctatggggagctgcagacattgattctgaactaggatgttttaagagtaggcttgtgaacatggtcttattctaggcattgacgaacttctgccctagacaaaggctatttctttaccctctgaacatcgataaaagttttgaaaaattgaaaagaacctagcatctgacagtgatgaccccagtggtcagaagatacatgcatgtaaagccatcagcccaattagtggacataaccct

SEQ ID NO: 108381 - DNA, 652 bp, Homo sapiens
cagttctgcctatatagaaacccacagttatctgagggaatgctctctgatactcaataaaagccatactcatcaatatccagatataaggcccaccatatgcagacctgactacaaaaacataccctagtgttttaactacggagcaaagccctgaaggatatgcagtctgtccaaaaataaaatgagaagtacaactacccaagcccctgtaacaagccaactaaaggtggaccctagtgcagacccagcagccttgtcaccaagctacaccccctctccactacaaattcagagggcatctcatcaccctaagggcccaacaaaagatctttaccttctaaaatcagtttataaaaacttgaaggccaggcgtggtggctcacacctgtaatcccagcactttgggaggccgaggcggatggatcacgaggtcaggagatcgagaccatcctggctaacacggtgaaaccctgtctctaataaaaatttttaaaaaattagccgggtgtggtggtgggcgcctgtagtcccagctactcgggaggctgaggcaggagaatggcgtgaacccgggaggtggaggttgcagtgagctgagactgcaccactgcactgcagcctgggcaacagagtgagactctctcaaaaa

SEQ ID NO: 108382 - DNA, 395 bp, Homo sapiens
ttcttcaatctataaacttttaaccatggcttaagtcatccattcctctaaatcagtcctgcctttcttgagactccacattcccagcatcctgtcctcccattacactgagctctcgcgtctgcatccacccacctgcttctgctcactctcctacagtgcccacatccttttcacctaggcagcctgtcctgacacaccaaactagacaagcagctgcttccttgtggaagtaggcctactatgcttgcaccaatctgagggtttctctgaccaaaagaaaaaaaaaaaagccctccaatagaagaatctgtgattaatgggtacaagcacagttcactttgcatgccaatggccaatgagacggtgggtttttcagacccagtggcacaatg

SEQ ID NO: 108383 - DNA, 371 bp, Homo sapiens
gttatggtagcctaggaaactaatatgagccttactaaacactttaaaatatggattcaaagaagtactgacctagctgcaattcaacacatgtgaaggaaagattcatctggcaacagtggatggatgtccttagtagggacccagataatcttccagctcagagtaactggggctcaagccagtgtgaaacaaatctgaaccctacaaatgaccttgggaagttggatcttgactacacacagaacaactggccaggcatttcacccttgctatgatctactatgtcaggtaaaacagtggcatcatttccacaggatcctgttgaggaaagctctgccagtcagagaaggggctggcacaaaggacta

SEQ ID NO: 108384 - DNA, 455 bp, Homo sapiens
ccaaccatccacccagaacaagtttaattatccacataaaaaatattcagggattatgagcatcccatattttcaacatcatcctgtgaagaaactagctggattaaggctatcacaaaacaataaactggcattgctgtatgtcagtttttgccaacttgacctgtggattcaatgcaatcccaatcaaaacccagcaaagtattttgtggatcctgacaaactggttctaaagtttacatggaaaggcaaaagacccagaatagctggcacaatattgaaagagaaaaaggtcagaagactgatattacccaactttaagactcactataaagctacagtaattaagatagggtggtaatggtgaaaaaatagacataatcactggaaacaaatagggagcccagaaatagccccacacaaatatagtcaactgatctttgacaaggaagcaa

SEQ ID NO: 108385 - DNA, 396 bp, Homo sapiens
gacgtttaagatgaaacttaagagcaggtcgactgggatagccagcccaggcttgatggcaagagctcacagggaatgttccaggggcagcagaagaacccctgtgctgagcatggtgaggagggggaagcgcagggagagaaaaggtcagtgaggctgtcaagggctacactgatcgggcctgaggaaccaaggtgagagctggattttattctgagtgcaacgaggatgtccttggaggggtgtgaagcaaggtgaaaggtcatgtccaccttgtagcctcaggaagtctcccctcaccccacttccacctccattcttctctagggggccacgactgggtttgaaactctaaaccctagttatgaagttgtaaatataagtaaaaaagaaaat

SEQ ID NO: 108386 - DNA, 782 bp, Homo sapiens
tgaaagactctttttctgagtagcatgacatttctgcaggcaaaggaagtgagtatagactcccaattctcttcttttccaggatgtacactagaatctgaagcatcctcttcaccctcgctccccttcaagtttccgaagccactaagttggcaatgaaattattttgtttatgcaaggagcaaaatcacatgtcaagctgataaataatgtatgaaatatcatttagttaatttcaaaggcgccaagactatgacaccattgcatccattcagatgaaaccttggttctccctgtgttaggggagagatctaaatgaagtatgtcctttatatttagatgactagatctgtggccctcctggcttgtttttcagggcccttaatactgatcagagaaatttgctatcacaaaatagctttcaaaacagaacagagctttttcttattgttttcattccaaattacctgaacctcagctttgtctgatcttttcaggagcaagaggttcacacattgcattcacagtatgcctacaaagagctactgagttgtttttaatgcattttatgctacagccaccagtggccaaattataagccagaattctgttagtagcatggcaaaaatctctcattgcaatgtaatttgttatgagtagataatacaataaaactgaagtagttcttcagtgttgaaattactgagtttcttttaaagtgtgtgtgcacatgtgcatgtactaaggttatggctagatgtgatgtgctaacatcccaaaaa

SEQ ID NO: 108387 - DNA, 396 bp, Homo sapiens
tagtaccctcctttgagaacacaattaaaaaaaaatcctttccttattgtcaaagtggcagtgttcttaaaccagatcatgagattgcccctgctcaaaatctagagtagtttcccatcgcaggttttttttttctttcaataatttcagcttttattttagattcagggagtacatgtgcaggtttgttacatgggtttactccatgatgctgagatttggggtacaattgattccatcacccaggtagtgagcattgttctcaatagtttttcaaacctttccccgctcctttcctccctcttctagtagtccccagtggctattgttgccatctttatgtctattgtacctactgttcagctctcacttgtaaatgagaacatacggtatttg

SEQ ID NO: 108388 - DNA, 256 bp, Homo sapiens
caacaaagcatggacttacgtagatcctgacaaaaaacaaatgcattaggctttgtaggtcacattaacgactgttcaatgaaatttgcacaaccattatatttcacaggtatccctgcactcacaatactgaagtcctccatctatagttggttggatgctggtgacacattccgaagaatgagtcagtgagatatgtccagactaacaaggtgttgctgtattactgaggcctcccccagatggtgattccttg

SEQ ID NO: 108389 - DNA, 447 bp, Homo sapiens
ataattcttattatacctgctgctctactactttacttggttttagtcgatttctgttggttgcaaccaagtgtgcctcaagccagtactctaatagagctctcctctatgttcagctcttctttatatatactcattctcgctggctaatctcatctgaacaaaagccttcattatacctaaatgttcatcacatacatgtgctactgagcaccatatcctagctttgcaaatacctactcaatatcttcacttggatatcccatagagccatcagtccaaacatcattcctcaaataatttgtttttatcctccttataattgttagcagcatgaacatcacccaaattaggactctgaacatcccttctctcttctttctcccacaccatctcaaataatttgccaagggctatgacatttgttttattcatagttgttaaatc

SEQ ID NO: 108390 - DNA, 320 bp, Homo sapiens
tctaactgtaatgcatacacacagtattcctaacgtatttgtagcttcatgtcattaaggaattttgcatattccttaaaaatggaagaaaaaggcattagaaaggtgttaccttacgctctgtcttgaactaactaaactatttaagtaacaaaaatatttatgtgttaggaggagcatgccagagactcatatctggataatttttctttagcttgtcattttttcttatttgccatgagagtatgatgacaataaaaaattcccaaccctggtcactaaagtaattaaagactatattctaactgacaactgtattt

SEQ ID NO: 108391 - DNA, 1163 bp, Homo sapiens
cttcccttttttctccctctctattcagctgtctccatcccccttttccgcctctctctctgcctttttgggaggcagccctgcagacatggttaaaactcgggcccagcctgactgtggttcccagctccagccctagtcagcttaacttctttgcattatggggcagaagtgggagcttctcccttccttccatcttcctctcttagatcagctggttaagagtccagcctgggtttggctcccagctccagcactagtcaacttaacttctttgcattgttgggcagaagagggggcgtctcctttccttccttcttcctctcttagaccagcttcccttcccttctggggctgccacagcacccggtcagcagaatccttgcctaattcctcttccttctccaaaccacagggtccccctcatcagaaagaagtccttgaggcgcaccctgtccgagcgtggcctgctgaaggacttcctgaagaagcacaacctcaacccagccagaaagtacttcccccagtggaaggctcccaccctggtagatgaacagcccctggagaactacctggatatggagtacttcggcactatcggcatcggaactcctgcccaggatttcactgtcctctttgacaccggctcctccaacctgtgggtgccctcagtctactgctccagtcttgcctgcaccaaccacaaccgcttcaaccctgaggattcttccacctaccagtccaccagcgagacagtctccatcacctacggcaccggcagcatgacaggcatcctcggatacgacactgtccaggttggaggcatctctgacaccaatcagatcttcggcctgagcgagacggaacctggctccttcctgtattatgctcccttcgatggcatcctggggctggcctaccccagcatttcctcctccggggccacacccgtttttgacaacatctggaaccagggcctggtttctcaggacctcttctctgtctacctcagcgccgatgaccagagtggcagcgtggtgatctttggtggcattgactcttcttactacactggaagtctgaactgggtgcctgttaccgtcgagggttactggcagatcaccgtggacagcatcaccagtgtggagagggggacctctaga

SEQ ID NO: 108392 - DNA, 836 bp, Homo sapiens
cttctccctcgagttgggacccgggaagaaccatgaagtggctgctgctgctgggtctggtggcactctctgagtgcatcatgtacaaggtccccctcatcagaaagaagtccttgaggcgcaccctgtccgagcgtggcctgctgaaggacttcctgaagaagcacaacctcaacccagccagaaagtacttcccccagtggaaggctcccaccctggtagatgaacagcccctggagaactacctggatatggagtacttcggcactatcggcatcggaactcctgcccaggatttcactgtcctctttgacaccggctcctccaacctgtgggtgccctcagtctactgctccagtcttgcctgcaccaaccacaaccgcttcaaccctgaggattcttccacctaccagtccaccagcgagacagtctccatcacctacggcaccggcagcatgacaggcatcctcggatacgacactgtccaggttggaggcatctctgacaccaatcagatcttcggcctgagcgagacggaacctggctccttcctgtattatgctcccttcgatggcatcctggggctggcctaccccagcatttcctcctccggggccacacccgtttttgacaacatctggaaccagggcctggtttctcaggacctcttctctgtctacctcagcgccgatgaccagagtggcagcgtggtgatctttggtggcattgactcttcttactacactggaagtctgaactgggtgcctgttaccgtcgagggttactggcagatcaccgtggacagcatcaccagtgtggagagggggacctctaga

SEQ ID NO: 108393 - DNA, 245 bp, Homo sapiens
  misc_feature (11)..(11): n is a, c, g, or t
ggccggctagncagatcccagatccttaccttaatcacatctgcagagtcccttttgccatggaaggtggtgtattcacaggttccgtggattagtatgtggacgtctttgagggattattgttcagcccaccacaatggtcaagggctgttggggcctctctgagagtcctctgatgtctgcaagctctgggtcctttctgtcctgcaagttctccctcctttcacgttggatcagaaggcctg

SEQ ID NO: 108394 - DNA, 289 bp, Homo sapiens
agaggatccctgttgctaggctggagtgcagagtgagacaaagggagtcaaggacgcctcccagaggaggtggcttttcagccaagccataacgatgcctaggagtttagatataacggcaggtggatggaagatgtggcatgtgaaagagcatgacctgacctgggctgggcacgctggctcacgcctgtaatcccagctattcgggtggctgaggcataagaatcgcttgaatgcaggaggtggagtttgcagtgagccaagatcacgccactgtactccagcctag

SEQ ID NO: 108395 - DNA, 354 bp, Homo sapiens
atacttggctaattttttattttttgcagagacgaggcctttctatgttgcctaggatggactcaaactcctgggctcaagctatcctcctgccttggcctcccaaagtgctgggattacaggtgtaagccaccgtgcctggccatggaattttaaacggtagctcttttctaaccgtatctccccctgctgccctgttgtagccctatttcagctagtctggaattcttactagtttctttggatttacaatgttcttaataatactggttctgcgtggaattccctttgcccattgcacttcaagtctctttctattgacatctatactcctccctcaaagcattatttatt

SEQ ID NO: 108396 - DNA, 390 bp, Homo sapiens
gctatattcagatacaaaggtataggtgctagagaaatcagagaattgtattaaccagaataacggttttaccaagggcaggggcaggcaaaggacctaatggtggaagcaatgattgggataatgggataatgacacataagacagaataggaggaaagagaggacatgaagtgggagagcaacagtgaaaagtcttaagacaaaccgaaagtcctggtgagatccaaggattgttggagttgaagtgctacagggagtgaactggaagggaagaaaggaggtggacagatggatgtttgaagtgagtttatggagaggcggtagttaaaagttaggttaagagattgttaacaattagcttactgttaataattaggttaagagatta

SEQ ID NO: 108397 - DNA, 493 bp, Homo sapiens
agctgggcctttttgagagaaattaatttaatgtggaaaccaacaggaagttagtattataagaaaaaattacagtaccagtagtgggctatctcctacaaagaatcttaatgttgaagtgcagccattactacctggtattctttagtgtctctgaattacttttccttatctgtagcatctaattatttacaatactctttagagctgtagactatgaatagaaaaagatgaaaagcatttaaaaactcaatcacaggacttactggggaggccaaacatttctgcttttaattcccaaactgtcccttttaatactttcccaccaggttttcctagaattgggacttctcctagaatttcttcatggtgtcttgatcctagaacttcacttctaaccctctgtactttttgtgacattgtctcttctagtttttgccatttttctatgatagacttttcagaggctattttttcaacttaaaaaattact

SEQ ID NO: 108398 - DNA, 465 bp, Homo sapiens
taggtcggacctcttgtctgctcagggagaacaaagtgccagtattacctgattgctaaattattaaattgctgcttaggctaaaaagcaatggttccttaggccctgaattaaaggcacctgacacagaccagcatgaggactgagaagcccacatagtgacctccactctgaccatacccagctttcccccacttccctgcagaccctatggagaaatctgcccagagaatcaggcaggaaaagatgagccagtgcctggcttgtcccttgagccaccaaagtgctgggattacaggcctgagccactgcgcctggtcaggaaaagactttaatgccactagattcctctcctgatgcattcaggcctgtggcatcctctagttcagtttcttgggtagttggtattacagatttagagtcttgttttgatggacatttctccatacgaagtaccgtaatgct

SEQ ID NO: 108399 - DNA, 210 bp, Homo sapiens
cctctgtccccaactgtggcacccagactctccatctcctccacctccacttcccacccaccgtcctgtctccctgggcctctgtcgtccccctctgatagctccaggccctgctctcctgtcctaccagcctcctggcccacagtccagcttctctgacctccctcttcgaagatcaacatcttgggaggacactgaggcacagagcag

SEQ ID NO: 108400 - DNA, 352 bp, Homo sapiens
tgcacagaaacaccatttctcacccacaagacagacaaaaccacatatttgacaacatatgtcactggcaagactgtgagaagagagaaactctttacatattttattgctggtaagaatgcaaaatggggctggcaccatggcccacaaggctcaggagttcaagaacagcctggtcaacatggtaaaaccctaaaaaattcaaaaattagccgggtgtggtggtgcatgcctgtagtcccagcgacttagaggctgaggtaggagattcgcttgagtccaggaggtcgaggctgcagtgaaccatgatcgtgccactgctctccagcctgggtgacggagtgagatccca

SEQ ID NO: 108401 - DNA, 205 bp, Homo sapiens
tgttaatggcgttggacaccctttctcctcgccacggagccagtgtagggaagtttcacttatgaaagtaggaaatcacttaaaagaggaggcgatcctcctcctctcctttcacttacgagagcaggagatccctctgaaaactcatgctttcattttgggcttattgctgaaatgtgaaacaagatgtttgcaagttggcttc

SEQ ID NO: 108402 - DNA, 481 bp, Homo sapiens
aaagtgactcacactccaaacagaatcctatactccatgaaattcaagaaccagcctcaactctgagctaaactacaaatctagcttttctaacactttaagcttagaaaaacaaacctttatttatcaggttggtgcaaaagtaatcgcagctcttgccattactttaaatggcaaaaccctcaattacttttgcactaccctatcatatgattcaaaataaatgctggacaaaaaccagaaccaaatcttttaacaggtaaaaatgaaagttgtcccataggtggcagggttatgaactctattccacctgctccaatgttaaaaatgttgaagtcttaaccactctctagtgattttcagaggtaattacaaaaggattcaagacaatcttaaattttatatatgacttacacatgaaaacggaggggaaggggaaaatacactaattattatttttatattccccaaatcatccatt

SEQ ID NO: 108403 - DNA, 766 bp, Homo sapiens
gcaagtggcagtggtttcttacatttgaaatctgagagagaggtttgggccaaagatacaagtttgggagtcatctgcataaagatggtattaaagagttctaaacggggtgttatcaccaggggagtaagtgtagacaaagaagagcgccaaggtctgagtcctggaatattacaacactcagaatctgtgagaagaggaaacaccagcaaataaaactgataaagagcagccaaggagataggaaagaaactaagagaaaggggaagtcctagaagccaagtgaagagaaaatatagcaaggagaagggggatcaactgtgtcaaatgccactgatactcaagtaagatgaggagtgggagctgcccattagatttagcatgtgaagatcattgatgtccatgataagacttgggtgcctggttggggcaaaagcctgagtggggtgagtttaagagaaaataggaggacaggcattggagacaagcagtacagacaactcattataggagtgctacaatgagaagcatctaaatggggtggaagctgatgggcaaagtgggattgagagaagccacttgttcatttagatggaagaaacatcagcgtgtttgtattctgatccagtacaatgaaaaggctaagagcttagacctgctaagctcacatactcaggcttccatcttctagtgatgactcctattgtgagttcattgaggatgagagctaaatgtctacccttacctcttgacataagatatatag

SEQ ID NO: 108404 - DNA, 518 bp, Homo sapiens
gcaatatttttccccaaaaatgttgacatctttaacatcaacataatgtcagttattatgtatatatatatagacacacatatatatatacacaactgttcccttttatgcttctttctctttatccatgggcttcaattgccagcgaaaatttttggaactattacatgacatttttgaagcctataacaagcatatattagtgtcagcagtaaaaagcacctaattctgttttcacagtgggaagccacatggtaaaggttatacactgatgaatatattattttgtaacaaatttatggggacagagatggagagattcttacctgaaggcaaatctagctgtttgggttaagagtccaatgcccatgatgatgcagctcatgaaaaatgtccatttcaatgagctattttgaatatttaattcaataatatttagtgagtgtctattacccaaaaggcacagttctttaagtatcatgggaagagtgactctaatttccaaaacaaaacaaaac

SEQ ID NO: 108405 - DNA, 331 bp, Homo sapiens
aaatgaggaccttggacaagatgttgaccattggccttaaaatggacactgtgcagaagctgacccaaacccactcccggccaagccacagaactagccaacttctccttggaggaaggatgtagacacaggagtctctcatcatgcaggggccatcactggcttctctgcacagcagtggggcacaggactgctgggtgacatggagccatgtggagaatcagggagacaggactgtgagcaggaggcagaagaaagcatgcaaagcaggggtcaagcagcagtttgagcagatgcagttctagggagttcacggctgtgtgaacgtgag

SEQ ID NO: 108406 - DNA, 989 bp, Homo sapiens
aaaaaggaagatagccaggaatacttgtgaacagagagcattaactcttaggtcagtcatgatttgctacacatttggagccaatcttcaatttgcacgttaaaaaaaattaaatagaggtttttgatccctccctcaattaacaacctgctcaacttcccctctgcccttcactccagccctgatttgaaaggatttcttgtgagttctaagaagccctggacagatgagggtggagttctcgtttggggtaggaatgagaaaattagaatatcaaagtaatcccagcactttgggaggccaaggcaggaggatatctttagcccaggaatttgacactactagcctgggcaacagagtgagaccttgtctctacaaaagcaaaagtagctgagcttcaggggatcccttgagcctgagagatcgagactgtagtgagctgtgatcctcttactgcactacagcctcggtgataaagtgaaaaggaaagaagcctggctctagtgaagagattctggaaacttctgaagcctctgctgtggctcccatccagcctagatatggaagagccatgaggccctacatcaccaaggtaaggagagtggagtctagggtcacacagtttctcagatccactttgggggcagcactttctttgaccctgactttctgtggacttcgaatctctcagctgagggctgtagtcagtagggaaacggatcagaggcaaagctccaagaatattaggtattcgacacttggtttagcagctgacttttgttttctattattttactcgttgtgtgtgtgtgtgtgtgtgtgtgtgtgggggacaatcatttgcttcagaagacagtatggtgtgatacaaggaatatctggagtcagacagaagtgtgtccaaatcccagctcggtctgaccctgaccggttcctcttcgtggtctcagggtccttcactctaacagtggggtagtgagacctacccg

SEQ ID NO: 108407 - DNA, 2103 bp, Homo sapiens
  misc_feature (2008)..(2008): n is a, c, g, or t
gaggcaaatggcattgtataatatgtctgtacaaaaaacaaacaaaaaaccaaacaagggcaaatagaaccctttggattggtattgtactatctgtttctgaagacccagaaacagaaaacaaacttttccccagacttactgtttccttgagaatcctttttctttgttcttcatactttaacttccataaggagctggctcctctgcctataaataagagcttagagaaatacttcaaaaagctacctgcagttagctaaatattaccaagtctgcctggtacatgtttcattatatttccttgcctcagtttgttatctagatttaatttacactccatgtgatatagctgttaaattagaaatgagattctttcttctgctttagcaaaattcagtgacaatttttagctccatttccaatttttacatatgtgcgatcacttggttcatactgataactgaactgactcagtctcatatttatcaggtcagataactgtgcttaaccgtgcatagtgggccagtcatcatttatgtgtcatcttctttatttgctttgtgaacactcaccacagcacctatttttctctggtattttttatactaattttcttgttagaatagtttccttaatgtacagaaattgaactagataattacagttgttctaaatatatttttctggacatttaaagaaatcattctaacaccagagattaatgttacctgttttagtattttatacaaattgattcctacagtgtaagctgtattgtactgtatacttcaattcatatgataaagaaatacaatgggctgtaacaatacactaaaaacaggaatgagtgaggggttaagttcacttggagtattacacctatcctttgcatctactgttttctgtgaaattttacagcagtgatgcccttccatataggttcttccatataaaatgtgatcatattttgggaaaaaatacaagaacattttaaggtaatttttgatttatagatctatatgatgataagtagatgccaagaggggtaggaattagaaatggaaagaagtaaaccataatgttaaatattttcaaaggatacttgtttttcatacaggaaaaaaattaggatttttaaacacctctccttccctcttgtttcaacttaaaaatgctatacagataaattcctcttgttttgtggaaatacagaataaatgtgaaagaaatacaaatcactttatcgtatgcctatacttcatgtagaacagctatagctgagttctcccacacagtctactttgatggcagaaatggagacacacagggtacccttatagtcacggcaacttttgtgttgtctttttacacaaagttggaagtattagcaagtgaattgctgaaatgtcattactaccaggactgctttgatgataaggttgaattggaaaagttaattttaataagccatgtacaataatacctgtttacttctaatgatctgaaaagcaggaaggtttttacggagccatgaacaaaaatctgaacatgcttttcttaaacttttggagatttgaagaagggttgcaaaatgtccaaaatacagttttcacaagaaaacacatcaaacctgattgttgccaatcattgtgatataacttctattcatttttggaaacatactcctgctttgtctatcatcacttgtatgtttccttgcagtgtggcctcaggaaacaagtgtatttttctgtcagacagaacacaagttgcatagataaatattaaaactagtactcatgaaagcataacccattagtgaacttaggtacagacacaaatacttaagtcagcaggaagtttactctttccttaggttactactccatgagagtaagattgaccatatcataatgtttggagccctttctgatgcattttctacagtgggtaaaatgatgtaggtaaaaatatattggctgggcgtggtggctcacacctatantcccagcactttgggaggccgaggtgggcagatcacgaggtcaggagttcgagaccatggccaacatggtgaaatcccgtctctactaaaaatac

SEQ ID NO: 108408 - DNA, 760 bp, Homo sapiens
caagaaagaaaacattgttgcgctcctctcagtccctgagaccctaacttgtgatgtttaccgtttaaatccacgggttaggctcttgggagctgcgagtcgtgcttttgcatcctggaaatttggtggaattttattctttaaagcaaaaacaaaagaaaagaaagtttgtctgaggtgattgagtatacctctgaggttttcattgttagatgggatcaggtgaccagagagtggcagctcctggatttctgttaaagtaggtatatattttgctttaatagcgtgttggctgctatgtatatgtatgcatgttattgatgcctgaggcttgtggaactcatctgcctggtctattccttgagagcaacacgcagtagtatacgagcgtaacaagaacagctcagtacctggtgcttgacctcagaacatctcagctgaagtcccagcatgccccatgtctccaactttcaaactccacagttaatcttaaaattgtgcccaattaaaatgggcatgtgaatatattatatattcagtgtccacacatgtgtatcatggatggctagacagtgaacatacagacgcagataaaggcaaactaatagtttggagtaaaatattaataggttaaaattctattcttgcaattccacacaaaggatggaagttatggtattaataaaaattaagtttgtatgactttgcaagattttttaaaaataaaaggagggataccacctccttgcttggtatcttt

SEQ ID NO: 108409 - DNA, 416 bp, Homo sapiens
tcgcgaacgtatatcctagggttcgtgtcccttggtctagctgtcaagtaaccacggaccctagaataacacgtttttcactccgtgcccccttggatcgaatgcagggactgttattttgctaaattgtgctttcacgttctgaagcacacttgcatgttgttatgcagtggtgtttaaatcctaaccaaagtgtttttgttgcaatggaaatatttcaattaatgtttagggttggaacatataaacaaagcttgggtccagattagttgattaatcattgcattccggggtgcaggaagagttttgttgaactctatcaggggaggaattaatatcctctgcctgtgaggtctttcctggagaaagcttgggttttaatgtttctccttacaggatatttttcttttggcaag

SEQ ID NO: 108410 - DNA, 1581 bp, Homo sapiens
ctaagaaacaaaagaatttcaagataattaggtggagcgggcgggctggctgctgaggacgcgccgcctgcgccttcctccctgcgtgcctcgccccgggcggcccggggctgccgcggtgcgcgggtgccgggccctgccttgccggccatgggggaagggggcgccgcggcggcgctggtggcggcggcagcagcagcagcagcggcagcggcagcggtggtggccgggcagcggcggcggcggctagggcgcagggcgcgctgccatgggcctggccgggctgcaggcaggaagatgtccaagccccgcgcggtggaggcggcggcggcggcggcggcggtggcagcgacggccccgggcccggagatggtggagcggaggggcccggggaggccccgcaccgacggggagaacgtatttaccgggcagtcaaagatctattcctacatgagcccgaacaaatgctctggaatgcgtttcccccttcaggaagagaactcagttacacatcacgaagtcaaatgccaggggaaaccattagccggaatctacaggaaacgagaagagaaaagaaatgctgggaacgcagtacggagcgccatgaagtccgaggaacagaagatcaaagacgccaggaaaggtcccctggtaccttttccaaaccaaaaatctgaagcagcagaacctccaaaaactccaccctcatcttgtgattccaccaatgcagccatcgccaagcaagccctgaaaaagcccatcaagggcaaacaggccccccgaaaaaaagctcaaggaaaaacgcaacagaatcgcaaacttacggatttctaccctgtccgaaggagctccaggaagagcaaagccgagctgcagtctgaagaaaggaaaagaatagatgaattgattgaaagtgggaaggaagaaggaatgaagattgacctcatcgatggcaaaggcaggggtgtgattgccaccaagcagttctcccggggtgcctttgtggtggaataccacggggacctcatcgagatcaccgacgccaagaaacgggaggctctgtacgcacaggacccttccacgggctgctacatgtactattttcagtatctgagcaaaacctactgcgtggatgcaactagagagacaaatcgcctaggaagactgatcaatcacagcaaacgtgggaactgccaaaccaaactgcacgacatcgacggcgtacctcacctcatcctcatcgcctcccgagacatcgcggctggggaggagcccctgtatgactatggggaccgcagcaaggcttccattgaagcccacccatggctgaagcattaaccggtgggccccgcgccctccccgccccactttcccttcttcaaaggacaaagtgccctcaaagggaattgaatttttttttacacacttaatcttagcggattacttcagatgtttttaaaaagtatattaagatgccttttcactgtagtatttaaatatctgttacaggtttccaaggtggacttgaacagatggccttatattaccaaaacttttatattctagttgtttttgtacttt

SEQ ID NO: 108411 - DNA, 1229 bp, Homo sapiens
  misc_feature (4)..(4): n is a, c, g, or t
  misc_feature (6)..(6): n is a, c, g, or t
  misc_feature (8)..(8): n is a, c, g, or t
  misc_feature (10)..(10): n is a, c, g, or t
  misc_feature (15)..(15): n is a, c, g, or t
tgtncngnantatcncggctatggtagcgaggctgggtggccgggagatcccaggcggtgacagagtggagccatggctagaggcaggaagatgtccaagccccgcgcggtggcagcgacggccccgggcccggagatggtggagcggaggggcccggggaggccccgcaccgacggggagaacgtatttaccgggcagtcaaagatctattcctacatgagcccgaacaaatgctctggaatgcgtttcccccttcaggaagagaactcagttacacatcacgaagtcaaatgccaggggaaaccattagccggaatctacaggaaacgagaagagaaaagaaatgctgggaacgcagtacggagcgccatgaagtccgaggaacagaagatcaaagacgccaggaaaggtcccctggtaccttttccaaaccaaaaatctgaagcagcagaacctccaaaaactccaccctcatcttgtgattccaccaatgcagccatcgccaagcaagccctgaaaaagcccatcaagggcaaacaggccccccgaaaaaaagctcaaggaaaaacgcaacagaatcgcaaacttacggatttctaccctgtccgaaggagctccaggaagagcaaagccgagctgcagtctgaagaaaggaaaagaatagatgaattgattgaaagtgggaaggaagaaggaatgaagattgacctcatcgatggcaaaggcaggggtgtgattgccaccaagcagttctcccggggtgcctttgtggtggaataccacggggacctcatcgagatcaccgacgccaagaaacgggaggctctgtacgcacaggacccttccacgggctgctacatgtactattttcagtatctgagcaaaacctactggtgagtccactgttgcttagagtggcttttctgtcctctgggcagtgaggagaggccaaagggccaggaactcctgattctgtttggtggccagtcttttggttttgttgttgttgacttttttttttttattttttgagatggagtcttgctctgttgcccaggctggagtgcagtggtgtgatctcggctcattgcaacctcctctcaggctcaaagaattctcctccctcagcctccagagtagcccagctaattttttttttctgtatttttagtagaggtggagttttgccacattggccaagctggtcttgaactcctgacctcagacc

SEQ ID NO: 108412 - DNA, 822 bp, Homo sapiens
  misc_feature (4)..(4): n is a, c, g, or t
  misc_feature (6)..(6): n is a, c, g, or t
  misc_feature (8)..(8): n is a, c, g, or t
  misc_feature (10)..(10): n is a, c, g, or t
  misc_feature (15)..(15): n is a, c, g, or t
tgtncngnantatcncggctatggtagcgaggctgggtggccgggagatcccaggcggtgacagagtggagccatggctagaggcaggaagatgtccaagccccgcgcggtggaggcggcggcggcggcggcggcggtggcagcgacggccccgggcccggagatggtggagcggaggggcccggggaggccccgcaccgacggggagaacgtatttaccgggcagtcaaagatctattcctacatgagcccgaacaaatgctctggaatgcgtttcccccttcaggaagagaactcagttacacatcacgaagtcaaatgccaggggaaaccattagccggaatctacaggaaacgagaaggtaagcttttgaaatggcctcgttctgatcccagctggtcgggttgcagaagcctctgtcttctgcaagaatgcacatatgtatttatccaaccttttcagtctcagattcgagaggtttgagccatgttctgtcttgctgctgaaagaatggcttgtcccagggtgtgtgccctgttggtttgacaggttcttcctgctttcacaagagttagcatatccttcaagcttgattgtcttgcttagttgcaaagtcatgaattcaggttgtacagaccaggcaattgcagacctaactaatgtgttcatgtaggggactgacttttcttccttttatgagctggtcttgaccccatttcttttctttttttgagacggattttcgcttttgttcttcaggttgaatgcaatggaaccatctaagttaatgaaacctcggcttctgggttaaggaatttttt

SEQ ID NO: 108413 - DNA, 1256 bp, Homo sapiens
  misc_feature (4)..(4): n is a, c, g, or t
  misc_feature (6)..(6): n is a, c, g, or t
  misc_feature (8)..(8): n is a, c, g, or t
  misc_feature (10)..(10): n is a, c, g, or t
  misc_feature (15)..(15): n is a, c, g, or t
tgtncngnantatcncggctatggtagcgaggctgggtggccgggagatcccaggcggtgacagagtggagccatggctagaggcaggaagatgtccaagccccgcgcggtggaggcggcggcggcggcggcggcggtggcagcgacggccccgggcccggagatggtggagcggaggggcccggggaggccccgcaccgacggggagaacgtatttaccgggcagtcaaagatctattcctacatgagcccgaacaaatgctctggaatgcgtttcccccttcaggaagagaactcagttacacatcacgaagtcaaatgccaggggaaaccattagccggaatctacaggaaacgagaagagaaaagaaatgctgggaacgcagtacggagcgccatgaagtccgaggaacagaagatcaaagacgccaggaaaggtcccctggtaccttttccaaaccaaaaatctgaagcagcagaacctccaaaaactccaccctcatcttgtgattccaccaatgcagccatcgccaagcaagccctgaaaaagcccatcaagggcaaacaggccccccgaaaaaaagctcaaggaaaaacgcaacagaatcgcaaacttacggatttctaccctgtccgaaggagctccaggaagagcaaagccgagctgcagtctgaagaaaggaaaagaatagatgaattgattgaaagtgggaaggaagaaggaatgaagattgacctcatcgatggcaaaggcaggggtgtgattgccaccaagcagttctcccggggtgcctttgtggtggaataccacggggacctcatcgagatcaccgacgccaagaaacgggaggctctgtacgcacaggacccttccacgggctgctacatgtactattttcagtatctgagcaaaacctactggtgagtccactgttgcttagagtggcttttctgtcctctgggcagtgaggagaggccaaagggccaggaactcctgattctgtttggtggccagtcttttggttttgttgttgttgacttttttttttttattttttgagatggagtcttgctctgttgcccaggctggagtgcagtggtgtgatctcggctcattgcaacctcctctcaggctcaaagaattctcctccctcagcctccagagtagcccagctaattttttttttctgtatttttagtagaggtggagttttgccacattggccaagctggtcttgaactcctgacctcagacc

SEQ ID NO: 108414 - DNA, 958 bp, Homo sapiens
agcggccgctcgcgatctagaactagggggaaaccattagccggaatctacaggaaacgagaagagaaaagaaatgctgggaacgcagtacggagcgccatgaagtccgaggaacagaagatcaaagacgccaggaaaggtcccctggtaccttttccaaaccaaaaatctgaagcagcagaacctccaaaaactccaccctcatcttgtgattccaccaatgcagccatcgccaagcaagccctgaaaaagcccatcaagggcaaacaggccccccgaaaaaaagctcaaggaaaaacgcaacagaatcgcaaacttacggatttctaccctgtccgaaggagctccaggaagagcaaagccgagctgcagtctgaagaaaggaaaagaatagatgaattgattgaaagtgggaaggaagaaggaatgaagattgacctcatcgatggcaaaggcaggggtgtgattgccaccaagcagttctcccggggtgcctttgtggtggaataccacggggacctcatcgagatcaccgacgccaagaaacgggaggctctgtacgcacaggacccttccacgggctgctacatgtactattttcagtatctgagcaaaacctactggtgagtccactgttgcttagagtggcttttctgtcctctgggcagtgaggagaggccaaagggccaggaactcctgattctgtttggtggccagtcttttggttttgttgttgttgacttttttttttttattttttgagatggagtcttgctctgttgcccaggctggagtgcagtggtgtgatctcggctcattgcaacctcctctcaggctcaaagaattctcctccctcagcctccagagtagcccagctaattttttttttctgtatttttagtagaggtggagttttgccacattggccaagctggtcttgaactcctgacctcagacc

SEQ ID NO: 108415 - DNA, 945 bp, Homo sapiens
agacgggatttcaccgtgttggctggactggtctcaaactcctgacctcagagaaaagaaatgctgggaacgcagtacggagcgccatgaagtccgaggaacagaagatcaaagacgccaggaaaggtcccctggtaccttttccaaaccaaaaatctgaagcagcagaacctccaaaaactccaccctcatcttgtgattccaccaatgcagccatcgccaagcaagccctgaaaaagcccatcaagggcaaacaggccccccgaaaaaaagctcaaggaaaaacgcaacagaatcgcaaacttacggatttctaccctgtccgaaggagctccaggaagagcaaagccgagctgcagtctgaagaaaggaaaagaatagatgaattgattgaaagtgggaaggaagaaggaatgaagattgacctcatcgatggcaaaggcaggggtgtgattgccaccaagcagttctcccggggtgcctttgtggtggaataccacggggacctcatcgagatcaccgacgccaagaaacgggaggctctgtacgcacaggacccttccacgggctgctacatgtactattttcagtatctgagcaaaacctactggtgagtccactgttgcttagagtggcttttctgtcctctgggcagtgaggagaggccaaagggccaggaactcctgattctgtttggtggccagtcttttggttttgttgttgttgacttttttttttttattttttgagatggagtcttgctctgttgcccaggctggagtgcagtggtgtgatctcggctcattgcaacctcctctcaggctcaaagaattctcctccctcagcctccagagtagcccagctaattttttttttctgtatttttagtagaggtggagttttgccacattggccaagctggtcttgaactcctgacctcagacc

SEQ ID NO: 108416 - DNA, 4047 bp, Homo sapiens
gcggccgccccgcgcgccccagccccgccgcgcgcctgagcccggtgcggcgccagaagacagcgcgcagccgcccctgagtcgtggaggcggggaccaagctggaaggagcagcgactcccggaccgagtcgcgagtgtgcgccgtccgccgcccgccggatcccccggaccccccgaccccccagtggacaggaaagctaaggcctcagcgatgccggactccccagcggaggtgaagacgcagccccggtccacaccccccagcatgccgcccccaccgcctgccgcatcccagggggccacacgccccccctccttcacgccacacacactgatgaacggcagcagccactcaccaacagccatcaatggtgcaccgtgcacacccaacggcttcagcaatggcccggccacctcgtccacagcctccttgtccacacagcacctgcccccagcctgcggggcccggcagctcagcaagctcaagcgcttcctcaccacactgcagcagtttggcagcgacatctccccagagattggggagcgcgtgcgcacactggtgctgggcctggtgaactcgacattgacgatcgaggagtttcattccaagcttcaggaggccaccaacttccctctgcggccgtttgtcattcccttcctgaaggcaaacctgcccttgctgcagcgggagctcctgcactgtgcacgcctggccaagcagacgcccgcccagtacttggcccagcatgagcagctcctgctggacgccagcgcctcctcccccatcgactcctcagagctgctactggaagtcaacgagaacggcaagaggaggacgcccgacaggaccaaagagaacgggtcagaccgcgacccgctgcaccccgagcacctcagcaaacggccatgcaccctgaaccctgcccagcgctacagccccagcaacgggccaccgcagcccacaccgccgccgcactaccgcctggaggacatagccatggcccaccacttccgagatgcctaccgccacccagacccccgggagctacgagagcgccatcggccgcttgtggtgcctgggtcccggcaggaagaagtgatcgaccacaagctcacagagcgtgagtgggcagaagagtggaagcacctcaacaacctcctgaactgcatcatggacatggtggagaagacgcggcgctcgctcacggtgctgcgcaggtgccaggaggccgaccgcgaggagctcaaccactgggcgcggcgctacagcgacgccgaggacacaaagaagggccccgctcccgccgcggcccggccccgcagcagctccgccggtcccgaagggcctcagctagacgtgcctcgcgagttcctgccgaggaccctcaccggctacgtgcctgaggacatctggaggaaggctgaagaggccgtgaatgaggtgaagcggcaggccatgtcggagctgcagaaagccgtgtcggacgcggagcgcaaagcgcacgagctcatcaccacggagcgtgccaagatggagcgggccctggccgaggcgaagcggcaggcctccgaggacgccctgacggtcatcaaccagcaggaggactccagcgagagctgctggaactgcgggcggaaagccagtgagacgtgcagcggctgcaacgcggcacgctactgcgggtccttctgccagcatcgggactgggagaagcatcaccacgtgtgtggccagagcctgcagggccccacagccgtggtggccgacccggtgcctggaccgcccgaagccgcccacagcctgggcccctccctgcctgtgggtgctgccagccccagcgaagccggctctgcggggccttctcgccccggctcccccagcccacctggcccactggacaccgtgccccgctgaccccactggcccctggcctgccggacacagcaccgtgccaaccccacccagctccaggcccaccggatgctgtgcctggcctccgatgcctggcctgccagacactgcgccccgcctgacctgggggagccgaccaattagtcactgctgctactgcccctctccgaaagaagacacagaaccaacaaaaccgcattcagtgcacctgcctcagctacctaatgattccgcgcggagacctcctgacaacgtctcttcaagcatcctcagaagcctcgactgagctttagacagcagagcagatgccgcaggcgcggcggctctgcccacctctcttttcctctctgtctgtctctccccctctgtcttctctatcctctctctctctatgactatcacacactttctcttcaatgaaaaaatcgaattggtggcttatattttcagcaaagaattttggggggttttgtgtgttggcaaaagagctactcagaaatggacaaagaaaacgggggggttctccccctcctgattaaaaagggagaaagaaaactgcgattttatagctggagatctgaacccagctgtgcccctcccccaggggcgtgaggctgatcagcgaagacgggaggaaagatttcgatttctgactcaagatgcatttttggtttcagatttttttttcctgtaatgttaaactctttggctttaagtaaaaatccaaaaagtttttttaaaaaagcaaaggaagcatacttgtgaactaccttgctagctagccagccaaggataccggacacacctctgctccaaaggaaatccaaaaaagcaaacacaagaaatcaaaatccaaaatttgtttgtcactgccaaagtatttttttcactgtttcacttgctcttgggtttgtttggatgtgggtctttttctcttctgttctgattttgtttgtgggtgtcgggatatttgggtgcagagggtttgtgcccagttagaagcgacttttgttctcttctgcgtaggcgttggtgcgtccgccgcgtgtgcgtggtccgtgtgccgttgctccggcctgcgtctccatatgtgtaggaaaggacacgccgtctgtcctcacgccccctgtgacttttcatatttccgttttccacttgtggaaaaaaagtgctaaagttttcttcccagagagagcataattccgaaacaaaactgtgacaatcttttgggttgattctcgactgcttttcgagcatgcggagccagcaggcctccctgaaacactgcttctcggccagcccgtcctcctctacctctctcctctccgcgccctccgacctctctcggccccctcaccccagctccgacctctctcagccccatcgccccaactccaacctctcggccccatcgccccaccgcagctactcccctttcttccaaacttttgcagaaaaaacaaaaaaactacaaacaaaagcagccctctgcctcctccccagggaagaccctgaccgtgtacatagccctggtgctcctgcccagccacccctcagatgcgttcgcctctggccctggggtgtgtctcggtgacgttttctatcagacgtgctccctcccatcctccagccctgcccaccctccctccactcctctcaactgcctcagcgatttcaagaaggaaataaagggataaagaaattcatgcttgcaccgagtacaaggacagacagcaggcacggcccgcagcctggcatctgtgcgtgtggcgtggcccgtggcttggcatctgtgtgcgtggtgtggcccgtggcctggcatctgtgtgcgtggcgtggcccgtggcctggcatctgtgtgtgtggcgtggcccgtggcctggcatctgtgcgcgtggcgtggcccgtggcctggcatctgtgtgcgtggctatcaggagttctaggaactcagtgcaatacgggagtgacccagctactgaaccagccacgaacagcccgccagaggcctgaagctgagcgtgtacgttaatgtgaatgtatatagtctttgcagaggtccaaatgatattcatgatggtaataaacgagatgtttgccaaataaaaaacagaaaccgcaggagtttgcgaa

SEQ ID NO: 108417 - DNA, 275 bp, Homo sapiens
cgcgtccgcgaagggcctcagctaggaaaacacgggctggtctgccaggaagcctggagctcagagcgtctggtgggccagaggctcggagctgggaggccctgagggtctctgcttctccgcctcagcgacgaatgctgacacaggagaggcccaggacacacacggctcccagccgagtccaagacgtgcctcgcgagttcctgccgaggaccctcaccggctacgtgcctgaggacatctggaggaaggctggtgagtgggggtgcaggggc

SEQ ID NO: 108418 - DNA, 4122 bp, Homo sapiens
gcggccgccccgcgcgccccagccccgccgcgcgcctgagcccggtgcggcgccagaagacagcgcgcagccgcccctgagtcgtggaggcggggaccaagctggaaggagcagcgactcccggaccgagtcgcgagtgtgcgccgtccgccgcccgccggatcccccggaccccccgaccccccagtggacaggaaagctaaggcctcagcgatgccggactccccagcggaggtgaagacgcagccccggtccacaccccccagcatgccgcccccaccgcctgccgcatcccagggggccacacgccccccctccttcacgccacacacacatcgagaggacgggcctgcgacgctgccccacggccgttttcatggctgcttaaaatggtctatggtctgtctcttgatgaacggcagcagccactcaccaacagccatcaatggtgcaccgtgcacacccaacggcttcagcaatggcccggccacctcgtccacagcctccttgtccacacagcacctgcccccagcctgcggggcccggcagctcagcaagctcaagcgcttcctcaccacactgcagcagtttggcagcgacatctccccagagattggggagcgcgtgcgcacactggtgctgggcctggtgaactcgacattgacgatcgaggagtttcattccaagcttcaggaggccaccaacttccctctgcggccgtttgtcattcccttcctgaaggcaaacctgcccttgctgcagcgggagctcctgcactgtgcacgcctggccaagcagacgcccgcccagtacttggcccagcatgagcagctcctgctggacgccagcgcctcctcccccatcgactcctcagagctgctactggaagtcaacgagaacggcaagaggaggacgcccgacaggaccaaagagaacgggtcagaccgcgacccgctgcaccccgagcacctcagcaaacggccatgcaccctgaaccctgcccagcgctacagccccagcaacgggccaccgcagcccacaccgccgccgcactaccgcctggaggacatagccatggcccaccacttccgagatgcctaccgccacccagacccccgggagctacgagagcgccatcggccgcttgtggtgcctgggtcccggcaggaagaagtgatcgaccacaagctcacagagcgtgagtgggcagaagagtggaagcacctcaacaacctcctgaactgcatcatggacatggtggagaagacgcggcgctcgctcacggtgctgcgcaggtgccaggaggccgaccgcgaggagctcaaccactgggcgcggcgctacagcgacgccgaggacacaaagaagggccccgctcccgccgcggcccggccccgcagcagctccgccggtcccgaagggcctcagctagacgtgcctcgcgagttcctgccgaggaccctcaccggctacgtgcctgaggacatctggaggaaggctgaagaggccgtgaatgaggtgaagcggcaggccatgtcggagctgcagaaagccgtgtcggacgcggagcgcaaagcgcacgagctcatcaccacggagcgtgccaagatggagcgggccctggccgaggcgaagcggcaggcctccgaggacgccctgacggtcatcaaccagcaggaggactccagcgagagctgctggaactgcgggcggaaagccagtgagacgtgcagcggctgcaacgcggcacgctactgcgggtccttctgccagcatcgggactgggagaagcatcaccacgtgtgtggccagagcctgcagggccccacagccgtggtggccgacccggtgcctggaccgcccgaagccgcccacagcctgggcccctccctgcctgtgggtgctgccagccccagcgaagccggctctgcggggccttctcgccccggctcccccagcccacctggcccactggacaccgtgccccgctgaccccactggcccctggcctgccggacacagcaccgtgccaaccccacccagctccaggcccaccggatgctgtgcctggcctccgatgcctggcctgccagacactgcgccccgcctgacctgggggagccgaccaattagtcactgctgctactgcccctctccgaaagaagacacagaaccaacaaaaccgcattcagtgcacctgcctcagctacctaatgattccgcgcggagacctcctgacaacgtctcttcaagcatcctcagaagcctcgactgagctttagacagcagagcagatgccgcaggcgcggcggctctgcccacctctcttttcctctctgtctgtctctccccctctgtcttctctatcctctctctctctatgactatcacacactttctcttcaatgaaaaaatcgaattggtggcttatattttcagcaaagaattttggggggttttgtgtgttggcaaaagagctactcagaaatggacaaagaaaacgggggggttctccccctcctgattaaaaagggagaaagaaaactgcgattttatagctggagatctgaacccagctgtgcccctcccccaggggcgtgaggctgatcagcgaagacgggaggaaagatttcgatttctgactcaagatgcatttttggtttcagatttttttttcctgtaatgttaaactctttggctttaagtaaaaatccaaaaagtttttttaaaaaagcaaaggaagcatacttgtgaactaccttgctagctagccagccaaggataccggacacacctctgctccaaaggaaatccaaaaaagcaaacacaagaaatcaaaatccaaaatttgtttgtcactgccaaagtatttttttcactgtttcacttgctcttgggtttgtttggatgtgggtctttttctcttctgttctgattttgtttgtgggtgtcgggatatttgggtgcagagggtttgtgcccagttagaagcgacttttgttctcttctgcgtaggcgttggtgcgtccgccgcgtgtgcgtggtccgtgtgccgttgctccggcctgcgtctccatatgtgtaggaaaggacacgccgtctgtcctcacgccccctgtgacttttcatatttccgttttccacttgtggaaaaaaagtgctaaagttttcttcccagagagagcataattccgaaacaaaactgtgacaatcttttgggttgattctcgactgcttttcgagcatgcggagccagcaggcctccctgaaacactgcttctcggccagcccgtcctcctctacctctctcctctccgcgccctccgacctctctcggccccctcaccccagctccgacctctctcagccccatcgccccaactccaacctctcggccccatcgccccaccgcagctactcccctttcttccaaacttttgcagaaaaaacaaaaaaactacaaacaaaagcagccctctgcctcctccccagggaagaccctgaccgtgtacatagccctggtgctcctgcccagccacccctcagatgcgttcgcctctggccctggggtgtgtctcggtgacgttttctatcagacgtgctccctcccatcctccagccctgcccaccctccctccactcctctcaactgcctcagcgatttcaagaaggaaataaagggataaagaaattcatgcttgcaccgagtacaaggacagacagcaggcacggcccgcagcctggcatctgtgcgtgtggcgtggcccgtggcttggcatctgtgtgcgtggtgtggcccgtggcctggcatctgtgtgcgtggcgtggcccgtggcctggcatctgtgtgtgtggcgtggcccgtggcctggcatctgtgcgcgtggcgtggcccgtggcctggcatctgtgtgcgtggctatcaggagttctaggaactcagtgcaatacgggagtgacccagctactgaaccagccacgaacagcccgccagaggcctgaagctgagcgtgtacgttaatgtgaatgtatatagtctttgcagaggtccaaatgatattcatgatggtaataaacgagatgtttgccaaataaaaaacagaaaccgcaggagtttgcgaa

SEQ ID NO: 108419 - DNA, 4150 bp, Homo sapiens
  misc_feature (27)..(27): n is a, c, g, or t
gagggcagaggacacccagttggtggncgggagggcctcggctttccagggacagaggcccaactccaggacgccccagctggcccagcccctcctctttccctcaaggctgcaggaggtcgggaaaggcagtcctggtagaggcctgtcctgggctccaggttggcccctgagggtggccctcctcatgccggcttcaagactgagggacagggcagccagttcagcctcgggatccacctgtggctccatgtcccagacgcaccctgtgctggagagcggcctcctggcatctgccggctgctccgcaccccggggtcccaggaagggcggcccagccccagtggacaggaaagctaaggcctcagcgatgccggactccccagcggaggtgaagacgcagccccggtccacaccccccagcatgccgcccccaccgcctgccgcatcccagggggccacacgccccccctccttcacgccacacacactgatgaacggcagcagccactcaccaacagccatcaatggtgcaccgtgcacacccaacggcttcagcaatggcccggccacctcgtccacagcctccttgtccacacagcacctgcccccagcctgcggggcccggcagctcagcaagctcaagcgcttcctcaccacactgcagcagtttggcagcgacatctccccagagattggggagcgcgtgcgcacactggtgctgggcctggtgaactcgacattgacgatcgaggagtttcattccaagcttcaggaggccaccaacttccctctgcggccgtttgtcattcccttcctgaaggcaaacctgcccttgctgcagcgggagctcctgcactgtgcacgcctggccaagcagacgcccgcccagtacttggcccagcatgagcagctcctgctggacgccagcgcctcctcccccatcgactcctcagagctgctactggaagtcaacgagaacggcaagaggaggacgcccgacaggaccaaagagaacgggtcagaccgcgacccgctgcaccccgagcacctcagcaaacggccatgcaccctgaaccctgcccagcgctacagccccagcaacgggccaccgcagcccacaccgccgccgcactaccgcctggaggacatagccatggcccaccacttccgagatgcctaccgccacccagacccccgggagctacgagagcgccatcggccgcttgtggtgcctgggtcccggcaggaagaagtgatcgaccacaagctcacagagcgtgagtgggcagaagagtggaagcacctcaacaacctcctgaactgcatcatggacatggtggagaagacgcggcgctcgctcacggtgctgcgcaggtgccaggaggccgaccgcgaggagctcaaccactgggcgcggcgctacagcgacgccgaggacacaaagaagggccccgctcccgccgcggcccggccccgcagcagctccgccggtcccgaagggcctcagctagacgtgcctcgcgagttcctgccgaggaccctcaccggctacgtgcctgaggacatctggaggaaggctgaagaggccgtgaatgaggtgaagcggcaggccatgtcggagctgcagaaagccgtgtcggacgcggagcgcaaagcgcacgagctcatcaccacggagcgtgccaagatggagcgggccctggccgaggcgaagcggcaggcctccgaggacgccctgacggtcatcaaccagcaggaggactccagcgagagctgctggaactgcgggcggaaagccagtgagacgtgcagcggctgcaacgcggcacgctactgcgggtccttctgccagcatcgggactgggagaagcatcaccacgtgtgtggccagagcctgcagggccccacagccgtggtggccgacccggtgcctggaccgcccgaagccgcccacagcctgggcccctccctgcctgtgggtgctgccagccccagcgaagccggctctgcggggccttctcgccccggctcccccagcccacctggcccactggacaccgtgccccgctgaccccactggcccctggcctgccggacacagcaccgtgccaaccccacccagctccaggcccaccggatgctgtgcctggcctccgatgcctggcctgccagacactgcgccccgcctgacctgggggagccgaccaattagtcactgctgctactgcccctctccgaaagaagacacagaaccaacaaaaccgcattcagtgcacctgcctcagctacctaatgattccgcgcggagacctcctgacaacgtctcttcaagcatcctcagaagcctcgactgagctttagacagcagagcagatgccgcaggcgcggcggctctgcccacctctcttttcctctctgtctgtctctccccctctgtcttctctatcctctctctctctatgactatcacacactttctcttcaatgaaaaaatcgaattggtggcttatattttcagcaaagaattttggggggttttgtgtgttggcaaaagagctactcagaaatggacaaagaaaacgggggggttctccccctcctgattaaaaagggagaaagaaaactgcgattttatagctggagatctgaacccagctgtgcccctcccccaggggcgtgaggctgatcagcgaagacgggaggaaagatttcgatttctgactcaagatgcatttttggtttcagatttttttttcctgtaatgttaaactctttggctttaagtaaaaatccaaaaagtttttttaaaaaagcaaaggaagcatacttgtgaactaccttgctagctagccagccaaggataccggacacacctctgctccaaaggaaatccaaaaaagcaaacacaagaaatcaaaatccaaaatttgtttgtcactgccaaagtatttttttcactgtttcacttgctcttgggtttgtttggatgtgggtctttttctcttctgttctgattttgtttgtgggtgtcgggatatttgggtgcagagggtttgtgcccagttagaagcgacttttgttctcttctgcgtaggcgttggtgcgtccgccgcgtgtgcgtggtccgtgtgccgttgctccggcctgcgtctccatatgtgtaggaaaggacacgccgtctgtcctcacgccccctgtgacttttcatatttccgttttccacttgtggaaaaaaagtgctaaagttttcttcccagagagagcataattccgaaacccagcaggcctccctgaaacactgcttctcggccagcccgtcctcctctacctctctcctctccgcgccctccgacctctctcggccccctcaccccagctccgacctctctcagccccatcgccccaactccaacctctcggccccatcgccccaccgcagctactcccctttcttccaaacttttgcagaaaaaacaaaaaaactacaaacaaaagcagccctctgcctcctccccagggaagaccctgaccgtgtacatagccctggtgctcctgcccagccacccctcagatgcgttcgcctctggccctggggtgtgtctcggtgacgttttctatcagacgtgctccctcccatcctccagccctgcccaccctccctccactcctctcaactgcctcagcgatttcaagaaggaaataaagggataaagaaattcatgcttgcaccgagtacaaggacagacagcaggcacggcccgcagcctggcatctgtgcgtgtggcgtggcccgtggcttggcatctgtgtgcgtggtgtggcccgtggcctggcatctgtgtgcgtggcgtggcccgtggcctggcatctgtgtgtgtggcgtggcccgtggcctggcatctgtgcgcgtggcgtggcccgtggcctggcatctgtgtgcgtggctatcaggagttctaggaactcagtgcaatacgggagtgacccagctactgaaccagccacgaacagcccgccagaggcctgaagctgagcgtgtacgttaatgtgaatgtatatagtctttgcagaggtccaaatgatattcatgatggtaataaacgagatgtttgccaaataaaaaacagaaaccgcaggagtttgcgaa

SEQ ID NO: 108420 - DNA, 3470 bp, Homo sapiens
  misc_feature (27)..(27): n is a, c, g, or t
gagggcagaggacacccagttggtggncgggagggcctcggctttccagggacagaggcccaactccaggacgccccagctggcccagcccctcctctttccctcaaggctgcaggaggtcgggaaaggcagtcctggtagaggcctgtcctgggctccaggttggcccctgagggtggccctcctcatgccggcttcaagactgagggacagggcagccagttcagcctcgggatccacctgtggctccatgtcccagacgcaccctgtgctggagagcggcctcctggcatctgccggctgctccgcaccccggggtcccaggaagggcggcccagccccagtggacaggaaagctaaggcctcagcgatgccggactccccagcggaggtgaagacgcagccccggtccacaccccccagcatgccgcccccaccgcctgccgcatcccagggggccacacgccccccctccttcacgccacacacactgatgaacggcagcagccactcaccaacagccatcaatggtgcaccgtgcacacccaacggcttcagcaatggcccggccacctcgtccacagcctccttgtccacacagcacctgcccccagcctgcggggcccggcagctcagcaagctcaagcgcttcctcaccacactgcagcagtttggcagcgacatctccccagagattggggagcgcgtgcgcacactggtgctgggcctggtgaactcgacattgacgatcgaggagtttcattccaagcttcaggaggccaccaacttccctctgcggccgtttgtcattcccttcctgaaggcaaacctgcccttgctgcagcgggagctcctgcactgtgcacgcctggccaagcagacgcccgcccagtacttggcccagcatgagcagctcctgctggacgccagcgcctcctcccccatcgactcctcagagctgctactggaagtcaacgagaacggcaagaggaggacgcccgacaggaccaaagagaacgggtcagaccgcgacccgctgcaccccgagcacctcagcaaacggccatgcaccctgaaccctgcccagcgctacagccccagcaacgggccaccgcagcccacaccgccgccgcactaccgcctggaggacatagccatggcccaccacttccgagatgcctaccgccacccagacccccgggagctacgagagcgccatcggccgcttgtggtgcctgggtcccggcaggaagaagtgatcgaccacaagctcacagagcgtgagtgggcagaagagtggaagcacctcaacaacctcctgaactgcatcatggacatggtggagaagacgcggcgctcgctcacggtgctgcgcaggtgccaggaggccgaccgcgaggagctcaaccactgggcgcggcgctacagcgacgccgaggacacaaagaagggccccgctcccgccgcggcccggccccgcagcagctccgccggtcccgaagggcctcagctagacgtgcctcgcgagttcctgccgaggaccctcaccggctacgtgcctgaggacatctggaggaaggctgaagaggccgtgaatgaggtgaagcggcaggccatgtcggagctgcagaaagccgtgtcggacgcggagcgcaaagcgcacgagctcatcaccacggagcgtgccaagatggagcgggccctggccgaggcgaagcggcaggcctccgaggacgccctgacggtcatcaaccagcaggaggactccagcgagagctgctggaactgcgggcggaaagccagtgagacgtgcagcggctgcaacgcggcacgctactgcgggtccttctgccagcatcgggactgggagaagcatcaccacgtgtgtggccagagcctgcagggccccacagccgtggtggccgacccggtgcctggaccgcccgaagccgcccacagcctgggcccctccctgcctgtgggtgctgccagccccagcgaagccggctctgcggggccttctcgccccggctcccccagcccacctggcccactggacaccgtgccccgctgaccccactggcccctggcctgccggacacagcaccgtgccaaccccacccagctccaggcccaccggatgctgtgcctggcctccgatgcctggcctgccagacactgcgccccgcctgacctgggggagccgaccaattagtcactgctgctactgcccctctccgaaagaagacacagaaccaacaaaaccgcattcagtgcacctgcctcagctacctaatgattccgcgcggagacctcctgacaacgtctcttcaagcatcctcagaagcctcgactgagctttagacagcagagcagatgccgcaggcgcggcggctctgcccacctctcttttcctctctgtctgtctctccccctctgtcttctctatcctctctctctctatgactatcacacactttctcttcaatgaaaaaatcgaattggtggcttatattttcagcaaagaattttggggggttttgtgtgttggcaaaagagctactcagaaatggacaaagaaaacgggggggttctccccctcctgattaaaaagggagaaagaaaactgcgattttatagctggagatctgaacccagctgtgcccctcccccaggggcgtgaggctgatcagcgaagacgggaggaaagatttcgatttctgactcaagatgcatttttggtttcagatttttttttcctgtaatgttaaactctttggctttaagtaaaaatccaaaaagtttttttaaaaaagcaaaggaagcatacttgtgaactaccttgctagctagccagccaaggataccggacacacctctgctccaaaggaaatccaaaaaagcaaacacaagaaatcaaaatccaaaatttgtttgtcactgccaaagtatttttttcactgtttcacttgctcttgggtttgtttggatgtgggtctttttctcttctgttctgattttgtttgtgggtgtcgggatatttgggtgcagagggtttgtgcccagttagaagcgacttttgttctcttctgcgtaggcgttggtgcgtccgccgcgtgtgcgtggtccgtgtgccgttgctccggcctgcgtctccatatgtgtaggaaaggacacgccgtctgtcctcacgccccctgtgacttttcatatttccgttttccacttgtggaaaaaaagtgctaaagttttcttcccagagagagcataattccgaaacaaaactgtgacaatcttttgggttgattctcgactgcttttcgagcatgcggagccagcaggcctccctgaaacactgcttctcggccagcccgtcctcctctacctctctcctctccgcgccctccgacctctctcggccccctcacccccaacatccccacctctgataccacaatcaaaagggatac

SEQ ID NO: 108421 - DNA, 247 bp, Homo sapiens
gacgccctgacggtcatcaaccagcaggaggactccagcgaggtagggccacccggccacgctgacacccatcccctgcctcggctcccgtgcggtcccacgccacccccatgaggattctgagcctccacgtggcatcagcacagttgtcacgggcatcctgcagcaggcacgccatccccgcccacactgtgctttatcagcacagagatcccacatggttcagtgaggcgtcctatggatgtcc

SEQ ID NO: 108422 - DNA, 462 bp, Homo sapiens
gcggccgccccgcgcgccccagccccgccgcgcgcctgagcccggtgcggcgccagaagacagcgcgcagccgcccctgagtcgtggaggcggggaccaagctggaaggagcagcgactcccggaccgagtcgcgagtgtgcgccgtccgccgcccgccggatcccccggaccccccgaccgtaagtgccgtgtccgccccgcgcgccgccgccgctctaccccgactccgcccgcggctgccgttcccggatctgcgccgcagccgcgccgagcgcacgggccgttttcaaagttggtgcccacggcagggtggagccaacccgcccagcgcccacccatccgggctgagcgcagccccccgtgagcagagcctgacctgcgggggctgcggcgaaacttcgaggggaacgacgcgcccgggcgctgggagtctcgcgggctcccctggggccgcccggtt

SEQ ID NO: 108423 - DNA, 4279 bp, Homo sapiens
  misc_feature (27)..(27): n is a, c, g, or t
gagggcagaggacacccagttggtggncgggagggcctcggctttccagggacagaggcccaactccaggacgccccagctggcccagcccctcctctttccctcaaggctgcaggaggtcgggaaaggcagtcctggtagaggcctgtcctgggctccaggttggcccctgagggtggccctcctcatgccggcttcaagactgagggacagggcagccagttcagcctcgggatccacctgtggctccatgtcccagacgcaccctgtgctggagagcggcctcctggcatctgccggctgctccgcaccccggggtcccaggaagggcggcccagccccagtggacaggaaagctaaggcctcagcgatgccggactccccagcggaggtgaagacgcagccccggtccacaccccccagcatgccgcccccaccgcctgccgcatcccagggggccacacgccccccctccttcacgccacacacacatcgagaggacgggcctgcgacgctgccccacggccgttttcatggctgcttaaaatggtctatggtctgtctcttgatgaacggcagcagccactcaccaacagccatcaatggtgcaccgtgcacacccaacggcttcagcaatggcccggccacctcgtccacagcctccttgtccacacagcacctgcccccagcctgcggggcccggcagctcagcaagctcaagcgcttcctcaccacactgcagcagtttggcagcgacatctccccagagattggggagcgcgtgcgcacactggtgctgggcctggtgaactcgacattgacgatcgaggagtttcattccaagcttcaggaggccaccaacttccctctgcggccgtttgtcattcccttcctgaaggcaaacctgcccttgctgcagcgggagctcctgcactgtgcacgcctggccaagcagacgcccgcccagtacttggcccagcatgagcagctcctgctggacgccagcgcctcctcccccatcgactcctcagagctgctactggaagtcaacgagaacggcaagaggaggacgcccgacaggaccaaagagaacgggtcagaccgcgacccgctgcaccccgagcacctcagcaaacggccatgcaccctgaaccctgcccagcgctacagccccagcaacgggccaccgcagcccacaccgccgccgcactaccgcctggaggacatagccatggcccaccacttccgagatgcctaccgccacccagacccccgggagctacgagagcgccatcggccgcttgtggtgcctgggtcccggcaggaagaagtgatcgaccacaagctcacagagcgtgagtgggcagaagagtggaagcacctcaacaacctcctgaactgcatcatggacatggtggagaagacgcggcgctcgctcacggtgctgcgcaggtgccaggaggccgaccgcgaggagctcaaccactgggcgcggcgctacagcgacgccgaggacacaaagaagggccccgctcccgccgcggcccggccccgcagcagctccgccggtcccgaagggcctcagctagacgtgcctcgcgagttcctgccgaggaccctcaccggctacgtgcctgaggacatctggaggaaggctgaagaggccgtgaatgaggtgaagcggcaggccatgtcggagctgcagaaagccgtgtcggacgcggagcgcaaagcgcacgagctcatcaccacggagcgtgccaagatggagcgggccctggccgaggcgaagcggcaggcctccgaggacgccctgacggtcatcaaccagcaggaggactccagcgagagctgctggaactgcgggcggaaagccagtgagacgtgcagcggctgcaacgcggcacgctactgcgggtccttctgccagcatcgggactgggagaagcatcaccacgtgtgtggccagagcctgcagggccccacagccgtggtggccgacccggtgcctggaccgcccgaagccgcccacagcctgggcccctccctgcctgtgggtgctgccagccccagcgaagccggctctgcggggccttctcgccccggctcccccagcccacctggcccactggacaccgtgccccgctgaccccactggcccctggcctgccggacacagcaccgtgccaaccccacccagctccaggcccaccggatgctgtgcctggcctccgatgcctggcctgccagacactgcgccccgcctgacctgggggagccgaccaattagtcactgctgctactgcccctctccgaaagaagacacagaaccaacaaaaccgcattcagtgcacctgcctcagctacctaatgattccgcgcggagacctcctgacaacgtctcttcaagcatcctcagaagcctcgactgagctttagacagcagagcagatgccgcaggcgcggcggctctgcccacctctcttttcctctctgtctgtctctccccctctgtcttctctatcctctctctctctatgactatcacacactttctcttcaatgaaaaaatcgaattggtggcttatattttcagcaaagaattttggggggttttgtgtgttggcaaaagagctactcagaaatggacaaagaaaacgggggggttctccccctcctgattaaaaagggagaaagaaaactgcgattttatagctggagatctgaacccagctgtgcccctcccccaggggcgtgaggctgatcagcgaagacgggaggaaagatttcgatttctgactcaagatgcatttttggtttcagatttttttttcctgtaatgttaaactctttggctttaagtaaaaatccaaaaagtttttttaaaaaagcaaaggaagcatacttgtgaactaccttgctagctagccagccaaggataccggacacacctctgctccaaaggaaatccaaaaaagcaaacacaagaaatcaaaatccaaaatttgtttgtcactgccaaagtatttttttcactgtttcacttgctcttgggtttgtttggatgtgggtctttttctcttctgttctgattttgtttgtgggtgtcgggatatttgggtgcagagggtttgtgcccagttagaagcgacttttgttctcttctgcgtaggcgttggtgcgtccgccgcgtgtgcgtggtccgtgtgccgttgctccggcctgcgtctccatatgtgtaggaaaggacacgccgtctgtcctcacgccccctgtgacttttcatatttccgttttccacttgtggaaaaaaagtgctaaagttttcttcccagagagagcataattccgaaacaaaactgtgacaatcttttgggttgattctcgactgcttttcgagcatgcggagccagcaggcctccctgaaacactgcttctcggccagcccgtcctcctctacctctctcctctccgcgccctccgacctctctcggccccctcaccccagctccgacctctctcagccccatcgccccaactccaacctctcggccccatcgccccaccgcagctactcccctttcttccaaacttttgcagaaaaaacaaaaaaactacaaacaaaagcagccctctgcctcctccccagggaagaccctgaccgtgtacatagccctggtgctcctgcccagccacccctcagatgcgttcgcctctggccctggggtgtgtctcggtgacgttttctatcagacgtgctccctcccatcctccagccctgcccaccctccctccactcctctcaactgcctcagcgatttcaagaaggaaataaagggataaagaaattcatgcttgcaccgagtacaaggacagacagcaggcacggcccgcagcctggcatctgtgcgtgtggcgtggcccgtggcttggcatctgtgtgcgtggtgtggcccgtggcctggcatctgtgtgcgtggcgtggcccgtggcctggcatctgtgtgtgtggcgtggcccgtggcctggcatctgtgcgcgtggcgtggcccgtggcctggcatctgtgtgcgtggctatcaggagttctaggaactcagtgcaatacgggagtgacccagctactgaaccagccacgaacagcccgccagaggcctgaagctgagcgtgtacgttaatgtgaatgtatatagtctttgcagaggtccaaatgatattcatgatggtaataaacgagatgtttgccaaataaaaaacagaaaccgcaggagtttgcgaa

SEQ ID NO: 108424 - DNA, 3955 bp, Homo sapiens
  misc_feature (27)..(27): n is a, c, g, or t
gagggcagaggacacccagttggtggncgggagggcctcggctttccagggacagaggcccaactccaggacgccccagctggcccagcccctcctctttccctcaaggctgcaggaggtcgggaaaggcagtcctggtagaggcctgtcctgggctccaggttggcccctgagggtggccctcctcatgccggcttcaagactgagggacagggcagccagttcagcctcgggatccacctgtggctccatgtcccagacgcaccctgtgctggagagcggcctcctggcatctgccggctgctccgcaccccggggtcccaggaagggcggcccagccccagtggacaggaaagctaaggcctcagcgatgccggactccccagcggaggtgaagacgcagccccggtccacaccccccagcatgccgcccccaccgcctgccgcatcccagggggccacacgccccccctccttcacgccacacacacatcgagaggacgggcctgcgacgctgccccacggccgttttcatggctgcttaaaatggtctatggtctgtctcttgatgaacggcagcagccactcaccaacagccatcaatggtgcaccgtgcacacccaacggcttcagcaatggcccggccacctcgtccacagcctccttgtccacacagcacctgcccccagcctgcggggcccggcagctcagcaagctcaagcgcttcctcaccacactgcagcagtttggcagcgacatctccccagagattggggagcgcgtgcgcacactggtgctgggcctggtgaactcgacattgacgatcgaggagtttcattccaagcttcaggaggccaccaacttccctctgcggccgtttgtcattcccttcctgaaggcaaacctgcccttgctgcagcgggagctcctgcactgtgcacgcctggccaagcagacgcccgcccagtacttggcccagctggtgcctgggtcccggcaggaagaagtgatcgaccacaagctcacagagcgtgagtgggcagaagagtggaagcacctcaacaacctcctgaactgcatcatggacatggtggagaagacgcggcgctcgctcacggtgctgcgcaggtgccaggaggccgaccgcgaggagctcaaccactgggcgcggcgctacagcgacgccgaggacacaaagaagggccccgctcccgccgcggcccggccccgcagcagctccgccggtcccgaagggcctcagctagacgtgcctcgcgagttcctgccgaggaccctcaccggctacgtgcctgaggacatctggaggaaggctgaagaggccgtgaatgaggtgaagcggcaggccatgtcggagctgcagaaagccgtgtcggacgcggagcgcaaagcgcacgagctcatcaccacggagcgtgccaagatggagcgggccctggccgaggcgaagcggcaggcctccgaggacgccctgacggtcatcaaccagcaggaggactccagcgagagctgctggaactgcgggcggaaagccagtgagacgtgcagcggctgcaacgcggcacgctactgcgggtccttctgccagcatcgggactgggagaagcatcaccacgtgtgtggccagagcctgcagggccccacagccgtggtggccgacccggtgcctggaccgcccgaagccgcccacagcctgggcccctccctgcctgtgggtgctgccagccccagcgaagccggctctgcggggccttctcgccccggctcccccagcccacctggcccactggacaccgtgccccgctgaccccactggcccctggcctgccggacacagcaccgtgccaaccccacccagctccaggcccaccggatgctgtgcctggcctccgatgcctggcctgccagacactgcgccccgcctgacctgggggagccgaccaattagtcactgctgctactgcccctctccgaaagaagacacagaaccaacaaaaccgcattcagtgcacctgcctcagctacctaatgattccgcgcggagacctcctgacaacgtctcttcaagcatcctcagaagcctcgactgagctttagacagcagagcagatgccgcaggcgcggcggctctgcccacctctcttttcctctctgtctgtctctccccctctgtcttctctatcctctctctctctatgactatcacacactttctcttcaatgaaaaaatcgaattggtggcttatattttcagcaaagaattttggggggttttgtgtgttggcaaaagagctactcagaaatggacaaagaaaacgggggggttctccccctcctgattaaaaagggagaaagaaaactgcgattttatagctggagatctgaacccagctgtgcccctcccccaggggcgtgaggctgatcagcgaagacgggaggaaagatttcgatttctgactcaagatgcatttttggtttcagatttttttttcctgtaatgttaaactctttggctttaagtaaaaatccaaaaagtttttttaaaaaagcaaaggaagcatacttgtgaactaccttgctagctagccagccaaggataccggacacacctctgctccaaaggaaatccaaaaaagcaaacacaagaaatcaaaatccaaaatttgtttgtcactgccaaagtatttttttcactgtttcacttgctcttgggtttgtttggatgtgggtctttttctcttctgttctgattttgtttgtgggtgtcgggatatttgggtgcagagggtttgtgcccagttagaagcgacttttgttctcttctgcgtaggcgttggtgcgtccgccgcgtgtgcgtggtccgtgtgccgttgctccggcctgcgtctccatatgtgtaggaaaggacacgccgtctgtcctcacgccccctgtgacttttcatatttccgttttccacttgtggaaaaaaagtgctaaagttttcttcccagagagagcataattccgaaacaaaactgtgacaatcttttgggttgattctcgactgcttttcgagcatgcggagccagcaggcctccctgaaacactgcttctcggccagcccgtcctcctctacctctctcctctccgcgccctccgacctctctcggccccctcaccccagctccgacctctctcagccccatcgccccaactccaacctctcggccccatcgccccaccgcagctactcccctttcttccaaacttttgcagaaaaaacaaaaaaactacaaacaaaagcagccctctgcctcctccccagggaagaccctgaccgtgtacatagccctggtgctcctgcccagccacccctcagatgcgttcgcctctggccctggggtgtgtctcggtgacgttttctatcagacgtgctccctcccatcctccagccctgcccaccctccctccactcctctcaactgcctcagcgatttcaagaaggaaataaagggataaagaaattcatgcttgcaccgagtacaaggacagacagcaggcacggcccgcagcctggcatctgtgcgtgtggcgtggcccgtggcttggcatctgtgtgcgtggtgtggcccgtggcctggcatctgtgtgcgtggcgtggcccgtggcctggcatctgtgtgtgtggcgtggcccgtggcctggcatctgtgcgcgtggcgtggcccgtggcctggcatctgtgtgcgtggctatcaggagttctaggaactcagtgcaatacgggagtgacccagctactgaaccagccacgaacagcccgccagaggcctgaagctgagcgtgtacgttaatgtgaatgtatatagtctttgcagaggtccaaatgatattcatgatggtaataaacgagatgtttgccaaataaaaaacagaaaccgcaggagtttgcgaa

SEQ ID NO: 108425 - DNA, 4051 bp, Homo sapiens
gcgggatcctgtgtccagctcttccactcgcccgtgttttctgggtccatccccactggagcgtgtgtcggacctgccttccttcttatgtctgaataagtgtgcactgcatctgcttttgagtttatctgtgctcggctgacagtctatggagaaccttgtctcaccacagctgtgtgtctcagccccagtggacaggaaagctaaggcctcagcgatgccggactccccagcggaggtgaagacgcagccccggtccacaccccccagcatgccgcccccaccgcctgccgcatcccagggggccacacgccccccctccttcacgccacacacactgatgaacggcagcagccactcaccaacagccatcaatggtgcaccgtgcacacccaacggcttcagcaatggcccggccacctcgtccacagcctccttgtccacacagcacctgcccccagcctgcggggcccggcagctcagcaagctcaagcgcttcctcaccacactgcagcagtttggcagcgacatctccccagagattggggagcgcgtgcgcacactggtgctgggcctggtgaactcgacattgacgatcgaggagtttcattccaagcttcaggaggccaccaacttccctctgcggccgtttgtcattcccttcctgaaggcaaacctgcccttgctgcagcgggagctcctgcactgtgcacgcctggccaagcagacgcccgcccagtacttggcccagcatgagcagctcctgctggacgccagcgcctcctcccccatcgactcctcagagctgctactggaagtcaacgagaacggcaagaggaggacgcccgacaggaccaaagagaacgggtcagaccgcgacccgctgcaccccgagcacctcagcaaacggccatgcaccctgaaccctgcccagcgctacagccccagcaacgggccaccgcagcccacaccgccgccgcactaccgcctggaggacatagccatggcccaccacttccgagatgcctaccgccacccagacccccgggagctacgagagcgccatcggccgcttgtggtgcctgggtcccggcaggaagaagtgatcgaccacaagctcacagagcgtgagtgggcagaagagtggaagcacctcaacaacctcctgaactgcatcatggacatggtggagaagacgcggcgctcgctcacggtgctgcgcaggtgccaggaggccgaccgcgaggagctcaaccactgggcgcggcgctacagcgacgccgaggacacaaagaagggccccgctcccgccgcggcccggccccgcagcagctccgccggtcccgaagggcctcagctagacgtgcctcgcgagttcctgccgaggaccctcaccggctacgtgcctgaggacatctggaggaaggctgaagaggccgtgaatgaggtgaagcggcaggccatgtcggagctgcagaaagccgtgtcggacgcggagcgcaaagcgcacgagctcatcaccacggagcgtgccaagatggagcgggccctggccgaggcgaagcggcaggcctccgaggacgccctgacggtcatcaaccagcaggaggactccagcgagagctgctggaactgcgggcggaaagccagtgagacgtgcagcggctgcaacgcggcacgctactgcgggtccttctgccagcatcgggactgggagaagcatcaccacgtgtgtggccagagcctgcagggccccacagccgtggtggccgacccggtgcctggaccgcccgaagccgcccacagcctgggcccctccctgcctgtgggtgctgccagccccagcgaagccggctctgcggggccttctcgccccggctcccccagcccacctggcccactggacaccgtgccccgctgaccccactggcccctggcctgccggacacagcaccgtgccaaccccacccagctccaggcccaccggatgctgtgcctggcctccgatgcctggcctgccagacactgcgccccgcctgacctgggggagccgaccaattagtcactgctgctactgcccctctccgaaagaagacacagaaccaacaaaaccgcattcagtgcacctgcctcagctacctaatgattccgcgcggagacctcctgacaacgtctcttcaagcatcctcagaagcctcgactgagctttagacagcagagcagatgccgcaggcgcggcggctctgcccacctctcttttcctctctgtctgtctctccccctctgtcttctctatcctctctctctctatgactatcacacactttctcttcaatgaaaaaatcgaattggtggcttatattttcagcaaagaattttggggggttttgtgtgttggcaaaagagctactcagaaatggacaaagaaaacgggggggttctccccctcctgattaaaaagggagaaagaaaactgcgattttatagctggagatctgaacccagctgtgcccctcccccaggggcgtgaggctgatcagcgaagacgggaggaaagatttcgatttctgactcaagatgcatttttggtttcagatttttttttcctgtaatgttaaactctttggctttaagtaaaaatccaaaaagtttttttaaaaaagcaaaggaagcatacttgtgaactaccttgctagctagccagccaaggataccggacacacctctgctccaaaggaaatccaaaaaagcaaacacaagaaatcaaaatccaaaatttgtttgtcactgccaaagtatttttttcactgtttcacttgctcttgggtttgtttggatgtgggtctttttctcttctgttctgattttgtttgtgggtgtcgggatatttgggtgcagagggtttgtgcccagttagaagcgacttttgttctcttctgcgtaggcgttggtgcgtccgccgcgtgtgcgtggtccgtgtgccgttgctccggcctgcgtctccatatgtgtaggaaaggacacgccgtctgtcctcacgccccctgtgacttttcatatttccgttttccacttgtggaaaaaaagtgctaaagttttcttcccagagagagcataattccgaaacaaaactgtgacaatcttttgggttgattctcgactgcttttcgagcatgcggagccagcaggcctccctgaaacactgcttctcggccagcccgtcctcctctacctctctcctctccgcgccctccgacctctctcggccccctcaccccagctccgacctctctcagccccatcgccccaactccaacctctcggccccatcgccccaccgcagctactcccctttcttccaaacttttgcagaaaaaacaaaaaaactacaaacaaaagcagccctctgcctcctccccagggaagaccctgaccgtgtacatagccctggtgctcctgcccagccacccctcagatgcgttcgcctctggccctggggtgtgtctcggtgacgttttctatcagacgtgctccctcccatcctccagccctgcccaccctccctccactcctctcaactgcctcagcgatttcaagaaggaaataaagggataaagaaattcatgcttgcaccgagtacaaggacagacagcaggcacggcccgcagcctggcatctgtgcgtgtggcgtggcccgtggcttggcatctgtgtgcgtggtgtggcccgtggcctggcatctgtgtgcgtggcgtggcccgtggcctggcatctgtgtgtgtggcgtggcccgtggcctggcatctgtgcgcgtggcgtggcccgtggcctggcatctgtgtgcgtggctatcaggagttctaggaactcagtgcaatacgggagtgacccagctactgaaccagccacgaacagcccgccagaggcctgaagctgagcgtgtacgttaatgtgaatgtatatagtctttgcagaggtccaaatgatattcatgatggtaataaacgagatgtttgccaaataaaaaacagaaaccgcaggagtttgcgaa

SEQ ID NO: 108426 - DNA, 3749 bp, Homo sapiens
  misc_feature (27)..(27): n is a, c, g, or t
gagggcagaggacacccagttggtggncgggagggcctcggctttccagggacagaggcccaactccaggacgccccagctggcccagcccctcctctttccctcaaggctgcaggaggtcgggaaaggcagtcctggtagaggcctgtcctgggctccaggttggcccctgagggtggccctcctcatgccggcttcaagactgagggacagggcagccagttcagcctcgggatccacctgtggctccatgtcccagacgcaccctgtgctggagagcggcctcctggcatctgccggctgctccgcaccccggggtcccaggaagggcggcccagccccagtggacaggaaagctaaggcctcagcgatgccggactccccagcggaggtgaagacgcagccccggtccacaccccccagcatgccgcccccaccgcctgccgcatcccagggggccacacgccccccctccttcacgccacacacactgatgaacggcagcagccactcaccaacagccatcaatggtgcaccgtgcacacccaacggcttcagcaatggcccggccacctcgtccacagcctccttgtccacacagcacctgcccccagcctgcggggcccggcagctcagcaagctcaagcgcttcctcaccacactgcagcagtttggcagcgacatctccccagagattggggagcgcgtgcgcacactggtgctgggcctggtgaactcgacattgacgatcgaggagtttcattccaagcttcaggaggccaccaacttccctctgcggccgtttgtcattcccttcctgaaggcaaacctgcccttgctgcagcgggagctcctgcactgtgcacgcctggccaagcagacgcccgcccagtacttggcccagcatgagcagctcctgctggacgccagcgcctcctcccccatcgactcctcagagctgctactggaagtcaacgagaacggcaagaggaggacgcccgacaggaccaaagagaacgggtcagaccgcgacccgctgcaccccgagcacctcagcaaacggccatgcaccctgaaccctgcccagcgctacagccccagcaacgggccaccgcagcccacaccgccgccgcactaccgcctggaggacatagccatggcccaccacttccgagatgcctaccgccacccagacccccgggagctacgagagcgccatcggccgcttgtggtgcctgggtcccggcaggaagaagtgatcgaccacaagctcacagagcgtgagtgggcagaagagtggaagcacctcaacaacctcctgaactgcatcatggacatggtggagaagacgcggcgctcgctcacggtgctgcgcaggtgccaggaggccgaccgcgaggagctcaaccactgggcgcggcgctacagcgacgccgaggacacaaagaagggccccgctcccgccgcggcccggccccgcagcagctccgccggtcccgaagggcctcagctagacgtgcctcgcgagttcctgccgaggaccctcaccggctacgtgcctgaggacatctggaggaaggctgaagaggccgtgaatgaggtgaagcggcaggccatgtcggagctgcagaaagccgtgtcggacgcggagcgcaaagcgcacgagctcatcaccacggagcgtgccaagatggagcgggccctggccgaggcgaagcggcaggcctccgaggacgccctgacggtcatcaaccagcaggaggactccagcgagagctgctggaactgcgggcggaaagccagtgagacgtgcagcggctgcaacgcggcacgctactgcgggtccttctgccagcatcgggactgggagaagcatcaccacgtgtgtggccagagcctgcagggccccacagccgtggtggccgacccggtgcctggaccgcccgaagccgcccacagcctgggcccctccctgcctgtgggtgctgccagccccagcgaagccggctctgcggggccttctcgccccggctcccccagcccacctggcccactggacaccgtgccccgctgaccccactggcccctggcctgccggacacagcaccgtgccaaccccacccagctccaggcccaccggatgctgtgcctggcctccgatgcctggcctgccagacactgcgccccgcctgacctgggggagccgaccaattagtcactgctgctactgcccctctccgaaagaagacacagaaccaacaaaaccgcattcagtgcacctgcctcagctacctaatgattccgcgcggagacctcctgacaacgtctcttcaagcatcctcagaagcctcgactgagctttagacagcagagcagatgccgcaggcgcggcggctctgcccacctctcttttcctctctgtctgtctctccccctctgtcttctctatcctctctctctctatgactatcacacactttctcttcaatgaaaaaatcgaattggtggcttatattttcagcaaagaattttggggggttttgtgtgttggcaaaagagctactcagaaatggacaaagaaaacgggggggttctccccctcctgattaaaaagggagaaagaaaactgcgattttatagctggagatctgaacccagctgtgcccctcccccaggggcgtgaggctgatcagcgaagacgggaggaaagatttcgatttctgactcaagatgcatttttggtttcagatttttttttcctgtaatgttaaactctttggctttaagtaaaaatccaaaaagtttttttaaaaaagcaaaggaagcatacttgtgaactaccttgctagctagccagccaaggataccggacacacctctgctccaaaggaaatccaaaaaagcaaacacaagaaatcaaaatccaaaatttgtttgtcactgccaaagtatttttttcactgtttcacttgctcttgggtttgtttggatgtgggtctttttctcttctgttctgattttgtttgtgggtgtcgggatatttgggtgcagagggtttgtgcccagttagaagcgacttttgttctcttctgcgtaggcgttggtgcgtccgccgcgtgtgcgtggtccgtgtgccgttgctccggcctgcgtctccatatgtgtaggaaaggacacgccgtctgtcctcacgccccctgtgacttttcatatttccgttttccacttgtggaaaaaaagtgctaaagttttcttcccagagagagcataattccgaaacaaaactgtgacaatcttttgggttgattctcgactgcttttcgagcatgcggagccagcaggcctccctgaaacactgcttctcggccagcccgtcctcctctacctctctcctctccgcgccctccgacctctctcggccccctcaccccagctccgacctctctcagccccatcgccccaactccaacctctcggccccatcgccccaccgcagctactcccctttcttccaaacttttgcagaaaaaacaaaaaaactacaaacaaaagcagccctctgcctcctccccagggaagaccctgaccgtgtacatagccctggtgctcctgcccagccacccctcagatgcgttcgcctctggccctggggtgtgtctcggtgacgttttctatcagacgtgctccctcccatcttcggccttggcacctttcttcaattttttaattggctcaggattcaagaagga

SEQ ID NO: 108427 - DNA, 357 bp, Homo sapiens
tgggaaagggaatcaaaacaaaggcagagaaggtaaaaataactttcatatgtggggctgcttcctatgtcgttgaattagaaaaaataaaatggcaatgtatttagcatagtagtgaaaactccagcaggtggtatagcaacaagggaaacctgagcttcattgactccttgcatctcacctacttctaaaaaagactcaagtcatctacatgtagacagcacagtgtgtagaactactcattcatcctgtaaacatatattgattgccaataatgatcccacggtagaggctgggataccaagatgggtgacccatgaccttccctcaaggaaaacagacaaaaacagctgtaat

SEQ ID NO: 108428 - DNA, 428 bp, Homo sapiens
gtgggccgcagagcactacgggacagagtgaggcacgctcagggaagtggggatgatgtggctgcagatacagcagatgtgggcgcagccccagttggcagatatggagggcacacagtccccttcccctggaggaaggcacgaaaagggacctcagatccctggtctcctctcagccaggctcctcaaaggggccatcaccattccaacccaatttcaacagaataaaaatgaggggagtggagcacttgggatatgtctaggctgcaccccaacacttaccatatgtctccctgatattccacctctgctcctccatctgctgaaggaggagcggaactcaccttccagcctccccagcacagggaacccaagctgtaccagtccacactccacgtgcccaggcaggctgcacgctatgcctccat

SEQ ID NO: 108429 - DNA, 399 bp, Homo sapiens
gagcatgtaacctagatccctcacatgtgcagttcacaatagggttcgtgctcctgtgagaatctaatgccgctgctgatctgacaggaggccgaactcaggaggtaatgctcattcgccctgttaggccaggttcttaataggccacagactagtactggtccatggccctgggtttgaggacccctgcctaagagggccaaaacaaaggtaagctatttctaggtcaatgataagtttcctcaaagtaaactgaaacttattgctgttatttcttattgtttccttatattaaaagcttactgtagaaaattctaatgcttataacatctaatcttccatctcataaatttgaaagcttcttccccacacagctgtgtatctgtccctctggtcttc

SEQ ID NO: 108430 - DNA, 270 bp, Homo sapiens
taagtaaactctctgcatttgccacggttctcatgtgaaacagaaccaagaggatgtatgtgtgtgtgtgtgtgtttgtgtgtataaataataaagaaatttattataagaaattggcccacacaattatggaggctggcaagtcccaagatctgcagggtgagtcagcaagctggaaatcaggagagccagtggggtagtttcaattcaaaagttggcagactcaaacccagtaagagccaatgtttcagttttagtctgaagacagaa

SEQ ID NO: 108431 - DNA, 298 bp, Homo sapiens
agtgccccattttttttttcttccaagtaactaagttctgtgacttggatgctgtgacttggactttagaggtgaagtcagatgacaaaagatttccatgcaaatcatgtttccagaatcatccctcatgtgcatgtatgtctagtggaatgcaaggcttactagagggaggttgaaatttggtgtgcgttaaaggaaatataaaaatcctgcttaatgatcctgttaggtttgtatacagattaactgttattacacaagaaatggtatgtccgtttggaatttctcatcctctgaa

SEQ ID NO: 108432 - DNA, 187 bp, Homo sapiens
ttgaagttgttcattcatttgtgtaacaattatttattgagcacatgccacactccaggcctgtgctaagttcagcagcacaacactgcacatggtttctgtcctcaaaaagttcaaggaaacagatgatccaccaagcaattcacaaaccataatctggagcctgaggttcccatctaaccatgcc

SEQ ID NO: 108433 - DNA, 318 bp, Homo sapiens
gactggaaattctagagttgaaaaacacagtaagtaaaatgaaaaattcaaaagaggaactcaacagtagatttgagttggaaaaagaatcagtgaatttgaagataaattgagattatgcaatttgaagcacagagatgaaaagaatgaggaaaaataaatggcatcagagaaatgtgggacaccattaagtgtaccaacatatgtataatgagagtcccagaaagatgagagaaagagaaaggagataaaaacctatacaaaggaaaaatggctgaaaatatcacaaatttgaccaaaaaaaaaaaaaacccaaac

SEQ ID NO: 108434 - DNA, 1474 bp, Homo sapiens
agttgatgctagctccccgccgggctcgcgccgcagaggccggtgaggcgccggcggccacgccgcggaaggcgcgggccgagcagagccgggcgttggagcccgcgcgcgcatggaggcgttgccggcagccccctgagggcagcggggagacaagacccggcgacctcgcgcatccctcgagccgccacgcgctctcgccaccgggcggcgacgggccgcggagccggcgcggccatggcgacgggcggccagcagaaggagaacacgctgcttcacctcttcgccggcgggtgtggaggcacagttggtgctattttcacttgtccactagaagtcattaagacacggttgcagtcttcaagattagctctccggacagtctactatcctcaggttcatctggggaccattagtggagctggaatggtgagaccaacatccgtgacacctggactctttcaggttctgaagtcgatcttggagaaagagggaccaaagtcactttttagaggcttgggtccaaatttggttggagttgcaccatcaagggctgtatactttgcatgttactccaaagccaaagagcaatttaatggcattttcgtgcctaacagcaatattgtgcatattttctcagctggctctgcagcttttatcacaaattccttaatgaatcctatatggatggttaaaacccgaatgcagctagaacagaaagtgaggggctctaagcagatgaatacactccagtgtgctcgttacgtttaccagaccgaaggcattcgtggcttctatagaggattaactgcctcgtatgctggaatttccgaaactataatctgctttgctatttatgaaagtttaaagaagtatctgaaagaagctccattagcctcttctgcaaatgggactgagaaaaattccacaagtttttttggacttatggcagctgctgctctttctaagggctgtgcctcctgcattgcttatccacacgaagtcataaggacgaggctccgggaagagggcaccaagtacaagtcttttgtccagacggcgcgcctggtgttccgggaagaaggctaccttgccttttatagaggactgtttgcccagcttatccggcagatcccaaatactgccattgtgttgtctacttatgagttaattgtgtacctgttagaagaccgtactcagtaacaggccggaaaattgtgctctagaagaataaaactgaaaaactctagagaattttttttccccattgatgtttagaaagtttgagactgaaacaggaaaggccataaaatatctggttcatatcacctgttggacatttccttttggattcatgctttctggaaggtttaaattcattaacgttaatagttaattataactttttttttaacttaagaggattcagggttaagcaccaactaaattaaatcatgctatttaatttaagtat

SEQ ID NO: 108435 - DNA, 367 bp, Homo sapiens
tgggattacaggtgtgagccaccgcacccggcctaaccttgacagttttaaagttgtgtgctgtggattcgttccccatttaatatgtggcgtaaagtaggtctttctctctctgcagaagtcataaggacgaggctccgggaagagggcaccaagtacaagtcttttgtccagacggcgcgcctggtgttccgggaagaaggctaccttgccttttatagaggactgtttgcccagcttatccggcagatcccaaatactgccattgtgttgtctacttatgagttaattgtgtacctgttagaagaccgtactcagtaacaggccggaaaattgtgctctagaagaataaaactgaaaaactcta

SEQ ID NO: 108436 - DNA, 1461 bp, Homo sapiens
ttatttcagtccacgggcctcgggtttaagttttacgattactatgcccgttgccttgccatttcccacgcagagccgggcgttggagcccgcgcgcgcatggaggcgttgccggcagccccctgagggcagcggggagacaagacccggcgacctcgcgcatccctcgagccgccacgcgctctcgccaccgggcggcgacgggccgcggagccggcgcggccatggcgacgggcggccagcagaaggagaacacgctgcttcacctcttcgccggcgggtgtggaggcacagttggtgctattttcacttgtccactagaagtcattaagacacggttgcagtcttcaagattagctctccggacagtctactatcctcaggttcatctggggaccattagtggagctggaatggtgagaccaacatccgtgacacctggactctttcaggttctgaagtcgatcttggagaaagagggaccaaagtcactttttagaggcttgggtccaaatttggttggagttgcaccatcaagggctgtatactttgcatgttactccaaagccaaagagcaatttaatggcattttcgtgcctaacagcaatattgtgcatattttctcagctggctctgcagcttttatcacaaattccttaatgaatcctatatggatggttaaaacccgaatgcagctagaacagaaagtgaggggctctaagcagatgaatacactccagtgtgctcgttacgtttaccagaccgaaggcattcgtggcttctatagaggattaactgcctcgtatgctggaatttccgaaactataatctgctttgctatttatgaaagtttaaagaagtatctgaaagaagctccattagcctcttctgcaaatgggactgagaaaaattccacaagtttttttggacttatggcagctgctgctctttctaagggctgtgcctcctgcattgcttatccacacgaagtcataaggacgaggctccgggaagagggcaccaagtacaagtcttttgtccagacggcgcgcctggtgttccgggaagaaggctaccttgccttttatagaggactgtttgcccagcttatccggcagatcccaaatactgccattgtgttgtctacttatgagttaattgtgtacctgttagaagaccgtactcagtaacaggccggaaaattgtgctctagaagaataaaactgaaaaactctagagaattttttttccccattgatgtttagaaagtttgagactgaaacaggaaaggccataaaatatctggttcatatcacctgttggacatttccttttggattcatgctttctggaaggtttaaattcattaacgttaatagttaattataactttttttttaacttaagaggattcagggttaagcaccaactaaattaaatcatgctatttaatttaagtat

SEQ ID NO: 108437 - DNA, 1620 bp, Homo sapiens
agttgatgctagctccccgccgggctcgcgccgcagaggccggtgaggcgccggcggccacgccgcggaaggcgcgggccgagcagagccgggcgttggagcccgcgcgcgcatggaggcgttgccggcagccccctgagggcagcggggagacaagacccggcgacctcgcgcatccctcgagccgccacgcgctctcgccaccgggcggcgacgggccgcggagccggcgcggccatggcgacgggcggccagcagaaggagaacacgctgcttcacctcttcgccggcgggtgtggaggcacagttggtgctattttcacttgtccactagaagtcattaagacacggttgcagtcttcaagattagctctccggacagtctactatcctcaggttcatctggggaccattagtggagctggaatggtgagaccaacatccgtgacacctggactctttcaggttctgaagtcgatcttggagaaagagggaccaaagtcactttttagaggcttgggtccaaatttggttggagttgcaccatcaagggctgtatactttgcatgttactccaaagccaaagagcaatttaatggcattttcgtgcctaacagcaatattgtgcatattttctcagctggctctgcagcttttatcacaaattccttaatgaatcctatatggatggttaaaacccgaatgcagctagaacagaaagtgaggggctctaagcagatgaatacactccagtgtgctcgttacgtttaccagaccgaaggcattcgtggcttctatagaggattaactgcctcgtatgctggaatttccgaaactataatctgctttgctatttatgaaagtttaaagaagtatctgaaagaagctccattagcctcttctgcaaatgggactgagaaaaattccacaagtttttttggacttatggcagctgctgctctttctaagggctgtgcctcctgcattgcttatccacacgaagtcataaggacgaggctccgggaagagggcaccaagtacaagtcttttgtccagacggcgcgcctggtgttccgggaagaaggctaccttgccttttatagaggactgtttgcccagcttatccggcagatcccaaatactgccattgtgttgtctacttatgagttaattgtgtacctgttagaagaccgtactcagtaacaggccggaaaattgtgctctagaagaataaaactgaaaaactctagagaattttttttccccattgatgtttagaaagtttgagactgaaacaggaaaggccataaaatatctggttcatatcacctgttggacatttccttttggattcatgctttctggaaggtttaaattcattaacgttaatagttaattataactttttttttaacttaagaggattcagggttaagcaccaactaaattaaatcatgctatttaatttaagtatcaaaatggttgtgtctcttttatgttcactatactatgaggcttagtatttagataactggctgaatgcgagaaatgtagggggaaaaacttggttaacggattagaattgcgtgaaggggaaagtgtgggggggggtcgcgatca

SEQ ID NO: 108438 - DNA, 1281 bp, Homo sapiens
gtaaaataaaatgtttcttgtccaagaaacgagccggcgcggccatggcgacgggcggccagcagaaggagaacacgctgcttcacctcttcgccggcgggtgtggaggcacagttggtgctattttcacttgtccactagaagtcattaagacacggttgcagtcttcaagattagctctccggacagtctactatcctcaggttcatctggggaccattagtggagctggaatggtgagaccaacatccgtgacacctggactctttcaggttctgaagtcgatcttggagaaagagggaccaaagtcactttttagaggcttgggtccaaatttggttggagttgcaccatcaagggctgtatactttgcatgttactccaaagccaaagagcaatttaatggcattttcgtgcctaacagcaatattgtgcatattttctcagctggctctgcagcttttatcacaaattccttaatgaatcctatatggatggttaaaacccgaatgcagctagaacagaaagtgaggggctctaagcagatgaatacactccagtgtgctcgttacgtttaccagaccgaaggcattcgtggcttctatagaggattaactgcctcgtatgctggaatttccgaaactataatctgctttgctatttatgaaagtttaaagaagtatctgaaagaagctccattagcctcttctgcaaatgggactgagaaaaattccacaagtttttttggacttatggcagctgctgctctttctaagggctgtgcctcctgcattgcttatccacacgaagtcataaggacgaggctccgggaagagggcaccaagtacaagtcttttgtccagacggcgcgcctggtgttccgggaagaaggctaccttgccttttatagaggactgtttgcccagcttatccggcagatcccaaatactgccattgtgttgtctacttatgagttaattgtgtacctgttagaagaccgtactcagtaacaggccggaaaattgtgctctagaagaataaaactgaaaaactctagagaattttttttccccattgatgtttagaaagtttgagactgaaacaggaaaggccataaaatatctggttcatatcacctgttggacatttccttttggattcatgctttctggaaggtttaaattcattaacgttaatagttaattataactttttttttaacttaagaggattcagggttaagcaccaactaaattaaatcatgctatttaatttaagtat

SEQ ID NO: 108439 - DNA, 1249 bp, Homo sapiens
agttgatgctagctccccgccgggctcgcgccgcagaggccggtgaggcgccggcggccacgccgcggaaggcgcgggccgagcagagccgggcgttggagcccgcgcgcgcatggaggcgttgccggcagccccctgagggcagcggggagacaagacccggcgacctcgcgcatccctcgagccgccacgcgctctcgccaccgggcggcgacgggccgcggagccggcgcggccatggcgacgggcggccagcagaaggagaacacgctgcttcacctcttcgccggcgggtgtggaggcacagttggtgctattttcacttgtccactagaagtcattaagacacggttgcagtcttcaagattagctctccggacagtctactatcctcaggttcatctggggaccattagtggagctggaatggtgagaccaacatccgtgacacctggactctttcaggttctgaagtcgatcttggagaaagagggaccaaagtcactttttagaggcttgggtccaaatttggttggagttgcaccatcaagggctgtatactttgcatgttactccaaagccaaagagcaatttaatggcattttcgtgcctaacagcaatattgtgcatattttctcagctggctctgcagcttttatcacaaattccttaatgaatcctatatggatggttaaaacccgaatgcagctagaacagaaagtgaggggctctaagcagatgaatacactccagtgtgctcgttacgtttaccagaccgaaggcattcgtggcttctatagaggattaactgcctcgtatgctggaatttccgaaactataatctgctttgctatttatgaaagtttaaagaagtatctgaaagaagctccattagcctcttctgcaaatgggactgagaaaaattccacaagtttttttggacttatggcagctgctgctctttctaagggctgtgcctcctgcattgcttatccacacgaagtcataaggacgaggctccgggaagagggcaccaagtacaagtcttttgtccagacggcgcgcctggtgttccgggaagaaggctaccttgccttttatagaggactgtttgcccagcttatccggcagatcccaaatactgccattgtgttgtctacttatgagttaattgtgtacctgttagaagaccgtactcagtaacaggccggaaaattgtgctctagaagaataaaactgaaaaactcta

SEQ ID NO: 108440 - DNA, 1407 bp, Homo sapiens
agttgatgctagctccccgccgggctcgcgccgcagaggccggtgaggcgccggcggccacgccgcggaaggcgcgggccgagcagagccgggcgttggagcccgcgcgcgcatggaggcgttgccggcagccccctgagggcagcggggagacaagacccggcgacctcgcgcatccctcgagccgccacgcgctctcgccaccgggcggcgacgggccgcggagccggcgcggccatggcgacgggcggccagcagaaggagaacacgctgcttcacctcttcgccggcgggtgtggaggcacagttggtgctattttcacttgtccactagaagtcattaagacacggttgcagtcttcaagattagctctccggacagtctactatcctcaggttcatctggggaccattagtggagctggaatggtgagaccaacatccgtgacacctggactctttcaggttctgaagtcgatcttggagaaagagggaccaaagtcactttttagaggcttgggtccaaatttggttggagttgcaccatcaagggctgtatactttgcatgttactccaaagccaaagagcaatttaatggcattttcgtgcctaacagcaatattgtgcatattttctcagctggctctgcagagtgaggggctctaagcagatgaatacactccagtgtgctcgttacgtttaccagaccgaaggcattcgtggcttctatagaggattaactgcctcgtatgctggaatttccgaaactataatctgctttgctatttatgaaagtttaaagaagtatctgaaagaagctccattagcctcttctgcaaatgggactgagaaaaattccacaagtttttttggacttatggcagctgctgctctttctaagggctgtgcctcctgcattgcttatccacacgaagtcataaggacgaggctccgggaagagggcaccaagtacaagtcttttgtccagacggcgcgcctggtgttccgggaagaaggctaccttgccttttatagaggactgtttgcccagcttatccggcagatcccaaatactgccattgtgttgtctacttatgagttaattgtgtacctgttagaagaccgtactcagtaacaggccggaaaattgtgctctagaagaataaaactgaaaaactctagagaattttttttccccattgatgtttagaaagtttgagactgaaacaggaaaggccataaaatatctggttcatatcacctgttggacatttccttttggattcatgctttctggaaggtttaaattcattaacgttaatagttaattataactttttttttaacttaagaggattcagggttaagcaccaactaaattaaatcatgctatttaatttaagtat

SEQ ID NO: 108441 - DNA, 1396 bp, Homo sapiens
agttgatgctagctccccgccgggctcgcgccgcagaggccggtgaggcgccggcggccacgccgcggaaggcgcgggccgagcagagccgggcgttggagcccgcgcgcgcatggaggcgttgccggcagccccctgagggcagcggggagacaagacccggcgacctcgcgcatccctcgagccgccacgcgctctcgccaccgggcggcgacgggccgcggagccggcgcggccatggcgacgggcggccagcagaaggagaacacgctgcttcacctcttcgccggcgggtgtggaggcacagttggtgctattttcacttgtccactagaagtcattaagacacggttgcagtcttcaagattagctctccggacagtctactatcctcaggttcatctggggaccattagtggagctggaatggtgagaccaacatccgtgacacctggactctttcaggttctgaaggctgtatactttgcatgttactccaaagccaaagagcaatttaatggcattttcgtgcctaacagcaatattgtgcatattttctcagctggctctgcagcttttatcacaaattccttaatgaatcctatatggatggttaaaacccgaatgcagctagaacagaaagtgaggggctctaagcagatgaatacactccagtgtgctcgttacgtttaccagaccgaaggcattcgtggcttctatagaggattaactgcctcgtatgctggaatttccgaaactataatctgctttgctatttatgaaagtttaaagaagtatctgaaagaagctccattagcctcttctgcaaatgggactgagaaaaattccacaagtttttttggacttatggcagctgctgctctttctaagggctgtgcctcctgcattgcttatccacacgaagtcataaggacgaggctccgggaagagggcaccaagtacaagtcttttgtccagacggcgcgcctggtgttccgggaagaaggctaccttgccttttatagaggactgtttgcccagcttatccggcagatcccaaatactgccattgtgttgtctacttatgagttaattgtgtacctgttagaagaccgtactcagtaacaggccggaaaattgtgctctagaagaataaaactgaaaaactctagagaattttttttccccattgatgtttagaaagtttgagactgaaacaggaaaggccataaaatatctggttcatatcacctgttggacatttccttttggattcatgctttctggaaggtttaaattcattaacgttaatagttaattataactttttttttaacttaagaggattcagggttaagcaccaactaaattaaatcatgctatttaatttaagtat

SEQ ID NO: 108442 - DNA, 756 bp, Homo sapiens
tcgagctggccaccgtacattcgtgtccactccagtgtgctcgttacgtttaccagaccgaaggcattcgtggcttctatagaggattaactgcctcgtatgctggaatttccgaaactataatctgctttgctatttatgaaagtttaaagaagtatctgaaagaagctccattagcctcttctgcaaatgggactgagaaaaattccacaagtttttttggacttatggcagctgctgctctttctaagggctgtgcctcctgcattgcttatccacacgaagtcataaggacgaggctccgggaagagggcaccaagtacaagtcttttgtccagacggcgcgcctggtgttccgggaagaaggctaccttgccttttatagaggactgtttgcccagcttatccggcagatcccaaatactgccattgtgttgtctacttatgagttaattgtgtacctgttagaagaccgtactcagtaacaggccggaaaattgtgctctagaagaataaaactgaaaaactctagagaattttttttccccattgatgtttagaaagtttgagactgaaacaggaaaggccataaaatatctggttcatatcacctgttggacatttccttttggattcatgctttctggaaggtttaaattcattaacgttaatagttaattataactttttttttaacttaagaggattcagggttaagcaccaactaaattaaatcatgctatttaatttaagtat

SEQ ID NO: 108443 - DNA, 387 bp, Homo sapiens
cttatgagttaattgtgtacctgttagaagaccgtactcagtaacaggccggaaaattgtgctctagaagaataaaactgaaaaactctaaaaaaaaaaaaaaaaaaaaaagttgttgcttagggcttagggatatagtactgggaatatttcagtgaggaggttggaaaccagaaagtattgtctgctatgacaagagtgttgggtatgtgaaagtgtgcctgtactacatatgctcactttgaacttacttaactgttattaccttgaataatgagttttactttatagcacttaaagacacctttctccatcagatacaggttcttggtctttgactgaagatataaaaatcatataaatgattaaagatataaaaagagataa

SEQ ID NO: 108444 - DNA, 2199 bp, Homo sapiens
aaaggagggacccgcgcgctgctggaggcgatccgcgtgcacccggacgtgcgggcggtgggcgtagagccgcacttcttcgacaggaactacgaaaaggggttggagtggtacagaaatgtgatgcccaagactttggatgggcaaataaccatggagaagactccaagttactttgtgacaaatgaggctcccaagcgcattcactccatggccaaggacatcaaactgattgtggtggtgagaaaccccgtgaccagggccatctctgactacacgcagacactgtcaaagaaacccgagatccccacctttgaggtgctggccttcaaaaaccggaccctcgggctgatcgatgcttcctggagtgccattcgaatagggatctatgcgctgcatctggaaaactggctccagtatttccccctctcccagatcctctttgtcagtggtgagcgactcattgtggaccccgccggggaaatggccaaagtacaggattttctaggcctcaaacgtgttgtgactgagaagcatttctatttcaacaaaaccaaggggttcccttgcctaaagaagccagaagacagcagtgccccgaggtgcttaggcaagagcaaaggtcggactcatcctcgcattgacccagatgtcatccacagactgaggaaattctacaaacccttcaacttgatgttttaccaaatgactggtcaagattttcagtgggaacaggaagagggtgataaatgaggctagagaggcagaggaaggctagtcaataagctaaggaggctccttgcctgagtccttgaataccccagcttctgcagcttcacttgctggagtgccaagtagatctcctcctccttcatgcagccaggattgcctccagtgctgttagcttaggcaaacaggtggatcccatggcatccccatggaggaaccaggcccatctgggcagcagcatctggttgaccagatggccaccagaacccactgttcattcttatcttctgctagttaatatagcctgaagacagaggataaatagttgtcaatgtcagagacagtgctattaatgtatatgtgagcgacaaaaaaggtctgctttataggggttctcactctagcttggggagccagggttctagccctgtatctgtcatgggcacctgctgtctaaacctctgcttgggcttctccccagaatgcactttgtggctgagtgctccaggactcctagggagcaaggtcctccctctaaggtgtttctagtcttctctttaaaggtctcatcccacaacccctgacttcctccctccccacatcatgaaggcagaggcatgcacattcctcactgaaaaagaaaacacacacccacccacacacacacacacagaagaaaatgaaagctgacacacctcgaagccttctttccaagagccctctaaatggggttgggtctcactcttcatgagtatcctgggttgtgcagaagcttagcatatgcccttgtgttcggatcaggcccacagggctgctcaaagagtagagtaattgtaaccgaggtcagagctctggggttggcagagatgagtggccatatctgggggtaaaagaagaaatcctgtcctcttggtgggaggttaccttacctgaagaccatctctcccaagcactgtagttctgagcatgtttttggggtggactctgtcccctagggtccctagaagggcaaagaccagagagttgacaagtctgttattaggaataatccttagccatgtaatggagaaaggagcagtcagcattcttccaatttgccccaccaccacctcctcgggcttcattttctctatttagagatggcagagagtgaggtagtggcgagaaagctgactccattcatcagatccagtttatgagggttgggggtgagcaagggctgtctgcagaaacccccatcaagagctgctgaatgaagtgtcccttcccatcagtttgattcaattaaaatgcatcatttgacataaagcacttgttcacagatctccaaaaccaggaattgttctagtaaaactggaaatttgtatgagtggggggagttaaatctgttcagctgttattaaactgtcatttctcccgctaaatgaaaaccgtgttgttataaagcttaatgcaacctgaaaaaaaaaa

SEQ ID NO: 108445 - DNA, 2259 bp, Homo sapiens
gctggatctgcattaaatgtcgaaaggaaggcggagaggggtgagacaagaggtgggaggtgaggcaggtgggagcctgaccctggagaaccccgcaggtggtgcttctgactttcagtttcagctttgacaccagcatggagctgactgtttgtcctttgctctggtatttagagaaatgtgatgcccaagactttggatgggcaaataaccatggagaagactccaagttactttgtgacaaatgaggctcccaagcgcattcactccatggccaaggacatcaaactgattgtggtggtgagaaaccccgtgaccagggccatctctgactacacgcagacactgtcaaagaaacccgagatccccacctttgaggtgctggccttcaaaaaccggaccctcgggctgatcgatgcttcctggagtgccattcgaatagggatctatgcgctgcatctggaaaactggctccagtatttccccctctcccagatcctctttgtcagtggtgagcgactcattgtggaccccgccggggaaatggccaaagtacaggattttctaggcctcaaacgtgttgtgactgagaagcatttctatttcaacaaaaccaaggggttcccttgcctaaagaagccagaagacagcagtgccccgaggtgcttaggcaagagcaaaggtcggactcatcctcgcattgacccagatgtcatccacagactgaggaaattctacaaacccttcaacttgatgttttaccaaatgactggtcaagattttcagtgggaacaggaagagggtgataaatgaggctagagaggcagaggaaggctagtcaataagctaaggaggctccttgcctgagtccttgaataccccagcttctgcagcttcacttgctggagtgccaagtagatctcctcctccttcatgcagccaggattgcctccagtgctgttagcttaggcaaacaggtggatcccatggcatccccatggaggaaccaggcccatctgggcagcagcatctggttgaccagatggccaccagaacccactgttcattcttatcttctgctagttaatatagcctgaagacagaggataaatagttgtcaatgtcagagacagtgctattaatgtatatgtgagcgacaaaaaaggtctgctttataggggttctcactctagcttggggagccagggttctagccctgtatctgtcatgggcacctgctgtctaaacctctgcttgggcttctccccagaatgcactttgtggctgagtgctccaggactcctagggagcaaggtcctccctctaaggtgtttctagtcttctctttaaaggtctcatcccacaacccctgacttcctccctccccacatcatgaaggcagaggcatgcacattcctcactgaaaaagaaaacacacacccacccacacacacacacacagaagaaaatgaaagctgacacacctcgaagccttctttccaagagccctctaaatggggttgggtctcactcttcatgagtatcctgggttgtgcagaagcttagcatatgcccttgtgttcggatcaggcccacagggctgctcaaagagtagagtaattgtaaccgaggtcagagctctggggttggcagagatgagtggccatatctgggggtaaaagaagaaatcctgtcctcttggtgggaggttaccttacctgaagaccatctctcccaagcactgtagttctgagcatgtttttggggtggactctgtcccctagggtccctagaagggcaaagaccagagagttgacaagtctgttattaggaataatccttagccatgtaatggagaaaggagcagtcagcattcttccaatttgccccaccaccacctcctcgggcttcattttctctatttagagatggcagagagtgaggtagtggcgagaaagctgactccattcatcagatccagtttatgagggttgggggtgagcaagggctgtctgcagaaacccccatcaagagctgctgaatgaagtgtcccttcccatcagtttgattcaattaaaatgcatcatttgacataaagcacttgttcacagatctccaaaaccaggaattgttctagtaaaactggaaatttgtatgagtggggggagttaaatctgttcagctgttattaaactgtcatttctcccgctaaatgaaaaccgtgttgttataaagcttaatgcaacctgaaaaaaaaaa

SEQ ID NO: 108446 - DNA, 843 bp, Homo sapiens
tgagacagggtctcactctgtcgcccaggctggagtgcagtggtatgatctcagctcactgcaaactccgcctccagagttcaagctattctcctgcctcagcctcccaagcagctgggatcaccggcatcggccaccatgcccagccaatttttgttatttttaatagagacagggttttaccatcttggccagactggtctcaaactcctgacctcaagtgatccacccgcctcggcctcccaaaatggtgggattacaggcgtgagcctccatgcctggtccaaaatgcttcttaaactattaccatcatcgttattccactcttccattcctctctgctttaaaatgtctattaacaacttacagagaaaaactctagaagactggttttagctccataccctgtcactgcctatgtatgccttctctaccaggcaccatttcacttttcactatctgactcactcaaaggctacctcctttggaaaaatcttccccagcattgtcattctcatctggaatcctatctaacttttaacagagtactacatgaactcacgtgtcaatcctttccattagtctgcaagatcaacaagatgaatggggtttcattcatctttgtattctccaaggcctagcataagctttggaaccaaattaatctcggttcaaatctcagttatgttaaaaaacagtagttgatcctatttaaatatggtttttatggctttctgactaaagcaaaagaaaaaagaaaactggttttctgacttaaaaaaaaagaaatatcatttttacatttagatgtggatgtctaatatttttacattttacatgtaa

SEQ ID NO: 108447 - DNA, 365 bp, Homo sapiens
aggttgatcaataatggtcttattggccttttttaaaggctgctatttgatttcccaggcaggcttcccttctgaaaatgacagccacctggccacagggctgtgggagtgagctgcgtcctgaccatagtgagtgggtggggacgctgacagacacgtttcctttttgtgagttttcacaagtacgcacaagtaaggacaggcaagctgctggaactcttttggttgatgaagaagaaagaaaggaattgcttaagagcttgctttgagagatcttactgctgaactaagctactcttctgttttgctttttctcagatgctaagtaaaagacagtaaagaagaaaataattatatgttttgtg

SEQ ID NO: 108448 - DNA, 637 bp, Homo sapiens
catcagagccctttgcagtctgctcccaaattgcatgtctagccttctccctcaccatagccctgtgatactctgcccttgtgcagtatcacattccctgcagtcattgaggaggctgtgcttttgggcacctctttagttctaccaatactgttcctggaatctcctttctcttaccagctgtcctcacttgtatccattgaaatcctattattctctcattttctaatgctcagttcaagtgctattccttttcattgaattgagttgaactaaagaattatggaccaggcgcggtggctcacgcctgtaatcccagcactttgggaggccgaggccggtggatcacgaggtcaggagatcgagaccatcctggctaacatggtgaaaccccgtctccactaaaaatacaaaaaattagctgggcgtggtggtgggcgcctgtagtcccagctaaaaatacaaaaattatctggacatggtggcacttgcctatagtcccagctactcgggagactgaggcaggagaatggcatgaacccgagaggcggagcttgcagtgaactgagattgcaccaatgcactccagcctgggggacaaagcgagactccgtctcaaaaaaaaaaaaaaaaaaaa

SEQ ID NO: 108449 - DNA, 711 bp, Homo sapiens
aatttatttgactcaattgttttttatttttcatttaaagaaatttaatagcatagggggctttccagtgaaatttaatagcatagtggtcttccagtgaagaccagaaaacctgctagataaattctaagagagctgtaacactgactcagtagttgaaaagcatatatcttatgtatgcaagttatgaggcataatagtaaaatgaacatctgtgatgtaccactacccaatattagaactagaatatcactaatgtagctgcatctgtctgtgtgttttttctcatcttgtgtcaccctcatattggtaaccacctctctggattttttgttttattatccccctaactttttttaattataatagatttcattttttagatcagtattaggtttacagaaaaattgaatggaaggcatagagagtttccatatactctcttttccccaaaacacagttttccctgttattcacaaatgacattagtgtgatatatgttacagtgtatgaactaatattgatatattgtcatgcagagtctatagtttacattaaggttcattctttgagttgtatattctgtgggttttgacaagtgtataatgacatgtatctagttgtagaatcacatgctataatttttctgccctaaaaattccctgtgccacagctatttatcactcattcccttccagtgaacacctggca

SEQ ID NO: 108450 - DNA, 504 bp, Homo sapiens
aaagataggatgaatagaacccaaaagcaagatgatagacttagcaccaaccatatcaataattacattagacataaatcgaccagatactccagttgaaagacagagatcatactggatttaaaaaaaaccaagacccaaccatgctgtttcaagagatgcattttatgatattttattactttaaaaatttttaaataattttaaaattgtagaaaagttgtgagaataagaatagtacaaagagccatatacctctttatttggattcagctgttcttaacgttttaccacttttttcctgttttctctctgtatatatggacacacacatgcatttttctttgaaaaatgggcagcaagttatctactctgctgtctatattcttgttttgttaactgacccagtaatgttctatatagcagtatttttgcccctccagtagagaaaccagtttagaatcaggtgtttcatttagttgtctttaaacttgaacatttata

SEQ ID NO: 108451 - DNA, 373 bp, Homo sapiens
ccctcttgtacatctcagatgggggggcagaaaagattaagcttcctgaactaacgttctgatcctgtcttttacacacctcccctggatctctagaatgaaattcaaattccttaggctgacagtcaaagccgatcacaataccgcccttccctcgctatcaacaatatttgccggtgcccttcccttccatcccctcatctatacctccctctccacaattcccttccagagtgtaaatgaggatccactactcccatgtgcatcagcgtgtctgtccccacccccatgactctgctccaccctgaatcccacccacttggtcccctgtcctcaccttacccacccttttatggcccaatttaaacagcac

SEQ ID NO: 108452 - DNA, 1712 bp, Homo sapiens
  misc_feature (46)..(46): n is a, c, g, or t
gcaggtacgaggccggtgttaatcggccgaggatgcagcccatgcnctgacaatgaaaacaacattgcctccaaccagtcccgatcgccacctgctgttgtagaagagaagtggaaacctcaggcccagaggaacagtgccaataacaccactaccagtggtttaacacccaacagcatgatccccgaaaaggagcggcagaacatcgcagagcggctgttgagggtcatgtgtgccgacctgggtgcactgagcgtggtcagcgggaaggagttcctgaagttggcccagaccttagtagacagtggtgcccgctatggggccttctcggtcactgaaatcctgggcaacttcaacacgctggcgctgaagcacctgccacgcatgtacaaccaggtgaaggtgaaagtgacctgtgccttgggcagcaatgcctgcctaggcatcggtgtcacctgccactcccagagtgttggccctgactcctgctacatcctcacagcctaccaggccgagggcaaccacatcaagagctatgtgcttggtgtgaagggtgcggacattcgcgacagcggtgaccttgtgcaccactgggtgcagaacgtgctgtcggagttcgtgatgtcggagatcaggacagtgtacgtgacggattgccgggtgagcacgtccgccttctccaaggccggcatgtgccttcgctgctcagcctgtgccttgaactcggtggtgcagagcgtgctgagcaagcggacactgcaggcccgcagcatgcacgaggtcatcgagctgctcaacgtgtgcgaggacctggcgggctccacgggcctggccaaggagaccttcgggtcgctggaggagacgtctccaccaccctgctggaactcggtgacggactcactgttgctggtgcatgagcgctatgagcagatctgcgagttctacagccgggccaagaagatgaacctcatccagagcctcaacaagcacctgctcagcaacctggcggccatcctgacgccggtgaagcaggcagtcatcgagctgagcaacgagagccagcccaccctgcagctggtgctgcccacctacgtcaggctggagaagctgttcacggccaaggccaacgacgcaggcactgtcagcaagctctgccacctcttcctggaggcgctcaaggagaacttcaaggtgcacccggcccacaaggtggccatgatcctggacccgcagcagaagctgcggcctgtgccaccctaccagcacgaggagatcatcggcaaggtctgtgagctcatcaacgaggtgaaggagtcctgggccgaggaggccgacttcgagcccgctgccaagaagccccgctctgctgccgtcgagaaccccgcagctcaggaagatgatcggctaggcaaaaatgaagtgtacgattacctgcaggagcccctcttccaggctacccctgatctcttccagtactggtcgtgcgttacccaaaagcacacaaaactcgccaagctcgccttctggctcctggcggttccggccgtgggcgccagaagcgggtgtgtaaatatgtgtgaacaagcgcttctaatcaaacggaggcggctgctcagtccagaagatatgaataaactcatgtttctgaaatccaacatgctttaagacttgacttcgggggaaaaaaaaagaaaaagagaagataacattag

SEQ ID NO: 108453 - DNA, 1718 bp, Homo sapiens
gtccagttccagttctacaacaacctgttggagcacatgcagtcccatgcagctgacaatgaaaacaacattgcctccaaccagtcccgatcgccacctgctgttgtagaagagaagtggaaacctcaggcccagaggaacagtgccaataacaccactaccagtggtttaacacccaacagcatgatccccgaaaaggagcggcagaacatcgcagagcggctgttgagggtcatgtgtgccgacctgggtgcactgagcgtggtcagcgggaaggagttcctgaagttggcccagaccttagtagacagtggtgcccgctatggggccttctcggtcactgaaatcctgggcaacttcaacacgctggcgctgaagcacctgccacgcatgtacaaccaggtgaaggtgaaagtgacctgtgccttgggcagcaatgcctgcctaggcatcggtgtcacctgccactcccagagtgttggccctgactcctgctacatcctcacagcctaccaggccgagggcaaccacatcaagagctatgtgcttggtgtgaagggtgcggacattcgcgacagcggtgaccttgtgcaccactgggtgcagaacgtgctgtcggagttcgtgatgtcggagatcaggacagtgtacgtgacggattgccgggtgagcacgtccgccttctccaaggccggcatgtgccttcgctgctcagcctgtgccttgaactcggtggtgcagagcgtgctgagcaagcggacactgcaggcccgcagcatgcacgaggtcatcgagctgctcaacgtgtgcgaggacctggcgggctccacgggcctggccaaggagaccttcgggtcgctggaggagacgtctccaccaccctgctggaactcggtgacggactcactgttgctggtgcatgagcgctatgagcagatctgcgagttctacagccgggccaagaagatgaacctcatccagagcctcaacaagcacctgctcagcaacctggcggccatcctgacgccggtgaagcaggcagtcatcgagctgagcaacgagagccagcccaccctgcagctggtgctgcccacctacgtcaggctggagaagctgttcacggccaaggccaacgacgcaggcactgtcagcaagctctgccacctcttcctggaggcgctcaaggagaacttcaaggtgcacccggcccacaaggtggccatgatcctggacccgcagcagaagctgcggcctgtgccaccctaccagcacgaggagatcatcggcaaggtctgtgagctcatcaacgaggtgaaggagtcctgggccgaggaggccgacttcgagcccgctgccaagaagccccgctctgctgccgtcgagaaccccgcagctcaggaagatgatcggctaggcaaaaatgaagtgtacgattacctgcaggagcccctcttccaggctacccctgatctcttccagtactggtcgtgcgttacccaaaagcacacaaaactcgccaagctcgccttctggctcctggcggttccggccgtgggcgccagaagcgggtgtgtaaatatgtgtgaacaagcgcttctaatcaaacggaggcggctgctcagtccagaagatatgaataaactcatgtttctgaaatccaacatgctttaagacttgacttcgggggaaaaaaaaagaaaaagagaagataacattag

SEQ ID NO: 108454 - DNA, 1121 bp, Homo sapiens
tggtgccgtgccgccccgttcagagcctcggcgtagcagccctgcggggcgggcgagcccagcttggtgccaatgcccgcgatgctgttgagcgtggcgatggagacggcgccgatgcagtggttggtgtaggtcttggagagcttggccgccttggagagcatctgcatccgagtgcctagcaagttcttgccgatggctttgttctcgtaccaggtcacatcgccctcgctgcagtggtcccggggccgctggaagaacgccttgcagagagggttgcgtttcgacaggtacttgacgaagctggcgtaggggcagaactcggtgcccgtctcatacatgcggggcaagttctcctcgtcgctgctctcggcgcgcttcttgctccacgacgacgagcgcgacttgtggtagggcccgagggacttgaagtagacgaacttgcgaccgtcctcgtccatggccagcccaaaagagtcctcctccaactcacgctggttctcgcgccgcgggtacagaagtacatgcacgtctcgaaccagaccttgttgagcagcccgaagggcgtgttggtgctgaagacgctggaggtgtacagcttgcgcaggtcggcgcgcgtgatggcttgcttctgcaccaccggcccggcgccctgctcctcgagcttgcggatgaccgcggccagcgtcaggttggcgctgcgcagctcggggtccttggtgaggtcgagcgtgcggcagtacgggggctcattgaggtagcggttgagggagctgcggatgctgatgagcgacgacttgctgtagagctggccgcttttggagcgggcctcggcatagaaggagcgcagcacgcggcacagcgcccccttgtccatggtctcgaagtccgggctctgcgccttctcgctcaggtactcccggaagatgcgcacggcgtagcgggtggccagccgggtgttctcgctcagccgggcccgctcggggcgctgcagcacgtcggggtccagctcggagccgtccccgggcggcccaccgcgggcccggggcgccagcagtcgcggcggcgcctcgggctccagcgcggcgctctggtccatattgatcatatggaccggctcg

SEQ ID NO: 108455 - DNA, 352 bp, Homo sapiens
ctctttgtgctttgcagggggaacctggggtatgcaaaatgtgtctatttctgtttgttgtatacacatttccttccttggccttgcatggcctgtttatttttaaaagtgcaaacttgcaaccccaaacaagctggggccctgaggccgtcaacccctccagtctcccctgtgacccgcagtctgcgtcctgttcccattttcattcctcaagtgcatatatttttaatatcttgtagttaccctgctgtatactgtcatcttagggaccttttaaacaataccagtatgagcgggacctaccctgctgctcagtgaccccaggcagtgtgtcctaaggtggtgtgtcctg

SEQ ID NO: 108456 - DNA, 703 bp, Homo sapiens
ggacgggtccctggtcgtgcctgtcagagaggctggcggcagtggtggctctcccggctgggttgtcagtcagtgagaggagggggaagatggctcaccgggacccgttctgctaggaagaaggggagcaggtggtgctgctactcgggaggaagcagagcagcctccgtcgctgtcgctgagagcctcacgagtcgaggtcctgcaggtggagctccggcagccgccctggttgaaggtttagaacagatgtggaaaaatgtttacttcagagaaaggggttgtggaggaatggttgtcagagtttaagacattaccagaaacatctttaccaaattatgccacaaatttgaaagacaagagttctttagtttcatctctctataaagttatccaggagccacaaagtgagttgctagaacctgtctgtcaccagctctttgaattctatcgcagtggagaggagcagttgcttcaatttacgctgcaatttctcccagaactaatttggtgctaccttgcagtctcagccagcagaaatgtgcatagcagtggatgcattgaagctcttcttctaggggtttacaatttggtttgtatttaatggagttaacaaaatcttttttgacaaaatcaaatatataacctgtgcaactgcttttcattttaataaagctagtgtttgttttttcatacaaaaaat

SEQ ID NO: 108457 - DNA, 283 bp, Homo sapiens
ccagtttggagggcagtggaactggggtgaccaacaatgaggagaggatgggaagatatttgctcaactttataccagtgaatctttctctagttggctaacccagtggctatataaggggtgtataacctttgattagttaatgaagaaaataaaacatattttcttgtctcatgagcttttctctaggatagctaaaatagtatttctttaatcagctaattacttttctctgtccttatgtgacacataattatgtgcacttgcatgatcatgaaccaca

SEQ ID NO: 108458 - DNA, 891 bp, Homo sapiens
ggacgggtccctggtcgtgcctgtcagagaggctggcggcagtggtggctctcccggctgggttgtcagtcagtgagaggagggggaagatggctcaccgggacccgttctgctaggaagaaggggagcaggtggtgctgctactcgggaggaagcagagcagcctccgtcgctgtcgctgagagcctcacgagtcgaggtcctgcaggtggagctccggcagccgccctggttgaaggtttagaacagatgtggaaaaatgtttacttcagagaaaggggttgtggaggaatggttgtcagagtttaagtattaggttactcttgatcaaatgacggaaatggaatgttgcctcgagatcttttgtgtcatacttttgaaatattgaagaatgccttaatctcgtctttatgtaagcagttgcagtaaaacctttttttcccccgtcgggagaattgtgaaaggtttccaaatagtccacatttgcttgcccttctgacattaccagaaacatctttaccaaattatgccacaaatttgaaagacaagagttctttagtttcatctctctataaagttatccaggagccacaaagtgagttgctagaacctgtctgtcaccagctctttgaattctatcgcagtggagaggagcagttgcttcaatttacgctgcaatttctcccagaactaatttggtgctaccttgcagtctcagccagcagaaatgtgcatagcagtggatgcattgaagctcttcttctaggggtttacaatttggtttgtatttaatggagttaacaaaatcttttttgacaaaatcaaatatataacctgtgcaactgcttttcattttaataaagctagtgtttgttttttcatacaaaaaat

SEQ ID NO: 108459 - DNA, 641 bp, Homo sapiens
taaataaaatatattcaaaacgttaacatttttctatgttaattttcaggttgaaggtttagaacagatgtggaaaaatgtttacttcagagaaaggggttgtggaggaatggttgtcagagtttaaggtaatatttactgttctactatagtaattatattccaaggaagttttgtctggcgtttaaattccagtgatttttgtattttatatgactgaaaggctaaatatctgtggaagtattttctatcaaatctcaatagagagttatttacacatagtaatcttttctaggaaattgattccttttttcccccaagtggttcaaagagtttattcatttgtttattttctttctttcatggcaataccacaaagtagttaaagtctctgaatgttgatgtcattctccagcgaccatcagtgattcattgtcaaaatgtttcttccagtttggagggcagtggaactggggtgaccaacaatgaggagaggatgggaagatatttgctcaactttataccagtgaatctttctctagttggctaacccagtggctatataaggggtgtataacctttgattagttaatgaagaaaataaaacatattttcttgtctcatgagcttttctctaggat

SEQ ID NO: 108460 - DNA, 1062 bp, Homo sapiens
ggacgggtccctggtcgtgcctgtcagagaggctggcggcagtggtggctctcccggctgggttgtcagtcagtgagaggagggggaagatggctcaccgggacccgttctgctaggaagaaggggagcaggtggtgctgctactcgggaggaagcagagcagcctccgtcgctgtcgctgagagcctcacgagtcgaggtcctgcaggtggagctccggcagccgccctggttgaaggtttagaacagatgtggaaaaatgtttacttcagagaaaggggttgtggaggaatggttgtcagagtttaagacattaccagaaacatctttaccaaattatgccacaaatttgaaagacaagagttctttagtttcatctctctataaagttatccaggagccacaaagtgagttgctagaacctgtctgtcaccagctctttgaattctatcgcagtggagaggagcagttgcttcaatttacgctgcaatttctcccagaactaatttggtgctaccttgcagtctcagccagcagaaatgtgcatagcagtggatgcattgaagctcttcttctaggggtttacaatttggaaatagttgacaaacagggacataccaaagtattgagttttacgattccatctttatccaaaccatctgtataccatgaaccttccagcattgggtccatggctctgactgagagtgcactatcccagcatggtttgtcaaaagtggtatacagtggacctcatcctcaaagggagatgctgacagcacagaatcggtttgaagtgttgacattccttttgttgtgttacaatgctgccttaacttacatgcccagtgtttctcttcagtcactgtgtcaaatttgttcaagaatctgtgtttgtggatatcctcgacaacatgtaagacaatataaaggtataagtagcaggataccagtttcttcaggattcatggtgcaatgttagacagggatttatttgccttttatatggaaatgggtcttactcaaaagcatggtggttttttacgacccgtaaattttcaa

SEQ ID NO: 108461 - DNA, 547 bp, Homo sapiens
gccgccacggaaatggggtctccatcaggaatagtagcctggagagttttcagatgacagtgccccctgtccccaaggtgggatcatggcatcatagacaagcaatgtgtggttccggtgccagggatggaagtttctggagcactcactgccctgccccctaatctgtgccccagcttccagaatcatctcctaccactccatcctccacggaaccccatgagctcccaaagcccagctgcggtctcgtcatgtacccacttaaaacgcaatagctcccaaggccccctgggagaagaccaagccccactgtgggacacggacaagccgtcctcagtatccacgtagaatctttttttaaaaagggggcggctgggcgcggtggctcacgcctgtaatcccagcactttgggagactgaggtggacagatcgcgaggtcaggagattgagaccatcctggataacacggtgaaaccccgtctctaccaaaaatacaaaaaattagccgggcgtggtggtaggcgcctgtagtcccagctacttggg

SEQ ID NO: 108462 - DNA, 358 bp, Homo sapiens
gggcgaatcacaatgtcaggagatcgagaccatcctggctaacacggtgaaaccctgtctctactaaaaatacaaaaaattagccaggcgtggtggcaggcacctgtagtcccagctgctcgggaggctgaggcaggagaatggcgtgaacccaggaggtggagcttgcagtgagccgagattgcaccactgcactccagcctgggtgacagagcgagacttcgtctcaaaaaaaaaaaaaaaaaaaaaaaggtactcatactggtaatacatactagaaaatatgtattgaacccaaatgtatacccttatggaattacaggtttaaaaatatttccagtgccctttctggtatggg

SEQ ID NO: 108463 - DNA, 166 bp, Homo sapiens
tgtttattcctgtgatccattaacatgagacatctttccatttatttatatcttttaatttttattccaacagtgttttgtagttttcagtgtatgagtctttcattagatttgttaaattaaatgcttagtattttattctctttggtactattataaatataat

SEQ ID NO: 108464 - DNA, 137 bp, Homo sapiens
acctcagccttccaagtagctgagaccgcaggtgtgtgccaccaagcccagctaatttttgtattttttgtagaaagagcactcactctgctgctcaggctggtctcagattcctggcctcaagcagtcctcccatc

SEQ ID NO: 108465 - DNA, 144 bp, Homo sapiens
ctgtgggagtgacctcagacctgatcttgagtagccactgaaggaggggagtgatatgattggaaagtcaactgagtccaaccacagttgggaaaacattttttgactcgtgtcattggaaccaaatagaatcaattaatagta

SEQ ID NO: 108466 - DNA, 884 bp, Homo sapiens
  misc_feature (18)..(18): n is a, c, g, or t
  misc_feature (60)..(60): n is a, c, g, or t
catcttaatacgactcantatagggctcgagcggccgcccgggcaggtttttaagcctcntggtttgtgttactttgttgtggcagccccagggactctgagttgatattctgtcaaatacacagcagaaattcgcctttcctgatcacatcacactgattccgggaccaagcaggatgtcacaggtgggggtcaagccaggcttgagaagatgggccgggctgggcctcagcctctcatgggcttctgtgggtcatggccttggcgttcctccagccctggctaatgcagtcttctgtggaggaatggcatcccaggccttcacccctccaggtcagccgtggctgccggccaagatggccgcgtgggcagcctcacattccttctcggcttttggccccatgtcctcggcactcaggtctgcagttcagcccaagtgttgagactcaggtatgcagctcagggcggccttaattaaccctcccatgggcctgggcaccgcctgcgcctcatcaactctgggctgctggttttgttcctgacgctgcagcctgacactgtgggcgggggtgcagtttgcgatggaaggctgcctccgaatcgaggaagccttgaccttgggaggggcctgccttttcgctgggcttgcctttctctgggcagcgttcgctcagcacttcagtgcggccgattcccctgggactgaattcacaccagccacgacgacttcccggctacttcacgttctctatgtttgcagctgttctttggtggcagaaaaagatgatttttcttccccccactcccattcccttttgttagtttctctccctgaaccacattttgagctgagtgaaggtctcaggttggcctttagagggagt

SEQ ID NO: 108467 - DNA, 187 bp, Homo sapiens
tggaacctgctcttagatctgctgctcaggagcaatgtgccctcgagcaagacgctgggttaatctcagcctccgcccctttttctattttaaacattttattactgtttttagagtcagggtgttgctccattgagcaggctgaagtgcagtggtgtaatcatagctcacggcagccatgaactcc

SEQ ID NO: 108468 - DNA, 476 bp, Homo sapiens
ctactggggaggctgaggaggcagaattgcttgaactcgggaggcggaggttgcagtgagccgagatcacaccactgcactccagcctggatgacagagctagattccgtctcaatcaataagggagatctgatggttttataagggattccccctttgctggtctctcactgtctctcctgctgccctataaagaggttccttccatcatgattgtaagtttcccgaggccacccccagccatgtggaaatgtgagtcaattacacctctttataaatcacccagtatcaggtatgtccttagagcatcgtgagaatggactaatacacctcccattggggttaggacttcatcatatgaattttggggagacagaaagatgcagttcaggctgggtacagtggctcagcctgtaatcccagtactttgggaggccaaggcgggtggatcacttgaggtcaggagtttaagacca

SEQ ID NO: 108469 - DNA, 524 bp, Homo sapiens
gggcttactgaagtaagcaatacattttcccaaatgcacaaatatcatggaattatgaataaaaatctgagtaggagtgtctatttttgttacaatatctctatgggagaacccgagacagaaagtgaaactggttgtaccccataagcctcttaaaacatggacttagggtttgctacatacatccagtgtggaaataaaatgcttctcggattttactgattccatcaatctaggatcataagtatgtaatcaggtatgtttcaggatattacattttaaaatagcattcttattttatttgtgtaatctcttgttgtcttccaaatcggttatttgggcacttgacttgggcaataaataatctcatgttttcttcttgagttctgtaaacagcataaaaaaggaggcaatttggtatcatcatctaaatgatgatgcatttcaaaagtaaagagttttgttcaatgctctccagattatctgacacaatccctccctggatgcagcatgtatttttaaag

SEQ ID NO: 108470 - DNA, 290 bp, Homo sapiens
caattttccacatgtgatacaaatttttaaatgtcctaattgtcaaagaaatgcagtatttcctgtttccatatacttggaaacatctctgacatctttagagatattagttatattcagaaggcaccacccttatttaaaaaataaactaaatttaatgttctaccagaaagtgctatgcatatgtaagtatatttcttcagcttttatgccagaaattcatatttaaactaaaacagaaaaacaataggcacctcccacagctcctaattttcatttcctctagtgag

SEQ ID NO: 108471 - DNA, 502 bp, Homo sapiens
tattctaaatctataaatgcaacaagaaagcctagatgacagcacatctgtttagagcatggtttactgaatatttgaagcccaatgttgacacctactgcttggaaaaaaagattcctttcaaaagattgctgctgactggcaatgcacttggtcaaccaagagctctgacagagatgaatgttgttttcataccaactaacacaacacacattctgcagcccatgaacaaggagcattttcatctttcaagtttcattatttaagaggtacatttttgcctgtggtcccagctacctggaggctgaggcaggaggactgtttaagtccagaagttctgagttatagtgcgctatgccaattgggtgtccagcctgggcaacagaatgagaatctgtctcaaaataaaaataaataaatcccttattatttcaacaatatgcacagcatcttcaccaggagattccatcttaagaaactactttcttggcttgttccgctg

SEQ ID NO: 108472 - DNA, 339 bp, Homo sapiens
ggatggatagagtgcccaggggagcaggcccaggaaccaaatttagatgaggaggtcagcaaaggcctggtggaggagtccatgtaagtcgaggccccaaggatgagtcgtcagccgctcgaagcgtgggcgggagaacattccaggcagggggaacagtgtgaggtgggaaagatctcggccagctgcagagtaggctgcctctgggccagagcgagagcccagagggaggaggtagaggaagaagcatctaggagcaggcagggccacgcctagcagcttgacagaggcacccaacaaggagtactgggaacaggaacagaccaggggctcaggatc

SEQ ID NO: 108473 - DNA, 472 bp, Homo sapiens
agacattttcttaaaggaccagacagtgttttaggcttgtgggtcatatcatctctggcacaggtactcaactctaccctgtaacacagagcagacacagaccatgtgtaaatgcatgagtgtcactgtgtggctataaatctttacttataaaaactgactgttggcccatgggctgtagtttgctgctgacccctgttttaagtcactaagttttgggatggtttgtcacataacaaaaggtaaccaaaacagtctaaaggaaagaaccaagctgctagcaaactatctctaccgataatttttcaggttactatttagtaatagtaacaattataacagccaacatatttaaagggcattacatgttacaaaatagtttcacatgaattatttcatttatgaagtcgctgcaatcagtgaaatagacataagtgattattaagtccattttactgatgaataagtaaag

SEQ ID NO: 108474 - DNA, 326 bp, Homo sapiens
attgttataagcttactgaagggcaacatggcagcacttatcacacttttaaaaatagggtgttatttttaagagttctgcttccaggaattcatcataaagaaataatggaagatgaagtatggtagaatgattagaagcttcactcagtggtcatgcagacctgctttgcattctggctttaccaccaatttgctgtgtagccttgaggaagttgcttagcctcttcaaccttcagttttctcatccggaaaaggagggtgacaataattcccatctcactgagtgatgcaaattgaaagggaggattcatataaagtggctat

SEQ ID NO: 108475 - DNA, 238 bp, Homo sapiens
atccgcccctgcaggcaacaactctctttaggtcctggtttatctttccttcctccagagcacccgagtaactgcttctctccccatctcccttacctgaagagcacacgctgcagatacacatctgcacctgcttcgtgctcagcagcgggtcgtgggaaccaccctacattgtcactcatctgtcacggctgcacagtgctcccttgtgacacaatgcacagcctataaccttttg

SEQ ID NO: 108476 - DNA, 364 bp, Homo sapiens
agagttcggggactgtggatagctcaggatatgtgtacttgcatcgaaccatcctgctgatatgaaagcattggtcgactgttctgcatgttgaattgtggggcagggagggcacttttctccttgacatttttttcttattatttgaaagaaatatatgttttaaatagtttaatttcttgattgatttacttttcttcaaaaatgctgtattggagttctgaatgtctctggttgtttgcacacagataactgcaaagaggttgtcattactggttacacgcaagccgaggccagatctcttacttaatgacttggggaaggcacaaaacatgagagaaaggtaactgccagccaggcttgc

SEQ ID NO: 108477 - DNA, 464 bp, Homo sapiens
ggtcaggagtgggtagggataaaataattcagccatactcagagttttgctcttggttaactgtgccaggaaggatgggctagtttggcaggacctgaaagagtggtttcttctttccttctttcttataaccacttcatctaccccacttctaagaagcttagtttctcagtcaatgaatgagtcctttggttgtggccatggcctgtgacactctagaagtaaaaattgtcctctcatttccttccacagtccatatttctttcatcttgataaatgccacagggggctatgtaacaagcccccattctctctcagctcagtttcagtggtggtttcctgtgttttcaaactgagagttcacatttcctagctccaggataatgtgagggtttttgaatagctctgatagtaactctggcagtaatctttgtatattaactgtggcatgttcagttgaccca

SEQ ID NO: 108478 - DNA, 277 bp, Homo sapiens
cttcaagttttcttttctgggcccatggcttacagcttgctctgcgatctaactaggctaagttcatcatgtgaaaaatggcacctctagtggcagaaggccccttggcaccagctgcagtggcggcaggctctaagacagaagagcgccacctactgcaccatggacaccgcagtccccctttccactcaacaagggacccagcccactgccactgccatcacagccaggataaggatctcatccaggggcaggctttcagcgcaccttgcgcact

SEQ ID NO: 108479 - DNA, 387 bp, Homo sapiens
tctgtccgggcttcagttagctctgagttggcaaggactaactgcttttccagctcttctgtctgaaaggaaagtacaaattgaacagtgtctgattatgacagtgggtaatataaaataaatatagactttggaaaacaaatggtattattttgagaacaaaaataaaagttcgttgtgaggctgggtgcagtggctcatgcctgtaatcccagcactttgggaggccgaggcgggtggatcacctgaggtcaggattttgagaccagcctggccaacatggcaaaatcccgtctctactaaaaatacaaaaattggccaggcatggtagtgggcgcctgtaatcccagctacttgggaggctgagacaagagaatcgcttggacc

SEQ ID NO: 108480 - DNA, 422 bp, Homo sapiens
ctacgaagaactattctttttccctatttacaggtgaagaaactgaggcccagaaaagttaggtaacttgaaaaaggttcacacagatgagaactagctgatctgggaggaagttaagtgagtaagcaactaaaagaagagggccgggcgcagtggctcatgcctgtaatcccagcactttgggaggccaaggcaagtggatcacctgaggctgtgagttcaagaccagcctgaccaacatggagaaaccccatctctactaaaaatgcaaaattagacgggcgtggtagctcatgcctgtaaccccagctactcaggaagctgaggcaggagaattgcttgaacctgggaggcggaggttgcagtgagctgggatcgctccattgcactccagcctgggcaacaagagcgaaactctgtct

SEQ ID NO: 108481 - DNA, 403 bp, Homo sapiens
atttaattggcttaaagaaaaataagtgtttataaaaattgttctctcagaaaaagagaaattaaccaaagtgcttttcaacttcatgtaaccgataaaatttggtaaataagaatattattggccagacctggtggctcatgcctgtaatcccaacactttgggacgcttaggtgggaggactgcttgaggtcagaagggcaagaccagcctgggcaacatagcaagaaccctgtgtctacaaaaaataaaaaattagctgggtggggtggtgcatcccagctacttgggaggctgaggtgggaggatcccttgagcccagaagttcgaggttgtagtgagctatgattgcaccactgcactccagcctgggtgacagagcaagaccttatctctaaataag

SEQ ID NO: 108482 - DNA, 605 bp, Homo sapiens
aacaaaagaaaggaaaaataatcagacgggcatttgcaacacaagaagctagaagatgattaaataatatcaacattatgtaaagtcaaaaggactaggcagggcaagacggctcacgcttgtaatcccagcactttgggaggccaaggcgggtgaatcacctgaggttaggagttcgagaccagcctgatcaacatggtgaaacccccatctctactaaaaatacaaaaattagccgggtatggtggtgagcgcctgtaattccagctactcaggaggctgaggcaggagaattgcttgaacccgggaggtggaggttgcagtgagctgagatcgcgccattgcacttcagcctgcgtgacaaagcaagactctgtctcaaaaaaaaaaaaaaaaagactaaaactcagaaattgttctttcagagttaaagaaagctattctaaagggagtagaatttagatgtgtcatccacatactcacctaataaaaatactcaagaaaggtttttagcctaaaacaaatgagtaagaagaaaccttaggatagaggatgatgaaaaggagggaaacagtggttagccacagaaactgtcaattagatta

SEQ ID NO: 108483 - DNA, 215 bp, Homo sapiens
cttcttttcattggtataatttattgctacagtcagaatttcatttattacatgcttttctctttccagtatctacatattctcattcagaaaatctctagtctaatgataactatcaaaacattttgaaattggcaaattggctttccaagagtatacaatgagtatttgtgggttttggggttttttttgctttttttggttgtttttttttt

SEQ ID NO: 108484 - DNA, 270 bp, Homo sapiens
tttgtcttctcctcttaattttttaaatgctctaaaacgttcaaatccaagtgaaaagctaactcaatgacatcttaatacttagaaccccttcaggacattctaagaacagaattaggattgttgagatgtgtgtttaatggtactcctaagtctgcacacatctgactaccaacctgatgtttcatgtctgtctattgtgctttatttcatagagaacctttctcttgaaaggttactaaagtctaattaggatcattgcttgtaaag

SEQ ID NO: 108485 - DNA, 376 bp, Homo sapiens
ctttctcactctgtcaggccagatggtctcttgtttcagattctttgtagtgtctgctttaagcttgtcttttctgcttctccatttacatattggaatatggccttctcacagctcaccagagactaaacagtgtcccagttctcatttcctgggagacagaatctgtttggcttagcttggatcagatggctgctctggggccaatgagctgtggccagggatatagctcccgtagtttaaacatggccatcagagaccactcttggattgaggataattttcaggaaaaataaatgtcagtccaggcagagcctcagaaaggtatttattatactaccctaattgttcatgtcagaccaaaaatgcaggggcc

SEQ ID NO: 108486 - DNA, 864 bp, Homo sapiens
agattctggtgaaagagacagtcataaactatcaatccacacagtagaataagtgttacaacagagttatatacagggtggtctgagtacatagtttctcatgctggtgttccaggtagtataattttctgaaattaaagctggtaagaatcaacataccggggatgtgattaaccattcccaaatctcagaaagacattagcctaaactgtaaggagtgtaagataagccgtgctctagttaattgtaactgagggcatgtgctggtgatagataatgtgatggctgataaagaatactgaaaaccagagccacgggaatgtgtcatggcccctttccattagggggagtgcagccccatgccaaatgaatggtcccagctctctagccacaggtggctctgaagatttctagccacagacacccctggacaacacagtgagacctctctagccacagatagccctggagccctgaagtggagaagggcacactgttctgcttcttccatgtacagcctgttcttccagctttgcaaaatgctctgataaattaggagaacactttaaaaattgaccgctcaggccgggcaccgctggtcatgcctgtaatcctcgtactttgggaggccaaagagggtagatcatctgaggtcaggagttcaagaccagcctggccaacatggcaaaaccccatctctactaaaaatacaaaaaattagctggacctggtgacacgtgcctgtaatcccagctacccaggaggctgaggcaggagaatcgctggaacccggaggcggaggctgcagtgagccgagatcgtgtcactgcactccagcctgggtgacagagtgagactccatct

SEQ ID NO: 108487 - DNA, 632 bp, Homo sapiens
tctggggcactgacgggttactgggtagagggccagcttaggggagggtgtggtctgaaggtatgggtagggcaagacctgactccactcagtgatgtgtccccagtgaggcatcctccctagaacctgtaagtaacaggaagaccctaccctgaacagagctctagggatgaggggagggtttgaacccctgctcgcaggccgaggccaccccagtgaaagcttggctggacaatatcgccctaccgtggaaatgtcgttaaggactaagtcctttaaaaaaaaactactggggagaattttgtctcaggcctagagcctataatcactggcttctcccggccgttagtttgattttgtcttatggatatgcgaaattttgaaacaattgttttgtctttgctttggctactgggaagctccctatcatacttatgacccatctctccctcctgtatagaactttatcgtatttgtttctgtgtagcaacccaaccagttgtacattctttttttcactgatccttcatcgacttattttttgtcctttgtatgtttttcccaaaagcgacattgcattatttttggaaggaaatagctatgagtaaataaacaaacggcattgtgaagtt

SEQ ID NO: 108488 - DNA, 459 bp, Homo sapiens
ccccctcctactccctccccctccaggctctggttgatgggcagagagtcccagggcctgggggagggtttggaacattggagctccccattgggagctctggctgtcagctgttttccctcatgtgtgcttttagctggaatccggctctgagtgctgggacctctgctgacctgtgacctctgctgtcctctgtcctctgctgacctgggaggcatggagaggtcctgctgggggactgagaatggctttttgtttgtaggttataatattgcggttactgtatttcttttgttaactacagtgattctcatggggccagtgttttatttttttaataccatcattttttacagctggcttaagggaattttttcctctatgtttttgtatctgagggtgaaaaacattttgcctggatctagcaaaagagtactcagtaagttctatttaaattga

SEQ ID NO: 108489 - DNA, 589 bp, Homo sapiens
tgaatttgcattaattttttctcctcaaaatttttgagagctgtctttaaactcttctgaattcaattagctcactttctgtttacagttagctcctggtattatacaggtaccaaaatgctacctggaatactagtggttctgtgagatgataataaaaaatgtttgagatatgttatatgccatattctattttaagagattgcaataaacattggcttatttaaagtctagaggtgtccttcaatgaaaaaactaatactttaaccaggagtttgtagatcatacttgaccacaaaatcctctcttctcccagtatctgtcagcattctttgaaaaaaaaaaaagttatgtttgtgccagtttgcatattatatactttctattactaggaaatcttttgaaaaccaaggatttgttgcttctgctctagaaagggtttggggatggttgggcctggtggcttgtgtctgtaataccagcactctggtatttacttcaggaaggctggtatcagccttggctggaggatcgtttaagcacagaggttctagagcagcctgggcaacatatggagacctcaactgtt

SEQ ID NO: 108490 - DNA, 361 bp, Homo sapiens
  misc_feature (210)..(210): n is a, c, g, or t
caagacctagagcgtatcttaacttcctgatccctttagccagaaatgactgaagccctaagcacatatggtcctattagtgtccattttagtaatctggcaggttagtattttgtggtattttttcaaccgtcttgaactatttaagtttaaattccattttatttagctttttgtaaatatatgaggtctgtctctaccaaaaatatnaaaaattagctgggtgtggtggcgggcacctgtaatcccagctacttgggaggctgaggcagaattgcttgaacctgggaggcagaggttacagtgagccgagatcacgccactgcactccagcttgggtgacagagcaagactccatctc

SEQ ID NO: 108491 - DNA, 337 bp, Homo sapiens
gcattttattcatgttaaaattttaacagtcattttataactaattgagatacaaaaggtcaatgttttatccccagattttggttcatacctctactaaacagcagagctgggatttaaactggtgtctgataagagatggtcttaatccttaaagcatgctgcctttcaagcaagttaaaggctaaaacactggccaagtgaacagccagatcagatagtggctaaataaagtaaatgtaaataaaacaatggggggtgctattagagattttaacaagtagtaatgcttaatgcaagtagggttgcattgagatgcataaggcaagacgatctc

SEQ ID NO: 108492 - DNA, 309 bp, Homo sapiens
tggggaagtgggctggaaaagcagcccaggctaggcaggatggtacacagcctcagtcgaggcaggaaccctggattcgactcccaaggtgatgggagggaagcctctgcaggtttgaataggagacacaggtgaagggtataggattcctagggcaggaagagaagtccataaagaacaattgtccagctgggaagagggcagtggaggtggaagggaggggatcacagaaaccaagtagtaaggaacctcagagaccatctggcccaggtctggcctccagcaggtaagtaacgaacatcactgtgc

SEQ ID NO: 108493 - DNA, 284 bp, Homo sapiens
tccttaagtgagggggtatatagcactcttggcttgctgtacttcctccactctgtttatcagaggagttcaggtccagatgagcaaactgctcctccaggtcgagggcattttctaccaccacatgactcatccctgaagagaagtggaaaatcaaggtcgtccaccataagtatgagaccaaatatcctagtttgttcatttttaaaaattatttctttatttccccccacccccaccccactgggttagctcaaatggccagtcttcaagctctgaaattc

SEQ ID NO: 108494 - DNA, 283 bp, Homo sapiens
acacactccatggggcctggttctgaaatggaagtatagccgtggcgtcttgaagctgaccagggaggtagtctagtccaagttgctcattttacaggttatgactctatgacctaattcaagtgaagtgaaagccacagctggttgtgttgagctttgaagactgttccctgactctcatgcaccatgccatctcatcattgatcgtgagcatctccatgtagttggaattagctctcaggggcaactgggtcatatatggagatagtagatgcccaagaaa

SEQ ID NO: 108495 - DNA, 643 bp, Homo sapiens
  misc_feature (38)..(38): n is a, c, g, or t
  misc_feature (185)..(185): n is a, c, g, or t
caaggcagtagcagcagaaagtgaatctggagaacctnccctgtgtgcagtgttaacaagctgagatttacaggagagacattatgatctgattcaccctttaaagtctgtggaggatgactgggggtggaagggcagaataaatcccagctactgagggaggctgaggcaggagaatcacttgnaacctgggagatggaggttgcgctgagccaggatcacaccactgcactcctgcctgggcaacagagcaagactccatcaaaaaaaatacataacagacccagtagtatgttgtcttcaagagacccatctcacatgcagtgacacccataggctcaaaataaagggatgaaaagaaaaatctaccaagcaaatggaaaacaaaaaggcaggggttgcagtcctcatttcagacaaaatgactaaaccgacgaagatcaaaaaagacaaagaatcacattacataatggtaaagggttcaattcaacaagaagacataactcccctaaatatatatacacccaacacaggagcacctagatccgtaaagcaagttcttggaaaccttcaaagagacttaaactcccacacaatagtagtgggagatttcaacaccccactgacaatattaaacagatca

SEQ ID NO: 108496 - DNA, 415 bp, Homo sapiens
gttgggtggaagtaagctcagacttgactccgcctgcattcctcgcaggccctggaagacttgccttctctgtcccatttccggatagcggaaatgcactcactccttcatttattattcagtaatgatggaattcatttgttcatttacttaatattgaaagagcctgtcctatgaaccaggcgctgttctaagtacttggaatgtggcagtgagcaaagtagaggaaaattcctgccctcgtggagcttcttagtggaaagaggcagacaaaacccaaaaccaaacaatcagtaaaatattagaaacggatatgttctatagagaaaaatggagcaggggaagagataagtttcacttggttgggcagggggttggaggagagtttgcaattttgcataagttggtcagggaa

SEQ ID NO: 108497 - DNA, 150 bp, Homo sapiens
gattacaagaaacagtaaaccttagtttttagaaggaattgagttacattgaatagttttatgcgcattttttgtcaatagatcttactgaaaatgggcttgggttggccgggtgcggtgcctcatgcctgtaatcccagcactttggga

SEQ ID NO: 108498 - DNA, 376 bp, Homo sapiens
tatagatccagtgctacaccagggccttcatgtgtacagaatcctgagctgtgaagcaagacaaacctcagttcaaatccctgctctacaactaactcaccaaatggccttaagcaagcccaactacttaatttctgagtttcaatatcatcttgaaaacaggggtttcttcattcacttaatcatccggcaaacactgtgtgtccaccaagccaggcactgttctaggtcctggcaaactggcactgaacagcaggcaactccccttccagctgggaggcagaaaacaaatacataacagaaggttaaaaagtactttgcagataaccaagcaggggctgctacttttgttgttgttgtttgtttgagacagagt

SEQ ID NO: 108499 - DNA, 172 bp, Homo sapiens
tgtaggctctgggcatgaaggattttcatcacacacctaatgaggatcgcttggccagtcgccctactaccaagaacaaaccacggcttttgggacatgtagtgctattctccccacccaagcatggcaagcaggagccagagtgagctactctcaattagctgtccttccc

SEQ ID NO: 108500 - DNA, 196 bp, Homo sapiens
aggatagcaagggtgtggcaagcatggccaggggcaggctgttgcaaggctgccatcctactttccaaagcctccatcgtccactctgcaggttatcaccgaaaatctgtgtgattccacctcaatcttgcatgcctttcgaaggcttccagctctttggttcagtggacagcttccgtcttacaaacaggctgaa

SEQ ID NO: 108501 - DNA, 165 bp, Homo sapiens
gagagatgtaaaaaaagggagtgagccctgcagtcctctgggagacagccctccaagcagagaacagcatgtggaaaggctctcagtgggatcctgcctgcatggcatcaaggaggccagggtggcagaaaacaagaagagtgggtggaaacacagggagacaaa

SEQ ID NO: 108502 - DNA, 711 bp, Homo sapiens
atgtaagaatgagtatctgattggctacctgccagccaatgagggttcccccttgcctacctgtgttggggagtgcaaggctgtcaccaggagggcaggttagggtgaatgtggcagcccaggtgaggtagacctgatgattgttcgaatgtgacactttctccctgtcatagcccagcagcccctttagtttgtgactctgctgtgcctcccaattaggcctgctgtggacatctcacttctggctgaactttgggctgggttttgtgatgctctttggtcagtggaatgtcatggaaggcccatgaatagagtgcttgaatgtgcttgcatgactttacttggcctctctgttctgctaggtaccatgagaaaagcatgtcctagattcacaggtggaacttcctggccccaacctgttgcttaactctcagtcacccagtgtacccaaacaccagtgagcaagaaataaatgcctactgttgttcaataccaaaatccttttttcccctcttgcttttggtcccacagtattgttgcagtagaaatctgaccaacacagcagacaagttgactaatatgtctgctctttggccagaaaaccaacaagagccagaatggacagtgatgatggaaatgaattagttgcatctagggccatgtaacttgccctccatttgaccaaagctgaatttcattgaagtgtccatt

SEQ ID NO: 108503 - DNA, 341 bp, Homo sapiens
cctggcatcctgctaggccccccacagcaaggacataggaagcacatccgggaatgtgacacccacagagcacacatgtggccctcaagcacagtgcttcccctgaggcctgtgagaaatgtcatcacaaccctacaccacctcctgtgaccacaatgaatggcctggcctttgctcaaaccacagacaaaggctgcccttcagtctgtcacaccagaagccatggccttttgatgccctggtgaattctggctcttggtttgcatcagatgagcccccactggtgcagttctccgaattttggtgtcattgacttgcacaagcttttgtctacatctctg

SEQ ID NO: 108504 - DNA, 832 bp, Homo sapiens
ataggaacctgttagtcagagtgggaacgggccaagggtcactaggtcactgtttttttgttggtttttttaagttttataattaatataaaaatggggtctcgcgatgttggccatgttgttcttgaacttttggcctcaagcagtcctcccgcctcagcctcccaaagtgctaggattacgggcacgagccaccacatccagccaagctgggtcactttgaactgaggccagggtggattgcagacgtggggcacatcccagcccctgaattcagggtccaccatcacacctgctcctgcctagcatcctgagagggctgcccagaaaagagcttttacaaaccagctgttgataagctcagaattttagaaaccactgtcttcattataagggcataaggtacaaggatgaaactccccctgtctttactctttcttagaactctgggtttttacatcccagtgaaaggggatctgtcctctggttgtgaggacaaggcatgtctttatgtgttaaaaagagtaaccactgacaaggttttttttgatccttttaaaatttactttcgacctgtaatcccaggactttgggaggccgaggcaggtggatcacttgggttaggagtttgagaccagcctggtcaacatggtgaaaccccgtctctactaaaaaatacaaaaattagctgggtgtggtggtgtgcacctggaatctcagctattcgggaggctaagacaggagaatcgcttgaacccaggaggcagaggttgcagtgagccgagatcacgccactgcactctagcctgggtgacagagcgagactccatct

SEQ ID NO: 108505 - DNA, 464 bp, Homo sapiens
cctttgttttgccctctgtgggattaaccccatctcttcatcaagtaaaagcctgtataccaattcacagactttcttttcagcagaataaatcttactgttgatacaatcttttgaaatggaacatctttatatttttatgtaaagtatgattttcctgcaattctggctatgactttgtatagctttcctacatgattctgtggcttcctcagacctgtggaagaccttgactctaaatctgagcagacagaaagctaagtgcagaatgatattcttcaagtaagccattcaccccaagaagaagtaagagggggggaaaaaagacaaaacaaaacagtgtggaaatgtgtctaaactagtgtccccaagggtatcccaaaaccatttattctatggaatgttagtaactgttgtgctttaaaagttacaaagatctgataagtttgggaaagcctgtgtta

SEQ ID NO: 108506 - DNA, 961 bp, Homo sapiens
tctgcacaccaggggagcacacgggagctggagagcgattactacctgggtggttatgacattgacagtgaatacccaccccctcatgaagaggagttcttgagtcaggaccagctgcctcctcctctcccggaggacttcccagaccaatatgaggccctgccaccctcccagcctgtctccctggccagcacactgagcccagactgcaggagaaggccccagtttcatcctagccagtatctccctcctcacccattccccaacgaaacggatttggtgggcccgcctgccagctgtgaatttagtacttttgctgtgagcatgaaccagggcacagagcccacaggcccagcagacagcgtgtctctgtccttgcacaattccagaggcacctcatcctcggatgtgtctgccaactgcggctttgacgattccgaagtagccatgagtgactacgagagcgtgggagagctcagcctcgccagccttcacattccctttgtggagactcagcatcagactcaagtgtagacatcacatcttgggtacttcaccctgtttgttacagaaaagtggaagcagattggctgggcttctgtcccagtggagcattgtctgtggaatgagaagggaatactgtatttttccactagaaacttcttcacaagtcatactgtcccaacaagcaagcttgattccagttgggtgaaaatgaaaggctcagaaattgtttttgagaggtgactggtaatccttgatgtaggtacctatgttcacagctaaaaatgcaaagagggaaaaattatttcacccactaagttatacagccagtcttgtatggctttgtgcagtattgtgccctggaaagtgttacagcatcagtccttgcagtattataatgatgtggaaagtagcccttagcgaagaaaggaaccatttttaacaaccgaaagggttt

SEQ ID NO: 108507 - DNA, 191 bp, Homo sapiens
cctgaaatgccagcactttgggaggccaaggcaggtggatcgcctgaggtcgggagttcgtgaaaccccgtctctactaaaaatacaaaattagctgggtgtggtggtacatgcctctaatcccagctactccggaggctgagaacccaggaagcagaggttgcggtgagacgagatcgtgccactgcact

SEQ ID NO: 108508 - DNA, 322 bp, Homo sapiens
aggctgaggcgggagaatagcttgaacccgggaggtggaggttgcagtgagccaaggttgtgccagtgcaccctagcctggtgacagagtgagactccgtctcaaaaaaaaaaaaaaaaaaaaattaaaaaatacaaacttactacctacctccttacaacctaccctcacagtattactgtgaataaaagtgtgtgtagcactgggaacactattcacagagcactcatgaatgtttgttctttgttattagttactagagaggcaaatgtctgccagggctgaataatatgtgtgaattggtgattgtcgcacatatcta

SEQ ID NO: 108509 - DNA, 385 bp, Homo sapiens
aagtccttttaagcctacctttcaataacatctaatattattaaaatattaattgcatgtaaattctctttaaaaactgccagagagagaatatgagaaacaaagagttaattttcctaaaatgcaaaggcctgtcacaaatcaatgaggaaaagggaaaaaaaccaataaaataacaaaggatctgaactgggagtgtaaggaaaaattgacatattaccatagttgagtaagtaacacaccttacttagcaatgaatttgaaaaaaaattacaggatatttctatacaaggaataaactttgaaatcaataacagtagtatgacaacaacaaaagtctgtatctgggaaatttgaaatacacttctaaataactcttggattg

SEQ ID NO: 108510 - DNA, 376 bp, Homo sapiens
acttttactatcattcttgatcttaactggaaacactccacatttgtatcattaaatccctgttttcccttcttgtaaaaagtaaaaatcaccacattataacatgacattttaggtttggttggtagtttcagttaagtaaaatagaaacattgttgaaccccatccccagaatttctatttcagaaggtctagggtggggtctaggaatcaaatttccaggtgaggcttatcctgctgatctgggaaccacatttagagaaccgcttgcctagcataacttcattgttctcttttgcttcccaaatgctttttaaaaaacaaatatggtgatttttccttttttttttttttctttgtcttgagacagggtctt

SEQ ID NO: 108511 - DNA, 319 bp, Homo sapiens
tcatcaaggcctatgtcgacctaattattcttgctatactttcaggcaactaatcaggtcacagtatcgggctaagggatttgcaaaccactcagtcctatcatgattttttaacaaaaatgaggactggaaagagagagatcatgttccaaactttaccatacatttgtcattaaattctgaactcattatatatctttgaaattttgcacaaattctttcaaattgcatagttgtggttatagactgttgggagtagatggtccttgggacctctcattccatgcagaacacttctgcccaccaccactaacactga

SEQ ID NO: 108512 - DNA, 548 bp, Homo sapiens
cagccagtaagcggcagagccatggttataatcaggtcagtctggctttggacttctagtttttaattataatgcttaattgccattggcctcacagtcactctcccccttgtcatgggtgcctgactggagctacccacacctgcataaacctctgaagagcaggatggacctggcacattcatgggtttatctggagactgcacaactatgagttggttttcaaaagggtgttttgaaaaccaccacacattgctggatgtcataaggcttcatggcttagtcagaattctttcatagctgtggctgcagcttggggaactatagttagaagtgcaggaagaacatggggagggataaagtacagaatctctgcaagacaaccccattggtggggagacagacttgaggccgctttattggacaggagcctgactcagaatgagaagtgaagatgttcttctgccagcagggtggcactggaggagctgtgatatttcagacctttcttgggatgagttgactacagtgcttcacatcgaatggct

SEQ ID NO: 108513 - DNA, 135 bp, Homo sapiens
aaatgtggaaatgaaagagaactggaaaggggaaaaaagggggagggaaactagctgatgatactggtgcaagggaagtcctaacctagctcctcaatggctgtgttggggaaggacttcagcatcagtctctcc

SEQ ID NO: 108514 - DNA, 103 bp, Homo sapiens
tcttatgtgcagaaatgtcttgtaattaggtttgggaaaggtgtattgcttagttacaaacacatctttttaaaaaggtcctttcaaagggtcctcaggatgg

SEQ ID NO: 108515 - DNA, 225 bp, Homo sapiens
ctagaggcaaacagactagcttttagctctgtgaccttaggaagtttgctttatatctccaatattcaattatcttacctttaagatggtatgttacttacccttcagagttctctacgggattaagtatgataacatataaaatacccagcaaggtattaggggttcatagcagcagtgttcagggatgggggtgttagtcagatatagtgaactattcaaact

SEQ ID NO: 108516 - DNA, 806 bp, Homo sapiens
  misc_feature (787)..(787): n is a, c, g, or t
  misc_feature (789)..(791): n is a, c, g, or t
  misc_feature (798)..(806): n is a, c, g, or t
tgagagaaaggatactacgtgtcctgccaattttagtatttattctggaatcccaggcttctgcaagctgttgggttgggtttttttaatgtgtgtggttttccttagttgttgaaggagtttcagaaaaatcttagatgaggataagaagggcagtataaacccaaaatcaccttttcttccctttcccttcctttttttgctccatctcagcttcctaggcttgattcatggagggagggacaagccctggggagagaaaagcacagaatttgagtcagtagatctggtttccattcctggttcaccctcttgctgcaaccctgagaagttacttcacatttctcatccttacctgaccccatctataaaatgaaaatcaagagatccatctcacagggttattgtgaataaaaatgtgtttgaatgtttattacgtattgttgagagttattcagatatgattctcatcttcctccaaggctacccagaagacacgtgtatgtgccatttatttcctcttccatgacatcactactgcctcctgccacccacagacatattccattcaaaactgaaatgggaagtgttcctagaatttcctatattgtggtgttttctggattttaagtactatctagtgctagggatgtcacttaggctgcttttggctgcaagtaatcaattacctcaatcaggatctcagcaagaaacagcagactcagattaggattatttgaggagggttatttatttatttatttatttatttatttatttatcgagncnnngtctcannnnnnnnn

SEQ ID NO: 108517 - DNA, 358 bp, Homo sapiens
ggtggttcagacacctctatagcatttatgccctatgaacactgctccctcaaacaagacactactccagcacccaaggattactacgcctaactccaaatctcactcaaaccaatggcttcttcatctaccgccatccttgcaacaaatccttagcacaattctcagagatgctagagggcacagataagtaattcctttaaagtctgcctttagtttctcttccttttccatgcatgacactataggcaaattctatcatccacatgattctggaaagatccaagcttagtagcaggcagttttttgagacctctgatagatcagggactgctccattctgatgggccccttgcca

SEQ ID NO: 108518 - DNA, 269 bp, Homo sapiens
gcaggcagatccacagagacagggaggggaagtgtgggtgccagggctggggagggaacggggtttccttttggaatgatggaaatgttctaaagttgattgggttgatggacacacagctttatgaagacaataaaagaaatcaaggcagggcacggtggctcacacctataatcccagcactttgggaggccgaccgaggtgggtggatcacgaggtcaggagattgagaccatcctggctaacaccgtgaaaccctgtctctaatt

SEQ ID NO: 108519 - DNA, 431 bp, Homo sapiens
ggaagtgtagtctatagtagagtcttcaaacaagggtctacatactcctgggaatattaaactttctaagggatatgcaggcataaatagctttaagggaatgcaaattcagatcgcagtgcccatgtaaatcctttattaaaattgacctacataaaaacatatccatatcaagggatcatgccagttctttttccctgctgccttttggtaatcactggtctcccattttacaaaagaaacctatggcaagttgtgttttgcagaaatgaccccaacaatatttaaagtctcatacccttctcgaaccttgccactacccttatcaagatgtggagttacgtcccttccctttgaacattaacagactttttttttttttcaaagagttagagggtctccttataggggcctccctgtattacccaggc

SEQ ID NO: 108520 - DNA, 1606 bp, Homo sapiens
acccacagcactcattcctgaagctactggttggttccctgagaggtcccagaactctgcgaagtgagtccagcgctgagattttccttgcagatctatcaggatgagcatccaggccccacccagactactggagctggcagggcagagcctgctgagagaccaggccttgtccatctctgccatggaggagctgcccagggtgctctatctcccactcttcatggaggccttcagcaggagacacttccagactctgacggtgatggttcaggcctggcccttcacctgcctccctctgggatcactgatgaagacgcttcatttggagaccttaaaagcattgctggaagggcttcatatgctgcttacacagaaggatcgccccaggaggtggaaacttcaagtgctggatttgcgggatgttgacgagaatttctgggccagatggcctggagcctgggccctgtcctgcttcccagagaccacgagtaagaggcagacagcagaggactgtccaaggatgggagagcaccagcccttaaaggtgttcatagacatctgcctcaaggaaataccccaggatgaatgcctgagatacctcttccagtgggtttaccaaaggagaggtttagtacacctgtgctgtagtaagctggtcaattatctaacgccgattaaatatctcagaaagtcattgaaaataatatacctgaatagtattcaagagctggaaattcgcaacatgtcctggccacgtctgataagaaagcttcgttgttacctgaaggagatgaagaatcttcgcaaactcgttttctccaggtgccatcattacacgtcagataatgaactccaaggacggttagttgccaaattcagctctgtgttcctcaggctggaacaccttcagttgcttaaaataaaattgatcaccttcttcagtgggcacctggaacagctgatcaggtgcctccagaaccccttggagaacttggaattaacttatggctacctattggaagaagacatgaagtgtctctcccagtacccaagcctcggttacctaaagcatctgaatctcagctacgtgctgctgttccgcatcagtcttgaacccctcggagctctgctggagaaaattgctgcctctctcaaaaccctcatcttggagggctgtcagatccactactcccaactcagtgccatcctgcctgccctgagccggtgctcccagctcaccaccttctactttggcagaaattgcatgtctattgacgccctgaaggacctgctgcgccacaccagtgggctgagcaagttaagcctggagacgtatcctgcccctgaggagagtttgaattccttggttcgtgtcaattgggagatcttcaccccacttcgggctgagctgatgtgtacactgagggaagtcaggcagcccaagaggatcttcattggccccaccccctgcccttcctgtggctcatcaccgtctgaggaactggagctccatctttgctgctagggaaggcgtgcccagtggggtagagaaatccaaagttctcttccaggcacttggacactaaaatctactatgtgggtg

SEQ ID NO: 108521 - DNA, 218 bp, Homo sapiens
tgccctccaggaatgctgagtaaaatgagtgtggcggttgcccacattgcagcttctctctgagtatgggtttaaatctgactattcaatctagagcccagcaagcacaggcttcctttacagtgtcttctttgttccctcttatttttcttccttttttgattaaccaacaatgcttctttgtaataatttcaaaagaacatcttgatagattgcaa

SEQ ID NO: 108522 - DNA, 718 bp, Homo sapiens
ggggaaggccgggtctgtgttgtcagggggccctgtgttctgactcccttcccattagaataggtggtgattaaacaagctatgccacaccctaaattctggttctgggttttactattcagtcagttttatcaaattaagatgatcatgtcttcccttctgaaaaattataggggaagaaaaaccatagaactttcccccagtatatagcattgaattacacatattcctacacacacacacacacacacacacacacacacacacacaccactcacacatatatacgtacatacatatataatagaatttttatataatatgtaaaattttaaaaatatatatttttagaagggctgggggtggtgggggcggtggctcacacctgaaatcccagcactttgggaggccgaggtgggcaaatcacctgaggtcaggaattcgagactagcctgactaacatggtgaaaccccgtctctactaaaaatacaaaattagccgggtgtggtggtgcatgcctgtaatctcagctactcaggaggttgagacaggagaatcacttgaacccaggaggtggaggttgcagtgagctgagatcccgccattgtactccagtctgggcaacaacagcaaaactctgtctcagaaaaaaaatatatgtgtgtgttttataaacctataaaatatgtgtgtgtgtgtgtgtatatatttatatat

SEQ ID NO: 108523 - DNA, 437 bp, Homo sapiens
ataggtgtgagacaccatgcccggccatctattttaaaatatttaaactcaaggcaaactctagacaaaacagaactaaatctggaaggagctattataccagaaacaagaaaatgttaccaaaaatatcaaattgatattctcagaatttaagaaaacaataggtttgtaaaatgagaagaagctattacagaggggaccaattaggggataagagaaagtccttggacattagaaatgttactgcaaaactaaaaactggacacaggtcagacagtgcagagttcactgggttgcacatggaacatagtactcattctcctccctgcccacttccactgaaaaggaatgcatccctccccagataatggacccaaatacccacttccggccctttccgccattagccatccgccttcagccagctactactacca

SEQ ID NO: 108524 - DNA, 192 bp, Homo sapiens
tgcagcctcaacctcccagtctcaagtgatcctcctgcttccgaaaagtcggatttaacatcaggtcaccaaatgggtttttcactgtgggatcttttgatgagtttttttcgaatacatttccttggtttagatgtctcagacctgcttgaattctctagaagtcatgaatgtggcttctgtttgcaccat

SEQ ID NO: 108525 - DNA, 744 bp, Homo sapiens
gggaaaaatctcaaatggtgctaacacaaaatattttttaaatgcattgaaaggcaggtatttgaccaatgactaggcagaagcaaaactattacgattgggaaagaggaaagaatacataagcacaaagaatttggaagacttgggattaaacaaagactcaatttaaaccataagatccaagttatcttctcaatcaaactttacaagggtttataaccaagagcaaaaataaaagactgtgtttttactttttctcttgaaccttgcccttgaccaaaacctggttcaaagaatcaagggcaaaaaaaacactatgaatgataacaacaaaacaacccagtaacacaaaatacaaattcagagaagcatgagactatgaaaggagcagagtagataattcacagtcaaagttatgtatttatcatcatgttaagctatgcaccaacatgtatactgcaaagcaatcctttggaaaaacaaattaaacaatgagttaaacttgtgagcaaaaagtcaaaacgacgtgacggtgatgagttctgttggttttgttctatcctaggaccagactgttaacagccacctcagacttagccagctagttatctctaaaatattttggtcatgagagacacaaagtgagaacgcaaagtaaaaaattcatccaccactattgggagaaaaaaaaaatcattaaatgagtagctctgtcaatggtaactaatggtttccacgcatttt

SEQ ID NO: 108526 - DNA, 1119 bp, Homo sapiens
ctcccaaagtgctgggattataggcatgagccactgcacccagccatgattggccttttaactctcatgtctcctaaatgaaaccagtgagtgttcctttaactgagagttaaaacttcacatagttgtcatgcttagtatatttttaagtgtttcgtttctagagaactgaattttgtaaaatgtgtaaaactgaatttactagatcaataaatagaatcaggtattctaaagataattaacctagttactactatttatacctgcttaaatgcttgatgagttccctttcctccttcactcagacaaatcgcatatagtgatgtaactttttttttcagtctcaggaatgcaaagaccgtaatggggaaagctgtaggttgcagttccattagccctttttatttagtttccagaattgtcttgaggcctctggtgctagattgtaaccattttaaaattatgtttctgttctggcttgtagataagtagcagtttttattttattttattttatttatttattttttttgaaatggagtctcgctctgtccccaggctggagtgcaatggtgcgatctcggctcactgcaagctccacctccctggttcacaccattctcttgcctcagcctcccgattagctgggactgcaggcactcatcaccacgcccggctaattttttgtattttttagtagagacggggtttcaccgtgttagccaggatggtctcaatctcctgactttatgatccacccgccttggcctcccaaagtgctgagattacaggcgtgagccaccgcgcctggccgatacttagcagtttttaaaacagctagctaaacaagagttactgatactggttagggaaaaactgcgatacactgtgcttgaatccatcactgaaaaaaaataatgttcgtggaagtgttcttgggagatgtcttataggaatatgctaatatctaaatgccttggcaatctgtagaatattgaacataaagtattgtgtaacatggaacttcagtataggagttattctggtttttggaaaagttgttggtggagacttcaaggcagaattctgcttttatgtaataatgcgttatgttctacc

SEQ ID NO: 108527 - DNA, 263 bp, Homo sapiens
tagagttgtggtttggctgcgttgctcaggctggactcaaactcctggcctcaagtgattctcccgccttagcctcccaagtagctgggtgtacaggaacatgccaccacacccagctgaaattctaacctagccacatgaatgactattaagttctgcttgcttggtcttaaataatatttggttacttggtgtccacaagttagtagtggaaatggagacaatgtgtgaagctgcatttctggaagggcactaagtgcctc

SEQ ID NO: 108528 - DNA, 205 bp, Homo sapiens
cacttagtctgcaatattccaaaaggtagtggtatataacataattttaggtgttaagtaaataaagatgttttgattatctatcactgcataacaaaccaccccaaaacagcagcttaaaagaaaattattatttattttctcacagttttgcagtttgggttgctctcagctgagatagctcagctcttgtctgtatggcgtc

SEQ ID NO: 108529 - DNA, 370 bp, Homo sapiens
atggtgtgccagctcctggcaggtagagaggggacgtgagggagaagaaggggcacacaattattcaaagttctaatatgatgattctttccagtcagaggctgagttttctacaaaggagaaatgcaagaggtgtaggtttcaattaattgtaactctcttccttgaccaaaggatgctcaggtggaaacagagagaaagagggaggaactagggaaaagaaggctgaggaagaggcagggagggttttgcaaagatgagcaaagccaggcagtgaatcaccgtgggacacagaactcctgaggctgaaagccagacttttggacgcttaaaatccagatcatccccaaccctgcccaggttcccaggt

SEQ ID NO: 108530 - DNA, 1945 bp, Homo sapiens
  misc_feature (234)..(234): n is a, c, g, or t
  misc_feature (238)..(239): n is a, c, g, or t
  misc_feature (247)..(247): n is a, c, g, or t
gcacacactcatcgaaaaaaatttggattattagaagagagaggtctgcggcttccacaccgtacagcgtggtttttcttctcggtataaaagcaaagttgtttttgatacgtgacagtttcccacaagccaggctgatccttttctgtcagtccacttcaccaagcctgcccttggacaaggacccgatgcccaaccccaggcctggcaagccctcggccccttccttggccntgtnncccatccncaggagcctcgcccagctggagggctgcacccaaagcctcagacctgctgggggcccggggcccagggggaaccttccagggccgagatcttcgaggcggggcccatgcctcctcttcttccttgaaccccatgccaccatcgcagctgcagctctcaacggtggatgcccacgcccggacccctgtgctgcaggtgcaccccctggagagcccagccatgatcagcctcacaccacccaccaccgccactggggtcttctccctcaaggcccggcctggcctcccacctgggatcaacgtggccagcctggaatgggtgtccagggagccggcactgctctgcaccttcccaaatcccagtgcacccaggaaggacagcaccctttcggctgtgccccagagctcctacccactgctggcaaatggtgtctgcaagtggcccggatgtgagaaggtcttcgaagagccagaggacttcctcaagcactgccaggcggaccatcttctggatgagaagggcagggcacaatgtctcctccagagagagatggtacagtctctggagcagcagctggtgctggagaaggagaagctgagtgccatgcaggcccacctggctgggaaaatggcactgaccaaggcttcatctgtggcatcatccgacaagggctcctgctgcatcgtagctgctggcagccaaggccctgtcgtcccagcctggtctggcccccgggaggcccctgacagcctgtttgctgtccggaggcacctgtggggtagccatggaaacagcacattcccagagttcctccacaacatggactacttcaagttccacaacatgcgaccccctttcacctacgccacgctcatccgctgggccatcctggaggctccagagaagcagcggacactcaatgagatctaccactggttcacacgcatgtttgccttcttcagaaaccatcctgccacctggaaggtgagctcctctgaggtggcggtgactgggatggcctcaagtgccatcgcagctcaaagtgggcaggcctgggtctgggctcataggcacattggggaggaacgggatgtgggttgttggtggtggctgctggcctcagaggttgacgcccacctgctccctgtccccggccttccacagaacgccatccgccacaacctgagtctgcacaagtgctttgtgcgggtggagagcgagaagggggctgtgtggaccgtggatgagctggagttccgcaagaaacggagccagaggcccagcaggtgttccaaccctacacctggcccctgacctcaagatcaaggaaaggaggatggacgaacaggggccaaactggtgggaggcagaggtggtgggggcagggatgataggccctggatgtgcccacagggaccaagaagtgaggtttccactgtcttgcctgccagggcccctgttcccccgctggcagccaccccctcccccatcatatcctttgccccaaggctgctcagaggggccccggtcctggccccagcccccacctccgccccagacacaccccccagtcgagccctgcagccaaacagagccttcacaaccagccacacagagcctgcctcagctgctcgcacagattacttcagggctggaaaagtcacacagacacacaaaatgtcacaatcctgtccctcac

SEQ ID NO: 108531 - DNA, 1870 bp, Homo sapiens
  misc_feature (234)..(234): n is a, c, g, or t
  misc_feature (238)..(239): n is a, c, g, or t
  misc_feature (247)..(247): n is a, c, g, or t
gcacacactcatcgaaaaaaatttggattattagaagagagaggtctgcggcttccacaccgtacagcgtggtttttcttctcggtataaaagcaaagttgtttttgatacgtgacagtttcccacaagccaggctgatccttttctgtcagtccacttcaccaagcctgcccttggacaaggacccgatgcccaaccccaggcctggcaagccctcggccccttccttggccntgtnncccatccncaggagcctcgcccagctggagggctgcacccaaagcctcagacctgctgggggcccggggcccagggggaaccttccagggccgagatcttcgaggcggggcccatgcctcctcttcttccttgaaccccatgccaccatcgcagctgcagctgcccacactgcccctagtcatggtggcaccctccggggcacggctgggccccttgccccacttacaggcactcctccaggacaggccacatttcatgcaccagctctcaacggtggatgcccacgcccggacccctgtgctgcaggtgcaccccctggagagcccagccatgatcagcctcacaccacccaccaccgccactggggtcttctccctcaaggcccggcctggcctcccacctgggatcaacgtggccagcctggaatgggtgtccagggagccggcactgctctgcaccttcccaaatcccagtgcacccaggaaggacagcaccctttcggctgtgccccagagctcctacccactgctggcaaatggtgtctgcaagtggcccggatgtgagaaggtcttcgaagagccagaggacttcctcaagcactgccaggcggaccatcttctggatgagaagggcagggcacaatgtctcctccagagagagatggtacagtctctggagcagcagctggtgctggagaaggagaagctgagtgccatgcaggcccacctggctgggaaaatggcactgaccaaggcttcatctgtggcatcatccgacaagggctcctgctgcatcgtagctgctggcagccaaggccctgtcgtcccagcctggtctggcccccgggaggcccctgacagcctgtttgctgtccggaggcacctgtggggtagccatggaaacagcacattcccagagttcctccacaacatggactacttcaagttccacaacatgcgaccccctttcacctacgccacgctcatccgctgggccatcctggaggctccagagaagcagcggacactcaatgagatctaccactggttcacacgcatgtttgccttcttcagaaaccatcctgccacctggaagaacgccatccgccacaacctgagtctgcacaagtgctttgtgcgggtggagagcgagaagggggctgtgtggaccgtggatgagctggagttccgcaagaaacggagccagaggcccagcaggtgttccaaccctacacctggcccctgacctcaagatcaaggaaaggaggatggacgaacaggggccaaactggtgggaggcagaggtggtgggggcagggatgataggccctggatgtgcccacagggaccaagaagtgaggtttccactgtcttgcctgccagggcccctgttcccccgctggcagccaccccctcccccatcatatcctttgccccaaggctgctcagaggggccccggtcctggccccagcccccacctccgccccagacacaccccccagtcgagccctgcagccaaacagagccttcacaaccagccacacagagcctgcctcagctgctcgcacagattacttcagggctggaaaagtcacacagacacacaaaatgtcacaatcctgtccctcac

SEQ ID NO: 108532 - DNA, 311 bp, Homo sapiens
accattttattattcgagatttccgctgttgccaggtattaatcaatgtattatgcggttcacttgggcaagctgtgcagaggagggtgcccctagggttaccacagtcaagagcgagaaaagtgttttagacatgtacacaacatgtggtttactattatcattaaatgaggtgaactgggactctatacatatggattttgaattgcataaattttgattgatatcatttgaagactgaggctctgaaaggctagattttgtgaaagacgatacacagaccagctattaccacatacaatcataccagg

SEQ ID NO: 108533 - DNA, 621 bp, Homo sapiens
  misc_feature (342)..(342): n is a, c, g, or t
  misc_feature (458)..(458): n is a, c, g, or t
cctctacaagtctggcagaggttgtgtctacatgaaccttaaatatttagttaattaaacacagtcagccaatttagattcaacattgtgtcttcttcttgttagcatggttcctggaattgaccaaggaaatttgcattggaatattatgagactatcatttgtgtttcgtttttgcctcatttcctgcagagggatgctaaagaaaattattgcacagcaaaaaattaaatccaatagcaaaactttttagcaaactgagattaatatctttgtttagtattttgactgctgctttacaaatctcttaggcttcatggccattaacagaaggaatctttnagtacagatgtcttactacaaatatctgggggctactgatttctcacccaaaagacttaccgttcctgtgggaatttccgggtgcttttcccctctcaaagtgcaacttctgtcancatcatcatcacagtcaaattcgatgttagggagaaaattgcccatggaagtaagactactatttgagtttcgctttaggaatctgcagtacatctgcatggtagcattttaaaaaattattaactagtgttttattaaaaagataaacatgctcatgttaag

SEQ ID NO: 108534 - DNA, 312 bp, Homo sapiens
cagccatgctgttttcctttagattctaaaatggaaaaaagatttcagacccttgttctgaagtgcaggaacccactaatggaaaatcaggagcaaaaataagtgagagagagcatggtgaatgggtctgtttcacagcataaactgctctgaaacttgagaagtccccagaaccaggcatatgctgtggaatctgaggagaacagcacttgtcataaaaagatagctaatttgaaatagcttctaattaaaatccagtgttcaaacattaacaccaggaacacagtggaaaagcaatattagcaagccata

SEQ ID NO: 108535 - DNA, 352 bp, Homo sapiens
aatttttcgtagagatgagggtcactatgttgcccaggctggtctcacactcctggcctcaagcagtcctcctgcttcagcctcccaaagcactgggattacaggcacaagccactgtacccagcccagttctttaaatatcctcctcacctgccttatagtcttgttaacagcagtaaacccagtgcctggcacatgacgggcactgaatgtctggtgaatggagagtaaatgacaagcaaagcctcccccatcaaccttaaaatagccccttgtccatgcaccataactaaatggcaatctaatccagcttgccaaataatctttctttctttcactgatggggtaccgg

SEQ ID NO: 108536 - DNA, 662 bp, Homo sapiens
taaggacatcctgatggccggacagtcacacagccacacctggctgcacatcatctcctgggcgtcttcctcctcagggactttctgcactgttttctaagcctctctcttgagggccacatgagcacagagccctgtaccacctggactgcctttccacccatccgtaagaattcagctcccctgggtgaaccaaggaggcacccccaccccccatgccacactttgctagaggtaggcagagcagaagcagcgtcatgaggccagcaggcaccagctggcagtcctgtccagacccaggtgcctccgtctgccagagggggcagggcagggagatgggcctcagccctgctgctcccttcctgccaaggggctgggctgaggctggatctcagctgacccagctccaagcccagcccatgcttgagggggtgagtagccttggcctctctggtgttgcttcctcatctctccagctgggacacgcccaggctgtcaggtcactggtgaggggctccctgggggttgggtcagcctcacctgtccatccgggtgtcctgccaaaggtcccatcagctgcaggctctgcctgccctgtgtgtgtcctgaggcaagaggggggctcttctggaaggggtgtgggcagcacagccttcccagga

SEQ ID NO: 108537 - DNA, 284 bp, Homo sapiens
aacttacaatcttccttcacccaactatcaccagacacctgcaagttagctcactgcaaccttggtgttttatcagaactccacgtagcattctgcagcctaagaaccatcctataaaatccccggcaagactttgtctcctggcagtcagctcccatttagttacttgctctaataaatctgcccttcttcacctacaactgtcttgggaaattcttttctctgcacgccactggcccagtggtcgctcacccccaacaatatttgacagtgcagatctagag

SEQ ID NO: 108538 - DNA, 832 bp, Homo sapiens
ggctcttgcacaactttaaaccttcgtaaatattactatttcttcatctggaaaatttcctgtccttcaagagttacatcaaatgtcacttccttcaacaagacttttctaatttctccatagaattagattcccctattcatcctccaagctcccaaaactctctgttcatatttctataaagataacttaaacacactatattatcaggcatttgattccatgactgtgagaaacccgagagtagccatatccttctttaaatctctattatcaggacctggtgtgtattggatgtgcaataaatgctttgaaatgaattagttaatgaattatggaaattgaatttggagacaccaaaaactatgattttgaagtctgtgcaggaacattaaaaatggcgtatgatataatgaagtacaaagggaactgtaaaattaaatttacattctaatcaccaaatatgtaatattatgtctatctatgggtatataattatacttgtataatcgctccctgttagacatgtctcttttgagtatacttcatttatttgaaatagaaaaaaatgtgaaaatacagaaaaccagtcgacttattaaggcagtaggattgctttctttttctttttttttttgttaaaatgttgtttgtacaacacccattcatggtgaaaactctcagcaaactaggaatggagagaaacttcctcaatttgataaagaacatctacaaaatacctataaccaacatcatacttaacagtgagaaattagacacttttcccctaagactgggaacaaggtaaggatgtcctctctcaccactccta

SEQ ID NO: 108539 - DNA, 880 bp, Homo sapiens
gaacactctaatatactgtagtcccccattcattcaaggtcctgtgtagtcctttctggtctggagctatagtaaaaggaggcagtgagtgggccagattcaaacagggaatgatgccagtagcgagaaagtgaagaggcttttctggcgcacctgtacaggttgtgctctgcattccttgggggccagccccatggagattcctcctgtgcacagtggaggttgatggggatgctcatctcctaagcggcaacagtgtcctatgcactcataattcagggtcaggggatctcaggtcataggacaaatcacaggctgctgtctctgttcagggtacctcaagccatcaatggccacgttgagcaggtgaacacttcccctctgaactctctagctctctttgaagtttgggagggcatttgagcactcttctcagctaagcccaacatacggcctggaagtagattggacaagtcaccatttactataccttctctctcaaggtgagtttttttagtctaatgaaattgccacctttgagaaggttgctctgtactctagggtgcgcaaaaggaaattgtttgtcttccggaagtctttctgtaatttagaatggacttggcagcgattttatttttaccttccctgtcatttgtgaggctggcagtccagaggtagggtgtggaatggagccgtaaattgcgcttgcagtgaccagaaggggcccattttaactctaattgtgcctttcccggttcacttctccttttacccgccctctcctttttttttttttttctaatccacatttgagtggggaggaagaattgaggggggtgcaggtgggagtaggtttatttattggcgcttctctgggtgg

SEQ ID NO: 108540 - DNA, 313 bp, Homo sapiens
actgagactgaatctgtatttgttaggtttttttttttttttttttttttttttgaggcagagtcacgctctgtcacccaggctggagtgcatcaactatttgaactaaaagaatgactgaagcatagaaaggagaataagcaaaaaagatgtttagacattgcataaatatggaatttgatttatttgtatacacttatgaagtacaagtgcaatcttgttacatgcatggattgcacagtcgtcaagtcagagcttttagggtatccatcacccgaataacatacatcatacccattaagtaatttttctc

SEQ ID NO: 108541 - DNA, 157 bp, Homo sapiens
cctgaaattctgtgacctgctttgatgctgtgcactgactgggccttcaaccatgcccttcagccctactgttttcttgtactgtttatgatttcttctccgttctcactttctgaacctcttagtttcatcaaagatgacatctatatttctcatt

SEQ ID NO: 108542 - DNA, 128 bp, Homo sapiens
gatgcatggacatcttcctagatgttagcactgggttgggcctgaagggacctgccccatgcccttgcagggggaaaggcatccacacaggaaagaaagggcagtggtgaagtgcatgaggaagaggt

SEQ ID NO: 108543 - DNA, 356 bp, Homo sapiens
ctgtggggacagccgtggccacacatgcttcaggaaaaccaaaaagtcagatgactgcttgccccgaaagagctgtgggtccagttgggcacaaagagtaaacatgcatagagcgaggagctgtctttgctcagcggctttgaggagagtagcagcattgtgaagaccgcgttcttcgcatacattcctccatgcatccattctacacatttttactaagcacctcctagatgaagacgttgctgaaaaatagtctaagtttattctttgaggtcataaaaatgccattcgttgtagcagagctgaggagagatagctggtcaggaatccgggagatggagtgggtggacctgggg

SEQ ID NO: 108544 - DNA, 780 bp, Homo sapiens
ttaaataaactttgatgtttgaaatatttctgcttcttagtcaagaaagggaaaatgcaattggatgctaataaaataattacaagtaccaactatctagggtaaacaaagaaaaacaatgttacacaaatacatgaagaacacgcagaaaaacaacatgatagaaattaactttccgccacatttccatgcattgttttgaggtttatgtaatttacgacacaaacctcttattagattttgaattggaagaaataaacttgcatttcattatattatgctgtaattcagggcctaataagggcctaataaatcttaagtattgcattatactatgttaatgattgtcatcatagcttttccaacacaggcaccacagtgtcatcacagattataatttaaaggaaatattagcaattcagagtgcccatatactgtagttaataaagcagtgaatagaaatcagctttatagataatttaccagctaacgacaattatttttatattgtatcacaggcttatgtgagaataacttttaatataaataagatcgatgctcataacattgtaacttgtatactgtagcaactcatccaatactgatgactgatagtttctcttaataaattattgcctgacaacacacacaaaaaaagccatgatatttcatactgctcacttcccagaggaatttagcaagttttccaactacaacaaggagtcaaaattgtactggtaagaaataaagtgatggaacatgatttgccatatattgtgg

SEQ ID NO: 108545 - DNA, 394 bp, Homo sapiens
cttttgagcatttgtcacttccaaatgaaaaaaaaaaaaagtatctaattttttccagttctttctggtaataaattcatcttccctttaatagggctctattaaagttttaataacagaattgtcttttgttagtaatgagtagaatggatgatctattcatttgcttatttacccatccacactagaagtagagcactaagaggtacaaagacatggtaggtttttgcctctgtgagctcttaatctggtggaaggtataagaaaacagacttttgccgggcgtggtggctcacgcctgtaatcccagcactttgggaggccgaggcggatggatcacttgaggtcaggagtttgagaccagcctggccaacatggtgaaactccatctcta

SEQ ID NO: 108546 - DNA, 1933 bp, Homo sapiens
gtccctgggtgtgcatagggtctacacccagcaggatttgctgtatcagaacgactgcgtcttcttgcattgcaattctcaacgaacaaaactaccaccttatccatgactttactataaagcagatgaggcagggagcattccttgtgaacgcagcccgtggtggcctggtggacgagaaagcctgagcacacatcctcaaggagggcagaatacgaggggcagccctcgacgtgaatgagtcggagccctttagttttgctcggggtctgttgaaagatgcctggaatctcatctgcactcctctcactgcctgctacagccagcaggtgtcactggagatgagcgaggcagttgccactgagatccgccaagccatcataagtcgcatcccgggaagcttaagaaactgtgtgaacaaggaattctttgtcacatcagcgctttggtccgtaataaaccagcaagaaattcatcctgagctcagtggtgctacctacagatatctgccaggcatggtgggcgtggctccaggaggacttctgcagccagggaagacatcatccctggagacatcccagtgactgacaacctcccaacagtggtacatccttcccaagggccctctcccaacagcccacaaaacacggggacagtcgagagcatcccaacgagcaatagcagagaatgccggaaggtaattattcagatatacttgggaacagtgaaaaatagataatctaagagaaaaagaatctgacggcctttttagctgattccggacatatgcatcattgttgttgcagtgttaaaacaagagctagaaaactgacaatgtcgtctgcttacggaagctctgaaagactagggtgtgatttattaacgaccaacttctattattgtgtgttaagtttttcatctgtgcatcaaatcacaaagaataaatagaacttttccctttatcagtcccttaggcacagcaggtcctgaacaccctgcttatatgttgcatcagcagttcaaatatcaaaataaaaaccatgaagaggaaatccgcatcctgtgactggagtcccttcagtctacagggactggttaccgctttttgctaataggaagattacattactagaaaatgtggagtaaactgtttgcctgtggtaaacacctgcatgcaaaggattgaagacagtaccggctcctgtacagagacgcgtctctcacatctgagctgcatattgagcggcaagttggttgtaagttcagtaaaagccgctgatgatgcaaaaaaaaaaaaaaaagtattaagtttcacaagttgttagtaatcaagtatattttctcagtttcagatcctctgcgattttattgagtggaaagtcttgcgctgaaagggttcaagaaaaataatattgcatttccttatgtcacaggaaacacttttaatggtaacttgtcagactatgaacaaacccactttttaagatattgataaagtcttcttttcttcacgtgatattttatacaagtacacttcagatgtattggatgtggctgattttaacaaatcctattagatttgtatcaattagttacatgttctattcatagtcttttgtgaatcattgcctttttgtttaaaaagatggcctattttgagcctttgtataagtacattcctgtttttgtgacaaaagaaaaactttaaatttgtcccaaagagaaaaataatggctatcagaagtatgctttgttttagtgcgagttaccgttactgtatttgtgtattgtaaaggtggacattctaattacattaaaatgtaattagaaaaaagtgcttaatgaacaaaaacagaacatagacaacaaaagaatattagaagtgatgcatgaagaaaacgagatatcaataaaaagatttttaaaaaccaag

SEQ ID NO: 108547 - DNA, 134 bp, Homo sapiens
ctggtgctaccagcctcaaaaggtaactcttacgcctgaggatggacaccttttagaattaaaagaactctcagtcattgtgggacatcttgctagccttcatagagactgatttactgtcagctcttttcttg

SEQ ID NO: 108548 - DNA, 401 bp, Homo sapiens
tgcttttacaggatcccatgtgccagaaaccctgaaagatgggcagaaaaaggcataacctccaggctgccccacagctcccgtagagcacggtcaagtccaacatgatgatcaccacgcccatttctcgaaaacggaaattgaagttggagcctggagcacagttcttgggaactaccaagactagctgggagtctcctagttctgggactatatgggacatctgtctcatgactaccctggctggcacacctccctgtcccctaatacgcaatatttccaagtggcctggagagagcaggaggatgaaaaagaccactgggtggtccctgcaagccacacacaaccatttcaacccttaaggctaagagccaacagtgttatctgcacaagcctgtcaa

SEQ ID NO: 108549 - DNA, 231 bp, Homo sapiens
atattcctaacacagaaaagatgtttcaaatgatgggtatcccaatcaccctgatttgatcactacatattatacacaggtatcaaaatatcacatgtacccaaaaaacacatatcactaaataaaacaaaaactcaatttaaccatacaactgccaagagacaccccccacctttcccaaaccccttctttatcctctacccaataccctaccctcctaccctcctaccc

SEQ ID NO: 108550 - DNA, 359 bp, Homo sapiens
cagtacagacagtcccaaacttacgctgtttcaatttgtgatgcgtttgtcagaacgtaattccattgtaagttaggagcatctgtatatatccagaagactaaaatattctatcagcgtagaaagtatattctatggatgaaatcatacaaaatgaaataactaaaaacatgagactttttttatgacacacatcacagttttttgtttggcacttctatgaagctagcatattaaatgaaagcactgaatggtgaaggcctaaacatagaatctgttcctgggaaaccatgtgctcatctagggtgggttttgtgaatttgagcaagtcactaagggcaggtaagcaagtacccttg

SEQ ID NO: 108551 - DNA, 246 bp, Homo sapiens
tttgagaccagtctggctaacatggcgaaaccccgtctctactaaaaaaatacaaaaatcagctggatgggatggtgcgcacctgtaatcctagctacttgggaggctgaggcacgagaatcacttgaactccggaggtggaggttgcagtcagccaagatcgcaccactccagccatggtgactcccagaattgtctgcctggacagtgtccagagcactggttccaccttagccgctgccagag

SEQ ID NO: 108552 - DNA, 861 bp, Homo sapiens
ggatctcaaggatgcaagataaagagaggcagtatgctgggggaatttggtagactggaagcaggggacagcggtctagacttaggacaaaatgaatgagagatgcttagggataatgggaaaaaaattaattcaatacgtttttggcagctgcttttcctccccagccacttgaaaaagccaagagactctgacagtcgcaatgcttcagtccaacagagtttgtcagagtcattagggaaacggacatagcagaatttttgggtgggagatgatggtgcagggaaagttgggtaaaacttcacgtgatatttacatgctccgcagttttggaaagaagaggacagatctctcctttgacaagcatcaggatagatcagcgaatagagtggatagtggaagataagtctggaaaagtaatttagagacacattaaagaggcttaaggaattgggctttgattcagtgctgtgaaatatgttcattctaaagatatttacatgcagatttttaatgtgatcagctcttaatttgtcctgtaaacttggatatttagttcatgttttcttacaatgaatcactctggtatccacatatcagcatagatgctactgtatgtggtttctcttctgttgatgacaagttgcctcccctgtcagctcaaaaggaattttctactaataaatcttttacagatgagtaagcatgccaagagagattaatctgggtctgagtagtattaagtcaggattattaaagagcctgtaggagggtccaactctttcactaaggtttgccaagaatggtccaaaatggtaagaaacatatctctcattctggaaccatttttgatttaacggg

SEQ ID NO: 108553 - DNA, 568 bp, Homo sapiens
aagacattcaaatttacacatagtagtaacatcatcaaagccagatgtcagaaagaaattttgaaatcagcaagagaaaaaacaaaataaaaaacatcacatttaactgatcttcaataagataatcagctgacttcttatcataaatcagagaccagaaaacaatgggaaataattttttttcttttttctttttcttttcttttcttttttttttttcggggatggagtctcactcagccgcccaggctggagtgcagcggcgctatctcggctcaccacagccatcatctcccgggttcaagcgattctcccatctcagcctcctgagtagctgggattagaggcacctgccatcatgcccagctaatttttatattttagtagaaacagggtttcaccatattggccaggctggtcttgaactcctgacctcagatgatccgcctgcctcggcctcccaaagtgctaggattacaggtgtgagccactgtgcccggccaacaatgggaaatattttcaaactgctaaagtaaaaagaatgccaactgcaaattctgtatctagc

SEQ ID NO: 108554 - DNA, 697 bp, Homo sapiens
ctgttcctgtcccatcccggtaccctctgccacctccagctacctgcttagcagtttcctctctgaactgccttctcaactgcgacgacgaggctgagcccctgcgtggctcccagatgcagcctagaaaggagctgtgatgggggctctggccctgccatacccgcctctgagtcctcacctctgcgtggtcactacactctgggggctttttttggtgtttttgttttagagacagggtctcgctttgttgtctaggctgagtgcagtggcggcatcatagctcactgtagcctggaactcccgggcttaagcagtccttccacctgggcctccagagtagctaagactgtacaggtgctcgccacgaagcctgggtaatttttttttttagacagagttttactccgttgcccaggctggagtgcagtggtgccatctcagttcactgcaacctcccactcccaggttcaagtaattctcctgtatcaacctcccaagtagctgggattacaggcgcccgccaccaagcctgcttaatttttttttttttttttgagacagagtcttcctctgtcgcgcaggctggagtgcagtggcgccatctcggctcagtgcaagctccgcctccctggttgacgccattctcccgcctcagcctccccagtagctgggactacaggcgcccgccaccacg

SEQ ID NO: 108555 - DNA, 472 bp, Homo sapiens
agctctattctgacctaggccttgtgataggttctggagatgcagtgatgccttagaaacatttcttatttttgagaaactcatggtgctgtgtaaaataaacaatgatagtatcctgtctgaacacagagaaggcatccttaacccgtcttaggatatcagggaagcttcctgaggaaaattacccctgcactgattatctagggatgactagacattatttggtgaataaagaaagtgcagttaaaattgtatgagataaggagaagtaggcgctacctgattttaactttttgtggtgctttttttttttcctatcgggctggcttctgtattataagagtttaatttcaaagcattaagactacacaacttctgtgtcactgattgcattgaatgtcttttgcaggcaaatgctttggctaagctggtttttgtttgttcttttttttttttttttttttttggccaa

SEQ ID NO: 108556 - DNA, 198 bp, Homo sapiens
agactgaggcgggaggatcatatgagcctgggaggtgaggcgggaggatcatgtgagtctgggaggctgaggctgtggtaaaccatggttgtgccacggcactccagcctgggtgacagaggaaaaccctaagggaaaaataaaataaaatgcactaactatattaactgcattttaaaaaagagtatagtgaaggaa

SEQ ID NO: 108557 - DNA, 366 bp, Homo sapiens
ctcccagagtgctgggattacaggcatgagccaccacgcctggcctataatgctactttcctagtgttaaaattagaatcagggaaagtacagatccaaaaaattcttatggcagggaatgaaaggtaggagcaaatattgaatcaactgaacaaattaaatctaggttaaggtaataatgactaccacaattaaagtgtcacaatgttttaaaaaataatatagcaagaggcctggtacggtggctcacgcctataatctcagcacttttgggaggcactccagcctgggagatagagcaagactgtgtctcagaaaaaaaaaaaaaaagaaaaaaaaagataatataacaagaaatactaattt

SEQ ID NO: 108558 - DNA, 390 bp, Homo sapiens
ctcccagagtgctgggattacaggcatgagccaccacgcctggcctataatgctactttcctagtgttaaaattagaatcagggaaagtacagatccaaaaaattcttatggcagggaatgaaaggtaggagcaaatattgaatcaactgaacaaattaaattgtggtagtcattattaccttaacctagatttaatttgttcagttgattcaatatttgctcctacctttccccccccccccccccaatcctttggatctgtactttccctgattctaatttgaacactaggaaagtagcattataggccaggcgtggtggctcatgcctgtaatcccagcactctgggaggccgaggaaggcaaatcacgaggtcaggagatcaagac

SEQ ID NO: 108559 - DNA, 302 bp, Homo sapiens
tatctaacaaattcctattgttttggaagataattgaaaatgcctaaatgtgtaagtacaaatacttaatcagtgttgtatgagaggtgcatttaatgccctatgggaggtcaaaggaacaaaggaagaagagattaattaactcagactatgatggctggtagcagtagaggtggctgttagtggaagagaagaatttgaacacggtgtgatgcaagaaatgacaactccaggtgacggcaaaggcataagcagatgtgaataagtagtgggtttctaagtgaaaagagcccagcttaatt

SEQ ID NO: 108560 - DNA, 269 bp, Homo sapiens
gacaatgcagctgggatggtcagagacagaaccaaggcccaggccagacgcctgcacgagacctgctcttgctgggacctgctccgtgacaatgcagccggggatggtcagaaacagacccaaggcccatcttgctgggacccactccgcgacaatgcagctgggatggtcagagacagacccaaggcccaggccagatgcctgcacaagacttgctctgtgacaatgccgctggggacagtcagagacagacccaaggcccatcttgc

SEQ ID NO: 108561 - DNA, 557 bp, Homo sapiens
aagcttcttctttataagtaagttacaagcatctatttgattacatagttaattgtacctgaaaattatttatataatgaaatgtgaagtattttttattataaattgcttcttttagattatcttttatgtacatttaggatattcatgttttaaagctgcatgtacagtagttaatattatcaacaaatttgattttagagtagtaaatgggacatgacagaatttttttgtcatataaagagagctatgagaataatggatagggttttgaaccaatgaaccaatccctgcctcagcgtttaaggaaggagggtatgcaaattacccagataggagggatgcttatcttcttcatgaagttccccagggaagatttcacgtgtacctcattaatttgtattagtattttgaaatcttcatagtaagctagttcttctgtattaatattttctaggagtcttcatatgtcactctaaaaacatgaccgggccaggtgcagtggctcatgcctgtaatccgagaactttgggaggccgaggcaggtggatcactga

SEQ ID NO: 108562 - DNA, 405 bp, Homo sapiens
acaaagctgaagacatcacactaccagacttcaaaatatactacaatgctgtagtcacccaaaccgcatgatactggcataaaaacagacacagaggccagtggaacagaatagagaacctataaattaattcacatatctatagccaactgacttttgacaaaggcctcaagaacatctactgaggaaaggacaatcttttcaataaatggggctgtaaaaactgaatatctatatgcagaagaatggaactagactctcacctcttaccctttataaaaatctaattataatggtttaaagacctaaaactcagatatggaactagaagaaaacataagggaaacacttccagacattggtcttagaaaacattttatgaataagacttcaaaaggagtcaag

SEQ ID NO: 108563 - DNA, 316 bp, Homo sapiens
gctcaccgtgtgccgtgctccaggaagtaactccccctaggattccagacaaagggacagttcaaaagcttgtcaacagcattgcaataaggtcaggactaggtagcaatctgtttgcaagtcaggtgatgtccaattgtttgcttcccccataacggaaggagaatttaattggggtatcagctgacacattagtaaccattttatcagcaggttattgtcatttcttagcgctaactcagaaggactttgaagaatcgagtgacatttctacaatgaagccctttccattcccatctatttattaatgtgaaca

SEQ ID NO: 108564 - DNA, 833 bp, Homo sapiens
gtggcgccgctgcagtccctgtctgctgtgaccagctctgaccaaaggaggcgtagtaaggaagccaggacacctggaacccgggatacggactcagtggtctttgaggatgtggctgtgaacttcacccaggaggagtgggcttgctgggtccctctcagaagaaactctacagagatgtgatgcaagaaacctttgttaacttggcctctataggggaaaactgggaggagaagaacattgaagatcacaaaaatcaggggagaaagctaagaagtcatatggtagagaggctctgtgaaaggaaagaaggtagtcagtttggagaaaccatcagtcagactccaaatcctaaaccaaacaagaaaacttttactagagtaaaaccatatgaatgtaaaaaaaaaaaaaaaaaaaaaaaaaaaaaaaaaaaaaaaaaaaaaaaaaaaaacaaaaaaaaagagaggggggggcgcgcgcccaaaagattccccccgggggggcgccaactcaagggccaaccacggatttttggaaaaaagagggggccccacttatgaggagggagtcattattatatatatcagagacgaggagagagaggaggcgcgagcgtgtttataaagaagaggtcgtgggagagtggggaaaaacacgagggagaccaagggaggggaacacactgttggagagagggagggcccacctctaatagctcgggggaggggggacgaaacacactgcgggggaacaacaaaaactcaccgaaacgaggagtaatagaggcgcccaccggaggggggcaaatatccaacagtgcggagcgcgacaaa

SEQ ID NO: 108565 - DNA, 606 bp, Homo sapiens
accagccgctgcgctccgctctggggtctcctcaccccagaaggccctcaggtggaggaagggcctcaggtggaggtaggacctgtgctggccgcgggagaggtaaacagaacaccaggacatcccagagtctgggaaatggactcagtggtctttgaggatgtggctgtgaacttcacccaaatacattttctttgtggatctgcatgacttatggtaccctcctcatctgggctgtgaatatatatgactaataaactgttgtcagttgcatttgtccagtgatggatatcatgtgttagcctacctaaatagccctagggccctaattcctctctcaccaatggggtgagtgggaggctattgaaacatgcacatccatgataccccatggtcaggcactgatgagcaaagaaaagaaggtacatttggtatcaatcctttccaaagcatgagaggatgtaactcaactgttcttccaaagcaaaacaagtagccagggggctacattgttttctgtagtactgctgcttaccagcatgtcaaagggataatcttgagatcacaaggccgttggttcccaccagggtcttaggcaaaattacc

SEQ ID NO: 108566 - DNA, 509 bp, Homo sapiens
accagccgctgcgctccgctctggggtctcctcaccccagaaggccctcaggtggaggaagggcctcaggtggaggtaggacctgtgctggccgcgggagaggtaaacagaacaccaggacatcccagagtctgggaaatggactcagtggtctttgaggatgtggctgtgaacttcacccaggaggagtgggcttgctgggtccctctcagaagaaactctacagagatgtgatgcaagaaacctttgttaacttggcctctataggggaaaactgggaggagaagaacattgaagatcacaaaaatcaggggagaaagctaagaagtcatatggtagagaggctctgtgaaaggaaagaagagatggggttttgccatgttgcccagactggtctcaaactcctgagctcaagtgatccacctgcttcagcctcccaaaatactgggattataggcgtgagccaccatgcccagccaaaaactttaaacttagaagaacattgcaag

SEQ ID NO: 108567 - DNA, 437 bp, Homo sapiens
ggagtgaaatgtgaaagaaaaactataaagttaactgaataaaatgtaggatgaactttctgatttagagacaaggaagaagtttttaaaacttctaaagtacaaaccatacagaaaaacaaataaaaatttgattacatcaaaattatttctacccatgaaagacatcacatatacaaatttgctaggtaacaggagaatcgaagaaggtatttgcattgtcaaatatctaaagtatatgagggccaggtgccgtggctcacacctgtaatcccaacactttaggaggccgaggcaagcggatcacttgaggtcaagagttcgagaccagcctggccaacatggtgaaacccctgtctctacaataaaagtaaaccaacttagctgggcataacggcctgtgcctgtagtcccagctactcaagaggtggagatgg

SEQ ID NO: 108568 - DNA, 431 bp, Homo sapiens
ttgagatggagtctcactgttgtcgcccaggctggagcgcaatggcacgatctcagcttactgcaacctccacctcccgggttcaagcaattctcctgcctcaaccccccaagtagctgggattacaggtgcataccaccacgcccggctaactttttggatttttagtagagacagggtttcaccatgttagccaggctggtcttgaactcctgacctcaggtgatccgcccgcctcggcctcccaaagtgctggggttacaggtgtgagccaccgtgcctggctaacatactctttctaaatatctatctagcaacatgcattatgattagaaatattaattccctttgatccaggcattctgtttttagcagaataggcacaaccgtttgcataaaagacttagagtagttttattcatattaattaa

SEQ ID NO: 108569 - DNA, 451 bp, Homo sapiens
gggcaacacagcgagacccccatctctacaaaaaatatttaaaaactagctgggcgtggtggcacatgtctgtagtctcagctactcaggaggctgaggactgcttgagcccgagaggtccaggctgcagtgagccatgatcgcaccactgcactccagcctggtgacagagcaagatcctgtctcaaaaaaagtaaataaataaaataaataaataaatcagctaattaaatcagggagatgccctccacctttccataagggtgggtaggtgattagagccttagcatccacatttcttcatctacaaaacagggcaaataccatcaacccaaggtgggggtggggggaggggcagtgaagactgagatgatacatttgacaaaaatgctatacaaatgttaattaattaattaaatgcaaagttcctcctggcccccaagggtagtat

SEQ ID NO: 108570 - DNA, 451 bp, Homo sapiens
atttttctaatagtcatcgtgagcatcttttcatgtttttttggtcatttgtataacttctttggaaaatgtctgtggaagttctttgctcatttttgagttgggttgtttttgtcaggtgttcgtcccacctcatcctcctgagtacccaggactacaggcacatgccactatgccccactaatagaatctattttagacctaattatattctgtctacctgaaagacaattgaaataaaatgacataaagagaaagataaaacatgccaacactaatcaaattaagctggagtggctatgttaatatcagacaaagcacacttcaaaacaaaacactgggccgggaggctaatgcctgtaatcccagccctatgggaagccaaggtgggaggatcgcttgagaccaggaattcaagacctgcctgagcaatatagcgagactccatctc

SEQ ID NO: 108571 - DNA, 334 bp, Homo sapiens
ttcctgggttcacgccattctcctgcctcaacctcccgagcagctgggactacaggcgcctgccaccacgcccagcttatttttgtatttttagtagaggcggggtttcaccatgtttaactgcttattttcttatctcaataatccattagaccaaactgaataaaggaacactgccctatttatttcctttatagtagttactgctatttaataacaatacttttctcttctcccaaaacgaaattctattaggctggtgcaaaatagctcctcgaaaaaaaatcagcttaaaacactcctacaaatcctgcaggagaaatatactaatgga

SEQ ID NO: 108572 - DNA, 498 bp, Homo sapiens
gggcttgtggagagaaaagaggagctcgctgccagggaggcacagaatgctgggctgtttggtaccccttctaactcctgaccgcttcttggaatcccagggctttctgagcagggccctgaaacatgctttcttgtaggaaactagggcagagggccaatttgacgaactgactttaaaaaattgttgattcaagagtagcaacttggctgggtgtggcggcttatgcctgtaatcccagcactttgggaggccgaggctggtggatcacttgagctcaggagttcaagaccagcctggccaacatgatgaaaccccgtctctaataaaaatacaaaaattggcggggtgtggtggcacacacctgtggtcccagctacttgggaggctgaggcaggagaatcacttgatcccaggaggctaaggttacagtgagccaagatcacaccactgcactccagctgggatgacaaggttactgagactccatctaaaaaa

SEQ ID NO: 108573 - DNA, 257 bp, Homo sapiens
aaacaatccacccgcctcagcctcctgagtagataggactacgggtacaggaaaccacactgggctaatttttattttttgttgagacagggtctcagtacgttgcccaggctagtctcgaactcctggcatcaagtgatccttccacctcggcctcccaaaatgctgagagtaccagtgtgagccaccgttcctggcctgaaaatgtttaaatatcaaattgagacaagggtctataggccagagttgatgataaa

SEQ ID NO: 108574 - DNA, 404 bp, Homo sapiens
atgttcacagtaaaattattttgtaagggcaaaaaactagtaaccaactaaatgcccatcaacagtacctgaaatgtaaattctgtatatccatacaaaggaataaataaatgaactatatttgcatgcagcaaaacagacaaatctaaataagggttaaagaacaataaaaaaaaaacagactcaaaagaatacatactatgattccacatatttaaaagtcaaaaccaagcataccaaacctatagttattagaagtcaggagtatactttagggaggaagcagcgatggagccacaaggaagggtttacagtactgaccatggtctctatctgaacgtgtatagtggcttctcaatgattaaccctgatagttcattagcagtatatttattgtactgctc

SEQ ID NO: 108575 - DNA, 414 bp, Homo sapiens
gagccggacttcctctccgcgccccccgactccgagctcctcttaatggagatgcggtgcggaaagttcaatgaaaagccttggctctaaccctgtggacacaccttccgtatctgctttcatcctgccttacccacctgcgagttcaccaccggacgggggaccctttcagtcacctgtttgcagcgtttaatgaagataacttgtttcttgaaactgctctccaaggggtattactcttttctggttctcttcctgcctttcttctctatcccatctctgataatggttccagtatctgtcctgctatccgaactagaaaaccaggaatcatcattggttcttcatttccacttaacactgcactgtattattttttttttcgccagaattagtgcggttgccccctctgcc

SEQ ID NO: 108576 - DNA, 392 bp, Homo sapiens
attatttattttattcaacacctctaataatctctattattatattaaacatttactctgtattaagtatagtattaaatgttctatatacattatctgttttattcactcaagacaattctatgatgtaagtactactattttccacattttgtatatgagaaaatgttatatcgatagcttgaagggtttgaagaacttgtctaagttgacacccaggtggggaactgtgatctgatcctaggtcatctgaatccagaatcagctttctgccaccattatcaagggacattggatattctgtagcatttactaaaatcaagaaagttaaaaaaatataaacatgagagatctatgatgcccatcttgaggagttcacaatccagttgata

SEQ ID NO: 108577 - DNA, 316 bp, Homo sapiens
gattcccgtaggccacttcctttagatggagccatgttcttgggcaagtaactgggaaatagagaaacagagccagacccagaaattggatcattgtagaagttgattgaaatgcattgcttgattgcctgagccttggtctcagtgaaagagtgacagagccactcatcccaacaaaaggaccctgacgcccagtgtggtgctgtatggacaaaggcccaaagtcagggcggactaagaaaatctagttactaaccattgccttgcatctgaaatctacagcttgcaatctagttgtcaaattgttgttagcatt

SEQ ID NO: 108578 - DNA, 428 bp, Homo sapiens
taaagaatgctgaatataggttgaatctctcctggcttgtagggtttctgctgttttaagccttattgggggtttcctttataggtgatctggcccttttctctagctgccttagcttttttttcctttcattttgaccttagagaatctcatgtgtcttgggatggtcatcttgtatagcatttcacaggggttctctgcatttcctgactctgaatgttggcctctctggcaagcttggggaaattttcacggatgatattctgaaatacactttcgaggttgcttgctttctctcccttacagggacaccagtgagtcgtagatttggttccctttacatagtcccatattttacataggttctgttcattctttattgttttttcttcatttctgaatgagttatttcaaagagccagtctttg

SEQ ID NO: 108579 - DNA, 795 bp, Homo sapiens
gtggagcatccctgcaggggactctggccagcctgagtgacgtgatccaaagagcactcctgggtagaaaattgcctgggtggaacgcctcaccagaacagcacgtagcaggcccccgtggaggattaacacagtggctgaacaccgggaaggaactggcacttggagtccggacatctgaaacttggtaagactcgtctttggaacttgccctactccatctgagtggaagcgtggcctgatcacccacggtgtgcctgtattggcacttttgttctggttttgacttgacttgacttggtaagactagtctttggaacttgccccactccatctgagtggaagtgtggcctgatcacccacgacgtgcctgcattggcacttttgttctaaacaagaaaatatggacaggatacttatctaaataaaattactaaatattttgatactttattccagtaaatatggatgcttagataaaagggatcatacacaacagcaacataatctttccaaaatcactaaaagaaaataaaaagttttataatcatgttttaaatggcataaagaagtaaattttccatgttcatagactgaaagtgctaaatctagtaaagatgttgtttctaaatgtattcataaagttaatgcactgcaataacataatatttgccaaaattatatttattctaaaatatatgtagaagagaatacagtaatgagaatcaattatgtgatacatgagatggaaggatgggatgatatgccataccagctattaagatctactatatc

SEQ ID NO: 108580 - DNA, 436 bp, Homo sapiens
gatcctcccacctcaggctcccaaagtgactgggcccacaggcatgcaccaccatgcctggctatttttcattttctttagttcagatgggggtcccactgtattgcccaggctggtctcgaactcctggcctcaagtgatcctcccaccttggcctcccaaagtgcttggatacaggcatgagccaccttgcctggcctagtttcttaactttgatataattaaatgtattaatattttcctttgtgatttatattttgtctatcttgtttaagaagtccttccctggctgagtgcagtgaacccaggagacggaggatgcagtgagacaagattgtgccactgcactccagccagggtgacagagtcagattctgtctcaaaaaaaaaaaaaaaaaaaaaagtccttccctaccctgaaattataaaaaaaatt

SEQ ID NO: 108581 - DNA, 345 bp, Homo sapiens
acaagccatcatcactcaaatccactttgcaagcagtctggcagttctgttgtgatagaattttgacctgcttttctgtgggcaagctgatattcttacagacaatattgataagaagttgccagtttttctctgtctgatgctttttgtcgtggtattgggcagtacaaacctcttacttggccttgagtcttatttgttttgaggttgcgggtagtaatgtgatttcagagaattagctagaatttctagattggaggttctaccatccatacaattgcctgaagaagccaacagctgggcctgaagtgatctgtagcgctgatctccttctttaccccaagt

SEQ ID NO: 108582 - DNA, 410 bp, Homo sapiens
taacatttttgtagatgttgtgaaaaacatttcttgtaaatcaatatctagtttagtaatgtgtcaatatcacctctttaacaaggtcttgttgaaatgttccagcaaggtccagctatgttccagggggtcagagaagtgtgcccctaacatggttgtggggaacagagcatttcctctgaggaaggagcttctaggactagaaatgaagggccttgggaatctccctaagccatcagcttacagtggagcggagcggacagaattctttctatgctctttggtgatttcaggatggagcatggaataggagctgctcatgatatgtttaggtggagtcaggggtcctgggtttcagtccctcctctgactcttaacagaacgtaatcttgagcaggtcatttgacctt

SEQ ID NO: 108583 - DNA, 237 bp, Homo sapiens
attattcatagattgtgctgtagtttgttgaggataaaatgagttaatatatgtaaactgtttagaataatgcctgatacctgttattaatatctactgcttggaagtcagaaaaaaaaatcctatcacaaaggcaacagacactataaaattctttggaataaattttgcaagcatgctatgtgacctaatgtgagggtacctataaaatattatttaaaaaacgtaaaacaggac

SEQ ID NO: 108584 - DNA, 461 bp, Homo sapiens
ccaacttctcctcactgagtgggaccctggacctcggactctagcacaaccactctggccccacctcaacactttagtcggaggcggttctacatttcactgaggaggaaatcacagagacaacccacagcccgtctgccactggaactgcagtagtaccaccctaaccaccctcaggatggggaaggaacaaaggacctggttgctatgctggcatttcccacacacaacagccaccatgcagagaggagcccagtctctcttccctgcaagccctcaatccccactcttcaccagactgagcccccggcttgggaccacagaacagccatcccatgcatggctgagtatatccacaggtagaggctctatgtttccctggaaaagggatcttagagtgaccaacagcccctctgccactgccacgacagtggttctgccactgctgccctcagtctgag

SEQ ID NO: 108585 - DNA, 468 bp, Homo sapiens
tgtacagaaagctttaatgtctccccatgacctttatggcaaaaaccaaattccctcgaccagtctttggattactacacaatacattgtcaaagaaaatagcctggaatggtgaacagagcctgaggctcagttgggagtcctgacttctcatcagctgtgcatgagcaaatttggaggtgttccttaacttgtaaaatcgatttggatttttggtattttaagcatgatttcctttagttctttttttttttttccagagtgctagaattcagtcttttagttctttgaacatatttataatagctgctttgctgtcttgtctactaagtctgacatctgggccttcaaggacaatttctgctgcctgcttttcccttctttctgtgtgtcatacttttctgtttatttgcatgcctcatgattttgtgttgtaaactgggcattttagatagtattttgtagcaa

SEQ ID NO: 108586 - DNA, 541 bp, Homo sapiens
ggggcgtggcacagggtagacgttccataaacatttgagcaaattacagaacttgtaaaggactcagtcccactttctttttcctgcaaagactaggggcaattgcttctgttaaaatggcctctttgtagctacagatagcatgttgagtcagtatttagaaaatgaatgtgcctgtctgtacttctgcatttgtaagcataaaaacacacaggtgggcactgcccagcaagtggttaggaccacgggcactgtatcactgacatattcttcttcttttgtcgtcttcttcttcctcttcttcttcttcttttctccttctccttctccttctccttctccttcttcttcttcttgagatggagtttcgctcttgttgctcaggctggagtgcaatggcacgatatcggctcactgcaacctctgcctcctgggttcaagtgattctccttcttcagcctcccgagtagctgggattacaggtgcccgccaccatgcccagctaatttttttgtatttttagtagagacggggtttcacc

SEQ ID NO: 108587 - DNA, 340 bp, Homo sapiens
ctctacaggagcccccttccaggcccaccagctaccccccagattgctgtatacgcagttgtttcccttgaccaagaattgagagccatttcctcctcccaaaaagcagaactcatagctctcaccagggccctaaatctttccaaggcagggagacagccgtttaggaggcccaacgagagaagcccctaaggagggcatgaggttagtccactatataaaggcctccaaaactgaggtggtctcataaatgaaaccctgggtccatttgacatccatcctgacttccaggtagcctgttcttgaccagcaccttccttgtgctttagtatatctcatg

SEQ ID NO: 108588 - DNA, 349 bp, Homo sapiens
cataaaataaatgttacatgaaaatgaattgtataggctgactacatgcattaatacttatacatgataaggaccagccaacgcttacctaaaaatttagctctcaggtggtcctttgattttcagttcggggccacgcaaagcaaatcctcccataccctaaatacacctcatgtggcatcaaacaagaaagtatatgtccaggtttaaggatcaggattttttaaactatctgttttttttaaatgagggcttaaaaaccttggacttctctcttcccagaaattgagcaacattattaattgatgactatttctgtttaaattaaatttcaaatgcagagtcatta

SEQ ID NO: 108589 - DNA, 665 bp, Homo sapiens
catcatcccttgctgcaacaagcaaaccaaacttggttcaactctaggggtttcctggtggtctttggccagaaaatattctataaatgagctaattactcagttgtgtccattctgggaaacaaatctgaattctactagttaggcccacctccttaacactaggcctggcatgttcttaaagcaactctgtccctctctgtgacttcagttcttctgggagatttattattaatgggctcatatgatgaaaagattttagtcttttggacagaaggagtaactttcttcttagaatccaaactaaaaatggatctttcatttataaatgataatagctaacagctaatactatatatcaggcaccgagctaagtattttacataaattgttttaatccttgtaacaagcctatgaaatggatattattaccacctccactttacatacaaggaaacaaatacagagaggtgaattaaattggccaagattatacagctaatggtaaagttagggctcaaattcaagttgttctaacactacatcctttgctttttttgctgtgagattttttttttcttagacacctaggttgcttccaaatcttggctattgtttgtttgtttgtttctgagatggagtctcgctctgtcacccaggctgga

SEQ ID NO: 108590 - DNA, 500 bp, Homo sapiens
cagagcttcctgtcctttccaatgaattccaggcttcccatggtgcttgcagggctctgccggaagctgctgggaaagctgacttccattctggttgctatgaactccatttttggttctgttctgtgaccatcttcatttcagtcacttgcaccattataaggattgaaaagactcttggcagaaaagcagttttttgtttcatagcattagggtttgatatataatattatttttgaacagaaaaatttcacataagagttcataaagggtggtattttagagctgaaggggcttagaagactgtctagttcaaccctgagatttttttcaggtgaggaactgaggcccaggcagaaagactggttttctccagccctcacacatgtcagtgagccagggttaaaatccccagaggtctgactcctattcatgtgctacttcccttaccccagggtcaaaagctcagatgctttcagagtccagataagtgaggagga

SEQ ID NO: 108591 - DNA, 1977 bp, Homo sapiens
ttttaagatggagttttcgctcttgttgcccaggctggagtgcagtggtgcaatcttggctcactgcaacctctgccccccgggttcaggcgattctctcctctcagtctctcaagtaactgggattacaggcacacaccaccacggccagctaattattttgtattttgagtcgagaggagaattcaccatattggcctcaggtaatccgcccgcctcggcctcccaaagtgttgggattatgggcgtgagccagccacggtgcccggcccgttttattgtttgaaaaacaagtacaggttgttattatccaagaattgttgatagagtatatactgtatttgaagtgtagaactgaggcagaggctgattaatataactagtttacatttgttagcctttcacatctgtgaaggaataaagtacagacaaaagtggaaaacaaaccagaaaaaaaaaaattgtgaagcacagagctgcttaaaagagtggtgtcacattaaaagaaaaaagtcacagaaataagtcagtattttgtttagagactagaactccaactgctagccaactgcctagaatatagtaaatattttctagtttcttaaatgactagtaatattcctacattatgtgatggcatttcccaaactgtttaattagatgttagatttgtagccaaatatgtctaggaaatgcttaaacaatataaaacagttttaatgattggctttttagaacgttatatattagtgtgctttatgcatatccaagaggtgagtgaggtatttggggtttttcagacttacttgattacagatctggagtatctcaaaacagttgttttgtggaaaacactttggcaaactctgagtcttagtcattaaaaatagtttttgggtaaacaacagtgtaatagaaatggaaattactgattcacattgagccatgaagaatttattttcagcgatttttatagaagttgctttatgacaaagaaagctttggttaactggcatttggcatttcacacccctaaattttctacatgaggatttatttctctggttctctcactttctcactcagttatactgaattcatttatgatgagcgctctcaaccattcttattcatcaaagctgaagttggcagagccctctctggtacctgattagaagtccgtcttccgtctcatagggaagtgttagagatggataatgtttctgtgtagcagaagtagtcattatgtccccttaaattcggtcactttgactgcagtagagcttcttagtgagcagtctgtgatggagtatactttcggagaagctcatggtgggggaaacctggaatttatctaaatatttcatttctttgataaattacattaaaaaattaataagagtatctatttggtgaaatcattttcctccacgtgaccaaatgagaaatttagtgaaagatttaaaatcatttttcagactttttccacattagttgggaagcaaaccccttttttaaggcaatgtcagttattaagctttagggaaccacatgccactttaggtaacacatgattggagagattgaagagtgaagtccctgctttaaagtgtactcctgtggacacagtaatacatatatttaaaatggttcatgttaagagtaggtatatttctatctaaatactctgtagcttttgtgattcagggaaatgagtggagcctcacaggcacaagaatctagtaaattctaggtttcttgtgtggaactcagtgggcaaaatcttaactgagtgaattcttgattattggtatcacatttattagtctgtatgtatctgtgtcatcgatctccttaagaagagactcgtagatattgactgggagacccaagctgaatgctaaaatctgctccatggatataagctgatgcagtcatcatttcacattaaaatgtaccacagctatatatgcagca

SEQ ID NO: 108592 - DNA, 188 bp, Homo sapiens
cctgatcccctcgggggttatttttgggaagggactatgatcattcttgctttaaagttaaactgtaaactgaattcatgattagcttgacctatttgtaggaatgagcaaatgcagttagcttgtgaggtgagaagcaagacagagtgaactatgttagaattttctcactgttacattcacacata

SEQ ID NO: 108593 - DNA, 194 bp, Homo sapiens
atgtggatacccaattttcccaatatcatttgttgaagagattatcctttctccattgagtggtcttgatacacttgtcaaaaaaatcatttacccagccagcttcagtagctcacacctgtaatcccaatactttgcaaggccaagatggaaggattgcttaaggccaggagtttgaaaccaggtataacaag

SEQ ID NO: 108594 - DNA, 821 bp, Homo sapiens
  misc_feature (821)..(821): n is a, c, g, or t
ggcctgcgtgggaaatcttcgattcttgctagcttgcaacatcaagtcaaacctccttaaacctccatgcatccttttcatgacagggttgctgctttaagggtagagggtttcggtcagcgtctgtgtcaacacactcatttaatggttatcaggcaaggctggtccctcagtagggtgggggagggaggctccatgaattcctgggttgactggcatcctcagctttatcatcatcccccagtcactggagggtgaaggcaagaagcaacagtgaaagccacttaagcaagcccctttgatttaatgtttgattttaggctacgtgttggtctgctcgggccgccacaacaaagtatcactgacacagtggcttaaacaacagacaatttttcacagttcgggatgcagaagtccaagatcaaggagccacaacagggctggtttctcccaaggcctccctccgtggtaattatttgaggccttgacaaaaaagtaactgcatacttaaagaaccccttaaggattaacgcccctcttcgtctgatccgtcctaatcacagcagtcctacttctcctatttctcccagtcctagctgctggcatcactatactactaacagaccggaactcaaaacacacttcttcgaccccggcggagggaggagaccccattctatacaaacactattctgattttcgggtcaccctgaagttataattcttatctaccaggcttcggaattatctcccatattgtaattactactccggaaaaaagaacatttggatcatagggatgggctgaagctatgattcan

SEQ ID NO: 108595 - DNA, 291 bp, Homo sapiens
acaaaacaaaaccccggacccattaagcagtcattccgcattgggctctctctctgcccagtccctgacaaacactcatctgctttccctcactactgatcataacaagtggccgttttcaacttccttctttcacttagcttgtttcaaatttcatgtattggttatctatctctttgatatctacctttgttgttgtacctgcatccacacaatttatcaccttaaggagacaattttatgccatgaaacttgctggacctgtaactgtgtgaagtaaatcatacccag

SEQ ID NO: 108596 - DNA, 207 bp, Homo sapiens
gacgagtagcagtagtggagatgagaacgccaaagcagttttcaggtcagctgactggggctacagtgtgtggcaggtcctgcttacattactgccaaatttgtactaaacaatgtcaaagatgacttctgggactccaaagtatgtctagttcataatattaaaaactcatgctgagttggaccgaattcacccttctagatcatt

SEQ ID NO: 108597 - DNA, 452 bp, Homo sapiens
caggggcaggcaggggagagaggacaggctcagagagatgtggcttcagttcccggctgtgccaatggagcctcactttcctcctctgtgaaatggggacaggttctccgctgttcggatacagtgtgataaacaacgggagctctggcacgtgtgcttcagcggtgacagactgctgctgaccctacatttataattctaaatttacgatacattttgatccccaaattaaaaaccagagctgggttgtaggcctgggaatcttcccaataagccacgtggccttggatcacacatagacatcacctcccaatgctctgcagttgccccagcaagaagtcctccaacctcagcttgaatgcttcccagcacggggcgctcaccccctccctggccagcccagctcagcgtgtctcactgctcaccactggaactcacgccctacaccaagc

SEQ ID NO: 108598 - DNA, 346 bp, Homo sapiens
gctagattctgagagggaggcatcccaaaacatgcatccaacagtataaagctgccagtctcttacggtttgaccctgaaattaagaacacatcatattcctctgcatactattaaccaaagcagtcacggcccaacccagattgaaggagaagggacataggccccagctttcaatgcaaggaatgtaaggctgggcgtggtggctcacacctataatcccagcactttgggaggccgaggcaggcagatcacttaaggccaggagttcgagttcagcctggccaacgtggtaaaaccccatctctactaaaaatacaaaattagctgggcgtggtggcacatgc

SEQ ID NO: 108599 - DNA, 696 bp, Homo sapiens
tatcattagatttggctttggttagaggcatttgttagaggcattagctggtttcatcctacaggcgtttcttagatacctgttaggagaggttgtctcatacagagagaggagcaccttgtgctaatgagaaagacttgggatcaagttctcactcttctgcctgtgctctgtgtccccaactgtgaagtggggcaatactacatgctgtatttgtactacatacttgtaaggattaaataaaataaaataatgtgggttaaactctttgaagagctatgcaagggtcagctatttataggattagtgggcatagcttggtgtttagtgtgatatgatgtgtgatatgtgtatatgtgataggaagtatgcttccttctatacacttgacagagtataggatatagacatgtgatatgatgaaatatatatttagtcttcctccatttcctggcatacagctcctaagatccttggaatcgcttaagtgataagtgtctttttgtatgctagtgaattgatgaaagttgggttgatcacaaatggccagtgatttaatcaatcatgcctatgtaatgtagcttccataaaaaaccaaaaggactgaatttggagagtttccagagaaccaaacatggggaggttcctggagagtagcgagcctgcagagggcatggaagttctgagctccttccc

SEQ ID NO: 108600 - DNA, 552 bp, Homo sapiens
aatccttgaaggtggtgatctccttgacttggatttgctgttggtggtcatcttattcacagttaggaaacaaagcctagcactcatgtagtcaaatccatgcccagcagtgaacaaaacgaattgcttatcatgaagcactgttgtggatgggacaggtaattacctctggggaaggagtacatagacctttcattgggtaaatacttaggagtggaattactgtgttatatggtaggtttgtgtttaacttgataagaaactgcttaaaccgtcttccaaagtgattgtatcattttatacttgcactttcagtattcagttaaggctagctttagtttttgaagaggtggcttataattttttcttttttgagacagggtctcactctgtctccgaggctagtgccactgcatctggccctaagttcttgataatagtgcattagatggttgttctaatctatgtttttacatagatagatagatagatagatagatagatagatagatagatagatagatattttttgtgagacggagtcttgctcgt

SEQ ID NO: 108601 - DNA, 622 bp, Homo sapiens
gtttagttaggattttggatctaattgcaagagagatgattaaaatgggattcatgttccgttcacggcccttagctgaaatgtgggctactcagtgaaactcactaacgttcagtttcttcatctgtagagtggatataatagctacttaaggatgttcttgtttaacgatgtaatgtgtatgaaatcatgcaccttggaacctgtaaagtggtatatactcaggatatgaggtatcaacataatttattctcattaaatttcattcagccaattactctgaatttagaatcatggagaatcttttgactcttgatttgattgtttagtctaacagtaatttagtctgacaagtcttgatttgactaacaaatcgtttagactaacaaattgtttagccttgatttgattgaaggattgtcaatccttcaatttcatgccttctacccatttataaacgtgctctgtatactttcgtatagacaataaaatgttgaacaagcccccaaaagatttaggtgatacattgtaagaaactgctgatcagattgatatatccatcacaacaattctaaaagctttttttgttgcctgtagaatttttttttgtaagctcactttg

SEQ ID NO: 108602 - DNA, 312 bp, Homo sapiens
ctcaaaatagaaaagaaaaaaaaaagtaaaccaccttactcggtcctcctaagtcaagcccatgagctggaagcctgtactagggagaagagcaggtatttgagatgttcaagtcctattagcaccaaatggaaactttctccttgatacaatgatagaactgaagaaggaatccctttcctgagtcacggttctgcagcatgtagtatcttcaccacatggcgttaacaccacctagtggtagcaggtccaccctggggaaagactggttctggctaaagcactcttgacccccgtctgggctgagcactg

SEQ ID NO: 108603 - DNA, 424 bp, Homo sapiens
caggagcccttaagagggttgtgggagagagggaagaacatgagaggccaccttctgaacccgatttttgtggtgacagccgcaggcgagatagtggcttggactctggtctttcttctgctgaggacagctgtcctcattgtgaccagttgggaacacacgatagaagaggctccattagctcctgtgcatcccaggagttgccaccctgtccagtgccgtttctgtctgggcttatttccattacacagcagatgtggtcacctcattctttgctctctcctttcctcgccctcatcccagtttcactgtgccctaggagtgctggctttctccaggaaccccttcagtgtctctgtcccttcagcagacacaccctttagactgtgccttcaggaaccaaggcacctggttctgtccctgt

SEQ ID NO: 108604 - DNA, 142 bp, Homo sapiens
ggccccgagcaacattgtatgagtcttgcttgcctatttgccagcctcctcctttcaatttgaactttgctagatagagacaaaatgtgggctgttattaactcagcaatacatttaaaatattgcaactggctgcatctaa

SEQ ID NO: 108605 - DNA, 623 bp, Homo sapiens
aagttcactcgaggttacatatttgggcacaaataaaaacctttacaggccaagggcaataatcctagagactctaaattctccatttcttttgaaatgagaataggaaatcttaggaagctataatataaatgtttctctttgtttgatagtatatacttattgtgcaactactatgtagaagatactatgttatgttctgtgggagacagaattaagttgaagacaaggcccttgcctttgaggagtttgcagttgaatagggaatataatgcatatacataaaattaacactgggaaataatgtgaagagggctatgagttttaaggaaatatattaattggtttgaatttttaaaaaatctttggtgattacagaaagcttcacaaatcaacatggctttttagctaggcaatgaaaaacagaatttggcaattacacagcaggaaacacaattagcctaagtatgaagaagaaagcacaagctgtgtttggagaaaagcaaatggcctcatacatggacagaaataggggaagaaaaaagagtgaggattagacagcaaatggctggaggaaagggagttccaagaagagaaagtgtgtgtgagagtcctgaggtagg

SEQ ID NO: 108606 - DNA, 249 bp, Homo sapiens
agaacatcctcatctgtccttaggaccctctctcctctgtcaccacgcgattggtgggtagccctgtttctggacctctgcttatttccctctgtgatgtagaatcacttatttacatgcttgtctcctaggagacaggaaagcctttgaggatagaaatgatatgataatagttcaccgatcgcacccgttacttattatagactgctgcactttgtgtaattttacttcctcttaaaaaaggaattc

SEQ ID NO: 108607 - DNA, 468 bp, Homo sapiens
tactactactaaattcgcggccgcgtcgactgtgtgcctgtaatcccagctattcaggaggctgaggtaggagaatcacttgaatcccggaggcagaggttgcagtgagccgagattgtgccactgcactccagcctgggagcctagagccctctcaatcttgtttcttatctttcacctcaaaactcctcccagatctatgactctgaggactaaactactaacagcataacatttggctctactttcagaggggtttgtaattcagtgaggggggaaaatgtttttaacctaaaatgattaaatactcaatataaatatactttcaatttcactttattagcagggaatgattattttgagtaataatctttctcttggttcatatgcctagcacataatctgttttcttttctgtgtggacacgcaatttgtcctgattataagcacccagacattgctgcttcc

SEQ ID NO: 108608 - DNA, 283 bp, Homo sapiens
atgttgtatttttcttttcattcagctcaatatattttaagaatttcccttgaaaatttctctttgacctctggattatttagaaataagatgtttaagtttcaagtgtttagagattttacaacaggaatttctgttgttgatttctattttaagttcattgtggttggagaatactctctatggtttcacttgtttaaattttttgaggtttttaaattaaaattttttaattgcccagaactcagtctattttagtatatgctccatgggcatttgaaaa

SEQ ID NO: 108609 - DNA, 108 bp, Homo sapiens
ttcatttcaactatgtcatcagtacctggacataaggacacttgaaacactttcaatataagctctagatcttctgatggtaagtacacaggtagtgtcctgtcaaca

SEQ ID NO: 108610 - DNA, 277 bp, Homo sapiens
ctttatggcaacctcaatcggtaatatcaatgtctctaatttcaggtgttaatttcttgagacatactagtcctcacaatgtatttacatccctggtcaggttgctggagcctatattttacaaattcaaaccaggaaataattagctccacagtggtgattcctaaaccttaacaggcataagagtcatcagagatgcttgttgaaatatatattccagggccaactccagatactgatttagtaagtcaggagtgaagcttagacatttttaata

SEQ ID NO: 108611 - DNA, 127 bp, Homo sapiens
gaaggcttgtgtagagctggcacttctgcttgagcctgaaggctatctggtagagaagcgttccaggtacagggaatgcaagcaggacagtagacggagctgggacaggacagagcgctcagagaat

SEQ ID NO: 108612 - DNA, 659 bp, Homo sapiens
  misc_feature (655)..(657): n is a, c, g, or t
tgagtccctgttaatatgccaggcactgtgctaggtcctggggtagagtggtgggcaaaacaggctctgccctcatagagcttaggaggaaaggcaaacacgtttcagatagtctcacaaataaatatatcattgcaaactgtgatacatgagagcctggaaagagttccctgagggcagtgcagcctcaaagggagagactactctttagcctgtacggtgtgtagagggcttgggagttggaatgtcttagagctagagcaggggcccagggctgtttcctccatttggctcataggcctgatgtctagggcatggaagtgtcttaagggcccggaaaaataaattaattggttccaaaatacaaagaaacaactgcataattcaagccaataaatgcataaatgtttatagagtatatattatactaacaagatcactggacctcagcttgccttgtagagctatttacaaataagaactttgtatttaaattatatttaatgtggaacatgggtacattttaatttgtttgatgtaatgtgcaatgggactcatggaagtcttcaaaagaccctctgattgggcaatgtgttgggttgaattaagttctgccgtgaataaaagaaattaacagtgttattaacagaaaaannnaa

SEQ ID NO: 108613 - DNA, 1976 bp, Homo sapiens
gcagcttagttactatatacagttaatagcaaaccttgcctgacatactcagaagatgaaatatccacccacacaaaatgaaaatctactttgacctattttccaggttaaatgatcttgggtatcttgctttcactcatgaccacaaattcccatgaaaaactggaagaatagaatcctggggaaaaactaacaggatactttttatgtgtactaagacacaagcaaggaaatattcttacagaatttattcacaggagataggatcaaaatcttaattattaacattatcatcctataggatgctagaataatacttagaattttttactttacagccaaaaggctgtttaaaatttattgaacaccaacagtgtgggactgaagtaccttacagaacactgataacataatctttgtctttaagtcctttttttttttttcagacgggatctcattttgttgccagaatgcagtggcatcatcatggccactgcagccttgacctcccaagctcaagggattctcctgccttggccttccaaagcgttgggactacagacacatgccaccatactcggctaattaaatacatatttttttgtagagatgaggtctcactatattgccccggctggtctcaaactcctgggctcaagcaatccttccacctttacctcctaaagtactggaattacaagtgtgagctacggtgcctggcctgagtcttaaattcctaacataatgtacattttttgagcataatacaatacatgacatcattaagagattacgtgaacatagactgagaccttttatggtgaaatcttgtgagattcactatgttttatttacgtcttggtaactgctgactaaatgtctggatgaaaatagaggatcttatgtaaaatgagatgaaaagctatatgtcaagccacatttgtaatcctttaacgcttggcttcggtagtccaaactctacagtaacagagccatctaatggccactgggaccaattacaagcagattgcctgggaattactcagttttcacagtataatggaaccataacgtatgctctgcaaataagccatttaaaaatcatttctaattggttttataatacaatatatttatggaagtatatattcctaatttgttttagtttggttaaaacatgcaaggaggcagtcttagaagcttgtgattagggttaagtatatcattacataaaaatttaaaaatccacttaatgtggctacctaagaatggtttgtatgtgaaaagaaaatgaagaggtcaggaacatgactgccttccttgaggctgctaatgttataatgaagcccctccaactccttgcataaaggaaacactttcatcagctgtatattttctgacacatcaaagattgctcacagaaagcaccatttagaaaatttaggagcctttaaacaaaatgtccattttaaattattctttagcagtgtccccaataagaacttgtaaggaaaacgtttcacaattgatttcattttagtatagtaattggattttccagtgactcatacagaattggcttgattctttggagagatcacagtgatgatgtgtaaatatcgctttggtggccaatggaaatacttcgttaagaaattggaaaaaaatgttgatgggtgtgtgctggactttgcctttcctgacccttacactcaccattgtgacagagattgctgattgtgcccagtatgttttctcctcctcacataatattagaacttctgctgtttagttgggcacatggttgcccagaataaatattcttttattactaataagcaaatttagtaaagttgctagatacaaagagcatgcaaaaatcttgtagctacatgtgccatgtccatctcatagacaatgagatgtaaatgaaagaggtgtatgcaacttccagtaaatgctgtttaagggaagga

SEQ ID NO: 108614 - DNA, 916 bp, Homo sapiens
gcttagtctcataatttggaatttaagataataagtagtaacaaggcaagtcttttatgtaagacagtcaaacagtgtcacttcagggacaaaggcctggaagcccttaaaataagttatcttagatgtgccagaacatattcagagctttattcctttaagcttaaggcttcaatacttgtagaaatgcaaatattcttgagaaatgatacattttttgttctcaatttctcaattctacatacctgattatgagtgaagtatccaaagcaggttttcatcagcatgggggatggaaggtaggtataatatgaggacaatggaaactttgggagaagggagtgaggaaatggataaagagaaatttgaaaattttaggctggacttgagcactattgctgctttcctatgaactatcagaatgtttaaatgctttatcattcatggtccactctcaaccaacatttattatcctttagtaattaaacaatggttttacatacatttttataatgtagaaggaaattcaagattccataatcgtaaaatttttcagatttgtctaatgtgtaatttgtgcatcttcacatgctgctaaatgcagatttaaacattacatctgaggatcatgacttttcctcctttcttggagatcttggtataaaattcatctgctgttataaaatcaggtttctacagagttcgtttcacactaaaggtagtttgttactgtttgcatgaggaaaccatgtatgtctcaatctttaattttaggtggtagtgtttattgttcaccctccctcttgcctccaaaagaatgctgaattatacgccaatatttccatgtgtattctgttgccttgatgcgtactatacttgttgcatgtatattaaaaattttgtactatgaaaaggt

SEQ ID NO: 108615 - DNA, 542 bp, Homo sapiens
gcataatctctaactgaacatgttttattccttcaaaagaaaacactgtaaaaaatgtgtgtggtataaaagaaggaatggttaattttgtttcagtagatcagagaagagtttactgatgaagtgatctttgagttggacttaaatgtaggcaggagcaaaagggcatttcatgcaaaggcagttaagatgtgaagccatatagtacattgagaaaatcattaatatttggacagggtttggtggggaaatgtagggataaacagccccaaaattaagaccatgagaccgaatttaagggcttgtattccataatgagtctcaagacttaaacagatttgcatcttagaagcatcactatggtaccatatagatggttggtgggaagaggatgcagaaagtggtgaggccaaagtgctgggattacaagcatgagcccctgtgcccggctaggtgatgtatttctgacagtagtccaggcaggtaatgctaaggaccttaagttggtaatgtgatagcatgattgaaaaggcagagggaga

SEQ ID NO: 108616 - DNA, 600 bp, Homo sapiens
gggaagatcacagatcacgtggagcgagaccagtggtcaaaaactgccaactacagccaggcctggtggcttatgaaggtaatctcaacggccgggcctggtggctcatgcccgtaatctcagcactttgggaggccgacgcgagcctatcacctgaggtcaagagttcgagaccagcccggccaatgtagggaaaccccgtctctactaaaaataccaaaattggccaggcatggtggcgggcgcctgtagtcccagctacttgggaggctgaagcaggagaattggttgaacccgggaggcggaggttgcagtgagctgggatctcaccactgcactccagcctgggcgacagagcgagactccatctcaaaaaatttaaaaaaaaaaaaacaaaaaactgcagactccaacaaggaagagccacaggacgataccccaggatgcgggaaaaggctacgccagccttggatcccttctgattaatgggcaccccagtcaccaaaggggtagatgcgtttcactcaacctttatccagccatcagagtataacacagggatgtgccatagacagagatggagaccaacaggtagagggg

SEQ ID NO: 108617 - DNA, 517 bp, Homo sapiens
taaattcattcccatcagcctgtaatccctctctattcaccccatctaccagaatgtctttgtttactgttcctttcttcattttaacagtaaaatgtctgggaaaggggtctgagtacataagcattcacttcaatgtgctaattttaaagaattcctgaggcatttaaaaacagaataaccaaagtgactgttttacaaagacattcttatagcaagagttgacaatgtagatatagttgtaaaaagagcaactaggcccaaaaaattatcagttcagtcagcaagactgctcactaatgcaacaatttagagggactggtgccccttaaagggtatatcaaaatttcagtgatttgaaaaagcataccctcgtccctttagggttaaactcagaaatgtgacttcagatatagtcacattagtcttaagtatcattgtaaggaagtaattttctgctcggaaatgtaatctaagaagaatggagacagtttctaaattctgttttacaagtgta

SEQ ID NO: 108618 - DNA, 315 bp, Homo sapiens
cacgagactgatactggatgacacctactaatccggggacatttgtgttcagattctacaagcagcgccactcactacttgtcacttaaagcatgaaaaactacaaaggcagatatctagaaggaaagttccttaggaaggcagtcgtccccagggcccagggttcttcctggaaagcatctgggaagctcttgaaaggtcagaattcattgaatagacgccagaaacagaacccaccactgcctcgttgcctggggggccaaggcaggcggctgggaggcggaggccgtagccagctgagatcacaccactgca

SEQ ID NO: 108619 - DNA, 693 bp, Homo sapiens
gttgcagagagtacataccagcaatagtgattaacaattgagtagcttaaacaactgaataatgaagatgctataaaatattaagaggaagaaaatcctttcaagcagtaagatgtctcaaggtgacattctgctctcagccattattcagccctttgtttgcttagcactcaacaagttttcatgtctggcatgcatagagatgccctgagcacacagcctcattggattcacactgatggttgcctatcattgtaaatagtgacattttcttggaggttcaagtacagaaaatgacttttagtgactccatgaagtgacagtcaactctagacaattttacaactttgttaattctgtctcttctgctctatttcttttgcttttcagttctttcagatacctaggcttctctttttggtttacctgtccaaaatcagtatcctacccaagcctaaccatgtttctgtcattaattccttataccgactcaaaacttctaaacctccagctttgtttggggtattaagaaggaaagttatctgattaagataattcatgataaagtacacatgatttttagttgttgcttttccagtagtcttttaattctaaaatgggagcttttggaaattgtgtgcagtagatgacattgaacaagagccttctcttgtaccttcttacttcctgttt

SEQ ID NO: 108620 - DNA, 137 bp, Homo sapiens
cctcctcttcctgacggttttccccatttcctcccacagacccagacagagggccatccatttcttccctgggatctcaggcacctcctgaccccagagggcagagagtgtcccactctggacccctaggcctcagc

SEQ ID NO: 108621 - DNA, 215 bp, Homo sapiens
ccaggctggtctcgaactcctgaccacaagtgatccacccacctcggcctcccaaagtgttgagattacaggcatgagccaccatgcccggcgatcctctcattttcacaggtggagagactgaggcccagagaggggaaggggcttccttgcagacacacagcagcagaggtagactgggagtcagaagcagttctccagcctcctgggtcagc

SEQ ID NO: 108622 - DNA, 1018 bp, Homo sapiens
ccagctactcaggaggctaaggcaggagaattgcttgaacccgggaggtggaggctgcagtaagccgagattgtgtcactgcactccagcctgggcgacagagtaagactccatgtcaaagacaaacaaacaaaaacaaaaaaacaacattaagtaggtttttaaaagtcacgttaaattttaatctgaacctctattggctgtttagtcattttcttattatgacaggcttttagaaacttttattctgtgatgctttcgtcagtagaggtgtttcctcttagccagttctagccacaatattgactgggcccaggcatttgctacactcagaaggaattaaccaggcaggagaaaacttggtccctactggaatgaatagtttaaaggccatcttagatgctgaaaactctgagcacaaatgaaagcgacccaagaaggaaaaacttcagagcctaagaataaaaaatggtggtagggttgggggataaactcgcccagagctgacttaaagtgctgtcagggaaggaagtgcctttcctggggaggatgagatggtccatgccgggtctggagctgtgggcgttctgatgttggatagcccaccctagcaggctgcagtgtcttaagggtagtggcatgagatctttggaagtatcgatacatttcctaacagtgagtttgagtttgttctggtatgttctgaatggatatgtggctcaaagattaacttagctaaaaataagtatattagatattagggaaatattgttaataaaggtcttctgtccctgttggataactttagaaaataatgtagacaactgaacgtagtggagatgatggcatgaatacagtcagggtttgatgcttgcttcctagaaacttcctagaaatagaacacatctagacatagggaaataaggttccaaagaaaaccttacacttttattcagattttatgttggcctcagttgtactagaaaagcgtttcagtatgtgtctcttggggaatctg

SEQ ID NO: 108623 - DNA, 824 bp, Homo sapiens
ggtttcttagtatcattctcagaccgggatctgggcatcagctagacaggttgggctgcctggagggacccccaagaccctgaaggcattaacatcctctgcttggcctgaacatctccccgcgggggtgaggtggagttgtacaagagggcccttgtgggtgctgtgtgatgcagctgagccaattcccaagggctccttgtgcccaaagactctggacttgacctgagggtgttacttacggagttggccttaggcattcctgagtatcttcacaggacacatggatacttgccacttcctgtcccgcacaggggcctcattctcatggctcctggtctgcggctgttggctcagactccgtggaggcctctgatgcctgcatcagtgttgcattgagtttcaccctaagttgtcacctccagtgttctggactgttctgtgacatatcctagcccttggtgacagtgcttgtgatccttcctgaggtgcccacagggcccctgcagagggaatggagaggaaaagctgctgaggctctgagaccgcacctggaggtctctggacctggctgctgggaggagacagctgggctcagacgcacctgagggaaggctgccctcggctggctgatcacagccattctgtcctacccatgtggtccctgtcaggggcttaaacacacagcctcctcaacactcaggcagtgatgagtgagcagggccatcagtgctgccagaggcctactggccttgccagccacccactccgagccacgtgggcccagaagagagtccagaggacaaagccacagatagaaagtg

SEQ ID NO: 108624 - DNA, 322 bp, Homo sapiens
ttctttagaaggaagaaatatgaaaaactggttttcgttttagagcttaggaggaaaatgggtacttagtaccattattaaactctgggtaagaaaattttgaaataaatatggttatgagattaagttagctatagactattaggaaattaaaaatagaaaggtaccatcattttcataggatttactttttcgtccactgtttatccttctaaactcatcacttataacctcaaatttcagtataaatggccataataacagaaatgccaagctgccatggctaatgctaggaatacagaagtcactacttggataagtt

SEQ ID NO: 108625 - DNA, 706 bp, Homo sapiens
accgtgtgatgacacagagggaagatggccaaaaagaggggcctcaggagaaacccaccctgtggataccttgatcttcgactttcagcttctagagtcatgagcaaatattaatgaatgcctgtggttcaagccacccagtctcttgtactgggttacagcagccctggctgactaataagggagcatacagtatcagaatctgcacaagggcatgcttcatctctattctctattataatacaatgcttaaatatgaaaaaatgatggcaagaaaaccattacaaggaagaaacccataatgactggcgaaatccatacggagagtggagctgtatcagaaaatgccaaagtagtcatgatgggtcaggtttattgagaagtcccagtgggctgaatgcagagctcagtgtctcacatacattttccccttttgtcctcaccacaatcctgtgagctatgagctgttgccctcttcatcttgtaagcaaggaaactgaggcaaggaagttaagtgacatccacgagatttcagagccagccagggtcagagctggaattccaaggcaggtatcactctgcagacctaagttgtttctttgacagccctaagcccttgggaggttgggggccagagaggggtggttgtaggatctattacgataattggttaaaagatattgggacacattgccttaacgatgtt

SEQ ID NO: 108626 - DNA, 549 bp, Homo sapiens
cttgtcccactgggtcacttcacctcaaagtcctcctctgtgagggggagaatagaacttgtatctagctcagtttttggttgtattagtcatggtaataggatgatgaaaacacagcttccatttaattctcttctggttgggctacatcttgaatgctttgttcagttctaattgccacattttgtgagaaatgcagacaaattagaatgtatagagagaatgtgcaatgaattcaggacacttagctgcagaagtaaatactaaaagaggaaatgatcttcaactgtgtgaaaagctgatatatagaaaagagagttgatgcgtcatgtagtaaaaagagttgatttatgtccaaaagacaaatctaaaagctgggaaccaggtccaactaagaaaggggctttgtaataaattgtcataaatgataattagctcccacatttgggagatactcagttggagactggataacagattgctgcaggattttttaattaggaaagaagttggactgcatatattgtcccactcctccattttgggtat

SEQ ID NO: 108627 - DNA, 562 bp, Homo sapiens
gaggagagggccatcgggaatctgggaattaaggaagtaaggaggtagaattggaatgtttaagccaccaagtaactattagattggtgcctgggttttgggtcatgctctcatgtgcttctgcctgcagcttacttgcctccctcttgggctggttggaaagccgtgggctggttactatgggaattgatgggtgctgctggcagtgagagaaggaaagtacttggaattgatacagaaatactaggagagcaggttttttttttgccctctgctttcctgcttactgttttttgatttgatttaactaatgtggttttagctgaagagagcctttccaagagctcacctgtggtaccctgaggaggagttgagctgtcatcactctaacccaggaagacctcatggagaggagggcaacacaaaggatggctagtttctcagatgaatttctgtttcagcaactggcttctcaggcttcattgaactcaaaattaaacccaagcctctttttatactgttaagaaatgtgctgcagacaggagggggaaagtcagtattt

SEQ ID NO: 108628 - DNA, 309 bp, Homo sapiens
gggagcttttaaagactaccattttcccagcctcaacccagactaactgaatcaaaatctctgagggtttggcctgcacctgagtatttttttaaaacttctttaggtgattgtcataggcagtcaatactgagaacccttgcattactgtttgtatgcataaccgctttctctactccaatcccactccactctgaatcttcctccagactgctgtctaattgttcttttaaagcaccactgtgatgatgcaactgtcctgctcatgcagctgcagtggttcccctctgcctatacaataggggccaa

SEQ ID NO: 108629 - DNA, 314 bp, Homo sapiens
aagtgaagagattcaggctgtatttttaagatagcttagcatttgctggtgcattgactgtgggaatgaaggagaggaatcaaagatgtttcccagaatggtgaattacggctatgggaaggcaaggttccttttgcccttgatgacatccttgtgctgtcattgtgcctggattttattcttctgtatatgcacattcctgcttccagccagccctgcccagggaagaaaaatccttccatgcctttggttagcctgaaggctctccagttcttcctttatctgacctgcattcctcatgctgtgcttaggtc

SEQ ID NO: 108630 - DNA, 594 bp, Homo sapiens
tgctactcgggaggctaaggcaggagaatcgcttgaacccaggaagcagaggttgcagtgagccaagattgtgccactgcacaccagcctggataaaaagagtgaaactctgcctcaaaataaaataataaaatgaaataaagatataaattggccagctagagttacctgaagttactatcttcaattatctgaagacagttctgatagcttcagaattctttcatacaaggcaggaatgcaacttgttttttaatggcagataaaatcaaagagcaaaagcaaaaggtagaagcttgaaagaccagagttgctacagattgttattacatgttccataatttaacaattgtcattgaagttggtgattgtcttgatattgcacatctgtaagaagtaatcaaactattgtgaatttgatagaatgctttaagttttattttccaacaaaagaatgtctacatacggcaaattcatagatctggaatccatttatgtcatcaaaagaggatttaaatttaattgtaagcttatatgatacattgttctaactggcaactaatgaaggattaaaaatgaattttgaaaatacca

SEQ ID NO: 108631 - DNA, 555 bp, Homo sapiens
ggttccagtaacatacagtctcttcctattatcgagttgtaatttctttatatgttcttgataaaagtactttaggaagcatttgtgtttgtgctggggatgggaagaagaatggtgataaaagatatgagtggatcacttgaggtcaggagttcgagaccagcctggccaaaatggtgaaaccccgtctttactaaaaatacaaaaattagccgggcgtagtggcatgggcctgtaatccccactactagaggctgaggcaggagaattgtttgagcccaggaggcggaggtagtgagctgagatcgtgccactgcactccagcctggacaacagagcgagactccatctcggcaggtgggggaaagatatatatgaagcctgtaactgaaaaagcaagcggtagctttgtaagcattatttgtggagatgaaggatttgagggtacttttcctagttgcttcagagtagaaaatgggatgggggactaagaggactgctgatatttgaaaaaacggtgggggtggggaggaactaagaggactgctaatattt

SEQ ID NO: 108632 - DNA, 1149 bp, Homo sapiens
gagcagcctggtttcagggagccggactcacgatgtgcttgagaccctcaaattcacccctggaagcagctgcccccgtgacaaggaactaaggacaggcatgtcatggactgtgaattggagtgacatttgtccctcccttcaccaacagactgccccaagagcttcccaagttatctgccatagaataccttgtttccctcgagtctctgaaagggggccgcaaaagctgtccccacgctggaaatgcagggccaggcttttaaagttttgctcccggattatgagaacacctagaaaattcagtgctcctctccactcccccaaaccccttcacaagcccccaccctttgtttaacaaacatatatatagtgctttcctggtaccagatactactttaagcacttgacaaaatatttagtcatacataaaacccttataattacactgtaattcactctcgtcagatccagtcattgtgaagaaacggaggcacggggagattaagagagctacttaagaagacacggtgccaggtttctacccaagccatttggatctagggtctggaggccatgtgagccattttgcattagattaacgctttaattcagttcacagttagacaatatacgttccccatctatatctatacccatctggaaggcaacaaaaagataataaactgatagtgtcatgtgcccatgacccagctaacaaagaggctctgggttccaatgccccagtctttcatgggattccatcgacctcatgccctgctcccctccccaacagagatggaaacattatcctgaattttgtgtttatcatcccttgtttctctctatagtttttccacttatggttgtatgatttttgtttgtttgttttttgagacggcatctcgctctgtcaccaggctggagtgcagtggcgtgatctcggctctacctcccaggttcaagccatcctcctgcctcatcctcccgagtagctgggactacaggcacacgccaccatgcccagctaatttttgtatttttagtagagacggggtttcaccttatggttgtatctttaaacaatgtcttgtttagttttgccatgtttttggactgtgaataagtagaattattatgctgtgtgaa

SEQ ID NO: 108633 - DNA, 357 bp, Homo sapiens
aagaaatggataagttcctagaaaagtataacccaccaagattgaattgatgagaaatagaaagcttgaacagaataacaagtgaagagattgaagaagcaattaaaaaccttccagtgaagaaaatctcaggaccagatggctttcgtggttgatttctacaaacatacaaagaagaattgtcaccaatacttcttaaagacttccgaataatagagctagagggaatacttccaaacatattttatgagaccagcatcatcttgataccaaagccagacaaaaacacaagacaagaaaagaaaacttcaggccagcatctctgatgagcattgatgcgaaaatccttcataaaat

SEQ ID NO: 108634 - DNA, 1199 bp, Homo sapiens
gaagaatacaatgactactagtacaggttgctactgccttgatttatattaatttgccaccatttttacacacttctgtttttatgccaagagttgtgacttcagatacctcctgaaagtggcttggattctccaggtgtccatatgtcatactttggaaacggatgatatgaattacaatgtgttgccctctggatttgtgcactgtactgtgtgcacagtctgcatgaaaattgcgtagacttcagtgtgggaaaattaggtgctgaactgactgattctttgttgaggaggatggtctcaacatcattatggagaggccaggtgtggtggctcatgcctgtaatcccaacactttgggaagctaatgcaggaggatcccttgaggctgggagtttgagaccagcctgggcaacacctggagacttcgtctctacaaaaaaaaaaatgtttttaactagccagtcatgttgagcacatactgtgtagtcctagctactcaggagactgaggtgagaggattgcttgagcttaggagttcgaggttgcagttgagctatgatcatgccactacattccagccttggtgacagagtgagatcttgtctcttaaaaaaaaaaaaaaaaaattcattctggaaaattttttctttggggttgatcattttctccagagagaaatctagcttctagctgagagtgctaggttggggagtgagttctctggctgttggcattctggaagccaggcagggagaaggattgttaagtacgtggacttttactaaaactttgttttctcagtatctcatgcctgccttttacttttcctggtgttcataagtctagactatctccacttcagaaagttaacttttaggctgggcacggtggctcactcctgtaatcccagcactttgggaggccgaggtgggtggatcatttgaggtcaggaattcacaaccaggctgacaaacatagtgaaaccccatctctactaaaaataaaaaaaattagttgggcatggtggaacatgcctgtaatcccagcactttgggaggccgaggtgggtggatcacctgaggtcaggagtctgagaccagcctggctaacatggtgaaaccccgtctgtactaaaaatacaaaaattagtcgggcatggtggtgggtacctgtaatcccagctactcagggggctg

SEQ ID NO: 108635 - DNA, 677 bp, Homo sapiens
gcttcctttgcctatatttgcagatgagtagttttctcagttttgtgcctgcagaagtgcccaaagatatccaaattcatctcttcattttccattatctctgttcctttgagtctaatttagtgtaatactttaaacatttagaatttcatacgaatcatgttataattcactgcattacagaagaacacatccacagctatcttcaccataagcctatctctagctaagtttccctgtaaggctgcagtgggacatcccattatttttagagcctttcatcatttttcagaggttcaatgagaccgcactactgtaatcttcctaaggtatttttttttctatttttatttgattctagtctagtccatcctgaggtcttagcaaagggttttacagccacatccttggctcacctgaagaccatgttttcctgatagcccttgtgcttgatctttgccctgaaaccatttcttaattttagtgtaatttttttttgtctagaaagaccgggaatgggaaatagtttcattgtttaaacaatcttggcttccttattttagcagttccttttttggtcatttctcttctcacattttactataggtagtgagaagaaaccaagtggcatttttacttttatatctgttgctgataattacacaacaagaagatga

SEQ ID NO: 108636 - DNA, 387 bp, Homo sapiens
ataaccattctgtatattggatattgacttctattgacaaaatagccataacaatattctgatttagaataatactccttttctgctgtatatttgcaagcttttatcaaatattacgggagctcaatagaaatcaacaatatgaatctttatttaccacaaacattattgatgcctatgcttgtttttcttaaaatccattagctttttatgacacatttatactttttcagttgtttattactgagaagtggctgtcctgccagaaaactgctattctcagctgtatccacaatgactaatagtgagtggaagtgcagtggataaaagcaaatgtgtcttctctgtattttttttcatccattggctaaaaaacaggaggatgca

SEQ ID NO: 108637 - DNA, 734 bp, Homo sapiens
gaaaaagtgtatatcattgcatcaaagggaggtgagatgttgacataagacttgtgccaaaatggaactgaaagcaggagagatcaccgtcttaaaattctctgctctaggattttcttaaaaataaagagaaaaaatagatgaacaaataccaataagcatttgttgaatatccactgcatcaactataagaataaaaagttgcaagtaattaacctttctagatctcagctttaactataagatggaaatgatgaacacggtctacttcaaaatgttatgttgaggatatgacgaaataatggttataatagttgctggcacattaatgcttcataagtgtaggcccccttcatcctattacttttgcttttaacacagttccaacaagttttataatttagatgatcagcccgtaaccctccatcccttcagcttgatagaagtacaaagagaaggctagggaaataagtaatagctgaaacagtgtcgtgatacagaggagaaaagaaacgctaaaaccctttataatatgtaaatgtacatgctcaagatatagagctcttgaatatttaatgaaataaatgaaaataaaccattatagtctgtgcagacatcactgtaatgtaatttattacaataagagatgtttgttatgaatgatcccagtgagcaaatccacatttatgactagtaaaatgataactactactacatgttaaggattatcatgt

SEQ ID NO: 108638 - DNA, 478 bp, Homo sapiens
ctgggattacaggcctgcgccactatcacccggctaatttttgtatttttagtagagatggggtttcaccatgttggctgggctggtctcaaactcctgacctcaaatgatccacctgtctcggcctccaaaagtgttgggaatacaggcgtgagccaccacgcccggcctcaatgccacatgtttaacattttttgccatgttgtccaggctggtctcaaattcctggactcatgccatcctcctgccttggcctcccaaagtgctgggattacaggtgtgagctaccacacccggccagctttggagattttaaagttctcgatagtaagggctaggtttaattccttgaaagcccctaagacctaaatcagtgttttatatggactgatttttcaatgttcactttaagagactttgtatgacagtattctttacataatcacttttggtaacttctagtaaatttcctctgaca

SEQ ID NO: 108639 - DNA, 111 bp, Homo sapiens
cgttttctctaactcgctcaggtacaacaatcagacagcgcatgctacaaactctggccagcattttcaattatctggcctttttccctcctgactgccagccctgcaaca

SEQ ID NO: 108640 - DNA, 829 bp, Homo sapiens
tatgatggttccatagcactgcagcctgggtgacagagtgagaccctgtctcaaagaaaaatttaatgaaaattcttggcattataatttaatatttttcctgctctgttctctactttttcctcctggtattccagatattcctggtatgtctatctcacatatttggatattatcctataattcttggatgttcatttgtgttcttaatttttttcattaatttttggcatgtcttgtacctttttcactgaacactagacatgttgtattgagtaatagtcactaaagaacacaggctattagtgtaaggatttgtgttaatctctttggcctcccaagaagaaggctgtaacagttaaatccaccccagtgtatttaccttttaactgcagacgctagaggctttaaattgctcctctgtccttatctttttctcccctcctgactctgggctctcctggatgcttttcttagggggagtctgtagctcttcaagctgtagtccactgttattacacaggaaccctgttggtgcagtggtgaggagtagagatgggcaagcattggaatctataatcctatgactgagtctcagccttttactgtgtccgtgtccctgggctgtgaccttcacagtcttttttgtcttcctagctgagacagcaaggctggagggggctagagtgggagcaatgcccctgctccacctgggatgatgctttagcaaagtttttcaccttggggagcagtctattgttatggagaatgctctggggttatttcacaataattttacagatcactttctcctgtcagagacatgagg

SEQ ID NO: 108641 - DNA, 347 bp, Homo sapiens
catatattttttttttgagactgagtctcgctctatcacccagtctggagtgcagtggcgcgatctcggctcactgcaacctggctgacagagcaagactccatctcaaaggagaaaaacaaaaaacgaacaaacaaaaaaacacaaatgaaaccaaaccaaaccaaaatgcaagggacccgtggcaggtgcctgcatctctgaggctcagctgctcattggtaaaatggggacactgtaactgcctcgcagggcccttacaaataaaggaatgcagagccattcccagaagccagggcttggcagctgctcaagaagagaagtgacaattaataatgacaggctgg

SEQ ID NO: 108642 - DNA, 315 bp, Homo sapiens
ctatcatgaaaatgcctcactgagcaattactaacactcttaatacaaatagaaagtagaaaataaatagaagatataaaaaggtaccaagggaaattatgtaacaaaaaatacaataattgaaattaaaaactcactgggctgcctcagtagtggacaagagatgatagaggaacgaaaaatcgatgaactcaaaagcatatcaatagaaatgtccagtctgggccaggcatggggactcatgcctgtaatccctgtattcacaatttttggacgttttgggcattgggctgtatcctttggcttgttccgctg

SEQ ID NO: 108643 - DNA, 446 bp, Homo sapiens
tgcactaaagatattcagtgcaaaggtacataggaattttggccagtctgcatatgccttgtgtgactgttcacagttcacacagttgttcgtttaactctttattacctgaattttgcaacattttcttctctctgcattattaagtagtggccttaataaaacccaagtccagacgtgttggttggctcctacacctgtgtcaaggagaacttgacgtctgatacattaatgggccttcagcacttctaagccagaaagccaacatcccagacacaggaattttcacctaagaacttgaaagctctaacaaactgcgaatgattagttagggttatattcaacatttagtcattatttctaatgttctaaaaagagatactgcttaactaaatgatcttattccacatagggtagggagggttggtgattttgatatatcacta

SEQ ID NO: 108644 - DNA, 403 bp, Homo sapiens
cctcagaggctcggaggccaaagctgctgtgtgtcctgcgtggagcagtcagagaggtctcaggcttcgtgggtggctatggtcacagctgcccaacccgagccccccatgctgggccaggcctctaagtcctggcagtaacccagccatgctatattcattccattttcagaggggaaactgaggcatggagtactttgacacctctcatgtcagaatcaggctcttctccttcctgagtccgggtgtgcaaatggccctgacactcggggcttgtcacagcctggctcagagcctctcctctccctccttccaggctcagagcctctcctctccctccttccaggctcagagcctctcctctccccccttcccaggctcagaccctctcctcttcctcctt

SEQ ID NO: 108645 - DNA, 362 bp, Homo sapiens
cagatttgttcattttcaacagatgactgcaggaccaacgttgtcacaggggccagcattctctcaccaggcaaagccagccgcttctctgcctggtatcaagctgcctgggcagccaattcgtaatcagagtgccaatttataagtgtagaatgagaaatagaactgccacaggaagcagaatcactgcctggtcggccctgtgggactttctggagacttctgtcaaatatgctcgtgtaagactgggagccatgaataaatgcacatttttgtttgtttttgtttttgttttgttttttgagacagggtcctgctctgtctgctggagtgctgtgatgcaatctccacctcccgggttc

SEQ ID NO: 108646 - DNA, 1028 bp, Homo sapiens
ccaagcctcttgatttaaaaatttctacagaggttttagaaattaccttataattctggaaaaatatggctctaatgataatttaactatgttagcagtgacatatttggcaaataagtatttttcatgatcctgttacacaggttgctagatgaaatgatttttaagatttaaatgtaataattaaaagaactaagctcttccctcccctttaaaaaacttcttttctcaaaaactattctgttaggtaacagaaatccaggactggagtgcatcaagcccacatagcgcagcatatgtcctctgggataatggtgctaagaacctttacagagttggctttgagggcatgtctgatctgaaatgtgtccaggatgccaagggaggttctttctacagagatcactgccctgtgctaggtgagcagaatggcaacaggaatcctggtggattgcagattggtgacctggtaaatatagatctcgacctcgaaattgtacagtctttgcagcatggtcatggaggatggactgatggaatgtttgagactttaactacaactggaactgtttgtggcattgatgaagatcatgacattgtagtacagtatccaagtggcaataggtggaccttcaatcctgctgttctcactaaagcgaacattgtccgaagtggagatgctgctcagggtgcagaaggaggcacctcgcagtttcaagtgggtgatcttgtacaagtttgttatgacctggaacgaattaaacttctacaaagaggacatggagaatgggctgaagcgatgcttccaactttaggtaaagttggccgagtacaacagatttattcagacagtgatttaaaggtggaagtttgtggaacatcttggacatacaatccagcagcagtttccaaggtggcatctgcaggatcagccattagcaatgcatctggtgaaagactctcacaactcctgaagaaattatttgaaacccaagaatctggtgacctcaatgaagaattagttaagg

SEQ ID NO: 108647 - DNA, 740 bp, Homo sapiens
gactgggttctcccagctaggtcgcagtgggcgatggggatccccaagggtgggccgagagctgacggatcggcagcgctggttaaggccccgcacctgcagccccagtgaccttgaacgattccgctctgcggcgggtgtccctaaactagcagtttagggtgtcaggcatcaagcatgatggaaccatgtgtgatacctgccgccagcaaccaatcattggcattcgatggaagtgtgcagagtgtacaaattatgatttgtgcacagtgtgttatcatggagataaacatcatttaagacatcgcttttaccgaattactacaccgggaagtgagagggttctgttagagtctcgtaggaaatctaagaagattacagccagaggaatctttgcaggtgccagagtggtgcgaggagtggactggcagtgggaagatcaagatggaggaaatggacgtaggggaaaggtaacagaaatccaggactggagtgcatcaagcccacatagcgcagcatatgtcctctgggataatggtgctaagaacctttacagagttggctttgagggcatgtctgatctgaaatgtgtccaggatgccaagggaggttctttctacagagatcactgccctgtgctaggtgagcagaatggcacggatcctgggggttgcgattggtggcctgtaattttgattcgactcgaattgtcgctttggcgctggtcgggggtggcgggg

SEQ ID NO: 108648 - DNA, 725 bp, Homo sapiens
acatgtaaaactaaatgtaaaactaaaactgtgtttgttgtgctactaagaagcacacatctatgaaatctaataataggggaatttgacttaattggtgaggtcaggaatgttttccttgaggacatgatggggtccagagagttactagacaaagacagaatggaagaggattccacgtatttgttgattgagtgatataatccagctttctatgtatctgggcttcttttctttgcacatattgttaacctctcaatctttaatcatctctctgggcttctgtgataataaaaggtaatctatagctctggtgcctctaatgttatacaatgaagaataccctacatgaaaatttcttttttttttttttaactgaaattttaattttagatccagggggtccatgtgcaggtttgttgcaagggtatattgcatgatgctgaggtttgggcttctattgatcccatcattcagactgtgaacagagtacccatgaaaacttttttttttttttttttttttgagaaagggtctcgctgtgttgctcaggctggagtacagtgacacaatcacgactcactgtagtcttggcctctcaggctcaagcaatcctcccacctcagtctccttagtaactggactataggcgtgtacaccaccatgtctggctaactgttatttgtggagagaggtcttcctatgttacccgggcttgtcttgaa

SEQ ID NO: 108649 - DNA, 490 bp, Homo sapiens
gcagatacatctaagtaggtttcaactgtctaagggcacatgcctggtgcagggacatgaacaaattgtgagtaaacagggataaaagccctatgagggatgtttaacattgaaatgtataaagtttttatttaatcacaaagttttctatattggctaaaattttataatgataatgaattattcatgtgaaaattaaaaactgttttttttgtatttttaaagaaaaaagcacaaatacacccatagaacactgtgaaatattatctttcacaatgtacaccaggccaggaaattattgggctaatttgagtcttcaacaaaattttactttgtgaagaaataagacaatgctggagggaccaaggttttcatttgcctgtgctccttctgatgccatctttactctccaggtgaaaggatgtttctgagatcaatattcctctcctttgatagttaccttcttttaaaacctactgaacactgactt

SEQ ID NO: 108650 - DNA, 520 bp, Homo sapiens
tacataaaacagtgatgcctttctttcctgggcaagctttatagtttctttactgataaggtgagaaagtcaaagaccgaaatgtctggagtcaaatgtctccaaggcattaagaggaaattttaatttgactagtaatcaaagaaatgcaaattaacataatgcaaatgtttagaaaataccatgccaaggatacaggaaaattcacttgtgcattttatactctgctattaggaatataaattgtcaaaatttttctggatggtataaagagttctttaaaaatagctctgacctagtacttctcttaaggatttatcccaaagaagtaattggagctaagactttagacacaattgtaataatgaaatttttaaaagcaacctaaatgtctagcagtagtgttagtaagtatattgtggtatttctgcaagataaatacagtcaagtcattaaaaatcagaaggcttacttaatgacattgagaaatgctcacgttatattgcaaagtaaaaaaaaa

SEQ ID NO: 108651 - DNA, 159 bp, Homo sapiens
tcaattccctgcccgtccccaccacctacactgctgagtgtgaggaggcatcttctgtagtttcccatccattctcaaaaaatatttgctcaatacctgtagtcagcattgttctaagtaccgggcataaaacagtgaacaaaaaagacaaaaaggctt

SEQ ID NO: 108652 - DNA, 559 bp, Homo sapiens
aaacattcagacctggaatttgatcatactgttcaccagagcagccactggagacacctgagctgaggagtgggtgccattacctgcttcatattttgagggtagggctacttctgaagtgacgtgcatcctctccagatagccttgatcctggcttgggccttaaatattggctttgttcctgttctccctcaaaagtgtggccccaaatttgactacatccaagttagaaagtaagtacagaatttctgaggggaacaggtcctaagatgtgaaaataaataaactgtaggccatgatggaagccccagttgagaactggtgtcccagggaaatctgagagtatggaaacggagctagaagtttccctgtgagggctggagttctgatccacttccttcaattagagaggtgatttttttttcttttaggtaagctgtggaggccaatcatagtcctgagtgataggctaatatcactccacacacttccctgttgccatccctggcctattcatatcctctccttctgcaaaagaggacacctaccttctgcagca

SEQ ID NO: 108653 - DNA, 257 bp, Homo sapiens
atgctttctagaaaatgcgagtctgttatttaggaggatgaagtattcagagaaactaagtgacttcctggagacttattggcaagatactggagttattaggatgaaggtcttctgatttcttgttcagagtttactaaggaaccctggaaagttttggtgaaccattttaccctataaaccctatcacatttatcaaatgagtccttacaatttgcatcttatcttgtaaacagaaataaaaaaaatgataatta

SEQ ID NO: 108654 - DNA, 572 bp, Homo sapiens
gggagagagggatagggaaaggatgaaaggaaaacttgagaagattccaagttgaaatggagcctagttaacagtactgcccatggtggcttattccatgtgatccatcaccattgttatcaaagtcccattctgtgttctcatctgcttacatgcttagcccttgactttctaaatgaatacacggtttaaatttttcatgtttcctttatgtttgtcaattttcaagttttaccctctggaatggttggtggctagttaacaaatcatactgatgaagaatataggctctggcccaggcaccgtggctcacacctgtaatcccagcactttgggaggccaaggtgggtggatcacctgaggtcaggagttcgagaccagcctggccaatatggcaaaaccctgtctctactaaaaatacaaaaacaaaaaattagcaaggcacagtggcacatgcctgtagtcccagctgctggggaggctgagacaggagaatcgcttgaacccaggaggtggaggttgcagtgagcccagattgtgccatcacactccagactgggcaaaagagcaag

SEQ ID NO: 108655 - DNA, 520 bp, Homo sapiens
atcactgaactttccccagattattctttccttttttgaggggaaagctggatataaactggcagttaaaaaattgtaaagaaatcaacttgctcattttcattgtgtatttttgctctcaagcattttccatgaactgtgtgtggattcattgtctgcattggatgacgaactcttgagtgttgctgctaaggtaaagtggtctcttgtaaaattaattttctcactctgaatgtagttttgcatagtacttacttttcaaacttagcagtggtttacctatcattgttttatggtggtaatggaaagtgggtcagagaaaaacatatatgtggctagttgactgaaaaaatttgtttaactttggtaactaacaaagattgataagtactgtgacagggtaggagctgaaaaaaatgaactggaaaataagtagtgagaggaaaatcacattaggaagtgctttctccaatagaggaaatatgaaatttgattaagctttatttggataaatactaat

SEQ ID NO: 108656 - DNA, 378 bp, Homo sapiens
acctctattactgatctaagaattcttattttagatgcatatacagctaaattaatgaatctaaatggatagcaggacaaatttgacatgagcaatttttcaaaaaaaattatttatttgcttttaagaggagaggctatgttgctcaggctaaactcaaactcctgggctcaacggatcctcccacctcagcctccaatacaagtgtgcaccaccgtgcccagttaataaacatttaaaaagttttacaatagttgcagatttacagaaaaattgcaaagatagtacaaaaagttcccaaatcttccaagaagtttctcttattaacattttatgatgtcagcaacttttagtgatagctcaatagtggaaagtcat

SEQ ID NO: 108657 - DNA, 358 bp, Homo sapiens
gataacacctcaggggactcacatctgattcataccagacgtcgagaggaaggaaatgaaaagtgaggacagacattccttccctcggctgagtggaagtcccagtagtcataataactagcagtcactgaacatgtgtggtatgccagccactgtgctaaggactataatgcacagtaaatgttaactcttccagttactgagtgcttactctgtaccagccactattccaggagctttacaagtattatttcatttaatccttgtgacaaccccatgagatgaatcctattattatcaccattttacagataggaaaactgaagtagggagagaagaattaactttcccagggcca

SEQ ID NO: 108658 - DNA, 112 bp, Homo sapiens
tcaggaaactggatgggtctcagggtggtcttttcccaacaaagatctggaagcatctgagatatccagcagcctcatttccatataaatgtagtgcagtgctgatggattg

SEQ ID NO: 108659 - DNA, 254 bp, Homo sapiens
gtgggactacaggcacccaccaccacgcctgactaattttttgtatttttagtagagacaggttttcaccgtgttagccaggatggtctcgatctcctgacctcatgatccgcccacctcggcctttcaaagtgctgggattacaggcatgagccactgcaactggccctatttgaaatttttgtactttcttgttgtaggtacttattgctataaactttcctcttattgctgcttttgcagtaccccatagg

SEQ ID NO: 108660 - DNA, 195 bp, Homo sapiens
cattcttcagtttatatttgcttgatcaaccaaaagaccagccagcagggcactcttgagtcagctctgaagagatcagctggctaagatgatttttccagtgctcaacattaacttgatcatttccccccacccaaaaaaaaaatgcttaactgcagagagcactctactctgggtgacagagtgacgccctgt

SEQ ID NO: 108661 - DNA, 682 bp, Homo sapiens
tagattctggacattagtcctttgtcagatgcagtttgtgaaaattttctcccactctgtgggtgatctgtttactctgctgattattccctatgctgtgcaggaggcctttagtttaattaagtcccatctatttatctttgtttctgttgcatttgcttttgggttcttggtcataaactctttgcctaagccaatgtgtagaagcattttcgaatgttatcttctagaatttttatggtttcagaccttagatttaagtctttgatccatcttgtgttgatttttgtataaggtgagagataaggatacagttttattcttctacatgtggcttgccaattatcccagcactatttgttgtatacggtgtacttttcttactttgtttttgtttactttgtcgaagatcagttggctgttaagtatttggctttatttctagcttctctactctgtcccattggtcatgtgactatttttataccagcaccgtgctgttttggtgactatagccttgtaatatagtttgaagttggataatgtgatgcctctagattggttctttttgcttagttttgctttggctttgcagactcttttttagttccaaatgaattttggcattttttttctaattctataaagaatgatgatggtacattgataggaattgcattga

SEQ ID NO: 108662 - DNA, 405 bp, Homo sapiens
ctatctcagattcccaaagtgctgggattacaggtgtgagccaccatgcctgggttttccttgttgataaatgagcatgggattgttctagagaaactgtgccatgagctgggtgggacaggagcatcaagatcatttcagaaagttctctcgtgaaagccaaaatatgtgcctactccacctctgcccgctagctaccatgtcccaggccaaaaagtccttaggagaggagaatcccatgcaactgtggagtgtgtgctgggcccagtcctgggttcctcatccattgcctgccttaatccccaaggcggctgtggggcacagatttccccatttgacaggacacctcaaccagcggttctcaacctcactagtactgacatgtgaggctgggtgcttctttgc

SEQ ID NO: 108663 - DNA, 144 bp, Homo sapiens
ttcccccagggaaacaaaattgccctcggttgagaaccactgagttacagggataaaattatcagatgtgttcgttttataaaagaatttaataatattttaaagcatatcacatatatttttgccgaggctggtctatttgat

SEQ ID NO: 108664 - DNA, 415 bp, Homo sapiens
aaaaaatggcctttctctccttgctaaaaattcacccagcactggccataaaatatagtccatgcatctgtaacccctgagagaattatttccttatggaactcagctctgttcctttgcctgccttgtagagggctggttcttgttatgggaggcttttaaagtaccaaagtaataatttgtgaagtaaggcccatgaactgcttggtttagcaaattgtgactctagaaaataatatttgaagctggtctcaaaggctggattaaataggaggtgcccatgtttacccaagccaaacctggtagccatcccctcagagcctcttctttgccccatgcctcatatatgccattatcataaaaataacaagagccctctattatttagggcctactttagaccagaaactattaa

SEQ ID NO: 108665 - DNA, 479 bp, Homo sapiens
aagaaagaattttgtacatgggcggggaacttgaaactggtagaaatagaggtggtcttagccagattgaatagtctgtgcataacttctcaacagataggggtttagttaacagagaagcatctctgaggtagaagcatctgaagtactgtgttttacagagacagatactagcctgataatttacaacagaattatcaccatgtttaatggtttcattaatgcatgactccatgatctgaagcaaattttttaaccacccagagtttattttctgggaaatgagaatgtctaccttgtaaagtggtttaaggcatgtaaaataatgtgtggcatttaggtattcaatacatgctagctgctattattattgttactgtgggaatctaatttttttatttttgagagatagggtttcactttgtcacccatgctggagtgtaatggcaggatcatgactcactgtagccttgacctct

SEQ ID NO: 108666 - DNA, 402 bp, Homo sapiens
tagatacaaaattttcagtgtagaattgaaggtgtttcacaaatagtggaactaacttatctttgcagccattttttccccccatttcttacctatattcagcttcactaacgtgtttccttactctcttcccaaggtactctgggcttcccccttccctcgcttgtgactgacttaccatttttttgtgtgaaggttccctaggccactctttgacaaacttgaatttgcattcagcccacctgagttcacattcatttctctcaaaaaaattttgagtttgatacttcactttctatatgtcttttttccccacctgcgtggttttgtttgttggcagatgttgtattttatagtaatttgcgtcttttatatggatgctccaaaacagttcttgattgg

SEQ ID NO: 108667 - DNA, 465 bp, Homo sapiens
caagctctgggatagcatgtagagtgagcagaggcaaggaccagaaccgggatggagtgggatggaggctgtactaccagtgctgtttggtttgggccaggggttagcagggaggttagaacacgggcagagaagagatgctgatgcccagatctgacagtggagtctaggacaccaaggccagccttcaatcctgtctataagcaggtcaaacattgaagtcattctggagagagtcccattttattatctgctcaaatatccccgtattttattgtgaacattgcatactcacacatcttttttcacaccaaaaatgcacccaaaccccaagtctccatctccatctcagccttctctttcctgcagttgactggggatcttcattcagggaccccaccaatatctcaaacatagcctgtgcaaaactgaactcatcagcccacctaccattctctctccact

SEQ ID NO: 108668 - DNA, 389 bp, Homo sapiens
ctctacagtgcccagagtccaaacagtgcccagagtccaaacagtgcccagagtccaaacagtgcccagagtccaaacagtgcccagagtccaaacagtgccaaagctgctggcagaacctgacactcctcatgccgtgtgtccctgctcccgtatcattttacgccacctacccacagcgcccagtatccatcacacccccaccctgccccaaagctaccattttctttttgaaattgtattcaagtgtggagaccccccaactgctgtcaactgagcccttctgactctcaatcagatgggctaattccctgtcatacccggcacagttgtgacagtcctgtgtgtgttgtgtcctcctctagaccatggactcctgagggtgtgag

SEQ ID NO: 108669 - DNA, 259 bp, Homo sapiens
atctgcactgtttgctgtcagcttaaccttcctcagactgatctcatcatcttccttctctcctgtcatctcagctctgcctcctcccagtgttccatgttggctcatggtatactgcccaggcactagaggtatccatgattgtggcctgttgccatttattcctttgagatgtccctgtcaactaccatggtaacccaccagttgggcttcagaccttcgtctctctttaccccactttaaggcagatcagctacat

SEQ ID NO: 108670 - DNA, 700 bp, Homo sapiens
aactattttgcttttaattcagtttgtagattaaggaggcattatatagattttttagtaatttttagtaactttttttaagtgaagaaattcaagattctaggttattactggtggaggcattagtgtgtttcatatcatagttcattgtttattgatgaattcatacacatatgcaaaaaaagataatagatgctcagcagaaaaaaagttcaataagtgctgaacagggtgcttaacatagcagtgaacagaaaggggcatgatctttaattacagtgtaaaaagtgctgcaactggattgtaggggaagagcccatacattacaggggcagctaaccttttctgagtggtttgtgtaagttcttgatcaaagctaagatctgaaggataatttaaactttggtaattatagctatattttagttttaaggtctaaggaatatactagataatttgtcagaatatctaagtataatgataatttttcttcagaactataaaattacacaaagtctgtcttctttttgaagtgagataaaattttggcatcaaagctaacttttaaattatgatgaataatacataattaccagaaaattcttacttctgaaataaaattattcaacattatttttatcttagagtacgactttctgtctcatatttttgagaactgtctactgccaacataatatta

SEQ ID NO: 108671 - DNA, 389 bp, Homo sapiens
gtcttggctctgtgcccccagtgtttgagcacactgtctgggaggcctggggactacctagcccagtccatcacctgtgccacacacctgagcactcctcctggtggcctgagattgagcccacccaacctgcctttaatcactgcagcaggcacccatctgcatgtaccacctgtgggcctggggactggcttgcccagcctgtcacagtcaccatcaacatcagcatggactgcttggaacccagaggttagtcctgccattgctaatgacatcaccgaagccatatctgcttccagaggccaaagaacccacctggccacctgcctgacccactgctgccactactagcacctgagcaagctgcctagaggcccaagaatcagcat

SEQ ID NO: 108672 - DNA, 588 bp, Homo sapiens
tgagagggagtcttgatctgctgcccaggctggagtgcagtggtgcaatctcagcttactgcaacttccgcctcctgggttcaagtgattcttctgcctcagcctcctgagtagctgggattacaggcgtgcgccaccacacccggctaatttttgtatttttagtagagatggggtttcaccatgttggccaggctggtctcgaactcctaacctcacgtgatccgcccacctctgcctcccaaagtggtgggattacaggcatgagccaccgcgcccagccatgaaatggtttttaatgacacatttcccagagtgcccagtggttcttactgccctaggtaagctgcctctcagactcctcaaagcagctttacctgcttcctagacctgtatcctaacactcatccccatagatactaagctgtaaagggattaaatgctaatgtggaatttcatccaagaaatgattaaggatattacagatgtgggtgggagtgattgcagactagtaaggttagctagacttttaaacccttgctcttttctgaaatcctccctacttttcaacttcttctaagtaccaga

SEQ ID NO: 108673 - DNA, 893 bp, Homo sapiens
agcgggggtctggagcaccctttcctggttaatttgtggtattccttccaagatgaggaagacatgttcatggtggtggacctcctgctgggtggagacctgcgttatcacctgcaacagaacgtccacttcaaggaagaaacagtgaagctcttcatctgtgagctggtcatggccctggactacctgcagaaccagcgcatcattcacagggatatgaagcctgacaatattttacttgacgaacatgggcacgtgcacatcacagatttcaacattgctgcgatgctgcccagggagacacagattaccaccatggctggcaccaagccttacatggcacctgagatgttcagctccagaaaaggagcaggctattcctttgctgttgactggtggtccctgggagtgacggcatatgaactgctgagaggccggagaccgtatcatattcgctccagtacttccagcaaggaaattgtacacacgtttgagacgactgttgtaacttacccttctgcctggtcacaggaaatggtgtcacttcttaaaaagctactcgaacctaatccagaccaacgattttctcagttatctgatgtccagaacttcccgtatatgaatgatataaactggatgcagtttcttcagaagaggctccttccacgtttcattcctaattaagggaggctgaattgtgatcctacctttgaacttgaggcaatgatttggggtccaaacccttacatagaaaaaagcgtctgcaaaaagacaagatatgcgaaagcgatccaaaatttttcaaaccctgacttgcaagggcaattccggaaaagaagggttaagaccatcctgaccccccaggtgtgaacgagcgtttgggcactccattt

SEQ ID NO: 108674 - DNA, 245 bp, Homo sapiens
actttggttttcccacagactcctgaagaataggtcagaagaaagggttaaagccttaaaaggggaacaaccattgcggggctcagggaggaggataatgttctttgggctgccgcaccctgatccccggggtcccgaaccctcccgtccctggccaggcctgccagccacagggtgagggcccccttccgccgcaacctgccactctcacaccaatgcgggaccgccttctcttccttccgcac

SEQ ID NO: 108675 - DNA, 1466 bp, Homo sapiens
ggcccaaatctctttttgaacaaaaaaaaaaaaaaaaaataaaatcccaaatagactaaaagggaaaatcctaccccagtcaagaccctacacaaccgtaaagccaggggccctggggctaactaattaactgatttcaatcctcagtgctccttcttaccacctatggcctagaaagaagactccacttctcagtgcctcattgtcctcatcatccttattccagtctgttctctgagaggcttttgtaaacttttaaagttctaccaaggacatgaccctcttctgttcacaaatctccatacatcccaggacactcagattgaaggcacaacccctaagacaaccaatacaggtgtgactctggctcatcttcagtttttactagggcctttttttttttttgagagacggggtctcactatgttgcccaagcctgtcttaaacttctggacttatgtgatcatgacacaacatggttaccaggttctgaaatgttcatggctcagatgcacctccaagcctttgcacctattggttcctctacctgtattactctacctggggtgaagcctgtaatacacagcatttacctgagctaggtccctcagtgtggctgctgccatcaactgtgggtggagtaggcatcaccccagccagtgcctatgagcctcagacctgccacttgggagcagagatgactactcctcttgtgccttctcagtcccaacccagtactccctggcctgacaagcatgcccagaaatccctcatcctgggccttgcaactagcaccttctgggtaaagtacttctcagagctctcagccaacaatggtggtatcctccaagagcaaaccgaatgcagaccatgttacactctgagggctgctggaaagccctgctcacacctcaagggaggaagactattgattctttgtaaaagcgtcaaataggtatcacataagactctaggaagctcatcctgcacccagagaataaaaaaactatttgagatgctcccaaactttacttatctaagtggccatatcattggcatcattcagacttacaatgtgtgcactcagagctgagaacattaagtattgattgctctttaaattcatgttacccaaattattacagtcagttttgtgagtttcattgttttgttgggaacgaaagaaaattgtccataagacataatgacaggatgggtacaaaaaacagttagaaaaaatgaataagacctagtatttgctaccataacagggtggctgtagtcaaaataatttaatcatacatatgaaaatcactaaaagggtataattggattgtttataatacaaaggataaatgcttgaggtgatggagacaccattaaccctgatgtgattattacatatggcatgactacatcaaaatatctcatgtaatctacaaatatatacactattatatacccac

SEQ ID NO: 108676 - DNA, 2379 bp, Homo sapiens
gtcgaggtgggtagatcacctgagatcaggagttcaagaccagcctgaccaacatggtgaaaccccatctctactaaaaatacaaaaattagccaggcatggtggcgggctaatcccagctactcgggaggctgaggcaggagaatcacctgaacctgggagacagaatttgcagtgagctgagatggcacaactgtactccagcctcagcaacaagagcaaaactccgtctcaaaaaaaaaaaacaaaaaaaaaccaggggtcacatcattgacccttctctctctctccctcacctacaacatgcaaagatctacttgttcctttattaaaaatataggtagaatgtctccttttctcccatctgcacggcattcacctgggcgatcaactcatctgaattatgctggtaaacttccctccgtgctaactgcctcctcattaatccaggagtctgttctcctccagtgtgcaaccagatagatcctatgaacatctggattagaccacctctttccccatccaagcatcccagcatctccaaaacagatgcccagcttttcaggcaaccacattacaggcctgaatcttgacccggcttcttgttcctatgagaaagaatagatgcctgtcgtacataggtcccagctcagtcacacctcaaagcatttgcacaaaatggtatgaattcctaaaatagctttctacacctgtttccattggttgccagaaataagaacacttctattaatccttggctggtactcaggactctgagcttggtgtatccacaggttctccacgccaagaactgggaaaacatcaagtgaacactcaagacaccataatctcagacaccacacaggtagtgtcaggttcagggagagactgggacactttctctttccctgtgttggcaccataagcattttcagtgttcagaacccatgaaaataaggcaactgtgaccagctccagctgatcaaacctccattgatccctacacaaccgtaaagccaggggccctggggctaactaattaactgatttcaatcctcagtgctccttcttaccacctatggcctagaaagaagactccacttctcagtgcctcattgtcctcatcatccttattccagtctgttctctgagaggcttttgtaaacttttaaagttctaccaaggacatgaccctcttctgttcacaaatctccatacatcccaggacactcagattgaaggcacaacccctaagacaaccaatacaggtgtgactctggctcatcttcagtttttactagggcctttttttttttttgagagacggggtctcactatgttgcccaagcctgtcttaaacttctggacttatgtgatcatgacacaacatggttaccaggttctgaaatgttcatggctcagatgcacctccaagcctttgcacctattggttcctctacctgtattactctacctggggtgaagcctgtaatacacagcatttacctgagctaggtccctcagtgtggctgctgccatcaactgtgggtggagtaggcatcaccccagccagtgcctatgagcctcagacctgccacttgggagcagagatgactactcctcttgtgccttctcagtcccaacccagtactccctggcctgacaagcatgcccagaaatccctcatcctgggccttgcaactagcaccttctgggtaaagtacttctcagagctctcagccaacaatggtggtatcctccaagagcaaaccgaatgcagaccatgttacactctgagggctgctggaaagccctgctcacacctcaagggaggaagactattgattctttgtaaaagcgtcaaataggtatcacataagactctaggaagctcatcctgcacccagagaataaaaaaactatttgagatgctcccaaactttacttatctaagtggccatatcattggcatcattcagacttacaatgtgtgcactcagagctgagaacattaagtattgattgctctttaaattcatgttacccaaattattacagtcagttttgtgagtttcattgttttgttgggaacgaaagaaaattgtccataagacataatgacaggatgggtacaaaaaacagttagaaaaaatgaataagacctagtatttgctaccataacagggtggctgtagtcaaaataatttaatcatacatatgaaaatcactaaaagggtataattggattgtttataatacaaaggataaatgcttgaggtgatggagacaccattaaccctgatgtgattattacatatggcatgactacatcaaaatatctcatgtaatctacaaatatatacactattatatacccac

SEQ ID NO: 108677 - DNA, 2030 bp, Homo sapiens
gcttgagggcggactttggaggatcccccggttgggggacaacgcatgaggagcatactgaggcgcttacgtacgcgcttgctgcctactgagtaatacatatgcttgaagtcattcagcgcacagccagatagatcctatgaacatctggattagaccacctctttccccatccaagcatcccagcatctccaaaacagatgcccagcttttcaggcaaccacattacaggcctgaatcttgacccggcttcttgttcctatgagaaagaatagatgcctgtcgtacataggtcccagctcagtcacacctcaaagcatttgcacaaaatggtatgaattcctaaaatagctttctacacctgtttccattggttgccagaaataagaacacttctattaatccttggctggtactcaggactctgagcttggtgtatccacaggttctccacgccaagaactgggaaaacatcaagtgaacactcaagacaccataatctcagacaccacacaggtagtgtcaggttcagggagagactgggacactttctctttccctgtgttggcaccataagcattttcagtgttcagaacccatgaaaataaggcaactgtgaccagctccagctgatcaaacctccattgatccctacacaaccgtaaagccaggggccctggggctaactaattaactgatttcaatcctcagtgctccttcttaccacctatggcctagaaagaagactccacttctcagtgcctcattgtcctcatcatccttattccagtctgttctctgagaggcttttgtaaacttttaaagttctaccaaggacatgaccctcttctgttcacaaatctccatacatcccaggacactcagattgaaggcacaacccctaagacaaccaatacaggtgtgactctggctcatcttcagtttttactagggcctttttttttttttgagagacggggtctcactatgttgcccaagcctgtcttaaacttctggacttatgtgatcatgacacaacatggttaccaggttctgaaatgttcatggctcagatgcacctccaagcctttgcacctattggttcctctacctgtattactctacctggggtgaagcctgtaatacacagcatttacctgagctaggtccctcagtgtggctgctgccatcaactgtgggtggagtaggcatcaccccagccagtgcctatgagcctcagacctgccacttgggagcagagatgactactcctcttgtgccttctcagtcccaacccagtactccctggcctgacaagcatgcccagaaatccctcatcctgggccttgcaactagcaccttctgggtaaagtacttctcagagctctcagccaacaatggtggtatcctccaagagcaaaccgaatgcagaccatgttacactctgagggctgctggaaagccctgctcacacctcaagggaggaagactattgattctttgtaaaagcgtcaaataggtatcacataagactctaggaagctcatcctgcacccagagaataaaaaaactatttgagatgctcccaaactttacttatctaagtggccatatcattggcatcattcagacttacaatgtgtgcactcagagctgagaacattaagtattgattgctctttaaattcatgttacccaaattattacagtcagttttgtgagtttcattgttttgttgggaacgaaagaaaattgtccataagacataatgacaggatgggtacaaaaaacagttagaaaaaatgaataagacctagtatttgctaccataacagggtggctgtagtcaaaataatttaatcatacatatgaaaatcactaaaagggtataattggattgtttataatacaaaggataaatgcttgaggtgatggagacaccattaaccctgatgtgattattacatatggcatgactacatcaaaatatctcatgtaatctacaaatatatacactattatatacccac

SEQ ID NO: 108678 - DNA, 252 bp, Homo sapiens
gcctacccactctatttgtagcatttaatggtttagaaagcacattcatataagttatttcaaaagaaagtcagcttgtgaactacagaattgtatactttggtggattttatcacaattttaaaaaaaggagggcatagtaaaaattactattcatattctacagtaaaggaaatttctgctcaaaaacatcaaatggcttgcccaaggccataccagtattaaatgatagagcatggcccccagcccagg

SEQ ID NO: 108679 - DNA, 267 bp, Homo sapiens
cttgataactagacacagcttgctaattgggaaccaatcctcgtgaccacgttatagaagaattttagagaaactggttgggggatttgacatttacactcctcccagccccccacaaacacacatgacatagttggcttctttatttccacctttcagggctctcatcctcattcctgcttgggaggcaagcttatctgagtcttctacatcatgttaatccaaacacagattcctccatcctcagtttttagttaagacttgact

SEQ ID NO: 108680 - DNA, 659 bp, Homo sapiens
gggactcgttttatgcagatgccaaggatgcctgtgcacaccagtgatgttcttgttggagggcggatgtatagaggaaggggtcctacacgcggtctcctctcttcttcttctgggccttcccttccttggcctgcttgggctcttccctagtttgccaaagaaagagtatcttaggtatcttaggacctttttagtaccagcatcctatggcttggtggtggctaacacttgccattggaaggtcggtctattttagaaatggaagaggagagtcaggtgcggtggctcatacctgtaatcccaaaactttggggggtgctgagacaggaggattgcttgagctcaggagttcaataccagcctgggcgacatagtgagatctcatctctaaaaaagaaaaaaattggaaatggaagaggagaaaccaaggtaatcttttaaatgcctacctatgacaggaatcagctgaaatggtgtttagattgttaacaaatcctcattaataatcacacactaggttgaaagttgtattttaaagagtcacttgtgtgacattgtggcaagagagtgtcccatagcaacttaagtgtaattttgtttgtccctcagattgcaaacactgccttttactctcttcactccccattttatcagga

SEQ ID NO: 108681 - DNA, 861 bp, Homo sapiens
  misc_feature (457)..(457): n is a, c, g, or t
  misc_feature (523)..(523): n is a, c, g, or t
  misc_feature (556)..(556): n is a, c, g, or t
  misc_feature (571)..(571): n is a, c, g, or t
  misc_feature (603)..(603): n is a, c, g, or t
  misc_feature (611)..(611): n is a, c, g, or t
tgccagtgtctccgccggttgaaagcgcgtgtctgcgtcgggttctgttggagtgcgttcggtgcgccgtgggtccgcgctgcttccacccaacttcctgttagtttctctcctgtcacaatggcatgatctcggctcactgcgacctctgcttcctgggttcaaggattctcctgcctcagcctcccaagtagctgggattacaggttacattagttatacactctggaggtgactagacctgtcattgtgaacaattattgctcttggacgacccaggacataggccagccagtacttaccccagtgtgttggagaatcgcgctcggcttcttcctctgtgctgagtcatgaaagttgccggagcaggtgcagttacacaacctccaggtaacatcacatgatcgttcaaaaaataatcatccaagtccaggatgcagcatctgtctcagtttanggcataggatgacagtctgaaatacacttactgaatttgaataagaacgggctcaggtcagtgatnatcgctagtgccttatcaacgccctgtggcttntcagcattagtcccnatatcctcgtccgttgtggcactgagagcagntaactgtngccctcgtaggttcccagttggcttccgtgactggtcagggtcaggtccactgcaacaggctggctgtgaatcccttggagaaacacagacattctgaccctaagattatgcttacaaatgccaatgtggtaaacttattcacaaaaaatcctcgatcatcaaaggtgtcgtgctattcgttaatgagaatattccattgcattggaatcagcattgcctccacaagttacattggaccaagatctacta

SEQ ID NO: 108682 - DNA, 865 bp, Homo sapiens
tgccagtgtctccgccggttgaaagcgcgtgtctgcgtcgggttctgttggagtgcgttcggtgcgccgtgggtccgcgctgcttccacccaacttcctgttagtttctctcctgtcacaatggcatgatctcggctcactgcgacctctgcttcctgggttcaaggattctcctgcctcagcctcccaagtagctgggattacaggttacattagttatacactctggaggtgactagacctgtcattgtgaacaattattgctcttggacgacccaggacataggccagccagtacttaccccagtgtgttggagaatcgcgctcggcttcttcctctgtgctgagtcatgaaagttgccggagcaggtgcagttacacaacctccaggtatgatcctgtcatacaggactggatactaggataacatactttagaggttaaaagtacaaaaggggtgtatggcatgagggctggagtgatactgggacacaagagacatctaggcttgctgtcaaggctactgctcaacatgagatgaacgacgaatgatgataaactgatgaaccccggacagcctagcatcacacactgaccaagaacacagaacgaactggcaacaccgacgaagccccggagacctgaaacaacaagcagacagaaacaacaggcaggaaaaactgagcaaaaccagaacagcatgaaaggcgcagcagcaccaacgaggaggtacaccggcaggcaacacagacagtaatacacacagcagaagccgcgagcggaacaaagaagaacccgaaagcacgaacagcagagaagaacaaaaggaaaaccaggaccgaaaaccaaaaaagaaaaagagaca

SEQ ID NO: 108683 - DNA, 480 bp, Homo sapiens
tcttccccctccaactagaaagtagctaaacaactggagagaattggccttgggcaagcagctaggagaggacccgttgctcctccctgcctctatattgtgtaagtttatcccgacatttaaaacttagagctgggtgtggtggcacacacctatagttctagctgcttggggggctgaggcaggagaatcacttgaggccagaagttggaggttacaatgagctatgatcacactactgcactctagcctgggtgacacagcaagactctgtttctaaaataaattttttttaaaaaaaattggagatttcacattaaaactctcatgaaaaaccagcagtggtcatatggaggtcaggcatcttttcagggcagggtgtcttctccttctggtttaaagcaggagaggccctgagagaagagccttgggatgggatcttctagagccacagaatagtgaaaaatacgcctcttgaac

SEQ ID NO: 108684 - DNA, 646 bp, Homo sapiens
ctgtctggtggtataaaggttattaatcttaggtgcatacaaattggccctggttcttaatctaaaggcttccagagaattgtttcttaaagcttggttcatcaaatgctaatagtttttacccatgtgaacaatacaaaaaatgttctcaaaaataagaagagtaggaaattcaaggttaaactaagtgaaatagtattcttcattgctgaacttctcagagtcttagatttacctatttggatgtctatggagtaataggcagaatttccccaaactacttgctgactgacctgttttttgtggagcacattgtggaagtaatgattaaatgcccctttcctgcagacttttccactggagaaagtagaggcaagcagtctgatggctgctctgtctgagccacagtagctgaaattaatggttccagcatcagacaagcacttgggcctctagcaaaggaaggaaagactgatccacactgctctgccacattacagtgatggtcctgatagccaagagaactgatgtgaataaaaacataaaaatgcttacttttgtgggttaggaatctagacttttcatatatatggaaaatgaactggaaggtgacacctttacttttatatttctgcattgagacaaa

SEQ ID NO: 108685 - DNA, 442 bp, Homo sapiens
aaacccctgggctcaagagatcctcctgcctcagcctactaagttgttggggtttatatttttgtttacttctttttggtctgtttcctccccaaggagaacacaaatcccgggagaacagagaccccatcagtcttgtttacctctgtatttccagtatttagaacagtgcttggcacacagtgaaagctcaataaatggatgaattaatcaacaatataggcactcgagatgatcttccatcatctcaccatctcaagtcagtgagacacaaatgctttgtgattggtgccatcgtttaccggattaaaaccacagtccccgtggtttttcttctttatgctgtctttatttcagtcagtcaagtccattcatttgctcttctctgctgccccctgtttttctttcacatctttatcaaagccctctaagcctgaacccc

SEQ ID NO: 108686 - DNA, 778 bp, Homo sapiens
gtctcacttgggccaaggagttctcgggcttcctcgtggtcgcgcagcccaggtcaccggggcgcggcttggaaggaaggggccgccaagctgggacttagagagtctgaggttttcgggaagggtcctatcagtgactgaggggagcaaaagtaaccggaaagaaaggaaagaagaaacggtcagagcctgctccgcgcgcacttcaaagccgaggcgcccgcgtgggggatgcacgggcccagccgccagccctgggtcccggcttctatccaccgggtgtgacccggctgggcggcctgcttgggacccagggcggtgacaggggaaaggccgagggaggagagagcgggccccggaggggacgcacgaccggaatcttggcgaggggcttcctccggagccccagcccagaggggggccagcgctccctccccgccgtctccctccggtccctcccctgcccgcgggccgggcgactcttcgccggccgccttttccgcgcgccgcagactgagcccgctgctttgctcgcaagtcagtcgcaaagcgtggcgttccgagaggcgctgaaactttcctccaaatagctgcggccaataggccgtggtgaacagagcctggcccccggctgcttcccggccctcctccctggggaaagaacggccaacttgaacccctccggtggcagaagagggaggggtggtggtggttggggagacgggcgaaccgcactaacttgtgcctttgaatctttcctttcctgaaagagcagcgc

SEQ ID NO: 108687 - DNA, 359 bp, Homo sapiens
ctcaccatcactgcagaacaagaccctgtctcaaaaaagaaagaaagaaagaatatttagaccagtttctccctgaacacatatgatatgtcaggccctgtgccgaatgcactgcagacctcattaatgctcatcccaatggactaggtgagtagtattgtaagcattctacagataaactggggctctgagagattaagatcttgccccaaatcacagaatagtagcggtgacccgggaatgggagtcacggccctctgacgttgaaggctttgccttcccagcagtgatctgggactgggagtcacggccctctgacgttgaacgctctgccttcccagcagtgatctgggaatggg

SEQ ID NO: 108688 - DNA, 366 bp, Homo sapiens
gctgtgggctcatatgtggagcttccccatccgagtctcccaacaaaagcaggagggaggaattgctgcccctccccctccctgcctacagcagcatttctaatcattaacatcccccacccctctgactctgaccattacctgggtctgtgaccatctcacagatgagaaagcagaatgccaaccttcctcactgatgtatcaatataatatggatagatgcaggattaaaacattggtgatatatgatgattagagcctgttcagcagcatgagaagcttagaggtaaagagcttggagtctggactcatgttcaaatctaggcctcaccaggtactcaaggtacaaccttgggaaagacattt

SEQ ID NO: 108689 - DNA, 313 bp, Homo sapiens
gtagctgggactataggcatgtaccaccacacctggctaggtttgttgttgttgttgaggcagggtctcactatgttgcccaggctggtctcaaactcctgagctcaggcaatcctcccacctcagcctccgaaagtgctgggatcacaggcatgaaccactcactcacatgcccagatcacctgttttattttttaccttatacctatcacaagctgacattcattcttacttaattacttatatatagcctgtatgcctctccaaatctaaaatgtaagcttcccaacctcagggatattgcactgttctt

SEQ ID NO: 108690 - DNA, 291 bp, Homo sapiens
ttgatccattcttctattgatggatatctgagctgtttccaggttttggctagtatgaataaagccaaagagagccattttaatctggggcatttaaaaaatggtgtgaataaactttcatctgaacacagggttccgtggtaataatttttgaaaatatcacctccagctctgacgtgccgagtttgtaattttcgtaaatgatataagaagtcatttcttcatccattcatttgttcactcaacccttatttagtgggcctattccctgtgccaggaatcattcaaggc

SEQ ID NO: 108691 - DNA, 422 bp, Homo sapiens
cggggagtcatctagaggatcccgataagagcataccctggcagggggctgcagtgtaggtagttctgtggtagggagtggtgcgtttggtgggttaaagggctgcaggctggggacaggtggcaggggactgagctggagtacctgtttcctatgtgttctcttcacatccctgtgcccactgaggacacagctggcaaccagaccaacagggtgcctgcctaagatggcttagcctgatgggggagacagatggcaaatagaagattacaactctgtgccaccatcagggagaaggcagcggaggaggtgcctcctgccagtggatgggagtgggcaggcgggtcagggaagcttggagtccgctgggccacagtgctttggggagagggggaggagccagcacgatgtccccatgtgtc

SEQ ID NO: 108692 - DNA, 327 bp, Homo sapiens
aaaaaataaaataaagataaagaagcacatgcttactaagagcctttagcacaatcttcacgtaaacatatgtactttccattgtactacccaaacctaaatttagaaacaggattagaaaaatatcattcctattcttcttggctataaatttacccatacaaagttaaatttaattatacattcttaatagtcttggatagacagggcttcacagataaattgtaatttaagcaagaattattttttcctgtttaaccctaaacacaataatgtggtctttactagctcatctcaattgaatatcatgccttagtatttgggctt

SEQ ID NO: 108693 - DNA, 358 bp, Homo sapiens
cctgcagtaggtgtttagtgtactttgagtgaatgagtggataatgtccgtggggcagcttggtccatctttgcaaatgcagaagcgatcgtctcccctgttcctctggagtttgcctgacgattgcaaagaaagtggcttccattctgttgaataatgagaataatcatgtttttaaaagctacttattaagagctctcttgtttaatgaaaaacattgtttggctttcttaagatccaattgtgatgcagatctctcaacctgcagctggtctctctctttatgtaacagcccatctgggttgtgctcaaggaaaccatattctaaatggaattctttaaggccttttcaaatcaa

SEQ ID NO: 108694 - DNA, 758 bp, Homo sapiens
acgccattctcctgcctcagcctccggagtagctgggactacaggcgcccgccaccacgcccggctagttttgtttttgtatgtttagtagagacggggattcaccgtgttagccaagatggtctcgatctcctgacctcatgatccgcccgcctcggcctcccaaagtgctgggattacaggcgtgagccaccgcgcctcgctgtccgcctcttgaagagtaaacgaggccgggcgcggtggtttagtaataccagctgtaatcccagctacttgggaggctgaggcagaagaatcgcttgaacccgggaggcggaggttgaggtgagaggagatcgcgccattgcactccagcctgggcaacaagggcgaagttctctcaaaagaaaaaaaaaatcgtcggtttccttttcccatctttctttcgtgacttatattccagaacgaagccccacacatcattaatgatttgaatcgtttctaaagtgtttcttaaatcgtttcttaaatcgtttgttgtttcttgtctaacagtccagaacacatattacataatggagccgggagacagactagggctggcttgatccggccacgcagtccaggaaaggtgcttttcacccccaagtgcaaaatgatcaatgtattcttccgatctacataaacaagcacctcctggtttcattttcgtaaagcaaaacaagcatggaagctttactgtttcggctcttcaaacttccagcaactacactgcgctg

SEQ ID NO: 108695 - DNA, 329 bp, Homo sapiens
atagatagcatcagaagacctaagagaaagcatatcttggtttagtcttgtgtttttgttttagttttagacacagggtgttggtatgttgcccaggctggaacgcagtagctaatctcaggcgcgaccccactactgatcagtatgggagttttgaactgctccgtttctgacctgagccagttcactcctccttaggtaacctggtggtctcctgcacttgggaggttaccatattgatgtctaccattgtgcagatacccaattggcatagctagcacactatagcccagaactcctgggctcaagtgatcctcctgcctcagcct

SEQ ID NO: 108696 - DNA, 747 bp, Homo sapiens
ggacaatctatcagaggctgatcattccaaggacctgatttatccatgttatggaacacaaaagtcaaacagatttcctcagcctcacaaggttccaattttctacgagcagcagcaaagaaaaagaaatgacttgcagtctaaagcctggagtattcagtgtagtattcaggagatgggctaatccacggagccctggggacagtgcagattattgtcacatgccaagaaaatatgctagctctcttctgaagctttaccattaagactaccttacactataaaatacaacatattattagagatgtaaccccaattggtgtaaatgtgaagaaaatctgtctgtatgccaaatgcctaaaatgacttttagattaataatgcacatttgaaatgataggcaaatcattcatcattctcaaacactaccacttttattccaaagtgtcctatgagtgcatttcctggtatatatatatattttttctctaaattcctttgttttcctatatagtcaccatctatgcattgttctgaaagctattacatattttaccatcaaccatctgtgcttctacatgatttatttttactagaagcagttttgtcaaaaaatttttatcatgttctatggtatgtcattgtggtttggcatcataaaatgtagcctctacatttatcaacctcagatacctgttgaccacaaagataggtctactatgaaaactctgtttcacaaaaagaaaa

SEQ ID NO: 108697 - DNA, 486 bp, Homo sapiens
tgatggggagagggagaaggggagagggtgatggggagaaggtgatagtgagagggcactggagagagggaggaaggatgcttcctggcatttcctgaggaggtcagggactccgagctctccccaaacattccctgtctctttccctcattcatagccctggagacacgaatgtctctcaaacagtcgggaaaggaataattgctgtagactcagtagaaaaggaaaaaaactagaaaactagaagaagtgaacaaaggaaggagatagaggtgagagagagggagtttcttccatgagaaccatagccatggcggctcggtcacttggcgtcagaaggtagcacagcagcctggggcagaggagccaccagctcctttatggaacatggaaggctttatgaccttaaaggttagagaggggctgccaaagggcaccctgaagggagatttagggccaaggatggagggaagtctgagatcagcc

SEQ ID NO: 108698 - DNA, 650 bp, Homo sapiens
aggatgccaaagatagaggtttgagtcagcttgacactggcttaggcgctccttttcactctccttgttccttcttccctttcccctcccccgctggccagttgtttcctgggctttgtctgagatacactgtacagttttagtcccagtctactagcgcctgctgaaaaacagtcagaagtgagatggaggagaagctgccaggaagtttctgacaacactaagctccggcctctgcctctgctgatagtacaggacaacagtaacctcaggagaaaggcatccagaggcctgcgctgagcttgtggctaactcaagggaggagaaaggacgggcctggaaatgcccctcttagattcatcttatttaccaccaaccatctttattttgactcacgttcttggagttgctggtgttctatactggaagaggcatgccagaggtagagcaggtaactaactggtacccagttattctttaaatctactgtggggcttttgagggtggggtgaatgatggaggtcttcccagttgctttccttaaagggccagtacgtccttcagctggggtgctgtcagacttaagagtgtgtgtgtgtgagtataatgaagaagctggtctgccctggggccactttgggatgggggtg

SEQ ID NO: 108699 - DNA, 342 bp, Homo sapiens
ctcctgagtagctgggattacaggcacacgccatcacgcccggctaattttgtatttttagtagagatggggtttctccatgttggtcaggctggtctcgaactcctgactttaggtgatccacccgcctgggcttcccaaagtgctgggattacaggcgtgagccactgcacccagcccagaacactttcttgatacgttttggaagtaaagcccaattgttgctattctacaacaaatgacttatccatcataattatttgacttttctgatgaggtcaataccactagtgcaatatattaacgtttttaaaaaatcaagtcagtgttttatttttcata

SEQ ID NO: 108700 - DNA, 495 bp, Homo sapiens
  misc_feature (419)..(419): n is a, c, g, or t
tggctattactattatcccaaccccagaggttgttctgggcacaagaagcacctgatatactgttttggagactccccaaattggggtggctgcaaggtgaggaggcagcagtcacatgtaactgtgccatgaattcagatgtcaggttaaccgggtctcttcctaaaggaaccaaaccaagaattttttcctttgatgtctcaccatgatttgaaactgagtcaatgtctttgctaaaagcaatcttttttttttttttccttttaaggggacattcctccaagggtgggctggtaaaggggatagccaacccaacgggtggtccaattggatatactcatttaaccaacattagggtaccaagggtgttaataactttccaaagaggtcatcaattcaataaaggtccagacttggncaggaagggctagccggtaattccaagaatttctcttggaaccccaatgttttacagggcaggattgtaccctcta

SEQ ID NO: 108701 - DNA, 113 bp, Homo sapiens
ctgagttttcttccatcttatctaatacaccctctgaaaagaaggatcttttttagttctgctaagatccccaaatgctcttaacatctccaaagctctctaatacaaaagga

SEQ ID NO: 108702 - DNA, 614 bp, Homo sapiens
tcttccttcttctgatgctcgtcatctgatgtgcgtgtggaacggtgtctccgtgtggctgatgctcgtcatctgatgtgcgtgtggaacagtgtctccgtgtgacaagtgatgtcgagcatcttctcgtgctttttggccatgtgaatagcttcgttggagaaatgtctattcaagtcctttgaccatttttgaattgagttttttttttgttttttttttttagttttagaagttctatatatattctggatattaatcctttatcagatatatgcaaatattttctttgggttatctttttacataaaaaattttttttagatgtagggtcttgcagtacagtgatcatagcttccctgtaaccttgaactccctgggctcaagtgatcctcccacctcagcctcctgagtagctaagactgcaggcatgcgccaccacatctctacaaaaaatacaaaaattagccaggcatggtggcagcgcctgtaatcccagctacttgggaggctgaggcaggagaatcacttgaacctgggaggcggaggttgcagtgagccaagatcacaccactgcactccagcctgggtgacagagcgagattctgtttcaa

SEQ ID NO: 108703 - DNA, 282 bp, Homo sapiens
tttaagtgaaattcaagccactgatttccagagtctaagtcaccagctggttttacaaatagacatgcaaggtcctagaatcttccagctgtttgccttaaaagacaggacaccagatttcttttatgaggcaacccttgagcccctacaggcctagctttggaaggaaggaaagatttaggctgcttaagtcttattgcagccactcatggctaccatagacagttgtgcagcctgcgcactacacaaatgcctctgggatgtcagggggagcgaacatgg

SEQ ID NO: 108704 - DNA, 401 bp, Homo sapiens
taaagatggagtctcactctgtcaccagcctggagtgcagtggcgcaatctcagctcactgcaacctccgcctcctgggttcaagcaattgtcctgcctcagcctccccaactagctgggactacacgcacacgccactacacctggctaattttgtatttttagtagagacaggtttctccatgttgaccagatctcgaactcctgacctcaggtgatctgcccgccttggcctcccaaggtgctggaattacaggcttgacccaccgctcccagcctgttttctattcttgaccaaaaaatagaaccatctaaacaagttgtctataacagagatttctgggttgcataattattcaatgaattagtttctcagggagaaacccacattttcccaaaag

SEQ ID NO: 108705 - DNA, 359 bp, Homo sapiens
aactcctctaatatgaaccccaagttcttagaacagtttctatccatagtaggtgctcaataaatatttgctgagggccaggcacagtggttcatgcctataatcccagcactttgggaggccaaggcaggcggatcacctgaggtcaggagttcgagaccagcattaccaacatggtgaaaccctgcctctactaaaaatacaaaaattagcagagcatggcggcaggagcttgtaatcccagctacttgggaggctgaggcaggagaattgcttgaatctgggaggtggaggttacagtgagcctagattgtgccattgcactccagcctgggtgacaaaagtgaaactccatctca

SEQ ID NO: 108706 - DNA, 549 bp, Homo sapiens
tcatactttagtagtaaaggctacattaaagtaaaggactttaaataattatccacaaataatttaactgcatgacaaaatgaacttcaacagtctttgaagagaggacagcaaattccaaacactcaacaatataatgattataatatctggcatacaaaaaattactagacatttcaagagggaatacaatgtgacccataaccagaaggaagccaatccgtagaaacagaaccagaaatgatggttatagaattagcagacaaggactttaaaacagctattaaaatgtgttgaaggattgaaaggaaaacatgaatatagtgagtaaagaagtgaaagacatataaagaaccaaatggaacttctggagctgaaaagtatactataaaaaatgaaaaattcattgaagaaataaatagcaaattagatgctgcagaggaaaatatcaatgaatttgtatccataacaatagaaattatccaatctgaaacagaatagaaaaaatggaaggaaaaaagcctcagtgaactgtgagacaatatcaag

SEQ ID NO: 108707 - DNA, 707 bp, Homo sapiens
tagatgaaacttgaagacattatgtgaagtaaaataagccagtcataaaaggacagatattgtatgattccacttataatttccttccagttattcattactattatagaagtagaattcatttttgtatatttaccctgtaacctgcaacttgttatatcacttattggttctagttgatatttttggagtttctttaggactttctaagtacccaaagttgcatgtttcattctctagtaaatactgttttacttcttcctttacagtgtttacctttcatgcagtacaaggctgaattagagtgatgagagtggatacccttgccttgttcacaaccttgtggtggaaaacattctggtccctcactgttctgtatgacatttgtgctaggtgttctgtctatgccctttgtcaggctaaagaagtttccttctatcgctagttggctgaacatttttataatgagtggatgttggattttatatttaaagttttactgcattccttggtaggattatatgttttttctcctatatcctgttgatatggtaaattacattgattagtttttgaatgttggcctgactgtaaattagtggaataaaacccacttgatcatggtataggacccattttatataattgttagatttgacttgctaaattttgttaaggattctttccatctatgttcataagaatat

SEQ ID NO: 108708 - DNA, 714 bp, Homo sapiens
tatcaagatggtagaacttatgtggaagggcagactgcacaaagtgccagagtcttaaacaagcagagatgaatgcctctggagtcagtagaagacagagataaagtaggtgaggcggggatggttgactggcagaagcttaaataagcagagtggacagtaaggatttggctattgcaccaagtgataacagaaaactagttttgcttttccatgttggggcaaggtggagggatatgccacctgatgggattagttcatatggattagtattttcagtacacgtgttgtcatatgtaattatcactcaaaagggtaagcagcaactaataagaagaggtgctggagggccacctgtctggcatatagtgtgggattccatttgatacaattacaaatgaattcatttttactcatttttatcttttcactatcctagataaaaactcaaaatgaatcaatgagttcttatcttaaaacaatatgttctgtttaaacatttctcagcggtataatcttcctttaatcttacatttcttcaatccagaggagtccaactacagtgccttcaccgtgaagctaatgaaaagggagttggtccactgtgtagactagactagatgattgcgaagttaaattgaagtaattgagcaggtacccaatagccagcagcggatttgtttctctgttcttgatgcttaagtaaaaacaagc

SEQ ID NO: 108709 - DNA, 318 bp, Homo sapiens
aatgtttattcaaggcccaaggccacattagtcagcagatggtgaatcctgccaggaccaagtccgtaccaaccgggcagtggattcccttctgacccaggatgggcctagaaacactatccaggaacaaagcctggaatcgggggcttcgggaatctgtttgatgttttatcgtattgtggctaagctgatacccaagttgcaagacaaagtcctctgtgctcttctctcttctttccccaagcagaaggaatctctccccaagcatcagtacctgaagtttgggaaggagtgacatacatactcctgtggctgcca

SEQ ID NO: 108710 - DNA, 594 bp, Homo sapiens
ggaaaatataatctgtcacaccatggctgagtccagattttaatcagccaatttagcacactattaatttgactcctaggaactaaagccaacacattaaatccagaatcctgaatgagtccttctacattaataaatttaagcaaaagagctttcaatgatgttctttttggtctaacacctttagaatccacgctcacgtatgctccccaaacttccatcaacactgatcagcgtcataactctgcgcataggctctctctccaaccaccaggctttgtacctctccatctgggctcttttgggttttaactcttgttataggcctagaggtgatgagtggtaccattagcatgggaggcaactgccaggtgttcccatttaaaagacttcttgcagagaacagtttgtttctgtgctagcgagagagttaagaggaatttacaggtcccaagttctcaactttgtccatatctgcccaaatgtcctcatcccatggctcatgcctaaatcaagccaaccagtgtctctaccctagggtaagaagtatagcaggttttagcctttaactggtgcagaaatgtttcccccttg

SEQ ID NO: 108711 - DNA, 210 bp, Homo sapiens
aggggctgggggagttgggggaaacatgagactgggtttgtagggcccctaaggaggagctcaggacccggtccaggtgggtacgagtcctaggttcctttgccccaagaggggggtctggggcagtggcacgttcaggacccttcctcagtccctcactggaatgtcctgggcatcggcacaacttcgggtgagcttgctccaccagct

SEQ ID NO: 108712 - DNA, 325 bp, Homo sapiens
ctctgtttttgtctgtctcccccatctctgtctctctgtctccctctgtctctgtctctctgtctctgtctccttctgtctctgtcactgtctctccgtctcttcctccctccatctctgactctgtctgcctgcgtctgtctctctctgtctccctttgtctctctgtctctgactgtctctgtctctctgtctctgtccctctgatgtctgacccaggtgggcagtacctgtggtggttctgctgtccctgaaggaatgacatgttctcgctctgcctgagagacctcctttgcctcctctggagggtctgagaagacaggag

SEQ ID NO: 108713 - DNA, 384 bp, Homo sapiens
tgctgggatgggggtggcgcagagtgagattggtaggctcgtaggtccctgtcttggagatacctacatgttgcttgagtgactgaggaaaaatgttcaagcttttaatctgggaaaacagttatgataaaatatatgttggggctgtttcctccctgctccccacttcctaccctcttacgtccacacgcttggtagaaggtctaggattgtgactaatcactgcccccattctgaagaaattgtacttggccatctctatgggactgggcatcctgtgtgagcgtctgctcgattgttagctgacacacaatcatttcttcccttttgttttctatcgggtctgtcttgctctgagagtgtacccacctccttccctcccct

SEQ ID NO: 108714 - DNA, 684 bp, Homo sapiens
cactgattaaaaagtaataaagattcccctaccagtacggagtgaaattgtgataactcctggcacaaccattaagaccctcatctatagtggactggaacaaagcacaggtaaaaggatatctttggattgtgcttttgaacaattttgtgtttgccttactttaccgttttgataactttgttaactattgctaatttgttaacttctcttattttagaacttataaaaaagaaaaaagtgcacattcagtttaatgaggtgttaattcaaggaatgctgtgagagtcagaagttctaaatgccagtgtttaaaaagatccatgtcacagtgatcttgggtaggctgggacacaccagctcactgacggacctgaaaatggattgctgtgggactacaaccctactcaggatattctgagttataagtggtatgcttggttgttttgtcttacgtacagggaggagtcacctaaggtaaaaaaaaatatatgtataaatgccttggaagggacaaatgactcaatgtttggtcagggttcttggaaggtttgacaaaatgagatcagagaataggaatatggatggatttacaggagcgagcaaaatatgtgtattttttgtgttttatattaatgcccagcaaacattactcactatacaggaagcacttaacaataagcc

SEQ ID NO: 108715 - DNA, 274 bp, Homo sapiens
taacagtataagaggtactttgtttaaaaatttagtgtgatctccagatacaactgtaactggagtcccagaattgattaagaccctgaagatttgccatttggtgcatcttggtagatgttaaaattaataaattaatttagaactgaggttgtagaggcacaaaagctaattaaagccctttttacctttcttttgcatagattgttttagtaaatgttggatttccaattgggtaaaaaaaatcataagcctctgctttagttattgtttc

SEQ ID NO: 108716 - DNA, 700 bp, Homo sapiens
tatttttaaaagaaattttatttcataactatacagggaaaattagcagaactgacgacagatagaaagtaaacatgaaaacaaatacgataggtacaaaacaaggttgtcgaattccagctcatttatttgacagcctcttaccctcacaaccatgctttgttatgaccattatctcattttaatcctaagtaaactgagtcccagagagatcaattgatgtgccaaagttcataaagcaaggcagggaatgtaccaccctagtttccagagttaaatgccaggctgagcctgtatttttgtcttttcctcatcctctatagtggagtcagcaaagtacagctcgtgggccaagtccagcccaacatctgtttttggaaataaagttttattggcacacagccactcttatttgttgacgtattgtctgtggcagcttctgtactataatggcagaattgagtaggtgctacagagaccatgtgaccctcaaagcctgaaatatttattatcaggccctttatagaaaaagtttgccaacccatgttctagatagaaaaaaaaatgaagtacatcaaagagaataagttatagttcatggaacacacataatgtctattcttcccatgactgcaacaaaatgtcagttaaagagaaataaatgttttttcaatgaatgatttaaaaaacaggagttaaa

SEQ ID NO: 108717 - DNA, 446 bp, Homo sapiens
atagattataagacattctttatgcgctgttaagaaagaaaagactgggccgggcgtggtaatcccagcactttgggaggcagaggtgggtggatcacgtgaggtcaggagttggaaaccagcctggccaacatgatgaaaccctgtatctactaaaaatacaaaaaaattagctggacatggtggtgcgcacctgtagtcccagctacttgggaggctgaggcaggagaattgcttgaacccaggagggggaggttgcagtaagccaagattgtgccactgcactccagcctgggcgacagagcaagactctgtctcaaaataaaaaaagatatatatcggctgtttggactctgggcactgtttggactctgggcactgtttggactctgggcactgtttggactctgggcactgtttggactctgggcactgtttggactctg

SEQ ID NO: 108718 - DNA, 450 bp, Homo sapiens
tgactacgtgcctctccaaggggttgagtattcagcatacttgaccaagaaagcttgcttccttgattacgtatttttgaaaacaggggcatgtgatttatgagacattgatttacaaaaatttaccaaaataaagatattacaatgattttcaataaagtcatgtgctgcataatgacatttcggtagatgacagaccacatatacaacgttgatgccctaagataatgatactgtatttttactgtaccttttctatgtttaaatacatttagatgtagacatacctcattttattgtgatttgctttactgtacttcacagatattgcattttacaaatcgaaggtctgcagcaaccctgcattgagcaagtctattggtgccatttttccaacagcacatgctcacttcatgtctttatgtcacattttggtaattctcgcaatat

SEQ ID NO: 108719 - DNA, 544 bp, Homo sapiens
tgatcctgagttaaaggcattactaagggaaccacatagggacagagtgaatgtcacttcttccattaagtttcatagtgtttgctgcccgcacatgcttgtacctgtcttgtcacttttcccttctgcctgggagatgggtcagtaaattccaaagggccttttgctaatctaacagccagaaaaccaagcaaaggcttctcccctactgatctccaagagcttagcaagaaaatgaaattcttgtggttctagggcacagctgtgataaccagggaccaacacccgcaagtgtgttgaaacaataggcctgaagtccaaaagctaaaagaataagtgttacaatccaagctcaggattcacaatgagttcgagatgaactctacattcagtttttggagaaaaacagttgtattaagtagtgactgagtatttaaggatgaagtattaagtttcaaaactgttcaatattatattaagtattaaaaactaaagtgaccttttaaatactgttgaattatgcctcctttcatagagttcttta

SEQ ID NO: 108720 - DNA, 872 bp, Homo sapiens
gggaatgatggtcagtttgtagtgacccactctagaggccagttcctctttaatcacccgcacatactttcaagatgactctctggagtccagggtgctgcttaatattggaatattgctgagctcacagtttattgagaagactgattctgaatttttggtctcttggcctggtgctggagccatctgagctatgcagcccgacactggagtaattggcatgtcctattaacacctaagcttttcctttatgagcaccctttggattgcaagccatcaagtttatctacctatcgactctttgcagaggtgtcacatggttcccagtttctgatcctgacctgcattctgaaaacaaaatgaggaacaaagaaagagaaaggatattcatttctttgggtacttcaaggttctaatgaatgaaacagaaatgctgccattaaaattccctgaagcaagacaacagtgagttttactagcacatcaccaaagaagttaatcaggtttccttggggttgctgggctacgttgctttgaagaaaaatagcacttccctgaagagtaagaatagctgaaaccacatgtcccagcgagctttcagccaactgctcctgaaggaaacggaatttaactgcgagaatggtttttgttggatgacgttttgattaagcaacaggctacttttccaccccgggaatgtgatcatttgaagatagatatattatgacccaaatagaagctggagtagaaggaagggcttgtaggctgaggttatgccttatttggtaaattactataagaaaattgaactgggtgagtttaatattcagtccttattttctgttccagacatcttgatatctctgtgagta

SEQ ID NO: 108721 - DNA, 307 bp, Homo sapiens
gggtgtccctcgccagccggccctctgggaacagggcgggggcgacaccccagggagtagggctgaggaccgcaaaaatcaatcgtgggtaccggcgcggggtcacgcataggagaggagcgggagaggggctggtgggggccccagggcggctgaggccgtggctctgtctgtggactcggcgggcgccccgaagtctggggccgccacggctccagctccgccggctccggccggagactccaggccgcagtttctcctcctcccggcgccttctctccagtgaggagctgagcgcgggcggcgc

SEQ ID NO: 108722 - DNA, 571 bp, Homo sapiens
ttcttcattcccagaactgttatgaggtaagttcagaaattgccagcttcctgatgctctatgctttgaacacacaaaataatcaaaggtgctctttagtaggatcctttccctatcaaaataacagtaacacccaatctgaggcctcaagcccactccttgagcaaaacaaaaagggacaggggagagtttgagacactggctacaccctgatccccaaatcagtggtttaaaaaaaatctcagactctttcttcaatcaggaagaatagatttcttttgtctctagaaatctcaggtcatccaagggacaacctgatagttgatttttaaatttagtgacaaaaaacttcagcaactgtcctgatagagtaacagctagtgataacaatgggtcagggattcatatatttcaaaattaactcaataaaaatgaaacgtttctgtctgtggagtctagatgtaaaaatggaaaactcatgcaattacgtatgtttcttacatcatttaagaattcaaagagttaaaaattaatttccattaagttaaactttccttctctgggtcttgtt

SEQ ID NO: 108723 - DNA, 542 bp, Homo sapiens
ttgtgtacaaatgtggggcattagtaagtgaggcattcataagttagaggcagccaatattggttagaagcagatacttaggatctctgagtctgctctgttaataaatgaagtagcaacaaagacaggagtaccacgcatcggagggtggaaatggcaaaaaaggaggcaccaatgcaaattctgtaagttgaacatgttgattgctgtctagtgctttgcaaaatgcaagtctgggcagggtgacctctggcttctttctcgaatattttataaaatagcagtatcatagccccaagcaagagcctgagttgcagccatctcagttcattgccttttaactccaaatctgccacttcacagatatcttgctcatcacccccttagcaatacaaagaccctaacacttgtgctttacgacagaccctgaacaaaggataacagctgctgagccacacggaatacttttccaagctgcagaatctcccaaggttggaacccaacaacatgcctaactttttcatcagtatctaaaaacaacc

SEQ ID NO: 108724 - DNA, 157 bp, Homo sapiens
tgtctttatttcccttcatttttgaaagatattgcactagatatagaattctaagttaacagttcttttctatcacttatttagaaacgctgggacacttcattctggcctccatcattcctgatgagaaatgcactgccgtttgaatatttcccct

SEQ ID NO: 108725 - DNA, 431 bp, Homo sapiens
ggtggctgaggaagcttggaggggaaaggcagctgaagtacaatatatgttctaccacggccccctggagccagcgactgggacgtgagacaagtgggcatggctccttttcaagccagagtctccaaaaccaatttcttaaagctagcctccagtggccagtgggtttcgggcagggaaggaggatgtctatactgcaggttgaagtttaatttatatttaggaactgtttgttttatttggttttgggttaaaggtggtaggtgccaagcaagactatccccctttcaacttctttttttaaaaaagacaaagaaaagagaaaaacaaaacaaccaaacacccgtagcccaaggccatgctgcgctgtgggcggcctacatgagcttcctttatccaaccacaaaaaggcatccgtggaaccagcgagg

SEQ ID NO: 108726 - DNA, 216 bp, Homo sapiens
tggttttgaggatttctgagatgattttgcctgattacattctgagaacttaaatctagcttcattaaggagacaactaactgctcatctgaatgttgtctatagcaagcagaccagcacagtctcaccaagaaagttgccttcatgcttaattttatgggtcaacttgactgggccatggtcccagatatttggtcaaaagttattctggatgtc

SEQ ID NO: 108727 - DNA, 790 bp, Homo sapiens
gacataacaagagtctatctctattttttagtattaaaaagaaaagtgggttttaactcaattggtagaaaaccaatttagtggcatgctaccaacaaaaaaagaaatttaaatagaatagaaaatataggctggggctgggcgtggtggctcatgcctgtaatcccagcactttgggaggctgaggagggtgtatcacttgaggtcaagagtttgagaccatcctggccaacatggtgaaaccccatctctactaaaaatacaaaaattagcttggcatggtggcatgcgcctgtagtcccagccactggcagggctgaggcaagagaatcgcttgaacctgggaggctgacgttgctgtgagccaagatggcgccactggagtggctgggtgcagaagttcacgcccgtaatgccagcttttagggaagcagaggcaggaggatagcttgagtccaggagttcaagacctgcctgaacaatataatgagaccccgttctccacaaaaaggagaaaatatatgttttttaatgaagtttatttatatataaaatatataaatatatacttgtatatatatggcaccacttagtaatggtaaatattgttttatcaacttttgctatattatatatacatatctattgggttccagttttaaaggtatttcttagtggagtcacagtcaaaacaaaattgagaaatagtgttctagatctcagagtatcctttagaatactagtcctctgataaatagagtttccctctataaaaagattctgagattga

SEQ ID NO: 108728 - DNA, 1401 bp, Homo sapiens
atggagccatggccctgctccccgggcggcggcggcgggacccgcgcccggcacgtcatcatcaacgtgggcggctgccgcgtgcgcctggcatgggccgcgctggcgcgatgccccctcgcgcgcctggagcgcctgcgcgcctgccgcggccacgacgacctgctgcgcgtgtgtgacgactacgacgtgagccgcgacgagttcttcttcgaccgcagcccgtgcgccttccgcgccatcgtggcgcttttgcgcgcagggaagctgcgactgctgcggggcccgtgcgcgctggccttccgcgacgagctggcctactggggcatcgacgaggcgcgcctggagcgctgctgcctgcgccgcctgcgccgccgcgaggaggaggcggccgaggcccgcgcggggccgacggagcgcggggcgcaggggagcccggcgcgcgccctgggacctcgggggcggctgcagcgcggccggcggcgcctgcgcgacgtggtggacaacccgcactcggggctggcgggcaagctcttcgcctgcgtgtccgtgtccttcgtggccgtcacggccgtgggcctctgcctgagcaccatgccggacatccgcgccgaggaggagcggggcgagtgctcccccaagtgccgcagcctgttcgtgctggagaccgtgtgcgtggcctggttctccttcgagttcctgctgcgctccctgcaggccgagagcaagtgcgccttcctgcgcgcgccactcaacatcattgacatcctggcgctcctgccgttctacgtgtcgctgctgctggggctggcggcaggcccgggcgggaccaagctcctggagcgcgcggggctggtgctgcggctgctgcgtgcgctgcgcgtgctctacgtgatgcgcctggcgcgccactcgctggggctgcgttcgctgggcctgaccatgcgccgctgcgcgcgcgagttcgggctgctgctgctgttcctctgcgtggccatggcgctcttcgcgccactggtgcacctggccgagcgcgagctgggcgcgcgccgcgacttctccagcgtgcccgccagctattggtgggccgtcatctccatgaccaccgtgggctacggcgacatggtcccgcgcagcctgcccgggcaggtggtggcgctcagcagcatcctcagcggcatcctgctcatggccttcccggtcacctccatcttccacaccttttcgcgctcctactccgagctcaaggagcagcagcagcgcgcggccagccccgagccggccctgcaggaggacagcacgcactcggccacagccaccgaggacagctcgcagggccccgacagcgcgggcctggccgacgactccgcggatgcgctgtgggtgcgggcagggcgctga

SEQ ID NO: 108729 - DNA, 1797 bp, Homo sapiens
ccgccctgccccgcccagccggccacctcttaaccgcgatcctccagtgcacttggtagttgttccggacacatagaaagataacgacgggaagagcggggcccgctttggggtccaggcaggttttggggcctcctgtctggtgggaggaggccgcagcgcagcaccctgctcgtcacttgggatggagaccggctttcccgcaatcatgtaccctggatcttttattgggggctggggagaagagtatctcagctgggaaggaccggggctcccagatttcgtcttccagagcagcccgtggagtctgaagcaatgcactgcagcaaccccaagagtggagttgtgctggctacagtggcccgaggtcccgatgcttgtcagatactcaccagagccccgctgggccaggatcccccgcagaggacagtgctagggctgctaactgcaaatgggcagtacaggaggacctgtggccaggggatcacaagaatcaggtgttattctggatcagaaaatgccttccctccagctggaaagaaagcactccctgactgtggggtccaagagccccccaagcaagggtttgacatctacatggatgaactagagcagggggacagagacagctgctcggtcagagaggggatggcatttgaggatgtgtatgaagtagacaccggcacactcaagtcagacctgcacttcctgctggatttcaacacagtttcccctatgctggtagattcatctctcctctcccagtctgaagatatatccagtcttggcacagatgtgataaatgtgactgaatatgctgaagaaatttatcagtaccttagggaagctgaaataaggcacagacccaaagcacactacatgaagaagcagccagacatcacggaaggcatgcgcacgattctggtggactggctggtggaggttggggaagaatataaacttcgagcagagaccctgtatctggctgtcaacttcctggacaggttcctttcatgtatgtctgttctgagagggaaactgcagctcgtaggaacagcagctatgcttttggcttcgaaatatgaagagatatatcctcctgaagtagacgagtttgtctatatcaccgatgatacatacacaaaacgacaactgttaaaaatggaacacttgcttctgaaagttctagcttttgatctgacagtaccaaccaccaaccagtttctccttcagtacttgaggcgacaaggagtgtgcgtcaggactgagaacctggctaagtacgtagcagagctgagtctacttgaagcagatccattcttgaaatatcttccttcactgatagctgcagcagctttttgcctggcaaactatactgtgaacaagcacttttggccagaaacccttgctgcatttacagggtattcattaagtgaaattgtgccttgcctgagtgagcttcataaagcgtaccttgatataccccatcgacctcagcaagcaattagggagaagtacaaggcttcaaagtacctgtgtgtgtccctcatggagccacctgcagttcttcttctacaataagtttctgaatggaagcacttccagaacttcacctccatatcagaagtgccaataatcgtcataggcttctgcacgttggatcaactaatgttgtttacaatatagatgacattttaaaaatgtaaatgaatttagtttcccttagactttagtagtttgtaatatagtccaacattttttaaacaataaactgcttgtcttatgacaaaaaaaaaa

SEQ ID NO: 108730 - DNA, 2249 bp, Homo sapiens
gccgcccgcccggcccccagcccggagagctgccaccgaccccctcaacgtcccaagccccagctctgtcgcccgcgttccttcctcttcctgggccacaatcttggctttcccgggccggcttcacgcagttgcgcaggagcccgcgggggaagacctctcgtggggacctcgagcacgacgtgcgaccctaaatccccacatctcctctgccgcctcgcaggccacatgcaccgggagccgggcggggcaggcgcggcccgcaaggacccccgcgatggagacgcaacactgccgcgactgcacttggggcagccccgccgcgtcccagccgcctcccggcaggaagcgtaggtgtgtgagccgacccggagcgagccgcgccctcgggccagcgtgggcagggcgccgcagcctgcgcagccccgaggaccccgcgtcgctctcccgagccagggttctcaggagcgggccgcgcaggagacgttagagggggttgttagcggctgttgggagaacgggtcacggaaacagtcccttccaaagccggggccatcgtggggtgggcgagtccgccctcccaggccgggggcgcggaccagaggggacgtgtgcagacggccgcggtcagccccacctcgcccgggcggagacgcacagctggagctggagggccgtcgcccgttgggccctcaggggcctgaacgcccaggggtcgcggcgagtccacccggagcgagtcagagcagcccgtggagtctgaagcaatgcactgcagcaaccccaagagtggagttgtgctggctacagtggcccgaggtcccgatgcttgtcagatactcaccagagccccgctgggccaggatcccccgcagaggacagtgctagggctgctaactgcaaatgggcagtacaggaggacctgtggccaggggatcacaagaatcaggtgttattctggatcagaaaatgccttccctccagctggaaagaaagcactccctgactgtggggtccaagagccccccaagcaagggtttgacatctacatggatgaactagagcagggggacagagacagctgctcggtcagagaggggatggcatttgaggatgtgtatgaagtagacaccggcacactcaagtcagacctgcacttcctgctggatttcaacacagtttcccctatgctggtagattcatctctcctctcccagtctgaagatatatccagtcttggcacagatgtgataaatgtgactgaatatgctgaagaaatttatcagtaccttagggaagctgaaataaggcacagacccaaagcacactacatgaagaagcagccagacatcacggaaggcatgcgcacgattctggtggactggctggtggaggttggggaagaatataaacttcgagcagagaccctgtatctggctgtcaacttcctggacaggttcctttcatgtatgtctgttctgagagggaaactgcagctcgtaggaacagcagctatgcttttggcttcgaaatatgaagagatatatcctcctgaagtagacgagtttgtctatatcaccgatgatacatacacaaaacgacaactgttaaaaatggaacacttgcttctgaaagttctagcttttgatctgacagtaccaaccaccaaccagtttctccttcagtacttgaggcgacaaggagtgtgcgtcaggactgagaacctggctaagtacgtagcagagctgagtctacttgaagcagatccattcttgaaatatcttccttcactgatagctgcagcagctttttgcctggcaaactatactgtgaacaagcacttttggccagaaacccttgctgcatttacagggtattcattaagtgaaattgtgccttgcctgagtgagcttcataaagcgtaccttgatataccccatcgacctcagcaagcaattagggagaagtacaaggcttcaaagtacctgtgtgtgtccctcatggagccacctgcagttcttcttctacaataagtttctgaatggaagcacttccagaacttcacctccatatcagaagtgccaataatcgtcataggcttctgcacgttggatcaactaatgttgtttacaatatagatgacattttaaaaatgtaaatgaatttagtttcccttagactttagtagtttgtaatatagtccaacattttttaaacaataaactgcttgtcttatgacaaaaaaaaaa

SEQ ID NO: 108731 - DNA, 1820 bp, Homo sapiens
gccgcccgcccggcccccagcccggagagctgccaccgaccccctcaacgtcccaagccccagctctgtcgcccgcgttccttcctcttcctgggccacaatcttggctttcccgggccggcttcacgcagttgcgcaggagcccgcgggggaagacctctcgtggggacctcgagcacgacgtgcgaccctaaatccccacatctcctctgccgcctcgcaggccacatgcaccgggagccgggcggggcaggcgcggcccgcaaggacccccgcgatggagacgcaacactgccgcgactgcacttggggcagccccgccgcgtcccagccgcctcccggcaggaagcgtaggtgtgtgagccgacccggagcgagccgcgccctcgggccagcgtgggcagggcgccgcagcctgcgcagccccgaggaccccgcgtcgctctcccgagccagggttctcaggagcgggccgcgcaggagacgttagagggggttgttagcggctgttgggagaacgggtcacggaaacagtcccttccaaagccggggccatcgtggggtgggcgagtccgccctcccaggccgggggcgcggaccagaggggacgtgtgcagacggccgcggtcagccccacctcgcccgggcggagacgcacagctggagctggagggccgtcgcccgttgggccctcaggggcctgaacgcccaggggtcgcggcgagtccacccggagcgagtcagagcagcccgtggagtctgaagcaatgcactgcagcaaccccaagagtggagttgtgctggctacagtggcccgaggtcccgatgcttgtcagatactcaccagagccccgctgggccaggatcccccgcagaggacagtgctagggctgctaactgcaaatgggcagtacaggaggacctgtggccaggggatcacaagaatcaggtgttattctggatcagaaaatgccttccctccagctggaaagaaagcactccctgactgtggggtccaagagccccccaagcaagggtttgacatctacatggatgaactagagcagggggacagagacagctgctcggtcagagaggggatggcatttgaggatgtgtatgaagtagacaccggcacactcaagtcagacctgcacttcctgctggatttcaacacagtttcccctatgctggtagattcatctctcctctcccagtctgaagatatatccagtcttggcacagatgtgataaatgtgactgaatatgctgaagaaatttatcagtaccttagggaagctgaatacgtagcagagctgagtctacttgaagcagatccattcttgaaatatcttccttcactgatagctgcagcagctttttgcctggcaaactatactgtgaacaagcacttttggccagaaacccttgctgcatttacagggtattcattaagtgaaattgtgccttgcctgagtgagcttcataaagcgtaccttgatataccccatcgacctcagcaagcaattagggagaagtacaaggcttcaaagtacctgtgtgtgtccctcatggagccacctgcagttcttcttctacaataagtttctgaatggaagcacttccagaacttcacctccatatcagaagtgccaataatcgtcataggcttctgcacgttggatcaactaatgttgtttacaatatagatgacattttaaaaatgtaaatgaatttagtttcccttagactttagtagtttgtaatatagtccaacattttttaaacaataaactgcttgtcttatgacaaaaaaaaaa

SEQ ID NO: 108732 - DNA, 2214 bp, Homo sapiens
gccgcccgcccggcccccagcccggagagctgccaccgaccccctcaacgtcccaagccccagctctgtcgcccgcgttccttcctcttcctgggccacaatcttggctttcccgggccggcttcacgcagttgcgcaggagcccgcgggggaagacctctcgtggggacctcgagcacgacgtgcgaccctaaatccccacatctcctctgccgcctcgcaggccacatgcaccgggagccgggcggggcaggcgcggcccgcaaggacccccgcgatggagacgcaacactgccgcgactgcacttggggcagccccgccgcgtcccagccgcctcccggcaggaagcgtaggtgtgtgagccgacccggagcgagccgcgccctcgggccagcgtgggcagggcgccgcagcctgcgcagccccgaggaccccgcgtcgctctcccgagccagggttctcaggagcgggccgcgcaggagacgttagagggggttgttagcggctgttgggagaacgggtcacggaaacagtcccttccaaagccggggccatcgtggggtgggcgagtccgccctcccaggccgggggcgcggaccagaggggacgtgtgcagacggccgcggtcagccccacctcgcccgggcggagacgcacagctggagctggagggccgtcgcccgttgggccctcaggggcctgaacgcccaggggtcgcggcgagtccacccggagcgagtcagagcagcccgtggagtctgaagcaatgcactgcagcaaccccaagagtggagttgtgctggctacagtggcccgaggtcccgatgcttgtcagatactcaccagagccccgctgggccaggatcccccgcagaggacagtgctagggctgctaactgcaaatgggcagtacaggaggacctgtggccaggggatcacaagaatcaggtgttattctggatcagaaaatgccttccctccagctggaaagaaagcactccctgactgtggggtccaagagccccccaagcaagggtttgacatctacatggatgaactagagcagggggacagagacagctgctcggtcagagaggggatggcatttgaggatgtgtatgaagtagacaccggcacactcaagtcagacctgcacttcctgctggatttcaacacagtttcccctatgctggtagattcatctctcctctcccagtctgaagatatatccagtcttggcacagatgtgataaatgtgactgaatatgctgaagaaatttatcagtaccttagggaagctgaaataaggcacagacccaaagcacactacatgaagaagcagccagacatcacggaaggcatgcgcacgattctggtggactggctggtggaggttggggaagaatataaacttcgagcagagaccctgtatctggctgtcaacttcctggacaggttcctttcatgtatgtctgttctgagagggaaactgcagctcgtaggaacagcagctatgcttttggcttcgaaatatgaagagatatatcctcctgaagtagacgagtttgtctatatcaccgatgatacatacacaaaacgacaactgttaaaaatggaacacttgcttctgaaagttctagcttttgatctgacagtaccaaccaccaaccagtttctccttcagtacttgaggcgacaaggagtgtgcgtcaggactgagaacctggctaagtacgtagcagagctgagtctacttgaagcagatccattcttgaaatatcttccttcactgatagctgcagcagctttttgcctggcaaactatactgtgaacaagcacttttggccagaaacccttgctgcatttacagggtattcattaagtgaaattgtgccttgcctgagtgagcttcataaagcgtaccttgatataccccatcgacctcagcaagcaattagggagaagtacaaggcttcaaagtacctgtgtgtgtccctcatggagccacctgcagttcttcttctacaataagtttctgaatggaagcacttccagaacttcacctccatatcagaagtgccaataatcgtcataggcttctgcacgttggatcaactaatgttgtttacaatatagatgacattttaaaaatgtaaatgaatttagtttcccttagactatattacaaactactaaagtctaagggtcgagc

SEQ ID NO: 108733 - DNA, 414 bp, Homo sapiens
tagatttataatttgtcagcttttaatacttgtagtcagccagcttccttccttccattctgttaaaactactggaaagttttctgtgacctgagattttatcaaaccaaagtccttggcttgtgctgaccttgctttgggtcttgtttcaggtacctgtgtgtgtccctcatggagccacctgcagttcttcttctacaataagtttctgaatggaagcacttccagaacttcacctccatatcagaagtgccaataatcgtcataggcttctgcacgttggatcaactaatgttgtttacaatatagatgacattttaaaaatgtaaatgaatttagtttcccttagactttagtagtttgtaatatagtccaacattttttaaacaataaactgcttgtcttatgacaaaa

SEQ ID NO: 108734 - DNA, 247 bp, Homo sapiens
acaggcgtgagccactgcgcccggcctggatatgctttttagttcaggtgtggctgaccctctcaatctgtcatttaggtagttcagtaaaatactgttctagggaatgtggtagagtcagggagggaggacagcaagatgaaaccaggaacacctgtttgaaaacagctgctttcccgcaagctcccaccaggctgttctaagacgagatggaaaggcacttaccattctgtcacatcccaagcaa

SEQ ID NO: 108735 - DNA, 786 bp, Homo sapiens
agatgctctttgttctgtgtactatttttcccctctcctaacacaagcatcattaaaaaagtcttggagcattgatacatcaaaagattcttctttctacctactttatcaaaatcactatgaacactttggtgtatgttcttctagactcttttctttgttaaaaaaacaaacaaacaaacaaacaaaaagcctagttttgcacagagtatcacagcgtgcacttccttgttaacctgttatttccccctacaaacaatgtgttgtgaacaccttcctatgttagcagattgatttctacagcatttaaaattggctgtagagttttgcattgtatggataaaataccttccaagttttcactgtttcatactgtgatgtatgttttcatacattgttctaaaatatcttaagccacatcgtacatattgccagtttggttctctgtgaattttactggtaacaatacaacctagatgctcagggttaattaagtattctggggcaaagtgccattgaacctggttcctggtacatacattcattctgattattggttgggataggtttatagttgtgaaataggtgctacagacagttaacataaaacatcctgtagctctcagaagatagaaaatgcaccctttaactttcagaaacttgcatacctataaacgtagaaacaaggaattgcatttttattaattcatggaatccagtcttcataatggatttaaataattctatttaaaatatgtgcacacaatctaaaagcattttgtcatt

SEQ ID NO: 108736 - DNA, 1854 bp, Homo sapiens
gagcacagactggagttattacttgcttaaaagccaaaaacttgagggtatccagcataagaattgtgtgttttggtctgtggatagcagctgcttgaagtccataaaaacaagaaacctgaagttgattcagatgaatctgaagtcttgtacctgaattatgtcaaggttagcagtaaatgccatttaaaaagactgagtacaaattgccaaattcctttgaatgccaaaccatatttctcaggaaagttggccactgccaaatttataacatttgtgtttctgttacctgaattccaagggcagaggggtgattgagggggtaagggaaaggcacaggtgaattttattttcagatgtctaataggacagtgtgacattgcccagagatagtctctcaaaggtagtgagtgccagcagaacttctcgaatgcgaagttgagaaattttacttatttacttattttcccattgaaaaaaaaaaaaaaaactttaaatgttttctgagttaaaaaggcctctgactggtagtcctgacacagcttcttgagagtctccgagagagcctcttctcagtacaattcctaagaagataggaagaaaaaaaaaaatattcttaacacataaaactagaattagtgggaagaaatgcctactgtaaactcaacagaaccggggttaaaaaatataggataagttttgactacctaaaagtagcagggcagacccatctcttccctaactctgtccataattcagaaagggcccagggaactgtcctcaggaatgctcttcccccctcttccttgtcctctccgacagagcctttctaatcagtaggaggtcacaacttagaaaataaccagagagagctggaatggtaagttaggggctattactgttatattctgagaatcctgatccatgaaaataaagtgctgaaggtggggtagagttagaaagacctgtgttcactgagggttttgagtattacaggctctccatcactcagagcatcagaaagtcaggcggtgaacgcaggagatttttctctcaggctaaccaaaaccatgttgaaatgaaaaccactttggaattggccttttcgtctcagactgccaaataactagcacccaagtggatcccttagctcagagcagtcaccaggcatgggtaggtctttccttgtttagtgataaacaggaaaaacctaaccgagcctactgaaccatgtccatctataaaagaaaaagggagatcatactggagatttgaaagaagagtagacctccagaactgattgattataatttatttctgttatagtatttccacttagtattatgatttatttctgtccctcatgaaagggacagaaagtagtcaggcggttatgagatgaaaagacagtaagatgggatgaaatcggagtgaaacaataaaaaaaagactaagttaaaaatgtaatagcatattaaaattcatgtgtaagggggtaatgagctgaaaataaagtctgtgttttgaaggagaaacaagataaagctctttggaatccaaaggataaaaacataaaatgagggagaagatatatagagagaatatctaacaggagaattacaagtgttgataaacagggaaccaagtgaaatagaacaacatcattataagaagttttcatgcacgtgtgcagatttgaaagtgttgccgtatttttcatgtgaaatcaatgaaaaatatgtttgggcatttctatttaagaataatgttaaagtaccttgccaaaatatctggcaagatattagctaccagggaacaaagttgtttttcttctcctttctagcaataaatgcc

SEQ ID NO: 108737 - DNA, 246 bp, Homo sapiens
  misc_feature (215)..(215): n is a, c, g, or t
  misc_feature (220)..(220): n is a, c, g, or t
  misc_feature (223)..(223): n is a, c, g, or t
  misc_feature (242)..(242): n is a, c, g, or t
tggtggtctccaagtaaccagcttcctgagggctcagcaggcggaatcctgcccatcacgcttatgtactggcaggagtgtctggctgtgattggaggtgtgtgtgctctgtacagaatcgactggtgttgcttagatgtccagagtgggaggggagaggggaaaaaacaaaaccttaaaattctggaaaggaaggaagaaaggaaaaaccctcngactngtnggtaaatgggaacttaaangtaa

SEQ ID NO: 108738 - DNA, 3051 bp, Homo sapiens
  misc_feature (920)..(920): n is a, c, g, or t
  misc_feature (1248)..(1248): n is a, c, g, or t
  misc_feature (2457)..(2457): n is a, c, g, or t
  misc_feature (2930)..(2930): n is a, c, g, or t
  misc_feature (2939)..(2939): n is a, c, g, or t
gttgcagaacgagcaagcattattaaagttagccctctacactgaaccatgttcgagggcccctttcactccttctcttctaccccgcctcaccgaccctttcccacctgttctcatttctgcgtctatgtccgaggaggctcaggtgcaaccctttccattggaaccaacccactcccatgcccagtggttctgcatgactttattgacataaccacactagtaaataaaggagagaagaagccagtccttggatgaagtttcctcttgcttttccagcgaatgatacgatgggtctctgttcagccctgtagcctggggtgcttttggcagaggtgccttttccttcgacagtcctggaaagcaggctgcataaaccagctgcctagaactgggaggtgagtgcggaggaagaataggtagagaaaacttaactggctcatgttcttcgaagctgccacatttcccgaatatgcccacttgggtcagatttcgaaggcgaagccttttgcagtcatgaactgcgggagcccaggctgtgttcaaattcctccggaagaaagaaagaataaacgagaacaggctgtggaaaagaatgtagttagtgtcttaaagatggccaaatattcattctcatttgtccttttatatgaaacagatttttaaaaaggcaattggagtagctaatgacatccagaaccccgttgattcgagtggggctgggggtgggggcttaaattggcccaaacagctaatcaggccgaaagaaagaggtgagttgattaccctggaaattgcacaggaattcttcaaagatgtggccaataattagagtttaagatgctactctttatgcacataacttagcataattttattaggcagctcatcaccaacagaattagtgaaaatcaggccanaaaaaatctgagagccaggcttatgcagacgtggaggcttttgctctaaaatggtctgctcacgcttggggaagaccccaagagaaagcactacctttcttctgggccctgagcgggttgggagtggaaatgaatcagagccatttcagggggctgtgctggagttggggacaatgtggcctggacctagctgggacggacacagacttggtttgaacaccagtttccccacttactggtgagtgagatggggccaattccttaaattctgacctcccattccttgcctgtttttgggagcaggaaccccatttgtgaggatcagccntgaggctgatggcattggaagcagtgcagatatagaaacagtagctgtcattatcactcgaggctgctgctgatggagggaggcctggtctccaccaagctcaaaagcccttcatcagaatgggtttatgctactgtttcccccaaacactgcagtcacctggctggctagagttcttagaagatttcaaagtttgggggcagaggcaatgtccaaccttgaatctttttttttttttttttttttgagacagagtctcactctgtagtccagatgcccaggctggtgtgcagtagcgagatcttggctcactgcaacctctgcctcccggggttaagagattcttgtgcctcagcctcccaaataggtggaactacaggtgtgtgccagcatatctggctaatttttgtatacttagtagagatgaggtttcaccatgttggccaggctggtctcgattgcctgacctcaggtgatccacctgcctcggcctcccaaagtgctgggattacaggtgtgagccactgcacctggcctcgaccttgaatctctctgtgcacctttcatggatttgcaaacttgcccagggtcctgtggccccagccgtggttctcagttggaggtgaacctgcctccagtatgctgggctggcctgggcatccctgactggagaatgtacctgtcatggggcaggggacatacagacaaaggagaaggcaaagggactcctcaagaatccatttcctcagggatctggaagggagaatgaaagtcatagaattggccaatcattaaaaacttctctttttacattaaaacaaacttattaatataatagaaagcagaatttacttgtgttaaaaaaatatagctaaggtatgcggggcttaatacctaggtgattggttgataggtgcagcaaaccaccatggcacacgtttacttatgaaacaaacttgcacgtcctgcacatgtatcccagaacttaaaattcaattaaaaaaaaaaaaacacacaaggcatgagataattgagggggaggaggtggctggtgcccatgtggatgggcggcggcggggcttcactattggcttctgctcataggatccagaggtgcagcttgagaggaactggcttatccttagcaagccaggcgtctggcccatggttagggctcagtaaacctttgtgacatttgagttggttttnaaaataattctggtaaaatatacatagcatacaatttattattttaaactttattttttttttgtgatgagatctcgctctgttgcccaggctggagtaaagtggcacaatcatagctcactgtaaccttgaactcctgggcttaagtgatcttcctgcctcaggaccctgagtaactgggactacaggcccaagccactgtgcctggctaattttttaatttttttttttttgtagagatggggtcttgctatgttgcctaggctggtcttgaactcctgacctcaagtgatgctctcaccctggcctcctaaagtgctaggattacaggccatttcaactattttttgtttgtttgtttgttttggtttttgagacggagtctggctgtgtcgcccaggctggagtgcagtggtgcgatcccggctcactgcaacctctgcctcctgggttcaagcgattctcctgcctcngactcccanctactcgggaggcggaggcaggggaattgcttgaacccgggaggtggacgttgcagtgagtcaagattatgccactgcactccagcctggcgacagagcgagactctgtctc

SEQ ID NO: 108739 - DNA, 438 bp, Homo sapiens
aatggtccttctgtaagaaagctgattctggcaccaacagagaggctgcctcagatgaagagtgttagcacccgaagggacccccaggcctgtcctgaccctcccacccctgctgtcggcccaacttgtgtccctttcctggaagaactgcttccggcggccagtgtgctatgcttcctcctggctctgccctgcacccccagaacagcccctgggcttacgggagacactagtctctgggcttctgcagccaatcaagctgctgggccctccctcccaagcactggaggaggtactcgttctgtgggccggggcccctccctcctgagcactggaggaggcacttgttctgtgggccacggcccctccctccccagcactggaggaggcactggttgtgtgggccctggctcctccatgtctgagggaactgctctg

SEQ ID NO: 108740 - DNA, 473 bp, Homo sapiens
gggctgaccatagaggttccgaacgcgtcaaatcgaagatgggtgctacagactagtagacactttgtggcataaataatacagtggtagaacaatagagtactttgtttcttcttgactgaaatttcttactgaattccctggctgatatttttcattgtgagttgcttatctcgatgtcctgctttgaaaagtatgtgtttagggaatgtttttatttgcatacttactatgtttgctatggaaaatttagaaagtaatgttaagtaaaatgaagaaaataaaaaccatctgtactccctccattctagcattaactactatttagattttggggataaagttttcctgtctttttacattaatacaataatagttaacatttattaagcattttctagtaccaagtactattccagttgctttacatgtattcgtctaatcttcgattttgacgcgttcgggtaccgaga

SEQ ID NO: 108741 - DNA, 857 bp, Homo sapiens
gggctgaccatagaggttccgaacgcgtcaaatcgaagatgggtgctacagactagtagacactttgtggcataaataatacagtggtagaacaatagagtactttgtttcttcttgactgaaatttcttactgaattccctggctgatatttttcattgtgagttgcttatctcgatgtcctgctttgaaaagtatgtgtttagggaatgtttttatttgcatacttactatgtttgctatggaaaatttagaaagtaatgttaagtaaaatgaagaaaataaaaaccatctgtactccctccattctagcattaactactatttagattttggggataaagttttcctgtctttttacattaatacaataatagttaacatttattaagcattttctagtaccaagtactattccagttgctttacatgtattcgtctaatcttcacaataacttcaagggggcaggtattattgtcctcattttacagataaagaaaatgaggcaccaaatacatgattggtggggtatattttagttttttgaaaatgctatttatatagttttataccttgttttttcatattattatccttctgtgtatacctaatattctattatgtgcatagttcctcatatacttggtcatatcgtaagttttggattttaagttctttgcattgttaattataaggtttttatgaatatttatttagcagaatttctacccacctcctcctgatcttcttccttctaataatttggcaaccaaaaattgatagttttaatttgcatttcattgattacccctgatatagaattttttcatatacttatgccatttttttttctattt

SEQ ID NO: 108742 - DNA, 1270 bp, Homo sapiens
atagtgagtgagttctcacgagatctgatggttttataaggggcttcaccgctttgctgtctcttctcgctcctgccgcatgtggagaaggtgcttgcttccactttgccttccgccatgattgtaattttcctgaggcctcaccagctgtgtggagctgtcagtcaattaaacctctttcctttgtaagttacccagtcttgggtatttctttatagcagtgtgaaaatggactaatacagtgctcttttaagtaccgtaactgaagaggagatgagatagttttttggagtgaataaaacgttctgtacttcataaaacccaagctgtcatttaagtcagcacctggggagtagtaataaatgactcttcttaggggctttctgtgggagcagtgtgaggaggcctcagccttccttatgtaggtccattagtttagagccacattcttttctcatggtgtcactgaagtttttgaggtccagaagctccctttgcactctcttcatcttgtgagctttcagtctgtctctagatttagggcaagaaacctgtggtggtgagggcaggtggcaatgttcacctgatagacagctaggatttcttgttaatctggttgtggttatcatttatgtgttaactagctctcatgagtgtttgcccccaaggcctgcagaagacaggtaatgtctcttctcacttacctgtgtggggcactccctcagactcacagaggatgaaggggtgtgtgttataaaatgttctgtttctgcttcctacttcaagcaaagcttgcttttcatcactgacctctgtgttatgtagtcatagttctttgtagtcactgatgaacatcttcaatgtgctccaaacattctgaactcctttctaattcctgaagatcccctactaatccctaggttgagaagtcagaggttctaattgatttgctgtttgctgccttaaggtttgtgttccctagaaatgatgtttcattttgtatgtacttccccccttactgaactgcacccaaaacaaatgttgtaggttttgacatgggaaagctttagctgttcaaacatgcacaccttgctgacattcaaatccacagactgtaccacacatcagtgtttacagagttcttgacaggtctgaaaaaacattaccatatttatcatttccattggtagaacagaataatggcaaatgatatacatgtagtcctccataattaataaaatactttcacatctgtaattattattcacaa

SEQ ID NO: 108743 - DNA, 321 bp, Homo sapiens
agctgtaacttaaaatatctaactttaaaaacagacatttagtgtataggactaaattattaatatatggttgccagtatcatatttgcaagcattatctttaagaggccttgagttactctttgagacacccttgtcacaatgcgacctagtatcacaaatgctgactgatttagagaacagatgcactgggaaaataaacctgcaagaagtgttatctttcctagtaagtaactgtgtgaccttggcaaaccacttactctctctgggtcctagtaaaatggagagtttggaaccaatggccttttagattctttagag

SEQ ID NO: 108744 - DNA, 339 bp, Homo sapiens
gatcctctacttctcaccctcttatgttgggaatgctttaggactcattcctaaggcattccctcaagtttggatacttaagtttcagttcctgaatttctatttggttattttacaaatctgcagtgtcatttctgttacagtctccaactctgttaaaattttttcaagcttggcttgtattccctagaccacagtaagtaggttttagtctatttccattgtttctgctggttctcattcacggtatcttaccttctcatatgcctggtggggtacatttgattctgtgccagaccctgcatttaaaaagtctagaatagtaacttgaggctcaga

SEQ ID NO: 108745 - DNA, 1152 bp, Homo sapiens
catgtgtaaattaatatcttaagtattttttggtaaagagttaagcaaagattgaattatttttagatatttttaaaattacagaaacactacatttaagttagaaaattaggaaaacagtcatcatatggagagaacaaagaaataaaaatactgaagtctgaaagagttttagatgttttatgtgtaaatgaaattggtaccatacagtttttctaattttctaattaaatgtagtattgtgaatattttctcttgggaatgattacttttctttggagtttgatagtggtataaactgtttatattttgtattctatcaggaaagtattacagtaatggaataattataatttcattgagtgcgtctcctctttttaatatgaattttgagcaagtttttagattcatttatatgaagtgtccatttttgtaggtaaaagtagttgaaaaaggtaatgtatggttcaacctaataacagaaaatatctagccttaattagaaaaataagtcataaagacaactttgtttcaaataaggggaaatacgatagcagtcatgaaaaactgaaggatacaaagagaatattttaattggtagccatacaaagtggagatattttagaatctatttcattctctaatatatttgagtcattttattttgggtaaaataaattataggcggagcatggtggctcacgctggttatcccaacactttgggaggctgagggggcccaaatgcttgaggccaggaatttgagaccagcctgaccaatatggtgaaaccctgtgtttacaaaaaataaaaaaaaaaaattagccaggtgtggtgacgtgcacctgtaattccaactactcgggtgactggggctggaggatcacttaaacccaggaggccaaggttgcagtgagcagagataatgccactgcactccatcctgggcaacaaagtgacacctgtctcaaaaaataaaataaataaatagtagcagaatccttttagcaggctttaatgttaagcatgagattaccattatttgtaacattttttaaatagggacattttactgtttcttacattgctgcttatttatgttatttggcatttcctggctggtcacggtggctcacgcctgtaatccctgca

SEQ ID NO: 108746 - DNA, 407 bp, Homo sapiens
agccatcaatccagcttttgcttaagctactaactaaaaaaactcactaatttatacagtttgttttagatgcaacttatagagacaaataaacccttcaaggtgtagcccaaatgctaaaatatcagggtttccctgaccctcccacataaatacaagttttcccttctgaaaactgccacagcacttgatctgaacgtatcttctgggacctctgggttcttgccatagagtacaagtctgcacacacatgcaacttatccataggctgaaactctccacaaattcaagcttcgaaggcaggcattctttttcatctggcaatagctatcataacaccagtcatgaaataaatgctcaataagtgattgctcaatggctgtctggctggctggcggtggttctat

SEQ ID NO: 108747 - DNA, 791 bp, Homo sapiens
gtgtaaatcaaatgtgtaaatcaaacatgtaccagtcaaaactgagcttcaggcagtatagaaatattccattctacaaacttttttttgttgttgtggtttttatctcaggttgagacttaagggaacattttcaaaatagtgtaagatctggtttcacaattctgtgacagaggacatgattttattgttgaagttaaattttaagttattgtagctttttttaaagtaaattaccctaatgcagtcatatgagctgatgatgctatgatttgtgtcactgctctgtatttttcagtaccaaataattcctttgttaaactcattttcagtaaatgagccattgtttccccaagggtaatgattatttcccctatatatagtacaaagccttgagaaatagatttttaaatctaaaatatgagttaatgattggaaaaggctgaaatcatcactgtgtcaactgtatgtgtgaaaagggcaactgctgtgtttgctgcctaggctacaatataagatactatgtttacaagaaatccaatgacagcaaggctttaaaagtgaggtctttcagtttagatgcaaaaagggtggttctgttgagtcaacccagctatttcactacatagtttcgtaatgtaaacacctagaatgaggtagctggagtgcaaatctaaatggcttgtgacagttaaggaagtacataggcaacagttactggttttcttgatgcagctgatatcagtatcttcaaataaatcactgacttaaagtacctcagcaggaaagac

SEQ ID NO: 108748 - DNA, 100 bp, Homo sapiens
cgaggttttgccatgttgcccaggcttgaaggagcattttgtagactgtaaatagttaaaatggtgtctctcctgtggttctctgattataattttttaa

SEQ ID NO: 108749 - DNA, 451 bp, Homo sapiens
aaatgtaatggataccactcctgtgattaggttactcatcaaaagagattgtcctggatgggcctgacctaatcaggtgactcctttcaagaagccaaggtgtctgagagatgttcttctgatggactggaggaaagcaaacagccatgttgaaagagggcggtgggggcatttggcaaggagctgagtatgccctttaggggcagagagtgatcctgggtgacagccagcaagaaaatggggacttctttttcacaatggcaagtaagtgaattctgccaacttgaatgagcttgcaagaggactctgcttctcaggtgagatcacagctccagatgataccttgatttcagcctgctgagacacccgagcagaggaccccactaacctatgctggactcctggcccatggaaattaagagataataaatttgtgttgttctaagccttt

SEQ ID NO: 108750 - DNA, 547 bp, Homo sapiens
  misc_feature (15)..(15): n is a, c, g, or t
tagaggatcccgatnagagcatacccctgatatactaaaataaagtaaaattcatagcacagattatcacaggtagagataagttagagcagataaaggtggagtgacaggtttggttgcagtccctgtctccaagtgactactaatgactatgactaccacacacacacatgcgcacatgtgcttctgcacaggcacacacaagatatatacacaatctgtgaaatagtaagtgagactgtcagctaagaggatgggcactgtgaggccaggagtaatattcaaaaatctttcagctgtgttggcacccttcatggttacattttcataggcagccaaacaggggtgactggggggaattcaaagagctggtatgaagccggcttcaggcagccaaatgggtgctgggcatatgcctgctgtggccccaacaccataaacactgttgctttccccacattccatgcctgctattgccactataatgcgcagggaccaggccagccaaacagaggtgcagtgggccagctggagggctggaagctga

SEQ ID NO: 108751 - DNA, 1174 bp, Homo sapiens
ggtaagctgttgtttgcttgccaaggaactggagagtgcaggtttcaagacaccttgaggaaattctcctgagcccttagccaagagaagagagcagaaaatgcttttctgtagaatcccaagaggcataaaagaggatgagtaactgggtcctgtgccaagttcccaacccctaagccttcccaacatggagaaactacaccagtgtttaaaagtttctaggttggaggaacaaacttgagcatcaagggcagatgatttgttaacacagtcctgtgcagagggctccttcagaaggcatcccctgtgacccaaacacagtgagcaccttctactttctggccttatgccatcaatgcatccagctgcaatctatcctcaaacctggaatccatctcttgacttcccagccagaccaccttccatcccttcactgtgtcccaccctgcccagaatgcatgctgttctcccagagtctcatggaaataaggccttgcactgaaataggctgtgggaaacaaaaggataagcaggtctggaccagtctgtaatggtagcaggtgaaaacaacttatggaaaaacacatgaattcattaggaaataaggtgacagatccccagctgctgaagaactagaatgtctattacactcatacaattgatgttttattttaatacaccagagctaccacacataacttccttccatgtgaaaggctccagataaaattctgccatccctcctctcctcatgtcctcctgctcagacccaccttcgatgcccctaaaccaatctgcatcatgcctgtttcagagagtcatgggaagatgggcagtgcctccattgtcaccattccccacacctctgcacacttctgccccttcccctctagacgccacaacttcacagtcttactgttgtaaatattcctgcacagttagtaatgatcaaatgatcctgtggtcagaggcctctttggcagtgtcttcttacccttaagaaaggtcatgaaatccagaaggggcaacctttccaggagagctttggagtcatttctgtgtgagacactattgcataatcctgtaagattgcttttatatttaaggaatgatgttacttaacaaatgaacaaaaaaaattgcaaataaattttttaacaatgtttacattggc

SEQ ID NO: 108752 - DNA, 1117 bp, Homo sapiens
ggtaagctgttgtttgcttgccaaggaactggagagtgcaggtttcaagacaccttgaggaaattctcctgagcccttagccaagagaagagagcagaaaatgcttttctgtagaatcccaagaggcataaaagaggatgagtaactgggtcctgtgccaagttcccaacccctaagccttcccaacatggagaaactacaccagtgtttaaaagtttctaggttggaggaacaaacttgagcatcaagggcagatgatttgttaacacagtcctgtgcagagggctccttcagaaggcatcccctgtgacccaaacacagtgagcaccttctactttctggccttatgccatcaatgcatccagctgcaatctatcctcaaacctggaatccatctcttgacttcccagccagaccaccttccatcccttcactgtgtcccaccctgcccagaatgcatgctgttctcccagagtctcatggaaataaggccttgcactgaaataggctgtgggaaacaaaaggataagcaggtctggaccagtctgtaatggtagcaggtgaaaacaacttatggaaaaacacatgaattcattaggaaataaggtgacagatccccagctgctgaagaactagaatgtctattacactcatacaattgatgttttattttaatacaccagagctaccacacataacttccttccatgtgaaagcttcgatgcccctaaaccaatctgcatcatgcctgtttcagagagtcatgggaagatgggcagtgcctccattgtcaccattccccacacctctgcacacttctgccccttcccctctagacgccacaacttcacagtcttactgttgtaaatattcctgcacagttagtaatgatcaaatgatcctgtggtcagaggcctctttggcagtgtcttcttacccttaagaaaggtcatgaaatccagaaggggcaacctttccaggagagctttggagtcatttctgtgtgagacactattgcataatcctgtaagattgcttttatatttaaggaatgatgttacttaacaaatgaacaaaaaaaattgcaaataaattttttaacaatgtttacattggc

SEQ ID NO: 108753 - DNA, 315 bp, Homo sapiens
cccagaaaggtgaagcaatggttgatggtcacacagctagtggcagcagagccaggactcaaacccagagagtctggctccagagtccatgatctcagtgccaaagtctactgcctcctatgagcacaggcagccaggactagaacctgcagggggatgccctggcccttccttgcagggggtcctctccatcgcctgcaagggtggagaggcgggggctgcccccactcagcaggtgtgaggggcaggaatatcactcggctcagaggaatgtgtgtgcttgtgagaaagcgagtgtgagtgtgtatgagtgtg

SEQ ID NO: 108754 - DNA, 475 bp, Homo sapiens
aagatctcatgactcactccagtgtggctgggcctccagtcctcactctgaaccaaagtcctggaaacacttttccaccacgttgagagaaggcgagggaagaacagggtcaggagtgatcaaatgcccttagaaacagtctctttctttccttttgggaaaacaaactcactgtgtaataaaaaggtacaaagccaactttggaataataatcaccccgccccatccccttgccctctgatggaaagtgccttgtcttctccatcaaggtctagctgggggcttgaacggcctccgtgtcacctctaattccccagtttttaccttgtttcctttctctgtatcttttttgcccttagttgtgtacagtcttgtattttttcacataggctatgctttctgtggatgttgcctccctcgaaagcagggaccatgtgttgaacccctgttgccttttcccagagtagcgggcacc

SEQ ID NO: 108755 - DNA, 421 bp, Homo sapiens
aaccccagactcacacaccgtagaaggcccagtgtctgtggagctaaaactgcactcccttccctgcactacgtcctctgttctgtctctatcactctggtagacttgcccaggcccaccacctctgcctaggctctcaaagctgccacccaagtggcttcctgcaattcttcccctactctagccagcttaagtcggttacctccatcacctgccctaaaacaaacacctgagtcaccccctcacggtctccacagctctgcactgtcattgacctggccaaggggagccactgtctctccctagagcacgtctgtccacaccctcctcttgcctggtgtgccagtgcccttccctacactcccaccctgaattctgaccactcttcagggtccactccattaaccccaacccaactcct

SEQ ID NO: 108756 - DNA, 413 bp, Homo sapiens
gacatagtggtctttagtagcacatgagaaagactatccccagtgatgtgcttatgatgttgtgttctcattgtagcctagggcttttcctcgcctcctctgtttccttttccctagagccctgtgtcagcggcaatgaatgcttaagtaggctctgtcaggaaaactctccgtgaccttggaaacggtatttaacctttctgtggatcagcatccaaatagcaaagcaataatgacaggagctgcctccttcacaagcctatgagttgtgactaagaaaagggattgtaaaacgctctgaacatcttaaatactacggacaaatctaacaatgttaatcactcaccagctcatgcccagtggtcatcaccagacccttaaaatcagttgctttctaggagtcttaggtcact

SEQ ID NO: 108757 - DNA, 522 bp, Homo sapiens
gcgtcgacaaatacaaacaaatattgataacataaattgtactgcaaagcagtattcctcagcctttggttgggtctttgatatgtggtgatatcctgggtttcaactcttctacaaggttttcttatatataatgtaggatagatacagttgttctgtgatttgggatggttataaaattaaataaccaaatggaaaggcagaaagtgagaaatgttaagtgacattgtagtaccatataatattttagatcttgacttaggcatatacaaagagtatcttacttattttatacaaagtctacaatgttatgatgctacaaagaatgagttaagaatgagtaaacgctaggttttatggagactcataagaaaatataaagattttcgtcttactattcaagtttgaaatgcataaatgaagctttataattggtgtgcaaaaccagacatagaacctgcccttctggactctctggtcaagtgaagaaagagtaatcaagttaagaaatgtaaaaaaaaa

SEQ ID NO: 108758 - DNA, 315 bp, Homo sapiens
tgcccaggtggtttcaaactcctgaactcaagtgatcttcctgccttggccgcccaaagtgctgggattataggcatgagctcccgcacccagccatcagcttgctccttcaaccttcaagctatcgtgtcctttctgggcttgtgggagtctcacctccgcttacacagttcagggttcagccaaagatttgaggggaccttatactcagactttgggttccttttttagtgggttcctcctttcctatatttccctctcaatttccagcttctttagcagtctcaaatcctccttcaacctggtcgaccgtct

SEQ ID NO: 108759 - DNA, 289 bp, Homo sapiens
cacggaccctgcaggaggatcttaaaagggcaggtgagggatctgcaccttccccaagaagctatcagaagccccagctggggtgtcacgccccacgggccactcagcagttcctcactacactgaaagcagccacctctgccatgggaggctggagtagaggaagcctgcgagagtcagcctcacagaccctgggcggggctggagaggcagctgggaagagcatgggacaggaggtgggggtccctgccattatatcagagccctccccagctcccaacaaacacca

SEQ ID NO: 108760 - DNA, 610 bp, Homo sapiens
tgcatttcaaaatcattttgtcctactttattgcaatgagtgcaaacacacacagtcataaaatacacaaagatagttgttacctttctttggtcagattctttgagaatgttatgaatgctagagatccttgtcccctcaaaatgagcacacacacacacaaacaaactggtccatacacatacacacaccaacatacttgtaggtttgctttttaggcaacagagcattccctaactcgttccaaagtctatgattcaagttaagaattactgaaataaagaataagtatttggatttacatgggaatagatatggaatacacaccatacacacacacacacacacacacacacacataatatatccaaatatttaatgactatttaaataagtcttatacagtacacaatttcctactcaatctgatatatgcaattgccactgacaaaattctaggaaaaggatcaacttatgctctgcataatgaagtgacagatgctcctacagtgttctgcaaaccactatttacttgaagcagtttcacaacttctatgtgtttacagcagggttgaatttgatatgacaacttggctcaatgagtattaca

SEQ ID NO: 108761 - DNA, 537 bp, Homo sapiens
cctcactagcctctgcccaggatatctctccactcctccctggccatggtggcggatccggtgggaggggcctcatctcccaggctgtcaggcttcgctctgcctgcgaccccgactctaattctgcctggggacggctgtgggggtgtcctgcagctggtgctcgccggaacccagtcctcccccagcagcatgggacggttggcccggagccttgcaccgaacgttttgccccagacgaggcgtcctgtcagccgaggcgtaatcctgctgcccactctctcccagaaggagaggcagtcaacccgaggtgctgtgctgcaggacagtctccagcgcgtgctcgtttaccgccttaatgattcacctaggttgctttgtccatgggggtcttggggagaccaaaacttggtcctgagtgagtttcatttatcgcacattgaactatgagctctcaatcaagtgcaagttatgggagatcagatttatttcacctattgcaaagcaataaaaatgaattttatttgaaaaaaaaaa

SEQ ID NO: 108762 - DNA, 339 bp, Homo sapiens
aggaatgtgggtccgacgagttaagttctggcccagtctcagcctccgtggactggcctggcctggtctgatttccgcctccgtggttaggtctggttttagctttgatgaccgtgccctgccccaccctgcctggtggcctggggaggctcctagtgcagatatgtggagggtttgaactccaaacagtctctgctgactgtaaacacctgtggggtgggggcttggagctctctgttctcttgcgggcctccttctgcctgggcctgtctgccattcgtgagtgagccctggccttcccgtcgtgtgcaagtaaggggtcatttgtggtggaagaag

SEQ ID NO: 108763 - DNA, 616 bp, Homo sapiens
cttgtttgttatcagctctgtgagaacaggggccacgtctgtgttgttcatctctgtatattcagattctaatacaatacctcacacataggaagcattcgctgagcatgtatttgctcaacaaatggtgccatatacttttatcgccatgaaaaagaacgtgatagatctatgtgtttgtatacaacagtcttatgggaaaaaaaggcaaagttagaaattgtgtatagtatgtgtgtgtatgtagtgtaattaataccatatgtaaaagtgttttcacgaaagataccaaaattaatactgattgtctctggggacagagaggaggagtggaagggagattcttcattgagaatcattgacattctgtggtgtttgaattttttaactttgtacatgtattattcttttaaaaggattatgtattctttcttttaaaagggtttaaaaaattaatgcttaaaatgtcaactggaaaagaaaggtatgacttctgccaatcatttttaaaaatatatgtagtatttatgtagaactgctcatgcaattaatcgttaaacaaaatcaataaatttcaggccttttttttttttttaagaaacaggtattttccaag

SEQ ID NO: 108764 - DNA, 661 bp, Homo sapiens
gtgtgatctctcccagtctcctcatttggccaatatttaaaactctagaaagttgacataaaaatctggattactggcttttcttgagaaatgaaaatttctgccactaccttccctcttcatctatggtaacactggggtggcacagagtagatggggtttgcccttttgtggtccctactcagtggctttactcatttatattacctgcatggttcctgtaggcaactgcttttcccactctagggtaacatgtttccctttgatgaccatgttaatttcattttggaaacaatttgttctctagattaaataccaaacatactatcttctcagactacaggttaaatattctttacccttttataaagaataaataatgtctatttattggctgcttcaccacatttaaggcacaatgctaaatgttttacatgtattatttcacttaacccacataaacattccaagagtaggcactaactttgtgcccatttcacagatcaggacactgaggttcagagaggcgtccttaacttgttgaagttacatagttgatgattggtcgaactcggattccagcccaaatctatttgagaccaaagcctgggctctcagccactttgccattgccactgctcgctcttattctcctgataga

SEQ ID NO: 108765 - DNA, 398 bp, Homo sapiens
gcatggaaattgatgttttggggattggtagatgattgttggctggtccacatttaacttctttctgttaaacttgtagatagtcaaagtgaagttcattaaatattttctgaaatcagtttattaaggtgacataaagtattttaaacatttaaagaagtattaattaaaatggtattacaaatttagaacttggtatatttagaactttggttatattgtctgttcttgggttttcatgtgaatataagacaattgctattttttttcaattaagaggctattttttaaaacagttttagacttacagaatgatatgtttaaaatactttatgtcaccttaataaactgatttcagaaaatatttaatgaacttcactttgactatctacaagttt

SEQ ID NO: 108766 - DNA, 286 bp, Homo sapiens
cttccacactccatctatctttgtccaaaccactaacagagactttcttacccacctcctgaacaaaaccaagttccttttaatctccacatctagcataaatatgcccccaaattattactttgaatatcatttcctgctttgtgcagcatcaattatccatagcaaagaaagggttctaaagcatgcaactggtttaaaatgagttgcttcaccattgcactgatcagcagacagtataacacacacaataatttgctaaggaaagcccatttaagcatttaac

SEQ ID NO: 108767 - DNA, 377 bp, Homo sapiens
ctctgaggcacggcaagaacggtgcttccccactaaagcatcaattgtattattcttttgatatgtgtattttggctatcagtaacacctgaacacggtattaaatcagatactgagttagaactctctacgtgattgcctggcttcctgcagattaggctgagtgcatcacgggcatcgacgcacatctgtggacactgataaggccatggtctctgtgactagggtttgcgaggcactatggtcaacttctgctcctggccagggggaacgcagccaatcacactcatgtgtgaggcattcagagcacacaagtcacccaaccagtcatggccgtgactgaggccatgccattctggtttcccaaatggcaaaca

SEQ ID NO: 108768 - DNA, 299 bp, Homo sapiens
tgaacattcagatgaaaactctggcaaacttcaggagctccatccccaaaggtattgatggctatgtgcaaattaacagctatactagtgcaaattaaaagcacactagtttaacacagggcctctacatcttttttaaaaagtcactttgggaggctgaagtgggaggactgcatgagcctaggagttcaagatcagtctgggcaacataatgagtccctgactccaaaataatttaaacatttcctgggcatggtggtgtctgcctgtagtcctagctactcaggagactgagcatg

SEQ ID NO: 108769 - DNA, 304 bp, Homo sapiens
tacacagccctgtatgcagagttaaggagcaaacaagatggcaaggcatccaattctagaaatgataagacagaaccatccctagggatgatgagacaaggagcaggagtttccttaagagcccagtgtaagcagaggcacaggagggcaggatggagggacgtacagcctgaaaggacactgccatggtccaggcaaagggtcaaagcaggaacagatgaagatgtatctcctttaaaaacaaacaaacaaaaaaagacagtttccctctgtcacccaagctggagtgcaatggtacaatctt

SEQ ID NO: 108770 - DNA, 691 bp, Homo sapiens
aggggaggtcagttaaaagagcttctgatgtaaataaagcaaatttgcaataagaacatgtccgccctctaatcacttgtttataaaacggctgccctctcctccacagcactatctgattcaacactttcatggtttgtcaatattgataacttatttttaaataaaaaagtgaagtatatatattttttttcaaaagccactgcttcccaagctcacatcacaagaaaaagtagcaactttttctgtttatgttcttttttgttgattcttttctccacaatatcagatttgtgtcatgagatggttcaaacattactagctctgcttgagcccctcagagaaagatatgtgtatacatacacatatatgttagtaatttgtgattgatattctttgcttatagacttgatttttttgtttaatatagtattctgtttttaggaatcatactaaactgtttcctccctgtatggctgattataagctatgactagcaaaccagattttatttgcagttgtttgaaacttcatttttcttatatgacctgattaatgcactctgaacatgaatcagtgtatcctgccctgttctttgttttgaatacatctgtcattttctgcctcacattattttccttgatttcaagtcacttgcttcttattttcaaataaaataatttttaagaat

SEQ ID NO: 108771 - DNA, 328 bp, Homo sapiens
cctcccaatctgtgctctgagcaaccccctgctctctccatccccgaccccaattccgtctcctccagaaatttgctctgacttctcctgcagggggtggagctcctctctgctaccacctgtggagtgtgatcatcaccttccggcctgccgcactagactgtgatgtctccgtgcatttgcattggtctgtgtggtgtggtaccaaggcactgatgaagaaaagggaggatctaaacttcagtccaagccctgccaggaactagcttcaagactgcacccgaggcattctgcctcactgagcttctccttgtttataaatatagac

SEQ ID NO: 108772 - DNA, 549 bp, Homo sapiens
tactgtgtcagtggtccccagcattgtagacagcagcaatgcctctggcatggagatcacttttgctaggtctttatttgtacagggtaaggtgtggtggctgctcagtcacccaggctgctgctaatcagtgcaactatgctttgaaaggagcaattcagttcatttcatcagaaaacaaaaggatcacaggtgtgtccagcagcagctagggaagaagaaaaaaaagaaatgcctaagagcactgctatcaagtctaaggcatgaaactgactttcacaggtgtgttcctggctgtgtacatacacatgtacttaactgccttccctgattccagtgagcaacatttgttagtatctccttccttatgacagcacatctctggaatactcgtatcccaagctagatctttgctacaaaaaaaaaatcagtaaatggcaatcacttcctgctgggtaaaaaatttaattcctcatccggaagttaagaacccaccaaacacggtgtggaagctagtaaaccccactatgggtgtactaactgctgttc

SEQ ID NO: 108773 - DNA, 682 bp, Homo sapiens
ttcctgtgaattctggaggctgcagcccagcgagcccgacacggtcgccagcatgtttcccaagctcatttctcgatactcagtttgtgagtcccgggaactatctaatagggcaacacaactggtgggtgcagaggccctgcaggcatcggcatagctgcagggtctgacggatgcaggcgcgtgcaattctctatgttggctacaacagaattatggttgaaaaagaggccgggcgcggtggctcacgcctgtaatcccagcactttgggaggctgcagcaggagaatggcatgaaccagggaggcggagcttgcagtgagccgagatcacgccactgcactccagcctgggcgatagagcgacactccatctcaaataaataaataaataaataaataaaagatttttgttgaccacagcagctggaatgtgaaggtggaaacgttgggatgcagcaggcatagaggggatcccaaatcctgagcatatgctgccctcgtcactagttgctcccacactacacatgaggcaggggaggtgcagactttaagccaactcacgctacaagcagggatttcagctgctatccaccacaggggaaagagtttcggctctgagctgagcaaaggtgattgcctaataaaatgaaccaaaaaaaagcaatactctttggaggaat

SEQ ID NO: 108774 - DNA, 306 bp, Homo sapiens
caataaaaaatcaattattagaaaaactaaataaatataagaaaatagcaaagtaaattaacaggtaagacatggagtgctaaaaatgattattaatattgtacatcagcatgagatttttgcaggcaagacagaaatatatgctaatacaactatttttattagatagaaaaggaccaatctagaaagaggtgttttcttaacgcactgttgggttcctaattcctgaatgattcgaaatttttgttagaaatttgaagacctagaagttgtatttacccaatctataagcaactcaaagctagg

SEQ ID NO: 108775 - DNA, 338 bp, Homo sapiens
tcagtgtggcgattcctcagggatgtagaactagaaataccatttgacccagccatcccattactgggtatgggtatacccaaaggactataaatcatgctgctataaagacacatgcacacatatgtttattgcggcccagtccttttttaagttgttctttaaattgtaaagagcaccttaccagcttcttgatatggcttctgctccaagaatctcctgttttatcagtagggataagtcatgcttttcacactatccgcactatgaagagtgccttccaaaagcatatgcttaaataatgttcagcaaataaaggagtcagtgaggctttcttg

SEQ ID NO: 108776 - DNA, 522 bp, Homo sapiens
gagacagagtctcgcatctcgctctgttgcccaggctggagtgcagtggtgcaacctccgcttcccaggctcaagcaattctcctgcctcagcctcccgagtagctgggattacaggcacacaccacggcaccgggctagtttttgtatttttagtagagacagggtttcacgatgttggccaggctggtctcgaactcctgacctcaagtgatcctctcacctcggcctcccaaagtgctgggattacaggcatgagccactgtgcccggccgattcttgctttttaagtgctgtctgctgggattcgaaagccagtggatggtgtataagagatgagttgattctcttatggcccatacaaaggtaggcacctttgaacctttcacatactgggcacctggttcttcgttattacttacaggtagatttctggtcttccttgaatagatatatcaaggccagggtcttcacatttcgggacccttgcagaattctgtggagttccatgtactcagtaaac

SEQ ID NO: 108777 - DNA, 351 bp, Homo sapiens
aagtcataattgatacttagttcttgaattctcagccttttagtgaagttctggggaagttagctcttcttttactgtgacttttaatatcttatacagatatgattaatttgcacagaattgaatttcagagcttcaagagattgttaaccagcaatttaaaaaacccttatgagattaattttttctgtatacacaattaacttaagcatagttgttctcatgaagcaaaacagagtagaaaatattattaaaatgtatgtgaagaaaaagtgttaccttgatgcaaaaacttaaatcagtgacctactctgttgtatattttcatgggctactatctgtatgcattat

SEQ ID NO: 108778 - DNA, 153 bp, Homo sapiens
agatatttgacattttaggagtagagcttaggaaaataatcagggttgaagatagttttgaccattgttcatctataaaggacagtgttgtctcataactatagctaattagttttacaaatataaaaatatttatgaaatgtttattcttgg

SEQ ID NO: 108779 - DNA, 791 bp, Homo sapiens
tgaggcgcgcgggcccagaaggtccaatgagtagggctgcatgggcagtgtaccgtaggtgaaactccaggaaactgtgaactaggtgactcgggaattcttcaaccaggttagaacctgcccgtgaggagtctggcgtcgacgattccgccagcgaactcgcagaaagagcatggttactgcatggtctatctggtaggtatctcactcaaatgaggcaagtccacacacgtggcttcatatggtcgaccttcagccaggaggtcaggatgatcagggagctgacgaactttccagttgactaggcttgactaaggataatttctgtggatcctcctgggcagaggttaggagctgctgctcacgtttctggagcatgtgcctccctcctccctaacactgatgctgtggaaagaggttcttcaaaactgaaaccagataaaccagggccctgagctggcagggaggagggatcaagcaggtgaccttcgatcacctcaagaaagaggtggttctttctgagttgcatgaatttatctaagtagagaaagaagcactgagagctgttcacattgatgttgtcttcttggggaggggctgcgggctaccgggcatctctgtagaaatggtaaaaatgcctacgtctagttcacagtgatgcgggtgcctctatgctaatgatagcagctttcttttctccctaattgcagaaaacacgacccagttttatagtttttcccttcagatgattgtgatgaacttcatagtccctgtcaagtcttaagatgacc

SEQ ID NO: 108780 - DNA, 412 bp, Homo sapiens
gctggtaatgtctcattttagtagaagaggagtcgaggttcctagagctcaggtggcttgcccaaagcagtgcttgcagcttatttcagcattccaagctacagagttccccataggttctgtcagcatcacacattcatagcttcagctgcctagcagttagggctgactttctcctgatagttgtgaccagcaacgagagttcatctctactcttttaaaggttattctgttttagttactgctccagatccctggctccctccggatggaatgtttgtggtctagtaagcagtactgggctcactctcatatctttgtacttccctccctccctcaacctgcacacactaaacaattttcttacactgaaatgcaattagcagtcctggcagtttatgcaaaggttggg

SEQ ID NO: 108781 - DNA, 180 bp, Homo sapiens
tattgagatcctatcaaacacaagatatacctggggccacaaacaatacaaagacaaataaaacagttcttttctcttaaagagaatatagtctcctgggggaatttagatgtgctttgctttccttcttactaatttacctttacttgattatttaattgactcaagtatgtgggtttg

SEQ ID NO: 108782 - DNA, 1251 bp, Homo sapiens
agggagtatgaatttaatatgggaattcttaaactcctttatgactggaagatgagcatcagagtgtctgcgaccatttgatgatattatgtaccaagttttagatgtttggcttttttcaggttatgaaagcgggggatgagttaagaaccactgctgtgaaggattcatcaactatttttaggcagttgggtaaaaatgaccaatttagttttaagaaactgactgtggctccagagtatgttggagaagtgaaaatggagactaggaataacaggtgggagactattagtctaattaagatgtaattataaatctaagctaggaacgtaaaatgagaatgcaaagtaagaaacaaatatggggaaaattatatgtaaaagtaataggacttggcatcttactgatgtgattgattatgagaaaaatgaagcatgtggaggagtccactggacagtaggaaattcagcctaagacttgggtaagagttctgtggagttgtgaattcagaggccagagatgtgatatttaaaattttggttcaagatttcccaggtataagaaagcaagaggattaaagcattgtaattaaactttaagcagtgcatatttatgttatagataagataaacaagaaatctagggatcaaataggattaaaattagtagtgatcattcagtacagtagttacgtactgttattcacaagagtatataaatcaaattacaaggaattaaggatataaacgtgataagaaagtatgcactgtactctttgaggaagtttgccatagaaaggaagaagaaataggatggtagatcagaagtaaagcaggacccagtggggggagtgtttgcagtgaggcagtatgtataatcatttaaaacatgggtttggagtcctctcaggttccatgtttgtaatggacataatgataataatccctttcatttaaggctgttgtgaggattaaatgtgttaatgtgcaaataactttacacagtgcctggtatataataaatgcttgctacctattaactagtatttgtttctaaggctaatttaagtcctagaattgattgcaaggattagatcaggagtatagtggacatgttgggatttaaatatttaaatatagagatgctttttaggaccattgttagaaccagaagagattttttaccaagttcacacagaaatgtaggtgcattggctgggcatggtggctcacacctgcaatcccagcactt

SEQ ID NO: 108783 - DNA, 381 bp, Homo sapiens
tgagatggagtcttgctctgttgcccaggctggagtgcagtggcaggatctcggctcactgcaacctccgcctcccgggttcaagcgattctcctgcctcagcctcccaagtagttgggactacaggcacataccaccacgcccggctaattttttgcatttttagtagagatggtgtttcaccatgttagccaggatggtcttgatctcctgacctcaggatccacccacctccgcctcccaaagtgctgggattacaagtgttggtcacctctctctacacagtgggatgggtacagctgaaaggatatgatgtctgggattcatttccaaacagtgcagaagctgaggacgtgggtgggaatatcaaaagaacaagat

SEQ ID NO: 108784 - DNA, 353 bp, Homo sapiens
  misc_feature (53)..(53): n is a, c, g, or t
  misc_feature (58)..(58): n is a, c, g, or t
atatatttgggcccctggtcttataagccaagttaaattttgcctaaaataanggccntgccgtcaagcagatcatggtttatttttattttattttattttattttatttttttgagatggagtctcactctgcattccagcctgggtgataagcaagactccatctcagaaaaaaaaaaaaaaaaaagtgttatgtgtcgctgttgttactctttgctcaatattttttttgagcataccactttgtttattcattcttaaattgacagactttaagccagtttctagtttgagataattaaaaatcgagctgcattccagcctgggtgataagcaagactccatctcaga

SEQ ID NO: 108785 - DNA, 719 bp, Homo sapiens
ggatcacttgagcctgggaatagaaaaagagagagagagggagaagcgggggagagagagagagagagaaagagaagtattcttcatgagtctcttgattcttttactggggagacagatgcatttaggtgattttcttcagctcatcctacaggaccagcaggtccctgtttctgaggaccacacacccttgaagaaagctttgcccctttcgtctctgaagatggtcctccagcaatcgagggtgtctgtgtacttgagttcagcctctttgtgcctggactgcatctgcatcccatccacctaggcaggcagatcatctgaggccaggagttcgaaaccagcctcgtcaacatggtgaaaccctgtctctactaaaaatacaaaaatcagccgggaatggccacacatgcctataatcccagctactcaggaggttaaggcaggagaatcacttgaaccccggatggaggttgcagtgagctgagatagcaccactgcattccagcctgggtgataagcaagactccatctcagaaaaaaaaaaaaaaaaaagtgttatgtgtcgctgttgttactctttgctcaatattttttttgagcataccactttgtttattcattcttaaattgacagactttaagccagtttctagtttgagataattaaaaatcgagctgcattccagcctgggtgataagcaagactccatctcaga

SEQ ID NO: 108786 - DNA, 477 bp, Homo sapiens
gtgttaatgtactttacagagttgtagtcaaaagatgattggatgtgtaggattcaaattgctgccttgcctctaattagctctgtgaccctgggcaaaactgtccacttgcattaatgtggaggcacagggacctgaaggtgaagagcaaatcagtgttttctgttttcttatacttatttgttctctcaaaacagttctacttagatttccttagatttaaaaatggggagatatgtgacaagccggaccaggtggcattctgggatttactgagcaatgtgacattgcctatgtcctgacctcaggcatctttgattccacagtgaactgccatttaaccacctgtaaaataaacctaatgtctaattttggaaaattaaagagtaccaccatctttaggatctccttaatctgcctaatccctttatcctctatccatgaaggcagaagccagatctgttgtgttctccctat

SEQ ID NO: 108787 - DNA, 207 bp, Homo sapiens
ccaagatcgagagaccaactggatggaaatagtagcaatagtgacggggttgtgtcgcggccctttgtgcaggattttggtcttcactcataatttgaagtagtaatcgattgccccagaagtgaagcaatgagtctctggtttatttgcccgctttccctttttcctttagcatctgttaatcattttggaaggatgatttgagtt

SEQ ID NO: 108788 - DNA, 677 bp, Homo sapiens
gtttatttggacatcaggtgacctcacaaaacaaaacaaacatttcttgctattgtttctactaaaagaaatgcttaaaagagactgcctgataacatttgggatatcctttttttccactgcagatctcggctgttgtgcttgagcttatttggggcatggatatctatgtgcctataggaagcggagaagtgagcctgagcagtgccacgatttatggggaggcagtaatgagcttctcctgaatgctaattactggagaattgttcagggagacggcaagaactgttggtttgtggtaaattagtcaccagctctattgaggtggactgaaagtttagatcggagctataaaggcaccaaaatcctgatgattgacggccagacttggtgacagtaccaatatggaaataccccaattgtgctaaacagtggtagataactttgtataaatctaatgaaatgagtacaatctatataaaagttaaaacttccaaccacattaggattaaaagggcggtgagactggattgttaaatgaattatgagagctgttttggttcttagatccgaaaagctgcccaagctgccaatggtatgaaagaatagtctgctctggaaagagctcttcctggagtctgctggccttcatttgcctggggatcaagctttctggc

SEQ ID NO: 108789 - DNA, 514 bp, Homo sapiens
acaagcaacattttgcaaaacatcaggctctgcatgaaaattcagattcccacactgagagtccattgagagatctcccactcattagcatgctacaaggccgctgaaagatcaggaagatgtcaaaagggcaaaccttcacataaacagaactcagagaaacaaactgaacttaacttggcatcagccaactgtaagtatgaaaaaaaaatgtgtttattgggatgagaagaaggaaaattcactaatttgtctacatgcaactaagtgatatttttccttggtaaaattaattgcaaaggcagccagatgcagtggctcctgcctgcaatcccagcactttgggaggccaaggtggacagatgacttgagctcaggagttcgagaccagtctgagcaacatggcagaactccatctctacaaaaaaatacaaaaatcagccagaggtggtggtacacatctgtggtcccagctacttgggagtctgagccagaaggtttgcttgagccccag

SEQ ID NO: 108790 - DNA, 303 bp, Homo sapiens
tgttgttggaggagtgggggtgatgccggccctgggaggaacctggccaagtgagctgtccttggtgtgtctgcagccccagctttgcgccatggcccggcacatccccagccctctaagtcagcgtttttaaatgagttgacttaggttgattttcatcttccaccaccatttatctccggaatttacatttcttagtgttttgtcagattccctttcttatagcaacagtctccctacaaaggaaaaaatccataatgacaaatttccatttgtaaccttgggacattctaaaatctatat

SEQ ID NO: 108791 - DNA, 372 bp, Homo sapiens
cagggtgtcacaactggaggtacactgtctgtctttcaatggcgatattattttgatcaatccatgaagattttgtcttattaccatatggttactgtttttttccctttgtatttaagcaatcttgggatacactttaagaccataaaaatatcctactgactgaagtctctccccttagatcaaatatccattgacggtgcttgcctggactaatgtttactgtgatggttgcaaaatttgtatttttttattctagttcattttccacattgatcagtcagcacttgacatcctactctaagcaagactcatacttttttgatgggagtgtaaattcttaacgacttcagaaaagagcaatgtggtgat

SEQ ID NO: 108792 - DNA, 288 bp, Homo sapiens
cattgacctctcttgctactatctccttattcctcagtttcatttgtaaaagttctgagtttcaatcccaatttgagcctggattgcaatgaactaggacttctatgggtgtcactgttctttccagatagctagctttgcatgaactaaatgtcaaatttcgaatggctggatctctactctaaaggctccaaataaacatcaaaacatatgcaatatcaaagcactgaaaacccgcaatagccaactttaaaaaataggtacatctcaacccttagaatttctatc

SEQ ID NO: 108793 - DNA, 302 bp, Homo sapiens
cgacagatttttttctacctaaagcttgagtatgaatagccttttttgataggtgatgaagtgggaggagagggggtaggtatcatgtattaaaggtgccgtatgtcctgtggaagtgtagttactgttgcccccatttaacagacaaggatgctgaggctcccagagcttatgtcagttgtccaaagttaccgtgctggtctgaggtggagctggaacttgatctgcttccaactggacacgtgactgcatccatccaggctttagctgcaagctggatcctgtttctcttggaaagtgct

SEQ ID NO: 108794 - DNA, 461 bp, Homo sapiens
gcattaagaacacgaactaaggaagagtcagatgtcagttcattgaatcacatttaaaataaagcttcaagaattgaggaggggaaaaccgatgtaattttcacattgaggaggcctaaaatgcagaatgtaatgtctgtcttatttttcatatggattatgaaaaaacaaatttttaattttcaaaagttagggacaaatgaaaagaaccctatcattcactcagaagatatgatatttactgtaattctagtgacatagctgtgaaatgctatgctaagtcctcacggggccagtgctggctgcacacttctggcccctgcaaattcaggagaagaaggcagtaagtttggaatcagatggaggagaattggcagacaggttatttgttgtgctttctgctctgtggctgaggttgcagcaaagtaaaaagttgacttttttttctcttttctttcttt

SEQ ID NO: 108795 - DNA, 132 bp, Homo sapiens
ttcttggtttgtctggatttttttttgttttttaagggttccctaccccccattttaagggagagtcttttcctttaacacaatgtaaagaaatctcttttttttttttcatcttccattttctttattttc

SEQ ID NO: 108796 - DNA, 179 bp, Homo sapiens
cgccactcctgcatgacagagtgagactctgtctcaaaaaaagaaaaaagggcaggcctcacgaaggaggtgttgtttgagcaaagcatgaatgtatatgtgagcgagggagtgtgtgtgtgtgcacacgtgcgtgtgtctctctctttctctctgtggccacttatctatgtaagggt

SEQ ID NO: 108797 - DNA, 793 bp, Homo sapiens
atgtggtggtggtctgagcacatagcagagctgccagcgcctgcgggagtcttatgttggtgagggtgtcagcaggggctccgtcaagcccccttccttggctgtagggtttccctggcctaactggtgtttgtatctaacaagagtgctccctccccaacccccaggcccttcttgcttttccacccttctcttactctgctcttgggaactgagtccgttcctcttatgggtaacttgaagggtcaggactgctccccctacaggctctaactgggatagtcactaggtatgtttgactcacgtagatatcaactagttgctgatatttccaaatagtagtatgtcacgtaaaaactagatttctggattctttagaaaatctaatgtgacaatgcaagacctgcatttcctcagaatgctaactggctccagtttgatgtagcaaaggggttagtatagtcatgtagttactcctccctgatatcttaaaccaggccagatttgcacataaatcccaggcctggccctgtggttgtgtgagtttgccaaccctgacccactgggtggtgtggaacttcactggccttcagccagctcaagagctggcactagtggctctgtgaatattccctttgattgatttttgtatttagaacatgtcccaagaaggagacaaattgttgtcagataatttagtatttgctcagtaaagtttctggaatatatatatattccacttctgatgtgagtgagaatgtgtacaacttagtgctattattcgtttaataca

SEQ ID NO: 108798 - DNA, 460 bp, Homo sapiens
ccatgctatactccctttcccgcatttcatcattggtgctgatatgctcagtaaactttcccccacttagtttcaaatttcttctgctttcaatgatgcttctctattcccacttaatttagttaggtgactatctatttcaaaaggtcgcttccagaatatattaaattgtgccagcacaaaggaaatcctgcacctattcctcctctcctttctattctcttttggtttaaatttaataaaaattgtgtttttctgggagaaatataattatatttgcaaatgtaactgagtgtgattgtcttctcttatcaaaagggtacaactctgatgagcaaaaaacagaagagacaaacaggggaaagatgactatcatagaactacagatctggaagcaataatacagatgagagatcagatgagggatgacttatagtattttcctagctcccaattcagt

SEQ ID NO: 108799 - DNA, 288 bp, Homo sapiens
caacatctctggccctgcccccacgatctgggtcataggtgcctggctgcctccattctcccagccttgaaccctcagctcacagggctgtgctccagctgcccttccaacaggctgacaaccttcaggccagacggagaagagctgggcttctccataccacagcaggcaggtgactcactgagagcccagacgagactgtataatccacagtctattggcctctcatcttcaggctcactgtctgtggtcacgagatggtcgcaatcgctttcaggttctcatgca

SEQ ID NO: 108800 - DNA, 514 bp, Homo sapiens
acattattcacttaaaacagcaaactagaaattatataatgggaactagaagaagatgctctcccataaggcagcaggaaagaatagagataagaaaatataaaagaaaactaagatatacgaaatgtagaaataagacttggtaacattcagataataggtgttttgaaaggaaagggagcaaaatgaaggaggagaaatagttaaagaaataataacaaaaaataaagagggaagatttcattttgaaaagacccagagtgacaaatagaagccagaaagaaaacctattcctggactcttaaaatagaatttatagataccaaaaaaaagatgaagaatattttaaagattccagagtcagcgcagacgaccttaaaaggaacaagattctgtagtcccagctactcgggaggctgaggcaggagaatagcttgaacccgggaggtggagcttgcagtgagctgagattgcaccattgcactccagcctgggcagcagagcgagactccgt

SEQ ID NO: 108801 - DNA, 422 bp, Homo sapiens
cttttatttgcagtactgaaatagcatcagaggaaaataagcattgttttggcaatacgtgagaaatatttacactaccctgtaccatctgatattttaggacatctatatagatcaaaataaatcagattgaaaggatttaatatcatataatgataacagtaattactaactaagaaactatcctgtataattcaaggtctccagttttattttttaatacttttggacatgggatagctgcagaattacctccattttccacttcggttttaggagttagttgtgaaccccaccctcacgcaggtacacacataaaaccacccaaataaaccagtttcattaatggtaccatattcaaataaccaaaacggatactggaatgcaatcttcaaagataataaaccacaatgtaaatctgg

SEQ ID NO: 108802 - DNA, 470 bp, Homo sapiens
gtgttaatagcaaaaagaaaaaattggcaacaactgtagtgtatgctaataaggaaatagttaaaatatgtgcattctacgatggaataatggctactaaagagtaaacaccagacatttcaagtaactcaatccaagggaaaataatataacaatacaggccgtatgatgccatttgttatgtacgtaagacgtccatgcacataaaaattatgtaaggacttatagcaaactgctaatgttaacctgggatacagcagaatttgaaaaagcagagaaatccaagaaagtttcactttaattctgtactgtttgagctttctttgtagtgaggatggatttacattatcctgtacaatatttttgaaaagcatgtcacagagctgtaggatcacatgtgagtccaacttgtgagcctcttctcgccttgagggactaagcgctaggacaacagttcactaagtgtggtc

SEQ ID NO: 108803 - DNA, 529 bp, Homo sapiens
agtgagaggcgcaaggagggtgagaagggaaggaacggcagtcaggaaaggggatttcttgagatggctgcaggtgggcagccggagagtcccccgaggagtgtggagaacatgcctcgcagtcgcctcggaaggatggggcattcatccaccaacatccaccccccataggctgatggttgtcccctcaaggtgctggctgtctccaccctgcttccacactatccagcagggctggtccccttctctggctctggagaaggtcctgaaggcagcacagggcagacctcatggttatggaggtgggagtgagtaggcgatgtgcacacactggccctccacagcatgagggcgagaggtgagccgagggcaggggacgtggggtcatgatgtctcctaaaggaacttctcttattgcccagggcgggaggtttcacagcagccgtttcctgggtgtcctgctctcccagagtgctctgcagtattatccttttacctcaggccactgtgtagcaccatgtaaagggtc

SEQ ID NO: 108804 - DNA, 183 bp, Homo sapiens
gtcactgggtctagaaagttaaagggcatcacagctcccatgatgcatgaagacgtagcttcaagcttccttgattctacaaaaggaatgcggaaactccgtatacactagcggcatccatcagagaatcaggcctctgatgagattatttacattaaaaaaaaagtccctcactccccccaa

SEQ ID NO: 108805 - DNA, 657 bp, Homo sapiens
gtcttagtgtttgggatttctcctgagtcatcttaggagaacactaacttatctgttagtgaacaagtaataactaaagcatttttatgtgatgggtaactaaagttttgagactttaaaaaaacccctactttaatggttttcatttattttggtaatcattttctaccttatattgtttattatttatgtgtttcatgtgcagtctttgcttagcaatggggatgtattctgagaaatacataatttggcgatttcatcattgtttgaacatcatagaatgtacttacacaaacctagatagtatagcctactacacacctaggctatatgttatagcctattgctcttagactacaaacctgtataaatgttactgtactgagtgctgtaggcagttgcaacacagtggtatttgtgtatctgaagattctaaatatagataagatacagtaaaaatatgatgttataatcttatgagaccaccatcatatatgtggtccatcattgaccaatatgtcattatgtggtacatgactgtatatgaatattattcaactagattgcatacttcttaagtataaagaccctcttttacacaattttttgccatatagcatagtattattcatgtagttgatggtcagtacatcataa

SEQ ID NO: 108806 - DNA, 301 bp, Homo sapiens
tttatttccaaggtaagtaggggtagactagaatggacatagcagctcctgtcttatttgctttaaggctgcaatttctgttcattctcttacccatgcactttgaaatttcattgctctgcaaagtttccactgaaacatcaggtcgagaagacaaaatgtagagaatagcaaaccaaaaatatactcttcagagagcccagtgatggaaattatattctacgtaaggccattaaccagctacaaagcagtagcagctaactaacctggggataaaagaccatctgctggctgcatactg

SEQ ID NO: 108807 - DNA, 890 bp, Homo sapiens
ccgtatgtgtttgaatggagacagggctgtcttgcatagccattcaggttgaacactgcagaactcctgcggatactatttaaatatatcctttgtagtctcaaaaattactaatgtttaccatattagaaattgaaataatgatattttaaaactattgtcaaaaataaaaataataaatatatgttaacataaatcacattttttttctgaaaaataactattttccaaagcaacagaaatttagtgagaaagaatggcttgattttacacttttgcatatttctttaatgtcaagcttagtagaaaaaaattggattctcatgtttctgaatccaatctgttgtgatacattcttttggttgaaatgtatgaagaatacccagcctcacccagtacttcaataatcttttccaataattgtgattattctcctttgatactgcaccaaaagtggaagttttcttgcttgttgcactgtggaatctagctccgtatcactgactttttttgctttgttacatcaaaatctgtttgtctgttttatattttgaatggatcttttatccatgcctaattttgtaatatcatgcattggtcatttggaacttattggccccttaagtgccctggatcttccaaatgttgaaatatttcattatataatatcaagcactcacagtaaatattagcattaatctaatcagtggtgggtaggagtttttgcttgattttattactggaaacgaatactgtcagttgttttccttgatatgacaggctcactttgttaatttttcaaaaagaaaaagtctactgaaactctagtctagatattcatagtttgacagtcattctttaaaataaaaatgatcctgttctatgaaaaa

SEQ ID NO: 108808 - DNA, 670 bp, Homo sapiens
ggtgagggccattctttctgagatggttccccttactgctttcctctgtcctgatgtgggaatagggggaagggggtgctatgatccttttatgcctgatatgtgcctggtaaagaattctagaactggccaggcacagtggctcatgcctataaccccagcactttgggagttcagggtgggaggatcacttaaagccaggaagttcaagagtagcctgggcaacacagtgagacgccatctctacagaaaatacaaaaaattagctgggtatggtggtgcatgcctatagtctcagctactcaggaggcagaggtgagagaagtgcttgagcccaggacttcagggctacagtgaactatgattatgtcattgcactccagcctaggggacagagtgagaccccgtctcaaaaaacaaagaaaaagatcatggaaacatggatttaatctaaaaaaaataaagattctagaactgggaaggactcagggaatcacccagttcaggcccttcccctcgtccccacatggctggatctacctgatctccttttgggacagataaaccctgtcctttctccgagtcatggagaaaatcagttcatcagcctgtcaccagaatcccagcagctggaactaaatgggatcaggaagctaaggttttcttccca

SEQ ID NO: 108809 - DNA, 700 bp, Homo sapiens
agacaaaaacatttgatctgttaatcatcagtagctgtggtcatctctctttcttaaactcttgggcaatgggtggaaatcagagaccaacttcaaatttaatgtgtaaaaaacaaatagttcagctgcttctattggtaagaaaattcaacttcctaccagccttagaaaggtctctttaaacaatttctttccccctagggttacctagctggtccatacaggttttatcacctcactgcaaggaggaagttgaatattctgttccccacggggatctggcttaatccctagttgctcatatagttggtatcagcatagcaatattttgcataatgctttatttttctcaaatgactattgcatagatgatcttgatatttgcaacagcctagtggatttggtagggtcctgaatcatctctataaggcaaacaaggaaattgtaacacaaagaaataaacatattgaatataattgctattctgtaagacatacagtctgtgtaagatgtatcttatttacagagacatttttgaaaattaaaatattaaatactttttgttatatagagacaatgatctggaagtataaaaagaaaaatattatcttgttgatgtaaatatgatatccttatatatattagaatccaataagatatcatgggcgcaatattagcaaaaaaaagtcagtcttaccct

SEQ ID NO: 108810 - DNA, 776 bp, Homo sapiens
gctatgaggccggggtgaatcggacgaggggcatctaagtcagctaaggcaataaccttatgcatgaacatttcccagactttcatgaagctgttgaggtcctaggcaattaatgcagcagttgcgataaataaaaacatctcacctaagtctccttttcttcataacatagatactgacatgataggaagctctcagcttagggaaagagaataaattttagattatagaacatggattcaaaagtgactggaacaaattggctgacaccttactggtaacctgctattcttctggtgttatccttcaggattgttccactaaaatttatttttcaaaaaatttacttcacattattctatgtaagtgatgacttgtcagtgttccaggtgtatcttagctaaaactagagaatgccctaacttagatggtttttgaagcctatacaattggtattgtttgacccttaagcttttacatctcttagcatggaggacgaagaaagctgtacattgttgcttgagagtctgtacatttagtccagatttgtatttgcactgtcagtatggcaaatgagtgaaaaatgtttaatacactattggattttttatttcctttttttgattcagcttatacccgggctgaaaacctcaatttatgttcatgacagtggggatttttttaaatgtctacattctttctaataaactgttggaagacaaaaaaaaaaaaaaaggcgacgcggtcgcgaatttatgaggagtagtcggcccggg

SEQ ID NO: 108811 - DNA, 215 bp, Homo sapiens
gtacccctagtttgagaagtttcaatagcagatgatgattcacaagacagtgatgatgaaaaaatgccagatctggagtaaggaatattgtcatcacctggattttgagaaagaaaaataacttctctgcaagatttcataattgagagaattcctgagttgatagctctaattctgatgacaaacgccaatttgggttctgtgctattgaaact

SEQ ID NO: 108812 - DNA, 685 bp, Homo sapiens
gctgcactccaacctgggcaacagagcaagactccatctcaaaataaaaaaggcttggcatggtggttcacgcctgtaatcccagcactttgggaggccaaggtgggtggatcactacagcccaggaattcgagaccagcctgggcaacatggtgaaaccccgtgtgtaccaaaatacaaaaaattagttgggtgtggtggtacgcgcctgtaatcccagctaccctggaggccgaggcatgagaattgcgtgaacccagaggcggaggttgcagtgagctgagatcacgccaccatactccagcttggacgacaaagctagactctgtctcaaaaaaaaaagaataccttaatacatgttccacctaacttaagatagatagctgtgcaactacaaatgaatcccattcttttccttaaccaccagaggtaaccactactcaagtagaatttttaatgtttgtcaaacctgttgcatgaatagctttgcttttctttagggaaaatttagttttaatttccatatgggtttttaggattttgtataattacctataatcttccttttccagaagggaaagatgcttatatttgcattttgcattttttgatatctgtggcagacttaaggtttattctgaagcatacagcattaataattagggcctaacttaacatcattttt

SEQ ID NO: 108813 - DNA, 1850 bp, Homo sapiens
ataagggaatcgcgaccacggcgtcgtccccgaccggaggagccgctctttccgcgcggtgcattctggggcccgaggtcgagcccgccgctgccgccgtcgcctgagggaagcgagaagaggccgcgaccggagagaaaaagcggagtcgccaccggagagaagtcgactccctagcagcagccgccgccagagaggcccgcccaccagttcgcccgtccccctgccccgttcacaatgcagcctgcttctgcaaagtggtacgatcgaagggactatgtcttcattgaattttgtgttgaagacagtaaggatgttaatgtaaattttgaaaaatccaaacttacattcagttgtctcggaggaagtgataattttaagcatttaaatgaaattgatctttttcactgtattgatccaaatgattccaagcataaaagaacggacagatcaattttatgttgtttacgaaaaggagaatctggccagtcatggccaaggttaacaaaagaaagggcaaagcttaattggcttagtgtcgacttcaataattggaaagactgggaagatgattcagatgaagacatgtctaattttgatcgtttctctgagatgatgaacaacatgggtggtgatgaggatgtagatttaccagaagtagatggagcagatgatgattcacaagacagtgatgatgaaaaaatgccagatctggagtaaggaatattgtcatcacctggattttgagaaagaaaaataacttctctgcaagatttcataattgagagaattcctgagttgatagctctaaaggcagatatgctgtatttgcctactttaacccatttttcaacctgtttgttttttaaaaggcttcactaagggttgatatgtaccattgtatggggcaattttaagtcagctaaggcaataaccttatgcatgaacatttcccagactttcatgaagctgttgaggtcctaggcaattaatgcagcagttgcgataaataaaaacatctcacctaagtctccttttcttcataacatagatactgacatgataggaagctctcagcttagggaaagagaataaattttagattatagaacatggattcaaaagtgactggaacaaattggctgacaccttactggtaacctgctattcttctggtgttatccttcaggattgttccactaaaatttatttttcaaaaaatttacttcacattattctatgtaagtgatgacttgtcagtgttccaggtgtatcttagctaaaactagagaatgccctaacttagatggtttttgaagcctatacaattggtattgtttgacccttaagcttttacatctcttagcatggaggacgaagaaagctgtacattgttgcttgagagtctgtacatttagtccagatttgtatttgcactgtcagtatggcaaatgagtgaaaaatgtttaatacactattggattttttatttcctttttttgattcagcttatacccgggctgaaaacctcaatttatgttcatgacagtggggatttttttaaatgtctacattctttctaataaactgttggaagacttcttggctgtccttttaagtgtctggcttactgtaatttttatgtatttaccatttactggaatggagtttatttgaggaagaatttgggattattcctctgtttgaaaaaagaggcttgctgtaatgtcacaggaaaccttttaaaagtggatctgtaatagcatattgtagatgcactttgcagcagttggaaaagaaagtgttgtgtgatttgattgaaataaaactaaatgtgttgtcctcctaaa

SEQ ID NO: 108814 - DNA, 1887 bp, Homo sapiens
tcaacaaagtgagttatcatttgaaccaagtgccagaaccttgtggcattatgaactgtcataaaatgtggttaaaagtcttagtagtctgcgcggtgcattctggggcccgaggtcgagcccgccgctgccgccgtcgcctgagggaagcgagaagaggccgcgaccggagagaaaaagcggagtcgccaccggagagaagtcgactccctagcagcagccgccgccagagaggcccgcccaccagttcgcccgtccccctgccccgttcacaatgcagcctgcttctgcaaagtggtacgatcgaagggactatgtcttcattgaattttgtgttgaagacagtaaggatgttaatgtaaattttgaaaaatccaaacttacattcagttgtctcggaggaagtgataattttaagcatttaaatgaaattgatctttttcactgtattgatccaaatgattccaagcataaaagaacggacagatcaattttatgttgtttacgaaaaggagaatctggccagtcatggccaaggttaacaaaagaaagggcaaagcttaattggcttagtgtcgacttcaataattggaaagactgggaagatgattcagatgaagacatgtctaattttgatcgtttctctgagatgatgaacaacatgggtggtgatgaggatgtagatttaccagaagtagatggagcagatgatgattcacaagacagtgatgatgaaaaaatgccagatctggagtaaggaatattgtcatcacctggattttgagaaagaaaaataacttctctgcaagatttcataattgagagaattcctgagttgatagctctaaaggcagatatgctgtatttgcctactttaacccatttttcaacctgtttgttttttaaaaggcttcactaagggttgatatgtaccattgtatggggcaattttaagtcagctaaggcaataaccttatgcatgaacatttcccagactttcatgaagctgttgaggtcctaggcaattaatgcagcagttgcgataaataaaaacatctcacctaagtctccttttcttcataacatagatactgacatgataggaagctctcagcttagggaaagagaataaattttagattatagaacatggattcaaaagtgactggaacaaattggctgacaccttactggtaacctgctattcttctggtgttatccttcaggattgttccactaaaatttatttttcaaaaaatttacttcacattattctatgtaagtgatgacttgtcagtgttccaggtgtatcttagctaaaactagagaatgccctaacttagatggtttttgaagcctatacaattggtattgtttgacccttaagcttttacatctcttagcatggaggacgaagaaagctgtacattgttgcttgagagtctgtacatttagtccagatttgtatttgcactgtcagtatggcaaatgagtgaaaaatgtttaatacactattggattttttatttcctttttttgattcagcttatacccgggctgaaaacctcaatttatgttcatgacagtggggatttttttaaatgtctacattctttctaataaactgttggaagacttcttggctgtccttttaagtgtctggcttactgtaatttttatgtatttaccatttactggaatggagtttatttgaggaagaatttgggattattcctctgtttgaaaaaagaggcttgctgtaatgtcacaggaaaccttttaaaagtggatctgtaatagcatattgtagatgcactttgcagcagttggaaaagaaagtgttgtgtgatttgattgaaataaaactaaatgtgttgtcctcctaaa

SEQ ID NO: 108815 - DNA, 2105 bp, Homo sapiens
ataagggaatcgcgaccacggcgtcgtccccgaccggaggagccgctctttccgcgcggtgcattctggggcccgaggtcgagcccgccgctgccgccgtcgcctgagggaagcgagaagaggccgcgaccggagagaaaaagcggagtcgccaccggagagaagtcgactccctagcagcagccgccgccagagaggcccgcccaccagttcgcccgtccccctgccccgttcacaatgcagcctgcttctgcaaagtggtacgatcgaagggactatgtcttcattgaattttgtgttgaagacagtaaggatgttaatgtaaattttgaaaaatccaaacttacattcagttgtctcggaggaagtgataattttaagcatttaaatgaaattgatctttttcactgtattgatccaaatgattccaagcataaaagaacggacagatcaattttatgttgtttacgaaaaggagaatctggccagtcatggccaaggttaacaaaagaaagggcaaagcttaattggcttagtgtcgacttcaataattggaaagactgggaagatgattcagatgaagacatgtctaattttgatcgtttctctgagatgatgaacaacatgggtggtgatgaggatgtagatttaccagaagtagatggagcagatgatgattcacaagacagtgatgatgaaaaaatgccagatctggagtaaggaatattgtcatcacctggattttgagaaagaaaaataacttctctgcaagatttcataattgagagaattcctgagttgatagctctaaaggcagatatgctgtatttgcctactttaacccatttttcaacctgtttgttttttaaaaggcttcactaagggttgatatgtaccattgtatggggcaattttaagtcagctaaggcaataaccttatgcatgaacatttcccagactttcatgaagctgttgaggtcctaggcaattaatgcagcagttgcgataaataaaaacatctcacctaagtctccttttcttcataacatagatactgacatgataggaagctctcagcttagggaaagagaataaattttagattatagaacatggattcaaaagtgactggaacaaattggctgacaccttactggtaacctgctattcttctggtgttatccttcaggattgttccactaaaatttatttttcaaaaaatttacttcacattattctatgtaagtgatgacttgtcagtgttccaggtgtatcttagctaaaactagagaatgccctaacttagatggtttttgaagcctatacaattggtattgtttgacccttaagcttttacatctcttagcatggaggacgaagaaagctgtacattgttgcttgagagtctgtacatttagtccagatttgtatttgcactgtcagtatggcaaatgagtgaaaaatgtttaatacactattggattttttatttcctttttttgattcagcttatacccgggctgaaaacctcaatttatgttcatgacagtggggatttttttaaatgtctacattctttctaataaactgttggaagacttcttggctgtccttttaagtgtctggcttactgtaatttttatgtatttaccatttactggaatggagtttatttgaggaagaatttgggattattcctctgtttgaaaaaagaggcttgctgtaatgtcacaggaaaccttttaaaagtggatctgtaatagcatattgtagatgcactttgcagcagttggaaaagaaagtgttgtgtgatttgattgaaataaaactaaatgtgttgtcctcctaaaaaaaaaaaaaaaaaaaaaaaaaaaattttgttgggggggttggccacatcagaaaaaggtttttaaaaccatccgttggggccggcgggccatagcgtacgttgaacatggcgtaaacagaggtcagaagaaacccggtcacgcatgggggtggagtctcaccaataaaaagggcggggcacccggcgtttgaaaactcggaagggtcggagcccaccggccacaacgggccaacggcaataataccgcccgtgg

SEQ ID NO: 108816 - DNA, 1817 bp, Homo sapiens
ataagggaatcgcgaccacggcgtcgtccccgaccggaggagccgctctttccgcgcggtgcattctggggcccgaggtcgagcccgccgctgccgccgtcgcctgagggaagcgagaagaggccgcgaccggagagaaaaagcggagtcgccaccggagagaagtcgactccctagcagcagccgccgccagagaggcccgcccaccagttcgcccgtccccctgccccgttcacaatgcagcctgcttctgcaaagtggtacgatcgaagggactatgtcttcattgaattttgtgttgaagacagtaaggatgttaatgtaaattttgaaaaatccaaacttacattcagttgtctcggaggaagtgataattttaagcatttaaatgaaattgatctttttcactgtattgatccaaatgattccaagcataaaagaacggacagatcaattttatgttgtttacgaaaaggagaatctggccagtcatggccaaggttaacaaaagaaagggcaaagcttaattggcttagtgtcgacttcaataattggaaagactgggaagatgattcagatgaagacatgtctaattttgatcgtttctctgagatgatgaacaacatgggtggtgatgaggatgtagatttaccagaagtagatggagcagatgatgattcacaagacagtgatgatgaaaaaatgccagatctggagtaaggaatattgtcatcacctggattttgagaaagaaaaataacttctctgcaagatttcataattgagagaattcctgagttgatagctctaaaggcagatatgctgtatttgcctactttaacccatttttcaacctgtttgttttttaaaaggcttcactaagggttgatatgtaccattgtatggggcaattttaagtcagctaaggcaataaccttatgcatgaacatttcccagactttcatgaagctgttgaggtcctaggcaattaatgcagcagttgcgataaataaaaacatctcacctaagtctccttttcttcataacatagatactgacatgataggaagctctcagcttagggaaagagaataaattttagattatagaacatggattcaaaagtgactggaacaaattggctgacaccttactggtaacctgctattcttctggtgttatccttcaggattgttccactaaaatttatttttcaaaaaatttacttcacattattctatgtaagtgatgacttgtcagtgttccaggtgtatcttagctaaaactagagaatgccctaacttagatggtttttgaagcctatacaattggtattgtttgacccttaagcttttacatctcttagcatggaggacgaagaaagctgtacattgttgcttgagagtctgtacatttagtccagatttgtatttgcactgtcagtatggcaaatgagtgaaaaatgtttaatacactattggattttttatttcctttttttgattcagcttatacccgggctgaaaacctcaatttatgttcatgacagtggggatttttttaaatgtctacattctttctaataaactgttggaagacttcttggctgtccttttaagtgtctggcttactgtaatttttatgtatttaccatttactggaatggagtttatttgaggaagaatttgggattattcctctgtttgaaaaaagaggcttgctgtaatgtcacaggaaaccttttaaaagtggatctgtaatagcatattgtagatgccggccagtgagtccgtaatcatagatacagatgtttcctg

SEQ ID NO: 108817 - DNA, 1897 bp, Homo sapiens
ggacgcgtgggtcgcggacgcgtgggtccccgaccggaggagccgctctttccgcgcggtgcattctggggcccgaggtcgagcccgccgctgccgccgtcgcctgagggaagcgagaagaggccgcgaccggagagaaaaagcggagtcgccaccggagagaagtcgactccctagcagcagccgccgccagagaggcccgcccaccagttcgcccgtccccctgccccgttcacaatactccattcagaagagagaagaggggagtgactttgtctttggaaaagcagcctgcttctgcaaagtggtacgatcgaagggactatgtcttcattgaattttgtgttgaagacagtaaggatgttaatgtaaattttgaaaaatccaaacttacattcagttgtctcggaggaagtgataattttaagcatttaaatgaaattgatctttttcactgtattgatccaaatgattccaagcataaaagaacggacagatcaattttatgttgtttacgaaaaggagaatctggccagtcatggccaaggttaacaaaagaaagggcaaagcttaattggcttagtgtcgacttcaataattggaaagactgggaagatgattcagatgaagacatgtctaattttgatcgtttctctgagatgatgaacaacatgggtggtgatgaggatgtagatttaccagaagtagatggagcagatgatgattcacaagacagtgatgatgaaaaaatgccagatctggagtaaggaatattgtcatcacctggattttgagaaagaaaaataacttctctgcaagatttcataattgagagaattcctgagttgatagctctaaaggcagatatgctgtatttgcctactttaacccatttttcaacctgtttgttttttaaaaggcttcactaagggttgatatgtaccattgtatggggcaattttaagtcagctaaggcaataaccttatgcatgaacatttcccagactttcatgaagctgttgaggtcctaggcaattaatgcagcagttgcgataaataaaaacatctcacctaagtctccttttcttcataacatagatactgacatgataggaagctctcagcttagggaaagagaataaattttagattatagaacatggattcaaaagtgactggaacaaattggctgacaccttactggtaacctgctattcttctggtgttatccttcaggattgttccactaaaatttatttttcaaaaaatttacttcacattattctatgtaagtgatgacttgtcagtgttccaggtgtatcttagctaaaactagagaatgccctaacttagatggtttttgaagcctatacaattggtattgtttgacccttaagcttttacatctcttagcatggaggacgaagaaagctgtacattgttgcttgagagtctgtacatttagtccagatttgtatttgcactgtcagtatggcaaatgagtgaaaaatgtttaatacactattggattttttatttcctttttttgattcagcttatacccgggctgaaaacctcaatttatgttcatgacagtggggatttttttaaatgtctacattctttctaataaactgttggaagacttcttggctgtccttttaagtgtctggcttactgtaatttttatgtatttaccatttactggaatggagtttatttgaggaagaatttgggattattcctctgtttgaaaaaagaggcttgctgtaatgtcacaggaaaccttttaaaagtggatctgtaatagcatattgtagatgcactttgcagcagttggaaaagaaagtgttgtgtgatttgattgaaataaaactaaatgtgttgtcctcctaaa

SEQ ID NO: 108818 - DNA, 1599 bp, Homo sapiens
ataagggaatcgcgaccacggcgtcgtccccgaccggaggagccgctctttccgcgcggtgcattctggggcccgaggtcgagcccgccgctgccgccgtcgcctgagggaagcgagaagaggccgcgaccggagagaaaaagcggagtcgccaccggagagaagtcgactccctagcagcagccgccgccagagaggcccgcccaccagttcgcccgtccccctgccccgttcacaatgcagcctgcttctgcaaagtggtacgatcgaagggactatgtcttcattgaattttgtgttgaagacagtaaggatgttaatgtaaattttgaaaaatccaaacttacattcagttgtctcggaggaagtgataattttaagcatttaaatgaaattgatctttttcactgtattgatccaaatgattccaagcataaaagaacggacagatcaattttatgttgtttacgaaaaggagaatctggccagtcatggccaaggttaacaaaagaaagggcaaagcttaattggcttagtgtcgacttcaataattggaaagactgggaagatgattcagatgaagacatgtctaattttgatcgtttctctgagatgatgaacaacatgggtggtgatgaggatgtagatttaccagaagtagatggagcagatgatgattcacaagacagtgatgatgaaaaaatgccagatctggagtaaggaatattgtcatcacctggattttgagaaagaaaaataacttctctgcaagatttcataattgagagaattcctgagttgatagctctaaaggcagatatgctgtatttgcctactttaacccatttttcaacctgtttgttttttaaaaggcttcactaagggttgatatgtaccattgtatggggcaattttaagtcagctaaggcaataaccttatgcatgaacatttcccagactttcatgaagctgttgaggtcctaggcaattaatgcagcagttgcgataaataaaaacatctcacctaagtctccttttcttcataacatagatactgacatgataggaagctctcagcttagggaaagagaataaattttagattatagaacatggattcaaaagtgactggaacaaattggctgacaccttactggtaacctgctattcttctggtgttatccttcaggattgttccactaaaatttatttttcaaaaaatttacttcacattattctatgtaagtgatgacttgtcagtgttccaggtgtatcttagctaaaactagagaatgccctaacttagatggtttttgaagcctatacaattggtattgtttgacccttaagcttttacatctcttagcatggaggacgaagaaagctgtacattgttgcttgagagtctgtacatttagtccagatttgtatttgcactgtcagtatggcaaatgagtgaaaaatgtttaatacactattggattttttatttcctttttttgattcagcttatacccgggctgaaaacctcaatttatgttcatgacagtggggatttttttaaatgtctacattctttctaataaactgttggaagac

SEQ ID NO: 108819 - DNA, 1818 bp, Homo sapiens
ataagggaatcgcgaccacggcgtcgtccccgaccggaggagccgctctttccgcgcggtgcattctggggcccgaggtcgagcccgccgctgccgccgtcgcctgagggaagcgagaagaggccgcgaccggagagaaaaagcggagtcgccaccggagagaagtcgactccctagcagcagccgccgccagagaggcccgcccaccagttcgcccgtccccctgccccgttcacaatgcagcctgcttctgcaaagtggtacgatcgaagggactatgtcttcattgaattttgtgttgaagacagtaaggatgttaatgtaaattttgaaaaatccaaacttacattcagttgtctcggaggaagtgataattttaagcatttaaatgaaattgatctttttcactgtattgatccaaatgattccaagcataaaagaacggacagatcaattttatgttgtttacgaaaaggagaatctggccagtcatggccaaggttaacaaaagaaagggcaaagcttaattggcttagtgtcgacttcaataattggaaagactgggaagatgattcagatgaagacatgtctaattttgatcgtttctctgagatgatgaacaacatgggtggtgatgaggatgtagatttaccagaagtagatggagcagatgatgattcacaagacagtgatgatgaaaaaatgccagatctggagtaaggaatattgtcatcacctggattttgagaaagaaaaataacttctctgcaagatttcataattgagagaattcctgagttgatagctctaaaggcagatatgctgtatttgcctactttaacccatttttcaacctgtttgttttttaaaaggcttcactaagggttgatatgtaccattgtatggggcaattttaagtcagctaaggcaataaccttatgcatgaacatttcccagactttcatgaagctgttgaggtcctaggcaattaatgcagcagttgcgataaataaaaacatctcacctaagtctccttttcttcataacatagatactgacatgataggaagctctcagcttagggaaagagaataaattttagattatagaacatggattcaaaagtgactggaacaaattggctgacaccttactggtaacctgctattcttctggtgttatccttcaggattgttccactaaaatttatttttcaaaaaatttacttcacattattctatgtaagtgatgacttgtcagtgttccaggtgtatcttagctaaaactagagaatgccctaacttagatggtttttgaagcctatacaattggtattgtttgacccttaagcttttacatctcttagcatggaggacgaagaaagctgtacattgttgcttgagagtctgtacatttagtccagatttgtatttgcactgtcagtatggcaaatgagtgaaaaatgtttaatacactattggattttttatttcctttttttgattcagcttatacccgggctgaaaacctcaatttatgttcatgacagtggggatttttttaaatgtctacattctttctaataaactgttggaagacaaaaaaaaaaaaaaaaaaaaaaaggggggggtaaagttcctgaggggcaagtatagctccccgtttggaagggccaaagggggatataagagagagggggtaaacgggggaaaggtcgggttttgaagaccttgggggtgattggacacaagaagggaaaatagatgtggctttttgttgtttattctgttatataggagtaaagagaagagaatataa

SEQ ID NO: 108820 - DNA, 1655 bp, Homo sapiens
ataagggaatcgcgaccacggcgtcgtccccgaccggaggagccgctctttccgcgcggtgcattctggggcccgaggtcgagcccgccgctgccgccgtcgcctgagggaagcgagaagaggccgcgaccggagagaaaaagcggagtcgccaccggagagaagtcgactccctagcagcagccgccgccagagaggcccgcccaccagttcgcccgtccccctgccccgttcacaatgcagcctgcttctgcaaagtggtacgatcgaagggactatgtcttcattgaattttgtgttgaagacagtaaggatgttaatgtaaattttgaaaaatccaaacttacattcagttgtctcggaggaagtgataattttaagcatttaaatgaaattgatctttttcactgtattgatccaaatgattccaagcataaaagaacggacagatcaattttatgttgtttacgaaaaggagaatctggccagtcatggccaaggttaacaaaagaaagggcaaagcttaattggcttagtgtcgacttcaataattggaaagactgggaagatgattcagatgaagacatgtctaattttgatcgtttctctgagatgatgaacaacatgggtggtgatgaggatgtagatttaccagaagtagatggagcagatgatgattcacaagacagtgatgatgaaaaaatgccagatctggagtaaggaatattgtcatcacctggattttgagaaagaaaaataacttctctgcaagatttcataattgagagaattcctgagttgatagctctaaaggcagatatgctgtatttgcctactttaacccatttttcaacctgtttgttttttaaaaggcttcactaagggttgatatgtaccattgtatggggcaattttaagtcagctaaggcaataaccttatgcatgaacatttcccagactttcatgaagctgttgaggtcctaggcaattaatgcagcagttgcgataaataaaaacatctcacctaagtctccttttcttcataacatagatactgacatgataggaagctctcagcttagggaaagagaataaattttagattatagaacatggattcaaaagtgactggaacaaattggctgacaccttactggtaacctgctattcttctggtgttatccttcaggattgttccactaaaatttatttttcaaaaaatttacttcacattattctatgtaagtgatgacttgtcagtgttccaggtgtatcttagctaaaactagagaatgccctaacttagatggtttttgaagcctatacaattggtattgtttgacccttaagcttttacatctcttagcatggaggacgaagaaagctgtacattgttgcttgagagtctgtacatttagtccagatttgtatttgcactgtcagtatggcaaatgagtgaaaaatgtttaatacactattggattttttatttcctttttttgattcagcttatacccgggctgaaaacctcaatttatgttcatgacagtggggatttttttaaatgtctacattctttctaataaactgttggaagacaaaaaaaaaaaaaaaggcgacgcggtcgcgaatttatgaggagtagtcggcccggg

SEQ ID NO: 108821 - DNA, 1629 bp, Homo sapiens
ataagggaatcgcgaccacggcgtcgtccccgaccggaggagccgctctttccgcgcggtgcattctggggcccgaggtcgagcccgccgctgccgccgtcgcctgagggaagcgagaagaggccgcgaccggagagaaaaagcggagtcgccaccggagagaagtcgactccctagcagcagccgccgccagagaggcccgcccaccagttcgcccgtccccctgccccgttcacaatgcagcctgcttctgcaaagtggtacgatcgaagggactatgtcttcattgaattttgtgttgaagacagtaaggatgttaatgtaaattttgaaaaatccaaacttacattcagttgtctcggaggaagtgataattttaagcatttaaatgaaattgatctttttcactgtattgatccaaatgattccaagcataaaagaacggacagatcaattttatgttgtttacgaaaaggagaatctggccagtcatggccaaggttaacaaaagaaagggcaaagcttaattggcttagtgtcgacttcaataattggaaagactgggaagatgattcagatgaagacatgtctaattttgatcgtttctctgagatgatgaacaacatgggtggtgatgaggatgtagatttaccagaagtagatggagcagatgatgattcacaagacagtgatgatgaaaaaatgccagatctggagtaaggaatattgtcatcacctggattttgagaaagaaaaataacttctctgcaagatttcataattgagagaattcctgagttgatagctctaaaggcagatatgctgtatttgcctactttaacccatttttcaacctgtttgttttttaaaaggcttcactaagggttgatatgtaccattgtatggggcaattttaagtcagctaaggcaataaccttatgcatgaacatttcccagactttcatgaagctgttgaggtcctaggcaattaatgcagcagttgcgataaataaaaacatctcacctaagtctccttttcttcataacatagatactgacatgataggaagctctcagcttagggaaagagaataaattttagattatagaacatggattcaaaagtgactggaacaaattggctgacaccttactggtaacctgctattcttctggtgttatccttcaggattgttccactaaaatttatttttcaaaaaatttacttcacattattctatgtaagtgatgacttgtcagtgttccaggtgtatcttagctaaaactagagaatgccctaacttagatggtttttgaagcctatacaattggtattgtttgacccttaagcttttacatctcttagcatggaggacgaagaaagctgtacattgttgcttgagagtctgtacatttagtccagatttgtatttgcactgtcagtatggcaaatgagtgaaaaatgtttaatacactattggattttttatttcctttttttgattcagcttatacccgggctgaaaacctcaatttatgttcatgacagtggggatttttttaaatgtctacattctttctaataaactgttggaagacctactcccgaagatcctgagagtcgccgca

SEQ ID NO: 108822 - DNA, 1518 bp, Homo sapiens
ataagggaatcgcgaccacggcgtcgtccccgaccggaggagccgctctttccgcgcggtgcattctggggcccgaggtcgagcccgccgctgccgccgtcgcctgagggaagcgagaagaggccgcgaccggagagaaaaagcggagtcgccaccggagagaagtcgactccctagcagcagccgccgccagagaggcccgcccaccagttcgcccgtccccctgccccgttcacaatgcagcctgcttctgcaaagtggtacgatcgaagggactatgtcttcattgaattttgtgttgaagacagtaaggatgttaatgtaaattttgaaaaatccaaacttacattcagttgtctcggaggaagtgataattttaagcatttaaatgaaattgatctttttcactgtattgatccaaatgattccaagcataaaagaacggacagatcaattttatgttgtttacgaaaaggagaatctggccagtcatggccaaggttaacaaaagaaagggcaaagcttaattggcttagtgtcgacttcaataattggaaagactgggaagatgattcagatgaagacatgtctaattttgatcgtttctctgagatgatgaacaacatgggtggtgatgaggatgtagatttaccagaagtagatggagcagatgatgattcacaagacagtgatgatgaaaaaatgccagatctggagtaaggaatattgtcatcacctggattttgagaaagaaaaataacttctctgcaagatttcataattgagagaattcctgagttgatagctctaaaggcagatatgctgtatttgcctactttaacccatttttcaacctgtttgttttttaaaaggcttcactaagggttgatatgtaccattgtatggggcaattttaagtcagctaaggcaataaccttatgcatgaacatttcccagactttcatgaagctgttgaggtcctaggcaattaatgcagcagttgcgataaataaaaacatctcacctaagtctccttttcttcataacatagatactgacatgataggaagctctcagcttagggaaagagaataaattttagattatagaacatggattcaaaagtgactggaacaaattggctgacaccttactggtaacctgctattcttctggtgttatccttcaggattgttccactaaaatttatttttcaaaaaatttacttcacattattctatgtaagtgatgacttgtcagtgttccaggtgtatcttagctaaaactagagaatgccctaacttagatggtttttgaagcctatacaattggtattgtttgacccttaagcttttacatctcttagcatggaggacgaagaaagctgtacattgttgcttgagagtctgtacatttagtccagatttgtatttgcactgtcagtatggcaaatgagtgaaaaatgtttaacccaacgagcaggtttgcgactcatatagatcatataggtgtttcagt

SEQ ID NO: 108823 - DNA, 1813 bp, Homo sapiens
ggacgcgtgggtcgcggacgcgtgggtccccgaccggaggagccgctctttccgcgcggtgcattctggggcccgaggtcgagcccgccgctgccgccgtcgcctgagggaagcgagaagaggccgcgaccggagagaaaaagcggagtcgccaccggagagaagtcgactccctagcagcagccgccgccagagaggcccgcccaccagttcgcccgtccccctgccccgttcacaatgcagcctgcttctgcaaagtggtacgatcgaagggactatgtcttcattgaattttgtgttgaagacagtaaggatgttaatgtaaattttgaaaaatccaaacttacattcagttgtctcggaggaagtgataattttaagcatttaaatgaaattgatctttttcactgtattgatccaaatgattccaagcataaaagaacggacagatcaattttatgttgtttacgaaaaggagaatctggccagtcatggccaaggttaacaaaagaaagggcaaagactgggaagatgattcagatgaagacatgtctaattttgatcgtttctctgagatgatgaacaacatgggtggtgatgaggatgtagatttaccagaagtagatggagcagatgatgattcacaagacagtgatgatgaaaaaatgccagatctggagtaaggaatattgtcatcacctggattttgagaaagaaaaataacttctctgcaagatttcataattgagagaattcctgagttgatagctctaaaggcagatatgctgtatttgcctactttaacccatttttcaacctgtttgttttttaaaaggcttcactaagggttgatatgtaccattgtatggggcaattttaagtcagctaaggcaataaccttatgcatgaacatttcccagactttcatgaagctgttgaggtcctaggcaattaatgcagcagttgcgataaataaaaacatctcacctaagtctccttttcttcataacatagatactgacatgataggaagctctcagcttagggaaagagaataaattttagattatagaacatggattcaaaagtgactggaacaaattggctgacaccttactggtaacctgctattcttctggtgttatccttcaggattgttccactaaaatttatttttcaaaaaatttacttcacattattctatgtaagtgatgacttgtcagtgttccaggtgtatcttagctaaaactagagaatgccctaacttagatggtttttgaagcctatacaattggtattgtttgacccttaagcttttacatctcttagcatggaggacgaagaaagctgtacattgttgcttgagagtctgtacatttagtccagatttgtatttgcactgtcagtatggcaaatgagtgaaaaatgtttaatacactattggattttttatttcctttttttgattcagcttatacccgggctgaaaacctcaatttatgttcatgacagtggggatttttttaaatgtctacattctttctaataaactgttggaagacttcttggctgtccttttaagtgtctggcttactgtaatttttatgtatttaccatttactggaatggagtttatttgaggaagaatttgggattattcctctgtttgaaaaaagaggcttgctgtaatgtcacaggaaaccttttaaaagtggatctgtaatagcatattgtagatgcactttgcagcagttggaaaagaaagtgttgtgtgatttgattgaaataaaactaaatgtgttgtcctcctaaa

SEQ ID NO: 108824 - DNA, 1760 bp, Homo sapiens
ggacgcgtgggtcgcggacgcgtgggtccccgaccggaggagccgctctttccgcgcggtgcattctggggcccgaggtcgagcccgccgctgccgccgtcgcctgagggaagcgagaagaggccgcgaccggagagaaaaagcggagtcgccaccggagagaagtcgactccctagcagcagccgccgccagagaggcccgcccaccagttcgcccgtccccctgccccgttcacaatgcagcctgcttctgcaaagtggtacgatcgaagggactatgtcttcattgaattttgtgttgaagacagtaaggatgttaatgtaaattttgaaaaatccaaacttacattcagttgtctcggaggaagtgataattttaagcatttaaatgaaattgatctttttcactgtattgatccaaatgattccaagcataaaagaacggacagatcaattttatgttgtttacgaaaaggagaatctggccagtcatggccaaggttaacaaaagaaagggcaaagatgatgaacaacatgggtggtgatgaggatgtagatttaccagaagtagatggagcagatgatgattcacaagacagtgatgatgaaaaaatgccagatctggagtaaggaatattgtcatcacctggattttgagaaagaaaaataacttctctgcaagatttcataattgagagaattcctgagttgatagctctaaaggcagatatgctgtatttgcctactttaacccatttttcaacctgtttgttttttaaaaggcttcactaagggttgatatgtaccattgtatggggcaattttaagtcagctaaggcaataaccttatgcatgaacatttcccagactttcatgaagctgttgaggtcctaggcaattaatgcagcagttgcgataaataaaaacatctcacctaagtctccttttcttcataacatagatactgacatgataggaagctctcagcttagggaaagagaataaattttagattatagaacatggattcaaaagtgactggaacaaattggctgacaccttactggtaacctgctattcttctggtgttatccttcaggattgttccactaaaatttatttttcaaaaaatttacttcacattattctatgtaagtgatgacttgtcagtgttccaggtgtatcttagctaaaactagagaatgccctaacttagatggtttttgaagcctatacaattggtattgtttgacccttaagcttttacatctcttagcatggaggacgaagaaagctgtacattgttgcttgagagtctgtacatttagtccagatttgtatttgcactgtcagtatggcaaatgagtgaaaaatgtttaatacactattggattttttatttcctttttttgattcagcttatacccgggctgaaaacctcaatttatgttcatgacagtggggatttttttaaatgtctacattctttctaataaactgttggaagacttcttggctgtccttttaagtgtctggcttactgtaatttttatgtatttaccatttactggaatggagtttatttgaggaagaatttgggattattcctctgtttgaaaaaagaggcttgctgtaatgtcacaggaaaccttttaaaagtggatctgtaatagcatattgtagatgcactttgcagcagttggaaaagaaagtgttgtgtgatttgattgaaataaaactaaatgtgttgtcctcctaaa

SEQ ID NO: 108825 - DNA, 1277 bp, Homo sapiens
tcgtaggtgactgactctctccttaaccgaccgaaccagatgatgaacaacatgggtggtgatgaggatgtagatttaccagaagtagatggagcagatgatgattcacaagacagtgatgatgaaaaaatgccagatctggagtaaggaatattgtcatcacctggattttgagaaagaaaaataacttctctgcaagatttcataattgagagaattcctgagttgatagctctaaaggcagatatgctgtatttgcctactttaacccatttttcaacctgtttgttttttaaaaggcttcactaagggttgatatgtaccattgtatggggcaattttaagtcagctaaggcaataaccttatgcatgaacatttcccagactttcatgaagctgttgaggtcctaggcaattaatgcagcagttgcgataaataaaaacatctcacctaagtctccttttcttcataacatagatactgacatgataggaagctctcagcttagggaaagagaataaattttagattatagaacatggattcaaaagtgactggaacaaattggctgacaccttactggtaacctgctattcttctggtgttatccttcaggattgttccactaaaatttatttttcaaaaaatttacttcacattattctatgtaagtgatgacttgtcagtgttccaggtgtatcttagctaaaactagagaatgccctaacttagatggtttttgaagcctatacaattggtattgtttgacccttaagcttttacatctcttagcatggaggacgaagaaagctgtacattgttgcttgagagtctgtacatttagtccagatttgtatttgcactgtcagtatggcaaatgagtgaaaaatgtttaatacactattggattttttatttcctttttttgattcagcttatacccgggctgaaaacctcaatttatgttcatgacagtggggatttttttaaatgtctacattctttctaataaactgttggaagacttcttggctgtccttttaagtgtctggcttactgtaatttttatgtatttaccatttactggaatggagtttatttgaggaagaatttgggattattcctctgtttgaaaaaagaggcttgctgtaatgtcacaggaaaccttttaaaagtggatctgtaatagcatattgtagatgcactttgcagcagttggaaaagaaagtgttgtgtgatttgattgaaataaaactaaatgtgttgtcctcctaaa

SEQ ID NO: 108826 - DNA, 1800 bp, Homo sapiens
ggacgcgtgggtcgcggacgcgtgggtccccgaccggaggagccgctctttccgcgcggtgcattctggggcccgaggtcgagcccgccgctgccgccgtcgcctgagggaagcgagaagaggccgcgaccggagagaaaaagcggagtcgccaccggagagaagtcgactccctagcagcagccgccgccagagaggcccgcccaccagttcgcccgtccccctgccccgttcacaatgcagcctgcttctgcaaagtggtacgatcgaagggactatgtcttcattgaattttgtgttgaagacagtaaggatgttaatgtaaattttgaaaaatccaaacttacattcagttgtctcggaggaagtgataattttaagcatttaaatgaaattgatctttttcactgtattgatccaaatgattccaagcataaaagaacggacagatcaattttatgttgtttacgaaaaggagaatctggccagtcatggccaaggttaacaaaagaaagggcaaagcttaattggcttagtgtcgacttcaataattggaaagactgggaagatgattcagatgaagacatgtctaattttgatcgtttctctgagatgatgaacaacatgggtggtgatgaggatgtagatttaccagaagtagatggagcagatgatgattcacaagacagtgatgatgaaaagaaaaataacttctctgcaagatttcataattgagagaattcctgagttgatagctctaaaggcagatatgctgtatttgcctactttaacccatttttcaacctgtttgttttttaaaaggcttcactaagggttgatatgtaccattgtatggggcaattttaagtcagctaaggcaataaccttatgcatgaacatttcccagactttcatgaagctgttgaggtcctaggcaattaatgcagcagttgcgataaataaaaacatctcacctaagtctccttttcttcataacatagatactgacatgataggaagctctcagcttagggaaagagaataaattttagattatagaacatggattcaaaagtgactggaacaaattggctgacaccttactggtaacctgctattcttctggtgttatccttcaggattgttccactaaaatttatttttcaaaaaatttacttcacattattctatgtaagtgatgacttgtcagtgttccaggtgtatcttagctaaaactagagaatgccctaacttagatggtttttgaagcctatacaattggtattgtttgacccttaagcttttacatctcttagcatggaggacgaagaaagctgtacattgttgcttgagagtctgtacatttagtccagatttgtatttgcactgtcagtatggcaaatgagtgaaaaatgtttaatacactattggattttttatttcctttttttgattcagcttatacccgggctgaaaacctcaatttatgttcatgacagtggggatttttttaaatgtctacattctttctaataaactgttggaagacttcttggctgtccttttaagtgtctggcttactgtaatttttatgtatttaccatttactggaatggagtttatttgaggaagaatttgggattattcctctgtttgaaaaaagaggcttgctgtaatgtcacaggaaaccttttaaaagtggatctgtaatagcatattgtagatgcactttgcagcagttggaaaagaaagtgttgtgtgatttgattgaaataaaactaaatgtgttgtcctcctaaa

SEQ ID NO: 108827 - DNA, 1447 bp, Homo sapiens
ataagggaatcgcgaccacggcgtcgtccccgaccggaggagccgctctttccgcgcggtgcattctggggcccgaggtcgagcccgccgctgccgccgtcgcctgagggaagcgagaagaggccgcgaccggagagaaaaagcggagtcgccaccggagagaagtcgactccctagcagcagccgccgccagagaggcccgcccaccagttcgcccgtccccctgccccgttcacaatgcagcctgcttctgcaaagtggtacgatcgaagggactatgtcttcattgaattttgtgttgaagacagtaaggatgttaatgtaaattttgaaaaatccaaacttacattcagttgtctcggaggaagtgataattttaagcatttaaatgaaattgatctttttcactgtattgatccaaatgattccaagcataaaagaacggacagatcaattttatgttgtttacgaaaaggagaatctggccagtcatggccaaggttaacaaaagaaagggcaaagcttaattggcttagtgtcgacttcaataattggaaagactgggaagatgattcagatgaagacatgtctaattttgatcgtttctctgagatgatgaacaacatgggtggtgatgaggatgtagatttaccagaagtagatggagcagatgatgattcacaagacagtgatgatgaaaaaatgccagatctggagtaaggaatattgtcatcacctggattttgagaaagaaaaataacttctctgcaagatttcataattgagagaattcctgagttgatagctctaaaggcagatatgctgtatttgcctactttaacccatttttcaacctgtttgttttttaaaaggcttcactaagggttgatatgtaccattgtatggggcaattttaagtcagctaaggcaataaccttatgcatgaacatttcccagactttcatgaagctgttgaggtcctaggcaattaatgcagcagttgcgataaataaaaacatctcacctaagtctccttttcttcataacatagatactgacatgataggaagctctcagcttagggaaagagaataaattttagattatagaacatggattcaaaagtgactggaacaaattggctgacaccttactggtaacctgctattcttctggtgttatccttcaggattgttccactaaaatttatttttcaaaaaatttacttcacattattctatgtaagtgatgacttgtgccggtccgggttcctagtaacaggagatgctactaatggtttgagccacactggatgtgacctagttaatctttggtgcgcgaaacgctgtgtgggacgcataccacgttgggcatgagggaacagaacagagactagcacagggaaacataacgggagaatcacagaggcggtgggcaaggaaaccaa

SEQ ID NO: 108828 - DNA, 1742 bp, Homo sapiens
  misc_feature (51)..(51): n is a, c, g, or t
  misc_feature (118)..(121): n is a, c, g, or t
  misc_feature (127)..(127): n is a, c, g, or t
  misc_feature (129)..(129): n is a, c, g, or t
  misc_feature (132)..(134): n is a, c, g, or t
  misc_feature (151)..(151): n is a, c, g, or t
  misc_feature (197)..(197): n is a, c, g, or t
  misc_feature (212)..(212): n is a, c, g, or t
  misc_feature (290)..(290): n is a, c, g, or t
agaaagctgtacagtgttgcttgagagatgtaaaagcttaagggtcaaacnataccaattgtataggcttcaaaaaccatctaagttagggcattctctagttttagctaagatacannnngaacantnacnnntcatcttacatgataangtgaagtaaattttttgaaaaataaattttagtggaacaatcctgnaggataacaccagangaatagcaggttaccagtaaggtgtcagccaatttgttccagtcacttttgaatccatgttctataatctaaaatttnttctttccctaagctgagagcttcctatcatgtcagtatctatgtttatacagtgatactttgcaatcagtaaaaacaaactcaaaatagagatgttaacttctttggaagtaaagtaattttttctttatgaccttgaataaataaccaaagcagaaatgtgaataacttgatagcaagacaacctattaattcattgggcaactatgtatttcgatttttggttgcttttcctttaagacagtaaaattggtagattattcacttgtactatatactaatatttttaaaaattctttcagaaatgccagatctggagtaaggaatattgtcatcacctggattttgagaaagaaaaataacttctctgcaagatttcataattgagagaattcctgagttgatagctctaaaggcagatatgctgtatttgcctactttaacccatttttcaacctgtttgttttttaaaaggcttcactaagggttgatatgtaccattgtatggggcaattttaagtcagctaaggcaataaccttatgcatgaacatttcccagactttcatgaagctgttgaggtcctaggcaattaatgcagcagttgcgataaataaaaacatctcacctaagtctccttttcttcataacatagatactgacatgataggaagctctcagcttagggaaagagaataaattttagattatagaacatggattcaaaagtgactggaacaaattggctgacaccttactggtaacctgctattcttctggtgttatccttcaggattgttccactaaaatttatttttcaaaaaatttacttcacattattctatgtaagtgatgacttgtcagtgttccaggtgtatcttagctaaaactagagaatgccctaacttagatggtttttgaagcctatacaattggtattgtttgacccttaagcttttacatctcttagcatggaggacgaagaaagctgtacattgttgcttgagagtctgtacatttagtccagatttgtatttgcactgtcagtatggcaaatgagtgaaaaatgtttaatacactattggattttttatttcctttttttgattcagcttatacccgggctgaaaacctcaatttatgttcatgacagtggggatttttttaaatgtctacattctttctaataaactgttggaagacttcttggctgtccttttaagtgtctggcttactgtaatttttatgtatttaccatttactggaatggagtttatttgaggaagaatttgggattattcctctgtttgaaaaaagaggcttgctgtaatgtcacaggaaaccttttaaaagtggatctgtaatagcatattgtagatgcactttgcagcagttggaaaagaaagtgttgtgtgatttgattgaaataaaactaaatgtgttgtcctcctaaa

SEQ ID NO: 108829 - DNA, 1127 bp, Homo sapiens
cggccggccccagttacacagcttgagagaaaaataacttctctgcaagatttcataattgagagaattcctgagttgatagctctaaaggcagatatgctgtatttgcctactttaacccatttttcaacctgtttgttttttaaaaggcttcactaagggttgatatgtaccattgtatggggcaattttaagtcagctaaggcaataaccttatgcatgaacatttcccagactttcatgaagctgttgaggtcctaggcaattaatgcagcagttgcgataaataaaaacatctcacctaagtctccttttcttcataacatagatactgacatgataggaagctctcagcttagggaaagagaataaattttagattatagaacatggattcaaaagtgactggaacaaattggctgacaccttactggtaacctgctattcttctggtgttatccttcaggattgttccactaaaatttatttttcaaaaaatttacttcacattattctatgtaagtgatgacttgtcagtgttccaggtgtatcttagctaaaactagagaatgccctaacttagatggtttttgaagcctatacaattggtattgtttgacccttaagcttttacatctcttagcatggaggacgaagaaagctgtacattgttgcttgagagtctgtacatttagtccagatttgtatttgcactgtcagtatggcaaatgagtgaaaaatgtttaatacactattggattttttatttcctttttttgattcagcttatacccgggctgaaaacctcaatttatgttcatgacagtggggatttttttaaatgtctacattctttctaataaactgttggaagacttcttggctgtccttttaagtgtctggcttactgtaatttttatgtatttaccatttactggaatggagtttatttgaggaagaatttgggattattcctctgtttgaaaaaagaggcttgctgtaatgtcacaggaaaccttttaaaagtggatctgtaatagcatattgtagatgcactttgcagcagttggaaaagaaagtgttgtgtgatttgattgaaataaaactaaatgtgttgtcctcctaaa

SEQ ID NO: 108830 - DNA, 1356 bp, Homo sapiens
  misc_feature (51)..(51): n is a, c, g, or t
  misc_feature (118)..(121): n is a, c, g, or t
  misc_feature (127)..(127): n is a, c, g, or t
  misc_feature (129)..(129): n is a, c, g, or t
  misc_feature (132)..(134): n is a, c, g, or t
  misc_feature (151)..(151): n is a, c, g, or t
  misc_feature (197)..(197): n is a, c, g, or t
  misc_feature (212)..(212): n is a, c, g, or t
  misc_feature (290)..(290): n is a, c, g, or t
agaaagctgtacagtgttgcttgagagatgtaaaagcttaagggtcaaacnataccaattgtataggcttcaaaaaccatctaagttagggcattctctagttttagctaagatacannnngaacantnacnnntcatcttacatgataangtgaagtaaattttttgaaaaataaattttagtggaacaatcctgnaggataacaccagangaatagcaggttaccagtaaggtgtcagccaatttgttccagtcacttttgaatccatgttctataatctaaaatttnttctaattcctgagttgatagctctaaaggcagatatgctgtatttgcctactttaacccatttttcaacctgtttgttttttaaaaggcttcactaagggttgatatgtaccattgtatggggcaattttaagtcagctaaggcaataaccttatgcatgaacatttcccagactttcatgaagctgttgaggtcctaggcaattaatgcagcagttgcgataaataaaaacatctcacctaagtctccttttcttcataacatagatactgacatgataggaagctctcagcttagggaaagagaataaattttagattatagaacatggattcaaaagtgactggaacaaattggctgacaccttactggtaacctgctattcttctggtgttatccttcaggattgttccactaaaatttatttttcaaaaaatttacttcacattattctatgtaagtgatgacttgtcagtgttccaggtgtatcttagctaaaactagagaatgccctaacttagatggtttttgaagcctatacaattggtattgtttgacccttaagcttttacatctcttagcatggaggacgaagaaagctgtacattgttgcttgagagtctgtacatttagtccagatttgtatttgcactgtcagtatggcaaatgagtgaaaaatgtttaatacactattggattttttatttcctttttttgattcagcttatacccgggctgaaaacctcaatttatgttcatgacagtggggatttttttaaatgtctacattctttctaataaactgttggaagacttcttggctgtccttttaagtgtctggcttactgtaatttttatgtatttaccatttactggaatggagtttatttgaggaagaatttgggattattcctctgtttgaaaaaagaggcttgctgtaatgtcacaggaaaccttttaaaagtggatctgtaatagcatattgtagatgcactttgcagcagttggaaaagaaagtgttgtgtgatttgattgaaataaaactaaatgtgttgtcctcctaaa

SEQ ID NO: 108831 - DNA, 1689 bp, Homo sapiens
  misc_feature (51)..(51): n is a, c, g, or t
  misc_feature (118)..(121): n is a, c, g, or t
  misc_feature (127)..(127): n is a, c, g, or t
  misc_feature (129)..(129): n is a, c, g, or t
  misc_feature (132)..(134): n is a, c, g, or t
  misc_feature (151)..(151): n is a, c, g, or t
  misc_feature (197)..(197): n is a, c, g, or t
  misc_feature (212)..(212): n is a, c, g, or t
  misc_feature (290)..(290): n is a, c, g, or t
agaaagctgtacagtgttgcttgagagatgtaaaagcttaagggtcaaacnataccaattgtataggcttcaaaaaccatctaagttagggcattctctagttttagctaagatacannnngaacantnacnnntcatcttacatgataangtgaagtaaattttttgaaaaataaattttagtggaacaatcctgnaggataacaccagangaatagcaggttaccagtaaggtgtcagccaatttgttccagtcacttttgaatccatgttctataatctaaaatttnttctttccctaagctgagagcttcctatcatgtcagtatctatgtttatacagtgatactttgcaatcagtaaaaacaaactcaaaatagagatgttaacttctttggaagtaaagtaattttttctttatgaccttgaataaataaccaaagcagaaatgtgaataacttgatagcaagacaacctattaattcattgggcaactatgtatttcgatttttggttgcttttcctttaagacagtaaaattggtagattattcacttgtactatatactaatatttttaaaaattctttcagaaatgccagatctggagtaaggaatattgtcatcacctggattttgagaaagaaaaataacttctctgcaagatttcataattgagagaattcctgagttgatagctctaaaggcagatatgctgtatttgcctactttaacccatttttcaacctgtttgttttttagctaaggcaataaccttatgcatgaacatttcccagactttcatgaagctgttgaggtcctaggcaattaatgcagcagttgcgataaataaaaacatctcacctaagtctccttttcttcataacatagatactgacatgataggaagctctcagcttagggaaagagaataaattttagattatagaacatggattcaaaagtgactggaacaaattggctgacaccttactggtaacctgctattcttctggtgttatccttcaggattgttccactaaaatttatttttcaaaaaatttacttcacattattctatgtaagtgatgacttgtcagtgttccaggtgtatcttagctaaaactagagaatgccctaacttagatggtttttgaagcctatacaattggtattgtttgacccttaagcttttacatctcttagcatggaggacgaagaaagctgtacattgttgcttgagagtctgtacatttagtccagatttgtatttgcactgtcagtatggcaaatgagtgaaaaatgtttaatacactattggattttttatttcctttttttgattcagcttatacccgggctgaaaacctcaatttatgttcatgacagtggggatttttttaaatgtctacattctttctaataaactgttggaagacttcttggctgtccttttaagtgtctggcttactgtaatttttatgtatttaccatttactggaatggagtttatttgaggaagaatttgggattattcctctgtttgaaaaaagaggcttgctgtaatgtcacaggaaaccttttaaaagtggatctgtaatagcatattgtagatgcactttgcagcagttggaaaagaaagtgttgtgtgatttgattgaaataaaactaaatgtgttgtcctcctaaa

SEQ ID NO: 108832 - DNA, 1105 bp, Homo sapiens
ataagggaatcgcgaccacggcgtcgtccccgaccggaggagccgctctttccgcgcggtgcattctggggcccgaggtcgagcccgccgctgccgccgtcgcctgagggaagcgagaagaggccgcgaccggagagaaaaagcggagtcgccaccggagagaagtcgactccctagcagcagccgccgccagagaggcccgcccaccagttcgcccgtccccctgccccgttcacaatgcagcctgcttctgcaaagtggtacgatcgaagggactatgtcttcattgaattttgtgttgaagacagtaaggatgttaatgtaaattttgaaaaatccaaacttacattcagttgtctcggaggaagtgataattttaagcatttaaatgaaattgatctttttcactgtattgatccaaatgattccaagcataaaagaacggacagatcaattttatgttgtttacgaaaaggagaatctggccagtcatggccaaggttaacaaaagaaagggcaaagcttaattggcttagtgtcgacttcaataattggaaagactgggaagatgattcagatgaagacatgtctaattttgatcgtttctctgagatgatgaacaacatgggtggtgatgaggatgtagatttaccagaagtagatggagcagatgatgattcacaagacagtgatgatgaaaaaatgccagatctggagtaaggaatattgtcatcacctggattttgagaaagaaaaataacttctctgcaagatttcataattgagagaattcctgagttgatagctctaaaggcagatatgctgtatttgcctactttaacccatttttcaacctgtttgttttttaaaaggcttcactaagggttgatatgtaccattgtatggggcaattttaagtcagctaaggcaataaccttatgcatgaacatttcccagactttcatgaagctgttgaggtcctaggcaattaatgcagcagttgcgataaataaaaacatctcacctaagtctccttttcttcataacatagatactgacatgataggaagctctcattatcctcggcgtcggtttatcctcgagg

SEQ ID NO: 108833 - DNA, 824 bp, Homo sapiens
gcagaagcgtatagtcggttctaccatactgacatgataggaagctctcagcttagggaaagagaataaattttagattatagaacatggattcaaaagtgactggaacaaattggctgacaccttactggtaacctgctattcttctggtgttatccttcaggattgttccactaaaatttatttttcaaaaaatttacttcacattattctatgtaagtgatgacttgtcagtgttccaggtgtatcttagctaaaactagagaatgccctaacttagatggtttttgaagcctatacaattggtattgtttgacccttaagcttttacatctcttagcatggaggacgaagaaagctgtacattgttgcttgagagtctgtacatttagtccagatttgtatttgcactgtcagtatggcaaatgagtgaaaaatgtttaatacactattggattttttatttcctttttttgattcagcttatacccgggctgaaaacctcaatttatgttcatgacagtggggatttttttaaatgtctacattctttctaataaactgttggaagacttcttggctgtccttttaagtgtctggcttactgtaatttttatgtatttaccatttactggaatggagtttatttgaggaagaatttgggattattcctctgtttgaaaaaagaggcttgctgtaatgtcacaggaaaccttttaaaagtggatctgtaatagcatattgtagatgcactttgcagcagttggaaaagaaagtgttgtgtgatttgattgaaataaaactaaatgtgttgtcctcctaaa

SEQ ID NO: 108834 - DNA, 1059 bp, Homo sapiens
ataagggaatcgcgaccacggcgtcgtccccgaccggaggagccgctctttccgcgcggtgcattctggggcccgaggtcgagcccgccgctgccgccgtcgcctgagggaagcgagaagaggccgcgaccggagagaaaaagcggagtcgccaccggagagaagtcgactccctagcagcagccgccgccagagaggcccgcccaccagttcgcccgtccccctgccccgttcacaatgcagcctgcttctgcaaagtggtacgatcgaagggactatgtcttcattgaattttgtgttgaagacagtaaggatgttaatgtaaattttgaaaaatccaaacttacattcagttgtctcggaggaagtgataattttaagcatttaaatgaaattgatctttttcactgtattgatccaaatgattccaagcataaaagaacggacagatcaattttatgttgtttacgaaaaggagaatctggccagtcatggccaaggttaacaaaagaaagggcaaagcttaattggcttagtgtcgacttcaataattggaaagactgggaagatgattcagatgaagacatgtctaattttgatcgtttctctgagatgatgaacaacatgggtggtgatgaggatgtagatttaccagaagtagatggagcagatgatgattcacaagacagtgatgatgaaaaaatgccagatctggagtaaggaatattgtcatcacctggattttgagaaagaaaaataacttctctgcaagatttcataattgagagaattcctgagttgatagctctaaaggcagatatgctgtatttgcctactttaacccatttttcaacctgtttgttttttaaaaggcttcactaagggttgatatgtaccattgtatggggcaattttaagtcagctaaggcaataaccttatgcatgaacatttcccagactttcatgaagctgttgaggtcctaggcactttgcagcagttggaaaagaaagtgttgtgtgatttgattgaaataaaactaaatgtgttgtcctcctaaa

SEQ ID NO: 108835 - DNA, 1688 bp, Homo sapiens
  misc_feature (51)..(51): n is a, c, g, or t
  misc_feature (118)..(121): n is a, c, g, or t
  misc_feature (127)..(127): n is a, c, g, or t
  misc_feature (129)..(129): n is a, c, g, or t
  misc_feature (132)..(134): n is a, c, g, or t
  misc_feature (151)..(151): n is a, c, g, or t
  misc_feature (197)..(197): n is a, c, g, or t
  misc_feature (212)..(212): n is a, c, g, or t
  misc_feature (290)..(290): n is a, c, g, or t
agaaagctgtacagtgttgcttgagagatgtaaaagcttaagggtcaaacnataccaattgtataggcttcaaaaaccatctaagttagggcattctctagttttagctaagatacannnngaacantnacnnntcatcttacatgataangtgaagtaaattttttgaaaaataaattttagtggaacaatcctgnaggataacaccagangaatagcaggttaccagtaaggtgtcagccaatttgttccagtcacttttgaatccatgttctataatctaaaatttnttctttccctaagctgagagcttcctatcatgtcagtatctatgtttatacagtgatactttgcaatcagtaaaaacaaactcaaaatagagatgttaacttctttggaagtaaagtaattttttctttatgaccttgaataaataaccaaagcagaaatgtgaataacttgatagcaagacaacctattaattcattgggcaactatgtatttcgatttttggttgcttttcctttaagacagtaaaattggtagattattcacttgtactatatactaatatttttaaaaattctttcagaaatgccagatctggagtaaggaatattgtcatcacctggattttgagaaagaaaaataacttctctgcaagatttcataattgagagaattcctgagttgatagctctaaaggcagatatgctgtatttgcctactttaacccatttttcaacctgtttgttttttaaaaggcttcactaagggttgatatgtaccattgtatggggcaattttaagtcagctaaggcaataaccttatgcatgaacatttcccagactttcatgaagctgttgaggtcctaggcaattaatgcagcagttgcgataaataaaaacatctcacctaagtctccttttcttcataacatagatactgacatgataggaagctctcagcttagggaaagagaataaattttagattatagaacatggattcggtgttatccttcaggattgttccactaaaatttatttttcaaaaaatttacttcacattattctatgtaagtgatgacttgtcagtgttccaggtgtatcttagctaaaactagagaatgccctaacttagatggtttttgaagcctatacaattggtattgtttgacccttaagcttttacatctcttagcatggaggacgaagaaagctgtacattgttgcttgagagtctgtacatttagtccagatttgtatttgcactgtcagtatggcaaatgagtgaaaaatgtttaatacactattggattttttatttcctttttttgattcagcttatacccgggctgaaaacctcaatttatgttcatgacagtggggatttttttaaatgtctacattctttctaataaactgttggaagacttcttggctgtccttttaagtgtctggcttactgtaatttttatgtatttaccatttactggaatggagtttatttgaggaagaatttgggattattcctctgtttgaaaaaagaggcttgctgtaatgtcacaggaaaccttttaaaagtggatctgtaatagcatattgtagatgcactttgcagcagttggaaaagaaagtgttgtgtgatttgattgaaataaaactaaatgtgttgtcctcctaaa

SEQ ID NO: 108836 - DNA, 601 bp, Homo sapiens
  misc_feature (51)..(51): n is a, c, g, or t
agaaagctgtacagtgttgcttgagagatgtaaaagcttaagggtcaaacnataccaattgtataggcttcaaaaaccatctaagttagggcattctctagcttttacatctcttagcatggaggacgaagaaagctgtacattgttgcttgagagtctgtacatttagtccagatttgtatttgcactgtcagtatggcaaatgagtgaaaaatgtttaatacactattggattttttatttcctttttttgattcagcttatacccgggctgaaaacctcaatttatgttcatgacagtggggatttttttaaatgtctacattctttctaataaactgttggaagacttcttggctgtccttttaagtgtctggcttactgtaatttttatgtatttaccatttactggaatggagtttatttgaggaagaatttgggattattcctctgtttgaaaaaagaggcttgctgtaatgtcacaggaaaccttttaaaagtggatctgtaatagcatattgtagatgcactttgcagcagttggaaaagaaagtgttgtgtgatttgattgaaataaaactaaatgtgttgtcctcctaaa

SEQ ID NO: 108837 - DNA, 456 bp, Homo sapiens
gctcgctaccatttggtggacgagtccagatttgtatttgcactgtcagtatggcaaatgagtgaaaaatgtttaatacactattggattttttatttcctttttttgattcagcttatacccgggctgaaaacctcaatttatgttcatgacagtggggatttttttaaatgtctacattctttctaataaactgttggaagacttcttggctgtccttttaagtgtctggcttactgtaatttttatgtatttaccatttactggaatggagtttatttgaggaagaatttgggattattcctctgtttgaaaaaagaggcttgctgtaatgtcacaggaaaccttttaaaagtggatctgtaatagcatattgtagatgcactttgcagcagttggaaaagaaagtgttgtgtgatttgattgaaataaaactaaatgtgttgtcctcctaaa

SEQ ID NO: 108838 - DNA, 1356 bp, Homo sapiens
ggacgcgtgggtcgcggacgcgtgggtccccgaccggaggagccgctctttccgcgcggtgcattctggggcccgaggtcgagcccgccgctgccgccgtcgcctgagggaagcgagaagaggccgcgaccggagagaaaaagcggagtcgccaccggagagaagtcgactccctagcagcagccgccgccagagaggcccgcccaccagttcgcccgtccccctgccccgttcacaatgcagcctgcttctgcaaagtggtacgatcgaagggactatgtcttcattgaattttgtgttgaagacagtaaggatgttaatgtaaattttgaaaaatccaaacttacattcagttgtctcggaggaagtgataattttaagcatttaaatgaaattgatctttttcactgtattgatccaaatgattccaagcataaaagaacggacagatcaattttatgttgtttacgaaaaggagaatctggccagtcatggccaaggttaacaaaagaaagggcaaagggtaggtttcattttccttttttgaaaagtttgatatttttattttaggtaataaaagatgtacttatttgatgtaaggaatatggctgtgtttttgtttcacagctaagtataaagcctcatgttcatgttttttgtctactcagttttaatacgaagtgtgatcagaatatcagttattaactggtgtagaatcttttgtacttaagagacagactttgcataaattactcacactttgggaggccaaggtgggtggatcactacagcccaggaattcgagaccagcctgggcaacatggtgaaaccccgtgtgtaccaaaatacaaaaaattagttgggtgtggtggtacgcgcctgtaatcccagctaccctggaggccgaggcatgagaattgcgtgaacccagaggcggaggttgcagtgagctgagatcacgccaccatactccagcttggacgacaaagctagactctgtctcaaaaaaaaaagaataccttaatacatgttccacctaacttaagatagatagctgtgcaactacaaatgaatcccattcttttccttaaccaccagaggtaaccactactcaagtagaatttttaatgtttgtcaaacctgttgcatgaatagctttgcttttctttagggaaaatttagttttaatttccatatgggtttttaggattttgtataattacctataatcttccttttccagaagggaaagatgcttatatttgcattttgcattttttgatatctgtggcagacttaaggtttattctgaagcatacagcattaataattagggcctaacttaacatcattttt

SEQ ID NO: 108839 - DNA, 926 bp, Homo sapiens
ggacgcgtgggtcgcggacgcgtgggtccccgaccggaggagccgctctttccgcgcggtgcattctggggcccgaggtcgagcccgccgctgccgccgtcgcctgagggaagcgagaagaggccgcgaccggagagaaaaagcggagtcgccaccggagagaagtcgactccctagcagcagccgccgccagagaggcccgcccaccagttcgcccgtccccctgccccgttcacaatgcagcctgcttctgcaaagtggtacgatcgaagggactatgtcttcattgaattttgtgttgaagacagtaaggatgttaatgtaaattttgaaaaatccaaacttacattcaggtaagttaagctttttatccaatgatgtaaaatagtcattcacacaactgaataactttgactggcttgtcttttcattgaagttattattaatctttgtctctttgaagaggcttaattctttctttattattttatacagttgtctcggaggaagtgataattttaagcatttaaatgaaattgatctttttcactgtattgatccaaatgattccaagcataaaagaacggacagatcaattttatgttgtttacgaaaaggagaatctggccagtcatggccaaggttaacaaaagaaagggcaaagcttaattggcttagtgtcgacttcaataattggaaagactgggaagatgattcagatgaagacatgtctaattttgatcgtttctctgagatgatgaacaacatgggtggtgatgaggatgtagatttaccagaagtagatggagcagatgatgtaagtctaaaaattcttttttctgtttactttcatactattaaatagtaagaaacaacatatttacaaatggttttatatagattcacaattacttcttattttctaa

SEQ ID NO: 108840 - DNA, 1581 bp, Homo sapiens
ataagggaatcgcgaccacggcgtcgtccccgaccggaggagccgctctttccgcgcggtgcattctggggcccgaggtcgagcccgccgctgccgccgtcgcctgagggaagcgagaagaggccgcgaccggagagaaaaagcggagtcgccaccggagagaagtcgactccctagcagcagccgccgccagagaggcccgcccaccagttcgcccgtccccctgccccgttcacaatgcagcctgcttctgcaaagtggtacgatcgaagggactatgtcttcattgaattttgtgttgaagacagtaaggatgttaatgtaaattttgaaaaatccaaacttacattcagttgtctcggaggaagtgataattttaagcatttaaatgaaattgatctttttcactgtattgatccaaatgattccaagcataaaagaacggacagatcaattttatgttgtttacgaaaaggagaatctggccagtcatggccaaggttaacaaaagaaagggcaaagcttaattggcttagtgtcgacttcaataattggaaagactgggaagatgattcagatgaagacatgtctaattttgatcgtttctctgagatgatgaacaacatgggtggtgatgaggatgtagatttaccagaagtagatggagcagatgatgattcacaagacagtgatgatgaaaaaatgccagatctggagtaaggaatattgtcatcacctggattttgagaaagaaaaataacttctctgcaagatttcataattgagagaattcctgagttgatagctctaaaggcagatatgctgtatttgcctactttaacccatttttcaacctgtttgttttttaaaaggcttcactaagggttgatatgtaccattgtatggggcaattttaagtcagctaaggcaataaccttatgcatgaacatttcccagactttcatgaagctgttgaggtcctaggcaattaatgcagcagttgcgataaataaaaacatctcacctaagtctccttttcttcataacatagatactgacatgataggaagctctcagcttagggaaagagaataaattttagattatagaacatggattcaaaagtgactggaacaaattggctgacaccttactggtaacctgctattcttctggtgttatccttcaggattgttccactaaaatttatttttcaaaaaatttacttcacattattctatgtaagtgatgacttgtcagtgttccaggtgtatcttagctaaaactagagaatgccctaacttagatggtttttgaagcctatacaattggtattgtttgacccttaagcttttacatctcttagcatggaggacgaagaaagctgtacattgttgcttgagagtctgtacatttagtccagatttgtatttgcactgtcagtatggcaaatgagtgaaaaatgtttaatacactattggattttttatttcctttttttgattcagcttatacccgggctgaaaacctcaatttatgttcatgacagtggggattttcagcccgggtataagctgaatc

SEQ ID NO: 108841 - DNA, 1424 bp, Homo sapiens
ataagggaatcgcgaccacggcgtcgtccccgaccggaggagccgctctttccgcgcggtgcattctggggcccgaggtcgagcccgccgctgccgccgtcgcctgagggaagcgagaagaggccgcgaccggagagaaaaagcggagtcgccaccggagagaagtcgactccctagcagcagccgccgccagagaggcccgcccaccagttcgcccgtccccctgccccgttcacaatgcagcctgcttctgcaaagtggtacgatcgaagggactatgtcttcattgaattttgtgttgaagacagtaaggatgttaatgtaaattttgaaaaatccaaacttacattcagttgtctcggaggaagtgataattttaagcatttaaatgaaattgatctttttcactgtattgatccaaatgattccaagcataaaagaacggacagatcaattttatgttgtttacgaaaaggagaatctggccagtcatggccaaggttaacaaaagaaagggcaaagcttaattggcttagtgtcgacttcaataattggaaagactgggaagatgattcagatgaagacatgtctaattttgatcgtttctctgagatgatgaacaacatgggtggtgatgaggatgtagatttaccagaagtagatggagcagatgatgattcacaagacagtgatgatgaaaaaatgccagatctggagtaaggaatattgtcatcacctggattttgagaaagaaaaataacttctctgcaagatttcataattgagagaattcctgagttgatagctctaaaggcagatatgctgtatttgcctactttaacccatttttcaacctgtttgttttttaaaaggcttcactaagggttgatatgtaccattgtatggggcaattttaagtcagctaaggcaataaccttatgcatgaacatttcccagactttcatgaagctgttgaggtcctaggcaattaatgcagcagttgcgataaataaaaacatctcacctaagtctccttttcttcataacatagatactgacatgataggaagctctcagcttagggaaagagaataaattttagattatagaacatggattcaaaagtgactggaacaaattggctgacaccttactggtaacctgctattcttctggtgttatccttcaggattgttccactaaaatttatttttcaaaaaatttacttcacattattctatgtaagtgatgacttgtcagtgttccaggtgtatcttagctaaaactagagaatgccctaacttagatggtttttgaagcctatacaattggtattgtttgacccttaagcttttacatctcttagcatggaggacgaagaaatagaaccgactggaatcctctagagtcacctcagcatcaca

SEQ ID NO: 108842 - DNA, 1860 bp, Homo sapiens
ggacgcgtgggtcgcggacgcgtgggtccccgaccggaggagccgctctttccgcgcggtgcattctggggcccgaggtcgagcccgccgctgccgccgtcgcctgagggaagcgagaagaggccgcgaccggagagaaaaagcggagtcgccaccggagagaagtcgactccctagcagcagccgccgccagagaggcccgcccaccagttcgcccgtccccctgccccgttcacaatgcagcctgcttctgcaaagtggtacgatcgaagggactatgtcttcattgaattttgtgttgaagacagtaaggatgttaatgtaaattttgaaaaatccaaacttacattcagttgtctcggaggaagtgataattttaagcatttaaatgaaattgatctttttcactgtattgatccaaatgattccaagcataaaagaacggacagatcaattttatgttgtttacgaaaaggagaatctggccagtcatggccaaggttaacaaaagaaagggcaaagcttaattggcttagtgtcgacttcaataattggaaagactgggaagatgattcagatgaagacatgtctaattttgatcgtttctctgagatgatgaacaacatgggtggtgatgaggatgtagatttaccagaagtagatggagcagatgatagcagatgatgattcacaagacagtgatgatgaaaaaatgccagatctggagtaaggaatattgtcatcacctggattttgagaaagaaaaataacttctctgcaagatttcataattgagagaattcctgagttgatagctctaaaggcagatatgctgtatttgcctactttaacccatttttcaacctgtttgttttttaaaaggcttcactaagggttgatatgtaccattgtatggggcaattttaagtcagctaaggcaataaccttatgcatgaacatttcccagactttcatgaagctgttgaggtcctaggcaattaatgcagcagttgcgataaataaaaacatctcacctaagtctccttttcttcataacatagatactgacatgataggaagctctcagcttagggaaagagaataaattttagattatagaacatggattcaaaagtgactggaacaaattggctgacaccttactggtaacctgctattcttctggtgttatccttcaggattgttccactaaaatttatttttcaaaaaatttacttcacattattctatgtaagtgatgacttgtcagtgttccaggtgtatcttagctaaaactagagaatgccctaacttagatggtttttgaagcctatacaattggtattgtttgacccttaagcttttacatctcttagcatggaggacgaagaaagctgtacattgttgcttgagagtctgtacatttagtccagatttgtatttgcactgtcagtatggcaaatgagtgaaaaatgtttaatacactattggattttttatttcctttttttgattcagcttatacccgggctgaaaacctcaatttatgttcatgacagtggggatttttttaaatgtctacattctttctaataaactgttggaagacttcttggctgtccttttaagtgtctggcttactgtaatttttatgtatttaccatttactggaatggagtttatttgaggaagaatttgggattattcctctgtttgaaaaaagaggcttgctgtaatgtcacaggaaaccttttaaaagtggatctgtaatagcatattgtagatgcactttgcagcagttggaaaagaaagtgttgtgtgatttgattgaaataaaactaaatgtgttgtcctcctaaa

SEQ ID NO: 108843 - DNA, 1787 bp, Homo sapiens
ggacgcgtgggtcgcggacgcgtgggtccccgaccggaggagccgctctttccgcgcggtgcattctggggcccgaggtcgagcccgccgctgccgccgtcgcctgagggaagcgagaagaggccgcgaccggagagaaaaagcggagtcgccaccggagagaagtcgactccctagcagcagccgccgccagagaggcccgcccaccagttcgcccgtccccctgccccgttcacaatgcagcctgcttctgcaaagtggtacgatcgaagggactatgtcttcattgaattttgtgttgaagacagtaaggatgttaatgtaaattttgaaaaatccaaacttacattcagttgtctcggaggaagtgataattttaagcatttaaatgaaattgatctttttcactgtattgatccaaatgattccaagcataaaagaacggacagatcaattttatgttgtttacgaaaaggagaatctggccagtcatggccaaggttaacaaaagaaagggcaaagcttaattggcttagtgtcgacttcaataattggaaagactgggaagatgattcagatgaagacatgtctaattttgatcgtttctctgaggattcacaagacagtgatgatgaaaaaatgccagatctggagtaaggaatattgtcatcacctggattttgagaaagaaaaataacttctctgcaagatttcataattgagagaattcctgagttgatagctctaaaggcagatatgctgtatttgcctactttaacccatttttcaacctgtttgttttttaaaaggcttcactaagggttgatatgtaccattgtatggggcaattttaagtcagctaaggcaataaccttatgcatgaacatttcccagactttcatgaagctgttgaggtcctaggcaattaatgcagcagttgcgataaataaaaacatctcacctaagtctccttttcttcataacatagatactgacatgataggaagctctcagcttagggaaagagaataaattttagattatagaacatggattcaaaagtgactggaacaaattggctgacaccttactggtaacctgctattcttctggtgttatccttcaggattgttccactaaaatttatttttcaaaaaatttacttcacattattctatgtaagtgatgacttgtcagtgttccaggtgtatcttagctaaaactagagaatgccctaacttagatggtttttgaagcctatacaattggtattgtttgacccttaagcttttacatctcttagcatggaggacgaagaaagctgtacattgttgcttgagagtctgtacatttagtccagatttgtatttgcactgtcagtatggcaaatgagtgaaaaatgtttaatacactattggattttttatttcctttttttgattcagcttatacccgggctgaaaacctcaatttatgttcatgacagtggggatttttttaaatgtctacattctttctaataaactgttggaagacttcttggctgtccttttaagtgtctggcttactgtaatttttatgtatttaccatttactggaatggagtttatttgaggaagaatttgggattattcctctgtttgaaaaaagaggcttgctgtaatgtcacaggaaaccttttaaaagtggatctgtaatagcatattgtagatgcactttgcagcagttggaaaagaaagtgttgtgtgatttgattgaaataaaactaaatgtgttgtcctcctaaa

SEQ ID NO: 108844 - DNA, 1303 bp, Homo sapiens
ataagggaatcgcgaccacggcgtcgtccccgaccggaggagccgctctttccgcgcggtgcattctggggcccgaggtcgagcccgccgctgccgccgtcgcctgagggaagcgagaagaggccgcgaccggagagaaaaagcggagtcgccaccggagagaagtcgactccctagcagcagccgccgccagagaggcccgcccaccagttcgcccgtccccctgccccgttcacaatgcagcctgcttctgcaaagtggtacgatcgaagggactatgtcttcattgaattttgtgttgaagacagtaaggatgttaatgtaaattttgaaaaatccaaacttacattcagttgtctcggaggaagtgataattttaagcatttaaatgaaattgatctttttcactgtattgatccaaatgattccaagcataaaagaacggacagatcaattttatgttgtttacgaaaaggagaatctggccagtcatggccaaggttaacaaaagaaagggcaaagcttaattggcttagtgtcgacttcaataattggaaagactgggaagatgattcagatgaagacatgtctaattttgatcgtttctctgagatgatgaacaacatgggtggtgatgaggatgtagatttaccagaagtagatggagcagatgatgattcacaagacagtgatgatgaaaaaatgccagatctggagtaaggaatattgtcatcacctggattttgagaaagaaaaataacttctctgcaagatttcataattgagagaattcctgagttgatagctctaaaggcagatatgctgtatttgcctactttaacccatttttcaacctgtttgttttttaaaaggcttcactaagggttgatatgtaccattgtatggggcaattttaagtcagctaaggcaataaccttatgcatgaacatttcccagactttcatgaagctgttgaggtcctaggcaattaatgcagcagttgcgataaataaaaacatctcacctaagtctccttttcttcataacatagatactgacatgataggaagctctcagcttagggaaagagaataaattttagattatagaacatggattcaaaagtgactggaacaaattggctgacaccttactggtaacctgctattcttctggtgttatccttcaggattgttccactaaaatttatttttcaaaaaatttacttcacattattctatgtaagtgatgacttgtccaatttgttccagtcacttttgaatccatggctggtggaagggag

SEQ ID NO: 108845 - DNA, 1037 bp, Homo sapiens
  misc_feature (1037)..(1037): n is a, c, g, or t
tcaacaaagtgagttatcatttgaaccaagtgccagaaccttgtggcattatgaactgtcataaaatgtggttaaaagtcttagtagtctgcgcggtgcattctggggcccgaggtcgagcccgccgctgccgccgtcgcctgagggaagcgagaagaggccgcgaccggagagaaaaagcggagtcgccaccggagagaagtcgactccctagcagcagccgccgccagagaggcccgcccaccagttcgcccgtccccctgccccgttcacaatactccattcagaagagagaagaggggagtgactttgtctttggaaaagcagcctgcttctgcaaagtggtacgatcgaagggactatgtcttcattgaattttgtgttgaagacagtaaggatgttaatgtaaattttgaaaaatccaaacttacattcagttgtctcggaggaagtgataattttaagcatttaaatgaaattgatctttttcactgtattgatccaaatgattccaagcataaaagaacggacagatcaattttatgttgtttacgaaaaggagaatctggccagtcatggccaaggttaacaaaagaaagggcaaagatgatgaacaacatgggtggtgatgaggatgtagatttaccagaagtagatggagcagatgatagcagatgatgattcacaagacagtgatgatgaaaaaatgcaggatctggggttaggaatatgtaatcactggatcttgagaaagaaaataacttctcggcaagaattcatatgagagaatacgagtgatagctctaaggcggatggcggattgccgactaaggcattgacacctgtgttgtaaagggtcacatggggtgatggcctgggtgggattaaatcgacaggagacttgtctgacatgcggcatcaaagggggacaggttagggaggaatggatagaagccggtcaataaggagagttggaaaggagataagagggagggagagttgatgcagaatgtgggtgtagttggccttggtttggn

SEQ ID NO: 108846 - DNA, 417 bp, Homo sapiens
tctatagaaaacagatataaggttcccaaaaaaattaaaaggcagaacgtactgatcatccagcaatcccacttctaggtatgcagccagaggaaataaaatcactgcaattaaagttatctgccctcccacgttcattacagcattatcacagaattagaaaaaactattttaaaattcacatgtaaccaaaaaagagcccaaataggaaaagcaatcctaagcaaaaggaacaaacctagaggtatcacattacccaacttcaaactataatacaaggctacagtaaccaaaacattatggtactggtataaaaacagacataaagaccaatggaacagaatagagaaccagaacatctacagccatctgaattttgacagaaataagcaatggggaacagatcccccattcaat

SEQ ID NO: 108847 - DNA, 328 bp, Homo sapiens
tgggtggtagtctcctaaaacctgcttaaaggtatgccaaaggcataatgccagcatgtaaaaattcacgagggccccctagaacattgttacatcagttatagactttttttaagcaactcatatatttttttaagtttgcaagctagagcttatagaagagatctactattttatttcctctgtccacttttacttatatatgggatttggaagttttctccaaccttacccagggtaccttttatccataaatgctttcttcgtcatatcccaacatgtagaccactgcctaccctgtttcagttcaatgtccttttgttcagct

SEQ ID NO: 108848 - DNA, 596 bp, Homo sapiens
tgatctcactggaatcaagattaaagttagattttaggttggctaaggaaggtgagcctgtattttcaaaggatatgactcattacctggtcttttttttccccccgagtttccagtttaaggatctgattgatgatagttcctttggttttgaacctttctgcttttgtgttcagtttgtgcttctagaatatagaatttaattgacagttgtactttataaaaaagctcacttggttacttaagatgctatctgcccaatatatagccagtgtcttttctattagagagtagcattcttattccattaacgtgccatgtccttttttttcccatttgactttttataaattccctagaggtcttcattaaacatttatacacttaatattccacaactactctcagttctcattcaatgtctaagaaaatatagatgtatatagtaaaatattttgttgttttacttatttcactctcctcttgtcagtttctagctttactttcatttaccacataccaatatgatagcctactaattttagatgaacttatttgtgtttgtgaaacttgatctcggtcttagaaaattttta

SEQ ID NO: 108849 - DNA, 711 bp, Homo sapiens
gggaaagctctcagttcggagaagtgtttaagatgatgcaggctgaagagacacctaaaactcctttgcagaaaagcatggacaggctaggaaagcaactgacactcttctcctttggcataatcggtctcatcatgctcattggctggtcgcaagggaaacaactcctgagtatgttcacgatcggggtcagcctggctgtggcggccattccagagggtctgcccatcgtcgtcatggtgacgctggtcctgggagtgctgcggatggccaagaagcgggtcatcgtgaagaagttacccatcgtggagactttaggttgctgcagcgttctctgttctgacaagacggggactctgactgccaatgaaatgacagtgacccagcttgtaacgtcagatgggcttcgtgccgaggtcagcggagttgggtatgacggtcaagggactgtgtgtcttctaccatccaaggaagtcattaaggaattttccaatgtctcagtgggaaagttagtggaggcgggctgtgttgccaacaatgcggtcatcagaaagaacgccgtgatggggcagcccaccgagggtgcattgatggccctggcgttgaagatggacttaagtgatattaaaaattcatatataagaaaaaaagagattccattcagttcagagcagaagtggatggcggtgaaatgcagtctgaagactgagg

SEQ ID NO: 108850 - DNA, 331 bp, Homo sapiens
atttatttgtgtttttctctcagagcttaatccatgaggagtacagagtggtggtagggtggaggctagcctttattttgcattgctctgagaagtgttgcgataatgggagaaatttggtgtcctagaaacgttattattataaatgaaaaatcttgaaatacgaggaaagtgaattttttaaaactgggattagaaactcagaacaaaatgagctggacgcgctggtcatgcctgtaatcccagcactttgggagtccaggaagggcggattacttgaggtcaggagtttgagaccagcctagccaacatggcgaaaccccgtctctat

SEQ ID NO: 108851 - DNA, 344 bp, Homo sapiens
ctgcatgctggatctgttcatttctgatagatggatgttgaagtttctaactgtaatagcgggtttatctgttttccttctatcagtttttgcctcatgttttgtgatgctcttttgttagggatatacacattaaggattgttagagttttttggagaattgaccccgttatcattatgtaaggcctaataactttccttactttgaagcctgctttgtctgaaattaatacagctacttgggtatagctacttgtcttttcattagtgttagcatcatatatattcattcatttgttttttattctatttatatctttatgttaaagtgggtttattataga

SEQ ID NO: 108852 - DNA, 366 bp, Homo sapiens
ccattctaggccctcagagaaatccaggagttggtattacctttgttagactgttggtagtttttctcttcttggggtttatcaccgtccaagttctgagtggtttgttcaccaagactcatctctattgagtccattttgcacttctcatttccttggaattgagcttccttagggaaccagagttcacctctaaccaaatgacttgattatggattacgaatacatatataattgccctgtttttcctttcaggctgagttggcaaaataggaaggtggaaattattttggatttttgctcttcttgttgttagatggagtctttcactctgtcgcccagcctggagtgcagtggcacaatctc

SEQ ID NO: 108853 - DNA, 280 bp, Homo sapiens
taaaaatgaacaaagttgagcctgtttctttgaggaaaacaattgacagtacttattgccaatgatgaaatttgagctttcaagcattttggaagactttttgcatctgccacataatcttgccagcttcgccaatacttaaagactttcctgatgagatcagagtgacagtgatgaaagttatatgagaagatctgccttagttttgaaatgaccaatggtataacagaatcatacatgggtaggccaggtgcagtggctcacgcctgtaatcccagca

SEQ ID NO: 108854 - DNA, 2131 bp, Homo sapiens
cctgcgagtccgtcgcgtgctgagggagacgcaggaggtggagccggccgggtgctcgagggaaggacgcaggaggtggagccggccgggtgctcgagggaaggagactggaagctggttccggcgtgagggagagtctgaaaaaggggagcgcggagaggaggctggaagaggaagatgcctagcacagaccttctgatgttgaaggcctttgagccctacttagagattttggaagtatactccacaaaagccaagaattatgtaaatggacattgcaccaagtatgagccctggcagctaattgcatggagtgtcgtgtggaccctgctgatagtctggggatatgagtttgtcttccagccagagagtttatggtcaaggtttaaaaagaaatgttttaagctcaccaggaagatgcccattattggtcgtaagattcaagacaagttgaacaagaccaaggatgatattagcaagaacatgtcattcctgaaagtggacaaagagtatgtgaaagctttaccctcccagggtctgagctcatctgctgttttggagaaacttaaggagtacagctctatggacgccttctggcaagaggggagagcctctggaacagtgtacagtggggaggagaagctcactgagctccttgtgaaggcttatggagattttgcatggagtaaccccctgcatccagatatcttcccaggactacgcaagatagaggcagaaattgtgaggatagcttgttccctgttcaatgggggaccagattcgtgtggatgtgtgacttctgggggaacagaaagcatactgatggcctgcaaagcatatcgggatctggcctttgagaaggggatcaaaactccagaaattgtggctccccaaagtgcccatgctgcatttaacaaagcagccagttactttgggatgaagattgtgcgggtcccattgacgaagatgatggaggtggatgtgcgggcaatgagaagagctatctccaggaacactgccatgctcgtctgttctaccccacagtttcctcatggtgtaatagatcctgtccctgaagtggccaagctggctgtcaaatacaaaataccccttcatgtcgacgcttgtctgggaggcttcctcatcgtctttatggagaaagcaggatacccactggagcacccatttgatttccgggtgaaaggtgtaaccagcatttcagctgacacccataagtatggctatgccccaaaaggctcatcattggtgttgtatagtgacaagaagtacaggaactatcagttcttcgtcgatacagattggcagggtggcatctatgcttccccaaccatcgcaggctcacggcctggtggcattagcgcagctgcttgggctgccttgatgcacttcggtgagaacggctatgttgaagctaccaaacagatcatcaaaactgctcgcttcctcaagtcagaactggaaaatatcaaaggcatctttgtttttgggaatccccaattgtcagtcattgctctgggatcccgtgattttgacatctaccgactatcaaacctgatgactgctaaggggtggaacttgaaccagttgcagttcccacccagtattcatttctgcatcacattactacacgcccggaaacgagtagctatacaattcctaaaggacattcgagaatctgtcactcaaatcatgaagaatcctaaagcgaagaccacaggaatgggtgccatctatggcatggcccagacaactgttgacaggaatatggttgcagaattgtcctcagtcttcttggacagcttgtacagcaccgacactgtcacccagggcagccagatgaatggttctccaaaaccccactgaacttggaccctttctagtctcaaggggattccagccttcagaaggttcttgggatatggaacaggccgtgcacaactttgacatctggtcttgctccatagagcacaactcaagatagaccatgagacagcttgagcctcaggattcttgttcttcctcttatcttccttttgtggtttttaatttgaagaccccagagaattccattacataatgattttgcccttgttataaatgttaccctagg

SEQ ID NO: 108855 - DNA, 822 bp, Homo sapiens
aactctgtgctccactaatctgtaccctcctggagggcaatgactttgtcttctcaacttgacatttctagcccagctcagcacctggactcactatccacactgtaataccacaaaggcagagaacatattcaccactgctattgccattgcctggcatagggcctggcctgtaggaggcattcatttcatatttgttgaaagcattaataatgggtgtttttaaatatcatactgtaatggtttagctcaggaattgcaacctgaagggcatcatcaagccatagccgtcttttgtatggcctcatagtattttaagttttttgaatttgatacctttggatagagcatgtgctctcctgtttaccactgtttaattgcacagttaatccactctgattatcatgcccttgacctccttactcatctgcgactcatctggtcctgggagatgaggttgggggatgtggggaggggcagtgtatttctttgtttaggctgccataacaaaataccatggaccaagtggctttaacagcagacatttattttctcatggttgtggaggctggaagtccaagatcaaggtgacagcagggtttgtttacctggaggcttttctgcctggcttgcagatggctgcccactcactgtgccctcacacagtcatccctcggtctgtgttgtctgtgtctgaatttcctcttcttatgaagacactggttatattgcattagggcccatccccgtgacctcatttaatcttaattacccatttaaagaccctgtctccaaatatagtcacattgtgagatactaggg

SEQ ID NO: 108856 - DNA, 393 bp, Homo sapiens
tttctgtgctatgccggcctggagaatcctaaagagcttttagactttataatctcaagaatacacaagcacacgaacctgcagcaattatacattaatcaaatgcaatccatattaagtatatcaaaattctgctcattgtgcagtagcctatttaccgtaatatacatgtaatgcatacagagccaggaagtttctgaaattcacaaataaactttgtctgttctttccatccctcttgagtagttggcataacaaacagtataaagaatagcgtgatttgatataaaatcaaagccacttaaaaatacaaatattagtaatcctactgaaaattaaagagttacttcctcccttggaataacagccatataggtccataatcccttgagg

SEQ ID NO: 108857 - DNA, 560 bp, Homo sapiens
  misc_feature (535)..(535): n is a, c, g, or t
  misc_feature (550)..(550): n is a, c, g, or t
gtagatgtgattagcatctacagttagttgactttaagtaaaggagattgtccttgataattttagtggccctgattcaatcagttgaaagatcttaaaagcagaaaacctgaggtttttcttttaaggaggaagacatttcacctgtggactgcagcatcagcttctgcccaagagattccatattttccgacagattctggacctcccaagacagccccacaatcacataagctaattctctgcaatgaattaatttaaatatcagatcactggtgctgtttgtttctctggtgtaaccctgagtatatgttaccctaaaataggcaataaatgagttagaaatttgctataccctcttccttacgtgctatctgatattgcatttcattatgtatccttcttagtgttattaaagtttagagagtgtgtaagtgtgtactgaaaaaaaaactcatttctgtaaaattgtcttctaagtatacagactttttagagaagtaaacagcagacagttaaaaaaaatgctactttnttagagcaaaaccanttttaatccc

SEQ ID NO: 108858 - DNA, 338 bp, Homo sapiens
tccagctgcctgcaatgttggacttgcttctaatttgtcactgcattccctgctcttctatagggatcagcaccagggttagaaaacctctgaaggccgaggcaagtggatcacctgagctcaggagttcgagaccagcctggccaacatggtgaaaccccatctctactaaaagtatgaaaactagctgggcgtggtggcacacacgtatagtcccaactactcgggaggctgagacaggagagttgcttgaacctgggaggcagaggttgcactgagctgagatcctgcctccaacctgggtgacgagagtgaaactcggtctcaaaaaaaaaaaa

SEQ ID NO: 108859 - DNA, 447 bp, Homo sapiens
tcaacttgagcacagcaccagggaggtcagcaagagtgtcccaaacacaacagcaggaagagggaggtgtcaggaatctcgtcagggcccacctcttttctgcaatacaaccgagatcttcctggagattctcagtggagttttggcagcacgagtaatttgtttggcagacagaagacgaccgtctgaggggacgaggtgaataactggaagtccaaaggaggacactggtctccttagaggattattttgtgaaattgcaagacaggcatgagctgcgctggatggtctgagataatttgtggaaatcacacaaacggagccagtgttagcagaggacgaggaaatggcttcctcatacagaaccctttgtcccgagatgggatgctagccacgctaacaggatccttccccagaatggtcttgcagtttccaccctccggaatg

SEQ ID NO: 108860 - DNA, 302 bp, Homo sapiens
gagacagagttttgctcttgttacccaggctggagtgcaatagtgcaatcttggttcattgcaacccccgcctcctgggttcaagcgattctcctaccgcagcctcctgaggaggtaggattacaggcatgtgccactactgcccagctaatttttttgtattattagtagagatggggtttcttttttttttttttttttttttatgagacggagtctctctttgttgcccaggctggagtacatgagctatcatgacgccactgcactgcagccagggcaacagagcgaggatctctggg

SEQ ID NO: 108861 - DNA, 449 bp, Homo sapiens
tactttcccaaggacaaagaatgtgttccctgcctacttagaaggatgttctttcaacatgtctaccttcctggtgggaaccagtttcagaagtctgtaatctcatcaaaggaagccaagtggcagagacgttctccacaggggaagctaatcagcaaggcttcctttctttcttccaagcccttttcattggttttcctgggggctagcttccaacctattgaaatttcccttgatccctctcaaccttcaattagatttgaggaaatggcagtttcccttggtttctttctttcttttaaactcatccttttgaatcaaagagtttagctaggtcttagcacaatgcaacgtcagtctgacatttggcattttgcagtcttggacattggtttgaaacaggtctggctgcagaggcctccaaaatggttaccttcattaagaaaatt

SEQ ID NO: 108862 - DNA, 302 bp, Homo sapiens
tgagagaaaggcgagacaaaaaacaagctaatattatggagtcattgcaaagtaacttttaggcaatgttccgtcatttgtacatgtttccatattgcacagttttcctacttattttttaagtgaatgtatacaaggctgggcacagtggctcacacctggaatcccagcactttaggaggcccagaagggcagatcacctgaggtcaggcgttcgagaccagcctggccaacatggtgacaccccctctctaccaaaaatacaaaaattagctgggcgtggtgatgcatagtagtcccag

SEQ ID NO: 108863 - DNA, 720 bp, Homo sapiens
gcatctgaatattcttaaaccgatatctacagttttccatattgttttatgcaattaaaaaataggtggcacaaataattcatgtactttcttagtttattgttcaattatctttatgtcctttgttagatgacacagtaacatgtttctaatgctagccccttcaagattgaccttctacttcacaatagtatttcaaatcaaaacaaaagaaaatctctcttggcatctttagattagtcacatgtcagattctttttggacttaggaaaacataccaccacctgtaagaggagtgtgctgaagtaagctttgaaaggcagagctgtggactttttactggaccaaatgtttaatattaagcatgggaaggagagattttaggcaactggtcattggctctattgttacagaaagggacaataaaccaaattattacggaaataatacttattttgaatatcagttggtgctaaccaaagttaaaatctttcattcttataaagaaggcaaggtaaataccaatgagctatacaaaatttagacgttcccaaaataccaacaagcctggttaaaagatagatatttgtactgctaacacctgtcccacaaaatgtacacacaaacagatgtatataatataaaatatgtatatttatatactgaaaaattatgttttacaatgttagtattgatagaatgtataggtactatagcaaa

SEQ ID NO: 108864 - DNA, 662 bp, Homo sapiens
acttttttcaatacgtaaacatatatcgcaataatatataaacgtaagattggataaacatatataacaacaacaatatataaacataagattggatgataaaaattttaattactttgtaatgataaaagtctgtagaggaaaccatgattatgttaaaaggatgttggttgtgcataacaggggcaagttgaaatttgtcttactaatccaaggtttacaggtaagcttattgagtgttactcctaagacatgacaagtgataattattctttgggccttttgcgaagtaaaataatgcatgaacatagagtttaatgtgtttgggcaacaccgcgagccccttctcccaggacggagctgggcctctgtgccttttgagttgttcctttgctcaatgagtgttccacagagaatgggacagaacctgctccctgagcacaagctgagggaggtgaattaaagtgcatttgcattcatgaggaaggatctgctcatccaggtgctctgtcctgtcgccgttagacgctccttggtccctcaaagagatgtcactctcacggccactgcattgcaccacctgtgagatacctttggaattgtggaaagttcagctagaaagttgtttctttttaatatttattcttttggtcccaaacctt

SEQ ID NO: 108865 - DNA, 857 bp, Homo sapiens
tgagctctgtgtctccagcacttactgttcatattcttatgataggttggcataggaaagaggagaagagaggcaacctttaaggagtaaggaggagagagtttgttagagcaataaatgaatgttcttatggattcttgtagtttataaagttatttggaagaccagcttgagtttgccgcttactcttagtggcactcaagtgtagctgtaaagactgggatctgtttttaagtgcctagaaaactctgtgtttatggaatctgcatctgttggtgaagtttagctcattcatcttagacctcaaacagccctgaagaacttaatgcttacatctggttaaattctcagtgtgtagtttgtacgtttttccacagctttaagtaatgatagagaagaaaagaatagagaatgaatctcagagaaatgaaagcaacttaggaacagaaacagagaaacagtaagaaatgcatttttcagagactgggccaaaggattcatcatggagttttaacttctagcagaaagttgaggaaaaggaataagactcttttctgaaccatacaaagccccgcagctcctgtcttctggctgacatagcaccatctttacccatcacacctgtggcctggaaggtagcctctctgtacctgaatttcttcatctgtaaaatgggattaaaaaaatcactgccctcatctatgtgaggatcacgtgaaggccaaatgaaattacaagcctgagacatctttaaatgttgaaagaagattacaaacattgggtaatcatcctctcctatgtgtatcattagacaaccttgctttggattatttgttttgttggccattcttagatca

SEQ ID NO: 108866 - DNA, 804 bp, Homo sapiens
atcttttgaaaaaagaatagaggactttaattgcaacttaaataattttttttatttttccctcagaatataatatgttcagtgggcacgttaaactgatgataatgtacactgtgtctaaacgaagtaaatctactttagcttatactaacagattcaatttgaaattatgtttaggtaaaatcagaattaaatgtatcttgatcacagggattaagtacagtatcttactgtgtaacttgtgtcacttgtgtatctggtaggagtttatcttctacatggagtttcattactgcctctccattgataaatgagcatctatagatgtagtttcacgggaaaaaatattaaatttatttgctgtcagaatagttttactgttacaatctatgtacccaggtattcacttctgagaagtggatactgagttttcaaatgctgataacttttagttggtagtatttattggataggggaccaaactgatttttttatgtgttgaattggcacaaatttgtgaaatagccactcagaactatcagtttgaatagaaatatatgataacatttgcctaaatagatcttctatatttccaaaatttgaaaacttgtataagttttacctaaaagtgtaaataatcaaatcatccttttaatattattctgaattctaaactggaatgtcaccaagtaactttgagtaatgaaaatccacatcaagaagaatataactatttgtccttaatttctttaagaatgtaaaaagcttttaaataaagttaaaaagacttccagtaataaaagt

SEQ ID NO: 108867 - DNA, 402 bp, Homo sapiens
gtctctactaaaaaatacaaaaaattagccgggcgtagtggcaggcgcctgtggtcccagctactcgggaggctgaggcaggagaatggagtgaacccgggaggcggagcttgcagtgagccgagatcgtgccactgtactccagcactccagcctgggcaacagagcgagactccgtcataaaaaaaaataaaaaaataaaaaaaccccaacaaaaccaaactgagagcttctcaatttgtagtcagaaagattaaaaaacaattaggctgggtgtggtgctcatgcctgtaatcttagcactttgggaagcctagctaggaagattgttcaaggccaggagttcaaggccagccctagcaacatagtgagaccccccctcatctccatacaaaaaaaaaa

SEQ ID NO: 108868 - DNA, 2331 bp, Homo sapiens
  misc_feature (45)..(45): n is a, c, g, or t
  misc_feature (358)..(358): n is a, c, g, or t
  misc_feature (617)..(617): n is a, c, g, or t
  misc_feature (643)..(643): n is a, c, g, or t
tccatgatccagactcagcagttgtcgcaccatgtctgacaaacnctgtattccttgacagagctttgataacgtaccatatgcagaaggagttattcctgataaggctaaggcttgtctctgttggcaccagctaatgcaatggcaggtcttctgcttggtgttgggctcctgcctactcctaacccacttactcagactggcgctgttccaccggctgctttgggggctcctactcttgttcctgcccttgctgcgcttgggcttcctggagcaaacttgaactcaatctgttgccacagatagttgctgaagcttatgagcactgttggtcccaagttgaagcatgtagctgctngtcttgtttcaccaagtctgaaatcggatacctctagtaaagaaatagagaaaggggccccacatggtggctcaggccagtaatcccagagctttgggaggctgaggagggtggatcacttgaggtcaggagttcgagaccaacctgaccaacatggtgaaaccttgtctctactaaaaattcaaaattagccgggcatggtggcgcatgcctgtaatcccaaatacttaggaggctgaggcaggagaatcgcctgaancctggaggcggaggttgcagtgagcngagattgtgccattgcactccagcctgggcaacgagcacaaaactcttggctcaaaaaaaaaatagaggaagctatgaaaagagtacaagaagcacactgcctaatttcggctgctatagaaccagagaaagaaaaaagaaggcattcaagatcacattctaggaggaggaggactctcatcttctagacacagtcaaggagcagatcaagagagtgattacattgtcagtctaggagtcgttgatgattcaaaagcccaagacagagaagatctcattccagagagagaggcagaaggtcaaggagcacatcaaaaacgagagacagaaagaaagaagacaaaagaaacattcaaaaacacccccagaaagttacagcacggctagacattatagaagtacaaacagagagacaacaacgaagaagcaggagtggaacaagatctcctaaaaagtctcggtgtcctaaaagaaaattgtctctctcaccatcccctgggaaacataaaaagaagaagaaagataaagagagaaataggtatgaaagagaacgatcaacaagcaagaagaagagtaaagatagggaaaaggaccaggaaagaaaatcagagagtgatacagatgtaaaagttacacgggtttatgatgaagaggaacaagggtatgacagtgagagagaggaaaaaaagagaagaaagcaatagaagcagattcccctaaaacaaagaaacgttctgtggaaaagggaactggtgattcactaggagaacccatagtgaatgggaatgatcatcatgaagaagacatggatatgagtgactgaaaattgcctctatgggaatccagctgtatacatgcatcagtgtcattgctttgtgtaatttctgaatgttgtatttgttcatctcaaccctagatgtatatagctctgagttattaatggttataaagctcttgttattgatattacctatttacatcaaaaagcttttagaaaatggtatgatgtaagcaattcttgtcatggtgaaatctgatggtgtaacccgttttactattggcgctgcttcataacaaaaatgaaaagctatatacatctacagccagaatggattgtttatgtcatataatttcctttactaagttcacttacattacttacagagttttattcattgccataatagagccatgtaggaaatgcactgactgcatgttattgtggcaagaatatcctaaatgtcattaaaatcctccaacatgatggatctacttatggtcttgtttgttgacatgccaaattaacatagttccatctggaaatgagcatttgaaatgataatccggctgggcacagtggctcacccctgtaattttagcactttgggaggccgaaggggggcagatcacctgaggtaaggagttccagaccagcctggctaacatggcgaaaccttgtctctactaaaacacaaacgcgcgtgcgcgcgcgcgcacacacacacacacacacacacacacacacacacacacacaaaattagccaggcatggtggtacatgcctgtaatcccagctactccagattctgaggcaggagaatcacttgaacccaggaggcagagtttgcagtgagccgagattgcgctactgcactctagcctaggcgacagagcaagactccatctc

SEQ ID NO: 108869 - DNA, 310 bp, Homo sapiens
gaattccagagactgagccaaagaagccagagaccaaggagtccctactgcatgctcccccaacgcaaaaaccccaaggaggcaaagcacccaaaggccttagaatgagaagagtgcttacccctgacatgggtggggcactgatggggaaaggacagtggggagttttacagaatgagaagagcgcttacccctgacacgggcggggcactgacggggaaaagacagtggggagttttctaggttgctagaaatgttccatgtcttcatcttggttgtgctacttgagtacaaaaactaacctgcctgg

SEQ ID NO: 108870 - DNA, 347 bp, Homo sapiens
gtggttcactttggggcctcagcagtcatgggcagacagtggctggggtcactgcaaagacttccctgcatctctggcagttgatgctggctgtcatctgagacacctacccagggcctctccctggggcctgggctcctgcttagcttggttgggaggctccaagaccaacatcccaagaaagatgagacagaagccagatcacctttttgggcctggcttcagaagtcacccagcatcacttctgctgcatttatttcttagaaacacagaatatcagaccccatctcttgatgggagggggcctcatggtttgtagacatgttctgaaactccactctgcccgg

SEQ ID NO: 108871 - DNA, 458 bp, Homo sapiens
atgaccagaatgattgccctgatgtcaaggagggagcaactggtgtaagaataaggatgctttatgtggttcactgccttacttattaaaattcactttatttattaagcaacatggccaggaaactggctcagggagtccaagtgaggctttcctagttgatagacaggaaatgggggatccaggctagagctcctggctcgaggctgttttcacgttgcccagctgtctctgaattccacattcctcagcagtcagccccacaactgccgacctcggggttggacatgaagatcattctttgggccaacagtgtagcagatttctaggtaaccaagagaataggaaggtacactatttcgatgttggcgggagctgtcctaacagacacgtgcctggtgataatgccgacctctccttttataggcctagtgttgggctggtgctagatctgatct

SEQ ID NO: 108872 - DNA, 3510 bp, Homo sapiens
caggaagaggtatttcttggggatgctaccaaggcagagactgtgaagaaggaagaacgttgcttgggcaaaaggagcatattctcaggagacggggcccctgcctgccacaccaagcattaggccaccaggaagacccccatctgcaagcaagcctagccttccagggagaaagaggcccctgcagctccttcatcatgaactggcacatgatcatctctgggcttattgtggtagtgcttaaagttgttggaatgaccttatttctactttatttcccacagatttttaacaaaagtaacgatggtttcaccaccaccaggagctatggaacagtctcacagatttttgggagcagttccccaagtcccaacggcttcattaccacaaggagctatggaacagtctgccccaaagactgggaattttatcaagcaagatgttttttcttatccacttctgaatcatcttggaatgaaagcagggacttttgcaaaggaaaaggatccacattggcaattgtcaacacgccagagaaactgaagtttcttcaggacataactgatgctgagaagtattttattggcttaatttaccatcgtgaagagaaaaggtggcgttggatcaacaactctgtgttcaatggcaatgttaccaatcagaatcagaatttcaactgtgcgaccattggcctaacaaagacatttgatgctgcatcatgtgacatcagctaccgcaggatctgtgagaagaatgccaaatgatcacagttccctgtgacaagaactatacttgcaactctttttgaatccatacaggtcgtctggccaatgattcttttacttacctatctgtctaccagtagcggtccttgcccatttgggaaactgagcttctttcttctgcactgggggactggatgctagccatctccaggagacaggatcagttttacggaaacaactcagttagtatagagatgaggtccgcttctgtagtactgagcatttctgactgatcaaaaaggcctagtctgttgacagggtttgttttattttagcctcagagtataccatactactagggagtaactgtagagtgagaaattataaacattatttagggattaccatggtggaagagggataaacataggtcctgtgacttcgtctctgttctcaagggaaccccattcacatgcccctcctaactccacaagcgagggtagcagaggctctcctcagtctgaactaaggcttggccttggggagggctcctagtgctgagcttggagcagcacggacagcagcattgtttatgggaatggagagaggtctgggcaggataggaaccttcttggagacccctttgaagaaaaccaggcagccaagggagccaaacacactagatttctgttcttcagcaaagccctgaagagacacttaagctaaaaattcccttgtcatatttctgaaactccattataacatatgtaactcctttgtaaccaaaatttaggtaagcaggcttcctttgctctgaaggttttgagtacctggctgtatttgttgagtatttttaaaattttggatagtctcttaggcaacaataatcacaatatattcatcccttcagttctggagaaagcctgataccagcacagcctactgaccccaaggagcctggcactgattggcatcacattgatctaagaactggtccagccgacgaagagtaggaaaagagaagggctgctcagggaaacattggctgggggcacggaataagcacatagtaaaaagggaacatcagggtcaaatggaaatcacctgagacaggaaacagggagttcatttggccacactggaagaaaggcaagaaagaggaagacaagtcttggggtaccctggctgttctccacactcacaagacatcagctatatactctgcttggtgcataagagagagaaaagagatgccttttgtgttttgagtaagaataattaaaccataaggaagaccatgtataaaactgatggaaataatagtcaccaaagtacagcacataccattttgtgtctaataacaatgtagcacagtaatgactgtacatgtcattgtatgtataccaaacaagattgttgtaaatcatattttttattacaacactaagttctgcttctgcattcctaggtttcatcatttttggctccttagcatggccacttacaattttttaacatgagataacacatcaggtgtcagaacttgcttgaagggaattaccagaagtaatttgtgtttgagatggggtggaaattggaattatattagtagccggtggagatacaagttctctgactgtgttgggaaaggataagtgctaccgttgagaagggaagaaaggctgagtctaggtggagaaaaatatcaacagaactctagccaaaggcaagccccagaactcagacaacagaaaggaaatcctaatccttctgttttgagaagagagaactgtagttgcttcacttcctatttcatgacagaataactgcaaacttttaagatcaggaaatgtagacatctagtgatttctttagtagacagtttaatttcccccaagattaggagacacttctgtgcaggttctaaaaggagcccaatggcctggggtgggagtggggagtagatagggaatatgtgggatttggtttaagttcatcattgggagagttcctggatccttgcaagcttagataaatgtgatctttattagatagcagtggcatgcttttaaaaaaaaaaaggcaatgaaaatttagcaagccactgaatttgagttttcactttgtttctaatatgctgtgtgaatcagtacagttttcttaccctttcttggtcttaatttccttactgataaaatggggtagtaatacctatctcaaaaaatattgcacatattaaataacattcctctatgtatctcaatggcattagacattaggagaagcattttgtggaggatttgaagttgagatcttcatccaagaagtagcttttcaatttgctagaagcttaatgtaggcaagccacttcatttttcagaacttgtttactcatttataatatgggaataaaaatttgtgcaagtcagagaagggtgccttaaaaatgttgtggccaagccacatgagatcaaagacacacttttcatgacctcaaatgtgggcccagcctaggtcagccaacccccatccaacccttagactcacgaacaaatccacctgagatcagcagagccaccctagatcagctgaaactctaagcacaaaaataaaaacttatcactgtataccactggagttttctggttatctctcgtatagcaaaatctaactgatgcaatctccatctggccttcatccttctccctttattgtcctttcgtgtattgttcatccagcaaccaggatgatcttgttaaaacattaaacagattctgtcactctt

SEQ ID NO: 108873 - DNA, 738 bp, Homo sapiens
tagccacaaataaatggagatagccaggttgggcatggtggcttatgcctgtaatcccagctctttgggaggctgaggcccaggagttcaagactggcctgtgcaacatagcaagaccccatctctacaaggaaaaatgaaaattatcccaggcatgatggcacacacctgtagtcccagctacttatgtggctaaagcaggaagatcacttgagctcaggagttcgaggctacggtgagctaggattgcaccactgcactatccagcctgggtgacagagcaagacgctgtctctgaaaagtaaaataataaaataaaaggagatagccagcaataggagaatagaatataatccagctatttagaatgtttccataattgatgaagaagtccataccttataacacgtgtgaaaaatatatagaaatatacacacattgtgtttgcagctgtgtaaaaaatacatagaaaaagtctaaaaggggctgggcacagtggctcactcctgtaatcccagcactttgggaggctgaggcagacagatcacttgaggtcaggagtttgagaccagcctggtcaacatggtgaaaccccatctctactaaaaataccaaaaattagctgggcatggtggtgcacgcctgtaatcccagctactcgggagactgaggcacaagagtgactggaagctgggaggtggaggttgcagtgagctgagattgcgagactctgtctca

SEQ ID NO: 108874 - DNA, 785 bp, Homo sapiens
  misc_feature (19)..(19): n is a, c, g, or t
  misc_feature (267)..(267): n is a, c, g, or t
attctagaggccgaggggngtcgacgatgctcatgtacgtttatctgtattcttgtgtctattatgtcttgtggtcacgtgatggaggtagcgctcgagatcagtagtatcttacaggcatagggatgtgcctacaacaccaagttattacacggcacagggaatagatccgatgtcgttttctgcaacccaaattggagactgagagtgtactagtccgatcatttcacatgagaatactacttggaacgaccgtgtatcaccagntggtgccatacagaatcctacacttctaaacgttcgcacgttacccgatatacatgtaaaaactaaaatgtgtaaacttctcagaagaaaacatctgtgtagatctttgtaaccttggcactggtttcatagtaccaccttaaaagcacaagtgacaagaggaaatataggtaaattggactttatcaaaattaaaatattttgtacttcaaaatacgccatcaaggaagtagaaaagtggccaggcatagtggctcgctcacacctgtaatcccagcactttgggaggccaaggtgggagaatcacctgagcctaggatttcgagaccagcctaaacagtgtagtgagacctcgtctttataaagaatttaaaaatttgcctggtgtggtggtgcacatctgtagtccaagctgcttgggaggctgaggtgggaggatcactggtgcccaggaggttgaggctgcagcaagtggtaatcatgcctacctgggcatcagagtgagaccctgtctccaa

SEQ ID NO: 108875 - DNA, 511 bp, Homo sapiens
aataaaacaaaagaggcctactacattatatttaagaaaactgtataatgtggaaaaatagaaaaccataatttatcatttatattttctcaatgtaaaatatttagcctttcactctaggttttatattataaaaacatgtatgctcagagacttaattagaattagctaacagacatgaaatataaattttttaaatactgcacaatgttacatatatttatatggatatgcagtacagatatttttattataataaatcaaaaataaagtgagtaaaaacatttcatcagaagttgtgctggaagaagctggcttttagttcaaacaggagaattacattattctaattgtatactcttactctaatctttttctttcggaattaagccaggatagtccaccagctttcactaattattaagtaaaaagactatttttaaaatttgtatattggaaacttaaggaaataaaactgaaaagcaactgaatctgaattttaagagatatt

SEQ ID NO: 108876 - DNA, 685 bp, Homo sapiens
ttgaaattactgggcttctctgtatcccccatatcagtgagatcaatggtccccattgcttttcaaatggaatgaaaaaagtaaagaattaactcattgagtgttttgccatataaaggtcacctacttaatatctatatcctttatcattttgttttgtttggttcttgtttttatgagtcttgtattatttttttgctttttgctattattatgttcttacttattaaaaaggtaattaatattttcatattgttagacacttaaacccatatttaagaattactgtgatctaattaatcaggccgtagtggttcgcacctgtaatcccagcctacttggggagggctcagggcatgagaattgcttgaactcaggaggcagaggttgcagtaagccgagatttcactgctgtactccaccctgggcaacagagaaagactctgtctcaaaaagaaaaaaagtattactgtgatctgaagtttttaagtcaggatttcattctagacaaatatcttaactaagcctataaaaaccttactttttatcctgtcagttccaagcaaattcaaactggttgtcacaatgctttacataatactaaattatctgtatacaaacataaacgcgtatgatttttattctctttaaaattcaccatttacatggaatataattatatttc

SEQ ID NO: 108877 - DNA, 471 bp, Homo sapiens
gtgaggagacaatcttgataggaagtttgaactttgaaataatattttattctaccacccatctaaaggctaattaatcacaaatgttaaaccaatcagaagaaaatgtttgttaaaccagaaaaggctgttacctctcacagacaagtttctttctttaggtcaacatatctggtgtagctgtcaggattcagagcaacctcctcacaccctggaccacctagtgatccctcctggactcagcactcagcaccagcacaaacctactgtgtttctctgtctccacatctttccctgagtacaaaaggtagccctgcgtgagtaggcatcttccatcatcagagatctccaacttgaagctggacctgcagccagttcacctgggttcttcaggaccaggggcaaggaaattgaaactcagtttaaaaagatcactcaaaaggctaaatggctacaagatgacccatggtt

SEQ ID NO: 108878 - DNA, 568 bp, Homo sapiens
aagctaaaatcaaagaacaatgaaggaagggagaagaaacacttttttctacttttatttggataccattacaaatttagttttagagcatattgatgaaaagaaaaatgaatctttaccataattaataatatataattaaatattttttatccactcatgtaactaaatgaaaaagaatgcataaaaacatgacttcttaaagtacatgcaaatgtatatgcatgttttatacataagcacattctatacaaaacataagaaaaagaaagtgttattttgagaatctctcctttactatatatgactataacatgttgggtaaatattttatttcataaaatagccataatcttatccattcaccatatattctctcttaatactatggtatgggggtcccctgcgaaggtcaatggatgggcccaaataacaaattctggcaatattaacttttggggtcccaaggttttttcccctcttttcacccaaagggaatccccccccccttttccccccccatggaaggtttccttggaaactggccatgggtcctttcccggattcc

SEQ ID NO: 108879 - DNA, 366 bp, Homo sapiens
ttctgttcttctctcactctcccctctgcagtatttgccgccgactgctgctccctccttcctcaatgctctccttccttggctctgatggcaccacaccctctggctttccctctgctcttctctcttctccttccttctcagtctcctctgtatgtcaccctctgttaaccagcccctcgattttggggcctttcaagtgtctgtcttggacctccttttcctttctctctttctcattctataggatctttctggaatatccatctctttccaagggctcaatacacatcgatgggctcccaaatttatactgccagctcagatttcttttttgagctccagatctatatttacaactgctta

SEQ ID NO: 108880 - DNA, 353 bp, Homo sapiens
acattcaggtacttaacatttttaattctcatcccaaatagtggaaaattgaatgtgagggctatctggctgtgacatgttaccccattgatccccagggttgattcagctcatctggctggctcggcaggtgtccccttcctccctctccactccacgtgcgtccctcctgaagctgaagctgcgtgcttggttgaagaggacaaccatcccaaatagaggaggactggtcttgggtcaagggtatacgagcagctgcgctcccctgctagaaccttcgagcaagctctcaaggtccaaatagtggaaaatgaaagtacaggttgattcatgttggcaggttttggtatcaa

SEQ ID NO: 108881 - DNA, 370 bp, Homo sapiens
gtgtgatctgttttaaggaactggaagaacgctactggtctgtagaagctgctgtccagtattgtgcacgttttggactccagagacagagaatgtagtagtagagaatttgcaaactaactctgactctagtaattcatatcaagactttatgagcagaaagttggtatacttgctttctacagcaccccaccccctctggtaaatttttttatgaaaagtgagactcatttctacttctacattgggtgatttacttaaatgaacctttccttcaaattgttgcactgaattcattacattaaattcaacagtttattgcacctctagtatttgcaatatgtcatggaggcagatcttggtttagagt

SEQ ID NO: 108882 - DNA, 228 bp, Homo sapiens
ttccgggttcacgccattctcctgcctcagcctcccgagtagctgggactacaggcgggcaccaccacacccagctaattccattttttaattgagttttttgttttgggttataggagttccttatcatggatggactttcataatctcttccctttctccaacccagtaaaacccatatatttattctttgcttacttttttgtgtgtaattgaattttttaaaat

SEQ ID NO: 108883 - DNA, 323 bp, Homo sapiens
aaatagggccaagaactgagtctgttgacctgccagttaaccaggagggagaagaaagaaagaacaatgttaacactacaaagttacaaaggtaggggattctcaagagaaggatgtatttcatcagctcagggagaaaagaatttcaaatcaaatgttgagaaaccaaggggaatgacttggaaagcaattgaatcaggcaattaggaagtcggcacttattgttaatacagcaaagtctcagatttgatatccaaatatttcgaatgtctttgtttgggtaagttagtctctggcatagctgagtgccctacacaatactg

SEQ ID NO: 108884 - DNA, 787 bp, Homo sapiens
gaaaaactctttttccctcctgcttttctgtctaagagtaggccataaatttccatttataaagttgtctgcctctctactaccaggaaaggatctacttggaaatatctcttgaggacgcttatgcatataacacaccttactagacaacccttatttatcatacgtttcctagcacctttcctaacttcccccctcacccctgttctccacaggaagccccataccccctttcctttgtgtagcctcttcacacttaatcacttctgttacgatggtataggtcaaaaattctaattgcctccttgagtcacatttatttgtgaaggctttgtgtacatatgtaattaaatgttttttctcttgtcagtctgtcttttatcagtttaattctcagacattgaaggtaagaggatagaggaaaagtgtttttccttctttacactattctcctcataaggtcatacttaaataaacttcattttctttttgttttgtgagatttttgtttcctgtgatcatccctactccattcttttccttgtttgcctttagtgagtccctgttccttgccatccaaggcttcatttacaaattatgcaaatattttacaacaaaagaaaacagatattatgacttgatgaactatgaagagtaacagcctaaagttttttttaataagtaaatagtagaaaatgaattacctatctagtatcaaattgttgccaacctgagttaggcaaaagaattttttttagtgcggtgtctctatcccctactctcccat

SEQ ID NO: 108885 - DNA, 433 bp, Homo sapiens
ttaatttccgacttaagtatgaagaaatagtacaggtggcaaagcactaccatccataagtctataaaatataaaatagccatattagctaaataaagaactcttaaaattttcccaggaatttcatttgaaacaaaacatgtagtttttcttaagcttttggactggtaagtggcatttatgaaagaaacattccttctagcaaactaagatgtgcttctctcttgcaaagtttcctgcttttcgccattgaattttaaatcattcttcaacaaagcctgtcaagaataagtaacatgatgtcctctttagtgccttccactccatccaattaccatctcaatacttaatattgatgattgggtgcatccatgattctgatcatttcttactgtggttgatgtgtccacttatctagatctgtgtacccttt

SEQ ID NO: 108886 - DNA, 257 bp, Homo sapiens
gtttctgtcagtttttatttctttgactgagtcatactttcctgtttctttgtgtgccttgtgatttttgttgttgttgcaaactggacctgtgatgatgagaacgcagtagctctggaaatcagattcttctcctttccttgggtttggtggggttttttgcttgccaaaggatataggggcccttttatttaacgacttttccaagctattgttattgcagactatcttccttcgttatgtagtcactgaagtcc

SEQ ID NO: 108887 - DNA, 220 bp, Homo sapiens
gcaggggtctctactgtccagaaatcatgtggttactcatcacggcagctgctactacagacactgaagaaagatcatccaacatggataaataccctgttcttatcagatgtttgagaagtaatagagtataatgatgcccctcatgtagaatatggttctaagaaacccatacttatattaactcagaaactgccataaatagctgaaatatccaaat

SEQ ID NO: 108888 - DNA, 152 bp, Homo sapiens
taaaactctggacagagggaataaatccaggcaaatacctctacgtatgaaatggacctgaaaagaagctttacctggaggaaaccttacctgactccagagacctttttggtttagaaaacaggaagtaacttgtatctgtcagtatgaca

SEQ ID NO: 108889 - DNA, 338 bp, Homo sapiens
atatgtgtgtcactattccaaggaatgagtagatcacactttatttttctgcttcttgtgaacattaattagttcagttttctgaaattttcaatgctattgtgattttttaaaattaacaatgctactttgcttattgtgtacttgtcaccagaaatgcaagagctaagatgtctctggaaatggaattcctgggtcacagggttggcacatgatcaacattattagataatgttaaattgttgtacaatgtaatcacattaatttgtatgccaatagtagtatataaaagtttgaattgccctacatccaaactcacacaaaaataaatgcagtct

SEQ ID NO: 108890 - DNA, 759 bp, Homo sapiens
gttcccacccaaatctcatgtcggactgtaattcccaatgttggaagaggggcctggtgggaggtgattggatcatggaggcagattccccccttgctgtacttgtgatagtgagtgagttctcacaagatctggttgcttaaaagtgtgtagctcctccctgtgctctctcttcctccttctccagccatataagacatgcctgctttccctttgccttccaccatgattgtaaatttcctgaggcctccccagttatgcttcctctacagcctgtggaactatgagtcaattaaacctcttttctttataaatcacccagtttcaggtagttctttatggcaacgtgagaaaggactaatacagccacgttattcaaattcctcagggagctttgacagagttgttcctctaagccaggacaaccattcccttgcacaccatgcagaagagccattaggaacagtgacctttctgattgtctggggactgagccagagggtgacaccatagggagaggggtaagtgagagaggacatttgctggttggctagagtttctcctgagcatggagatacccctgctgggactcccagagatatttggaaggaggcagtagggtctggtggtagtggtttaacagagctttctgcaggatgtttaacaaggagatgccacaaatccacagggcctaagccgctattctcataagcactggcgggaaaatgagaaggaagaggaatatgagagaggtactgc

SEQ ID NO: 108891 - DNA, 770 bp, Homo sapiens
tatcattatctagcatatattgtaaaatcctgtttggtgggctcagttggaccacataatgagcataattcaaggtgagagatggaatagtgggtcagtttttgcccgggcatgccaagcttccctgcagggttagtcaagggatttgcctgaaattctaccattgtttggcttgttcccctttcctgtcctgtttttctctctccctgagagtattatcttaacaaatcatttgcttatgaattatcacctcaggatttgcttctgaagatccggattgtgttcgtttgggtctacatagaagcagacacagatacattacaccatacattggatgtgcaagagatttactaaggagagagcaagagcagggagggagaacttgcagacagcagtgcaggtctgacactcacaggaggagaaaaggaaggaatgtggattgggtaagaagtttctgggtacagtgcaattccaagaaagggttggctttgcaaagagtcctgcagtttgtcagaatgggcctgtactagtacctttgccatcctcattcattgactgggaccctcagaaagcatggccttggtgcaaatgtggtggttgatccagagggtagcagcttgagctgtcagtcaactgtggtccccgcagctgaagatctgagtagagcattatcatggccaccacactgccctaagatactaatcatgtagtaattttttatttgtattcagaaaatattttctttgtttattctcaacaaatatatgtga

SEQ ID NO: 108892 - DNA, 177 bp, Homo sapiens
tacaaatcttagaaaggtggatttattttttgttgcctcattgatttcactaaaacttgtttcaaaagaagtcctttgttctcatgatatttttaaactgtgggtccgaaggaccaatggtattaataatacactatattatataatatacaatataatacaataatcataaaaaac

SEQ ID NO: 108893 - DNA, 171 bp, Homo sapiens
caactctagatttgctgttcatccacctcaccctacgggacaactgcaggatttgtagcatcccggaaggtgactatcttaaacttgaacggtatttcagtgatttgtaagctcaataagtgcaaggttcacatttgttttgtgtaccactgtgtatctgctatccagcac

SEQ ID NO: 108894 - DNA, 511 bp, Homo sapiens
gcggccgcctactactactaaattcgcggccgcgtcgatttgagctcctcagaagaaaggtgctccaggcatctgagagaataccgttggggtgatacttacaaatttgtaagctaacactgaaatcttaaaacttccgaaaatattaatgcatttgtatgacttatttttcaactgagtatgtcaaagtactttatgaacaagtgttgtccctagtttgtactgatggggaaactgaggcatggggtgataaggtgactggcccaaggttacaaaatgagttattgacaactccggaaatagaagattttttaaattcccatactagatacatgtgggcattgacattcaaagcttccctcatgctatttcctttagtcctgtcctttggggattgcctctgagggtgagagggtagttcaggtttccaggcttgttcagcctttagtctctgtagaggcttccagcaagctgacaagttactgccaaaagtgagacagatggtattttt

SEQ ID NO: 108895 - DNA, 379 bp, Homo sapiens
tctatctgggctccaagctgattgtcacccacattgaggatggatcttcccattcagtctactgactcacatgccattaccctctggaaacactctaaaacatacacccagaattatgctttactaggtctctaggtgttccttaatccacacctgaaacctgaaattaaccgtctcacaggtatactctctttctatttcattaatgcaactctctcttgaattatatctttcttataaggctaggagtggtagctcatataaagtcattattagacaaatgtctgattgctatttagttgtcaatgccttctaaaaatgttgcactcaaacttctcaaaaataaacaaacaaaaaatactttagaagtatttaattc

SEQ ID NO: 108896 - DNA, 202 bp, Homo sapiens
accactcccagcctcattttgcatttagatgtgaaataatttaagggctgtgttgatcatctctctttaactataaaactcaatcagcctccttattttatgccaattgagtttttaactgtaaaacccaatcagcattaaataaaagtgaacacaggtcgaagaatctgtagtagaatctgatttattcttttttgagact

SEQ ID NO: 108897 - DNA, 329 bp, Homo sapiens
tgccccagcggcaggattccagagctgcacgcggccgcccaggcacctccaggcctcctcggaagctgcttaaaccctcgcattcacaaccattttaaaacaatcagtgttctcagatggaaaccatttaacgagacatttattgttttcaccctaaaacgtgaagggtccctccacagaaaccatcaacacagctcatcccacaaagcaatcactgctcgtagggcctctcaggattagctctgttgaaaaaatactaacaaaaacctagacatggaatctggggaccagccctctcacaaggaactcaactcacagagacattttac

SEQ ID NO: 108898 - DNA, 2475 bp, Homo sapiens
  misc_feature (1)..(2): n is a, c, g, or t
  misc_feature (2139)..(2139): n is a, c, g, or t
  misc_feature (2147)..(2148): n is a, c, g, or t
  misc_feature (2153)..(2156): n is a, c, g, or t
  misc_feature (2158)..(2158): n is a, c, g, or t
nntgttctctacagaagatttaaatcaacaaaaagatataaaattgcaaaggttgctcagtcaaaaccatgattatcaaggaagcaaagcttctggttccaaatttggtaatctgctacccatgttaagtttccagtttttatctggttgcccttcagtttagggaccactggcccagaacacacattactggcttagataccggcctgacataggaaagagagtggtagggtgaagagagtcattctctgcaggctcagagatgtgtaggcacaaggactcccgctatgtaatatactgaattgctcaattatccaaagtccacataagcaaaaagctcaaataaacagatttttcaaactgtctgtatatgctaataggcaattatagcaatggccctggaatataggcctgattcagaactcagtaactctgaataaagcacattataaagtgtttcaatttactaaacacagcagcctgatatctaaccatcccaggtaaaagagtcttggctaagggtggtagccagatggcactgcctcagaatcacagaataactgctggtggggataagagctggactccccagtctgggtcctggatcccaaccacaggtgtaaattcaagtccagcaaatgccccctactcccatctctccaaagtctgtacaaggtgtactcagcagccagagcttacgcattagcattaggcaaagggtgttttcccaccacctaggatcggatccatgctgacccaccacctcacagagaacaatgggtttatgttttttggggtttttttgaggctgagtcttgctctgtcgcccaagctagagtgtagtggcatgatctgggctcactgcaacctctgcctcctgggttcaagagattctcctgcctcagcctccctagtagctgggattacaggcacgcgccactatgcctggctaatttttgtacttttagtagagatggggtttcgtcatgttggccaggctggtctcaaactcctgacctcaggtgatctgcccacctcagcctcccaaagtgctgggattataggcgtgagtcaccatgcccggcctgggtttatggtttaaatgagtaataatgtgattcctccttcaaaatttttaccctcaaatagttcccacagtaggtttcctttaacagaagcatgagtccagcttctaaatacagttaaaacaaacaaacaaaaaatacatgtttgtagagaagtaatgcactatgaaatgcatcctcaggagcatacatttatggtaacaatagatttctcctttgaaaaattttaatcaccacatttcaaaattgccacatccaatttcctgattaggaaaaaaaacaaatctttaaaaaaacacacaagcatcagctggcaaagtttttattttcttaagcacattggttttgtagctctagcttccaaaactaaggtaacataaaaatccagagaaatcgtgtaattgaagtaaaaaaaaacagagcacaggaaagaaaacagagaaaattggcagcagactcgtggctgtttcagtggttgatctttgccatgaaatcttcttaataacaaatagagcatttattaataagcatttaacctgtagcacctccccttctccccatgcagatggaggaggctcccacatcggctctaccagggagctcaagaaacagccacacacagctggcaagtggcacagacagccttgaacttgagccttctggctccagagcccaacctctgcaaatccaatttgttgactctactttctaggaaagttgccctcttaaacagagaaaagtccttccatttaacacaaccaatattcaaatggccttcaagaaaatacaatgggctaggcacaatggctcacttctgtattcccagcactttgggagaccgaggcaagtggatctcttgagctcaggagttcgagaccagcccgggtagcacggtgaaaccctgtctctaccaagaatacaaaaaattagccaagtgtggtggtgtgcacctgtggttccagctactagggaggttgaggtgggaggattgcctgagcctgacaggcagaggttgcagtgagctgtgattgtgccactgcactccagcctgggngacagagnnagacnnnntntcaaaaaaaaaaaaaaaattttttttcactgcaaaggccaggcgtgatggctcacacctataatcccagcactttgagaggtcgaggtgggtggatcacctgagttcaggagttcaagaccagcgtaaccaacatggagaaaccccatctcaactaaaaatacaaacaatcagccgggcatggtggcgcatgcctgtaatcccaactacttgggagactgaggcaggagaattgcttgaacctgggaggtggaggttgcagtgtgccgagatcatgtcattgcactccagcctaggcaacgagcaaaactctgtttc

SEQ ID NO: 108899 - DNA, 702 bp, Homo sapiens
tttccccacaactgtgatgctttatcctttgacattaagaatgctgtttgcagaagtaacattcctttgaacactcagctttctgaaatggtgtcccaccgcaaggacctggagaagggtaaacctcaggttctcctcctgccttttgctaagtatatgtcttgatgacaagccttctgctgatgagctgtgtttctggaccgatcatggtagaagtcaattaacgtgtccctcacttggggtttctcaaggctgcactgatgaggaaactgaaacagaaaatccagagtaaattccaccaggccacacagcaaggtctgatagagccaggagagactttatgaaatccagactctcacactaatgctctatcagctagacctccatgtgagtctccccaatgtaggtaggaagtgctttccctaaaatgctcataaagcaaatcagagcaatgctgcattccatgtgatttctaatttgaaatgcaaacaattgccaatttgtttgacttgtatttataattatttccttgtgaattactcatcactaaatgctttataaatattttctctttttttcctcaatgtctatggaatgatcacagcatagaaaatgttggctttcaaggatttattaatatctccttttgaaataacatgtatttgtaagacagaataaaatcactttaaagaaacaaatctt

SEQ ID NO: 108900 - DNA, 674 bp, Homo sapiens
tccttgagacagggtcttcctctgccacccaggctggagtgtgcagcagcatgaccgtggcttactgcagcttcaacctctcaggattaggtaaacctcaggttctcctcctgccttttgctaagtatatgtcttgatgacaagccttctgctgatgagctgtgtttctggaccgatcatggtagaagtcaattaacgtgtccctcacttggggtttctcaaggctgcactgatgaggaaactgaaacagaaaatccagagtaaattccaccaggccacacagcaaggtctgatagagccaggagagactttatgaaatccagactctcacactaatgctctatcagctagacctccatgtgagtctccccaatgtaggtaggaagtgctttccctaaaatgctcataaagcaaatcagagcaatgctgcattccatgtgatttctaatttgaaatgcaaacaattgccaatttgtttgacttgtatttataattatttccttgtgaattactcatcactaaatgctttataaatattttctctttttttcctcaatgtctatggaatgatcacagcatagaaaatgttggctttcaaggatttattaatatctccttttgaaataacatgtatttgtaagacagaataaaatcactttaaagaaacaaatctt

SEQ ID NO: 108901 - DNA, 1150 bp, Homo sapiens
  misc_feature (734)..(734): n is a, c, g, or t
  misc_feature (912)..(912): n is a, c, g, or t
  misc_feature (1029)..(1029): n is a, c, g, or t
tttccccacaactgtgatgctttatcctttgacattaagaatgctgtttgcagaagtaacattcctttgaacactcagctttctgaaatggtgtcccaccgcaaggacctggagaaggacacaaagcaaattcgagcgattttcttatttgagttcaaaatgggctgtaaagcagtggagacaactcgcaacatcaacaatccatttggcccaggaactgctaatgaatgtacagtggagtggtggttcaagaagtctggcaaaggagatgagagccttgaagatgaggagtgtagtggctgaccattggaaattgacaacaaccaattaagagcggtcatcaaagctgatcctcttacaatgacacaagaagttgccaaagaactcaatgttgaccattctttggtcattcagcatttgaagcaaattgggaaggtgaaaaagcttgatgagtgggtgcctcatgagctgagcgaaaatttttttaaaaatcattgttttgaagcgttgtcttctcttattctacgcaacaacagtgaaccatttctctatcagattgtgatgtgcaaggaaaagtggattttatatgacaattggtgatgcccagctcagtggttggacagagaagaaactccaaagcacttcccaaaaccaaacttgcaccaaaaaaaggtcatggtcaccatttggtggtctgctgccggtgtaatcgactacagctttctgaaccccancaaatcattacgtctgaaaagtatgctcagcaaattgatgagatgtactgaaaactgcaatgcctgcagccggcattggtcaacagaaagggcccaactctttacaacaactctcgaccacatgtcgcacaaccaacacttcaaaagttgaatgaattgggctatgaagttttgactnatctgtcattcacctgacctcctgccaactgactaccacatcttcaatcatctcgacagatttttgcagggaaaaagcttctacgatcatcaggatgcagaaaatgctttccaaganttcatcaaatcccaaagcatggatttttatgttacaggaataaacaaacttatttctcattggtaaaaatatgttgattgtaatggttcctattttgattaataaagatgtgtttgagcct

SEQ ID NO: 108902 - DNA, 799 bp, Homo sapiens
tttccccacaactgtgatgctttatcctttgacattaagaatgctgtttgcagaagtaacattcctttgaacactcagctttctgaaatggtgtcccaccgcaaggacctggagaagggtaaacctcaggttctcctcctgccttttgctaagtatatgtcttgatgacaagccttctgctgatgagctgtgtttctggaccgatcatggtagaagtcaattaacgtgtccctcacttggggtttctcaagggtatgttaccacaaagactctcatacacccttttttctgatctccctttcccattctacacttgtgtgctgaatctgtttagcattatagttagtacacttacacgtccactaaaaagtggaaattaatttaattaccaatgaagtaacaagaatttagtttggcaatggatttcttctataatccaaagccaagttacctttccactcatggttctaaagattactcaactgtgtaaatcatctgtgccacatggaataactcaaagtaagttctttcaccccctactcattctaagtacaccaaataaaactctgcctcttttggagagttcatacactgttcagagaaggctgtgaggtatttatgatatctaatccagaaggaactcaagtgatgtttgttttagaaatagaaagcaaagaatgattatgctgcaaatattatcatgaagacatttataaatatattacaaatgcatgtttcccgccaaataattgacaaaacactattacttgccttaaaaataatgcacaattaatgaatg

SEQ ID NO: 108903 - DNA, 750 bp, Homo sapiens
tttccccacaactgtgatgctttatcctttgacattaagaatgctgtttgcagaagtaacattcctttgaacactcagctttctgaaatggtgtcccaccgcaaggacctggagaagggtaaacctcaggttctcctcctgccttttgctaagtatatgtcttgatgacaagccttctgctgatgagctgtgtttctggaccgatcatggtagaagtcaattaacgtgtccctcacttggggtttctcaaggacatgcaaggtcctcatgattgtctcaaaactatatagaattgagaagctgcactgatgaggaaactgaaacagaaaatccagagtaaattccaccaggccacacagcaaggtctgatagagccaggagagactttatgaaatccagactctcacactaatgctctatcagctagacctccatgtgagtctccccaatgtaggtaggaagtgctttccctaaaatgctcataaagcaaatcagagcaatgctgcattccatgtgatttctaatttgaaatgcaaacaattgccaatttgtttgacttgtatttataattatttccttgtgaattactcatcactaaatgctttataaatattttctctttttttcctcaatgtctatggaatgatcacagcatagaaaatgttggctttcaaggatttattaatatctccttttgaaataacatgtatttgtaagacagaataaaatcactttaaagaaacaaatctt

SEQ ID NO: 108904 - DNA, 170 bp, Homo sapiens
tgcagtcctgatacttggaggtctcccccccacccccagcttgagggctggcttcctttcggtggtcttcaaatcaactcacactcggccgttggagaagcctatgtgtctggccaggcaggctccatggatgtggccagtgtctttgtggacggtgggaaccagctttg

SEQ ID NO: 108905 - DNA, 307 bp, Homo sapiens
caaatatcattcagcctggtcatctaggatgaattctccttctatattcatagcagggctgagcccagcaaagaggtaagtaaagcccctcaagcagatcctgaaatcactctcactgggaaagtccacacatgaaacttctgtatgacgcagtgccaggccttgatgactgtagggattttggtagctgtgataaaaagcaaacagataaataaatacaagcataagtaaagttgtgcctttccagtactctttacaggccaagagaaaatggttaaatgagagccccaaatgtacttgggatgtg

SEQ ID NO: 108906 - DNA, 412 bp, Homo sapiens
  misc_feature (134)..(134): n is a, c, g, or t
  misc_feature (136)..(136): n is a, c, g, or t
  misc_feature (139)..(139): n is a, c, g, or t
ggaaaacttataagttgattgatgaaaaataataccatggatttgattatcttgtcatggagagagatgtggtgtggacactatcagctttggttccactgaagttctatcagatttgtgccgggacctagtgngnggngagaggtgttgtggtggccgaggggaagattggtgcgcgatgtgtgagggggggggggtggggggggtgggggggggggtgtggggggggggtgggggggtggggtgggtgtgagtgggtgtgggtggggtgatgtatggggaggtaagcatcgtgaggtgtttattggagctctttgcctagaactgataattggattcatggtattctggagaacaaggaaacaggctgaggaagaataagagacttgcttgaggaagaaaactgaagccc

SEQ ID NO: 108907 - DNA, 452 bp, Homo sapiens
ggtggtattattgagctaaatcctcaactttgtctgggcacagtggctaaaaattagccgggcatggtagcatgcacctgtagtcccagctacttgggaggctgaggcggaaggatcgcttgagcttgagaggcggaagttgcagtgagccaagatggcactactgcactccagcctgggagacagagaaagaccctgtgtcaacataaataaatatataaataaatcatcaagtctcatattaaagactctgtaaatatgacttattgttgacaaatgaaacaaatagaggtgtaagcatgttgtctacatggaggcaagaccagaataatagaaaatggaaacagattcccttaaagaggggaatcgtgtctttctcattggctcaatgtagtctccgtagagtctagaatgcttcagcacctggcacactgcttaacaaatggtgaatg

SEQ ID NO: 108908 - DNA, 475 bp, Homo sapiens
tcttcttgtgcttggagttctacagtcctgatcatctcaacttaaaggagatcccgccggtgcagtggctcacacctgtaatcccagcactttggcaggctgagggggtggatccatgaggcaggaatgttcaagagtgcctcatttattacaaatgcctaggacgggctgggcctagtggctcaatcctatagtcccagcactttgggaggccaaggcgagaggatcgcgtgagctcaagagtttgagaccaacctgggcaacatagtgagaccttgtctctactaaaatacatccatgcctatggagagcagagcttaccactgtaattatacactagatttctgtcatttccttctaacttaatgataggtaatcttcctttaaacatgtgctgaagttcctacagtcctgaccatctcaacttaaaggagatcccgccgggtgcagtggctcacacctgtaatcccagcac

SEQ ID NO: 108909 - DNA, 196 bp, Homo sapiens
gaaagtgggggagaagaggaccctataacccagagacaagaggccatcaggcaccctgaagcctaggggccctcatctccactctaacaaaacacacatttgcagtgacccccatccccacccttgacttctcttcctcacccagagcacgggagggtgccactacccactcttagagcagacctggcatgcccac

SEQ ID NO: 108910 - DNA, 426 bp, Homo sapiens
tgtgatagaatcctccaagcaccgcaccttactgcctcccttgtgtatgtgatagaatcctccaagcaccgcgccttaatgcctcccttgtgtatgtgacagaatcctccaagcaccgcgccttaatgcctcccttgtatatgtgatagaatcctccaagcaccgcgccttactgcctctcttgtgtatgtgacagaatcctccaagcaccgcaccttactgcctcccttgtatatgtgatagaatcctccaagcaccgcaccttactgcctcccttgtatatgtgatagaatccaatgcagctcattctttctactgctgcaactcacaactgatttcactaccatcaagatatcacaatcggcagctgccagttgtgagatacctaggtgatccttaggtctcttccagctctagggttctctg

SEQ ID NO: 108911 - DNA, 161 bp, Homo sapiens
cccaggctagagtgcagtagcatgataatagttcactgtaacctcaaactcctggatttaagggatcctcccacctctgcctcccgggtagctgggactacaggcacatgccacccagataatttttttaaattactttttgtagactatggatttcattg

SEQ ID NO: 108912 - DNA, 349 bp, Homo sapiens
tgagaggcaggctggtttgggacttaaattcacgaatgactgtaagaagcctcagatcccattgattctccaagaattgaggtcgaggctggataatctttgaggggctggtaccctttgtcaaagaccacaaagcacggccatgcccatggagagtagtaaggtattaattggcaaagttaggtgctaatgccacttttctacccaagaagagaataatgctaaatgacctgagaaggtcacttaggtcactgtctctatcattgagatgtggttggaatgccttccacagtctgcaccctgagcctcgtgatcttctcaatcaaacagagcaggcagttctgtttca

SEQ ID NO: 108913 - DNA, 687 bp, Homo sapiens
agcaattctcctgcctctccttaaaacatctcggtgtttgtccgagatgacggtgctcctcctcaatcaaccaccacacctggccaatattttgtagagatggggttttcccatgttgcccaggctggtctcaaactcctgggctcaagtgatttgcccgcctcagcctcccaaaatgctggattacaggtgtgagctactgcacctggcacagattttttaaaagatcaaattaggtactaggtataaagcatttaaactgtgtcaggcacattttaagtgctcagtagatagtgctggtaggctggctatagtagctcacgcctctaatctcagcattttgagaggctgaggcaggaggatcacttgagctcaaaagttcaagcccagcctgggcaacatagcaagaccttgtctctactaaaaataaaaaataaattagctgggcatcaggcatcgtgcacaatcctgtactcccggctacttgtgaggccgaggtaggaggattgtttgagcctgggaggtcaaggctgcagtaagctatgattgcaccactgcatcctggttgacagagcaagattctgtaagtaagtaaataaaataaataaataaataaataaatatagcaagctggtttggagtgaggaatattaatagttgtgttaaggaaagaaaagaaaaaaaaaa

SEQ ID NO: 108914 - DNA, 255 bp, Homo sapiens
ggatgtggatgttattggggtgatgaaaatgttctaaagcattttatgatgatggttgcataactgggtatgtttactaaaaaccattgagctatattcttgaaatgggtgaattacatgatatttaaaatgtgcctcaataaagttactttctgaaggatttttttaaatgaccaggcagattttttaaactatcacattatgaaggcttctgtttcttctgcttccttttcaaggccccatcctgaattgcta

SEQ ID NO: 108915 - DNA, 124 bp, Homo sapiens
tggcagtgcagcccctggctgaggtgtagcagtcatcaataccagccatcatgagcagcttcttgggcacgggctgagacgatgccagtgcccttgggcgcagggatgaggtgcaccagcacag

SEQ ID NO: 108916 - DNA, 419 bp, Homo sapiens
  misc_feature (8)..(8): n is a, c, g, or t
  misc_feature (14)..(15): n is a, c, g, or t
agaggatncccatnnggcgaggcagtctcctctgagagccaacttcaaggctttctctcagggaagctgctgtggttttaatgcctagtggtgttttacggttgcagaagtcatcctcaaggtcgctttttggccgtctacatgtgaggatgcaccagacagatgaagctccagctacccaccgtgcttcctgattttttgttgaaagtcatcaatttctctgaggctcagctctattcctcccaagtcctgggcccttggctggctttttaatttgtgtggcgttattacgttatgtacttgtcagcagagatttcattaagttcccataatatggccacgctgcacattatccaaactaaaacaaccatctctgggcttgttcagagactgccacgccaaatgaattcttcatgatt

SEQ ID NO: 108917 - DNA, 381 bp, Homo sapiens
tattaaaggatttggctgaaataagagttccctatgttgtattaaggacagtaactcatttcagtgttctacaatgtaattattcatctgttgttgaacatttgagctgatatatgtaatataagaaaaaatagggaatatttttgtataaatatttatacacctctctatttctttaaattctgtaatcgactaataggtcatgaacatctttaagatttttgacacaatgtcatattactttcagaaaaattttactattttacactcccagccattagtatgtgagagttcctctttcacttttcccaggtttggaaacatttataatctcttatctttgccagtctgaaagatgaaagtggagcttgttttattttg

SEQ ID NO: 108918 - DNA, 618 bp, Homo sapiens
agtggtggctcaagcctgtaatcctagcaatttgggaggccaagacaggtgaatcacctgaggacaggagttcgagactatcctggccaacatggtgaaacactgtctctactaaaaatacaaaaatttgccaggtgtggtggcaggcgcctgtaatcccagctacttgggaagctgaggcaggataatcgcttgaacccaggaagcagaggttacagtgagccaagatcgtgcccttgcactccagcctgggtgacaagagcgaaactccatctcaaaaataaaaaaattgaattaaattgaatcaatggatagtatttacaagcctcatggtaacctcaaataaaaaaacatacactggatacacaaaaaatagaaaccaagaaaatcagtgataccaccagagaaaatcaccttcactaaaagcaagaaagagggagggaagaaggaaggaaggaaaaagaagaccagaaaacaaataacaaaatggcaggattaagtccttacttaccaatacaaacattgaatataaatgaactaaactcttcagccatgagttaaaagacactgagtggctgaatggattaaaaaaataagccccacctatctggtgcctat

SEQ ID NO: 108919 - DNA, 281 bp, Homo sapiens
catggtcgatgtttacagaaagtatctttttattacaaaaggcagagataaattacatccaaatattttcagaccatcaaaagtctttaagtaactcacattcctccacagagattatcctggtagccaaattaacagaatcagccaagcacataaggaacttagcacataaagatactcaataaaatccaattataaaggagcaaatttctacgaacttgaaactaccacccaccctgctgccagaatgtaatgatatgttctctgcatgccaaacatat

SEQ ID NO: 108920 - DNA, 399 bp, Homo sapiens
ttttttgagatggagtctcacgctgctgcccaggctggagtgcaatagcacaatctcagatcactgcaacctctgcttctcaggttcaagcgattctcgtgcctcagcctcccaagtaaatgggattataggtgcatgccaccacacccagctaatttttttatttttagtagagatggggttttaccgtgttggccaggctggtctcgaactcctgacctcagatgatctgccagcctcagcctcccaaagtgctgggatttacaggcgcgaaccaccatgcccagcccctgaaaaacattttgatgaaaagaagactgattctgaaaacattaattcaggtctagttacatagctgaaatcttccagaaagctggaagatttatatacatatgtgtg

SEQ ID NO: 108921 - DNA, 518 bp, Homo sapiens
cctgaccctgttgactctacactccttcttaactcttccctggtcctttcatagtatacattcctcatctacccagatccctctggtaatgcctgctagctccttttcctcttgcattctacataaatatagatatgccctaaatatcatagcttttccagtagtaaggatcatatctagcacacacattttcttcttcccacctctcttctgtctccatatactgccagtgggagttcaacctattagaaatgccctctgacaaccaaaaacatccttctctttcatcacccgtaaataagcacctaccatgtgagattcagcacaggaggggaatctgggatcagactgcctaatttcaaatcccagctcagcttctttagcacatgccattgtgacctggcaagattcttcccaagtcttcattttttcttctaaccacctacgattgttgtgaagactaatgagaaattactcatacagagttactcagtgaagtggctggcttgcagcattaa

SEQ ID NO: 108922 - DNA, 312 bp, Homo sapiens
cagatggaaggcctccaggctccatgatttatagactgtcagcatcctatagcctttcttgtgcctcccattacatccttttctcaagttcttcatttacaatgaccaaaaatgaccagtaatagctttagatgtgacctcttctaagagtccttacattttaaagcaatcaaaactttagttaaaccagaagaatgaaactccagtgtggtcagatatctgagtcttagtatcagctagctctcttgcttgcttgctgtgagatctttggcaagtttctttaactttctggagctggtttcttcattcata

SEQ ID NO: 108923 - DNA, 355 bp, Homo sapiens
aaactcagtgactgaaagtgtgaaccaaggatagtatagtcatccatgatctccttcaagtatgaacgctaaaagaaacagttttcaatataggaaattctgtacccatgaacccttcttgaggaatactagaggaagagtttcatctaaccatgagatgagtaacaaagtgtcagtacaaggactgactatattttaataaatataaatgtaggcagaagataaaaggggtggaagacccatatacaaatactgtatgttaagtagaagtaatacaactttagaaaatgggagtggaacagagagtgaaagagtaagatagaataagctcactgatggttgtatagccaatagt

SEQ ID NO: 108924 - DNA, 460 bp, Homo sapiens
tctcaatcatataataagcattagctgacatttttataatcattaagaaaataagcagactctctgttgaaatttttccaggtgaagtttgaattagagtcaaaattgtagaaagcttgctatgaagccccttcactttaaacttatttggcattctaataacaactccattttataatcacagattctaacacaatgccaattctgcttttattttttatttaaaaaatgaggtaatacatgtattatgggaccagaatgaaaaaaatactttcttctgagtacctttccacgtggctcttctggctctgagaaatctttttctctactcagtgaactttgatttcttcttaccgtaaataatgtcttctacactttattcattataccaaggatcagcaaatgatggacatgacccaccacttgtctttgtaaataaagttttattggaacacaaaaa

SEQ ID NO: 108925 - DNA, 360 bp, Homo sapiens
  misc_feature (346)..(346): n is a, c, g, or t
gaaatatatttctattcaaaggattaagaagcagaatgactttatatttcttcgagctaaaaaaaagctgagcagtgtcctcaaaattctcaagaaaaatgaatttcccaacatagaattccgagcccaataaaattgtcactgattgtgatgatagaccgaagacatttctgatagtttagctctcaaaaattttacctactttacacgccttctctgaaatgtaataaaggatgtgcatcaccaaataagagggaggagggggtcaagaaagtgggatccggatgagctgaatcaagagtgaggtgacaagaaaactcaggttaacaggcaggagacaccggtntttttttcacatgc

SEQ ID NO: 108926 - DNA, 1453 bp, Homo sapiens
cccgcgatactgtcagagatggagaaaggtatgacaggaagagcagatcaagaagacgggaacagcacgaggcactgggagctgcaaacgcccacgatactgtcagagatggagaaaggtatggccatggctgacacaaaatgttactcaacatttatcacaggcctaaatggagaacatgacgctataaaacccttagataaaaacacaggaaaatttgtatggcctggggttgggcgaaaagttcttagacatgacaccaaaagcatgattcataaaagattgacaaattaaacttaatcataaatttaaaattataattctataaagcaatataaaaatctaaagagaatgaaacacaaactatggtctagaaaaaagtatttgtgaatcacacgtctcacaacgtactggcacgcaggatatgtgaagaaccaccaaaacttaaccataagaaagtaaaaaccccagtattaaagagagggcagatatttgaatggagaatcaaagaaggtataaggagggcatattgcccgagaaagaggctcaacatcatagagatgctggagaaatgccagtcaacagtacctctgcaaatctattaaaatggctaaaaacagacaaaaaccacaggccgacccaggttctagtgatgatgccgaggaactgggaccctcataagctgcagtgggaatgggacgggtcccgccatgctggaaagtggtccgggagtttcttatgaagttaagcacatctttaccctgtcatccagcaaccccgctcctgaaacgtcccccaagagaaaacttaaacatgcatgcacaaacctgcacacaagtgtttaggcctcattcctcattgccaataactggaagaaaacaaaatgtccatcggcaggaggaggcgggaaccaacgcggatgcttccacacagggggcaccaaccagcagtggaaggatgcacccaaatgccccaggtctcccaggccatatgcccggtgaaggaagctagtttcggtgcgcacaggccgagggatgccgccgcatgacatcttggagaagacagtgctaccgtgttggggagcagggcagtggtttcgaggggctatgggtggaggggcgaatggaggagctctctggggcagtggtgtgagcacctgcacctcactgtgggctgctgcggctgagaggctgtacagcaaacactggcttcagtacacgcagactgaaggtggaaggcttccgcaagtcaaagacagagggtgtcacctccatgaaacaaaaacattaaaaaaaaactcttaaaattaagaaaaaaaccacaaaaagtatttcataagcccgttggactttgagttgacatcatctacctgggagcatggaactgaaaccacaggcttggcaatcccagagggagagagtggagggtttagacctccattgaagggctcagt

SEQ ID NO: 108927 - DNA, 386 bp, Homo sapiens
gataagtattcctgtatctaaacatagctaaacagaaaaggaacagtatttgatacagtccggattatgatattataatcttacggaaccaccatcattaatgaggtccaccattgactgaaacatcattatgcaaagcatgactgtatagtcaatatgttataaggacatcctttggtacttcaataactaagccctcgtgaatgagacctgctgattctaccatgatactgatcatagagaaaatgttaactttctatatgggtgcttgaagaagatactcagacaactaacaaaacgagatgagaaataagataaaaatccgggccaggcatcgtggctcacacctgtagtcccaacactttgggaggctgaggcaggtggat

SEQ ID NO: 108928 - DNA, 339 bp, Homo sapiens
gatcctaagaagcataatcagaaatgacaaaggtgacagaactcatactacaaaaatacaaaagagcctcagagactactatgaacatctttatgtgcacaaactagaaaaaccagaggaaatggataaattcttggaaacacacaacctcccaagattgaacaaggaagaaactgaaatcctgaacagatcataacaatttacaaaattgaatcagttataaaaacaaatctacaaaccaaaaaaagaccaggatcagatgcattcacagccaaattataccagacaaacaaagaagagctggtatcaatcttactgaaactactccaaaaaatcaag

SEQ ID NO: 108929 - DNA, 265 bp, Homo sapiens
agataagggaaaagctaaagatacatgggagagcatgcgccatgatttatacaagagccaagaccgctagactgcattgggttcatactgatgaacagtggaaaataagagcttcctaggtaaagatggcagaaagacccgatgagcagagcaaaggatgcacctttgacttgatgagtggtcattttaggcttttgcatgtggaggaatgagagaaaatgtaagctctaagatagtggcgcagggcagagtatatggggagaga

SEQ ID NO: 108930 - DNA, 812 bp, Homo sapiens
actccatcttcaaagaaaaagtcgctaataaatcacatttggtaggttagtgaatgttaaacacattagtgagcaaaagaaaataggaatgaacaagaattggtcatctacctaactgaacacaaatgaactctggcagttcagtaataggaggtaaagaaccacgctaattgcagaacagcagcccccctaccttcccaggagcagtgtgactgggaagcagccccgtgtgtatgctggtgcaggttctaagcaaagtgagctgcccatcagttccgatgagtttgctgatgctagacatatgacatctgttctcttgctgcctgccccagttatctcccaaagttctttactgagaatgaaaagcatctttctctgtgtggtgacttcagtaggccaacaaatatttgagtttaaagcacaagactagtcataggcagagcagcgctaccatttacaatttgcttacttgatgctaaaccgtgggtttggcattttacagtcatatcatctagcccagcaagtcatggaagcatagttgttaaaatcatctgacactttgggaggctgaggcgggcggatcacgaggtcaggagattgagaccatcctggctaacatggtgaaaccctgtctccactaaaaatacaaaaaaattagccgggcgtggtggcaggagcctgtagtcccagctactcaggaagctgaggcaggagaatggtgtgaacctggaaggtggagcttacagtgagctgagatcacgccactgcactccagcctgggcaagtgagactccatctcaaaaaaaaaaaaa

SEQ ID NO: 108931 - DNA, 318 bp, Homo sapiens
agaaaaggaagaagaagatgcttcgggcagcgtgtggctcacagagcctcggctgctcactcccgggccctcggcaggacgggatctggccggtgctctaggagcttttgaacttttatctttctttatcagtgattttcagcattgtattttccaggtgccttggtgggcttttctttgtgttctacttagcatttgttgtttcttggatctgtctgtagttttcatcatatttggaagatttttagccattactcaaatgtcattttccaccactgcctcttcctcctcctgctggactgtggcactctgaggaca

SEQ ID NO: 108932 - DNA, 281 bp, Homo sapiens
tagtacctagctcagactgttggtgtaaaaattaaatgagctaattaaaattaaaaagtaaagtgttttgcacagagacactcctagtaagccctgaagaaatgagagctatgcttttgattattaatattcttataatccaaaggatgatgcaggattttttaaatctttccacatgtatgtttttggaccagtccaaaaaagaattggaaacacacttatgccgcataaagacagagttatgaggaactataaaaacaaaataaaacctttggagaatc

SEQ ID NO: 108933 - DNA, 191 bp, Homo sapiens
cctactgttttaatctaaggtcttctcatttcatttacttcatataaattcatttaaacatcatgtaatatcttataaacatcctaaaatcaaagatttaactttcccgactgccttcttaaagtattcaagacatagaatgctctgatttttttctttatttgatactatctattaaaatttgaattgtg

SEQ ID NO: 108934 - DNA, 2343 bp, Homo sapiens
gggacgcgctaatgttgccgggaagcagctccgggttgcagggcaggaacgtgcccttcccccgcggcaaacttgccgtcgctgcgacggaagcaggaacttgctaaccacaaaacccgccaggccggtgcgggagctgcggagcatccgctgcggtcctcgccgagacccccgcgcggattcgccggtccttcccgcgggcgcgacagagctgtcctcgcacctggatggcagcaggggcgccggggtcctctcgacgccagagagaaatctcatcatctgtgcagccttcttaaagcaaactaagaccagagggaggattatccttgacctttgaagaccaaaactaaactgaaatttaaaatgttcttcgggggagaagggagcttgacttacactttgggaatcagaggcaatgagcccgtatatacttcaactcaagaagactgcattaattcttgctgttcaacaaaaaacatatcaggggacaaagcatgtaacttgatgatcttcgacactcgaaaaacagctagacaacccaactgctacctatttttctgtcccaacgaggaagcctgtccattgaaaccagcaaaaggacttatgagttacaggataattacagattttccatctttgaccagaaatttgccaagccaagagttaccccaggaagattctctcttacatggccaattttcacaagcagtcactcccctagcccatcatcacacagattattcaaagcccaccgatatctcatggagagacacactttctcagaagtttggatcctcagatcacttggagaaactatttaagatggatgaagcaagtgcccagctccttgcttataaggaaaaaggccattctcagagttcacaattttcctctgatcaagaaatagctcatctgctgcctgaaaatgtgagtgcgctcccagctacggtggcagttgcttctccacataccacctcggctactccaaagcccgccacccttctacccaccaatgcttcagtgacaccttctgggacttcccagccacagctggccaccacagctccacctgtaaccactgtcacttctcagcctcccacgaccctcatttctacagtttttacacgggctgcggctacactccaagcaatggctacaacagcagttctgactaccacctttcaggcacctacggactcgaaaggcagcttagaaaccataccgtttacagaaatctccaacctaactttgaacacagggaatgtgtataaccctactgcactttctatgtcaaatgtggagtcttccactatgaataaaactgcttcctgggaaggtagggaggccagtccaggcagttcctcccagggcagtgttccagaaaatcagtacggccttccatttgaaaaatggcttcttatcgggtccctgctctttggtgtcctgttcctggtgataggcctcgtcctcctgggtagaatcctctcggaatcactccgcaggaaacgttactcaagactggattatttgatcaatgggatctatgtggacatctaaggatggaactcggtgtctcttaattcatttagtaaccagaagcccaaatgcaatgagtttctgctgacttgctagtcttagcaggaggttgtattttgaagacaggaaaatgcccccttctgctttccttttttttttttggagacagagtcttgctctgttgcccaggctggagtgcagtagcacgatctcggctctcaccgcaacctccgtctcctgggttcaagcgattctcctgcctcagcctcctaagtatctgggattacaggcatgtgccaccacacctgggtgatttttgtatttttagtagagacggggtttcaccatgttggtcaggctggtctcaaactcctgacctagtgatccaccctcctcggcctcccaaagtgctgggattacaggcatgagccaccacagctggcccccttctgttttatgtttggtttttgagaaggaatgaagtgggaaccaaattaggtaattttgggtaatctgtctctaaaatattagctaaaaacaaagctctatgtaaagtaataaagtataattgccatataaatttcaaaattcaactggcttttatgcaaagaaacaggttaggacatctaggttccaattcattcacattcttggttccagataaaatcaactgtttatatcaatttctaatggatttgcttttctttttatatggattcctttaaaacttattccagatgtagttccttccaattaaatatttgaataaatcttttgttactcagtagtgttctcataagtagcatg

SEQ ID NO: 108935 - DNA, 1981 bp, Homo sapiens
gggacgcgctaatgttgccgggaagcagctccgggttgcagggcaggaacgtgcccttcccccgcggcaaacttgccgtcgctgcgacggaagcaggaacttgctaaccacaaaacccgccaggccggtgcgggagctgcggagcatccgctgcggtcctcgccgagacccccgcgcggattcgccggtccttcccgcgggcgcgacagagctgtcctcgcacctggatggcagcaggggcgccggggtcctctcgacgccagagagaaatctcatcatctgtgcagccttcttaaagcaaactaagaccagagggaggattatccttgacctttgaagaccaaaactaaactgaaatttaaaatgttcttcgggggagaagggagcttgacttacactttggtaataatttgcttcctgacactaaggctgtctgctagtcagaattgcctcaaaaagagtctagaagatgttgtcattgacatccagtcatctctttctaagggaatcagaggcaatgagcccgtatatacttcaactcaagaagactgcattaattcttgctgttcaacaaaaaacatatcaggggacaaagcatgtaacttgatgatcttcgacactcgaaaaacagctagacaacccaactgctacctatttttctgtcccaacgaggaagcctgtccattgaaaccagcaaaaggacttatgagttacaggataattacagattttccatctttgaccagaaatttgccaagccaagagttaccccaggaagattctctcttacatggccaattttcacaagcagtcactcccctagcccatcatcacacagattattcaaagcccaccgatatctcatggagagacacactttctcagaagtttggatcctcagatcacttggagaaactatttaagatggatgaagcaagtgcccagctccttgcttataaggaaaaaggccattctcagagttcacaattttcctctgatcaagaaatagctcatctgctgcctgaaaatgtgagtgcgctcccagctacggtggcagttgcttctccacataccacctcggctactccaaagcccgccacccttctacccaccaatgcttcagtgacaccttctgggacttcccagccacagctggccaccacagctccacctgtaaccactgtcacttctcagcctcccacgaccctcatttctacagtttttacacgggctgcggctacactccaagcaatggctacaacagcagttctgactaccacctttcaggcacctacggactcgaaaggcagcttagaaaccataccgtttacagaaatctccaacctaactttgaacacagggaatgtgtataaccctactgcactttctatgtcaaatgtggagtcttccactatgaataaaactgcttcctgggaaggtagggaggccagtccaggcagttcctcccagggcagtgttccagaaaatcagtacggccttccatttgaaaaatggcttcttatcgggtccctgctctttggtgtcctgttcctggtgataggcctcgtcctcctgggtagaatcctctcggaatcactccgcaggaaacgttactcaagactggattatttgatcaatgggatctatgtggacatctaaggatggaactcggtgtctcttaattcatttagtaaccagaagcccaaatgcaatgagtttctgctgacttgctagtcttagcaggaggttgtatttgacgacggcgatcacttggacccaggagctggtgttgcgtgccgagatacgcatgtacccgcagagtggctccctctgaaaaagcgggcgccgggtcagccgggccccttggccggcgcgtcccgggcggtcgcgctgtctggaccctcttatcaatatggggcctccctggggggaaggcacgggggggccctccgggcccaacctgggggtcttcgtctctaga

SEQ ID NO: 108936 - DNA, 1529 bp, Homo sapiens
tagcggcaccattttgaaggcgtgcccagctccttgcttataaggaaaaaggccattctcagagttcacaattttcctctgatcaagaaatagctcatctgctgcctgaaaatgtgagtgcgctcccagctacggtggcagttgcttctccacataccacctcggctactccaaagcccgccacccttctacccaccaatgcttcagtgacaccttctgggacttcccagccacagctggccaccacagctccacctgtaaccactgtcacttctcagcctcccacgaccctcatttctacagtttttacacgggctgcggctacactccaagcaatggctacaacagcagttctgactaccacctttcaggcacctacggactcgaaaggcagcttagaaaccataccgtttacagaaatctccaacctaactttgaacacagggaatgtgtataaccctactgcactttctatgtcaaatgtggagtcttccactatgaataaaactgcttcctgggaaggtagggaggccagtccaggcagttcctcccagggcagtgttccagaaaatcagtacggccttccatttgaaaaatggcttcttatcgggtccctgctctttggtgtcctgttcctggtgataggcctcgtcctcctgggtagaatcctctcggaatcactccgcaggaaacgttactcaagactggattatttgatcaatgggatctatgtggacatctaaggatggaactcggtgtctcttaattcatttagtaaccagaagcccaaatgcaatgagtttctgctgacttgctagtcttagcaggaggttgtattttgaagacaggaaaatgcccccttctgctttccttttttttttttggagacagagtcttgctctgttgcccaggctggagtgcagtagcacgatctcggctctcaccgcaacctccgtctcctgggttcaagcgattctcctgcctcagcctcctaagtatctgggattacaggcatgtgccaccacacctgggtgatttttgtatttttagtagagacggggtttcaccatgttggtcaggctggtctcaaactcctgacctagtgatccaccctcctcggcctcccaaagtgctgggattacaggcatgagccaccacagctggcccccttctgttttatgtttggtttttgagaaggaatgaagtgggaaccaaattaggtaattttgggtaatctgtctctaaaatattagctaaaaacaaagctctatgtaaagtaataaagtataattgccatataaatttcaaaattcaactggcttttatgcaaagaaacaggttaggacatctaggttccaattcattcacattcttggttccagataaaatcaactgtttatatcaatttctaatggatttgcttttctttttatatggattcctttaaaacttattccagatgtagttccttccaattaaatatttgaataaatcttttgttactcagtagtgttctcataagtagcatg

SEQ ID NO: 108937 - DNA, 638 bp, Homo sapiens
  misc_feature (135)..(135): n is a, c, g, or t
  misc_feature (200)..(200): n is a, c, g, or t
  misc_feature (203)..(203): n is a, c, g, or t
tttttttttttggtttgggttggtttgggtttttgggttgggttttgttttgttttttaaaacaaagtatccaatgttttataggggccaaaggttaacttgggcactattcctgtcagttaaaggccactgaanattttctaagttagcaaggctcacttgctgctttcttgcctcccttgcctcccatccctctcccntcntacctttctatttacctatttctctccctcccaaagtgctgggattacaggcatgagccaccacagctggcccccttctgttttatgtttggtttttgagaaggaatgaagtgggaaccaaattaggtaattttgggtaatctgtctctaaaatattagctaaaaacaaagctctatgtaaagtaataaagtataattgccatataaatttcaaaattcaactggcttttatgcaaagaaacaggttaggacatctaggttccaattcattcacattcttggttccagataaaatcaactgtttatatcaatttctaatggatttgcttttctttttatatggattcctttaaaacttattccagatgtagttccttccaattaaatatttgaataaatcttttgttactcagtagtgttctcataagtagcatg

SEQ ID NO: 108938 - DNA, 1073 bp, Homo sapiens
gggacgcgctaatgttgccgggaagcagctccgggttgcagggcaggaacgtgcccttcccccgcggcaaacttgccgtcgctgcgacggaagcaggaacttgctaaccacaaaacccgccaggccggtgcgggagctgcggagcatccgctgcggtcctcgccgagacccccgcgcggattcgccggtccttcccgcgggcgcgacagagctgtcctcgcacctggatggcagcaggggcgccggggtcctctcgacgccagagagaaatctcatcatctgtgcagccttcttaaagcaaactaagaccagagggaggattatccttgacctttgaagaccaaaactaaactgaaatttaaaatgttcttcgggggagaagggagcttgacttacactttggtaataatttgcttcctgacactaaggctgtctgctagtcagaattgcctcaaaaagagtctagaagatgttgtcattgacatccagtcatctctttctaagggaatcagaggcaatgagcccgtatatacttcaactcaagaagactgcattaattcttgctgttcaacaaaaaacatatcaggtaaatagtggtttcttggcaatcctttgttccatgtgttttgtggcttcaggagctgggggatgtggctgaataacttataccagtgattctcgacagggtatgaatataagtgacaaaatcactggagaattttctacaagtgtgccctcccctctcctaagctgagtcaaagttattgatgaatgtatgtatatatccctcaggtgactgggtagacaagaggttgagaatcactggtgttatatcccaactggtatctagaatattgaaaacaaaaatcctattgaaatggttagctgccatcagcatggagtattggaatacagtgtgatattacaaagaaaatgtaaacagagaaaaggggttgagacaaaaaatagaattcttatctcttgggaaaatcagcatttgatctttaagttggaagcataaaacctccacttcgtctccttccttggagctggtggcataggataagtcaaaa

SEQ ID NO: 108939 - DNA, 2445 bp, Homo sapiens
gggacgcgctaatgttgccgggaagcagctccgggttgcagggcaggaacgtgcccttcccccgcggcaaacttgccgtcgctgcgacggaagcaggaacttgctaaccacaaaacccgccaggccggtgcgggagctgcggagcatccgctgcggtcctcgccgagacccccgcgcggattcgccggtccttcccgcgggcgcgacagagctgtcctcgcacctggatggcagcaggggcgccggggtcctctcgacgccagagagaaatctcatcatctgtgcagccttcttaaagcaaactaagaccagagggaggattatccttgacctttgaagaccaaaactaaactgaaatttaaaatgttcttcgggggagaagggagcttgacttacactttggtaataatttgcttcctgacactaaggctgtctgctagtcagaattgcctcaaaaagagtctagaagatgttgtcattgacatccagtcatctctttctaagggaatcagaggcaatgagcccgtatatacttcaactcaagaagactgcattaattcttgctgttcaacaaaaaacatatcaggggacaaagcatgtaacttgatgatcttcgacactcgaaaaacagctagacaacccaactgctacctatttttctgtcccaacgaggaagcctgtccattgaaaccagcaaaaggacttatgagttacaggataattacagattttccatctttgaccagaaatttgccaagccaagagttaccccaggaagattctctcttacatggccaattttcacaagcagtcactcccctagcccatcatcacacagattattcaaagcccaccgatatctcatggagagacacactttctcagaagtttggatcctcagatcacttggagaaactatttaagatggatgaagcaagtgcccagctccttgcttataaggaaaaaggccattctcagagttcacaattttcctctgatcaagaaatagctcatctgctgcctgaaaatgtgagtgcgctcccagctacggtggcagttgcttctccacataccacctcggctactccaaagcccgccacccttctacccaccaatgcttcagtgacaccttctgggacttcccagccacagctggccaccacagctccacctgtaaccactgtcacttctcagcctcccacgaccctcatttctacagtttttacacgggctgcggctacactccaagcaatggctacaacagcagttctgactaccacctttcaggcacctacggactcgaaaggcagcttagaaaccataccgtttacagaaatctccaacctaactttgaacacagggaatgtgtataaccctactgcactttctatgtcaaatgtggagtcttccactatgaataaaactgcttcctgggaaggtagggaggccagtccaggcagttcctcccagggcagtgttccagaaaatcagtacggccttccatttgaaaaatggcttcttatcgggtccctgctctttggtgtcctgttcctggtgataggcctcgtcctcctgggtagaatcctctcggaatcactccgcaggaaacgttactcaagactggattatttgatcaatgggatctatgtggacatctaaggatggaactcggtgtctcttaattcatttagtaaccagaagcccaaatgcaatgagtttctgctgacttgctagtcttagcaggaggttgtattttgaagacaggaaaatgcccccttctgctttccttttttttttttggagacagagtcttgctctgttgcccaggctggagtgcagtagcacgatctcggctctcaccgcaacctccgtctcctgggttcaagcgattctcctgcctcagcctcctaagtatctgggattacaggcatgtgccaccacacctgggtgatttttgtatttttagtagagacggggtttcaccatgttggtcaggctggtctcaaactcctgacctagtgatccaccctcctcggcctcccaaagtgctgggattacaggcatgagccaccacagctggcccccttctgttttatgtttggtttttgagaaggaatgaagtgggaaccaaattaggtaattttgggtaatctgtctctaaaatattagctaaaaacaaagctctatgtaaagtaataaagtataattgccatataaatttcaaaattcaactggcttttatgcaaagaaacaggttaggacatctaggttccaattcattcacattcttggttccagataaaatcaactgtttatatcaatttctaatggatttgcttttctttttatatggattcctttaaaacttattccagatgtagttccttccaattaaatatttgaataaatcttttgttactcagtagtgttctcataagtagcatg

SEQ ID NO: 108940 - DNA, 2005 bp, Homo sapiens
gaaatgattcagcggtcagcaagcaagtgaacaaaatgaacaaaggtgtttgtgttggactccataataagtgaagtttttcctacttgccctactctttagaaaatcgcatttcaaaatcatgcttatgaaacctttcattgcaggggacaaagcatgtaacttgatgatcttcgacactcgaaaaacagctagacaacccaactgctacctatttttctgtcccaacgaggaagcctgtccattgaaaccagcaaaaggacttatgagttacaggataattacagattttccatctttgaccagaaatttgccaagccaagagttaccccaggaagattctctcttacatggccaattttcacaagcagtcactcccctagcccatcatcacacagattattcaaagcccaccgatatctcatggagagacacactttctcagaagtttggatcctcagatcacttggagaaactatttaagatggatgaagcaagtgcccagctccttgcttataaggaaaaaggccattctcagagttcacaattttcctctgatcaagaaatagctcatctgctgcctgaaaatgtgagtgcgctcccagctacggtggcagttgcttctccacataccacctcggctactccaaagcccgccacccttctacccaccaatgcttcagtgacaccttctgggacttcccagccacagctggccaccacagctccacctgtaaccactgtcacttctcagcctcccacgaccctcatttctacagtttttacacgggctgcggctacactccaagcaatggctacaacagcagttctgactaccacctttcaggcacctacggactcgaaaggcagcttagaaaccataccgtttacagaaatctccaacctaactttgaacacagggaatgtgtataaccctactgcactttctatgtcaaatgtggagtcttccactatgaataaaactgcttcctgggaaggtagggaggccagtccaggcagttcctcccagggcagtgttccagaaaatcagtacggccttccatttgaaaaatggcttcttatcgggtccctgctctttggtgtcctgttcctggtgataggcctcgtcctcctgggtagaatcctctcggaatcactccgcaggaaacgttactcaagactggattatttgatcaatgggatctatgtggacatctaaggatggaactcggtgtctcttaattcatttagtaaccagaagcccaaatgcaatgagtttctgctgacttgctagtcttagcaggaggttgtattttgaagacaggaaaatgcccccttctgctttccttttttttttttggagacagagtcttgctctgttgcccaggctggagtgcagtagcacgatctcggctctcaccgcaacctccgtctcctgggttcaagcgattctcctgcctcagcctcctaagtatctgggattacaggcatgtgccaccacacctgggtgatttttgtatttttagtagagacggggtttcaccatgttggtcaggctggtctcaaactcctgacctagtgatccaccctcctcggcctcccaaagtgctgggattacaggcatgagccaccacagctggcccccttctgttttatgtttggtttttgagaaggaatgaagtgggaaccaaattaggtaattttgggtaatctgtctctaaaatattagctaaaaacaaagctctatgtaaagtaataaagtataattgccatataaatttcaaaattcaactggcttttatgcaaagaaacaggttaggacatctaggttccaattcattcacattcttggttccagataaaatcaactgtttatatcaatttctaatggatttgcttttctttttatatggattcctttaaaacttattccagatgtagttccttccaattaaatatttgaataaatcttttgttactcagtagtgttctcataagtagcatg

SEQ ID NO: 108941 - DNA, 819 bp, Homo sapiens
gcgacggaagcaggaacttgctaaccacaaaacccgccaggccggtgcgggagctgcggagcatccgctgcggtcctcgccgagacccccgcgcggattcgccggtccttcccgcgggcgcgacagagctgtcctcgcacctggatggcagcaggggcgccggggtcctctcgacgccaggtaaaggggtctccccaatacccacccccgaccggccgcaggcgacgtcgctacctgcggagagagtcggtcccctcctttccaggggccgaggctccttcacccacacccgagcatccaaaggaccagctggggccaataagggctgaccaggatccttgagtcgctgcagtattccaaaggggacctctaggcgggctcaaggcacctgccataaatggctctggctctgcgttgacatcagaaggagaggcagaagaatagctcagtaggcaacatgcatttcctcaaaggaagagaaaatgttccctgttttcttgtcgttgactctgtattcattattgaaactgctaattgtctaattctctgtagagtgtgtgtgtgtatacagttataagcatcttggtaaattatagtgtgctgtaagacgatttccaatatttgaactaattacgtgcgagtaagttttagcgactcttgtatgcagacgttaaaactcaggggcatcctctctcacccgcctgtatccttttaccccgtctttcaacaagattcaactcgacttcaggcccttaaagcctaaataataatggattagaaaacgtcgctaacctaatattgctgagcctctttaatgat

SEQ ID NO: 108942 - DNA, 417 bp, Homo sapiens
tgcaaattagtggattttgtgtagaatttggggcaaggatggtttttgtttggtccacatagtatttttaacccatttgtgccagaggttgcaatttttttgtgtgaaaaatcagaccttggcgatgaccttgagcagtaggatataaataactcccacaagcttagcgttccaataatggaacactatgcataaatgagttgaaaatcaagaaatttcacaaagatccaaatttctgacatctcttaaatcttagaaggtctggcagcaatttggatctgcattccatcaaggaaaaacattactggaacccaaatgtcccaaacagcgcatttgtaccatgtccacactcataatcttaatcccaattcattttactcatttatgtcaccacctgattccgtgagcaagagttta

SEQ ID NO: 108943 - DNA, 369 bp, Homo sapiens
tgactcacaaccctaagatatctcctcattccaaacttaacaccacatcccattacccaataccacatcccattacccaatttgccttgtagaactaggaaagtgtttcagttctttgctaaaggccagtgttagcctagacagctttgctccaggcagattaggaaagaaagaatcctcagttttatgactcagccaggagtttttcccacctcttcacttaaaaatacctcagtaacacattacaacctgccatatgaggctgaagatcgcagatctacactcaaataagggtttttctaggtgacagtataacatttcataaagcagcagcataattatgtgacagcaaaatttaaaatatcatgt

SEQ ID NO: 108944 - DNA, 320 bp, Homo sapiens
ttggaagacacccgacgaggattccctgaaaaaattcttaatgagtccctaaggcaaagatttccaagccaagcgcttcaccacataccctcagcggcccagtgcctgagagcctcccctgccaggaagcctagcccagaaacgcctcccgaaacgggtagtggccctggggaagaagcttccctggaaggcacaagcagtaaacgggcagcctcttacctcttaccttcatcagatactggcgggaggcaccctcctggcagatttcttcatccccctctccttctgtgggtgtggagtcactgggagaacaaagggat

SEQ ID NO: 108945 - DNA, 303 bp, Homo sapiens
gctacttaagtcagttactatagttttccaagaaaaactaattatatttgggtctttaaatttattgatatacagtcatttattctattttcttaaatttttaaaacttcttgtgcatatgggttgttaacttctttttcacttattttattgcttacttctgtttttttttctcctttgatttgacctgctcaagggatttgctaattttgttcatctcctcaaagaccaagttcttagatttatttcatccattgtcttttaccatttcattatatttctgcttttgtctttgttaatgct

SEQ ID NO: 108946 - DNA, 665 bp, Homo sapiens
tgaggagggagcataggatgcagtttgataacagctgagagccctgaggagtttgttgctggatgtggagtattccatgtctcgtccctcccccagtctttttccagttgtgtcacaactccctttgctaataatattttgcacagcattttacgtctacaaagcaccatttccatgatgtcgctcacccttcgacaccaccctgtgctgggggcatcatcatcattctgagttaccaacaggaggggtagcagacagtccaaggggcaaggcagggactcccagctccaggctccagcctctcctcccctccaccctctcctggtcctgtcctgaaatctttggctcccttgaaacttgttatgcccgggcaaatgccaccctcgtgccactgtattcccaccacctccaatgagtgtcccccacctgatggggtcacacacttgtccagccacctgcacagaaaagcctcatggacacagccctgtgaggtcagaaatagaccgaacagggtcactcggttggaaggcgtggtagtgttagaacccaggtgtttgaactcggtctaatattcattccactctttcacacacacgtaagggcacatgaccactattaatcaaattttcaaaaaaaaatcagctgggcacaatggctcatgcctg

SEQ ID NO: 108947 - DNA, 529 bp, Homo sapiens
caaagcgagggtccgcattagggaagtctgggaggccaggcatgggtggcagctgtgtacagtgagaacattcctgcactcagaattcgtggcttcaaaacacagcttccctattgtcttggttttctagggctgctgtaacaaagtcctgcaaccaggtggcttaaaccaccaggaatttacgtctcgcagttctagaagctgtccttctaaagctctggggagagtctgtcccatgccttgctcctgccttctgggggctcctagcaatccttggtgtcccatggcttgtggatgcatcactctgatccctgtctctatgttcacggggtcttctccccatgtgtgtcctgggttcgacttcagatcttcttataaggataccagtcactgcattagcaccctcctcccaacagcatgttacctaattatatctgcaaagaccctatttacaaataaggtcacattctgaggttccaggtgaacacgaatttgggagagaacaccattcaacccagtacacccaaca

SEQ ID NO: 108948 - DNA, 616 bp, Homo sapiens
ggaagctgagaaaagtgacatctgcctctgaaatagttctgggaacgtcactggagggtgactgccaggttcactcatgccatcagccccgcctttgtgtcctcagtaatttttactctgagcataatcacagccctcgttgagaggagccactgtccctgttggtcttctttctagaagtatctcttatatactgatatacagcagtgcatttacattgttaactgtaaaaatgacaccaacacatttagaaaggccaccagataaaataaagaaaaatgtatccctcaacgctgacatacttactggcttgcttttggaacgttcttctttctgtcttcaggtgctagaactttaggagagtaagtgggctctgttgagggactctgaagactggtcacccccccgcccacacacacacacacatcccccagcacttgagctgcgcttccacataaccacttcctttatgctgggactgtggtttctttgtgtgtttttatgtcttttccatgtctgggtctgggtttgcctcccctgagagaccgtaaacttctaaagaacaagaactgtgttgtctccttttataggagtgtatgtttcattaaaaaaaaaa

SEQ ID NO: 108949 - DNA, 189 bp, Homo sapiens
aaagagcaaatcctgcgtctggcagatggtctgtctttggatggaaattctgcctcctcattcacaggaaatggaagccgacatcacattcaatactggattgttaggtaatggtgtggggtcagaggccaggatctacacacgaaaatttcagatagatggctggttgtcccttcctttctggaagaa

SEQ ID NO: 108950 - DNA, 220 bp, Homo sapiens
ttttgttattttttgtagagacgggggtctcactaagttgctggtcttgaactcctgagctcaagcagtcctcccacctcggcctcccaaagtgctgggattacaggtgtgagccaccgtccctggccaattctcttattttcatatattcatgtcatttagatttttgggcatattgaatatttctacaatagctgtttttttaatctataatttctgg

SEQ ID NO: 108951 - DNA, 794 bp, Homo sapiens
gtagctacgatagtgatgatcaccattgccgtgagtattccttcaacaagggctgacacagagaacaattatacttattgggcatatttatcaatcttggctggcaataatgcctggatgtaatcactctatgacacagttacacatgctttctgatctcagtatttaccataataaatctgttcctataattgaggcatacagccctcaaaaacctatttgtaaacaaaattgaacctggccagaaaatgaacgtacttgtttaggaagattgcattgcagaacaggcagaggtgctgcacaacgattcctatggaatcattattaattggtcccctaaggggatatttagcttgaattgcacctctgagtctgcatgccatggccacactatgttcagatggtctgaacaaaacggtcagatggtagaaatgataaaaagtatgacaagagttcctattatctggaaccatggcagtatagtggcacctcaacctcaaatgatatggcttgttgtaggagctaacataagattttgtggaaactattaatagcttttaataagatcaaaatttgggaaagaatagaaaagcatctagaaggacactctacaaacttgtttttggatattgcaaaattaaaaaaacaaatatttaaagcatcccaggcacacctgaccttaatgccaagaactggagtgcttgaaggagctgcagacagattagcagctagtaacccattaaaatggataaaaacacttggaggctctgtgatttcaatgattattatgcttt

SEQ ID NO: 108952 - DNA, 362 bp, Homo sapiens
catctttctgccctcactgcccagaaggggagctgttgttagctttggcatctttttcacctgtccttccttcctaggccttctcccttgacaagattgagagtatatcttagagttttctcatctcctgccaccttttgatttcttttcttaacagtgggccataagcacctccccaagttacacaaattagttgtcagcacagagcagctgccgagagagttcatcagacagacccccacattccttctggctgtcctcagaggccggatttcttcctcttttgaggatgaagagctttctctgccgaggctgggggaggaggtcagtgaggcagccagtgaatgccgtttttggtcaaa

SEQ ID NO: 108953 - DNA, 355 bp, Homo sapiens
gctgctttccctaacaggctgtatgtagccaaagagaggcctaactgcttatgtgcttgcttccaatgacaaagtgcgtgtgtaagaagcacagatatacttgactgtttataaactactgcaattaataatttatgacaacgactgcaagtcatacaacatctgagggtacctataatacactaagcaagaagctttcactactagaggatggtacggtttgaactctcctggagccctggttctgggcattcagtaggccagcagttcccaaacatgttctacagaacatgagctccatgagaaacagtcttgtgaggctgaggcacagtggctcacaactgtgatcttggca

SEQ ID NO: 108954 - DNA, 429 bp, Homo sapiens
cttcttgtttttctctctttaaactccccaacaggcagtctgtttccattgcctccaccatctatcctatcctttctctggagatcttgttcctgttgtctcagttttattttcagcttcttcattttgctaataaaaacatctaaaatgttcattgtagtaaattaggggcttggcatggtggctcatgcctgtaatcttagcactttgggaggctgaggcaggagaatcacttgaggccacagtaagttcaatctgaagtcgaaaccaaccaatttgtattctgaggcagccaaaatactggttatgggctgggaggagccacatgttggcttatctgagtccactgccaaggaacagatccagagcaatgcatttcaattgctttgaaaaatggctaagttccattacataccaccactaaagaaa

SEQ ID NO: 108955 - DNA, 384 bp, Homo sapiens
ctattcctacacagattcttaaaaagctatactcccgtcttagagttaaatttgaatattttgaaaaatgcacattaaacgtggaaagagatggctctcctctctataaggggctcccaaggcagcctcaaagctcaccaaaagttccaaaacaacatccacaacaaaacaaactctctttcatctctggcagcaacaaaagcaataactttcaccaaacctacccaagccaagaattaatataacacagaacaacacatccacattcagaccattacggctacatcagctcaccacaatatttgtttaaaaaacacataatttgtggtagagagaaagaacctttcatacaaaaagaagttctttcaaatgcaaattaaccaa

SEQ ID NO: 108956 - DNA, 534 bp, Homo sapiens
ttatgtgtacaccaagtcatacaaaaatatgcacccccattaaaataatcaagtgtactcaaacaataattttcccatagcacactgacaaaaatgagagagactgaacctacccagtgctggtacagcacaaatgaaaaatatgcatcctcttacactggaattaggaagatcagttggaacgaggcttctggagcaatttgacagtcaacctaatgatgttttaagtgcacgggctcactgacccagcttccacttcctggaatttgtctagtagtgatacttagaagtttacaaaatatatgtataataattgtttgatgccaatttggaattggtataaacactgctacaaccacataaatatccattcgcaaggtatcaaaagagcaagttatatttgcacacatactgataccaaaagatgcttataacacattaaaatggacagaatgtaaaacacagggccctgcctatagaattatactctatgaaaatgctcacacacatcacactatgtttagacacagaaaa

SEQ ID NO: 108957 - DNA, 720 bp, Homo sapiens
ggtggggacttactcttcatcagtctctcaaatttatttgtctctgacattatttctggagttaattattatcatataagaatcaacaacataagaaagcgttgttgaatttgcacatttctatcatgtatatatatcttacatatataatatatatagattactgtagtgtactatatatttataatgctatgtatacatagatatcttactatatatgtagatatatagtaaacaactgtttcaaatgcattatattatacaatatatattatgtaaatatatacattttgattatatatgtacacacataaacacatacatatacatatgcacacacatacaatggaagttacaaacttctgtcctgcaatgaaagcataaaatattattttcaacttccaaacattttaaattggcaccataaaacactattaaataaatgtcacttgttgtggctcatgcatgtaattccagccctttgggagaccaaggtggaaagattccttgaaggtgaataattcaagaccagcctgggcaacatagtgagactccatctctacaaaaataaaaaataagaggtgtggtggcatgcacctgtagtcctagctactctgtagggtaagagaggaggattgcttgagcccaggagttcatagctgctgtgggttatgattgtgccactgcactccagcatgggtgacagtgagatcctgtctc

SEQ ID NO: 108958 - DNA, 401 bp, Homo sapiens
cttatttagtatattatttagtgcagcacataaattttacatatatttaaggaatctttttcaaacagtttgagccataaaacctagagattgaatttaaaaattgcagatttggacgggcgcggtggtgtacacttttcatcctagcactttgggaggctgtggcaggcagatcacttgaggtcaggagttcaagaccagcctggccaacatggtgaaaccctgtctctacaaaaaaataacaaaaattagccagacatggtagcgggtgcctgtaatcccagctactcgggagactgaggcaggagaatggcttgaacctgggaggtggaggttgcagtgatccgagattgcgccactgcactctagcctaggcgacagagtgaaactccgtctaaaaa

SEQ ID NO: 108959 - DNA, 349 bp, Homo sapiens
gtcgttttacattctaaacatgttgtgtgttaaaccaactggctttttttaaaaacaccttaggatcctcttccaatgaaaaaaacagaaagcatacagtatacgcaataagtggatggttaggacctcttgcttcttcagtatgtctctctgaagagttaaggaaagcagagaaaggtggagataaggttggcagggatgggagagcagtatcccgaggctgagtggagaggcctaggctaagcccctgaaagtatgcttcttgtgatgggtgcagggcctctctaagaatggaaaggatgaatgaagaatagtaggactttagcctgcaggaaggtctataagtggt

SEQ ID NO: 108960 - DNA, 326 bp, Homo sapiens
agtcacaaaatactctttgtggaatagatatctacaggcagaaattttgcaaaaacgtttcaaagcttagcaatttacataattagttttcaactctcaattccatacagagtctcctaagaggaaaattacaaatgccacgtggttagggtttcaacattctgaacactggtattttctccatatagcatacaggaaagagtaaatagttgttctctacaaatctcaggcagcacagtcacttctgggaggctgggagtgtaacgctgcacatcgttgcctgatgtgcatgccaagtcaatatgctgagaccctgggctgcagca

SEQ ID NO: 108961 - DNA, 341 bp, Homo sapiens
cttatatacatgcacactcacacacatgcacgcttgcgtgcatatacatgcactcttatacatgcatgcacactgacaatatacatgcacacatatatacatgcatgcccacacacacatgcatgcttacacacacagacacagacacacacaaacacacgtattctctttctgtctctctgtctctggggcacagcaaccttggcaaaagccatgggaggagggtcctctcctgcttaggtgcagcagcagagaggtccctgagttgaggggcccctgaggagccaccagggaggaggataggccacttcctgttgagaggcccagctgagggagagccc

SEQ ID NO: 108962 - DNA, 419 bp, Homo sapiens
ttctgaatatagatgcccttaacagaaagctctggtaggaattcgagagattgcgaagtaaatgcatggattatctttaatgctgtgaaagtataaatgtcagagtggcaggtcagagagtctcttgaaaaccaatacgaagtgggtaggaagaagaggcagagacatttcacccactttttaggctcactgcctgctgctcagcagggccaccatgatttatctgaattctgtgtcaatttccataactgcatatcactctacaggtacccactgggattacttacaagagattttgctaatgaggatgtacttccgggtacagggttctgtggcatgcatttaaaaaggcagtagctggctgggcgccgtggctcacacctgtaatgtaattccagcactttgggaagccaaggagg

SEQ ID NO: 108963 - DNA, 270 bp, Homo sapiens
cttcctgatttttagtagttttgacatttttactaataatgtttattgaatactttgtcagctaattaataagatcttaaaattattgagtatcagacattgttataatattttacttgtattaccccatctgcacaattctgaagtgggtaacttaccagttttttttttttcttaactcattagaaagaagagttgaataacatggacagggttacacactgaatgtggtacagccatttagtgagaactaggctatttcaacgaact

SEQ ID NO: 108964 - DNA, 472 bp, Homo sapiens
aaatttggtgacctttgtaatgtggaacagtattcttcattttaaataaaatttagagtgattaaaaaaatgattatttacctggggcattaaaccaagtctgatgaggtttttagcttcatttgtgatgtaaaacccatagtgaagattagaagtagttcctgaagtatgcataccttgtgaaatatatttctagtttcaatatctttcctaggggaaatgcccatgctatggaaatcactatgattagcattaattgttatgcttcttgggtctccttgcaaagaagccagacttgtaaaaacgaacctctttttttgccctgtaaaggtcatagcaacagacattgtcttaaaatggaatagtataatggtctcttgactgatttaaatggtaatatgtaataatatacaattatattgtatgggtgatatgggtggtatctttcattaagttacatttctttcatatt

SEQ ID NO: 108965 - DNA, 674 bp, Homo sapiens
cctacagagttcttcacaaggaaagatagaagggatgggtaaagccaagctatcactataaatgtcatgaagctaaattcagtggccttttcagctgatgcagcttatttttattttattttgactcatgacagtaggtggtcaatcaatgcataataataatgtacctctaagtctccatatgctgtcaaacctggatgtgggttctggtaattagcttagcaattgatagcacttgttgtagaaagaatagggaaagaaagacaaatgacacaccaagaaatggatgtgctcacgtagcctaggtgttgttaagcgcaacacataagtctaccccttggaggatactatgtatggaagatttgagttagaagtttgcactgcccagacagggatccaagaagctttgcttggatgaccattttccccaccccaagaaagccatctcaaaatgaagctgactcccaccattccaatcccaccttccgaacttttctgtgaatcacccctcctttagggatgcctttaggggttacacgctctcttccgtgaataatggggaagagcggccacaagagggcgcgttccaaagacttttgctccttgtcagtgtatccagggaaaggcagttgcgcgtactggaagcccctgtctgtagcgccctaatcttggtg

SEQ ID NO: 108966 - DNA, 364 bp, Homo sapiens
gtcttcaattctgcaggttcagtgatctttctaaagcacaaatctcatgatgtcactctcctacttaaaactctccaatggctccctctctggtccagaagatctaaagtccttaggaaggtgttcaaggactctatgagctagcttcccaccttccacctctctcaaaagagctgaaaaacagtttcaactcttttttgggtagaatagcttggtaagggtgctcagttttaatgacctgatggacgggtttaagatgactgggataaggcaacccctccttgtccttgctttcatagcaaacttagggcacaactgggagtggcccagctcttgtatgcacttacctcattcatatcagtat

SEQ ID NO: 108967 - DNA, 555 bp, Homo sapiens
actgaaactgcagaaagtgaaactgtggaaaagagaggactcctgaactaacctggaagtttggagacctagttttaaagttgtatgttataacttagaatatgtattaatttttctggctgtagtttctttatataaatgtaagtggattgtcagctgtacaggcctgggaatctgctgtcctgcaagtgcaagggctctgaggtagagatatatttggcatggtgagaaacaacaaggaggctactgtggctggacagtgtttgaggagggaggagtagtgataggacttcacatttgagaagtaaggggtgggagcaggaggcaaattgtgcagggctttgtaagccattttaaagacaatctttattctgagggaggtggaaagccattggagggatatgaatagagtagtgacatgatgtgacttaaattttaacacggtcactctagctgttgtgtagaatataagtggtaagggaacaagggcaaaagatcagttaggaggaaattgctgtggatagttttgcctaaaatcttataatgcattgttat

SEQ ID NO: 108968 - DNA, 429 bp, Homo sapiens
tttttttgagacagagtttcgctctcgttgcccaggctggagtacagtcgcatgatcttggctcactgcaacctctgcctcccaggttcaagtgattattttgcctcagcctccaagtagctgggattacaggtgcacaccagcatgcccagctaatttttgtatttttaatagagacggggtttcaccatgttggccaggctggtctcgatctcctgacctcagaagatccacccacctcagtctcccagactgctgggattacaggcgtgagccactgtgcccggccagagactaagagttctttatggtccacacacacaagtaggctcctgtggctaatcacaacaatacctagtatttctcaagggcccactatgtgtcaggcactgttccaagtgttttaaaagttgtcatcatttaataaca

SEQ ID NO: 108969 - DNA, 547 bp, Homo sapiens
aagaccaatggaagcgggcgttgctggtcgctaagagaaccctcggcggcaagatggcagcggcgggcgagggcaccccgagctcccgcgggccgcgtcgggacccgcctaggcggccgccccggaacggttatggtgtctacgtatacccaaattccttctttcgatatgaaggagaatggaaagcagggaggaagcacggtcacgggacagttgtaatttaacgatggcagtcattacgaaggggcgttgtggacggaccgagatcacgggagacggccgcggcacgtgggcctggtcccggagacaccttctctggacacgttgtactgcgaagagcccatcaacaggctacggcgtacaagagagtacaaagccggcagaatgtcctgaaacgggaggcctcccaggggaatgggggaagggcaacgaggataatggaggacacgagatggagcagcgacccaggactcccccaggacaaccgaggcacagaactgggcagatcactccaaaacgggacaagacgacgccacccgccccgccg

SEQ ID NO: 108970 - DNA, 461 bp, Homo sapiens
ggcagggtagggatgagcatcttcattttcttcattttacacggaaaagaaatctctggttgaacgtggtcagtgacttgcttcagctgggagacttgggactgaagctgccctctgtgactctgcactctgtccgtgataccagggaactggtgaatccaggagcctcccattgtgatgctcactccttctcctgtccattcatatgggtaaaaaaggttttgtggcttaagtagcatccagtttcatctcaagtttcagttcccataaaataaacagatactagggtagcaaatggtcccttattaaatgtcacaggggaaaaagagaacaaaaatcattttctgtactctccagaatacagttgagtgtcccgattgcctcatacctccagtgagaacagcagcagcatttatgggctatctcagtgagccacttttctgttaaacaatccaacacgg

SEQ ID NO: 108971 - DNA, 256 bp, Homo sapiens
ctgctccttcccagctgacacgtgcagctgtccgggggcctcaccctctgtcctggagatcgggtttcatgatggccccaaggagtactggctgccccagggcctggtccctgcactcacctgagtggagccatgggcctagagcctaggtccccacctctggaacctgcaccctcctggagagcaccatgcactgcctgccctggaatcctgaaccctgccttccccaatctgcctttctcatcctgactccctg

SEQ ID NO: 108972 - DNA, 404 bp, Homo sapiens
gagacgccaagacagctgtgggagaaggaagaagaggagggctctggaggaggccacgagccatctttgggaccccagcctgcggcagcactgggtccaagggggtctctgtcctgactggagctcgaggaagggctagaaggtgatctgaggtcaggcacagtctccctgtgctcaagggtcctgggcaaggccagggagtgcaggcaggactctcagaagaaatgggcctagggttcagggcaatgtggttgtttcctggtgttggaggagttcagagctggaggctcagctggggtcgggcagggaaggggctgagccgagactagcgttgtgctatgggtgtggctggcactgacatttagaaaaagactgggtgggactggaaccagggctaggcataa

SEQ ID NO: 108973 - DNA, 400 bp, Homo sapiens
tgagacagactctcgctctgtcacccaggccagagtgcagtggtgcgatctcagctcagtgcaacctctgcctctcggtttcaagcgattttcgtgtctcagcctcccctgtagctgggattataggagcccaccaacatgcccagctgatttttctgttctagtagagatgagattttaccacgttaaccaggttggtgtcgaactgacctcaagtgatctgcccaccttggcctcccaaagtgctggaattacaggtgtgagccaccatgctcagccaggatctccttttttatggccaaatactattccatagtgtatataaaccacagtttctttatccattcatctgtggggttttttgttttttttcgagacggagtcttgctttgttgctcag

SEQ ID NO: 108974 - DNA, 312 bp, Homo sapiens
ttcctccctaagattggggaaaaggtatagatgtccactacttctattcagcattatagggaagtcttaatgtcttattcagaaataatacaatttgcagaaaattcccaaggaatttgttaaaaagttgctggaacttaataaatgagtttaacagtacaatttctgtgtgtttaagctcaacatatagaaataattgtatttctacatacagtgaacaattagaaactgaaatgtagcgccgggcgcggtggctcacgcctgtaatcccagcactttgagaggccgaagcgggcggatcacgaggtcagg

SEQ ID NO: 108975 - DNA, 1686 bp, Homo sapiens
  misc_feature (1677)..(1677): n is a, c, g, or t
  misc_feature (1679)..(1679): n is a, c, g, or t
ggcttagccgccaccgcgcgcttcggaaggccagagggagggggaggcctgtcagtctcgcgcgttgcctgggcgaagggggcggagctttggcgtggggcggccaatagtgggggtggctgcgtgggtcgccatggggacggggctgttcccggggaggctgtgatgggttgacaggtgcgtgacagtgggagctgctctcggcacaagcatgtacggcaaaggcaagagtaacagcagcgccgtcccgtccgacagccaggcccgggagaagttagcactctacgtatatgaatatctgctccatgtaggagctcagaaatcagctcaaacatttttatcagagataagatgggaaaaaaacatcacattgggggaaccaccaggattcttacattcttggtggtgtgtattttgggatctctactgtgcagctccagagagacgtgaaacatgtgaacactcaagtgaagcaaaagccttccatgattacagtgctgcagcagctcccagtccagtgctaggaaacattcccccaggagatggcatgccagtaggtcctgtaccaccagggttctttcagccttttatgtcacctcggtaccctggaggtccaaggcccccattgaggatacctaatcaggcacttggaggtgtcccaggaagtcagccattactccccagtggaatggatccaactcgacaacaaggacatccaaatatgggtgggccaatgcagagaatgactcctccaagaggaatggtgcccttaggaccacagtctgacccttggttatcattacagaactatggaggtgcaatgagacccccactgaatgctttaggtggccctggaatgcctggaatgaacatgggtccaggtggtggtagaccttggccaaacccaacaaatgccaattcaataccatactcctcagcatctcctgggaattatgtaggtcctccaggaggtggagggccaccaggaacacccatcatgcctagtccagcagattcaaccaactctggtgataacatgtatactttaatgaatgcagtacctcctggacctaacagacctaattttccaatgggtcctgggtcagatggtcccatgggtggattaggaggaatggagtcacatcacatgaatggctctttaggctcaggagatatggacagtatttccaagaattctcccaataatatgagcctgagtaatcaaccgggcactccaagggatgatggcgaaatggggggaaatttcttaaatccttttcagagtgagagttactcccctagcatgacaatgagcgtgtgatccattaccaagtctcctcatgaaaaccacagtgagtcagcccttcacagaactactacggaagaaaattattcatcacagtgtacagttaaacaaaggaatctcagtcacaccaaacactctatgatgttcagacaaggacaatattgcctgacaatgcatttctcagaatgtatacttatcattaagtaacatatgactgtatgtactagttcctgatgacttacttctctcaaattcataatgatttagtccttgtaaaaataaagattttgcctgtgcctaaacagggatactaggcagaactgttgagaaaaaaaagctgaattaaatttatgttgcagatttaaactatnanaaaaaaa

SEQ ID NO: 108976 - DNA, 582 bp, Homo sapiens
  misc_feature (573)..(573): n is a, c, g, or t
  misc_feature (575)..(575): n is a, c, g, or t
tgaaaagcattgtttaattgcaggtaagaggaatcttctctttcctttaggcttatagtctctaaagtgaaaatttggcaggatatagtcatgcagctcataatgacattccaatcaaccacagactgcatatacagcagtggtcctataagattataataccatatttttagcatatcttttctatgcttagatacacaaataccattgtattacagttgcctttggtattcagtacagtaacatgctgtacaggtttgtagcctaggagcaatagtttatattatatagcctaggtgtgtaggagcctataccatctaggtttgtgtaagtacactctatgatgttcagacaaggacaatattgcctgacaatgcatttctcagaatgtatacttatcattaagtaacatatgactgtatgtactagttcctgatgacttacttctctcaaattcataatgatttagtccttgtaaaaataaagattttgcctgtgcctaaacagggatactaggcagaactgttgagaaaaaaaagctgaattaaatttatgttgcagatttaaactatnanaaaaaaa

SEQ ID NO: 108977 - DNA, 636 bp, Homo sapiens
ggcttagccgccaccgcgcgcttcggaaggccagagggagggggaggcctgtcagtctcgcgcgttgcctgggcgaagggggcggagctttggcgtggggcggccaatagtgggggtggctgcgtgggtcgccatggggacggggctgttcccggggaggctgtgatgggttgacaggtgcgtgacagtgggagctgctctcggcacaagcatgtacggcaaaggcaagagtaacagcagcgccgtcccgtccgacagccaggcccgggagaagttagcactctacgtatatgaatatctgctccatgtaggagctcagaaatcagctcaaacatttttatcagagataagatgggaaaaaaacatcacattgggggaaccaccaggattcttacattcttggtggtgtgtattttgggatctctactgtgcagctccagagagacgtgaaacatgtgaacactcaagtgaagcaaaagccttccatgattacgtaagttaacatataattttacaaagttacactgtcagttttctgtttaaccactgctcttaaaaaatacactggctcatctattcttttgtttttggtacttaaggaaattgtttggtctcttttttcttggaaaagtaggt

SEQ ID NO: 108978 - DNA, 493 bp, Homo sapiens
ggcttagccgccaccgcgcgcttcggaaggccagagggagggggaggcctgtcagtctcgcgcgttgcctgggcgaagggggcggagctttggcgtggggcggccaatagtgggggtggctgcgtgggtcgccatggggacggggctgttcccggggaggctgtgatgggttgacaggtgcgtgacagtgggagctgctctcggcacaagcatgtacggcaaaggcaagagtaacagcagcgccgtcccgtccgacagccaggcccgggagaagttagcactctacgtatatgaatatctgctccatgtaggagctcagaaatcagctcaaacatttttatcagagataagatgggaaaaaaacatcacattgggggaaccaccaggattcttacattcttggtggtggtaagtatcctttattccatttttactggcttgatgatgcatttcaataggcctgtactatacctgtttatgatttcatgcttcc

SEQ ID NO: 108979 - DNA, 1797 bp, Homo sapiens
ggcttagccgccaccgcgcgcttcggaaggccagagggagggggaggcctgtcagtctcgcgcgttgcctgggcgaagggggcggagctttggcgtggggcggccaatagtgggggtggctgcgtgggtcgccatggggacggggctgttcccggggaggctgtgatgggttgacaggtgcgtgacagtgggagctgctctcggcacaagcatgtacggcaaaggcaagagtaacagcagcgccgtcccgtccgacagccaggcccgggagaagttagcactctacgtatatgaatatctgctccatgtaggagctcagaaatcagctcaaacatttttatcagagataagatgggaaaaaaacatcacattgggggaaccaccaggattcttacattcttggtggtgtgtattttgggatctctactgtgcagctccagagagacgtgaaacatgtgaacactcaagtgaagcaaaagccttccatgattacccttttatgtcacctcggtaccctggaggtccaaggcccccattgaggatacctaatcaggcacttggaggtgtcccaggaagtcagccattactccccagtggaatggatccaactcgacaacaaggacatccaaatatgggtgggccaatgcagagaatgactcctccaagaggaatggtgcccttaggaccacagaactatggaggtgcaatgagacccccactgaatgctttaggtggccctggaatgcctggaatgaacatgggtccaggtggtggtagaccttggccaaacccaacaaatgccaattcaataccatactcctcagcatctcctgggaattatgtaggtcctccaggaggtggagggccaccaggaacacccatcatgcctagtccagcagattcaaccaactctggtgataacatgtatactttaatgaatgcagtacctcctggacctaacagacctaattttccaatgggtcctgggtcagatggtcccatgggtggattaggaggaatggagtcacatcacatgaatggctctttaggctcaggagatatggacagtatttccaagaattctcccaataatatgagcctgagtaatcaaccgggcactccaagggatgatggcgaaatggggggaaatttcttaaatccttttcagagtgagagttactcccctagcatgacaatgagcgtgtgatccattaccaagtctcctcatgaaaaccacagtgagtcagcccttcacagaactactacggaagaaaattattcatcacagtgtacagttaaacaaaggaatctcagtcacaccaaaccaacctttttatttcctgctctctcccctcttttgtgaagaaagcgggtccaaatgtgattcaaacaactgtacggagtggcatattagaattgccctaaactgaactgcaaataattatgtgtgtatgtatatgtgtgggaaagagaatgtactgtatatgtgtatgttatacagacatatacacatacatacattgacccacaggacattgtaaaatattatcacatgacatcttaagtagaaataagtagggacttttattccatcctttttttcacgtttacattttaattattacaagttgctcctgccccctccctgaactattttgtgctgtgtatatcactgctttatataagttattttttaaggtgaactcagatgttatggttttgtaaatgtctgcaatcatggataggaataaaatcgcttatttgagagctttcattaaaatgcgtctgatgcaagtt

SEQ ID NO: 108980 - DNA, 1827 bp, Homo sapiens
ggcttagccgccaccgcgcgcttcggaaggccagagggagggggaggcctgtcagtctcgcgcgttgcctgggcgaagggggcggagctttggcgtggggcggccaatagtgggggtggctgcgtgggtcgccatggggacggggctgttcccggggaggctgtgatgggttgacaggtgcgtgacagtgggagctgctctcggcacaagcatgtacggcaaaggcaagagtaacagcagcgccgtcccgtccgacagccaggcccgggagaagttagcactctacgtatatgaatatctgctccatgtaggagctcagaaatcagctcaaacatttttatcagagataagatgggaaaaaaacatcacattgggggaaccaccaggattcttacattcttggtggtgtgtattttgggatctctactgtgcagctccagagagacgtgaaacatgtgaacactcaagtgaagcaaaagccttccatgattacagtgctgcagcagctcccagtccagtgctaggaaacattcccccaggagatggcatgccagtaggtcctgtaccaccagggttctttcaggcacttggaggtgtcccaggaagtcagccattactccccagtggaatggatccaactcgacaacaaggacatccaaatatgggtgggccaatgcagagaatgactcctccaagaggaatggtgcccttaggaccacagaactatggaggtgcaatgagacccccactgaatgctttaggtggccctggaatgcctggaatgaacatgggtccaggtggtggtagaccttggccaaacccaacaaatgccaattcaataccatactcctcagcatctcctgggaattatgtaggtcctccaggaggtggagggccaccaggaacacccatcatgcctagtccagcagattcaaccaactctggtgataacatgtatactttaatgaatgcagtacctcctggacctaacagacctaattttccaatgggtcctgggtcagatggtcccatgggtggattaggaggaatggagtcacatcacatgaatggctctttaggctcaggagatatggacagtatttccaagaattctcccaataatatgagcctgagtaatcaaccgggcactccaagggatgatggcgaaatggggggaaatttcttaaatccttttcagagtgagagttactcccctagcatgacaatgagcgtgtgatccattaccaagtctcctcatgaaaaccacagtgagtcagcccttcacagaactactacggaagaaaattattcatcacagtgtacagttaaacaaaggaatctcagtcacaccaaaccaacctttttatttcctgctctctcccctcttttgtgaagaaagcgggtccaaatgtgattcaaacaactgtacggagtggcatattagaattgccctaaactgaactgcaaataattatgtgtgtatgtatatgtgtgggaaagagaatgtactgtatatgtgtatgttatacagacatatacacatacatacattgacccacaggacattgtaaaatattatcacatgacatcttaagtagaaataagtagggacttttattccatcctttttttcacgtttacattttaattattacaagttgctcctgccccctccctgaactattttgtgctgtgtatatcactgctttatataagttattttttaaggtgaactcagatgttatggttttgtaaatgtctgcaatcatggataggaataaaatcgcttatttgagagctttcattaaaatgcgtctgatgcaagtt

SEQ ID NO: 108981 - DNA, 1737 bp, Homo sapiens
ggcttagccgccaccgcgcgcttcggaaggccagagggagggggaggcctgtcagtctcgcgcgttgcctgggcgaagggggcggagctttggcgtggggcggccaatagtgggggtggctgcgtgggtcgccatggggacggggctgttcccggggaggctgtgatgggttgacaggtgcgtgacagtgggagctgctctcggcacaagcatgtacggcaaaggcaagagtaacagcagcgccgtcccgtccgacagccaggcccgggagaagttagcactctacgtatatgaatatctgctccatgtaggagctcagaaatcagctcaaacatttttatcagagataagatgggaaaaaaacatcacattgggggaaccaccaggattcttacattcttggtggtgtgtattttgggatctctactgtgcagctccagagagacgtgaaacatgtgaacactcaagtgaagcaaaagccttccatgattacgcacttggaggtgtcccaggaagtcagccattactccccagtggaatggatccaactcgacaacaaggacatccaaatatgggtgggccaatgcagagaatgactcctccaagaggaatggtgcccttaggaccacagaactatggaggtgcaatgagacccccactgaatgctttaggtggccctggaatgcctggaatgaacatgggtccaggtggtggtagaccttggccaaacccaacaaatgccaattcaataccatactcctcagcatctcctgggaattatgtaggtcctccaggaggtggagggccaccaggaacacccatcatgcctagtccagcagattcaaccaactctggtgataacatgtatactttaatgaatgcagtacctcctggacctaacagacctaattttccaatgggtcctgggtcagatggtcccatgggtggattaggaggaatggagtcacatcacatgaatggctctttaggctcaggagatatggacagtatttccaagaattctcccaataatatgagcctgagtaatcaaccgggcactccaagggatgatggcgaaatggggggaaatttcttaaatccttttcagagtgagagttactcccctagcatgacaatgagcgtgtgatccattaccaagtctcctcatgaaaaccacagtgagtcagcccttcacagaactactacggaagaaaattattcatcacagtgtacagttaaacaaaggaatctcagtcacaccaaaccaacctttttatttcctgctctctcccctcttttgtgaagaaagcgggtccaaatgtgattcaaacaactgtacggagtggcatattagaattgccctaaactgaactgcaaataattatgtgtgtatgtatatgtgtgggaaagagaatgtactgtatatgtgtatgttatacagacatatacacatacatacattgacccacaggacattgtaaaatattatcacatgacatcttaagtagaaataagtagggacttttattccatcctttttttcacgtttacattttaattattacaagttgctcctgccccctccctgaactattttgtgctgtgtatatcactgctttatataagttattttttaaggtgaactcagatgttatggttttgtaaatgtctgcaatcatggataggaataaaatcgcttatttgagagctttcattaaaatgcgtctgatgcaagtt

SEQ ID NO: 108982 - DNA, 1743 bp, Homo sapiens
ggcttagccgccaccgcgcgcttcggaaggccagagggagggggaggcctgtcagtctcgcgcgttgcctgggcgaagggggcggagctttggcgtggggcggccaatagtgggggtggctgcgtgggtcgccatggggacggggctgttcccggggaggctgtgatgggttgacaggtgcgtgacagtgggagctgctctcggcacaagcatgtacggcaaaggcaagagtaacagcagcgccgtcccgtccgacagccaggcccgggagaagttagcactctacgtatatgaatatctgctccatgtaggagctcagaaatcagctcaaacatttttatcagagataagatgggaaaaaaacatcacattgggggaaccaccaggattcttacattcttggtggtgtgtattttgggatctctactgtgcagctccagagagacgtgaaacatgtgaacactcaagtgaagcgcccccattgaggatacctaatcaggcacttggaggtgtcccaggaagtcagccattactccccagtggaatggatccaactcgacaacaaggacatccaaatatgggtgggccaatgcagagaatgactcctccaagaggaatggtgcccttaggaccacagaactatggaggtgcaatgagacccccactgaatgctttaggtggccctggaatgcctggaatgaacatgggtccaggtggtggtagaccttggccaaacccaacaaatgccaattcaataccatactcctcagcatctcctgggaattatgtaggtcctccaggaggtggagggccaccaggaacacccatcatgcctagtccagcagattcaaccaactctggtgataacatgtatactttaatgaatgcagtacctcctggacctaacagacctaattttccaatgggtcctgggtcagatggtcccatgggtggattaggaggaatggagtcacatcacatgaatggctctttaggctcaggagatatggacagtatttccaagaattctcccaataatatgagcctgagtaatcaaccgggcactccaagggatgatggcgaaatggggggaaatttcttaaatccttttcagagtgagagttactcccctagcatgacaatgagcgtgtgatccattaccaagtctcctcatgaaaaccacagtgagtcagcccttcacagaactactacggaagaaaattattcatcacagtgtacagttaaacaaaggaatctcagtcacaccaaaccaacctttttatttcctgctctctcccctcttttgtgaagaaagcgggtccaaatgtgattcaaacaactgtacggagtggcatattagaattgccctaaactgaactgcaaataattatgtgtgtatgtatatgtgtgggaaagagaatgtactgtatatgtgtatgttatacagacatatacacatacatacattgacccacaggacattgtaaaatattatcacatgacatcttaagtagaaataagtagggacttttattccatcctttttttcacgtttacattttaattattacaagttgctcctgccccctccctgaactattttgtgctgtgtatatcactgctttatataagttattttttaaggtgaactcagatgttatggttttgtaaatgtctgcaatcatggataggaataaaatcgcttatttgagagctttcattaaaatgcgtctgatgcaagtt

SEQ ID NO: 108983 - DNA, 1478 bp, Homo sapiens
ggcttagccgccaccgcgcgcttcggaaggccagagggagggggaggcctgtcagtctcgcgcgttgcctgggcgaagggggcggagctttggcgtggggcggccaatagtgggggtggctgcgtgggtcgccatggggacggggctgttcccggggaggctgtgatgggttgacaggtgcgtgacagtgggagctgctctcggcacaagcatgtacggcaaaggcaagagtaacagcagcgccgtcccgtccgacagccaggcccgggagaagttagcactctacgtatatgaatatctgctccatgtaggagctcagaaatcagctcaaacatttttatcagagataagatgggaaaaaaacatcacattgggggaaccaccaggattcttacattcttggtggtgtgtattttgggatctctactgtgcagctccagagagacgtgaaacatgtgaacactcaagtgaagcaaaagccttccatgattacagtgctgcagcagctcccagtccagtgctaggggtcctccaggaggtggagggccaccaggaacacccatcatgcctagtccagcagattcaaccaactctggtgataacatgtatactttaatgaatgcagtacctcctggacctaacagacctaattttccaatgggtcctgggtcagatggtcccatgggtggattaggaggaatggagtcacatcacatgaatggctctttaggctcaggagatatggacagtatttccaagaattctcccaataatatgagcctgagtaatcaaccgggcactccaagggatgatggcgaaatggggggaaatttcttaaatccttttcagagtgagagttactcccctagcatgacaatgagcgtgtgatccattaccaagtctcctcatgaaaaccacagtgagtcagcccttcacagaactactacggaagaaaattattcatcacagtgtacagttaaacaaaggaatctcagtcacaccaaaccaacctttttatttcctgctctctcccctcttttgtgaagaaagcgggtccaaatgtgattcaaacaactgtacggagtggcatattagaattgccctaaactgaactgcaaataattatgtgtgtatgtatatgtgtgggaaagagaatgtactgtatatgtgtatgttatacagacatatacacatacatacattgacccacaggacattgtaaaatattatcacatgacatcttaagtagaaataagtagggacttttattccatcctttttttcacgtttacattttaattattacaagttgctcctgccccctccctgaactattttgtgctgtgtatatcactgctttatataagttattttttaaggtgaactcagatgttatggttttgtaaatgtctgcaatcatggataggaataaaatcgcttatttgagagctttcattaaaatgcgtctgatgcaagtt

SEQ ID NO: 108984 - DNA, 1106 bp, Homo sapiens
aaatgttcagaggtggtggctagctggagggaaaaaaagaacgcataagaagaaaatcagtgagcatttcactctccatggaaatagtattttattaacatagtgaaaagcacacactgctttggacctgtgaacttagtgttcagtgttcatggtcctccaggaggtggagggccaccaggaacacccatcatgcctagtccagcagattcaaccaactctggtgataacatgtatactttaatgaatgcagtacctcctggacctaacagacctaattttccaatgggtcctgggtcagatggtcccatgggtggattaggaggaatggagtcacatcacatgaatggctctttaggctcaggagatatggacagtatttccaagaattctcccaataatatgagcctgagtaatcaaccgggcactccaagggatgatggcgaaatggggggaaatttcttaaatccttttcagagtgagagttactcccctagcatgacaatgagcgtgtgatccattaccaagtctcctcatgaaaaccacagtgagtcagcccttcacagaactactacggaagaaaattattcatcacagtgtacagttaaacaaaggaatctcagtcacaccaaaccaacctttttatttcctgctctctcccctcttttgtgaagaaagcgggtccaaatgtgattcaaacaactgtacggagtggcatattagaattgccctaaactgaactgcaaataattatgtgtgtatgtatatgtgtgggaaagagaatgtactgtatatgtgtatgttatacagacatatacacatacatacattgacccacaggacattgtaaaatattatcacatgacatcttaagtagaaataagtagggacttttattccatcctttttttcacgtttacattttaattattacaagttgctcctgccccctccctgaactattttgtgctgtgtatatcactgctttatataagttattttttaaggtgaactcagatgttatggttttgtaaatgtctgcaatcatggataggaataaaatcgcttatttgagagctttcattaaaatgcgtctgatgcaagtt

SEQ ID NO: 108985 - DNA, 996 bp, Homo sapiens
  misc_feature (1)..(1): n is a, c, g, or t
  misc_feature (19)..(19): n is a, c, g, or t
  misc_feature (26)..(26): n is a, c, g, or t
nttttagggggtactggtnggcggangctgcttggtcataccaacacacgccaattcaataccatacctcctcagcttgctccgtgggaattaatgccattcaaccaactctggtgataacatgtatactttaatgaatgcagtacctcctggacctaacagacctaattttccaatgggtcctgggtcagatggtcccatgggtggattaggaggaatggagtcacatcacatgaatggctctttaggctcaggagatatggacagtatttccaagaattctcccaataatatgagcctgagtaatcaaccgggcactccaagggatgatggcgaaatggggggaaatttcttaaatccttttcagagtgagagttactcccctagcatgacaatgagcgtgtgatccattaccaagtctcctcatgaaaaccacagtgagtcagcccttcacagaactactacggaagaaaattattcatcacagtgtacagttaaacaaaggaatctcagtcacaccaaaccaacctttttatttcctgctctctcccctcttttgtgaagaaagcgggtccaaatgtgattcaaacaactgtacggagtggcatattagaattgccctaaactgaactgcaaataattatgtgtgtatgtatatgtgtgggaaagagaatgtactgtatatgtgtatgttatacagacatatacacatacatacattgacccacaggacattgtaaaatattatcacatgacatcttaagtagaaataagtagggacttttattccatcctttttttcacgtttacattttaattattacaagttgctcctgccccctccctgaactattttgtgctgtgtatatcactgctttatataagttattttttaaggtgaactcagatgttatggttttgtaaatgtctgcaatcatggataggaataaaatcgcttatttgagagctttcattaaaatgcgtctgatgcaagtt

SEQ ID NO: 108986 - DNA, 1120 bp, Homo sapiens
attttcaaaaaatatatgtagatatctctatatatgttatatatacatttttaaatttttaattgggtagggtatataaaatggtctttctaaaatttcacatttaggaatctatgataacaacagttttcttcatgcttccataaaaaaaaaacgattgggaactaaggatagaactccttgcattttccatcagatggtactgattcactatactgtataaaagaagaggaattttttcagatttaaaaactcaggagctatatgctggaaaatacatatagtatacttcacttatttaaattaaaggagtgtttaatttataaatgaaatcttacctaataaaggctttctttttatattttgtttcaggctcaggagatatggacagtatttccaagaattctcccaataatatgagcctgagtaatcaaccgggcactccaagggatgatggcgaaatggggggaaatttcttaaatccttttcagagtgagagttactcccctagcatgacaatgagcgtgtgatccattaccaagtctcctcatgaaaaccacagtgagtcagcccttcacagaactactacggaagaaaattattcatcacagtgtacagttaaacaaaggaatctcagtcacaccaaaccaacctttttatttcctgctctctcccctcttttgtgaagaaagcgggtccaaatgtgattcaaacaactgtacggagtggcatattagaattgccctaaactgaactgcaaataattatgtgtgtatgtatatgtgtgggaaagagaatgtactgtatatgtgtatgttatacagacatatacacatacatacattgacccacaggacattgtaaaatattatcacatgacatcttaagtagaaataagtagggacttttattccatcctttttttcacgtttacattttaattattacaagttgctcctgccccctccctgaactattttgtgctgtgtatatcactgctttatataagttattttttaaggtgaactcagatgttatggttttgtaaatgtctgcaatcatggataggaataaaatcgcttatttgagagctttcattaaaatgcgtctgatgcaagtt

SEQ ID NO: 108987 - DNA, 1260 bp, Homo sapiens
  misc_feature (1251)..(1251): n is a, c, g, or t
  misc_feature (1253)..(1253): n is a, c, g, or t
ggcttagccgccaccgcgcgcttcggaaggccagagggagggggaggcctgtcagtctcgcgcgttgcctgggcgaagggggcggagctttggcgtggggcggccaatagtgggggtggctgcgtgggtcgccatggggacggggctgttcccggggaggctgtgatgggttgacaggtgcgtgacagtgggagctgctctcggcacaagcatgtacggcaaaggcaagagtaacagcagcgccgtcccgtccgacagccaggcccgggagaagttagcactctacgtatatgaatatctgctccatgtaggagctcagaaatcagctcaaacatttttatcagagataagatgggaaaaaaacatcacattgggggaaccaccaggattcttacattcttggtggtgtgtattttgggatctctactgtgcagctccagagagacgtgaaacatgtgaacactcaagtgaagcaaaagccttccatgattacagtgctgcagcagctcccagtccagtgctaggggtcctccaggaggtggagggccaccaggaacacccatcatgcctagtccagcagattcaaccaactctggtgataacatgtatactttaatgaatgcagtacctcctggacctaacagacctaattttccaatgggtcctgggtcagatggtcccatgggtggattaggaggaatggagtcacatcacatgaatggctctttaggctcaggagatatggacagtatttccaagaattctcccaataatatgagcctgagtaatcaaccgggcactccaagggatgatggcgaaatggggggaaatttcttaaatccttttcagagtgagagttactcccctagcatgacaatgagcgtgtgatccattaccaagtctcctcatgaaaaccacagtgagtcagcccttcacagaactactacggaagaaaattatattatatagcctaggtgtgtaggagcctataccatctaggtttgtgtaagtacactctatgatgttcagacaaggacaatattgcctgacaatgcatttctcagaatgtatacttatcattaagtaacatatgactgtatgtactagttcctgatgacttacttctctcaaattcataatgatttagtccttgtaaaaataaagattttgcctgtgcctaaacagggatactaggcagaactgttgagaaaaaaaagctgaattaaatttatgttgcagatttaaactatnanaaaaaaa

SEQ ID NO: 108988 - DNA, 303 bp, Homo sapiens
ttgttctttgaaattgagaacacttatttttatcattattactatttagtacacattagaattttccaaaaattcatgtcaatgtgaagtcaaattaataagttttatatgacctcctgagcttacaagtgaccttttaatcatcatcatcacattatgatcctagctacatctcaaagtcaacacagaggaaaatacgttacaccatttagagggaaacacctaacagagaaacaaggataaaatggtaacaagggaaatctttcccacagaaatgttcagaggtggtggctagctggaggg

SEQ ID NO: 108989 - DNA, 293 bp, Homo sapiens
acttgacaaaaaatcatgaaataaattcattttaggtcagtgtccatattgctacatgaatcaaaaatttttttgtcctattcgtgttccagataccatactcctcagcatctcctgggaattatgtagtaagtacatttgggtttgtttgcttataagaattgatgttacattttatttgggcaatgaaacagttgtccagatgttaagaagagcccctgtgtttggccaagaagtgaacatcttgagttgtttcatctgccaacctcagtacatatgttgatgttcattag

SEQ ID NO: 108990 - DNA, 354 bp, Homo sapiens
taatgatgagcctctgggtgcagggagaggataggacttgatgctttccaggggaaatatttaaaatttcagtactaagttaagtctgtatcattttactttttttatagtttcttattttatgttgtatgagatgaaaagcttgcacataaaagatgataagaaattagaattcatcgtttctgttgtaccaagaagaaccttagtgatctctaaaagaattgttgttaaaatatggattcttctttccttctagtactcccctagcatgacaatgagcgtgtgatccattaccaagtctcctcatgaaaaccacagtgagtcagcccttcacagaactactacggaagaaaa

SEQ ID NO: 108991 - DNA, 751 bp, Homo sapiens
actctttcaaaattgaattttggatttatgatatgtttcatttgaaaatgtttactattgtacatatcttaggatattaataaaatatattgaaatataattgcagccataccttaatcatttaacgtgctccagtgatcatacatattcacatggttttaaaaagacatagaccaaagtaattgctaaaatagaagcaaaaatacaagaatggacccctcagagaatgaattacacaggccttatccaattggagttatgtagggaaatcattaacgtttaacgtgctctcctttctttcccccctcctctttggttttgtttttttgttttgtggtagtctgacccttggttatcattacagaactatggaggtgcaatgagacccccactgaatgctttaggtggccctggaatgcctggaatgaacatgtagcaatgttatatcatatactacattattacgtggatgatattttatatatataataataccatattattctatttagtaaagtgttctattttctggcctctaaaatgacgttaatttgtaaaacaatttgagcaccacagtctctgtgtggtataaaaatgaactaaacaagagctgtagtgtttgcttcattttcacaacataatctcttatgttttctttgttcccttgcaacctttaattttttttcattttcaagtgctataaataacagcttttagtctatttcattttgataactacagagtctccata

SEQ ID NO: 108992 - DNA, 1887 bp, Homo sapiens
ggcttagccgccaccgcgcgcttcggaaggccagagggagggggaggcctgtcagtctcgcgcgttgcctgggcgaagggggcggagctttggcgtggggcggccaatagtgggggtggctgcgtgggtcgccatggggacggggctgttcccggggaggctgtgatgggttgacaggtgcgtgacagtgggagctgctctcggcacaagcatgtacggcaaaggcaagagtaacagcagcgccgtcccgtccgacagccaggcccgggagaagttagcactctacgtatatgaatatctgctccatgtaggagctcagaaatcagctcaaacatttttatcagagataagatgggaaaaaaacatcacattgggggaaccaccaggattcttacattcttggtggtgtgtattttgggatctctactgtgcagctccagagagacgtgaaacatgtgaacactcaagtgaagcaaaagccttccatgattacagtgctgcagcagctcccagtccagtgctaggaaacattcccccaggagatggcatgccagtaggtcctgtaccaccagggttctttcagccttttatgtcacctcggtaccctggaggtccaaggcccccattgaggatacctaatcaggcacttggaggtgtcccaggaagtcagccattactccccagtggaatggatccaactcgacaacaaggacatccaaatatgggtgggccaatgcagagaatgactcctccaagaggaatggtgcccttaggaccacagaactatggaggtgcaatgagacccccactgaatgctttaggtggccctggaatgcctggaatgaacatgggtccaggtggtggtagaccttggccaaacccaacaaatgccaattcaataccatactcctcagcatctcctgggaattatgtaggtcctccaggaggtggagggccaccaggaacacccatcatgcctagtccagcagattcaaccaactctggtgataacatgtatactttaatgaatgcagtacctcctggacctaacagacctaattttccaatgggtcctgggtcagatggtcccatgggtggattaggaggaatggagtcacatcacatgaatggctctttaggctcaggagatatggacagtatttccaagaattctcccaataatatgagcctgagtaatcaaccgggcactccaagggatgatggcgaaatggggggaaatttcttaaatccttttcagagtgagagttactcccctagcatgacaatgagcgtgtgatccattaccaagtctcctcatgaaaaccacagtgagtcagcccttcacagaactactacggaagaaaattattcatcacagtgtacagttaaacaaaggaatctcagtcacaccaaaccaacctttttatttcctgctctctcccctcttttgtgaagaaagcgggtccaaatgtgattcaaacaactgtacggagtggcatattagaattgccctaaactgaactgcaaataattatgtgtgtatgtatatgtgtgggaaagagaatgtactgtatatgtgtatgttatacagacatatacacatacatacattgacccacaggacattgtaaaatattatcacatgacatcttaagtagaaataagtagggacttttattccatcctttttttcacgtttacattttaattattacaagttgctcctgccccctccctgaactattttgtgctgtgtatatcactgctttatataagttattttttaaggtgaactcagatgttatggttttgtaaatgtctgcaatcatggataggaataaaatcgcttatttgagagctttcattaaaatgcgtctgatgcaagtt

SEQ ID NO: 108993 - DNA, 1911 bp, Homo sapiens
ggcttagccgccaccgcgcgcttcggaaggccagagggagggggaggcctgtcagtctcgcgcgttgcctgggcgaagggggcggagctttggcgtggggcggccaatagtgggggtggctgcgtgggtcgccatggggacggggctgttcccggggaggctgtgatgggttgacaggtgcgtgacagtgggagctgctctcggcacaagcatgtacggcaaaggcaagagtaacagcagcgccgtcccgtccgacagccaggcccgggagaagttagcactctacgtatatgaatatctgctccatgtaggagctcagaaatcagctcaaacatttttatcagagataagatgggaaaaaaacatcacattgggggaaccaccaggattcttacattcttggtggtgtgtattttgggatctctactgtgcagctccagagagacgtgaaacatgtgaacactcaagtgaagcaaaagccttccatgattacagtgctgcagcagctcccagtccagtgctaggaaacattcccccaggagatggcatgccagtaggtcctgtaccaccagggttctttcagccttttatgtcacctcggtaccctggaggtccaaggcccccattgaggatacctaatcaggcacttggaggtgtcccaggaagtcagccattactccccagtggaatggatccaactcgacaacaaggacatccaaatatgggtgggccaatgcagagaatgactcctccaagaggaatggtgcccttaggaccacagtctgacccttggttatcattacagaactatggaggtgcaatgagacccccactgaatgctttaggtggccctggaatgcctggaatgaacatgggtccaggtggtggtagaccttggccaaacccaacaaatgccaattcaataccatactcctcagcatctcctgggaattatgtaggtcctccaggaggtggagggccaccaggaacacccatcatgcctagtccagcagattcaaccaactctggtgataacatgtatactttaatgaatgcagtacctcctggacctaacagacctaattttccaatgggtcctgggtcagatggtcccatgggtggattaggaggaatggagtcacatcacatgaatggctctttaggctcaggagatatggacagtatttccaagaattctcccaataatatgagcctgagtaatcaaccgggcactccaagggatgatggcgaaatggggggaaatttcttaaatccttttcagagtgagagttactcccctagcatgacaatgagcgtgtgatccattaccaagtctcctcatgaaaaccacagtgagtcagcccttcacagaactactacggaagaaaattattcatcacagtgtacagttaaacaaaggaatctcagtcacaccaaaccaacctttttatttcctgctctctcccctcttttgtgaagaaagcgggtccaaatgtgattcaaacaactgtacggagtggcatattagaattgccctaaactgaactgcaaataattatgtgtgtatgtatatgtgtgggaaagagaatgtactgtatatgtgtatgttatacagacatatacacatacatacattgacccacaggacattgtaaaatattatcacatgacatcttaagtagaaataagtagggacttttattccatcctttttttcacgtttacattttaattattacaagttgctcctgccccctccctgaactattttgtgctgtgtatatcactgctttatataagttattttttaaggtgaactcagatgttatggttttgtaaatgtctgcaatcatggataggaataaaatcgcttatttgagagctttcattaaaatgcgtctgatgcaagtt

SEQ ID NO: 108994 - DNA, 1978 bp, Homo sapiens
ggcttagccgccaccgcgcgcttcggaaggccagagggagggggaggcctgtcagtctcgcgcgttgcctgggcgaagggggcggagctttggcgtggggcggccaatagtgggggtggctgcgtgggtcgccatggggacggggctgttcccggggaggctgtgatgggttgacaggtgcgtgacagtgggagctgctctcggcacaagcatgtacggcaaaggcaagagtaacagcagcgccgtcccgtccgacagccaggcccgggagaaaattcatctgtgccttattccagttcactcttgtaagggtgatgcttgtgatcccctcagccctcatgtattcattcgtattatattggaggttagcactctacgtatatgaatatctgctccatgtaggagctcagaaatcagctcaaacatttttatcagagataagatgggaaaaaaacatcacattgggggaaccaccaggattcttacattcttggtggtgtgtattttgggatctctactgtgcagctccagagagacgtgaaacatgtgaacactcaagtgaagcaaaagccttccatgattacagtgctgcagcagctcccagtccagtgctaggaaacattcccccaggagatggcatgccagtaggtcctgtaccaccagggttctttcagccttttatgtcacctcggtaccctggaggtccaaggcccccattgaggatacctaatcaggcacttggaggtgtcccaggaagtcagccattactccccagtggaatggatccaactcgacaacaaggacatccaaatatgggtgggccaatgcagagaatgactcctccaagaggaatggtgcccttaggaccacagaactatggaggtgcaatgagacccccactgaatgctttaggtggccctggaatgcctggaatgaacatgggtccaggtggtggtagaccttggccaaacccaacaaatgccaattcaataccatactcctcagcatctcctgggaattatgtaggtcctccaggaggtggagggccaccaggaacacccatcatgcctagtccagcagattcaaccaactctggtgataacatgtatactttaatgaatgcagtacctcctggacctaacagacctaattttccaatgggtcctgggtcagatggtcccatgggtggattaggaggaatggagtcacatcacatgaatggctctttaggctcaggagatatggacagtatttccaagaattctcccaataatatgagcctgagtaatcaaccgggcactccaagggatgatggcgaaatggggggaaatttcttaaatccttttcagagtgagagttactcccctagcatgacaatgagcgtgtgatccattaccaagtctcctcatgaaaaccacagtgagtcagcccttcacagaactactacggaagaaaattattcatcacagtgtacagttaaacaaaggaatctcagtcacaccaaaccaacctttttatttcctgctctctcccctcttttgtgaagaaagcgggtccaaatgtgattcaaacaactgtacggagtggcatattagaattgccctaaactgaactgcaaataattatgtgtgtatgtatatgtgtgggaaagagaatgtactgtatatgtgtatgttatacagacatatacacatacatacattgacccacaggacattgtaaaatattatcacatgacatcttaagtagaaataagtagggacttttattccatcctttttttcacgtttacattttaattattacaagttgctcctgccccctccctgaactattttgtgctgtgtatatcactgctttatataagttattttttaaggtgaactcagatgttatggttttgtaaatgtctgcaatcatggataggaataaaatcgcttatttgagagctttcattaaaatgcgtctgatgcaagtt

SEQ ID NO: 108995 - DNA, 1476 bp, Homo sapiens
caggaacccgtagatcagcggccatgcgctgagtcctgcgagatgtaaacactcatcataagcataggtcttccatgagtacagtgctgcagcagctcccagtccagtgctaggaaacattcccccaggagatggcatgccagtaggtcctgtaccaccagggttctttcagccttttatgtcacctcggtaccctggaggtccaaggcccccattgaggatacctaatcaggcacttggaggtgtcccaggaagtcagccattactccccagtggaatggatccaactcgacaacaaggacatccaaatatgggtgggccaatgcagagaatgactcctccaagaggaatggtgcccttaggaccacagaactatggaggtgcaatgagacccccactgaatgctttaggtggccctggaatgcctggaatgaacatgggtccaggtggtggtagaccttggccaaacccaacaaatgccaattcaataccatactcctcagcatctcctgggaattatgtaggtcctccaggaggtggagggccaccaggaacacccatcatgcctagtccagcagattcaaccaactctggtgataacatgtatactttaatgaatgcagtacctcctggacctaacagacctaattttccaatgggtcctgggtcagatggtcccatgggtggattaggaggaatggagtcacatcacatgaatggctctttaggctcaggagatatggacagtatttccaagaattctcccaataatatgagcctgagtaatcaaccgggcactccaagggatgatggcgaaatggggggaaatttcttaaatccttttcagagtgagagttactcccctagcatgacaatgagcgtgtgatccattaccaagtctcctcatgaaaaccacagtgagtcagcccttcacagaactactacggaagaaaattattcatcacagtgtacagttaaacaaaggaatctcagtcacaccaaaccaacctttttatttcctgctctctcccctcttttgtgaagaaagcgggtccaaatgtgattcaaacaactgtacggagtggcatattagaattgccctaaactgaactgcaaataattatgtgtgtatgtatatgtgtgggaaagagaatgtactgtatatgtgtatgttatacagacatatacacatacatacattgacccacaggacattgtaaaatattatcacatgacatcttaagtagaaataagtagggacttttattccatcctttttttcacgtttacattttaattattacaagttgctcctgccccctccctgaactattttgtgctgtgtatatcactgctttatataagttattttttaaggtgaactcagatgttatggttttgtaaatgtctgcaatcatggataggaataaaatcgcttatttgagagctttcattaaaatgcgtctgatgcaagtt

SEQ ID NO: 108996 - DNA, 2858 bp, Homo sapiens
ggcttagccgccaccgcgcgcttcggaaggccagagggagggggaggcctgtcagtctcgcgcgttgcctgggcgaagggggcggagctttggcgtggggcggccaatagtgggggtggctgcgtgggtcgccatggggacggggctgttcccggggaggctgtgatgggttgacaggtgcgtgacagtgggagctgctctcggcacaagcatgtacggcaaaggcaagagtaacagcagcgccgtcccgtccgacagccaggcccgggagaagttagcactctacgtatatgaatatctgctccatgtaggagctcagaaatcagctcaaacatttttatcagagataagatgggaaaaaaacatcacattgggggaaccaccaggattcttacattcttggtggtgtgtattttgggatctctactgtgcagctccagagagacgtgaaacatgtgaacactcaagtgaagcaaaagccttccatgattacagtgctgcagcagctcccagtccagtgctaggaaacattcccccaggagatggcatgccagtaggtcctgtaccaccagggttctttcagccttttatgtcacctcggtaccctggaggtccaaggcccccattgaggatacctaatcaggcacttggaggtgtcccaggaagtcagccattactccccagtggaatggatccaactcgacaacaaggacatccaaatatgggtgggccaatgcagagaatgactcctccaagaggaatggtgcccttaggaccacagaactatggaggtgcaatgagacccccactgaatgctttaggtggccctggaatgcctggaatgaacatgggtccaggtggtggtagaccttggccaaacccaacaaatgccaattcaataccatactcctcagcatctcctgggaattatgtaggtcctccaggaggtggagggccaccaggaacacccatcatgcctagtccagcagattcaaccaactctggtgataacatgtatactttaatgaatgcagtacctcctggacctaacagacctaattttccaatgggtcctgggtcagatggtcccatgggtggattaggaggaatggagtcacatcacatgaatggctctttaggctcaggagatatggacagtatttccaagaattctcccaataatatgagcctgagtaatcaaccgggcactccaagggatgatggcgaaatggggggaaatttcttaaatccttttcagagtgagagttactcccctagcatgacaatgagcgtgtgatccattaccaagtctcctcatgaaaaccacagtgagtcagcccttcacagaactactacggaagaaaattattcatcacagtgtacagttaaacaaaggaatctcagtcacaccaaaccaacctttttatttcctgctctctcccctcttttgtgaagaaagcgggtccaaatgtgattcaaacaactgtacggagtggcatattagaattgccctaaactgaactgcaaataattatgtgtgtatgtatatgtgtgggaaagagaatgtactgtatatgtgtatgttatacagacatatacacatacatacattgacccacaggacattgtaaaatattatcacatgacatcttaagtagaaataagtagggacttttattccatcctttttttcacgtttacattttaattattacaagttgctcctgccccctccctgaactattttgtgctgtgtatatcactgctttatataagttattttttaaggtgaactcagatgttatggttttgtaaatgtctgcaatcatggataggaataaaatcgcttatttgagagctttcattaaaatgcgtctgatgcaagttatcctgtgaatcacaaagtgtactgtctcaaaaaatagaagaaaatgtgtcttcgtctttatgttgaatcaaacaatttctcagttaccttcagtgaaaagtatttttttaatttttatttgagaaaaacacttcaaatcagtaaaagcttaactggggcctcacacagtatatttctgcaataactgctttaaacggagttcttgatttgtttgtcttagatgatacagaaatcattaaatagcccaaatcatttagaccatagcaataaagtgaccggggttgtcatatatttagcaacatcttttctctttaacatgatgaagcccaaaagtgataacaaaagcatttgcttgaatttgtcacttctcaccaggagtactagaggtaaatttttaataacatactaatgtgaaatggtatctggtttttattcagactttttgtgagcatattcttatagacactagaaataaatacatagaaggagactttgagcacaagggagaagagagttattagcactcctgaggcctctggaatgctgcttttctatccaggtatcttgcttgctaccagcagaattgactggtattggttctcactggccagggagcctctgctctgttcctggaatataaggcttttattcaggagcaaatcattgatagtaactttgctttatctagccattgacttcagcaggctaaaactacattgtgtaactgactgttcaaaaaagaataagtaaattttttttaatctaattcccttatggaaagcaccttgctctatggcactttccagatcttttgggattttgtgcttaattatacatacatacaccaaaatcacaatagaaagatatggaaggactttaattttagactctgaaagataactgggtgatcctttgtgttaaaattgtgatacaaacaaccattgataaataccaactatgaatccaaact

SEQ ID NO: 108997 - DNA, 1669 bp, Homo sapiens
  misc_feature (1660)..(1660): n is a, c, g, or t
  misc_feature (1662)..(1662): n is a, c, g, or t
ggcttagccgccaccgcgcgcttcggaaggccagagggagggggaggcctgtcagtctcgcgcgttgcctgggcgaagggggcggagctttggcgtggggcggccaatagtgggggtggctgcgtgggtcgccatggggacggggctgttcccggggaggctgtgatgggttgacaggtgcgtgacagtgggagctgctctcggcacaagcatgtacggcaaaggcaagagtaacagcagcgccgtcccgtccgacagccaggcccgggagaagttagcactctacgtatatgaatatctgctccatgtaggagctcagaaatcagctcaaacatttttatcagagataagatgggaaaaaaacatcacattgggggaaccaccaggattcttacattcttggtggtgtgtattttgggatctctactgtgcagctccagagagacgtgaaacatgtgaacactcaagtgaagcaaaagccttccatgattacagtgctgcagcagctcccagtccagtgctaggaaacattcccccaggagatggcatgccagtaggtcctgtaccaccagggttctttcagccttttatgtcacctcggtaccctggaggtccaaggcccccattgaggatacctaatcaggcacttggaggtgtcccaggaagtcagccattactccccagtggaatggatccaactcgacaacaaggacatccaaatatgggtgggccaatgcagagaatgactcctccaagaggaatggtgcccttaggaccacagaactatggaggtgcaatgagacccccactgaatgctttaggtggccctggaatgcctggaatgaacatgggtccaggtggtggtagaccttggccaaacccaacaaatgccaattcaataccatactcctcagcatctcctgggaattatgtaggtcctccaggaggtggagggccaccaggaacacccatcatgcctagtccagcagattcaaccaactctggtgataacatgtatactttaatgaatgcagtacctcctggacctaacagacctaattttccaatgggtcctgggtcagatggtcccatgggtggattaggaggaatggagtcacatcacatgaatggctctttaggctcaggagatatggacagtatttccaagaattctcccaataatatgagcctgagtaatcaaccgggcactccaagggatgatggcgaaatggggggaaatttcttaaatccttttcagagtgagagttactcccctagcatgacaatgagcgtgtgatccattaccaagtctcctcatgaaaaccacagtgagtcagcccttcacagaactactacggaagaaaattatattatatagcctaggtgtgtaggagcctataccatctaggtttgtgtaagtacactctatgatgttcagacaaggacaatattgcctgacaatgcatttctcagaatgtatacttatcattaagtaacatatgactgtatgtactagttcctgatgacttacttctctcaaattcataatgatttagtccttgtaaaaataaagattttgcctgtgcctaaacagggatactaggcagaactgttgagaaaaaaaagctgaattaaatttatgttgcagatttaaactatnanaaaaaaa

SEQ ID NO: 108998 - DNA, 484 bp, Homo sapiens
ggcttagccgccaccgcgcgcttcggaaggccagagggagggggaggcctgtcagtctcgcgcgttgcctgggcgaagggggcggagctttggcgtggggcggccaatagtgggggtggctgcgtgggtcgccatggggacggggctgttcccggggaggctgtgatgggttgacaggtgcgtgacagtgggagctgctctcggcacaagcatgtacggcaaaggcaagagtaacagcagcgccgtcccgtccgacagccaggcccgggagaagttagcactctacgtatatgaatatctgctccatgtaggagctcagaaatcagctcaaacatttttatcagagataagatgggaaaaaaacatcacattgggggaaccaccaggattcttacattcttggtggtgtttcttgatgatctcaatctcctgacctcctggatctgcccgcctcggcctcccaagctgctgggattacaggcgt

SEQ ID NO: 108999 - DNA, 301 bp, Homo sapiens
aggttgtacatttaagtctttaatccatcttgagttgatttttgtatatggtgtaagaaaggggtccagtttcagtcttctgtgtatggctagccagttatcccagcaccatttattgaatagggagtccttttcccattgcttatttttgtcgatgatcagtcggttgtggggatgtgactttatttctaggatgtctattctgttccattgatctgtgtgtctatatttctactactaacgtgttatttttgttactgtagccttgtggtatagtttgaagaaaggtaatgtgattgct

SEQ ID NO: 109000 - DNA, 356 bp, Homo sapiens
tttccactatccaacttcataaaaacaattttatttgaactcttcatatatatcttcaacatcagtgtcttcttccatcacaaaaatagtttatcaatctaaaaattttccatagcacatcatcttcagtttggctcaaattgtaagataatacaccatctaaatcatctatgatgctgtcactaaaattcttttccaagtcataagtagtcactcatgtgacagtaggacagttgttttttatctgtcctctaggtataatgtgatttgtaaaatgtaacacttgctatgttgctttcttagtgagatatacaaggttcatttgttctgacatctaacacaaccattagtcagac

SEQ ID NO: 109001 - DNA, 463 bp, Homo sapiens
agttgacaaactcatcaagttacagaatctttagcatatgcatactctatatgagtcaagagctgaccttttcaaaaaaaaattatactttgacagccgtatatatatatatataaagcaacataagacattttaaataacaatatataaatttctatcctgttgtttttaaaactagaaacagggcaattaaataatcattcaatatatgggcaaaaggattccaccttatctttccctcctgccagtggtgcagaaagtggtcaagggagagtggtggatgaagagggataggggagacacagcccttgggaggggtcctctgtctacctggacttgatcaagctgcagtatgactcatcccggcatcggtgacattgcactggggattcctgaaatctcatacagttttccatgaatgattttggtttccatccagcagttcttatcattgatatgaaac

SEQ ID NO: 109002 - DNA, 203 bp, Homo sapiens
cattttcatatttgtttaaaactaacctcaccatcttgatagtgtgtgtaccttattgaaatggaatctaaacatattccttgtcagtaaatgattcagtcagtaaccagctacctacttccaaggcaaaagaaaccttttagagcatctcctattcatgaatggcattgagaagaaaggcatgaaccatatgtatcacaaag

SEQ ID NO: 109003 - DNA, 158 bp, Homo sapiens
gcacagtcacagatcattttttctggccatgtgcctttggccttatgtgtgaatctgggtctgtctgataggtggaaaaccatggactttggaggcagacacttgggttcagatcttgactctggccctaactaatggtgtgacagggaaagttattt

SEQ ID NO: 109004 - DNA, 348 bp, Homo sapiens
cactgagctttaatactgaggaatttttagttgtggtaaaagtttagcaaagtctctattaaataatttacacattctgggaatagggaaaggaaaaagtttttattcaccaccactctgtattcgggatctatatatactaaatagttcatgtgtttactctttccaatagtgaaaaaacagggttttatcacagaatttttatgaaaaccagaaaagagtaaagagcctttattatctccttgctcttttggagcaagatctagtaaacgtctcaacagaaaaagtagcagatgctttgtaaaaaggtctcatatcacttatgtccaattatagaggctgatttgc

SEQ ID NO: 109005 - DNA, 235 bp, Homo sapiens
acatgtttgagccactgcgcccaaccttcagcttacaattgttaagtactcagaaggcctctcgccagttaaatccacaatggctcctccagtcattactacgttagcaaaacatgtatcatgccctggcatctcactgagttctatattcagtgcctgtctcttcactgccacagcataagctccccgagaccacaggcttcacaggcacagcttttcagtgtccggcccggta

SEQ ID NO: 109006 - DNA, 295 bp, Homo sapiens
ttcccacagattgaggttcttgctccaaatactcccaaactctacttaccatctgatgtcttaacattgctaatataagttttatgaactatttcattgaaatattttcatctccttgactaataatgttgaacatcttttcatgttctcagtcatttagacttcttcttttgtaaaaagtttgttcatgtcttataagcagtatactgaatcttttgtgtgtgtgtgtgtgtgacagtctcactctgtcgcccaggctggagtgcaatggcacgatcttatactgtttttttgt

SEQ ID NO: 109007 - DNA, 374 bp, Homo sapiens
accaactagaaactccaatatagtcttctgtttttatgtcaatgcatttgcaatcagatttcagaatcctaacaggtaaattggagtctacgaaaattttataataattgcttcatggactctgagctatagtctatatcttagttttttcaaacattttgactattttgaccaagccagcttgcagtacagaaaaaagtgaaaaatgtttctccttctgaatgcattcttaccactttgattctttctgtttctactatccatataaatacttttctgacccttttgttagacaaggaaagtttcttttgttattttgttttgttaaatgtaaggaatgagacaggccaaacagtgaagataaacaatagatc

SEQ ID NO: 109008 - DNA, 1077 bp, Homo sapiens
ctcatcaaatgattgtttcagttatttaatcactcatgagagaagaaatagtacacagatgaagttcaacagtgtttcaattataaaaactcaggagaagtaggaaatgctgcagtaaccactgaggtatgttatttgtatattatagatatgatactagcacaatgcacataggtcaattaccctcaacttaatttaaccttcatgcatgtcatggataagaactacaaagctcttgtgcagacatggaactttgtttaatgtgctatctaaatggcaaattaagtaattgtttgaacggctttacatatttgaaatattaaggttttcactaaaatatgagaatgtaaggattatgtaaatcatctttaccctgtgtgactggtcatcaggatattaacatgatgcaaacattactttaaaaacactagatacagtgagtagacaacttatttaaataattaagtggcttattaatattcattggctattatctattttgtctctgaattaaacaccttccaagctctaaagtgtagtgcagcacgcatttgtaaacagtcaccttccctagtacttttcttcaaaatgtttagtttatggcactcttttgcctttaaatggaattactgacctgagtttattaatgattaggaagatcacatgtctcctttcacattctatgatgttgggaaagatagaatttacaaagcctgcaaggaactctatatcagagtaaccataaaaacagttatacttagcttgaacaactaataacacacagcaactagatttggtcatgtacattgggaacatgagtttgtaattttaaataataagccctaactaaatagaacttggttaaagaatgcctacaacaaacatttagttgataggaagaaaaccttttatttaattcacttttatatggatatatggttttccattggtactagcttactgcaatctccacaataatcacagaagttaggtacagaagatactatctatctgttacagatgaagttactcaaggattgtgaggttaagttgccgccaatcgaggggatctctaga

SEQ ID NO: 109009 - DNA, 334 bp, Homo sapiens
tgatcacacatattcccagaaggagaatatgactcatctctgaaggtctaaatatatatattgggatgactggtctaaggcatcatggaaggcaatggtgcataatgttctaaattagaattgtccattaagaagaaaaaggagggggggctaggcacaatgctcatgcctataatcccaacactttgggaggccaagaggggaggatcgcctgagcccgagagtttgagaccagcctggacaacatagtgagacctcatctctacaaaaaattaaaaaattggtgggcatggtggtcatgcctttagtcccagccattgggagaccgaggtgg

SEQ ID NO: 109010 - DNA, 561 bp, Homo sapiens
cagaacagagtggtctcccaccccagctctacccttggctgcctgtgtcaccctgggtggctttcccagcctctctacctgcttccttcttgacagcctgatggtggccatacgtcccttgggctgtggtgactgggcctctgggagctgcccttccacttctgcattttaacataaacctccttgacctcagctgctccattctctgctcccttccagccactcggattccagtcctgggggcctcctcactgaccatgccctccaccctcagtgctgttccctggtactctgcatggcttcctcacctgtatcccgtctttgctcagacgccacccctttagagacctccctgactgtgccctctgaaagagcaccttgtcactctctgtcccttctcccacttgtttacttgtatattgtgttcccactagaatgtcaactccaggagagcagagactcttgtcttattcactgctgtgtccctggtgcctagaacagtgcctggcacctgctaagtgcatattaaggagtcgttgctcactgggtagaagcattaaa

SEQ ID NO: 109011 - DNA, 371 bp, Homo sapiens
gagcttccaactcactttccagccacctacaggacatctccccatgtgtcgtatgtctaacacacatatgtccaaaatggaacataccatttttctcccttctttagctcccatttcattaaatggcaccacaatcttaaatgcccatccagaaacctgagattattacccctcttcctttctcagacctccatctaatcaatccctaaattccgttcatcctacccttaaatagctctcagatcagtccacttccctccatttccaaggctcctagcctagtccaggccacattgccatctctcaccccagtgactgggacagcctccagctggtctccctgcctccggtccttcctctacaggatgttt

SEQ ID NO: 109012 - DNA, 686 bp, Homo sapiens
cgtggtgcctcacgttgtaatcttactactttgggaggctgaggcaggcagactgactgagctcaggagttcaagaccagcctgggcaacatggcgaaaccccatctctactaaaaatacaaaaaattagccaggcgtggtggtgtgcgcctgtaatcccaactactggggaggctgaggcacgagaatagcttgaacccgggaggtggaggttgcggtgagccgagatcgtgccagttcactaaagcctgggtgacagagtgagactctgtctcaaaaaaaataaaaataaaaataaaaataaaaataaaaatacaaaaactagctgagcatggtggcatgtgccggtagtcccagctacttcgggggctgaggcaggagaatcgcttcagcctgcaaggttgaggctgcagtgagccatgtttgcaccactgcactccagcctgggcaacaaagtgagaccctgtctttaaataaaaaaagaacatatgaagcaaaggatactaagtccaacacatggcgtaacagaccacatcctaagactacctaaaagacaaacatgaggatttcctgatacagggccatttgctttggtttattttgttttaattacatttatatttttaaaacagataacatattcacaagaaagaaaattccaaaggcttgtgagtgaaaatttttct

SEQ ID NO: 109013 - DNA, 322 bp, Homo sapiens
cctctctgtttatgtggcaaagaatagggaccaaatactatctgaataaatgttccttatagccacagcatgcttgacttagatggtctgtttctccagcctgttgaagaactgtagctcacagatgtagatttcaaatgatatcctaaattgctgctttcatcatcttagtgcctgtaattttctgtggctttagaattgatcacatgtatgagacgcagttataccatttaagcatcaagcactagatttggattagcagtgtttatactttgtattggtatgcagtcattccttttttttttttgagacagagtctcac

SEQ ID NO: 109014 - DNA, 742 bp, Homo sapiens
attttgtttgtgttagttcaaacagctggtcattaatgcagtccccatttctagagcgaagtgctgctggacatgaatgcccgcctgattaatgctgcccctccgagggtccttcacccagcagtcatgctcgcagcagaataatgtagcatgatgtgattgcactctaacaggatagtatgtcattgtgtcaccaagcaattgaggttattatggggcagggcagacagacgggacagtggggttactagaccgtagcatttttagaaatacaggcctgacctacttagagttattctctctggctggcagctgcatggtacataaagtctcctgataggctgagtctgttgctagggggaattagcatgaatttttccacacacagactcagtggctgaatgataaaagctgactggaattaaagagatttggtttagtattatacagatttatgtgcctccttttctttctcaagtgcagagaaagagtgcaaaacacagattttgtttccatttgttctttgaccttcttgttctctccccctcccctcaagatgcatgaggggaggagggcagggcagttatgaaattttggttaatctctcactgttggggtcactgaaacgatgtcgcaaattgcaagatatttaagcttaaaaactgttgggaatgactaacagaaggttagattatttttcctcttctgtgcactaagctgttttgaagttgggcatgcatct

SEQ ID NO: 109015 - DNA, 803 bp, Homo sapiens
ggttgctgttatcctccccattttacagagaaggacatggaggcccagagaggctacataattttctctgggtcccaaaacctgtaaatagtagagaaggggatcaaacttgtttatcttactctaagctaccccactctttctactatacctaatgcctcttagaatgaccctggacttgttgatttgtcagctgcttgcccttggcgggagggcgtttggctttctttttcagataggagagaaaacatgagaggagaaatcagcttctgcagagattaccttagagattgagcaaggcagtgtaatgtaatgaaaacatgcaccagagcaggggcctctagccccaggggcaggcttgcaattagaactgggctaaaagaaagaaaattgtgggagggtccaaatgagtaatatgggaaacatgctttttgtttaactgtgatacctttggtatcacagttttgtgattgatgtgacttaggctgtttgcctctttcattccaagatgacacacctctgtggggttactttgtgttcattctggacctggatcattttcagggggtccatgctagaatgtactgcaatgtgggaacattggcctacagatctagttaggtcctctcccaccgccatgcgcttagtcacttcacctgctgccttccaaaacaaatgggctgtgtgtgtctccttcccttaacaaagtattctataatcatattttctagcttaaaacaaaattagtcttttagatgtaaaacacatctaaagcacttttattaatggatcgctttccttca

SEQ ID NO: 109016 - DNA, 668 bp, Homo sapiens
gagaaaatataccatttcagaaattattcttaaggatgatttaagtgaagttttgttaagacacacttgaggttctaaagttattttgagagtttaagtttgtttcaaagaaaaatagtgtaacaaaataaatagaatgtgagggatattatttattataacagaattaacctgatgcctaaatttatgaaattcagaggaatccactttttgttgttagaaatgaatgcttttgtcattttggatggtttttattaagattggagtggtcacaacttcaaaaagatattggaaattttaggaaagagtgagaaaatccacccaagataaactgtaaaaccttttttttaaaagaaaacttcttatgataacagaatgataacatgtggtgattacctttacttactagtgaaagaaatagcttaatatataagctactctcatgacatctaatggctagcagccagggatgctgctaaacatcctaaaatgcacaggatatttccctaaaaaacacattatttggctccaaatttcaacactccaaaaccaaacaaatatattacaggaaaagaaactacagaccagtatcttttgattataggcacaaaaatcctcaatgaaatataagtacatggaatcaggaatataaaaacgattgtactcca

SEQ ID NO: 109017 - DNA, 136 bp, Homo sapiens
tcggatatggatggttcagcgttagaaagacttgaaaaaacaaaatgagtcctccttctttgaaatgttaaagatatgataaaacctatgccatcaagtacattcgcttgacttaaggccttctaagacagacctt

SEQ ID NO: 109018 - DNA, 372 bp, Homo sapiens
attttaaaatgtaaaaagtaataaaaaatctgtgtaatacatgacaatgaaattcaaatttcagcgttcataaagttttacagaggtacagccacacccattcatttacctactgctgcttctacgtgatgccagcagggttgagtagttgccagagaccatactgccccccaaaatgtgaaatatttactacccagttctttacagaaaaagttcgccaacacctactcaaagtctggtcggtggtaattgtttgttaccaatctgcgatgagataaacacagaaattgagagtaagactttagaggccaggcacggtggctcacgcctgtaatccctgcactttgggaggccgaggtgggtggatcacct

SEQ ID NO: 109019 - DNA, 203 bp, Homo sapiens
gctgtaactgcgctactcggacagaatgaacccatcacttgctgtccttctggttcctcacccacttcatatgacatagctggtggctgtgcatgtagaggggaggctgggcgctcagtgcaaagcacaattgtttacaaccttcctggaaatggctgttctctggctggaggctggggccatttccacgatgcccaggacag

SEQ ID NO: 109020 - DNA, 265 bp, Homo sapiens
ctttgctaatggcaaactcctacttattcttcaaaacccagctctgatagcatcatgcttctgcaatgcctctgagcagcattacttgccctctcttctgtccttttcctccatgctcttctctgatatgactgtgaatccactttctgttatgtctctccaccagatcacattccgtgatggcacacacaatttatccaaactcctgatacacaagcactcctcttacagcagacattctggaagaagtggttttcaaccacag

SEQ ID NO: 109021 - DNA, 353 bp, Homo sapiens
ggaattagatattgccattagcagagtcacaaatagaatttactaacttctttgattactgcaaattgtaagttttctgacctaagaaaattctctgattgctaattggcagcaaaacttctgtttaaaaacacagtaagaaatacaggctagatttattgattctatgatgttcagttaaggtagtaaacctagaagtattcgcctaaagagaaaaacattcttgagtttgcagattgccatcttggtaatatagaaggcatgccatatgcacctgatgacactttattgtatctgtttctatctaaaaagccttgcacatttgcagttgtaacctaattcagttctcatgg

SEQ ID NO: 109022 - DNA, 1085 bp, Homo sapiens
aacctgcttcctgagtttcttaaaattgtgtctggaactcagatttgcactgcctagtatagtagctgctggccactgctctgttgagcacttaagctctggctagaacatgtaaaatacatatcagattttaaaacttaaaatgggaagcagactaaaatagctaatcaattttttatcttgggccaggcacagtggctcatgcctataatctcagcattttgggaggccaaggagagagaattgcttgaggcaggagttcaagaccagcctgggcaatatagtgagacccctgcctctacaaaaaattttaaaaattagccaggtatggtggtgcacacctgtagtcccagctactcaggaggctgaggcgggaggatcgctagagctgggaggtcaaggctgcagtgagccgtgattgtgccactgcactccagcctgggtgacagagcgagaccctgtcttaaaaaaaaaaaaatcttgactacatgttgaaatagtattattttggatacattgagttaaataaatacatttttaaaacttctttcctctgtttctttgtacatttttcatgtggctacaaaaaaatataagcttgttgtaggtttctgttggacagtgctgaattgccacagctaacaccaagatgatagttgtttattatccattctcactgtcagaaaacaagatgcttggggctctggttttgtttgcttatttttttgtttttaaacagaagttttgctgccaattagcaattagagaattttcttaggtcagaaaacttacaatttgcagtaatcaaaagaagttagtaaattctatttgtgactctgcttatggaaattctaatttaaaaacacagtaagaaatacaggctagatttattgattctatgatgttcagttaaggtagtaaacctagaagtattcgcctaaagagaaaaacattcttgagtttgcagattgccatcttggtaatatagaaggcatgccatatgcacctgatgacactttattgtatctgtttctatctaaaaagccttgcacatttgcagttgtaacctaattcagttctcatgg

SEQ ID NO: 109023 - DNA, 700 bp, Homo sapiens
attttgaaggggtgctttctgtaaggaaaatgcgttataaatttagcctccacctgggtgacagagcgagaccctgtcttaaaaaaaaaaaaatcttgactacatgttgaaatagtattattttggatacattgagttaaataaatacatttttaaaacttctttcctctgtttctttgtacatttttcatgtggctacaaaaaaatataagcttgttgtaggtttctgttggacagtgctgaattgccacagctaacaccaagatgatagttgtttattatccattctcactgtcagaaaacaagatgcttggggctctggttttgtttgcttatttttttgtttttaaacagaagttttgctgccaattagcaattagagaattttcttaggtcagaaaacttacaatttgcagtaatcaaaagaagttagtaaattctatttgtgactctgcttatggaaattctaatttaaaaacacagtaagaaatacaggctagatttattgattctatgatgttcagttaaggtagtaaacctagaagtattcgcctaaagagaaaaacattcttgagtttgcagattgccatcttggtaatatagaaggcatgccatatgcacctgatgacactttattgtatctgtttctatctaaaaagccttgcacatttgcagttgtaacctaattcagttctcatgg

SEQ ID NO: 109024 - DNA, 719 bp, Homo sapiens
ataggaattgtgttaaacctacagatcaatttggggagaatttctctctttactatgttgcgtcttccaatttatgaacatagtgtgtctctgctttgattcctttcaatagcatcttagattttcagcatagaggacctctgctttttaaaaaatcttgtcaatcagttggttaattctgaaacatttaatatgcacttactatgtgctagtaccatgcttggtgctagaaatacaaaaatgaaatacaaagctttaagaagccagaaggacagagtttgagaagagcatgttgtctgaactggcattttagctaataaaagcagaaaaaacttccccctccaaaacaatacaattacagtgaaattggaaattgcctaatatttattattagtaaaagaatcacgagatagaacatgtttgagagtacagtctttggaacaaggcagatctgagtttgaaacttagctcaggctggtcatttgactttgggccagttgcttaagctttagaagcctcatttaaaaaatctgtaaagtaggatgagaatatactgagctctgagggttgttgtaaagattgaagaaaacatttgtgaaacggtataatgcctgccacatgtcaagtgccctggtataatacaatacagttatttttattattagtttcatctcacttaagggctaaggaaaaaaatgatagggtagaagtggataatg

SEQ ID NO: 109025 - DNA, 394 bp, Homo sapiens
aaggttcaagacatcatgatattgctgaagcagaataacttggctatgaaaacaatcacaaagattgatttcgttttaaaaatgatgacccttcgttaaatccaaggaacattcactaaaaataccaacctagatcaatggcaaactgtaatatcaagaaattggcatagaatggattaagcgatactttgaagaaaactttggagacagattatgccaagtccacaaggcaacagagtcaaaaacagctgcataccaacatgatatgagaccattctatgtagctggaaattaatccatggactacactagatttccatttgaagatggtgctgccttcatcactgagcactcaacattcatggattgataggcacagcacttcagcacaata

SEQ ID NO: 109026 - DNA, 142 bp, Homo sapiens
gtgactcttctggagctctacaagtttaaaagccctttgttttaacttcatattcagtagaaaccatttaacacaggataaactcatagttacattaaaagataggaaaatacacacacacacacacacacacacacacaca

SEQ ID NO: 109027 - DNA, 816 bp, Homo sapiens
atcttcaattgaggttcttctcttccctttgccagcctttgcatggagtaatgaacaggcctgtgttagatgtagcagatgcacatctcctcatgggccagaactcttgattcaaatcacaggcttgccgagaattatcacagagatgagaatcctacattaaaatgcacttttgtcttactggtaatgatcacagacctcattacatcatttatttgtatacactaagccataaacttgctttagccaggattacctcaggattcctcgctaaacacaaggcaatcttgttggcttagatcctcccacttggctatatactctttgcaatttcaccagaactttgccaacactctactctgatgtgtgctgtgtagaagtagaaggaaaatagctaaatcaagagaaggaaagaagtaatttacaaatttttcatgattagcattattgttttctgttggacttgtactcatcttggtaaattttacagattataattcaattttatttttatcaattcttattttctgagtttttaagttaggaaagaaatttagttaagagggatgattccaaatgtgattgtagctcaagtggagtggagacctcattgtttatctagtgaattcatatagcataaagatacaggagtatcagccaaggagtcatctgggggcaattgcataaaactctcttttctcattgcacaacatcacctggaacaagaactctaggcttttcaagatttaaaggtggctgaaaaattcagtgaaaatcaatgagaattgagatttttaataaatcacaaattcatta

SEQ ID NO: 109028 - DNA, 578 bp, Homo sapiens
gtattaatattattagttatacctctagtcctgagaatctgaagctgtaaactttcactgtggaaacatgcagaggcatacagacacagaattgtgcttacaggttgaggacccgttgaagtttgttcctggaaccagactaaggatcctatcataagtacccttgccccaccacacccaccctttttaaatataatcttgacacatatcataaaagttgaaactacatttcaaaatcatatttggctttagtgttagaataaccaatcccaacaatactaaaatactggacttgccattttcttttcatgcttcattttaaaaacatttaaaaagcttggatgtattgagtaaattttgctgttatcattttgtgggattacattctgtttaggataaattttaaatttctgttcctctgcttgttctgttgagtttgtctgataactgcttttgtagttacttttgtgaaccagtttacaaaggccaaagcatttctagatcttggtgaggagttggaggcttaaaattacatgctttaggccatcaccatagcaaactcactagtaaactgaggt

SEQ ID NO: 109029 - DNA, 270 bp, Homo sapiens
gacataggaactaatctgaaggatctcccaatggccaaagttggaaaaatgtaaggaacaaaataaatgaagtactgggttataacccttagagtacaataaaaaaccatgagtctatacaatttgaataaataattgaaaacagaaataaaaaggaaggacaactcttccttatggaaaattccaattaataaatgtataaggaataaggaaaaaattttaaggataaagaaaatgtcctatatatacataatgaaatactattcagcc

SEQ ID NO: 109030 - DNA, 218 bp, Homo sapiens
agctcttgctgacacaaatagaataaatcattgcacaccattgtagaggggagaagttagtaaaaaacaaaaaagtaataggttttaccaaaatggatattactccaaacgtccaatgataggcagactatagtgtgatttttcatggctggtaaaaataaacaaaattatttgcagatgaattctgtcagccaagcaatctggactaaaagcttagc

SEQ ID NO: 109031 - DNA, 515 bp, Homo sapiens
aagcttattgatataaatcatatataatatcctcattctattctttgtattgtgaaataagctctatataaggtcataaaacaaataaacatctcaaagaaagtcaggaaatgacctggactttttttgaatcaagccaggcacagtgggtcacacttgcaatcccagcactacgggaggctacgacaagcggatcgcttgagcccaggagttcaagaccagcctgggaaacatggcgagacctcatctctataaaaaattaaaaattagctgggcccagctactcacgaggctgaggagggagaattgcttgagcccaggagttcgaggctgcagtgagccctgattgcaccactgcattccagcctaggtgacagagcaagattctctcaaaaaaaaaaaaaaaaaatcacatcaaatttactcataactaagaaatcagcaagcttgagaaggccagttccatggaattagggttccttttgtgtatacatgaacatgtgtaaatttctgca

SEQ ID NO: 109032 - DNA, 477 bp, Homo sapiens
cagagtggtcatgtgaaaatgtaagtcaaaccatttcacgtcactattcaaaagcattcaactgctcaccatttccttccaatttaggtcggaggctcttataattgcctacaaggtccaagaccacttggcctcattgcctctctggcccaacctcttgtttctcctccctcacacactccactccagctacgatggcccccttgctatttctccaatacaacaggcatgctcccacctgccatgggcctgtatctggaatgttttatcccccatgcttggttccctcccttaattccttcaagtttttactcagtgtcaccttcttagtgaggcctaccctgaccaactcattgaaatttgaaccctagctcctctggcactcctgatctcccttactctgccctattttccccttatattaattaaaataaactttttattctggaataattctaggttcacagaaaggttgca

SEQ ID NO: 109033 - DNA, 446 bp, Homo sapiens
gtctcacaagtagctgggattacaggcgggtgccactacacccagctaatttttctatttttagtagagatggggtttcaccatgttggccaggttggtcttgaactcccgacctcaggtgatctgcccgccttggcctcccaaagtgttgggattacaggcgtgagccactgtgcccacccgaattatatttttcgaagcggagtcttgctttgttggccagggtggtctccaacctgggctcaagcaatccccctgccttggcttccctaagtgttgggattaccagcctgatctaccatgcccagctgattttatttgttgagcttgagataaaatttgggttcatgtgttatggaaaagctttctgataagattgagaattattactgttagaatatcttacaaatattttgtttgtttgttttttgagactgtcccctcac

SEQ ID NO: 109034 - DNA, 259 bp, Homo sapiens
cctaccagatgatttgtctaatctgaaaaattattttgagctaagatgttcctagctgctatctggaaaggatgacatttaattatatgtaatgtaaagaagcctttcagtgctttaactctaggagtggagtgctggttactgtttggctttagaagtgacgttaagaacctcctatctgttcttttttatttttattttattttattttttttagaggagaggtctcactatgtttcccaggcttgtctcaaactcc

SEQ ID NO: 109035 - DNA, 255 bp, Homo sapiens
gaggctgagggagaccaggcccaggccattgggccacgtcatgcgcagacaccacccctggcctggtaggagccagcatctggttcccagcagcagcttggaaacccagcgacagaaggggcaggaactgcaccctgagtctgcagaagaggctgctcttaatggtcctccatgctgggccctgagcccaggtggggcctggccagctcctcatcacagctgaccagccctgggagttccaactccaggagacct

SEQ ID NO: 109036 - DNA, 321 bp, Homo sapiens
atttctgatcctcctgacagccctgcagttggctttggatatggtaaacctaaggaaagtaaagctcagcgagctggggtggctcacccagtccaagggcagattgcagggactcctcttcaccacatcttgtccattcccttactcgtgagggtctcctgagcactggtagtgagcaggtgctggacatgccacagggaacacggcagatcctccgccgtcccgaagcacacatcatggtgctccccttgactttcaccaggatgactccgggtatgggccagttacctgaacatcctgggggggcccacgtcccttcta

SEQ ID NO: 109037 - DNA, 2612 bp, Homo sapiens
  misc_feature (8)..(8): n is a, c, g, or t
  misc_feature (318)..(318): n is a, c, g, or t
  misc_feature (336)..(336): n is a, c, g, or t
  misc_feature (346)..(346): n is a, c, g, or t
  misc_feature (355)..(355): n is a, c, g, or t
  misc_feature (361)..(361): n is a, c, g, or t
tcccaggnggtgacagagtggagccatggctagaggagaacgtatttaccgggcagtcaaagatctattcctacatgagcccgaacaaatgctctggaatgcgtttcccccttcaggaagagaactcagttacacatcacgaagtcaaatgccaggggaaaccattagccggaatctacaggaaacgagaagagaaaagaaatgctgggaacgcagtacggagcgccatgaagtccgaggaacagaagatcaaagacgccaggaaaggtcccctggtaccttttccaaaccaaaaatctgaagcagcagaacctccanaaactccaccctcatctngtgattccancaatgcagncatcgncaagcaagccctgaaaaagcccatcaagggcaaacaggccccccgaaaaaaagctcaaggaaaaacgcaacagaatcgcaaacttacggatttctaccctgtccgaaggagctccaggaagagcaaagccgagctgcagtctgaagaaaggaaaagaatagatgaattgattgaaagtgggaaggaagaaggaatgaagattgacctcatcgatggcaaaggcaggggtgtgattgccaccaagcagttctcccggggtgactttgtggtggaataccacggggacctcatcgagatcaccgacgccaagaaacgggaggctctgtacgcacaggacccttccacgggctgctacatgtactattttcagtatctgagcaaaacctactgcgtggatgcaactagagagacaaatcgcctaggaagactgatcaatcacagcaaatgtgggaactgccaaaccaaactgcacgacatcgacggcgtacctcacctcatcctcatcgcctcccgagacatcgcggctggggaggagctcctgtatgactatggggaccgcagcaaggcttccattgaagcccacccgtggctgaagcattaaccggtgggccccgtgccctccccgccccactttcccttcttcaaaggacaaagtgccctcaaagggaattgaattttttttttacacacttaatcttagcggattacttcagatgtttttaaaaagtatattaagatgccttttcactgtagtatttaaatatctgttacaggtttccaaggtggacttgaacagatggccttatattaccaaaacttttatattctagttgtttttgtactttttttgcatacaagccgaacgtttgtgcttcccgtgcatgcagtcaaagactcagcacaggttttagaggaaatagtcaaacatgaactaggaagccaggtgagtctcctttctccagtggaagagccgggaccttccccctgcacccccgacatccagggacggggtgtgaggaagacgctgcctcccaatggcctggacgggatgtttccaagctcttgttcccctaacgtctcaacaggcgctcactgaagtgtatgaatattttttaaaaaggtttttgcagtaagctagtcttcccctctgctttctcgaaagcttactgagccctgggccccaagcacgggccgggcatagatttcctcttccacaagctgccgcttttctgggcaccttgaagcatcagggcgtgaaatcaaactagatgtgggcagggagagtgttgcttacctgccctgctggggcagggtttcctgaaactgggttaattctttatagaaatgtgaacactgaatttattttaaaaaataataataaaaatttaaaaaaattaaaaataaaaaaaaccacagaaaacaactttacatgtatataggtcttgaagtgagtgaagtggctgcttttttttttttttttttttgcttttttttgctttttgtagaagagattgagaatggtactctaatcaaaaataaagttttgtagtgggaccagaaattacttacctgacatccacccccattccccctcatcctgctggggttgaaagttccagacctgctgtcgaggccttgtgtttgtcagacacccagtgtcctcctgcaaggacgcaactgtgagctgaggtgtgagcctaggagcccaggacccctgaccccggccgctgctgccagcctcagaaaggcacccaggtgtgcaggggagcacacagggcccggcagcccccaggaatcaaggatagggctaaggttttcaccttaactgtgaaggcaggaggaataggtgactgcttcctcccgcccttcacagaactgattctcacacactgtcccttcagtccagggggccggggctcaggagccatgacctggtgtctcctgcccaccctggtcccaggtaaatgtgaatggagacaggtatgagaggctgtcctcgtctttgattcccccccaaccccacctcgggcctcacgacggtgctacctaagaaagtcttccctcccaccccccgctagcctggtcagtggtcagcaaattggaagaggatccgatgggagtgtaaatgtgagacacaatgtcttgattatacctgtttgtggtttagctttgtatttaaataaggaaataaacttgaaaattatttgtcatcataaaaatgaaacaaattaaaatatttattgccaggcaa

SEQ ID NO: 109038 - DNA, 2665 bp, Homo sapiens
  misc_feature (8)..(8): n is a, c, g, or t
  misc_feature (318)..(318): n is a, c, g, or t
  misc_feature (336)..(336): n is a, c, g, or t
  misc_feature (346)..(346): n is a, c, g, or t
  misc_feature (355)..(355): n is a, c, g, or t
  misc_feature (361)..(361): n is a, c, g, or t
tcccaggnggtgacagagtggagccatggctagaggagaacgtatttaccgggcagtcaaagatctattcctacatgagcccgaacaaatgctctggaatgcgtttcccccttcaggaagagaactcagttacacatcacgaagtcaaatgccaggggaaaccattagccggaatctacaggaaacgagaagagaaaagaaatgctgggaacgcagtacggagcgccatgaagtccgaggaacagaagatcaaagacgccaggaaaggtcccctggtaccttttccaaaccaaaaatctgaagcagcagaacctccanaaactccaccctcatctngtgattccancaatgcagncatcgncaagcaagccctgaaaaagcccatcaagggcaaacaggccccccgaaaaaaagctcaaggaaaaacgcaacagaatcgcaaacttacggatttctaccctgtccgaaggagctccaggaagagcaaagccgagctgcagtctgaagaaaggaaaagaatagatgaattgattgaaagtgggaaggaagaaggaatgaagattgacctcatcgatggcaaaggcaggggtgtgattgccaccaagcagttctcccggggtgactttgtggtggaataccacggggacctcatcgagatcaccgacgccaagaaacgggaggctctgtacgcacaggacccttccacgggctgctacatgtactattttcagtatctgagcaaaacctactgcgtggatgcaactagagagacaaatcgcctaggaagactgatcaatcacagcaaatgtgggaactgccaaaccaaactgcacgacatcgacggcgtacctcacctcatcctcatcgcctcccgagacatcgcggctggggaggagctcctgtatgactatggggaccgcagcaaggcttccattgaagcccacccgtggctgaagcattaaccggtgggccccgtgccctccccgccccactttcccttcttcaaaggacaaagtgccctcaaagggaattgaattttttttttacacacttaatcttagcggattacttcagatgtttttaaaaagtatattaagatgccttttcactgtagtatttaaatatctgttacaggtttccaaggtggacttgaacagatggccttatattaccaaaacttttatattctagttgtttttgtactttttttgcatacaagccgaacgtttgtgcttcccgtgcatgcagtcaaagactcagcacaggttttagaggaaatagtcaaacatgaactaggaagccaggtgagtctcctttctccagtggaagagccgggaccttccccctgcacccccgacatccagggacggggtgtgaggaagacgctgcctcccaatggcctggacgggatgtttccaagctcttgttcccctaacgtctcaacaggcgctcactgaagtgtatgaatattttttaaaaaggtttttgcagtaagctagtcttcccctctgctttctcgaaagcttactgagccctgggccccaagcacgggccgggcatagatttcctcttccacaagctgccgcttttctgggcaccttgaagcatcagggcgtgaaatcaaactagatgtgggcagggagagtgttgcttacctgccctgctggggcagggtttcctgaaactgggttaattctttatagaaatgtgaacactgaatttattttaaaaaataataataaaaatttaaaaaaattaaaaataaaaaaaaccacagaaaacaactttacatgtatataggtcttgaagtgagtgaagtggctgcttttttttttttttttttttgcttttttttgctttttgtagaagagattgagaatggtactctaatcaaaaataaagttttgtagtgggaccagaaattacttacctgacatccacccccattccccctcatcctgctggggttgaaagttccagacctgctgtcgaggccttgtgtttgtcagacacccagtgtcctcctgcaaggacgcaactgtgagctgaggtgtgagcctaggagcccaggacccctgaccccggccgctgctgccagcctcagaaaggcacccaggtgtgcaggggagcacacagggcccggcagcccccaggaatcaaggatagggctaaggttttcaccttaactgtgaaggcaggaggaataggtgactgcttcctcccgcccttcacagaactgattctcacacactgtcccttcagtccagggggccggggctcaggagccatgacctggtgtctcctgcccaccctggtcccaggtaaatgtgaatggagacaggtatgagaggctgtcctcgtctttgattcccccccaaccccacctcgggcctcacgacggtgctacctaagaaagtcttccctcccaccccccgctagcctggtcagtggtcagcaaattggaagaggatccgatgggagtgtaaatgtgagacacaatgtcttgattatacctgtttgtggtttagctttgtatttaaataaggaaataaacttgaaaattatttgtcatcataaaaatgaaacaaattaaaatatttattgccaggcaaaaaaaagagcggaagaaaagttttggcccatagtgagtcctttacaagtcgac

SEQ ID NO: 109039 - DNA, 1437 bp, Homo sapiens
ctactaaattcgcggccgcgtcgacttttttttttgcatacaagccgaacgtttgtgcttcccgtgcatgcagtcaaagactcagcacaggttttagaggaaatagtcaaacatgaactaggaagccaggtgagtctcctttctccagtggaagagccgggaccttccccctgcacccccgacatccagggacggggtgtgaggaagacgctgcctcccaatggcctggacgggatgtttccaagctcttgttcccctaacgtctcaacaggcgctcactgaagtgtatgaatattttttaaaaaggtttttgcagtaagctagtcttcccctctgctttctcgaaagcttactgagccctgggccccaagcacgggccgggcatagatttcctcttccacaagctgccgcttttctgggcaccttgaagcatcagggcgtgaaatcaaactagatgtgggcagggagagtgttgcttacctgccctgctggggcagggtttcctgaaactgggttaattctttatagaaatgtgaacactgaatttattttaaaaaataataataaaaatttaaaaaaattaaaaataaaaaaaaccacagaaaacaactttacatgtatataggtcttgaagtgagtgaagtggctgcttttttttttttttttttttgcttttttttgctttttgtagaagagattgagaatggtactctaatcaaaaataaagttttgtagtgggaccagaaattacttacctgacatccacccccattccccctcatcctgctggggttgaaagttccagacctgctgtcgaggccttgtgtttgtcagacacccagtgtcctcctgcaaggacgcaactgtgagctgaggtgtgagcctaggagcccaggacccctgaccccggccgctgctgccagcctcagaaaggcacccaggtgtgcaggggagcacacagggcccggcagcccccaggaatcaaggatagggctaaggttttcaccttaactgtgaaggcaggaggaataggtgactgcttcctcccgcccttcacagaactgattctcacacactgtcccttcagtccagggggccggggctcaggagccatgacctggtgtctcctgcccaccctggtcccaggtaaatgtgaatggagacaggtatgagaggctgtcctcgtctttgattcccccccaaccccacctcgggcctcacgacggtgctacctaagaaagtcttccctcccaccccccgctagcctggtcagtggtcagcaaattggaagaggatccgatgggagtgtaaatgtgagacacaatgtcttgattatacctgtttgtggtttagctttgtatttaaataaggaaataaacttgaaaattatttgtcatcataaaaatgaaacaaattaaaatatttattgccaggcaa

SEQ ID NO: 109040 - DNA, 2392 bp, Homo sapiens
  misc_feature (8)..(8): n is a, c, g, or t
  misc_feature (318)..(318): n is a, c, g, or t
  misc_feature (336)..(336): n is a, c, g, or t
  misc_feature (346)..(346): n is a, c, g, or t
  misc_feature (355)..(355): n is a, c, g, or t
  misc_feature (361)..(361): n is a, c, g, or t
tcccaggnggtgacagagtggagccatggctagaggagaacgtatttaccgggcagtcaaagatctattcctacatgagcccgaacaaatgctctggaatgcgtttcccccttcaggaagagaactcagttacacatcacgaagtcaaatgccaggggaaaccattagccggaatctacaggaaacgagaagagaaaagaaatgctgggaacgcagtacggagcgccatgaagtccgaggaacagaagatcaaagacgccaggaaaggtcccctggtaccttttccaaaccaaaaatctgaagcagcagaacctccanaaactccaccctcatctngtgattccancaatgcagncatcgncaagcaagccctgaaaaagcccatcaagggcaaacaggccccccgaaaaaaagctcaaggaaaaacgcaacagaatcgcaaacttacggatttctaccctgtccgaaggagctccaggaagagcaaagccgagctgcagtctgaagaaaggaaaagaatagatgaattgattgaaagtgggaaggaagaaggaatgaagattgacctcatcgatggcaaaggcaggggtgtgattgccaccaagcagttctcccggggtgactttgtggtggaataccacggggacctcatcgagatcaccgacgccaagaaacgggaggctctgtacgcacaggacccttccacgggctgctacatgtactattttcagtatctgagcaaaacctactgcgtggatgcaactagagagacaaatcgcctaggaagactgatcaatcacagcaaatgtgggaactgccaaaccaaactgcacgacatcgacggcgtacctcacctcatcctcatcgcctcccgagacatcgcggctggggaggagctcctgtatgactatggggaccgcagcaaggcttccattgaagcccacccgtggctgaagcattaaccggtgggccccgtgccctccccgccccactttcccttcttcaaaggacaaagtgccctcaaagggaattgaattttttttttacacacttaatcttagcggattacttcagatgtttttaaaaagtatattaagatgccttttcactgtagtatttaaatatctgttacaggtttccaaggtggacttgaacagatggccttatattaccaaaacttttatattctagttgtttttgtactttttttgcatacaagccgaacgtttgtgcttcccgtgcatgcagtcaaagactcagcacaggttttagaggaaatagtcaaacatgaactaggaagccaggtgagtctcctttctccagtggaagagccgggaccttccccctgcacccccgacatccagggacggggtgtgaggaagacgctgcctcccaatggcctggacgggatgtttccaagctcttgttcccctaacgtctcaacaggcgctcactgaagtgtatgaatattttttaaaaaggtttttgcagtaagctagtcttcccctctgctttctcgaaagcttactgagccctgggccccaagcacgggccgggcatagatttcctcttccacaagctgccgcttttctgggcaccttgaagcatcagggcgtgaaatcaaactagatgtgggcagggagagtgttgcttacctgccctgctggggcagggtttcctgaaactgggttaattctttatagaaatgtgaacactgaatttattttaaaaaataataataaaaatttaaaaaaattaaaaataaaaaaaaccacagaaaacaactttacatgtatataggtcttgaagtgagtgaagtggctgcttttttttttttttttttttgcttttttttgctttttgtagaagagattgagaatggtactctaatcaaaaataaagttttgtagtgggaccagaaattacttacctgacatccacccccattccccctcatcctgctggggttgaaagttccagacctgctgtcgaggccttgtgtttgtcagacacccagtgtcctcctgcaaggacgcaactgtgagctgaggtgtgagctcaggagccatgacctggtgtctcctgcccaccctggtcccaggtaaatgtgaatggagacaggtatgagaggctgtcctcgtctttgattcccccccaaccccacctcgggcctcacgacggtgctacctaagaaagtcttccctcccaccccccgctagcctggtcagtggtcagcaaattggaagaggatccgatgggagtgtaaatgtgagacacaatgtcttgattatacctgtttgtggtttagctttgtatttaaataaggaaataaacttgaaaattatttgtcatcataaaaatgaaacaaattaaaatatttattgccaggcaa

SEQ ID NO: 109041 - DNA, 2228 bp, Homo sapiens
  misc_feature (8)..(8): n is a, c, g, or t
  misc_feature (318)..(318): n is a, c, g, or t
  misc_feature (336)..(336): n is a, c, g, or t
  misc_feature (346)..(346): n is a, c, g, or t
  misc_feature (355)..(355): n is a, c, g, or t
  misc_feature (361)..(361): n is a, c, g, or t
tcccaggnggtgacagagtggagccatggctagaggagaacgtatttaccgggcagtcaaagatctattcctacatgagcccgaacaaatgctctggaatgcgtttcccccttcaggaagagaactcagttacacatcacgaagtcaaatgccaggggaaaccattagccggaatctacaggaaacgagaagagaaaagaaatgctgggaacgcagtacggagcgccatgaagtccgaggaacagaagatcaaagacgccaggaaaggtcccctggtaccttttccaaaccaaaaatctgaagcagcagaacctccanaaactccaccctcatctngtgattccancaatgcagncatcgncaagcaagccctgaaaaagcccatcaagggcaaacaggccccccgaaaaaaagctcaaggaaaaacgcaacagaatcgcaaacttacggatttctaccctgtccgaaggagctccaggaagagcaaagccgagctgcagtctgaagaaaggaaaagaatagatgaattgattgaaagtgggaaggaagaaggaatgaagattgacctcatcgatggcaaaggcaggggtgtgattgccaccaagcagttctcccggggtgactttgtggtggaataccacggggacctcatcgagatcaccgacgccaagaaacgggaggctctgtacgcacaggacccttccacgggctgctacatgtactattttcagtatctgagcaaaacctactgcgtggatgcaactagagagacaaatcgcctaggaagactgatcaatcacagcaaatgtgggaactgccaaaccaaactgcacgacatcgacggcgtacctcacctcatcctcatcgcctcccgagacatcgcggctggggaggagctcctgtatgactatggggaccgcagcaaggcttccattgaagcccacccgtggctgaagcattaaccggtgggccccgtgccctccccgccccactttcccttcttcaaaggacaaagtgccctcaaagggaattgaattttttttttacacacttaatcttagcggattacttcagatgtttttaaaaagtatattaagatgccttttcactgtagtatttaaatatctgttacaggtttccaaggtggacttgaacagatggccttatattaccaaaacttttatattctagttgtttttgtactttttttgcatacaagccgaacgtttgtgcttcccgtgcatgcagtcaaagactcagcacaggttttagaggaaatagtcaaacatgaactaggaagccaggtgagtctcctttctccagtggaagagccgggaccttccccctgcacccccgacatccagggacggggtgtgaggaagacgctgcctcccaatggcctggacgggatgtttccaagctcttgttcccctaacgtctcaacaggcgctcactgaagtgtatgaatattttttaaaaaggtttttgcagtaagctagtcttcccctctgctttctcgaaagcttactgagccctgggccccaagcacgggccgggcatagatttcctcttccacaagctgccgcttttctgggcaccttgaagcatcagggcgtgaaatcaaactagatgtgggcagggagagtgttgcttacctgccctgctggggcagggtttcctgaaactgggttaattctttatagaaatgtgaacactgaatttattttaaaaaataataataaaaatttaaaaaaattaaaaataaaaaaaaccacagaaaacaactttacatgtatataggtcttgaagtgagtgaagtggctgcttttttttttttttttttttgcttttttttgctttttgtagaagagattgagaatggtactctaatcaaaaataaagttttgtagtgggaccagaaattacttacctgacatccacccccattccccctcatcctgctggggttgaaagttccagacctgctgtcgaggccttgtctcgggcctcacgacggtgctacctaagaaagtcttccctcccaccccccgctagcctggtcagtggtcagcaaattggaagaggatccgatgggagtgtaaatgtgagacacaatgtcttgattatacctgtttgtggtttagctttgtatttaaataaggaaataaacttgaaaattatttgtcatcataaaaatgaaacaaattaaaatatttattgccaggcaa

SEQ ID NO: 109042 - DNA, 1413 bp, Homo sapiens
  misc_feature (8)..(8): n is a, c, g, or t
tcccaggnggtgacagagtggagccatggctagagggctgctgtgaggtttcagtgagataacggcaagagactcgcccaggaaaccgatcattataacccctggctctgtctcctttctccagtggaagagccgggaccttccccctgcacccccgacatccagggacggggtgtgaggaagacgctgcctcccaatggcctggacgggatgtttccaagctcttgttcccctaacgtctcaacaggcgctcactgaagtgtatgaatattttttaaaaaggtttttgcagtaagctagtcttcccctctgctttctcgaaagcttactgagccctgggccccaagcacgggccgggcatagatttcctcttccacaagctgccgcttttctgggcaccttgaagcatcagggcgtgaaatcaaactagatgtgggcagggagagtgttgcttacctgccctgctggggcagggtttcctgaaactgggttaattctttatagaaatgtgaacactgaatttattttaaaaaataataataaaaatttaaaaaaattaaaaataaaaaaaaccacagaaaacaactttacatgtatataggtcttgaagtgagtgaagtggctgcttttttttttttttttttttgcttttttttgctttttgtagaagagattgagaatggtactctaatcaaaaataaagttttgtagtgggaccagaaattacttacctgacatccacccccattccccctcatcctgctggggttgaaagttccagacctgctgtcgaggccttgtgtttgtcagacacccagtgtcctcctgcaaggacgcaactgtgagctgaggtgtgagcctaggagcccaggacccctgaccccggccgctgctgccagcctcagaaaggcacccaggtgtgcaggggagcacacagggcccggcagcccccaggaatcaaggatagggctaaggttttcaccttaactgtgaaggcaggaggaataggtgactgcttcctcccgcccttcacagaactgattctcacacactgtcccttcagtccagggggccggggctcaggagccatgacctggtgtctcctgcccaccctggtcccaggtaaatgtgaatggagacaggtatgagaggctgtcctcgtctttgattcccccccaaccccacctcgggcctcacgacggtgctacctaagaaagtcttccctcccaccccccgctagcctggtcagtggtcagcaaattggaagaggatccgatgggagtgtaaatgtgagacacaatgtcttgattatacctgtttgtggtttagctttgtatttaaataaggaaataaacttgaaaattatttgtcatcataaaaatgaaacaaattaaaatatttattgccaggcaa

SEQ ID NO: 109043 - DNA, 1250 bp, Homo sapiens
tggtgagagctgatctagaggatcccagcaacattggactggacgggatgtttccaagctcttgttcccctaacgtctcaacaggcgctcactgaagtgtatgaatattttttaaaaaggtttttgcagtaagctagtcttcccctctgctttctcgaaagcttactgagccctgggccccaagcacgggccgggcatagatttcctcttccacaagctgccgcttttctgggcaccttgaagcatcagggcgtgaaatcaaactagatgtgggcagggagagtgttgcttacctgccctgctggggcagggtttcctgaaactgggttaattctttatagaaatgtgaacactgaatttattttaaaaaataataataaaaatttaaaaaaattaaaaataaaaaaaaccacagaaaacaactttacatgtatataggtcttgaagtgagtgaagtggctgcttttttttttttttttttttgcttttttttgctttttgtagaagagattgagaatggtactctaatcaaaaataaagttttgtagtgggaccagaaattacttacctgacatccacccccattccccctcatcctgctggggttgaaagttccagacctgctgtcgaggccttgtgtttgtcagacacccagtgtcctcctgcaaggacgcaactgtgagctgaggtgtgagcctaggagcccaggacccctgaccccggccgctgctgccagcctcagaaaggcacccaggtgtgcaggggagcacacagggcccggcagcccccaggaatcaaggatagggctaaggttttcaccttaactgtgaaggcaggaggaataggtgactgcttcctcccgcccttcacagaactgattctcacacactgtcccttcagtccagggggccggggctcaggagccatgacctggtgtctcctgcccaccctggtcccaggtaaatgtgaatggagacaggtatgagaggctgtcctcgtctttgattcccccccaaccccacctcgggcctcacgacggtgctacctaagaaagtcttccctcccaccccccgctagcctggtcagtggtcagcaaattggaagaggatccgatgggagtgtaaatgtgagacacaatgtcttgattatacctgtttgtggtttagctttgtatttaaataaggaaataaacttgaaaattatttgtcatcataaaaatgaaacaaattaaaatatttattgccaggcaa

SEQ ID NO: 109044 - DNA, 1993 bp, Homo sapiens
  misc_feature (8)..(8): n is a, c, g, or t
  misc_feature (318)..(318): n is a, c, g, or t
  misc_feature (336)..(336): n is a, c, g, or t
  misc_feature (346)..(346): n is a, c, g, or t
  misc_feature (355)..(355): n is a, c, g, or t
  misc_feature (361)..(361): n is a, c, g, or t
tcccaggnggtgacagagtggagccatggctagaggagaacgtatttaccgggcagtcaaagatctattcctacatgagcccgaacaaatgctctggaatgcgtttcccccttcaggaagagaactcagttacacatcacgaagtcaaatgccaggggaaaccattagccggaatctacaggaaacgagaagagaaaagaaatgctgggaacgcagtacggagcgccatgaagtccgaggaacagaagatcaaagacgccaggaaaggtcccctggtaccttttccaaaccaaaaatctgaagcagcagaacctccanaaactccaccctcatctngtgattccancaatgcagncatcgncaagcaagccctgaaaaagcccatcaagggcaaacaggccccccgaaaaaaagctcaaggaaaaacgcaacagaatcgcaaacttacggatttctaccctgtccgaaggagctccaggaagagcaaagccgagctgcagtctgaagaaaggaaaagaatagatgaattgattgaaagtgggaaggaagaaggaatgaagattgacctcatcgatggcaaaggcaggggtgtgattgccaccaagcagttctcccggggtgactttgtggtggaataccacggggacctcatcgagatcaccgacgccaagaaacgggaggctctgtacgcacaggacccttccacgggctgctacatgtactattttcagtatctgagcaaaacctactgcgtggatgcaactagagagacaaatcgcctaggaagactgatcaatcacagcaaatgtgggaactgccaaaccaaactgcacgacatcgacggcgtacctcacctcatcctcatcgcctcccgagacatcgcggctggggaggagctcctgtatgactatggggaccgcagcaaggcttccattgaagcccacccgtggctgaagcattaaccggtgggccccgtgccctccccgccccactttcccttcttcaaaggacaaagtgccctcaaagggaattgaattttttttttacacacttaatcttagcggattacttcagatgtttttaaaaagtatattaagatgccttttcactgtagtatttaaatatctgttacaggtttccaaggtggacttgaacagatggccttatattaccaaaacttttatattctagttgtttttgtactttttttgcatacaagccgaacgtttgtgcttcccgtgcatgcagtcaaagactcagcacaggttttagaggaaatagtcaaacatgaactaggaagccaggtgagtctcctttctccagtggaagagccgggaccttccccctgcacccccgacatccagggacggggtgtgaggaagacgctgcctcccaatggcctggacgggatgtttccaagctcttgttcccctaacgtctcaacaggcgctcactgaagtgtatgaatattttttaaaaaggtttttgcagtaagctagtcttcccctctgctttctcgaaagcttactgagccctgggccccaagcacgggccgggcatagatttcctcttccacaagctgccgcttttctgggcaccttgaagcatcagggcgtgaaatcaaactagatgtgggcagggagagtgttgcttacctgccctgctggggcagggtttcctgaaactgggttaattctttatagaaatgtgaacactgaatttattttaaaaaataataataaaaatttaaaaaaattaaaaataaaaaaaaccacagaaaacaactttacatgtatataggtcttgaagtgagtgaagtggctgcttttttttttttttgggttttttggggttttgggaaaaaaatttggaaaggggtcctctctattcaaaattaagtttgggtggggggcccaaaatttttttccttgatttcaaccccaattccccttattcgggggggggttaaagttcccaaacctgttgtcagggc

SEQ ID NO: 109045 - DNA, 940 bp, Homo sapiens
ctggtcccactacaaaactttatttttgattagggtaccattctgaatttattttaaaaaataataataaaaatttaaaaaaattaaaaataaaaaaaaccacagaaaacaactttacatgtatataggtcttgaagtgagtgaagtggctgcttttttttttttttttttttgcttttttttgctttttgtagaagagattgagaatggtactctaatcaaaaataaagttttgtagtgggaccagaaattacttacctgacatccacccccattccccctcatcctgctggggttgaaagttccagacctgctgtcgaggccttgtgtttgtcagacacccagtgtcctcctgcaaggacgcaactgtgagctgaggtgtgagcctaggagcccaggacccctgaccccggccgctgctgccagcctcagaaaggcacccaggtgtgcaggggagcacacagggcccggcagcccccaggaatcaaggatagggctaaggttttcaccttaactgtgaaggcaggaggaataggtgactgcttcctcccgcccttcacagaactgattctcacacactgtcccttcagtccagggggccggggctcaggagccatgacctggtgtctcctgcccaccctggtcccaggtaaatgtgaatggagacaggtatgagaggctgtcctcgtctttgattcccccccaaccccacctcgggcctcacgacggtgctacctaagaaagtcttccctcccaccccccgctagcctggtcagtggtcagcaaattggaagaggatccgatgggagtgtaaatgtgagacacaatgtcttgattatacctgtttgtggtttagctttgtatttaaataaggaaataaacttgaaaattatttgtcatcataaaaatgaaacaaattaaaatatttattgccaggcaa

SEQ ID NO: 109046 - DNA, 974 bp, Homo sapiens
ctcccaggctcaagcagtcctccggcctcagcctcccaagtagttgggactacaggcaggcaccaccacacctggccaatttttgtggagacgggtcttgctgtgttgtccaggctggtcttgaactcctgagctaaagccatctacctgcctccgcctcccggagtgctgggattacaggtgtgagctaccacacctagattttttgcttttttttgctttttgtagaagagattgagaatggtactctaatcaaaaataaagttttgtagtgggaccagaaattacttacctgacatccacccccattccccctcatcctgctggggttgaaagttccagacctgctgtcgaggccttgtgtttgtcagacacccagtgtcctcctgcaaggacgcaactgtgagctgaggtgtgagcctaggagcccaggacccctgaccccggccgctgctgccagcctcagaaaggcacccaggtgtgcaggggagcacacagggcccggcagcccccaggaatcaaggatagggctaaggttttcaccttaactgtgaaggcaggaggaataggtgactgcttcctcccgcccttcacagaactgattctcacacactgtcccttcagtccagggggccggggctcaggagccatgacctggtgtctcctgcccaccctggtcccaggtaaatgtgaatggagacaggtatgagaggctgtcctcgtctttgattcccccccaaccccacctcgggcctcacgacggtgctacctaagaaagtcttccctcccaccccccgctagcctggtcagtggtcagcaaattggaagaggatccgatgggagtgtaaatgtgagacacaatgtcttgattatacctgtttgtggtttagctttgtatttaaataaggaaataaacttgaaaattatttgtcatcataaaaatgaaacaaattaaaatatttattgccaggcaa

SEQ ID NO: 109047 - DNA, 1651 bp, Homo sapiens
  misc_feature (8)..(8): n is a, c, g, or t
  misc_feature (318)..(318): n is a, c, g, or t
  misc_feature (336)..(336): n is a, c, g, or t
  misc_feature (346)..(346): n is a, c, g, or t
  misc_feature (355)..(355): n is a, c, g, or t
  misc_feature (361)..(361): n is a, c, g, or t
  misc_feature (1609)..(1609): n is a, c, g, or t
  misc_feature (1613)..(1613): n is a, c, g, or t
tcccaggnggtgacagagtggagccatggctagaggagaacgtatttaccgggcagtcaaagatctattcctacatgagcccgaacaaatgctctggaatgcgtttcccccttcaggaagagaactcagttacacatcacgaagtcaaatgccaggggaaaccattagccggaatctacaggaaacgagaagagaaaagaaatgctgggaacgcagtacggagcgccatgaagtccgaggaacagaagatcaaagacgccaggaaaggtcccctggtaccttttccaaaccaaaaatctgaagcagcagaacctccanaaactccaccctcatctngtgattccancaatgcagncatcgncaagcaagccctgaaaaagcccatcaagggcaaacaggccccccgaaaaaaagctcaaggaaaaacgcaacagaatcgcaaacttacggatttctaccctgtccgaaggagctccaggaagagcaaagccgagctgcagtctgaagaaaggaaaagaatagatgaattgattgaaagtgggaaggaagaaggaatgaagattgacctcatcgatggcaaaggcaggggtgtgattgccaccaagcagttctcccggggtgactttgtggtggaataccacggggacctcatcgagatcaccgacgccaagaaacgggaggctctgtacgcacaggacccttccacgggctgctacatgtactattttcagtatctgagcaaaacctactgcgtggatgcaactagagagacaaatcgcctaggaagactgatcaatcacagcaaatgtgggaactgccaaaccaaactgcacgacatcgacggcgtacctcacctcatcctcatcgcctcccgagacatcgcggctggggaggagctcctgtatgactatggggaccgcagcaaggcttccattgaagcccacccgtggctgaagcattaaccggtgggccccgtgccctccccgccccactttcccttcttcaaaggacaaagtgccctcaaagggaattgaattttttttttacacacttaatcttagcggattacttcagatgtttttaaaaagtatattaagatgccttttcactgtagtatttaaatatctgttacaggtttccaaggtggacttgaacagatggccttatattaccaaaacttttatattctagttgtttttgtactttttttgcatacaagccgaacgtttgtgcttcccgtgcatgcagtcaaagactcagcacaggttttagaggaaatagtcaaacatgaactaggaagccaggtgagtctcctttctccagtggaagagccgggaccttccccctgcacccccgacatccagggacggggtgtgaggaagacgctgcctcccaatggcctggacgggatgtttccaagctcttgttcccctaacgtctcaacaggcgctcactgaagtgtatgaatattttttaaaaaggtttttgcagtaagctagtcttcccctctgctttctcgaaagcttactgagccctgggccccaagcacgggccgggcatagatttcctcttccacaagctgccgcttttctgggcaccttgaagcttncagngacgtccctgatccggtaccgagctgatttatttgggg

SEQ ID NO: 109048 - DNA, 1783 bp, Homo sapiens
  misc_feature (8)..(8): n is a, c, g, or t
  misc_feature (318)..(318): n is a, c, g, or t
  misc_feature (336)..(336): n is a, c, g, or t
  misc_feature (346)..(346): n is a, c, g, or t
  misc_feature (355)..(355): n is a, c, g, or t
  misc_feature (361)..(361): n is a, c, g, or t
tcccaggnggtgacagagtggagccatggctagaggagaacgtatttaccgggcagtcaaagatctattcctacatgagcccgaacaaatgctctggaatgcgtttcccccttcaggaagagaactcagttacacatcacgaagtcaaatgccaggggaaaccattagccggaatctacaggaaacgagaagagaaaagaaatgctgggaacgcagtacggagcgccatgaagtccgaggaacagaagatcaaagacgccaggaaaggtcccctggtaccttttccaaaccaaaaatctgaagcagcagaacctccanaaactccaccctcatctngtgattccancaatgcagncatcgncaagcaagccctgaaaaagcccatcaagggcaaacaggccccccgaaaaaaagctcaaggaaaaacgcaacagaatcgcaaacttacggatttctaccctgtccgaaggagctccaggaagagcaaagccgagctgcagtctgaagaaaggaaaagaatagatgaattgattgaaagtgggaaggaagaaggaatgaagattgacctcatcgatggcaaaggcaggggtgtgattgccaccaagcagttctcccggggtgactttgtggtggaataccacggggacctcatcgagatcaccgacgccaagaaacgggaggctctgtacgcacaggacccttccacgggctgctacatgtactattttcagtatctgagcaaaacctactgcgtggatgcaactagagagacaaatcgcctaggaagactgatcaatcacagcaaatgtgggaactgccaaaccaaactgcacgacatcgacggcgtacctcacctcatcctcatcgcctcccgagacatcgcggctggggaggagctcctgtatgactatggggaccgcagcaaggcttccattgaagcccacccgtggctgaagcattaaccggtgggccccgtgccctccccgccccactttcccttcttcaaaggacaaagtgccctcaaagggaattgaattttttttttacacacttaatcttagcggattacttcagatgtttttaaaaagtatattaagatgccttttcactgtagtatttaaatatctgttacaggtttccaaggtggacttgaacagatggccttatattaccaaaacttttatattctagttgtttttgtactttttttgcatacaagccgaacgtttgtgcttcccgtgcatgcagtcaaagactcagcacaggttttagaggaaatagtcaaacatgaactaggaagccaggtgagtctcctttctccagtggaagagccgggaccttccccctgcacccccgacatccagggacggggtgtgaggaagacgctgcctcccaatggcctggacgggatgtttccaagctcttgttcccctaacgtctcaacaggcgctcactgaagtgtatgaatattttttaaaaaggtttttgcagtaagctagtcttcccctctgctttctcgaaagcttactgagccctgggccccaagcacgggccgggcatagatttcctcttccacaagctgccgcttttctgggcaccttgaagcatcagggcgtgaaatcaaactagatgtgggcagggagagtgttgcttacctgccctgctggggcagggtttcctgaaactgggttaattctttatagaaatgtgaacactgaatttattttaaaaaataataataaaaatttaaaaaaagatggggggggagaggaaaaaagcgggg

SEQ ID NO: 109049 - DNA, 1186 bp, Homo sapiens
  misc_feature (8)..(8): n is a, c, g, or t
  misc_feature (318)..(318): n is a, c, g, or t
  misc_feature (336)..(336): n is a, c, g, or t
  misc_feature (346)..(346): n is a, c, g, or t
  misc_feature (355)..(355): n is a, c, g, or t
  misc_feature (361)..(361): n is a, c, g, or t
tcccaggnggtgacagagtggagccatggctagaggagaacgtatttaccgggcagtcaaagatctattcctacatgagcccgaacaaatgctctggaatgcgtttcccccttcaggaagagaactcagttacacatcacgaagtcaaatgccaggggaaaccattagccggaatctacaggaaacgagaagagaaaagaaatgctgggaacgcagtacggagcgccatgaagtccgaggaacagaagatcaaagacgccaggaaaggtcccctggtaccttttccaaaccaaaaatctgaagcagcagaacctccanaaactccaccctcatctngtgattccancaatgcagncatcgncaagcaagccctgaaaaagcccatcaagggcaaacaggccccccgaaaaaaagctcaaggaaaaacgcaacagaatcgcaaacttacggatttctaccctgtccgaaggagctccaggaagagcaaagccgagctgcagtctgaagaaaggaaaagaatagatgaattgattgaaagtgggaaggaagaaggaatgaagattgacctcatcgatggcaaaggcaggggtgtgattgccaccaagcagttctcccggggtgactttgtggtggaataccacggggacctcatcgagatcaccgacgccaagaaacgggaggctctgtacgcacaggacccttccacgggctgctacatgtactattttcagtatctgagcaaaacctactgcgtggatgcaactagagagacaaatcgcctaggaagactgatcaatcacagcaaatgtgggaactgccaaaccaaactgcacgacatcgacggcgtacctcacctcatcctcatcgcctcccgagacatcgcggctggggaggagctcctgtatgactatggggaccgcagcaaggcttccattgaagcccacccgtggctgaagcattaaccggtgggccccgtgccctccccgccccactttcccttcttcaaaggacaaagtgccctcaaagggaattgaattttttttttacacacttaatcttagcggattacttcagatgtttttaaaaagtatattaagatgccttttcactgtagtatttaaatatctgttacaggtttccaaggtggacttgaacagatgcctatctgaactgggccgagctcgat

SEQ ID NO: 109050 - DNA, 344 bp, Homo sapiens
ttgagtaatagttaaaaaaatggttttgacatctgtgttaatgacctttctaatacctgagactcaccattctttgaattctatttaatacagcaatccttttcacaccaattgagcattctgttaatttgttctctttattagacctcatttacaatgggaactgattgtttctgaatattgatctctgcatttttttcttttagccttcagcattactcttgttacccctagttttgcatatcatcttatctcttactttacaagaaataggatcatcacacataactcattcagcttacatttctttccttttccctaatacctaatcacttattagattt

SEQ ID NO: 109051 - DNA, 394 bp, Homo sapiens
ccctaaggaaataatgagaagttttggtaaacaagtgcgtgcaagagaatcaattatggtattaccgagtaacatggaaaactgtatatgagccctagttaattcaaagaaaagcaacaaagtagaagttaaggtgtcatttgactttaatgtaatgtgcgtatgtatatgagattggaccatgtagaattgcacctaattgactgctttttatctgcaaaatgataattttatatggacaacctaagatgtatacatagaaacagactgaaagattatccacctatagttttctgggcggaagaaatagaataacttttacccttttccgtatgttcattatttacaatgaacatattttaacctgcaatgagaaaaatgatgcagggttttt

SEQ ID NO: 109052 - DNA, 5555 bp, Homo sapiens
  misc_feature (3)..(5): n is a, c, g, or t
  misc_feature (7)..(8): n is a, c, g, or t
  misc_feature (12)..(12): n is a, c, g, or t
cgnnngnntggngttttattttacaggctgatgtaatctctaaactcaacatgacagacagttttgcgtttggctccctaatatctgctgtcgatccagtggccactattgccattttcaatgcacttcatgtggaccccgtgctcaacatgctggtctttggagaaagtattctcaacgatgcagtctccattgttctgaccaaacagctgaaggtttaacaagaaaaaatatgtcagatgtcagtgggtggcaaacatttttacaagcccttgactacttcctcaaaatgttctttggctctgcagcgctcggcactctcactggcttaatttctgcattagtgctgaagcatattgacttgaggaaaacgccttccttggagtttggcatgatgatcatttttgcttatctgccttatgggcttgcagaaggaatctcactctcagggcatcatggccatccttttctcaggcatcgtgatgtcccactacacgcaccataacctctccccagtcacccagatcctcatgcagcagaccctccgcaccgtggccttcttatgtgaaacatgtgtgtttgcatttcttggcctgtccatttttagttttcctcacaagtttgaaatttcctttgtcatctggtgcatagtgcttgtactatttggcagagcggtaaacattttccctctttcctacctcctgaatttcttccgggatcataaaatcacaccgaagatgatgttcatcatgtggtttagtggcctgcggggagccatcccctatgccctgagcctacacctggacctggagcccatggagaagcggcagctcatcggcaccaccaccatcgtcatcgtgctcttcaccatcctgctgctgggcggcagcaccatgcccctcattcgcctcatggacatcgaggacgccaaggcacaccgcaggaacaagaaggacgtcaacctcagcaagactgagaagatgggcaacactgtggagtcggagcacctgtcggagctcacggaggaggagtacgaggcccactacatcaggcggcaggaccttaagggcttcgtgtggctggacgccaagtacctgaaccccttcttcactcggaggctgacgcaggaggacctgcaccacgggcgcatccagatgaaaactctcaccaacaagtggtacgaggaggtacgccagggcccctccggctccgaggacgacgagcaggagctgctctgacgccaggtgccaaggcttcaggcaggcaggcccaggatgggcgtttgctgcgcacagacactcagcaggggcctcgcagagatgcgtgcatccagcagccccttcaagacataagagggcggggcgaggtactggctgcagagtcgccttagtccagaacctgacaggcctctggagccaggcgacttcttgggaaactgtcatctcccgactcctccctgagccagcctccgctcagtgtggctcctcagcccacagaggggagggagcatggggccaggtgccagtcatctgtgaagctagggcgcctacccccccacccggaggacccctgcggccccctgcctagaggagcaccatctacagttgtgccattccccagccactgccttcatgctgcccccgccggactggcagagccaggggtcagccacctgcctttgagtcatcaagatgcctctgcagccacaattctgacctaagtggcagggcccagaaatcctgaaaacctcccgctgccttttgtgatacttcctgtgctccctcagagagaaacggagtgaccttttgtcctttacctgattggcacttcgcagtctatctccctgggtagcagacggctgctgcccttctctgggcatgttctgaatgtttacactggtaccttctggtatcttctttagagccccctgcaagctgcaactctaggcttttatcttgcggggtcagagcgccctctagagggaaaagctagaggcacagggtttctgccggcccacaactgctgtcttgatttgcattttacagcaaagtgctgagagcctctagtcgcctcctgccatctgatctccctccccaccattcccgtactcagttgttcttttgtctaatcggaggccactgtgctgaggccctgcagtgtctgctcactgctgccatcttcgctgctagtcagggttccatcctctttcccctctcccagttccctaccacgttggatcccattcgtcacccatgctagggtccccaaagcactggggcaggggccagagcagcagcacccagtgctccctcctctactctgacctggggccccagcatcctggagcacacgctccacgcacacacaccccagccctgtcccaggggcctggccccctcagccatctcagggtgaggagctgccagtcatgtccagatggaatgactcccatcctctcctcatctcccctttgacgagcctcaaactgctcagctcatcaaagagccattgccaacttccgtatgtggttctgggtcccagggagccttggaacctggcaccctggggtggtttaattcatcattaagaagcattcctgcttctcaagggacacagtggcctgcatgggccagcatggaccctgggctgatcatgtgcattcctgcttctctggggacacagtgggcccacatgggccagcatggaccctgggctagagcaagcacatctccatctcttccacctcaggcagtgtggctccagatgtcaggagggactgacctcaggaccttccaggttcctctgtgccaggaatgagaggccaggcccgatcctaccacctcgccttgaccctgaagtcagagcaggccagccaagcaggaagcacactgtttactttttgcatgaaaagtaaatgtgtacttgatagagctaaaatatgatcttttttaatttctcaaccccataatttgagccattgccttgcttaattttggtttccaccatttccttttagtggagaagagaggaagtcagagggtagggacctttgcctgcccctgggcgagtgcgggcagggatctgagaccagattgttctcgcacccctgccagaactcactctcccctgaagtttagggtcccatctcccagatgtaagttgttttgcaaactcagtttgccaggatttctttctttcctaatcttaaattcacagataaagcaatgaaaagagtcagatcccatttccgtctgccccctcgtcaccaggtgtgatagccccagccaggtcacacctggcctcacactttgagctgagacttgaaaacgatgctgtggcggaagagcatgtggggcttggtggaggggccccaggatttgttgggggcaaagggggtggcgggaccgttcccaggaggtaccagcacctgcctcgatctcctctgagcctcttctgccccctgtcggccaggtgaggtcagcagcctgggagagtgcccccaagagatgagggcaccccgtgttccttggcaatcttggctcaccttggtaacaaaaggccatagaagtctgtttttctgggtcagttttttttgcctgagaataacaaattgctgctgtctacctttagcacacccaataattctatttggggcagtgaatgcatagaagatataaaaatacgcagcttaactatatcttcctgcgtgtgtatttattttcttctgggtctaggccatggtacaggagaactgtggcgtgtaggaggaatacttcaggatgagtgaaggctggagccagggagcgctggaggaaaccagccctttagccagcagcccctccaccacaggcactgctgtgtggaacgagttcttggaatgaatcccatgctttctgcagcctgtagttgttatgacccctcggaacaaccaccccgtggcttgtgtggggtctcgcagggaaaagggctggcttctaggtccccgagataagtgtgcagggggatgggccagggccaggctaagggtggctcagttccatcatctggaggtcagacacactgtccagaggcagaactgaagccctctcggcccctaccctaagccagccacccctcttcacagtgggtgagctgggctgggctggctggcatgaggccaaggggtaggcctgagcgccagagtcgcccaggttagcccacaggattcctttgtgtgccatggaatgctgaaagatgggtgactggggacccttcttaaaacctttggcaaaggtgccatcggcagggcttggcctcatgaagtctcaggtccgtgttcccgcagggcgcacatgcttggagagtcctcagcagggtagccgaggccaggccacttctgctgaggatggggcaggctggggtgtgggtgtggcctggggtggctcagggctggaactgctgcctgattcctgtgtggggagaagctcagtggccgtttgctgccactgacaaggatttcacatgcagaagagaaaaggcccccctccaccccccgcattccctgccgagtgagagccagtgtttgctgcccttgctgggggcgggtaggaaaccctgagcttcctgatgcggagtcatgaagcagagtcctcgggaaggcatctccacagccccgggtcctctgtctaacgccctccatttcacgccctccatctcacagtcaagataaaggcctcgagaataaagagccagcccccttccatttagtctcctgccgtttcccaaacagttgtccaacagttagacattgaggggcttcactgttaccaggcatgtaacagaaggaggaagactaacacacaccccctgccccatcccatccccctctcccgagctattttcttgctgtggcctctggtgcccttgagttggtctccccggctgctctgcgggggcttcactggcttcggagtgagcgcgaagtgctggtgagcagtgggcctgtgattggatgggaagatgtgcatccgtggtcaaaagtcagctgccagccctgcggaaccagagcctcaggctgggatggggaggcctccctgcttccacctgcatggtgggcatggcctggcttacaccaaaggctttgacggtttctccaagtaaggatctgcaaatcttgaatcgtcctcaaaatgacgaagcttgaattgtcctcaagatggatgtgaatcttacattccttttcatcatttcctttgtaaaaatgacgagtgctgggtttttgttttaagaagcattatgaaggccagacttactcatttttctcccccaagtgagctgcaagaggcccctgttaggcccctgtttcctgagcagtgatgtgctgctcttcttggtggggctttgggctgggaggggaaggcgggtcagagatgggggacctgtggctgccatgcaggagcccctgcgtcatctcgttggactctttaagggagtcaggaatagatgtatgaacagtcgtgtcactggatgcctatttagaaataaagtgtatgctgctgaattggaaaaaaagtctg

SEQ ID NO: 109053 - DNA, 487 bp, Homo sapiens
attctccttccttgacagttgtcatttacgtgctgaagcatattgacttgaggaaaacgccttccttggagtttggcatgatgatcatttttgcttatctgccttatgggcttgcagaaggaatctcactctcagggcatcatggccatccttttctcaggcatcgtgatgtcccactacacgcaccataacctctccccagtcacccagatcctcatgcagcagaccctccgcaccgtggccttcttatgtgaaacatgtgtgtttgcatttcttggcctgtccatttttagttttcctcacaagtttgaaatttcctttgtcatctggtgcatagtaagtattttcctttttttttttaaatttaattacttatttgtagatcaataaacacatgttccggattcatttatgtaactgttaactgttcaaagtcaacagctacatagacactcttttgtttaaagtttcttttgttaaaaaaaaa

SEQ ID NO: 109054 - DNA, 5582 bp, Homo sapiens
ggacggcaatctccgcttttgtagtaggtggaggaatttattttctgggtcaggctgatgtaatctctaaactcaacatgacagacagttttgcgtttggctccctaatatctgctgtcgatccagtggccactattgccattttcaatgcacttcatgtggaccccgtgctcaacatgctggtctttggagaaagtattctcaacgatgcagtctccattgttctgaccaaacagctgaaggtttaacaagaaaaaatatgtcagatgtcagtgggtggcaaacatttttacaagcccttgactacttcctcaaaatgttctttggctctgcagcgctcggcactctcactggcttaatttctgcattagtgctgaagcatattgacttgaggaaaacgccttccttggagtttggcatgatgatcatttttgcttatctgccttatgggcttgcagaaggaatctcactctcagggcatcatggccatccttttctcaggcatcgtgatgtcccactacacgcaccataacctctccccagtcacccagatcctcatgcagcagaccctccgcaccgtggccttcttatgtgaaacatgtgtgtttgcatttcttggcctgtccatttttagttttcctcacaagtttgaaatttcctttgtcatctggtgcatagtgcttgtactatttggcagagcggtaaacattttccctctttcctacctcctgaatttcttccgggatcataaaatcacaccgaagatgatgttcatcatgtggtttagtggcctgcggggagccatcccctatgccctgagcctacacctggacctggagcccatggagaagcggcagctcatcggcaccaccaccatcgtcatcgtgctcttcaccatcctgctgctgggcggcagcaccatgcccctcattcgcctcatggacatcgaggacgccaaggcacaccgcaggaacaagaaggacgtcaacctcagcaagactgagaagatgggcaacactgtggagtcggagcacctgtcggagctcacggaggaggagtacgaggcccactacatcaggcggcaggaccttaagggcttcgtgtggctggacgccaagtacctgaaccccttcttcactcggaggctgacgcaggaggacctgcaccacgggcgcatccagatgaaaactctcaccaacaagtggtacgaggaggtacgccagggcccctccggctccgaggacgacgagcaggagctgctctgacgccaggtgccaaggcttcaggcaggcaggcccaggatgggcgtttgctgcgcacagacactcagcaggggcctcgcagagatgcgtgcatccagcagccccttcaagacataagagggcggggcgaggtactggctgcagagtcgccttagtccagaacctgacaggcctctggagccaggcgacttcttgggaaactgtcatctcccgactcctccctgagccagcctccgctcagtgtggctcctcagcccacagaggggagggagcatggggccaggtgccagtcatctgtgaagctagggcgcctacccccccacccggaggacccctgcggccccctgcctagaggagcaccatctacagttgtgccattccccagccactgccttcatgctgcccccgccggactggcagagccaggggtcagccacctgcctttgagtcatcaagatgcctctgcagccacaattctgacctaagtggcagggcccagaaatcctgaaaacctcccgctgccttttgtgatacttcctgtgctccctcagagagaaacggagtgaccttttgtcctttacctgattggcacttcgcagtctatctccctgggtagcagacggctgctgcccttctctgggcatgttctgaatgtttacactggtaccttctggtatcttctttagagccccctgcaagctgcaactctaggcttttatcttgcggggtcagagcgccctctagagggaaaagctagaggcacagggtttctgccggcccacaactgctgtcttgatttgcattttacagcaaagtgctgagagcctctagtcgcctcctgccatctgatctccctccccaccattcccgtactcagttgttcttttgtctaatcggaggccactgtgctgaggccctgcagtgtctgctcactgctgccatcttcgctgctagtcagggttccatcctctttcccctctcccagttccctaccacgttggatcccattcgtcacccatgctagggtccccaaagcactggggcaggggccagagcagcagcacccagtgctccctcctctactctgacctggggccccagcatcctggagcacacgctccacgcacacacaccccagccctgtcccaggggcctggccccctcagccatctcagggtgaggagctgccagtcatgtccagatggaatgactcccatcctctcctcatctcccctttgacgagcctcaaactgctcagctcatcaaagagccattgccaacttccgtatgtggttctgggtcccagggagccttggaacctggcaccctggggtggtttaattcatcattaagaagcattcctgcttctcaagggacacagtggcctgcatgggccagcatggaccctgggctgatcatgtgcattcctgcttctctggggacacagtgggcccacatgggccagcatggaccctgggctagagcaagcacatctccatctcttccacctcaggcagtgtggctccagatgtcaggagggactgacctcaggaccttccaggttcctctgtgccaggaatgagaggccaggcccgatcctaccacctcgccttgaccctgaagtcagagcaggccagccaagcaggaagcacactgtttactttttgcatgaaaagtaaatgtgtacttgatagagctaaaatatgatcttttttaatttctcaaccccataatttgagccattgccttgcttaattttggtttccaccatttccttttagtggagaagagaggaagtcagagggtagggacctttgcctgcccctgggcgagtgcgggcagggatctgagaccagattgttctcgcacccctgccagaactcactctcccctgaagtttagggtcccatctcccagatgtaagttgttttgcaaactcagtttgccaggatttctttctttcctaatcttaaattcacagataaagcaatgaaaagagtcagatcccatttccgtctgccccctcgtcaccaggtgtgatagccccagccaggtcacacctggcctcacactttgagctgagacttgaaaacgatgctgtggcggaagagcatgtggggcttggtggaggggccccaggatttgttgggggcaaagggggtggcgggaccgttcccaggaggtaccagcacctgcctcgatctcctctgagcctcttctgccccctgtcggccaggtgaggtcagcagcctgggagagtgcccccaagagatgagggcaccccgtgttccttggcaatcttggctcaccttggtaacaaaaggccatagaagtctgtttttctgggtcagttttttttgcctgagaataacaaattgctgctgtctacctttagcacacccaataattctatttggggcagtgaatgcatagaagatataaaaatacgcagcttaactatatcttcctgcgtgtgtatttattttcttctgggtctaggccatggtacaggagaactgtggcgtgtaggaggaatacttcaggatgagtgaaggctggagccagggagcgctggaggaaaccagccctttagccagcagcccctccaccacaggcactgctgtgtggaacgagttcttggaatgaatcccatgctttctgcagcctgtagttgttatgacccctcggaacaaccaccccgtggcttgtgtggggtctcgcagggaaaagggctggcttctaggtccccgagataagtgtgcagggggatgggccagggccaggctaagggtggctcagttccatcatctggaggtcagacacactgtccagaggcagaactgaagccctctcggcccctaccctaagccagccacccctcttcacagtgggtgagctgggctgggctggctggcatgaggccaaggggtaggcctgagcgccagagtcgcccaggttagcccacaggattcctttgtgtgccatggaatgctgaaagatgggtgactggggacccttcttaaaacctttggcaaaggtgccatcggcagggcttggcctcatgaagtctcaggtccgtgttcccgcagggcgcacatgcttggagagtcctcagcagggtagccgaggccaggccacttctgctgaggatggggcaggctggggtgtgggtgtggcctggggtggctcagggctggaactgctgcctgattcctgtgtggggagaagctcagtggccgtttgctgccactgacaaggatttcacatgcagaagagaaaaggcccccctccaccccccgcattccctgccgagtgagagccagtgtttgctgcccttgctgggggcgggtaggaaaccctgagcttcctgatgcggagtcatgaagcagagtcctcgggaaggcatctccacagccccgggtcctctgtctaacgccctccatttcacgccctccatctcacagtcaagataaaggcctcgagaataaagagccagcccccttccatttagtctcctgccgtttcccaaacagttgtccaacagttagacattgaggggcttcactgttaccaggcatgtaacagaaggaggaagactaacacacaccccctgccccatcccatccccctctcccgagctattttcttgctgtggcctctggtgcccttgagttggtctccccggctgctctgcgggggcttcactggcttcggagtgagcgcgaagtgctggtgagcagtgggcctgtgattggatgggaagatgtgcatccgtggtcaaaagtcagctgccagccctgcggaaccagagcctcaggctgggatggggaggcctccctgcttccacctgcatggtgggcatggcctggcttacaccaaaggctttgacggtttctccaagtaaggatctgcaaatcttgaatcgtcctcaaaatgacgaagcttgaattgtcctcaagatggatgtgaatcttacattccttttcatcatttcctttgtaaaaatgacgagtgctgggtttttgttttaagaagcattatgaaggccagacttactcatttttctcccccaagtgagctgcaagaggcccctgttaggcccctgtttcctgagcagtgatgtgctgctcttcttggtggggctttgggctgggaggggaaggcgggtcagagatgggggacctgtggctgccatgcaggagcccctgcgtcatctcgttggactctttaagggagtcaggaatagatgtatgaacagtcgtgtcactggatgcctatttagaaataaagtgtatgctgctgaattggaaaaaaagtctg

SEQ ID NO: 109055 - DNA, 3724 bp, Homo sapiens
ggacggcaatctccgcttttgtagtaggtggaggaatttattttctgggtcaggctgatgtaatctctaaactcaacatgacagacagttttgcgtttggctccctaatatctgctgtcgatccagtggccactattgccattttcaatgcacttcatgtggaccccgtgctcaacatgctggtctttggagaaagtattctcaacgatgcagtctccattgttctgaccaaacagctgaaggtttaacaagaaaaaatatgtcagatgtcagtgggtggcaaacatttttacaagcccttgactacttcctcaaaatgttctttggctctgcagcgctcggcactctcactggcttaatttctgcattagtgctgaagcatattgacttgaggaaaacgccttccttggagtttggcatgatgatcatttttgcttatctgccttatgggcttgcagaaggaatctcactctcagggcatcatggccatccttttctcaggcatcgtgatgtcccactacacgcaccataacctctccccagtcacccagatcctcatgcagcagaccctccgcaccgtggccttcttatgtgaaacatgtgtgtttgcatttcttggcctgtccatttttagttttcctcacaagtttgaaatttcctttgtcatctggtgcatagtgcttgtactatttggcagagcggtaaacattttccctctttcctacctcctgaatttcttccgggatcataaaatcacaccgaagatgatgttcatcatgtggtttagtggcctgcggggagccatcccctatgccctgagcctacacctggacctggagcccatggagaagcggcagctcatcggcaccaccaccatcgtcatcgtgctcttcaccatcctgctgctgggcggcagcaccatgcccctcattcgcctcatggacatcgaggacgccaaggcacaccgcaggaacaagaaggacgtcaacctcagcaagactgagaagatgggcaacactgtggagtcggagcacctgtcggagctcacggaggaggagtacgaggcccactacatcaggcggcaggaccttaagggcttcgtgtggctggacgccaagtacctgaaccccttcttcactcggaggctgacgcaggaggacctgcaccacgggcgcatccagatgaaaactctcaccaacaagtggtacgaggaggtacgccagggcccctccggctccgaggacgacgagcaggagctgctctgacgccaggtgccaaggcttcaggcaggcaggcccaggatgggcgtttgctgcgcacagacactcagcaggggcctcgcagagatgcgtgcatccagcagccccttcaagacataagagggcggggcgaggtactggctgcagagtcgccttagtccagaacctgacaggcctctggagccaggcgacttcttgggaaactgtcatctcccgactcctccctgagccagcctccgctcagtgtggctcctcagcccacagaggggagggagcatggggccaggtgccagtcatctgtgaagctagggcgcctacccccccacccggaggacccctgcggccccctgcctagaggagcaccatctacagttgtgccattccccagccactgccttcatgctgcccccgccggactggcagagccaggggtcagccacctgcctttgagtcatcaagatgcctctgcagccacaattctgacctaagtggcagggcccagaaatcctgaaaacctcccgctgccttttgtgatacttcctgtgctccctcagagagaaacggagtgaccttttgtcctttacctgattggcacttcgcagtctatctccctgggtagcagacggctgctgcccttctctgggcatgttctgaatgtttacactggtaccttctggtatcttctttagagccccctgcaagctgcaactctaggcttttatcttgcggggtcagagcgccctctagagggaaaagctagaggcacagggtttctgccggcccacaactgctgtcttgatttgcattttacagcaaagtgctgagagcctctagtcgcctcctgccatctgatctccctccccaccattcccgtactcagttgttcttttgtctaatcggaggccactgtgctgaggccctgcagtgtctgctcactgctgccatcttcgctgctagtcagggttccatcctctttcccctctcccagttccctaccacgttggatcccattcgtcacccatgctagggtccccaaagcactggggcaggggccagagcagcagcacccagtgctccctcctctactctgacctggggccccagcatcctggagcacacgctccacgcacacacaccccagccctgtcccaggggcctggccccctcagccatctcagggtgaggagctgccagtcatgtccagatggaatgactcccatcctctcctcatctcccctttgacgagcctcaaactgctcagctcatcaaagagccattgccaacttccgtatgtggttctgggtcccagggagccttggaacctggcaccctggggtggtttaattcatcattaagaagcattcctgcttctcaagggacacagtggcctgcatgggccagcatggaccctgggctgatcatgtgcattcctgcttctctggggacacagtgggcccacatgggccagcatggaccctgggctagagcaagcacatctccatctcttccacctcaggcagtgtggctccagatgtcaggagggactgacctcaggaccttccaggttcctctgtgccaggaatgagaggccaggcccgatcctaccacctcgccttgaccctgaagtcagagcaggccagccaagcaggaagcacactgtttactttttgcatgaaaagtaaatgtgtacttgatagagctaaaatatgatcttttttaatttctcaaccccataatttgagccattgccttgcttaattttggtttccaccatttccttttagtggagaagagaggaagtcagagggtagggacctttgcctgcccctgggcgagtgcgggcagggatctgagaccagattgttctcgcacccctgccagaactcactctcccctgaagtttagggtcccatctcccagatgtaagttgttttgcaaactcagtttgccaggatttctttctttcctaatcttaaattcacagataaagcaatgaaaagagtcagatcccatttccgtctgccccctcgtcaccaggtgtgatagccccagccaggtcacacctggcctcacactttgagctgagacttgaaaacgatgctgtggcggaagagcatgtggggcttggtggaggggccccaggatttgttgggggcaaagggggtggcgggaccgttcccaggaggtaccagcacctgcctcgatctcctctgagcctcttctgccccctgtcggccaggtgaggtcagcagcctgggagagtgcccccaagagatgagggcaccccgtgttccttggcaatcttggctcaccttggtaacaaaaggccatagaagtctgtttttctgggtcagttttttttgcctgagaataacaaattgctgctgtctacctttagcacacccaataattctatttggggcagtgaatgcatagaagatataaaaatacgcagcttaactata

SEQ ID NO: 109056 - DNA, 2604 bp, Homo sapiens
ggacggcaatctccgcttttgtagtaggtggaggaatttattttctgggtcaggctgatgtaatctctaaactcaacatgacagacagttttgcgtttggctccctaatatctgctgtcgatccagtggccactattgccattttcaatgcacttcatgtggaccccgtgctcaacatgctggtctttggagaaagtattctcaacgatgcagtctccattgttctgaccaaacagctgaaggtttaacaagaaaaaatatgtcagatgtcagtgggtggcaaacatttttacaagcccttgactacttcctcaaaatgttctttggctctgcagcgctcggcactctcactggcttaatttctgcattagtgctgaagcatattgacttgaggaaaacgccttccttggagtttggcatgatgatcatttttgcttatctgccttatgggcttgcagaaggaatctcactctcagggcatcatggccatccttttctcaggcatcgtgatgtcccactacacgcaccataacctctccccagtcacccagatcctcatgcagcagaccctccgcaccgtggccttcttatgtgaaacatgtgtgtttgcatttcttggcctgtccatttttagttttcctcacaagtttgaaatttcctttgtcatctggtgcatagtgcttgtactatttggcagagcggtaaacattttccctctttcctacctcctgaatttcttccgggatcataaaatcacaccgaagatgatgttcatcatgtggtttagtggcctgcggggagccatcccctatgccctgagcctacacctggacctggagcccatggagaagcggcagctcatcggcaccaccaccatcgtcatcgtgctcttcaccatcctgctgctgggcggcagcaccatgcccctcattcgcctcatggacatcgaggacgccaaggcacaccgcaggaacaagaaggacgtcaacctcagcaagactgagaagatgggcaacactgtggagtcggagcacctgtcggagctcacggaggaggagtacgaggcccactacatcaggcggcaggaccttaagggcttcgtgtggctggacgccaagtacctgaaccccttcttcactcggaggctgacgcaggaggacctgcaccacgggcgcatccagatgaaaactctcaccaacaagtggtacgaggaggtacgccagggcccctccggctccgaggacgacgagcaggagctgctctgacgccaggtgccaaggcttcaggcaggcaggcccaggatgggcgtttgctgcgcacagacactcagcaggggcctcgcagagatgcgtgcatccagcagccccttcaagacataagagggcggggcgaggtactggctgcagagtcgccttagtccagaacctgacaggcctctggagccaggcgacttcttgggaaactgtcatctcccgactcctccctgagccagcctccgctcagtgtggctcctcagcccacagaggggagggagcatggggccaggtgccagtcatctgtgaagctagggcgcctacccccccacccggaggacccctgcggccccctgcctagaggagcaccatctacagttgtgccattccccagccactgccttcatgctgcccccgccggactggcagagccaggggtcagccacctgcctttgagtcatcaagatgcctctgcagccacaattctgacctaagtggcagggcccagaaatcctgaaaacctcccgctgccttttgtgatacttcctgtgctccctcagagagaaacggagtgaccttttgtcctttacctgattggcacttcgcagtctatctccctgggtagcagacggctgctgcccttctctgggcatgttctgaatgtttacactggtaccttctggtatcttctttagagccccctgcaagctgcaactctaggcttttatcttgcggggtcagagcgccctctagagggaaaagctagaggcacagggtttctgccggcccacaactgctgtcttgatttgcattttacagcaaagtgctgagagcctctagtcgcctcctgccatctgatctccctccccaccattcccgtactcagttgttcttttgtctaatcggaggccactgtgctgaggccctgcagtgtctgctcactgctgccatcttcgctgctagtcagggttccatcctctttcccctctcccagttccctaccacgttggatcccattcgtcacccatgatttgttgggggcaaagggggtggcgggaccgttcccaggaggtaccagcacctgcctcgatctcctctgagcctcttctgccccctgtcggccaggtgaggtcagcagcctgggagagtgcccccaagagatgagggcaccccgtgttccttggcaatcttggctcaccttggtaacaaaaggccatagaagtctgtttttctgggtcagttttttttgcctgagaataacaaattgctgctgtctacctttagcacacccaataattctatttggggcagtgaatgcatagaagatataaaaatacgcagcttaactata

SEQ ID NO: 109057 - DNA, 446 bp, Homo sapiens
tgggcggtgtatgataaatatatctaagcaaaagtctcccttccatcattggtcaaagtcaagtctccgtgctgacactagaaaaccaggccattcctaacaactcagtttagagtgggcctttcatactccacccacaaaacagcagataagtggggaaaaaatacgctaccttctgtaattaattcagctctagcgtgtagtattgctttctgttaaatatggcctttgactttaatgctttaatatgtggaccaagtgacacacattacagaatctccccttccctctgtctcttacagttttgcgtttggctccctaatatctgctgtcgatccagtggccactattgccattttcaatgcacttcatgtggaccccgtgctcaacatgctggtctttggagaaagtattctcaacgatgcagtctccattgttctgaccaa

SEQ ID NO: 109058 - DNA, 385 bp, Homo sapiens
cacagcagctgtcctgcagtttccaagacacgagcatcaggcttgctaagtcctcccgcacccgcatctggggctctgtagctggggcaggccatctcatttgatctgccaatgttggaatggaggtgagtctgtggtcccatctctgccacctgctctttacaccccaaagcctcacagggtgagcacacactcttcagcagggccattagaatagtcagctggtcgtggtgctgggccggctggatttccagggaagccagcccatgaagctgctgcctcttcactgtgtcctctcacactgtttgctgtcacccaggcctgcggggagccatcccctatgccctgagcctacacctggacctggagcccatggagaagcggc

SEQ ID NO: 109059 - DNA, 4440 bp, Homo sapiens
ggacggcaatctccgcttttgtagtaggtggaggaatttattttctgggtcaggctgatgtaatctctaaactcaacatgacagacagttttgcgtttggctccctaatatctgctgtcgatccagtggccactattgccattttcaatgcacttcatgtggaccccgtgctcaacatgctggtctttggagaaagtattctcaacgatgcagtctccattgttctgaccaaacagctgaaggtttaacaagaaaaaatatgtcagatgtcagtgggtggcaaacatttttacaagcccttgactacttcctcaaaatgttctttggctctgcagcgctcggcactctcactggcttaatttctgcattagtgctgaagcatattgacttgaggaaaacgccttccttggagtttggcatgatgatcatttttgcttatctgccttatgggcttgcagaaggaatctcactctcaggcaccatctacagttgtgccattccccagccactgccttcatgctgcccccgccggactggcagagccaggggtcagccacctgcctttgagtcatcaagatgcctctgcagccacaattctgacctaagtggcagggcccagaaatcctgaaaacctcccgctgccttttgtgatacttcctgtgctccctcagagagaaacggagtgaccttttgtcctttacctgattggcacttcgcagtctatctccctgggtagcagacggctgctgcccttctctgggcatgttctgaatgtttacactggtaccttctggtatcttctttagagccccctgcaagctgcaactctaggcttttatcttgcggggtcagagcgccctctagagggaaaagctagaggcacagggtttctgccggcccacaactgctgtcttgatttgcattttacagcaaagtgctgagagcctctagtcgcctcctgccatctgatctccctccccaccattcccgtactcagttgttcttttgtctaatcggaggccactgtgctgaggccctgcagtgtctgctcactgctgccatcttcgctgctagtcagggttccatcctctttcccctctcccagttccctaccacgttggatcccattcgtcacccatgctagggtccccaaagcactggggcaggggccagagcagcagcacccagtgctccctcctctactctgacctggggccccagcatcctggagcacacgctccacgcacacacaccccagccctgtcccaggggcctggccccctcagccatctcagggtgaggagctgccagtcatgtccagatggaatgactcccatcctctcctcatctcccctttgacgagcctcaaactgctcagctcatcaaagagccattgccaacttccgtatgtggttctgggtcccagggagccttggaacctggcaccctggggtggtttaattcatcattaagaagcattcctgcttctcaagggacacagtggcctgcatgggccagcatggaccctgggctgatcatgtgcattcctgcttctctggggacacagtgggcccacatgggccagcatggaccctgggctagagcaagcacatctccatctcttccacctcaggcagtgtggctccagatgtcaggagggactgacctcaggaccttccaggttcctctgtgccaggaatgagaggccaggcccgatcctaccacctcgccttgaccctgaagtcagagcaggccagccaagcaggaagcacactgtttactttttgcatgaaaagtaaatgtgtacttgatagagctaaaatatgatcttttttaatttctcaaccccataatttgagccattgccttgcttaattttggtttccaccatttccttttagtggagaagagaggaagtcagagggtagggacctttgcctgcccctgggcgagtgcgggcagggatctgagaccagattgttctcgcacccctgccagaactcactctcccctgaagtttagggtcccatctcccagatgtaagttgttttgcaaactcagtttgccaggatttctttctttcctaatcttaaattcacagataaagcaatgaaaagagtcagatcccatttccgtctgccccctcgtcaccaggtgtgatagccccagccaggtcacacctggcctcacactttgagctgagacttgaaaacgatgctgtggcggaagagcatgtggggcttggtggaggggccccaggatttgttgggggcaaagggggtggcgggaccgttcccaggaggtaccagcacctgcctcgatctcctctgagcctcttctgccccctgtcggccaggtgaggtcagcagcctgggagagtgcccccaagagatgagggcaccccgtgttccttggcaatcttggctcaccttggtaacaaaaggccatagaagtctgtttttctgggtcagttttttttgcctgagaataacaaattgctgctgtctacctttagcacacccaataattctatttggggcagtgaatgcatagaagatataaaaatacgcagcttaactatatcttcctgcgtgtgtatttattttcttctgggtctaggccatggtacaggagaactgtggcgtgtaggaggaatacttcaggatgagtgaaggctggagccagggagcgctggaggaaaccagccctttagccagcagcccctccaccacaggcactgctgtgtggaacgagttcttggaatgaatcccatgctttctgcagcctgtagttgttatgacccctcggaacaaccaccccgtggcttgtgtggggtctcgcagggaaaagggctggcttctaggtccccgagataagtgtgcagggggatgggccagggccaggctaagggtggctcagttccatcatctggaggtcagacacactgtccagaggcagaactgaagccctctcggcccctaccctaagccagccacccctcttcacagtgggtgagctgggctgggctggctggcatgaggccaaggggtaggcctgagcgccagagtcgcccaggttagcccacaggattcctttgtgtgccatggaatgctgaaagatgggtgactggggacccttcttaaaacctttggcaaaggtgccatcggcagggcttggcctcatgaagtctcaggtccgtgttcccgcagggcgcacatgcttggagagtcctcagcagggtagccgaggccaggccacttctgctgaggatggggcaggctggggtgtgggtgtggcctggggtggctcagggctggaactgctgcctgattcctgtgtggggagaagctcagtggccgtttgctgccactgacaaggatttcacatgcagaagagaaaaggcccccctccaccccccgcattccctgccgagtgagagccagtgtttgctgcccttgctgggggcgggtaggaaaccctgagcttcctgatgcggagtcatgaagcagagtcctcgggaaggcatctccacagccccgggtcctctgtctaacgccctccatttcacgccctccatctcacagtcaagataaaggcctcgagaataaagagccagcccccttccatttagtctcctgccgtttcccaaacagttgtccaacagttagacattgaggggcttcactgttaccaggcatgtaacagaaggaggaagactaacacacaccccctgccccatcccatccccctctcccgagctattttcttgctgtggcctctggtgcccttgagttggtctccccggctgctctgcgggggcttcactggcttcggagtgagcgcgaagtgctggtgagcagtgggcctgtgattggatgggaagatgtgcatccgtggtcaaaagtcagctgccagccctgcggaaccagagcctcaggctgggatggggaggcctccctgcttccacctgcatggtgggcatggcctggcttacaccaaaggctttgacggtttctccaagtaaggatctgcaaatcttgaatcgtcctcaaaatgacgaagcttgaattgtcctcaagatggatgtgaatcttacattccttttcatcatttcctttgtaaaaatgacgagtgctgggtttttgttttaagaagcattatgaaggccagacttactcatttttctcccccaagtgagctgcaagaggcccctgttaggcccctgtttcctgagcagtgatgtgctgctcttcttggtggggctttgggctgggaggggaaggcgggtcagagatgggggacctgtggctgccatgcaggagcccctgcgtcatctcgttggactctttaagggagtcaggaatagatgtatgaacagtcgtgtcactggatgcctatttagaaataaagtgtatgctgctgaattggaaaaaaagtctg

SEQ ID NO: 109060 - DNA, 4030 bp, Homo sapiens
gtccatcgccgcgaaaggggaagtcaggcttgcccatggagacgggctgcacagcgctggaaagctggttgatcagcctgctcagtctgaagacggagattcacaggcatctgcccagcctgagatctgggcatacagggtgctctcagctttcctgctcggatctagcaccagatgtctcctgcccagtccagccaacatttcgtttcttgtactgcgtcactctctgtcttcgtccagcacctggtatgagcacagtcaggaatcggtggatgagcgatgacttcccactcctgggcaccttcgcagtctatctccctgggtagcagacggctgctgcccttctctgggcatgttctgaatgtttacactggtaccttctggtatcttctttagagccccctgcaagctgcaactctaggcttttatcttgcggggtcagagcgccctctagagggaaaagctagaggcacagggtttctgccggcccacaactgctgtcttgatttgcattttacagcaaagtgctgagagcctctagtcgcctcctgccatctgatctccctccccaccattcccgtactcagttgttcttttgtctaatcggaggccactgtgctgaggccctgcagtgtctgctcactgctgccatcttcgctgctagtcagggttccatcctctttcccctctcccagttccctaccacgttggatcccattcgtcacccatgctagggtccccaaagcactggggcaggggccagagcagcagcacccagtgctccctcctctactctgacctggggccccagcatcctggagcacacgctccacgcacacacaccccagccctgtcccaggggcctggccccctcagccatctcagggtgaggagctgccagtcatgtccagatggaatgactcccatcctctcctcatctcccctttgacgagcctcaaactgctcagctcatcaaagagccattgccaacttccgtatgtggttctgggtcccagggagccttggaacctggcaccctggggtggtttaattcatcattaagaagcattcctgcttctcaagggacacagtggcctgcatgggccagcatggaccctgggctgatcatgtgcattcctgcttctctggggacacagtgggcccacatgggccagcatggaccctgggctagagcaagcacatctccatctcttccacctcaggcagtgtggctccagatgtcaggagggactgacctcaggaccttccaggttcctctgtgccaggaatgagaggccaggcccgatcctaccacctcgccttgaccctgaagtcagagcaggccagccaagcaggaagcacactgtttactttttgcatgaaaagtaaatgtgtacttgatagagctaaaatatgatcttttttaatttctcaaccccataatttgagccattgccttgcttaattttggtttccaccatttccttttagtggagaagagaggaagtcagagggtagggacctttgcctgcccctgggcgagtgcgggcagggatctgagaccagattgttctcgcacccctgccagaactcactctcccctgaagtttagggtcccatctcccagatgtaagttgttttgcaaactcagtttgccaggatttctttctttcctaatcttaaattcacagataaagcaatgaaaagagtcagatcccatttccgtctgccccctcgtcaccaggtgtgatagccccagccaggtcacacctggcctcacactttgagctgagacttgaaaacgatgctgtggcggaagagcatgtggggcttggtggaggggccccaggatttgttgggggcaaagggggtggcgggaccgttcccaggaggtaccagcacctgcctcgatctcctctgagcctcttctgccccctgtcggccaggtgaggtcagcagcctgggagagtgcccccaagagatgagggcaccccgtgttccttggcaatcttggctcaccttggtaacaaaaggccatagaagtctgtttttctgggtcagttttttttgcctgagaataacaaattgctgctgtctacctttagcacacccaataattctatttggggcagtgaatgcatagaagatataaaaatacgcagcttaactatatcttcctgcgtgtgtatttattttcttctgggtctaggccatggtacaggagaactgtggcgtgtaggaggaatacttcaggatgagtgaaggctggagccagggagcgctggaggaaaccagccctttagccagcagcccctccaccacaggcactgctgtgtggaacgagttcttggaatgaatcccatgctttctgcagcctgtagttgttatgacccctcggaacaaccaccccgtggcttgtgtggggtctcgcagggaaaagggctggcttctaggtccccgagataagtgtgcagggggatgggccagggccaggctaagggtggctcagttccatcatctggaggtcagacacactgtccagaggcagaactgaagccctctcggcccctaccctaagccagccacccctcttcacagtgggtgagctgggctgggctggctggcatgaggccaaggggtaggcctgagcgccagagtcgcccaggttagcccacaggattcctttgtgtgccatggaatgctgaaagatgggtgactggggacccttcttaaaacctttggcaaaggtgccatcggcagggcttggcctcatgaagtctcaggtccgtgttcccgcagggcgcacatgcttggagagtcctcagcagggtagccgaggccaggccacttctgctgaggatggggcaggctggggtgtgggtgtggcctggggtggctcagggctggaactgctgcctgattcctgtgtggggagaagctcagtggccgtttgctgccactgacaaggatttcacatgcagaagagaaaaggcccccctccaccccccgcattccctgccgagtgagagccagtgtttgctgcccttgctgggggcgggtaggaaaccctgagcttcctgatgcggagtcatgaagcagagtcctcgggaaggcatctccacagccccgggtcctctgtctaacgccctccatttcacgccctccatctcacagtcaagataaaggcctcgagaataaagagccagcccccttccatttagtctcctgccgtttcccaaacagttgtccaacagttagacattgaggggcttcactgttaccaggcatgtaacagaaggaggaagactaacacacaccccctgccccatcccatccccctctcccgagctattttcttgctgtggcctctggtgcccttgagttggtctccccggctgctctgcgggggcttcactggcttcggagtgagcgcgaagtgctggtgagcagtgggcctgtgattggatgggaagatgtgcatccgtggtcaaaagtcagctgccagccctgcggaaccagagcctcaggctgggatggggaggcctccctgcttccacctgcatggtgggcatggcctggcttacaccaaaggctttgacggtttctccaagtaaggatctgcaaatcttgaatcgtcctcaaaatgacgaagcttgaattgtcctcaagatggatgtgaatcttacattccttttcatcatttcctttgtaaaaatgacgagtgctgggtttttgttttaagaagcattatgaaggccagacttactcatttttctcccccaagtgagctgcaagaggcccctgttaggcccctgtttcctgagcagtgatgtgctgctcttcttggtggggctttgggctgggaggggaaggcgggtcagagatgggggacctgtggctgccatgcaggagcccctgcgtcatctcgttggactctttaagggagtcaggaatagatgtatgaacagtcgtgtcactggatgcctatttagaaataaagtgtatgctgctgaattggaaaaaaagtctg

SEQ ID NO: 109061 - DNA, 675 bp, Homo sapiens
tttgacttaaagttacagtttccaagaacctatggatgacatcaaatgaggatgtactgtattaagtactattgtatatagtagattatggcattgtagcattatagtatattattgcagtcttaacagttgggagtataatgtgttttagttccctgccagcccacagaattattcagatgaaccaataaaattttgttttgaaattcaaggcacatctcactttcttttttttttttttctcctaaaagactctcgctctgtttcccaggctggagtgcagtggcatgattatagctcactgcaacctccacctcctgggctcaagcgattctctcacttcagcctctcgaatagctgggatgacgggtgtgcaccaccatgcctaattttttttttaaattttttgtagacatggggtttcaccatgttgtcagagctaatctcgaactcctgggctcaagcgatcctcccacctcaacctcccaaagtgttgggattacaggtgtgagccaccacaccaagcgtatctcaccttcttgatactacaaaaccttcctcagtcccctgtttgttctctttgctcccaagtgcaatccctgtgtgggcctgcatagcttacactactttcctcttcttgtctgagggaatgtgtaactaataaactgttgttga

SEQ ID NO: 109062 - DNA, 217 bp, Homo sapiens
tagacttttttccactacagattaattttaccggttccagaaattcatataaatagaatcataccatgtttctgttgttcccagttcttttcactcaggaaacacaactgtatatatcagtagttcattattttttattgatgagtggtatttgttgtttaaatataccacaatttctttaatctccagggttatttcagtttgggattattttgaa

SEQ ID NO: 109063 - DNA, 390 bp, Homo sapiens
ttgaattaccggacacccacttcagtggcatttattcggtgaagtgtttggggtgtagggaaggggtggtggtgactggaagtgtagcttggggatcgcctttttaatatccctgtctagtcacaaaaataaggcatgttctaatcaactaagcacttgaccatgaacttctcgtaagcaaggtgagtggtagattttttttcctcaaggatgcaagcagctgatagaattgggaagaaagttattagttgcaaaaacatttaagctttgcagtaagattactagtgcaccaaaggaatcgtgactgttaagccctctagctgattaactggtgctgttattttattttaaaatgttgtaattttttcacaacaagaaaagtaatgtgta

SEQ ID NO: 109064 - DNA, 482 bp, Homo sapiens
ctccctgcatgtgaggagatgaagaactactcttcttcctcccattgttaacaaaatctattacgcctttcatctagaggcaggaatccacctccacttttacaaaatgaatccaaccactaaaaccacagggtagaagaggcatttttcagtccagatatagttgtgtttcttcagtaaatcaaaaggcacaatcttggtaatgctgtaatatcctattttaaaatctgtattcaaaataggggtgggggaatgtggggggagaaaaggaaactggtaaatgggtcacttcttggcaaacttagtaaaaaccaagactccctgagctgataacttatgtttttatgagatccaaagatagaaaagaacaacctattttcttaaattctaccaggctgggctctacctaacctggtaagaacacaacccactatagttaaagaaaggaggatgctttctgaagcatctcctgtgtgccagtc

SEQ ID NO: 109065 - DNA, 746 bp, Homo sapiens
gcatctttgaacaaataatcttaaaattcagactttcagggcatagaaagatgttttacaatctggtggaatgattacagctgcagtgttggctgctttggcaattacagcagtggaagactgcatatttacattttcactattcagggaaaatttttatcttgctatcattagtatacaagtgttaatttatgcaatgggaatagttaaggagcattttctatattcttagcataaaacacttttcagggtggttcattaaaaaatgtataagatgagattcccagctttttggctgagattaagtacaaaaatgtataacttgcttttggcacttggatgcttataggaattcactttataaataattagtgtcaaaaacctagttttatttcagagcataaattcaatttttgattcttttctgaatttttatttttttactatttgcttttttattacagctttcataatagttgttttgagtactttcaaaacaagaattcagattttaaaatttaatttttgtttttgtccatgtaatatacatacatggtttcaaaagacaaatagtacttcaaggcttaaaataaaacccatctttgtccatggttttatttcttattggctgccattttcaacccatttggctgtttctcttgatatatatacatacaatttttttttaagatgggatctcactatgttgcctaggctggtctcaaattcctgggcttaagtgatcc

SEQ ID NO: 109066 - DNA, 412 bp, Homo sapiens
tacatggccttcctagggggtactgggctggacaccacatctcctgctccagtgtcctctttgtaccttccagaggattgtctgtgacctagatttctggggatcgcatccctagaatgctcacgtggtcagcccatggctggcctttgtggataaacctgtgagctttgctatagatgtgcctgatcctagctagattttctcatccagtgttcttagaacccaagaaagaccctaagggttggagtagtgtatctactctcaaattagaatgcagggggtggtggtggtccagagccatccttgcctatagacaggaaggattatgacagtgatttctgcataaggtgcctcttcctttgactagtgctttttattatctctgcctgatagaaagtcccctctttttctt

SEQ ID NO: 109067 - DNA, 411 bp, Homo sapiens
gggattacagattgacttgatgcacaacatcacaaaggcgatttttgagagctgatagtgcatcagccgacccaggtaatttaaaatattcttcatccagagatagaggtggttcttcctcttacggactgcaaccttcaaattcagctgtggtgtctcggcaaaggcacgatgataccagagtccacgctgacatacagaatgacgaaaaggagagatcgatgtcttattgtgatgagtctcgactgtcatatcttcttcggaggatcacccgggaaaacgaccgagaccgaagattggctactgtaaagcagttgaaagaatttattcagcaaccagaaaataagctggtactagttaaacaattggatatcttggctgctgtacatgatgtgcttaatgaaaggtaag

SEQ ID NO: 109068 - DNA, 376 bp, Homo sapiens
cacagtggccaaggaggctaaggaagaagcacgtggacattccattcccattatggccaacccccatgggaggcagctctatcatttctgggagccgtttcctgaacccaaggctggaggaggtggccttggtttcctaatctgtcagaagagatgacaatgctatcttggcctacttctgtggacacagctggcagtgctcccacagctgggcccaaagcatcagaaattcagggacaagagagtgtgtctaaggtagaagccaggccagctcctccattcggggttgggaaactgaggcccagggagaggcatgagggtgtggggagggaaggctgaagccccatcccagccagcctctaccctcgaagctgca

SEQ ID NO: 109069 - DNA, 457 bp, Homo sapiens
ttttactacagagtattatgataggtaatgtatacaatcgaacacactaaaatgggacccattctagaggttttagtctgtggcagcgtttctcagcctcaccactattgatattttgggctgagagattctcctttgtgaggatgtgtcttgttaattgcaggatgtttagcagcatccctggcctctactcaccagatgctagtaggatctttccaattgagccaatcaaaatttttgttagaaaattgctgcaagtcccctatgtggcaaatcacaactagtggtaaatgcagatatatttagttagatacaaagatcaaatagatcattgagcaaagactgaagaaaaaatatgaaaaattattttgtttatacataggtaaaggaaagagtgcagttagtgtgagtggcaggatttgctcccttagagaaaattttgtcagaggaaaaagtg

SEQ ID NO: 109070 - DNA, 670 bp, Homo sapiens
ggcatgatctcggctcactgcaacctctgcctcctgtgttcacgcgattcttccacttcagcctcccgagtaactgggattacaggcgtgcaccaccacgcctggctaatttttgtattttttggtagagatggggtttcaccatatttattggtcaggctggtctcaaactcccgacctctggtgatccacctgccttggcctcccaacgtgctgggattacaggtttgagccaccatgcctggccgagtggcgtcttttcttttccatagctctattatgggcaatgtacctttggttgggcatagggctattttttcccctctcatgcttaaactgaatcaggtcatagtttatgataagagacagggaagaactggcttaaatcgagagtcaacaaacttgttttgaatgggccaaagagtaaataatttaggcttgatggactacacagtctctgtccccactgctcagctctgctgtggtgtccaaacagccaggggtgatgcagaaacaaatgggcatggccgtcctccaataaaacctcattcatggaccctcaaattttagttttatatactttccatgtgtcacatgtcaagaaattatatccttcttttaatttttaaaactatttaggccaggcgcagtggctcacacctgtaactcc

SEQ ID NO: 109071 - DNA, 781 bp, Homo sapiens
tacggccagatcaaagggtggaggagcttgcctgtgttccccttaagggtttcttagcaaactctttgagctgagtccttgacctttgcaagcagaaaggcaactgatttctctggcctaagtgaaggcttagaaaaggcagctggactagcacaggcccggcctgggaagccgcaggtcagcgttttcaaactgccttttctctggagagcaagcctccacccctcttccatgcctttgatctaccgttggagaaataagatgcgaagcttgtatttgttaaattagctgtttttattatttaagatttcatattgttcatgagtagttgctgtgtgcaaagtctcacttcctgcagtgaggtgctgtgcagcccagctactctgtgtgagctttccagtgacacgcgctcacccgctgggtttcactgtggaaatccacacgcacctccagaagaacaaaccagtgaacctttgctcccctgaatagaggcgatgatgtaaaggggactgatgaaatgtcgcttctcctgtcttctgtcgtcacaggtgtctgtggggtgcttgttaatagatgatcattgtagatgctctctgcacattcacttactcgtgtgcatttgtgatagcacttcccatgggtgtgtcacacaccgtggaagaatcactcatgtcactgaagggcctgaacttagacggtgtgtccctagattatctggaagagaaactacttctaatagcacagagtcatggcatctttgagaatgccttttctccaattt

SEQ ID NO: 109072 - DNA, 170 bp, Homo sapiens
tctcctattcaatccatcaactagtctaggtgactacttccaaatccatcccaaatgcatctctttctatctgaagccaccacctcaatctatgacttggatacctatcaagcctcccacttttgcccttcctgcctccagtcagttctccccactatggccagagggag

SEQ ID NO: 109073 - DNA, 473 bp, Homo sapiens
tcaccaaagctggaagtcttgttttggtgtagtctctctgcacttacaaaatcacaaaacccagtggattttactttataattttccctcttttcttcctccttcttaggtcctcatatcatctcttattggattattacactagcaagtctgaccatggcacaatattatcttcaaaatatagacaataaatgatctacctttattaaaattatttttattgttggccaggcgcagtggttaacacctgtaatccctgcactttgggaagccaaggcaggtgggtcacctgaaggagatcaagaccagcctggccaacatggtgaaaccccgtgtctattgaaaataaaaaatcagctgggtatggtggcacgcgcctgtaatcccaggtactcgagaggctgaggcacgagaatcacttgaacccaggaggcggaggttgcagtgagccgagatcacgcctgggcaacaaa

SEQ ID NO: 109074 - DNA, 772 bp, Homo sapiens
tcagttttcttatctctaaaataaggacaaaattggaaggaaaaaccctcacaaggttgtcaaaaaaatataaatgatgtaatgcatataaaataatcagcccaggagtacaggcctgttaaatggcggttgttaagattactcttgttaataaaaaattccaagtcaaaaatcctgccttgggatctgactactgtttctctctgtagaatttcctatggaaatattaacatatattcataactcagtcaacacatgtttactgaactccagctacataccagactttgtgttaggtactcaggacacaaaagtgagttaggaaatagccctgcctttgtggagacgtgctagaagtatgaaaataggcaaaggtggcaccgttcgccagttttactggaaagtgggaggcctcagtgcgggggtcactcttggtttggatgatgttagatgaagagattctcatagttctcaggattaggaggttacccagaacagagaatggcatgaactaaaatacagtgggtttaggaaatacaagtggacagagggcgagagcctaatctgaacctccaccctgccaccaaacagcagaacatcgctggtgctcaaaccagtgcccccagacgggggtccctgagttcaggtttagcctggcagtgggccaaggatccctgaggaagcagatcccttttacggtgctttggcttgggatgaccctacatattattgtctgggagacctcacttgtgtggattgctcacagccttct

SEQ ID NO: 109075 - DNA, 271 bp, Homo sapiens
gctccctagacaatatacaaccatccaggagtcatccacaattccaaacaaaggattatttgctcaggagcaaaccaaggggccataattccacatctacaaggggcttatggggagtaatttaggtgtaatggggaatagaaattagccgggtgtgatggcatgtgcctgtagttccagctattggggaggctgaggcaggataatcgcttgaacccaggaggtggaggttgcagtgagccgagattgcaccactgcactccagcttggg

SEQ ID NO: 109076 - DNA, 504 bp, Homo sapiens
catgccccacccaagaccaatgaatctaaatctttgaatcagccattagtattttttttaaaacctccccatgtaattctaatgtatagccagtattgaaaacaactgatgtgaagctgtgttaaagttctgaattgaataaatttgtgtagttctgtttatttgttatacttgttaactacacttttggaagaaatcggatagtaaagaaaatgagatttttatataaatgtgtaacaaagcagaagggcccaatgagaggtcttacttaagggggtttatacaagggaggtattatttctgactgtggggtgttaaggaaggcttctaaggagttggtaacatttgaactggatcttgaaggctagaataggcagatatgaaaagaaaataagtttcaagcataggtcaagtcctattgaagatgattgtgggggaaacagtcagtggacataatgtgaagacataaaagggaaataaggtgaataggtaagttggggccac

SEQ ID NO: 109077 - DNA, 473 bp, Homo sapiens
attctcaaatatgaatatgctagctggaattgccaaaaaatttttggaaatgatgcataatagaggagatttacatttccagatataaaatgtactcaaatgatgctaattaagaccacgtggttattattgcaggaacatgccagtaagtggaacagaatagtctagaaacagagcctaatgtgaaagagggtttagtacatgatggagggaaaggatgaattatttaatatattctaagttaactatttggaaaaaatgggattagagcctttcctcaccctatataccaaaataaattttgatttgatgcaaaaattttaataataaaaaatgaaaagtaggaaaaattgtggttaactctgacattagggaagtcaacagaaacaaaatatcactggaggaaaatgactcatttctccatacagaattaatatatatatagttttttgagacagaatctcactctgtca

SEQ ID NO: 109078 - DNA, 282 bp, Homo sapiens
tgctgggattacaggtgtgagtcactgtgccctgctggatgcgtcttttctgagactgttcagtttcttcagagaagaatctcccaattttctacctggggagtacaagcatggctgctcattttccagaagcagagttggaaaagggaggtggagttccacttctcagtgtgtagttttttttcccatttcccagatttcagtcctactatttctgagcccagaaccttctatattccttataagatgggaggacaggtggacctgggactccaactacat

SEQ ID NO: 109079 - DNA, 444 bp, Homo sapiens
tattcagagatgacctaagtaaatatactgtgtcaatgtattgataggcccagtagtgctaaaatgtcagttcttatgaaaatgatctacacagatgaatacaatttcaatcaaaatcacagctatattttttgtaaagattgacaaactgattctagaacgtaatggaaaagcaagggattacagaagccaaaattattctgaaaaagaacaaacatggaagactcatgacctgatttcaagacttaatgtgaagcttcagtaaccaagactgtggtactgacaaaggacagacacacagatcaatggaacaagatagtccagagattagatttctgcaaatatgatttgttaatttttttgacattcaaaggaaattgagtggagaaaggatagtctaacagatggtgctggaacaattgaacctccatattcaaagaaaaa

SEQ ID NO: 109080 - DNA, 229 bp, Homo sapiens
gaccctcttcctgccctgatctgtggcccaagaagttgacctctgcgacctgcattcccttggacccttatcttccggttgggttcaaccaatgacaggcacactggctgcttcctggccatgggctagcaggggtcatgtgcctctagtgaaggtcatcacctctgttgggcaggtctcccgtgctgctaaagctactgctctcccaggttctattaactgccccctg

SEQ ID NO: 109081 - DNA, 697 bp, Homo sapiens
gaggttgcggtgagctgagaccacaccattgcactccagcctgggctacaagagggaaacttcgtctccaaaaaaaaaaaaaaaaagaatgacttagattcattctctctgtctgttattttgtatctgcccacattgatgttaatctgtcactttccttcctacgtgcatgggcttgtgaaatctcctgaccatttatgctatttgtttgtctttttgcaaatcaaaagagcctaatgtcaccttaaagcatcatggtaattaaacttaagaaaggatgagtgattacagtttatttaattcctccctctttagagaacttctagagtacacaggcatagacatacaaatttagtttcaagtaagaatgagagtatacctgagtagtttacataaaattatggggaaaactggatatgtgttggagcagacaatgtttgtggggctaggtgtccagagtcaagtctgtctcggatgggccttcagcagaacggctttttcctgacataggtgcagcctcatcctatgcgtgctcatcacaagagcatgtttctcctttgttctgggggatgggaatttccttcctttgattcctttctcttcactcctacagccccagtgtttgcttgttcactccccgcgtcccacatcaatgccagtcaactccagcctgggctacaagagggcatcgagatct

SEQ ID NO: 109082 - DNA, 418 bp, Homo sapiens
ggtcaccatattgatgccaaactcagtgtggtacccaatgggcattttgcagcccacaactcctgggctcaagtgataaataagtgagaagaaaggaaacacatacctcagagagaaacacagcaaatatatcaaaattcacaaaattataaaatattagtaaaagagttgaaacctagcatatcagtcatatcaattgatgtaaatggactcacctcacctattaaaagaaaaagattcaatttgctcataaagcaagatccagctatgtactgtaagaaagacatacatctaaataaaatgattcagaaagggtaaaaataaaggaatggggaaagatattcaggcaaatgaaaataataagaaaccaatagtaaccatactaattacagaattcaagcccaaaagcataaaatcc

SEQ ID NO: 109083 - DNA, 565 bp, Homo sapiens
cctaggatagggaacttctgaatttaaatttatacacttggccttttagggagtggaatctttaagttttagatatttaaattgaccccctgtacctgaaaataaatacttggtcaagccatttttaatgtgagatgtctcttaagttttctctgaaatctcatgtcttgtccaagtgccgtatgccacccacccgttagtactttggaacaactcttttctgggctttggccacaacttcgtgacccatttccttgtctctagtcacaccacttccctgttctaaattcttcaatggctcttcatcacttatggaaaaagtgcattgtataaaaaatgtgtatgtgtaggtatatgcagactcggcataccagggaggctatgataagacatttgcctgcttgttcagtctcgtcatctagcaatcatctctgtgaatctgttacttaagtgccctaatacatatattgtaccctcgcttagcttaggctgtggcaatgtatatatatttttttctgtgaaaaaaacatattgtttcctttacctctctgcaactaaaatcctg

SEQ ID NO: 109084 - DNA, 358 bp, Homo sapiens
ccgccacctgccaaactcactaaatcaaaacaggcaaatattcttaaatgcaccattatttacttttacaagtcttcgagtaaatcccagtaaaactaaacccagctgttaactgtctcttaggacaaaaggttgtacccaacatgtttatccatattgatccactattgatttttgttgtgttgaatgacatcagtagtgtctcgttaaggcaaaattaagaccataaacaggtgttcagtggggtaggcctcattttccaattggatttttatctattcacaatagataaaagttcataattgcttcatctgtgttcatggctgtcattacagctttataaactccaatactgcag

SEQ ID NO: 109085 - DNA, 465 bp, Homo sapiens
acagacacctcctgctctcctacagcccacgctcagcagggacagagaatgagaatcactgaaagaggacatcagaaagggagtgctaggggaaggaagaggacaaagtaggggcctcacaagatgggagccaggagaggagggaggacgagagtagactcagagaaggaggatccaaacagagggcccagccagggcaggaggcggcgaggccacagggtcagggtggcaagggcctgcaggtcatggaagggataacgaaggcaacaggaacgcggcatggcagcaacactgcagacacgggggtgctcgtgaatatgtgtgggtgggtttgttttcttggggacagtggctgtgacacccacatcagcgtgggcacaattctgtgtctctgagtattcccacccactcccactgggaaggaagcatcagaggcgagagcaggacacaccaagatgccccgtc

SEQ ID NO: 109086 - DNA, 483 bp, Homo sapiens
ttttttctgtttctgctaagatccaggcctggacaataagacattaagtttagcattatccagggctggagagagaaggacatgatagaatctatcccttcagatctccttgaagtgagagcgagagaaagagagagaaaggaaatcaagcagagaaccatatgtaccctgccattcctccatgtggtgaagtcagggatgtgagaaggcacagcagacattgaaacagaaagctcaaaacaaaggaactgtctcccatttccatgtggaaccccagggtgctgctcagtcagctatgagtgacacaaggagccaaaggagcttgtgggtgtagataccagaggtcaaagagtgacactcaagacccccagtgagaagtgtgaacacaccccccaggaagcctgtgggaatgcatcacacttcaccagatacaagccatggatcagccacagaagaagagagacaagatctgatgcccattcc

SEQ ID NO: 109087 - DNA, 216 bp, Homo sapiens
caggcgtgagccactgcacctggactccgttgtgggatttaggaagtggggccaaggaatagtaacgcaggtgggcatacctcatgcttccctgtaggtggcacagagtgctatgcccaccaaaggcacatgacccagacccctgtccttgggatctgccctcactgcatccactgcacccaactaagcgctcttcatccaggctggacacaaggt

SEQ ID NO: 109088 - DNA, 376 bp, Homo sapiens
agtcatgatgtcgattgccgattcttcatacatcttccatccattatgtattttagtacccttcctgtatacagtggatctctgtatagagagcatgttcttgcagtttgcctccttcaaagttgagtgcaaactattggacttgactttatgattttcacccaatgtttcgtccaggcaccaagatacacttttactgttcctgatccattttagctgagcattttgatatatttttaaatcatgtctttcaaaatggtattattataaagaatatttttttttataggctcaaccatcaactcttatagttggatggaaatgattccaagagaggttcattatttcctcaggtcatgtggctgttggccacaga

SEQ ID NO: 109089 - DNA, 702 bp, Homo sapiens
ggatggagtaaagataatataaaggcaatgtgaaagggtcttttacttttctgtgggaaagtgggaactagtgttcctaaacatgttttgagacctctgaaactcaccttattcccctaaagaaagccataaaaatggtaatacctgttggtgtaaaactagtgaattcaaagtaacactttcctgatgtttctagcaagccccagagacaagttagcagtgttgaagccccatagtatgcctttctttctggcctgcagttttccagcagatctgatgatagtccaaaaatgccatactcttagggagatagggtgattcatttttttgtgctcctttggctttgatgcattatggtccaagtacagaagagatgggttgtgatatttgctgcttttaattatagggaataccttgccctgttgggagtgagttggaaaccacgtattaaagtaaaacctcacactggacttaaaacagtatctcagggaaaattgcttgttgcttcagctgattcttttaaccttccacagggtatcctgagaccacagcacttaatttggtggaatgagttgtgctaatgagaactcagacagattaagtgacgttgtcatttgcttctttccttcaaaaatgaaatcagctgcgattttgatatataatgactgcttattaggtgaataaaatattttaatggtgtgt

SEQ ID NO: 109090 - DNA, 474 bp, Homo sapiens
atttacatgaaaagttagctcaaacacagtctctattagcaaccagaagaccagttagtttaggaaatcatctattacaaagaaagagttaacatgttaaaatttaaggcaactttgttatgttagtctaagtgaagacttagctctgcctctatctgaagtatcaaacaaagtttcagagagccataaaataatatgcatcaattcatcatcatctgctgagtcaaacattggaaaataatgtcaagaagttaccctgtaattacttcgtggctccttgaaaacccatttgacataatcactctttgacagctgcaagagggaaaatgttctatttcttctcccaccagtattctcttctgagacccaggggcattgcttttcagcacttcctgatctgccaaatgtttatgaaggaagtatgtggggtgccttcgtaatcagtgctcccaaggctggtcaggggttgagagt

SEQ ID NO: 109091 - DNA, 506 bp, Homo sapiens
atgcaggctaatgagggtcgttgataggaaagtattgcttttcctagaaagctctggttctttgacagaagccttctggtggccacagttcctgagccctaagaagaaatcctgtagggtacctctaggacatgatggttagtgtagggtcatgagtctgctctctggtcatgtcaagaaagctgccccctactttgtgtttaagcagatcctggaggctgcaggatagcccattgagactaagtggagaccaggcatcaggtgaggaagccttagcttggagggtcagaggcctcagctagacttggtaaatatttggcacttcctctccctcacaggaccacagcaaatgttaaataatcacagcactctttagtttgaccaccactaatcgattgagttgggcaaatagcatggaaggtctttgcctattctttgggagctctgggtgtccccagagaattgagtctggcattaagttttgcctctcctttctcgttttcttt

SEQ ID NO: 109092 - DNA, 2864 bp, Homo sapiens
ccaagtttattcctcctaattatcacacacctccttatctcactgctgagccagaggtaacttaccaccgattaaggccacaggataagtttctggtgttggctactgatgggttgtgggggactatgcataggcaggatgtggttaggattgtgggtgagtacctaactggcatgcatcaccaacagccaatagctgttggtggctacaaggtgactctgggacagatgcatggccttttaacagaaaggagaaccaaaatgtcctcggtatttgaggatcagaacgcagcaacccatctcattcgccacgctgtgggcaacaacgagtttgggactgttgatcatgagcgcctctctaaaatgcttagtcttcctgaagagcttgctcgaatgtacagagatgacattacaatcattgtagttcagttcaattctcatgttgtaggggcgtatcaaaaccaagaatagtgagtggctctttcactggcaattctcaaatgatatacatttaaagggcagattttttaaaaagatactactataataaacatttccagttggtcattctaagcatttacccttttgatactctagctagtcaggtactccaaattgactttgcagcagggtggcagggtcaggagagtctggtcctgcctagctcagatttcatggcacctgcacttgaagcaagtcacttctttatcacaggtgtcttgaaacattagcttcttttaccaacctgagaaaattaggatgacctggcaaataagatcttgaataggccaaaagcaagtatcttgctgtgtgtagtctcttggttaaagtgaagaaacagtactgttcacacctttcttcactgagattccagtgtacatgagaacatatatttattgcatgattttctagatacacagtctatgcattattcatatacatttattttagcctaaagtggttttcaaatccagttcttcaagccataaatgaccaagatccaagcaatctgaatttgtttttgtgattatttgactggaatgcttcttaagtggaataactatactccgttatccacccgatttcctaatgtaattgaaagattttctattttgccacacacttggagacaataagggtttttagttttatctactcttctattgaagttaaagaaagaaaaaaagatttttttatttgtattaatgaaaagctttagtttaaaataaggagatccagaataaaaagaagagactgatctcttcaattattgtcatctgtagccaccagcacatcactcttatgtaatccccaaaggcttggcatgccgtaagtgtgtggtgggtagactgctgccggggaatcgtacttcttatttagtaatgataagacttttcattatttttggaattttaaagatgacataaataagtttaaatatcaatttggggagtaaggtttaatattgccatcgggtattgagacaggaggaagtttctgtttttctccatttagacataggtcaattaaaatatttgggtttaaaatgactaaatgctttaaacatattgtagcttaagatatatgtgttaagatatatacatgagaaactttaaaaggtaactactgtgcatgcctgatgcttaatagaatacttagtggcatcaaatgtttgcagcagtctccataattatattcagtcccttctaatactgtatcaatgtaaatgaaataaatatattcaaattggctttttgatatgcatcaagtggcattttgttcctgtgtttaatagtgatctgtatacagctgtgcacatattgtcatcacttattctagcatcactgttaaggctgtgattatgtttgatattcacctggattttaatacaagccaatatcagcttcccattgtgtaataacttgggtgtttaggagtcttttcacattttttggggatatgaactagatgttcaagaactccttctggactgtggatactgaatcagtgtactattggctgcagaatttgtttcaattgaaaatagactcaggaagattgctgctcagaatatcatataatgtttattttttgaggtgtttttgtttttatttgtgtgttttttttttttaagtcagcttggaacttttttcctgggtagtatttgggagagggaaaggctgtactatatatttatttctaaatgttttgactgggcatttttcttttaatgaaatatgtggactgctctagcaaaccctattttcagctactatttgaatattcttgaacaccaccactgaagagtttcatatacaccaaataatgtctcatctctatagtacagggaatataaaattggtttcctgtggtcatgatcaagatagtagtattattacacaagaaacttggtctgcagtctggaagcttgtctgctctatagaaatgaaaatgcagcatgaagttgacattgtggaaatgaaagtaattgggtattagaaatctgaaagtactgtcatctaaaagcaattgtgattttattgtaattggttgtcactgttgtacggtgtctagaattaaagaatacatgtaaactttcatggtatttagcctttcttaaatttttttaaaatttaaactttctaacctatgtattcaacttctgtatttatatttaatcagtggttcatgttatataatacacccttaactagttaaatggaatgttggtatggtacagagtaccatattgctaagaaaactgtcttataaaagatgtatatgtgtgaagacatgaaagtttaatgtacagaatggttggagaaatgcctatggtgaattaaagcttcatatctgctttctgaa

SEQ ID NO: 109093 - DNA, 2972 bp, Homo sapiens
ccaagtttattcctcctaattatcacacacctccttatctcactgctgagccagaggtaacttaccaccgattaaggccacaggataagtttctggtgttggctactgatgggttgtgggggactatgcataggcaggatgtggttaggattgtgggtgagtacctaactggcatgcatcaccaacagccaatagctgttggtggctacaaggtgactctgggacagatgcatggccttttaacagaaaggagaaccaaaatgtcctcggtatttgaggatcagaacgcagcaacccatctcattcgccacgctgtgggcaacaacgagtttgggactgttgatcatgagcgcctctctaaaatgcttagtcttcctgaagagcttgctcgaatgtacagagatgacattacaatcattgtagttcagttcaattctcatgttgtaggggcgtatcaaaaccaagaatagtgagtggctctttcactggcaattctcaaatgatatacatttaaagggcagattttttaaaaagatactactataataaacatttccagttggtcattctaagcatttacccttttgatactctagctagtcaggtactccaaattgactttgcagcagggtggcagggtcaggagagtctggtcctgcctagctcagatttcatggcacctgcacttgaagcaagtcacttctttatcacaggtgtcttgaaacattagcttcttttaccaacctgagaaaattaggatgacctggcaaataagatcttgaataggccaaaagcaagtatcttgctgtgtgtagtctcttggttaaagtgaagaaacagtactgttcacacctttcttcactgagattccagtgtacatgagaacatatatttattgcatgattttctagatacacagtctatgcattattcatatacatttattttagcctaaagtggttttcaaatccagttcttcaagccataaatgaccaagatccaagcaatctgaatttgtttttgtgattatttgactggaatgcttcttaagtggaataactatactccgttatccacccgatttcctaatgtaattgaaagattttctattttgccacacacttggagacaataagggtttttagttttatctactcttctattgaagttaaagaaagaaaaaaagatttttttatttgtattaatgaaaagctttagtttaaaataaggagatccagaataaaaagaagagactgatctcttcaattattgtcatctgtagccaccagcacatcactcttatgtaatccccaaaggcttggcatgccgtaagtgtgtggtgggtagactgctgccggggaatcgtacttcttatttagtaatgataagacttttcattatttttggaattttaaagatgacataaataagtttaaatatcaatttggggagtaaggtttaatattgccatcgggtattgagacaggaggaagtttctgtttttctccatttagacataggtcaattaaaatatttgggtttaaaatgactaaatgctttaaacatattgtagcttaagatatatgtgttaagatatatacatgagaaactttaaaaggtaactactgtgcatgcctgatgcttaatagaatacttagtggcatcaaatgtttgcagcagtctccataattatattcagtcccttctaatactgtatcaatgtaaatgaaataaatatattcaaattggctttttgatatgcatcaagtggcattttgttcctgtgtttaatagtgatctgtatacagctgtgcacatattgtcatcacttattctagcatcactgttaaggctgtgattatgtttgatattcacctggattttaatacaagccaatatcagcttcccattgtgtaataacttgggtgtttaggagtcttttcacattttttggggatatgaactagatgttcaagaactccttctggactgtggatactgaatcagtgtactattggctgcagaatttgtttcaattgaaaatagactcaggaagattgctgctcagaatatcatataatgtttattttttgaggtgtttttgtttttatttgtgtgttttttttttttaagtcagcttggaacttttttcctgggtagtatttgggagagggaaaggctgtactatatatttatttctaaatgttttgactgggcatttttcttttaatgaaatatgtggactgctctagcaaaccctattttcagctactatttgaatattcttgaacaccaccactgaagagtttcatatacaccaaataatgtctcatctctatagtacagggaatataaaattggtttcctgtggtcatgatcaagatagtagtattattacacaagaaacttggtctgcagtctggaagcttgtctgctctatagaaatgaaaatgcagcatgaagttgacattgtggaaatgaaagtaattgggtattagaaatctgaaagtactgtcatctaaaagcaattgtgattttattgtaattggttgtcactgttgtacggtgtctagaattaaagaatacatgtaaactttcatggtatttagcctttcttaaatttttttaaaatttaaactttctaacctatgtattcaacttctgtatttatatttaatcagtggttcatgttatataatacacccttaactagttaaatggaatgttggtatggtacagagtaccatattgctaagaaaactgtcttataaaagatgtatatgtgtgaagacatgaaagtttaatgtacagaatggttggagaaatgcctatggtgaattaaagcttcatatctgctttctgaaacaccaccaccaccacacccaccaccccctcctccccgcctccccccccaaaaaccttcttcaccaccctcctacccccgcgcccccacacccaactaacacctgtct

SEQ ID NO: 109094 - DNA, 389 bp, Homo sapiens
ctagtgggcaggtgtgcaaagccccaggctgggcccagagaaattcagcagcaggtttcagggcagcaggaggtcggctgggagggtggatccttatgcatctctctgtctcatcccctctgaccgcctcagccagggggagagaatggagctcggtgagcagccccagtgggcctgctatgaattacaggaccccctgcaaattcacacacatgcttgccccctgctgtgctactgacagcaaaggcagaatctgagctgctgggacttgcccaaggctgccagctgcagatgctggagccagacagaagcccaggccgccttcacagtctgcatagttccagtgcaacaaggaacctaaagggttaaccagcattagcacagggccc

SEQ ID NO: 109095 - DNA, 273 bp, Homo sapiens
ttataaagaaagttctcaagtactctggcagtaaatataatgcatgttgttatccatctttagtcacctctgcctggagagtacagttgtccctcagtatacctggggtattggttccaggatgtctcctccacctggcagataccaaaatcctagaatgctcagtcaagtcccttatacaaaatgctgtagtatttacactgtatttttaattgttgtattttttttattgcctccccctcccctgcaatattttctttttgtttttttttt

SEQ ID NO: 109096 - DNA, 103 bp, Homo sapiens
aagagaagtaactttgaaaacatcatgactttgagctgaaactaagaaaagcaaaggggtttcccctctgcacctaatcccttttaaggggggctcccaggag

SEQ ID NO: 109097 - DNA, 474 bp, Homo sapiens
atagctggtcttagggagatgagaacacatgtagagtctgactttatgaagtcattgacattaacacgtatgataactctcaattgtgaaagttaattctgtcagaaatgctgtgtgacaggcctattagagcggctacttgggccatttattgtactgtggcctatttccgacaagtcagataaaccatggtttgaatctccactcagtcaaaactgcagctagtcacttaaccacactggtgttcaatttactgtctgtgtagtgaattgaacatacctacctcaatgcgtttttatgggaataaaacaagagtacaaacctatctgtccactagtggtattttttaccttaagtcacattccttcaccactaatagtggttaagttttctgactctcagtgatccattttcaaaaggccatctctgaaatttttgcctctactttctttaatggcatttccctatgtcact

SEQ ID NO: 109098 - DNA, 453 bp, Homo sapiens
tttacttaattgtagtcagcttgaaattacatttgtttaactgcaccaaggacccaagagagaactgtaaaatctttacctttctaataactttcatctcattcctctcatctgttctccaaacttgcttacatggccttgttctcatctggtctgaaaaaccttaaccaggccgggcgcagtggctcactcctgtggtcccaccactttgggaggccaaggtgggtggatcacctgaggttgggagttcgagaccagcctgaccggcatggagaaaccccgtctctactaaaaatacaaaattagccaggtgtggtggtgcttgcctgtaatcccaactacttgggaagttgaggcaggagaatcgcttgaactcaggaggcggaggtggcagtgagccgagattgcgccattgcgctccagcctgggtgacagagcgaaaaactctgtttc

SEQ ID NO: 109099 - DNA, 397 bp, Homo sapiens
gcggccgctactactactactaaatttgcggccgatcgactctcattcctctcatctgttctccaaacttgcttacatggccttgttctcatctggtctgaaaaaccttaaccaggccgggcgcagtggctcactcctgtggtcccaccactttgggaggccaaggtgggtggatcacctgaggttgggagttcgagaccagcctgaccggcatggagaaaccccgtctctactaaaaatacaaaattagccaggtgtggtggtgcttgcctgtaatcccaactacttgggaagttgaggcaggagaatcgcttgaactcaggaggcggaggtggcagtgagccgagattgcgccattgcgctccagcctgggtgacagagcgaaaaactctgtttc

SEQ ID NO: 109100 - DNA, 733 bp, Homo sapiens
tcctgactccatcacttccttgttgtgtgaccctgggcaagttactcagcctctgtgaacgtctatttcctcatcttttaaatgtagtatctgcctgaggccgtgtctctctcattgagccatgaggagaaatgagtcggcgcctgtaaagcctcgcgcacagtgcctagcacataaccattgctagagggagaggggagtattttggggcaactcactccagtaacagatgaccagtttggtttgatgacctcacttttcagtgaatcagcctcatttcactgaagtccttagtccttatctccttgtgaaggaataagaggggatgattatacctaacagcgaacatttattgagtgctgggcagtacatttcatgcttataaagatgcattccaagattgatgttatccttacctttgttttacgaggagaaaaccaacacaacaatgtcaggtcatttctccaaagtcacacagccattaagtagcaaagctgggattcaaactcagtctggctctgtgggtccaatgcttagccactctctgaactgagtggggcttgtgagtcataacctccagtgtaggagtttgtgcttttagtgttatttccttaactgcaattgattctcatagcaaaggtattgttttccccttttacagataagaaaccaaggcttggagaagtgaatcattaaactcactctcccttttacgtgtatgtaccccacccca

SEQ ID NO: 109101 - DNA, 238 bp, Homo sapiens
cacacacacatacaatataaggggaaaagtcaggagttagattgggacgtggtggctactctgtatgtcaactgatatttatagggtgcctgccatttgcccactgcactaggtgctgggagacagctatgaacaagccagattatggctgcatgcaccaataagggtgaattctcaaaatataagtagtggagaaaaagcaattaatagggaatatacaaatagtgtatattcaaac

SEQ ID NO: 109102 - DNA, 392 bp, Homo sapiens
aagatgatactttgggttttggacttttgagttaatactggaatgagtcaagacttcaaggactgttgggaaggcatgactgtattttgaaatgtgagaagaacatgagatttggaaggggccaagggtggaatgatatggtttggatctgtatccctgcccaaatctcatgtcaaattataatccctaatgcgggaaatggagcctggtgggaggtgactggatcatgggggcagtttctcatggtttaacaccatgcaaccttggtcctgtcatcaggatagtgagttctcatgagatctggttgtttaaaagtgtgtagcatctcccccacccaagtcctgctcctgcctgcatgtaagaagcctgatctcgttttgccttctgtcatg

SEQ ID NO: 109103 - DNA, 182 bp, Homo sapiens
gcaccagctcttgctggggcattaaaacagcagtcttctaaagaccctaaaggaaagcattgtaatttctggagctggtagcattgggtaagaaattgggcctgtggtcctaagctgctggctttaaagagatctattatgtcttcctggacagtataaagacaacccagtatcagataact

SEQ ID NO: 109104 - DNA, 432 bp, Homo sapiens
catacagtagcacgtaagttcagagtgcctcctagtggagtctagtgttgatcaagtaacattggaataattttttcattcctctaaaaaaatctcccctttggcatcatggttggttatgaatcttgggcctcataggagcacaacattctccactaaaataatgttttactcatactttttcctttcttcctttaaaaattaggtaagataccttctctgaatgtgtgaattttttatagaacaccgaagattctttgcgtttaaaattccctccgtgtaaattaagtccaaagtgcctaggcttttccatttctaatgtttaagttaaagacttgtaaattgggctgggtgcagtggctcatgcctgtaacccctgcactttggcagattcagaggatcccttgagcccaggagtttgggagcagtctg

SEQ ID NO: 109105 - DNA, 404 bp, Homo sapiens
ttcaccatgttggccaggctggtctcaaactcctgacctcaggtgatccacccacctcggtttcccaaagtgctgggattacaggtgtgagccaccacgcccagcctgcccttgtgaattttcacctgctccttacccctcacctgttaggactgtttcttgcttttgcccctgtcggtcccctgccttaacagacctaagcagctgataatgcaccaagcttccctgaccaggtggggtgtgtctatcacccaagggcagtcctacagaccctgaccaaaggccgttcctgggcggcccaaggtccaggtttcttccacctgctcttccctgtttatggggatttgcaagcctaattgcatcagcaggagcccatctctcagagaacccggactccccaagca

SEQ ID NO: 109106 - DNA, 274 bp, Homo sapiens
ctgatggaactttctttagcatatgtttaagacttgtcatcttcccatctcatctttgcagtagaaaaataccaacgtttccctgaacaaaatagaagtattttccacttccccatttctgaagctcctagacgttttatatttcttttgagtaagagattgctttgtatccaggagcctttgcatggtgccttttcttttactggtttgtttatttgggagatggagtcttgctctgtcacccaggctggagtgcattggcatgatctcggct

SEQ ID NO: 109107 - DNA, 216 bp, Homo sapiens
ctctcactcgtggtggcttattttcttccatatctgattttcttcagttgtgagttcacgtttgtttgatctttacctttcctgctctagcagtggttttcaaagtgtggttcctggacaagcacaataaacagcacctgggaattttttagaaatggaagttctagggccgggcactgtggctcatgcctgtaatcccagcactttgggaggccg

SEQ ID NO: 109108 - DNA, 229 bp, Homo sapiens
aatatgtgtgcacacagtgcacacacacggattaaaggcaaatataccaaaataattaatagtgatcatcattgtaacgttactagtaggtaaaattataggtaacttattttattcttcatatatttctggattttctacattttccataattagtatatttcttttttgttttcacaaatattaatttcttaatcagaaaaaaatacacctgaaaaacagtccttaa

SEQ ID NO: 109109 - DNA, 589 bp, Homo sapiens
gcccgtgttctgcagctcacacggcacagtcaggccctccagcttcctgccgtcaacgtaccagcacaagcatcctgtcctgcttgcctttggttaattaaaagcaaatacctctttgcagtgcagatagctgctctgtcagtcacactgggacacggtggcctcaccgcacacaatttttaattgattgactcccactcctgagacctctgggtctttcattaatcagttatatacacaagaaaggtgaagtttaatgaggtgtgtgtcaggcactctgacatgaagtggcccaggtgggtgaatgtggtgctccacattttaataatttttgacacccagcattttgcagtccacacaatgccagtttgtgataattctaataaacgcaaagatcgcttatctggtatcaagacaaaatctctcagcagcaggaacaaagactttcctagagtgagaacagaaagatcacatccttgctctgtcctagattcacaccaggagctactaagctgtttggtgagtcagaaaatggatacttaattcagccattcagccctatttcagtgagcggccgtataatgcagtt

SEQ ID NO: 109110 - DNA, 422 bp, Homo sapiens
attttcggcttcctcctaccacgtagggtttaggttgaaaagttttctcttgtcgtgaactcactggccacttgtctgtcggctttccagcttccaaaatttgttgaatgcactagcctcgtctttctctttgtccctgtaactttaaaattaatttgtttttcaaaatttttcatcttagtggaattgcaggaggtatttgagatacacatacacttaactagaagttacatgcaggaaaattattcctgttttctctgaatacacaacttctccatacccagtgtgtgtgtctctgtgtgtgtgtgtgtgtgtgtgtgtgtgtgtgtgtgttttaatgtgattttctctttagcacacacacttttctcataatctctgctcatgtatctgtggttcttggctgtggtcctgtttgctct

SEQ ID NO: 109111 - DNA, 386 bp, Homo sapiens
gagcacttgggtcttggtacagtggctcacgcttgtaattccagcactttgggaggccgaggtggagggttccttgaatccaggagttcaagacaagcctgggcaacacagtgagaccccgtctctacaaaaaatacaaaatttagcctggcgtggtgacatgcacctgtaatcccagctactcaggaggctgaggtaggaggattgcttgagccatggaggtggaggctgcagtgagctgggattgcaccactgtactccagcctgggtgacagagcaagatcctgtcttaaaaaaaaaaaaggtgtatatctatatatgcacttggggaaaagaagaatcctagataaaactctgaaaactctcgctaacaccctctgccaccc

SEQ ID NO: 109112 - DNA, 395 bp, Homo sapiens
aaagaattgctaaagagagaatagagagtcagacaggaaaaaagctcaggctagaaagtttttaaaaactatagcatttaaaggttggagaaaaggaaggggtcatttttcgttttggtaattttcagataaaactgaagattggtatgaatatttagaagtcacttacatactgatgataattgagactatgagaataaacatgttcccagtgggaaagtaagtataaaaggtaaataacaagtactctgtattgaggacctccgcagttaaatttaatggagttgcaagtaattgaaagttaatcaaaggatattatagaaatagtgtaggcaggattttaaagaattatgaaatcaaatatagctgagagtttgaaattttttccttttttt

SEQ ID NO: 109113 - DNA, 422 bp, Homo sapiens
ttttttgagacagtatctcgcactgttgcccaagctggagtagagtgacaccatcttggctcactgcaacctctgcctcctgggttcaagtgatttcgcctcagccttcagagtagctgagactacagatgtgtaccactatgctcagctacttttttttagaaggggggtgaggcagggcgtggagatggagtctcattctgtcgcccaggctggagtgcaggaacacaatcttggttcactgcaacctccacctcccaggttcaagcgaattctcctgcctcagcctcccgagtagctgggattacaggcaacagccaccacacccagctaatttttagtagagacagggttttgccatgttggccaggctggtctcgagctcctgacctcaggtggtccacccacctcagcctcccaag

SEQ ID NO: 109114 - DNA, 251 bp, Homo sapiens
agactgggagggtgagttaggtagaaggatataagatttggtgtattctttgttgggcacaattgagattgctgctcatgtttaaatccaacaaatttcagcaaaaggtagtgagttagatgttgttaatcttggggtttctcagatgagtatgactgaataaaagtggtctcgggacactgcttgggtgatgggtgcactaaaatttcagaattcaccactatataattcaaccatgtaaaaaaaccact

SEQ ID NO: 109115 - DNA, 308 bp, Homo sapiens
ctgcatccggctgtcacttcctttcttaaatcttccaacatgcttaccgtggctggtgaggctgtccatggtcaagcccctgcctgccctccgtccctgtgccctttaccttggtctagtggcactggcatccagctgttcctcaaacagggcaagccccttcacactcagagcatctgcacttgctctgcctgcggcttggagggtattcctcagacccttgtaagttcactcccacgttttatgcaagtctctactcaaatgtcatcccagactgcccttgtctaaaatagctaccttcacctaca

SEQ ID NO: 109116 - DNA, 209 bp, Homo sapiens
cacaaactaaacacaatctgaaatataaaaataaaactcttcaaaacatataaacagtagactgtagaaaatgaatttttttcaggtaaaaaatctttcatatacatgaatggcctatagaataagcccagttaaatctattttatattttattttacatatagcaacatttgcattttggaattcacagtttggggagttctgagaaa

SEQ ID NO: 109117 - DNA, 901 bp, Homo sapiens
aaaaatacaaaagttagccaggtgtcgtgatgggtgcctgtaatcccagctacttgggaggctgaggcaggagaatcacttgaacccgggaggcggaagttgcagtgagccgagatcgcaccattgcactccagcctgggcgacagagccagactgtctcaaaaataaaattaaaaaaaaaaataaaataaaataaatagaaaaaaaggaaaaagaaattattaaaactgtcttagttttgattcttggtttaatccagttcaaactggtctaagtcaaactaaaggaatttataataaggacacaagagttttgtttttgcttttgtctttttcacagactccaggagtagacatacaggccaggtctcacatgtaaagcatcagaacacctttagaaaggcaagcagcacctctctgtttcttgcctctgcatctctctgtgcttctgtttcattttctttcaggaccttctgctttgcacaaaggtggtatgcaatcagaagacgtctgaggagacaagtatgcatctcccaccacaacattatatgatgcttggagtaaaaacagtcctccctgttcctacccacgaatgtattattcaataaagattgctgccaggcatggtggctcatacctgtagtcccgcactttgggaggctgaggctgggcagatcgcttgagaccagggtttgagactagcctggacaacatggtgagccactatctctgcagaaataaaataaaataaaattagccaggtgtagtggcctgtgcctatagcctcagctacttgggaggctgaggcaggagaatagcttgagccctggaagtccaggcaacagtaagccatgatggtggcactgcactccaaactgggtgacagagtaagaccctgtctt

SEQ ID NO: 109118 - DNA, 293 bp, Homo sapiens
ctgcactccagcctgggccacagagcaagaccctgaaaaaaaagaaagaaatatccattaatattttcttgaatgttttaaatcagggatcattattatattttgtcaaatatatatacttgattaaaggttttatatttcctacatgtatggagataattatgtattttttctgtttggatctatgtgtatggtatattaatggattttttattgtctcaacttgcattcttgaaatatattctacttgattgtagtgatcctattatcctctacaagagtggcacatttgt

SEQ ID NO: 109119 - DNA, 629 bp, Homo sapiens
gctgcacatgttactgtgtgttggggtaagaaacatacatgggcacagttggtcagatatgagaccacagggatttgtgaggcatgcccttagtattcatgattatggtttttgctttgttttgtttgagatggggtctcattctgtcacccaggctggagtgcagcagtgccatctcagctcactgcaacctccacctctacgctcaagcaatcctcccacctcagcctcccaagtagctgagaccacaggcacgcaccaccacacctggctaattttttgtgattttggtagagacagggtttcgccatgttgcccagactggtcttgaactcctgagctcaggagatccactggcctcagcctcccaaggtgctagggttataggcatgagccaccgcacccggccatttatatatggcatgagccactgtgccatacctaaaatcagctgctgcagaactaaaatgagcagattgcaattgtggccaacaccattttttacccaaaaccattttcccatcttccttgctaacagaacttgatttgggctgaatcaatgtgtccagatcagtgatagatctacactggtctatgccaattatgacaatcttattccctaactgatc

SEQ ID NO: 109120 - DNA, 367 bp, Homo sapiens
ggagagctgaccatagttaagactatcaaaattaaaaacttttgtgcatcaaaggatattatcaagaaagtgagcagataacccacaaaatgggagcaaattatttgcaaatcatacatactgatatgggtctagtacagagaataaagaatgcttacaaactcaacaattaaaaaggacaacccaatgttaaaatgagcaaagggtttgaatagacatttctccaaagaaaatatgcaaatgcccaacaagaaaaatgctcagcatcattactcattaaggaaatgcaaatccaaatcatgacacatcacacccactagaatagaatagaaggcaattacagcactggtgagggtgtggagaaact

SEQ ID NO: 109121 - DNA, 854 bp, Homo sapiens
cgtggtggcacacgcctgtagtcccagctacttgggaggttgaggcaggagaatctcttgaatctgagaggcggaggttgtagtgaaccgagatcgcgccactgcgctccagcctggtgacagagagagactgcgtctcaaacaccaaacaaacaaacaaacaaaacccaaagtttaatttttaatttttctggttgttcatgtggctcccaacatttatttttgttgtacgtttagttccttgactactttggatgattttttattttcactttgtatttacaaattttaaaacacatgaaagttgagaaaatatacccctagcaatcatattcaacaacgaataattcccttataatcttttcttacaatttcatatatttctctattttagctttggaggagctagagaattttaaagcttgtctttgaaaagtgcatcatgtgtttcaccaataaatacttaattatgatctccaactgatacagacattttaaaataaccatcttgccactatcgtatatcatagtattaaaatttcctggagctggggaggcagaagcttcagttagcgagatagcaccactgcgcttcagcttcggtgacagagtgagactcataaaaaatatttttaattctttaatattatgtaatatacagtccacaaatacatttgcaagattgctttaaaaagcattttatggtgatttgtttaagtcaggatacaaacaatgttttactatgaccctattcatttatagactacttgttcttgaaaagagcagggagttagaaatagattgaacaccctcttcaaagtccttccctagacatggcaatccacttactgaaa

SEQ ID NO: 109122 - DNA, 286 bp, Homo sapiens
aaacgatggtctatcaaatggaaacttacagatcagagaagatgcaataggtctgagttgtgaaacagaaatttgctgattgctttaaaatgtatacaatgaaatggcgtattttaacataaagttattaaatgtaatgtatttaataaaatatgttatatgtattatttataataatttaataaaattattaaaatgtaaaacattttatttagtgtaaaataagtgttctattgttcatcttctaaactggctagatttgtacaaagtaagtataatgctaaca

SEQ ID NO: 109123 - DNA, 782 bp, Homo sapiens
ggcaatctgcctagtatacgtttgaacttcttgcccaaagatgtattcccactgtgtttggccatcaccttttccttgccttaaattatatctgtattaaaatgatgcggcctttaaaacagtgctagagaatacataaaaaggaattaatttttaaatcaaaatttatgaacttgccttataacatttttatgatagccctatttgaattatcttcttatctttgactaaaatagaattcgatttttctatggggtatttaacattttggatcataatcatgctagggatgaattaatagatcttctgtgagtgaactgtcaagacagatccccattgggtttgaaatgtaattaaaaatgtcagtgaactcacttgaagtccacagagtgctccagggtcccctcgaaaacgttagtcaaggactgaaaatacttaccaagtgcagtgaacataacgcagctgccagctctccacaaccaggagggcgctggtcacctttgtcaggtgcctctcatcttaacttccttctagttttggagtgttcgtctcagaagtcttgaaactaggggtgctttttagcccaaggctatgggtccggttggtggcttctcaacaaatggctggtgcaacagacctccaagagaggaacgagtctctaaacaatatccatgccctttgtaacccttctccgtcattagactctcagactggccacctttccaatgggcagactcccttttatttctgggaggcttttaaaggtggggctcattgggagg

SEQ ID NO: 109124 - DNA, 479 bp, Homo sapiens
atttgagctgagtccaatatgatgagttaagatggcacaatagtagaatagagtgacaggcattctagagagaatggcccatgcaaaatctcagaggatgggaaaggcttagcgcatttcaggaaccaaaaggtcagtgtggctagagtgtagtgaacagatggcatagtggagtgcactacaattaggtagacagggagccattctcttacaagttttgtcgtttttaccaccaaaatgtattgcaagtgtatctccagggcactaccctgtccaagctgccatcaactttgccctggaccacctttcttccattctagccctcctccagtccagtcgttgtacagagctaatttttaaaaaataacctattaattataccatctccctgcctaaaacccttcaaaggatcctattacacattaagtaaaatttaacgatctggtttctcaggacagtgcaaaggttatatccttgtt

SEQ ID NO: 109125 - DNA, 346 bp, Homo sapiens
gccagctccccgcaggggcagacaggaccttttgggaagggtggggtgagactctccagtgtccgactcctctgccacccatctcctggtcaccctctcccctgttctctttgaggggaacaagcagggcccggcccaggcaccttttgtggggatgagtcgttgctgtgacctgcccgagtgctggccactcagttgctcccaggagccactgtgcctcatttctggctgcctgtgttctcccaggggtcagcagataggtgcgattaggtgtttgaatgcttgccaagttgccctccatcaaagctgtccccattcacagtccatgtcccccagccctgaggga

SEQ ID NO: 109126 - DNA, 642 bp, Homo sapiens
atacaaatgagttcttatgcaatctaaatattgctaaatatttatttgtaaccttgtttttgtgggaaacagtattctatatggtcatactgtagacatcctggagataatctaatattgaaggttgatagggataggtctgaaaaggaaaaagctgagaagggaagggatcagagtccttgaaccatgtagtttgcctagcctctcctaggggtctgcacatccacaaagattaataaattttaggctctatctatcatgagtttatattctggtaagggagataaaacctataatcgtttcaatatatgtaatatattcggtaatacctgtttttttaaaaaattatactttaagtagaatacctgtttttctaagatatttgaagggccatagagagaatacttatgggtcagagggtcagagaaaacattaagagaagaaagtgacatctcagtatgactttgggggatgaacagtaattttttgatgaaccaatggaactagaaaaaggcgttttttacaggtttgaaggtgtgaaacaacatgatcattttcaggaatgacaaagtagtatggtatttaaaggagcagaaagtatgtgttatacaagaaaaggaacaaaagctaggaagtgatgaa

SEQ ID NO: 109127 - DNA, 568 bp, Homo sapiens
tgagacccccaagggcaggccctaatccaagctgattggcgtccttataagaaaaggaaattgtggcacacagagagacaccagggatgtggagagacagagatagacgttggcatcggtcccagcaccttcaagttcacctgtgcacacagtcacatggtaccgggccactggcaggcagagagagggacatcattgctgacagccccctgcttcccatccctagccctgctgctcccacttctaagctctgattcctcctctccttctagttctcatctgggctgaccttcccccttcctcccaactatctaaatcctaccacacaccaatcaagagctgagtcatccccaagtctcttggcctaggcccttggtcattataggtatatggattccatttaaatccatgggatcaaatgagacagaccagaggttcccaatcctgtcaattatcagtatcctctgggaaacttttataagaattcagattcctgagccctgcttcaggtttctcaactctgaatttccagagctcagtctactaaacgtgaattgcttccaagctt

SEQ ID NO: 109128 - DNA, 378 bp, Homo sapiens
tcggtactgacagatcggcttcatcctctggtcattttaattgacaactgtaatcttaagaaatatcaaacccaactgcatcacactacacagtcatttctcttctgcctgtgactgcaaagatccacttctggagatctgtttgctctgaggaggaggaaagaaaacgcaatgtggtccaaggactatgtggtgacctcacagtgccattaagcctcaggttttctcttttcaaatcttaaacaagcgattcctttcttttatttactttctttttttttgagacagggtctcactctgtcgctcaggctggagtgcagtggcgggatggcagagtctcactctgtcgcccaggctggagtgcagtggcgggtggca

SEQ ID NO: 109129 - DNA, 163 bp, Homo sapiens
gtaaagttaatgatttttttaggaatccaatgcagaaaattaattatttgccaaggttattttatcctgttctgaaaatggataaatttgacacagttccagtagtatggttttgtggttggcaggagaaacggagacaggtaaggaattagcatatacggtg

SEQ ID NO: 109130 - DNA, 658 bp, Homo sapiens
cagatgtcagaagtgaaactgaccacaggcaagtcagaggctcgccaggagggccaggtcacaaccccacagctcccagccacccacgtggcctgggagacacacacacacacatacacaccacagagagagagagagagaatctggctccagatggcctagcaggaggcattcggcaggcctggcctggagttaggcaggcaggcccctcccttgtagctctcgtgggcaggtcctaacccaggctcctgacagcctggcttcgagccccgcctggcccaggcctgggagctcccagggctgtagggctcctggccctgggcctgtgcctgtctctgaggctcagcctcagcccctgctggttgtttggccaagtcctccggggagactggcttgtggtcactgaggaagacaaagggaggcttgctcttccagtaaaaacagcaaacaagcctgcctgacctccagatccagggagaagggccagccaggcccagccagagtcagacaagggtggaggggaggttctctgtcttccattcccctcctacgcccccagactgtgaggggtgtaaggaagatggaagatgttgcgggagggattcagagtaggtaagagaaataatcctggtacttggaaaatcagtgtgatgggaaa

SEQ ID NO: 109131 - DNA, 261 bp, Homo sapiens
ttttccagggtgagtaagtcctcctttactgatgagagtggctctccttgagtgcagtatcatataatagttcaagagcttggttttgtttagaaatagtcaaaccagggttcaaatcctggctctgccacttccaagttctatgaccctgagcaaatgagtagacatctctaaacttcaattttcagatatgtaaaagggctaatggcatagatatcatagacgcattataaagattaaactaagcaccttaaacacaaa

SEQ ID NO: 109132 - DNA, 1107 bp, Homo sapiens
agtcaatccagagcctcagcaagcagcagctggaaacggggaagagggagcagacaggaagcgggaggtcagctgtacacccagggtaatagaacttctaccctcagaggagtcaaagaggaggcagaactatggcaggaaagctccggaagtcccacatccctggagtgagcatctggcagctggtggaggagatccctgaaggctgcagcacgccggactttgagcagaagcccgtcacctcggctctgccagaggggaaaaatgctgtctttcgggctgtggtctgtggggagcccaggcccgaggtgcgttggcagaactccaaaggtgacctcagtgattccagcaagtacaagatctcctccagccctggcagcaaggagcacgtgctgcagatcaacaagctgacaggcgaggacacggatctgtaccgctgcacagcagtaaatgcgtacggagaggccgcttgctcagtgagactcactgtcatcgaagttggctttcggaagaatcggaagaggcacagggaaccgcaggaagacctcaggaaggagctgatggacttccggaagttgctgaaaaagaggggcccaacagtccccaagaaaaacggatggaccttgaagcagatatgcgcagctggctgatgacagccagacaggaagggactaacgagaagatctgctggaaggtaatggcatcggcgactaacgtggcatggtgggcaggcctggagcgcatgagaagggaccgaggcacagatgggacacggaaactcgaagaccaactcccagctaagaaacccacccgggggccccaggcgcgacacgcaagcttggactcggaggccgagaccaacaagagagacccaaaacgaacgaggttacccggtatagagaagggcgaaaactagcccccaagagacgtaaacaagaacaacaaacagcagacagtggccaacagggagaaagccagtacaccacacaatgaacgcgtcgcgaagacagagaatcacacgacaggaagaaaagcgccaaccacaaacagcagaccaacccccagacaagaggaaggcgaccaccatagaaagcagaaagaaaacag

SEQ ID NO: 109133 - DNA, 1885 bp, Homo sapiens
cctgcctcagcctcctgagtagctgggattacaggtgtgtgccaccatgcttggctaatttttgtatttttagtagagacggggtttcaccatgttagccaggctggtctcaaactcctgaccttgtgatctgcccgcctcagcctcccaaagtgctaggattacgggtgtgagcaaccctgcccggccagtaaattgtatttttttaatgacatcattgatttgaagatctagatggcataaattacgacgtctgccatcgcatattagaaaggggacagtcatatttgtaacgtggagagaacacggagcaccagtcaccacgtgcacttaggatgcagagcttaccgcgcaccgctgatggggacctccggaaagagcggtgccttgtggttggcctggaagttctctcccaaggtgaaattcctttaaaacctcaggctctgacctatgtctttgaagcagctgctttgtagagtccctctctttactgtcctcgttaggactgttttgtggttccatgaaaatgtttagcatccttgcagaattacttgagaaggggctggtaccagtgtaaagaatctatttctgtaaaactacgaacttttgcatagggaatttattctaagcaggtcatagccgtgatccagagctgctgctgctcactgccagtccttgcggctggcggcgattgccggacagactctctgtggcctggctctcatccttggcgtgtcagcctgcggcaggctgccagccatccatgacaatcatgtgagctcagccacagacctcagctggcggtttgatccctggcaggtccctcgagcagtactggtaagaggcttcacacattttcccactcttacagttcatttttcatagtaggaagggcccttggcctccccagtgcctcttccagagcctccaccagcactaagctcagaggaaagaagaaaagggccaggagtcagacgtcacacccgggggctcccctttcccatgtagaagtgttggcatgcgtcagtctcctttacagaggggtggatgtatccgtggaggaggggccttctctctttctaattgcactatacttgttctagcttcagtctggagatacttaagacctccatggggtcgtgatccatagacttagcaagtcttgccttatctatggagctcgatggtgagaattgtgaccattgtctgatgtccatagttccttccccctagattgtttctttccacggattgtgttcatctgaaccattttattttttatttaccaaagtactgtacttggctatttgcagtgttttcaaaaccaaatgtttctttttttgtgtttttaatcttcgatacttggtgcaatagaagctgcaaagatgtgccactttatctatgaaatggagttttgtataccaataaattctagtttaaaaacaaaaaaaaaaaaaaaaaaaaaaaaaaaaaaaaaaaaaaaaaaaaaaaaaaaaaaaaaaaaaaaaaaaaaaaaaagaaaagaagagcagcagacagacagaaccagaaaggagacaactacaaaacagaaagaaaagagcaagtaaaacctcacagcacgaacgcacacccgcgactaaccgactagaggtagcagagcaacatcacgaacagagagacgaccggccacagcgacagcggagccacacaccaggcagggggcagcggcaactcagcgggaggacaaaaacatacaaggcgccgatacccaacaacggcgacgaaaataaagaacggaaagacaacgcgacaatatccgcaccaacaccgccaaggaaacaccgcaacccggacgtgggcacacggacaaacgatcagagcgagtataccacggatggggaaa

SEQ ID NO: 109134 - DNA, 1447 bp, Homo sapiens
cctgcctcagcctcctgagtagctgggattacaggtgtgtgccaccatgcttggctaatttttgtatttttagtagagacggggtttcaccatgttagccaggctggtctcaaactcctgaccttgtgatctgcccgcctcagcctcccaaagtgctaggattacgggtgtgagcaaccctgcccggccagtaaattgtatttttttaatgacatcattgatttgaagatctagatggcataaattacgacgtctgccatcgcatattagaaaggggacagtcatatttgtaacgtggagagaacacggagcaccagtcaccacgtgcacttaggatgcagagcttaccgcgcaccgctgatggggacctccggaaagagcggtgccttgtggttggcctggaagttctctcccaaggtgaaattcctttaaaacctcaggctctgacctatgtctttgaagcagctgctttgtagagtccctctctttactgtcctcgttaggactgttttgtggttccatgaaaatgtttagcatccttgcagaattacttgagaaggggctggtaccagtgtaaagaatctatttctgtaaaactacgaacttttgcatagggaatttattctaagcaggtcatagccgtgatccagagctgctgctgctcactgccagtccttgcggctggcggcgattgccggacagactctctgtggcctggctctcatccttggcgtgtcagcctgcggcaggctgccagccatccatgacaatcatgtgagctcagccacagacctcagctggcggtttgatccctggcaggtccctcgagcagtactggtaagaggcttcacacattttcccactcttacagttcatttttcatagtaggaagggcccttggcctccccagtgcctcttccagagcctccaccagcactaagctcagaggaaagaagaaaagggccaggagtcagacgtcacacccgggggctcccctttcccatgtagaagtgttggcatgcgtcagtctcctttacagaggggtggatgtatccgtggaggaggggccttctctctttctaattgcactatacttgttctagcttcagtctggagatacttaagacctccatggggtcgtgatccatagacttagcaagtcttgccttatctatggagctcgatggtgagaattgtgaccattgtctgatgtccatagttccttccccctagattgtttctttccacggattgtgttcatctgaaccattttattttttatttaccaaagtactgtacttggctatttgcagtgttttcaaaaccaaatgtttctttttttgtgtttttaatcttcgatacttggtgcaatagaagctgcaaagatgtgccactttatctatgaaatggagttttgtataccaataaattctagtttaaaaacaaa

SEQ ID NO: 109135 - DNA, 5079 bp, Homo sapiens
  misc_feature (3902)..(3902): n is a, c, g, or t
  misc_feature (4090)..(4090): n is a, c, g, or t
tgtttttatgttaaaccaaacatgtctcttcggaacacagtctgtatacaaataacatgcatgaggactttccatttaatctgtgattcagccacatgatgtttttgccaaatgatgtgatactttccaaagcaccttgagtgtgaaatgtcaacagaaatatcagcaagcttttatgttgcagagtattatggtacctctgaattagcctgtatagttctcttcctgctttaagcattacctggttagctcagacggcttgaggcagtcccttaataatagggatgcttttcatctctaaggatgtaagaggcaaacaaatcatgtcattctttaagtgggctatgctttgatagatgtgctctttaaaggtgtgagattggaatttagagttgttaaattgaaatgtttgcattgcaccaaaggagctcagttttcaaactttaatggaaccttgggtaaagggaaaaaatttttaatgaaatctggggttttatattttgattagcctaaaagtaaaaatacagctttatccattaagtgacttttaaaaatcagttttgccataccaaagaaattagattcttagtgtcacatgctatacttttgtctgtgcttgaaacgagcaatgccaacattgggagcaatgacagaggtttgcatcagtttgtcttggctttgttaaggacttctgccagaaatgtgctcgtggttgacaacccaggatcattgttcaagttcttatgcagacacctttgaaaacaattcagatcgtgtcacaagaatttggaattgaaaatatcatttattttttaatgcaagaatacccagatgtggtttcacttcagcagtagctatagtggttcacttatatacatttctgtttcactgaatgtaaattttgaatactgaatgtaaaaaaaaaactccagttatattgaaacagtcactaagactgcacatgtgttttgcagactttcttcctgaccatttgccacatgggtctctgataagattctgttggtttaatagtcaaaataatctttgcagtttgtgagcactgagtagcaggttctggagactaccatatacaaccagttgtctaattgtgatttttttattgatgtttagaagaatgtaaccgtagagttctgtgttaagttgatttatgctcaggacataagatcacaggctaatgcaatgtgtatgtttcaggctttaatcttctcaatttccctttttaagccgttgatggtgtttaagattaacatgacagtcttgtatttttaccagatactgtattatttttcctattgctgctgtaacacattaccatgaaggtggtggcttaaaataacacaaatttttcttaagttctgcagatcagaagtctaacacaggtctccctgggacaaaatcaaggcgcttgcagggctgtttctttttgaggctttagggaaaaatctatttccttttctagttttttaaggctgggaacccctccttccatcttcaaagccagccatgtagcatctctctgaagctccttccgttatcatttctctttgtccaaccccagctgatacaggttatctaggtttaaggattccagtgatcacattgagcccacctaaataatccaggataatctccccaactgaagttcctcaacttaatcacatctacagagttccttttgctatgtttggtaacatattcactggttccagggatttgggcatggacttctgtaggtggccagtattttgcccacaacaggtacattctttctgtggaattctgatccctgtaaaatgtctgtagcattaaagagattggaaatctgaggtcatgtgccccttggggatctttaaagattaaaagcatgaaaactttgacttgtagcctaccaaaattatacactaaactttctctccaaaatacttgtgaaacaatttatctttaaagtttctgaatatgtgcttcataaaataacatctcatgtttatcagcaagtgtcctaaatatttgcgtctaactttatggaatttattcagaaaaagaattgaaaactcttcttatagttaccctttctccttttctcttcagtggttatgttgctggggaagagttgggggaagacctcaaaacacaggaactcagagtgatgaacaggaccatgctcaagtttattctttgttttcttttaatgacatattcacaacattcacaactttctgcctttaaatctggttcctctcttcagcttcaccaagccactgaatgcttttcagttttattaaccctcacattccccatccttctcagcaagagcctctccttatgccatcagcatgtatatacatttcctaggaaatttgatctttcttgtcattcttttttggttccaatcggccttttcctggttctcaaagctctagtttcttctaatttctggatcatcgcaagtctggccctctttgaactttaaaacataatgtctaattccaccccaattttcagcatttcttcaactaaatcgataaagctgtctccattatgagaaaggccagaataatactccgagtaagcataagaaagctggtcattttacaacttctcccgactctaggaagtaatatgatgccatttgttgagcatctacagtgtgccaagcacatggttcatctctgcaaactgctgctacattctgtaaagcaagtattatccgcattttagggattaggaacagcttcctgatctcttgccaaaagtcacagctagtgagtggtttaggcaagatacaaaccctagttagttaatccttactcagaagtgtataggactatgatacattgtctcagcttaaaaaaaaaaaaaaaaaaaaaaggtatttaatcacccagggtcatagtgccttccatagtgtgaccagatacaactgttttttccttgtatccacaaaagccaggttgtgtcagaacaacctttctacagagtaataaccaatcgaaaaagagaagactaccttatttaaatccacttattcacaggagggattaaggcggctgtaactcatcccttatcatctcctaatttctctcctccaaaaccttccatttatctcagctaaaattgtgtctgaaggctgtttgtacttagagttacattacaaataaggtaggcatggtttctagagtccttttctagtcaagcatttccttattcgacaatgtcttcagaattgcattttatcttttgtaattttctgtagctcccatattccaaacaggaattcattgacttgaaaaagtcaggtgtgtaaacagtaatcctttcttgttaggtctgaagagttcatgattttttatgaatataaactaatttattatttgcattaatgtaggagacagcaaagttaacggagagtcataaaacagaacaagtataagttaggctttggagcacctaagttctaatcttgacaattttgagaatcgtttggtacaaaaattcttaaactgtttctgtgccttctccatccatgaaatgaggataatttttttgtgcaaaatgaaacaatagtactttgaaaacttaagagaaaattcaagtgtaaataatcataatctgaaactcatttgtatgaggctgtgaaagattttacagactctttcttttcaagtcagcctttgcaattatattttgcctttgttgaaatgaaaaatgtttgcatctcccgtacgcatacacaaaaccaatagaagaaagtggttggtaaaagatatagctgaaatggaaacactcatatgttaggtggataaaatcataagagaaaatgggaattgactgtactttcaaagtactaaatttgaagtcatcttactccaatttaagtcatntatatatatatatatatattggcttttaaagagttaaagagagaatcagatctgtccagcaggatagatgggtgaggagaaaagtacatatttaggatttttctctaaaagatctttttcaagattatggagtattttaatatttctgcaaactattccaaatgaatgcattttatatagggcaacanatactggcacctgattctggtttattcgagttcatatgtagggtttgttgggaagaattatatgattggcttctttttttagaggaaatattttcccttttttcttatccatatactattctgaacagctttgcagatttccttaagttcatagcttgtaagtagttcatggtatatagacatagtcttgacttacaactgaaaaaaaatttatgttacagaagtttattttttctatggaactgtctttaaaaacaaaaatattacaaatcttgaccttgaaatattctgtttcctgttatcacattctggatatctattttgtttgcaaatgaaaattattactgatgattagcaacttgagcctgttaataggaaattgcaaagcctgaatacacacacattgccttagcctatcagtagagtagaggacatatgttaagaaaatgtgtctgcttgttgctgttgttggacaaaattttgtgtctgtgtgtatgatttttttttttctattttcttcaaagatgtgaattaaatgaaagtgtgggagccagttaaattattttgtattatgggtgttctggatcctttcactccgtataccattttcttgtaagggcagcatttgtagacttgctaatggactgtagagctgagctatattaattttatacttgactcaggggatcagttctgtgaatgccattgcacgaagaaagcaaatgtttgccttgattttgaatgtatctttttaatgtcttcttaaaacatatttgtttaataatgtagatttgtttttttttttctagtatcatagtaaatattgcttagtacttgcccccaccccactgggtagtttatatactaccctataggtcatgccaaaaatgaataaaagtttaaatgccaaaatgtttatgaaactgctgtctaaatactgattgattgcacaatttaaataaaagctttccttagttaaaaaagacaaa

SEQ ID NO: 109136 - DNA, 740 bp, Homo sapiens
cttttcagtctcaccagcccctgaccaacattaatctgtagatttgcctattaaggacatttagaataaatgaaataatacaatatatactttttcataaattatgtagtcactttttgactggcttctctcatatttttaaggttcagctacactgcagcatgtgtcagtatttcatttctttttattgccagatcatatcccattgtataaatatgccagattttaaagtgtaccattctgtaatgttaagtatattcacattgttttgaaacagatctctgggactttttcatcttacaaaactgaaactatatactccacattttatttacccattctcatagattgggttgttttccacatttgggcagttgtgtataatactgctgtgaacatttgtatgcacgtttttaggtggagatatattttcatttttcttgcgtgtattctgcctaggagtggaattgaagggctagtcatctggttattctttaacattgtgaggaactgccaagctgttttccaaagtggctgcaccattttgcattcccaccagcaatgtcgtttttgatttgcatttttctaataactaaggatgtagaacatcttttcatgtgaagacatttaattaaaatgttttccttaaaataatgttttactagattctcagggttataacttagaaaggaaacatccttttagaattcttcaaggatactaattgtaacccaaattat

SEQ ID NO: 109137 - DNA, 308 bp, Homo sapiens
agggatttcaatgtcctgtgtctgtagcctcaggccacaaacacagctggcctgcccttgcctgcaggctggcagtttctcagtctgtccagcccctcagtcctcttcctgggggtagctacagtcccccatctgctgtcttctgtcactaccctgggggcaggggctggagtgccatccaggagcacctcgtcagcagcatgggcaagaggcaacacagagaacaagaccacacaaaactggctgggacctcaaagctgctttctccctttcccaggaagccacaggagtccttctttgaatttctc

SEQ ID NO: 109138 - DNA, 485 bp, Homo sapiens
aatcctttgtgtcaaatcattttcttgcaggttggggagttaatggtaactttgtctgaagcccagccaagccagaaagcctccacggatgaggcgtggtatgctcaacctcctcgaaaaaccacaagatgagaatgtggaaatggggaactttctagagcagatgagtatgggacaagtctgcatgtgccacatctaatgggaagcttaaaccttcctgtgtatttaggcatacagtagttcattttaagagggttttcctctttctgaatcatcatggtgtttttattgatacctgtagtttggataatcttttgtgcagccaatatttatatattctgcaccattttgaaagccttctactacctggttacctgtatgtatcgtgtgatttcaagaagttttaccatgtttttgtcctcggatttactttgtttacctaaaaaatgaactattgttttagaacagtgataactcttactttg

SEQ ID NO: 109139 - DNA, 374 bp, Homo sapiens
taacaaacagaacacaacaaaacaaaaaacagctgggcatggtggtaagtgtctgtagtcctagctattgggaggttcacgtgtgaggacagcttgagcttggcagttaggggctatggtgagctatgattgcaccactgcactccagcctggaagacagagtgagaccttgtctcaacaaaacaaaacgacagcaacatgtggagtaattacaaaacaccttcagaattctggcactctggtctagatgctcaaaattctcaccaggtggcaacggttttcacaggcacaactgggaagttaatggacagcagagtgggcaactgtgaagtcttctatcattaactcaaacttataacagccataaacaccaa

SEQ ID NO: 109140 - DNA, 331 bp, Homo sapiens
attaacaataactaatgataaaatacaacagttatgtgattgtggtctctctctttcaaaatatcttattgtatgtaatgttttcagattgtggttgaccgtgggtaactgaaaccttggaaagcaaaatcaaggataatggggggtactcctgtagatccaaagcatttcagttcagcattaatagggacaggaattgccaggccactagagtttcactttctcttctacattcccctttcctttcctgcttttgggcataggggagcatttgtttgttttgtatacatatctcttatctctgcctacctgaaatttatattctagtcaa

SEQ ID NO: 109141 - DNA, 397 bp, Homo sapiens
ccccaaatatgtacaactattacatatcagtgaaaataaatatttttaaagatttaaaaattgtctcctgaagttatgtggaaagcagaacttataaaagatgaaccatttatttatttattatttattttaagtacagtgtgtggaagtaagggatgagctttgttgtgcagcaaaaggagattttcatccaatgttgccaatgctgcttggtttctccttgatgcttagagtaaaatgtgagtgaagcgagagagagagagagagagagagagagagagagaggaaaaccatggcacaaaaatgaactaggactgaattgtttagaaaaaactccacctctccaggtggcaaaaggtgctaaaagtcaatggctgtggaaaatgtgacatagaga

SEQ ID NO: 109142 - DNA, 171 bp, Homo sapiens
agcccactgggcgcccccctcgggagcgcgggcacgtgtgcagcagtttactgcgcgcccccgagggccggggcttccccttccccgcccccttggctttcgcagtcaaatcccgctctccgcccgccgcccgcggaagtctcaccgcgcagcagcacccccagcccgggc

SEQ ID NO: 109143 - DNA, 276 bp, Homo sapiens
caattttaggaagtaaagagagttaccttctaaagtcaaaaggtatgtacacacacacacacacacgaggttgtactaaatatatagctactcaaagatatgtatatatacacaaatgcacacacacaagtatgtattggaacctatacatttagtaccacttattttttgtgtatggtatacattcatttccttgaaaatgaaaataagttctttgcatgtaagaatggacatccaaaatgtacccacaatgatataaataaaaaatacttttct

SEQ ID NO: 109144 - DNA, 1080 bp, Homo sapiens
ggtattttgatagaggttgcattaaatctgtagaccactttgtatagtatggccgttttagcagttcttccagttcatgaacagcagatagctttccatttacccacatcctctgcagtttctttcatcaatgttttatcattttcagtgtagaaatctttcacttccattattaagtttattcctgggtatttattttttcgtagctattggaaatggaattgttttcttgatttttttttcagatagttcactattagtatttagaaacactaccaatttgtatatgttaattttatatcctgcaactttactgaatttattctaacacttttttggtggagtctaggatttcctatatatgatatatcatctgcaaatgggacaacttcttcctttacaatttggataccttttatttctttctcttgcctaatagctctaagacttctagcactgtgttgaatggaagtggtgaaattgggcatacttgtcttgttcctgatcttaggggaatagctgaaagcataacatcagtatgtttgtcatatatggcctttgttgtttcaagctgcatactttctatacctaatttagtgagcatttcagaaacaaactttaataattctttagctttagtgttgtttgctttctacctggatcatggggttaacagaatttgaaaatagagtgatttcattttaaaaggagattttagattagtaagaaattgttactctctgattttatttctccatttgtttcttctcaaccctgagatgaagatccttctgatatcttctaagataaaatttgttcagcatttagagcattatttttttctatttagtcctctattgtactagtacctattgctgcctaacacattatcctaaaacttaatagcttaaaataacaaacatttattacctcagtttctgtgctcagaaatcccattgtaacttacctggatgcctctgacttggggtctctcccaaagctgcagtcaagcatcagccagggctgtagtcatgtcaaggttctaattggggagaatctgcctccatacctactaatagt

SEQ ID NO: 109145 - DNA, 336 bp, Homo sapiens
tggcgtgcgcctgtagtcccagctactcagctactcagctactcaggaggctgagacaggagaatcacttgaacctgggaagtagaggttgcagtgagccgagatcgcaccactgcactccagcctgggtgacaaagtgagactccgtctcaagaaaaacaaaaaccaaaaaccccatgtggaaggccttggggtggggtgtgtgcgtggggggatttgcttccatcatccggctcatccagcacataatgtttgttatatcactatctaatgtacaatatatcttatttatctgatttgtctgtctctctctctgtctagaatataaaccccatg

SEQ ID NO: 109146 - DNA, 892 bp, Homo sapiens
tttaaaatggcctccaaatgccctgctggagtgctttctgatgttcctaagctcaggaaggcttaggagaaaataagtatattagataagcttcattcatgcacaagttataatgctgttggcagagagttcagtgttactgaatcaacaatatgttgcattgttctgttgacaaaaacaaagcttgcagaaacctaaccctgtatgttttctaggagcagtgatttggtattcactacttcagtgtttgtggactttatggaacataagtaccacaaataatgcaaattgactatatttgcagcgtgtacaatcaaggatgcagaggcagaaatgtgtgtgcagcttaggtcatagtaaaaagaggaaagaatttgaggaaaattttgccagttacatattacctctggaataactttgcctttgccgtgtgtgttactgtgtacactcagatatttttctcataatggcctttgccgtgtgtgttactgagtgagtacactcagatatttttctcataatggcatgagggaaatcagtctccttttcccattgtgtttgtcacttttgctgagacgcaaaaaataacgtgctatgatattgtgaaatatgtatttggtctttatccccaatccctgacatccagcggaatctgcagagttaagtgtcttttatatgctcatgtgatgactggtggctgggggcccctagaaagtttcaggatagggcagatccttgtggccaggagttccagatcagcctgggcaacatagtgagaccttgtctgtacaaaaaagaaagtaggaaaaaacatctttggtttttcctatctccagatacttccttttcaaataaatgaatcttctttcatgtgcataatttaaaaaaaaaa

SEQ ID NO: 109147 - DNA, 427 bp, Homo sapiens
ctaaagcaactaccatagctgtgttcaaagatttaaagaaaaatatgctcctaaggaatgaacaaatgcaaaatttcagcagagaaagaaaaactacaaaaataaccaatgctaaaactgaaaaaaatatttaaaaattacactggatgcacttagcagattataaaacaacaaaagaaagggtcagtgaacttgaaaatatatcaacaagatttctaatttgaagaataggaaaatagtggaaaaaaaatgaacagagcttcagtgacctataaaatgtcaaagccaaataaaacaaagatgactctctaaattgaaaatgttgtatttaggaagcaagaatctaatttgggtgcggtggctcatgcctataatcccagcactttgggaagccgaggcaggtggattacttgagcccaggaattga

SEQ ID NO: 109148 - DNA, 329 bp, Homo sapiens
tagctgggactgcaggcacccgccacctcgcccggctaattttttgtgtttttagtagacaaggggtttcactgtgttagccaggatggtctcgatctcctgacctcgtgatccgcccgactccgcctcccaaagtgctgagattacaggtgtgagccactgcgcccagcctctgggaagaattctttagagcacatttatctagtatgcaggtaggaagaactgtgtttagttagtaattttcttggtagatacaattcagctatagatagcagatctattttcttaacttttttttttttttttaattttctcgagacagggtcttg

SEQ ID NO: 109149 - DNA, 539 bp, Homo sapiens
agtaaggcagtaagattgcttaatttatgggcattttgggggaaaaaaagtctaagagtaaaaatactgaatctaggttaactgcctccttgtttcaaagtgaagagtaatataatgagataaaacagcccggttccaccagcgaacaagatgaaataaaaaccctggatccaagagtggcagttaggagttaacataggcttcctggaggatgcagtttgagccaagtcttactgaaagctaagagggagttggcaagacaaaggaaggtgaaagggcattcttggtggatgtgctacgctgcagcaagaaatgagttgcaacagccagctattactatcattgctgaaaaattcatcctctcctgaatgagcaaaattaagtgagacatacttctcccagctaggaaatgggagagttgactgttttcaggagcatattaaaaaataaaatcccagagttatgtttatctccctaaagtcatgtgtccaaaacagagtttttttttgttgtttgtttagacagagtctcactctact

SEQ ID NO: 109150 - DNA, 187 bp, Homo sapiens
ggctacagagcgagactctgtctcaaaaaacaaacaaacaaacaaaaggtaattgtgcagtgaggaatatgttaatatactgactacagtaatcatttcactatgcatatgtatatcaaaacatcacactgtataccttaaatgtatgcaataaaaaataaaagatacatacacaaaattctttaaa

SEQ ID NO: 109151 - DNA, 373 bp, Homo sapiens
tagtagataagatagcaacggaagtgtgctgggcccataaaaaaaagtggatagatgtaagcaagcacgaattgtaaaaaaaaaaatacaaaatatgggaggaagatatcatagttaaggtactttagagtcctgcatctttctgggggacagagatagtgattttcaattttgttatgtcaaatatacaagttaaaagtgcaaggtaactactaaaggaatagtgatagaaggtgtaattccgacaagcagagtgatcaaaaagtatgcaaacactgaaaagaagaatacatatcaacttcaagttattggttatttcctataaggaataaaaatgcatgggatatagtaagattggtaggagagggggact

SEQ ID NO: 109152 - DNA, 618 bp, Homo sapiens
gccccaaattgctgtgcctaatcctacaggtcccactgtccagaaatcaagtgtctgatggccaagaatgatgaaacatcttgcggtgactttgtgtggtcccttcccttcctagaggccttccttcccaatggccacattatttcacatggcctcagaggcagtttatgaaatggggaccatgaaggcattaccccatttccccagaaggggaaactaagaccagaatatatgtgtgtgtgtgtgtttggtctgataataccattctcattgagatgataccttattgtggctttgatttgcatttctctgatgattagtgatattgagcatttttttttgctatacttattgggcatttgtatatcttcttttgagaaatgtttattcagatcctttgatcatttttaaaaccagattatttggtcatttttaaaacccgattattggggtttttcttttggttttgctgttgagtttttgaatcccttgaatatttgggataatacatagtcccttatgggatgaatagttggcaatactttcccctataccagagtgtctcttcctttgatttttcctttgctgtgcaacgcctttaggttgtatagccccttg

SEQ ID NO: 109153 - DNA, 434 bp, Homo sapiens
acatgaatatacaaaaaatatttgtaaaatgaccatcgaatgaacaagtgctcattaagtaccaagctatatgccaggggttgctgatggttagaaatgagcagggcacaaaattctttgttcaattagtgagcaattcaggcaaaaagaaaatattaatggtgattatacaatataatgcaatgcagccatctgccactagatttctgaagtgttttgttttgtttttaagagacagagtcttgctctgtcacccagactggagtacagtggtaaaatcatagctcacttcagtctcgaactcctgggctcaaggaatcctctcacctcaacctcctaagtagctgggactacaggtgcatgccactatactggctaatttaaaaacagaagccaacaaacaaaaaacacacctttttaagactgggtctcac

SEQ ID NO: 109154 - DNA, 773 bp, Homo sapiens
ctcttaggtatttgaaaagatagattgacgatggcaaaacaggtgacggcttcaggccacagggaatatgtggtcaaatgagtttggctctattactggtactgaatccatatttatctggagaaaacaataatagctaagtagctaatttgatcaaggtttagaataagtcttttattgttgttttagcaatctccaaatcaagagttgcatctttaaacatgcctaacacttttaaacatttgggggctgttctgtaaagaattcatgactttaagtatatgtaatatccataagatgtgaatgaaaagaactacccctgcccaatctttctgaagtgagaatcagacaaaaatatttatttgttctggtgttttagggtaaatttaatgactagattgactataaaacttgattcagtatagtgtgaataaattggtttaaatggcactaaaaacactcttatacataccaagatttgctagatataaatttggcagagttattaacatgtgaatagtgaatgccacttacaaggacttttaaacaaattatgaagggtagtacaaatttaattcggtcagttgggaaaaatactttggataaaatacaggtgaacagtttagtgctacacaagtttaaaggtagcccggaaattacttcaacttctacaaggcagatttactgatctttatgtccccttgtttgaagcttttcacataatagatatatattttctggatgtatttaacccatgtctggatagctgaaga

SEQ ID NO: 109155 - DNA, 406 bp, Homo sapiens
gatatttgtttaaagggggtgcaaatgctggggccacccagtggcttcttccctggataaaatctgcctgtggtgacatcagcagtctaattcttggtcacagacccttgaagctgtcctgtgggaggggatggaaatttctgtttttctcagccaatctaattctcctctacaaaatgaggctggtttctctgccttttaatttagagaataaattcaataacaatctaacattttctctccctgttaccaaaggagaaagacttctttttgcagcaagaatgaacagggcagaattccagagactcgttggaaggaaattgctatttattcgataaaaacagatggcaatgatagctatgttgttcgttccccctttcaggcaaacgtcttaatgttatagaaa

SEQ ID NO: 109156 - DNA, 685 bp, Homo sapiens
  misc_feature (38)..(38): n is a, c, g, or t
  misc_feature (69)..(69): n is a, c, g, or t
  misc_feature (179)..(179): n is a, c, g, or t
  misc_feature (234)..(234): n is a, c, g, or t
  misc_feature (276)..(276): n is a, c, g, or t
  misc_feature (380)..(380): n is a, c, g, or t
  misc_feature (440)..(440): n is a, c, g, or t
  misc_feature (442)..(442): n is a, c, g, or t
  misc_feature (446)..(446): n is a, c, g, or t
  misc_feature (448)..(448): n is a, c, g, or t
  misc_feature (450)..(450): n is a, c, g, or t
  misc_feature (567)..(567): n is a, c, g, or t
  misc_feature (671)..(671): n is a, c, g, or t
ccttcttcaattgtactgcacccaacttgtggaaagcnaaacaatattaaaaatactttttaagaaacnctagaatatattgtcatcaaagtgatcacggttctgcttatttttggtcatcgcaaccaatgtactgagccccctttgcccagaccctagcaggtcctgagtctcagcgnccacaaaacgaggctatggcccttggggagttccgtgcggtgccacaattggccnctgagttactctagagtgataaacgcagccttggcagtaaantaccagagaggtaatgagtgcggactccgtgctccctccgcagggcaggtgcgtgagctctagcgccacctcgtgggccgtgggattcgtgcccatctcctccngggcgggagttcctctggagccaggaactctttgggctcagggtgtcttttagaaaagcntntgangntngttcttctttagtggaccttctccggtaaaacggggttaacaactccaaacttttccccacctaaagggattgaaaggctgtttcaaaggaattagagctctgagactgcaacccanaaaacacacaatagcatatacacagagatgcacatagaaacatagacacacagggacacacaccagagatacacacacacacacacacggacaggcagacacanggccacaaacacat

SEQ ID NO: 109157 - DNA, 348 bp, Homo sapiens
  misc_feature (15)..(15): n is a, c, g, or t
cggccggataggcangatccccagatttttttgcacaaagttaggcaagcttggtggtatatacctgtagtcctagctatttgagaggctgagagcttgagaacaatgagctatggcttgagagagccagggtgacagagtgaggtcctgtctctaaaaaaatttttaaaattgtatttcgggttttaaaatagcggaaactagcagagttacttaatgaagtatgaggagttgattatagcacaattaaactaattattctaaatataaagcatatgacctttagataactttatgtcctatttttggtgtctactagcacaagcaaacaggatttgctttcttgga

SEQ ID NO: 109158 - DNA, 4599 bp, Homo sapiens
  misc_feature (1347)..(1347): n is a, c, g, or t
  misc_feature (2245)..(2245): n is a, c, g, or t
  misc_feature (3399)..(3399): n is a, c, g, or t
  misc_feature (3724)..(3724): n is a, c, g, or t
  misc_feature (3790)..(3790): n is a, c, g, or t
  misc_feature (4109)..(4109): n is a, c, g, or t
acaattcagtgtggacagtgcctggtggaaactattcagctttccaatcatctccaagtcccttgtgaatggttcgtccagagccaaaagcctgttgacaagctggagaaacacatgccgaagtacttaagacagaaactacgcgctgaattaaagccaaagacacggatcttcgaaatccagcccatttctggagtcttggatcctggtgagaagtccaacgtgcaagtgaaattcatgccaaaagaagagaaattctacagccaaaccctggtgtttcagattgcccagagtgctcaaaagcttaccctcctggcacgtgggcaaggtctagagccacgcctggaatttagtccttcagtcctggatctggggccactgctactttgtgcacctggagacgaggccgaggtgatagtgaagaatccctgcaacttccccattgagttttattccttagaatttgatcagcagtatctcatagaagaaaagatcttgcggaagctgaagggctatgattcctacaacaccctgctgctgcctccccgcaaccctggggagaagctgcccccagaactgtacgagtacttcaaagagataaagaagtcaaaagaggagcagatgagggcgaaatatctggagaatctggcacaggagaatgaagaggaagatataacctcatcagatcagggaacctccaatagcacaaagaggacatcgctgagccgagggatctctgtcacatccaacctggaagaatggcacgccctgttggtcgagtccaaaacctacctagaggaagaggaggatgaggaaagcctggaaaaaatcattttccaaactgacaagcttcagagcattgacagccactccatggaggaagttggagaggtggaaaacaacccagtgagcaaagcaatcgctcgccacctgggcattgacatttctgcagaaggccgcctggccaagaaccggaaaggcatcgccattatcattcacgggacacccttgtcaggaaagtcagccaatgccgttagcgtggccaagtactacaacgcagcctgcctgagcatcgactccattgtgctggaagctgtggccaacagcaacaacatcccagggatccgggcctgtgagctctgcatcagggctgccatagagcagtccatgaaggaaggagaggaggctgctgagtgactgctaccgaggagtggtgtttgatggcctcgacactctctttgctcggaatgctgcagccgccctcctctgcctgctgaaggccattggcagccgggagcatatatacattctcaacatggcccaggattacgcagccatgaaggcccnggagaaagccaaaaaggagcaagaagaacgcaagcacaagggagctcttgagaaagagaaggagggtctccaaaacatggatgaggaagaatatgatgccctgactgaggaggagaaactcacattcgatcgggggattcagcaggcgctccgcgagcggaagaagagggagcaggagaggctggcaaaggaaatgcaagaaaagaagctacagcaggagctggagcgacaaaaggaagaggatgagctgaaacggagggtcaaaaaaggaaagcagggacccattaaggaggagccccccatgaagaaatctcaagcagcaaacaagcagctactgtgtgctgaattcctgctatgtgacactccctgctgggaactgtgaatagatcccatcaccatctatctccagtctccacaacacccgctgagggagatatgatcatcaccatcattttggagatgaggaagctggaatgcagcacagttcctccgctcaccaaagtggatgtcaagatggagacaatcgaaaggaaaatatctgttagggaacaaacaatgtctgagaaggaagagctaaataagaagaaaaggaacatgggcgatgtcagcatgcatgggcttcctcttgtccaggaccaagaggacagtgaaggggacatctcaaaggaccccgacaagcaactggcccagaagtttaagacctatgaattgacactgaaggatgtccagaacatcctcatgtactgggaccggaagcaaggagtccagctgcctcctgcagggatggaggaagctccccatgagcccgacgaccagcgccaggtcccctcgggtgggcgcaggggccgcaaggaccgggagagagagcgcctggagaaggagcgcctggagagggagnaggcggagcgggagcgcctggagaagctgcgagccctggaggagcggagcgactgggagggggaaggggaggaggaccacgaagagaagaaggagaaggacctgggcgtacccttccttaacatccagacaccagactttgaaggcttgagctggaagcaggccctagagagcgacaggcttcccaaaggagagcaggctcaagaggagcagaccagctcatctaaggggggcaaacagaaaatgaaagaaaagatagaccaagtcttcgagagtcagaaagacaagcgtcacatggccttaaacaggaaggtcctttctggggaacctgctggaaccatttcccagctgtcagatacagacctggacaacttcaacgggcagcactcccaggagaaattcaccagactgaatcacttccggtggatcgtgccagccaatggcgaggtaacgttgcaggtgcacttctcttctgatgagttcgggaactttgaccaaacctttaactttgagatcctaggaacttgctgccagtaccagctctactgccgaggcatctgcacttacccatacatttgccaagacccaaaagtggtatttcctcagcggaagatggacatgaagacaaatgaggtcatctttaagaagtatgttatgagcacggagacgtactactttgggccactactttgtggaaaatcaagagataagtacaagtcatccttattcccaggcaacatggagacgctaacaatcctgaacacttccttaatggtggtggaggcatccttctattttcagaatgatgtcaaagcaaacacgtacttcctggaacccaacaccatggtcctgaaacccaatgagaagcagatattaaacgtatgggcctaccctacttcagttggtgtctttgaagacagcattgtctgctgcatcaatgacaacccagagccagccatcttccaattaagctgccaggggatccgcccggaactagagctggaacccaggcaattacattttgaccggctcttgctgcacagacaggaatccagggtagttcttctccgcaatgtcacgctcctgcctgtggcctggcggatcaccagcctggagcacttgggtgatgatttcactgtatccctgatgcagggnaccatcccccctgaggctgagtacggcctgcacctgtactttcagcccaccaagcctgtcaacatcaagaaggctattcggttggaggttttagatgcagaaaatcttcttggtgttgttcagattgaaaatatcatggtctttgcagaggcatacgacatcgccttggacatcaccttccccaaaggagctgaagggggactggattttgggattgtcagggtcacagaggaggcgaagcagcccctgcaattgaagaaccgtgggaaatatgagatcgcgttcaggtaactggaatcccatcagatgtaaggccatcaagtcngccgtgtggaggaatgtggggaaatatgagatcgtgttcaggtaacctgaatcccatagggtttgnggccgtcaagtccaccgtggggaatagcgtgtctgggaaacttatcagtcagtcaaggaaatcataagaaccgtctctgcttttttgcctcccttggcttcaaaagaatggaattccacctgctaaggaagcagagattctcacactgctctcaactctgcagcttaacagggccctttaagtggcccggatgtacctggccagttggaaccataggtgtctgggaatggaggaagagacttaggggaagaggccgggagggggagattctaggggtgagaagaggtcccagggtggagggagagactggagatgggcnacctggcctcaagctgtcctgccttctgccagctcttatctgctttacaaggagaccttcttcagcagatttcatgtgaagaaagggctttcctttttcattacattctaagaatcacgatattgtacaatccaaatagtagcttggtagaatagagctctggcttgtgctcatccccagagataaaaaatgaaacacagaggctgggtgtgatggctcatgcctgtaatcccagcactgtaggaggtgaaggcaggcagattgcttgagcccaggagttggagaccagcctgagcaaagtggcaagacccccctgcctctacaaaatacaaaaaaagttagctaggcgtggtggtcatatcacttgtagtcccatctacttgggagactggaatgggaggatcgcttgagcccagagaggtcaaggctgcagtgagccgtgatcgtgccactgcactccagcctcagcaacagagcgagaccctgtctc

SEQ ID NO: 109159 - DNA, 804 bp, Homo sapiens
ggtgcagcgggcccttggcgggggactctgagggaggagctggggacggcgaccctaggagaggttttagatgcagaaaatcttcttggtgttgttcagattgaaaatatcatggtctttgcagaggcatacgacatcgccttggacatcaccttccccaaaggagctgaagggggactggattttgggattgtcagggtcacagaggaggcgaagcagcccctgcaattgaagaaccgtgggaaatatgagatcgcgttcagcttttccgtggactctgtagggatttcaacacctaatataaattccatgatctcagtccaacccaaaaagggttcactgaccccaacagaaaaacccagaaatgtccaagttttcttccatgcaaaaaaggaagtgaagattgagcaccagcctgttctgcgctgtcagattattgagcccaatatttcagaaggaggtgagatcattgccagcatcccaattaagttttccgcgaatgcagtatattccaaatacaacatcaccccctcctctgtcatcaactttggagctttgatctgtggcactcgtaaaagcaccaccttcaccatagaaaatcaaggtgttactgacttcaagttcgccctttataagctgacaggggagagccccattcatcaaaagaaagcagccagccacgtcagacatgcaagatcccgagaaagtgagagcttctacaaaactggctcttccagagcagccaagttctctgacacgattcagaaagaagtaaccaccacaggccaggtgcgtgtccttttc

SEQ ID NO: 109160 - DNA, 721 bp, Homo sapiens
catggagaaaccctgtctctactaaaaatatgaaattagccagggtggtggcacatgcctgtaatcccagctactcgggaggctgaggcaggagaattgcttgaacccgggaggcggaggttgcggtgagccgagctggcgccattgtactccggcctgggcaacaagagcgaaagtccgtctcaaaaaaaaaaaaaaaaaaaaaaaaggtataataaaaatttacttctaaagatattcataaaagcattatttatgatagtaaaaaattgtgtgcaacctaaatgttcagcaaaataagacaagttaactaacgtatgatgcatctatacaatataatgttaggtagccaattaaaaatcaagttttaggctgggcatggtggctcacctgtaatcccagtactttgggaggctgaggtaagaggatcgcttgggcctgagaggtcaaggctgcagtgagctgtgatcatgccattggactccagcctcggtgacagagtgagaccctgtctcaaaaaagtaaaataataaaataaaataataaaaaaattatgtttaaaaaacatttaagaccatgagaaaatgctcaaaatagaataagtgaaaaaaaaagcatgattctacagttattatctctgggtaccaggactactactaatgtttatttttttctttttaacttgtatttattttctgaaatctctgtagtgaattgcatt

SEQ ID NO: 109161 - DNA, 787 bp, Homo sapiens
ttgaagattgcacatttgcctctttttttttttgaaagaagcataactttgacctcaggaaagaatctcagcctttttcctgaattttttattctaggttccattcagtaagagcattcattacctgcatttgagtatgtaatagataaaaccaaatttttaacattttcttaaatataggtgtcaagaaaataatcagaatccattgcatatgtcaatttttaattagatcattaatttatgttctataagaagtctcttgaatactctttggagtatgaagtattaattatgtgtcttagttaaaatttgtggttgctgtgataatactgtgtagataggtatgtcagtaatacagatcttctgaattgttcttgcttatacaaaatacaaatataacatcaatatctgtgtctgataatattgtctttattttttaatccttttattacctgattttttgccaaatttctacattaaatacgttattttgaatttaagagacagtgagtagaattcaagaaatcatttctgaaattaaatacatcatcacattttgtaactctgctgtatgtatcatgcaagccattgaacagatccagttttttgctgtctagaaatttcaagagcagtgcttgatatgaacaaataaatgctgttagggtctaaagacctgatcccttacgaaaccttgaatattaacaccaacattttttgtgtctatatcattaggttataatgtgtagtagaacagggcagttgggtaaggattagtgaaactttttta

SEQ ID NO: 109162 - DNA, 233 bp, Homo sapiens
tatggatagggcacttgggaagcagtgtttgctacccttctagaggagcagcaggcatctgtaatttttcagccttccatggacacctgttttagctgattcattctcataccttatctttctgtattttgagtttgagacagttggaaatattgctagttgttttcattatttgtttatttttccagataccttatttggtttccatttacactaacacttaagctttgacc

SEQ ID NO: 109163 - DNA, 460 bp, Homo sapiens
ttacggctggaggaacttccatcctcaatgtctccagcgctgcaacacacctggaggctttctgcttcactactgcctcttggccgtcacgcaaggtattgtagttaatggcctagtaaatattagcatttccactgttgagaagcgttatgaaatgaagagttccctgactggcctgatttcatcaagctacgatatttcattctgtttgttgtctttatttgtatcattctttggtgaaagaggacataagccgagatggcttgcatttgcagcctttatgattggactgggagcacttgtattctcattgccacaatttttcagtggagaatataaattggggtctctttttgaagacacttgtgtaacaacaaggaatagcaccagttgtacatcttcaacttcttcactttctaactacttgtatgtcttcatcttgggacaactattgctgggg

SEQ ID NO: 109164 - DNA, 202 bp, Homo sapiens
aacccctgggtgttcacaaaaggggaagtccaggaccacccacgcactgctcaactcctgccatgccagaggggaaaggtgaggtatcggggggttttcgggaggagtcccttcttctgtctgcttcttccacaccccacacccagtggggggaacaagcaggcctccattcatgaactcaacaagaaagtcagcctggcgt

SEQ ID NO: 109165 - DNA, 346 bp, Homo sapiens
aagatgtcaggcttgtaaggaaaaatacatttttgcttttttaaaaaaaaaacttgaaagcaatttgttgaaagataaaaagagctttacataagcttatgtggaagcggtcggaaagggttccgtgtatcatttagagacaaacttctggaacattcctcaggctgaaaggcctcagatctcatcattgtccttatggatgtgtcagagtttgagacaatctctttcagactgaaagcattctctttaagagttttgaaggaagagcctgtaatcccagcactttgggaggctgaggcaggcagatcacaaggtcaggagatcaagaccatcctggccaacatgg

SEQ ID NO: 109166 - DNA, 2054 bp, Homo sapiens
agagagttctggacagcagagactacagattgggtcatagttttgcccagagccttcccactgatccatatggtggggtcctcacgttcctcttcctccagcattcaccatagccacacaaagctgagtagccccttccttttatacctttaacattcattaactcagacttctgagggaccacctctgtggcagtggggcagtgatgtgttggtgaaggcacaagaccaggaaactggtttgactctgggatctatgaccttgggcaaatcatgcccctcccttcccgtcgggcttcagcctcatactctgtaaagtaaaggacctcatctattccagcccagtggacacagctcacaaggtactgattagcctgaggaccttcctgaggaggaatgaggatatccaagtgggcggtcttatccgaggccacttcctgctgatcctgcagcgtctgctagtggagcatggggcatccccatcaggagcctcggggaacctaccattgctgctgagcctcctctccctgatgcagctcaggaatgtgtcagagcaagaactggacagcgtggccatgaagctccttcaccaagtaagcaagctgtgtgggaagtgcagccccactgacgtggacatcctgcagccctccttcaacttcctgtattggagccttcatcagaccacacccagcagtcagaaaagaggtgcaggggcccgggctgggacagtgaagagtgctgggcagtctgtggtcctctgtatctcaactttttcatcttaaaaaaacaaatagggttgtgtgtgtggctggtggtcataaggtcctttctggctctaataacctgagcttctgttatgaagctgggacccttagagcctcaggatgatcctctgtttgtttgtgaagccccaatcaggtgctaagcaccatagtggcacttagctgaagctcctctgtaactcctgtgggccctgccttgcccacccccgacagctgctgcagtgctcctgagcagcacaggcctgatggagcttctggagaagatgctggccctcaccttggcaaaggcagattctcccaggactgcactcctctgctctgcctggctgctcactgcctccttctctgcccagcagcacaagggcagtttgcaggttcaccagacactctctgtggaaatggaccaagtattgaaggctctcagctttccaaagaaaaaggctgcactactctcagctgccatcttatgcttcctgcggacagccctgcgacaaagcttttcctctgccctggtagccctggtgccctcaggggcccagccactgccagccaccaaggacactgtcctagctccactgcgaatgtcgcaagtccggtccctggtcattgggctgcagaacctcctggtgcagaaggaccctctattgtcccaggcctgtgttggctgcctggaggccttgcttgactacctggatgcccggagcccagacattgctctccacgtggcctcccagccttggaatcggtttttgctgtttaccctcttggatgctggagagaattccttcctcagacctgagattttgaggctcatgaccctgtttatgcggtaccggagtagcagtgtcctctctcatgaagaggtgggtgatgttctgcaaggtgtggctttggctgacctgtctaccctctcgaacaccacactccaggccctgcatggcttcttccagcagctccagagcatgggacacctggctgaccacagcatggcccagaccctgcaggcctccttggagggccttccccctagcacctcctcaggccagccacccctgcaggacatgctctgcctgggaggggtggctgtatccctgtcccacatcagaaactgatcctcaggacttgaaggcccagaagtggagagagaatgagacctggagacaaagggcataattgttggggaaatggatgacagctgaagctattcatatggagccatatactctattgttgaaatagaataaggaaataaaatgatacactcacaaaaaaa

SEQ ID NO: 109167 - DNA, 1922 bp, Homo sapiens
agagagttctggacagcagagactacagattgggtcatagttttgcccagagccttcccactgatccatatggtggggtcctcacgttcctcttcctccagcattcaccatagccacacaaagctgagtagccccttccttttatacctttaacattcattaactcagacttctgagggaccacctctgtggcagtggggcagtgatgtgttggtgaaggcacaagaccaggaaactggtttgactctgggatctatgaccttgggcaaatcatgcccctcccttcccgtcgggcttcagcctcatactctgtaaagtaaaggacctcatctattccagcccagtggacacagctcacaaggtactgattagcctgaggaccttcctgaggaggaatgaggatatccaagtgggcggtcttatccgaggccacttcctgctgatcctgcagcgtctgctagtggagcatggggcatccccatcaggagcctcggggaacctaccattgctgctgagcctcctctccctgatgcagctcaggaatgtgtcagagcaagaactggacagcgtggccatgaagctccttcaccaagtaagcaagctgtgtgggaagtgcagccccactgacgtggacatcctgcagccctccttcaacttcctgtattggagccttcatcagaccacacccagcagtcagaaaagaggtgcaggggcccgggctgggacagtgaagagtgctgggcagtctgtggtcctctgtatctcaactttttcatcttaaaaaaacaaatagggttgtgtgtgtggctggtggtcataaggtcctttctggctctaataacctgagcttctgttatgaagctgggacccttagagcctcaggatgatcctctgtttgtttgtgaagccccaatcaggtgctaagcaccatagtggcacttagctgaagctcctctgtaactcctgtgggccctgccttgcccacccccgacagctgctgcagtgctcctgagcagcacaggcctgatggagcttctggagaagatgctggccctcaccttggcaaaggcagattctcccaggactgcactcctctgctctgcctggctgctcactgcctccttctctgcccagcagcacaagggcagtttgcaggttcaccagacactctctgtggaaatggaccaagtattgaaggctctcagctttccaaagaaaaaggctgcactactctcagctgccatcttatgcttcctgcggacagccctgcgacaaagcttttcctctgccctggtagccctggtgccctcaggggcccagccactgccagccaccaaggacactgtcctagctccactgcgaatgtcgcaagtccggtccctggtcattgggctgcagaacctcctggtgcagaaggaccctctattgtcccaggcctgtgttggctgcctggaggccttgcttgactacctggatgcccggagcccagacattgctctccacgtggcctcccagccttggaatcggtttttgctgtttaccctcttggatgctggagagaattccttcctcagacctgagattttgaggctcatgaccctgctccagagcatgggacacctggctgaccacagcatggcccagaccctgcaggcctccttggagggccttccccctagcacctcctcaggccagccacccctgcaggacatgctctgcctgggaggggtggctgtatccctgtcccacatcagaaactgatcctcaggacttgaaggcccagaagtggagagagaatgagacctggagacaaagggcataattgttggggaaatggatgacagctgaagctattcatatggagccatatactctattgttgaaatagaataaggaaataaaatgatacactcacaaaaaaa

SEQ ID NO: 109168 - DNA, 1839 bp, Homo sapiens
agagagttctggacagcagagactacagattgggtcatagttttgcccagagccttcccactgatccatatggtggggtcctcacgttcctcttcctccagcattcaccatagccacacaaagctgagtagccccttccttttatacctttaacattcattaactcagacttctgagggaccacctctgtggcagtggggcagtgatgtgttggtgaaggcacaagaccaggaaactggtttgactctgggatctatgaccttgggcaaatcatgcccctcccttcccgtcgggcttcagcctcatactctgtaaagtaaaggacctcatctattccagcccagtggacacagctcacaaggtactgattagcctgaggaccttcctgaggaggaatgaggatatccaagtgggcggtcttatccgaggccacttcctgctgatcctgcagcgtctgctagtggagcatggggcatccccatcaggagcctcggggaacctaccattgctgctgagcctcctctccctgatgcagctcaggaatgtgtcagagcaagaactggacagcgtggccatgaagctccttcaccaagtaagcaagctgtgtgggaagtgcagccccactgacgtggacatcctgcagccctccttcaacttcctgtattggagccttcatcagaccacacccagcagtcagaaaagaggtgcaggggcccgggctgggacagtgaagagtgctgggcagtctgtggtcctctgtatctcaactttttcatcttaaaaaaacaaatagggttgtgtgtgtggctggtggtcataaggtcctttctggctctaataacctgagcttctgttatgaagctgggacccttagagcctcaggatgatcctctgtttgtttgtgaagccccaatcaggtgctaagcaccatagtggcacttagctgaagctcctctgtaactcctgtgggccctgccttgcccacccccgacagctgctgcagtgctcctgagcagcacaggcctgatggagcttctggagaagatgctggccctcaccttggcaaaggcagattctcccaggactgcactcctctgctctgcctggctgctcactgcctccttctctgcccagcagcacaagggcagtttgcaggttcaccagacactctctgtggaaatggaccaagtattgaaggctctcagctttccaaagaaaaaggctgcactactctcagaaggaccctctattgtcccaggcctgtgttggctgcctggaggccttgcttgactacctggatgcccggagcccagacattgctctccacgtggcctcccagccttggaatcggtttttgctgtttaccctcttggatgctggagagaattccttcctcagacctgagattttgaggctcatgaccctgtttatgcggtaccggagtagcagtgtcctctctcatgaagaggtgggtgatgttctgcaaggtgtggctttggctgacctgtctaccctctcgaacaccacactccaggccctgcatggcttcttccagcagctccagagcatgggacacctggctgaccacagcatggcccagaccctgcaggcctccttggagggccttccccctagcacctcctcaggccagccacccctgcaggacatgctaaactgatcctcaggacttgaaggcccagaagtggagagagaatgagacctggagacaaagggcataattgttggggaaatggatgacagctgaagctattcatatggagccatatactctattgttgaaatagaataaggaaataaaatgatacactcacaaaaaaa

SEQ ID NO: 109169 - DNA, 1401 bp, Homo sapiens
agagagttctggacagcagagactacagattgggtcatagttttgcccagagccttcccactgatccatatggtggggtcctcacgttcctcttcctccagcattcaccatagccacacaaagctgagtagccccttccttttatacctttaacattcattaactcagacttctgagggaccacctctgtggcagtggggcagtgatgtgttggtgaaggcacaagaccaggaaactggtttgactctgggatctatgaccttgggcaaatcatgcccctcccttcccgtcgggcttcagcctcatactctgtaaagtaaaggacctcatctattccagcccagtggacacagctcacaaggtactgattagcctgaggaccttcctgaggaggaatgaggatatccaagtgggcggtcttatccgaggccacttcctgctgatcctgcagcgtctgctagtggagcatggggcatccccatcaggagcctcggggaacctaccattgctgctgagcctcctctccctgatgcagctcaggaatgtgtcagagcaagaactggacagcgtggccatgaagctccttcaccaagtaagcaagctgtgtgggaagtgcagccccactgacgtggacatcctgcagccctccttcaacttcctgtattggagccttcatcagaccacacccagcagtcagaaaagaggtgcaggggcccgggctgggacagtgaagagtgctgggcagtctgtggtcctctgtatctcaactttttcatcttaaaaaaacaaatagggttgtgtgtgtggctggtggtcataaggtcctttctggctctaataacctgagcttctgttatgaagctgggacccttagagcctcaggatgatcctctgtttgtttgtgaagccccaatcaggtgctaagcaccatagtggcacttagctgaagctcctctgtaactcctgtgggccctgccttgcccacccccgacagctgctgcagtgctcctgagcagcacaggcctgatggagcttctggagaagatgctggccctcaccttggcaaaggcagattctcccaggactgcactcctctgctctgcctggctgctcactgcctccttctctgcccagcagcacaagggcagtttgcagaaggaccctctattgtcccaggcctgtgttggctgcctggaggccttgcttgactacctggatgcccggagcccagacattggtagaaactctccacattatctgatgttcccatgagagagattagagggagcaacacccttccaccctcctgctccagccttccattcccttgtgtgactcatacttgttttgtttaattcttttagcagcactgcaagggcagtcatgcccattatacagatg

SEQ ID NO: 109170 - DNA, 1878 bp, Homo sapiens
agagagttctggacagcagagactacagattgggtcatagttttgcccagagccttcccactgatccatatggtggggtcctcacgttcctcttcctccagcattcaccatagccacacaaagctgagtagccccttccttttatacctttaacattcattaactcagacttctgagggaccacctctgtggcagtggggcagtgatgtgttggtgaaggcacaagaccaggaaactggtttgactctgggatctatgaccttgggcaaatcatgcccctcccttcccgtcgggcttcagcctcatactctgtaaagtaaaggacctcatctattccagcccagtggacacagctcacaaggtactgattagcctgaggaccttcctgaggaggaatgaggatatccaagtgggcggtcttatccgaggccacttcctgctgatcctgcagcgtctgctagtggagcatggggcatccccatcaggagcctcggggaacctaccattgctgctgagcctcctctccctgatgcagctcaggaatgtgtcagagcaagaactggacagcgtggccatgaagctccttcaccaagtaagcaagctgtgtgggaagtgcagccccactgacgtggacatcctgcagccctccttcaacttcctgtattggagccttcatcagaccacacccagcagtcagaaaagaggtgcaggggcccgggctgggacagtgaagagtgctgggcagtctgtggtcctctgtatctcaactttttcatcttaaaaaaacaaatagggttgtgtgtgtggctggtggtcataaggtcctttctggctctaataacctgagcttctgttatgaagctgggacccttagagcctcaggatgatcctctgtttgtttgtgaagccccaatcaggtgctaagcaccatagtggcacttagctgaagctcctctgtaactcctgtgggccctgccttgcccacccccgacagctgctgcagtgctcctgagcagcacaggcctgatggagcttctggagaagatgctggccctcaccttggcaaaggcagattctcccaggactgcactcctctgctctgcctggctgctcactgcctccttctctgcccagcagcacaagggcagtttgcaggttcaccagacactctctgtggaaatggaccaagtattgaaggctctcagctttccaaagaaaaaggctgcactactctcagaaggaccctctattgtcccaggcctgtgttggctgcctggaggccttgcttgactacctggatgcccggagcccagacattgctctccacgtggcctcccagccttggaatcggtttttgctgtttaccctcttggatgctggagagaattccttcctcagacctgagattttgaggctcatgaccctgtttatgcggtaccggagtagcagtgtcctctctcatgaagaggtgggtgatgttctgcaaggtgtggctttggctgacctgtctaccctctcgaacaccacactccaggccctgcatggcttcttccagcagctccagagcatgggacacctggctgaccacagcatggcccagaccctgcaggcctccttggagggccttccccctagcacctcctcaggccagccacccctgcaggacatgctctgcctgggaggggtggctgtatccctgtcccacatcagaaactgatcctcaggacttgaaggcccagaagtggagagagaatgagacctggagacaaagggcataattgttggggaaatggatgacagctgaagctattcatatggagccatatactctattgttgaaatagaataaggaaataaaatgatacactcacaaaaaaa

SEQ ID NO: 109171 - DNA, 1588 bp, Homo sapiens
agagagttctggacagcagagactacagattgggtcatagttttgcccagagccttcccactgatccatatggtggggtcctcacgttcctcttcctccagcattcaccatagccacacaaagctgagtagccccttccttttatacctttaacattcattaactcagacttctgagggaccacctctgtggcagtggggcagtgatgtgttggtgaaggcacaagaccaggaaactggtttgactctgggatctatgaccttgggcaaatcatgcccctcccttcccgtcgggcttcagcctcatactctgtaaagtaaaggacctcatctattccagcccagtggacacagctcacaaggtactgattagcctgaggaccttcctgaggaggaatgaggatatccaagtgggcggtcttatccgaggccacttcctgctgatcctgcagcgtctgctagtggagcatggggcatccccatcaggagcctcggggaacctaccattgctgctgagcctcctctccctgatgcagctcaggaatgtgtcagagcaagaactggacagcgtggccatgaagctccttcaccaagtaagcaagctgtgtgggaagtgcagccccactgacgtggacatcctgcagccctccttcaacttcctgtattggagccttcatcagaccacacccagcagtcagaaaagagctgctgcagtgctcctgagcagcacaggcctgatggagcttctggagaagatgctggccctcaccttggcaaaggcagattctcccaggactgcactcctctgctctgcctggctgctcactgcctccttctctgcccagcagcacaagggcagtttgcaggttcaccagacactctctgtggaaatggaccaagtattgaaggctctcagctttccaaagaaaaaggctgcactactctcagaaggaccctctattgtcccaggcctgtgttggctgcctggaggccttgcttgactacctggatgcccggagcccagacattgctctccacgtggcctcccagccttggaatcggtttttgctgtttaccctcttggatgctggagagaattccttcctcagacctgagattttgaggctcatgaccctgtttatgcggtaccggagtagcagtgtcctctctcatgaagaggtgggtgatgttctgcaaggtgtggctttggctgacctgtctaccctctcgaacaccacactccaggccctgcatggcttcttccagcagctccagagcatgggacacctggctgaccacagcatggcccagaccctgcaggcctccttggagggccttccccctagcacctcctcaggccagccacccctgcaggacatgctctgcctgggaggggtggctgtatccctgtcccacatcagaaactgatcctcaggacttgaaggcccagaagtggagagagaatgagacctggagacaaagggcataattgttggggaaatggatgacagctgaagctattcatatggagccatatactctattgttgaaatagaataaggaaataaaatgatacactcacaaaaaaa

SEQ ID NO: 109172 - DNA, 298 bp, Homo sapiens
  misc_feature (28)..(28): n is a, c, g, or t
tgatctagaggatcccttagatccaagngcctagatgttctctggccctctagagactcaggaagggggtcatctgtgtttgggggctgttgtgcctcctggacctgagctgggtaatttgggacatctcctccttgcaacttgagtcctacaggggtttgcagaaggttgcttcccttgaccatccctcccagcaccccaggcactttcagctcacaggctgtagctctgggcctccagtcattcataagtggctgcgaggcctctgccacagcggaggtgcggggtggaggggggg

SEQ ID NO: 109173 - DNA, 361 bp, Homo sapiens
tttgctctctgagaaatactattctaggactataaaccacccatttttcaatttactgtaatttagtgtttcatacactaaaatggacactaaaatctgtcattattactgaccaggctatgatcacacctactcagtcataccagagctgtagattctgactctgagagcttagttatctaattttgttttttaggctcaagaagtaatagttggtcttatgtttgttcatttttagtaaaaagaaaaattcagaaaatgaacactcccacacatttgtgcttttggcacattaagtatgtactctgtgaactgtatcatttaaatatttttactttaacactgtagatgtcataacaca

SEQ ID NO: 109174 - DNA, 112 bp, Homo sapiens
gctgtgtggaaagagctacctggacagaaaagcctgaagaatcagaagaaagggcaactgatggtgcagggactggtctcagacaagtaaggggtcatttcaccctatgaag

SEQ ID NO: 109175 - DNA, 305 bp, Homo sapiens
gttaggatgttatagcacagggctagactggggtagtacagtaaaaatggagaagaagaggtgtctgcaagaggtgtcatcatggaaaattcaaaggattttgcctgcctctattttttttaatgagacgaagtcctgctctgtcacccaggctggagtacagtggagcgatctcaactcacagcaacctccatcttctgggttcaggtgattctccttcctcagcctcctgagtagctgggattacaggcacgtgccaccacgcctggctaatttttgtatttttagtagagatggtgtttcac

SEQ ID NO: 109176 - DNA, 495 bp, Homo sapiens
cagatatttaaatactgaaaaactgaattcccatcattttaaatattttaaatatacttcactcactctaaagaagcctgccaaattaaatgtatctgtgatactctaaaaaatcttgttactttggaccttcaggttaataaacccaaaggtaactttatacctgcgtaatgccagcataactgtcctgagagaggggacctagtattctgaagataataatgttttaaaataatttatgaaaaaaatactcttttaagactacatcaataggatgtaaaaactttcaaaaatacgaaacttttaaaaacatttataagtatgtcacatgaacgctggtatcatagtcttcacctttattttaagccagtatatacatgaggagtcaggctccaaatcacaatcctatgtgtgatctctcaggcccaaccgttgataatttcaagacgttgggtggcaagactatttaaggaaatctgtcctccatacacaaat

SEQ ID NO: 109177 - DNA, 130 bp, Homo sapiens
actttggtgagcacttcttaaatttaattttcatcataatccatgaggtagtttaccctagatcaggaaatgaatgcttagaaaagtttaataacttgccctagaccacacaagcaaaatggcaagatct

SEQ ID NO: 109178 - DNA, 733 bp, Homo sapiens
aaagggaagagtggagtaattaacagcccagcctcaagacaggggccacctcccagctgtgtgaccccaggcaggccacctcttctctccagcttcagtttctttatctgtaaaatggggccaatttatagcacctgcttcttagggctcttgtgaggatgaaatggactaatccatgcaaattttagcacagtgcctggcacagagtcagcctttgtgagtctgctgttactatatatcctggtatggtctgcagacaaacttaaagaacataaaagcttcacaatttgaaaaggaacagcctacatggataacctcttccattgaaaaaccatgaatttgttccttctgttttcttctccctactggctctttttgtgagaagttgtcttaaaacttaactaaaattacaaggctccttaagaactgcctgaaaaaaataattatggccaagtgtggtgattcacacctgtaatcccagcactttgggaggcctagacaggaggatcactggagcccaagagttcgagactagcctgagcaacatagtgagacccgccccccacctcccctcaaccatctctactaaaaataaaaaaaaattaggagggtgttgtggtgcatgcctgcagtctcagatactcaggagatggaaggaggaggatggcttgagcccaggagttggaggctgcagcgagccgtgatcatgccactacactccagcccaggcaac

SEQ ID NO: 109179 - DNA, 354 bp, Homo sapiens
  misc_feature (348)..(348): n is a, c, g, or t
gcttcctgtttagtttttccactttatctttggccctttctccgtaagaccctgagccttaatggattgaattgtcactccttgtttttgcctcagatgttttcttgccttgaatattggtttatctttctttatctgttgtatttcctcatcgtctgtaacgttcaacctaatagtctccttaacatagccttcattcacatatctaaggcaagggaaatattcttctccattgtgtatcacttcacctgtgccataccagttaaacaggctgattctggaagttctgaggaaaagcagctttacaacaaatacccagatgctgtggccacatgggttaaaccctgnacccat

SEQ ID NO: 109180 - DNA, 378 bp, Homo sapiens
tagaatgtgtatgtctccttgtaagaatccaatttgaggggttcagaaacacatagtgaatatgcctgatgagtagtgatttttcaataatgatttttacatgttatgtctcctcaaagataacaacagagcaccatgttgcctaaattcatgtaacttccttctgggttaaactgtttattggacatttctgaatatatgcaccatatgtggctatctttcaaagtatgtgtctgagatattattcagagccttttccagccatttagagatatatgtggagcttagagagaataaaaatataatgtgcattatttactagtaattcacataaaatattccatttctaaagcatgttgcagaattattctactggta

SEQ ID NO: 109181 - DNA, 788 bp, Homo sapiens
gctcgtgccggcgtcagggtccccctgccatctggagtgagcaggaggcggccaggccaggccttcccagctgaggtttgggagttccgtgcctttggtgctgagggtgagcgtgttcacggtgacttcgtcccttggtcatgaggaggttcgagctaggaaccccctgcaagtggtcaacgcatccggcttgctgttctaagtggaggcggcaggcacagctgggacccacgcccctcagaagcaggctctgtggtggtcggagcaggcacctcaccaggccacgctccatttggggctgctgagaagctggctgtggccagtcctgaggtctctgcagccctcgggagcttggaggcccggctggtttttctaaggagttggccgggtggccatggctgcccacagtggggtgtgaccttgggcttgtggcctcctcagtgagggcctcctggcaggggctgagagcccagcgtcagtggggggcttcagcatagaccaccacatgtgtgtctctgggtgcttggtaaatgcaccctgtgcttcggtgacaagtttttttgtctagtcaagtgaagcagtggaaatgcagggagcatcttaaatctgttttatttctaactgatttcaattccacctttacccttaggccgaccaagcatctgaggtgccgggacagtaccaccttgccatggggcttcaggcctgctgtgaccccttggggaaagtgagccccatggccacctgcccagttcccaggtcttgtgctgtcagaattcctggtgggc

SEQ ID NO: 109182 - DNA, 481 bp, Homo sapiens
tcctcttcccttcccttaacatctcagaggcctttgtacttgcctcaacaaatcgccacaaaatatgtgatggaagtgatgctgcttctaggacttctgcaagtttctctcggcacactggcctgggagccttcagctgccaggtaagaagtccaaccacccttagagaccacatggagagaacatagagggagatggctgagaggctccaaccattctagccagcagctgcttgactcttttcagctcagacagcagatgtgtgagctctctttgagattatgactctagcccagctgctgtcagaccacagctgcaggagaccctgagcaagaactgctttgccaagtccagtcacccccagatctgtgagcaaaataaatgaccatgattgtttcaagctgctgttttggggtggcttattatgcagcaatagataactagataactgaaacagttcccaacacagagcactgttaat

SEQ ID NO: 109183 - DNA, 233 bp, Homo sapiens
tcctcaggacagggttcagagctaggctggtggctgctacacagagacagcaccctccaccagttaaggtataagacaaggtataaggctgatgggctgtaggcatcaaacctggaactcacagtcggggcacctcacttcaagccttggtggataggtaagatgaacactcaggctcccaagttagacagatgagctggatccttcatctaccaccaatttcctggctgtgt

SEQ ID NO: 109184 - DNA, 698 bp, Homo sapiens
gcagaagcaagagagagagtggggtggtgcaacacactattaaacaaccagatctgaagggaactcatgcactatcatgagaacagcaccaaggggatgatgcgaaaccattcatgagaaatccaccaccatgatacaatcccctcccactagggacccctccaacactggggattacaatttgcatgagatttgggtgaggacacagatccaaaccatatcatgcttcataaatcaaaagtttacaaacgcaatggactattgccaataagtatatttctttatccatcatgctacatttagtatatatactacttataaataaatgttccccccaaatcacattatctaaagtcgcaggctttagatcgcagcctttatcctgtcttctagaacactgataatggtgagaaatgttattggcatgttttattgtttactggaacaaactatgtgttgttctagggcatgaaccaaaggccctttttgcaagactggctcaataaattcttccatttaaaaagaaaagaaattcaaaatcctcattttggcctggctctgcaattgaaatgagcagtttaaaccaattcaatatctggcccagatgagcaatttaagccagttcaacatctgccaaataatccaatattggtaatcaaatagttgtgctaaaccaaggaacaaagcttgctcttggc

SEQ ID NO: 109185 - DNA, 454 bp, Homo sapiens
tgtgagtgacacgatagaaactaactctgtatttcccctagggccaaagactcaccattcactaattcagtgtttgaggtgactttaaagcccttaactataccacaaataaggagaatcactccacttgttcttggtcaccaaattccttgctatccacctgcccccaaattgttttcattctttttttaaccagctcaatttagatacaatacattgagcacagtaaactgcacatatttaaaatgtgcaaacggatgcattttgacatatgtgaaaccatcatcaagtaaccaaggtaatgaaaatattcatcacttcccacacttcccagtgcccctttgcagttcttccttcccaccctttcactggtctgttttctctcagtatagattgcttgcatttcctagagtgttgcataaaggaatcaatttattttatctggcccctggct

SEQ ID NO: 109186 - DNA, 455 bp, Homo sapiens
tgtgagtgacacgatagaaactaactctgtatttcccctagggccaaagactcaccattcactaattcagtgtttgaggtgactttaaagcccttaactataccacaaataaggagaatcactccacttgttcttggtcaccaaattccttgctatccacctgcccccaaattgttttcattctttttttaaccagctcaatttagatacaatacattgagcacagtaaactgcacatatttaaaatgtgcaaacggatgcattttgacatatgtgaaaccatcatcaagtaaccaaggtaatgaaaatattcatcacttcccacagaagtcaccctgtgtactggttggttatttccaacctggtttgaaaagtaaagaagttgcactgaggggtaagtagaactgattgaaatctaggtgcctgtgctgtcctgctcttcccttatgacgttt

SEQ ID NO: 109187 - DNA, 456 bp, Homo sapiens
gttagtcctttgatgtgtctttaggcaattccactaactccatggctattttgagatgaaccactttttatgcatcatttttgccatcttccatttttaatgctacatacgttctgggcttatagtttgtctattcataaattactcttagtaatcttgtgttccacgcttcttgcatattatttgttaacaagatagacagggccattcctatctgttactgtcctcaaaattctactcttattttggattatactatgtataaagattttaaatctgtgaatgtccagtggggtcataacataattactaaccagtctggttagtgttgaactcttacctagttttcctgaatcttaaatacaaattgcttagtagctatacaagggtgttttgaaactaatggatgtttaaaggaccatggaccattcagtctttgtagaacttctaaatgta

SEQ ID NO: 109188 - DNA, 315 bp, Homo sapiens
tatctggaaacagagctggtcattttctttttctgtatctcagccaaggggaggggaaaaggttggttagagagaaggagggaggtcaggagatggaaaatgggatgagatcctgttactttcaatcccctataatttgttagtgtttaacagagacagttacattaagcaggaaatccaattcagtttcccagtcagcatgcttgtactgtttcaactaatgctctggatgctccaaagaaaatgcaaactagcatattaattatgacaacattcacatttcattccttcaaaataagcaataaagaaacaaat

SEQ ID NO: 109189 - DNA, 258 bp, Homo sapiens
tggaatctaatcaaattttacaagaaatacagaggatagaaagaaaagctaaggaacatcacaagaaagcaatcaaatccataaatatatgtccataagataataaataaaagttggtatgtcttccaatggaatcctatatgatagctaaatgaattggatttgtatacagaacatcaatttaactctcagaaataaaacgttgagtataaacaagttacataatgatatatgtataaattatcatttataaaaatt

SEQ ID NO: 109190 - DNA, 540 bp, Homo sapiens
agagatggggtgttctatgttgcccagtgtggtctcaaactcttgggctcaagagatcctcccacttctgctgcccaaagtgctaggattacaggcatgagccaccgcgccgggacagttattttgtagagtgttctttaatttggatgtacctcatcttttatgtatctttgggaggaataccacataactcatgtggtttatcccatcgagagacacacagtgtcaatgtgttccattcttggtgatgttaacttttattacttagtgaaaataattctaagagatttcaccactgtagagtgaataaatgaatatgtgggattcatcaatgaataagtaaaaggatgccaactggcaaaagaactgagttgggaggatggcttgagcctgggaggtcgaggctgcagtgagccgtgatggcaccactgccctccagcctgggtgacaaagcaagaccccgtctcagaaaaaattaaataaataaataaatacccagcacctgaacatctcgggcatttcctgtgcctcttatattgg

SEQ ID NO: 109191 - DNA, 315 bp, Homo sapiens
ctccccctcctcacacctggtccagcttacagtttcgttctgcgactggccctcccccacctgcccagcaatttcctcttaaaaaggtggctggagctaaaggcatagtaaaggttaatgctcctttttctttatcggacctctcccaaatcagttagcgtttaggctctttttcatcaaatatgaaaaacccagcccagttcatggcccatttagcagcaacccttaagactctttacagccctagaccctgaagggtcagaaggccatctcattctaattatgcattttaacacccagtcagctcctgacatt

SEQ ID NO: 109192 - DNA, 347 bp, Homo sapiens
ctttcttgacctgggttaataggtaactggatgttaatcattatttttttaaaccacaagtgcattttggccatttttctgtgtaaaatacatttcataaaaatgtttaatgtacatgaatctgagataagatacaaatcaatccaaatctagttgtttaaaagaaatgagactcaaacagaactgcactgcacctggtttcatttttacatgacattttagaataaaaatttcaaactctaagtctatcccttagatagcaaagaaaaaacaggttgtagtttgcaaatacattactgaaaaggattttctatagtttttcaaatcatttcagttgcaaaatcagt

SEQ ID NO: 109193 - DNA, 629 bp, Homo sapiens
tgttatccatctgaaggttttccagttacacattgtaaggtacaatgtgtaccttacagatgtaaggtacatctgaaatagtccaaattactgactcaggccaatcacatatgctttgatttttctgtgacctaatctttttctcaaaatgaccctggtcctcaatgcgttgtcttcatagtctaataaacatctacctcccagttcttgttctgaaaatctttttcttattttactaccaacagaaaactgtttatataactgctttgggtctaattataaagttaatctgattcattgaaaatacaactttttttctcatctctcaaccattatgacttgcaacacggacatttaagtcaagtctgaggagtctggatgttggtctatagggaatgttaaccaatgaaaggctctaagtaaagggtcgcttcaggtatgcttcagagtaatcaatctggcctcacagaggaaaaggattagagtaaatgagcaggaaccagggagccagaggccaactggggagactaccgtctggctgaggagtaattaagacctaaagcagggcaatagctgtgggagcagagacattggcagaatgtagccacatcatctgtttcaaaatccca

SEQ ID NO: 109194 - DNA, 616 bp, Homo sapiens
ctctaaaaacagctagaggagatgtctgcttattataactggcctctgccaaaggcttacttttaattgttatagagccaggtcagttattcctttgactgtggaaataataagatggttataaaatgcagctttggtatggtttccttgcaagaagttcacattttctatcaagaaaataattctgtgtgtatggaagtgtgtgcctaagagtttttgagtgcagataaaattgttttgatgcctgaattctcacaaagtttagccaaaatatccaggtacttccaggctactgtcaatattgggattgctccttctcattcctccatgtggcaggacttttaaagaggaaaaaaggactgagtttagagtgctgaaataacagcccgattataatttttgtcaatttaccacttggacgtttattctctccttccctatatattccaactccttgctctttttgcattgtaaaatatagtatttttaggattatacaccatatgctaatcttttacccactcttcagtatcacaactttctttctctgtggggaggaaaaatccctgtcccctttctgtcttcttgccttttgattctatttgccatagtctaa

SEQ ID NO: 109195 - DNA, 607 bp, Homo sapiens
attactggggtgagggtggagaagcgggggcggtttgctaaatggatgtgctccatagccacaataaaacgccaccaagcccttttagcccctcattagctagaccctaatctggggtggtgccagccagagcgggtgcaccccctcctccagcccgaggtggggcagtgtcagccccaagcctcaccctcctcacagggacgcttccgcctggccctgccctcacccactcagctggtcgactccgtggtttccaacacaaacacattctctggatttcaggcgcacctcaatctctccacttgaggggcagaggaggctccaggctatgtggccagccctctgcctcctactcgactccctggctccccatgggatggaggtggtgagatccaaaaaccctcagtgggaaaacaggttctgcaccttcctgccacctccacgcctctccctgggctgtagtcttggcatttgccaaggcccccgtgggcatccacgccctgttttccccagaagggtctcccctcattccctgcaaaccagcagggcatctccaggtggaaagaaggggagggcttgggaggcagatggaggttcaaggtctagt

SEQ ID NO: 109196 - DNA, 216 bp, Homo sapiens
accacggtattgcagcgtttgctacaagagcagcttcgctatggcaatcctagtgagaatcgcagcctgcttgccatacaccagcaagccacagggaatggccctcctttccccagtggcagtgggaacccgggccctcagagtgatgtgttgagtccccaagaccaccaccaacagcttgtggctcatgctgctcgacaagaaccccaggggcag

SEQ ID NO: 109197 - DNA, 692 bp, Homo sapiens
gtcaccaccgggacgcccctcatccatctctatgaccgggcagacggaacccaggagcccaggagattgacggcaacacacacacacacacaagattggaaggatagacactgaaaagtgacctctggcctcatccgtgattttatttatttctttaaaatttttacagtaacatacctggtgtttgagatacttttctaaaaaatcaattttttaatacctaccactcaaaaggccatgaatattgaatgggctttgcacaatgcccaggcaaaagcaacaacagcaaacgaagaaacaatgtgcactccaacacttggtgaaatctgcttgatgatttgagaagtgataaaaatagattttgtgattacaatagcttttgaagctaaagctttgcacatgacagagctttcatgctagtggcccacagcactgggttgagtcatttactaaatggaaaaaaatgattgaaaaattaatgttgggctttatttctgaagtctcattgacaagaagaaaataacaaagctgtttttcattttgtttatcctgaaagtcttcaacaagtgattactcaaagttcttagagcagttgtttctcttctatgctgtctagatctccagatcacactaagtttgtgggaagcttcaaaaccaaacaagacttcacgccaggttgtcccaatccgacg

SEQ ID NO: 109198 - DNA, 2518 bp, Homo sapiens
gagatcgcccaccagattgcctggtataaatgacactgtgagagagcagaggaagacacaaggagtcctactcgggctcggtgacagtctggggtgggttaaagcggaggcctgggagagggaccaaggccactccaggcagcatccctggatctcagcgaggccgctccaggcagcaggatttgaccagagcaaggaggaaggccaaggcggccaggacggatgcagcatccctgaggagtgacagtgaggattcacatttgggttatttcaagatgagcttcctactgcccaagctgactagcaaaaaggaagtagaccaggcgataaaaagtactgctgagaaggtgttggttctcaggtttgggagagatgaagatcctgtctgtctgcagctagatgatattctttctaagacctcttctgacttaagtaaaatggctgctatatacctggtagatgtggaccaaactgcagtttatacacagtattttgacatcagttatattccatctactgtctttttcttcaatgggcagcatatgaaagtggattatggatctccagatcacactaagtttgtgggaagcttcaaaaccaaacaagacttcatagatttgattgaagtaatctatcgaggagcaatgagggggaagcttattgtccaaagtcctattgatcccaagaatattcccaaatatgaccttctctatcaagacatttagtacattaattgctgtcaaagatgaagaagaaggcacatcttgacacagtacctgaatccagctgtgctgtgtttctggagtcctttggaaacatgtgtcccagaggagaagaggtttgacttgcgtgtagaaaacccggcccctgaggaaaagaccccactggttctctgatgacctgggatgcctaactgtctactccctgcaagcctcagagcagccaagtcattggtgttcattttccccacagtgatttttgtaacttctctttctaatgtttttctttatccctttaatacagaaccctcccaaacattggctagtacaacttgatttcatcatgttcatttgatacacaagtgaactggaaagtcacttcccatagaagcaaaagtacttattttctaccctagctgggtgcatgtgtgtgcacacacacacacacacacacccccacacccctttgccggttcctcgactcatacatccctcgtgctttcccatctccagtctgtattactgtaggttctcttcaaataattaattgagcagacaagtttgttttattttggagcctttttggctctggcttttaaacattgtcctggttggctcatttaattttttttttttttttgagaccgagtcactcttgtcacccaggctggagtgcagtggcgcgatctcggctcactgcaagctccacctcctgggttcatgccattctcctgcttcagcctcctgagtagctgggactacaggcgcccgccaccatgcccagctaattttttgtatttttatagaggcgcagtttcaccgtgttagccaagatggtctcgatctcctgacctcgtgatctgccctcctcagcctcccaggtgctgggattataggcgtgagccaccgcgcgcaccccatttaattattttttatgttataaaatttaatatggaaagtgagaatttgaaccttcaccatccaccactctattcaggtaaaacaatgaatgagccaccttagcaggagcagatttttcccagaagctgctgcctcttcctgaggcagaaaattggattactaaggctcaaaactaaaagagatgtcagcattgttggatagaaatgtcacctatatgggatttgcctgttttaataactttgtaaggaattcttgctcttctaggggtgcctggcgcaaccgtgggcaagttactgctcctctttaaacctcgtggtggttattgaaacagatttattagaaggagagggtaggtgcagagctggagagccatgggtgaggcagcttgtgacctgcctagcagccgctgaccacctctccaacagaagcctagtcctgttcagagcagcactgtcactgcaagtccagccccctttgccaggggctccattccacccctttcctgcagggaggggtgccatgagtcttgcttttggctcatacaggagagagggaaggctgccaggcactgcttgtatccctgctgataagaggagggagtcactccaggaataagacaaaaggagaggaggaggccatcacctctggcctcttccatcgtacacttcctgtctctggtttaatcatgatgcatggagctacaacagccatcttaggtccccgaggtgcccagcatcacgtaaaacatcgatatgctaagaagaacaaaaagagcccaatctctgatgttattgagctcctgcatgaactctggacctgcctgcctcagacttctgtgaaagaataaaatttctttttgcctaagtcaaaaaaagttg

SEQ ID NO: 109199 - DNA, 1117 bp, Homo sapiens
gcaccaccccgcctcccccccccccacccgccgccaccaccgccaacctacgctaggtacgatgcctgggtgttactgttgagcgggggccgaccgacggccaggagtttcttttctgcgcttgtgcgttttctgttcggtttccttcccgctagcggggccacgagggttgctaggcaacagcccctgggtgacttggtcttagggtcctgtccggcttggggctgatgaaaggagctgtccgcgcccgggctcttccgagaagtggttgctgacagccacaaagtgaaagggagtgaggcggcgtggacgagtaaggagtgacagtgaggattcacatttgggttatttcaagatgagcttcctactgcccaagctgactagcaaaaaggaagtagaccaggcgataaaaagtactgctgagaaggtgttggttctcaggtttgggagagatgaagatcctgtctgtctgcagctagatgatattctttctaagacctcttctgacttaagtaaaatggctgctatatacctggtagatgtggaccaaactgcagtttatacacagtattttgacatcagttatattccatctactgtctttttcttcaatgggcagcatatgaaagtggattatggatctccagatcacactaagtttgtgggaagcttcaaaaccaaacaagacttcatagatttgattgaagtaatctatcgaggagcaatgagggggaagcttattgtccaaagtcctattgatcccaagaatattcccaaatatgaccttctctatcaagacatttagtacattaattgctgtcaaagatgaagaagaaggcacatcttgacacagtacctgaatccagctgtgctgtgtttctggagtcctttggaaacatgtgtcccagaggagaagaggtttgacttgcgtgtagaaaacccggcccctgaggaaaagaccccactggttctctgatgacctgggatgcctaactgtctactccctgcaagcctcagagcagccaagtcattggtgttcattttccccacagtgatttttgtaacttctctttctaatgtttttctttatccctttaatacagaaccctcccaaaca

SEQ ID NO: 109200 - DNA, 2598 bp, Homo sapiens
gcaccaccccgcctcccccccccccacccgccgccaccaccgccaacctacgctaggtacgatgcctgggtgttactgttgagcgggggccgaccgacggccaggagtttcttttctgcgcttgtgcgttttctgttcggtttccttcccgctagcggggccacgagggttgctaggcaacagcccctgggtgacttggtcttagggtcctgtccggcttggggctgatgaaaggagctgtccgcgcccgggctcttccgagaagtggttgctgacagccacaaagtgaaagggagtgaggcggcgtggacgagtaaggagtgacagtgaggattcacatttgggttatttcaagatgagcttcctactgcccaagctgactagcaaaaaggaagtagaccaggcgataaaaagtactgctgagaaggtgttggttctcaggtttgggagagatgaagatcctgtctgtctgcagctagatgatattctttctaagacctcttctgacttaagtaaaatggctgctatatacctggtagatgtggaccaaactgcagtttatacacagtattttgacatcagttatattccatctactgtctttttcttcaatgggcagcatatgaaagtggattatggatctccagatcacactaagtttgtgggaagcttcaaaaccaaacaagacttcatagatttgattgaagtaatctatcgaggagcaatgagggggaagcttattgtccaaagtcctattgatcccaagaatattcccaaatatgaccttctctatcaagacatttagtacattaattgctgtcaaagatgaagaagaaggcacatcttgacacagtacctgaatccagctgtgctgtgtttctggagtcctttggaaacatgtgtcccagaggagaagaggtttgacttgcgtgtagaaaacccggcccctgaggaaaagaccccactggttctctgatgacctgggatgcctaactgtctactccctgcaagcctcagagcagccaagtcattggtgttcattttccccacagtgatttttgtaacttctctttctaatgtttttctttatccctttaatacagaaccctcccaaacattggctagtacaacttgatttcatcatgttcatttgatacacaagtgaactggaaagtcacttcccatagaagcaaaagtacttattttctaccctagctgggtgcatgtgtgtgcacacacacacacacacacacccccacacccctttgccggttcctcgactcatacatccctcgtgctttcccatctccagtctgtattactgtaggttctcttcaaataattaattgagcagacaagtttgttttattttggagcctttttggctctggcttttaaacattgtcctggttggctcatttaattttttttttttttttgagaccgagtcactcttgtcacccaggctggagtgcagtggcgcgatctcggctcactgcaagctccacctcctgggttcatgccattctcctgcttcagcctcctgagtagctgggactacaggcgcccgccaccatgcccagctaattttttgtatttttatagaggcgcagtttcaccgtgttagccaagatggtctcgatctcctgacctcgtgatctgccctcctcagcctcccaggtgctgggattataggcgtgagccaccgcgcgcaccccatttaattattttttatgttataaaatttaatatggaaagtgagaatttgaaccttcaccatccaccactctattcaggtaaaacaatgaatgagccaccttagcaggagcagatttttcccagaagctgctgcctcttcctgaggcagaaaattggattactaaggctcaaaactaaaagagatgtcagcattgttggatagaaatgtcacctatatgggatttgcctgttttaataactttgtaaggaattcttgctcttctaggggtgcctggcgcaaccgtgggcaagttactgctcctctttaaacctcgtggtggttattgaaacagatttattagaaggagagggtaggtgcagagctggagagccatgggtgaggcagcttgtgacctgcctagcagccgctgaccacctctccaacagaagcctagtcctgttcagagcagcactgtcactgcaagtccagccccctttgccaggggctccattccacccctttcctgcagggaggggtgccatgagtcttgcttttggctcatacaggagagagggaaggctgccaggcactgcttgtatccctgctgataagaggagggagtcactccaggaataagacaaaaggagaggaggaggccatcacctctggcctcttccatcgtacacttcctgtctctggtttaatcatgatgcatggagctacaacagccatcttaggtccccgaggtgcccagcatcacgtaaaacatcgatatgctaagaagaacaaaaagagcccaatctctgatgttattgagctcctgcatgaactctggacctgcctgcctcagacttctgtgaaagaataaaatttctttttgcctaagtcaaaaaaagttg

SEQ ID NO: 109201 - DNA, 2544 bp, Homo sapiens
gcaccaccccgcctcccccccccccacccgccgccaccaccgccaacctacgctaggtacgatgcctgggtgttactgttgagcgggggccgaccgacggccaggagtttcttttctgcgcttgtgcgttttctgttcggtttccttcccgctagcggggccacgagggttgctaggcaacagcccctgggtgacttggtcttagggtcctgtccggcttggggctgatgaaaggagctgtccgcgcccgggctcttccgagaagtggttgctgacagccacaaagtgaaagggagtgaggcggcgtggacgagtaaggagtgacagtgaggattcacatttgggttatttcaagatgagcttcctactgcccaagctgactagcaaaaaggaagtagaccaggcgataaaaagtactgctgagaaggtgttggttctcaggtttgggagagatgaagatcctgtctgtctgcagctagatgatattctttctaagacctcttctgacttaagttattttgacatcagttatattccatctactgtctttttcttcaatgggcagcatatgaaagtggattatggatctccagatcacactaagtttgtgggaagcttcaaaaccaaacaagacttcatagatttgattgaagtaatctatcgaggagcaatgagggggaagcttattgtccaaagtcctattgatcccaagaatattcccaaatatgaccttctctatcaagacatttagtacattaattgctgtcaaagatgaagaagaaggcacatcttgacacagtacctgaatccagctgtgctgtgtttctggagtcctttggaaacatgtgtcccagaggagaagaggtttgacttgcgtgtagaaaacccggcccctgaggaaaagaccccactggttctctgatgacctgggatgcctaactgtctactccctgcaagcctcagagcagccaagtcattggtgttcattttccccacagtgatttttgtaacttctctttctaatgtttttctttatccctttaatacagaaccctcccaaacattggctagtacaacttgatttcatcatgttcatttgatacacaagtgaactggaaagtcacttcccatagaagcaaaagtacttattttctaccctagctgggtgcatgtgtgtgcacacacacacacacacacacccccacacccctttgccggttcctcgactcatacatccctcgtgctttcccatctccagtctgtattactgtaggttctcttcaaataattaattgagcagacaagtttgttttattttggagcctttttggctctggcttttaaacattgtcctggttggctcatttaattttttttttttttttgagaccgagtcactcttgtcacccaggctggagtgcagtggcgcgatctcggctcactgcaagctccacctcctgggttcatgccattctcctgcttcagcctcctgagtagctgggactacaggcgcccgccaccatgcccagctaattttttgtatttttatagaggcgcagtttcaccgtgttagccaagatggtctcgatctcctgacctcgtgatctgccctcctcagcctcccaggtgctgggattataggcgtgagccaccgcgcgcaccccatttaattattttttatgttataaaatttaatatggaaagtgagaatttgaaccttcaccatccaccactctattcaggtaaaacaatgaatgagccaccttagcaggagcagatttttcccagaagctgctgcctcttcctgaggcagaaaattggattactaaggctcaaaactaaaagagatgtcagcattgttggatagaaatgtcacctatatgggatttgcctgttttaataactttgtaaggaattcttgctcttctaggggtgcctggcgcaaccgtgggcaagttactgctcctctttaaacctcgtggtggttattgaaacagatttattagaaggagagggtaggtgcagagctggagagccatgggtgaggcagcttgtgacctgcctagcagccgctgaccacctctccaacagaagcctagtcctgttcagagcagcactgtcactgcaagtccagccccctttgccaggggctccattccacccctttcctgcagggaggggtgccatgagtcttgcttttggctcatacaggagagagggaaggctgccaggcactgcttgtatccctgctgataagaggagggagtcactccaggaataagacaaaaggagaggaggaggccatcacctctggcctcttccatcgtacacttcctgtctctggtttaatcatgatgcatggagctacaacagccatcttaggtccccgaggtgcccagcatcacgtaaaacatcgatatgctaagaagaacaaaaagagcccaatctctgatgttattgagctcctgcatgaactctggacctgcctgcctcagacttctgtgaaagaataaaatttctttttgcctaagtcaaaaaaagttg

SEQ ID NO: 109202 - DNA, 1316 bp, Homo sapiens
gcaccaccccgcctcccccccccccacccgccgccaccaccgccaacctacgctaggtacgatgcctgggtgttactgttgagcgggggccgaccgacggccaggagtttcttttctgcgcttgtgcgttttctgttcggtttccttcccgctagcggggccacgagggttgctaggcaacagcccctgggtgacttggtcttagggtcctgtccggcttggggctgatgaaaggagctgtccgcgcccgggctcttccgagaagtggttgctgacagccacaaagtgaaagggagtgaggcggcgtggacgagtaaggagtgacagtgaggattcacatttgggttatttcaagatgagcttcctactgcccaagctgactagcaaaaaggaagtagaccaggcgataaaaagtactgctgagaaggtgttggttctcaggtttgggagagatgaagatcctgtctgtctgcagctagatgatattctttctaagacctcttctgacttaagtaaaatggctgctatatacctggtagatgtggaccaaactgcagtttatacacagtattttgacatcagttatattccatctactgtctttttcttcaatgggcagcatatgaaagtggattatggatctccagatcacactaagtttgtgggaagcttcaaaaccaaacaagacttcatagatttgattgaagtaatctatcgaggagcaatgagggggaagcttattgtccaaagtcctattgatcccaagaatattcccaaatatgaccttctctatcaagacatttagtacattaattgctgtcaaagatgaagaagaaggcacatcttgacacagtacctgaatccagctgtgctgtgtttctggagtcctttggaaacatgtgtcccagaggagaagaggtttgacttgcgtgtagaaaacccggcccctgaggaaaagaccccactggttctctgatgacctgggatgcctaactgtctactccctgcaagcctcagagcagccaagtcattggtgttcattttccccacagtgatttttgtaacttctctttctaatgtttttctttatccctttaatacagaaccctcccaaacattggctagtacaacttgatttcatcatgttcatttgatacacaagtgaactggaaagtcacttcccatagaagcaaaagtacttattttctaccctagctgggtgcatgtgtgtgcgctctttcacactcaggaaacagctctgcccactatgccggtctcgacttaccttggtttatcctctagagtcagctagaaga

SEQ ID NO: 109203 - DNA, 400 bp, Homo sapiens
aagagtctgttcagttagttaccctcctcttcaatatcattcgcttgtcaggtagggcaggaaaagttgctgagaatattaggtagcagtttctccccttccattgtcccttaaaatacttttcatgctctttcatggattatctggggttttggccactctagaaaatctttggaagcagctgcgcatagtggctcatgcttgtaatcccagagctttgggaggttcacttgaggccaagagtttgagaccagcctgggcactatagtgagaccctgtctctacaaaaaaaaaaattaaataaaaaattagctgggcatggtggcatatacctgtggtcccagctacttgggaggatgaggtgggaggatcccttgagcccaggagttcgaggctacag

SEQ ID NO: 109204 - DNA, 1426 bp, Homo sapiens
gagagagagagagagacagacggggagagaaagagagtaagacagaagacagacacagtgagacaggcagagagggagagagagagacaaagacagagacagagacagagagaaagaaagagacagacagacagacggcacaggcagagaaggagagtaagacagaggacagacacagtgagagcagacatgcagagagagagagagagacagagacagagagagacagagaaagacaaagagagagacacgcgaggcaaacagagcaggcggggtgcgcgaccagcgagcaaaggacaccgcaccagatagcacagagagctagcagaagcgctcgaaagagagggaacaacgaggcggagcagacacaagagccgcagaacaccacagactagggaaacgcgacagcacacgcagcggccggcacgcagagcgacagcaggagcagaagaagaagagaagagtcccaggagtcagcgcggacaagagaaaggcacacagcacaagcatgagcggcacgacacgatgagggcagagagacggagggggagagaaaagggggcgggacaagaggcgagcaagagaaaaggaaaggaggagaggcgaaaggaggaagagagcacgggacgaacacgagggaagcgcggaggagccggcagaagaaagacgagagggagagacgacggggaaaagaagcgagaggacgagagcagaggagaggagaagagagagaaggagagagagacgagcgaaggggcaagagagcagaggaagcacgagagaagaggagaacgcgggagagggggacaagcgagcaggagaggagaagagaggagcagcgagaggacaagagggcagcgggggaacggaacggcagcggcaggagagggacgcagggacgagcggcggcgagcgggagagaaaggcgggagcgcggaggacggggagtggggagggaccggagacagggcgcgaggagggcgaggaagcgaagaggagcacaggggggaaaggagaagggcacgcaagacagggacgcacgcgacaacggtgaggagcgggagacggccgtaagaggcggcagaaaaggagacagagagaacgggagaagagacagcggaagcgacgaggaaagagagcagcggagaggcgaaagagaagaagagagggagaagagagcggagaagaagagggacggagggaaggagggagcggagggagggagaagagagcagcaggggagggggagaggagagagaggagaggtgggacgcggcgacgggggaagagagcacggcgggcagaggtagagggagagggcggagcatgcaggggggggatgagaggaagggagacaagaggagagaacgaggaagggaaaggaagggagaaggaggaggaggagggaggcgggaaaggtagagac

SEQ ID NO: 109205 - DNA, 356 bp, Homo sapiens
aactgccatttaagtatcttttagttgtcagacacatacctatctttttaaatatcccatttcatttgattttcataaaattctacaagggagtacttttaaatgtaattttaataaattattcaagttatacatgccaatagcaaaaaattcaaatgaaacaaaaagcaagtttaagaagttaaagttccctttatcctttaccattcacatccagaattccccacaccaggcaataatcaaaattttggtagccacccttctatagatgggtagtgttaacatcatttctatcctacaaatgataaaactaagtatcggccaggcacggtggctcacgcctgtaattccagcac

SEQ ID NO: 109206 - DNA, 407 bp, Homo sapiens
atttcacaacaatttacccaaagaggccttttcgaatgagctgaaataacttcaaagcaaatggtagtgctttagtcatgaattcagaacaaatttagagtttcatgtttaatgagaccgtgcaggaatagaaactgaaaggtaggtcttctaaagggaaaaacagtgggtaaagctttgagtctaatgtggtataaatgttccaaaattctgtcccttctttgcatgttatcttctgaaagtatagcattcctctcagaaattcccgctgatcaaagctagaaaaacttaattcctttatagggtcctatatattatgtctcaattttcaattggcttaatctaaaaaaaaattaagttatccttatgttaactatttaacatgaaaattcggattcttatccatc

SEQ ID NO: 109207 - DNA, 325 bp, Homo sapiens
cacatgctgaaatgccaagtgactaagttagggcagggctaaatgcttttccagcactgtctctcctacttcttataaactgctgttgagatagatgtttttgttcttatattgtggatgacaaaaccaaggctccgagaagagaccacaaaacatatgattagtaacagtaatcacaagctttagggagtactaaatatgccagaaacggtggtaagttatgcaccttacatgaaattttctattgtcttcacaatgatgttttaagtactatcattatccccaattcacaaatgagaaaatggagaaaatttaagtaaactgc

SEQ ID NO: 109208 - DNA, 351 bp, Homo sapiens
cagtaaaataactttttataactatattaatttgggtctctcaacaaacaattattattagtagtttggaaatcaagcctttttgaggttagatagcttgtcccagatcaaacgagtaagaggtaccagaacaagatttcaaattcaggtctaacttactccaaagccagtgctcttaactactgcacaatacagtattgccgcctaaatcccactttaaaacctaccatatgtcattaaattaatgctcatcatcctctattaagatgtaaatgatattgaattaatttaaaacttattcacttattgtaatagattatatactttttgcttttctacatgcaaaatgat

SEQ ID NO: 109209 - DNA, 216 bp, Homo sapiens
tgctttgaagaacactgatttaaaaataaagtggagccaggcgcagtggctcatgcctgtaatcccagcacctggaccctttcaccttcccagactcccaaattttgatatttttctaaactgagttctcttccacccaccattctcctactccaagatcttaggacttgaggatttccctagttcctggttttccaaatggaagtcacagtcacc

SEQ ID NO: 109210 - DNA, 757 bp, Homo sapiens
taataacttaaaacagttcttttcagaaatgcttttctccagctggtttgtcagaaccacattcctgcaaggttgggccagaatgctgtgccccgagcagctccatctactctgccaacagcagccctccagcctctgcgggaagcacgcctccccacgccaacaccctgtagactcctggccccgtggactgtcaggcagttattttggcctgggacgtggctctgctaactggctgctgtgtttttccagttgtgagaagagcttccaggggagttcttcagataatcatcatcttgatcttaaatgtaaatattgtcaccgtggtttaaagagagattaatgatttgccgacagctccatacatccttaggaagtgaacacttgattgtctatcttatttccaataatactagaggaaaaggcacaccctacaggtggctgcaggtgccaccggagcttggagcgagtgaaggccgagcctcggactcgggtatcatttctgaatagctcgccaactgtgaaggaagttctgcggttctctgtcacggaggaaaacagcagtgagtgccatccgccaggctgtgtgccaggtgtcccgtaatcccgtctttaccttctggaggagctgcgaggcggcgtcattagctccgtttcagagaagagaaggcggagggcaaagcaggtttgctgaggcatggccagtcatgggcagtgtccagagccaaacccggggcttgccacatccggctcccct

SEQ ID NO: 109211 - DNA, 476 bp, Homo sapiens
gggttttgccatgttggccagcctggtcttgaactcctgacctcaagtgatcctcctgcctcggcctcccaaagtgctgggattacaggcgtgagccaccacgcctggctgagatggaaacatttctaaagagattgcttgctttaaaccaatttgaatatttaatttaattttgtttttgtagagatggtggtcttgctgtgttgcccagtctggtctcaaactccagcctcaggcaatcctcctgcctaattttttaaaagttattttttcctatgtaatcagcatgtggtggcttgtgaaggaaggttagctgtggacaaaaataagggagcatattcattccctgcccatttgaacgtcaggttaactgagttaagtttgtgtcctatgtcggtaggtactgtgatcccaaactctgcgctttctttttttttttttgagacggagtcctgctttatcacccaggctggagt

SEQ ID NO: 109212 - DNA, 487 bp, Homo sapiens
ccatgttccccaggctggtctgaaattcctgagctcaagagatctgcccgccttggcctccgaaagtgctggggttacaggcgtgagctactgtgcctgtcctatggttttaactggtccttaaagaatgattctgcattgagtacaaagggggtggttatggttacaggctggagaaacagagatgggaatgagtactttccatggaataatgagacaaacattgtgatttaatgtacagagtaagaactacagttaataacactgtaatgccagccagatgtggtggctcacacctgtagttcaagacagctggggtgacagaacaagaccttgtctctacaaaaaaaaaatctggactatggtggcatgcacctgtagtcccagctacttggggaactgaggcaaaaggctcgcttgagcctacaagtttgaggctgcagggagctatcatcatgtcactgcactctagcctaggcgatagagg

SEQ ID NO: 109213 - DNA, 292 bp, Homo sapiens
ccatgttccccaggctggtctgaaattcctgagctcaagagatctgcccgccttggcctccgaaagtgctggggttacaggcgtgagctactgtgcctgtcctatggttttaactggtccttaaagaatgattctgcattgagtacaaagggggtggttatggttacaggctggagaaacagagatgggaatgagtactttccatggaataatgagacaaacattgtgattgaaactgtaggttcaattttattaatagaaaaagcaggtctttggtttttgcaggatcttg

SEQ ID NO: 109214 - DNA, 777 bp, Homo sapiens
cgaaagtggggtatttaagttccccactattacggtattgctatttccccctttagttctattgatagtgctttatatatttaggtgctccaaattggggcatgtatatatatttataaatgttacattctcctgatgaattgacctctgatctcttttaacactttttgactcaaagtctattttattttatgtaaggatcctctgctctctttggttaacatgtgtgtggaatatctttttccatctcttcactttcagcctcagtcctttaaagctaaagagagtctcttgtaggcagcatataggtggatcttgtttttaaaaatccgcttggctgggtgcagtggctcacgcttgtattcctagcactttgggaggctgaggtgggtagatcacctgaggtcaggagtttgagaccagcctgaccaacatggtgaaaccccatctttactaaaaatacaaaaattagctgggtgtggtggtgggcgcctgtaatcccagttactcaggaggctgaggcaggtgaatcgcttgaacccaggaggtggaggttgcggtgagctgagatcacaccatcgcagtccagtctgggcgacagagtgagactccgtcttaaacaatcaaaaatccattcaatctgtgtcttattggagagcttaattcttttcatttaaaataattattgataggtaaggagttactactgccattttgtcagtttttctgactcttgtagtttctttgttccagtcttcctctctagccgtcttcctt

SEQ ID NO: 109215 - DNA, 268 bp, Homo sapiens
gggtcagttggaaatggggtactctgtggttcctacactacagttggtgactgacattggcctaggaattaagagttacagattcttttaaaaagaactagtgaatttaaccaactgtatttcaaattcatatttctaaatacattcctcctagaactttattttctttgtagctcatgtaattgccatcactaaatcattactggccatgcaagtccagctaaaaatttatataatggtaaaagtaatttttgcagacttactcttt

SEQ ID NO: 109216 - DNA, 707 bp, Homo sapiens
tagggaagtattttccagtttttttcatattaaaagctatgatggatacagttgtttttaaaccgtgttcagaaatcacaacatttaactaaggggtttctcccctggtgctcttctgtatgcaaatttgaggttatctaaattgtcagactctgggacacagggttgttttgtatttaagtaacattttgtatatgaaaaaaatctttgacagtaataaaaataagccgagaagtcattttttctgttaaaaaaccttacttgaaaaagagaatgaagaatcactaatttctgttttcacactttagtgatattctacttgcctttgatctgtagtagtgtgtttttgtatagtgctgtgttttctaatgtgctgacatactactggcgatttggtagatatttttagattatattcaggtgaacatttaaattataggaaatttaatgctgattaggaaaatgtataatctaatataccaaattggtggtttcataggtcttaatatttttccctttattgttgtacccacatgcaagtcttaatagtttagggttaataaaatgtttctaaaaaaatgagttgagattctgatacatgctacaacgtggatgaactttgtgaccattatgtacagtgacataaacgtgacacaaaaggacagttattctataatttcacttaaaatgttcctagaatagtccaa

SEQ ID NO: 109217 - DNA, 331 bp, Homo sapiens
ctggtgttttggaaattttcatatgcaaaactccttttgtgttaaaccaattaagtctatgattataacccattgttaaacattaacctactaattctgctcttctagtcctctattttaaaaattatagtcgtctttgcttaaacataaaataatgattttaaagtctgaatgttaaaaattaatttaatgtgtatggtctattgtatttaagccatatcctagtggtcatttacttttactagttcaaacactaacagtttaagacttgtgaagcatggttttgatattctccaggcttgacatatctcagtaggtgataaattaaaaa

SEQ ID NO: 109218 - DNA, 304 bp, Homo sapiens
gttcattagcaatagtggataataatattatgcgtcacgaatatttcatagccataacagtagcccttaagcatgaactttttcttaccttcctactcacaagtctttaacctatctttctgtatctttcttggtctcccagttctccctcctcctgcccacagttaagcttccacaagcctccaccttgactcagtcattctcaagatctagttctttttctgcctcctctatacatgcacgccctgtctttcagcagttccttctcttagcttccaaatgtgctgaagaaactccaacatgc

SEQ ID NO: 109219 - DNA, 387 bp, Homo sapiens
ctgtgctcctgtgtgtgtgttgggttggggttgtgagactctacggagctgtgttgggggatgtgaggctgggggcgacacggtacttgtgattgtccctgggtgtgtctttgtgaatgggtgtgtaaggttttgtgtgtgctgggcgtggtggctcacgcctgtaatcccagcactttgggaggccgaggtgggtggatcacgaggtcaggagatccagaccattctggctaatggtgaaatcccgtctctactaaaaaaacacaaaaaaaattagccgggcatggtggcgggcacctgtagtcccagctactcgggaggctgaggcaggagaatggtgtgaatctgggaggcggagtttgcaatgagccgagattgcgccactgc

SEQ ID NO: 109220 - DNA, 434 bp, Homo sapiens
atttctcttgtgtatatacctaggagtgcaattgctgggtcatagggatgatttgaagaatgtcaaaatattttccaaagtggctacacctttatattgccactagccatggatgaaggttcttgtttttccagatcttcaacacttgttatcatctgactttttaattctagccatcctagtggatgtgaagtaatatttcattgtagatttgatttgcaattccctgatgactaatgaagttgagcatcttatatgcttattggccatttgtatattgtctttggaagaatgttaattcagatcattttctaatttttaaattgtgttgtcttttaattattgagttgtacgtgttctttatgtattctagatacatctgttatcagatatttgatttgcaaatatattctgtcattctgtgtcttttcact

SEQ ID NO: 109221 - DNA, 311 bp, Homo sapiens
aggaaatgaaccaaaacttgggttccttgtatttggatttcaaacaaagaaggtcaccaagtgttggtctgcaaatgagctgtgtctgcagggcaattttatttttaaatgcaagatgacagagtgaaatttctatgtttgatcttagccaaaagtctgagaagtaatgtgaaatttctttattacaaaaaataaaccgggctctttgatctggaagtgctgcctttgttctataaaatgaatgtttgccggggctcggtcaaaggtggcattctgtgtgtcggcttcctaatctggctaagagaaacttt

SEQ ID NO: 109222 - DNA, 231 bp, Homo sapiens
acagagccactctcccgccccagctggccctgccccagcctgcaaggcaactcaatgcacttggcattgagagcagcctcagttccctagaatactctcattcttttggaggtctcctgagacaaaagtaaggcatgatggatacagagctgtgaagagatgaaagagagaatgaaaaagtgccaacagaagaggatgggtggggggtctccagcgcacccgggagcacct

SEQ ID NO: 109223 - DNA, 389 bp, Homo sapiens
aagcttctctgtcccctttcctgaggggaaacccctcgccggtgagccttccagccttgttcattgctagaactgccctagagatggttctagtttcacatcctcctttctttgtgctgataagtcgaactctttcttttctctttttttttttccttgccagcaggaaaaaccactgccagtcccaactgtggttccagtcacaaggatcctcctccaggcctcagagaaaaagaaatggttaacacggctttctgcaccatcccaattcagccaaacctgcagctatgacatcagtggtccactctgaacactagattcttcccactcaaaaactaaggccgggagcagtggctcacacttgtaatcccagcactttgtgaggccaa

SEQ ID NO: 109224 - DNA, 289 bp, Homo sapiens
gtggttacaatggaaagttacaacaggttctgttactgcaatggcatttcactgagaacaaagacttcactaaggagagaaaacttggaagcaagaagttgttctgggccaggcgtggtggctcacacctgtaatcccagcacttcgggaggccaaggcaggcagatgacctgaggtcagcagtttgagaccagcctggccagcatagtaaaaccccgtctctactaaaaatacaaaaattagccggcatggtggcacgtgcctgtaatcccagctactcaggaggctg

SEQ ID NO: 109225 - DNA, 467 bp, Homo sapiens
ttagtagtgactgggatttcgcatgtcggtcaggttggtctcgaactcctgacctcaggtgatgtacccgtcttggctcccaaagtgctgagattacaggcatgacgcactgactgggctgaaaaatttggcttttataatgcgtgtacctctctctctggagtggctaatttattggaagactgttgtagctcaacttccattatcttgaatggtctcagaaaatgcattatttccaggacgggactcagacttttctcgcataactgatttacaacattcaagacgtactttaaaggtggggtaatttgccgagtaacttcctatatatgcaagctcatatttcttctctggggaattgtgcataatgtagttgtaatacagtgcttcttaatgtttcttcccttatcttactggtgagatatgcttttaggggtcctgaaatcccctttaacctcatctctcag

SEQ ID NO: 109226 - DNA, 364 bp, Homo sapiens
atttaaaaaaaaaaaaaaggctgagatgggacaggggaaaaggagacaaccatccagagagcagagtgttcccagcagagggcagggggtgtacaaagacctgtagtgaaggtttggacctgcagacttgagtgttggtggatacatcattacctttatcaggggttgccaactgttttccaaagtggtctatccccattttgtccccagaggggtctttctaaagcacaaatctggtcaagatatccctcctacagcttcacagccccctcagaatcaagtctgaaccctttgctgagcatcctgtggccccacggagtctccagccctagtcccttgcctcttctttctccacaatgtgcat

SEQ ID NO: 109227 - DNA, 282 bp, Homo sapiens
aaacttgaaagattagaggaaaagttttctgtgatgaaataacattgctcagataatatttttatataggtcaagtgcagtgagttttagggatgccaccagggtagtgaattacgtgccatcatccaggctgaactttctttttactctgtccttctacattcttggcaaccattgttcattgcaggtgatgaaattaatatcttggtggagcacttgttagtttggtagtagagtaaaagtaaccccaaatttgagagctaggagctgtagatatgttcc

SEQ ID NO: 109228 - DNA, 692 bp, Homo sapiens
ctaggaggtgagtagaaatttttgccttccatcgttttaatgtagcaaagcaaaaaacagctgaaaagggtagttcacgaaactatcatagcatcttaggctctgatgtcagcctgggtttatgtctccactattccattctacataactagctggctcaatatataaccagtacaaatccttggtttgtccactgtaaatcagctttactttctagttcactgagtggttatcagaatcaatggaaatggtgtgtagaaagtgctcatcactatacctggtagctataagcttttaacaaaagatattttcattagttgtgatgatgataattattaaagctctggatgactaatgaactggctaaggttattgcattttaactctgcaaatgcatggaaaacactccccgtgactgggaatatcttaaatcagtgcgggacttgccatattctgatggctctttataacatgttaaggtggccttacctaatttcagatttcactcaagatctgttatgagaggctgggaggagacttttataaagctgtattcaaaagcaattatattattttcagtgtatttttaaaagattcagaaagaatgaattattttccagaagtaagatttttaaaaattcattgataatatataaggccgggcatggtggctcacgcctgtaatcccagaa

SEQ ID NO: 109229 - DNA, 228 bp, Homo sapiens
aaaaaaaggggatttagcaaatggcaattattactacttattttaagaagactgtgtctaaagataacaatttaacgtgcagctgcagagagtacatttacatatcattctgtgatatgtgacttttcatttagactaaataacttttaaattaaaatttcccattattttattatgaaaaattaaaaatatagcagagttaaaggaattttcccttgaacattctta

SEQ ID NO: 109230 - DNA, 186 bp, Homo sapiens
tgggcacggaggacatgtgttgggtgggtggagacccactgaccagtccgtttgacactgagtggttcatgtcacgtcctgtggacaggctgcaggggagtggtgtggctggcagctggtgtgggccgaggggctagtgtaccctttccacccctgtgcatctcctccgccttggcagtgggcgcg

SEQ ID NO: 109231 - DNA, 268 bp, Homo sapiens
  misc_feature (26)..(26): n is a, c, g, or t
tccttacgtgcgggctgggtgcgggngctggggtctgtatcttgggtcctcttctggatacatctagctctgctatgtttcttatgcatatagcacagtgtatgttatgacttcctactgcattgtggtttggcctagctgttaacatggtttacgcttttaagggtgacagtgttagggtgcacctagcagtttcgcctgcatccacacgagggcacatagaatcctattgctcatgagatacaatctgaccctccccttctttttt

SEQ ID NO: 109232 - DNA, 548 bp, Homo sapiens
agggagttctgaactgtgcattagcctattcgcagcaaacaggcaaacttgcaggaggctaggaggaacactcaaggtttgggttcagggggcagccagcctgcagtctgagcacttctagttgtgcagccgtgggcaagagactcaggagagctaaggactgatactgcctcctcccacaagcctggggtgaggagtaaatttgagataatgcaggtaatgcaacgcccagcacttgttaaacgttcagcaaatgttagctattatgattacaaccaaggagaaactggatggatgatagaggagttaaacagaaacagaaaaactgaggtttctattatagaaattagtcaagtcccctacaaatcttgggatttcctaaactgaatccttgagaagccagcagaggtgtcattcagtgctctggagggcaatagaaggataatcataataatggctcattgtgtacatattatttcccaggtgacattgtccatcatttggtaaaacaatgcacccagtttccatctccagcaagaacaggtacc

SEQ ID NO: 109233 - DNA, 454 bp, Homo sapiens
gcgaaatcccattgttaattggcctccaacttagataatgccctagaatgacatctatccaaaaggttatctagtgaggacaagggctcctgagtatttcaggtcccgagcagaatccagcttggaaagccagtccattacctggcccccgtagactgcaagctcacccagggccaaggctgcaagcaccatactaagtacttgaagcagtcctgaacaaaagtgtttttatctttgatttataaattaggacacagaggcgtggaatggctaactggcttgcttagagtcacaagtctgaagttaatccagggatatctggtgccacaagccaagctctttgcaggatgttcttctgccttcccaaagagtactggtccaggatgaggttcattttcctgacttggaatgctttgcattgtctccctccactgagccctcttcattgtgtctt

SEQ ID NO: 109234 - DNA, 251 bp, Homo sapiens
agatccatcatgtcatgctagcctaacttactactactgtctttcatttttccccctttttggcacactccaactattttctgttaaactagtgctgtcacaagaaaacatataaaaatgctcttttgcaaacacactgtttggttctctcctgaactctccagagctatggatttctctcactgtcttcatcaggggtgaatgttgacagatcactgaaccttactgtcggtggtgacaggcttgatgct

SEQ ID NO: 109235 - DNA, 291 bp, Homo sapiens
ccccaagagtttctgctgtgggattgtggacctgtgtaacaaggctttctgaaacatctagcaatgagtgacttgcttctactagatataaaaaaaccttctttcttggatgagagccaaggcagacccgcctctatcagtcacacatcccactgtgtggttcaaggtgagagagctcagacacccacacagggatttgcgtagtttctccagtggcagcttcagatgggaaatccgtgaagcatgggtgtcctggctgtcagtgtctttcacagagccacactgtgttct

SEQ ID NO: 109236 - DNA, 572 bp, Homo sapiens
atttcaccaagtttgtggctttgccaagcaagtgtgataaagcaagagggcagaggaactgagaatgtatgaaaaaaagtgataaaaactgagctcgaaatttaggtataatctcctctttcctctttactgaatcattttcatcaccataaaatcatgatatttctgtgtcttaggaaaaaaactttctcgctcccaattcagctactgtcccatttctctccttctgaaagcaaagacttgtttatgcacactgtcaacaagtcctcccttccaatcctctcttaaacacattccaatgagactttccccaccccactccaccaacaccattcttatcaacaactaatgatccccatgttactaaatccaattgtcaattctcagtcctcatcttatttgtcctatcagcagcatttgatacagctgaccacatcctcttcttggaaatgctttcttcatttggctatatactttgctttctcccaacctcactgaccacttctaagtttcctttaacggaatgcccagggcttagtcctttcttgtcctcttctaactacagtctcttc

SEQ ID NO: 109237 - DNA, 392 bp, Homo sapiens
tactatagaacatttcagggagttaacaaaaatgttgtatttcttgattttgtgatgtttgtggtacagtcaattttgaacaatttgtaatttgtttttatttctttttgcattctaaataaattttcacatttgtacctaatttggaatgtgtaactttgtatgttttttccttagagagagaccctaaccctcacccaagtggtataagcttcaaaggtggacccacacaactcagacccacctctgtacagagcttgcactgcactacattcctacatttcaaaaatgtcttaaatcacaggtcccagagcaagggaatccagaatacaaaattcattttccactttgcttagcacggcacaatcaaatgtatttaatgacaggacaag

SEQ ID NO: 109238 - DNA, 268 bp, Homo sapiens
ccagacactggcattcaacgtgattttgaagtgtgatagaccatgtatacacttgattgtgcaccaagaggcataaggtaaaatcttgtttccttcccacctgtaagtgttaagtgcatcagtctcctttctctactggtggtgtcctgttgctccactagtagcccctgatataaaacccgtgtcctccatagataattagtcatgaatccctttccagggcgtgttgttctctatgtggtgatttgaagggagaagttttgaaatg

SEQ ID NO: 109239 - DNA, 135 bp, Homo sapiens
ggcagattatgccaagtcagatgggagccctaatatctaagacctgcctgagaagacggagtgaggaccggtgatgaggacctctggggctgagaggtgggaaagctggagggatagaatacagcctctacccca

SEQ ID NO: 109240 - DNA, 831 bp, Homo sapiens
tgatggctagggctcaaggacctcatcagtgagggaagagacagtatagagcatggcagagaaggggaggctgggacaggtgtgcagggtgacagaatgggaagcaacccatggactgaggcatgaagaagcagccagcggagaagtccagaaggcactgtccctgagaccaggctgaaggagacctccactgtttgcctttgttgcctgccatttggggttcctctctgggtttccccctcacccagtcactccccagggagaaccatgccctccctttcccccatgtctggccacccccaggattgggcaggtagggaggttgggataaagtgagtcacacctttccctgcccccctcccatgttgccagagctggatttggggccggcagggggtgagggcatggtattcctggccgcgggggcgggggggggggtccgggggccgggggagcgtcgcgctgacggcagccagagcctgcgatgacggggctgctataaataacttcttggaggctcccacacccaagctcccctcccgctttcccactgctctctactcttcatcccctgcccatctccataccgcttttgtattgctatcctacccctcattattccatgcccctagccccctttatcttctgccctcctgcagtgatttttttgcattccatcccctcttagccctcacctcggttctcccggccatctctccagttggccttcctcctcttctcctgtcctctgtcttgctgcacatacctttgtctccccctttcttcttcttgccctacctcctcttcttccctagtccgtgtattctgtct

SEQ ID NO: 109241 - DNA, 279 bp, Homo sapiens
tgcacaccgacaatgttctacaacatccttcacaaatgcacatcgcatgtcttagtgacacaagcccgactcacagatttccagctttgtgcagctatgtgtggccgctcctcctcctcctcccaaagcttccttccccctttccaccacacagactaaggcatgaggctgggcagggggaagggggatactgagtgaggaaaacagagagggcggtggaggtggccacacagcatagctggtgtgctctttacagcaaggcttcagagcagcgctggt

SEQ ID NO: 109242 - DNA, 549 bp, Homo sapiens
cccaactttattgttaacagcctatatcaagatagtattcccacgtggcttagctcctgtcatgcccccctccccccaacagcttctttcttttcagtgatcttgttttgttacttctttcattatttggatgttgacaccatttattttgcccacatctctctatgcccaaagaattgttcctttgtttttttattttaaattccatcaacctattcaaatttataaaaacaaacaaacatcttgcaattatctccttagtggtctttgatttcaagatttttattttctctagttcatcacacagaagggtgtccttaatgtgtaaactggatcacctaagtttcttactcaataactttccctatttaaaaaaatcaactctatgctgccattctagacttcttatattctacttgatatacatcatcccacatttcctaaagcatagcctataagaaattgtttatatcataagggtcattaatggcttgtggtcaaggaaatttgtaaaatgatgagttgaaggaaagttaacatctgaatata

SEQ ID NO: 109243 - DNA, 520 bp, Homo sapiens
atctgtgagacaagagttgtcctgagttgcttgggtttggggcttgtccctgagcctgggggaggtggacctgctgggcagggctgcactgagatgaggccagcaggacagagcttcatgcccagaggccaaacttcagggactttgcaaataagactttgcctctgggcaaacacagctccaatcagctttttgctcaatacctaccatgattcctacaactcaataataaaaagacaaataaaccaattaaaaaatggccaaagaaactgagcagacatttagaatagagaaagaatgtataaaaatggccaataaatgtgactagggggcggtatctcacggctgtgatctcggcactttgtgaggccaaggcaggaggatcgcttgaggccaggagtttaagaccagcctggacaacatggcgagaccttgtctctacttaaaaaaaaaaaattagccagggatggtggtgtacacctgtagttcccagctacttgggaggctgaggtgggagaat

SEQ ID NO: 109244 - DNA, 197 bp, Homo sapiens
aagctggaaaaattagaaaatactatacataacttgaggattcaactcaattttaaaaattttctttgtactgacatttgccattctgtttattttttgaatatatgtgcctctccctactcactttatatgaaataatgtagtaggctgatggttggggtgggagagatgaaccactttttcatgttcacacctgc

SEQ ID NO: 109245 - DNA, 312 bp, Homo sapiens
ggcccagcactccctgcccctggtagctgagggcatctcaagggtcagacagggcgctggccatccctacacaacagaaccaggctcccagtccctcaccacactcttgggataaacccagcagagcccatgccagccctccctgggtgagaagcactcattttagagaaaatctcttttctaggctgggcgcggtggctcacatctgtaatcccagcacttcgggaggccgaagcgggcagatcacttgaggtcaagagtttgagaccagcctggccaacatgacaaaaccctgtctctattaaaaataca

SEQ ID NO: 109246 - DNA, 473 bp, Homo sapiens
cactatattggtcaggctggtctcaaactcctggcttcaactgatctgcctgccttggcctcctaaagtgctgggattacaggcgtgacccactttgtccaaccagtacttacttgctttttatttcttgtataattttaccacatatatatgtatcccaaaagaacatagttgagttttgactgtttttgatcctaaataaatggaataatagattattttatgactgtttcttaattactcagtatcatatctgtgagactcaaccaattggatacaagtagttgtactttagtaattttctttgttgtatagtagtgtctgaaatgaatacatcaaaatatacttacacattctattccattttatttggattacttccagtattaggctaaacattgttgctacaaacattcataaacatgtctctgatacctatctgccaaggtttttttaaggcagatgctggtaaa

SEQ ID NO: 109247 - DNA, 521 bp, Homo sapiens
acaaatggaattaaccccccatacacaacatcgcatggtgttgtgaatgtaacgaaaatattttttaaaaaaagaaaagaaagagttgcatgaaagtaatctgttatccaattaattgcagctaaaaagtatggccctgcaataaggcggagactctgggagaaccccatagctcagccatggcaaatgaactaattttaccttttggccacatctgattttgcctcatttgcaagatacagtcataatgagaaatatgaattaaagcaaaatgtctaatttattgtcgtgattcatgtggcagattagtaactagggaaatatagagttcaacggaatgttgtgcttcaaaacctacatttattcataggtaactaatcattttacaaaagtattcttcaagtcacttcagaatttatctataatgcaaaatatttttatatgatgtttcccaatttttttatgtcaaaaattttccgccgggtgtggtggctgacgcctgtaatcccagcactttggga

SEQ ID NO: 109248 - DNA, 407 bp, Homo sapiens
aacagaggtttgataaagtaacagtatataaaacaataatttatattatgtaggaaaattactttggatgactttcttagatataagatgaattgcactgaaatatttgagtagaaaataaaatgctttactaatggagtgatcaattgctgaaaattttattttctataaaacttgatcttcagttataatgtactttagggaccttaaatttaactttagctgattttatcatttcaccttgaaattttagatgccaatttgcagggcccaccattcccataataataatctctgttgcctgcccaaagtgggtaccatatggtgggggaatggaggctagtggaataaagtaaaatcagctgtggactgaatggttgctcgtttatctttgagtctttattcac

SEQ ID NO: 109249 - DNA, 364 bp, Homo sapiens
aagaatgatgtttatactaaactccagtttgctgttatcaaaaatatggcctatcccataagtcaggaaaatacattatttaaaaaaaaactatttatatcaaatgcaatttgctgtatgggaaaagtcttttttccaatctttatcatttctgaatgtatagtgctgactgtggaaacagagaatggtgtgacaccccaggatagagccccaggaaggaagatcttaatcaacgttacactctctgtgaaagatttaaaacccagaaatacaatacatttttttcttccttccttgctctctattttttttttccatttctaggcattctgtatttttcagcaagggtggttgtgtttcgaag

SEQ ID NO: 109250 - DNA, 376 bp, Homo sapiens
ccccagagtccaaacagcgcccagagcaagcgaattgtgggccagattatcccagccattgccaccactacagcagctgtggcaggcctgttgggcctggagctgtataaggtggtgagtgggccacggcctcgcagtgccttgcccaaacccctacagctaagaagtgacagaaatgggacacaaatccaggcctatgtgacttgaggcctttttggacaaaactcccccacctcacgaagcttccttctcctcatctggaaaacgaggatagtaacagtacctattccatagggttgttgtgataagtgacatagtacacacatagagttaggtttcagtagctagcacacaagaatggatcaataaatgttag

SEQ ID NO: 109251 - DNA, 377 bp, Homo sapiens
gcactaaggtgggtgttaggtgaggaaatacactaaagcaaattatcattctaaaatgctcagtcctaaatggacaagtcactttgtaatactgggccaggttcggcagtaagtagaggctttggtagcaaaaacgaactgggttcaatcttggctctgccacccattcctggacaaaatacttaactctctccatcttccaaatgtgacctacaccttacaggactgccaggagaattaaggaagcacatacacagtgcctgacacacaagtgagtaaacaccttaaactatgtttagccacagaaccagagtggttggagggagagatttaggaacttccctgggagtaaacagatttcataactgattctattt

SEQ ID NO: 109252 - DNA, 634 bp, Homo sapiens
caccagcccgggtcgcacacagctcacacccagaacacacagctcacacccgggacacacagcttacacgcgggaaacacagctcacacccgggacacacagctcacacccggaacacagagctcacacccgggacacacagctcatacgcaggacacactcagctcacacctgatacaaggacagctcacagtggaacacacagctcacacccgggatacagctcacacccaggacacactcagctcacactggaacacacagctcacacccagaacacagaactcacatctgggacacacacagctcacacccgagacacacaccctcacacccagctgacactaaaaccaagccctgggcaccagagctgaccacagaggcaggcagggctctcgtgagagcacagctcacaccagggacatgctcagttcacacctgggacaggcacaacgcataactgagacacagctcacacctgggacacagagcccaccccagcgcctgctcagctgagcatctcccagccgacctcggggcctgggctcaggtcttgctgaggacccagcacacacggtggtcacagtcaggggtccacacgccctgtcctccgtcctccccacagcccagcagg

SEQ ID NO: 109253 - DNA, 518 bp, Homo sapiens
acttccggaggctgaggcggacagctcacctgaggtcaggagtttgagaccagcctggccaacatgatgaaaccccatctctactaaaaatacaaaaattagccgggcgtgggggtataagcctgtagtcccagctaccagggaagctgaggatgcaccgagcatccactgtactccagcctggacgatggattctctctcaaaaaataaacaaaacaaaacaaacaagcaaaaaaaaatacctagtgtttggaagacaaagcttgggacttctataagttacttctataagtaacttgactgggtgtatttctcaccaagacccctggaagctagacccattgtttgttataagaaataattgacccttacagggcatgtggtctcaaagtagttaatacactcacttgtgtggcctttttccaggctatcaccttggagctctgctgctgaggactcctgctgaacacacatgcctgatgctgccttactagcatactttttctcatcttgcaatt

SEQ ID NO: 109254 - DNA, 217 bp, Homo sapiens
ggtcgaccttccaggggtcttggtgagaaatacacccagtcaagttacttatagaaataattgacccttacagggcatgtggtctcaaagtagttaatacactcacttgtgtggcctttttccaggctatcaccttggagctctgctgctgaggactcctgctgaacacacatgcctgatgctgccttactagcatactttttctcatcttgcaatt

SEQ ID NO: 109255 - DNA, 520 bp, Homo sapiens
gtcgcagtctaattcctctataatggaaatgcttataggcggcgacagcctatgcctccattcccattttatagactgtgcacagcgactacctatcgacaggaccaatttaagagtttcatgtatacagtgtgatggtgcttgtaaatgacatacagcacagtacaaaaattttaagcctaactactgctaatagtcactctgtgacttttcctgtgatgtttatataaggaatcttattaccttcaaacactatttcatagatttagaaaaaccaacataggatacttcaggactaccacgtatgggctcacttaactaccattacacatttctttcaaccttttaatcttcttgttaacaagctccctgatatatattagtacattttatgtctgagtatacagggcaaaatggtgctagatatgtttcacggtgactgtcactcgtaactcctcctaagggaaagtacccagccttctggaccaggggaagttttttgttaacagtgagatctctt

SEQ ID NO: 109256 - DNA, 273 bp, Homo sapiens
tgacagcacccctatggagaaggtccatgcagacatttgtacaggacacacacaggaactaactcagctgtagataaaacaagtgaattttgttctgaactgaagatggtgaccacttgagatccagatgctcagtatcttcttatatctccattaaaaagtaattaatatattttttattaattcgattttaattagatttgtgaaaaattgattcaaataaattcctcttgtccatggtacagaccagctttagcagacagcaactgtatg

SEQ ID NO: 109257 - DNA, 429 bp, Homo sapiens
ttttttcctgctccttcacttcttaaaccttttaataagttgcatgtggtttttcttgccctaaagtttaagtcttaaattgaccagcaatttaggagccttacattgtttctcaaagaagttgagactggttatgatttttaagaagatttactgaaaaacttttagtgtcagatattggttcattgtcagatccaggagcatttggcctggcattatgactttatcttttttggtacattttattcccttttccatctttaaaactagcagttaggtcttccagcttcttaacttatgttttggcctgtaaaacttctttctaggatattctttatggtgctgccagtttatctttcaaatatcgatttcattatgtctacttccctattaaaaaacttttgatggatttcctgttgcctggagagt

SEQ ID NO: 109258 - DNA, 702 bp, Homo sapiens
taagtgatcttcagcagtaggacattagatatatagatatatccagttttcaattatgaactgttatgctaagtatttttatgtagctttttatacacaattcctatttttgtatggtgaagggaatgggattttaattcttatattgaatgtaccttgcaactatacttctgttttatcttagatattatcaaatgatatatttaaatatttatcttggtaaataaatacttgataagttaggtcacttttgtcacaaacaaaatttttaattttttattctatttctacataggtcagttgtagttgtaatgaaggaatcataattcctcaaatctaaaaattagaaagatggaaactgatatttcttcacatttaatagtttgattatacatcttatgattaatgttagtattatctgagacaaatatttcactgtcctttatgtaaagttctttatgtacattgtccactatgacaaaatatgtctcttaatttaggtcttggggaatgaacacttgtttttaatattagcctatcagagtaagcactttaattggattagctcatttaattctcataacattgcatgaactataggtagcattttatcctattttatacatgaggaattctgactcatagagtcctcatgtgtcatagagtcctttgtagagctgcaaagtataggcagtaatatag

SEQ ID NO: 109259 - DNA, 369 bp, Homo sapiens
agactctatctcaaaaaaaaaaaggaagagtcccgggtgcggtggctcacacctgtaatcccagcactttgggaggcagaagtgggtggatcacctaaggtcgggagttcgagaccaggctgatcaacatggtgaaacccatctctgccaaaaatacaaaattagggcgtggtggtgcatgcctgtaatgctagctacttgggaggctgaggcactaaaatcacttgaacccaggaggtggaggttgcaatgagccaaggttgtgccattgcacttcatcctgagcaacaagagcgaaactccatctcaagtaaattaattaaattcttcctcttttctgagcatcgctataggctttaattataggtt

SEQ ID NO: 109260 - DNA, 801 bp, Homo sapiens
gtcatggacagttcagacagcacgaggcagttcagaaaggaccagggagctgctttgcagttccataggatggtgaaaatgtcccttgaagatacctcagaccaggcaggcttctgacttggaggagttctaagaaaaccatacaatcttttttggtttgctatcaggtcgcagaaatgtgttagagaacagccttccttccctgtgatccaccctgcattgtttgattttagggttgagtgacatgacatatgtgaggatgtagtgagacatacagtcatgactcattatgtttggataatgtaatttcattccggactcaccctcaaagaagtttcattataaatagctgttcattagcaattttaaatatttacatttatgcatgtcatcaacaaaaggctctgaaacacaagaaaatgaatttacgattgatacgtgattccttcaagtcctactttatctttgttacggtgttggtgaataagtaataactgggcaagtacataaataatgtagggaagatagcatgatttagtttttgcactgagggggcttctgtttggatggagcatgaaccttgtggaatactgtgcatgagtagtcctggggctgcaacgaggtaaagagaaatcttttagggattcagccgcctgaaagatcagttccagaagccaggcacagtggcttatgcctgtaatctcagcactttgggaggcctgaggcgagcgaatttcttgagcccaggagtttgagaccagcctgggcagcacagcacaacccgatctctgcaaaaaaaaa

SEQ ID NO: 109261 - DNA, 328 bp, Homo sapiens
aatctgtggcctctggtgctgtgatttaaagactaaagatggcaaagagtggcttttatgagctgccccactcctgattataaacacactctctatgagtcagaggcctgggtgatcatggataagtcacttgccaacagttaactccagactgtagctgctggggccaccgagggcggctggaacatcaccattctgtgcctagcgtttcagccgggctgaggccattttattaataatgatttattgtttttattgcttcccagagatattaaacatgaatcaaataatgcatgtgatgattcactggaggttcccttccaaattt

SEQ ID NO: 109262 - DNA, 112 bp, Homo sapiens
tgaactagcatctagggcacagaaagatagagggtgatcacttaaaggatcattggctgaatgtggcggctcatgtctgtaatcccaacactatgggaggctgagttgggaa

SEQ ID NO: 109263 - DNA, 285 bp, Homo sapiens
gagagaggaccattttggtcccacacctgacacacagcacacctgtgacatccaagagcttcttggaactgacttgccaggagggttcggacttcgcgtgagcgggggtggggccttctcagggagcgtcccttgactccagaacgcccttgctggcggctggcggctgggtggggataggtgttgttagctcctctttcctgctgcaattcctttccacagagccctggactcaaactacacatcaccccagatcatcgaggcctggaaatctgctcccagagg

SEQ ID NO: 109264 - DNA, 557 bp, Homo sapiens
cagaactttagtttatccagtgggggtgtgtgttcaggagaggaggatctccctttcccacttcagcagttggggcactcacagtatttggggtatctcctgggtcctgcaagagcagtctacttccctcagagggtttgtggctcctctcaggattgctagcttgttcttgcagttgatcttagctaaaattcataatgcgagcctctgcacgctgctcagccctgagctgcaatcaatctagtcctgcctctcatctgccatgatgatcctccttccaaataaatattaaaaaataaaaacaaactgtaatctgaccgccttgggcacagtttctcaagactccttgagactatttttccaagtcacagtcactcatgttggttcagaataaacctcttccaaaatattttacaaagtttagtttttccattaacaagtagaaactgtccttttatacgcttagattcaacaaagtatggatggctatgtagaaataggattgggcaaaagggtataatccaatgttaatagacgaagtggggaaacccagcaag

SEQ ID NO: 109265 - DNA, 423 bp, Homo sapiens
gtacacgtgagacatgctagtatactacctttgacgtaggtaaacgtgtatgttttttttggagagagagggacttgctatgtcacccaggctggtctcaaactcctgggctcaagcaatcctcctccctcagcctcctgaatagctgggactacaggcctgtgccatcatacccggctaatttttgtgttttttttggagagagagggacttgctatgtcacccaggctggtctcaaactcctgggctcaagcaatcaacccacctcggcctccaaagtactgggattacaggtgtgagccactgtaccggcctcctttaaggagttgtaatcacaaagtgcttatctttgtatttcataatgctgggacagacagaaaagagacaaattagagagagtgggactgcaggaggtggtagagg

SEQ ID NO: 109266 - DNA, 396 bp, Homo sapiens
actggactactctaaaaacaaaatacaggttattaaaataataatatagaaataaaataaaataaaaaagtaaagaaaaagcaagttactgctccactcccaacctcctgagccttggaaatatgaatttttgccaagagcccaggtggttcctaagcacaccaagtttgttctctgtccatccttcctccaacctgctgccacaattctctcaacgggaggatttcatcccaactgccactacaattacctgacaagctttgagaaacagtgaccactggccccaccccaccagtgatgagcatcagtgtgggagggggcagggagccacagtgttaaaaactcccaggtgactggaagaagcatacagtctcagagccagggcccactcccaaa

SEQ ID NO: 109267 - DNA, 778 bp, Homo sapiens
cattttcttgtaataaatgcgttcccacctctcaaaactcgattgtgcctagctattagcaggccagctctgtagtcagttccaggctggaaaatttcgctttttgtcattctctggcatggtgaattgttcaggaatatctgttagctggtgttctttctctagaaatgggcagatctttctgataatattcttatcccttctataaatcttttgtagacatagggttatgaaaccctgtaattcacatgtacctccctttaaagcatagacttttttcaaagttgtggtaaggtaacttttgggaacccatatgtgataaaataaaaaatatgtgtttggtccccagtttcttgtacacaggtcctaaagcccttggaatctccggagtgataggagtgtcttttgtttaccaatgggatgactggtggctggaggcccccagacagcttcagaatgggggctggtcaccagaaagacgaaggcacgattagaggattgggaatttcggccccaccactggggaagagagaggggctgaagattgagctaatcaccagcgggcaatgatttaatcagtcatacctaggttatgaatcctctggagaacttccagtttggtgaacatgttgaggtgctgggaaggtggcgtatccggagagggcacggaagctccacacacctgtctcctcctttcttgccccatgtgccttttccgtctggctttcctgagttgtatcctttataataaaccaataaatataagtcaagtgttgcc

SEQ ID NO: 109268 - DNA, 327 bp, Homo sapiens
gcatctatatttagaaatgagattgggctttaattttttccttcatataccatccttatctgatttgccatcagaattgttatactttgtaaaatgaggtgggcagtgttccctcattttatattcactggaacagtttgttttagataatgattatctgttcttcgaagtctgggtatgactggtaaaccttctgggtttaatgggttttatttttatcttaatttaattttattttttttagtatggagggtagattttaaaactcccaattcaagttataaatctaacccaaaaaatgtatttcttcttgagtagttctgttag

SEQ ID NO: 109269 - DNA, 664 bp, Homo sapiens
gggccatcctaatacttccatccttgtgtgatgggactgttggcccccagtgcaggaattaccctctgcccccattacattttatctttttaaaattagcctattccaatctgagattgttttggatcctgatttgtgtcagccaaggaatttattcccttgccgtttcttgtcaactattgtctgattaagatatgatgtgtcactcatgtaagtagactagtagataaaatatatttgcaacaaggaaagaaaactctgaaagcttcttaaattataaattgtttttaaatgtaaagttttattttctttgatcgatggtactttttcaatttttttctcgaatgtgttccatttttttcttgaatgtcttcataactttgtcttcattgaatcataagcctgagaaggactttgaacttttctgacccaaatttacaccattccaggctgttgaagctctcagggaacaccatctatgataagaggacccttggggcacttagaaaagttggtggagtcttccactttttaaaatctaaacgaggagccaggtggccagaattccaccttgcagttcttgcagttctgccagaaataagattggaggtattgagaattcatttcatctcttcagccaaatgaaactctcaaagactcttcc

SEQ ID NO: 109270 - DNA, 343 bp, Homo sapiens
cctccccacactccaactccactcccttctagttgttttcctgaggtaacggaaaaccttttaaagcaaaaaaggaactatgtccatgtttccaggccagcaagatagggaaagtgagaaagactaataaaagagtagtaggctgggcatggtggctcacacctgtaatcccagcactttgggaggcggaggcgggctggtcacctgaggtcaggagtttaagactagcctggccaacatggcgaaaccctatctctactaaaaatacaaaaattagccagatgtgggggcacgtgcctgtagtcctacccactggagaagctgaggcacgagaattgtttga

SEQ ID NO: 109271 - DNA, 1272 bp, Homo sapiens
cagagaattcacactggagaaaaactttacaaatgtaaagcgtgtagcaaatgttttactcattcttcaaatcttcttgtgcatcagagaattcatactggagagaaaccttacaaatgtaaagaatgtggtaaatcatttaaagtgtcttcagcccttactcagcatgagagaattcatactggagagaaaccctataaatgtaaggaatgcagcaaagcctttaactgtagttcatcccttactaaacatcagagaattcatactggagtaaaactttacaaatgtaaagcatgtagcaaatctttctctcattcctcatgtctttctgtgcatcagataactcatactggaatgaaaccatatatatgtaaggattgtggcatctcctttaaccggtcttcaaaccttagacgacatcagatgattcatactggagagaaaccctacaaatgtaaagaatgtggcaaattatttaatcgatgctcaacccttactcgacataaaagtattcatactagagaatttctatagttgtagtaaatgtgaaaagagttttatccaaaatttagaacttaaaaatcaccatagagtttatagggaaaccgactttacagattgaataaatgggaggaagtatttaatcagaactcaaatctgaatgtgtcaggacttacacaaaaaaggactaaagcacagatccccactttaaaattaaataagagtatttgttatggaggattactctaaagccaaagcagttacttattttgttatgtgtttcaaatgagcaaaagcattgatgtttggacaagtaattattcagtgagcatgttatttgtattgaaaacatttgaaatttgtataaagcaaatcataatttaattctcagattagttgttataccttaatgcctagtgtttatataaaaacatatagtctattttttctgcatcagagctgtaagaggtcgttctatagtaggtgaacatcattaatatcaacttattttcatggaaatttaatggcaaatgtaaaatacatgaagaaaatctaaaagaggctctttgtgtttgaatcattaaacagtaatatgtgtaaacatatagtacatatttagggcattagtattctatactaaagtaaaagaggaatattctgaatttatttattacatcaattgctccttaagtagaaaaacactggtcagttatttaaaatactggcatacctttatagtacaatgaagtagtaatcttgaatattatttga

SEQ ID NO: 109272 - DNA, 460 bp, Homo sapiens
ctcaaaagaatatttaatatattttaattatgcttccccaaaatcttttttacttttgtttggtaaaatattaatatgttaatattttatattactgttatgaaaataaagccaattctgtttgagttgacaattatgaattgtgtcatataaacttttctctaactctcttactgcttatccctactcatacttgtctttggaaataagcttaaaaattacacagggtacatcttagatagcaacgcccaataggaggcatgtacatgtgtgtttagctgcctggctagctgggtagcaaactatgtagattggggaaatggagaaaggaagggtgtttaatgtttaggcagaatatttctgttctgagaacatacagataattttgttgaggataaaactgtgtatatgtgtgtgtatatatgtatgttttctaataataaaaagataaatattgttt

SEQ ID NO: 109273 - DNA, 781 bp, Homo sapiens
gggcacttaccatgaatggagcttgcaggactggaagttgctctgggcaagtcagtgagtgagtggtgaccgaatgtgaaggcctagaaaattcctctacactactgtagactttataaaccctgtacacttaggctacaccacatttgtttaaaaattgattgcactatgacatgacgtcactagatgacagtaatgtttcagcttcattattatcttatgggaccactgtcatctatgtggcccgtcattgaccaagatgttgttctgtggcgcatgaccataatcggaggggagagcaccattagggacgatatcttacatttgttttgctcaggtggccccctgtgggcctttcatgtgatggtcaccaggcctcaatattcaaaaccactcgtcttgagagcaactgaggtcatatgatggaggtagtaatacttttgacgtatgtccacttttccgctcactgttgcttcacaagttagagtaaagccttgttgttaagtcactgagaagcgcttggactttgctttccttttgatgtatttaatcattttaaacataagaatcctcatctcttccccactgcactgctgcccccatgaccccagcatgctagaactgcttcattgctcctaaatttgtagcccatttaaattcaagcatctgttctggcactgtaacacaaggccatgccatgtctatccgcaccaccccaccctacacacacacccttgtgccgtgcctgtcatatcatcaagtgtcttgagattaaagttgg

SEQ ID NO: 109274 - DNA, 916 bp, Homo sapiens
gggcacttaccatgaatggagcttgcaggactggaagttgctctgggcaagtcagtgagtgagtggtgaccgaatgtgaaggcctagaaaattcctctacactactgtagactttataaaccctgtacacttaggctacaccacatttgtttaaaaattgattgcactatgacatgacgtcactagatgacagtaatgtttcagcttcattattatcttatgggaccactgtcatctatgtggcccgtcattgaccaagatgttgttctgtggcgcatgaccataatcggaggggagagcaccattagggacgatatcttacatttgttttgctcaggtggccccctgtgggcctttcatgtgatggtcaccaggcctcaatattcaaaaccactcgtcttgagagcaactgaggtcatatgatggaggtagtaatacttttgacgtatgtccacttttccgctcactgttgcttcacaagttagagtaaagccttgttgttaagtcactgagaagcgcttggactttgctttccttttgatgtatttaatcattttaaacataagaatgagaagagatatctgtgtgaggcccaaaatgagggaaatcggggaaggcttcatgataccagatcatgccatgagaaggctagatgttagcacatctctgagggcgttaatgtgtgaaatacccaccagggcagtcctcagtgagttgtcctcagctgaaatggagcccacaggaaacaggattctaaattctccgggtaaccaccctaccctctagacctgtgctgtccaatattgtagccgctcatcacatacagctactgggcacttgaaatatggctcatgcaaattgagatgtgctgtaagtgtaagatacacaccagattccaaagacttagtacaaaaaa

SEQ ID NO: 109275 - DNA, 462 bp, Homo sapiens
ttgtatccagaaactcaacaaataaaagacaaataacccaattaaaaaatggcaatggatctaaatacgcgtttcttccagggagatatacaaagagccaataagtatgggaaaaaatattcagtatcattaacccacaggaaaatgtgactataaccatagtgagatactgcctcacacccgctaagatgactggaattaaaaatgacaactgtaacaaggagagtatatgaagaaatcagaacacatgtacaccgttggtggaaatgaaaaacagtgtagccagtgtggcagttcctcaaatgattaaacatagagttactatatgtttttgaggatgcaccaaatacaaatgaaaaacatatgtccaaacaaaaatgtgtgttcatggatgtttctagcagtattatttataataaccaaaatgtaaaaacaaccccaaaactcatcaattgataaatg

SEQ ID NO: 109276 - DNA, 601 bp, Homo sapiens
aaattcacatttattcattctttccaaaaaggggattcctgagacaagtcataggcatacccagaacaaaagtagcaatatgacatttttaaacattaggacctcaaatagatgctgtaaagttttatacctatgcctcaagtatagtacccacaaattctgcctgaaaatatttgtagacatatagaagggaaaaatcaagttggtgcaaagttgaaaattaaattttaccatgcccaggtgctttcctaatccttactagaattttctatggcttaccccatccgggaggtgaggggcgcctctgcccggccgcccctactgggaagtgaggagcccctctgtccggccaccaccccgtctgggaggtgtacccaacagctcattgagaacgggccatgatgacaatggcagttttgtggaatagaaaggggggaaaggtggggaaaagattgagaaatcggatggttgccgtgtctgtgtagaaagaggtagacatgggagacttttcattttgttctgtactaagaaaaattcttctgccttgggatcctgttgatctgtgaccttacccccaaccctgtgctctctgaaacatgtg

SEQ ID NO: 109277 - DNA, 380 bp, Homo sapiens
tactttcatggaggatatttttccatatgaaaatcaccatgatcaaaagctcacaaaggactattatccagatactaattaaataagaatataaataggagacttgcctctgtaaatattgtcaaacaagactgagtaacgtaatctggatacttgcattaacatttgattttattctgttttccatatctaagtggaactgttttattatatatgaaacagtgtttttatcaaaattcttttgtcccatccagtaataaatgtcttgtataagattcaataaggaatcctcctttatcaagcctcagaagacattcctgctttcaaacttccagatacttaaaatgacaacaacaacaataaaaacaaaataaaacttc

SEQ ID NO: 109278 - DNA, 691 bp, Homo sapiens
tggatgccagtgagcggctgacagctgaagctccctggacactcaaggctcttgtggtgacaggtgaggggactgggtggaaggacagtgctctgagcatgcaccttccttgggatctggaggctgggctgttttttatgcttggcacttatgccacctcagcaacctaaaaacttacaataaagctggagggagcctttcctgaaacttgtgcttggtcacaggatttctgcgatgtatggtccctggagaagcaccaaagggttgggcatgtggcctgcctgaggtaggtactctctcaatgcaccaagaagctgagagagccagaaaaaggaaacagagggaagagtggtgggtagttcatctatcagggctttatagaaggtattttattcaatcttcgaaacaactctagaaggcaggttttcttctcccctgttctatagatgaagaagtggaggctcagagaggttaagtgacatgcccaaggtcacacagctagaaaggcatggagccagattccaatgcaggtctttctcatgctaccttctcccagtggcagaggcctgcttcctcatgggcaaacgcggaaagacacacccttaagcaggtctccctgttcctgcaaggctgggagccatgcaggcactcacgtggtttcctctctcttccccaggcctggcgtaaaggc

SEQ ID NO: 109279 - DNA, 433 bp, Homo sapiens
gctaaaccaattaaatagacaaaaatgactcaaatatcctccaaaagaggtagtaagacatcaaatataaaggctgaacactcactaatgctaacaatgaagaataaacagccaacattttgtctatttatactttaatttttaattatagctgtgtatttgtttaagaaagaatgtctgcctgcttgtatttcccaagaaatgctcacattttataagtctcataatacatatcaagatgttcaatttatccaatacttttatgtaatatcaaggcaaaaattctgaactaaacttaaaattctatttaatcctggccaggcatggtggcttatgcctataatcccagcactttgagaggctgaggcacgaggaatgcttgagcttaggaattccagaccagcctgggcaaatagtgagacattgtctctta

SEQ ID NO: 109280 - DNA, 1061 bp, Homo sapiens
cggtacctgggccgccagggagccgggggtgggctctccggggacagccggcagcgcccccagatctgcaccgccagccgccgggagctccgggctccgggcgtagaggctgcgctgtcacatgggcggcggcgacggggccgcatttaagcggccgggggacggcgcccgcctccagcgcgtcctcgggcttggctcccgccgggagccccgttctctgcccgccgggggccccgcgccgcgccgcaccgcgccgcccccgccgggccatgcgagcgcgggccccgccgcgatgagctcgcacatcgccaaaagcgagtccaagacgtcgctgctgaaggcggcggcggcggcggcgagcgggggcagccgggctccccgccacggccctgcccgggacccgggggctgcctagccgccggctacccggctcctgcccggcgacgccgcagtcgtccggggaccccagttcgcggaggcccctgtgccggccggcgccgcgagaggagggcgcgcgggggagccagcgtgtgctcccccaggcgcactgcaggccccgggaggcgctgccggccgcggcgtcccgaccttcgccgtcgtcgccgctgccgccggcccgcgggcgggatggggaggaacggggactgtccccggcgctcggcctccggggctctctgcgagcccggggccgcggggactccgttccagccgccgcgtccgaggcggacccgttcctccaccggctgcgccccatgctcagctccgcctttggccaggatagatcactgcgaccagaggaaattgaagagctccgagaggccttcagagaattcgacaaggacaaggatggctacatcaactgccgggatctgggcaactgcatgcgcaccatgggctacatgcccaccgagatggagctcatcgaactgtcccagcagatcaacatgaacctgggtggccatgtagattttgatgacttcgtggagctaatggggcctaaactcctggcagagacagcagatatgattggtgtaaaggaactgcgagatgctttccgagag

SEQ ID NO: 109281 - DNA, 3163 bp, Homo sapiens
  misc_feature (2471)..(2471): n is a, c, g, or t
  misc_feature (2899)..(2900): n is a, c, g, or t
  misc_feature (2906)..(2906): n is a, c, g, or t
  misc_feature (2950)..(2950): n is a, c, g, or t
  misc_feature (2990)..(2991): n is a, c, g, or t
  misc_feature (2996)..(2996): n is a, c, g, or t
  misc_feature (3001)..(3002): n is a, c, g, or t
  misc_feature (3162)..(3162): n is a, c, g, or t
cgaggctcctcctctgtggatggtcactgcccctccaccaggcttcctgctggaggagtttccttcccagccaggccggcccagaagccagatggtcccgggacaggcccagccccagagcccagagatgctgctgctgcccctgctgctgcccgtgctgggggcggggtccctgaacaaggatcccagttacagtcttcaagtgcagaggcaggtgccggtgccggagggcctgtgtgtcatcgtgtcttgcaacctctcctacccccgggatggctgggacgagtctactgctgcttatggctactggttcaaaggacggaccagcccaaagacgggtgctcctgtggccactaacaaccagagtcgagaggtggaaatgagcacccgggaccgattccagctcactggggatcccggcaaagggagctgctccttggtgatcagagacgcgcagagggaggatgaggcatggtacttctttcgggtggagagaggaagccgtgtgagacatagtttcctgagcaatgcgttctttctaaaagtaacagccctgactaagaagcctgatgtctacatccccgagaccctggagcccgggcagccggtgacggtcatctgtgtgtttaactgggctttcaagaaatgtccagccccttctttctcctggacgggggctgccctctcccctagaagaaccagaccaagcacctcccacttctcagtgctcagcttcacgcccagcccccaggaccacgacaccgacctcacctgccatgtggacttctccagaaagggtgtgagcgcacagaggaccgtccgactccgtgtggcctatgcccccaaagaccttattatcagcatttcacatgacaacacgtcagccctggaactccagggaaacgtcatatatctggaagttcagaaaggccagttcctgcggctcctctgtgctgctgacagccagccccctgccacgctgagctgggtcctgcaggacagagtcctctcctcgtcccacccctggggccccagaaccctggggctggagctgcgtggggtaagggccggggattcagggcgctacacctgccgagcggagaacaggcttggctcccagcagcaagccctggacctctctgtgcagtatcctccagagaacctgagagtgatggtttcccaagcaaacaggacagtcctggaaaacctcgggaacggcacatccctcccggtcctggagggccaaagcctgcgcctggtctgtgtcacccacagcagccccccagccaggctgagctggacccggtggggacagaccgtgggcccctcccagccctcagaccccggggtcctggagctgccacccattcaaatggagcacgaaggagagttcacctgccacgctcagcaccctctgggctcccagcacgtctctctcagcctctccgtgcactaccctccacagctgctgggcccctcctgctcctgggaggctgagggtctgcactgcagctgctcctcccaggccagcccggccccctctctgcgctggtggcttggggaggagctgctggaggggaacagcagtcagggctccttcgaggtcacccccagctcagccgggccctgggccaacagctccctgagcctccatggagggctcagctccggcctcaggctccgctgtaaggcctggaacgtccacggggcccagagtggctctgtcttccagctgctaccagggaagctggagcatgggggaggacttggcctgggggctgccctgggagctggcgtcgctgccctgctcgctttctgttcctgccttgtcgtcttcagggtgaagatctgcaggaaggaagctcgcaagagggcagcagctgagcaggacgtgccctccaccctgggacccatctcccagggtcaccagcatgaatgctcggcaggcagctcccaagaccacccgcccccaggtgcagccacctacaccccggggaagggggaagagcaggagctccactatgcctccctcagcttccagggcctgaggctctgggagcctgcggaccaggaggcccccagcaccaccgagtactcggagatcaagatccacacaggacagcccctgaggggcccaggctttgggcttcaattggagagggagatgtcagggatggttccaaagtgaagaggtctccatggcaacaggacaccagcaagtgtgtgggagtcgcactggtgtgacggccagaactggactcagatttcagccccatccccaatgaagagcttgagtttgaagattatactttttttgagacagggtctgactctgtcctccaggccggagtccagtggtgcaatctcagctcactgtagcctcaacctgccaggttgaagtgagcctcccatttcagcctcccaagtagctgggactacaattgtgagccaccatgccaggctcattgttntatttttagtagagacagggttttgccatgtttccctggctggtctcagactcctgggctcaagcaatctgcccgcctctgcctcccaaagtgctgggattacagacgtgagccaccacagctggctgaagattatactttcaattcagagcgagtttgaagatgacactttgaggcatcgtgtctatggttcattactacagaagcttctctggatgtgtaaagcacaggaaaccaggcagaggaggcacagggtgctctccagaacgagaagccagctcctggagttgtttgctgcaactgccattccccgttgatgaccatgctcttccttcagaagagggagagtgagaggaccaagtccaagtggttcccatttgaacatttaaaaaaaaaaaaaaggctgggcatggtggctcacgcctgtnntctcancactttgggaggctgaagtgggtggatcacaagtcaggagttcnagaccagcctgggcaagatggtgaaaccccatctctactnnaaatncaaannttagccgggcatggtggcgggcgcctaaaatcccagctactcgggagactaggcagagaattggttgaacccgggaggtggaggttgcagtgagccgagatcgtcccactgcactccagcctgggcaacagagtgagactctgtttctaaataaataaang

SEQ ID NO: 109282 - DNA, 3066 bp, Homo sapiens
  misc_feature (2374)..(2374): n is a, c, g, or t
  misc_feature (2802)..(2803): n is a, c, g, or t
  misc_feature (2809)..(2809): n is a, c, g, or t
  misc_feature (2853)..(2853): n is a, c, g, or t
  misc_feature (2893)..(2894): n is a, c, g, or t
  misc_feature (2899)..(2899): n is a, c, g, or t
  misc_feature (2904)..(2905): n is a, c, g, or t
  misc_feature (3065)..(3065): n is a, c, g, or t
cgaggctcctcctctgtggatggtcactgcccctccaccaggcttcctgctggaggagtttccttcccagccaggccggcccagaagccagatggtcccgggacaggcccagccccagagcccagagatgctgctgctgcccctgctgctgcccgtgctgggggcggggtccctgaacaaggatcccagttacagtcttcaagtgcagaggcaggtgccggtgccggagggcctgtgtgtcatcgtgtcttgcaacctctcctacccccgggatggctgggacgagtctactgctgcttatggctactggttcaaaggacggaccagcccaaagacgggtgctcctgtggccactaacaaccagagtcgagaggtggaaatgagcacccgggaccgattccagctcactggggatcccggcaaagggagctgctccttggtgatcagagacgcgcagagggaggatgaggcatggtacttctttcgggtggagagaggaagccgtgtgagacatagtttcctgagcaatgcgttctttctaaaagtaacagccctgactaagaagcctgatgtctacatccccgagaccctggagcccgggcagccggtgacggtcatctgtgtgtttaactgggctttcaagaaatgtccagccccttctttctcctggacgggggctgccctctcccctagaagaaccagaccaagcacctcccacttctcagtgctcagcttcacgcccagcccccaggaccacgacaccgacctcacctgccatgtggacttctccagaaagggtgtgagcgcacagaggaccgtccgactccgtgtggcctatgcccccaaagaccttattatcagcatttcacatgacaacacgtcagccctggaactccagggaaacgtcatatatctggaagttcagaaaggccagttcctgcggctcctctgtgctgctgacagccagccccctgccacgctgagctgggtcctgcaggacagagtcctctcctcgtcccacccctggggccccagaaccctggggctggagctgcgtggggtaagggccggggattcagggcgctacacctgccgagcggagaacaggcttggctcccagcagcaagccctggacctctctgtgcagtatcctccagagaacctgagagtgatggtttcccaagcaaacaggacagtcctggaaaacctcgggaacggcacatccctcccggtcctggagggccaaagcctgcgcctggtctgtgtcacccacagcagccccccagccaggctgagctggacccggtggggacagaccgtgggcccctcccagccctcagaccccggggtcctggagctgccacccattcaaatggagcacgaaggagagttcacctgccacgctcagcaccctctgggctcccagcacgtctctctcagcctctccgtgcactaccctccacagctgctgggcccctcctgctcctgggaggctgagggtctgcactgcagctgctcctcccaggccagcccggccccctctctgcgctggtggcttggggaggagctgctggaggggaacagcagtcagggctccttcgaggtcacccccagctcagccgggccctgggccaacagctccctgagcctccatggagggctcagctccggcctcaggctccgctgtaaggcctggaacgtccacggggcccagagtggctctgtcttccagctgctaccagggtgaagatctgcaggaaggaagctcgcaagagggcagcagctgagcaggacgtgccctccaccctgggacccatctcccagggtcaccagcatgaatgctcggcaggcagctcccaagaccacccgcccccaggtgcagccacctacaccccggggaagggggaagagcaggagctccactatgcctccctcagcttccagggcctgaggctctgggagcctgcggaccaggaggcccccagcaccaccgagtactcggagatcaagatccacacaggacagcccctgaggggcccaggctttgggcttcaattggagagggagatgtcagggatggttccaaagtgaagaggtctccatggcaacaggacaccagcaagtgtgtgggagtcgcactggtgtgacggccagaactggactcagatttcagccccatccccaatgaagagcttgagtttgaagattatactttttttgagacagggtctgactctgtcctccaggccggagtccagtggtgcaatctcagctcactgtagcctcaacctgccaggttgaagtgagcctcccatttcagcctcccaagtagctgggactacaattgtgagccaccatgccaggctcattgttntatttttagtagagacagggttttgccatgtttccctggctggtctcagactcctgggctcaagcaatctgcccgcctctgcctcccaaagtgctgggattacagacgtgagccaccacagctggctgaagattatactttcaattcagagcgagtttgaagatgacactttgaggcatcgtgtctatggttcattactacagaagcttctctggatgtgtaaagcacaggaaaccaggcagaggaggcacagggtgctctccagaacgagaagccagctcctggagttgtttgctgcaactgccattccccgttgatgaccatgctcttccttcagaagagggagagtgagaggaccaagtccaagtggttcccatttgaacatttaaaaaaaaaaaaaaggctgggcatggtggctcacgcctgtnntctcancactttgggaggctgaagtgggtggatcacaagtcaggagttcnagaccagcctgggcaagatggtgaaaccccatctctactnnaaatncaaannttagccgggcatggtggcgggcgcctaaaatcccagctactcgggagactaggcagagaattggttgaacccgggaggtggaggttgcagtgagccgagatcgtcccactgcactccagcctgggcaacagagtgagactctgtttctaaataaataaang

SEQ ID NO: 109283 - DNA, 546 bp, Homo sapiens
ctggtgcagaggatattgatttatatacattaaatctctaatgaattcctgaaaagcgccaggctgcctgagagtggtggggcctgctgggtgtgtacattcatgaaagtgctttttaatccttaagggccttgtggtgtgagttctggcctctaggctgactttgcctcgaggctaataaacatggaagaatgatgatcttcgaataattttataatccactgtgtgggactgttgaaacgactgcaaggcgatttagatgtaaataaacgtgatgttgcagaaatctataaataagaagcactggcaatttaaaccgtgttgtgcattttgccaaaaaacacgagtgagtcctggaaaccacagtgaggtgctgccgaaagtagagattctattttaaaaggtgcagccaccgttacagcacaaccctccgtgctcaggcctggccagcttatcatcatcactggatgtccaggctagcaaggacaatccctcttcccagtctcattttaattcctgagtcccatctgtaggaacatatcatct

SEQ ID NO: 109284 - DNA, 522 bp, Homo sapiens
aatcctatctcccagcctcacctctgctgtctcctccacgcttcctgtctccagagccccgagttcagcataagcagaaagcggcctgttccctctctagggagaggagggttgcggtctggaggtctggctcgtctttatctgcgcattctcccagcctcctggcttcagacctcagcgaggcggcggctgccggccggctctcctcttcctgcctgcagacctggcctgctgcttctttctccttcctccctccctgcctgccctgcggtttcaaagtagattagaaataacagtgtcccacatggaagcctctacttcttcctgggtcaactttgatgacgaggctccagaaaacctttgcaatgctgtgtggaatttttaaatcggtgagctcgtgctcttgccctatttatttgtccagcgtacatttctgaacattgtgaacgtcgaatgggccaacaaatctaaaaattaaatgagctgataaagaacgccgtcagcacagagcagacgctgggt

SEQ ID NO: 109285 - DNA, 704 bp, Homo sapiens
  misc_feature (219)..(219): n is a, c, g, or t
acatacaatttcatgggacttgtggactccttgggaccattcgtgaacctctgttaagaattcttaagttctttgcagggtcctagacaaagctctgaaaattgatatttttcctcagtgaagatcaactcaatcctaaaatggattttcagtttttcagctgaataaatcaacacccataggagcactttacagaatatggagacttgggagtctganggtgccaaataacatggaaatgataggtggagacttcttggggatgtgaaaggccttcctttcatgggttaagttcatcgggaatcattgctgcttcggtgagatttgaacttacacatttttctgtataggtctgaaggagcttagtctaaatattatgtaaatatgaccccatataaatatatatacacacacccacacacagagacactccatacataatgggatagatcccatggagcaaacctcaacagtggtgccgtgatttacaaaataacctctcagttgcacccttattacagtcagatcctcagtggcgggcttcttacttctctcagagtgaaattcactcttacacaggggcaacttgcagtgtgccacattcagaaaagctctttaaagtgtagtccctgtcatttacaaatgtgggctaattctcaatacctgtcgacctctatgttctcatccaaaatatggaaatcata

SEQ ID NO: 109286 - DNA, 298 bp, Homo sapiens
gtggaaacctttccagacccccaaagcaggtcacaggtgcccattgttccctctcaggaccctgtgctccctttctgtgtggcatggtccagttgtcattgtaccttaacttgtaaccctcctccccatgtcttttgtccacttgggttattctgcttcactaagtaaactggatttccctggctgttttttcatatgttcatgcctggaaacaactctcccagctctggctcaacatcatctggttcaaaagccataattagctgaccacaatctttgtgactgttaggtacagatg

SEQ ID NO: 109287 - DNA, 443 bp, Homo sapiens
accgctccaagctgagacactgaacattacaagtaacagcaattcaatgagctgacacaggaggtgtggcacttggagaacctggatcatgaagcagagcaagaccaggagagggccttctgaggtcttcctcctgcttaggggctcccatagggagtgcggctgcttccttccctctacagggtgaagaatcattcatccctgagcctctctggccagagcaatgtcttcaacagaaattagaagctttgtaacacaggaaatttccacattcaccttatatatgaaagtacctagcaaagtgcctgacacatattagtaactcaataaatgccagcttcctttcttccttcccaactctattttttattttctacatatccagagcataaatatcagggggaaaccaccaggaaatagaactggggatgaggagcggtgga

SEQ ID NO: 109288 - DNA, 243 bp, Homo sapiens
gagatagtgccactgcactacagcctgggcgacagagcgagactccctctcaagaaaaacaaacaaacaaaacagaacaaaacaaaaacttttctgcttctttcactgtagagagcagtagatctagaaagcattacatcactgagaggtttttttttctggtttcatatttttctctacttctcaaaaactgggaaaattagattacttgaagttcatctaatgctaatatttggatgagat

SEQ ID NO: 109289 - DNA, 385 bp, Homo sapiens
aattttaagacttgggtctgccaatgaatatgagctttctactttgcaacagaatgttaaaatataggtggaccaaaagttacactatgaagtagtgggttggaatatattttggaggtataatttcttttgaaacttaaattttatgatttttgatagaaaggcatttaccatattaaaatatattcccaattctaagaggagtgaccttgcatatagtacaagccataataagagtctgaaacagattttggggtagttgaaatttaatcttagaagtagcatttttacattattagaattacattgttgagtttttaaaaacattaactttttctgattataaaattatggtgctcactatggacaatttttggaaaataca

SEQ ID NO: 109290 - DNA, 390 bp, Homo sapiens
aatctgaattagttcagtctaagataacatagataacgcctacatagatgtgtttgaaaagtgatcggtccctatttccagatttccttgtgaaggcagtttcccaaggaactttggtcttcacagcttcctctgactgataaattctgatgctgtcatcagagatatgatattcaagatatgaatgcaaagataagtacccaaaaccttggtaaacagagccttaaccattatattagaagatacctaggaacattcagctctctattatgttatcaatggaggagagctctggttttctcaatatagagaataggttttgaatcaattctatcagtattagacttcaagccatgctctaaaacataaagggattgtaatgcaaccaat

SEQ ID NO: 109291 - DNA, 310 bp, Homo sapiens
ccacctgctgactgttgaccagctcctcttcctgtacccctctctaattcttcgctatgtaaacccctgactttagttggttagggagatggatttgggagcagccttccatctcccagctgacatcacctgtgttacagctgtcttccctggcaatacttattgtttcagtgattggctttccgtgagcaaccagatctaggccaaacctctaggtattcagcagcacatgcaaagaaacccaaaacaagcatgcaaagcgaacctatagcaccttagagacctttgggaatggggtacagagataatg

SEQ ID NO: 109292 - DNA, 286 bp, Homo sapiens
ctccagttgagcttttgcttctcgtaatagccagtccactcagtggagatttcagtttttagtgtttgcattgtatagacaaagggagcatctgtgagagttactcatgttctttaccttacaagcggtatttgtatcatggacgtggggcacacaactcaactggggtctccctgcccctggcaaagcaggaactcagcttgatacgacccatttccatgtcccccatttccatggtctttctagtgagtatccccacttcccagttttgcttctgatggctggg

SEQ ID NO: 109293 - DNA, 472 bp, Homo sapiens
cagtatcacacgggtcgagttctgtagctttgtagtatactttcaaatgaggaaatgtgagtcctctgacttgttctacccaactgttttttattaaaaattttttttcatgcttactgataacatcccatacttaactgtttttaaagcaaatttccctcttaaattttctaatagatgtgtaccaaattaaatacacctagcctctgttggaagaattctcctggattctagagttaggagagaagccctaagagtgttttaatactgagatatatggtccttcctatcaatatcttaaatcagggattgcatacttgatatactttggatatttgtccccacccaaatctcctgttgaaatataatccccaatgttggaagtgaggtctggtgggaggtgtatggatcatggaggtggatcccacatggcttggtgctgtctttgcgacagtcagtgggtgcttgtgaa

SEQ ID NO: 109294 - DNA, 258 bp, Homo sapiens
aagactacaggtgaaatatgtttggaagagaaagaacaggaggtcagtttttagtatattgagtttgagatgacactcagatagctaaaagtaggtgtcaaacacattaaatggatcataagcctgaagttcaggtaagagaggtaagttgatcactttggtatttaaagacataacattgatgaaatcaccaaggcaataaatgtagatagaacaattaaaaggtcaaggctgggtgtggtgtctcacgcctgtaat

SEQ ID NO: 109295 - DNA, 365 bp, Homo sapiens
gatcaaagacagaccactcagtcctagattggttcacagtctacatgcttcacatcatgttttgctaagaaatttgaaatctacatgccttctaggtgcagttcagaataatttccaaaataaggattttaaatggcaaatggcataaatacccgacaacagaatgagtatttaaataaattataaggaatttggtatttttaagtaaatatataaatggaatatagttactttaaaatgcacaaacagaatataaatggaaacatatattaagtaaaaaagaaagtattctgcccatcacaaatgtaataaatgaataatatttacacaaattgacaaagatgagaaaatgttgctaatacttc

SEQ ID NO: 109296 - DNA, 793 bp, Homo sapiens
atagaactgttaaacaagttcatcgaggttgcaggatacaagatcaatattcaaaaataaattttatttctaatacagtagcaatgaacaatctgaaatgaaattaagaaaacaacttcacttaaaatagcatcaaaaaacaataaaatacttagcaataaatttaaccaaagaagtgcaagacttatatacctaaagctacaaaataacattgaaataaattaaagatgtaaataaatggaggcatcctgtgttcatggacttaatattgttagggtgacaatacttcccaaattgaactacgtttttaacacaatccctttcaagatcctagctgacagtttttgcagaaattgggagattgatcctaaaatgtatatgtaaatgtgagagacccataatagccaaagcagttttaaaagagaagaacaaatttgaaggacccacacttcctgatttcaaaaattactatgaagctagtgtgctaaaacaatgtgtacttgtataaaaacaatgtgtacttctataaggataaacatataggtaaatggagtagaactgtgatttcagaaataaacccttacatttatgcccaattgatttttgtcaagggtagcaagacaactcagtgcaaaaagtaaaataagttatttcaacaaatgttgttggaacgactggatatccacatgcaaaagaatgaagctggacttcttctcacactatacacaaacattaactcattttagacctaactataagagctaaaaatataaaactcctggaagaaaaaata

SEQ ID NO: 109297 - DNA, 724 bp, Homo sapiens
agatttctagagtattacctttacagttttccctcaactaaaaaaaatgtttaaaatactaattcattggaaagaattgaaacttaacttttcactttggttttcagacagaaaaatttagaaacacaaaattgaagaggattatagcagcactaacataacaatcatttataaatagataaataaaataacacttaaatctgttctgttagccactttcaaccagagattaacaagactatttcatgtggctgacgagaattgacctctctatggtcttgtttaaaagtcttcttaaatagacgtatagaatcttaggatattccaggtttcttaatgttagaaacaatataattatgttggttactgtcaaaacttgcagtgttgtttgaaatatgtatttacagcaacagatagtcattgcgtctttcgttgtccacactggtaccagtttggtactgaggcatctgactaaagacctcagagaagcaccagaaaatggaaaagaaagatctgcccccaaatacgcagctggccacctttttgctactagtttactttgtcgcatataaaataacgaagacagatgcatgtcaaaggatgtgcgtattgggtcagaataaaaacatgcacaattttttttatgaggaacactcgttttatgaaagttcacaggctcttattcacttaagtctttagaaatttgtgtctctttgtctttcac

SEQ ID NO: 109298 - DNA, 206 bp, Homo sapiens
  misc_feature (110)..(110): n is a, c, g, or t
gatagtaactaggacatatggtcagtaagtggcaggtctggcatttatgcctgggtctgagtcaaaatcctggagcctgcacagagggagccaagtgatactgttcagtnttagtcctcatactcactaaaagctacacattagcctttaagcatttactccaatagtattatatagttgtaccccctttctgctggggatatgtt

SEQ ID NO: 109299 - DNA, 410 bp, Homo sapiens
cgacctcagcccggcagtctccttgcttcctcgagcgtccctttgctccggcattggggcggctgcaggacaccagcaagaacatcctcgagcacactgttgctgccaccatgggtcccacacactgtcttgtggccgcctcaggctcccgtcacgggaggggtgcacgggcacatttgctgaggtcaggaacggcgtgtgggaaggtcaccgagtgcctcccaggctccctgggacatgggagccacacgcatgttgggggagaatgtggtagtggccactggggacagtgtcaggagtgatggcgctgggtcctggctgtgaaggatgctgctttcgaggccggcaagcgtgtttaggtaacggcaaagaggctcgcggcaggtgctttcaaggcatggttttctaga

SEQ ID NO: 109300 - DNA, 364 bp, Homo sapiens
tctataaatatctgttagatccatttggtctatagtgcagattaagtctgatgtttgttgattttctgtctggaagatctctccagtgctgaaagtggggtgttgaagtctccagccatataatgcccttatttgaatgatatgtgctttctaaaaatgttgtgacctgctaaacatgtattatcactaggctatcaggcatacattagtctttattagaataaaacaaaatttcataactgtggctatttgtctttggtccttcacagggcctactctgtcccggcttcctttctgctgccctgatgtctcactggcttctgaatgagtgactgtgtaaaaataagttggtcttaaaacagta

SEQ ID NO: 109301 - DNA, 385 bp, Homo sapiens
tctgaattgggcagcattgtgccaagcccataaacttcggggagaactcctagaactcatgcaacgaattgaacttcccttgtccctaccagcctttggctctgagcagaatcgcagagaccttcagaaagcactggtgtcaggatactttctcaaggtggccagagacacagacgggactggaaattaccttctcctaacccataagcatgtggcccagctctcctcatactgctgctaccgaagccgcagagctcctgccagacccccaccatgggtgctctaccacaatttcaccatatccaaagacaactgcctttccattgtttctgagattcaaccacagatgtgagttccctgacatccctcctatactgcctattcc

SEQ ID NO: 109302 - DNA, 478 bp, Homo sapiens
tgtgccaccacacctggctgattgttttttggagaggtggggtcttgctgtgttgccgaggctggtctcaaactctaggcctcaagatcctctcacctcagcctcccaaagccctgggattacaggcacgaaccaccacacccagcctgcaagtgtcctcttaagccttcttgtgtaactacactccttagagaaaaatcttgctagttttctccattatggccagttttcaggaaacttttgggttattgatcatatcttttattttgctcatagaggtgtgatcttatttaaaagtccaaacatatagatggtccccaattttggactttttgactttttgatggagcaaaaacgatacacatttagtatgcacttcgacttacatccagataaacccactgtgagttttgactttaagatattttcaatttatcatgggcttattgggactcaattattgttattctcttaaaaa

SEQ ID NO: 109303 - DNA, 611 bp, Homo sapiens
gggggctgcaattctgcctaccacattgacttcatcagcaacaggtccagttcgggatgaatcgcctctgaagggtgctctgaagtgctccagctgaagttttggccatctccgccagccacaccccactgggttcctcctccccagctctggctgtttcgtcccctctagccatcgcccaccgtccacactgccatacggccgctcaggacatcccagttccctcctgcccgagagctctcatctgaggacgcgcatcattcctcaggaaactctatctttccacaccacccccagctgttctcagccacccagaaaaaaggaacataaacgctaatggggaaaaacatggggacacatctcatttcaccccacactccctcagctcaacctgggaatgtaacctgcagggcagcaagaccagaagcaacaccactccagttctcccaagggccaatggcatagcccttgggtattctcagggttctcttacccagacaggtggccagctagcaggagtgcacacacttccaaatatcagctaaagtcaaatgatggctcaatcttctccatctattaaatcaaattggtgctaggctcaatggccaagg

SEQ ID NO: 109304 - DNA, 306 bp, Homo sapiens
cctggccaagacctcatgttttaaacaaggcattatctattctcattctagttcctacttttctcttacaaatgcattcactgcaagttagagaaaaaagagtaacaagagtataatactataaacctcgggtattaattctagatttccattctcatatagcattcagaagcattttcacaagctggaatataactgaatgaataaagataatccttcaaaacctgtttacatcctcaaaaaggacttaaaggcttcctttggccatatttcagaccaatggctacatagagggaaagttggttt

SEQ ID NO: 109305 - DNA, 349 bp, Homo sapiens
gtgaaaggtttccttctggcgggtaggtgttgtggtgtttgaagtgagataattctctctagttcaggttcagattaaaaactcatttgacttttccttggcacttcattttgaaagtttattttagttgactagttaactagtaaaatatttagtgatttagtgatttctttaacagtactatactaatgttgatttgctaggatctgtaaatgttcattttaatgtatttatttatccatgtaaacagtaaagaatctatttgtaaccatgtcaaactgtaagatgtaaaactcaaaaactgagaaactttactttgctattttgtccctaaagttgaacatgtctg

SEQ ID NO: 109306 - DNA, 303 bp, Homo sapiens
aggaaaggaaaaagaaactagtgtgacgaacttggctgtcgctttaaataagttgctgtcttcctctcctctcacaaatatggttgtgatttaagaggagaactttttttcagacctgacttgtattttttcacaccagtacaacaatttatggggcaaggtaggccctggggaaaagtgctatgttatataaacatatgttggcctgcttttccgactcgtctaaatgatgttactgagtattttttgaatttctaggagaaaatagtttagccaatgattaataaaccagattaaaaaata

SEQ ID NO: 109307 - DNA, 356 bp, Homo sapiens
gttgcaatgttacattcctgctgcctggtgaaagcactccaacaccaaatctgcagtgtttactgcatgaagaaatgttgatggaatgaagaaatgattgtactctactatagcactgatcttgctttgacccagagttgtttttggacgtagagttgctcgacatgctaagttataaactcctggaaggcagggtccccccatcattcacctttgcatcccaccttgttccccagcacagcccctgacactgagtgggtgctttatcagggttctttggtggagtggagtactcacccgtcaacccagtcttgaagttcacctttgagatattagggaaatgagccctagcactt

SEQ ID NO: 109308 - DNA, 363 bp, Homo sapiens
ttagaataaggtggattgggaatttagtcacagttttataataataagtcatgtgtctaatttaatgtattggggaatttttttttccatattaaattttctagcattcttcagtctggttctgatcagtgtattattgtggacaggaatggtagtgtttaggagcttggaccctggagtggaactggttggatttgaatcccatctctatcactgctgtgtgacctcaggcaacttacctaactttcctggccctcagttttcctacacagaaaatgggaataataaaagtatctgcttcataggattattacgagaattcgctaactcaatatatgcaaatctgttggaccagtgcttagc

SEQ ID NO: 109309 - DNA, 401 bp, Homo sapiens
  misc_feature (15)..(15): n is a, c, g, or t
tcgagtcggtaccgngcactctagtccagattaccttggagcctccttcgtcttttccttcctcttcccctaccagtccacaagccactggggtgaaattagccacctgaaaaactcacctaatacgcggtctgatggtgactagagtggccgcggattctctaaattcgtccagtatgcttgcgcgcatggaactggccgtggtgggcccccggcttggactggggggacctcttgatctgcagtcaaatgcctcccacagccacttcctgagccagattaccttggagcctccttcgctccttttccttcctcttcccctaccagtccacaagccacttgggtgaaattagccacctgaaaaactcacctaatacgcggtctgatggtgacttgagtgg

SEQ ID NO: 109310 - DNA, 443 bp, Homo sapiens
ctgagcaatgacgggaacctgtgggcagagttcatttcttcccctaagaggagctgaaccagagtgactaaaggaccgctgagctcccttccaggattcccagtccccagccccccaaacaccaggtgaagtctccacgctcttacctcccagctctggagctgtgtgacccacaagctcttacctcccagctctggagctatgtgaccccctgaagcaggtctaggtctggcccctccctccactcagactagcccttccctggtgccttcgttggccacagcttctctgactgttcccaggtctcagttcactctgcccctgccctagggagagtctcccgtgagtcaacaggttcactgcatcctgaataagacctccctggatcagcattggagaatttccaggatctgacccagacccattactagccccatctccag

SEQ ID NO: 109311 - DNA, 414 bp, Homo sapiens
tgaattcaatctccctcccctattacagctgtcatgactcactgcaattgtgcttaataaacttttccttgacattcttaacaagtttccagtgcaatctctctttaacagggaacaaggctgtaaacttgagaccctggttcatttatctgaaatgcataggggatgacaggctccctcccactggggatgaaggagctgggaaccacacatgccattctgctgggcccacccaagtctgaatccatggagggggagggtgtcctgagagtacctcccacccacaaacccaaaacaccaggctcagatttctctctggatggccactccctgttgtcaccccatgatctgggtgagatccaggattgcaggtgcacaactgcccagagagaggtccaggaggtagactgcctc

SEQ ID NO: 109312 - DNA, 774 bp, Homo sapiens
gtttttccctgatgagcctgaggaacaccctggtgacaggaggaaggtctcagcagcacctggtaaaggactgcacaggctcttagtcccctcacatccagtcagctcagccacgtagtcagggccagggaccgtctgggcaagatgtgggcctcagcgcccatgggaagggctgtgcgacagtccctgggtagctcagtggctcaccacagacacagagctaccagggccgtactggtctcatcccaaacccttgtctcccttctagaatcagccttgtctcctctggtcaattttaactaaattacactcaaataagttccacagtgtggaccttttttaggcattagtgactggaagagttttgttctattacttcacattttcctaaacccacttaacacggatggaatctcttgtaatcctgtaagaccaaacacagaagaggaactgcgccaaagcggtcaggcccagtacttgtttagcacagacagaatggtcatacttcttctgaccttgtgataaatcttctgtgctgaatttgggaggtcttcacactgaggagtgctcatgcttcattcattaacagaggctgcttgagcatctactgccagccaggccctgtgccccgcatgtcacctcccttgtcaggctctgcctccttcagtctctgtcacaattctgtggggttagctatagcatcttcatatttagtactgaaggaactgatgctgagagaggtgatttgtctggtgtttcccaggaaataagtga

SEQ ID NO: 109313 - DNA, 778 bp, Homo sapiens
gactggtggctattgaaggtgtggcatctgattcatgatgagaaaaattggggattgttctgggaatagttgagctggtctctgcaggatgagtgagccatgtggttcttgtctctgtttcatgtggggacttagtcagtgttgggaatgttgtactagtatctgtccccgaaatagtgaccagtggggtcagtgcatctagttcactaggtgagatatttgttggaatggctgagctgacgtctgccccatgactggtggctgtggaagatacagtgtctaattcactgtggaaaaaattgggggttgtcttggaaacagttgggatggtctctgcaggatggataacccatgaagctgttgtatctggctcactagaagaaacatctagagtttgaataaccggacttctctctgccccagaacgagagaccagtgaggctgtggtctctgattctctattgaaaacagatggggttgtcctgggaagagctgtgctggtttctgctcccaggctggtagccaatgaggatgtcgtttctggaacatcagggaaaacatatggggttgtgatcatcatttctgtggggattgtgctggccatttgcattgatgcattgaggggagtcagtgttcccaaagtgggagtatagacactggtggtcaaggtggctctggaagtggtcttcagagctgtggtggtggtcttcagagctgtggtgtggtctccattctttttgtccctcctgtgtgtagtcctgtaaattggggaatgggc

SEQ ID NO: 109314 - DNA, 252 bp, Homo sapiens
ccagtaactcagctgcatcagtcaccctcaaggagatgagccatgactttgttcattagttggaaaagagtctggagagtgccttttcgttactgtttatctttggtctgacacttgggaatagggtcatggatacttcagccagaaaactttccaaatttaagttattaatgtattataaggatcaaagtttctagtatagcctgttcaattagaacatagtgtgttggttgattggatttggagaaaggg

SEQ ID NO: 109315 - DNA, 442 bp, Homo sapiens
gatggaggaatggataaacagcacgtggtctgtccatacaatggaatatgattcagcctttaaaaggaaggagattctgacccctgctacaacactggggaaccttgagcatattatcctaagtgaaataagccagacatagaaagacacatactgtaggattcaacttctgtgaagtgcctagagtcgtccaattcatagagacagaaagtagaacggtggttgccaagggcttggggaaggaggagaaaggacatctatggacattttgccatatggcataatgggtgcagggtttatgtttgcgggatattttaaagttctggaaataggtagtgctgatggctctacaacattgcgagtattctcaatgccgctgaactgtacatttaaatgtggttacagtggtaagcctcatgttagtatattttgccacagttga

SEQ ID NO: 109316 - DNA, 330 bp, Homo sapiens
cttacaaaaagaaaacccctcctctaaaatgtttgagtccttcatttgtccttatttaattaaaaataattattgagcatatactacattccaggcaccatgctaaaacatggagcacgggccagtcatcaaaacagacccaaactttgctgttcaaggaacttacagtctattgaacaatgcgaacagtaaagaagtcattgcattattaacaaatattgtaaatgaacttcaaggtgctgagtgtcttttaaaaattatttctcctaatgctatccctcccctatcccccaccccccaacatcacacaccggggcctgtcgtgggttg

SEQ ID NO: 109317 - DNA, 293 bp, Homo sapiens
tgcacatgaacttttcagattagctatctgttggctttaataatgtcagcataggctgggcgtagtgcctcatgcctgtaatcccagcattttgggaagccgaggctggctggtctcaaactcctgacctcaggtaatccgccctccttggcctccctaagtgttgggattacaggcgtgagccaccgcacctggccctttttttttttttaagacagggtctcgggctgtcacccagactgaagtgcagtggcgccatcttggctcactggcaacctccccaccagcaacct

SEQ ID NO: 109318 - DNA, 744 bp, Homo sapiens
ataacaatgccacatgttgcttgtgtgataaataatctttgtttactgtggacacttcggcaatttggttcatcttggtacagaaaatacaaagacaggactaatattttattcattttttatacttagtaactaggacagggatctgtatttagactatattcaagcctcgctctgtcacccatgcttgagtgcaacctctgcccactgtgttcaagcgattctcctgcctcagcctcctgagtagctgggagtacaggcgtgcatcaccacacccggctaatttttgtatttttagtagagacagggttttgccatgttgaccaggctggtctcaaactcctgacctcaggtgatccgcccacctcggcctcccaaagtgctgggattacaggtgtgcgtctccgcgcccggccagttacataagattttaaaaaatgtattgtaataggctctctgattgtttagaaggtttcatgttgtgcccgcagtattttcatccactggtaatcactttaggtaatcaaaactagttcagacttttaaaataaatagttgcttggtgacatgataaactaataaatgttattcttattggttaatatgaaacatctatcaaaagtgaaaaaagaagaatgcagaatgtttgtaaactgattccaaaattacacaaaatagcaactgtgaaaaaaatgaaggcaatatatgaaaataataacagctatgtggcataattatggggga

SEQ ID NO: 109319 - DNA, 372 bp, Homo sapiens
atgagccagctacctcatagcagccatctcagcagaaaaggactgagcctctcctgggcctggagcttccaatccctgtggcctcctgctcccctcactggcagaaagccccagtattcactgggatggggaagtccccatgctaagcctagcctcccctcttccctgctctcacagctctctatttaatagcagcaactaataattatttgcattgtctcagtgaatccccagaacagccctatgaggttatcatggccattccataggcgagaagtaaggcaactggacctagattaggggatttacctaaaatgacaactagcaagcagtagagtcaggactcaaacccagacttttaacccccatgct

SEQ ID NO: 109320 - DNA, 258 bp, Homo sapiens
atgagccagctacctcatagcagccatctcagcagaaaaggactgagcctctcctgggcctggagcttccaatccctgtggcctcctgctcccctcactggcagaaagccccagtattcactgggatggggaagtccccatgctaagcctagcctcccctcttccctgctctcacagctctctatttaatagcagcaggaggattccagcagcaggagaagcagcaggagaagcagcaggcaatcctctagatcacct

SEQ ID NO: 109321 - DNA, 1205 bp, Homo sapiens
ataattcagctcttttgagttatgtggggccagcagaagtctcaatccttataggcttgatggtgagagcagcgggaggtttgaggtgtactcattgcagtccagtttggtctctaaataggatgcttacgagaaatcagtgaaggtaagcagggctgccactgtggccacgtaacccttcaggaaccagtgctgaagaataatgagtgagaacacttaatttgagagttagacaaatacagcccactttggatttcatcctagtgaacagactaaaacttcgcagtaaaatacctatttctacaaagcaaggtttgcctgcctcggttggggaaacctagtggttttgtcacactagtcgatgtatgatgttagtgttgtaagacaccatggcagaatcttcattattctcacctattctgaaccctgcgtcatgtatctgggatgccccctcccaagtccaccaatgtaccacgttgctgacacagccttcatttttaactcaaattgatgctcagtaaaggtcaatgacaatttgttcaaggaagttcatctaaaataatctggaggccttgaaaatgatccctctaaaatgctgttgagcttgtgttcagtgtagcaggaggatctgaacttttcctggagaggtggtgatcgggatgccatttggcagcttaagcacatcctgccagcaggctttaagtggctgttctaggcatagccctccctgaactagaaaggagagtaaccagtttgctatgctgcgtctaaccagacacacctgacttagtagtaactctaagaacccttaacttacaaacaactttgtctcctcttagacaatattcattaaatctgaggacacagtttgacagtagttcagattcttgcatgagcaattgacagcatcagagcacacaatatcataagttacataaattacacaaagtacatcataaattacactacagacacgttaggtaaaaagcatcaggccgggccgggcgtggtggctcatgcctataatcccagcactttgggaggccaagcgggggcggatcacgaggtcaggagattgagaccatcctggctaacacggtgaaaccccatctctactaaaaatacaaaaaattagccgggcgtggtggtgggcgcctgtagtcccagctactcgggaggctgaggcaggagaatggcgtgaaccc

SEQ ID NO: 109322 - DNA, 273 bp, Homo sapiens
gatgaaaaactgcagtaccagtttgaggggctactgtactgttttatttcaagtcttagcaacttcttaacactttgcccaattcacttcacaacctgtttcaggtaatttgactttttagtatctcctatactttcttcctgtttttctcaatgttgagagaaagagacttccttattcatttctactttgttgtttgcattccttctttttttattttattttatttttttgtctatatacaactaatgtattttgttatttttttaatta

SEQ ID NO: 109323 - DNA, 175 bp, Homo sapiens
ggacagggaggacttggtagcagcacatagaaggaaaaagaattactgcttgtcgaaaatttcagcaaggctcccagaggtttacttacatccctaagactcaaatatgatcttaaaataagcataacaatgtataataacaagtccatcaatcattattgaaaaaaatctttga

SEQ ID NO: 109324 - DNA, 840 bp, Homo sapiens
gagtgcctcctaagtggatgccctccacacctcctgcacttggccctggccctgggtcctaggctcattgttgatcttcttagatctgggttccttgcattgcaggacctacctcagcctgctcttgtctgcctttgctgatgcccctcaattcacctctttcctgcctgtactgtgatatggtgtgaacttgacttatactgcttgtgaaacctgagtcatgtgctgaaatcctgccccgccaccgctttcctcccttaactggatccttagccttggactccaaggctacagctctgtctcgtggccactcaagccccacccaaaggaggtgctactcaaaagtttgaggcaggagtgatttatcgtgaatgacaatgttatagtttctaattctagtgtttagcatggtattattcacttatttattttaaaatcttagacaatttatctaaaatgtcaatttttagaaggtatcagcacaattgtggcagccttttttctgtatgtgttatatgtattatttaaaaaagcaggttcattctatgacaggtattggtttcggtattcacaatataaattgtcttttcaagggaaaggatattttctttggaaatgtcattgaatctatgttctctttattgaaattgttctaattgactttgaactgtttctcagacacctggtgcccagtttctggccatagaaactatgtgaggctgagtaattcatgttttgggtcactaccagtcacgaatgcttctctcattccaaggctatgcatatggatgtcacattcccatgtcaatcatctctggaaggtattattcgcccagtttt

SEQ ID NO: 109325 - DNA, 324 bp, Homo sapiens
acgtgctacaaaaatgataatctcacttattaaagctttgtttacagtgttgatagctcttatagtacttttgcaaatctttactaatttaacattacaacttcctatcttttcctaatctcatgtaatttaccctacttaattccttgcttctggatatgctacatttgccacccaatgagtttatttcactggtcatttacttttaacagtaaagccaaactatttgaaagaaataatctcccaacaaatccaacacaggaaaaaaagactcttatttatccagcattttgtgccatgaattgaagttttattgcaaagagt

SEQ ID NO: 109326 - DNA, 556 bp, Homo sapiens
tctgggttaagtgttgatatttagacttgttaggagtagaggtacaatgttataaagaaagagactttaccatctgtatactaactaaaaacacaaatacatttcaggaatgttggtggctattggtggctattttcattgtatttcatggttctgtatgatatggccatttatgtcatcaggaaacaagctgacaggtcaatgggttttttttttgcgtctgtaaatgacatttaatcttattatgtaatataggaagacagaaagctttttgatgatactgaaatccttccatttattaatagctcttgcttataaccttaaaaaatatgcactgtctttctggtttagttttctaatacttattttcctgttctttaaaaaaatttttgtggacatttaaaatcatctggtaaaattatgactgttcttttaataagtaacatattaattgtagctcgtagcagcagttttacagtaaaggaaggttactgtgaaactgctcgattctgggaagatataatgttcactcttgttttgcttagtagggacggca

SEQ ID NO: 109327 - DNA, 132 bp, Homo sapiens
catgagttgaggcttggagatgtcatggcagtcgctcgaggctccacggcttgtaaatgatgggacagaaggcatccccagtctgcggctctacagctcttgtgtttccaaagctgacccagccctttggtt

SEQ ID NO: 109328 - DNA, 383 bp, Homo sapiens
gtacattttaaaataacaaacacccacatttgtgtttgaacccagataatactaatttttctccactgagagacccaaggtgccttccctgagctgcacagatacctccttgggaggtacgttaggggcccagcagatcccatctcagaatctcaccctaccttggtgtgtccagactgtcggggagaatatggagtgagaggtgaggcccagccagatctgaagcctcacccccacccatcatctatcctcctggcatctttcccctgcttctggtttaattagttgttggattgatctgctgaacccagaggggttctagagcagttgctttattccatcttcagctagcagaagttttgaaggatattgggtcggggtga

SEQ ID NO: 109329 - DNA, 639 bp, Homo sapiens
ccccaaactctcacctccttaaggaattgctttgcctaatattaaccctttccaatcttcatctgtagcctcaattcatcttcacagcaaccccgggaagtagtgctgtcctccccatagaggcgcagaaacatgccttgcctcattcagttcacacgactggaggtgtagttcagttcttcccattttatgggggaggaagcttaagtcccagtgaggttagtaacttgtcagataaaggatgaagccaggaatcaacctcagtcccaggcctgtgactgtgaccgctgtgctaaccctgtgcctggcactcacacacaggcactcgtttatttagcctctgggcaaggaaagcaccatgactgtcattttacagctcaacctgggcttggaaagtttggtggttgccgaaaggccagacaggcagcaagtggaaagcccataaattttctaccctggcctcctcaagaatggttatatgcagaaccgtatgcttagcgcttactctgtgccagcctgagctgggcacctcacacgccttagaacctgaatccaccccacccccaggaatgttctgcatcctgccacaggcggactgtgctgcaggcacagacaggggaccatggggcctcttagcac

SEQ ID NO: 109330 - DNA, 268 bp, Homo sapiens
accaagtgggtagtatcttgcaaataaatttgacatcttacaaaaatgaaaatgcacaaaccccatgagttctacttcaagaccactacctatgataaacaacatgacatgtaccaggatgttgattgtcatgctatttgtaatagaggaaaaagaaacatcattactcttccttagtaggaaatggaatagcatacagatattaaaatgaatatgctgagcacagtggcccacgcctgtaatcccagcacttcaggatgccaaggca

SEQ ID NO: 109331 - DNA, 750 bp, Homo sapiens
gttgattataaatgttattcttgagccccaccccagacttgttgaatcagagtctctggaagtgggaatgaggatctagtcctttaacaagactcccaggtgattctcatgcatgctaaagttcaagaattgctgctaatatactcagtcatctgttccctccccataacccaggtagggaaacctggcctggacttcttacactagaaccacctccagttatatgagcttgtctcataatttattcttccagtaaaaactgttcttcaaggtcattaaaaagatacttcttttcactaccattgcattaatctctaaagctgtattgagatcttgtcatctgccaggcaccactcatttatagatgttctgtcatggatccaaagattgtgtgaacccagaaactgcctgtcctgcctgccttccccaccggtggcctggaaaacccccttccctgtcctcctcaccccctatctctgcatcttaggtcctgccttgacccagtacagccacttaacttcccaacaccatgggcttctgtgtacttcctttccttttatttgaaaaaaacaaaaactgtaggctaaaggagattgtaatagattttacgcctaccagtggttccctggtcatgaagttttacaagcattgagataaataaagctaaccaggagctatagaaattctcagaggcttcaaattttcatgtccattgccaaattccaaaagagaggtatcataagcttcata

SEQ ID NO: 109332 - DNA, 851 bp, Homo sapiens
tgggttattaggaaaagaatttttatggaaaaacattgaattaagctagttactgagataaaatgtgttgctgtctataaaattccatccttggcacaggtaccattcaacctaccactcctttcaattataatatgttttaattagggcaagtagaatggaagtatatgtaaaagtactacgataaagtgtggcagacactgtattgagacataaagaaatatcagagactggggtaaattcttgccaaatcagatgtttaaagtaggcgtggtggagacaattagtgctcatcagtatctgttttctcttcttcctgaggatgcagtcagaacaaattgaaaaggtaactaataaaagggggagagaaagaaaaataatgcgtgtgtttgtgtctcctgctgattacagttatgctctcagccatgtcaggactggcgcttaacgtggctccgagacattcctagttatagccaactgacgcaaccacctcccttcagctgttttttgtcttttcctccgcaaaagatcacaattttcttgggcctttgcctttttcagcaggctgtgaagcttgaaatttcttactactgcatttcagttttatctggttctacttaattggggcaagggagtagagttaaggttaaatacagaatattatgtgatctgttcctccaattaaaataaattgcactctagacacaaaacagtaaaaaaaaagagagaaaaagtatgaaatggaaatgccttcctacacaatccttctttctttattgtgaaatattgtacatattgttaaaacaaaatgtttcataatcttagataatactaaatatcaacatatattt

SEQ ID NO: 109333 - DNA, 3768 bp, Homo sapiens
ttccctgtccctgcttggtggagctgccacgtgtggttcagttctaagttctggactagtgccactcgatatcattgggaataaatcgttgttcaacagtctgttccacaaacaacagtaattgaatttcacagactttatcctgattagtggaaatcaaataatggagtggaatccccatgtgttttctcttgcacaaacttattagacttgattagaaaactgtttggaggaaaaacttgccagtaagttttttggttgttgttttgttttttttgaaaaacgacgcaacaccataaagtgtaaaattaggggttctggccaagagaggtactagatttttttaatgccgagaaaagtccatgccacagaagttattgtgtatgtctctagggagctttaagaatttcacgtttgaactttacagctgtttaccaattaaatggcaagctggaaaaatacattttgagaggggtagaaagaataagaatataattaaaagtatgctaacaaaataagcagtacatatttttttagaaaatgcagtttaggccaggcacggtagctcgtgcctgtaatcccagcactttgggaggccgaggcaggtggatcacctgaggtcaggagtttgagaccagcctggacaacatggtgaaaccccgtctctactaaaaatacaaaaaattagccaacgatggtgatgcctgtctgtaatcccagctactctggaggctgaggcaggagaatcgcttgaaccggggaggcagaggttgtagtgagccaagattgcaccactgcactccagcctgggcaacagagcaagactccgtctcaaaaaaggaaagaaaatgcagtttcattccagccatccctagatttcttttccccttaaagtggctgaatccattggagatgtgatttattttgcagatccaccaattccaaacttcaggaatattcaagcgggagtcatgtgtaagtgacagctttgacaaagagagactgtggctgggtggcccgggtgttgcccacgcggagcaaggattggttcattcaacggatggagagtacaggatggctgggacctgggaagttccagaatctgaaaagagggcagggcaagaaggagccagaagagaggtcccacccctcagttggcagtggggcacggaggtccgcatcagccaagaacgtccccaggatgccgtgggcacctcatttcaccccacgtttttggcacagtctactttttaggtattttgtaaaggaacttctcaggattgattatttgccagaggaacaattaggccaagagaaacttgcttgacagccatgtgtaaaacacgtctgtcctaatcaaactagagatgcctcaaggcccacgcaggacacaggcaggttcaaggtcatgcacctggaaatttgtaggggagggtcaagcaactgaggccaaagggggccggtaaagtggcttctggggtctgagcatctggaaggctcctggcagcagttacctgacagtgtcgttgaggggcacggcagctgggccctcaccgtttccgccagctctgctgagccagcccagcccatgcattccgaacatccgacagcttctttctccagaatgtcttctgtcagagacttccaggaaaggagctccctcctgtctcactgctgtcagcgtgggagccctgctccccaggctccacgtccccggaaggtccatcttgtcctggagcacacccagccccattcagggtcagtgcaggagggaacagggaatctgcatttcagtaagctccccaggtgaggctgcagagcagaaaccacggctttcagacgtgagcaggctccctgggctcttggtgtcaccctgttagccacatctgcggaatgtggaaggcagaacatagccacgctgcttagtgctgccagcgaacctcaggttgcatcagtggctggaatctatcacagctgttggggatacgtaactcccagcaataaatccagtattttcttccctgccctgagcttcctctgggtttcttatcagcagctattacacacagatgtccagtgcttctaaactaaattgtactgtgtaacttttacatcacacttgtgtgcttaaaaagcacaccgtgggtagtgactgggccaagagacatcacaaagcttcctgataaatttgaatccagccacggcaagagcgacgtgcgggtacctggtccctgatgcttgggtgccccgttgagcctcgggtacttcttggacactattgtgagagcagccatcctggtgtctctgccagcatcttggggaacgctgtgatggtaaaatatctgtctctcctctgggaatcagggcagccctgagaagtgagcagttccctttacagatggataattgtttgtgtaagaccaaccagatgaagtccaaactgtgtagaacacacgtgtgcctcacacatagccatctgagtaaaatattttttccaatgtagatttataattagaaatgacagatttataatatagacttcagtagggttgggcacagctgtcactttcgtggtatcaataaaaggctagaaaccttgagtgtccttggcaacctagcctttgacattgatgtttttccataggattttcttcatttgggttggaataaaaatgcatttttattcacaaggcacagacagataagaatatcataagcagggaagtgtctccaaaggtcaggacttatgtttttctgttgagtgctatatgtggaggttattgcaagttccctgatatgagtatggtttcgcttgctacattgtgcctattaaagtaaaattttacacaagcctcgcatttctaagattagtgttcccgaatgaaatgttaagaaaacattaaaagattatctctttttaagatggaggaaaaaaagtgaacaaagctaattaatctataatgaaaattgcacaaaataacatttcttaacaaatttaatacaattttgtgttctttgttgctagtggtataaaacgagatttttttccctcatttttctcattgtagatgtcatctctcacatttatatcagtgaggtttgaaattctgtgtagcagttactcagcacatatgagagggcagcgaatgaatgagatttgtcatgtgctaataaaagctgaatttttgtaatctaaaatgatgtattttctactattgctgttaatttgcattgttaaaaattcttaaagtttaatatgttatgttcagtcattgaaagcgaccactcatttttttcttaaagttgatgccttttctgctgtgctagagtcagtattttgcttctggcaggagagctgcaaactgtgtatcctcaaacagatgcaaaaagtagtgctttgcaaaacgtttgttttctgtttatctcagattaacatcctttaatacaagtttcttaagtgtaacttgtatttctgaaaatgcttaaaattattttatatttccctttgggaatttttctctatttccagcacgctgatttgatttaaaaatgtaataagaccaagagttggagtaaagggatattcattccatgttaaaagtggcttcatagctactgacaaatgtctgaactattgtcgtgcccttcaaaactggagttttctaaaataatcttatttttatacttgtatgttccagcaatttaagatatataccattgaaagggaaataaaacatttttgtttatttgaataaataatactcccaa

SEQ ID NO: 109334 - DNA, 625 bp, Homo sapiens
  misc_feature (625)..(625): n is a, c, g, or t
ttccctgtccctgcttggtggagctgccacgtgtggttcagttctaagttctggactagtgccactcgatatcattgggaataaatcgttgttcaacagtctgttccacaaacaacagtaattgaatttcacagactttatcctgattagtggaaatcaaataatggagtggaatccccatgtgttttctcttgcacaaacttattagacttgattagaaaactgtttggaggaaaaacttgccagtaagttttttggttgttgttttgttttttttgaaaaacgacgcaacaccataaagtgtaaaattaggggttctggccaagagaggtactagatttttttaatgccgagaaaagtccatgccacagaagttattgtgtatgtctctagggagctttaagaatttcacgtttgaactttacagctgtttaccaattaaatggcaagctggaaagttcaaacgtgaaattcttaaagctccctagagacttcacccgggggtgaaggggtaaacccgactgaaactggaacccttgtcctccgctggtgcgggatgacagagggccgtgaggggtccccctgcttatcttcacccctgccagaaccacaaatatcggggtcn

SEQ ID NO: 109335 - DNA, 3199 bp, Homo sapiens
ttccctgtccctgcttggtggagctgccacgtgtggttcagttctaagttctggactagtgccactcgatatcattgggaataaatcgttgttcaacagtctgttccacaaacaacagtaattgaatttcacagactttatcctgattagtggaaatcaaataatggagtggaatccccatgtgttttctcttgcacaaacttattagacttgattagaaaactgtttggaggaaaaacttgccagtaagttttttggttgttgttttgttttttttgaaaaacgacgcaacaccataaagtgtaaaattaggggttctggccaagagaggtactagatttttttaatgccgagaaaagtccatgccacagaagttattgtgtatgtctctagggagctttaagaatttcacgtttgaactttacagctgtttaccaattaaatggcaagctggaaaaatacattttgagaggggtagaaagaataagaatataattaaaagtatgctaacaaaataagcagtacatatttttttagaaaatgcagtttaggccaggcacggtagctcgtgcctgtaatcccagcactttgggaggccgaggcaggtggatcacctgaggtcaggagtttgagaccagcctggacaacatggtgaaaccccgtctctactaaaaatacaaaaaattagccaacgatggtgatgcctgtctgtaatcccagctactctggaggctgaggcaggagaatcgcttgaaccggggaggcagaggttgtagtgagccaagattgcaccactgcactccagcctgggcaacagagcaagactccgtctcaaaaaaggaaagaaaatgcagtttcattccagccatccctagatttcttttccccttaaagtggctgaatccattggagatgtgatttattttgcagatccaccaattccaaacttcaggaatattcaagcgggagtcatgtgtaagtgacagctttgacaaagagagactgtggctgggtggcccgggtgttgcccacgcggagcaaggattggttcattcaacggatggagagtacaggatggctgggacctgggaagttccagaatctgaaaagagggcagggcaagaaggagccagaagagaggtccccggaaggtccatcttgtcctggagcacacccagccccattcagggtcagtgcaggagggaacagggaatctgcatttcagtaagctccccaggtgaggctgcagagcagaaaccacggctttcagacgtgagcaggctccctgggctcttggtgtcaccctgttagccacatctgcggaatgtggaaggcagaacatagccacgctgcttagtgctgccagcgaacctcaggttgcatcagtggctggaatctatcacagctgttggggatacgtaactcccagcaataaatccagtattttcttccctgccctgagcttcctctgggtttcttatcagcagctattacacacagatgtccagtgcttctaaactaaattgtactgtgtaacttttacatcacacttgtgtgcttaaaaagcacaccgtgggtagtgactgggccaagagacatcacaaagcttcctgataaatttgaatccagccacggcaagagcgacgtgcgggtacctggtccctgatgcttgggtgccccgttgagcctcgggtacttcttggacactattgtgagagcagccatcctggtgtctctgccagcatcttggggaacgctgtgatggtaaaatatctgtctctcctctgggaatcagggcagccctgagaagtgagcagttccctttacagatggataattgtttgtgtaagaccaaccagatgaagtccaaactgtgtagaacacacgtgtgcctcacacatagccatctgagtaaaatattttttccaatgtagatttataattagaaatgacagatttataatatagacttcagtagggttgggcacagctgtcactttcgtggtatcaataaaaggctagaaaccttgagtgtccttggcaacctagcctttgacattgatgtttttccataggattttcttcatttgggttggaataaaaatgcatttttattcacaaggcacagacagataagaatatcataagcagggaagtgtctccaaaggtcaggacttatgtttttctgttgagtgctatatgtggaggttattgcaagttccctgatatgagtatggtttcgcttgctacattgtgcctattaaagtaaaattttacacaagcctcgcatttctaagattagtgttcccgaatgaaatgttaagaaaacattaaaagattatctctttttaagatggaggaaaaaaagtgaacaaagctaattaatctataatgaaaattgcacaaaataacatttcttaacaaatttaatacaattttgtgttctttgttgctagtggtataaaacgagatttttttccctcatttttctcattgtagatgtcatctctcacatttatatcagtgaggtttgaaattctgtgtagcagttactcagcacatatgagagggcagcgaatgaatgagatttgtcatgtgctaataaaagctgaatttttgtaatctaaaatgatgtattttctactattgctgttaatttgcattgttaaaaattcttaaagtttaatatgttatgttcagtcattgaaagcgaccactcatttttttcttaaagttgatgccttttctgctgtgctagagtcagtattttgcttctggcaggagagctgcaaactgtgtatcctcaaacagatgcaaaaagtagtgctttgcaaaacgtttgttttctgtttatctcagattaacatcctttaatacaagtttcttaagtgtaacttgtatttctgaaaatgcttaaaattattttatatttccctttgggaatttttctctatttccagcacgctgatttgatttaaaaatgtaataagaccaagagttggagtaaagggatattcattccatgttaaaagtggcttcatagctactgacaaatgtctgaactattgtcgtgcccttcaaaactggagttttctaaaataatcttatttttatacttgtatgttccagcaatttaagatatataccattgaaagggaaataaaacatttttgtttatttgaataaataatactcccaa

SEQ ID NO: 109336 - DNA, 825 bp, Homo sapiens
gttgtgtctcttggttcatgcattacttcattgctttgacatgacctatccttttttccttctccccgaactcctgggctccaattagaaactagctttttatcctaggctgcagtcctgcctaccaactttttttgtttcataccttctattctggagcccattgtacagccactgactttggagcctttactactccaacttggcttctgagagttagatttgtagatggcattgaattgggactcacaatgacagatgaaaaacttcattctgactttttaggccattggtgttaggtgctaggactgaaatcctagtatgtgaaagctggaaggggttttagagaccatctctcccaaacttcttatttacatatcagaagaacaaacttacccaaggttttggtaagccagggctagaatataattttctctgattctcattcatatgttgttctcactctgttgtggagcctgtctaccctaatggagcctgtttgggttgttaggaggtctgggacctacacagaggagaaccaggaagcagttcacaatattatattatgttcaccgaaattggtctgggtacaattagggatatacaaagtcaaatgtcaagtgctgcttctttggacctatccagctagaaagcttttttattaggcacagaaaaagaagcccagcaatatctgtttcctatggtgcctaatatatgcaccctataccactctcttgacaatatctgttcagagcaatgaggaatctgtttgctgggatgtacagtataggcatctgaaggagacaggtcagagccttatgttgt

SEQ ID NO: 109337 - DNA, 441 bp, Homo sapiens
cagctggattacaggcacgcgccaccacgcccaaacaattttttgtatttttagtagagacagggttttaccatactggacaggctggtctcaaactccaaaccttgtgatccgcccaccttggcctctcaaagtgctgggattacaggcgtgagccgctgtgcccggccattataactttttaagtacatcaaggagtctttcccaggagagatgaaaattcatttgattttttatatttcaaggtttagcagacaataaagataggcacccaccagttacataccgcagacttgtcaacatgcgtatgtattggaaatggtacatcctttggtgggttgaaaagggggttaagtaagagcaaggagcatacattcctgcaggcaacctcttcacagtcagagctggggctgctgcaggcaaccctggtgtccattactt

SEQ ID NO: 109338 - DNA, 533 bp, Homo sapiens
caagccctcttcagtggacttggcatactacagtcaggggcattttctgaaatgcaaatctgattacatcactcttggctttccttaaaaaccttcactagcttgccattgctcttacgatgatataatttgaaatcctctacctggcccccagggtcccttctcccatctgatctggcaagcccccactctgtgtgcctgctccctccctcattctttctttcatttccagcctcatcccccatttctctttttccaggttctctgttccctagttatgtggggcttctagattttcaactgtaccatactccttcctgcctcagatgctattccccagctgaggatattcctcactctctgctaatttaattcctcctcttctgagaggtcagcttcatgagaagttgtattgtgcagtagtcaagaatgtggactttggagctagactgcctgggatcaaatcctaggtctgatactttctactttggacaaattacttaacctctcagtttcttcatttgtaaaagagg

SEQ ID NO: 109339 - DNA, 674 bp, Homo sapiens
caggcaaacaagacccctttccaaagcctctgcgtcagagtgtccagcccgcgatgtccctgggcagggcaccccagtgtccaccgaacctcgagctgcctgctccctcccgcagtggtggcgctccgaagaggcgcaggacatgggcccgggtcctcctgaccccacggagccgcccctccacgtgaagtctgaggaccagcccggggaggaagaggacgatgagaggggcgcggacgccacctgggacctggatctcctcctcaccaacttctcgggcccggagcccggtggcgcgccccagacctgcgctctggcgcccagcgaggcctccggggcgcaatatccgccgccgcccgagactctgggcgcatatgctggcggcccggggctggtggctgggcttttgggttcggaggatcactcgggttgggtgcgccctgccctgcgagcccgggctcccgacgccttcgtgggcccagccctggctccagccccggcccccgagcccaaggcgctggcgctgcaaccggtgtacccggggcccggcgccggctcctcgggtggctacttcccgcggaccgggctttcagtgcctgcggcgtcgggcgccccctacgggctactgtccgggtaccccgcgatgtacccggcgcctcagtaccaagggcact

SEQ ID NO: 109340 - DNA, 1619 bp, Homo sapiens
tcagagttcacgaggcagccgaggaagaggaggcttgaggcccagggtgggcaccagccagccatggccacagccgagaccgccttgccctccatcagcacactgaccgccctgggccccttcccggacacacaggatgacttcctcaagtggtggcgctccgaagaggcgcaggacatgggcccgggtcctcctgaccccacggagccgcccctccacgtgaagtctgaggaccagcccggggaggaagaggacgatgagaggggcgcggacgccacctgggacctggatctcctcctcaccaacttctcgggcccggagcccggtggcgcgccccagacctgcgctctggcgcccagcgaggcctccggggcgcaatatccgccgccgcccgagactctgggcgcatatgctggcggcccggggctggtggctgggcttttgggttcggaggatcactcgggttgggtgcgccctgccctgcgagcccgggctcccgacgccttcgtgggcccagccctggctccagccccggcccccgagcccaaggcgctggcgctgcaaccggtgtacccggggcccggcgccggctcctcgggtggctacttcccgcggaccgggctttcagtgcctgcggcgtcgggcgccccctacgggctactgtccgggtaccccgcgatgtacccggcgcctcagtaccaagggcacttccagctcttccgcgggctccagggacccgcgcccggtcccgccacgtccccctccttcctgagttgtttgggacccgggacggtgggcactggactcggggggactgcagaggatccaggtgtgatagccgagaccgcgccatccaagcgaggccgacgttcgtgggcgcgcaagaggcaggcagcgcacacgtgcgcgcacccgggttgcggcaagagctacaccaagagctcccacctgaaggcgcatctgcgcacgcacacaggggagaagccatacgcctgcacgtgggaaggctgcggctggagattcgcgcgctcggacgagctgacccgccactaccggaaacacacggggcagcgccccttccgctgccagctctgcccacgtgctttttcgcgctctgaccacctggccttgcacatgaagcgccacctttgagccctgccctggcacttggactctcctagtgactggggatgggacaagaagcctgtttggtggtctcttcacacggacgcgcgtgacacaatgctgggtggttttcccacgaatggaccctctcctggactcgcgttcccaaagatccacccaaatatcaaacacggacccatagacagccctgggggagcctcttacggaaaatccgacaagccttcagccacagggagccacacagagatgtccaaactgtcgtgcaaacccagtgagacagaccgccaaataaacggactcagtggacactcagaccagctcccagatggccctggacagcaggagagggtgtgggatgaggcttcccagagaccctgggtctagaaagcggctcctgaaggtcccttattgtggctgatattaactgtcaatggttatgggtcctataaaaatgcccctcccagataaagctt

SEQ ID NO: 109341 - DNA, 528 bp, Homo sapiens
gcccacagagcttgatccagaagtgcacaggtaagtatttagcaggctggccgatgttgatttgaacaatctcaagaatgtgctctttagtgcattaaacatatgtgacgagagctgagcacgtttaaaatctcagtaactttggggtttgtaagtgttgtagctcatagtgtcggttaaggttagacatctcagtcacatgctgtcttggcaccagctgtggactgtgctgtgaaagagatctgtgaccttgcaccctgagatctcaggctcaattaagagacaaaacaggcaatgcagtatcagtgcagatgggaaagagaaagcagaaagtatgaagagggaaaggaggagcacaaaggagttagcattagtctctactgagcaattcctattccaaccacgtcctaaatgatgagttggatcctagcagaaagggaacacatgttatttttaactgattttaacttgatttattgtaacctatcaggagctcttaataaatatggctctttatgttgttagcaa

SEQ ID NO: 109342 - DNA, 515 bp, Homo sapiens
acttcctttgttagcatttttttttttcaaaataattagcttggaataattcttaagccaaagggacatattttggggttgcatattctggtttcctaccattatattttggggtggcatattttggtcttatacactgtgttccaccggcaatgaaaagagttcttgtttttcctccagcaatttgtcatttgttaaagagtttagcagttctaagagatatagaccagctgtgctatctttttgtggttttcagttctctagtatgttgagcatctttttgtaagtgtacttgccatctgtagatcttctttggtgaggcgtctgttcagatctgtgtgcatttttaattgggctgtttaacttattgtttagttttaacaattttttatgtattttgaatacaaattctcagatctgtattttgcaaatattttcttcaatatgtggcttgtcttttggttctcttaacaaggtctcttccagagtataaactgtaaataataagaaatcca

SEQ ID NO: 109343 - DNA, 448 bp, Homo sapiens
actggcccaaggcacgaggggagagctcatgccagatccaagtgtgggtggctggagtttgcagtgctttggaggaataacgaactggaactctggggaaagctctagacagtggtgagtggtctgcaggtccatcctggttggcaggttgggaagagctgggcttgccctgtgaggttggctggtgtgactgcctcatcagggcccctccccattccatcacagtcactcacctagccttgggtctcgcctgccgtgctgtgctgtgaggtggcctggtgctggctgtgcagacgccctggcttgctgcactccctggcagagtgctcagaagcaggaaacagacaagaggagcgccagggtggcccggccagagcctcacaggccttgcactctttgtgctggcctttccactggccaccttggctgtggcctgtgacttctagta

SEQ ID NO: 109344 - DNA, 249 bp, Homo sapiens
tatttcctgccttgagtcctttgctgggcttctttctcatttattcagctgtcactgggcatttccacatcatgttcttcaccaatgattatccagaatgagacccctaacaatacctgcctcctgttcctagccacagacctgctgctctacctgtattttctctccacacagatgtacaagacagaaaccttacagtcatctctgtcactcctgcacttccacattctcccacatccatccaaagga

SEQ ID NO: 109345 - DNA, 926 bp, Homo sapiens
gggaagacccgaagacagacattcctgttagtcccactttttctttgttttctttcaaacaagcagggaagtgaggaaagcacaggttcagttttaataatctgctaacatggcacttgtctgggctgttacccatatgggtcaaaccatgtctgtcctggagtgtgcttgaaattcacccagtgatcacagcatgcagacacgttgaaattggcagcatctctgagcatttctctggctcctgctgcctagtgtatacctcttttgccttgctgttgggtgaggcatgtttcaatctacttgttttataagactagacaatattcagtaaaatgggccaccccagagcttagaacagaagctctgggaaaaaaaatatctaatacgaggaagtattcgttgtgggggaatgtcaatttaaataatttaacatgtaaaatagtaattgtcttaatttaggctataacgtttttcagtaagcattttcacgttagcttctcataaatcttagtttgttcacttagaggtcttgatgttcttattaatttcgatacattatttacatatataatttcctgtctgcttcctttgaagtatgtgattttttttttaattgtagaggagacacagtttctgtaattatacatacaccagtgttttttgttgttgctatttcttgtattactgcaaagcttaggaggttttctctcttaggtctaggggtcaagatcacgtttgcttgataagatgaaccaatgaacttccccgtcattttccgtgagcccaaagagtttatctttcatgacaccaactttctattgggctgagactgaataaaggactgaagtaggcactcacgaaatgtttgtcaaatactgatactgttgaaagagtagaattagttgcacctcaaaaatctgaaataa

SEQ ID NO: 109346 - DNA, 411 bp, Homo sapiens
tacaacacaattcaccagttccaagtatacagtttgataaattttgacaaatgcacatggtttgtaactaccaccaacatcaagatgtagaatatttccatgactccagaaagtttcttcaggctcctttacagtaaattctctctctaccatgaaagctgttgtttttgtggtctctaccatgatgacaaaaacaactgctttcattagtttttatgtatttgggaattttatatcaacagaattatataatataaagaagttttatatgtctggcttatttcattccgcataatacttttgagattcttctatattatggggagtagtaatttcttttttattgatgagtaatattctcttgtatgactatactacaatttgtttacccattcaccagtggatagacat

SEQ ID NO: 109347 - DNA, 628 bp, Homo sapiens
gcgactctggataatgagaatgtttaaaaagcagccacacagaatttatgcatataaatgcctactttaatctatttcatgtttataccttttgtattttaatatggttatatgccatttacgaaaataaatgattaattctttataataagaaaaataagccagggacagcagctcatgcctgtgctcccagagtgctgggaatacaggcatgagccaccacacccagtcagaaacttttttttttttttaagtattctctttggaagtcttgttgccccagcccaaggaatttgctaaattatccttataatcacaaacagtactctctctgagagggctcctgttgaactcagttttctctatcttcttatattttcagagatgtttcaagacccattttagactgatacctcattacatccccatctggctcactctttaatttggctctgggttccctataccaactgtttggggtttataataaagaatgtacatgttaattaaatatgttcatgccacttccagaagtctcaatcctggaaagaaaaaaaatgcaaaataagaaaaaacatctctatgctttaagacgttttttgcagtatcttgacggagagcagtgaga

SEQ ID NO: 109348 - DNA, 408 bp, Homo sapiens
atagagacagggtttcactctgttgcccaggctgatcttgaactcctgagctaaagggatcctcccatcttggcctcccagagtactgtgatcataggcatgagccaccacacctgacctgacacatttttttaatgtattatgaaaaaaatgtattttgtctctcattggttagaggagaaaaaatttcaaatagacataaaagtagagagaaatgtaacaaacccgtcttctacccatccttttgctcccatgtcatcagcttttcccccaggctttttttttgtgggggtggggtggaggtaaagttggcttatactgtattactagcaccgtaaattgctctagaaagtagttattacagattgttaaatgggaacgaatattagatcttgacatgggcacaaa

SEQ ID NO: 109349 - DNA, 1229 bp, Homo sapiens
gtaaacctgagactttcccagtctccaggagacaaaaccctaatttctttcaatctgctgtcttcctcgtgccgaattcggacgaggctataagcctgcattctataaatggcgtatgaccatgggctgtttccccccagcaagttgtacaaagttctgtggtaccagggaaagggcttaaggttagcagggcctctgcggaaggacatatgaagtgacttgggttaggaaacaggaagggataggattcaagaacagctattgcttctgttctatataggaaactgcagcgtgaaaaatgctgggctgggaattttgagacctgggttttagtttgtgttctaatactaacaagctatgtgactgtgggtaagtcatttcacattccatttggatgcctcttgagtgactccaggcctctccagctctaaaacattaagatcaggccctacgctacagctggccagtgtgtaattcttctgtttctatgctgttaggtcaaatagatcttcaatagttacttgattgttattacttttttctgaagtgggtgttttatcaatgttttaggatacagtgagtctgcttctcccctttggagttaggaaggttgtaggaatatacactgtagagcatatgggagctttatcccctccttttttccccgctacctttctccctctccttcccttcatcacatttctattgagcatatgccattgccgtgtaccaggtgtgtgctaggtttggagatacaaggtaaacctgagactttcccagtctccaggagacaaaaccctaatttctttcatctgctgtctttctctttggaaagaatcaacgatatcccaggggaatgtgcccatgtcccagggtaaccaactacagacagatgccccattctactcaagcaacttttagagtgccttgagatacacatcagataattatgcagggccaggcatggtgctgcacacttgtaatcacagcactttgggaggccgaggcagcagattgcttgagcccaggaattcaagtgtagcctagggaacatggcaaaaccccagctctacaaaaaaatacacaaattagctgcgtgtggtggcctatgacaggaggctgagatgggaggattgcttgagcctgtgaggtcgaggctgcagtgagccgagatcatgccattactccagcctgggtgacatagggagaccctgtcttgaaaaaaaaaa

SEQ ID NO: 109350 - DNA, 634 bp, Homo sapiens
ggcacgagggaaaggtagcggggaaaaaaggaggggataaagctcccatatgctctacagtgtatattcctacaacctttctccctctccttcccttcatcacatttctattgagcatatgccattgccgtgtaccaggtgtgtgctaggtttggagatacaaggtaaacctgagactttcccagtctccaggagacaaaaccctaatttctttcatctgctgtctttctctttggaaagaatcaacgatatcccaggggaatgtgcccatgtcccagggtaaccaactacagacagatgccccattctactcaagcaacttttagagtgccttgagatacacatcagataattatgcagggccaggcatggtgctgcacacttgtaatcacagcactttgggaggccgaggcagcagattgcttgagcccaggaattcaagtgtagcctagggaacatggcaaaaccccagctctacaaaaaaatacacaaattagctgcgtgtggtggcctatgacaggaggctgagatgggaggattgcttgagcctgtgaggtcgaggctgcagtgagccgagatcatgccattactccagcctgggtgacatagggagaccctgtcttgaaaaaaaaaa

SEQ ID NO: 109351 - DNA, 2372 bp, Homo sapiens
ctggcacgagggaagactgaagctttctgccgcgagtttcctccgagttcccgttgctgagacaaaggaaaacccactcccttggaggagcatgaccttttcctgtaattcttcccactgctgttgttgagctccttggatcctggctcctggacaccatcatcaagaagactttatggatgggctgtccacccactgagagaagaggagcatcagctacagtttctctctagattgccttcttcattttgagtaatgactgtcagcagggtcagattaaacacaaaacaactggacaattgcttggaggactaaactataagggcactaacatgtcaatagtaggctaacacatccatggaaaatatatttaccagctcttctctcagggaggattctgtgtggggttggaagtaatgatttgttaaattccttaggggtagaaagtagggcataatcagaatatagaggaatatgctgtttgacttcagggtttctgtttttcttactaggatatataaaacagggactctagctagattgtttatgaccacagagggtaggctgagtgctcccatgatcttcctgcttggttcttgcccatacagaggtcagcctttcctctaataaagattgaacaagtagtggtctgagggagacaccaattcattaccctacatgtctcttctctgcactccagggctttgataataaagacactggcagactatctatcttccatttctataatgtgagcccttagggagtcttcgttcacttgggggtgagggtcattgctcacagagtagttcaagtcaaatggaacttgaactctttgcctatgggcctggtggtcagactctgtgttgagttcattagattattggagacacaaggtagagctggatgcttcaaaaatatttggctaaaggatgacattgctggttatttgtagataaagccatgatggaacctgcttggaatcatgaaatatggaactggtggtcatgtttaaaaatacaactaatagttaagtacctactggacactgtagagacttaggggctagacagacatggttcctgcccccttggagcttacactgtagcttccccttaggtatgaagaacagtggctacaactaacaaatggccacaaagatataattgagccagtgttccaattattagggtaattcctatttccttaatcattcctattgaccatgttctataagcctgcattctataaatggcgtatgaccatgggctgtttccccccagcaagttgtacaaagttctgtggtaccagggaaagggcttaaggttagcagggcctctgcggaaggacatatgaagtgacttgggttaggaaacaggaagggataggattcaagaacagctattgcttctgttctatataggaaactgcagcgtgaaaaatgctgggctgggaattttgagacctgggttttagtttgtgttctaatactaacaagctatgtgactgtgggtaagtcatttcacattccatttggatgcctcttgagtgactccaggcctctccagctctaaaacattaagatcaggccctacgctacagctggccagtgtgtaattcttctgtttctatgctgttaggtcaaatagatcttcaatagttacttgattgttattacttttttctgaagtgggtgttttatcaatgttttaggatacagtgagtctgcttctcccctttggagttaggaaggttgtaggaatatacactgtagagcatatgggagctttatcccctccttttttccccgctacctttctccctctccttcccttcatcacatttctattgagcatatgccattgccgtgtaccaggtgtgtgctaggtttggagatacaaggtaaacctgagactttcccagtctccaggagacaaaaccctaatttctttcatctgctgtctttctctttggaaagaatcaacgatatcccaggggaatgtgcccatgtcccagggtaaccaactacagacagatgccccattctactcaagcaacttttagagtgccttgagatacacatcagataattatgcagggccaggcatggtgctgcacacttgtaatcacagcactttgggaggccgaggcagcagattgcttgagcccaggaattcaagtgtagcctagggaacatggcaaaaccccagctctacaaaaaaatacacaaattagctgcgtgtggtggcctatgacaggaggctgagatgggaggattgcttgagcctgtgaggtcgaggctgcagtgagccgagatcatgccattactccagcctgggtgacatagggagaccctgtcttgaaaaaaaaaa

SEQ ID NO: 109352 - DNA, 2417 bp, Homo sapiens
gagcttctgccctgagactcagaaaaatattctcctgtgctttggttcagtatagatttctaaaccctgatcattgcttaagagatattcactgagggttgctgagacaaaggaaaacccactcccttggaggagcatgaccttttcctgtaattcttcccactgctgttgttgagctccttggatcctggctcctggacaccatcatcaagaagactttatggatgggctgtccacccactgagagaagaggagcatcagctacagtttctctctagattgccttcttcattttgagtaatgactgtcagcagggtcagattaaacacaaaacaactggacaattgcttggaggactaaactataagggcactaacatgtcaatagtaggctaacacatccatggaaaatatatttaccagctcttctctcagggaggattctgtgtggggttggaagtaatgatttgttaaattccttaggggtagaaagtagggcataatcagaatatagaggaatatgctgtttgacttcagggtttctgtttttcttactaggatatataaaacagggactctagctagattgtttatgaccacagagggtaggctgagtgctcccatgatcttcctgcttggttcttgcccatacagaggtcagcctttcctctaataaagattgaacaagtagtggtctgagggagacaccaattcattaccctacatgtctcttctctgcactccagggctttgataataaagacactggcagactatctatcttccatttctataatgtgagcccttagggagtcttcgttcacttgggggtgagggtcattgctcacagagtagttcaagtcaaatggaacttgaactctttgcctatgggcctggtggtcagactctgtgttgagttcattagattattggagacacaaggtagagctggatgcttcaaaaatatttggctaaaggatgacattgctggttatttgtagataaagccatgatggaacctgcttggaatcatgaaatatggaactggtggtcatgtttaaaaatacaactaatagttaagtacctactggacactgtagagacttaggggctagacagacatggttcctgcccccttggagcttacactgtagcttccccttaggtatgaagaacagtggctacaactaacaaatggccacaaagatataattgagccagtgttccaattattagggtaattcctatttccttaatcattcctattgaccatgttctataagcctgcattctataaatggcgtatgaccatgggctgtttccccccagcaagttgtacaaagttctgtggtaccagggaaagggcttaaggttagcagggcctctgcggaaggacatatgaagtgacttgggttaggaaacaggaagggataggattcaagaacagctattgcttctgttctatataggaaactgcagcgtgaaaaatgctgggctgggaattttgagacctgggttttagtttgtgttctaatactaacaagctatgtgactgtgggtaagtcatttcacattccatttggatgcctcttgagtgactccaggcctctccagctctaaaacattaagatcaggccctacgctacagctggccagtgtgtaattcttctgtttctatgctgttaggtcaaatagatcttcaatagttacttgattgttattacttttttctgaagtgggtgttttatcaatgttttaggatacagtgagtctgcttctcccctttggagttaggaaggttgtaggaatatacactgtagagcatatgggagctttatcccctccttttttccccgctacctttctccctctccttcccttcatcacatttctattgagcatatgccattgccgtgtaccaggtgtgtgctaggtttggagatacaaggtaaacctgagactttcccagtctccaggagacaaaaccctaatttctttcatctgctgtctttctctttggaaagaatcaacgatatcccaggggaatgtgcccatgtcccagggtaaccaactacagacagatgccccattctactcaagcaacttttagagtgccttgagatacacatcagataattatgcagggccaggcatggtgctgcacacttgtaatcacagcactttgggaggccgaggcagcagattgcttgagcccaggaattcaagtgtagcctagggaacatggcaaaaccccagctctacaaaaaaatacacaaattagctgcgtgtggtggcctatgacaggaggctgagatgggaggattgcttgagcctgtgaggtcgaggctgcagtgagccgagatcatgccattactccagcctgggtgacatagggagaccctgtcttgaaaaaaaaaa

SEQ ID NO: 109353 - DNA, 2540 bp, Homo sapiens
gagcttctgccctgagactcagaaaaatattctcctgtgctttggttcagtatagatttctaaaccctgatcattgcttaagagatattcactgagggtcctacgtctctgcaatttgtgtatgaataacagaataatttccctcttttgtttcgcctttcctgttcctgaatctaaataaagatggctttttagtattaaaagtggaagaaaattacaggttgctgagacaaaggaaaacccactcccttggaggagcatgaccttttcctgtaattcttcccactgctgttgttgagctccttggatcctggctcctggacaccatcatcaagaagactttatggatgggctgtccacccactgagagaagaggagcatcagctacagtttctctctagattgccttcttcattttgagtaatgactgtcagcagggtcagattaaacacaaaacaactggacaattgcttggaggactaaactataagggcactaacatgtcaatagtaggctaacacatccatggaaaatatatttaccagctcttctctcagggaggattctgtgtggggttggaagtaatgatttgttaaattccttaggggtagaaagtagggcataatcagaatatagaggaatatgctgtttgacttcagggtttctgtttttcttactaggatatataaaacagggactctagctagattgtttatgaccacagagggtaggctgagtgctcccatgatcttcctgcttggttcttgcccatacagaggtcagcctttcctctaataaagattgaacaagtagtggtctgagggagacaccaattcattaccctacatgtctcttctctgcactccagggctttgataataaagacactggcagactatctatcttccatttctataatgtgagcccttagggagtcttcgttcacttgggggtgagggtcattgctcacagagtagttcaagtcaaatggaacttgaactctttgcctatgggcctggtggtcagactctgtgttgagttcattagattattggagacacaaggtagagctggatgcttcaaaaatatttggctaaaggatgacattgctggttatttgtagataaagccatgatggaacctgcttggaatcatgaaatatggaactggtggtcatgtttaaaaatacaactaatagttaagtacctactggacactgtagagacttaggggctagacagacatggttcctgcccccttggagcttacactgtagcttccccttaggtatgaagaacagtggctacaactaacaaatggccacaaagatataattgagccagtgttccaattattagggtaattcctatttccttaatcattcctattgaccatgttctataagcctgcattctataaatggcgtatgaccatgggctgtttccccccagcaagttgtacaaagttctgtggtaccagggaaagggcttaaggttagcagggcctctgcggaaggacatatgaagtgacttgggttaggaaacaggaagggataggattcaagaacagctattgcttctgttctatataggaaactgcagcgtgaaaaatgctgggctgggaattttgagacctgggttttagtttgtgttctaatactaacaagctatgtgactgtgggtaagtcatttcacattccatttggatgcctcttgagtgactccaggcctctccagctctaaaacattaagatcaggccctacgctacagctggccagtgtgtaattcttctgtttctatgctgttaggtcaaatagatcttcaatagttacttgattgttattacttttttctgaagtgggtgttttatcaatgttttaggatacagtgagtctgcttctcccctttggagttaggaaggttgtaggaatatacactgtagagcatatgggagctttatcccctccttttttccccgctacctttctccctctccttcccttcatcacatttctattgagcatatgccattgccgtgtaccaggtgtgtgctaggtttggagatacaaggtaaacctgagactttcccagtctccaggagacaaaaccctaatttctttcatctgctgtctttctctttggaaagaatcaacgatatcccaggggaatgtgcccatgtcccagggtaaccaactacagacagatgccccattctactcaagcaacttttagagtgccttgagatacacatcagataattatgcagggccaggcatggtgctgcacacttgtaatcacagcactttgggaggccgaggcagcagattgcttgagcccaggaattcaagtgtagcctagggaacatggcaaaaccccagctctacaaaaaaatacacaaattagctgcgtgtggtggcctatgacaggaggctgagatgggaggattgcttgagcctgtgaggtcgaggctgcagtgagccgagatcatgccattactccagcctgggtgacatagggagaccctgtcttgaaaaaaaaaa

SEQ ID NO: 109354 - DNA, 1316 bp, Homo sapiens
  misc_feature (1135)..(1135): n is a, c, g, or t
  misc_feature (1138)..(1140): n is a, c, g, or t
  misc_feature (1153)..(1153): n is a, c, g, or t
  misc_feature (1157)..(1157): n is a, c, g, or t
  misc_feature (1163)..(1163): n is a, c, g, or t
ctggcacgagggaagactgaagctttctgccgcgagtttcctccgagttcccgttgctgagacaaaggaaaacccactcccttggaggagcatgaccttttcctgtaattcttcccactgctgttgttgagctccttggatcctggctcctggacaccatcatcaagaagactttatggatgggctgtccacccactgagagaagaggagcatcagctacagtttctctctagattgccttcttcattttgagtaatgactgtcagcagggtcagattaaacacaaaacaactggacaattgcttggaggactaaactataagggcactaacatgtcaatagtaggctaacacatccatggaaaatatatttaccagctcttctctcagggaggattctgtgtggggttggaagtaatgatttgttaaattccttaggggtagaaagtagggcataatcagaatatagaggaatatgctgtttgacttcagggtttctgtttttcttactaggatatataaaacagggactctagctagattgtttatgaccacagagggtaggctgagtgctcccatgatcttcctgcttggttcttgcccatacagaggtcagcctttcctctaataaagattgaacaagtagtggtctgagggagacaccaattcattaccctacatgtctcttctctgcactccagggctttgataataaagacactggcagactatctatcttccatttctataatgtgagcccttagggagtcttcgttcacttgggggtgagggtcattgctcacagagtagttcaagtcaaatggaacttgaactctttgcctatgggcctggtggtcagactctgtgttgagttcattagattattggagacacaaggtagagctggatgcttcaaaaatatttggctaaaggatgacattgctggttatttgtagataaagccatgatggaacctgcttggaatcatgaaatatggaactggtggtcatgtttaaaaatacaactaatagttaagtacctactggacactgtagagacttaggggctagacagacatggttcctgcccccttggagcttacactgtagcttccccttaggtatgaagaacaggtncannnacaatggccaatntttnggccgntcctttaggaacgcaactaaatcattggaagtgtaaagcggttaagggggacggggtcccccagtgaattgtgccaggagagcctgatacatggaagagggactctgcttaaaggagagatggaaagtcgttgcgtaacatattgttttttgt

SEQ ID NO: 109355 - DNA, 271 bp, Homo sapiens
gggaggtggaggttgcagtaagctgagattgcatcactgcactccagcctgggcaacggagcaagactccatctcaaaaaataaataaataaggaagaaagtaagaaagattttggtggtgcttacctgctgagatgaacattactgtctctactaaataacctcataaaatgttttaaatgcattctttatttagggcttcagaccaatgtatctcctactgttcctctctcccttcttctatgtctccacccctattccctaccctttc

SEQ ID NO: 109356 - DNA, 623 bp, Homo sapiens
gaccagcctggccaacacagtgaaaccctgtctctactaaaaatacaaaaattagctgcgtgtggtggcacgtgcctgtagtaccagctacttgggaggctgaggtaggagaatcgtttgaacccaggaggcagaggttacagtgagttgagaccatgtcattgcactccagcctggacgatagagactccatttcaaaaaataaattaattaataaatttcaatttctactgaattttattacaatgacttcatatacatagtaaatactggttataagtaatccttcccaagaaggacctgcaataatgctgttcaagttgccactgagcttactctcctcgccaaaaggataccgtggaagtcactgtcttcgcagatttccaattctcaaacatcaaaatctctctagtcacttatttgggattttcagagacttacatttcttatagattatggtagaaaaggcttatgttgtagccaggcgtggtgggtcaccctgtaatcccagcactttgggaggccgaggcaggcggatcatgaagtcaggagttcgagaccagtctgaccaacgtggtgaaaccccgtctctactaaaaatacaaaaattagctgggcgtgat

SEQ ID NO: 109357 - DNA, 454 bp, Homo sapiens
tattctatttctgtacaatattctttcccactcagaagaactattcctctgtgattactgctagtctctaactcatttcttaatactaactaaatacacattcacaatgaattagcctatatcatgttctattttgatctttgatgttgctgtcaggcagaataacagtatgaaattataacagttgtatttaatgtaacctgtgtggtacttggcaacatcatgaatattcattctttggtaagacttagcctttggctttgttcctgattcagattttcctcacatgtggctatgtggtagctcttgctcaactatctagatgcttgctggctaatgcttttcacttgtcaaatggtaaatatgcagccatcactttccagataatattgccatctgggtagaaatcaccgtacattctgaatttttcttgtgtactttttagctctgtgaa

SEQ ID NO: 109358 - DNA, 278 bp, Homo sapiens
acactaccctacttcaagacttactataaaactgcaataactgagacaatgtggtgttggcaaatagagaaacaggtcagtgaaacaggataaagatcttagaaatatactgacaaaaatgaaatcaactgatctttggtgaagaagcaaaggcaatacaataaagcaaaggtagtcttttcatgtttgaacaactggacattcacatacaaaaatgattctagatatagactttatacccttcacaaaagttaacttaaaatgcatcacacacctaa

SEQ ID NO: 109359 - DNA, 670 bp, Homo sapiens
gacagtggaggaatcagagaaagcgtgatgatgaataagtccctgaatcatttcttttctctctgctggttgaactctctcctcccaaaaagtgactgtggccttccagatattgtttctctccatttggctacttgggtctgcccttttagatgtatctagatttttgggtaattcatttagtgttataagccatttatacataaatcttgacatttggaactgctttgtcacctgtgtttctagttacacactggtataatccaggatttatccagaaaattctttcctttacccttccctaaggctaaagctgagtttttgtcttctcttccttgaatggaaggaatacttacattttttccccaggtttgcttttgaggccctttgctattttcttttaggtggtgattgaactctgtatacgaagtcctccagggagttggcctttgccatgcagtccttcttgcatacacagtccctgaagtactcaggtgctgctcaggtctcagagttcttggatgatggtacttatgagctctctatgtcgtattgcctactctatgaaccttgggagattactcttcctttttttttttttttaagttagatttaaaggagtgttttacctgaaggctcatttaaggttatttttcaaactacaaactgg

SEQ ID NO: 109360 - DNA, 528 bp, Homo sapiens
tctgaagagtcttcttctagcatgactctattctactcaaaaatctctttttatctttctcttctcttcttttttcactttttctgaggaacgagttgtcttctgctatatcaagcgaagctccccatttgtgtttttgattataaattctccaaattttctagaatcttgctccatgatcccccacctaacccaatccagccctctattaccataagatacttatttacttccccggcatggtggattatccctgtaatctcagcaccttgggaggccgaggcaggcagatcacttgaggttagttcgaaaccagcctgggcaacagggcgaaattccatctctacaaataataataatataaaaattagcctggtgtggtggtgcatgcctatagtctcagctacttgagaggctgaggtggaggattgctggagccagggtggcggagattgcagtgagcctgcatcgcacgactacactccagcctgggtgacagagggagaccctgtctcaaaaaaaaaaaga

SEQ ID NO: 109361 - DNA, 780 bp, Homo sapiens
ctctagtacaaccgacaaaatagttcataaagagatttctattactatgaccattttactgataaggaaattgaggcttaggcaggataagtgacttgaacaaggtcacatagctagaaagcggtggaactgggaatgaactcaggtaattcaccttcagagcttgcatgcctttgccaagtcaagcacttttaaagacctactttctaaagtgatcaagaagtttaaaagcctggacagggaaaagtaaagggaaaaaaagtacacaattcttagactttaaaacaacagcaacaaaaactactgtcagtctagaacctcttaaagcttcctggtttccaaagatttagaaagaaaaaccaagggggcgtcaaatttaaaacagtaaacatagagcctgaaaataatagagatatatatttaaccttcacacaaaccctatgatgtaaatgctttcaggaaacaaagcttggagtggttaagtaatgtggctactacatacaccaacaatgtataaaaactataaatttaaccttggtctgtccagctccaaagctcatgtactttttttctgctacttcattaagtgctgtgaaattctgcattgataactgtagaggagagaattggtgttcctgaaagaagagctcaccattgcagtgtgctaactctgcttttgtttaagaagagaaagtaaatgttatgtagtgcacttgttttgtctatttatatagacattttaatttttattttctttctaaatcctagatatggaaaaaa

SEQ ID NO: 109362 - DNA, 233 bp, Homo sapiens
tcttatatgcggaaaacccccgcgggattttacatcgcagaaagccactatatgccttagtccttcaggccataagctctgagggcataactgagtcagtcatcattgtcctgtgtcctggcacccggtaaagtgcctggcacatagtaatcgctcagtaaatgttggctcctgtcctcaattactgaacatttactatttctgtcctcaattactgaacacttactacaagc

SEQ ID NO: 109363 - DNA, 336 bp, Homo sapiens
ctgagaggttatgtcctgaaaggcaggcctaagtgctgggccaggaactttataggccacatcaaagttgacccccagccactggcaccttttgaagaagcagcattcgtgcatagaggcacaacttcagatcagtctaaaagcctgaaaatatacagaaactacattcattgggcagtctggtattcaaccgatttcttccataattgaatgaaggcataataacactgatgggtttcccatcctctaaaccagataaaaacacagtaacatagttgttgacctgtatgaagtcaggatccatgtcctttatagaacctatggggcattttctca

SEQ ID NO: 109364 - DNA, 130 bp, Homo sapiens
tggaagaggatgtcaatgggcaggaatggagccaaactctacgggagaacggagctggccaggcagagctgctggacacctgaggctccctccttccaccacaaacaccactgccccatggcctagagag

SEQ ID NO: 109365 - DNA, 312 bp, Homo sapiens
gcagtgacacgatctaagctcatggcaacctccgcctcccaggctcaagcggttctcgtgcttcagcctcctgggtagctgggattacaggtgcgcacaaccatgcccggcttgtatttttagtagagatgggatttcgccatgtgggccaggctggtcttgaactcctggcctcaagtgatccacccacctcggccacccaaagtgctggaattacaggcgtgtgccaccacgcgcccagccctgatacttgttttttacatatttacttcatgttctttgaaggcaggcactcgccaaggcttaacactt

SEQ ID NO: 109366 - DNA, 625 bp, Homo sapiens
aaataaaatggtttattcatatactgaaataaagtagcggaaatcagctaattatatatatatatataaatatagatgatattctagaaacaatgttgagtggggggaaaagaaaaattagagttgaataccactgtaataaaattttgtgtacatatataaatctgtagaaaaaaattaacgatttcaaagttttcaggatagaaggtacttctgagaaggaataggatcaagggagaagaacatggtggggttgggggacttaaactgtcctcaaactgttcagtgtcttacatttggtgccagatttccaagttcataatgcttcattacattactttctgtacataatatatttcctgataacattttctaacgttcggccaaaaccacattaatacaaagttattagtacaaagaaaacaggtggtttctttgaaactttactttgaaggcaaattggataaagagtcaagacccatcagtgtgttgtattcaggaaacccacctcacatgcagagacacacataggctcaaaataaaaggatggaggaagatctactaagcaaatggaaaacaaaaaaaggcaggggttgcaatcctagtctctgattaaacagacttt

SEQ ID NO: 109367 - DNA, 318 bp, Homo sapiens
gggatgtgcaggtgaacatcagaccaggatgggaaccttataatatctatgatatactatggcttctatcaaccagtttcaggaaaagcaaagaagaatgcagtcatggccaggtgcagtggctcacacctgtaatcttgaggtgggcagatcacatgaggccaggagttcgagaccagtctggccaacgtggtgaaaccccatcgctactaaaccccgtctctactaaaaaataaaaaattagccaggcatggtggtgggtgcctgaattcccagctacttgggaggctgaggcaggataatcacttgaacccagga

SEQ ID NO: 109368 - DNA, 307 bp, Homo sapiens
tcttcacggctgcaactcccatcacagtcctaaaggcctagaagggaaaaattttttcttgggttgggcccaggtcctcggtcctctgtgcagccttgggacgtgaagacctgtgtcccagcagctccagctccagccatggctcatgccactgcttcagagggtgcaagccccaagccttggcaacttccacatactgctgggcctgcaggtgtgcagaagacaagaattgaggtttaggaacctccacctagatttcagataatatatggaagtgcctggatatccaggcagaagtgtgctgcag

SEQ ID NO: 109369 - DNA, 462 bp, Homo sapiens
tgtttgcactgaatttaaaacagaacaaaggtaggaactacactttttgggtggctgcgccttgcaaatgtattcggatgcaggtttgtgagcagcgccatggccgacagaaccacaggcaggcggcaggtctcctgcagcctcccccacggtgcaggggcgcctttccggctcctctaagaagcgctgctgaagccacgccctggcttagcgcggaggaggagccaccgtggggcaccgtggggagcgaggcctgagccccgcctccccagtcaccgagcacttcctgtccctgctcagtaatcaagcacagacttcagatcttggcatctcagtctgaactccttaaaagccaggtattttaaaagaaacgttttaaggcaaattggtacctatttccagcccacctttctgtagtgcaagaactgtctccaaacctcctaaataaatcttccagacaaa

SEQ ID NO: 109370 - DNA, 181 bp, Homo sapiens
ttatcaatgctaatttagtgctgaaaacgactacgatgtaaaacttctgcaattccgtggctgactgagtttgactggccggttcttctgctccacatggtgcagctgaggttgctcacacacttgggagcttagctgagagcaacactgaggctgaaacgtccaggttagcctctcaccc

SEQ ID NO: 109371 - DNA, 230 bp, Homo sapiens
gtccaggctctctacctgtgcagtcatgtccagcattatctttttatgtccacagtatgtgagtttcgtcagtgaagaaactcatctgagtctttgattttccagttttactggggctcaaaatcacatactagctgaaaggtgtagcttcggcctctgggaggtcagactaataactttagttcccacttcttctggaggtcagaattgatactggaatgtcgaaagcc

SEQ ID NO: 109372 - DNA, 333 bp, Homo sapiens
atgggctctcagcctcccctctcttctccctttcacttcctcactacctgctctcttctcccgttttccatgcaccttcttccaaatttctcctccctctcctcctcattcctcatgcaaagcaaatgctcagctgccttcgctggcctggttatgtcccaggatgcaagttattttacaaaactgaaattcatcagcatttttagtccttctactttgttctatctctagtgggttatttaattttgggaacccaatatcatatctaatgttcattagctttttaatgaagcagtggatcctagagcatcaaatagatgtgttttgatagcc

SEQ ID NO: 109373 - DNA, 211 bp, Homo sapiens
ctattataggacccagagtttgaagacctaagaaccaggagaactctgatgtcgaagaagaaaagaaggatgctcagctcaaggaaagagagagaatttgcactctctctgcctttctgatctattcagaccctcaatggattagataatgtccatctacattgctgagggcaaagttctttacctagtgtactgattcaaatgctaatct

SEQ ID NO: 109374 - DNA, 528 bp, Homo sapiens
agcccatgcggcatctttcacaggttgaactcaggtgtctgcaactcacccaggccagtgttacactctggtggctctacagatctggggtcttcaggggcagtcctacccccacaatttcactaggctttgccattgtaggagctattggtgttggccttgaccccatcacttctctggacattgccctggtgatggtgacaggaggcagtcaaatgcctaggcagataaaggtgggtccctggtgaaaccttgcctccaagccaaagatagtttaaagccgaaaagccaagctacaacttaaatccttgaaccacattgagaatctgtcttcccatatggtgcactttcctctgattgatccccacccttcgcctattttacatatacctactgtttcctaattggttttctacactgtcatgcccacctttgagtggtaactttgctttaatcttttttgcatcctcacaaaaacaatcagcacgcactccccattctgaatccataaaaagacctggacccagc

SEQ ID NO: 109375 - DNA, 311 bp, Homo sapiens
aagcgagcaggataccagcactgctcaataaaaacatgagccacccaggtataaaatttttcagtagccacattttgacaaacaaaaacaggctaattttgggccgggtgcggtggctcacgcctgtaatcccagcactttggggggctgaggcgggcggatcagggtcaggagttcgagaccagcctgaccaacctagtgaaaccctatctctattaaagatgcaaaaattagccggctgtggtggcgggtgcctgtaatcccagctactcaggaggctgaggcaggagaattgcttgagcccgggaggt

SEQ ID NO: 109376 - DNA, 737 bp, Homo sapiens
cgtggcaggttctgaggggctactgtgtgcctccttgtgaaagcggcaaggttgggctggccgggcaggcacacagttctggttcacgcgggtgcccacctggcagtggctgagtggcccagagcctgggtgcccaaagttccctcagcccaggtgtgcccgtcactggtgctgccctccctgttgccgcctggagccctccggcccactggggagggcagcttctcctgatctttccaccgtgtcaggagcagctggcctgaaagggcagaagtcagtgtccagggcccacagaaactatgtgctgggcaggagactctcctgatcttttgagagctgtgggtacgggctctgagctggcagtgatatcaggggacccagaaccccgctgtgggtagagtaagggctcccggagacctggaggcaagcccgccctgcagtgaccctgggaccctcagcctctcgtgcctaagggaaggggctgcctgtactctgcagttggcagagcctgcccattggttccttgacctaatgattatgagccattttggcaggaaaaaaacccaaacgaacaagtggaagcttctaagaccctggccaagagagtcattccacacatcctgagcatctgcagaaattaggaccatccccaaagactcaaaagatacagggatggtcagtcccactgtccccactgttcccactctgttcacccatatggtccacaaaaaccagca

SEQ ID NO: 109377 - DNA, 385 bp, Homo sapiens
aaaacaaagaaaaagattcaacagagtttatctgagcaaagaatgattcatgaatggtgtagcagtcagaatcaggggaggttcagagagctctgctgcagcagcctgagcagtgagtttttatgggctgacagagaaggaagacaaaatatatttaactggttagagtggaaataccctagttagaggtgagttgctgatttctgattgataaagtctccagtctccttttactgtttacactgggcttcagtttgcttatgtaggaacttaaagggcttgagcggtccaagtcgggtatccagtggcttcccctacccttttttttttttttgaaatggagtctcactctgttgcccggacttgagtccagtggcccgatctc

SEQ ID NO: 109378 - DNA, 314 bp, Homo sapiens
tctttcttccagactgcccacctcagccttaggaaaggcctaagggcccaaggcctcaaggccctgggaaatctacttctctgggattgacttctctttgtctagttctctcacatgaagcctcaccggggcacttctctccactttaaccaccaaagtatactcctcagctgttcccattgctctttggatcagaaccaagattcttaacttctttttgtaacctgtaagggcatcattcagctctcacctttcagagattgccctgcttcccatctggttccgtgtgtgtgtgtgtgtgtgtgtgtgtgtgt

SEQ ID NO: 109379 - DNA, 423 bp, Homo sapiens
catacatgcattccttggaaagctgaacaaaatgagtgggaactctgtactatcatcttagttgaactgaggtccaccgggggctatagagggacaactgtcattttttttgatgcccgttgcatgaagcattcttccaggcttaggaagggattccgtttgggtgaaggagagtcacaggggagttgaggctatgtgcacaggacttctgtctacaaggctggggtagcacacatgcagtccgtgggactaggtgaatgtgcaggttgctcagggagagttaacctgtagcctgcctctgggtggccaagattgtccttgactcctggctctgggttcccacaacccctggaggaagacaagtaattgtgcttgggaagagagaacaaggccatacttttgcctttctttttttcattctta

SEQ ID NO: 109380 - DNA, 348 bp, Homo sapiens
tagtagagacggggtttcactgtgttagccaagatggtctcaatctcctgacctcgtgatccgcccgcctcggcctcccaaagtgctgggattacaggcctgagccactgcacccggccagcaatatttcttctgtaaaagaaaagaataagtgttccacatggaaagaacccaagatatattaagtgaaaaatgtcatagcatgactacatttctgttaaaaaaaaaaaacaaaatgttatatatatatgcgaatgcagagaaaaaagaaatgtaaaaaatacaataaatttttcacggtgattacatttgcgagaggaacgtacagctttcatatttcattcaatg

SEQ ID NO: 109381 - DNA, 340 bp, Homo sapiens
agggggacattccggaactagatatgaagagacttttctccctgaagttccccggacccaattagatgttgtacccaggctggttaccctggtaacaggcgtcgcggtttgtcaaggaactgagagaagaggcttaagaaaattattcaccactcataagtcatggagacatcctcaaaaggtctgcttacccaagttactcagttttggaacctcctagatgatctagctcagagtgaccctgagggctatgagaagtttattcagcagcagctgaaagaagggaaacagctctgtgctgccccagaaccacagctttgtctacagaccaggattctgg

SEQ ID NO: 109382 - DNA, 275 bp, Homo sapiens
cacacacacacacacacacacacctgcatacttgaacgataaatttttataaatgaaacttcaatgttaaaggataaattgtaatagaaactggtaacatgtcatttaaaagatggtaactataccctcatcaagagtatatatatgaggccaggcacagtggctcatacctgcaatcccagcactttgggaggtggaggagggaggatcacttgagcccagtagtttaagaacggcctgggcaacatagtaagaccccatctctattttacact

SEQ ID NO: 109383 - DNA, 219 bp, Homo sapiens
gtggttggggtaaacaccagaatgaatagctagaagagatgaaaatggttgatgtaggtggcctgccatggctaggatattgcttttttttacatattcttgtatgtatgtgtgtatactgttttgattaaaaataacaattgatttaaaaagggaagtagaaaatgtagatgatcaaaatgaaataaataagaattgcctagtattacacccccaaat

SEQ ID NO: 109384 - DNA, 406 bp, Homo sapiens
agtcaaagtgtaggagttgctaattgtgtgaagtgtcaaggaaagcaccccggactgggcttgtgggttgaatttgcagctgttctgctcaacaagctgtatatgaccctgaacaagtccttcacttgaagcgatctctttttttaagaaatgggatcttgctaggttgtccaggctagtctctgaactcctgggctcaagtgccttggcctcccaaagcactgggattacaggtgtgagccactacgcttggcctgatctctttttttcattgataaattgaggcaactggactggataattattctagagtatttacagctataaaatgtatagattttgtaaaccatgcacagaattgaaatgctgttaacgtatccttttgttgtcatggcagctatggata

SEQ ID NO: 109385 - DNA, 259 bp, Homo sapiens
tctaaaagggctctagactagaggaaaaataaggagagcctgagaaacacaacacgaatgggaccctggagggtcacagtcacagtcgttccatagtcaggacagaactcactcctgcagtggctggagtcagtcaccagcatcctcacacttttgtggacaaattttggctcaaccaaagattctgacaaagcatcagacttgctggctagtctcgtgatcattatcaagtgtattatttgtcttggagacctcttca

SEQ ID NO: 109386 - DNA, 483 bp, Homo sapiens
aaataaaaggggtacggaaggattttacagattcaaatgtagtttaagagatatataagccagttgcaatgtataggccttaactgtactcagaatcaaacaaaatcaaacttttccacaaacagaaaacatgttggagagtatggacactgactgtatatttgatgttattaaataattgtgcatgcacaggaatcagttgggaaacccggggaacagatgctgctgacctgacagtggggtttcaagaagaatatgtatttgagaaatacctggacataccactgaaggacttggttactggtcagatgttgggaccagagcaggggaggagtcagacgtatgtcttgagagacactgggtgggtggaagaagaaatgataaatgagtttagtttagaagtgcatattaggtcatcaagtggagatcctaagttagaagatgaatattgagtttgggctcaggagaagaggattgggctag

SEQ ID NO: 109387 - DNA, 261 bp, Homo sapiens
gctgctgttttttaatgctctcccaatggttctgatgattagccagattctagaatcgctggactagtatgttactatacaaccatgctttccagcgtctacctagagcaaattaccctagagctccaagagttttagctcttagataagcactaactgtccactgttacagcacatatacactgcaaaggccattctgatggtcctcaagtatgctctgttctctccatgttccaacttttgcctcccacttcccatttc

SEQ ID NO: 109388 - DNA, 191 bp, Homo sapiens
attgtatcatttttttccttcactctcaaagtggagatgtgtattcgtaataccaaaatgatgcatttaaaatggtcattgatgagtttttaagtgcagagtcacaacagatttctagaagcaatctttcagactgctttcagtattgagtccaggcaacaaatacaatttgcacaagatctcacagctac

SEQ ID NO: 109389 - DNA, 453 bp, Homo sapiens
aggcactatcctgggtgcttttcatcagttcgtttaatccacatagcagtcatatgatatgtgggtactttaatcatccccactgtacataggctacaattgaggcttagagagattacttaacttactcaaggtcacatagttcctaagcggccagaacttgaacctaagactgtgttgttgccaaagtgcattccccaaacctctgccctctaaagcgttggataggagacagagtcaccggaagggaaggtttgcatgagagaggaaagcaaccatgtgcaagtagccagtggtcaacttggagaatgctgacctcccttccatcccaggtgaataagtgagtaggatgtggggattctcagtctcactggagatggctataaggaaatagaatctttaggggagagccaggtaaatgttagaaacaaattcgagtggtgcattgtgtga

SEQ ID NO: 109390 - DNA, 283 bp, Homo sapiens
ctgttggtgtgagaaggggctgtaaagaggcagggcagggggctgccagattggagatgtaggtaccagagcttggtgtagctcagtctccagggagacactgggtgatgaggctggggtgtcagtttccacagcagcaatcagtgtgcaggtctgttgccagggagacaggcctttcagaaagtgttccactcacaccccttactgtcatatctcagcaccatttgaggataacgtagcttcaagttttacgaagagtcacttggtgtagtggccatggtta

SEQ ID NO: 109391 - DNA, 398 bp, Homo sapiens
ccattcgagctcggcacccagcaatctaattattgtgaactgccaacaattttaatcatttgggcagaagctttcagtaattcaaaagaatcctccattgatacactattttggaaatgatcttttttcttggctctcaaagtcacgagaaactataattaaatgtcagaaggcatctgacatgcgaagaaggtgaagtgagagttgagcatgagtcaagtataaaagtagagcctcaggcacaaagtagttatttttaaaagaggaatgcataaataatcaaagtacatgcctaatattactatttgtccaaagcttgatttttgaaattctgcatttttaatggctctctaatacattttacaaagctaaagcaaaagacaagataaaagaaagat

SEQ ID NO: 109392 - DNA, 392 bp, Homo sapiens
tggatgccttttatgttttagtttcttacaaagcaatttccagcactcagataaaccatttgagaggaacagacttagaattccatattcacagaactgtgggatttttaaaccacaaaggaaacctagagatcctagaagactgttctgtggatgtggaaagttcaaatatcccccaagactgcacagctaattagaggcagagctggggtaaggactcaggtttcctggctctcaactcaaatctctttccaatatcatttctcaaattctaagatcagaagttgaatgaaacgattcgcttcacatttcttgtggtttgaaacatgagcttctcagaatctccagcttcagtggggtcagggtaacgtattggctgctactgatggagg

SEQ ID NO: 109393 - DNA, 369 bp, Homo sapiens
aagaccctatgggctgcaaggatgaaaatgagtcacgtgaaggtctggggtggggaaagcatcccagtgccaaaggtagagattggtaaggacccagaatgctatgggaggaggggaaactaatggaaggagaggggtggtgcaggaaaacaactgtgggttttgggtaaggcttctaagcttgagttgtctccctggaaagatgacaagaatgaatgtaaccagtcacattgaagcttgtcaaaggatcacatatatatgtattctgctttatgtctagtgcttgcaactgcagttttgtttaaggtaatgttttaatgtcttgagtcttggtgacaccagagatgtgatggcccagaagaattttta

SEQ ID NO: 109394 - DNA, 705 bp, Homo sapiens
gaagatcctggttcccacccttgctttctcatcccccaggacactgaaagggagcagatatcaagagaagttcaccatgttgtttaaagtcactggtgtcccctgaaaaccccaagtcagggcagtcctgaagccagaccatcctgccccaccaaagagccacttgtgccagcagagaggctgcaaaatacccatcctcagtgtccaagaggcaccaagaaagtacagatacatgccaccccctttccagagtctaaactcagcacctatggctcgccagaggggctgacagagagcgcctcccaggccctgcagctccgaagcccaggctgcgtcctggacctgtctcttaagccagggctgccccacgtgcagtccaacacgctcatgctgctgctgctgccactgtatctatccatccatccatcaccgccggtggatggcgcctggggcacttttcactctgtggttttaagcatttactgtttcttttgaaatgttccaagtaggtgcctgaaatacccatatttgcttctttttaaaaaactcacagaaagattctttttgctctccatcccctccctttgctcttccccctccctcggcatttttaatctgtgggttttccctggttttggaaattccaaaagtgggggtcaggccccctttctcaccataacagatttgcgggtgtgcctggagacc

SEQ ID NO: 109395 - DNA, 256 bp, Homo sapiens
atacatcattttttttcccagctgtatagtattcagttggattgaggcatcataatttattttgacaaggtcccctctggttggacggactctttggttttcagttttttattaatgtgaagggtgccgtagtaagtatccttgtacatacatctctgcatcatttcttatgtaatgtttgagagtccaggaatgctgctcgcccatcaaacctgatccccctgcccccagccccttgccattgccaccctttgcc

SEQ ID NO: 109396 - DNA, 505 bp, Homo sapiens
tgaggacctgccatactgtttcccaaaatgtactaatgtacaatattaccaacggtctccaagggttcccttttctccacattcttgccaaaacttgttatctttcatctttttaataatagcacatctaacaattgtgaggtgatttcacattgtgattttattttacatttctctgatgattaaatatgttgagcattttttcatatatctcttggttgtttgtatgccttcctttgagaaatgtctattcagatcctttgcccatttttttaatagagctattttgttttcttgttattgagtagtttgagtttcttgtatattttggatattaaacccctttatttgaggtatgatttgcaaatattttctccgaatctgtacgttgtccctttgcttcaattgtttcatttatgtgcagaagcttttcagtttgatataatcccatttatctatttttgctttagttgcctgtgcctttggggtcatatccaggaaatca

SEQ ID NO: 109397 - DNA, 415 bp, Homo sapiens
attttgttagacattttcaattttagagatttacatctttcagttataaaattttgtttttaaaattatgtctttgatcatttccatacaaattcttttgtttggtcttttctactgaaactcctgtaagattttggaactcatggcttttctaaataatttctttatgtttgtttgtttatgagtcctttgtctttttattcttttttggaacaaatttccttgaatctatcttttttaatttttacatttttttattttcaatttttgtgtttaaatagtaggtatatatatttatggggtacgtgagatgttctgatacaggcatgcggtgtgaaatttgcacatcatggaaaacggggtgttcacaccctcaagaattccttgtttttaatcttctaatccccttattgga

SEQ ID NO: 109398 - DNA, 298 bp, Homo sapiens
gaagttaaataatcaagcagaaaggccaagctcagaaaaggccagagctagatcagctcttgggtcgctggcaaggagttatagctggtttttgctgagtaccactatcttcatgaatgagcaacaaccattttcagattcattttcattttccaaaagaaccaaataccaggcgaaaagttttgcattgatttgggttagcatgtgactacatcagggtgaggaaccttaactgacaatcccaccagtcaatctctaataaggtaagtcccttaaaaatatatcttaaacgagactt

SEQ ID NO: 109399 - DNA, 745 bp, Homo sapiens
cggctttagacatttttagatttctcttagacatccaaatggagagaagatatttaaatccatgggattgaatgagatccaaccaagggtattgtaggtagagagaggaccaaagactgacacctagaacctttcagtgttcagaatgcaaggagacaggaggaaccaagagggaagattgaaaaggagagtccagctgggagctgtggctacacctttactaatcccagcactttgggagaccaaatacaggaagatcacttgaatccaggagtttgtagaacagccttagcaacatagcaagaccctgtctctacaaaaataaaaattaaaaaatttgcctgtaatccgagcattttggaggccgaggtgggtggatcagctgaggtcaggagtttgagaccaacttggccaacacagtgaaaccccgtctctactaaaaatacaaaaattagctgggcgtgatggctggcacctgtaatcccagctactcgggaggccgaggcaggagaatcccttgaacctaggaggcagaggttgcagtgagccgagatcacgccactgcactccagcctgggagacagagcgagactccatctcaaaataaataaataaataaaaatttaaaaagttagctgggcgtggtggcatgtacctgtagtcccagttactcagaaggctgaggtgggaggatcctgtgagcctaggagttggaaacttcagtaagctataatcatcacactgc

SEQ ID NO: 109400 - DNA, 845 bp, Homo sapiens
gagtttttcttcaatgtttgctacttatttattcattttgtgtttgctattaagcaagtggtaggagccatcaaaaaaaacatacatttaaaaaaaattatgaatatacattttgaaaaagtgtatgagagattcttaaagttgagaattctgcccattaactcaatttttccacttgtgattttggttaataccatatccttgaatcagaacatctcccagggttttgcaggagtgtactaaaaaatgtatgaggacctgatgtgtccttttaagaacctgtgctgtcatgggatacacgggaaggtcatccaatggcagcataaagaccatcaaatggggaacgtgtcccgtaggaagatatccccaaggacagaggggtagtggagtttctggatctcaccagggaggattgtggttcttattttagctccctctccttgatgtgcccttggcgtcagttgctattttgactgtgagcatcttcttgcagttgccgatgtgctgattgccagcagcactcaccgggagaaccagcggctgctctgcccactgcctccctgtcagtctttccgcatctctttgttgagcatggggctcatgcccatgaaacactgaaaacatacagtgcaggagaagagtcccgtgataaaaaatgagtctgattttagagggaaaagtccatatggaatataggcgtctctcaaccagggcatggtggctcacgcctgtaatcccagcactttgggaggccaagcaggcagatcacttgaggtcaggagttcaagaacacgctggccaacatggtgaaaccccgtttctactaaaatacaaaaattagctgg

SEQ ID NO: 109401 - DNA, 292 bp, Homo sapiens
tcaagggacagggtcttactctgttgcccaggctagccttgaactcttgggctcaaccattcaagcctcagcctcccgactagctgggactgtgggtttagaatttgaatccagtgttcacccttcctcctgagcggtgctgtacattatgaacaggttgtttgccaggaactgggataatgccattttcctcataaacctttgccccgcaagcatgggtagacagacagctggtgctttccttggttatatttggcaaactatataaccaaaccaaacttgattatatttg

SEQ ID NO: 109402 - DNA, 944 bp, Homo sapiens
aaagttggggtggggggaagcaacggaagaatgatggaagggtagattgatagagtctagaaaacatttaaaggacaaatattttgtcaaagtacatttgagattgtgatatccggttaaatgaactactcaagactgtttgtttatttatttatttttttcgttctgttgcccaggctggagtgcagtggcacaatctcggctcactgctaagtctgcctcccgggttcaagtgattctcctgcctcagcctcctgagtagctggataacaggcatctgccatcacgcccagttaatttttgtaatttttttttagtacaggcgggtttcaccacgttggcctggttggtctcgaactcctgaccttaggtgatccgctcgcctcggcctgccaaagtgctggggattataggtgtgagccaccacacccggcctactcaagacttttgagcaaagagttagagcctcagcctttgagatgccctattagaagtcccttaaaaaaaaaattgtaggaatttggtttgtttgcccccaggatatatattcttccagaaagttattaggaagaaatttgtttttttaatgagaaataaagcaaaataaatttctagttggttactgggttttgacaaatttcggctgggatgagaataaatgtgaagcgttagaaacattcttcccatgctggaatggtagaaattatgaaacctacatagaatttaccataaaatgcagataatccttgagttttctgtcagggaaatgtgagtgctaaaaatacaatagctaaaataaagtttcactgtattggtttaatagccaattagatacactaaagatagaattagtaagttggagaataggttagaagaaaatatctaccctgagacagggaaaaacaagaaaatgacatatacagaaaagagcatatgagacacag

SEQ ID NO: 109403 - DNA, 1194 bp, Homo sapiens
caagatcctgcctcccaagcctataagctttaccaggagagaggcaggccccaccccaagatccactatccactctttgaagaaagattagagccatgttctcagactttgggctgcatcctaatccctgcgaagtgcacaatgtgtgatgactccaccctccacccgatccagagggtctggggtgagacccaaggctgagaggcctcgatggcttcctggccccatctccggcagcagcctctatggctgggctctcctgcaggctgggtgcaccccaggccctcagatggttctaaccagaatcgatgggcagcagtgacttcgactgtatcatcaatcttggctgccacaaggttgggtgtccaggccctcagctgacccttgaggtgggcccccacacagagctttgctctgcccccagcccaccctcattcatcgcccagaccacggccagggacccagctcctcatgtcccataccctgctctcacctcatcaccagtgcaaccacagcaccgaggcctgcctggcgggggctgtggcttgatgcttgggatttcatgagaagtctctctcctcccgactgacgtggttgcacaagccacagtgtgcctggccacccccgctgggaccgcctgcagctcggccatttcccccagaggcgctctgatctgccctcctgcctcctctcctgttcttgttagcagagagccacactctgggagctgtgtagacccagggcctcagagagggctggaggatggcttgccagccaagcgggtcagtttggtgagcacttcagaatgagacgccttgatttgtttccctattccaagagtttaccatctggatttagccatgcccttgtaatgaccccaccaatttcatgaaaaatggaatctgtgaatttgctctttaaatcactagtcatctctgttcatttaaaaataaaattatagttccttaagtttgtattgctaaaggcatcagaagaattcatcttaagcaaatagcatgtgactattttgccttatgagatggtgtatttgggactaggatggccatatatcaatatgtgacaggatatcgagatccaatgttagccagagatctcaattagtcccagttttgttctcataattcattttaattcagtgaatttttagatacttttttaagcccttgaagtttt

SEQ ID NO: 109404 - DNA, 979 bp, Homo sapiens
tgcgtgtgtgtgtgtgtgtgtgtgttgggatcggcttccaaatcttcctactgggggaatgcccattatccattagatgccactcagtgggaagtggtgccccacccgtccgtggagacctaaggggcttaatagatcctccctgcatagccagagacggatacaatctgggctcagtgaatcggtgctttgactgctcacagcgtagctgagagcttactcccagaatggcgaaggtggcaaagagtccccatagctggtgttgttggctgccatcaccccttttatccaggggcacagctgaaatctgtgccactcggctctgctgggcaggtgggataaatctgccccagcctctgtgctgtccccatccctgctcctgctgcccagcagcctggagtccttctccagacttcctgtaactctctccccaagccaatgccctccctcgggtgaacaagggcccctccttgtgacccatggtgcctggcttgccttggccccagccctcctccctgtgccgaaatcatctctctgtggacctttctccctcatggactcccacctccttgtgggcaggaaccagcccttggccatgttccggctccctagtgcccagtatgtgtttggtgaatttgggggcatgggttggatgatcttggttcagttaccaaatctttctttcctgtccaatcagtcttccaggatctcaaccagttctctcactgcagagtctggagaagcccagccctcattgtgaagggagagccaccgtggtgctcacagcaagacacccagagtcccttccagacagggacacccctggagcgaccctgtttcagaatgaagttatctgggtgggaactcaccaagaatgcacagagggcgctgggctccaagcttcagcatatcctttcactggactccacacaggcctgcggagcaggtggacccaccattctcagaccccccagggccc

SEQ ID NO: 109405 - DNA, 111 bp, Homo sapiens
tgatgggttaaatcaggcagcacagggtttgtgtctttctggttattttctttttaccatttggagtcatagaacctgaacttcagtctttgaaatttgtagtcttccagt

SEQ ID NO: 109406 - DNA, 652 bp, Homo sapiens
tgtaatcccagcactttgggaggctgagtttacattctccccttttagccaagatgtgccagagatgacattggtgaccaaacatttattttttcccatatctttgccggggtggtgtggctacctgctgcaggttcattctgttctttggtgggatccttatggccaagggacttggagccaattaaacattctaggccagatgaggatggaggtgaacaggcactcattaacccttaaaaaccttttgagcaacagaagagccaaaaagcaaggttacaacagtgacttacctgtaagttctatgtgacgagtcatcagctgtttagtaacctgtatgacctgttaaccatttttgtagcctgtgaatatcagatgttcatttaagtcagaaccttaaacatgtggatatttttgccaacaactcagaagctaacaaaacagctaacaacttagctgttttcattgaaccaacaatattaaattagtcttatttgtcaaaaaattcacacaaagatcattctctttttgactgggtttatagtctaataatcttttgtgccaaatcctgataccttaaaacacctagcggaggcaaatataaaataatcagtaaacccagactaaaaaaaaaatgtatgctgacaattct

SEQ ID NO: 109407 - DNA, 236 bp, Homo sapiens
tcctcaacgtatagtgagtgtcctatcaatggaaactttaacaaaggagctagattttggttttacaggactcttagatctatggattaagatgtgtctgtaatattagatgtatcttagagaataattatccaaaatatacttcatggaacatggaggaactacagactaacattttctatggtaaaatatttgggaaatgcttcattttttctttcataatatattaacacgtt

SEQ ID NO: 109408 - DNA, 1126 bp, Homo sapiens
gaatgataagcaaaggatagctgtggttgcattttttcctgagaatggagtaagtgattttcaaaaagcacaaataattggcagtcagagagaaaatggatgggcagtgggtgttgagtcagattttgatttttgccagacagctataaaaagaatttttaatgattctgattttactggctttcttactgtggaatatggaacaatcttaagttcggctaactccataaactggggccgactacttccgcaggtagtttatcatgcttccgcatatcttgatcttgttagtcaaggatttatttcttttggaagcccagtcgatgtctgtattcccacaggaaactttggtaacattttagcagcagtgtatgccaaaatgatgggaatcccgattcgaaaatttatctgtgcctctaatcagaaccatgttttgactgattttataaaaacaggacattatgatctaagggaaagaaaactagcacaaaccttttcaccgtcaatagatattctcaaatcttcaaacctagaacgacatttacacttgatggctaataaagatggacagctaatgacagaattatttaatcgattagaaagtcagcatcatttccagatagaaaaggctctagttgagaaacttcagcaggattttgtagctgactggtgctctgagggagagtgcctagcagctattaactccacctataatacttcagggtatattttggatccacacactgctgttgcaaaagtggttgcagatagggtgcaagacaaaacttgccctgtgattatctcatctacagcccattactcaaagtttgcacctgctatcatgcaggctttaaagattaaagaaatcaatgagacttcatcaagtcagctctatttgctgggttcatacaatgcattacctccactgcatgaggctttattagagagaacaaaacagcaagagaagatggagtaccaggtctgtgcagctgatatgaatgtcttgaagagtcatgtggaacaacttgtccaaaatcaattcatatgaaagcttttggagtccattatcctccccctctaccccctttaaagaaaaaatataaaacaatgataaaaaaaaaataaa

SEQ ID NO: 109409 - DNA, 2267 bp, Homo sapiens
gaatgataagcaaaggatagctgtggttgcattttttcctgagaatggagtaagtgattttcaaaaagcacaaataattggcagtcagagagaaaatggatgggcagtgggtgttgagtcagattttgatttttgccagacagctataaaaagaatttttaatgattctgattttactggctttcttactgtggaatatggaacaatcttaagttcggctaactccataaactggggccgactacttccgcaggtagtttatcatgcttccgcatatcttgatcttgttagtcaaggatttatttcttttggaagcccagtcgatgtctgtattcccacaggaaactttggtaacattttagcagcagtgtatgccaaaatgatgggaatcccgattcgaaaatttatctgtgcctctaatcagaaccatgttttgactgattttataaaaacaggacattatgatctaagggaaagaaaactagcacaaaccttttcaccgtcaatagatattctcaaatcttcaaacctagaacgacatttacacttgatggctaataaagatggacagctaatgacagaattatttaatcgattagaaagtcagcatcatttccagatagaaaaggctctagttgagaaacttcagcaggattttgtagctgactggtgctctgagggagagtgcctagcagctattaactccacctataatacttcagggtatattttggatccacacactgctgttgcaaaagtggttgcagatagggtgcaagacaaaacttgccctgtgattatctcatctacagcccattactcaaagtttgcacctgctatcatgcaggctttaaagattaaagaaatcaatgagacttcatcaagtcagctctatttgctgggttcatacaatgcattacctccactgcatgaggctttattagagagaacaaaacagcaagagaagatggagtaccaggtctgtgcagctgatatgaatgtcttgaagagtcatgtggaacaacttgtccaaaatcaattcatatgaaagctttcagagtaaatttttttttctagctataagcatgcaataataaatctcaaacactgatttggagtacagtagcattttgtcttttatgtaaatatctctatatctgtttggaatttcaaaagtctgatctctagggctgacatgagaactccatgtcacctcctcagatctttaatctggaagtgacaaaaggtaacacagtgcacggacctttgagctatcatacttttgccttctgctcatgaggggtgtatcaatttccactcccacaccctcactgttatgtggaccaaaatgtctggtatactatttggcgattaaaatatttaagcccagttttcaggtactacatctgtaactagtgaatactctgttgattagaaagttaatttaccactcaaaatggctaacttgaatggaggaagtagtaaactcttctattaggatttgggccagtgttttttgtttgtttttttggtgcagtttcagctcactgcaacctccgcctcccaggttcaagtgattctcctgcctcagcctcccaggtagctgggattacaggcatgcaacaccacacatggctaatttttttatttttaatagagatgaggtttcgccatgttttccaggctgatcttgaacctctgacctcaggtgatccatccacctcggcctcccaaagtgctaggattacaggcgtgagcctctgcacctggctagggccagtgtttttaaccctcctcaaattccattttggactacaactaatgtgtatctcacactgtccaaattaaagatgtactctgtccttcactctcctttggatgtgtacggttagggtgacgatgtttgaaaatcaacacataactgaaatccaggatgaaacagtaagcagaactacttagaagtgaatacagaaatgatctatttcaagaggaaggttttccaaaattaagagtacttgagtagtctcaataggagtgtatttgtagacagcagtttccctatattatttggagtcaattcttacgtaatttgttgtttatttcttcagtgaacattgtctttttctggcagctgaaactgcacacaactgatacacatatttaatttgtattcctttgtagtaatacattttaaccatgatttatgtttgtgaatttactggatgttttctttctgaattaaagattgtcaagaccaattagtgtaa

SEQ ID NO: 109410 - DNA, 211 bp, Homo sapiens
aagtggactctgaaataaataactggtagaaattctacagtgtggaatttcttgcagttagcaaaagcttaggggtccaggtttttgcaggattcctgtcttggtcctttcaaaccaaggagctctgctggctctgccaggccgcctcacatgcccagtgggattctgacccggcctccttggtgcggcagcttctcccgttaacggaaga

SEQ ID NO: 109411 - DNA, 279 bp, Homo sapiens
gcggagtgtctggttcaaggccacgcaaccggcaagaggcggagcctgcagagccaggactctgcctcctgcgtctctcggtctccaggtggaatgtggggcctcatgttggcccctccactggcctccctcacagatgggcacagggagggcagggactggggccacggaaacaggtttgggtctctctcctccatcccccggtagccacctgcaggctcagccatagcagggtttaataagtattcagcaaatgaacgacatggcttcacaactgtg

SEQ ID NO: 109412 - DNA, 404 bp, Homo sapiens
actccaggccctgcaccctatggaagtgtttaggagaagaataaactacatgccggcttataagacacactgtgggggaaagaaagggacttggcagcaggcaggatgtctgtggtccccctccctggccagtcattgcccctgaaactcctgacaaaaccttgactctagaagaggaatgggagggggctggagatgaagaaggcggcctcggcccgggcaaatctgccctggcagctctgtccagctcaggaaggggtgggctgtgccaagggctttctgaaaatgtgcgtgtgtgcgtgtgtgtgtgtgtgcgcgtgtgtggcttctgcaaaggtggctggcagggctgaggggggttgcagcagagaaagagaattttgcttcagaatgccaagcccttc

SEQ ID NO: 109413 - DNA, 268 bp, Homo sapiens
tagctgggattacaggcacctgccaccacgcccggctaatttttgtatttttagtactgacagggtttcaccatcttggataggctggacttgaactcctgacctcatgatccacccaccttagcctcccaaagtgctgggattacaggtgtgagccaccacacccagccaacctagtattattttctaagctcattttaataactattcaaataaggtcttcataacccaaggaacacaaaacaaccttctatttctccagattgcc

SEQ ID NO: 109414 - DNA, 314 bp, Homo sapiens
gaagacttcttgtctcacatctgacctgcatttaaccaataatctttaaggctgtttttatttctcaaagattaaagtcacgtgaactgaaaggtaccacagcttttaactttccttaaaaaaatacttgatccaagcacttgtttttctttagggcaaattaagtagagctctttttacagacgttacacacaatacacacacagagagacagaagaaaacccagtcttcacaagatcctttttcacaagcaaaactttacagagtacaaacagtgatagttgggggacctggcctagtaaaaaaagtcttcc

SEQ ID NO: 109415 - DNA, 423 bp, Homo sapiens
gcaaagtggaccagggaattgcttcatttgcttggtgaaaaaaaccaaacagaactagacagttttctaagtttggctggaaggacgtgcatggatgagatgacctttcatatactctctgtcccggtccctcagacactgggttttcccattttcacactatcttgcctaggacaccctttctactggctgaaatcctatctatgcaccaagtccaaagactctccctccttcaggaagtccctgactgtccccagaaggctgtttcctccctcctccaagtgccctgagggctggcattggattgcctttgccatggggttctgctgtcgggaatgcaggcctcgtctgctcaaggggaggccatgcattcagcatgcaggtgagatgcagcacctggcccaggccttgcacacgcaggtg

SEQ ID NO: 109416 - DNA, 347 bp, Homo sapiens
atatgatcctgcagactttttctgttcctttgcttaacacactcatgcttcatgctccaatcacagaaacatcaagttcccccagccggtcagttctactgccaataaacatatagctttttctctcctcattgcttccatcctctggtatgcctgaatctaccatccacccttggtgaactctgaattatgcaggactcaggctaaaagaatccaattaggccttctcaggaaaccccccccctgagcaagcttagaaaaggttagccatgtccccacatccattcctctctagctcccttctctgccattatgcaaatgatcacagcttggtctctcagtttacc

SEQ ID NO: 109417 - DNA, 487 bp, Homo sapiens
cttaaccacagccaaccaattgcactgtccttgtgatgactattgctcccttatttctcaaatgcctgacacatggcagctgctagtgcatcctcttccatgggtatacatcccagggtgtacatccaatggaaggaggttatgggttaaggcaaaattgtgaataaggataggaggtgaagatagcagatgaaaaaattggaaacccctgagtgtttgtccagggactcttatctgcctggattattttccccatatcctttacctaattaaactctaaacttacccttcacaactcagctcacacaagaatcaatttcactctaaagtcttcatggaccctttccaagccttagactggattggttgcctgccttgttattcctgtaactctttagccacctcaatcatataacaacacactaagcatctgctcacatatgtctatttcaatacaccagtggttttcaacctcagacatacatgt

SEQ ID NO: 109418 - DNA, 675 bp, Homo sapiens
aattggcctatgttttctcagaagtcatgcattttggctcaaagctgaaggttggattattttgtgaggttagtcagtaagttaaatttagaactagaattttgtgaatgaatcccaaggctgtgttggaagtcttgaagatgtgagagaaatgtgcctgaagtctattcatttgctaaagtagatgtcattgcaaggaaatgaaaaacaaagaaaaaatgaatccccagaaattatgtaatctgcgttatacatgttatctatcatttgtgcttgtatttcaaagtcaaatttcaataatgctttagtaacaatatactaaaggattccttcatttttcagtgtcatacttttttaaaaagaggtttttaatatgagaggaaattttaactagtgaactaattattttaatttgatataatttttctcatttgcatttttgacaattatttatgactattgataattagaggttgtatgtctttcagaatactgtaaacagcagcatagacattagctgaatcattaatttcaactgaggatgaaacattttatacttttgaccttttataaaatattcttctatttgaagcaaattgcttgtcaaaatcatagctatttgcccaattggtatctggcatcgcaaatgagctcttgacttatatatagcacatt

SEQ ID NO: 109419 - DNA, 517 bp, Homo sapiens
tcagtagagacagggtttcaccatgttggccaggatgacctcatgagctgcctgcctcagcctcccaaagtgctgggattacaggtgtgagccacctggggattctttttacagcaacattttgcattgagatttgaagtcttacagatttttatgattatctttgctaagaaatggttgtgagctacattttacttgcaagtaagttcaactacctttgattcatggcagaaaattcctttgggactgtaaagttttccagcgcttcatggtgttggcgttcagcagcagtgggaccatggtcataggtgacgtgccctggccccttgtgctggtcattagggatacagctcagtgtatctcatgaactcaaccgtggtgccttctgagactttaaattcaaattatttgtatactctcttgttcagtgattcttaaaagaatttgttttgttcccaaatgtcttctttttaattgttgtagaagaaatgaggaacgagtgaaaagttaatgagca

SEQ ID NO: 109420 - DNA, 253 bp, Homo sapiens
tttcagtcttatttaagcgactgaaatgagaaacagaagacacataagagaacccagtcccagcagaggcaggcagagaaggaaggcctgcgggggctgaggtctggagggcagtgtatgccgctctggcccccggcctcacagagagcagccctggccggacatccaccccatggagtctagaaacagctctgcagcagcccacaatcacctctgcttttcatcacattctcaagaataaggacacgagcct

SEQ ID NO: 109421 - DNA, 350 bp, Homo sapiens
cagccacccaggagctggccctgtccccatggataccttacattcatgtctccgggctgccccacctgccctctgtctgatacaaagggtcccactacccgcctcatgaggttacttatcatcaaaaagcgttaagtgcagagccatgaggtacaacgcaagtgtcagctgcgctgagttggccacgcaatccaagaaccttcctgagacctggcatgccctacgagagcaccaagatgctgcccagtggccacatacaccctctcagctcacaggtaccacattatccaaaacactcccagcagcctcacagcacctggcacctggtacacctgcaccagcaacgccca

SEQ ID NO: 109422 - DNA, 425 bp, Homo sapiens
ataaaatctactgtaatggggaataggaggtttttaaaaaattcttacaacttagttttttccctgtcacataggctgtcagtatatcctaacttacagaagtgattgtgattgtgtctgggtgttggaattatggtgattttaatcttcttctttgaaagtttttgatgatgagtatatatttattttgtagacaaattaacaatttttaattaaaaatttaaattataccaggcttggtatcgcatgcctgtaatcctatcactttgggaggtcaaggtgggaagatcacttgagcttaggagtttgaggccagcctgggcaacatagtgagaccctgtctccatttttatataaacaaataagcaaaaattttgatgaaaaatttttttgtaaccaaattaaaatttatgaatttcatttgt

SEQ ID NO: 109423 - DNA, 182 bp, Homo sapiens
gaacagagggcagaatataaaatccattattatgacgatgaatctagcgtcataaatgtggcattagttgacatttccactagtttctggtatttagaagtcatttatccttccgagagaaataataaagtttcatctactgagaaatgttttaatgattctcctcaaattttaataagtat

SEQ ID NO: 109424 - DNA, 472 bp, Homo sapiens
aactctcccagttctgagatgcccgagcctggacgctttgtcattgtacaccatcaactcagtgctgccagtcattccagcagccagctagcgtagctcagggtttctccaccttagcactgttgacatttcgagccagataattctctgtggtgaggagctgtcctatgccttgtaggatatacaacagcatcctggcctctacccaccagatgctggaacacctccccagtcgtgacagcccaaaatgtctatagacgttgccacgtatacccaggggttcccagctgagaaccttagctaaagaaactggctgcattaggagatatacctaatgctaaatgacgagttaatgggtgcagtacaccaacatggcacctgtatacatatgtaacaaacctgcacattgtccacatgtaccctaaaacttaaagtataataaaaataaaatttaaaaaagaaaaaaaaaaaa

SEQ ID NO: 109425 - DNA, 367 bp, Homo sapiens
ccataattatgtttaattctctagtacctagcagtgcccgacaataggcattcagtaaatattcagtaaatattggatgaacagaaactaaggtaagctctgccttcatgggaattatagtctggtcatgaaagcaggcagaaaacaagcaaataaaaagatgtaattgtggtaaatattaagaaagttaaaagggggagaggggtaaaggaagggttaccaaactacagcagaaactttcagaggtaggtgatggtgttaaaacccaaagtagctgtactaactttgcttattcatccgaagagactggaggtggtaatcataaaagattccgtttacattttgttccattcatcattttaacaca

SEQ ID NO: 109426 - DNA, 624 bp, Homo sapiens
tccaaggctggttcattggctgtaatctagaaccttctggttagctaccaccactcagatgtcgatgaagcgagctatgttgtgtaaataactcagttatcttctctatcgttactagtccttttcctcttatacgtagctttttttttttttttcatcctggtgaacttatgtatcccatttagtgtgagatcaccatgagttcttaagaatgtctgtattgcaagaaaactgcctttggatgcttcatgcctgatacgctgtaagaggagatacttttaagtcatttttctcaactgtagtgagagactagtatactttggggttgaatctaagtccttggaggccagcatatttttgcatatgcgtgaatgtagaagcaaatgactggggatattgttaagccatcagagcttaaaacatacttgactctgtgccaggggtgctggatatttgtccccagcctatagccatctcctaaataattgatttaatttttcctgcttaacaatgaataagtgattgtgcttgggtattaaacagagaaaaataatccaggccttgctttattaaaaactgaatgagtttaaattattcagacatagaataaataggaaagaaggg

SEQ ID NO: 109427 - DNA, 237 bp, Homo sapiens
gagctcaacagtggatgtgaccatctactagtcagtaggtgtgattagtcacagataccaattcatcatgcactcaacaaattcttacaagttaaacccctatacttgtaacaaaagacagcaaagacctaaagtggttataaaatgcaggcatagataaacaagtgtttgtacaagcacagcaaatagaaggatacacacctaagttgtatcagcaattatcaatgaggaatcaac

SEQ ID NO: 109428 - DNA, 143 bp, Homo sapiens
ggagaggcagcgtattactccttacctggcctgcctggcacatacgagacattcaactaacatttgtggaatgggtgaatgtagacatggctcaaggctcagagaagaataccttatatcatgtggcgtggcaatgccagaag

SEQ ID NO: 109429 - DNA, 865 bp, Homo sapiens
gtcatgtttaagtggggataatgacattggcatacctgcttgctagagttaatgtgtgggtcatgagataacgaatataacaaatatttggaaaagtactatgttgaaatattttaaaataaaatttaaatccctcttcatttagaaaggatttgaggcagctaaatgcagaggtgtaagatggttttttggttaggattgtttctgagctgtgactctgtagtcactttcttactcagccctgccactcagctgtattcctctgtagctctgggcagacgactctgaacacggcttcatattggccttccatgagtgggtgaagggcatagtcatctggcagttttacctgctgttctatgcatgtctctccagcgcttgcttattttccccttctgcaaacattccattcatgccatgggcattcagtacagtcctgtaagcaagggtaggggcggcacaccaggtggatttaagcgcaaagacaggacgactgctttgccacaggcgcctttacagccagcagtgaacagttagacatattcaccttcctctaggtggaaaacagtcctcttctcagtagccctctcatgttcttgagacccatttgatataaataacaatgttgcaggaaatttcctgaaggaactgaaatgaaccatagaaacgagatcgttcttttcctaccacacagctgggattagactgcttagtttgtacttgcagcacttttgcagtatgggccgtattaaaaaaaaaaaacatttaacactcagctatgggtacaaagatagtcactgaaacattattatttacttttatttatatatttatttttgagatggagtctcgctctgtcgccagg

SEQ ID NO: 109430 - DNA, 3324 bp, Homo sapiens
gtcactgtggttttggcttccctgatgctgagcatctttctatatcctttttggccatttgtctatcttcttcagtaaaatctctattcagatgtctgtcttacctattttttttcagacagggtctcgttctgtcactcagcctgagtgcaatggtgtgatcacagcccactacagccttgaactcctgggctcaaaggactcttctgcctcaacttcccaaggagatagaactataggagcacgcaaccaggcctggctaatttttaaaattttttgtagagacaggatcttgctatgttgcccaggctggtcttgaactcccagcctaaagcaatcctcccgtcctggtctcccaaagtgctgggattacaggcatgagccacgacgcctggcctatcccttctttcaaccaaaccttctttagttctctctcaaggcgattcggagacatttacccaaccctccctggagagaaggggtcgaagcaacgcaggggttaacttttctgaaaacacaattaactttttccaatcctgcgtggggtgggggagagacatatttatttaatcacccgggagtggggtggtctcaatctaaacgttccctcctccctcaaaggcactgagcctgtttcacagatcctacgtaggtggaacaggacgcgttgtgttgttggggagagagaggagaaaggcgaaggagaaggaggaaaaaaaaaaggttgataggtttgtgcgcgggtccctcgtgcgggctgcgctcctcctgggtgctatttgacaattcctgcctctgccattggtcagtgttggatcagatggttgtatttccttctggccctcactggcacctcgccatcccccctcagctaaaacccaatctcggatatactactaataggcgcggcgctcggactataaaacacaacaaatcataaacccggcggagcagcagcgccgcgcgcgcctcccctcccaatgagttcctatttcgtgaactccaccttccccgtcactctggccagcgggcaggagtccttcctgggccacgtaccgctctattcgtcgggctatgcggacccgctgagacattaccccgcgccctacgggccagggccgggccaggacaagggctttgccacttcctcctattacccgccggcgggcggtggctacggccgagcggcgccctgcgactacgggccggcgccggccttctaccgcgagaaagagtcggcctgcgcactctccggcgccgacgagcagcccccgttccaccccgagccgcggaagtcggactgcgcgcaggacaagagcgtgttcggcgagacagaagagcagaagtgctccactccggtctacccgtggatgcagcggatgaattcgtgcaacagtgagtgagacttcccgtcgccgtcgccccggctcccctgggcgcccaccccgggacacagaactagtgagcgccccctgccccaatctcccacagggtgctgggtgggcatctcagttaggagatagaagaagattgggcgccggccgggggtctctcgctgtgtcccctattaggcaggagttacaaagtttgcaaagtcccagccgcactgggagccatggggagcaagtgtgctctcctggggcgcctggccagagccggggttccaggacagggaagggagcaggagcctgcagtcactggcttggctttactttgagcccccaacccccctctcccagccctggtagggttccccaaccaaagacggctccattaaaaacggagtgcgtcatgcaagggggtagggggtgacgctgaagaggaagagttgagtctgtctgggactgtgtttccctgtggtggggagctggggcaagatgaggcaccaggaaaggggtggtagtcagaggagggaggaggaataaggggaaggaagagagagggagcaggcggagcgagagagggagaaacaggcgcggggtctcaggttggattatttgttggccttaagtcccaactgatgtccattagccggactcgaaagtgaggagccgttaatgtggactatggatcgatctacgtcattacggattaacggcctggatttatcattgggttggggggatgacggggggtgggaacaagatggatggaaagggagggaaagacaagatgcaactaggaagagacacacctgaccagcccctccccccaggctcaggtgggagttcaaactgctcctcccctcccccatctagagtctagacagacggcacaggcctaggagactaggagggaatctggagggggcgctggaggagtgcgaaacgggggaagggagccggcagaatagagggcatcccggtactggctggagtctgtgttcgagggtcgactaggggagggggtcctgggcccggtgaccgcaggcctcagcatctccactctgcgtaacaggttcctcctttgggcccagcggccggcgaggccgccagacatacacacgttaccagacgctggagctggagaaggagtttcactacaatcgctacctgacgcggcggcggcgcatcgagatcgcgcacgccctgtgcctgacggagaggcagatcaagatatggttccagaaccgacgcatgaagtggaaaaaggagagcaaactgctcagcgcgtctcagctcagtgccgaggaggaggaagaaaaacaggccgagtgaaggtgctggaaagggagggaggacgcgaggggaaaggcctgtggggagccgagggcgtcagagagacccgggaaggaaggctctcgggtgggggagccaggagacctgctctccggcgcagacaggcggggccagcgctctcctggacgcccccgcccgcacagctcccggcgggtgctctgaggcctcactactcgagcccacccagcatcccgcgcgcccttccttcccgaggaactcgcctcagcctgatcaggcttcctggtgagaactgaggagcggactcacttgatgtttcctggaagcagagcaaaatgctcttgtccctgtcgcgtctcattttgtccatgtcccccgtgcacggttcaatggtagattcgctgtccctcagcgggggccttgaagactccctgatcccagacctgtcgtctctcccaccccctccccaaagccactggaaggagcacatactacctagaagtaagaagaggagcctcagaagaaaacaaagttctattttattaattttctatgtgttgtgtttgtagtcttgtcttagctctggacgtgaaatacttcgatgatgatgatgatgatgatgatgatg

SEQ ID NO: 109431 - DNA, 217 bp, Homo sapiens
agggctaataggcggtcaggtaggtagatatggatgggtgggtggatggatggatgggtagatggatggatgggtagatggatggataggtgaataggtggatggatggatggatggatggataggcagacatatagacaaataagcttcccctacacccttcacttcacctggaagtgaataaacagactggtcatgccagttctgtatatctgtt

SEQ ID NO: 109432 - DNA, 792 bp, Homo sapiens
tttataggtgtaaagtaacaacagtaacctttcctcttacttgctcttttagttcacagcaataccagtatgtaaccaaaagacaagctagagaaacttttaagtacctttctgcagttctaatttgaaccttcttgcataaagaaaacacaagtttgacttttaactgtgcttcacttattatgcttggaatctagaaaacgacttctgaggaagtaatttttttcccctctcatggaaagtctctagggaggatgtcattacacactgtttaaaagaataatgttttcaaaagaataatgcttccgtttgtcctgcatggatgctcttactaggatttaaacttgctttatgtgacagattctccatttacttaacctcactcaacattcctctcttttactctttctcactcaaaaggatgaactgtctgaaatgatcaaaaggaaattttgaaagaaaaaaaaaaggaaaattattctttgaggttaccaagcaaacctgatctcagatccaaactgagacatactttctaacagagatgaaaagtgcaagtgagtgccaaactcgcttttcttttgttttcattaggttaaggcttgacaatacgttagtcgccacagcatgatccagtgtaacatattagttcattttaaagtagtctttttaaaatacgcatctttaaaacaaaatgaattaaaattatgtgttttttttttttcttctaatgaacctggtatttatttccttaaaaagaaacttcctcaggcagtgacttaagtggttaagtga

SEQ ID NO: 109433 - DNA, 153 bp, Homo sapiens
cattaaaaaataaagccaccccattttggacgaaggagggagaggaagtcagaatgacaccccactccccatgctggctgaggatgggggggtaccaccaggtgcccccaagcccgatgctggctccccagggtttccagatggaggctgggg

SEQ ID NO: 109434 - DNA, 1073 bp, Homo sapiens
ggcttttttttttttttcctttttttgtggagacagggtctctctctattacccagattggtctcaaattcctggactcaagtgatcctctcacctcagcctcccaaagtgctggagtgctcccactgcacttgacaaggtgaagaacttacagctggagagtttaatgccagcaaaggatggtttgagatatatgtgtatatatatgtgtctatatatatacgtacaagcctgtacagtatgttattgtactgaatactatgacaagtgtaaaacaatagtaactatatatgtatctaaacataaaaaagatacagtaaaaatagtgcattgtaatcttatggaaccgctatcatgtatgaagtccatctttggccagaaaaggtaattatactgtgcatgattgtaatttaagtaattttcatctctagattacttataatacctaatatttttgttttgcagttagttgaatccatggacatgaaacccacagatatagagggttggcccggtgcagtggctcacgcctgtaatcccagcactttgggaggccaaggcgggtggatcacctgaggtcagaagcttgagaccagcctggccaacatggtaaaaccccatctctactaataatacaaaacaatttgctgggcatggtggtgcacgcttgtaatccaagctactccagaggctgaggcagaagaatcgcttgaatccgagaggcaaaggttgcagtgagcccagatcacaccactgctctccaacctgggcaacaagagcaaaactccgtcaaaaaaaaaagatacagggtcaactgtacacattaaacacttctatcaactagtgatgtcagtcttgtccattgtattattgcctatcttactaaacagtcatatttcaggaagtacaatatactcaaaaactaagttaatgttctttgtagatttatggttaatggatgattcatataatagaaacttaaatttatttgaccattctatttaatatagaataaatacaactagccaggcatggtggctcatgtctataatgccagcacttggggaggccaa

SEQ ID NO: 109435 - DNA, 1151 bp, Homo sapiens
ccccccttctattatgcgtgaagtccatctttggccagaaaaggtatttattctgtgcatgattgtaatttaaggaaagggcatctctagattacttataatacctaccacattgcggccagacacggtgtctcacgcctgtaatcccactactttgggaggccaaggcagacaaattgcttgagtccggaagttcgagactagcttgggcaacaaggtgaagaacttacagctggagagtttaatgccagcaaaggatggtttgagatatatgtgtatatatatgtgtctatatatatacgtacaagcctgtacagtatgttattgtactgaatactatgacaagtgtaaaacaatagtaactatatatgtatctaaacataaaaaagatacagtaaaaatagtgcattgtaatcttatggaaccgctatcatgtatgaagtccatctttggccagaaaaggtaattatactgtgcatgattgtaatttaagtaattttcatctctagattacttataatacctaatatttttgttttgcagttagttgaatccatggacatgaaacccacagatatagagggttggcccggtgcagtggctcacgcctgtaatcccagcactttgggaggccaaggcgggtggatcacctgaggtcagaagcttgagaccagcctggccaacatggtaaaaccccatctctactaataatacaaaacaatttgctgggcatggtggtgcacgcttgtaatccaagctactccagaggctgaggcagaagaatcgcttgaatccgagaggcaaaggttgcagtgagcccagatcacaccactgctctccaacctgggcaacaagagcaaaactccgtcaaaaaaaaaagatacagggtcaactgtacacattaaacacttctatcaactagtgatgtcagtcttgtccattgtattattgcctatcttactaaacagtcatatttcaggaagtacaatatactcaaaaactaagttaatgttctttgtagatttatggttaatggatgattcatataatagaaacttaaatttatttgaccattctatttaatatagaataaatacaactagccaggcatggtggctcatgtctataatgccagcacttggggaggccaa

SEQ ID NO: 109436 - DNA, 595 bp, Homo sapiens
agattctcttccattttcaaataggttatttagtcagtcaatgggtggccatcgttaatgcttgttgcaagtttgctattccagagacatagtgcttgacttctatatatttaatattactacaagagtcagtagtatatctacatagctatctgcagttcagggtcaatataatttgatagtatttaataatcataacttcattttgctgtactaattacatttataatttgaccaaatcttatataatcatgaagtatatatacatatgtgtgtgtatgtgtaagtaacttgctacagtcacttatgttgctttggccctctttattctagttgctttcacttgagttatcaccattgtcaggttgtcaaagtaaattttctttacagtcttgctttgctcgtgtcctttttttttttttttgtaattgttattatctttcaatttttcttctttacagtataaacaaatcccaaggtcaaaaatttgtaggactgatgctcactgaagtcaaaactacttttagttatgaggaagaggatccttatcctacaagtacatgacatcacctgattataactagcctaaccatca

SEQ ID NO: 109437 - DNA, 654 bp, Homo sapiens
ctcttccattctctttatttgcttcctcccactctgactctagctatactgaacaccttacaattctttgaatataatgttctctttacctggatcaatgtttgactttctgtgtcccctatgtgtcccattggcttataacttcttttttccccctcaccaaaagttgtatgaaaagatactgtagtaccattacatcctgttttacatggcacttttcatgtagtgtagtgtttactttgtgaactctttaatgtcttactcatctttgtgtctttagtttaacgtacacattgttgtataactgagttaaacatcttagtcttcttgagaagccttgtggtatggtagagactagatctgaagtaagatagatttggttcagatcccagcagctccaccatttaaaggttatgtgggtcttgcagggattacttaacccttcttctctggtcctgtttctgtaatatgggaatcgtagagctcataaacttgttagaaggactgattgagatgggtgaggtttttattgtgcagggcccattatggtgctccatagatgttagtactcttttctttcctctgtattgaatgaaaattgaattgcttctcagagcccctcatgctatatgtcattgaaataagtagatatgg

SEQ ID NO: 109438 - DNA, 605 bp, Homo sapiens
agttttcaacaataatttataaagcaaacaggaaagtatggcccattcacagggaaaaaagtagttgatagaaaccatctctgaggacacattgggcatactaaacaaatgctttgaatcagctgtcttaaatatgctcagaaagccaggtgaaaccatgggcaaagaactaaaggaaaccaggagcacagtgtatgaacaagtagagagtatagatagaaattaagaaaccagccaggcgcagtggctcacgcctgtaatcccagcactttgggaggctgacgtgggcggatcacttgaggtcaggagttcaagaccagcctggccaacatggtgaaacctttctctactaaaaacacaaaaattagctggatgtggtggcgggcgcctgtagtcccagctacttggaaggctgaagcaggagaatcatttgaacccggcagatggaggttgcagtgagctgagactgcaccactgcacaccagcgtggggacagagcaagactctgttgcaaaaaaaaaaaagaaaaattaagaaaccaacagaaattctgtaccccaaaattacaatagctgagatgaaaaatacactagaagaattcaata

SEQ ID NO: 109439 - DNA, 513 bp, Homo sapiens
tagagtctgttaatggctagggcccatcatcgtggtgaatcacctaagacccagggaagagtggcccagggtgggaactgtctgcctgtgggccacatcacccctagtctggtccaaggagctcctgccaggctttctcagagggtcctggactcactcccctggggcaggcccggggaggctggggaccaactctccggccaatgccgcttggccagggaacagatgaaggggtgggggataggagctttctggagcctgcactcctccctggctcctgggtcccagccctggagcaggaaggagggagggagggccagtctttgtgtactttacagatcacagctgccttgagcaaacgatgccagctacccacccagctcggtgattccaccaaacacaaacagctgcctagcctggccacctcctaggcaaacaacccagctggtttgcagggcaacaaggtcaggcagtccccctcagcctggggcctggccaacagcagctcctcct

SEQ ID NO: 109440 - DNA, 342 bp, Homo sapiens
aagaaagtacagcttcaaaaatctaagccatttgtccgatgcagaacagcatttgacaactatggaggtgactctgatgacctggctctacctcagcatggggccctgtgtcattgataagtgtggtattagccgcctgattcgctaacccacagttcagagcaggggtgggccaggcagatattagaacagaaatgaggaccaagacttgcttaaataagcaggcagcaagctcggtgagcagacaggatccaggtgacgcggtgcagtaatgtggggttgtggtcagcaccatggacagctcccctgttgcttcatattgaggaataggaaagcgccgct

SEQ ID NO: 109441 - DNA, 337 bp, Homo sapiens
tgggaggaggtggatgtgggggttcagaaatgcggaagtttatcttgcgggcactagggagccgttggaggtgtgtaagcaggagagaggtcggctcagatcttcactatggggctgtcaggacaaggcgaggatggagtcattcataggttcaacaagtgtttgctgagcacttactctgtgccacgccccagggagacagaggagagccagacagacaaggcgtgcaccttggggagacagacgtgaccacacaaccaccaccacagggtgagggggctatggtgggggctggactgggtaaggcacgtggcctggtccctccaaagaggaatcc

SEQ ID NO: 109442 - DNA, 487 bp, Homo sapiens
tcattgatatttggtggttttcctatgtgtttagccatttattttctaggattcttgggctccttgatcataagaattaggtcctttaacagttttggttggaaaattctcagctattgttttttcatatttgctttctcttattttcgccttatgaattccaagtagatagatgttggaacctctcataccgtctttcatgtgtcttaaactctttttaccatatttatcttttggtatctgtgcttatgttaaaatgtatccacaggattttaatgtgtagaggtgacagagtgaggacatggagtagtcagtgccactgggaagaaaagtttattactcagtttcctagaagtgagaggcattgcttgctatgcagaagcacatggggcagccccagagctggtcaggaggcagggtaggagtgaaagagaagcacagggcatagccgtttttggagtttctgtgggaaagtcaaggcagggca

SEQ ID NO: 109443 - DNA, 179 bp, Homo sapiens
caatgtataagacagtggaatactatgcagtactaaaacagtgaagcgatgcaacattacaaacaaaaaaaccccgaaaaactgtcccatcctagttcttcccatttctgcttcccgctttccagcagtcccatcccagctgttcgaatccactcttgtagctccgcccctgcctagcc

SEQ ID NO: 109444 - DNA, 900 bp, Homo sapiens
atttattatgagagaatttattataatgactgcgatggtagtttataacttataaactctaccatatttgggaaattcacagttacaaacatttacctatgaagggggagtgagtagtcattccttcattttttacaaataagctgagtcgtggagaatttaagtgatgtgtgtagaaactcacagtaagtaaggcgtagtcttcatcactcttgtagtactgcattatctctttgtaaagttttcagggtttctgttttattaatggttattaattttatttatttatttatttatttatttttgagatggagtctgtcaccaggctgaagtgcagtggtgctatcttggctcactgcagcctctgcctcctgggttcaagtgattctcctgcctcagcctaccgagtaactgggactacaggtgcatgccaccacacccagctaatttttttgtatttttagtagagacagggtttcaccatgttggtcaggatggtatcgatttcttgaccttgtgatctgcccacctcagcctcccagagtgctggggattacaggcgtgagccacggcgcccagccaaaattgtccaagtcagtcgtagtttgagacgaggtctcgctggttgtgcaggctgtaagtgcaagggacaaaaatcagcaacagcaaaacattacctcccagcgctcatgaccttacgatcagcaacacgaaagaagagaaggagaacgacgaccgggaggccgcttgagtgaacagaggacccgaaacaaggcgcgatcacacaacacacccaaagctaacacaaaaacacggtaaacgaacaagcacaaatacacacaaaaaccaaaccaaaagagaacagacaacacacaaaaaaagaaacggaaaccaaaacac

SEQ ID NO: 109445 - DNA, 548 bp, Homo sapiens
cacaggttcttcatgaccctcctctcctcctcacccttggcagtattcttactagaccacaagtgcctgggggatcccaggacccgcccccttccaccgtcactcccagcctgagcctgtcacagctctgtccacagtgctgctggtttgtcacttcccagtggctttgaggaagtgccacccccccacccagggcccacccgagaaagtctccagcagtgaggtcccctgggccagttcggtgggccaagtcctgcactctgtgcccacaccgagccctcctcggggctggcagctcctgccgtgctgggcacttgacgggcaccccttgctgcatccccagcaacttggaaatgcagagtccaaaacgcctgaagccagggcctggagcctctgctggagcaggctggcatcccaaggggaatgtccccaaggggacatgcaggcagacaccctcaggagcacagtgacccaaggtcagtgtggggagatcgaggaggggctagaaggaggaggacccaggtcccaccgaggatggaggcaggtgt

SEQ ID NO: 109446 - DNA, 274 bp, Homo sapiens
ggcccaggccagcagatgctggaatccagagagaattgctgtttgagtaaggccacctggctgaggcagtgaccttcagcagagggacacagcctacctgtggcaacgcataagccagaacaggaaaaaacatctcaacctcacttccctcctgcccaccagtctcccgggagggcagccctccagtcaaccctaacggaaaccagagcgaaagcgagactagagatgctttatgcatcagcctcatggagcataaagtgagggttacggcaag

SEQ ID NO: 109447 - DNA, 378 bp, Homo sapiens
ctttcttgtactgtattaatttttgaacacttacttgaagtatatttgtaaaacaaattccttggagtagaattgctgttttaaaaatatttacattttaaattgtagtaatgtttgtcaggtttgtcatcttgttctccaaaaacagtgcagtatttcctgttgtagtaccataaagtttttgtagttctaaagtgaaaaaagtatgttaaaggaaaaattgtcactgttttagcttttaatttaggagattgtattggctttagaatttacaaactgttattggtagatgtttttattatcttgccaaagtctttgcagagatttggggcgtccattcagcagtgtttcctgagtcgttgtttttggtcaatgctg

SEQ ID NO: 109448 - DNA, 247 bp, Homo sapiens
gaaaaacagagccagcatggtggctcatgcctgtagtcccagtgctttgggaggtcaaagtgggaggatcgcttgagcccaggagtttgagaccaccctgggcaacgtagtgagaccctgcttcttacaaaaaactcagacaaacaaacaaaaagacaaaaaatagttgtagttgtgcacaactgtagtcccagctactcaggaggcagaggcaggaagattgtttgagcccaggaattttcaggct

SEQ ID NO: 109449 - DNA, 669 bp, Homo sapiens
acttgaccccaaattgaagaaaaaaatgttcttctagaatacataacaatctgttcttcacatatgtttggagccagaattttctctacctctatgatccaattaatttgaagctgagaaatttctttaaactaatgctggaatgggagtgtcaccatgttcccaacagaagtaaatgtaaaccatctattaaggaacctaccctaaatcccaggcttcaacaaaatccctgcaaaatgtataaaaatatatatgctcacaaaaataaaatacgaaagtaaataagatactaagagtgagcagaaaccactgaaagaagagtaaaactctcaaatactgtagatattagaattattgtatatagaatataatggttatgtaataaatacccttaaaataagagtgtcaatactacatttaataaatgatttactacatacagccattatggaaaacaatacagagcttcctcaaaaaactaaaaacagaactgccatatgacccagcaatcccactgctgggcatatatccaaaagaaaggaaatcagtatgtcagtgagatatctgtactaccatggttattgtagcactattcgcaatagccaaaatatggaatcaacctgagtgtccaccaatagatgagtagatttttttaatgtggtatatata

SEQ ID NO: 109450 - DNA, 488 bp, Homo sapiens
gttttggagtatatatattgtatgccatgaactatatttttctgcttatggctttgcctcatttaattgccatagcacttacatggggcaggtattcattttcctgcttagcaaataaggaaactgaatttcagagatgtcaggtaacctgcctacttcacacactaggagttttgatgtttaattttgaactaagatctatctggcttgaaagctctttgcattaaacaaccttgaacaatatacttggaacgtaggtgtgtttttggcacagaacatggcatgtgtgtgagggattgaacacagacttgcccagattcaaacttaccaatcttctgtttcatgtgcccagaagaaacagcctgtttctcagcctcaaacccaaacttctagttgtcttgattggttcagcctgactgtccaactctgatttatagctgtgattgggggagctgagattacacagtgtaggcaggcagaagggcccc

SEQ ID NO: 109451 - DNA, 299 bp, Homo sapiens
gttgttgagtgttcatgcgtcactgcagttaatcctcacatctctatgaggtggatgatattattgtcttagcttagagatgagcgctctggagacatgtttgttctttgctccaggcctctcagctttaagtacagagccaggatccaaaccttgatctgctttacaataaagtcgaagaacttaatctgaatgaatgctccactgccttatttttttaaatccagaaataaaagtagaacactacattgcctgggcattccaaagctcataaaacgtaataagattttggaaaaaag

SEQ ID NO: 109452 - DNA, 420 bp, Homo sapiens
ctagccctactcaaaagtatggaacggctatattaaattcagataaatcaggttttttggtttatttatttatttatttatttttcgagacagggtctctggcacccaggctggggtgcagtggtgtgatcacagcaacctgtgcctcccgaactcaagcaatcctcccacctcatctgggactacaggcgtgtgctaccatgcctggctaatttttgtatttattttttgtagagacagggtctctccatgttgctcagctggtcttgagaactcctgggctcaagtgatccacccatcttgtcttcctgagatgaatcacgaggtcaggagattgagaccatcctggctagcatggtgaaaccccgtctctactaaaaatataaaaaattagccaggcgtgttggtgggcacctgtag

SEQ ID NO: 109453 - DNA, 677 bp, Homo sapiens
taaggaggctttgtatgtgcaccccgcgtcatctgttgcctggggtgatgctctagcctcctgacattgtcatactgctgcacttttccagtctgtttccatttatgtctgaggttgcaattttttgaattttggaaatcagaccttggcgatgaccttgagcagtaggataggatataaataactcccacgtgcctagcgttccagtgaaggaacactaggcataaatgtgttaatgaagtaacgtaacacaagttaagtaaggtcatatcattccaaataagagctgacgtctctgtagtggccctcaaagactatccccttccttgtgcacccagctcccacttcagagcctttgcatgtactgttccctctgtctccctactctttccccaaacagaatgttgctgggtccctgcttccttcagctccctcttcacatgtcaacttattggtgaggtcttctctggccaccccttttaaaaataacaatcttgtccttcctggaaacttttttttttttctttctccaacactgttatcaccatctagcaaaaataaattacataatgttttattcatttatatttacatgtttttattatatggtgattctcattagaaagtaaaccttggaaggccatgtttgtgtgtttttatctctgctgtatctccag

SEQ ID NO: 109454 - DNA, 241 bp, Homo sapiens
taagaatgcacgtgtttcttatctactgagactatgctactcggttgaaaagaaaacgaatgcagactgtaataattccaacaagaatgacccttttctttagtagaaaaagacaagaactctttttttttttttttttttttttttttttttttttttttttttcaaagggggcccccccaaaaccccaccactagaaatgcaaaaaaagaaaaaaacacgggggtgaaggggggagaag

SEQ ID NO: 109455 - DNA, 312 bp, Homo sapiens
attttatattacctatttcaaaagattagtcagattaaagaaatattttatatttatactttatattgaagttgtccataattatgtattaacacatggttgtttttctagtggtttgtttaatatgtcctttatggtagtaggctaaggatggtgaatgactagcagatagttgttttgtacctatttaacatataaactatttgtgcctatttctgtaaataaagtttattataaaagtgattctaagtaactcgtcacattgggaaaattatttttattttattaaaatgacttaaaatattgtaattg

SEQ ID NO: 109456 - DNA, 459 bp, Homo sapiens
tatgggggtggtgcattaagcgtccatgccctccaggcacaccaccctcccaacattttgatgttaatccagggctctccaaactccattgttaaggtttttgaggtttccttagggaggcatgattgataaaataattggccatgggtgattaactcatcttcagcccctctcccctctgcagaggttgcagttagggctgaacgttccctctaatcatgccttgctgtttctggtgaccagcccccatcctgaagctactaggggcctccagccacaagctatgtcattagcatacaaaagacaccagttgagatttcaaggctttcaggaactatatgccaggaaccagggacaaagaccaaatatttatttttattatatcccatacatataaaagttacttgtaaattatatgtatatacacattaataatctcatgtatattacaagagatta

SEQ ID NO: 109457 - DNA, 2175 bp, Homo sapiens
cttcaagtctttttatttataagaacagtggagaaagttatcaagcaccagatcctggtaatggctcaatacaaaggccttatcaggacacagttgcagagaacaaagatgcattggaaaaaactcaaacatatttaaaagtacattctaatttggtaattccagatgtagaattagaaacatatattccgtattcaacccccacactgacaccttcagatacattccaaacagttgaaacgctgacatgtttgtctttggaaagaaacaggctaactgattattatgaaccattactcaagaacaattccactgcttattcaacaaggggaaatagaatagaaatttcttacgaaaatttacaggtcacaaatattactagaaagggaagcatgttaccagtgagctgtaagttaccgaatatgggtacttaccagagttacctttcctcatctatgccagctggttgtgttttgccagtaggtggtaattttgagatcttgttacattactatcttctcaattatgccaaaaaatgccatcaatcagaagaaaccatggttagtatgataatagctaatgcacttttaggcattcccaaagtcctttataaatctaaaacaggaaagtacagctttccacatacatatataagagctgtccatgcactgcaaaccaatcaacccttggtaagcagtcagacaggtttggaatcagtaatgggtaaataccagctactaacttcagttcttcagtgtttgacaaaaatattaaccattgacatggtaatcactgttaagagacaccctcagaaagttcacaatcaagattcagaagatgaactataacatcagaagtttttaattaaccaaacttttcatctaactcaagccaagtaaagcagtcatgtgaccactggttctaaagtcagttcagtctacttaggaaaatagcgtaactttaaaagtctttagaagaagcacactaaggtcaccagaccagatacaaatattaaattactttatggaacaaatctagaggggaagccaagatttggctaagtgtgtctgttttttccctattttatgcctctgtgtctcagctctgtgttagcctatgtgtttaggggagggtttttctttatagctcctttttactctcctgtatctttttcactccagccctccttcatcgttacatgtttagttcatagaatcatttaatctctgatttgggtgggcttattctaattgtttttaatattgaatacattatttgcattaattttccctactcatactttgtaaagctgagtaaaaggctcaaattatttttttcaaaaagcataaaattaaattagcagtgagtaaaaggctcaaattttttttcaaaaagcataaaattaatttttacttttatgtggtcattggtttactgccacttcatttggaaaacttggatagattttcacctttgatatacctttgaatatatgttacctgaaatataactgtgcattgttaactctttcatttctgtagtaaaaggttaatactagaaaggatatgcaattaatactttgattttctcctgaccccaagagcttgtaaggatatgtcatgtatttactggtttttcttgtatctggtgcatagccagagttccacagtaacaaataatttgacaatttttatttctaatgtttatttctgttttatttttaatttttatttctaatttatttcatttacaaatgttcatattttaaaaacttgtcaatgtaaataatatgatgcatcttatcatggacaaggacagtgttttctacctttatcagttctctgtaatacccaaaacagtgctgtatttactccaagtattcagaagtgcttgttgaataaaacagtgttatctttaattcattcctttaaatacatgtttccagtttacttattcaacagattcttacttgggattgactgaagaaaaaaaactttaattatagttgaataagtgttgactaatgtattttaaaaactataatatcaaaattttttatattaaatgtaattctgattttttaaacatttatgctatatgatgcattattttgtttctgtgaatatggagagaataaattagctcttttgctgaattcatggatgaatgaacttt

SEQ ID NO: 109458 - DNA, 1929 bp, Homo sapiens
cttcaagtctttttatttataagaacagtggagaaagttatcaagcaccagatcctggtaatggctcaatacaaaggccttatcaggacacagttgcagagaacaaagatgcattggaaaaaactcaaacatatttaaaagtacattctaatttggtaattccagatgtagaattagaaacatatattccgtattcaacccccacactgacaccttcagatacattccaaacagttgaaacgctgacatgtttgtctttggaaagaaacaggctaactgattattatgaaccattactcaagaacaattccactgcttattcaacaaggggaaatagaatagaaatttcttacgaaaatttacaggtcacaaatattactagaaagggaagcatgttaccagtgagctgtaagttaccgaatatgggtacttaccagagttacctttcctcatctatgccagctggttgtgttttgccagtaggtggtaattttgagatcttgttacattactatcttctcaattatgccaaaaaatgccatcaatcagaagaaaccatggttagtatgataatagctaatgcacttttaggcattcccaaagtcctttataaatctaaaacaggaaagtacagctttccacatacatatataagagctgtccatgcactgcaaaccaatcaacccttggtaagcagtcagacaggtttggaatcagtaatgggtaaataccagctactaacttcagttcttcagtgtttgacaaaaatattaaccattgacatggtaatcactgttaagagacaccctcagaaagttcacaatcaagattcagaagatgaactataacatcagaagtttttaattaaccaaacttttcatctaactcaagccaagtaaagcagtcatgtgaccactggttctaaagtcagttcagtctacttaggaaaatagcgtaactttaaaagtctttagaagaagcacactaaggtcaccagaccagatacaaatattaaattactttatggaacaaatctagaggggaagccaagatttggctaagtgtgtctgttttttccctattttatgcctctgtgtctcagctctgtgttagcctatgtgtttaggggagggtttttctttatagctcctttttactctcctgtatctttttcactccagccctccttcatcgttacatgtttagttcatagaatcatttaatctctgatttgggtgggcttattctaattgtttttaatattgaatacattatttgcattaattttccctactcatactttgtaaagctgagtaaaaggctcaaattatttttttcaaaaagcataaaattaaattagcagtgagtaaaaggctcaaattttttttcaaaaagcataaaattaatttttacttttatgtggtcattggtttactgccacttcatttggaaaacttggatagattttcacctttgatatacctttgaatatatgttacctgaaatataactgtgcattgttaactctttcatttctgtagtaaaaggttaatactagaaaggatatgcaattaatactttgattttctcctgaccccaagagcttgtaaggatatgtcatgtatttactggtttttcttgtatctggtgcatagccagagttccacagtaacaaataatttgacaatttttatttctaatgtttatttctgttttatttttaatttttatttctaatttatttcatttacaaatgttcatattttaaaaacttgtcaatgtaaataatatgatgcatcttatcatggacaaggacagtgttttctacctttatcagttctctgtaatacccaaaacagtgctgtatttactccaagtattcagaagtgcttgttgaataaaacagtgttatctttaattcattccttt

SEQ ID NO: 109459 - DNA, 2035 bp, Homo sapiens
acgcaggcgcagcggcggccggcgcgggccgagcggaggcaactgctgtgcggcctgcgggcgcgcgctcccttatcggccaacggacgcgaggcgcgcgccatggaacagcggttagctgagtttcgggcggcgcggaaacgggcgggtctggcggcccaaccccctgctgccagtcagggcgcacaaaccccaggagagaaggcggaagcagcagcgactctaaaggcagccccaggctggctaaagcggttcctggtatggaaacctaggcccgcgagtgcccgggcccagcccggcctagttcaggaagcggctcagccccagggcagcacatcagagacaccatggaacacagccattcctctgccgtcgtgctgggaccagtctttcctgaccaatatcaccttcttgaaggttcttctctggttggtcctgctgggactgtttgtggaactggaatttggcctggcatattttgtcctgtccttgttctattggatgtacgtcgggacacgaggccctgaagagaagaaagagggagagaagagcgcctactctgtgttcaatccaggctgtgaagccatccagggcaccctgactgcagagcagttggagcgcgagttacagttgagacccctggcagggagataggacccagctgtgctgtcatgcagctaacctctgatgtggtcttcctcaccattggctatggatttgatttcaggtgtataggactaagggcagcttgcgggttagctctgtgactgcatagtttttctaccttctttccctgatcttttgctgccatttgatctttgatagttttggtgaaactctctaaaatacattcactgtgggtccgacgcaatttataaaaattatgtactcaagaagggagacctgtttgtttcatttctcatctgtttgggagatgattttagagcactagaaaggcactggggagattctcagcttaaaacatccagcagtttgaagtatgattaggtacatcagggctgcattgtcaatgttctctttaagtcttttaacatttatagcaattttttttttcccggagagtttaggttgcaagttttgggtttcttgtttgtttttgttttgcttcctgctttaattctttaattttcagtcattactggtattgaaaaataaaatatctttaaaacatctcctcttcagaaataggtccctcttcattgcccatcaccatcttccactctcctattattttgccactactcagtaaaggaaggtaggaagagacaaacgcctaagtgcaggtgtggggagggatttcacaagtggttattaacggccagttcagcaagaagtgttgagtgtgtacaaaggggagggctggaagtgttaactccagacccgttggctgcttgagttgtttcttatattctaaagcagcagtccctaacctttttggcaccagggaccagttttgtggaacacagtttttccatggacggggtggtggtggaggatgaaacttccacctcagatcatcaggcattagagtctcataaggagcacgcaacctagatccctcgcatgcgcagttcacaatacggttctaagggctttagagtaagcagctttttcacctgtgggcctctggtgagaaattctgtaaattgtgataatcaggctggattttaatgctgcttttccagtacaatgttagagtttgggttcattaaaattaggcaaactcccattgggttagggcttctctcattccattttgtggctaaccttactgtgtttcagcccttgctgaaaattcttctgatatgtgttgcccttcctcacagccctttggccattgggagtttggctgtccctcagagccatccggtcaagcagatggtctgttctatctcacagaaaagtcttttcttccatgagttctgtctgaactgaacatgtaaaaagtatgggaaacagatgaatccctattaaacatgaagttttgattgtatttaagataaaaaaaaaatga

SEQ ID NO: 109460 - DNA, 3209 bp, Homo sapiens
  misc_feature (2985)..(2985): n is a, c, g, or t
tttttttaaggtccagtgacttttcacatgaaagaaatgcattctggacttccattaggatacgagaatcattacaatccattccatattgcttaatgagcatcataaacttcttacaatgagggtaaggtttctcatgatcctctgaagctgtttcagagggccgagttaagtcatcaggttcatctctaaatgagtttgctttttgacctttttcttttcatttgacattttctttgcaggcctagcatactctttgttctccttcctaggaaatcgctgatggtaagtttttccactctttctttgttgaattaatttatcatcatcgtcagcagatgtactatcatatacgtttttttgatactttttttttttaactttcgtgcttctttctagcttcttcaacctgtggctgtttattttcactttcaagcttttcctgttcttcctctgatgtcacttgtacttcttgttctgctttggatgtttgttcgttcttcctttctattgctttcttcacaacagaatctttcatttccatggtaggctttagggaaggatgtttttcaggaggcccttctccctttccatttactatatattttttccttttttatatgaaggtccaagtaaagactttgaaacactctcagggatacactgcttggtagtaaaagtcaagtcttcatcatctggtttaggccatgagtcaacacacagtttttttttaaatactgaatgcagatgcttcagaactcccagaatcttttgcacttgctcctcctgttttcaaacttgcattcttcttggatgcttcttctgggttgtcattttgaagaccattttcaagtatcttttttttttaatgttgcaaaatttgttgtgagtgcttgtcagaccaccagaaatagcataatctgcagtctgttcatacatactcttgagtaaagacaatattttgttgaagaagaatgctaactatacctgacaagccataatgtacaacaggcatgagagctgttcttttcaacctatcaacagcatgtacatttgcttgtttcttcactaaaattccaccttttgctgtgttttgcaaactatagcaagtaaaagtggtgtgtttgcatccttgttcagcacttcagtatccttgttcagcacttcagtattcacatggtgtgagggcagtttttctgccagtagtgtattctcattatacacagcatagtgtagtgcattgttgctatagacatccataagatctgggttggtgccacattctagcagaatgatgacacaaatctcttcttggcaatgtacagccttcatcaaaggcatcctgtttcatttgtcaccaatgtcagtctggcactttcagttcacctggagagtgaccacttccacatggccattggcacaggccaaatgtaaagcagtcgtgttcatccacagatgaaggaatacagaaactccaggatatttgcacaatggaatactcttcagccatcaaactttaggacatcaccccacttccagcaacgtggagagagacctgttcatccgcagatgaagggataaagaaactgtagtatatatacacaaatggaatactcttcatccagaaaaatgtaatgaaattacatcatttgcagccacactgttgaacctagaggacatcatggtaaatgacctgtcctgtccacccacagctgaagggataaagaaaccaccatacagatacactatggaatatgcttcagccataaagctttgggaaatcctgtcatccacagccatgtggagaaacccaagaaacccagaggatattaggtccaaggaaatgagcctggtagaggaagtcccacaccttttaatctcaggcatggagattccaaaaactttatctcctgtccatctacagatgaagggatcaagaaactgtaatgtatatgcacaaagaatactctttggccatcaaaataactaaaccatgtcatttggagcaacaaagccactgcggcctccatttgggccaagctctgactgcaatgatgcctctgccccgacccgggcctcgctgtgactgacaatgccgctgcatcttttcagcagtcattgatgaggaagtatctacatcctccttcccactaccagattttgcttggagaaaagcagtttcctgaaataattctgtgacgagcttcttccacattaggacaaaaatgctggtaacttttaaaaattcctacagaaacctcctgcttccctctccagccatatcccaggcaagcccccagcacaccaccctgccccagaacccatttcccatacccatccaccactcctgacctccaggccttggctcaggctggccttctgctcaaaggctctcctttggagtcgcctggctaagcacagctgtgcctcacccccgcaaaatctagtagtcatcttgaatttcttcctttccctcactatcattcattcattcaacaaaaatcttgtcatgtgcccgctgtgttccagcttttgttctaaatcctgggagacagtgtaattaagacacacaagtcctactcttgtacaacttgcatttgagcttggggcagcagggaaaggaggacaataaacaaaaccagataaatgctatgaaagaaaaaagataaaaccagtagactgtgatagtgaattaggggtgaggggagcagagtactattttaaatcagctgagcagggagaactcactaaggaggagacatttaacaagaaggaaccaccctggcaaaaacggggactaagccaagggcacatacggtgacatttttgccgtttgtagtaggaggggtcaaccaagtgatatgaggggaagggagcattcctctcagagggaaccacaagtgcagaggccctaaggtaagaagcagcttgatatttgaggaatggcagtgccttccttgggccatgcctgtgtgtgatgtaacngtcacaaacacttcttcacccaggttttacagcagaagggaactggtactccgacaagttccaaatgaggcagaagaatgtccgtatctctcctcttgtttgttcccttcgtcagtttgtttacccccccacccccacacccatctacctctagctccctaacctttctcctgccaccccccataaaggcccctaattaaataaaatatattttggaggagacc

SEQ ID NO: 109461 - DNA, 892 bp, Homo sapiens
acgcaggcgcagcggcggccggcgcgggccgagcggaggcaactgctgtgcggcctgcgggcgcgcgctcccttatcggccaacggacgcgaggcgcgcgccatggaacagcggttagctgagtttcgggcggcgcggaaacgggcgggtctggcggcccaaccccctgctgccagtcagggcgcacaaaccccaggagagaaggcggaagcagcagcgactctaaaggcagccccaggctggctaaagcggttcctggtatggaaacctaggcccgcgagtgcccgggcccagcccggcctagttcaggaagcggctcagccccagggcagcacatcagagacaccatggaacacagccattcctctgccgtcgtgctgggaccagtctttcctgaccaatatcaccttcttgaaggttcttctctggttggtcctgctgggactgtttgtggaactggaatttggcctggcatattttgtcctgtccttgttctattggatgtacgtcgggacacgaggccctgaagagaagaaagagggagagaagagcgcctactctgtgttcaatccaggctgtgaagccatccagggcaccctgactgcagagcagttggagcgcgagttacagttgagacccctggcagggagataggacccagctgtgctgtcatgcagctaacctctgatgtggtcttcctcaccattggctatggatttgatttcaggtgtataggactaagggcagcttgcgggttagctctgtgactgcatagtttttctaccttctttccctgatcttttgctgccatttgatctttgatagttttggtgaaactctctaaaatacattcactgtgggtccgacgcaatttataaaaattatgtactca

SEQ ID NO: 109462 - DNA, 1193 bp, Homo sapiens
acgcaggcgcagcggcggccggcgcgggccgagcggaggcaactgctgtgcggcctgcgggcgcgcgctcccttatcggccaacggacgcgaggcgcgcgccatggaacagcggttagctgagtttcgggcggcgcggaaacgggcgggtctggcggcccaaccccctgctgccagtcagggcgcacaaaccccaggagagaaggcggaagcagcagcgactctaaaggcagccccaggctggctaaagcggttcctggtatggaaacctaggcccgcgagtgcccgggcccagcccggcctagttcaggaagcggctcagccccagggcagcacatcagagacaccatggaacacagccattcctctgccgtcgtgctgggaccagtctttcctgaccaatatcaccttcttgaaggttcttctctggttggtcctgctgggactgtttgtggaactggaatttggcctggcatattttgtcctgtccttgttctattggatgtacgtcgggacacgaggccctgaagagaagaaagagggagagaagagcgcctactctgtgttcaatccaggctgtgaagccatccagggcaccctgactgcagagcagttggagcgcgagttacagttgagacccctggcagggagataggacccagctgtgctgtcatgcagctaacctctgatgtggtcttcctcaccattggctatggatttgatttcaggtgtataggactaagggcagcttgcgggttagctctgtgactgcatagtttttctaccttctttccctgatcttttgctgccatttgatctttgatagttttggtgaaactctctaaaatacattcactgtgggtccgacgcaatttataaaaattatgtactcaagaagggagacctgtttgtttcatttctcatctgtttgggagatgattttagagcactagaaaggcactggggagattctcagcttaaaacatccagcagtttgaagtatgattaggtacatcagggctgcattgtcaatgttctctttaagtcttttaacatttatagcaattttttttttcccggagagtttaggttgcaagttttgggtttcttgtttgtttttgttttgcttcctgctttaattctttaattttcagtcattactggtattgaaaaataaaatatctttaaaacatc

SEQ ID NO: 109463 - DNA, 3036 bp, Homo sapiens
acgcaggcgcagcggcggccggcgcgggccgagcggaggcaactgctgtgcggcctgcgggcgcgcgctcccttatcggccaacggacgcgaggcgcgcgccatggaacagcggttagctgagtttcgggcggcgcggaaacgggcgggtctggcggcccaaccccctgctgccagtcagggcgcacaaaccccaggagagaaggcggaagcagcagcgactctaaaggcagccccaggctggctaaagcggttcctggtatggaaacctaggcccgcgagtgcccgggcccagcccggcctagttcagatgaaggaatacagaaactccaggatatttgcacaatggaatactcttcagccatcaaactttaggacatcaccccacttccagcaacgtggagagagacctgttcatccacagatgaagggatacagaaactgtagtattcattcacaatggaatacccttcagctgtgcacatatactgaaatcatatcacctggagccacacagttgaacctgttcatcccttgatgaagggatgacaaaactgaaatatatatccagaatggaatacccttccacgacagaagtggatgaaatcctgtcatttgcagccatgtggagaaacctgttcatccgcagatgaagggataaagaaactgtagtatatatacacaaatggaatactcttcatccagaaaaatgtaatgaaattacatcatttgcagccacactgttgaacctagaggacatcatggtaaatgacctgtcctgtccacccacagctgaagggataaagaaaccaccatacagatacactatggaatatgcttcagccataaagctttgggaaatcctgtcatccacagccatgtggagaaacccaagaaacccagaggatattaggtccaaggaaatgagcctggtagaggaagtcccacaccttttaatctcaggcatggagattccaaaaactttatctcctgtccatctacagatgaagggatcaagaaactgtaatgtatatgcacaaagaatactctttggccatcaaaataactaaaccatgtcatttggagcaacaaagccactgcggcctccatttgggccaagctctgactgcaatgatgcctctgccccgacccgggcctcgctgtgactgacaatgccgctgcatcttttcagcagtcattgatgaggaagtatctacatcctccttcccactaccagattttgcttggagaaaagcagtttcctgaaataattctgtgacgagcttcttccacattaggacaaaaatgctggaagcggctcagccccagggcagcacatcagagacaccatggaacacagccattcctctgccgtcgtgctgggaccagtctttcctgaccaatatcaccttcttgaaggttcttctctggttggtcctgctgggactgtttgtggaactggaatttggcctggcatattttgtcctgtccttgttctattggatgtacgtcgggacacgaggccctgaagagaagaaagagggagagaagagcgcctactctgtgttcaatccaggctgtgaagccatccagggcaccctgactgcagagcagttggagcgcgagttacagttgagacccctggcagggagataggacccagctgtgctgtcatgcagctaacctctgatgtggtcttcctcaccattggctatggatttgatttcaggtgtataggactaagggcagcttgcgggttagctctgtgactgcatagtttttctaccttctttccctgatcttttgctgccatttgatctttgatagttttggtgaaactctctaaaatacattcactgtgggtccgacgcaatttataaaaattatgtactcaagaagggagacctgtttgtttcatttctcatctgtttgggagatgattttagagcactagaaaggcactggggagattctcagcttaaaacatccagcagtttgaagtatgattaggtacatcagggctgcattgtcaatgttctctttaagtcttttaacatttatagcaattttttttttcccggagagtttaggttgcaagttttgggtttcttgtttgtttttgttttgcttcctgctttaattctttaattttcagtcattactggtattgaaaaataaaatatctttaaaacatctcctcttcagaaataggtccctcttcattgcccatcaccatcttccactctcctattattttgccactactcagtaaaggaaggtaggaagagacaaacgcctaagtgcaggtgtggggagggatttcacaagtggttattaacggccagttcagcaagaagtgttgagtgtgtacaaaggggagggctggaagtgttaactccagacccgttggctgcttgagttgtttcttatattctaaagcagcagtccctaacctttttggcaccagggaccagttttgtggaacacagtttttccatggacggggtggtggtggaggatgaaacttccacctcagatcatcaggcattagagtctcataaggagcacgcaacctagatccctcgcatgcgcagttcacaatacggttctaagggctttagagtaagcagctttttcacctgtgggcctctggtgagaaattctgtaaattgtgataatcaggctggattttaatgctgcttttccagtacaatgttagagtttgggttcattaaaattaggcaaactcccattgggttagggcttctctcattccattttgtggctaaccttactgtgtttcagcccttgctgaaaattcttctgatatgtgttgcccttcctcacagccctttggccattgggagtttggctgtccctcagagccatccggtcaagcagatggtctgttctatctcacagaaaagtcttttcttccatgagttctgtctgaactgaacatgtaaaaagtatgggaaacagatgaatccctattaaacatgaagttttgattgtatttaagataaaaaaaaaatga

SEQ ID NO: 109464 - DNA, 4182 bp, Homo sapiens
tttttttaaggtccagtgacttttcacatgaaagaaatgcattctggacttccattaggatacgagaatcattacaatccattccatattgcttaatgagcatcataaacttcttacaatgagggtaaggtttctcatgatcctctgaagctgtttcagagggccgagttaagtcatcaggttcatctctaaatgagtttgctttttgacctttttcttttcatttgacattttctttgcaggcctagcatactctttgttctccttcctaggaaatcgctgatggtaagtttttccactctttctttgttgaattaatttatcatcatcgtcagcagatgtactatcatatacgtttttttgatactttttttttttaactttcgtgcttctttctagcttcttcaacctgtggctgtttattttcactttcaagcttttcctgttcttcctctgatgtcacttgtacttcttgttctgctttggatgtttgttcgttcttcctttctattgctttcttcacaacagaatctttcatttccatggtaggctttagggaaggatgtttttcaggaggcccttctccctttccatttactatatattttttccttttttatatgaaggtccaagtaaagactttgaaacactctcagggatacactgcttggtagtaaaagtcaagtcttcatcatctggtttaggccatgagtcaacacacagtttttttttaaatactgaatgcagatgcttcagaactcccagaatcttttgcacttgctcctcctgttttcaaacttgcattcttcttggatgcttcttctgggttgtcattttgaagaccattttcaagtatcttttttttttaatgttgcaaaatttgttgtgagtgcttgtcagaccaccagaaatagcataatctgcagtctgttcatacatactcttgagtaaagacaatattttgttgaagaagaatgctaactatacctgacaagccataatgtacaacaggcatgagagctgttcttttcaacctatcaacagcatgtacatttgcttgtttcttcactaaaattccaccttttgctgtgttttgcaaactatagcaagtaaaagtggtgtgtttgcatccttgttcagcacttcagtatccttgttcagcacttcagtattcacatggtgtgagggcagtttttctgccagtagtgtattctcattatacacagcatagtgtagtgcattgttgctatagacatccataagatctgggttggtgccacattctagcagaatgatgacacaaatctcttcttggcaatgtacagccttcatcaaaggcatcctgtttcatttgtcaccaatgtcagtctggcactttcagttcacctggagagtgaccacttccacatggccattggcacaggccaaatgtaaagcagtcgtgttcatccacagatgaaggaatacagaaactccaggatatttgcacaatggaatactcttcagccatcaaactttaggacatcaccccacttccagcaacgtggagagagacctgttcatccacagatgaagggatacagaaactgtagtattcattcacaatggaatacccttcagctgtgcacatatactgaaatcatatcacctggagccacacagttgaacctgttcatcccttgatgaagggatgacaaaactgaaatatatatccagaatggaatacccttccacgacagaagtggatgaaatcctgtcatttgcagccatgtggagaaacctgttcatccgcagatgaagggataaagaaactgtagtatatatacacaaatggaatactcttcatccagaaaaatgtaatgaaattacatcatttgcagccacactgttgaacctagaggacatcatggtaaatgacctgtcctgtccacccacagctgaagggataaagaaaccaccatacagatacactatggaatatgcttcagccataaagctttgggaaatcctgtcatccacagccatgtggagaaacccaagaaacccagaggatattaggtccaaggaaatgagcctggtagaggaagtcccacaccttttaatctcaggcatggagattccaaaaactttatctcctgtccatctacagatgaagggatcaagaaactgtaatgtatatgcacaaagaatactctttggccatcaaaataactaaaccatgtcatttggagcaacaaagccactgcggcctccatttgggccaagctctgactgcaatgatgcctctgccccgacccgggcctcgctgtgactgacaatgccgctgcatcttttcagcagtcattgatgaggaagtatctacatcctccttcccactaccagattttgcttggagaaaagcagtttcctgaaataattctgtgacgagcttcttccacattaggacaaaaatgctggaagcggctcagccccagggcagcacatcagagacaccatggaacacagccattcctctgccgtcgtgctgggaccagtctttcctgaccaatatcaccttcttgaaggttcttctctggttggtcctgctgggactgtttgtggaactggaatttggcctggcatattttgtcctgtccttgttctattggatgtacgtcgggacacgaggccctgaagagaagaaagagggagagaagagcgcctactctgtgttcaatccaggctgtgaagccatccagggcaccctgactgcagagcagttggagcgcgagttacagttgagacccctggcagggagataggacccagctgtgctgtcatgcagctaacctctgatgtggtcttcctcaccattggctatggatttgatttcaggtgtataggactaagggcagcttgcgggttagctctgtgactgcatagtttttctaccttctttccctgatcttttgctgccatttgatctttgatagttttggtgaaactctctaaaatacattcactgtgggtccgacgcaatttataaaaattatgtactcaagaagggagacctgtttgtttcatttctcatctgtttgggagatgattttagagcactagaaaggcactggggagattctcagcttaaaacatccagcagtttgaagtatgattaggtacatcagggctgcattgtcaatgttctctttaagtcttttaacatttatagcaattttttttttcccggagagtttaggttgcaagttttgggtttcttgtttgtttttgttttgcttcctgctttaattctttaattttcagtcattactggtattgaaaaataaaatatctttaaaacatctcctcttcagaaataggtccctcttcattgcccatcaccatcttccactctcctattattttgccactactcagtaaaggaaggtaggaagagacaaacgcctaagtgcaggtgtggggagggatttcacaagtggttattaacggccagttcagcaagaagtgttgagtgtgtacaaaggggagggctggaagtgttaactccagacccgttggctgcttgagttgtttcttatattctaaagcagcagtccctaacctttttggcaccagggaccagttttgtggaacacagtttttccatggacggggtggtggtggaggatgaaacttccacctcagatcatcaggcattagagtctcataaggagcacgcaacctagatccctcgcatgcgcagttcacaatacggttctaagggctttagagtaagcagctttttcacctgtgggcctctggtgagaaattctgtaaattgtgataatcaggctggattttaatgctgcttttccagtacaatgttagagtttgggttcattaaaattaggcaaactcccattgggttagggcttctctcattccattttgtggctaaccttactgtgtttcagcccttgctgaaaattcttctgatatgtgttgcccttcctcacagccctttggccattgggagtttggctgtccctcagagccatccggtcaagcagatggtctgttctatctcacagaaaagtcttttcttccatgagttctgtctgaactgaacatgtaaaaagtatgggaaacagatgaatccctattaaacatgaagttttgattgtatttaagataaaaaaaaaatga

SEQ ID NO: 109465 - DNA, 2316 bp, Homo sapiens
tttagtagagatgaggttccaccatgttggccaggctggtctcaaactcctgagctcaagtgatctgtctgcctcagcctcccaaagtgctgggattacaggtgtgcacctggctgatttttttttttaaacgtaaaaaggatttttgtttcctgtctctattttagaatcatgtcacttgtaatattttaggtcatctaatccaatcaacaaaggtatattgactctgtatttgaagcatttgtcatgactgttgcattatcagttattcaggagtttctgtatggggcacaaattagctcttcttagcagcagactaatctgaagaaatgactcccacgaataagaatctgtctgaatacgtagggcttttattaggtcacatctcactaagtgctgatcagttttgattcagttggagtagagcacataggttctttggagatgattgttttagagagttgcatgaaagaatagaaatcaatgagccagcagccttctcagagcaatgaaaactgccttttcagattagttttgatcatctcagctccattaccctttattctttcttttgtttgtttgtgtatcctgaagcggctcagccccagggcagcacatcagagacaccatggaacacagccattcctctgccgtcgtgctgggaccagtctttcctgaccaatatcaccttcttgaaggttcttctctggttggtcctgctgggactgtttgtggaactggaatttggcctggcatattttgtcctgtccttgttctattggatgtacgtcgggacacgaggccctgaagagaagaaagagggagagaagagcgcctactctgtgttcaatccaggctgtgaagccatccagggcaccctgactgcagagcagttggagcgcgagttacagttgagacccctggcagggagataggacccagctgtgctgtcatgcagctaacctctgatgtggtcttcctcaccattggctatggatttgatttcaggtgtataggactaagggcagcttgcgggttagctctgtgactgcatagtttttctaccttctttccctgatcttttgctgccatttgatctttgatagttttggtgaaactctctaaaatacattcactgtgggtccgacgcaatttataaaaattatgtactcaagaagggagacctgtttgtttcatttctcatctgtttgggagatgattttagagcactagaaaggcactggggagattctcagcttaaaacatccagcagtttgaagtatgattaggtacatcagggctgcattgtcaatgttctctttaagtcttttaacatttatagcaattttttttttcccggagagtttaggttgcaagttttgggtttcttgtttgtttttgttttgcttcctgctttaattctttaattttcagtcattactggtattgaaaaataaaatatctttaaaacatctcctcttcagaaataggtccctcttcattgcccatcaccatcttccactctcctattattttgccactactcagtaaaggaaggtaggaagagacaaacgcctaagtgcaggtgtggggagggatttcacaagtggttattaacggccagttcagcaagaagtgttgagtgtgtacaaaggggagggctggaagtgttaactccagacccgttggctgcttgagttgtttcttatattctaaagcagcagtccctaacctttttggcaccagggaccagttttgtggaacacagtttttccatggacggggtggtggtggaggatgaaacttccacctcagatcatcaggcattagagtctcataaggagcacgcaacctagatccctcgcatgcgcagttcacaatacggttctaagggctttagagtaagcagctttttcacctgtgggcctctggtgagaaattctgtaaattgtgataatcaggctggattttaatgctgcttttccagtacaatgttagagtttgggttcattaaaattaggcaaactcccattgggttagggcttctctcattccattttgtggctaaccttactgtgtttcagcccttgctgaaaattcttctgatatgtgttgcccttcctcacagccctttggccattgggagtttggctgtccctcagagccatccggtcaagcagatggtctgttctatctcacagaaaagtcttttcttccatgagttctgtctgaactgaacatgtaaaaagtatgggaaacagatgaatccctattaaacatgaagttttgattgtatttaagataaaaaaaaaatga

SEQ ID NO: 109466 - DNA, 2194 bp, Homo sapiens
acgcaggcgcagcggcggccggcgcgggccgagcggaggcaactgctgtgcggcctgcgggcgcgcgctcccttatcggccaacggacgcgaggcgcgcgccatggaacagcggttagctgagtttcgggcggcgcggaaacgggcgggtctggcggcccaaccccctgctgccagtcagggcgcacaaaccccaggagagaaggcggaagcagcagcgactctaaaggcagccccaggctggctaaagcggttcctggtatggaaacctaggcccgcgagtgcccgggcccagcccggcctagttcagatgaaggaatacagaaactccaggatatttgcacaatggaatactcttcagccatcaaactttaggacatcaccccacttccagcaacgtggagagagacctgttcatccacagatgaagggatacagaaactgtagtattcattcacaatggaatacccttcagctgtgcacatatactgaaatcatatcacctggagccacacagttgaacctgttcatcccttgatgaagggatgacaaaactgaaatatatatccagaatggaatacccttccacgacagaagtggatgaaatcctgtcatttgcagccatgtggagaaacctgttcatccgcagatgaagggataaagaaactgtagtatatatacacaaatggaatactcttcatccagaaaaatgtaatgaaattacatcatttgcagccacactgttgaacctagaggacatcatggtaaatgacctgtcctgtccacccacagctgaagggataaagaaaccaccatacagatacactatggaatatgcttcagccataaagctttgggaaatcctgtcatccacagccatgtggagaaacccaagaaacccagaggatattaggtccaaggaaatgagcctggtagaggaagtcccacaccttttaatctcaggcatggagattccaaaaactttatctcctgtccatctacagatgaagggatcaagaaactgtaatgtatatgcacaaagaatactctttggccatcaaaataactaaaccatgtcatttggagcaacaaagccactgcggcctccatttgggccaagctctgactgcaatgatgcctctgccccgacccgggcctcgctgtgactgacaatgccgctgcatcttttcagcagtcattgatgaggaagtatctacatcctccttcccactaccagattttgcttggagaaaagcagtttcctgaaataattctgtgacgagcttcttccacattaggacaaaaatgctggaagcggctcagccccagggcagcacatcagagacaccatggaacacagccattcctctgccgtcgtgctgggaccagtctttcctgaccaatatcaccttcttgaaggttcttctctggttggtcctgctgggactgtttgtggaactggaatttggcctggcatattttgtcctgtccttgttctattggatgtacgtcgggacacgaggccctgaagagaagaaagagggagagaagagcgcctactctgtgttcaatccaggctgtgaagccatccagggcaccctgactgcagagcagttggagcgcgagttacagttgagacccctggcagggagataggacccagctgtgctgtcatgcagctaacctctgatgtggtcttcctcaccattggctatggatttgatttcaggtgtataggactaagggcagcttgcgggttagctctgtgactgcatagtttttctaccttctttccctgatcttttgctgccatttgatctttgatagttttggtgaaactctctaaaatacattcactgtgggtccgacgcaatttataaaaattatgtactcaagaagggagacctgtttgtttcatttctcatctgtttgggagatgattttagagcactagaaaggcactggggagattctcagcttaaaacatccagcagtttgaagtatgattaggtacatcagggctgcattgtcaatgttctctttaagtcttttaacatttatagcaattttttttttcccggagagtttaggttgcaagttttgggtttcttgtttgtttttgttttgcttcctgctttaattctttaattttcagtcattactggtattgaaaaataaaatatctttaaaacatc

SEQ ID NO: 109467 - DNA, 1969 bp, Homo sapiens
acgcaggcgcagcggcggccggcgcgggccgagcggaggcaactgctgtgcggcctgcgggcgcgcgctcccttatcggccaacggacgcgaggcgcgcgccatggaacagcggttagctgagtttcgggcggcgcggaaacgggcgggtctggcggcccaaccccctgctgccagtcagggcgcacaaaccccaggagagaaggcggaagcagcagcgactctaaaggcagccccaggctgggaagcggctcagccccagggcagcacatcagagacaccatggaacacagccattcctctgccgtcgtgctgggaccagtctttcctgaccaatatcaccttcttgaaggttcttctctggttggtcctgctgggactgtttgtggaactggaatttggcctggcatattttgtcctgtccttgttctattggatgtacgtcgggacacgaggccctgaagagaagaaagagggagagaagagcgcctactctgtgttcaatccaggctgtgaagccatccagggcaccctgactgcagagcagttggagcgcgagttacagttgagacccctggcagggagataggacccagctgtgctgtcatgcagctaacctctgatgtggtcttcctcaccattggctatggatttgatttcaggtgtataggactaagggcagcttgcgggttagctctgtgactgcatagtttttctaccttctttccctgatcttttgctgccatttgatctttgatagttttggtgaaactctctaaaatacattcactgtgggtccgacgcaatttataaaaattatgtactcaagaagggagacctgtttgtttcatttctcatctgtttgggagatgattttagagcactagaaaggcactggggagattctcagcttaaaacatccagcagtttgaagtatgattaggtacatcagggctgcattgtcaatgttctctttaagtcttttaacatttatagcaattttttttttcccggagagtttaggttgcaagttttgggtttcttgtttgtttttgttttgcttcctgctttaattctttaattttcagtcattactggtattgaaaaataaaatatctttaaaacatctcctcttcagaaataggtccctcttcattgcccatcaccatcttccactctcctattattttgccactactcagtaaaggaaggtaggaagagacaaacgcctaagtgcaggtgtggggagggatttcacaagtggttattaacggccagttcagcaagaagtgttgagtgtgtacaaaggggagggctggaagtgttaactccagacccgttggctgcttgagttgtttcttatattctaaagcagcagtccctaacctttttggcaccagggaccagttttgtggaacacagtttttccatggacggggtggtggtggaggatgaaacttccacctcagatcatcaggcattagagtctcataaggagcacgcaacctagatccctcgcatgcgcagttcacaatacggttctaagggctttagagtaagcagctttttcacctgtgggcctctggtgagaaattctgtaaattgtgataatcaggctggattttaatgctgcttttccagtacaatgttagagtttgggttcattaaaattaggcaaactcccattgggttagggcttctctcattccattttgtggctaaccttactgtgtttcagcccttgctgaaaattcttctgatatgtgttgcccttcctcacagccctttggccattgggagtttggctgtccctcagagccatccggtcaagcagatggtctgttctatctcacagaaaagtcttttcttccatgagttctgtctgaactgaacatgtaaaaagtatgggaaacagatgaatccctattaaacatgaagttttgattgtatttaagataaaaaaaaaatga

SEQ ID NO: 109468 - DNA, 1888 bp, Homo sapiens
acgcaggcgcagcggcggccggcgcgggccgagcggaggcaactgctgtgcggcctgcgggcgcgcgctcccttatcggccaacggacgcgaggcgcgcgccatggaacagcggttagctgagtttcgggcggcgcggaaacgggcgggtctggcggcccaaccccctgctgccagtcagggcgcacaaaccccaggagagaaggcggaagcagcagcgactctaaaggcagccccaggctggctaaagcggttcctggtatggaaacctaggcccgcgagtgcccgggcccagcccggcctagttcaggaagcggctcagccccagggcagcacatcagagacaccatggaacacagccattcctctgccgtcgtgctgggaccagtctttcctgaccaatatcaccttcttgaaggttcttctctggttggtcctgctgggactgtttgtggaactggaatttggcctggcatattttgtcctgtccttgttctattggatgtacgtcgggacacgaggccctgaagagaagaaagagggagagaagagcgcctactctgtgttcaatccaggctgtgaagccatccagggcaccctgactgcagagcagttggagcgcgagttacagttgagacccctggcagggagataggacccagctgtgctgtcatgcagctaacctctgatgtggtcttcctcaccattggctatggatttgatttcaggtgtataggactaagggcagcttgcgggttagctctgtgactgcatagtttttctaccttctttccctgatcttttgctgccatttgatctttgatagttttggtgaaactctctaaaatacattcactgtgggtccgacgcaatttataaaaattatgtactcaagaagggagacctgtttgtttcatttctcatctgtttgggagatgattttagagcactagaaaggcactggggagattctcagcttaaaacatccagcagtttgaagtatgattaggtacatcagggctgcattgtcaatgttctctttaagtcttttaacatttatagcaattttttttttcccggagagtttaggttgcaagttttgggtttcttgtttgtttttgttttgcttcctgctttaattctttaattttcagtcattactggtattgaaaaataaaatatctttaaaacatctcctcttcagaaataggtccctcttcattgcccatcaccatcttccactctcctattattttgccactactcagtaaaggaaggtaggaagagacaaacgcctaagtgcaggtgtggggagggatttcacaagtggttattaacggccagttcagcaagaagtgttgagtgtgtacaaaggggagggctggaagtgttaactccagacccgttggctgcttgagttgtttcttatattctaaagcagcagtccctaacctttttggcaccagggaccagttttgtggaacacagtttttccatggacggggtggtggtggaggatgaaacttccacctcagatcatcaggcattagagtctcataaggagcacgcaacctagatccctcgcatgcgcagttcacaatacggttctaagggctttagagtaagcagctttttcacctgtgggcctctggtgagaaattctgtaaattgtgataatcaggctggattttaatgctgcttttccagtacaatgttagatttggctgtccctcagagccatccggtcaagcagatggtctgttctatctcacagaaaagtcttttcttccatgagttctgtctgaactgaacatgtaaaaagtatgggaaacagatgaatccctattaaacatgaagttttgattgtatttaagataaaaaaaaaatga

SEQ ID NO: 109469 - DNA, 2194 bp, Homo sapiens
acgcaggcgcagcggcggccggcgcgggccgagcggaggcaactgctgtgcggcctgcgggcgcgcgctcccttatcggccaacggacgcgaggcgcgcgccatggaacagcggttagctgagtttcgggcggcgcggaaacgggcgggtctggcggcccaaccccctgctgccagtcagggcgcacaaaccccaggagagaaggcggaagcagcagcgactctaaaggcagccccaggctggctaaagcggttcctggtatggaaacctaggcccgcgagtgcccgggcccagcccggcctagttcagttaaaaaacaatgtctaacccatgcaatgaacttttgactgtatgtctcatttccaaaggaatgagatcattgaggtggacccagagaaactgaattcagagaaaaacttccattattgagaacccaaacgctgattgccagacaaaaggatgagaggaaatgctggacctccagtttcttgttaattgctctgtttttccataagggactctgccttaagctcattttcattgacttatcatttctgggtttgctctggtgtgaaaattctcatttaattttttttcttcagattctgcctctagtttagaaaagaaaaagtctaatttacaattcatgtcagacaattttgatggcacactgtggcctgtcagagatttctttagcattctatttttttaaattatttttaatttttgtttttttaattgaaacagctttattgaaataaggtttacatactacagaatttatctcttttaacatacagttcaaagatttttagtaaatttattgagtcatgcagctaacctctgatgtggtcttcctcaccattggctatggatttgatttcaggtgtataggactaagggcagcttgcgggttagctctgtgactgcatagtttttctaccttctttccctgatcttttgctgccatttgatctttgatagttttggtgaaactctctaaaatacattcactgtgggtccgacgcaatttataaaaattatgtactcaagaagggagacctgtttgtttcatttctcatctgtttgggagatgattttagagcactagaaaggcactggggagattctcagcttaaaacatccagcagtttgaagtatgattaggtacatcagggctgcattgtcaatgttctctttaagtcttttaacatttatagcaattttttttttcccggagagtttaggttgcaagttttgggtttcttgtttgtttttgttttgcttcctgctttaattctttaattttcagtcattactggtattgaaaaataaaatatctttaaaacatctcctcttcagaaataggtccctcttcattgcccatcaccatcttccactctcctattattttgccactactcagtaaaggaaggtaggaagagacaaacgcctaagtgcaggtgtggggagggatttcacaagtggttattaacggccagttcagcaagaagtgttgagtgtgtacaaaggggagggctggaagtgttaactccagacccgttggctgcttgagttgtttcttatattctaaagcagcagtccctaacctttttggcaccagggaccagttttgtggaacacagtttttccatggacggggtggtggtggaggatgaaacttccacctcagatcatcaggcattagagtctcataaggagcacgcaacctagatccctcgcatgcgcagttcacaatacggttctaagggctttagagtaagcagctttttcacctgtgggcctctggtgagaaattctgtaaattgtgataatcaggctggattttaatgctgcttttccagtacaatgttagagtttgggttcattaaaattaggcaaactcccattgggttagggcttctctcattccattttgtggctaaccttactgtgtttcagcccttgctgaaaattcttctgatatgtgttgcccttcctcacagccctttggccattgggagtttggctgtccctcagagccatccggtcaagcagatggtctgttctatctcacagaaaagtcttttcttccatgagttctgtctgaactgaacatgtaaaaagtatgggaaacagatgaatccctattaaacatgaagttttgattgtatttaagataaaaaaaaaatga

SEQ ID NO: 109470 - DNA, 1893 bp, Homo sapiens
acgcaggcgcagcggcggccggcgcgggccgagcggaggcaactgctgtgcggcctgcgggcgcgcgctcccttatcggccaacggacgcgaggcgcgcgccatggaacagcggttagctgagtttcgggcggcgcggaaacgggcgggtctggcggcccaaccccctgctgccagtcagggcgcacaaaccccaggagagaaggcggaagcagcagcgactctaaaggcagccccaggctggctaaagcggttcctggtatggaaacctaggcccgcgagtgcccgggcccagcccggcctagttcagatgaaggaatacagaaactccaggatatttgcacaatggaatactcttcagccatcaaactttaggacatcaccccacttccagcaacgtggagagagacctgttcatccacagatgaagggatacagaaactgtagtattcattcacaatggaatacccttcagctgtgcacatatactgaaatcatatcacctggagccacacagttgaacctgttcatcccttgatgaagggatgacaaaactgaaatatatatccagaatggaatacccttccacgacagaagtggatgaaatcctgtcatttgcagccatgtggagaaacctgttcatccgcagatgaagggataaagaaactgtagtatatatacacaaatggaatactcttcatccagaaaaatgtaatgaaattacatcatttgcagccacactgttgaacctagaggacatcatggtaaatgacctgtcctgtccacccacagctgaagggataaagaaaccaccatacagatacactatggaatatgcttcagccataaagctttgggaaatcctgtcatccacagccatgtggagaaacccaagaaacccagaggatattaggtccaaggaaatgagcctggtagaggaagtcccacaccttttaatctcaggcatggagattccaaaaactttatctcctgtccatctacagatgaagggatcaagaaactgtaatgtatatgcacaaagaatactctttggccatcaaaataactaaaccatgtcatttggagcaacaaagccactgcggcctccatttgggccaagctctgactgcaatgatgcctctgccccgacccgggcctcgctgtgactgacaatgccgctgcatcttttcagcagtcattgatgaggaagtatctacatcctccttcccactaccagattttgcttggagaaaagcagtttcctgaaataattctgtgacgagcttcttccacattaggacaaaaatgctggaagcggctcagccccagggcagcacatcagagacaccatggaacacagccattcctctgccgtcgtgctgggaccagtctttcctgaccaatatcaccttcttgaaggttcttctctggttggtcctgctgggactgtttgtggaactggaatttggcctggcatattttgtcctgtccttgttctattggatgtacgtcgggacacgaggccctgaagagaagaaagagggagagaagagcgcctactctgtgttcaatccaggctgtgaagccatccagggcaccctgactgcagagcagttggagcgcgagttacagttgagacccctggcagggagataggacccagctgtgctgtcatgcagctaacctctgatgtggtcttcctcaccattggctatggatttgatttcaggtgtataggactaagggcagcttgcgggttagctctgtgactgcatagtttttctaccttctttccctgatcttttgctgccatttgatctttgatagttttggtgaaactctctaaaatacattcactgtgggtccgacgcaatttataaaaattatgtactca

SEQ ID NO: 109471 - DNA, 1051 bp, Homo sapiens
acgcaggcgcagcggcggccggcgcgggccgagcggaggcaactgctgtgcggcctgcgggcgcgcgctcccttatcggccaacggacgcgaggcgcgcgccatggaacagcggttagctgagtttcgggcggcgcggaaacgggcgggtctggcggcccaaccccctgctgccagtcagggcgcacaaaccccaggagagaaggcggaagcagcagcgactctaaaggcagccccaggctggctaaagcggttcctggtatggaaacctaggcccgcgagtgcccgggcccagcccggcctagttcagttaaaaaacaatgtctaacccatgcaatgaacttttgactgtatgtctcatttccaaaggaatgagatcattgaggtggacccagagaaactgaattcagagaaaaacttccattattgagaacccaaacgctgattgccagacaaaaggatgagaggaaatgctggacctccagtttcttgttaattgctctgtttttccataagggactctgccttaagctcattttcattgacttatcatttctgggtttgctctggtgtgaaaattctcatttaattttttttcttcagattctgcctctagtttagaaaagaaaaagtctaatttacaattcatgtcagacaattttgatggcacactgtggcctgtcagagatttctttagcattctatttttttaaattatttttaatttttgtttttttaattgaaacagctttattgaaataaggtttacatactacagaatttatctcttttaacatacagttcaaagatttttagtaaatttattgagtcatgcagctaacctctgatgtggtcttcctcaccattggctatggatttgatttcaggtgtataggactaagggcagcttgcgggttagctctgtgactgcatagtttttctaccttctttccctgatcttttgctgccatttgatctttgatagttttggtgaaactctctaaaatacattcactgtgggtccgacgcaatttataaaaattatgtactca

SEQ ID NO: 109472 - DNA, 558 bp, Homo sapiens
tgtgcataattttaaaatgtttttttgaaaaacattttaagtttaaattggattcccaaccttatttttaaaaagtcacagaaacaagaatagagagaaatctagccatgttttaactggtagaatttcggacggatatttgttttgtattttccaattttttcaagtgtgtctatgttattatgttcagaaaaaaaaacgttaaaaaataaggctattgcaatggtttggtgaatgatgatacatgtgttgctttgtttgtaagtctaggatagtctagcctgagagcctgctattgagtagaacttgtagaatgatggatcatgaaccaaattgaacaaagagaagcttcactctgggaaatctgtacctaccaactaggagtcaagataggaaaatataagggtataagatagggaaattactaagaaacagtccaggaattttagtccagacaccttgcatactactgagtaaaaggtgagtctttaaagaatttgcaccagttggatacagtctgaactaaagcagttgctaagactgaaaatgtgcaagcca

SEQ ID NO: 109473 - DNA, 600 bp, Homo sapiens
ggaggaatggcgttttctatgaagaagccctttggagtatgtgaggtgctgactttacatgtagagagatgaaatgactgtgatggttgtgttacatggggccggtggttgttttaaacagatcattgagcgcttgaagctggtgcccctgaatcaggaaagtgtggaagagagagtggctgccttcagaaatttcagtgatgaaatcaggcacaacctctcagaagtgcttcttgccaccatgaacatcttgttcacacagtttaagaggctcaaggggacaagtccatcctcgtcatccaggccccagcgagtcatcgaggaccgcgactctcaactccgaagtcaagcccgcactctgattacctttgctggaatgataccataccgaacgtctggggacaccaatgcgaggctggtgcagatggaggtcctcatgaattaagtgccatgctttgtgggagtctgggtcggcacactgtcagtacatcaggcacatgggcccactaggctggggtttctggttttgtttctgttgtgttttgttttggtttctgtattatgtatttttgtcaacgccaataaatttctttgatttgt

SEQ ID NO: 109474 - DNA, 321 bp, Homo sapiens
  misc_feature (29)..(29): n is a, c, g, or t
  misc_feature (32)..(32): n is a, c, g, or t
gttttattggtagtccgcttatttttttnttntagaaaaaaacttaagctactagcaactccgaagtcaagcccgcactctgattacctttgctggaatgataccataccgaacgtctggggacaccaatgcgaggctggtgcagatggaggtcctcatgaattaagtgccatgctttgtgggagtctgggtcggcacactgtcagtacatcaggcacatgggcccactaggctggggtttctggttttgtttctgttgtgttttgttttggtttctgtattatgtatttttgtcaacgccaataaatttctttgatttgt

SEQ ID NO: 109475 - DNA, 324 bp, Homo sapiens
ccgttagtgttcccccgcccctttttctttatttttatattttattaatttcaatagccaactccgaagtcaagcccgcactctgattacctttgctggaatgataccataccgaacgtctggggacaccaatgcgaggctggtgcagatggaggtcctcatgaattaagtgccatgctttgtgggagtctgggtcggcacactgtcagtacatcaggcacatgggcccactaggctggggtttctggttttgtttctgttgtgttttgttttggtttctgtattatgtatttttgtcaacgccaataaatttctttgatttgt

SEQ ID NO: 109476 - DNA, 331 bp, Homo sapiens
tgatttttttcgcccccaccttttgttttttttatgtagaagagaaaacctcgaagactcacgaacaactccgaagtcaagcccgcactctgattacctttgctggaatgataccataccgaacgtctggggacaccaatgcgaggctggtgcagatggaggtcctcatgaattaagtgccatgctttgtgggagtctgggtcggcacactgtcagtacatcaggcacatgggcccactaggctggggtttctggttttgtttctgttgtgttttgttttggtttctgtattatgtatttttgtcaacgccaataaatttctttgatttgt

SEQ ID NO: 109477 - DNA, 329 bp, Homo sapiens
cggattgttgcccggatggcacggccgctttgcaaggaggaaggaagggttacagactacaaacaactccgaagtcaagcccgcactctgattacctttgctggaatgataccataccgaacgtctggggacaccaatgcgaggctggtgcagatggaggtcctcatgaattaagtgccatgctttgtgggagtctgggtcggcacactgtcagtacatcaggcacatgggcccactaggctggggtttctggttttgtttctgttgtgttttgttttggtttctgtattatgtatttttgtcaacgccaataaatttctttgatttgt

SEQ ID NO: 109478 - DNA, 328 bp, Homo sapiens
  misc_feature (44)..(44): n is a, c, g, or t
  misc_feature (53)..(53): n is a, c, g, or t
acaaataacttaacaacaatccaaaaacaaaaaaaaaccttaanagtaacaancagcccttccaactccgaagtcaagcccgcactctgattacctttgctggaatgataccataccgaacgtctggggacaccaatgcgaggctggtgcagatggaggtcctcatgaattaagtgccatgctttgtgggagtctgggtcggcacactgtcagtacatcaggcacatgggcccactaggctggggtttctggttttgtttctgttgtgttttgttttggtttctgtattatgtatttttgtcaacgccaataaatttctttgatttgt

SEQ ID NO: 109479 - DNA, 326 bp, Homo sapiens
ttttttatggtcgcgtttcttttcgttataaacaggataaaagatctacagactacacagcaactccgaagtcaagcccgcactctgattacctttgctggaatgataccataccgaacgtctggggacaccaatgcgaggctggtgcagatggaggtcctcatgaattaagtgccatgctttgtgggagtctgggtcggcacactgtcagtacatcaggcacatgggcccactaggctggggtttctggttttgtttctgttgtgttttgttttggtttctgtattatgtatttttgtcaacgccaataaatttctttgatttgt

SEQ ID NO: 109480 - DNA, 325 bp, Homo sapiens
  misc_feature (43)..(43): n is a, c, g, or t
cgcgtatcctcccccccaatattttttatatattttgggggancttcaagactcacgagcaactccgaagtcaagcccgcactctgattacctttgctggaatgataccataccgaacgtctggggacaccaatgcgaggctggtgcagatggaggtcctcatgaattaagtgccatgctttgtgggagtctgggtcggcacactgtcagtacatcaggcacatgggcccactaggctggggtttctggttttgtttctgttgtgttttgttttggtttctgtattatgtatttttgtcaacgccaataaatttctttgatttgt

SEQ ID NO: 109481 - DNA, 313 bp, Homo sapiens
cccgaaacattaacgcatcaaccacaagcagaaagaacaaaaacctacaactccgaagtcaagcccgcactctgattacctttgctggaatgataccataccgaacgtctggggacaccaatgcgaggctggtgcagatggaggtcctcatgaattaagtgccatgctttgtgggagtctgggtcggcacactgtcagtacatcaggcacatgggcccactaggctggggtttctggttttgtttctgttgtgttttgttttggtttctgtattatgtatttttgtcaacgccaataaatttctttgatttgt

SEQ ID NO: 109482 - DNA, 762 bp, Homo sapiens
  misc_feature (635)..(636): n is a, c, g, or t
  misc_feature (643)..(644): n is a, c, g, or t
  misc_feature (670)..(670): n is a, c, g, or t
  misc_feature (686)..(686): n is a, c, g, or t
  misc_feature (713)..(714): n is a, c, g, or t
  misc_feature (729)..(730): n is a, c, g, or t
  misc_feature (740)..(740): n is a, c, g, or t
  misc_feature (742)..(742): n is a, c, g, or t
  misc_feature (748)..(749): n is a, c, g, or t
  misc_feature (751)..(751): n is a, c, g, or t
  misc_feature (754)..(754): n is a, c, g, or t
aactgttactcccatcagtttgtgctttcaaactgatggctgacttctctgaatttgtgtagcgcacaacgaatggtgatgctgtgctccgggggctgcagtgcaccctttttaaagggaccctgcaatctcattgtttaatttgactctttagtgcttcagtcacatcagcacttgcagaggggttgttcttttcctttttcttctttctctctttttctcttctctctgtccttctccccacccccatccctcaattcaggcagtttggggtgggaaaaacttgagcactggttccgacagagctcatctcatataagaaggtttggaagagctgcagtgatcgacagcatcgaccgttctgtaactccttaaatttaagagctgcaggtaggattggccgtgttttgtaaagaaattaagacaaatgcaccctggtaaatagagtggcagcatgttgttgcagtgcctctgaaagacaaggtcttggtttgtttgaaaatttgagataaatttggaagcagttaactcatttgatagaagaagtacttgattcttctgagaattgttcagatttgtatcttgccattctaatattttttcttttaaaaatgtattgggggggaatttgcttnnatatttnnatagttggttattgggatttttgtgnacttcttctttaagtngcagtagtgtggtctttaggatttttnnaggagatacatgtgnngtgccattcntntatganncnggntatgccca

SEQ ID NO: 109483 - DNA, 2954 bp, Homo sapiens
gcccccggccaggctaggcgtcctgctgctggatgaaggggttggggatggcctccatgccgtcctgcgggcagattagcaccacggacgtgccccggcacaccacgaggcccagctgccgggtgtcctccgtgagcttgtactggtcgtcagggtctcgcatgtactcaatggtgccgtccagcacaaggttgaggagtgggtcgaagcccttcaggattccactggctctcgtgccgaattcggcacgagggagagcggcgcgagaagcggcggccgcgtcctcaagccggcacctgagcggcggagacggctgtagcacaaggatctgcatctccaatggatactgaggggtttggtgagctccttcagcaagctgaacagcttgctgctgagactgagggcatctcagagcttccccatgtggaacggaacttacaggagatccagcaggcgggagagcgcctgcgttcccgtaccctaacacgcacgtcccaggagacggcagatgtcaaggcgtcagttctcctcgggtctcggggacttgacatatcccacatctcccagcgattggagagtctgagtgcagccaccacctttgagcctcttgagcctgtgaaggacactgacattcagggcttcctgaagaatgagaaggacaatgccctgctgtctgccatcgaagagtcccggaagaggaccttcggcatggctgaggagtaccatcgggagtcaatgttggttgagtgggagcaagtgaaacagcgaattctgcacacactgctggcatcaggagaagacgcccttgactttactcaagaaagcgagccaagctacatcagtgatgtgggaccccctggtcgaagctctctggataacatcgagatggcctatgcgcggcaaatttatatctataatgagaaaattgtaaatggacacctgcagcctaacctggtggacctttgtgcttccgtcgcagagctggatgataagagcatttccgacatgtggaccatggtaaaacaaatgacagacgtgttgttgacaccggcaacggatgccctgaagaaccgcagcagcgtggaagtgcgcatggagtttgtcaggcaggccttggcgtaccttgagcagagttataagaattacacccttgtgactgtctttggaaatttgcatcaggcccagctgggcggggtgcctgggacttaccaattggttcgaagtttcctgaacattaaactgccagctcccttgcctggactacaggatggagaggtggaaggccatcctgtgtgggcgctaatttactactgcatgcgctgtggagacctgcttgccgcttcacaggtagttaatcgagcccagcaccagctgggagagtttaaaacctggttccaggagtacatgaacagcaaggacagaagattgtccccagctacggaaaacaagctccggctgcattaccgtagggccctcaggaacaatacagatccctacaagcgggccgtgtactgtatcattggcagatgtgacgtcaccgacaaccagagtgaagtggcggacaaaactgaggattacctgtggctgaagttgaaccaagtgtgttttgacgacgatggcaccagctccccacaagacaggctcactctctcacagttccagaagcagttgttggaagactatggcgagtcccactttacggtgaaccagcaacccttcctctacttccaagtcctgttcctgacagcgcagtttgaagcagcagttgcctttcttttccgcatggagcggctgcgctgccatgctgtccatgtagcactggtgctgtttgagctgaagctgcttttaaagtcctctggacagagtgctcagctcctcagccacgagcctggtgaccctccttgcttgcggcggctgaacttcgtgcggctcctcatgctgtacacccggaagtttgagtccacggacccaagggaggccctccagtacttctatttcctcagggatgagaaagatagtcaaggagaaaacatgtttctgcgctgtgtgagtgagcttgtgattgaaagccgagagttcgatatgattcttgggaaactagagaatgacggaagtagaaagcctggagtcatagataagtttactagtgacacaaagcctattatcaacaaagttgcttctgtggcagaaaataaaggactgtttgaagaggcagcaaagctgtatgaccttgccaagaatgctgacaaggtactggagctgatgaacaaactgctgagccctgtcgtcccccagatcagtgccccgcaatccaacaaggagaggctgaagaacatggcactctccattgccgaacggtatagggctcaaggaataagcgcaaataaatttgtggactccacgttctatcttcttttggacttgatcaccttttttgacgagtatcatagtggtcatattgatagagcttttgatatcattgagcgcttgaagctggtgcccctgaatcaggaaagtgtggaagagagagtggctgccttcagaaatttcagtgatgaaatcaggcacaacctctcagaagtgcttcttgccaccatgaacatcttgttcacacagtttaagaggctcaaggggacaagtccatcctcgtcatccaggccccagcgagtcatcgaggaccgcgactctcaactccgaagtcaagcccgcactctgattacctttgctggaatgataccataccgaacgtctggggacaccaatgcgaggctggtgcagatggaggtcctcatgaattaagtgccatgctttgtgggagtctgggtcggcacactgtcagtacatcaggcacatgggcccactaggctggggtttctggttttgtttctgttgtgttttgttttggtttctgtattatgtatttttgtcaacgccaataaatttctttgatttgt

SEQ ID NO: 109484 - DNA, 2929 bp, Homo sapiens
gcccccggccaggctaggcgtcctgctgctggatgaaggggttggggatggcctccatgccgtcctgcgggcagattagcaccacggacgtgccccggcacaccacgaggcccagctgccgggtgtcctccgtgagcttgtactggtcgtcagggtctcgcatgtactcaatggtgccgtccagcacaaggttgaggagtgggtcgaagcccttcaggattccactggctctcgtgccgaattcggcacgagggagagcggcgcgagaagcggcggccgcgtcctcaagccggcacctgagcggcggagacggctgtagcacaaggatctgcatctccaatggatactgaggggtttggtgagctccttcagcaagctgaacagcttgctgctgagactgagggcatctcagagcttccccatgtggaacggaacttacaggagatccagcaggcgggagagcgcctgcgttcccgtaccctaacacgcacgtcccaggagacggcagatgtcaaggcgtcagttctcctcgggtctcggggacttgacatatcccacatctcccagcgattggagagtctgagtgcagccaccacctttgagcctcttgagcctgtgaaggacactgacattcagggcttcctgaagaatgagaaggacaatgccctgctgtctgccatcgaagagtcccggaagaggaccttcggcatggctgaggagtaccatcgggagtcaatgttggttgagtgggagcaagtgaaacagcgaattctgcacacactgctggcatcaggagaagacgcccttgactttactcaagaaagcgagccaagctacatcagtgatgtgggaccccctggtcgaagctctctggataacatcgagatggcctatgcgcggcaaatttatatctataatgagaaaattgtaaatggacacctgcagcctaacctggtggacctttgtgcttccgtcgcagagctggatgataagagcatttccgacatgtggaccatggtaaaacaaatgacagacgtgttgttgacaccggcaacggatgccctgaagaaccgcatgtcaggcaggccttggcgtaccttgagcagagttataagaattacacccttgtgactgtctttggaaatttgcatcaggcccagctgggcggggtgcctgggacttaccaattggttcgaagtttcctgaacattaaactgccagctcccttgcctggactacaggatggagaggtggaaggccatcctgtgtgggcgctaatttactactgcatgcgctgtggagacctgcttgccgcttcacaggtagttaatcgagcccagcaccagctgggagagtttaaaacctggttccaggagtacatgaacagcaaggacagaagattgtccccagctacggaaaacaagctccggctgcattaccgtagggccctcaggaacaatacagatccctacaagcgggccgtgtactgtatcattggcagatgtgacgtcaccgacaaccagagtgaagtggcggacaaaactgaggattacctgtggctgaagttgaaccaagtgtgttttgacgacgatggcaccagctccccacaagacaggctcactctctcacagttccagaagcagttgttggaagactatggcgagtcccactttacggtgaaccagcaacccttcctctacttccaagtcctgttcctgacagcgcagtttgaagcagcagttgcctttcttttccgcatggagcggctgcgctgccatgctgtccatgtagcactggtgctgtttgagctgaagctgcttttaaagtcctctggacagagtgctcagctcctcagccacgagcctggtgaccctccttgcttgcggcggctgaacttcgtgcggctcctcatgctgtacacccggaagtttgagtccacggacccaagggaggccctccagtacttctatttcctcagggatgagaaagatagtcaaggagaaaacatgtttctgcgctgtgtgagtgagcttgtgattgaaagccgagagttcgatatgattcttgggaaactagagaatgacggaagtagaaagcctggagtcatagataagtttactagtgacacaaagcctattatcaacaaagttgcttctgtggcagaaaataaaggactgtttgaagaggcagcaaagctgtatgaccttgccaagaatgctgacaaggtactggagctgatgaacaaactgctgagccctgtcgtcccccagatcagtgccccgcaatccaacaaggagaggctgaagaacatggcactctccattgccgaacggtatagggctcaaggaataagcgcaaataaatttgtggactccacgttctatcttcttttggacttgatcaccttttttgacgagtatcatagtggtcatattgatagagcttttgatatcattgagcgcttgaagctggtgcccctgaatcaggaaagtgtggaagagagagtggctgccttcagaaatttcagtgatgaaatcaggcacaacctctcagaagtgcttcttgccaccatgaacatcttgttcacacagtttaagaggctcaaggggacaagtccatcctcgtcatccaggccccagcgagtcatcgaggaccgcgactctcaactccgaagtcaagcccgcactctgattacctttgctggaatgataccataccgaacgtctggggacaccaatgcgaggctggtgcagatggaggtcctcatgaattaagtgccatgctttgtgggagtctgggtcggcacactgtcagtacatcaggcacatgggcccactaggctggggtttctggttttgtttctgttgtgttttgttttggtttctgtattatgtatttttgtcaacgccaataaatttctttgatttgt

SEQ ID NO: 109485 - DNA, 2677 bp, Homo sapiens
tcctggtaccggtccggacagttttttggatgacggctgtagcacaaggatctgcatctccaatggatactgaggggtttggtgagctccttcagcaagctgaacagcttgctgctgagactgagggcatctcagagcttccccatgtggaacggaacttacaggagatccagcaggcgggagagcgcctgcgttcccgtaccctaacacgcacgtcccaggagacggcagatgtcaaggcgtcagttctcctcgggtctcggggacttgacatatcccacatctcccagcgattggagagtctgagtgcagccaccacctttgagcctcttgagcctgtgaaggacactgacattcagggcttcctgaagaatgagaaggacaatgccctgctgtctgccatcgaagagtcccggaagaggaccttcggcatggctgaggagtaccatcgggagtcaatgttggttgagtgggagcaagtgaaacagcgaattctgcacacactgctggcatcaggagaagacgcccttgactttactcaagaaagcgagccaagctacatcagtgatgtgggaccccctggtcgaagctctctggataacatcgagatggcctatgcgcggcaaatttatatctataatgagaaaattgtaaatggacacctgcagcctaacctggtggacctttgtgcttccgtcgcagagctggatgataagagcatttccgacatgtggaccatggtaaaacaaatgacagacgtgttgttgacaccggcaacggatgccctgaagaaccgcagcagcgtggaagtgcgcatggagtttgtcaggcaggccttggcgtaccttgagcagagttataagaattacacccttgtgactgtctttggaaatttgcatcaggcccagctgggcggggtgcctgggacttaccaattggttcgaagtttcctgaacattaaactgccagctcccttgcctggactacaggatggagaggtggaaggccatcctgtgtgggcgctaatttactactgcatgcgctgtggagacctgcttgccgcttcacaggtagttaatcgagcccagcaccagctgggagagtttaaaacctggttccaggagtacatgaacagcaaggacagaagattgtccccagctacggaaaacaagctccggctgcattaccgtagggccctcaggaacaatacagatccctacaagcgggccgtgtactgtatcattggcagatgtgacgtcaccgacaaccagagtgaagtggcggacaaaactgaggattacctgtggctgaagttgaaccaagtgtgttttgacgacgatggcaccagctccccacaagacaggctcactctctcacagttccagaagcagttgttggaagactatggcgagtcccactttacggtgaaccagcaacccttcctctacttccaagtcctgttcctgacagcgcagtttgaagcagcagttgcctttcttttccgcatggagcggctgcgctgccatgctgtccatgtagcactggtgctgtttgagctgaagctgcttttaaagtcctctggacagagtgctcagctcctcagccacgagcctggtgaccctccttgcttgcggcggctgaacttcgtgcggctcctcatgctgtacacccggaagtttgagtccacggacccaagggaggccctccagtacttctatttcctcagggatgagaaagatagtcaaggagaaaacatgtttctgcgctgtgtgagtgagcttgtgattgaaagccgagagttcgatatgattcttgggaaactagagaatgacggaagtagaaagcctggagtcatagataagtttactagtgacacaaagcctattatcaacaaagttgcttctgtggcagaaaataaaggactgtttgaagaggcagcaaagctgtatgaccttgccaagaatgctgacaaggtactggagctgatgaacaaactgctgagccctgtcgtcccccagatcagtgccccgcaatccaacaaggagaggctgaagaacatggcactctccattgccgaacggtatagggctcaaggaataagcgcaaataaatttgtggactccacgttctatcttcttttggacttgatcaccttttttgacgagtatcatagtggtcatattgatagagcttttgatatcattgagcgcttgaagctggtgcccctgaatcaggaaagtgtggaagagagagtggctgccttcagaaatttcagtgatgaaatcaggcacaacctctcagaagtgcttcttgccaccatgaacatcttgttcacacagtttaagaggctcaaggggacaagtccatcctcgtcatccaggccccagcgagtcatcgaggaccgcgactctcaactccgaagtcaagcccgcactctgattacctttgctggaatgataccataccgaacgtctggggacaccaatgcgaggctggtgcagatggaggtcctcatgaattaagtgccatgctttgtgggagtctgggtcggcacactgtcagtacatcaggcacatgggcccactaggctggggtttctggttttgtttctgttgtgttttgttttggtttctgtattatgtatttttgtcaacgccaataaatttctttgatttgt

SEQ ID NO: 109486 - DNA, 2482 bp, Homo sapiens
ccgttagaggatcccgagagggtgcccaggagtacggagattcagcgtcagttctcctcgggtctcggggacttgacatatcccacatctcccagcgattggagagtctgagtgcagccaccacctttgagcctcttgagcctgtgaaggacactgacattcagggcttcctgaagaatgagaaggacaatgccctgctgtctgccatcgaagagtcccggaagaggaccttcggcatggctgaggagtaccatcgggagtcaatgttggttgagtgggagcaagtgaaacagcgaattctgcacacactgctggcatcaggagaagacgcccttgactttactcaagaaagcgagccaagctacatcagtgatgtgggaccccctggtcgaagctctctggataacatcgagatggcctatgcgcggcaaatttatatctataatgagaaaattgtaaatggacacctgcagcctaacctggtggacctttgtgcttccgtcgcagagctggatgataagagcatttccgacatgtggaccatggtaaaacaaatgacagacgtgttgttgacaccggcaacggatgccctgaagaaccgcagcagcgtggaagtgcgcatggagtttgtcaggcaggccttggcgtaccttgagcagagttataagaattacacccttgtgactgtctttggaaatttgcatcaggcccagctgggcggggtgcctgggacttaccaattggttcgaagtttcctgaacattaaactgccagctcccttgcctggactacaggatggagaggtggaaggccatcctgtgtgggcgctaatttactactgcatgcgctgtggagacctgcttgccgcttcacaggtagttaatcgagcccagcaccagctgggagagtttaaaacctggttccaggagtacatgaacagcaaggacagaagattgtccccagctacggaaaacaagctccggctgcattaccgtagggccctcaggaacaatacagatccctacaagcgggccgtgtactgtatcattggcagatgtgacgtcaccgacaaccagagtgaagtggcggacaaaactgaggattacctgtggctgaagttgaaccaagtgtgttttgacgacgatggcaccagctccccacaagacaggctcactctctcacagttccagaagcagttgttggaagactatggcgagtcccactttacggtgaaccagcaacccttcctctacttccaagtcctgttcctgacagcgcagtttgaagcagcagttgcctttcttttccgcatggagcggctgcgctgccatgctgtccatgtagcactggtgctgtttgagctgaagctgcttttaaagtcctctggacagagtgctcagctcctcagccacgagcctggtgaccctccttgcttgcggcggctgaacttcgtgcggctcctcatgctgtacacccggaagtttgagtccacggacccaagggaggccctccagtacttctatttcctcagggatgagaaagatagtcaaggagaaaacatgtttctgcgctgtgtgagtgagcttgtgattgaaagccgagagttcgatatgattcttgggaaactagagaatgacggaagtagaaagcctggagtcatagataagtttactagtgacacaaagcctattatcaacaaagttgcttctgtggcagaaaataaaggactgtttgaagaggcagcaaagctgtatgaccttgccaagaatgctgacaaggtactggagctgatgaacaaactgctgagccctgtcgtcccccagatcagtgccccgcaatccaacaaggagaggctgaagaacatggcactctccattgccgaacggtatagggctcaaggaataagcgcaaataaatttgtggactccacgttctatcttcttttggacttgatcaccttttttgacgagtatcatagtggtcatattgatagagcttttgatatcattgagcgcttgaagctggtgcccctgaatcaggaaagtgtggaagagagagtggctgccttcagaaatttcagtgatgaaatcaggcacaacctctcagaagtgcttcttgccaccatgaacatcttgttcacacagtttaagaggctcaaggggacaagtccatcctcgtcatccaggccccagcgagtcatcgaggaccgcgactctcaactccgaagtcaagcccgcactctgattacctttgctggaatgataccataccgaacgtctggggacaccaatgcgaggctggtgcagatggaggtcctcatgaattaagtgccatgctttgtgggagtctgggtcggcacactgtcagtacatcaggcacatgggcccactaggctggggtttctggttttgtttctgttgtgttttgttttggtttctgtattatgtatttttgtcaacgccaataaatttctttgatttgt

SEQ ID NO: 109487 - DNA, 2511 bp, Homo sapiens
attcggctcctcttggcattggagttctggatttacccatgactaagattcctttgaaactctgacccagtgcagcattgcaaagaatcgatttctgagatgagacaatgagatgtggtttgcattttgtaaagatggaggaaacctctaacactgaccctgtatgggagatgactcaattatccacgccttgggcttcctgaagaatgagaaggacaatgccctgctgtctgccatcgaagagtcccggaagaggaccttcggcatggctgaggagtaccatcgggagtcaatgttggttgagtgggagcaagtgaaacagcgaattctgcacacactgctggcatcaggagaagacgcccttgactttactcaagaaagcgagccaagctacatcagtgatgtgggaccccctggtcgaagctctctggataacatcgagatggcctatgcgcggcaaatttatatctataatgagaaaattgtaaatggacacctgcagcctaacctggtggacctttgtgcttccgtcgcagagctggatgataagagcatttccgacatgtggaccatggtaaaacaaatgacagacgtgttgttgacaccggcaacggatgccctgaagaaccgcagcagcgtggaagtgcgcatggagtttgtcaggcaggccttggcgtaccttgagcagagttataagaattacacccttgtgactgtctttggaaatttgcatcaggcccagctgggcggggtgcctgggacttaccaattggttcgaagtttcctgaacattaaactgccagctcccttgcctggactacaggatggagaggtggaaggccatcctgtgtgggcgctaatttactactgcatgcgctgtggagacctgcttgccgcttcacaggtagttaatcgagcccagcaccagctgggagagtttaaaacctggttccaggagtacatgaacagcaaggacagaagattgtccccagctacggaaaacaagctccggctgcattaccgtagggccctcaggaacaatacagatccctacaagcgggccgtgtactgtatcattggcagatgtgacgtcaccgacaaccagagtgaagtggcggacaaaactgaggattacctgtggctgaagttgaaccaagtgtgttttgacgacgatggcaccagctccccacaagacaggctcactctctcacagttccagaagcagttgttggaagactatggcgagtcccactttacggtgaaccagcaacccttcctctacttccaagtcctgttcctgacagcgcagtttgaagcagcagttgcctttcttttccgcatggagcggctgcgctgccatgctgtccatgtagcactggtgctgtttgagctgaagctgcttttaaagtcctctggacagagtgctcagctcctcagccacgagcctggtgaccctccttgcttgcggcggctgaacttcgtgcggctcctcatgctgtacacccggaagtttgagtccacggacccaagggaggccctccagtacttctatttcctcagggatgagaaagatagtcaaggagaaaacatgtttctgcgctgtgtgagtgagcttgtgattgaaagccgagagttcgatatgattcttgggaaactagagaatgacggaagtagaaagcctggagtcatagataagtttactagtgacacaaagcctattatcaacaaagttgcttctgtggcagaaaataaaggactgtttgaagaggcagcaaagctgtatgaccttgccaagaatgctgacaaggtactggagctgatgaacaaactgctgagccctgtcgtcccccagatcagtgccccgcaatccaacaaggagaggctgaagaacatggcactctccattgccgaacggtatagggctcaaggaataagcgcaaataaatttgtggactccacgttctatcttcttttggacttgatcaccttttttgacgagtatcatagtggtcatattgatagagcttttgatatcattgagcgcttgaagctggtgcccctgaatcaggaaagtgtggaagagagagtggctgccttcagaaatttcagtgatgaaatcaggcacaacctctcagaagtgcttcttgccaccatgaacatcttgttcacacagtttaagaggctcaaggggacaagtccatcctcgtcatccaggccccagcgagtcatcgaggaccgcgactctcaactccgaagtcaagcccgcactctgattacctttgctggaatgataccataccgaacgtctggggacaccaatgcgaggctggtgcagatggaggtcctcatgaattaagtgccatgctttgtgggagtctgggtcggcacactgtcagtacatcaggcacatgggcccactaggctggggtttctggttttgtttctgttgtgttttgttttggtttctgtattatgtatttttgtcaacgccaataaatttctttgatttgt

SEQ ID NO: 109488 - DNA, 1576 bp, Homo sapiens
tattataacctgggaccgtcgaacaggacaagcaatgatcagaatgattgtccccagctacggaaaacaagctccggctgcattaccgtagggccctcaggaacaatacagatccctacaagcgggccgtgtactgtatcattggcagatgtgacgtcaccgacaaccagagtgaagtggcggacaaaactgaggattacctgtggctgaagttgaaccaagtgtgttttgacgacgatggcaccagctccccacaagacaggctcactctctcacagttccagaagcagttgttggaagactatggcgagtcccactttacggtgaaccagcaacccttcctctacttccaagtcctgttcctgacagcgcagtttgaagcagcagttgcctttcttttccgcatggagcggctgcgctgccatgctgtccatgtagcactggtgctgtttgagctgaagctgcttttaaagtcctctggacagagtgctcagctcctcagccacgagcctggtgaccctccttgcttgcggcggctgaacttcgtgcggctcctcatgctgtacacccggaagtttgagtccacggacccaagggaggccctccagtacttctatttcctcagggatgagaaagatagtcaaggagaaaacatgtttctgcgctgtgtgagtgagcttgtgattgaaagccgagagttcgatatgattcttgggaaactagagaatgacggaagtagaaagcctggagtcatagataagtttactagtgacacaaagcctattatcaacaaagttgcttctgtggcagaaaataaaggactgtttgaagaggcagcaaagctgtatgaccttgccaagaatgctgacaaggtactggagctgatgaacaaactgctgagccctgtcgtcccccagatcagtgccccgcaatccaacaaggagaggctgaagaacatggcactctccattgccgaacggtatagggctcaaggaataagcgcaaataaatttgtggactccacgttctatcttcttttggacttgatcaccttttttgacgagtatcatagtggtcatattgatagagcttttgatatcattgagcgcttgaagctggtgcccctgaatcaggaaagtgtggaagagagagtggctgccttcagaaatttcagtgatgaaatcaggcacaacctctcagaagtgcttcttgccaccatgaacatcttgttcacacagtttaagaggctcaaggggacaagtccatcctcgtcatccaggccccagcgagtcatcgaggaccgcgactctcaactccgaagtcaagcccgcactctgattacctttgctggaatgataccataccgaacgtctggggacaccaatgcgaggctggtgcagatggaggtcctcatgaattaagtgccatgctttgtgggagtctgggtcggcacactgtcagtacatcaggcacatgggcccactaggctggggtttctggttttgtttctgttgtgttttgttttggtttctgtattatgtatttttgtcaacgccaataaatttctttgatttgt

SEQ ID NO: 109489 - DNA, 1281 bp, Homo sapiens
tgctgatctcgaggttccgggtcggctatctgtccagcaacccttcctctacttccaagtcctgttcctgacagcgcagtttgaagcagcagttgcctttcttttccgcatggagcggctgcgctgccatgctgtccatgtagcactggtgctgtttgagctgaagctgcttttaaagtcctctggacagagtgctcagctcctcagccacgagcctggtgaccctccttgcttgcggcggctgaacttcgtgcggctcctcatgctgtacacccggaagtttgagtccacggacccaagggaggccctccagtacttctatttcctcagggatgagaaagatagtcaaggagaaaacatgtttctgcgctgtgtgagtgagcttgtgattgaaagccgagagttcgatatgattcttgggaaactagagaatgacggaagtagaaagcctggagtcatagataagtttactagtgacacaaagcctattatcaacaaagttgcttctgtggcagaaaataaaggactgtttgaagaggcagcaaagctgtatgaccttgccaagaatgctgacaaggtactggagctgatgaacaaactgctgagccctgtcgtcccccagatcagtgccccgcaatccaacaaggagaggctgaagaacatggcactctccattgccgaacggtatagggctcaaggaataagcgcaaataaatttgtggactccacgttctatcttcttttggacttgatcaccttttttgacgagtatcatagtggtcatattgatagagcttttgatatcattgagcgcttgaagctggtgcccctgaatcaggaaagtgtggaagagagagtggctgccttcagaaatttcagtgatgaaatcaggcacaacctctcagaagtgcttcttgccaccatgaacatcttgttcacacagtttaagaggctcaaggggacaagtccatcctcgtcatccaggccccagcgagtcatcgaggaccgcgactctcaactccgaagtcaagcccgcactctgattacctttgctggaatgataccataccgaacgtctggggacaccaatgcgaggctggtgcagatggaggtcctcatgaattaagtgccatgctttgtgggagtctgggtcggcacactgtcagtacatcaggcacatgggcccactaggctggggtttctggttttgtttctgttgtgttttgttttggtttctgtattatgtatttttgtcaacgccaataaatttctttgatttgt

SEQ ID NO: 109490 - DNA, 2825 bp, Homo sapiens
gcccccggccaggctaggcgtcctgctgctggatgaaggggttggggatggcctccatgccgtcctgcgggcagattagcaccacggacgtgccccggcacaccacgaggcccagctgccgggtgtcctccgtgagcttgtactggtcgtcagggtctcgcatgtactcaatggtgccgtccagcacaaggttgaggagtgggtcgaagcccttcaggattccactggctctcgtgccgaattcggcacgagggagagcggcgcgagaagcggcggccgcgtcctcaagccggcacctgagcggcggagacggctgtagcacaaggatctgcatctccaatggatactgaggggtttggtgagctccttcagcaagctgaacagcttgctgctgagactgagggcatctcagagcttccccatgtggaacggaacttacaggagatccagcaggcgggagagcgcctgcgttcccgtaccctaacacgcacgtcccaggagacggcagatgtcaaggcgtcagttctcctcgggtctcggggacttgacatatcccacatctcccagcgattggagagtctgagtgcagccaccacctttgagcctcttgagcctgtgaaggacactgacattcagggcttcctgaagaatgagaaggacaatgccctgctgtctgccatcgaagagtcccggaagaggaccttcggcatggctgaggagtaccatcgggagtcaatgttggttgagtgggagcaagtgaaacagcgaattctgcacacactgctggcatcaggagaagacgcccttgactttactcaagaaagcgagccaagctacatcagtgatgtgggaccccctggtcgaagctctctggataacatcgagatggcctatgcgcggcaaatttatatctataatgagaaaattgtaaatggacacctgcagcctaacctggtggacctttgtgcttccgtcgcagagctggatgataagagcatttccgacatgtggaccatggtaaaacaaatgacagacgtgttgttgacaccggcaacggatgccctgaagaaccgcagcagcgtggaagtgcgcatggagtttgtcaggcaggccttggcgtaccttgagcagagttataagaattacacccttgtgactgtctttggaaatttgcatcaggcccagctgggcggggtgcctgggacttaccaattggttcgaagtttcctgaacattaaactgccagctcccttgcctggactacaggatggagaggtggaaggccatcctgtgtgggcgctaatttactactgcatgcgctgtggagacctgcttgccgcttcacaggtagttaatcgagcccagcaccagctgggagagtttaaaacctggttccaggagtacatgaacagcaaggacagaagattgtccccagctacggaaaacaagctccggctgcattaccgtagggccctcaggaacaatacagatccctacaagcgggccgtgtactgtatcattggcagatgtgacgtcaccgacaaccagagtgaagtggcggacaaaactgaggattacctgtggctgaagttgaaccaagtgtgttttgacgacgatggcaccagctccccacaagacaggctcactctctcacagttccagaagcagttgttggaagactatggcgagtcccactttacggtgaaccagcaacccttcctctacttccaagtcctgttcctgacagcgcagtttgaagcagcagttgcctttcttttccgcatggagcggctgcgctgccatgctgtccatgtagcactggtgctgtttgagctgaagctgcttttaaagtcctctggacagagtgctcagctcctcagccacgagcctggtgaccctccttgcttgcggcggctgaacttcgtgcggctcctcatgctgtacacccggaagtttgagtccacggacccaagggaggccctccagtacttctatttcctcagggatgagaaagatagtcaaggagaaaacatgtttctgcgctgtgtgagtgagcttgtgattgaaagccgagagttcgatatgattcttgggaaactagagaatgacggaagtagaaagcctggagtcatagataagtttactagtgacacaaagcctattatcaacaaagttgcttctgtggcagaaaataaaggactgtttgaagaggcagcaaagctgtatgaccttgccaagaatgctgacaaggtactggagctgatgaacaaactgctgagccctgtcgtcccccagatcagtgccccgcaatccaacaaggagaggctgaagaacatggcactctccattgccgaacggtatagggctcaaggaataagcgcaaataaatttgtggactccacgttctatcttcttttggacttgatcaccttttttgacgagtatcatagtggtcatattgatagagcttttgatatcattgagcgcttgaagctggtgcccctgaatcaggaaagtgtggaagagagagtggctgccttcagaaatttcagtgatgaacaactccgaagtcaagcccgcactctgattacctttgctggaatgataccataccgaacgtctggggacaccaatgcgaggctggtgcagatggaggtcctcatgaattaagtgccatgctttgtgggagtctgggtcggcacactgtcagtacatcaggcacatgggcccactaggctggggtttctggttttgtttctgttgtgttttgttttggtttctgtattatgtatttttgtcaacgccaataaatttctttgatttgt

SEQ ID NO: 109491 - DNA, 2779 bp, Homo sapiens
gcccccggccaggctaggcgtcctgctgctggatgaaggggttggggatggcctccatgccgtcctgcgggcagattagcaccacggacgtgccccggcacaccacgaggcccagctgccgggtgtcctccgtgagcttgtactggtcgtcagggtctcgcatgtactcaatggtgccgtccagcacaaggttgaggagtgggtcgaagcccttcaggattccactggctctcgtgccgaattcggcacgagggagagcggcgcgagaagcggcggccgcgtcctcaagccggcacctgagcggcggagacggctgtagcacaaggatctgcatctccaatggatactgaggggtttggtgagctccttcagcaagctgaacagcttgctgctgagactgagggcatctcagagcttccccatgtggaacggaacttacaggagatccagcaggcgggagagcgcctgcgttcccgtaccctaacacgcacgtcccaggagacggcagatgtcaaggcgtcagttctcctcgggtctcggggacttgacatatcccacatctcccagcgattggagagtctgagtgcagccaccacctttgagcctcttgagcctgtgaaggacactgacattcagggcttcctgaagaatgagaaggacaatgccctgctgtctgccatcgaagagtcccggaagaggaccttcggcatggctgaggagtaccatcgggagtcaatgttggttgagtgggagcaagtgaaacagcgaattctgcacacactgctggcatcaggagaagacgcccttgactttactcaagaaagcgagccaagctacatcagtgatgtgggaccccctggtcgaagctctctggataacatcgagatggcctatgcgcggcaaatttatatctataatgagaaaattgtaaatggacacctgcagcctaacctggtggacctttgtgcttccgtcgcagagctggatgataagagcatttccgacatgtggaccatggtaaaacaaatgacagacgtgttgttgacaccggcaacggatgccctgaagaaccgcagcagcgtggaagtgcgcatggagtttgtcaggcaggccttggcgtaccttgagcagagttataagaattacacccttgtgactgtctttggaaatttgcatcaggcccagctgggcggggtgcctgggacttaccaattggttcgaagtttcctgaacattaaactgccagctcccttgcctggactacaggatggagaggtggaaggccatcctgtgtgggcgctaatttactactgcatgcgctgtggagacctgcttgccgcttcacaggtagttaatcgagcccagcaccagctgggagagtttaaaacctggttccaggagtacatgaacagcaaggacagaagattgtccccagctacggaaaacaagctccggctgcattaccgtagggccctcaggaacaatacagatccctacaagcgggccgtgtactgtatcattggcagatgtgacgtcaccgacaaccagagtgaagtggcggacaaaactgaggattacctgtggctgaagttgaaccaagtgtgttttgacgacgatggcaccagctccccacaagacaggctcactctctcacagttccagaagcagttgttggaagactatggcgagtcccactttacggtgaaccagcaacccttcctctacttccaagtcctgttcctgacagcgcagtttgaagcagcagttgcctttcttttccgcatggagcggctgcgctgccatgctgtccatgtagcactggtgctgtttgagctgaagctgcttttaaagtcctctggacagagtgctcagctcctcagccacgagcctggtgaccctccttgcttgcggcggctgaacttcgtgcggctcctcatgctgtacacccggaagtttgagtccacggacccaagggaggccctccagtacttctatttcctcagggatgagaaagatagtcaaggagaaaacatgtttctgcgctgtgtgagtgagcttgtgattgaaagccgagagttcgatatgattcttgggaaactagagaatgacggaagtagaaagcctggagtcatagataagtttactagtgacacaaagcctattatcaacaaagttgcttctgtggcagaaaataaaggactgtttgaagaggcagcaaagctgtatgaccttgccaagaatgctgacaaggtactggagctgatgaacaaactgctgagccctgtcgtcccccagatcagtgccccgcaatccaacaaggagaggctgaagaacatggcactctccattgccgaacggtatagggctcaaggaataagcgcaaataaatttgtggactccacgttctatcttcttttggacttgatcaccttttttgacgagtatcatagtggtcatattgatagagcttttgatatcattgagcgcttgaagctggtgcccctgaatcaggaaagtgtggaagagagagtggctgccttcagaaatttcagtgatgaagtaagttccttcttcctgagttgtggaattcctttttccccacttccaccaaaagctttttcttttcctgtacctaacagctttaagaattctagttacagtaactatccagactgagttttccagagtggttccctttcagataccttggcctggcttttctgtgagtgcatacatccccatcagattattgtctgaattcctaattgagaaaatacag

SEQ ID NO: 109492 - DNA, 2129 bp, Homo sapiens
gcccccggccaggctaggcgtcctgctgctggatgaaggggttggggatggcctccatgccgtcctgcgggcagattagcaccacggacgtgccccggcacaccacgaggcccagctgccgggtgtcctccgtgagcttgtactggtcgtcagggtctcgcatgtactcaatggtgccgtccagcacaaggttgaggagtgggtcgaagcccttcaggattccactggctctcgtgccgaattcggcacgagggagagcggcgcgagaagcggcggccgcgtcctcaagccggcacctgagcggcggagacggctgtagcacaaggatctgcatctccaatggatactgaggggtttggtgagctccttcagcaagctgaacagcttgctgctgagactgagggcatctcagagcttccccatgtggaacggaacttacaggagatccagcaggcgggagagcgcctgcgttcccgtaccctaacacgcacgtcccaggagacggcagatgtcaaggcgtcagttctcctcgggtctcggggacttgacatatcccacatctcccagcgattggagagtctgagtgcagccaccacctttgagcctcttgagcctgtgaaggacactgacattcagggcttcctgaagaatgagaaggacaatgccctgctgtctgccatcgaagagtcccggaagaggaccttcggcatggctgaggagtaccatcgggagtcaatgttggttgagtgggagcaagtgaaacagcgaattctgcacacactgctggcatcaggagaagacgcccttgactttactcaagaaagcgagccaagctacatcagtgatgtgggaccccctggtcgaagctctctggataacatcgagatggcctatgcgcggcaaatttatatctataatgagaaaattgtaaatggacacctgcagcctaacctggtggacctttgtgcttccgtcgcagagctggatgataagagcatttccgacatgtggaccatggtaaaacaaatgacagacgtgttgttgacaccggcaacggatgccctgaagaaccgcagcagcgtggaagtgcgcatggagtttgtcaggcaggccttggcgtaccttgagcagagttataagaattacacccttgtgactgtctttggaaatttgcatcaggcccagctgggcggggtgcctgggacttaccaattggttcgaagtttcctgaacattaaactgccagctcccttgcctggactacaggatggagaggtggaaggccatcctgtgtgggcgctaatttactactgcatgcgctgtggagacctgcttgccgcttcacaggtagttaatcgagcccagcaccagctgggagagtttaaaacctggttccaggagtacatgaacagcaaggacagaagattgtccccagctacggaaaacaagctccggctgcattaccgtagggccctcaggaacaatacagatccctacaagcgggccgtgtactgtatcattggcagatgtgacgtcaccgacaaccagagtgaagtggcggacaaaactgaggattacctgtggctgaagttgaaccaagtgtgttttgacgacgatggcaccagctccccacaagacaggctcactctctcacagttccagaagcagttgttggaagactatggcgagtcccactttacggtgaaccagcaacccttcctctacttccaagtcctgttcctgacagcgcagtttgaagcagcagttgcctttcttttccgcatggagcggctgcgctgccatgctgtccatgtagcactggtgctgtttgagctgaagctgcttttaaagtcctctggacagagtgctcagctcctcagccacgagcctggtgaccctccttgcttgcggcggctgaacttcgtgcggctcctcatgctgtacacccggaagtttgagtccacggacccaagggaggccctccagtacttctatttcctcagggatgagaaagatagtcaaggagaaaacatgtttctgcgctgtgtgagtgagcttgtgattgaaagccgagagttcgatatttcttgggaactacgagaatgacagaacgtagaaagccttggagg

SEQ ID NO: 109493 - DNA, 1991 bp, Homo sapiens
gcccccggccaggctaggcgtcctgctgctggatgaaggggttggggatggcctccatgccgtcctgcgggcagattagcaccacggacgtgccccggcacaccacgaggcccagctgccgggtgtcctccgtgagcttgtactggtcgtcagggtctcgcatgtactcaatggtgccgtccagcacaaggttgaggagtgggtcgaagcccttcaggattccactggctctcgtgccgaattcggcacgagggagagcggcgcgagaagcggcggccgcgtcctcaagccggcacctgagcggcggagacggctgtagcacaaggatctgcatctccaatggatactgaggggtttggtgagctccttcagcaagctgaacagcttgctgctgagactgagggcatctcagagcttccccatgtggaacggaacttacaggagatccagcaggcgggagagcgcctgcgttcccgtaccctaacacgcacgtcccaggagacggcagatgtcaaggcgtcagttctcctcgggtctcggggacttgacatatcccacatctcccagcgattggagagtctgagtgcagccaccacctttgagcctcttgagcctgtgaaggacactgacattcagggcttcctgaagaatgagaaggacaatgccctgctgtctgccatcgaagagtcccggaagaggaccttcggcatggctgaggagtaccatcgggagtcaatgttggttgagtgggagcaagtgaaacagcgaattctgcacacactgctggcatcaggagaagacgcccttgactttactcaagaaagcgagccaagctacatcagtgatgtgggaccccctggtcgaagctctctggataacatcgagatggcctatgcgcggcaaatttatatctataatgagaaaattgtaaatggacacctgcagcctaacctggtggacctttgtgcttccgtcgcagagctggatgataagagcatttccgacatgtggaccatggtaaaacaaatgacagacgtgttgttgacaccggcaacggatgccctgaagaaccgcagcagcgtggaagtgcgcatggagtttgtcaggcaggccttggcgtaccttgagcagagttataagaattacacccttgtgactgtctttggaaatttgcatcaggcccagctgggcggggtgcctgggacttaccaattggttcgaagtttcctgaacattaaactgccagctcccttgcctggactacaggatggagaggtggaaggccatcctgtgtgggcgctaatttactactgcatgcgctgtggagacctgcttgccgcttcacaggtagttaatcgagcccagcaccagctgggagagtttaaaacctggttccaggagtacatgaacagcaaggacagaagattgtccccagctacggaaaacaagctccggctgcattaccgtagggccctcaggaacaatacagatccctacaagcgggccgtgtactgtatcattggcagatgtgacgtcaccgacaaccagagtgaagtggcggacaaaactgaggattacctgtggctgaagttgaaccaagtgtgttttgacgacgatggcaccagctccccacaagacaggctcactctctcacagttccagaagcagttgttggaagactatggcgagtcccactttacggtgaaccagcaacccttcctctacttccaagtcctgttcctgacagcgcagtttgaagcagcagttgcctttcttttccgcatggagcggctgcgctgccatgctgtccatgtagcactggtgctgtttgagctgaagctgcttttaaagtccttctgggtcggcacactgtcagtacatcaggcacatgggcccactaggctggggtttctggttttgtttctgttgtgttttgttttggtttctgtattatgtatttttgtcaacgccaataaatttctttgatttgt

SEQ ID NO: 109494 - DNA, 310 bp, Homo sapiens
atgtctttttggtattttgttaatcgtcattttttccgctttcacaactccgaagtcaagcccgcactctgattacctttgctggaatgataccataccgaacgtctggggacaccaatgcgaggctggtgcagatggaggtcctcatgaattaagtgccatgctttgtgggagtctgggtcggcacactgtcagtacatcaggcacatgggcccactaggctggggtttctggttttgtttctgttgtgttttgttttggtttctgtattatgtatttttgtcaacgccaataaatttctttgatttgt

SEQ ID NO: 109495 - DNA, 327 bp, Homo sapiens
  misc_feature (40)..(40): n is a, c, g, or t
gttggtctgcaccccgcggacgatcccagaggggacgccntgtcattctaatactcacgaacaactccgaagtcaagcccgcactctgattacctttgctggaatgataccataccgaacgtctggggacaccaatgcgaggctggtgcagatggaggtcctcatgaattaagtgccatgctttgtgggagtctgggtcggcacactgtcagtacatcaggcacatgggcccactaggctggggtttctggttttgtttctgttgtgttttgttttggtttctgtattatgtatttttgtcaacgccaataaatttctttgatttgt

SEQ ID NO: 109496 - DNA, 327 bp, Homo sapiens
cgttcgcatttctagttcgtcacattacccctctctatcccagcccaggtatcctccttagcaactccgaagtcaagcccgcactctgattacctttgctggaatgataccataccgaacgtctggggacaccaatgcgaggctggtgcagatggaggtcctcatgaattaagtgccatgctttgtgggagtctgggtcggcacactgtcagtacatcaggcacatgggcccactaggctggggtttctggttttgtttctgttgtgttttgttttggtttctgtattatgtatttttgtcaacgccaataaatttctttgatttgt

SEQ ID NO: 109497 - DNA, 658 bp, Homo sapiens
aaaaaaaaaaaaaaaaaaaggaagcgggggagagcggcgcgagaagcggcggccgcgtcctcaagccggcacctgagcggcggagacggctgtagcacaaggatctgcatctccaatggatactgaggggtttggtgagctccttcagcaagctgaacagcttgctgctgagactgagggcatctcagagcttccccatgtggaacggaacttacaggagatccagcaggcgggagagcgcctgcgttcccgtaccctaacacgcacgtcccaggagacggcagatgtcaaggcgtcagttctcctcgggtctcggggacttgacatatcccacatctcccagcgattggagagtctgagtgcagccaccacctttgagcctcttgagcctgtgaaggacactgacattcagggcttcctgaagaatgagaaggacaatgccctgctgtctgccatcgaagagtcccggaagaggaccttcggcatggctgaggagtaccatcgggagtcaatgttggttgagtgggagcaagtgaaacagcgaattctgcacacactgctggcatcaggagaagacgcccttgactttactcaagaaagcgaggtagcttgaatgcaaaagataaactactgttaataaaaacatgaagtcaaagaa

SEQ ID NO: 109498 - DNA, 400 bp, Homo sapiens
gcccaccctccctccatctgtggttggccccaaaggcttggttctttttctttactctgtttttctctctatgtagatcaggcacaacctctcagaagtgcttcttgccaccatgaacatcttgttcacacagtttaagaggctcaaggggacaagtccatcctcgtcatccaggccccagcgagtcatcgaggaccgcgactctctctgtaagatcccagcattcgcgagaaacattgctaagcaccacctttctggtttggaatccgttgcgctcttatgagaccacatgacccaaaactgctctttctcctcagtacctggcagctggataaatctcgtgttaggaggctcccagaggaaatcaaatattaaagggattgctgctcttctcaagctt

SEQ ID NO: 109499 - DNA, 336 bp, Homo sapiens
cggcttcttttccgagaacgcgccgtcccccagacacggaaagactttaagctaaccagactagccctgccaactccgaagtcaagcccgcactctgattacctttgctggaatgataccataccgaacgtctggggacaccaatgcgaggctggtgcagatggaggtcctcatgaattaagtgccatgctttgtgggagtctgggtcggcacactgtcagtacatcaggcacatgggcccactaggctggggtttctggttttgtttctgttgtgttttgttttggtttctgtattatgtatttttgtcaacgccaataaatttctttgatttgt

SEQ ID NO: 109500 - DNA, 312 bp, Homo sapiens
atggaaaacaaagagacaagacaggaaagggtagtcaaggcacctacaactccgaagtcaagcccgcactctgattacctttgctggaatgataccataccgaacgtctggggacaccaatgcgaggctggtgcagatggaggtcctcatgaattaagtgccatgctttgtgggagtctgggtcggcacactgtcagtacatcaggcacatgggcccactaggctggggtttctggttttgtttctgttgtgttttgttttggtttctgtattatgtatttttgtcaacgccaataaatttctttgatttgt

SEQ ID NO: 109501 - DNA, 2730 bp, Homo sapiens
aaaaaaaaaaaaaaaaaaaggaagcgggggagagcggcgcgagaagcggcggccgcgtcctcaagccggcacctgagcggcggagacggctgtagcacaaggatctgcatctccaatggatactgaggggtttggtgagctccttcagcaagctgaacagcttgctgctgagactgagggcatctcagagcttccccatgtggaacggaacttacaggagatccagcaggcgggagagcgcctgcgttcccgtaccctaacacgcacgtcccaggagacggcagatgtcaaggcgtcagttctcctcgggtctcggggacttgacatatcccacatctcccagcgattggagagtctgagtgcagccaccacctttgagcctcttgagcctgtgaaggacactgacattcagggcttcctgaagaatgagaaggacaatgccctgctgtctgccatcgaagagtcccggaagaggaccttcggcatggctgaggagtaccatcgggagtcaatgttggttgagtgggagcaagtgaaacagcgaattctgcacacactgctggcatcaggagaagacgcccttgactttactcaagaaagcgagccaagctacatcagtgatgtgggaccccctggtcgaagctctctggataacatcgagatggcctatgcgcggcaaatttatatctataatgagaaaattgtaaatggacacctgcagcctaacctggtggacctttgtgcttccgtcgcagagctggatgataagagcatttccgacatgtggaccatggtaaaacaaatgacagacgtgttgttgacaccggcaacggatgccctgaagaaccgcagcagcgtggaagtgcgcatggagtttgtcaggcaggccttggcgtaccttgagcagagttataagaattacacccttgtgactgtctttggaaatttgcatcaggcccagctgggcggggtgcctgggacttaccaattggttcgaagtttcctgaacattaaactgccagctcccttgcctggactacaggatggagaggtggaaggccatcctgtgtgggcgctaatttactactgcatgcgctgtggagacctgcttgccgcttcacaggtagttaatcgagcccagcaccagctgggagagtttaaaacctggttccaggagtacatgaacagcaaggacagaagattgtccccagctacggaaaacaagctccggctgcattaccgtagggccctcaggaacaatacagatccctacaagcgggccgtgtactgtatcattggcagatgtgacgtcaccgacaaccagagtgaagtggcggacaaaactgaggattacctgtggctgaagttgaaccaagtgtgttttgacgacgatggcaccagctccccacaagacaggctcactctctcacagttccagaagcagttgttggaagactatggcgagtcccactttacggtgaaccagcaacccttcctctacttccaagtcctgttcctgacagcgcagtttgaagcagcagttgcctttcttttccgcatggagcggctgcgctgccatgctgtccatgtagcactggtgctgtttgagctgaagctgcttttaaagtcctctggacagagtgctcagctcctcagccacgagcctggtgaccctccttgcttgcggcggctgaacttcgtgcggctcctcatgctgtacacccggaagtttgagtccacggacccaagggaggccctccagtacttctatttcctcagggatgagaaagatagtcaaggagaaaacatgtttctgcgctgtgtgagtgagcttgtgattgaaagccgagagttcgatatgattcttgggaaactagagaatgacggaagtagaaagcctggagtcatagataagtttactagtgacacaaagcctattatcaacaaagttgcttctgtggcagaaaataaaggactgtttgaagaggcagcaaagctgtatgaccttgccaagaatgctgacaaggtactggagctgatgaacaaactgctgagccctgtcgtcccccagatcagtgccccgcaatccaacaaggagaggctgaagaacatggcactctccattgccgaacggtatagggctcaaggaataagcgcaaataaatttgtggactccacgttctatcttcttttggacttgatcaccttttttgacgagtatcatagtggtcatattgatagagcttttgatatcattgagcgcttgaagctggtgcccctgaatcaggaaagtgtggaagagagagtggctgccttcagaaatttcagtgatgaaatcaggcacaacctctcagaagtgcttcttgccaccatgaacatcttgttcacacagtttaagaggctcaaggggacaagtccatcctcgtcatccaggccccagcgagtcatcgaggaccgcgactctcaactccgaagtcaagcccgcactctgattacctttgctggaatgataccataccgaacgtctggggacaccaatgcgaggctggtgcagatggaggtcctcatgaattaagtgccatgctttgtgggagtctgggtcggcacactgtcagtacatcaggcacatgggcccactaggctggggtttctggttttgtttctgttgtgttttgttttggtttctgtattatgtatttttgtcaacgccaataaatttctttgatttgt

SEQ ID NO: 109502 - DNA, 2708 bp, Homo sapiens
aactgttactcccatcagtttgtgctttcaaactgatggctgacttctctgaatttgtgtagcgcacaacgaatggtgatgctgtgctccgggggctgcagtgcaccctttttaaagggaccctgcaatctcattgtttaatttgactctttagtgcttcagtcacatcagcacttgcagaggggttgttcttttcctttttcttctttctctctttttctcttctctctgtccttctccccacccccatccctcaattcaggcagtttggggtgggaaaaacttgagcactggttccgacagagctcatctcatataagaaggtttggaagagctgcagtgatcgacagcatcgaccgttctgtaactccttaaatttaagagctgcagggcttcctgaagaatgagaaggacaatgccctgctgtctgccatcgaagagtcccggaagaggaccttcggcatggctgaggagtaccatcgggagtcaatgttggttgagtgggagcaagtgaaacagcgaattctgcacacactgctggcatcaggagaagacgcccttgactttactcaagaaagcgagccaagctacatcagtgatgtgggaccccctggtcgaagctctctggataacatcgagatggcctatgcgcggcaaatttatatctataatgagaaaattgtaaatggacacctgcagcctaacctggtggacctttgtgcttccgtcgcagagctggatgataagagcatttccgacatgtggaccatggtaaaacaaatgacagacgtgttgttgacaccggcaacggatgccctgaagaaccgcagcagcgtggaagtgcgcatggagtttgtcaggcaggccttggcgtaccttgagcagagttataagaattacacccttgtgactgtctttggaaatttgcatcaggcccagctgggcggggtgcctgggacttaccaattggttcgaagtttcctgaacattaaactgccagctcccttgcctggactacaggatggagaggtggaaggccatcctgtgtgggcgctaatttactactgcatgcgctgtggagacctgcttgccgcttcacaggtagttaatcgagcccagcaccagctgggagagtttaaaacctggttccaggagtacatgaacagcaaggacagaagattgtccccagctacggaaaacaagctccggctgcattaccgtagggccctcaggaacaatacagatccctacaagcgggccgtgtactgtatcattggcagatgtgacgtcaccgacaaccagagtgaagtggcggacaaaactgaggattacctgtggctgaagttgaaccaagtgtgttttgacgacgatggcaccagctccccacaagacaggctcactctctcacagttccagaagcagttgttggaagactatggcgagtcccactttacggtgaaccagcaacccttcctctacttccaagtcctgttcctgacagcgcagtttgaagcagcagttgcctttcttttccgcatggagcggctgcgctgccatgctgtccatgtagcactggtgctgtttgagctgaagctgcttttaaagtcctctggacagagtgctcagctcctcagccacgagcctggtgaccctccttgcttgcggcggctgaacttcgtgcggctcctcatgctgtacacccggaagtttgagtccacggacccaagggaggccctccagtacttctatttcctcagggatgagaaagatagtcaaggagaaaacatgtttctgcgctgtgtgagtgagcttgtgattgaaagccgagagttcgatatgattcttgggaaactagagaatgacggaagtagaaagcctggagtcatagataagtttactagtgacacaaagcctattatcaacaaagttgcttctgtggcagaaaataaaggactgtttgaagaggcagcaaagctgtatgaccttgccaagaatgctgacaaggtactggagctgatgaacaaactgctgagccctgtcgtcccccagatcagtgccccgcaatccaacaaggagaggctgaagaacatggcactctccattgccgaacggtatagggctcaaggaataagcgcaaataaatttgtggactccacgttctatcttcttttggacttgatcaccttttttgacgagtatcatagtggtcatattgatagagcttttgatatcattgagcgcttgaagctggtgcccctgaatcaggaaagtgtggaagagagagtggctgccttcagaaatttcagtgatgaaatcaggcacaacctctcagaagtgcttcttgccaccatgaacatcttgttcacacagtttaagaggctcaaggggacaagtccatcctcgtcatccaggccccagcgagtcatcgaggaccgcgactctcaactccgaagtcaagcccgcactctgattacctttgctggaatgataccataccgaacgtctggggacaccaatgcgaggctggtgcagatggaggtcctcatgaattaagtgccatgctttgtgggagtctgggtcggcacactgtcagtacatcaggcacatgggcccactaggctggggtttctggttttgtttctgttgtgttttgttttggtttctgtattatgtatttttgtcaacgccaataaatttctttgatttgt

SEQ ID NO: 109503 - DNA, 2520 bp, Homo sapiens
aaaaaaaaaaaaaaaaaaaggaagcgggggagagcggcgcgagaagcggcggccgcgtcctcaagccggcacctgagcggcggagtcagttctcctcgggtctcggggacttgacatatcccacatctcccagcgattggagagtctgagtgcagccaccacctttgagcctcttgagcctgtgaaggacactgacattcagggcttcctgaagaatgagaaggacaatgccctgctgtctgccatcgaagagtcccggaagaggaccttcggcatggctgaggagtaccatcgggagtcaatgttggttgagtgggagcaagtgaaacagcgaattctgcacacactgctggcatcaggagaagacgcccttgactttactcaagaaagcgagccaagctacatcagtgatgtgggaccccctggtcgaagctctctggataacatcgagatggcctatgcgcggcaaatttatatctataatgagaaaattgtaaatggacacctgcagcctaacctggtggacctttgtgcttccgtcgcagagctggatgataagagcatttccgacatgtggaccatggtaaaacaaatgacagacgtgttgttgacaccggcaacggatgccctgaagaaccgcagcagcgtggaagtgcgcatggagtttgtcaggcaggccttggcgtaccttgagcagagttataagaattacacccttgtgactgtctttggaaatttgcatcaggcccagctgggcggggtgcctgggacttaccaattggttcgaagtttcctgaacattaaactgccagctcccttgcctggactacaggatggagaggtggaaggccatcctgtgtgggcgctaatttactactgcatgcgctgtggagacctgcttgccgcttcacaggtagttaatcgagcccagcaccagctgggagagtttaaaacctggttccaggagtacatgaacagcaaggacagaagattgtccccagctacggaaaacaagctccggctgcattaccgtagggccctcaggaacaatacagatccctacaagcgggccgtgtactgtatcattggcagatgtgacgtcaccgacaaccagagtgaagtggcggacaaaactgaggattacctgtggctgaagttgaaccaagtgtgttttgacgacgatggcaccagctccccacaagacaggctcactctctcacagttccagaagcagttgttggaagactatggcgagtcccactttacggtgaaccagcaacccttcctctacttccaagtcctgttcctgacagcgcagtttgaagcagcagttgcctttcttttccgcatggagcggctgcgctgccatgctgtccatgtagcactggtgctgtttgagctgaagctgcttttaaagtcctctggacagagtgctcagctcctcagccacgagcctggtgaccctccttgcttgcggcggctgaacttcgtgcggctcctcatgctgtacacccggaagtttgagtccacggacccaagggaggccctccagtacttctatttcctcagggatgagaaagatagtcaaggagaaaacatgtttctgcgctgtgtgagtgagcttgtgattgaaagccgagagttcgatatgattcttgggaaactagagaatgacggaagtagaaagcctggagtcatagataagtttactagtgacacaaagcctattatcaacaaagttgcttctgtggcagaaaataaaggactgtttgaagaggcagcaaagctgtatgaccttgccaagaatgctgacaaggtactggagctgatgaacaaactgctgagccctgtcgtcccccagatcagtgccccgcaatccaacaaggagaggctgaagaacatggcactctccattgccgaacggtatagggctcaaggaataagcgcaaataaatttgtggactccacgttctatcttcttttggacttgatcaccttttttgacgagtatcatagtggtcatattgatagagcttttgatatcattgagcgcttgaagctggtgcccctgaatcaggaaagtgtggaagagagagtggctgccttcagaaatttcagtgatgaaatcaggcacaacctctcagaagtgcttcttgccaccatgaacatcttgttcacacagtttaagaggctcaaggggacaagtccatcctcgtcatccaggccccagcgagtcatcgaggaccgcgactctcaactccgaagtcaagcccgcactctgattacctttgctggaatgataccataccgaacgtctggggacaccaatgcgaggctggtgcagatggaggtcctcatgaattaagtgccatgctttgtgggagtctgggtcggcacactgtcagtacatcaggcacatgggcccactaggctggggtttctggttttgtttctgttgtgttttgttttggtttctgtattatgtatttttgtcaacgccaataaatttctttgatttgt

SEQ ID NO: 109504 - DNA, 2667 bp, Homo sapiens
aaaaaaaaaaaaaaaaaaaggaagcgggggagagcggcgcgagaagcggcggccgcgtcctcaagccggcacctgagcggcggagacggctgtagcacaaggatctgcatctccaatggatactgaggggtttggtgagctccttcagcaagctgaacagcttgctgctgagactgagggcatctcagagcttccccatgtggaacggaacttacaggagatccagcaggcgggagagcgcctgcgttcccgtaccctaacacgcacgtcccaggagacggcagatgtcaaggcgtcagttctcctcgggtctcggggacttgacatatcccacatctcccagcgattggagagtctgagtgcagccaccacctttgagcctcttgagcctgtgaaggacactgacattcagaccttcggcatggctgaggagtaccatcgggagtcaatgttggttgagtgggagcaagtgaaacagcgaattctgcacacactgctggcatcaggagaagacgcccttgactttactcaagaaagcgagccaagctacatcagtgatgtgggaccccctggtcgaagctctctggataacatcgagatggcctatgcgcggcaaatttatatctataatgagaaaattgtaaatggacacctgcagcctaacctggtggacctttgtgcttccgtcgcagagctggatgataagagcatttccgacatgtggaccatggtaaaacaaatgacagacgtgttgttgacaccggcaacggatgccctgaagaaccgcagcagcgtggaagtgcgcatggagtttgtcaggcaggccttggcgtaccttgagcagagttataagaattacacccttgtgactgtctttggaaatttgcatcaggcccagctgggcggggtgcctgggacttaccaattggttcgaagtttcctgaacattaaactgccagctcccttgcctggactacaggatggagaggtggaaggccatcctgtgtgggcgctaatttactactgcatgcgctgtggagacctgcttgccgcttcacaggtagttaatcgagcccagcaccagctgggagagtttaaaacctggttccaggagtacatgaacagcaaggacagaagattgtccccagctacggaaaacaagctccggctgcattaccgtagggccctcaggaacaatacagatccctacaagcgggccgtgtactgtatcattggcagatgtgacgtcaccgacaaccagagtgaagtggcggacaaaactgaggattacctgtggctgaagttgaaccaagtgtgttttgacgacgatggcaccagctccccacaagacaggctcactctctcacagttccagaagcagttgttggaagactatggcgagtcccactttacggtgaaccagcaacccttcctctacttccaagtcctgttcctgacagcgcagtttgaagcagcagttgcctttcttttccgcatggagcggctgcgctgccatgctgtccatgtagcactggtgctgtttgagctgaagctgcttttaaagtcctctggacagagtgctcagctcctcagccacgagcctggtgaccctccttgcttgcggcggctgaacttcgtgcggctcctcatgctgtacacccggaagtttgagtccacggacccaagggaggccctccagtacttctatttcctcagggatgagaaagatagtcaaggagaaaacatgtttctgcgctgtgtgagtgagcttgtgattgaaagccgagagttcgatatgattcttgggaaactagagaatgacggaagtagaaagcctggagtcatagataagtttactagtgacacaaagcctattatcaacaaagttgcttctgtggcagaaaataaaggactgtttgaagaggcagcaaagctgtatgaccttgccaagaatgctgacaaggtactggagctgatgaacaaactgctgagccctgtcgtcccccagatcagtgccccgcaatccaacaaggagaggctgaagaacatggcactctccattgccgaacggtatagggctcaaggaataagcgcaaataaatttgtggactccacgttctatcttcttttggacttgatcaccttttttgacgagtatcatagtggtcatattgatagagcttttgatatcattgagcgcttgaagctggtgcccctgaatcaggaaagtgtggaagagagagtggctgccttcagaaatttcagtgatgaaatcaggcacaacctctcagaagtgcttcttgccaccatgaacatcttgttcacacagtttaagaggctcaaggggacaagtccatcctcgtcatccaggccccagcgagtcatcgaggaccgcgactctcaactccgaagtcaagcccgcactctgattacctttgctggaatgataccataccgaacgtctggggacaccaatgcgaggctggtgcagatggaggtcctcatgaattaagtgccatgctttgtgggagtctgggtcggcacactgtcagtacatcaggcacatgggcccactaggctggggtttctggttttgtttctgttgtgttttgttttggtttctgtattatgtatttttgtcaacgccaataaatttctttgatttgt

SEQ ID NO: 109505 - DNA, 3149 bp, Homo sapiens
gcccccggccaggctaggcgtcctgctgctggatgaaggggttggggatggcctccatgccgtcctgcgggcagattagcaccacggacgtgccccggcacaccacgaggcccagctgccgggtgtcctccgtgagcttgtactggtcgtcagggtctcgcatgtactcaatggtgccgtccagcacaaggttgaggagtgggtcgaagcccttcaggattccactggctctcgtgccgaattcggcacgagggagagcggcgcgagaagcggcggccgcgtcctcaagccggcacctgagcggcggagacggctgtagcacaaggatctgcatctccaatggatactgaggggtttggtgagctccttcagcaagctgaacagcttgctgctgagactgagggcatctcagagcttccccatgtggaacggaacttacaggagatccagcaggcgggagagcgcctgcgttcccgtaccctaacacgcacgtcccaggagacggcagatgtcaaggcgtcagttctcctcgggtctcggggacttgacatatcccacatctcccagcgattggagagtctgagtgcagccaccacctttgagcctcttgagcctgtgaaggacactgacattcagggcttcctgaagaatgagaaggacaatgccctgctgtctgccatcgaagagtcccggaagaggaccttcggcatggctgaggagtaccatcgggagtcaatgttggttgagtgggagcaagtgaaacagcgaattctgcacacactgctggcatcaggagaagacgcccttgactttactcaagaaagcgagccaagctacatcagtgatgtgggaccccctggtcgaagctctctggataacatcgagatggcctatgcgcggcaaatttatatctataatgagaaaattgtaaatggacacctgcagcctaacctggtggacctttgtgcttccgtcgcagagctggatgataagagcatttccgacatgtggaccatggtaaaacaaatgacagacgtgttgttgacaccggcaacggatgccctgaagaaccgcagcagcgtggaagtgcgcatggagtttgtcaggcaggccttggcgtaccttgagcagagttataagaattacacccttgtgactgtctttggaaatttgcatcaggcccagctgggcggggtgcctgggacttaccaattggttcgaagtttcctgaacattaaactgccagctcccttgcctggactacaggatggagaggtggaaggccatcctgtgtgggcgctaatttactactgcatgcgctgtggagacctgcttgccgcttcacaggtagttaatcgagcccagcaccagctgggagagtttaaaacctggttccaggagtacatgaacagcaaggacagaagattgtccccagctacggaaaacaagctccggctgcattaccgtagggccctcaggaacaatacagatccctacaagcgggccgtgtactgtatcattggcagatgtgacgtcaccgacaaccagagtgaagtggcggacaaaactgaggattacctgtggctgaagttgaaccaagtgtgttttgacgacgatggcaccagctccccacaagacaggctcactctctcacagttccagaagcagttgttggaagactatggcgagtcccactttacggtgaaccagcaacccttcctctacttccaagtcctgttcctgacagcgcagtttgaagcagcagttgcctttcttttccgcatggagcggctgcgctgccatgctgtccatgtagcactggtgctgtttgagctgaagctgcttttaaagtcctctggacagagtgctcagctcctcagccacgagcctggtgaccctccttgcttgcggcggctgaacttcgtgcggctcctcatgctgtacacccggaagtttgagtccacggacccaagggaggccctccagtacttctatttcctcagggatgagaaagatagtcaaggagaaaacatgtttctgcgctgtgtgagtgagcttgtgattgaaagccgagagttcgatatgattcttgggaaactagagaatgacggaagtagaaagcctggagtcatagataagtttactagtgacacaaagcctattatcaacaaagttgcttctgtggcagaaaataaaggactgtttgaagaggcagcaaagctgtatgaccttgccaagaatgctgacaaggtactggagctgatgaacaaactgctgagccctgtcgtcccccagatcagtgccccgcaatccaacaaggagaggctgaagaacatggcactctccattgccgaacggtatagggctcaaggaataagcgcaaataaatttgtggactccacgttctatcttcttttggacttgatcaccttttttgacgagtatcatagtggtcatattgatagagcttttgatatcattgagcgcttgaagctggtgcccctgaatcaggaaagtgtggaagagagagtggctgccttcagaaatttcagtgatgaaatcaggcacaacctctcagaagtgcttcttgccaccatgaacatcttgttcacacagtttaagaggctcaaggggacaagtccatcctcgtcatccaggccccagcgagtcatcgaggaccgcgactctcaactccgaagtcaagcccgcactctgattacctttgctggaatgataccataccgaacgtctggggacaccaatgcgaggctggtgcagatggaggtcctcatgaattaagtgccatgctttgtgggagtctgggtcggcacactgtcagtacatcaggcacatgggcccactaggctggggtttctggttttgtttctgttgtgttttgttttggtttctgtattatgtatttttgtcaacgccaataaatttctttgatttgtatttcttttcaacattcttttattttcttttttttttcctttgaaattttgtttacatttttatttgtgtaatgggaaataccgtcactagctcttgggccagggaatgagaggctatgtagatattcattatttggttaaattgaccttaattaattaaaaatctacccaaaatgagccaggaaacaaagcctt

SEQ ID NO: 109506 - DNA, 2721 bp, Homo sapiens
gcccccggccaggctaggcgtcctgctgctggatgaaggggttggggatggcctccatgccgtcctgcgggcagattagcaccacggacgtgccccggcacaccacgaggcccagctgccgggtgtcctccgtgagcttgtactggtcgtcagggtctcgcatgtactcaatggtgccgtccagcacaaggttgaggagtgggtcgaagcccttcaggattccactggctctcgtgccgaattcggcacgagggagagcggcgcgagaagcggcggccgcgtcctcaagccggcacctgagcggcggagacggctgtagcacaaggatctgcatctccaatggatactgaggggtttggtgagctccttcagcaagctgaacagcttgctgctgagactgagggcatctcagagcttccccatgtggaacggaacttacaggagatccagcaggcgggagagcgcctgcgttcccgtaccctaacacgcacgtcccaggagacggcagatgtcaaggcgtcagttctcctcgggtctcggggacttgacatatcccacatctcccagcgattggagagtctgagtgcagccaccacctttgagcctcttgagcctgtgaaggacactgacattcagggcttcctgaagaatgagaaggacaatgccctgctgtctgccatcgaagagtcccggaagaggaccttcggcatggctgaggagtaccatcgggagtcaatgttggttgagtgggagcaagtgaaacagcgaattctgcacacactgctggcatcaggagaagacgcccttgactttactcaagaaagcgagccaagctacatcagtgatgtgggaccccctggtcgaagctctctggataacatcgagatggcctatgcgcggcaaatttatatctataatgagaaaattgtaaatggacacctgcagcctaacctggtggacctttgtgcttccgtcgcagagctggatgataagagcatttccgacatgtggaccatggtaaaacaaatgacagacgtgttgttgacaccggcaacggatgccctgaagaaccgcagcagcgtggaagtgcgcatggagtttgtcaggcaggccttggcgtaccttgagcagagttataagaattacacccttgtgactgtctttggaaatttgcatcaggcccagctgggcggggtgcctgggacttaccaattggttcgaagtttcctgaacattaaactgccagctcccttgcctggactacaggatggagaggtggaaggccatcctgtgtgggcgctaatttactactgcatgcgctgtggagacctgcttgccgcttcacaggtagttaatcgagcccagcaccagctgggagagtttaaaacctggttccaggagtacatgaacagcaaggacagaagattgtccccagctacggaaaacaagctccggctgcattaccgtagggccctcaggaacaatacagatccctacaagcgggccgtgtactgtatcattggcagatgtgacgtcaccgacaaccagagtgaagtggcggacaaaactgaggattacctgtggctgaagttgaaccaagtgtgttttgacgacgatggcaccagctccccacaagacaggctcactctctcacagttccagaagcagttgttggaagactatggcgagtcccactttacggtgaaccagcaacccttcctctacttccaagtcctgttcctgacagcgcagtttgaagcagcagttgcctttcttttccgcatggagcggctgcgctgccatgctgtccatgtagcactggtgctgtttgagctgaagctgcttttaaagtcctctggacagagtgctcagctcctcagccacgagcctggtgaccctccttgcttgcggcggctgaacttcgtgcggctcctcatgctgtacacccggaagtttgagtccacggacccaagggaggccctccagtacttctatttcctcagggatgagaaagatagtcaaggagaaaacatgtttctgcgctgtgtgagtgagcttgtgattgaaagccgagagttcgatatgattcttgggaaactagagaatgacggaagtagaaagcctggagtcatagataagtttactagtgacacaaagcctattatcaacaaagttgcttctgtggcagaaaataaaggactgtttgaagaggcagcaaagctgtatgaccttgccaagaatgctgacaaggtactggagctgatgaacaaactgctgagccctgtcgtcccccagatcagtgccccgcaatccaacaaggagaggctgaagaacatggcactctccattgccgaacggtatagggctcaaggaataagcgcaaataaatttgtggactccacgttctatcttcttttggacttgatcaccttttttgacgagtatcatagtggtcatattgatagagcttttgatatcattgagcgcttgaagctggtgcccctgaatcaggaaagtgtggaagagagagtggctgccttcagaaatttcagtgatgaaatcaggcacaacctctcagaagtgcttcttgccaccatgaacatcttgttcacacagtttaagaggctcaaggggacaagtccatcctcgtcatccaggccccagcgagtcatcgaggaccgcgactcttgtacaccactggccactgaatacgtaatcatg

SEQ ID NO: 109507 - DNA, 2619 bp, Homo sapiens
gcccccggccaggctaggcgtcctgctgctggatgaaggggttggggatggcctccatgccgtcctgcgggcagattagcaccacggacgtgccccggcacaccacgaggcccagctgccgggtgtcctccgtgagcttgtactggtcgtcagggtctcgcatgtactcaatggtgccgtccagcacaaggttgaggagtgggtcgaagcccttcaggattccactggctctcgtgccgaattcggcacgagggagagcggcgcgagaagcggcggccgcgtcctcaagccggcacctgagcggcggagacggctgtagcacaaggatctgcatctccaatggatactgaggggtttggtgagctccttcagcaagctgaacagcttgctgctgagactgagggcatctcagagcttccccatgtggaacggaacttacaggagatccagcaggcgggagagcgcctgcgttcccgtaccctaacacgcacgtcccaggagacggcagatgtcaaggcgtcagttctcctcgggtctcggggacttgacatatcccacatctcccagcgattggagagtctgagtgcagccaccacctttgagcctcttgagcctgtgaaggacactgacattcagggcttcctgaagaatgagaaggacaatgccctgctgtctgccatcgaagagtcccggaagaggaccttcggcatggctgaggagtaccatcgggagtcaatgttggttgagtgggagcaagtgaaacagcgaattctgcacacactgctggcatcaggagaagacgcccttgactttactcaagaaagcgagccaagctacatcagtgatgtgggaccccctggtcgaagctctctggataacatcgagatggcctatgcgcggcaaatttatatctataatgagaaaattgtaaatggacacctgcagcctaacctggtggacctttgtgcttccgtcgcagagctggatgataagagcatttccgacatgtggaccatggtaaaacaaatgacagacgtgttgttgacaccggcaacggatgccctgaagaaccgcagcagcgtggaagtgcgcatggagtttgtcaggcaggccttggcgtaccttgagcagagttataagaattacacccttgtgactgtctttggaaatttgcatcaggcccagctgggcggggtgcctgggacttaccaattggttcgaagtttcctgaacattaaactgccagctcccttgcctggactacaggatggagaggtggaaggccatcctgtgtgggcgctaatttactactgcatgcgctgtggagacctgcttgccgcttcacaggtagttaatcgagcccagcaccagctgggagagtttaaaacctggttccaggagtacatgaacagcaaggacagaagattgtccccagctacggaaaacaagctccggctgcattaccgtagggccctcaggaacaatacagatccctacaagcgggccgtgtactgtatcattggcagatgtgacgtcaccgacaaccagagtgaagtggcggacaaaactgaggattacctgtggctgaagttgaaccaagtgtgttttgacgacgatggcaccagctccccacaagacaggctcactctctcacagttccagaagcagttgttggaagactatggcgagtcccactttacggtgaaccagcaacccttcctctacttccaagtcctgttcctgacagcgcagtttgaagcagcagttgcctttcttttccgcatggagcggctgcgctgccatgctgtccatgtagcactggtgctgtttgagctgaagctgcttttaaagtcctctggacagagtgctcagctcctcagccacgagcctggtgaccctccttgcttgcggcggctgaacttcgtgcggctcctcatgctgtacacccggaagtttgagtccacggacccaagggaggccctccagtacttctatttcctcagggatgagaaagatagtcaaggagaaaacatgtttctgcgctgtgtgagtgagcttgtgattgaaagccgagagttcgatatgattcttgggaaactagagaatgacggaagtagaaagcctggagtcatagataagtttactagtgacacaaagcctattatcaacaaagttgcttctgtggcagaaaataaaggactgtttgaagaggcagcaaagctgtatgaccttgccaagaatgctgacaaggtactggagctgatgaacaaactgctgagccctgtcgtcccccagatcagtgccccgcaatccaacaaggagaggctgaagaacatggcactctccattgccgaacggtatagggctcaaggaataagcgcaaataaatttgtggactccacgttctatcttcttttggacttgatcaccttttttgacgagtatcatagtggtcatattgatagagcttttgatgtaagtttcaggaaaggtgtttgaagtgcaggttaatgtacaccctcgaaaattcaaaacacttcatggaatttacttaaaacaaaggagctgttgccagtatgtttgttgtataaagaaagacaagtacaatcctgggactta

SEQ ID NO: 109508 - DNA, 329 bp, Homo sapiens
  misc_feature (42)..(42): n is a, c, g, or t
  misc_feature (47)..(47): n is a, c, g, or t
cacacgcagcagcacagcgaaagggtccgcaaccaacacacnaaacngtttcaaggtgacgagcaactccgaagtcaagcccgcactctgattacctttgctggaatgataccataccgaacgtctggggacaccaatgcgaggctggtgcagatggaggtcctcatgaattaagtgccatgctttgtgggagtctgggtcggcacactgtcagtacatcaggcacatgggcccactaggctggggtttctggttttgtttctgttgtgttttgttttggtttctgtattatgtatttttgtcaacgccaataaatttctttgatttgt

SEQ ID NO: 109509 - DNA, 504 bp, Homo sapiens
aaaaaaaaaaaaaaaaaaaggaagcgggggagagcggcgcgagaagcggcggccgcgtcctcaagccggcacctgagcggcggagacggctgtagcacaaggatctgcatctccaatggatactgaggggtttggtgagctccttcagcaagctgaacagcttgctgctgagactgagggcatctcagagcttccccatgtggaacggaacttacaggagatccagcaggcgggagagcgcctgcgttcccgtaccctaacacgcacgtcccaggagacggcagatgtcaaggcgtagtgaacgaaaaataacaatacaggaccttcggcatggctgaggagtaccatcgggagtcaatgttggttgagtgggagcaagtgaaacagcgaattctgcacacactgctggcatcaggagaagacgcccttgactttactcaagaaagcgaggtagcttgaatgcaaaagataaactactgttaataaaaacatgaagtcaaagaa

SEQ ID NO: 109510 - DNA, 996 bp, Homo sapiens
ctgccttggcctcccaaagtgtgggataatacacgtgagccactgtcccaggcttatcattatttttgaaaactagcctcaggctgtcttaatgactaggtccagctgacctaaattgagtccacagccttgcccatttcagtttatctccaagccataatgtgtggataattactgaagtagtcatgtgggtcattgaggaatatcaggagctttcgctacagcagtggccttcaacccttagtgcgctgctagtgaaatgcaaatattgggactctgttccctgagaatcttggggtcagggaagtaaccctagagtttgcatttctaataacctctggggattctaaagcacgtggttcttagcactgaaaaacactaaaaaatataacaggtgtttgagggaggaggaggaaagaggaattcattcttggtatttatcaggcactgtcaggggccatagctccccaagaacaggaaccatgcttactcttctgtatccctagcatcagcatggttgctagcactgagtaagaatgtaagacattttgagtggataaattcattaaaacaaattgataaatgacctatacatagggtgctatcaaatacaactctcttcaggtactttgatgttataaaaaggattgcacatgtagacagtctttattaggaataaacaagaaacatgttaagtgacaacagtagcagagataaaacagcacatgttcaaaattaggaaagccaatgaggcaggaggattgcttgagctcaggtgttcaaggctgccatgagttatgatcatgccactgcactccagcctgattacagtgagaccttgtctcttaaaaaaagaagcagtagcagccaagagactaagatcaattaagccaaactggttatcacggattttttttttaacatcaaagtcacacggatgcataatttgaaaagtcagaatgtactgtacaattgcctgactcagtcctgggtcca

SEQ ID NO: 109511 - DNA, 143 bp, Homo sapiens
cagagcataaaagcaagacacggtcagacctattccgtgtgagaatgtttcagactggttcacatgattactatagacgtctataattattttgtttaaacttcatgtttcataaattgtagatatatgtttgttagggaaaa

SEQ ID NO: 109512 - DNA, 337 bp, Homo sapiens
tatgttgtaatccactgtggtgtctcatcaaacggtatgcaaataacattccaaaatcgaaatgtgaacctaatctttgcttgtgttctgttacgttgtgatgagctctatgtatataatatttaaaataaatggagatctttatttttatatcccaaatgttagacaattacaatgtatatttcttgggtgtatactttgtcattcttgtgcattgcaatttacctgttctatggaataggttttatttagtgaatattgaggtttttcaaagtcatttcagttatttgggtacctattatagtgaaaagtcacgggactgaaagtcaagaattgt

SEQ ID NO: 109513 - DNA, 514 bp, Homo sapiens
aaaatattttacatgcaaatacttggattatacacaaccatttagtaacacattaatagcgaatataaaaaaaacaagggctatattctaatgtggtacacagatttgtttgtttgcctctataagttgaatcaacatgtaaaatttagaagactcgtgaagaaatgtggacttcaggcatatcctaaaaaatcaaatctggtgtcccctgagtttctatcattgtttggtctgctgtgcagaagttgcccctttatagaaggcggcatgtattctccagtttgctactgtgcccaccttagtacttcccttactcaggcaaccttcctttgtccttgtaagtatctgagtttacaactcctatgttatagtatattttgataaaaatttcaaggtttttaagtcagcatgtatttgtttataatatatagtctatagagtatataaatccctcagttatggagttgaattttagagtttagaagtttttaactcttttctttatatataccac

SEQ ID NO: 109514 - DNA, 215 bp, Homo sapiens
tgtactaccaagttcagaaagttcagctcatcaaaatcttggatgagtgtgatatctgaagagttttcaaatggagatctggggctagatctctgtgttcatgttaagggaccttgaaacaagtgaaggccagagaccaagtgttatgtattgcccattctgggtatatactaggtactcagatactttttaattgaataaaaatttaaaaagtt

SEQ ID NO: 109515 - DNA, 735 bp, Homo sapiens
caggctggagtgcagtgacatgatcttggctcactgcaacctccacctcctgggttcaagcgattctcatgcctcagcctcccaggcagctgggactacaggtgcccaccaccatctctggctaatttttgtatatttagtagagatggggtttcaccacgttgtccatgctcatctcgaactcctggcttcaagtgatccacttgtcacgaactcccaaagtgctgggattacaggtgagccactgcacctggcctaggtactattcttttatcatttactaccataaaatatatacaagtctatcatatgttaaaatttatgaaaacttaagctcactacatggcgccattcacagttgagaaatgtaaaccaatgtaaagccatattaaatcataactgcataaaatactgttctataatatagccatctgttgctactatgagctcaagtgttgctagtatccacttaaaacaccatgtgtgacacttatcactgttttatagcctattactggttatgttttgggggactcaaaagttttatgtgaatttttgattggcagtcattgttcaggggtcaccttagtgaattaactgcaaagtgagcaattttgtatccgtgacacaggtcaagagaacagaacagtgccagtactccagaagcttcctcatgaccccttgtggtcactatcctgtcccacttccctctccaaaaggtaatcattatattgg

SEQ ID NO: 109516 - DNA, 320 bp, Homo sapiens
ggtatatttgcatgatcacagaaataacaagtctaggatgaatagcactaaaatgtctaagatatatataatattgaccaagatttctctctttttttcctctctctcacctctcgtgttcttctcctcccaccacatactcatcaacacaaccatcaatcaatgacactaacagaatcacttctttatcagaacttaaaccacaaaagaggtatcctgtaattccataatctgttctgctcattaaatcctgggttttaagtgagtaaataaattatttgatgagaagtatttcgacctgaagtaatactatttaagaa

SEQ ID NO: 109517 - DNA, 364 bp, Homo sapiens
gatcaccgcagccttgacctctggggctcagctcaggtgatcctcccatctcagcctccccagtagctgggactacaggtacatgtcaccatgctcgggtaatttttgtattttttgtagagatggggttttgccatgttgcccaggttggtcttgaactcctggagttaagcaatctgcgtgcctcagcctccagagtgctggggttacaggcatgagccaccacactcagctggttgttttttgtttaagacaggaggaggttgctctgtcgcacaggatgaaatgcagtggcacaatcatggatctgggctgcatccttgatctcctgggctttaagcaatccttccacctcagcctgggt

SEQ ID NO: 109518 - DNA, 778 bp, Homo sapiens
gggaagaagactgaaacatatgctcacttctctccagattgcataaatgccttcgccttttacttagcactgctccggaactgtatggaagttgctattatttgaatgtttaaggtaccatttattgtaacgggtttttggagttatgaaaaagcacctttgcaggccaatcagtgcacactggcagaaaggataaattacaaagctgaaagaaagaccctctttgagtgtattggaagcttttatgtataagtctaataatagaatgagaaagctgaatgagaaagttagataagggatatgatggagactgcagggcagaaccaccattaaatcatgataattctataggtcaaaaggttttctttgtctctgatgcctgcagagttataactgaatcctactagaagggaaatgcagggttcagtcccttctcatctttcttcttggagagatgaatcctgattcacaggcctaaatcttctattaggggaagctttgtgggacccagagtagccaccctaacttttccgcaattgagctacccctgacaaaaaaagtaggcgtgaagacccagaatgcttagtttaatcagttttaaatgaaaagtgaaactttgttttctataacataaatatatgtccttcaaaacatgtggtaagctgtgtttcatttttagaaggtatatacttttaaataaatgagtaattcaggaattggagaacattacgctaagtgaagtatgtcaggcaaagaaagacaaatactgcatgatctc

SEQ ID NO: 109519 - DNA, 1470 bp, Homo sapiens
cacctctgctgctgagcagccccccagccccctgggccgagagcctgggggtccgcctggcagcttcctgacctcccgtcggccccgcttacctctcacggtgccctttccacccacctgggctgaggaccctgggccagcctatggagatgcctcaggcccagagccagcacgagacatccgctgcgagttctgtggtgagttcttcgagaaccgcaagggcctctcgagccacgcgcgctcccatctgcggcaaatgggcgtgaccgagtggtacgtcaatggctcgcccatcgacacgctgcgggagatcctgaagagacggacccagtctcggcctggtggacctcccaacccaccagggccaagcccaaaagccctggccaagatgatgggcggcgcaggtcctggcagctcactggaagcccgcagcccctcggaccttcacatctcacccttggccaagaagttgccaccaccaccgggcagccccctgggccactcactcctgctccctctcccttttcactgttgctttctatgtatagctccctagacctttcacttttttaaaaacgcgttttgtgtaaaaaagaaaaaaaaaaaaaaaaggaggggcgggccccgaccgatacaactccccggggcgggcagcctcactatatacactacccgccccgttgtataatggtgagcagagggcggaccatcataggacgagcatataatgaaacccacgagactgacacgcggcgcttattcacaacgacggaggagcgcaggggagacgaagacactgagatcacgaccgcgttgagctaggggcaagaacccccaaccatctgcgcgtgacgtaaccaaacatcgaggccacacacagtccaccaccaagaagaacacagccggcagcgcggaacacataaccaacaaacacacggacggactaaaacgtcagcgacaacaacaccacacactgggtggcgcgcagaaagaagcaaagattgcactacacacagtcgaacgactcgaaagaaacaaacatactcagcagcggaacggagtgaactaacctcccgcccacacgaaaccgagacacccacgtcatcctagcgagcacacaccagagacgacgagcggagacatgacgaatcgagagaagagagaagagaacaacagacgacgacagagcacgcgacgcaaacagcaggccgacaaacacacgccacaggcgatgcagcacagagtcacgcacaaacacagcagcgagcaacgtcacaacacgaccaaacactgaccacgcacgacacaagaaacggagagccgaaccacgagaggcccgacaacgagcatagatcgaaccgacagacgcaacagaagagcgacagacaccatgagcgagacgaccaacaggcaccacgacccgaaggaccgaaccgcaccacaaactgaaccgcgagaatcacaaaaaca

SEQ ID NO: 109520 - DNA, 4715 bp, Homo sapiens
agcaggcggtgattgaaatgtgttgccggccttgtggggttccctaggtctgcggaacggcaccgtcgggggacggttggataacaggatgatactggagggattcttgtggttggagatcaggcctgggttctgaggaaaacgcaatggtggccatggacttgggctctccctcgctccctaagaagagcctgcctgtccctggggccctggagcaggtggccagtcggctgagcagcaaagtggctgcagaggttcctcatggcagcaaacaggagctgcaggacctcaaggcccagagcctgaccacctgcgaggtctgcggtgcctgctttgagacccgaaagggcctgtccagccacgcgcgctcccacctgcggcagctgggagtggcagagtcggaaagcagcggcgcacccatcgacctcctctacgagcttgtgaagcagaagggtctgcctgacgcccaccttgggctgcccccaggcctggctaagaagtccagctcactgaaggaggtggtcgccggggccccccggcccggcttgctcagcctggccaagcccttggatgcccctgctgtcaacaaagccatcaagtcgcctcccggcttctcggccaagggcctgggccacccgcccagctctccactcctcaaaaagacaccactggccctggcgggctcccctacccctaagaatcctgaggacaagagcccccagctgtccctgagcccccggccggcctccccaaaggcacagtggcctcagtctgaggatgaggggcccttgaacctcactttagatagtgacgggggcagagagctggactgccagctgtgcggtgcctggtttgagacccgcaagggcctgtctagccacgcccgtgcccacctgcgccacctgggcgtcagcgatccggacgccaagggatcccccatagacgtgctccacgggctcatcaggagggacggcgtccagatccgcctcccacccaggcgcggcgccctggcccacccggggcggccgcctcccacctccgcggccctctccttgcttccccccccaccgccggccaagaaggccaagctgaaggccgcgggtatggccagcccctgggggaagcaggacctctcggccgccgcagccgccggcattttctgggcctctgatgtggagccgtctcctctcaacctctcctcaggcccagagccagcacgagacatccgctgcgagttctgtggtgagttcttcgagaaccgcaagggcctctcgagccacgcgcgctcccatctgcggcaaatgggcgtgaccgagtggtacgtcaatggctcgcccatcgacacgctgcgggagatcctgaagagacggacccagtctcggcctggtggacctcccaacccaccagggccaagcccaaaagccctggccaagatgatgggcggcgcaggtcctggcagctcactggaagcccgcagcccctcggaccttcacatctcacccttggccaagaagttgccaccaccaccgggcagccccctgggccactcaccaactgcctctcctcctcctacggcccgaaagatgttcccaggcctggctgcaccctccttgcccaagaagctgaagcctgaacaaatacgggtggagatcaagcgggagatgctgccgggggcccttcatggggaactgcacccatctgagggtccctggggggcaccacgggaagacatgacacccctgaacctgtcgtcccgggcagagccggtgcgcgacatccgctgtgagttctgcggcgagttcttcgagaaccgcaagggcctgtcgagtcacgcgcgctcacacctgcggcagatgggtgtgaccgagtggtccgtcaatggttcgcccatcgacacactgcgagagatcctcaagaagaagtccaagccgtgcctcatcaagaaggagccaccggctggagacctggcccctgccctggctgaggacgggcctcccaccgtggcccctgggcccgtgcagtccccactgccgctgtcgcccctggctggccggccaggcaaaccaggtgcagggccggcccaggttcctcgtgagctcagcctgacgcccatcactggggccaagccctcagccactggctacctgggctcagtggcagccaagcggcccctgcaggaggaccgcctcctcccagcagaggtcaaggccaagacctacatccagactgaactgcccttcaaggcaaagacccttcatgagaagacctcccactcctccaccgaggcctgctgcgagctgtgtggcctttactttgaaaaccgcaaggccctggccagccacgcacgggcacacctgcggcagttcggcgtgaccgagtggtgcgtcaatggctcgcccatcgagacactgagcgagtggatcaaacaccggccccagaaggtgggcgcctaccgcagctacatccagggcggccgccccttcaccaagaagttccgcagtgccggccatggccgtgacagtgacaagcggccgtccctggggctggcacccgggggcctggccgtggtcggccgcagtgccggaggggagccagggcccgaggctggccgggcagccgacggtggtgagcggcctctggcagccagcccgccaggcaccgtgaaggctgaggagcaccagcggcagaacatcaacaaatttgaacgccgacaagcccgccctccagatgcctccgcagcccggggaggcgaggacaccaatgacctacagcagaagctggaggaggtgcggcaacccccaccccgagtccggccagtcccctccctggtgccccggcccccccagacatcacttgtcaagttcgtgggcaacatctacaccctcaaatgcaggttctgtgaggtggaattccagggccccctctccatccaggaagagtgggtgcggcacttacagcggcacatcctggagatgaacttctccaaagcggaccccccacctgaggagtcccaggccccgcaggcacagacagcggcggcagaggctccctaacacaaaagcattccagatcccctctcgtgccacctctgtctcctcttcttcctcctctgtgtcctcgtccctcttcctctttctttccgtttccaaaggagcaagccaaaacctcaaaccggcgccccttgggggccgggcacactacagccagggcgccgggagccagctagctgcccttcccccagcccgaggactctggggccacagggtgtcttccttcagcccatgcccacctggtccagcaggggcagcagccaggtctctgatggcagccggtctggtcacaggggaggacagcactcccccgtctagcagccaggcagggcgatgtctgccatccgtggccatttgcaaagaccccaaagacccctgttctggttccctctctcccccatgaatatcctctcacacacatgtacatgcgaacacacacaacacgcacctcgtgagacccgggacctgccccggacccccagttcctgggttgaacgaccacatcatgccacggtgcttgctcaggggaagccacgctccctctgtggggcctgctggggcctgggagccccccactgagcccacaatgccacggaaatccttgttggctgcccccgagaggggccttcccagctgggaagagctcagagctgacagctgcctcctgccatgtcaaggccccccaaagagcctcaggggctctggggccctggagggtggggttggggggtgggactctcctcccccactcctgctccctctcccttttcactgttgctttctatgtatagctccctagacctttcacttttttaaaaacgcgttttgtgtagagaataaggaacgtggatctttttattttgcaatcctgggccagctagaagccaggagctgattgaccttttaacttttttcagtggccacattttggttatcgatgtacctagaagtatgtaaattagattaaatttctcttctggaaacaccctggggcaggcggccagcgtgtgtttttctgtcaagtggacaggctggcattggctggcagccggggctgggatcggggcctcctctgtccagagcgccatggaggccctgggttttccagttggccgccaagccgaccagacgcagctggggatgagcccaagttcccagctgttggctctttaggccatggctgggagggggtctctggctggctggcaaagcggctccagtgagcagatgaaccagggttctgggcagcctgtctgggaagggagccaggatcaagaagcagttgaggctagaggagcttatcaaaggcaggagctaccagcgagggtgtcagggacccgttgggagcatttgggtgggggccagtggggttgtagagagctggaactcacctgcttttaatacatgtgacttctagtgagacacatgcacccctgacccaaggaacatgcggggaaaagaggagccactggctcctttgcgatgttatttattttctcgctctgcaaatgtttattgaacatttctgagattttaagagattttgttggctgctccttcttgtttattgcatgtggtttttcagctcatcgtttttactaaacggtcaagtgctggagagtgggaacgacctcatggcgtgtggacagaaggggccacctctac

SEQ ID NO: 109521 - DNA, 4316 bp, Homo sapiens
agcaggcggtgattgaaatgtgttgccggccttgtggggttccctaggtctgcggaacggcaccgtcgggggacggttggataacaggatgatactggagggattcttgtggttggagatcaggcctgggttctgaggaaaacgcaatggtggccatggacttgggctctccctcgctccctaagaagagcctgcctgtccctggggccctggagcaggtggccagtcggctgagcagcaaagtggctgcagaggttcctcatggcagcaaacaggagctgcaggacctcaaggcccagagcctgaccacctgcgaggtctgcggtgcctgctttgagacccgaaagggcctgtccagccacgcgcgctcccacctgcggcagctgggagtggcagagtcggaaagcagcggcgcacccatcgacctcctctacgagcttgtgaagcagaagggtctgcctgacgcccaccttgggctgcccccaggcctggctaagaagtccagctcactgaaggaggtggtcgccggggccccccggcccggcttgctcagcctggccaagcccttggatgcccctgctgtcaacaaagccatcaagtcgcctcccggcttctcggccaagggcctgggccacccgcccagctctccactcctcaaaaagacaccactggccctggcgggctcccctacccctaagaatcctgaggacaagagcccccagctgtccctgagcccccggccggcctccccaaaggcacagtggcctcagtctgaggatgaggggcccttgaacctcacctcaggcccagagccagcacgagacatccgctgcgagttctgtggtgagttcttcgagaaccgcaagggcctctcgagccacgcgcgctcccatctgcggcaaatgggcgtgaccgagtggtacgtcaatggctcgcccatcgacacgctgcgggagatcctgaagagacggacccagtctcggcctggtggacctcccaacccaccagggccaagcccaaaagccctggccaagatgatgggcggcgcaggtcctggcagctcactggaagcccgcagcccctcggaccttcacatctcacccttggccaagaagttgccaccaccaccgggcagccccctgggccactcaccaactgcctctcctcctcctacggcccgaaagatgttcccaggcctggctgcaccctccttgcccaagaagctgaagcctgaacaaatacgggtggagatcaagcgggagatgctgccgggggcccttcatggggaactgcacccatctgagggtccctggggggcaccacgggaagacatgacacccctgaacctgtcgtcccgggcagagccggtgcgcgacatccgctgtgagttctgcggcgagttcttcgagaaccgcaagggcctgtcgagtcacgcgcgctcacacctgcggcagatgggtgtgaccgagtggtccgtcaatggttcgcccatcgacacactgcgagagatcctcaagaagaagtccaagccgtgcctcatcaagaaggagccaccggctggagacctggcccctgccctggctgaggacgggcctcccaccgtggcccctgggcccgtgcagtccccactgccgctgtcgcccctggctggccggccaggcaaaccaggtgcagggccggcccaggttcctcgtgagctcagcctgacgcccatcactggggccaagccctcagccactggctacctgggctcagtggcagccaagcggcccctgcaggaggaccgcctcctcccagcagaggtcaaggccaagacctacatccagactgaactgcccttcaaggcaaagacccttcatgagaagacctcccactcctccaccgaggcctgctgcgagctgtgtggcctttactttgaaaaccgcaaggccctggccagccacgcacgggcacacctgcggcagttcggcgtgaccgagtggtgcgtcaatggctcgcccatcgagacactgagcgagtggatcaaacaccggccccagaaggtgggcgcctaccgcagctacatccagggcggccgccccttcaccaagaagttccgcagtgccggccatggccgtgacagtgacaagcggccgtccctggggctggcacccgggggcctggccgtggtcggccgcagtgccggaggggagccagggcccgaggctggccgggcagccgacggtggtgagcggcctctggcagccagcccgccaggcaccgtgaaggctgaggagcaccagcggcagaacatcaacaaatttgaacgccgacaagcccgccctccagatgcctccgcagcccggggaggcgaggacaccaatgacctacagcagaagctggaggaggtgcggcaacccccaccccgagtccggccagtcccctccctggtgccccggcccccccagacatcacttgtcaagttcgtgggcaacatctacaccctcaaatgcaggttctgtgaggtggaattccagggccccctctccatccaggaagagtgggtgcggcacttacagcggcacatcctggagatgaacttctccaaagcggaccccccacctgaggagtcccaggccccgcaggcacagacagcggcggcagaggctccctaacacaaaagcattccagatcccctctcgtgccacctctgtctcctcttcttcctcctctgtgtcctcgtccctcttcctctttctttccgtttccaaaggagcaagccaaaacctcaaaccggcgccccttgggggccgggcacactacagccagggcgccgggagccagctagctgcccttcccccagcccgaggactctggggccacagggtgtcttccttcagcccatgcccacctggtccagcaggggcagcagccaggtctctgatggcagccggtctggtcacaggggaggacagcactcccccgtctagcagccaggcagggcgatgtctgccatccgtggccatttgcaaagaccccaaagacccctgttctggttccctctctcccccatgaatatcctctcacacacatgtacatgcgaacacacacaacacgcacctcgtgagacccgggacctgccccggacccccagttcctgggttgaacgaccacatcatgccacggtgcttgctcaggggaagccacgctccctctgtggggcctgctggggcctgggagccccccactgagcccacaatgccacggaaatccttgttggctgcccccgagaggggccttcccagctgggaagagctcagagctgacagctgcctcctgccatgtcaaggccccccaaagagcctcaggggctctggggccctggagggtggggttggggggtgggactctcctcccccactcctgctccctctcccttttcactgttgctttctatgtatagctccctagacctttcacttttttaaaaacgcgttttgtgtagagaataaggaacgtggatctttttattttgcaatcctgggccagctagaagccaggagctgattgaccttttaacttttttcagtggccacattttggttatcgatgtacctagaagtatgtaaattagattaaatttctcttctggaaacaccctggggcaggcggccagcgtgtgtttttctgtcaagtggacaggctggcattggctggcagccggggctgggatcggggcctcctctgtccagagcgccatggaggccctgggttttccagttggccgccaagccgaccagacgcagctggggatgagcccaagttcccagctgttggctctttaggccatggctgggagggggtctctggctggctggcaaagcggctccagtgagcagatgaaccagggttctgggcagcctgtctgggaagggagccaggatcaagaagcagttgaggctagaggagcttatcaaaggcaggagctaccagcgagggtgtcagggacccgttgggagcatttgggtgggggccagtggggttgtagagagctggaactcacctgcttttaatacatgtgacttctagtgagacacatgcacccctgacccaaggaacatgcggggaaaagaggagccactggctcctttgcgatgttatttattttctcgctctgcaaatgtttattgaacatttctgagattttaagagattttgttggctgctccttcttgtttattgcatgtggtttttcagctcatcgtttttactaaacggtcaagtgctggagagtgggaacgacctcatggcgtgtggacagaaggggccacctctac

SEQ ID NO: 109522 - DNA, 4033 bp, Homo sapiens
agcaggcggtgattgaaatgtgttgccggccttgtggggttccctaggtctgcggaacggcaccgtcgggggacggttggataacaggatgatactggagggattcttgtggttggagatcaggcctgggttctgaggaaaacgcaatggtggccatggacttgggctctccctcgctccctaagaagagcctgcctgtccctggggccctggagcaggtggccagtcggctgagcagcaaagtggctgcagaggttcctcatggcagcaaacaggagctgcaggacctcaaggcccagagcctgaccacctgcgaggtctgcggtgcctgctttgagacccgaaagggcctgtccagccacgcgcgctcccacctgcggcagctgggagtggcagagtcggaaagcagcggcgcacccatcgacctcctctacgagcttgtgaagcagaagggtctgcctgacgcccaccttgggctgcccccaggcctggctaagaagtccagctcactgaaggaggtggtcgccggggccccccggcccggcttgctcagcctggccaagcccttggatgcccctgctgtcaacaaagccatcaagtcgcctcccggcttctcggccaagggcctgggccacccgcccagctctccactcctcaaaaagacaccactggccctggcgggctcccctacccctaagaatcctgaggacaagagcccccagctgtccctgagcccccggccggcctccccaaaggcacagtggcctcagtctgaggatgaggggcccttgaacctcactttagatagtgacgggggcagagagctggactgccagctgtgcggtgcctggtttgagacccgcaagggcctgtctagccacgcccgtgcccacctgcgccacctgggcgtcagcgatccggacgccaagggatcccccatagacgtgctccacgggctcatcaggagggacggcgtccagatccgcctcccacccaggcgcggcgccctggcccacccggggcggccgcctcccacctccgcggccctctccttgcttccccccccaccgccggccaagaaggccaagctgaaggccgcgggtatggccagcccctgggggaagcaggacctctcggccgccgcagccgccggcattttctgggcctctgatgtggagccgtctcctctcaacctctcctcaggcccagagccagcacgagacatccgctgcgagttctgtggtgagttcttcgagaaccgcaagggcctctcgagccacgcgcgctcccatctgcggcaaatgggcgtgaccgagtggtacgtcaatggctcgcccatcgacacgctgcgggagatcctgaagagacggacccagtctcggcctggtggacctcccaacccaccagggccaagcccaaaagccctggccaagatgatgggcggcgcaggtcctggcagctcactggaagcccgcagcccctcggaccttcacatctcacccttggccaagaagttgccaccaccaccgggcagccccctgggccactcaccaactgcctctcctcctcctacggcccgaaagatgttcccaggcctggctgcaccctccttgcccaagaagctgaagcctgaacaaatacgggtggagatcaagcgggagatgctgccgggggcccttcatggggaactgcacccatctgagggtccctggggggcaccacgggaagacatgacacccctgaacctgtcgtcccgggcagagccggtgcgcgacatccgctgtgagttctgcggcgagttcttcgagaaccgcaagggcctgtcgagtcacgcgcgctcacacctgcggcagatgggtgtgaccgagtggtccgtcaatggttcgcccatcgacacactgcgagagatcctcaagaagaagtccaagccgtgcctcatcaagaaggagccaccggctggagacctggcccctgccctggctgaggacgggcctcccaccgtggcccctgggcccgtgcagtccccactgccgctgtcgcccctggctggccggccaggcaaaccaggtgcagggccggcccaggttcctcgtgagctcagcctgacgcccatcactggggccaagccctcagccactggctacctgggctcagtggcagccaagcggcccctgcaggaggaccgcctcctcccagcagaggtcaaggccaagacctacatccagactgaactgcccttcaaggcaaagacccttcatgagaagacctcccactcctccaccgaggcctgctgcgagctgtgtggcctttactttgaaaaccgcaaggccctggccagccacgcacgggcacacctgcggcagttcggcgtgaccgagtggtgcgtcaatggctcgcccatcgagacactgagcgagtggatcaaacaccggccccagaaggtgggcgcctaccgcagctacatccagggcggccgccccttcaccaagaagttccgcagtgccggccatggccgtgacagtgacaagcggccgtccctggggctggcacccgggggcctggccgtggtcggccgcagtgccggaggggagccagggcccgaggctggccgggcagccgacggtggtgagcggcctctggcagccagcccgccaggcaccgtgaaggctgaggagcaccagcggcagaacatcaacaaatttgaacgccgacaagcccgccctccagatgcctccgcagcccggggaggcgaggacaccaatgacctacagcagaagctggaggaggtgcggcaacccccaccccgagtccggccagtcccctccctggtgccccggcccccccagacatcacttgtcaagttcgtgggcaacatctacaccctcaaatgcaggttctgtgaggtggaattccagggccccctctccatccaggaagagtgggtgcggcacttacagcggcacatcctggagatgaacttctccaaagcggaccccccacctgaggagtcccaggccccgcaggcacagacagcggcggcagaggctccctaacacaaaagcattccagatcccctctcgtgccacctctgtctcctcttcttcctcctctgtgtcctcgtccctcttcctctttctttccgtttccaaaggagcaagccaaaacctcaaaccggcgccccttgggggccgggcacactacagccagggcgccgggagccagctagctgcccttcccccagcccgaggactctggggccacagggtgtcttccttcagcccatgcccacctggtccagcaggggcagcagccaggtctctgatggcagccggtctggtcacaggggaggacagcactcccccgtctagcagccaggcagggcgatgtctgccatccgtggccatttgcaaagaccccaaagacccctgttctggttccctctctcccccatgaatatcctctcacacacatgtacatgcgaacacacacaacacgcacctcgtgagacccgggacctgccccggacccccagttcctgggttgaacgaccacatcatgccacggtgcttgctcaggggaagccacgctccctctgtggggcctgctggggcctgggagccccccactgagcccacaatgccacggaaatccttgttggctgcccccgagaggggccttcccagctgggaagagctcagagctgacagctgcctcctgccatgtcaaggccccccaaagagcctcaggggctctggggccctggagggtggggttggggggtgggactctcctcccccactcctgctccctctcccttttcactgttgctttctatgtatagctccctagacctttcacttttttaaaaacgcgttttgtgtagagaataaggaacgtggatctttttattttgcaatcctgggccagctagaagccaggagctgattgaccttttaacttttttcagtggccacattttggttatcgatgtacctagaagtatgtaaattagattaaatttctcttctggaaa

SEQ ID NO: 109523 - DNA, 4988 bp, Homo sapiens
agcaggcggtgattgaaatgtgttgccggccttgtggggttccctaggtctgcggaacggcaccgtcgggggacggttggataacaggatgatactggagggattcttgtggttggagatcaggcctgggttctgaggaaaacgcaatggtggccatggacttgggctctccctcgctccctaagaagagcctgcctgtccctggggccctggagcaggtggccagtcggctgagcagcaaagtggctgcagaggttcctcatggcagcaaacaggagctgcaggacctcaaggcccagagcctgaccacctgcgaggtctgcggtgcctgctttgagacccgaaagggcctgtccagccacgcgcgctcccacctgcggcagctgggagtggcagagtcggaaagcagcggcgcacccatcgacctcctctacgagcttgtgaagcagaagggtctgcctgacgcccaccttgggctgcccccaggcctggctaagaagtccagctcactgaaggaggtggtcgccggggccccccggcccggcttgctcagcctggccaagcccttggatgcccctgctgtcaacaaagccatcaagtcgcctcccggcttctcggccaagggcctgggccacccgcccagctctccactcctcaaaaagacaccactggccctggcgggctcccctacccctaagaatcctgaggacaagagcccccagctgtccctgagcccccggccggcctccccaaaggcacagtggcctcagtctgaggatgaggggcccttgaacctcactttagatagtgacgggggcagagagctggactgccagctgtgcggtgcctggtttgagacccgcaagggcctgtctagccacgcccgtgcccacctgcgccacctgggcgtcagcgatccggacgccaagggatcccccatagacgtgctccacgggctcatcaggagggacggcgtccagatccgcctcccacccaggcgcggcgccctggcccacccggggcggccgcctcccacctccgcggccctctccttgcttccccccccaccgccggccaagaaggccaagctgaaggccgcgggtatggccagcccctgggggaagcaggacctctcggccgccgcagccgccggcattttctgggcctctgatgtggagccgtctcctctcaacctctcctcaggcccagagccagcacgagacatccgctgcgagttctgtggtgagttcttcgagaaccgcaagggcctctcgagccacgcgcgctcccatctgcggcaaatgggcgtgaccgagtggtacgtcaatggctcgcccatcgacacgctgcgggagatcctgaagagacggacccagtctcggcctggtggacctcccaacccaccagggccaagcccaaaagccctggccaagatgatgggcggcgcaggtcctggcagctcactggaagcccgcagcccctcggaccttcacatctcacccttggccaagaagttgccaccaccaccgggcagccccctgggccactcaccaactgcctctcctcctcctacggcccgaaagatgttcccaggcctggctgcaccctccttgcccaagaagctgaagcctgaacaaatacgggtggagatcaagcgggagatgctgccgggggcccttcatggggaactgcacccatctgagggtccctggggggcaccacgggaagacatgacacccctgaacctgtcgtcccgggcagagccggtgcgcgacatccgctgtgagttctgcggcgagttcttcgagaaccgcaagggcctgtcgagtcacgcgcgctcacacctgcggcagatgggtgtgaccgagtggtccgtcaatggttcgcccatcgacacactgcgagagatcctcaagaagaagtccaagccgtgcctcatcaagaaggagccaccggctggagacctggcccctgccctggctgaggacgggcctcccaccgtggcccctgggcccgtgcagtccccactgccgctgtcgcccctggctggccggccaggcaaaccaggtgcagggccggcccaggttcctcgtgagctcagcctgacgcccatcactggggccaagccctcagccactggctacctgggctcagtggcagccaagcggcccctgcaggaggaccgcctcctcccagcagaggtcaaggccaagacctacatccagactgaactgcccttcaaggcaaagacccttcatgagaagacctcccactcctccaccgaggcctgctgcgagctgtgtggcctttactttgaaaaccgcaaggccctggccagccacgcacgggcacacctgcggcagttcggcgtgaccgagtggtgcgtcaatggctcgcccatcgagacactgagcgagtggatcaaacaccggccccagaaggtgggcgcctaccgcagctacatccagggcggccgccccttcaccaagaagttccgcagtgccggccatggccgtgacagtgacaagcggccgtccctggggctggcacccgggggcctggccgtggtcggccgcagtgccggaggggagccagggcccgaggctggccgggcagccgacggtggtgagcggcctctggcagccagcccgccaggcaccgtgaaggctgaggagcaccagcggcagaacatcaacaaatttgaacgccgacaagcccgccctccagatgcctccgcagcccggggaggcgaggacaccaatgacctacagcagaagctggaggaggtgcggcaacccccaccccgagtccggccagtcccctccctggtgccccggcccccccagacatcacttgtcaagttcgtgggcaacatctacaccctcaaatgcaggttctgtgaggtggaattccagggccccctctccatccaggaagagtgggtgcggcacttacagcggcacatcctggagatgaacttctccaaagcggaccccccacctgaggagtcccaggccccgcaggcacagacagcggcggcagaggctccctaacacaaaagcattccagatcccctctcgtgccacctctgtctcctcttcttcctcctctgtgtcctcgtccctcttcctctttctttccgtttccaaaggagcaagccaaaacctcaaaccggcgccccttgggggccgggcacactacagccagggcgccgggagccagctagctgcccttcccccagcccgaggactctggggccacagggtgtcttccttcagcccatgcccacctggtccagcaggggcagcagccaggtctctgatggcagccggtctggtcacaggggaggacagcactcccccgtctagcagccaggcagggcgatgtctgccatccgtggccatttgcaaagaccccaaagacccctgttctggttccctctctcccccatgaatatcctctcacacacatgtacatgcgaacacacacaacacgcacctcgtgagacccgggacctgccccggacccccagttcctgggttgaacgaccacatcatgccacggtgcttgctcaggggaagccacgctccctctgtggggcctgctggggcctgggagccccccactgagcccacaatgccacggaaatccttgttggctgcccccgagaggggccttcccagctgggaagagctcagagctgacagctgcctcctgccatgtcaaggccccccaaagagcctcaggggctctggggccctggagggtggggttggggggtgggactctcctcccccactcctgctccctctcccttttcactgttgctttctatgtatagctccctagacctttcacttttttaaaaacgcgttttgtgtagagaataaggaacgtggatctttttattttgcaatcctgggccagctagaagccaggagctgattgaccttttaacttttttcagtggccacattttggttatcgatgtacctagaagtatgtaaattagattaaatttctcttctggaaaaaaaaaaaaaaaaaaaaaaaaaaaaaaaaaaaaaaaaaaaaaaaaaaaaaaaaaaaaaaaaaaaaaaagaaaaaaaaaagaaaaaaaaaaaaaaaaggaggggcgggccccgaccgatacaactccccggggcgggcagcctcactatatacactacccgccccgttgtataatggtgagcagagggcggaccatcataggacgagcatataatgaaacccacgagactgacacgcggcgcttattcacaacgacggaggagcgcaggggagacgaagacactgagatcacgaccgcgttgagctaggggcaagaacccccaaccatctgcgcgtgacgtaaccaaacatcgaggccacacacagtccaccaccaagaagaacacagccggcagcgcggaacacataaccaacaaacacacggacggactaaaacgtcagcgacaacaacaccacacactgggtggcgcgcagaaagaagcaaagattgcactacacacagtcgaacgactcgaaagaaacaaacatactcagcagcggaacggagtgaactaacctcccgcccacacgaaaccgagacacccacgtcatcctagcgagcacacaccagagacgacgagcggagacatgacgaatcgagagaagagagaagagaacaacagacgacgacagagcacgcgacgcaaacagcaggccgacaaacacacgccacaggcgatgcagcacagagtcacgcacaaacacagcagcgagcaacgtcacaacacgaccaaacactgaccacgcacgacacaagaaacggagagccgaaccacgagaggcccgacaacgagcatagatcgaaccgacagacgcaacagaagagcgacagacaccatgagcgagacgaccaacaggcaccacgacccgaaggaccgaaccgcaccacaaactgaaccgcgagaatcacaaaaaca

SEQ ID NO: 109524 - DNA, 2539 bp, Homo sapiens
tcacccatcgtagagtatctattggtcgcgtgtgcgtttacaaaggcaggtaactgatatcatggcaacaatgagtctcttcactgttccatgaaccgactgttgttgatcctgatagtttggcttatctgtcgagtacatcgctatggtgagtccaatcactcacggtcagcccatgttgaaactgcgttgattgacgtcgtggtgcgtcaatggctcgcccatcgagacactgagcgagtggatcaaacaccggccccagaaggtgggcgcctaccgcagctacatccagggcggccgccccttcaccaagaagttccgcagtgccggccatggccgtgacagtgacaagcggccgtccctggggctggcacccgggggcctggccgtggtcggccgcagtgccggaggggagccagggcccgaggctggccgggcagccgacggtggtgagcggcctctggcagccagcccgccaggcaccgtgaaggctgaggagcaccagcggcagaacatcaacaaatttgaacgccgacaagcccgccctccagatgcctccgcagcccggggaggcgaggacaccaatgacctacagcagaagctggaggaggtgcggcaacccccaccccgagtccggccagtcccctccctggtgccccggcccccccagacatcacttgtcaagttcgtgggcaacatctacaccctcaaatgcaggttctgtgaggtggaattccagggccccctctccatccaggaagagtgggtgcggcacttacagcggcacatcctggagatgaacttctccaaagcggaccccccacctgaggagtcccaggccccgcaggcacagacagcggcggcagaggctccctaacacaaaagcattccagatcccctctcgtgccacctctgtctcctcttcttcctcctctgtgtcctcgtccctcttcctctttctttccgtttccaaaggagcaagccaaaacctcaaaccggcgccccttgggggccgggcacactacagccagggcgccgggagccagctagctgcccttcccccagcccgaggactctggggccacagggtgtcttccttcagcccatgcccacctggtccagcaggggcagcagccaggtctctgatggcagccggtctggtcacaggggaggacagcactcccccgtctagcagccaggcagggcgatgtctgccatccgtggccatttgcaaagaccccaaagacccctgttctggttccctctctcccccatgaatatcctctcacacacatgtacatgcgaacacacacaacacgcacctcgtgagacccgggacctgccccggacccccagttcctgggttgaacgaccacatcatgccacggtgcttgctcaggggaagccacgctccctctgtggggcctgctggggcctgggagccccccactgagcccacaatgccacggaaatccttgttggctgcccccgagaggggccttcccagctgggaagagctcagagctgacagctgcctcctgccatgtcaaggccccccaaagagcctcaggggctctggggccctggagggtggggttggggggtgggactctcctcccccactcctgctccctctcccttttcactgttgctttctatgtatagctccctagacctttcacttttttaaaaacgcgttttgtgtagagaataaggaacgtggatctttttattttgcaatcctgggccagctagaagccaggagctgattgaccttttaacttttttcagtggccacattttggttatcgatgtacctagaagtatgtaaattagattaaatttctcttctggaaacaccctggggcaggcggccagcgtgtgtttttctgtcaagtggacaggctggcattggctggcagccggggctgggatcggggcctcctctgtccagagcgccatggaggccctgggttttccagttggccgccaagccgaccagacgcagctggggatgagcccaagttcccagctgttggctctttaggccatggctgggagggggtctctggctggctggcaaagcggctccagtgagcagatgaaccagggttctgggcagcctgtctgggaagggagccaggatcaagaagcagttgaggctagaggagcttatcaaaggcaggagctaccagcgagggtgtcagggacccgttgggagcatttgggtgggggccagtggggttgtagagagctggaactcacctgcttttaatacatgtgacttctagtgagacacatgcacccctgacccaaggaacatgcggggaaaagaggagccactggctcctttgcgatgttatttattttctcgctctgcaaatgtttattgaacatttctgagattttaagagattttgttggctgctccttcttgtttattgcatgtggtttttcagctcatcgtttttactaaacggtcaagtgctggagagtgggaacgacctcatggcgtgtggacagaaggggccacctctac

SEQ ID NO: 109525 - DNA, 3189 bp, Homo sapiens
agcaggcggtgattgaaatgtgttgccggccttgtggggttccctaggtctgcggaacggcaccgtcgggggacggttggataacaggatgatactggagggattcttgtggttggagatcaggcctgggttctgaggaaaacgcaatggtggccatggacttgggctctccctcgctccctaagaagagcctgcctgtccctggggccctggagcaggtggccagtcggctgagcagcaaagtggctgcagaggttcctcatggcagcaaacaggagctgcaggacctcaaggcccagagcctgaccacctgcgaggtctgcggtgcctgctttgagacccgaaagggcctgtccagccacgcgcgctcccacctgcggcagctgggagtggcagagtcggaaagcagcggcgcacccatcgacctcctctacgagcttgtgaagcagaagggtctgcctgacgcccaccttgggctgcccccaggcctggctaagaagtccagctcactgaaggaggtggtcgccggggccccccggcccggcttgctcagcctggccaagcccttggatgcccctgctgtcaacaaagccatcaagtcgcctcccggcttctcggccaagggcctgggccacccgcccagctctccactcctcaaaaagacaccactggccctggcgggctcccctacccctaagaatcctgaggacaagagcccccagctgtccctgagcccccggccggcctccccaaaggcacagtggcctcagtctgaggatgaggggcccttgaacctcactttagatagtgacgggggcagagagctggactgccagctgtgcggtgcctggtttgagacccgcaagggcctgtctagccacgcccgtgcccacctgcgccacctgggcgtcagcgatccggacgccaagggatcccccatagacgtgctccacgggctcatcaggagggacggcgtccagatccgcctcccacccaggcgcggcgccctggcccacccggggcggccgcctcccacctccgcggccctctccttgcttccccccccaccgccggccaagaaggccaagctgaaggccgcgggtatggccagcccctgggggaagcaggacctctcggccgccgcagccgccggcattttctgggcctctgatgtggagccgtctcctctcaacctctcctcaggcccagagccagcacgagacatccgctgcgagttctgtggtgagttcttcgagaaccgcaagggcctctcgagccacgcgcgctcccatctgcggcaaatgggcgtgaccgagtggtacgtcaatggctcgcccatcgacacgctgcgggagatcctgaagagacggacccagtctcggcctggtggacctcccaacccaccagggccaagcccaaaagccctggccaagatgatgggcggcgcaggtcctggcagctcactggaagcccgcagcccctcggaccttcacatctcacccttggccaagaagttgccaccaccaccgggcagccccctgggccactcaccaactgcctctcctcctcctacggcccgaaagatgttcccaggcctggctgcaccctccttgcccaagaagctgaagcctgaacaaatacgggtggagatcaagcgggagatgctgccgggggcccttcatggggaactgcacccatctgagggtccctggggggcaccacgggaagacatgacacccctgaacctgtcgtcccgggcagagccggtgcgcgacatccgctgtgagttctgcggcgagttcttcgagaaccgcaagggcctgtcgagtcacgcgcgctcacacctgcggcagatgggtgtgaccgagtggtccgtcaatggttcgcccatcgacacactgcgagagatcctcaagaagaagtccaagccgtgcctcatcaagaaggagccaccggctggagacctggcccctgccctggctgaggacgggcctcccaccgtggcccctgggcccgtgcagtccccactgccgctgtcgcccctggctggccggccaggcaaaccaggtgcagggccggcccaggttcctcgtgagctcagcctgacgcccatcactggggccaagccctcagccactggctacctgggctcagtggcagccaagcggcccctgcaggaggaccgcctcctcccagcagaggtcaaggccaagacctacatccagactgaactgcccttcaaggcaaagacccttcatgagaagacctcccactcctccaccgaggcctgctgcgagctgtgtggcctttactttgaaaaccgcaaggccctggccagccacgcacgggcacacctgcggcagttcggcgtgaccgagtggtgcgtcaatggctcgcccatcgagacactgagcgagtggatcaaacaccggccccagaaggtgggcgcctaccgcagctacatccagggcggccgccccttcaccaagaagttccgcagtgccggccatggccgtgacagtgacaagcggccgtccctggggctggcacccgggggcctggccgtggtcggccgcagtgccggaggggagccagggcccgaggctggccgggcagccgacggtggtgagcggcctctggcagccagcccgccaggcaccgtgaaggctgaggagcaccagcggcagaacatcaacaaatttgaacgccgacaagcccgccctccagatgcctccgcagcccggggaggcgaggacaccaatgacctacagcagaagctggaggaggtgcggcaacccccaccccgagtccggccagtcccctccctggtgccccggcccccccagacatcacttgtcaagttcgtgggcaacatctacaccctcaaatgcaggtaggctgcccctgggggagggagggagaccacctgagtggaccttggtcacccggagccttggaacaggatagggtttggtggaagctgggaggtgtcgcctcagtggctgcccttgggtgtggtggggctcaggctaaaggctgacaccctgagctttgtagcctgcgagacctgggttcaaatcccaactctgccacttaccagcttagtgacctcagggaaggacttacctgctccttacctcaatttcctcactcataaaagcgggttgataacaaacctaccttacagat

SEQ ID NO: 109526 - DNA, 1958 bp, Homo sapiens
gcaaaatgacctcctttgactccatgtgtcacatctaggtgatgcaagaagtgggttcccagggtcttgggcagccccggcccccccagacatcacttgtcaagttcgtgggcaacatctacaccctcaaatgcaggttctgtgaggtggaattccagggccccctctccatccaggaagagtgggtgcggcacttacagcggcacatcctggagatgaacttctccaaagcggaccccccacctgaggagtcccaggccccgcaggcacagacagcggcggcagaggctccctaacacaaaagcattccagatcccctctcgtgccacctctgtctcctcttcttcctcctctgtgtcctcgtccctcttcctctttctttccgtttccaaaggagcaagccaaaacctcaaaccggcgccccttgggggccgggcacactacagccagggcgccgggagccagctagctgcccttcccccagcccgaggactctggggccacagggtgtcttccttcagcccatgcccacctggtccagcaggggcagcagccaggtctctgatggcagccggtctggtcacaggggaggacagcactcccccgtctagcagccaggcagggcgatgtctgccatccgtggccatttgcaaagaccccaaagacccctgttctggttccctctctcccccatgaatatcctctcacacacatgtacatgcgaacacacacaacacgcacctcgtgagacccgggacctgccccggacccccagttcctgggttgaacgaccacatcatgccacggtgcttgctcaggggaagccacgctccctctgtggggcctgctggggcctgggagccccccactgagcccacaatgccacggaaatccttgttggctgcccccgagaggggccttcccagctgggaagagctcagagctgacagctgcctcctgccatgtcaaggccccccaaagagcctcaggggctctggggccctggagggtggggttggggggtgggactctcctcccccactcctgctccctctcccttttcactgttgctttctatgtatagctccctagacctttcacttttttaaaaacgcgttttgtgtagagaataaggaacgtggatctttttattttgcaatcctgggccagctagaagccaggagctgattgaccttttaacttttttcagtggccacattttggttatcgatgtacctagaagtatgtaaattagattaaatttctcttctggaaacaccctggggcaggcggccagcgtgtgtttttctgtcaagtggacaggctggcattggctggcagccggggctgggatcggggcctcctctgtccagagcgccatggaggccctgggttttccagttggccgccaagccgaccagacgcagctggggatgagcccaagttcccagctgttggctctttaggccatggctgggagggggtctctggctggctggcaaagcggctccagtgagcagatgaaccagggttctgggcagcctgtctgggaagggagccaggatcaagaagcagttgaggctagaggagcttatcaaaggcaggagctaccagcgagggtgtcagggacccgttgggagcatttgggtgggggccagtggggttgtagagagctggaactcacctgcttttaatacatgtgacttctagtgagacacatgcacccctgacccaaggaacatgcggggaaaagaggagccactggctcctttgcgatgttatttattttctcgctctgcaaatgtttattgaacatttctgagattttaagagattttgttggctgctccttcttgtttattgcatgtggtttttcagctcatcgtttttactaaacggtcaagtgctggagagtgggaacgacctcatggcgtgtggacagaaggggccacctctac

SEQ ID NO: 109527 - DNA, 2157 bp, Homo sapiens
gttgggtaggatttgcttctctgtgccctctactgtctcagattctatgtatctgccagatggcaggggtacctggaagccagtagcccttacctggcaccagtgacttctgagcacagaggcaggggtctctgtgagaccctgccatgaccccatggtgagtggaggtggctgtccatgggaaacgcctgacttctgggtccctcttcccccgcctcctgggctggctctgtccacactgagtagcagcaggtgtgcccagggatgctggcaaggctatgcttccgcctctcctcacagcactggccactccctctctctgttcccccatgcaggttctgtgaggtggaattccagggccccctctccatccaggaagagtgggtgcggcacttacagcggcacatcctggagatgaacttctccaaagcggaccccccacctgaggagtcccaggccccgcaggcacagacagcggcggcagaggctccctaacacaaaagcattccagatcccctctcgtgccacctctgtctcctcttcttcctcctctgtgtcctcgtccctcttcctctttctttccgtttccaaaggagcaagccaaaacctcaaaccggcgccccttgggggccgggcacactacagccagggcgccgggagccagctagctgcccttcccccagcccgaggactctggggccacagggtgtcttccttcagcccatgcccacctggtccagcaggggcagcagccaggtctctgatggcagccggtctggtcacaggggaggacagcactcccccgtctagcagccaggcagggcgatgtctgccatccgtggccatttgcaaagaccccaaagacccctgttctggttccctctctcccccatgaatatcctctcacacacatgtacatgcgaacacacacaacacgcacctcgtgagacccgggacctgccccggacccccagttcctgggttgaacgaccacatcatgccacggtgcttgctcaggggaagccacgctccctctgtggggcctgctggggcctgggagccccccactgagcccacaatgccacggaaatccttgttggctgcccccgagaggggccttcccagctgggaagagctcagagctgacagctgcctcctgccatgtcaaggccccccaaagagcctcaggggctctggggccctggagggtggggttggggggtgggactctcctcccccactcctgctccctctcccttttcactgttgctttctatgtatagctccctagacctttcacttttttaaaaacgcgttttgtgtagagaataaggaacgtggatctttttattttgcaatcctgggccagctagaagccaggagctgattgaccttttaacttttttcagtggccacattttggttatcgatgtacctagaagtatgtaaattagattaaatttctcttctggaaacaccctggggcaggcggccagcgtgtgtttttctgtcaagtggacaggctggcattggctggcagccggggctgggatcggggcctcctctgtccagagcgccatggaggccctgggttttccagttggccgccaagccgaccagacgcagctggggatgagcccaagttcccagctgttggctctttaggccatggctgggagggggtctctggctggctggcaaagcggctccagtgagcagatgaaccagggttctgggcagcctgtctgggaagggagccaggatcaagaagcagttgaggctagaggagcttatcaaaggcaggagctaccagcgagggtgtcagggacccgttgggagcatttgggtgggggccagtggggttgtagagagctggaactcacctgcttttaatacatgtgacttctagtgagacacatgcacccctgacccaaggaacatgcggggaaaagaggagccactggctcctttgcgatgttatttattttctcgctctgcaaatgtttattgaacatttctgagattttaagagattttgttggctgctccttcttgtttattgcatgtggtttttcagctcatcgtttttactaaacggtcaagtgctggagagtgggaacgacctcatggcgtgtggacagaaggggccacctctac

SEQ ID NO: 109528 - DNA, 1422 bp, Homo sapiens
cacctctgctgctgagcagccccccagccccctgggccgagagcctgggggtccgcctggcagcttcctgacctcccgtcggccccgcttacctctcacggtgccctttccacccacctgggctgaggaccctgggccagcctatggagatgcctcaggcccagagccagcacgagacatccgctgcgagttctgtggtgagttcttcgagaaccgcaagggcctctcgagccacgcgcgctcccatctgcggcaaatgggcgtgaccgagtggtacgtcaatggctcgcccatcgacacgctgcgggagatcctgaagagacggacccagtctcggcctggtggacctcccaacccaccagggccaagcccaaaagccctggccaagatgatgggcggcgcaggtcctggcagctcactggaagcccgcagcccctcggaccttcacatctcacccttggccaagaagttgccaccaccaccgggcagccccctgggccactcactcctgctccctctcccttttcactgttgctttctatgtatagctccctagacctttcacttttttaaaaacgcgttttgtgtagagaataaggaacgtggatctttttattttgcaatcctgggccagctagaagccaggagctgattgaccttttaacttttttcagtggccacattttggttatcgatgtacctagaagtatgtaaattagattaaatttctcttctggaaacaccctggggcaggcggccagcgtgtgtttttctgtcaagtggacaggctggcattggctggcagccggggctgggatcggggcctcctctgtccagagcgccatggaggccctgggttttccagttggccgccaagccgaccagacgcagctggggatgagcccaagttcccagctgttggctctttaggccatggctgggagggggtctctggctggctggcaaagcggctccagtgagcagatgaaccagggttctgggcagcctgtctgggaagggagccaggatcaagaagcagttgaggctagaggagcttatcaaaggcaggagctaccagcgagggtgtcagggacccgttgggagcatttgggtgggggccagtggggttgtagagagctggaactcacctgcttttaatacatgtgacttctagtgagacacatgcacccctgacccaaggaacatgcggggaaaagaggagccactggctcctttgcgatgttatttattttctcgctctgcaaatgtttattgaacatttctgagattttaagagattttgttggctgctccttcttgtttattgcatgtggtttttcagctcatcgtttttactaaacggtcaagtgctggagagtgggaacgacctcatggcgtgtggacagaaggggccacctctac

SEQ ID NO: 109529 - DNA, 485 bp, Homo sapiens
gcaccgtcgggggacggttggataacaggatgatactggagggattcttgtggttggagatcaggtgttttccaggatccccgactcggagatggagactttccggaaagggaatggggcagggtcctagggcaggtcctagctccgcccgtcggggctcttaagagttttgacgttgtttaagggggtctgagtgaggccggaagattcccatcctagggatagagatgtccggggactgggctggggcggcggttagaggccgctgggcgcccagcgtgggtgcatccgctagccagggcgcgcgacaagcttccagcagctgcagccgtccgccctcagggcccagacgaacggtttcgctcgtggcactcggcgctcggcgctcggcactcggcaggccaacctgggcgcgccctgaggggcggggcggagcgggtttggcggcggcggcagcggcactcggcactcggcgctcagctgct

SEQ ID NO: 109530 - DNA, 4694 bp, Homo sapiens
agcaggcggtgattgaaatgtgttgccggccttgtggggttccctaggtctgcggaacggcaccgtcgggggacggttggataacaggatgatactggagggattcttgtggttggagatcaggcctgggttctgaggaaaacgcaatggtggccatggacttgggctctccctcgctccctaagaagagcctgcctgtccctggggccctggagcaggtggccagtcggctgagcagcaaagtggctgcagaggttcctcatggcagcaaacaggagctgcaggacctcaaggcccagagcctgaccacctgcgaggtctgcggtgcctgctttgagacccgaaagggcctgtccagccacgcgcgctcccacctgcggcagctgggagtggcagagtcggaaagcagcggcgcacccatcgacctcctctacgagcttgtgaagcagaagggtctgcctgacgcccaccttgggctgcccccaggcctggctaagaagtccagctcactgaaggaggtggtcgccggggccccccggcccggcttgctcagcctggccaagcccttggatgcccctgctgtcaacaaagccatcaagtcgcctcccggcttctcggccaagggcctgggccacccgcccagctctccactcctcaaaaagacaccactggccctggcgggctcccctacccctaagaatcctgaggacaagagcccccagctgtccctgagcccccggccggcctccccaaaggcacagtggcctcagtctgaggatgaggggcccttgaacctcactttagatagtgacgggggcagagagctggactgccagctgtgcggtgcctggtttgagacccgcaagggcctgtctagccacgcccgtgcccacctgcgccacctgggcgtcagcgatccggacgccaagggatcccccatagacgtgctccacgggctcatcaggagggacggcgtccagatccgcctcccacccaggcgcggcgccctggcccacccggggcggccgcctcccacctccgcggccctctccttgcttccccccccaccgccggccaagaaggccaagctgaaggccgcgggtatggccagcccctgggggaagcaggacctctcggccgccgcagccgccggcattttctgggcctctgatgtggagccgtctcctctcaacctctcctcaggcccagagccagcacgagacatccgctgcgagttctgtggtgagttcttcgagaaccgcaagggcctctcgagccacgcgcgctcccatctgcggcaaatgggcgtgaccgagtggtacgtcaatggctcgcccatcgacacgctgcgggagatcctgaagagacggacccagtctcggcctggtggacctcccaacccaccagggccaagcccaaaagccctggccaagatgatgggcggcgcaggtcctggcagctcactggaagcccgcagcccctcggaccttcacatctcacccttggccaagaagttgccaccaccaccgggcagccccctgggccactcaccaactgcctctcctcctcctacggcccgaaagatgttcccaggcctggctgcaccctccttgcccaagaagctgaagcctgaacaaatacgggtggagatcaagcgggagatgctgccgggggcccttcatggggaactgcacccatctgagggtccctggggggcaccacgggaagacatgacacccctgaacctgtcgtcccgggcagagccggtgcgcgacatccgctgtgagttctgcggcgagttcttcgagaaccgcaagggcctgtcgagtcacgcgcgctcacacctgcggcagatgggtgtgaccgagtggtccgtcaatggttcgcccatcgacacactgcgagagatcctcaagaagaagtccaagccgtgcctcatcaagaaggagccaccggctggagacctggcccctgccctggctgaggacgggcctcccaccgtggcccctgggcccgtgcagtccccactgccgctgtcgcccctggctggccggccaggcaaaccaggtgcagggccggcccaggttcctcgtgagctcagcctgacgcccatcactggggccaagccctcagccactggctacctgggctcagtggcagccaagcggcccctgcaggaggaccgcctcctcccagcagaggtcaaggccaagacctacatccagactgaactgcccttcaaggcaaagacccttcatgagaagacctcccactcctccaccgaggcctgctgcgagctgtgtggcctttactttgaaaaccgcaaggccctggccagccacgcacgggcacacctgcggcagttcggcgtgaccgagtggtgcgtcaatggctcgcccatcgagacactgagcgagtggatcaaacaccggccccagaaggtgggcgcctaccgcagctacatccagggcggccgccccttcaccaagaagttccgcagtgccggccatggccgtgacagtgacaagcggccgtccctggggctggcacccgggggcctggccgtggtcggccgcagtgccggaggggagccagggcccgaggctggccgggcagccgacggtggtgagcggcctctggcagccagcccgccaggcaccgtgaaggctgaggagcaccagcggcagaacatcaacaaatttgaacgccgacaagcccgccctccagatgcctccgcagcccggggaggcgaggacaccaatgacctacagcagaagctggaggaggtgcggcaacccccaccccgagtccggccagtcccctccctggtgccccggcccccccagacatcacttgtcaagttcgtgggcaacatctacaccctcaaatgcaggttctgtgaggtggaattccagggccccctctccatccaggaagagtgggtgcggcacttacagcggcacatcctggagatgaacttctccaaagcggaccccccacctgaggagtcccaggccccgcaggcacagacagcggcggcagaggctccctaacacaaaagcattccagatcccctctcgtgccacctctgtctcctcttcttcctcctctgtgtcctcgtccctcttcctctttctttccgtttccaaaggagcaagccaaaacctcaaaccggcgccccttgggggccgggcacactacagccagggcgccgggagccagctagctgcccttcccccagcccgaggactctggggccacagggtgtcttccttcagcccatgcccacctggtccagcaggggcagcagccaggtctctgatggcagccggtctggtcacaggggaggacagcactcccccgtctagcagccaggcagggcgatgtctgccatccgtggccatttgcaaagaccccaaagacccctgttctggttccctctctcccccatgaatatcctctcacacacatgtacatgcgaacacacacaacacgcacctcgtgagacccgggacctgccccggacccccaatcatgccacggtgcttgctcaggggaagccacgctccctctgtggggcctgctggggcctgggagccccccactgagcccacaatgccacggaaatccttgttggctgcccccgagaggggccttcccagctgggaagagctcagagctgacagctgcctcctgccatgtcaaggccccccaaagagcctcaggggctctggggccctggagggtggggttggggggtgggactctcctcccccactcctgctccctctcccttttcactgttgctttctatgtatagctccctagacctttcacttttttaaaaacgcgttttgtgtagagaataaggaacgtggatctttttattttgcaatcctgggccagctagaagccaggagctgattgaccttttaacttttttcagtggccacattttggttatcgatgtacctagaagtatgtaaattagattaaatttctcttctggaaacaccctggggcaggcggccagcgtgtgtttttctgtcaagtggacaggctggcattggctggcagccggggctgggatcggggcctcctctgtccagagcgccatggaggccctgggttttccagttggccgccaagccgaccagacgcagctggggatgagcccaagttcccagctgttggctctttaggccatggctgggagggggtctctggctggctggcaaagcggctccagtgagcagatgaaccagggttctgggcagcctgtctgggaagggagccaggatcaagaagcagttgaggctagaggagcttatcaaaggcaggagctaccagcgagggtgtcagggacccgttgggagcatttgggtgggggccagtggggttgtagagagctggaactcacctgcttttaatacatgtgacttctagtgagacacatgcacccctgacccaaggaacatgcggggaaaagaggagccactggctcctttgcgatgttatttattttctcgctctgcaaatgtttattgaacatttctgagattttaagagattttgttggctgctccttcttgtttattgcatgtggtttttcagctcatcgtttttactaaacggtcaagtgctggagagtgggaacgacctcatggcgtgtggacagaaggggccacctctac

SEQ ID NO: 109531 - DNA, 4012 bp, Homo sapiens
agcaggcggtgattgaaatgtgttgccggccttgtggggttccctaggtctgcggaacggcaccgtcgggggacggttggataacaggatgatactggagggattcttgtggttggagatcaggcctgggttctgaggaaaacgcaatggtggccatggacttgggctctccctcgctccctaagaagagcctgcctgtccctggggccctggagcaggtggccagtcggctgagcagcaaagtggctgcagaggttcctcatggcagcaaacaggagctgcaggacctcaaggcccagagcctgaccacctgcgaggtctgcggtgcctgctttgagacccgaaagggcctgtccagccacgcgcgctcccacctgcggcagctgggagtggcagagtcggaaagcagcggcgcacccatcgacctcctctacgagcttgtgaagcagaagggtctgcctgacgcccaccttgggctgcccccaggcctggctaagaagtccagctcactgaaggaggtggtcgccggggccccccggcccggcttgctcagcctggccaagcccttggatgcccctgctgtcaacaaagccatcaagtcgcctcccggcttctcggccaagggcctgggccacccgcccagctctccactcctcaaaaagacaccactggccctggcgggctcccctacccctaagaatcctgaggacaagagcccccagctgtccctgagcccccggccggcctccccaaaggcacagtggcctcagtctgaggatgaggggcccttgaacctcactttagatagtgacgggggcagagagctggactgccagctgtgcggtgcctggtttgagacccgcaagggcctgtctagccacgcccgtgcccacctgcgccacctgggcgtcagcgatccggacgccaagggatcccccatagacgtgctccacgggctcatcaggagggacggcgtccagatccgcctcccacccaggcgcggcgccctggcccacccggggcggccgcctcccacctccgcggccctctccttgcttccccccccaccgccggccaagaaggccaagctgaaggccgcgggtatggccagcccctgggggaagcaggacctctcggccgccgcagccgccggcattttctgggcctctgatgtggagccgtctcctctcaacctctcctcaggcccagagccagcacgagacatccgctgcgagttctgtggtgagttcttcgagaaccgcaagggcctctcgagccacgcgcgctcccatctgcggcaaatgggcgtgaccgagtggtacgtcaatggctcgcccatcgacacgctgcgggagatcctgaagagacggacccagtctcggcctggtggacctcccaacccaccagggccaagcccaaaagccctggccaagatgatgggcggcgcaggtcctggcagctcactggaagcccgcagcccctcggaccttcacatctcacccttggccaagaagttgccaccaccaccgggcagccccctgggccactcaccaactgcctctcctcctcctacggcccgaaagatgttcccaggcctggctgcaccctccttgcccaagaagctgaagcctgaacaaatacgggtggagatcaagcgggagatgctgccgggggcccttcatggggaactgcacccatctgagggtccctggggggcaccacgggaagacatgacacccctgaacctgtcgtcccgggcagagccggtgcgcgacatccgctgtgagttctgcggcgagttcttcgagaaccgcaagggcctgtcgagtcacgcgcgctcacacctgcggcagatgggtgtgaccgagtggtccgtcaatggttcgcccatcgacacactgcgagagatcctcaagaagaagtccaagccgtgcctcatcaagaaggagccaccggctggagacctggcccctgccctggctgaggacgggcctcccaccgtggcccctgggcccgtgcagtccccactgccgctgtcgcccctggctggccggccaggcaaaccaggtgcagggccggcccaggttcctcgtgagctcagcctgacgcccatcactggggccaagccctcagccactggctacctgggctcagtggcagccaagcggcccctgcaggaggaccgcctcctcccagcagaggtcaaggccaagacctacatccagactgaactgcccttcaaggcaaagacccttcatgagaagacctcccactcctccaccgaggcctgctgcgagctgtgtggcctttactttgaaaaccgcaaggccctggccagccacgcacgggcacacctgcggcagttcggcgtgaccgagtggtgcgtcaatggctcgcccatcgagacactgagcgagtggatcaaacaccggccccagaaggtgggcgcctaccgcagctacatccagggcggccgccccttcaccaagaagttccgcagtgccggccatggccgtgacagtgacaagcggccgtccctggggctggcacccgggggcctggccgtggtcggccgcagtgccggaggggagccagggcccgaggctggccgggcagccgacggtggtgagcggcctctggcagccagcccgccaggcaccgtgaaggctgaggagcaccagcggcagaacatcaacaaatttgaacgccgacaagcccgccctccagatgcctccgcagcccggggaggcgaggacaccaatgacctacagcagaagctggaggaggtgcggcaacccccaccccgagtccggccagtcccctccctggtgccccggcccccccagacatcacttgtcaagttcgtgggcaacatctacaccctcaaatgcaggttctgtgaggtggaattccagggccccctctccatccaggaagagtgggtgcggcacttacagcggcacatcctggagatgaacttctccaaagcggaccccccacctgaggagtcccaggccccgcaggcacagacagcggcggcagaggctccctaacacaaaagcattccagatcccctctcgtgccacctctgtctcctcttcttcctcctctgtgtcctcgtccctcttcctctttctttccgtttccaaaggagcaagccaaaacctcaaaccggcgccccttgggggccgggcacactacagccagggcgccgggagccagctagctgcccttcccccagcccgaggactctggggccacagggtgtcttccttcagcccatgcccacctggtccagcaggggcagcagccaggtctctgatggcagccggtctggtcacaggggaggacagcactcccccgtctagcagccaggcagggcgatgtctgccatccgtggccatttgcaaagaccccaaagacccctgttctggttccctctctcccccatgaatatcctctcacacacatgtacatgcgaacacacacaacacgcacctcgtgagacccgggacctgccccggacccccaatcatgccacggtgcttgctcaggggaagccacgctccctctgtggggcctgctggggcctgggagccccccactgagcccacaatgccacggaaatccttgttggctgcccccgagaggggccttcccagctgggaagagctcagagctgacagctgcctcctgccatgtcaaggccccccaaagagcctcaggggctctggggccctggagggtggggttggggggtgggactctcctcccccactcctgctccctctcccttttcactgttgctttctatgtatagctccctagacctttcacttttttaaaaacgcgttttgtgtagagaataaggaacgtggatctttttattttgcaatcctgggccagctagaagccaggagctgattgaccttttaacttttttcagtggccacattttggttatcgatgtacctagaagtatgtaaattagattaaatttctcttctggaaa

SEQ ID NO: 109532 - DNA, 2838 bp, Homo sapiens
agcaggcggtgattgaaatgtgttgccggccttgtggggttccctaggtctgcggaacggcaccgtcgggggacggttggataacaggatgatactggagggattcttgtggttggagatcaggcctgggttctgaggaaaacgcaatggtggccatggacttgggctctccctcgctccctaagaagagcctgcctgtccctggggccctggagcaggtggccagtcggctgagcagcaaagtggctgcagaggttcctcatggcagcaaacaggagctgcaggacctcaaggcccagagcctgaccacctgcgaggtctgcggtgcctgctttgagacccgaaagggcctgtccagccacgcgcgctcccacctgcggcagctgggagtggcagagtcggaaagcagcggcgcacccatcgacctcctctacgagcttgtgaagcagaagggtctgcctgacgcccaccttgggctgcccccaggcctggctaagaagtccagctcactgaaggaggtggtcgccggggccccccggcccggcttgctcagcctggccaagcccttggatgcccctgctgtcaacaaagccatcaagtcgcctcccggcttctcggccaagggcctgggccacccgcccagctctccactcctcaaaaagacaccactggccctggcgggctcccctacccctaagaatcctgaggacaagagcccccagctgtccctgagcccccggccggcctccccaaaggcacagtggcctcagtctgaggatgaggggcccttgaacctcactttagatagtgacgggggcagagagctggactgccagctgtgcggtgcctggtttgagacccgcaagggcctgtctagccacgcccgtgcccacctgcgccacctgggcgtcagcgatccggacgccaagggatcccccatagacgtgctccacgggctcatcaggagggacggcgtccagatccgcctcccacccaggcgcggcgccctggcccacccggggcggccgcctcccacctccgcggccctctccttgcttccccccccaccgccggccaagaaggccaagctgaaggccgcgggtatggccagcccctgggggaagcaggacctctcggccgccgcagccgccggcattttctgggcctctgatgtggagccgtctcctctcaacctctcctcaggcccagagccagcacgagacatccgctgcgagttctgtggtgagttcttcgagaaccgcaagggcctctcgagccacgcgcgctcccatctgcggcaaatgggcgtgaccgagtggtacgtcaatggctcgcccatcgacacgctgcgggagatcctgaagagacggacccagtctcggcctggtggacctcccaacccaccagggccaagcccaaaagccctggccaagatgatgggcggcgcaggtcctggcagctcactggaagcccgcagcccctcggaccttcacatctcacccttggccaagaagttgccaccaccaccgggcagccccctgggccactcaccaactgcctctcctcctcctacggcccgaaagatgttcccaggcctggctgcaccctccttgcccaagaagctgaagcctgaacaaatacgggtggagatcaagcgggagatgctgccgggggcccttcatggggaactgcacccatctgagggtccctggggggcaccacgggaagacatgacacccctgaacctgtcgtcccgggcagagccggtgcgcgacatccgctgtgagttctgcggcgagttcttcgagaaccgcaagggcctgtcgagtcacgcgcgctcacacctgcggcagatgggtgtgaccgagtggtccgtcaatggttcgcccatcgacacactgcgagagatcctcaagaagaagtccaagccgtgcctcatcaagaaggagccaccggctggagacctggcccctgccctggctgaggacgggcctcccaccgtggcccctgggcccgtgcagtccccactgccgctgtcgcccctggctggccggccaggcaaaccaggtgcagggccggcccaggttcctcgtgagctcagcctgacgcccatcactggggccaagccctcagccactggctacctgggctcagtggcagccaagcggcccctgcaggaggaccgcctcctcccagcagaggtcaaggccaagacctacatccagactgaactgcccttcaaggcaaagacccttcatgagaagacctcccactcctccaccgaggcctgctgcgagctgtgtggcctttactttgaaaaccgcaaggccctggccagccacgcacgggcacacctgcggcagttcggcgtgaccgagtggtgcgtcaatggctcgcccatcgagacactgagcgagtggatcaaacaccggccccagaaggtgggcgcctaccgcagctacatccagggcggccgccccttcaccaagaagttccgcagtgccggccatggccgtgacagtgacaagcggccgtccctggggctggcacccgggggcctggccgtggtcggccgcagtgccggaggggagccagggcccgaggctggccgggcagccgacggtggtgagcggcctctggcagccagcccgccaggcaccgtgaaggctgaggagcaccagcggcagaacatcaacagtgagtgcttggtggaggagggtcgggagcgcagcgggcacctgtcaggcccacccagccactccccaggcgctctgctgtggcccttaagtcctttctccagttgcttacccattcacccatccatcccccatcccaccc

SEQ ID NO: 109533 - DNA, 303 bp, Homo sapiens
ctctgggcccacacaacctgcaaatggatttgacttggcctgcactgagatttttttctaccatgcatcaatcactagcattgaaacatcagaagatgtgacacaaaagcctgctccctattctctaaacatcagaagagcggccaccagggcccacaatccttcgtggcaacaacaagcaaaaacagagaacagctgcagggtgggccaagcaagggctcccggggtcaccgcaggccccatctgccccctgctgtcactcacatggcctgcccagaccctagaggcatcagagttggagac

SEQ ID NO: 109534 - DNA, 132 bp, Homo sapiens
gcagctgcgacagtgggggctgaaaggaacatgcttgagttggaatgaataagtggggatttctgagcactgcgtcatcggtgcataagaatggggactgtggccagacacagtggctcacacctggaatcc

SEQ ID NO: 109535 - DNA, 292 bp, Homo sapiens
acactcggaacactggcaggatggacgaggggttgctgcccacctggcatgggtttctgctgagaacctggcggaggtggtgggacgcacgcttgtttgatagtgccttggtgcctcggtggccccgcccccagtgtgcactgacgttcatcagcaccctgccgttgcaggtctgcgtggcaccatcctgctgcctaggagtcggagggggaaaggatcccgtgtgacaaggcccagcctgcctgctgcgggcttcacgctgcctctgggtcctgcctagcccaggctctcc

SEQ ID NO: 109536 - DNA, 580 bp, Homo sapiens
tcaaaagtctatttttatctgtaagaatatacagtagattcatgtgttctattgttacattggattattcctcctactttcacatcagctgttttagaagtgacctttagcaaacattatgttttttattttcaaaaatagcattacagaaatcacattaatatacaacatatcttgaaggtgtacagaaaccaataaagccagtaatatataaagaataatgcaaatagttatgccacatggcaggcaatgactacccataacggccccttccttgttgattctcgatgactagaataaccagagagacaagacttgtatttttgtctaacaataatgccaaaaagtactaaattttcttgaaaaaaaaaagtgtttttgttttccttttccatactcctacattatctctcctccaaaattgaatagtagaggatgatctgcagcacttcctcaatttccccacactatccccgccccctaagccccacaaaacactggctggcaccagagccaagatgggtaggtagtttgttaagtgaaaaggaaaattaactggtttccccaagaaaagcaaaat

SEQ ID NO: 109537 - DNA, 586 bp, Homo sapiens
gctgggattacaggcatgcaccaccatgcctggctagttttgtatttttagtagaaatggggtttctccatgttgctcaggctggtttcgaactctcgacctcaggtgatctgcccacctcggcctcccaaagtactgggatttcaggcatgaaccactgcgcccggccagcaatagattttctaacataggctactaatcattcacactcctttaaggaggaaacttgaggcaaaatcaccccataaagattggaggacagaactgtataggcagtttccaaatgctgcatgaagatgacaaagtaggatgttcagattcctgagaatgggtgttttaaaggggagagtctggagccagggacatcagtcaggctgcttaccttaacagtcctgcacttggtgttagaggggttggagactgggctgaggcagccatgcaaatagaaggggatgtttcaggccattttgttgatccatacaactttctgcagttttttattcttcactcttacccctttattcaagttttatttttatttttaacagttttgtggaggtataattcacattgaacatatccatcg

SEQ ID NO: 109538 - DNA, 1360 bp, Homo sapiens
tgagcccgggcgggggtcggggctgcgcctgctccgccccccaggcggggtgtcctggcgcccgcgggaacctggggcgtcgctccctgcgcggcgtccgggtcgaggccgcagcactcggcgtccccgcgggactgaaaactggatatttggtccccatggactttctggtcaccctgtgaagtggacttaactttttcttgaatcatgtggaaggattctgaagtcaaaagtttttaagactctcaggcttactgtggatctggattctaaggcaacacttccttgaagaaacaagcttacagctctgcccggatggccctagtcttcgtgtacggcaccctgaagcggggtcagcccaaccacagggtcctgcgggacggcgcccacggctccgcagcctttcgggcgcgcggccgcacgctggagccctacccgttggtgatcgcgggggagcacaacatcccgtggctgctgcacctgcccggctcggggcgcctcgtggagggcgaggtctacgcggtagacgagcggatgctgcgctttctggatgacttcgagagttgcccggccctgtaccagcgcacggtgctgcgggtacagctgctggaggaccgggccccgggcgcagaggagccgccagcgcccaccgcggtgcagtgcttcgtgtacagcagggccaccttcccgccggagtgggcccagctcccgcaccatgacagctacgactccgaggggccgcacgggctgcgctacaacccccgggagaacagataagggggacgggcagggtgggcctaggtttgagagccctggggctccaagatgcgcccagcccatgctgggtgaaggcggaagccgaacagggccctttccaatgaatctgccggaaaggaaccaatctttcagtggcagctgattttacaaataatgttgagatacgaatagcaaggtgcttccctcccatctttctacctggtaagaaaaatttaggattttaactcccctaaatgacatttagagaactcgtgttatgcctaattcttcttcctcctcgtgttgtttctgctgttggctctgctttgagctcaagataataataaatatttaggatcagtgtaaagacttggtgttgccgctagattttagcagccctactatactgattctggcctgtaacccctgagaaagccgattttacacggctgggtagaatttgtagaaaagatccacagggcaagcatgctgtatatcagagtgcgtatagcaccattcttcctaattttcagatcaagcttcacagcaaatattaaagattatttaaatttgaagtcgatgttttgggaaatcagatataaaa

SEQ ID NO: 109539 - DNA, 1572 bp, Homo sapiens
tgagcccgggcgggggtcggggctgcgcctgctccgccccccaggcggggtgtcctggcgcccgcgggaacctggggcgtcgctccctgcgcggcgtccgggtcgaggccgcagcactcggcgtccccgcgggactgaaaactggatatttggtccccatggactttctggtcaccctgtgaagtggacttaactttttcttgaatcatgtggaaggattctgaagtcaaaagtttttaagactctcaggcttactgtggatctggattctaaggcaacacttccttgaagaaacaagcttacagtctgtggcccagacccaggcaagtggtaaatatttaccttcacgctggagccaagatcgctgcggggagtcccgtgaagcaccactgccctctaagaccttggaaggggaaacaccagaaggtgtgggtgctgagctccgctgcgtcagactgccaggacctgagtggaactcagtgctgaaacctgggttctcactgcagctggatagcagctctgcccggatggccctagtcttcgtgtacggcaccctgaagcggggtcagcccaaccacagggtcctgcgggacggcgcccacggctccgcagcctttcgggcgcgcggccgcacgctggagccctacccgttggtgatcgcgggggagcacaacatcccgtggctgctgcacctgcccggctcggggcgcctcgtggagggcgaggtctacgcggtagacgagcggatgctgcgctttctggatgacttcgagagttgcccggccctgtaccagcgcacggtgctgcgggtacagctgctggaggaccgggccccgggcgcagaggagccgccagcgcccaccgcggtgcagtgcttcgtgtacagcagggccaccttcccgccggagtgggcccagctcccgcaccatgacagctacgactccgaggggccgcacgggctgcgctacaacccccgggagaacagataagggggacgggcagggtgggcctaggtttgagagccctggggctccaagatgcgcccagcccatgctgggtgaaggcggaagccgaacagggccctttccaatgaatctgccggaaaggaaccaatctttcagtggcagctgattttacaaataatgttgagatacgaatagcaaggtgcttccctcccatctttctacctggtaagaaaaatttaggattttaactcccctaaatgacatttagagaactcgtgttatgcctaattcttcttcctcctcgtgttgtttctgctgttggctctgctttgagctcaagataataataaatatttaggatcagtgtaaagacttggtgttgccgctagattttagcagccctactatactgattctggcctgtaacccctgagaaagccgattttacacggctgggtagaatttgtagaaaagatccacagggcaagcatgctgtatatcagagtgcgtatagcaccattcttcctaattttcagatcaagcttcacagcaaatattaaagattatttaaatttgaagtcgatgttttgggaaatcagatataaaa

SEQ ID NO: 109540 - DNA, 1654 bp, Homo sapiens
tgagcccgggcgggggtcggggctgcgcctgctccgccccccaggcggggtgtcctggcgcccgcgggaacctggggcgtcgctccctgcgcggcgtccgggtcgaggccgcagcactcggcgtccccgcgggactgaaaactggatatttggtccccatggactttctggtcaccctgtgaagtggacttaactttttcttgaatcatgtggaaggattctgaagtcaaaagtttttaagactctcaggcttactgtggatctggattctaaggcaacacttccttgaagaaacaagcttacagtctgtggcccagacccaggcaagtggtaaatatttaccttcacgctggagccaagatcgctgcggggagtcccgtgaagcaccactgccctctaagaccttggaaggggaaacaccagaaggtgtgggtgctgagctccgctgcgtcagactgccaggacctgagtggaactcagtgctgaaacctgggttctcactgcagctggatagcagatcagcagctctagagggtggcggccttgcctggaacctccgcaacctccgcgcccaccacacaagggctgagaacagtaagctctgcccggatggccctagtcttcgtgtacggcaccctgaagcggggtcagcccaaccacagggtcctgcgggacggcgcccacggctccgcagcctttcgggcgcgcggccgcacgctggagccctacccgttggtgatcgcgggggagcacaacatcccgtggctgctgcacctgcccggctcggggcgcctcgtggagggcgaggtctacgcggtagacgagcggatgctgcgctttctggatgacttcgagagttgcccggccctgtaccagcgcacggtgctgcgggtacagctgctggaggaccgggccccgggcgcagaggagccgccagcgcccaccgcggtgcagtgcttcgtgtacagcagggccaccttcccgccggagtgggcccagctcccgcaccatgacagctacgactccgaggggccgcacgggctgcgctacaacccccgggagaacagataagggggacgggcagggtgggcctaggtttgagagccctggggctccaagatgcgcccagcccatgctgggtgaaggcggaagccgaacagggccctttccaatgaatctgccggaaaggaaccaatctttcagtggcagctgattttacaaataatgttgagatacgaatagcaaggtgcttccctcccatctttctacctggtaagaaaaatttaggattttaactcccctaaatgacatttagagaactcgtgttatgcctaattcttcttcctcctcgtgttgtttctgctgttggctctgctttgagctcaagataataataaatatttaggatcagtgtaaagacttggtgttgccgctagattttagcagccctactatactgattctggcctgtaacccctgagaaagccgattttacacggctgggtagaatttgtagaaaagatccacagggcaagcatgctgtatatcagagtgcgtatagcaccattcttcctaattttcagatcaagcttcacagcaaatattaaagattatttaaatttgaagtcgatgttttgggaaatcagatataaaa

SEQ ID NO: 109541 - DNA, 1848 bp, Homo sapiens
tgagcccgggcgggggtcggggctgcgcctgctccgccccccaggcggggtgtcctggcgcccgcgggaacctggggcgtcgctccctgcgcggcgtccgggtcgaggccgcagcactcggcgtccccgcgggactgaaaactggatatttggtccccatggactttctggtcaccctgtgaagtggacttaactttttcttgaatcatgtggaaggattctgaagtcaaaagtttttaagactctcaggcttactgtggatctggattctaaggcaacacttccttgaagaaacaagcttacagtctgtggcccagacccaggcaagtggtaaatatttaccttcacgctggagccaagatcgctgcggggagtcccgtgaagcaccactgccctctaagaccttggaaggggaaacaccagaaggtgtgggtgctgagctccgctgcgtcagactgccaggacctgagtggaactcagtgctgaaacctgggttctcactgcagctggatagcaggtggttacaaaattatatgtatttttagggttatttctaatttttctctaatagttattggcaattttcaaagtcctttaagaaacactgaaaactgctcaagaaaatggcagttctgcagggctcaggtagcagggcaggctgttgggacaggtttgacagactgtcctaatacaaggagcgccttttcccagatcagcagctctagagggtggcggccttgcctggaacctccgcaacctccgcgcccaccacacaagggctgagaacagtaagctctgcccggatggccctagtcttcgtgtacggcaccctgaagcggggtcagcccaaccacagggtcctgcgggacggcgcccacggctccgcagcctttcgggcgcgcggccgcacgctggagccctacccgttggtgatcgcgggggagcacaacatcccgtggctgctgcacctgcccggctcggggcgcctcgtggagggcgaggtctacgcggtagacgagcggatgctgcgctttctggatgacttcgagagttgcccggccctgtaccagcgcacggtgctgcgggtacagctgctggaggaccgggccccgggcgcagaggagccgccagcgcccaccgcggtgcagtgcttcgtgtacagcagggccaccttcccgccggagtgggcccagctcccgcaccatgacagctacgactccgaggggccgcacgggctgcgctacaacccccgggagaacagataagggggacgggcagggtgggcctaggtttgagagccctggggctccaagatgcgcccagcccatgctgggtgaaggcggaagccgaacagggccctttccaatgaatctgccggaaaggaaccaatctttcagtggcagctgattttacaaataatgttgagatacgaatagcaaggtgcttccctcccatctttctacctggtaagaaaaatttaggattttaactcccctaaatgacatttagagaactcgtgttatgcctaattcttcttcctcctcgtgttgtttctgctgttggctctgctttgagctcaagataataataaatatttaggatcagtgtaaagacttggtgttgccgctagattttagcagccctactatactgattctggcctgtaacccctgagaaagccgattttacacggctgggtagaatttgtagaaaagatccacagggcaagcatgctgtatatcagagtgcgtatagcaccattcttcctaattttcagatcaagcttcacagcaaatattaaagattatttaaatttgaagtcgatgttttgggaaatcagatataaaa

SEQ ID NO: 109542 - DNA, 3825 bp, Homo sapiens
tgtccaggtctccacacctctctcagcagttaatccctttatctattccttgggtcaaaacttttgaggtgggctagctatatagcagcgggggagagggtaaactggggcgcgcgggttggaggcgcttcagcaccgcggccagcgcccactgcagcccaacccactctctagagctcccggactcctagctctgagaatgcctgcggaatgatcgccccccagggcggctgccgccgctgccgctgctgctgttattgctactgctgctgccgccgcctctgcttccactcggctctgactggcaggcagaaagtgcaactgacgagggaaaggtctctgcagtgagtggagagcctacataaaagagagtaaagaggggcaaaaacccagatcagaatgcaggcgacgtccaaccttctcaacctcctgctgctgtctttgtttgccggattagatccttccaaggatggaagtaaaaaggcaggacctcgagcagtcaccttggatcccaaaatgaaagtgttatactcagattagtcctaaagaagggtggcaggtgtacagctcagctcaggatcctgatgggcggtgcatttgcacagttgttgctccagaacaaaacctgtgttcccgggatgccaaaagcaggcaacttcgccaactactggaaaaggttcagaacatgtcccagtctattgaagtcttaaacttgagaactcagagagatttccaatatgttttaaaaatggaaacccaaatgaaagggctgaaggcaaaatttcggcagattgaagatgatcgaaagacacttatgaccaagcattttcaggagttgaaagagaaaatggacgagctcctgcctttgatccccgtgctggaacagtacaaaacagatgctaagttaatcacccagttcaaggaggaaataaggaatctgtctgctgtcctcactggtattcaggaggaaattggtgcctatgactacgaggaactacaccaaagagtgctgagcttggaaacaagacttcgtgactgcatgaaaaagctaattgatttaaaaaagagaaaagaagaagaaaaaaggcaacagaaaggagaagcataagcaatagtattttgggaagctataacacgcgacttgcctccctgttcacctttgtattctcagcacctagaatagttctggtacaaaataagttcacagtaaatggttgtcaaatgaataaattaattattatatctttaaatagtaactattgtttttaccctctaacatatttcagagaaatgcttagtgctacaagaaagtaaagtttgctttctaaggtatgattgactggagtaagaatcaattttcctcacaaaaccaggtacaaaataaaagagtcaactagccaaaagaccactttaccatggtcacccaatgtttagtttaagagccagaagcttttaacctccggtacaaattctgtcctaagttttggccgaaacaacctaagactcagcagtatccctttgccatagagatgcaaggctggattagattcaagcaccatcgaagccaaagacaccccaagccagtgatgtgctgtgggttgtttggaaatgtcgattagataaggctcatggtatgattcagagctccaaggacagttcttgttcaggtttcaactaatcaacatcggattatgcacacctcaacatctgaaatatgcagacatttgagacaaataccagaattgtgtcttcttgctttgtacaaatcatgcttcagtctggcaataagcatgtggcaaactgatgaaaatcacaggcccagttacagtcaagacatctggaacccgatttggtgcttggatgacagaccctttagcatctgagaaaaacaacagagtctggtacatggacagttatactaacaataaaattgttcgtgaatacaaatcaattgcagactttgtcagtggggctgaatcaaggacatacaaccttcctttcaagtgggcaggaactaaccatgttgtctacaatggctcactctattttaacaagtatcagagtaatatcatcatcaaatacagctttgatatggggagagtgcttgcccaacgaagcctggagtatgctggttttcataatgtttacccctacacatggggtggattctctgacatcgacctaatggctgatgaaatcgggctgtgggctgtgtatgcaactaaccagaatgcaggcaatattgtcatcagccaacttaaccaagataccttggaggtgatgaagagctggagcactggctaccccaagagaagtgcaggggaatctttcatgatctgtgggacactgtatgtcaccaactcccacttaactggagccaaggtgtattattcctattccaccaaaacctccacatatgagtacacagacattcccttccataaccaatactttcacatatccatgcttgactacaatgcaagagatcgagctctctatgcctggaacaatggccaccaggtgctgttcaatgtcacccttttccatatcatcaagacagaggatgacacataggcaaatgtgacatgttttcattgatttaaacagtgtgatttgtgataaactctataagaccccttccgtttttttcttcactattatttttcatcatttctccaaagcaaagcatttttattgtaaagttggtgtttcaaaaacatagctgagcttgtctaacttaccatgttggaaacacatcttaacttctaaatttacaaggcctatcatgtccttgtcatgaaaagcactaaaaaaaaaaagagtttaagtggctaaagtcatagttttgcaagagattaatgatctgccttatattagagtcagagactaatggtggcttaaatgcacgaatgtctttttttttaaaactgtcattttttactgtcttttgctccatatcaggaaatattttggtaggaattaggagaacaaaaagcacttttatcccatttatttctttaaaaaatgtaaggatttcatttatattgaaaaataatattaatcattttgctgttaacacaattctctgatgcggtgctgtacagtcatttttaaatctcttgctaacattttattggcagtatgtatttctaccattgtaaccaccattgtgctattgtatctcttcacttctgtgaaagtaatattttttataaaatacactgaaatttaacctcagtaattgagtccattttcaagtgtggtcaagaataatcttcttggcttacccctttacataagcattataaactaaaatgaaaaccaaaccagacacctgacatagagtctttattttaccccaagttttttgggccactgacattgaatgcaacaactgatttcatacaactgagttactctgttcactccactgaatgcaacccatatagtttcttgcacaaggtgcatctggattccaaatattggatttgagttgactctactcatttattatacactaaagaaattttgttcttcatagttaaatgtactagcatttaatttatattttacatacaacttgcaataatgaaattccttatgtcaggaccctgaaaataagcacatttgaaaactcttagaaaaaaaaaattctgtaatgtcctctagatttagattatgagccctgaggagttattggcaagatttgtgcaaaataaaatatggggagacttgggagttgtctttgtggtttcaaaagtgtaaataaccaattcagaaaacaaaatggaaaaacgaccccttgttaccttgattcactgtatg

SEQ ID NO: 109543 - DNA, 3425 bp, Homo sapiens
atgagtcctccactgctgaagcttggcgctgtgcttagtaccatggcaatgatctcaaactggatgtcccaaactctcccatccttggtgggactgaacaccacgaggctgtcgactccggataccttaactcagattagtcctaaagaagggtggcaggtgtacagctcagctcaggatcctgatgggcggtgcatttgcacagttgttgctccagaacaaaacctgtgttcccgggatgccaaaagcaggcaacttcgccaactactggaaaaggttcagaacatgtcccagtctattgaagtcttaaacttgagaactcagagagatttccaatatgttttaaaaatggaaacccaaatgaaagggctgaaggcaaaatttcggcagattgaagatgatcgaaagacacttatgaccaagcattttcaggagttgaaagagaaaatggacgagctcctgcctttgatccccgtgctggaacagtacaaaacagatgctaagttaatcacccagttcaaggaggaaataaggaatctgtctgctgtcctcactggtattcaggaggaaattggtgcctatgactacgaggaactacaccaaagagtgctgagcttggaaacaagacttcgtgactgcatgaaaaagctaattgatttaaaaaagagaaaagaagaagaaaaaaggcaacagaaaggagaagcataagcaatagtattttgggaagctataacacgcgacttgcctccctgttcacctttgtattctcagcacctagaatagttctggtacaaaataagttcacagtaaatggttgtcaaatgaataaattaattattatatctttaaatagtaactattgtttttaccctctaacatatttcagagaaatgcttagtgctacaagaaagtaaagtttgctttctaaggtatgattgactggagtaagaatcaattttcctcacaaaaccaggtacaaaataaaagagtcaactagccaaaagaccactttaccatggtcacccaatgtttagtttaagagccagaagcttttaacctccggtacaaattctgtcctaagttttggccgaaacaacctaagactcagcagtatccctttgccatagagatgcaaggctggattagattcaagcaccatcgaagccaaagacaccccaagccagtgatgtgctgtgggttgtttggaaatgtcgattagataaggctcatggtatgattcagagctccaaggacagttcttgttcaggtttcaactaatcaacatcggattatgcacacctcaacatctgaaatatgcagacatttgagacaaataccagaattgtgtcttcttgctttgtacaaatcatgcttcagtctggcaataagcatgtggcaaactgatgaaaatcacaggcccagttacagtcaagacatctggaacccgatttggtgcttggatgacagaccctttagcatctgagaaaaacaacagagtctggtacatggacagttatactaacaataaaattgttcgtgaatacaaatcaattgcagactttgtcagtggggctgaatcaaggacatacaaccttcctttcaagtgggcaggaactaaccatgttgtctacaatggctcactctattttaacaagtatcagagtaatatcatcatcaaatacagctttgatatggggagagtgcttgcccaacgaagcctggagtatgctggttttcataatgtttacccctacacatggggtggattctctgacatcgacctaatggctgatgaaatcgggctgtgggctgtgtatgcaactaaccagaatgcaggcaatattgtcatcagccaacttaaccaagataccttggaggtgatgaagagctggagcactggctaccccaagagaagtgcaggggaatctttcatgatctgtgggacactgtatgtcaccaactcccacttaactggagccaaggtgtattattcctattccaccaaaacctccacatatgagtacacagacattcccttccataaccaatactttcacatatccatgcttgactacaatgcaagagatcgagctctctatgcctggaacaatggccaccaggtgctgttcaatgtcacccttttccatatcatcaagacagaggatgacacataggcaaatgtgacatgttttcattgatttaaacagtgtgatttgtgataaactctataagaccccttccgtttttttcttcactattatttttcatcatttctccaaagcaaagcatttttattgtaaagttggtgtttcaaaaacatagctgagcttgtctaacttaccatgttggaaacacatcttaacttctaaatttacaaggcctatcatgtccttgtcatgaaaagcactaaaaaaaaaaagagtttaagtggctaaagtcatagttttgcaagagattaatgatctgccttatattagagtcagagactaatggtggcttaaatgcacgaatgtctttttttttaaaactgtcattttttactgtcttttgctccatatcaggaaatattttggtaggaattaggagaacaaaaagcacttttatcccatttatttctttaaaaaatgtaaggatttcatttatattgaaaaataatattaatcattttgctgttaacacaattctctgatgcggtgctgtacagtcatttttaaatctcttgctaacattttattggcagtatgtatttctaccattgtaaccaccattgtgctattgtatctcttcacttctgtgaaagtaatattttttataaaatacactgaaatttaacctcagtaattgagtccattttcaagtgtggtcaagaataatcttcttggcttacccctttacataagcattataaactaaaatgaaaaccaaaccagacacctgacatagagtctttattttaccccaagttttttgggccactgacattgaatgcaacaactgatttcatacaactgagttactctgttcactccactgaatgcaacccatatagtttcttgcacaaggtgcatctggattccaaatattggatttgagttgactctactcatttattatacactaaagaaattttgttcttcatagttaaatgtactagcatttaatttatattttacatacaacttgcaataatgaaattccttatgtcaggaccctgaaaataagcacatttgaaaactcttagaaaaaaaaaattctgtaatgtcctctagatttagattatgagccctgaggagttattggcaagatttgtgcaaaataaaatatggggagacttgggagttgtctttgtggtttcaaaagtgtaaataaccaattcagaaaacaaaatggaaaaacgaccccttgttaccttgattcactgtatg

SEQ ID NO: 109544 - DNA, 2688 bp, Homo sapiens
atgagtcctccactgctgaagcttggcgctgtgcttagtaccatggcaatgatctcaaactggatgtcccaaactctcccatccttggtgggactgaacaccacgaggctgtcgactccggataccttaactcagattagtcctaaagaagggtggcaggtgtacagctcagctcaggatcctgatgggcggtgcatttgcacagttgttgctccagaacaaaacctgtgttcccgggatgccaaaagcaggcaacttcgccaactactggaaaaggttcagaacatgtcccagtctattgaagtcttaaacttgagaactcagagagatttccaatatgttttaaaaatggaaacccaaatgaaagggctgaaggcaaaatttcggcagattgaagatgatcgaaagacacttatgaccaagcattttcaggagttgaaagagaaaatggacgagctcctgcctttgatccccgtgctggaacagtacaaaacagatgctaagttaatcacccagttcaaggaggaaataaggaatctgtctgctgtcctcactggtattcaggaggaaattggtgcctatgactacgaggaactacaccaaagagtgctgagcttggaaacaagacttcgtgactgcatgaaaaagctaacatgtggcaaactgatgaaaatcacaggcccagttacagtcaagacatctggaacccgatttggtgcttggatgacagaccctttagcatctgagaaaaacaacagagtctggtacatggacagttatactaacaataaaattgttcgtgaatacaaatcaattgcagactttgtcagtggggctgaatcaaggacatacaaccttcctttcaagtgggcaggaactaaccatgttgtctacaatggctcactctattttaacaagtatcagagtaatatcatcatcaaatacagctttgatatggggagagtgcttgcccaacgaagcctggagtatgctggttttcataatgtttacccctacacatggggtggattctctgacatcgacctaatggctgatgaaatcgggctgtgggctgtgtatgcaactaaccagaatgcaggcaatattgtcatcagccaacttaaccaagataccttggaggtgatgaagagctggagcactggctaccccaagagaagtgcaggggaatctttcatgatctgtgggacactgtatgtcaccaactcccacttaactggagccaaggtgtattattcctattccaccaaaacctccacatatgagtacacagacattcccttccataaccaatactttcacatatccatgcttgactacaatgcaagagatcgagctctctatgcctggaacaatggccaccaggtgctgttcaatgtcacccttttccatatcatcaagacagaggatgacacataggcaaatgtgacatgttttcattgatttaaacagtgtgatttgtgataaactctataagaccccttccgtttttttcttcactattatttttcatcatttctccaaagcaaagcatttttattgtaaagttggtgtttcaaaaacatagctgagcttgtctaacttaccatgttggaaacacatcttaacttctaaatttacaaggcctatcatgtccttgtcatgaaaagcactaaaaaaaaaaagagtttaagtggctaaagtcatagttttgcaagagattaatgatctgccttatattagagtcagagactaatggtggcttaaatgcacgaatgtctttttttttaaaactgtcattttttactgtcttttgctccatatcaggaaatattttggtaggaattaggagaacaaaaagcacttttatcccatttatttctttaaaaaatgtaaggatttcatttatattgaaaaataatattaatcattttgctgttaacacaattctctgatgcggtgctgtacagtcatttttaaatctcttgctaacattttattggcagtatgtatttctaccattgtaaccaccattgtgctattgtatctcttcacttctgtgaaagtaatattttttataaaatacactgaaatttaacctcagtaattgagtccattttcaagtgtggtcaagaataatcttcttggcttacccctttacataagcattataaactaaaatgaaaaccaaaccagacacctgacatagagtctttattttaccccaagttttttgggccactgacattgaatgcaacaactgatttcatacaactgagttactctgttcactccactgaatgcaacccatatagtttcttgcacaaggtgcatctggattccaaatattggatttgagttgactctactcatttattatacactaaagaaattttgttcttcatagttaaatgtactagcatttaatttatattttacatacaacttgcaataatgaaattccttatgtcaggaccctgaaaataagcacatttgaaaactcttagaaaaaaaaaattctgtaatgtcctctagatttagattatgagccctgaggagttattggcaagatttgtgcaaaataaaatatggggagacttgggagttgtctttgtggtttcaaaagtgtaaataaccaattcagaaaacaaaatggaaaaacgaccccttgttaccttgattcactgtatg

SEQ ID NO: 109545 - DNA, 3764 bp, Homo sapiens
tgtccaggtctccacacctctctcagcagttaatccctttatctattccttgggtcaaaacttttgaggtgggctagctatatagcagcgggggagagggtaaactggggcgcgcgggttggaggcgcttcagcaccgcggccagcgcccactgcagcccaacccactctctagagctcccggactcctagctctgagaatgcctgcggaatgatcgccccccagggcggctgccgccgctgccgctgctgctgttattgctactgctgctgccgccgcctctgcttccactcggctctgactggcaggcagaaagtgcaactgacgagggaaaggtctctgcagtgagtggagagcctacataaaagagagtaaagaggggcaaaaacccagatcagaatgcaggcgacgtccaaccttctcaacctcctgctgctgtctttgtttgccggattagatccttccaagactcagattagtcctaaagaagggtggcaggtgtacagctcagctcaggatcctgatgggcggtgcatttgcacagttgttgctccagaacaaaacctgtgttcccgggatgccaaaagcaggcaacttcgccaactactggaaaaggttcagaacatgtcccagtctattgaagtcttaaacttgagaactcagagagatttccaatatgttttaaaaatggaaacccaaatgaaagggctgaaggcaaaatttcggcagattgaagatgatcgaaagacacttatgaccaagcattttcaggagttgaaagagaaaatggacgagctcctgcctttgatccccgtgctggaacagtacaaaacagatgctaagttaatcacccagttcaaggaggaaataaggaatctgtctgctgtcctcactggtattcaggaggaaattggtgcctatgactacgaggaactacaccaaagagtgctgagcttggaaacaagacttcgtgactgcatgaaaaagctaattgatttaaaaaagagaaaagaagaagaaaaaaggcaacagaaaggagaagcataagcaatagtattttgggaagctataacacgcgacttgcctccctgttcacctttgtattctcagcacctagaatagttctggtacaaaataagttcacagtaaatggttgtcaaatgaataaattaattattatatctttaaatagtaactattgtttttaccctctaacatatttcagagaaatgcttagtgctacaagaaagtaaagtttgctttctaaggtatgattgactggagtaagaatcaattttcctcacaaaaccaggtacaaaataaaagagtcaactagccaaaagaccactttaccatggtcacccaatgtttagtttaagagccagaagcttttaacctccggtacaaattctgtcctaagttttggccgaaacaacctaagactcagcagtatccctttgccatagagatgcaaggctggattagattcaagcaccatcgaagccaaagacaccccaagccagtgatgtgctgtgggttgtttggaaatgtcgattagataaggctcatggtatgattcagagctccaaggacagttcttgttcaggtttcaactaatcaacatcggattatgcacacctcaacatctgaaatatgcagacatttgagacaaataccagaattgtgtcttcttgctttgtacaaatcatgcttcagtctggcaataagcatgtggcaaactgatgaaaatcacaggcccagttacagtcaagacatctggaacccgatttggtgcttggatgacagaccctttagcatctgagaaaaacaacagagtctggtacatggacagttatactaacaataaaattgttcgtgaatacaaatcaattgcagactttgtcagtggggctgaatcaaggacatacaaccttcctttcaagtgggcaggaactaaccatgttgtctacaatggctcactctattttaacaagtatcagagtaatatcatcatcaaatacagctttgatatggggagagtgcttgcccaacgaagcctggagtatgctggttttcataatgtttacccctacacatggggtggattctctgacatcgacctaatggctgatgaaatcgggctgtgggctgtgtatgcaactaaccagaatgcaggcaatattgtcatcagccaacttaaccaagataccttggaggtgatgaagagctggagcactggctaccccaagagaagtgcaggggaatctttcatgatctgtgggacactgtatgtcaccaactcccacttaactggagccaaggtgtattattcctattccaccaaaacctccacatatgagtacacagacattcccttccataaccaatactttcacatatccatgcttgactacaatgcaagagatcgagctctctatgcctggaacaatggccaccaggtgctgttcaatgtcacccttttccatatcatcaagacagaggatgacacataggcaaatgtgacatgttttcattgatttaaacagtgtgatttgtgataaactctataagaccccttccgtttttttcttcactattatttttcatcatttctccaaagcaaagcatttttattgtaaagttggtgtttcaaaaacatagctgagcttgtctaacttaccatgttggaaacacatcttaacttctaaatttacaaggcctatcatgtccttgtcatgaaaagcactaaaaaaaaaaagagtttaagtggctaaagtcatagttttgcaagagattaatgatctgccttatattagagtcagagactaatggtggcttaaatgcacgaatgtctttttttttaaaactgtcattttttactgtcttttgctccatatcaggaaatattttggtaggaattaggagaacaaaaagcacttttatcccatttatttctttaaaaaatgtaaggatttcatttatattgaaaaataatattaatcattttgctgttaacacaattctctgatgcggtgctgtacagtcatttttaaatctcttgctaacattttattggcagtatgtatttctaccattgtaaccaccattgtgctattgtatctcttcacttctgtgaaagtaatattttttataaaatacactgaaatttaacctcagtaattgagtccattttcaagtgtggtcaagaataatcttcttggcttacccctttacataagcattataaactaaaatgaaaaccaaaccagacacctgacatagagtctttattttaccccaagttttttgggccactgacattgaatgcaacaactgatttcatacaactgagttactctgttcactccactgaatgcaacccatatagtttcttgcacaaggtgcatctggattccaaatattggatttgagttgactctactcatttattatacactaaagaaattttgttcttcatagttaaatgtactagcatttaatttatattttacatacaacttgcaataatgaaattccttatgtcaggaccctgaaaataagcacatttgaaaactcttagaaaaaaaaaattctgtaatgtcctctagatttagattatgagccctgaggagttattggcaagatttgtgcaaaataaaatatggggagacttgggagttgtctttgtggtttcaaaagtgtaaataaccaattcagaaaacaaaatggaaaaacgaccccttgttaccttgattcactgtatg

SEQ ID NO: 109546 - DNA, 3027 bp, Homo sapiens
tgtccaggtctccacacctctctcagcagttaatccctttatctattccttgggtcaaaacttttgaggtgggctagctatatagcagcgggggagagggtaaactggggcgcgcgggttggaggcgcttcagcaccgcggccagcgcccactgcagcccaacccactctctagagctcccggactcctagctctgagaatgcctgcggaatgatcgccccccagggcggctgccgccgctgccgctgctgctgttattgctactgctgctgccgccgcctctgcttccactcggctctgactggcaggcagaaagtgcaactgacgagggaaaggtctctgcagtgagtggagagcctacataaaagagagtaaagaggggcaaaaacccagatcagaatgcaggcgacgtccaaccttctcaacctcctgctgctgtctttgtttgccggattagatccttccaagactcagattagtcctaaagaagggtggcaggtgtacagctcagctcaggatcctgatgggcggtgcatttgcacagttgttgctccagaacaaaacctgtgttcccgggatgccaaaagcaggcaacttcgccaactactggaaaaggttcagaacatgtcccagtctattgaagtcttaaacttgagaactcagagagatttccaatatgttttaaaaatggaaacccaaatgaaagggctgaaggcaaaatttcggcagattgaagatgatcgaaagacacttatgaccaagcattttcaggagttgaaagagaaaatggacgagctcctgcctttgatccccgtgctggaacagtacaaaacagatgctaagttaatcacccagttcaaggaggaaataaggaatctgtctgctgtcctcactggtattcaggaggaaattggtgcctatgactacgaggaactacaccaaagagtgctgagcttggaaacaagacttcgtgactgcatgaaaaagctaacatgtggcaaactgatgaaaatcacaggcccagttacagtcaagacatctggaacccgatttggtgcttggatgacagaccctttagcatctgagaaaaacaacagagtctggtacatggacagttatactaacaataaaattgttcgtgaatacaaatcaattgcagactttgtcagtggggctgaatcaaggacatacaaccttcctttcaagtgggcaggaactaaccatgttgtctacaatggctcactctattttaacaagtatcagagtaatatcatcatcaaatacagctttgatatggggagagtgcttgcccaacgaagcctggagtatgctggttttcataatgtttacccctacacatggggtggattctctgacatcgacctaatggctgatgaaatcgggctgtgggctgtgtatgcaactaaccagaatgcaggcaatattgtcatcagccaacttaaccaagataccttggaggtgatgaagagctggagcactggctaccccaagagaagtgcaggggaatctttcatgatctgtgggacactgtatgtcaccaactcccacttaactggagccaaggtgtattattcctattccaccaaaacctccacatatgagtacacagacattcccttccataaccaatactttcacatatccatgcttgactacaatgcaagagatcgagctctctatgcctggaacaatggccaccaggtgctgttcaatgtcacccttttccatatcatcaagacagaggatgacacataggcaaatgtgacatgttttcattgatttaaacagtgtgatttgtgataaactctataagaccccttccgtttttttcttcactattatttttcatcatttctccaaagcaaagcatttttattgtaaagttggtgtttcaaaaacatagctgagcttgtctaacttaccatgttggaaacacatcttaacttctaaatttacaaggcctatcatgtccttgtcatgaaaagcactaaaaaaaaaaagagtttaagtggctaaagtcatagttttgcaagagattaatgatctgccttatattagagtcagagactaatggtggcttaaatgcacgaatgtctttttttttaaaactgtcattttttactgtcttttgctccatatcaggaaatattttggtaggaattaggagaacaaaaagcacttttatcccatttatttctttaaaaaatgtaaggatttcatttatattgaaaaataatattaatcattttgctgttaacacaattctctgatgcggtgctgtacagtcatttttaaatctcttgctaacattttattggcagtatgtatttctaccattgtaaccaccattgtgctattgtatctcttcacttctgtgaaagtaatattttttataaaatacactgaaatttaacctcagtaattgagtccattttcaagtgtggtcaagaataatcttcttggcttacccctttacataagcattataaactaaaatgaaaaccaaaccagacacctgacatagagtctttattttaccccaagttttttgggccactgacattgaatgcaacaactgatttcatacaactgagttactctgttcactccactgaatgcaacccatatagtttcttgcacaaggtgcatctggattccaaatattggatttgagttgactctactcatttattatacactaaagaaattttgttcttcatagttaaatgtactagcatttaatttatattttacatacaacttgcaataatgaaattccttatgtcaggaccctgaaaataagcacatttgaaaactcttagaaaaaaaaaattctgtaatgtcctctagatttagattatgagccctgaggagttattggcaagatttgtgcaaaataaaatatggggagacttgggagttgtctttgtggtttcaaaagtgtaaataaccaattcagaaaacaaaatggaaaaacgaccccttgttaccttgattcactgtatg

SEQ ID NO: 109547 - DNA, 3088 bp, Homo sapiens
tgtccaggtctccacacctctctcagcagttaatccctttatctattccttgggtcaaaacttttgaggtgggctagctatatagcagcgggggagagggtaaactggggcgcgcgggttggaggcgcttcagcaccgcggccagcgcccactgcagcccaacccactctctagagctcccggactcctagctctgagaatgcctgcggaatgatcgccccccagggcggctgccgccgctgccgctgctgctgttattgctactgctgctgccgccgcctctgcttccactcggctctgactggcaggcagaaagtgcaactgacgagggaaaggtctctgcagtgagtggagagcctacataaaagagagtaaagaggggcaaaaacccagatcagaatgcaggcgacgtccaaccttctcaacctcctgctgctgtctttgtttgccggattagatccttccaaggatggaagtaaaaaggcaggacctcgagcagtcaccttggatcccaaaatgaaagtgttatactcagattagtcctaaagaagggtggcaggtgtacagctcagctcaggatcctgatgggcggtgcatttgcacagttgttgctccagaacaaaacctgtgttcccgggatgccaaaagcaggcaacttcgccaactactggaaaaggttcagaacatgtcccagtctattgaagtcttaaacttgagaactcagagagatttccaatatgttttaaaaatggaaacccaaatgaaagggctgaaggcaaaatttcggcagattgaagatgatcgaaagacacttatgaccaagcattttcaggagttgaaagagaaaatggacgagctcctgcctttgatccccgtgctggaacagtacaaaacagatgctaagttaatcacccagttcaaggaggaaataaggaatctgtctgctgtcctcactggtattcaggaggaaattggtgcctatgactacgaggaactacaccaaagagtgctgagcttggaaacaagacttcgtgactgcatgaaaaagctaacatgtggcaaactgatgaaaatcacaggcccagttacagtcaagacatctggaacccgatttggtgcttggatgacagaccctttagcatctgagaaaaacaacagagtctggtacatggacagttatactaacaataaaattgttcgtgaatacaaatcaattgcagactttgtcagtggggctgaatcaaggacatacaaccttcctttcaagtgggcaggaactaaccatgttgtctacaatggctcactctattttaacaagtatcagagtaatatcatcatcaaatacagctttgatatggggagagtgcttgcccaacgaagcctggagtatgctggttttcataatgtttacccctacacatggggtggattctctgacatcgacctaatggctgatgaaatcgggctgtgggctgtgtatgcaactaaccagaatgcaggcaatattgtcatcagccaacttaaccaagataccttggaggtgatgaagagctggagcactggctaccccaagagaagtgcaggggaatctttcatgatctgtgggacactgtatgtcaccaactcccacttaactggagccaaggtgtattattcctattccaccaaaacctccacatatgagtacacagacattcccttccataaccaatactttcacatatccatgcttgactacaatgcaagagatcgagctctctatgcctggaacaatggccaccaggtgctgttcaatgtcacccttttccatatcatcaagacagaggatgacacataggcaaatgtgacatgttttcattgatttaaacagtgtgatttgtgataaactctataagaccccttccgtttttttcttcactattatttttcatcatttctccaaagcaaagcatttttattgtaaagttggtgtttcaaaaacatagctgagcttgtctaacttaccatgttggaaacacatcttaacttctaaatttacaaggcctatcatgtccttgtcatgaaaagcactaaaaaaaaaaagagtttaagtggctaaagtcatagttttgcaagagattaatgatctgccttatattagagtcagagactaatggtggcttaaatgcacgaatgtctttttttttaaaactgtcattttttactgtcttttgctccatatcaggaaatattttggtaggaattaggagaacaaaaagcacttttatcccatttatttctttaaaaaatgtaaggatttcatttatattgaaaaataatattaatcattttgctgttaacacaattctctgatgcggtgctgtacagtcatttttaaatctcttgctaacattttattggcagtatgtatttctaccattgtaaccaccattgtgctattgtatctcttcacttctgtgaaagtaatattttttataaaatacactgaaatttaacctcagtaattgagtccattttcaagtgtggtcaagaataatcttcttggcttacccctttacataagcattataaactaaaatgaaaaccaaaccagacacctgacatagagtctttattttaccccaagttttttgggccactgacattgaatgcaacaactgatttcatacaactgagttactctgttcactccactgaatgcaacccatatagtttcttgcacaaggtgcatctggattccaaatattggatttgagttgactctactcatttattatacactaaagaaattttgttcttcatagttaaatgtactagcatttaatttatattttacatacaacttgcaataatgaaattccttatgtcaggaccctgaaaataagcacatttgaaaactcttagaaaaaaaaaattctgtaatgtcctctagatttagattatgagccctgaggagttattggcaagatttgtgcaaaataaaatatggggagacttgggagttgtctttgtggtttcaaaagtgtaaataaccaattcagaaaacaaaatggaaaaacgaccccttgttaccttgattcactgtatg

SEQ ID NO: 109548 - DNA, 264 bp, Homo sapiens
tgattccatataaccagtgaaaaaatgacaaaagatttcaaatgaactttttttgtctttaagtagcttaagcaagttaatttgaaatattttgctcttttacgctataaatgtatttattttatgctacaactgaatttccatgggtctttagagtatatctaagagtcagtgagagtaaactatatatatacacacacatacacacacacatatgtattttattttttatttttttgagatggagtctcactctgtcaccca

SEQ ID NO: 109549 - DNA, 656 bp, Homo sapiens
aaaccccatctctactaaaaatacgataattagccaggtgtggtggcacatgcgtgtagtcccagctaattgagaggctgaggcaggagaattgcttgaatccaggaggtggaggttgcagtgagccaagatcgaaccactgcactctagtctgggtgacagaggagcaagactctgtctcaaaaaaaaaaattctataatttttatagaaataataaaaaactaaccttagcttactgtaaattttctagtttagaaacttatttaaaaacaatttttggactcttctagtaataacgtagcttaaaacacacattgcatagctgtacaaaaatattttccttatatccttattatataagcttttatctatttaaattttgaatttttaaactttttggtcaaaaaccaagacaaacacactagcctaggcctatgcagggtcaggatcaagacatccctagcaggtgacaggaatttttcaactccattataatctgtggggccaccatcatatatatattgtacattgaccgaaacatggttacatgactatataatttgcgtcaatactgctcagtgtgccatatttaaatttacatgactatattgtgatattcttttcaaaataaagtttatttgggagataaaaaatt

SEQ ID NO: 109550 - DNA, 480 bp, Homo sapiens
aggtgagtgagttctctcttagctcctaagaaagctggttgttaaaaagagcctggcacctccctgcaacccccacttctctccccatgtaatctctgcacatgccagctctccaccttccaccatgagcagaaggaactcaccagaagcaaatgcccaatcttgaactttccagctgtcagaatcatgagccagactgggcacggtggctcaggcctgtaagcccaacactctgggaggctgaaacaggaggatcacttgaggccaggagaaagtcagcctgggcaacaaagcaagacctcatctctaaaaacaaattttaaaaatttgttaaaaactcatgagccactacgcctggtgtaaatggtatgtttttaaatttttatttatttatttagagatggagtcttgctctgtcacccagtctggggtgcagtggcgggatcttggctcactgcaacctctgcctcctgggttcaa

SEQ ID NO: 109551 - DNA, 312 bp, Homo sapiens
gatggtcttgatctcctgactttgtgatcctcccgcctcggcctcccaaattgctaggattacaggcgtgagccaccgggaagcaccacaacatatgggaaattcaaagttgggctgtaaataatcagatgacattgatgtatctttgaatataatcagcataaaagatcgataaaatgtgatcctatcagttcgcgtctagattttactgaatctaacctctacctgtttatattgtattcagttaagtatgttcacaaacataatagcacactcatatttattgagtgtgtatgatgtgtcagacacaat

SEQ ID NO: 109552 - DNA, 143 bp, Homo sapiens
gcgccgtcccagatccttcaggggactctgaaggcccatcagatgtggctgcagacccacctccctcagaccctcagctctggatctagaggtttttcttctcatccaatcagaatatgtagtccaagaacctcatttgcata

SEQ ID NO: 109553 - DNA, 796 bp, Homo sapiens
aacagtttgaatctgtggcccaattgaacaactctttgaaggaatatgggtttactgaagaagaagaaataataatggaagcaacatgtttgatggatagataccagacattactgagacaactaagtgaaatcgaggaagaggataagttactacccacagaggaccagagctttaatgatcttgcacatgatgtaattcattggataaaagagattaaagagtcccttatggttttgaattcatccgaaggcaaaatgccacttgaggaaagaatccaaaaaatcaaggaaatcattttgctgaagcctgaaggggatgccagaatagagaccatcatgaagcaggctgagagcagcgaggccccgctggttcagaagaccctcactgacatcagcaaccagtgggacaacacactccatttagctagcacctacctaagccatcaagaaaagcttctactagaaggagagaaatatttacaaagtaaggaggatctgagattaatgctcatagaattaaagaagaaacaggaagcaggctttgctctacaacatggtctgcaggagaagaaagctcagttaaagatttataagaaattcctcaagaaagcccaagatttgacatccttgctaaaggagttaaaatctcagggaaactacctcttggagtgcactaaaaatcccagcttcagtgaagagccttggctggaaataaagcatctacacgaaagtcttcttcaacaactgcaggattctgtgccaaattggacggtcacgttcgagaactgattctc

SEQ ID NO: 109554 - DNA, 353 bp, Homo sapiens
agtaagcaaaaagcttagattttcagtattatgttagttgttcattctactcctaaattaacctaatctgtctttatgtttagagagagggggatgagaagcgttaaaattctaggaagtgaaagattagagaagttaggcttaaacatgtatgtaaatatcaaatgttggttctttgagaagattttaaaatattgacaaacctttggctagacttagagagggagagagagaagacataaattactaaaatcaggaatgaaagagaagacatcactaccaacatttatgggggagagaagggattatagagaaactatgaaaaactctgtgtcaacaaattagataaacta

SEQ ID NO: 109555 - DNA, 396 bp, Homo sapiens
actgcgacaaatactttaggaagcattgcgtgagaaagttccttaatccttagataacactttaacgttgtgtctgcaaacaaaattattttgaaatgtatgattgaattagcttcatcaatcaaagaaagggtcaatgggatcagacaaccttctctgacttaaaaaaaaaaaatcttttcagtcaaaattcctaaaagattatgctgataaaaacacagttatagtgaattattttcaactattaaaaggatggaaggaaacagaaccagacgtgatagataatccgggttttagtcttgattatttctctaactgaatgtatgaccgtggagaaaacaatcacatttttgttcttcattttattcatttgtaaaataaaggaatggaacacgc

SEQ ID NO: 109556 - DNA, 176 bp, Homo sapiens
gcggcggctcatgggcctggtatcgcaggacacacgcaggagtctggtttgtatcttgaggataaagagtgctaatgaacatttgcaggggaaggcctcacctcctggcgctccgccgctccctcctctgctgtgctgatccctgtgcacttgctggaaaccattctctctccact

SEQ ID NO: 109557 - DNA, 162 bp, Homo sapiens
tgctttagttcgttcttcttagtttatgtgttgtgtgcaaagtggcttcaagctgtgtgttcttctagccttggccaaacaccctgttaatatatgtcatgaaattacagtattggtttaatattaattgttaaaagttaatagaaaagttgcatctttaag

SEQ ID NO: 109558 - DNA, 576 bp, Homo sapiens
  misc_feature (34)..(34): n is a, c, g, or t
  misc_feature (60)..(60): n is a, c, g, or t
atccttttgttacaattaaagttgctaatttgtnttcaaaattgcaggaaataaagtacncgaatcaaagaaaccaaaatatttaaaaacaaaatagctattctcccaactttcttacttataggtatgtctatacaattgtggcagaatccaaagggaaggacagtttggttagtccatttggtcacagcaaatgtacctgttcatttgttcatcaacgatttgttgagcactcaccttgtgccctgaagatacagttcagaaaaaacaccgaaaaggcccctgtgtccagcagctcacatcttaatggtggaagggagatgaaggagaacagaccataataagtaagtaaacaatgatttcagactgtgccaagagctctgaggaaaacacggtgatatgatagggagcggggaaaggtactttaggtacaatgtcagaaatgcctcccccaggccaggcgagggggtgcaagcctggaatcctagcactttgggaggccgaggtgggtggatcacttgagcccaggagtttgagaccagcctggggtttcaccatgtgaaacccagactccac

SEQ ID NO: 109559 - DNA, 551 bp, Homo sapiens
ctcagactgccagtgatatgaaattcacctgaaccctttacagttggtgacaattgttttaggaaaatatatgtgataagatgctgcaggtcctcataccagtgtcaactcagaatgtcgttcacatttcttctgagagtctccaattggccacattactgagagctttgtcataatgctttaagtcatttatcagctgaggtcactttgacttttgagattctaataaaattggcttgaacttttatcttataccctgtgggaattccaatgagcatttctggaggctttgttttcgtggtggatttttgttagagaactcttggatattccttgtttccgttgcttttctctcttctctcagagttagaaattagcttctttccacaatttccttccacacagctcacacagaccgtggaagtttagggagttggaggaagtttgcatcagagaaatttggaaggatgtttaacagcctgtttgtttgttggtttgtttgtttgtttgtttgtttgttttgctgagacggagtcccactctgttgccca

SEQ ID NO: 109560 - DNA, 403 bp, Homo sapiens
tgtctcacaggtcttggagcagcttgaggaaaaatgtccaggcttgtttgtgcgtggtgagggtgtgcctcaagaaccctccctggctgatgcatcctgttactgactgctctagagagggctgtcccgtctcctgccaccccagtgatggggatgaacaatcccatagggagaatcaaccagggaacttgaacactgccagaagttcttggaaggaaaacaatctggtgattttgttgaaattgggatctagcctttattttgggtagttaaaataagcctctgggtgatatattttgggcctaattaccccggttttcacagaggaggctattgagtgattaagtaaaggtaaatgcttggcatcatagcagctccagaaattcagagcagtttgttcaaa

SEQ ID NO: 109561 - DNA, 376 bp, Homo sapiens
aagaagggaaaaaacaggctaaagaggagtgttaaggaaagagaagagcaccaaatagcaagtgaagtgttttgaggtctgctttgtaccagatgagggttccagagacctttgatttgtgaacgcaactaaatagctgaactaggcttattctgcctatagtttgttccgttgaagcaaagattgtgtgcgcattgtattactcagagcccaggccaaggcaggtagttacagaacagttaattggtgtaggccaggcgcagtggctcacacttgtaatcacagcacattgggaagccgaggtgggaggattgcttgaggtcacgagttcaagaccagcctgggtaacatagtgatccttcctctctacaaaaaa

SEQ ID NO: 109562 - DNA, 452 bp, Homo sapiens
gcactggctccctatccgccactggccatgaaatgcttatactgacctactgacacctggctgagataaagcagttacaatgcccagaacattttattgcattcatttgcatatacatatatttgcttatctgcctggctcttcccactaaaatatctctttgagaacagggaacttttttaaaaaagcctttattttaggttaggaggtacatatgaaggtttgttacacaggtaaactcatgtcatggggggcttgatgtacagattatttcatcacccaggtatgaaacccagtgcccaacactgatcttttctgctcctctccctccttccaccctccaccctcaaggagaacccagtgtctgtagtttccttctttgagaacagggaactgatctctgccatctaacaggtatttattaactgtttaagttaattaatgaattaact

SEQ ID NO: 109563 - DNA, 670 bp, Homo sapiens
caatatttgcccttttctgcctggcttattccactcagcattttcaagattcattcatgttgtagcatgtgtcagaatttcattcctttttaaggctgaataatattctagtgtatgtatatatcacattttgtttatctgtctgttgatgggcatttgggttgttttccttagagtctttatatgtcagtaattcttaaagaatttaaaagttgtagaaactaggaattttgtagatattctagaaatatgtcatttcctgtactgtatataataatttattctacagactaattactgtgtatatatttggttctcagacgtgattttgattttgtagatgctgtacatgctcttcacttcattaatcttttccttttgctaattttggttcttgtgtatacagaattatagagttacaaggtaatttagttgttacctaattcaccctaaagtctacatgaaaccactgtcacagtctttgataagtagttaccaaatctcactatttctactgtgatagtgaatgactttcattgattagctttctgaaagaatagtttatcttacttgtcttggtatcctcacctctgagtctatttgtctattgtaatctggcttttgctccaccgctccactgattaaatggatgagctaagcattttttttt

SEQ ID NO: 109564 - DNA, 558 bp, Homo sapiens
tctataattatatatttatatacatttaaaagtttatatataacaaagtatattcctacttatttatgtgtgtatctgtatttctggagtccttattctgttccattggtctgtgtgtctgttctttcactaatcctgcagtttcgtaattactgtagctttatagtaagtctgaactcagttattgtcaatattctgactttgttcttctccttcgattttcttatttttaaactattatttatactttatcttgtattagacttttttctaatgcaaaacaatctttaaaaagtagtgttaatatatgtgatactgtgtgaagatttagaaaccctgtctggtataatcaaattgaattgggaagtcattatagggaaaagccaggatataatcattttaaatatttgccaaattcccggcatagcatcgtaaacattttagagatgctcagttgaaatttctgacaatgtgatacgatctttgtagacatacaagcttttatcttcttgccttctgcttctcttttcatttctctcctttccttttgctcttccc

SEQ ID NO: 109565 - DNA, 509 bp, Homo sapiens
atcagcagcctcctggatcctgataagcacttgcttgcttagcacactctagtgcggtgtgggaaggagggagatgagggcatggagggtgcagaatgggaggttaatcactgatccataggctgagaggtcatctggtccaatcatcctgatttcacacatgcctgaaaccaatggacacttgaacaatgagaatctggcccattttgaaaagcacccagagatgtagtgtctacccctttcccgggccaaagctgaacagctctcagtccacctcactgaagggaaatacctctcacaattagccctacagatgagagactatctggacaagtttctcagtactgacagatggttacgtagctctgctaatcccaaaccatttacggttttggtcatcagtctttctaacccagagactgggtgagttgtgagtccccttttagatttccacggggactggctctgtaaacccaaaggtcatcagtactgacaaagacagtataaga

SEQ ID NO: 109566 - DNA, 223 bp, Homo sapiens
aaaaatcccatgtctcacagaaagaaaagaaatagggtaaggtaatttattgataaagaatgtactaaccatcatatgatctagtgctcagaacaccaccgtgagattggtcccatcatatattaatatttcccaaacacttttttggtttgttttttttttgtttttggtttttttttgagacagagcttcactcttgtcacccaggctggagtgcaatggc

SEQ ID NO: 109567 - DNA, 213 bp, Homo sapiens
tcttgaaatgacaactccattcttctagtggaggctaaaaactttggagtcatctttgattgttttatatctcacattgactccatcaacaaattttgccagcattaccttcaaaatgtatccacaatctgatctctgtaacccacctccagcaagttcactctggtccaagccaccatcattaaacctggaccgtggcaaaggctttctaac

SEQ ID NO: 109568 - DNA, 395 bp, Homo sapiens
acatgattactaactaagacccacactttactcagatttctttagttttcacctaatgtcccttttctgttccagggtcctatccaggatcccacatgatatttagttttcttctctccctccgtaggttcctcctggctgtaagtttctcagattttccttggttttgatgatcttgacagttttgaggagtgccagtcaagcattttttggactgtccctcagatgggatttctttctcaacgaacctagcctgaggttctggttttagaggatggccgtagcggcaaaatgcctccttcactgcgtcataccaactatcatatcatatcatactaccgacatgacttttatcgctgttagcgttgaccttgatggcctgcctgagtgaaata

SEQ ID NO: 109569 - DNA, 453 bp, Homo sapiens
taacccagctacatgcacacaaaaacccagaagtgaattaaacatgcctggcgctcaaagaatcccttcaaggagaacacagctgcttcaaaaggaagtttttctagaatcactatgtgatttttctgacacataaggtcacctcaaaacccttcctttcacaccctacaaaaacccagcttaattagaaatatggaaataaaaatggtagttatgctgtcaagatttaggagattagtatagatttaaaacccctcaaaatcagaaatacacagtgaaacacatacctcaaaggtatgatgaatatttaactgggggctcgtatcactttaggcataagcacttttccattttgacttttcatattatggccaacttctggacatgttgttaataaactgacaagttgtcaatctagttttaaaacggggtggagtgggggtgggtgcacac

SEQ ID NO: 109570 - DNA, 303 bp, Homo sapiens
ggtatgtaaactgtatgttttctttggctagtactcagccctagcatgtagagggtgtcactattaggtcactcaaagtatgcagctggctgggcgcagtggctcacgcctgtaatcccaatactttgggaggccgaggcaggcggatcacaaggtcaggagatcgagaccatcctggctaacacggtgaaaccctgtctctactaaaaatacaaaaaattagccgggcatggtggcgggcgcctgtagtcccagctagttaggaggctgaagcaggagaatggtgtgaacccgggaggcgga

SEQ ID NO: 109571 - DNA, 560 bp, Homo sapiens
cgaggtgggtggatcacttgaggtcaggagttcaagaccagcctgaccaacatgatgaaaccctgtctctgctaaaaatacaaaattgccgagagtggtggcatatgcctgtaatcccagctatctgggaggctgtggcaggagaattgcttgaaccggggaggtggaggttgcagtgagctgagatcgtgccactgcactccagcctgggctacaagagcgaaactctgtctcaaaaaagaaaaaaaaaaaagtgaaaataaaacataattttacataatacatgacccaaagaggaagtttcaagataaattagaaaatattttaaacaggaaaaaaatgaaaatgacatttcacatcttgtggcatgcagctaatatgtagccttaaaccttatttttaaaatgaagaaaatgctcaaagccataatctaggccagtggttggcaaactttctctctatgtttggacagtaaatattttaggctttctgggccatatggtatctgccacaactattaaactctaccattgggcaaaagcagtcatcgccaatatgta

SEQ ID NO: 109572 - DNA, 626 bp, Homo sapiens
tttaatttatcttcaccaatatcagacagtaatgcattataaaaactcagatggactttgtggaagcgatcccaaaaggcacattctaagatgatgatgcaaaataacaagttatttaaacagtcatatggaagtattttaataaaatttacagttgaaagatcacttctgcaaaaaaaacctacttttagatgtacttcaaattcttaatttgaaaaatattttctattgtatttacttccttgatgtgtttatatatgaaagtttatctcattttatagtgggggatggacacgaaggtagaaatttatctaaaaaacatatttttctctaataaattgagatctagattgtgctaaatttaaatagtgattgtgatgtttatgaaagcatgtctggaaggcagctgtgtctgttggtctggtgctaaggaggaagatctgagctgcagcaagagatggacttgacaatacggacgtggatgagcacagcaaatccagggagagcaggcagagtgagaaaaggaggaaagctaggctggagccctgagtctgatatttaggggaaggaaaggggagaatatcctgaaaagtggactgaaaagaagctgagaggtacgaggaaag

SEQ ID NO: 109573 - DNA, 283 bp, Homo sapiens
ttgagatgaagtctcgctgtgtagcccaggctggagtgcagtggtgtgatctctactcactacaacctcagcctcccaggttcaagtgattctcctgcctcagcctcccgaataactgggactacaggtgtgtgtcaccatgcccggctaagttttgtatttttagtagagacggggtttcgccaggttggccaggctggtcttaaattcctgacctcaagtgatccacctacctcggcctcccaaagtgctgggattccaggcgtgagccaccacacctggc

SEQ ID NO: 109574 - DNA, 230 bp, Homo sapiens
cgagagcaaaactcccactcaaaaaaataaaaaaaataaaaaaagactggtggatgacaaaatacttcagactgcctgtgaactatcaacataatgctcatgtttccttctccttttacagatgatgaaactgaaacccagatggctaatgtaactgtaaagatcacacaaatattttatgatgttgctgtaagcagaacctaggtcttgtggctcccagtccagtgatt

SEQ ID NO: 109575 - DNA, 268 bp, Homo sapiens
gcagaggggctctgctgcctagcatttaaaagaagagggaagtaaatatttctgaggtgagtcagtaaaagtaaagaaatgcttacttcttgtaaatgagaaggtggcagatgaacacatgagggaatgggcatatattcatcccacttgtaaaacatacttcaaaggaggtaggtccaacatcaatttctttatcgtggtactttataagatttccttgtttgcttggttttaattaacagcaaccatacagcattgaaagcgaagc

SEQ ID NO: 109576 - DNA, 460 bp, Homo sapiens
gatgaatgggatgagtctcatagattaatatacaaccagtggtacctgttttcaaacttcattgaacaactaactatttggtcaacatggtcaataacttggatatttactttgtaactactgcctgtacatgtgtgcaggggagtggtgtagatattgaaattccattgtataaatttgagtcttttagaatcttcaactattaggtctggtcagaaccttcatggtcatagtcccattttggaaaactgaaagtcaaaaaacagaagaggtctttcagctggttagtgtgagagataagatttggacaggtcttcctaaccctacttgaactccacaacagccattagctaattaatctttcatttcctcccacaagaggactcagaattggacttggaataaggttaaaaagattatatttcatcagcttcccaggttttactctctttattcctgg

SEQ ID NO: 109577 - DNA, 276 bp, Homo sapiens
ccttcactcagctgtctcagctgtgagctatttttatccattacttgaaagctattgttttatttatttgtccaatcttatttatttatgaagggagagtaatgttgatatcagctacgttattgtgagtgaaactggaagcctcctaaattcttctttcaaaaaaattgtcaaatattcagtaaattaactagatttgataatttgtaaaactctaggatttcaaagttgtaatatggaataactgaatcataggcttgcctaaaaaaatgtttg

SEQ ID NO: 109578 - DNA, 398 bp, Homo sapiens
aagcatccaaagcatccctttggattgcctataagggctgactagatagagtaaaaacaagatttcaagaggaatgcttaaagttcatgagataaattattttaaagtaccattacttcagaagcattatgccaactaagaaactattcttattaaagcaagtgtccaatgaatgcctaaaaaagtcaaccttattctctggcattctcatgatcaatatatgaatatctgaaatgaattaatttttaaaaattgtatttattattttttgaatacagagtttcagtctgttacccaggccggagcgtaatggtgtgatcacagctcactgcagtctcaaattcctgggcttaagagattctctcacctaagactcctgagtaggtaggattacagaa

SEQ ID NO: 109579 - DNA, 352 bp, Homo sapiens
atgaggaacgtcactgggatgaggaacgtcactagctgaatgttcctctcctgactttgatttctctcttggtgagtcggggtgtaattcgccttgacatcactggccatcagcgccacagtgaagtgggccttctttgactcgaagtgacagctcttggcccctgtgacattgtttccatagatttgcaatgaaacagttttatatttttcaaaatagagtgatctcctatgactggcattgatgtggttttcgccatggtcttctggagggtaaagctgtttccattgacccgccctaaattgattcccttattctggcatctggacacattgctcttaggctgcctggg

SEQ ID NO: 109580 - DNA, 518 bp, Homo sapiens
cgccacccaacatgttgccaggaatagagtgctttggccataagatcaactccccaaatctcccttagtgtgatcttattattggtcctttccatttttgatgggggggaaataccctcacgtcctttgtgtgagcctgtgatggattagcacagcttggacggagtgttgctttccaaactcctgtgggtgtgtctccagctgaatgttcctctcctgactttgatttctctcttggtgagtcggggtgtaattcgccttgacatcactggccatcagcgccacagtgaagtgggccttctttgactcgaagtgacagctcttggcccctgtgacattgtttccatagatttgcaatgaaacagttttatatttttcaaaatagagtgatctcctatgactggcattgatgtggttttcgccatggtcttctggagggtaaagctgtttccattgacccgccctaaattgattcccttattctggcatctggacacattgctcttaggctgcctggg

SEQ ID NO: 109581 - DNA, 114 bp, Homo sapiens
atagggttgaaatatacctcaaaaccattcactttaaaatgaaaagtgatgtattttagttaactcttcagaatgtgctgtgaacattacctagtggtgactggatgcgtctaa

SEQ ID NO: 109582 - DNA, 741 bp, Homo sapiens
ggtctagaactttgtattaagtagctgtttaaacactttgtgtacattctgcagtatgcttgaactctgttgaaagtatttcagtggtccccgtgtggtggctcactcctgtaatctcaacactttgggaggccaaagcaggcagatctcctgaggttaggagttcgagatcagcatggccagcatggcaagacttcgtctctactaaaaatacaaaaattagcctggcgtggtggtgcacgcctgtagtcccagctacttgggaggtcaaagcaggagaatcacttgaacccaggaggtgggggttgtagtgagctgagattgcaccattgcattccagcctgggcaacaaaacgagactccctctcagaaacaaaaaagtatttcagtaaaatctatgtatttgaaatagagtcacatagaaagtagagcacatgggatcttcaaaatatattgggtagaaaaatcagaaaacaaaaattattattcattcagaaataaaggagaagaaaaaagggaataaaaaacttcaaggtcagactatgtaaaggtgccctgaaggatacaaagattagaaagcttagacgctgctggatacagatatgtaaaagtgtgagtcagaatactgaaagtaccctaataagtgctttacgttgtaatcacatgggagggataaatgggggttcagatctggcctgctgcctgttgttacgtcctgtgagctgagtgtttttctcatat

SEQ ID NO: 109583 - DNA, 532 bp, Homo sapiens
ttcacacctcacaggcacacagcaagatttagcttcttagacacaggacagacagattacagatgcttagaatcacttgaacccaggaggtgggggttgtagtgagctgagattgcaccattgcattccagcctgggcaacaaaacgagactccctctcagaaacaaaaaagtatttcagtaaaatctatgtatttgaaatagagtcacatagaaagtagagcacatgggatcttcaaaatatattgggtagaaaaatcagaaaacaaaaattattattcattcagaaataaaggagaagaaaaaagggaataaaaaacttcaaggtcagactatgtaaaggtgccctgaaggatacaaagattagaaagcttagacgctgctggatacagatatgtaaaagtgtgagtcagaatactgaaagtaccctaataagtgctttacgttgtaatcacatgggagggataaatgggggttcagatctggcctgctgcctgttgttacgtcctgtgagctgagtgtttttctcatat

SEQ ID NO: 109584 - DNA, 741 bp, Homo sapiens
gtatttcagtggtccccgtgtggtggctcactcctgtaatctcaacactttgggaggccaaagcaggcagatctcctgaggttaggagttcgagatcagcatggccagcatggcaagacttcgtctctactaaaaatacaaaaattagcctggcgtggtggtgcacgcctgtagtcccagctacttgggaggtcaaagcaggagaatcacttgaacccaggaggtgggggttgtagtgagctgagattgcaccattgcattccagcctgggcaacaaaacgagactccctctcagaaacaaaaaagtatttcagtaaaatctatgtatttgaaatagagtcacatagaaagtagagcacatgggatcttcaaaatatattgggtagaaaaatcagaaaacaaaaattattattcattcagaaataaaggagaagaaaaaagggaataaaaaacttcaaggtcagactatgtaaaggtgccctgaaggatacaaagattagaaagcttagacgctgctggatacagatatgtaaaagtgtgagtcagaatactgaaagtaccctaataagtgctttacgttgtaatcacatgggagggataaatgggggttcagaaaattaatgtttgatgcactaaggtaggaatgggccaactatggcctataggccaaatctggcctgctgcctgttgttacgtcctgtgagctgagtgtttttctcatatttaaacggatggagaaga

SEQ ID NO: 109585 - DNA, 581 bp, Homo sapiens
cgttctaacatcctaaaacaactgataccagtttagtctcagtaacacaaaatctctgcttctctacagatgttaccccccttatgttgttgtcatcacagattacacctttatacatagtggggtaaaaaacatagacttataatgcagaccttttatgcatttgttctttagatcacttaggaaatatgtaatggcaaaaaccacaattaattttgcaccaacttaatacaaagtgtacttagaaaccaaaatatagggatactaacttttatacttacctatgtagttacttttactggaggtctttatttttgtatggctttgagtccctgtctagtgttctttcatttcaaccttcaggactccctttaaaagcattccttgtggggcagtctatttgtaacaagcttcctcagcttttatctacctggatatgttttaatttctccttcattttgaagaataattttgccagataacagaattcttagttgacaggtttttttccccctcttagcagtttaactaagccgtcccactgccttctgacctccatgggttctgatgaaaaactggct

SEQ ID NO: 109586 - DNA, 273 bp, Homo sapiens
gaaaaattgggatagaaagaaatatttgaagaaatcatggccaaaatttttccaagtttgataaaaagtataaactgctaaataaaaaagctcaacaaatcttaattacaagaaatatgaagaaaatgaaaccaaggcatatcatcatcagattaggcaaaagcagtagaaaaaaacaaaaattattgtccagcacggtggctcacgcctggcccagcacttagggaggccgaggcagggggatcgcctgagcttaggagtttgagaccagcc

SEQ ID NO: 109587 - DNA, 766 bp, Homo sapiens
ttttcctttttttattgaaacgctgtgtcactctataggagcatgccaaccacctggctaatttttgtatttttagtagagatggggttttgctatgctggccaggctggtctccaactcctgacctcaggtgatctgcccacctcggcctcccaaagtgctgggattacaggcatgagccaccacgcctggcccaagactggcattttaaagatcactgctgaagagtagcccagttctctccctctctaagcctggcctgtccaaatacaaaccaaaaaacagcccttcagcttccattcacaggcagtgaagtccacctagtaacaggtaatgtcccaggctaggtcaagaagttcatcggccttttggccatcttattcttgcctgcctgtgtctgatgtggtgaggggcaggaaacgaaagtccctctccccacactggggtctgaagccctagacttagggaaagacagtgggaggcatccaacttagcagcagaccaaagtgtgatctccaaccaaggaggacgaaaatcaaaactcatacggagaaggagaaaaccttaactggtccagaatgagtagagaaaggtttgattaattaacatctacaaacagcaggtctggttctacgaagtctcgaataagacatgctgagatgctaccttagcccttcgagtaaggaggttcaggatcccaagatttctttttttttttttttgagacagagtcttgttctgtcgccaagctggagtgcgatctcag

SEQ ID NO: 109588 - DNA, 170 bp, Homo sapiens
ctcaaaaagaattgctcagttgataaaggacatgaatatttttaaaaatttattctttaaattaatatatcataaagctcattcttttggagtacagttccacgagtttttaagaaatgcacagatctgtaaccatcacctcctttctgcgatgtggggagttccttcct

SEQ ID NO: 109589 - DNA, 662 bp, Homo sapiens
ggtctttactggaatctttgcagctgaaatggtattaaaactgattgccatggatccatatgagtatttccaagtaggctggaatatttttgacagccttattgtgactttaagtttagtggagctctttctagcagatgtggaaggattgtcagttctgcgatcattcagactgctccgagtcttcaagttggcaaaatcctggccaacattgaacatgctgattaagatcattggtaactcagtaggggctctaggtaacctcaccttagtgttggccatcatcgtcttcatttttgctgtggtcggcatgcagctctttggtaagagctacaaagaatgtgtctgcaagatcaatgatgactgtacgctcccacggtggcacatgaacgacttcttccactccttcctgattgtgttccgcgtgctgtgtggagagtggatagagaccatgtgggactgtatggaggtcgctggtcaagctatgtgccttattgtttacatgatggtcatggtcattggaaacctggtggtatgtaaccagatgttcatgcattttaatttctctgtggaaattattttgtgatgatgtgatctattatttttataattttataattaattatatctacaattattaattgcaaaagaatagtgataat

SEQ ID NO: 109590 - DNA, 173 bp, Homo sapiens
tgttgctaagatcctacctgaaccaactgtgaaaggctttcaagttgaatgtaaattgatgagacgttggagatggaactagcttggggagcagttggagttacagatagaacacagaaatcctggaaaccaagccacacccagtaaacagcaactggctccaactttccctg

SEQ ID NO: 109591 - DNA, 484 bp, Homo sapiens
cacgcacgtacacgcacacatacacaagaagaaagcgtggagagagggtaactcgactcccctgcccccctccccaccagcctgcagaggcgaggggtcggggagaaggagggcctctgctctatcctcccaggtatctaaccctccctgggcagctgtcagcttccatttgcatgaatgaaaactgtggtcaactggtacctgggagagaacaaagcaggaaataaaaggggctgtcacttactcaaatccaaagctcatcaagtctaactaaagggagtgccacattccgcacccccagttcggagggaaggatttgctggctgggccccgacgcccctccccctcgctgacactgacaaaggatctggttctcactgaaactgcttctcttgtgactgtttctagtctccaaaaagactgtatttatatttttaattagctgctttttacagcaattttttaagtattatgatgacttaca

SEQ ID NO: 109592 - DNA, 424 bp, Homo sapiens
caccccagtgacagcatcgttcctaacccagctgcatcctggaccccgtctcttctgaccaaggtgtggaaaatccctttgctagactagaaagagatagaccaacataaaaacaaatgctggtgcttagctaggggcaattttgcccctgaggaacaggcatattaccatgtttggagacattttttgttgtcataactagaggtagtggtgctaatggcatctggtggggacagtccagggttactgctaagcatcctacagcacacaggctagccccccaccacaggggattatctaggcccaaacctcaatggtgccagggttggctggcgcggtggcaaacgcccgtaatcccagcactttgggaggccgaggcagatggatcacctgaggtcaggagtagttcaagaccagcctggcc

SEQ ID NO: 109593 - DNA, 457 bp, Homo sapiens
aaattaatacgactcactaggggaatttgccctcgaggcccaagaattcggcacgaggatggcagtttgctttattaaagatagcaaaggagaaaatctctagcaagatggaagtcactctcctatgaaacctggtcacagaagtgacatctctccacctttccacactgtatgggttagaagcaagtcacaggtttcacacacatttgtggggagaggattgcacaatgcacgggggtgaggaccattgccagccatctccaaagaagctgtgaaccacatgccttacatgctttgtctcacacacacacataatttttatcagttcaacattaagtaaaaagtattcttaaaatttactttgagaaattgccacactgccttccacaatggttgaactatactggataaagaaaatgtggacatatacaccatggaatactatgcagccatgaaa

SEQ ID NO: 109594 - DNA, 761 bp, Homo sapiens
gcacaatcatgggtcagtgcagcttcatcttcctgggcttatgtaatcctcttgcctcagcctcccaagtagctgggaccacaggtgtgtgtcaccatgaccagctaatttttttttactttttaatttttttagagatggagtctcactatgttgcccaggcttatctcaaactcctgggctcaagtgatcttcctgccttgacctcccagagtattggcattacaggagcaagccattgtgcctggcctgctttcttttactaataggcttaatcaactttaataaaatttagattaagatctttcaaatttttttaaaattgattttatctgtcactcatattctttgtccattccatttactatgcattcttatttaacaggtgataattttatattccataagtgcttaaacaccattcattactgaactgcatttttgtttaatttcacataatttttatataagcagtactctttctcagtttctcttgaacattcaactcattagtgagtggttttcccctgtcatttccatttttctttatttggctctgatagttttctgtttttgtttttcagagataatcctttactatactaaattctacatgattatattttccacctctatttgcctatatttatctgttgtcttttccttttccatatatgggctttttttttccctcttcttccttttctacctttggtatttaaaaagttacttaggactgaatgcactggcttacgcgtgta

SEQ ID NO: 109595 - DNA, 162 bp, Homo sapiens
ccagcaccctcccaacttccctccgggctccagctcagtcccgagtcaatatgtccagccccctgtctctgaccagccgttcctactctctctgtgtgacggcttagcctggccagccagccggtgagtggaagcggcggctcctgactcctggtggcggca

SEQ ID NO: 109596 - DNA, 151 bp, Homo sapiens
agggaacaccacccaacgtcttcccccgaaaccagtcctactccctcctacacaacagtggtccctgctcaaggcgcacagttccaaacttcctccacccaaaggctttccagaggatgaagacctcctttaaggacatctcgagaacctc

SEQ ID NO: 109597 - DNA, 661 bp, Homo sapiens
gctatttcagtggggtttagtaggagggataagcaaatggtttgtttctttattgtcttctttatttattggttgtaaatatgatttttaatgagtatataatgttctaccatttttaaaaactacttttctcttgctggtggttttaatttttctgtctttttgctaatataagtaaacctgcattgactattttattatatatatttgtatatatttttagttattattttcttcttaaaaatttcctgagagtatattcagtgggtcagtgagattgtttttagatcaagaaccttaaaactgttcagttttctcaaaaatgtccaaatcacatcagccacatatcagagtccatttgatatatttatactatataggggatgtaaatttacctgagagaaaatcatttgcttataatcagtcattctcagtgttctactgctagtgtcctcatcctctattatctcattcagggaatttttttaggcttcagaactcattgtttttaaggattctttaaaatataattttaagtgattgggtgtagaagccttttccaaaacctaatactagtgtgagataaaactgtagcctgaatatttgtatggtcacaagcagctttactgcatttttgtaaaatattccaacagtacagaaa

SEQ ID NO: 109598 - DNA, 1997 bp, Homo sapiens
  misc_feature (1541)..(1541): n is a, c, g, or t
gggagcatctgaagggataatgatttttaagtggtaccctgttcatgccaggaccagcatttgtacatgggaaaataatcttaagatgagtgaaaagcaaatgctagaccacacctttaataggcccaagtgccaacaaaaatacgtgtgagtgggattcccacggagaaatgtttctgaatgaaaatgaaacccttgataatgaatcctgaggccagaatgccaaagtcacagtattctgtcatttacagcccctaaaaaatcccaggtgtttgtgatgacaagccactattataagtactctgtattagtgactacttggcaagtaaaattttctcaaatgttatttttcatagatctccaagcaacaatcacttgcagtgtatctgacaaaatgctatacatgattttctaaaagtattttgatcactccagaaagaaatcagaataaagctgcataccccaaatcctagaaaattcacaaatattttgctcaagttcaggctctctcagcttctcttttctctttaacttttgcctcatacagaggcaatcttgatgacaaaagattgggctcaatttttgtttttcttatgtagaaaagcaacacctctgtttcggactactgttcagtagacaaaaagcatcccagctttcgaaatgagagtccaaattgggttaccactgagattttaaattatgatgtgaaattggagaaggtgaactgtacagggccagacaaataatagagcccactctctgggcagttgcatgcagtcttgctgggtgctgagctgagagactgagagccgcttttgagacgtgttttgaggcatatcttccttaaatttttgctggtgtctgttttttagaagttttgccattagcatttttcactttgagtatctagccatggagaatgctctaaaaaatacaaggagacagggggatgctttatctatttggcttagtcactggttcagggtgaagtttcataatttattctgataatctggaggggatgacctccttcacagtactgttaaagccttccttgaacaagctcatttcactatataacttcctaaagacaaggctgattatttaaggatttcagagatatcatttggggaataactcaccatctgccccttctctgagagtttagcctttcttaggatacttccttttccaggctagaaaagattgattgtattcatatcccaaagtaaaggctcctccaattctatcagatgtggaggcaacagaaaatgactcatgttatttttctctcacttcacagcatcaagaactcttcttgtttatgtgggggccatggtggattagcttgaggaactgtcaaattaaaatgaaaggaaagcaagttggggcaagaaaattctcactctgaatgtgaaagaaaatagcagtgttcttctctctggcaaagatttgtgtactgttgggggaagattcatgttatttctcaggtagactttactttttgagattctgtgtgtgtgtgtgtgtgtgtgtgtgtntgtgtgtgtgtgtgtgtgtattttgcctggtggggggttaaaggcagatagaatgtagttgtttatgagtttatactttctctttagcataatagatgccctgtttattttctcagaatgtgacaataaaattaggaaaggagaggaattcagaggcccatgttgcagttcatggcaaagttttacccaaatatttccttcagaaacatttagtcatagcaagccatataaattattgtctgcaactggtatcagaaaaagaaatcagtaggtggggactgtagaccccaatggtgcatctgtttacaatctttcttttccaaggttttaaggttcatgaataacatgagggaattttgggagagctaccacatcagtactttggcacgcattaactgttccacaggaaaactagggttgcttcagggctatttttgtttgaaatgacacacatac

SEQ ID NO: 109599 - DNA, 649 bp, Homo sapiens
ggactgcttgaacccagagtcaaggctgcagtgagccgtgatcacaccactacactccagcctgggcgacagagcaagaccagtctgtttaaaaataaataaataacaaatgcctgttggttgtaaaaattgaatactgaagtgtatcctctttgattcaattttcttttctttttttttttttttttttgagacagtcttgctgtgtcacccagggcgtgggagtgtgcaggtgggtgcggatctgggcctcacgtgaaagaaccttgccaccgtgcgttggacacgaaggcgaatggcgcccggagccgtgtacgcgcatcgcacgaagctagcggggacatgcggcgagggtggcaatgccgaccggcgagccggcggtaaaaatatatttggagcgcgtaattagagcggcggaagacagaggcggtgccacacaagggtcgagccagcaagagaccggggtactctacgagaaacatgcgcagagaaacacaagagagggtacacggacccgcacaattagagaatcgtgagggagacgtaccaacaaagcgcgacgagagaggaaataaaaaagggtggtgaaagacaacaatgcgaatgatacaaactgtgaccaaaaagcaaaacagagaataaaacaaga

SEQ ID NO: 109600 - DNA, 150 bp, Homo sapiens
gcgggactcacccagctgaggcttcaataaactggtgaattgggtggagaagggccaggcacagaacactttggtgctgatgagtggagcggacagagcttttacccttcaaagatctaccacagtgtgtgtgagatctggatgggccag

SEQ ID NO: 109601 - DNA, 440 bp, Homo sapiens
gggcctgttccatcgccgctcagcaaatagaatgtgatgacaaggcactgctgcgtgggagcatccaagcagctggtgcgccatagggaacagggcgagggctttgcaggcaacaggctgagccttgatccctgcctctgcacctgctagctacgcatcgcagacgggcctcagtttcttcagctgtgaaatgggaccataattctctacccccaggggcagtgtggaagataaaaggagacctgggatgcctgacccctcaccaatttgccagacacggacgcagagagcagggagcacacgcggtatccctgacccaccctcaccctgagagaccaggctctgttcagggcagcttggtgttcaggggcagagcacagaagccagtcggctgacctaagcgcatcggccaccaggaacctggggtgcgagcagggctg

SEQ ID NO: 109602 - DNA, 427 bp, Homo sapiens
ttctccaccttcagtgccatggatttccttggtctgggtgtgttgaagcctcacccaatgatcggagtgtgtggccagggtggagaagcatacagcgctggatgctctcagcagaggcctttggcccagagcttctgtagaagcaggcagggagcctgcacttcccgccttccaccacccatggctctggacaatgacacactgggcaagacatacatatatcagtgggcacagaagatctctttctgtttctgctcagggtgtttctgtgtaggaaaagaaatcccatctttcttcattgaagcccaaaaccagcagaactgctcttccacctggcccttctagtatgtgaacttggttcctgtaggaagctgtggctctactgtcccctccagaggccacaccaaggtctggaggaggcaggggc

SEQ ID NO: 109603 - DNA, 239 bp, Homo sapiens
ctttaatgtataatttttaataatattttgaaaatacaatttaacaatatgaaagtgttatttcatgtgtacctaaaaactaatgggacttatttaagactttattttttttagagcagttttaggttcacagtaaaattgagaggagggtaccgagatttcctgtgggtaaatttccctacccacactcatacctagcttcccccgtaatcagcatcccccttcagagtgatacattt

SEQ ID NO: 109604 - DNA, 796 bp, Homo sapiens
tcacaccatgtaacatgttgaaaccctatgtctaaaatattgtatacctatttttatttgatttactaaattctaaagcttttctaaatctctaaaaggtagtttccccagtaatgcataactgcttaatcgggaagtgtacaaaacataattacactgcctaaaactacaatattgcttatgggaatatctccgttcatgcattccactttattttgtatttaatctctattaagatgtctatgtgaaaacagataggtattcttcataaacaccataaatcataaagtcatttctttgctaactcaagtccaaaagcggccccaaaagaaactgccagggccccaaagactatcactttccatattcaagcagacaagctccttgcacagaggcctcagtgcagagccccaaaacacctagccctgggccaattagtcaggtcataatttctctcaccataaatggctctgcatgcaactcaaaaagcacccagacgctccccagaaagcagtcactcaaaccaagaagagcaattcctttctgctcaagaccccagttacaaacctcatatcaaggggcaaacagagtcccttaaatccttcttcatctaaggacacccgtggatgctctttcaagttcacctttcaacccgggggactcccaccaaaggctccagactcttgaaactggattctcctgcttcccttctggccttcgaatttgcacccacccgctcatccctagaatggggtcatgtgaatacacaaccattctctggacggcctggtattgg

SEQ ID NO: 109605 - DNA, 369 bp, Homo sapiens
tatctatagagtgatcactataatacctcccaaaaggaaagataaaatccctgaaagtgcattaccttagaggcttattttaaaacaagttttatttttttatttcacatttttaaagttccaaattatgcttggaaaagataatatcatttaggcctttaagttttttttagctttgaattcactgatatgtatttttcatttagatttgaaatatgataattgagaagagtatattcaacaaaagaagagtgaagtaatatatgaatgtatatgtaaacctaactacatatatttatagaaatatgcatatgcttccataaatattaaccatacgtgattatgtttgtaatattcacatattgctta

SEQ ID NO: 109606 - DNA, 211 bp, Homo sapiens
aagcaccaggcccgcctctagctttgttaagaagtaagctgggttccctctgctccccaactccacagcaggctgaagtggctgaagcagaaccgtgcttttcatcaccaataaacaggaccttctcaaggttctagttccctctgagctgccagccccgctctgaaacaggcatctgggcaccattttttcctttccagccgttcgatgt

SEQ ID NO: 109607 - DNA, 226 bp, Homo sapiens
tttaaatataaaatctgttgcccaaagacaaagttttttccaaaggaagatatttagctcttcaacaacagatctaggaatggatatttgatttgctgacttatgttgcttttccttttgtcgtatttgtctttttaatgaaataataatctgaaaagtcattttagcacctataacagtgcaatttaacattgaacagcttacaagtaaaattttaacatcataa

SEQ ID NO: 109608 - DNA, 307 bp, Homo sapiens
ccagcaacattcttagcacctccaggacagagacaggacaggattgtgacatacagcaagaaaacagcatttccaggagggaggggtatctagggagaagtgcctgtcaggagatccttggcaagatgacagtgtgtcctggaggaaatgtgttattcctccctttgaaagccagggagcagggtgcctcctcatgaggaggcctagcatgaacctgacactcagaatatctgttcccatgcgggcaggggctccctggcctttgtggcccccactgaggttgtgtgtctgccctccgcagcgcgag

SEQ ID NO: 109609 - DNA, 532 bp, Homo sapiens
cctctctgtgcccgagagagagactgtaaaggaatgtgtcaccatccatgcatatgaagccgatgcctgcaccccaaggcctccggcaccctggtgtggtttccaggcactgggtgggttgcagggggacctgccgggaaagggctgggagacgcccaagggtggagactggggcaagggccagcccacaccaggtgccaaaaactacgggatgcttccggggcagggaccatgggggcccatgagcaagcagggctgtggggaactagaactgaccagacctcccttggggccccacttggctccaggaagatgctcctgctagcaggaccaaggagaagcagagtcccccagggatggaagttagaggaggtgacaggcagggctaggcagagggaaggaagggggtgcctggcttagggctgctccctggggaggcctctctgcccagggcagcctccgtgaagatgcctgggacccagccccttgctgagccttgcttctcttccctcttgtaagttcccactccagg

SEQ ID NO: 109610 - DNA, 361 bp, Homo sapiens
accccttgggcagaacacccacacttgccacagtccacaccattccctattactgacatacaaggctagtttcgctcaattaattctgcatagcttagtttgttagctcttgatgggaatgaaatgatttagaggtcaacaaccagtctcataaaaaataagccacacaaagaactaaaattaggaacaaaaatcaagcagtaaaaattgcacttttccccaatatttttggtattcattagagctctatcctaagtcctcttctcttctcatttcacacacattttacagacacatcccatctgctcccaaccaattatccatgggctggtgcattattctgtctctaacctggtggtcc

SEQ ID NO: 109611 - DNA, 664 bp, Homo sapiens
cccactgtctggcactccctagtgagatgaacccggtacctcagatggaaatgcagaaatcacccgtcttctgcgtcactcacgctgggagctgtagaccggagctgttcctattcggccatcttggctcctcctcttccctgttctttaattaatcccatttcccaatctccgcccttttagcactccataaaagggatcatgtaatctgaaacctagaacgttagaatatatttgagaatgcccatgtcttagagaacgtgcttgaattctaattctccattagtcctttaaagtttcgttattctcagtcttcacatttatacttctttattattcatcatgatcttgtatgattttgttcctttgaaggccaaaccagtttaaacttatgtatgtatgtatgtatgtatgtatgtttgtgtctatttttttttcattcttctaggaaagggggaataaattgctaggaaggagtaaagatggtaagatgttttctgacttggggagctggtcctcacttaagctgagagcacctgtagtggaaaaatatatgagatttcatttttttttggctccccacagtttgtctgcccaaaacaatgtcctgcagtgttcttggggatgtgtaagagcacgacttttttttccctataaatctaga

SEQ ID NO: 109612 - DNA, 439 bp, Homo sapiens
gggtacttagtctcctggatccacaaggtagaatcacattaccctgaagagttgtagtaactagtaaagatggaatgatatgaacacaaagcccccggcatagcataggcagtcaacacacaggcagtcattactttgagccaccagtattaatagtgctgcttgtctgtcacagtgcccacagaccattccaccagaggcttcgcatgtgtacaggcacaaaaacaaaagcattcagtatcaaaagaaggcccaaaacaatggactaaatgtttccttttctcattcattgttctggcagcatagggaagtgtagcctacataaaggtaggccccaaatgacttttctctgccaccgtcccctgtgtgaccttaaccatgacactttgctgttcctggcccttgatttttttttttttaatctggaaatgggagggtg

SEQ ID NO: 109613 - DNA, 208 bp, Homo sapiens
aatgggctctggggatgactgtgtagagttaaagtaagctctgaaacccttcactatttatttcagtagaaaagaaatgtcattgttggcagtaatctagacacgtctcctttaaatggtggcggtggtctgtgtctgcattcaaaggtgtggcacatcgtttcatcttttcgtagtacaaaaggagtttcatttaacaatttcatac

SEQ ID NO: 109614 - DNA, 279 bp, Homo sapiens
ccccagctgttgctttctcagccttgtgaaatttcacccttagtttccacagctgattaatcagcagccaacttgacaaatagttagccagtttgctagagctctttctctccagtattctaatccacaaattttagcctctttaatctctttgaaatctgacacctgtctccttaattcagcaaaacctccaggaagaaagtggacaaccataaagctcacctcattggtttcccttttctcagacattacagtcctgcactgcccattggctaatgt

SEQ ID NO: 109615 - DNA, 104 bp, Homo sapiens
agcctgagaaccaaagctcatcagccctcattttccactctgacattggtcactcctactccagattgacatatggctcgtttttggtctgccactctgccttt

SEQ ID NO: 109616 - DNA, 757 bp, Homo sapiens
tagcaaggctccagctgcatcagctggtggccaacattttaggatgataaattcaagaactcactagctaatgcctcctctccctctggtgccatggcctcacccttcaactcctctgggcttttaaacctcaggcctctaattatctgaccaggaagctgaagtccactgtattgtaatttcctatctgattcgcaccatatagagtatatttatgcattgcaagaaaatagttatgtttgcagtattaagtctatgcacactaaaaatcaagctgtttatttcctggtctaaaaaaaaaactgttgggaaaatgttcatctattcaaatactttctcttctctctgctacctagaccagttttagcttatcactgttttcagttgctatatataaaatgtgaatagttgcttggattaaatattttaggactcatgccaatgcctcctacataataaggatccttaagcatgaaggcctgaaatccttgttctgattcataacataccaaataaatggaaaaatcgcaaacagttgtcatgttttatataatctaccacgtataatgccagaagttactgctatgtatttcctgagcggaatatagcaatatctcagtattatgaggtacctctctaagggactcagcagtttgtgttgtggtggttgttgtgtagccaagctatgcaaaaaattggaatttgttttataaacaaggatctccgcagactgccagattttaactgcataatacta

SEQ ID NO: 109617 - DNA, 328 bp, Homo sapiens
ggctaggagagtcgaaagctgaaaggaatagtaccaaagagacagagggggaaaaagtgctcaagagcttctacttaggccagggcgcagtggctcacgcctgtaattccagcactttgagaggccaaggcgggcagatcacctgaggccaggagttcgagaccagcctggccagcatggtgaaaccctgtctctactaaaaatgcaaaaaattagccagacgtggtggcgtgcacctgtagtcccagctactcagaaggctgaggcaggagaatcgcctgaacctgccaaggccgaggctgcagtgagccgagatcacaccactgca

SEQ ID NO: 109618 - DNA, 432 bp, Homo sapiens
gggttttttttgttaagattagtagccttttataattttgtaaatttagcaatatgtctttaatggaaaaaaagcagtgtattttaagtcagactttttcttctgaaataatctgtccttggatatgcagtttagtctctctgggttttgatattctttcactgtaaaatgtgaaaactggactgaacccagtggtttcaaaagaatgtctttagttctgaatgaaatataacctgaaagctccatatttaaaataggggattgaagggcaacagacttcacacagcaggcactaaggtgcctcattgaaaaccttggagttctgcagaatgtgactaagtacttaactaatctctagggtgccttccagataatgaagtgtgatttttgtattgtctatgtgtgttgggacctttaaagccgcattccact

SEQ ID NO: 109619 - DNA, 280 bp, Homo sapiens
caagtactcttaactctgcaccaagtgaagaactgagaaattactgcagtaaaatatttgaggtattatattacacattaaatacgtttaagttgtagggaagtgagtgctcaatacacactcatttcttcattggcaagtctttcataccaggccccttgaaaacttattttctgggctgtttttcaggaactccaaattggctacaactgctctcttttgactctgtactagaggcaactatcagtctcacactcagcttcagcccatgttcccttcc

SEQ ID NO: 109620 - DNA, 578 bp, Homo sapiens
gattaggccactgaaagctgttttgttagttaaatgtctatctttgttagtaatatatcaaattttacccatctaattgatggtgattatgtatgaacatacatatatgatctatgtagattatgacctgtaaaaatgctaggtctttaataatatcataaaaagagactggacagtataatttatttagtaagcattctaattcaacaataaaatttggtctaattgttaccacttttgttatataaaataagttagataaacatagccagcagatttacatccaaatgcaaaacagtcactattctaagttaatatcacattacagtttgcttctactagcatgtttcaaggaaatgcattcttataatttaaataaatatgttcttgtcgataaaattctcagaattaaaatctcaatatgtcaaactttttacaaatagtaaatcagattctaatcgattataccaaaagtgatcatgtcttgttatagaaacctggatgattttctagattgtgagatttcaaaaacattataatttaaaattaggtgacaccattcacatttgtagccattg

SEQ ID NO: 109621 - DNA, 225 bp, Homo sapiens
gtaaaggaatgcgggcaaggattcttacttacaagcatcatattttgggacctctgtgcaggtctttacaatcttccccactcatcattctttcagcccacgcatatttactgagcagctgcaatgggccaggtaacgtttgtgggggctaagtctacagcagggaacaaaacagatgaagggagctgaaattctaggggaggcagagactatgcaaagaaatga

SEQ ID NO: 109622 - DNA, 212 bp, Homo sapiens
tatgataatatttgttgcttccattagaagtaatgaaattgtgtttatgaaagcatttggtgtcctttaagctcaaaggtgttatgcaaataaagtattttattatcatttctatacacctttcatgtgtacataactcaaatgaaagtcaagaaaaggttatatacccaagagttctgttcagtcagaatttatttatattaatcaatgat

SEQ ID NO: 109623 - DNA, 563 bp, Homo sapiens
gggagcgatggctagagagatgatcagaggaagtatttgtggggcccagagacctagctctgggggcaccctcaaggtgggaccagcccaaagccttgttttaaagcatccctccagaaatctctgcttatgccaggtgccaggtcattgcaaaatccacacctgacccaaagaagttcaagatcttcttcccactgtacaggaaaaaggggggtagtttataagaaagcagaacaaaattcagaaactctggtcccctatctgtgggcagtctcctgctgcactttcaacccagcacctgtatttccttcttacaacaccagctcgaagcctgaaacaaagaggaaggagaaaagaaaagtatgcctggcctaagagatggtgtccagaggatgggggtggaagtccctttcagacacaaaatgcattcactgacctcagggagcagagtcaggactgtgctgttcacctttttgtctgacaaatcttaggcctgatcagctagaagggcagtgttccggggaggggcaggtgaaacccagcggggctgtagctgtagtccc

SEQ ID NO: 109624 - DNA, 465 bp, Homo sapiens
ggcctgctggcctcacagggagagggaggaaggggggtccaccctggccaggtgcactctggtgagagcagcccacagaggccttgtggtctcccaacttcctcagtccttaggatgctaacagggctgtagcagagcgagtcctcaaaaccaaggggcttccccaccactctgaatccaccagcaatctctgcctctgcacggcacccagggcagggtggtccttccccgcttttctattccagaccgtccatgaactgcctccatttcctccacccacccccaacatagcctccttcatggagcatatacacatgtgcaagtgcatatgttcagacccacacacacacacactcacactcatacacactcacacaaacacatccatacacacatgcactcacacttacacacacactcccacacatacacacccacacatgcactcacactcatacacacact

SEQ ID NO: 109625 - DNA, 765 bp, Homo sapiens
gggatcccggtactggcggcaaggggaacctccccaattgcactgggcttcagaagaatgtgggccccacttgtttatgtgtgctaagatggcattcttcttgttgtattgatttcgtagatctgtcctctattattttaatttgagagatttgttaccacaacccagaaaggtgaagaatttaaaaaatctaaactatcatgtagttgtttcatttttttaatcagagtactattaggcacataatacctgcttaggagccatttacctcttgacttatacactgtaaaacagagttatgcatgtaaaagcacaaggtctgtcgacagactgggttcaactcccatctctggcacttcatagctttgtgaatctctgcctcagtttcctcagctttatagcaggaatacgaatagtgtttcagtctattttctctgctataatagcataccacagactggtatttataaagaaacaaggtttctggaggctgggaaatccgagagcatggtgctgacatctggtgagggtcaacctatggtgcaaggcatcacctggccagctaatgcatgagacagagaaaggaaattgggtcaaacgcatctttttaaatcagaaactcactctcaataactaacccactcctgccactgttgccgtgtaattgttacaatggcagttaaatttcaacttgcatttctgaggggacattcaagtcatagcaaatagtaactatatcataggcttgttatgaggattaaatgg

SEQ ID NO: 109626 - DNA, 359 bp, Homo sapiens
attatacaaattcagaagaaaagctgaggggcagatcatgttaaggggaaaaaacaaaaccaaaaaagcaaaaacaaaaacctctatcttatactaaacattcaaaggtttaaaaaacaaaaaaattaaatctcaactggtgacccagggattatctgctgaccccagaggtctatctaaccattcgtttaatgatctccaactcagaaacaggtctggcagtaagaactctgcagggtagctcaaagagagctggtagaaccagatgtttttaagaaaggagagcagacctacccttttgaataactaccagctgtgctgttttatattctgtcccaaagctgtgaccagttggcatt

SEQ ID NO: 109627 - DNA, 416 bp, Homo sapiens
ggctttctgagatgtgaggatggaaatgcttttctctaagaaccctattctgggatagggaagccaaattggaaatgtggagccacactgatatacagcttccagaatagtcatatttccccgttccaaccacacataaattcctaaacttgcttcacacagagaatctgggaagtgaacaaagcctatgttttccctcttctactctccaaagtgtgggttgtgtgttggcaccttaggacaggaagggaatttagaccgcatgctcttgattgcacagtctgggagggtatggggtggtaaggagagcaaatgttcagctaggccagtagaatgttgccaccaatctgtcactaacgcagctgccaaaattttcacattgccgagaaagtaagtctttaaagcaaaggctcttt

SEQ ID NO: 109628 - DNA, 210 bp, Homo sapiens
tcttcccaagggactcctcttctagaaggtgctaagcttcacaaattcggctggacacaaatagttctgctcagcatggggcatgggaaagatggacagcagctgcagttggcttggccacagatgggcaggtgggaaagtggggtctgcactttgcaaaccacagttcattcttcctcccctcctggatgcccagttactccctgggcc

SEQ ID NO: 109629 - DNA, 469 bp, Homo sapiens
ataaccgctctccgagttcatgctcttctgaggtctagaaagaaatgggtgtctctgtcccaacctggttagttattctgtctctaaaaacacaattaagtcaatgttaagactaagttcattaagctgctcgtgtttttatgccttgacagtttgttaatggtggttgcataagttttacagaactagtttcgtcttgttgcccaggctggagggcaatggtgtgacctcagctcaccgcaacctccgcctcctgggttcaagcgattctcctgcctcagcctcccaagtagctgggattacaggcatgcgccaccatgcctggcttattttgtatttttcgtagagacagggtttctccatgttggtctggctggtctcgaactcctgacctcaggtgatctgcccgccttgacctcccaaagtgcagggattacaggcatgagccaccgcggccagcctgtagtca

SEQ ID NO: 109630 - DNA, 817 bp, Homo sapiens
ggagtataaaacaataaaacaatatgagagggtctctctcttccctcaccagagggggccaaagttttatgagacatctcctcatctgtgcacagatgggtggcggactctggagtccaggctgttgcttcccattctagtggtgaatcttccatagtctggtattgttgtctctaacccagacctgatcacctggctacagcaaggaaaagaaactttgaccatgaagagacaggtgatgattgccaaacacacaggtattgttgtctccaagccagacctgatcatctgtctggagcaaggaaaaatcctttgagtatgaggagacatgagatgattgccaaacacccaggtgggtgcaagtgaaagtgaatacaacagacgacacagatggagtttcactcttgttgcttagactggagtgcaatggtgtgaccccagttcactgcaacctctgcctctcaggttcaagcaattttcctgcctcagcctcccaagtaggtgggagtacaggcgcctgcaaccacacccaggtaattttttctattttaagtagaaatggggtttgaccatgatggccaggctggtcttgaattcctgatctcaggtggtctacctgcctcggcatcacaaagtgctggtattacaggcatgagccaccacatccagccttgtgtattttggagatagtgtctcactctgtcaaccaggctgatttgctcggttcactgctgcctgaatctcccaaactcagatgatcctctcatatcagcctctcaagtagctgcattacaagtatgtaacatcacacccagcc

SEQ ID NO: 109631 - DNA, 869 bp, Homo sapiens
cgggaggcagaggttgcagtgagccgagatggcaccattgcaccccagcccgggtgacagagtgaggctgtgtctcaaaaacaaacaagtaaacgaaaaaatactgccatgtgggtgagttcctgttactgatgggaatgtgttgggtcaaagtggaggggaaaaatgctgaaaatcaccacatcagagagagagactttacagccctcggaaaagaggccactgggaaaggctcttgttttataagctttttccgacgtgtgcgtcctttccttttgtccttcgtggccacggggcaccataaaactggggccagtctgtcggatggaagccggacggcgtccgacgtccgggcagcccgcaggtcccgctctccgcagcaaggcccgcttacaacctgggagttttggaagtccgctcggccagcccttccccaggctttgctggggctgcagaagaactcttagggcagtcgacgcggtgaggcatgtacggacagagtttggccttattcagtctaattatgaaaattcttggcaggaattctacatgaatcacctccaaaaaaatttacgttaaagttaatgctacaagtctgacttcagcccacaaaactcagaaaactaggttctgcgtctacaaatgcagccttaactcctccttgtccacagactagtgacttttaccacaaacaagggagcgtgaattttgttaggaatctgcccgtggggggtgaggttggcttcggagggggccgccccagtggggatttggtctaccctgaatgaaggcaggcgtcaggccctttggctgcggtcataatacgttgtatgacttccggcagctccttagcctctctgaacctcagt

SEQ ID NO: 109632 - DNA, 742 bp, Homo sapiens
gggcgtgaaataacctcacactcggtgttaggtgctcttgttggtgaccttgggccatgccatatacccctgaacttcagttccattttggtctctggttttacttaatattctatgagccttgaggccaacataattctgatacactggtaagccacaaaccaagtgagaccaaccagaatgtcaccatgggcatgaagcatttttcttagattttctgggctttgatatctcaaccacagggtgtgctgaagcctgaaaactgggccagattgtggaatttgtctatgatctctctccctggtcttttactgcataaccctgctggtcacatggtgttatccactttctttctccagcaattaactgtcaccattattgctaatgatatatgatcaacactatagtaagcatccctgtgcaaatgacatgtaatttagagaaagttgatccactgtttaaaaaacaccctaccgtcctgccattatgactataatagaatgaagaggattgagccctgaaatgcaggtcaggagacttgagttctattccaaccctgctgcttattatctgtgggaccatggacaatcacttcctttctctgggcctcagtttccaaagctgcagaattaatagggtgggctcaatgctttaaaggttctctcctctgtcaatgccacatcacagcctttcacagtgccctcaaggcctttctgttgaacctatttcttattgtttttga

SEQ ID NO: 109633 - DNA, 356 bp, Homo sapiens
ccaggctggtctggaacgccttggctcaaggaaccctgctgctgccttagccttccaaagtgctgggattataggcgtgaggcaccgtgcccagcctggtgatgtttctttaaatgttacttgcttttaaaaatatttgtgccaaggattataacttaatcagctgactccttagagaagaaattctgatattttagatctagattgtgggaacaaatgttaacttgggattttccctgtcattttagttatgtggtgaaatgtgaaaaaaccacactgattcttttatatcttaccatgtgaattatttacctctcattccgctcatttcttatagtcttgatattcttacaact

SEQ ID NO: 109634 - DNA, 386 bp, Homo sapiens
ggttttaatatttatatggttggatcagctattttcatcatggcatttgggtgtaacgtatttaggaaggcgtttcctctgtattagaaatatatgaatccatagttgcctaattcttctatagttttatttataaaatgagtttctctcctacttggaagcttcttctaggatgaaatagaataattaagcatagccctgcccctcctacctcctgaaagtgcatactcatcatgaccttgttttcttctactgccttttcctatgtccttgcttcactttcactccctacatctattattaagcctttctagatctttcctagccctgagtttatctatatatctttcagtaatttcttctctccttcccccatcagaaaataa

SEQ ID NO: 109635 - DNA, 739 bp, Homo sapiens
ggaagagaggatgacagagcctagggcgaaatggacagaacccaggcactggatggaagagaggaaggagaaaagggttccaaggttaagacctgaatcacttggagaaaggtgatataagggagacaagaagggagaaaagggacagttggagtgggaagaggactggtttgctttttgagtttaaggtgagtgctgttcatcaaagggaaccgatgcttaggaggctgcaaggattaaaatgcaggtaagaggcaaagctgtccaagtaaggggatttctagggaaaagggggcgaggaagtgagggtgggagagaacagaggtgcaaggactggacctcagaaaaggctgacttctggggtggagacagaaatgagcaatatataatccttcttgaagaaaaatttttaaaaagaaatggagcaatgcagagtccttacaatgaaagaagacagtcgagtggcgtgaggagacaaaaatgaataaggaagggacggcccatgccgggtcaaatgccaggatctgacgggtggttgctggtcctttgaaaactgcagtatgttttgctcttttttcctaaacagcagagggattgggggtagacacaagagtgcaaaggattcaggagtaggaaggtggtaagaaaatgcaggtggcaggcaggaaggggtcatctgaagtacccaccagaaaaaatgaaggagaaccagattaaacaggacgctgtgttcaggtca

SEQ ID NO: 109636 - DNA, 220 bp, Homo sapiens
ctcaagcctcctgctatgaaattccattaaagttacaacaaccccacacaatggttcaaagtctaagagggtcagaataataacccctcacaaagcctggcaggtcccagttccatttcatctgctgaataaaggaatgaaaggtgaaaaggcgagtgaattcacagcaaatgcaaatataaagccacagaactaagggaaattttgactctggactggc

SEQ ID NO: 109637 - DNA, 347 bp, Homo sapiens
cttaagatgccaccttcattttcttccaaagtgttactttgttctgtcctacagtgtatgctgtagattagctgaaaatcacaacatgttaatgagtatttcagtgattaaggaaagaagatataaaccaaggctgtaccttcatttgtgatgatgaaagaacatactgaaagctgtaccacactgtgctgaatgtagtaatatgaatgtgtctgtctgtggtcttatccttagtcctgctactgtgtagctctctggctttgtgggaattaagtaagttagtctcatggacctatcgccccttctataaagtaagaagattggactagagggatcctactagtgct

SEQ ID NO: 109638 - DNA, 261 bp, Homo sapiens
aacatcagggatgaagtctctgataaaggcagagaaggaagttaccattttgccctaactggaaaatcctttcatgttataagtcaacatttcagcagcctactgccaaagatattgatcaatgggaccatctttgcaagaatgtctcctgggcagaagtccagtctggtggaagaatttcagaaactggagtaggttctttgccagtgcaggtggcatgaactgcatggaggcataacagtcagggggagtggaagaggt

SEQ ID NO: 109639 - DNA, 648 bp, Homo sapiens
atatggaaaaatcatctttcgtagtgcccaaatatactttttaagtctataatccaagtaaacagaagaaactggaatgttttcatcaagaaaaataaaaaggatttatttggaaagtagactattcagcaattaatctttttatgtatttcaggattcagctgtggaaatggctatgtcaaaacaactttctcttaatgctcaagaaagcatgaaaaacactgaagatgagcggaaagtcaatgagctgcaaaatcaacctttagaattagatactatgttaagaaatgaacaattagaagagatagaggtatggaaacataaaaacactgacaacatgattgcatcatttatccagtgcaatacaatatattttaattgccaaaaacttgcttgtacagagtgaaaagtcttatttaacctttgcctgatgatcaatttggtaactgtataattatgtactaagtaagttgtataaatctttccatttagaaagtagaagagttaaagggacattagtcttctttctatttcacaaagttcctaaagacttagtgagaaaatttggagattttgacttgccatcattccttttcttacaagtatatattcttctgattctgacaaatgtatttttcctaacaatca

SEQ ID NO: 109640 - DNA, 308 bp, Homo sapiens
cagacggctgcattggggtatattatctctcgacactgtatgcgggcctggggtagcttgttgagttcctattacatatcctataattagacggtgccatccactctttcacctttgtaccagctgtatgcaaaaagatgctggggcagatcgtagaccagtagaagcacctccttcccctctgcgacattgaacggcgtggattccatagtgagcttggcagtgggggacccggaaactctacttcagataacactggatccttgctggtgcttgaacatgcaaagcaaccttttatctcaatctcg

SEQ ID NO: 109641 - DNA, 408 bp, Homo sapiens
aagaagaagagaaagtttttgtgagttcctatgcatagtggagacctgttctagtgacggtccctggggctgagcctgtgggtcagtggaatgatgctgtgaggagggtcttgttatagcagatggcccaaaaaaggctgatggatcatgagcagctggaagaatggagagtttgggggacgtagttcctacctggctttccaacaatgtgtaagcccggaattcttacataagtccatggagaagggaaaggaatgctggtaacgacaagattgaattctccacctgccaggcatccagggactcagagcagatttaactgaagttacagaaataggaatgtgacatttcttacatccgggtgtgctggagcaaatgtattccctctcaggtttgtggggaaggaga

SEQ ID NO: 109642 - DNA, 408 bp, Homo sapiens
ccaggcacaatggcatgcatccatagttccagctgttaaggaggctgatacaagaggattgagaatcacttgagctcaggagttcaaggccagcctggacatcatagtaagagcctgtctcttagaaaaaaaaaaaaaaaacagaaaaccctacagctgacaccatacttagtggtgaaaacctgaattctttccccttcaaaatctgtagcaagctaagtcctattcaatgttatactagaagttgtagccagtacaaaaaagcatacagattggaaaaagaagaaatcaatctttttgaagatatcgttgtctatataaaaatttccatagcatctgaaaagctcctggaacaaatatatcaggttaacaaggttgcaggatggaagaccagtatacaaaaatcaa

SEQ ID NO: 109643 - DNA, 514 bp, Homo sapiens
atttctctatctaaagtgtttgttgacagaaactaaactcatgatagctagatgcatagaaattattcaacacgcccatacttcctttgtaagtggatgaaatccctgagaccccaattccctctgcccctttgtgttgcccagttaatttagcctaagacttcactaaattcttaagctgtagtgcctctcctctttccctccaatgtagagagagattacccgggaatgagccttcctagcaatatggggaaaagctacgtttaaaatgttgattatcaatgctttcagaagaggaagatctcaatcaaaaaggggaaatgagaagaaaagtagctcagagatgtctgagctatgtgaggtatgcaaaatgtatcagatccagagagacatgagtattgaaagccaacttgtaactactgctaatcaaagcatatattcatggcaacttgaatctgtgtctccttggttgcagtccccaaatttggcccaaataaattctcgacttatgtta

SEQ ID NO: 109644 - DNA, 426 bp, Homo sapiens
ggtgagactgccctctagtgggccagtggagctattggtctagctgtgttctgggcaactttgctttctcacgccacatcaatgtagagcgattattcctacggaaaggaatttcaattttattctttctcaagcactgtggcccatagtaactctgttgatctctaagcactagccatcatttgcgcgtcttatagaaggctgggtttgccttctatacatacacacattagaagtgtcttacttccctaacaagattcaggctcctaaaagccaggacatgcatgtatgtatgtatgtatatattttgtggagacagggtcttgctctgtcactcaggctagaatgaagtggtgcaatcacaacccaacctctacctcttgggctcaatcaaacctcctacctcagcctcccgagtagctgaga

SEQ ID NO: 109645 - DNA, 401 bp, Homo sapiens
gtagaaatgaaaaaatcattaacaaaatattagcaatttatacacaatgaccaagtggggtttattccacactttttttttttaataaataaatcccacttgggatttgtttatcccaagtggggtttattccaaatgaaaaaggttcattcaacattcaaaaatcaatcaacataatataccatattaacaggctaaagaagaaaaattacacaatcagatgtcgccatcggagtatacataataaacctttagttcccttcaatttggatgaaatcaaccattacactttaaaggacttgcctatataagagtaactctttttcaccaacaaaagcttgacctatttcaaatgttgcataatatctgaattttgagaactagagaaaacaagacactga

SEQ ID NO: 109646 - DNA, 311 bp, Homo sapiens
cttattctggtaacctgagttgttggtagagccagggtattcccgaatcccacaactctggatttccatccaatgctagcttctccctcccgtgctgcttgtctttggcgacagtagccacactgagtgttttaggattcctagaattctgaggcatagaaagcctcaccactcatagcccctgctgtagtctctgctcaccagattctgtttgcataactaatgcgtccaaattcattactacagaaccatagtcatgcccttaagcagatgcctcctcttttcaccatctcacattattagttttgcct

SEQ ID NO: 109647 - DNA, 377 bp, Homo sapiens
cggaattcttctgcataagagattggtctcttctctgtgtatacatgcatgcatgtatgtatgtcagtatggatatttatttattttatactttggattataatctaatacttgtttatttcattgatcagactgttgtagctttggccatggaagctctttcagttggctactgtgtccctttgatatacccccactgttgcattgttgttgtttttgagtactttcttaatttctggcactacaagatgctcatgcacatcttgtatattccctgctccagtgctagaatcaatgattttttccaaggagccctggtttcttttattggagactgttactagaaaccaagatctgctatgctcattgctactggg

SEQ ID NO: 109648 - DNA, 314 bp, Homo sapiens
gggcaaagggatcaatctggatcatagtagagaatttgtgtaattggagaatgtttcctaaaaattttgagtcaaaaggagattaagaaggaaatcagttgatactgtaaagtctacaaagtaattacagatggtcactgcaggatgagagatgttcagcaagacttctcaggaggaaatgctagagctccatcatgagggctgagtgggagccaagtaaatggaaggctggtattcctggaagagtaaagaacttgtttaaaggtaaaaccaggagacattgtggcatgtttgggaactgccagatggctcaa

SEQ ID NO: 109649 - DNA, 575 bp, Homo sapiens
agttaataagtattttctgctttgcaggccatatggtctctgttgtaactactgagttcagccataggcaacaatatgtaaacaaatagatatggctgtatttaggtaaaattttatttgcaaaaataggtggtctgcagaccatagttttttaacccctgatttagactatccctgtatgctatatttgagccattcacttagatttttagtattggaagaagtcattgagtcaaactctcttttataaaagagttcatagctagttaggaattagggcttggatttctggtcagttttttttccagtgtaccatgtctcagcatctagaaaagttttgtttatatctggaaccttaaatgtctggaaacttaaatgtcacctgttctgtgaaacctttcttaactgttccttccatgtcttccttttctttatctctagccagaatttattggtttttgtcctggcttctgtataactttttaaaatagccttgatcatgctgtactgaagttaatctacaagttatttttcaccactagacagcaagccttatgaaggaagggactcccata

SEQ ID NO: 109650 - DNA, 360 bp, Homo sapiens
taagacacggagtatcactctgtcgcccaggctggagtgcagtggcgcaatctcggctcactgcaacctccgcctcctgggttctagcaattctccagcctcagcctcccgagtagctgggattacaggcgcccgccaacatgcctggctaattttttgtattttagtagagacggggtttcactgtgttgcccaggctggtctcgaactcctgagcttaggcaatccaccctgcctcagcctcccaaagttctaggattacaggtgtgagtcatcgtgcctggcctatttatacttttttttaacatatttctgatatggggagtaaatcttcctttgggaacaacagagttcccatag

SEQ ID NO: 109651 - DNA, 363 bp, Homo sapiens
tgtaaactgatgtttgctgtatgctcctcctgatttgaaatagatgaaagaaaatgaacctattatcaccatggttcacacaatgattgagaactcggcgctaagaccccaactgtaccagcaagtaaggtcttggacagtgaatgatactgctttatcatctgcaaaatccctcagtgacagttttgatttattctcagatttactcatgacatcagtgtttttcttattttattttttgtttatgtttatttggaaaaccacaattcatccatgcttttcaagatgctgcagtattcttagcatgcttcgctgaacattttgctgttgaatattaaatgtgccattttcctaaagtttttg

SEQ ID NO: 109652 - DNA, 188 bp, Homo sapiens
atcttgtaaaacaacaggaaggagaagagtggaagctcaaagctggagctgctgaggacccaccaaaaggcacgcaaaggagcaggctctgtgattgagactagttggggaggccggcaggaagccaggagccagtttatgtcatagtgccaaaggagaaagaggaggggcgcaggcagcattgtcga

SEQ ID NO: 109653 - DNA, 372 bp, Homo sapiens
cccacagctgccagtcactgggggagtgctgatgtcaggtttagtggaggtcattaattctggccagcgccccctgcaggcagtgaagagtccaggagccagagaagcctttaagcaaggaggcaaaggggtctggcatttgaagtcaatagatgctgtgagattttggtcacatatgagtaatctcaaaatactgaaaacatataaattttctactttgtactgtggcagacttcattgcagtctgatctggctttttccttgtactatgatttagggcattctgtcctctgcccctgactgctaagtgttgagaaatgcaaatttaaccatacatagagtgtaacatagttaggaaatgctgttccccac

SEQ ID NO: 109654 - DNA, 708 bp, Homo sapiens
tgggatttccaaaaaattagaaataggctaatagaaatggagaatacactatagaagaaatcagcaaattatttggataaatggagagtatcagtttgaatgaaagaaaaataaaataagaagcaaaagaatggcagtttctggcacaaaagtcttgataaaatattcagtgcatgtatgcctcttgtttgccagagtgttgtacttataattttttctatgtattttctctttttaatccttacagaaaatctatgaaatcagaattagaatcaatttatggctgagattattgaggcacagagtgagttaattaacatagctaggttgcatagtaaaagagattgcttcatctgactacaaagcactcattctttcttccatactatcctgttagtcattaatagatgactcccagattttctcacttgtgagactaaaaaagtactggtattcaccagtagccaaaaacaagtaaataaatactaataaaattttaaaattgggctttaggaaaagatgctaatttgagagagattctaatgaatttatttggatgtaaggagttcaatgtgattcttagcatatacaaaaacagtgtaagtgatttgagggagaaaaagggatgggcaaagttaaaagaaatttaaaaattttaaaacatttttctaatctgaaatcagtagcggcgatgaggtggaactattg

SEQ ID NO: 109655 - DNA, 1020 bp, Homo sapiens
gtgaatttctcctgtgtgttcctgtgtggatcccgacactcttctcgctttaagagagcctcccgcgcccctcactccgccccttcccaagtctctgggctcgtcaaagcttcccgagagccatggttggtccaggcaggcagtcggagcacctcgtggagcggctgctaacccagggtggggtggggtggggtggaggggtctgcttgtagtactctcagtcctgatgtcacaggcgcggcaaggacatcgcaaggaggagtcggattacagtaaggatgggcagtgcagcaggcagcccgagcgcactctccagccgccggggatcttagccctggaaaggcagcctgcaaggcgctcatcccgcggaggaggcacgctctcggcgctcactgctctccacgccggggacatttccaccgaatgtagcatgaaagggctctgctctacgtgccagccttgggtgagagctgatgctgaagacaccgcggtgggattccagctgtctgattaatgagaaacataatgtattttggtggtacatgccagagtcctgctctcccggcccttgtaccgtccaccagtcccctcctttgcaaccatcgctggatattaaagccatttcttccctttgcctcttgtaccactgcagtcgtgcgagtgcgaacctcgttccccaactttctaatgcagatggacccagattcagaaagctgtaataaaccatacattcggggttcctcttccccaccgaagaaagcaaatcatatcatgcaacatttgccagttgagatttaattctgatagccaggctgcggcccactacaaaaggcacgaaacatgccaagaagctcaaagcactggaagccatgaaacaataagcagaaatctgtaactgccaaggacagcgcaaagagtaccttcacctccatcacgtaccaataccatcaataccagcttctgacaaaacagacggtactgcaggaaacccagcaatatcaacgacggaacactgtggaa

SEQ ID NO: 109656 - DNA, 526 bp, Homo sapiens
acagctgcagccagcccgcccctccctctgctgactgccccttggaaaggaaaattgacccggattcttcccgcctgtctgggagtagaatccaaccatcggggatggaggccctggcctccatgaggctgcctctttttgctgggctgctcttcctgtgcctgtctggcctggcactgccaccccggctggactgaggctgttcctgctggctgccggggctgcctttccccaaccccacccaacactttcagaatgtcagtctgaggagccctgatgggtggggacatggggctcccaggcttcttccattgtttttctaaaaatgaaagtgctgggagctttagactcgggccgcaggttttatggtaaagtgctgttccagtaaccttgtcaccaaaaggtgcaattaaaatgtttggaatcattatttttagttcagtgttagattttgtctctaatacagatggtccggaggcaaagctgtgaaatctaggggggagaaaagagaaatcaacaagaacca

SEQ ID NO: 109657 - DNA, 239 bp, Homo sapiens
gtcagaatggtttaataatgtgttcaaaatgttggatgttttgagatcttcagatgaaaagcactgcggaaataaggtgtcattacagttcatttgactatgccttagcaaacaaattttttaaagttatggaatcaaaacatgtagctcacccttcctgtcatattatcccttaaaacatgcagaaaatctctaaattattagtgaacttgaataacaatgtataaaattatgatccc

SEQ ID NO: 109658 - DNA, 374 bp, Homo sapiens
gaggaagaagggggtgggacctatttttaaacaaccaaatcttgtgagaactctatcacgagaatagcaccaaaggggaaaatccaccccatgatccaatcacctcccgccaggccgtatctccaatattggggattatgtttgacatgagacttgagtgaggacacagatccaaaccgtatgagagatagaacatttcctttatctccccaaagttccttcgtgtctttccaagtcagtcccctcctttccttattcccagccagaggtacccactgttgtgatttctttcatcatagattagttttatctactcaaacgtcatgtaaatggaatagtaaagtatgtgttctttgtatcttgcttttattctt

SEQ ID NO: 109659 - DNA, 546 bp, Homo sapiens
attttaaatgtccccccagtcctgaagagattgagcagcattttcaggaggaggcctcaccatcatcattgccacactggccataaaccagagactctgctggagaaaccctctgcagaccttggaggcctcacacatcccagttacgggcagcgcagctgtcccctccggagaagattcctctgcaatgggaaagcatttgtgaaatgaggcagggtttacataattggtgtgagcctgagcacacccggcacacctgtgtcctctgcgtacacctgcctgggtgccgacactgcttgcaggtggttttggggaaagtgcaggcctggcttccatatggcacatagtggcttttctaagactgttcacatgtctgccaatgaggaatggccctggcccctatttcctgtagattcccaacaccactggagggcccgtgaggatccttctgtccctgcaaggtgtggcctactggggtgtccctccaaggtgtggcctgctggggtgtccctccaaggtgtggcctgctggggtgtccctccaagg

SEQ ID NO: 109660 - DNA, 456 bp, Homo sapiens
gccacaaatggttgtctggagaggttggaaagagaaagcggatctgctggctttcatcataagccaactggaactacctgtttttaagtatgtgtatgaattactttaaaaaaattaaaagtaaaagaaaacgaggaaactgaccaacaaagtgtatggaaagaggctccactgcatcagttaccaaggcagaggcacaggaagccacaggcaataccaggagagcggtgggaaggcaaagccgggcagcagcaagagtaggcacgaatgcagggcgatctgcttacggatgtgaacgagacggtgagaacagtcatctccaagtgtcttcactggaaagcagaaggtacacattccccaagatgtggtcagtcctctcccagatgcacgtcgcagaggaaccttgctgttcacaccaggaggtgttggggaggctgcagcagccttctggtaaca

SEQ ID NO: 109661 - DNA, 564 bp, Homo sapiens
ataaaaaataaatttgtctcccatctcatctcctaataccgaattcccgttccacagaagggagtacttaatgtgtctgtacttaatgtgtctactttgagtaatatttcatctacatacaagcagatattgtatgtttagtgtacatatatttaatttctcctcttttacaaaaatggtagcacgcaatacccattgctttctatttttttttatttaacaatatcttggcaatctttctgtatcagtatataaagtgctattctctttttaaaaaaaaaaagctgtatggatcttctataatttgtgtaaccactaccatattgatagacattttacttttcgatttcactaggcatgcctggcccatattgctctacaggttgtgcattgcacaagtccaagcagtgtcattcacatggaccacagtgttaatagtattccaagtcatgcttggaaccctgcacttggggaaatatcaaaaactttaatcattcaaaccatggattcacaggcaatagagaagtaaaggacagagaaaggaaaccagaggaaggaaaagga

SEQ ID NO: 109662 - DNA, 443 bp, Homo sapiens
ggaagttgttattggttatacagttggttatggctacttagatattacttataatgggtgtgacctctattgcggattgtcatagcccgaattgtgttccaccccaaaaaattcatgtttggtatcctaaacctcagtgcttaagaatgtgactgtatttcaagattgggtctttaaagagataaataaggttaatggagttcattggtgtgggctgtaatccaataaaactggggtccttataagtagatgagagtagaacacagacatgtacagaggaaagaccacatgaagatgcaaggaaaagatgaccatctgctaaccaagaataaaggtctcaaaacatcgggcctcagaattgtgagaaaatagatttctgttgctgaagccacccagactgtggtactttgtaatggcagccctagcaaatagacagtgatgaa

SEQ ID NO: 109663 - DNA, 460 bp, Homo sapiens
gatgtgaggtaagggtctgagttcttttcttgcagatggatatcctgtagtagatttggagtgagaagattacattcaatccaagttcttctatttactaattttacagtcttagagttaatcacgtttcgaagcctgtttgcccatctataaaatgtgattagttaaatctaataagattattgtcagaatgaaacaaatgagacaataagtgaaaccactttggcatagtgtatggcgcctagtaggactaagatagataaatgttagtggagtttgaaaaacactcccaggatacccaaatactcttcttgtttgtttctttaaattcgtttcagtgagtgaataatgcccaagcttttggttttcagatataatcattgtaatatttaatcccttgaaattacctcttaatcttaaagtctatcagctttaaactctaggcagcaaatgcactgca

SEQ ID NO: 109664 - DNA, 104 bp, Homo sapiens
gattctgtgccttcgaacttgggcaaattgctcccatcttcttcctcccttttcccattctgtagaaggaagggatgggattagataatataggacaacatcca

SEQ ID NO: 109665 - DNA, 414 bp, Homo sapiens
accttctgaaccagctaagggaaggaatggcagattctacagcagggagcaaatcatcctcagcccaggagttcagagatccctgtgtcctgcagtgacctgcctgcctatggaatggagctgggttcatctcatcacattagattatccctcagggtgacaccaaagcacccagacagatttagaagcccaaagtttagggtcaaatgtaaaccctggaacctgagtcccaagaaatggtagactgggaatggaaagaatggggtaaaccacagtctacatagggaaggactctttccttagccttctcttattgattggagagggactgacatgctcctcattctcttaactttgccaaacccattcttgtactcccttgtgatctataaaagatttttctatgatgccaag

SEQ ID NO: 109666 - DNA, 484 bp, Homo sapiens
ttagcaaggtaatgccacatcaggtcattagtgacattaatgagagaacaggggaattattggaaagtcttgacttaaggccagacgagaaatccttaactgctagtgtgacttccctccccacaaaagagaatgctctcgtaatacaccgaactgttggatgctgttgtatatactttatatataatcttacccaaggtggcagagcattaactttaacatctgtctccctgacctcaccagagttcataatctttgccctacttacactgtctgaaggatgacttggcctttttttttttttttttttttttgatagtttaattattgtgtcttagtgagcagttctttcatttgaatttcactggagacctctgtgcctcctgtacttggatgctagcatctatcccctaattagggaagttttcagcccttactgctttttttttttctgattctatactctttttttttcattattgct

SEQ ID NO: 109667 - DNA, 507 bp, Homo sapiens
aagtcatcctcacccaaatctcatctcaaattatattaataatgctcatgtgttaagggagtgactgaatcatgggagtggtttcccccgtgctattctcgtgatagtgagtgaattctcacgagatctgatggttttatcacttaccatgattctaagtttcctgaggcctctcagccatgtgtaactgtgagtcaattaaacctcttacctttataaattacccagtctcgggtatttctttatagcagtgtcaaaatggactaatacaccccttttcccgtggtaaaacatccagcagaggccaggcacagcagctcacacctgtaatcctagcactctggaaggccaaggcaggaggactgcttaaggccaggagttcaaggaccaacctgtgcaacatagtgagaaccccccaatctctacccccacccccgccaaaaaatttttttaataagccaggtgtggtggtgtgcctataattccagctattcaggaggctgaagt

SEQ ID NO: 109668 - DNA, 492 bp, Homo sapiens
  misc_feature (487)..(487): n is a, c, g, or t
tgatgtgtcagtacagggttgttgattacaacaaaggtaccatttgagtggggacattgctaatggtagaggctgtgcatgcatgggagcagggggcatatgacatatgccaagtttcctccaaatttcgctgtgaacctaaaagtgttcttaaaaaatagtcttttttaagagacagggtcttgctctgttgcccaggctagagttcaatagcacaatcacagctcactgtggcctcaacctcccaggttcaagggatcctcctgcctctacctccagagtagctaggactataggcacacgccaccatgcctggctaatttaaaattttttgtacaaacagggtctcaccacgttgcccaggctggtctcaaactcaaaagcaatcctcccaccttggcctccccaaagtgctgggattacaggtatgagccacagcacccgaccaaaaaacccattcttcatgtctttaaatatagcaaatatngtgtg

SEQ ID NO: 109669 - DNA, 412 bp, Homo sapiens
  misc_feature (11)..(11): n is a, c, g, or t
  misc_feature (35)..(35): n is a, c, g, or t
ccaagtctttnataacactgtaaccttcatctccngggttcaagcgatcctcctgcctcagcctccaaagtgctgggattacaggcatgagccactgcgcccggccaggaattagttttttacttggtacaataattcattatagttaagtattgtaagaaatcttaaaatgtaccagctgaaggaattttacatgtacagttaagatagtttgacaaatctacttctctaagatgaataatactgtatttttatttttgtgactggctttttgcgattagtataccattgcttataccatggaacaggatgttattttctaaggctaaataatattccattgtatgtatatgcttaccacattttggttatccgttcagccatcaatggacattgatggattgatccacct

SEQ ID NO: 109670 - DNA, 301 bp, Homo sapiens
cccctcagagttggagtcagggtggttttctgtgacatgtgggttttcacccaggaggatatgatctgtgctcctattctgatggaagcttttggaatttccttgcccaaggcttagcctgcttctggatggcgatggggagttgctgatttaaaatgacaatcaaaaggggcaagttacaatcaggaacgtctataatgtgctttccagtttacaagaggctatcacttttctcacttaataggatctcggtatttttaactgtagctccttcctgaggctccacttgcccatgaatggg

SEQ ID NO: 109671 - DNA, 694 bp, Homo sapiens
aagacggtgtctagaggtgtgctgggtgcacctgcgaagccgacgtcactcatgcttctgctatttcagtcttgactgttagcgtgtgtgggtcaacagcggcattctttgtggttttgctttggctgtgtggaaggctctctttgctgtttggaccatcttggtctccttggcaaccgtgagcgtcaccttcatcctgaatgcctgtgctgggcgttcatcttaacttttctgggatttccctctcatttattctgcattagcagctcccattcatagccacatgaggggcatcctgtgggcctaaacgcttggctttcggcagcgtttattcttccttcctggtaaaatatcaagctgcgagattcagtttcacttagaaggagaaaaataattcttcccatttcttcgtgaaatcattgttcttggtccaactgtcctagtgttttcagtggatactgaagctaacctctgccacatgcacagaacggtgtttccacctgcatctttcccaggactgtaatgtttctcccacctgcggagaaaatgacctttttgttggagcaggcacagtggttgagatggccctggcaggttgttaagtcttttcaggaggcccttactttgcctcaggtgttgagtgggccttttctgggacctctgaggctctgtcttcacagggcttataccctga

SEQ ID NO: 109672 - DNA, 381 bp, Homo sapiens
tgcttgcatggttcctgaagaaatgtctgatgtaattcttatccttgttcctcaataggtaaggtttctcttaactaccatctgtggcttctttaagtatctttttgttgtctttgattttctgcagattgaatatgacatgcctaagtgtagatttttggtatttatcttatgtcatgttctccaaactttctgcctctgtgatttggtgtctgtcataaatgttggaaagttttcagccattttttcttcgattactattttaatgatttttcagctttacaatggtgcaaaagcaatatgcattcagtagaaaccatacttctcttgctatgctgggcagcagcaagcctcagcttccagtcagctatgcctttttga

SEQ ID NO: 109673 - DNA, 352 bp, Homo sapiens
tggttaaagcaaaagaatagactgttttattttgcaaatagatagctaaatcaacattccagatgtgcttacttcccagtatatatgcactagtcatttccaaaaactattgattgacaaaaaacattcttttcaatttgatctacatagtaatgattttaatatccttagaaccaaataacactatatatagcatcagaaataaatttttgttaaactggttgactcagtgaactattcttttttatgatatacttacatgctttgtgcaacaagtaagttcatggagtttgagaaagctaaacagtagcacactcatggaccaggcatggtggcttattcctgtaatccc

SEQ ID NO: 109674 - DNA, 185 bp, Homo sapiens
tgctgggattacaggcatgagccaccacacccagccgagaatggggcacttgtgcacgagagtcctctcttcatggcctttccctggctctatttttcagagttgttttttgttgttttgttttgttttgttttgagatggagtcttgctctgttgcacaggctggagtgcagtggcggaatctc

SEQ ID NO: 109675 - DNA, 912 bp, Homo sapiens
aataggcagccataattcagaaactcctccaagcaacccaaccttcagatcaactcctgacaccatggcctgctgtcagaccagcttctgtggatttcccagctgctccaccagtgggacctgcggctccagctgctgccagccaagctgctgtgagaccagctcctgccagccacgctgctgtgagaccagctgctgccagccaagctgctgccagaccagcttctgtggatttcctagcttctcaaccggtgggacttgtgactctagctgctgccagccaagctgctgtgaaactagctgctgccagccaagctgctaccagaccagctcctgcggaactggctgtggcattggtggtggcattggctatggccaggagggcagcagtggagctgtgagcacccgtatcaggtggtgccgcccagactgccgtgtggagggtacctgcctgcccccctgctgcgtggtgagctgcacacccccatcctgctgccagctgcaccacgccgaggcctcctgctgccgcccatcctactgtggacagtcctgttgccgcccagtctgctgctgctactgctctgagcccacttgttgaaaacctccttctgctggggatcctgataagatggcaccttaaaactagccaaattagaatcctaacaatcttctgaactccagtacctataactgggcttgcaacctctcatcacacagccacataaattccctaggaagtaaattcatttacaatggaagaccaaaaatttttcctagacctggttgtcagccaaagtcctacaatgtgaaaagagttagatactattttactataaatatcacctgaaatatttcaacagttattgggacttaaatttaataaaagttttcatctcttcaatgaaaaaaaaa

SEQ ID NO: 109676 - DNA, 773 bp, Homo sapiens
aataggcagccataattcagaaactcctccaagcaacccaaccttcagatcaactcctgacaccatggctgctgccagaccagcttctgtggatttcctagcttctcaaccggtgggacttgtgactctagctgctgccagccaagctgctgtgaaactagctgctgccagccaagctgctaccagaccagctcctgcggaactggctgtggcattggtggtggcattggctatggccaggagggcagcagtggagctgtgagcacccgtatcaggtggtgccgcccagactgccgtgtggagggtacctgcctgcccccctgctgcgtggtgagctgcacacccccatcctgctgccagctgcaccacgccgaggcctcctgctgccgcccatcctactgtggacagtcctgttgccgcccagtctgctgctgctactgctctgagcccacttgttgaaaacctccttctgctggggatcctgataagatggcaccttaaaactagccaaattagaatcctaacaatcttctgaactccagtacctataactgggcttgcaacctctcatcacacagccacataaattccctaggaagtaaattcatttacaatggaagaccaaaaatttttcctagacctggttgtcagccaaagtcctacaatgtgaaaagagttagatactattttactataaatatcacctgaaatatttcaacagttattgggacttaaatttaataaaagttttcatctcttcaatgaaaaaaaaa

SEQ ID NO: 109677 - DNA, 635 bp, Homo sapiens
aataggcagccataattcagaaactcctccaagcaacccaaccttcagatcaactcctgacaccatggcctgctgtcagaccagcttctgtggatttcccagctgctccaccatggagctgtgagcacccgtatcaggtggtgccgcccagactgccgtgtggagggtacctgcctgcccccctgctgcgtggtgagctgcacacccccatcctgctgccagctgcaccacgccgaggcctcctgctgccgcccatcctactgtggacagtcctgttgccgcccagtctgctgctgctactgctctgagcccacttgttgaaaacctccttctgctggggatcctgataagatggcaccttaaaactagccaaattagaatcctaacaatcttctgaactccagtacctataactgggcttgcaacctctcatcacacagccacataaattccctaggaagtaaattcatttacaatggaagaccaaaaatttttcctagacctggttgtcagccaaagtcctacaatgtgaaaagagttagatactattttactataaatatcacctgaaatatttcaacagttattgggacttaaatttaataaaagttttcatctcttcaatgaaaaaaaaa

SEQ ID NO: 109678 - DNA, 384 bp, Homo sapiens
gatatatgcatgtatctatggaccatgtaatgcttgttataatgacatgaggctctacttggtcatggccacattcatctaggagaaaattcctaactttagtaaaatgtactctttcaaataataaagttattttattcaattttttttttttgagacggaatttcactcttgtcacccaggctggagtgcaatggtgcaatctcagctcactgcaacctccacctcctgggttcaagagattctcctgcctcagcctcccaagaagctgggattacaggaatgtgccaccacgcctggctaatttttgtattttttttagtagagacggggtttcaccatgttggcgaagcttgtcttgaactcctgacctcaaatgatctg

SEQ ID NO: 109679 - DNA, 216 bp, Homo sapiens
ccaggtggtggggggagcacagcatttgaagcccactcccctttgaccacttgctgttgtccagacagacatcacgcacgtgggccttgcattggttcctgcttactttgtctctgctgacccggtttctgctccttgaagtctcagcccccttcttccatgattccaaggcatgtccctctaaggaggcttgaccccaccctggagggcctgctc

SEQ ID NO: 109680 - DNA, 653 bp, Homo sapiens
gtggcacgatcttggctcactgaaacctccaccttacaggttcaagcaattctcctgcctcagcctcccaagtagctgggattacaggtgcctaccaccatgcccagctattttttttgtatttttagtagagacagggtttcaccatgttggcaggctgttcgggaactcctgacctcaggtgatctgctcacctccgcctctcaaagtgctgggattacaggcatgagccaccacgcctggctatttcttaagatataatttggacagttcctgtttctttcagttgatttaattatttttatgtgacaacatttataaggaatgtgcagttttacaaagaaaattggttaaactatgtccacaggttttttgacacctttctactcaaaaggtgcgaccaaatttctttccccttgagtgtattgttaaacttagtgatccatttctaatgcacagagtatggctgaagagatggtacatgacttctgagatgaggtcataaaagacattgctggtttggttttgctttttctcttgaatcacttgttataaagaaagccagctaccatgttatggggacactcaagcaaccctctggaaaggtacacacagtgaggaatcagggactccagccaacagccccataagta

SEQ ID NO: 109681 - DNA, 1128 bp, Homo sapiens
tgaaggaagcaggcacactctcatgcttccccacctagggtttcgcctttcttctaatatttaggattcccagtgaagggtactccacacacaccctctgcctacccctaatcccaccccattgtgtctgatcccacaattactcccagggtatctatactcacagcttttgcgctcaaagaacattgtcgtctgcagggaacgggtggagcccttctcagaagctcccgggggcgagtccattttaagaatgagttgaagtaggaaagaaaacacagatgctgtctttgcattcgacattctatcaccagcaagagaatatgtaactcctgttctttccttcattattccatgaattaccttttttctctagggatctaccagttggtgatttagggcttttaaatattatgcttgttatgtatttaacaaaatgcaatatgtctactggtggcattgtttccttgggaaattagaaaagtagaagctacatactctagttcctaggtggtctctggaaagttggcctcatgctggttggctaaataataagtgtttaggatttgaaaggaagaaagagagctgaagtcctggtgacagagtttgtgagaaacagaagatgtaacactctggcatttgttgaggagatgaggaagaacttttgaaaaataagctattctattcagttttgtgcaaatttattgcagttgcttcatagaggaagaataatgttgagaatggaataattgcaaatgctagtgatgaaatctaaaggaaacctctactcatagttaactgaaagtatttttgttgttgttgtttaaatacttatctcattgctttctttcctttgcagaattattttcctataatagtttccattaggtgtcagtctgaactggttcttacttaagttaggggtgaaaatgttccatcatcacaccttttaagataagaaagtgggaaaaattaaaactttattaagttgaaattactggagttaatttttattgttaaagacagcttttttattcccagaaaaagtaattttaaattatgtcaccactagtcaatgactgcttttgccctgtcactgtccatagccatgattaaagaagtacaaaatgc

SEQ ID NO: 109682 - DNA, 521 bp, Homo sapiens
agccccaacactggcttctcttattgactccatggataaacccacgggcatactgccaagaacctaatgtttcctttctccttcctttctccctttcccacaaggttctatattttactcagctcctaaagcagtctcaaaagttccacatgccaactctcgttacctttataacagctcatcctccttcccagcctgctgaccctgttcctagatcactcacttttctgtcaaatacttgaactgaaagaggctcttgtttcaggttcggcctcctgaggaagccaggctaacagaaagttcatattgtatgtaaacaagtattgacttgataatattctttggtaacttttataaagaaaaacaggctttaagaaattgagttttcagagtataaagtaagtatactttgttttcaaaacactcaatttgctttcacctttagccaacataaatatcactgaatgctaaatgtaaaaaccattaaaaaacaatttaatccatattcttagatattctgc

SEQ ID NO: 109683 - DNA, 382 bp, Homo sapiens
atcatgggggcagtttcctccatgctgttctcatgatagtgagtgagttctcatgaaatttgatggtttcataaggggctcttcccccttcactctctctttcctgctgctgtgtgaagaaggttcctgcttcccctttgccttctgccatgattataagtttcctgaggcctcctcagccatgcagaactgtgagtcaattaagcctctttcctttataaattacccagtctcgggtagtatttttatagcagtgtgaaaatggactcatacacagagagtacctaaaggaggggctgccaccacctcattcctacctgattcttgttctagatcctgagcccgttgctctagcctactggcttgtttcatcctactttgt

SEQ ID NO: 109684 - DNA, 746 bp, Homo sapiens
gaattctcccagggacctgttaaaaatgcatattttgagaattgctgaatcagagttttaaaggtttggggctcagaagtctgcatcttgaaaaggcatctcaggtgattctgctatacacggaatgaagtttaaaaaccactcatagagagtagtaagtaaatgctgctgctaaaaagggcagaacatatctgacatcactgatcatgttgctaatgttgatctctgcagcaggtactttataaaatatatactggtgttaaagctgttatatctgagccttgccacaggcacaggctctccctcccagtgtggtcaccacatagctgctctaggaaaaatgggaacaacgtatgacattaggtgttccttgcatttgactcattcaaatgattggtatgtgcaagagtttaactagaaaacgtttagactctttagtgttttagtcattatgagttagagattagaatgtagttaaatttgtagggttaggcagtttttgcaaaatgcattaaaatggttaaaatgggctaaaacatcagtgttttctcatgggggttatattgtgtagcaacggaatgttacttttaatattgaatgtagctaattatgcaacatatttatttacctttttaaaaaattttaattttaatttttagttctggggtacatgtgtaggatgcgcaggtttgttaaatagataaacgtgtgccaaggtggtttgctgcacctatcaatccatcccc

SEQ ID NO: 109685 - DNA, 291 bp, Homo sapiens
taggagcatgtctggcatgcttctggcatgaagagcatatactggctagaagaccagtatagcctgagaacacagtgtacgagggggaaaaggtaaggagtggggtcaaagagataccagagagccagaatggccatgctggatataaaggctttagcttttacagtactctaaggaaactgtgaactcagtggagagctctgagcacagacatgatagttctcgacttacactattaaagaattatcctgggccgaggtgggcaaattacctgaggtcaggagttcaaga

SEQ ID NO: 109686 - DNA, 394 bp, Homo sapiens
ttcatatattcctagccaaaactgaaagaggggacataaaaggagaaaagtgagaatttgggggattgaatatcctacaatattgactagtctgcaaccaggtcttaattttcggccgaaataaagtcatactatttctatattttatttttatctataatgaaagaagataaaactattttacttcagaaacatatgccagttgcctaaaatctagatgagtaaattctaatttggagtacacattggaattactggggaatatttttctcaaagatgttatgactgccccaccccagactaactaaataagcatcagcaaggatggtgtcaaagcatgcatagcttggaaaaatttcccaggtatgatgtatgtccatggttataaattgct

SEQ ID NO: 109687 - DNA, 1178 bp, Homo sapiens
aacagctggccttctggtgggcaaaccatcccctgatggactggaagcctaccccccaccccaagccctggctgcgacagctctggaaccctgactgcctgggtgcccctcagctctggaaccctgactgcctggatgctcctcagctctggaaccctgactgcttggataccccctcagctctggaaccctgactgcctggaaccgtgatccggaacccaagatcctttcaaggcctcaggggtattgctgctgccctcctccttctcaatttaaccccgcgtccagccgtcgccaccaggggcgtcagagcgcgcgcatgctcctagctcggagccgcgccgatctcgcgccggcacctggcagccaatcgcaggtctccactggacgcgcgcgtgtggaggcgtgcgcgtcggcggcgccgggggcctgaggaggcgtagtcgccgccggctgtgccccgggagcgcctccggggctggtgcgtggccggcagctcgcgaacagcagctgatccggactggatgtgaccttctgcctggaatagctcaagttcttaaaagttgcgttgtaataaacctgaggctgggaagttcaagatcaagatgctggacgatttggttccttagtgaaggctctcttcctggctggtggatgacagccttcttgctgtgttctcacatgacagaaagaggaagcaaggtggcagtttatataaaggaagcattgggacttgtggccccaccattcaggaataaaaaaattagaaaatggaacaatcatgtgaggaagagaaagagcctgaaccacagaagaacatacaagaaaccaaacaagtagatgacgaagatgctgagctcatctttgttggtgtggaacatgtaaatgaagatgctgagctaatctttgttggggtgacttcaaattcaaaaccagtcgtttcaaacattttgaacagagtcaccccgggttcatggtcaaggagaaaaaagtatgatcaccttagaaaagatactgtcgcaaattgcagcctaaaagtcatgagaccgttacatcagaagcagtgaccgtcctgccagcttcccaacttgaatcgagatcaacagatagtcctattattattgagcctttgtctaaacctgattatagaaatagtttcccacaagttgtgcctaata

SEQ ID NO: 109688 - DNA, 358 bp, Homo sapiens
gcacgagaagaaaagagtggggagagagtaaaggctttgcttctgtcttagaattgagctagcttgagtcaatttctgtgcctgcaaccaaatgaaaattaatatagtgagttctttcaggagctttctctgtttttctattgatacctctatatatttttaaggcaatgtcactttgttttgtttacaaatatattgaatatgtcaagattactattttgttattgccctttgtgaatttccttgtctattttgctcgcttgttctttcaggtgaaatttattattttattaatgttgccaaaaattataagtaaaatatcaattatagtaataaaatgttttgtgaaaaaaatgct

SEQ ID NO: 109689 - DNA, 837 bp, Homo sapiens
aacagctggccttctggtgggcaaaccatcccctgatggactggaagcctaccccccaccccaagccctggctgcgacagctctggaaccctgactgcctgggtgcccctcagctctggaaccctgactgcctggatgctcctcagctctggaaccctgactgcttggataccccctcagctctggaaccctgactgcctggaaccgtgatccggaacccaagatcctttcaaggcctcaggggctgggaagttcaagatcaagatgctggacgatttggttccttagtgaaggctctcttcctggctggtggatgacagccttcttgctgtgttctcacatgacagaaagaggaagcaaggtggcagtttatataaaggaagcattgggacttgtggccccaccattcaggaataaaaaaattagaaaatggaacaatcatgtgaggaagagaaagagcctgaaccacagaagaacatacaagaaaccaaacaagtagatgacgaagatgctgagctcatctttgttggtgtggaacatgtaaatgaagatgctgagctaatctttgttggggtgacttcaaattcaaaaccagtcgtttcaaacattttgaacagagtcaccccgggttcatggtcaaggagaaaaaagtatgatcaccttagaaaagatactgtcgcaaattgcagcctaaaagtcatgagaccgttacatcagaagcagtgaccgtcctgccagcttcccaacttgaatcgagatcaacagatagtcctattattattgagcctttgtctaaacctgattatagaaatagtttcccacaagttgtgcctaata

SEQ ID NO: 109690 - DNA, 2059 bp, Homo sapiens
gaagaagccctaatatctataatttgaactgtactggacccatagttttaactgaaaagggccaaacaagtggtgtctgtccagttcctggactgggctaaatttagttttcccactgttaagctggaatgaggactgtcccaacaacagtaggtacagtggacaaaaatagcccagggtgactgactgaatttaaacccataatggctttatatttttctgtgcatatatatcttaccctaattgaacatgtgaagcttgcaactttatgtcttgctttggacatgaatgtattacagcttgcagctattctgttaaatgtatagtttcccagttttttgacactaatgctgtttgggtcttacctgacacacaccagtgtgcaagaaatgtctctctaattcaataagttttaagacttagagttaatgtccttcatctgatctatcctatctaatctgtactatgggtgaatctttttcccttgctctccccaggggctgtttcacagtattctggagtaccttttgagtattggttcctgaacatcagcagtcttggctgcctctgtggactcccggagttgtctccctgcttgtgttctggtgccatcctttgttcctccacccctgaccaaggtgcccagcagcctgtcttcaccagtcaaggaatccgccatcttggctgtagacatacataggtctggagaaatctctccctttttccttgatttctttttaaaggtaccttatctctccccactcctttcttccctcctcaatctagttaaatttcctaagctttcacaaaaatccgggaagagataattaagagcttagcatccctcttagagtagaaggcagtacagataacaaagaagttgtgagtatattatctacattttagaaaattttctgactctagatccatagattctgttgtatttatttgccggacactcatttgattgatttgcaccttgaacactatactaggtcttttcagttacgttgcttgggttaagacactttgctaaaattacagcctgaatcctttctttagttgaagaaagggtatgtgtgtgcaagtgggtgtgtgtgtgccagtttttcttgtctcaggtagatactcccactgtgtataaatagatctacagacttttcatacttacctcccgtattctgtttctgtggtaaaaatatgaagtgttttagttgtatgttgagtgattggttggtattatcaacactgttgtttgcagtctcattaaagcatgctcttaaggagtacatatggtcattaattgccaactgtagattccagtgatctggcccctgcctacctccttcctctctttttcattctctgtcatgcttctccactgttttccccaatgatgcactattttgacacactggccttgctattccttaagcaaatcacattcttcccaatccaaagactttgcacatgctgttgtctttcttagaatgcccttcccctaggcctgcatggcttgctacctcacttaattgtttgacacttcctttggttcattgagcttcaaggctcttaaaatgccactgacaatgagatctccctttaaaaaaaaaaaaaaacttctacttttcctcttaaaggcactttactctctccccactcttttcttcctcttcaaagtatttaaatttcctaggttttcatgaaaaagctggaaagcgatcatcatcaagggctttgcttctgtcttagaattgagctagcttgagtcaatttctgtgcctgcaaccaaatgaaaattaatatagtgagttctttcaggagctttctctgtttttctattgatacctctatatatttttaaggcaatgtcactttgttttgtttacaaatatattgaatatgtcaagattactattttgttattgccctttgtgaatttccttgtctattttgctcgcttgttctttcaggtgaaatttattattttattaatgttgccaaaaattataagtaaaatatcaattatagtaataaaatgttttgtgaaaaaaatgct

SEQ ID NO: 109691 - DNA, 2203 bp, Homo sapiens
aacagctggccttctggtgggcaaaccatcccctgatggactggaagcctaccccccaccccaagccctggctgcgacagctctggaaccctgactgcctgggtgcccctcagctctggaaccctgactgcctggatgctcctcagctctggaaccctgactgcttggataccccctcagctctggaaccctgactgcctggaaccgtgatccggaacccaagatcctttcaaggcctcaggggtattgctgctgccctcctccttctcaatttaaccccgcgtccagccgtcgccaccaggggcgtcagagcgcgcgcatgctcctagctcggagccgcgccgatctcgcgccggcacctggcagccaatcgcaggtctccactggacgcgcgcgtgtggaggcgtgcgcgtcggcggcgccgggggcctgaggaggcgtagtcgccgccggctgtgccccgggagcgcctccggggctggtgcgtggccggcagctcgcgaacagcagctgatccggactggctgggaagttcaagatcaagatgctggacgatttggttccttagtgaaggctctcttcctggctggtggatgacagccttcttgctgtgttctcacatgacagaaagaggaagcaaggggctgtttcacagtattctggagtaccttttgagtattggttcctgaacatcagcagtcttggctgcctctgtggactcccggagttgtctccctgcttgtgttctggtgccatcctttgttcctccacccctgaccaaggtgcccagcagcctgtcttcaccagtcaaggaatccgccatcttggctgtagacatacataggtctggagaaatctctccctttttccttgatttctttttaaaggtaccttatctctccccactcctttcttccctcctcaatctagttaaatttcctaagctttcacaaaaatccgggaagagataattaagagcttagcatccctcttagagtagaaggcagtacagataacaaagaagttgtgagtatattatctacattttagaaaattttctgactctagatccatagattctgttgtatttatttgccggacactcatttgattgatttgcaccttgaacactatactaggtcttttcagttacgttgcttgggttaagacactttgctaaaattacagcctgaatcctttctttagttgaagaaagggtatgtgtgtgcaagtgggtgtgtgtgtgccagtttttcttgtctcaggtagatactcccactgtgtataaatagatctacagacttttcatacttacctcccgtattctgtttctgtggtaaaaatatgaagtgttttagttgtatgttgagtgattggttggtattatcaacactgttgtttgcagtctcattaaagcatgctcttaaggagtacatatggtcattaattgccaactgtagattccagtgatctggcccctgcctacctccttcctctctttttcattctctgtcatgcttctccactgttttccccaatgatgcactattttgacacactggccttgctattccttaagcaaatcacattcttcccaatccaaagactttgcacatgctgttgtctttcttagaatgcccttcccctaggcctgcatggcttgctacctcacttaattgtttgacacttcctttggttcattgagcttcaaggctcttaaaatgccactgacaatgagatctccctttaaaaaaaaaaaaaaacttctacttttcctcttaaaggcactttactctctccccactcttttcttcctcttcaaagtatttaaatttcctaggttttcatgaaaaagctggaaagcgatcatcatcaagggctttgcttctgtcttagaattgagctagcttgagtcaatttctgtgcctgcaaccaaatgaaaattaatatagtgagttctttcaggagctttctctgtttttctattgatacctctatatatttttaaggcaatgtcactttgttttgtttacaaatatattgaatatgtcaagattactattttgttattgccctttgtgaatttccttgtctattttgctcgcttgttctttcaggtgaaatttattattttattaatgttgccaaaaattataagtaaaatatcaattatagtaataaaatgttttgtgaaaaaaatgct

SEQ ID NO: 109692 - DNA, 1175 bp, Homo sapiens
gaagaagccctaatatctataatttgaactgtactggacccatagttttaactgaaaagggccaaacaagtggtgtctgtccagttcctggactgggctaaatttagttttcccactgttaagctggaatgaggactgtcccaacaacagtaggtacagtggacaaaaatagcccagggtgactgactgaatttaaacccataatggctttatatttttctgtgcatatatatcttaccctaattgaacatgtgaagcttgcaactttatgtcttgctttggacatgaatgtattacagcttgcagctattctgttaaatgtatagtttcccagttttttgacactaatgctgtttgggtcttacctgacacacaccagtgtgcaagaaatgtctctctaattcaataagttttaagacttagagttaatgtccttcatctgatctatcctatctaatctgtactatgggtgaatctttttcccttgctctccccaggggctgtttcacagtattctggagtaccttttgagtattggttcctgaacatcagcagtcttggctgcctctgtggactcccggagttgtctccctgcttgtgttctggtgccatcctttgttcctccacccctgaccaaggtgcccagcagcctgtcttcaccagtcaaggaatccgccatcttggctgtagacatacataggtctggagaaatctctccctttttccttgatttctttttaaaggtaccttatctctccccactcctttcttccctcctcaatctagttaaatttcctaagctttcacaaaaatccgggaagagataattaagagcttagcatccctcttagagtagaaggcagtacagataacaaagaagttgtgagtatattatctacattttagaaaattttctgactctagatccatagattctgttgtatttatttgccggacactcatttgattgatttgcaccttgaacactatactaggtcttttcagttacgttgcttgggttaagacactttgctaaaattacagcctgaatcctttctttagttgaagaaagggtatgtgtgtgcaagtgggtgtgtgtgtgccagtttttcttgtctcaggtagatactcccactgtgtataaatagatctacagacttttcatacttacctcc

SEQ ID NO: 109693 - DNA, 185 bp, Homo sapiens
gaaaggaatgctggaaagaaaaaaatgaccattttgcaatcatcacaataaaaagctggatcagacaagagtcaatggatgctaaatctagaagaaaccgtgaaaagaatcagaatatctgcattgtttccccacaagctgcttattgcttggcaaaagagagggcaaaaaaaccaaatggtgga

SEQ ID NO: 109694 - DNA, 836 bp, Homo sapiens
  misc_feature (150)..(150): n is a, c, g, or t
  misc_feature (165)..(165): n is a, c, g, or t
ccgcctccagcgcgcccttgctgccccgcgcgaccccaggattgcgaactcttgcccctgacctgttgggcggggctccgcgctccagccatcagcccggatgggtctcctggctgggacttggggcacctggagttaatgtccaacctngggtctgcggagacncgatccgaggtgccgccgccggacgggactttaagatgaagttatgggatgtcgtggctgtctgcctggtgctgctccacaccgcgtccgccttcccgctgcccgccggtaagaggcctcccgaggcgcccgccgaagaccgctccctcggccgccgccgcgcgcccttcgcgctgagcagtgactcaaatatgccagaggattatcctgatcagttcgatgatgtcatggattttattcaagccaccattaaaagactgaaaaggtcaccagataaacaaatggcagtgcttcctagaagagagcggaatcggcaggctgcagctgccaacccagagaattccagaggaaaaggtcggagaggccagaggggcaaaaaccggggttgtgtcttaactgcaatacatttaaatgtcactgacttgggtctgggctatgaaaccaaggaggaactgatttttaggtactgcagcggctcttgcgatgcagctgagacaacgtacgacaaaatattgaaaaacttatccagaaatagaaggctggtgagtgacaaagtagggcaggcatgttgcagacccatcgcctttgatgatgacctgtcgtttttagatgataacctggtttaccatattctaagaaagcattccgctaaaaggtgtggatgtatctga

SEQ ID NO: 109695 - DNA, 856 bp, Homo sapiens
ccaaagcgtccgagactgggtacagtcgtccaggcgtgacgggggcgcggggagccagtgactcctctgggaggggaagggattagggccagaatctctcaaaggtgcaaaaatccagtcaagagagggttttcgggtataccacggaggattaaaactttcaagacaaatgcagtctttgcctaacagcaatggtgccgccgccggacgggactttaagatgaagttatgggatgtcgtggctgtctgcctggtgctgctccacaccgcgtccgccttcccgctgcccgccggtaagaggcctcccgaggcgcccgccgaagaccgctccctcggccgccgccgcgcgcccttcgcgctgagcagtgactcaaatatgccagaggattatcctgatcagttcgatgatgtcatggattttattcaagccaccattaaaagactgaaaaggtcaccagataaacaaatggcagtgcttcctagaagagagcggaatcggcaggctgcagctgccaacccagagaattccagaggaaaaggtcggagaggccagaggggcaaaaaccggggttgtgtcttaactgcaatacatttaaatgtcactgacttgggtctgggctatgaaaccaaggaggaactgatttttaggtactgcagcggctcttgcgatgcagctgagacaacgtacgacaaaatattgaaaaacttatccagaaatagaaggctggtgagtgacaaagtagggcaggcatgttgcagacccatcgcctttgatgatgacctgtcgtttttagatgataacctggtttaccatattctaagaaagcattccgctaaaaggtgtggatgtatctga

SEQ ID NO: 109696 - DNA, 778 bp, Homo sapiens
ccaaagcgtccgagactgggtacagtcgtccaggcgtgacgggggcgcggggagccagtgactcctctgggaggggaagggattagggccagaatctctcaaaggtgcaaaaatccagtcaagagagggttttcgggtataccacggaggattaaaactttcaagacaaatgcagtctttgcctaacagcaatggtgccgccgccggacgggactttaagatgaagttatgggatgtcgtggctgtctgcctggtgctgctccacaccgcgtccgccttcccgctgcccgccgcaaatatgccagaggattatcctgatcagttcgatgatgtcatggattttattcaagccaccattaaaagactgaaaaggtcaccagataaacaaatggcagtgcttcctagaagagagcggaatcggcaggctgcagctgccaacccagagaattccagaggaaaaggtcggagaggccagaggggcaaaaaccggggttgtgtcttaactgcaatacatttaaatgtcactgacttgggtctgggctatgaaaccaaggaggaactgatttttaggtactgcagcggctcttgcgatgcagctgagacaacgtacgacaaaatattgaaaaacttatccagaaatagaaggctggtgagtgacaaagtagggcaggcatgttgcagacccatcgcctttgatgatgacctgtcgtttttagatgataacctggtttaccatattctaagaaagcattccgctaaaaggtgtggatgtatctga

SEQ ID NO: 109697 - DNA, 681 bp, Homo sapiens
  misc_feature (6)..(6): n is a, c, g, or t
catacnggccaaaagtctccaagtccctgctaacttcttgctctcgcaacagaatacctatttaggtgggaagaatgaggtgtgggcggcaggctgggtgccgccgccggacgggactttaagatgaagttatgggatgtcgtggctgtctgcctggtgctgctccacaccgcgtccgccttcccgctgcccgccgcaaatatgccagaggattatcctgatcagttcgatgatgtcatggattttattcaagccaccattaaaagactgaaaaggtcaccagataaacaaatggcagtgcttcctagaagagagcggaatcggcaggctgcagctgccaacccagagaattccagaggaaaaggtcggagaggccagaggggcaaaaaccggggttgtgtcttaactgcaatacatttaaatgtcactgacttgggtctgggctatgaaaccaaggaggaactgatttttaggtactgcagcggctcttgcgatgcagctgagacaacgtacgacaaaatattgaaaaacttatccagaaatagaaggctggtgagtgacaaagtagggcaggcatgttgcagacccatcgcctttgatgatgacctgtcgtttttagatgataacctggtttaccatattctaagaaagcattccgctaaaaggtgtggatgtatctga

SEQ ID NO: 109698 - DNA, 670 bp, Homo sapiens
tggagaggggcgcagggacccgcagggagcccaggcttaacgtgcattctgcggttctctcccccacctcccgcctgcccgcgcaggtgccgccgccggacgggactttaagatgaagttatgggatgtcgtggctgtctgcctggtgctgctccacaccgcgtccgccttcccgctgcccgccgcaaatatgccagaggattatcctgatcagttcgatgatgtcatggattttattcaagccaccattaaaagactgaaaaggtcaccagataaacaaatggcagtgcttcctagaagagagcggaatcggcaggctgcagctgccaacccagagaattccagaggaaaaggtcggagaggccagaggggcaaaaaccggggttgtgtcttaactgcaatacatttaaatgtcactgacttgggtctgggctatgaaaccaaggaggaactgatttttaggtactgcagcggctcttgcgatgcagctgagacaacgtacgacaaaatattgaaaaacttatccagaaatagaaggctggtgagtgacaaagtagggcaggcatgttgcagacccatcgcctttgatgatgacctgtcgtttttagatgataacctggtttaccatattctaagaaagcattccgctaaaaggtgtggatgtatctga

SEQ ID NO: 109699 - DNA, 170 bp, Homo sapiens
atgaggttccaaaaagatgtttcagtattttgaaccccataaatgacattgctctatgtaagtcatttttagatttttttacccccctattttagggtatttggtttccttgtctttctccctcattttgatgctttgttcagtggatcctctgtttaacaataggttgt

SEQ ID NO: 109700 - DNA, 375 bp, Homo sapiens
ccttgaggagagaagtcatctggggaactccttgctcctggccttgcccccctcacagggccttccctctgcccacttagcacaacctctgaatggcttggtgcctgggccactggagtccagcaaagccttctggtattgcctttgggttttcctgtcctctgaaacagggagtggtgagcttcaatttggtaaatgtatacgagcagaagataaggtgtgtgcagtgctgtcaggtacagaagcccagagcagaggagctaaaggttttgggtgggtcccttttctgtcaccagcctgctctgagactgagaccaactccttctctagatatcagtttcctctttgtaaaaatgttggccaggcgcggtgact

SEQ ID NO: 109701 - DNA, 231 bp, Homo sapiens
tagagaagctctgggataggagacaccagctcagcagatggtgatgggggagggttaacttcagatactgaaggtgacaccctgagttcatttgttcttttcccgaaatgccaacaatcagacctatgccctatcggacaggagatcaggggatttcttcatcgaaaaattgaatagccttgggatcccccaaccaaaaagtcagctttttacccaggtaattgagaataa

SEQ ID NO: 109702 - DNA, 182 bp, Homo sapiens
aagtcaaagatctgggtcaaagagacctgcttatggccccgattgtgtaatccattcccattctgtagtgctggggcttacgccccacccgagggagcccaggtttcttttcacatggcccccaccccgagaacacggctccaggttggcacctactcatggccctctacctctgcagccgc

SEQ ID NO: 109703 - DNA, 365 bp, Homo sapiens
atgattttgccccttggggacatttggcagtgcctgaaaccatttttggtagtcccaactggggatggggtggctactgctactgtttagtgggtggaggccaaaggtgctgctaataaacatcttacaatgtacagggcagcctactcacctttccagcaaagaattatctggtccaaaatgtcaataatgccagtattcagaaaccctggtcaagtgttttttgagatagcgtcttactatgttgcccaggctggtcttgaactcctgggctcaagcgatcctcttgccttagccttccaagtagctggaactataggcataggccaccatgtccagcttaagttaaggcaaaaaacatagaa

SEQ ID NO: 109704 - DNA, 716 bp, Homo sapiens
ggcatcttttttctttctgttcctgtgacgattgactaattcagatcctttttatttcaagctcaagctcattccagcaaaaaggtctacaggtctccctgctacaggcacaggcaccaatctctcacatactaccataacaatctgcttcagtgataccaattttcattgttccctttctctgcttaaaacttttaatgcactactccttcctcggtcccacaatctgtatgggaaaagaacaagactgaccttcacatgacaatcaaaatccttcacttatctacctggctcccaccttcatttcttatcttatctaccgtgataaaaaataccatcaccttacatttatgcagtgctttatctaatttagaaaacctaacatgcaccgccatttcatctggacaaaggccttagagagtagctaaacaggcattagtgtcctccttttacagatgagaaaacagactactagcatggaacccaagtctaaacaaataagtccctgtcccacttcaccctgggaaccttaagtaagtccatcaacctttctttcttttttttgagacggagtctcactgtgtcgcccaggctggagtacagtggcgtgatctcggctcactgcaacctccacctctcgggttcaagcgagtctcctgcctcagcctcccgagtaactgggattacaggtgcccaccaccacgcctggctaattt

SEQ ID NO: 109705 - DNA, 211 bp, Homo sapiens
aaaagaaaaaaaaaagaaatcttcaatgtggaaggctttggaggtaggggctttgctgagaagagttaggactaagcagcctcttctggatcagattccaaatttgacattgctgaatttctgggaatttggtgactatgagggaaggacttaaaagtgacttaaaattttgagacttgatgacaggaacgttccagactgtactactgtt

SEQ ID NO: 109706 - DNA, 421 bp, Homo sapiens
tcccctcatacaaacaagcaaactttgaagttcatgaggcattagagagttattcgcatctcagatgttattttgagaattacagtaatatttgtcattaatggaatgcccatcatgtgctagacactactaccaatactttgatagatataattgtctgtcctcatagtagtccagtaactgagtataagtatgctcacaggagaacagggattgagatggggaaccatactcagtgcaggaagtgtcatcactacatgaagtgatgaaactacgttcacactcagtgctgcacgaatacagtgtgggctctggagtccacctggctccaaagctctttaccagctgtgatcttgggcaaggaatttaacgtctggctgctttggttctctcgtgtgtaaaatgaagataataatccaca

SEQ ID NO: 109707 - DNA, 250 bp, Homo sapiens
ttggcctcccaaagtgatgggataacaggcatgagccaccgcgcccagccggaggagtggttttcatgccatgtggtgcctgtcttggaggaagcaagattcgggagacattaaagaatgagcagccctttgtctgcttttctgagtgttttgtctctgggctgtgtccccgcaagtcaggcataaacagtaggccccaaagtgagtggcgactcctcagtaacaaacttccacaatgatgcacagttaa

SEQ ID NO: 109708 - DNA, 337 bp, Homo sapiens
aaataagcagttttactaatagaaagaggacatttaataagataaatagaaatatgtataacttattcttctctagtgacagaaattgaggcagcttatagtaaaacatacagaaagtttgcagtttaaaatttaaaatataaacagatatataaagttatataagggataaggaattatgtttacacttcaagatatttactgttgctgaacatttatttgaagacagcttttttgtgtggaggttgaacggataggaaatgtaatgaacgtggtaataacctttttaaaaattctcaagaataggaacttaggcaacataaaaatttatcaatgt

SEQ ID NO: 109709 - DNA, 412 bp, Homo sapiens
atctatcggctggggtctgtaggcacgtggagtatgtcagcataggccaggcacggtggctcatgcctgtaatcccagcactttgggactcggaggccgagtcgggtggatcacccgagatcaggagtttgggaccagcctgtccaacatggcaacactccatctccaaaaaaaaaaaaaaaagaaaaaggaatggaccgcaaacacaggcaaaaacatggtagatctcaaaagcagcatgataagacaagaaagaacaaaagcatagcaaaagaaagcagatcagcagttcctggggttgggggcaagaattacctctaaaggggcaggatggaatttttcaaactcattgacccgcacagttaaaattagtgagttttagtgaacaagaattacacttcgtaaatcttta

SEQ ID NO: 109710 - DNA, 1433 bp, Homo sapiens
cccatttctactaaaaatacaaaattagctgggcatggtggcccacacctgtaatcccagctactcgggcagctgaggcaggagaatcccttgaacctgggaggcagaagatgcagtgagccgagatcacgccattgcactccagcctgggcaaaaagagcaaaactccatcttaaaaaaataaataaataaaggaaaatgagccgagtgatggtcttagatataagatggaatggcaagcaaataaaattataaatatgaatacatatgtatatataaaagaatagtgtcaactaaaatactagacaacaatagcatgtaaattagaagggacagaaatgttctaagaccctccggttgttgggaagagggtgtaagatagtgtttaatttgactttgataagttaaatgtgcatagtgtaatttaatgttaattactaaaagagtgtaaccagtctatacatctctaatccaataaaaagaataaaacactgtgatttaaaatgtagtcccagctgcttgggagactgaggcaggaggatctcggcttggatcctcagaccaggagtttgaggcagcagtgagctatgattgtgccgctgcactccagactggacaacacagtgagagcccataaaataaataaatgaactgaacacaaacttctgtcaattaaaaaataagaacgaaatcaggctgggcctgagcgctgtggctcacacctgtaatcccagcactttggaggccaaggtgggtggatcgcttaagcccaggagttcgaaaccagcctgggcaacatagggagaacctgtctctacaaaaaatacagtaagtaagcctatagttccagccacccaggaggctgaggtgggaggatcacctgagcctgggagctcgagactgcagtgagctgtagtcataccactacactccagcctgagcaaaagagtgagaccctctctcaaaaaagaaaaaaaaatcagaaacaaactgggcaaattaagatggtggaaacaaaactaaatatgtccctaaccacagtaagctgtatagaattgccggttgacaggtaaaggttaggactgggtgcagtggctcatgcctgtaatcccagcactttgggaggccgtggtgggtggatcacctgaggtcaggggtttgagaccagcctggccaacatggtgaaaccccgtctctactaaaaatacaaaaatcagccagttgtggtggtgcatgcctgtaatctcagctactcgggaggctgagacaggagaatggtttgaacctgggaggcggaggttgcagtgagccaagattgcgccactgctctccagcctgtgtgacagagtgagactgtcatacacacaaacacacataaagattaggaggaaaatctgtgacccagagtcacacacatgaagacagacaggagg

SEQ ID NO: 109711 - DNA, 229 bp, Homo sapiens
tatccaaatcccttatgaaaatctggtttataggccaagcacggtggctcatgtaatcctagcagtttgggaggccggagtgggtgggttgcctgagctcaggagtttgagaccagcctgggcaacatgggaaaaccccacctctactaaaaatacaaaaattcgctgggtgtggtggtgggcgcctgtagtcccaggtactcgggaggctgaggcatgagaataactt

SEQ ID NO: 109712 - DNA, 694 bp, Homo sapiens
tcatagtctgtagctgtcattggaccgggagcttcctgtttcttccagcaatttttgtttgtgttttttgttgttgaagagaggaacatttaaggagttagataaactggtaattttcagatgtgtagaaaattgcataggtggtgaaagccaatgccataggctctgaaattttactatttcctacatcaggaaatgtgtaccaaaagtgctaaaatgccaagaataattttgagtatctaaagatagataaatcttttcatctgagtggaaatggcattatgactttatattctcatggttttccttgtaccttgaaattgagcatcacttgaattggagccccagaagcaaggttaaagtgagttactactgagtttctggtgttcctaacttatccctttggtatatatgtagaagataacaaagcagctgtgtacagtggcttgtgcctgtagtcccaactattcaggaagctgaggctggaggatcccttgagcccaggagtgagagactgcagttagccactgcactccagcctgggcaagagtggctcctctctctcttaaaaaaaaaaaaaaaaattaaaaagcaaagccacagcaatttgctcttttatgtgaattgagaagcaaatgttatgaacctgtaataagttgtaccctatatgcatgtcagcaagacttgagatctc

SEQ ID NO: 109713 - DNA, 304 bp, Homo sapiens
tgcctctgagcacacctgcctcggggtgtggaccttgccggttctttggcctggaatgcactgcccccaggttttttatggctgaattcttcttgtcatttaaatcttcgttcaaaagtgatcctctcaagccaggcatccccccgtcactctctactgcgttacccagttgtgtttatttttttcacagcactcatctgaccggcaaggatctcatttgttgacggactcctcctgcagacagggtctcgtctgtctcgggcgcctctgtgtccctagttcctgcaggcctggcacgtggaag

SEQ ID NO: 109714 - DNA, 353 bp, Homo sapiens
taaagaaaattcaagttttacagccttagcttacacactaatcttcagaacaccatagccatttctttaatctgatggatgccctcgcatgatgcctgtcttctctgatcagaaatgacattcttaacatcaatagattcttagacttttctgacaggaaatatttttgaggatatgtaatcagttatggggtatgcttgtcaatacatttttcctgcaaaaataaatcagaaatcctatcaaaatagcattatgaaagaatccatttcccttaatactcctcatgaaatggtcatgcctgaagtttctgagaatttttatttagatgaaggttgtgtatttaatttatatac

SEQ ID NO: 109715 - DNA, 604 bp, Homo sapiens
accaggtttctacttttcccaattagtatttgtgtttcaaccaccctgcatggaaacatgggttatgaaatgccttcacaagtatggtagaaaatatgctgctattgtgtgttgccttggacttctagaagtctaggtgttggtggttattatatggcgatagtaaagtaaaatcctccctactgttctagtacccacaatactacttttcatactttagctactttaccttcagtctctctgtcaacctctgatctaaagacttctttactaaataacattcttcttgcctaatactgtattatggacttcatcagggaagggactaatccatctttgcatgctaacgtttaagctgaaataaagtaatccctcaattaacattttgcagaaacctccttaggttcccctacaaacctgcccctattttagttaatagaatgcattcccactgacatgctggaaatttcagcattgtctttggtcctccctccagtctaatctgaatctcacaagtcatcaaggcctgtggcttctgtctctgaaatgtcttttgagtctttctccctgtacctcttgtccttagacagtccccctccctatt

SEQ ID NO: 109716 - DNA, 852 bp, Homo sapiens
gctaaggcaggagaatggcgtgaacctgggaggcggaggttgcagtggcatgatctctgctcactacatctgcctcccgggttcaagtgattcttgtgtctcagcctcctaagtagctgggatcgcatgcgtgagccaccaaacctggccttagaattactcttagaacagtggaatgcccacacatccaagacaggcaagttcatggagactaagggaacagtggtatcatgtctcccttctcccttgtgcttactacaagaatggcaggcagaattccctacttatttaaaatatcactgatgtctcactctttttctttatattttatttattgatttgccacaaagtttaattcacctaagtgagacgtgcatatgatgtaactccactgtacagatacacagatctttacagaagaactatttttggcaacccctatgcccctgggtagggtccagaagtgaacaggcttggtgggggattgttttcacctcttggctactcagagtacctaaacctgtccttacttatggagagcatgtgtcacaccaagatggcagtaagctggcaactgcgaagacctgactgatgcccatttgggaagccaggcaagtgaaaatggaccgaagaaacagagatggctgtcttttatgcagggcttttccataaagaggttacactggggcaaccaagtatgtgtagaaagccagagctaaacttcagcttggcattcacagttttctcttcactgagctaataggcccagagtttcgggcagagctgtgaaatagtgcttctctaatagcaaccatattattgttacataattaaaagccagctcttttgtta

SEQ ID NO: 109717 - DNA, 399 bp, Homo sapiens
gcagagtctcactctgtcacccaggctggagtgcagtggcatgatctctgctcactacatctgcctcccgggttcaagtgattcttgtgtctcagcctcctaagtagctgggatcgcatgtgtgtgccaccatgtgtagctaattttttgtatttttagtagagataggattttgctaagctggccaggttggtttcaaactcctggtctcaagtgatccgcccaccttggcctcccaaagtgctgggattacaggcgtgagccaccaaacctggccttagaattactcttagaacagtggaatgcccacacatccaagacaggcaagttcatggagactaagggaacagtggtatcatgtctcccttctcccttgtgcttactacaagaatggcaggc

SEQ ID NO: 109718 - DNA, 779 bp, Homo sapiens
gctgcaaagatctgctatagagttaaactacagagataattgacttaaaacatgggaatttattcataatatacaaaaaggagcagctctggtgaagactgtctggccaaggcaagggaggggcttacaaaggcaaagccccagagcttcacatggaagattgatttgttggtttgaacaagtccttgccttgtagattcaggttgtctggttctggaggagcttcatgctgcagatatgtctgcatgctgcgccccaagtcaaagtaatagagccacagtttcaccatcaggccattttctgatgatctgaccagtttcctgaagagcagttgccctggtccttcttctgggccttgcttgcttgctgtctgtaccttccaagctccgggtcctgtagtgggcacataaaatgcatgtgtttgggctcagtaaaaatatccttttcaaggcccttatagttatctgccttgtaagcatgtctacttggatttcttgcaagtgtttcaggctcaaagaaaataactaacctaccaactttcacctccctcttccccagctcctctccctctagtgtcatcagcccaatgaatggcatcactctctaccgcatctcccaaagcggaaaccgaggagttgcctgttccttcatcttcctcactctcatcccatgaaatcagtctctgcatcccaacaattctactccttatgatctaaccactctgcccttcctgcaggtttctctctccagcatcctcctgactagtatccctgtctcca

SEQ ID NO: 109719 - DNA, 703 bp, Homo sapiens
gaaatgagacacatgcccagacacacacatgcatgttataaaacaagatgtttatatgaacagtgtagtgaggtggcatataatgaagagccacataggtaatacctactctactccagggtggaggccaaaaagtacatactacaggtgccaatatatattacctttaatcctcaaagccatctccattttacagctgagcaattcctcaaatcccaggacagttggagaggaccatggatggcccctggctatggcaggaatgcctcttagaataatcctgcttgaccttcacccagcccaatgccagaaatgtcttacggggaattttggtcactgcctatttcaattctggatttctctaacaatgagaaatggtctccttgtactgattcttagaagctatttctacacaggggaaaatgagatagagattattaaaattgtgaaaaatgaaacagaattaagttaaaacaaaaaaaagcagaggaagggaagaaacgaccacctgtttttctctagtctttgagtggcaagagagaaaataactttatatataaaaatgcctctggccgggtgtggtggctcacacttgtaatcccagcactttgggaggccgagacaggccgatcacctgaggtcaggagttcaagaccagcctggccaacatggtgaaaccccatctctactaaaaatacacaaa

SEQ ID NO: 109720 - DNA, 920 bp, Homo sapiens
catatccaaaattcttgggaccagaagtgtttcagatttctgatttgtttggattttgaaatatttgtatcggtacttaccagttgaacatcccaaatcccaaaaatccgaaatgttccagtgagcatttttgttttaattgttatgttggcactcagaaagttttggattttggagcatttcagattttgtatttttggatttgggatgctcaacctgtgattgtccaaatcaatcaacgacattgaaatccagtgatacggatgaatgttagcaatatgataagtcaaaaatgtaagacccaagagattacatacagcatgataagcttttttaaatagttagaaacaaacaaaaaataatgtcttacattgactacatgtagatgaatttaaaacaatataaaaaggaaagcaataaatgattaacctggaattccagataacggtgggaagtagcacatggttagatgaaggttattgtgaaagtgctaattttgttatagtggtagattttagggtgcttattacttcattaaagataaataattatataactagtcttctaagtggaccatgcatataccagttatgcgagtgttttcaattaaagatgatgtattccattttgtacacctgagttccagttaaaaaaaatttttttcagagttcattgaatatagatagatatagatatagatatagagattgagtgtcaggaactaccctaggaattggctagaaatgagagacaaatatgacatattgtctatctggtggtctaatgtaatagaaataggcttttcaataagtgtgtaaaatcttgcactgaacatggtagaagtctttggggatacaaagaagggagcatttgtttctacgacatgtctagaatttgcctccactctgctccttctcacc

SEQ ID NO: 109721 - DNA, 539 bp, Homo sapiens
gtacttgatatctcaattacattagaggctaagacagttttctaccagcatgagaactgaaacacgatagcatgccttttatggcgaaatgtgtttgaacttcaaacaacaaatatataaaacttattatgcaatacaccctatcagcaaattaattgaaggctgcctctagattgttaggtgtggacgacaggaactttatttcctacttcttttgtacatgccattgctgtttaacagtgttgggttcataacaggtgattagacagtcttgttgatagtttggagaaccatcttaatcatgacctagaatcattcttatttcacagcaacctgtgtcttgactaatgttaaactgactaatttgttttgaagctgagaatgagaaattggaggtccttctcatagatctgagattcctttttattcccgagttggataaattagggtaaacaaaatcaaatacttgtaaaaatactgtacaaaggaatgacatatgcatgctggttccctagcagggtaattccatcagcgcttta

SEQ ID NO: 109722 - DNA, 417 bp, Homo sapiens
gggattccagtgtttgagccaccgcgcccagcctcagagaaaccactttcacacatcctgagtagcagaggcatcagaaagtgtcactggtacgacccatcaagtggccatttcaacctaggaacagggcacagacaaaggagagagttgcccagtttttaagcacctggtctgtgccgggaacagtgctgtgctgcctacatgagtttcacttcatcctttttgtatcaccaaaaggctgaatgcagttgacccactttacaggtgtggaaactgaggccctgggtggtgaagtcttttggccaaactctctcagaaaataagtggcagagccagatctgaagcctgggtctgtctgattccaaggcctgggtcccctactgcatctcctcacccaagggaagttgtcacagggag

SEQ ID NO: 109723 - DNA, 685 bp, Homo sapiens
cgtggtggctcacgcctgtaatcccagtaccttgggaggccaaggcgggcagatcacctgaggtcaggagttggagaccggcctggctaacatggcgaaaccctgtctctactaaaaatacaaaaaaatttgcagggtgtggtggtgcatgcctgtaatcccagctactcaggaggctgaaactggagaatcgcttgaacctgggaggtggaggttgcagtgagctgagatcgtaccactgcaccccagcctgggcgacagagtgagactccatctcaaaacaaaactaaacaaaacaaaaacaaaaaaactatatatggtcaatgtggtcagaaaacagcagtactttggtgtcagaacctggaagactgaacagtgcagagctgggcagcaaaggggccagctaacacgcgcacggggcacttcttgggtgctgggagtgatggggtgtgtgtggaaaacccagtctcaaggagcagcttgtagcctagcaagattcgaaagactggcagcaatttaggatacggcagcctctactgcagctgcagagctctggctctggactcagagggcctgggttcaggccactaactagctatgtgacctccactaagttacttaccctctgcctcagttgccttgcaaaattaggttccccacagtgcctgtcacttatcattgttgg

SEQ ID NO: 109724 - DNA, 364 bp, Homo sapiens
aaaaacttattttgtccaattgaatcttttgtggcattttcatcatttctaacgtctctatgttggttcttcttgattgtggttttccctgctgtttccgtatttgactgattgctgaggctcctactatttgctttcagctcagaaggtaagcaagcaaacttccagtccagtttcagatggactttgaaccaatgttgctttgcagtagggctgagcactgccacagtcaaatgtatcctccctggttggctttgatcgctttcgaggcaggcccatccctcatgggtcaagctggtttttccttgtcagcttctgaagcctccccgagaggggggacccacagtgtggtgttaccactttt

SEQ ID NO: 109725 - DNA, 139 bp, Homo sapiens
aatgagtgcttagagcatgctatggcgcagttaggaattcttagccaacccctctgtgcattgtctttccgctacctcgtctgacaacgcatgccaagtcagtcattcccttcaacaaatattctgaagcacttcagtt

SEQ ID NO: 109726 - DNA, 810 bp, Homo sapiens
taccaggtcttgcaataatcatagctacctcatttagctcattatattttaatagaatctcatctgtattattttttaaaatatgtattttttaatctttgaagaatagattactcatctcaactggcctctattacattttataatgcaaggattttatttacctatttcacatattaatttggttttgttattactatttatggagcacatgaaaggccagagtgcttgaattttcttatatccctaagctgtactaccatctgtactacccatctatgtattttctattaatgactattagaaactttgggtcaaaaaacagtgtaagccaggcatggtggcacatgcctgtaatcccaccctgctcgggagtctgaggcaggaggatcgcttgacccaggagttcgagtccatcctgggcaacatagcaagacccccatctctaataataacggtagatagaagcataggctctgaaatgaaacagcctttgttttttcatctgtgaaatggaaattaaaaataatggtacctacttcatagggtgcctgtgagaattaaatcataatatacaaaaaaaagtagtactcagtatgtagtatacatttaatgtatgttttgacatgcctttattatcattatttgtcattaccattacttaattagaatgtcatggctatgtgaatatgatgtcctgtgtgaatcattagttagcccttccaactctgtctttgactttttttttcttttcactagagcctatgtgcttctcttacctgcaaacttataatagccgtgttttagacc

SEQ ID NO: 109727 - DNA, 280 bp, Homo sapiens
ggcgaggcagtctcctaatggagcgaactagagggcatatatctttgaatgctgatatctttaaaatacaaatgtgtgttttaaaaaaaaaaaagtccccgcccagctttaaaataacagggaaaaatgtttttgccaaaagttaagggacatctacagtgtgacttcaaatgttaaaaaagcaatgtgtttagaaaataattggaaggaaatacaccaaaatagtatatcaaaatacaaataccagttgcttctggttgggttgaggcatgcagctttt

SEQ ID NO: 109728 - DNA, 904 bp, Homo sapiens
tctatccataaagatgaagacattctttcgcagggatttaatattggggctgcatgcctggcccctgagaaagcccaagcttcctcctccttttgaatcgaacccagtgcagctttatgcgctccagacgagcctgcattccccctaatgcccctggaattgcttactcacaccaaaatccgctgcctcaggcgtttccagccagaggtaagccttcttttcatgggcaatcaggcagtagcctggagcacagaggggaaggggggcacctgcatgcccggctgggtctctgtagacagtggatcatgcgaggcctcccctctccttgaccctgtgtgatgagccctgggaggaggcacccaggccagggaggagctgcgtagtgacagaaagggcatctacatctctaccacgtaagtggggaaactgaggctgggcctagcaccagatcactcatgttgaaacctaggtttgaactgggtctctgaatcccatccagagctcactgccttaaggctgaggtgcctgtgagtgtctgaggacccttactatgagacagtgttatcgctgacttacagtctgggtaaagaaggtgaatgcagtcagaggagtagattcaggtgtcagatatttgcataaaataccaattgctcctcatgttggggaggtaattcacaagcttgaatctctaaaaggctgcatctggtggagggcggggctatgtgtctgtgcacgtctggtctttggagttcttattcagcaaatattgattgcaagcccaccatgtgccaggcatcatgcctggggcttgggatccagagatgaagagacagtcaaccaagtccatcaggctctgccaacccctgtagtgtgagtggtggttggagcacgtgttataccccca
